United States Patent Application Publication US 2007/0042381 A1 - sequence listing, part 9

SEQ ID NO: 359079 - RNA, 21 nt, Human
gcuccuggugcugcguggcgc

SEQ ID NO: 359080 - RNA, 22 nt, Human
agucccagcucugccacuuacu

SEQ ID NO: 359081 - RNA, 22 nt, Human
cuguguuugaugagaagccacc

SEQ ID NO: 359082 - RNA, 22 nt, Human
ccuggggagaagagcuuccccc

SEQ ID NO: 359083 - RNA, 22 nt, Human
gaaugcuaagcaugugggaguu

SEQ ID NO: 359084 - RNA, 22 nt, Human
uaaguccuauuccaggucucuc

SEQ ID NO: 359085 - RNA, 22 nt, Human
ugcccuguuccugccuccagcu

SEQ ID NO: 359086 - RNA, 22 nt, Human
agucucuuuugcgaagaguguu

SEQ ID NO: 359087 - RNA, 17 nt, Human
ucuggccuuccugaacu

SEQ ID NO: 359088 - RNA, 23 nt, Human
uacagaaggaguagucacuaaga

SEQ ID NO: 359089 - RNA, 22 nt, Human
aaucaguuagaaggaagagaau

SEQ ID NO: 359090 - RNA, 20 nt, Human
uacagaaugcaauaaaaugg

SEQ ID NO: 359091 - RNA, 22 nt, Human
cccaggaaacccgaaggcgacc

SEQ ID NO: 359092 - RNA, 23 nt, Human
ccucccaccuauuucacuuucuu

SEQ ID NO: 359093 - RNA, 22 nt, Human
cauuuauucauuugcuagggcu

SEQ ID NO: 359094 - RNA, 22 nt, Human
aggcacugaaggaagcuugcgc

SEQ ID NO: 359095 - RNA, 20 nt, Human
ugucauuguuucuaggaccu

SEQ ID NO: 359096 - RNA, 22 nt, Human
ucuggcucaggagcuguguuca

SEQ ID NO: 359097 - RNA, 22 nt, Human
uggccuggugcucaggcaguag

SEQ ID NO: 359098 - RNA, 22 nt, Human
agagggaucacccuguuucugg

SEQ ID NO: 359099 - RNA, 22 nt, Human
ucuuuggauaucgcuagaccgu

SEQ ID NO: 359100 - RNA, 22 nt, Human
agggcugguauguccaugaaag

SEQ ID NO: 359101 - RNA, 22 nt, Human
aggaggaggcuggaguacaccc

SEQ ID NO: 359102 - RNA, 20 nt, Human
ccagcuuucccugcagcauc

SEQ ID NO: 359103 - RNA, 22 nt, Human
cucuuaaagcuuccaguuucaa

SEQ ID NO: 359104 - RNA, 22 nt, Human
cacaggcuugucagcaugaggc

SEQ ID NO: 359105 - RNA, 23 nt, Human
auaauaacgucugucuugucucu

SEQ ID NO: 359106 - RNA, 22 nt, Human
ucugccuggauuccauucucca

SEQ ID NO: 359107 - RNA, 22 nt, Human
cagggcuccaugcagggacucc

SEQ ID NO: 359108 - RNA, 22 nt, Human
cucaaguaagaaacagaauugg

SEQ ID NO: 359109 - RNA, 22 nt, Human
cugucaguaggcucccaucauu

SEQ ID NO: 359110 - RNA, 20 nt, Human
aagggcagagggaacagacu

SEQ ID NO: 359111 - RNA, 20 nt, Human
cuuguacaugauaaagauuu

SEQ ID NO: 359112 - RNA, 17 nt, Human
gcuguaguuugauaaga

SEQ ID NO: 359113 - RNA, 22 nt, Human
agauaucaccaguuuuacauac

SEQ ID NO: 359114 - RNA, 22 nt, Human
uccagaauauuugggaaagaug

SEQ ID NO: 359115 - RNA, 22 nt, Human
cacaguggauugggugaugccc

SEQ ID NO: 359116 - RNA, 22 nt, Human
cacucacuuauuucuaacagaa

SEQ ID NO: 359117 - RNA, 22 nt, Human
agaggacaaaaugagaagugcu

SEQ ID NO: 359118 - RNA, 22 nt, Human
ccugaagaugcuguggccuggu

SEQ ID NO: 359119 - RNA, 22 nt, Human
ccuaggccuuacuuuccugugc

SEQ ID NO: 359120 - RNA, 22 nt, Human
agcugccacagagccuggccag

SEQ ID NO: 359121 - RNA, 22 nt, Human
ucaaaguccuugcuuuuucugu

SEQ ID NO: 359122 - RNA, 22 nt, Human
auagcuguuagauuggggucga

SEQ ID NO: 359123 - RNA, 17 nt, Human
agccccucagcgucacc

SEQ ID NO: 359124 - RNA, 22 nt, Human
cugcagaggccucgccuccucu

SEQ ID NO: 359125 - RNA, 22 nt, Human
acaguggagaaggcaugaggcu

SEQ ID NO: 359126 - RNA, 22 nt, Human
gcagagugagauaugaacccag

SEQ ID NO: 359127 - RNA, 22 nt, Human
ugcccugucuaagcugucagua

SEQ ID NO: 359128 - RNA, 22 nt, Human
aaggcccuggcaggaagcagga

SEQ ID NO: 359129 - RNA, 22 nt, Human
gguacaauucugggguaugcuc

SEQ ID NO: 359130 - RNA, 22 nt, Human
ucugucaggagauuggcagcug

SEQ ID NO: 359131 - RNA, 22 nt, Human
gcugccaauccagcugugggag

SEQ ID NO: 359132 - RNA, 22 nt, Human
aggccuccugcagggaugagug

SEQ ID NO: 359133 - RNA, 22 nt, Human
ugucccagcacuuugggagucu

SEQ ID NO: 359134 - RNA, 22 nt, Human
agagggcugcugcacagugcuc

SEQ ID NO: 359135 - RNA, 22 nt, Human
aauaaugucuuuggcuugacca

SEQ ID NO: 359136 - RNA, 22 nt, Human
guggagcccugguagggacccc

SEQ ID NO: 359137 - RNA, 22 nt, Human
uaaauguaccuucugccuuacu

SEQ ID NO: 359138 - RNA, 22 nt, Human
cuuucacagcacaagccugccu

SEQ ID NO: 359139 - RNA, 22 nt, Human
uaaaguuuguagcaauugauau

SEQ ID NO: 359140 - RNA, 22 nt, Human
gcauguguugguuuaugcaugu

SEQ ID NO: 359141 - RNA, 22 nt, Human
uauucacaaaaugagguccuca

SEQ ID NO: 359142 - RNA, 23 nt, Human
agggccacugggaaggauuacug

SEQ ID NO: 359143 - RNA, 22 nt, Human
ucuguucagguuucagagaacu

SEQ ID NO: 359144 - RNA, 22 nt, Human
caggaggcaguuucagaaguca

SEQ ID NO: 359145 - RNA, 22 nt, Human
cagcagcuucuguugaucagaa

SEQ ID NO: 359146 - RNA, 22 nt, Human
gaaggagaggauugugaggcug

SEQ ID NO: 359147 - RNA, 22 nt, Human
ucaggaauccagacagggcaca

SEQ ID NO: 359148 - RNA, 22 nt, Human
ugaaggaauggaggaucagagc

SEQ ID NO: 359149 - RNA, 22 nt, Human
aaggcucccucuucucgagugu

SEQ ID NO: 359150 - RNA, 22 nt, Human
aauuuagauugauaaacaugga

SEQ ID NO: 359151 - RNA, 22 nt, Human
caggauggugugagugugagga

SEQ ID NO: 359152 - RNA, 22 nt, Human
uuuguucaugccuauauucuca

SEQ ID NO: 359153 - RNA, 22 nt, Human
gcuccuggucuggagcuucaag

SEQ ID NO: 359154 - RNA, 22 nt, Human
ucuugggauugcccugcaguuc

SEQ ID NO: 359155 - RNA, 22 nt, Human
gacugucauucuagugcccaug

SEQ ID NO: 359156 - RNA, 17 nt, Human
cugaggcccagggccca

SEQ ID NO: 359157 - RNA, 22 nt, Human
gcccaggauggagaauaguggu

SEQ ID NO: 359158 - RNA, 22 nt, Human
cugccucuauucacugaggcag

SEQ ID NO: 359159 - RNA, 22 nt, Human
cacagggcagugauuguccaca

SEQ ID NO: 359160 - RNA, 22 nt, Human
ggcugcuggggacgugggagag

SEQ ID NO: 359161 - RNA, 22 nt, Human
cugggagcugucaggagcgugu

SEQ ID NO: 359162 - RNA, 22 nt, Human
uuuaggcaaauuucagaugugc

SEQ ID NO: 359163 - RNA, 22 nt, Human
ugggcuccucgucacucgcugu

SEQ ID NO: 359164 - RNA, 22 nt, Human
cucucuguuaugcuuucaugaa

SEQ ID NO: 359165 - RNA, 22 nt, Human
uaaagguaguuuuaaaggugcu

SEQ ID NO: 359166 - RNA, 22 nt, Human
agcagcuggugagcaagcucag

SEQ ID NO: 359167 - RNA, 22 nt, Human
agaauaaaucaaauguccugag

SEQ ID NO: 359168 - RNA, 22 nt, Human
aagcaccugcaguugacaaaaa

SEQ ID NO: 359169 - RNA, 18 nt, Human
gcucugcccaggcugccc

SEQ ID NO: 359170 - RNA, 22 nt, Human
agccuggauccauguggcuacc

SEQ ID NO: 359171 - RNA, 22 nt, Human
gucccagagagcacuaguccau

SEQ ID NO: 359172 - RNA, 22 nt, Human
cagugcaguggcugagcuggag

SEQ ID NO: 359173 - RNA, 20 nt, Human
cguaaggcaagugcugcauc

SEQ ID NO: 359174 - RNA, 22 nt, Human
cagauuuagaguggggcuugga

SEQ ID NO: 359175 - RNA, 22 nt, Human
ucauuuaauagcuuuugucuuu

SEQ ID NO: 359176 - RNA, 22 nt, Human
ggcuugcuucuuguccaggaau

SEQ ID NO: 359177 - RNA, 22 nt, Human
gcucaaggcaggcagacaugag

SEQ ID NO: 359178 - RNA, 22 nt, Human
uagauuuuacuucugucauuac

SEQ ID NO: 359179 - RNA, 22 nt, Human
aggccucuucagggagcaugga

SEQ ID NO: 359180 - RNA, 20 nt, Human
aggaacuggaagggaggaaa

SEQ ID NO: 359181 - RNA, 22 nt, Human
uuauuagggugguuuauguucu

SEQ ID NO: 359182 - RNA, 22 nt, Human
gggggaagaaagaacauggcau

SEQ ID NO: 359183 - RNA, 22 nt, Human
uauccaauucaccauugauggg

SEQ ID NO: 359184 - RNA, 22 nt, Human
agcugcagugaacuguuuuguc

SEQ ID NO: 359185 - RNA, 22 nt, Human
guuuucugauuagcaaaucuga

SEQ ID NO: 359186 - RNA, 23 nt, Human
ccucagggucuagcagagagaag

SEQ ID NO: 359187 - RNA, 17 nt, Human
uccuggcucugccacug

SEQ ID NO: 359188 - RNA, 22 nt, Human
ugggcagaggcagcagaaaccu

SEQ ID NO: 359189 - RNA, 22 nt, Human
ggccucugguucguggugaccu

SEQ ID NO: 359190 - RNA, 22 nt, Human
ucuggccaggauggcaagacca

SEQ ID NO: 359191 - RNA, 22 nt, Human
cagaaucagcccuugcuauuaa

SEQ ID NO: 359192 - RNA, 23 nt, Human
gcagacagagcagacuaagacaa

SEQ ID NO: 359193 - RNA, 22 nt, Human
cuguccagucuuuagcaagcug

SEQ ID NO: 359194 - RNA, 22 nt, Human
agcaggaaggggaugaugggca

SEQ ID NO: 359195 - RNA, 22 nt, Human
uuagccauuaauguccugugca

SEQ ID NO: 359196 - RNA, 22 nt, Human
uggcucagagagggagugugga

SEQ ID NO: 359197 - RNA, 21 nt, Human
ccagcuccaggaccuuggauc

SEQ ID NO: 359198 - RNA, 22 nt, Human
augaaggcuguguagauggaug

SEQ ID NO: 359199 - RNA, 23 nt, Human
uugcacauuggagcuggucuucu

SEQ ID NO: 359200 - RNA, 22 nt, Human
ucaggcagagggagaagccaag

SEQ ID NO: 359201 - RNA, 22 nt, Human
gcagggacaucuucagaucacu

SEQ ID NO: 359202 - RNA, 22 nt, Human
aaggcugagacagcacaggucc

SEQ ID NO: 359203 - RNA, 22 nt, Human
ugccucugugggccuuccuggc

SEQ ID NO: 359204 - RNA, 22 nt, Human
agggcagagggugccucaccug

SEQ ID NO: 359205 - RNA, 22 nt, Human
auaauucagguuuucuggcaca

SEQ ID NO: 359206 - RNA, 22 nt, Human
aauuucaaagcucacuggcaua

SEQ ID NO: 359207 - RNA, 22 nt, Human
gcucccucugcucaggcacuug

SEQ ID NO: 359208 - RNA, 19 nt, Human
uagaaugcccacuuaaaaa

SEQ ID NO: 359209 - RNA, 22 nt, Human
ggccucuguucugcauuccucc

SEQ ID NO: 359210 - RNA, 22 nt, Human
ugaagccaaucugccaggcaga

SEQ ID NO: 359211 - RNA, 22 nt, Human
ugucccaguuuugcagguuaga

SEQ ID NO: 359212 - RNA, 22 nt, Human
cagugauguuucugcaucagag

SEQ ID NO: 359213 - RNA, 22 nt, Human
uacauguaagacaugagacucu

SEQ ID NO: 359214 - RNA, 22 nt, Human
agugcagaguacauuuguggca

SEQ ID NO: 359215 - RNA, 22 nt, Human
aagggcagaauagagaagaugg

SEQ ID NO: 359216 - RNA, 22 nt, Human
ggcugcugaguuggccaggaga

SEQ ID NO: 359217 - RNA, 22 nt, Human
ucuacuuuucccuauacaguuu

SEQ ID NO: 359218 - RNA, 22 nt, Human
acuuccuguuaugugugccucu

SEQ ID NO: 359219 - RNA, 22 nt, Human
agcucccagcuccuuugagaga

SEQ ID NO: 359220 - RNA, 22 nt, Human
ugugaauaccuugaauucauca

SEQ ID NO: 359221 - RNA, 22 nt, Human
cugaggugagcuucccugggcu

SEQ ID NO: 359222 - RNA, 22 nt, Human
gcuguucucuguaacaugcauu

SEQ ID NO: 359223 - RNA, 22 nt, Human
agacaggcagaggcugcagagg

SEQ ID NO: 359224 - RNA, 22 nt, Human
cacagacccagaagggaugaag

SEQ ID NO: 359225 - RNA, 22 nt, Human
ccagggcugagcugugaccaug

SEQ ID NO: 359226 - RNA, 22 nt, Human
caaaguccauaguuuacaauag

SEQ ID NO: 359227 - RNA, 22 nt, Human
ugagccaggcucaagugauccu

SEQ ID NO: 359228 - RNA, 22 nt, Human
gccagggcugugcagguuuguu

SEQ ID NO: 359229 - RNA, 22 nt, Human
uuguggaaauacagacuccaag

SEQ ID NO: 359230 - RNA, 22 nt, Human
ccagacccugcucuggggcucu

SEQ ID NO: 359231 - RNA, 22 nt, Human
uugcaccauuucacuuccauua

SEQ ID NO: 359232 - RNA, 22 nt, Human
agacaaauggaguaugagcaac

SEQ ID NO: 359233 - RNA, 22 nt, Human
agauuaugcuggcugcuacaag

SEQ ID NO: 359234 - RNA, 22 nt, Human
cugugaccuccaggaaggggug

SEQ ID NO: 359235 - RNA, 21 nt, Human
agcugccacccuagcuucuga

SEQ ID NO: 359236 - RNA, 22 nt, Human
cccuggcagaaugucucugggc

SEQ ID NO: 359237 - RNA, 22 nt, Human
cuuaaagaugucaaggcuguuu

SEQ ID NO: 359238 - RNA, 22 nt, Human
agggaugguggagguugcaagu

SEQ ID NO: 359239 - RNA, 22 nt, Human
uaaaaguuuuaguuguacauaa

SEQ ID NO: 359240 - RNA, 22 nt, Human
ucaguuuugauuccugguucuc

SEQ ID NO: 359241 - RNA, 22 nt, Human
acagccagaggugguccugggu

SEQ ID NO: 359242 - RNA, 22 nt, Human
aggucauuacaauuaucauuuu

SEQ ID NO: 359243 - RNA, 22 nt, Human
uggguggcggccugguucugag

SEQ ID NO: 359244 - RNA, 22 nt, Human
auugacaagcaguaugucuuag

SEQ ID NO: 359245 - RNA, 20 nt, Human
uugcauuggaugugcaggug

SEQ ID NO: 359246 - RNA, 22 nt, Human
ucaccugggagggcugugguag

SEQ ID NO: 359247 - RNA, 22 nt, Human
ugggcagauuaaugcaguggcu

SEQ ID NO: 359248 - RNA, 22 nt, Human
uaauaaaugaaagugcuggcau

SEQ ID NO: 359249 - RNA, 22 nt, Human
uaugcauauagaugcacacaca

SEQ ID NO: 359250 - RNA, 22 nt, Human
gggcugcuguagagaacauguu

SEQ ID NO: 359251 - RNA, 22 nt, Human
aucuggcuauugacauguuaua

SEQ ID NO: 359252 - RNA, 18 nt, Human
cggcagagugcuucuagc

SEQ ID NO: 359253 - RNA, 22 nt, Human
gggcugagucugcugccuguca

SEQ ID NO: 359254 - RNA, 22 nt, Human
ccugugaggucaucugugguaa

SEQ ID NO: 359255 - RNA, 22 nt, Human
agcagcugaucaaagcacuuau

SEQ ID NO: 359256 - RNA, 22 nt, Human
gaaugaauagguguccagaugg

SEQ ID NO: 359257 - RNA, 22 nt, Human
ugcauuguugaccaguugugca

SEQ ID NO: 359258 - RNA, 18 nt, Human
gagcugggagaaggaagg

SEQ ID NO: 359259 - RNA, 22 nt, Human
ugucaccaaguugaugaaugca

SEQ ID NO: 359260 - RNA, 22 nt, Human
uagaacacuugaccacugcucc

SEQ ID NO: 359261 - RNA, 22 nt, Human
gcaggggaguggaugauggauu

SEQ ID NO: 359262 - RNA, 22 nt, Human
uuaaaauagccagugccccucu

SEQ ID NO: 359263 - RNA, 18 nt, Human
gucacuguguuucugagc

SEQ ID NO: 359264 - RNA, 22 nt, Human
gcucaggauuucauccaugugu

SEQ ID NO: 359265 - RNA, 17 nt, Human
uccauacaauucucucu

SEQ ID NO: 359266 - RNA, 22 nt, Human
agaaagaacguugguuaucuua

SEQ ID NO: 359267 - RNA, 22 nt, Human
uugcauguuauuuaaucuguau

SEQ ID NO: 359268 - RNA, 21 nt, Human
uugaaggaucacuucuguacc

SEQ ID NO: 359269 - RNA, 19 nt, Human
ccuuccuccccagggccau

SEQ ID NO: 359270 - RNA, 22 nt, Human
gggcagguuauuggaguaggga

SEQ ID NO: 359271 - RNA, 22 nt, Human
gcuggcuguaucaccuggccag

SEQ ID NO: 359272 - RNA, 22 nt, Human
aauguguauacuggcaauuaag

SEQ ID NO: 359273 - RNA, 22 nt, Human
aggcagcagugauaagauagga

SEQ ID NO: 359274 - RNA, 22 nt, Human
agggggugucucugauuggguu

SEQ ID NO: 359275 - RNA, 22 nt, Human
acagaguacauucagagacuau

SEQ ID NO: 359276 - RNA, 22 nt, Human
cagagccaugguaugggcuugu

SEQ ID NO: 359277 - RNA, 22 nt, Human
ccacuugugaaauaaucaaaua

SEQ ID NO: 359278 - RNA, 22 nt, Human
cagguggcaugacugccuacaa

SEQ ID NO: 359279 - RNA, 22 nt, Human
gccugccugcugugugcaaguu

SEQ ID NO: 359280 - RNA, 22 nt, Human
uagcccagcaugagcagagcug

SEQ ID NO: 359281 - RNA, 22 nt, Human
uaagagaacuggauagauagga

SEQ ID NO: 359282 - RNA, 22 nt, Human
ucagaggauagaaauacuuauu

SEQ ID NO: 359283 - RNA, 22 nt, Human
ccugucaggguuugccucagaa

SEQ ID NO: 359284 - RNA, 22 nt, Human
cagcacugcugcuguacacaca

SEQ ID NO: 359285 - RNA, 23 nt, Human
agggcccaagccuggacagcagg

SEQ ID NO: 359286 - RNA, 22 nt, Human
ggaggacacuggcucugccuuc

SEQ ID NO: 359287 - RNA, 22 nt, Human
ccacuguuuuucaguuaacuuu

SEQ ID NO: 359288 - RNA, 22 nt, Human
aagcagccagccaucaugcccg

SEQ ID NO: 359289 - RNA, 22 nt, Human
uuguaaaugaccuuuucuaauu

SEQ ID NO: 359290 - RNA, 22 nt, Human
uggcuuuauaaauccacugguu

SEQ ID NO: 359291 - RNA, 22 nt, Human
aguccuuugggaaaaaugacua

SEQ ID NO: 359292 - RNA, 22 nt, Human
cuggcucacaggugagaugcau

SEQ ID NO: 359293 - RNA, 22 nt, Human
gcucccagacugaccagaggug

SEQ ID NO: 359294 - RNA, 22 nt, Human
agagccagcaagugaauaguga

SEQ ID NO: 359295 - RNA, 22 nt, Human
gcagagcucuguucuuaucucc

SEQ ID NO: 359296 - RNA, 22 nt, Human
gcagggcucaacaggacacccc

SEQ ID NO: 359297 - RNA, 17 nt, Human
uguuccauuugaccacc

SEQ ID NO: 359298 - RNA, 22 nt, Human
acagcagcaauagcagugacau

SEQ ID NO: 359299 - RNA, 22 nt, Human
gcaggcaguugcaguuuucuag

SEQ ID NO: 359300 - RNA, 22 nt, Human
gaugcacaugugaguauagaag

SEQ ID NO: 359301 - RNA, 22 nt, Human
uccucucagugugguuguggga

SEQ ID NO: 359302 - RNA, 22 nt, Human
augcuguguggccaccuccaug

SEQ ID NO: 359303 - RNA, 22 nt, Human
uaggcuggaacuuaggcagagg

SEQ ID NO: 359304 - RNA, 22 nt, Human
uggcagucggacuucuaucuca

SEQ ID NO: 359305 - RNA, 22 nt, Human
gugucccaaagauuagaaauca

SEQ ID NO: 359306 - RNA, 22 nt, Human
guggccucugugcuccugccua

SEQ ID NO: 359307 - RNA, 22 nt, Human
cuacauuuggagaguauaggaa

SEQ ID NO: 359308 - RNA, 22 nt, Human
uccucugcuguucugguucuuu

SEQ ID NO: 359309 - RNA, 22 nt, Human
gggauggggucaacauguaccu

SEQ ID NO: 359310 - RNA, 22 nt, Human
cccaggaggugugcccaacucg

SEQ ID NO: 359311 - RNA, 22 nt, Human
acaggugugagaacaugccuug

SEQ ID NO: 359312 - RNA, 23 nt, Human
gccaggcuccggucuguggccac

SEQ ID NO: 359313 - RNA, 22 nt, Human
auuauguaacugugguucagca

SEQ ID NO: 359314 - RNA, 22 nt, Human
uacaaaugaguuguaugaacca

SEQ ID NO: 359315 - RNA, 22 nt, Human
gcugagggcauguguggcgacu

SEQ ID NO: 359316 - RNA, 22 nt, Human
ugcagcauuauucacaguagcc

SEQ ID NO: 359317 - RNA, 22 nt, Human
aauucuauguucuugaguaaga

SEQ ID NO: 359318 - RNA, 22 nt, Human
gucucccaucguuugugaggaa

SEQ ID NO: 359319 - RNA, 22 nt, Human
cugcuuuguggaaucacacugg

SEQ ID NO: 359320 - RNA, 22 nt, Human
accucuggccuucaggcaucau

SEQ ID NO: 359321 - RNA, 22 nt, Human
gugaauaaaacaccugccaaga

SEQ ID NO: 359322 - RNA, 22 nt, Human
gggauuuaguaggauaguauac

SEQ ID NO: 359323 - RNA, 22 nt, Human
agcugucuaccugcagaguccu

SEQ ID NO: 359324 - RNA, 22 nt, Human
acauguguauagccuguauaga

SEQ ID NO: 359325 - RNA, 22 nt, Human
uggagccuguguuucugcccag

SEQ ID NO: 359326 - RNA, 22 nt, Human
cagcaauaagccagguuagaca

SEQ ID NO: 359327 - RNA, 22 nt, Human
cagcagggcccccgggugcgcc

SEQ ID NO: 359328 - RNA, 22 nt, Human
auuuucugguugagguuuaaca

SEQ ID NO: 359329 - RNA, 22 nt, Human
uccaggagggguaggcaguaug

SEQ ID NO: 359330 - RNA, 22 nt, Human
uuguuucaggaugguuuguuac

SEQ ID NO: 359331 - RNA, 22 nt, Human
gcuggccauggggagugaggag

SEQ ID NO: 359332 - RNA, 19 nt, Human
ccugggagucagcugaagg

SEQ ID NO: 359333 - RNA, 22 nt, Human
agcucccagaaggcccugcgcc

SEQ ID NO: 359334 - RNA, 22 nt, Human
uuauuccauagaagucaaggaa

SEQ ID NO: 359335 - RNA, 22 nt, Human
aaaggccacugcaagggaaggu

SEQ ID NO: 359336 - RNA, 22 nt, Human
caucagaaccaguggggacauu

SEQ ID NO: 359337 - RNA, 22 nt, Human
cuucucagaggccagaagcuau

SEQ ID NO: 359338 - RNA, 22 nt, Human
uccuugaagcuuguaucuaaua

SEQ ID NO: 359339 - RNA, 22 nt, Human
gcucugagccgggggccugucc

SEQ ID NO: 359340 - RNA, 20 nt, Human
agugucugggccucaggccc

SEQ ID NO: 359341 - RNA, 22 nt, Human
ccagggcugcugugggacucca

SEQ ID NO: 359342 - RNA, 22 nt, Human
cucagaguccccaguggguuug

SEQ ID NO: 359343 - RNA, 22 nt, Human
uaucuguuccaggcacucagcu

SEQ ID NO: 359344 - RNA, 22 nt, Human
gaagcccagcaaacugugauca

SEQ ID NO: 359345 - RNA, 22 nt, Human
uugaaaggugacauuguuagag

SEQ ID NO: 359346 - RNA, 22 nt, Human
cacacagaugguaagggaggga

SEQ ID NO: 359347 - RNA, 22 nt, Human
cugggagcccgcguccuggugg

SEQ ID NO: 359348 - RNA, 22 nt, Human
aauuagggaggacaaagguaca

SEQ ID NO: 359349 - RNA, 22 nt, Human
uucccucuccuacucaggaaag

SEQ ID NO: 359350 - RNA, 22 nt, Human
gugugcagcagagacaggacuc

SEQ ID NO: 359351 - RNA, 22 nt, Human
cugagaaggaagccuccacucu

SEQ ID NO: 359352 - RNA, 22 nt, Human
auucuucauuguugauucaugu

SEQ ID NO: 359353 - RNA, 19 nt, Human
cucuccagcuccaguagcu

SEQ ID NO: 359354 - RNA, 22 nt, Human
uccagggaugccagccauguug

SEQ ID NO: 359355 - RNA, 22 nt, Human
aaggaguuuggguagucauaca

SEQ ID NO: 359356 - RNA, 22 nt, Human
acauuugaggauguuaagaaug

SEQ ID NO: 359357 - RNA, 19 nt, Human
uucaggauugacccuacug

SEQ ID NO: 359358 - RNA, 22 nt, Human
uugaggagucaggggcacggaa

SEQ ID NO: 359359 - RNA, 22 nt, Human
agaauuguugggguaauaaaag

SEQ ID NO: 359360 - RNA, 22 nt, Human
caugggagguuggcuuggcaug

SEQ ID NO: 359361 - RNA, 22 nt, Human
ccagagagaaauggauuugagu

SEQ ID NO: 359362 - RNA, 22 nt, Human
cuggcucauagagcagcuccaa

SEQ ID NO: 359363 - RNA, 22 nt, Human
aaugagacacgugaagcagaug

SEQ ID NO: 359364 - RNA, 22 nt, Human
ucagcuuuccuugcuuuagauu

SEQ ID NO: 359365 - RNA, 22 nt, Human
uugcauugggagugaggagacc

SEQ ID NO: 359366 - RNA, 22 nt, Human
uuucacaaaugucuuuaacuug

SEQ ID NO: 359367 - RNA, 22 nt, Human
gucagaggaggcugaguaggaa

SEQ ID NO: 359368 - RNA, 22 nt, Human
uuuugagauggugucucgcucc

SEQ ID NO: 359369 - RNA, 22 nt, Human
agcagcauccccggccuccacc

SEQ ID NO: 359370 - RNA, 23 nt, Human
uugcuuucaucaugagaugcucc

SEQ ID NO: 359371 - RNA, 22 nt, Human
agagcccugaagcagagcuaaa

SEQ ID NO: 359372 - RNA, 22 nt, Human
gcauggaauucccuuaugggcc

SEQ ID NO: 359373 - RNA, 22 nt, Human
ugccuggguguaaagggccaac

SEQ ID NO: 359374 - RNA, 22 nt, Human
uuagccauauagaaaaagagcu

SEQ ID NO: 359375 - RNA, 22 nt, Human
cuggcagcgugagcagcaucca

SEQ ID NO: 359376 - RNA, 22 nt, Human
uuucaguuuaugucuugaauua

SEQ ID NO: 359377 - RNA, 22 nt, Human
augaaacaugcuuuguggauga

SEQ ID NO: 359378 - RNA, 22 nt, Human
cugcuucuccaaaguaggacuu

SEQ ID NO: 359379 - RNA, 22 nt, Human
ggagagugggagcaacuguugc

SEQ ID NO: 359380 - RNA, 22 nt, Human
acacaugcauaagccuucccuu

SEQ ID NO: 359381 - RNA, 22 nt, Human
cugugagcuggguggccaggac

SEQ ID NO: 359382 - RNA, 22 nt, Human
ugcuggcuggccuggccuggac

SEQ ID NO: 359383 - RNA, 22 nt, Human
ggagccuggccuggcucugugu

SEQ ID NO: 359384 - RNA, 22 nt, Human
cuucuccucugaguccugggag

SEQ ID NO: 359385 - RNA, 22 nt, Human
uuccauuguuucugucuucacu

SEQ ID NO: 359386 - RNA, 22 nt, Human
gccuggagaaaggaagguggga

SEQ ID NO: 359387 - RNA, 22 nt, Human
gucuggggaagucagggcauca

SEQ ID NO: 359388 - RNA, 22 nt, Human
aaucagaaagaucuugaugaga

SEQ ID NO: 359389 - RNA, 15 nt, Human
aggcacugugggacc

SEQ ID NO: 359390 - RNA, 22 nt, Human
gcauucaucuuccuccaugcag

SEQ ID NO: 359391 - RNA, 22 nt, Human
ugaauaaucauguccauagugu

SEQ ID NO: 359392 - RNA, 22 nt, Human
gcugcaggggggucuggacuug

SEQ ID NO: 359393 - RNA, 22 nt, Human
ccuggcagguggagguugcagu

SEQ ID NO: 359394 - RNA, 22 nt, Human
gagcagaacaggccggguggga

SEQ ID NO: 359395 - RNA, 22 nt, Human
ucccaguguggcaggccaugga

SEQ ID NO: 359396 - RNA, 22 nt, Human
gcucuggguagccacugccugg

SEQ ID NO: 359397 - RNA, 22 nt, Human
ccucugagagaaggccuucagc

SEQ ID NO: 359398 - RNA, 22 nt, Human
aauuagggaaguauuuaguagu

SEQ ID NO: 359399 - RNA, 22 nt, Human
aggaaggguucuuugugaaaga

SEQ ID NO: 359400 - RNA, 22 nt, Human
uuuaggcaaacucauugucaga

SEQ ID NO: 359401 - RNA, 22 nt, Human
gcaggaugaaggcagaggcuga

SEQ ID NO: 359402 - RNA, 20 nt, Human
gcacugaagguuccagggga

SEQ ID NO: 359403 - RNA, 22 nt, Human
ggcugaggcucaugccaucuug

SEQ ID NO: 359404 - RNA, 22 nt, Human
ugcugccuugaccuccugggcu

SEQ ID NO: 359405 - RNA, 22 nt, Human
caguacuuguccucagguguua

SEQ ID NO: 359406 - RNA, 20 nt, Human
ucuggcucuuugcuccuccc

SEQ ID NO: 359407 - RNA, 22 nt, Human
aagucacacuagacaacugagg

SEQ ID NO: 359408 - RNA, 22 nt, Human
caguuucugggcguucacaggu

SEQ ID NO: 359409 - RNA, 22 nt, Human
aagcaauagcaacaacuuuaca

SEQ ID NO: 359410 - RNA, 22 nt, Human
ggagagaaauugagguagcaag

SEQ ID NO: 359411 - RNA, 22 nt, Human
augaacaauaaaauagaucaca

SEQ ID NO: 359412 - RNA, 22 nt, Human
agcccaggugagggguucgaaa

SEQ ID NO: 359413 - RNA, 22 nt, Human
cagugcauagauccugaggccu

SEQ ID NO: 359414 - RNA, 22 nt, Human
ucucuucuagcuucuugugguu

SEQ ID NO: 359415 - RNA, 22 nt, Human
auguuacagaaagcaaagauga

SEQ ID NO: 359416 - RNA, 22 nt, Human
augccaggaacaaacaguggug

SEQ ID NO: 359417 - RNA, 22 nt, Human
ggccucugguucacagggagga

SEQ ID NO: 359418 - RNA, 22 nt, Human
aagggcaggaaaagauggaugu

SEQ ID NO: 359419 - RNA, 22 nt, Human
ugucaccacuggcugaaacacc

SEQ ID NO: 359420 - RNA, 22 nt, Human
uagcuuuaaaaaucaucaaagc

SEQ ID NO: 359421 - RNA, 22 nt, Human
gcagggcugggugggagacaga

SEQ ID NO: 359422 - RNA, 17 nt, Human
ggcuggagcagcucccc

SEQ ID NO: 359423 - RNA, 22 nt, Human
cccagcucuuuuagcggcaucu

SEQ ID NO: 359424 - RNA, 21 nt, Human
gcugugcacauaguagaagug

SEQ ID NO: 359425 - RNA, 22 nt, Human
gagccuguguuuccuguagcca

SEQ ID NO: 359426 - RNA, 22 nt, Human
guggcugcucgggcuccggccc

SEQ ID NO: 359427 - RNA, 22 nt, Human
cagauacuguaaaauuucagua

SEQ ID NO: 359428 - RNA, 22 nt, Human
aggauuuaggagcuggcuaacg

SEQ ID NO: 359429 - RNA, 22 nt, Human
acaugaaaaauguuugcaguuu

SEQ ID NO: 359430 - RNA, 22 nt, Human
ucaguguagcagacuuguagcc

SEQ ID NO: 359431 - RNA, 22 nt, Human
agcccuggcccggcugugcuuu

SEQ ID NO: 359432 - RNA, 22 nt, Human
gcucugugggugaguagaaucu

SEQ ID NO: 359433 - RNA, 22 nt, Human
auuucccaugugaaucaauugg

SEQ ID NO: 359434 - RNA, 22 nt, Human
aaaguccuguuaacuguuaaca

SEQ ID NO: 359435 - RNA, 22 nt, Human
uuugaaaauuuaagugcuacac

SEQ ID NO: 359436 - RNA, 22 nt, Human
cagcaauaguguguuuguuuca

SEQ ID NO: 359437 - RNA, 22 nt, Human
gcaguccucucauuggccuccu

SEQ ID NO: 359438 - RNA, 22 nt, Human
ggcugccuggaccuccucuuuc

SEQ ID NO: 359439 - RNA, 22 nt, Human
uaagcauaacuaaaaaugauuu

SEQ ID NO: 359440 - RNA, 22 nt, Human
cuggcagcgcagcaugaagucg

SEQ ID NO: 359441 - RNA, 22 nt, Human
agugaccaacaaugcugagaag

SEQ ID NO: 359442 - RNA, 17 nt, Human
aaggccauuuccaccca

SEQ ID NO: 359443 - RNA, 22 nt, Human
ugccaggcaggacccuagaacc

SEQ ID NO: 359444 - RNA, 15 nt, Human
aaucagaaguguggc

SEQ ID NO: 359445 - RNA, 22 nt, Human
accagugcuuccugcuggagcu

SEQ ID NO: 359446 - RNA, 22 nt, Human
auuauuuuaugugcggccugau

SEQ ID NO: 359447 - RNA, 22 nt, Human
uuaagcaacacacauuaauuau

SEQ ID NO: 359448 - RNA, 22 nt, Human
aucaguuucacuugcuugcaaa

SEQ ID NO: 359449 - RNA, 22 nt, Human
gcaggaguguggugggacaucc

SEQ ID NO: 359450 - RNA, 22 nt, Human
cccaggaaaugggcucuugccu

SEQ ID NO: 359451 - RNA, 22 nt, Human
agggccagcacuccuggcagga

SEQ ID NO: 359452 - RNA, 22 nt, Human
cucuggagaacuccuugugucu

SEQ ID NO: 359453 - RNA, 22 nt, Human
auugaaagaguuuucugcugca

SEQ ID NO: 359454 - RNA, 22 nt, Human
gucccugcaucaccacgggacu

SEQ ID NO: 359455 - RNA, 19 nt, Human
cuggcagccugucuguguc

SEQ ID NO: 359456 - RNA, 22 nt, Human
ugcuggaggauuaaacaaguca

SEQ ID NO: 359457 - RNA, 22 nt, Human
gggcaggagagaacagucaugg

SEQ ID NO: 359458 - RNA, 22 nt, Human
agagccaggcggcugggcaccu

SEQ ID NO: 359459 - RNA, 22 nt, Human
gcagauggugccaugucuugug

SEQ ID NO: 359460 - RNA, 22 nt, Human
cugcagggcagaagggcauaga

SEQ ID NO: 359461 - RNA, 22 nt, Human
cccugcagugugaccucaccua

SEQ ID NO: 359462 - RNA, 22 nt, Human
ugcugccuccaacuccugggcu

SEQ ID NO: 359463 - RNA, 22 nt, Human
cugggaggacaacuuggagcuc

SEQ ID NO: 359464 - RNA, 22 nt, Human
uggcuggggccacaguuuuccu

SEQ ID NO: 359465 - RNA, 22 nt, Human
cagggcugugcccaucuucccc

SEQ ID NO: 359466 - RNA, 22 nt, Human
uucacauaaugauacaaagcuu

SEQ ID NO: 359467 - RNA, 22 nt, Human
cagucacauggaugauggauag

SEQ ID NO: 359468 - RNA, 22 nt, Human
cacaauacuauuuuuaggucuu

SEQ ID NO: 359469 - RNA, 22 nt, Human
ucauucuuuaccaaguugucac

SEQ ID NO: 359470 - RNA, 22 nt, Human
agagugcaaccgaaacaagcag

SEQ ID NO: 359471 - RNA, 22 nt, Human
cccuguccuggaugggagcacu

SEQ ID NO: 359472 - RNA, 22 nt, Human
agggagcuaggauccugaaggu

SEQ ID NO: 359473 - RNA, 22 nt, Human
aucuggguucaccaugcuccug

SEQ ID NO: 359474 - RNA, 22 nt, Human
ucucaggaagauuagggcuaag

SEQ ID NO: 359475 - RNA, 22 nt, Human
auguguaaaaagugcuuaauau

SEQ ID NO: 359476 - RNA, 22 nt, Human
ggagcaggagucucuugaauuu

SEQ ID NO: 359477 - RNA, 22 nt, Human
ugaggcucagagcaccugcucc

SEQ ID NO: 359478 - RNA, 19 nt, Human
uggcucugucgaaggcaca

SEQ ID NO: 359479 - RNA, 22 nt, Human
ggccagaggugguacauagcuu

SEQ ID NO: 359480 - RNA, 21 nt, Human
caguguggugaccagggucuc

SEQ ID NO: 359481 - RNA, 22 nt, Human
aggggccucgcaggaccgcucc

SEQ ID NO: 359482 - RNA, 22 nt, Human
ugggcugcccugaugguccuca

SEQ ID NO: 359483 - RNA, 22 nt, Human
gaggcugggaaguccaagauca

SEQ ID NO: 359484 - RNA, 22 nt, Human
ugggcagaguugugaugaacug

SEQ ID NO: 359485 - RNA, 22 nt, Human
auggcagcaaaugucuggcugg

SEQ ID NO: 359486 - RNA, 22 nt, Human
auagaauuauggaaagcaucuu

SEQ ID NO: 359487 - RNA, 20 nt, Human
agaauucuuacccuuugaug

SEQ ID NO: 359488 - RNA, 22 nt, Human
cucagcuggcaauucuggcucc

SEQ ID NO: 359489 - RNA, 22 nt, Human
ccaagaugaucuuuacaguguu

SEQ ID NO: 359490 - RNA, 18 nt, Human
cuuuaugugcagagcuuu

SEQ ID NO: 359491 - RNA, 22 nt, Human
uguccaggucagcagcagggac

SEQ ID NO: 359492 - RNA, 22 nt, Human
aucacaaaggcugcuucaugau

SEQ ID NO: 359493 - RNA, 22 nt, Human
uggcaguguauagguggcuccu

SEQ ID NO: 359494 - RNA, 22 nt, Human
ugauuaacugucuauuaaucau

SEQ ID NO: 359495 - RNA, 23 nt, Human
ggcaccaggccauggagcgggag

SEQ ID NO: 359496 - RNA, 22 nt, Human
auggacagugugucuguuucca

SEQ ID NO: 359497 - RNA, 22 nt, Human
caaaagucuuccuauucucuua

SEQ ID NO: 359498 - RNA, 22 nt, Human
aaguccaguuuuuccagguggu

SEQ ID NO: 359499 - RNA, 22 nt, Human
gccuucugauaucucuuggcau

SEQ ID NO: 359500 - RNA, 22 nt, Human
acagguuugucugauguaauga

SEQ ID NO: 359501 - RNA, 22 nt, Human
gagaaggacuacacaucuggcc

SEQ ID NO: 359502 - RNA, 22 nt, Human
uauaaaguuucgaaagauguau

SEQ ID NO: 359503 - RNA, 22 nt, Human
caguccuuaaggaaacauuugu

SEQ ID NO: 359504 - RNA, 22 nt, Human
acaggcagggaccuuggcuaag

SEQ ID NO: 359505 - RNA, 22 nt, Human
uuuucauuguuacuaugagcua

SEQ ID NO: 359506 - RNA, 22 nt, Human
cagaauuugaaguaauauucca

SEQ ID NO: 359507 - RNA, 19 nt, Human
ucagggcaguccggucccc

SEQ ID NO: 359508 - RNA, 22 nt, Human
cugauuccugauucaugcucuu

SEQ ID NO: 359509 - RNA, 22 nt, Human
uugcuguguaacuccuggccug

SEQ ID NO: 359510 - RNA, 22 nt, Human
ugcacagugaccccuggugacu

SEQ ID NO: 359511 - RNA, 22 nt, Human
cagggcuggguuaaaagcaggg

SEQ ID NO: 359512 - RNA, 22 nt, Human
guguacaugagaaaucaacuuu

SEQ ID NO: 359513 - RNA, 22 nt, Human
cucacuguccaacaggcuuuac

SEQ ID NO: 359514 - RNA, 22 nt, Human
gggcugaggaacauauuuuguu

SEQ ID NO: 359515 - RNA, 22 nt, Human
ucuucaaacugaaaauuuagaa

SEQ ID NO: 359516 - RNA, 22 nt, Human
cucagagaaccuaagcggagga

SEQ ID NO: 359517 - RNA, 22 nt, Human
uacuuugucauucuaaccuucc

SEQ ID NO: 359518 - RNA, 22 nt, Human
ugggacagugugccuugcuccu

SEQ ID NO: 359519 - RNA, 22 nt, Human
gcaggccagcugugcagauggg

SEQ ID NO: 359520 - RNA, 18 nt, Human
gcccagaggucugggccc

SEQ ID NO: 359521 - RNA, 22 nt, Human
caugaguuuuuuaguucaugca

SEQ ID NO: 359522 - RNA, 22 nt, Human
uucaggauuauacucucuuccc

SEQ ID NO: 359523 - RNA, 22 nt, Human
gagccuggauagccuuguucca

SEQ ID NO: 359524 - RNA, 22 nt, Human
cuacagaaacacuggacaugug

SEQ ID NO: 359525 - RNA, 22 nt, Human
uuccuuagacagagguggucau

SEQ ID NO: 359526 - RNA, 22 nt, Human
gcaccaggcagcugagcaggcc

SEQ ID NO: 359527 - RNA, 22 nt, Human
gcuucucucucagacugcaagc

SEQ ID NO: 359528 - RNA, 22 nt, Human
uccuggaggcaaaugaagacuc

SEQ ID NO: 359529 - RNA, 22 nt, Human
cggggcuguagcacagcugagc

SEQ ID NO: 359530 - RNA, 23 nt, Human
uguaacaauuucauauacaugca

SEQ ID NO: 359531 - RNA, 22 nt, Human
ucacaggcuccagggccuggau

SEQ ID NO: 359532 - RNA, 22 nt, Human
ucuggcucaaaauacguacucu

SEQ ID NO: 359533 - RNA, 21 nt, Human
aacugguucaauucaacuaga

SEQ ID NO: 359534 - RNA, 20 nt, Human
aggcugccaggucucacauc

SEQ ID NO: 359535 - RNA, 22 nt, Human
aaagccuucaaguagauguaag

SEQ ID NO: 359536 - RNA, 22 nt, Human
aauaucaguauauuguaucagu

SEQ ID NO: 359537 - RNA, 22 nt, Human
uuccuuccauagcaaaacaugc

SEQ ID NO: 359538 - RNA, 22 nt, Human
gaggccagaagucugagaucag

SEQ ID NO: 359539 - RNA, 22 nt, Human
aggcucaggugccucauucaca

SEQ ID NO: 359540 - RNA, 22 nt, Human
gagucaguaauggauaugucau

SEQ ID NO: 359541 - RNA, 22 nt, Human
agcucugacauugauucucagc

SEQ ID NO: 359542 - RNA, 22 nt, Human
uacaugcucaguaacuuucagu

SEQ ID NO: 359543 - RNA, 22 nt, Human
ucagggcauccauugccuguug

SEQ ID NO: 359544 - RNA, 20 nt, Human
uuucugugcccaggucuguu

SEQ ID NO: 359545 - RNA, 22 nt, Human
ucucuggccgagagucccuggg

SEQ ID NO: 359546 - RNA, 22 nt, Human
gagcuucccucugcagucccug

SEQ ID NO: 359547 - RNA, 23 nt, Human
aggcacugaaugugucagugagu

SEQ ID NO: 359548 - RNA, 17 nt, Human
gcuggcugacccaugcc

SEQ ID NO: 359549 - RNA, 21 nt, Human
ucacuagugccuucugucauu

SEQ ID NO: 359550 - RNA, 22 nt, Human
uucaacuuuggagauuuaauaa

SEQ ID NO: 359551 - RNA, 18 nt, Human
ggcugccuguuccugaag

SEQ ID NO: 359552 - RNA, 22 nt, Human
cucagaauuuagggcucugagg

SEQ ID NO: 359553 - RNA, 22 nt, Human
ucaggggcuugaggugcauguc

SEQ ID NO: 359554 - RNA, 22 nt, Human
cugaaugucgaucagcuugggu

SEQ ID NO: 359555 - RNA, 22 nt, Human
uaaagccacgcuggaaaucagg

SEQ ID NO: 359556 - RNA, 22 nt, Human
uucagagcaucucuaaagccag

SEQ ID NO: 359557 - RNA, 22 nt, Human
caaaugugacuuuugggcuucu

SEQ ID NO: 359558 - RNA, 22 nt, Human
uauuucaugugcaccauaauuc

SEQ ID NO: 359559 - RNA, 22 nt, Human
cauuuacacacagaggugugcu

SEQ ID NO: 359560 - RNA, 22 nt, Human
aauuucagagguagagauucua

SEQ ID NO: 359561 - RNA, 22 nt, Human
aggcagaucacuugaggccagg

SEQ ID NO: 359562 - RNA, 22 nt, Human
ccuucucuacuccugaugcaug

SEQ ID NO: 359563 - RNA, 22 nt, Human
uggcugagagaagacggggaag

SEQ ID NO: 359564 - RNA, 20 nt, Human
uuugagaccagucugcccaa

SEQ ID NO: 359565 - RNA, 22 nt, Human
uggcagagcuggcugcggauga

SEQ ID NO: 359566 - RNA, 22 nt, Human
ggggccagcaauguugaggaau

SEQ ID NO: 359567 - RNA, 22 nt, Human
uucuugcaggucacucacugag

SEQ ID NO: 359568 - RNA, 18 nt, Human
gagcugccauauuuaguu

SEQ ID NO: 359569 - RNA, 23 nt, Human
ugugaagguggguccaagggcug

SEQ ID NO: 359570 - RNA, 22 nt, Human
ugcuuccuucccguucuucucc

SEQ ID NO: 359571 - RNA, 22 nt, Human
cuggggcucacuuuggucaggc

SEQ ID NO: 359572 - RNA, 22 nt, Human
gaggccuggaccagccacagag

SEQ ID NO: 359573 - RNA, 18 nt, Human
uacaugcauaaaugaagc

SEQ ID NO: 359574 - RNA, 22 nt, Human
aagugaguggccuggagaggug

SEQ ID NO: 359575 - RNA, 22 nt, Human
ggcgcacaaugugcagguuugu

SEQ ID NO: 359576 - RNA, 22 nt, Human
ccugggcaauauagugaggccc

SEQ ID NO: 359577 - RNA, 22 nt, Human
uucaaugagcccggggccauag

SEQ ID NO: 359578 - RNA, 22 nt, Human
aucuaagauguauugagcacuu

SEQ ID NO: 359579 - RNA, 22 nt, Human
uuuucuuacugucugugauccu

SEQ ID NO: 359580 - RNA, 22 nt, Human
augaagauaagaccaggcugga

SEQ ID NO: 359581 - RNA, 22 nt, Human
ccagagccggauugugaagugc

SEQ ID NO: 359582 - RNA, 22 nt, Human
auggcuuucagauggugaaaga

SEQ ID NO: 359583 - RNA, 22 nt, Human
gacaucauagggugggaggaaa

SEQ ID NO: 359584 - RNA, 18 nt, Human
uggaggcagaguucuggc

SEQ ID NO: 359585 - RNA, 22 nt, Human
augcccgauaccuaguuaacuc

SEQ ID NO: 359586 - RNA, 22 nt, Human
uaaauguggagacucaggaguc

SEQ ID NO: 359587 - RNA, 22 nt, Human
gcuucuaucccuccacugcacu

SEQ ID NO: 359588 - RNA, 22 nt, Human
agcuggcagcucucagggguac

SEQ ID NO: 359589 - RNA, 22 nt, Human
agcugccagggacugggcaugg

SEQ ID NO: 359590 - RNA, 22 nt, Human
uccugcagugugucuccugcac

SEQ ID NO: 359591 - RNA, 22 nt, Human
cauuccuuaacguggggagucu

SEQ ID NO: 359592 - RNA, 22 nt, Human
agccuggccacucagggccuga

SEQ ID NO: 359593 - RNA, 22 nt, Human
ggccuggaagaggacagagaaa

SEQ ID NO: 359594 - RNA, 19 nt, Human
cuggcucuuggguggagga

SEQ ID NO: 359595 - RNA, 22 nt, Human
agaauucuuggugguuagaaua

SEQ ID NO: 359596 - RNA, 22 nt, Human
caagacaagaucuaagcaugcu

SEQ ID NO: 359597 - RNA, 17 nt, Human
aaucuguuuacagucag

SEQ ID NO: 359598 - RNA, 22 nt, Human
uaaggccaaguucauauacaac

SEQ ID NO: 359599 - RNA, 22 nt, Human
ggccaggccaagaggguuggaa

SEQ ID NO: 359600 - RNA, 22 nt, Human
agcugcagauucuaucuagaag

SEQ ID NO: 359601 - RNA, 22 nt, Human
aaucuucacagaaaaaugucug

SEQ ID NO: 359602 - RNA, 22 nt, Human
ugggugggagcgcccugucugg

SEQ ID NO: 359603 - RNA, 22 nt, Human
cccaggcacucuuggucauuuu

SEQ ID NO: 359604 - RNA, 22 nt, Human
gaaggagggugcggaucugagc

SEQ ID NO: 359605 - RNA, 22 nt, Human
gcacaauuauuuaugcaguaug

SEQ ID NO: 359606 - RNA, 22 nt, Human
ccucugcugcuguugagcaccg

SEQ ID NO: 359607 - RNA, 22 nt, Human
auguacauuuguaguaauauca

SEQ ID NO: 359608 - RNA, 22 nt, Human
gcaggugguccccguggagugg

SEQ ID NO: 359609 - RNA, 22 nt, Human
cuggcugugcugcaggcuuugg

SEQ ID NO: 359610 - RNA, 22 nt, Human
gacaguuuuuaauccuuucaug

SEQ ID NO: 359611 - RNA, 22 nt, Human
ucccuggcuguguucaggugcg

SEQ ID NO: 359612 - RNA, 23 nt, Human
aacaccaaggcucagagagauaa

SEQ ID NO: 359613 - RNA, 22 nt, Human
gguggguuuggaagagcaggcu

SEQ ID NO: 359614 - RNA, 22 nt, Human
gugucauuaaccaccaugcaaa

SEQ ID NO: 359615 - RNA, 22 nt, Human
aaguuguauauaccgcuuuaag

SEQ ID NO: 359616 - RNA, 22 nt, Human
acacugugcagauucccuguga

SEQ ID NO: 359617 - RNA, 22 nt, Human
accucugcaguagggcugugcc

SEQ ID NO: 359618 - RNA, 22 nt, Human
ugcauggacucaucagacaaga

SEQ ID NO: 359619 - RNA, 22 nt, Human
gauacauuuuaucuccuaacag

SEQ ID NO: 359620 - RNA, 22 nt, Human
ccgggccucgggacaccgggua

SEQ ID NO: 359621 - RNA, 20 nt, Human
ugcagggccuaaaaagggaa

SEQ ID NO: 359622 - RNA, 22 nt, Human
aaauaguucagcuuguaaaccc

SEQ ID NO: 359623 - RNA, 22 nt, Human
ucagcugccucucccuggaaga

SEQ ID NO: 359624 - RNA, 22 nt, Human
ggaggccauaguuugggaguca

SEQ ID NO: 359625 - RNA, 22 nt, Human
uuuauucaucaucuguucauau

SEQ ID NO: 359626 - RNA, 22 nt, Human
cggggcaggagucccuguagag

SEQ ID NO: 359627 - RNA, 22 nt, Human
gugugccagacaugaugcuaug

SEQ ID NO: 359628 - RNA, 22 nt, Human
acaauguguuuuuauacauuug

SEQ ID NO: 359629 - RNA, 22 nt, Human
caugcuccaaaaacaagagaau

SEQ ID NO: 359630 - RNA, 22 nt, Human
uucuucuucaagugcugcauuc

SEQ ID NO: 359631 - RNA, 22 nt, Human
cucccagggucuaggcugcugg

SEQ ID NO: 359632 - RNA, 22 nt, Human
gggaucagaaacauagcccuga

SEQ ID NO: 359633 - RNA, 18 nt, Human
gccagagggaagcaggug

SEQ ID NO: 359634 - RNA, 21 nt, Human
uggagacucugguucuuugug

SEQ ID NO: 359635 - RNA, 22 nt, Human
gcugcugucagugguggcaguu

SEQ ID NO: 359636 - RNA, 22 nt, Human
agccauugaauuuagugccuuu

SEQ ID NO: 359637 - RNA, 22 nt, Human
ccacagggugucaucagcuuga

SEQ ID NO: 359638 - RNA, 22 nt, Human
cccaggagguggagguugcggu

SEQ ID NO: 359639 - RNA, 22 nt, Human
agagcuuagaauuucagaugau

SEQ ID NO: 359640 - RNA, 22 nt, Human
ugcagggaaaacccaggaugcu

SEQ ID NO: 359641 - RNA, 22 nt, Human
uggagaaggggcagggucucca

SEQ ID NO: 359642 - RNA, 21 nt, Human
aggcucagagaucaaacagua

SEQ ID NO: 359643 - RNA, 22 nt, Human
ccagguggcuucugcccgaugu

SEQ ID NO: 359644 - RNA, 22 nt, Human
ggagaggugaauggcugcucua

SEQ ID NO: 359645 - RNA, 22 nt, Human
acaaaggcagagaauucaacau

SEQ ID NO: 359646 - RNA, 22 nt, Human
ugaaaugauaucugauaacaaa

SEQ ID NO: 359647 - RNA, 22 nt, Human
gcugccucugcgacucugggcg

SEQ ID NO: 359648 - RNA, 22 nt, Human
guggccuggauagacuccaucu

SEQ ID NO: 359649 - RNA, 22 nt, Human
aaagacacacagugcuucaguu

SEQ ID NO: 359650 - RNA, 22 nt, Human
aguggcaguagaugagcugguu

SEQ ID NO: 359651 - RNA, 22 nt, Human
aguggccagugcugcucugggg

SEQ ID NO: 359652 - RNA, 22 nt, Human
agggagcucaguuggaagcggu

SEQ ID NO: 359653 - RNA, 22 nt, Human
caguuucuuaucuucaaaauug

SEQ ID NO: 359654 - RNA, 21 nt, Human
uccuguaagcuuggguggcuc

SEQ ID NO: 359655 - RNA, 22 nt, Human
ggagguggcagagggacauucu

SEQ ID NO: 359656 - RNA, 22 nt, Human
cucaggauuuaaaggggcacuc

SEQ ID NO: 359657 - RNA, 22 nt, Human
aaaauaacuucuacuauuugca

SEQ ID NO: 359658 - RNA, 22 nt, Human
uuaaugauaccuauguuaauuu

SEQ ID NO: 359659 - RNA, 22 nt, Human
agcugccagaugacagugcuau

SEQ ID NO: 359660 - RNA, 22 nt, Human
auaauuuacaacugcuuuuaau

SEQ ID NO: 359661 - RNA, 22 nt, Human
acagcagcgucaacuuaaaauu

SEQ ID NO: 359662 - RNA, 22 nt, Human
acacagggcggaaagcaugaga

SEQ ID NO: 359663 - RNA, 22 nt, Human
cauuauggcagccaggauauug

SEQ ID NO: 359664 - RNA, 22 nt, Human
caguuuauaugucagagcugua

SEQ ID NO: 359665 - RNA, 22 nt, Human
uggaugcuguaggacacgcucu

SEQ ID NO: 359666 - RNA, 22 nt, Human
cuccagugagugagcaggcgac

SEQ ID NO: 359667 - RNA, 22 nt, Human
cuguucauggaaaaauaguugg

SEQ ID NO: 359668 - RNA, 22 nt, Human
cagcuguggagggaggaaaugc

SEQ ID NO: 359669 - RNA, 22 nt, Human
cagaugagaguggccaggguuc

SEQ ID NO: 359670 - RNA, 22 nt, Human
cccaggacucggcacucuccuu

SEQ ID NO: 359671 - RNA, 22 nt, Human
cagggcuggcucaugaaaaguu

SEQ ID NO: 359672 - RNA, 19 nt, Human
ccagcagcuuugauucucu

SEQ ID NO: 359673 - RNA, 22 nt, Human
uuccucuagcuucucacuaaca

SEQ ID NO: 359674 - RNA, 22 nt, Human
uuucuaguaaucaauauaaagu

SEQ ID NO: 359675 - RNA, 22 nt, Human
accaugaucugcucugguguuu

SEQ ID NO: 359676 - RNA, 22 nt, Human
cagaauuuagcacaauguaugg

SEQ ID NO: 359677 - RNA, 22 nt, Human
ugcauaaacuucucugguguga

SEQ ID NO: 359678 - RNA, 22 nt, Human
caguugcuggaugugcagcucu

SEQ ID NO: 359679 - RNA, 22 nt, Human
ggcaggguggcccuccagugag

SEQ ID NO: 359680 - RNA, 22 nt, Human
uuuagggaauagaagaucugaa

SEQ ID NO: 359681 - RNA, 22 nt, Human
ucauggauggccgggaggugau

SEQ ID NO: 359682 - RNA, 22 nt, Human
augcagguugggcaaguguggg

SEQ ID NO: 359683 - RNA, 22 nt, Human
cuauuucugccuaaugaccugu

SEQ ID NO: 359684 - RNA, 22 nt, Human
ugcugucugauucagggugauu

SEQ ID NO: 359685 - RNA, 22 nt, Human
cuggccugcugggugagguccu

SEQ ID NO: 359686 - RNA, 22 nt, Human
cccaggccccagggcuugucag

SEQ ID NO: 359687 - RNA, 20 nt, Human
ggccugagcauggcuggcag

SEQ ID NO: 359688 - RNA, 22 nt, Human
gugcaggagguaacauagcaaa

SEQ ID NO: 359689 - RNA, 22 nt, Human
ggagagcaggguccugagauac

SEQ ID NO: 359690 - RNA, 22 nt, Human
ucauuuguugaacuuuagugcg

SEQ ID NO: 359691 - RNA, 22 nt, Human
caguccuuucugaaauccuaua

SEQ ID NO: 359692 - RNA, 22 nt, Human
cuacuuuaauuuucugcagaga

SEQ ID NO: 359693 - RNA, 20 nt, Human
gugcauuucaccuguacugu

SEQ ID NO: 359694 - RNA, 22 nt, Human
aaggcucuuggagugaaugcag

SEQ ID NO: 359695 - RNA, 20 nt, Human
ugugugcacacaugacauuc

SEQ ID NO: 359696 - RNA, 22 nt, Human
uuuuuccuagcgauuugucagc

SEQ ID NO: 359697 - RNA, 22 nt, Human
guuuucaauuauaagauggcuu

SEQ ID NO: 359698 - RNA, 22 nt, Human
uggaggcauaggccugggcccu

SEQ ID NO: 359699 - RNA, 22 nt, Human
gccucugcacuguggcacacca

SEQ ID NO: 359700 - RNA, 22 nt, Human
uaauuucaaguuuagggcucua

SEQ ID NO: 359701 - RNA, 23 nt, Human
ccaggcaguagcuauugaaguga

SEQ ID NO: 359702 - RNA, 22 nt, Human
gagaaagauguaggcugggagg

SEQ ID NO: 359703 - RNA, 22 nt, Human
gaggcuggugguuaguuccauu

SEQ ID NO: 359704 - RNA, 22 nt, Human
aaaugcacucugcuucugugac

SEQ ID NO: 359705 - RNA, 22 nt, Human
uuccuauuuccaugaaacacaa

SEQ ID NO: 359706 - RNA, 22 nt, Human
caaguccuuagaugguucuuug

SEQ ID NO: 359707 - RNA, 22 nt, Human
uugcauaaaagaguauaucuua

SEQ ID NO: 359708 - RNA, 22 nt, Human
aaggcacuagcaagcugccugg

SEQ ID NO: 359709 - RNA, 22 nt, Human
guguugaugacauuuuagaaac

SEQ ID NO: 359710 - RNA, 22 nt, Human
cagcugggugaucuugggcagg

SEQ ID NO: 359711 - RNA, 23 nt, Human
auauggcuguuguguguuaacau

SEQ ID NO: 359712 - RNA, 22 nt, Human
agagccugugauugucaucacc

SEQ ID NO: 359713 - RNA, 22 nt, Human
cugggcuucucccccuggcaga

SEQ ID NO: 359714 - RNA, 22 nt, Human
cauuucugugacacuuccaucu

SEQ ID NO: 359715 - RNA, 22 nt, Human
ccacagagacagagcccagggu

SEQ ID NO: 359716 - RNA, 20 nt, Human
aggaaaaggguggugguaga

SEQ ID NO: 359717 - RNA, 22 nt, Human
cucugggcaaguaugauagaaa

SEQ ID NO: 359718 - RNA, 17 nt, Human
uggagcugcguguguuc

SEQ ID NO: 359719 - RNA, 22 nt, Human
uuucuucagagagagcuuuccc

SEQ ID NO: 359720 - RNA, 22 nt, Human
gugcuaggauuacaggcauggg

SEQ ID NO: 359721 - RNA, 22 nt, Human
ggccugagucacaucaggagag

SEQ ID NO: 359722 - RNA, 22 nt, Human
caaaugaagggagcugaagucu

SEQ ID NO: 359723 - RNA, 22 nt, Human
uuccaggaagauucaacaaaag

SEQ ID NO: 359724 - RNA, 22 nt, Human
agagcugagcaccaagcauggu

SEQ ID NO: 359725 - RNA, 22 nt, Human
agaaggcagaugggacggagca

SEQ ID NO: 359726 - RNA, 22 nt, Human
aggaagcccaagucucaucuuc

SEQ ID NO: 359727 - RNA, 22 nt, Human
acauugaucagccucccaugca

SEQ ID NO: 359728 - RNA, 18 nt, Human
agaguguucucagugaaa

SEQ ID NO: 359729 - RNA, 22 nt, Human
uggagcagccaugaugacagag

SEQ ID NO: 359730 - RNA, 22 nt, Human
aacaggcaggagaauucugccu

SEQ ID NO: 359731 - RNA, 22 nt, Human
aucaauucuuaggaaaauagcu

SEQ ID NO: 359732 - RNA, 22 nt, Human
cucagggacguuagaggacagg

SEQ ID NO: 359733 - RNA, 21 nt, Human
aaaugaaugugguagugcaag

SEQ ID NO: 359734 - RNA, 22 nt, Human
uuugacaguaauaaagcacaag

SEQ ID NO: 359735 - RNA, 22 nt, Human
auuuccaccggcucaggaaguu

SEQ ID NO: 359736 - RNA, 22 nt, Human
cugggaugucuauagaacacuu

SEQ ID NO: 359737 - RNA, 22 nt, Human
auucacaaagaagggaaguaca

SEQ ID NO: 359738 - RNA, 18 nt, Human
cugaaggauccaggugua

SEQ ID NO: 359739 - RNA, 22 nt, Human
ucugagcuggagcccaucaccu

SEQ ID NO: 359740 - RNA, 22 nt, Human
ugguccaggguguaguacagag

SEQ ID NO: 359741 - RNA, 22 nt, Human
auagucuuagucuauaguuuug

SEQ ID NO: 359742 - RNA, 22 nt, Human
ccucacugcuauguguuugcuc

SEQ ID NO: 359743 - RNA, 22 nt, Human
cuuacaaaggagaggagauagg

SEQ ID NO: 359744 - RNA, 22 nt, Human
uuugaaguggaaaaggauuuaa

SEQ ID NO: 359745 - RNA, 22 nt, Human
gcugccacgaucucugcuguag

SEQ ID NO: 359746 - RNA, 22 nt, Human
uugggaaggcguggaagcagaa

SEQ ID NO: 359747 - RNA, 22 nt, Human
ugagccaguggaagauggcagu

SEQ ID NO: 359748 - RNA, 22 nt, Human
uugucuguccaggcaccccaag

SEQ ID NO: 359749 - RNA, 22 nt, Human
gcagggcacacaagaaugauaa

SEQ ID NO: 359750 - RNA, 22 nt, Human
ugccacacagcuguaugaggga

SEQ ID NO: 359751 - RNA, 22 nt, Human
ugguaaauauguccauucucuu

SEQ ID NO: 359752 - RNA, 22 nt, Human
acacauaagccuaaucaucucc

SEQ ID NO: 359753 - RNA, 22 nt, Human
caagagcuggguggcaagcuag

SEQ ID NO: 359754 - RNA, 22 nt, Human
accaggaguugggggugggacc

SEQ ID NO: 359755 - RNA, 22 nt, Human
ggcugcagaaguacuuccggau

SEQ ID NO: 359756 - RNA, 22 nt, Human
auagaauucguguuuguaauuc

SEQ ID NO: 359757 - RNA, 22 nt, Human
uugcuucaguagcucuuuaaag

SEQ ID NO: 359758 - RNA, 22 nt, Human
ugggcagacgcuguuggaaggc

SEQ ID NO: 359759 - RNA, 22 nt, Human
ucaaagucauggcaggcucaga

SEQ ID NO: 359760 - RNA, 22 nt, Human
ucucaggggauucacuggcacc

SEQ ID NO: 359761 - RNA, 22 nt, Human
ugcaccugagaggucucugagg

SEQ ID NO: 359762 - RNA, 22 nt, Human
ucucagggccccaaaggcuagu

SEQ ID NO: 359763 - RNA, 21 nt, Human
aaggccugcuuacugcuaguu

SEQ ID NO: 359764 - RNA, 22 nt, Human
aaaagccaugcauaccuaagag

SEQ ID NO: 359765 - RNA, 22 nt, Human
augcuguguauuuuacucuuuc

SEQ ID NO: 359766 - RNA, 22 nt, Human
uuaugauuugccacagauuggu

SEQ ID NO: 359767 - RNA, 22 nt, Human
gggagggacacaaagaguuccc

SEQ ID NO: 359768 - RNA, 22 nt, Human
cagguaagagacggauuggccc

SEQ ID NO: 359769 - RNA, 22 nt, Human
aggccugaggaccagauaaaug

SEQ ID NO: 359770 - RNA, 22 nt, Human
auggaaagggaagcaaggaaca

SEQ ID NO: 359771 - RNA, 22 nt, Human
uuuccucuccaccaggaggucu

SEQ ID NO: 359772 - RNA, 22 nt, Human
aggaagcuagagccaccggacu

SEQ ID NO: 359773 - RNA, 22 nt, Human
ggguggcuccuaugggcauagc

SEQ ID NO: 359774 - RNA, 22 nt, Human
ggcgaggccgggacaggcugga

SEQ ID NO: 359775 - RNA, 22 nt, Human
uucaaauacauucuuugccacu

SEQ ID NO: 359776 - RNA, 22 nt, Human
agggcuccaaggaaguguagcu

SEQ ID NO: 359777 - RNA, 19 nt, Human
acagagcucucugcuucug

SEQ ID NO: 359778 - RNA, 20 nt, Human
ucagagagagggugccacuu

SEQ ID NO: 359779 - RNA, 21 nt, Human
gggagcuggaaacugggugac

SEQ ID NO: 359780 - RNA, 22 nt, Human
ggagacagugguagggccuaag

SEQ ID NO: 359781 - RNA, 22 nt, Human
uaguaaaaguuuaguugaaagu

SEQ ID NO: 359782 - RNA, 22 nt, Human
ugcagagguuuccaggcaaguu

SEQ ID NO: 359783 - RNA, 22 nt, Human
agggucaguucugugagguguu

SEQ ID NO: 359784 - RNA, 22 nt, Human
ugaagacagaccaaggagaaug

SEQ ID NO: 359785 - RNA, 22 nt, Human
gagggcaguagccucguacccu

SEQ ID NO: 359786 - RNA, 22 nt, Human
guccuggcuuaguucgcuguaa

SEQ ID NO: 359787 - RNA, 22 nt, Human
caagcagacaguaggccuagaa

SEQ ID NO: 359788 - RNA, 22 nt, Human
guuuuauaggcuguugcuauau

SEQ ID NO: 359789 - RNA, 22 nt, Human
aaaugcacagguuuuaaauccu

SEQ ID NO: 359790 - RNA, 22 nt, Human
cagcuccugccugggcagcugu

SEQ ID NO: 359791 - RNA, 22 nt, Human
uccugucugcucacagagcugg

SEQ ID NO: 359792 - RNA, 21 nt, Human
uuugaaagcccuauguuuuca

SEQ ID NO: 359793 - RNA, 22 nt, Human
ccaggugguucaggucaccaua

SEQ ID NO: 359794 - RNA, 22 nt, Human
auuaggcacuagaaugucaauu

SEQ ID NO: 359795 - RNA, 21 nt, Human
uucaauacuauuucaauaguc

SEQ ID NO: 359796 - RNA, 22 nt, Human
uaaugaauaaacuugagaguca

SEQ ID NO: 359797 - RNA, 22 nt, Human
ugcagggccuugggaugugucc

SEQ ID NO: 359798 - RNA, 22 nt, Human
gccucugcaucaucacuccagc

SEQ ID NO: 359799 - RNA, 22 nt, Human
ucuauacugaugggauacuauu

SEQ ID NO: 359800 - RNA, 22 nt, Human
ggcuuuauaggguagaggauca

SEQ ID NO: 359801 - RNA, 22 nt, Human
augacagaggagugcaggugau

SEQ ID NO: 359802 - RNA, 22 nt, Human
ucuuccucuagaucugaggccc

SEQ ID NO: 359803 - RNA, 22 nt, Human
gguagcacauugcauuaggaga

SEQ ID NO: 359804 - RNA, 22 nt, Human
uagcuuuaagacauggugaaug

SEQ ID NO: 359805 - RNA, 22 nt, Human
cccagcaggaggagguugcagu

SEQ ID NO: 359806 - RNA, 22 nt, Human
gagucgagcagaaagccgucgg

SEQ ID NO: 359807 - RNA, 22 nt, Human
aggacagugguguucuggagug

SEQ ID NO: 359808 - RNA, 20 nt, Human
uuccagagaucugcauuuua

SEQ ID NO: 359809 - RNA, 22 nt, Human
ggggaugguagaccggugacgu

SEQ ID NO: 359810 - RNA, 22 nt, Human
ccagcuuucauaucaugaggua

SEQ ID NO: 359811 - RNA, 22 nt, Human
ccucagggccaucucugucccu

SEQ ID NO: 359812 - RNA, 23 nt, Human
cccagcuuucccacugccgagag

SEQ ID NO: 359813 - RNA, 23 nt, Human
acagcaagaggaccagaugugag

SEQ ID NO: 359814 - RNA, 22 nt, Human
ccugcugugaagccaggccugu

SEQ ID NO: 359815 - RNA, 22 nt, Human
uaucaagugacuaucacagaac

SEQ ID NO: 359816 - RNA, 22 nt, Human
cucaggauauugggcuggagca

SEQ ID NO: 359817 - RNA, 22 nt, Human
aggccagcucuacccuuggacu

SEQ ID NO: 359818 - RNA, 22 nt, Human
gccauccucugagcacuaggca

SEQ ID NO: 359819 - RNA, 22 nt, Human
cagggcagaacauauagauagu

SEQ ID NO: 359820 - RNA, 22 nt, Human
aguuuucuguucuacaauuuga

SEQ ID NO: 359821 - RNA, 22 nt, Human
acuuucugcaguguuggaaaug

SEQ ID NO: 359822 - RNA, 22 nt, Human
uguuuguucccucucuuuccug

SEQ ID NO: 359823 - RNA, 22 nt, Human
cugaggccucuguucaccagaa

SEQ ID NO: 359824 - RNA, 22 nt, Human
guagggacuguucucaccugag

SEQ ID NO: 359825 - RNA, 22 nt, Human
guucagggagggacagaugaag

SEQ ID NO: 359826 - RNA, 22 nt, Human
ugcuuuauguuaucagaagggu

SEQ ID NO: 359827 - RNA, 22 nt, Human
ucacaguaucacacaaggauua

SEQ ID NO: 359828 - RNA, 22 nt, Human
auugacaagugagcugggcugc

SEQ ID NO: 359829 - RNA, 22 nt, Human
ucuggccacccgaggccccugc

SEQ ID NO: 359830 - RNA, 22 nt, Human
ucaaagucucugcuucuguaac

SEQ ID NO: 359831 - RNA, 22 nt, Human
cugaagcaaaggaucgagcuaa

SEQ ID NO: 359832 - RNA, 22 nt, Human
ucauuuguacuugugugcuugu

SEQ ID NO: 359833 - RNA, 22 nt, Human
gccagagguaucaaagauagua

SEQ ID NO: 359834 - RNA, 22 nt, Human
gccaccagggggcuccagugag

SEQ ID NO: 359835 - RNA, 22 nt, Human
ucucuucuauuugagacuauuu

SEQ ID NO: 359836 - RNA, 22 nt, Human
aagaggaacugggggcugaguc

SEQ ID NO: 359837 - RNA, 22 nt, Human
uccagggaagagcagaggcuac

SEQ ID NO: 359838 - RNA, 22 nt, Human
caaaggcugccacuguggcugu

SEQ ID NO: 359839 - RNA, 23 nt, Human
ucuugaaaagccuacagcaguuc

SEQ ID NO: 359840 - RNA, 22 nt, Human
ugggcagggagcuggaaccaca

SEQ ID NO: 359841 - RNA, 22 nt, Human
auaguuugugaaacacagcagu

SEQ ID NO: 359842 - RNA, 22 nt, Human
gucucccaaccccugugcccag

SEQ ID NO: 359843 - RNA, 22 nt, Human
gugcaggggccuccccuugcug

SEQ ID NO: 359844 - RNA, 22 nt, Human
uuuuaaguuaauauaauugagg

SEQ ID NO: 359845 - RNA, 22 nt, Human
caggcauggugagaacucagcc

SEQ ID NO: 359846 - RNA, 22 nt, Human
aggauuuacuagcaaggauucu

SEQ ID NO: 359847 - RNA, 22 nt, Human
ccugucucuuucaaucugagag

SEQ ID NO: 359848 - RNA, 22 nt, Human
ucagaacagaagaaggaacacg

SEQ ID NO: 359849 - RNA, 17 nt, Human
cuuuuaauuuacuuccc

SEQ ID NO: 359850 - RNA, 19 nt, Human
guggccucggagcgcgcgg

SEQ ID NO: 359851 - RNA, 20 nt, Human
aggcacuggauuucuuauau

SEQ ID NO: 359852 - RNA, 22 nt, Human
agaagccaauccuugucucucu

SEQ ID NO: 359853 - RNA, 22 nt, Human
uacagaagcugagacacugaga

SEQ ID NO: 359854 - RNA, 22 nt, Human
cagcuggccccacaguagaggc

SEQ ID NO: 359855 - RNA, 22 nt, Human
ggagccagggaagcugcuuccu

SEQ ID NO: 359856 - RNA, 22 nt, Human
aaagcucacaguaauacaaggc

SEQ ID NO: 359857 - RNA, 22 nt, Human
uccagagcagguggucagaagg

SEQ ID NO: 359858 - RNA, 22 nt, Human
gggcucuguccauuccuucaua

SEQ ID NO: 359859 - RNA, 22 nt, Human
auaugaaaauguuuuagcugua

SEQ ID NO: 359860 - RNA, 22 nt, Human
caggcagcugaggacuuugcua

SEQ ID NO: 359861 - RNA, 22 nt, Human
uaccugcagcgggaauccauua

SEQ ID NO: 359862 - RNA, 22 nt, Human
ggcagcugcaaaucugcucugu

SEQ ID NO: 359863 - RNA, 22 nt, Human
cuggguaaguuccuaaggcuca

SEQ ID NO: 359864 - RNA, 21 nt, Human
aggugccaaggagaagcaggc

SEQ ID NO: 359865 - RNA, 22 nt, Human
ggccugugagcccuugcaugua

SEQ ID NO: 359866 - RNA, 22 nt, Human
uucaagucaaggaaagaggucu

SEQ ID NO: 359867 - RNA, 22 nt, Human
cagccaggagcucccccugcuc

SEQ ID NO: 359868 - RNA, 22 nt, Human
agggagaaaauuggaugcacaa

SEQ ID NO: 359869 - RNA, 22 nt, Human
ucuggcuccaggaccgggcaca

SEQ ID NO: 359870 - RNA, 22 nt, Human
cauggcuuguaauaaauuuaua

SEQ ID NO: 359871 - RNA, 22 nt, Human
cccaggucugccagccuguggg

SEQ ID NO: 359872 - RNA, 22 nt, Human
uccuccucuaucagacagugcc

SEQ ID NO: 359873 - RNA, 22 nt, Human
uucuuucccuuccagcagcucc

SEQ ID NO: 359874 - RNA, 22 nt, Human
agcuguggaguaggggguugga

SEQ ID NO: 359875 - RNA, 22 nt, Human
uccagcuuugagauuuuaugga

SEQ ID NO: 359876 - RNA, 22 nt, Human
acagaugauuuuuaugaaaaca

SEQ ID NO: 359877 - RNA, 20 nt, Human
gcugccagugccugaugcuu

SEQ ID NO: 359878 - RNA, 22 nt, Human
ugcugcucaaugagaugccauc

SEQ ID NO: 359879 - RNA, 20 nt, Human
agaggaggauuauuuuauuc

SEQ ID NO: 359880 - RNA, 22 nt, Human
agaaaugggccuugggacacaa

SEQ ID NO: 359881 - RNA, 22 nt, Human
uguuuucauuugauguaacaaa

SEQ ID NO: 359882 - RNA, 22 nt, Human
ggucuuccgagaggccugugcu

SEQ ID NO: 359883 - RNA, 21 nt, Human
uccuuccuugagguccuuucc

SEQ ID NO: 359884 - RNA, 22 nt, Human
caggcacuggccagucagcaca

SEQ ID NO: 359885 - RNA, 19 nt, Human
ucucagagcccuagaggcc

SEQ ID NO: 359886 - RNA, 22 nt, Human
ucuucuuccuccacagggccca

SEQ ID NO: 359887 - RNA, 22 nt, Human
uuuucaguuccaucucugcucu

SEQ ID NO: 359888 - RNA, 22 nt, Human
auaucagaaauaguaagcagag

SEQ ID NO: 359889 - RNA, 22 nt, Human
augcacaagaggcuagaaaaga

SEQ ID NO: 359890 - RNA, 22 nt, Human
cauuucacaaauggccacauca

SEQ ID NO: 359891 - RNA, 22 nt, Human
gcaggaguguauuugcauguaa

SEQ ID NO: 359892 - RNA, 23 nt, Human
cauuucugggagauuuauaaaau

SEQ ID NO: 359893 - RNA, 22 nt, Human
ucugcaggaaaaaagugccugg

SEQ ID NO: 359894 - RNA, 22 nt, Human
caguguuccaggcggcagugaa

SEQ ID NO: 359895 - RNA, 22 nt, Human
gaggccuggcugggaggaggug

SEQ ID NO: 359896 - RNA, 22 nt, Human
ugccagugggugugcagagacu

SEQ ID NO: 359897 - RNA, 22 nt, Human
ucuguccucuuugaagcugcuc

SEQ ID NO: 359898 - RNA, 22 nt, Human
gggugcugacuggggccugaaa

SEQ ID NO: 359899 - RNA, 22 nt, Human
aagacaauuugauacuaguugc

SEQ ID NO: 359900 - RNA, 22 nt, Human
cuucuucacacuggucugaagc

SEQ ID NO: 359901 - RNA, 22 nt, Human
gccuaggagacaagcgugaaag

SEQ ID NO: 359902 - RNA, 22 nt, Human
uauggcuuuucauuccuaugug

SEQ ID NO: 359903 - RNA, 22 nt, Human
ugcagggaaagggcacugggcu

SEQ ID NO: 359904 - RNA, 22 nt, Human
ucagagaguccuggucauuugc

SEQ ID NO: 359905 - RNA, 22 nt, Human
auuugucuagugguauucacgu

SEQ ID NO: 359906 - RNA, 22 nt, Human
ggcugcugguagggguaggaag

SEQ ID NO: 359907 - RNA, 22 nt, Human
cuggugagacgguugacaggag

SEQ ID NO: 359908 - RNA, 22 nt, Human
ugggcagacauugaguuuguuc

SEQ ID NO: 359909 - RNA, 22 nt, Human
auaaggcagaaauagggaaagu

SEQ ID NO: 359910 - RNA, 22 nt, Human
uccaagggcagccauagaacuu

SEQ ID NO: 359911 - RNA, 22 nt, Human
gagccagcgccuugccucuggg

SEQ ID NO: 359912 - RNA, 22 nt, Human
auuauucaacacuugagaaauu

SEQ ID NO: 359913 - RNA, 21 nt, Human
agguggggcugcaccucugcu

SEQ ID NO: 359914 - RNA, 22 nt, Human
auguguuuguaccuuuaaauau

SEQ ID NO: 359915 - RNA, 22 nt, Human
ccagcuggugggucuuucucug

SEQ ID NO: 359916 - RNA, 22 nt, Human
cccagcucaucaggagccgccc

SEQ ID NO: 359917 - RNA, 22 nt, Human
uagaagcaguaauagaaauagg

SEQ ID NO: 359918 - RNA, 22 nt, Human
ugucccauggauaccaggcuau

SEQ ID NO: 359919 - RNA, 22 nt, Human
gucaggauuauaauccccaugg

SEQ ID NO: 359920 - RNA, 22 nt, Human
uuucagacaggacuucauaugu

SEQ ID NO: 359921 - RNA, 22 nt, Human
gugagcagaacagguggcuucu

SEQ ID NO: 359922 - RNA, 22 nt, Human
uucauugucucuguuugccuuc

SEQ ID NO: 359923 - RNA, 22 nt, Human
gcccggcagucacacacccagg

SEQ ID NO: 359924 - RNA, 22 nt, Human
uccaggaggaggaaggcugcca

SEQ ID NO: 359925 - RNA, 22 nt, Human
ugcugccaaaugcgagcucugu

SEQ ID NO: 359926 - RNA, 22 nt, Human
uaaagguaugucuuaaucaaac

SEQ ID NO: 359927 - RNA, 22 nt, Human
acagaacuuccugcuggagugg

SEQ ID NO: 359928 - RNA, 22 nt, Human
acaauuccacauggcaugcagg

SEQ ID NO: 359929 - RNA, 19 nt, Human
uggaccugugcccauggcu

SEQ ID NO: 359930 - RNA, 22 nt, Human
acauuuaaugauccuacuguga

SEQ ID NO: 359931 - RNA, 22 nt, Human
agguauagaauugaaaggguuu

SEQ ID NO: 359932 - RNA, 22 nt, Human
gcagagcugggucuguauccaa

SEQ ID NO: 359933 - RNA, 22 nt, Human
cccagccuuugcuuccugguuc

SEQ ID NO: 359934 - RNA, 22 nt, Human
aaaguucagugccuucuauaca

SEQ ID NO: 359935 - RNA, 19 nt, Human
agaaucaggucaggugaca

SEQ ID NO: 359936 - RNA, 17 nt, Human
agugacuuggaaagagc

SEQ ID NO: 359937 - RNA, 22 nt, Human
agucuucagagaaauuaacucu

SEQ ID NO: 359938 - RNA, 22 nt, Human
agaguggggaagguguugagaa

SEQ ID NO: 359939 - RNA, 22 nt, Human
aaaguguugggauuacaggugu

SEQ ID NO: 359940 - RNA, 22 nt, Human
uuucugcugugcuuucuugcgu

SEQ ID NO: 359941 - RNA, 22 nt, Human
caacaguguugcaaucugaaaa

SEQ ID NO: 359942 - RNA, 23 nt, Human
guaaaauacgcagugcaguguga

SEQ ID NO: 359943 - RNA, 22 nt, Human
gcuggccaguguggugaccacc

SEQ ID NO: 359944 - RNA, 22 nt, Human
ugacccugcuucuuggugcagg

SEQ ID NO: 359945 - RNA, 22 nt, Human
gcuggccauucucuuugagaug

SEQ ID NO: 359946 - RNA, 22 nt, Human
cagcugggagcuccauuagaua

SEQ ID NO: 359947 - RNA, 22 nt, Human
gcuggagauaguaggauccaua

SEQ ID NO: 359948 - RNA, 22 nt, Human
agcagcuggggccugugacgau

SEQ ID NO: 359949 - RNA, 22 nt, Human
aagagggaggugcgggugcaga

SEQ ID NO: 359950 - RNA, 22 nt, Human
gcaaaugcuaaaguguagagac

SEQ ID NO: 359951 - RNA, 20 nt, Human
aaaaucucccagaaacuuau

SEQ ID NO: 359952 - RNA, 22 nt, Human
guggccugccagcagauggcgc

SEQ ID NO: 359953 - RNA, 22 nt, Human
aaauguguuugauaggaauauu

SEQ ID NO: 359954 - RNA, 22 nt, Human
acagauuuuauuauucagguau

SEQ ID NO: 359955 - RNA, 22 nt, Human
gagaagcagguuuagcagacaa

SEQ ID NO: 359956 - RNA, 22 nt, Human
ugcuauaagaauuauauuacuc

SEQ ID NO: 359957 - RNA, 22 nt, Human
cuggcuccauccuugagcucug

SEQ ID NO: 359958 - RNA, 22 nt, Human
uccuucagaaaaccucagucuu

SEQ ID NO: 359959 - RNA, 22 nt, Human
aggagcugacuuguaaagcauu

SEQ ID NO: 359960 - RNA, 22 nt, Human
ggcuuuauuugcagccauuguu

SEQ ID NO: 359961 - RNA, 22 nt, Human
gugauuucaaauauagagugag

SEQ ID NO: 359962 - RNA, 22 nt, Human
agauuucagaugcucggcaguu

SEQ ID NO: 359963 - RNA, 22 nt, Human
augccagucaaagaagaugaca

SEQ ID NO: 359964 - RNA, 22 nt, Human
cagacacagcaauucuguguug

SEQ ID NO: 359965 - RNA, 22 nt, Human
aggagaaggaggccccucacac

SEQ ID NO: 359966 - RNA, 22 nt, Human
aguaaacauagaauguucuucc

SEQ ID NO: 359967 - RNA, 18 nt, Human
acaggccucaguccugca

SEQ ID NO: 359968 - RNA, 22 nt, Human
ggcagcacgacaggaguggaag

SEQ ID NO: 359969 - RNA, 19 nt, Human
ugucuuaauuaacucagag

SEQ ID NO: 359970 - RNA, 22 nt, Human
augcuuuaaacuauaaauccac

SEQ ID NO: 359971 - RNA, 20 nt, Human
gcccuggagccuuguccugg

SEQ ID NO: 359972 - RNA, 22 nt, Human
agggcagagaaauguaguugag

SEQ ID NO: 359973 - RNA, 22 nt, Human
uguguuccugccuggcucuggu

SEQ ID NO: 359974 - RNA, 22 nt, Human
cugagggccuuggcuccugccc

SEQ ID NO: 359975 - RNA, 22 nt, Human
gccugggagggcagcagugugg

SEQ ID NO: 359976 - RNA, 22 nt, Human
caaguccaucagauaagcaaga

SEQ ID NO: 359977 - RNA, 22 nt, Human
gaaauauuacaguggaggggau

SEQ ID NO: 359978 - RNA, 19 nt, Human
aauguaguguuaugucaac

SEQ ID NO: 359979 - RNA, 22 nt, Human
guacuucccugggaggcaagca

SEQ ID NO: 359980 - RNA, 22 nt, Human
caaugaaagcaacugccuauaa

SEQ ID NO: 359981 - RNA, 22 nt, Human
accugcagguguuuccacacuu

SEQ ID NO: 359982 - RNA, 22 nt, Human
ucuucucucauguaggagggaa

SEQ ID NO: 359983 - RNA, 18 nt, Human
guucaaggucaagagaga

SEQ ID NO: 359984 - RNA, 22 nt, Human
ccuucccuaaagcgucgcuuag

SEQ ID NO: 359985 - RNA, 22 nt, Human
uagcagaaacuguuacagaagg

SEQ ID NO: 359986 - RNA, 22 nt, Human
ggaggccacgguuuagcaccga

SEQ ID NO: 359987 - RNA, 22 nt, Human
aggcaaaauuacaaaguuauua

SEQ ID NO: 359988 - RNA, 22 nt, Human
ucacagaacaauguuuaguucu

SEQ ID NO: 359989 - RNA, 22 nt, Human
agggccaccagagcagggcagu

SEQ ID NO: 359990 - RNA, 22 nt, Human
uaaauguguaaaccuccauuac

SEQ ID NO: 359991 - RNA, 22 nt, Human
gaggagaggggcucccaagagc

SEQ ID NO: 359992 - RNA, 22 nt, Human
gcucugaggcugggagcacucu

SEQ ID NO: 359993 - RNA, 18 nt, Human
ggcagcaagaagggaggg

SEQ ID NO: 359994 - RNA, 22 nt, Human
aaacugcugguugcuggccagc

SEQ ID NO: 359995 - RNA, 22 nt, Human
auaucaguaucuauguauuugu

SEQ ID NO: 359996 - RNA, 22 nt, Human
aaauuguugaucuacaguaagg

SEQ ID NO: 359997 - RNA, 22 nt, Human
ccugcccuagagaugacacaau

SEQ ID NO: 359998 - RNA, 22 nt, Human
acuguguggaaauuugugaggg

SEQ ID NO: 359999 - RNA, 22 nt, Human
gcugcccaggagagguggggcu

SEQ ID NO: 360000 - RNA, 21 nt, Human
cagaggcaggcucugugugug

SEQ ID NO: 360001 - RNA, 19 nt, Human
ugggaguggggaagguccu

SEQ ID NO: 360002 - RNA, 22 nt, Human
aagccagggauuccugagggag

SEQ ID NO: 360003 - RNA, 22 nt, Human
uugugaaauguuucaaaauagu

SEQ ID NO: 360004 - RNA, 22 nt, Human
ucagugcuucggcgagcaccua

SEQ ID NO: 360005 - RNA, 22 nt, Human
caggcuugggagcagagccacu

SEQ ID NO: 360006 - RNA, 22 nt, Human
ugcuggggucauggggcgcccg

SEQ ID NO: 360007 - RNA, 22 nt, Human
cagagcugcucaugguggccag

SEQ ID NO: 360008 - RNA, 22 nt, Human
acugcuuuucagagucugccug

SEQ ID NO: 360009 - RNA, 22 nt, Human
acagagcuuaauucaggagcuu

SEQ ID NO: 360010 - RNA, 22 nt, Human
aauuccagcuaggaaaagcuuc

SEQ ID NO: 360011 - RNA, 18 nt, Human
ggagagugacagagucgu

SEQ ID NO: 360012 - RNA, 22 nt, Human
ucaguaaaguucuuucuugcug

SEQ ID NO: 360013 - RNA, 22 nt, Human
gccuuuuuuguugcucugucac

SEQ ID NO: 360014 - RNA, 22 nt, Human
cagggcugaaaucaagguguag

SEQ ID NO: 360015 - RNA, 22 nt, Human
ugaccuauuagauuuccuugcc

SEQ ID NO: 360016 - RNA, 22 nt, Human
uugcaggaaacugagugugagc

SEQ ID NO: 360017 - RNA, 22 nt, Human
ugggcugcggauaggccucgga

SEQ ID NO: 360018 - RNA, 22 nt, Human
ugguccugccccgugcacagag

SEQ ID NO: 360019 - RNA, 22 nt, Human
ccucugaggucauggacuuggc

SEQ ID NO: 360020 - RNA, 22 nt, Human
uuugaaaggagcuuuauccaga

SEQ ID NO: 360021 - RNA, 22 nt, Human
acaaaugucuccucuuuuguua

SEQ ID NO: 360022 - RNA, 22 nt, Human
ucacaggaaccaucagagaaau

SEQ ID NO: 360023 - RNA, 22 nt, Human
cagcagcuuugccaagucagcc

SEQ ID NO: 360024 - RNA, 22 nt, Human
cugggacacccaaggaaagagc

SEQ ID NO: 360025 - RNA, 22 nt, Human
aucagcaaggcaaucacugcag

SEQ ID NO: 360026 - RNA, 22 nt, Human
agagccaggaugucuucugggg

SEQ ID NO: 360027 - RNA, 22 nt, Human
aagaacagguucuagaaccauu

SEQ ID NO: 360028 - RNA, 22 nt, Human
gacaauaaaaugaucuuacagu

SEQ ID NO: 360029 - RNA, 22 nt, Human
cagagccuaaaacgacuccacu

SEQ ID NO: 360030 - RNA, 22 nt, Human
uugacagcaaagauugugccua

SEQ ID NO: 360031 - RNA, 22 nt, Human
uaauacuuuugccuuguauuca

SEQ ID NO: 360032 - RNA, 22 nt, Human
caaguccucgcuucuagcugug

SEQ ID NO: 360033 - RNA, 22 nt, Human
ucacagaaggcaucacagaaga

SEQ ID NO: 360034 - RNA, 22 nt, Human
agcuggagcuucaagcagguaa

SEQ ID NO: 360035 - RNA, 22 nt, Human
gagggaugguaguugacacuga

SEQ ID NO: 360036 - RNA, 22 nt, Human
gaggcacaguguuuggucagug

SEQ ID NO: 360037 - RNA, 22 nt, Human
uggcugcugcuuggucuucuuc

SEQ ID NO: 360038 - RNA, 21 nt, Human
augucaaaugcuuuauuuuau

SEQ ID NO: 360039 - RNA, 22 nt, Human
aggcagagcugauguucuguga

SEQ ID NO: 360040 - RNA, 22 nt, Human
auucuucacuguuucagaauga

SEQ ID NO: 360041 - RNA, 22 nt, Human
acgagagguccuuagaaucugu

SEQ ID NO: 360042 - RNA, 22 nt, Human
gggagggaaagcuugaucuguc

SEQ ID NO: 360043 - RNA, 22 nt, Human
cagagcugguguuacaagucca

SEQ ID NO: 360044 - RNA, 22 nt, Human
uucauguguauggaacauuuuu

SEQ ID NO: 360045 - RNA, 22 nt, Human
uuugacagauccuuaacucagc

SEQ ID NO: 360046 - RNA, 22 nt, Human
auaugauuccacuauuguaugg

SEQ ID NO: 360047 - RNA, 22 nt, Human
uaugaagacaaugauagcauga

SEQ ID NO: 360048 - RNA, 21 nt, Human
uuucuucacuuugccccaugu

SEQ ID NO: 360049 - RNA, 22 nt, Human
auacagaagaacuauagccacu

SEQ ID NO: 360050 - RNA, 22 nt, Human
uggcaaggccacaggugcaguu

SEQ ID NO: 360051 - RNA, 22 nt, Human
ugaagaagccaauugguaggcu

SEQ ID NO: 360052 - RNA, 22 nt, Human
auguggaggaaaugaguguaca

SEQ ID NO: 360053 - RNA, 22 nt, Human
agggccugggauguccuccuag

SEQ ID NO: 360054 - RNA, 22 nt, Human
aaguccauucuuccagccagcu

SEQ ID NO: 360055 - RNA, 22 nt, Human
agcgagggaggucugaggacag

SEQ ID NO: 360056 - RNA, 22 nt, Human
ccuggccacucagguguggggc

SEQ ID NO: 360057 - RNA, 22 nt, Human
cagcuacuccucccaugacuuc

SEQ ID NO: 360058 - RNA, 22 nt, Human
uucuacagacuauaacugugau

SEQ ID NO: 360059 - RNA, 22 nt, Human
gguuggaggugggaauagcuag

SEQ ID NO: 360060 - RNA, 22 nt, Human
ggcucccaggagggccuggagg

SEQ ID NO: 360061 - RNA, 22 nt, Human
acccaggagcucugggguccuc

SEQ ID NO: 360062 - RNA, 22 nt, Human
acuacuuugggccauuuguuua

SEQ ID NO: 360063 - RNA, 22 nt, Human
uucuucuuuaucucaguauccu

SEQ ID NO: 360064 - RNA, 22 nt, Human
ggcucuggaaaguguccuugau

SEQ ID NO: 360065 - RNA, 22 nt, Human
aaaucucacuguagucaaagug

SEQ ID NO: 360066 - RNA, 22 nt, Human
ucacaaauauuuuaacaguagg

SEQ ID NO: 360067 - RNA, 22 nt, Human
uaauccaggguauucuaguuuc

SEQ ID NO: 360068 - RNA, 22 nt, Human
ccuguguggaaaccgcaugacg

SEQ ID NO: 360069 - RNA, 22 nt, Human
agccagcaugaagacagaggcc

SEQ ID NO: 360070 - RNA, 22 nt, Human
aagggcucugggcuacgcacug

SEQ ID NO: 360071 - RNA, 22 nt, Human
gggcugaaaggccgccucagau

SEQ ID NO: 360072 - RNA, 22 nt, Human
aggcacuggguaauuaguagcu

SEQ ID NO: 360073 - RNA, 22 nt, Human
ucucagaguuuacggggcugaa

SEQ ID NO: 360074 - RNA, 22 nt, Human
agacaggacacaagcugcauaa

SEQ ID NO: 360075 - RNA, 22 nt, Human
ccuuccaggagucucugcaggu

SEQ ID NO: 360076 - RNA, 22 nt, Human
ucuguucacugagcaauggcaa

SEQ ID NO: 360077 - RNA, 22 nt, Human
agacucaagcagauaggaauua

SEQ ID NO: 360078 - RNA, 22 nt, Human
ucaaaugcacguagagaaaaua

SEQ ID NO: 360079 - RNA, 22 nt, Human
uggcugagaaugggaugaugcc

SEQ ID NO: 360080 - RNA, 22 nt, Human
guuuggggucugcagagcggcg

SEQ ID NO: 360081 - RNA, 22 nt, Human
agucaguuaaccucacagcauc

SEQ ID NO: 360082 - RNA, 22 nt, Human
ugcugccacauuuaaagagggg

SEQ ID NO: 360083 - RNA, 22 nt, Human
uggguagagcaggcuggggcuu

SEQ ID NO: 360084 - RNA, 22 nt, Human
aagauuuagggccaguuuacau

SEQ ID NO: 360085 - RNA, 22 nt, Human
ggcauuuauuugucucauucuu

SEQ ID NO: 360086 - RNA, 22 nt, Human
auccuugagaaaauaaaugacc

SEQ ID NO: 360087 - RNA, 22 nt, Human
auggagggugguaagacagaga

SEQ ID NO: 360088 - RNA, 22 nt, Human
ccagggugggguccaggaacca

SEQ ID NO: 360089 - RNA, 22 nt, Human
uccaugccaggcagucgaugca

SEQ ID NO: 360090 - RNA, 22 nt, Human
gaccagagaaaggcacuggaag

SEQ ID NO: 360091 - RNA, 22 nt, Human
cugucccagauguucucagcac

SEQ ID NO: 360092 - RNA, 22 nt, Human
gaggaagccccauugaagccag

SEQ ID NO: 360093 - RNA, 22 nt, Human
gaggaguguauuccacaccacu

SEQ ID NO: 360094 - RNA, 22 nt, Human
guacaauagucccuguuuggau

SEQ ID NO: 360095 - RNA, 18 nt, Human
cagggcuguggggucacu

SEQ ID NO: 360096 - RNA, 21 nt, Human
agacagaacaacugcucucca

SEQ ID NO: 360097 - RNA, 22 nt, Human
uucuuuccccauggaguucgga

SEQ ID NO: 360098 - RNA, 22 nt, Human
cuacacaguucugccuaauggc

SEQ ID NO: 360099 - RNA, 22 nt, Human
gcugcccauuccacuggauggu

SEQ ID NO: 360100 - RNA, 22 nt, Human
cugagagucagcuucuccuccu

SEQ ID NO: 360101 - RNA, 21 nt, Human
cauuucuauugaugagaaaag

SEQ ID NO: 360102 - RNA, 22 nt, Human
guggggcaugcacgcugcuccu

SEQ ID NO: 360103 - RNA, 22 nt, Human
cgaggcagggaagcugcaaaag

SEQ ID NO: 360104 - RNA, 22 nt, Human
uuccaggaggcacugacagagg

SEQ ID NO: 360105 - RNA, 22 nt, Human
gcucugagauugagccuuuggu

SEQ ID NO: 360106 - RNA, 22 nt, Human
caggcagaguuagagcaacugg

SEQ ID NO: 360107 - RNA, 22 nt, Human
uccagaaacuuuuccagucuca

SEQ ID NO: 360108 - RNA, 22 nt, Human
cugcugcaggaugggcacucug

SEQ ID NO: 360109 - RNA, 17 nt, Human
gcacugaacaauccugu

SEQ ID NO: 360110 - RNA, 22 nt, Human
aucauucuauuguugagcugcc

SEQ ID NO: 360111 - RNA, 22 nt, Human
caauuuuuaaacuaugaaguug

SEQ ID NO: 360112 - RNA, 22 nt, Human
gcagagcaguacucucuugacu

SEQ ID NO: 360113 - RNA, 22 nt, Human
gaagcagcgaaguggaagggac

SEQ ID NO: 360114 - RNA, 22 nt, Human
ccuugcugaccaucaccuuuga

SEQ ID NO: 360115 - RNA, 22 nt, Human
cccauuuaaacacaagcuuuca

SEQ ID NO: 360116 - RNA, 22 nt, Human
agugaaauaugcccauugcugu

SEQ ID NO: 360117 - RNA, 22 nt, Human
acuagaaauuacucagaauaaa

SEQ ID NO: 360118 - RNA, 22 nt, Human
aaggcaggaugggaaaagauuu

SEQ ID NO: 360119 - RNA, 22 nt, Human
uccaugagggacacuggaugcu

SEQ ID NO: 360120 - RNA, 22 nt, Human
cacccagcacagagggaggcga

SEQ ID NO: 360121 - RNA, 18 nt, Human
uuuuacucauagcaggcc

SEQ ID NO: 360122 - RNA, 22 nt, Human
cagggcucaccacugggauccu

SEQ ID NO: 360123 - RNA, 22 nt, Human
gcuggaucccugugggaguggu

SEQ ID NO: 360124 - RNA, 22 nt, Human
caugcuuauucauucugcuaac

SEQ ID NO: 360125 - RNA, 21 nt, Human
cagggcacacagaggauggua

SEQ ID NO: 360126 - RNA, 22 nt, Human
cucuucuugaaagaggaauuca

SEQ ID NO: 360127 - RNA, 22 nt, Human
augugcaaauccaaugugaaug

SEQ ID NO: 360128 - RNA, 22 nt, Human
ggcacugaauuucuuggcaucu

SEQ ID NO: 360129 - RNA, 22 nt, Human
cccuuucccuucuggcucaggg

SEQ ID NO: 360130 - RNA, 22 nt, Human
cauguacaguuuuucuguccug

SEQ ID NO: 360131 - RNA, 22 nt, Human
ugccucugugugcaggugagca

SEQ ID NO: 360132 - RNA, 22 nt, Human
auuuuccagccuuucuagaacu

SEQ ID NO: 360133 - RNA, 20 nt, Human
caucagugccugacaggucc

SEQ ID NO: 360134 - RNA, 22 nt, Human
ccagggucuuggagaggagugc

SEQ ID NO: 360135 - RNA, 22 nt, Human
uucaggauucugugucugacaa

SEQ ID NO: 360136 - RNA, 22 nt, Human
ugucuguacaaauuuucugugu

SEQ ID NO: 360137 - RNA, 22 nt, Human
aggcugagcuggcccuugaaau

SEQ ID NO: 360138 - RNA, 22 nt, Human
gcagggugugucucauacaguu

SEQ ID NO: 360139 - RNA, 22 nt, Human
caggggcucccugggugccagu

SEQ ID NO: 360140 - RNA, 22 nt, Human
acagaggccgccucucucacgg

SEQ ID NO: 360141 - RNA, 22 nt, Human
gggagcuguaguccagauaccg

SEQ ID NO: 360142 - RNA, 21 nt, Human
gccauuguuuucuaccuggag

SEQ ID NO: 360143 - RNA, 20 nt, Human
uccagcugucuuucagagac

SEQ ID NO: 360144 - RNA, 22 nt, Human
cagcugcuuuaguuuuccaucc

SEQ ID NO: 360145 - RNA, 22 nt, Human
guccucuguagggcugggccac

SEQ ID NO: 360146 - RNA, 22 nt, Human
cagcaguggaacuacccaggga

SEQ ID NO: 360147 - RNA, 22 nt, Human
ugcagggcuacaggacuacaac

SEQ ID NO: 360148 - RNA, 22 nt, Human
agcagcaucuucuguucuccgc

SEQ ID NO: 360149 - RNA, 22 nt, Human
gccagcagggcccaaaugcugg

SEQ ID NO: 360150 - RNA, 19 nt, Human
aucugccuuagugcugcug

SEQ ID NO: 360151 - RNA, 20 nt, Human
cccucugcuacacugggagc

SEQ ID NO: 360152 - RNA, 22 nt, Human
uuauacaguuuauacuuagaau

SEQ ID NO: 360153 - RNA, 22 nt, Human
aaauacugggcucaaaaggguu

SEQ ID NO: 360154 - RNA, 22 nt, Human
guuuauuauacaacaaaagcua

SEQ ID NO: 360155 - RNA, 22 nt, Human
ggcagcucugcuccacaugagu

SEQ ID NO: 360156 - RNA, 22 nt, Human
cagagcggccacuagagggcgc

SEQ ID NO: 360157 - RNA, 22 nt, Human
uuaucguacgcuucagaaauuu

SEQ ID NO: 360158 - RNA, 22 nt, Human
ucuucuccagugcuucugcaca

SEQ ID NO: 360159 - RNA, 22 nt, Human
ggagaagcaggugcuuuggguc

SEQ ID NO: 360160 - RNA, 17 nt, Human
uugaacugcugagucag

SEQ ID NO: 360161 - RNA, 21 nt, Human
ggcagcguguggacaggaagg

SEQ ID NO: 360162 - RNA, 22 nt, Human
ugugcccauuacacagaggcau

SEQ ID NO: 360163 - RNA, 22 nt, Human
uggcagcagggaggccaguguu

SEQ ID NO: 360164 - RNA, 22 nt, Human
gaugcacuuucuuuucaacagu

SEQ ID NO: 360165 - RNA, 18 nt, Human
ggcaucugcacagcagcc

SEQ ID NO: 360166 - RNA, 22 nt, Human
gcuccuggcuccaggcagccaa

SEQ ID NO: 360167 - RNA, 22 nt, Human
ugcuuauugcuuucaagacugu

SEQ ID NO: 360168 - RNA, 22 nt, Human
cagcagcugcgugcccaggccg

SEQ ID NO: 360169 - RNA, 22 nt, Human
gucucagauaacauguauucua

SEQ ID NO: 360170 - RNA, 22 nt, Human
auucuuaauugccaugcuguau

SEQ ID NO: 360171 - RNA, 22 nt, Human
cugggcagcuguaucagggagu

SEQ ID NO: 360172 - RNA, 22 nt, Human
ucauuuaauaauuuuugaguag

SEQ ID NO: 360173 - RNA, 22 nt, Human
uugaagagugccuuccagacau

SEQ ID NO: 360174 - RNA, 22 nt, Human
uaucuguuaugggcugaauugc

SEQ ID NO: 360175 - RNA, 22 nt, Human
caggggcugagaaggaacgucc

SEQ ID NO: 360176 - RNA, 22 nt, Human
auaaagucuaccguauuaaaga

SEQ ID NO: 360177 - RNA, 22 nt, Human
acugcaggagacacagcugcug

SEQ ID NO: 360178 - RNA, 22 nt, Human
uugaagcaaauucugugcagua

SEQ ID NO: 360179 - RNA, 19 nt, Human
gguguccuagagauaagag

SEQ ID NO: 360180 - RNA, 22 nt, Human
ccagcugcagguguuccagaug

SEQ ID NO: 360181 - RNA, 22 nt, Human
ugcauuuccagauuucuggagu

SEQ ID NO: 360182 - RNA, 22 nt, Human
cugcagcuuuggaaaccuguuu

SEQ ID NO: 360183 - RNA, 22 nt, Human
uagcugccuaugugauaagaga

SEQ ID NO: 360184 - RNA, 22 nt, Human
ugcagucuuccagcugcacaaa

SEQ ID NO: 360185 - RNA, 18 nt, Human
gggcauggaugcagcauc

SEQ ID NO: 360186 - RNA, 22 nt, Human
gcugucucggggcuuucuccug

SEQ ID NO: 360187 - RNA, 22 nt, Human
uggggcuggcacagucucuauu

SEQ ID NO: 360188 - RNA, 22 nt, Human
aaagccagcucugagcugcacc

SEQ ID NO: 360189 - RNA, 22 nt, Human
uugaaauaucaaguuauuagug

SEQ ID NO: 360190 - RNA, 22 nt, Human
cuggagggggaaauguucauug

SEQ ID NO: 360191 - RNA, 22 nt, Human
gcugcccagcaggccccagggg

SEQ ID NO: 360192 - RNA, 22 nt, Human
cucuggacacuggcaugggguc

SEQ ID NO: 360193 - RNA, 22 nt, Human
auggccugggcccgcuucagau

SEQ ID NO: 360194 - RNA, 22 nt, Human
caagaaauguuuacugagcauc

SEQ ID NO: 360195 - RNA, 22 nt, Human
aggcagacaaggucccuggucu

SEQ ID NO: 360196 - RNA, 22 nt, Human
gccagaaagaggaggaccuggg

SEQ ID NO: 360197 - RNA, 22 nt, Human
ugaggggaacugaugcccauug

SEQ ID NO: 360198 - RNA, 22 nt, Human
aaugaucuggcucaggauauca

SEQ ID NO: 360199 - RNA, 22 nt, Human
ccagguguaggacaccaaggga

SEQ ID NO: 360200 - RNA, 22 nt, Human
acauucacuauguccaaacucu

SEQ ID NO: 360201 - RNA, 22 nt, Human
guaggcagucucucaggugauc

SEQ ID NO: 360202 - RNA, 22 nt, Human
gaggcuggaggucaaagaugaa

SEQ ID NO: 360203 - RNA, 21 nt, Human
caagccagaccaauagcagcc

SEQ ID NO: 360204 - RNA, 22 nt, Human
agcugcucuugggugacuucaa

SEQ ID NO: 360205 - RNA, 22 nt, Human
cuggagcuaggaaguccaagau

SEQ ID NO: 360206 - RNA, 22 nt, Human
gguuucaacuucaaccucucca

SEQ ID NO: 360207 - RNA, 22 nt, Human
gcagacagacugcagugauuuu

SEQ ID NO: 360208 - RNA, 22 nt, Human
ugaaauaauaucuggaucaauc

SEQ ID NO: 360209 - RNA, 22 nt, Human
gugaauaagaccuaaggaugaa

SEQ ID NO: 360210 - RNA, 22 nt, Human
uugauacuauuaagcacugggc

SEQ ID NO: 360211 - RNA, 22 nt, Human
agcagugggggaguguuaguuu

SEQ ID NO: 360212 - RNA, 22 nt, Human
uggcucaggagggaucuuugcu

SEQ ID NO: 360213 - RNA, 22 nt, Human
cagccuccugggacacucaccg

SEQ ID NO: 360214 - RNA, 21 nt, Human
guauucuuuaugaagugaaaa

SEQ ID NO: 360215 - RNA, 22 nt, Human
ugucaacacaccuaucucaauu

SEQ ID NO: 360216 - RNA, 22 nt, Human
cagagccacuuggagaugagaa

SEQ ID NO: 360217 - RNA, 22 nt, Human
ucugaggcauaaccuguucugc

SEQ ID NO: 360218 - RNA, 22 nt, Human
aggccagcacgacagccgcagg

SEQ ID NO: 360219 - RNA, 22 nt, Human
agaugcugcuccacaggccagg

SEQ ID NO: 360220 - RNA, 22 nt, Human
cuggccucaccucagacuuacu

SEQ ID NO: 360221 - RNA, 22 nt, Human
agccucugauggcucccaagga

SEQ ID NO: 360222 - RNA, 22 nt, Human
ggcugccauaacugauaccaua

SEQ ID NO: 360223 - RNA, 22 nt, Human
acauguuagaaaugcagaaucu

SEQ ID NO: 360224 - RNA, 22 nt, Human
aagccaggaagagagccuucac

SEQ ID NO: 360225 - RNA, 22 nt, Human
ggcagggaguggagacucccua

SEQ ID NO: 360226 - RNA, 22 nt, Human
cugcuuuagacaacugcuggga

SEQ ID NO: 360227 - RNA, 22 nt, Human
ucucugagacaguagccucugc

SEQ ID NO: 360228 - RNA, 22 nt, Human
cucccaggacucagaggagaag

SEQ ID NO: 360229 - RNA, 22 nt, Human
acugucugcccugagaugccag

SEQ ID NO: 360230 - RNA, 22 nt, Human
uggcucagccuggcccuuucau

SEQ ID NO: 360231 - RNA, 22 nt, Human
ucugccuuggcaaccacagcuu

SEQ ID NO: 360232 - RNA, 22 nt, Human
caggagcaaggagcagugggau

SEQ ID NO: 360233 - RNA, 22 nt, Human
aaaguccuguuugaaggaccug

SEQ ID NO: 360234 - RNA, 22 nt, Human
cugccaggcgauggauuggcug

SEQ ID NO: 360235 - RNA, 22 nt, Human
uuucacauuuguuuuaagaagu

SEQ ID NO: 360236 - RNA, 22 nt, Human
gcaggagagucugugccagguu

SEQ ID NO: 360237 - RNA, 22 nt, Human
agagccaggugcugcuguuuga

SEQ ID NO: 360238 - RNA, 22 nt, Human
agggacuugaugucagggagau

SEQ ID NO: 360239 - RNA, 22 nt, Human
aaauuuucagagcacuagagaa

SEQ ID NO: 360240 - RNA, 22 nt, Human
agcucugggccaggaacccuaa

SEQ ID NO: 360241 - RNA, 22 nt, Human
ucuuuaauauaaaggaaugaau

SEQ ID NO: 360242 - RNA, 17 nt, Human
uuauuuuuugggcugag

SEQ ID NO: 360243 - RNA, 22 nt, Human
cuccugggcucaagugauccuc

SEQ ID NO: 360244 - RNA, 22 nt, Human
uuucuucucacccaggacagag

SEQ ID NO: 360245 - RNA, 22 nt, Human
gggcacuguggggcccaugcug

SEQ ID NO: 360246 - RNA, 23 nt, Human
ugagcccaggaggucaaggcugc

SEQ ID NO: 360247 - RNA, 22 nt, Human
uggcuucaucugcagcacugcc

SEQ ID NO: 360248 - RNA, 22 nt, Human
augggcagcugcagcaguggug

SEQ ID NO: 360249 - RNA, 22 nt, Human
cacaauuuccaagucauguuau

SEQ ID NO: 360250 - RNA, 22 nt, Human
ccucauggaccucagacugucc

SEQ ID NO: 360251 - RNA, 22 nt, Human
cuagccaugggcauuaaaggua

SEQ ID NO: 360252 - RNA, 22 nt, Human
acaagagauuaucuacagauga

SEQ ID NO: 360253 - RNA, 21 nt, Human
uucagcaguccucuagagaua

SEQ ID NO: 360254 - RNA, 20 nt, Human
gccaggagggugugaugagc

SEQ ID NO: 360255 - RNA, 22 nt, Human
gcuuuuucaaaugaaagcuggu

SEQ ID NO: 360256 - RNA, 22 nt, Human
agucaaagcuacaggcauuuga

SEQ ID NO: 360257 - RNA, 22 nt, Human
gaaucauuuagcucugcaugga

SEQ ID NO: 360258 - RNA, 22 nt, Human
gaggccuggagccgccuaggcg

SEQ ID NO: 360259 - RNA, 22 nt, Human
gggaggagugaagauucaccug

SEQ ID NO: 360260 - RNA, 22 nt, Human
aaaguucugggggagaagaacg

SEQ ID NO: 360261 - RNA, 22 nt, Human
acucugccccgaguucugggaa

SEQ ID NO: 360262 - RNA, 22 nt, Human
ugacuuccugcacucaggugau

SEQ ID NO: 360263 - RNA, 22 nt, Human
agugcuguccaguuucacaggu

SEQ ID NO: 360264 - RNA, 22 nt, Human
agguaaggcuguaagcuaagcc

SEQ ID NO: 360265 - RNA, 18 nt, Human
ggcagcuugacuagcaac

SEQ ID NO: 360266 - RNA, 22 nt, Human
aaucaguguggugacuugucug

SEQ ID NO: 360267 - RNA, 22 nt, Human
uggagcugggguuugaaucugg

SEQ ID NO: 360268 - RNA, 22 nt, Human
accuuuuuguucuguucucagc

SEQ ID NO: 360269 - RNA, 22 nt, Human
uccauguggccagacacuggca

SEQ ID NO: 360270 - RNA, 21 nt, Human
cagugcucaaucugacagugg

SEQ ID NO: 360271 - RNA, 22 nt, Human
cugagcucuaaugucagccuug

SEQ ID NO: 360272 - RNA, 23 nt, Human
cucccuggaguuucuggaagaug

SEQ ID NO: 360273 - RNA, 22 nt, Human
gcuggcucagggacuagaguuu

SEQ ID NO: 360274 - RNA, 19 nt, Human
uccccagcaccucugaguc

SEQ ID NO: 360275 - RNA, 22 nt, Human
agaagaaaugaggccguucugc

SEQ ID NO: 360276 - RNA, 22 nt, Human
ugcaagcacucaaugcaaacag

SEQ ID NO: 360277 - RNA, 22 nt, Human
gaggcaguuugccaugccagga

SEQ ID NO: 360278 - RNA, 22 nt, Human
aagcugcccaagacugaagcau

SEQ ID NO: 360279 - RNA, 23 nt, Human
ugcaugugaauucauacuuguuu

SEQ ID NO: 360280 - RNA, 22 nt, Human
gcugucacucuccggccuuccc

SEQ ID NO: 360281 - RNA, 22 nt, Human
agcagcauguugggaugugaaa

SEQ ID NO: 360282 - RNA, 22 nt, Human
cauuguuaauugguaucuuaca

SEQ ID NO: 360283 - RNA, 22 nt, Human
aaaugcagguucuugagccaag

SEQ ID NO: 360284 - RNA, 22 nt, Human
gggcugagacgauggggucuuc

SEQ ID NO: 360285 - RNA, 22 nt, Human
uacaaacuuguuuuaaguaagu

SEQ ID NO: 360286 - RNA, 22 nt, Human
agaaagaacgcacuugugcugc

SEQ ID NO: 360287 - RNA, 22 nt, Human
gugggugauguacuggaggcca

SEQ ID NO: 360288 - RNA, 22 nt, Human
auacauguucguguacauguuc

SEQ ID NO: 360289 - RNA, 22 nt, Human
ugggccugacucaccugccucc

SEQ ID NO: 360290 - RNA, 19 nt, Human
ggagaagcaucuagaaaua

SEQ ID NO: 360291 - RNA, 22 nt, Human
ggagcggagggagggccacugu

SEQ ID NO: 360292 - RNA, 22 nt, Human
aagggcuccaagagguagcugg

SEQ ID NO: 360293 - RNA, 22 nt, Human
cagaggguugaugugaggcuua

SEQ ID NO: 360294 - RNA, 22 nt, Human
cauuuguaucauauguaucuua

SEQ ID NO: 360295 - RNA, 22 nt, Human
ucaaaguuuuugagaauuacau

SEQ ID NO: 360296 - RNA, 22 nt, Human
ucaacugcaaguuugcuuaguu

SEQ ID NO: 360297 - RNA, 22 nt, Human
gcccugugccagucacgcugug

SEQ ID NO: 360298 - RNA, 22 nt, Human
cagcugccaugacauguccugc

SEQ ID NO: 360299 - RNA, 22 nt, Human
ggagggacccacucuagaggug

SEQ ID NO: 360300 - RNA, 22 nt, Human
acagaaugcguagugcauguug

SEQ ID NO: 360301 - RNA, 22 nt, Human
guuaggcaauaccucuuacacc

SEQ ID NO: 360302 - RNA, 22 nt, Human
gcagggcagccacaggcccccu

SEQ ID NO: 360303 - RNA, 22 nt, Human
augaauaaacaggugccucuuc

SEQ ID NO: 360304 - RNA, 21 nt, Human
auuauuauuucuguguccagc

SEQ ID NO: 360305 - RNA, 22 nt, Human
agagcccucucauuggcuuauu

SEQ ID NO: 360306 - RNA, 22 nt, Human
uugaacugguaguuggaaaucu

SEQ ID NO: 360307 - RNA, 22 nt, Human
ucugucacuauuggccagaaca

SEQ ID NO: 360308 - RNA, 22 nt, Human
gaaaggcaguacagcugagccu

SEQ ID NO: 360309 - RNA, 22 nt, Human
cagagcaguaaaucuggggcac

SEQ ID NO: 360310 - RNA, 22 nt, Human
cccagggauuauaaaggugaaa

SEQ ID NO: 360311 - RNA, 22 nt, Human
aggaagagcuggaccagaggac

SEQ ID NO: 360312 - RNA, 22 nt, Human
aggcagcuggaaaacuccaggc

SEQ ID NO: 360313 - RNA, 22 nt, Human
aaggcaggagcuguaucuuauu

SEQ ID NO: 360314 - RNA, 22 nt, Human
uauaguaaaauuuucauuuaug

SEQ ID NO: 360315 - RNA, 22 nt, Human
uccuucagauuccugcuucugg

SEQ ID NO: 360316 - RNA, 23 nt, Human
cuuucauugugguuucacagagc

SEQ ID NO: 360317 - RNA, 22 nt, Human
agaggccuccgaaaggugggcu

SEQ ID NO: 360318 - RNA, 22 nt, Human
agcagggcagcuuuuuucagaa

SEQ ID NO: 360319 - RNA, 19 nt, Human
uggccagguacugucugcu

SEQ ID NO: 360320 - RNA, 22 nt, Human
uacaguaagaugaaauagcaau

SEQ ID NO: 360321 - RNA, 22 nt, Human
acugaguguaggacuuugaguu

SEQ ID NO: 360322 - RNA, 22 nt, Human
cagacccugggccacagaggag

SEQ ID NO: 360323 - RNA, 22 nt, Human
uaccuugggcuauuaucuuuga

SEQ ID NO: 360324 - RNA, 22 nt, Human
uaaauuuacccaaggaacaugu

SEQ ID NO: 360325 - RNA, 22 nt, Human
aagagcauauuaauaguggaga

SEQ ID NO: 360326 - RNA, 22 nt, Human
accugccucuaagcagcaggug

SEQ ID NO: 360327 - RNA, 19 nt, Human
uuugaaagaguuuuauugg

SEQ ID NO: 360328 - RNA, 22 nt, Human
agccuggagguaaugaggaaac

SEQ ID NO: 360329 - RNA, 22 nt, Human
guggagaccuccuaggaugugu

SEQ ID NO: 360330 - RNA, 22 nt, Human
aaucuguucuacucuauucaga

SEQ ID NO: 360331 - RNA, 22 nt, Human
ugcuugaaagggguuucccagu

SEQ ID NO: 360332 - RNA, 22 nt, Human
cagcaucccucaggggccucug

SEQ ID NO: 360333 - RNA, 22 nt, Human
cugccgagugggucaugaggca

SEQ ID NO: 360334 - RNA, 22 nt, Human
caaagaugcugauguuggauca

SEQ ID NO: 360335 - RNA, 22 nt, Human
uggagacugugcuaagggaguu

SEQ ID NO: 360336 - RNA, 22 nt, Human
agucucugucguagaucagcgu

SEQ ID NO: 360337 - RNA, 22 nt, Human
uccuggccugucuggaguagcu

SEQ ID NO: 360338 - RNA, 21 nt, Human
ccacauucucauucugacugc

SEQ ID NO: 360339 - RNA, 22 nt, Human
ccacagccauuccagggaggcu

SEQ ID NO: 360340 - RNA, 22 nt, Human
uuuucaucucugcuuuguaccu

SEQ ID NO: 360341 - RNA, 22 nt, Human
gcauucuuuuuaggagguuccu

SEQ ID NO: 360342 - RNA, 22 nt, Human
acuucucuucauagguggcaau

SEQ ID NO: 360343 - RNA, 22 nt, Human
gccaggcauuauuccgaucccu

SEQ ID NO: 360344 - RNA, 17 nt, Human
cgagggcuugcuggcuc

SEQ ID NO: 360345 - RNA, 20 nt, Human
gggcaguggcgcuaucucag

SEQ ID NO: 360346 - RNA, 21 nt, Human
gcuauacagaauggccagagg

SEQ ID NO: 360347 - RNA, 22 nt, Human
uugugaguagugccgcaauaaa

SEQ ID NO: 360348 - RNA, 22 nt, Human
uugauccaguugaaagugauga

SEQ ID NO: 360349 - RNA, 22 nt, Human
uuacagaaggaacacuacucag

SEQ ID NO: 360350 - RNA, 22 nt, Human
agggaaggagguuagaacccac

SEQ ID NO: 360351 - RNA, 22 nt, Human
ccagcaggagaugccugugucu

SEQ ID NO: 360352 - RNA, 22 nt, Human
cuuccagagauagggccucaag

SEQ ID NO: 360353 - RNA, 22 nt, Human
agugacucacuagcucucagug

SEQ ID NO: 360354 - RNA, 22 nt, Human
uuccuuagcuccucauggccug

SEQ ID NO: 360355 - RNA, 22 nt, Human
agcagggcagcugaugcgcacg

SEQ ID NO: 360356 - RNA, 22 nt, Human
auaauaaaccaggaugggucug

SEQ ID NO: 360357 - RNA, 22 nt, Human
gggcucugguacuuccuggcuc

SEQ ID NO: 360358 - RNA, 19 nt, Human
ggcucucuuaaagcuguuu

SEQ ID NO: 360359 - RNA, 22 nt, Human
ucuuuaaugugauuguaauuau

SEQ ID NO: 360360 - RNA, 22 nt, Human
uucaggauggaguaccuuuuau

SEQ ID NO: 360361 - RNA, 21 nt, Human
ugggcagauggcaguguggcu

SEQ ID NO: 360362 - RNA, 22 nt, Human
aggguccugggugcaguugcuu

SEQ ID NO: 360363 - RNA, 22 nt, Human
cugcccaggaaccagaggggca

SEQ ID NO: 360364 - RNA, 22 nt, Human
ccugagacaugaaccaggcucc

SEQ ID NO: 360365 - RNA, 21 nt, Human
ccauaauuuuguuucagaagu

SEQ ID NO: 360366 - RNA, 22 nt, Human
ucuucacagaugcauauacuuc

SEQ ID NO: 360367 - RNA, 22 nt, Human
gacacagggggauguguggacg

SEQ ID NO: 360368 - RNA, 22 nt, Human
ucugaagaacugaguaaacaug

SEQ ID NO: 360369 - RNA, 22 nt, Human
gaagcagcuuucuggugaggag

SEQ ID NO: 360370 - RNA, 22 nt, Human
acagggcagguggcuacugguc

SEQ ID NO: 360371 - RNA, 22 nt, Human
augcuuuuaugucacaugguca

SEQ ID NO: 360372 - RNA, 22 nt, Human
ucccagagucagagguggggcc

SEQ ID NO: 360373 - RNA, 22 nt, Human
gacagcagggacauguaggaag

SEQ ID NO: 360374 - RNA, 22 nt, Human
gcagaauuuucuguuuucuaga

SEQ ID NO: 360375 - RNA, 22 nt, Human
cugaaggauucaaaauggcagg

SEQ ID NO: 360376 - RNA, 22 nt, Human
cagccagcugaauguaccauga

SEQ ID NO: 360377 - RNA, 22 nt, Human
aguaacaagugccaacguuaga

SEQ ID NO: 360378 - RNA, 22 nt, Human
gggccucugugcagaggggccu

SEQ ID NO: 360379 - RNA, 22 nt, Human
uccaggcuggccucgcgugaca

SEQ ID NO: 360380 - RNA, 22 nt, Human
cagagcagcagagcuuccaugg

SEQ ID NO: 360381 - RNA, 22 nt, Human
gccuucccacccugcgaggcug

SEQ ID NO: 360382 - RNA, 22 nt, Human
aaagccauugaacuguacuuua

SEQ ID NO: 360383 - RNA, 22 nt, Human
uacauguuugguaaaugauggc

SEQ ID NO: 360384 - RNA, 22 nt, Human
uuuaaaaaacuagucugagucu

SEQ ID NO: 360385 - RNA, 22 nt, Human
ugacauaauaauccaaacauac

SEQ ID NO: 360386 - RNA, 22 nt, Human
auggaguucuuuaaauucacag

SEQ ID NO: 360387 - RNA, 22 nt, Human
acugucuguccugcucuccgug

SEQ ID NO: 360388 - RNA, 22 nt, Human
uggaaggggagcuggaaagggg

SEQ ID NO: 360389 - RNA, 22 nt, Human
ugucucaggggcauugaaauaa

SEQ ID NO: 360390 - RNA, 22 nt, Human
ugucaugcagguuuguuauaga

SEQ ID NO: 360391 - RNA, 22 nt, Human
aagagaaggauucugagccugg

SEQ ID NO: 360392 - RNA, 22 nt, Human
uggcucagcuuuccccaucugg

SEQ ID NO: 360393 - RNA, 22 nt, Human
augauugcagcccuacagcugu

SEQ ID NO: 360394 - RNA, 22 nt, Human
ugcugucccuaagucucuucaa

SEQ ID NO: 360395 - RNA, 22 nt, Human
uuuacuuuugguaaggucauuu

SEQ ID NO: 360396 - RNA, 22 nt, Human
uauuucagggagaauaaauuug

SEQ ID NO: 360397 - RNA, 22 nt, Human
uuagggacaaauuugcagaacc

SEQ ID NO: 360398 - RNA, 22 nt, Human
agaggccaucugcucugugggg

SEQ ID NO: 360399 - RNA, 21 nt, Human
uggaaagauucaaagaccagg

SEQ ID NO: 360400 - RNA, 22 nt, Human
ggacagcccauacacaugucug

SEQ ID NO: 360401 - RNA, 22 nt, Human
gcagcuaccacccaggaaggac

SEQ ID NO: 360402 - RNA, 22 nt, Human
gggcagcugccccucucugggc

SEQ ID NO: 360403 - RNA, 22 nt, Human
cucuccagccacagaagcugcu

SEQ ID NO: 360404 - RNA, 22 nt, Human
cggcagggcuccaugcauuucu

SEQ ID NO: 360405 - RNA, 22 nt, Human
uggcucaggggucuggcucugu

SEQ ID NO: 360406 - RNA, 22 nt, Human
ggccugcugcuaugacuuccug

SEQ ID NO: 360407 - RNA, 22 nt, Human
agacccucuccaugcccacugc

SEQ ID NO: 360408 - RNA, 22 nt, Human
ugcacacaguucucaggaaaga

SEQ ID NO: 360409 - RNA, 22 nt, Human
acauuucuugaugccucuguga

SEQ ID NO: 360410 - RNA, 20 nt, Human
agguggcuccugcugggggu

SEQ ID NO: 360411 - RNA, 22 nt, Human
gggugggagucuggcccucaaa

SEQ ID NO: 360412 - RNA, 22 nt, Human
gaggagaggcuggacgcgguga

SEQ ID NO: 360413 - RNA, 22 nt, Human
cugcccuggucccauggcugau

SEQ ID NO: 360414 - RNA, 22 nt, Human
gcugagcugaggcagggcuggg

SEQ ID NO: 360415 - RNA, 22 nt, Human
gauaccagacagggagggagaa

SEQ ID NO: 360416 - RNA, 22 nt, Human
acuuaaaaacagauccagcagg

SEQ ID NO: 360417 - RNA, 21 nt, Human
acagcagggcuggcaugacag

SEQ ID NO: 360418 - RNA, 22 nt, Human
ucagaagcaggagugugcacaa

SEQ ID NO: 360419 - RNA, 22 nt, Human
gacauucacagguaaacauucc

SEQ ID NO: 360420 - RNA, 22 nt, Human
uucaaaacagcuagauauugga

SEQ ID NO: 360421 - RNA, 22 nt, Human
caggccugugacaccgugucug

SEQ ID NO: 360422 - RNA, 22 nt, Human
agcagguguagggcucuuugua

SEQ ID NO: 360423 - RNA, 22 nt, Human
agguagagcuccaguagaaaau

SEQ ID NO: 360424 - RNA, 22 nt, Human
ucagcagucacauguuguccca

SEQ ID NO: 360425 - RNA, 22 nt, Human
cagguccccuccccuaccaggc

SEQ ID NO: 360426 - RNA, 22 nt, Human
uaaagaacacagggaauagcac

SEQ ID NO: 360427 - RNA, 22 nt, Human
cauuucugauuacagaauacua

SEQ ID NO: 360428 - RNA, 22 nt, Human
ucucucagucagaugcuaaaga

SEQ ID NO: 360429 - RNA, 22 nt, Human
agagcuguuuggacaucugagu

SEQ ID NO: 360430 - RNA, 22 nt, Human
uuugucaucccuuuugaaacug

SEQ ID NO: 360431 - RNA, 22 nt, Human
ggagcacccugcucagccaagc

SEQ ID NO: 360432 - RNA, 22 nt, Human
agcaggugaauuccuggaugug

SEQ ID NO: 360433 - RNA, 22 nt, Human
gggcuggcaucaguugccgaga

SEQ ID NO: 360434 - RNA, 22 nt, Human
guuaauuuaguagaguccagau

SEQ ID NO: 360435 - RNA, 22 nt, Human
gugaggggaguaaagccauguu

SEQ ID NO: 360436 - RNA, 22 nt, Human
uuacagaaguuucagcguuuua

SEQ ID NO: 360437 - RNA, 22 nt, Human
uguagcacagagcuuugacacu

SEQ ID NO: 360438 - RNA, 22 nt, Human
gagagcacaugaacauggagga

SEQ ID NO: 360439 - RNA, 22 nt, Human
agggccaguaccaggugggugg

SEQ ID NO: 360440 - RNA, 22 nt, Human
agcagaggaggauuuaguuagg

SEQ ID NO: 360441 - RNA, 22 nt, Human
gagggggcgugcaaggcuccgc

SEQ ID NO: 360442 - RNA, 19 nt, Human
cauuuuaagcauccccagu

SEQ ID NO: 360443 - RNA, 22 nt, Human
aggcagguguuaccucugguuu

SEQ ID NO: 360444 - RNA, 22 nt, Human
cagcugcaggaacaaaaaugug

SEQ ID NO: 360445 - RNA, 22 nt, Human
cacccaggcuagagugcagugg

SEQ ID NO: 360446 - RNA, 22 nt, Human
augggggccugaacaggcaaaa

SEQ ID NO: 360447 - RNA, 22 nt, Human
acaagccaauuacugugccagg

SEQ ID NO: 360448 - RNA, 22 nt, Human
ggggcagggagguuaucgccga

SEQ ID NO: 360449 - RNA, 18 nt, Human
ggcugagguugacuagaa

SEQ ID NO: 360450 - RNA, 21 nt, Human
gaguccuuccaauguccucag

SEQ ID NO: 360451 - RNA, 22 nt, Human
cacagggcagagaccugggugc

SEQ ID NO: 360452 - RNA, 22 nt, Human
uccaggcuggaaaugucaaacu

SEQ ID NO: 360453 - RNA, 22 nt, Human
aaauaugaaugauaagaguuau

SEQ ID NO: 360454 - RNA, 22 nt, Human
aaucagaaauucuacaucacaa

SEQ ID NO: 360455 - RNA, 22 nt, Human
cuuuggcaugguccucacuaua

SEQ ID NO: 360456 - RNA, 22 nt, Human
uugaagcacaaugucuuuuauc

SEQ ID NO: 360457 - RNA, 22 nt, Human
aaagcagagcagggcacuuaug

SEQ ID NO: 360458 - RNA, 22 nt, Human
agaacagaggccuuauguuuca

SEQ ID NO: 360459 - RNA, 22 nt, Human
uauugaguuacagaaaauacuu

SEQ ID NO: 360460 - RNA, 22 nt, Human
uacaauacuuaaccuauuuugc

SEQ ID NO: 360461 - RNA, 22 nt, Human
aggcugaggaucccuguguucu

SEQ ID NO: 360462 - RNA, 22 nt, Human
cggucaggugcagcguuggcac

SEQ ID NO: 360463 - RNA, 22 nt, Human
aacagaacccgagugugaaucu

SEQ ID NO: 360464 - RNA, 22 nt, Human
cuggcucaguucuugguuuuca

SEQ ID NO: 360465 - RNA, 22 nt, Human
auugcuguggaaauauaagaug

SEQ ID NO: 360466 - RNA, 22 nt, Human
cugccucuguugggcauggucu

SEQ ID NO: 360467 - RNA, 22 nt, Human
uuacuucuuacaaaagaaauau

SEQ ID NO: 360468 - RNA, 22 nt, Human
gccuggagggauagaaugcaag

SEQ ID NO: 360469 - RNA, 22 nt, Human
acaaguggguccuacauaaagc

SEQ ID NO: 360470 - RNA, 22 nt, Human
aaaaucaguacacuuuauuuug

SEQ ID NO: 360471 - RNA, 20 nt, Human
aagcacauuucuacaauaau

SEQ ID NO: 360472 - RNA, 22 nt, Human
gccucucucuacccaguaugau

SEQ ID NO: 360473 - RNA, 22 nt, Human
auucugucuuuuuaaaauaaua

SEQ ID NO: 360474 - RNA, 22 nt, Human
auccaaagcccuaaguuaacug

SEQ ID NO: 360475 - RNA, 22 nt, Human
gcaggcagaucaccugucagga

SEQ ID NO: 360476 - RNA, 22 nt, Human
ucaccaggcuggaaugcagugg

SEQ ID NO: 360477 - RNA, 22 nt, Human
gcccugagacugagcauggguu

SEQ ID NO: 360478 - RNA, 22 nt, Human
acaacaggguaaggcaggccau

SEQ ID NO: 360479 - RNA, 22 nt, Human
uaaaugugcacagguuagaagg

SEQ ID NO: 360480 - RNA, 22 nt, Human
gcuggccugcugggcaccaccg

SEQ ID NO: 360481 - RNA, 22 nt, Human
aagugauuucugccugcauguu

SEQ ID NO: 360482 - RNA, 22 nt, Human
ugcuguguucuccugacucacc

SEQ ID NO: 360483 - RNA, 22 nt, Human
uaguggagaaguggagucugug

SEQ ID NO: 360484 - RNA, 22 nt, Human
gcagcaugagcuauacaaagua

SEQ ID NO: 360485 - RNA, 22 nt, Human
gccagcaguccugcugugugcc

SEQ ID NO: 360486 - RNA, 22 nt, Human
gagcaugguuccauagguuggu

SEQ ID NO: 360487 - RNA, 22 nt, Human
caggguggcacaucacagcauu

SEQ ID NO: 360488 - RNA, 22 nt, Human
ggcugaaguguaguggcucacu

SEQ ID NO: 360489 - RNA, 22 nt, Human
caucagaaggaaggacgauuau

SEQ ID NO: 360490 - RNA, 22 nt, Human
uggccugcagaggcuguggggc

SEQ ID NO: 360491 - RNA, 22 nt, Human
cugggugguucuaacuguugau

SEQ ID NO: 360492 - RNA, 22 nt, Human
ugagagggcccagagcacacca

SEQ ID NO: 360493 - RNA, 22 nt, Human
uagacacaucaaguauaguuaa

SEQ ID NO: 360494 - RNA, 22 nt, Human
ucugagagccucuagccuaagu

SEQ ID NO: 360495 - RNA, 22 nt, Human
cccaggaggcagagguuggagc

SEQ ID NO: 360496 - RNA, 18 nt, Human
acagaacucaggggcacc

SEQ ID NO: 360497 - RNA, 22 nt, Human
augaaacacacacgcgcauacu

SEQ ID NO: 360498 - RNA, 22 nt, Human
cagggcaguuuuacuucucucu

SEQ ID NO: 360499 - RNA, 18 nt, Human
cccagccucuccuuucua

SEQ ID NO: 360500 - RNA, 20 nt, Human
uguuucuuuuaaugagcggc

SEQ ID NO: 360501 - RNA, 22 nt, Human
aagauucuacaguagguacauu

SEQ ID NO: 360502 - RNA, 22 nt, Human
auaauuuaauuuucacaguggu

SEQ ID NO: 360503 - RNA, 22 nt, Human
gccagagcacaggcugguagua

SEQ ID NO: 360504 - RNA, 22 nt, Human
gcugccuggaauaacggcuggc

SEQ ID NO: 360505 - RNA, 22 nt, Human
uuagccaugugggaaaaacagc

SEQ ID NO: 360506 - RNA, 22 nt, Human
aucacaaaggucucagagcaca

SEQ ID NO: 360507 - RNA, 22 nt, Human
uuuaggcacaacuacucagcua

SEQ ID NO: 360508 - RNA, 22 nt, Human
ucagagaugcagugccaccuac

SEQ ID NO: 360509 - RNA, 22 nt, Human
aggcaggaacccugugugcgcc

SEQ ID NO: 360510 - RNA, 22 nt, Human
gaugguuuggaaugaaguagcu

SEQ ID NO: 360511 - RNA, 22 nt, Human
uguccuuauauuguggaagggg

SEQ ID NO: 360512 - RNA, 22 nt, Human
uuaacagagaacauagaaguag

SEQ ID NO: 360513 - RNA, 22 nt, Human
ccagcuuguuugaagcucguca

SEQ ID NO: 360514 - RNA, 22 nt, Human
cacaagucuguggucuccaaca

SEQ ID NO: 360515 - RNA, 22 nt, Human
uggcugccuagucccucagccu

SEQ ID NO: 360516 - RNA, 22 nt, Human
ccagucugaggccuggugaggg

SEQ ID NO: 360517 - RNA, 22 nt, Human
agccccaguccgcugcgggcgg

SEQ ID NO: 360518 - RNA, 22 nt, Human
gcaaauauucaagacuuuucca

SEQ ID NO: 360519 - RNA, 22 nt, Human
gaaggccaagaggcuccaagau

SEQ ID NO: 360520 - RNA, 22 nt, Human
uggccugguccuugucaaggca

SEQ ID NO: 360521 - RNA, 23 nt, Human
uuugaaaguaucaacucgccuga

SEQ ID NO: 360522 - RNA, 22 nt, Human
uuaagauagaacccaguagucu

SEQ ID NO: 360523 - RNA, 22 nt, Human
acuguucacagauuagucgaug

SEQ ID NO: 360524 - RNA, 22 nt, Human
agggaagagcuugcaagaaacc

SEQ ID NO: 360525 - RNA, 22 nt, Human
gaggagcugggcugagaggguc

SEQ ID NO: 360526 - RNA, 22 nt, Human
caugcuuuucaaucuaucuuaa

SEQ ID NO: 360527 - RNA, 22 nt, Human
ugaauagauuuuuaacauauaa

SEQ ID NO: 360528 - RNA, 22 nt, Human
cagaaguggccucagagggagu

SEQ ID NO: 360529 - RNA, 22 nt, Human
agucaccaggguuugcuggguu

SEQ ID NO: 360530 - RNA, 22 nt, Human
uggagaauuuugucaccagaca

SEQ ID NO: 360531 - RNA, 22 nt, Human
ugagguaggugguaagagauac

SEQ ID NO: 360532 - RNA, 22 nt, Human
caucuggcuagcuaucauugug

SEQ ID NO: 360533 - RNA, 21 nt, Human
auuucagagcacacaaguaaa

SEQ ID NO: 360534 - RNA, 22 nt, Human
uugcacagaugagggugaugcu

SEQ ID NO: 360535 - RNA, 22 nt, Human
gaauuucauuuguuuccuacca

SEQ ID NO: 360536 - RNA, 22 nt, Human
cugcuguggaugcaggaccuca

SEQ ID NO: 360537 - RNA, 22 nt, Human
ugugggaggaauuagaauggga

SEQ ID NO: 360538 - RNA, 22 nt, Human
aaaaaucacuuuuauaggcagc

SEQ ID NO: 360539 - RNA, 22 nt, Human
uauuuaguuaucuuucauaaaa

SEQ ID NO: 360540 - RNA, 22 nt, Human
gaguuauuucagaaggaaagau

SEQ ID NO: 360541 - RNA, 22 nt, Human
cacccacauggaaauucacagu

SEQ ID NO: 360542 - RNA, 22 nt, Human
uagcugcugcagcacagggagg

SEQ ID NO: 360543 - RNA, 22 nt, Human
ugaagaauaaaugguugagacu

SEQ ID NO: 360544 - RNA, 22 nt, Human
ugcagcucauugcuggggucug

SEQ ID NO: 360545 - RNA, 22 nt, Human
uccuuccuggggucucugcugc

SEQ ID NO: 360546 - RNA, 22 nt, Human
uaaugcacauagaaguacuuag

SEQ ID NO: 360547 - RNA, 22 nt, Human
ugcagaguaaaagcagaugcua

SEQ ID NO: 360548 - RNA, 22 nt, Human
cauccugcggggagcagagggc

SEQ ID NO: 360549 - RNA, 22 nt, Human
uguauuuuuaggaaugcgcuau

SEQ ID NO: 360550 - RNA, 22 nt, Human
cagaguguggcaucuuccaacu

SEQ ID NO: 360551 - RNA, 22 nt, Human
ccagaagaggacacagugugga

SEQ ID NO: 360552 - RNA, 22 nt, Human
aggcagagcuggguuuugaaau

SEQ ID NO: 360553 - RNA, 22 nt, Human
uagggcuauaagagaauaagac

SEQ ID NO: 360554 - RNA, 22 nt, Human
cugcccugaccugccucagagu

SEQ ID NO: 360555 - RNA, 22 nt, Human
ucuugcacuucaugaauauguu

SEQ ID NO: 360556 - RNA, 22 nt, Human
agaaaacuugucacagcucuca

SEQ ID NO: 360557 - RNA, 21 nt, Human
ggucuuccaaauaaggagaaa

SEQ ID NO: 360558 - RNA, 22 nt, Human
gccuaauaugcaaaauugauac

SEQ ID NO: 360559 - RNA, 22 nt, Human
cccugagaugccucacccuagu

SEQ ID NO: 360560 - RNA, 22 nt, Human
uuuaaauucugucugccgcuua

SEQ ID NO: 360561 - RNA, 22 nt, Human
agcuuccugaugcaagagggcu

SEQ ID NO: 360562 - RNA, 22 nt, Human
ucuggcuccacuuucuucauuu

SEQ ID NO: 360563 - RNA, 22 nt, Human
ccugagugcuuccagagucaug

SEQ ID NO: 360564 - RNA, 22 nt, Human
uuagagucaaaauggcauguua

SEQ ID NO: 360565 - RNA, 21 nt, Human
uuucacaaaaguaugugacaa

SEQ ID NO: 360566 - RNA, 22 nt, Human
gaugcugagagguggagggaac

SEQ ID NO: 360567 - RNA, 22 nt, Human
auauuauucuaguaacagugau

SEQ ID NO: 360568 - RNA, 22 nt, Human
caggaaggcgcggcugugccug

SEQ ID NO: 360569 - RNA, 22 nt, Human
ucagggacuaggugcugccuga

SEQ ID NO: 360570 - RNA, 22 nt, Human
uuuaggcaagaacucacugaga

SEQ ID NO: 360571 - RNA, 22 nt, Human
uuugauuuacuggauauucuca

SEQ ID NO: 360572 - RNA, 22 nt, Human
aggagggagaugcccauccugg

SEQ ID NO: 360573 - RNA, 23 nt, Human
gcucugagggcuuaucccuccca

SEQ ID NO: 360574 - RNA, 18 nt, Human
uaggagagaauuuauuua

SEQ ID NO: 360575 - RNA, 22 nt, Human
agaaaugacacacaugagacau

SEQ ID NO: 360576 - RNA, 22 nt, Human
agagcagagggcucugggacaa

SEQ ID NO: 360577 - RNA, 22 nt, Human
ucuuuacacaagacaagaauaa

SEQ ID NO: 360578 - RNA, 22 nt, Human
cugugcuugacagugggaagca

SEQ ID NO: 360579 - RNA, 22 nt, Human
gaagcagcuagcccacuaguca

SEQ ID NO: 360580 - RNA, 22 nt, Human
aaacuguauauuuauggcaugu

SEQ ID NO: 360581 - RNA, 23 nt, Human
aguguuccaguugguugagagug

SEQ ID NO: 360582 - RNA, 17 nt, Human
gagagcugcugcuuccg

SEQ ID NO: 360583 - RNA, 22 nt, Human
guuccaaagucucugagcugag

SEQ ID NO: 360584 - RNA, 22 nt, Human
cacccaggcagguggcugagaa

SEQ ID NO: 360585 - RNA, 22 nt, Human
agaggcagaaguguucaaaccc

SEQ ID NO: 360586 - RNA, 22 nt, Human
ccagucacagguguguuuauau

SEQ ID NO: 360587 - RNA, 22 nt, Human
ggagacaguauggcuuguagcu

SEQ ID NO: 360588 - RNA, 22 nt, Human
uucaaagugcauguuccucaga

SEQ ID NO: 360589 - RNA, 22 nt, Human
ucucagagcuucaguuauuuuc

SEQ ID NO: 360590 - RNA, 22 nt, Human
ucucagagcuucagaaagcacc

SEQ ID NO: 360591 - RNA, 22 nt, Human
ugaccugcagucaagaggggaa

SEQ ID NO: 360592 - RNA, 22 nt, Human
cccugaggggaguggugaggug

SEQ ID NO: 360593 - RNA, 22 nt, Human
accaggcaguauggugcugcaa

SEQ ID NO: 360594 - RNA, 22 nt, Human
gugugcagggcugccugugccg

SEQ ID NO: 360595 - RNA, 22 nt, Human
agcugggucuugggccaggaga

SEQ ID NO: 360596 - RNA, 21 nt, Human
uuucugucucugccacuaguu

SEQ ID NO: 360597 - RNA, 22 nt, Human
caggaacauuuaaccacagggu

SEQ ID NO: 360598 - RNA, 22 nt, Human
agagcugaaaaagcugacccgg

SEQ ID NO: 360599 - RNA, 22 nt, Human
gucugagaaucuugcauaucau

SEQ ID NO: 360600 - RNA, 22 nt, Human
augcacagcagugaguucagug

SEQ ID NO: 360601 - RNA, 22 nt, Human
augugaggaagaaagagguaag

SEQ ID NO: 360602 - RNA, 22 nt, Human
aaaaagguugauccagauuagg

SEQ ID NO: 360603 - RNA, 22 nt, Human
aucugcaggaaugugugcagag

SEQ ID NO: 360604 - RNA, 22 nt, Human
acaguguguucugggaccucca

SEQ ID NO: 360605 - RNA, 22 nt, Human
uuauuaggaacucaggauuuuu

SEQ ID NO: 360606 - RNA, 22 nt, Human
gaucaaaagcuggguucuaaaa

SEQ ID NO: 360607 - RNA, 22 nt, Human
aucacgucaugguuugaucugg

SEQ ID NO: 360608 - RNA, 22 nt, Human
uuuugaaagaguccugcuacag

SEQ ID NO: 360609 - RNA, 22 nt, Human
ugugaaggagaugaagggagug

SEQ ID NO: 360610 - RNA, 22 nt, Human
agagauaugaguaguugugaca

SEQ ID NO: 360611 - RNA, 22 nt, Human
aguaaagcagaguugcaguaca

SEQ ID NO: 360612 - RNA, 22 nt, Human
uucaaugagcccaagaacguga

SEQ ID NO: 360613 - RNA, 22 nt, Human
agucucuuuguggacucugccu

SEQ ID NO: 360614 - RNA, 22 nt, Human
guggcuugaccaucccugcuac

SEQ ID NO: 360615 - RNA, 22 nt, Human
gaggcagcggcucacagagaaa

SEQ ID NO: 360616 - RNA, 22 nt, Human
ugucucaguauacgaaacacuu

SEQ ID NO: 360617 - RNA, 22 nt, Human
acagauauaaacuauaguagug

SEQ ID NO: 360618 - RNA, 22 nt, Human
auaaggcagucccuuaacaagg

SEQ ID NO: 360619 - RNA, 22 nt, Human
uuuauucuugagagugagaaga

SEQ ID NO: 360620 - RNA, 22 nt, Human
cugcagggcccgccugagcccu

SEQ ID NO: 360621 - RNA, 22 nt, Human
uugaauaguguuuucaguauac

SEQ ID NO: 360622 - RNA, 22 nt, Human
acaguggaauggugggccugca

SEQ ID NO: 360623 - RNA, 22 nt, Human
ggcagcuccucucagcaaaaga

SEQ ID NO: 360624 - RNA, 22 nt, Human
cugugcuggagaugggccagag

SEQ ID NO: 360625 - RNA, 22 nt, Human
uugcuuugccaccagaagucua

SEQ ID NO: 360626 - RNA, 22 nt, Human
ggcuucuccccuuugagucuuc

SEQ ID NO: 360627 - RNA, 22 nt, Human
uuauauuaguuagacuugcugu

SEQ ID NO: 360628 - RNA, 22 nt, Human
uuccuuagggaaagggauaagg

SEQ ID NO: 360629 - RNA, 22 nt, Human
caaaguuuaaaguagauuucag

SEQ ID NO: 360630 - RNA, 22 nt, Human
ccaggugugccagcagggacug

SEQ ID NO: 360631 - RNA, 22 nt, Human
cauuaugugggaaaauguucuu

SEQ ID NO: 360632 - RNA, 22 nt, Human
ggagcuggucagccuugagcau

SEQ ID NO: 360633 - RNA, 22 nt, Human
uuugaguugcuuauuuaauagg

SEQ ID NO: 360634 - RNA, 22 nt, Human
cagggcacggagaagucacccc

SEQ ID NO: 360635 - RNA, 22 nt, Human
caucagaaggccagaggguagc

SEQ ID NO: 360636 - RNA, 22 nt, Human
caggggcuguggcacauggugu

SEQ ID NO: 360637 - RNA, 22 nt, Human
cucucuggaagggggagcugau

SEQ ID NO: 360638 - RNA, 22 nt, Human
ucauuuguaccauuuuuuaaga

SEQ ID NO: 360639 - RNA, 22 nt, Human
cuggggccacaacggcgcacgc

SEQ ID NO: 360640 - RNA, 22 nt, Human
cggagcugccugccaagccugc

SEQ ID NO: 360641 - RNA, 22 nt, Human
ccagugcccagcugcccaggca

SEQ ID NO: 360642 - RNA, 22 nt, Human
cucccagagagcaggugggccg

SEQ ID NO: 360643 - RNA, 22 nt, Human
caaagccauagaguagauaaga

SEQ ID NO: 360644 - RNA, 22 nt, Human
uuccauaaaggugauaguauac

SEQ ID NO: 360645 - RNA, 22 nt, Human
agagccugugggagaugcagcu

SEQ ID NO: 360646 - RNA, 20 nt, Human
auauguguacguguauacau

SEQ ID NO: 360647 - RNA, 22 nt, Human
gagaggcuaugagguucugugu

SEQ ID NO: 360648 - RNA, 22 nt, Human
ggccugcugacccaaguccugu

SEQ ID NO: 360649 - RNA, 22 nt, Human
aggcuucagaugaccuuagcau

SEQ ID NO: 360650 - RNA, 22 nt, Human
gaugaaaaauugcugugucaua

SEQ ID NO: 360651 - RNA, 22 nt, Human
uagcugugagcacccaggcugu

SEQ ID NO: 360652 - RNA, 22 nt, Human
guggccagcaagugcugccucu

SEQ ID NO: 360653 - RNA, 22 nt, Human
agagacaggauaucugcucaug

SEQ ID NO: 360654 - RNA, 22 nt, Human
ugcuugugagaguuuuuucaga

SEQ ID NO: 360655 - RNA, 22 nt, Human
gccuggugugcgccgcgcagcu

SEQ ID NO: 360656 - RNA, 23 nt, Human
uggcucagggucucuuaugaagu

SEQ ID NO: 360657 - RNA, 22 nt, Human
ucacauuuguucuugaaucuaa

SEQ ID NO: 360658 - RNA, 19 nt, Human
uuucuuaggccuuuggccu

SEQ ID NO: 360659 - RNA, 19 nt, Human
gacucacaccuuccgcugu

SEQ ID NO: 360660 - RNA, 22 nt, Human
aaggguggauuucugagcucua

SEQ ID NO: 360661 - RNA, 22 nt, Human
ugcucuguugugcaugugggau

SEQ ID NO: 360662 - RNA, 17 nt, Human
gggcagggacuccuggg

SEQ ID NO: 360663 - RNA, 22 nt, Human
gcugucacacauggccccagcu

SEQ ID NO: 360664 - RNA, 22 nt, Human
uucucugaguacguuucagugu

SEQ ID NO: 360665 - RNA, 22 nt, Human
aaggcuuuugggaauuuucaac

SEQ ID NO: 360666 - RNA, 22 nt, Human
uggcaggguuggccaccuuacc

SEQ ID NO: 360667 - RNA, 22 nt, Human
ccaggcuuucccagccucucca

SEQ ID NO: 360668 - RNA, 22 nt, Human
agcugcagagguuugugcaaca

SEQ ID NO: 360669 - RNA, 22 nt, Human
ucagggcagaauccaaagaauu

SEQ ID NO: 360670 - RNA, 22 nt, Human
aucagaauaauuagauuucaga

SEQ ID NO: 360671 - RNA, 22 nt, Human
uugcauaaaugcuuaaaauuug

SEQ ID NO: 360672 - RNA, 22 nt, Human
ugcaauaaagugcuauaaaucc

SEQ ID NO: 360673 - RNA, 22 nt, Human
ugugccagaaaauaugcugagg

SEQ ID NO: 360674 - RNA, 22 nt, Human
uaagaaacccaggaauuucuua

SEQ ID NO: 360675 - RNA, 22 nt, Human
gagggcagugaauuuugaagcu

SEQ ID NO: 360676 - RNA, 22 nt, Human
agaggccagggacacugcucaa

SEQ ID NO: 360677 - RNA, 22 nt, Human
acagaauauugguuacuguugc

SEQ ID NO: 360678 - RNA, 22 nt, Human
cagaguguuagcgcugguuggg

SEQ ID NO: 360679 - RNA, 22 nt, Human
agccaggcagggcucucgcucu

SEQ ID NO: 360680 - RNA, 22 nt, Human
aacaaacaaacauuuugucauc

SEQ ID NO: 360681 - RNA, 22 nt, Human
ugugacaugugucaucuuuucu

SEQ ID NO: 360682 - RNA, 22 nt, Human
cagccucuuuccacaucaggca

SEQ ID NO: 360683 - RNA, 22 nt, Human
aaaugcaccuugcugugagacu

SEQ ID NO: 360684 - RNA, 19 nt, Human
cagucccaaauucuuguca

SEQ ID NO: 360685 - RNA, 22 nt, Human
caguccuuucaauggugaccuu

SEQ ID NO: 360686 - RNA, 18 nt, Human
uggcagcaggaagccauu

SEQ ID NO: 360687 - RNA, 22 nt, Human
gcagcuuuggagguggaacucu

SEQ ID NO: 360688 - RNA, 22 nt, Human
cagugggaagggcagaggcuuu

SEQ ID NO: 360689 - RNA, 22 nt, Human
ggagugacucacagcugggaca

SEQ ID NO: 360690 - RNA, 22 nt, Human
agcuuuauuaacucuccaggug

SEQ ID NO: 360691 - RNA, 22 nt, Human
gccaggccugcaagugcuggug

SEQ ID NO: 360692 - RNA, 22 nt, Human
agugggcaggcagggugcgcag

SEQ ID NO: 360693 - RNA, 22 nt, Human
ccuucuucuguguggcccaaga

SEQ ID NO: 360694 - RNA, 22 nt, Human
gccugcaguucugugcuaggca

SEQ ID NO: 360695 - RNA, 22 nt, Human
cccuggaggcaaagguugcagu

SEQ ID NO: 360696 - RNA, 22 nt, Human
aaaaauaggucaaccguguaug

SEQ ID NO: 360697 - RNA, 22 nt, Human
ucacaugcuacugagccagacc

SEQ ID NO: 360698 - RNA, 22 nt, Human
cuuagaaauaaugguuucaguu

SEQ ID NO: 360699 - RNA, 22 nt, Human
ucugaggcauacccaggccccc

SEQ ID NO: 360700 - RNA, 22 nt, Human
gagacaggauuuaaccaaagcu

SEQ ID NO: 360701 - RNA, 22 nt, Human
uccugucugucuuuggucccuu

SEQ ID NO: 360702 - RNA, 22 nt, Human
cagcuggccugaucccuguggc

SEQ ID NO: 360703 - RNA, 22 nt, Human
acuguucaaguuuuaugcugga

SEQ ID NO: 360704 - RNA, 22 nt, Human
gaggcucagagugguuaaauaa

SEQ ID NO: 360705 - RNA, 22 nt, Human
uaaacaucugucauguguuuau

SEQ ID NO: 360706 - RNA, 22 nt, Human
uuugcauugcauacaaggaacu

SEQ ID NO: 360707 - RNA, 22 nt, Human
uauuccaguccuauccucuuuu

SEQ ID NO: 360708 - RNA, 22 nt, Human
cgcugggcgccgaccugcuggc

SEQ ID NO: 360709 - RNA, 22 nt, Human
gcugccugauuuacauagugaa

SEQ ID NO: 360710 - RNA, 20 nt, Human
aaagucuuaugguuaauuuu

SEQ ID NO: 360711 - RNA, 20 nt, Human
uucuggaggcuacaagucug

SEQ ID NO: 360712 - RNA, 22 nt, Human
gaagucuggcugacgagaguua

SEQ ID NO: 360713 - RNA, 22 nt, Human
ucucagggugaggaaagaauuu

SEQ ID NO: 360714 - RNA, 22 nt, Human
uggcagcaaaaccagaaucaga

SEQ ID NO: 360715 - RNA, 22 nt, Human
cccaggucuaugccagcucuga

SEQ ID NO: 360716 - RNA, 22 nt, Human
ggcucagaccucccagcuccag

SEQ ID NO: 360717 - RNA, 22 nt, Human
aaaugcacaaaguaaguguaau

SEQ ID NO: 360718 - RNA, 22 nt, Human
agcuggcauacuuugcuaggaa

SEQ ID NO: 360719 - RNA, 22 nt, Human
gcugccuuuuaaagccucgcuu

SEQ ID NO: 360720 - RNA, 22 nt, Human
uuuuaacuuaaaauacauagau

SEQ ID NO: 360721 - RNA, 22 nt, Human
uaagaacauuuucggaaagaua

SEQ ID NO: 360722 - RNA, 22 nt, Human
cauuugaaauucuuagaacaaa

SEQ ID NO: 360723 - RNA, 22 nt, Human
uauuucaagaacuucuauccau

SEQ ID NO: 360724 - RNA, 22 nt, Human
ugucccucugaggcuucccugg

SEQ ID NO: 360725 - RNA, 22 nt, Human
agaggacagacggaaagugcca

SEQ ID NO: 360726 - RNA, 22 nt, Human
cagaaggcuggcagauugagau

SEQ ID NO: 360727 - RNA, 22 nt, Human
uaucagaaaucaacacacagug

SEQ ID NO: 360728 - RNA, 22 nt, Human
uccuguuuaucugugugacucg

SEQ ID NO: 360729 - RNA, 22 nt, Human
cagaggaaggcucugggaaugu

SEQ ID NO: 360730 - RNA, 18 nt, Human
agaaggagcuaugggcag

SEQ ID NO: 360731 - RNA, 22 nt, Human
ggcaggugugagaucgaggcca

SEQ ID NO: 360732 - RNA, 22 nt, Human
acagugacguuuauuugagacg

SEQ ID NO: 360733 - RNA, 22 nt, Human
ccaguuuuuccagugcuuucug

SEQ ID NO: 360734 - RNA, 22 nt, Human
agcaggguauguuagagcugua

SEQ ID NO: 360735 - RNA, 22 nt, Human
agcccugggaggccagcuugua

SEQ ID NO: 360736 - RNA, 22 nt, Human
cagagggcucaguccugcugga

SEQ ID NO: 360737 - RNA, 23 nt, Human
ucuguacacaucagcaucuccca

SEQ ID NO: 360738 - RNA, 22 nt, Human
gacuacucaaacuuucucuaua

SEQ ID NO: 360739 - RNA, 22 nt, Human
uacccagcuucaagucaggacu

SEQ ID NO: 360740 - RNA, 22 nt, Human
cuugaauccaaaugggagauga

SEQ ID NO: 360741 - RNA, 22 nt, Human
uaagaaucgauguuuauuuaga

SEQ ID NO: 360742 - RNA, 22 nt, Human
cagguacacucccuugugcuga

SEQ ID NO: 360743 - RNA, 22 nt, Human
ccuccuuuccuguuuuccugag

SEQ ID NO: 360744 - RNA, 22 nt, Human
uuguuacacauaauaacauuuu

SEQ ID NO: 360745 - RNA, 22 nt, Human
auucaguaggucuagaauaaga

SEQ ID NO: 360746 - RNA, 22 nt, Human
acuggcagcuguaggaugcaug

SEQ ID NO: 360747 - RNA, 22 nt, Human
uagaggugucacuuugggaagu

SEQ ID NO: 360748 - RNA, 22 nt, Human
aaggcacuagcagaauuaguga

SEQ ID NO: 360749 - RNA, 22 nt, Human
gugcagggagcccagaaggucc

SEQ ID NO: 360750 - RNA, 22 nt, Human
auuucaacguuagauguaauag

SEQ ID NO: 360751 - RNA, 22 nt, Human
aucuggcuuuuacugaauugcu

SEQ ID NO: 360752 - RNA, 22 nt, Human
auugaaagcauggauuuggauu

SEQ ID NO: 360753 - RNA, 22 nt, Human
aaagaacagauguguggugcau

SEQ ID NO: 360754 - RNA, 22 nt, Human
gccagguguaguggccacaccu

SEQ ID NO: 360755 - RNA, 22 nt, Human
ccagagaguaaacauuuuccgg

SEQ ID NO: 360756 - RNA, 22 nt, Human
uggggccugagguggagcugca

SEQ ID NO: 360757 - RNA, 22 nt, Human
uucuucaaugugcccuguuuuc

SEQ ID NO: 360758 - RNA, 22 nt, Human
uuagcaucugcuguaagcuuau

SEQ ID NO: 360759 - RNA, 22 nt, Human
gugcucuccuggcugcccugac

SEQ ID NO: 360760 - RNA, 22 nt, Human
gcguuaauaacauuaauaaugc

SEQ ID NO: 360761 - RNA, 22 nt, Human
agggcugcugaggaagccuugc

SEQ ID NO: 360762 - RNA, 22 nt, Human
cuuccaaaauuuauauguugaa

SEQ ID NO: 360763 - RNA, 22 nt, Human
ucuuuauuucugaaucccccau

SEQ ID NO: 360764 - RNA, 22 nt, Human
cccaaggcugcagugagcauga

SEQ ID NO: 360765 - RNA, 22 nt, Human
gucccaggcagagucaggaggg

SEQ ID NO: 360766 - RNA, 22 nt, Human
ucagaauucagagggagugggg

SEQ ID NO: 360767 - RNA, 22 nt, Human
gccaggcugcuggcugcugucc

SEQ ID NO: 360768 - RNA, 22 nt, Human
aagcugccugggaggaagggcu

SEQ ID NO: 360769 - RNA, 22 nt, Human
auuauuagugauguuguuacug

SEQ ID NO: 360770 - RNA, 22 nt, Human
ccuggguggcagagguugcagu

SEQ ID NO: 360771 - RNA, 22 nt, Human
uagucaccuguugugugaugcc

SEQ ID NO: 360772 - RNA, 22 nt, Human
agcuggagaaaccugggagggu

SEQ ID NO: 360773 - RNA, 19 nt, Human
cugaggcccauguaccaug

SEQ ID NO: 360774 - RNA, 22 nt, Human
ugaagguggcauaggagagaug

SEQ ID NO: 360775 - RNA, 22 nt, Human
caggcccugggcaggaucagcc

SEQ ID NO: 360776 - RNA, 22 nt, Human
aaaugcacagagccuuagagau

SEQ ID NO: 360777 - RNA, 22 nt, Human
agcccucauggaacagcuccua

SEQ ID NO: 360778 - RNA, 22 nt, Human
gaggggcuugaggcccugaugg

SEQ ID NO: 360779 - RNA, 22 nt, Human
caagagcucaccggagagcauu

SEQ ID NO: 360780 - RNA, 22 nt, Human
auuagcugaccucuaaggagcc

SEQ ID NO: 360781 - RNA, 22 nt, Human
ucccagcgcggggggaggaucc

SEQ ID NO: 360782 - RNA, 22 nt, Human
caaucaguuucuguuguauaau

SEQ ID NO: 360783 - RNA, 22 nt, Human
guccugggccugcugaggcuga

SEQ ID NO: 360784 - RNA, 22 nt, Human
aauuucuccaagaaugcuuaga

SEQ ID NO: 360785 - RNA, 22 nt, Human
gccugaugagcuuccagcugag

SEQ ID NO: 360786 - RNA, 22 nt, Human
uaagaaucugcauuuuaacaag

SEQ ID NO: 360787 - RNA, 22 nt, Human
uuccaugaagggcagccucuca

SEQ ID NO: 360788 - RNA, 23 nt, Human
uggccucuccccaccuggcagaa

SEQ ID NO: 360789 - RNA, 22 nt, Human
ccaggacagugaacauguaaga

SEQ ID NO: 360790 - RNA, 20 nt, Human
cuggcaggagcgagucuacc

SEQ ID NO: 360791 - RNA, 22 nt, Human
gguggcagucuuaagagaucuu

SEQ ID NO: 360792 - RNA, 22 nt, Human
uucaaauuaccacauuugcuua

SEQ ID NO: 360793 - RNA, 22 nt, Human
ggaggcgauccugggaaacacc

SEQ ID NO: 360794 - RNA, 22 nt, Human
ucuggcucauacaagccugcaa

SEQ ID NO: 360795 - RNA, 23 nt, Human
ucaugcccaggcuccagauguca

SEQ ID NO: 360796 - RNA, 22 nt, Human
ccacagggcacaagggagguug

SEQ ID NO: 360797 - RNA, 22 nt, Human
aaaguuugcaauuuauguuaau

SEQ ID NO: 360798 - RNA, 22 nt, Human
uauauacuuucuuccuggguag

SEQ ID NO: 360799 - RNA, 22 nt, Human
ucucagggccucccucuguuuc

SEQ ID NO: 360800 - RNA, 22 nt, Human
caaauguauucucacuucaggg

SEQ ID NO: 360801 - RNA, 22 nt, Human
ucugagagucucugaggcagau

SEQ ID NO: 360802 - RNA, 22 nt, Human
gcagagugccgagauggaagcg

SEQ ID NO: 360803 - RNA, 22 nt, Human
gcccaggccggagagcagugcu

SEQ ID NO: 360804 - RNA, 22 nt, Human
uaagaacagauaaaguuucccc

SEQ ID NO: 360805 - RNA, 22 nt, Human
acacugugagcugaagggcugc

SEQ ID NO: 360806 - RNA, 22 nt, Human
cuacccagauccaggauggcua

SEQ ID NO: 360807 - RNA, 19 nt, Human
aggguccagggagcggcuc

SEQ ID NO: 360808 - RNA, 22 nt, Human
agugggguccucaguaugguuc

SEQ ID NO: 360809 - RNA, 22 nt, Human
aggggcugccuggcuuggcacu

SEQ ID NO: 360810 - RNA, 22 nt, Human
aggcacaggccucagcacccag

SEQ ID NO: 360811 - RNA, 22 nt, Human
aauauguuccacuuaaagcugg

SEQ ID NO: 360812 - RNA, 22 nt, Human
cugccuggagcauucugaaggu

SEQ ID NO: 360813 - RNA, 22 nt, Human
uucacagggcagcagcugagcc

SEQ ID NO: 360814 - RNA, 22 nt, Human
cacccaggacaggccagaugug

SEQ ID NO: 360815 - RNA, 22 nt, Human
ccacccugagccgcaagagcag

SEQ ID NO: 360816 - RNA, 22 nt, Human
guuucauucggcagcucauaag

SEQ ID NO: 360817 - RNA, 22 nt, Human
agccugcaggaugggcagcacc

SEQ ID NO: 360818 - RNA, 22 nt, Human
aguuuauguaaaauuaguaaug

SEQ ID NO: 360819 - RNA, 22 nt, Human
uuuuuccuuagggguuacucac

SEQ ID NO: 360820 - RNA, 22 nt, Human
aggcugaggcagguggaucauu

SEQ ID NO: 360821 - RNA, 22 nt, Human
cugagcgcaugguugcugggga

SEQ ID NO: 360822 - RNA, 18 nt, Human
agaagccacgaggagucc

SEQ ID NO: 360823 - RNA, 22 nt, Human
caggagcuacucagguuggguu

SEQ ID NO: 360824 - RNA, 22 nt, Human
ucaagcaggguagcaagcuggu

SEQ ID NO: 360825 - RNA, 22 nt, Human
ccccaggacacauggaccaagu

SEQ ID NO: 360826 - RNA, 22 nt, Human
gucauugcaguggcaaaucaca

SEQ ID NO: 360827 - RNA, 22 nt, Human
ggugcagaucuuucucuucagg

SEQ ID NO: 360828 - RNA, 22 nt, Human
aaaugccucugcuguacacaau

SEQ ID NO: 360829 - RNA, 22 nt, Human
uguauacauuuaacuagauaga

SEQ ID NO: 360830 - RNA, 19 nt, Human
agggcugcucuggccuggg

SEQ ID NO: 360831 - RNA, 22 nt, Human
gccugcagccagggaguucucu

SEQ ID NO: 360832 - RNA, 22 nt, Human
cucagggcuggaaagccaggaa

SEQ ID NO: 360833 - RNA, 22 nt, Human
uucaaaauuguucuaagcucug

SEQ ID NO: 360834 - RNA, 22 nt, Human
ccagguggacggcgaguacagg

SEQ ID NO: 360835 - RNA, 22 nt, Human
cccaagaucuuucgugcacuaa

SEQ ID NO: 360836 - RNA, 22 nt, Human
agcugcugcgccucacccuggc

SEQ ID NO: 360837 - RNA, 22 nt, Human
cuggcucccagcuuucagggag

SEQ ID NO: 360838 - RNA, 22 nt, Human
gccucugcaggugcgguuaucc

SEQ ID NO: 360839 - RNA, 22 nt, Human
agccagggacgcugcaggcuac

SEQ ID NO: 360840 - RNA, 22 nt, Human
auugcagcuggucaggguaauu

SEQ ID NO: 360841 - RNA, 22 nt, Human
uuccaaagucauguugcugaua

SEQ ID NO: 360842 - RNA, 22 nt, Human
ucucccaggcugcccuguggac

SEQ ID NO: 360843 - RNA, 22 nt, Human
gcagagcccuggggguauggug

SEQ ID NO: 360844 - RNA, 22 nt, Human
auaacagaguugggaagugaaa

SEQ ID NO: 360845 - RNA, 22 nt, Human
uggcucagcgguggcagcagac

SEQ ID NO: 360846 - RNA, 22 nt, Human
uugcauuugacaaauuauuuaa

SEQ ID NO: 360847 - RNA, 22 nt, Human
agagcuggauggucaagauggc

SEQ ID NO: 360848 - RNA, 22 nt, Human
caucagaaugaauguucuggag

SEQ ID NO: 360849 - RNA, 22 nt, Human
cagauggccagaggcagcugca

SEQ ID NO: 360850 - RNA, 22 nt, Human
gcugucuguucgagcguguguu

SEQ ID NO: 360851 - RNA, 21 nt, Human
ggagcugcaggagccgaaggc

SEQ ID NO: 360852 - RNA, 22 nt, Human
cagguggggcagcugugggagc

SEQ ID NO: 360853 - RNA, 22 nt, Human
aaguuauaucaucucauugacg

SEQ ID NO: 360854 - RNA, 22 nt, Human
uuuaugaacuacagauauaacu

SEQ ID NO: 360855 - RNA, 22 nt, Human
ggcagcucacgggcauggggug

SEQ ID NO: 360856 - RNA, 22 nt, Human
gcagagccccucaagccagccu

SEQ ID NO: 360857 - RNA, 22 nt, Human
uuugcaguagacaucuuauuuu

SEQ ID NO: 360858 - RNA, 22 nt, Human
uccagccaagggagguuacuag

SEQ ID NO: 360859 - RNA, 22 nt, Human
agggcagcccuucugggagggc

SEQ ID NO: 360860 - RNA, 22 nt, Human
ggcaagcucaggccucaggugu

SEQ ID NO: 360861 - RNA, 22 nt, Human
aggcuggagggcaauggcaaga

SEQ ID NO: 360862 - RNA, 22 nt, Human
guguguuucagaagccaggugu

SEQ ID NO: 360863 - RNA, 22 nt, Human
cccaggagacauauagaaggac

SEQ ID NO: 360864 - RNA, 22 nt, Human
acaguggaguugggguagcccu

SEQ ID NO: 360865 - RNA, 22 nt, Human
aggucauuggggacuaucuccg

SEQ ID NO: 360866 - RNA, 22 nt, Human
aauacauguuuucuacuauucu

SEQ ID NO: 360867 - RNA, 22 nt, Human
uccuucuuucccccuagucauu

SEQ ID NO: 360868 - RNA, 22 nt, Human
cauguuaaugaauuuuugcagu

SEQ ID NO: 360869 - RNA, 22 nt, Human
gcuggccuugugucugaggaag

SEQ ID NO: 360870 - RNA, 22 nt, Human
acaguggaugacauccuuuugc

SEQ ID NO: 360871 - RNA, 22 nt, Human
cagucaccaccagguggcagua

SEQ ID NO: 360872 - RNA, 22 nt, Human
aucucccagccacagcauucuu

SEQ ID NO: 360873 - RNA, 22 nt, Human
cagguaggauggaagggcucaa

SEQ ID NO: 360874 - RNA, 22 nt, Human
aggcugaggcgggaggaucacu

SEQ ID NO: 360875 - RNA, 22 nt, Human
cugggagaugacucagagcagg

SEQ ID NO: 360876 - RNA, 22 nt, Human
uccugccucacaguugaaguuu

SEQ ID NO: 360877 - RNA, 22 nt, Human
uuuuuauaacucuuuugugaca

SEQ ID NO: 360878 - RNA, 22 nt, Human
auccagcuuugucuggucuucg

SEQ ID NO: 360879 - RNA, 22 nt, Human
guaagggauuugaacauagguu

SEQ ID NO: 360880 - RNA, 22 nt, Human
uuucuaggcacagugucuuccc

SEQ ID NO: 360881 - RNA, 22 nt, Human
cuugaaucuucugaguauuugc

SEQ ID NO: 360882 - RNA, 21 nt, Human
gccacguuucagucuucucag

SEQ ID NO: 360883 - RNA, 22 nt, Human
agaguuaagacguacaugagug

SEQ ID NO: 360884 - RNA, 22 nt, Human
guuuuaguggguggccacugau

SEQ ID NO: 360885 - RNA, 22 nt, Human
gggcaggaggcuaauucugcau

SEQ ID NO: 360886 - RNA, 20 nt, Human
ccagcauguacacaugugga

SEQ ID NO: 360887 - RNA, 22 nt, Human
ugcauugcauuugucaugaaga

SEQ ID NO: 360888 - RNA, 22 nt, Human
auugaaagauuuugggcucaug

SEQ ID NO: 360889 - RNA, 22 nt, Human
ucagaagcauguggggagccug

SEQ ID NO: 360890 - RNA, 22 nt, Human
agcagaggacaguucuuaggaa

SEQ ID NO: 360891 - RNA, 22 nt, Human
cccaggaagagugaguggcauu

SEQ ID NO: 360892 - RNA, 19 nt, Human
ucauucaggaccaguggau

SEQ ID NO: 360893 - RNA, 22 nt, Human
ucucugucugagccuggcagac

SEQ ID NO: 360894 - RNA, 22 nt, Human
gauguagagggaagauuuuaaa

SEQ ID NO: 360895 - RNA, 22 nt, Human
cuucucuucccagggacacagg

SEQ ID NO: 360896 - RNA, 22 nt, Human
ccucuggcuguaccacuggcac

SEQ ID NO: 360897 - RNA, 22 nt, Human
cccuggagucagguuggccugg

SEQ ID NO: 360898 - RNA, 22 nt, Human
uuauccuggauuauauauguga

SEQ ID NO: 360899 - RNA, 22 nt, Human
aggcagguccccuggaaggcac

SEQ ID NO: 360900 - RNA, 22 nt, Human
ugcugcacgauaaauaauuucu

SEQ ID NO: 360901 - RNA, 22 nt, Human
caggacauugauccauuggcac

SEQ ID NO: 360902 - RNA, 22 nt, Human
uccuuggcuuucuggagcuucu

SEQ ID NO: 360903 - RNA, 22 nt, Human
cucaggagaugacagaagguau

SEQ ID NO: 360904 - RNA, 22 nt, Human
gggcuggggcucaauaauuugu

SEQ ID NO: 360905 - RNA, 21 nt, Human
aggcagccagucaugcucccu

SEQ ID NO: 360906 - RNA, 22 nt, Human
ugaagcagcaaaugaugggaga

SEQ ID NO: 360907 - RNA, 22 nt, Human
ccuccagcgcgauccacuccgg

SEQ ID NO: 360908 - RNA, 20 nt, Human
gcagggcaucuuggccccca

SEQ ID NO: 360909 - RNA, 22 nt, Human
cugggcagugguggcccuuccc

SEQ ID NO: 360910 - RNA, 22 nt, Human
ucucaccauggugcuugcuuau

SEQ ID NO: 360911 - RNA, 22 nt, Human
ucucugagaaguuccuuuguga

SEQ ID NO: 360912 - RNA, 22 nt, Human
uaacauuagguagacauaagcc

SEQ ID NO: 360913 - RNA, 23 nt, Human
agccucuuuucuccugcccugca

SEQ ID NO: 360914 - RNA, 22 nt, Human
uggauuuaguucuucacaggcc

SEQ ID NO: 360915 - RNA, 22 nt, Human
aguguguccagaaaucuguauu

SEQ ID NO: 360916 - RNA, 22 nt, Human
aaggacuccaauucuuucaucu

SEQ ID NO: 360917 - RNA, 22 nt, Human
uuuuccucuguauuugaaaugc

SEQ ID NO: 360918 - RNA, 22 nt, Human
gcugcagcagcugcaggguugu

SEQ ID NO: 360919 - RNA, 21 nt, Human
ugacauuuccaauauaaagcc

SEQ ID NO: 360920 - RNA, 22 nt, Human
guggagcccugccuugcucaug

SEQ ID NO: 360921 - RNA, 21 nt, Human
acagaugggaugagcacacug

SEQ ID NO: 360922 - RNA, 22 nt, Human
uacaaagucagaauaacaggug

SEQ ID NO: 360923 - RNA, 22 nt, Human
aaaaacugcaauuacuuuuguc

SEQ ID NO: 360924 - RNA, 22 nt, Human
gcagggacgcagcacucuccgu

SEQ ID NO: 360925 - RNA, 22 nt, Human
ggcagagacuggguuggcagag

SEQ ID NO: 360926 - RNA, 22 nt, Human
uuacaaaguucugaguucaaac

SEQ ID NO: 360927 - RNA, 22 nt, Human
ggagauaguccaggugaaggga

SEQ ID NO: 360928 - RNA, 22 nt, Human
cugagaggaugcugcaguggag

SEQ ID NO: 360929 - RNA, 22 nt, Human
gcucaggaucagccaccucuuu

SEQ ID NO: 360930 - RNA, 22 nt, Human
ucaacagaagugauagcuauua

SEQ ID NO: 360931 - RNA, 22 nt, Human
acuguucauauucuuagaaauu

SEQ ID NO: 360932 - RNA, 22 nt, Human
gaagaaucaagcaguaauuugu

SEQ ID NO: 360933 - RNA, 22 nt, Human
agagggcaaguguaguccagua

SEQ ID NO: 360934 - RNA, 22 nt, Human
cccugcagagaccacugaccuu

SEQ ID NO: 360935 - RNA, 22 nt, Human
aggguccaucaaggacugcaca

SEQ ID NO: 360936 - RNA, 22 nt, Human
uauugaggaucuccugcuaauu

SEQ ID NO: 360937 - RNA, 22 nt, Human
gccugggagugcacagugaggu

SEQ ID NO: 360938 - RNA, 22 nt, Human
augaacaagagagggaagauuc

SEQ ID NO: 360939 - RNA, 23 nt, Human
agcuuugugaaagcagacauggg

SEQ ID NO: 360940 - RNA, 22 nt, Human
ggagaugccagaauugcaaauu

SEQ ID NO: 360941 - RNA, 22 nt, Human
agugauggugagugagaagcuc

SEQ ID NO: 360942 - RNA, 22 nt, Human
acaguggaaagaaacgaauuag

SEQ ID NO: 360943 - RNA, 22 nt, Human
aggcugcucugcgaagucagcu

SEQ ID NO: 360944 - RNA, 22 nt, Human
cagugaggcucugcugagcggu

SEQ ID NO: 360945 - RNA, 22 nt, Human
uggauuagugcugaaaugaugg

SEQ ID NO: 360946 - RNA, 22 nt, Human
auugaggcagcauaguucaggg

SEQ ID NO: 360947 - RNA, 22 nt, Human
caggcuugcugcuagagcacuu

SEQ ID NO: 360948 - RNA, 22 nt, Human
aagggcagaaagggacgcuuug

SEQ ID NO: 360949 - RNA, 22 nt, Human
uggcagcugagugcacccccuc

SEQ ID NO: 360950 - RNA, 22 nt, Human
uggagcuggaauuucugggccu

SEQ ID NO: 360951 - RNA, 22 nt, Human
uaagauguuuugguuugauaag

SEQ ID NO: 360952 - RNA, 22 nt, Human
aggagcugcauggauaccuggu

SEQ ID NO: 360953 - RNA, 22 nt, Human
accaggagacaugaccaaugag

SEQ ID NO: 360954 - RNA, 22 nt, Human
uuuaggaaugugguuuuugagc

SEQ ID NO: 360955 - RNA, 22 nt, Human
uggguggaauaaaucaguucug

SEQ ID NO: 360956 - RNA, 17 nt, Human
agccgggcauggaccag

SEQ ID NO: 360957 - RNA, 22 nt, Human
gcaccugauugauuucacugcu

SEQ ID NO: 360958 - RNA, 22 nt, Human
gauuucuugauaaguaguguga

SEQ ID NO: 360959 - RNA, 22 nt, Human
ucauacaucuguccuggagcuc

SEQ ID NO: 360960 - RNA, 22 nt, Human
ucagcugcucuguugagcugaa

SEQ ID NO: 360961 - RNA, 22 nt, Human
agccucugugacucacagguca

SEQ ID NO: 360962 - RNA, 22 nt, Human
uuuaauuuuccugguaggccug

SEQ ID NO: 360963 - RNA, 22 nt, Human
ugccugagugauguggcagcca

SEQ ID NO: 360964 - RNA, 22 nt, Human
gcaaaggcuagagacacaggga

SEQ ID NO: 360965 - RNA, 22 nt, Human
agugcacaccuuaguacaaagu

SEQ ID NO: 360966 - RNA, 22 nt, Human
gccuuccuuuuaccaccagcca

SEQ ID NO: 360967 - RNA, 22 nt, Human
uuugggaagaggaaucucugga

SEQ ID NO: 360968 - RNA, 22 nt, Human
gacacauagaucuaucucacuc

SEQ ID NO: 360969 - RNA, 22 nt, Human
cgggcagaucacacagggcuug

SEQ ID NO: 360970 - RNA, 22 nt, Human
acacacuguugcucauccaggc

SEQ ID NO: 360971 - RNA, 22 nt, Human
cuggcaggucucgcugacgugu

SEQ ID NO: 360972 - RNA, 22 nt, Human
ucaaaauuaaaccaacguccag

SEQ ID NO: 360973 - RNA, 22 nt, Human
caggaaaggugugucaugaugg

SEQ ID NO: 360974 - RNA, 22 nt, Human
uaauuucuagggacuaaggugc

SEQ ID NO: 360975 - RNA, 22 nt, Human
gagguacaugaggauacacagg

SEQ ID NO: 360976 - RNA, 22 nt, Human
aaaaugugaucuacaaaugcaa

SEQ ID NO: 360977 - RNA, 22 nt, Human
gcccaggagaggccagggcuga

SEQ ID NO: 360978 - RNA, 22 nt, Human
cuggccuuuagccccagugucu

SEQ ID NO: 360979 - RNA, 21 nt, Human
aggcugcuggcucaggguccu

SEQ ID NO: 360980 - RNA, 22 nt, Human
gcuggggcugggcugaggaaga

SEQ ID NO: 360981 - RNA, 22 nt, Human
cauacauaugcauguguguaua

SEQ ID NO: 360982 - RNA, 22 nt, Human
aucagagauggcuccagugcuc

SEQ ID NO: 360983 - RNA, 22 nt, Human
ugaggaagccaaacagcuacac

SEQ ID NO: 360984 - RNA, 18 nt, Human
cagaaguccuucaaggcc

SEQ ID NO: 360985 - RNA, 22 nt, Human
auggcuuugcucaaguuuagcc

SEQ ID NO: 360986 - RNA, 22 nt, Human
cugucaggggcggguggagcgg

SEQ ID NO: 360987 - RNA, 22 nt, Human
acucuugucucaacuuuuguau

SEQ ID NO: 360988 - RNA, 22 nt, Human
gggggcaguaaggauauggaaa

SEQ ID NO: 360989 - RNA, 23 nt, Human
uggggccaagugaggaagggucu

SEQ ID NO: 360990 - RNA, 22 nt, Human
gagggcucacugagaaagcagu

SEQ ID NO: 360991 - RNA, 22 nt, Human
uaaauuguuuucuagaaguugu

SEQ ID NO: 360992 - RNA, 22 nt, Human
gggccuggggacaccaccauga

SEQ ID NO: 360993 - RNA, 22 nt, Human
ugccuugguucucuacuuggag

SEQ ID NO: 360994 - RNA, 20 nt, Human
cagaaggucuaagcuuuaga

SEQ ID NO: 360995 - RNA, 22 nt, Human
ucagcuuucucuucuaucgaua

SEQ ID NO: 360996 - RNA, 22 nt, Human
agguggggaaaccagcgauccc

SEQ ID NO: 360997 - RNA, 20 nt, Human
agaagcugauacugauggaa

SEQ ID NO: 360998 - RNA, 22 nt, Human
gaaacuguauguaguuuuuggg

SEQ ID NO: 360999 - RNA, 22 nt, Human
accaggcuugaugauuugcuua

SEQ ID NO: 361000 - RNA, 22 nt, Human
uccuguguuacugccuggagcg

SEQ ID NO: 361001 - RNA, 22 nt, Human
ccagcugaggcagccacacagg

SEQ ID NO: 361002 - RNA, 22 nt, Human
aagagcugcccaaggugaacag

SEQ ID NO: 361003 - RNA, 22 nt, Human
gauuucuugauaauucaaaucc

SEQ ID NO: 361004 - RNA, 22 nt, Human
gugcaguggcagauccuagcuc

SEQ ID NO: 361005 - RNA, 22 nt, Human
cuccagggaugagacagaguag

SEQ ID NO: 361006 - RNA, 22 nt, Human
uauuuugacuauuaaaccaaca

SEQ ID NO: 361007 - RNA, 22 nt, Human
ccagcccuguaaggaugaggca

SEQ ID NO: 361008 - RNA, 22 nt, Human
gagcagcuggacaggccucccu

SEQ ID NO: 361009 - RNA, 22 nt, Human
agugccaggagcaaggagcucc

SEQ ID NO: 361010 - RNA, 22 nt, Human
ucugcagcuugcacaggcaggc

SEQ ID NO: 361011 - RNA, 22 nt, Human
ugaacagaucaauagaacugac

SEQ ID NO: 361012 - RNA, 22 nt, Human
ucaggcugguccccacagugga

SEQ ID NO: 361013 - RNA, 22 nt, Human
ucccagagguugagucacuuau

SEQ ID NO: 361014 - RNA, 22 nt, Human
aaacauuguaauuuuagcaugg

SEQ ID NO: 361015 - RNA, 20 nt, Human
cgcccaggagggcccaugug

SEQ ID NO: 361016 - RNA, 22 nt, Human
gucccauaaguagugcaacuug

SEQ ID NO: 361017 - RNA, 22 nt, Human
uaugcacaccuggguccuuguc

SEQ ID NO: 361018 - RNA, 22 nt, Human
acacugugucuagcauuuuaca

SEQ ID NO: 361019 - RNA, 22 nt, Human
gcguccagggaaggcccagcug

SEQ ID NO: 361020 - RNA, 22 nt, Human
cugagccaaggggacagugaca

SEQ ID NO: 361021 - RNA, 22 nt, Human
auacaucuugucagauucaugu

SEQ ID NO: 361022 - RNA, 22 nt, Human
aaacuguaagagaauaaacuac

SEQ ID NO: 361023 - RNA, 22 nt, Human
gcagaugguggggcaggaaaau

SEQ ID NO: 361024 - RNA, 21 nt, Human
ucuguacaucauugagucccc

SEQ ID NO: 361025 - RNA, 21 nt, Human
uuugcauuuuacaugugggga

SEQ ID NO: 361026 - RNA, 22 nt, Human
aggguauaaagagcaagcagaa

SEQ ID NO: 361027 - RNA, 22 nt, Human
aggcucagauccuuguguccug

SEQ ID NO: 361028 - RNA, 22 nt, Human
cucccuggcuuuguccugaggc

SEQ ID NO: 361029 - RNA, 19 nt, Human
gagcgcagagggcagggga

SEQ ID NO: 361030 - RNA, 22 nt, Human
gaggagcuggcugucgggaggc

SEQ ID NO: 361031 - RNA, 22 nt, Human
uugaaagggauauaucuuucug

SEQ ID NO: 361032 - RNA, 22 nt, Human
ucaugaaucguggaaugauuua

SEQ ID NO: 361033 - RNA, 22 nt, Human
guacagaaugcuugguaaggca

SEQ ID NO: 361034 - RNA, 22 nt, Human
uucuuguauauaaaaaucauuu

SEQ ID NO: 361035 - RNA, 22 nt, Human
ccuguucaaugcccuggcuuca

SEQ ID NO: 361036 - RNA, 22 nt, Human
cuccucccucuuugccacacau

SEQ ID NO: 361037 - RNA, 22 nt, Human
cccagcuaccucugcuaggaga

SEQ ID NO: 361038 - RNA, 22 nt, Human
ugagcuuccucccugcauccau

SEQ ID NO: 361039 - RNA, 22 nt, Human
acaaaugcagcauaaagugaac

SEQ ID NO: 361040 - RNA, 22 nt, Human
gcaucuaaauaaacgugggagu

SEQ ID NO: 361041 - RNA, 22 nt, Human
ucuguucaugaaauaucuuuuu

SEQ ID NO: 361042 - RNA, 22 nt, Human
gagcuggugaucagcuggagga

SEQ ID NO: 361043 - RNA, 21 nt, Human
gccaggaguagauuacauuua

SEQ ID NO: 361044 - RNA, 22 nt, Human
ucuuucucucuaaucaagcaca

SEQ ID NO: 361045 - RNA, 22 nt, Human
aggcacugggaauaugcugagg

SEQ ID NO: 361046 - RNA, 22 nt, Human
gcugcucucagagcucaugcug

SEQ ID NO: 361047 - RNA, 20 nt, Human
uuucacaucugucccuuuaa

SEQ ID NO: 361048 - RNA, 22 nt, Human
aaucaguuucuuggcaaguuua

SEQ ID NO: 361049 - RNA, 22 nt, Human
gccccagccaaggugacacgaa

SEQ ID NO: 361050 - RNA, 17 nt, Human
gcuuuggaaggguagac

SEQ ID NO: 361051 - RNA, 22 nt, Human
gcacugcagccucagauggugg

SEQ ID NO: 361052 - RNA, 22 nt, Human
ccaggugcucuugccagggcug

SEQ ID NO: 361053 - RNA, 22 nt, Human
ugaaaucugcaugcaaaguccu

SEQ ID NO: 361054 - RNA, 22 nt, Human
ucuuuccucugagcuccuguag

SEQ ID NO: 361055 - RNA, 22 nt, Human
guugggaagcagauggaugagc

SEQ ID NO: 361056 - RNA, 19 nt, Human
uggcauuuggaggcaaccu

SEQ ID NO: 361057 - RNA, 22 nt, Human
accaugaugcauccuuaaggaa

SEQ ID NO: 361058 - RNA, 18 nt, Human
aggcuucuuggcucaguc

SEQ ID NO: 361059 - RNA, 22 nt, Human
ucugagcauugaauuuucuucc

SEQ ID NO: 361060 - RNA, 22 nt, Human
acugggaggcaucuggagcuga

SEQ ID NO: 361061 - RNA, 22 nt, Human
cccaggagagggaaccaaaugu

SEQ ID NO: 361062 - RNA, 22 nt, Human
agcugagcugcagaugacugua

SEQ ID NO: 361063 - RNA, 22 nt, Human
aucuagaaaguguugaagauca

SEQ ID NO: 361064 - RNA, 22 nt, Human
uuaauuuauguccaaaccagau

SEQ ID NO: 361065 - RNA, 22 nt, Human
gucauauacacugcauguaauc

SEQ ID NO: 361066 - RNA, 22 nt, Human
aaaaugcaugagaaugugcucg

SEQ ID NO: 361067 - RNA, 22 nt, Human
agaugguuuugucuuuaugauu

SEQ ID NO: 361068 - RNA, 23 nt, Human
cauggcagcaagagcucauggcc

SEQ ID NO: 361069 - RNA, 23 nt, Human
uagagcagggaaaucugucagag

SEQ ID NO: 361070 - RNA, 18 nt, Human
auggucucauacugggag

SEQ ID NO: 361071 - RNA, 22 nt, Human
aggcaagcauugggaacagggc

SEQ ID NO: 361072 - RNA, 22 nt, Human
ccauccugcauugcuauucaga

SEQ ID NO: 361073 - RNA, 22 nt, Human
aaagguuugcauggaauuuacc

SEQ ID NO: 361074 - RNA, 22 nt, Human
uugaagcagcucaggaggcuua

SEQ ID NO: 361075 - RNA, 22 nt, Human
gaaaucugaacucuguauccuu

SEQ ID NO: 361076 - RNA, 22 nt, Human
gccaggcucagcagucaaccug

SEQ ID NO: 361077 - RNA, 22 nt, Human
gaguccaggcucagaaacccgu

SEQ ID NO: 361078 - RNA, 22 nt, Human
aaguaaauaucuguuuauagca

SEQ ID NO: 361079 - RNA, 22 nt, Human
acccuggacuggggcugaggcu

SEQ ID NO: 361080 - RNA, 22 nt, Human
uaugcugugcuagauacaauau

SEQ ID NO: 361081 - RNA, 22 nt, Human
cugcuuugcauagcugccagag

SEQ ID NO: 361082 - RNA, 22 nt, Human
cacaauuuccuugcuucacuuu

SEQ ID NO: 361083 - RNA, 22 nt, Human
ccugggugucaugggcagcugg

SEQ ID NO: 361084 - RNA, 22 nt, Human
cauuuagagucuugcaauuuua

SEQ ID NO: 361085 - RNA, 22 nt, Human
ggcagaggaaggaugaauucac

SEQ ID NO: 361086 - RNA, 22 nt, Human
gcuaccugagcaagagcuucaa

SEQ ID NO: 361087 - RNA, 22 nt, Human
uuuauuguuuagaagggggcug

SEQ ID NO: 361088 - RNA, 22 nt, Human
agcugccauggccugaauuuac

SEQ ID NO: 361089 - RNA, 22 nt, Human
uggcaggguggcaacuuuuggu

SEQ ID NO: 361090 - RNA, 22 nt, Human
ggggcuccagucuucacauuuu

SEQ ID NO: 361091 - RNA, 22 nt, Human
agcaugcacaugacuggcuuaa

SEQ ID NO: 361092 - RNA, 22 nt, Human
ugagcccuaagggucaagcagg

SEQ ID NO: 361093 - RNA, 22 nt, Human
ugccagggcugcuacuggcuga

SEQ ID NO: 361094 - RNA, 22 nt, Human
cuguggugagcaacugacugaa

SEQ ID NO: 361095 - RNA, 22 nt, Human
aaaaaaucagaucuuugguuaa

SEQ ID NO: 361096 - RNA, 22 nt, Human
aguggaccagaagacugaagcu

SEQ ID NO: 361097 - RNA, 22 nt, Human
uauuuccaaaagccuauuauga

SEQ ID NO: 361098 - RNA, 22 nt, Human
gggcccuggacguggcggcaga

SEQ ID NO: 361099 - RNA, 22 nt, Human
uccaggaggguuuucugccuuc

SEQ ID NO: 361100 - RNA, 22 nt, Human
ugcuuuaaauaugaauuagcau

SEQ ID NO: 361101 - RNA, 22 nt, Human
caaaugcaggucauaaccugag

SEQ ID NO: 361102 - RNA, 22 nt, Human
cuccaggagcugugucuuucuu

SEQ ID NO: 361103 - RNA, 22 nt, Human
guacaugucaaaaaaugcauaa

SEQ ID NO: 361104 - RNA, 22 nt, Human
uugaauaauguguauguuguua

SEQ ID NO: 361105 - RNA, 22 nt, Human
uucagauguggcuuugucaggc

SEQ ID NO: 361106 - RNA, 22 nt, Human
ucacugcagacaaccucaguca

SEQ ID NO: 361107 - RNA, 19 nt, Human
agguggucuaggcuggaga

SEQ ID NO: 361108 - RNA, 22 nt, Human
uuggaaggagucaaccagcuga

SEQ ID NO: 361109 - RNA, 22 nt, Human
cccaggcuggagugcaauggug

SEQ ID NO: 361110 - RNA, 22 nt, Human
acauaauaaaaauaacagcuca

SEQ ID NO: 361111 - RNA, 22 nt, Human
auauacugaggagacuuuauau

SEQ ID NO: 361112 - RNA, 22 nt, Human
cagagcugguaagugguagagg

SEQ ID NO: 361113 - RNA, 21 nt, Human
cucaggauggcggccuggugg

SEQ ID NO: 361114 - RNA, 20 nt, Human
cgugcugugaccuugagcau

SEQ ID NO: 361115 - RNA, 22 nt, Human
agugacagcugggaaggugaaa

SEQ ID NO: 361116 - RNA, 17 nt, Human
caaggccagcaucuuca

SEQ ID NO: 361117 - RNA, 22 nt, Human
ucucagaguuccucuggagucc

SEQ ID NO: 361118 - RNA, 22 nt, Human
ucauuucuccgaccugcugucc

SEQ ID NO: 361119 - RNA, 22 nt, Human
agggccagcuagagcccucgcc

SEQ ID NO: 361120 - RNA, 22 nt, Human
gagaaagggaacuuacagagug

SEQ ID NO: 361121 - RNA, 22 nt, Human
uguaugcagcaaaacaauuagu

SEQ ID NO: 361122 - RNA, 22 nt, Human
guauuuucaugauuucagacca

SEQ ID NO: 361123 - RNA, 22 nt, Human
caugaguucaucugcuucucuu

SEQ ID NO: 361124 - RNA, 22 nt, Human
gagcucaggagcaucagaagaa

SEQ ID NO: 361125 - RNA, 22 nt, Human
cugccuggcauggagaagagaa

SEQ ID NO: 361126 - RNA, 22 nt, Human
uccaggcauaaugcccaguggu

SEQ ID NO: 361127 - RNA, 22 nt, Human
ggagucccagcaaagccuuccc

SEQ ID NO: 361128 - RNA, 22 nt, Human
aaacaccagucccaguauacac

SEQ ID NO: 361129 - RNA, 22 nt, Human
acagucuugagcaucagccaga

SEQ ID NO: 361130 - RNA, 22 nt, Human
caaggcaggaagccugucuuau

SEQ ID NO: 361131 - RNA, 22 nt, Human
uccaggcuggacaugaggcggg

SEQ ID NO: 361132 - RNA, 22 nt, Human
aggaagugcuaagagaacauca

SEQ ID NO: 361133 - RNA, 22 nt, Human
aaguguuaaaagauuaaaugcu

SEQ ID NO: 361134 - RNA, 22 nt, Human
aguaggaggcgggagcaugaag

SEQ ID NO: 361135 - RNA, 20 nt, Human
uccaugaguuagagacuaua

SEQ ID NO: 361136 - RNA, 19 nt, Human
gcagcugugggaagagcca

SEQ ID NO: 361137 - RNA, 22 nt, Human
agaaguaggcagggcuguauca

SEQ ID NO: 361138 - RNA, 22 nt, Human
ugcagaagaauguaggcauaag

SEQ ID NO: 361139 - RNA, 22 nt, Human
accaggaggccuggagcacaaa

SEQ ID NO: 361140 - RNA, 22 nt, Human
uuggccuuguuaaggaggcccu

SEQ ID NO: 361141 - RNA, 22 nt, Human
uuuucagugggcaaugauguga

SEQ ID NO: 361142 - RNA, 22 nt, Human
uugcugugaaaccaugggaagu

SEQ ID NO: 361143 - RNA, 22 nt, Human
guuauugcaguauagaggucua

SEQ ID NO: 361144 - RNA, 22 nt, Human
uuuucucaggugcuuaucuaag

SEQ ID NO: 361145 - RNA, 22 nt, Human
uaaaugcagauuccugagccua

SEQ ID NO: 361146 - RNA, 22 nt, Human
augccaaagcccaaguucauca

SEQ ID NO: 361147 - RNA, 19 nt, Human
ggcucucccuugagagagc

SEQ ID NO: 361148 - RNA, 20 nt, Human
uuucuugucggcuguugcug

SEQ ID NO: 361149 - RNA, 19 nt, Human
ccagcagguucauuucagg

SEQ ID NO: 361150 - RNA, 21 nt, Human
aagagcuggaucaaggauaag

SEQ ID NO: 361151 - RNA, 22 nt, Human
ugcugccagggcucugcccaca

SEQ ID NO: 361152 - RNA, 22 nt, Human
guuuauuaacugucaagugauu

SEQ ID NO: 361153 - RNA, 22 nt, Human
aggcuucccaagcagcugcaaa

SEQ ID NO: 361154 - RNA, 22 nt, Human
aauaauaagauacuaagggagu

SEQ ID NO: 361155 - RNA, 22 nt, Human
gccaggcaaauuaaggaaugca

SEQ ID NO: 361156 - RNA, 22 nt, Human
ggggcagauggaacagagcaca

SEQ ID NO: 361157 - RNA, 22 nt, Human
cucucuggcuuggcacggagau

SEQ ID NO: 361158 - RNA, 22 nt, Human
acuguguccucauguggcagaa

SEQ ID NO: 361159 - RNA, 22 nt, Human
agauuuccaucuuuuucaugug

SEQ ID NO: 361160 - RNA, 22 nt, Human
cccaggagacugagcuguaacc

SEQ ID NO: 361161 - RNA, 22 nt, Human
gcuggugccuuguuguuguuac

SEQ ID NO: 361162 - RNA, 19 nt, Human
aauuagggagucgguuaag

SEQ ID NO: 361163 - RNA, 22 nt, Human
ucacuuauugcucaucucaugc

SEQ ID NO: 361164 - RNA, 22 nt, Human
uuacauuuggcuauguccucua

SEQ ID NO: 361165 - RNA, 22 nt, Human
aguacaauuauauuuagauggu

SEQ ID NO: 361166 - RNA, 22 nt, Human
cuggcugcuggccugaggaugc

SEQ ID NO: 361167 - RNA, 22 nt, Human
ucucagucuuugcaaggaugcu

SEQ ID NO: 361168 - RNA, 22 nt, Human
ugauuuccaaaaggcuucuaag

SEQ ID NO: 361169 - RNA, 22 nt, Human
uugcagcagggugaauucacuc

SEQ ID NO: 361170 - RNA, 22 nt, Human
aaggcacuacgcugcuggggcg

SEQ ID NO: 361171 - RNA, 22 nt, Human
gccaguuccuguggagucagag

SEQ ID NO: 361172 - RNA, 22 nt, Human
ucauaaaacacaccagguaguu

SEQ ID NO: 361173 - RNA, 22 nt, Human
gaaaggaaauauucuaagcacu

SEQ ID NO: 361174 - RNA, 22 nt, Human
ugagcaguaacagcucacaggg

SEQ ID NO: 361175 - RNA, 22 nt, Human
aaagaacaucggagugggcggg

SEQ ID NO: 361176 - RNA, 20 nt, Human
gccuguccugagugucaugg

SEQ ID NO: 361177 - RNA, 22 nt, Human
gguggggcccuggcacugguau

SEQ ID NO: 361178 - RNA, 22 nt, Human
agggaggagaauggacuccuuc

SEQ ID NO: 361179 - RNA, 22 nt, Human
gagggcugauguugccaccuca

SEQ ID NO: 361180 - RNA, 22 nt, Human
auuaaacugagcaaauuaacau

SEQ ID NO: 361181 - RNA, 22 nt, Human
aagugacaccucuucccuuucc

SEQ ID NO: 361182 - RNA, 22 nt, Human
gcagcccagguguagcucuuug

SEQ ID NO: 361183 - RNA, 22 nt, Human
ugccugggggacuaaggccaaa

SEQ ID NO: 361184 - RNA, 22 nt, Human
caucagagugguggccuggugu

SEQ ID NO: 361185 - RNA, 22 nt, Human
agggcagaccacgugcaaggau

SEQ ID NO: 361186 - RNA, 22 nt, Human
accgaaggaaacuggaaccguu

SEQ ID NO: 361187 - RNA, 22 nt, Human
gcagugacagggcugcugccuu

SEQ ID NO: 361188 - RNA, 21 nt, Human
aaauggauagggcaauggaag

SEQ ID NO: 361189 - RNA, 22 nt, Human
cuggauuugccuauggugcuuu

SEQ ID NO: 361190 - RNA, 22 nt, Human
caagauggacauaaggagagaa

SEQ ID NO: 361191 - RNA, 20 nt, Human
cccagugaagcauggaagag

SEQ ID NO: 361192 - RNA, 22 nt, Human
gggcucagacaucccuccugga

SEQ ID NO: 361193 - RNA, 22 nt, Human
ugggcuccaauuuguccuuuca

SEQ ID NO: 361194 - RNA, 22 nt, Human
ccagaagagaucacaguucuug

SEQ ID NO: 361195 - RNA, 22 nt, Human
acaaaugcuuaguucaccaaaa

SEQ ID NO: 361196 - RNA, 22 nt, Human
aggaggcccuagagcucuagag

SEQ ID NO: 361197 - RNA, 22 nt, Human
agccucugacugucagcaaggu

SEQ ID NO: 361198 - RNA, 22 nt, Human
aaaggccauuacuugcuuuuag

SEQ ID NO: 361199 - RNA, 22 nt, Human
cacagcagaaauaugaaggcag

SEQ ID NO: 361200 - RNA, 22 nt, Human
gagaagcaaucgugacaucucc

SEQ ID NO: 361201 - RNA, 22 nt, Human
uaucuguuguaguacagaugau

SEQ ID NO: 361202 - RNA, 22 nt, Human
auguccuucuccucuuaccugc

SEQ ID NO: 361203 - RNA, 22 nt, Human
ccaggcugcucacaagcugccc

SEQ ID NO: 361204 - RNA, 22 nt, Human
agggcacagccuaaagccuaug

SEQ ID NO: 361205 - RNA, 22 nt, Human
aggaagcugccugggaugggaa

SEQ ID NO: 361206 - RNA, 22 nt, Human
caaaugcuggcccugcuacuua

SEQ ID NO: 361207 - RNA, 22 nt, Human
agcuuccuacaaccaucucaga

SEQ ID NO: 361208 - RNA, 22 nt, Human
aggcugccaaagcuucugucuc

SEQ ID NO: 361209 - RNA, 22 nt, Human
agaauaaucacugaaguucaaa

SEQ ID NO: 361210 - RNA, 22 nt, Human
ugugcucuggaguugccuucac

SEQ ID NO: 361211 - RNA, 22 nt, Human
uugcauugaucccagcuugggc

SEQ ID NO: 361212 - RNA, 22 nt, Human
ucacauuuauuucaaaguuacu

SEQ ID NO: 361213 - RNA, 18 nt, Human
cuguccaguagacucugc

SEQ ID NO: 361214 - RNA, 22 nt, Human
cagaaaauaaaguuucuacgca

SEQ ID NO: 361215 - RNA, 22 nt, Human
agagacaccgcgcaucauggcu

SEQ ID NO: 361216 - RNA, 22 nt, Human
uuccuuagugccucuuccgcug

SEQ ID NO: 361217 - RNA, 22 nt, Human
uggcccugccacucacugcuga

SEQ ID NO: 361218 - RNA, 23 nt, Human
agcaauaagaagggauacaugug

SEQ ID NO: 361219 - RNA, 16 nt, Human
agaggccuugaggaag

SEQ ID NO: 361220 - RNA, 22 nt, Human
ccagggcaucacauccaguguu

SEQ ID NO: 361221 - RNA, 22 nt, Human
ucagagagugcaaaauauagcu

SEQ ID NO: 361222 - RNA, 22 nt, Human
cagcccugccauggagccuccu

SEQ ID NO: 361223 - RNA, 22 nt, Human
gcugagggcuguaacagcagag

SEQ ID NO: 361224 - RNA, 22 nt, Human
ggggcagaaguagugccccuga

SEQ ID NO: 361225 - RNA, 22 nt, Human
aggcagcuuucagugucucuca

SEQ ID NO: 361226 - RNA, 22 nt, Human
ucagaauugcagggagggcagg

SEQ ID NO: 361227 - RNA, 22 nt, Human
ggagccuugggcgcucucccau

SEQ ID NO: 361228 - RNA, 22 nt, Human
ugcaggggcuugucugggccug

SEQ ID NO: 361229 - RNA, 21 nt, Human
aggucccagguuugggcagca

SEQ ID NO: 361230 - RNA, 22 nt, Human
ucccagaguucaaugggaaggu

SEQ ID NO: 361231 - RNA, 22 nt, Human
uccugccuucauacugcuguau

SEQ ID NO: 361232 - RNA, 22 nt, Human
caaggcugcugcgggucgcacc

SEQ ID NO: 361233 - RNA, 22 nt, Human
uggggacauagccagucuggcu

SEQ ID NO: 361234 - RNA, 22 nt, Human
cauugaaaaacguugacugagu

SEQ ID NO: 361235 - RNA, 22 nt, Human
aggggccugguuggccucuguu

SEQ ID NO: 361236 - RNA, 22 nt, Human
cccagcuugcaaauggguugcu

SEQ ID NO: 361237 - RNA, 22 nt, Human
acagcagcuaaccccugggcca

SEQ ID NO: 361238 - RNA, 22 nt, Human
cagggcagagggaaacuccuuu

SEQ ID NO: 361239 - RNA, 22 nt, Human
ugaucugagagcagaucaccau

SEQ ID NO: 361240 - RNA, 22 nt, Human
gggacgggcaguccaagggguc

SEQ ID NO: 361241 - RNA, 22 nt, Human
guguaaggugaaaucaacaaau

SEQ ID NO: 361242 - RNA, 22 nt, Human
aagguuaaauagguauuuucca

SEQ ID NO: 361243 - RNA, 22 nt, Human
cuguccagaaagggggcaacaa

SEQ ID NO: 361244 - RNA, 22 nt, Human
auguaacaggugaagcucugag

SEQ ID NO: 361245 - RNA, 23 nt, Human
aagucaccaagaggaaggcggag

SEQ ID NO: 361246 - RNA, 22 nt, Human
acagugcuaaacacuucuugaa

SEQ ID NO: 361247 - RNA, 22 nt, Human
aagggcugcuguagaagcagag

SEQ ID NO: 361248 - RNA, 22 nt, Human
gucccagaggacagggucacau

SEQ ID NO: 361249 - RNA, 22 nt, Human
uccucacagucaacacuuugag

SEQ ID NO: 361250 - RNA, 22 nt, Human
uacaguaaagcugcuaugaauu

SEQ ID NO: 361251 - RNA, 22 nt, Human
uaagaaucggucgcaacagagg

SEQ ID NO: 361252 - RNA, 22 nt, Human
uuuccauauuuggucuuuggga

SEQ ID NO: 361253 - RNA, 22 nt, Human
gugcuuccaucuagagggucac

SEQ ID NO: 361254 - RNA, 22 nt, Human
caggcccagcccagcccuucga

SEQ ID NO: 361255 - RNA, 22 nt, Human
gcauacagagaggauguggcau

SEQ ID NO: 361256 - RNA, 22 nt, Human
aacauaauguggccaaagucac

SEQ ID NO: 361257 - RNA, 22 nt, Human
uuguuauaaagacuaaauaugu

SEQ ID NO: 361258 - RNA, 22 nt, Human
acaugucuguaauuauuuuagg

SEQ ID NO: 361259 - RNA, 22 nt, Human
aguccggggucuggacaccugg

SEQ ID NO: 361260 - RNA, 21 nt, Human
aaggcagaagcauggaaugag

SEQ ID NO: 361261 - RNA, 23 nt, Human
auucuucauuaucuucuagaaaa

SEQ ID NO: 361262 - RNA, 22 nt, Human
guggcccucugauagggucagg

SEQ ID NO: 361263 - RNA, 22 nt, Human
uauuugaaaguguacaaaaacu

SEQ ID NO: 361264 - RNA, 22 nt, Human
auaugucgcuacaucauuagau

SEQ ID NO: 361265 - RNA, 22 nt, Human
uggcuuuacaucaaauugagua

SEQ ID NO: 361266 - RNA, 22 nt, Human
caguauguacucuuaucaugua

SEQ ID NO: 361267 - RNA, 22 nt, Human
uucccaggcugugcuaccagag

SEQ ID NO: 361268 - RNA, 22 nt, Human
ucaggugggaccugcuaggaca

SEQ ID NO: 361269 - RNA, 23 nt, Human
ucccagccucuucucuugcauac

SEQ ID NO: 361270 - RNA, 22 nt, Human
gagguacagaguguuccaaugu

SEQ ID NO: 361271 - RNA, 22 nt, Human
ugagguguguccccagggaggu

SEQ ID NO: 361272 - RNA, 22 nt, Human
aaagaugucauacacauuaaga

SEQ ID NO: 361273 - RNA, 22 nt, Human
gugauuucagguuuuucauacu

SEQ ID NO: 361274 - RNA, 22 nt, Human
uggcagggucuugcuguguugc

SEQ ID NO: 361275 - RNA, 22 nt, Human
aacagaaaucauuuagggcucu

SEQ ID NO: 361276 - RNA, 22 nt, Human
ugccaggauauaagagugcgau

SEQ ID NO: 361277 - RNA, 22 nt, Human
gggaccugccaaggccacccag

SEQ ID NO: 361278 - RNA, 22 nt, Human
uaaguucaagucuuggauauaa

SEQ ID NO: 361279 - RNA, 18 nt, Human
ugggcugccuggccucug

SEQ ID NO: 361280 - RNA, 22 nt, Human
auaaacacuucuagggcacaca

SEQ ID NO: 361281 - RNA, 22 nt, Human
aagggcagcuuaaauugguagc

SEQ ID NO: 361282 - RNA, 22 nt, Human
uguauuuugugaggaucacucu

SEQ ID NO: 361283 - RNA, 22 nt, Human
cagcugagcucccaggccauca

SEQ ID NO: 361284 - RNA, 22 nt, Human
ugcugaaggcaggggagguggc

SEQ ID NO: 361285 - RNA, 21 nt, Human
auacauucuauuaagcauuua

SEQ ID NO: 361286 - RNA, 22 nt, Human
cccauugugguuguugaggaua

SEQ ID NO: 361287 - RNA, 22 nt, Human
ccaggaagccucagaugcugag

SEQ ID NO: 361288 - RNA, 22 nt, Human
ugcauggaggaagaugaaugca

SEQ ID NO: 361289 - RNA, 22 nt, Human
aggcugaggugugcugugaucg

SEQ ID NO: 361290 - RNA, 21 nt, Human
guuuuaagggagaaaaccuag

SEQ ID NO: 361291 - RNA, 22 nt, Human
uccagucaucucccuucacauu

SEQ ID NO: 361292 - RNA, 18 nt, Human
gcagagugcgucucugug

SEQ ID NO: 361293 - RNA, 22 nt, Human
uuuccuaggagauugaucacau

SEQ ID NO: 361294 - RNA, 22 nt, Human
aaaguuugaaugauauauuagu

SEQ ID NO: 361295 - RNA, 22 nt, Human
cacaggugcuccucggggagcu

SEQ ID NO: 361296 - RNA, 22 nt, Human
uggcaggagacacauggcauag

SEQ ID NO: 361297 - RNA, 23 nt, Human
ugagaagccaggggagcgugagg

SEQ ID NO: 361298 - RNA, 22 nt, Human
guauuaggagguggagccuuug

SEQ ID NO: 361299 - RNA, 22 nt, Human
cugccagucuaugcugcucggc

SEQ ID NO: 361300 - RNA, 22 nt, Human
caaggccaaagggccacuguca

SEQ ID NO: 361301 - RNA, 22 nt, Human
uucuaacaaguggcuuguuagu

SEQ ID NO: 361302 - RNA, 22 nt, Human
cccucagcuccacccucagcag

SEQ ID NO: 361303 - RNA, 22 nt, Human
uugauuccuugaaauauccuug

SEQ ID NO: 361304 - RNA, 22 nt, Human
ccuggcacgaagggcugagguu

SEQ ID NO: 361305 - RNA, 22 nt, Human
cuuaacagcaagaucuguguca

SEQ ID NO: 361306 - RNA, 22 nt, Human
cugcauuagucaugcuuugcag

SEQ ID NO: 361307 - RNA, 22 nt, Human
caguagacacauuaauauggaa

SEQ ID NO: 361308 - RNA, 23 nt, Human
uuaggcacuuaguagggccagag

SEQ ID NO: 361309 - RNA, 22 nt, Human
ucagagagaaauaguuuuugac

SEQ ID NO: 361310 - RNA, 22 nt, Human
cuuuauguucaguacaaugcuu

SEQ ID NO: 361311 - RNA, 22 nt, Human
uagcugccuagacagcuauagc

SEQ ID NO: 361312 - RNA, 22 nt, Human
aaggccagccugagagcuaaca

SEQ ID NO: 361313 - RNA, 20 nt, Human
agcaggaaaagugccagucu

SEQ ID NO: 361314 - RNA, 22 nt, Human
ugccucugcugcuguggcauca

SEQ ID NO: 361315 - RNA, 22 nt, Human
uuauacauguguuuugagauga

SEQ ID NO: 361316 - RNA, 22 nt, Human
ugaggcaggagaaucacaugaa

SEQ ID NO: 361317 - RNA, 22 nt, Human
ggcugggcugcugggucagagc

SEQ ID NO: 361318 - RNA, 22 nt, Human
accaggcagcugggggugaugu

SEQ ID NO: 361319 - RNA, 22 nt, Human
agcuguguagggaaucagagaa

SEQ ID NO: 361320 - RNA, 22 nt, Human
uuucaaagaguuguaaauuacu

SEQ ID NO: 361321 - RNA, 21 nt, Human
uuuaaagaauaggaagggagg

SEQ ID NO: 361322 - RNA, 22 nt, Human
ccaccagcuucagcagccgcgg

SEQ ID NO: 361323 - RNA, 22 nt, Human
ggagccugugggaugagaugug

SEQ ID NO: 361324 - RNA, 22 nt, Human
gagggugguggcuuaaggugcu

SEQ ID NO: 361325 - RNA, 22 nt, Human
aaggcugagagucacaguccua

SEQ ID NO: 361326 - RNA, 22 nt, Human
gcaggagcagucaggggcagcu

SEQ ID NO: 361327 - RNA, 22 nt, Human
auaaauaucacuguugucccuc

SEQ ID NO: 361328 - RNA, 19 nt, Human
uggcagaggacaaggacuu

SEQ ID NO: 361329 - RNA, 22 nt, Human
aaguguguauuguuuaugcugc

SEQ ID NO: 361330 - RNA, 22 nt, Human
uuugcaaagugacuauuauaug

SEQ ID NO: 361331 - RNA, 22 nt, Human
ugggcuggcugaacuucaaccu

SEQ ID NO: 361332 - RNA, 22 nt, Human
uacauuaucuuguuaucuuuca

SEQ ID NO: 361333 - RNA, 22 nt, Human
gagccagccgcaagagcuguga

SEQ ID NO: 361334 - RNA, 22 nt, Human
uggggcuguccuuagucugaga

SEQ ID NO: 361335 - RNA, 20 nt, Human
cugcugugugugccucagcc

SEQ ID NO: 361336 - RNA, 22 nt, Human
augaaauauuucagagcagagu

SEQ ID NO: 361337 - RNA, 22 nt, Human
ugccaggcccagcuccagagcu

SEQ ID NO: 361338 - RNA, 22 nt, Human
cugaagccacgauagcuuccua

SEQ ID NO: 361339 - RNA, 22 nt, Human
acagggccucagccagggcaga

SEQ ID NO: 361340 - RNA, 22 nt, Human
agcagaaccacagcacuguuga

SEQ ID NO: 361341 - RNA, 22 nt, Human
gaggauggaggugugagcuaug

SEQ ID NO: 361342 - RNA, 22 nt, Human
gaggagaggccaucguuguuau

SEQ ID NO: 361343 - RNA, 22 nt, Human
uagaaucuaguucauucauuug

SEQ ID NO: 361344 - RNA, 22 nt, Human
auucagcaguuccugcuucagu

SEQ ID NO: 361345 - RNA, 22 nt, Human
ccugccugcggcccgcggggag

SEQ ID NO: 361346 - RNA, 22 nt, Human
agggcccauagaucgucagcuu

SEQ ID NO: 361347 - RNA, 22 nt, Human
agggcugacagugaggagucaa

SEQ ID NO: 361348 - RNA, 22 nt, Human
agcugcccuguggggaggguug

SEQ ID NO: 361349 - RNA, 18 nt, Human
gguggcucagucaugggg

SEQ ID NO: 361350 - RNA, 22 nt, Human
ugaaaaaccucaguccgcuuua

SEQ ID NO: 361351 - RNA, 22 nt, Human
cagggcucacucggcuggcguc

SEQ ID NO: 361352 - RNA, 22 nt, Human
gggcacuguguucagagugcag

SEQ ID NO: 361353 - RNA, 22 nt, Human
aagauuuccauuucuagcucau

SEQ ID NO: 361354 - RNA, 22 nt, Human
ugcugccagagagacagggacu

SEQ ID NO: 361355 - RNA, 22 nt, Human
aggagaggcucuaacucugugu

SEQ ID NO: 361356 - RNA, 18 nt, Human
agggaguuuuagggaagg

SEQ ID NO: 361357 - RNA, 23 nt, Human
ugggucagcugccuccaggacaa

SEQ ID NO: 361358 - RNA, 22 nt, Human
aacaaaugauuguugguuggag

SEQ ID NO: 361359 - RNA, 22 nt, Human
ucagaggagaaguugggaaaau

SEQ ID NO: 361360 - RNA, 22 nt, Human
aagaacugugcuccaggcucca

SEQ ID NO: 361361 - RNA, 23 nt, Human
aggaggccugaaacugaggcuga

SEQ ID NO: 361362 - RNA, 22 nt, Human
cccaaggacacgggcagggaca

SEQ ID NO: 361363 - RNA, 22 nt, Human
aaagcagguugcaauuacagug

SEQ ID NO: 361364 - RNA, 17 nt, Human
aggaaacauuuucuuuc

SEQ ID NO: 361365 - RNA, 22 nt, Human
uuggcugaagguuaagugcugg

SEQ ID NO: 361366 - RNA, 18 nt, Human
aggcacagagcauacaua

SEQ ID NO: 361367 - RNA, 22 nt, Human
aggccagggucccacacucgca

SEQ ID NO: 361368 - RNA, 22 nt, Human
agcugaggaggaaugaugggua

SEQ ID NO: 361369 - RNA, 21 nt, Human
uccugcagaaugccuuccuac

SEQ ID NO: 361370 - RNA, 22 nt, Human
gcaaaauuuacacuccuucuuc

SEQ ID NO: 361371 - RNA, 22 nt, Human
aaaaauugcugagaacggaauu

SEQ ID NO: 361372 - RNA, 22 nt, Human
caggaacagcaccaggagcuag

SEQ ID NO: 361373 - RNA, 22 nt, Human
aaaugucuuucuucugcuacgu

SEQ ID NO: 361374 - RNA, 22 nt, Human
gccacccugagcugggccaggg

SEQ ID NO: 361375 - RNA, 22 nt, Human
cauuaggguaauugaacacuua

SEQ ID NO: 361376 - RNA, 22 nt, Human
uccgccaggacugagggcccau

SEQ ID NO: 361377 - RNA, 22 nt, Human
gccacacuuauucucaugcaca

SEQ ID NO: 361378 - RNA, 22 nt, Human
gcagcuggauuucaagagggag

SEQ ID NO: 361379 - RNA, 22 nt, Human
aguuauuacucuuuaacauauu

SEQ ID NO: 361380 - RNA, 22 nt, Human
aagucuguuugagugucacacu

SEQ ID NO: 361381 - RNA, 17 nt, Human
ccucccacaccgcccug

SEQ ID NO: 361382 - RNA, 22 nt, Human
gggaggugauuaggaccaugua

SEQ ID NO: 361383 - RNA, 22 nt, Human
ucuuucaaugagcauucuuucc

SEQ ID NO: 361384 - RNA, 22 nt, Human
cacagcuucuccuugauaucgc

SEQ ID NO: 361385 - RNA, 22 nt, Human
uguacuugaacuugacuguaga

SEQ ID NO: 361386 - RNA, 16 nt, Human
aaggagggaagagaau

SEQ ID NO: 361387 - RNA, 20 nt, Human
caggccucugggggcccugg

SEQ ID NO: 361388 - RNA, 22 nt, Human
aaggcccuaauagagcacauau

SEQ ID NO: 361389 - RNA, 22 nt, Human
aggcccuguuaugagccacugu

SEQ ID NO: 361390 - RNA, 22 nt, Human
cagcagcaaaucuagaagagga

SEQ ID NO: 361391 - RNA, 22 nt, Human
aaggccaugaccacuugcugug

SEQ ID NO: 361392 - RNA, 22 nt, Human
auuguauuagcacaauacaauu

SEQ ID NO: 361393 - RNA, 22 nt, Human
aacuagaaccacuuguauuucc

SEQ ID NO: 361394 - RNA, 22 nt, Human
agugcuuuagagaaauggugcu

SEQ ID NO: 361395 - RNA, 22 nt, Human
aaagguaguacuucuagaaggg

SEQ ID NO: 361396 - RNA, 18 nt, Human
gcaggugccacugcuguu

SEQ ID NO: 361397 - RNA, 22 nt, Human
acauuucucuugaugucucuau

SEQ ID NO: 361398 - RNA, 22 nt, Human
uaaggccaggcuguggucggca

SEQ ID NO: 361399 - RNA, 22 nt, Human
accugaggccuccccagcagac

SEQ ID NO: 361400 - RNA, 22 nt, Human
gcagagcauguccucaggacag

SEQ ID NO: 361401 - RNA, 22 nt, Human
ggcuccuguggcaagacagcuu

SEQ ID NO: 361402 - RNA, 22 nt, Human
ggcagaggagcuggaaacaugg

SEQ ID NO: 361403 - RNA, 22 nt, Human
uggucagacaaaggagaauguu

SEQ ID NO: 361404 - RNA, 22 nt, Human
ccugccaggagcuggugcugca

SEQ ID NO: 361405 - RNA, 22 nt, Human
ccuuggaggacugcugcuucuu

SEQ ID NO: 361406 - RNA, 22 nt, Human
cagacuugacggcagcugcuuu

SEQ ID NO: 361407 - RNA, 22 nt, Human
uccugggcuugcuccuccagcu

SEQ ID NO: 361408 - RNA, 22 nt, Human
agaggcggagcuugcagugagc

SEQ ID NO: 361409 - RNA, 22 nt, Human
cccccaaggccaggcugagacc

SEQ ID NO: 361410 - RNA, 22 nt, Human
cugugaauuaaguauuguuauc

SEQ ID NO: 361411 - RNA, 22 nt, Human
uggaccugagccuggcccugcc

SEQ ID NO: 361412 - RNA, 22 nt, Human
ccagaggaguugaggcuuuggg

SEQ ID NO: 361413 - RNA, 22 nt, Human
gagggcagagucuaaugaugca

SEQ ID NO: 361414 - RNA, 22 nt, Human
acuguucacuagugaggguuga

SEQ ID NO: 361415 - RNA, 20 nt, Human
gucucaaguaucucacaguc

SEQ ID NO: 361416 - RNA, 22 nt, Human
auuuuuaugacaaaccauccuc

SEQ ID NO: 361417 - RNA, 19 nt, Human
aacuguaauuaauacccua

SEQ ID NO: 361418 - RNA, 22 nt, Human
cagagccauccaggugccuguu

SEQ ID NO: 361419 - RNA, 22 nt, Human
aggucaggguauucacgucugu

SEQ ID NO: 361420 - RNA, 22 nt, Human
ccuggcuccugccucugcaggg

SEQ ID NO: 361421 - RNA, 22 nt, Human
cccugcagagccagcccugacc

SEQ ID NO: 361422 - RNA, 22 nt, Human
gccuggugaaaggcagagagcg

SEQ ID NO: 361423 - RNA, 22 nt, Human
agucucagcaagcauggcuagu

SEQ ID NO: 361424 - RNA, 22 nt, Human
ucagagaggcaauacuguuuaa

SEQ ID NO: 361425 - RNA, 22 nt, Human
ucuuugcagaauuuaacuuugc

SEQ ID NO: 361426 - RNA, 22 nt, Human
cauauucuuuaagcaaugcucu

SEQ ID NO: 361427 - RNA, 22 nt, Human
caggcugcagaggccuuucaug

SEQ ID NO: 361428 - RNA, 22 nt, Human
auggacaggaacucccuuggca

SEQ ID NO: 361429 - RNA, 22 nt, Human
aagcaggauggaucuaguguuc

SEQ ID NO: 361430 - RNA, 22 nt, Human
ucuggcuccacaccucacugca

SEQ ID NO: 361431 - RNA, 22 nt, Human
uggagcugauacagcuggcuuu

SEQ ID NO: 361432 - RNA, 22 nt, Human
uccugccucuugccuucuucac

SEQ ID NO: 361433 - RNA, 22 nt, Human
uagcaucuguucuuucauuaaa

SEQ ID NO: 361434 - RNA, 22 nt, Human
cgcagagggcaggcagugcugg

SEQ ID NO: 361435 - RNA, 22 nt, Human
cagagcugugauaaauagauau

SEQ ID NO: 361436 - RNA, 22 nt, Human
uuucaaaguugggaauuguaau

SEQ ID NO: 361437 - RNA, 22 nt, Human
agcugggaggugggcagugaga

SEQ ID NO: 361438 - RNA, 22 nt, Human
ugaacgcagguccacauggcuc

SEQ ID NO: 361439 - RNA, 20 nt, Human
ucugcccaccccggcuccca

SEQ ID NO: 361440 - RNA, 22 nt, Human
ugaacccaggagguugcaguga

SEQ ID NO: 361441 - RNA, 22 nt, Human
agaaauguggaucguuuuaaaa

SEQ ID NO: 361442 - RNA, 22 nt, Human
auacaaagcuaaauaugguuuc

SEQ ID NO: 361443 - RNA, 18 nt, Human
uuucacaaccuccagagg

SEQ ID NO: 361444 - RNA, 22 nt, Human
agagccagccuucucagcuuac

SEQ ID NO: 361445 - RNA, 22 nt, Human
aggagagucuugagucacuggu

SEQ ID NO: 361446 - RNA, 22 nt, Human
uuucuguaauuaaaagggcagg

SEQ ID NO: 361447 - RNA, 22 nt, Human
gugggggcaggcagugcuagga

SEQ ID NO: 361448 - RNA, 22 nt, Human
aggcugcuggcaggcguggacg

SEQ ID NO: 361449 - RNA, 22 nt, Human
cuggaggcugaguugggucucc

SEQ ID NO: 361450 - RNA, 22 nt, Human
agcugccagcaucccggaaggg

SEQ ID NO: 361451 - RNA, 22 nt, Human
auuauccagcaccaaugucaga

SEQ ID NO: 361452 - RNA, 22 nt, Human
ugucuuuauauauuuggaaaau

SEQ ID NO: 361453 - RNA, 22 nt, Human
ucaggcugcuggccagcaggcu

SEQ ID NO: 361454 - RNA, 22 nt, Human
aauguauaaaguguuaauaacu

SEQ ID NO: 361455 - RNA, 22 nt, Human
agacucaagacugcagaagacg

SEQ ID NO: 361456 - RNA, 22 nt, Human
gagacaaaaguuggagugcaag

SEQ ID NO: 361457 - RNA, 22 nt, Human
uauuuuaaagugaagggucuug

SEQ ID NO: 361458 - RNA, 22 nt, Human
gaggcagugcauugucuagggg

SEQ ID NO: 361459 - RNA, 22 nt, Human
caggcagcucugcuuuuccuaa

SEQ ID NO: 361460 - RNA, 22 nt, Human
caggccugaguguggaagucuu

SEQ ID NO: 361461 - RNA, 22 nt, Human
acaggcaggcgggacagcccga

SEQ ID NO: 361462 - RNA, 22 nt, Human
gacagggcauggugcagaguuc

SEQ ID NO: 361463 - RNA, 22 nt, Human
ugcugugagguugagaaggaag

SEQ ID NO: 361464 - RNA, 22 nt, Human
ugaaacaagauccacagacuug

SEQ ID NO: 361465 - RNA, 22 nt, Human
ccucccacauccuagcucugcu

SEQ ID NO: 361466 - RNA, 22 nt, Human
uccacugcagcuucugauggaa

SEQ ID NO: 361467 - RNA, 22 nt, Human
cacagugcaugaugggcagaag

SEQ ID NO: 361468 - RNA, 21 nt, Human
agaauucuuaaguauucuaau

SEQ ID NO: 361469 - RNA, 18 nt, Human
ccucacagacuuccaugu

SEQ ID NO: 361470 - RNA, 22 nt, Human
agauaaaaugguucaaaggcua

SEQ ID NO: 361471 - RNA, 22 nt, Human
uugcauugcuuggucuucaaga

SEQ ID NO: 361472 - RNA, 22 nt, Human
aauaacaggcucaucagaugcu

SEQ ID NO: 361473 - RNA, 22 nt, Human
ugcuuauucuuuccacaauuca

SEQ ID NO: 361474 - RNA, 22 nt, Human
gcuguucccauguggggcucag

SEQ ID NO: 361475 - RNA, 22 nt, Human
cagcaggaagguuuccccugca

SEQ ID NO: 361476 - RNA, 22 nt, Human
ccagggcuggguuugucggugu

SEQ ID NO: 361477 - RNA, 22 nt, Human
gcauaauauacaugcuugaucc

SEQ ID NO: 361478 - RNA, 22 nt, Human
uucaggauccccuugaugggcu

SEQ ID NO: 361479 - RNA, 22 nt, Human
gaggaaaagagacagguuauug

SEQ ID NO: 361480 - RNA, 22 nt, Human
cacacauugaauucauucuugu

SEQ ID NO: 361481 - RNA, 22 nt, Human
aggucacauggauaaugaucag

SEQ ID NO: 361482 - RNA, 20 nt, Human
ucugcucagcccucaguggc

SEQ ID NO: 361483 - RNA, 22 nt, Human
gauucuuacuucuaagcaagcu

SEQ ID NO: 361484 - RNA, 22 nt, Human
gaugaggggucauuggcuggga

SEQ ID NO: 361485 - RNA, 22 nt, Human
ugcuuuauaaccauuucugugg

SEQ ID NO: 361486 - RNA, 22 nt, Human
gaaaguuucuucauuaagaugu

SEQ ID NO: 361487 - RNA, 22 nt, Human
uuuauuuaaagucguguguuaa

SEQ ID NO: 361488 - RNA, 22 nt, Human
gcuugaaaauucauagguauuu

SEQ ID NO: 361489 - RNA, 22 nt, Human
cugggccucaaucucagaguuu

SEQ ID NO: 361490 - RNA, 23 nt, Human
uguaacaauucccagccuuugcc

SEQ ID NO: 361491 - RNA, 22 nt, Human
gggaggaaaugugcagcgaauu

SEQ ID NO: 361492 - RNA, 17 nt, Human
ugagacagggcaggccc

SEQ ID NO: 361493 - RNA, 22 nt, Human
ccauggcauuuuaugugucuua

SEQ ID NO: 361494 - RNA, 22 nt, Human
cuggcagcugcccgagaugccc

SEQ ID NO: 361495 - RNA, 18 nt, Human
acagaggcagacauguau

SEQ ID NO: 361496 - RNA, 22 nt, Human
uccaggagagguagaggguucc

SEQ ID NO: 361497 - RNA, 22 nt, Human
aaugcaguuucauuuguagaau

SEQ ID NO: 361498 - RNA, 22 nt, Human
gcagaggcucuuuaaugcuuag

SEQ ID NO: 361499 - RNA, 22 nt, Human
cccaggcagugugugcaugcgu

SEQ ID NO: 361500 - RNA, 22 nt, Human
acuauacaagauuagggauuug

SEQ ID NO: 361501 - RNA, 22 nt, Human
uugguuuaggaacuggcuugga

SEQ ID NO: 361502 - RNA, 22 nt, Human
caagagcuuuagaaaugcucau

SEQ ID NO: 361503 - RNA, 22 nt, Human
ggaucugagagcaagcaggacc

SEQ ID NO: 361504 - RNA, 22 nt, Human
acuuccuguguuggucuugcug

SEQ ID NO: 361505 - RNA, 22 nt, Human
ucagcuccucaugcaggggaua

SEQ ID NO: 361506 - RNA, 22 nt, Human
gcaaauacauguugagcaccua

SEQ ID NO: 361507 - RNA, 22 nt, Human
caagagcucccagaccugggca

SEQ ID NO: 361508 - RNA, 22 nt, Human
aauuaggggaggacguaucaua

SEQ ID NO: 361509 - RNA, 22 nt, Human
ccagaggaggggggucuuucug

SEQ ID NO: 361510 - RNA, 22 nt, Human
uuuuucaucugauugauaacuc

SEQ ID NO: 361511 - RNA, 22 nt, Human
uaacagaaaggcucaggugcuc

SEQ ID NO: 361512 - RNA, 22 nt, Human
guacccaggcacgccuugcuga

SEQ ID NO: 361513 - RNA, 22 nt, Human
ugguccagacauuucugaggua

SEQ ID NO: 361514 - RNA, 22 nt, Human
cuggccgguauuugccucuggg

SEQ ID NO: 361515 - RNA, 22 nt, Human
ugugaacuggcagguggacggg

SEQ ID NO: 361516 - RNA, 22 nt, Human
aggcgugggaggaucugaggcc

SEQ ID NO: 361517 - RNA, 22 nt, Human
ccuggcaguggugaagaagagg

SEQ ID NO: 361518 - RNA, 22 nt, Human
cauggucuacaauuucauuuua

SEQ ID NO: 361519 - RNA, 22 nt, Human
uagggcucacugagaugaauau

SEQ ID NO: 361520 - RNA, 22 nt, Human
uccauuuuucaugacuccucaa

SEQ ID NO: 361521 - RNA, 22 nt, Human
uuaugcaaaggggccucuuccu

SEQ ID NO: 361522 - RNA, 20 nt, Human
agagaauucccuuuggagau

SEQ ID NO: 361523 - RNA, 22 nt, Human
augcugcacaagccacauguag

SEQ ID NO: 361524 - RNA, 22 nt, Human
uucaggaucaaguugccaguag

SEQ ID NO: 361525 - RNA, 22 nt, Human
agaauuucaaauggaaguuuua

SEQ ID NO: 361526 - RNA, 22 nt, Human
acaaaaauuagcugggcauggu

SEQ ID NO: 361527 - RNA, 22 nt, Human
agccaggaaugcaugcucugcu

SEQ ID NO: 361528 - RNA, 22 nt, Human
cccaggugggcaccucgaggaa

SEQ ID NO: 361529 - RNA, 22 nt, Human
acagaguaggugcugucgacug

SEQ ID NO: 361530 - RNA, 22 nt, Human
ugaggaaacugaggcacagaug

SEQ ID NO: 361531 - RNA, 22 nt, Human
ucuggaucgccggcgccugggc

SEQ ID NO: 361532 - RNA, 19 nt, Human
gcuuuuuguugucaaaggu

SEQ ID NO: 361533 - RNA, 22 nt, Human
cccuccccacaaagcuucacac

SEQ ID NO: 361534 - RNA, 22 nt, Human
uauugacaauaggcaacugagg

SEQ ID NO: 361535 - RNA, 22 nt, Human
cuggagccauguauagccuaug

SEQ ID NO: 361536 - RNA, 22 nt, Human
ccuuucucauuuuaagcauuag

SEQ ID NO: 361537 - RNA, 22 nt, Human
cagacaugauguaagcagaggc

SEQ ID NO: 361538 - RNA, 22 nt, Human
gugaggcagagaugccaaaacu

SEQ ID NO: 361539 - RNA, 22 nt, Human
uucuuacagcccuauuacuaaa

SEQ ID NO: 361540 - RNA, 22 nt, Human
caugggcuacagaagcaugcug

SEQ ID NO: 361541 - RNA, 22 nt, Human
gacaggaggcagagcucaggug

SEQ ID NO: 361542 - RNA, 22 nt, Human
cugucuguucagauucauuacu

SEQ ID NO: 361543 - RNA, 22 nt, Human
cugggguggaggagcuccccug

SEQ ID NO: 361544 - RNA, 22 nt, Human
agccauuuuccugaaauauaac

SEQ ID NO: 361545 - RNA, 20 nt, Human
agggcagagggauuacaggc

SEQ ID NO: 361546 - RNA, 20 nt, Human
uggagcuccagcguccaugu

SEQ ID NO: 361547 - RNA, 21 nt, Human
uggccucccacacuuccaugg

SEQ ID NO: 361548 - RNA, 22 nt, Human
caucagaaccagcugggugagg

SEQ ID NO: 361549 - RNA, 20 nt, Human
ucucugcuguccacauuugc

SEQ ID NO: 361550 - RNA, 22 nt, Human
auacaacuuuaucuguaaugag

SEQ ID NO: 361551 - RNA, 22 nt, Human
ccaggcagccaagugugugugu

SEQ ID NO: 361552 - RNA, 18 nt, Human
aucuuuccauagcauguu

SEQ ID NO: 361553 - RNA, 22 nt, Human
gcccaggaguuggaggcugcag

SEQ ID NO: 361554 - RNA, 22 nt, Human
agauacauagcugugagcacac

SEQ ID NO: 361555 - RNA, 22 nt, Human
aguuuguaucaauuugcuuuau

SEQ ID NO: 361556 - RNA, 22 nt, Human
gggcagccucggugccugcugc

SEQ ID NO: 361557 - RNA, 22 nt, Human
caaaggcuuccacugcauccuu

SEQ ID NO: 361558 - RNA, 22 nt, Human
cucagagagggcaccagggcca

SEQ ID NO: 361559 - RNA, 22 nt, Human
gggagguucuguucgcacuuga

SEQ ID NO: 361560 - RNA, 22 nt, Human
cacagcagagggagccauugaa

SEQ ID NO: 361561 - RNA, 22 nt, Human
gaaggccacaagagaaguuaag

SEQ ID NO: 361562 - RNA, 22 nt, Human
caggagccagcugucccaacca

SEQ ID NO: 361563 - RNA, 22 nt, Human
agagguagagguugcagugagc

SEQ ID NO: 361564 - RNA, 22 nt, Human
gcagugaaucuggcaagaauuu

SEQ ID NO: 361565 - RNA, 22 nt, Human
agggacccugaugacugaggag

SEQ ID NO: 361566 - RNA, 22 nt, Human
ucagaagagcuggugcugccug

SEQ ID NO: 361567 - RNA, 22 nt, Human
uagucucuggagacucuagggg

SEQ ID NO: 361568 - RNA, 22 nt, Human
ucucuggaauuggcugaggcaa

SEQ ID NO: 361569 - RNA, 22 nt, Human
caggcugggcuccggagauaaa

SEQ ID NO: 361570 - RNA, 22 nt, Human
agcuuuauauaaaagaguacau

SEQ ID NO: 361571 - RNA, 22 nt, Human
uuagaaacccagacucuuaggu

SEQ ID NO: 361572 - RNA, 22 nt, Human
uuuaggcagcacgggcagcccu

SEQ ID NO: 361573 - RNA, 22 nt, Human
gcagaauugauggagaacuuaa

SEQ ID NO: 361574 - RNA, 22 nt, Human
caggaaagagcugccaggcagg

SEQ ID NO: 361575 - RNA, 22 nt, Human
agcagagcgccugcucagaggg

SEQ ID NO: 361576 - RNA, 22 nt, Human
gaucugaaucaauagaauaacu

SEQ ID NO: 361577 - RNA, 22 nt, Human
ugggaggcuuccagaccuugcu

SEQ ID NO: 361578 - RNA, 22 nt, Human
ugcuucaaguugaaauauucuu

SEQ ID NO: 361579 - RNA, 22 nt, Human
auuuucauggcuucugcucagu

SEQ ID NO: 361580 - RNA, 22 nt, Human
gcucccacugcagcccugagcc

SEQ ID NO: 361581 - RNA, 22 nt, Human
gcucccaggaugaggagccagg

SEQ ID NO: 361582 - RNA, 22 nt, Human
cggcagcuccgcgccguaggac

SEQ ID NO: 361583 - RNA, 22 nt, Human
guaagagcacugucuccugcug

SEQ ID NO: 361584 - RNA, 22 nt, Human
uuagaaaggagcuuauuucuuu

SEQ ID NO: 361585 - RNA, 22 nt, Human
caggcagagcaacugguccaga

SEQ ID NO: 361586 - RNA, 22 nt, Human
uauguacagggauagaacuuga

SEQ ID NO: 361587 - RNA, 22 nt, Human
uacauucuacuuuuucacuccc

SEQ ID NO: 361588 - RNA, 22 nt, Human
cuccaggggccagaagccuggc

SEQ ID NO: 361589 - RNA, 19 nt, Human
ccaggccaucccaguuccc

SEQ ID NO: 361590 - RNA, 22 nt, Human
agcccagguucuaaagccaaac

SEQ ID NO: 361591 - RNA, 22 nt, Human
aucagaaaauacccaguguuua

SEQ ID NO: 361592 - RNA, 22 nt, Human
auguucuuucagccagugcauc

SEQ ID NO: 361593 - RNA, 22 nt, Human
aagcccagaugggagcauuuca

SEQ ID NO: 361594 - RNA, 22 nt, Human
cuucccacagaauucaaucagu

SEQ ID NO: 361595 - RNA, 22 nt, Human
ccauaagguuuggggccaugca

SEQ ID NO: 361596 - RNA, 20 nt, Human
uccagcugggaacagcugau

SEQ ID NO: 361597 - RNA, 22 nt, Human
auggaucacagugccgugggug

SEQ ID NO: 361598 - RNA, 22 nt, Human
cuuauguauauuuggaacguac

SEQ ID NO: 361599 - RNA, 22 nt, Human
cccuguacagucucuguggcac

SEQ ID NO: 361600 - RNA, 22 nt, Human
uacugaaaguggucaacagugg

SEQ ID NO: 361601 - RNA, 22 nt, Human
uuucaaauaccauaaaccuaau

SEQ ID NO: 361602 - RNA, 22 nt, Human
gagccauacaaccuauaaagug

SEQ ID NO: 361603 - RNA, 22 nt, Human
agccuggaguucccaggagaag

SEQ ID NO: 361604 - RNA, 23 nt, Human
uggcuucugccccauucucucca

SEQ ID NO: 361605 - RNA, 22 nt, Human
caggcagagaggagcauuuaau

SEQ ID NO: 361606 - RNA, 22 nt, Human
aaagccacguggccuggggagc

SEQ ID NO: 361607 - RNA, 22 nt, Human
ucuguucaguugauguaguuuu

SEQ ID NO: 361608 - RNA, 22 nt, Human
cugagagguaagcagcgcagug

SEQ ID NO: 361609 - RNA, 22 nt, Human
uccaggagacacccuugugugu

SEQ ID NO: 361610 - RNA, 22 nt, Human
aauuaguauugcgauucauuag

SEQ ID NO: 361611 - RNA, 21 nt, Human
agaagccuggguggagguggg

SEQ ID NO: 361612 - RNA, 18 nt, Human
ggcaugugagugcugagg

SEQ ID NO: 361613 - RNA, 22 nt, Human
caaggaaaacagaugaucaaca

SEQ ID NO: 361614 - RNA, 22 nt, Human
ucccagcauaacaaacugcccg

SEQ ID NO: 361615 - RNA, 22 nt, Human
uaggcucagggcugggugacgg

SEQ ID NO: 361616 - RNA, 22 nt, Human
uucaggaugcagagguuguagu

SEQ ID NO: 361617 - RNA, 22 nt, Human
uaguuaggguucugcagagaca

SEQ ID NO: 361618 - RNA, 22 nt, Human
cagaagcagugagagaugugca

SEQ ID NO: 361619 - RNA, 22 nt, Human
ggcugcaggcagaggcugucug

SEQ ID NO: 361620 - RNA, 22 nt, Human
cagggccuccccggcagucuuu

SEQ ID NO: 361621 - RNA, 22 nt, Human
acugaaggaaacuuuuguguuu

SEQ ID NO: 361622 - RNA, 22 nt, Human
ucccaggacaugggcucugcuc

SEQ ID NO: 361623 - RNA, 22 nt, Human
acagagcugggugcccccugga

SEQ ID NO: 361624 - RNA, 22 nt, Human
aggcaggcuggucugaagagug

SEQ ID NO: 361625 - RNA, 22 nt, Human
uucuucucucauagauuaaggu

SEQ ID NO: 361626 - RNA, 22 nt, Human
ucaggggagguugaaucgucuc

SEQ ID NO: 361627 - RNA, 22 nt, Human
gcagagccgugaauggauuuca

SEQ ID NO: 361628 - RNA, 22 nt, Human
gauuucaaagguucugcaugcc

SEQ ID NO: 361629 - RNA, 22 nt, Human
cauugaaauauggaaacugaug

SEQ ID NO: 361630 - RNA, 22 nt, Human
cugcccugcuugaugacagcga

SEQ ID NO: 361631 - RNA, 22 nt, Human
uccaguggcaccuuggcccuca

SEQ ID NO: 361632 - RNA, 22 nt, Human
ggccugugucugugccuguccu

SEQ ID NO: 361633 - RNA, 22 nt, Human
gcagcuggcccugacacgcaga

SEQ ID NO: 361634 - RNA, 22 nt, Human
ccugucugcagauaucucaggu

SEQ ID NO: 361635 - RNA, 21 nt, Human
cagagcuguccaaacccugac

SEQ ID NO: 361636 - RNA, 21 nt, Human
ccagcuuucccaagucccuuu

SEQ ID NO: 361637 - RNA, 22 nt, Human
gcugccugggcaggaggcgcug

SEQ ID NO: 361638 - RNA, 22 nt, Human
aucugcagaggacaggcgagga

SEQ ID NO: 361639 - RNA, 22 nt, Human
aguccaaggagagacagcauuu

SEQ ID NO: 361640 - RNA, 22 nt, Human
agccaggcugcaguuggcuggc

SEQ ID NO: 361641 - RNA, 22 nt, Human
uuucaaagaccauuaacuauca

SEQ ID NO: 361642 - RNA, 22 nt, Human
cugcuccacaccuccauuuccu

SEQ ID NO: 361643 - RNA, 18 nt, Human
ggcuguggacaagauuag

SEQ ID NO: 361644 - RNA, 22 nt, Human
gccugagccgccugagcggcgg

SEQ ID NO: 361645 - RNA, 22 nt, Human
agggcugagcccaggcauguag

SEQ ID NO: 361646 - RNA, 22 nt, Human
gggcuccagcccgggaccaggu

SEQ ID NO: 361647 - RNA, 22 nt, Human
caguuuuuagauuaguuggugg

SEQ ID NO: 361648 - RNA, 22 nt, Human
ucucaggggccuggaguccugg

SEQ ID NO: 361649 - RNA, 22 nt, Human
gaauuucacaaggugaggauaa

SEQ ID NO: 361650 - RNA, 22 nt, Human
gcgucugaguugcgggggcuca

SEQ ID NO: 361651 - RNA, 22 nt, Human
aaagaaauagauggcauuuaaa

SEQ ID NO: 361652 - RNA, 22 nt, Human
agggucugacuccucuggcaag

SEQ ID NO: 361653 - RNA, 22 nt, Human
ccacccagcagaggaggcaaga

SEQ ID NO: 361654 - RNA, 22 nt, Human
ugaggcuccagccaggccagca

SEQ ID NO: 361655 - RNA, 22 nt, Human
auucuggauuaucaguccacca

SEQ ID NO: 361656 - RNA, 22 nt, Human
cagggugccuguccucagcaaa

SEQ ID NO: 361657 - RNA, 22 nt, Human
agaaagcuuaugaaugggcaag

SEQ ID NO: 361658 - RNA, 22 nt, Human
cucaggauagcugcgcagccug

SEQ ID NO: 361659 - RNA, 22 nt, Human
uuucugaagggcagcagacucu

SEQ ID NO: 361660 - RNA, 22 nt, Human
acugugcacaauucuaaguccu

SEQ ID NO: 361661 - RNA, 18 nt, Human
agaggggagguaagucug

SEQ ID NO: 361662 - RNA, 22 nt, Human
ggaggccagggacccagucagc

SEQ ID NO: 361663 - RNA, 22 nt, Human
acagaggcagugugagauacug

SEQ ID NO: 361664 - RNA, 22 nt, Human
ccugggaguggcacucacagca

SEQ ID NO: 361665 - RNA, 19 nt, Human
gcaucagagcagaaggggu

SEQ ID NO: 361666 - RNA, 21 nt, Human
uggcacugcuuagcagguucc

SEQ ID NO: 361667 - RNA, 22 nt, Human
uggguagagacacagucugggg

SEQ ID NO: 361668 - RNA, 23 nt, Human
ugccucugccucccuagucugca

SEQ ID NO: 361669 - RNA, 22 nt, Human
ugagaaaagguugagaugauaa

SEQ ID NO: 361670 - RNA, 22 nt, Human
uggguagaggaauugggcuacc

SEQ ID NO: 361671 - RNA, 22 nt, Human
cgggcagcggcguggccauggu

SEQ ID NO: 361672 - RNA, 22 nt, Human
uaaaucccuacaucuguguuuu

SEQ ID NO: 361673 - RNA, 22 nt, Human
ccugcagguugcagaggcggaa

SEQ ID NO: 361674 - RNA, 22 nt, Human
caggauccuggcugcauggacg

SEQ ID NO: 361675 - RNA, 22 nt, Human
uggcuuccugcauggauccucu

SEQ ID NO: 361676 - RNA, 22 nt, Human
augcuuaagcucaguuauauau

SEQ ID NO: 361677 - RNA, 20 nt, Human
aggcagagcgcacuuuuaga

SEQ ID NO: 361678 - RNA, 22 nt, Human
auuuugaaaccaaguuauuucc

SEQ ID NO: 361679 - RNA, 22 nt, Human
ccacagaguuacaaaacaguca

SEQ ID NO: 361680 - RNA, 22 nt, Human
aggcagcagggccacuggcuga

SEQ ID NO: 361681 - RNA, 22 nt, Human
gucugucaucugagauggagug

SEQ ID NO: 361682 - RNA, 22 nt, Human
ucagaggacaagcucccuggug

SEQ ID NO: 361683 - RNA, 22 nt, Human
ggcuccugauaggagaaugcgg

SEQ ID NO: 361684 - RNA, 22 nt, Human
gaaaggugccccauaggcagga

SEQ ID NO: 361685 - RNA, 22 nt, Human
caauuucagugcuguggagagg

SEQ ID NO: 361686 - RNA, 19 nt, Human
cccaggagucuggcugguu

SEQ ID NO: 361687 - RNA, 19 nt, Human
ggagaagcccaggaauccu

SEQ ID NO: 361688 - RNA, 22 nt, Human
ucagucucaucaacucuauucc

SEQ ID NO: 361689 - RNA, 22 nt, Human
ggccaugguuggggaagacaug

SEQ ID NO: 361690 - RNA, 22 nt, Human
ucucuuaauuuuggaauagugu

SEQ ID NO: 361691 - RNA, 22 nt, Human
auuccaaacgccucgcggacuu

SEQ ID NO: 361692 - RNA, 22 nt, Human
cagagugaaaacugagcucaaa

SEQ ID NO: 361693 - RNA, 22 nt, Human
ucacagacauggugagguaaca

SEQ ID NO: 361694 - RNA, 22 nt, Human
guaaacauuacugugcuguaua

SEQ ID NO: 361695 - RNA, 18 nt, Human
aagaggaggagcagguug

SEQ ID NO: 361696 - RNA, 17 nt, Human
uuuucucucuuggauuc

SEQ ID NO: 361697 - RNA, 22 nt, Human
cccagcaucccagugggcagca

SEQ ID NO: 361698 - RNA, 23 nt, Human
caauuucauaugauucuaccuaa

SEQ ID NO: 361699 - RNA, 23 nt, Human
aaucuggcugauguuuuuucucu

SEQ ID NO: 361700 - RNA, 22 nt, Human
acccugggcuuggccugcucag

SEQ ID NO: 361701 - RNA, 22 nt, Human
gagaggccauggcugugcagug

SEQ ID NO: 361702 - RNA, 22 nt, Human
agcugguguccuccuggagcug

SEQ ID NO: 361703 - RNA, 22 nt, Human
cccagcagaaucugaugagggc

SEQ ID NO: 361704 - RNA, 22 nt, Human
uauuucagcccuacuacuuggc

SEQ ID NO: 361705 - RNA, 22 nt, Human
uuucacauguggaaugccaggu

SEQ ID NO: 361706 - RNA, 22 nt, Human
cagaauaaagguacaauugagu

SEQ ID NO: 361707 - RNA, 22 nt, Human
gaccauuuuuacagagcauuca

SEQ ID NO: 361708 - RNA, 22 nt, Human
ggccauggaccccgagcugacc

SEQ ID NO: 361709 - RNA, 22 nt, Human
ccagggccaguaagauuggcau

SEQ ID NO: 361710 - RNA, 22 nt, Human
cauagaaaucaggugagaaucu

SEQ ID NO: 361711 - RNA, 19 nt, Human
cuggaaugagaacaugccc

SEQ ID NO: 361712 - RNA, 18 nt, Human
ucugucucuguccuugcu

SEQ ID NO: 361713 - RNA, 22 nt, Human
gcucuggcuacuguggcuaccg

SEQ ID NO: 361714 - RNA, 20 nt, Human
ggcugugcccuuccguggcc

SEQ ID NO: 361715 - RNA, 22 nt, Human
acaguuugcccugacauucucc

SEQ ID NO: 361716 - RNA, 22 nt, Human
ucagagagguuggugauaagaa

SEQ ID NO: 361717 - RNA, 20 nt, Human
agaggcuuccuugggaggag

SEQ ID NO: 361718 - RNA, 22 nt, Human
aaguucaauggaaaagcuuuag

SEQ ID NO: 361719 - RNA, 20 nt, Human
ccuggcugcauucaggacgg

SEQ ID NO: 361720 - RNA, 22 nt, Human
gcucuggagauggagccuugag

SEQ ID NO: 361721 - RNA, 18 nt, Human
gggaagccgggaagccgg

SEQ ID NO: 361722 - RNA, 18 nt, Human
uuaagagcugaaagggga

SEQ ID NO: 361723 - RNA, 22 nt, Human
cucaggcuugggaggaggccca

SEQ ID NO: 361724 - RNA, 22 nt, Human
accaugaugggaagcucagggc

SEQ ID NO: 361725 - RNA, 22 nt, Human
ucagggugaaccaggcaggaau

SEQ ID NO: 361726 - RNA, 22 nt, Human
agccuccaaaugucaggucccg

SEQ ID NO: 361727 - RNA, 20 nt, Human
ugcccagcaagagugcaguu

SEQ ID NO: 361728 - RNA, 22 nt, Human
uccagccaccaccuugauugcc

SEQ ID NO: 361729 - RNA, 22 nt, Human
ugggagaagcagcagccaagug

SEQ ID NO: 361730 - RNA, 22 nt, Human
uucuggagcuaaaguccacucu

SEQ ID NO: 361731 - RNA, 22 nt, Human
ccagggugagugucauggguua

SEQ ID NO: 361732 - RNA, 22 nt, Human
uaaggcacacaguugcugcaug

SEQ ID NO: 361733 - RNA, 22 nt, Human
ccccagcucagugcagggacau

SEQ ID NO: 361734 - RNA, 23 nt, Human
ggagccuggcauaugagacgcau

SEQ ID NO: 361735 - RNA, 22 nt, Human
ggcucugguugaccaugauggc

SEQ ID NO: 361736 - RNA, 19 nt, Human
uacauacuuauucuaaaag

SEQ ID NO: 361737 - RNA, 22 nt, Human
uugauuaaacaggcauauucaa

SEQ ID NO: 361738 - RNA, 22 nt, Human
uuucuuaguccuagagugauuu

SEQ ID NO: 361739 - RNA, 22 nt, Human
uccucuucugcccaucagaggc

SEQ ID NO: 361740 - RNA, 22 nt, Human
ccaggcagagggaauagcaagu

SEQ ID NO: 361741 - RNA, 23 nt, Human
uggcaccaggcauucuaggggua

SEQ ID NO: 361742 - RNA, 22 nt, Human
cuauuaggcuuccauuucaugc

SEQ ID NO: 361743 - RNA, 23 nt, Human
uccaggagaauuccagggcccgg

SEQ ID NO: 361744 - RNA, 19 nt, Human
agauuuaccucauauaguu

SEQ ID NO: 361745 - RNA, 20 nt, Human
gcagcugcccccagucccug

SEQ ID NO: 361746 - RNA, 22 nt, Human
cagggcucuucaucacacagua

SEQ ID NO: 361747 - RNA, 22 nt, Human
uggcagggccugcucaucaucc

SEQ ID NO: 361748 - RNA, 19 nt, Human
cagauguuuucaguucauu

SEQ ID NO: 361749 - RNA, 19 nt, Human
ugucacugucauggcccag

SEQ ID NO: 361750 - RNA, 22 nt, Human
guccuggggauacagaagugaa

SEQ ID NO: 361751 - RNA, 22 nt, Human
cuuagaaaugcagauucucagg

SEQ ID NO: 361752 - RNA, 22 nt, Human
gcuguggccaacaaaccacuuu

SEQ ID NO: 361753 - RNA, 23 nt, Human
uuacagaaaguaugcuuuuguuu

SEQ ID NO: 361754 - RNA, 22 nt, Human
cccaggagacagaaacagaggu

SEQ ID NO: 361755 - RNA, 22 nt, Human
uggugccuugggccuacagcgc

SEQ ID NO: 361756 - RNA, 22 nt, Human
cagcuucucagaaagcugaggu

SEQ ID NO: 361757 - RNA, 22 nt, Human
agaaaugcucaggucaacuuaa

SEQ ID NO: 361758 - RNA, 22 nt, Human
gagaaguuucugguuugcauag

SEQ ID NO: 361759 - RNA, 22 nt, Human
uaauuauagccgcuauuuugcu

SEQ ID NO: 361760 - RNA, 22 nt, Human
gagggauggugugagaggcuca

SEQ ID NO: 361761 - RNA, 22 nt, Human
cagggcccauggcucagguagg

SEQ ID NO: 361762 - RNA, 20 nt, Human
aggccaggaaauguaguucu

SEQ ID NO: 361763 - RNA, 17 nt, Human
ggagagugggaauggcc

SEQ ID NO: 361764 - RNA, 22 nt, Human
cggcugagcagugcugauggaa

SEQ ID NO: 361765 - RNA, 22 nt, Human
ucccagauuguugauggcuuaa

SEQ ID NO: 361766 - RNA, 22 nt, Human
cagcucucuaaggucuugcuuu

SEQ ID NO: 361767 - RNA, 22 nt, Human
aaaucauguuggcacaauaaaa

SEQ ID NO: 361768 - RNA, 22 nt, Human
aacacuuugggcauggccuucc

SEQ ID NO: 361769 - RNA, 22 nt, Human
ucugaaaugcaaauuugacuga

SEQ ID NO: 361770 - RNA, 22 nt, Human
cuuccuguugucacagucugcg

SEQ ID NO: 361771 - RNA, 22 nt, Human
cuuaauuuaagccuagaaugca

SEQ ID NO: 361772 - RNA, 22 nt, Human
ggccaccuuccaguugccugca

SEQ ID NO: 361773 - RNA, 22 nt, Human
agcugcuguccuaggcacugua

SEQ ID NO: 361774 - RNA, 22 nt, Human
gaauacaugauacaugaacugc

SEQ ID NO: 361775 - RNA, 22 nt, Human
cucuucuugcuagacugagugc

SEQ ID NO: 361776 - RNA, 22 nt, Human
uccuggcccggccgggccugcu

SEQ ID NO: 361777 - RNA, 17 nt, Human
uucucuuccuggauagu

SEQ ID NO: 361778 - RNA, 22 nt, Human
cugcugagcccuggcacaggug

SEQ ID NO: 361779 - RNA, 22 nt, Human
gggacuucauagcuaggcacuu

SEQ ID NO: 361780 - RNA, 22 nt, Human
cagagacauucaguaaauuauc

SEQ ID NO: 361781 - RNA, 22 nt, Human
gcacacaguauaugcucauuaa

SEQ ID NO: 361782 - RNA, 19 nt, Human
uaaaaugucuguggucagu

SEQ ID NO: 361783 - RNA, 22 nt, Human
cucccagguuccgacgccucuu

SEQ ID NO: 361784 - RNA, 22 nt, Human
ugccaggcuaaguggaggacuu

SEQ ID NO: 361785 - RNA, 22 nt, Human
agaugcuucaguguuuaauuua

SEQ ID NO: 361786 - RNA, 22 nt, Human
guucauuuaugauguaacaugu

SEQ ID NO: 361787 - RNA, 18 nt, Human
caauuucaauggucugaa

SEQ ID NO: 361788 - RNA, 22 nt, Human
uggugcaagucucugaggaggg

SEQ ID NO: 361789 - RNA, 18 nt, Human
agaugaaagcaaaugaca

SEQ ID NO: 361790 - RNA, 22 nt, Human
ucuggcucugacacuacuguua

SEQ ID NO: 361791 - RNA, 22 nt, Human
aaucagcuaaauaaacuaguca

SEQ ID NO: 361792 - RNA, 22 nt, Human
ggcacugagaacaggcugacuu

SEQ ID NO: 361793 - RNA, 22 nt, Human
ucucccaguggugcagaaagca

SEQ ID NO: 361794 - RNA, 22 nt, Human
auaagagcuagucuuuuccuug

SEQ ID NO: 361795 - RNA, 22 nt, Human
aggaggggcauagaaauguaau

SEQ ID NO: 361796 - RNA, 22 nt, Human
uucuguguggguagcuccuguu

SEQ ID NO: 361797 - RNA, 20 nt, Human
ugcucugucuaaaacuuccc

SEQ ID NO: 361798 - RNA, 22 nt, Human
ucaggauccauagacucccaaa

SEQ ID NO: 361799 - RNA, 22 nt, Human
gagucaccuugggucagcgaua

SEQ ID NO: 361800 - RNA, 22 nt, Human
aaguccuuuccaguccugugau

SEQ ID NO: 361801 - RNA, 23 nt, Human
auuucuaggggauuuucuggugc

SEQ ID NO: 361802 - RNA, 22 nt, Human
auuucaacacuuuuggaauuag

SEQ ID NO: 361803 - RNA, 22 nt, Human
ucccagagacagagccuccucc

SEQ ID NO: 361804 - RNA, 22 nt, Human
gaggccugguagccgagcccca

SEQ ID NO: 361805 - RNA, 20 nt, Human
uucuauacauaucacugaaa

SEQ ID NO: 361806 - RNA, 22 nt, Human
agauguuccagccaaugggaau

SEQ ID NO: 361807 - RNA, 22 nt, Human
uagaauaaguugaugauauaug

SEQ ID NO: 361808 - RNA, 22 nt, Human
ugggcucugcugcguaccaguu

SEQ ID NO: 361809 - RNA, 22 nt, Human
ucucagagcucacaccuccugg

SEQ ID NO: 361810 - RNA, 22 nt, Human
ugcucugguccucccucggcgc

SEQ ID NO: 361811 - RNA, 22 nt, Human
agagacaggguuuugucguguu

SEQ ID NO: 361812 - RNA, 22 nt, Human
cugugcagcuggcuuccuggaa

SEQ ID NO: 361813 - RNA, 22 nt, Human
ggcaccuggauguagcagugaa

SEQ ID NO: 361814 - RNA, 23 nt, Human
agcccagcagagaaccuaggucc

SEQ ID NO: 361815 - RNA, 22 nt, Human
uuguauuagcuguaaauuuucu

SEQ ID NO: 361816 - RNA, 22 nt, Human
acagcuuuuaugggaccagcca

SEQ ID NO: 361817 - RNA, 20 nt, Human
acauccuggugacuagaacu

SEQ ID NO: 361818 - RNA, 22 nt, Human
cagcuauuuucucauuaaggau

SEQ ID NO: 361819 - RNA, 22 nt, Human
cucagagaggcaguggaaguca

SEQ ID NO: 361820 - RNA, 22 nt, Human
gcuuagucaauuauaaauaggc

SEQ ID NO: 361821 - RNA, 22 nt, Human
ggcagcaguccauggcccaagg

SEQ ID NO: 361822 - RNA, 21 nt, Human
auucagaaagggaauaaacuc

SEQ ID NO: 361823 - RNA, 22 nt, Human
acacaaguucuaaagauugcgc

SEQ ID NO: 361824 - RNA, 22 nt, Human
ggcaggugcaccugagccaucu

SEQ ID NO: 361825 - RNA, 22 nt, Human
ugaagcccugugucagcuucca

SEQ ID NO: 361826 - RNA, 22 nt, Human
ccugggaggcugugggucugcu

SEQ ID NO: 361827 - RNA, 22 nt, Human
uaaguucagaguucucauuugu

SEQ ID NO: 361828 - RNA, 22 nt, Human
ugccauuuugagauguuaauga

SEQ ID NO: 361829 - RNA, 22 nt, Human
ucuucucuccugcuuggcagaa

SEQ ID NO: 361830 - RNA, 23 nt, Human
ucagagaaguuguaggcugggga

SEQ ID NO: 361831 - RNA, 22 nt, Human
cagggcaggaugcugugauuau

SEQ ID NO: 361832 - RNA, 22 nt, Human
gaggcagagguuguugcaguga

SEQ ID NO: 361833 - RNA, 22 nt, Human
agagaauuuuaaaagccuugaa

SEQ ID NO: 361834 - RNA, 23 nt, Human
uugucugugcuuuuccaguugcu

SEQ ID NO: 361835 - RNA, 22 nt, Human
uaggcagccagcaucaguuggg

SEQ ID NO: 361836 - RNA, 22 nt, Human
aacaguaaugugguguuggguu

SEQ ID NO: 361837 - RNA, 22 nt, Human
ggcaggcaagucugcucuguga

SEQ ID NO: 361838 - RNA, 22 nt, Human
ugccugucuuggaguccuggcc

SEQ ID NO: 361839 - RNA, 22 nt, Human
uaaaugugggggccacgggcuu

SEQ ID NO: 361840 - RNA, 21 nt, Human
uuucagaccuaucuuugaagg

SEQ ID NO: 361841 - RNA, 22 nt, Human
gucauuguguggacauggagaa

SEQ ID NO: 361842 - RNA, 22 nt, Human
gcagcugcaggcaggcuugcug

SEQ ID NO: 361843 - RNA, 22 nt, Human
cagagcagagugauuguucugg

SEQ ID NO: 361844 - RNA, 22 nt, Human
ucucagggcagcaaggaagcau

SEQ ID NO: 361845 - RNA, 20 nt, Human
gccugagcuccgccuccugu

SEQ ID NO: 361846 - RNA, 22 nt, Human
uuaaaugaggcugauguagauu

SEQ ID NO: 361847 - RNA, 22 nt, Human
ugggcucugcaucagugcccau

SEQ ID NO: 361848 - RNA, 22 nt, Human
agggccaggaucacagccaaga

SEQ ID NO: 361849 - RNA, 22 nt, Human
cccuggcauaaaacuucuccag

SEQ ID NO: 361850 - RNA, 22 nt, Human
ggccucugcccucacuccuguc

SEQ ID NO: 361851 - RNA, 22 nt, Human
guccagagauggacgagcagau

SEQ ID NO: 361852 - RNA, 22 nt, Human
agacagcaugauacaugaugcu

SEQ ID NO: 361853 - RNA, 22 nt, Human
guaaacauuuucaucugugccc

SEQ ID NO: 361854 - RNA, 22 nt, Human
agcuguggaagacugucagggu

SEQ ID NO: 361855 - RNA, 22 nt, Human
gcucaggaucccaggggugugc

SEQ ID NO: 361856 - RNA, 22 nt, Human
caaggaaacaugaaaugcauug

SEQ ID NO: 361857 - RNA, 22 nt, Human
gaggggcuggguagggcaaccc

SEQ ID NO: 361858 - RNA, 22 nt, Human
agugcugucccgacaacugagg

SEQ ID NO: 361859 - RNA, 22 nt, Human
cauagaaacuugcagcaagcac

SEQ ID NO: 361860 - RNA, 22 nt, Human
acagaacugggggcacagauag

SEQ ID NO: 361861 - RNA, 22 nt, Human
uauagccauuuccaguggcauc

SEQ ID NO: 361862 - RNA, 22 nt, Human
ccacagagcauuagauuucaga

SEQ ID NO: 361863 - RNA, 22 nt, Human
agagcuggaaucagaccucagg

SEQ ID NO: 361864 - RNA, 22 nt, Human
agagccagagaccuggguucac

SEQ ID NO: 361865 - RNA, 22 nt, Human
gguguccaucaggcugugcuuc

SEQ ID NO: 361866 - RNA, 17 nt, Human
agagagagcaugccacc

SEQ ID NO: 361867 - RNA, 22 nt, Human
uuuccucuaaacgcauuugcuu

SEQ ID NO: 361868 - RNA, 22 nt, Human
auuuacagaagcauguaauagc

SEQ ID NO: 361869 - RNA, 19 nt, Human
cucuuaaauugucucuugc

SEQ ID NO: 361870 - RNA, 22 nt, Human
acaacaaagacacuugaaauga

SEQ ID NO: 361871 - RNA, 22 nt, Human
cccaggcagcggggucuccuug

SEQ ID NO: 361872 - RNA, 22 nt, Human
gaggcagcaauaaaaagaauuu

SEQ ID NO: 361873 - RNA, 22 nt, Human
ggggauggauuccgggucccug

SEQ ID NO: 361874 - RNA, 22 nt, Human
gccuggcaaggcccuguugacu

SEQ ID NO: 361875 - RNA, 21 nt, Human
aggcccagagucuugggggga

SEQ ID NO: 361876 - RNA, 22 nt, Human
cagaaguaagauuacugugagu

SEQ ID NO: 361877 - RNA, 22 nt, Human
agggaggaucugcuccuugucu

SEQ ID NO: 361878 - RNA, 19 nt, Human
agcagccaucgaccaugga

SEQ ID NO: 361879 - RNA, 20 nt, Human
caggagggacauuucagcau

SEQ ID NO: 361880 - RNA, 22 nt, Human
cucuaauccuuugucccugggu

SEQ ID NO: 361881 - RNA, 22 nt, Human
ugcagggauuguuggcauccau

SEQ ID NO: 361882 - RNA, 22 nt, Human
auuagagguacaaaccuucacu

SEQ ID NO: 361883 - RNA, 22 nt, Human
uaugaacuuuugaugugacaug

SEQ ID NO: 361884 - RNA, 22 nt, Human
aggggcucaaagugugcaggga

SEQ ID NO: 361885 - RNA, 22 nt, Human
auaucacaguaguuguuuaguu

SEQ ID NO: 361886 - RNA, 22 nt, Human
caggccucccggugcacacuga

SEQ ID NO: 361887 - RNA, 22 nt, Human
ggaaggucgagcugcaucuggc

SEQ ID NO: 361888 - RNA, 22 nt, Human
uagcagggguagauagagugug

SEQ ID NO: 361889 - RNA, 20 nt, Human
cacaagagaauacacacugg

SEQ ID NO: 361890 - RNA, 23 nt, Human
uuuggacuugugacucuucuccu

SEQ ID NO: 361891 - RNA, 22 nt, Human
uggcagcuggaucccaaggcag

SEQ ID NO: 361892 - RNA, 22 nt, Human
gugucccaggccucuggaauua

SEQ ID NO: 361893 - RNA, 22 nt, Human
gaggaagggcugccugccgggc

SEQ ID NO: 361894 - RNA, 22 nt, Human
gcacuaaaccaacauguaauaa

SEQ ID NO: 361895 - RNA, 22 nt, Human
agcaauaugacauugcuacauc

SEQ ID NO: 361896 - RNA, 22 nt, Human
gguucacauauugagaguauuc

SEQ ID NO: 361897 - RNA, 22 nt, Human
ggacacagcugcagccacaccc

SEQ ID NO: 361898 - RNA, 22 nt, Human
cccaggaagaaauucugauuug

SEQ ID NO: 361899 - RNA, 22 nt, Human
ccuuucucuuggauaccgauug

SEQ ID NO: 361900 - RNA, 22 nt, Human
gccaaaucuugcacacucuugu

SEQ ID NO: 361901 - RNA, 22 nt, Human
cagggacagccuugggguggcg

SEQ ID NO: 361902 - RNA, 22 nt, Human
auacacauauguguguauaugu

SEQ ID NO: 361903 - RNA, 22 nt, Human
auuaagggccaauccuccagcc

SEQ ID NO: 361904 - RNA, 22 nt, Human
cucaagacugaucgcaguggaa

SEQ ID NO: 361905 - RNA, 22 nt, Human
ugggauggagccugaguauagu

SEQ ID NO: 361906 - RNA, 22 nt, Human
cauagcuuagggguuaaacuca

SEQ ID NO: 361907 - RNA, 22 nt, Human
acagcugugagggucacuugua

SEQ ID NO: 361908 - RNA, 22 nt, Human
aaggcacucauucaaggagaua

SEQ ID NO: 361909 - RNA, 22 nt, Human
agggucagggagugaguauuua

SEQ ID NO: 361910 - RNA, 23 nt, Human
gugcucugcggucugcuagucug

SEQ ID NO: 361911 - RNA, 22 nt, Human
ggccuguccagccugccuggcu

SEQ ID NO: 361912 - RNA, 22 nt, Human
uaaacauguugacaucuuaccu

SEQ ID NO: 361913 - RNA, 22 nt, Human
gccagccugugcuuggccaggc

SEQ ID NO: 361914 - RNA, 22 nt, Human
ccauaauauuaaaugcuuuugu

SEQ ID NO: 361915 - RNA, 22 nt, Human
cagggagcuggcuggcugugcc

SEQ ID NO: 361916 - RNA, 22 nt, Human
aagggcuccauccuuauaaaug

SEQ ID NO: 361917 - RNA, 22 nt, Human
ugccaaggagcuggaucagggc

SEQ ID NO: 361918 - RNA, 22 nt, Human
cccagcagccuggauguucuuu

SEQ ID NO: 361919 - RNA, 22 nt, Human
guauuagguuggugcaaaagua

SEQ ID NO: 361920 - RNA, 22 nt, Human
auaucuuuguuuuugccaagau

SEQ ID NO: 361921 - RNA, 22 nt, Human
ugccucuguggaaauggugguc

SEQ ID NO: 361922 - RNA, 22 nt, Human
ucagaacagaagcuggcuauaa

SEQ ID NO: 361923 - RNA, 22 nt, Human
caguggccaugguggcaggggu

SEQ ID NO: 361924 - RNA, 22 nt, Human
ggaagagagggcugggccucaa

SEQ ID NO: 361925 - RNA, 22 nt, Human
uauauguaagcuauguaagagu

SEQ ID NO: 361926 - RNA, 22 nt, Human
gaauguaauagucaguagaaca

SEQ ID NO: 361927 - RNA, 23 nt, Human
cagagcuggcucagagcugccug

SEQ ID NO: 361928 - RNA, 22 nt, Human
accaucaguacuggaugcugac

SEQ ID NO: 361929 - RNA, 22 nt, Human
uuuaggcagucauugaacaagu

SEQ ID NO: 361930 - RNA, 22 nt, Human
uacuuccagcaaucugcauauu

SEQ ID NO: 361931 - RNA, 22 nt, Human
gguacaaggagugaagguuugg

SEQ ID NO: 361932 - RNA, 20 nt, Human
auuucaguguuugcaauuuc

SEQ ID NO: 361933 - RNA, 22 nt, Human
cccucccaagcacucugacaua

SEQ ID NO: 361934 - RNA, 22 nt, Human
cagcuuuauuaaugauugucuu

SEQ ID NO: 361935 - RNA, 22 nt, Human
acccuggguucccgcagcacca

SEQ ID NO: 361936 - RNA, 22 nt, Human
ggucagagggugggcugccugu

SEQ ID NO: 361937 - RNA, 22 nt, Human
gcaggugaaugauggacuagga

SEQ ID NO: 361938 - RNA, 18 nt, Human
aaaugcuaggcuacauga

SEQ ID NO: 361939 - RNA, 22 nt, Human
uuguuuucuccacugcaucuua

SEQ ID NO: 361940 - RNA, 22 nt, Human
cuucagaagccugcagccuuug

SEQ ID NO: 361941 - RNA, 22 nt, Human
ggcugcuuuaucggcugcugaa

SEQ ID NO: 361942 - RNA, 22 nt, Human
aaaugcacagaaaggaugugga

SEQ ID NO: 361943 - RNA, 22 nt, Human
ucaggaucaggggccuuuccuu

SEQ ID NO: 361944 - RNA, 22 nt, Human
cagcuuuauuucacguguuugu

SEQ ID NO: 361945 - RNA, 22 nt, Human
ggcagaggugacagugucuuuu

SEQ ID NO: 361946 - RNA, 22 nt, Human
auguaacuucugugaaucugac

SEQ ID NO: 361947 - RNA, 22 nt, Human
cuguagccaguuuggccucacc

SEQ ID NO: 361948 - RNA, 22 nt, Human
ccucugcucugguccaugugcu

SEQ ID NO: 361949 - RNA, 22 nt, Human
ggcuuaaugguucuuuuucuca

SEQ ID NO: 361950 - RNA, 22 nt, Human
uauccuuguacuauaguauuua

SEQ ID NO: 361951 - RNA, 22 nt, Human
aaacuuuaagacaguccucaag

SEQ ID NO: 361952 - RNA, 22 nt, Human
gagcuggcuccgccaugcugcu

SEQ ID NO: 361953 - RNA, 22 nt, Human
auucuucacaaauauauagaag

SEQ ID NO: 361954 - RNA, 16 nt, Human
gagggcagaggcggaa

SEQ ID NO: 361955 - RNA, 22 nt, Human
ggugaaggaggaagcugaugga

SEQ ID NO: 361956 - RNA, 22 nt, Human
uuguuugaggucacugauauuu

SEQ ID NO: 361957 - RNA, 23 nt, Human
gccuggagaaaagcugcaguuca

SEQ ID NO: 361958 - RNA, 22 nt, Human
ucaaagcaucagucaauuuagg

SEQ ID NO: 361959 - RNA, 22 nt, Human
uggcagcaguagccaccccagc

SEQ ID NO: 361960 - RNA, 22 nt, Human
acaaaugcaaguuuuaugucaa

SEQ ID NO: 361961 - RNA, 22 nt, Human
uggcugagagucauccugugug

SEQ ID NO: 361962 - RNA, 22 nt, Human
ugcugugcuggcggcagaggcc

SEQ ID NO: 361963 - RNA, 22 nt, Human
aggcagguguuaacccucugag

SEQ ID NO: 361964 - RNA, 19 nt, Human
agcagcuggagguggagug

SEQ ID NO: 361965 - RNA, 21 nt, Human
agcagcugcaguuucuaucug

SEQ ID NO: 361966 - RNA, 22 nt, Human
ccucaugguacuuacuguagcu

SEQ ID NO: 361967 - RNA, 22 nt, Human
agugcuccuauggaucaguugu

SEQ ID NO: 361968 - RNA, 22 nt, Human
uccaggagauacacugcaccag

SEQ ID NO: 361969 - RNA, 23 nt, Human
cccugcagucagggugagauggu

SEQ ID NO: 361970 - RNA, 22 nt, Human
aggcagcaugggcccagagucc

SEQ ID NO: 361971 - RNA, 22 nt, Human
uucaugaauggaaucaaugcuc

SEQ ID NO: 361972 - RNA, 21 nt, Human
auacacauacacauaaaugug

SEQ ID NO: 361973 - RNA, 22 nt, Human
acacuuuacagcuuccuuugca

SEQ ID NO: 361974 - RNA, 22 nt, Human
uuugcauuauauuuauagaaga

SEQ ID NO: 361975 - RNA, 22 nt, Human
agccagcugugggcucaggcgg

SEQ ID NO: 361976 - RNA, 22 nt, Human
caggagggcccgagacucuucc

SEQ ID NO: 361977 - RNA, 22 nt, Human
gccacaggcacuuaagggcugg

SEQ ID NO: 361978 - RNA, 22 nt, Human
auuucacucuuaauugcuuccu

SEQ ID NO: 361979 - RNA, 22 nt, Human
uuucagaucauuuuuuaaguac

SEQ ID NO: 361980 - RNA, 22 nt, Human
augaagcuaaacccugcagcca

SEQ ID NO: 361981 - RNA, 22 nt, Human
uggcucagaaggcugccuucac

SEQ ID NO: 361982 - RNA, 22 nt, Human
caggcagcagccacucugguau

SEQ ID NO: 361983 - RNA, 18 nt, Human
agcagcugucagaaugcc

SEQ ID NO: 361984 - RNA, 21 nt, Human
uccugcaggaggccugagagg

SEQ ID NO: 361985 - RNA, 22 nt, Human
cccagggacagcuagguggggc

SEQ ID NO: 361986 - RNA, 22 nt, Human
ccagaggugccacagaaagagc

SEQ ID NO: 361987 - RNA, 22 nt, Human
ucaaguuucucucagauuaugg

SEQ ID NO: 361988 - RNA, 22 nt, Human
gaaaucugcccagugcacuggu

SEQ ID NO: 361989 - RNA, 22 nt, Human
ucucagagggaggauuacugcc

SEQ ID NO: 361990 - RNA, 22 nt, Human
aaggaaagacauauaaaugacu

SEQ ID NO: 361991 - RNA, 22 nt, Human
gagagaagaaagccaugguccu

SEQ ID NO: 361992 - RNA, 22 nt, Human
ugucucagaguaucccugaacu

SEQ ID NO: 361993 - RNA, 22 nt, Human
ccagccuucugagcugccugga

SEQ ID NO: 361994 - RNA, 22 nt, Human
agggaccugcucacugccuggc

SEQ ID NO: 361995 - RNA, 22 nt, Human
ucauugcaagcucauuuaucug

SEQ ID NO: 361996 - RNA, 22 nt, Human
caaaguuaucaacugcaacauu

SEQ ID NO: 361997 - RNA, 22 nt, Human
caguggguggcuaaguggcuga

SEQ ID NO: 361998 - RNA, 22 nt, Human
agggcugaaacauaauccuucu

SEQ ID NO: 361999 - RNA, 19 nt, Human
aggugaugugacucuagaa

SEQ ID NO: 362000 - RNA, 22 nt, Human
acccugagggguauagcagaag

SEQ ID NO: 362001 - RNA, 22 nt, Human
ggaggccaucagggagggcauu

SEQ ID NO: 362002 - RNA, 22 nt, Human
acagcacaaucugagucccaga

SEQ ID NO: 362003 - RNA, 23 nt, Human
uggcccugugcaugcugcuuccc

SEQ ID NO: 362004 - RNA, 22 nt, Human
auggcauuauagcaaugguuug

SEQ ID NO: 362005 - RNA, 22 nt, Human
aaagccaaaugaaagaugguuc

SEQ ID NO: 362006 - RNA, 22 nt, Human
cuggcagguccagcuggacuca

SEQ ID NO: 362007 - RNA, 22 nt, Human
aguuucuaccgguacauucagg

SEQ ID NO: 362008 - RNA, 22 nt, Human
uguaaauaauuccuaggcuuuu

SEQ ID NO: 362009 - RNA, 22 nt, Human
cagcaggguauacagggaauuu

SEQ ID NO: 362010 - RNA, 22 nt, Human
gggcugaggcuaccacuggucu

SEQ ID NO: 362011 - RNA, 22 nt, Human
ccuggccuggcacucccucugc

SEQ ID NO: 362012 - RNA, 22 nt, Human
ccugcuguucuguuuagugaac

SEQ ID NO: 362013 - RNA, 22 nt, Human
cauuaauauuguucuucuuuag

SEQ ID NO: 362014 - RNA, 22 nt, Human
gcccagcacuaaaagcuuugcu

SEQ ID NO: 362015 - RNA, 22 nt, Human
cccagcauccucagggagcggg

SEQ ID NO: 362016 - RNA, 22 nt, Human
cagagagagugggguguggauu

SEQ ID NO: 362017 - RNA, 22 nt, Human
guagaagugaugucauguuaua

SEQ ID NO: 362018 - RNA, 22 nt, Human
uuuaagaaguuauguuauaaau

SEQ ID NO: 362019 - RNA, 22 nt, Human
agccauggcgccacuagaggga

SEQ ID NO: 362020 - RNA, 22 nt, Human
ggacucagcagccaggaguggc

SEQ ID NO: 362021 - RNA, 22 nt, Human
augucccagcugagagacaacu

SEQ ID NO: 362022 - RNA, 22 nt, Human
cccagguggguuggccucuguc

SEQ ID NO: 362023 - RNA, 22 nt, Human
cagcuuuagagaaaacauauuu

SEQ ID NO: 362024 - RNA, 22 nt, Human
cucugugcccuacugcucagcu

SEQ ID NO: 362025 - RNA, 22 nt, Human
gaugcacugcaguauauacugu

SEQ ID NO: 362026 - RNA, 22 nt, Human
ugucagugaguuaguugcaagu

SEQ ID NO: 362027 - RNA, 22 nt, Human
accaaggaagagauucucaguu

SEQ ID NO: 362028 - RNA, 22 nt, Human
cgagaguggacagggcgcagcu

SEQ ID NO: 362029 - RNA, 22 nt, Human
uuugaacugauaaucuucuguu

SEQ ID NO: 362030 - RNA, 21 nt, Human
acagagccgggcacaaagcug

SEQ ID NO: 362031 - RNA, 22 nt, Human
acagggccagccugggaccugg

SEQ ID NO: 362032 - RNA, 22 nt, Human
uuaaauuauuucuagugaggug

SEQ ID NO: 362033 - RNA, 22 nt, Human
ggguguguuccuaaggaaacca

SEQ ID NO: 362034 - RNA, 22 nt, Human
aggagccccucuucaguccugg

SEQ ID NO: 362035 - RNA, 22 nt, Human
ugaaaucaauugcaauguuuau

SEQ ID NO: 362036 - RNA, 22 nt, Human
ucacaaaagcuuuugaauuugg

SEQ ID NO: 362037 - RNA, 22 nt, Human
aaauacagaguugcuuaaaagc

SEQ ID NO: 362038 - RNA, 22 nt, Human
caauuucacuaauaauauuuac

SEQ ID NO: 362039 - RNA, 22 nt, Human
ggucccagcugcucaagaggcu

SEQ ID NO: 362040 - RNA, 22 nt, Human
gugacaguggucacuuguaguu

SEQ ID NO: 362041 - RNA, 22 nt, Human
auuucaacagaguuugaaggca

SEQ ID NO: 362042 - RNA, 22 nt, Human
gcugagacuggcagcaggaagu

SEQ ID NO: 362043 - RNA, 22 nt, Human
ugcuuauuuauagucaauagag

SEQ ID NO: 362044 - RNA, 22 nt, Human
gcugccugccuaguuccacagu

SEQ ID NO: 362045 - RNA, 22 nt, Human
uguccucaaggagcuucagucu

SEQ ID NO: 362046 - RNA, 22 nt, Human
ccagagaccagaacauggggau

SEQ ID NO: 362047 - RNA, 22 nt, Human
gucccaggcuuauguggagcuu

SEQ ID NO: 362048 - RNA, 22 nt, Human
gcuacugauugaccuuggagag

SEQ ID NO: 362049 - RNA, 22 nt, Human
gcucucugucguuaugcuucau

SEQ ID NO: 362050 - RNA, 22 nt, Human
cccaugagauucugaauuuggc

SEQ ID NO: 362051 - RNA, 22 nt, Human
gcagcagaguuugggagauggu

SEQ ID NO: 362052 - RNA, 22 nt, Human
aaggcaguaggaucuuccacag

SEQ ID NO: 362053 - RNA, 22 nt, Human
aaguuugacagaaguuucuaau

SEQ ID NO: 362054 - RNA, 22 nt, Human
auuugcuucugugaaaucaagu

SEQ ID NO: 362055 - RNA, 22 nt, Human
ugaacucucucaagugacagaa

SEQ ID NO: 362056 - RNA, 19 nt, Human
cugaggugcaguaagaggc

SEQ ID NO: 362057 - RNA, 22 nt, Human
gcucagaggaugcuccuuuaug

SEQ ID NO: 362058 - RNA, 22 nt, Human
uuuggaauguaguuuaaucauc

SEQ ID NO: 362059 - RNA, 22 nt, Human
ccugccagcccgcguucaugcc

SEQ ID NO: 362060 - RNA, 22 nt, Human
uguaagaaucagucuuuaaugu

SEQ ID NO: 362061 - RNA, 22 nt, Human
cuggccagggugcgaucguggu

SEQ ID NO: 362062 - RNA, 22 nt, Human
aaaagguaguugccaaauaagg

SEQ ID NO: 362063 - RNA, 22 nt, Human
cugagcugaaacuugagaggcu

SEQ ID NO: 362064 - RNA, 22 nt, Human
aggcugcuuucauggccgcccc

SEQ ID NO: 362065 - RNA, 22 nt, Human
cagucacauugcccugcauuua

SEQ ID NO: 362066 - RNA, 22 nt, Human
uggcuuccacugugugcccccu

SEQ ID NO: 362067 - RNA, 22 nt, Human
uacuuugaagacaauaucugga

SEQ ID NO: 362068 - RNA, 18 nt, Human
gggcuguguucaugccca

SEQ ID NO: 362069 - RNA, 22 nt, Human
uuuccuuccuugcuagccugag

SEQ ID NO: 362070 - RNA, 22 nt, Human
uagugcuugagucucuccguac

SEQ ID NO: 362071 - RNA, 21 nt, Human
cucuggaggcaagggagagug

SEQ ID NO: 362072 - RNA, 17 nt, Human
ugcauuguuggaaauuu

SEQ ID NO: 362073 - RNA, 22 nt, Human
auguagcagaagauguuuuccu

SEQ ID NO: 362074 - RNA, 22 nt, Human
ggcagcuuguccuucaggagag

SEQ ID NO: 362075 - RNA, 20 nt, Human
cacguuuuuccacuagcaaa

SEQ ID NO: 362076 - RNA, 22 nt, Human
cagcagcugggaaggaggcuga

SEQ ID NO: 362077 - RNA, 22 nt, Human
uggagaggaaagugcaguuuug

SEQ ID NO: 362078 - RNA, 22 nt, Human
gcugccuuugugagccaagggg

SEQ ID NO: 362079 - RNA, 22 nt, Human
guguguccaggcgggagucaag

SEQ ID NO: 362080 - RNA, 22 nt, Human
ucagagagcagaacuuuuuuac

SEQ ID NO: 362081 - RNA, 20 nt, Human
gcaaggcacagugaggaggg

SEQ ID NO: 362082 - RNA, 22 nt, Human
gccuggcccagggcuccgcagg

SEQ ID NO: 362083 - RNA, 22 nt, Human
uccaaaaaacguuugaauaguu

SEQ ID NO: 362084 - RNA, 22 nt, Human
uauuucuaagagauaucuguac

SEQ ID NO: 362085 - RNA, 22 nt, Human
gaggcucugugaugugccaggc

SEQ ID NO: 362086 - RNA, 22 nt, Human
caggcugcagcagcaguggccc

SEQ ID NO: 362087 - RNA, 22 nt, Human
cuggggacuugcagacacaauu

SEQ ID NO: 362088 - RNA, 22 nt, Human
cugcccagaagccagaugggca

SEQ ID NO: 362089 - RNA, 22 nt, Human
cugcagaguggagccucggcug

SEQ ID NO: 362090 - RNA, 22 nt, Human
gaagccacaacuuuuucuuagc

SEQ ID NO: 362091 - RNA, 22 nt, Human
aggccagguuccucaaucuuga

SEQ ID NO: 362092 - RNA, 22 nt, Human
uaucuacaggugucagguaaga

SEQ ID NO: 362093 - RNA, 16 nt, Human
ccaccugcagcucuca

SEQ ID NO: 362094 - RNA, 22 nt, Human
acacugaauauacaaugaauau

SEQ ID NO: 362095 - RNA, 22 nt, Human
auguucuuguucaaaugucagu

SEQ ID NO: 362096 - RNA, 22 nt, Human
gcagagcagugcuugcccagcg

SEQ ID NO: 362097 - RNA, 22 nt, Human
guucuugccagcauccucaggu

SEQ ID NO: 362098 - RNA, 23 nt, Human
uccaagggcuacaaacacagacc

SEQ ID NO: 362099 - RNA, 21 nt, Human
ugcucacagaugugcucagug

SEQ ID NO: 362100 - RNA, 22 nt, Human
acaaugaacacacaaggaauuc

SEQ ID NO: 362101 - RNA, 22 nt, Human
ggaagggccucgggcgugggac

SEQ ID NO: 362102 - RNA, 22 nt, Human
uaaucacaucaggguaaauggg

SEQ ID NO: 362103 - RNA, 22 nt, Human
ggcagagaugugggucagaauc

SEQ ID NO: 362104 - RNA, 22 nt, Human
cagcuuuccagagaccugcccc

SEQ ID NO: 362105 - RNA, 22 nt, Human
ccugauggagcccugcugcaug

SEQ ID NO: 362106 - RNA, 22 nt, Human
agagggcuggacgcagguugga

SEQ ID NO: 362107 - RNA, 22 nt, Human
ucaggaugaccacgagccucua

SEQ ID NO: 362108 - RNA, 22 nt, Human
cugggcuguaauguggcacuga

SEQ ID NO: 362109 - RNA, 22 nt, Human
uucugggacaucuggacaguuu

SEQ ID NO: 362110 - RNA, 23 nt, Human
aucaagauaauccagaugaccua

SEQ ID NO: 362111 - RNA, 22 nt, Human
ccagcugucagugugaaaauaa

SEQ ID NO: 362112 - RNA, 22 nt, Human
ugagcuucuuuauuuggccaga

SEQ ID NO: 362113 - RNA, 22 nt, Human
gaaguucaaaagacagauuuga

SEQ ID NO: 362114 - RNA, 22 nt, Human
gagcaacaguuuaugguuuuuc

SEQ ID NO: 362115 - RNA, 22 nt, Human
gagcccuggcagucugggaugg

SEQ ID NO: 362116 - RNA, 22 nt, Human
gcagagcucaugccugcaccuc

SEQ ID NO: 362117 - RNA, 22 nt, Human
cagccuucugaaugaacguacu

SEQ ID NO: 362118 - RNA, 23 nt, Human
aaggucacagaacuuagcaagcc

SEQ ID NO: 362119 - RNA, 22 nt, Human
cuuaggcaguuuaggaaagaga

SEQ ID NO: 362120 - RNA, 22 nt, Human
gcagggcuaauggggcaaguag

SEQ ID NO: 362121 - RNA, 22 nt, Human
ccaggcagcucugauuuauguc

SEQ ID NO: 362122 - RNA, 22 nt, Human
agccagggauggcagugcccag

SEQ ID NO: 362123 - RNA, 22 nt, Human
ccuggcagcuaagugcuuugag

SEQ ID NO: 362124 - RNA, 22 nt, Human
ccugggcuggaguacagcagug

SEQ ID NO: 362125 - RNA, 22 nt, Human
agcugugggauuugggugugcc

SEQ ID NO: 362126 - RNA, 22 nt, Human
uaaaguuuggcagacaauaaca

SEQ ID NO: 362127 - RNA, 22 nt, Human
acaguuaucuuugaaauagaga

SEQ ID NO: 362128 - RNA, 22 nt, Human
aaaggucaagcuggacucaggu

SEQ ID NO: 362129 - RNA, 22 nt, Human
ugcuuuauuggaaccucauccu

SEQ ID NO: 362130 - RNA, 22 nt, Human
ugagcagaacacgggauccaug

SEQ ID NO: 362131 - RNA, 22 nt, Human
ucugggcccuaaaccagcucua

SEQ ID NO: 362132 - RNA, 22 nt, Human
ugcagcuucuccaucuccuugu

SEQ ID NO: 362133 - RNA, 22 nt, Human
cccugcagagagugcuuuugug

SEQ ID NO: 362134 - RNA, 22 nt, Human
aucugccugagucuagguuuuc

SEQ ID NO: 362135 - RNA, 22 nt, Human
uggcaggggaggugcuugcuua

SEQ ID NO: 362136 - RNA, 22 nt, Human
aggcagccuuuagacagucugc

SEQ ID NO: 362137 - RNA, 22 nt, Human
uggggaagggcacccuggagac

SEQ ID NO: 362138 - RNA, 22 nt, Human
gccaggaggcuuaacuggacag

SEQ ID NO: 362139 - RNA, 22 nt, Human
cuagucacucagcacugacaaa

SEQ ID NO: 362140 - RNA, 20 nt, Human
cugcugugguccuuuauuuu

SEQ ID NO: 362141 - RNA, 22 nt, Human
aaagauuucacaucccaagccu

SEQ ID NO: 362142 - RNA, 22 nt, Human
ucuuuccuagaggcugaugagu

SEQ ID NO: 362143 - RNA, 22 nt, Human
uccuugaagagugggcggucga

SEQ ID NO: 362144 - RNA, 23 nt, Human
cagaaaucugaaaucuagaaaug

SEQ ID NO: 362145 - RNA, 22 nt, Human
ugaggggagguuggggcacauc

SEQ ID NO: 362146 - RNA, 22 nt, Human
cuggugggaggcaagguggaag

SEQ ID NO: 362147 - RNA, 22 nt, Human
ggguacuuaauauuuacggggu

SEQ ID NO: 362148 - RNA, 22 nt, Human
ugcaguggaagagguggagauc

SEQ ID NO: 362149 - RNA, 22 nt, Human
ccugucuggccaccagggcgau

SEQ ID NO: 362150 - RNA, 22 nt, Human
ccaggccuagccccugagggua

SEQ ID NO: 362151 - RNA, 22 nt, Human
cacauguaguaagcaggcaaug

SEQ ID NO: 362152 - RNA, 22 nt, Human
ggggcucaguucggacagccug

SEQ ID NO: 362153 - RNA, 22 nt, Human
cagagccagcuguccuuggcau

SEQ ID NO: 362154 - RNA, 22 nt, Human
ugacuccaaacagaaaacgaau

SEQ ID NO: 362155 - RNA, 22 nt, Human
ugaagcagaggggucuugagcu

SEQ ID NO: 362156 - RNA, 22 nt, Human
aucugccuggcuccaggugagc

SEQ ID NO: 362157 - RNA, 19 nt, Human
aggcugcaagguggugggc

SEQ ID NO: 362158 - RNA, 22 nt, Human
gaggcaggguguugauuacaga

SEQ ID NO: 362159 - RNA, 22 nt, Human
cuauacaguaaccacagugauu

SEQ ID NO: 362160 - RNA, 22 nt, Human
caggguccggcugccuggcugu

SEQ ID NO: 362161 - RNA, 22 nt, Human
uuauuuuuaaaaguucacacag

SEQ ID NO: 362162 - RNA, 22 nt, Human
agugggaggcggcugacgggcg

SEQ ID NO: 362163 - RNA, 22 nt, Human
ucacaggacccugaggguggcg

SEQ ID NO: 362164 - RNA, 22 nt, Human
gccuuggccaacaccuugcaaa

SEQ ID NO: 362165 - RNA, 22 nt, Human
ccagagagucgaugggggacac

SEQ ID NO: 362166 - RNA, 22 nt, Human
gggcugaccccaccccucacuc

SEQ ID NO: 362167 - RNA, 22 nt, Human
acugccuugucucuugccuguu

SEQ ID NO: 362168 - RNA, 22 nt, Human
gauuucaccugaucuugucauc

SEQ ID NO: 362169 - RNA, 22 nt, Human
aaaugcuagggagaaacucucc

SEQ ID NO: 362170 - RNA, 22 nt, Human
ugugaaaggggucacagggaaa

SEQ ID NO: 362171 - RNA, 22 nt, Human
ccuggagagagaggccaacugc

SEQ ID NO: 362172 - RNA, 22 nt, Human
gagggagagugauggaccauug

SEQ ID NO: 362173 - RNA, 22 nt, Human
gguucacacuaagcuuaagugg

SEQ ID NO: 362174 - RNA, 22 nt, Human
ccaggccaaauucagucagcag

SEQ ID NO: 362175 - RNA, 22 nt, Human
cagcaguguggaagcugagggg

SEQ ID NO: 362176 - RNA, 22 nt, Human
cccuggaggaaaaucugaggcu

SEQ ID NO: 362177 - RNA, 22 nt, Human
ucaaauaccagcaauuucaugu

SEQ ID NO: 362178 - RNA, 22 nt, Human
cagcugacgccagaguggaauu

SEQ ID NO: 362179 - RNA, 22 nt, Human
caugucuuauauccugucuuca

SEQ ID NO: 362180 - RNA, 22 nt, Human
acaggcagcgucauugcugcuc

SEQ ID NO: 362181 - RNA, 22 nt, Human
guagggacuuguuuuacuagua

SEQ ID NO: 362182 - RNA, 18 nt, Human
cagggccccagaauuauc

SEQ ID NO: 362183 - RNA, 22 nt, Human
gaaggcugucagagaggagggc

SEQ ID NO: 362184 - RNA, 22 nt, Human
ggcugagcucaggggcagcagg

SEQ ID NO: 362185 - RNA, 22 nt, Human
aguuuucacacucaccaaaagg

SEQ ID NO: 362186 - RNA, 22 nt, Human
cagcuugugcaaagguccuggg

SEQ ID NO: 362187 - RNA, 22 nt, Human
aucugccucuucuucauugcga

SEQ ID NO: 362188 - RNA, 22 nt, Human
aagcagcugauuucacagcuca

SEQ ID NO: 362189 - RNA, 23 nt, Human
uccugcagauaagcugguugaca

SEQ ID NO: 362190 - RNA, 22 nt, Human
cuggagccagccagggcccucu

SEQ ID NO: 362191 - RNA, 22 nt, Human
gaccaaggaagaggggagccag

SEQ ID NO: 362192 - RNA, 22 nt, Human
ucuuuauuuaagucuguuguaa

SEQ ID NO: 362193 - RNA, 22 nt, Human
guuugucuuaauuaggcaucga

SEQ ID NO: 362194 - RNA, 22 nt, Human
ucagagugggagaaugugccaa

SEQ ID NO: 362195 - RNA, 22 nt, Human
aguuuccaaagcauguucacac

SEQ ID NO: 362196 - RNA, 22 nt, Human
caguagcagggauuauuuuagg

SEQ ID NO: 362197 - RNA, 22 nt, Human
uuucucaucuggaaacagugcu

SEQ ID NO: 362198 - RNA, 22 nt, Human
aguggcagccgagcaggagaug

SEQ ID NO: 362199 - RNA, 22 nt, Human
agguccagcuguugcagccucc

SEQ ID NO: 362200 - RNA, 22 nt, Human
acagauuuuugguaaauaauuu

SEQ ID NO: 362201 - RNA, 22 nt, Human
caguguggcugagacagaggcu

SEQ ID NO: 362202 - RNA, 22 nt, Human
augacacaauuuuagagcugaa

SEQ ID NO: 362203 - RNA, 22 nt, Human
aaacaucaauugcaucucccaa

SEQ ID NO: 362204 - RNA, 22 nt, Human
cuccuuccccuacucagcaucc

SEQ ID NO: 362205 - RNA, 22 nt, Human
ugaggcaggaauggggaaaagu

SEQ ID NO: 362206 - RNA, 18 nt, Human
ggcuuugcugggguuucu

SEQ ID NO: 362207 - RNA, 22 nt, Human
gaaguggaagccaucggcaguc

SEQ ID NO: 362208 - RNA, 22 nt, Human
ucccaggaauccguccucuaga

SEQ ID NO: 362209 - RNA, 22 nt, Human
cagcugccccauaaaucacagu

SEQ ID NO: 362210 - RNA, 22 nt, Human
uauugucuguccgggucaaagc

SEQ ID NO: 362211 - RNA, 22 nt, Human
gugccaggugcuaagcugugcu

SEQ ID NO: 362212 - RNA, 22 nt, Human
aggcagcuggcagcacccaggg

SEQ ID NO: 362213 - RNA, 22 nt, Human
caacuuuucugugaauuuaagu

SEQ ID NO: 362214 - RNA, 22 nt, Human
uucuucuccgaggagggcuggu

SEQ ID NO: 362215 - RNA, 22 nt, Human
cugaacuuauugagugcuugcu

SEQ ID NO: 362216 - RNA, 22 nt, Human
uggcagcauuuuuuccagaaca

SEQ ID NO: 362217 - RNA, 22 nt, Human
uacaguaaccuuauuugucauu

SEQ ID NO: 362218 - RNA, 22 nt, Human
uagugcuuaacacaaagugauu

SEQ ID NO: 362219 - RNA, 22 nt, Human
ugaggaaguugaucucaucagu

SEQ ID NO: 362220 - RNA, 22 nt, Human
ggcuggcacucuguccaguguc

SEQ ID NO: 362221 - RNA, 22 nt, Human
gauuucuuuaugaaguacagaa

SEQ ID NO: 362222 - RNA, 22 nt, Human
ucugccuggauuuuggaaagcu

SEQ ID NO: 362223 - RNA, 22 nt, Human
gaaauauacaugaagucggcug

SEQ ID NO: 362224 - RNA, 18 nt, Human
agcuggggccucuggucc

SEQ ID NO: 362225 - RNA, 22 nt, Human
acagcuuuugaaaaauuacugg

SEQ ID NO: 362226 - RNA, 22 nt, Human
ccagaggaaaaauaucucccua

SEQ ID NO: 362227 - RNA, 22 nt, Human
accaguccgcggagcuccgggg

SEQ ID NO: 362228 - RNA, 22 nt, Human
cccaggaggacauuccauaccc

SEQ ID NO: 362229 - RNA, 22 nt, Human
ggcuuuaugcacagcagauggu

SEQ ID NO: 362230 - RNA, 22 nt, Human
caggauggucucgaucuccuga

SEQ ID NO: 362231 - RNA, 22 nt, Human
gcagggaccuugcccacccucc

SEQ ID NO: 362232 - RNA, 22 nt, Human
ggaggcucccacgcagcucaca

SEQ ID NO: 362233 - RNA, 22 nt, Human
agugcagcaugcuggggaggcu

SEQ ID NO: 362234 - RNA, 22 nt, Human
cacaggagcuguggggcagugu

SEQ ID NO: 362235 - RNA, 22 nt, Human
gggacaggcugagacuugagcu

SEQ ID NO: 362236 - RNA, 17 nt, Human
ccugggaggaguuauga

SEQ ID NO: 362237 - RNA, 22 nt, Human
cugaggugcuagggucccugcu

SEQ ID NO: 362238 - RNA, 20 nt, Human
ggaagcagagaacuguuuuc

SEQ ID NO: 362239 - RNA, 22 nt, Human
aauacaaucaaauucacuagca

SEQ ID NO: 362240 - RNA, 22 nt, Human
accagagaaaacacagcaggcu

SEQ ID NO: 362241 - RNA, 22 nt, Human
uucucagguagugcugaugcug

SEQ ID NO: 362242 - RNA, 22 nt, Human
ucauugaacgaagagcuccauu

SEQ ID NO: 362243 - RNA, 22 nt, Human
guuuuuccuugcugaggacccg

SEQ ID NO: 362244 - RNA, 22 nt, Human
augcauugucugguuucauuuu

SEQ ID NO: 362245 - RNA, 22 nt, Human
gccuggucucuuucaugucagu

SEQ ID NO: 362246 - RNA, 22 nt, Human
agucccagaucuccauucgguc

SEQ ID NO: 362247 - RNA, 22 nt, Human
agugaggcuaauaggcaauggu

SEQ ID NO: 362248 - RNA, 17 nt, Human
gcagcagagagacccuc

SEQ ID NO: 362249 - RNA, 22 nt, Human
ccagcugucugguuccagagcc

SEQ ID NO: 362250 - RNA, 22 nt, Human
aaagcagucacuccagugugau

SEQ ID NO: 362251 - RNA, 22 nt, Human
uugcaacaucugaacauuuauc

SEQ ID NO: 362252 - RNA, 22 nt, Human
uggccagaaccugcaguaggcc

SEQ ID NO: 362253 - RNA, 22 nt, Human
cugggggcaagcagacagcugu

SEQ ID NO: 362254 - RNA, 22 nt, Human
auuugucugcuugcugccuucc

SEQ ID NO: 362255 - RNA, 22 nt, Human
cugagcugggcucucuugaggg

SEQ ID NO: 362256 - RNA, 22 nt, Human
cugaggagagaucacguggugu

SEQ ID NO: 362257 - RNA, 22 nt, Human
cucaggaugcaauuccaucaag

SEQ ID NO: 362258 - RNA, 19 nt, Human
ccuuugaaucaggacacuu

SEQ ID NO: 362259 - RNA, 22 nt, Human
aacaaagucguugccuagaaga

SEQ ID NO: 362260 - RNA, 22 nt, Human
ccucuccaguuuuaacgugacc

SEQ ID NO: 362261 - RNA, 22 nt, Human
uucuccgcuaaguucucugcag

SEQ ID NO: 362262 - RNA, 22 nt, Human
uucucuagguuuuagaugaaga

SEQ ID NO: 362263 - RNA, 22 nt, Human
caggggcuuaagugacagaagg

SEQ ID NO: 362264 - RNA, 22 nt, Human
cccaggaguucgaggcuguagu

SEQ ID NO: 362265 - RNA, 17 nt, Human
uauguaguacuuauaaa

SEQ ID NO: 362266 - RNA, 19 nt, Human
augucccaccgccccugag

SEQ ID NO: 362267 - RNA, 22 nt, Human
uaauuucuucaucucugcagcu

SEQ ID NO: 362268 - RNA, 20 nt, Human
cugugcuuuggaaccuggaa

SEQ ID NO: 362269 - RNA, 22 nt, Human
ucaggcaggcagagggcaaaug

SEQ ID NO: 362270 - RNA, 22 nt, Human
cugagaggcggagcuugcagug

SEQ ID NO: 362271 - RNA, 22 nt, Human
caguagcaggcaggugcuuuug

SEQ ID NO: 362272 - RNA, 22 nt, Human
auguuucaaugcacuuuagccu

SEQ ID NO: 362273 - RNA, 22 nt, Human
gcugggaggaauuuggggaaua

SEQ ID NO: 362274 - RNA, 22 nt, Human
uuuccaaacccagcgagcuaca

SEQ ID NO: 362275 - RNA, 22 nt, Human
cugaaggagcauagucaguuuu

SEQ ID NO: 362276 - RNA, 22 nt, Human
cccaugagaccugguuuaaggc

SEQ ID NO: 362277 - RNA, 22 nt, Human
gcucugcuugcaucaugacugc

SEQ ID NO: 362278 - RNA, 22 nt, Human
agaccgagaaguucuccaggcc

SEQ ID NO: 362279 - RNA, 22 nt, Human
acugcuuuuagaaaucuauaga

SEQ ID NO: 362280 - RNA, 22 nt, Human
aucuggcuauuucuggucgggg

SEQ ID NO: 362281 - RNA, 22 nt, Human
ggcugugcgggcagccguggga

SEQ ID NO: 362282 - RNA, 22 nt, Human
uguggcucucagauccuccaau

SEQ ID NO: 362283 - RNA, 22 nt, Human
cagggagaggcaucauagggaa

SEQ ID NO: 362284 - RNA, 22 nt, Human
acagggcagcaacuuugugccu

SEQ ID NO: 362285 - RNA, 22 nt, Human
auauacaguuuuacaggguuuc

SEQ ID NO: 362286 - RNA, 22 nt, Human
uugaaagaggcaaaguuugauc

SEQ ID NO: 362287 - RNA, 22 nt, Human
cggggcugcgcucuuccugccg

SEQ ID NO: 362288 - RNA, 22 nt, Human
gaauucugguccuguccaaggu

SEQ ID NO: 362289 - RNA, 22 nt, Human
gcagagcuaucuucuggauuug

SEQ ID NO: 362290 - RNA, 22 nt, Human
uggcagagccuugccaaacucc

SEQ ID NO: 362291 - RNA, 22 nt, Human
uuaguuaguggggcugucaguc

SEQ ID NO: 362292 - RNA, 19 nt, Human
uguggccaugguucagcug

SEQ ID NO: 362293 - RNA, 22 nt, Human
ucuuuccaaggacucuguagca

SEQ ID NO: 362294 - RNA, 22 nt, Human
agugaaaacacuaguucuugcc

SEQ ID NO: 362295 - RNA, 22 nt, Human
aggcacugaaagguggccagag

SEQ ID NO: 362296 - RNA, 22 nt, Human
cucucuucccgugaguguugca

SEQ ID NO: 362297 - RNA, 22 nt, Human
cugccuggaaugccagcuucuc

SEQ ID NO: 362298 - RNA, 22 nt, Human
uggccaggggaguuccccucca

SEQ ID NO: 362299 - RNA, 22 nt, Human
ggcugcagauagccagccacca

SEQ ID NO: 362300 - RNA, 22 nt, Human
uuccaugaaauguguuaugcuu

SEQ ID NO: 362301 - RNA, 22 nt, Human
auugucugaauccaaagcucug

SEQ ID NO: 362302 - RNA, 22 nt, Human
ccaaaguccauaguuuacuuua

SEQ ID NO: 362303 - RNA, 22 nt, Human
ggcuggucacaccacugcaggg

SEQ ID NO: 362304 - RNA, 22 nt, Human
uacauuaacuuacguccacaug

SEQ ID NO: 362305 - RNA, 22 nt, Human
ggcauuuaucuaauauaguuua

SEQ ID NO: 362306 - RNA, 22 nt, Human
aagaagagaaaugugcugcugg

SEQ ID NO: 362307 - RNA, 23 nt, Human
uuuuccagaaucgacucuguaga

SEQ ID NO: 362308 - RNA, 22 nt, Human
ugaaucauggauaaauagcuua

SEQ ID NO: 362309 - RNA, 22 nt, Human
ugcccaaguccuccaccgaggu

SEQ ID NO: 362310 - RNA, 22 nt, Human
gguggcuggaggagcugaugga

SEQ ID NO: 362311 - RNA, 22 nt, Human
gugccagcaguuauggugauuu

SEQ ID NO: 362312 - RNA, 19 nt, Human
ggcagucucaagcagcaca

SEQ ID NO: 362313 - RNA, 22 nt, Human
uuucaaagucaauaucauuacc

SEQ ID NO: 362314 - RNA, 22 nt, Human
agauacaugucaagagacuuau

SEQ ID NO: 362315 - RNA, 22 nt, Human
gcaggccugacuguagggggca

SEQ ID NO: 362316 - RNA, 22 nt, Human
ggcagauggagaagcagcaggu

SEQ ID NO: 362317 - RNA, 22 nt, Human
ucucuucucuagugagcaacug

SEQ ID NO: 362318 - RNA, 22 nt, Human
gcuccucuucucccacugaaug

SEQ ID NO: 362319 - RNA, 22 nt, Human
guggcugcuguccucucugguu

SEQ ID NO: 362320 - RNA, 22 nt, Human
ggugagaggcagaggacagcuu

SEQ ID NO: 362321 - RNA, 22 nt, Human
cuugaacucaaugugaggaaga

SEQ ID NO: 362322 - RNA, 22 nt, Human
cugcuguguugccagugucacc

SEQ ID NO: 362323 - RNA, 22 nt, Human
caggaagagaacauggaggcug

SEQ ID NO: 362324 - RNA, 22 nt, Human
aacaucuacuaagugccaggca

SEQ ID NO: 362325 - RNA, 19 nt, Human
ucaaaggcaaggaggaacu

SEQ ID NO: 362326 - RNA, 19 nt, Human
uccaggaggcugccauuga

SEQ ID NO: 362327 - RNA, 22 nt, Human
caccagcuuugcccacugccca

SEQ ID NO: 362328 - RNA, 22 nt, Human
ugguggcaauguccuggagaag

SEQ ID NO: 362329 - RNA, 22 nt, Human
gagagaagaauguuccgaggcc

SEQ ID NO: 362330 - RNA, 22 nt, Human
aggccagguggucaugcuugcu

SEQ ID NO: 362331 - RNA, 22 nt, Human
cuggggcugcagcgaucuucau

SEQ ID NO: 362332 - RNA, 22 nt, Human
ugcucccaggcauucucuguug

SEQ ID NO: 362333 - RNA, 22 nt, Human
gaaauauuguacuggagauguu

SEQ ID NO: 362334 - RNA, 22 nt, Human
ggcaggagggcggacaaugacc

SEQ ID NO: 362335 - RNA, 22 nt, Human
gcagauggaaagugcuugaggg

SEQ ID NO: 362336 - RNA, 22 nt, Human
agcuggguggagggcccacggu

SEQ ID NO: 362337 - RNA, 22 nt, Human
uggaaagaugaagauguuuaag

SEQ ID NO: 362338 - RNA, 22 nt, Human
uggcucagcgcggccuggucuu

SEQ ID NO: 362339 - RNA, 22 nt, Human
caaaugaagaaccuucucaccu

SEQ ID NO: 362340 - RNA, 22 nt, Human
augaggcagcugcuggagaacg

SEQ ID NO: 362341 - RNA, 22 nt, Human
augaaacagugaauuagucaag

SEQ ID NO: 362342 - RNA, 22 nt, Human
ugggcagggaucucuuuugcaa

SEQ ID NO: 362343 - RNA, 22 nt, Human
ugggccuggagcccuggagagu

SEQ ID NO: 362344 - RNA, 17 nt, Human
cugaagauaauggcaac

SEQ ID NO: 362345 - RNA, 22 nt, Human
caggagcccguugcuccggcgg

SEQ ID NO: 362346 - RNA, 22 nt, Human
ugccaggcccagcagggcggcc

SEQ ID NO: 362347 - RNA, 19 nt, Human
gcagccaggugcucuaccu

SEQ ID NO: 362348 - RNA, 22 nt, Human
agcugucuuucugccuccugau

SEQ ID NO: 362349 - RNA, 23 nt, Human
gggcaguuauguuguccuuggcu

SEQ ID NO: 362350 - RNA, 22 nt, Human
gcugaagggagugcugagucug

SEQ ID NO: 362351 - RNA, 22 nt, Human
uccauaagcagguucuuccuga

SEQ ID NO: 362352 - RNA, 22 nt, Human
gcagaggagaugaagauacuuu

SEQ ID NO: 362353 - RNA, 23 nt, Human
uggggcugauggagacggaccag

SEQ ID NO: 362354 - RNA, 22 nt, Human
gcugagaguccaggaaaacauc

SEQ ID NO: 362355 - RNA, 22 nt, Human
aggcugggcuccgcccaacucc

SEQ ID NO: 362356 - RNA, 22 nt, Human
gaguggagaucgugccacugca

SEQ ID NO: 362357 - RNA, 22 nt, Human
aggcugcuuccuuacguggcug

SEQ ID NO: 362358 - RNA, 22 nt, Human
ugucccagucaaggcugucauc

SEQ ID NO: 362359 - RNA, 22 nt, Human
uacacacagaggccaugggauu

SEQ ID NO: 362360 - RNA, 22 nt, Human
uauuuagaaugcguguacgugu

SEQ ID NO: 362361 - RNA, 20 nt, Human
aacauugcuucaauguaacc

SEQ ID NO: 362362 - RNA, 22 nt, Human
gcucugagucucagcuaccaca

SEQ ID NO: 362363 - RNA, 22 nt, Human
ucagcuuuccugcagcuaaggg

SEQ ID NO: 362364 - RNA, 22 nt, Human
agaagccaugguaugcaacuac

SEQ ID NO: 362365 - RNA, 22 nt, Human
gagcuggcuaauacugacuuau

SEQ ID NO: 362366 - RNA, 22 nt, Human
gugugcagaagacacaagacau

SEQ ID NO: 362367 - RNA, 22 nt, Human
uggcuuccgccgcgggccucgg

SEQ ID NO: 362368 - RNA, 22 nt, Human
ugggccacuugaaaguggaugu

SEQ ID NO: 362369 - RNA, 22 nt, Human
cagccacguagcccuuggccgu

SEQ ID NO: 362370 - RNA, 22 nt, Human
uccaggcaugguguaauuuugc

SEQ ID NO: 362371 - RNA, 20 nt, Human
uuucaguugguuaauggcau

SEQ ID NO: 362372 - RNA, 22 nt, Human
cuggacagaaaccaguccuggg

SEQ ID NO: 362373 - RNA, 22 nt, Human
gggcagggguagcauuccaagu

SEQ ID NO: 362374 - RNA, 22 nt, Human
caauagcagcuucugaaugcaa

SEQ ID NO: 362375 - RNA, 22 nt, Human
ggucagggggaucugugaggua

SEQ ID NO: 362376 - RNA, 22 nt, Human
acauuuuaauaugcuuagugug

SEQ ID NO: 362377 - RNA, 22 nt, Human
uuuaacuuaaucugcuugauga

SEQ ID NO: 362378 - RNA, 18 nt, Human
uggagcagguaggcauga

SEQ ID NO: 362379 - RNA, 22 nt, Human
gcucucuguuauuaagaucuuu

SEQ ID NO: 362380 - RNA, 22 nt, Human
uggccucuuacgacauagccuu

SEQ ID NO: 362381 - RNA, 22 nt, Human
acacugcagaugaaagcauaag

SEQ ID NO: 362382 - RNA, 22 nt, Human
auguuacacauaggcauaaaug

SEQ ID NO: 362383 - RNA, 22 nt, Human
uccugggagagugggacuguau

SEQ ID NO: 362384 - RNA, 22 nt, Human
ugcucccagggacucuggcugg

SEQ ID NO: 362385 - RNA, 22 nt, Human
gcagggacaacugugcaccuga

SEQ ID NO: 362386 - RNA, 22 nt, Human
ggcccagcugugcuuccagccc

SEQ ID NO: 362387 - RNA, 22 nt, Human
uagcagggucucaggagucagg

SEQ ID NO: 362388 - RNA, 22 nt, Human
uccucugcucagcauuccucac

SEQ ID NO: 362389 - RNA, 22 nt, Human
cuggccuuggaagggagcccgu

SEQ ID NO: 362390 - RNA, 18 nt, Human
ucagagguacagaaaagu

SEQ ID NO: 362391 - RNA, 22 nt, Human
ucaaguauaucuagucauuagg

SEQ ID NO: 362392 - RNA, 22 nt, Human
uagggcaguuucauguuaucuu

SEQ ID NO: 362393 - RNA, 22 nt, Human
ucuggcucaggucagacaggga

SEQ ID NO: 362394 - RNA, 22 nt, Human
aagcugaggcccauggcaaggu

SEQ ID NO: 362395 - RNA, 22 nt, Human
aucagaaauagucauguuacuu

SEQ ID NO: 362396 - RNA, 22 nt, Human
cacuggaauucaagauacugag

SEQ ID NO: 362397 - RNA, 22 nt, Human
cccaggcagggacgugcucugg

SEQ ID NO: 362398 - RNA, 22 nt, Human
cauguuuacuaccaggagaaug

SEQ ID NO: 362399 - RNA, 22 nt, Human
uggcauuucuggccauuugugu

SEQ ID NO: 362400 - RNA, 22 nt, Human
aaggaggagcggaggcuuguug

SEQ ID NO: 362401 - RNA, 22 nt, Human
ggcuuuaugcagggauagaaau

SEQ ID NO: 362402 - RNA, 22 nt, Human
ucauucuccucuggaaaaggca

SEQ ID NO: 362403 - RNA, 22 nt, Human
uucacauuagugguucuauaua

SEQ ID NO: 362404 - RNA, 22 nt, Human
gauuuauuuuuaaucagcaggg

SEQ ID NO: 362405 - RNA, 22 nt, Human
acaguguccuuguggucccugu

SEQ ID NO: 362406 - RNA, 18 nt, Human
ucucugaauauuuuaugu

SEQ ID NO: 362407 - RNA, 22 nt, Human
uucaugaaaguguaucuugugg

SEQ ID NO: 362408 - RNA, 22 nt, Human
acagaauugauggaaaucucag

SEQ ID NO: 362409 - RNA, 19 nt, Human
ugagcaugcgagcugagaa

SEQ ID NO: 362410 - RNA, 19 nt, Human
ugaaauggcaguugcuaaa

SEQ ID NO: 362411 - RNA, 22 nt, Human
aacagcaugcuggguaacauug

SEQ ID NO: 362412 - RNA, 22 nt, Human
gaucuguuauaaucucuuuuau

SEQ ID NO: 362413 - RNA, 22 nt, Human
augcaacaaaugcuacgaaucg

SEQ ID NO: 362414 - RNA, 22 nt, Human
cagcaggacccaggaauccugc

SEQ ID NO: 362415 - RNA, 22 nt, Human
auucuucaccauggauaauuug

SEQ ID NO: 362416 - RNA, 21 nt, Human
aggcagcucaggcccagagag

SEQ ID NO: 362417 - RNA, 22 nt, Human
gaacagaauuaccgaagaucug

SEQ ID NO: 362418 - RNA, 22 nt, Human
aucagcaaucaaauugcagagu

SEQ ID NO: 362419 - RNA, 22 nt, Human
acccaggacacagagaugaccc

SEQ ID NO: 362420 - RNA, 22 nt, Human
uccaaauucuagggccuugguu

SEQ ID NO: 362421 - RNA, 22 nt, Human
uguucuugggaaucuuacaguu

SEQ ID NO: 362422 - RNA, 22 nt, Human
caggugggaccaugauagggca

SEQ ID NO: 362423 - RNA, 22 nt, Human
ccagagucuaugaguccucauu

SEQ ID NO: 362424 - RNA, 22 nt, Human
aguuacaaccaugacacaagca

SEQ ID NO: 362425 - RNA, 22 nt, Human
agagccuugaagaucuggaaaa

SEQ ID NO: 362426 - RNA, 22 nt, Human
uguggcccagaugagugugcua

SEQ ID NO: 362427 - RNA, 22 nt, Human
gugagcaggauuucauggugua

SEQ ID NO: 362428 - RNA, 21 nt, Human
cccaggaggagcuccggcucc

SEQ ID NO: 362429 - RNA, 22 nt, Human
cugggcuggcgcauccgacacg

SEQ ID NO: 362430 - RNA, 22 nt, Human
gcaggggcugagcaccagcggg

SEQ ID NO: 362431 - RNA, 18 nt, Human
cagaaaucacaccagcac

SEQ ID NO: 362432 - RNA, 22 nt, Human
auacaaauuuauagaugcauuu

SEQ ID NO: 362433 - RNA, 22 nt, Human
cagagaaaaaauccugcucuca

SEQ ID NO: 362434 - RNA, 22 nt, Human
ucuucaaguuccaaagugcagg

SEQ ID NO: 362435 - RNA, 22 nt, Human
uuuaggcacagggaguugguuu

SEQ ID NO: 362436 - RNA, 22 nt, Human
cacccagccuucacacaggagu

SEQ ID NO: 362437 - RNA, 22 nt, Human
acagagcaauucuuggguguuu

SEQ ID NO: 362438 - RNA, 22 nt, Human
ucagcagaggggaaggcaucug

SEQ ID NO: 362439 - RNA, 23 nt, Human
uggcagagacccagaaucuacau

SEQ ID NO: 362440 - RNA, 22 nt, Human
cagugucuuauuuguagcucag

SEQ ID NO: 362441 - RNA, 22 nt, Human
aggaagcaaaaggcagggucua

SEQ ID NO: 362442 - RNA, 22 nt, Human
gaggaacccagcugggguugcc

SEQ ID NO: 362443 - RNA, 22 nt, Human
caaagauuuuagaauuugcaau

SEQ ID NO: 362444 - RNA, 22 nt, Human
aucaggauccaccuugagccug

SEQ ID NO: 362445 - RNA, 22 nt, Human
acauuuaaccaaacuguuuaau

SEQ ID NO: 362446 - RNA, 22 nt, Human
uuauguacucugcaauguuuga

SEQ ID NO: 362447 - RNA, 22 nt, Human
uuuuccucuguuauuaguguga

SEQ ID NO: 362448 - RNA, 22 nt, Human
ucucuggguuuuuguccuguac

SEQ ID NO: 362449 - RNA, 22 nt, Human
gccuggccugaacuaggaggug

SEQ ID NO: 362450 - RNA, 22 nt, Human
gcugcucugaaaaugacuguug

SEQ ID NO: 362451 - RNA, 22 nt, Human
acccuuucuuacucacacgcuc

SEQ ID NO: 362452 - RNA, 22 nt, Human
agggccuggugaccuggguccu

SEQ ID NO: 362453 - RNA, 22 nt, Human
guuuacauguacucauuauacu

SEQ ID NO: 362454 - RNA, 22 nt, Human
cagggcuguaaauuagugcuga

SEQ ID NO: 362455 - RNA, 22 nt, Human
aaauucuuucauggcuaauaag

SEQ ID NO: 362456 - RNA, 22 nt, Human
cagugcauaaucuaaauggggg

SEQ ID NO: 362457 - RNA, 22 nt, Human
acaggcuggugguccuggccau

SEQ ID NO: 362458 - RNA, 21 nt, Human
acuguucaucuguucagaagc

SEQ ID NO: 362459 - RNA, 23 nt, Human
uggaauaauaagguacauuaaca

SEQ ID NO: 362460 - RNA, 22 nt, Human
augggaggcaggcucagaaccg

SEQ ID NO: 362461 - RNA, 22 nt, Human
ucgagcucuggagccaaggaug

SEQ ID NO: 362462 - RNA, 22 nt, Human
aaaugcacaauaaaguaaaggc

SEQ ID NO: 362463 - RNA, 22 nt, Human
uccaggcaaggauaauaaacau

SEQ ID NO: 362464 - RNA, 22 nt, Human
agggugcauguuugcaagagug

SEQ ID NO: 362465 - RNA, 22 nt, Human
caaaugauaccuauuacuaggc

SEQ ID NO: 362466 - RNA, 22 nt, Human
ccuguucacuuugacuucucca

SEQ ID NO: 362467 - RNA, 22 nt, Human
ccaucagcuccaguaucuucug

SEQ ID NO: 362468 - RNA, 22 nt, Human
uccucagacuucccuuugugua

SEQ ID NO: 362469 - RNA, 22 nt, Human
cuggugcaggaaggagcuggca

SEQ ID NO: 362470 - RNA, 22 nt, Human
ucuuugcaugcauuuucccuua

SEQ ID NO: 362471 - RNA, 22 nt, Human
ccagcuuuucuuaucauuauaa

SEQ ID NO: 362472 - RNA, 22 nt, Human
cuggcagcuuagcacucugguu

SEQ ID NO: 362473 - RNA, 22 nt, Human
ugcugccuucuaggcgugcccu

SEQ ID NO: 362474 - RNA, 17 nt, Human
cccacggaggugugaaa

SEQ ID NO: 362475 - RNA, 22 nt, Human
gaagagcuccaaaaacagugag

SEQ ID NO: 362476 - RNA, 22 nt, Human
uauuuccagcaguaagaagaca

SEQ ID NO: 362477 - RNA, 21 nt, Human
ugggaccuauuucaacuggau

SEQ ID NO: 362478 - RNA, 22 nt, Human
ugucauaaucaguuuugcaugu

SEQ ID NO: 362479 - RNA, 21 nt, Human
ccuguucacagaucuguaacu

SEQ ID NO: 362480 - RNA, 22 nt, Human
uggaaagaaaaacaggccauga

SEQ ID NO: 362481 - RNA, 22 nt, Human
guuuaagaggguuucauuccca

SEQ ID NO: 362482 - RNA, 22 nt, Human
uuuguagaggguaauugacaga

SEQ ID NO: 362483 - RNA, 22 nt, Human
agcagcugggcucagagcuggg

SEQ ID NO: 362484 - RNA, 22 nt, Human
cugugucccuugucccagagcc

SEQ ID NO: 362485 - RNA, 22 nt, Human
ucagaggaacacuguuucaugc

SEQ ID NO: 362486 - RNA, 22 nt, Human
uaaggccaccguuauagaacca

SEQ ID NO: 362487 - RNA, 22 nt, Human
uugaagcaaggcgaaucuugug

SEQ ID NO: 362488 - RNA, 22 nt, Human
uggaggcaccacuggcugcccg

SEQ ID NO: 362489 - RNA, 22 nt, Human
ccagggcagcagaauuggggca

SEQ ID NO: 362490 - RNA, 22 nt, Human
augcuuaacucuguacauaguu

SEQ ID NO: 362491 - RNA, 22 nt, Human
gaggagaagcuauuggaaggac

SEQ ID NO: 362492 - RNA, 22 nt, Human
cccaggaguuggaggcuacggu

SEQ ID NO: 362493 - RNA, 22 nt, Human
acaggcagguugagaaacauuu

SEQ ID NO: 362494 - RNA, 22 nt, Human
cuggccugugggcugucuccgg

SEQ ID NO: 362495 - RNA, 22 nt, Human
aggauuuaccuccagcuaggcu

SEQ ID NO: 362496 - RNA, 22 nt, Human
uuacaagauaaccugaugcugu

SEQ ID NO: 362497 - RNA, 17 nt, Human
uggcucugaggcugaau

SEQ ID NO: 362498 - RNA, 22 nt, Human
ccuuucucuaucgacccaucgc

SEQ ID NO: 362499 - RNA, 22 nt, Human
gaggcaguguuuacugcccugu

SEQ ID NO: 362500 - RNA, 22 nt, Human
acuuuagaccaucuuccacagu

SEQ ID NO: 362501 - RNA, 22 nt, Human
uggauuuauggagaccgaaagu

SEQ ID NO: 362502 - RNA, 22 nt, Human
ggcagaggugaaguucacaagg

SEQ ID NO: 362503 - RNA, 22 nt, Human
cuaguggaaacuaacuggaauu

SEQ ID NO: 362504 - RNA, 22 nt, Human
agccuggagaagauguguauug

SEQ ID NO: 362505 - RNA, 22 nt, Human
aauuccagaggaggacaguccu

SEQ ID NO: 362506 - RNA, 22 nt, Human
cucugcagaauuugagcugcuc

SEQ ID NO: 362507 - RNA, 22 nt, Human
cccuucucuuucacucacuauu

SEQ ID NO: 362508 - RNA, 22 nt, Human
gaugcacuugccccuccucaga

SEQ ID NO: 362509 - RNA, 22 nt, Human
aaugcagugagccauuaaaugg

SEQ ID NO: 362510 - RNA, 22 nt, Human
gggaccuggcaccuuugcucug

SEQ ID NO: 362511 - RNA, 22 nt, Human
uuacaagcagcuacauaucaca

SEQ ID NO: 362512 - RNA, 22 nt, Human
caagcuccuuacauccacaggg

SEQ ID NO: 362513 - RNA, 22 nt, Human
ucucuggaguauaaccagggau

SEQ ID NO: 362514 - RNA, 22 nt, Human
gugcuuucugcugcauuccucu

SEQ ID NO: 362515 - RNA, 23 nt, Human
aggcagcagguuguccaggguga

SEQ ID NO: 362516 - RNA, 22 nt, Human
cugccuguuagucuagcaguua

SEQ ID NO: 362517 - RNA, 22 nt, Human
gcugaagcccacguggcuugua

SEQ ID NO: 362518 - RNA, 22 nt, Human
cugcagcuauauuuucccacag

SEQ ID NO: 362519 - RNA, 22 nt, Human
gagagcugauagaugagcuacu

SEQ ID NO: 362520 - RNA, 22 nt, Human
aucagcaagacuaggggaauac

SEQ ID NO: 362521 - RNA, 22 nt, Human
agcagggcuccauuucacugcc

SEQ ID NO: 362522 - RNA, 22 nt, Human
ugcaggcaggggaugagcagcc

SEQ ID NO: 362523 - RNA, 15 nt, Human
cagucccagggaccc

SEQ ID NO: 362524 - RNA, 22 nt, Human
ucaguggaguauggaugaaguc

SEQ ID NO: 362525 - RNA, 22 nt, Human
uuaaaguucauuaaaugagcca

SEQ ID NO: 362526 - RNA, 22 nt, Human
gaagcccagggcguggccgggc

SEQ ID NO: 362527 - RNA, 22 nt, Human
gcagggcaaauguggaaaggag

SEQ ID NO: 362528 - RNA, 22 nt, Human
ggcugggcaggucugcacaggg

SEQ ID NO: 362529 - RNA, 22 nt, Human
uuauacuuuauacuacaucauu

SEQ ID NO: 362530 - RNA, 22 nt, Human
caugucuuuguuaugcucacca

SEQ ID NO: 362531 - RNA, 19 nt, Human
aucugaaguaggugcagcu

SEQ ID NO: 362532 - RNA, 22 nt, Human
aagcagaggguauggccagguu

SEQ ID NO: 362533 - RNA, 22 nt, Human
gcagggcucugcuguaguccua

SEQ ID NO: 362534 - RNA, 22 nt, Human
ccugcucagagcgucuugugug

SEQ ID NO: 362535 - RNA, 22 nt, Human
gcugcaggcauuuuccugggca

SEQ ID NO: 362536 - RNA, 22 nt, Human
aucuauacuacaaauggcuggu

SEQ ID NO: 362537 - RNA, 22 nt, Human
caguaaaagauggaaauagaau

SEQ ID NO: 362538 - RNA, 22 nt, Human
uuaugcuaagugcaacaagcca

SEQ ID NO: 362539 - RNA, 22 nt, Human
ucugcugugauuugcuaccugu

SEQ ID NO: 362540 - RNA, 22 nt, Human
aagaugauaggacuugcuuaag

SEQ ID NO: 362541 - RNA, 22 nt, Human
caggcugggaacgccacccgcu

SEQ ID NO: 362542 - RNA, 22 nt, Human
aaugaaauguagcuuauccaua

SEQ ID NO: 362543 - RNA, 22 nt, Human
aagcagagccaccagcuuugga

SEQ ID NO: 362544 - RNA, 22 nt, Human
gcucagagcaucccagugaaug

SEQ ID NO: 362545 - RNA, 22 nt, Human
aagggaaaucauauggugcagu

SEQ ID NO: 362546 - RNA, 22 nt, Human
caagagcauuuaguuagcuggu

SEQ ID NO: 362547 - RNA, 22 nt, Human
uuaacagagugccuggcaugua

SEQ ID NO: 362548 - RNA, 22 nt, Human
aggguagggcccggagacagac

SEQ ID NO: 362549 - RNA, 22 nt, Human
ucucuucuuguguuuuccugcc

SEQ ID NO: 362550 - RNA, 22 nt, Human
aggcagucuaguccccaggcaa

SEQ ID NO: 362551 - RNA, 22 nt, Human
gcugccagucuaaugggaaaca

SEQ ID NO: 362552 - RNA, 22 nt, Human
gcucuccacugaccacggggca

SEQ ID NO: 362553 - RNA, 22 nt, Human
uacaggcauguagcauggugau

SEQ ID NO: 362554 - RNA, 22 nt, Human
ucuggccagugaaaugcagaau

SEQ ID NO: 362555 - RNA, 22 nt, Human
agggcagccugagugcuggccc

SEQ ID NO: 362556 - RNA, 22 nt, Human
caguggguccuaaguacaguuc

SEQ ID NO: 362557 - RNA, 21 nt, Human
cagcuuugucugucuucgggg

SEQ ID NO: 362558 - RNA, 22 nt, Human
acagcuuuucaauucugcugag

SEQ ID NO: 362559 - RNA, 22 nt, Human
gagcucccuggagguucagaua

SEQ ID NO: 362560 - RNA, 22 nt, Human
aaguccaguuucauuugagguc

SEQ ID NO: 362561 - RNA, 22 nt, Human
ccugagggcgccgagcucccag

SEQ ID NO: 362562 - RNA, 22 nt, Human
agcagcauuuaaggauccaagu

SEQ ID NO: 362563 - RNA, 21 nt, Human
gugcuuuuccuuaauguucuu

SEQ ID NO: 362564 - RNA, 22 nt, Human
cuuuuuccagcuucaggguggg

SEQ ID NO: 362565 - RNA, 22 nt, Human
cuuaagauuugagauaccuaau

SEQ ID NO: 362566 - RNA, 22 nt, Human
gagugcaguaugagaggcugcu

SEQ ID NO: 362567 - RNA, 21 nt, Human
auccuuagcacuuagaagagu

SEQ ID NO: 362568 - RNA, 22 nt, Human
uguggccuugcagccuggaggu

SEQ ID NO: 362569 - RNA, 19 nt, Human
acauuuaaauucagaucuc

SEQ ID NO: 362570 - RNA, 22 nt, Human
gcccucucggcauagcaggggc

SEQ ID NO: 362571 - RNA, 22 nt, Human
cuggagccggaccagggacggu

SEQ ID NO: 362572 - RNA, 22 nt, Human
caccagggacaaugcuaggggu

SEQ ID NO: 362573 - RNA, 22 nt, Human
ccagguguggggaggacucaca

SEQ ID NO: 362574 - RNA, 22 nt, Human
caugagcugcugggagccuguc

SEQ ID NO: 362575 - RNA, 23 nt, Human
caguacuuaguguagcguuaauu

SEQ ID NO: 362576 - RNA, 22 nt, Human
cuuaggcauccaggguucuucc

SEQ ID NO: 362577 - RNA, 22 nt, Human
aagccaggcugcacuugcuggg

SEQ ID NO: 362578 - RNA, 22 nt, Human
uucucagauccaucagaagucc

SEQ ID NO: 362579 - RNA, 22 nt, Human
caugucuugcccugauuaguag

SEQ ID NO: 362580 - RNA, 22 nt, Human
augguuuguguggcccagauga

SEQ ID NO: 362581 - RNA, 20 nt, Human
acaggagaucugaggaaagg

SEQ ID NO: 362582 - RNA, 18 nt, Human
aggcagacacuagagguc

SEQ ID NO: 362583 - RNA, 22 nt, Human
aggcagacucaauggcuagaua

SEQ ID NO: 362584 - RNA, 21 nt, Human
ugaggcuguuguaccagggag

SEQ ID NO: 362585 - RNA, 18 nt, Human
aagccagagaccacugcc

SEQ ID NO: 362586 - RNA, 22 nt, Human
auguggaaugaacaaaggaggc

SEQ ID NO: 362587 - RNA, 22 nt, Human
gucccugggaugcccuucuggg

SEQ ID NO: 362588 - RNA, 22 nt, Human
aauguguagauguugcauuccu

SEQ ID NO: 362589 - RNA, 22 nt, Human
aucagcaaguccuguuaauucu

SEQ ID NO: 362590 - RNA, 22 nt, Human
gagggcuguggggcaugaccag

SEQ ID NO: 362591 - RNA, 23 nt, Human
aggagacagggaagugccuggcu

SEQ ID NO: 362592 - RNA, 20 nt, Human
gcugucuggauuagaagccu

SEQ ID NO: 362593 - RNA, 22 nt, Human
aggagaggucucccuuccccag

SEQ ID NO: 362594 - RNA, 22 nt, Human
ucagaggaggcauuuaaacaga

SEQ ID NO: 362595 - RNA, 22 nt, Human
uauacuuuccugcaacuuugau

SEQ ID NO: 362596 - RNA, 22 nt, Human
aaaugucuuugaguauuucugc

SEQ ID NO: 362597 - RNA, 22 nt, Human
agggcugacaaauggcagugac

SEQ ID NO: 362598 - RNA, 22 nt, Human
gaaggccacggaauggagcugg

SEQ ID NO: 362599 - RNA, 22 nt, Human
gaggagcuugugagaagauguc

SEQ ID NO: 362600 - RNA, 22 nt, Human
ugaugauguuuaucuugguauu

SEQ ID NO: 362601 - RNA, 22 nt, Human
gcucugcuggagggaaagagaa

SEQ ID NO: 362602 - RNA, 21 nt, Human
agccuguugguuuacugcuca

SEQ ID NO: 362603 - RNA, 22 nt, Human
ccugccugcagaaaguaucucc

SEQ ID NO: 362604 - RNA, 22 nt, Human
ggccaggagaggagggcacuga

SEQ ID NO: 362605 - RNA, 22 nt, Human
guggccucuguuggcuccuagg

SEQ ID NO: 362606 - RNA, 22 nt, Human
gggcuggaggugagcaggacag

SEQ ID NO: 362607 - RNA, 22 nt, Human
aagcagaguccccuucccaugg

SEQ ID NO: 362608 - RNA, 22 nt, Human
uaguggaggccuguugugugca

SEQ ID NO: 362609 - RNA, 22 nt, Human
aggcaguggaugucaggaaugg

SEQ ID NO: 362610 - RNA, 19 nt, Human
aggcugugagggaggacuc

SEQ ID NO: 362611 - RNA, 22 nt, Human
agcagggcuuuggcuggcuuuc

SEQ ID NO: 362612 - RNA, 22 nt, Human
gaggcucaguuauuuuagccug

SEQ ID NO: 362613 - RNA, 22 nt, Human
uucaagauggcaccagugagug

SEQ ID NO: 362614 - RNA, 21 nt, Human
ccagacuggccuaugugguag

SEQ ID NO: 362615 - RNA, 22 nt, Human
ggcaggagcucagguugguucc

SEQ ID NO: 362616 - RNA, 22 nt, Human
uuuccuuccaaaugcccgggag

SEQ ID NO: 362617 - RNA, 22 nt, Human
auuucagguaccugugggaucc

SEQ ID NO: 362618 - RNA, 22 nt, Human
accucugccaagaugugcuccc

SEQ ID NO: 362619 - RNA, 22 nt, Human
gggauggacuuggggacuccag

SEQ ID NO: 362620 - RNA, 22 nt, Human
gguacaaugguucauuuuaugu

SEQ ID NO: 362621 - RNA, 22 nt, Human
uugcuuccaguccaagucuguu

SEQ ID NO: 362622 - RNA, 22 nt, Human
caugaauauacauccugauggc

SEQ ID NO: 362623 - RNA, 22 nt, Human
cugcaggauucucccaguugga

SEQ ID NO: 362624 - RNA, 22 nt, Human
ugucucaggcccaagccaguaa

SEQ ID NO: 362625 - RNA, 22 nt, Human
cauaagaaauaaugaugaugac

SEQ ID NO: 362626 - RNA, 22 nt, Human
uuggauccaucucaggcauagg

SEQ ID NO: 362627 - RNA, 22 nt, Human
ccuuaaauucuccauuugaaag

SEQ ID NO: 362628 - RNA, 22 nt, Human
uccugggcugugugccacucug

SEQ ID NO: 362629 - RNA, 22 nt, Human
cagccaucccagccugugguuc

SEQ ID NO: 362630 - RNA, 22 nt, Human
caauauauaggaacaacuuagg

SEQ ID NO: 362631 - RNA, 22 nt, Human
uuucaucuucccagagaccuug

SEQ ID NO: 362632 - RNA, 22 nt, Human
agaccagcugccucccagggcc

SEQ ID NO: 362633 - RNA, 22 nt, Human
ucuggcuccuggcuccacugcc

SEQ ID NO: 362634 - RNA, 22 nt, Human
ugcauacacaugugcacauacg

SEQ ID NO: 362635 - RNA, 22 nt, Human
aggagaguucacacuggucaga

SEQ ID NO: 362636 - RNA, 22 nt, Human
ucagccacuacccaccuuaaca

SEQ ID NO: 362637 - RNA, 22 nt, Human
cuggugccuccucccugugcuu

SEQ ID NO: 362638 - RNA, 22 nt, Human
uggcacugggacagaugcucuc

SEQ ID NO: 362639 - RNA, 22 nt, Human
uugguuuacuaggauucaaauu

SEQ ID NO: 362640 - RNA, 22 nt, Human
ggccugagcuugggcagcguau

SEQ ID NO: 362641 - RNA, 22 nt, Human
uucagcagugcagacacccagu

SEQ ID NO: 362642 - RNA, 22 nt, Human
gaaggccacuuuguguugagaa

SEQ ID NO: 362643 - RNA, 22 nt, Human
uccaagaucuacagcaguuuag

SEQ ID NO: 362644 - RNA, 22 nt, Human
gcucuaauugaaaaauacugca

SEQ ID NO: 362645 - RNA, 21 nt, Human
ccagagccugcugagcccccu

SEQ ID NO: 362646 - RNA, 22 nt, Human
ucagagguaguagcagaguuga

SEQ ID NO: 362647 - RNA, 15 nt, Human
cccaggaguucgaga

SEQ ID NO: 362648 - RNA, 22 nt, Human
uucauuccugagcccauauuua

SEQ ID NO: 362649 - RNA, 22 nt, Human
ccaggcugagcaugauuggagc

SEQ ID NO: 362650 - RNA, 22 nt, Human
cgcugccaggucaccaggggua

SEQ ID NO: 362651 - RNA, 22 nt, Human
uccugcagaucaaagccuuuga

SEQ ID NO: 362652 - RNA, 22 nt, Human
ucucccagaaguccucaguaca

SEQ ID NO: 362653 - RNA, 22 nt, Human
uugaaaguccuucuugaguuac

SEQ ID NO: 362654 - RNA, 22 nt, Human
ugcaggaaucagaggggaagcg

SEQ ID NO: 362655 - RNA, 22 nt, Human
ggcuuggaaaugguaaugagcu

SEQ ID NO: 362656 - RNA, 22 nt, Human
cauuucaagcauugacuucuau

SEQ ID NO: 362657 - RNA, 22 nt, Human
guacagaaaguacccauagaag

SEQ ID NO: 362658 - RNA, 19 nt, Human
ugccugucaguagaucuca

SEQ ID NO: 362659 - RNA, 22 nt, Human
gcccugucccuuggcuucuagg

SEQ ID NO: 362660 - RNA, 22 nt, Human
cuuaauuuaaaauaguucaggc

SEQ ID NO: 362661 - RNA, 22 nt, Human
cagagggcucuuggcugccugc

SEQ ID NO: 362662 - RNA, 22 nt, Human
ucagaguguggugagaugugca

SEQ ID NO: 362663 - RNA, 22 nt, Human
acugaaggcuuucccaagguca

SEQ ID NO: 362664 - RNA, 22 nt, Human
caggcacugugcuagauccuug

SEQ ID NO: 362665 - RNA, 22 nt, Human
gccuggccgcuccgagcuccgc

SEQ ID NO: 362666 - RNA, 22 nt, Human
cagcucuguaaauuccuucauc

SEQ ID NO: 362667 - RNA, 22 nt, Human
ugcagauucaaaugaaaugcaa

SEQ ID NO: 362668 - RNA, 22 nt, Human
gaaaacuaacggaaaaguuagg

SEQ ID NO: 362669 - RNA, 23 nt, Human
aaggccagaauuucaauggugcc

SEQ ID NO: 362670 - RNA, 22 nt, Human
uaaaugcagcaguuucuguucu

SEQ ID NO: 362671 - RNA, 22 nt, Human
aauuaaauugguuuagagagga

SEQ ID NO: 362672 - RNA, 22 nt, Human
agcagagcggggccuccggaag

SEQ ID NO: 362673 - RNA, 20 nt, Human
agccugccagcuggcccaga

SEQ ID NO: 362674 - RNA, 22 nt, Human
cagagccaacgccaccugccca

SEQ ID NO: 362675 - RNA, 22 nt, Human
gaauuguacgcuuuacauaggu

SEQ ID NO: 362676 - RNA, 22 nt, Human
cacagguguucuugcagugaaa

SEQ ID NO: 362677 - RNA, 20 nt, Human
cucaggauacugcaaaguug

SEQ ID NO: 362678 - RNA, 21 nt, Human
ucucacaauaugaugccagau

SEQ ID NO: 362679 - RNA, 22 nt, Human
aauacauauggaauuccauguu

SEQ ID NO: 362680 - RNA, 22 nt, Human
guuacacaggaaaacauuagca

SEQ ID NO: 362681 - RNA, 22 nt, Human
gugucaugggguuuguuauaca

SEQ ID NO: 362682 - RNA, 22 nt, Human
ggugaguugggguucacagguc

SEQ ID NO: 362683 - RNA, 22 nt, Human
aauguacaaaagucagccaacu

SEQ ID NO: 362684 - RNA, 18 nt, Human
acccucuggcuucugagc

SEQ ID NO: 362685 - RNA, 22 nt, Human
caaaugcauagaaagaugaaac

SEQ ID NO: 362686 - RNA, 22 nt, Human
ggcagcaguaggagcuaaucuu

SEQ ID NO: 362687 - RNA, 21 nt, Human
uccacaaguuagaaggaaauu

SEQ ID NO: 362688 - RNA, 21 nt, Human
uggcucuguucaauauaugga

SEQ ID NO: 362689 - RNA, 22 nt, Human
ggcagcuuucucacccaugacc

SEQ ID NO: 362690 - RNA, 22 nt, Human
ggucccaguccucucccugcua

SEQ ID NO: 362691 - RNA, 22 nt, Human
cucagagauauagucccugcuu

SEQ ID NO: 362692 - RNA, 22 nt, Human
ccuucauugcaucuuuaagaga

SEQ ID NO: 362693 - RNA, 22 nt, Human
agcagcauggaugggccucagc

SEQ ID NO: 362694 - RNA, 22 nt, Human
ggcugugagcaggcagaaugcu

SEQ ID NO: 362695 - RNA, 22 nt, Human
agaaauacuaggaauauucaua

SEQ ID NO: 362696 - RNA, 22 nt, Human
gcccagcuggcuuccagcacau

SEQ ID NO: 362697 - RNA, 22 nt, Human
cugcuuccauaaauaaugugcu

SEQ ID NO: 362698 - RNA, 22 nt, Human
cucaguuucuucauauuguagg

SEQ ID NO: 362699 - RNA, 22 nt, Human
guaucuuuccacaucuucagua

SEQ ID NO: 362700 - RNA, 22 nt, Human
gcccagaguucaaggcugcagu

SEQ ID NO: 362701 - RNA, 22 nt, Human
uugacaauguccuuugaauuuc

SEQ ID NO: 362702 - RNA, 22 nt, Human
gagaggaguagacacuuugguu

SEQ ID NO: 362703 - RNA, 22 nt, Human
uuuaucacagaauaagaaguca

SEQ ID NO: 362704 - RNA, 22 nt, Human
cagaggcauacucccagucuug

SEQ ID NO: 362705 - RNA, 20 nt, Human
ugggccugagccugugggcu

SEQ ID NO: 362706 - RNA, 22 nt, Human
auauucuucuuguucagacuau

SEQ ID NO: 362707 - RNA, 22 nt, Human
gaggcagcagggcugguuccuu

SEQ ID NO: 362708 - RNA, 22 nt, Human
ucaccagggcuccagccagccu

SEQ ID NO: 362709 - RNA, 22 nt, Human
gauacaaauucaugucugaauu

SEQ ID NO: 362710 - RNA, 22 nt, Human
auuuccaaaaccacuuauugcc

SEQ ID NO: 362711 - RNA, 22 nt, Human
auacuguuucucuucuacauga

SEQ ID NO: 362712 - RNA, 22 nt, Human
aaacauuugcaacucgguuugg

SEQ ID NO: 362713 - RNA, 22 nt, Human
gagagugagauccuccugggga

SEQ ID NO: 362714 - RNA, 22 nt, Human
uuauuccaguaaucucuguaau

SEQ ID NO: 362715 - RNA, 22 nt, Human
aacaggagaguaaauauaugau

SEQ ID NO: 362716 - RNA, 20 nt, Human
gaguccuuaugggcugaggu

SEQ ID NO: 362717 - RNA, 22 nt, Human
cagagagcaugggaggcccgag

SEQ ID NO: 362718 - RNA, 22 nt, Human
guggcagcggugugcaaggagg

SEQ ID NO: 362719 - RNA, 22 nt, Human
agaccaugggcucugaagagca

SEQ ID NO: 362720 - RNA, 22 nt, Human
aaggcagcccuggcucagccug

SEQ ID NO: 362721 - RNA, 22 nt, Human
ugcugccaccugguggcugaag

SEQ ID NO: 362722 - RNA, 21 nt, Human
acaugcauagagagauuucug

SEQ ID NO: 362723 - RNA, 19 nt, Human
aucuuacagagcagaguac

SEQ ID NO: 362724 - RNA, 22 nt, Human
uuucauaaccucaagcuacagu

SEQ ID NO: 362725 - RNA, 22 nt, Human
uguuucaugauugcugucauuu

SEQ ID NO: 362726 - RNA, 22 nt, Human
uaagaacaagcuggggguucca

SEQ ID NO: 362727 - RNA, 22 nt, Human
aagaggagacuucagcaacuug

SEQ ID NO: 362728 - RNA, 22 nt, Human
ucaggcaguagaauugcuugaa

SEQ ID NO: 362729 - RNA, 22 nt, Human
uauugaaaugaaugacagugau

SEQ ID NO: 362730 - RNA, 22 nt, Human
ccagagccuggcaucugcauaa

SEQ ID NO: 362731 - RNA, 22 nt, Human
uagagcuggccgggacagcugg

SEQ ID NO: 362732 - RNA, 21 nt, Human
gcagcagaggcuugacagaca

SEQ ID NO: 362733 - RNA, 22 nt, Human
ggggccagguccagcuuccaaa

SEQ ID NO: 362734 - RNA, 19 nt, Human
aguguguacugaaagcacu

SEQ ID NO: 362735 - RNA, 19 nt, Human
ucucaauguucagaaagcu

SEQ ID NO: 362736 - RNA, 22 nt, Human
auucuucacauaagugcuguac

SEQ ID NO: 362737 - RNA, 22 nt, Human
augugaaagagguguucagugg

SEQ ID NO: 362738 - RNA, 22 nt, Human
uuaaacagucccagaggcugac

SEQ ID NO: 362739 - RNA, 22 nt, Human
ggauaagaaaauuguaauaacu

SEQ ID NO: 362740 - RNA, 22 nt, Human
acauuguuugagaauacagaug

SEQ ID NO: 362741 - RNA, 22 nt, Human
uggcucagauaauucaaggggc

SEQ ID NO: 362742 - RNA, 22 nt, Human
cauugcccaguaggaucaccag

SEQ ID NO: 362743 - RNA, 22 nt, Human
cagugagggaagaucucagcac

SEQ ID NO: 362744 - RNA, 20 nt, Human
aggcugagggugauuguguc

SEQ ID NO: 362745 - RNA, 22 nt, Human
cagcuucuucaguccuggagcu

SEQ ID NO: 362746 - RNA, 22 nt, Human
aucaguuuguauaugaaacacu

SEQ ID NO: 362747 - RNA, 22 nt, Human
agaagauuuagguugacgcuau

SEQ ID NO: 362748 - RNA, 22 nt, Human
agggcacccucucugcaguacc

SEQ ID NO: 362749 - RNA, 22 nt, Human
cugagcugggacucaguagcaa

SEQ ID NO: 362750 - RNA, 22 nt, Human
agagucuuccaggcagccugag

SEQ ID NO: 362751 - RNA, 22 nt, Human
agccugagccccauccagcuga

SEQ ID NO: 362752 - RNA, 22 nt, Human
gcugugcagauguagggagugg

SEQ ID NO: 362753 - RNA, 22 nt, Human
ccagagagaguacugggcucug

SEQ ID NO: 362754 - RNA, 22 nt, Human
agaucugaggguccaagggagg

SEQ ID NO: 362755 - RNA, 22 nt, Human
guccucagggaauguggcgggu

SEQ ID NO: 362756 - RNA, 22 nt, Human
uaugcacacaucgcagcaggaa

SEQ ID NO: 362757 - RNA, 22 nt, Human
guacaguuuucaguguucacug

SEQ ID NO: 362758 - RNA, 18 nt, Human
agcugcagaccaggaggu

SEQ ID NO: 362759 - RNA, 22 nt, Human
cagcugacuucauaggaagaca

SEQ ID NO: 362760 - RNA, 22 nt, Human
cccaggaggguggccucugccc

SEQ ID NO: 362761 - RNA, 22 nt, Human
gugucccacucuggaggugaag

SEQ ID NO: 362762 - RNA, 22 nt, Human
cucuacucuuaacacagcuagg

SEQ ID NO: 362763 - RNA, 21 nt, Human
cuguggaagggaacuagaggg

SEQ ID NO: 362764 - RNA, 22 nt, Human
gccaggcuggugcaaggauauu

SEQ ID NO: 362765 - RNA, 22 nt, Human
aaaucucaauuugaauuguagc

SEQ ID NO: 362766 - RNA, 22 nt, Human
aagggacccuggaucaaaugga

SEQ ID NO: 362767 - RNA, 22 nt, Human
cucugggcuuguugaccugcac

SEQ ID NO: 362768 - RNA, 22 nt, Human
cagaagcacuaggaggaaacgu

SEQ ID NO: 362769 - RNA, 22 nt, Human
uuucuagugguuaagauuuaca

SEQ ID NO: 362770 - RNA, 22 nt, Human
aaaauccuuagccgagugaggu

SEQ ID NO: 362771 - RNA, 22 nt, Human
ccagcaggagacuagcaacaua

SEQ ID NO: 362772 - RNA, 22 nt, Human
ugcaggcugggaagagggacaa

SEQ ID NO: 362773 - RNA, 19 nt, Human
ccuggguccacucagacua

SEQ ID NO: 362774 - RNA, 22 nt, Human
agucauaugacccuucacaaac

SEQ ID NO: 362775 - RNA, 22 nt, Human
ucucacuuuccagacuuuucaa

SEQ ID NO: 362776 - RNA, 22 nt, Human
gaauucuuuucuuucugaaagu

SEQ ID NO: 362777 - RNA, 22 nt, Human
augauuuccaguuguugcuaag

SEQ ID NO: 362778 - RNA, 22 nt, Human
cucuaacacuguaaugcuuucu

SEQ ID NO: 362779 - RNA, 22 nt, Human
augcuuuacaguuuuccaaaca

SEQ ID NO: 362780 - RNA, 21 nt, Human
agcugcuccagggagcucagg

SEQ ID NO: 362781 - RNA, 22 nt, Human
cauuagggucucucagcugaau

SEQ ID NO: 362782 - RNA, 20 nt, Human
gguagcagcugcugucaucc

SEQ ID NO: 362783 - RNA, 22 nt, Human
ccuggccaggcauggagucaca

SEQ ID NO: 362784 - RNA, 22 nt, Human
cagggcccaagacacaaugagg

SEQ ID NO: 362785 - RNA, 22 nt, Human
ccccagccuuccaugggaauug

SEQ ID NO: 362786 - RNA, 22 nt, Human
cagcaggcccaggugcugguga

SEQ ID NO: 362787 - RNA, 22 nt, Human
uguuuuaugagccauauaaccu

SEQ ID NO: 362788 - RNA, 22 nt, Human
gccuugcuuugcuucuggacag

SEQ ID NO: 362789 - RNA, 21 nt, Human
agcaggaggcagucacagcuc

SEQ ID NO: 362790 - RNA, 22 nt, Human
ugagaggcagaauggugccugc

SEQ ID NO: 362791 - RNA, 22 nt, Human
ucuggaucucccucauccuggg

SEQ ID NO: 362792 - RNA, 22 nt, Human
acaaaauuaccuaguuauuuuc

SEQ ID NO: 362793 - RNA, 22 nt, Human
ugcaggugccucuugagcuugu

SEQ ID NO: 362794 - RNA, 22 nt, Human
uaaaaguggauaagcuguagga

SEQ ID NO: 362795 - RNA, 22 nt, Human
cuaaaugccuuuccuaccuaac

SEQ ID NO: 362796 - RNA, 22 nt, Human
cauugcuuccuaugucccuucu

SEQ ID NO: 362797 - RNA, 22 nt, Human
cagaaauggagcccaggaaucu

SEQ ID NO: 362798 - RNA, 22 nt, Human
agaauccugaugaaaaggagag

SEQ ID NO: 362799 - RNA, 22 nt, Human
cucuggagcaccgggcuaucca

SEQ ID NO: 362800 - RNA, 22 nt, Human
gagccuccuccuggugugccga

SEQ ID NO: 362801 - RNA, 22 nt, Human
aaauguguuuagaugguuuauu

SEQ ID NO: 362802 - RNA, 22 nt, Human
uggcaauuuuaggugguuuagu

SEQ ID NO: 362803 - RNA, 22 nt, Human
cugggccauggaagucucugcc

SEQ ID NO: 362804 - RNA, 22 nt, Human
ugaagccacagagcaucugccu

SEQ ID NO: 362805 - RNA, 22 nt, Human
uagaaaauagggccuguggagc

SEQ ID NO: 362806 - RNA, 22 nt, Human
uggucaggcugcucugcggcgu

SEQ ID NO: 362807 - RNA, 22 nt, Human
ccugccagucacuaugucaccu

SEQ ID NO: 362808 - RNA, 19 nt, Human
aggcaggugcagagguccc

SEQ ID NO: 362809 - RNA, 22 nt, Human
uaucaucuuguugucaugcagc

SEQ ID NO: 362810 - RNA, 22 nt, Human
uuucacaaacugaggagacaau

SEQ ID NO: 362811 - RNA, 22 nt, Human
caggcagcugggucaccguccc

SEQ ID NO: 362812 - RNA, 22 nt, Human
gcucagagcacucagacucagc

SEQ ID NO: 362813 - RNA, 22 nt, Human
ugcuuuaaaauggacuguuuug

SEQ ID NO: 362814 - RNA, 22 nt, Human
ccagguguagcacugcucacag

SEQ ID NO: 362815 - RNA, 22 nt, Human
uguguauuucuggaacagacua

SEQ ID NO: 362816 - RNA, 22 nt, Human
ggcucaggaccugggauugcca

SEQ ID NO: 362817 - RNA, 21 nt, Human
aggccucuucauggccaugau

SEQ ID NO: 362818 - RNA, 22 nt, Human
uggcuucuugggaugggucauu

SEQ ID NO: 362819 - RNA, 22 nt, Human
acacaggggaaaguggagcuga

SEQ ID NO: 362820 - RNA, 21 nt, Human
cauugucgacauuuuccccuc

SEQ ID NO: 362821 - RNA, 19 nt, Human
ugaagcaggcagagaagau

SEQ ID NO: 362822 - RNA, 22 nt, Human
gauuuucauuauagcuaguuuc

SEQ ID NO: 362823 - RNA, 22 nt, Human
agaaaaggauugauggaucaga

SEQ ID NO: 362824 - RNA, 22 nt, Human
agggcagagcacugaauuggga

SEQ ID NO: 362825 - RNA, 22 nt, Human
uuauuuugagagaaugugugcu

SEQ ID NO: 362826 - RNA, 22 nt, Human
caagggcauugcuugggaccuu

SEQ ID NO: 362827 - RNA, 22 nt, Human
uucuuuuacauuaagauuucag

SEQ ID NO: 362828 - RNA, 22 nt, Human
acuggauuccauugugcaaaga

SEQ ID NO: 362829 - RNA, 22 nt, Human
gaaugcacucacccaucacuca

SEQ ID NO: 362830 - RNA, 22 nt, Human
guucacaagaguuacagacaga

SEQ ID NO: 362831 - RNA, 22 nt, Human
agugcauugcaucucugcuuca

SEQ ID NO: 362832 - RNA, 22 nt, Human
ucugagagagggucagaugcua

SEQ ID NO: 362833 - RNA, 22 nt, Human
aaauucagcagugaaaugcccc

SEQ ID NO: 362834 - RNA, 22 nt, Human
cuaaucaucuuucucuuaaagc

SEQ ID NO: 362835 - RNA, 22 nt, Human
uacuuccuguuuccaugucugu

SEQ ID NO: 362836 - RNA, 22 nt, Human
augaaaacuuuagccucauuag

SEQ ID NO: 362837 - RNA, 21 nt, Human
ugauccuuucccccauguugc

SEQ ID NO: 362838 - RNA, 22 nt, Human
cacaauuuguuuuaucaguauu

SEQ ID NO: 362839 - RNA, 22 nt, Human
ugcugaggucaccuugcugcua

SEQ ID NO: 362840 - RNA, 22 nt, Human
uuccuguaguugugcaauguac

SEQ ID NO: 362841 - RNA, 22 nt, Human
ugcaagggcuuagggggcugug

SEQ ID NO: 362842 - RNA, 22 nt, Human
agggccugcucuaucacucuca

SEQ ID NO: 362843 - RNA, 22 nt, Human
cugcugggucuaugcaagugga

SEQ ID NO: 362844 - RNA, 21 nt, Human
uggcugccuacaugcugcagg

SEQ ID NO: 362845 - RNA, 22 nt, Human
ugaggggagaagcagcagccug

SEQ ID NO: 362846 - RNA, 22 nt, Human
ccugggcucaagugauccuccu

SEQ ID NO: 362847 - RNA, 20 nt, Human
gggagaagggcugaugagag

SEQ ID NO: 362848 - RNA, 22 nt, Human
ugucucugagaugacucccacc

SEQ ID NO: 362849 - RNA, 22 nt, Human
agcagugggugacagagcugag

SEQ ID NO: 362850 - RNA, 22 nt, Human
uugaaaaaauugguagaggaug

SEQ ID NO: 362851 - RNA, 22 nt, Human
agcagccaaccuuacauucauc

SEQ ID NO: 362852 - RNA, 22 nt, Human
uaauuuuacuuccugagcaccu

SEQ ID NO: 362853 - RNA, 22 nt, Human
cccagacugcagagcgggcaga

SEQ ID NO: 362854 - RNA, 22 nt, Human
uggcagcuguuaauguuuuguu

SEQ ID NO: 362855 - RNA, 22 nt, Human
acuugguugaugucauaagguu

SEQ ID NO: 362856 - RNA, 22 nt, Human
uguacauagaucuugaaaauua

SEQ ID NO: 362857 - RNA, 22 nt, Human
aacauuuaugauugagguaaau

SEQ ID NO: 362858 - RNA, 23 nt, Human
uacauuguggauggaguccuggg

SEQ ID NO: 362859 - RNA, 18 nt, Human
uuucacagauucaugacu

SEQ ID NO: 362860 - RNA, 22 nt, Human
gccaggcuggccagcaccuucu

SEQ ID NO: 362861 - RNA, 22 nt, Human
aguuugaaauguuggcaauauu

SEQ ID NO: 362862 - RNA, 22 nt, Human
acccagcaugacaccugcacau

SEQ ID NO: 362863 - RNA, 22 nt, Human
uuagauaauguuauuguaauuu

SEQ ID NO: 362864 - RNA, 22 nt, Human
aucuaagaguuaacaucaagaa

SEQ ID NO: 362865 - RNA, 22 nt, Human
agccagucggggccaugcuggg

SEQ ID NO: 362866 - RNA, 22 nt, Human
ugggggaagagcuuguuaaagu

SEQ ID NO: 362867 - RNA, 22 nt, Human
agaucaguuagauagcuugaug

SEQ ID NO: 362868 - RNA, 22 nt, Human
ggagcugaugacgucaccaugg

SEQ ID NO: 362869 - RNA, 22 nt, Human
gggcuggcaucgguugcugaga

SEQ ID NO: 362870 - RNA, 22 nt, Human
guaagcaucugucucuucugca

SEQ ID NO: 362871 - RNA, 22 nt, Human
gccaggcaggugucggagcccu

SEQ ID NO: 362872 - RNA, 22 nt, Human
acacacucaauugcauaagcac

SEQ ID NO: 362873 - RNA, 23 nt, Human
ccaaagucgaagucuaguccaga

SEQ ID NO: 362874 - RNA, 22 nt, Human
ggcagcuauuccaagcagcacu

SEQ ID NO: 362875 - RNA, 22 nt, Human
aauguuaaaaccuucagugcuu

SEQ ID NO: 362876 - RNA, 17 nt, Human
ugaaggccaugaccacg

SEQ ID NO: 362877 - RNA, 22 nt, Human
acacugaaugcuguuuagaaau

SEQ ID NO: 362878 - RNA, 22 nt, Human
ggcugcagcggauuggggauug

SEQ ID NO: 362879 - RNA, 22 nt, Human
aguggcaguuugggagcuacag

SEQ ID NO: 362880 - RNA, 22 nt, Human
ucuugauuacaaauaacaucau

SEQ ID NO: 362881 - RNA, 22 nt, Human
uuuucagaggccuaagagguuu

SEQ ID NO: 362882 - RNA, 22 nt, Human
uuuccuuccagguuccuaaggc

SEQ ID NO: 362883 - RNA, 22 nt, Human
ucaguuuuuacggucacaggga

SEQ ID NO: 362884 - RNA, 22 nt, Human
caggcacagaguuauucauuua

SEQ ID NO: 362885 - RNA, 22 nt, Human
uuacugaaaauucuucaggauu

SEQ ID NO: 362886 - RNA, 23 nt, Human
uccagcagccaagaaggguagaa

SEQ ID NO: 362887 - RNA, 22 nt, Human
ggcaggagaauggcgugaacuc

SEQ ID NO: 362888 - RNA, 22 nt, Human
auguuuuugagauacaaacaga

SEQ ID NO: 362889 - RNA, 22 nt, Human
ggucccaguugcccaggucagg

SEQ ID NO: 362890 - RNA, 22 nt, Human
uggagaagcuguagguggacuc

SEQ ID NO: 362891 - RNA, 22 nt, Human
agggcugagacuaaggccagau

SEQ ID NO: 362892 - RNA, 22 nt, Human
caguugaugggacucauguggg

SEQ ID NO: 362893 - RNA, 22 nt, Human
uggcuuucucccccagcuucuc

SEQ ID NO: 362894 - RNA, 22 nt, Human
ccagccagccuugaucugagua

SEQ ID NO: 362895 - RNA, 22 nt, Human
aagaaaagaaaccugaggcuuu

SEQ ID NO: 362896 - RNA, 22 nt, Human
gcaggcagagguggaggagaca

SEQ ID NO: 362897 - RNA, 22 nt, Human
uggcucaguuucaguccugguu

SEQ ID NO: 362898 - RNA, 22 nt, Human
ggcuccuggcaucuggugggua

SEQ ID NO: 362899 - RNA, 22 nt, Human
cuggcagcuucaggacacucgg

SEQ ID NO: 362900 - RNA, 22 nt, Human
ugcagcugcuggcccaggugcu

SEQ ID NO: 362901 - RNA, 22 nt, Human
cuuccugcaggacagccaucug

SEQ ID NO: 362902 - RNA, 22 nt, Human
ugggcucuccuggaggacaaca

SEQ ID NO: 362903 - RNA, 22 nt, Human
aggaggcacucacucucagggu

SEQ ID NO: 362904 - RNA, 21 nt, Human
agccuggcccagggggaggcu

SEQ ID NO: 362905 - RNA, 22 nt, Human
acaguggaaaugugggagggga

SEQ ID NO: 362906 - RNA, 22 nt, Human
uuucacagcuggguggcagagu

SEQ ID NO: 362907 - RNA, 22 nt, Human
uagaaaucagcaggcauaugua

SEQ ID NO: 362908 - RNA, 20 nt, Human
uacugggcaagcccacagac

SEQ ID NO: 362909 - RNA, 22 nt, Human
uaucauaaguuaauuaaacagu

SEQ ID NO: 362910 - RNA, 22 nt, Human
uggaagggagugacagucagag

SEQ ID NO: 362911 - RNA, 21 nt, Human
ucucuggaauuagaccauguu

SEQ ID NO: 362912 - RNA, 22 nt, Human
cuggccuguccugacccagccu

SEQ ID NO: 362913 - RNA, 22 nt, Human
ggaggugggcuaaggacucucu

SEQ ID NO: 362914 - RNA, 22 nt, Human
ggaagagccuggggugucaggc

SEQ ID NO: 362915 - RNA, 22 nt, Human
gugggacucuucuuuggcagug

SEQ ID NO: 362916 - RNA, 22 nt, Human
agcagcauaucagagaaaguca

SEQ ID NO: 362917 - RNA, 22 nt, Human
ucugggcugggagcguguggac

SEQ ID NO: 362918 - RNA, 22 nt, Human
ucucaagagggaggcaaucaug

SEQ ID NO: 362919 - RNA, 22 nt, Human
ccuggagcacucucccuggcug

SEQ ID NO: 362920 - RNA, 22 nt, Human
agggcagcacagcugugcuccu

SEQ ID NO: 362921 - RNA, 22 nt, Human
gcacacacuguuuuccucacau

SEQ ID NO: 362922 - RNA, 22 nt, Human
aggccagcaccagagucaagaa

SEQ ID NO: 362923 - RNA, 22 nt, Human
agggacccauagagagaccagu

SEQ ID NO: 362924 - RNA, 22 nt, Human
cauaauaucuccgauuacuugc

SEQ ID NO: 362925 - RNA, 20 nt, Human
uggcaggaggcagcagugga

SEQ ID NO: 362926 - RNA, 22 nt, Human
caaagaagagauuuacagagcu

SEQ ID NO: 362927 - RNA, 22 nt, Human
agggcuacugccugccuucagg

SEQ ID NO: 362928 - RNA, 22 nt, Human
gucccucugugucccugcaguc

SEQ ID NO: 362929 - RNA, 22 nt, Human
ggcugagcguggcugccguggg

SEQ ID NO: 362930 - RNA, 22 nt, Human
cuggagugaagucuggcagcuu

SEQ ID NO: 362931 - RNA, 22 nt, Human
uauguguaggaggaggacaggg

SEQ ID NO: 362932 - RNA, 22 nt, Human
cuucucucugcauaggcauggg

SEQ ID NO: 362933 - RNA, 22 nt, Human
agggccagaguacaucagggcu

SEQ ID NO: 362934 - RNA, 20 nt, Human
cucugcugcccgccggcugc

SEQ ID NO: 362935 - RNA, 22 nt, Human
gccaggcagcugggagggugcc

SEQ ID NO: 362936 - RNA, 22 nt, Human
gcuggcagagagcuggugagga

SEQ ID NO: 362937 - RNA, 22 nt, Human
gaagccaguguuugaagaauuu

SEQ ID NO: 362938 - RNA, 19 nt, Human
aauucuguuucagcagauc

SEQ ID NO: 362939 - RNA, 22 nt, Human
agcagccauagauagcaugcaa

SEQ ID NO: 362940 - RNA, 22 nt, Human
ugcauaaacagauacuucaugu

SEQ ID NO: 362941 - RNA, 22 nt, Human
ucugagggugggagaaggagcu

SEQ ID NO: 362942 - RNA, 17 nt, Human
ucauuuguugugacuag

SEQ ID NO: 362943 - RNA, 22 nt, Human
ucugcaggaggcuggcugcagg

SEQ ID NO: 362944 - RNA, 22 nt, Human
ucagggcaggacaguguaggcc

SEQ ID NO: 362945 - RNA, 22 nt, Human
cugcuguguuccuccugcaucu

SEQ ID NO: 362946 - RNA, 22 nt, Human
ucugggaacacacgucacuuca

SEQ ID NO: 362947 - RNA, 22 nt, Human
cuuuucauuguuuguacaugca

SEQ ID NO: 362948 - RNA, 22 nt, Human
uccugagauguggagcuccaug

SEQ ID NO: 362949 - RNA, 22 nt, Human
aggcugagggcuccugagggca

SEQ ID NO: 362950 - RNA, 20 nt, Human
ccugccuguguuugugauga

SEQ ID NO: 362951 - RNA, 22 nt, Human
uucagucagugacuaagcaguu

SEQ ID NO: 362952 - RNA, 22 nt, Human
aggcagugugggccaagcuucc

SEQ ID NO: 362953 - RNA, 22 nt, Human
cugaacucuuuaugacagcuug

SEQ ID NO: 362954 - RNA, 22 nt, Human
aacaaauguguggcaguguggg

SEQ ID NO: 362955 - RNA, 22 nt, Human
gucucuggguuaagcagugcau

SEQ ID NO: 362956 - RNA, 21 nt, Human
acagugugcuucucucccucc

SEQ ID NO: 362957 - RNA, 22 nt, Human
cuuccucacggugcaacaggaa

SEQ ID NO: 362958 - RNA, 22 nt, Human
ucuccuggucaccucagaaguc

SEQ ID NO: 362959 - RNA, 22 nt, Human
ccaaggagcaaggcucaacaag

SEQ ID NO: 362960 - RNA, 22 nt, Human
gaagugaagguuacucuagauu

SEQ ID NO: 362961 - RNA, 22 nt, Human
uggagagguugaauaacuuguc

SEQ ID NO: 362962 - RNA, 22 nt, Human
ccaucccuccuccaccagcuag

SEQ ID NO: 362963 - RNA, 22 nt, Human
uugcauugugauuacagaggug

SEQ ID NO: 362964 - RNA, 22 nt, Human
gagagcuggauucuggauaggu

SEQ ID NO: 362965 - RNA, 22 nt, Human
gagguagcgaguggacagugca

SEQ ID NO: 362966 - RNA, 22 nt, Human
ggucauugucagagccuguacu

SEQ ID NO: 362967 - RNA, 16 nt, Human
gagaagagcccggcag

SEQ ID NO: 362968 - RNA, 19 nt, Human
ccagagagcuagguacaga

SEQ ID NO: 362969 - RNA, 22 nt, Human
uaucagaacacagccacagcca

SEQ ID NO: 362970 - RNA, 22 nt, Human
agagagcccgggccagggcaca

SEQ ID NO: 362971 - RNA, 22 nt, Human
aggauccuuuuucugcuguuug

SEQ ID NO: 362972 - RNA, 23 nt, Human
auacauacagucuuacugacuuu

SEQ ID NO: 362973 - RNA, 22 nt, Human
ggaggccaguccuggccgggcu

SEQ ID NO: 362974 - RNA, 18 nt, Human
uggccuggagacaacucu

SEQ ID NO: 362975 - RNA, 22 nt, Human
augcuuuuccaggagaaauaua

SEQ ID NO: 362976 - RNA, 22 nt, Human
aaagccagugguaugagagaaa

SEQ ID NO: 362977 - RNA, 22 nt, Human
gcagugggagcuuaggcagugc

SEQ ID NO: 362978 - RNA, 22 nt, Human
caguccuuggcaaguucucagu

SEQ ID NO: 362979 - RNA, 22 nt, Human
uccaggcaugucugaguccuuc

SEQ ID NO: 362980 - RNA, 22 nt, Human
cuggcucaauuuguacugcugu

SEQ ID NO: 362981 - RNA, 22 nt, Human
uggauuuaccacagggccacag

SEQ ID NO: 362982 - RNA, 22 nt, Human
uggcagcuguguccagguagaa

SEQ ID NO: 362983 - RNA, 22 nt, Human
ucaguggauuguagaaggcuua

SEQ ID NO: 362984 - RNA, 22 nt, Human
auuugaauggcuuaacacaacg

SEQ ID NO: 362985 - RNA, 22 nt, Human
ccuggccuccuggccuucucau

SEQ ID NO: 362986 - RNA, 22 nt, Human
auaguuguguggggauucuggu

SEQ ID NO: 362987 - RNA, 22 nt, Human
auuuugaugcuaucuaaugaau

SEQ ID NO: 362988 - RNA, 22 nt, Human
cuccauugaacauccucucaga

SEQ ID NO: 362989 - RNA, 22 nt, Human
ugagccugguugcagugucugg

SEQ ID NO: 362990 - RNA, 22 nt, Human
gagguauguaugcuacauucuu

SEQ ID NO: 362991 - RNA, 21 nt, Human
uccugcagggcagcagagugg

SEQ ID NO: 362992 - RNA, 22 nt, Human
agcugagcuaguaguuccagug

SEQ ID NO: 362993 - RNA, 22 nt, Human
ucccagccuuccuuguggugaa

SEQ ID NO: 362994 - RNA, 22 nt, Human
cacuacuugaaagaauuacaga

SEQ ID NO: 362995 - RNA, 22 nt, Human
cauguacauucuguagauggag

SEQ ID NO: 362996 - RNA, 22 nt, Human
gcccaggaucugcucagaucau

SEQ ID NO: 362997 - RNA, 18 nt, Human
ugcccagaaaagcaggga

SEQ ID NO: 362998 - RNA, 23 nt, Human
acaacuuuacagauacauuuugu

SEQ ID NO: 362999 - RNA, 22 nt, Human
gcagggacaccuuugugaagcu

SEQ ID NO: 363000 - RNA, 21 nt, Human
cagaggggcuagccuggcugc

SEQ ID NO: 363001 - RNA, 22 nt, Human
guggaaugaauagauuugcauu

SEQ ID NO: 363002 - RNA, 22 nt, Human
ucagcagcagcucagcauguuu

SEQ ID NO: 363003 - RNA, 21 nt, Human
ccagagagagggaaguggguu

SEQ ID NO: 363004 - RNA, 22 nt, Human
aggccuggcuuugguuugcuga

SEQ ID NO: 363005 - RNA, 22 nt, Human
gcagcuuggugaaaggugaugg

SEQ ID NO: 363006 - RNA, 21 nt, Human
ccuggcagaagccugauaugc

SEQ ID NO: 363007 - RNA, 22 nt, Human
aagucacccuagggccuggacu

SEQ ID NO: 363008 - RNA, 22 nt, Human
cacagaggcaaccuucuggggu

SEQ ID NO: 363009 - RNA, 22 nt, Human
gggcagugguccaggcuacagc

SEQ ID NO: 363010 - RNA, 22 nt, Human
ugaaaugagauaauuuaagugc

SEQ ID NO: 363011 - RNA, 22 nt, Human
ccugucuggaacauggccuguu

SEQ ID NO: 363012 - RNA, 18 nt, Human
caggaugagugaugggga

SEQ ID NO: 363013 - RNA, 22 nt, Human
cugagagaaucaugcugcaggu

SEQ ID NO: 363014 - RNA, 22 nt, Human
aaggcacugcuuugcugcgccc

SEQ ID NO: 363015 - RNA, 22 nt, Human
cccagcccagcguucgaggggu

SEQ ID NO: 363016 - RNA, 22 nt, Human
ggcucaccauuuucacucucug

SEQ ID NO: 363017 - RNA, 22 nt, Human
uuucuucaauugcuaacaagga

SEQ ID NO: 363018 - RNA, 22 nt, Human
agugcuuugguauagaacuauu

SEQ ID NO: 363019 - RNA, 22 nt, Human
uguaaaaccaaaucaaucuagu

SEQ ID NO: 363020 - RNA, 22 nt, Human
agggcacaucugcugggaaugg

SEQ ID NO: 363021 - RNA, 22 nt, Human
ucugugacuugcgggaggagaa

SEQ ID NO: 363022 - RNA, 22 nt, Human
agcagaaccugcagaccugucu

SEQ ID NO: 363023 - RNA, 22 nt, Human
uuuacauuucccucugucaguu

SEQ ID NO: 363024 - RNA, 22 nt, Human
gaggcucacuuucauccucuuc

SEQ ID NO: 363025 - RNA, 22 nt, Human
cagggcagccaggccccguggg

SEQ ID NO: 363026 - RNA, 22 nt, Human
gugcuucucuucacacccaacu

SEQ ID NO: 363027 - RNA, 22 nt, Human
uggagagguuuaaacaaaaguu

SEQ ID NO: 363028 - RNA, 21 nt, Human
aaagaacaggcagauguucuu

SEQ ID NO: 363029 - RNA, 22 nt, Human
cucugggcaaguuucuucauga

SEQ ID NO: 363030 - RNA, 22 nt, Human
cugggcagccucacacaauguu

SEQ ID NO: 363031 - RNA, 22 nt, Human
ggcccucccugagccagguggg

SEQ ID NO: 363032 - RNA, 22 nt, Human
caucagaauguuauggggggcu

SEQ ID NO: 363033 - RNA, 22 nt, Human
ucugcagguguuggaaggguca

SEQ ID NO: 363034 - RNA, 22 nt, Human
uagggcuauucugaguaauaau

SEQ ID NO: 363035 - RNA, 22 nt, Human
uuccucagaaaauacuguccaa

SEQ ID NO: 363036 - RNA, 21 nt, Human
guggccugauuaugaaugggu

SEQ ID NO: 363037 - RNA, 22 nt, Human
cuggaggcacccuuagagaggc

SEQ ID NO: 363038 - RNA, 22 nt, Human
uagucuuuugagaaguauaucu

SEQ ID NO: 363039 - RNA, 22 nt, Human
cugagccauaagggaggcuggg

SEQ ID NO: 363040 - RNA, 22 nt, Human
gcuggccuccugcuagauggaa

SEQ ID NO: 363041 - RNA, 20 nt, Human
gagccugggaagucuaaggu

SEQ ID NO: 363042 - RNA, 22 nt, Human
uacaucauaauaauacuuagaa

SEQ ID NO: 363043 - RNA, 22 nt, Human
auguccuuccauuuugaucugu

SEQ ID NO: 363044 - RNA, 22 nt, Human
ugcagggaaaguguuggcagca

SEQ ID NO: 363045 - RNA, 22 nt, Human
uaagaacauaaauucauacggg

SEQ ID NO: 363046 - RNA, 22 nt, Human
uacaaaguauauuucuagcugu

SEQ ID NO: 363047 - RNA, 22 nt, Human
agcuucuguucaucuuccaggc

SEQ ID NO: 363048 - RNA, 21 nt, Human
aggcacuguuugugguuuggg

SEQ ID NO: 363049 - RNA, 22 nt, Human
aggccagcuguuacuagagcca

SEQ ID NO: 363050 - RNA, 22 nt, Human
cccagcauggagugaggacuca

SEQ ID NO: 363051 - RNA, 22 nt, Human
ugcagggauuauguagggguug

SEQ ID NO: 363052 - RNA, 22 nt, Human
gcagagcuucuguccuucagga

SEQ ID NO: 363053 - RNA, 22 nt, Human
ucaguggauauuucuguggcug

SEQ ID NO: 363054 - RNA, 22 nt, Human
aucuggcucccuuggaauccgu

SEQ ID NO: 363055 - RNA, 19 nt, Human
ggcagcuggacgcuguuca

SEQ ID NO: 363056 - RNA, 22 nt, Human
ucgcugugguuucuguacaugg

SEQ ID NO: 363057 - RNA, 23 nt, Human
gaaucaguggcuaacaaggaaac

SEQ ID NO: 363058 - RNA, 22 nt, Human
agcccagguugaggcugcagug

SEQ ID NO: 363059 - RNA, 22 nt, Human
gacccaggguauccagagcugc

SEQ ID NO: 363060 - RNA, 22 nt, Human
gggagccaaggagagaggccuu

SEQ ID NO: 363061 - RNA, 22 nt, Human
ccugcucagccccagcucaccc

SEQ ID NO: 363062 - RNA, 22 nt, Human
aucuugcauuugcuaaaaugca

SEQ ID NO: 363063 - RNA, 22 nt, Human
uauuacaauuuacauugcacuu

SEQ ID NO: 363064 - RNA, 22 nt, Human
uaaggccagcaugaaugcagca

SEQ ID NO: 363065 - RNA, 22 nt, Human
agcugaagaaaugggaagcauu

SEQ ID NO: 363066 - RNA, 22 nt, Human
ucacaugcccuguauuuaccag

SEQ ID NO: 363067 - RNA, 22 nt, Human
agaauucugacaauagaauugg

SEQ ID NO: 363068 - RNA, 22 nt, Human
acuuaguauuuuucagcuuuga

SEQ ID NO: 363069 - RNA, 22 nt, Human
aucaguuugauaauaaggcuug

SEQ ID NO: 363070 - RNA, 22 nt, Human
ggcugccaggagaagcucagug

SEQ ID NO: 363071 - RNA, 22 nt, Human
uggcagcugccauguccacgug

SEQ ID NO: 363072 - RNA, 22 nt, Human
auccuuggaugugucuuuuugu

SEQ ID NO: 363073 - RNA, 22 nt, Human
ggcuucuuccugugaacauguu

SEQ ID NO: 363074 - RNA, 22 nt, Human
aagaugcuuauugcuccugcag

SEQ ID NO: 363075 - RNA, 22 nt, Human
aggagaaagacuggacagccaa

SEQ ID NO: 363076 - RNA, 22 nt, Human
gggagagagagcucauguugaa

SEQ ID NO: 363077 - RNA, 22 nt, Human
guuaaagaguuuggcuuucuuc

SEQ ID NO: 363078 - RNA, 22 nt, Human
gcagggccagugcagagaggaa

SEQ ID NO: 363079 - RNA, 22 nt, Human
guguccacggcugagaaugauu

SEQ ID NO: 363080 - RNA, 19 nt, Human
auagucuuuccaauuauac

SEQ ID NO: 363081 - RNA, 23 nt, Human
aggauuuaaaggcaaugcauuuu

SEQ ID NO: 363082 - RNA, 22 nt, Human
caguucuuuguggggaguucuc

SEQ ID NO: 363083 - RNA, 22 nt, Human
gagugggcaccgugggcacacu

SEQ ID NO: 363084 - RNA, 22 nt, Human
ggcugagggccagggcuagucu

SEQ ID NO: 363085 - RNA, 22 nt, Human
uccuccuucgggacugcuugac

SEQ ID NO: 363086 - RNA, 23 nt, Human
ggcagcucucaucugaugacuga

SEQ ID NO: 363087 - RNA, 22 nt, Human
uagcagagaggggacaguggca

SEQ ID NO: 363088 - RNA, 22 nt, Human
ggccaggaagggaagaucagca

SEQ ID NO: 363089 - RNA, 22 nt, Human
ccuggagcaaaaaucuaaggag

SEQ ID NO: 363090 - RNA, 22 nt, Human
gaauuucagagguaacaucauc

SEQ ID NO: 363091 - RNA, 22 nt, Human
ucaggagaaggcaauguggaaa

SEQ ID NO: 363092 - RNA, 22 nt, Human
uuuuaauacugcuauuguagga

SEQ ID NO: 363093 - RNA, 22 nt, Human
ucuagaaacaugacauugaucu

SEQ ID NO: 363094 - RNA, 22 nt, Human
gcagaugaggaagcuaaugcug

SEQ ID NO: 363095 - RNA, 22 nt, Human
agaaaugaauauguagugguua

SEQ ID NO: 363096 - RNA, 22 nt, Human
aguaaacauuucagauuuauuu

SEQ ID NO: 363097 - RNA, 22 nt, Human
uugcucugacuggagugcagug

SEQ ID NO: 363098 - RNA, 22 nt, Human
gaaauauugggacucagagcuu

SEQ ID NO: 363099 - RNA, 22 nt, Human
gaacaauagugguaacaaagcc

SEQ ID NO: 363100 - RNA, 22 nt, Human
ugcuggggagugauugaccauc

SEQ ID NO: 363101 - RNA, 22 nt, Human
cagcuguggagauggggugcau

SEQ ID NO: 363102 - RNA, 22 nt, Human
uuucacagguacaaacacuccu

SEQ ID NO: 363103 - RNA, 22 nt, Human
ucagcuggauguggaagugcua

SEQ ID NO: 363104 - RNA, 22 nt, Human
uaggagggcccugaaaauggca

SEQ ID NO: 363105 - RNA, 22 nt, Human
aagaggaggacgguucccagaa

SEQ ID NO: 363106 - RNA, 22 nt, Human
ucccacugcuuugcucugcuca

SEQ ID NO: 363107 - RNA, 22 nt, Human
gcauggcauuugaagguagaag

SEQ ID NO: 363108 - RNA, 22 nt, Human
ugugaaggcagagccagugaaa

SEQ ID NO: 363109 - RNA, 23 nt, Human
acugagccagggccugggucagc

SEQ ID NO: 363110 - RNA, 22 nt, Human
uucuuuuccuacacagcgauuu

SEQ ID NO: 363111 - RNA, 22 nt, Human
auuaggcauuauggggauaagg

SEQ ID NO: 363112 - RNA, 22 nt, Human
gcugcucucucccuaaguuggg

SEQ ID NO: 363113 - RNA, 22 nt, Human
gaggaggaaguucucuguaggc

SEQ ID NO: 363114 - RNA, 22 nt, Human
ggcacugggagaggugagacgg

SEQ ID NO: 363115 - RNA, 22 nt, Human
ucagagagguuaaauaucuugu

SEQ ID NO: 363116 - RNA, 22 nt, Human
auacuaaaguauagaacuuagu

SEQ ID NO: 363117 - RNA, 22 nt, Human
ggugaagggccuuaggagacag

SEQ ID NO: 363118 - RNA, 20 nt, Human
ccagagcugauggcugcccg

SEQ ID NO: 363119 - RNA, 22 nt, Human
ucagagaggauuuuaauaagug

SEQ ID NO: 363120 - RNA, 22 nt, Human
ccuuagagaguacugggcugcc

SEQ ID NO: 363121 - RNA, 22 nt, Human
aguuuuaugcaguguucugaua

SEQ ID NO: 363122 - RNA, 22 nt, Human
uaagaacagugacagccaacau

SEQ ID NO: 363123 - RNA, 22 nt, Human
ucauuuccucaaauucaagguu

SEQ ID NO: 363124 - RNA, 22 nt, Human
caugggagcuaucuccaucacu

SEQ ID NO: 363125 - RNA, 22 nt, Human
uacaaaguuugggguccucaaa

SEQ ID NO: 363126 - RNA, 22 nt, Human
ucaaaugcucuuugcagagagg

SEQ ID NO: 363127 - RNA, 22 nt, Human
uggcuuaauauuucauauuuaa

SEQ ID NO: 363128 - RNA, 22 nt, Human
cugauuccaaagccaaagcuau

SEQ ID NO: 363129 - RNA, 22 nt, Human
uuuaggcauacuuuugggagaa

SEQ ID NO: 363130 - RNA, 22 nt, Human
uaaauucuacaacuucaaagau

SEQ ID NO: 363131 - RNA, 18 nt, Human
ucauagaagugaaucaga

SEQ ID NO: 363132 - RNA, 22 nt, Human
agggcagcagcuccuccuagcu

SEQ ID NO: 363133 - RNA, 22 nt, Human
ccugccuggaucagccauccug

SEQ ID NO: 363134 - RNA, 21 nt, Human
aaauacagaaacuuguuuuca

SEQ ID NO: 363135 - RNA, 22 nt, Human
ucauuauccuaguaucuugaau

SEQ ID NO: 363136 - RNA, 22 nt, Human
aggcaguguguagcuggaagag

SEQ ID NO: 363137 - RNA, 22 nt, Human
agggcagagcugucuaaauggc

SEQ ID NO: 363138 - RNA, 22 nt, Human
ggccuuggggaggauggugucc

SEQ ID NO: 363139 - RNA, 22 nt, Human
aggagccaagcagaacuaagga

SEQ ID NO: 363140 - RNA, 22 nt, Human
gugguaauuuaauccuacacug

SEQ ID NO: 363141 - RNA, 22 nt, Human
aguggcagagcugugucuugaa

SEQ ID NO: 363142 - RNA, 22 nt, Human
ucccagacaaucauuggccacc

SEQ ID NO: 363143 - RNA, 22 nt, Human
ucugggcuuuacacugugcuua

SEQ ID NO: 363144 - RNA, 22 nt, Human
aguuacuugagacguuuaugaa

SEQ ID NO: 363145 - RNA, 22 nt, Human
uuuauauuucccaggauuggcc

SEQ ID NO: 363146 - RNA, 22 nt, Human
agagcaauggcauccagcugau

SEQ ID NO: 363147 - RNA, 22 nt, Human
agauauaauaauuuacaagugu

SEQ ID NO: 363148 - RNA, 20 nt, Human
aaucagaaagugugagcucu

SEQ ID NO: 363149 - RNA, 22 nt, Human
ggcaggaggaagaguuagcacc

SEQ ID NO: 363150 - RNA, 23 nt, Human
ccuggaguacuaaggggauggaa

SEQ ID NO: 363151 - RNA, 22 nt, Human
uuugcauuguuucaaaagugaa

SEQ ID NO: 363152 - RNA, 22 nt, Human
ugaaaugcuguagagacuguau

SEQ ID NO: 363153 - RNA, 22 nt, Human
agcaggcuuguuaugucugaga

SEQ ID NO: 363154 - RNA, 19 nt, Human
ugggcagcucccucugucc

SEQ ID NO: 363155 - RNA, 22 nt, Human
aaaggccagguuggcugguauu

SEQ ID NO: 363156 - RNA, 22 nt, Human
gaguccuuaauacacuggugga

SEQ ID NO: 363157 - RNA, 22 nt, Human
caguccuucauuccuccuuuga

SEQ ID NO: 363158 - RNA, 22 nt, Human
ccaggccucuggcugcuuaguc

SEQ ID NO: 363159 - RNA, 22 nt, Human
guaucuuucccaccaaucacaa

SEQ ID NO: 363160 - RNA, 22 nt, Human
uugaagcauuucuuugagcuuc

SEQ ID NO: 363161 - RNA, 22 nt, Human
uaggccaggacagagcuuccag

SEQ ID NO: 363162 - RNA, 22 nt, Human
gaggccuggguuggaggugcau

SEQ ID NO: 363163 - RNA, 22 nt, Human
uagaauaugugguaggaucugg

SEQ ID NO: 363164 - RNA, 22 nt, Human
uuccugagggacuuuugagauu

SEQ ID NO: 363165 - RNA, 18 nt, Human
auccuugaugagaggucu

SEQ ID NO: 363166 - RNA, 19 nt, Human
aaagcagaggagcaucuga

SEQ ID NO: 363167 - RNA, 22 nt, Human
agcuggagaugcccagcaccgg

SEQ ID NO: 363168 - RNA, 22 nt, Human
aguggagaagaggauggucucc

SEQ ID NO: 363169 - RNA, 22 nt, Human
uacccaggaggaaacugaggcu

SEQ ID NO: 363170 - RNA, 22 nt, Human
uucuuacuaguauguuucagca

SEQ ID NO: 363171 - RNA, 18 nt, Human
uucacaggaaaugucuuu

SEQ ID NO: 363172 - RNA, 22 nt, Human
agaggagugggaagcagugcaa

SEQ ID NO: 363173 - RNA, 22 nt, Human
gugcugucguggaacugggcug

SEQ ID NO: 363174 - RNA, 22 nt, Human
ggggcagaaagcccacagagug

SEQ ID NO: 363175 - RNA, 22 nt, Human
aucaggaucacagaaacuuuua

SEQ ID NO: 363176 - RNA, 22 nt, Human
acuugaauuauauuucuagaga

SEQ ID NO: 363177 - RNA, 22 nt, Human
acugcagcaaagcccgugucuu

SEQ ID NO: 363178 - RNA, 22 nt, Human
ggcagcuucucccaggcuguuu

SEQ ID NO: 363179 - RNA, 22 nt, Human
gucucccacuuucuggccucuu

SEQ ID NO: 363180 - RNA, 22 nt, Human
caaaugugguuucucagcauuc

SEQ ID NO: 363181 - RNA, 22 nt, Human
acaggagaauuaucuggaacaa

SEQ ID NO: 363182 - RNA, 22 nt, Human
aggcaccuugagagcaggagcu

SEQ ID NO: 363183 - RNA, 22 nt, Human
gacagggcaagacucugucuaa

SEQ ID NO: 363184 - RNA, 23 nt, Human
acagagaucuugacuuguaugga

SEQ ID NO: 363185 - RNA, 22 nt, Human
cuggcaguguccagcucgugau

SEQ ID NO: 363186 - RNA, 22 nt, Human
ugaauaguccuuggaauaacug

SEQ ID NO: 363187 - RNA, 22 nt, Human
uaauuucaaauuucuuagcgug

SEQ ID NO: 363188 - RNA, 22 nt, Human
cacaagagagugcgcguugcaa

SEQ ID NO: 363189 - RNA, 22 nt, Human
uagggcagccacccaggcugcu

SEQ ID NO: 363190 - RNA, 22 nt, Human
gauggcagucaaccaggugagg

SEQ ID NO: 363191 - RNA, 22 nt, Human
auacauguuguaccauauguuu

SEQ ID NO: 363192 - RNA, 22 nt, Human
augcuguguuugagaaccuagg

SEQ ID NO: 363193 - RNA, 22 nt, Human
gagggugggccagauaugaggg

SEQ ID NO: 363194 - RNA, 22 nt, Human
gggcuacagacaugcucuaagc

SEQ ID NO: 363195 - RNA, 22 nt, Human
acagaaauauagaagguaggaa

SEQ ID NO: 363196 - RNA, 22 nt, Human
ucucuggaauuuugagagugac

SEQ ID NO: 363197 - RNA, 22 nt, Human
uaagaacaucuguccccagauu

SEQ ID NO: 363198 - RNA, 22 nt, Human
ugaggcaggaggauugcaggau

SEQ ID NO: 363199 - RNA, 22 nt, Human
aagacuuucucccaaauccuca

SEQ ID NO: 363200 - RNA, 22 nt, Human
guuauaaaugacugcaaaaguu

SEQ ID NO: 363201 - RNA, 20 nt, Human
cccagggaccugagcuccau

SEQ ID NO: 363202 - RNA, 22 nt, Human
agggagcucacaguccaguaga

SEQ ID NO: 363203 - RNA, 19 nt, Human
uucuaccuuacuguaggcu

SEQ ID NO: 363204 - RNA, 22 nt, Human
gguuucaacuaaaucaagaagg

SEQ ID NO: 363205 - RNA, 21 nt, Human
uuucaauguguucuuuguagu

SEQ ID NO: 363206 - RNA, 22 nt, Human
agguuuauguuuggugcaggag

SEQ ID NO: 363207 - RNA, 22 nt, Human
ggcuggaaguccaagaucaagg

SEQ ID NO: 363208 - RNA, 22 nt, Human
acccaggaugauaauguucaca

SEQ ID NO: 363209 - RNA, 19 nt, Human
uguuggugcggauguggag

SEQ ID NO: 363210 - RNA, 22 nt, Human
ugcuggguagaaguauuagucu

SEQ ID NO: 363211 - RNA, 22 nt, Human
gggacuggaacuacuggugcag

SEQ ID NO: 363212 - RNA, 22 nt, Human
gugccuggcacacagaaggcaa

SEQ ID NO: 363213 - RNA, 22 nt, Human
auuucauagauuguaaaucccu

SEQ ID NO: 363214 - RNA, 22 nt, Human
caggaugagaagggcucuuacg

SEQ ID NO: 363215 - RNA, 22 nt, Human
guuugcauuuauuagucuucug

SEQ ID NO: 363216 - RNA, 22 nt, Human
guugaaagcuuuucauuuaguu

SEQ ID NO: 363217 - RNA, 22 nt, Human
caaagucauggggaugcagguc

SEQ ID NO: 363218 - RNA, 22 nt, Human
aucagaaauugcuaccagugga

SEQ ID NO: 363219 - RNA, 22 nt, Human
ugcccaggaucuggcgaugcuc

SEQ ID NO: 363220 - RNA, 22 nt, Human
gccuuaauuuuuuauaaucucu

SEQ ID NO: 363221 - RNA, 19 nt, Human
ggucacagggguuacaagg

SEQ ID NO: 363222 - RNA, 22 nt, Human
aaacaugagcauuucuguuuaa

SEQ ID NO: 363223 - RNA, 22 nt, Human
aggcccuguccauggugcugaa

SEQ ID NO: 363224 - RNA, 22 nt, Human
uuucagggagccuagaagagcu

SEQ ID NO: 363225 - RNA, 22 nt, Human
acagcugugaaaauccacagga

SEQ ID NO: 363226 - RNA, 22 nt, Human
aaaugcauguagaauaauagag

SEQ ID NO: 363227 - RNA, 21 nt, Human
guggcccugguguggcugcac

SEQ ID NO: 363228 - RNA, 22 nt, Human
guccugggaaggaagccaggga

SEQ ID NO: 363229 - RNA, 22 nt, Human
aaguccagcucuaaauaucuga

SEQ ID NO: 363230 - RNA, 22 nt, Human
augaggcaguacacacaaagcc

SEQ ID NO: 363231 - RNA, 22 nt, Human
gucucagaguccuacuuauucc

SEQ ID NO: 363232 - RNA, 22 nt, Human
agagcuggcugguagcccugau

SEQ ID NO: 363233 - RNA, 22 nt, Human
gcuggagccuucugcucuguug

SEQ ID NO: 363234 - RNA, 22 nt, Human
auucaaauuaaguuaauucagc

SEQ ID NO: 363235 - RNA, 22 nt, Human
gcucccagggaccgcagggcag

SEQ ID NO: 363236 - RNA, 22 nt, Human
caggccugcaggaaaggcuccc

SEQ ID NO: 363237 - RNA, 22 nt, Human
cagggccagcgucucgggcuau

SEQ ID NO: 363238 - RNA, 22 nt, Human
ucugagcuuuuauuaucaaccu

SEQ ID NO: 363239 - RNA, 22 nt, Human
ugucuguaagguguuuauguua

SEQ ID NO: 363240 - RNA, 22 nt, Human
uccagaauacucugaaaucauu

SEQ ID NO: 363241 - RNA, 22 nt, Human
cagcccaaagccccaggcuaga

SEQ ID NO: 363242 - RNA, 22 nt, Human
ucaaaugcugccuuugugugcc

SEQ ID NO: 363243 - RNA, 22 nt, Human
caguacuuugaagauauuuuag

SEQ ID NO: 363244 - RNA, 22 nt, Human
uccugagagcagaguccaggug

SEQ ID NO: 363245 - RNA, 20 nt, Human
gcauugaguauagacagaug

SEQ ID NO: 363246 - RNA, 22 nt, Human
ugccacaccaacaucuuucagc

SEQ ID NO: 363247 - RNA, 22 nt, Human
uccaggagagguguggggacug

SEQ ID NO: 363248 - RNA, 22 nt, Human
ugaaauuccaggagaguuaaaa

SEQ ID NO: 363249 - RNA, 22 nt, Human
aguggcaguggcugggcagagc

SEQ ID NO: 363250 - RNA, 22 nt, Human
ugguuuaauuuccauuuccuug

SEQ ID NO: 363251 - RNA, 18 nt, Human
auauguuaauuagguagg

SEQ ID NO: 363252 - RNA, 22 nt, Human
uucaggauucucucccauuuac

SEQ ID NO: 363253 - RNA, 22 nt, Human
gaacccaguccaggugcagccu

SEQ ID NO: 363254 - RNA, 22 nt, Human
gcugggagcccuggucugcucc

SEQ ID NO: 363255 - RNA, 22 nt, Human
uagaauaugauuaauuuucuua

SEQ ID NO: 363256 - RNA, 22 nt, Human
ccuccaggauaagucagggccu

SEQ ID NO: 363257 - RNA, 22 nt, Human
ucuucaaagaauuuuaguaauu

SEQ ID NO: 363258 - RNA, 22 nt, Human
gaagcuucguggcucuucaaau

SEQ ID NO: 363259 - RNA, 22 nt, Human
guccucuggccuuucccaggac

SEQ ID NO: 363260 - RNA, 22 nt, Human
uuagcugcauuaucaaaguuau

SEQ ID NO: 363261 - RNA, 22 nt, Human
ucuaaacacuaagucuugaugc

SEQ ID NO: 363262 - RNA, 22 nt, Human
uggagaaggacagccugagaaa

SEQ ID NO: 363263 - RNA, 19 nt, Human
gggcuucugggaucaagag

SEQ ID NO: 363264 - RNA, 22 nt, Human
aaggaaccuggaguagagggag

SEQ ID NO: 363265 - RNA, 22 nt, Human
uccagugguacauggagacacu

SEQ ID NO: 363266 - RNA, 22 nt, Human
ugggauaguggccaggaccccc

SEQ ID NO: 363267 - RNA, 22 nt, Human
uccugggcugcagggaagagca

SEQ ID NO: 363268 - RNA, 22 nt, Human
agcugguucauucauucauggu

SEQ ID NO: 363269 - RNA, 22 nt, Human
cucugggcaaagaugccucauc

SEQ ID NO: 363270 - RNA, 22 nt, Human
caaaugcauaguuuauaagaag

SEQ ID NO: 363271 - RNA, 22 nt, Human
uuacuuuggguccugcuuauaa

SEQ ID NO: 363272 - RNA, 22 nt, Human
acauuucuauagugcaucuguu

SEQ ID NO: 363273 - RNA, 22 nt, Human
accucugccacuuucuaacucu

SEQ ID NO: 363274 - RNA, 22 nt, Human
cagaggcacagcuucuuuuaau

SEQ ID NO: 363275 - RNA, 22 nt, Human
cccaggcucccaggugggacaa

SEQ ID NO: 363276 - RNA, 22 nt, Human
aagcaccucuaugauugcuuuu

SEQ ID NO: 363277 - RNA, 23 nt, Human
ucugucacuuucugcuguggagu

SEQ ID NO: 363278 - RNA, 22 nt, Human
cuggggcugcggacgggagccc

SEQ ID NO: 363279 - RNA, 23 nt, Human
cuggccuccgacacuggccaaga

SEQ ID NO: 363280 - RNA, 22 nt, Human
aggugauguccacagcuugcag

SEQ ID NO: 363281 - RNA, 22 nt, Human
gcugucugagaacaugguggaa

SEQ ID NO: 363282 - RNA, 22 nt, Human
gcugcuguugauuuaguccaau

SEQ ID NO: 363283 - RNA, 22 nt, Human
ggaagccaggccaaugagaaca

SEQ ID NO: 363284 - RNA, 22 nt, Human
ugcagcagcagggaggaggcuc

SEQ ID NO: 363285 - RNA, 22 nt, Human
auuacaguaacagcuacaaugc

SEQ ID NO: 363286 - RNA, 22 nt, Human
uggcagaguucgcugugccuuu

SEQ ID NO: 363287 - RNA, 22 nt, Human
uguggcugucuguucuccuagg

SEQ ID NO: 363288 - RNA, 22 nt, Human
ugaggcaggaguucaggcugcg

SEQ ID NO: 363289 - RNA, 22 nt, Human
gacagcagacagaacuaccugc

SEQ ID NO: 363290 - RNA, 22 nt, Human
cugaaggauuagagagcacuua

SEQ ID NO: 363291 - RNA, 22 nt, Human
gagcacagaaucuucccaugca

SEQ ID NO: 363292 - RNA, 22 nt, Human
agcagcauggagaaaccguuca

SEQ ID NO: 363293 - RNA, 22 nt, Human
cuuucacagcugugcuuaugau

SEQ ID NO: 363294 - RNA, 22 nt, Human
aggaccaacauagcagcagugg

SEQ ID NO: 363295 - RNA, 22 nt, Human
aacccgggaggcagagguugug

SEQ ID NO: 363296 - RNA, 22 nt, Human
gcugccugcacagagcugcuuu

SEQ ID NO: 363297 - RNA, 22 nt, Human
acaggcugcccgcuccccaccu

SEQ ID NO: 363298 - RNA, 22 nt, Human
ccagccuuacugcccuucagug

SEQ ID NO: 363299 - RNA, 22 nt, Human
uggagaggagcaccauggccau

SEQ ID NO: 363300 - RNA, 22 nt, Human
uaggcaggugugcacugcccac

SEQ ID NO: 363301 - RNA, 22 nt, Human
ugcugcuguauccuuaguguca

SEQ ID NO: 363302 - RNA, 22 nt, Human
gccaggagaaugcuagcagagg

SEQ ID NO: 363303 - RNA, 19 nt, Human
gcccugcaggagguggggc

SEQ ID NO: 363304 - RNA, 22 nt, Human
ucucagagagcuguguuuuccu

SEQ ID NO: 363305 - RNA, 22 nt, Human
aauauaugugguauugaccagc

SEQ ID NO: 363306 - RNA, 22 nt, Human
cagucccacaagaucuccacaa

SEQ ID NO: 363307 - RNA, 22 nt, Human
uucuucuuaauguccugggaac

SEQ ID NO: 363308 - RNA, 17 nt, Human
aaguccagccugcagcu

SEQ ID NO: 363309 - RNA, 22 nt, Human
aacuuucagaauccuaugcauu

SEQ ID NO: 363310 - RNA, 22 nt, Human
agaagcuuccuacauuguucuu

SEQ ID NO: 363311 - RNA, 22 nt, Human
caggaacacaaugagucucaaa

SEQ ID NO: 363312 - RNA, 22 nt, Human
gcugagguaggagguugcagug

SEQ ID NO: 363313 - RNA, 22 nt, Human
cucaguuucugacauuaaaauc

SEQ ID NO: 363314 - RNA, 22 nt, Human
aggccuggugugccggaugcag

SEQ ID NO: 363315 - RNA, 22 nt, Human
cugcugggcuccucaugugacu

SEQ ID NO: 363316 - RNA, 22 nt, Human
cuggcuucugggccagggcaga

SEQ ID NO: 363317 - RNA, 23 nt, Human
uggaaagcggaccuggggcagag

SEQ ID NO: 363318 - RNA, 22 nt, Human
cucuuaaaaacuugauauauuu

SEQ ID NO: 363319 - RNA, 22 nt, Human
guccucugacucagccuuggga

SEQ ID NO: 363320 - RNA, 22 nt, Human
auaaggcagaaaugauucuagu

SEQ ID NO: 363321 - RNA, 22 nt, Human
gagagggccagggugagaacua

SEQ ID NO: 363322 - RNA, 22 nt, Human
gaaugaauucagcacauggaau

SEQ ID NO: 363323 - RNA, 17 nt, Human
ggcagcugccacuuuuu

SEQ ID NO: 363324 - RNA, 22 nt, Human
gagcuuccauggacgccaucug

SEQ ID NO: 363325 - RNA, 22 nt, Human
cuggcagcguguuuaugaacau

SEQ ID NO: 363326 - RNA, 22 nt, Human
augggcagacagggagcucacg

SEQ ID NO: 363327 - RNA, 22 nt, Human
cagagguagaaggcaugcagug

SEQ ID NO: 363328 - RNA, 22 nt, Human
agguagaggccuccaggcagca

SEQ ID NO: 363329 - RNA, 22 nt, Human
aggcaguggaaggagaaagcaa

SEQ ID NO: 363330 - RNA, 22 nt, Human
uaauuuacuugcaaauaacaau

SEQ ID NO: 363331 - RNA, 22 nt, Human
uucauacaguggcugcacucca

SEQ ID NO: 363332 - RNA, 22 nt, Human
acagggcccuugccagcacaag

SEQ ID NO: 363333 - RNA, 22 nt, Human
gagcagcugagcuggaaugaga

SEQ ID NO: 363334 - RNA, 22 nt, Human
acuucuucuucagcugggggau

SEQ ID NO: 363335 - RNA, 22 nt, Human
uuauuuacaacucuucucuucc

SEQ ID NO: 363336 - RNA, 22 nt, Human
acugcuuacaaaaggaaagaau

SEQ ID NO: 363337 - RNA, 22 nt, Human
cuguccuggagggcauaggacg

SEQ ID NO: 363338 - RNA, 22 nt, Human
aggcacagagaaugcccuccau

SEQ ID NO: 363339 - RNA, 22 nt, Human
aauaugcauuaacuguguacau

SEQ ID NO: 363340 - RNA, 22 nt, Human
uggagcugggaguccugggcug

SEQ ID NO: 363341 - RNA, 22 nt, Human
aagagcuggagcugcuacagga

SEQ ID NO: 363342 - RNA, 22 nt, Human
cccuguccuuggcugugaggcu

SEQ ID NO: 363343 - RNA, 22 nt, Human
uugcaggggaaggagcagagcu

SEQ ID NO: 363344 - RNA, 22 nt, Human
ucaguggauuggaugagaucug

SEQ ID NO: 363345 - RNA, 22 nt, Human
aauaauuuccagccaacuggaa

SEQ ID NO: 363346 - RNA, 22 nt, Human
cugucuguuucugauucaaccu

SEQ ID NO: 363347 - RNA, 22 nt, Human
cagcauggggcuuggagucagc

SEQ ID NO: 363348 - RNA, 22 nt, Human
uacuguauuugauaagugaagu

SEQ ID NO: 363349 - RNA, 23 nt, Human
ggccauggagacuuagaaugggc

SEQ ID NO: 363350 - RNA, 22 nt, Human
uuagauaaauuaagacuuuaca

SEQ ID NO: 363351 - RNA, 22 nt, Human
gcacagccagcaucugagggau

SEQ ID NO: 363352 - RNA, 23 nt, Human
agaggcaggaguggcuugcccgg

SEQ ID NO: 363353 - RNA, 22 nt, Human
agcagggcucugccaugggccc

SEQ ID NO: 363354 - RNA, 22 nt, Human
aagagcauggaauggagaucca

SEQ ID NO: 363355 - RNA, 22 nt, Human
uaacacacugaaggugagaugg

SEQ ID NO: 363356 - RNA, 22 nt, Human
aacugcuguggccuaguacuua

SEQ ID NO: 363357 - RNA, 22 nt, Human
ggcugccuccugcugggcugga

SEQ ID NO: 363358 - RNA, 20 nt, Human
auaaaauaacugccacaaga

SEQ ID NO: 363359 - RNA, 22 nt, Human
ugggcagaucuuugguggcuag

SEQ ID NO: 363360 - RNA, 22 nt, Human
uaugcacacauguaugcaugug

SEQ ID NO: 363361 - RNA, 22 nt, Human
ugcauccuuaaccagcaucacu

SEQ ID NO: 363362 - RNA, 22 nt, Human
uggagcagcacaagaaagggga

SEQ ID NO: 363363 - RNA, 22 nt, Human
ugcagaaggaggaggaaaucca

SEQ ID NO: 363364 - RNA, 22 nt, Human
aaaguucaugguguuauagaaa

SEQ ID NO: 363365 - RNA, 22 nt, Human
aaaguucagauuagacucaaga

SEQ ID NO: 363366 - RNA, 22 nt, Human
cuuuacagaauaagaauacugg

SEQ ID NO: 363367 - RNA, 22 nt, Human
ucugcuguaaagaauuucugcc

SEQ ID NO: 363368 - RNA, 22 nt, Human
aaauugcaaaaguacuuuuagg

SEQ ID NO: 363369 - RNA, 22 nt, Human
gcaaggagacuguagggccaag

SEQ ID NO: 363370 - RNA, 22 nt, Human
auaaaugccucagaaucauccc

SEQ ID NO: 363371 - RNA, 22 nt, Human
aucaggauucaccccagagcug

SEQ ID NO: 363372 - RNA, 22 nt, Human
augaggcaugugaggagaaggg

SEQ ID NO: 363373 - RNA, 20 nt, Human
ccugucucacguuccgcccc

SEQ ID NO: 363374 - RNA, 22 nt, Human
gcuucccagcagaggaaagacu

SEQ ID NO: 363375 - RNA, 22 nt, Human
gaagucugacucuuuguaagcu

SEQ ID NO: 363376 - RNA, 22 nt, Human
gggcucugcgcucagcuccagc

SEQ ID NO: 363377 - RNA, 19 nt, Human
ccauggcaaugaucugaug

SEQ ID NO: 363378 - RNA, 22 nt, Human
acaguggaagaagcacugaacu

SEQ ID NO: 363379 - RNA, 22 nt, Human
agccuucagcaguucaggugcc

SEQ ID NO: 363380 - RNA, 22 nt, Human
auuaaagaaacccagcauguga

SEQ ID NO: 363381 - RNA, 22 nt, Human
uuaaguccuugguaauuuucuu

SEQ ID NO: 363382 - RNA, 22 nt, Human
accaggggaugguuggcacugu

SEQ ID NO: 363383 - RNA, 22 nt, Human
ucccuccuggugagcaggggcu

SEQ ID NO: 363384 - RNA, 22 nt, Human
aggcacuggucuaccccuuagu

SEQ ID NO: 363385 - RNA, 22 nt, Human
ucaugcacaugugucaccauca

SEQ ID NO: 363386 - RNA, 23 nt, Human
uuuauccaacucuguaaucucuc

SEQ ID NO: 363387 - RNA, 22 nt, Human
aaaucaguaaauguucauuaac

SEQ ID NO: 363388 - RNA, 22 nt, Human
auuuccaagaaagcuuuaggau

SEQ ID NO: 363389 - RNA, 22 nt, Human
uggcugaaggaagauucuucua

SEQ ID NO: 363390 - RNA, 22 nt, Human
aggccaggcaacauucugaagu

SEQ ID NO: 363391 - RNA, 22 nt, Human
uggcagcugguacagugggucu

SEQ ID NO: 363392 - RNA, 22 nt, Human
agaggagguccuuuucugaugu

SEQ ID NO: 363393 - RNA, 22 nt, Human
gcucccaguucccaaagugacc

SEQ ID NO: 363394 - RNA, 23 nt, Human
aucaaaguggaaaucaauuaucu

SEQ ID NO: 363395 - RNA, 22 nt, Human
cacaggguuguucugaggauuc

SEQ ID NO: 363396 - RNA, 22 nt, Human
augaggcauucacagaaggcac

SEQ ID NO: 363397 - RNA, 22 nt, Human
ggguggaggagaacaggcccca

SEQ ID NO: 363398 - RNA, 22 nt, Human
gagccaggucgggccgcggcga

SEQ ID NO: 363399 - RNA, 22 nt, Human
uggcucagugcauucacaguaa

SEQ ID NO: 363400 - RNA, 21 nt, Human
auuuccaaauaaggucacauu

SEQ ID NO: 363401 - RNA, 22 nt, Human
caguguccucagccagcagcua

SEQ ID NO: 363402 - RNA, 22 nt, Human
aauuagggagagguagcuaggu

SEQ ID NO: 363403 - RNA, 22 nt, Human
ggcuuugccuggaauuuccuug

SEQ ID NO: 363404 - RNA, 22 nt, Human
acuguacuguguauuguagaau

SEQ ID NO: 363405 - RNA, 22 nt, Human
augcacuugcguguuugcaaau

SEQ ID NO: 363406 - RNA, 22 nt, Human
aacaaucaaguuucuaaaugac

SEQ ID NO: 363407 - RNA, 22 nt, Human
uugugguuaaccgcacauuuuu

SEQ ID NO: 363408 - RNA, 22 nt, Human
gacagggcgagacucagucuca

SEQ ID NO: 363409 - RNA, 23 nt, Human
cccagcagagaugaggagggguc

SEQ ID NO: 363410 - RNA, 22 nt, Human
gggcugagauuggugcccuguc

SEQ ID NO: 363411 - RNA, 20 nt, Human
ugucagugccugaggcacag

SEQ ID NO: 363412 - RNA, 22 nt, Human
ugaaagguuauuuaggucugcu

SEQ ID NO: 363413 - RNA, 22 nt, Human
cagaacugggcagggagcagag

SEQ ID NO: 363414 - RNA, 22 nt, Human
ugcaggccggcccuaggccuca

SEQ ID NO: 363415 - RNA, 22 nt, Human
ggggcagagagaaggaagcuug

SEQ ID NO: 363416 - RNA, 22 nt, Human
ccacacugaaccucagugucuu

SEQ ID NO: 363417 - RNA, 22 nt, Human
ccuggccugugaaucugagagc

SEQ ID NO: 363418 - RNA, 19 nt, Human
aggacucuggaggcaugag

SEQ ID NO: 363419 - RNA, 22 nt, Human
ccagcccugccucucagggccc

SEQ ID NO: 363420 - RNA, 22 nt, Human
cagagccaggccugcccucuuu

SEQ ID NO: 363421 - RNA, 22 nt, Human
uucuuaacucaaauauauaucc

SEQ ID NO: 363422 - RNA, 18 nt, Human
uccgaggcaccauaaaaa

SEQ ID NO: 363423 - RNA, 20 nt, Human
guaaugaauguaaacaguaa

SEQ ID NO: 363424 - RNA, 22 nt, Human
ugcaggagacauaauagggacu

SEQ ID NO: 363425 - RNA, 22 nt, Human
uguucuugagccuuuagaccua

SEQ ID NO: 363426 - RNA, 22 nt, Human
cccaggaacagggcucagaccc

SEQ ID NO: 363427 - RNA, 22 nt, Human
uuucaacuuguuugcuuccaua

SEQ ID NO: 363428 - RNA, 22 nt, Human
uacugaaaagccacaaggacca

SEQ ID NO: 363429 - RNA, 22 nt, Human
uucuuuucuuuaggcauugugu

SEQ ID NO: 363430 - RNA, 22 nt, Human
cgccaggcuugguagcucaugc

SEQ ID NO: 363431 - RNA, 22 nt, Human
uucaacuaauguuuauuuuaug

SEQ ID NO: 363432 - RNA, 22 nt, Human
uguggcuuaagaaugccuuuaa

SEQ ID NO: 363433 - RNA, 22 nt, Human
cauuugcagagggugacacucu

SEQ ID NO: 363434 - RNA, 22 nt, Human
guuagaaagugucugcuugggu

SEQ ID NO: 363435 - RNA, 22 nt, Human
uggcugaggagagggcggaagu

SEQ ID NO: 363436 - RNA, 22 nt, Human
uggcuggcuagugggcaggauu

SEQ ID NO: 363437 - RNA, 22 nt, Human
agagcugaauuuggguggugga

SEQ ID NO: 363438 - RNA, 22 nt, Human
ggcuucagugacuggugcccuc

SEQ ID NO: 363439 - RNA, 22 nt, Human
caggcagcugcuggguucagcc

SEQ ID NO: 363440 - RNA, 22 nt, Human
gcucugcugucuucuugcaggc

SEQ ID NO: 363441 - RNA, 22 nt, Human
uggaaggaagccaaggaagguu

SEQ ID NO: 363442 - RNA, 22 nt, Human
caggccugucugcacaugaggc

SEQ ID NO: 363443 - RNA, 22 nt, Human
agaagccauaguaucucagggu

SEQ ID NO: 363444 - RNA, 22 nt, Human
agagcuguucagcagccagguu

SEQ ID NO: 363445 - RNA, 22 nt, Human
aggcugcugccuuggagagugu

SEQ ID NO: 363446 - RNA, 22 nt, Human
aaacucuguagcuaaacauaau

SEQ ID NO: 363447 - RNA, 22 nt, Human
uggaagggggaagacagcucug

SEQ ID NO: 363448 - RNA, 22 nt, Human
aggugucugugaugggagcgau

SEQ ID NO: 363449 - RNA, 22 nt, Human
gagggucccgagcccugucaga

SEQ ID NO: 363450 - RNA, 22 nt, Human
auaaaaguuuccaaucaugccu

SEQ ID NO: 363451 - RNA, 22 nt, Human
gaguguucccacaccccaguug

SEQ ID NO: 363452 - RNA, 22 nt, Human
cuccagggcagcauggcagugg

SEQ ID NO: 363453 - RNA, 22 nt, Human
ucacauuugcaauugcauuguu

SEQ ID NO: 363454 - RNA, 22 nt, Human
ccagcucugcagggccuggggu

SEQ ID NO: 363455 - RNA, 22 nt, Human
aaggcgacacaggcagcaggcc

SEQ ID NO: 363456 - RNA, 20 nt, Human
agcauuugaaauaugacuau

SEQ ID NO: 363457 - RNA, 22 nt, Human
aaauguguuucgaaaacuggug

SEQ ID NO: 363458 - RNA, 22 nt, Human
cuguagccagaagcagaaggcc

SEQ ID NO: 363459 - RNA, 22 nt, Human
uacaguauguucuugaauuugg

SEQ ID NO: 363460 - RNA, 22 nt, Human
uauuccaguucaccuuuucauc

SEQ ID NO: 363461 - RNA, 23 nt, Human
uggcucugugucacauacaggau

SEQ ID NO: 363462 - RNA, 22 nt, Human
uggacaggugagugacucaggg

SEQ ID NO: 363463 - RNA, 18 nt, Human
cugcuugggagacgucag

SEQ ID NO: 363464 - RNA, 22 nt, Human
aggggaaggccagccuguagag

SEQ ID NO: 363465 - RNA, 22 nt, Human
uggcagcuagauaguguguuua

SEQ ID NO: 363466 - RNA, 22 nt, Human
aagagcugcacauauuuauauc

SEQ ID NO: 363467 - RNA, 22 nt, Human
acauaauagcauuucuaauuug

SEQ ID NO: 363468 - RNA, 23 nt, Human
gacacaggagcacccagcugagc

SEQ ID NO: 363469 - RNA, 21 nt, Human
gcaaggcuuuuguguuuccca

SEQ ID NO: 363470 - RNA, 22 nt, Human
caaaugcaugagaaauaagagg

SEQ ID NO: 363471 - RNA, 22 nt, Human
gcaggguauaauacuuagguga

SEQ ID NO: 363472 - RNA, 22 nt, Human
cccaggagaauauaauguucuu

SEQ ID NO: 363473 - RNA, 22 nt, Human
cauuauguucaguagcuuaaaa

SEQ ID NO: 363474 - RNA, 22 nt, Human
aacauugccaugguuaauuuua

SEQ ID NO: 363475 - RNA, 22 nt, Human
gcaacuuucaagcaccaugggg

SEQ ID NO: 363476 - RNA, 22 nt, Human
ucacagcaaaagugugcagagc

SEQ ID NO: 363477 - RNA, 22 nt, Human
acucccagguugccuggcaggc

SEQ ID NO: 363478 - RNA, 22 nt, Human
uuaauucuaguuuaacacuuag

SEQ ID NO: 363479 - RNA, 22 nt, Human
ucauguaaguauagaaagcagu

SEQ ID NO: 363480 - RNA, 22 nt, Human
cugugccuuuguagcugugccu

SEQ ID NO: 363481 - RNA, 22 nt, Human
uccauuggucucugugcccagg

SEQ ID NO: 363482 - RNA, 22 nt, Human
gaaagaggaaggagauguauua

SEQ ID NO: 363483 - RNA, 22 nt, Human
gucccuggaauggacucugcgc

SEQ ID NO: 363484 - RNA, 22 nt, Human
ccuggcagguggcgcccucggc

SEQ ID NO: 363485 - RNA, 22 nt, Human
agcugccaccucugccuuuggg

SEQ ID NO: 363486 - RNA, 22 nt, Human
gagaaagauggaaucuuacagg

SEQ ID NO: 363487 - RNA, 22 nt, Human
gcaggcagguggcaucuuguga

SEQ ID NO: 363488 - RNA, 23 nt, Human
cugcuguguuggucucgauggga

SEQ ID NO: 363489 - RNA, 22 nt, Human
aagauggagcacgagcagaagc

SEQ ID NO: 363490 - RNA, 22 nt, Human
uagucaaaccucagaauacccc

SEQ ID NO: 363491 - RNA, 17 nt, Human
aguggcaggcagauggg

SEQ ID NO: 363492 - RNA, 22 nt, Human
cagggcucaggcucugggauuc

SEQ ID NO: 363493 - RNA, 19 nt, Human
acuggcaguuucugcaugg

SEQ ID NO: 363494 - RNA, 22 nt, Human
gcagcuuuagaaacaagggcug

SEQ ID NO: 363495 - RNA, 22 nt, Human
agaagugccauacuguggucca

SEQ ID NO: 363496 - RNA, 22 nt, Human
uugauacaggcucuauuucauc

SEQ ID NO: 363497 - RNA, 22 nt, Human
ggcaggugaccuggccucccag

SEQ ID NO: 363498 - RNA, 18 nt, Human
acauuucuaugcuucugg

SEQ ID NO: 363499 - RNA, 22 nt, Human
caugggcaguuggcagggcuca

SEQ ID NO: 363500 - RNA, 22 nt, Human
uguuucaggaccuaucuuuuag

SEQ ID NO: 363501 - RNA, 22 nt, Human
uccaguggagugugggggugaa

SEQ ID NO: 363502 - RNA, 22 nt, Human
gcccucugcacagcucugagca

SEQ ID NO: 363503 - RNA, 22 nt, Human
ugauuucccucaucauaacaga

SEQ ID NO: 363504 - RNA, 22 nt, Human
cuggcucaugugaugagggcaa

SEQ ID NO: 363505 - RNA, 22 nt, Human
ucuggagcaacagagcaggaca

SEQ ID NO: 363506 - RNA, 22 nt, Human
aggcaggugggucacuugaguc

SEQ ID NO: 363507 - RNA, 22 nt, Human
uggcucagucauggaugaguaa

SEQ ID NO: 363508 - RNA, 22 nt, Human
gaauuucaaaagccagaacggg

SEQ ID NO: 363509 - RNA, 22 nt, Human
ucugucacuuuuauuuacugaa

SEQ ID NO: 363510 - RNA, 22 nt, Human
gagguuagaggucagugcaguc

SEQ ID NO: 363511 - RNA, 22 nt, Human
ugaaagguuaaaaguaguauug

SEQ ID NO: 363512 - RNA, 22 nt, Human
agccaacuaggagauuaaggua

SEQ ID NO: 363513 - RNA, 22 nt, Human
agagaaggucacuaaggaccca

SEQ ID NO: 363514 - RNA, 22 nt, Human
agccaaggagugcagguggcuu

SEQ ID NO: 363515 - RNA, 22 nt, Human
agcagcagauccaaaaaaugug

SEQ ID NO: 363516 - RNA, 22 nt, Human
cuggccuuuaaaaugaccuuau

SEQ ID NO: 363517 - RNA, 22 nt, Human
gcuguauuuaacaacuggcuca

SEQ ID NO: 363518 - RNA, 21 nt, Human
gcagcaguguucuagaauacu

SEQ ID NO: 363519 - RNA, 22 nt, Human
cccaggaaaucaggcuuucuag

SEQ ID NO: 363520 - RNA, 21 nt, Human
gcagccagacgggauucaguu

SEQ ID NO: 363521 - RNA, 22 nt, Human
aaaauguaaagcuugaguguag

SEQ ID NO: 363522 - RNA, 22 nt, Human
acccagggaccccgcugacgcc

SEQ ID NO: 363523 - RNA, 22 nt, Human
cacuucaauuaacuucagcauu

SEQ ID NO: 363524 - RNA, 19 nt, Human
ggugugaagugaggaguua

SEQ ID NO: 363525 - RNA, 22 nt, Human
cuggagccugcaguuuucacuu

SEQ ID NO: 363526 - RNA, 21 nt, Human
acucaggagacuaacuauguc

SEQ ID NO: 363527 - RNA, 22 nt, Human
aaagccaugaauguuauagagg

SEQ ID NO: 363528 - RNA, 22 nt, Human
ucuguggccuguguccaagugc

SEQ ID NO: 363529 - RNA, 22 nt, Human
aaaagagguuaaccaggugugu

SEQ ID NO: 363530 - RNA, 22 nt, Human
uccugccucaggcucuggagua

SEQ ID NO: 363531 - RNA, 19 nt, Human
caggaaggggcgaaucugg

SEQ ID NO: 363532 - RNA, 22 nt, Human
gggccuggugcuucugacuccu

SEQ ID NO: 363533 - RNA, 22 nt, Human
agaauucuggaguugggaggaa

SEQ ID NO: 363534 - RNA, 22 nt, Human
ucucucuucaacccuuaacuag

SEQ ID NO: 363535 - RNA, 22 nt, Human
aggcuucccagcugagcucagc

SEQ ID NO: 363536 - RNA, 22 nt, Human
aggauuuagcaugaaaugugaa

SEQ ID NO: 363537 - RNA, 22 nt, Human
gugauuuugagaccuauauagu

SEQ ID NO: 363538 - RNA, 22 nt, Human
guuauuuuaucucugagagguu

SEQ ID NO: 363539 - RNA, 22 nt, Human
aagaacaguugggaggugagcc

SEQ ID NO: 363540 - RNA, 22 nt, Human
ucacaucuuauuagaguaucuc

SEQ ID NO: 363541 - RNA, 22 nt, Human
cagagccaaaugcugugguuau

SEQ ID NO: 363542 - RNA, 22 nt, Human
ggucccugaagaggccuggggu

SEQ ID NO: 363543 - RNA, 22 nt, Human
uggcugcaguucacaggagcaa

SEQ ID NO: 363544 - RNA, 22 nt, Human
cagaggccaccuguggccacug

SEQ ID NO: 363545 - RNA, 22 nt, Human
caaaggcaggcccccugugcag

SEQ ID NO: 363546 - RNA, 22 nt, Human
uuucccaauugagagguucugu

SEQ ID NO: 363547 - RNA, 22 nt, Human
uuauagaaggagcauucacuua

SEQ ID NO: 363548 - RNA, 22 nt, Human
uuccaugacaccgagggaaguc

SEQ ID NO: 363549 - RNA, 22 nt, Human
ugaaggaaugaguauacuguuu

SEQ ID NO: 363550 - RNA, 22 nt, Human
agagagcauggcacagaggggu

SEQ ID NO: 363551 - RNA, 22 nt, Human
ugcagccauuuucugccaaugc

SEQ ID NO: 363552 - RNA, 19 nt, Human
gggaaauucacuugcuucc

SEQ ID NO: 363553 - RNA, 22 nt, Human
cagaggcucagauggcccuggc

SEQ ID NO: 363554 - RNA, 22 nt, Human
cugggcacauuuugacuagugu

SEQ ID NO: 363555 - RNA, 22 nt, Human
gugcccugguccccagcauaua

SEQ ID NO: 363556 - RNA, 22 nt, Human
uucaacuagauuuauacaauuc

SEQ ID NO: 363557 - RNA, 22 nt, Human
agggcugaugcaccauguagcc

SEQ ID NO: 363558 - RNA, 20 nt, Human
cucugcuuuaggagagucag

SEQ ID NO: 363559 - RNA, 20 nt, Human
aggcucaggguguuuaggaa

SEQ ID NO: 363560 - RNA, 22 nt, Human
ccagggcuccauugcucauccu

SEQ ID NO: 363561 - RNA, 22 nt, Human
aauucaugaguagaaucuauau

SEQ ID NO: 363562 - RNA, 22 nt, Human
auaacagaugugaagugcuaau

SEQ ID NO: 363563 - RNA, 21 nt, Human
uuugagaauuggucagagugc

SEQ ID NO: 363564 - RNA, 22 nt, Human
uuccuugguagagagaauauuu

SEQ ID NO: 363565 - RNA, 23 nt, Human
ucuguacaauugagaagagaaca

SEQ ID NO: 363566 - RNA, 22 nt, Human
uuuccaaaggaguaccacgcau

SEQ ID NO: 363567 - RNA, 18 nt, Human
ugugguggagcugccuuc

SEQ ID NO: 363568 - RNA, 22 nt, Human
cagagcuguuacuauucaugaa

SEQ ID NO: 363569 - RNA, 22 nt, Human
acccagccacagcauugaggga

SEQ ID NO: 363570 - RNA, 22 nt, Human
aagaguuuucuauaaucuuggc

SEQ ID NO: 363571 - RNA, 22 nt, Human
ucaugcaaggcugaaacauggu

SEQ ID NO: 363572 - RNA, 22 nt, Human
uguuuuguuuaugagagcacag

SEQ ID NO: 363573 - RNA, 21 nt, Human
ugaaaugagaaugcugagcac

SEQ ID NO: 363574 - RNA, 22 nt, Human
ucuguucauguugggcuuuucc

SEQ ID NO: 363575 - RNA, 23 nt, Human
gaagcagaugucugaguaggcag

SEQ ID NO: 363576 - RNA, 22 nt, Human
uauuauguagaguaaggguuaa

SEQ ID NO: 363577 - RNA, 22 nt, Human
aaggcagaaauucaacuacugg

SEQ ID NO: 363578 - RNA, 22 nt, Human
gagauuuagcugcuuaacuccu

SEQ ID NO: 363579 - RNA, 22 nt, Human
ggacacaguggaagacagcuug

SEQ ID NO: 363580 - RNA, 22 nt, Human
uauguacaucguugaauucaaa

SEQ ID NO: 363581 - RNA, 22 nt, Human
accagaguaauguguggaaauu

SEQ ID NO: 363582 - RNA, 22 nt, Human
aaagaagggacagacugccucu

SEQ ID NO: 363583 - RNA, 22 nt, Human
gcuuuggagccuguguucugcc

SEQ ID NO: 363584 - RNA, 22 nt, Human
gggcucagccccauugaaccag

SEQ ID NO: 363585 - RNA, 22 nt, Human
agaugaagauaucugcaggggc

SEQ ID NO: 363586 - RNA, 22 nt, Human
ucuggagcuuguuucagauggu

SEQ ID NO: 363587 - RNA, 22 nt, Human
gcagcauuaccaagacauggca

SEQ ID NO: 363588 - RNA, 22 nt, Human
cugcccugucuuuuucugauga

SEQ ID NO: 363589 - RNA, 22 nt, Human
ccagcugcgggcaucgagaguu

SEQ ID NO: 363590 - RNA, 22 nt, Human
gcugugcaguaguagguacagu

SEQ ID NO: 363591 - RNA, 22 nt, Human
acucugugugaguagagccugu

SEQ ID NO: 363592 - RNA, 17 nt, Human
agggacagcaguuuagg

SEQ ID NO: 363593 - RNA, 22 nt, Human
uguccucacaggaaugaacuuu

SEQ ID NO: 363594 - RNA, 22 nt, Human
ucaggggcugugcauuucccag

SEQ ID NO: 363595 - RNA, 20 nt, Human
gcccaggaucucugaggcau

SEQ ID NO: 363596 - RNA, 20 nt, Human
ucauuguguugccaauuccc

SEQ ID NO: 363597 - RNA, 22 nt, Human
gaggaagcagggcuuggcugag

SEQ ID NO: 363598 - RNA, 22 nt, Human
ugcuuaauacguauuugcugga

SEQ ID NO: 363599 - RNA, 22 nt, Human
agggugggcuagacucuucccc

SEQ ID NO: 363600 - RNA, 22 nt, Human
uccaggagguagugcuuaauuu

SEQ ID NO: 363601 - RNA, 23 nt, Human
uguaaaaugggguaguguuacca

SEQ ID NO: 363602 - RNA, 22 nt, Human
uucuucaaauagcagggaguca

SEQ ID NO: 363603 - RNA, 22 nt, Human
auuuccauagagcgucucacag

SEQ ID NO: 363604 - RNA, 22 nt, Human
uuuccuguugccaucaagaaug

SEQ ID NO: 363605 - RNA, 22 nt, Human
aucuagaaguggcaugaauuac

SEQ ID NO: 363606 - RNA, 22 nt, Human
cugcccugugaggguccuuggg

SEQ ID NO: 363607 - RNA, 22 nt, Human
aaguguuuacuuaaagucaugg

SEQ ID NO: 363608 - RNA, 22 nt, Human
caaugaaaauuuaaguugcagc

SEQ ID NO: 363609 - RNA, 17 nt, Human
uccuucagggccucaca

SEQ ID NO: 363610 - RNA, 22 nt, Human
guucccauacaguaucagugcu

SEQ ID NO: 363611 - RNA, 22 nt, Human
cagggagcuggugccagccgac

SEQ ID NO: 363612 - RNA, 22 nt, Human
gcuggccugucuagagccuuac

SEQ ID NO: 363613 - RNA, 22 nt, Human
aucaguuucugugaagaacaca

SEQ ID NO: 363614 - RNA, 20 nt, Human
gauuacaaaaugaaaugcau

SEQ ID NO: 363615 - RNA, 22 nt, Human
aggcugaggcuuuccuuggaga

SEQ ID NO: 363616 - RNA, 22 nt, Human
cugugacuguguuggaugcaca

SEQ ID NO: 363617 - RNA, 22 nt, Human
ugggggugugccagggaccucc

SEQ ID NO: 363618 - RNA, 22 nt, Human
gagcucugacugcugggugaca

SEQ ID NO: 363619 - RNA, 22 nt, Human
uugugaaacauucauggauuug

SEQ ID NO: 363620 - RNA, 22 nt, Human
ugaaggcauugaugaaggaauc

SEQ ID NO: 363621 - RNA, 22 nt, Human
auucuucagaauaucuggcacu

SEQ ID NO: 363622 - RNA, 22 nt, Human
gcagcugccuucagcuggaugg

SEQ ID NO: 363623 - RNA, 17 nt, Human
uuccucucacauuuuuu

SEQ ID NO: 363624 - RNA, 22 nt, Human
gggccuguguguucaggagccu

SEQ ID NO: 363625 - RNA, 20 nt, Human
agcugaggcaccugagguua

SEQ ID NO: 363626 - RNA, 22 nt, Human
uauucacauguacauaugcuca

SEQ ID NO: 363627 - RNA, 22 nt, Human
acaaggcugaacagugaagccg

SEQ ID NO: 363628 - RNA, 22 nt, Human
uacaaaguuuucuuggauugag

SEQ ID NO: 363629 - RNA, 22 nt, Human
ucuggcucccagccugcucuca

SEQ ID NO: 363630 - RNA, 22 nt, Human
ucaagagaaggggaaauagacu

SEQ ID NO: 363631 - RNA, 22 nt, Human
aaagaaucacauccuucagcaa

SEQ ID NO: 363632 - RNA, 22 nt, Human
agggagcuguggucagcucagu

SEQ ID NO: 363633 - RNA, 22 nt, Human
uuucuuucaauucuccuaaugc

SEQ ID NO: 363634 - RNA, 22 nt, Human
cacaggaaugaacagggaaaga

SEQ ID NO: 363635 - RNA, 22 nt, Human
auuaaauuagcaaacugugaaa

SEQ ID NO: 363636 - RNA, 22 nt, Human
uuguccaaggucccacaguuag

SEQ ID NO: 363637 - RNA, 22 nt, Human
gccaggcucucagugacugccc

SEQ ID NO: 363638 - RNA, 22 nt, Human
aaugcuagugugauauguaagg

SEQ ID NO: 363639 - RNA, 22 nt, Human
aaaguguugggaagaaagugca

SEQ ID NO: 363640 - RNA, 22 nt, Human
aacaugcugccuuucuacgagu

SEQ ID NO: 363641 - RNA, 21 nt, Human
acaugucucuaaucucaguga

SEQ ID NO: 363642 - RNA, 22 nt, Human
aaaugcuguguuuuaacauaga

SEQ ID NO: 363643 - RNA, 22 nt, Human
aggccugggucucgugccuacc

SEQ ID NO: 363644 - RNA, 22 nt, Human
uaagaagcuucugcuaaugccu

SEQ ID NO: 363645 - RNA, 22 nt, Human
cuggagguaauguuauuuuugu

SEQ ID NO: 363646 - RNA, 22 nt, Human
caguaugagaguugaaucaagg

SEQ ID NO: 363647 - RNA, 22 nt, Human
auaaugaggauuugcauauuag

SEQ ID NO: 363648 - RNA, 22 nt, Human
uuucacaugguacugccuguuu

SEQ ID NO: 363649 - RNA, 21 nt, Human
cagcagaguaaugcauucgua

SEQ ID NO: 363650 - RNA, 22 nt, Human
ucagagccccuccgcuguccca

SEQ ID NO: 363651 - RNA, 22 nt, Human
gcacugaaauuauaugcauuug

SEQ ID NO: 363652 - RNA, 22 nt, Human
aggcuagcaaugggagaugagu

SEQ ID NO: 363653 - RNA, 22 nt, Human
cugagguggaacagaggugaag

SEQ ID NO: 363654 - RNA, 22 nt, Human
gcaaggacucccugggucauuc

SEQ ID NO: 363655 - RNA, 22 nt, Human
gccuggcaggggccugggagug

SEQ ID NO: 363656 - RNA, 20 nt, Human
gacaucauguacacauugcc

SEQ ID NO: 363657 - RNA, 22 nt, Human
cagcuugggucaggugccugcu

SEQ ID NO: 363658 - RNA, 22 nt, Human
gcaggguaggugacagguaguc

SEQ ID NO: 363659 - RNA, 22 nt, Human
ugggcugaguggcagccagagu

SEQ ID NO: 363660 - RNA, 22 nt, Human
aucagagaaauggagggcgcuu

SEQ ID NO: 363661 - RNA, 22 nt, Human
cagcuuuggcccagucgggagg

SEQ ID NO: 363662 - RNA, 20 nt, Human
cccagccccuaccuguugcc

SEQ ID NO: 363663 - RNA, 23 nt, Human
uccaugagaugugggcuucuagu

SEQ ID NO: 363664 - RNA, 22 nt, Human
uccuucagucuucugagccaua

SEQ ID NO: 363665 - RNA, 22 nt, Human
agacagcauggagcugauaaca

SEQ ID NO: 363666 - RNA, 20 nt, Human
ugccagggccagcagaggcu

SEQ ID NO: 363667 - RNA, 22 nt, Human
gcuuccugucccucagccauga

SEQ ID NO: 363668 - RNA, 22 nt, Human
cccaggcaucccauuaaggagc

SEQ ID NO: 363669 - RNA, 22 nt, Human
acuguucauuuggauuucucug

SEQ ID NO: 363670 - RNA, 22 nt, Human
uuuucuuaggugcuccaaguag

SEQ ID NO: 363671 - RNA, 22 nt, Human
ugggcaggauaauaucucaugu

SEQ ID NO: 363672 - RNA, 22 nt, Human
uagcuuuccuuguugccugugc

SEQ ID NO: 363673 - RNA, 22 nt, Human
uuugaagugcaaugaggauucu

SEQ ID NO: 363674 - RNA, 22 nt, Human
cccaggagagaggggauaaagc

SEQ ID NO: 363675 - RNA, 22 nt, Human
ucuccucucuuaccugguacaa

SEQ ID NO: 363676 - RNA, 22 nt, Human
cuguggaguggggaguacuggu

SEQ ID NO: 363677 - RNA, 22 nt, Human
ucuccaagcagggcugcaaggc

SEQ ID NO: 363678 - RNA, 22 nt, Human
cugagcacugggcacauagcug

SEQ ID NO: 363679 - RNA, 22 nt, Human
cacagcuuguuuagugacucac

SEQ ID NO: 363680 - RNA, 22 nt, Human
uauggcuuuuaacugucguaug

SEQ ID NO: 363681 - RNA, 22 nt, Human
ucagugugaguaccaugcucag

SEQ ID NO: 363682 - RNA, 22 nt, Human
guucuucaucuuaaccaucugu

SEQ ID NO: 363683 - RNA, 22 nt, Human
acauaugcucaucugcauuccc

SEQ ID NO: 363684 - RNA, 22 nt, Human
ccagggugaccagcuggccuag

SEQ ID NO: 363685 - RNA, 22 nt, Human
gccugucugcgucacgcuuauu

SEQ ID NO: 363686 - RNA, 22 nt, Human
agcaauauaaauguuggguaga

SEQ ID NO: 363687 - RNA, 19 nt, Human
ugagcuggcugagccucuc

SEQ ID NO: 363688 - RNA, 22 nt, Human
caacauauaauauuugaguucu

SEQ ID NO: 363689 - RNA, 22 nt, Human
gagaaagggauaauuugaagag

SEQ ID NO: 363690 - RNA, 22 nt, Human
ucuguucaguugauuagacaga

SEQ ID NO: 363691 - RNA, 22 nt, Human
gcagagugaagcaguauggaaa

SEQ ID NO: 363692 - RNA, 22 nt, Human
ggugcagcugcagccugggagc

SEQ ID NO: 363693 - RNA, 22 nt, Human
uuauuauagauuaugcaagauu

SEQ ID NO: 363694 - RNA, 22 nt, Human
gugcugugugauccaugcuggc

SEQ ID NO: 363695 - RNA, 22 nt, Human
gauuucaaaaguagauccauca

SEQ ID NO: 363696 - RNA, 22 nt, Human
gagcugcccugagcuuugcaug

SEQ ID NO: 363697 - RNA, 22 nt, Human
cacccugggcugggccuguuaa

SEQ ID NO: 363698 - RNA, 22 nt, Human
augcuguggggagugaggguag

SEQ ID NO: 363699 - RNA, 20 nt, Human
agugcaagaaagcacagcug

SEQ ID NO: 363700 - RNA, 22 nt, Human
aggauccuccuuagaaaagacc

SEQ ID NO: 363701 - RNA, 22 nt, Human
aggcucaggcaggaauggcgga

SEQ ID NO: 363702 - RNA, 22 nt, Human
gccuaauaacuagcuguguaac

SEQ ID NO: 363703 - RNA, 22 nt, Human
guuuacauauuuuaauugguga

SEQ ID NO: 363704 - RNA, 22 nt, Human
ugagcccagagaucugagcuau

SEQ ID NO: 363705 - RNA, 22 nt, Human
aggaaacuguccccucauccua

SEQ ID NO: 363706 - RNA, 22 nt, Human
gggcugcugccaccagguggau

SEQ ID NO: 363707 - RNA, 22 nt, Human
gaaaagcuaggccaguucagcu

SEQ ID NO: 363708 - RNA, 22 nt, Human
uuucuucagccuucacaaccug

SEQ ID NO: 363709 - RNA, 22 nt, Human
uuagacaagggcuccuuaaaag

SEQ ID NO: 363710 - RNA, 22 nt, Human
aggcaguuguugcugagcagcu

SEQ ID NO: 363711 - RNA, 19 nt, Human
uucacauuggaagaaguag

SEQ ID NO: 363712 - RNA, 22 nt, Human
agcagagccaggucucucugua

SEQ ID NO: 363713 - RNA, 22 nt, Human
aucuggcucauucagggaacgg

SEQ ID NO: 363714 - RNA, 22 nt, Human
cagugcccuuccaggacugcag

SEQ ID NO: 363715 - RNA, 22 nt, Human
ugauuuccacagucaggggugc

SEQ ID NO: 363716 - RNA, 22 nt, Human
uuacaaagagaaguuguagaau

SEQ ID NO: 363717 - RNA, 22 nt, Human
agguuuucagcuguauccugag

SEQ ID NO: 363718 - RNA, 22 nt, Human
uugauacaggccuucuagauga

SEQ ID NO: 363719 - RNA, 21 nt, Human
ucccacucuaaauggacugaa

SEQ ID NO: 363720 - RNA, 22 nt, Human
cccaggaggccaagguugcagu

SEQ ID NO: 363721 - RNA, 22 nt, Human
cucaggaggugguagaggcccu

SEQ ID NO: 363722 - RNA, 22 nt, Human
agcucccagaagccagagucgg

SEQ ID NO: 363723 - RNA, 22 nt, Human
acucaggaaaaauguagugaua

SEQ ID NO: 363724 - RNA, 22 nt, Human
uaaagccauacugaaagccacu

SEQ ID NO: 363725 - RNA, 22 nt, Human
uaacagaaaagaacugaguuug

SEQ ID NO: 363726 - RNA, 22 nt, Human
gggcugagggguaucucauggg

SEQ ID NO: 363727 - RNA, 21 nt, Human
guuugcaugaacaagucagcc

SEQ ID NO: 363728 - RNA, 22 nt, Human
ccuggcagucaggggaguccuu

SEQ ID NO: 363729 - RNA, 22 nt, Human
caaaugcuacuaauaggcaagu

SEQ ID NO: 363730 - RNA, 18 nt, Human
cuguucuagaacuccugu

SEQ ID NO: 363731 - RNA, 22 nt, Human
ucucugagcccagugucccccu

SEQ ID NO: 363732 - RNA, 22 nt, Human
gcccagcuuuuugaggcaggca

SEQ ID NO: 363733 - RNA, 22 nt, Human
uaucagaaagauauuacugggg

SEQ ID NO: 363734 - RNA, 17 nt, Human
acucaggaucugggagu

SEQ ID NO: 363735 - RNA, 22 nt, Human
cuggagcugucuucacaggccu

SEQ ID NO: 363736 - RNA, 22 nt, Human
aguaaacauaauuuaccuguag

SEQ ID NO: 363737 - RNA, 22 nt, Human
gcuggcuguguuucaucucuga

SEQ ID NO: 363738 - RNA, 22 nt, Human
aagauaaacucuugauuucuga

SEQ ID NO: 363739 - RNA, 22 nt, Human
uucuguauauuguaaagacuca

SEQ ID NO: 363740 - RNA, 22 nt, Human
acaggauuagcaaguaaucagg

SEQ ID NO: 363741 - RNA, 22 nt, Human
ggccuugggauguggcugcagc

SEQ ID NO: 363742 - RNA, 22 nt, Human
ucuguucagaagaggugaaagu

SEQ ID NO: 363743 - RNA, 22 nt, Human
uguccuuuaugaaaugguguuu

SEQ ID NO: 363744 - RNA, 22 nt, Human
agucccuucucaaagugugcgg

SEQ ID NO: 363745 - RNA, 22 nt, Human
ccaggagcagggcuggcugcac

SEQ ID NO: 363746 - RNA, 22 nt, Human
uguccuuacaaggucccuuucg

SEQ ID NO: 363747 - RNA, 22 nt, Human
ugcuucugggcaaaugugugug

SEQ ID NO: 363748 - RNA, 22 nt, Human
uccagggagagccgcugcucca

SEQ ID NO: 363749 - RNA, 22 nt, Human
cagcagugaugugugaggguuc

SEQ ID NO: 363750 - RNA, 22 nt, Human
guaauugacucagcucuguuca

SEQ ID NO: 363751 - RNA, 22 nt, Human
agccucucuuucugguggcuaa

SEQ ID NO: 363752 - RNA, 22 nt, Human
gcuggaucaaguccuucaccca

SEQ ID NO: 363753 - RNA, 22 nt, Human
ggagcauguggggugagcaggg

SEQ ID NO: 363754 - RNA, 22 nt, Human
uucaggauggcggauguugggg

SEQ ID NO: 363755 - RNA, 22 nt, Human
uguguacuugaaagggcagguc

SEQ ID NO: 363756 - RNA, 22 nt, Human
cugggccagcaacugcaaugga

SEQ ID NO: 363757 - RNA, 22 nt, Human
ggaguuggugagcaccaggcuu

SEQ ID NO: 363758 - RNA, 22 nt, Human
gaccuggaggauccucuucuug

SEQ ID NO: 363759 - RNA, 22 nt, Human
uauucaaaguaccuucauugcc

SEQ ID NO: 363760 - RNA, 22 nt, Human
auguuauuuuggaaaauacaaa

SEQ ID NO: 363761 - RNA, 23 nt, Human
aaaguugauuugcaguuuaagag

SEQ ID NO: 363762 - RNA, 21 nt, Human
ccagcugucuguccuuaggca

SEQ ID NO: 363763 - RNA, 22 nt, Human
gcuccugggcucuaccuugcua

SEQ ID NO: 363764 - RNA, 22 nt, Human
uguaugcuuuccaaaaaugcug

SEQ ID NO: 363765 - RNA, 22 nt, Human
gcugucagugaggugagacaug

SEQ ID NO: 363766 - RNA, 22 nt, Human
aucuguaaaugcaaauguagcu

SEQ ID NO: 363767 - RNA, 22 nt, Human
acacuaauuaagcugcuuuacu

SEQ ID NO: 363768 - RNA, 22 nt, Human
uuuuaucaaucauuaagacauu

SEQ ID NO: 363769 - RNA, 22 nt, Human
caggugucaaaauacuaagugg

SEQ ID NO: 363770 - RNA, 22 nt, Human
caauuucucgaacucuaaucca

SEQ ID NO: 363771 - RNA, 22 nt, Human
auuugagaugguaaauaacuuu

SEQ ID NO: 363772 - RNA, 22 nt, Human
ugcugggcuagaagcugaggcc

SEQ ID NO: 363773 - RNA, 22 nt, Human
uacugaaauacuaagaaguuaa

SEQ ID NO: 363774 - RNA, 22 nt, Human
ggcagggaaacagcugauccca

SEQ ID NO: 363775 - RNA, 22 nt, Human
aggccuguuccuuccugggcac

SEQ ID NO: 363776 - RNA, 20 nt, Human
ucauuacagugcuaagaugu

SEQ ID NO: 363777 - RNA, 22 nt, Human
uggcaggaaaaagggccagagg

SEQ ID NO: 363778 - RNA, 22 nt, Human
ccugcuggccaguggagggcug

SEQ ID NO: 363779 - RNA, 23 nt, Human
caggcaggaugaggacuacacuc

SEQ ID NO: 363780 - RNA, 19 nt, Human
aguggcagaucuggaagua

SEQ ID NO: 363781 - RNA, 22 nt, Human
ucaguguccggagccugagugc

SEQ ID NO: 363782 - RNA, 22 nt, Human
caggggcucugagauugucuaa

SEQ ID NO: 363783 - RNA, 22 nt, Human
ucccaggacaggccacauggaa

SEQ ID NO: 363784 - RNA, 22 nt, Human
acagccaggaauucuggagaag

SEQ ID NO: 363785 - RNA, 22 nt, Human
uuuauuauucucuggagaaugu

SEQ ID NO: 363786 - RNA, 22 nt, Human
ugagaggccccagcucuuggcc

SEQ ID NO: 363787 - RNA, 22 nt, Human
cuucuugcaauuuucaucuuau

SEQ ID NO: 363788 - RNA, 22 nt, Human
aggcugggaaauguauuccagc

SEQ ID NO: 363789 - RNA, 22 nt, Human
cauucacucagcgaugccagua

SEQ ID NO: 363790 - RNA, 22 nt, Human
ggauuuccucuugacucuaaag

SEQ ID NO: 363791 - RNA, 22 nt, Human
aacagaauugcugcugccaaug

SEQ ID NO: 363792 - RNA, 22 nt, Human
ugcucugucaagaaaagaugcc

SEQ ID NO: 363793 - RNA, 22 nt, Human
cccagcucucucaguucugcuu

SEQ ID NO: 363794 - RNA, 22 nt, Human
aggcacugguccauuuucugca

SEQ ID NO: 363795 - RNA, 22 nt, Human
gcagcugccuauucagggcuug

SEQ ID NO: 363796 - RNA, 22 nt, Human
uggcugaacuaaugugcuguuu

SEQ ID NO: 363797 - RNA, 22 nt, Human
agcugguuagcaaucuaaguga

SEQ ID NO: 363798 - RNA, 21 nt, Human
ccaccaggucuucugcucggg

SEQ ID NO: 363799 - RNA, 22 nt, Human
uuuuguuguaauauaccuaucc

SEQ ID NO: 363800 - RNA, 22 nt, Human
uguaacaaaauaccuuggauug

SEQ ID NO: 363801 - RNA, 22 nt, Human
ccaggguuuaaauucugacuau

SEQ ID NO: 363802 - RNA, 22 nt, Human
ucuagggaacaugggucaagcu

SEQ ID NO: 363803 - RNA, 22 nt, Human
agcaggaaggcuuuggggguuc

SEQ ID NO: 363804 - RNA, 22 nt, Human
ccugaagcaaggguaggcaggu

SEQ ID NO: 363805 - RNA, 22 nt, Human
cccaggcaggagugugguggcu

SEQ ID NO: 363806 - RNA, 22 nt, Human
uggcagagugcggcauccccug

SEQ ID NO: 363807 - RNA, 22 nt, Human
agcaggcuuucaagagucuucu

SEQ ID NO: 363808 - RNA, 22 nt, Human
uaauuauuaugacaacaauugc

SEQ ID NO: 363809 - RNA, 20 nt, Human
ucacauccucucccaacaug

SEQ ID NO: 363810 - RNA, 22 nt, Human
cacaugggcguaauguccaugg

SEQ ID NO: 363811 - RNA, 22 nt, Human
accugagaccuaaucugacugu

SEQ ID NO: 363812 - RNA, 20 nt, Human
caccacagaauuggggacag

SEQ ID NO: 363813 - RNA, 22 nt, Human
uccagggagauacuggcugcca

SEQ ID NO: 363814 - RNA, 20 nt, Human
uuacucaguuccugccaugc

SEQ ID NO: 363815 - RNA, 22 nt, Human
uccucaggcggugaggaggggc

SEQ ID NO: 363816 - RNA, 16 nt, Human
uggcugagagaggguu

SEQ ID NO: 363817 - RNA, 22 nt, Human
cuuauacacccucuucccaggc

SEQ ID NO: 363818 - RNA, 22 nt, Human
ggaaagagcccagcagugcuug

SEQ ID NO: 363819 - RNA, 22 nt, Human
cccucugccugcgcccuggugu

SEQ ID NO: 363820 - RNA, 20 nt, Human
uuucuguaaggcauuaaucu

SEQ ID NO: 363821 - RNA, 22 nt, Human
agucaauucuuuucaacucaag

SEQ ID NO: 363822 - RNA, 22 nt, Human
gccugcagggcccuuguggguc

SEQ ID NO: 363823 - RNA, 22 nt, Human
augggaugcauggcuguggcca

SEQ ID NO: 363824 - RNA, 22 nt, Human
ccagggcauguccaagacuuag

SEQ ID NO: 363825 - RNA, 22 nt, Human
acagaggaagcauauagcacaa

SEQ ID NO: 363826 - RNA, 22 nt, Human
ucauccaguaccauggaaggca

SEQ ID NO: 363827 - RNA, 22 nt, Human
cugcugugccuuaaaaugcaag

SEQ ID NO: 363828 - RNA, 22 nt, Human
aaguggagcuauaggcucagau

SEQ ID NO: 363829 - RNA, 22 nt, Human
aagacaagcaucaaaucaggca

SEQ ID NO: 363830 - RNA, 22 nt, Human
ucaccgucgggggucgcugucu

SEQ ID NO: 363831 - RNA, 22 nt, Human
ggcugggcuccgggagcaugcg

SEQ ID NO: 363832 - RNA, 22 nt, Human
ucacaagacagaaaacauuuag

SEQ ID NO: 363833 - RNA, 22 nt, Human
ugggcucucuggcaggaaggcu

SEQ ID NO: 363834 - RNA, 19 nt, Human
caggagagcaugcacuuug

SEQ ID NO: 363835 - RNA, 22 nt, Human
ccccaggaagccucagauuugc

SEQ ID NO: 363836 - RNA, 22 nt, Human
agacagcugcucgcagagcuau

SEQ ID NO: 363837 - RNA, 21 nt, Human
agagccugagaucuuccagca

SEQ ID NO: 363838 - RNA, 22 nt, Human
gagagggcugccuggugugagg

SEQ ID NO: 363839 - RNA, 22 nt, Human
aucuccaggcauuucaagagac

SEQ ID NO: 363840 - RNA, 22 nt, Human
agcaccuucacaggcucucagg

SEQ ID NO: 363841 - RNA, 22 nt, Human
acuggagcccguggaggcgcag

SEQ ID NO: 363842 - RNA, 22 nt, Human
aggcuucugugagcucauacaa

SEQ ID NO: 363843 - RNA, 22 nt, Human
gagagucuaggaaccucauaua

SEQ ID NO: 363844 - RNA, 22 nt, Human
cugcucugagaggcucuuccua

SEQ ID NO: 363845 - RNA, 22 nt, Human
guauuuucaagagcaguaguau

SEQ ID NO: 363846 - RNA, 22 nt, Human
gaaggaggugucaguuggacug

SEQ ID NO: 363847 - RNA, 23 nt, Human
agaccugcaucugauaggcccug

SEQ ID NO: 363848 - RNA, 22 nt, Human
gagucccaugaugauagccaca

SEQ ID NO: 363849 - RNA, 22 nt, Human
gcagugcuaaguagcuggccca

SEQ ID NO: 363850 - RNA, 22 nt, Human
caaauacuaaacauaagauuuu

SEQ ID NO: 363851 - RNA, 22 nt, Human
auucugauaucuuauucuagcu

SEQ ID NO: 363852 - RNA, 17 nt, Human
ccagguggaaucgugga

SEQ ID NO: 363853 - RNA, 22 nt, Human
agaugaaagauuuuuauagaga

SEQ ID NO: 363854 - RNA, 22 nt, Human
aaaugucagaggaacauauuga

SEQ ID NO: 363855 - RNA, 22 nt, Human
ggagcugcauuuagggagccuu

SEQ ID NO: 363856 - RNA, 22 nt, Human
ggcacagggaggcccuggugug

SEQ ID NO: 363857 - RNA, 22 nt, Human
cccacucuggcucccuucuagu

SEQ ID NO: 363858 - RNA, 23 nt, Human
gccagccuugcucuccugcagcc

SEQ ID NO: 363859 - RNA, 22 nt, Human
gcagcuuuaaacauuggaaaua

SEQ ID NO: 363860 - RNA, 22 nt, Human
uuucugcucgcucucaaucagg

SEQ ID NO: 363861 - RNA, 22 nt, Human
uccuccagugucuggggccuug

SEQ ID NO: 363862 - RNA, 22 nt, Human
cagccugcagggcugccuguug

SEQ ID NO: 363863 - RNA, 22 nt, Human
uauaucuuauaugugcagguac

SEQ ID NO: 363864 - RNA, 22 nt, Human
ggucauugaaaucagaaggguu

SEQ ID NO: 363865 - RNA, 22 nt, Human
ggccuuggugcucuguguugca

SEQ ID NO: 363866 - RNA, 22 nt, Human
cuggcugcuuguagacucgacu

SEQ ID NO: 363867 - RNA, 22 nt, Human
cuggccucauagccaagcugug

SEQ ID NO: 363868 - RNA, 22 nt, Human
caaugugugcuuacaggccagu

SEQ ID NO: 363869 - RNA, 22 nt, Human
uuccaggaggagguacuagagg

SEQ ID NO: 363870 - RNA, 22 nt, Human
cugaauaauauuccauuaugag

SEQ ID NO: 363871 - RNA, 22 nt, Human
agcagggcacuggaaggcacug

SEQ ID NO: 363872 - RNA, 17 nt, Human
agcagcuggcacaggag

SEQ ID NO: 363873 - RNA, 22 nt, Human
ucugucugagggagugacauuu

SEQ ID NO: 363874 - RNA, 22 nt, Human
gcugccuucaguucugauucau

SEQ ID NO: 363875 - RNA, 22 nt, Human
agccagacauggcuccugcucc

SEQ ID NO: 363876 - RNA, 18 nt, Human
ugaccugcgcuucacggu

SEQ ID NO: 363877 - RNA, 22 nt, Human
caccagcuacagacuacugugu

SEQ ID NO: 363878 - RNA, 22 nt, Human
ucuuugaauuucugacugucuu

SEQ ID NO: 363879 - RNA, 22 nt, Human
cagccagugugaccgaggagga

SEQ ID NO: 363880 - RNA, 22 nt, Human
uggcagaguuauggguauuuau

SEQ ID NO: 363881 - RNA, 22 nt, Human
gaaaggagggaaacagagcggu

SEQ ID NO: 363882 - RNA, 22 nt, Human
ugacagaacagguugggagcaa

SEQ ID NO: 363883 - RNA, 20 nt, Human
cuucuucagccuaugcuuca

SEQ ID NO: 363884 - RNA, 22 nt, Human
gggcacuggaggccaaggagcu

SEQ ID NO: 363885 - RNA, 22 nt, Human
ucuucagauggccaguuguccc

SEQ ID NO: 363886 - RNA, 22 nt, Human
guuugaaaaaagcaguauguaa

SEQ ID NO: 363887 - RNA, 22 nt, Human
augagcugggccauccagugau

SEQ ID NO: 363888 - RNA, 22 nt, Human
uaguuaggaaaguccagggagc

SEQ ID NO: 363889 - RNA, 22 nt, Human
ucagagcuuuggagaccaggaa

SEQ ID NO: 363890 - RNA, 22 nt, Human
agagggcuuugauucucaguuc

SEQ ID NO: 363891 - RNA, 22 nt, Human
ucucccaggugggugccuggag

SEQ ID NO: 363892 - RNA, 22 nt, Human
aauuugauucccugcaccuguu

SEQ ID NO: 363893 - RNA, 22 nt, Human
uuaugcuaaaugaaucaaguca

SEQ ID NO: 363894 - RNA, 22 nt, Human
ucaguuuuguauguuguaaguc

SEQ ID NO: 363895 - RNA, 23 nt, Human
cagcugaagcagccugggcugga

SEQ ID NO: 363896 - RNA, 22 nt, Human
gagggcaggggucuugcacggu

SEQ ID NO: 363897 - RNA, 22 nt, Human
ugugccuggaucucugugacaa

SEQ ID NO: 363898 - RNA, 22 nt, Human
aggaaagcucccaguagggcuc

SEQ ID NO: 363899 - RNA, 22 nt, Human
uuuuucauauuccccucucugg

SEQ ID NO: 363900 - RNA, 20 nt, Human
aggcaccugucacaggugag

SEQ ID NO: 363901 - RNA, 22 nt, Human
ccaggcauccauugcuuccucu

SEQ ID NO: 363902 - RNA, 22 nt, Human
ugaggcucagaagugccaagug

SEQ ID NO: 363903 - RNA, 22 nt, Human
gugcauuuaggucacaugaugu

SEQ ID NO: 363904 - RNA, 22 nt, Human
agggcccuuacgcaggcccuuc

SEQ ID NO: 363905 - RNA, 22 nt, Human
ggauccuucuuugaccucacag

SEQ ID NO: 363906 - RNA, 22 nt, Human
gucaaguuuauccgcucauuca

SEQ ID NO: 363907 - RNA, 22 nt, Human
cagaggaugaucuggccucucu

SEQ ID NO: 363908 - RNA, 22 nt, Human
aggacaguguggaagagggugc

SEQ ID NO: 363909 - RNA, 22 nt, Human
auucuucaucagagaugcacua

SEQ ID NO: 363910 - RNA, 22 nt, Human
aaggaaaggaugagcaugcauu

SEQ ID NO: 363911 - RNA, 21 nt, Human
ugcagcugacacugguaugcc

SEQ ID NO: 363912 - RNA, 22 nt, Human
gcuggcugggucccugagaggc

SEQ ID NO: 363913 - RNA, 22 nt, Human
caccagguggaaaugucacagc

SEQ ID NO: 363914 - RNA, 22 nt, Human
uauacagauuaacagauuuaaa

SEQ ID NO: 363915 - RNA, 22 nt, Human
gugccagggggcacugaacaga

SEQ ID NO: 363916 - RNA, 22 nt, Human
caggcagcccugcaccaagugu

SEQ ID NO: 363917 - RNA, 22 nt, Human
ggucucagaucuuuauuaaggc

SEQ ID NO: 363918 - RNA, 22 nt, Human
ccucugccugcacaucauccug

SEQ ID NO: 363919 - RNA, 22 nt, Human
caagagcugcaaauagcgugac

SEQ ID NO: 363920 - RNA, 22 nt, Human
aggcagcuucugauuagcagcg

SEQ ID NO: 363921 - RNA, 22 nt, Human
uacagaaguaaauaccaaaagc

SEQ ID NO: 363922 - RNA, 22 nt, Human
ucagggcaucaucaugaauaua

SEQ ID NO: 363923 - RNA, 22 nt, Human
gcugaggccucagaaggcugag

SEQ ID NO: 363924 - RNA, 22 nt, Human
ccagcaggguugguuucuucug

SEQ ID NO: 363925 - RNA, 19 nt, Human
auuccucaaggacagaaau

SEQ ID NO: 363926 - RNA, 22 nt, Human
cugucagguuggucucagagcu

SEQ ID NO: 363927 - RNA, 22 nt, Human
cagugcagguggcagaggacag

SEQ ID NO: 363928 - RNA, 21 nt, Human
uucuucuuggacuguuuuggc

SEQ ID NO: 363929 - RNA, 22 nt, Human
ucugcaggcuuauaggaugggu

SEQ ID NO: 363930 - RNA, 22 nt, Human
ucccaggauguuuauggcuggu

SEQ ID NO: 363931 - RNA, 22 nt, Human
acuuggagagcauugcugggga

SEQ ID NO: 363932 - RNA, 22 nt, Human
cuuagaaauuguuacucauuca

SEQ ID NO: 363933 - RNA, 22 nt, Human
aauuucaaacuaauaggaacca

SEQ ID NO: 363934 - RNA, 22 nt, Human
gaggcagcugggauacaaggga

SEQ ID NO: 363935 - RNA, 18 nt, Human
uguuuauuuuucucuuac

SEQ ID NO: 363936 - RNA, 22 nt, Human
ugccugugucacagugauguuu

SEQ ID NO: 363937 - RNA, 18 nt, Human
gccaggcaggguggggaa

SEQ ID NO: 363938 - RNA, 22 nt, Human
ggcagucagugugguucauaaa

SEQ ID NO: 363939 - RNA, 22 nt, Human
cggagaggugggggcagcaucu

SEQ ID NO: 363940 - RNA, 22 nt, Human
uugcucaggcuuagagcuacua

SEQ ID NO: 363941 - RNA, 22 nt, Human
ggcugcuguacugaugucaguu

SEQ ID NO: 363942 - RNA, 22 nt, Human
auucagagcacuggguagaauu

SEQ ID NO: 363943 - RNA, 22 nt, Human
ccucccucuuucagucccacag

SEQ ID NO: 363944 - RNA, 22 nt, Human
aggagucagauaugggaaaguu

SEQ ID NO: 363945 - RNA, 22 nt, Human
gguugccggggcaggacuggaa

SEQ ID NO: 363946 - RNA, 22 nt, Human
uaagauaaguggguugagaugg

SEQ ID NO: 363947 - RNA, 22 nt, Human
caggacaguauaggcuuuagga

SEQ ID NO: 363948 - RNA, 22 nt, Human
auaugccauuagcuagaaauaa

SEQ ID NO: 363949 - RNA, 22 nt, Human
aggcaggagcaagcccuacaag

SEQ ID NO: 363950 - RNA, 22 nt, Human
ggcagcuaguuuaagaaagagg

SEQ ID NO: 363951 - RNA, 22 nt, Human
uuggaaggcccugccuagcagg

SEQ ID NO: 363952 - RNA, 22 nt, Human
uaucuauuccaaauaucagcgu

SEQ ID NO: 363953 - RNA, 22 nt, Human
uuggaucaaauuucaugcuguc

SEQ ID NO: 363954 - RNA, 22 nt, Human
augacaguucuacacuuaaucu

SEQ ID NO: 363955 - RNA, 22 nt, Human
caguggaaacuaugcugcugga

SEQ ID NO: 363956 - RNA, 22 nt, Human
aacugcauucagaaagcucacu

SEQ ID NO: 363957 - RNA, 22 nt, Human
accagguggccccagcgugguu

SEQ ID NO: 363958 - RNA, 22 nt, Human
ucagcaggcgguuccuuguggg

SEQ ID NO: 363959 - RNA, 20 nt, Human
gugcuucagaagccauugcu

SEQ ID NO: 363960 - RNA, 20 nt, Human
gacauucauaguuauuacca

SEQ ID NO: 363961 - RNA, 22 nt, Human
cagcugaagaaagagugguuag

SEQ ID NO: 363962 - RNA, 22 nt, Human
aaucuagucuccuuaagucuuu

SEQ ID NO: 363963 - RNA, 22 nt, Human
auuucagauucagaaauguagg

SEQ ID NO: 363964 - RNA, 22 nt, Human
ugcuuucaaaggcuuucuagau

SEQ ID NO: 363965 - RNA, 20 nt, Human
gggcuggcgcauggggaaag

SEQ ID NO: 363966 - RNA, 22 nt, Human
ugugcccauuccacuugaguac

SEQ ID NO: 363967 - RNA, 22 nt, Human
agcagggcuuugucucugugaa

SEQ ID NO: 363968 - RNA, 22 nt, Human
aaauacuagaauucagaguuga

SEQ ID NO: 363969 - RNA, 22 nt, Human
agauacaucauuuauaccuuca

SEQ ID NO: 363970 - RNA, 22 nt, Human
guaaacaacacaaaucauuuga

SEQ ID NO: 363971 - RNA, 22 nt, Human
uuguuacagcagugauuucaga

SEQ ID NO: 363972 - RNA, 22 nt, Human
guggcuucugcggugugcgcag

SEQ ID NO: 363973 - RNA, 22 nt, Human
auccuuaguuaagaacaggagu

SEQ ID NO: 363974 - RNA, 22 nt, Human
uggcugcagacaccuauggcag

SEQ ID NO: 363975 - RNA, 22 nt, Human
uugagggucuggaucugcugcu

SEQ ID NO: 363976 - RNA, 22 nt, Human
uuugacauuauccuguuacugg

SEQ ID NO: 363977 - RNA, 22 nt, Human
ggcagcuucuuaauauggagac

SEQ ID NO: 363978 - RNA, 22 nt, Human
cuggaaggucuguccccacugc

SEQ ID NO: 363979 - RNA, 22 nt, Human
aaugucugaaaaucagacugca

SEQ ID NO: 363980 - RNA, 22 nt, Human
agguacagggugaaaguuuaug

SEQ ID NO: 363981 - RNA, 22 nt, Human
uauaauccauucauugauuucu

SEQ ID NO: 363982 - RNA, 22 nt, Human
agggccacaguggggccugaga

SEQ ID NO: 363983 - RNA, 22 nt, Human
uggaguuccuuugaaaggcucu

SEQ ID NO: 363984 - RNA, 22 nt, Human
ccaaggcuccucagcuggucuu

SEQ ID NO: 363985 - RNA, 22 nt, Human
augaggcaggauuaagcuauca

SEQ ID NO: 363986 - RNA, 22 nt, Human
auuaaauuggacgcugggggaa

SEQ ID NO: 363987 - RNA, 22 nt, Human
cagagccaaaccucagggcccg

SEQ ID NO: 363988 - RNA, 22 nt, Human
aauaaaaugaacugguagaguu

SEQ ID NO: 363989 - RNA, 22 nt, Human
cccugccucugaagcugcucag

SEQ ID NO: 363990 - RNA, 22 nt, Human
aauaauguugacgauagucuua

SEQ ID NO: 363991 - RNA, 22 nt, Human
cauuguauugaggauacuuaag

SEQ ID NO: 363992 - RNA, 18 nt, Human
ucugucuguacaaguauc

SEQ ID NO: 363993 - RNA, 22 nt, Human
cagugccucuuaagugucaccc

SEQ ID NO: 363994 - RNA, 22 nt, Human
uuuggacuuagccugcagaauu

SEQ ID NO: 363995 - RNA, 17 nt, Human
uguuuucauucauugcu

SEQ ID NO: 363996 - RNA, 22 nt, Human
uuuacagaaugucaauuucuau

SEQ ID NO: 363997 - RNA, 22 nt, Human
uccuggagaauccugccaccug

SEQ ID NO: 363998 - RNA, 22 nt, Human
cagagcauugagggucugccaa

SEQ ID NO: 363999 - RNA, 19 nt, Human
cagaacagaggucauggcc

SEQ ID NO: 364000 - RNA, 22 nt, Human
guggcaggucccauuggagcag

SEQ ID NO: 364001 - RNA, 22 nt, Human
ccguggaguugugcugaguaug

SEQ ID NO: 364002 - RNA, 22 nt, Human
acaaagguggaccauguggcuu

SEQ ID NO: 364003 - RNA, 20 nt, Human
aggagaaauucgggacaccu

SEQ ID NO: 364004 - RNA, 22 nt, Human
uguguacucaauugagccauuu

SEQ ID NO: 364005 - RNA, 22 nt, Human
ucucagaggcccgacguucucc

SEQ ID NO: 364006 - RNA, 22 nt, Human
augugacaauauuuggucuuau

SEQ ID NO: 364007 - RNA, 22 nt, Human
caggcuugauuauucagacaau

SEQ ID NO: 364008 - RNA, 22 nt, Human
ccucugaguccucccugguugc

SEQ ID NO: 364009 - RNA, 22 nt, Human
uagaaaggauauugagaugaau

SEQ ID NO: 364010 - RNA, 22 nt, Human
aggucauuuuugccuucuauuu

SEQ ID NO: 364011 - RNA, 23 nt, Human
uccuccuuuugcuugugcuuccc

SEQ ID NO: 364012 - RNA, 22 nt, Human
aaugccucuuggaagaagacuu

SEQ ID NO: 364013 - RNA, 22 nt, Human
gaaaauagcagauagaccaaug

SEQ ID NO: 364014 - RNA, 18 nt, Human
ugcucuguuuaaugauuu

SEQ ID NO: 364015 - RNA, 22 nt, Human
ggcaugggccgaggugccuccu

SEQ ID NO: 364016 - RNA, 21 nt, Human
aggaggaacccguggcugggc

SEQ ID NO: 364017 - RNA, 22 nt, Human
agagacaggaguucuguuucca

SEQ ID NO: 364018 - RNA, 22 nt, Human
gcccaggaguugguggcugcag

SEQ ID NO: 364019 - RNA, 22 nt, Human
gacuguguccaugugcuggauu

SEQ ID NO: 364020 - RNA, 22 nt, Human
auugacaauuagcccuuaggug

SEQ ID NO: 364021 - RNA, 18 nt, Human
acaaaggucugcaagacc

SEQ ID NO: 364022 - RNA, 22 nt, Human
ggagccaggcaaucuguacuuu

SEQ ID NO: 364023 - RNA, 22 nt, Human
ggaaccaguggaaugauaugcu

SEQ ID NO: 364024 - RNA, 22 nt, Human
auaaaaguucaagagaguacag

SEQ ID NO: 364025 - RNA, 23 nt, Human
uugcuucugugcaauucaguacu

SEQ ID NO: 364026 - RNA, 22 nt, Human
aaguuugcauagauuaagcauu

SEQ ID NO: 364027 - RNA, 22 nt, Human
uaggugugggcucaggaaugug

SEQ ID NO: 364028 - RNA, 22 nt, Human
gugaagagcuguugcagagauu

SEQ ID NO: 364029 - RNA, 22 nt, Human
cuguauuucccacauucucuau

SEQ ID NO: 364030 - RNA, 23 nt, Human
uguugaaguaacuguuacauaga

SEQ ID NO: 364031 - RNA, 22 nt, Human
aggauuuaccgucauuuagucu

SEQ ID NO: 364032 - RNA, 22 nt, Human
ggcagggcagcgcugauuaggg

SEQ ID NO: 364033 - RNA, 23 nt, Human
gcugcagcuguggauguucucag

SEQ ID NO: 364034 - RNA, 22 nt, Human
cagcagcuacuuggagcagcag

SEQ ID NO: 364035 - RNA, 21 nt, Human
cagaggcugagagggcaaucu

SEQ ID NO: 364036 - RNA, 22 nt, Human
caggaggggguggaguuucgcc

SEQ ID NO: 364037 - RNA, 22 nt, Human
uaugcacauucacacaaaaaug

SEQ ID NO: 364038 - RNA, 22 nt, Human
ucugccugcggcugcagguggc

SEQ ID NO: 364039 - RNA, 20 nt, Human
gagggcucguggauggauaa

SEQ ID NO: 364040 - RNA, 22 nt, Human
auguucuuccaaaucuguaaca

SEQ ID NO: 364041 - RNA, 22 nt, Human
ucugaggcuucagacuguacug

SEQ ID NO: 364042 - RNA, 18 nt, Human
uggagccagcucuaggau

SEQ ID NO: 364043 - RNA, 22 nt, Human
uauacagauggaaagauacaca

SEQ ID NO: 364044 - RNA, 21 nt, Human
gucagcagauccagcacuugu

SEQ ID NO: 364045 - RNA, 22 nt, Human
uacaugaaccuuuaugugugau

SEQ ID NO: 364046 - RNA, 22 nt, Human
uccaugaggcagggaggcuggc

SEQ ID NO: 364047 - RNA, 22 nt, Human
gcucuuccauuucucuugaacu

SEQ ID NO: 364048 - RNA, 22 nt, Human
uagcuuuaagaugagaugugga

SEQ ID NO: 364049 - RNA, 22 nt, Human
acucugcuuauugcugcaggca

SEQ ID NO: 364050 - RNA, 22 nt, Human
ugggaccugaagcagguuggca

SEQ ID NO: 364051 - RNA, 22 nt, Human
aagccagauagaagaacucauu

SEQ ID NO: 364052 - RNA, 22 nt, Human
agcucccagcagagcuggccac

SEQ ID NO: 364053 - RNA, 22 nt, Human
auuucuacaguacacaugcauu

SEQ ID NO: 364054 - RNA, 22 nt, Human
guuccaaauuuggaucuuuagg

SEQ ID NO: 364055 - RNA, 22 nt, Human
gcagcguggggcugagucagcu

SEQ ID NO: 364056 - RNA, 22 nt, Human
uccucugcuggaagggcaagag

SEQ ID NO: 364057 - RNA, 16 nt, Human
agcagggcgggaagga

SEQ ID NO: 364058 - RNA, 22 nt, Human
gaugcacagugacccugccagu

SEQ ID NO: 364059 - RNA, 22 nt, Human
gcagcugccgugagcucacgcc

SEQ ID NO: 364060 - RNA, 22 nt, Human
agaccaagacuauaaugagagg

SEQ ID NO: 364061 - RNA, 22 nt, Human
ugcaguggaaagacucagacuu

SEQ ID NO: 364062 - RNA, 22 nt, Human
gcuguauuuauuuucuaggguu

SEQ ID NO: 364063 - RNA, 22 nt, Human
acacaugcugauaagaauauaa

SEQ ID NO: 364064 - RNA, 22 nt, Human
cccaguccuaaagcagacgcca

SEQ ID NO: 364065 - RNA, 22 nt, Human
caguucagcuagaagaaacaaa

SEQ ID NO: 364066 - RNA, 23 nt, Human
ugccagaggcagucacaguggug

SEQ ID NO: 364067 - RNA, 22 nt, Human
cacagggcagugcugcccacuc

SEQ ID NO: 364068 - RNA, 22 nt, Human
gagcugaguuaccuccagauca

SEQ ID NO: 364069 - RNA, 22 nt, Human
cccagcagaccgcugugauggc

SEQ ID NO: 364070 - RNA, 21 nt, Human
agccagcuaucacacagcauu

SEQ ID NO: 364071 - RNA, 22 nt, Human
gaucagaauuuacuuauaauug

SEQ ID NO: 364072 - RNA, 22 nt, Human
uaugccugauaacugugucucu

SEQ ID NO: 364073 - RNA, 20 nt, Human
ucacaucuggcagcugauga

SEQ ID NO: 364074 - RNA, 22 nt, Human
uccagcagguuggucaggugca

SEQ ID NO: 364075 - RNA, 22 nt, Human
ggcccagcacagugcuuggggg

SEQ ID NO: 364076 - RNA, 22 nt, Human
ugaagcaacuggacaaguuggc

SEQ ID NO: 364077 - RNA, 22 nt, Human
auuauucuuaugucaucauggc

SEQ ID NO: 364078 - RNA, 22 nt, Human
gugcgccagcucaaggggaggc

SEQ ID NO: 364079 - RNA, 22 nt, Human
cagaagccugccucagaugcac

SEQ ID NO: 364080 - RNA, 22 nt, Human
ccaggaagcugucugauaugaa

SEQ ID NO: 364081 - RNA, 22 nt, Human
gguggagcuggaccaggagagg

SEQ ID NO: 364082 - RNA, 22 nt, Human
caagagcugugaccucauucac

SEQ ID NO: 364083 - RNA, 22 nt, Human
ccugccaggccagugagcuucc

SEQ ID NO: 364084 - RNA, 21 nt, Human
ugaaacaaucagacagagucu

SEQ ID NO: 364085 - RNA, 22 nt, Human
cccaggaccgcgcggcugagcg

SEQ ID NO: 364086 - RNA, 22 nt, Human
caguguacuuggaauguaacag

SEQ ID NO: 364087 - RNA, 22 nt, Human
caggcagcugacugucagauau

SEQ ID NO: 364088 - RNA, 22 nt, Human
acagccaggagccaugggcagg

SEQ ID NO: 364089 - RNA, 22 nt, Human
aagacacagcgaaauguuccug

SEQ ID NO: 364090 - RNA, 22 nt, Human
gcauuauuaauagcugcaugag

SEQ ID NO: 364091 - RNA, 22 nt, Human
uuaacaauagaguuucuucagg

SEQ ID NO: 364092 - RNA, 19 nt, Human
aggccugggguuuugcacu

SEQ ID NO: 364093 - RNA, 22 nt, Human
aaauucaguuuuaauaaucacu

SEQ ID NO: 364094 - RNA, 22 nt, Human
uagaggcacccuggaggagacu

SEQ ID NO: 364095 - RNA, 22 nt, Human
gcuggugcauuagcugcaguuc

SEQ ID NO: 364096 - RNA, 22 nt, Human
gcgcaggagccgcggagggccg

SEQ ID NO: 364097 - RNA, 22 nt, Human
cauucuuauauuuacucauuca

SEQ ID NO: 364098 - RNA, 22 nt, Human
gaggcgagaagcuggagauggu

SEQ ID NO: 364099 - RNA, 22 nt, Human
gagugcagaugccagccccagu

SEQ ID NO: 364100 - RNA, 19 nt, Human
acccucucagugccugagg

SEQ ID NO: 364101 - RNA, 22 nt, Human
ucauggagacuuugagccuguu

SEQ ID NO: 364102 - RNA, 22 nt, Human
uucauucuuugaaucugaggua

SEQ ID NO: 364103 - RNA, 22 nt, Human
ucagaaauagucuuuaaaauga

SEQ ID NO: 364104 - RNA, 22 nt, Human
uccaggagguuuggaggaagca

SEQ ID NO: 364105 - RNA, 22 nt, Human
gaagggagaagguugggugacg

SEQ ID NO: 364106 - RNA, 22 nt, Human
uccaggcaaaaaccaacuacag

SEQ ID NO: 364107 - RNA, 22 nt, Human
ugaugggaaaaugaggccuggg

SEQ ID NO: 364108 - RNA, 22 nt, Human
aggcuggggaauugaauuugcu

SEQ ID NO: 364109 - RNA, 22 nt, Human
agaagcugccuacaugaccagc

SEQ ID NO: 364110 - RNA, 22 nt, Human
uagugcuuuaggccugaguguc

SEQ ID NO: 364111 - RNA, 22 nt, Human
cccagcagccagaaugaggagc

SEQ ID NO: 364112 - RNA, 22 nt, Human
uggggcaguuaauaaacauucu

SEQ ID NO: 364113 - RNA, 22 nt, Human
guagaaaugguguguuucuucu

SEQ ID NO: 364114 - RNA, 22 nt, Human
aucuggcucuuccuggaguucc

SEQ ID NO: 364115 - RNA, 22 nt, Human
gagccuggagcuggaacgaagc

SEQ ID NO: 364116 - RNA, 22 nt, Human
ugggcagaaggaagagccaccu

SEQ ID NO: 364117 - RNA, 22 nt, Human
guggcugcuacagagcuggagg

SEQ ID NO: 364118 - RNA, 21 nt, Human
uagggcaggcauuggaagaga

SEQ ID NO: 364119 - RNA, 22 nt, Human
agaaauguuuauggcugccuau

SEQ ID NO: 364120 - RNA, 22 nt, Human
ucuuugcaucccuuccauaguu

SEQ ID NO: 364121 - RNA, 22 nt, Human
cacagaauuaagggagaaauau

SEQ ID NO: 364122 - RNA, 22 nt, Human
acagagguaggacaugagauau

SEQ ID NO: 364123 - RNA, 22 nt, Human
ccauaagguugaaaacuguaca

SEQ ID NO: 364124 - RNA, 22 nt, Human
auaaauuuauaauuguuuccug

SEQ ID NO: 364125 - RNA, 22 nt, Human
acaacacagcaaaaccccaucu

SEQ ID NO: 364126 - RNA, 22 nt, Human
acaggugaccugcucauaugaa

SEQ ID NO: 364127 - RNA, 22 nt, Human
agcaaaguagcugcuguucuua

SEQ ID NO: 364128 - RNA, 22 nt, Human
cccaccccuggacaggugagug

SEQ ID NO: 364129 - RNA, 22 nt, Human
cccaggcacagauuaucccaau

SEQ ID NO: 364130 - RNA, 22 nt, Human
gaucauuuacuuguucuggacu

SEQ ID NO: 364131 - RNA, 21 nt, Human
uggcagggguaguaguacagc

SEQ ID NO: 364132 - RNA, 22 nt, Human
guacagaaggagcuuuggauuc

SEQ ID NO: 364133 - RNA, 22 nt, Human
ccaggagacuguacugauauuu

SEQ ID NO: 364134 - RNA, 22 nt, Human
cuggcccagucucagaguguca

SEQ ID NO: 364135 - RNA, 22 nt, Human
caaaugcagucccuuuguugcu

SEQ ID NO: 364136 - RNA, 22 nt, Human
ucaauucaacacaugcacauug

SEQ ID NO: 364137 - RNA, 22 nt, Human
cacaguggcagguguggguugu

SEQ ID NO: 364138 - RNA, 22 nt, Human
cuggcuggccggagcgaggcgg

SEQ ID NO: 364139 - RNA, 22 nt, Human
cauggccuugagugacugcacu

SEQ ID NO: 364140 - RNA, 22 nt, Human
ccugggcagugcuggaguugaa

SEQ ID NO: 364141 - RNA, 22 nt, Human
uagaaacagcauauauuagccc

SEQ ID NO: 364142 - RNA, 22 nt, Human
ucaucaaagucaaagaaugacu

SEQ ID NO: 364143 - RNA, 22 nt, Human
ccagggagccuggugugucagc

SEQ ID NO: 364144 - RNA, 22 nt, Human
uauguacauaacaugaaaugca

SEQ ID NO: 364145 - RNA, 22 nt, Human
guuauuaguaagacucgcacau

SEQ ID NO: 364146 - RNA, 22 nt, Human
gcugccugaucauacaccaggg

SEQ ID NO: 364147 - RNA, 22 nt, Human
cuaacuuuagcuuagauuauca

SEQ ID NO: 364148 - RNA, 22 nt, Human
accaucagagcacaguccgugc

SEQ ID NO: 364149 - RNA, 22 nt, Human
acagaauucucucugcagaggc

SEQ ID NO: 364150 - RNA, 22 nt, Human
uucuugcucaaugucuguuuaa

SEQ ID NO: 364151 - RNA, 22 nt, Human
ccacaggggcccacgagccgcu

SEQ ID NO: 364152 - RNA, 22 nt, Human
gcagugguggagcuuacauauc

SEQ ID NO: 364153 - RNA, 22 nt, Human
ggcuucugccacgagagggaag

SEQ ID NO: 364154 - RNA, 22 nt, Human
agcccagccggauucccaguuc

SEQ ID NO: 364155 - RNA, 22 nt, Human
ugaaaauggccugaagaagcaa

SEQ ID NO: 364156 - RNA, 22 nt, Human
auucacaauuagaaguagauaa

SEQ ID NO: 364157 - RNA, 22 nt, Human
aagcagcuggaagaguaagaug

SEQ ID NO: 364158 - RNA, 22 nt, Human
cuuggcagagggcugggcucag

SEQ ID NO: 364159 - RNA, 22 nt, Human
cagacaggcuagccagacucac

SEQ ID NO: 364160 - RNA, 22 nt, Human
aggcagccaguucagguuucuu

SEQ ID NO: 364161 - RNA, 21 nt, Human
ucucugugucuuuaagcugga

SEQ ID NO: 364162 - RNA, 22 nt, Human
caaagguaguauauauauuguu

SEQ ID NO: 364163 - RNA, 22 nt, Human
cugcaguguucuggaaugcauu

SEQ ID NO: 364164 - RNA, 19 nt, Human
gcuggggccugaccagaca

SEQ ID NO: 364165 - RNA, 19 nt, Human
cacagggcaggucucaugu

SEQ ID NO: 364166 - RNA, 23 nt, Human
aggcgagcucuucuccagcacgu

SEQ ID NO: 364167 - RNA, 22 nt, Human
uuggaaggugagucccuggguu

SEQ ID NO: 364168 - RNA, 22 nt, Human
ggagcugggguuggcaucuucc

SEQ ID NO: 364169 - RNA, 22 nt, Human
auuguacaugcagugagucauc

SEQ ID NO: 364170 - RNA, 22 nt, Human
ggcccaucucuugcucuggguu

SEQ ID NO: 364171 - RNA, 22 nt, Human
uggcugaggcacagcugccgcc

SEQ ID NO: 364172 - RNA, 22 nt, Human
gcugcccaguucugcugcugcc

SEQ ID NO: 364173 - RNA, 22 nt, Human
ggaggccaaggcagguggaucg

SEQ ID NO: 364174 - RNA, 22 nt, Human
uauuuucuguggaggaccagau

SEQ ID NO: 364175 - RNA, 22 nt, Human
auaugcauaugucaaaacuuau

SEQ ID NO: 364176 - RNA, 19 nt, Human
uuagggacaugaauucuag

SEQ ID NO: 364177 - RNA, 22 nt, Human
ugggcagccaucccagccucuc

SEQ ID NO: 364178 - RNA, 22 nt, Human
cccucuacagggaagcgcuuuc

SEQ ID NO: 364179 - RNA, 22 nt, Human
uucuucucggcugucagauagu

SEQ ID NO: 364180 - RNA, 22 nt, Human
uacaguucacaguaucauaaau

SEQ ID NO: 364181 - RNA, 22 nt, Human
cacaucuucuuaacuccaaagu

SEQ ID NO: 364182 - RNA, 22 nt, Human
cagggcugaacugagcuuguga

SEQ ID NO: 364183 - RNA, 22 nt, Human
uuugacaugcaaagcacuuuag

SEQ ID NO: 364184 - RNA, 22 nt, Human
ugcaggagaaaguacggagcgu

SEQ ID NO: 364185 - RNA, 22 nt, Human
cuuggccucuucucaggguggg

SEQ ID NO: 364186 - RNA, 22 nt, Human
uuuccauguuggugaaaugagg

SEQ ID NO: 364187 - RNA, 22 nt, Human
ccagguggugaaagugggcccu

SEQ ID NO: 364188 - RNA, 22 nt, Human
ugaagcaggaaccagcagcauu

SEQ ID NO: 364189 - RNA, 22 nt, Human
ucagagcuuaucucuugcugga

SEQ ID NO: 364190 - RNA, 22 nt, Human
auucuccagcucacuguccaua

SEQ ID NO: 364191 - RNA, 23 nt, Human
ccagcccuccaccagcucuaggc

SEQ ID NO: 364192 - RNA, 22 nt, Human
cugccuggccugaucuccacgc

SEQ ID NO: 364193 - RNA, 22 nt, Human
ugguggccaauucacagggcuc

SEQ ID NO: 364194 - RNA, 22 nt, Human
gcagcuggugcaaaugucacuc

SEQ ID NO: 364195 - RNA, 22 nt, Human
auuucuguuugcuacuauaagu

SEQ ID NO: 364196 - RNA, 22 nt, Human
ugaggcagucacccccuccugc

SEQ ID NO: 364197 - RNA, 22 nt, Human
uucaagguaugguagcugguca

SEQ ID NO: 364198 - RNA, 20 nt, Human
uccugagauuuaagggguuc

SEQ ID NO: 364199 - RNA, 22 nt, Human
ugucagagcaaugagguucagc

SEQ ID NO: 364200 - RNA, 22 nt, Human
gcccaggauucuuucuuccuua

SEQ ID NO: 364201 - RNA, 22 nt, Human
ggaaagccaggugcucuggugu

SEQ ID NO: 364202 - RNA, 21 nt, Human
auccauccaucuuggccuaac

SEQ ID NO: 364203 - RNA, 21 nt, Human
uuuaauuugcauguaugacgc

SEQ ID NO: 364204 - RNA, 19 nt, Human
ugggccugcaucugggucu

SEQ ID NO: 364205 - RNA, 22 nt, Human
gagcagcuccagccgcaugacu

SEQ ID NO: 364206 - RNA, 19 nt, Human
uggcagaggcaguuuguac

SEQ ID NO: 364207 - RNA, 22 nt, Human
uggcucagcugacucggcuucu

SEQ ID NO: 364208 - RNA, 22 nt, Human
gacccaggguuucugcacaggg

SEQ ID NO: 364209 - RNA, 22 nt, Human
ucccagggcagcuguccagaag

SEQ ID NO: 364210 - RNA, 22 nt, Human
ucagggcaccaaaaaagaugcc

SEQ ID NO: 364211 - RNA, 22 nt, Human
agucaggauaugccuugugggc

SEQ ID NO: 364212 - RNA, 22 nt, Human
agaauaaacugcuuuagggcag

SEQ ID NO: 364213 - RNA, 22 nt, Human
uggccaccccuuucucugcacu

SEQ ID NO: 364214 - RNA, 18 nt, Human
uggcagggaggaaauaua

SEQ ID NO: 364215 - RNA, 22 nt, Human
ugagacaaaauugacagacaaa

SEQ ID NO: 364216 - RNA, 22 nt, Human
gggagcugagggaccucugugg

SEQ ID NO: 364217 - RNA, 18 nt, Human
uuccauaauguauguaac

SEQ ID NO: 364218 - RNA, 22 nt, Human
agcugaggcauggacaggcugc

SEQ ID NO: 364219 - RNA, 22 nt, Human
ggcugccugcucaggugcggcg

SEQ ID NO: 364220 - RNA, 22 nt, Human
gcacagggcaacaggucuguua

SEQ ID NO: 364221 - RNA, 22 nt, Human
ccuuuaauuuacaauguuaauu

SEQ ID NO: 364222 - RNA, 22 nt, Human
ggaggagacaguaaaaagcacg

SEQ ID NO: 364223 - RNA, 22 nt, Human
uugaaauacugcauuguucagu

SEQ ID NO: 364224 - RNA, 22 nt, Human
ggcuuggaccagucacaguggu

SEQ ID NO: 364225 - RNA, 18 nt, Human
gggcaucauucacaaagu

SEQ ID NO: 364226 - RNA, 22 nt, Human
agccucugcacgggcacgggug

SEQ ID NO: 364227 - RNA, 22 nt, Human
acagaauuuaaagcucuagacu

SEQ ID NO: 364228 - RNA, 22 nt, Human
aaugguuuucuagaacaugaaa

SEQ ID NO: 364229 - RNA, 22 nt, Human
gcagagaacccagcagauuggc

SEQ ID NO: 364230 - RNA, 22 nt, Human
ucucucuugucaccccaucugc

SEQ ID NO: 364231 - RNA, 22 nt, Human
cugccugugugugccugcagaa

SEQ ID NO: 364232 - RNA, 22 nt, Human
gccugaagaacagcugugagga

SEQ ID NO: 364233 - RNA, 20 nt, Human
aggaggcauagucuggaaag

SEQ ID NO: 364234 - RNA, 22 nt, Human
agcuggcagagcauuuguggcc

SEQ ID NO: 364235 - RNA, 22 nt, Human
auggcuuuuuagacuuugguac

SEQ ID NO: 364236 - RNA, 22 nt, Human
uaaggccaaggggccauagucu

SEQ ID NO: 364237 - RNA, 22 nt, Human
uucauagugauuguucagauag

SEQ ID NO: 364238 - RNA, 22 nt, Human
cauugcacuucugcuuuuccuc

SEQ ID NO: 364239 - RNA, 22 nt, Human
caggaaagguagucacaaugua

SEQ ID NO: 364240 - RNA, 19 nt, Human
ucugucacuggggguauuc

SEQ ID NO: 364241 - RNA, 22 nt, Human
ccaggagaugauguuggggauu

SEQ ID NO: 364242 - RNA, 22 nt, Human
agcugggccugagcuggaagcu

SEQ ID NO: 364243 - RNA, 22 nt, Human
ggccucugaggacagccuuggc

SEQ ID NO: 364244 - RNA, 22 nt, Human
agaggccaugcuagaggccugg

SEQ ID NO: 364245 - RNA, 22 nt, Human
acagcuggaggucugugagcac

SEQ ID NO: 364246 - RNA, 22 nt, Human
cuggcugccacuucagggucuu

SEQ ID NO: 364247 - RNA, 22 nt, Human
ggagcagagcucuucaucugca

SEQ ID NO: 364248 - RNA, 23 nt, Human
cauguacagaguuugauaaagug

SEQ ID NO: 364249 - RNA, 22 nt, Human
uggcagcagccauggaaggccc

SEQ ID NO: 364250 - RNA, 22 nt, Human
uacacauguuuggcaaguaugu

SEQ ID NO: 364251 - RNA, 22 nt, Human
gggcagcuguaucugagcuuau

SEQ ID NO: 364252 - RNA, 17 nt, Human
ucuguucaagugagagg

SEQ ID NO: 364253 - RNA, 22 nt, Human
aaaauaucagcaaagggugaca

SEQ ID NO: 364254 - RNA, 22 nt, Human
cccuccagagcuugaccugcug

SEQ ID NO: 364255 - RNA, 22 nt, Human
acugaaggaagcgggcaggggu

SEQ ID NO: 364256 - RNA, 22 nt, Human
auguuucaugacugagcaaaau

SEQ ID NO: 364257 - RNA, 22 nt, Human
agcugguggauuaugcuguaca

SEQ ID NO: 364258 - RNA, 22 nt, Human
ggcuggaaguccaagaucaaga

SEQ ID NO: 364259 - RNA, 22 nt, Human
uggcuggcaaggcuggagucag

SEQ ID NO: 364260 - RNA, 22 nt, Human
aagagaggacauggugaaccug

SEQ ID NO: 364261 - RNA, 22 nt, Human
aagggcaggcacccacccucac

SEQ ID NO: 364262 - RNA, 22 nt, Human
ugcauuguuugauaggugaauu

SEQ ID NO: 364263 - RNA, 22 nt, Human
ucauuuaauugguuuugcucgu

SEQ ID NO: 364264 - RNA, 22 nt, Human
auggcaagcaagcugaagagau

SEQ ID NO: 364265 - RNA, 22 nt, Human
aaagccagaguguguuagagac

SEQ ID NO: 364266 - RNA, 22 nt, Human
acagcugugaagcaagcacucu

SEQ ID NO: 364267 - RNA, 22 nt, Human
gccagccccuuagggcucuccc

SEQ ID NO: 364268 - RNA, 22 nt, Human
cauuuguaucugggcugcugug

SEQ ID NO: 364269 - RNA, 22 nt, Human
aggggccuggacauggacgcgc

SEQ ID NO: 364270 - RNA, 22 nt, Human
acaacauuauacauagaaagcu

SEQ ID NO: 364271 - RNA, 22 nt, Human
uuucaguucaguuuauuauauc

SEQ ID NO: 364272 - RNA, 19 nt, Human
gaucuuugccaauuuaagc

SEQ ID NO: 364273 - RNA, 22 nt, Human
cauuucuguacauguuuuggug

SEQ ID NO: 364274 - RNA, 22 nt, Human
gcugucugggaggccuccacuu

SEQ ID NO: 364275 - RNA, 22 nt, Human
uuugcagucaaauuugcuaaau

SEQ ID NO: 364276 - RNA, 22 nt, Human
gaaaugcagaaccugagaccau

SEQ ID NO: 364277 - RNA, 22 nt, Human
guguggcugccagccaagaggc

SEQ ID NO: 364278 - RNA, 22 nt, Human
uaaaugugaccuucauuuuaua

SEQ ID NO: 364279 - RNA, 22 nt, Human
gccugagauucccggagccgug

SEQ ID NO: 364280 - RNA, 22 nt, Human
acaggggauugauuggaagucu

SEQ ID NO: 364281 - RNA, 22 nt, Human
ccagcuccucuucccaguguca

SEQ ID NO: 364282 - RNA, 22 nt, Human
gaaagccaucuggcugcuggga

SEQ ID NO: 364283 - RNA, 22 nt, Human
gaaaccucuuagccucucuuug

SEQ ID NO: 364284 - RNA, 22 nt, Human
ccaggugugcucugcaguggau

SEQ ID NO: 364285 - RNA, 22 nt, Human
acagauuuaggacuguagcgau

SEQ ID NO: 364286 - RNA, 22 nt, Human
gcugaguugaaagcagaggaua

SEQ ID NO: 364287 - RNA, 22 nt, Human
agcuggcuccagaaggagucgu

SEQ ID NO: 364288 - RNA, 21 nt, Human
uuucugaaggcaacaucuauc

SEQ ID NO: 364289 - RNA, 22 nt, Human
ugcuuuauaacuuaguuuaugg

SEQ ID NO: 364290 - RNA, 22 nt, Human
gcccaggaggucaaguagcuau

SEQ ID NO: 364291 - RNA, 22 nt, Human
acaggcucucagccaguuggca

SEQ ID NO: 364292 - RNA, 22 nt, Human
uauucacaguugauuuacaguu

SEQ ID NO: 364293 - RNA, 22 nt, Human
caggcugucugaauggaggccc

SEQ ID NO: 364294 - RNA, 22 nt, Human
ggcagcauauauucagugggca

SEQ ID NO: 364295 - RNA, 22 nt, Human
aggcccagcccguccucgugcu

SEQ ID NO: 364296 - RNA, 23 nt, Human
gggagccaggaccucgcgcccca

SEQ ID NO: 364297 - RNA, 22 nt, Human
uguacaaucugaugauguaugg

SEQ ID NO: 364298 - RNA, 22 nt, Human
ugggccacacacagaagaauca

SEQ ID NO: 364299 - RNA, 22 nt, Human
auguguauacuugugcuuacuc

SEQ ID NO: 364300 - RNA, 22 nt, Human
uccuaguucucugccagucgcu

SEQ ID NO: 364301 - RNA, 22 nt, Human
cauuuccagcuccugcaucaug

SEQ ID NO: 364302 - RNA, 22 nt, Human
cuacccagagugaaucucuuaa

SEQ ID NO: 364303 - RNA, 22 nt, Human
ucuacagacagagcagguggga

SEQ ID NO: 364304 - RNA, 22 nt, Human
agaaaucacaggaggcagaagg

SEQ ID NO: 364305 - RNA, 22 nt, Human
aauuuuauuagaaggcaagggg

SEQ ID NO: 364306 - RNA, 22 nt, Human
uauguacauggagagcaauuga

SEQ ID NO: 364307 - RNA, 18 nt, Human
gggcccuggcguccgccc

SEQ ID NO: 364308 - RNA, 22 nt, Human
ugauggcuaucccuggaagggc

SEQ ID NO: 364309 - RNA, 22 nt, Human
uuucaucuaacacuacauaggg

SEQ ID NO: 364310 - RNA, 22 nt, Human
agauacaaaagauaagauuuag

SEQ ID NO: 364311 - RNA, 22 nt, Human
uggccugguuguugcugccguu

SEQ ID NO: 364312 - RNA, 22 nt, Human
cacauauuugaugaagcuuugu

SEQ ID NO: 364313 - RNA, 22 nt, Human
ggcagcaucucuggcagcagcu

SEQ ID NO: 364314 - RNA, 22 nt, Human
agcugcugagagucugccgggc

SEQ ID NO: 364315 - RNA, 22 nt, Human
agucccagaugacccagcuacu

SEQ ID NO: 364316 - RNA, 20 nt, Human
ggcagagggccugggagaag

SEQ ID NO: 364317 - RNA, 22 nt, Human
agggcuccuaugccccauggac

SEQ ID NO: 364318 - RNA, 22 nt, Human
agugcagagaccuggucaggca

SEQ ID NO: 364319 - RNA, 22 nt, Human
ggccucucuccagucagugcag

SEQ ID NO: 364320 - RNA, 22 nt, Human
cccagaggugcuucagaggugc

SEQ ID NO: 364321 - RNA, 22 nt, Human
augucacagcucccauuccucc

SEQ ID NO: 364322 - RNA, 22 nt, Human
ucaggagaguguucaguggagg

SEQ ID NO: 364323 - RNA, 22 nt, Human
uuugaaguguuauuucuaucac

SEQ ID NO: 364324 - RNA, 22 nt, Human
ucauccaguuguggagagggaa

SEQ ID NO: 364325 - RNA, 22 nt, Human
guccaugauucugugacacccu

SEQ ID NO: 364326 - RNA, 23 nt, Human
cacacccaucacuaagagcuccu

SEQ ID NO: 364327 - RNA, 17 nt, Human
acaagcaguggccaugg

SEQ ID NO: 364328 - RNA, 22 nt, Human
ugcaugcagcuggugauaagaa

SEQ ID NO: 364329 - RNA, 23 nt, Human
gcugucugucaucucugcgggag

SEQ ID NO: 364330 - RNA, 22 nt, Human
gauuuccauuuucaacuccugc

SEQ ID NO: 364331 - RNA, 22 nt, Human
cagcugcccaggccaccuggag

SEQ ID NO: 364332 - RNA, 22 nt, Human
cuguuuucaaagagagagaaug

SEQ ID NO: 364333 - RNA, 22 nt, Human
agaagcuugaaggagcagugac

SEQ ID NO: 364334 - RNA, 22 nt, Human
ugggcagagucguggggaauag

SEQ ID NO: 364335 - RNA, 22 nt, Human
ggcugcaggaugcccagccgug

SEQ ID NO: 364336 - RNA, 20 nt, Human
caggcaguuugugguuaggg

SEQ ID NO: 364337 - RNA, 22 nt, Human
agacccugucaguguuaggaaa

SEQ ID NO: 364338 - RNA, 22 nt, Human
agugacugggcagggcagggcc

SEQ ID NO: 364339 - RNA, 22 nt, Human
ggagugacucucggggccacua

SEQ ID NO: 364340 - RNA, 22 nt, Human
caaaagcaguucuaucugaguu

SEQ ID NO: 364341 - RNA, 23 nt, Human
uggcaaggaaugggauggagacu

SEQ ID NO: 364342 - RNA, 22 nt, Human
acaguggaauuuguagaugugu

SEQ ID NO: 364343 - RNA, 22 nt, Human
gccugccugaaggcuguaccag

SEQ ID NO: 364344 - RNA, 22 nt, Human
uauuccuauggccacugcuacu

SEQ ID NO: 364345 - RNA, 22 nt, Human
cuggaaugccucccugucagag

SEQ ID NO: 364346 - RNA, 22 nt, Human
ucagaguggugguuuugccuuc

SEQ ID NO: 364347 - RNA, 22 nt, Human
gggugacauuucccaaugagcc

SEQ ID NO: 364348 - RNA, 22 nt, Human
gaggcucagggaaacagcgcag

SEQ ID NO: 364349 - RNA, 22 nt, Human
ugcagggaaugcuugcagcaug

SEQ ID NO: 364350 - RNA, 22 nt, Human
cuugaaucuggcuuugccacuu

SEQ ID NO: 364351 - RNA, 22 nt, Human
ccagaucuucuuuucagugucu

SEQ ID NO: 364352 - RNA, 22 nt, Human
aguggcagaagccaagucugca

SEQ ID NO: 364353 - RNA, 22 nt, Human
uuucucauagucaugccucuua

SEQ ID NO: 364354 - RNA, 22 nt, Human
uggagcucaaaggccuguggga

SEQ ID NO: 364355 - RNA, 22 nt, Human
acuucacagaaauuuuaugagg

SEQ ID NO: 364356 - RNA, 22 nt, Human
uucucuucuguucagugcccaa

SEQ ID NO: 364357 - RNA, 22 nt, Human
uugcuagcugguguaugcauug

SEQ ID NO: 364358 - RNA, 22 nt, Human
aggcagccaucugcaggaagga

SEQ ID NO: 364359 - RNA, 22 nt, Human
agucaccagguuuuagagaccu

SEQ ID NO: 364360 - RNA, 22 nt, Human
uggccuuguguuuuagagaaag

SEQ ID NO: 364361 - RNA, 22 nt, Human
uaaauuauguuccauguccuuu

SEQ ID NO: 364362 - RNA, 22 nt, Human
ccaggccuuccaguacgcagaa

SEQ ID NO: 364363 - RNA, 22 nt, Human
gcuuuguguagaaggaggaugg

SEQ ID NO: 364364 - RNA, 20 nt, Human
aaguuuucuccaaauacagu

SEQ ID NO: 364365 - RNA, 22 nt, Human
aggagucacucagggcuucauc

SEQ ID NO: 364366 - RNA, 22 nt, Human
uccaggcauuggagagauaaug

SEQ ID NO: 364367 - RNA, 23 nt, Human
agggcugaaugcagagaagcaga

SEQ ID NO: 364368 - RNA, 22 nt, Human
gcucccagcauugcuucccagg

SEQ ID NO: 364369 - RNA, 20 nt, Human
caggcacacucauuccugcu

SEQ ID NO: 364370 - RNA, 22 nt, Human
ccaggagcaacuugaaggcaag

SEQ ID NO: 364371 - RNA, 22 nt, Human
auuuuaucugcuuacuuucagg

SEQ ID NO: 364372 - RNA, 22 nt, Human
uagggcugccuauggcuagaua

SEQ ID NO: 364373 - RNA, 22 nt, Human
uggagcugacucacaccagcua

SEQ ID NO: 364374 - RNA, 22 nt, Human
gcugaaugaauguauuuuaaaa

SEQ ID NO: 364375 - RNA, 22 nt, Human
auacauuagcucauaugauuaa

SEQ ID NO: 364376 - RNA, 22 nt, Human
uucaggaucauuuguuuuaucu

SEQ ID NO: 364377 - RNA, 22 nt, Human
ugcagugugaccuguagcgagc

SEQ ID NO: 364378 - RNA, 20 nt, Human
ucucaggccccaguuuucuu

SEQ ID NO: 364379 - RNA, 23 nt, Human
ugggcaucuccucugugccaggc

SEQ ID NO: 364380 - RNA, 22 nt, Human
agauuucccacuccauguauug

SEQ ID NO: 364381 - RNA, 22 nt, Human
aggcucugcagugcuggaggac

SEQ ID NO: 364382 - RNA, 22 nt, Human
aaguaaaacacacaguccaccg

SEQ ID NO: 364383 - RNA, 22 nt, Human
uuaacauuguccuuagcagauu

SEQ ID NO: 364384 - RNA, 22 nt, Human
cuccucccugcgauugcucugc

SEQ ID NO: 364385 - RNA, 21 nt, Human
uagggcucuauuuuuauuuca

SEQ ID NO: 364386 - RNA, 22 nt, Human
uccucagaaaccccugugaggu

SEQ ID NO: 364387 - RNA, 19 nt, Human
aggugcaggucacagggga

SEQ ID NO: 364388 - RNA, 22 nt, Human
cugcagaggucuugcugauggu

SEQ ID NO: 364389 - RNA, 22 nt, Human
aguccuuaugagaugcugccuu

SEQ ID NO: 364390 - RNA, 22 nt, Human
aacauucugguucuaaaaaccu

SEQ ID NO: 364391 - RNA, 22 nt, Human
auguaacuguuauauuuuguug

SEQ ID NO: 364392 - RNA, 22 nt, Human
gcaucuuucuguccauucagca

SEQ ID NO: 364393 - RNA, 22 nt, Human
cagacacagauaugcauauggc

SEQ ID NO: 364394 - RNA, 22 nt, Human
gagucaccacugugauagucga

SEQ ID NO: 364395 - RNA, 22 nt, Human
uccaggcuagaagucacaggcc

SEQ ID NO: 364396 - RNA, 19 nt, Human
agauggggaagagugugag

SEQ ID NO: 364397 - RNA, 22 nt, Human
uauuucagucacuucuucucug

SEQ ID NO: 364398 - RNA, 22 nt, Human
ggcuggcauccagggaaaucca

SEQ ID NO: 364399 - RNA, 22 nt, Human
ggagagcugguagcuggcucca

SEQ ID NO: 364400 - RNA, 21 nt, Human
ucuauucauuacaguuauuug

SEQ ID NO: 364401 - RNA, 22 nt, Human
cuggccuggggccucagcugcu

SEQ ID NO: 364402 - RNA, 22 nt, Human
ucacaugcucaccuaagccaca

SEQ ID NO: 364403 - RNA, 22 nt, Human
uuguacaaaggauuuggaagag

SEQ ID NO: 364404 - RNA, 22 nt, Human
uugaggaguguuuagggugagg

SEQ ID NO: 364405 - RNA, 21 nt, Human
uggcucugcucagagcagucc

SEQ ID NO: 364406 - RNA, 22 nt, Human
acaauucucucauaucuuauua

SEQ ID NO: 364407 - RNA, 22 nt, Human
cucuucuugucucugguuagaa

SEQ ID NO: 364408 - RNA, 22 nt, Human
agggagguaggagcuucuagcu

SEQ ID NO: 364409 - RNA, 23 nt, Human
gccaggaguggguagacuaaugc

SEQ ID NO: 364410 - RNA, 22 nt, Human
ucugccuucgcugcucccugaa

SEQ ID NO: 364411 - RNA, 22 nt, Human
aggagaguaccauugggccgca

SEQ ID NO: 364412 - RNA, 22 nt, Human
uaguacuuaucucugucauugu

SEQ ID NO: 364413 - RNA, 22 nt, Human
cucagcagugacaagagaguau

SEQ ID NO: 364414 - RNA, 21 nt, Human
ugauuuccaucuuaaaauaaa

SEQ ID NO: 364415 - RNA, 22 nt, Human
aaagcagacugauuugcaucac

SEQ ID NO: 364416 - RNA, 22 nt, Human
gugcuuccccaagccacagccu

SEQ ID NO: 364417 - RNA, 22 nt, Human
ccagauaaggcuuuuuaaaagc

SEQ ID NO: 364418 - RNA, 22 nt, Human
caggugggcuugggagaacacu

SEQ ID NO: 364419 - RNA, 22 nt, Human
uggcagagagagugcagucgac

SEQ ID NO: 364420 - RNA, 22 nt, Human
gggagagguuacccgagcaacu

SEQ ID NO: 364421 - RNA, 19 nt, Human
uauggcaggccgaggcacu

SEQ ID NO: 364422 - RNA, 22 nt, Human
cuaauacucauuucuguaacuc

SEQ ID NO: 364423 - RNA, 23 nt, Human
caugccaguuugugcaggcagau

SEQ ID NO: 364424 - RNA, 22 nt, Human
uccuucaggguugaggccgacu

SEQ ID NO: 364425 - RNA, 22 nt, Human
ugaugggacugccagcugcuga

SEQ ID NO: 364426 - RNA, 22 nt, Human
cagcaggaggugaguagcaggu

SEQ ID NO: 364427 - RNA, 22 nt, Human
ucaaauguucccuguacuggcc

SEQ ID NO: 364428 - RNA, 19 nt, Human
guggccugcgcugggugcg

SEQ ID NO: 364429 - RNA, 22 nt, Human
aggggaggagcuuuucuugccu

SEQ ID NO: 364430 - RNA, 22 nt, Human
gcugagagugggugcagugcuu

SEQ ID NO: 364431 - RNA, 22 nt, Human
caggaugagaggcccagggaag

SEQ ID NO: 364432 - RNA, 22 nt, Human
caaagguauaaguuaauauaca

SEQ ID NO: 364433 - RNA, 22 nt, Human
gcagacuggucuucagccuugg

SEQ ID NO: 364434 - RNA, 22 nt, Human
gccugugcuuaacugacgugag

SEQ ID NO: 364435 - RNA, 22 nt, Human
agcugcuacugcucugccagag

SEQ ID NO: 364436 - RNA, 22 nt, Human
ccguagcacaugcuccuggggc

SEQ ID NO: 364437 - RNA, 22 nt, Human
uacuuguuaucaucuuuuccuu

SEQ ID NO: 364438 - RNA, 21 nt, Human
gcucuuggaaggggcucagcu

SEQ ID NO: 364439 - RNA, 22 nt, Human
ccagcugacgaugccuggucuc

SEQ ID NO: 364440 - RNA, 22 nt, Human
aguguauugauuggaacagccu

SEQ ID NO: 364441 - RNA, 20 nt, Human
cccugcagccaugggagugg

SEQ ID NO: 364442 - RNA, 23 nt, Human
cagaggcaucggauucaacauca

SEQ ID NO: 364443 - RNA, 22 nt, Human
ugcauaguucuccuuccuccuc

SEQ ID NO: 364444 - RNA, 22 nt, Human
acugcccucccaucuauugcaa

SEQ ID NO: 364445 - RNA, 22 nt, Human
cugagguguugaugaccuaugc

SEQ ID NO: 364446 - RNA, 23 nt, Human
ugcuucucugcuugacaguucug

SEQ ID NO: 364447 - RNA, 22 nt, Human
aaaaaguuucaacugccaacuc

SEQ ID NO: 364448 - RNA, 22 nt, Human
ccugucugagccagggugggca

SEQ ID NO: 364449 - RNA, 22 nt, Human
aaggcagcaggauuuggugacu

SEQ ID NO: 364450 - RNA, 21 nt, Human
ugagccaggcugacggcugug

SEQ ID NO: 364451 - RNA, 22 nt, Human
acagguggaggcuuuaggaggu

SEQ ID NO: 364452 - RNA, 22 nt, Human
gcuguucacagacucugcucug

SEQ ID NO: 364453 - RNA, 21 nt, Human
uggcucugagccucauggcug

SEQ ID NO: 364454 - RNA, 22 nt, Human
ugcagggcuuccucuuggaguu

SEQ ID NO: 364455 - RNA, 22 nt, Human
cagcagggaagcugugcuguuu

SEQ ID NO: 364456 - RNA, 22 nt, Human
uuaauuacaaaacacauagguu

SEQ ID NO: 364457 - RNA, 22 nt, Human
acuggcagccacaacuggcagg

SEQ ID NO: 364458 - RNA, 22 nt, Human
uggggcugaggagccucacucu

SEQ ID NO: 364459 - RNA, 22 nt, Human
caggagugaguuggggucuaca

SEQ ID NO: 364460 - RNA, 22 nt, Human
uggcagggaauacagauguuua

SEQ ID NO: 364461 - RNA, 22 nt, Human
ugcagagguguugcugagauaa

SEQ ID NO: 364462 - RNA, 22 nt, Human
uggcuggcuuguucacugacug

SEQ ID NO: 364463 - RNA, 22 nt, Human
gcccaggaaagauagggccuca

SEQ ID NO: 364464 - RNA, 22 nt, Human
gggugcagggucuccagcagcu

SEQ ID NO: 364465 - RNA, 22 nt, Human
aggcaagggggcgccaccuucc

SEQ ID NO: 364466 - RNA, 22 nt, Human
ucuugccucuuccccuuuccau

SEQ ID NO: 364467 - RNA, 22 nt, Human
uuguacuugccauagaacaaca

SEQ ID NO: 364468 - RNA, 22 nt, Human
cccugcagcauucucuaacugg

SEQ ID NO: 364469 - RNA, 22 nt, Human
ugugaaaggagccauagacagu

SEQ ID NO: 364470 - RNA, 22 nt, Human
cagucccaucucccagguggcu

SEQ ID NO: 364471 - RNA, 22 nt, Human
gaaaaaggauaaauacaguguu

SEQ ID NO: 364472 - RNA, 22 nt, Human
ugaaauaggaaacagauguuuc

SEQ ID NO: 364473 - RNA, 18 nt, Human
caggucagccuggccuca

SEQ ID NO: 364474 - RNA, 22 nt, Human
cccagcacuuugaauaugucac

SEQ ID NO: 364475 - RNA, 22 nt, Human
acccaggagccgugagagguua

SEQ ID NO: 364476 - RNA, 22 nt, Human
guuuuacacaccuaugaaagac

SEQ ID NO: 364477 - RNA, 22 nt, Human
auuucuucaggucagaaauaga

SEQ ID NO: 364478 - RNA, 22 nt, Human
gaggcaggcagauugcuugagg

SEQ ID NO: 364479 - RNA, 21 nt, Human
uauacaugugugcauacgugu

SEQ ID NO: 364480 - RNA, 22 nt, Human
ggucauuguucuuuucugugau

SEQ ID NO: 364481 - RNA, 22 nt, Human
ugcagggccagacuggguugga

SEQ ID NO: 364482 - RNA, 22 nt, Human
ugauugacuuuagaauagcacu

SEQ ID NO: 364483 - RNA, 22 nt, Human
ccagcagcgauagggugagugc

SEQ ID NO: 364484 - RNA, 22 nt, Human
gaggcugcuuugaugacaggag

SEQ ID NO: 364485 - RNA, 22 nt, Human
aguccagugucaaggugccauu

SEQ ID NO: 364486 - RNA, 22 nt, Human
agucccagugacuuggccagaa

SEQ ID NO: 364487 - RNA, 23 nt, Human
ggcugagacuacaggcgcuugcc

SEQ ID NO: 364488 - RNA, 22 nt, Human
agggcuggcuccguuaccuuga

SEQ ID NO: 364489 - RNA, 22 nt, Human
agagcucaagacgcucacagua

SEQ ID NO: 364490 - RNA, 22 nt, Human
aucccaugagaccacguuggcu

SEQ ID NO: 364491 - RNA, 22 nt, Human
aggcagucuaucucuggagccu

SEQ ID NO: 364492 - RNA, 22 nt, Human
gaggaaaauaacaacuaagggc

SEQ ID NO: 364493 - RNA, 22 nt, Human
guauucuugguuaucaaaauac

SEQ ID NO: 364494 - RNA, 19 nt, Human
ggaaacaggggccagagga

SEQ ID NO: 364495 - RNA, 22 nt, Human
uucaauucaauucuaaauauau

SEQ ID NO: 364496 - RNA, 21 nt, Human
gaaaagcaagggaguagaaca

SEQ ID NO: 364497 - RNA, 22 nt, Human
agagggcagucucagauuggga

SEQ ID NO: 364498 - RNA, 22 nt, Human
auauuaggaguuaaauguauua

SEQ ID NO: 364499 - RNA, 22 nt, Human
cagagguauugcaaaagccuag

SEQ ID NO: 364500 - RNA, 22 nt, Human
uuuccucuucgauuaaguuugg

SEQ ID NO: 364501 - RNA, 22 nt, Human
guuaauauuuaccugucaagaa

SEQ ID NO: 364502 - RNA, 22 nt, Human
cuuccucugcggcgccgggcgc

SEQ ID NO: 364503 - RNA, 22 nt, Human
cccugccugugggcaucaacau

SEQ ID NO: 364504 - RNA, 22 nt, Human
ccucuucugcuucaggagcacu

SEQ ID NO: 364505 - RNA, 22 nt, Human
uugguacaaaaguaacuguggu

SEQ ID NO: 364506 - RNA, 20 nt, Human
cugccuggaggccucuaccu

SEQ ID NO: 364507 - RNA, 22 nt, Human
aggcagcugaccacaguaugau

SEQ ID NO: 364508 - RNA, 22 nt, Human
caauuucagguggauagguuuu

SEQ ID NO: 364509 - RNA, 22 nt, Human
uguguacaggccuugcuagacu

SEQ ID NO: 364510 - RNA, 22 nt, Human
ugaagccagcuuuggaagacac

SEQ ID NO: 364511 - RNA, 22 nt, Human
gggcacagaagucuaagacauc

SEQ ID NO: 364512 - RNA, 22 nt, Human
acacauuucuaaauuuuuaccg

SEQ ID NO: 364513 - RNA, 22 nt, Human
aguggggaagagcaugggcccu

SEQ ID NO: 364514 - RNA, 22 nt, Human
auugaauagaugcauuauacua

SEQ ID NO: 364515 - RNA, 22 nt, Human
cagcucugugcaggccugggga

SEQ ID NO: 364516 - RNA, 22 nt, Human
agccuggauccuaggcucagcu

SEQ ID NO: 364517 - RNA, 22 nt, Human
augucacagucugacucaguga

SEQ ID NO: 364518 - RNA, 22 nt, Human
uccuggagauaauugcagugaa

SEQ ID NO: 364519 - RNA, 22 nt, Human
aaguuuuccuguguccaagaug

SEQ ID NO: 364520 - RNA, 22 nt, Human
ugaauggucacugagcaucugu

SEQ ID NO: 364521 - RNA, 22 nt, Human
agccagaguugaaugugagucu

SEQ ID NO: 364522 - RNA, 20 nt, Human
uacuggauuagggcucaccc

SEQ ID NO: 364523 - RNA, 22 nt, Human
gcagugaaaaagugcacccugu

SEQ ID NO: 364524 - RNA, 22 nt, Human
gcuuuggaugugugccugaggu

SEQ ID NO: 364525 - RNA, 22 nt, Human
aggugaguugguaggaaguuug

SEQ ID NO: 364526 - RNA, 23 nt, Human
cuuuuaacuagaguaucagcugc

SEQ ID NO: 364527 - RNA, 22 nt, Human
aaugucugccagaacugaucau

SEQ ID NO: 364528 - RNA, 22 nt, Human
gguguccuugcagaaggcggcg

SEQ ID NO: 364529 - RNA, 20 nt, Human
acaauacagguugugucuga

SEQ ID NO: 364530 - RNA, 20 nt, Human
cugcaggguuagaggcucca

SEQ ID NO: 364531 - RNA, 22 nt, Human
aucuggcucacuuagucuagga

SEQ ID NO: 364532 - RNA, 22 nt, Human
caugaagcauguuuugucauga

SEQ ID NO: 364533 - RNA, 22 nt, Human
gcccagcugcacccuggugggu

SEQ ID NO: 364534 - RNA, 22 nt, Human
uugcauuguaggauguuagaag

SEQ ID NO: 364535 - RNA, 22 nt, Human
cacaaugcguacauauaucaaa

SEQ ID NO: 364536 - RNA, 21 nt, Human
cucaaagaccaaaaguguaga

SEQ ID NO: 364537 - RNA, 22 nt, Human
ccaggaguuugaggcugcagug

SEQ ID NO: 364538 - RNA, 22 nt, Human
ccugagugaauucccucacugu

SEQ ID NO: 364539 - RNA, 22 nt, Human
aaggcagcacagcaacugcuca

SEQ ID NO: 364540 - RNA, 22 nt, Human
uuccaggaagcaguuagcagcc

SEQ ID NO: 364541 - RNA, 16 nt, Human
ggagagugucugcaaa

SEQ ID NO: 364542 - RNA, 22 nt, Human
agccauccucccaccucagccu

SEQ ID NO: 364543 - RNA, 22 nt, Human
aaaguguagagacuuuggaacc

SEQ ID NO: 364544 - RNA, 22 nt, Human
ucaggaugguguggaggaaaua

SEQ ID NO: 364545 - RNA, 22 nt, Human
ggggaccuuuccauuucugaga

SEQ ID NO: 364546 - RNA, 22 nt, Human
ucucucagcuuugagaccugcu

SEQ ID NO: 364547 - RNA, 22 nt, Human
guccuuugaaggcaaaaggaga

SEQ ID NO: 364548 - RNA, 21 nt, Human
gagugucuaauccaggcuguc

SEQ ID NO: 364549 - RNA, 22 nt, Human
uauaauuuaucaugucacaguu

SEQ ID NO: 364550 - RNA, 22 nt, Human
guagggacccacagucuauauu

SEQ ID NO: 364551 - RNA, 22 nt, Human
augcagagacagauguggcaug

SEQ ID NO: 364552 - RNA, 22 nt, Human
cagauuucuauuucaaauacau

SEQ ID NO: 364553 - RNA, 22 nt, Human
uuccggaagguucucuagaauu

SEQ ID NO: 364554 - RNA, 22 nt, Human
auuucuuccucugucaguaacu

SEQ ID NO: 364555 - RNA, 22 nt, Human
cugccgaguacagccauagaaa

SEQ ID NO: 364556 - RNA, 22 nt, Human
ggcccagcccgagucagccuuc

SEQ ID NO: 364557 - RNA, 22 nt, Human
acucagaagauauaaugacuca

SEQ ID NO: 364558 - RNA, 22 nt, Human
augaaaauugacagcggaagua

SEQ ID NO: 364559 - RNA, 22 nt, Human
auuucucuuagcaagacauuac

SEQ ID NO: 364560 - RNA, 22 nt, Human
cugccuuggcccuaguucaugg

SEQ ID NO: 364561 - RNA, 22 nt, Human
ccagagcaauucucacagaacu

SEQ ID NO: 364562 - RNA, 22 nt, Human
uuccauaauuaaguggagagaa

SEQ ID NO: 364563 - RNA, 22 nt, Human
uagaaacauguucuguucuguu

SEQ ID NO: 364564 - RNA, 23 nt, Human
cuggcucuguagguggcauccuu

SEQ ID NO: 364565 - RNA, 22 nt, Human
uuuacaaguuuacagaaugaug

SEQ ID NO: 364566 - RNA, 22 nt, Human
cccuggaggcggauguugcagu

SEQ ID NO: 364567 - RNA, 19 nt, Human
guaagggcuaauggacuau

SEQ ID NO: 364568 - RNA, 22 nt, Human
ccagcaggaaagugacguuuga

SEQ ID NO: 364569 - RNA, 16 nt, Human
cagcuuuaugucagug

SEQ ID NO: 364570 - RNA, 22 nt, Human
aaguugaagcaugaaccaaggu

SEQ ID NO: 364571 - RNA, 20 nt, Human
auacaaagagauugauguau

SEQ ID NO: 364572 - RNA, 22 nt, Human
gaaggcugcugggaaguguggu

SEQ ID NO: 364573 - RNA, 22 nt, Human
cccuggcaugcaugucccuggc

SEQ ID NO: 364574 - RNA, 22 nt, Human
gcugucagaaggugaaggguaa

SEQ ID NO: 364575 - RNA, 22 nt, Human
uguuuuaaucucccauugcucu

SEQ ID NO: 364576 - RNA, 22 nt, Human
uggcagcugaauggcuggaugg

SEQ ID NO: 364577 - RNA, 22 nt, Human
agagugaaguaauuguuaggau

SEQ ID NO: 364578 - RNA, 22 nt, Human
gcucugagaggugcagcaguaa

SEQ ID NO: 364579 - RNA, 22 nt, Human
aagucacagcuaaauagcuaag

SEQ ID NO: 364580 - RNA, 23 nt, Human
uucaagauacgguuuccaggcug

SEQ ID NO: 364581 - RNA, 22 nt, Human
aaagucauguaaugauaugauu

SEQ ID NO: 364582 - RNA, 22 nt, Human
acaugucaauuuaguacucuua

SEQ ID NO: 364583 - RNA, 22 nt, Human
gauaucauaucagacaaccucu

SEQ ID NO: 364584 - RNA, 22 nt, Human
guggcaggagacuggaagaugg

SEQ ID NO: 364585 - RNA, 22 nt, Human
aggcaagcauuuaaccacucau

SEQ ID NO: 364586 - RNA, 22 nt, Human
ggcccugggaugcucagcagug

SEQ ID NO: 364587 - RNA, 20 nt, Human
gccugcagguuggaugggau

SEQ ID NO: 364588 - RNA, 22 nt, Human
gcccugcugucuucagaguaua

SEQ ID NO: 364589 - RNA, 23 nt, Human
aguacauucgaaaaauucuguga

SEQ ID NO: 364590 - RNA, 22 nt, Human
aaugggagguaguaugggaggu

SEQ ID NO: 364591 - RNA, 22 nt, Human
cggcuggguagaggugccgggu

SEQ ID NO: 364592 - RNA, 22 nt, Human
auccaugaagguacuucucagg

SEQ ID NO: 364593 - RNA, 22 nt, Human
ggccccacgggggaguccuagu

SEQ ID NO: 364594 - RNA, 19 nt, Human
ucccuggcgccucucgggc

SEQ ID NO: 364595 - RNA, 21 nt, Human
ugauuuccagaaaauuggccc

SEQ ID NO: 364596 - RNA, 22 nt, Human
uugaauaggacucagcagugau

SEQ ID NO: 364597 - RNA, 22 nt, Human
cugccucugcgucccacagagu

SEQ ID NO: 364598 - RNA, 22 nt, Human
cuguggaaaauuuguauguaau

SEQ ID NO: 364599 - RNA, 22 nt, Human
agcaaucaccaccucuauauuu

SEQ ID NO: 364600 - RNA, 22 nt, Human
uggccucaagucugagggccuu

SEQ ID NO: 364601 - RNA, 19 nt, Human
cucugccucccuccugggu

SEQ ID NO: 364602 - RNA, 22 nt, Human
acuaaauaguuuugacagaaca

SEQ ID NO: 364603 - RNA, 22 nt, Human
caguacuuuucuggcuuucuac

SEQ ID NO: 364604 - RNA, 22 nt, Human
aguguuucccaguaggaugaaa

SEQ ID NO: 364605 - RNA, 22 nt, Human
ugacaugcuuguuuuccuugaa

SEQ ID NO: 364606 - RNA, 22 nt, Human
agcuccugcacccagccuugag

SEQ ID NO: 364607 - RNA, 22 nt, Human
ugcuuuggaucuauuugcugag

SEQ ID NO: 364608 - RNA, 22 nt, Human
uagcuguguagacacucagagc

SEQ ID NO: 364609 - RNA, 22 nt, Human
auccaguucucagugcuuacag

SEQ ID NO: 364610 - RNA, 22 nt, Human
acaguuucuccauuuacaccuu

SEQ ID NO: 364611 - RNA, 22 nt, Human
ccugggaggcagagguugcagu

SEQ ID NO: 364612 - RNA, 22 nt, Human
aacuuucagcaaguaauucugg

SEQ ID NO: 364613 - RNA, 22 nt, Human
agguacagaugaaagucuaguu

SEQ ID NO: 364614 - RNA, 22 nt, Human
caguggguaggaaaggcucuuc

SEQ ID NO: 364615 - RNA, 22 nt, Human
aauaucaacaguguccuucuaa

SEQ ID NO: 364616 - RNA, 22 nt, Human
gggcugcuuccuggggaaugcu

SEQ ID NO: 364617 - RNA, 22 nt, Human
gcagguggauuaucagaagugc

SEQ ID NO: 364618 - RNA, 23 nt, Human
auguuauuauuagcagucuugcc

SEQ ID NO: 364619 - RNA, 22 nt, Human
cccauuuagauaacaguucaaa

SEQ ID NO: 364620 - RNA, 22 nt, Human
gaaacaaucaucaugugauuug

SEQ ID NO: 364621 - RNA, 22 nt, Human
guuuuuaucuaauagcaguuau

SEQ ID NO: 364622 - RNA, 22 nt, Human
cauuucaaguaacagauugcuu

SEQ ID NO: 364623 - RNA, 18 nt, Human
ugucauugccagggaagc

SEQ ID NO: 364624 - RNA, 22 nt, Human
cacagaaucugugacuccaaga

SEQ ID NO: 364625 - RNA, 22 nt, Human
cagcugccacaggacuuucuga

SEQ ID NO: 364626 - RNA, 22 nt, Human
augcuguagaucuuagccucua

SEQ ID NO: 364627 - RNA, 22 nt, Human
ugcuuuauagacaaggaaguag

SEQ ID NO: 364628 - RNA, 22 nt, Human
gcagggacugugaucucacaga

SEQ ID NO: 364629 - RNA, 22 nt, Human
ugccacagaggugaagcccacu

SEQ ID NO: 364630 - RNA, 20 nt, Human
auguaaaauuauaaggcuga

SEQ ID NO: 364631 - RNA, 22 nt, Human
aggccagacagcuagaaacagg

SEQ ID NO: 364632 - RNA, 22 nt, Human
ugcugagaucugccaguagaug

SEQ ID NO: 364633 - RNA, 22 nt, Human
agccagagcugaugucauucuc

SEQ ID NO: 364634 - RNA, 19 nt, Human
gccagcagaaugaugaggc

SEQ ID NO: 364635 - RNA, 22 nt, Human
uguuaaucaaucaacaguauua

SEQ ID NO: 364636 - RNA, 22 nt, Human
ccugggcucuauccugacccag

SEQ ID NO: 364637 - RNA, 22 nt, Human
uuuuccucugagcuuugaauaa

SEQ ID NO: 364638 - RNA, 22 nt, Human
uuacacaacaucuguauuauua

SEQ ID NO: 364639 - RNA, 22 nt, Human
uggcagagucucuccuuuccag

SEQ ID NO: 364640 - RNA, 22 nt, Human
ugcacaaacuugugucccaggg

SEQ ID NO: 364641 - RNA, 22 nt, Human
cagcugcccugccuugcccuua

SEQ ID NO: 364642 - RNA, 22 nt, Human
agacaguguguguauauauggu

SEQ ID NO: 364643 - RNA, 22 nt, Human
acagcuuugggcaaugcuauga

SEQ ID NO: 364644 - RNA, 22 nt, Human
ugccuacauuccuugcuuaugg

SEQ ID NO: 364645 - RNA, 22 nt, Human
cuguauuuguccucuauuuauu

SEQ ID NO: 364646 - RNA, 22 nt, Human
gagacacaaacauuuauuccac

SEQ ID NO: 364647 - RNA, 22 nt, Human
aaaugguaagacaacacauuau

SEQ ID NO: 364648 - RNA, 22 nt, Human
cacugaguucccugacauuuca

SEQ ID NO: 364649 - RNA, 22 nt, Human
ggcugucugugguggagcguug

SEQ ID NO: 364650 - RNA, 23 nt, Human
ucagugauguugaaccuagcagu

SEQ ID NO: 364651 - RNA, 22 nt, Human
aaggucauuuaacaauuuauga

SEQ ID NO: 364652 - RNA, 22 nt, Human
uuucuucauagaccuugucuug

SEQ ID NO: 364653 - RNA, 22 nt, Human
gcucaggaaaacagucuaguaa

SEQ ID NO: 364654 - RNA, 22 nt, Human
uguaggccuauguccagcaauu

SEQ ID NO: 364655 - RNA, 22 nt, Human
ccacacagucaguuuccaagaa

SEQ ID NO: 364656 - RNA, 22 nt, Human
cacacaugaaucccuaguaccu

SEQ ID NO: 364657 - RNA, 22 nt, Human
agaggggagagcuaagcaauuc

SEQ ID NO: 364658 - RNA, 21 nt, Human
ggccuuggcgggggccgaauu

SEQ ID NO: 364659 - RNA, 22 nt, Human
agcccuucaaccugccuacucc

SEQ ID NO: 364660 - RNA, 22 nt, Human
aggagcagaauuuaaugugcag

SEQ ID NO: 364661 - RNA, 22 nt, Human
ggucugagcuugagcccaugcu

SEQ ID NO: 364662 - RNA, 21 nt, Human
ucccagagugcuugggacugc

SEQ ID NO: 364663 - RNA, 22 nt, Human
auucauucugaccucaagagaa

SEQ ID NO: 364664 - RNA, 22 nt, Human
gccugugguuugauuaagcauu

SEQ ID NO: 364665 - RNA, 22 nt, Human
ugaaggaaaugacggcagaaga

SEQ ID NO: 364666 - RNA, 22 nt, Human
caggauccccaggucgccgucc

SEQ ID NO: 364667 - RNA, 22 nt, Human
cagccagcuggcacugugagua

SEQ ID NO: 364668 - RNA, 17 nt, Human
aggcugcugggccaggg

SEQ ID NO: 364669 - RNA, 22 nt, Human
gugcaugaagacucagaaaguc

SEQ ID NO: 364670 - RNA, 22 nt, Human
gcaggccucuguugagggccuu

SEQ ID NO: 364671 - RNA, 22 nt, Human
aagcugccuagaguugaauguc

SEQ ID NO: 364672 - RNA, 22 nt, Human
ggaggagacccugugucaguuu

SEQ ID NO: 364673 - RNA, 22 nt, Human
cccaggaaccuaccagcucgag

SEQ ID NO: 364674 - RNA, 22 nt, Human
ggugagggaguggaacgaggug

SEQ ID NO: 364675 - RNA, 22 nt, Human
aaugcugcucucauaauuauag

SEQ ID NO: 364676 - RNA, 22 nt, Human
aacugcauuugcauaaguccau

SEQ ID NO: 364677 - RNA, 22 nt, Human
gagggcucuacucaccacccug

SEQ ID NO: 364678 - RNA, 22 nt, Human
cagagccacugucugccaggca

SEQ ID NO: 364679 - RNA, 22 nt, Human
aucacaaaggguuuucucugag

SEQ ID NO: 364680 - RNA, 17 nt, Human
ucaggauguagcaguag

SEQ ID NO: 364681 - RNA, 22 nt, Human
auugaaagguuuugagcagaua

SEQ ID NO: 364682 - RNA, 22 nt, Human
uccaggcauguugggaagauga

SEQ ID NO: 364683 - RNA, 22 nt, Human
agcugcugugugcucaggcagg

SEQ ID NO: 364684 - RNA, 22 nt, Human
gcaaguuauuuccauuuaaagc

SEQ ID NO: 364685 - RNA, 22 nt, Human
ugugccuuaugaauucuuucug

SEQ ID NO: 364686 - RNA, 19 nt, Human
cgcaggagccgaggugacc

SEQ ID NO: 364687 - RNA, 22 nt, Human
ucaauucaauugaacaguuacu

SEQ ID NO: 364688 - RNA, 22 nt, Human
gggguggauuccuacaggucca

SEQ ID NO: 364689 - RNA, 22 nt, Human
uauauuuaaauccagguugaaa

SEQ ID NO: 364690 - RNA, 22 nt, Human
gaaggcaggcuucugauuaggu

SEQ ID NO: 364691 - RNA, 22 nt, Human
auuucuacugugagaaacauga

SEQ ID NO: 364692 - RNA, 22 nt, Human
ugugccugucacccucagagag

SEQ ID NO: 364693 - RNA, 22 nt, Human
gccugcagacguguuuuccuca

SEQ ID NO: 364694 - RNA, 16 nt, Human
cagaguguaaacagga

SEQ ID NO: 364695 - RNA, 22 nt, Human
ucucagagaucuuucugcaugu

SEQ ID NO: 364696 - RNA, 22 nt, Human
ucaggauaaaauguaauggcaa

SEQ ID NO: 364697 - RNA, 22 nt, Human
uggaaagucucuuuugacugua

SEQ ID NO: 364698 - RNA, 22 nt, Human
agucucuuccuucaaggcuggu

SEQ ID NO: 364699 - RNA, 18 nt, Human
gggaagaggaucuggccc

SEQ ID NO: 364700 - RNA, 22 nt, Human
agaccaagugcaggugccacua

SEQ ID NO: 364701 - RNA, 22 nt, Human
ggcugccucugaugugcagacg

SEQ ID NO: 364702 - RNA, 22 nt, Human
cagggccugccugguuccugga

SEQ ID NO: 364703 - RNA, 21 nt, Human
auacagaacauugauccaaga

SEQ ID NO: 364704 - RNA, 20 nt, Human
cauuuguuagcuuucuacug

SEQ ID NO: 364705 - RNA, 21 nt, Human
cacaggugggucagugaggcc

SEQ ID NO: 364706 - RNA, 22 nt, Human
gcugugugacugagagccuggc

SEQ ID NO: 364707 - RNA, 23 nt, Human
gagguacagcaccagugaauagg

SEQ ID NO: 364708 - RNA, 22 nt, Human
gcucccagaaccaaggcugggg

SEQ ID NO: 364709 - RNA, 22 nt, Human
uucagaaacccauugggucucu

SEQ ID NO: 364710 - RNA, 17 nt, Human
uuucuccuuccaucuca

SEQ ID NO: 364711 - RNA, 22 nt, Human
cagauuuaccuaacuccaaguu

SEQ ID NO: 364712 - RNA, 22 nt, Human
ugcagcucugaacagucaugaa

SEQ ID NO: 364713 - RNA, 22 nt, Human
ucugcaggcuguacaggaagca

SEQ ID NO: 364714 - RNA, 22 nt, Human
uggcuuccuggacagaugcggu

SEQ ID NO: 364715 - RNA, 22 nt, Human
auccaggguguggagagagcuc

SEQ ID NO: 364716 - RNA, 22 nt, Human
uauugaaauucuucauguccuc

SEQ ID NO: 364717 - RNA, 22 nt, Human
uugaccuauguuucuucaucug

SEQ ID NO: 364718 - RNA, 18 nt, Human
ucugagggugcgggagcu

SEQ ID NO: 364719 - RNA, 22 nt, Human
ccagcuuuucagaaucugccug

SEQ ID NO: 364720 - RNA, 22 nt, Human
agagggaaugugauugcaccau

SEQ ID NO: 364721 - RNA, 22 nt, Human
cugggguggauggguccaaguu

SEQ ID NO: 364722 - RNA, 20 nt, Human
ucagggcaugggacagcccc

SEQ ID NO: 364723 - RNA, 22 nt, Human
caggcagagugagguggucuaa

SEQ ID NO: 364724 - RNA, 22 nt, Human
agauggguaacuggagucugcu

SEQ ID NO: 364725 - RNA, 22 nt, Human
uauuuccauguuagaacuaagu

SEQ ID NO: 364726 - RNA, 22 nt, Human
gcauuucuuccuggugugagcc

SEQ ID NO: 364727 - RNA, 22 nt, Human
uuucaacguguaaucuuauuua

SEQ ID NO: 364728 - RNA, 22 nt, Human
caagagagaugcagcucacuca

SEQ ID NO: 364729 - RNA, 21 nt, Human
cugguguagcacucaggugcu

SEQ ID NO: 364730 - RNA, 21 nt, Human
cagagcagcguucugcugugg

SEQ ID NO: 364731 - RNA, 18 nt, Human
cccagcuccacuucccuc

SEQ ID NO: 364732 - RNA, 22 nt, Human
cucagcagcagggaagagguca

SEQ ID NO: 364733 - RNA, 22 nt, Human
ccagggcagggaccacgugucu

SEQ ID NO: 364734 - RNA, 19 nt, Human
aaaugugaugguacaauuc

SEQ ID NO: 364735 - RNA, 21 nt, Human
uucaaagacuugaugcugacc

SEQ ID NO: 364736 - RNA, 22 nt, Human
gcaguggaagccucuuuaagca

SEQ ID NO: 364737 - RNA, 22 nt, Human
aaauguguauaugaaacaugau

SEQ ID NO: 364738 - RNA, 23 nt, Human
agcaggaaaccgagggugauguu

SEQ ID NO: 364739 - RNA, 22 nt, Human
ccaggagagcgcccucccggcc

SEQ ID NO: 364740 - RNA, 22 nt, Human
uaagauaugguaggaaguuugg

SEQ ID NO: 364741 - RNA, 22 nt, Human
gcagccacucucauuccacgug

SEQ ID NO: 364742 - RNA, 22 nt, Human
uucacaggauauaugugcaggg

SEQ ID NO: 364743 - RNA, 22 nt, Human
cacugugucaguuugguuagac

SEQ ID NO: 364744 - RNA, 22 nt, Human
agugcaaaauucagaagcaauu

SEQ ID NO: 364745 - RNA, 22 nt, Human
cagcgucucguugugggccucg

SEQ ID NO: 364746 - RNA, 22 nt, Human
gggcacuguacacugugcaugg

SEQ ID NO: 364747 - RNA, 23 nt, Human
auggagcugguacuagcuaccuc

SEQ ID NO: 364748 - RNA, 22 nt, Human
aggccuggccuuuauguucaag

SEQ ID NO: 364749 - RNA, 22 nt, Human
guguuuuaagaaagaagcucag

SEQ ID NO: 364750 - RNA, 22 nt, Human
uuuucuuauggugaagcacaaa

SEQ ID NO: 364751 - RNA, 22 nt, Human
agagacagaggcaauauagcuu

SEQ ID NO: 364752 - RNA, 23 nt, Human
uacuuaggguuuagaucugacug

SEQ ID NO: 364753 - RNA, 22 nt, Human
cccagcaguaaccaguggaaau

SEQ ID NO: 364754 - RNA, 22 nt, Human
uuuccuaagguagugauaauuu

SEQ ID NO: 364755 - RNA, 22 nt, Human
cagaggcuguguaggcagacug

SEQ ID NO: 364756 - RNA, 22 nt, Human
ugugaaagcaagucuaguucuc

SEQ ID NO: 364757 - RNA, 22 nt, Human
cugggcucagaugagaggaagg

SEQ ID NO: 364758 - RNA, 22 nt, Human
acuguguguuugucuagcacag

SEQ ID NO: 364759 - RNA, 22 nt, Human
auuugucucugcacuuuacuca

SEQ ID NO: 364760 - RNA, 22 nt, Human
uagaaaagaauuuuauuugaua

SEQ ID NO: 364761 - RNA, 22 nt, Human
uuuuccucaggaaugcuaagcu

SEQ ID NO: 364762 - RNA, 22 nt, Human
caagaaucagaccugucagggu

SEQ ID NO: 364763 - RNA, 22 nt, Human
cuguggcauugugaggacugca

SEQ ID NO: 364764 - RNA, 22 nt, Human
cugggcugcaguuccugguccu

SEQ ID NO: 364765 - RNA, 22 nt, Human
uacaugaacaaaauagcagaaa

SEQ ID NO: 364766 - RNA, 22 nt, Human
caguacuuggucaaggaagcag

SEQ ID NO: 364767 - RNA, 22 nt, Human
gaagaacaagcagugcuuuccu

SEQ ID NO: 364768 - RNA, 20 nt, Human
uauaacaguguugggugugu

SEQ ID NO: 364769 - RNA, 22 nt, Human
agggaauguagcaagaugccaa

SEQ ID NO: 364770 - RNA, 22 nt, Human
uggaaguggcagaaaaugaaca

SEQ ID NO: 364771 - RNA, 22 nt, Human
caauuucaugccauguauugcu

SEQ ID NO: 364772 - RNA, 22 nt, Human
uaccugcaaaguuccuuuugcc

SEQ ID NO: 364773 - RNA, 22 nt, Human
auacaugucaucauauguuugu

SEQ ID NO: 364774 - RNA, 22 nt, Human
caccugcagggggagucaagag

SEQ ID NO: 364775 - RNA, 22 nt, Human
ccuggaucagucacuguugcug

SEQ ID NO: 364776 - RNA, 22 nt, Human
ucaggauguuaauauagcauua

SEQ ID NO: 364777 - RNA, 22 nt, Human
ggucucuguugccuccaucaag

SEQ ID NO: 364778 - RNA, 23 nt, Human
aguaaagcaauuguuggcgagag

SEQ ID NO: 364779 - RNA, 22 nt, Human
uaugcacauauaaccugcacug

SEQ ID NO: 364780 - RNA, 22 nt, Human
uugcauugaugucuauacgcug

SEQ ID NO: 364781 - RNA, 23 nt, Human
gccugggacucaggaggagcuca

SEQ ID NO: 364782 - RNA, 22 nt, Human
ccuuuugcucucccauccagaa

SEQ ID NO: 364783 - RNA, 22 nt, Human
gaaaggucuuccggucuuccag

SEQ ID NO: 364784 - RNA, 18 nt, Human
cccacggugcuguagggc

SEQ ID NO: 364785 - RNA, 22 nt, Human
caguggagaggcaugcuuggca

SEQ ID NO: 364786 - RNA, 22 nt, Human
caguucacacugugcuaucugc

SEQ ID NO: 364787 - RNA, 22 nt, Human
uggaccugcuggaugggcaggu

SEQ ID NO: 364788 - RNA, 22 nt, Human
cacagggcuaaaugaaggguug

SEQ ID NO: 364789 - RNA, 22 nt, Human
ccaggagagcucuaaauggcug

SEQ ID NO: 364790 - RNA, 23 nt, Human
aucaaacuggugagaaugucagu

SEQ ID NO: 364791 - RNA, 22 nt, Human
aaggggaauagaguggguugug

SEQ ID NO: 364792 - RNA, 22 nt, Human
cggcagagcuuccugcucagcg

SEQ ID NO: 364793 - RNA, 22 nt, Human
uggagccugagucagcggaggc

SEQ ID NO: 364794 - RNA, 20 nt, Human
aaguuacauuguauuguacc

SEQ ID NO: 364795 - RNA, 22 nt, Human
uuucauuuugguuaugccauaa

SEQ ID NO: 364796 - RNA, 22 nt, Human
acauauuuccaugcagcauguc

SEQ ID NO: 364797 - RNA, 23 nt, Human
uaucagugugaugaggcugcugc

SEQ ID NO: 364798 - RNA, 22 nt, Human
aaaucaguuaagaugaggccau

SEQ ID NO: 364799 - RNA, 21 nt, Human
aaauguguuccauaaugcuuu

SEQ ID NO: 364800 - RNA, 22 nt, Human
uguguuuuacaaauucucuuaa

SEQ ID NO: 364801 - RNA, 22 nt, Human
agaggggcucauauccugucau

SEQ ID NO: 364802 - RNA, 22 nt, Human
caggaguggugugagggacucc

SEQ ID NO: 364803 - RNA, 22 nt, Human
uggccuggcccugaggcccugu

SEQ ID NO: 364804 - RNA, 22 nt, Human
gagauuggauuuaauggccaaa

SEQ ID NO: 364805 - RNA, 22 nt, Human
uaguuuuuucaacaaauggugc

SEQ ID NO: 364806 - RNA, 22 nt, Human
auacaugugggucuaaacauau

SEQ ID NO: 364807 - RNA, 22 nt, Human
ugucccagauacuggacauaga

SEQ ID NO: 364808 - RNA, 22 nt, Human
cagcacuggggggauucggagc

SEQ ID NO: 364809 - RNA, 22 nt, Human
ugaggcagccugcauuaaagag

SEQ ID NO: 364810 - RNA, 22 nt, Human
uggccuggggaccugugagacc

SEQ ID NO: 364811 - RNA, 22 nt, Human
gggcugacaaccaucugacaag

SEQ ID NO: 364812 - RNA, 22 nt, Human
agagccugggaauuugcauguu

SEQ ID NO: 364813 - RNA, 22 nt, Human
cagcuuugugcaaugcagucuc

SEQ ID NO: 364814 - RNA, 23 nt, Human
cccuggagcuagucugagcagag

SEQ ID NO: 364815 - RNA, 22 nt, Human
agucccagagaggucggggcca

SEQ ID NO: 364816 - RNA, 22 nt, Human
cucugagcccgcugcagcccca

SEQ ID NO: 364817 - RNA, 22 nt, Human
agaaaugaagcaggaguuauua

SEQ ID NO: 364818 - RNA, 22 nt, Human
ucacauuuucuacuacuguacg

SEQ ID NO: 364819 - RNA, 19 nt, Human
uggcugagcuggacugagg

SEQ ID NO: 364820 - RNA, 22 nt, Human
ucuauaaauuaugcagucucag

SEQ ID NO: 364821 - RNA, 22 nt, Human
uagagaaaagcagggaucagga

SEQ ID NO: 364822 - RNA, 22 nt, Human
aaucagaaucaguugacacagc

SEQ ID NO: 364823 - RNA, 20 nt, Human
aggaagccaaaggcugucuu

SEQ ID NO: 364824 - RNA, 22 nt, Human
caaaaguucucacccagacaug

SEQ ID NO: 364825 - RNA, 22 nt, Human
ccaggagcagauauggacauaa

SEQ ID NO: 364826 - RNA, 22 nt, Human
ggaugggagcagaggacgacca

SEQ ID NO: 364827 - RNA, 22 nt, Human
ucagagaguuuucacuagggug

SEQ ID NO: 364828 - RNA, 20 nt, Human
uggagcuguaaucuugucug

SEQ ID NO: 364829 - RNA, 22 nt, Human
agccaagcacucaacuccugga

SEQ ID NO: 364830 - RNA, 22 nt, Human
cagggacaauggcagagccuga

SEQ ID NO: 364831 - RNA, 22 nt, Human
ccucugagaccagcucugcacc

SEQ ID NO: 364832 - RNA, 22 nt, Human
gaagccaagugcaaaugccuua

SEQ ID NO: 364833 - RNA, 22 nt, Human
agugcuuuauguuguugugcaa

SEQ ID NO: 364834 - RNA, 22 nt, Human
aaagauuugaguucugcuuaua

SEQ ID NO: 364835 - RNA, 22 nt, Human
cuguuaauugugaauuuuacau

SEQ ID NO: 364836 - RNA, 22 nt, Human
ucugccuguucaagucuucuag

SEQ ID NO: 364837 - RNA, 22 nt, Human
cugaagagcucuccuguccccu

SEQ ID NO: 364838 - RNA, 22 nt, Human
ccucuugccaaucagcuacaga

SEQ ID NO: 364839 - RNA, 22 nt, Human
uggaccugggguggccuccucu

SEQ ID NO: 364840 - RNA, 22 nt, Human
gaaauagacacuuucuaugaau

SEQ ID NO: 364841 - RNA, 22 nt, Human
gcauugucaaaagugguaugac

SEQ ID NO: 364842 - RNA, 22 nt, Human
acugucucucuagcaguucagg

SEQ ID NO: 364843 - RNA, 22 nt, Human
ccucauggccuugagcugaggg

SEQ ID NO: 364844 - RNA, 22 nt, Human
guggccuggaguuugauguagg

SEQ ID NO: 364845 - RNA, 22 nt, Human
agcuguucccucacugcaguca

SEQ ID NO: 364846 - RNA, 22 nt, Human
cugaggucaauuaaucaacaac

SEQ ID NO: 364847 - RNA, 22 nt, Human
ugcugccaggucuugcugucca

SEQ ID NO: 364848 - RNA, 22 nt, Human
aagccagggucaggggccuccu

SEQ ID NO: 364849 - RNA, 22 nt, Human
gaaaggccauuucugaggguuu

SEQ ID NO: 364850 - RNA, 20 nt, Human
cugagagucugugcuuaguc

SEQ ID NO: 364851 - RNA, 22 nt, Human
cugcugugauugggagaaaccg

SEQ ID NO: 364852 - RNA, 22 nt, Human
cauaaaauggcuuguucuuuaa

SEQ ID NO: 364853 - RNA, 22 nt, Human
cacuggugacuucugagcugga

SEQ ID NO: 364854 - RNA, 22 nt, Human
caagcccaggauuccccaguua

SEQ ID NO: 364855 - RNA, 22 nt, Human
ccagagugacgugaagugugaa

SEQ ID NO: 364856 - RNA, 22 nt, Human
ugcuucucccaaccagggccug

SEQ ID NO: 364857 - RNA, 22 nt, Human
agucugcacucagguggagguc

SEQ ID NO: 364858 - RNA, 22 nt, Human
gcucuccaaacccuguggcuuu

SEQ ID NO: 364859 - RNA, 22 nt, Human
gaagcccacguuuggugaugua

SEQ ID NO: 364860 - RNA, 22 nt, Human
aguggcagcugucaugcccuag

SEQ ID NO: 364861 - RNA, 22 nt, Human
guguaucaaagcacagacuuca

SEQ ID NO: 364862 - RNA, 22 nt, Human
uuuuauuaguggcuagaugggg

SEQ ID NO: 364863 - RNA, 22 nt, Human
agcagggcccacuaggggagau

SEQ ID NO: 364864 - RNA, 22 nt, Human
guguuuccucacuucucugacu

SEQ ID NO: 364865 - RNA, 22 nt, Human
gcuggccuucugcagaguucug

SEQ ID NO: 364866 - RNA, 20 nt, Human
ggcagcaggaguuuccucuu

SEQ ID NO: 364867 - RNA, 22 nt, Human
uggucgaccaguuggaaaguaa

SEQ ID NO: 364868 - RNA, 22 nt, Human
gccucuggggcagcugagucau

SEQ ID NO: 364869 - RNA, 22 nt, Human
agggaggaaggauguuccaaag

SEQ ID NO: 364870 - RNA, 22 nt, Human
aggauuuauuacaagccauggu

SEQ ID NO: 364871 - RNA, 22 nt, Human
cagagcugggcauggugaaagg

SEQ ID NO: 364872 - RNA, 22 nt, Human
gauuucaagcccccagagauuc

SEQ ID NO: 364873 - RNA, 22 nt, Human
uccuggagggaggcggugcuac

SEQ ID NO: 364874 - RNA, 22 nt, Human
gucccagaggcuuuggccacag

SEQ ID NO: 364875 - RNA, 22 nt, Human
ggaggguuagcaaaggcacaga

SEQ ID NO: 364876 - RNA, 22 nt, Human
aaugcacacauuugguacugaa

SEQ ID NO: 364877 - RNA, 22 nt, Human
ucagccagugccuugaucuugc

SEQ ID NO: 364878 - RNA, 22 nt, Human
aggcaccuugcgguccagugaa

SEQ ID NO: 364879 - RNA, 22 nt, Human
uccagggauguccuguagcacu

SEQ ID NO: 364880 - RNA, 22 nt, Human
auuaggcauucaugcagcuccu

SEQ ID NO: 364881 - RNA, 22 nt, Human
augugucaauuuucaaaugcuu

SEQ ID NO: 364882 - RNA, 22 nt, Human
augcagcugugggcaagaaaug

SEQ ID NO: 364883 - RNA, 22 nt, Human
aggccaaguagcuagcauugaa

SEQ ID NO: 364884 - RNA, 22 nt, Human
aaauauaguaaaugcauaguuc

SEQ ID NO: 364885 - RNA, 22 nt, Human
ccuggaucuuuguuguaaauau

SEQ ID NO: 364886 - RNA, 22 nt, Human
uuaauuuuuauguauagugugu

SEQ ID NO: 364887 - RNA, 22 nt, Human
ucaguaaaugguugcuguuauu

SEQ ID NO: 364888 - RNA, 22 nt, Human
uaacagaaauagaaaugagagu

SEQ ID NO: 364889 - RNA, 22 nt, Human
auuugcuuuaagguauaaaagg

SEQ ID NO: 364890 - RNA, 22 nt, Human
uggagauggguuaauggagaga

SEQ ID NO: 364891 - RNA, 20 nt, Human
agaaucugacccagagagac

SEQ ID NO: 364892 - RNA, 22 nt, Human
cuucuuaaugacagauuaaaau

SEQ ID NO: 364893 - RNA, 17 nt, Human
gucugggcuuuagagac

SEQ ID NO: 364894 - RNA, 22 nt, Human
guggcugggcuccgagcggcuu

SEQ ID NO: 364895 - RNA, 22 nt, Human
gaagagcuuaguuguccuagaa

SEQ ID NO: 364896 - RNA, 22 nt, Human
aagguacaguuuuaagaauaag

SEQ ID NO: 364897 - RNA, 22 nt, Human
aggagggcuaggaaaaccagga

SEQ ID NO: 364898 - RNA, 19 nt, Human
uggcagcauugguaccuug

SEQ ID NO: 364899 - RNA, 22 nt, Human
agacaucauguuacagauuaag

SEQ ID NO: 364900 - RNA, 22 nt, Human
aacacaaagaagcugcaggauc

SEQ ID NO: 364901 - RNA, 22 nt, Human
gccuggagugcaguggcgugau

SEQ ID NO: 364902 - RNA, 22 nt, Human
uaaacauuuguuauucuuguuu

SEQ ID NO: 364903 - RNA, 20 nt, Human
ggcagccaaucagcgugccg

SEQ ID NO: 364904 - RNA, 22 nt, Human
aagaacaacugcuuuaaaagca

SEQ ID NO: 364905 - RNA, 22 nt, Human
cucuggagugcagccugguggc

SEQ ID NO: 364906 - RNA, 22 nt, Human
ggcagcuggccuccucgcccac

SEQ ID NO: 364907 - RNA, 22 nt, Human
cauucugcauuuggaaggggca

SEQ ID NO: 364908 - RNA, 22 nt, Human
aaggaagguucauagucaaaga

SEQ ID NO: 364909 - RNA, 23 nt, Human
cugcugugaaacaugguuuuggu

SEQ ID NO: 364910 - RNA, 22 nt, Human
caguacuugggggguucuaagu

SEQ ID NO: 364911 - RNA, 22 nt, Human
uccaggcuccccugcgugcucc

SEQ ID NO: 364912 - RNA, 22 nt, Human
aucaggaagaagaauguguugg

SEQ ID NO: 364913 - RNA, 22 nt, Human
gaggccuggcugucagucccca

SEQ ID NO: 364914 - RNA, 22 nt, Human
cagcaucuuucucuucuggagu

SEQ ID NO: 364915 - RNA, 22 nt, Human
uucuuugaguuaguacagucca

SEQ ID NO: 364916 - RNA, 22 nt, Human
ccaugagccaggcugaggaagc

SEQ ID NO: 364917 - RNA, 20 nt, Human
aagagcauaguacaggaaga

SEQ ID NO: 364918 - RNA, 22 nt, Human
cuucucagcaugguuacuguga

SEQ ID NO: 364919 - RNA, 22 nt, Human
cagcccucagguccucagcagc

SEQ ID NO: 364920 - RNA, 20 nt, Human
cugagcgucuaagaggugag

SEQ ID NO: 364921 - RNA, 19 nt, Human
cagcaauaaugccagaugg

SEQ ID NO: 364922 - RNA, 22 nt, Human
uuccuguauucuaaagggaaag

SEQ ID NO: 364923 - RNA, 22 nt, Human
auuuuccaaaauaauuguuacu

SEQ ID NO: 364924 - RNA, 22 nt, Human
ggagauggcucugcaaggucua

SEQ ID NO: 364925 - RNA, 22 nt, Human
ucaucacucauuggacaacaga

SEQ ID NO: 364926 - RNA, 22 nt, Human
uccaggcaucccccaggacaga

SEQ ID NO: 364927 - RNA, 22 nt, Human
ggcaguggguggaucucaggga

SEQ ID NO: 364928 - RNA, 23 nt, Human
aagcuuccuucacgucuccuggg

SEQ ID NO: 364929 - RNA, 19 nt, Human
gaggcgaggcgugcaggag

SEQ ID NO: 364930 - RNA, 22 nt, Human
aucuagaacuuaaagucaguca

SEQ ID NO: 364931 - RNA, 22 nt, Human
uagauuuccucuuccucauucc

SEQ ID NO: 364932 - RNA, 22 nt, Human
gcucucuggguggugggcaaca

SEQ ID NO: 364933 - RNA, 22 nt, Human
uaaggccaaacuauuauaguuc

SEQ ID NO: 364934 - RNA, 22 nt, Human
aggccugagcagaggaguggac

SEQ ID NO: 364935 - RNA, 22 nt, Human
aauucuaaauguaauuuagaau

SEQ ID NO: 364936 - RNA, 22 nt, Human
guuauuuuaacuucucaguaau

SEQ ID NO: 364937 - RNA, 22 nt, Human
agaagucauuuauguuagauga

SEQ ID NO: 364938 - RNA, 22 nt, Human
ucagaggaucaugucccuacuc

SEQ ID NO: 364939 - RNA, 23 nt, Human
gccaggcacaugguggacacgca

SEQ ID NO: 364940 - RNA, 22 nt, Human
cagguggggcgcccucaggcag

SEQ ID NO: 364941 - RNA, 22 nt, Human
gcccaggagccuggagaugugu

SEQ ID NO: 364942 - RNA, 22 nt, Human
ugucaccagcugcuccucagga

SEQ ID NO: 364943 - RNA, 22 nt, Human
uacagagauacucuagaucaaa

SEQ ID NO: 364944 - RNA, 22 nt, Human
uccauucuaugcuuacauuuau

SEQ ID NO: 364945 - RNA, 21 nt, Human
agcagccauuucacagagacu

SEQ ID NO: 364946 - RNA, 23 nt, Human
cagggccaggcagcagcugucac

SEQ ID NO: 364947 - RNA, 19 nt, Human
auuucaagagguuuauugg

SEQ ID NO: 364948 - RNA, 22 nt, Human
ucagagguaagggcugagagga

SEQ ID NO: 364949 - RNA, 22 nt, Human
gccuggaguagcauggcaagcc

SEQ ID NO: 364950 - RNA, 22 nt, Human
gaauuucuggacccuuugagaa

SEQ ID NO: 364951 - RNA, 23 nt, Human
uuucauaugguguggaugaagaa

SEQ ID NO: 364952 - RNA, 22 nt, Human
caguggagugggacuggucuga

SEQ ID NO: 364953 - RNA, 22 nt, Human
cccagagccucauucuguuggg

SEQ ID NO: 364954 - RNA, 22 nt, Human
cagggccuucguaaguguccgg

SEQ ID NO: 364955 - RNA, 22 nt, Human
acauucuagaagucuuugcaau

SEQ ID NO: 364956 - RNA, 22 nt, Human
acucacuuuccauucaagcacc

SEQ ID NO: 364957 - RNA, 22 nt, Human
augcagcaguuuacaaagcaau

SEQ ID NO: 364958 - RNA, 22 nt, Human
agcuccugaaaagcgcuugcuu

SEQ ID NO: 364959 - RNA, 22 nt, Human
cugggagagaagcgaagcuggg

SEQ ID NO: 364960 - RNA, 22 nt, Human
uacugugacagaguacuuaaac

SEQ ID NO: 364961 - RNA, 17 nt, Human
ucagcaaagacaaagga

SEQ ID NO: 364962 - RNA, 22 nt, Human
augcugugcuggcuaaccaugg

SEQ ID NO: 364963 - RNA, 22 nt, Human
aaagucugagcagaauuucuca

SEQ ID NO: 364964 - RNA, 19 nt, Human
agacagagcucaguggguu

SEQ ID NO: 364965 - RNA, 17 nt, Human
gccuggcccagccuggc

SEQ ID NO: 364966 - RNA, 19 nt, Human
ggcaggcuggauagagagg

SEQ ID NO: 364967 - RNA, 22 nt, Human
uccucagggaagaugagccuca

SEQ ID NO: 364968 - RNA, 22 nt, Human
caggugggccaugaaaaaugac

SEQ ID NO: 364969 - RNA, 22 nt, Human
ugaauccagagcuauuucgucc

SEQ ID NO: 364970 - RNA, 22 nt, Human
agucagcagccuggccaggaga

SEQ ID NO: 364971 - RNA, 22 nt, Human
aguugaauaauuagacauaucu

SEQ ID NO: 364972 - RNA, 22 nt, Human
ugccaggcauuugacagacacu

SEQ ID NO: 364973 - RNA, 22 nt, Human
aaaguguaaaagcauguuaggg

SEQ ID NO: 364974 - RNA, 22 nt, Human
ugaauaugugacuuugauuuca

SEQ ID NO: 364975 - RNA, 22 nt, Human
ugaaaaggguagaucccuaagu

SEQ ID NO: 364976 - RNA, 22 nt, Human
cagcuggcguggagugauugca

SEQ ID NO: 364977 - RNA, 18 nt, Human
cugccuguugcugagagg

SEQ ID NO: 364978 - RNA, 22 nt, Human
uucucugaucuugcuagacuga

SEQ ID NO: 364979 - RNA, 22 nt, Human
uggcuuccuccagagcaggagg

SEQ ID NO: 364980 - RNA, 22 nt, Human
gcucucugaggugcuggcagag

SEQ ID NO: 364981 - RNA, 20 nt, Human
ugcagcugcaggaggguggg

SEQ ID NO: 364982 - RNA, 22 nt, Human
ugucaaauuuuuauugcaguau

SEQ ID NO: 364983 - RNA, 22 nt, Human
gcugucugcugggucgcucagg

SEQ ID NO: 364984 - RNA, 22 nt, Human
uuauuagguuauucucuguacu

SEQ ID NO: 364985 - RNA, 22 nt, Human
ugcugcucuucaccauggccuc

SEQ ID NO: 364986 - RNA, 22 nt, Human
gggcauggugaugugcaccugu

SEQ ID NO: 364987 - RNA, 22 nt, Human
aaugcacauauauguguauaca

SEQ ID NO: 364988 - RNA, 22 nt, Human
auuucucaguguacauuauguu

SEQ ID NO: 364989 - RNA, 22 nt, Human
gacagaguuguugauguaugcu

SEQ ID NO: 364990 - RNA, 22 nt, Human
cauuuguaauacugacuugcag

SEQ ID NO: 364991 - RNA, 22 nt, Human
gucagaggaauggaugagugau

SEQ ID NO: 364992 - RNA, 22 nt, Human
caaauguaaauucuuuugaagc

SEQ ID NO: 364993 - RNA, 22 nt, Human
uuguggcucgugagauguuagg

SEQ ID NO: 364994 - RNA, 21 nt, Human
ucauucacaggguauuguaua

SEQ ID NO: 364995 - RNA, 19 nt, Human
cucuggagcagacacugga

SEQ ID NO: 364996 - RNA, 22 nt, Human
aguguuucuggcaaaugaaagu

SEQ ID NO: 364997 - RNA, 22 nt, Human
augccuguaaucccagugcuuu

SEQ ID NO: 364998 - RNA, 22 nt, Human
cagggcuccccagagagccucu

SEQ ID NO: 364999 - RNA, 22 nt, Human
gggcugggaauggcuaaguaug

SEQ ID NO: 365000 - RNA, 22 nt, Human
gagcugccaguguaugaauucu

SEQ ID NO: 365001 - RNA, 22 nt, Human
aagagcuggaugaagaaaucaa

SEQ ID NO: 365002 - RNA, 22 nt, Human
gcacacaggcaguuuccagcca

SEQ ID NO: 365003 - RNA, 21 nt, Human
uaaagaagaugaaugugauca

SEQ ID NO: 365004 - RNA, 22 nt, Human
ucaccccuacauuucccuugcu

SEQ ID NO: 365005 - RNA, 22 nt, Human
agggcugaagggaggugcucau

SEQ ID NO: 365006 - RNA, 22 nt, Human
agcuuuaucacaauauuggcua

SEQ ID NO: 365007 - RNA, 22 nt, Human
aagcagaaguugaucuaccaua

SEQ ID NO: 365008 - RNA, 22 nt, Human
gugguuuucuccaacccagaac

SEQ ID NO: 365009 - RNA, 22 nt, Human
ucaggccacggcucacugagac

SEQ ID NO: 365010 - RNA, 22 nt, Human
cuuccugcauugugccagaguu

SEQ ID NO: 365011 - RNA, 22 nt, Human
aggagaaggaagugcaucacua

SEQ ID NO: 365012 - RNA, 22 nt, Human
ucagagugaccuuacauggucu

SEQ ID NO: 365013 - RNA, 22 nt, Human
aagaugcagcuuuacaauaagg

SEQ ID NO: 365014 - RNA, 22 nt, Human
cauauuugguauaacuuaagca

SEQ ID NO: 365015 - RNA, 22 nt, Human
ccuggagcacagcccaguccca

SEQ ID NO: 365016 - RNA, 22 nt, Human
cccaggagauggagguugcagu

SEQ ID NO: 365017 - RNA, 22 nt, Human
ggaggccaggguggguggaucg

SEQ ID NO: 365018 - RNA, 22 nt, Human
cugggccuagaggaagcugaca

SEQ ID NO: 365019 - RNA, 22 nt, Human
agccaggccagacucacacccu

SEQ ID NO: 365020 - RNA, 22 nt, Human
gcugcccucccagggcaagcuu

SEQ ID NO: 365021 - RNA, 22 nt, Human
ggccaagauggaaggagagaug

SEQ ID NO: 365022 - RNA, 20 nt, Human
agaggccaguuaggagucua

SEQ ID NO: 365023 - RNA, 22 nt, Human
agggucagugaugagggagccc

SEQ ID NO: 365024 - RNA, 22 nt, Human
ccauggcuuuugagucucaaga

SEQ ID NO: 365025 - RNA, 22 nt, Human
ucauccagccucaucaggagcu

SEQ ID NO: 365026 - RNA, 22 nt, Human
uccuucaguucaauuaguccgu

SEQ ID NO: 365027 - RNA, 22 nt, Human
ggaccugcucucccaguucucu

SEQ ID NO: 365028 - RNA, 22 nt, Human
uugaaagaagaagcugcgaugu

SEQ ID NO: 365029 - RNA, 22 nt, Human
cuggagcaggcuugucccagcu

SEQ ID NO: 365030 - RNA, 20 nt, Human
ugacucugcaaccgucucuc

SEQ ID NO: 365031 - RNA, 22 nt, Human
aucuacagugcacaggacagcc

SEQ ID NO: 365032 - RNA, 22 nt, Human
ccagcuggcacuguggcugccc

SEQ ID NO: 365033 - RNA, 22 nt, Human
ccaggagaagcaucugagugua

SEQ ID NO: 365034 - RNA, 22 nt, Human
uggcucugaccagguagaggag

SEQ ID NO: 365035 - RNA, 22 nt, Human
uguucuucuagauugccuuuua

SEQ ID NO: 365036 - RNA, 20 nt, Human
uuccuuaggcauuggaagaa

SEQ ID NO: 365037 - RNA, 22 nt, Human
gcaagcugcucuuauguggagg

SEQ ID NO: 365038 - RNA, 22 nt, Human
ccagagucuuuauauuccugaa

SEQ ID NO: 365039 - RNA, 22 nt, Human
ggccagcucuuguccacggagg

SEQ ID NO: 365040 - RNA, 22 nt, Human
ggagucagccugucagagugua

SEQ ID NO: 365041 - RNA, 19 nt, Human
ugaaggagggggauggcca

SEQ ID NO: 365042 - RNA, 22 nt, Human
uauggcuuuuuauucaucuuac

SEQ ID NO: 365043 - RNA, 22 nt, Human
ggaggccaccugaccugcuguu

SEQ ID NO: 365044 - RNA, 22 nt, Human
ugggcagaaugugggauccaga

SEQ ID NO: 365045 - RNA, 22 nt, Human
ugcuuuauucagucucugccau

SEQ ID NO: 365046 - RNA, 22 nt, Human
uguaacaauuucuuacuauugu

SEQ ID NO: 365047 - RNA, 22 nt, Human
ccugggcagggcuggacucuca

SEQ ID NO: 365048 - RNA, 22 nt, Human
cugaggaggggccugagugaga

SEQ ID NO: 365049 - RNA, 18 nt, Human
agagcagcggcaucacac

SEQ ID NO: 365050 - RNA, 22 nt, Human
gggaagggagggaccucagucu

SEQ ID NO: 365051 - RNA, 22 nt, Human
ucucaggaguagugggauccau

SEQ ID NO: 365052 - RNA, 22 nt, Human
gggcagcugccagaggccaugg

SEQ ID NO: 365053 - RNA, 19 nt, Human
ccucuccgcccaccagccc

SEQ ID NO: 365054 - RNA, 22 nt, Human
agccuauuccaggaugagcuca

SEQ ID NO: 365055 - RNA, 22 nt, Human
gucccuaguggaaagacaugau

SEQ ID NO: 365056 - RNA, 22 nt, Human
ccucaggggugcccacagcugc

SEQ ID NO: 365057 - RNA, 19 nt, Human
uuugcagugguuccuuugu

SEQ ID NO: 365058 - RNA, 22 nt, Human
gccuggguccacugaucaugcu

SEQ ID NO: 365059 - RNA, 22 nt, Human
aagcagccucauuugugguaag

SEQ ID NO: 365060 - RNA, 22 nt, Human
acuuucuauucccacagagaua

SEQ ID NO: 365061 - RNA, 22 nt, Human
gucaggaugggcagccaaacua

SEQ ID NO: 365062 - RNA, 22 nt, Human
ccagccuggagggcaguggugg

SEQ ID NO: 365063 - RNA, 22 nt, Human
augcuguguuuuaaauggaaau

SEQ ID NO: 365064 - RNA, 22 nt, Human
ucagaagcugguguccuuugaa

SEQ ID NO: 365065 - RNA, 22 nt, Human
ucccaggaggugcuuccuagga

SEQ ID NO: 365066 - RNA, 22 nt, Human
aagggcugccagggggugccag

SEQ ID NO: 365067 - RNA, 22 nt, Human
cccagcauuucugggcugcacu

SEQ ID NO: 365068 - RNA, 22 nt, Human
ugcuuuauuuuaaauaugccau

SEQ ID NO: 365069 - RNA, 22 nt, Human
uccuggccuugcuccugaugcc

SEQ ID NO: 365070 - RNA, 22 nt, Human
cagagcaucgcgcagagagccu

SEQ ID NO: 365071 - RNA, 22 nt, Human
gggacagcuguagugcuuggcu

SEQ ID NO: 365072 - RNA, 22 nt, Human
aucaggauucaguaucuccagc

SEQ ID NO: 365073 - RNA, 22 nt, Human
ucucuucuaauuuucccgagua

SEQ ID NO: 365074 - RNA, 22 nt, Human
uguuugaacugaauaacauagu

SEQ ID NO: 365075 - RNA, 23 nt, Human
cuggcuccgaagacuccaggauc

SEQ ID NO: 365076 - RNA, 20 nt, Human
agugucuggugcagggccuc

SEQ ID NO: 365077 - RNA, 22 nt, Human
ugcuggcuacauuauugcuguc

SEQ ID NO: 365078 - RNA, 22 nt, Human
gcggagggcgagcccgcggagc

SEQ ID NO: 365079 - RNA, 22 nt, Human
cagagcuggagcuugaauggag

SEQ ID NO: 365080 - RNA, 22 nt, Human
gccaggugcuaucccugcgcug

SEQ ID NO: 365081 - RNA, 21 nt, Human
ccugcugugaucuuagugagu

SEQ ID NO: 365082 - RNA, 22 nt, Human
uaguuuuacuugcgaugauaau

SEQ ID NO: 365083 - RNA, 22 nt, Human
ugggcugcugcggugcucuugg

SEQ ID NO: 365084 - RNA, 22 nt, Human
gucuggagccacccuaagcauu

SEQ ID NO: 365085 - RNA, 22 nt, Human
cugucccuucauuauucacuac

SEQ ID NO: 365086 - RNA, 22 nt, Human
ucuuagaaaugaaguucuuucu

SEQ ID NO: 365087 - RNA, 22 nt, Human
ccagggccucguguucugagug

SEQ ID NO: 365088 - RNA, 22 nt, Human
auaugcacacucugcccacaga

SEQ ID NO: 365089 - RNA, 22 nt, Human
agggagcugagcugugagcagc

SEQ ID NO: 365090 - RNA, 22 nt, Human
cagagacuggagugcaguggcg

SEQ ID NO: 365091 - RNA, 22 nt, Human
cauccagggcagccauggccug

SEQ ID NO: 365092 - RNA, 22 nt, Human
ucccagcagagccagcaagccg

SEQ ID NO: 365093 - RNA, 22 nt, Human
ccacugggcguuucuguccaau

SEQ ID NO: 365094 - RNA, 22 nt, Human
ugaaagaacuagcaucuucaag

SEQ ID NO: 365095 - RNA, 22 nt, Human
guucuaauaggagaaaagacag

SEQ ID NO: 365096 - RNA, 22 nt, Human
cugggcagcuaccaccacugcu

SEQ ID NO: 365097 - RNA, 23 nt, Human
uucuuucaagaaguucacagugc

SEQ ID NO: 365098 - RNA, 22 nt, Human
agggaccucauguaaguggauu

SEQ ID NO: 365099 - RNA, 22 nt, Human
uggcuuuagguugcauguuucu

SEQ ID NO: 365100 - RNA, 22 nt, Human
ccagagcccgggaccuggacuu

SEQ ID NO: 365101 - RNA, 19 nt, Human
auagaaaggguuaaagaca

SEQ ID NO: 365102 - RNA, 22 nt, Human
ggaggugaggccguagggugug

SEQ ID NO: 365103 - RNA, 22 nt, Human
aaaugauugucaaaguucuguu

SEQ ID NO: 365104 - RNA, 20 nt, Human
caauuucaucauuuccugug

SEQ ID NO: 365105 - RNA, 22 nt, Human
aguugaaauuagaguccuggcu

SEQ ID NO: 365106 - RNA, 22 nt, Human
uuuuccaaaguaccaugucccu

SEQ ID NO: 365107 - RNA, 22 nt, Human
uugcauguguaauuuuucuaaa

SEQ ID NO: 365108 - RNA, 17 nt, Human
acagggcagaaacagcu

SEQ ID NO: 365109 - RNA, 18 nt, Human
aaagaaggauuggagagc

SEQ ID NO: 365110 - RNA, 22 nt, Human
uguaauggaagugggauugcau

SEQ ID NO: 365111 - RNA, 22 nt, Human
cuagaaauacaggcacgugcca

SEQ ID NO: 365112 - RNA, 22 nt, Human
cuguugucuccucucagauuau

SEQ ID NO: 365113 - RNA, 22 nt, Human
ugaaaugaaugugauucgauag

SEQ ID NO: 365114 - RNA, 22 nt, Human
agaaaugugagccccuuaucaa

SEQ ID NO: 365115 - RNA, 22 nt, Human
ugcccaggguggagugcagcgg

SEQ ID NO: 365116 - RNA, 23 nt, Human
uccaggcacgcauuucuucuagc

SEQ ID NO: 365117 - RNA, 22 nt, Human
agcuacccgaggacaggcuaag

SEQ ID NO: 365118 - RNA, 22 nt, Human
ccagagagagaggucaauggca

SEQ ID NO: 365119 - RNA, 22 nt, Human
uuucuucagccacuccaaacug

SEQ ID NO: 365120 - RNA, 22 nt, Human
cccuuccuccucgccugucaga

SEQ ID NO: 365121 - RNA, 22 nt, Human
uccuucagggggccgccugcac

SEQ ID NO: 365122 - RNA, 22 nt, Human
ucucagagaugucaagagucua

SEQ ID NO: 365123 - RNA, 22 nt, Human
ucaucugucauccacaaagcug

SEQ ID NO: 365124 - RNA, 22 nt, Human
aggcucagagaugaguaagcac

SEQ ID NO: 365125 - RNA, 22 nt, Human
uugaacauuaacuucagucuau

SEQ ID NO: 365126 - RNA, 20 nt, Human
cagcuuuagaucuuugauua

SEQ ID NO: 365127 - RNA, 22 nt, Human
cuggugguucaggagaauggcu

SEQ ID NO: 365128 - RNA, 22 nt, Human
ugaugguugauuauaaaucagu

SEQ ID NO: 365129 - RNA, 22 nt, Human
caaagguaaagaucugcugugg

SEQ ID NO: 365130 - RNA, 22 nt, Human
ucuucuuccucauuuauacaua

SEQ ID NO: 365131 - RNA, 22 nt, Human
gcugucugucucugucccacca

SEQ ID NO: 365132 - RNA, 22 nt, Human
agaugaaaauacgugacuuuaa

SEQ ID NO: 365133 - RNA, 22 nt, Human
acagagagaaacaaucagcagc

SEQ ID NO: 365134 - RNA, 22 nt, Human
cugccacuuacuaggcauggug

SEQ ID NO: 365135 - RNA, 22 nt, Human
uuuccucuccggggccuccagg

SEQ ID NO: 365136 - RNA, 22 nt, Human
gacagggaggagcagagcuucu

SEQ ID NO: 365137 - RNA, 22 nt, Human
ucugcuggccuuagcaggucua

SEQ ID NO: 365138 - RNA, 22 nt, Human
aggcugaggaucguacuuucca

SEQ ID NO: 365139 - RNA, 22 nt, Human
uggcaggcagugugggagcugg

SEQ ID NO: 365140 - RNA, 22 nt, Human
uuuuuccuagugcuuucuggua

SEQ ID NO: 365141 - RNA, 22 nt, Human
aggucauuccuugucuucuugc

SEQ ID NO: 365142 - RNA, 22 nt, Human
augcaguacugauacaugccac

SEQ ID NO: 365143 - RNA, 22 nt, Human
uggcugagaccaucagggugua

SEQ ID NO: 365144 - RNA, 22 nt, Human
ucaguucuuuauuucacaguga

SEQ ID NO: 365145 - RNA, 22 nt, Human
acuuuggaucugauguaaucag

SEQ ID NO: 365146 - RNA, 22 nt, Human
uaaauaugcauguauccuuauc

SEQ ID NO: 365147 - RNA, 22 nt, Human
agagcugcaccuaugcagaccu

SEQ ID NO: 365148 - RNA, 22 nt, Human
acucugggccccagguggagcu

SEQ ID NO: 365149 - RNA, 22 nt, Human
ucuggcuccacucugugcaugc

SEQ ID NO: 365150 - RNA, 22 nt, Human
guuauacauauguguuaacaaa

SEQ ID NO: 365151 - RNA, 22 nt, Human
aggccugucuggggcucagcca

SEQ ID NO: 365152 - RNA, 22 nt, Human
uugaauaguuuuggauagcaua

SEQ ID NO: 365153 - RNA, 22 nt, Human
cacugucuuuugugaagacaau

SEQ ID NO: 365154 - RNA, 19 nt, Human
agucuuucccacucgucuu

SEQ ID NO: 365155 - RNA, 22 nt, Human
caguggauuagccagagcugga

SEQ ID NO: 365156 - RNA, 22 nt, Human
cuuguccccagcagguugguuu

SEQ ID NO: 365157 - RNA, 22 nt, Human
gagagcuguccggcugagcagc

SEQ ID NO: 365158 - RNA, 22 nt, Human
cccugcaggcucagacuggagu

SEQ ID NO: 365159 - RNA, 22 nt, Human
gcuggauccugauucgucuuug

SEQ ID NO: 365160 - RNA, 22 nt, Human
cagccaccauacagcagaagcu

SEQ ID NO: 365161 - RNA, 22 nt, Human
ccucaggaaaugaauaaauggc

SEQ ID NO: 365162 - RNA, 22 nt, Human
guggugaagccccaucucugcu

SEQ ID NO: 365163 - RNA, 22 nt, Human
guuaggcagcccaagaugucag

SEQ ID NO: 365164 - RNA, 22 nt, Human
augcuguggccagaguucaacu

SEQ ID NO: 365165 - RNA, 22 nt, Human
cugguccuccuugccuucagau

SEQ ID NO: 365166 - RNA, 21 nt, Human
gcugcccaacccugcaucucc

SEQ ID NO: 365167 - RNA, 22 nt, Human
aggcagcaagauuauuuaaucc

SEQ ID NO: 365168 - RNA, 22 nt, Human
uccagcucuaacaugcugggcc

SEQ ID NO: 365169 - RNA, 22 nt, Human
ucuggcucucucaucacccaau

SEQ ID NO: 365170 - RNA, 22 nt, Human
ucuuugaauucaaacuguucaa

SEQ ID NO: 365171 - RNA, 22 nt, Human
cugagaguguggcuuccaggcc

SEQ ID NO: 365172 - RNA, 23 nt, Human
uggcugagguccagguaguuuca

SEQ ID NO: 365173 - RNA, 22 nt, Human
agagaagagcaaugauaaauuu

SEQ ID NO: 365174 - RNA, 22 nt, Human
uucagaaagugaaucuuguuau

SEQ ID NO: 365175 - RNA, 22 nt, Human
acguguucaauuuccaucugac

SEQ ID NO: 365176 - RNA, 23 nt, Human
agggcuccuuguugauuagcauu

SEQ ID NO: 365177 - RNA, 20 nt, Human
guggccuguccuguuguggg

SEQ ID NO: 365178 - RNA, 22 nt, Human
ggcuccugggaugggacugagc

SEQ ID NO: 365179 - RNA, 22 nt, Human
aaauuauucucauguguuucuu

SEQ ID NO: 365180 - RNA, 22 nt, Human
gucauuccuuauguugauucag

SEQ ID NO: 365181 - RNA, 22 nt, Human
aauucucagguaaaaguuaagu

SEQ ID NO: 365182 - RNA, 22 nt, Human
acagucauuagauacaaugucu

SEQ ID NO: 365183 - RNA, 22 nt, Human
ccacagggcacagacaggaagc

SEQ ID NO: 365184 - RNA, 22 nt, Human
gugcauuugacgaauacucacu

SEQ ID NO: 365185 - RNA, 22 nt, Human
agacaaagaaaccguagaagca

SEQ ID NO: 365186 - RNA, 21 nt, Human
gcaaauguucaggaaaaaaga

SEQ ID NO: 365187 - RNA, 22 nt, Human
ccagagagcuacaaggcauaaa

SEQ ID NO: 365188 - RNA, 22 nt, Human
acccucccauuuccauguagca

SEQ ID NO: 365189 - RNA, 22 nt, Human
ccuggcugcuauagcagcaugu

SEQ ID NO: 365190 - RNA, 22 nt, Human
acugccaaugguaguuugaugg

SEQ ID NO: 365191 - RNA, 22 nt, Human
ugaaggugaaugucuaugggga

SEQ ID NO: 365192 - RNA, 20 nt, Human
ccuaggcaugcugagucucc

SEQ ID NO: 365193 - RNA, 22 nt, Human
aagcagcauaauugcuauuuua

SEQ ID NO: 365194 - RNA, 22 nt, Human
aggcagcuuuaacugguaguag

SEQ ID NO: 365195 - RNA, 22 nt, Human
gcuggaucauauggugguucua

SEQ ID NO: 365196 - RNA, 21 nt, Human
agccugggaggcggagguugc

SEQ ID NO: 365197 - RNA, 22 nt, Human
gaggcugauucggggaacagca

SEQ ID NO: 365198 - RNA, 22 nt, Human
cacauacaaugguguuauuugg

SEQ ID NO: 365199 - RNA, 22 nt, Human
auugucgcuuauuuaggugcuu

SEQ ID NO: 365200 - RNA, 22 nt, Human
aaaggcuaugagauagaagaua

SEQ ID NO: 365201 - RNA, 22 nt, Human
caagccugucucaccagugcua

SEQ ID NO: 365202 - RNA, 19 nt, Human
cagaaauagcgaaguguaa

SEQ ID NO: 365203 - RNA, 22 nt, Human
auguccuuugcuucucuggucc

SEQ ID NO: 365204 - RNA, 22 nt, Human
ggggacccucaggacugcgucu

SEQ ID NO: 365205 - RNA, 22 nt, Human
aucagcuuuucucaucagaaau

SEQ ID NO: 365206 - RNA, 22 nt, Human
gaggcugccccuuccucagcug

SEQ ID NO: 365207 - RNA, 22 nt, Human
gcuggcauuacaggagagaacc

SEQ ID NO: 365208 - RNA, 18 nt, Human
ccucaggggaccuggcag

SEQ ID NO: 365209 - RNA, 22 nt, Human
cuggaugcuuccucucugcuag

SEQ ID NO: 365210 - RNA, 22 nt, Human
aaaguuugagugauuugacaca

SEQ ID NO: 365211 - RNA, 22 nt, Human
agggacuuguguccuauguaug

SEQ ID NO: 365212 - RNA, 21 nt, Human
acagacagggccagugucccc

SEQ ID NO: 365213 - RNA, 23 nt, Human
ccugggcauuggcugcagcuucu

SEQ ID NO: 365214 - RNA, 22 nt, Human
gccagucugcucccacaaguuc

SEQ ID NO: 365215 - RNA, 22 nt, Human
gggaggaaggcuugggugagua

SEQ ID NO: 365216 - RNA, 22 nt, Human
agcagacaacccagaugaccca

SEQ ID NO: 365217 - RNA, 22 nt, Human
uacaugaaguugucuaaacugg

SEQ ID NO: 365218 - RNA, 22 nt, Human
cuucaguuuaucccaucaucca

SEQ ID NO: 365219 - RNA, 22 nt, Human
aucuuucagagcuccaucaggg

SEQ ID NO: 365220 - RNA, 22 nt, Human
gacaugcaacaauuuggcauuu

SEQ ID NO: 365221 - RNA, 22 nt, Human
cagggcaggaauuugacauugc

SEQ ID NO: 365222 - RNA, 20 nt, Human
agggucaguagcacagagcu

SEQ ID NO: 365223 - RNA, 22 nt, Human
caugggcaccuuaaaaugaggc

SEQ ID NO: 365224 - RNA, 23 nt, Human
cuggggcuuucaaaucugggcag

SEQ ID NO: 365225 - RNA, 22 nt, Human
ucagcaauccucccacaggugg

SEQ ID NO: 365226 - RNA, 16 nt, Human
gcaacuuugggguuga

SEQ ID NO: 365227 - RNA, 22 nt, Human
cugccaggccuccgcugucccc

SEQ ID NO: 365228 - RNA, 22 nt, Human
aaucauaauucaaauaagcuua

SEQ ID NO: 365229 - RNA, 22 nt, Human
aaaggccaccaacaugaagcau

SEQ ID NO: 365230 - RNA, 22 nt, Human
uccuugaaaggggcugcagggc

SEQ ID NO: 365231 - RNA, 22 nt, Human
cagcuggaucccugcagaacuu

SEQ ID NO: 365232 - RNA, 19 nt, Human
ugccagcauuaggcugaag

SEQ ID NO: 365233 - RNA, 22 nt, Human
auucccaucgucaacuucacug

SEQ ID NO: 365234 - RNA, 22 nt, Human
aaaugcuacauacacaucaggg

SEQ ID NO: 365235 - RNA, 22 nt, Human
auguuaaaugguuuauuauuaa

SEQ ID NO: 365236 - RNA, 22 nt, Human
uaucagaacacauguuuugcag

SEQ ID NO: 365237 - RNA, 22 nt, Human
agccaucauuucugucacuggc

SEQ ID NO: 365238 - RNA, 23 nt, Human
ugggggugcacgggccacaucuu

SEQ ID NO: 365239 - RNA, 22 nt, Human
gcaaacaagcugccugaagauu

SEQ ID NO: 365240 - RNA, 22 nt, Human
gcagacuguaucaaugucagua

SEQ ID NO: 365241 - RNA, 22 nt, Human
agcugcucugauaaaccuacuu

SEQ ID NO: 365242 - RNA, 22 nt, Human
guauccuuugcggaaauuucua

SEQ ID NO: 365243 - RNA, 22 nt, Human
cagcagaggaaagcaaaucuaa

SEQ ID NO: 365244 - RNA, 22 nt, Human
ccagggcacguugggacaguac

SEQ ID NO: 365245 - RNA, 22 nt, Human
ggcucuggugugaagcagccuc

SEQ ID NO: 365246 - RNA, 21 nt, Human
cuccugggcuaagauauagug

SEQ ID NO: 365247 - RNA, 22 nt, Human
gagcccaggcagagguugcagu

SEQ ID NO: 365248 - RNA, 22 nt, Human
cagccaggacagggaaacuagu

SEQ ID NO: 365249 - RNA, 21 nt, Human
ugcagcagaguaagcagggga

SEQ ID NO: 365250 - RNA, 22 nt, Human
gggcuggaggagauccagaggc

SEQ ID NO: 365251 - RNA, 22 nt, Human
uagaaaugauuuugaugcuuca

SEQ ID NO: 365252 - RNA, 22 nt, Human
ucuguuccauguuuuguuccau

SEQ ID NO: 365253 - RNA, 22 nt, Human
auguuuccagguucuuccuaug

SEQ ID NO: 365254 - RNA, 22 nt, Human
acagccauagaugcuuauguaa

SEQ ID NO: 365255 - RNA, 18 nt, Human
gaggcagcuagcaauuuu

SEQ ID NO: 365256 - RNA, 22 nt, Human
acagggcagagggcaguuggua

SEQ ID NO: 365257 - RNA, 22 nt, Human
guagggacaauauguuauuaga

SEQ ID NO: 365258 - RNA, 22 nt, Human
uuuaauauuucuuuccugaagc

SEQ ID NO: 365259 - RNA, 23 nt, Human
uuuauuuauuuaggcugagggau

SEQ ID NO: 365260 - RNA, 22 nt, Human
uggcagagaacacggcugaucu

SEQ ID NO: 365261 - RNA, 22 nt, Human
ucugcagaaguggcugggccac

SEQ ID NO: 365262 - RNA, 22 nt, Human
cacauuuaauccuuuauaagua

SEQ ID NO: 365263 - RNA, 22 nt, Human
uguagggaggaaggguuggaaa

SEQ ID NO: 365264 - RNA, 18 nt, Human
cugcugcaggcacucagg

SEQ ID NO: 365265 - RNA, 22 nt, Human
aggcaagcgcagaagcggagga

SEQ ID NO: 365266 - RNA, 22 nt, Human
uuuauguacauauccacaagga

SEQ ID NO: 365267 - RNA, 22 nt, Human
ucucugguggcuccaucaguag

SEQ ID NO: 365268 - RNA, 22 nt, Human
uaggccagcccuuaguccuguc

SEQ ID NO: 365269 - RNA, 22 nt, Human
ggcagugaaaaaguauguuucc

SEQ ID NO: 365270 - RNA, 19 nt, Human
uggagggguuugaaugugg

SEQ ID NO: 365271 - RNA, 22 nt, Human
cucucugcuguauccuuaggcu

SEQ ID NO: 365272 - RNA, 22 nt, Human
ggucucagacuggcaggcagug

SEQ ID NO: 365273 - RNA, 22 nt, Human
uuaaacauuuauggaggcagca

SEQ ID NO: 365274 - RNA, 22 nt, Human
auacagaacucucaguuguaua

SEQ ID NO: 365275 - RNA, 22 nt, Human
cuuuggcagccucugcuauuga

SEQ ID NO: 365276 - RNA, 22 nt, Human
uagagcaguuggcagcuguauu

SEQ ID NO: 365277 - RNA, 22 nt, Human
auucauaacggcaaaugucacc

SEQ ID NO: 365278 - RNA, 22 nt, Human
acuuugugcccaacagaaagaa

SEQ ID NO: 365279 - RNA, 22 nt, Human
ccuccugguccagcaucucuuu

SEQ ID NO: 365280 - RNA, 22 nt, Human
uggaccugaagaauaggaagua

SEQ ID NO: 365281 - RNA, 22 nt, Human
gcugucacauuuggagcacugg

SEQ ID NO: 365282 - RNA, 22 nt, Human
ucagugcacagagauuuuuguu

SEQ ID NO: 365283 - RNA, 19 nt, Human
uaaggccaaaaguaagugu

SEQ ID NO: 365284 - RNA, 22 nt, Human
cagggagcuuucccaggacccu

SEQ ID NO: 365285 - RNA, 21 nt, Human
cagugagguccccagccuagg

SEQ ID NO: 365286 - RNA, 22 nt, Human
ggcuggaaaagacaaagcuauu

SEQ ID NO: 365287 - RNA, 22 nt, Human
cuggcagucugccucuucacug

SEQ ID NO: 365288 - RNA, 22 nt, Human
gcacaggcacagagggccacug

SEQ ID NO: 365289 - RNA, 22 nt, Human
uaaauguguuagucaugguuuu

SEQ ID NO: 365290 - RNA, 22 nt, Human
aaggcaguagguguuucaaacu

SEQ ID NO: 365291 - RNA, 22 nt, Human
augcugaauugaugcgagggag

SEQ ID NO: 365292 - RNA, 22 nt, Human
caaugugguggcagaugucagu

SEQ ID NO: 365293 - RNA, 22 nt, Human
cacagaguggaggcuuggccug

SEQ ID NO: 365294 - RNA, 22 nt, Human
gcagggacaaggcagguguucu

SEQ ID NO: 365295 - RNA, 22 nt, Human
uguacaugugucuguauaucuu

SEQ ID NO: 365296 - RNA, 22 nt, Human
augaagucuagcaagcauugaa

SEQ ID NO: 365297 - RNA, 22 nt, Human
ugcuuuauggagcccaucucau

SEQ ID NO: 365298 - RNA, 22 nt, Human
uccaauauggauaaaaggggcc

SEQ ID NO: 365299 - RNA, 22 nt, Human
cagguggggagaguguggagca

SEQ ID NO: 365300 - RNA, 22 nt, Human
cucagggccaaggaugcuguug

SEQ ID NO: 365301 - RNA, 22 nt, Human
aauauguucaaaauagaucacu

SEQ ID NO: 365302 - RNA, 20 nt, Human
uuguuucugcuauuuucuaa

SEQ ID NO: 365303 - RNA, 22 nt, Human
uuuauuugaaucaggggagaau

SEQ ID NO: 365304 - RNA, 22 nt, Human
ccuggaucccgauggcugugag

SEQ ID NO: 365305 - RNA, 22 nt, Human
acagcagcacuauugacauuuu

SEQ ID NO: 365306 - RNA, 21 nt, Human
agccugcaauguagguaccgg

SEQ ID NO: 365307 - RNA, 22 nt, Human
aguaaugugccugaaauacuug

SEQ ID NO: 365308 - RNA, 22 nt, Human
aguaaaaucuuaagcacagugg

SEQ ID NO: 365309 - RNA, 22 nt, Human
cuccaggccauggcugcggagg

SEQ ID NO: 365310 - RNA, 22 nt, Human
gaggcucagagagguccacaua

SEQ ID NO: 365311 - RNA, 22 nt, Human
agagccugcagcugugaagaaa

SEQ ID NO: 365312 - RNA, 20 nt, Human
ccagaagagaugaucaucca

SEQ ID NO: 365313 - RNA, 22 nt, Human
cucaggauuuacuaauuucaag

SEQ ID NO: 365314 - RNA, 22 nt, Human
gcucucuuuuuccagugguggu

SEQ ID NO: 365315 - RNA, 22 nt, Human
auuuuucucuccacuccauuaa

SEQ ID NO: 365316 - RNA, 22 nt, Human
acaggcuuuuuuagaaugacau

SEQ ID NO: 365317 - RNA, 22 nt, Human
ggccucggcccacugcugcggu

SEQ ID NO: 365318 - RNA, 22 nt, Human
ggcucagguugggucacaugac

SEQ ID NO: 365319 - RNA, 22 nt, Human
ggccaggcugcugggaccccgc

SEQ ID NO: 365320 - RNA, 22 nt, Human
aagggacuuugucagcuuucca

SEQ ID NO: 365321 - RNA, 22 nt, Human
uagggcucgggcacaggacagg

SEQ ID NO: 365322 - RNA, 22 nt, Human
augcaguagauaggcacuuuua

SEQ ID NO: 365323 - RNA, 22 nt, Human
uccauggguagcccugguugag

SEQ ID NO: 365324 - RNA, 22 nt, Human
aggaaccagagguugagcaacu

SEQ ID NO: 365325 - RNA, 20 nt, Human
ggaagccagcauccuugagg

SEQ ID NO: 365326 - RNA, 22 nt, Human
ugaggaaacuuacaaggcagaa

SEQ ID NO: 365327 - RNA, 22 nt, Human
aaaacaguuuaggcaucacagu

SEQ ID NO: 365328 - RNA, 22 nt, Human
uugaaaggaauacagaggccua

SEQ ID NO: 365329 - RNA, 22 nt, Human
aauuuccagaucagaugacuca

SEQ ID NO: 365330 - RNA, 22 nt, Human
gaauauuuuuaaagggacuaau

SEQ ID NO: 365331 - RNA, 22 nt, Human
uguggcagcuggagguggagaa

SEQ ID NO: 365332 - RNA, 22 nt, Human
cccuugcaucccauguguggcc

SEQ ID NO: 365333 - RNA, 22 nt, Human
gagcagugagugaauguugccu

SEQ ID NO: 365334 - RNA, 22 nt, Human
cuuggcagcuuuuggaggagcc

SEQ ID NO: 365335 - RNA, 22 nt, Human
acagagauggcacagagaaggu

SEQ ID NO: 365336 - RNA, 22 nt, Human
caguguggagggagagagccug

SEQ ID NO: 365337 - RNA, 22 nt, Human
agcaggaguuugaugcuuuuau

SEQ ID NO: 365338 - RNA, 22 nt, Human
caauuuuuguacuuauaguacu

SEQ ID NO: 365339 - RNA, 22 nt, Human
agauuucacaugcugcucuauu

SEQ ID NO: 365340 - RNA, 22 nt, Human
cucugagcugaaacaugagcau

SEQ ID NO: 365341 - RNA, 23 nt, Human
uccaggagcaugcuggcuggcga

SEQ ID NO: 365342 - RNA, 22 nt, Human
cagcacacagugacucgcaccu

SEQ ID NO: 365343 - RNA, 22 nt, Human
auggggugagacuaggauuaaa

SEQ ID NO: 365344 - RNA, 22 nt, Human
cccugccuucuuggccuuuaaa

SEQ ID NO: 365345 - RNA, 22 nt, Human
gggcuggucuggcuuagucagg

SEQ ID NO: 365346 - RNA, 20 nt, Human
uuuacauuuugaaacaguga

SEQ ID NO: 365347 - RNA, 22 nt, Human
cagccccucccucaggcaggug

SEQ ID NO: 365348 - RNA, 22 nt, Human
gagucaccacacggugcugacu

SEQ ID NO: 365349 - RNA, 22 nt, Human
ggaugcugcuaucaggcuucga

SEQ ID NO: 365350 - RNA, 21 nt, Human
ucacagacuggucagugaggc

SEQ ID NO: 365351 - RNA, 22 nt, Human
auaucaaacgaaguuauuuuaa

SEQ ID NO: 365352 - RNA, 22 nt, Human
ccucaggggcuuuucguuguug

SEQ ID NO: 365353 - RNA, 22 nt, Human
gaaggcugaugacagauucugc

SEQ ID NO: 365354 - RNA, 22 nt, Human
gccaggcagcagcgaggauggu

SEQ ID NO: 365355 - RNA, 22 nt, Human
agggcuccgggccaccggccug

SEQ ID NO: 365356 - RNA, 22 nt, Human
agagugguacuucuuuuucuuc

SEQ ID NO: 365357 - RNA, 20 nt, Human
uuccaacucacaucucuaca

SEQ ID NO: 365358 - RNA, 22 nt, Human
uugcagcuuagugauguuaucu

SEQ ID NO: 365359 - RNA, 22 nt, Human
gaaaugcaaauucucucucgcu

SEQ ID NO: 365360 - RNA, 22 nt, Human
ucugcagauuuaucagcagcug

SEQ ID NO: 365361 - RNA, 22 nt, Human
augccacugacauggacaauuu

SEQ ID NO: 365362 - RNA, 22 nt, Human
acuuugcagggcuugauaucca

SEQ ID NO: 365363 - RNA, 19 nt, Human
ugagugggccccugcagac

SEQ ID NO: 365364 - RNA, 22 nt, Human
uccauguguuuuccuguccaca

SEQ ID NO: 365365 - RNA, 22 nt, Human
uugaaauggaagugaaaauucu

SEQ ID NO: 365366 - RNA, 22 nt, Human
acauucuguuuccccaaagaga

SEQ ID NO: 365367 - RNA, 22 nt, Human
gaauuucagaucagagaccauu

SEQ ID NO: 365368 - RNA, 22 nt, Human
caaagagcuguucagugucgcu

SEQ ID NO: 365369 - RNA, 22 nt, Human
uuuccucuuauacaguguuuau

SEQ ID NO: 365370 - RNA, 22 nt, Human
uaaaguucuggugagagguaag

SEQ ID NO: 365371 - RNA, 22 nt, Human
cagcugagaaauggggaaaggg

SEQ ID NO: 365372 - RNA, 16 nt, Human
gcaggcagaucacaug

SEQ ID NO: 365373 - RNA, 22 nt, Human
ugccuaggaaaccucaugcuuc

SEQ ID NO: 365374 - RNA, 22 nt, Human
aagcugccacacggugaguacu

SEQ ID NO: 365375 - RNA, 22 nt, Human
guaugcaucgacucaagucuga

SEQ ID NO: 365376 - RNA, 22 nt, Human
uccugagauaaaucucauguga

SEQ ID NO: 365377 - RNA, 22 nt, Human
auucauuuagguauucacuuac

SEQ ID NO: 365378 - RNA, 22 nt, Human
ucucagaguuuuuuuccaggac

SEQ ID NO: 365379 - RNA, 22 nt, Human
aggcugagugcuccccuagaug

SEQ ID NO: 365380 - RNA, 22 nt, Human
gcuggccacacugcugauggag

SEQ ID NO: 365381 - RNA, 22 nt, Human
uggcagcagggccccuggagga

SEQ ID NO: 365382 - RNA, 22 nt, Human
ucugucugcucauuuaccucag

SEQ ID NO: 365383 - RNA, 22 nt, Human
gagauucuguagucaggcaucu

SEQ ID NO: 365384 - RNA, 22 nt, Human
agaaaagguugaaaguaggauu

SEQ ID NO: 365385 - RNA, 22 nt, Human
agcaggagcugugggaagaugg

SEQ ID NO: 365386 - RNA, 22 nt, Human
ugucugugaccucuuaggcaag

SEQ ID NO: 365387 - RNA, 22 nt, Human
ugauuuccccagucuugcugcu

SEQ ID NO: 365388 - RNA, 22 nt, Human
ucuuagcauuucauaacaacug

SEQ ID NO: 365389 - RNA, 22 nt, Human
agaaugcaagauaaacuuuauu

SEQ ID NO: 365390 - RNA, 22 nt, Human
ucagcaaugagaacuggcauuu

SEQ ID NO: 365391 - RNA, 22 nt, Human
gccuccugaaaggaagagcucc

SEQ ID NO: 365392 - RNA, 22 nt, Human
uacagacaguuuuucagauauu

SEQ ID NO: 365393 - RNA, 22 nt, Human
ugcagggaagcaaggguggcuc

SEQ ID NO: 365394 - RNA, 18 nt, Human
cacaggcaggugauaggu

SEQ ID NO: 365395 - RNA, 22 nt, Human
accaaaggcagagcugaacacu

SEQ ID NO: 365396 - RNA, 22 nt, Human
agugggggccaacgagggcagc

SEQ ID NO: 365397 - RNA, 22 nt, Human
gauagaaagaauauagauucca

SEQ ID NO: 365398 - RNA, 22 nt, Human
cugccaggcagcagagggagaa

SEQ ID NO: 365399 - RNA, 22 nt, Human
cauguuauuuauccauuaaaca

SEQ ID NO: 365400 - RNA, 22 nt, Human
gucaggauuggggucaugaguc

SEQ ID NO: 365401 - RNA, 20 nt, Human
cccaggaguuugcucuuacu

SEQ ID NO: 365402 - RNA, 22 nt, Human
uauuucuugaguggucaguuuc

SEQ ID NO: 365403 - RNA, 22 nt, Human
ugcauuauacuuuuagaaauuu

SEQ ID NO: 365404 - RNA, 22 nt, Human
cuauagaaaauuguaucacacg

SEQ ID NO: 365405 - RNA, 22 nt, Human
uucagaaacagagugagugagu

SEQ ID NO: 365406 - RNA, 22 nt, Human
gccucugcggagcuguacauca

SEQ ID NO: 365407 - RNA, 18 nt, Human
ccuggagcuccacagcaa

SEQ ID NO: 365408 - RNA, 22 nt, Human
auucacuggcagacagaacuca

SEQ ID NO: 365409 - RNA, 22 nt, Human
uguccugggaaugggaugcagu

SEQ ID NO: 365410 - RNA, 18 nt, Human
uuccaugauuccuuucac

SEQ ID NO: 365411 - RNA, 22 nt, Human
guaacagaaagucaugcucauu

SEQ ID NO: 365412 - RNA, 22 nt, Human
aagauauagauggugguauaaa

SEQ ID NO: 365413 - RNA, 20 nt, Human
ggcagagcuaugucuguugc

SEQ ID NO: 365414 - RNA, 22 nt, Human
ucaaacuagccugacugguauu

SEQ ID NO: 365415 - RNA, 22 nt, Human
ugccaggcacgugagaguggcc

SEQ ID NO: 365416 - RNA, 22 nt, Human
cugucaguucuuccagauagag

SEQ ID NO: 365417 - RNA, 21 nt, Human
uccucugcucucauaccacaa

SEQ ID NO: 365418 - RNA, 22 nt, Human
guccaguguguuuaucuuggau

SEQ ID NO: 365419 - RNA, 22 nt, Human
aggcaggcucaaugcccagucu

SEQ ID NO: 365420 - RNA, 22 nt, Human
gggcagauggggcacaggcuga

SEQ ID NO: 365421 - RNA, 22 nt, Human
gaaaaaugagcugaugucaggg

SEQ ID NO: 365422 - RNA, 22 nt, Human
caggagagcccggguccgggcu

SEQ ID NO: 365423 - RNA, 22 nt, Human
uccugcugagcgucugucauuu

SEQ ID NO: 365424 - RNA, 22 nt, Human
cuggcagcauggagccugugcu

SEQ ID NO: 365425 - RNA, 22 nt, Human
gccaaaucacagggccaaaagc

SEQ ID NO: 365426 - RNA, 22 nt, Human
uuugcagugucagcuucugugu

SEQ ID NO: 365427 - RNA, 22 nt, Human
uugauuuauagaauguucaagc

SEQ ID NO: 365428 - RNA, 22 nt, Human
cagaguccuggacacagagaca

SEQ ID NO: 365429 - RNA, 22 nt, Human
cauugcuuugugcauauuuaaa

SEQ ID NO: 365430 - RNA, 22 nt, Human
gcaggggcuacucugagcuucc

SEQ ID NO: 365431 - RNA, 22 nt, Human
ucucuuaauaaguaaauacuga

SEQ ID NO: 365432 - RNA, 22 nt, Human
aauauccacacugugucccugc

SEQ ID NO: 365433 - RNA, 22 nt, Human
auguccagccaaccacuggauu

SEQ ID NO: 365434 - RNA, 22 nt, Human
cagagcugcaaaugccccuccg

SEQ ID NO: 365435 - RNA, 22 nt, Human
uauugacagagggucagaagag

SEQ ID NO: 365436 - RNA, 22 nt, Human
cuuccucccggcccaugcucug

SEQ ID NO: 365437 - RNA, 22 nt, Human
ucacaguuauagucuguagaau

SEQ ID NO: 365438 - RNA, 18 nt, Human
cagaagcaggcagugcag

SEQ ID NO: 365439 - RNA, 19 nt, Human
agccagugagccucugggu

SEQ ID NO: 365440 - RNA, 22 nt, Human
aaucagucauuagcucugaccu

SEQ ID NO: 365441 - RNA, 21 nt, Human
ugcuccuuagcugccccugcc

SEQ ID NO: 365442 - RNA, 22 nt, Human
accaggaguagaauaucuguga

SEQ ID NO: 365443 - RNA, 22 nt, Human
gguuuauuaaugugaacuguau

SEQ ID NO: 365444 - RNA, 22 nt, Human
gcagggaagacccggagcagcg

SEQ ID NO: 365445 - RNA, 19 nt, Human
uccugggcugggccagguc

SEQ ID NO: 365446 - RNA, 22 nt, Human
ucaaaggcaccaaggucacugc

SEQ ID NO: 365447 - RNA, 22 nt, Human
guacauaaaggaggcucuuugc

SEQ ID NO: 365448 - RNA, 22 nt, Human
uuacuuuguucucaagauaugu

SEQ ID NO: 365449 - RNA, 20 nt, Human
cagaggcaaggagacuugga

SEQ ID NO: 365450 - RNA, 20 nt, Human
cuggguggcaagcaaggggg

SEQ ID NO: 365451 - RNA, 22 nt, Human
agcugccaaguuggaguagcaa

SEQ ID NO: 365452 - RNA, 22 nt, Human
agagcagcuggggcagagacca

SEQ ID NO: 365453 - RNA, 22 nt, Human
acaaagucuuuuacaacaguca

SEQ ID NO: 365454 - RNA, 22 nt, Human
caguuuuugccauuaagaguaa

SEQ ID NO: 365455 - RNA, 22 nt, Human
ugacaauacagagagagcaaaa

SEQ ID NO: 365456 - RNA, 22 nt, Human
aagggcucugcugucucucccc

SEQ ID NO: 365457 - RNA, 22 nt, Human
gccaggcacaguucuaggugcu

SEQ ID NO: 365458 - RNA, 22 nt, Human
uucucagaggagucgggagcug

SEQ ID NO: 365459 - RNA, 21 nt, Human
agucccaggggugagugaugu

SEQ ID NO: 365460 - RNA, 22 nt, Human
ggcugcuucucacucauuugca

SEQ ID NO: 365461 - RNA, 22 nt, Human
caucugcuguuccuuggacuca

SEQ ID NO: 365462 - RNA, 22 nt, Human
auauuaggugcucaauacaugc

SEQ ID NO: 365463 - RNA, 22 nt, Human
ggcuguggucauuaggagguug

SEQ ID NO: 365464 - RNA, 19 nt, Human
ucugaggguccagaugcau

SEQ ID NO: 365465 - RNA, 22 nt, Human
acacugaauaauugagaguuga

SEQ ID NO: 365466 - RNA, 22 nt, Human
ccuccacaggagcugcagugcu

SEQ ID NO: 365467 - RNA, 22 nt, Human
aaggccugcucagcugucugug

SEQ ID NO: 365468 - RNA, 22 nt, Human
gagcaggcucugccuguguguc

SEQ ID NO: 365469 - RNA, 22 nt, Human
uucaggauccccaccgcguuua

SEQ ID NO: 365470 - RNA, 22 nt, Human
caggguggcccuguggucucau

SEQ ID NO: 365471 - RNA, 22 nt, Human
cucaggaaaggccaugcaaggg

SEQ ID NO: 365472 - RNA, 21 nt, Human
uucauaaaccauucucaugca

SEQ ID NO: 365473 - RNA, 22 nt, Human
uuucuauugaucuaauaaacau

SEQ ID NO: 365474 - RNA, 22 nt, Human
gugcuuuccauccucccugcug

SEQ ID NO: 365475 - RNA, 22 nt, Human
ugagcuuacuucuguacacaga

SEQ ID NO: 365476 - RNA, 18 nt, Human
aaguccuuccuuugcuuu

SEQ ID NO: 365477 - RNA, 22 nt, Human
augggcugugagguccggcagg

SEQ ID NO: 365478 - RNA, 22 nt, Human
ccuggccagccagggcuggggu

SEQ ID NO: 365479 - RNA, 22 nt, Human
ugggaccuguuacauugaguua

SEQ ID NO: 365480 - RNA, 22 nt, Human
aggcugggaaauguagucuucc

SEQ ID NO: 365481 - RNA, 21 nt, Human
aagcuucccugcucuccaggg

SEQ ID NO: 365482 - RNA, 22 nt, Human
ucauucuugaucacuaguuagu

SEQ ID NO: 365483 - RNA, 22 nt, Human
uaugcacgucuauuuaugaaga

SEQ ID NO: 365484 - RNA, 18 nt, Human
acugugguuuauguguag

SEQ ID NO: 365485 - RNA, 22 nt, Human
gacaggguacgggcuaggcaca

SEQ ID NO: 365486 - RNA, 22 nt, Human
cuagggacagaaagaggguaga

SEQ ID NO: 365487 - RNA, 20 nt, Human
cugcuguguuauuguagaac

SEQ ID NO: 365488 - RNA, 22 nt, Human
ggcagccagcaaugagaaguuu

SEQ ID NO: 365489 - RNA, 22 nt, Human
uccuuucaccaaaaaguguugu

SEQ ID NO: 365490 - RNA, 22 nt, Human
uuuguguuuguacaaugcacua

SEQ ID NO: 365491 - RNA, 22 nt, Human
ugcagggauuagaggccgggga

SEQ ID NO: 365492 - RNA, 22 nt, Human
ucaaaagucugcauucuucaca

SEQ ID NO: 365493 - RNA, 22 nt, Human
cccagugccaggcacaggcagc

SEQ ID NO: 365494 - RNA, 22 nt, Human
agccacagcuccuugguggaga

SEQ ID NO: 365495 - RNA, 22 nt, Human
ugcaggccucacaccuggcacc

SEQ ID NO: 365496 - RNA, 22 nt, Human
uuacagaaaguuucccaugccg

SEQ ID NO: 365497 - RNA, 22 nt, Human
gaaauucugugucccagagugc

SEQ ID NO: 365498 - RNA, 22 nt, Human
ggaggaggggcgcuuugucuau

SEQ ID NO: 365499 - RNA, 20 nt, Human
uguuaaaggacacuugcuuu

SEQ ID NO: 365500 - RNA, 22 nt, Human
caauuucauggauaaaagaugu

SEQ ID NO: 365501 - RNA, 21 nt, Human
uuacuuuugcaccaaccuaau

SEQ ID NO: 365502 - RNA, 22 nt, Human
gaggcugguaggaaaggaaaca

SEQ ID NO: 365503 - RNA, 22 nt, Human
uggcagaaguacacaagcaugc

SEQ ID NO: 365504 - RNA, 22 nt, Human
acacuucucccaucuccuguug

SEQ ID NO: 365505 - RNA, 22 nt, Human
cucaccacagagccuguccagc

SEQ ID NO: 365506 - RNA, 22 nt, Human
cugcugggaaggucugcucagu

SEQ ID NO: 365507 - RNA, 22 nt, Human
gcucugagagugggugauucug

SEQ ID NO: 365508 - RNA, 22 nt, Human
agcuaggaaauugaggcugaga

SEQ ID NO: 365509 - RNA, 22 nt, Human
gaauuuuucuggaagcaauuau

SEQ ID NO: 365510 - RNA, 22 nt, Human
agggcaugugggagaggagccu

SEQ ID NO: 365511 - RNA, 22 nt, Human
acuggcagagguuggacaccau

SEQ ID NO: 365512 - RNA, 22 nt, Human
ugcuggguuaccuaagccuaaa

SEQ ID NO: 365513 - RNA, 22 nt, Human
cagucccaccaggaucgcucuu

SEQ ID NO: 365514 - RNA, 22 nt, Human
uccugcagcauccgucgucugu

SEQ ID NO: 365515 - RNA, 22 nt, Human
ucuauacaugugcacacacauc

SEQ ID NO: 365516 - RNA, 22 nt, Human
aaaugcauuuuuaauuagaccc

SEQ ID NO: 365517 - RNA, 17 nt, Human
uggcagcugaaagcucu

SEQ ID NO: 365518 - RNA, 22 nt, Human
cuuggggcugucacucuggcau

SEQ ID NO: 365519 - RNA, 22 nt, Human
ugagagugauugguucgaaugu

SEQ ID NO: 365520 - RNA, 22 nt, Human
auugacaaauggauguugacau

SEQ ID NO: 365521 - RNA, 22 nt, Human
cccugggcagucugcacuucag

SEQ ID NO: 365522 - RNA, 22 nt, Human
uggagcccagggugagaaggag

SEQ ID NO: 365523 - RNA, 22 nt, Human
cagacuuucaaggagugaaggc

SEQ ID NO: 365524 - RNA, 22 nt, Human
gcacagccacugagugagaacc

SEQ ID NO: 365525 - RNA, 22 nt, Human
uucuucucagggucccacaugg

SEQ ID NO: 365526 - RNA, 22 nt, Human
uguggcagaaccagaauucaaa

SEQ ID NO: 365527 - RNA, 22 nt, Human
ugccugggccuucccaccucug

SEQ ID NO: 365528 - RNA, 22 nt, Human
ucagagucauugcaaguagaag

SEQ ID NO: 365529 - RNA, 22 nt, Human
cagaccugagguugaguaccag

SEQ ID NO: 365530 - RNA, 22 nt, Human
cagaccagaaggaagccgacaa

SEQ ID NO: 365531 - RNA, 22 nt, Human
gccugccacgcaugcagaguca

SEQ ID NO: 365532 - RNA, 22 nt, Human
acaaaagugagugugucucaga

SEQ ID NO: 365533 - RNA, 20 nt, Human
caggcagaggaugcugacca

SEQ ID NO: 365534 - RNA, 22 nt, Human
cuggagagaccgaaagaggcug

SEQ ID NO: 365535 - RNA, 21 nt, Human
aucacauuggcuguuauuauu

SEQ ID NO: 365536 - RNA, 18 nt, Human
cugagggcagccccuggg

SEQ ID NO: 365537 - RNA, 22 nt, Human
uguccuuagaagaagugaaaga

SEQ ID NO: 365538 - RNA, 23 nt, Human
cagaaaacccagagcucaguccc

SEQ ID NO: 365539 - RNA, 19 nt, Human
cugcugggugcugagggag

SEQ ID NO: 365540 - RNA, 22 nt, Human
aagugggaauagaaaugaaggu

SEQ ID NO: 365541 - RNA, 22 nt, Human
uguggccuggaaggggcugcuc

SEQ ID NO: 365542 - RNA, 22 nt, Human
aaaagcaguuaucugggaggaa

SEQ ID NO: 365543 - RNA, 22 nt, Human
ccucccuuggccauagccagcc

SEQ ID NO: 365544 - RNA, 22 nt, Human
auuuuucucucacacuuaccag

SEQ ID NO: 365545 - RNA, 22 nt, Human
guuucauuaccugacccaugag

SEQ ID NO: 365546 - RNA, 22 nt, Human
gcuuugaagacuuuuccagggu

SEQ ID NO: 365547 - RNA, 22 nt, Human
ugcauuugucuugucucaugaa

SEQ ID NO: 365548 - RNA, 22 nt, Human
acaaagucaaauugcagccgcc

SEQ ID NO: 365549 - RNA, 22 nt, Human
ucugccuggguguggagcagag

SEQ ID NO: 365550 - RNA, 22 nt, Human
ccaggccugugcaaggagggag

SEQ ID NO: 365551 - RNA, 22 nt, Human
cucagaaucugccaaguucagg

SEQ ID NO: 365552 - RNA, 22 nt, Human
gcucuguccagcgugcacagaa

SEQ ID NO: 365553 - RNA, 22 nt, Human
aagaauguucuuguagucauga

SEQ ID NO: 365554 - RNA, 22 nt, Human
gcagggaccagggccagaucca

SEQ ID NO: 365555 - RNA, 22 nt, Human
gcaggcugauagaggauuccau

SEQ ID NO: 365556 - RNA, 22 nt, Human
cggcagcugauugcagagcacc

SEQ ID NO: 365557 - RNA, 22 nt, Human
uugcagagcaguaggaauauag

SEQ ID NO: 365558 - RNA, 22 nt, Human
ugccugucuuuccucccucgua

SEQ ID NO: 365559 - RNA, 22 nt, Human
ugaagggcaaccccaggcccag

SEQ ID NO: 365560 - RNA, 22 nt, Human
aggaccaguaugagagcaucug

SEQ ID NO: 365561 - RNA, 23 nt, Human
uaauucacauauacauugcuuca

SEQ ID NO: 365562 - RNA, 21 nt, Human
uucuucaaagaagaaggcaca

SEQ ID NO: 365563 - RNA, 22 nt, Human
ccagcuccccucagcagguaau

SEQ ID NO: 365564 - RNA, 22 nt, Human
ucucacugggucacagcagagg

SEQ ID NO: 365565 - RNA, 22 nt, Human
acugcagggcauccuggccaag

SEQ ID NO: 365566 - RNA, 22 nt, Human
gcagcuuuuuggaugucaguua

SEQ ID NO: 365567 - RNA, 22 nt, Human
aguucucagcuuaguaugcugu

SEQ ID NO: 365568 - RNA, 22 nt, Human
uaauuuaauuucaugccagccu

SEQ ID NO: 365569 - RNA, 22 nt, Human
aucuauacccaucaugauuuaa

SEQ ID NO: 365570 - RNA, 22 nt, Human
aaauccuaaaaguuugacuuaa

SEQ ID NO: 365571 - RNA, 22 nt, Human
agacaucagcuugugugcaggg

SEQ ID NO: 365572 - RNA, 22 nt, Human
uuuaucuguuguacauuuaugc

SEQ ID NO: 365573 - RNA, 22 nt, Human
cugagauggaguuucgcucuuc

SEQ ID NO: 365574 - RNA, 22 nt, Human
guggagacuucuacuagagacc

SEQ ID NO: 365575 - RNA, 22 nt, Human
ucccagagugagccaggggcag

SEQ ID NO: 365576 - RNA, 22 nt, Human
caggguggaauggaaugcuggc

SEQ ID NO: 365577 - RNA, 22 nt, Human
ucagaauuugauuccugggaua

SEQ ID NO: 365578 - RNA, 22 nt, Human
cagccagaaccuaggaugagcu

SEQ ID NO: 365579 - RNA, 22 nt, Human
ccuguucaauauucuuccuugu

SEQ ID NO: 365580 - RNA, 21 nt, Human
ucaggggcuguguuuuccauc

SEQ ID NO: 365581 - RNA, 22 nt, Human
ugcagggcagauaugacuguag

SEQ ID NO: 365582 - RNA, 22 nt, Human
gaggggaaaguucugcacaagg

SEQ ID NO: 365583 - RNA, 22 nt, Human
aagccagccagugccagucuua

SEQ ID NO: 365584 - RNA, 22 nt, Human
ggagagagaugccgccuugcuc

SEQ ID NO: 365585 - RNA, 22 nt, Human
uggccugaauuauggcagaucu

SEQ ID NO: 365586 - RNA, 22 nt, Human
caggcagcagaggaguguggga

SEQ ID NO: 365587 - RNA, 22 nt, Human
uugcucugauuagguggaaaca

SEQ ID NO: 365588 - RNA, 22 nt, Human
ggagaggguguggaaaguuauc

SEQ ID NO: 365589 - RNA, 22 nt, Human
gcuccucucccagagcugcagg

SEQ ID NO: 365590 - RNA, 22 nt, Human
ugccuggauucgguuguuguca

SEQ ID NO: 365591 - RNA, 22 nt, Human
cauuuguaguaucuguuuauau

SEQ ID NO: 365592 - RNA, 22 nt, Human
cagcccuguccagcagagggug

SEQ ID NO: 365593 - RNA, 22 nt, Human
ggcugagcacuuuaggcaggag

SEQ ID NO: 365594 - RNA, 22 nt, Human
ggcugcugugaccucaggugau

SEQ ID NO: 365595 - RNA, 22 nt, Human
cucuucuuauggccguggcuga

SEQ ID NO: 365596 - RNA, 22 nt, Human
ucaguuuugaaaacauugaaug

SEQ ID NO: 365597 - RNA, 22 nt, Human
auuauaggcuugagccaccgug

SEQ ID NO: 365598 - RNA, 21 nt, Human
cccugcaggccagggcugagc

SEQ ID NO: 365599 - RNA, 22 nt, Human
aagggcucccaacucaucuuuu

SEQ ID NO: 365600 - RNA, 22 nt, Human
ucccagaguuuccuguguccca

SEQ ID NO: 365601 - RNA, 22 nt, Human
gcauuguccugcuucugagugu

SEQ ID NO: 365602 - RNA, 22 nt, Human
gacauaauccuccucaccuacu

SEQ ID NO: 365603 - RNA, 22 nt, Human
gcacacagccagcugagggcua

SEQ ID NO: 365604 - RNA, 22 nt, Human
auaaguucagguaaagaaauca

SEQ ID NO: 365605 - RNA, 22 nt, Human
ccugccuguaagauggguacaa

SEQ ID NO: 365606 - RNA, 22 nt, Human
ccaaggagaaugacaccaugga

SEQ ID NO: 365607 - RNA, 22 nt, Human
uuuauccaccuuacccuguucc

SEQ ID NO: 365608 - RNA, 22 nt, Human
cagcuuuuuagaaucuagggca

SEQ ID NO: 365609 - RNA, 22 nt, Human
uggagaagucaaagugaacagg

SEQ ID NO: 365610 - RNA, 22 nt, Human
ccuggcugugcauugccggccc

SEQ ID NO: 365611 - RNA, 22 nt, Human
cagggcccaggccacuggguug

SEQ ID NO: 365612 - RNA, 22 nt, Human
agugaaauugcuguaagaggaa

SEQ ID NO: 365613 - RNA, 22 nt, Human
ucuggcugcugcgugagugcuu

SEQ ID NO: 365614 - RNA, 20 nt, Human
uaucaaucagaaagaagacu

SEQ ID NO: 365615 - RNA, 22 nt, Human
ugcccaggcuggaaugcagugg

SEQ ID NO: 365616 - RNA, 22 nt, Human
cugccaaggcuggggaggacaa

SEQ ID NO: 365617 - RNA, 19 nt, Human
ccuggaggugaagguucuc

SEQ ID NO: 365618 - RNA, 22 nt, Human
ccagcagcucccucaggguccg

SEQ ID NO: 365619 - RNA, 22 nt, Human
aaaggugacugcagcagcuauu

SEQ ID NO: 365620 - RNA, 22 nt, Human
cucugcaugccuugcucagaca

SEQ ID NO: 365621 - RNA, 22 nt, Human
uacacuuuuuacuacagauucu

SEQ ID NO: 365622 - RNA, 22 nt, Human
auuucucagcacuuccuaucuc

SEQ ID NO: 365623 - RNA, 22 nt, Human
aagacagaccacgugacagggc

SEQ ID NO: 365624 - RNA, 22 nt, Human
gagcacugagcuggaauuggag

SEQ ID NO: 365625 - RNA, 22 nt, Human
auccagucaaaauuaguaaggu

SEQ ID NO: 365626 - RNA, 22 nt, Human
uggcaggauuugcccggaagga

SEQ ID NO: 365627 - RNA, 22 nt, Human
cauggcuuuguucuguuagaug

SEQ ID NO: 365628 - RNA, 22 nt, Human
agcaccugcacaguggaggaaa

SEQ ID NO: 365629 - RNA, 22 nt, Human
aagagcuggucacagguccauu

SEQ ID NO: 365630 - RNA, 22 nt, Human
uggccuggaagagaggucgagg

SEQ ID NO: 365631 - RNA, 21 nt, Human
uccuucaguucugcacuuucu

SEQ ID NO: 365632 - RNA, 22 nt, Human
agcagugagugggaggaccaug

SEQ ID NO: 365633 - RNA, 22 nt, Human
gaguccuucuggcuggcaggau

SEQ ID NO: 365634 - RNA, 17 nt, Human
ggaaaaggaugauacag

SEQ ID NO: 365635 - RNA, 22 nt, Human
gggagcugguuccugcccucca

SEQ ID NO: 365636 - RNA, 22 nt, Human
gugcuuuuaaaggcaauuagua

SEQ ID NO: 365637 - RNA, 22 nt, Human
uuaaacagacaguaaaugaaac

SEQ ID NO: 365638 - RNA, 22 nt, Human
uggaauaaagugcuuugaucag

SEQ ID NO: 365639 - RNA, 22 nt, Human
cccagcuugucugauucagccu

SEQ ID NO: 365640 - RNA, 22 nt, Human
gacccaggagagaggguugcau

SEQ ID NO: 365641 - RNA, 22 nt, Human
agguauuauuagcaucucuauu

SEQ ID NO: 365642 - RNA, 22 nt, Human
auguccagaguaaagcacauuc

SEQ ID NO: 365643 - RNA, 22 nt, Human
auaggcuuauauaaaaacaucu

SEQ ID NO: 365644 - RNA, 22 nt, Human
ggaaagaccugagauaggaaua

SEQ ID NO: 365645 - RNA, 22 nt, Human
ggggcagagcauagcuccaauu

SEQ ID NO: 365646 - RNA, 22 nt, Human
ucauuuuucacacagggucacc

SEQ ID NO: 365647 - RNA, 22 nt, Human
cugcuuuguaaaauagacauaa

SEQ ID NO: 365648 - RNA, 22 nt, Human
gcuguucagaugcgauucagga

SEQ ID NO: 365649 - RNA, 22 nt, Human
gcucuguguugucagaggcacc

SEQ ID NO: 365650 - RNA, 22 nt, Human
auuucacaaagaacagaugcag

SEQ ID NO: 365651 - RNA, 20 nt, Human
cagagacccaggcuucagcu

SEQ ID NO: 365652 - RNA, 22 nt, Human
uaaggcacuucaauguuuagaa

SEQ ID NO: 365653 - RNA, 22 nt, Human
ccagggcagugggagaaggugc

SEQ ID NO: 365654 - RNA, 17 nt, Human
ucugggcuucagugguc

SEQ ID NO: 365655 - RNA, 22 nt, Human
acagggcaaccucugggagacu

SEQ ID NO: 365656 - RNA, 22 nt, Human
gcagggcagaaggugcugagga

SEQ ID NO: 365657 - RNA, 22 nt, Human
cccagccagccucuucccauau

SEQ ID NO: 365658 - RNA, 22 nt, Human
aggcuguccucucuugcucagu

SEQ ID NO: 365659 - RNA, 22 nt, Human
cagcaaucgggugauaugcaau

SEQ ID NO: 365660 - RNA, 17 nt, Human
gcagccagugcagcagg

SEQ ID NO: 365661 - RNA, 22 nt, Human
cugaagcaaaugaaacagcucu

SEQ ID NO: 365662 - RNA, 22 nt, Human
ucugccuggaugauggcagggc

SEQ ID NO: 365663 - RNA, 22 nt, Human
ugagaaagugggugccuagcaa

SEQ ID NO: 365664 - RNA, 22 nt, Human
ugccuggcaacuguggugggcu

SEQ ID NO: 365665 - RNA, 23 nt, Human
ugcucccaggugacgcugcuguu

SEQ ID NO: 365666 - RNA, 22 nt, Human
uuucuguaaggacuuaaugcaa

SEQ ID NO: 365667 - RNA, 22 nt, Human
agauacauauagaaaacaucaa

SEQ ID NO: 365668 - RNA, 22 nt, Human
uccaucaccauuucugcgagcu

SEQ ID NO: 365669 - RNA, 22 nt, Human
agcucccagggcugggcaaguu

SEQ ID NO: 365670 - RNA, 22 nt, Human
uucacauuugcccuuaugugug

SEQ ID NO: 365671 - RNA, 22 nt, Human
uucauaaucaccaaaaacugga

SEQ ID NO: 365672 - RNA, 22 nt, Human
ugccagagaagacccagucacu

SEQ ID NO: 365673 - RNA, 22 nt, Human
ggcucagagaccugcgaucuga

SEQ ID NO: 365674 - RNA, 22 nt, Human
ccagagagguagcuuacccucu

SEQ ID NO: 365675 - RNA, 22 nt, Human
cagcuucugcuaucgaacaucu

SEQ ID NO: 365676 - RNA, 21 nt, Human
aggcccagcuuuccucuugcu

SEQ ID NO: 365677 - RNA, 22 nt, Human
cacaccuguaauaccagcuacu

SEQ ID NO: 365678 - RNA, 20 nt, Human
ccugggguacacuggcaugu

SEQ ID NO: 365679 - RNA, 19 nt, Human
uccuuugaauaucaguuga

SEQ ID NO: 365680 - RNA, 22 nt, Human
aaguggaggccgaguucacgca

SEQ ID NO: 365681 - RNA, 22 nt, Human
gcugucaccaaagcaggcacug

SEQ ID NO: 365682 - RNA, 22 nt, Human
agcuucuggaaggcaaggcuug

SEQ ID NO: 365683 - RNA, 22 nt, Human
ggcuguccuuggccaaggcacu

SEQ ID NO: 365684 - RNA, 22 nt, Human
ucccaaggauaagagagucuga

SEQ ID NO: 365685 - RNA, 22 nt, Human
caaagugcuaggauuacaggcc

SEQ ID NO: 365686 - RNA, 22 nt, Human
aacuuaaacccacucauguaga

SEQ ID NO: 365687 - RNA, 22 nt, Human
aaauguauccuacuuccugagu

SEQ ID NO: 365688 - RNA, 22 nt, Human
cugggcacuuuggggagccuac

SEQ ID NO: 365689 - RNA, 22 nt, Human
auuuaaaugcuuaagaggguuu

SEQ ID NO: 365690 - RNA, 22 nt, Human
agaggggacagccaccugcccg

SEQ ID NO: 365691 - RNA, 22 nt, Human
cagagcagugaggaguugugua

SEQ ID NO: 365692 - RNA, 20 nt, Human
ugaugguucuuuccggguug

SEQ ID NO: 365693 - RNA, 22 nt, Human
cucccacuccuggcucaccaca

SEQ ID NO: 365694 - RNA, 22 nt, Human
agcucagcuuccucuccaugcu

SEQ ID NO: 365695 - RNA, 23 nt, Human
uuaaacuucagugcagaacacuc

SEQ ID NO: 365696 - RNA, 22 nt, Human
ccugucuguauugguuugcuau

SEQ ID NO: 365697 - RNA, 22 nt, Human
uugcucaggcuggugugcagug

SEQ ID NO: 365698 - RNA, 22 nt, Human
aggugucuggauggguguccuu

SEQ ID NO: 365699 - RNA, 22 nt, Human
ucagacaguuugcagugugccu

SEQ ID NO: 365700 - RNA, 22 nt, Human
uucagugugugauaccugcugu

SEQ ID NO: 365701 - RNA, 22 nt, Human
cuguaaaacacuguaguaucug

SEQ ID NO: 365702 - RNA, 22 nt, Human
uuugaaaggaauuaggaugaca

SEQ ID NO: 365703 - RNA, 22 nt, Human
aaacugcuuuccacaguggcua

SEQ ID NO: 365704 - RNA, 22 nt, Human
ccucacugaagaggugacauuu

SEQ ID NO: 365705 - RNA, 22 nt, Human
uacaaagugugcccaugcugag

SEQ ID NO: 365706 - RNA, 22 nt, Human
ggcuucuguccucuggaucugu

SEQ ID NO: 365707 - RNA, 22 nt, Human
uauuucuuucagguauguguug

SEQ ID NO: 365708 - RNA, 22 nt, Human
aagccaaugagagaggccucag

SEQ ID NO: 365709 - RNA, 22 nt, Human
aguauuuccuggcuuaucugcu

SEQ ID NO: 365710 - RNA, 20 nt, Human
ugcugucguguuuucugcuu

SEQ ID NO: 365711 - RNA, 22 nt, Human
guaaugaaugaaagaaacuggg

SEQ ID NO: 365712 - RNA, 22 nt, Human
uuucauugcagagucugugugc

SEQ ID NO: 365713 - RNA, 22 nt, Human
agggaggaguccucaaagucau

SEQ ID NO: 365714 - RNA, 22 nt, Human
caguagcauguaauaaagacag

SEQ ID NO: 365715 - RNA, 17 nt, Human
uuucagauucacuuucu

SEQ ID NO: 365716 - RNA, 22 nt, Human
ugcugccuuugggaccuggccu

SEQ ID NO: 365717 - RNA, 20 nt, Human
cuguggcaucugucauggug

SEQ ID NO: 365718 - RNA, 22 nt, Human
gcagaggagcaaguugcuacag

SEQ ID NO: 365719 - RNA, 22 nt, Human
aaguugagaugucauaggagac

SEQ ID NO: 365720 - RNA, 22 nt, Human
aaggaccuauauugucagagga

SEQ ID NO: 365721 - RNA, 22 nt, Human
gaggcagagacuccaccuucag

SEQ ID NO: 365722 - RNA, 22 nt, Human
agugagaguauuaaugugaacu

SEQ ID NO: 365723 - RNA, 22 nt, Human
aaagaagguagggcuggugacu

SEQ ID NO: 365724 - RNA, 22 nt, Human
ugguaauuuacgcauuucugua

SEQ ID NO: 365725 - RNA, 22 nt, Human
ucaaaggcccauugucccguug

SEQ ID NO: 365726 - RNA, 22 nt, Human
ugcugugguucccagaguggau

SEQ ID NO: 365727 - RNA, 22 nt, Human
ucaggcacugcuuucugauaug

SEQ ID NO: 365728 - RNA, 22 nt, Human
gaggcaguguugaaaaggagag

SEQ ID NO: 365729 - RNA, 21 nt, Human
uucugggaaaugagcuggggc

SEQ ID NO: 365730 - RNA, 22 nt, Human
uacaacauguaaagugguuuaa

SEQ ID NO: 365731 - RNA, 22 nt, Human
cucccugggcagauguggcucu

SEQ ID NO: 365732 - RNA, 22 nt, Human
gagauauguuagaaagcuauug

SEQ ID NO: 365733 - RNA, 22 nt, Human
aacagcagggggaccugcuggu

SEQ ID NO: 365734 - RNA, 23 nt, Human
auuugagaaaguauuuuuaagac

SEQ ID NO: 365735 - RNA, 22 nt, Human
gcaggagcaaacugcagugugg

SEQ ID NO: 365736 - RNA, 22 nt, Human
gcuuccaaaucuguucaaaaug

SEQ ID NO: 365737 - RNA, 22 nt, Human
gcuggccugcgagggcaggcug

SEQ ID NO: 365738 - RNA, 22 nt, Human
gcacagggaggcuggccuggcc

SEQ ID NO: 365739 - RNA, 22 nt, Human
auuucaguguugguuagcaagc

SEQ ID NO: 365740 - RNA, 22 nt, Human
cugcugcugcuaucuacccagg

SEQ ID NO: 365741 - RNA, 22 nt, Human
uaaagccaauauaccuagcaua

SEQ ID NO: 365742 - RNA, 22 nt, Human
cagggcucuuccggagcaggga

SEQ ID NO: 365743 - RNA, 22 nt, Human
ugauguucuguauaucauauag

SEQ ID NO: 365744 - RNA, 22 nt, Human
gaggacagagccgccuggcaag

SEQ ID NO: 365745 - RNA, 22 nt, Human
cuguauuuaguuaaaaugcuaa

SEQ ID NO: 365746 - RNA, 22 nt, Human
ucucugaguaagugacaguuca

SEQ ID NO: 365747 - RNA, 22 nt, Human
aaacaugaauagauauuaaaca

SEQ ID NO: 365748 - RNA, 22 nt, Human
cagcccuggcuagggcgagggc

SEQ ID NO: 365749 - RNA, 22 nt, Human
gcucugcucuugacuuaccagg

SEQ ID NO: 365750 - RNA, 22 nt, Human
ugcccagcugucaaaguagaua

SEQ ID NO: 365751 - RNA, 22 nt, Human
uucaacccaaguucuccauuuu

SEQ ID NO: 365752 - RNA, 22 nt, Human
agaguccauaugugggaggagu

SEQ ID NO: 365753 - RNA, 23 nt, Human
uuccacaaugaaaauaaagcagg

SEQ ID NO: 365754 - RNA, 23 nt, Human
ccuucagaagaaguaacaggggc

SEQ ID NO: 365755 - RNA, 22 nt, Human
auguucaaacuuuuuacacacc

SEQ ID NO: 365756 - RNA, 22 nt, Human
ucccaggacccaggcauucaca

SEQ ID NO: 365757 - RNA, 22 nt, Human
ggcccacuugaaauggagcuca

SEQ ID NO: 365758 - RNA, 19 nt, Human
gggcuccuugggccucucu

SEQ ID NO: 365759 - RNA, 22 nt, Human
aaauguguguauguacauauau

SEQ ID NO: 365760 - RNA, 20 nt, Human
aggagcugaauuagaggguu

SEQ ID NO: 365761 - RNA, 22 nt, Human
uaauuuaauccaaguguuacau

SEQ ID NO: 365762 - RNA, 22 nt, Human
cuaugacacaggccauuauaua

SEQ ID NO: 365763 - RNA, 22 nt, Human
guuagggaucaggaacaagagc

SEQ ID NO: 365764 - RNA, 22 nt, Human
caggauggagaguuguugguug

SEQ ID NO: 365765 - RNA, 22 nt, Human
uggaggaaaauuacuggggucu

SEQ ID NO: 365766 - RNA, 22 nt, Human
gaggcagcuuaggguacugacu

SEQ ID NO: 365767 - RNA, 19 nt, Human
gcucugugaugcugagggg

SEQ ID NO: 365768 - RNA, 22 nt, Human
cuggagugauacucagaaugug

SEQ ID NO: 365769 - RNA, 22 nt, Human
cucuuaguuuaucuuugacaaa

SEQ ID NO: 365770 - RNA, 19 nt, Human
uggauuuauauucuuuauc

SEQ ID NO: 365771 - RNA, 22 nt, Human
aaccaggacaauuugaauagaa

SEQ ID NO: 365772 - RNA, 22 nt, Human
agcgugaaggcgggcagucggc

SEQ ID NO: 365773 - RNA, 22 nt, Human
uucaagaugacccagucacacg

SEQ ID NO: 365774 - RNA, 22 nt, Human
aucaguuucuaccauguggaau

SEQ ID NO: 365775 - RNA, 22 nt, Human
gacucugcuacaggccgagguu

SEQ ID NO: 365776 - RNA, 22 nt, Human
ugugccauuucuauucugcagc

SEQ ID NO: 365777 - RNA, 22 nt, Human
cagcuuucaucagugacacuca

SEQ ID NO: 365778 - RNA, 22 nt, Human
aaauuucaguuaccuuuacguu

SEQ ID NO: 365779 - RNA, 22 nt, Human
aggccugaaguguggagugggg

SEQ ID NO: 365780 - RNA, 22 nt, Human
uucaugugauaaaugugugacu

SEQ ID NO: 365781 - RNA, 22 nt, Human
gcagcaggagaguuuguccugc

SEQ ID NO: 365782 - RNA, 22 nt, Human
uuaauuuuaaccuguuuguguc

SEQ ID NO: 365783 - RNA, 22 nt, Human
ggguggcacaggugcagagggu

SEQ ID NO: 365784 - RNA, 22 nt, Human
aguccuucaagaaaucuggaaa

SEQ ID NO: 365785 - RNA, 21 nt, Human
ucucuacacuuucacuaggcu

SEQ ID NO: 365786 - RNA, 22 nt, Human
agcugucuccagauacaggauu

SEQ ID NO: 365787 - RNA, 22 nt, Human
cuacuucuaaguacauggugau

SEQ ID NO: 365788 - RNA, 22 nt, Human
cuacccaggcuggagugcagua

SEQ ID NO: 365789 - RNA, 22 nt, Human
cgucccaguuccagccgcgcug

SEQ ID NO: 365790 - RNA, 22 nt, Human
aagacaugcaauuagcaaggaa

SEQ ID NO: 365791 - RNA, 22 nt, Human
gcugagcuagcuaucucagucu

SEQ ID NO: 365792 - RNA, 22 nt, Human
aaagccagcaaggugaguuuca

SEQ ID NO: 365793 - RNA, 22 nt, Human
cuggccuggucuggccucucca

SEQ ID NO: 365794 - RNA, 22 nt, Human
acuaaagaagccaaaguuuucu

SEQ ID NO: 365795 - RNA, 22 nt, Human
gccuuccugcagcucugagcgu

SEQ ID NO: 365796 - RNA, 22 nt, Human
gaaugcagauggcugguguaug

SEQ ID NO: 365797 - RNA, 22 nt, Human
ugggccagcaauugcugcucag

SEQ ID NO: 365798 - RNA, 23 nt, Human
ucacacagcuggucagguacaga

SEQ ID NO: 365799 - RNA, 22 nt, Human
gcccccucuuuggagccagcca

SEQ ID NO: 365800 - RNA, 22 nt, Human
acacuaaugagaaaggaauuaa

SEQ ID NO: 365801 - RNA, 22 nt, Human
acaacauucuuaaauacacuga

SEQ ID NO: 365802 - RNA, 19 nt, Human
auaaggcaggaggaaauuu

SEQ ID NO: 365803 - RNA, 22 nt, Human
uuuaaaaucagaugggaguugg

SEQ ID NO: 365804 - RNA, 21 nt, Human
gggaaauuaggauugcucauc

SEQ ID NO: 365805 - RNA, 22 nt, Human
gggcuugcugauuugggcagga

SEQ ID NO: 365806 - RNA, 23 nt, Human
ccagcugugccuggcccaggagc

SEQ ID NO: 365807 - RNA, 22 nt, Human
ugacuucaagguucagcaccuu

SEQ ID NO: 365808 - RNA, 23 nt, Human
gggagccauggguggucauggag

SEQ ID NO: 365809 - RNA, 22 nt, Human
aagacuuucaaguaugcaugca

SEQ ID NO: 365810 - RNA, 22 nt, Human
aaguccuuauguggaggggcua

SEQ ID NO: 365811 - RNA, 22 nt, Human
gauggcacacagacauccccgc

SEQ ID NO: 365812 - RNA, 22 nt, Human
agggcugacaguaaaaguauga

SEQ ID NO: 365813 - RNA, 22 nt, Human
gagcacugauuuauuuuugucu

SEQ ID NO: 365814 - RNA, 22 nt, Human
ggaggccaugaggcucuaggug

SEQ ID NO: 365815 - RNA, 20 nt, Human
aucuggcucagauccugcag

SEQ ID NO: 365816 - RNA, 22 nt, Human
ugcauguguuugccacagugag

SEQ ID NO: 365817 - RNA, 23 nt, Human
uggcagcuguguaagagaaagca

SEQ ID NO: 365818 - RNA, 22 nt, Human
uucucagagcucacuguaguaa

SEQ ID NO: 365819 - RNA, 20 nt, Human
gugggcagaugugugcaugg

SEQ ID NO: 365820 - RNA, 22 nt, Human
ucagagaguuggaaagaauuaa

SEQ ID NO: 365821 - RNA, 22 nt, Human
ugcuuaauauugugauguaaua

SEQ ID NO: 365822 - RNA, 19 nt, Human
gggcucuggccucaguggg

SEQ ID NO: 365823 - RNA, 22 nt, Human
aaauguuuugcucccauguggu

SEQ ID NO: 365824 - RNA, 22 nt, Human
gugggagcuuuggcaucaggcu

SEQ ID NO: 365825 - RNA, 22 nt, Human
ugggacuugccucgagggcugc

SEQ ID NO: 365826 - RNA, 22 nt, Human
cagggcagggauguugcggcag

SEQ ID NO: 365827 - RNA, 22 nt, Human
acccaggguagaaccucagagc

SEQ ID NO: 365828 - RNA, 22 nt, Human
ucagaauucuacaauagaucag

SEQ ID NO: 365829 - RNA, 16 nt, Human
gcccaggacgggaggc

SEQ ID NO: 365830 - RNA, 22 nt, Human
ccacaucucgguccccucuuug

SEQ ID NO: 365831 - RNA, 23 nt, Human
cagaaauaaacugguuuguagau

SEQ ID NO: 365832 - RNA, 22 nt, Human
uacaguagaauuuuuaguaacu

SEQ ID NO: 365833 - RNA, 22 nt, Human
ucccuggacagccuugccuggg

SEQ ID NO: 365834 - RNA, 22 nt, Human
gggcccuggggccugauuugca

SEQ ID NO: 365835 - RNA, 22 nt, Human
uggccuggggaagaccaugggc

SEQ ID NO: 365836 - RNA, 22 nt, Human
acuuugcaauacuuaauacaaa

SEQ ID NO: 365837 - RNA, 22 nt, Human
aggcagggucuugcuauguugc

SEQ ID NO: 365838 - RNA, 22 nt, Human
cagggcaguaccgcccucuggc

SEQ ID NO: 365839 - RNA, 22 nt, Human
acacaaacagucuauagcacca

SEQ ID NO: 365840 - RNA, 22 nt, Human
agaucuauuagcaaacugccau

SEQ ID NO: 365841 - RNA, 22 nt, Human
cccagguguuuguggcagaggu

SEQ ID NO: 365842 - RNA, 19 nt, Human
cuauacagccucugaggaa

SEQ ID NO: 365843 - RNA, 22 nt, Human
gcaggagcccuggcauguucuu

SEQ ID NO: 365844 - RNA, 22 nt, Human
cugcucugacccuuucaccuuc

SEQ ID NO: 365845 - RNA, 22 nt, Human
uaauuucaccguugcuagaaau

SEQ ID NO: 365846 - RNA, 20 nt, Human
ugcucaggauggagaggugu

SEQ ID NO: 365847 - RNA, 22 nt, Human
ucugucaccgagggcauccaaa

SEQ ID NO: 365848 - RNA, 22 nt, Human
acaguggagaagcaaaugcagu

SEQ ID NO: 365849 - RNA, 22 nt, Human
cagaguguugaccauaagccca

SEQ ID NO: 365850 - RNA, 22 nt, Human
guccacauaggaacccagcuuc

SEQ ID NO: 365851 - RNA, 22 nt, Human
agcugaugccauguggaacagu

SEQ ID NO: 365852 - RNA, 22 nt, Human
gccugucugcagggcugucauu

SEQ ID NO: 365853 - RNA, 22 nt, Human
ccaggacuuuaaguccagcacu

SEQ ID NO: 365854 - RNA, 22 nt, Human
agcagaugagccucaugacugg

SEQ ID NO: 365855 - RNA, 22 nt, Human
auucuagaugcuguaaguagca

SEQ ID NO: 365856 - RNA, 22 nt, Human
acaaaauuuuuagacaaggcuu

SEQ ID NO: 365857 - RNA, 22 nt, Human
uuggaucagaugauaucuuugu

SEQ ID NO: 365858 - RNA, 22 nt, Human
uggacagcgaaagugccuggga

SEQ ID NO: 365859 - RNA, 22 nt, Human
uucuuauagaagcaaccauugu

SEQ ID NO: 365860 - RNA, 20 nt, Human
agcagcauuguucuagagca

SEQ ID NO: 365861 - RNA, 22 nt, Human
aagccaguccucuacugggcac

SEQ ID NO: 365862 - RNA, 22 nt, Human
cacugcauggaugauggcugua

SEQ ID NO: 365863 - RNA, 19 nt, Human
ugcauaaauuauauacuuu

SEQ ID NO: 365864 - RNA, 22 nt, Human
uaggaaaagucuagauugauga

SEQ ID NO: 365865 - RNA, 22 nt, Human
ugccacacuccccugcugcagu

SEQ ID NO: 365866 - RNA, 22 nt, Human
ugggaccugcccuggccccauc

SEQ ID NO: 365867 - RNA, 22 nt, Human
aggcacuguggaagacaugguu

SEQ ID NO: 365868 - RNA, 21 nt, Human
gcugcaucaaucuacccaggg

SEQ ID NO: 365869 - RNA, 22 nt, Human
cccaucacagacacuggguuau

SEQ ID NO: 365870 - RNA, 22 nt, Human
aguuggagugaacaugagauug

SEQ ID NO: 365871 - RNA, 21 nt, Human
gaugaagcaaucuuucuguug

SEQ ID NO: 365872 - RNA, 22 nt, Human
gggaccugaggcccugcuccac

SEQ ID NO: 365873 - RNA, 22 nt, Human
cacugcaguaacucuaggacug

SEQ ID NO: 365874 - RNA, 22 nt, Human
aauguacaaggguuccaguuuu

SEQ ID NO: 365875 - RNA, 22 nt, Human
gaaggagcuaaagggagcccug

SEQ ID NO: 365876 - RNA, 17 nt, Human
ggccuuggggccucagu

SEQ ID NO: 365877 - RNA, 22 nt, Human
gcaggcuccaaggccugggaga

SEQ ID NO: 365878 - RNA, 22 nt, Human
uucagaaugugaccuuauuugg

SEQ ID NO: 365879 - RNA, 22 nt, Human
aauuccaaguagcaucccauca

SEQ ID NO: 365880 - RNA, 22 nt, Human
agcagcauacacaucauguuga

SEQ ID NO: 365881 - RNA, 22 nt, Human
ucccagaggcaguugguaacuu

SEQ ID NO: 365882 - RNA, 22 nt, Human
gcagcuuucuuuuugcaugucu

SEQ ID NO: 365883 - RNA, 17 nt, Human
acacagccagguucucc

SEQ ID NO: 365884 - RNA, 22 nt, Human
ucuucaaauccuacagugucug

SEQ ID NO: 365885 - RNA, 23 nt, Human
uauggcuuacagugcuuuaggua

SEQ ID NO: 365886 - RNA, 22 nt, Human
ucaaaaguuucacauagagaua

SEQ ID NO: 365887 - RNA, 22 nt, Human
ggaggccaaggaggagcuugcc

SEQ ID NO: 365888 - RNA, 22 nt, Human
caggcacucauucagagaggug

SEQ ID NO: 365889 - RNA, 22 nt, Human
uugaaucauuacaauagauaag

SEQ ID NO: 365890 - RNA, 22 nt, Human
cugcaggcccccuuccuggagu

SEQ ID NO: 365891 - RNA, 22 nt, Human
caggugccucaggaugagacaa

SEQ ID NO: 365892 - RNA, 22 nt, Human
augccuggacugacaugcacug

SEQ ID NO: 365893 - RNA, 22 nt, Human
cucucugaggcaggccuguggg

SEQ ID NO: 365894 - RNA, 22 nt, Human
acuaagugauucuaagcaucuu

SEQ ID NO: 365895 - RNA, 21 nt, Human
uggcaggcagcuggaagcuug

SEQ ID NO: 365896 - RNA, 22 nt, Human
aagcagugcgcucaucuaaggg

SEQ ID NO: 365897 - RNA, 22 nt, Human
acagggcaugugcaagagacau

SEQ ID NO: 365898 - RNA, 19 nt, Human
uggcagggagugauauuag

SEQ ID NO: 365899 - RNA, 22 nt, Human
uuuaccaaauagauuaugucag

SEQ ID NO: 365900 - RNA, 22 nt, Human
uuaggaaauuaugguuucagau

SEQ ID NO: 365901 - RNA, 22 nt, Human
gaggagaagcuaagaaacacag

SEQ ID NO: 365902 - RNA, 22 nt, Human
gcagccucagggcacucagaug

SEQ ID NO: 365903 - RNA, 22 nt, Human
aauuauccuuaaugcaguaagc

SEQ ID NO: 365904 - RNA, 21 nt, Human
ccuggcugcacaguugcuggu

SEQ ID NO: 365905 - RNA, 22 nt, Human
ccaccaggacagcccugagggg

SEQ ID NO: 365906 - RNA, 22 nt, Human
acugucacuccaacugagucgu

SEQ ID NO: 365907 - RNA, 22 nt, Human
uggcagcuugaaugcagucuuu

SEQ ID NO: 365908 - RNA, 22 nt, Human
ugccuggguucccaccccaaag

SEQ ID NO: 365909 - RNA, 22 nt, Human
cccaggcagccccagaagcuug

SEQ ID NO: 365910 - RNA, 22 nt, Human
aggagagggguaggauuaauuu

SEQ ID NO: 365911 - RNA, 22 nt, Human
guggggcaguggccugggagca

SEQ ID NO: 365912 - RNA, 22 nt, Human
cagggaggaugggcuguuuugc

SEQ ID NO: 365913 - RNA, 22 nt, Human
uuaauuacuaagcacaaugcaa

SEQ ID NO: 365914 - RNA, 22 nt, Human
uccucaggugacuagguaucuu

SEQ ID NO: 365915 - RNA, 19 nt, Human
ggaugagggucaggcauag

SEQ ID NO: 365916 - RNA, 22 nt, Human
auuuacugagguaaauaaacug

SEQ ID NO: 365917 - RNA, 22 nt, Human
uggcacugagcagccgcggcag

SEQ ID NO: 365918 - RNA, 23 nt, Human
gggcuccagucucugcucaguug

SEQ ID NO: 365919 - RNA, 22 nt, Human
cccagcacaggcaauuccauac

SEQ ID NO: 365920 - RNA, 22 nt, Human
cagggccaaguuggugccuuuu

SEQ ID NO: 365921 - RNA, 22 nt, Human
gggccaugagagguucaucaac

SEQ ID NO: 365922 - RNA, 22 nt, Human
gagggagggacuagcauucucu

SEQ ID NO: 365923 - RNA, 22 nt, Human
ggugcccaccugucuuccugga

SEQ ID NO: 365924 - RNA, 22 nt, Human
auuugcuugugcuaugaaaguu

SEQ ID NO: 365925 - RNA, 22 nt, Human
ugggcucugaagucagucugcu

SEQ ID NO: 365926 - RNA, 22 nt, Human
cuuagggagaaugccucugcag

SEQ ID NO: 365927 - RNA, 22 nt, Human
ggcacugagcugccuuggggca

SEQ ID NO: 365928 - RNA, 22 nt, Human
cucaggauccaucuccugcccu

SEQ ID NO: 365929 - RNA, 22 nt, Human
ucacaccuguaaucccaggccu

SEQ ID NO: 365930 - RNA, 22 nt, Human
caggcagcucgaugccuuguug

SEQ ID NO: 365931 - RNA, 19 nt, Human
ugagagugaggaaggcuuc

SEQ ID NO: 365932 - RNA, 22 nt, Human
gggcacugcuggaggcucccug

SEQ ID NO: 365933 - RNA, 22 nt, Human
gagugaaaaaggaagggccaua

SEQ ID NO: 365934 - RNA, 22 nt, Human
cauggcuuuguucauauaauuu

SEQ ID NO: 365935 - RNA, 22 nt, Human
uaguuacagcaggcaggauaua

SEQ ID NO: 365936 - RNA, 20 nt, Human
aauuuacucacagaaugaau

SEQ ID NO: 365937 - RNA, 22 nt, Human
ccaggagucaauaaaggaagcu

SEQ ID NO: 365938 - RNA, 22 nt, Human
uguuaacaucuuggacucguga

SEQ ID NO: 365939 - RNA, 22 nt, Human
cauuuacauuuaagguuaauau

SEQ ID NO: 365940 - RNA, 22 nt, Human
agcugauuccacuuuuucccca

SEQ ID NO: 365941 - RNA, 21 nt, Human
agggagcuauuuauaguaagc

SEQ ID NO: 365942 - RNA, 22 nt, Human
uuggcaguaaaagaaaaugcuu

SEQ ID NO: 365943 - RNA, 20 nt, Human
aagauucauuguaauuaggg

SEQ ID NO: 365944 - RNA, 22 nt, Human
acuccuggguugcaguccucaa

SEQ ID NO: 365945 - RNA, 22 nt, Human
gcaaagcauucuguggagucua

SEQ ID NO: 365946 - RNA, 22 nt, Human
gggcaugagaggcaggcaagug

SEQ ID NO: 365947 - RNA, 22 nt, Human
aggcagagaaaaaccagauaug

SEQ ID NO: 365948 - RNA, 23 nt, Human
ugucauugugacuacagaaccag

SEQ ID NO: 365949 - RNA, 22 nt, Human
cagagaaagggugaauuccuuc

SEQ ID NO: 365950 - RNA, 22 nt, Human
caagaacauugugaucacuuca

SEQ ID NO: 365951 - RNA, 22 nt, Human
ccagcugcaggggagcagugga

SEQ ID NO: 365952 - RNA, 22 nt, Human
gagguggccucaagcagucuuc

SEQ ID NO: 365953 - RNA, 22 nt, Human
ccuuaaaagaacuaucucuucu

SEQ ID NO: 365954 - RNA, 22 nt, Human
acuggcagagacccugauggcc

SEQ ID NO: 365955 - RNA, 22 nt, Human
aacauaaauuugaaguggcaaa

SEQ ID NO: 365956 - RNA, 22 nt, Human
ucucuuauuuugccuuugacaa

SEQ ID NO: 365957 - RNA, 22 nt, Human
uccuggccucacaguccugggu

SEQ ID NO: 365958 - RNA, 22 nt, Human
uaaguccuucaccuaauccuca

SEQ ID NO: 365959 - RNA, 22 nt, Human
gccugguggacacugggcauca

SEQ ID NO: 365960 - RNA, 22 nt, Human
uggcugaguuacgaacagagca

SEQ ID NO: 365961 - RNA, 22 nt, Human
acagcagcuggguucccaccau

SEQ ID NO: 365962 - RNA, 22 nt, Human
aggcucagucccggcccgcgcc

SEQ ID NO: 365963 - RNA, 22 nt, Human
ucccagccggugccuggguccc

SEQ ID NO: 365964 - RNA, 22 nt, Human
ccagagcugcauccagcagguu

SEQ ID NO: 365965 - RNA, 22 nt, Human
ucccagcagcauagcucagaau

SEQ ID NO: 365966 - RNA, 22 nt, Human
uagcucuucauuucaucugauu

SEQ ID NO: 365967 - RNA, 22 nt, Human
agggggcaggagagaccugcug

SEQ ID NO: 365968 - RNA, 17 nt, Human
agaggcagauacuugga

SEQ ID NO: 365969 - RNA, 22 nt, Human
gucaggaucaaauugaaguuau

SEQ ID NO: 365970 - RNA, 22 nt, Human
agagcuuauaucuuggccaucc

SEQ ID NO: 365971 - RNA, 22 nt, Human
gggcugcuuuuaagggucucag

SEQ ID NO: 365972 - RNA, 19 nt, Human
ggagaggcuggagggaugc

SEQ ID NO: 365973 - RNA, 22 nt, Human
uuucucugaggcuggccucccu

SEQ ID NO: 365974 - RNA, 19 nt, Human
caaggguugggucugucau

SEQ ID NO: 365975 - RNA, 22 nt, Human
cgggcuccgggucuuugcaguc

SEQ ID NO: 365976 - RNA, 22 nt, Human
ugauuuccucuacuagcaauua

SEQ ID NO: 365977 - RNA, 22 nt, Human
guucuucagucacaucacagaa

SEQ ID NO: 365978 - RNA, 22 nt, Human
ucaggagaaucagggcuguccu

SEQ ID NO: 365979 - RNA, 22 nt, Human
cauuuguauguuccuccuuagg

SEQ ID NO: 365980 - RNA, 22 nt, Human
cccauucauccucgcuuccuuc

SEQ ID NO: 365981 - RNA, 22 nt, Human
agucucuuauucccuauugcug

SEQ ID NO: 365982 - RNA, 22 nt, Human
agcugcucuuugaaggacacuu

SEQ ID NO: 365983 - RNA, 23 nt, Human
uugcauguagcccaugaguaacu

SEQ ID NO: 365984 - RNA, 22 nt, Human
cacugaagccacuggaagagga

SEQ ID NO: 365985 - RNA, 22 nt, Human
auuuuacuuugugaauauugac

SEQ ID NO: 365986 - RNA, 22 nt, Human
augugucuuugagacucugcua

SEQ ID NO: 365987 - RNA, 22 nt, Human
ugaacaguuucaagaaaacuuu

SEQ ID NO: 365988 - RNA, 22 nt, Human
ucagagaaguaagguggggugc

SEQ ID NO: 365989 - RNA, 22 nt, Human
ucacguuuuacugagugagaua

SEQ ID NO: 365990 - RNA, 22 nt, Human
augaaaauguacauguguauaa

SEQ ID NO: 365991 - RNA, 22 nt, Human
gcaaggcugagcacauuugcau

SEQ ID NO: 365992 - RNA, 20 nt, Human
agaagucagcucagaaguga

SEQ ID NO: 365993 - RNA, 22 nt, Human
uccaggcagcccuuccugacuc

SEQ ID NO: 365994 - RNA, 22 nt, Human
aaagaacaaauuagcuguuuua

SEQ ID NO: 365995 - RNA, 22 nt, Human
uuuacagaucuguugauuuguu

SEQ ID NO: 365996 - RNA, 22 nt, Human
auuuagccucauuuuugacaua

SEQ ID NO: 365997 - RNA, 22 nt, Human
uuaaagaauagugccccuauug

SEQ ID NO: 365998 - RNA, 22 nt, Human
ucuuagaaguuuauggcacgga

SEQ ID NO: 365999 - RNA, 22 nt, Human
uggagcaggugggaugucguga

SEQ ID NO: 366000 - RNA, 22 nt, Human
agggcgacaauggagagcguuu

SEQ ID NO: 366001 - RNA, 22 nt, Human
ggcuggcuuucucuccgcaccu

SEQ ID NO: 366002 - RNA, 22 nt, Human
aguauacauauauuagccuucg

SEQ ID NO: 366003 - RNA, 22 nt, Human
agcugucucugguauuauguga

SEQ ID NO: 366004 - RNA, 22 nt, Human
cagguacauucguagacccauu

SEQ ID NO: 366005 - RNA, 22 nt, Human
guagggagcccagagcccagug

SEQ ID NO: 366006 - RNA, 22 nt, Human
ccccuuccacagugcuuccuaa

SEQ ID NO: 366007 - RNA, 20 nt, Human
accuuucaaaugauucagca

SEQ ID NO: 366008 - RNA, 22 nt, Human
ucagccaguugccccaguuagu

SEQ ID NO: 366009 - RNA, 22 nt, Human
agcacagguacggagaugcuac

SEQ ID NO: 366010 - RNA, 22 nt, Human
cagcugugggccugacguggca

SEQ ID NO: 366011 - RNA, 22 nt, Human
cagugguggaaugaggaauugu

SEQ ID NO: 366012 - RNA, 22 nt, Human
cauuugaaauaguucauucuug

SEQ ID NO: 366013 - RNA, 22 nt, Human
acugucuuccaggucuggaggu

SEQ ID NO: 366014 - RNA, 22 nt, Human
uucuguuuuagaaauaaguagu

SEQ ID NO: 366015 - RNA, 21 nt, Human
gugcucugggcagcagagggc

SEQ ID NO: 366016 - RNA, 22 nt, Human
gggcagugucggggcccaggga

SEQ ID NO: 366017 - RNA, 22 nt, Human
gccaggcaauguguuagaagcg

SEQ ID NO: 366018 - RNA, 19 nt, Human
cuguggcugaccucuggcc

SEQ ID NO: 366019 - RNA, 22 nt, Human
auguuucaaauauauagaguug

SEQ ID NO: 366020 - RNA, 22 nt, Human
uuucagauggagguuuaggaca

SEQ ID NO: 366021 - RNA, 22 nt, Human
cugggacagcugagacaggaga

SEQ ID NO: 366022 - RNA, 22 nt, Human
ugacccauggucugaucauagg

SEQ ID NO: 366023 - RNA, 22 nt, Human
agggucagagaucggccaugug

SEQ ID NO: 366024 - RNA, 22 nt, Human
ugaggcuuagagaagaugggau

SEQ ID NO: 366025 - RNA, 22 nt, Human
agucaccaucuguggcagccug

SEQ ID NO: 366026 - RNA, 22 nt, Human
cucccaggggaacuaucaagua

SEQ ID NO: 366027 - RNA, 23 nt, Human
gccauggcugccccacaggccuc

SEQ ID NO: 366028 - RNA, 22 nt, Human
cuguacaaguccuucaucaggg

SEQ ID NO: 366029 - RNA, 22 nt, Human
aauaugcauguauacaugugua

SEQ ID NO: 366030 - RNA, 22 nt, Human
ugcccacaggaagacaccagcg

SEQ ID NO: 366031 - RNA, 22 nt, Human
gcccaggaguugaaugcagcag

SEQ ID NO: 366032 - RNA, 22 nt, Human
gaggaaugucagcacaggccuc

SEQ ID NO: 366033 - RNA, 22 nt, Human
gcagcuggucuggccuagagua

SEQ ID NO: 366034 - RNA, 22 nt, Human
agggcagagauuaauuaagaca

SEQ ID NO: 366035 - RNA, 22 nt, Human
acugaaauacugcucuuggauu

SEQ ID NO: 366036 - RNA, 22 nt, Human
uggccuuggacagagcgcuccu

SEQ ID NO: 366037 - RNA, 22 nt, Human
gcugugcacuaccuauacaucc

SEQ ID NO: 366038 - RNA, 22 nt, Human
uuugaauagaggccccucagaa

SEQ ID NO: 366039 - RNA, 22 nt, Human
aaggggaaguagcaccagaggu

SEQ ID NO: 366040 - RNA, 22 nt, Human
ucugggcagcagcagcuaguag

SEQ ID NO: 366041 - RNA, 23 nt, Human
uucauuugucuacuucacuuguu

SEQ ID NO: 366042 - RNA, 22 nt, Human
uguuauugagguuacuuauaag

SEQ ID NO: 366043 - RNA, 22 nt, Human
gggagaagaaugugucaauugu

SEQ ID NO: 366044 - RNA, 22 nt, Human
gggaguggauuauguggaccca

SEQ ID NO: 366045 - RNA, 22 nt, Human
ccugggcaacauagugagaccu

SEQ ID NO: 366046 - RNA, 22 nt, Human
uaaguccuggcugguuugaagc

SEQ ID NO: 366047 - RNA, 22 nt, Human
uggccuggaaaaaugcagaugg

SEQ ID NO: 366048 - RNA, 22 nt, Human
ucugaggccccugggcaggaug

SEQ ID NO: 366049 - RNA, 22 nt, Human
agcagagucugugugcacuuua

SEQ ID NO: 366050 - RNA, 22 nt, Human
uuucuguauuuaaaagaucugg

SEQ ID NO: 366051 - RNA, 20 nt, Human
ugggccuguggcagaagucu

SEQ ID NO: 366052 - RNA, 22 nt, Human
uggccucugcaauggauucacc

SEQ ID NO: 366053 - RNA, 22 nt, Human
gaggcagcagaacauggaagag

SEQ ID NO: 366054 - RNA, 22 nt, Human
ucagagugaggcccagcaaucu

SEQ ID NO: 366055 - RNA, 22 nt, Human
uucauaguguuuccuuccagug

SEQ ID NO: 366056 - RNA, 22 nt, Human
cucacagaugcugugggucagg

SEQ ID NO: 366057 - RNA, 22 nt, Human
cacagaagaaucaugcuguguu

SEQ ID NO: 366058 - RNA, 22 nt, Human
ugcaguggcgccaucucagcuc

SEQ ID NO: 366059 - RNA, 22 nt, Human
aaaugcagguaguauuuauuuu

SEQ ID NO: 366060 - RNA, 22 nt, Human
aaagauaauguuuccuuauucu

SEQ ID NO: 366061 - RNA, 22 nt, Human
gagcuuggugaugccuccuggu

SEQ ID NO: 366062 - RNA, 20 nt, Human
cugcccagccacugagggau

SEQ ID NO: 366063 - RNA, 20 nt, Human
cagcucugggaaagaggcca

SEQ ID NO: 366064 - RNA, 22 nt, Human
ugcucugcaagcaggagcaaga

SEQ ID NO: 366065 - RNA, 22 nt, Human
uugguccacugugaaauuggga

SEQ ID NO: 366066 - RNA, 19 nt, Human
agugaaauggaguauucaa

SEQ ID NO: 366067 - RNA, 22 nt, Human
gcagcuguggguuccaagucua

SEQ ID NO: 366068 - RNA, 22 nt, Human
ccugagagcagcuuccugcuua

SEQ ID NO: 366069 - RNA, 22 nt, Human
cuggugcuggagccuagucccu

SEQ ID NO: 366070 - RNA, 22 nt, Human
aaugguuugauggacaaaauga

SEQ ID NO: 366071 - RNA, 22 nt, Human
aagcuuccugaaugcucauuua

SEQ ID NO: 366072 - RNA, 22 nt, Human
gccauuuucugucuuguuuauu

SEQ ID NO: 366073 - RNA, 22 nt, Human
auugucuguacuuuaaaaaugu

SEQ ID NO: 366074 - RNA, 22 nt, Human
cacagcuggugacagagcccag

SEQ ID NO: 366075 - RNA, 22 nt, Human
cuggcuugcagcucaucauaaa

SEQ ID NO: 366076 - RNA, 22 nt, Human
gagagcuggguucaaguagcug

SEQ ID NO: 366077 - RNA, 22 nt, Human
uggcacuggaaucguagccuug

SEQ ID NO: 366078 - RNA, 22 nt, Human
gcccauggacacccaagugcca

SEQ ID NO: 366079 - RNA, 23 nt, Human
ugggaguguugggaucucugcuc

SEQ ID NO: 366080 - RNA, 22 nt, Human
cccaaggaagacgcuugugaua

SEQ ID NO: 366081 - RNA, 17 nt, Human
agcugagcuggccaggg

SEQ ID NO: 366082 - RNA, 17 nt, Human
ccaggugggaggugggg

SEQ ID NO: 366083 - RNA, 22 nt, Human
ggagcugggacccugucaucug

SEQ ID NO: 366084 - RNA, 22 nt, Human
uuccucuccucccaccagguga

SEQ ID NO: 366085 - RNA, 22 nt, Human
uuuuucagccaugaauuacacu

SEQ ID NO: 366086 - RNA, 22 nt, Human
ucaaauaccagcuuuuccagaa

SEQ ID NO: 366087 - RNA, 22 nt, Human
gagcugugagggacacauugcu

SEQ ID NO: 366088 - RNA, 22 nt, Human
gacagcuguggagaggcaugug

SEQ ID NO: 366089 - RNA, 22 nt, Human
cuuagaaaucgaacucagguua

SEQ ID NO: 366090 - RNA, 22 nt, Human
aagggcucgguagcaguccuga

SEQ ID NO: 366091 - RNA, 22 nt, Human
ugcauugcaguuaacucaguau

SEQ ID NO: 366092 - RNA, 22 nt, Human
gaagcacauggcuauagcuauu

SEQ ID NO: 366093 - RNA, 22 nt, Human
uuaaauauuuucagcaggguca

SEQ ID NO: 366094 - RNA, 20 nt, Human
uccugguggauacugcuuaa

SEQ ID NO: 366095 - RNA, 22 nt, Human
cauaucccauuggccaggacau

SEQ ID NO: 366096 - RNA, 22 nt, Human
ugggagcugggguuggacgucu

SEQ ID NO: 366097 - RNA, 22 nt, Human
aucagaaaaacauaauguuauu

SEQ ID NO: 366098 - RNA, 22 nt, Human
agcugcccuuuaugaugcugaa

SEQ ID NO: 366099 - RNA, 22 nt, Human
augauugaaaaugacauugcca

SEQ ID NO: 366100 - RNA, 20 nt, Human
ucaggcaguggggaaaggca

SEQ ID NO: 366101 - RNA, 22 nt, Human
ccaggugugauuuggcaguguc

SEQ ID NO: 366102 - RNA, 22 nt, Human
auuuggaaaugcaucucuugag

SEQ ID NO: 366103 - RNA, 22 nt, Human
ucucccaggcuggagugcagug

SEQ ID NO: 366104 - RNA, 22 nt, Human
ucaucaguguccuuaucacuua

SEQ ID NO: 366105 - RNA, 23 nt, Human
uuucaaauuacucugcagaugac

SEQ ID NO: 366106 - RNA, 22 nt, Human
gcaagcaagcagguagagcuga

SEQ ID NO: 366107 - RNA, 22 nt, Human
cugugccaggcccagcugacuu

SEQ ID NO: 366108 - RNA, 19 nt, Human
uugaaagauuagcuuucua

SEQ ID NO: 366109 - RNA, 22 nt, Human
uacuuuaaaaacugauaauuca

SEQ ID NO: 366110 - RNA, 22 nt, Human
cuuaaacugaaagcuacaagau

SEQ ID NO: 366111 - RNA, 22 nt, Human
gcuucccacagcuggacugggg

SEQ ID NO: 366112 - RNA, 22 nt, Human
aaaugugucaguuucauucucu

SEQ ID NO: 366113 - RNA, 22 nt, Human
cgcugccaggauccccugccgg

SEQ ID NO: 366114 - RNA, 22 nt, Human
uaacugauauugaaaaacauca

SEQ ID NO: 366115 - RNA, 22 nt, Human
agcuggccuccgggugccuggg

SEQ ID NO: 366116 - RNA, 23 nt, Human
uccagcagagccuuccaggaggg

SEQ ID NO: 366117 - RNA, 22 nt, Human
ccagugcacagccaggcaggug

SEQ ID NO: 366118 - RNA, 22 nt, Human
aauuuggcagugucuugaagua

SEQ ID NO: 366119 - RNA, 22 nt, Human
cagaggaaaugggaaggagaua

SEQ ID NO: 366120 - RNA, 18 nt, Human
agcuggcccuggcugccg

SEQ ID NO: 366121 - RNA, 22 nt, Human
ucucagagauucagggagaagu

SEQ ID NO: 366122 - RNA, 22 nt, Human
gcauuuccugugcuuggcauau

SEQ ID NO: 366123 - RNA, 22 nt, Human
caguguuuguauagaauaugca

SEQ ID NO: 366124 - RNA, 22 nt, Human
aucaggaucacugggagucuug

SEQ ID NO: 366125 - RNA, 22 nt, Human
ugcauguuaagaaaauauugag

SEQ ID NO: 366126 - RNA, 22 nt, Human
cugccaucugagccaaaagugc

SEQ ID NO: 366127 - RNA, 22 nt, Human
gggccccuuguaucucuggcuc

SEQ ID NO: 366128 - RNA, 22 nt, Human
cacaaauggccguguucaaaga

SEQ ID NO: 366129 - RNA, 22 nt, Human
cccuuccucccaggcuucugug

SEQ ID NO: 366130 - RNA, 22 nt, Human
auugugcaaauauuaucuguag

SEQ ID NO: 366131 - RNA, 22 nt, Human
cacagcuggggaagcugaggcc

SEQ ID NO: 366132 - RNA, 22 nt, Human
uucauauaaauggaaucagaau

SEQ ID NO: 366133 - RNA, 22 nt, Human
aggccuuaccauagcuguagca

SEQ ID NO: 366134 - RNA, 22 nt, Human
uuucuggcagcgggacaggggu

SEQ ID NO: 366135 - RNA, 22 nt, Human
uggcuguguuaccacuucaugu

SEQ ID NO: 366136 - RNA, 22 nt, Human
gcccuggccuucaucucagaca

SEQ ID NO: 366137 - RNA, 22 nt, Human
accccagcccugcuucugggag

SEQ ID NO: 366138 - RNA, 22 nt, Human
uaauuucuggagggagaaagag

SEQ ID NO: 366139 - RNA, 22 nt, Human
ccuggaaguuggagguugcagu

SEQ ID NO: 366140 - RNA, 22 nt, Human
aggcugcaggucugggucaugu

SEQ ID NO: 366141 - RNA, 22 nt, Human
acuggcaguuugagaaugcauu

SEQ ID NO: 366142 - RNA, 22 nt, Human
aaguaaaauguuuccuuuauua

SEQ ID NO: 366143 - RNA, 22 nt, Human
uaguccuuuaucaaacauuuau

SEQ ID NO: 366144 - RNA, 22 nt, Human
ucagcuuuuaaaaacaagaagu

SEQ ID NO: 366145 - RNA, 22 nt, Human
ggaaggaggggcaaagcaguuc

SEQ ID NO: 366146 - RNA, 22 nt, Human
acaguaaaaagccuuagaauuu

SEQ ID NO: 366147 - RNA, 21 nt, Human
agaauaaugguaucauuugcu

SEQ ID NO: 366148 - RNA, 22 nt, Human
ugugucagagguagagauggca

SEQ ID NO: 366149 - RNA, 22 nt, Human
cgcuggccauagccuccugugu

SEQ ID NO: 366150 - RNA, 22 nt, Human
ugguuugcccacucgagugauu

SEQ ID NO: 366151 - RNA, 22 nt, Human
aggggagcuaacaccagagccc

SEQ ID NO: 366152 - RNA, 22 nt, Human
cucuggaguucucaugaggaac

SEQ ID NO: 366153 - RNA, 22 nt, Human
cuuaagaugaggucaugcuaua

SEQ ID NO: 366154 - RNA, 22 nt, Human
uguacaguauauuucaaagcca

SEQ ID NO: 366155 - RNA, 22 nt, Human
ucaagugcuugugagguauuug

SEQ ID NO: 366156 - RNA, 22 nt, Human
agaaauguacgauguuaugcag

SEQ ID NO: 366157 - RNA, 22 nt, Human
uugucugucccagcuugugcau

SEQ ID NO: 366158 - RNA, 22 nt, Human
gcagggacgccagggacagcaa

SEQ ID NO: 366159 - RNA, 22 nt, Human
gugacagucaaagacaugacuu

SEQ ID NO: 366160 - RNA, 22 nt, Human
uuagaaauacaagugagguuga

SEQ ID NO: 366161 - RNA, 22 nt, Human
ucaggcugcuguacugugaaug

SEQ ID NO: 366162 - RNA, 22 nt, Human
acguuuucuagagaauaugcag

SEQ ID NO: 366163 - RNA, 22 nt, Human
cuccucuuuacccgcauggucu

SEQ ID NO: 366164 - RNA, 22 nt, Human
caaggccagggaauuuuucugg

SEQ ID NO: 366165 - RNA, 22 nt, Human
acccaggguagagugcaguggc

SEQ ID NO: 366166 - RNA, 21 nt, Human
aagccucaagcagaagacaga

SEQ ID NO: 366167 - RNA, 22 nt, Human
uagucaccagcuacaggacagc

SEQ ID NO: 366168 - RNA, 22 nt, Human
cuggagcccaggccuggugucu

SEQ ID NO: 366169 - RNA, 22 nt, Human
augcuguguggucaaguuaauu

SEQ ID NO: 366170 - RNA, 21 nt, Human
uguggcagauguugggaggca

SEQ ID NO: 366171 - RNA, 22 nt, Human
ccucagccuuggccccaggcag

SEQ ID NO: 366172 - RNA, 22 nt, Human
uggaagcagugauucuugucug

SEQ ID NO: 366173 - RNA, 22 nt, Human
aagaugauguuguguuuucacu

SEQ ID NO: 366174 - RNA, 22 nt, Human
uuuaacagaugcuaugucuacc

SEQ ID NO: 366175 - RNA, 22 nt, Human
ucugucucaaguucuugcacuc

SEQ ID NO: 366176 - RNA, 22 nt, Human
ucugcagggaugugagggguga

SEQ ID NO: 366177 - RNA, 22 nt, Human
gcccaggaaauaaaagugggcu

SEQ ID NO: 366178 - RNA, 22 nt, Human
uaaguccuaacagacugggggc

SEQ ID NO: 366179 - RNA, 23 nt, Human
guggagccacaucacaggcuccu

SEQ ID NO: 366180 - RNA, 22 nt, Human
ugcuuaauguacgugaguguac

SEQ ID NO: 366181 - RNA, 22 nt, Human
aagagagagcauucuucuguua

SEQ ID NO: 366182 - RNA, 19 nt, Human
cccaggaggcggagguugc

SEQ ID NO: 366183 - RNA, 22 nt, Human
ucccagggacugggcuaggcuu

SEQ ID NO: 366184 - RNA, 22 nt, Human
gcucugggcugcccucuggaca

SEQ ID NO: 366185 - RNA, 22 nt, Human
uagaaaucagguuuuuagaaag

SEQ ID NO: 366186 - RNA, 22 nt, Human
agcugccugcuuaugagcucca

SEQ ID NO: 366187 - RNA, 22 nt, Human
agacuuugagcucuuagagaag

SEQ ID NO: 366188 - RNA, 22 nt, Human
gagcuuuaggagaaggagguca

SEQ ID NO: 366189 - RNA, 22 nt, Human
uuugcuuguucaagauuucugu

SEQ ID NO: 366190 - RNA, 22 nt, Human
agcugagccagcagcaacagga

SEQ ID NO: 366191 - RNA, 22 nt, Human
gggaaauugucaacacucucaa

SEQ ID NO: 366192 - RNA, 22 nt, Human
ugcccaaguguuuggcugaguc

SEQ ID NO: 366193 - RNA, 22 nt, Human
ucuggccuauuucugucagauc

SEQ ID NO: 366194 - RNA, 22 nt, Human
cuggcucagugccuucagaagu

SEQ ID NO: 366195 - RNA, 22 nt, Human
aggguagggccguagggccaug

SEQ ID NO: 366196 - RNA, 22 nt, Human
ucugccagaaguucugagagua

SEQ ID NO: 366197 - RNA, 22 nt, Human
acucccacuccagaguagaagc

SEQ ID NO: 366198 - RNA, 22 nt, Human
gaggcagugucgguggcaggau

SEQ ID NO: 366199 - RNA, 22 nt, Human
ccugugugucugucacugcaca

SEQ ID NO: 366200 - RNA, 22 nt, Human
agccauugaguuuuaugugcua

SEQ ID NO: 366201 - RNA, 22 nt, Human
cugagcccaggcgggagcugag

SEQ ID NO: 366202 - RNA, 22 nt, Human
ugucccaguuuaucugggacug

SEQ ID NO: 366203 - RNA, 22 nt, Human
uagcuguguaagcuugguaaga

SEQ ID NO: 366204 - RNA, 21 nt, Human
ugcccacagcaaaugcagagg

SEQ ID NO: 366205 - RNA, 16 nt, Human
ccuuucucugccuucc

SEQ ID NO: 366206 - RNA, 22 nt, Human
gucucuuuuauggugaguugau

SEQ ID NO: 366207 - RNA, 22 nt, Human
cuucagagugcagaagauuggg

SEQ ID NO: 366208 - RNA, 23 nt, Human
cuugcaggaagcagauggcacac

SEQ ID NO: 366209 - RNA, 22 nt, Human
agcauuuauuucuuagaaauug

SEQ ID NO: 366210 - RNA, 22 nt, Human
aauggcugccagggcaggaggu

SEQ ID NO: 366211 - RNA, 22 nt, Human
uagaugaccuuguguuaggcaa

SEQ ID NO: 366212 - RNA, 22 nt, Human
uuccucuccucacaugagucac

SEQ ID NO: 366213 - RNA, 22 nt, Human
ggagccaguauuuaguggucuu

SEQ ID NO: 366214 - RNA, 22 nt, Human
cagucucuugcuucauuaguug

SEQ ID NO: 366215 - RNA, 20 nt, Human
uggccuuuaaauaguauucc

SEQ ID NO: 366216 - RNA, 22 nt, Human
gggaccugcgccacucacuguc

SEQ ID NO: 366217 - RNA, 22 nt, Human
uugaauaaaugagcagugaauu

SEQ ID NO: 366218 - RNA, 22 nt, Human
caagaugaaacuacagggagga

SEQ ID NO: 366219 - RNA, 22 nt, Human
agccccaggcccggacgccucu

SEQ ID NO: 366220 - RNA, 22 nt, Human
ugaaguuauauauguugaaaau

SEQ ID NO: 366221 - RNA, 22 nt, Human
ccuccaggcugaauaucuagaa

SEQ ID NO: 366222 - RNA, 22 nt, Human
agaauuagaggccauguacuug

SEQ ID NO: 366223 - RNA, 22 nt, Human
ccugagaccaaguugcagccau

SEQ ID NO: 366224 - RNA, 22 nt, Human
aaacugaauucccaagggcaug

SEQ ID NO: 366225 - RNA, 20 nt, Human
gaaauucucguauuaguuua

SEQ ID NO: 366226 - RNA, 22 nt, Human
guuuauaaggcccaauauuucu

SEQ ID NO: 366227 - RNA, 22 nt, Human
accuuuuuucagaacucuaaag

SEQ ID NO: 366228 - RNA, 22 nt, Human
uuacauuuuaguuaaccuguga

SEQ ID NO: 366229 - RNA, 22 nt, Human
uaaaauguagcuucuaggcugg

SEQ ID NO: 366230 - RNA, 22 nt, Human
uauucacauucucaggccuggu

SEQ ID NO: 366231 - RNA, 22 nt, Human
ugagacaguucugcagcugggu

SEQ ID NO: 366232 - RNA, 22 nt, Human
guagggacaugccauuaucuca

SEQ ID NO: 366233 - RNA, 22 nt, Human
ggcucuggcguccaauggagcg

SEQ ID NO: 366234 - RNA, 23 nt, Human
auugaugacuugauuacacuuuu

SEQ ID NO: 366235 - RNA, 22 nt, Human
aagggagguaaagcuauuuaaa

SEQ ID NO: 366236 - RNA, 22 nt, Human
uggccacagccucugccaguuc

SEQ ID NO: 366237 - RNA, 22 nt, Human
cccagcuucugagggggccuug

SEQ ID NO: 366238 - RNA, 22 nt, Human
aagagcuggaguuugcagcccu

SEQ ID NO: 366239 - RNA, 22 nt, Human
aguacuuuacuucuuacaguuu

SEQ ID NO: 366240 - RNA, 22 nt, Human
ggcuuccuaauacucccuacac

SEQ ID NO: 366241 - RNA, 22 nt, Human
ugaggaggucagagucuggcug

SEQ ID NO: 366242 - RNA, 22 nt, Human
cagggcagugaagaacacacgu

SEQ ID NO: 366243 - RNA, 22 nt, Human
guaaucucagcuacuugggagg

SEQ ID NO: 366244 - RNA, 22 nt, Human
gccugucucuuggaacuuggua

SEQ ID NO: 366245 - RNA, 22 nt, Human
gcucccacgcaauucuuuucag

SEQ ID NO: 366246 - RNA, 22 nt, Human
ugggaggaaugucacugagcca

SEQ ID NO: 366247 - RNA, 22 nt, Human
uuagggcuuuucugaauaggcc

SEQ ID NO: 366248 - RNA, 22 nt, Human
ugcuuaauagugcacugguuuc

SEQ ID NO: 366249 - RNA, 22 nt, Human
agaggcagccguauuucaaagg

SEQ ID NO: 366250 - RNA, 22 nt, Human
cagugguuauacuuacuguuuc

SEQ ID NO: 366251 - RNA, 22 nt, Human
cucugguucagggcucccuggc

SEQ ID NO: 366252 - RNA, 22 nt, Human
caaagugcuggaauuacaggug

SEQ ID NO: 366253 - RNA, 22 nt, Human
agaggaugguugaggaagaccu

SEQ ID NO: 366254 - RNA, 21 nt, Human
aacaaagggaugcucaucuuu

SEQ ID NO: 366255 - RNA, 22 nt, Human
uggcauuuucuccuuugaguuu

SEQ ID NO: 366256 - RNA, 22 nt, Human
agcagcauguucauuacauuau

SEQ ID NO: 366257 - RNA, 21 nt, Human
uaucagaagagaaagaaugau

SEQ ID NO: 366258 - RNA, 22 nt, Human
aaucuucauuuugacaagauuc

SEQ ID NO: 366259 - RNA, 22 nt, Human
gagacagaguuucacucuuguu

SEQ ID NO: 366260 - RNA, 22 nt, Human
gagcagaugugugccaggaugc

SEQ ID NO: 366261 - RNA, 23 nt, Human
auguauuuaaauuucagugauga

SEQ ID NO: 366262 - RNA, 22 nt, Human
ugcuuuauguggcugauacuca

SEQ ID NO: 366263 - RNA, 22 nt, Human
ugagccagaggaggcugugugg

SEQ ID NO: 366264 - RNA, 22 nt, Human
aguuuccaaauauuguuuuagc

SEQ ID NO: 366265 - RNA, 22 nt, Human
gcugguccacucccuggaggcu

SEQ ID NO: 366266 - RNA, 22 nt, Human
cagcugccacaccucuuucucu

SEQ ID NO: 366267 - RNA, 22 nt, Human
aggcaggcccucuggaaaggua

SEQ ID NO: 366268 - RNA, 22 nt, Human
ccuggcagaauauuaaagugca

SEQ ID NO: 366269 - RNA, 22 nt, Human
ugcagcucauugguguccuggu

SEQ ID NO: 366270 - RNA, 22 nt, Human
agaggcugaaugaugucaucau

SEQ ID NO: 366271 - RNA, 22 nt, Human
cuguucacacacuuguacucuc

SEQ ID NO: 366272 - RNA, 22 nt, Human
gugcagcagggggaagacagug

SEQ ID NO: 366273 - RNA, 22 nt, Human
agcauugccugccuauugcuaa

SEQ ID NO: 366274 - RNA, 19 nt, Human
cagaccuguccagccugug

SEQ ID NO: 366275 - RNA, 22 nt, Human
cccaggcacacugaagugacau

SEQ ID NO: 366276 - RNA, 22 nt, Human
ggguggagcuuggacaccagua

SEQ ID NO: 366277 - RNA, 22 nt, Human
ggcacugggcaccggcugaggg

SEQ ID NO: 366278 - RNA, 20 nt, Human
aagggagaauaaugauugua

SEQ ID NO: 366279 - RNA, 22 nt, Human
augguuuacaauguuuucaguu

SEQ ID NO: 366280 - RNA, 22 nt, Human
ugucuucagcaaaugccuuucu

SEQ ID NO: 366281 - RNA, 22 nt, Human
gcaucuaauccaguccagcauc

SEQ ID NO: 366282 - RNA, 22 nt, Human
ucuuuaauaucugccccagagc

SEQ ID NO: 366283 - RNA, 22 nt, Human
uggccuggugucugcgaggccu

SEQ ID NO: 366284 - RNA, 22 nt, Human
uaguccuuuccggcugcuauaa

SEQ ID NO: 366285 - RNA, 20 nt, Human
gcugaggucauuaugccuca

SEQ ID NO: 366286 - RNA, 22 nt, Human
aauggacaggagagcauaguca

SEQ ID NO: 366287 - RNA, 22 nt, Human
uuggcagugucugcaaaaugga

SEQ ID NO: 366288 - RNA, 22 nt, Human
cuccaggcucguccaagaucga

SEQ ID NO: 366289 - RNA, 22 nt, Human
cugcgcagggguggcgccagaa

SEQ ID NO: 366290 - RNA, 22 nt, Human
aagaaauauugggccuuauaaa

SEQ ID NO: 366291 - RNA, 22 nt, Human
cugcuucuaagaaccugcagcu

SEQ ID NO: 366292 - RNA, 22 nt, Human
aaaaguaauugcaauuuuguag

SEQ ID NO: 366293 - RNA, 23 nt, Human
agaauuguaaauagaauauaccu

SEQ ID NO: 366294 - RNA, 22 nt, Human
ccuuguccucugguuuccuguu

SEQ ID NO: 366295 - RNA, 22 nt, Human
cuggccaacuugcuuguuggca

SEQ ID NO: 366296 - RNA, 22 nt, Human
cuguacaucccgagagccagua

SEQ ID NO: 366297 - RNA, 22 nt, Human
guucuucagcauuagaagucau

SEQ ID NO: 366298 - RNA, 23 nt, Human
uggcuggcagaaacugaagcaug

SEQ ID NO: 366299 - RNA, 22 nt, Human
acagagcaauaacagggagagg

SEQ ID NO: 366300 - RNA, 22 nt, Human
ucaguuuuuaaaugauauaauu

SEQ ID NO: 366301 - RNA, 22 nt, Human
gaagaggaugacaggagccggu

SEQ ID NO: 366302 - RNA, 22 nt, Human
gccaccuggacagcugugcccu

SEQ ID NO: 366303 - RNA, 22 nt, Human
acccuguaugcuauaucccuaa

SEQ ID NO: 366304 - RNA, 22 nt, Human
ccaaaguccacaguuuacauua

SEQ ID NO: 366305 - RNA, 23 nt, Human
gcaguggaaugucucuguuugga

SEQ ID NO: 366306 - RNA, 22 nt, Human
uaauuauucuagucacauagca

SEQ ID NO: 366307 - RNA, 19 nt, Human
cugagagaugcuucacaca

SEQ ID NO: 366308 - RNA, 22 nt, Human
uuuccauauuuaaucaaaauaa

SEQ ID NO: 366309 - RNA, 22 nt, Human
cucuccaggacuuuggcccaau

SEQ ID NO: 366310 - RNA, 22 nt, Human
ucugggaacugagcuccccuag

SEQ ID NO: 366311 - RNA, 22 nt, Human
agagccaguuacaacuguggag

SEQ ID NO: 366312 - RNA, 21 nt, Human
uuacuuuugcagcaaccuaau

SEQ ID NO: 366313 - RNA, 22 nt, Human
cagagcaugaauaaaaguuaca

SEQ ID NO: 366314 - RNA, 22 nt, Human
cagagacagaaaauggaucuag

SEQ ID NO: 366315 - RNA, 22 nt, Human
ugaagcaggugaauggaugucg

SEQ ID NO: 366316 - RNA, 22 nt, Human
gucccagggaugcagacaugag

SEQ ID NO: 366317 - RNA, 21 nt, Human
ugaaaguuggagucaaaugua

SEQ ID NO: 366318 - RNA, 22 nt, Human
ggagaggcgaugagucacagcc

SEQ ID NO: 366319 - RNA, 22 nt, Human
acaaaguuugugguauuccaag

SEQ ID NO: 366320 - RNA, 22 nt, Human
ggaggccaaggcgggcggauca

SEQ ID NO: 366321 - RNA, 22 nt, Human
uuucaaauagaaucuuuccaaa

SEQ ID NO: 366322 - RNA, 22 nt, Human
ucuucaauuagauuuaccaauu

SEQ ID NO: 366323 - RNA, 22 nt, Human
cuuuggcaaggguuuuaauugu

SEQ ID NO: 366324 - RNA, 22 nt, Human
cauuucugucacguucuuuuau

SEQ ID NO: 366325 - RNA, 22 nt, Human
cugcaggguuuuucaaggacaa

SEQ ID NO: 366326 - RNA, 22 nt, Human
gauuuucauuugcacucuagaa

SEQ ID NO: 366327 - RNA, 22 nt, Human
uuuacaaccucauauucugaug

SEQ ID NO: 366328 - RNA, 18 nt, Human
uucagcagcagacacacu

SEQ ID NO: 366329 - RNA, 22 nt, Human
ucuguaguagguuguaguucuu

SEQ ID NO: 366330 - RNA, 22 nt, Human
uggcucagauuuuuguaggcuu

SEQ ID NO: 366331 - RNA, 22 nt, Human
uggacucagaaguguucuuuua

SEQ ID NO: 366332 - RNA, 22 nt, Human
ccccaccagcacccucucuauc

SEQ ID NO: 366333 - RNA, 21 nt, Human
ucaggcaggcgcagagggaag

SEQ ID NO: 366334 - RNA, 22 nt, Human
ccagcuuuuagugggcuuauua

SEQ ID NO: 366335 - RNA, 22 nt, Human
agggcugcugcuccgggcccag

SEQ ID NO: 366336 - RNA, 22 nt, Human
ugggccuggcccuguggaggag

SEQ ID NO: 366337 - RNA, 22 nt, Human
gagauuuagagagacuuaaaca

SEQ ID NO: 366338 - RNA, 22 nt, Human
cauuucauaguugucacaauaa

SEQ ID NO: 366339 - RNA, 22 nt, Human
gaggcucauugcauugugcauu

SEQ ID NO: 366340 - RNA, 22 nt, Human
caauuucuggaacuaauucuga

SEQ ID NO: 366341 - RNA, 22 nt, Human
ucccaggcuggcaggcagcagu

SEQ ID NO: 366342 - RNA, 22 nt, Human
gggagggguugcauguuugagu

SEQ ID NO: 366343 - RNA, 19 nt, Human
acaaagcugugagcagcuu

SEQ ID NO: 366344 - RNA, 22 nt, Human
gcucaagggaugggagugggug

SEQ ID NO: 366345 - RNA, 22 nt, Human
ugcugcugaucauuuauagucu

SEQ ID NO: 366346 - RNA, 22 nt, Human
aggccugaaggaagaugagcug

SEQ ID NO: 366347 - RNA, 22 nt, Human
ggcccagaauacuuuguaaaau

SEQ ID NO: 366348 - RNA, 22 nt, Human
ccuggccucuccgaguaaccug

SEQ ID NO: 366349 - RNA, 22 nt, Human
ccaggcugggcggggaaccugg

SEQ ID NO: 366350 - RNA, 22 nt, Human
gccaggcugaggcucuggaaga

SEQ ID NO: 366351 - RNA, 22 nt, Human
cuuucauucuuagauauuagug

SEQ ID NO: 366352 - RNA, 22 nt, Human
ccugcuucagggaugauggcac

SEQ ID NO: 366353 - RNA, 22 nt, Human
cccagggacagaugggcagcua

SEQ ID NO: 366354 - RNA, 22 nt, Human
caaagccaggcuuucuaaugua

SEQ ID NO: 366355 - RNA, 19 nt, Human
guggccagggcaggggcug

SEQ ID NO: 366356 - RNA, 22 nt, Human
uauccaaaguuucucagaaacu

SEQ ID NO: 366357 - RNA, 20 nt, Human
agugggagagggcagacugc

SEQ ID NO: 366358 - RNA, 22 nt, Human
gggaggucagggugccugcugg

SEQ ID NO: 366359 - RNA, 22 nt, Human
gccaggcagagccccgugcagc

SEQ ID NO: 366360 - RNA, 22 nt, Human
uccuucaguuaucacaguacug

SEQ ID NO: 366361 - RNA, 21 nt, Human
ugcaggcaggcagagaugcug

SEQ ID NO: 366362 - RNA, 22 nt, Human
uuguugguggaauugaugcuag

SEQ ID NO: 366363 - RNA, 22 nt, Human
ggcugccugggagcccuccucu

SEQ ID NO: 366364 - RNA, 22 nt, Human
aagaagguguggaaagaugcuc

SEQ ID NO: 366365 - RNA, 22 nt, Human
ugggcaaguaucggacucugag

SEQ ID NO: 366366 - RNA, 23 nt, Human
uuguuuuuagagguggcaugaga

SEQ ID NO: 366367 - RNA, 22 nt, Human
ggggagaguccuuuccaguucc

SEQ ID NO: 366368 - RNA, 19 nt, Human
uugaaauuguuugauaugg

SEQ ID NO: 366369 - RNA, 22 nt, Human
gcuggcagagacaagaagacua

SEQ ID NO: 366370 - RNA, 22 nt, Human
uugaaucuauguauucagugua

SEQ ID NO: 366371 - RNA, 21 nt, Human
ugcauaaagaaauacaaauac

SEQ ID NO: 366372 - RNA, 22 nt, Human
acagcuguggccacuugcaucc

SEQ ID NO: 366373 - RNA, 22 nt, Human
gccaccuguuucgcuugcccag

SEQ ID NO: 366374 - RNA, 22 nt, Human
agaggccagguccagaguuugu

SEQ ID NO: 366375 - RNA, 22 nt, Human
agcucuggaauaaugaugugau

SEQ ID NO: 366376 - RNA, 20 nt, Human
aauaaaagaagccuucaccc

SEQ ID NO: 366377 - RNA, 22 nt, Human
ugaaggcccuaucuccauauac

SEQ ID NO: 366378 - RNA, 22 nt, Human
cagagcccagggccuacguccc

SEQ ID NO: 366379 - RNA, 22 nt, Human
cagcuuuauugagguauaauug

SEQ ID NO: 366380 - RNA, 22 nt, Human
accucccagcucugagcuuggg

SEQ ID NO: 366381 - RNA, 22 nt, Human
accaggggugucaacagcauuu

SEQ ID NO: 366382 - RNA, 23 nt, Human
ucagucuucccugucaguaauag

SEQ ID NO: 366383 - RNA, 22 nt, Human
ugccucugaggaagauuguguu

SEQ ID NO: 366384 - RNA, 22 nt, Human
agucaguguagaaagcccaggc

SEQ ID NO: 366385 - RNA, 22 nt, Human
ucaucacauguguagucauccc

SEQ ID NO: 366386 - RNA, 22 nt, Human
uggugcugacaguucugagugc

SEQ ID NO: 366387 - RNA, 22 nt, Human
gcaguguuuacauauuagaaac

SEQ ID NO: 366388 - RNA, 22 nt, Human
ggcaggguggcagaggcucaga

SEQ ID NO: 366389 - RNA, 22 nt, Human
cugcucuggggaagccagaugu

SEQ ID NO: 366390 - RNA, 22 nt, Human
aggacugacuuuugccaugaaa

SEQ ID NO: 366391 - RNA, 22 nt, Human
ccacagggcucuaggcgcuucc

SEQ ID NO: 366392 - RNA, 22 nt, Human
ugcagcaggcacaggacggaag

SEQ ID NO: 366393 - RNA, 22 nt, Human
gcacccaggcuugggcagcaac

SEQ ID NO: 366394 - RNA, 22 nt, Human
aacuuuaaggcuauaaauuaug

SEQ ID NO: 366395 - RNA, 22 nt, Human
gaagcagccacggggagacaga

SEQ ID NO: 366396 - RNA, 22 nt, Human
uuaaagggccgauuuccaggcc

SEQ ID NO: 366397 - RNA, 21 nt, Human
uucuccccagcgaauccucgg

SEQ ID NO: 366398 - RNA, 22 nt, Human
acaaguaccaaaugcucaagua

SEQ ID NO: 366399 - RNA, 22 nt, Human
uggccuggcugcccugucugga

SEQ ID NO: 366400 - RNA, 22 nt, Human
aggagagaauguuccaggcuug

SEQ ID NO: 366401 - RNA, 22 nt, Human
uuacaguuuaguccaagccaga

SEQ ID NO: 366402 - RNA, 18 nt, Human
cauuaugugguuauagaa

SEQ ID NO: 366403 - RNA, 22 nt, Human
ugcaaacuauugguagagaugg

SEQ ID NO: 366404 - RNA, 22 nt, Human
ccaaguacucucaccaaagcuu

SEQ ID NO: 366405 - RNA, 22 nt, Human
ggcagggaagcuggcaucacgg

SEQ ID NO: 366406 - RNA, 22 nt, Human
gaggggagacagggaaaucagu

SEQ ID NO: 366407 - RNA, 20 nt, Human
gugggcagcaggcauacugg

SEQ ID NO: 366408 - RNA, 22 nt, Human
ccugccugcuuucugcuuugca

SEQ ID NO: 366409 - RNA, 20 nt, Human
uggcaggaauagggccagag

SEQ ID NO: 366410 - RNA, 22 nt, Human
ucucugaaggggagcuguuuaa

SEQ ID NO: 366411 - RNA, 22 nt, Human
uuaacauacaucaugaacaaug

SEQ ID NO: 366412 - RNA, 22 nt, Human
acccagcuguuucccgugucau

SEQ ID NO: 366413 - RNA, 22 nt, Human
uuucagugcuucuguuuaccgg

SEQ ID NO: 366414 - RNA, 22 nt, Human
uauuucuuguuauucucguuga

SEQ ID NO: 366415 - RNA, 22 nt, Human
gcagagcugucuaagucacuuc

SEQ ID NO: 366416 - RNA, 22 nt, Human
cugugcuuccaggauggcagcu

SEQ ID NO: 366417 - RNA, 22 nt, Human
ugcauauuguccuugauauuau

SEQ ID NO: 366418 - RNA, 22 nt, Human
aggaggcugguucaggccauau

SEQ ID NO: 366419 - RNA, 22 nt, Human
caguuucuuggaugccaauuuc

SEQ ID NO: 366420 - RNA, 22 nt, Human
auguccagaguguccuggaaag

SEQ ID NO: 366421 - RNA, 22 nt, Human
aaaaaugucauuauggaacuga

SEQ ID NO: 366422 - RNA, 22 nt, Human
gccugcagcugcuuccacacac

SEQ ID NO: 366423 - RNA, 22 nt, Human
auuuuacuacuccaauuaauga

SEQ ID NO: 366424 - RNA, 22 nt, Human
cugccugcugccuguggagggu

SEQ ID NO: 366425 - RNA, 20 nt, Human
uggcagaguugucccaccca

SEQ ID NO: 366426 - RNA, 17 nt, Human
uucaaagcuuaucaagg

SEQ ID NO: 366427 - RNA, 19 nt, Human
guccaguguuuuccaguca

SEQ ID NO: 366428 - RNA, 22 nt, Human
cucuuuccaggguaccccaggu

SEQ ID NO: 366429 - RNA, 17 nt, Human
gacaggcucagugacga

SEQ ID NO: 366430 - RNA, 22 nt, Human
ucuggcucuauaacuccuagcu

SEQ ID NO: 366431 - RNA, 22 nt, Human
aaggcagucugguuucaaagca

SEQ ID NO: 366432 - RNA, 21 nt, Human
cugagggccgcagcugggcuc

SEQ ID NO: 366433 - RNA, 22 nt, Human
ucaugacaucuguuuaucucaa

SEQ ID NO: 366434 - RNA, 22 nt, Human
caaguccuaggucugauugaac

SEQ ID NO: 366435 - RNA, 22 nt, Human
ucagaaauacuaucagcuuuug

SEQ ID NO: 366436 - RNA, 22 nt, Human
uagagcuguaucaaagagccuu

SEQ ID NO: 366437 - RNA, 22 nt, Human
gcccugggauuggguggaggcu

SEQ ID NO: 366438 - RNA, 22 nt, Human
uuucuagucucgaucucuuaau

SEQ ID NO: 366439 - RNA, 22 nt, Human
uagccgggugugguggaacucc

SEQ ID NO: 366440 - RNA, 22 nt, Human
cugcaucaguggauaugauggu

SEQ ID NO: 366441 - RNA, 19 nt, Human
aucugccuguuaucacaua

SEQ ID NO: 366442 - RNA, 22 nt, Human
guuuuucuaggaccaugugauu

SEQ ID NO: 366443 - RNA, 21 nt, Human
uggcccuggccacggcugcca

SEQ ID NO: 366444 - RNA, 22 nt, Human
aaaugcuugcucuugauuauuu

SEQ ID NO: 366445 - RNA, 22 nt, Human
cagcauuuucuuaauguaggug

SEQ ID NO: 366446 - RNA, 22 nt, Human
gaaagaagcuuuagauggcuau

SEQ ID NO: 366447 - RNA, 22 nt, Human
uuauuuauggcacuguuggugg

SEQ ID NO: 366448 - RNA, 22 nt, Human
gagucacaaagccuuucuuauu

SEQ ID NO: 366449 - RNA, 22 nt, Human
uagaaacagaaaacuguaauag

SEQ ID NO: 366450 - RNA, 22 nt, Human
ucuggcaggcaaucggcucugg

SEQ ID NO: 366451 - RNA, 22 nt, Human
aaccaggacaauuuugaaagua

SEQ ID NO: 366452 - RNA, 22 nt, Human
ugcuuuaucaaagcuauaguga

SEQ ID NO: 366453 - RNA, 22 nt, Human
agugcuuugagcguuugaaaag

SEQ ID NO: 366454 - RNA, 22 nt, Human
cuccuuagugccucugcacgag

SEQ ID NO: 366455 - RNA, 22 nt, Human
aaguucaaucagaugaaaaagc

SEQ ID NO: 366456 - RNA, 22 nt, Human
gcugucaggccaugugggccuu

SEQ ID NO: 366457 - RNA, 22 nt, Human
ucuuguccuaagagcuggauuc

SEQ ID NO: 366458 - RNA, 22 nt, Human
uugcagagagguuaggaacuca

SEQ ID NO: 366459 - RNA, 22 nt, Human
ggucccagcuggucacugucag

SEQ ID NO: 366460 - RNA, 22 nt, Human
aggccucaggaagguaaagaag

SEQ ID NO: 366461 - RNA, 22 nt, Human
cugaggcuggggaagggaagug

SEQ ID NO: 366462 - RNA, 22 nt, Human
agacuucucaguuuuauuagua

SEQ ID NO: 366463 - RNA, 22 nt, Human
auaugaagucagacaaacuggg

SEQ ID NO: 366464 - RNA, 22 nt, Human
cugcccuguuuggacagcccgg

SEQ ID NO: 366465 - RNA, 22 nt, Human
acacauaugguugcugcaguga

SEQ ID NO: 366466 - RNA, 22 nt, Human
caaauucaaugaacauguuuaa

SEQ ID NO: 366467 - RNA, 22 nt, Human
auuuccucaugaucauaaugca

SEQ ID NO: 366468 - RNA, 22 nt, Human
auuuucucucaaaccuuaaaau

SEQ ID NO: 366469 - RNA, 22 nt, Human
acuuugcacuaaguuacucauu

SEQ ID NO: 366470 - RNA, 22 nt, Human
auguaauuugcccucaaguuaa

SEQ ID NO: 366471 - RNA, 19 nt, Human
uguguaaagucugugguca

SEQ ID NO: 366472 - RNA, 22 nt, Human
uugcugugucugauggcugaga

SEQ ID NO: 366473 - RNA, 22 nt, Human
uggcuggggagccccgacuccc

SEQ ID NO: 366474 - RNA, 22 nt, Human
cugaaugaggaaaagagugagg

SEQ ID NO: 366475 - RNA, 21 nt, Human
acagccugucaucucaugguc

SEQ ID NO: 366476 - RNA, 22 nt, Human
aggcacugacucaagggagcca

SEQ ID NO: 366477 - RNA, 22 nt, Human
augaagucugcacaugcaugug

SEQ ID NO: 366478 - RNA, 17 nt, Human
gcccaggaaggacggcc

SEQ ID NO: 366479 - RNA, 22 nt, Human
caggaggcuuugggauccaagu

SEQ ID NO: 366480 - RNA, 22 nt, Human
gccuugccucagccauggaaac

SEQ ID NO: 366481 - RNA, 22 nt, Human
agaaaguuuugugcuauauaug

SEQ ID NO: 366482 - RNA, 22 nt, Human
aucucagggcuggagcccugga

SEQ ID NO: 366483 - RNA, 22 nt, Human
ggccaggagcaagccaggcucu

SEQ ID NO: 366484 - RNA, 22 nt, Human
gcagugggcaacaagagcugga

SEQ ID NO: 366485 - RNA, 22 nt, Human
augaggcagaaaaaagucggag

SEQ ID NO: 366486 - RNA, 22 nt, Human
cagcugcaugucuguggugguc

SEQ ID NO: 366487 - RNA, 22 nt, Human
ggagcugugcugggugaucagg

SEQ ID NO: 366488 - RNA, 22 nt, Human
ucaguucaguauacacuauucu

SEQ ID NO: 366489 - RNA, 21 nt, Human
aucuuuauuacgcagagaaga

SEQ ID NO: 366490 - RNA, 23 nt, Human
ucugggcaccuuguugacaugau

SEQ ID NO: 366491 - RNA, 22 nt, Human
gcagccucaaacuccccagcuc

SEQ ID NO: 366492 - RNA, 22 nt, Human
aaaggccaugguuggaguguuu

SEQ ID NO: 366493 - RNA, 22 nt, Human
caggaggaggugagguagaacu

SEQ ID NO: 366494 - RNA, 22 nt, Human
agagaggcugggcguagggcuu

SEQ ID NO: 366495 - RNA, 22 nt, Human
caaggagauaaaauguugagcu

SEQ ID NO: 366496 - RNA, 22 nt, Human
uggcugcugagaaggcagcugu

SEQ ID NO: 366497 - RNA, 22 nt, Human
agggcuggcaagggauugaaau

SEQ ID NO: 366498 - RNA, 22 nt, Human
auggacaggcugagcuuccuca

SEQ ID NO: 366499 - RNA, 22 nt, Human
agcacaggaccaaggaagcugu

SEQ ID NO: 366500 - RNA, 22 nt, Human
ggcaaaaacagcaaugacuuuu

SEQ ID NO: 366501 - RNA, 22 nt, Human
cuagaaaugcucaagagaaagu

SEQ ID NO: 366502 - RNA, 22 nt, Human
cugguucauccccuuccaggaa

SEQ ID NO: 366503 - RNA, 22 nt, Human
uucagaaacaucaguggaugga

SEQ ID NO: 366504 - RNA, 22 nt, Human
gccaggcauuuguuaggugcug

SEQ ID NO: 366505 - RNA, 22 nt, Human
augggcaguuaggaggccagga

SEQ ID NO: 366506 - RNA, 22 nt, Human
agaccauggccauccuaggaaa

SEQ ID NO: 366507 - RNA, 20 nt, Human
uauuuguauuugggaaaguu

SEQ ID NO: 366508 - RNA, 22 nt, Human
uaaauuauggcuggcagagcag

SEQ ID NO: 366509 - RNA, 22 nt, Human
gggugggacugaagucugaggg

SEQ ID NO: 366510 - RNA, 22 nt, Human
ggggccugcgagguucaacuuc

SEQ ID NO: 366511 - RNA, 22 nt, Human
acaugcauacacguacauaccu

SEQ ID NO: 366512 - RNA, 22 nt, Human
ccggggacuuaaagugaaggaa

SEQ ID NO: 366513 - RNA, 22 nt, Human
agugccuugugugugggcagcc

SEQ ID NO: 366514 - RNA, 22 nt, Human
ugggcagauguccucugaagug

SEQ ID NO: 366515 - RNA, 22 nt, Human
ucuuuauugcuacugguuuguc

SEQ ID NO: 366516 - RNA, 22 nt, Human
acccaggagacggaggugcagu

SEQ ID NO: 366517 - RNA, 22 nt, Human
cccucccagaugggcuugaggu

SEQ ID NO: 366518 - RNA, 22 nt, Human
gcagggcagagggagaaucucu

SEQ ID NO: 366519 - RNA, 22 nt, Human
ugagagugguucagcucagaag

SEQ ID NO: 366520 - RNA, 22 nt, Human
aagagggcugcaaucuuauugc

SEQ ID NO: 366521 - RNA, 22 nt, Human
aaucaggaugacugucauuuca

SEQ ID NO: 366522 - RNA, 22 nt, Human
cagggcuggauuucauuucuag

SEQ ID NO: 366523 - RNA, 22 nt, Human
gcugccacuuggucaugucaug

SEQ ID NO: 366524 - RNA, 22 nt, Human
agccagagagccccagguucua

SEQ ID NO: 366525 - RNA, 22 nt, Human
agcaggaacucagggaguucuc

SEQ ID NO: 366526 - RNA, 22 nt, Human
uccuggagcuuccuucauggua

SEQ ID NO: 366527 - RNA, 22 nt, Human
cauauaauguuugaagaugugg

SEQ ID NO: 366528 - RNA, 22 nt, Human
agaaaucaugacuaagagcagu

SEQ ID NO: 366529 - RNA, 22 nt, Human
cuggcugcgucugcucugacag

SEQ ID NO: 366530 - RNA, 22 nt, Human
uuccuuccgggcaccaggcacu

SEQ ID NO: 366531 - RNA, 22 nt, Human
uuucuguagugugguauguagg

SEQ ID NO: 366532 - RNA, 22 nt, Human
gcagcugcagagaccggguggg

SEQ ID NO: 366533 - RNA, 23 nt, Human
uggcucugagagguucagaugcu

SEQ ID NO: 366534 - RNA, 23 nt, Human
uggcccugaaucuguccuggagg

SEQ ID NO: 366535 - RNA, 22 nt, Human
caggugcucccagagaagugcu

SEQ ID NO: 366536 - RNA, 22 nt, Human
uggggugggcaugcgcuguccu

SEQ ID NO: 366537 - RNA, 23 nt, Human
aggagccaggaaccagcuucccc

SEQ ID NO: 366538 - RNA, 19 nt, Human
gcaggcacagcccugggug

SEQ ID NO: 366539 - RNA, 22 nt, Human
ugggcaggagagaagcuaaaga

SEQ ID NO: 366540 - RNA, 22 nt, Human
agcaccugcuuaaugugcagug

SEQ ID NO: 366541 - RNA, 22 nt, Human
uaggggugaggccaggcaucag

SEQ ID NO: 366542 - RNA, 22 nt, Human
aggccuggccugggcggcauug

SEQ ID NO: 366543 - RNA, 22 nt, Human
gguggccucugcaggccucgac

SEQ ID NO: 366544 - RNA, 22 nt, Human
caggggcaagaaugcugucagc

SEQ ID NO: 366545 - RNA, 22 nt, Human
gagcugggcacacgccacuuga

SEQ ID NO: 366546 - RNA, 22 nt, Human
uuccaggaauucagcucucagu

SEQ ID NO: 366547 - RNA, 22 nt, Human
ccaaaauguuugaaugcaugug

SEQ ID NO: 366548 - RNA, 22 nt, Human
uaucuguucaauggaagaugac

SEQ ID NO: 366549 - RNA, 21 nt, Human
ucucugggcccuccugugggg

SEQ ID NO: 366550 - RNA, 22 nt, Human
gcucugcugcuuacuagauggu

SEQ ID NO: 366551 - RNA, 22 nt, Human
uuccuuagggucagccagaucu

SEQ ID NO: 366552 - RNA, 20 nt, Human
agucccagaucaaauuucug

SEQ ID NO: 366553 - RNA, 22 nt, Human
cagcuuuaguaacccacugcuc

SEQ ID NO: 366554 - RNA, 22 nt, Human
cucccuggaggugagcuggcac

SEQ ID NO: 366555 - RNA, 22 nt, Human
uucccaauauucugcuuuuaug

SEQ ID NO: 366556 - RNA, 22 nt, Human
ugccaggcauauggccucuuug

SEQ ID NO: 366557 - RNA, 22 nt, Human
ggccugaggcgucccagcugug

SEQ ID NO: 366558 - RNA, 23 nt, Human
aggcagagccaaggucaaaaccc

SEQ ID NO: 366559 - RNA, 22 nt, Human
uggugcuguggaggggcagaag

SEQ ID NO: 366560 - RNA, 22 nt, Human
gggcacagcugcuacccagugc

SEQ ID NO: 366561 - RNA, 22 nt, Human
cagaaagcuuaggcaaguugga

SEQ ID NO: 366562 - RNA, 22 nt, Human
guggcagguuauaagcaucuca

SEQ ID NO: 366563 - RNA, 22 nt, Human
agggaaauuaaugugagcaaug

SEQ ID NO: 366564 - RNA, 20 nt, Human
guggccucucacauucugag

SEQ ID NO: 366565 - RNA, 22 nt, Human
aaagaucagucugaagcaacau

SEQ ID NO: 366566 - RNA, 20 nt, Human
ugcguguguauuuauuuucu

SEQ ID NO: 366567 - RNA, 22 nt, Human
ucaaaguuuguggcaauuuauu

SEQ ID NO: 366568 - RNA, 20 nt, Human
ggggcaguggcucaugccug

SEQ ID NO: 366569 - RNA, 22 nt, Human
agugauggagcuuccucugcua

SEQ ID NO: 366570 - RNA, 22 nt, Human
ucagcuuucuauguugcuaaac

SEQ ID NO: 366571 - RNA, 22 nt, Human
ugucuuuagagucacaaaacca

SEQ ID NO: 366572 - RNA, 22 nt, Human
ugggagcacccugaggagcuuc

SEQ ID NO: 366573 - RNA, 22 nt, Human
aucagcaagauguaauuucuau

SEQ ID NO: 366574 - RNA, 22 nt, Human
ugcagcagguuccaaaggguua

SEQ ID NO: 366575 - RNA, 22 nt, Human
caggcagcucuaauggaaagug

SEQ ID NO: 366576 - RNA, 22 nt, Human
ucccagccuuccagucugguuu

SEQ ID NO: 366577 - RNA, 22 nt, Human
agagcuggguggacuuguaguu

SEQ ID NO: 366578 - RNA, 22 nt, Human
uaucuaaauggaauauuccaga

SEQ ID NO: 366579 - RNA, 22 nt, Human
agcaguggaccucagugcuauu

SEQ ID NO: 366580 - RNA, 21 nt, Human
aggauuuacuauuaacugugu

SEQ ID NO: 366581 - RNA, 22 nt, Human
agagaauuacagaagaauguca

SEQ ID NO: 366582 - RNA, 22 nt, Human
ucaggcaggacaauuauuuagg

SEQ ID NO: 366583 - RNA, 22 nt, Human
gcugugcuugggaagaaucucu

SEQ ID NO: 366584 - RNA, 22 nt, Human
ccaggggcuggugcugagcugg

SEQ ID NO: 366585 - RNA, 22 nt, Human
ucaccaggauugggcuguaggc

SEQ ID NO: 366586 - RNA, 22 nt, Human
uucucuggaacugaaacaagau

SEQ ID NO: 366587 - RNA, 22 nt, Human
uccccagggcugcagagggugu

SEQ ID NO: 366588 - RNA, 22 nt, Human
cugagcugcucccgcugcagcg

SEQ ID NO: 366589 - RNA, 22 nt, Human
augcaguacauacaaacacuga

SEQ ID NO: 366590 - RNA, 22 nt, Human
agucccaguucgguucuuccuc

SEQ ID NO: 366591 - RNA, 22 nt, Human
uucacagaugccugaugugugg

SEQ ID NO: 366592 - RNA, 22 nt, Human
uacuuuuugucucuuugaaugu

SEQ ID NO: 366593 - RNA, 22 nt, Human
cucacugucuguacuagcugau

SEQ ID NO: 366594 - RNA, 22 nt, Human
ucagggcacauucugcaguggc

SEQ ID NO: 366595 - RNA, 22 nt, Human
cccaggaggucgaagcugcagu

SEQ ID NO: 366596 - RNA, 22 nt, Human
cccagaaggucgaggcugcagu

SEQ ID NO: 366597 - RNA, 22 nt, Human
aaguucaaguaguguuacaugg

SEQ ID NO: 366598 - RNA, 22 nt, Human
cuuuuccacugagccucacaaa

SEQ ID NO: 366599 - RNA, 22 nt, Human
uucauauauaugcacuacguac

SEQ ID NO: 366600 - RNA, 22 nt, Human
gccucccuguagaggccagccu

SEQ ID NO: 366601 - RNA, 22 nt, Human
uucaggauaguggugaguggca

SEQ ID NO: 366602 - RNA, 22 nt, Human
augaugguuguccuaggugcau

SEQ ID NO: 366603 - RNA, 22 nt, Human
agaccugcagggccaggccugc

SEQ ID NO: 366604 - RNA, 22 nt, Human
aacuagaaaacaagaugcugau

SEQ ID NO: 366605 - RNA, 22 nt, Human
aaggcacugagccagccgucuc

SEQ ID NO: 366606 - RNA, 21 nt, Human
aggucagcccagcucuggaag

SEQ ID NO: 366607 - RNA, 19 nt, Human
ucccaggaaccuuuuauuu

SEQ ID NO: 366608 - RNA, 22 nt, Human
aagguucuaagggaagccaugc

SEQ ID NO: 366609 - RNA, 22 nt, Human
gcugguuuccuuaucuauaaag

SEQ ID NO: 366610 - RNA, 22 nt, Human
gauguguuuccaggauuuguuu

SEQ ID NO: 366611 - RNA, 20 nt, Human
aaaagcagccagagauggua

SEQ ID NO: 366612 - RNA, 18 nt, Human
aguaguggguuuagcuuc

SEQ ID NO: 366613 - RNA, 23 nt, Human
gggcugcuccaggccaaggcugg

SEQ ID NO: 366614 - RNA, 22 nt, Human
ccaucuccacugucccugucaa

SEQ ID NO: 366615 - RNA, 22 nt, Human
auuguaucuugucauuaugcau

SEQ ID NO: 366616 - RNA, 22 nt, Human
ucccaggguuacagccagggca

SEQ ID NO: 366617 - RNA, 22 nt, Human
ugauuuccaguugcugggugcu

SEQ ID NO: 366618 - RNA, 22 nt, Human
gcacagggcccugugcguaggu

SEQ ID NO: 366619 - RNA, 22 nt, Human
gagccugagugcugccuccccu

SEQ ID NO: 366620 - RNA, 22 nt, Human
aaugauuuccccuacacagaag

SEQ ID NO: 366621 - RNA, 22 nt, Human
gggcacugugcuaggugcugag

SEQ ID NO: 366622 - RNA, 22 nt, Human
caagagcuagaaauugguuaga

SEQ ID NO: 366623 - RNA, 22 nt, Human
aauguucagaggacaauauaaa

SEQ ID NO: 366624 - RNA, 22 nt, Human
ggauggagguucucagaugcuc

SEQ ID NO: 366625 - RNA, 22 nt, Human
augggaggguggaaaggcucug

SEQ ID NO: 366626 - RNA, 22 nt, Human
uagaugcuacaauuuuguacuc

SEQ ID NO: 366627 - RNA, 22 nt, Human
uuuaacagaugugaaauuuuca

SEQ ID NO: 366628 - RNA, 22 nt, Human
auucuccaucaccacuggcacu

SEQ ID NO: 366629 - RNA, 22 nt, Human
gcugcaggcgccugcggucucu

SEQ ID NO: 366630 - RNA, 22 nt, Human
gagagcugcauucucagacaca

SEQ ID NO: 366631 - RNA, 22 nt, Human
ccagggugugagaaggaaguag

SEQ ID NO: 366632 - RNA, 22 nt, Human
cuccagggaaaggggcguccgc

SEQ ID NO: 366633 - RNA, 22 nt, Human
ccuaagaauuaaugaauacacc

SEQ ID NO: 366634 - RNA, 19 nt, Human
ucaaagcaagcauguucug

SEQ ID NO: 366635 - RNA, 22 nt, Human
aaaaguucccugguuagaaaag

SEQ ID NO: 366636 - RNA, 22 nt, Human
gugucccagcagcacauuggcu

SEQ ID NO: 366637 - RNA, 22 nt, Human
auguacaaaaugccacugaauu

SEQ ID NO: 366638 - RNA, 22 nt, Human
ggcuuuauuaacucauccguaa

SEQ ID NO: 366639 - RNA, 22 nt, Human
aaugggaagccagaagacaagg

SEQ ID NO: 366640 - RNA, 22 nt, Human
aauaauuauuugagagcagacc

SEQ ID NO: 366641 - RNA, 22 nt, Human
uucuuuggggaauauucugguu

SEQ ID NO: 366642 - RNA, 22 nt, Human
uuggaaagcaagcuggacauac

SEQ ID NO: 366643 - RNA, 22 nt, Human
augcugagacuggagcagcugg

SEQ ID NO: 366644 - RNA, 22 nt, Human
cuggggggagcugcguccagca

SEQ ID NO: 366645 - RNA, 22 nt, Human
ccaggcccugcuccucacacca

SEQ ID NO: 366646 - RNA, 22 nt, Human
aagggcugaaagaccuugggca

SEQ ID NO: 366647 - RNA, 21 nt, Human
cugugcuucuuccuaagccag

SEQ ID NO: 366648 - RNA, 23 nt, Human
cccuggaguaaauucuuggaagg

SEQ ID NO: 366649 - RNA, 22 nt, Human
gcucaggaaggcucaaccagga

SEQ ID NO: 366650 - RNA, 22 nt, Human
ugggcugccggcaggcucugcc

SEQ ID NO: 366651 - RNA, 22 nt, Human
ugggggugaaagucuggacagu

SEQ ID NO: 366652 - RNA, 22 nt, Human
gaggaugugucuggucugggca

SEQ ID NO: 366653 - RNA, 19 nt, Human
uccaggagcaaagccaguu

SEQ ID NO: 366654 - RNA, 22 nt, Human
ugaggcagcuuuuucugugugu

SEQ ID NO: 366655 - RNA, 22 nt, Human
uuuaacagguaaaguaaaugug

SEQ ID NO: 366656 - RNA, 22 nt, Human
aguguuccacacaucuggggaa

SEQ ID NO: 366657 - RNA, 22 nt, Human
ugcuggcccaugaagacgcagu

SEQ ID NO: 366658 - RNA, 22 nt, Human
cuuucacauaauugaccuugaa

SEQ ID NO: 366659 - RNA, 22 nt, Human
auaaacaguaaaugugagcagu

SEQ ID NO: 366660 - RNA, 22 nt, Human
aagcugccaaugguaagcugcu

SEQ ID NO: 366661 - RNA, 22 nt, Human
ugcagagggacagccacagcuc

SEQ ID NO: 366662 - RNA, 22 nt, Human
ggcugagacuagagugaggcau

SEQ ID NO: 366663 - RNA, 22 nt, Human
ugccugucuccucugcagggug

SEQ ID NO: 366664 - RNA, 20 nt, Human
aggcugaguucuaugcacuu

SEQ ID NO: 366665 - RNA, 22 nt, Human
acuauacagaagaggauaggaa

SEQ ID NO: 366666 - RNA, 22 nt, Human
ugggcugcagggguugagagcu

SEQ ID NO: 366667 - RNA, 22 nt, Human
caugggcuuuggaggcuggagg

SEQ ID NO: 366668 - RNA, 22 nt, Human
aggagguggcugaacuugaggg

SEQ ID NO: 366669 - RNA, 22 nt, Human
uucaagaugccagggacgcggc

SEQ ID NO: 366670 - RNA, 22 nt, Human
ucccagagcccaaguuggagag

SEQ ID NO: 366671 - RNA, 22 nt, Human
uucacaguggcugugccauuug

SEQ ID NO: 366672 - RNA, 22 nt, Human
uucaucaauguguuuaauaaug

SEQ ID NO: 366673 - RNA, 22 nt, Human
auuuaagauugcguauucaugu

SEQ ID NO: 366674 - RNA, 22 nt, Human
auaucuuuuagagcaagcuugu

SEQ ID NO: 366675 - RNA, 22 nt, Human
ccuucagaccuagacaggaauc

SEQ ID NO: 366676 - RNA, 22 nt, Human
ucagaguguuuuacuaaacaag

SEQ ID NO: 366677 - RNA, 22 nt, Human
cugcaggcucgaagacacggau

SEQ ID NO: 366678 - RNA, 22 nt, Human
uggagcugagaaguggagcucu

SEQ ID NO: 366679 - RNA, 22 nt, Human
aaaugcaggaaauuaugcuuuu

SEQ ID NO: 366680 - RNA, 18 nt, Human
ucagagagaauaguaauu

SEQ ID NO: 366681 - RNA, 22 nt, Human
acauauauuacuaguaaagaca

SEQ ID NO: 366682 - RNA, 22 nt, Human
acauaauaggugccugaauauu

SEQ ID NO: 366683 - RNA, 22 nt, Human
gagcucauucauucauugccug

SEQ ID NO: 366684 - RNA, 22 nt, Human
gaguccaguuguucacagaggc

SEQ ID NO: 366685 - RNA, 22 nt, Human
agugcuuugaacgaaaggcuga

SEQ ID NO: 366686 - RNA, 22 nt, Human
gaagagcugugauucaggcuua

SEQ ID NO: 366687 - RNA, 22 nt, Human
agcacagauucugaagaguccu

SEQ ID NO: 366688 - RNA, 21 nt, Human
aacugcuggucuuuucugucu

SEQ ID NO: 366689 - RNA, 22 nt, Human
uccugggcuguggccccgggca

SEQ ID NO: 366690 - RNA, 22 nt, Human
cagaggcagaauggagauuugg

SEQ ID NO: 366691 - RNA, 22 nt, Human
gcagcuuucuaagcuuuauugc

SEQ ID NO: 366692 - RNA, 21 nt, Human
acagggcaugcagcuggcugu

SEQ ID NO: 366693 - RNA, 22 nt, Human
gggcacugaaugccaagcuagg

SEQ ID NO: 366694 - RNA, 21 nt, Human
caaguccuuugccaaagugcu

SEQ ID NO: 366695 - RNA, 22 nt, Human
gagcuuuaagggcacuggucuu

SEQ ID NO: 366696 - RNA, 19 nt, Human
uagcugccuguuaccucca

SEQ ID NO: 366697 - RNA, 22 nt, Human
gggccugugcacaguucuguua

SEQ ID NO: 366698 - RNA, 22 nt, Human
gggcagcuggauaguuuuaaau

SEQ ID NO: 366699 - RNA, 22 nt, Human
gcagacagcauguugggcuauu

SEQ ID NO: 366700 - RNA, 22 nt, Human
caggugucuaauucucaccccc

SEQ ID NO: 366701 - RNA, 22 nt, Human
cucaugauguagcgaaugagaa

SEQ ID NO: 366702 - RNA, 22 nt, Human
agguaagggucacaguucauau

SEQ ID NO: 366703 - RNA, 22 nt, Human
caggcccagugaucagggcucu

SEQ ID NO: 366704 - RNA, 22 nt, Human
uucuucaguguagcaacuguau

SEQ ID NO: 366705 - RNA, 22 nt, Human
gaaguucaggugggaauugagc

SEQ ID NO: 366706 - RNA, 22 nt, Human
acccaggccugagagacaggag

SEQ ID NO: 366707 - RNA, 22 nt, Human
cccccagccagcagugcucagc

SEQ ID NO: 366708 - RNA, 22 nt, Human
uggggaggacgggcgccuuccu

SEQ ID NO: 366709 - RNA, 22 nt, Human
aggugccaauuuucagugaaca

SEQ ID NO: 366710 - RNA, 22 nt, Human
gaggggcugcccuggugucagg

SEQ ID NO: 366711 - RNA, 22 nt, Human
ugacauuuaagccucugauuuc

SEQ ID NO: 366712 - RNA, 22 nt, Human
cagcuugcuaauuuugacuuca

SEQ ID NO: 366713 - RNA, 22 nt, Human
agaugagggguagaaaggacuu

SEQ ID NO: 366714 - RNA, 22 nt, Human
acaauguaggauauguacuugu

SEQ ID NO: 366715 - RNA, 22 nt, Human
ugggggagauuagagcuucuua

SEQ ID NO: 366716 - RNA, 22 nt, Human
gccaggcacugcucuaagcccu

SEQ ID NO: 366717 - RNA, 22 nt, Human
uuuaggcaagggcaagauuauc

SEQ ID NO: 366718 - RNA, 22 nt, Human
uaggcuggaggaagcagugccu

SEQ ID NO: 366719 - RNA, 22 nt, Human
aacaugaaaguugcuaagugca

SEQ ID NO: 366720 - RNA, 22 nt, Human
uagaggugacacugagaccaua

SEQ ID NO: 366721 - RNA, 22 nt, Human
uaagaacaagauguuccuguuu

SEQ ID NO: 366722 - RNA, 22 nt, Human
cuguuuuugugcugugucuccc

SEQ ID NO: 366723 - RNA, 22 nt, Human
cuaaaauuaucaagauaauucc

SEQ ID NO: 366724 - RNA, 22 nt, Human
agcagcauggcugacuaaagac

SEQ ID NO: 366725 - RNA, 22 nt, Human
caggaggcagaggaugcccagu

SEQ ID NO: 366726 - RNA, 22 nt, Human
cacacaggagagugcuggaggu

SEQ ID NO: 366727 - RNA, 20 nt, Human
cagcaggaaaagugccucag

SEQ ID NO: 366728 - RNA, 22 nt, Human
uucacagggccacuggcaggag

SEQ ID NO: 366729 - RNA, 22 nt, Human
gcuggccucuggagaagggcuu

SEQ ID NO: 366730 - RNA, 22 nt, Human
cagaauuuuucgaauguacugu

SEQ ID NO: 366731 - RNA, 22 nt, Human
ggccucucucccuggcuugcag

SEQ ID NO: 366732 - RNA, 22 nt, Human
cuuaaaaucuggcaguuagcua

SEQ ID NO: 366733 - RNA, 20 nt, Human
agcaccagugggggcagccc

SEQ ID NO: 366734 - RNA, 22 nt, Human
agcuggagaucaugcugauacu

SEQ ID NO: 366735 - RNA, 22 nt, Human
agaugauggccauguccucucc

SEQ ID NO: 366736 - RNA, 22 nt, Human
caagcugguaucagcuagagcg

SEQ ID NO: 366737 - RNA, 22 nt, Human
ugcuggggauccguaccaaccc

SEQ ID NO: 366738 - RNA, 22 nt, Human
auauaggcuaacaacuauugag

SEQ ID NO: 366739 - RNA, 22 nt, Human
caggcagcauuuacucugauga

SEQ ID NO: 366740 - RNA, 22 nt, Human
caucagaaucugagucucugcc

SEQ ID NO: 366741 - RNA, 22 nt, Human
uggaaggcaacggagugagcug

SEQ ID NO: 366742 - RNA, 22 nt, Human
gcuuucucuucacugauguuca

SEQ ID NO: 366743 - RNA, 22 nt, Human
uuugaauguuuuagguacuuaa

SEQ ID NO: 366744 - RNA, 22 nt, Human
ugccugggaaccaauccuggcu

SEQ ID NO: 366745 - RNA, 22 nt, Human
acaaagucucuaauaaucuucu

SEQ ID NO: 366746 - RNA, 22 nt, Human
agagugcagauaagagaauguu

SEQ ID NO: 366747 - RNA, 20 nt, Human
cucugcagcaaggccugggu

SEQ ID NO: 366748 - RNA, 22 nt, Human
aaggaagauauaucaagcuuaa

SEQ ID NO: 366749 - RNA, 19 nt, Human
uccugcagaccagaccugu

SEQ ID NO: 366750 - RNA, 22 nt, Human
ugcugggggugucucaccaggc

SEQ ID NO: 366751 - RNA, 22 nt, Human
gcagggaccugccacugcuguc

SEQ ID NO: 366752 - RNA, 22 nt, Human
ccaguggacaauuucugaggaa

SEQ ID NO: 366753 - RNA, 22 nt, Human
uagaacagaguuccagugauca

SEQ ID NO: 366754 - RNA, 22 nt, Human
aggcaguuuauccccagagccu

SEQ ID NO: 366755 - RNA, 22 nt, Human
gcggcaggaagagcgcagcccc

SEQ ID NO: 366756 - RNA, 22 nt, Human
auauuucaugggguuccauacu

SEQ ID NO: 366757 - RNA, 22 nt, Human
gagacugcauagauggccacaa

SEQ ID NO: 366758 - RNA, 22 nt, Human
gucaggauguuuauucuccagu

SEQ ID NO: 366759 - RNA, 22 nt, Human
cugggcacuugcucacagcucu

SEQ ID NO: 366760 - RNA, 22 nt, Human
cuucaagauccauagauauugc

SEQ ID NO: 366761 - RNA, 23 nt, Human
uuuauauuccuaaugucuugagc

SEQ ID NO: 366762 - RNA, 22 nt, Human
gcagagccuugcgucaugugcc

SEQ ID NO: 366763 - RNA, 22 nt, Human
agcucccugagaugccacagca

SEQ ID NO: 366764 - RNA, 22 nt, Human
gaaaucugcggugaggccugag

SEQ ID NO: 366765 - RNA, 22 nt, Human
aauauuucugcagaaugguuuu

SEQ ID NO: 366766 - RNA, 22 nt, Human
uuccauaauaggcuuaagugaa

SEQ ID NO: 366767 - RNA, 22 nt, Human
aguuuuucugcuggucucacua

SEQ ID NO: 366768 - RNA, 22 nt, Human
ccagcuccgggaguugcugcug

SEQ ID NO: 366769 - RNA, 22 nt, Human
ggcagcugugaagugccucaca

SEQ ID NO: 366770 - RNA, 22 nt, Human
ugcauauuuguaugauguuuag

SEQ ID NO: 366771 - RNA, 22 nt, Human
ccugggcuuucaaaaccagccu

SEQ ID NO: 366772 - RNA, 22 nt, Human
accucugcuucccggguucaag

SEQ ID NO: 366773 - RNA, 22 nt, Human
cacagcuucugagugaggauuu

SEQ ID NO: 366774 - RNA, 21 nt, Human
uggagcugaauuuuuggcauc

SEQ ID NO: 366775 - RNA, 22 nt, Human
cuguaugaggaucagacuggac

SEQ ID NO: 366776 - RNA, 18 nt, Human
gaggccugagaaccaggu

SEQ ID NO: 366777 - RNA, 22 nt, Human
auuaugcugguuuacacauuuu

SEQ ID NO: 366778 - RNA, 22 nt, Human
agggcugggcugcuuguuguca

SEQ ID NO: 366779 - RNA, 22 nt, Human
ggcucugcugguaagaugccuc

SEQ ID NO: 366780 - RNA, 22 nt, Human
gcugccuccugaaagcgcucug

SEQ ID NO: 366781 - RNA, 22 nt, Human
cucccaagggguaagggagcug

SEQ ID NO: 366782 - RNA, 22 nt, Human
aaggcugugucagaagcucccu

SEQ ID NO: 366783 - RNA, 22 nt, Human
ugucugagugugccugggcauu

SEQ ID NO: 366784 - RNA, 22 nt, Human
agggcagaaaucgauuacaccu

SEQ ID NO: 366785 - RNA, 22 nt, Human
accaggcagagcugggccuuaa

SEQ ID NO: 366786 - RNA, 22 nt, Human
ggccucugcaacuggcuguggc

SEQ ID NO: 366787 - RNA, 22 nt, Human
ccaaggcuggagugcaguggcg

SEQ ID NO: 366788 - RNA, 22 nt, Human
aaggccugggaggccucucuuc

SEQ ID NO: 366789 - RNA, 20 nt, Human
gucugaggagcagugggaaa

SEQ ID NO: 366790 - RNA, 22 nt, Human
aaguucaagcucugccuaaaau

SEQ ID NO: 366791 - RNA, 22 nt, Human
ucuuugcacugugcaagcagaa

SEQ ID NO: 366792 - RNA, 22 nt, Human
uugcauugaaugcacauuuuua

SEQ ID NO: 366793 - RNA, 22 nt, Human
ggcugcaguuugucuuuugcuu

SEQ ID NO: 366794 - RNA, 22 nt, Human
augcacgccccacacuggugug

SEQ ID NO: 366795 - RNA, 22 nt, Human
ggcugugggaugcauaggagcu

SEQ ID NO: 366796 - RNA, 22 nt, Human
uaaacauggcuguuucaguuau

SEQ ID NO: 366797 - RNA, 22 nt, Human
cuggguggaaagugcugagaau

SEQ ID NO: 366798 - RNA, 22 nt, Human
gcuggcuguuggagguaccugc

SEQ ID NO: 366799 - RNA, 22 nt, Human
aggugucuuugcggcccgccgc

SEQ ID NO: 366800 - RNA, 22 nt, Human
ucugggaagcugguccuguucu

SEQ ID NO: 366801 - RNA, 22 nt, Human
agagggcccauguugggcugcu

SEQ ID NO: 366802 - RNA, 22 nt, Human
guugaaaguggagaaccugguu

SEQ ID NO: 366803 - RNA, 22 nt, Human
uacauuugcuuugauuuucagc

SEQ ID NO: 366804 - RNA, 22 nt, Human
ggcucuggucagugaggggccu

SEQ ID NO: 366805 - RNA, 22 nt, Human
acauuucuuccacaugcugcug

SEQ ID NO: 366806 - RNA, 22 nt, Human
aucuggcugcugugcuuaagcu

SEQ ID NO: 366807 - RNA, 22 nt, Human
ucauuuguucaucugcucuucu

SEQ ID NO: 366808 - RNA, 22 nt, Human
ucugggagauccaagcagaacu

SEQ ID NO: 366809 - RNA, 22 nt, Human
ggucccagaauugguuagcaca

SEQ ID NO: 366810 - RNA, 22 nt, Human
auaauguagguauguguauuua

SEQ ID NO: 366811 - RNA, 22 nt, Human
caggggcuagcacuuaauguuu

SEQ ID NO: 366812 - RNA, 22 nt, Human
aaaggucagacuuaggcugggc

SEQ ID NO: 366813 - RNA, 22 nt, Human
gaguccuugucauaauucagug

SEQ ID NO: 366814 - RNA, 22 nt, Human
agacaaaugguaauuaugucua

SEQ ID NO: 366815 - RNA, 22 nt, Human
auuucaaggcuauuaauauaaa

SEQ ID NO: 366816 - RNA, 22 nt, Human
ucacaaauagcuauauuaagga

SEQ ID NO: 366817 - RNA, 22 nt, Human
ugcuuaaaauaguucauuuuug

SEQ ID NO: 366818 - RNA, 19 nt, Human
gggaugggcccucacccuc

SEQ ID NO: 366819 - RNA, 21 nt, Human
ccuucucuugcuucagcuuca

SEQ ID NO: 366820 - RNA, 22 nt, Human
aggccagagaggggaccagccu

SEQ ID NO: 366821 - RNA, 22 nt, Human
aguguuugagacacauuucacu

SEQ ID NO: 366822 - RNA, 22 nt, Human
guaaacaucgacccaacagggg

SEQ ID NO: 366823 - RNA, 17 nt, Human
gcaguggagggguaguu

SEQ ID NO: 366824 - RNA, 22 nt, Human
ucagauggcacacagagccugc

SEQ ID NO: 366825 - RNA, 21 nt, Human
ucagggcagcugcucuucaga

SEQ ID NO: 366826 - RNA, 22 nt, Human
gagacagcacaggccacuggga

SEQ ID NO: 366827 - RNA, 22 nt, Human
gauuuauugucccuguccugcu

SEQ ID NO: 366828 - RNA, 22 nt, Human
gccuggagaagauggaacuagc

SEQ ID NO: 366829 - RNA, 22 nt, Human
ucucaggaucuaauacauggua

SEQ ID NO: 366830 - RNA, 22 nt, Human
uacuuuuagccuauuugauucu

SEQ ID NO: 366831 - RNA, 22 nt, Human
ugggcaggugcuauuuuccaug

SEQ ID NO: 366832 - RNA, 22 nt, Human
cauuuguuggucagauuguagu

SEQ ID NO: 366833 - RNA, 22 nt, Human
gaaacugugaggaucuuaacuu

SEQ ID NO: 366834 - RNA, 22 nt, Human
agcuaccuggcuuaucacuguc

SEQ ID NO: 366835 - RNA, 22 nt, Human
uucauuaguucugaagaugucu

SEQ ID NO: 366836 - RNA, 19 nt, Human
ucaguggaugaacauguuu

SEQ ID NO: 366837 - RNA, 22 nt, Human
aaaaaugcuuggacuuaauaaa

SEQ ID NO: 366838 - RNA, 22 nt, Human
cauuucuguucucuuccuguac

SEQ ID NO: 366839 - RNA, 20 nt, Human
aagagaggaaguuauacuag

SEQ ID NO: 366840 - RNA, 22 nt, Human
cugcuuugauuagaagaguaca

SEQ ID NO: 366841 - RNA, 22 nt, Human
gcuggcaggguucucacugaaa

SEQ ID NO: 366842 - RNA, 22 nt, Human
acacagggcaaugcuuugaccu

SEQ ID NO: 366843 - RNA, 22 nt, Human
ccugggcaaaugccagagacaa

SEQ ID NO: 366844 - RNA, 22 nt, Human
ccugccugggcucacuugccag

SEQ ID NO: 366845 - RNA, 22 nt, Human
ugcuuccugaggccgucuucuc

SEQ ID NO: 366846 - RNA, 22 nt, Human
uucaagaucgaguuuaaaguga

SEQ ID NO: 366847 - RNA, 22 nt, Human
gaaaauuauugaaaauggcucu

SEQ ID NO: 366848 - RNA, 22 nt, Human
ucugucugcaccuaagcacagu

SEQ ID NO: 366849 - RNA, 22 nt, Human
gcagcacauauaaacaaagaga

SEQ ID NO: 366850 - RNA, 22 nt, Human
agaccaagaaaggaugaggauc

SEQ ID NO: 366851 - RNA, 22 nt, Human
gcagggcaugggcccugucugc

SEQ ID NO: 366852 - RNA, 20 nt, Human
accucugcaucaauccuuug

SEQ ID NO: 366853 - RNA, 18 nt, Human
aaaaugcaggcgacaugg

SEQ ID NO: 366854 - RNA, 22 nt, Human
ucaaaauuuuauuucucaagga

SEQ ID NO: 366855 - RNA, 22 nt, Human
aggcucugcagaccccagcugu

SEQ ID NO: 366856 - RNA, 22 nt, Human
acugugcaaugaguaauaaacu

SEQ ID NO: 366857 - RNA, 22 nt, Human
agaguucugcucuucucaguga

SEQ ID NO: 366858 - RNA, 22 nt, Human
ggggaggcugaugugggcaaag

SEQ ID NO: 366859 - RNA, 22 nt, Human
gagagcugucagcguagcaccg

SEQ ID NO: 366860 - RNA, 21 nt, Human
aggcucccagaaaugggcauc

SEQ ID NO: 366861 - RNA, 22 nt, Human
aggcagcagagguugaggaaag

SEQ ID NO: 366862 - RNA, 22 nt, Human
ccugcacuaccuggggcugcug

SEQ ID NO: 366863 - RNA, 22 nt, Human
ugaggggagcccgcccuggacg

SEQ ID NO: 366864 - RNA, 22 nt, Human
ggagccagaggcugcugcugug

SEQ ID NO: 366865 - RNA, 22 nt, Human
aggcagcauuucugcuuaucca

SEQ ID NO: 366866 - RNA, 22 nt, Human
uggggcugugagacuacaggau

SEQ ID NO: 366867 - RNA, 22 nt, Human
gcuguucugcgucccaggcugg

SEQ ID NO: 366868 - RNA, 20 nt, Human
uccuggccucccuggggcuc

SEQ ID NO: 366869 - RNA, 23 nt, Human
agcagccagagauccucggcccu

SEQ ID NO: 366870 - RNA, 22 nt, Human
caggaagcugugaaggagacgg

SEQ ID NO: 366871 - RNA, 22 nt, Human
ugugcaggugcaggaagggggc

SEQ ID NO: 366872 - RNA, 22 nt, Human
uccucuggcccagcugccucug

SEQ ID NO: 366873 - RNA, 21 nt, Human
ggugggcacaggagagcagag

SEQ ID NO: 366874 - RNA, 22 nt, Human
ccaaaauuaagccucuuauguu

SEQ ID NO: 366875 - RNA, 22 nt, Human
gggagggaagguaccuguguga

SEQ ID NO: 366876 - RNA, 22 nt, Human
agucccagcucagaaccacuag

SEQ ID NO: 366877 - RNA, 22 nt, Human
cagagccagcccacuguucccg

SEQ ID NO: 366878 - RNA, 22 nt, Human
gaaggagagggucaaggauaau

SEQ ID NO: 366879 - RNA, 22 nt, Human
uggcagcaauuugugauguuga

SEQ ID NO: 366880 - RNA, 22 nt, Human
uugaacuguaagcaugucugcc

SEQ ID NO: 366881 - RNA, 22 nt, Human
gcugucugggaugucacugcug

SEQ ID NO: 366882 - RNA, 22 nt, Human
acugccuugaaagauuguugag

SEQ ID NO: 366883 - RNA, 22 nt, Human
ucccaggcuggggccaggugac

SEQ ID NO: 366884 - RNA, 22 nt, Human
caugugucaaaugauguagcug

SEQ ID NO: 366885 - RNA, 22 nt, Human
ugaggcaggacuugcauaaagu

SEQ ID NO: 366886 - RNA, 21 nt, Human
aagaagcaauuuauuggaagg

SEQ ID NO: 366887 - RNA, 22 nt, Human
uuccuguaugucagugaagagc

SEQ ID NO: 366888 - RNA, 22 nt, Human
gcccuuccaacccagagggcaa

SEQ ID NO: 366889 - RNA, 22 nt, Human
gcagaggccuagguggaaggcc

SEQ ID NO: 366890 - RNA, 22 nt, Human
gugccugguuuggggaauguuc

SEQ ID NO: 366891 - RNA, 22 nt, Human
aacauucuauuuugcuaaaaca

SEQ ID NO: 366892 - RNA, 22 nt, Human
ccagaggacuugggggcugaau

SEQ ID NO: 366893 - RNA, 22 nt, Human
uuucucuaaauagggaggcuua

SEQ ID NO: 366894 - RNA, 22 nt, Human
ccuggcuggcaagaucgugaag

SEQ ID NO: 366895 - RNA, 22 nt, Human
ugcugccucagcuuccugggcu

SEQ ID NO: 366896 - RNA, 22 nt, Human
uacucagagucauugcccuucu

SEQ ID NO: 366897 - RNA, 22 nt, Human
auggaaagccaguguuccauca

SEQ ID NO: 366898 - RNA, 22 nt, Human
ucucuucugaaaccugucuuua

SEQ ID NO: 366899 - RNA, 22 nt, Human
agaaacauuuagauuauauguc

SEQ ID NO: 366900 - RNA, 22 nt, Human
cugggcaguuuuacaucauugc

SEQ ID NO: 366901 - RNA, 22 nt, Human
auuugaagaaaguuuucuagau

SEQ ID NO: 366902 - RNA, 22 nt, Human
ccagccugguucagaauuggcu

SEQ ID NO: 366903 - RNA, 22 nt, Human
aaagccuugagauccuauaguu

SEQ ID NO: 366904 - RNA, 22 nt, Human
gccaggagaaaaggcgaaugau

SEQ ID NO: 366905 - RNA, 22 nt, Human
cagcugcccaagccccagaugu

SEQ ID NO: 366906 - RNA, 22 nt, Human
ugcugcuccccagcacacagca

SEQ ID NO: 366907 - RNA, 22 nt, Human
uauaauuaguaaauggcagauu

SEQ ID NO: 366908 - RNA, 22 nt, Human
aggcacagcacaccuggccccc

SEQ ID NO: 366909 - RNA, 22 nt, Human
ggcugcucuucuuggcgaccuc

SEQ ID NO: 366910 - RNA, 22 nt, Human
uuccagcuaacucacaucccuu

SEQ ID NO: 366911 - RNA, 22 nt, Human
cagcuggacuuuugauagaagu

SEQ ID NO: 366912 - RNA, 22 nt, Human
accugagaaugggggcaugugu

SEQ ID NO: 366913 - RNA, 21 nt, Human
gagagggcauuauaggaagug

SEQ ID NO: 366914 - RNA, 22 nt, Human
agccuggccugggcaggcacau

SEQ ID NO: 366915 - RNA, 22 nt, Human
agccacagggggugagggacaa

SEQ ID NO: 366916 - RNA, 22 nt, Human
caggacugauguuccuccagcc

SEQ ID NO: 366917 - RNA, 22 nt, Human
ucugucugacaggguaugaacu

SEQ ID NO: 366918 - RNA, 22 nt, Human
ugggcacuauggcucugugcac

SEQ ID NO: 366919 - RNA, 19 nt, Human
ggaccagguccugggcagc

SEQ ID NO: 366920 - RNA, 22 nt, Human
ccaaaauuauuacauuuguagg

SEQ ID NO: 366921 - RNA, 22 nt, Human
gaguaagagcuggcuuuggugu

SEQ ID NO: 366922 - RNA, 22 nt, Human
gcaggcaguuugcuuuucccuc

SEQ ID NO: 366923 - RNA, 22 nt, Human
aagacuguacauuuuccagucu

SEQ ID NO: 366924 - RNA, 23 nt, Human
acaaaugcccauacaucuaguuc

SEQ ID NO: 366925 - RNA, 20 nt, Human
uuucagugguuugugccuag

SEQ ID NO: 366926 - RNA, 22 nt, Human
aaaaggcauggagguugauagu

SEQ ID NO: 366927 - RNA, 22 nt, Human
cugucucuguugccuguaggug

SEQ ID NO: 366928 - RNA, 22 nt, Human
ucaaagagcuauucaguugugg

SEQ ID NO: 366929 - RNA, 22 nt, Human
aaucaguucuacaucuuaucca

SEQ ID NO: 366930 - RNA, 22 nt, Human
gggcuggcaggaccugggcuga

SEQ ID NO: 366931 - RNA, 22 nt, Human
uacuaucucuucuaacuucaga

SEQ ID NO: 366932 - RNA, 22 nt, Human
cucuucuuggcccccaugaggg

SEQ ID NO: 366933 - RNA, 22 nt, Human
uaaagguacgaagugagggauu

SEQ ID NO: 366934 - RNA, 23 nt, Human
ucuguucaaggcuuucuccuuga

SEQ ID NO: 366935 - RNA, 22 nt, Human
uggccugguaccacauagauuu

SEQ ID NO: 366936 - RNA, 22 nt, Human
agggcagcagcggcccaggccu

SEQ ID NO: 366937 - RNA, 22 nt, Human
acagcauucaauaaauaauaac

SEQ ID NO: 366938 - RNA, 22 nt, Human
gagccugggacugggggucaug

SEQ ID NO: 366939 - RNA, 22 nt, Human
aaaauccucuaauucuagaaua

SEQ ID NO: 366940 - RNA, 20 nt, Human
cugagcugagcuccaugggu

SEQ ID NO: 366941 - RNA, 22 nt, Human
aggguggcuggaggaaucagaa

SEQ ID NO: 366942 - RNA, 22 nt, Human
ggcagccaugucccagggcuuc

SEQ ID NO: 366943 - RNA, 22 nt, Human
agaaacugaauuauuucugagg

SEQ ID NO: 366944 - RNA, 22 nt, Human
cugcucugcaaggcacagugau

SEQ ID NO: 366945 - RNA, 22 nt, Human
ggcucccacccauagggcgagu

SEQ ID NO: 366946 - RNA, 22 nt, Human
cugacucuccucaagcauaaau

SEQ ID NO: 366947 - RNA, 22 nt, Human
agcaccugucacaagcagaagg

SEQ ID NO: 366948 - RNA, 22 nt, Human
ucaguggauugacaugaaaaag

SEQ ID NO: 366949 - RNA, 16 nt, Human
agcagccagcacugga

SEQ ID NO: 366950 - RNA, 22 nt, Human
auguuucaccaguuuuauaaga

SEQ ID NO: 366951 - RNA, 19 nt, Human
agugguagaugagcaggag

SEQ ID NO: 366952 - RNA, 22 nt, Human
ucugggcucuuaguguacccuc

SEQ ID NO: 366953 - RNA, 22 nt, Human
aagugacaaaaggguauccaaa

SEQ ID NO: 366954 - RNA, 22 nt, Human
uaggugucugcucuuauuuaac

SEQ ID NO: 366955 - RNA, 22 nt, Human
uaacagaaacagauaaguguaa

SEQ ID NO: 366956 - RNA, 19 nt, Human
auacacauacguaaacuga

SEQ ID NO: 366957 - RNA, 22 nt, Human
auuuguagugaagugaaaauaa

SEQ ID NO: 366958 - RNA, 22 nt, Human
agaacuuaggaacaacagcuua

SEQ ID NO: 366959 - RNA, 17 nt, Human
uccagagcacagagcuc

SEQ ID NO: 366960 - RNA, 22 nt, Human
auagugguuggauaugucagag

SEQ ID NO: 366961 - RNA, 22 nt, Human
ccagggcaacgcugucucagag

SEQ ID NO: 366962 - RNA, 22 nt, Human
aucuauuaugcugagaaacugu

SEQ ID NO: 366963 - RNA, 22 nt, Human
agugcuguuagguuaauauagu

SEQ ID NO: 366964 - RNA, 22 nt, Human
cuuguucaguugccucuccugc

SEQ ID NO: 366965 - RNA, 22 nt, Human
gggcaagcucuucagaagcucu

SEQ ID NO: 366966 - RNA, 20 nt, Human
ucagugauuuugaagaggaa

SEQ ID NO: 366967 - RNA, 22 nt, Human
aagaaaucugauauuuguuuca

SEQ ID NO: 366968 - RNA, 19 nt, Human
aagaagcaauaagcuguga

SEQ ID NO: 366969 - RNA, 22 nt, Human
ugcucccaaacgaccuacugug

SEQ ID NO: 366970 - RNA, 22 nt, Human
ucacaaaugaggaaaucgagca

SEQ ID NO: 366971 - RNA, 22 nt, Human
cacuggggugggccugguagag

SEQ ID NO: 366972 - RNA, 22 nt, Human
cccagcagugacccagugauac

SEQ ID NO: 366973 - RNA, 22 nt, Human
ggcauuuaauccaucugauuga

SEQ ID NO: 366974 - RNA, 19 nt, Human
gguagaagggaaguguuuu

SEQ ID NO: 366975 - RNA, 22 nt, Human
gggucuggacggcugcaggaag

SEQ ID NO: 366976 - RNA, 22 nt, Human
gguacaauccacuguggguuag

SEQ ID NO: 366977 - RNA, 22 nt, Human
ccagugcuaagguagccucugc

SEQ ID NO: 366978 - RNA, 22 nt, Human
uuccaagagcuuuaauuguuga

SEQ ID NO: 366979 - RNA, 22 nt, Human
gguggggucacgacagagggaa

SEQ ID NO: 366980 - RNA, 22 nt, Human
ucacaggguaucugggauggau

SEQ ID NO: 366981 - RNA, 22 nt, Human
gcugcugguccucagagcucau

SEQ ID NO: 366982 - RNA, 22 nt, Human
gcagcuuugaagacuuauuugc

SEQ ID NO: 366983 - RNA, 18 nt, Human
ccuggcagccaugcgcgc

SEQ ID NO: 366984 - RNA, 22 nt, Human
gggcugacgaaggccaugugug

SEQ ID NO: 366985 - RNA, 19 nt, Human
gaggaggcuucagcuuucu

SEQ ID NO: 366986 - RNA, 22 nt, Human
ugcuaucucuauauccauuuau

SEQ ID NO: 366987 - RNA, 22 nt, Human
gaaguccuccuaucuugcucuu

SEQ ID NO: 366988 - RNA, 22 nt, Human
aaguccagaacuccugugauag

SEQ ID NO: 366989 - RNA, 22 nt, Human
uuauuauugugaccugagaaug

SEQ ID NO: 366990 - RNA, 22 nt, Human
uccaugaggaccaaauucguag

SEQ ID NO: 366991 - RNA, 22 nt, Human
aagaacagauucagccugaacu

SEQ ID NO: 366992 - RNA, 20 nt, Human
aucuucuuggccagcuugcu

SEQ ID NO: 366993 - RNA, 22 nt, Human
gcuuccugagaaacaaucugau

SEQ ID NO: 366994 - RNA, 22 nt, Human
uauuucuggcuuugagggugau

SEQ ID NO: 366995 - RNA, 22 nt, Human
augcaguaaauguuaagaaaaa

SEQ ID NO: 366996 - RNA, 22 nt, Human
ggccucgcggcuucugguggcu

SEQ ID NO: 366997 - RNA, 22 nt, Human
ugccagcccaccuuggggccuc

SEQ ID NO: 366998 - RNA, 22 nt, Human
gcauuuguguucuuccuagagc

SEQ ID NO: 366999 - RNA, 22 nt, Human
uggugugggcguggcaggcaag

SEQ ID NO: 367000 - RNA, 22 nt, Human
aauuaacagagggcuuauuacu

SEQ ID NO: 367001 - RNA, 22 nt, Human
uagcauuuauggucaugugucc

SEQ ID NO: 367002 - RNA, 22 nt, Human
augaggcaaggcuggccguguu

SEQ ID NO: 367003 - RNA, 22 nt, Human
gauaaugaugacaaugacaacc

SEQ ID NO: 367004 - RNA, 22 nt, Human
gucagcaccucuuuggggagcu

SEQ ID NO: 367005 - RNA, 22 nt, Human
cugugucccaguaccuugggua

SEQ ID NO: 367006 - RNA, 22 nt, Human
guccuggggauuauagaguguu

SEQ ID NO: 367007 - RNA, 22 nt, Human
aggggagccccugguccuggug

SEQ ID NO: 367008 - RNA, 22 nt, Human
uaugcauaauuggauaaguaga

SEQ ID NO: 367009 - RNA, 22 nt, Human
uggccuggcagagcaaggccug

SEQ ID NO: 367010 - RNA, 22 nt, Human
uagaaacucaggauacucuucc

SEQ ID NO: 367011 - RNA, 22 nt, Human
aggaccugacauuguguuuucu

SEQ ID NO: 367012 - RNA, 22 nt, Human
uaauuucacaguucaacgcaca

SEQ ID NO: 367013 - RNA, 22 nt, Human
caugcagugacucagacacagg

SEQ ID NO: 367014 - RNA, 22 nt, Human
cagcaaaagccagcauaagcuc

SEQ ID NO: 367015 - RNA, 22 nt, Human
gcaguggcuaagcucgcaugca

SEQ ID NO: 367016 - RNA, 22 nt, Human
agcccagggaaccaggaagugg

SEQ ID NO: 367017 - RNA, 22 nt, Human
ugaggcaggagguugagaacug

SEQ ID NO: 367018 - RNA, 22 nt, Human
aggauuuagauuuggaggaacu

SEQ ID NO: 367019 - RNA, 23 nt, Human
uggccuggagagaaaagaugagu

SEQ ID NO: 367020 - RNA, 18 nt, Human
acaaauguagugucuuaa

SEQ ID NO: 367021 - RNA, 22 nt, Human
ccugccuguacuagagacccag

SEQ ID NO: 367022 - RNA, 22 nt, Human
agaaaucaugucuuauuucuau

SEQ ID NO: 367023 - RNA, 22 nt, Human
uguguccauucaggcacugacc

SEQ ID NO: 367024 - RNA, 22 nt, Human
ugcugaggagguggcugugcuu

SEQ ID NO: 367025 - RNA, 20 nt, Human
gcagagcuguucugugggga

SEQ ID NO: 367026 - RNA, 22 nt, Human
uuucuuagcgaugcuugauaaa

SEQ ID NO: 367027 - RNA, 20 nt, Human
aggaaaaauggaaacuggag

SEQ ID NO: 367028 - RNA, 22 nt, Human
uuggccuucccuaccugggcca

SEQ ID NO: 367029 - RNA, 22 nt, Human
gagaggcugaaaucacaggagc

SEQ ID NO: 367030 - RNA, 21 nt, Human
ccugccaggaaacugaguguc

SEQ ID NO: 367031 - RNA, 22 nt, Human
agaaaucuaagaugcucaagga

SEQ ID NO: 367032 - RNA, 22 nt, Human
ugcagcagacugaguaugagaa

SEQ ID NO: 367033 - RNA, 22 nt, Human
auauaguuggguuucauucuac

SEQ ID NO: 367034 - RNA, 20 nt, Human
guggcaggcagugaaggagc

SEQ ID NO: 367035 - RNA, 19 nt, Human
caaggccaccauuucuccg

SEQ ID NO: 367036 - RNA, 22 nt, Human
guguccuuauaagaagagaugc

SEQ ID NO: 367037 - RNA, 22 nt, Human
agggcugacaguggcguggcgu

SEQ ID NO: 367038 - RNA, 22 nt, Human
cacauuuaaagguugaagcuga

SEQ ID NO: 367039 - RNA, 22 nt, Human
uggggcucaccuaggcuggaag

SEQ ID NO: 367040 - RNA, 22 nt, Human
ugcccugcagugagugcgucug

SEQ ID NO: 367041 - RNA, 22 nt, Human
aauguacaauaagacaaagagg

SEQ ID NO: 367042 - RNA, 22 nt, Human
aauuuacacuucauuuggaggg

SEQ ID NO: 367043 - RNA, 22 nt, Human
aacaugauuuaguauaaugcag

SEQ ID NO: 367044 - RNA, 20 nt, Human
gcagggcaagggauaugaaa

SEQ ID NO: 367045 - RNA, 20 nt, Human
cuguaucagguuacaaagua

SEQ ID NO: 367046 - RNA, 20 nt, Human
cagagaccaggccagguguc

SEQ ID NO: 367047 - RNA, 23 nt, Human
ucuggcuccauccuuggggaucc

SEQ ID NO: 367048 - RNA, 22 nt, Human
aagccaguguuuuugagaguug

SEQ ID NO: 367049 - RNA, 22 nt, Human
ucuggcucauaggaaggccauu

SEQ ID NO: 367050 - RNA, 22 nt, Human
acaguggagcucagaugaaaau

SEQ ID NO: 367051 - RNA, 22 nt, Human
ugccucagagugggcuugcuau

SEQ ID NO: 367052 - RNA, 19 nt, Human
gggcaguggcacuagggag

SEQ ID NO: 367053 - RNA, 22 nt, Human
cuucuucaauagcaagcgcaua

SEQ ID NO: 367054 - RNA, 22 nt, Human
ggucagggcucuuccaguggcu

SEQ ID NO: 367055 - RNA, 22 nt, Human
uucauucuugggaucagagagu

SEQ ID NO: 367056 - RNA, 22 nt, Human
ucagccaguuugauucuauuug

SEQ ID NO: 367057 - RNA, 22 nt, Human
uggcucagugaagagauaacuu

SEQ ID NO: 367058 - RNA, 22 nt, Human
cugaggcuuggaggggucuggu

SEQ ID NO: 367059 - RNA, 22 nt, Human
gacaggcuuugagucccagaac

SEQ ID NO: 367060 - RNA, 23 nt, Human
aggagaagagauuuccacaugca

SEQ ID NO: 367061 - RNA, 22 nt, Human
ccagaggugcugggagaggucu

SEQ ID NO: 367062 - RNA, 22 nt, Human
caauuucacugacacccuggaa

SEQ ID NO: 367063 - RNA, 22 nt, Human
ggagccagcagggugacacuga

SEQ ID NO: 367064 - RNA, 22 nt, Human
agguuauaugucauacugaagu

SEQ ID NO: 367065 - RNA, 22 nt, Human
cucuuucaguucugauagucuc

SEQ ID NO: 367066 - RNA, 22 nt, Human
uccauuuuagaagaaaauccac

SEQ ID NO: 367067 - RNA, 22 nt, Human
uuccuguauuuugcgaauuuuc

SEQ ID NO: 367068 - RNA, 22 nt, Human
ucacuguaucauguugcacuua

SEQ ID NO: 367069 - RNA, 22 nt, Human
acucaggagggaucagcuauca

SEQ ID NO: 367070 - RNA, 22 nt, Human
uguuuauucauggcuaaugaaa

SEQ ID NO: 367071 - RNA, 22 nt, Human
aagagguaaccauagcaaccac

SEQ ID NO: 367072 - RNA, 22 nt, Human
cagggcuguuagcugcugcucu

SEQ ID NO: 367073 - RNA, 22 nt, Human
ggagaaugauauauagcucagu

SEQ ID NO: 367074 - RNA, 22 nt, Human
uggagcaggaagucuauggcug

SEQ ID NO: 367075 - RNA, 22 nt, Human
ggagaggacauggcucccacag

SEQ ID NO: 367076 - RNA, 17 nt, Human
cccagcuggcagugccg

SEQ ID NO: 367077 - RNA, 22 nt, Human
ucugggaacagccuggcugugu

SEQ ID NO: 367078 - RNA, 22 nt, Human
aggggcugcuggguccgccccu

SEQ ID NO: 367079 - RNA, 22 nt, Human
ugccagaagugcuuuauaagug

SEQ ID NO: 367080 - RNA, 22 nt, Human
aaaggaagauugagcuuuucca

SEQ ID NO: 367081 - RNA, 22 nt, Human
aaggagcucccggcagaccagg

SEQ ID NO: 367082 - RNA, 22 nt, Human
uccaggcuaauuuugcauuguu

SEQ ID NO: 367083 - RNA, 22 nt, Human
ggcucaggacugcagcguagag

SEQ ID NO: 367084 - RNA, 22 nt, Human
augagcuguaagguggcuuccu

SEQ ID NO: 367085 - RNA, 22 nt, Human
aggcugggaagguaaaguugua

SEQ ID NO: 367086 - RNA, 22 nt, Human
cuacauaaucuggauuugucug

SEQ ID NO: 367087 - RNA, 22 nt, Human
ggagcugcuuugaucugaagaa

SEQ ID NO: 367088 - RNA, 22 nt, Human
ugcugucuuccaggauggugaa

SEQ ID NO: 367089 - RNA, 22 nt, Human
ggccucucuggcauggcugccc

SEQ ID NO: 367090 - RNA, 22 nt, Human
agacaugucaccaauucuuacu

SEQ ID NO: 367091 - RNA, 22 nt, Human
cugcugugcacccaggaaggcu

SEQ ID NO: 367092 - RNA, 22 nt, Human
acuguccaagcaugccuggcuu

SEQ ID NO: 367093 - RNA, 22 nt, Human
augcugugaaaaagaaggcuga

SEQ ID NO: 367094 - RNA, 21 nt, Human
ucuggagcccuaagcugagaa

SEQ ID NO: 367095 - RNA, 22 nt, Human
cugcagagcuaggcugagugaa

SEQ ID NO: 367096 - RNA, 22 nt, Human
uggcagggccugaaucuuauac

SEQ ID NO: 367097 - RNA, 22 nt, Human
agaaaugacaagacugaucagg

SEQ ID NO: 367098 - RNA, 22 nt, Human
cgcagcagccccgugguaggug

SEQ ID NO: 367099 - RNA, 20 nt, Human
acauugauuauguuuguaga

SEQ ID NO: 367100 - RNA, 21 nt, Human
agcagcagaucuggugagggc

SEQ ID NO: 367101 - RNA, 22 nt, Human
gggacccugggaggcuggcgca

SEQ ID NO: 367102 - RNA, 22 nt, Human
cucuggaguucuucaagcuacu

SEQ ID NO: 367103 - RNA, 22 nt, Human
caaaugcagauucaggaguucu

SEQ ID NO: 367104 - RNA, 22 nt, Human
ugcuuaauaggaguugaacauu

SEQ ID NO: 367105 - RNA, 19 nt, Human
gcugucugaugcugagguc

SEQ ID NO: 367106 - RNA, 22 nt, Human
ccaaaggccaagcucagguaaa

SEQ ID NO: 367107 - RNA, 22 nt, Human
uuccaugugaguacacugugau

SEQ ID NO: 367108 - RNA, 22 nt, Human
gaagccaacauuccaaguagaa

SEQ ID NO: 367109 - RNA, 22 nt, Human
caggaaccuaaugaaggcucac

SEQ ID NO: 367110 - RNA, 22 nt, Human
cacucuccagcacaccccauuu

SEQ ID NO: 367111 - RNA, 22 nt, Human
ugaagcaaacgcuucuguuccu

SEQ ID NO: 367112 - RNA, 20 nt, Human
ccaggccugggccugcucua

SEQ ID NO: 367113 - RNA, 22 nt, Human
ccaggcugccgaggaaagaaag

SEQ ID NO: 367114 - RNA, 22 nt, Human
acagaauuaucaggaaauguua

SEQ ID NO: 367115 - RNA, 22 nt, Human
agccauucauugugcucucaga

SEQ ID NO: 367116 - RNA, 22 nt, Human
uggcugagccacuuguucagau

SEQ ID NO: 367117 - RNA, 22 nt, Human
uggccugcagcucucagggaag

SEQ ID NO: 367118 - RNA, 22 nt, Human
cacauaaguggguuccauugca

SEQ ID NO: 367119 - RNA, 21 nt, Human
ccucuggcuugugcugugccc

SEQ ID NO: 367120 - RNA, 22 nt, Human
ucagaagacuacuaggacacau

SEQ ID NO: 367121 - RNA, 22 nt, Human
aguguuccugcucucaggaagc

SEQ ID NO: 367122 - RNA, 22 nt, Human
agaaggaguguacaggucaugc

SEQ ID NO: 367123 - RNA, 22 nt, Human
agugcuguaacaacuuauuugg

SEQ ID NO: 367124 - RNA, 19 nt, Human
agauggcaaaaugcaaaga

SEQ ID NO: 367125 - RNA, 22 nt, Human
cuccagugagcgcggggcaugg

SEQ ID NO: 367126 - RNA, 22 nt, Human
ucaugcccagagcaguaaauua

SEQ ID NO: 367127 - RNA, 22 nt, Human
gccagcagguugucaaggagcu

SEQ ID NO: 367128 - RNA, 22 nt, Human
uuucaagaacaacauucauuca

SEQ ID NO: 367129 - RNA, 22 nt, Human
caaaugauagagccgauuauca

SEQ ID NO: 367130 - RNA, 22 nt, Human
cuggcucaggaaaguugcugcu

SEQ ID NO: 367131 - RNA, 22 nt, Human
gcagcauugcacuuuuguucuu

SEQ ID NO: 367132 - RNA, 22 nt, Human
caacagagagaccagaaacagg

SEQ ID NO: 367133 - RNA, 22 nt, Human
guuagggagggugcauaugugu

SEQ ID NO: 367134 - RNA, 22 nt, Human
aauaguguuguucacucaggag

SEQ ID NO: 367135 - RNA, 22 nt, Human
ugcuggaggcaguggaggugcc

SEQ ID NO: 367136 - RNA, 22 nt, Human
augcaucuauucccaagggcag

SEQ ID NO: 367137 - RNA, 21 nt, Human
aguugcauaggccagccaucc

SEQ ID NO: 367138 - RNA, 21 nt, Human
ugggcacugagggugcugcuc

SEQ ID NO: 367139 - RNA, 22 nt, Human
cagcucugcugggaggaugcag

SEQ ID NO: 367140 - RNA, 22 nt, Human
uggaaagacauucagccgcugg

SEQ ID NO: 367141 - RNA, 22 nt, Human
gagaggauccacaaaccaggaa

SEQ ID NO: 367142 - RNA, 22 nt, Human
uguauuuucuucuggaagcuua

SEQ ID NO: 367143 - RNA, 22 nt, Human
gccucugcaacuccgccuuggu

SEQ ID NO: 367144 - RNA, 22 nt, Human
aagcagaauuuaauagaaaggu

SEQ ID NO: 367145 - RNA, 22 nt, Human
uguggccagcagguggcugugu

SEQ ID NO: 367146 - RNA, 20 nt, Human
gaaggaagggggcaagguga

SEQ ID NO: 367147 - RNA, 22 nt, Human
ccaccuccaccuauugccagcc

SEQ ID NO: 367148 - RNA, 22 nt, Human
ccaggaguggcuggugaccuuc

SEQ ID NO: 367149 - RNA, 22 nt, Human
uguuacuuaucucacgugaugc

SEQ ID NO: 367150 - RNA, 22 nt, Human
augauacaagcaaaacuaauca

SEQ ID NO: 367151 - RNA, 22 nt, Human
ggcugagccaugggcacugcag

SEQ ID NO: 367152 - RNA, 22 nt, Human
cucaggcccacagcagacccac

SEQ ID NO: 367153 - RNA, 22 nt, Human
gcagugcuuuagucuguccuuu

SEQ ID NO: 367154 - RNA, 22 nt, Human
cugugcccuggccaggccucuc

SEQ ID NO: 367155 - RNA, 22 nt, Human
aguugacauccauaacaggaag

SEQ ID NO: 367156 - RNA, 22 nt, Human
uauuuaauuagugauuguagag

SEQ ID NO: 367157 - RNA, 22 nt, Human
agauuuccugcacugccuuuga

SEQ ID NO: 367158 - RNA, 22 nt, Human
gaaggaaaaauacucuguaagg

SEQ ID NO: 367159 - RNA, 19 nt, Human
ggcugcugguuacagaggc

SEQ ID NO: 367160 - RNA, 22 nt, Human
acuucaugcagaagagagcugu

SEQ ID NO: 367161 - RNA, 22 nt, Human
uugcagggaccugcagaaagcu

SEQ ID NO: 367162 - RNA, 22 nt, Human
acugugugaaacaucaaugugu

SEQ ID NO: 367163 - RNA, 22 nt, Human
gucagagagggcacgugcacac

SEQ ID NO: 367164 - RNA, 22 nt, Human
caggaggcaucauggagcggac

SEQ ID NO: 367165 - RNA, 22 nt, Human
uggccugacugucaggcuguau

SEQ ID NO: 367166 - RNA, 22 nt, Human
cauuaagauuuuuuucuacugg

SEQ ID NO: 367167 - RNA, 22 nt, Human
ggucccagguugacagggagac

SEQ ID NO: 367168 - RNA, 22 nt, Human
cccagcucugcagaccugcccu

SEQ ID NO: 367169 - RNA, 22 nt, Human
cccugagcccauaguugacauu

SEQ ID NO: 367170 - RNA, 19 nt, Human
ggugaccaccuggucagug

SEQ ID NO: 367171 - RNA, 22 nt, Human
ucuggcucuccagugcucuuag

SEQ ID NO: 367172 - RNA, 22 nt, Human
ucugccugagggagcugaggaa

SEQ ID NO: 367173 - RNA, 19 nt, Human
accaggcuuauggucagug

SEQ ID NO: 367174 - RNA, 22 nt, Human
aggaagcucaaagccaugaugu

SEQ ID NO: 367175 - RNA, 20 nt, Human
gaggcucugggcauggcgcc

SEQ ID NO: 367176 - RNA, 22 nt, Human
ucaguaacuuacuuauucaccu

SEQ ID NO: 367177 - RNA, 22 nt, Human
ggacaggaugcugaagaugaag

SEQ ID NO: 367178 - RNA, 22 nt, Human
gaggccuggcucugcccuccug

SEQ ID NO: 367179 - RNA, 22 nt, Human
gcacaugagcugcugggauggg

SEQ ID NO: 367180 - RNA, 22 nt, Human
ugagaagcugcugacuuagccu

SEQ ID NO: 367181 - RNA, 22 nt, Human
uguccuuauaagaaaaggaaau

SEQ ID NO: 367182 - RNA, 22 nt, Human
ucagguggcuucggggaguggc

SEQ ID NO: 367183 - RNA, 22 nt, Human
cagaggcaaaagagguggaggu

SEQ ID NO: 367184 - RNA, 22 nt, Human
aaaauucugucauuaaauugug

SEQ ID NO: 367185 - RNA, 22 nt, Human
ucacauuuuaucugagauugac

SEQ ID NO: 367186 - RNA, 22 nt, Human
ugggcuguccagcaccugggcu

SEQ ID NO: 367187 - RNA, 22 nt, Human
gguggccaggccagcucuggcc

SEQ ID NO: 367188 - RNA, 22 nt, Human
agagccagcaacucuagcccug

SEQ ID NO: 367189 - RNA, 22 nt, Human
ccugugugcugaugacgacaga

SEQ ID NO: 367190 - RNA, 22 nt, Human
accaaaaauuguggggcugaau

SEQ ID NO: 367191 - RNA, 21 nt, Human
ucaaagcacauauuugcacau

SEQ ID NO: 367192 - RNA, 22 nt, Human
gugccuuccccgguggucuguu

SEQ ID NO: 367193 - RNA, 22 nt, Human
ucucuggagcugcagauccagg

SEQ ID NO: 367194 - RNA, 20 nt, Human
uugauaggcagcuugucagg

SEQ ID NO: 367195 - RNA, 22 nt, Human
cucagagcccaggguacacccg

SEQ ID NO: 367196 - RNA, 22 nt, Human
uugcagcuucgagucuaucugu

SEQ ID NO: 367197 - RNA, 22 nt, Human
uuauuugcccauguuuagcaga

SEQ ID NO: 367198 - RNA, 22 nt, Human
agucccagugagaugagccacg

SEQ ID NO: 367199 - RNA, 22 nt, Human
augcaguguuuggaagcuuaag

SEQ ID NO: 367200 - RNA, 22 nt, Human
cuuugaagagauuacugugcuc

SEQ ID NO: 367201 - RNA, 22 nt, Human
acauuuuuauucaucaaagcag

SEQ ID NO: 367202 - RNA, 17 nt, Human
gaaagguccuagaaauc

SEQ ID NO: 367203 - RNA, 22 nt, Human
gcugggaagugcaagaucaagg

SEQ ID NO: 367204 - RNA, 22 nt, Human
gaucagaaugggacauauccug

SEQ ID NO: 367205 - RNA, 22 nt, Human
aucaguuaguuacugcuaagau

SEQ ID NO: 367206 - RNA, 22 nt, Human
acauucaugucccacuucuagc

SEQ ID NO: 367207 - RNA, 22 nt, Human
gaacagcccuguuaagucuguu

SEQ ID NO: 367208 - RNA, 22 nt, Human
uggcucugaucagauguccagu

SEQ ID NO: 367209 - RNA, 22 nt, Human
uugcagcuucuaccacuguuuc

SEQ ID NO: 367210 - RNA, 22 nt, Human
uuugaauagcauaggauuacau

SEQ ID NO: 367211 - RNA, 22 nt, Human
ucuguucagaaauggaagugcc

SEQ ID NO: 367212 - RNA, 22 nt, Human
ccaggagagcaggcgugcagcu

SEQ ID NO: 367213 - RNA, 22 nt, Human
gucacuguauccagguuccagc

SEQ ID NO: 367214 - RNA, 18 nt, Human
cugaggcuuagagagguu

SEQ ID NO: 367215 - RNA, 22 nt, Human
guaggaagcucugaggcuaguu

SEQ ID NO: 367216 - RNA, 22 nt, Human
aagaacauguuaaaagauucac

SEQ ID NO: 367217 - RNA, 22 nt, Human
ucacaggcuugugaacauugca

SEQ ID NO: 367218 - RNA, 22 nt, Human
gaguccaguucuuuccagcagu

SEQ ID NO: 367219 - RNA, 22 nt, Human
aauuucaaguggcaucuuugau

SEQ ID NO: 367220 - RNA, 22 nt, Human
gaggcucagagggagcaugguc

SEQ ID NO: 367221 - RNA, 22 nt, Human
cagauuucagcucauauauuau

SEQ ID NO: 367222 - RNA, 22 nt, Human
agguggggccaaaugcuacagu

SEQ ID NO: 367223 - RNA, 22 nt, Human
agggugguucuuuuaguggaag

SEQ ID NO: 367224 - RNA, 22 nt, Human
cagugauggauauggagaaguc

SEQ ID NO: 367225 - RNA, 17 nt, Human
cagcuuuaugcuacugu

SEQ ID NO: 367226 - RNA, 23 nt, Human
uccucccaaauuucagccucauu

SEQ ID NO: 367227 - RNA, 22 nt, Human
cugcugccggcgagccucccuu

SEQ ID NO: 367228 - RNA, 21 nt, Human
acagcaagccuuccuuucagg

SEQ ID NO: 367229 - RNA, 22 nt, Human
cagagccccucagcucucuccc

SEQ ID NO: 367230 - RNA, 22 nt, Human
gaggcagcgggucaggaccgug

SEQ ID NO: 367231 - RNA, 22 nt, Human
cagaagaauggugucugagcuc

SEQ ID NO: 367232 - RNA, 18 nt, Human
cugcccagagcacuugug

SEQ ID NO: 367233 - RNA, 22 nt, Human
aaaagguuuugaguacaaauau

SEQ ID NO: 367234 - RNA, 22 nt, Human
ucugggagacguguguugucag

SEQ ID NO: 367235 - RNA, 22 nt, Human
ccaggccucccuuuuccagcca

SEQ ID NO: 367236 - RNA, 22 nt, Human
agagggcugccucagucagcua

SEQ ID NO: 367237 - RNA, 22 nt, Human
ggcugcuguuucagagacuguu

SEQ ID NO: 367238 - RNA, 22 nt, Human
ugggcccugacuucaagcaucc

SEQ ID NO: 367239 - RNA, 22 nt, Human
aagagagggguugcauggaaau

SEQ ID NO: 367240 - RNA, 22 nt, Human
aggcuauuuccacucuucucau

SEQ ID NO: 367241 - RNA, 23 nt, Human
gggaccagcuagggcugugaccu

SEQ ID NO: 367242 - RNA, 22 nt, Human
agguaacacuacuuaguauacu

SEQ ID NO: 367243 - RNA, 22 nt, Human
gaggagaaagcagugauuugug

SEQ ID NO: 367244 - RNA, 22 nt, Human
gagacguggccuuugccugagc

SEQ ID NO: 367245 - RNA, 22 nt, Human
aucagaaaguucaucauguuug

SEQ ID NO: 367246 - RNA, 22 nt, Human
cuggcucacuagcccugcccug

SEQ ID NO: 367247 - RNA, 22 nt, Human
auggggugaccaugagcauuua

SEQ ID NO: 367248 - RNA, 22 nt, Human
cuguccauuuucgugccuccuu

SEQ ID NO: 367249 - RNA, 22 nt, Human
acaguggaugugauguccaggu

SEQ ID NO: 367250 - RNA, 22 nt, Human
gaaagcaguaaaugggucccau

SEQ ID NO: 367251 - RNA, 22 nt, Human
ugcagggagcucuggggugcag

SEQ ID NO: 367252 - RNA, 22 nt, Human
aauggcugggaguguauuuugg

SEQ ID NO: 367253 - RNA, 22 nt, Human
auuguauaacagcauguauuuu

SEQ ID NO: 367254 - RNA, 22 nt, Human
ccagagaggggaagggcuugcc

SEQ ID NO: 367255 - RNA, 22 nt, Human
aacaaccaaaaagaugaaugua

SEQ ID NO: 367256 - RNA, 22 nt, Human
aagaaauguagagccuaguaaa

SEQ ID NO: 367257 - RNA, 22 nt, Human
gcuguggaaaugccuaacauga

SEQ ID NO: 367258 - RNA, 20 nt, Human
ucauuucuugggguuccaag

SEQ ID NO: 367259 - RNA, 22 nt, Human
cagcaggauuggauacaucuca

SEQ ID NO: 367260 - RNA, 22 nt, Human
ucucuucuugauuuucacugga

SEQ ID NO: 367261 - RNA, 23 nt, Human
uuucuguuggguauauauccaag

SEQ ID NO: 367262 - RNA, 22 nt, Human
uggcuggggccugaauccugca

SEQ ID NO: 367263 - RNA, 22 nt, Human
gccucugccaagggggcugcgg

SEQ ID NO: 367264 - RNA, 22 nt, Human
accuggcacuacaggcaccugu

SEQ ID NO: 367265 - RNA, 22 nt, Human
ugugucagaaggcaauggggau

SEQ ID NO: 367266 - RNA, 22 nt, Human
ggugcagaggagccagcugggg

SEQ ID NO: 367267 - RNA, 22 nt, Human
agaugcugugaggaagcuagga

SEQ ID NO: 367268 - RNA, 22 nt, Human
ccugggagugucagacuugcuu

SEQ ID NO: 367269 - RNA, 22 nt, Human
aagcugccauagaacgagaggu

SEQ ID NO: 367270 - RNA, 23 nt, Human
uucaaagcuuaagcucuuuccac

SEQ ID NO: 367271 - RNA, 22 nt, Human
ucaggcuggagugcaguggcgc

SEQ ID NO: 367272 - RNA, 22 nt, Human
aaucuggcauuugagaguagga

SEQ ID NO: 367273 - RNA, 18 nt, Human
uugcuuuguaagcuugca

SEQ ID NO: 367274 - RNA, 22 nt, Human
acaggcagcacuaaucucuggu

SEQ ID NO: 367275 - RNA, 22 nt, Human
ggcuagaacuuuacacuuugca

SEQ ID NO: 367276 - RNA, 17 nt, Human
ugaaggaaggaugaugu

SEQ ID NO: 367277 - RNA, 22 nt, Human
gcaugcugcaccagagccucuc

SEQ ID NO: 367278 - RNA, 22 nt, Human
aaauauagugacacuuauaguc

SEQ ID NO: 367279 - RNA, 22 nt, Human
gcaugguggccuuaggguagcc

SEQ ID NO: 367280 - RNA, 22 nt, Human
ccacuggcauccagcugccauc

SEQ ID NO: 367281 - RNA, 22 nt, Human
cagaauaaaagucccaaggcau

SEQ ID NO: 367282 - RNA, 22 nt, Human
agccuccuggaguuucugggau

SEQ ID NO: 367283 - RNA, 22 nt, Human
cucucccccacagcagccuucu

SEQ ID NO: 367284 - RNA, 22 nt, Human
aggcaggcacuccggaaguguc

SEQ ID NO: 367285 - RNA, 22 nt, Human
cagacccucgggugaguuggcc

SEQ ID NO: 367286 - RNA, 22 nt, Human
caaugauguuuagauaaaaucc

SEQ ID NO: 367287 - RNA, 22 nt, Human
guuuucuuugaaugcuucuaga

SEQ ID NO: 367288 - RNA, 22 nt, Human
aguuugaauugaaaugcagaug

SEQ ID NO: 367289 - RNA, 22 nt, Human
gcagauggcagcccaggcuggg

SEQ ID NO: 367290 - RNA, 22 nt, Human
cagggguguuuuuggccaggag

SEQ ID NO: 367291 - RNA, 22 nt, Human
auucuuauuuaaauagagucug

SEQ ID NO: 367292 - RNA, 22 nt, Human
auucuucauacagacaaguccu

SEQ ID NO: 367293 - RNA, 22 nt, Human
auaagguaugaaaaguaaaugg

SEQ ID NO: 367294 - RNA, 22 nt, Human
gcagaggagcaagcuggacacc

SEQ ID NO: 367295 - RNA, 22 nt, Human
caggcagccaggggaccugucc

SEQ ID NO: 367296 - RNA, 22 nt, Human
ccuggcagcauugguagagauu

SEQ ID NO: 367297 - RNA, 22 nt, Human
ugaggcucacaaaucugcauuu

SEQ ID NO: 367298 - RNA, 22 nt, Human
cagccagagaaagggcacugcc

SEQ ID NO: 367299 - RNA, 20 nt, Human
gaagcagcuucauguagaca

SEQ ID NO: 367300 - RNA, 21 nt, Human
ugccagcauguaggcuaguug

SEQ ID NO: 367301 - RNA, 22 nt, Human
cccaggaaguggagguugcagu

SEQ ID NO: 367302 - RNA, 22 nt, Human
cuuaauuucaaacugcuaguga

SEQ ID NO: 367303 - RNA, 22 nt, Human
ugcagcugcuugauucaucuug

SEQ ID NO: 367304 - RNA, 17 nt, Human
ucucuuucccuuucugc

SEQ ID NO: 367305 - RNA, 20 nt, Human
ucuggcaggugaacgagcug

SEQ ID NO: 367306 - RNA, 22 nt, Human
cuguacaucucugaggacagua

SEQ ID NO: 367307 - RNA, 22 nt, Human
cuggagggugagccucaucucu

SEQ ID NO: 367308 - RNA, 20 nt, Human
cagaggcauuuucagacucu

SEQ ID NO: 367309 - RNA, 22 nt, Human
uauugacaauuugugaaacuau

SEQ ID NO: 367310 - RNA, 22 nt, Human
cauugaaaccuaacauaggcug

SEQ ID NO: 367311 - RNA, 22 nt, Human
cccaggagauaacguucccaag

SEQ ID NO: 367312 - RNA, 22 nt, Human
guggauggauuuugaggaaugg

SEQ ID NO: 367313 - RNA, 22 nt, Human
ucaaaguaaaaguauagaguuu

SEQ ID NO: 367314 - RNA, 22 nt, Human
gagaaacuuggaguuauucugg

SEQ ID NO: 367315 - RNA, 22 nt, Human
aggugccagcucucaggcagga

SEQ ID NO: 367316 - RNA, 22 nt, Human
uuaacagauguuuauggagcau

SEQ ID NO: 367317 - RNA, 22 nt, Human
ucucugggauaaacugggccag

SEQ ID NO: 367318 - RNA, 18 nt, Human
uccauuguucuacuguga

SEQ ID NO: 367319 - RNA, 22 nt, Human
aaaugcaugagaaaguauucug

SEQ ID NO: 367320 - RNA, 22 nt, Human
ucaaaugcuucuacuccuaaga

SEQ ID NO: 367321 - RNA, 22 nt, Human
ucaauucugguccucaggaacu

SEQ ID NO: 367322 - RNA, 22 nt, Human
ucuguucaugucuuuuuaagug

SEQ ID NO: 367323 - RNA, 22 nt, Human
augugcuuuauuaaguaaaaau

SEQ ID NO: 367324 - RNA, 22 nt, Human
cugcaggggcuggaguuggcuu

SEQ ID NO: 367325 - RNA, 22 nt, Human
uccaucaccacagaggacagag

SEQ ID NO: 367326 - RNA, 22 nt, Human
aauaugugagguauguucagug

SEQ ID NO: 367327 - RNA, 22 nt, Human
agaaugcauuuuguguagcuau

SEQ ID NO: 367328 - RNA, 22 nt, Human
gugaauggggcaggaaggaugg

SEQ ID NO: 367329 - RNA, 22 nt, Human
uaguaucuuucuauauuuccca

SEQ ID NO: 367330 - RNA, 23 nt, Human
agccacuucuaucuugcuccugg

SEQ ID NO: 367331 - RNA, 22 nt, Human
gcuguggcugaccaccaggggg

SEQ ID NO: 367332 - RNA, 22 nt, Human
ucccagcauuaaugccugucag

SEQ ID NO: 367333 - RNA, 22 nt, Human
uccugggcccaggcugccaggg

SEQ ID NO: 367334 - RNA, 22 nt, Human
ugcaggaguccaaucaggagac

SEQ ID NO: 367335 - RNA, 22 nt, Human
aaauuauuacaagcuaguuggc

SEQ ID NO: 367336 - RNA, 22 nt, Human
caucacuguccucagcauucca

SEQ ID NO: 367337 - RNA, 22 nt, Human
uggaaggagcuaaggaccuggg

SEQ ID NO: 367338 - RNA, 22 nt, Human
aggguggcaccuggaagggaug

SEQ ID NO: 367339 - RNA, 22 nt, Human
acugccaggauggcacuagagg

SEQ ID NO: 367340 - RNA, 22 nt, Human
aacucaguucuuuccacaaugc

SEQ ID NO: 367341 - RNA, 22 nt, Human
caaugguggugucagaagagau

SEQ ID NO: 367342 - RNA, 22 nt, Human
aggagcugcagauucugccuug

SEQ ID NO: 367343 - RNA, 22 nt, Human
gagcugccagacaugggaauga

SEQ ID NO: 367344 - RNA, 22 nt, Human
uagaacauaagucauucauuug

SEQ ID NO: 367345 - RNA, 22 nt, Human
uugaaggacaucuuguuucuag

SEQ ID NO: 367346 - RNA, 20 nt, Human
gaaguccuuucacucuuccc

SEQ ID NO: 367347 - RNA, 22 nt, Human
uggauuagguacuaugaauaua

SEQ ID NO: 367348 - RNA, 22 nt, Human
gugagggcagcuuggucagugu

SEQ ID NO: 367349 - RNA, 22 nt, Human
guacagaauuaugccaugaggg

SEQ ID NO: 367350 - RNA, 22 nt, Human
gcuaugcaggagccuaaugaca

SEQ ID NO: 367351 - RNA, 20 nt, Human
uccagccacuuccgcugguc

SEQ ID NO: 367352 - RNA, 22 nt, Human
cccagggaaugacucuggccuu

SEQ ID NO: 367353 - RNA, 22 nt, Human
aauucacaaaaguuagauccau

SEQ ID NO: 367354 - RNA, 22 nt, Human
gguggcagaggugcaucagccc

SEQ ID NO: 367355 - RNA, 22 nt, Human
ccagcugguuaaaauagagaaa

SEQ ID NO: 367356 - RNA, 22 nt, Human
cagggagggacaauugucaccu

SEQ ID NO: 367357 - RNA, 22 nt, Human
ugccaggaggaggugggacaga

SEQ ID NO: 367358 - RNA, 22 nt, Human
cacugcagcaccaugcagggcu

SEQ ID NO: 367359 - RNA, 22 nt, Human
uugacaagaaucguugccuugg

SEQ ID NO: 367360 - RNA, 22 nt, Human
aaguccuucccaagcauguacc

SEQ ID NO: 367361 - RNA, 22 nt, Human
auacauauaugguacuuccugg

SEQ ID NO: 367362 - RNA, 22 nt, Human
uucaaucauuagaaucucaggc

SEQ ID NO: 367363 - RNA, 22 nt, Human
cagcugaacauguagagcaucu

SEQ ID NO: 367364 - RNA, 22 nt, Human
auugacaauguauuuguaucug

SEQ ID NO: 367365 - RNA, 22 nt, Human
uucacaaagcuggagcauuucc

SEQ ID NO: 367366 - RNA, 22 nt, Human
cagggccuccuaaggcaucuaa

SEQ ID NO: 367367 - RNA, 22 nt, Human
ccugcaggcugcaggccaguuc

SEQ ID NO: 367368 - RNA, 22 nt, Human
gccaccaggagcccaguccaaa

SEQ ID NO: 367369 - RNA, 22 nt, Human
gcugucucauacaaggcccugc

SEQ ID NO: 367370 - RNA, 22 nt, Human
auuucccagcuuugaucaguuu

SEQ ID NO: 367371 - RNA, 22 nt, Human
ucagugucuugggcuugaaugc

SEQ ID NO: 367372 - RNA, 22 nt, Human
cugggcagcugugcaaacaaua

SEQ ID NO: 367373 - RNA, 22 nt, Human
cagugcagucaaggaagaacca

SEQ ID NO: 367374 - RNA, 22 nt, Human
cugucuccagggcaggugcagg

SEQ ID NO: 367375 - RNA, 18 nt, Human
gugacagcugcuagcuca

SEQ ID NO: 367376 - RNA, 22 nt, Human
augugcuuguaauguuaaaugu

SEQ ID NO: 367377 - RNA, 22 nt, Human
cuggcuccacucccugccugac

SEQ ID NO: 367378 - RNA, 22 nt, Human
cauuuacaauguacagguugug

SEQ ID NO: 367379 - RNA, 22 nt, Human
ucucugcugagaagggcuggca

SEQ ID NO: 367380 - RNA, 22 nt, Human
cucugagaggugagaagcagca

SEQ ID NO: 367381 - RNA, 22 nt, Human
agggcuggaggguacuaguuua

SEQ ID NO: 367382 - RNA, 21 nt, Human
aauaaaacaguuggugucaau

SEQ ID NO: 367383 - RNA, 19 nt, Human
agccagggugagaaggagc

SEQ ID NO: 367384 - RNA, 22 nt, Human
agcagcucaaagccugcaagga

SEQ ID NO: 367385 - RNA, 22 nt, Human
cagagccccccuucugaucaca

SEQ ID NO: 367386 - RNA, 18 nt, Human
gcaggagauggguggggu

SEQ ID NO: 367387 - RNA, 22 nt, Human
ccugucuggccuuccacggggg

SEQ ID NO: 367388 - RNA, 22 nt, Human
gugcugugcgcuuuuucuguau

SEQ ID NO: 367389 - RNA, 22 nt, Human
ccugcagaccacacucaguccu

SEQ ID NO: 367390 - RNA, 22 nt, Human
gaggcccuccagcugucagcug

SEQ ID NO: 367391 - RNA, 22 nt, Human
uguggcugcucaggugcagacc

SEQ ID NO: 367392 - RNA, 22 nt, Human
gcaggaagaggcucgaagcccc

SEQ ID NO: 367393 - RNA, 22 nt, Human
uauuccuaagucccaacuacau

SEQ ID NO: 367394 - RNA, 22 nt, Human
acaaugcaccagcaucuucacc

SEQ ID NO: 367395 - RNA, 22 nt, Human
gucuucuuuaaccuacuaaagc

SEQ ID NO: 367396 - RNA, 22 nt, Human
ccugucugcaugagugagcaua

SEQ ID NO: 367397 - RNA, 22 nt, Human
gaauuaguguugaaaucagggc

SEQ ID NO: 367398 - RNA, 22 nt, Human
aaggcaguaaaaucuaccuugc

SEQ ID NO: 367399 - RNA, 22 nt, Human
gaucuucuauguaaugaagugu

SEQ ID NO: 367400 - RNA, 22 nt, Human
cugccacuagcuuucacaucuu

SEQ ID NO: 367401 - RNA, 22 nt, Human
agcaucuggucaugagugagaa

SEQ ID NO: 367402 - RNA, 22 nt, Human
ggccagagagccgcuguuagga

SEQ ID NO: 367403 - RNA, 22 nt, Human
aggaggugacagccugcaucug

SEQ ID NO: 367404 - RNA, 22 nt, Human
uccaaauacauuuacuguauuu

SEQ ID NO: 367405 - RNA, 22 nt, Human
gccugggagagggauagugcag

SEQ ID NO: 367406 - RNA, 22 nt, Human
uggccugggucacaccaggguc

SEQ ID NO: 367407 - RNA, 22 nt, Human
aagagcaucgguggagccccca

SEQ ID NO: 367408 - RNA, 22 nt, Human
cugccuggcuaaacucaagucg

SEQ ID NO: 367409 - RNA, 22 nt, Human
ucugccugagcagagggaggcc

SEQ ID NO: 367410 - RNA, 22 nt, Human
agauuucaaugugagcauuagu

SEQ ID NO: 367411 - RNA, 22 nt, Human
ucagcuggagaugagaaccgaa

SEQ ID NO: 367412 - RNA, 22 nt, Human
gccuucaguagugucagcugua

SEQ ID NO: 367413 - RNA, 22 nt, Human
aguugcagacgcagagauguug

SEQ ID NO: 367414 - RNA, 22 nt, Human
uaaagccaacacuuuacugcuc

SEQ ID NO: 367415 - RNA, 22 nt, Human
gcagguggagcaguagucuggu

SEQ ID NO: 367416 - RNA, 22 nt, Human
ugccugcucuuaccacucuccc

SEQ ID NO: 367417 - RNA, 22 nt, Human
auaugcuugggacugauacagu

SEQ ID NO: 367418 - RNA, 22 nt, Human
caugagauaauuuuucuccagu

SEQ ID NO: 367419 - RNA, 22 nt, Human
gaugagcauuguuucauguguu

SEQ ID NO: 367420 - RNA, 22 nt, Human
uaaggcaccuguccaggcuggg

SEQ ID NO: 367421 - RNA, 22 nt, Human
cuccagggaggucugcaggacu

SEQ ID NO: 367422 - RNA, 22 nt, Human
agugaagaggaaguggggcaca

SEQ ID NO: 367423 - RNA, 22 nt, Human
cacauacuuguguguacauaug

SEQ ID NO: 367424 - RNA, 22 nt, Human
gggcucuggauggagccugcag

SEQ ID NO: 367425 - RNA, 22 nt, Human
guuuuuccugcugacuuggguc

SEQ ID NO: 367426 - RNA, 22 nt, Human
gugcagguguuuuggcugccag

SEQ ID NO: 367427 - RNA, 20 nt, Human
aggcucagagcaguaguaca

SEQ ID NO: 367428 - RNA, 22 nt, Human
agagcuguagcuuccuagagcc

SEQ ID NO: 367429 - RNA, 22 nt, Human
ggggcagcuaccggaaguaggg

SEQ ID NO: 367430 - RNA, 22 nt, Human
cagagggcacaugguuuccuca

SEQ ID NO: 367431 - RNA, 23 nt, Human
cugcagucgccggccugggugcc

SEQ ID NO: 367432 - RNA, 22 nt, Human
ccugucugaggaggugcucuuu

SEQ ID NO: 367433 - RNA, 22 nt, Human
ccuuuccuuuuuagugugggag

SEQ ID NO: 367434 - RNA, 22 nt, Human
ucuucauuccguagauauuuau

SEQ ID NO: 367435 - RNA, 22 nt, Human
gacccaggguggucaccugaaa

SEQ ID NO: 367436 - RNA, 22 nt, Human
guggcugcagcccagcggcacg

SEQ ID NO: 367437 - RNA, 22 nt, Human
ccaggauggggagcagauagaa

SEQ ID NO: 367438 - RNA, 22 nt, Human
uuagaaaucaccucugaagauc

SEQ ID NO: 367439 - RNA, 22 nt, Human
cagagccaggguugcaccccug

SEQ ID NO: 367440 - RNA, 22 nt, Human
ugagccagaguggagugugccu

SEQ ID NO: 367441 - RNA, 22 nt, Human
cggcagagacggcgcuuugaac

SEQ ID NO: 367442 - RNA, 22 nt, Human
uuugaaguucccccauaucaga

SEQ ID NO: 367443 - RNA, 22 nt, Human
cuuugcaauagaggcacacaug

SEQ ID NO: 367444 - RNA, 22 nt, Human
aggcucaggaggagcugccgga

SEQ ID NO: 367445 - RNA, 22 nt, Human
guccagugacaaguagcuggcc

SEQ ID NO: 367446 - RNA, 22 nt, Human
uugcauugauguuccuucuugc

SEQ ID NO: 367447 - RNA, 22 nt, Human
uuuauugacccaaagcgagagu

SEQ ID NO: 367448 - RNA, 22 nt, Human
aggggcuggcuuaucugagagu

SEQ ID NO: 367449 - RNA, 22 nt, Human
aagagcuggauggaaucuggga

SEQ ID NO: 367450 - RNA, 22 nt, Human
agcuguggcagcagccguggca

SEQ ID NO: 367451 - RNA, 22 nt, Human
gcacagggcugccaggcggcuu

SEQ ID NO: 367452 - RNA, 22 nt, Human
agcagcugguaggaguggccac

SEQ ID NO: 367453 - RNA, 22 nt, Human
cuuguacauagagaagaagccu

SEQ ID NO: 367454 - RNA, 22 nt, Human
uucagaaagguaaauggauuuc

SEQ ID NO: 367455 - RNA, 15 nt, Human
uccaggcauucauuc

SEQ ID NO: 367456 - RNA, 22 nt, Human
ucagaggagccaaaguucugag

SEQ ID NO: 367457 - RNA, 22 nt, Human
uucaauucugcucugaucuuag

SEQ ID NO: 367458 - RNA, 22 nt, Human
aaggcugaguaaaacagagaac

SEQ ID NO: 367459 - RNA, 22 nt, Human
cacugaagcuuucauucucuug

SEQ ID NO: 367460 - RNA, 22 nt, Human
agauuccagaucccaaaaauga

SEQ ID NO: 367461 - RNA, 22 nt, Human
gcaggggcugcugggaacucgg

SEQ ID NO: 367462 - RNA, 22 nt, Human
agcaaagucaguggaaccaucc

SEQ ID NO: 367463 - RNA, 22 nt, Human
aggggagaguuaaugugaaugu

SEQ ID NO: 367464 - RNA, 22 nt, Human
agaggaggcuggguccagauaa

SEQ ID NO: 367465 - RNA, 22 nt, Human
auuucaguguuuuaagaguuca

SEQ ID NO: 367466 - RNA, 22 nt, Human
cugaggcuggcguuugaggaag

SEQ ID NO: 367467 - RNA, 22 nt, Human
ugccugugguuccaguuuuuuc

SEQ ID NO: 367468 - RNA, 22 nt, Human
ucacaugcuugaggaaagaaaa

SEQ ID NO: 367469 - RNA, 22 nt, Human
agccaggauggucucgaucggc

SEQ ID NO: 367470 - RNA, 22 nt, Human
gaaggccuaggaaggaagccuu

SEQ ID NO: 367471 - RNA, 22 nt, Human
uguauacaauucacacuuccca

SEQ ID NO: 367472 - RNA, 22 nt, Human
gaggaggcuaagugggcucugg

SEQ ID NO: 367473 - RNA, 22 nt, Human
auacaaagacaaaucucaaucu

SEQ ID NO: 367474 - RNA, 22 nt, Human
gcccauggcagaacugugagca

SEQ ID NO: 367475 - RNA, 18 nt, Human
aggcaggcuggagugacu

SEQ ID NO: 367476 - RNA, 22 nt, Human
ccuggcagcgugccgagcugcg

SEQ ID NO: 367477 - RNA, 22 nt, Human
guaggcagauaggagugcagcc

SEQ ID NO: 367478 - RNA, 22 nt, Human
caggaugcacuaggaaccaggg

SEQ ID NO: 367479 - RNA, 22 nt, Human
gccaggugggagacagacagca

SEQ ID NO: 367480 - RNA, 22 nt, Human
cugcagagcagccaguccccca

SEQ ID NO: 367481 - RNA, 22 nt, Human
cugagacuuucaugugcuuuua

SEQ ID NO: 367482 - RNA, 21 nt, Human
ugguuugcggccaaaguuaaa

SEQ ID NO: 367483 - RNA, 22 nt, Human
ggauuugaauuguugaaaugau

SEQ ID NO: 367484 - RNA, 22 nt, Human
agugcugaagacuggcuaggga

SEQ ID NO: 367485 - RNA, 22 nt, Human
caggauggagggagggcuguua

SEQ ID NO: 367486 - RNA, 22 nt, Human
uccaggagugugugcuaauggg

SEQ ID NO: 367487 - RNA, 22 nt, Human
ucaggcugaggucaucugcauc

SEQ ID NO: 367488 - RNA, 22 nt, Human
uuucuucucgacaccuuauccc

SEQ ID NO: 367489 - RNA, 22 nt, Human
accugagcaugccaggagagug

SEQ ID NO: 367490 - RNA, 22 nt, Human
aaauuauaggugccaccuugga

SEQ ID NO: 367491 - RNA, 19 nt, Human
cuggggcuuugguacugcc

SEQ ID NO: 367492 - RNA, 22 nt, Human
auuugucuuugagugcccugcu

SEQ ID NO: 367493 - RNA, 22 nt, Human
uuccaaagugcuggaauuacau

SEQ ID NO: 367494 - RNA, 22 nt, Human
aucagagaccggucaagucaug

SEQ ID NO: 367495 - RNA, 17 nt, Human
uaaagccagucaaguca

SEQ ID NO: 367496 - RNA, 22 nt, Human
gccuggagaggaagccggugga

SEQ ID NO: 367497 - RNA, 20 nt, Human
cagagccaagagcagcaucu

SEQ ID NO: 367498 - RNA, 21 nt, Human
cucuugugucagagccagagg

SEQ ID NO: 367499 - RNA, 17 nt, Human
uauacacagacagacug

SEQ ID NO: 367500 - RNA, 22 nt, Human
gaugcugaagugaagugaucuu

SEQ ID NO: 367501 - RNA, 22 nt, Human
uuauuauugugguugcauuauc

SEQ ID NO: 367502 - RNA, 22 nt, Human
ucugagggcuugaggggaagua

SEQ ID NO: 367503 - RNA, 22 nt, Human
auauauuuugcggucacguggc

SEQ ID NO: 367504 - RNA, 22 nt, Human
cagccagcuucagauccaagcc

SEQ ID NO: 367505 - RNA, 22 nt, Human
aggaguguggccagggcucugg

SEQ ID NO: 367506 - RNA, 22 nt, Human
ugguuuugcuccaguauaaaua

SEQ ID NO: 367507 - RNA, 23 nt, Human
ugcugggcagagcuggugcugag

SEQ ID NO: 367508 - RNA, 22 nt, Human
cacauggggcgcugcauuggcc

SEQ ID NO: 367509 - RNA, 22 nt, Human
agcccaagcauaggagggaggc

SEQ ID NO: 367510 - RNA, 22 nt, Human
ccagccuccauguagauagcug

SEQ ID NO: 367511 - RNA, 22 nt, Human
ccucccuggccagagcagcagc

SEQ ID NO: 367512 - RNA, 22 nt, Human
gugugcaggugucagugcagcu

SEQ ID NO: 367513 - RNA, 22 nt, Human
gagagcuguguucauucuacca

SEQ ID NO: 367514 - RNA, 19 nt, Human
ggcccaaguacugagugcc

SEQ ID NO: 367515 - RNA, 22 nt, Human
caacagaagguguacuacugaa

SEQ ID NO: 367516 - RNA, 22 nt, Human
aaggcacugaaaaauugugugu

SEQ ID NO: 367517 - RNA, 22 nt, Human
uccuucagggcugaccacaggc

SEQ ID NO: 367518 - RNA, 22 nt, Human
acuuucucaggaauucacagac

SEQ ID NO: 367519 - RNA, 22 nt, Human
gggcagcuccuguggaauccac

SEQ ID NO: 367520 - RNA, 22 nt, Human
caguagccacuagacacaugua

SEQ ID NO: 367521 - RNA, 22 nt, Human
acagagcacugcccugugccgc

SEQ ID NO: 367522 - RNA, 22 nt, Human
auggcuuucucuaaugugguau

SEQ ID NO: 367523 - RNA, 22 nt, Human
aguuucauauuaccaugucacc

SEQ ID NO: 367524 - RNA, 19 nt, Human
gagggcucauuugaacaau

SEQ ID NO: 367525 - RNA, 22 nt, Human
augucuuuuaugauuacgggau

SEQ ID NO: 367526 - RNA, 22 nt, Human
agagccaggacugugucucacu

SEQ ID NO: 367527 - RNA, 19 nt, Human
uccaaaggacccaccucca

SEQ ID NO: 367528 - RNA, 22 nt, Human
cggcuggugucgggcacagcaa

SEQ ID NO: 367529 - RNA, 22 nt, Human
caggaugugaggaggccauuug

SEQ ID NO: 367530 - RNA, 22 nt, Human
augguguagcaugugauaugac

SEQ ID NO: 367531 - RNA, 22 nt, Human
ugaaaaggaguccuuguuuuca

SEQ ID NO: 367532 - RNA, 18 nt, Human
acugugugaauuagcucc

SEQ ID NO: 367533 - RNA, 22 nt, Human
caaguccaggucaauuuaaagc

SEQ ID NO: 367534 - RNA, 22 nt, Human
gccugagauucugcauuucuaa

SEQ ID NO: 367535 - RNA, 22 nt, Human
agaggcagcagucauacuacag

SEQ ID NO: 367536 - RNA, 22 nt, Human
ugcagugggccggaggccaggg

SEQ ID NO: 367537 - RNA, 22 nt, Human
caugugguucaaguacuccaca

SEQ ID NO: 367538 - RNA, 22 nt, Human
aggagcugucagagugccagag

SEQ ID NO: 367539 - RNA, 19 nt, Human
gcugugggacagcagggug

SEQ ID NO: 367540 - RNA, 22 nt, Human
agcuggggguuggauaagggua

SEQ ID NO: 367541 - RNA, 22 nt, Human
cugaggucuagacaccccaggg

SEQ ID NO: 367542 - RNA, 22 nt, Human
uuuuaagaugcuaguauuucag

SEQ ID NO: 367543 - RNA, 21 nt, Human
cccaggucguggucuucccag

SEQ ID NO: 367544 - RNA, 22 nt, Human
ccagagaguaucauggagagua

SEQ ID NO: 367545 - RNA, 22 nt, Human
guggauggacaugggcaagagg

SEQ ID NO: 367546 - RNA, 17 nt, Human
gucauucucagaaaaug

SEQ ID NO: 367547 - RNA, 22 nt, Human
aggagcuggaguccaggcaagu

SEQ ID NO: 367548 - RNA, 22 nt, Human
agaugcugugucuguucccuug

SEQ ID NO: 367549 - RNA, 21 nt, Human
gcagggacaaagcuucaggag

SEQ ID NO: 367550 - RNA, 18 nt, Human
cugcugugucgucugggc

SEQ ID NO: 367551 - RNA, 22 nt, Human
gaggcagaaguugcagugagca

SEQ ID NO: 367552 - RNA, 22 nt, Human
agcugguaugaacaggauagga

SEQ ID NO: 367553 - RNA, 22 nt, Human
acguuuucagugacugugcuuc

SEQ ID NO: 367554 - RNA, 22 nt, Human
cuuccuucugaagcauagaagc

SEQ ID NO: 367555 - RNA, 22 nt, Human
agagaugaaaaguggagacugg

SEQ ID NO: 367556 - RNA, 23 nt, Human
aaguucaagucacagccugucuu

SEQ ID NO: 367557 - RNA, 19 nt, Human
ugcagaagacacaguggug

SEQ ID NO: 367558 - RNA, 22 nt, Human
gaaaugugaccuacuuccuugu

SEQ ID NO: 367559 - RNA, 22 nt, Human
uggcuggcccugggagugcaga

SEQ ID NO: 367560 - RNA, 22 nt, Human
caguggggaggccaggauagaa

SEQ ID NO: 367561 - RNA, 22 nt, Human
ucagaggagaccaaggggaaua

SEQ ID NO: 367562 - RNA, 22 nt, Human
acagagcaugcucaguguguga

SEQ ID NO: 367563 - RNA, 22 nt, Human
gagugcaggccugagcaccauc

SEQ ID NO: 367564 - RNA, 22 nt, Human
acaguaauauugaugcucguca

SEQ ID NO: 367565 - RNA, 22 nt, Human
ucuguucuauuggucuaugugu

SEQ ID NO: 367566 - RNA, 22 nt, Human
ccucccaccguaucucaguggc

SEQ ID NO: 367567 - RNA, 22 nt, Human
uuaagucauuucugauuauaga

SEQ ID NO: 367568 - RNA, 22 nt, Human
guaggcagugguuggaagagaa

SEQ ID NO: 367569 - RNA, 22 nt, Human
ccuggaucuccucuauucauau

SEQ ID NO: 367570 - RNA, 22 nt, Human
cugggaguguucuaggucacau

SEQ ID NO: 367571 - RNA, 22 nt, Human
uagggcuccacucccagagauu

SEQ ID NO: 367572 - RNA, 22 nt, Human
gaggagcuugaggcuaggagcc

SEQ ID NO: 367573 - RNA, 22 nt, Human
ggcuagaguggaacuggagcgg

SEQ ID NO: 367574 - RNA, 22 nt, Human
uacuacauuaauaaaacauuca

SEQ ID NO: 367575 - RNA, 22 nt, Human
ucuucacaugaccuucaugucu

SEQ ID NO: 367576 - RNA, 22 nt, Human
uggcccugacacgugguacugg

SEQ ID NO: 367577 - RNA, 22 nt, Human
agagcagugcugaagaguaggg

SEQ ID NO: 367578 - RNA, 22 nt, Human
cagcagagaccaagugauuuga

SEQ ID NO: 367579 - RNA, 22 nt, Human
ucagggacgugagcucagaguc

SEQ ID NO: 367580 - RNA, 22 nt, Human
uuuagaaguucacacauuuaaa

SEQ ID NO: 367581 - RNA, 22 nt, Human
auauuaaauggauuuugggagc

SEQ ID NO: 367582 - RNA, 21 nt, Human
aucagaaguuuuggucaguag

SEQ ID NO: 367583 - RNA, 19 nt, Human
ugcagccacgugagagacu

SEQ ID NO: 367584 - RNA, 22 nt, Human
agggacagucuacuguucacug

SEQ ID NO: 367585 - RNA, 22 nt, Human
ugggaauggaugcuaagugcua

SEQ ID NO: 367586 - RNA, 22 nt, Human
ugcuggaggaguuuacuguggc

SEQ ID NO: 367587 - RNA, 22 nt, Human
aaugauggauuuagacaagcug

SEQ ID NO: 367588 - RNA, 22 nt, Human
uggcucuguugagguauggauu

SEQ ID NO: 367589 - RNA, 22 nt, Human
uagacacauccguggaagcuuc

SEQ ID NO: 367590 - RNA, 22 nt, Human
gcagcuggagcaucuucucauc

SEQ ID NO: 367591 - RNA, 22 nt, Human
gccuggcuccuaagagcacaac

SEQ ID NO: 367592 - RNA, 22 nt, Human
ccaggguggaggcuggauggag

SEQ ID NO: 367593 - RNA, 21 nt, Human
agcucagccgggcacaguggc

SEQ ID NO: 367594 - RNA, 22 nt, Human
uggcugaguuucaugcaucaug

SEQ ID NO: 367595 - RNA, 22 nt, Human
aaucaagaaaaugaggauucuu

SEQ ID NO: 367596 - RNA, 22 nt, Human
uaggcagaauuguugaaugaag

SEQ ID NO: 367597 - RNA, 22 nt, Human
ugaaggcacuugccuaggggca

SEQ ID NO: 367598 - RNA, 22 nt, Human
gaaggcuguuucugguagugau

SEQ ID NO: 367599 - RNA, 22 nt, Human
uuugcagugauucuugcaguga

SEQ ID NO: 367600 - RNA, 22 nt, Human
auuucacaucuaucucagauuu

SEQ ID NO: 367601 - RNA, 22 nt, Human
gcagaagaccaugguggaaaga

SEQ ID NO: 367602 - RNA, 20 nt, Human
uguacacaguacuuuacaau

SEQ ID NO: 367603 - RNA, 20 nt, Human
ggaagccagggugcagggga

SEQ ID NO: 367604 - RNA, 22 nt, Human
cccaggaaugaggggcggaggc

SEQ ID NO: 367605 - RNA, 20 nt, Human
aggcucagcugagcucuugg

SEQ ID NO: 367606 - RNA, 20 nt, Human
cagccuccacucacucagcu

SEQ ID NO: 367607 - RNA, 22 nt, Human
ugcuggccgugagcucucggga

SEQ ID NO: 367608 - RNA, 22 nt, Human
uaagaaucuauuaggaauaugu

SEQ ID NO: 367609 - RNA, 22 nt, Human
gcuguguuuuauguuagguuaa

SEQ ID NO: 367610 - RNA, 22 nt, Human
uguacauuuagagcucaauaga

SEQ ID NO: 367611 - RNA, 22 nt, Human
aauuaugauuggucuaaaccag

SEQ ID NO: 367612 - RNA, 22 nt, Human
accaaagggcagaacaugagca

SEQ ID NO: 367613 - RNA, 22 nt, Human
cuucuucauaggcaguccuguu

SEQ ID NO: 367614 - RNA, 22 nt, Human
uggaggaugccuggggaggccu

SEQ ID NO: 367615 - RNA, 23 nt, Human
aaacugcuuccaauuccugccau

SEQ ID NO: 367616 - RNA, 22 nt, Human
caguuucucucaauaagcaucg

SEQ ID NO: 367617 - RNA, 22 nt, Human
agauuugcggcuuuacuuugca

SEQ ID NO: 367618 - RNA, 22 nt, Human
ggccagcugggccaccaggugc

SEQ ID NO: 367619 - RNA, 22 nt, Human
ccugccugcguccucugagggc

SEQ ID NO: 367620 - RNA, 22 nt, Human
auuuccaauuucauccaugucc

SEQ ID NO: 367621 - RNA, 22 nt, Human
guguggcugauugacaugguca

SEQ ID NO: 367622 - RNA, 22 nt, Human
gguggccucucaugcaagguag

SEQ ID NO: 367623 - RNA, 22 nt, Human
uacccagcccaugccuaccuca

SEQ ID NO: 367624 - RNA, 22 nt, Human
ggccagggggcuucagacucca

SEQ ID NO: 367625 - RNA, 19 nt, Human
ggucucagugcagcugcag

SEQ ID NO: 367626 - RNA, 22 nt, Human
uucauucugcaguucucagcuc

SEQ ID NO: 367627 - RNA, 23 nt, Human
ccuggcuggauucucugcauuca

SEQ ID NO: 367628 - RNA, 22 nt, Human
cuggggugagcagaaacagggg

SEQ ID NO: 367629 - RNA, 22 nt, Human
ggccuagggaguggccaugccu

SEQ ID NO: 367630 - RNA, 21 nt, Human
ugaaaucugaugggacaaaug

SEQ ID NO: 367631 - RNA, 22 nt, Human
uccaggcauguggccaguacuc

SEQ ID NO: 367632 - RNA, 22 nt, Human
ccagagccggcucccucagcuu

SEQ ID NO: 367633 - RNA, 22 nt, Human
uugaacagcuguuacauuguua

SEQ ID NO: 367634 - RNA, 22 nt, Human
gucuuuaugguaugaaaacuga

SEQ ID NO: 367635 - RNA, 18 nt, Human
aggccugggaagcugagg

SEQ ID NO: 367636 - RNA, 22 nt, Human
cagagugagggccugcaccugc

SEQ ID NO: 367637 - RNA, 22 nt, Human
cugccugugccaaugcuccuuu

SEQ ID NO: 367638 - RNA, 22 nt, Human
ucugagccaauuucugugucca

SEQ ID NO: 367639 - RNA, 22 nt, Human
gacaaaggaucagagguuggga

SEQ ID NO: 367640 - RNA, 22 nt, Human
uggaggagaauuuauggucgaa

SEQ ID NO: 367641 - RNA, 22 nt, Human
ucucugucccuaggagccuugc

SEQ ID NO: 367642 - RNA, 22 nt, Human
caggcgagugaacagacucuca

SEQ ID NO: 367643 - RNA, 22 nt, Human
cauguuuuguguacagaauauu

SEQ ID NO: 367644 - RNA, 22 nt, Human
aggcuggcccuacuggcugccu

SEQ ID NO: 367645 - RNA, 22 nt, Human
aaaucaguuagugguaggauug

SEQ ID NO: 367646 - RNA, 22 nt, Human
ccaggacucaguggggaaaggg

SEQ ID NO: 367647 - RNA, 22 nt, Human
uucuuccucagcagggcugccu

SEQ ID NO: 367648 - RNA, 22 nt, Human
gcucagccgaacuucagagcag

SEQ ID NO: 367649 - RNA, 22 nt, Human
cugggcugucaauggcccucug

SEQ ID NO: 367650 - RNA, 21 nt, Human
ccuccaggugauuccgugcuc

SEQ ID NO: 367651 - RNA, 22 nt, Human
cuauugaaaguguacaauucaa

SEQ ID NO: 367652 - RNA, 22 nt, Human
aagccacugagauuucacugca

SEQ ID NO: 367653 - RNA, 22 nt, Human
agguggcuccucccauggcugg

SEQ ID NO: 367654 - RNA, 22 nt, Human
cauuuacauaacaguaacgcug

SEQ ID NO: 367655 - RNA, 19 nt, Human
auuuacugccuaaaaucuc

SEQ ID NO: 367656 - RNA, 22 nt, Human
ccugagagcauuccacacugaa

SEQ ID NO: 367657 - RNA, 22 nt, Human
uuugagauggagucuugcucug

SEQ ID NO: 367658 - RNA, 22 nt, Human
aggcugccucgugagcucgcug

SEQ ID NO: 367659 - RNA, 19 nt, Human
cucagagaggggcagugcc

SEQ ID NO: 367660 - RNA, 22 nt, Human
aaaguuucaauagaggaagugg

SEQ ID NO: 367661 - RNA, 22 nt, Human
cagcugaauucuucagacucca

SEQ ID NO: 367662 - RNA, 22 nt, Human
accugcaggggugcucucuggg

SEQ ID NO: 367663 - RNA, 22 nt, Human
ugggcagggucucuguuaucag

SEQ ID NO: 367664 - RNA, 22 nt, Human
ggagccuguuaguugagugcuc

SEQ ID NO: 367665 - RNA, 22 nt, Human
gaggcugcggggaggagccugc

SEQ ID NO: 367666 - RNA, 22 nt, Human
uucuccccugacccugaugagg

SEQ ID NO: 367667 - RNA, 22 nt, Human
guuugaaugcaguaugcauuuu

SEQ ID NO: 367668 - RNA, 23 nt, Human
gccucugcucugcguuggggacu

SEQ ID NO: 367669 - RNA, 22 nt, Human
ugccuuccuggagcugaaggcu

SEQ ID NO: 367670 - RNA, 22 nt, Human
ggggaaggauugaguugaccca

SEQ ID NO: 367671 - RNA, 21 nt, Human
gccaccucgucucggagcagc

SEQ ID NO: 367672 - RNA, 22 nt, Human
uaucuaaaggauuuaauuuagu

SEQ ID NO: 367673 - RNA, 22 nt, Human
gugucccaaucuacuuuucccu

SEQ ID NO: 367674 - RNA, 22 nt, Human
gugaauaaccuacuccaggccu

SEQ ID NO: 367675 - RNA, 22 nt, Human
ccacauuuuugauacucucacu

SEQ ID NO: 367676 - RNA, 22 nt, Human
agcugggaugauaaccucaguc

SEQ ID NO: 367677 - RNA, 19 nt, Human
gccugcagaaaaggcaggg

SEQ ID NO: 367678 - RNA, 18 nt, Human
agacccucuaagggcagu

SEQ ID NO: 367679 - RNA, 22 nt, Human
acaguaaugauucugagucucu

SEQ ID NO: 367680 - RNA, 22 nt, Human
ccagcaggagagaacauuuccc

SEQ ID NO: 367681 - RNA, 22 nt, Human
ugcagggacacgaagacaaaua

SEQ ID NO: 367682 - RNA, 20 nt, Human
gcuuccuucccagcccccac

SEQ ID NO: 367683 - RNA, 22 nt, Human
cacaggcucuucucacuugauu

SEQ ID NO: 367684 - RNA, 22 nt, Human
ucucaagcuuguugguauguuu

SEQ ID NO: 367685 - RNA, 22 nt, Human
cauugcacugcagcccgggcaa

SEQ ID NO: 367686 - RNA, 22 nt, Human
gagaggagguggcuaugacagc

SEQ ID NO: 367687 - RNA, 20 nt, Human
uaggcagcuugacccuuggu

SEQ ID NO: 367688 - RNA, 19 nt, Human
gagcagcugcacccauuga

SEQ ID NO: 367689 - RNA, 22 nt, Human
agcagggccuggcacuccuggg

SEQ ID NO: 367690 - RNA, 22 nt, Human
uuccuguccgcaauggccuggg

SEQ ID NO: 367691 - RNA, 22 nt, Human
guuaaauucgaugauggauaaa

SEQ ID NO: 367692 - RNA, 22 nt, Human
aggcaguggcugagaccagggg

SEQ ID NO: 367693 - RNA, 22 nt, Human
cagggcaguaacgggaacaucu

SEQ ID NO: 367694 - RNA, 22 nt, Human
gccucccuguucuuccacaaua

SEQ ID NO: 367695 - RNA, 22 nt, Human
gaaggccauugcguccugggau

SEQ ID NO: 367696 - RNA, 22 nt, Human
ugcuggcuacugauggcaggcc

SEQ ID NO: 367697 - RNA, 22 nt, Human
agaccuggauuccaauccuacc

SEQ ID NO: 367698 - RNA, 22 nt, Human
uuaggaaaaucaugagagauga

SEQ ID NO: 367699 - RNA, 22 nt, Human
ccagcuccagguagaugggcag

SEQ ID NO: 367700 - RNA, 22 nt, Human
gcagagaagaugcccaggcuuc

SEQ ID NO: 367701 - RNA, 23 nt, Human
auuuccuacuauaaaagagguaa

SEQ ID NO: 367702 - RNA, 22 nt, Human
auuuaguguguauugcuauuau

SEQ ID NO: 367703 - RNA, 22 nt, Human
cugcuguguggugaaacucagu

SEQ ID NO: 367704 - RNA, 22 nt, Human
aagucacccacaggcagcagaa

SEQ ID NO: 367705 - RNA, 22 nt, Human
uaaaucaguuucucuuauuggu

SEQ ID NO: 367706 - RNA, 22 nt, Human
uucaagaucuuccaaaggauac

SEQ ID NO: 367707 - RNA, 22 nt, Human
agaauucuguucuucgggugug

SEQ ID NO: 367708 - RNA, 22 nt, Human
agcugucugucuccugaggaga

SEQ ID NO: 367709 - RNA, 21 nt, Human
acauuuucuguuuuaggaagu

SEQ ID NO: 367710 - RNA, 22 nt, Human
uggcagagcaaaaagauagaau

SEQ ID NO: 367711 - RNA, 22 nt, Human
cuuaacagagagaaguguugcu

SEQ ID NO: 367712 - RNA, 22 nt, Human
ucugcagcgugcaggcuggugc

SEQ ID NO: 367713 - RNA, 22 nt, Human
cuucuuuacuuucuagaaauaa

SEQ ID NO: 367714 - RNA, 22 nt, Human
agggccagccaggcccuacaaa

SEQ ID NO: 367715 - RNA, 22 nt, Human
ugggaccaagucauuucuuuag

SEQ ID NO: 367716 - RNA, 22 nt, Human
agaauucauaggaaguuuccua

SEQ ID NO: 367717 - RNA, 22 nt, Human
aaaaucugguaauuugaaugug

SEQ ID NO: 367718 - RNA, 22 nt, Human
gagaggccaaaaucccugcccc

SEQ ID NO: 367719 - RNA, 22 nt, Human
cagccagggagcaaagaguuga

SEQ ID NO: 367720 - RNA, 22 nt, Human
gaagccacccuccuuccagccc

SEQ ID NO: 367721 - RNA, 22 nt, Human
ccugucucuguuaccacauuug

SEQ ID NO: 367722 - RNA, 22 nt, Human
uaaaggcuucugcagggacuga

SEQ ID NO: 367723 - RNA, 22 nt, Human
agaagccagucgcucucccgca

SEQ ID NO: 367724 - RNA, 22 nt, Human
ucuccucuauuucuguauguau

SEQ ID NO: 367725 - RNA, 22 nt, Human
ccuggagcuuuuccauccugga

SEQ ID NO: 367726 - RNA, 22 nt, Human
caguggccugagccaggcuucc

SEQ ID NO: 367727 - RNA, 21 nt, Human
ugggaccuagcuuugcacagg

SEQ ID NO: 367728 - RNA, 20 nt, Human
uccaguuuuggagacauucu

SEQ ID NO: 367729 - RNA, 20 nt, Human
gaggccucagccucagcucc

SEQ ID NO: 367730 - RNA, 22 nt, Human
agcagggcugcggccccaccac

SEQ ID NO: 367731 - RNA, 22 nt, Human
aucuggcugagcgaggcccaca

SEQ ID NO: 367732 - RNA, 22 nt, Human
gggcugggauggcuugaagauu

SEQ ID NO: 367733 - RNA, 19 nt, Human
ugagaggcuuaaggcagcu

SEQ ID NO: 367734 - RNA, 22 nt, Human
cagggcaggacagauacauuac

SEQ ID NO: 367735 - RNA, 22 nt, Human
auacauuagaaucugguacuca

SEQ ID NO: 367736 - RNA, 22 nt, Human
agcuggagaauguggaugaucc

SEQ ID NO: 367737 - RNA, 22 nt, Human
caggcagauuugcugcccucca

SEQ ID NO: 367738 - RNA, 22 nt, Human
cccuggaggcuggaggcaguag

SEQ ID NO: 367739 - RNA, 22 nt, Human
gcagagccaugggagguuuuug

SEQ ID NO: 367740 - RNA, 17 nt, Human
uccaggcauaucuccua

SEQ ID NO: 367741 - RNA, 19 nt, Human
ugaggggaggagaggccug

SEQ ID NO: 367742 - RNA, 23 nt, Human
gaagccacacaaaggucgccaag

SEQ ID NO: 367743 - RNA, 22 nt, Human
cagucuggaggucagcuggcuu

SEQ ID NO: 367744 - RNA, 22 nt, Human
uccaggaggccucauuuccugu

SEQ ID NO: 367745 - RNA, 23 nt, Human
agcagggccagaauacuugcugu

SEQ ID NO: 367746 - RNA, 22 nt, Human
gggcagcucuuugguauccuuc

SEQ ID NO: 367747 - RNA, 22 nt, Human
auuagggaaggauuuggccuga

SEQ ID NO: 367748 - RNA, 22 nt, Human
acacacacaagcagguugugga

SEQ ID NO: 367749 - RNA, 23 nt, Human
gugugccaagcacugugccagga

SEQ ID NO: 367750 - RNA, 22 nt, Human
uuuuauagcugaauaguauucc

SEQ ID NO: 367751 - RNA, 22 nt, Human
gauaaaauucuuauuuuacccg

SEQ ID NO: 367752 - RNA, 21 nt, Human
augacagaugcugcagaucgu

SEQ ID NO: 367753 - RNA, 22 nt, Human
ucuaaaaaagucuguucacuug

SEQ ID NO: 367754 - RNA, 22 nt, Human
acagccuguguaccagcuggga

SEQ ID NO: 367755 - RNA, 19 nt, Human
uuugugaagaaaaugaugc

SEQ ID NO: 367756 - RNA, 22 nt, Human
auuccaaacuuaccccagagga

SEQ ID NO: 367757 - RNA, 22 nt, Human
uuccaggacaagauguuucagg

SEQ ID NO: 367758 - RNA, 22 nt, Human
aaggcaguuugggccaccaucu

SEQ ID NO: 367759 - RNA, 23 nt, Human
uccuucagagccucccuccaagc

SEQ ID NO: 367760 - RNA, 22 nt, Human
guguggcuaccucagaggagca

SEQ ID NO: 367761 - RNA, 22 nt, Human
ugggcacuggaagccugcugug

SEQ ID NO: 367762 - RNA, 22 nt, Human
acauacuuuuuaaaagauugcu

SEQ ID NO: 367763 - RNA, 22 nt, Human
ccucaggggucacugugaggag

SEQ ID NO: 367764 - RNA, 22 nt, Human
acagaaugggauuugaauauuu

SEQ ID NO: 367765 - RNA, 22 nt, Human
ccugucugcggaggaguggaag

SEQ ID NO: 367766 - RNA, 23 nt, Human
ugcagcugccucuggcgggccgg

SEQ ID NO: 367767 - RNA, 22 nt, Human
uugcauuccaguccccacugug

SEQ ID NO: 367768 - RNA, 22 nt, Human
ugagauuuguuuuauaaaauag

SEQ ID NO: 367769 - RNA, 22 nt, Human
ggacccugggcuugcuccuggg

SEQ ID NO: 367770 - RNA, 22 nt, Human
aaugcacaugccacauguggua

SEQ ID NO: 367771 - RNA, 22 nt, Human
uaucugagaaagaagcaccaga

SEQ ID NO: 367772 - RNA, 22 nt, Human
gaggagagccugcacuuugacc

SEQ ID NO: 367773 - RNA, 22 nt, Human
aguauggggcugugugugcaca

SEQ ID NO: 367774 - RNA, 22 nt, Human
ccaggagccugggccaggcugg

SEQ ID NO: 367775 - RNA, 22 nt, Human
gaggagagaugguagauugggu

SEQ ID NO: 367776 - RNA, 22 nt, Human
ucagccugcgucauggugacac

SEQ ID NO: 367777 - RNA, 19 nt, Human
gaggaggaaaacuagugua

SEQ ID NO: 367778 - RNA, 22 nt, Human
auauccaagaaacaauuaauuc

SEQ ID NO: 367779 - RNA, 22 nt, Human
uggcauuugcucccuuguguuc

SEQ ID NO: 367780 - RNA, 22 nt, Human
cugggcuggagugcaauggcgc

SEQ ID NO: 367781 - RNA, 22 nt, Human
cucucaggcuugggucguggca

SEQ ID NO: 367782 - RNA, 22 nt, Human
uuucaugaggggcaaaaucuca

SEQ ID NO: 367783 - RNA, 22 nt, Human
agggaaagguagugaggucaca

SEQ ID NO: 367784 - RNA, 22 nt, Human
uuauuuauggcccucaccugau

SEQ ID NO: 367785 - RNA, 22 nt, Human
ucaaggcuaaacuuucagagua

SEQ ID NO: 367786 - RNA, 22 nt, Human
ggcuucccagcagagggcgcac

SEQ ID NO: 367787 - RNA, 22 nt, Human
agccuggcccugcugaacucug

SEQ ID NO: 367788 - RNA, 22 nt, Human
caccagguuccgggcagagcug

SEQ ID NO: 367789 - RNA, 20 nt, Human
agucucuguagugccugaga

SEQ ID NO: 367790 - RNA, 22 nt, Human
cucagaguggggcucccugagg

SEQ ID NO: 367791 - RNA, 22 nt, Human
aggcacugaccugcuuccuuga

SEQ ID NO: 367792 - RNA, 22 nt, Human
agagccugcaucaggcuugggg

SEQ ID NO: 367793 - RNA, 22 nt, Human
uguuucauguggacauaguugu

SEQ ID NO: 367794 - RNA, 22 nt, Human
ggcagaccucuccagccccaca

SEQ ID NO: 367795 - RNA, 22 nt, Human
cuuauguaaaacggaaagggaa

SEQ ID NO: 367796 - RNA, 22 nt, Human
cuguccugauggugccacuggu

SEQ ID NO: 367797 - RNA, 22 nt, Human
uugaaagugccaaguccuagug

SEQ ID NO: 367798 - RNA, 22 nt, Human
cuugcugucccuugguaugaac

SEQ ID NO: 367799 - RNA, 22 nt, Human
uuuccucugcugccauugcccc

SEQ ID NO: 367800 - RNA, 22 nt, Human
cacugcuuaguugguaaaugug

SEQ ID NO: 367801 - RNA, 22 nt, Human
uuuauugcauacacaaauguca

SEQ ID NO: 367802 - RNA, 22 nt, Human
gacccaggaagcuacuucuggu

SEQ ID NO: 367803 - RNA, 22 nt, Human
uagcaguggaaucuuuugucca

SEQ ID NO: 367804 - RNA, 22 nt, Human
aaggugucaccagauuggcagg

SEQ ID NO: 367805 - RNA, 22 nt, Human
aaucaguuaaauauugaguaca

SEQ ID NO: 367806 - RNA, 22 nt, Human
uggcagugggaagcuggaaguc

SEQ ID NO: 367807 - RNA, 19 nt, Human
ggcuccuguggcugcagcc

SEQ ID NO: 367808 - RNA, 22 nt, Human
cagcaauaacucaaagccauuu

SEQ ID NO: 367809 - RNA, 22 nt, Human
ggugggcacccgagacuggauc

SEQ ID NO: 367810 - RNA, 22 nt, Human
augguauugcaacaacugucau

SEQ ID NO: 367811 - RNA, 22 nt, Human
uguuuuucaaauauugcucugu

SEQ ID NO: 367812 - RNA, 22 nt, Human
auucuucacaccuguuccuguu

SEQ ID NO: 367813 - RNA, 22 nt, Human
agauuucccaaauacuuguuau

SEQ ID NO: 367814 - RNA, 22 nt, Human
aacauacagugagcaguggacu

SEQ ID NO: 367815 - RNA, 22 nt, Human
acuguccauucacucauauuca

SEQ ID NO: 367816 - RNA, 22 nt, Human
ccagugccugugggcauggugc

SEQ ID NO: 367817 - RNA, 22 nt, Human
cucaggacccgguccagguggg

SEQ ID NO: 367818 - RNA, 22 nt, Human
cacaucagguagaccuacagag

SEQ ID NO: 367819 - RNA, 21 nt, Human
ugggggagaauugguugcuuu

SEQ ID NO: 367820 - RNA, 22 nt, Human
cucccaagcugugcugaacugu

SEQ ID NO: 367821 - RNA, 22 nt, Human
ugggggucaggaugaggccuug

SEQ ID NO: 367822 - RNA, 22 nt, Human
cagagcuggagggaacccuggc

SEQ ID NO: 367823 - RNA, 22 nt, Human
gaagucuucauucucucugaga

SEQ ID NO: 367824 - RNA, 22 nt, Human
uaaggccauuauggugggcccg

SEQ ID NO: 367825 - RNA, 22 nt, Human
aggcaagcugcagagaguccuu

SEQ ID NO: 367826 - RNA, 22 nt, Human
agcauuuaauuacaguuuaauu

SEQ ID NO: 367827 - RNA, 22 nt, Human
gaggcagugaacaauuccugug

SEQ ID NO: 367828 - RNA, 22 nt, Human
ugggcacaaacaucugccuguu

SEQ ID NO: 367829 - RNA, 22 nt, Human
gcugucuucacuuccugguuuc

SEQ ID NO: 367830 - RNA, 22 nt, Human
gcccagugguaaaagcaggccu

SEQ ID NO: 367831 - RNA, 22 nt, Human
agcagggcagugaucagaaagg

SEQ ID NO: 367832 - RNA, 22 nt, Human
uggagcagcaucacuuugagcu

SEQ ID NO: 367833 - RNA, 22 nt, Human
cucugugggggagaggcagcug

SEQ ID NO: 367834 - RNA, 22 nt, Human
cccagcuccuuggaugggcagg

SEQ ID NO: 367835 - RNA, 23 nt, Human
ucucuuucaagagcuuaaugugc

SEQ ID NO: 367836 - RNA, 22 nt, Human
uccucagggggccaacccagcc

SEQ ID NO: 367837 - RNA, 22 nt, Human
uuucacaaguaaaguccuaagu

SEQ ID NO: 367838 - RNA, 22 nt, Human
ucaggaguccugccugcagccu

SEQ ID NO: 367839 - RNA, 22 nt, Human
caggaaagaaaugagaacacca

SEQ ID NO: 367840 - RNA, 20 nt, Human
uccugcagucgcuagcgccc

SEQ ID NO: 367841 - RNA, 22 nt, Human
gucuucuuuucagucugcuugu

SEQ ID NO: 367842 - RNA, 22 nt, Human
uaucagaaggcacauggagucu

SEQ ID NO: 367843 - RNA, 22 nt, Human
gcugggagcaaguacucaucuu

SEQ ID NO: 367844 - RNA, 22 nt, Human
gccucugcaccaguacugugcc

SEQ ID NO: 367845 - RNA, 22 nt, Human
aagccucaccuuuuagaagcua

SEQ ID NO: 367846 - RNA, 22 nt, Human
cugcuuccaugcaauggcaguc

SEQ ID NO: 367847 - RNA, 22 nt, Human
aagcccagcugaaagcauuuuu

SEQ ID NO: 367848 - RNA, 22 nt, Human
ccugccuggcuuccagaagaga

SEQ ID NO: 367849 - RNA, 22 nt, Human
auaauuuaaauuaguaugugau

SEQ ID NO: 367850 - RNA, 22 nt, Human
gccaaagcagucuugccucugc

SEQ ID NO: 367851 - RNA, 21 nt, Human
ucugucucuccacugcccugc

SEQ ID NO: 367852 - RNA, 22 nt, Human
agggccuggaacuggagaccac

SEQ ID NO: 367853 - RNA, 22 nt, Human
cagucccagaagagccugggag

SEQ ID NO: 367854 - RNA, 22 nt, Human
cugugcaagacuuacuuuaaua

SEQ ID NO: 367855 - RNA, 22 nt, Human
cagggcagaaggcacucuacuc

SEQ ID NO: 367856 - RNA, 17 nt, Human
uguagcuucuccuucuc

SEQ ID NO: 367857 - RNA, 22 nt, Human
ggcauuaagaauaucauuaaaa

SEQ ID NO: 367858 - RNA, 22 nt, Human
aaaucaaaagacauguguuuua

SEQ ID NO: 367859 - RNA, 22 nt, Human
uuagucaauagugaauauagag

SEQ ID NO: 367860 - RNA, 22 nt, Human
ggcagcuguggacgucgucauu

SEQ ID NO: 367861 - RNA, 22 nt, Human
agggcacaagacucugagcccc

SEQ ID NO: 367862 - RNA, 21 nt, Human
uagaaaucagcuggugccucu

SEQ ID NO: 367863 - RNA, 22 nt, Human
ucuuuacaucacaauuguaugg

SEQ ID NO: 367864 - RNA, 21 nt, Human
agacagagugcagucuacaua

SEQ ID NO: 367865 - RNA, 22 nt, Human
caggcagcucaaccuugggagc

SEQ ID NO: 367866 - RNA, 22 nt, Human
cuccugggaauuuaguugugag

SEQ ID NO: 367867 - RNA, 18 nt, Human
uagggcucuagggaguga

SEQ ID NO: 367868 - RNA, 22 nt, Human
cccuuagcucaauuucuugccc

SEQ ID NO: 367869 - RNA, 22 nt, Human
aggggagguggcagaaaugugc

SEQ ID NO: 367870 - RNA, 22 nt, Human
auucaaguggcugcuauguuaa

SEQ ID NO: 367871 - RNA, 22 nt, Human
uuccagaauuuuguucugcuug

SEQ ID NO: 367872 - RNA, 21 nt, Human
agagagaaggccauauggucc

SEQ ID NO: 367873 - RNA, 22 nt, Human
cacagcugcacagaggaggugc

SEQ ID NO: 367874 - RNA, 22 nt, Human
ugccagcaguagcaguaggcca

SEQ ID NO: 367875 - RNA, 18 nt, Human
acacacacaccuguguau

SEQ ID NO: 367876 - RNA, 22 nt, Human
cucuguccuaugcuugauagaa

SEQ ID NO: 367877 - RNA, 22 nt, Human
gcagcugcuggaaguuccugcc

SEQ ID NO: 367878 - RNA, 22 nt, Human
agggcagauggaacuuccccga

SEQ ID NO: 367879 - RNA, 22 nt, Human
ucaggaugguccuuuaugagaa

SEQ ID NO: 367880 - RNA, 22 nt, Human
ugcagaagauggucugagcacc

SEQ ID NO: 367881 - RNA, 18 nt, Human
agcagggcauuuugccau

SEQ ID NO: 367882 - RNA, 22 nt, Human
aggccugagguuccugugcuca

SEQ ID NO: 367883 - RNA, 23 nt, Human
ucaggauauugugugccaaggug

SEQ ID NO: 367884 - RNA, 22 nt, Human
ugagccuguggggugacaacca

SEQ ID NO: 367885 - RNA, 22 nt, Human
uaguggaguagaaaccaaagaa

SEQ ID NO: 367886 - RNA, 22 nt, Human
auuucagcccaguaugagcccc

SEQ ID NO: 367887 - RNA, 22 nt, Human
acaggagacccugcugguucug

SEQ ID NO: 367888 - RNA, 22 nt, Human
ugaguccaccuuaguauauggg

SEQ ID NO: 367889 - RNA, 22 nt, Human
caguacuuuucaaccaguauga

SEQ ID NO: 367890 - RNA, 22 nt, Human
uuaauaaacaggugcagcugaa

SEQ ID NO: 367891 - RNA, 22 nt, Human
ucuaaacagccucuuaccaacu

SEQ ID NO: 367892 - RNA, 22 nt, Human
acccagcucuuugauggucuug

SEQ ID NO: 367893 - RNA, 22 nt, Human
acacacaauuaguuuuaugcuu

SEQ ID NO: 367894 - RNA, 22 nt, Human
agcaugcugguguucauggcag

SEQ ID NO: 367895 - RNA, 22 nt, Human
auuaaaauuccaagguaugcca

SEQ ID NO: 367896 - RNA, 20 nt, Human
caaugcacacagcugcuucu

SEQ ID NO: 367897 - RNA, 22 nt, Human
ccugagguggcugcagcacugc

SEQ ID NO: 367898 - RNA, 22 nt, Human
ggcugagcaauuuugaugacau

SEQ ID NO: 367899 - RNA, 22 nt, Human
ggccucuguuuggagccaggau

SEQ ID NO: 367900 - RNA, 22 nt, Human
gcucagagaaucagcagacacc

SEQ ID NO: 367901 - RNA, 22 nt, Human
uucacuuauagggauguuauug

SEQ ID NO: 367902 - RNA, 22 nt, Human
aauguguacuuuuucaugcuca

SEQ ID NO: 367903 - RNA, 22 nt, Human
uggcucagaggggaagugguuu

SEQ ID NO: 367904 - RNA, 22 nt, Human
uuuaaugauagcuguuucacau

SEQ ID NO: 367905 - RNA, 22 nt, Human
agucagugaaaacuagaauguu

SEQ ID NO: 367906 - RNA, 22 nt, Human
ccaggcaggcagcguucucagg

SEQ ID NO: 367907 - RNA, 22 nt, Human
uaauaucuacuucauagaguuu

SEQ ID NO: 367908 - RNA, 22 nt, Human
ccuggcugggguagaagugagg

SEQ ID NO: 367909 - RNA, 22 nt, Human
caggccucagagaguggcgggg

SEQ ID NO: 367910 - RNA, 22 nt, Human
aaucagaaccuugggucauaac

SEQ ID NO: 367911 - RNA, 22 nt, Human
accucugcaaugcaaugucaug

SEQ ID NO: 367912 - RNA, 23 nt, Human
uuucaacuccugccauuauuucu

SEQ ID NO: 367913 - RNA, 22 nt, Human
acccagcaaagauaaacuuaug

SEQ ID NO: 367914 - RNA, 22 nt, Human
ccuagaugggauggcggccggg

SEQ ID NO: 367915 - RNA, 22 nt, Human
ccacacagggggaugaguuauu

SEQ ID NO: 367916 - RNA, 22 nt, Human
aauaaaauggucaguuuucuca

SEQ ID NO: 367917 - RNA, 22 nt, Human
ugccugggccucugaggaaggc

SEQ ID NO: 367918 - RNA, 22 nt, Human
gggccugacugagagcuccuca

SEQ ID NO: 367919 - RNA, 22 nt, Human
agccuguggaucccugcacugg

SEQ ID NO: 367920 - RNA, 22 nt, Human
gaaggaaaacagaucugccuga

SEQ ID NO: 367921 - RNA, 22 nt, Human
uguacaguguagucaugagguu

SEQ ID NO: 367922 - RNA, 22 nt, Human
agauuucccucuuguauuugca

SEQ ID NO: 367923 - RNA, 22 nt, Human
cagggcucagaagacagaccuc

SEQ ID NO: 367924 - RNA, 22 nt, Human
aggucaaggccaaaagaguggu

SEQ ID NO: 367925 - RNA, 22 nt, Human
aggugcuagguguguaguggag

SEQ ID NO: 367926 - RNA, 22 nt, Human
cuggcccuucucuugcuuccug

SEQ ID NO: 367927 - RNA, 22 nt, Human
cugggccagggaggugucugua

SEQ ID NO: 367928 - RNA, 22 nt, Human
cagaucuguaguaaaagaucuc

SEQ ID NO: 367929 - RNA, 22 nt, Human
ggcuguggccagcggggcugag

SEQ ID NO: 367930 - RNA, 21 nt, Human
aauuacagauggaauuacaga

SEQ ID NO: 367931 - RNA, 22 nt, Human
gugaggugguacaauauuaacu

SEQ ID NO: 367932 - RNA, 22 nt, Human
guacacauuaugcuucucuaaa

SEQ ID NO: 367933 - RNA, 22 nt, Human
ccagugcaggugagcaccaggu

SEQ ID NO: 367934 - RNA, 22 nt, Human
gugugcagggaugagugcaggu

SEQ ID NO: 367935 - RNA, 22 nt, Human
cugcucuggcuguguacuucag

SEQ ID NO: 367936 - RNA, 22 nt, Human
ggaaccaggaguuacacgaguu

SEQ ID NO: 367937 - RNA, 22 nt, Human
ccccaccugugcgucugccgca

SEQ ID NO: 367938 - RNA, 22 nt, Human
ugcucugggcaacagccucccu

SEQ ID NO: 367939 - RNA, 22 nt, Human
agcaggaaguagucuguaagca

SEQ ID NO: 367940 - RNA, 20 nt, Human
augcuuucuugugugcugcu

SEQ ID NO: 367941 - RNA, 22 nt, Human
aaacauguuuucugaauauuuu

SEQ ID NO: 367942 - RNA, 22 nt, Human
gaacagcugcuagagaucugug

SEQ ID NO: 367943 - RNA, 22 nt, Human
aggauuuauuggugggaaguua

SEQ ID NO: 367944 - RNA, 22 nt, Human
ucacagaauagcacuguaagcg

SEQ ID NO: 367945 - RNA, 22 nt, Human
ggcagaguugguggagucaguu

SEQ ID NO: 367946 - RNA, 17 nt, Human
uuccaguuuaguauugu

SEQ ID NO: 367947 - RNA, 22 nt, Human
cugggagcccugacuagccugg

SEQ ID NO: 367948 - RNA, 22 nt, Human
ccagcauggcaccugagaugag

SEQ ID NO: 367949 - RNA, 22 nt, Human
guggcugcagagggcacagcau

SEQ ID NO: 367950 - RNA, 22 nt, Human
agagcugugaaaaugagguuug

SEQ ID NO: 367951 - RNA, 22 nt, Human
cagaguguauucugcaguugca

SEQ ID NO: 367952 - RNA, 22 nt, Human
aaacagcuaauggccaggaaua

SEQ ID NO: 367953 - RNA, 22 nt, Human
gccagcuggagugagagugggc

SEQ ID NO: 367954 - RNA, 22 nt, Human
aaaauauuuuagggccaggaga

SEQ ID NO: 367955 - RNA, 22 nt, Human
ggccugcuuuccgagccugcag

SEQ ID NO: 367956 - RNA, 22 nt, Human
gaguggggucugggcaucaguc

SEQ ID NO: 367957 - RNA, 19 nt, Human
ccagaggacuguuaaugaa

SEQ ID NO: 367958 - RNA, 22 nt, Human
gcacugcaucuacuggcaagua

SEQ ID NO: 367959 - RNA, 22 nt, Human
caaaggcuuugcuaugaugcau

SEQ ID NO: 367960 - RNA, 22 nt, Human
ugaugcugagccugggacugac

SEQ ID NO: 367961 - RNA, 22 nt, Human
uuccuuaguuauuugguccccu

SEQ ID NO: 367962 - RNA, 22 nt, Human
ugcauuguaggauguuuagcag

SEQ ID NO: 367963 - RNA, 22 nt, Human
aggcaggccccugagaauagac

SEQ ID NO: 367964 - RNA, 22 nt, Human
uucacagacuuuccauagauug

SEQ ID NO: 367965 - RNA, 22 nt, Human
ugccacacauugucagguuagu

SEQ ID NO: 367966 - RNA, 22 nt, Human
ugccacccagccaggaguggga

SEQ ID NO: 367967 - RNA, 22 nt, Human
uugaaaggguuaaagugguaaa

SEQ ID NO: 367968 - RNA, 22 nt, Human
gcccaggcuagcguagagugca

SEQ ID NO: 367969 - RNA, 22 nt, Human
ucucucuuuuuaaucauguaau

SEQ ID NO: 367970 - RNA, 22 nt, Human
ugcuauacggagcaucuucagg

SEQ ID NO: 367971 - RNA, 22 nt, Human
acacuucuauucccugcacaaa

SEQ ID NO: 367972 - RNA, 23 nt, Human
aggucagcaggcaaggaaauggc

SEQ ID NO: 367973 - RNA, 22 nt, Human
agguggguccuggcucugccau

SEQ ID NO: 367974 - RNA, 23 nt, Human
caguggagacucaugcuuccuua

SEQ ID NO: 367975 - RNA, 22 nt, Human
gaggccugcuuuggcacucugg

SEQ ID NO: 367976 - RNA, 22 nt, Human
auggagugggccaauuuuagug

SEQ ID NO: 367977 - RNA, 22 nt, Human
cuucucagaucucagcuuugag

SEQ ID NO: 367978 - RNA, 22 nt, Human
uguaaauaaugcauguaaauca

SEQ ID NO: 367979 - RNA, 22 nt, Human
ccucagagguuuucauucugua

SEQ ID NO: 367980 - RNA, 22 nt, Human
ugcugagcgcauccggcggccg

SEQ ID NO: 367981 - RNA, 22 nt, Human
ugucugucugcaagccagaaag

SEQ ID NO: 367982 - RNA, 22 nt, Human
gaaacaugucugacaauuuacc

SEQ ID NO: 367983 - RNA, 22 nt, Human
aguucccaggugaugcugaugu

SEQ ID NO: 367984 - RNA, 22 nt, Human
acaugcuuuucccacaauuaua

SEQ ID NO: 367985 - RNA, 22 nt, Human
ucugggugcccuuugcucuguu

SEQ ID NO: 367986 - RNA, 22 nt, Human
gcugggcuugguuucccugcuu

SEQ ID NO: 367987 - RNA, 22 nt, Human
agacacaggauucugcauuucu

SEQ ID NO: 367988 - RNA, 22 nt, Human
agcaugaaaggcgugccaacuu

SEQ ID NO: 367989 - RNA, 18 nt, Human
uggcucugcagccagaug

SEQ ID NO: 367990 - RNA, 22 nt, Human
cugcuguguaucauuuuagaug

SEQ ID NO: 367991 - RNA, 22 nt, Human
ugucugugaccucuuuggagcc

SEQ ID NO: 367992 - RNA, 22 nt, Human
auggcuuuguuccaauaaaacu

SEQ ID NO: 367993 - RNA, 22 nt, Human
caagaaucaacauuauuuagug

SEQ ID NO: 367994 - RNA, 22 nt, Human
uucuugauuucaugcaguuaag

SEQ ID NO: 367995 - RNA, 22 nt, Human
ucuggcuccaccuccuuuacua

SEQ ID NO: 367996 - RNA, 22 nt, Human
acacagaaccucauagccucuc

SEQ ID NO: 367997 - RNA, 22 nt, Human
cccaggaggcagagcuugcagu

SEQ ID NO: 367998 - RNA, 22 nt, Human
cuucagaaugggacuguguuug

SEQ ID NO: 367999 - RNA, 22 nt, Human
cugcugggcagaggcugcauga

SEQ ID NO: 368000 - RNA, 22 nt, Human
agccccuuccaguucucagauc

SEQ ID NO: 368001 - RNA, 22 nt, Human
ggcuucauggaggaggugaguc

SEQ ID NO: 368002 - RNA, 22 nt, Human
aggcuuccuggaggaagaggua

SEQ ID NO: 368003 - RNA, 22 nt, Human
uaauuucacugauaugaaguca

SEQ ID NO: 368004 - RNA, 22 nt, Human
uaacagaauuugcuaaacuccg

SEQ ID NO: 368005 - RNA, 22 nt, Human
ggcagggguccugguguugacu

SEQ ID NO: 368006 - RNA, 22 nt, Human
aaaagccaagguccucuucaga

SEQ ID NO: 368007 - RNA, 22 nt, Human
cugcccugcccaggccuugggc

SEQ ID NO: 368008 - RNA, 22 nt, Human
uccagaccaugugagaggcgca

SEQ ID NO: 368009 - RNA, 22 nt, Human
gcccuggaaucucuccauggga

SEQ ID NO: 368010 - RNA, 22 nt, Human
ggcagaggaagcuggaaguggg

SEQ ID NO: 368011 - RNA, 21 nt, Human
aaggagccuaggaggcucagg

SEQ ID NO: 368012 - RNA, 22 nt, Human
gauuuccuugcauauugguaau

SEQ ID NO: 368013 - RNA, 22 nt, Human
acaguaccugcucucaagcaaa

SEQ ID NO: 368014 - RNA, 22 nt, Human
ggcagcugucucugaguuagca

SEQ ID NO: 368015 - RNA, 22 nt, Human
guagcuuauuagggauaauagu

SEQ ID NO: 368016 - RNA, 22 nt, Human
aagggcagccugacucacgguc

SEQ ID NO: 368017 - RNA, 22 nt, Human
uagccggguguugugucaugca

SEQ ID NO: 368018 - RNA, 22 nt, Human
gcagguguggaguggggugagc

SEQ ID NO: 368019 - RNA, 22 nt, Human
gcaugucaugucauguaggaau

SEQ ID NO: 368020 - RNA, 22 nt, Human
agauuguagaaacuguagcauu

SEQ ID NO: 368021 - RNA, 22 nt, Human
ggagaggaaaugccagcacuuc

SEQ ID NO: 368022 - RNA, 22 nt, Human
uggccuggcucacagugagauu

SEQ ID NO: 368023 - RNA, 22 nt, Human
uggcccugcuguaucaucugcu

SEQ ID NO: 368024 - RNA, 22 nt, Human
cugggagguggagguugcauug

SEQ ID NO: 368025 - RNA, 22 nt, Human
gggcccuggauuuaagcaugga

SEQ ID NO: 368026 - RNA, 22 nt, Human
agccccucuguggcucugccuc

SEQ ID NO: 368027 - RNA, 22 nt, Human
aggcucauucuugccucugagc

SEQ ID NO: 368028 - RNA, 22 nt, Human
ugaagcugugggcaguggagcc

SEQ ID NO: 368029 - RNA, 19 nt, Human
gcuggcagauguggccgug

SEQ ID NO: 368030 - RNA, 22 nt, Human
caaauucagaaaauugguagag

SEQ ID NO: 368031 - RNA, 22 nt, Human
ggaagccaggcugggggaucug

SEQ ID NO: 368032 - RNA, 22 nt, Human
ccaggagaugggaaaguagcag

SEQ ID NO: 368033 - RNA, 22 nt, Human
ccaggcucaggugcgagagaca

SEQ ID NO: 368034 - RNA, 22 nt, Human
gggcaguguggucgugccuuug

SEQ ID NO: 368035 - RNA, 22 nt, Human
auccuugacacacuccaguacu

SEQ ID NO: 368036 - RNA, 22 nt, Human
cccuugcacauuugucuuuaau

SEQ ID NO: 368037 - RNA, 22 nt, Human
cuuuccaaugcauuuccaaugu

SEQ ID NO: 368038 - RNA, 22 nt, Human
ggcuagaauaauugacuucauu

SEQ ID NO: 368039 - RNA, 22 nt, Human
aggcaggcugcuauggaguaga

SEQ ID NO: 368040 - RNA, 22 nt, Human
ccagaagucaggaaugagucuu

SEQ ID NO: 368041 - RNA, 22 nt, Human
augcugugagugugccgcagag

SEQ ID NO: 368042 - RNA, 22 nt, Human
augcuuuuccuaaaaugaugcc

SEQ ID NO: 368043 - RNA, 22 nt, Human
uauccaaaggaacaaucacagc

SEQ ID NO: 368044 - RNA, 22 nt, Human
uuucucaaggugucauguauuu

SEQ ID NO: 368045 - RNA, 22 nt, Human
gggcagcugucuugguucucaa

SEQ ID NO: 368046 - RNA, 22 nt, Human
uguauuagagcaguagaauuau

SEQ ID NO: 368047 - RNA, 22 nt, Human
acagaauugaaaguauaaucug

SEQ ID NO: 368048 - RNA, 22 nt, Human
gagcagugaagacagaaguaca

SEQ ID NO: 368049 - RNA, 22 nt, Human
ugcuuuaagagauuguuaguac

SEQ ID NO: 368050 - RNA, 22 nt, Human
cagcaggaccauugaggcauca

SEQ ID NO: 368051 - RNA, 20 nt, Human
aguuauaguaucuagccaug

SEQ ID NO: 368052 - RNA, 18 nt, Human
ugaaacaagaauggugca

SEQ ID NO: 368053 - RNA, 22 nt, Human
acacaguaccccaaggcugggc

SEQ ID NO: 368054 - RNA, 22 nt, Human
agccacaccuguccugccagcu

SEQ ID NO: 368055 - RNA, 22 nt, Human
cgugucaucugagccuugggcg

SEQ ID NO: 368056 - RNA, 22 nt, Human
caaguccuaaauguauuuguug

SEQ ID NO: 368057 - RNA, 19 nt, Human
gccucugcuggggacaggc

SEQ ID NO: 368058 - RNA, 22 nt, Human
gcccucagaggacagcugacuu

SEQ ID NO: 368059 - RNA, 22 nt, Human
gagauguacaauguguauuaau

SEQ ID NO: 368060 - RNA, 22 nt, Human
ggacagcugcuuucaggccaca

SEQ ID NO: 368061 - RNA, 22 nt, Human
aggccaggaccauuagcccaga

SEQ ID NO: 368062 - RNA, 22 nt, Human
gcugguuagaaaacagagcuca

SEQ ID NO: 368063 - RNA, 22 nt, Human
ccuggagcgcgggucaagcugg

SEQ ID NO: 368064 - RNA, 20 nt, Human
cacaggccuugugagcagac

SEQ ID NO: 368065 - RNA, 22 nt, Human
ugcugucaguuggcaggaugag

SEQ ID NO: 368066 - RNA, 22 nt, Human
cacaggcuccggccuugcagcc

SEQ ID NO: 368067 - RNA, 22 nt, Human
ggccagagucuauaugcagaca

SEQ ID NO: 368068 - RNA, 22 nt, Human
aucuggcuuucuuaaugacuua

SEQ ID NO: 368069 - RNA, 22 nt, Human
aggcacugauucucagaguuac

SEQ ID NO: 368070 - RNA, 22 nt, Human
uaccuuggguugaguucauucu

SEQ ID NO: 368071 - RNA, 22 nt, Human
gugugccaacaaaagacagugc

SEQ ID NO: 368072 - RNA, 22 nt, Human
cuagcaucagaugagaagcugu

SEQ ID NO: 368073 - RNA, 22 nt, Human
agcugagcacauucaaacaggu

SEQ ID NO: 368074 - RNA, 22 nt, Human
caguggaaaucagagugagagu

SEQ ID NO: 368075 - RNA, 22 nt, Human
aaugaaacuguauauagacugu

SEQ ID NO: 368076 - RNA, 22 nt, Human
gcacccaguuugucucaggguu

SEQ ID NO: 368077 - RNA, 22 nt, Human
agcugucagugcugugccugua

SEQ ID NO: 368078 - RNA, 22 nt, Human
ugcagggcuaagucagagccug

SEQ ID NO: 368079 - RNA, 22 nt, Human
aaacggauauaacagcaaacgc

SEQ ID NO: 368080 - RNA, 22 nt, Human
uuuaagauucaguaaggcaaac

SEQ ID NO: 368081 - RNA, 19 nt, Human
ccaggccugcgggcguugg

SEQ ID NO: 368082 - RNA, 22 nt, Human
gcuggggucugugaggagggcu

SEQ ID NO: 368083 - RNA, 18 nt, Human
cccucuccugcuaguggg

SEQ ID NO: 368084 - RNA, 23 nt, Human
aggaaagcauucauuuuuaccau

SEQ ID NO: 368085 - RNA, 22 nt, Human
cuauuagguaugcagccuauuu

SEQ ID NO: 368086 - RNA, 22 nt, Human
aggccugggcaagaaggggcgu

SEQ ID NO: 368087 - RNA, 22 nt, Human
ggcugccuccucgagacaggau

SEQ ID NO: 368088 - RNA, 22 nt, Human
ucaggcugaaggaggccuaucu

SEQ ID NO: 368089 - RNA, 22 nt, Human
auguuuccauuuucuuguauca

SEQ ID NO: 368090 - RNA, 22 nt, Human
acaugauuaaaagauuuuaaag

SEQ ID NO: 368091 - RNA, 22 nt, Human
uuugcauuuccagaguagcaga

SEQ ID NO: 368092 - RNA, 22 nt, Human
aaggccugggaguacugggaca

SEQ ID NO: 368093 - RNA, 22 nt, Human
gaggcagaggaagguggucucu

SEQ ID NO: 368094 - RNA, 22 nt, Human
uggcagcacaagguggcccaug

SEQ ID NO: 368095 - RNA, 22 nt, Human
ggccuguguccuccuugcccug

SEQ ID NO: 368096 - RNA, 22 nt, Human
accugccucagugcagcuggau

SEQ ID NO: 368097 - RNA, 22 nt, Human
uaggcagcugcaaacuucgguc

SEQ ID NO: 368098 - RNA, 22 nt, Human
cucacugcccugaaguuggguu

SEQ ID NO: 368099 - RNA, 22 nt, Human
acuguggaugccaaaggggagg

SEQ ID NO: 368100 - RNA, 22 nt, Human
gccuggagagcacugugcgcuu

SEQ ID NO: 368101 - RNA, 22 nt, Human
caacuuugugugaccuagauag

SEQ ID NO: 368102 - RNA, 22 nt, Human
aaacuuuggauugugauugugc

SEQ ID NO: 368103 - RNA, 19 nt, Human
uacauuuguguacacuugu

SEQ ID NO: 368104 - RNA, 19 nt, Human
ucauuguugguuugucggg

SEQ ID NO: 368105 - RNA, 22 nt, Human
caggccuggguucaaaucccuu

SEQ ID NO: 368106 - RNA, 22 nt, Human
cauuugcauaugaagaaguaag

SEQ ID NO: 368107 - RNA, 22 nt, Human
agucucugcaugccugcugugc

SEQ ID NO: 368108 - RNA, 22 nt, Human
acgugcaggaucugguuggcga

SEQ ID NO: 368109 - RNA, 22 nt, Human
ccugcagaaaggguccccagga

SEQ ID NO: 368110 - RNA, 22 nt, Human
cuacauuaaauuggcuuacuua

SEQ ID NO: 368111 - RNA, 22 nt, Human
uaguccuuacuuacuagaauaa

SEQ ID NO: 368112 - RNA, 22 nt, Human
ccuggccucgugcucacggcuc

SEQ ID NO: 368113 - RNA, 19 nt, Human
ucccgcccacugagcgugc

SEQ ID NO: 368114 - RNA, 21 nt, Human
uucuucaugaugauuaauggc

SEQ ID NO: 368115 - RNA, 22 nt, Human
gaagcagcucagauugacugaa

SEQ ID NO: 368116 - RNA, 22 nt, Human
cucccaggcacagggaggagcc

SEQ ID NO: 368117 - RNA, 19 nt, Human
agcuuccauauucucuagu

SEQ ID NO: 368118 - RNA, 22 nt, Human
acaggcagguccugucccagcu

SEQ ID NO: 368119 - RNA, 23 nt, Human
cccuggccuuggggcacaggcug

SEQ ID NO: 368120 - RNA, 19 nt, Human
uguguguuuauauauguau

SEQ ID NO: 368121 - RNA, 22 nt, Human
aguuauaaucugcuacugauau

SEQ ID NO: 368122 - RNA, 22 nt, Human
uccuucagcucucuauuuagau

SEQ ID NO: 368123 - RNA, 22 nt, Human
ccagaccacccuggccaugcac

SEQ ID NO: 368124 - RNA, 22 nt, Human
aaaacauguccauacagaaacu

SEQ ID NO: 368125 - RNA, 22 nt, Human
caugaaaauaacauuguuguga

SEQ ID NO: 368126 - RNA, 20 nt, Human
aggauuuacuacuaccugcu

SEQ ID NO: 368127 - RNA, 22 nt, Human
cuagaaaaauacuuuauuguga

SEQ ID NO: 368128 - RNA, 23 nt, Human
cuggaagugcuuuuauagcuuug

SEQ ID NO: 368129 - RNA, 22 nt, Human
aagcaagacagaaguuacugcc

SEQ ID NO: 368130 - RNA, 22 nt, Human
cugcuguguggauucaauggcu

SEQ ID NO: 368131 - RNA, 22 nt, Human
ucacaggguguacaucaccuau

SEQ ID NO: 368132 - RNA, 22 nt, Human
ggcagcugauuagcaucaagga

SEQ ID NO: 368133 - RNA, 22 nt, Human
gaagaaggugcuacacagggca

SEQ ID NO: 368134 - RNA, 23 nt, Human
ccugugugcccuuaauucacagc

SEQ ID NO: 368135 - RNA, 22 nt, Human
uucugcagcccaacaguaguuu

SEQ ID NO: 368136 - RNA, 22 nt, Human
aucugccugcaguggagguggg

SEQ ID NO: 368137 - RNA, 22 nt, Human
uuuucauuuuuguagaugcaag

SEQ ID NO: 368138 - RNA, 20 nt, Human
ugccaggcugcacgccugcc

SEQ ID NO: 368139 - RNA, 22 nt, Human
cauuacauuucaaaauguuucc

SEQ ID NO: 368140 - RNA, 22 nt, Human
caggccuggggcuggcuuccag

SEQ ID NO: 368141 - RNA, 22 nt, Human
ucauuucaaguucugacagcua

SEQ ID NO: 368142 - RNA, 22 nt, Human
ccuggaugauccaugucaugga

SEQ ID NO: 368143 - RNA, 22 nt, Human
caaaauguucuggcaccuuuaa

SEQ ID NO: 368144 - RNA, 22 nt, Human
ugcauuauuugcaugugccugu

SEQ ID NO: 368145 - RNA, 22 nt, Human
cagagcagguaucuuuggugaa

SEQ ID NO: 368146 - RNA, 22 nt, Human
ccuccaggaacuugagagacac

SEQ ID NO: 368147 - RNA, 22 nt, Human
aaagcaguauauugguaguugu

SEQ ID NO: 368148 - RNA, 22 nt, Human
ugggauggcauccugggccuug

SEQ ID NO: 368149 - RNA, 22 nt, Human
uucuucaacaaggacacuguua

SEQ ID NO: 368150 - RNA, 17 nt, Human
cauuuguugaucaguug

SEQ ID NO: 368151 - RNA, 22 nt, Human
gccuccugguugcuucuccaac

SEQ ID NO: 368152 - RNA, 22 nt, Human
aaagguuaguucuuagaagugc

SEQ ID NO: 368153 - RNA, 22 nt, Human
cagcaggaggugagaugugacc

SEQ ID NO: 368154 - RNA, 22 nt, Human
uucauucuuauuugugaucugg

SEQ ID NO: 368155 - RNA, 22 nt, Human
ucugcuguucauucuuuuagcu

SEQ ID NO: 368156 - RNA, 20 nt, Human
ggucccugcccucugucauc

SEQ ID NO: 368157 - RNA, 22 nt, Human
ggcccugggcagaggagugggc

SEQ ID NO: 368158 - RNA, 22 nt, Human
ccucaggguggcaucagaucuu

SEQ ID NO: 368159 - RNA, 22 nt, Human
cugggaggauacacaagaucag

SEQ ID NO: 368160 - RNA, 22 nt, Human
aguuuaugaaacacagauuuga

SEQ ID NO: 368161 - RNA, 22 nt, Human
ucaauaaaauuguuuuccuauc

SEQ ID NO: 368162 - RNA, 22 nt, Human
agcccuagagcuggaggucagu

SEQ ID NO: 368163 - RNA, 20 nt, Human
ugcuuuaugcuauacuuugu

SEQ ID NO: 368164 - RNA, 22 nt, Human
ucucagagagaugaaacuucca

SEQ ID NO: 368165 - RNA, 22 nt, Human
aucugccuccaaguccaugugu

SEQ ID NO: 368166 - RNA, 22 nt, Human
aggaguggaauuacuggguucu

SEQ ID NO: 368167 - RNA, 22 nt, Human
cucagggggaaucaggucacag

SEQ ID NO: 368168 - RNA, 17 nt, Human
uucucugagcuguauug

SEQ ID NO: 368169 - RNA, 22 nt, Human
ucucagggaccaugaugaugac

SEQ ID NO: 368170 - RNA, 21 nt, Human
agggucaggaaccaggguacc

SEQ ID NO: 368171 - RNA, 22 nt, Human
gagaagccgagucagcugagcc

SEQ ID NO: 368172 - RNA, 22 nt, Human
gcccagcagaucucagugucuc

SEQ ID NO: 368173 - RNA, 19 nt, Human
cagagccucagagcuagaa

SEQ ID NO: 368174 - RNA, 22 nt, Human
aagcuggcaugucaccugagaa

SEQ ID NO: 368175 - RNA, 22 nt, Human
uggucucugacucugaagaccc

SEQ ID NO: 368176 - RNA, 22 nt, Human
uggcucaguggcagccgcagcu

SEQ ID NO: 368177 - RNA, 22 nt, Human
ugugcuucugcagagacuauuu

SEQ ID NO: 368178 - RNA, 22 nt, Human
uuccucaugggguuccuucaga

SEQ ID NO: 368179 - RNA, 22 nt, Human
cuuaauuuuuguaguagaugga

SEQ ID NO: 368180 - RNA, 22 nt, Human
aagacauuacuggaaucugacu

SEQ ID NO: 368181 - RNA, 22 nt, Human
ccuugcaggggaacaggcagug

SEQ ID NO: 368182 - RNA, 22 nt, Human
ugccaggcaacugcccagccau

SEQ ID NO: 368183 - RNA, 22 nt, Human
aauuucaaugcacucaugguug

SEQ ID NO: 368184 - RNA, 22 nt, Human
uggccugggccugccggugcaa

SEQ ID NO: 368185 - RNA, 22 nt, Human
uucuucuugaaacuuuagguug

SEQ ID NO: 368186 - RNA, 22 nt, Human
guuaucaugcuucaucaucacu

SEQ ID NO: 368187 - RNA, 23 nt, Human
cagggcugggcuugguguuaggc

SEQ ID NO: 368188 - RNA, 22 nt, Human
ugagcauggugggugcagagca

SEQ ID NO: 368189 - RNA, 22 nt, Human
acaccauacucauguugguucc

SEQ ID NO: 368190 - RNA, 22 nt, Human
ucagcuggcaguucagaggcug

SEQ ID NO: 368191 - RNA, 22 nt, Human
cugaaggacuuggugauaguug

SEQ ID NO: 368192 - RNA, 22 nt, Human
cuuuccuagauggccaucuuuc

SEQ ID NO: 368193 - RNA, 22 nt, Human
uuguuuuuaugaacauccagga

SEQ ID NO: 368194 - RNA, 22 nt, Human
ucugucacucuagagauggcag

SEQ ID NO: 368195 - RNA, 22 nt, Human
ccagcuggagccaagguggacu

SEQ ID NO: 368196 - RNA, 22 nt, Human
ucagcaguggcucucaugcagu

SEQ ID NO: 368197 - RNA, 22 nt, Human
cugcugugucagaguccagggg

SEQ ID NO: 368198 - RNA, 22 nt, Human
gcaaagcugggugugaaugcac

SEQ ID NO: 368199 - RNA, 20 nt, Human
aggcaguuagaaggagauga

SEQ ID NO: 368200 - RNA, 22 nt, Human
cuggagccccagacagggagag

SEQ ID NO: 368201 - RNA, 22 nt, Human
ggcuguggacacugagcucaga

SEQ ID NO: 368202 - RNA, 22 nt, Human
gcucccagcuggagccucaaca

SEQ ID NO: 368203 - RNA, 22 nt, Human
ggcaggcucagcagccaaggag

SEQ ID NO: 368204 - RNA, 22 nt, Human
ccagcuccugggucuuagucag

SEQ ID NO: 368205 - RNA, 22 nt, Human
aggacuccauguguccuggaga

SEQ ID NO: 368206 - RNA, 22 nt, Human
cagaaauguucuaaugauucag

SEQ ID NO: 368207 - RNA, 22 nt, Human
ccugccuggagcugagugugga

SEQ ID NO: 368208 - RNA, 22 nt, Human
gcuguucacauuuugggccaaa

SEQ ID NO: 368209 - RNA, 22 nt, Human
uuucuuauauucugucauuguu

SEQ ID NO: 368210 - RNA, 21 nt, Human
ugaggcucaucuuauguggcu

SEQ ID NO: 368211 - RNA, 22 nt, Human
aaagcagaacugagagagcugg

SEQ ID NO: 368212 - RNA, 22 nt, Human
ugugcuucuugcagcuccugua

SEQ ID NO: 368213 - RNA, 22 nt, Human
cagggcagagccaggauuucaa

SEQ ID NO: 368214 - RNA, 22 nt, Human
aagggcuggagacugggucuuc

SEQ ID NO: 368215 - RNA, 22 nt, Human
ggggcaggagguguucucuuuu

SEQ ID NO: 368216 - RNA, 22 nt, Human
gaaggcuggcuuucugagagca

SEQ ID NO: 368217 - RNA, 22 nt, Human
auacuuacuuuucuucagacua

SEQ ID NO: 368218 - RNA, 22 nt, Human
agcagugaugcaugacagccua

SEQ ID NO: 368219 - RNA, 21 nt, Human
gagcauggcuuacaucagcag

SEQ ID NO: 368220 - RNA, 22 nt, Human
cagagcuggguuugggaaaccu

SEQ ID NO: 368221 - RNA, 22 nt, Human
cuacugaguccuucagcugcca

SEQ ID NO: 368222 - RNA, 21 nt, Human
cugcucuggggaccggcugug

SEQ ID NO: 368223 - RNA, 22 nt, Human
ggugcuggacacguggcacucc

SEQ ID NO: 368224 - RNA, 22 nt, Human
agaggccagcagugccuaucug

SEQ ID NO: 368225 - RNA, 22 nt, Human
ggaagaggcucucauugagggc

SEQ ID NO: 368226 - RNA, 22 nt, Human
auaaagaggauguauuuacagc

SEQ ID NO: 368227 - RNA, 22 nt, Human
aacaucagaauauccauguugg

SEQ ID NO: 368228 - RNA, 22 nt, Human
cucacagguaccagcacccucc

SEQ ID NO: 368229 - RNA, 20 nt, Human
ccucaagcagacugacagcu

SEQ ID NO: 368230 - RNA, 22 nt, Human
ugcuccauucucuagccagugc

SEQ ID NO: 368231 - RNA, 22 nt, Human
ucucuuuuauguacacccugac

SEQ ID NO: 368232 - RNA, 22 nt, Human
cccaggagaccuagaucuguuu

SEQ ID NO: 368233 - RNA, 22 nt, Human
gcaggcagagagggguuuccag

SEQ ID NO: 368234 - RNA, 22 nt, Human
aauucuauaggcaagcuauuuu

SEQ ID NO: 368235 - RNA, 22 nt, Human
guggccucaugucuauaaagag

SEQ ID NO: 368236 - RNA, 22 nt, Human
ucaccaggcuccuguuaagaug

SEQ ID NO: 368237 - RNA, 22 nt, Human
aaggccaggacaccaggggacu

SEQ ID NO: 368238 - RNA, 20 nt, Human
gaugggaaucggagcuggua

SEQ ID NO: 368239 - RNA, 22 nt, Human
uauacagaacugcacgugcacg

SEQ ID NO: 368240 - RNA, 22 nt, Human
gccaggcuccaggcccuccuga

SEQ ID NO: 368241 - RNA, 22 nt, Human
ggcccaaggcccaggucgagcu

SEQ ID NO: 368242 - RNA, 19 nt, Human
guucaaacacugauucagc

SEQ ID NO: 368243 - RNA, 22 nt, Human
cuccaggaaagccugaggcccg

SEQ ID NO: 368244 - RNA, 22 nt, Human
gugcagugacccuggagagcug

SEQ ID NO: 368245 - RNA, 22 nt, Human
ugaacauauucaccucuaaaua

SEQ ID NO: 368246 - RNA, 22 nt, Human
cugggcucagcccaugcugucc

SEQ ID NO: 368247 - RNA, 22 nt, Human
aagauauucaaagauuuauuag

SEQ ID NO: 368248 - RNA, 22 nt, Human
cuggacuuuggcccaucugcca

SEQ ID NO: 368249 - RNA, 22 nt, Human
uggggugguaauacaccguucu

SEQ ID NO: 368250 - RNA, 22 nt, Human
gagagugaggcaucaggggcag

SEQ ID NO: 368251 - RNA, 22 nt, Human
uggaggaaguugcuggaaguca

SEQ ID NO: 368252 - RNA, 22 nt, Human
gugaaggcuacaagagaucaag

SEQ ID NO: 368253 - RNA, 22 nt, Human
uggggugccgacagggagggca

SEQ ID NO: 368254 - RNA, 22 nt, Human
uugauacauuuuuaggauaaac

SEQ ID NO: 368255 - RNA, 22 nt, Human
agauuuacugagaacugauuac

SEQ ID NO: 368256 - RNA, 22 nt, Human
gaagcagcuggugagauggagc

SEQ ID NO: 368257 - RNA, 22 nt, Human
ugcauauuuuauaaagauggaa

SEQ ID NO: 368258 - RNA, 22 nt, Human
gcaggagcucguuuccaggcug

SEQ ID NO: 368259 - RNA, 22 nt, Human
aggaggccgggauucuggagau

SEQ ID NO: 368260 - RNA, 22 nt, Human
uggcuccuaggauggugccugg

SEQ ID NO: 368261 - RNA, 22 nt, Human
uuuguacauccuaauucugagu

SEQ ID NO: 368262 - RNA, 23 nt, Human
ggagaggggugugggcaucuuua

SEQ ID NO: 368263 - RNA, 22 nt, Human
uggcaugauaggaggugcagaa

SEQ ID NO: 368264 - RNA, 22 nt, Human
gaggugagaagggggucagaug

SEQ ID NO: 368265 - RNA, 22 nt, Human
gcuggcuccucuguccucacgg

SEQ ID NO: 368266 - RNA, 22 nt, Human
gggcugggcaugguguucccuc

SEQ ID NO: 368267 - RNA, 23 nt, Human
aaucuauacuuaggcugguaaua

SEQ ID NO: 368268 - RNA, 22 nt, Human
gcugagugagguccagagcuug

SEQ ID NO: 368269 - RNA, 21 nt, Human
auggauuuaaacaggccacaa

SEQ ID NO: 368270 - RNA, 22 nt, Human
agccuggauucgugcauccaca

SEQ ID NO: 368271 - RNA, 22 nt, Human
guuauaaaggugauaaugguca

SEQ ID NO: 368272 - RNA, 20 nt, Human
agugugcauuuagagucugc

SEQ ID NO: 368273 - RNA, 22 nt, Human
cauuugcaagagauaaauguuu

SEQ ID NO: 368274 - RNA, 22 nt, Human
agagcugugcuuugcaccacgu

SEQ ID NO: 368275 - RNA, 22 nt, Human
ggcucaccauggccucccugcu

SEQ ID NO: 368276 - RNA, 22 nt, Human
uuacauuuugggguaaggauaa

SEQ ID NO: 368277 - RNA, 23 nt, Human
acuauaaaguuguucugauuuac

SEQ ID NO: 368278 - RNA, 22 nt, Human
ugucaugccauuuaaaauguuu

SEQ ID NO: 368279 - RNA, 22 nt, Human
ggcugcucugccuuccagcugg

SEQ ID NO: 368280 - RNA, 22 nt, Human
acauacauaugacaacuuuccu

SEQ ID NO: 368281 - RNA, 22 nt, Human
agaaggcacucacacuggcacg

SEQ ID NO: 368282 - RNA, 22 nt, Human
ccaaaguccuuucuccaccugc

SEQ ID NO: 368283 - RNA, 22 nt, Human
cauacuuuugcccugacauucu

SEQ ID NO: 368284 - RNA, 22 nt, Human
auuugcaaagucguaucuguga

SEQ ID NO: 368285 - RNA, 22 nt, Human
ucaggagagagaaauuggggcu

SEQ ID NO: 368286 - RNA, 17 nt, Human
acaggccugcuugcacu

SEQ ID NO: 368287 - RNA, 22 nt, Human
cuaaaugcccuacaaugacugg

SEQ ID NO: 368288 - RNA, 22 nt, Human
cagagggagcccuccaggagca

SEQ ID NO: 368289 - RNA, 22 nt, Human
cugccuggaccggcagcccucc

SEQ ID NO: 368290 - RNA, 22 nt, Human
gcugccuguugaagggucugug

SEQ ID NO: 368291 - RNA, 22 nt, Human
aucagcaagcauuuauugagug

SEQ ID NO: 368292 - RNA, 22 nt, Human
uccuuuuuauaguuagagaaac

SEQ ID NO: 368293 - RNA, 22 nt, Human
auaacaugaccugugcuucaca

SEQ ID NO: 368294 - RNA, 22 nt, Human
ugggcuccggcggccucaggcu

SEQ ID NO: 368295 - RNA, 22 nt, Human
uaggagcuaaaauauuuuauau

SEQ ID NO: 368296 - RNA, 22 nt, Human
agcugcuccuuuccugcaggcg

SEQ ID NO: 368297 - RNA, 22 nt, Human
uggaagccaggcccgcuccuaa

SEQ ID NO: 368298 - RNA, 22 nt, Human
ggguggagaggcuaaguccagu

SEQ ID NO: 368299 - RNA, 22 nt, Human
aggagccaagauggggcaagua

SEQ ID NO: 368300 - RNA, 22 nt, Human
gggcuguaggagcuggaauggg

SEQ ID NO: 368301 - RNA, 18 nt, Human
uggcagccagcugcuccu

SEQ ID NO: 368302 - RNA, 22 nt, Human
caagggccuccaccuugcucgu

SEQ ID NO: 368303 - RNA, 22 nt, Human
caggugggagcggagacugauu

SEQ ID NO: 368304 - RNA, 22 nt, Human
aggcagauuacuugaggccagg

SEQ ID NO: 368305 - RNA, 22 nt, Human
agggcuggccacaugauuuggu

SEQ ID NO: 368306 - RNA, 22 nt, Human
ccagcugcuugggaaaaugucu

SEQ ID NO: 368307 - RNA, 22 nt, Human
cccagccucugggcucacccaa

SEQ ID NO: 368308 - RNA, 22 nt, Human
cauugcacuccaucuugggcaa

SEQ ID NO: 368309 - RNA, 17 nt, Human
ugaaaucagcacccagg

SEQ ID NO: 368310 - RNA, 22 nt, Human
aaaugaacucuuccugcauccc

SEQ ID NO: 368311 - RNA, 22 nt, Human
guucuguacuccaagcucuucc

SEQ ID NO: 368312 - RNA, 22 nt, Human
gccaggcaggccacgcuguguu

SEQ ID NO: 368313 - RNA, 22 nt, Human
cuggagccacuuuuuauccuuu

SEQ ID NO: 368314 - RNA, 22 nt, Human
gaaacugugaucguguucuggg

SEQ ID NO: 368315 - RNA, 22 nt, Human
ugcagggccccucugcaugagu

SEQ ID NO: 368316 - RNA, 22 nt, Human
gcagccaccucccauggcgggg

SEQ ID NO: 368317 - RNA, 22 nt, Human
cagcuuuguggccuugaccucg

SEQ ID NO: 368318 - RNA, 22 nt, Human
acaaauuuauugaagggcauau

SEQ ID NO: 368319 - RNA, 22 nt, Human
gcuggggaggcagcagagaaca

SEQ ID NO: 368320 - RNA, 22 nt, Human
cuagagggauguuaggauagca

SEQ ID NO: 368321 - RNA, 22 nt, Human
gcaccacaucaaugaggggagc

SEQ ID NO: 368322 - RNA, 22 nt, Human
gcagcuuuguggagaggcccau

SEQ ID NO: 368323 - RNA, 21 nt, Human
acagucuccccagaucucucc

SEQ ID NO: 368324 - RNA, 22 nt, Human
ccagcccucacugaggccucuc

SEQ ID NO: 368325 - RNA, 22 nt, Human
gcugucuccauagcuguguguc

SEQ ID NO: 368326 - RNA, 22 nt, Human
ugugaaggcagcagcucugucc

SEQ ID NO: 368327 - RNA, 22 nt, Human
gagggaauggugugcaagaggu

SEQ ID NO: 368328 - RNA, 22 nt, Human
gaagaauccuguccucuuuagg

SEQ ID NO: 368329 - RNA, 22 nt, Human
ucugagagcuguagaagccuau

SEQ ID NO: 368330 - RNA, 22 nt, Human
uacauugugauguuucaauaca

SEQ ID NO: 368331 - RNA, 22 nt, Human
uuucaaaccuacuuguauguuu

SEQ ID NO: 368332 - RNA, 22 nt, Human
acuggcugaaguuuacuuuuug

SEQ ID NO: 368333 - RNA, 19 nt, Human
ggcugggucuggcagguuc

SEQ ID NO: 368334 - RNA, 22 nt, Human
uacauaaugagcuaguuaaguu

SEQ ID NO: 368335 - RNA, 22 nt, Human
ucugucuucaucagcaugugau

SEQ ID NO: 368336 - RNA, 22 nt, Human
agcuuuguggcuuugcaagacu

SEQ ID NO: 368337 - RNA, 22 nt, Human
cucucugagugagggacaagcu

SEQ ID NO: 368338 - RNA, 22 nt, Human
cagaguguaucuguguaagcau

SEQ ID NO: 368339 - RNA, 22 nt, Human
ccagccaguccagcauuggugu

SEQ ID NO: 368340 - RNA, 22 nt, Human
augcaagauguauagaagacuu

SEQ ID NO: 368341 - RNA, 22 nt, Human
gggagucugggcuagacuccuu

SEQ ID NO: 368342 - RNA, 22 nt, Human
ugucccagggaaggcccagcac

SEQ ID NO: 368343 - RNA, 17 nt, Human
aaucagauuucugagga

SEQ ID NO: 368344 - RNA, 22 nt, Human
uucugaaagccaauucauugaa

SEQ ID NO: 368345 - RNA, 22 nt, Human
ccucuggcaacuucacagccca

SEQ ID NO: 368346 - RNA, 22 nt, Human
ggcauggcuggguucuggugag

SEQ ID NO: 368347 - RNA, 22 nt, Human
ugguggcuucugaggauggcga

SEQ ID NO: 368348 - RNA, 22 nt, Human
uggcucaggccacuucuuuuau

SEQ ID NO: 368349 - RNA, 22 nt, Human
uuuuauguaauccuuacugucg

SEQ ID NO: 368350 - RNA, 22 nt, Human
uuugaagucagacacugcuuug

SEQ ID NO: 368351 - RNA, 22 nt, Human
gugaaaauaaggcugguucuug

SEQ ID NO: 368352 - RNA, 22 nt, Human
uuagaaaaaggcuguggucuua

SEQ ID NO: 368353 - RNA, 22 nt, Human
uccugcagacauuuacaccuuu

SEQ ID NO: 368354 - RNA, 22 nt, Human
ggagccuuccagacugcccaca

SEQ ID NO: 368355 - RNA, 22 nt, Human
agcagcauagaugcuauccgag

SEQ ID NO: 368356 - RNA, 22 nt, Human
aucaggaucagggcuagcagag

SEQ ID NO: 368357 - RNA, 22 nt, Human
uccugguggugccagcugcagg

SEQ ID NO: 368358 - RNA, 21 nt, Human
aaauuucugcaagccucaacu

SEQ ID NO: 368359 - RNA, 22 nt, Human
cccagcccaucucaaaggucua

SEQ ID NO: 368360 - RNA, 22 nt, Human
gcauguuauguaucugcccagc

SEQ ID NO: 368361 - RNA, 22 nt, Human
gcuguggccuggcgcagagcug

SEQ ID NO: 368362 - RNA, 22 nt, Human
gaauuucagggucugguaggaa

SEQ ID NO: 368363 - RNA, 22 nt, Human
cagggccaguucucgcagcagu

SEQ ID NO: 368364 - RNA, 22 nt, Human
uaguaacagauuuauacagucu

SEQ ID NO: 368365 - RNA, 17 nt, Human
auuucacuuagcaugag

SEQ ID NO: 368366 - RNA, 22 nt, Human
uccauugucuuugguccuagcc

SEQ ID NO: 368367 - RNA, 22 nt, Human
uuaaauauuauguugucugcaa

SEQ ID NO: 368368 - RNA, 19 nt, Human
uacuuuuucaggacagagu

SEQ ID NO: 368369 - RNA, 22 nt, Human
agauaacuuuuggguauucaug

SEQ ID NO: 368370 - RNA, 22 nt, Human
cccaggaggcgcagguugcggu

SEQ ID NO: 368371 - RNA, 22 nt, Human
ccccggaggcggagguugcagu

SEQ ID NO: 368372 - RNA, 21 nt, Human
ccccugggagcccugucagua

SEQ ID NO: 368373 - RNA, 22 nt, Human
uaguccaguaaaacagcuaacg

SEQ ID NO: 368374 - RNA, 22 nt, Human
agagcuggacgucugagcccua

SEQ ID NO: 368375 - RNA, 21 nt, Human
agagaagggacucuuccaguc

SEQ ID NO: 368376 - RNA, 22 nt, Human
ugagcuguagcagaugcuguug

SEQ ID NO: 368377 - RNA, 22 nt, Human
ucaguguaaguuauguagaugu

SEQ ID NO: 368378 - RNA, 22 nt, Human
aagcagcauucagugaaaugug

SEQ ID NO: 368379 - RNA, 22 nt, Human
uuuguuaauucuuauguuagag

SEQ ID NO: 368380 - RNA, 22 nt, Human
augaugguggguaauguguaaa

SEQ ID NO: 368381 - RNA, 22 nt, Human
caguagcacucugucagugaag

SEQ ID NO: 368382 - RNA, 22 nt, Human
ugcugcucucagccaccaggaa

SEQ ID NO: 368383 - RNA, 22 nt, Human
ugcccauguuucucuguauccc

SEQ ID NO: 368384 - RNA, 22 nt, Human
aaguuacaggagaaagagauca

SEQ ID NO: 368385 - RNA, 22 nt, Human
agggaggauaguagucaguuua

SEQ ID NO: 368386 - RNA, 22 nt, Human
cuggggcugcgguggaggagcc

SEQ ID NO: 368387 - RNA, 22 nt, Human
aauuuccagaccccauccacag

SEQ ID NO: 368388 - RNA, 22 nt, Human
gaaggcuugcagcucuguggca

SEQ ID NO: 368389 - RNA, 18 nt, Human
aggccagcccugcuacug

SEQ ID NO: 368390 - RNA, 22 nt, Human
uuucagaugugugucucugaag

SEQ ID NO: 368391 - RNA, 22 nt, Human
gaguccuuggcaucaucaguac

SEQ ID NO: 368392 - RNA, 22 nt, Human
uuugaaucugauauggcagcau

SEQ ID NO: 368393 - RNA, 19 nt, Human
agggccugcagcucaagcu

SEQ ID NO: 368394 - RNA, 22 nt, Human
uguccuuaucuccaaacaauca

SEQ ID NO: 368395 - RNA, 22 nt, Human
uuuaggcacagaguugagggac

SEQ ID NO: 368396 - RNA, 22 nt, Human
uuguuuuaucuuucuacagacu

SEQ ID NO: 368397 - RNA, 22 nt, Human
agggcugaguggugcagucaaa

SEQ ID NO: 368398 - RNA, 22 nt, Human
gggauggggagcuggaaagggg

SEQ ID NO: 368399 - RNA, 22 nt, Human
cagcaggacauggaggaguaaa

SEQ ID NO: 368400 - RNA, 22 nt, Human
ggcucugcccagguggacagca

SEQ ID NO: 368401 - RNA, 22 nt, Human
gagcucagcccaaagagcagug

SEQ ID NO: 368402 - RNA, 20 nt, Human
ugaaggccagcagcauaggg

SEQ ID NO: 368403 - RNA, 22 nt, Human
agcuuccuuggcgcugaggccu

SEQ ID NO: 368404 - RNA, 22 nt, Human
gaggaguggaguugcuggguug

SEQ ID NO: 368405 - RNA, 22 nt, Human
caggaggaggguacaccaucag

SEQ ID NO: 368406 - RNA, 22 nt, Human
caggguccaucuuucaucacug

SEQ ID NO: 368407 - RNA, 22 nt, Human
gagagugaugaaugguuaaaca

SEQ ID NO: 368408 - RNA, 22 nt, Human
cuuuuauuuugaauuaagggcu

SEQ ID NO: 368409 - RNA, 20 nt, Human
uucuuaaagaccucacuuug

SEQ ID NO: 368410 - RNA, 22 nt, Human
acucacauuucaucaggccaag

SEQ ID NO: 368411 - RNA, 19 nt, Human
ggaagagaggaaaggugga

SEQ ID NO: 368412 - RNA, 22 nt, Human
gccuggagcucaugugggcauu

SEQ ID NO: 368413 - RNA, 22 nt, Human
uccuuccucggggacccagauc

SEQ ID NO: 368414 - RNA, 22 nt, Human
ccugacgaaaggcgugcuggag

SEQ ID NO: 368415 - RNA, 22 nt, Human
ccuggaucagagccagagaagc

SEQ ID NO: 368416 - RNA, 22 nt, Human
cuggccugaucucaugcugucc

SEQ ID NO: 368417 - RNA, 21 nt, Human
ccugcagcaccagaaggagau

SEQ ID NO: 368418 - RNA, 22 nt, Human
uugaaucuggguacuuguaaua

SEQ ID NO: 368419 - RNA, 22 nt, Human
gagggaggugauacugaacgua

SEQ ID NO: 368420 - RNA, 22 nt, Human
uuucaugugcaauuagcaauau

SEQ ID NO: 368421 - RNA, 22 nt, Human
ccagcucuuggugcacuuacau

SEQ ID NO: 368422 - RNA, 22 nt, Human
aaaucagugcucauuugaaagg

SEQ ID NO: 368423 - RNA, 22 nt, Human
agagauguucauucagcauguu

SEQ ID NO: 368424 - RNA, 22 nt, Human
cuucccuuggugaacagagcau

SEQ ID NO: 368425 - RNA, 22 nt, Human
gggagggauuaguucugccugg

SEQ ID NO: 368426 - RNA, 17 nt, Human
ucugccgacugccagcu

SEQ ID NO: 368427 - RNA, 22 nt, Human
uccugagaaggcacagcuugca

SEQ ID NO: 368428 - RNA, 22 nt, Human
gaggcucaccuagggagcacug

SEQ ID NO: 368429 - RNA, 22 nt, Human
aggcagcuaagauggauaauga

SEQ ID NO: 368430 - RNA, 22 nt, Human
cugcucuguuaauuaaacuuug

SEQ ID NO: 368431 - RNA, 22 nt, Human
agcagcuguggaaaaguaacua

SEQ ID NO: 368432 - RNA, 22 nt, Human
cucaggagacaguguccacaug

SEQ ID NO: 368433 - RNA, 22 nt, Human
uuugaaauaugaggcauuauga

SEQ ID NO: 368434 - RNA, 22 nt, Human
uucacagauguauuggaacucc

SEQ ID NO: 368435 - RNA, 22 nt, Human
agauggaguuaguaccagaguc

SEQ ID NO: 368436 - RNA, 22 nt, Human
guggcagcaaaauccugcauuc

SEQ ID NO: 368437 - RNA, 22 nt, Human
aaggaagagaauccuucucaga

SEQ ID NO: 368438 - RNA, 22 nt, Human
caggaagcugagcugcacugca

SEQ ID NO: 368439 - RNA, 22 nt, Human
gccuggagggucccucucugga

SEQ ID NO: 368440 - RNA, 22 nt, Human
guuagaauaaaaggucagagag

SEQ ID NO: 368441 - RNA, 22 nt, Human
cuuuaagagaucaccaaucaca

SEQ ID NO: 368442 - RNA, 22 nt, Human
gcagagccugugucugagcaaa

SEQ ID NO: 368443 - RNA, 22 nt, Human
caucaaauggcaagugaaagcu

SEQ ID NO: 368444 - RNA, 22 nt, Human
cugggagcggcugucacugguu

SEQ ID NO: 368445 - RNA, 22 nt, Human
gacagaggcaagaccagaagcc

SEQ ID NO: 368446 - RNA, 22 nt, Human
cacugagaggucucauuuccaa

SEQ ID NO: 368447 - RNA, 22 nt, Human
ugaaaucuucacuaagucucuu

SEQ ID NO: 368448 - RNA, 22 nt, Human
ggcugugccucaaggcuacuca

SEQ ID NO: 368449 - RNA, 22 nt, Human
cccaggaggcagagauagcagu

SEQ ID NO: 368450 - RNA, 22 nt, Human
aggcacugcagauuacaggcgc

SEQ ID NO: 368451 - RNA, 22 nt, Human
uuaaaaugcagauucugauuca

SEQ ID NO: 368452 - RNA, 22 nt, Human
auuauaaaccuuugaggguggg

SEQ ID NO: 368453 - RNA, 22 nt, Human
agccuggcuguaaccucauggu

SEQ ID NO: 368454 - RNA, 22 nt, Human
gcuccugucuuggggcacuggc

SEQ ID NO: 368455 - RNA, 22 nt, Human
cagagcagggugcaccuugggc

SEQ ID NO: 368456 - RNA, 22 nt, Human
aguuauuucaguaacauaauag

SEQ ID NO: 368457 - RNA, 22 nt, Human
ucuguagcaagugagaggcauu

SEQ ID NO: 368458 - RNA, 22 nt, Human
aggacagggauucaaacuccca

SEQ ID NO: 368459 - RNA, 22 nt, Human
uguaugcuuguguauaauauaa

SEQ ID NO: 368460 - RNA, 22 nt, Human
uuccuuagaguuuccagaaagc

SEQ ID NO: 368461 - RNA, 22 nt, Human
uuguaacaggcacucugugcca

SEQ ID NO: 368462 - RNA, 22 nt, Human
uggcagagugcagaagaggcau

SEQ ID NO: 368463 - RNA, 22 nt, Human
ugcauguguguguauuuauaaa

SEQ ID NO: 368464 - RNA, 22 nt, Human
gagggagggaaaguuuaacacu

SEQ ID NO: 368465 - RNA, 22 nt, Human
ggucccaggaaucuguguucua

SEQ ID NO: 368466 - RNA, 21 nt, Human
gccaccccuggcacaggugcu

SEQ ID NO: 368467 - RNA, 22 nt, Human
aaggucauuguugcauguucuc

SEQ ID NO: 368468 - RNA, 22 nt, Human
gcccagcugucuggcagggaug

SEQ ID NO: 368469 - RNA, 22 nt, Human
aggagucagauuguuugaaugu

SEQ ID NO: 368470 - RNA, 22 nt, Human
gacagcugugcaggagaagggg

SEQ ID NO: 368471 - RNA, 22 nt, Human
ugggagcucagaaagggagguc

SEQ ID NO: 368472 - RNA, 22 nt, Human
guccugucccccaaggcugugg

SEQ ID NO: 368473 - RNA, 22 nt, Human
cugccuugaaaaugaagcuuua

SEQ ID NO: 368474 - RNA, 22 nt, Human
aagcugcccuguguuagaguuc

SEQ ID NO: 368475 - RNA, 22 nt, Human
uggagaugaauauguguaccug

SEQ ID NO: 368476 - RNA, 22 nt, Human
uuuaacacuaguuucuuuaacu

SEQ ID NO: 368477 - RNA, 22 nt, Human
ggaagccaguugcuuggugugg

SEQ ID NO: 368478 - RNA, 22 nt, Human
gcauccagagguagccacugug

SEQ ID NO: 368479 - RNA, 22 nt, Human
uaaguucaaugaacucaguucu

SEQ ID NO: 368480 - RNA, 22 nt, Human
aaaggucagcugccaucguucu

SEQ ID NO: 368481 - RNA, 22 nt, Human
agggcuccuaugaugcucugcc

SEQ ID NO: 368482 - RNA, 22 nt, Human
cuacauaaauauuuaugugucu

SEQ ID NO: 368483 - RNA, 22 nt, Human
ugggugcuucgucagcucugag

SEQ ID NO: 368484 - RNA, 22 nt, Human
ucucucagaggccaggguccug

SEQ ID NO: 368485 - RNA, 22 nt, Human
aaguggacuaauacaaggacua

SEQ ID NO: 368486 - RNA, 21 nt, Human
ccaggcuccugaggcugguca

SEQ ID NO: 368487 - RNA, 21 nt, Human
gcagccacugccuucaacaau

SEQ ID NO: 368488 - RNA, 22 nt, Human
aagccaggggcugcuuaggaga

SEQ ID NO: 368489 - RNA, 16 nt, Human
aggaggggaauuagga

SEQ ID NO: 368490 - RNA, 21 nt, Human
ggagucauuagucauuuccuu

SEQ ID NO: 368491 - RNA, 22 nt, Human
ugaggcaggagaauggcgggaa

SEQ ID NO: 368492 - RNA, 22 nt, Human
cagccugcauuuguaucuguau

SEQ ID NO: 368493 - RNA, 22 nt, Human
uauuaguagcuugaaauuggug

SEQ ID NO: 368494 - RNA, 22 nt, Human
ccugagggaggguauaggcugu

SEQ ID NO: 368495 - RNA, 22 nt, Human
ucucuucuaauuaggguccaug

SEQ ID NO: 368496 - RNA, 22 nt, Human
gagugcagaugaacagaagauu

SEQ ID NO: 368497 - RNA, 22 nt, Human
uagagcuggaaaacugcaggua

SEQ ID NO: 368498 - RNA, 22 nt, Human
gcagucaguaaggcagccagaa

SEQ ID NO: 368499 - RNA, 22 nt, Human
gaauaaucaugaaauucaguga

SEQ ID NO: 368500 - RNA, 22 nt, Human
uuugcauucuagaaaaauuucu

SEQ ID NO: 368501 - RNA, 20 nt, Human
ugcuggggacauacagggug

SEQ ID NO: 368502 - RNA, 22 nt, Human
aauuccaggaugcaggaggugc

SEQ ID NO: 368503 - RNA, 22 nt, Human
gaggagaaauuauccuuggugu

SEQ ID NO: 368504 - RNA, 22 nt, Human
guuaggcaugaguguguauuaa

SEQ ID NO: 368505 - RNA, 22 nt, Human
ggaggcagaacuucccgucagu

SEQ ID NO: 368506 - RNA, 22 nt, Human
aggcucagugcaaaucauucug

SEQ ID NO: 368507 - RNA, 20 nt, Human
ccuguucacugcgcaguuuc

SEQ ID NO: 368508 - RNA, 19 nt, Human
caguccuuuccgcuuucuc

SEQ ID NO: 368509 - RNA, 22 nt, Human
gugaauaaucacccuucuggau

SEQ ID NO: 368510 - RNA, 22 nt, Human
ugacacagaaauuaagcuguca

SEQ ID NO: 368511 - RNA, 22 nt, Human
caguccuuggcuucauccgagu

SEQ ID NO: 368512 - RNA, 22 nt, Human
agcagggcagguaaggaucaga

SEQ ID NO: 368513 - RNA, 22 nt, Human
cagggacauugguggccagguu

SEQ ID NO: 368514 - RNA, 22 nt, Human
ggagugggcagcacugcccugu

SEQ ID NO: 368515 - RNA, 22 nt, Human
gcagcaggcacggucucgacau

SEQ ID NO: 368516 - RNA, 22 nt, Human
cggcagcucgagggccacccgu

SEQ ID NO: 368517 - RNA, 22 nt, Human
agcugccgaugcccagcugcau

SEQ ID NO: 368518 - RNA, 22 nt, Human
gucaccagcaccaaugccacau

SEQ ID NO: 368519 - RNA, 22 nt, Human
caguccaggccuggaggagcca

SEQ ID NO: 368520 - RNA, 22 nt, Human
uuucaacaccagagaccaugcg

SEQ ID NO: 368521 - RNA, 22 nt, Human
ccuguucaccauggucacgugc

SEQ ID NO: 368522 - RNA, 22 nt, Human
gaaugcacacgugugugcaugc

SEQ ID NO: 368523 - RNA, 22 nt, Human
ucugucugcgcuugcccuggug

SEQ ID NO: 368524 - RNA, 22 nt, Human
accaaggagacaaagguguauu

SEQ ID NO: 368525 - RNA, 20 nt, Human
aacuuguucuaccuguuuca

SEQ ID NO: 368526 - RNA, 22 nt, Human
agagugaaaagcuagagcagua

SEQ ID NO: 368527 - RNA, 22 nt, Human
acaugcuuguuuuucacaaccu

SEQ ID NO: 368528 - RNA, 22 nt, Human
aaggcagaaagggaugugagug

SEQ ID NO: 368529 - RNA, 22 nt, Human
ugugccagccucuggcuguguc

SEQ ID NO: 368530 - RNA, 22 nt, Human
uggcauuucuguuagacucuca

SEQ ID NO: 368531 - RNA, 20 nt, Human
aacacagauaccaaagguug

SEQ ID NO: 368532 - RNA, 22 nt, Human
ccucccacauugaggacaugcu

SEQ ID NO: 368533 - RNA, 22 nt, Human
cagggaguuuuuguuccucuag

SEQ ID NO: 368534 - RNA, 22 nt, Human
ucacauucucagcaucuauaca

SEQ ID NO: 368535 - RNA, 22 nt, Human
ugagugaggaagcgguggagga

SEQ ID NO: 368536 - RNA, 21 nt, Human
ggagggcagcccagacuggcu

SEQ ID NO: 368537 - RNA, 22 nt, Human
uccagcuugacaaaugauuuua

SEQ ID NO: 368538 - RNA, 22 nt, Human
ccugggcuucugucuagauguu

SEQ ID NO: 368539 - RNA, 22 nt, Human
uuuccaagagcuuauuucugaa

SEQ ID NO: 368540 - RNA, 22 nt, Human
ucaggcugcaucuguaagggug

SEQ ID NO: 368541 - RNA, 22 nt, Human
cuucuuaaucccuuauauauuu

SEQ ID NO: 368542 - RNA, 19 nt, Human
ggcauccacgaaugcagag

SEQ ID NO: 368543 - RNA, 22 nt, Human
agggaagcuuguuacugagaag

SEQ ID NO: 368544 - RNA, 22 nt, Human
agcagggcugcagugugucuuu

SEQ ID NO: 368545 - RNA, 22 nt, Human
ugccugucuucaggagugucac

SEQ ID NO: 368546 - RNA, 22 nt, Human
gacccaggcucgugggacggcu

SEQ ID NO: 368547 - RNA, 19 nt, Human
ccuguucaugacucugucc

SEQ ID NO: 368548 - RNA, 22 nt, Human
aaugucugccugaacuuuauau

SEQ ID NO: 368549 - RNA, 19 nt, Human
uucacaauuaugaaauuag

SEQ ID NO: 368550 - RNA, 22 nt, Human
cagcagagcauuugguaggagg

SEQ ID NO: 368551 - RNA, 22 nt, Human
agccaggcagacucucuuucuu

SEQ ID NO: 368552 - RNA, 22 nt, Human
guauuagguuggugcaaaauug

SEQ ID NO: 368553 - RNA, 22 nt, Human
aaagggaggggcgauaagccgg

SEQ ID NO: 368554 - RNA, 22 nt, Human
gguaaaaugcagauucuuagcc

SEQ ID NO: 368555 - RNA, 22 nt, Human
gcuguguuugacaguagcagac

SEQ ID NO: 368556 - RNA, 22 nt, Human
aaggcuuuaugugaccaaaaga

SEQ ID NO: 368557 - RNA, 22 nt, Human
cuuucaacuacauacaggcgau

SEQ ID NO: 368558 - RNA, 22 nt, Human
auuuccauacacccauuucuga

SEQ ID NO: 368559 - RNA, 22 nt, Human
uagcuuuagaaauauucucaga

SEQ ID NO: 368560 - RNA, 22 nt, Human
ggugaaggucuacugugugcca

SEQ ID NO: 368561 - RNA, 22 nt, Human
cuccagugggggugagccuaga

SEQ ID NO: 368562 - RNA, 22 nt, Human
uugaaagucacaauggcauuaa

SEQ ID NO: 368563 - RNA, 22 nt, Human
aauauuaucaaaagcuuuuuca

SEQ ID NO: 368564 - RNA, 22 nt, Human
ggcagaguggagugcggccucc

SEQ ID NO: 368565 - RNA, 22 nt, Human
uggcccugacugauguggaggg

SEQ ID NO: 368566 - RNA, 22 nt, Human
ggugccagccuagugcaguggu

SEQ ID NO: 368567 - RNA, 22 nt, Human
uggcagagaaccugggcuuugu

SEQ ID NO: 368568 - RNA, 22 nt, Human
uuuauuagauuaucaaagaggu

SEQ ID NO: 368569 - RNA, 22 nt, Human
guucacauccuugugaggauuu

SEQ ID NO: 368570 - RNA, 22 nt, Human
guugcacaguuccucaagcagg

SEQ ID NO: 368571 - RNA, 22 nt, Human
gcccugugcgacucuagagguu

SEQ ID NO: 368572 - RNA, 22 nt, Human
cagugguauuugagagaaugga

SEQ ID NO: 368573 - RNA, 22 nt, Human
agugaguggguuacagauggga

SEQ ID NO: 368574 - RNA, 20 nt, Human
gugaccagaagacagugggu

SEQ ID NO: 368575 - RNA, 22 nt, Human
cugucccaggagcuguaagaca

SEQ ID NO: 368576 - RNA, 22 nt, Human
ccacugaggcaggcaguaucua

SEQ ID NO: 368577 - RNA, 22 nt, Human
ccaagggcucugacuugccugc

SEQ ID NO: 368578 - RNA, 22 nt, Human
ggaggcucugcuccguguguuc

SEQ ID NO: 368579 - RNA, 22 nt, Human
ugaagccauaggacagaggaua

SEQ ID NO: 368580 - RNA, 22 nt, Human
auaguauuuaauaguuagcuca

SEQ ID NO: 368581 - RNA, 22 nt, Human
ucauuauuuuggacuggagugu

SEQ ID NO: 368582 - RNA, 22 nt, Human
ugggaccugcucuuggaaugag

SEQ ID NO: 368583 - RNA, 21 nt, Human
agaugcugugcuccaggagca

SEQ ID NO: 368584 - RNA, 22 nt, Human
aggagguggccugagcgugccc

SEQ ID NO: 368585 - RNA, 22 nt, Human
gugcugugucuaucaggaauaa

SEQ ID NO: 368586 - RNA, 22 nt, Human
ugauucacagacuucacaaggc

SEQ ID NO: 368587 - RNA, 22 nt, Human
gaggcaacacauuuggaaagca

SEQ ID NO: 368588 - RNA, 22 nt, Human
aggcuucacgaugggugaggug

SEQ ID NO: 368589 - RNA, 22 nt, Human
aggcucagcugguggugaucgc

SEQ ID NO: 368590 - RNA, 22 nt, Human
uccucugcuccaucuuuacugu

SEQ ID NO: 368591 - RNA, 19 nt, Human
uggcaggcccaggauggac

SEQ ID NO: 368592 - RNA, 22 nt, Human
cuuaagaauauugaaguugugg

SEQ ID NO: 368593 - RNA, 22 nt, Human
agcagggcagugcuucagcucu

SEQ ID NO: 368594 - RNA, 22 nt, Human
augcagaaggagccaugcuugc

SEQ ID NO: 368595 - RNA, 22 nt, Human
cugucuccuccacugcauggga

SEQ ID NO: 368596 - RNA, 22 nt, Human
aaauacuguagauaauagaguu

SEQ ID NO: 368597 - RNA, 20 nt, Human
ccagagcagccacugaaguu

SEQ ID NO: 368598 - RNA, 22 nt, Human
gagugugggcacgggggccuug

SEQ ID NO: 368599 - RNA, 22 nt, Human
agugaaauggaugcugcuacug

SEQ ID NO: 368600 - RNA, 22 nt, Human
uacaguagacaauguuaguaug

SEQ ID NO: 368601 - RNA, 22 nt, Human
ugggaguggggcauagaaggua

SEQ ID NO: 368602 - RNA, 22 nt, Human
ggaggcagaauagagugugggu

SEQ ID NO: 368603 - RNA, 22 nt, Human
uggaagcaucacuucuugccug

SEQ ID NO: 368604 - RNA, 22 nt, Human
agacgagggccuggcacacagu

SEQ ID NO: 368605 - RNA, 22 nt, Human
ugucucugggugauucaguccu

SEQ ID NO: 368606 - RNA, 22 nt, Human
agcccagaggcugggcgugcau

SEQ ID NO: 368607 - RNA, 22 nt, Human
uguguacauaucuauccuagau

SEQ ID NO: 368608 - RNA, 22 nt, Human
gccuaggaguacagaaugguuu

SEQ ID NO: 368609 - RNA, 20 nt, Human
ccuuuauuauuuguaugaug

SEQ ID NO: 368610 - RNA, 22 nt, Human
uccuugaauauaauaacaguag

SEQ ID NO: 368611 - RNA, 22 nt, Human
acugcagccuuugggcucauaa

SEQ ID NO: 368612 - RNA, 22 nt, Human
cucagaagaacccaggguccca

SEQ ID NO: 368613 - RNA, 22 nt, Human
ccugcccagcuucaccucaggc

SEQ ID NO: 368614 - RNA, 22 nt, Human
ccccaggcagggccuaacagag

SEQ ID NO: 368615 - RNA, 22 nt, Human
guauuaggugguggaauuguag

SEQ ID NO: 368616 - RNA, 22 nt, Human
uuccucucgcucuccggggccc

SEQ ID NO: 368617 - RNA, 22 nt, Human
aagcagagcaagcguauuuauu

SEQ ID NO: 368618 - RNA, 22 nt, Human
uuaaagaugcagcuuuagagaa

SEQ ID NO: 368619 - RNA, 22 nt, Human
cucucugaggaaggagcaucug

SEQ ID NO: 368620 - RNA, 22 nt, Human
cagcugaguuuccaagucugcc

SEQ ID NO: 368621 - RNA, 22 nt, Human
ucccagagaagagcuggaugga

SEQ ID NO: 368622 - RNA, 22 nt, Human
uggcugagggggcucugcucag

SEQ ID NO: 368623 - RNA, 22 nt, Human
caaggccaagguuuugugaacu

SEQ ID NO: 368624 - RNA, 22 nt, Human
auuuuuccaugauacuuaucug

SEQ ID NO: 368625 - RNA, 22 nt, Human
gcuggccugcaaagcccggcug

SEQ ID NO: 368626 - RNA, 22 nt, Human
gauaaaauauguggccuuuagu

SEQ ID NO: 368627 - RNA, 22 nt, Human
ucugcaucauuuuucagagccg

SEQ ID NO: 368628 - RNA, 22 nt, Human
ugaaaugagcauuuauucuuua

SEQ ID NO: 368629 - RNA, 22 nt, Human
cagaagucacccucagaauaac

SEQ ID NO: 368630 - RNA, 22 nt, Human
caggccucaggggcucaggcug

SEQ ID NO: 368631 - RNA, 22 nt, Human
gauugaaacauaggcagucgag

SEQ ID NO: 368632 - RNA, 20 nt, Human
cagcccuccaguggaggcag

SEQ ID NO: 368633 - RNA, 22 nt, Human
aaccauuugcaguuacugagac

SEQ ID NO: 368634 - RNA, 19 nt, Human
caggaaugagguaauggcu

SEQ ID NO: 368635 - RNA, 22 nt, Human
ccagcagguguagggcucaugg

SEQ ID NO: 368636 - RNA, 22 nt, Human
agugucauuuuguccaucuucu

SEQ ID NO: 368637 - RNA, 22 nt, Human
aagugacacauggcacuucuau

SEQ ID NO: 368638 - RNA, 22 nt, Human
agagaagggccuguauguaauc

SEQ ID NO: 368639 - RNA, 22 nt, Human
acagcuuuguguuaaugggaag

SEQ ID NO: 368640 - RNA, 22 nt, Human
uuuauuguuaucaugggugagu

SEQ ID NO: 368641 - RNA, 22 nt, Human
acacauauauacauauuugugc

SEQ ID NO: 368642 - RNA, 22 nt, Human
auauucguggucaaguaaggcc

SEQ ID NO: 368643 - RNA, 22 nt, Human
aaaguccuugcaguuuccucuu

SEQ ID NO: 368644 - RNA, 22 nt, Human
gccuucugaucgcuggacugac

SEQ ID NO: 368645 - RNA, 22 nt, Human
ugcccaagcagaggagugauuc

SEQ ID NO: 368646 - RNA, 22 nt, Human
agcauaaaggcacuagaaagag

SEQ ID NO: 368647 - RNA, 22 nt, Human
uggcucagcagguuagaaacua

SEQ ID NO: 368648 - RNA, 17 nt, Human
aaguccagaguugagca

SEQ ID NO: 368649 - RNA, 22 nt, Human
guggccugggguuuguucugag

SEQ ID NO: 368650 - RNA, 22 nt, Human
ccagggcaaaugagaucauagc

SEQ ID NO: 368651 - RNA, 22 nt, Human
uggcccucagucuugcuccugc

SEQ ID NO: 368652 - RNA, 22 nt, Human
uucucucauucaaauuaaagug

SEQ ID NO: 368653 - RNA, 22 nt, Human
cugaggucucuuuccauaguga

SEQ ID NO: 368654 - RNA, 22 nt, Human
aaagcagcagcaccugcauuuc

SEQ ID NO: 368655 - RNA, 22 nt, Human
ggaccugcccuggcucagaugc

SEQ ID NO: 368656 - RNA, 22 nt, Human
cugcagggaccacaagcagguu

SEQ ID NO: 368657 - RNA, 22 nt, Human
cucccuggcacagcgagagguu

SEQ ID NO: 368658 - RNA, 22 nt, Human
auugcacaaacacagucagacu

SEQ ID NO: 368659 - RNA, 23 nt, Human
agaggccaacuucuugccccucc

SEQ ID NO: 368660 - RNA, 22 nt, Human
uaaacaugugagugugcauaua

SEQ ID NO: 368661 - RNA, 22 nt, Human
gcuuccucgcugggcagaggca

SEQ ID NO: 368662 - RNA, 22 nt, Human
cacagggcagaggguccguggc

SEQ ID NO: 368663 - RNA, 22 nt, Human
aagugccugaccuagccuggag

SEQ ID NO: 368664 - RNA, 22 nt, Human
ucacauuuguguuuuauuagag

SEQ ID NO: 368665 - RNA, 22 nt, Human
ggccagcuuugagcugcaggaa

SEQ ID NO: 368666 - RNA, 22 nt, Human
uuuauccagcagcuauucaaaa

SEQ ID NO: 368667 - RNA, 22 nt, Human
ugggccugugaugcugggcuau

SEQ ID NO: 368668 - RNA, 22 nt, Human
uguacacugcaggaugcauugc

SEQ ID NO: 368669 - RNA, 23 nt, Human
cuguggcugaguccuguuggagu

SEQ ID NO: 368670 - RNA, 22 nt, Human
agugcagccgagaucaggugcu

SEQ ID NO: 368671 - RNA, 22 nt, Human
gaagaauccaugcuaauuuacc

SEQ ID NO: 368672 - RNA, 22 nt, Human
cauggggagacaccuagggaaa

SEQ ID NO: 368673 - RNA, 22 nt, Human
gugggccucuugaggguggcua

SEQ ID NO: 368674 - RNA, 20 nt, Human
cccucccagaugcuucccaa

SEQ ID NO: 368675 - RNA, 22 nt, Human
aaggcagccauagcaccaucca

SEQ ID NO: 368676 - RNA, 21 nt, Human
ggccugagcaccuguccaccu

SEQ ID NO: 368677 - RNA, 22 nt, Human
cuuucaaugugccugccuuggg

SEQ ID NO: 368678 - RNA, 22 nt, Human
auacuuuggucacuauuauugg

SEQ ID NO: 368679 - RNA, 20 nt, Human
cugcagggugagugggcgau

SEQ ID NO: 368680 - RNA, 22 nt, Human
ugaggcaggacugagcgggaug

SEQ ID NO: 368681 - RNA, 21 nt, Human
uagcacuucgcuguaauuggg

SEQ ID NO: 368682 - RNA, 22 nt, Human
agugaaauaaagcugccuaugg

SEQ ID NO: 368683 - RNA, 22 nt, Human
gggagcugagcuggaagagaau

SEQ ID NO: 368684 - RNA, 17 nt, Human
agaaagaggauccacag

SEQ ID NO: 368685 - RNA, 22 nt, Human
ugcagucuggauguccucagau

SEQ ID NO: 368686 - RNA, 22 nt, Human
gcuccaggagagggaagcagau

SEQ ID NO: 368687 - RNA, 22 nt, Human
gaggcagcuuggggcugugggu

SEQ ID NO: 368688 - RNA, 22 nt, Human
uggcucagaguucaucuuuuag

SEQ ID NO: 368689 - RNA, 22 nt, Human
ugucucugugagaucugacgau

SEQ ID NO: 368690 - RNA, 21 nt, Human
ggcagcucagcagauggggac

SEQ ID NO: 368691 - RNA, 22 nt, Human
cugccugugcaugcagucagaa

SEQ ID NO: 368692 - RNA, 22 nt, Human
acccugccgugggcugcuugug

SEQ ID NO: 368693 - RNA, 22 nt, Human
gggccugggaacuugcauuuag

SEQ ID NO: 368694 - RNA, 22 nt, Human
ugccaggcauguaguagacuug

SEQ ID NO: 368695 - RNA, 22 nt, Human
aggaugagaagauuggaaucuu

SEQ ID NO: 368696 - RNA, 22 nt, Human
cuggggaggcagggcugccccu

SEQ ID NO: 368697 - RNA, 22 nt, Human
cuucaguucuaaaguagaaugu

SEQ ID NO: 368698 - RNA, 22 nt, Human
ucuuaagcagagaagaaguuga

SEQ ID NO: 368699 - RNA, 22 nt, Human
auguucuguuuuguaauucaua

SEQ ID NO: 368700 - RNA, 21 nt, Human
agagaagaggacuuucucaca

SEQ ID NO: 368701 - RNA, 22 nt, Human
gccugcuggauguggccaggcc

SEQ ID NO: 368702 - RNA, 22 nt, Human
aaucagugguucccagcccagg

SEQ ID NO: 368703 - RNA, 22 nt, Human
ggagucaggagcaggcugggcu

SEQ ID NO: 368704 - RNA, 22 nt, Human
gucaggaugcuauuguuauuaa

SEQ ID NO: 368705 - RNA, 21 nt, Human
gagccuucccucugcccuuuc

SEQ ID NO: 368706 - RNA, 22 nt, Human
aggucauuuccuuagaggcaga

SEQ ID NO: 368707 - RNA, 22 nt, Human
aaaugugugcacaaagacagcu

SEQ ID NO: 368708 - RNA, 22 nt, Human
uucuucaaacaaaaguggcaug

SEQ ID NO: 368709 - RNA, 21 nt, Human
gagcucucaggcaagaagcag

SEQ ID NO: 368710 - RNA, 22 nt, Human
uagucccauuuugagguauuug

SEQ ID NO: 368711 - RNA, 22 nt, Human
caggcacugugcaagggucucg

SEQ ID NO: 368712 - RNA, 22 nt, Human
gcugagcucccagcaguaucug

SEQ ID NO: 368713 - RNA, 22 nt, Human
aagaaaucagaaaagcauucgu

SEQ ID NO: 368714 - RNA, 22 nt, Human
cucucagacugaagggccugug

SEQ ID NO: 368715 - RNA, 22 nt, Human
aaaugugucauauucaaaguca

SEQ ID NO: 368716 - RNA, 20 nt, Human
aauaaacuacugagagaugu

SEQ ID NO: 368717 - RNA, 22 nt, Human
uacaguaucuucuggcaagcau

SEQ ID NO: 368718 - RNA, 22 nt, Human
gggacuguaaauucauauggcc

SEQ ID NO: 368719 - RNA, 22 nt, Human
uuaacaugucuugacuucaucu

SEQ ID NO: 368720 - RNA, 22 nt, Human
ggcugagccuggagcaucuggu

SEQ ID NO: 368721 - RNA, 22 nt, Human
cuucugugcuucacaguugcca

SEQ ID NO: 368722 - RNA, 21 nt, Human
ggcacugagccagauggacuc

SEQ ID NO: 368723 - RNA, 22 nt, Human
accaggaggcuacacuguccca

SEQ ID NO: 368724 - RNA, 22 nt, Human
ugcuggcugggcugcuggagac

SEQ ID NO: 368725 - RNA, 22 nt, Human
ugaacuccaaauacugcugauu

SEQ ID NO: 368726 - RNA, 22 nt, Human
gcaguggggaaugcuggggaga

SEQ ID NO: 368727 - RNA, 22 nt, Human
caggggcuuuuccucuauaagg

SEQ ID NO: 368728 - RNA, 22 nt, Human
gagggcucaacuacuacuaggc

SEQ ID NO: 368729 - RNA, 22 nt, Human
ugcagccaucuuucuuggagga

SEQ ID NO: 368730 - RNA, 22 nt, Human
caggugcugcguggcggagcug

SEQ ID NO: 368731 - RNA, 22 nt, Human
gccagcccagcuccaggggaaa

SEQ ID NO: 368732 - RNA, 22 nt, Human
uuccugaugcacacagucauuu

SEQ ID NO: 368733 - RNA, 22 nt, Human
gcaagcaguuguggcuucugag

SEQ ID NO: 368734 - RNA, 22 nt, Human
ccuggagcucacugggagccgg

SEQ ID NO: 368735 - RNA, 23 nt, Human
gggauauggaccuuggaggaguc

SEQ ID NO: 368736 - RNA, 22 nt, Human
gggcagcuggccagguauucug

SEQ ID NO: 368737 - RNA, 22 nt, Human
gagggagugccagagggccagc

SEQ ID NO: 368738 - RNA, 22 nt, Human
ggcaccuggagguuuacuggau

SEQ ID NO: 368739 - RNA, 22 nt, Human
acagagagggagugauaaaucc

SEQ ID NO: 368740 - RNA, 22 nt, Human
ccucgaccuccccaggcucagg

SEQ ID NO: 368741 - RNA, 22 nt, Human
cagcucugaagaaaggugucua

SEQ ID NO: 368742 - RNA, 21 nt, Human
agcaccuuacagcuauaaugg

SEQ ID NO: 368743 - RNA, 22 nt, Human
gcucagaggagcaucauaagga

SEQ ID NO: 368744 - RNA, 22 nt, Human
gcagccacccucaaggcugaau

SEQ ID NO: 368745 - RNA, 22 nt, Human
gaauuucauugcucugcugugu

SEQ ID NO: 368746 - RNA, 22 nt, Human
gcccuuccuuagacagcaggau

SEQ ID NO: 368747 - RNA, 22 nt, Human
agcccaagcuaugaggugaccu

SEQ ID NO: 368748 - RNA, 22 nt, Human
uggagaauucuauguugagggg

SEQ ID NO: 368749 - RNA, 22 nt, Human
auaaggcaucucucaguuagca

SEQ ID NO: 368750 - RNA, 22 nt, Human
agcagcuccugccaugagugcu

SEQ ID NO: 368751 - RNA, 22 nt, Human
gaaauuuauuaucuacaucauu

SEQ ID NO: 368752 - RNA, 19 nt, Human
uggcugggugccaauggcc

SEQ ID NO: 368753 - RNA, 22 nt, Human
ccaccagcuuugccacccugcu

SEQ ID NO: 368754 - RNA, 21 nt, Human
ccaggguccagcugccauggu

SEQ ID NO: 368755 - RNA, 22 nt, Human
acaaaggcagccaaucaucugc

SEQ ID NO: 368756 - RNA, 22 nt, Human
gcucccaccuccagccugaguu

SEQ ID NO: 368757 - RNA, 22 nt, Human
gccaggcauucuagaaguagug

SEQ ID NO: 368758 - RNA, 22 nt, Human
ggcagccauggacacuggcuag

SEQ ID NO: 368759 - RNA, 23 nt, Human
uggaccugaaccagugccucugu

SEQ ID NO: 368760 - RNA, 22 nt, Human
ccuggcugccgagugugcagcg

SEQ ID NO: 368761 - RNA, 22 nt, Human
ucaaaugcuguauuguaguaau

SEQ ID NO: 368762 - RNA, 22 nt, Human
auaugagaauuggaaaauauca

SEQ ID NO: 368763 - RNA, 22 nt, Human
ucugucuccugccagugccucu

SEQ ID NO: 368764 - RNA, 21 nt, Human
augggcagaggcagagaggcu

SEQ ID NO: 368765 - RNA, 22 nt, Human
cuuugaaagcucccaggacuua

SEQ ID NO: 368766 - RNA, 22 nt, Human
uugauacauagcacaguuuagg

SEQ ID NO: 368767 - RNA, 17 nt, Human
ugcugccaagucccaac

SEQ ID NO: 368768 - RNA, 22 nt, Human
gcagugaaacaauaggaucaaa

SEQ ID NO: 368769 - RNA, 22 nt, Human
ggcuucucucccccagcuccac

SEQ ID NO: 368770 - RNA, 22 nt, Human
ucuggagcgaggucccugucug

SEQ ID NO: 368771 - RNA, 22 nt, Human
gacccagaaggagugcccuaga

SEQ ID NO: 368772 - RNA, 19 nt, Human
agacacacuugauaugugu

SEQ ID NO: 368773 - RNA, 22 nt, Human
caaacugagcaucagaaaguuu

SEQ ID NO: 368774 - RNA, 22 nt, Human
uuauuccauucaguucaacaag

SEQ ID NO: 368775 - RNA, 22 nt, Human
gagacacagagaggcuguguga

SEQ ID NO: 368776 - RNA, 22 nt, Human
uagaaaugcccagauucugcua

SEQ ID NO: 368777 - RNA, 22 nt, Human
ccugggcaggaugggcccggug

SEQ ID NO: 368778 - RNA, 22 nt, Human
augucccaagauacagcuagag

SEQ ID NO: 368779 - RNA, 22 nt, Human
gagcugagccuggguggaccgc

SEQ ID NO: 368780 - RNA, 22 nt, Human
aguggcaggcggagauguagga

SEQ ID NO: 368781 - RNA, 22 nt, Human
gcuggccugggcucaagaccag

SEQ ID NO: 368782 - RNA, 21 nt, Human
aaggaaaagcuuggucucuga

SEQ ID NO: 368783 - RNA, 22 nt, Human
aauauaaugcuguuuuaugcca

SEQ ID NO: 368784 - RNA, 22 nt, Human
cuggagaggccccaagauauuu

SEQ ID NO: 368785 - RNA, 22 nt, Human
agcuggcccucgagagccaauu

SEQ ID NO: 368786 - RNA, 21 nt, Human
ucagagagucacagugaacug

SEQ ID NO: 368787 - RNA, 22 nt, Human
gccuggcaggccuguuggggcu

SEQ ID NO: 368788 - RNA, 22 nt, Human
cccuucccuucugggagaucca

SEQ ID NO: 368789 - RNA, 22 nt, Human
cacugcccagcgucuuaggcac

SEQ ID NO: 368790 - RNA, 22 nt, Human
uuaugacauaugaguacaagua

SEQ ID NO: 368791 - RNA, 22 nt, Human
ucccagagucuucuccuguaau

SEQ ID NO: 368792 - RNA, 22 nt, Human
cucuccuggggagcacacacac

SEQ ID NO: 368793 - RNA, 22 nt, Human
gugccagcucuccccacaucug

SEQ ID NO: 368794 - RNA, 22 nt, Human
aggcugaggcaagaggaucacu

SEQ ID NO: 368795 - RNA, 22 nt, Human
uuuauuccaugugucuaugacc

SEQ ID NO: 368796 - RNA, 22 nt, Human
ggaggccaaagugugggcggcu

SEQ ID NO: 368797 - RNA, 22 nt, Human
uggggcagggaugggaaacuau

SEQ ID NO: 368798 - RNA, 22 nt, Human
gcuggccugggcagccugucgg

SEQ ID NO: 368799 - RNA, 23 nt, Human
gugagucuugccuuugcugugga

SEQ ID NO: 368800 - RNA, 22 nt, Human
ggagaaggaagaaagcuacuau

SEQ ID NO: 368801 - RNA, 21 nt, Human
ccucugcucgggcaugcguuu

SEQ ID NO: 368802 - RNA, 22 nt, Human
auggcagagggauugaacagcu

SEQ ID NO: 368803 - RNA, 22 nt, Human
cgccucagccguggucaucuuc

SEQ ID NO: 368804 - RNA, 22 nt, Human
gcaucuaaacuugcaucauugu

SEQ ID NO: 368805 - RNA, 22 nt, Human
gagcccuccauggagccaggca

SEQ ID NO: 368806 - RNA, 22 nt, Human
uuugcauuccugccugcauuca

SEQ ID NO: 368807 - RNA, 22 nt, Human
caaaagauacuugcaucuaacu

SEQ ID NO: 368808 - RNA, 22 nt, Human
aagcaguguucccagcuggccc

SEQ ID NO: 368809 - RNA, 21 nt, Human
agugaaaugaaguguaugcuc

SEQ ID NO: 368810 - RNA, 22 nt, Human
aggcuccuuguucaucauccau

SEQ ID NO: 368811 - RNA, 22 nt, Human
aguucucaagacaauuaccugu

SEQ ID NO: 368812 - RNA, 22 nt, Human
ucagaacaauugggaaccauua

SEQ ID NO: 368813 - RNA, 22 nt, Human
ucccacugugaauccaaggccu

SEQ ID NO: 368814 - RNA, 22 nt, Human
accugaggcuguuagucuaggu

SEQ ID NO: 368815 - RNA, 21 nt, Human
cccuguguuccacagcagaca

SEQ ID NO: 368816 - RNA, 22 nt, Human
cccugcagggaggauucugaag

SEQ ID NO: 368817 - RNA, 17 nt, Human
uuccuggaagucauucc

SEQ ID NO: 368818 - RNA, 20 nt, Human
uguuccaugacuauuuggau

SEQ ID NO: 368819 - RNA, 22 nt, Human
cacauaaucaccaaguccuuuc

SEQ ID NO: 368820 - RNA, 22 nt, Human
cagcaugacagucugcagcaga

SEQ ID NO: 368821 - RNA, 22 nt, Human
caaugauugcuauuuacauaaa

SEQ ID NO: 368822 - RNA, 22 nt, Human
ucagagugcagggaguagcagc

SEQ ID NO: 368823 - RNA, 22 nt, Human
gcauagucaguaggauucucaa

SEQ ID NO: 368824 - RNA, 22 nt, Human
guuccaaacaagucauaaagua

SEQ ID NO: 368825 - RNA, 22 nt, Human
uacuaaacaucuggcauuaaau

SEQ ID NO: 368826 - RNA, 22 nt, Human
gaaucacgguauucugcacggg

SEQ ID NO: 368827 - RNA, 22 nt, Human
caggaaggcccaccuguccugu

SEQ ID NO: 368828 - RNA, 22 nt, Human
ugaaacacugcgauaaaauccu

SEQ ID NO: 368829 - RNA, 22 nt, Human
uauuuugucuucugcucaucac

SEQ ID NO: 368830 - RNA, 22 nt, Human
ugaaacaaugugaaguugcuga

SEQ ID NO: 368831 - RNA, 22 nt, Human
ggacaggguaaguacuagugug

SEQ ID NO: 368832 - RNA, 22 nt, Human
gccaggcuccccggaucccugg

SEQ ID NO: 368833 - RNA, 22 nt, Human
caugcuuaugauuugcuaagcc

SEQ ID NO: 368834 - RNA, 22 nt, Human
uaaggcacccgugagcugccag

SEQ ID NO: 368835 - RNA, 20 nt, Human
ucucccaggcucagggaaga

SEQ ID NO: 368836 - RNA, 22 nt, Human
acugaaggaaagccuuugcaug

SEQ ID NO: 368837 - RNA, 22 nt, Human
gcugggcuucucaaugcugccu

SEQ ID NO: 368838 - RNA, 22 nt, Human
gcugagugauugauauuuuagu

SEQ ID NO: 368839 - RNA, 21 nt, Human
uggaccuguccuucucgcugu

SEQ ID NO: 368840 - RNA, 19 nt, Human
ugcucaggccaaggagccc

SEQ ID NO: 368841 - RNA, 22 nt, Human
cuucuucauguauugauagucu

SEQ ID NO: 368842 - RNA, 22 nt, Human
uuguuacaucuuauguaagugg

SEQ ID NO: 368843 - RNA, 22 nt, Human
accugccuaucagcugccugcu

SEQ ID NO: 368844 - RNA, 22 nt, Human
uggagacucugcaucugugaca

SEQ ID NO: 368845 - RNA, 22 nt, Human
caccaggcuggagugcagaggu

SEQ ID NO: 368846 - RNA, 22 nt, Human
acucagaaugacugaugcugug

SEQ ID NO: 368847 - RNA, 22 nt, Human
gagaagcaauuuccaacugugc

SEQ ID NO: 368848 - RNA, 22 nt, Human
uccaggcugggcugaagggugc

SEQ ID NO: 368849 - RNA, 20 nt, Human
gucagaggacccuagagcga

SEQ ID NO: 368850 - RNA, 22 nt, Human
uguggccaccagagcugcuauu

SEQ ID NO: 368851 - RNA, 22 nt, Human
gugauuucuaaucaucugaaug

SEQ ID NO: 368852 - RNA, 20 nt, Human
uauuugaaauggccaagugu

SEQ ID NO: 368853 - RNA, 22 nt, Human
gaacaguaucaguagugccagu

SEQ ID NO: 368854 - RNA, 21 nt, Human
uccagaaaagaggucauuagc

SEQ ID NO: 368855 - RNA, 22 nt, Human
uccauacauugaaauaccauuc

SEQ ID NO: 368856 - RNA, 21 nt, Human
ugccagggauuuacagagccu

SEQ ID NO: 368857 - RNA, 22 nt, Human
ggcagagcugcaugagcacuca

SEQ ID NO: 368858 - RNA, 22 nt, Human
cugcccucuagaggaggacuga

SEQ ID NO: 368859 - RNA, 22 nt, Human
caggaugggauguagugggccc

SEQ ID NO: 368860 - RNA, 22 nt, Human
gcaaaggcuucuuuuauucucc

SEQ ID NO: 368861 - RNA, 22 nt, Human
ggcucaggaugagccuucucau

SEQ ID NO: 368862 - RNA, 22 nt, Human
cuggccagcauuuuugcuuuag

SEQ ID NO: 368863 - RNA, 22 nt, Human
cugccucucaggucccugagau

SEQ ID NO: 368864 - RNA, 22 nt, Human
ucagcugaaguggagaagcaga

SEQ ID NO: 368865 - RNA, 22 nt, Human
cuugugcaauugacauugaauc

SEQ ID NO: 368866 - RNA, 20 nt, Human
uuuuccagaaaguaucauug

SEQ ID NO: 368867 - RNA, 22 nt, Human
uaaaauguuugcaagagaccag

SEQ ID NO: 368868 - RNA, 22 nt, Human
cuuugcauacaauuuuuagaaa

SEQ ID NO: 368869 - RNA, 22 nt, Human
guuccuauauagccuuaaggau

SEQ ID NO: 368870 - RNA, 22 nt, Human
ucacaucucccuggaggacaca

SEQ ID NO: 368871 - RNA, 22 nt, Human
uuaugggagcaauuggggaggu

SEQ ID NO: 368872 - RNA, 22 nt, Human
gcugccuggcuuuaguccacuu

SEQ ID NO: 368873 - RNA, 22 nt, Human
ucugaacagaaaagaugcacaa

SEQ ID NO: 368874 - RNA, 22 nt, Human
ugacacaggcagcucccagcac

SEQ ID NO: 368875 - RNA, 22 nt, Human
aaagggagcauggcugcaggga

SEQ ID NO: 368876 - RNA, 22 nt, Human
acugaaggcuuaacucuuucau

SEQ ID NO: 368877 - RNA, 22 nt, Human
ucccaggauuuuaggcucucag

SEQ ID NO: 368878 - RNA, 22 nt, Human
agaagaaacugucggggauauu

SEQ ID NO: 368879 - RNA, 22 nt, Human
uuagccauuaaauuacaaggug

SEQ ID NO: 368880 - RNA, 22 nt, Human
gcugaguguaaugauggcagag

SEQ ID NO: 368881 - RNA, 22 nt, Human
guauagaaacccagaaagauag

SEQ ID NO: 368882 - RNA, 22 nt, Human
gccuccuggauuuuagugccau

SEQ ID NO: 368883 - RNA, 22 nt, Human
acucugagcaucccaagucuua

SEQ ID NO: 368884 - RNA, 22 nt, Human
ucccacacagcccgcucaccgg

SEQ ID NO: 368885 - RNA, 22 nt, Human
ugcagggcaucuuugaagugug

SEQ ID NO: 368886 - RNA, 22 nt, Human
ccaguccagugccaugcauggc

SEQ ID NO: 368887 - RNA, 22 nt, Human
augggaggaagagaagaugucu

SEQ ID NO: 368888 - RNA, 22 nt, Human
caggagaucuuaggaauucuua

SEQ ID NO: 368889 - RNA, 22 nt, Human
aguuuauguagaauuggcaaua

SEQ ID NO: 368890 - RNA, 22 nt, Human
uuguuuuggagaugagcuaaaa

SEQ ID NO: 368891 - RNA, 20 nt, Human
aaaauauguauaacucuucu

SEQ ID NO: 368892 - RNA, 22 nt, Human
caguggaagcuggcugugaaga

SEQ ID NO: 368893 - RNA, 22 nt, Human
ugaggcagugcugggaagccug

SEQ ID NO: 368894 - RNA, 22 nt, Human
cagagagagucaaaucuuugcu

SEQ ID NO: 368895 - RNA, 22 nt, Human
uguaagauauucagcuuauuga

SEQ ID NO: 368896 - RNA, 22 nt, Human
ucuggcaggucaaucauucuuu

SEQ ID NO: 368897 - RNA, 22 nt, Human
acauaucuuucccucuccugaa

SEQ ID NO: 368898 - RNA, 21 nt, Human
ucacaucuauguuaagcaaac

SEQ ID NO: 368899 - RNA, 22 nt, Human
uagcagagcagggaucagagcc

SEQ ID NO: 368900 - RNA, 22 nt, Human
gaagcagcugccagagaugucu

SEQ ID NO: 368901 - RNA, 22 nt, Human
gaggcacaccagggagucuugu

SEQ ID NO: 368902 - RNA, 22 nt, Human
acuggacagaggaaauauggag

SEQ ID NO: 368903 - RNA, 22 nt, Human
agagugaaggccagguuacagu

SEQ ID NO: 368904 - RNA, 22 nt, Human
caggguggggaaauagcgcccu

SEQ ID NO: 368905 - RNA, 22 nt, Human
gcagaggggaagcugaggaauu

SEQ ID NO: 368906 - RNA, 22 nt, Human
caacagaaggaagcagggucag

SEQ ID NO: 368907 - RNA, 22 nt, Human
uuguuucaaauauuucagaaua

SEQ ID NO: 368908 - RNA, 22 nt, Human
uuuccucuuuguaccuugacua

SEQ ID NO: 368909 - RNA, 22 nt, Human
ccaggagaaugggauuacccua

SEQ ID NO: 368910 - RNA, 20 nt, Human
aggagggaccuggauuggcg

SEQ ID NO: 368911 - RNA, 22 nt, Human
agaaaguucacugguauauuuu

SEQ ID NO: 368912 - RNA, 22 nt, Human
ggcagcuuccugagccagcagc

SEQ ID NO: 368913 - RNA, 22 nt, Human
agccacagugcaagagagaaaa

SEQ ID NO: 368914 - RNA, 22 nt, Human
uuucagaaaacuuaucaucagu

SEQ ID NO: 368915 - RNA, 22 nt, Human
auagucacugccuuccauuugu

SEQ ID NO: 368916 - RNA, 22 nt, Human
agaagccauucccuguaggcuc

SEQ ID NO: 368917 - RNA, 22 nt, Human
ccaggagaugggagcaucuaaa

SEQ ID NO: 368918 - RNA, 22 nt, Human
aggggcaggugcugcacuuaga

SEQ ID NO: 368919 - RNA, 22 nt, Human
gggcccacuggcugucugaccc

SEQ ID NO: 368920 - RNA, 22 nt, Human
uccagaggcuccaaagggagau

SEQ ID NO: 368921 - RNA, 22 nt, Human
agaauuuccuaugagagauucc

SEQ ID NO: 368922 - RNA, 22 nt, Human
augaaaauacugugguugauag

SEQ ID NO: 368923 - RNA, 22 nt, Human
ggagaguggauuccagcuguau

SEQ ID NO: 368924 - RNA, 22 nt, Human
agcuucccaagguuggaagguu

SEQ ID NO: 368925 - RNA, 22 nt, Human
guccucugggcuuugagcaguc

SEQ ID NO: 368926 - RNA, 22 nt, Human
auacagaaaaguggauagccag

SEQ ID NO: 368927 - RNA, 22 nt, Human
ucccaggguccucuucuggaau

SEQ ID NO: 368928 - RNA, 22 nt, Human
ucaaaggcauugccaauaagua

SEQ ID NO: 368929 - RNA, 22 nt, Human
ccucugccaccucccacgaggc

SEQ ID NO: 368930 - RNA, 22 nt, Human
cacaggagauugaucuauuggu

SEQ ID NO: 368931 - RNA, 20 nt, Human
cagcugccuggcucugggau

SEQ ID NO: 368932 - RNA, 21 nt, Human
ggagauggguaucgccugggc

SEQ ID NO: 368933 - RNA, 22 nt, Human
ucugaagauuaccagcuaaaug

SEQ ID NO: 368934 - RNA, 22 nt, Human
cuacccaggcuuagagggcugg

SEQ ID NO: 368935 - RNA, 22 nt, Human
caugaaugcuggguucauguaa

SEQ ID NO: 368936 - RNA, 22 nt, Human
ugcucagggacaauggagaggg

SEQ ID NO: 368937 - RNA, 22 nt, Human
aguuauucauuuauucuguaca

SEQ ID NO: 368938 - RNA, 20 nt, Human
acuuucucgguuucucaccu

SEQ ID NO: 368939 - RNA, 22 nt, Human
acagaggaaggcugagcugccc

SEQ ID NO: 368940 - RNA, 22 nt, Human
uauaauuuuaagugguaaauua

SEQ ID NO: 368941 - RNA, 16 nt, Human
uuuccaaagggcagcu

SEQ ID NO: 368942 - RNA, 22 nt, Human
aggcuggaguacaguggcuauu

SEQ ID NO: 368943 - RNA, 22 nt, Human
gcagugaacauaacacagaagg

SEQ ID NO: 368944 - RNA, 22 nt, Human
gagcacccuuugcacaucaguc

SEQ ID NO: 368945 - RNA, 22 nt, Human
aaugggaaagagacuagaugcu

SEQ ID NO: 368946 - RNA, 22 nt, Human
uccuugaaugaauguucucucc

SEQ ID NO: 368947 - RNA, 22 nt, Human
cacacuuugugcuaaucuauuu

SEQ ID NO: 368948 - RNA, 22 nt, Human
accauuuuggguauuuucagag

SEQ ID NO: 368949 - RNA, 23 nt, Human
aaaugcagggucgcagguuacag

SEQ ID NO: 368950 - RNA, 22 nt, Human
cccuggccagcucaugucugag

SEQ ID NO: 368951 - RNA, 22 nt, Human
gggagcuguaagggacagguag

SEQ ID NO: 368952 - RNA, 22 nt, Human
aauuucagaccauuugcaauua

SEQ ID NO: 368953 - RNA, 22 nt, Human
cagauaaaggcuuacuaguagu

SEQ ID NO: 368954 - RNA, 23 nt, Human
aucagucuugguagcugugccca

SEQ ID NO: 368955 - RNA, 22 nt, Human
ucuagaaauuuugccuuguauu

SEQ ID NO: 368956 - RNA, 22 nt, Human
agcauuuaguuaguaaauguuu

SEQ ID NO: 368957 - RNA, 22 nt, Human
uggcagagucaucacaucugga

SEQ ID NO: 368958 - RNA, 22 nt, Human
uccucacaagcaagcacaggua

SEQ ID NO: 368959 - RNA, 22 nt, Human
guggcagcaaaugccuggacua

SEQ ID NO: 368960 - RNA, 22 nt, Human
uggcugaggucuggggcuucug

SEQ ID NO: 368961 - RNA, 22 nt, Human
gagagucuagugcaccuaguuu

SEQ ID NO: 368962 - RNA, 22 nt, Human
caggcugcagugcaguggcuau

SEQ ID NO: 368963 - RNA, 22 nt, Human
caggcacugugcugagcucugc

SEQ ID NO: 368964 - RNA, 23 nt, Human
agucucagcuggaaacauguguc

SEQ ID NO: 368965 - RNA, 22 nt, Human
ugucuuuucuacuguaagcaua

SEQ ID NO: 368966 - RNA, 22 nt, Human
ccagagcagauguggccuuggu

SEQ ID NO: 368967 - RNA, 19 nt, Human
gggcuuggggcugaagccu

SEQ ID NO: 368968 - RNA, 22 nt, Human
ucuucacauggaacaugaagcu

SEQ ID NO: 368969 - RNA, 22 nt, Human
ccuccagggcagacggggagca

SEQ ID NO: 368970 - RNA, 19 nt, Human
uccuucagucagaucuggg

SEQ ID NO: 368971 - RNA, 22 nt, Human
uggccuccccuaacagccucuu

SEQ ID NO: 368972 - RNA, 22 nt, Human
agaaaucagaacccugaaguuc

SEQ ID NO: 368973 - RNA, 22 nt, Human
uguuuaagcugaugagguaucg

SEQ ID NO: 368974 - RNA, 22 nt, Human
ucaggcugagaaaaucuggacc

SEQ ID NO: 368975 - RNA, 22 nt, Human
cugcccugagucaugccagaug

SEQ ID NO: 368976 - RNA, 22 nt, Human
accaaggagaaggugcaagcuu

SEQ ID NO: 368977 - RNA, 22 nt, Human
cagauccacccuuguagugaca

SEQ ID NO: 368978 - RNA, 22 nt, Human
aggguggggugcuacaucuuua

SEQ ID NO: 368979 - RNA, 22 nt, Human
aacagacagaaaaaugugaucu

SEQ ID NO: 368980 - RNA, 22 nt, Human
gaauacaagccugccaccugga

SEQ ID NO: 368981 - RNA, 22 nt, Human
ggagugaguacuggaguagcug

SEQ ID NO: 368982 - RNA, 20 nt, Human
cucucuggaaggugggagcc

SEQ ID NO: 368983 - RNA, 22 nt, Human
ccugugucuuccccacuggugu

SEQ ID NO: 368984 - RNA, 22 nt, Human
agcagagccagaauuggaccag

SEQ ID NO: 368985 - RNA, 22 nt, Human
caugagaaguggccuucaaaaa

SEQ ID NO: 368986 - RNA, 22 nt, Human
aagcagcuuuugaagagugagg

SEQ ID NO: 368987 - RNA, 22 nt, Human
ggcauuuagagggcuuuucuga

SEQ ID NO: 368988 - RNA, 22 nt, Human
ccugcccagcuucccgagugca

SEQ ID NO: 368989 - RNA, 21 nt, Human
cagcaaaucauugggcagacu

SEQ ID NO: 368990 - RNA, 22 nt, Human
gccugggaacucugaucuccug

SEQ ID NO: 368991 - RNA, 22 nt, Human
ucccacucccaggcaggccucu

SEQ ID NO: 368992 - RNA, 22 nt, Human
cacugaaggcuaggauuagaug

SEQ ID NO: 368993 - RNA, 22 nt, Human
ucuguggauuuuaguguucaug

SEQ ID NO: 368994 - RNA, 22 nt, Human
uaugaaaagguggccaauguag

SEQ ID NO: 368995 - RNA, 22 nt, Human
gcuccagaugaaaggccagagg

SEQ ID NO: 368996 - RNA, 22 nt, Human
cugguacaaaaugcugauauca

SEQ ID NO: 368997 - RNA, 22 nt, Human
cuggcagcagcuucuggaucga

SEQ ID NO: 368998 - RNA, 22 nt, Human
uuuaggcauugaauuagaauag

SEQ ID NO: 368999 - RNA, 22 nt, Human
agggcaguucagccacaggcuc

SEQ ID NO: 369000 - RNA, 22 nt, Human
agggcaguguggugggacugac

SEQ ID NO: 369001 - RNA, 22 nt, Human
ggucccaggagaauaggugcaa

SEQ ID NO: 369002 - RNA, 22 nt, Human
aacaugcucuguuucuuggaug

SEQ ID NO: 369003 - RNA, 22 nt, Human
ucagguguuagaagaaauuuca

SEQ ID NO: 369004 - RNA, 22 nt, Human
cagcaugguggagcugcucuuu

SEQ ID NO: 369005 - RNA, 22 nt, Human
cccaggaauuggaggcugcagu

SEQ ID NO: 369006 - RNA, 19 nt, Human
accaggccucagaggcccu

SEQ ID NO: 369007 - RNA, 22 nt, Human
uagcugucaccagaaauggcca

SEQ ID NO: 369008 - RNA, 22 nt, Human
ccaaaguccauaguuuacauaa

SEQ ID NO: 369009 - RNA, 18 nt, Human
aauuuccauaugaauugc

SEQ ID NO: 369010 - RNA, 22 nt, Human
guuauguauugggaaauccaag

SEQ ID NO: 369011 - RNA, 22 nt, Human
aaagaaucuauauaucaccacc

SEQ ID NO: 369012 - RNA, 22 nt, Human
uaagacauuugaaaugugaucc

SEQ ID NO: 369013 - RNA, 20 nt, Human
cuuuggcaaugagaacaggg

SEQ ID NO: 369014 - RNA, 22 nt, Human
cucugugagggucuguacagaa

SEQ ID NO: 369015 - RNA, 22 nt, Human
cucuaacaccacagugugguuu

SEQ ID NO: 369016 - RNA, 22 nt, Human
acaggacauguaccaggugguc

SEQ ID NO: 369017 - RNA, 22 nt, Human
cauugcacuuuggguccaggac

SEQ ID NO: 369018 - RNA, 22 nt, Human
guuucaaauagguuucagcaaa

SEQ ID NO: 369019 - RNA, 22 nt, Human
gucuugaucuccugaccuugug

SEQ ID NO: 369020 - RNA, 19 nt, Human
ugcuuccucaccaucuccc

SEQ ID NO: 369021 - RNA, 22 nt, Human
cucagggcuugaguguccagga

SEQ ID NO: 369022 - RNA, 22 nt, Human
guggcagcugguaugcagacag

SEQ ID NO: 369023 - RNA, 22 nt, Human
cagagagaggccacugcuauua

SEQ ID NO: 369024 - RNA, 22 nt, Human
cccuggaggcggagcuugcagu

SEQ ID NO: 369025 - RNA, 22 nt, Human
gggcguggauggucagugcagg

SEQ ID NO: 369026 - RNA, 17 nt, Human
cacaggugugguuugag

SEQ ID NO: 369027 - RNA, 22 nt, Human
gcagcugauggaaguccuauug

SEQ ID NO: 369028 - RNA, 22 nt, Human
ugcuuuauucaggguuuacccc

SEQ ID NO: 369029 - RNA, 22 nt, Human
ugacucuguaccugucugccuu

SEQ ID NO: 369030 - RNA, 22 nt, Human
gagggcugaugcuuacuuauuu

SEQ ID NO: 369031 - RNA, 22 nt, Human
ccagagaggccaaggucguggu

SEQ ID NO: 369032 - RNA, 21 nt, Human
uuugaaagcuacaucuauagc

SEQ ID NO: 369033 - RNA, 22 nt, Human
agggaagcccuggcugagaccc

SEQ ID NO: 369034 - RNA, 22 nt, Human
ugugaauagugccgcaauaaac

SEQ ID NO: 369035 - RNA, 22 nt, Human
guuagggaagcgcuguguucuu

SEQ ID NO: 369036 - RNA, 22 nt, Human
auuuaugauuagccuauuguug

SEQ ID NO: 369037 - RNA, 22 nt, Human
uggcacugggaugcuacuguua

SEQ ID NO: 369038 - RNA, 22 nt, Human
gggcagcugccaagugcaucgc

SEQ ID NO: 369039 - RNA, 22 nt, Human
agugugaccuuauuuggaaaca

SEQ ID NO: 369040 - RNA, 22 nt, Human
gaauuucaacaguccucaaaug

SEQ ID NO: 369041 - RNA, 20 nt, Human
gcuguugccaguacagaugg

SEQ ID NO: 369042 - RNA, 22 nt, Human
gcucagaggcacgaccucuugg

SEQ ID NO: 369043 - RNA, 22 nt, Human
ugcagugccucggcagugcagc

SEQ ID NO: 369044 - RNA, 22 nt, Human
cuggaguuagaguagacacuga

SEQ ID NO: 369045 - RNA, 22 nt, Human
agacccagaaagcagcugcauu

SEQ ID NO: 369046 - RNA, 22 nt, Human
guuuucaaggggauuuaacuga

SEQ ID NO: 369047 - RNA, 22 nt, Human
acagcuggcaggggggcaugaa

SEQ ID NO: 369048 - RNA, 22 nt, Human
agucccagacuccaguuuucug

SEQ ID NO: 369049 - RNA, 22 nt, Human
uucuauacaaagauuucucaca

SEQ ID NO: 369050 - RNA, 22 nt, Human
gcuggcagacugggggcagaac

SEQ ID NO: 369051 - RNA, 22 nt, Human
aguucuagaagacuuuuccauu

SEQ ID NO: 369052 - RNA, 22 nt, Human
ugugcuucagguugucgccacg

SEQ ID NO: 369053 - RNA, 22 nt, Human
caacugugaauuuuaugauacc

SEQ ID NO: 369054 - RNA, 22 nt, Human
auauucuugugauuauaaagua

SEQ ID NO: 369055 - RNA, 19 nt, Human
ggaggccuggguauuugcc

SEQ ID NO: 369056 - RNA, 22 nt, Human
uuugaacaagagcuucacauua

SEQ ID NO: 369057 - RNA, 22 nt, Human
caagggcuucaaguggccaaga

SEQ ID NO: 369058 - RNA, 22 nt, Human
aaugggaagucacuacuguuac

SEQ ID NO: 369059 - RNA, 22 nt, Human
gacuucuauuaauaccucuacu

SEQ ID NO: 369060 - RNA, 22 nt, Human
gccuccccugcaauuguccuug

SEQ ID NO: 369061 - RNA, 22 nt, Human
uaugagcuuccaguguugcaug

SEQ ID NO: 369062 - RNA, 22 nt, Human
ugggcccaagagagucuccaac

SEQ ID NO: 369063 - RNA, 19 nt, Human
ugggcagguucaguaaugg

SEQ ID NO: 369064 - RNA, 22 nt, Human
cagcagcagccccaggaagguu

SEQ ID NO: 369065 - RNA, 22 nt, Human
cugagggcccugaagcuuggca

SEQ ID NO: 369066 - RNA, 22 nt, Human
auggcaggcccagguguucauu

SEQ ID NO: 369067 - RNA, 21 nt, Human
ugaggcaggggugcuuuuguc

SEQ ID NO: 369068 - RNA, 19 nt, Human
ccugugacuaucuuuguaa

SEQ ID NO: 369069 - RNA, 22 nt, Human
ugggccuggacaaggccacuag

SEQ ID NO: 369070 - RNA, 22 nt, Human
cugggcugugguguggcccaaa

SEQ ID NO: 369071 - RNA, 22 nt, Human
ugucacaguuuguacuuuauag

SEQ ID NO: 369072 - RNA, 22 nt, Human
agccccaguaagggagggccug

SEQ ID NO: 369073 - RNA, 22 nt, Human
accaugggucagccaccucagc

SEQ ID NO: 369074 - RNA, 18 nt, Human
gagucuuuguuacugcug

SEQ ID NO: 369075 - RNA, 22 nt, Human
uuuuugaaggcugaugugauua

SEQ ID NO: 369076 - RNA, 22 nt, Human
agucccagaucuacaggaggga

SEQ ID NO: 369077 - RNA, 22 nt, Human
auggggagagaagggcugagcu

SEQ ID NO: 369078 - RNA, 22 nt, Human
gaggcuggaauauuagaaaugu

SEQ ID NO: 369079 - RNA, 22 nt, Human
auuaucuauguagaaugauuuu

SEQ ID NO: 369080 - RNA, 21 nt, Human
uccaaaaaggagcguccuucu

SEQ ID NO: 369081 - RNA, 22 nt, Human
ggguccagcuacaucagggugg

SEQ ID NO: 369082 - RNA, 19 nt, Human
agcuggagauuggagggca

SEQ ID NO: 369083 - RNA, 22 nt, Human
uccagccaagccuugguagcug

SEQ ID NO: 369084 - RNA, 22 nt, Human
agaaaugcucuuccugaccaga

SEQ ID NO: 369085 - RNA, 22 nt, Human
cuguccuaugaguacucacuag

SEQ ID NO: 369086 - RNA, 22 nt, Human
gaugggaggaaccugggucccu

SEQ ID NO: 369087 - RNA, 22 nt, Human
uucaaaggcaggauagcagcug

SEQ ID NO: 369088 - RNA, 19 nt, Human
cugagcagcggcagcacuu

SEQ ID NO: 369089 - RNA, 22 nt, Human
uucauuaauucauucagugacu

SEQ ID NO: 369090 - RNA, 22 nt, Human
gcaaggcagcgcggaguagcua

SEQ ID NO: 369091 - RNA, 23 nt, Human
gaguguucauagcaggcucuugc

SEQ ID NO: 369092 - RNA, 23 nt, Human
agaauuccaguuucuuaugucac

SEQ ID NO: 369093 - RNA, 22 nt, Human
gugggcuggacccuccugcucc

SEQ ID NO: 369094 - RNA, 22 nt, Human
ucccaaggccaggcaucuagaa

SEQ ID NO: 369095 - RNA, 22 nt, Human
uuuguuuagaaagagauuggug

SEQ ID NO: 369096 - RNA, 22 nt, Human
gaggggcagagguagagaacaa

SEQ ID NO: 369097 - RNA, 22 nt, Human
aaguccuuuauccuaaaagguc

SEQ ID NO: 369098 - RNA, 22 nt, Human
caccagcagaagacugagggug

SEQ ID NO: 369099 - RNA, 22 nt, Human
uuucacaaucaaauggugaaau

SEQ ID NO: 369100 - RNA, 22 nt, Human
cauacuuugggauaagagugga

SEQ ID NO: 369101 - RNA, 22 nt, Human
ugggcugagcacugaggaagga

SEQ ID NO: 369102 - RNA, 22 nt, Human
cuccaggagggggauggcugua

SEQ ID NO: 369103 - RNA, 22 nt, Human
uugaaaggugcugugugcugau

SEQ ID NO: 369104 - RNA, 22 nt, Human
ugccuggcaaugccagaagcca

SEQ ID NO: 369105 - RNA, 20 nt, Human
gcagcugaaaguaugacacc

SEQ ID NO: 369106 - RNA, 22 nt, Human
ucagggcagccuaaggcaccuc

SEQ ID NO: 369107 - RNA, 20 nt, Human
caccaggcgcucugagaaca

SEQ ID NO: 369108 - RNA, 22 nt, Human
uaggcaggcugaauguagauuu

SEQ ID NO: 369109 - RNA, 22 nt, Human
gguuucaaugagaagugcuugu

SEQ ID NO: 369110 - RNA, 22 nt, Human
agcagggcucacauuaguggau

SEQ ID NO: 369111 - RNA, 22 nt, Human
gacugccagaaugugaggccug

SEQ ID NO: 369112 - RNA, 22 nt, Human
cagcaggcugcgauugcucauu

SEQ ID NO: 369113 - RNA, 22 nt, Human
caauuucagaccuuuccuugga

SEQ ID NO: 369114 - RNA, 22 nt, Human
aauauuguuucaagaucacaga

SEQ ID NO: 369115 - RNA, 22 nt, Human
ggaagaggcugaggccaugcug

SEQ ID NO: 369116 - RNA, 22 nt, Human
ggcuuucuagaucuagcucugu

SEQ ID NO: 369117 - RNA, 17 nt, Human
caagagagaugacugga

SEQ ID NO: 369118 - RNA, 22 nt, Human
ugucuuuagaaagaagcagaca

SEQ ID NO: 369119 - RNA, 20 nt, Human
cuucuucauuaacccuacug

SEQ ID NO: 369120 - RNA, 22 nt, Human
cuggccuuuuguuucuggagaa

SEQ ID NO: 369121 - RNA, 22 nt, Human
ggucucagcaguugcuuugacu

SEQ ID NO: 369122 - RNA, 19 nt, Human
gcugugccucucuccugcu

SEQ ID NO: 369123 - RNA, 22 nt, Human
gcucccagucugauggaggaga

SEQ ID NO: 369124 - RNA, 22 nt, Human
ugccucuguugagccuuggcug

SEQ ID NO: 369125 - RNA, 22 nt, Human
auggaaaggcuguggaaacuua

SEQ ID NO: 369126 - RNA, 22 nt, Human
aggcagcuggacauaacuaacc

SEQ ID NO: 369127 - RNA, 22 nt, Human
guucucucugcuuccaagaugg

SEQ ID NO: 369128 - RNA, 22 nt, Human
ucccaggaucugagggcagaga

SEQ ID NO: 369129 - RNA, 22 nt, Human
gucugaggaagaugcaggggga

SEQ ID NO: 369130 - RNA, 22 nt, Human
gggcaggucugggucagccuga

SEQ ID NO: 369131 - RNA, 18 nt, Human
gaaaugugauucuagggc

SEQ ID NO: 369132 - RNA, 22 nt, Human
uggccugaggcucggcaugggu

SEQ ID NO: 369133 - RNA, 22 nt, Human
agcuuaggaggaugaugaacau

SEQ ID NO: 369134 - RNA, 22 nt, Human
gccagcugcuggaacagcgcga

SEQ ID NO: 369135 - RNA, 22 nt, Human
aaucagaaauugagggucuggu

SEQ ID NO: 369136 - RNA, 22 nt, Human
auugaaaauaaggccagaaaca

SEQ ID NO: 369137 - RNA, 22 nt, Human
gcacccagagggcagggucucc

SEQ ID NO: 369138 - RNA, 22 nt, Human
caguacuucuuggaaacuggau

SEQ ID NO: 369139 - RNA, 22 nt, Human
agaggaaguaaucaggaccugc

SEQ ID NO: 369140 - RNA, 22 nt, Human
ugaagaaucagauuggccugcg

SEQ ID NO: 369141 - RNA, 22 nt, Human
ucagggcauguauguuucuuua

SEQ ID NO: 369142 - RNA, 23 nt, Human
uucuucucaauuaguugauucag

SEQ ID NO: 369143 - RNA, 17 nt, Human
gcugagugcagggaguc

SEQ ID NO: 369144 - RNA, 22 nt, Human
ccccaggagcuuguuuuagaga

SEQ ID NO: 369145 - RNA, 20 nt, Human
acaaaugcauucugugacau

SEQ ID NO: 369146 - RNA, 22 nt, Human
aaucuggcucagaagaagauga

SEQ ID NO: 369147 - RNA, 22 nt, Human
ggagcagacauaaccuuacaga

SEQ ID NO: 369148 - RNA, 22 nt, Human
uuuauacauggagaauuuuugc

SEQ ID NO: 369149 - RNA, 22 nt, Human
acacacagguaaaggagccugg

SEQ ID NO: 369150 - RNA, 22 nt, Human
augauucagcaauuuuauaucu

SEQ ID NO: 369151 - RNA, 22 nt, Human
uggaaauguauuugggcaugcc

SEQ ID NO: 369152 - RNA, 22 nt, Human
ggcugugaacccuggcagugug

SEQ ID NO: 369153 - RNA, 22 nt, Human
aggaccuguaccucagcaucua

SEQ ID NO: 369154 - RNA, 22 nt, Human
agugccuggaccccaugacaua

SEQ ID NO: 369155 - RNA, 22 nt, Human
agcccagcaaagggagguucag

SEQ ID NO: 369156 - RNA, 22 nt, Human
agggcagccucucagccuaggu

SEQ ID NO: 369157 - RNA, 22 nt, Human
ugcugccuuagcagccaggcaa

SEQ ID NO: 369158 - RNA, 22 nt, Human
aaggucauggcaaauuacuuuu

SEQ ID NO: 369159 - RNA, 22 nt, Human
cuggcagcgguuugcagccugg

SEQ ID NO: 369160 - RNA, 22 nt, Human
uggaaagcgaggaguuggcauu

SEQ ID NO: 369161 - RNA, 22 nt, Human
caauguguguguuuuucucaac

SEQ ID NO: 369162 - RNA, 22 nt, Human
gcuggccauggccugcgccauc

SEQ ID NO: 369163 - RNA, 22 nt, Human
uggaggaaguggacaguugugu

SEQ ID NO: 369164 - RNA, 22 nt, Human
gaguuguucaacgugugugaaa

SEQ ID NO: 369165 - RNA, 22 nt, Human
ucuggccuuaucuguccaagcc

SEQ ID NO: 369166 - RNA, 22 nt, Human
ucucccuggagcccugaagcau

SEQ ID NO: 369167 - RNA, 22 nt, Human
aagggccauaacuugcaguguu

SEQ ID NO: 369168 - RNA, 22 nt, Human
ucauggcacuuagcacaguccu

SEQ ID NO: 369169 - RNA, 22 nt, Human
ccagcuggagcucgcagauagg

SEQ ID NO: 369170 - RNA, 22 nt, Human
uaaggucauggugaauaauaag

SEQ ID NO: 369171 - RNA, 22 nt, Human
cugcugagguccuugcucagac

SEQ ID NO: 369172 - RNA, 22 nt, Human
uacagaguggugagaucuuuug

SEQ ID NO: 369173 - RNA, 22 nt, Human
uuccucagccaaggcugggauc

SEQ ID NO: 369174 - RNA, 22 nt, Human
auggggcucugcggcugcuccc

SEQ ID NO: 369175 - RNA, 22 nt, Human
gccuaggaguggggauggcggu

SEQ ID NO: 369176 - RNA, 22 nt, Human
ccugggagggcaagugcugaug

SEQ ID NO: 369177 - RNA, 22 nt, Human
uccagaccuagggcaccccagu

SEQ ID NO: 369178 - RNA, 22 nt, Human
cuccuuccugccccagugauaa

SEQ ID NO: 369179 - RNA, 22 nt, Human
ugaaaaaacaaguuggcccauu

SEQ ID NO: 369180 - RNA, 22 nt, Human
agggagacacaugaggaaguca

SEQ ID NO: 369181 - RNA, 22 nt, Human
agggaguguaaauggugcucag

SEQ ID NO: 369182 - RNA, 22 nt, Human
agcaucuggcagaaagucagaa

SEQ ID NO: 369183 - RNA, 22 nt, Human
cuauuauuagauaaucuacuug

SEQ ID NO: 369184 - RNA, 22 nt, Human
uacuuucuagcucuccccaguu

SEQ ID NO: 369185 - RNA, 22 nt, Human
cccaggaacuccagagcuccuc

SEQ ID NO: 369186 - RNA, 22 nt, Human
cuguggaccugcucuuagagac

SEQ ID NO: 369187 - RNA, 22 nt, Human
cugcccugagggccuguguguu

SEQ ID NO: 369188 - RNA, 22 nt, Human
auacuguuuugugacuuaucuu

SEQ ID NO: 369189 - RNA, 22 nt, Human
gagugagggcagcaggggcugc

SEQ ID NO: 369190 - RNA, 22 nt, Human
guccagggcuaaaucagguucc

SEQ ID NO: 369191 - RNA, 22 nt, Human
auuauuagauucuuaauuguaa

SEQ ID NO: 369192 - RNA, 22 nt, Human
aaucaagucaaccaucaugugc

SEQ ID NO: 369193 - RNA, 22 nt, Human
cuggaagguuccucccagcucc

SEQ ID NO: 369194 - RNA, 22 nt, Human
gaggugggaugugugugcuacu

SEQ ID NO: 369195 - RNA, 19 nt, Human
cagugcccgacgcaggucu

SEQ ID NO: 369196 - RNA, 22 nt, Human
uggcuuaagcgcaacucugucu

SEQ ID NO: 369197 - RNA, 22 nt, Human
caggagcaugcugaugccagaa

SEQ ID NO: 369198 - RNA, 22 nt, Human
acaggcacugucaagucaugaa

SEQ ID NO: 369199 - RNA, 22 nt, Human
aggcugagagcaacgugucaga

SEQ ID NO: 369200 - RNA, 22 nt, Human
gggcaguagcuucguaggcauc

SEQ ID NO: 369201 - RNA, 22 nt, Human
gcacacacaugugaguacaugc

SEQ ID NO: 369202 - RNA, 22 nt, Human
aagcugccugccacgcuagaua

SEQ ID NO: 369203 - RNA, 22 nt, Human
gaggccagaagugccucgggcu

SEQ ID NO: 369204 - RNA, 22 nt, Human
gaagaaggugccagaggcuuac

SEQ ID NO: 369205 - RNA, 22 nt, Human
ugggcucugugccagguuggug

SEQ ID NO: 369206 - RNA, 22 nt, Human
guagaaauagugguugacagga

SEQ ID NO: 369207 - RNA, 22 nt, Human
aaagcagagguugcagugagcu

SEQ ID NO: 369208 - RNA, 22 nt, Human
aucagaaaggugggcaagcaga

SEQ ID NO: 369209 - RNA, 22 nt, Human
uggcucagcauucacuggucuu

SEQ ID NO: 369210 - RNA, 22 nt, Human
aacacagcuaauuucugucaau

SEQ ID NO: 369211 - RNA, 22 nt, Human
cuggcucauccagguguugcuc

SEQ ID NO: 369212 - RNA, 22 nt, Human
caguguuuaaucauugugaauu

SEQ ID NO: 369213 - RNA, 22 nt, Human
caaaugauacuguuuuuagucu

SEQ ID NO: 369214 - RNA, 22 nt, Human
augcaguaaauguucuaguuug

SEQ ID NO: 369215 - RNA, 22 nt, Human
ucagaauuagagcucuucuuga

SEQ ID NO: 369216 - RNA, 22 nt, Human
acaguccuuguguggaacauua

SEQ ID NO: 369217 - RNA, 22 nt, Human
ugggccugauucuugaauccug

SEQ ID NO: 369218 - RNA, 22 nt, Human
ccauccuaucugaccuacuugu

SEQ ID NO: 369219 - RNA, 22 nt, Human
gcccaggauggcuggaggugcu

SEQ ID NO: 369220 - RNA, 22 nt, Human
ucuucagagugaaagucuguga

SEQ ID NO: 369221 - RNA, 22 nt, Human
ugaaauagucuaaaaaaccaga

SEQ ID NO: 369222 - RNA, 22 nt, Human
uccaguggcacuggagacuaga

SEQ ID NO: 369223 - RNA, 22 nt, Human
uuauuuaaaagugguaagauuc

SEQ ID NO: 369224 - RNA, 22 nt, Human
uccaggagacacaagguacaua

SEQ ID NO: 369225 - RNA, 22 nt, Human
aguuugaaaguauugacagaag

SEQ ID NO: 369226 - RNA, 22 nt, Human
uguucuuucaguuagacacagu

SEQ ID NO: 369227 - RNA, 22 nt, Human
cuggcuggucaucagcaguacg

SEQ ID NO: 369228 - RNA, 22 nt, Human
cuccuucccuucaaguguuccu

SEQ ID NO: 369229 - RNA, 22 nt, Human
uguggaaaagaauaagggagau

SEQ ID NO: 369230 - RNA, 22 nt, Human
aggauccuguauggagaagcug

SEQ ID NO: 369231 - RNA, 22 nt, Human
aggagggaccuaggaauauugc

SEQ ID NO: 369232 - RNA, 22 nt, Human
uuuuugcugauaagcagaauuc

SEQ ID NO: 369233 - RNA, 22 nt, Human
gcugcccugucugcagcaggac

SEQ ID NO: 369234 - RNA, 22 nt, Human
ugcaauaaggaguaauaguaaa

SEQ ID NO: 369235 - RNA, 22 nt, Human
gugcucuggcuggucucccggu

SEQ ID NO: 369236 - RNA, 22 nt, Human
gauggggaugagaagugagcag

SEQ ID NO: 369237 - RNA, 20 nt, Human
ccugucuccucuuaccuggc

SEQ ID NO: 369238 - RNA, 22 nt, Human
cagcaggaaaaucaauucugug

SEQ ID NO: 369239 - RNA, 22 nt, Human
gaugcaggauagcuucacccag

SEQ ID NO: 369240 - RNA, 22 nt, Human
uccuuuccaugcuucuagaggc

SEQ ID NO: 369241 - RNA, 19 nt, Human
cagcugcaccgugaccauc

SEQ ID NO: 369242 - RNA, 18 nt, Human
cagaggagagacauucag

SEQ ID NO: 369243 - RNA, 23 nt, Human
gggaccugguaggaggugauugg

SEQ ID NO: 369244 - RNA, 22 nt, Human
gucuuguuugggauguggaugg

SEQ ID NO: 369245 - RNA, 22 nt, Human
gacaauacagaaagggacaugc

SEQ ID NO: 369246 - RNA, 22 nt, Human
acagagcuuaggaugacuccca

SEQ ID NO: 369247 - RNA, 22 nt, Human
gucaggaugacaagugcuuuca

SEQ ID NO: 369248 - RNA, 22 nt, Human
uuucuuguaagauguuuauuaa

SEQ ID NO: 369249 - RNA, 22 nt, Human
gcacacagauuaggaaacagaa

SEQ ID NO: 369250 - RNA, 22 nt, Human
gccaggcagauaugugagcuua

SEQ ID NO: 369251 - RNA, 22 nt, Human
gccaggcaugggcuucugggcg

SEQ ID NO: 369252 - RNA, 21 nt, Human
gcaggcuggucaaaccucagu

SEQ ID NO: 369253 - RNA, 22 nt, Human
aaaguguugauaugugacaucc

SEQ ID NO: 369254 - RNA, 22 nt, Human
caggaaugacugcagauggggc

SEQ ID NO: 369255 - RNA, 22 nt, Human
aggcugucucaccucaggaggg

SEQ ID NO: 369256 - RNA, 22 nt, Human
uugcagagccaugaggcuggcu

SEQ ID NO: 369257 - RNA, 22 nt, Human
gcacagaacagagaaauagcca

SEQ ID NO: 369258 - RNA, 22 nt, Human
gggauuugugggauggccagug

SEQ ID NO: 369259 - RNA, 22 nt, Human
guccucugcuucaugcccugau

SEQ ID NO: 369260 - RNA, 22 nt, Human
ucagcuuuuuacaugugaaaua

SEQ ID NO: 369261 - RNA, 22 nt, Human
uccuggauaucaaacaaacauu

SEQ ID NO: 369262 - RNA, 22 nt, Human
auugaaagauaggcuacugugg

SEQ ID NO: 369263 - RNA, 22 nt, Human
aaguuaugaaauuuggacagcu

SEQ ID NO: 369264 - RNA, 18 nt, Human
aaugcacacauuuacucc

SEQ ID NO: 369265 - RNA, 22 nt, Human
uuuauuuggcauccagggagaa

SEQ ID NO: 369266 - RNA, 22 nt, Human
aaguggagagcccuggaggucu

SEQ ID NO: 369267 - RNA, 22 nt, Human
ugaagccagucaauguuaaguu

SEQ ID NO: 369268 - RNA, 22 nt, Human
gggaguguugagcgcccugcca

SEQ ID NO: 369269 - RNA, 22 nt, Human
ccagcuuuccugcgaguugauu

SEQ ID NO: 369270 - RNA, 22 nt, Human
gugugcagugagcaaaagaucu

SEQ ID NO: 369271 - RNA, 22 nt, Human
uuucaggguacauggagcaaau

SEQ ID NO: 369272 - RNA, 22 nt, Human
gcugugcuggaaggggaccugc

SEQ ID NO: 369273 - RNA, 22 nt, Human
ccagagccuaagaucugauccu

SEQ ID NO: 369274 - RNA, 22 nt, Human
cuuaaauucuuaaugcccucau

SEQ ID NO: 369275 - RNA, 22 nt, Human
uguguguauaugcauuuaucua

SEQ ID NO: 369276 - RNA, 22 nt, Human
aggacuucuccgauaagucaga

SEQ ID NO: 369277 - RNA, 22 nt, Human
ugaaagcucugucaucauuccu

SEQ ID NO: 369278 - RNA, 19 nt, Human
auacagauguauccaugau

SEQ ID NO: 369279 - RNA, 22 nt, Human
cugcagggaacugaggcccaga

SEQ ID NO: 369280 - RNA, 22 nt, Human
uagaaaugcaguguacuguguc

SEQ ID NO: 369281 - RNA, 22 nt, Human
uguggccuccccacuucugggg

SEQ ID NO: 369282 - RNA, 22 nt, Human
gcugccaccguggagaugagug

SEQ ID NO: 369283 - RNA, 22 nt, Human
ggcaggcagaggcugagacagg

SEQ ID NO: 369284 - RNA, 22 nt, Human
aucaggauuauuaaaucuggau

SEQ ID NO: 369285 - RNA, 22 nt, Human
ugugaugguucacugggcauga

SEQ ID NO: 369286 - RNA, 22 nt, Human
gcugugcagccaagugccucug

SEQ ID NO: 369287 - RNA, 22 nt, Human
acucaagauagggaaaguacaa

SEQ ID NO: 369288 - RNA, 22 nt, Human
uugcauuuccuguacuguuuga

SEQ ID NO: 369289 - RNA, 22 nt, Human
auacaguauuaccuguucagga

SEQ ID NO: 369290 - RNA, 22 nt, Human
ggcagcagaacuggcccuguau

SEQ ID NO: 369291 - RNA, 22 nt, Human
aaaaguauuggccaccauuucu

SEQ ID NO: 369292 - RNA, 22 nt, Human
gugcugcagagucucgugccgc

SEQ ID NO: 369293 - RNA, 22 nt, Human
cccaggaguuagagguuguggu

SEQ ID NO: 369294 - RNA, 22 nt, Human
uuuuuaagagauucuccagucu

SEQ ID NO: 369295 - RNA, 22 nt, Human
aggcaggcaaccaccugggaag

SEQ ID NO: 369296 - RNA, 21 nt, Human
gcucucugcaugguggcucag

SEQ ID NO: 369297 - RNA, 20 nt, Human
agugccagggcaggugagag

SEQ ID NO: 369298 - RNA, 22 nt, Human
agugaaauacugucguuuuuag

SEQ ID NO: 369299 - RNA, 19 nt, Human
ggccuggauuuagggcucc

SEQ ID NO: 369300 - RNA, 22 nt, Human
cauugcacgggcgucugucugu

SEQ ID NO: 369301 - RNA, 22 nt, Human
ccagagaggccuuggcaagaca

SEQ ID NO: 369302 - RNA, 22 nt, Human
aguguguguuugggcgguuuau

SEQ ID NO: 369303 - RNA, 22 nt, Human
agccagcuguucuggggcagca

SEQ ID NO: 369304 - RNA, 22 nt, Human
accaggagaggcacuugcaaug

SEQ ID NO: 369305 - RNA, 22 nt, Human
aaauaaguaguuuaguguugug

SEQ ID NO: 369306 - RNA, 22 nt, Human
uggcauuugggcuggcuuuucu

SEQ ID NO: 369307 - RNA, 18 nt, Human
ccuggcuuccaucuuggu

SEQ ID NO: 369308 - RNA, 22 nt, Human
uagaaauaaaucugcagcuggg

SEQ ID NO: 369309 - RNA, 22 nt, Human
aaagcucuuuuccaaguauuga

SEQ ID NO: 369310 - RNA, 22 nt, Human
cagagccuuccuagcagacucu

SEQ ID NO: 369311 - RNA, 22 nt, Human
ccaagggaaaccgagaggcugg

SEQ ID NO: 369312 - RNA, 22 nt, Human
agugcuuucccugaaaccuucc

SEQ ID NO: 369313 - RNA, 19 nt, Human
auaaggcagugacuuuuuu

SEQ ID NO: 369314 - RNA, 22 nt, Human
agggccucuaccauccaagguu

SEQ ID NO: 369315 - RNA, 22 nt, Human
aaaugucuuucaauagagaaau

SEQ ID NO: 369316 - RNA, 22 nt, Human
guuaggcaaauaacuguggagc

SEQ ID NO: 369317 - RNA, 22 nt, Human
auuauuaggugcucucugacaa

SEQ ID NO: 369318 - RNA, 21 nt, Human
uguaaguuucaucugaauugg

SEQ ID NO: 369319 - RNA, 22 nt, Human
uggcagcuagcuguuuucaugc

SEQ ID NO: 369320 - RNA, 22 nt, Human
cagucccaaggaggaagcaguc

SEQ ID NO: 369321 - RNA, 22 nt, Human
cauggcaggugcagauucugug

SEQ ID NO: 369322 - RNA, 20 nt, Human
uuucugugagaaacacuguu

SEQ ID NO: 369323 - RNA, 22 nt, Human
ucacuucacacccacuaucaug

SEQ ID NO: 369324 - RNA, 22 nt, Human
auggagacgcaagggaccuagg

SEQ ID NO: 369325 - RNA, 22 nt, Human
acugccauuggucaaaugagug

SEQ ID NO: 369326 - RNA, 22 nt, Human
agacccugcaccucucgugggc

SEQ ID NO: 369327 - RNA, 22 nt, Human
aagcccagaugugagaacugag

SEQ ID NO: 369328 - RNA, 22 nt, Human
uuccuaauggcaaaacauguuu

SEQ ID NO: 369329 - RNA, 22 nt, Human
auuuccaguccuaaugaucugg

SEQ ID NO: 369330 - RNA, 22 nt, Human
agcugcccuggcggagcugcuc

SEQ ID NO: 369331 - RNA, 22 nt, Human
agggaccugucaaugacaguua

SEQ ID NO: 369332 - RNA, 18 nt, Human
aaacuggcuuggccugug

SEQ ID NO: 369333 - RNA, 22 nt, Human
caggcugaucagggcugggaug

SEQ ID NO: 369334 - RNA, 22 nt, Human
ccacagagacaggguccuugcu

SEQ ID NO: 369335 - RNA, 22 nt, Human
uaauuucagugcaagcucacgg

SEQ ID NO: 369336 - RNA, 22 nt, Human
acauagcuuaaaugagaagaua

SEQ ID NO: 369337 - RNA, 22 nt, Human
gaggagagagggacugucugca

SEQ ID NO: 369338 - RNA, 17 nt, Human
gcugacccuggagaagu

SEQ ID NO: 369339 - RNA, 22 nt, Human
uguauuuaagcuuuaccuaaaa

SEQ ID NO: 369340 - RNA, 22 nt, Human
agagccaggaaguggcgugggg

SEQ ID NO: 369341 - RNA, 22 nt, Human
gcagagccaggagagacccuug

SEQ ID NO: 369342 - RNA, 22 nt, Human
caguaaauuugagggaucuaau

SEQ ID NO: 369343 - RNA, 22 nt, Human
aaauaauugaguuggucaauau

SEQ ID NO: 369344 - RNA, 22 nt, Human
ugcagccaccaccucugcugaa

SEQ ID NO: 369345 - RNA, 22 nt, Human
uggcugccuagugucugagcag

SEQ ID NO: 369346 - RNA, 22 nt, Human
ucagucuucccuccagugcaac

SEQ ID NO: 369347 - RNA, 22 nt, Human
gggccuggggugacguaccccu

SEQ ID NO: 369348 - RNA, 22 nt, Human
aagcgccaugguuccugcgcag

SEQ ID NO: 369349 - RNA, 22 nt, Human
uuucaaguguccugauuaaugg

SEQ ID NO: 369350 - RNA, 22 nt, Human
cagggccacccucugcugggug

SEQ ID NO: 369351 - RNA, 22 nt, Human
gaggaaaauggaguguaauuaa

SEQ ID NO: 369352 - RNA, 22 nt, Human
cacugcaguuccccagugcgca

SEQ ID NO: 369353 - RNA, 22 nt, Human
uggcucuggcgugaagcccaga

SEQ ID NO: 369354 - RNA, 22 nt, Human
ucaggaucggccuuuuuuuaag

SEQ ID NO: 369355 - RNA, 22 nt, Human
cagggagcuggcuggcgugagu

SEQ ID NO: 369356 - RNA, 22 nt, Human
uugggcugaacccugcagcuga

SEQ ID NO: 369357 - RNA, 22 nt, Human
gccaggcagccacccucugcga

SEQ ID NO: 369358 - RNA, 22 nt, Human
acuuggcaaguaucuauaaagu

SEQ ID NO: 369359 - RNA, 22 nt, Human
ccugagaggcccucucacuguc

SEQ ID NO: 369360 - RNA, 22 nt, Human
gaggcuggcagaaaagcacagg

SEQ ID NO: 369361 - RNA, 22 nt, Human
uagcagcucugauucugggccc

SEQ ID NO: 369362 - RNA, 17 nt, Human
cccagagaugcugccuu

SEQ ID NO: 369363 - RNA, 22 nt, Human
gggcacuggaaggcucucaggc

SEQ ID NO: 369364 - RNA, 22 nt, Human
uccagggcuuggcugggacggu

SEQ ID NO: 369365 - RNA, 22 nt, Human
agcagcaucugguucugaugug

SEQ ID NO: 369366 - RNA, 18 nt, Human
gggcacuggggacuggag

SEQ ID NO: 369367 - RNA, 22 nt, Human
ccagccacagcuuccagcuccu

SEQ ID NO: 369368 - RNA, 22 nt, Human
cuucucucccuggcacucagac

SEQ ID NO: 369369 - RNA, 22 nt, Human
uccugugccuccaccugcuccg

SEQ ID NO: 369370 - RNA, 22 nt, Human
cccuggguucuggcugggcugc

SEQ ID NO: 369371 - RNA, 22 nt, Human
aaaucuaggcucauccuggucc

SEQ ID NO: 369372 - RNA, 22 nt, Human
agccaggcucaaggccugcucc

SEQ ID NO: 369373 - RNA, 22 nt, Human
ccagggcauccucacaucgcag

SEQ ID NO: 369374 - RNA, 22 nt, Human
gcagagcuguuaauggagcuga

SEQ ID NO: 369375 - RNA, 22 nt, Human
gggccuccggggugagcugugg

SEQ ID NO: 369376 - RNA, 22 nt, Human
gccagguggcugagcagcugca

SEQ ID NO: 369377 - RNA, 22 nt, Human
ggacagagcccugguggccuaa

SEQ ID NO: 369378 - RNA, 22 nt, Human
ucuuacauauagcaugaguaca

SEQ ID NO: 369379 - RNA, 22 nt, Human
cagcaucuaaucuucaugccgg

SEQ ID NO: 369380 - RNA, 22 nt, Human
ucagaggaauaaugcugcauuu

SEQ ID NO: 369381 - RNA, 19 nt, Human
gaaaggcugcugcuaccug

SEQ ID NO: 369382 - RNA, 22 nt, Human
cuggggcuggugaggcaggcuc

SEQ ID NO: 369383 - RNA, 22 nt, Human
ucugcucuaguugcuuccugcc

SEQ ID NO: 369384 - RNA, 22 nt, Human
cauggcagaaaccugagcugcu

SEQ ID NO: 369385 - RNA, 21 nt, Human
guggcccugccgcagugucca

SEQ ID NO: 369386 - RNA, 22 nt, Human
aaaacuaaauacgcuuugccuc

SEQ ID NO: 369387 - RNA, 22 nt, Human
ucuggcucuguguccccaccca

SEQ ID NO: 369388 - RNA, 22 nt, Human
agcuguggggcaggcagcgagg

SEQ ID NO: 369389 - RNA, 22 nt, Human
ucucucugccaacucacagcca

SEQ ID NO: 369390 - RNA, 22 nt, Human
auuaaaagcuucccaagaguua

SEQ ID NO: 369391 - RNA, 22 nt, Human
agaccacagucaggcuccuggu

SEQ ID NO: 369392 - RNA, 18 nt, Human
cacaggcucccagugagg

SEQ ID NO: 369393 - RNA, 22 nt, Human
ccaggguguagggauuccagau

SEQ ID NO: 369394 - RNA, 22 nt, Human
gcucccaccaggcagaccuacc

SEQ ID NO: 369395 - RNA, 22 nt, Human
auaugugugccauuucagcagu

SEQ ID NO: 369396 - RNA, 19 nt, Human
agagaaggauccuaugguu

SEQ ID NO: 369397 - RNA, 20 nt, Human
ugaaaaggucaggagacaug

SEQ ID NO: 369398 - RNA, 22 nt, Human
agccaagcaccacuggcacucg

SEQ ID NO: 369399 - RNA, 22 nt, Human
gcagagaggauauuauugucca

SEQ ID NO: 369400 - RNA, 22 nt, Human
ucucagagauuuauggaaaacu

SEQ ID NO: 369401 - RNA, 22 nt, Human
agucauauguggcauuuucuaa

SEQ ID NO: 369402 - RNA, 22 nt, Human
ucucugauguauaucagagaac

SEQ ID NO: 369403 - RNA, 22 nt, Human
uaccugcacagccagccaugug

SEQ ID NO: 369404 - RNA, 21 nt, Human
uggcucaguugcugggcacag

SEQ ID NO: 369405 - RNA, 22 nt, Human
gggcccagcgugguuccaucug

SEQ ID NO: 369406 - RNA, 22 nt, Human
cccaccaguacagaugguagau

SEQ ID NO: 369407 - RNA, 22 nt, Human
gcagaagcugggcagcgaggug

SEQ ID NO: 369408 - RNA, 21 nt, Human
ccuggcuucagggugcacugg

SEQ ID NO: 369409 - RNA, 22 nt, Human
ggcaugggguguauguggcacg

SEQ ID NO: 369410 - RNA, 22 nt, Human
uccaggcaguuuuccagguugu

SEQ ID NO: 369411 - RNA, 22 nt, Human
agugugugcaugcauucgugca

SEQ ID NO: 369412 - RNA, 22 nt, Human
auucagcaaugagcuuggauuu

SEQ ID NO: 369413 - RNA, 22 nt, Human
ccugucugaaggcagggggaug

SEQ ID NO: 369414 - RNA, 22 nt, Human
ccuggagauuucuucaagcuuu

SEQ ID NO: 369415 - RNA, 22 nt, Human
aacaaauguguuuuguaauuaa

SEQ ID NO: 369416 - RNA, 22 nt, Human
ugggccuguugggguugaguua

SEQ ID NO: 369417 - RNA, 22 nt, Human
ccagcuccuucugucuguggag

SEQ ID NO: 369418 - RNA, 22 nt, Human
ucagggacauuuagacacugau

SEQ ID NO: 369419 - RNA, 22 nt, Human
uacuauaccauguaagauauga

SEQ ID NO: 369420 - RNA, 22 nt, Human
uacccagggcuuuucugaugca

SEQ ID NO: 369421 - RNA, 22 nt, Human
caucacagauguuguguggagu

SEQ ID NO: 369422 - RNA, 22 nt, Human
uucuucaugcuguugcugcuug

SEQ ID NO: 369423 - RNA, 22 nt, Human
uuccauaaugagauucccagcc

SEQ ID NO: 369424 - RNA, 22 nt, Human
gcaguggauggccagcaggggc

SEQ ID NO: 369425 - RNA, 22 nt, Human
cuuauaguaugauguugagaau

SEQ ID NO: 369426 - RNA, 22 nt, Human
aauuaacaaauguagcugugau

SEQ ID NO: 369427 - RNA, 22 nt, Human
uaugaagauauaucugaucucu

SEQ ID NO: 369428 - RNA, 22 nt, Human
ggacagaggguugacagaguau

SEQ ID NO: 369429 - RNA, 22 nt, Human
uugaaucucuugaaucucuguu

SEQ ID NO: 369430 - RNA, 21 nt, Human
uccaggaguggcugggcaggg

SEQ ID NO: 369431 - RNA, 22 nt, Human
uuuucauugagcaccugaguaa

SEQ ID NO: 369432 - RNA, 22 nt, Human
aggcuuuaauuaucuacaggag

SEQ ID NO: 369433 - RNA, 22 nt, Human
uuucaguuuccagcuuugucau

SEQ ID NO: 369434 - RNA, 22 nt, Human
aggcacugagaggcuguguugc

SEQ ID NO: 369435 - RNA, 22 nt, Human
cccaggagaugcacuccauugg

SEQ ID NO: 369436 - RNA, 20 nt, Human
uccucagaagacauuugggg

SEQ ID NO: 369437 - RNA, 22 nt, Human
uaaggcagaaauaugagcaggg

SEQ ID NO: 369438 - RNA, 18 nt, Human
aggcccuggccucgaaca

SEQ ID NO: 369439 - RNA, 22 nt, Human
aacaugcuuugauaaauaaaag

SEQ ID NO: 369440 - RNA, 22 nt, Human
cagcuuugcaggcuggucagug

SEQ ID NO: 369441 - RNA, 17 nt, Human
gcgcagcuccuggcgcg

SEQ ID NO: 369442 - RNA, 22 nt, Human
gccugccuuugugaggaagcgg

SEQ ID NO: 369443 - RNA, 22 nt, Human
ccagggugagaaaaggcuggau

SEQ ID NO: 369444 - RNA, 19 nt, Human
agacagagacugaaauaga

SEQ ID NO: 369445 - RNA, 22 nt, Human
gucacuguuuccuauuauauuu

SEQ ID NO: 369446 - RNA, 22 nt, Human
auuaauuuuaccuuuguaaaca

SEQ ID NO: 369447 - RNA, 22 nt, Human
aggcuccuugcucacaggcuca

SEQ ID NO: 369448 - RNA, 22 nt, Human
aggcacuguacuagguacaggg

SEQ ID NO: 369449 - RNA, 22 nt, Human
uugccuugauucuucucaugug

SEQ ID NO: 369450 - RNA, 22 nt, Human
guugaaagagcauggacuugaa

SEQ ID NO: 369451 - RNA, 22 nt, Human
gaggcugcugagagcccuguuu

SEQ ID NO: 369452 - RNA, 22 nt, Human
gucccagaugucuggaacuccc

SEQ ID NO: 369453 - RNA, 22 nt, Human
caguccuugcucugggaugaug

SEQ ID NO: 369454 - RNA, 22 nt, Human
cugggcacacagugacucugca

SEQ ID NO: 369455 - RNA, 22 nt, Human
acaagagacaagagguucuucu

SEQ ID NO: 369456 - RNA, 22 nt, Human
agccaggcggggcagguuuccu

SEQ ID NO: 369457 - RNA, 22 nt, Human
ccucacagggccaggccccuca

SEQ ID NO: 369458 - RNA, 19 nt, Human
gcucagagggcccugugcu

SEQ ID NO: 369459 - RNA, 21 nt, Human
agaggcaggcauuaaguacac

SEQ ID NO: 369460 - RNA, 22 nt, Human
caguagcaggcacucagcacgu

SEQ ID NO: 369461 - RNA, 22 nt, Human
uacauacacaaauauacuguuu

SEQ ID NO: 369462 - RNA, 22 nt, Human
gcaguucuacuuauccauagac

SEQ ID NO: 369463 - RNA, 22 nt, Human
uggcucagcuuacuuuugaggg

SEQ ID NO: 369464 - RNA, 22 nt, Human
ccaaggcaggggaucaaaguuu

SEQ ID NO: 369465 - RNA, 22 nt, Human
guaaaguucuauuugaauuuag

SEQ ID NO: 369466 - RNA, 22 nt, Human
uuuagaguugaguauucauugg

SEQ ID NO: 369467 - RNA, 22 nt, Human
aagccacuauggugauucucaa

SEQ ID NO: 369468 - RNA, 22 nt, Human
cagagcagggguuucccagguu

SEQ ID NO: 369469 - RNA, 22 nt, Human
gcaccuggacagugacccuagc

SEQ ID NO: 369470 - RNA, 22 nt, Human
gggugggccacugagcagcgug

SEQ ID NO: 369471 - RNA, 19 nt, Human
cuuuucaucaacagccaau

SEQ ID NO: 369472 - RNA, 22 nt, Human
gaucauuuugaugcccuuuuag

SEQ ID NO: 369473 - RNA, 22 nt, Human
gauccuugcaacucugugaggu

SEQ ID NO: 369474 - RNA, 22 nt, Human
cugccuugaggagguuguggga

SEQ ID NO: 369475 - RNA, 22 nt, Human
auagaauagcauagaaaauuga

SEQ ID NO: 369476 - RNA, 22 nt, Human
cuguccuguggaccugaggacg

SEQ ID NO: 369477 - RNA, 22 nt, Human
uuauuaggaaaaggucagaugu

SEQ ID NO: 369478 - RNA, 22 nt, Human
uggacagguugaguaggaggag

SEQ ID NO: 369479 - RNA, 22 nt, Human
ggugaggcagguggcugcugag

SEQ ID NO: 369480 - RNA, 20 nt, Human
auuuggcaugaaguauugau

SEQ ID NO: 369481 - RNA, 22 nt, Human
gcugccuguguggccacucacu

SEQ ID NO: 369482 - RNA, 22 nt, Human
ugaguagcggcuauguguaacu

SEQ ID NO: 369483 - RNA, 20 nt, Human
ccagacagcaccugccuggu

SEQ ID NO: 369484 - RNA, 22 nt, Human
agaaaaggcuugaagagguuuu

SEQ ID NO: 369485 - RNA, 22 nt, Human
cucagaagaacaaaggcucuac

SEQ ID NO: 369486 - RNA, 22 nt, Human
uggccucugugggagcugagca

SEQ ID NO: 369487 - RNA, 18 nt, Human
acauacauucugucugca

SEQ ID NO: 369488 - RNA, 22 nt, Human
aaucacaauuacuuuugcacca

SEQ ID NO: 369489 - RNA, 20 nt, Human
cugaacacagaauaagcaca

SEQ ID NO: 369490 - RNA, 22 nt, Human
uccugggccuguacuccauccg

SEQ ID NO: 369491 - RNA, 18 nt, Human
gagaggagccagaauuuu

SEQ ID NO: 369492 - RNA, 22 nt, Human
agauggggcagaauggagccau

SEQ ID NO: 369493 - RNA, 21 nt, Human
auucagaguaauucaucuuua

SEQ ID NO: 369494 - RNA, 19 nt, Human
uccauaaugaagauagagg

SEQ ID NO: 369495 - RNA, 22 nt, Human
agcaguggcuggauggugugcu

SEQ ID NO: 369496 - RNA, 15 nt, Human
aaucuggcggcaagu

SEQ ID NO: 369497 - RNA, 22 nt, Human
acaguacauaauccugagucug

SEQ ID NO: 369498 - RNA, 22 nt, Human
gcucaagagagaugcaguucuu

SEQ ID NO: 369499 - RNA, 22 nt, Human
gcccucagcuccuggacacaug

SEQ ID NO: 369500 - RNA, 22 nt, Human
aaggcagcaugaaucccuguac

SEQ ID NO: 369501 - RNA, 22 nt, Human
ucugagaggauuccugucccga

SEQ ID NO: 369502 - RNA, 22 nt, Human
cucagagcaaugaacaugcaaa

SEQ ID NO: 369503 - RNA, 22 nt, Human
agggaagaaaauccaucgcugc

SEQ ID NO: 369504 - RNA, 22 nt, Human
agcagcaggagccgugggguga

SEQ ID NO: 369505 - RNA, 22 nt, Human
cagaggcauauaauugcugggg

SEQ ID NO: 369506 - RNA, 21 nt, Human
gcagaugggagucaucaggcu

SEQ ID NO: 369507 - RNA, 22 nt, Human
ucuucacaccgggcagcaggaa

SEQ ID NO: 369508 - RNA, 22 nt, Human
uaagaaguacaaaaauuuucug

SEQ ID NO: 369509 - RNA, 22 nt, Human
cuucugggcauucagcugcaca

SEQ ID NO: 369510 - RNA, 22 nt, Human
agagugucugguagcugcucug

SEQ ID NO: 369511 - RNA, 19 nt, Human
uucauucuuucuacuuacc

SEQ ID NO: 369512 - RNA, 23 nt, Human
ucacagggcacuggcugggguug

SEQ ID NO: 369513 - RNA, 22 nt, Human
cuggggugucucgucugccauu

SEQ ID NO: 369514 - RNA, 22 nt, Human
cccuuccuugugacuggugggg

SEQ ID NO: 369515 - RNA, 22 nt, Human
cugacuguaauucuguucuuaa

SEQ ID NO: 369516 - RNA, 17 nt, Human
cugcuuugugcaacgcu

SEQ ID NO: 369517 - RNA, 22 nt, Human
cagaggauucccuagugaccug

SEQ ID NO: 369518 - RNA, 22 nt, Human
cacacaugucucuccaugcucu

SEQ ID NO: 369519 - RNA, 22 nt, Human
cauccacuagaaugacagaguu

SEQ ID NO: 369520 - RNA, 22 nt, Human
ucacuguauuugcugaugcaua

SEQ ID NO: 369521 - RNA, 22 nt, Human
gauggcagguaguggucucauc

SEQ ID NO: 369522 - RNA, 22 nt, Human
cugagcugcggcaggcaccugg

SEQ ID NO: 369523 - RNA, 22 nt, Human
gagaggugaaggcugcccuggg

SEQ ID NO: 369524 - RNA, 20 nt, Human
uucacagaggacucagguca

SEQ ID NO: 369525 - RNA, 22 nt, Human
gcagcaaucuucacagugucau

SEQ ID NO: 369526 - RNA, 22 nt, Human
agggcagccaugagccuucagg

SEQ ID NO: 369527 - RNA, 22 nt, Human
uaagaacagugucugucucaca

SEQ ID NO: 369528 - RNA, 22 nt, Human
ccugaagggacuccagagagca

SEQ ID NO: 369529 - RNA, 22 nt, Human
uguggcucucaugcacucccag

SEQ ID NO: 369530 - RNA, 22 nt, Human
cugucaccuguucacugcagca

SEQ ID NO: 369531 - RNA, 22 nt, Human
gcagagaguugggcugcgccag

SEQ ID NO: 369532 - RNA, 22 nt, Human
acaggcucuggggcaggauggc

SEQ ID NO: 369533 - RNA, 22 nt, Human
agcuucuugggcuuuacacaaa

SEQ ID NO: 369534 - RNA, 22 nt, Human
gcagcuuuaaucugaauaagua

SEQ ID NO: 369535 - RNA, 22 nt, Human
ugcucuucggggccacugcuug

SEQ ID NO: 369536 - RNA, 22 nt, Human
cccaggagguggagguugcagc

SEQ ID NO: 369537 - RNA, 22 nt, Human
uacaggaggauuaucaaaggau

SEQ ID NO: 369538 - RNA, 22 nt, Human
acaacuuuguagcaauuccacg

SEQ ID NO: 369539 - RNA, 22 nt, Human
ucuguucauacagaguauagua

SEQ ID NO: 369540 - RNA, 16 nt, Human
gcacacacaucaauga

SEQ ID NO: 369541 - RNA, 22 nt, Human
gggcugugcugaguaggaggug

SEQ ID NO: 369542 - RNA, 22 nt, Human
augggagugacagggccacugg

SEQ ID NO: 369543 - RNA, 22 nt, Human
aagggcugggucugguuaaccc

SEQ ID NO: 369544 - RNA, 22 nt, Human
acagcaagccagcuugucacug

SEQ ID NO: 369545 - RNA, 22 nt, Human
uuuugaauaauucagaaacagc

SEQ ID NO: 369546 - RNA, 22 nt, Human
cugccucuggccucaggcccag

SEQ ID NO: 369547 - RNA, 22 nt, Human
uggcucuguuuguuaacuagac

SEQ ID NO: 369548 - RNA, 23 nt, Human
ugguucuaggccuauaauuauau

SEQ ID NO: 369549 - RNA, 22 nt, Human
caagaacaguuugccaaauugg

SEQ ID NO: 369550 - RNA, 22 nt, Human
uucagagacagcaaccaggaca

SEQ ID NO: 369551 - RNA, 22 nt, Human
aggcucugaucagguggcugug

SEQ ID NO: 369552 - RNA, 22 nt, Human
ggagaccagaaggaagcuucga

SEQ ID NO: 369553 - RNA, 22 nt, Human
ugaccugcguaggugguuucug

SEQ ID NO: 369554 - RNA, 22 nt, Human
caggagagauaugaguccccac

SEQ ID NO: 369555 - RNA, 22 nt, Human
aggcaggugcuuaugacuugcu

SEQ ID NO: 369556 - RNA, 22 nt, Human
uaucuugagagacaacacagca

SEQ ID NO: 369557 - RNA, 22 nt, Human
uaacagaaguuguucauugugg

SEQ ID NO: 369558 - RNA, 22 nt, Human
ggcucaggccuguaauccuagc

SEQ ID NO: 369559 - RNA, 22 nt, Human
gagguagccacagauagagacu

SEQ ID NO: 369560 - RNA, 22 nt, Human
uuacagaaaauguguuuuaacu

SEQ ID NO: 369561 - RNA, 21 nt, Human
ucagaacaauuccaugccucc

SEQ ID NO: 369562 - RNA, 22 nt, Human
ucagggacuuacaaaccagaag

SEQ ID NO: 369563 - RNA, 22 nt, Human
uggcucugucaaacugcacaca

SEQ ID NO: 369564 - RNA, 22 nt, Human
auuaauuuuucugacagccaca

SEQ ID NO: 369565 - RNA, 22 nt, Human
gccaggcugacucccccggccu

SEQ ID NO: 369566 - RNA, 22 nt, Human
cugcugugcaacauugcaccua

SEQ ID NO: 369567 - RNA, 19 nt, Human
uguuuuguuaaagcagucc

SEQ ID NO: 369568 - RNA, 22 nt, Human
cccagcagggucucugugucua

SEQ ID NO: 369569 - RNA, 22 nt, Human
cuucaagaagacagcagagcau

SEQ ID NO: 369570 - RNA, 20 nt, Human
ugugcaggagagugaggcug

SEQ ID NO: 369571 - RNA, 22 nt, Human
uuucucaguuacuagcuguggu

SEQ ID NO: 369572 - RNA, 22 nt, Human
guuucauuuacaucuguaggua

SEQ ID NO: 369573 - RNA, 22 nt, Human
ggaggacaggggcugcagcaca

SEQ ID NO: 369574 - RNA, 22 nt, Human
gaggcugaauggccagaagcca

SEQ ID NO: 369575 - RNA, 22 nt, Human
cacaucagggcugcuugggggu

SEQ ID NO: 369576 - RNA, 22 nt, Human
ugcagggcagcuagggagcuuu

SEQ ID NO: 369577 - RNA, 22 nt, Human
gcugucacaaauauuucucagc

SEQ ID NO: 369578 - RNA, 22 nt, Human
uguccauggauagagcugcucg

SEQ ID NO: 369579 - RNA, 20 nt, Human
cccaggagcugugccccauc

SEQ ID NO: 369580 - RNA, 22 nt, Human
cugagauggaguuuugcucuug

SEQ ID NO: 369581 - RNA, 22 nt, Human
gagccuucaucgcagccuuguu

SEQ ID NO: 369582 - RNA, 22 nt, Human
uucaaacaaaacuguucccaua

SEQ ID NO: 369583 - RNA, 22 nt, Human
gacagggcgcccagccuguuuc

SEQ ID NO: 369584 - RNA, 22 nt, Human
ccacagggucagccacucugca

SEQ ID NO: 369585 - RNA, 22 nt, Human
ucacaggagggagagacaccca

SEQ ID NO: 369586 - RNA, 22 nt, Human
auaauucaugggccuuucaccu

SEQ ID NO: 369587 - RNA, 22 nt, Human
aggacccagaggcagaggacgu

SEQ ID NO: 369588 - RNA, 22 nt, Human
cuuugaauuccaguacaauaac

SEQ ID NO: 369589 - RNA, 22 nt, Human
ggcuccagggaguggagagaag

SEQ ID NO: 369590 - RNA, 23 nt, Human
augcaguauaugucaguaguuua

SEQ ID NO: 369591 - RNA, 22 nt, Human
aucuucucaagcagcauccugu

SEQ ID NO: 369592 - RNA, 22 nt, Human
aaaugcagauuuugaugcagca

SEQ ID NO: 369593 - RNA, 22 nt, Human
uggaggaaucagggcuuaggcu

SEQ ID NO: 369594 - RNA, 22 nt, Human
ucauacauaacuuguacaguga

SEQ ID NO: 369595 - RNA, 22 nt, Human
uuggcagugaugcagcuuguuc

SEQ ID NO: 369596 - RNA, 22 nt, Human
gggagaaggaggacugugcugu

SEQ ID NO: 369597 - RNA, 22 nt, Human
cagggcugaagaaauucaaaag

SEQ ID NO: 369598 - RNA, 22 nt, Human
uaaaucuccuguuuuucaucua

SEQ ID NO: 369599 - RNA, 22 nt, Human
cggcagagugugugcgugcaug

SEQ ID NO: 369600 - RNA, 22 nt, Human
aaaugguauuuacucuguauua

SEQ ID NO: 369601 - RNA, 17 nt, Human
cccugccaccaggaagc

SEQ ID NO: 369602 - RNA, 22 nt, Human
cagcaaaauuugaggauugccu

SEQ ID NO: 369603 - RNA, 20 nt, Human
ggcugcugugggcagagagg

SEQ ID NO: 369604 - RNA, 22 nt, Human
cugggagucaccaggagcaagg

SEQ ID NO: 369605 - RNA, 22 nt, Human
auugaaaggcaaaguaggaagc

SEQ ID NO: 369606 - RNA, 22 nt, Human
agugcagugguuaggagccagg

SEQ ID NO: 369607 - RNA, 22 nt, Human
aggaggccgcugaugggcuccc

SEQ ID NO: 369608 - RNA, 22 nt, Human
agaaaucugacugcugugcaca

SEQ ID NO: 369609 - RNA, 22 nt, Human
uuucaaacauaucuucauuacu

SEQ ID NO: 369610 - RNA, 22 nt, Human
uucuacaugguugcucagaggg

SEQ ID NO: 369611 - RNA, 22 nt, Human
uucauucccaagaguaaacaua

SEQ ID NO: 369612 - RNA, 22 nt, Human
uaagaauuguguugaauagagu

SEQ ID NO: 369613 - RNA, 22 nt, Human
cugucugucaaguucaucucca

SEQ ID NO: 369614 - RNA, 22 nt, Human
augguuuaaagaguaugacuuu

SEQ ID NO: 369615 - RNA, 22 nt, Human
agcagccagagucugaacauua

SEQ ID NO: 369616 - RNA, 22 nt, Human
aagcuguucucuaaguuucaug

SEQ ID NO: 369617 - RNA, 22 nt, Human
gcuuuaaugaagucacgcaaag

SEQ ID NO: 369618 - RNA, 19 nt, Human
gugcuuuuuaagagcucag

SEQ ID NO: 369619 - RNA, 22 nt, Human
caaauagugucacauugugagg

SEQ ID NO: 369620 - RNA, 22 nt, Human
aaaguuuuagaacuaggaagca

SEQ ID NO: 369621 - RNA, 22 nt, Human
ugucccaggccucauguugcca

SEQ ID NO: 369622 - RNA, 22 nt, Human
agcagcucuguuuaccuggagg

SEQ ID NO: 369623 - RNA, 22 nt, Human
gugcaugugucuuuauaguagc

SEQ ID NO: 369624 - RNA, 17 nt, Human
gccucugcuugugucau

SEQ ID NO: 369625 - RNA, 22 nt, Human
gggcagagguucaacuucaaca

SEQ ID NO: 369626 - RNA, 22 nt, Human
aaugaacagauacacauaggca

SEQ ID NO: 369627 - RNA, 22 nt, Human
gggagccuugggagugccagcc

SEQ ID NO: 369628 - RNA, 22 nt, Human
gcugagaggcacuaucuccgga

SEQ ID NO: 369629 - RNA, 22 nt, Human
guccucugggcagcugccccac

SEQ ID NO: 369630 - RNA, 22 nt, Human
ggcagcuuuuaucccugacaga

SEQ ID NO: 369631 - RNA, 22 nt, Human
agggaaggaaaagcugucgcuu

SEQ ID NO: 369632 - RNA, 22 nt, Human
ugggguggauagaaagugaugu

SEQ ID NO: 369633 - RNA, 20 nt, Human
aaaggaauauaugaaguaua

SEQ ID NO: 369634 - RNA, 22 nt, Human
agccuucauaaucuugggcuuu

SEQ ID NO: 369635 - RNA, 22 nt, Human
caggcagaaauuuuguuucauu

SEQ ID NO: 369636 - RNA, 22 nt, Human
ucuaugaaaagucuauucauuc

SEQ ID NO: 369637 - RNA, 22 nt, Human
guuagggagucagguggcucuu

SEQ ID NO: 369638 - RNA, 22 nt, Human
ucagagaguuagugucuuagcu

SEQ ID NO: 369639 - RNA, 22 nt, Human
ccucuggggugagugggccacu

SEQ ID NO: 369640 - RNA, 22 nt, Human
ugaggcagggagaguggauaug

SEQ ID NO: 369641 - RNA, 22 nt, Human
uuucuagaggcuccaggggagu

SEQ ID NO: 369642 - RNA, 22 nt, Human
ccagcagaggggcggagugcag

SEQ ID NO: 369643 - RNA, 22 nt, Human
aggccagcccugggcugagaga

SEQ ID NO: 369644 - RNA, 22 nt, Human
uuucauggcuaggacuagagug

SEQ ID NO: 369645 - RNA, 22 nt, Human
cuucuucagcacaauauugaug

SEQ ID NO: 369646 - RNA, 22 nt, Human
aauuuuaagcauaugacugguu

SEQ ID NO: 369647 - RNA, 22 nt, Human
ugggcuggcguggagaguuuag

SEQ ID NO: 369648 - RNA, 22 nt, Human
aggaccuggaucacagagaucu

SEQ ID NO: 369649 - RNA, 22 nt, Human
ccuggaucuuucugacugacaa

SEQ ID NO: 369650 - RNA, 22 nt, Human
gcagcuggagccagccagacac

SEQ ID NO: 369651 - RNA, 21 nt, Human
acagagcauaaugguguggca

SEQ ID NO: 369652 - RNA, 22 nt, Human
ggccugcucugcagccucuaca

SEQ ID NO: 369653 - RNA, 22 nt, Human
aucuacagcugucugcacagua

SEQ ID NO: 369654 - RNA, 22 nt, Human
auagaaauguauuuuggacuag

SEQ ID NO: 369655 - RNA, 22 nt, Human
gacauaauaaucugaccuagau

SEQ ID NO: 369656 - RNA, 22 nt, Human
ccaggcagggcucaaggaaccu

SEQ ID NO: 369657 - RNA, 22 nt, Human
aaguuuuaacaaguacuuacua

SEQ ID NO: 369658 - RNA, 22 nt, Human
gaagagcugacagugucauccu

SEQ ID NO: 369659 - RNA, 22 nt, Human
aggaagcuccaugaaggcagag

SEQ ID NO: 369660 - RNA, 22 nt, Human
uggggcuccuccuggcaggagg

SEQ ID NO: 369661 - RNA, 22 nt, Human
ggagcuggcuacagagaacucc

SEQ ID NO: 369662 - RNA, 22 nt, Human
gucuaacaagcauuaggaaccc

SEQ ID NO: 369663 - RNA, 22 nt, Human
aggcagaauguuggaaaggaag

SEQ ID NO: 369664 - RNA, 22 nt, Human
uagauuuaagacccugaauuug

SEQ ID NO: 369665 - RNA, 22 nt, Human
ccagcuggaagagugcagaacu

SEQ ID NO: 369666 - RNA, 22 nt, Human
agaggggaaggaugugauguga

SEQ ID NO: 369667 - RNA, 22 nt, Human
agcugcccugggcuggagaugg

SEQ ID NO: 369668 - RNA, 22 nt, Human
cuugaaagcuuugcgucuucua

SEQ ID NO: 369669 - RNA, 22 nt, Human
ucagagagccucaggcacugcc

SEQ ID NO: 369670 - RNA, 22 nt, Human
ucaggggacagccagcuggagg

SEQ ID NO: 369671 - RNA, 22 nt, Human
guuuauuagaguuuucugucug

SEQ ID NO: 369672 - RNA, 22 nt, Human
gccacagggcagaugcgcagag

SEQ ID NO: 369673 - RNA, 22 nt, Human
gucaggauuuuaaaaucccagu

SEQ ID NO: 369674 - RNA, 22 nt, Human
guucuccauucagcuuccugug

SEQ ID NO: 369675 - RNA, 19 nt, Human
agaaguuagacauugcaau

SEQ ID NO: 369676 - RNA, 22 nt, Human
uggaaagagguagaggaucugg

SEQ ID NO: 369677 - RNA, 22 nt, Human
cagcccuggaacagcugacuca

SEQ ID NO: 369678 - RNA, 22 nt, Human
cucuggagguggagguugcagu

SEQ ID NO: 369679 - RNA, 22 nt, Human
aagggcuggcccugggaagagu

SEQ ID NO: 369680 - RNA, 22 nt, Human
gccuggagcagacgugucccgg

SEQ ID NO: 369681 - RNA, 20 nt, Human
gucagugucuucaguaguga

SEQ ID NO: 369682 - RNA, 22 nt, Human
cuggcuuuaacccuacaaaccu

SEQ ID NO: 369683 - RNA, 22 nt, Human
agugcaugccuuccuguggaug

SEQ ID NO: 369684 - RNA, 22 nt, Human
acaguggaggccauaugguccu

SEQ ID NO: 369685 - RNA, 22 nt, Human
ggagcuguucaggacugcuuca

SEQ ID NO: 369686 - RNA, 22 nt, Human
uuauguauggauggcugaaagu

SEQ ID NO: 369687 - RNA, 22 nt, Human
ugucagcagcugguuugcuguu

SEQ ID NO: 369688 - RNA, 22 nt, Human
cugagaggugacagcgugcugg

SEQ ID NO: 369689 - RNA, 22 nt, Human
cuuaggcaagcagagcccaucc

SEQ ID NO: 369690 - RNA, 17 nt, Human
cucugcagugcauggcu

SEQ ID NO: 369691 - RNA, 22 nt, Human
aggggcucaguuacuuuggcag

SEQ ID NO: 369692 - RNA, 22 nt, Human
gaaaagggcaagagagagggca

SEQ ID NO: 369693 - RNA, 22 nt, Human
cuggcaggcagacuucugcaag

SEQ ID NO: 369694 - RNA, 22 nt, Human
uauuugcaaagaacuacacuag

SEQ ID NO: 369695 - RNA, 22 nt, Human
cagagcagaaaccugggugauu

SEQ ID NO: 369696 - RNA, 19 nt, Human
ugccuggcaccagcuccac

SEQ ID NO: 369697 - RNA, 22 nt, Human
agguggagaagagaugggcagu

SEQ ID NO: 369698 - RNA, 22 nt, Human
cagagaccccgcugcccuucug

SEQ ID NO: 369699 - RNA, 22 nt, Human
cacaggagugcugcuauuguug

SEQ ID NO: 369700 - RNA, 22 nt, Human
cauggaaggcaaaagacacaga

SEQ ID NO: 369701 - RNA, 18 nt, Human
aagucaccccugcucccu

SEQ ID NO: 369702 - RNA, 22 nt, Human
auuucacaaaccauccugauuu

SEQ ID NO: 369703 - RNA, 22 nt, Human
caggacaguuugcuuugcccug

SEQ ID NO: 369704 - RNA, 22 nt, Human
gcuggagcugcagccugggccu

SEQ ID NO: 369705 - RNA, 22 nt, Human
agugguaacuaaguccugcuua

SEQ ID NO: 369706 - RNA, 22 nt, Human
cugagagugcucuuugauguca

SEQ ID NO: 369707 - RNA, 22 nt, Human
cccuggaguccggagcucaccu

SEQ ID NO: 369708 - RNA, 22 nt, Human
uucuuacagaguuuacagagcc

SEQ ID NO: 369709 - RNA, 21 nt, Human
aaagagguuaauauuguaagu

SEQ ID NO: 369710 - RNA, 22 nt, Human
gggagaaguggaaaucucauua

SEQ ID NO: 369711 - RNA, 22 nt, Human
caagaugugccuaaucagaccu

SEQ ID NO: 369712 - RNA, 22 nt, Human
ugaguucuaguggcugcagauu

SEQ ID NO: 369713 - RNA, 22 nt, Human
gccuggugguauccuggcaaga

SEQ ID NO: 369714 - RNA, 22 nt, Human
cugcucugcagcuuggacuccc

SEQ ID NO: 369715 - RNA, 22 nt, Human
caggacagguguucuagaucag

SEQ ID NO: 369716 - RNA, 22 nt, Human
ggccacuccgcugcuacuggaa

SEQ ID NO: 369717 - RNA, 21 nt, Human
agcagaacagucgagcacugc

SEQ ID NO: 369718 - RNA, 22 nt, Human
ggagagcagggaggcugcucug

SEQ ID NO: 369719 - RNA, 22 nt, Human
aaagccuugggauuugugauca

SEQ ID NO: 369720 - RNA, 22 nt, Human
gccuggagggcucuagagaggc

SEQ ID NO: 369721 - RNA, 22 nt, Human
cagggcucccugcagccucugu

SEQ ID NO: 369722 - RNA, 22 nt, Human
aucaguuuauacuuauaaaucu

SEQ ID NO: 369723 - RNA, 22 nt, Human
aagccaguguccagaaugggca

SEQ ID NO: 369724 - RNA, 22 nt, Human
agggucuguggaugcaucuggg

SEQ ID NO: 369725 - RNA, 22 nt, Human
ucaggcagagcuguggagcucu

SEQ ID NO: 369726 - RNA, 22 nt, Human
ugcagggcaguggagguugagu

SEQ ID NO: 369727 - RNA, 22 nt, Human
acugggaguucuccaugucccu

SEQ ID NO: 369728 - RNA, 22 nt, Human
gggggacuaacuggauccugga

SEQ ID NO: 369729 - RNA, 22 nt, Human
ugucucagaggcaggaagagcc

SEQ ID NO: 369730 - RNA, 22 nt, Human
uugaagaaagucauauauaaug

SEQ ID NO: 369731 - RNA, 22 nt, Human
ccagccaggcuggcuguggagg

SEQ ID NO: 369732 - RNA, 22 nt, Human
cccucugaccuccugccacagu

SEQ ID NO: 369733 - RNA, 19 nt, Human
auuuccaagaauuggagag

SEQ ID NO: 369734 - RNA, 19 nt, Human
agaggcugucaccuguagc

SEQ ID NO: 369735 - RNA, 22 nt, Human
cugggaggcagucucucuagaa

SEQ ID NO: 369736 - RNA, 22 nt, Human
uuguucaugguuguaaguuuga

SEQ ID NO: 369737 - RNA, 22 nt, Human
agucucagcuacuugggaggcu

SEQ ID NO: 369738 - RNA, 22 nt, Human
aucauucugauggucaaugcua

SEQ ID NO: 369739 - RNA, 20 nt, Human
augccucuaauuuugcaaac

SEQ ID NO: 369740 - RNA, 22 nt, Human
cagggcugguuugucgaagaaa

SEQ ID NO: 369741 - RNA, 22 nt, Human
ucaagagacaggacguguuuca

SEQ ID NO: 369742 - RNA, 22 nt, Human
ucuuagaaguucauguuccagc

SEQ ID NO: 369743 - RNA, 23 nt, Human
aggcuuccuaucuuagagcuggg

SEQ ID NO: 369744 - RNA, 22 nt, Human
agugugcugcuuaaacaguugu

SEQ ID NO: 369745 - RNA, 22 nt, Human
gaggcucagggaguauaugaau

SEQ ID NO: 369746 - RNA, 22 nt, Human
cugcugagcaucagggcugccc

SEQ ID NO: 369747 - RNA, 22 nt, Human
cugcagggagaggggacagccu

SEQ ID NO: 369748 - RNA, 22 nt, Human
uaugcacaauaugaucuauuug

SEQ ID NO: 369749 - RNA, 23 nt, Human
agcuggguggccugcgugaagcu

SEQ ID NO: 369750 - RNA, 22 nt, Human
gcucccugcacucugcagcccu

SEQ ID NO: 369751 - RNA, 18 nt, Human
gccugcaggcacgggggu

SEQ ID NO: 369752 - RNA, 22 nt, Human
ggcaggagcucuccaguuugcc

SEQ ID NO: 369753 - RNA, 22 nt, Human
ugacauuuaucuucuacaauga

SEQ ID NO: 369754 - RNA, 23 nt, Human
acuuuagauaaauuaugugcaca

SEQ ID NO: 369755 - RNA, 22 nt, Human
gcuguucauuagaaauagaaug

SEQ ID NO: 369756 - RNA, 22 nt, Human
ucuguucauuugccucggcucu

SEQ ID NO: 369757 - RNA, 22 nt, Human
gccucccugagucacccaagca

SEQ ID NO: 369758 - RNA, 22 nt, Human
gaggaggcuggcgccgccugcc

SEQ ID NO: 369759 - RNA, 22 nt, Human
uuuucauuguaaaucaggaaac

SEQ ID NO: 369760 - RNA, 22 nt, Human
ucaccaggcaacuauguacucc

SEQ ID NO: 369761 - RNA, 22 nt, Human
ggccugagcucuggggaggcaa

SEQ ID NO: 369762 - RNA, 22 nt, Human
cagaccucaguccucaguagga

SEQ ID NO: 369763 - RNA, 22 nt, Human
gggcuggcucccagguguugaa

SEQ ID NO: 369764 - RNA, 22 nt, Human
agcaggaaggucugugugaguc

SEQ ID NO: 369765 - RNA, 22 nt, Human
ccugucacgaugacugcacucu

SEQ ID NO: 369766 - RNA, 22 nt, Human
gcagacaauuuauuagcagauu

SEQ ID NO: 369767 - RNA, 22 nt, Human
uuuuccuuucaucaggacaaag

SEQ ID NO: 369768 - RNA, 22 nt, Human
ugaaauagaaaaacaggcuucu

SEQ ID NO: 369769 - RNA, 22 nt, Human
cugaaggagaaggccacuguuc

SEQ ID NO: 369770 - RNA, 22 nt, Human
cagugcagaggugcaagcaugu

SEQ ID NO: 369771 - RNA, 22 nt, Human
cugccaggggccucacaggcca

SEQ ID NO: 369772 - RNA, 22 nt, Human
caguaaauacauaucagagaag

SEQ ID NO: 369773 - RNA, 22 nt, Human
gcucacugccauucucuagaug

SEQ ID NO: 369774 - RNA, 22 nt, Human
uguacaauguggccaguguuaa

SEQ ID NO: 369775 - RNA, 22 nt, Human
ucuuugaaagcuguucuagagu

SEQ ID NO: 369776 - RNA, 22 nt, Human
cagguggcuucucccuaggcca

SEQ ID NO: 369777 - RNA, 20 nt, Human
aggcugggguguuuugccca

SEQ ID NO: 369778 - RNA, 22 nt, Human
agugucugccagcugccaggug

SEQ ID NO: 369779 - RNA, 22 nt, Human
ccagcugauucgguggugguug

SEQ ID NO: 369780 - RNA, 22 nt, Human
gcugcugcgcuugucuacuguu

SEQ ID NO: 369781 - RNA, 22 nt, Human
uuguuuguaugcugagaagaau

SEQ ID NO: 369782 - RNA, 22 nt, Human
ggcucuggagacauguggagag

SEQ ID NO: 369783 - RNA, 22 nt, Human
gagaggcauggaacagauucuu

SEQ ID NO: 369784 - RNA, 22 nt, Human
acaggagaaaucuggucaaaag

SEQ ID NO: 369785 - RNA, 22 nt, Human
augaccccuaaaauuuacuguc

SEQ ID NO: 369786 - RNA, 22 nt, Human
auagaauuugcacuaaaucugc

SEQ ID NO: 369787 - RNA, 22 nt, Human
gccuggcacauugcaguggauu

SEQ ID NO: 369788 - RNA, 22 nt, Human
aaauucuaugucaauguuuauu

SEQ ID NO: 369789 - RNA, 22 nt, Human
ugcaggcuguaaucugaggcua

SEQ ID NO: 369790 - RNA, 22 nt, Human
uccaggagauucauuaggucau

SEQ ID NO: 369791 - RNA, 22 nt, Human
acaucuguuugagaaaaagaag

SEQ ID NO: 369792 - RNA, 22 nt, Human
auuauuaggacuacugggguug

SEQ ID NO: 369793 - RNA, 22 nt, Human
cuugcaggccuuucuagcucua

SEQ ID NO: 369794 - RNA, 22 nt, Human
gauuuucugagccuucaaauuu

SEQ ID NO: 369795 - RNA, 22 nt, Human
uucaugugaauauauuugucuu

SEQ ID NO: 369796 - RNA, 22 nt, Human
cuucccagacgggguggcagcc

SEQ ID NO: 369797 - RNA, 22 nt, Human
acacaggaagucagcacugaug

SEQ ID NO: 369798 - RNA, 22 nt, Human
caauuuuuuccaugcucuuaca

SEQ ID NO: 369799 - RNA, 22 nt, Human
aguaacuaugcuugagaaucag

SEQ ID NO: 369800 - RNA, 22 nt, Human
uuuucaagggcagggaaaucau

SEQ ID NO: 369801 - RNA, 22 nt, Human
caguguuugcuuaaguuauaug

SEQ ID NO: 369802 - RNA, 22 nt, Human
gucagcaggguccccuugagug

SEQ ID NO: 369803 - RNA, 22 nt, Human
gcagggcaaugaucccgagagg

SEQ ID NO: 369804 - RNA, 22 nt, Human
agggggaggcugugcugcgucu

SEQ ID NO: 369805 - RNA, 22 nt, Human
uccaggaggcucugguugacgu

SEQ ID NO: 369806 - RNA, 22 nt, Human
augcagcugucagggagaacau

SEQ ID NO: 369807 - RNA, 22 nt, Human
cuggcaggagcauucacagagg

SEQ ID NO: 369808 - RNA, 22 nt, Human
gagagcugggaaagccguggag

SEQ ID NO: 369809 - RNA, 22 nt, Human
ugaggcaguucuuacuuguauu

SEQ ID NO: 369810 - RNA, 22 nt, Human
ugcagaagcagagaguugccaa

SEQ ID NO: 369811 - RNA, 22 nt, Human
ucuuugcaacucccauuuccau

SEQ ID NO: 369812 - RNA, 20 nt, Human
uccaagggcagcagaaucag

SEQ ID NO: 369813 - RNA, 22 nt, Human
cauuuccugucuggaggucaaa

SEQ ID NO: 369814 - RNA, 22 nt, Human
caagccucagaaucuucuccau

SEQ ID NO: 369815 - RNA, 22 nt, Human
gggcugagugggccucuuacuu

SEQ ID NO: 369816 - RNA, 22 nt, Human
gugguaaucggauucuuaccgg

SEQ ID NO: 369817 - RNA, 22 nt, Human
ucauugcaccccagucccagcu

SEQ ID NO: 369818 - RNA, 22 nt, Human
ccucugggugggaggccgggcg

SEQ ID NO: 369819 - RNA, 22 nt, Human
gagcagcucgagaaggaagcag

SEQ ID NO: 369820 - RNA, 23 nt, Human
ggccucuguguucugcccacaug

SEQ ID NO: 369821 - RNA, 22 nt, Human
agaucaaagccaugagagauuu

SEQ ID NO: 369822 - RNA, 22 nt, Human
cuagggcacuaggacucaugug

SEQ ID NO: 369823 - RNA, 22 nt, Human
cacugcuuuuuuggcuauguac

SEQ ID NO: 369824 - RNA, 22 nt, Human
ugcuucaggagaugucaccaug

SEQ ID NO: 369825 - RNA, 22 nt, Human
agagcccuuucuccaggcaccu

SEQ ID NO: 369826 - RNA, 22 nt, Human
ugccuugcacauaauauacauu

SEQ ID NO: 369827 - RNA, 22 nt, Human
uggcagcucauuuggaaaugga

SEQ ID NO: 369828 - RNA, 22 nt, Human
acucugccaucccaggugcugu

SEQ ID NO: 369829 - RNA, 22 nt, Human
ggcacugauaauguccucucuc

SEQ ID NO: 369830 - RNA, 22 nt, Human
cuccucuggaaauuccucugcc

SEQ ID NO: 369831 - RNA, 22 nt, Human
uggagccauaacccuuucguac

SEQ ID NO: 369832 - RNA, 22 nt, Human
uugcugaaguuaaugcuugcaa

SEQ ID NO: 369833 - RNA, 23 nt, Human
ucagaaugcacugaauuuacccu

SEQ ID NO: 369834 - RNA, 22 nt, Human
agcaggguuccaggaguugcag

SEQ ID NO: 369835 - RNA, 22 nt, Human
ggccccuggcaccaggcugauu

SEQ ID NO: 369836 - RNA, 22 nt, Human
auugaaaaauucacaauucugg

SEQ ID NO: 369837 - RNA, 22 nt, Human
ccagagcccagggucaugcagg

SEQ ID NO: 369838 - RNA, 20 nt, Human
uaugaagauaugugaacagc

SEQ ID NO: 369839 - RNA, 22 nt, Human
gugucccagccccacaggccug

SEQ ID NO: 369840 - RNA, 22 nt, Human
aggguauguuuuuaucuacugu

SEQ ID NO: 369841 - RNA, 22 nt, Human
uugaaguuguaguucagugaag

SEQ ID NO: 369842 - RNA, 20 nt, Human
uucuucucuaguuaucuuca

SEQ ID NO: 369843 - RNA, 22 nt, Human
cugcugcugagagcucagccug

SEQ ID NO: 369844 - RNA, 22 nt, Human
ccuguucagagcuaagcaucau

SEQ ID NO: 369845 - RNA, 22 nt, Human
aaaauguguuuaugcauuucgu

SEQ ID NO: 369846 - RNA, 22 nt, Human
gccacccccaaguagguggucu

SEQ ID NO: 369847 - RNA, 22 nt, Human
augcaucauggaaaacucaguu

SEQ ID NO: 369848 - RNA, 22 nt, Human
caggccucuccuuagucuggca

SEQ ID NO: 369849 - RNA, 22 nt, Human
aucuaucccaguuuaacucauu

SEQ ID NO: 369850 - RNA, 19 nt, Human
cccaaggcccugggcaggc

SEQ ID NO: 369851 - RNA, 22 nt, Human
ggauuuacaaguuuaacucuca

SEQ ID NO: 369852 - RNA, 20 nt, Human
ugccaggcacggagugcaug

SEQ ID NO: 369853 - RNA, 22 nt, Human
aaguccuuuaauaucacauagu

SEQ ID NO: 369854 - RNA, 22 nt, Human
ucagugugaggucuuccacccg

SEQ ID NO: 369855 - RNA, 22 nt, Human
ugacagcauaacacuggucuug

SEQ ID NO: 369856 - RNA, 22 nt, Human
ugagauguaagguaugcuuacu

SEQ ID NO: 369857 - RNA, 22 nt, Human
ucccaagugucuuggaccaggg

SEQ ID NO: 369858 - RNA, 22 nt, Human
ugugcccaucccucuggagugu

SEQ ID NO: 369859 - RNA, 22 nt, Human
ggagggagucagcugauuagaa

SEQ ID NO: 369860 - RNA, 22 nt, Human
uggcucucagcucccagcagcc

SEQ ID NO: 369861 - RNA, 22 nt, Human
auuauuauauagggaaaguccc

SEQ ID NO: 369862 - RNA, 22 nt, Human
guucuucagaggggaaagaacc

SEQ ID NO: 369863 - RNA, 22 nt, Human
gcucucagguacaaagcugugu

SEQ ID NO: 369864 - RNA, 22 nt, Human
ugaguuuugucuugcuagaagu

SEQ ID NO: 369865 - RNA, 22 nt, Human
gaauacaaauaauaccaaggug

SEQ ID NO: 369866 - RNA, 22 nt, Human
gagaagguggaccugaaggagc

SEQ ID NO: 369867 - RNA, 22 nt, Human
cagaguggcagucccaggccca

SEQ ID NO: 369868 - RNA, 23 nt, Human
acugucugauauguuuuccauca

SEQ ID NO: 369869 - RNA, 22 nt, Human
cugaggccagcugcagagcucu

SEQ ID NO: 369870 - RNA, 22 nt, Human
aggaagcuuagugaaaggacca

SEQ ID NO: 369871 - RNA, 22 nt, Human
cugggcagaauuuuaggauggc

SEQ ID NO: 369872 - RNA, 22 nt, Human
cugggcacaggggagcagaguc

SEQ ID NO: 369873 - RNA, 22 nt, Human
gugccuggagcuaauguguaua

SEQ ID NO: 369874 - RNA, 22 nt, Human
aguucaggcauaaggcaugaac

SEQ ID NO: 369875 - RNA, 22 nt, Human
caugccaguuuugagaugcacc

SEQ ID NO: 369876 - RNA, 22 nt, Human
acaguggaagcaugaugcuauc

SEQ ID NO: 369877 - RNA, 22 nt, Human
cuucaagauauuucuagaauca

SEQ ID NO: 369878 - RNA, 22 nt, Human
gagggcuccacacgggcccagc

SEQ ID NO: 369879 - RNA, 15 nt, Human
uucaggauaugacuc

SEQ ID NO: 369880 - RNA, 22 nt, Human
agccaaggcagcuagagcucug

SEQ ID NO: 369881 - RNA, 22 nt, Human
uccaggcagucauuaaucucua

SEQ ID NO: 369882 - RNA, 22 nt, Human
uuccagauuucuacacaagacc

SEQ ID NO: 369883 - RNA, 22 nt, Human
cagcuuccaucuccacugcccu

SEQ ID NO: 369884 - RNA, 22 nt, Human
uucagcaagaccaccauguacc

SEQ ID NO: 369885 - RNA, 22 nt, Human
aggcaguuguagagagggcucu

SEQ ID NO: 369886 - RNA, 22 nt, Human
auucuggccuuggcucugucac

SEQ ID NO: 369887 - RNA, 22 nt, Human
cugggagucuggccucuggucc

SEQ ID NO: 369888 - RNA, 20 nt, Human
cagggccacgcuccaaggca

SEQ ID NO: 369889 - RNA, 22 nt, Human
gaggcacaauacaugucucaag

SEQ ID NO: 369890 - RNA, 22 nt, Human
acuucacacagcaaauuuaucu

SEQ ID NO: 369891 - RNA, 19 nt, Human
ucaaagucugagucacuuu

SEQ ID NO: 369892 - RNA, 22 nt, Human
acagguggcuuauuggcugauu

SEQ ID NO: 369893 - RNA, 22 nt, Human
uccuggaguugugcagugcaca

SEQ ID NO: 369894 - RNA, 22 nt, Human
ugguaaaguguacugaauauga

SEQ ID NO: 369895 - RNA, 22 nt, Human
ggugucuguugccuccugguua

SEQ ID NO: 369896 - RNA, 22 nt, Human
ggcucagaaacuaaaggcgcug

SEQ ID NO: 369897 - RNA, 22 nt, Human
ucucagaguuuagagcugagcc

SEQ ID NO: 369898 - RNA, 19 nt, Human
ugcaagcuuuuucuuguua

SEQ ID NO: 369899 - RNA, 20 nt, Human
acagccagaggaggcagaca

SEQ ID NO: 369900 - RNA, 22 nt, Human
gugcauuucucauacacuaaau

SEQ ID NO: 369901 - RNA, 22 nt, Human
gccugagaaggacacagcaggu

SEQ ID NO: 369902 - RNA, 22 nt, Human
ccccagccagcaggaccucuga

SEQ ID NO: 369903 - RNA, 22 nt, Human
uuggcucaggaccccugugacu

SEQ ID NO: 369904 - RNA, 22 nt, Human
ucuacuguagugaugcugcagu

SEQ ID NO: 369905 - RNA, 22 nt, Human
uugaggagcacuagucagguau

SEQ ID NO: 369906 - RNA, 22 nt, Human
ccucagcucuucccugugcaca

SEQ ID NO: 369907 - RNA, 22 nt, Human
auucuucauguugaagcuguca

SEQ ID NO: 369908 - RNA, 22 nt, Human
agagccuggucugagauaggac

SEQ ID NO: 369909 - RNA, 22 nt, Human
cagcugccaagaaucuuuucua

SEQ ID NO: 369910 - RNA, 22 nt, Human
gaugguuuaugauagaugggaa

SEQ ID NO: 369911 - RNA, 22 nt, Human
cuaaagaagcuagcaaucuaua

SEQ ID NO: 369912 - RNA, 22 nt, Human
ugagcagagucgcuccagagug

SEQ ID NO: 369913 - RNA, 22 nt, Human
gaaugaaagauuugcauucuau

SEQ ID NO: 369914 - RNA, 22 nt, Human
acuggcagcagcagcccuuggg

SEQ ID NO: 369915 - RNA, 22 nt, Human
cccaggcuggagugcaauggca

SEQ ID NO: 369916 - RNA, 22 nt, Human
uuuugugagcccauaaaugcca

SEQ ID NO: 369917 - RNA, 22 nt, Human
aagggcaggagaagacggauau

SEQ ID NO: 369918 - RNA, 19 nt, Human
gcagcugcuugaaaagaaa

SEQ ID NO: 369919 - RNA, 22 nt, Human
gcagaaggucuggcacuucagg

SEQ ID NO: 369920 - RNA, 22 nt, Human
cauugucacccaaagcucauag

SEQ ID NO: 369921 - RNA, 22 nt, Human
gaaggccauuuuuagguagaau

SEQ ID NO: 369922 - RNA, 22 nt, Human
caaguaaagaaucacauuucuu

SEQ ID NO: 369923 - RNA, 22 nt, Human
aacuggauuuaggaacagagaa

SEQ ID NO: 369924 - RNA, 22 nt, Human
ccaguggaauuaaaaauaagug

SEQ ID NO: 369925 - RNA, 22 nt, Human
cuuguaauuauaauguacuguu

SEQ ID NO: 369926 - RNA, 22 nt, Human
augaggcaucugcagucacuag

SEQ ID NO: 369927 - RNA, 22 nt, Human
ggccugagucccaccuggcugu

SEQ ID NO: 369928 - RNA, 22 nt, Human
acugggccuggauuggcguguc

SEQ ID NO: 369929 - RNA, 22 nt, Human
gauuucuuuagguguaauagug

SEQ ID NO: 369930 - RNA, 21 nt, Human
acaggcuuuagaaaaugacuc

SEQ ID NO: 369931 - RNA, 22 nt, Human
agauacaucuugaacuucuaga

SEQ ID NO: 369932 - RNA, 22 nt, Human
ugucaccaguuccaggaaauaa

SEQ ID NO: 369933 - RNA, 22 nt, Human
cauaacuagagugaaauguuga

SEQ ID NO: 369934 - RNA, 22 nt, Human
uaacaauaguguuugcuaguca

SEQ ID NO: 369935 - RNA, 22 nt, Human
guggcagagggugagcuggacu

SEQ ID NO: 369936 - RNA, 22 nt, Human
uacauggugguggcacuugacu

SEQ ID NO: 369937 - RNA, 22 nt, Human
gaggggaagacuucuggacagu

SEQ ID NO: 369938 - RNA, 16 nt, Human
agccaggcugccucgg

SEQ ID NO: 369939 - RNA, 22 nt, Human
gcugucacaucaaggcacuaaa

SEQ ID NO: 369940 - RNA, 22 nt, Human
aggguaggguaaaugaugcauc

SEQ ID NO: 369941 - RNA, 22 nt, Human
aggcuccaugcaaaggcuguuu

SEQ ID NO: 369942 - RNA, 22 nt, Human
auaugcaagcacauagaauacu

SEQ ID NO: 369943 - RNA, 22 nt, Human
auauaauacaaccugcuaagug

SEQ ID NO: 369944 - RNA, 22 nt, Human
agcagccagaaauccagaggug

SEQ ID NO: 369945 - RNA, 22 nt, Human
cauuucaauacuaucugagaau

SEQ ID NO: 369946 - RNA, 22 nt, Human
aagagagaacucccuucgccag

SEQ ID NO: 369947 - RNA, 22 nt, Human
aggcaguguauugcuagcggcu

SEQ ID NO: 369948 - RNA, 23 nt, Human
cccagaccuugugcugcccuugg

SEQ ID NO: 369949 - RNA, 22 nt, Human
uggcucaggccuacgacgccuu

SEQ ID NO: 369950 - RNA, 22 nt, Human
ccugggugacccgugagcgucc

SEQ ID NO: 369951 - RNA, 22 nt, Human
auuauuucucacucacauaaua

SEQ ID NO: 369952 - RNA, 22 nt, Human
acauuccaaaaacuagcagaua

SEQ ID NO: 369953 - RNA, 22 nt, Human
ggcauggcucggagucagaaca

SEQ ID NO: 369954 - RNA, 22 nt, Human
agugagcauucguuuggaaccc

SEQ ID NO: 369955 - RNA, 22 nt, Human
ugagcaguaggucugaauagug

SEQ ID NO: 369956 - RNA, 18 nt, Human
ucuuccaacacugacacc

SEQ ID NO: 369957 - RNA, 22 nt, Human
uacuuagagcgauaauuuauac

SEQ ID NO: 369958 - RNA, 22 nt, Human
aagaauucacugguagagucaa

SEQ ID NO: 369959 - RNA, 22 nt, Human
ucagcagugcagggugaggcag

SEQ ID NO: 369960 - RNA, 22 nt, Human
gagguucacaggcuaucacagu

SEQ ID NO: 369961 - RNA, 22 nt, Human
ugccaggccaaugaaggcaggg

SEQ ID NO: 369962 - RNA, 22 nt, Human
caggccugugaguugaggcccc

SEQ ID NO: 369963 - RNA, 22 nt, Human
uaguggagaggauguggagaaa

SEQ ID NO: 369964 - RNA, 17 nt, Human
ucagcaggggccaagcu

SEQ ID NO: 369965 - RNA, 19 nt, Human
auaaggcaauuggauuugg

SEQ ID NO: 369966 - RNA, 22 nt, Human
gagcugggacauggguccucuc

SEQ ID NO: 369967 - RNA, 22 nt, Human
acagagcauuugggacagagag

SEQ ID NO: 369968 - RNA, 22 nt, Human
gcauuccugagaaugcagagug

SEQ ID NO: 369969 - RNA, 22 nt, Human
gaguuauuggguggaaagguag

SEQ ID NO: 369970 - RNA, 17 nt, Human
agaugcuggccacaugu

SEQ ID NO: 369971 - RNA, 22 nt, Human
uggagcagagaugguggccuuc

SEQ ID NO: 369972 - RNA, 22 nt, Human
agaggccacuuugccugugaug

SEQ ID NO: 369973 - RNA, 22 nt, Human
augugguugaagaauuacaucu

SEQ ID NO: 369974 - RNA, 22 nt, Human
ugucccucauugacgcugugcc

SEQ ID NO: 369975 - RNA, 22 nt, Human
uuugcauuucucguaaggaaac

SEQ ID NO: 369976 - RNA, 21 nt, Human
gcagaggaaugguauacauaa

SEQ ID NO: 369977 - RNA, 22 nt, Human
ucucuuucuauaugugagucuu

SEQ ID NO: 369978 - RNA, 22 nt, Human
gaagaagguggcccagggguag

SEQ ID NO: 369979 - RNA, 22 nt, Human
cuguguccucccgcugcaccca

SEQ ID NO: 369980 - RNA, 22 nt, Human
ggggcagccuccaggaaagcug

SEQ ID NO: 369981 - RNA, 22 nt, Human
cagaggccucacuuccagccag

SEQ ID NO: 369982 - RNA, 18 nt, Human
ugagaggcagguagagga

SEQ ID NO: 369983 - RNA, 22 nt, Human
cugccuggggaaugugaggauu

SEQ ID NO: 369984 - RNA, 22 nt, Human
ucuuuauuuuaugcuugugcaa

SEQ ID NO: 369985 - RNA, 22 nt, Human
ggcauccaaauaccaagaugua

SEQ ID NO: 369986 - RNA, 22 nt, Human
uccaggcaggguuaaggguccu

SEQ ID NO: 369987 - RNA, 22 nt, Human
cugugccuaagaugcaugucuc

SEQ ID NO: 369988 - RNA, 22 nt, Human
uccuguaguugcuaaguuuguu

SEQ ID NO: 369989 - RNA, 22 nt, Human
gucaggggccaugggccaagga

SEQ ID NO: 369990 - RNA, 22 nt, Human
cugagccauccauaccagcuua

SEQ ID NO: 369991 - RNA, 17 nt, Human
uagagcugguucaggag

SEQ ID NO: 369992 - RNA, 22 nt, Human
cccaggccagaacuugguugcu

SEQ ID NO: 369993 - RNA, 22 nt, Human
uggggcuguggauucucacgaa

SEQ ID NO: 369994 - RNA, 22 nt, Human
uuuagggaugucagaacaggga

SEQ ID NO: 369995 - RNA, 22 nt, Human
uggaagcuguggcauaacugag

SEQ ID NO: 369996 - RNA, 22 nt, Human
cuuaaagaguauuuaauauaau

SEQ ID NO: 369997 - RNA, 22 nt, Human
agagcauccaucggccaggacc

SEQ ID NO: 369998 - RNA, 22 nt, Human
agggcugcuauguugauucaga

SEQ ID NO: 369999 - RNA, 22 nt, Human
caggcagcaucagucugcugua

SEQ ID NO: 370000 - RNA, 22 nt, Human
gcccacagcucguuccucuccu

SEQ ID NO: 370001 - RNA, 22 nt, Human
ugaaggugucuuugugaacauc

SEQ ID NO: 370002 - RNA, 22 nt, Human
ucagggcucaccagccucugcc

SEQ ID NO: 370003 - RNA, 22 nt, Human
caggaaugaggucguaaguguc

SEQ ID NO: 370004 - RNA, 22 nt, Human
agauuuacuggagucuuuggug

SEQ ID NO: 370005 - RNA, 22 nt, Human
uuaacagacauauauauuugua

SEQ ID NO: 370006 - RNA, 22 nt, Human
agagcagguggcaacucuggga

SEQ ID NO: 370007 - RNA, 18 nt, Human
ugucucaggcugaaacag

SEQ ID NO: 370008 - RNA, 21 nt, Human
acagcagacaggcuuaggacc

SEQ ID NO: 370009 - RNA, 22 nt, Human
aggcaacuguuugauaauguug

SEQ ID NO: 370010 - RNA, 22 nt, Human
cccacaggcuagggguagggca

SEQ ID NO: 370011 - RNA, 22 nt, Human
gccggggcuggggagagacaug

SEQ ID NO: 370012 - RNA, 22 nt, Human
ugacagaaugugacucucagau

SEQ ID NO: 370013 - RNA, 22 nt, Human
gcaagcuggcuguuagaggaug

SEQ ID NO: 370014 - RNA, 22 nt, Human
gggcugagugucccaggccgaa

SEQ ID NO: 370015 - RNA, 22 nt, Human
acauuuacagugcuagacaauc

SEQ ID NO: 370016 - RNA, 18 nt, Human
aggcagcagcaucuucuc

SEQ ID NO: 370017 - RNA, 22 nt, Human echovirus 1
ccaugggaggugaaggugucgu

SEQ ID NO: 370018 - RNA, 22 nt, Human echovirus 1
acucggcacacaugggggccac

SEQ ID NO: 370019 - RNA, 22 nt, Human echovirus 1
cucaaguguuuggcuuucaacu

SEQ ID NO: 370020 - RNA, 22 nt, Human
uggcagaaguucacuaguagcu

SEQ ID NO: 370021 - RNA, 22 nt, Human
cugggcacagcguugggcucuu

SEQ ID NO: 370022 - RNA, 22 nt, Human
aagcuggcaauuaucaaaacug

SEQ ID NO: 370023 - RNA, 23 nt, Human
uggcagcagaucuuaaagugacc

SEQ ID NO: 370024 - RNA, 22 nt, Human
accagggcacaggagucugaag

SEQ ID NO: 370025 - RNA, 22 nt, Human
cucaggggaccuggcuccgagu

SEQ ID NO: 370026 - RNA, 22 nt, Human
accagcugcugauugcuaaaug

SEQ ID NO: 370027 - RNA, 22 nt, Human
gcuucacacuaaaaauguuaaa

SEQ ID NO: 370028 - RNA, 22 nt, Human
aaggcauaggacaaaucaguga

SEQ ID NO: 370029 - RNA, 22 nt, Human
gccaggcauuauuccgaucccu

SEQ ID NO: 370030 - RNA, 22 nt, Human
uuuuauauggcacauugguugg

SEQ ID NO: 370031 - RNA, 22 nt, Human
caggugaccuuuguccuaaguu

SEQ ID NO: 370032 - RNA, 22 nt, Human
ugguaaagaaggcuagaucuga

SEQ ID NO: 370033 - RNA, 22 nt, Human
cagugagguggauggauggccu

SEQ ID NO: 370034 - RNA, 22 nt, Human
gauuucuucauucauuagaugg

SEQ ID NO: 370035 - RNA, 22 nt, Human
gccccugggagcagagccacca

SEQ ID NO: 370036 - RNA, 22 nt, Human
cugugaccuccaggaaggggug

SEQ ID NO: 370037 - RNA, 22 nt, Human
ccuccugggcuccugucugcac

SEQ ID NO: 370038 - RNA, 22 nt, Human
agaauuucuggaagauugcaag

SEQ ID NO: 370039 - RNA, 22 nt, Human
aaguguagauuauggagugucu

SEQ ID NO: 370040 - RNA, 22 nt, Human
agagacaaugccaaugcacacg

SEQ ID NO: 370041 - RNA, 22 nt, Human
uaggagagcugaacuauugucu

SEQ ID NO: 370042 - RNA, 22 nt, Human
ggagucagccugucagagugua

SEQ ID NO: 370043 - RNA, 22 nt, Human
agcuuuaucacaauauuggcua

SEQ ID NO: 370044 - RNA, 22 nt, Human
gcaguguuaggaauaaaaauga

SEQ ID NO: 370045 - RNA, 22 nt, Human
ggcagggcuugucucugugaug

SEQ ID NO: 370046 - RNA, 22 nt, Human
agagacaggauaucugcucaug

SEQ ID NO: 370047 - RNA, 19 nt, Human
gaguuauugccagggcaug

SEQ ID NO: 370048 - RNA, 22 nt, Human
agaggcugucccuugcuauucc

SEQ ID NO: 370049 - RNA, 22 nt, Human
gagcacccuuugcacaucaguc

SEQ ID NO: 370050 - RNA, 21 nt, Human
gcugcucgagauccagugcuu

SEQ ID NO: 370051 - RNA, 22 nt, Human
uuugacaguaauaaagcacaag

SEQ ID NO: 370052 - RNA, 22 nt, Human
gaggaggcuggcgccgccugcc

SEQ ID NO: 370053 - RNA, 22 nt, Human
ucacaucuuauuagaguaucuc

SEQ ID NO: 370054 - RNA, 21 nt, Human
ccagcagcucaaggaucucuu

SEQ ID NO: 370055 - RNA, 22 nt, Human
uuuaggcagcuacauacuaacu

SEQ ID NO: 370056 - RNA, 23 nt, Human
uggcugagguccagguaguuuca

SEQ ID NO: 370057 - RNA, 22 nt, Human
gaggccaggggccuggagauga

SEQ ID NO: 370058 - RNA, 22 nt, Human
guggcuugaccaucccugcuac

SEQ ID NO: 370059 - RNA, 22 nt, Human
cagcagcuacuuggagcagcag

SEQ ID NO: 370060 - RNA, 22 nt, Human
aggcuucccaagcagcugcaaa

SEQ ID NO: 370061 - RNA, 22 nt, Human
ucugggaaccagugcggcuggg

SEQ ID NO: 370062 - RNA, 22 nt, Human
acagauugaucuugagaauuau

SEQ ID NO: 370063 - RNA, 22 nt, Human
uuugaauagcauaggauuacau

SEQ ID NO: 370064 - RNA, 22 nt, Human
uuuucucaggugcuuaucuaag

SEQ ID NO: 370065 - RNA, 22 nt, Human
aauaugugagguauguucagug

SEQ ID NO: 370066 - RNA, 20 nt, Human
gcagggcaucuuggccccca

SEQ ID NO: 370067 - RNA, 22 nt, Human
aaggucauuuaacaauuuauga

SEQ ID NO: 370068 - RNA, 22 nt, Human
gcucucuugguggcuguccugg

SEQ ID NO: 370069 - RNA, 23 nt, Human
cagaagcaccuguugacugcugc

SEQ ID NO: 370070 - RNA, 22 nt, Human
acacaucagaaauaugaaugag

SEQ ID NO: 370071 - RNA, 20 nt, Human
gccuguccugagugucaugg

SEQ ID NO: 370072 - RNA, 21 nt, Human
agagccugagaucuuccagca

SEQ ID NO: 370073 - RNA, 23 nt, Human
ucucugaguuguacuuucccuug

SEQ ID NO: 370074 - RNA, 22 nt, Human
uaaauacagucauuugagccau

SEQ ID NO: 370075 - RNA, 22 nt, Human
uucagcaaacacgaugcuuguu

SEQ ID NO: 370076 - RNA, 22 nt, Human
acagucuugcuguauggucagg

SEQ ID NO: 370077 - RNA, 22 nt, Human
gcagcugcagagaccggguggg

SEQ ID NO: 370078 - RNA, 22 nt, Human
ggcugggcuccgggagcaugcg

SEQ ID NO: 370079 - RNA, 22 nt, Human
gccugucugcgucacgcuuauu

SEQ ID NO: 370080 - RNA, 22 nt, Human
uacauagaacauguuuaauguc

SEQ ID NO: 370081 - RNA, 22 nt, Human
ggaggcugagaaguccaagauc

SEQ ID NO: 370082 - RNA, 22 nt, Human
ggggcugguggugguuucucca

SEQ ID NO: 370083 - RNA, 18 nt, Human
ccagguggugacagagau

SEQ ID NO: 370084 - RNA, 22 nt, Human
cgagcaugaugacggcuguggc

SEQ ID NO: 370085 - RNA, 22 nt, Human
gcuuuaaugcuucguggggcca

SEQ ID NO: 370086 - RNA, 22 nt, Human
ggcugggcaaacaagacucuuc

SEQ ID NO: 370087 - RNA, 22 nt, Human
aaagacacacagugcuucaguu

SEQ ID NO: 370088 - RNA, 22 nt, Human
ucaggaguaaagacagaguucc

SEQ ID NO: 370089 - RNA, 22 nt, Human
accaggcaguauggugcugcaa

SEQ ID NO: 370090 - RNA, 22 nt, Human
ccuggaagauucaccacuacca

SEQ ID NO: 370091 - RNA, 22 nt, Human
ugaggcaggacauggacaacug

SEQ ID NO: 370092 - RNA, 22 nt, Human
aaugucuucaguguauacaugg

SEQ ID NO: 370093 - RNA, 22 nt, Human
gggaggaaagagaaguggucca

SEQ ID NO: 370094 - RNA, 22 nt, Human
aagacccacaaggcugaauguu

SEQ ID NO: 370095 - RNA, 22 nt, Human
aagggcugcaauccaaaacacu

SEQ ID NO: 370096 - RNA, 22 nt, Human
auggccuuagugaugauuaaua

SEQ ID NO: 370097 - RNA, 22 nt, Human
aaaggccaagcaugagguggac

SEQ ID NO: 370098 - RNA, 22 nt, Human
auacagaacucucaguuguaua

SEQ ID NO: 370099 - RNA, 22 nt, Human
aguggcaguggggcagggcccu

SEQ ID NO: 370100 - RNA, 22 nt, Human
augaugugugcugaucaagcuu

SEQ ID NO: 370101 - RNA, 20 nt, Human
aagaaacuugaaaguacaag

SEQ ID NO: 370102 - RNA, 22 nt, Human
agcacaauagagcaguuaaaaa

SEQ ID NO: 370103 - RNA, 22 nt, Human
cacaggcuuccaguccccagcu

SEQ ID NO: 370104 - RNA, 22 nt, Human
ggagaggguguggaaaguuauc

SEQ ID NO: 370105 - RNA, 22 nt, Human
ccagcuuuccaggguugacugg

SEQ ID NO: 370106 - RNA, 22 nt, Human
uguguauuucuggaacagacua

SEQ ID NO: 370107 - RNA, 22 nt, Human
uggcucugugucucccagcagc

SEQ ID NO: 370108 - RNA, 22 nt, Human
guggaauguccuugaucauaag

SEQ ID NO: 370109 - RNA, 19 nt, Human
ggaggccuggguauuugcc

SEQ ID NO: 370110 - RNA, 22 nt, Human
uguucuuuggcuucacagcucu

SEQ ID NO: 370111 - RNA, 22 nt, Human
ggggccagcaauguugaggaau

SEQ ID NO: 370112 - RNA, 22 nt, Human
ccacacugaaccucagugucuu

SEQ ID NO: 370113 - RNA, 22 nt, Human
agugggguccucaguaugguuc

SEQ ID NO: 370114 - RNA, 22 nt, Human
uugcauuuuuagaugcuucugu

SEQ ID NO: 370115 - RNA, 22 nt, Human
gccugccugcugugugcaaguu

SEQ ID NO: 370116 - RNA, 22 nt, Human
guauacagauacuuagacgugc

SEQ ID NO: 370117 - RNA, 22 nt, Human
ggagugacucucggggccacua

SEQ ID NO: 370118 - RNA, 22 nt, Human
ugcugaggagguggcugugcuu

SEQ ID NO: 370119 - RNA, 22 nt, Human
agagugaucagauaucaggugu

SEQ ID NO: 370120 - RNA, 22 nt, Human
agucuucucauuucacaugcuu

SEQ ID NO: 370121 - RNA, 22 nt, Human
cuuaauuacccaaugugguagg

SEQ ID NO: 370122 - RNA, 22 nt, Human
ugugugccugagccgugccugg

SEQ ID NO: 370123 - RNA, 22 nt, Human
gucaggcugccagucuuuauug

SEQ ID NO: 370124 - RNA, 22 nt, Human
ucaucucaaaacccaaggggca

SEQ ID NO: 370125 - RNA, 22 nt, Human
cauuagggccaccauaacaaaa

SEQ ID NO: 370126 - RNA, 22 nt, Human
gcaaauauucaagacuuuucca

SEQ ID NO: 370127 - RNA, 23 nt, Human
uggagcugacagucagagggagg

SEQ ID NO: 370128 - RNA, 22 nt, Human
auauuauucuaguaacagugau

SEQ ID NO: 370129 - RNA, 22 nt, Human
ucaacacuauccaggcaaucuu

SEQ ID NO: 370130 - RNA, 22 nt, Human
gugguaauuuaauccuacacug

SEQ ID NO: 370131 - RNA, 22 nt, Human
uuuugcuugagugcacaaaaug

SEQ ID NO: 370132 - RNA, 22 nt, Human
gcauuuaaauuugaacuucaga

SEQ ID NO: 370133 - RNA, 22 nt, Human
auaauaacaccugaauaggaaa

SEQ ID NO: 370134 - RNA, 22 nt, Human
ccagggcaugggaagaacugaa

SEQ ID NO: 370135 - RNA, 22 nt, Human
uggcagaguuauggguauuuau

SEQ ID NO: 370136 - RNA, 22 nt, Human
uguguguauaugcauuuaucua

SEQ ID NO: 370137 - RNA, 22 nt, Human
uccucccacauaggacaauggg

SEQ ID NO: 370138 - RNA, 22 nt, Human
gaggagaggcuggacgcgguga

SEQ ID NO: 370139 - RNA, 22 nt, Human
cccugcaguccuuucuuggcuc

SEQ ID NO: 370140 - RNA, 22 nt, Human
cagccucuaagcacagccucuc

SEQ ID NO: 370141 - RNA, 22 nt, Human
ccagcccuugagauggaaggga

SEQ ID NO: 370142 - RNA, 22 nt, Human
cugcuuugaaaauaaacuuguc

SEQ ID NO: 370143 - RNA, 22 nt, Human
uccauucauucauugaugaaca

SEQ ID NO: 370144 - RNA, 17 nt, Human
gccaaaggguuccaauc

SEQ ID NO: 370145 - RNA, 22 nt, Human
ucucugagcugcuucuugcaua

SEQ ID NO: 370146 - RNA, 22 nt, Human
uggaggcagucaaaugacugac

SEQ ID NO: 370147 - RNA, 22 nt, Human
uucuuguauguaugcaaaauca

SEQ ID NO: 370148 - RNA, 22 nt, Human
gagagugaggccugggaaucua

SEQ ID NO: 370149 - RNA, 22 nt, Human
aagggcuccaagagguagcugg

SEQ ID NO: 370150 - RNA, 22 nt, Human
uggcacuggaaucguagccuug

SEQ ID NO: 370151 - RNA, 22 nt, Human
cgcagaagagguugucuagucc

SEQ ID NO: 370152 - RNA, 22 nt, Human
uguauuaacauuaauaaaaugg

SEQ ID NO: 370153 - RNA, 21 nt, Human
cucacaggaugcaguguuacu

SEQ ID NO: 370154 - RNA, 22 nt, Human
auuuucaucauggguuuaacau

SEQ ID NO: 370155 - RNA, 19 nt, Human
uuggaaggagccagagugg

SEQ ID NO: 370156 - RNA, 22 nt, Human
uccaggaguccugggagugauu

SEQ ID NO: 370157 - RNA, 22 nt, Human
cugggacagcugagacaggaga

SEQ ID NO: 370158 - RNA, 22 nt, Human
aaggcagagggcuggaucagag

SEQ ID NO: 370159 - RNA, 22 nt, Human
uggcagggccugaaucuuauac

SEQ ID NO: 370160 - RNA, 20 nt, Human
cagaaggucuaagcuuuaga

SEQ ID NO: 370161 - RNA, 22 nt, Human
ggcugagggccagggcuagucu

SEQ ID NO: 370162 - RNA, 22 nt, Human
gcugccaguaguuggagcucca

SEQ ID NO: 370163 - RNA, 22 nt, Human
uucucuuugacauuauucaggu

SEQ ID NO: 370164 - RNA, 22 nt, Human
cagagccaaaugcugugguuau

SEQ ID NO: 370165 - RNA, 22 nt, Human
gagacaggauuuaaccaaagcu

SEQ ID NO: 370166 - RNA, 22 nt, Human
uggaaggagcuaaggaccuggg

SEQ ID NO: 370167 - RNA, 22 nt, Human
uggcugagggggcaguucagga

SEQ ID NO: 370168 - RNA, 22 nt, Human
ugcagguaggccugacuuccag

SEQ ID NO: 370169 - RNA, 21 nt, Human
guuuuaagggagaaaaccuag

SEQ ID NO: 370170 - RNA, 22 nt, Human
caggcccauucuaggcuugcua

SEQ ID NO: 370171 - RNA, 22 nt, Human
agggcuccgggccaccggccug

SEQ ID NO: 370172 - RNA, 22 nt, Human
uaauuuaauccaaguguuacau

SEQ ID NO: 370173 - RNA, 22 nt, Human
aaauacuguugaaugaaguaag

SEQ ID NO: 370174 - RNA, 22 nt, Human
uugucuguaaagacggccacca

SEQ ID NO: 370175 - RNA, 22 nt, Human
aacagaauaguugauguacagu

SEQ ID NO: 370176 - RNA, 22 nt, Human
ugggagcucagaaagggagguc

SEQ ID NO: 370177 - RNA, 21 nt, Human
caaagccaggcaacucucucc

SEQ ID NO: 370178 - RNA, 22 nt, Human
ucauugcacuccagccugggca

SEQ ID NO: 370179 - RNA, 22 nt, Human
acccaggcugcuucucaguggc

SEQ ID NO: 370180 - RNA, 21 nt, Human
uagagaaaagaagcuguuccu

SEQ ID NO: 370181 - RNA, 22 nt, Human
aggucauuguuaagucaccaua

SEQ ID NO: 370182 - RNA, 19 nt, Human
agguggucuaggcuggaga

SEQ ID NO: 370183 - RNA, 22 nt, Human
ucagagaggauuuuaauaagug

SEQ ID NO: 370184 - RNA, 22 nt, Human
gggcaggucugggucagccuga

SEQ ID NO: 370185 - RNA, 22 nt, Human
ugaauaauuccuuuuugucaag

SEQ ID NO: 370186 - RNA, 22 nt, Human
ucugagaggauuccugucccga

SEQ ID NO: 370187 - RNA, 22 nt, Human
gcugggagugggcaagaugaga

SEQ ID NO: 370188 - RNA, 22 nt, Human
gcugugcaguaguagguacagu

SEQ ID NO: 370189 - RNA, 22 nt, Human
auguagcaucuauccugauaaa

SEQ ID NO: 370190 - RNA, 22 nt, Human
ccugagugaauucccucacugu

SEQ ID NO: 370191 - RNA, 22 nt, Human
acucagaagauauaaugacuca

SEQ ID NO: 370192 - RNA, 22 nt, Human
cccagcagugacccagugauac

SEQ ID NO: 370193 - RNA, 22 nt, Human
aguucacugcuuaagccuuuga

SEQ ID NO: 370194 - RNA, 19 nt, Human
ccagguggaacugagguag

SEQ ID NO: 370195 - RNA, 22 nt, Human
gaauauuuuuaaagggacuaau

SEQ ID NO: 370196 - RNA, 22 nt, Human
aggaugaauaacugaaauggug

SEQ ID NO: 370197 - RNA, 22 nt, Human
ucaggagauguaaccuuagcug

SEQ ID NO: 370198 - RNA, 22 nt, Human
uaucaaaggcuaugugauuuuu

SEQ ID NO: 370199 - RNA, 22 nt, Human
aggagaaagacuggacagccaa

SEQ ID NO: 370200 - RNA, 22 nt, Human
ccagccugguucagaauuggcu

SEQ ID NO: 370201 - RNA, 22 nt, Human
aauuuccagaucagaugacuca

SEQ ID NO: 370202 - RNA, 22 nt, Human
cuaacuuuagcuuagauuauca

SEQ ID NO: 370203 - RNA, 22 nt, Human
acauuucucagguaagucauuu

SEQ ID NO: 370204 - RNA, 22 nt, Human
uuuacauuucccucugucaguu

SEQ ID NO: 370205 - RNA, 22 nt, Human
aagcaccucuaugauugcuuuu

SEQ ID NO: 370206 - RNA, 22 nt, Human
ucggagcuguagaugaaacccu

SEQ ID NO: 370207 - RNA, 22 nt, Human
cuauuauuagauaaucuacuug

SEQ ID NO: 370208 - RNA, 22 nt, Human
cccagggucccugcucucugug

SEQ ID NO: 370209 - RNA, 22 nt, Human
cagaugaggcaaccucauugcu

SEQ ID NO: 370210 - RNA, 22 nt, Human
ucagcccugaggacagaggcag

SEQ ID NO: 370211 - RNA, 22 nt, Human
gaucagaauuuacuuauaauug

SEQ ID NO: 370212 - RNA, 22 nt, Human
uacccagcccaugccuaccuca

SEQ ID NO: 370213 - RNA, 22 nt, Human
cauuagggacugaggaauaagg

SEQ ID NO: 370214 - RNA, 22 nt, Human
agcagagcuauucuugugcaau

SEQ ID NO: 370215 - RNA, 20 nt, Human
ugcuguaagauuagagagcu

SEQ ID NO: 370216 - RNA, 22 nt, Human
ccucccacauugaggacaugcu

SEQ ID NO: 370217 - RNA, 22 nt, Human
aagugaguggccuggagaggug

SEQ ID NO: 370218 - RNA, 19 nt, Human
agcagccauagacaauaug

SEQ ID NO: 370219 - RNA, 22 nt, Human
uaagaaucaguagauauagauu

SEQ ID NO: 370220 - RNA, 22 nt, Human
gcacagggcugccaggcggcuu

SEQ ID NO: 370221 - RNA, 22 nt, Human
agaucacaguggcaacucccuu

SEQ ID NO: 370222 - RNA, 22 nt, Human
cugggugguuuugaugugaauu

SEQ ID NO: 370223 - RNA, 22 nt, Human
cccagccucuguuugcuccucu

SEQ ID NO: 370224 - RNA, 21 nt, Human
agugaaauugcaucagaggga

SEQ ID NO: 370225 - RNA, 22 nt, Human
ucaggagagaaagaauacaauu

SEQ ID NO: 370226 - RNA, 22 nt, Human
uuccagcuaacucacaucccuu

SEQ ID NO: 370227 - RNA, 22 nt, Human
ucagccaggccaccuucagcuu

SEQ ID NO: 370228 - RNA, 22 nt, Human
ugggccugggcuccuguccucu

SEQ ID NO: 370229 - RNA, 22 nt, Human
cagucccagcugcucagaaggc

SEQ ID NO: 370230 - RNA, 22 nt, Human
ucaugaauauugaaugcuucau

SEQ ID NO: 370231 - RNA, 22 nt, Human
gagguacagaguguuccaaugu

SEQ ID NO: 370232 - RNA, 22 nt, Human
gaagagcugacagugucauccu

SEQ ID NO: 370233 - RNA, 22 nt, Human
gcuguggcugaccaccaggggg

SEQ ID NO: 370234 - RNA, 18 nt, Human
gcuccuggaccaggucac

SEQ ID NO: 370235 - RNA, 22 nt, Human
gagauuucuuuugaugccuguc

SEQ ID NO: 370236 - RNA, 22 nt, Human
gugccucagcaccgccugcagc

SEQ ID NO: 370237 - RNA, 22 nt, Human
acaugucaauuuaguacucuua

SEQ ID NO: 370238 - RNA, 22 nt, Human
ugaauggucacugagcaucugu

SEQ ID NO: 370239 - RNA, 22 nt, Human
uaugaagauauaucugaucucu

SEQ ID NO: 370240 - RNA, 22 nt, Human
cauugcucaggcccagcaggaa

SEQ ID NO: 370241 - RNA, 22 nt, Human
aaagcucuuauagcagagugug

SEQ ID NO: 370242 - RNA, 22 nt, Human
gaucauuuugaugcccuuuuag

SEQ ID NO: 370243 - RNA, 22 nt, Human
guguguuucagaagccaggugu

SEQ ID NO: 370244 - RNA, 22 nt, Human
uguuuuauuucuccaagaggga

SEQ ID NO: 370245 - RNA, 22 nt, Human
guuugcauguguacuuaauugg

SEQ ID NO: 370246 - RNA, 22 nt, Human
uaauuuacuugcaaauaacaau

SEQ ID NO: 370247 - RNA, 22 nt, Human
ucaauucaauugaacaguuacu

SEQ ID NO: 370248 - RNA, 22 nt, Human
cucaggauucucgacacucaca

SEQ ID NO: 370249 - RNA, 22 nt, Human
auuucuacugugagaaacauga

SEQ ID NO: 370250 - RNA, 22 nt, Human
cagaagaaaguggggagacaag

SEQ ID NO: 370251 - RNA, 22 nt, Human
aaauccuaccaagaaauucccu

SEQ ID NO: 370252 - RNA, 22 nt, Human
caccaggcugcccaggacaggg

SEQ ID NO: 370253 - RNA, 22 nt, Human
ugaguccauguggaggggaggu

SEQ ID NO: 370254 - RNA, 22 nt, Human
ucccacuggacgucugugcugg

SEQ ID NO: 370255 - RNA, 22 nt, Human
ccagcagggcagugcccuggac

SEQ ID NO: 370256 - RNA, 22 nt, Human
aaccaggacaauuugaauagaa

SEQ ID NO: 370257 - RNA, 22 nt, Human
auggcuuuccugggacaugggc

SEQ ID NO: 370258 - RNA, 22 nt, Human
cagcugagaccagaaugcaggu

SEQ ID NO: 370259 - RNA, 22 nt, Human
agcugaggcucugagagggaag

SEQ ID NO: 370260 - RNA, 22 nt, Human
ugccugucuccucugcagggug

SEQ ID NO: 370261 - RNA, 22 nt, Human
gcucugagccgggggccugucc

SEQ ID NO: 370262 - RNA, 22 nt, Human
gccagcagccacagaagucacu

SEQ ID NO: 370263 - RNA, 22 nt, Human
cccugcagaucuaggguccuuc

SEQ ID NO: 370264 - RNA, 22 nt, Human
uacccaggggcugagcagaggu

SEQ ID NO: 370265 - RNA, 22 nt, Human
uccucagggaagaugagccuca

SEQ ID NO: 370266 - RNA, 22 nt, Human
agagccaggaaguggcgugggg

SEQ ID NO: 370267 - RNA, 22 nt, Human
caggaggcuccuagggcucugu

SEQ ID NO: 370268 - RNA, 22 nt, Human
cagcagagcauuugguaggagg

SEQ ID NO: 370269 - RNA, 22 nt, Human
ugcucacagcccagaacauaau

SEQ ID NO: 370270 - RNA, 22 nt, Human
ucagugcagaauagugaugcau

SEQ ID NO: 370271 - RNA, 22 nt, Human
aacagcaauagcacuauucauu

SEQ ID NO: 370272 - RNA, 22 nt, Human
gagaggccaccugacgagcagu

SEQ ID NO: 370273 - RNA, 22 nt, Human
uguaggauuuucaccagaccuu

SEQ ID NO: 370274 - RNA, 20 nt, Human
uucuuucaucuacacguugu

SEQ ID NO: 370275 - RNA, 22 nt, Human
cucugggcaaguaugauagaaa

SEQ ID NO: 370276 - RNA, 22 nt, Human
cagauuuaagagauaaacagug

SEQ ID NO: 370277 - RNA, 22 nt, Human
cagcugugcugauugcucagua

SEQ ID NO: 370278 - RNA, 22 nt, Human
aagcagcuggaagaguaagaug

SEQ ID NO: 370279 - RNA, 22 nt, Human
uuccucuuucucugugcuaugu

SEQ ID NO: 370280 - RNA, 22 nt, Human
gccugcagacguguuuuccuca

SEQ ID NO: 370281 - RNA, 22 nt, Human
gccucuggggcagcugagucau

SEQ ID NO: 370282 - RNA, 22 nt, Human
cagcccuggugccaagguuccc

SEQ ID NO: 370283 - RNA, 22 nt, Human
ugauacagucagcucacaauug

SEQ ID NO: 370284 - RNA, 20 nt, Human
agggucaguagcacagagcu

SEQ ID NO: 370285 - RNA, 22 nt, Human
auuuaucaccaguuagcugacu

SEQ ID NO: 370286 - RNA, 22 nt, Human
cacugcagcaccaugcagggcu

SEQ ID NO: 370287 - RNA, 22 nt, Human
guguuuccuaguuuaaugaaug

SEQ ID NO: 370288 - RNA, 22 nt, Human
ugaggcagggagaguggauaug

SEQ ID NO: 370289 - RNA, 22 nt, Human
aguaauaauuuauauuagggag

SEQ ID NO: 370290 - RNA, 22 nt, Human
gaaggaaaaauacucuguaagg

SEQ ID NO: 370291 - RNA, 18 nt, Human
ucagagagaauaguaauu

SEQ ID NO: 370292 - RNA, 22 nt, Human
aaguuucaaauauaaaauuaca

SEQ ID NO: 370293 - RNA, 22 nt, Human
gggaccugccaaggccacccag

SEQ ID NO: 370294 - RNA, 22 nt, Human
cuggcugcaggaugaggcugcc

SEQ ID NO: 370295 - RNA, 19 nt, Human
gcccugcaggagguggggc

SEQ ID NO: 370296 - RNA, 22 nt, Human
gagcugcuucugugugccgggu

SEQ ID NO: 370297 - RNA, 22 nt, Human
acuguucauuuguccuguaucu

SEQ ID NO: 370298 - RNA, 22 nt, Human
aauacagaggggucacaauuca

SEQ ID NO: 370299 - RNA, 18 nt, Human
aggcacuggaauuaaggg

SEQ ID NO: 370300 - RNA, 22 nt, Human
uuaaaguucauuaaaugagcca

SEQ ID NO: 370301 - RNA, 22 nt, Human
ucaaguuucucucagauuaugg

SEQ ID NO: 370302 - RNA, 22 nt, Human
cagggccacacggaagggaaca

SEQ ID NO: 370303 - RNA, 22 nt, Human
cacauauuguaguucaccagga

SEQ ID NO: 370304 - RNA, 22 nt, Human
aggggcugccuggcuuggcacu

SEQ ID NO: 370305 - RNA, 22 nt, Human
uaaacauuuguuauucuuguuu

SEQ ID NO: 370306 - RNA, 22 nt, Human
aagcgccaugguuccugcgcag

SEQ ID NO: 370307 - RNA, 22 nt, Human
cuggggcugcggacgggagccc

SEQ ID NO: 370308 - RNA, 22 nt, Human
uauggaaaaauguaucuuguca

SEQ ID NO: 370309 - RNA, 22 nt, Human
cauuucaaaagaauugccagaa

SEQ ID NO: 370310 - RNA, 22 nt, Human
aaagcagagguugcagugagcu

SEQ ID NO: 370311 - RNA, 22 nt, Human
aaagucaucuaggagcagauuu

SEQ ID NO: 370312 - RNA, 22 nt, Human
ccaggaagccucagaugcugag

SEQ ID NO: 370313 - RNA, 22 nt, Human
agggccugggguagcuuacugc

SEQ ID NO: 370314 - RNA, 22 nt, Human
ggcugcucuucuuggcgaccuc

SEQ ID NO: 370315 - RNA, 22 nt, Human
cagaggccuuucuacagugaua

SEQ ID NO: 370316 - RNA, 22 nt, Human
agcaugaaaggcgugccaacuu

SEQ ID NO: 370317 - RNA, 22 nt, Human
ggcuuggaaaugguaaugagcu

SEQ ID NO: 370318 - RNA, 22 nt, Human
gggaauuauagcugucacaggc

SEQ ID NO: 370319 - RNA, 23 nt, Human
cagguggcuccacgagggguggg

SEQ ID NO: 370320 - RNA, 22 nt, Human
acuggcagagguuggacaccau

SEQ ID NO: 370321 - RNA, 22 nt, Human
gggaggaaggcuugggugagua

SEQ ID NO: 370322 - RNA, 22 nt, Human
uacaugcucaguaacuuucagu

SEQ ID NO: 370323 - RNA, 22 nt, Human
agcccugggaggccagcuugua

SEQ ID NO: 370324 - RNA, 22 nt, Human
agcuguggaagacugucagggu

SEQ ID NO: 370325 - RNA, 22 nt, Human
caugaagcuugaagcaguccac

SEQ ID NO: 370326 - RNA, 22 nt, Human
cggcuggugucgggcacagcaa

SEQ ID NO: 370327 - RNA, 17 nt, Human
acagagcacaucaagau

SEQ ID NO: 370328 - RNA, 22 nt, Human
acacagggucuagaguuaggcc

SEQ ID NO: 370329 - RNA, 22 nt, Human
caggccugggcuucggggcuga

SEQ ID NO: 370330 - RNA, 22 nt, Human
gcucugggcugcccucuggaca

SEQ ID NO: 370331 - RNA, 22 nt, Human
ucuucuuccucauuuauacaua

SEQ ID NO: 370332 - RNA, 22 nt, Human
uuuuauagcugaauaguauucc

SEQ ID NO: 370333 - RNA, 22 nt, Human
acagaguagcucaagaagauug

SEQ ID NO: 370334 - RNA, 22 nt, Human
agggcagagaucugagugggca

SEQ ID NO: 370335 - RNA, 22 nt, Human
uuaaggauguugugauuuauua

SEQ ID NO: 370336 - RNA, 22 nt, Human
agucugucugucacuucugcag

SEQ ID NO: 370337 - RNA, 22 nt, Human
agaggagguccuuuucugaugu

SEQ ID NO: 370338 - RNA, 19 nt, Human
gcacacccugcaccaccau

SEQ ID NO: 370339 - RNA, 22 nt, Human
uacagagacuuuauggcacaaa

SEQ ID NO: 370340 - RNA, 22 nt, Human
agcagggcagugcuucagcucu

SEQ ID NO: 370341 - RNA, 22 nt, Human
gcauggcagugaggauggugcu

SEQ ID NO: 370342 - RNA, 22 nt, Human
augaagcugguuuuggcuuggg

SEQ ID NO: 370343 - RNA, 23 nt, Human
cgcccagccucagugaccugggc

SEQ ID NO: 370344 - RNA, 22 nt, Human
gcugcucucucccuaaguuggg

SEQ ID NO: 370345 - RNA, 22 nt, Human
aacaucagaauauccauguugg

SEQ ID NO: 370346 - RNA, 22 nt, Human
cuccagaagacccauccucaug

SEQ ID NO: 370347 - RNA, 22 nt, Human
ggggcuccagucuucacauuuu

SEQ ID NO: 370348 - RNA, 22 nt, Human
ugccaggcccucccacagauua

SEQ ID NO: 370349 - RNA, 22 nt, Human
uacaaaguuugggguccucaaa

SEQ ID NO: 370350 - RNA, 22 nt, Human
aacaugaaaguugcuaagugca

SEQ ID NO: 370351 - RNA, 22 nt, Human
agaaauacuaggaauauucaua

SEQ ID NO: 370352 - RNA, 22 nt, Human
cagauuucuauuucaaauacau

SEQ ID NO: 370353 - RNA, 22 nt, Human
gcuggggagggcgucaaggcca

SEQ ID NO: 370354 - RNA, 22 nt, Human
agggcuccuccccggccuccac

SEQ ID NO: 370355 - RNA, 22 nt, Human
aggcugccuguuccaaucuccu

SEQ ID NO: 370356 - RNA, 22 nt, Human
aggcagagaaaaaccagauaug

SEQ ID NO: 370357 - RNA, 22 nt, Human
ggagcuggcuacagagaacucc

SEQ ID NO: 370358 - RNA, 20 nt, Human
uauggcuuggcaaagcuuca

SEQ ID NO: 370359 - RNA, 22 nt, Human
aggcuggagggcaauggcaaga

SEQ ID NO: 370360 - RNA, 22 nt, Human
uggcucugccacuaacuuggua

SEQ ID NO: 370361 - RNA, 22 nt, Human
aacaggagaguaaauauaugau

SEQ ID NO: 370362 - RNA, 22 nt, Human
auacagaacaagccucaccucc

SEQ ID NO: 370363 - RNA, 22 nt, Human
ucacaacuugaagcugauuuaa

SEQ ID NO: 370364 - RNA, 20 nt, Human
ggggcugcaugcagagaaga

SEQ ID NO: 370365 - RNA, 22 nt, Human
ugcagggccagacuggguugga

SEQ ID NO: 370366 - RNA, 16 nt, Human
aggcagagauuuaccc

SEQ ID NO: 370367 - RNA, 21 nt, Human
ugccagggauuuacagagccu

SEQ ID NO: 370368 - RNA, 22 nt, Human
uggcucaguuaggucagaaaca

SEQ ID NO: 370369 - RNA, 22 nt, Human
agagccuggaccugagcuacaa

SEQ ID NO: 370370 - RNA, 22 nt, Human
cagggcagcuuccuuuguuagg

SEQ ID NO: 370371 - RNA, 22 nt, Human
ucagaaauacaaaacacuuacu

SEQ ID NO: 370372 - RNA, 22 nt, Human
ugaugaaaauaugauucugagg

SEQ ID NO: 370373 - RNA, 22 nt, Human
caaaguuaugaaugauaagauu

SEQ ID NO: 370374 - RNA, 22 nt, Human
agucaacaaaaauguggagccu

SEQ ID NO: 370375 - RNA, 22 nt, Human
ucaaguguaguggugucagguc

SEQ ID NO: 370376 - RNA, 22 nt, Human
aguguuccugcucucaggaagc

SEQ ID NO: 370377 - RNA, 22 nt, Human
caggaagagaacauggaggcug

SEQ ID NO: 370378 - RNA, 22 nt, Human
aagaacaguguccugggacucg

SEQ ID NO: 370379 - RNA, 21 nt, Human
gagccuucccucugcccuuuc

SEQ ID NO: 370380 - RNA, 22 nt, Human
uccugguggugccagcugcagg

SEQ ID NO: 370381 - RNA, 22 nt, Human
uuuaaaaucagaugggaguugg

SEQ ID NO: 370382 - RNA, 22 nt, Human
ccuggacucaggcugugggcac

SEQ ID NO: 370383 - RNA, 22 nt, Human
gccugcuggcuguccauugcag

SEQ ID NO: 370384 - RNA, 22 nt, Human
acagaaauauucguggugcuug

SEQ ID NO: 370385 - RNA, 22 nt, Human
uugcagagaucagcagguuuga

SEQ ID NO: 370386 - RNA, 22 nt, Human
uauacaaugaguacauucuggg

SEQ ID NO: 370387 - RNA, 22 nt, Human
cuuacauugucuuaguuuucaa

SEQ ID NO: 370388 - RNA, 22 nt, Human
gggcuaggcuuggccagcacug

SEQ ID NO: 370389 - RNA, 22 nt, Human
cugggagcccugacuagccugg

SEQ ID NO: 370390 - RNA, 22 nt, Human
cuagaaaugcucaagagaaagu

SEQ ID NO: 370391 - RNA, 22 nt, Human
uuccucagccagcacuuagggg

SEQ ID NO: 370392 - RNA, 22 nt, Human
ggcugcagagcugggugggccu

SEQ ID NO: 370393 - RNA, 22 nt, Human
uuugcaaauauguguuucuauu

SEQ ID NO: 370394 - RNA, 22 nt, Human
ggaggcagaauagagugugggu

SEQ ID NO: 370395 - RNA, 22 nt, Human
auuucaggauagccuaguuuug

SEQ ID NO: 370396 - RNA, 22 nt, Human
agaagauuuagguugacgcuau

SEQ ID NO: 370397 - RNA, 22 nt, Human
cugccucucagccugaccgcca

SEQ ID NO: 370398 - RNA, 22 nt, Human
caggaguggugugagggacucc

SEQ ID NO: 370399 - RNA, 22 nt, Human
uccaggcaaaaaccaacuacag

SEQ ID NO: 370400 - RNA, 22 nt, Human
ggcugcaggcaggguauccacu

SEQ ID NO: 370401 - RNA, 22 nt, Human
ucugccuguucaagucuucuag

SEQ ID NO: 370402 - RNA, 22 nt, Human
aaggaagagucuagaacaggca

SEQ ID NO: 370403 - RNA, 22 nt, Human
gcagcugagagaagaacagggc

SEQ ID NO: 370404 - RNA, 22 nt, Human
aaacuucauggauaauauaaag

SEQ ID NO: 370405 - RNA, 22 nt, Human
ccagggugagaaaaggcuggau

SEQ ID NO: 370406 - RNA, 22 nt, Human
ggcuggaaguccaagaucaagg

SEQ ID NO: 370407 - RNA, 22 nt, Human
agccaccaccacugaaagguua

SEQ ID NO: 370408 - RNA, 22 nt, Human
gguuucaacuaaaucaagaagg

SEQ ID NO: 370409 - RNA, 22 nt, Human
agucaccaacaugguucccagg

SEQ ID NO: 370410 - RNA, 22 nt, Human
gacauaauaaucugaccuagau

SEQ ID NO: 370411 - RNA, 22 nt, Human
agaaaugggccuugggacacaa

SEQ ID NO: 370412 - RNA, 22 nt, Human
ucuggccuuaucuguccaagcc

SEQ ID NO: 370413 - RNA, 22 nt, Human
aaguugaaugcguacgugacau

SEQ ID NO: 370414 - RNA, 22 nt, Human
cuccucuggcuuccuggaggca

SEQ ID NO: 370415 - RNA, 22 nt, Human
cuguacaucucugaggacagua

SEQ ID NO: 370416 - RNA, 22 nt, Human
aaaugugugcacaaagacagcu

SEQ ID NO: 370417 - RNA, 22 nt, Human
aggcccugcuuuccagagcuca

SEQ ID NO: 370418 - RNA, 22 nt, Human
aacucuauuuacccuacuaaac

SEQ ID NO: 370419 - RNA, 18 nt, Human
cccacggugcuguagggc

SEQ ID NO: 370420 - RNA, 22 nt, Human
ugccacacauugucagguuagu

SEQ ID NO: 370421 - RNA, 22 nt, Human
gagguagcaugcuggaagggac

SEQ ID NO: 370422 - RNA, 22 nt, Human
uugaagcauuguggcuuguauu

SEQ ID NO: 370423 - RNA, 22 nt, Human
cuggcagcccaaccuagagucu

SEQ ID NO: 370424 - RNA, 22 nt, Human
acuguucauuuggauuucucug

SEQ ID NO: 370425 - RNA, 22 nt, Human
ugcuggaggcaguggaggugcc

SEQ ID NO: 370426 - RNA, 22 nt, Human
uucagauguggcuuugucaggc

SEQ ID NO: 370427 - RNA, 22 nt, Human
uggcucuguuuuaugaguacca

SEQ ID NO: 370428 - RNA, 22 nt, Human
agaauucugacaauagaauugg

SEQ ID NO: 370429 - RNA, 22 nt, Human
aaagaaucuauauaucaccacc

SEQ ID NO: 370430 - RNA, 22 nt, Human
agcuggagaaaccugggagggu

SEQ ID NO: 370431 - RNA, 22 nt, Human
ucaggggcugugcauuucccag

SEQ ID NO: 370432 - RNA, 22 nt, Human
ggaugggagcagaggacgacca

SEQ ID NO: 370433 - RNA, 22 nt, Human
uauugaaauccauuacguucuu

SEQ ID NO: 370434 - RNA, 19 nt, Human
aggcucugagcuccuggag

SEQ ID NO: 370435 - RNA, 22 nt, Human
gggagucugggcuagacuccuu

SEQ ID NO: 370436 - RNA, 22 nt, Human
gaaaggccagcucacagaugag

SEQ ID NO: 370437 - RNA, 17 nt, Human
ugagcaguagaagaugc

SEQ ID NO: 370438 - RNA, 22 nt, Human
gaagcccagggcguggccgggc

SEQ ID NO: 370439 - RNA, 22 nt, Human
gaaccucagugaaacuggaggu

SEQ ID NO: 370440 - RNA, 22 nt, Human
ucucccagaggaucccagugga

SEQ ID NO: 370441 - RNA, 22 nt, Human
ucagcuuugggggucucaggag

SEQ ID NO: 370442 - RNA, 22 nt, Human
ugaauagauuuuuaacauauaa

SEQ ID NO: 370443 - RNA, 22 nt, Human
ccaggccuucugaggacacucu

SEQ ID NO: 370444 - RNA, 22 nt, Human
gucucagaguccuacuuauucc

SEQ ID NO: 370445 - RNA, 22 nt, Human
uggcagggucuugcuguguugc

SEQ ID NO: 370446 - RNA, 22 nt, Human
cuagggaguggcagagcuggga

SEQ ID NO: 370447 - RNA, 22 nt, Human
aagagcuggagcugcuacagga

SEQ ID NO: 370448 - RNA, 22 nt, Human
uccuuuccagccucaccucagc

SEQ ID NO: 370449 - RNA, 22 nt, Human
acucugugugaguagagccugu

SEQ ID NO: 370450 - RNA, 22 nt, Human
aguacauauaguaauuuagcca

SEQ ID NO: 370451 - RNA, 22 nt, Human
auguuucaccaguuuuauaaga

SEQ ID NO: 370452 - RNA, 18 nt, Human
cuggcuuucuuauccauc

SEQ ID NO: 370453 - RNA, 22 nt, Human
uggccucugggaaagcagauuc

SEQ ID NO: 370454 - RNA, 22 nt, Human
aguguggguuuuauggagcccu

SEQ ID NO: 370455 - RNA, 22 nt, Human
aaaugcagcagcuaauugaaaa

SEQ ID NO: 370456 - RNA, 22 nt, Human
uacaggaaguaaguaaugaaau

SEQ ID NO: 370457 - RNA, 22 nt, Human
ugaaaugagcauuuauucuuua

SEQ ID NO: 370458 - RNA, 22 nt, Human
aggcagguuucccggcugucaa

SEQ ID NO: 370459 - RNA, 22 nt, Human
acauguggucaaucuguguagg

SEQ ID NO: 370460 - RNA, 22 nt, Human
aaucauucuuauuucacagcaa

SEQ ID NO: 370461 - RNA, 22 nt, Human
uggccuggcccugaggcccugu

SEQ ID NO: 370462 - RNA, 22 nt, Human
aagcagaguccccuucccaugg

SEQ ID NO: 370463 - RNA, 22 nt, Human
uuaagacaguguauuuguuuuc

SEQ ID NO: 370464 - RNA, 22 nt, Human
cuaguggaaacuaacuggaauu

SEQ ID NO: 370465 - RNA, 22 nt, Human
aaagccagcucugagcugcacc

SEQ ID NO: 370466 - RNA, 22 nt, Human
aagcagccacuggccaguuaua

SEQ ID NO: 370467 - RNA, 22 nt, Human
gcaaagguagccaaggagcuca

SEQ ID NO: 370468 - RNA, 22 nt, Human
uuccagagcaguuuucagauca

SEQ ID NO: 370469 - RNA, 22 nt, Human
gauggcacacagacauccccgc

SEQ ID NO: 370470 - RNA, 22 nt, Human
aagaacauuuuguagaaugaca

SEQ ID NO: 370471 - RNA, 22 nt, Human
cugcagagcaaguaacauccuc

SEQ ID NO: 370472 - RNA, 22 nt, Human
aauucacaaaaguuagauccau

SEQ ID NO: 370473 - RNA, 22 nt, Human
cucucuguuaugcuuucaugaa

SEQ ID NO: 370474 - RNA, 22 nt, Human
ggccagaggccacagcuguguc

SEQ ID NO: 370475 - RNA, 22 nt, Human
augaaaauugacagcggaagua

SEQ ID NO: 370476 - RNA, 22 nt, Human
augagcuguaagguggcuuccu

SEQ ID NO: 370477 - RNA, 22 nt, Human
guccucugacucagccuuggga

SEQ ID NO: 370478 - RNA, 19 nt, Human
uggcagaggcaguuuguac

SEQ ID NO: 370479 - RNA, 22 nt, Human
ccagcugcgggcaucgagaguu

SEQ ID NO: 370480 - RNA, 22 nt, Human
ugucaccagcugcuccucagga

SEQ ID NO: 370481 - RNA, 22 nt, Human
guucaaagcuccugguacagua

SEQ ID NO: 370482 - RNA, 22 nt, Human
uuugcuauuuuucugugcagcu

SEQ ID NO: 370483 - RNA, 22 nt, Human
aggguaggaacugaguggaagg

SEQ ID NO: 370484 - RNA, 22 nt, Human
ugcccacaggaagacaccagcg

SEQ ID NO: 370485 - RNA, 22 nt, Human
ggagcggagggagggccacugu

SEQ ID NO: 370486 - RNA, 19 nt, Human
acccucucagugccugagg

SEQ ID NO: 370487 - RNA, 17 nt, Human
gcugcagcgguaggcag

SEQ ID NO: 370488 - RNA, 22 nt, Human
uacaagagguauauagaaacag

SEQ ID NO: 370489 - RNA, 22 nt, Human
auuaggcagugccauuguacgg

SEQ ID NO: 370490 - RNA, 22 nt, Human
ugcagugugaccuguagcgagc

SEQ ID NO: 370491 - RNA, 22 nt, Human
ucugccugccagucugguccuc

SEQ ID NO: 370492 - RNA, 22 nt, Human
ugggaguggggcauagaaggua

SEQ ID NO: 370493 - RNA, 22 nt, Human
ucagccagaggcuucuugguuu

SEQ ID NO: 370494 - RNA, 22 nt, Human
cucagagucccuucccucgugg

SEQ ID NO: 370495 - RNA, 22 nt, Human
aagaggaagucuccauggagag

SEQ ID NO: 370496 - RNA, 18 nt, Human
ugaauuaguuugugguuu

SEQ ID NO: 370497 - RNA, 22 nt, Human
ucugaaaguaucuggaucuuuu

SEQ ID NO: 370498 - RNA, 22 nt, Human
cagaacauucacucauaugugg

SEQ ID NO: 370499 - RNA, 23 nt, Human
gcugucaguuguuuuugucucua

SEQ ID NO: 370500 - RNA, 22 nt, Human
ucauugcaccccagucccagcu

SEQ ID NO: 370501 - RNA, 22 nt, Human
ggaggaguguggggcacucugc

SEQ ID NO: 370502 - RNA, 22 nt, Human
uggcccucagucuugcuccugc

SEQ ID NO: 370503 - RNA, 23 nt, Human
caguggagacucaugcuuccuua

SEQ ID NO: 370504 - RNA, 22 nt, Human
ucagggcacguuucugcaaugc

SEQ ID NO: 370505 - RNA, 22 nt, Human
agaaaacuugucacagcucuca

SEQ ID NO: 370506 - RNA, 22 nt, Human
ccagugcacagccaggcaggug

SEQ ID NO: 370507 - RNA, 22 nt, Human
uggccugggccggcagauauac

SEQ ID NO: 370508 - RNA, 22 nt, Human
gagggggcgugcaaggcuccgc

SEQ ID NO: 370509 - RNA, 22 nt, Human
cauuuccacuucugaaaacugg

SEQ ID NO: 370510 - RNA, 22 nt, Human
gcugguuuccuuaucuauaaag

SEQ ID NO: 370511 - RNA, 22 nt, Human
uuugaacuucuaccugucauau

SEQ ID NO: 370512 - RNA, 22 nt, Human
aauguguauaugaacauacagg

SEQ ID NO: 370513 - RNA, 20 nt, Human
aggaagccaaaggcugucuu

SEQ ID NO: 370514 - RNA, 19 nt, Human
ggcugucucggcccagcca

SEQ ID NO: 370515 - RNA, 22 nt, Human
agagcuggacgucugagcccua

SEQ ID NO: 370516 - RNA, 22 nt, Human
cuguggcugcagccuugguccu

SEQ ID NO: 370517 - RNA, 22 nt, Human
cugcaggaauucaaagugagcu

SEQ ID NO: 370518 - RNA, 22 nt, Human
uuuuccuucugauacuccauuu

SEQ ID NO: 370519 - RNA, 22 nt, Human
aaaugaacucuuccugcauccc

SEQ ID NO: 370520 - RNA, 22 nt, Human
uaucagaaacucuggggcaggg

SEQ ID NO: 370521 - RNA, 22 nt, Human
caucaguguggcaguucacugu

SEQ ID NO: 370522 - RNA, 22 nt, Human
gggaccugcgccacucacuguc

SEQ ID NO: 370523 - RNA, 22 nt, Human
gaaacugugaggaucuuaacuu

SEQ ID NO: 370524 - RNA, 22 nt, Human
ccaggcugcucacaagcugccc

SEQ ID NO: 370525 - RNA, 22 nt, Human
aggaagcuccuggagagccagu

SEQ ID NO: 370526 - RNA, 22 nt, Human
agggcugccugacuccagagcc

SEQ ID NO: 370527 - RNA, 22 nt, Human
agggcuggccacaugauuuggu

SEQ ID NO: 370528 - RNA, 19 nt, Human
uugaaauuguuugauaugg

SEQ ID NO: 370529 - RNA, 22 nt, Human
acacugcucacuucuucccuug

SEQ ID NO: 370530 - RNA, 22 nt, Human
aagaugauguuguguuuucacu

SEQ ID NO: 370531 - RNA, 22 nt, Human
uauuucaacguaugaaaagcug

SEQ ID NO: 370532 - RNA, 22 nt, Human
uauagaaguaagcauugugaug

SEQ ID NO: 370533 - RNA, 22 nt, Human
caaagucagcugccagucccaa

SEQ ID NO: 370534 - RNA, 22 nt, Human
aacuuuguguguuuaauauggc

SEQ ID NO: 370535 - RNA, 22 nt, Human
uaucuuuaacuugcaguauuua

SEQ ID NO: 370536 - RNA, 22 nt, Human
gguggcagaggugcaucagccc

SEQ ID NO: 370537 - RNA, 22 nt, Human
ugaaaaggagccuuagguaggu

SEQ ID NO: 370538 - RNA, 22 nt, Human
ugcuucuggaaacaguggcugu

SEQ ID NO: 370539 - RNA, 22 nt, Human
uuuauaaaauagacugggucua

SEQ ID NO: 370540 - RNA, 22 nt, Human
cccagcagccagaaugaggagc

SEQ ID NO: 370541 - RNA, 21 nt, Human
aaacugaccuugccugagaca

SEQ ID NO: 370542 - RNA, 23 nt, Human
gccagccuugcucuccugcagcc

SEQ ID NO: 370543 - RNA, 23 nt, Human
uaauacugcuucagaggcuuaga

SEQ ID NO: 370544 - RNA, 23 nt, Human
gcaggugguucgaacagaaguuu

SEQ ID NO: 370545 - RNA, 23 nt, Human
agcuucauugaccuccgcagggg

SEQ ID NO: 370546 - RNA, 22 nt, Human
ugcagggcuauaacuccauucu

SEQ ID NO: 370547 - RNA, 22 nt, Human
gaguccuucuggcuggcaggau

SEQ ID NO: 370548 - RNA, 22 nt, Human
uuugcauuuguucaaguauuga

SEQ ID NO: 370549 - RNA, 23 nt, Human
aggagaagagauuuccacaugca

SEQ ID NO: 370550 - RNA, 22 nt, Human
agggcagccugagugcuggccc

SEQ ID NO: 370551 - RNA, 22 nt, Human
ucugcucagugcuuaucucuaa

SEQ ID NO: 370552 - RNA, 22 nt, Human
aguacagaccugucucuuccug

SEQ ID NO: 370553 - RNA, 23 nt, Human
cccuggagcuagucugagcagag

SEQ ID NO: 370554 - RNA, 22 nt, Human
cagcugcaggaacaaaaaugug

SEQ ID NO: 370555 - RNA, 22 nt, Human
uuuuauguuccucuuuaugcga

SEQ ID NO: 370556 - RNA, 22 nt, Human
gagauggggaauaggagcaagc

SEQ ID NO: 370557 - RNA, 22 nt, Human
gcugcccugucugcagcaggac

SEQ ID NO: 370558 - RNA, 22 nt, Human
aaugucugaaaaucagacugca

SEQ ID NO: 370559 - RNA, 22 nt, Human
uuuccuaagguagugauaauuu

SEQ ID NO: 370560 - RNA, 22 nt, Human
aauacauguuuucuacuauucu

SEQ ID NO: 370561 - RNA, 22 nt, Human
uuucaggguacauggagcaaau

SEQ ID NO: 370562 - RNA, 22 nt, Human
caguucaggccggcugacucag

SEQ ID NO: 370563 - RNA, 22 nt, Human
cauuuguuggucagauuguagu

SEQ ID NO: 370564 - RNA, 22 nt, Human
agacccugucaguguuaggaaa

SEQ ID NO: 370565 - RNA, 22 nt, Human
gucaaacauagggacuuugugg

SEQ ID NO: 370566 - RNA, 22 nt, Human
auucuucacauaagugcuguac

SEQ ID NO: 370567 - RNA, 22 nt, Human
uucucucauucaaauuaaagug

SEQ ID NO: 370568 - RNA, 22 nt, Human
cccuuccucccaggcuucugug

SEQ ID NO: 370569 - RNA, 22 nt, Human
ucuuaagcagagaagaaguuga

SEQ ID NO: 370570 - RNA, 22 nt, Human
acaaguggguccuacauaaagc

SEQ ID NO: 370571 - RNA, 22 nt, Human
uaaagcacgucuauuuaaugau

SEQ ID NO: 370572 - RNA, 22 nt, Human
uuccucucaacaugccugccgg

SEQ ID NO: 370573 - RNA, 22 nt, Human
uccaggagagguguggggacug

SEQ ID NO: 370574 - RNA, 22 nt, Human
ucugaggcauaaccuguucugc

SEQ ID NO: 370575 - RNA, 22 nt, Human
uagcuuuaggcacguuugaauu

SEQ ID NO: 370576 - RNA, 22 nt, Human
cccaugagauucugaauuuggc

SEQ ID NO: 370577 - RNA, 22 nt, Human
gcgcaggagccgcggagggccg

SEQ ID NO: 370578 - RNA, 22 nt, Human
gcuguucucuguaacaugcauu

SEQ ID NO: 370579 - RNA, 22 nt, Human
cuggcagguggauggggacucc

SEQ ID NO: 370580 - RNA, 22 nt, Human
gcuuccugucccucagccauga

SEQ ID NO: 370581 - RNA, 22 nt, Human
aggagcugagggagcgcccuug

SEQ ID NO: 370582 - RNA, 22 nt, Human
uuucaacuuguuugcuuccaua

SEQ ID NO: 370583 - RNA, 22 nt, Human
uuggaaggagucaaccagcuga

SEQ ID NO: 370584 - RNA, 22 nt, Human
agggagcugcucugcuuccgug

SEQ ID NO: 370585 - RNA, 21 nt, Human
ggcagcucagcagauggggac

SEQ ID NO: 370586 - RNA, 22 nt, Human
auagugguuggauaugucagag

SEQ ID NO: 370587 - RNA, 22 nt, Human
gucagcugucuccccagagugg

SEQ ID NO: 370588 - RNA, 22 nt, Human
agucucugcugguugugccuau

SEQ ID NO: 370589 - RNA, 22 nt, Human
ggucugagcuugagcccaugcu

SEQ ID NO: 370590 - RNA, 22 nt, Human
uauuucugauugcucaugaggc

SEQ ID NO: 370591 - RNA, 22 nt, Human
uccauacauugaaauaccauuc

SEQ ID NO: 370592 - RNA, 22 nt, Human
aagggagguaaagcuauuuaaa

SEQ ID NO: 370593 - RNA, 22 nt, Human
uucacagagaguaugcagagaa

SEQ ID NO: 370594 - RNA, 20 nt, Human
guaaaauauggucuuugggu

SEQ ID NO: 370595 - RNA, 22 nt, Human
caugaauauacauccugauggc

SEQ ID NO: 370596 - RNA, 22 nt, Human
gcagcuuuaaacauuggaaaua

SEQ ID NO: 370597 - RNA, 22 nt, Human
cucuccagccacagaagcugcu

SEQ ID NO: 370598 - RNA, 22 nt, Human
cacaggggcaaacuguagggga

SEQ ID NO: 370599 - RNA, 22 nt, Human
cagucccagacauaguaaggga

SEQ ID NO: 370600 - RNA, 22 nt, Human
gaggccuggucuaugagauguu

SEQ ID NO: 370601 - RNA, 22 nt, Human
gggcucucgauuagacccuggg

SEQ ID NO: 370602 - RNA, 22 nt, Human
ccaggccugauugggaaucuug

SEQ ID NO: 370603 - RNA, 17 nt, Human
uucaaagcuuaucaagg

SEQ ID NO: 370604 - RNA, 22 nt, Human
uuccaugaaagugaaauggagc

SEQ ID NO: 370605 - RNA, 22 nt, Human
gcuggcucagggacuagaguuu

SEQ ID NO: 370606 - RNA, 22 nt, Human
uacauaguauucacauuguuuu

SEQ ID NO: 370607 - RNA, 22 nt, Human
ugaaggagggaagaaggcucug

SEQ ID NO: 370608 - RNA, 22 nt, Human
agcuuuguggcuuugcaagacu

SEQ ID NO: 370609 - RNA, 22 nt, Human
ggggaugguggcauuuguaaaa

SEQ ID NO: 370610 - RNA, 22 nt, Human
uucaaacauucaaauaaaccgg

SEQ ID NO: 370611 - RNA, 22 nt, Human
ggagagcugguagcuggcucca

SEQ ID NO: 370612 - RNA, 22 nt, Human
ugcugucccuaagucucuucaa

SEQ ID NO: 370613 - RNA, 22 nt, Human
ucaauaaaucccucugacccug

SEQ ID NO: 370614 - RNA, 22 nt, Human
ggccagggccuggggacugucc

SEQ ID NO: 370615 - RNA, 22 nt, Human
gaggagaaauuauccuuggugu

SEQ ID NO: 370616 - RNA, 20 nt, Human
acagaaagagagaaugucag

SEQ ID NO: 370617 - RNA, 22 nt, Human
cuguccugcaguugggggcagg

SEQ ID NO: 370618 - RNA, 22 nt, Human
ccagggccaagagaccucgagg

SEQ ID NO: 370619 - RNA, 19 nt, Human
ccucuccgcccaccagccc

SEQ ID NO: 370620 - RNA, 17 nt, Human
ucuguucaugcauaccu

SEQ ID NO: 370621 - RNA, 22 nt, Human
caggaugaagggcaaaggcaag

SEQ ID NO: 370622 - RNA, 22 nt, Human
ucagcuuuuuggauugcccaag

SEQ ID NO: 370623 - RNA, 21 nt, Human
auccauccaucuuggccuaac

SEQ ID NO: 370624 - RNA, 22 nt, Human
aaaaccaggcguuuccuauuau

SEQ ID NO: 370625 - RNA, 22 nt, Human
cuggagccauguauagccuaug

SEQ ID NO: 370626 - RNA, 22 nt, Human
agacccagaaagcagcugcauu

SEQ ID NO: 370627 - RNA, 22 nt, Human
agagaggcugggcguagggcuu

SEQ ID NO: 370628 - RNA, 17 nt, Human
uccagagcacagagcuc

SEQ ID NO: 370629 - RNA, 22 nt, Human
gggccucugugcagaggggccu

SEQ ID NO: 370630 - RNA, 22 nt, Human
aagauauucaaagauuuauuag

SEQ ID NO: 370631 - RNA, 22 nt, Human
ccacagggugucaucagcuuga

SEQ ID NO: 370632 - RNA, 22 nt, Human
uugcucaggcuggugugcagug

SEQ ID NO: 370633 - RNA, 22 nt, Human
cagucucucugaaguauuaaga

SEQ ID NO: 370634 - RNA, 22 nt, Human
gcagaauucuacagaugauaaa

SEQ ID NO: 370635 - RNA, 22 nt, Human
ggguguguuccuaaggaaacca

SEQ ID NO: 370636 - RNA, 22 nt, Human
cccaggaaagagacugcugggu

SEQ ID NO: 370637 - RNA, 22 nt, Human
cggcagagcggcgagccccucc

SEQ ID NO: 370638 - RNA, 21 nt, Human
uggaggaauaaagcacagaag

SEQ ID NO: 370639 - RNA, 22 nt, Human
cugggccugucagggcuuuuug

SEQ ID NO: 370640 - RNA, 22 nt, Human
caaaugcuacuaauaggcaagu

SEQ ID NO: 370641 - RNA, 22 nt, Human
gagggcucugucuggaagggaa

SEQ ID NO: 370642 - RNA, 22 nt, Human
uggagaauuuugucaccagaca

SEQ ID NO: 370643 - RNA, 22 nt, Human
acauucuagaagucuuugcaau

SEQ ID NO: 370644 - RNA, 22 nt, Human
gccaugccugugucuccaggcc

SEQ ID NO: 370645 - RNA, 22 nt, Human
gaaaucugcuucuugcauagua

SEQ ID NO: 370646 - RNA, 22 nt, Human
acuauacaagauuagggauuug

SEQ ID NO: 370647 - RNA, 22 nt, Human
gacagagugcagggcuagaaga

SEQ ID NO: 370648 - RNA, 22 nt, Human
aguuauaaucugcuacugauau

SEQ ID NO: 370649 - RNA, 22 nt, Human
gccuguccuggaugcucugcaa

SEQ ID NO: 370650 - RNA, 22 nt, Human
ggggaccuaggcucugucucuu

SEQ ID NO: 370651 - RNA, 22 nt, Human
agcccggcuuccccgguugcua

SEQ ID NO: 370652 - RNA, 23 nt, Human
cccagcagauuguaaagugucca

SEQ ID NO: 370653 - RNA, 22 nt, Human
uggggcuggcacagucucuauu

SEQ ID NO: 370654 - RNA, 22 nt, Human
gaggggaaagugugaggcugcg

SEQ ID NO: 370655 - RNA, 22 nt, Human
gugcagggcuggcaccggaggc

SEQ ID NO: 370656 - RNA, 22 nt, Human
aaucagucucauuuagcaggga

SEQ ID NO: 370657 - RNA, 21 nt, Human
ccuucucuugcuucagcuuca

SEQ ID NO: 370658 - RNA, 22 nt, Human
guuuauuauacaacaaaagcua

SEQ ID NO: 370659 - RNA, 22 nt, Human
uuucuguaaggacuuaaugcaa

SEQ ID NO: 370660 - RNA, 22 nt, Human
uggcauuuggcuuacuuauguu

SEQ ID NO: 370661 - RNA, 22 nt, Human
gggcguggauggucagugcagg

SEQ ID NO: 370662 - RNA, 22 nt, Human
ucauaauacaaagaguucugca

SEQ ID NO: 370663 - RNA, 22 nt, Human
uauuauuaaauggcagaauuuu

SEQ ID NO: 370664 - RNA, 21 nt, Human
ugagagccuccaaccggcuac

SEQ ID NO: 370665 - RNA, 22 nt, Human
ccaggagguggagauugcagug

SEQ ID NO: 370666 - RNA, 22 nt, Human
aggagaaguaaggcuagaugau

SEQ ID NO: 370667 - RNA, 22 nt, Human
aggagaggucucccuuccccag

SEQ ID NO: 370668 - RNA, 22 nt, Human
gcaggcagagucaauuugaucc

SEQ ID NO: 370669 - RNA, 22 nt, Human
cugcugugcagacagacucucu

SEQ ID NO: 370670 - RNA, 22 nt, Human
uguuccuaaauaugaauggaga

SEQ ID NO: 370671 - RNA, 22 nt, Human
uggagcaggacugcugcccuca

SEQ ID NO: 370672 - RNA, 22 nt, Human
ggcugcagaggcgaucugaggu

SEQ ID NO: 370673 - RNA, 22 nt, Human
gaauuucauuuguuuccuacca

SEQ ID NO: 370674 - RNA, 22 nt, Human
ugggcugcagagcccggccuuc

SEQ ID NO: 370675 - RNA, 22 nt, Human
uuauguauggauggcugaaagu

SEQ ID NO: 370676 - RNA, 22 nt, Human
cagggagaggcaucauagggaa

SEQ ID NO: 370677 - RNA, 22 nt, Human
ucacugcucagucuguacuaca

SEQ ID NO: 370678 - RNA, 22 nt, Human
gaggggcuugaggcccugaugg

SEQ ID NO: 370679 - RNA, 22 nt, Human
ggcugccuugacccuggcuccg

SEQ ID NO: 370680 - RNA, 22 nt, Human
aggcucauucuugccucugagc

SEQ ID NO: 370681 - RNA, 22 nt, Human
cuguaugaggaucagacuggac

SEQ ID NO: 370682 - RNA, 22 nt, Human
uaggaaaaauacagaauuauau

SEQ ID NO: 370683 - RNA, 22 nt, Human
ggagccaggggaccuucacaga

SEQ ID NO: 370684 - RNA, 22 nt, Human
cagggcagggauguugcggcag

SEQ ID NO: 370685 - RNA, 22 nt, Human
ugaggggagcuagcaugccuug

SEQ ID NO: 370686 - RNA, 22 nt, Human
ucagcugccuuucccaugcuag

SEQ ID NO: 370687 - RNA, 22 nt, Human
gccagaaagaggaggaccuggg

SEQ ID NO: 370688 - RNA, 22 nt, Human
cacugcaggucugagauggggg

SEQ ID NO: 370689 - RNA, 22 nt, Human
gcagcuggggaggucgugggga

SEQ ID NO: 370690 - RNA, 22 nt, Human
agauuuacugagaacugauuac

SEQ ID NO: 370691 - RNA, 20 nt, Human
agccaggcucaagcuccccc

SEQ ID NO: 370692 - RNA, 22 nt, Human
cagccagccucucaaccaugca

SEQ ID NO: 370693 - RNA, 22 nt, Human
cuucuaggcuucucagggggca

SEQ ID NO: 370694 - RNA, 22 nt, Human
uccugcagaccucagucagguc

SEQ ID NO: 370695 - RNA, 22 nt, Human
caggccuggcugcagcucgccu

SEQ ID NO: 370696 - RNA, 22 nt, Human
auacuuucugaccaauuaauug

SEQ ID NO: 370697 - RNA, 22 nt, Human
aggcucuguuauucuagagggc

SEQ ID NO: 370698 - RNA, 22 nt, Human
aggcacugguccauuuucugca

SEQ ID NO: 370699 - RNA, 22 nt, Human
ggcuggaaguccaagaucaaga

SEQ ID NO: 370700 - RNA, 21 nt, Human
gggcagcucuguuuuauuuuc

SEQ ID NO: 370701 - RNA, 22 nt, Human
gcugcaggcgccugcggucucu

SEQ ID NO: 370702 - RNA, 22 nt, Human
ugcagggaaaacccaggaugcu

SEQ ID NO: 370703 - RNA, 22 nt, Human
uccauuggucucugugcccagg

SEQ ID NO: 370704 - RNA, 22 nt, Human
uggaggaauaacagcaaccuua

SEQ ID NO: 370705 - RNA, 22 nt, Human
gaggcagcugaagcuucaaaga

SEQ ID NO: 370706 - RNA, 22 nt, Human
cucugcauuuuaacagaugauu

SEQ ID NO: 370707 - RNA, 22 nt, Human
cagcuggccccacaguagaggc

SEQ ID NO: 370708 - RNA, 22 nt, Human
ugaugcugagccugggacugac

SEQ ID NO: 370709 - RNA, 22 nt, Human
aaaaagauguccugaaguuuag

SEQ ID NO: 370710 - RNA, 22 nt, Human
acagauauaugauuguguaaau

SEQ ID NO: 370711 - RNA, 22 nt, Human
gccccuggcuggccagcuccuc

SEQ ID NO: 370712 - RNA, 22 nt, Human
uguguuuugaacucaucuacug

SEQ ID NO: 370713 - RNA, 22 nt, Human
aggagaggaaucauuauuacaa

SEQ ID NO: 370714 - RNA, 22 nt, Human
aagacagagggaagcaaugaug

SEQ ID NO: 370715 - RNA, 22 nt, Human
cccaggaggacauuccauaccc

SEQ ID NO: 370716 - RNA, 22 nt, Human
cuucuucauguauugauagucu

SEQ ID NO: 370717 - RNA, 22 nt, Human
ggaggaagugcaguucuacuac

SEQ ID NO: 370718 - RNA, 22 nt, Human
uuuuucauugcagccucucucc

SEQ ID NO: 370719 - RNA, 22 nt, Human
gcagccaggaaagcuggacccu

SEQ ID NO: 370720 - RNA, 22 nt, Human
ucccagaguuuccuguguccca

SEQ ID NO: 370721 - RNA, 22 nt, Human
ggcagaguugguggagucaguu

SEQ ID NO: 370722 - RNA, 22 nt, Human
ggcagagcugcaugagcacuca

SEQ ID NO: 370723 - RNA, 21 nt, Human
uaagccaccaugugaaaccag

SEQ ID NO: 370724 - RNA, 22 nt, Human
ugugaaggcagcagcucugucc

SEQ ID NO: 370725 - RNA, 22 nt, Human
cucacaguuggcucauuaauga

SEQ ID NO: 370726 - RNA, 22 nt, Human
caagaaaugggauuugacugcc

SEQ ID NO: 370727 - RNA, 22 nt, Human
ccagagucuuuauauuccugaa

SEQ ID NO: 370728 - RNA, 22 nt, Human
ggcugaguugagaggauuacuu

SEQ ID NO: 370729 - RNA, 22 nt, Human
ccucugccugcacaucauccug

SEQ ID NO: 370730 - RNA, 22 nt, Human
agagauaugaguaguugugaca

SEQ ID NO: 370731 - RNA, 22 nt, Human
ugaggcaguucuuacuuguauu

SEQ ID NO: 370732 - RNA, 22 nt, Human
uuucagaaaacuuaucaucagu

SEQ ID NO: 370733 - RNA, 23 nt, Human
aggauguaggauguauggcagag

SEQ ID NO: 370734 - RNA, 22 nt, Human
uggcucugggaaucuguugcuu

SEQ ID NO: 370735 - RNA, 22 nt, Human
cuuucacacacauacauuugga

SEQ ID NO: 370736 - RNA, 22 nt, Human
ucucuggguuuuuguccuguac

SEQ ID NO: 370737 - RNA, 22 nt, Human
aggacagagggaccagagccca

SEQ ID NO: 370738 - RNA, 22 nt, Human
uuugacauggaauaacucauuu

SEQ ID NO: 370739 - RNA, 22 nt, Human
auaagcauguuagaauauuuga

SEQ ID NO: 370740 - RNA, 22 nt, Human
uguagggaggaaggguuggaaa

SEQ ID NO: 370741 - RNA, 22 nt, Human
aggaguguggccagggcucugg

SEQ ID NO: 370742 - RNA, 22 nt, Human
gggcugagugggccucuuacuu

SEQ ID NO: 370743 - RNA, 22 nt, Human
uggcugccuagucccucagccu

SEQ ID NO: 370744 - RNA, 22 nt, Human
cuccaguggcaaguccgggcgg

SEQ ID NO: 370745 - RNA, 22 nt, Human
cuauagaaaauuguaucacacg

SEQ ID NO: 370746 - RNA, 22 nt, Human
cuacauuuugugauuaugaaau

SEQ ID NO: 370747 - RNA, 22 nt, Human
ccauggagcgggugagugagug

SEQ ID NO: 370748 - RNA, 22 nt, Human
ugucaccaugcgaggcuaauuu

SEQ ID NO: 370749 - RNA, 22 nt, Human
ccugagugcuuccagagucaug

SEQ ID NO: 370750 - RNA, 22 nt, Human
caucagaaccagcugggugagg

SEQ ID NO: 370751 - RNA, 22 nt, Human
acaugcuuuucccacaauuaua

SEQ ID NO: 370752 - RNA, 22 nt, Human
aaggucauugguucugaauucu

SEQ ID NO: 370753 - RNA, 22 nt, Human
gccaggcuggugcaaggauauu

SEQ ID NO: 370754 - RNA, 22 nt, Human
agagggcccauguugggcugcu

SEQ ID NO: 370755 - RNA, 22 nt, Human
auggguuucccucugaaauuau

SEQ ID NO: 370756 - RNA, 22 nt, Human
gggagggacacaaagaguuccc

SEQ ID NO: 370757 - RNA, 22 nt, Human
uguccuuaaggagcuuaauguc

SEQ ID NO: 370758 - RNA, 22 nt, Human
gcugccugaagugucuacacug

SEQ ID NO: 370759 - RNA, 22 nt, Human
acacugcagaugaaagcauaag

SEQ ID NO: 370760 - RNA, 22 nt, Human
gggccaugagagguucaucaac

SEQ ID NO: 370761 - RNA, 22 nt, Human
ugcauguuaagaaaauauugag

SEQ ID NO: 370762 - RNA, 22 nt, Human
ucugugcucuucucaguaucac

SEQ ID NO: 370763 - RNA, 22 nt, Human
ccaccaggacagcccugagggg

SEQ ID NO: 370764 - RNA, 22 nt, Human
aaauuaguacauugcaaagucc

SEQ ID NO: 370765 - RNA, 22 nt, Human
gaagcagcgaaguggaagggac

SEQ ID NO: 370766 - RNA, 22 nt, Human
cuuugaauuccaguacaauaac

SEQ ID NO: 370767 - RNA, 21 nt, Human
cucuugugucagagccagagg

SEQ ID NO: 370768 - RNA, 22 nt, Human
gagucacauuaauuuaauuuua

SEQ ID NO: 370769 - RNA, 22 nt, Human
caaggccacguucugcaugcgg

SEQ ID NO: 370770 - RNA, 22 nt, Human
agugaaauagcauuuaugaagc

SEQ ID NO: 370771 - RNA, 19 nt, Human
uccaaaggacccaccucca

SEQ ID NO: 370772 - RNA, 22 nt, Human
gauggcuucagucuccuugggu

SEQ ID NO: 370773 - RNA, 23 nt, Human
uugaaggagaaagcuuucuuggu

SEQ ID NO: 370774 - RNA, 22 nt, Human
uguacauacauagauauacaca

SEQ ID NO: 370775 - RNA, 22 nt, Human
accagagcuggcucugagcacc

SEQ ID NO: 370776 - RNA, 22 nt, Human
ucucaggguuuccugggggcug

SEQ ID NO: 370777 - RNA, 23 nt, Human
ugcuucucugcuugacaguucug

SEQ ID NO: 370778 - RNA, 22 nt, Human
ucagggacuuacaaaccagaag

SEQ ID NO: 370779 - RNA, 22 nt, Human
ucuuuaaucauaaccaagaugg

SEQ ID NO: 370780 - RNA, 17 nt, Human
gucugggcuuuagagac

SEQ ID NO: 370781 - RNA, 22 nt, Human
cugggagcuagcucugagcuga

SEQ ID NO: 370782 - RNA, 22 nt, Human
ugacagaaauaguucuuaauuu

SEQ ID NO: 370783 - RNA, 22 nt, Human
ccaggacccugcaaacccuguu

SEQ ID NO: 370784 - RNA, 22 nt, Human
caacauauaauauuugaguucu

SEQ ID NO: 370785 - RNA, 22 nt, Human
acaguggagaaggcaugaggcu

SEQ ID NO: 370786 - RNA, 22 nt, Human
gggaggugauggcaagcagcgg

SEQ ID NO: 370787 - RNA, 22 nt, Human
accacccucagcagagcugaaa

SEQ ID NO: 370788 - RNA, 22 nt, Human
caguugcuggaugugcagcucu

SEQ ID NO: 370789 - RNA, 22 nt, Human
ggcuuuauuaacucauccguaa

SEQ ID NO: 370790 - RNA, 22 nt, Human
cacaugaugguggaagccauag

SEQ ID NO: 370791 - RNA, 22 nt, Human
cuggcuuccaugcuguaguggc

SEQ ID NO: 370792 - RNA, 22 nt, Human
uuauaacaacaguuuacuuuaa

SEQ ID NO: 370793 - RNA, 22 nt, Human
aauuugauuuucuuaaaccaua

SEQ ID NO: 370794 - RNA, 22 nt, Human
gacagcaggagaucaugauaga

SEQ ID NO: 370795 - RNA, 22 nt, Human
ggggggugcugaucaguggagc

SEQ ID NO: 370796 - RNA, 22 nt, Human
cacacaggagagugcuggaggu

SEQ ID NO: 370797 - RNA, 22 nt, Human
cuggagugauacucagaaugug

SEQ ID NO: 370798 - RNA, 22 nt, Human
uuucuuagcgaugcuugauaaa

SEQ ID NO: 370799 - RNA, 22 nt, Human
gagagggcucuguguggguacu

SEQ ID NO: 370800 - RNA, 22 nt, Human
agcagaaccugcagaccugucu

SEQ ID NO: 370801 - RNA, 23 nt, Human
auugaugacuugauuacacuuuu

SEQ ID NO: 370802 - RNA, 22 nt, Human
accaugaugcauccuuaaggaa

SEQ ID NO: 370803 - RNA, 22 nt, Human
caugcugugugguuagaacugu

SEQ ID NO: 370804 - RNA, 22 nt, Human
aacaugauggggaagaacaaga

SEQ ID NO: 370805 - RNA, 22 nt, Human
caagagcuagacuuugucagga

SEQ ID NO: 370806 - RNA, 22 nt, Human
ugggcagauuaaugcaguggcu

SEQ ID NO: 370807 - RNA, 22 nt, Human
uugggguguuggauggagcaag

SEQ ID NO: 370808 - RNA, 22 nt, Human
guguguuuagcauuagcagggg

SEQ ID NO: 370809 - RNA, 22 nt, Human
gaggggcuggcacgauggcugc

SEQ ID NO: 370810 - RNA, 22 nt, Human
gcacaauaauucuuguuuugcu

SEQ ID NO: 370811 - RNA, 22 nt, Human
aagggugggcaccgccagguca

SEQ ID NO: 370812 - RNA, 22 nt, Human
ccugaggggcugcaggccagcu

SEQ ID NO: 370813 - RNA, 22 nt, Human
agggcagcacagcugugcuccu

SEQ ID NO: 370814 - RNA, 22 nt, Human
uucccaugccuggccccuaucc

SEQ ID NO: 370815 - RNA, 22 nt, Human
aacagacaacuccuguggcuca

SEQ ID NO: 370816 - RNA, 22 nt, Human
ggcccuguuagagcucccacaa

SEQ ID NO: 370817 - RNA, 22 nt, Human
gagagcuggccagcuucaguau

SEQ ID NO: 370818 - RNA, 22 nt, Human
ccucuguccuggggaguggagc

SEQ ID NO: 370819 - RNA, 21 nt, Human
cagagcagcguucugcugugg

SEQ ID NO: 370820 - RNA, 22 nt, Human
gggcuucuagaccagcagugag

SEQ ID NO: 370821 - RNA, 23 nt, Human
agucuucauuguauuuccagacc

SEQ ID NO: 370822 - RNA, 22 nt, Human
cccaggagaugcacuccauugg

SEQ ID NO: 370823 - RNA, 22 nt, Human
aucugccugagucuagguuuuc

SEQ ID NO: 370824 - RNA, 22 nt, Human
ucaggagagaguuggguaggcu

SEQ ID NO: 370825 - RNA, 22 nt, Human
caggauagaaaggccauggagu

SEQ ID NO: 370826 - RNA, 22 nt, Human
aauaauaagauacuaagggagu

SEQ ID NO: 370827 - RNA, 22 nt, Human
ugaguccaauaggggccuggaa

SEQ ID NO: 370828 - RNA, 22 nt, Human
uguuuuguuuaugagagcacag

SEQ ID NO: 370829 - RNA, 22 nt, Human
uuucaaaauuuugcagugguaa

SEQ ID NO: 370830 - RNA, 22 nt, Human
ugucccagcacuuugggagucu

SEQ ID NO: 370831 - RNA, 22 nt, Human
aagcuggcaugucaccugagaa

SEQ ID NO: 370832 - RNA, 22 nt, Human
cagaagcauuccagcaaauagu

SEQ ID NO: 370833 - RNA, 20 nt, Human
ucucaggguucagcaaagua

SEQ ID NO: 370834 - RNA, 22 nt, Human
cucuccagaucugcugagccag

SEQ ID NO: 370835 - RNA, 22 nt, Human
gccaggcuccccggaucccugg

SEQ ID NO: 370836 - RNA, 22 nt, Human
ggccccugcggacugccuagag

SEQ ID NO: 370837 - RNA, 22 nt, Human
cagaaggcauagaugaaggccu

SEQ ID NO: 370838 - RNA, 16 nt, Human
aggcucagaggcugga

SEQ ID NO: 370839 - RNA, 22 nt, Human
gaggccaggacaugaaagcuga

SEQ ID NO: 370840 - RNA, 22 nt, Human
cucagggcaguauggcugagag

SEQ ID NO: 370841 - RNA, 22 nt, Human
augcaguauaaaucauuucugg

SEQ ID NO: 370842 - RNA, 22 nt, Human
cagauauuaggagcucaauaau

SEQ ID NO: 370843 - RNA, 23 nt, Human
uccuggugacaugccugagcauc

SEQ ID NO: 370844 - RNA, 22 nt, Human
ucuaaacacgucucuuugaaua

SEQ ID NO: 370845 - RNA, 22 nt, Human
aggacugacuuuugccaugaaa

SEQ ID NO: 370846 - RNA, 22 nt, Human
aacuuaaacccacucauguaga

SEQ ID NO: 370847 - RNA, 22 nt, Human
auaaagcaaauaggacuauugc

SEQ ID NO: 370848 - RNA, 22 nt, Human
cccaguuguugccggcucugga

SEQ ID NO: 370849 - RNA, 22 nt, Human
uuucuuccuuaccuuacuagag

SEQ ID NO: 370850 - RNA, 22 nt, Human
gcugccagccaacuugcugugc

SEQ ID NO: 370851 - RNA, 22 nt, Human
gggcagcuggcuuauagguuug

SEQ ID NO: 370852 - RNA, 22 nt, Human
guccuggggaauacagaagccg

SEQ ID NO: 370853 - RNA, 22 nt, Human
auguaaggcugccuaugacacu

SEQ ID NO: 370854 - RNA, 22 nt, Human
aagaagagaaaugugcugcugg

SEQ ID NO: 370855 - RNA, 22 nt, Human
aggaagcccuugucauuucugu

SEQ ID NO: 370856 - RNA, 22 nt, Human
gcagagccuugcgucaugugcc

SEQ ID NO: 370857 - RNA, 22 nt, Human
aaggucauuguugcauguucuc

SEQ ID NO: 370858 - RNA, 22 nt, Human
gaaggagggugcggaucugagc

SEQ ID NO: 370859 - RNA, 22 nt, Human
aaaaugaggucaauauccuuuu

SEQ ID NO: 370860 - RNA, 22 nt, Human
ucuguggcacgauugcacugca

SEQ ID NO: 370861 - RNA, 22 nt, Human
uugaaaggccuguuuauccagc

SEQ ID NO: 370862 - RNA, 20 nt, Human
uguugauuggugucaucuca

SEQ ID NO: 370863 - RNA, 22 nt, Human
uguacuuccccaaugacagcac

SEQ ID NO: 370864 - RNA, 22 nt, Human
ggucccaggaagugcggcggcg

SEQ ID NO: 370865 - RNA, 22 nt, Human
aaaucaguuguuauauuaaaga

SEQ ID NO: 370866 - RNA, 22 nt, Human
cccugcagagagugcuuuugug

SEQ ID NO: 370867 - RNA, 22 nt, Human
gggcaguguggucgugccuuug

SEQ ID NO: 370868 - RNA, 23 nt, Human
ucagagaggcccccugcagagau

SEQ ID NO: 370869 - RNA, 22 nt, Human
auuucaacagaguuugaaggca

SEQ ID NO: 370870 - RNA, 22 nt, Human
uuccuuccgggcaccaggcacu

SEQ ID NO: 370871 - RNA, 21 nt, Human
aagggagauaggaaucaggcc

SEQ ID NO: 370872 - RNA, 22 nt, Human
gccugaggaaugcuccugacuu

SEQ ID NO: 370873 - RNA, 22 nt, Human
ggggcggggcucugagaagcau

SEQ ID NO: 370874 - RNA, 22 nt, Human
cauuucuguucucuuccuguac

SEQ ID NO: 370875 - RNA, 22 nt, Human
uagggcucgggcacaggacagg

SEQ ID NO: 370876 - RNA, 22 nt, Human
gagaugaauguaaacaaaggca

SEQ ID NO: 370877 - RNA, 22 nt, Human
cacccaggcuagagugcagugg

SEQ ID NO: 370878 - RNA, 22 nt, Human
uucugucacuuaggaggucaua

SEQ ID NO: 370879 - RNA, 22 nt, Human
cuggcugugcugcaggcuuugg

SEQ ID NO: 370880 - RNA, 22 nt, Human
acauuucuaguuguucaucucc

SEQ ID NO: 370881 - RNA, 22 nt, Human
auauuagguuggugcaaaagua

SEQ ID NO: 370882 - RNA, 22 nt, Human
gcagcagaguuugggagauggu

SEQ ID NO: 370883 - RNA, 22 nt, Human
ugagccuggagucguggagggg

SEQ ID NO: 370884 - RNA, 22 nt, Human
cagcaggauuugaaaggaagag

SEQ ID NO: 370885 - RNA, 22 nt, Human
uuaacauuucuuuuccacucau

SEQ ID NO: 370886 - RNA, 22 nt, Human
cacaaaugacugaaacgacugu

SEQ ID NO: 370887 - RNA, 22 nt, Human
accaggggugucaacagcauuu

SEQ ID NO: 370888 - RNA, 22 nt, Human
cagugcagguuuagggcugggg

SEQ ID NO: 370889 - RNA, 21 nt, Human
aggcucagagagaaacucuug

SEQ ID NO: 370890 - RNA, 22 nt, Human
ggcagccuugacuagugacuua

SEQ ID NO: 370891 - RNA, 22 nt, Human
gaauucugggagagaucugaca

SEQ ID NO: 370892 - RNA, 22 nt, Human
gagacacaggugguuccuguca

SEQ ID NO: 370893 - RNA, 22 nt, Human
uaaauguggagacucaggaguc

SEQ ID NO: 370894 - RNA, 22 nt, Human
uucuucuccuaaggagaguccu

SEQ ID NO: 370895 - RNA, 22 nt, Human
uggcucagaagaaaagguaaac

SEQ ID NO: 370896 - RNA, 22 nt, Human
uugcauuugaucuuggguucuc

SEQ ID NO: 370897 - RNA, 22 nt, Human
cucaggaugcaauuccaucaag

SEQ ID NO: 370898 - RNA, 22 nt, Human
ucaagcaggguagcaagcuggu

SEQ ID NO: 370899 - RNA, 19 nt, Human
agcuuccauauucucuagu

SEQ ID NO: 370900 - RNA, 22 nt, Human
aauauugagaaccagcauguuu

SEQ ID NO: 370901 - RNA, 22 nt, Human
ggaggccaucagggagggcauu

SEQ ID NO: 370902 - RNA, 22 nt, Human
cagguacauucguagacccauu

SEQ ID NO: 370903 - RNA, 22 nt, Human
guccucugggagccuugagccu

SEQ ID NO: 370904 - RNA, 22 nt, Human
ucuggcaggucaaucauucuuu

SEQ ID NO: 370905 - RNA, 22 nt, Human
ccagagagggcgccaccuggag

SEQ ID NO: 370906 - RNA, 22 nt, Human
cgggcagauugggaagguucau

SEQ ID NO: 370907 - RNA, 21 nt, Human
acccuggguucuccauacccu

SEQ ID NO: 370908 - RNA, 22 nt, Human
uaauuucuagggacuaaggugc

SEQ ID NO: 370909 - RNA, 22 nt, Human
ucugggcagcagcagcuaguag

SEQ ID NO: 370910 - RNA, 22 nt, Human
ccagcucucagcgggagacuca

SEQ ID NO: 370911 - RNA, 22 nt, Human
uagcugccuaugugauaagaga

SEQ ID NO: 370912 - RNA, 22 nt, Human
cagggccuucguaaguguccgg

SEQ ID NO: 370913 - RNA, 22 nt, Human
uucucugaguacguuucagugu

SEQ ID NO: 370914 - RNA, 22 nt, Human
aggccagccucaggcagggacc

SEQ ID NO: 370915 - RNA, 22 nt, Human
uuacaagugucagguacuggca

SEQ ID NO: 370916 - RNA, 22 nt, Human
aagggcagaaagggacgcuuug

SEQ ID NO: 370917 - RNA, 22 nt, Human
gcagugguggagcuuacauauc

SEQ ID NO: 370918 - RNA, 19 nt, Human
ugcagaggguaggaaggcc

SEQ ID NO: 370919 - RNA, 20 nt, Human
cagagcuguuauggaugaug

SEQ ID NO: 370920 - RNA, 20 nt, Human
ucuuauacagaaaacauuuu

SEQ ID NO: 370921 - RNA, 22 nt, Human
ugauuucaaguagugacaugcu

SEQ ID NO: 370922 - RNA, 22 nt, Human
uuccuaauggcaaaacauguuu

SEQ ID NO: 370923 - RNA, 22 nt, Human
ggcaugcucuuuguccacagua

SEQ ID NO: 370924 - RNA, 23 nt, Human
gggagaauaugaggaugauggug

SEQ ID NO: 370925 - RNA, 22 nt, Human
gcagagcugggucuguauccaa

SEQ ID NO: 370926 - RNA, 22 nt, Human
uaaggcacccauguucauacag

SEQ ID NO: 370927 - RNA, 22 nt, Human
uuagccauggacugaauugacu

SEQ ID NO: 370928 - RNA, 22 nt, Human
uauguacacauacacuuguaau

SEQ ID NO: 370929 - RNA, 21 nt, Human
ucagaacaauuccaugccucc

SEQ ID NO: 370930 - RNA, 22 nt, Human
aggcaauccccugaggauacuu

SEQ ID NO: 370931 - RNA, 21 nt, Human
agcugccacccuagcuucuga

SEQ ID NO: 370932 - RNA, 22 nt, Human
caggagaaauguggcugcuacc

SEQ ID NO: 370933 - RNA, 22 nt, Human
guuuaagaaaauucauguuguu

SEQ ID NO: 370934 - RNA, 18 nt, Human
caggagcaggaguugaac

SEQ ID NO: 370935 - RNA, 22 nt, Human
gaggaaaagagacagguuauug

SEQ ID NO: 370936 - RNA, 22 nt, Human
aaaugguguuucuaaugcuaga

SEQ ID NO: 370937 - RNA, 21 nt, Human
agcagcugggcaacauggagg

SEQ ID NO: 370938 - RNA, 22 nt, Human
cuuuaacaaaugacucuugucu

SEQ ID NO: 370939 - RNA, 22 nt, Human
uccucagacuucccuuugugua

SEQ ID NO: 370940 - RNA, 22 nt, Human
gcauguuuugcaacaagugacc

SEQ ID NO: 370941 - RNA, 22 nt, Human
uggcugagaaguucugguggga

SEQ ID NO: 370942 - RNA, 21 nt, Human
cugccuugaaugguacuggga

SEQ ID NO: 370943 - RNA, 22 nt, Human
gaacagaagaggcuggugccac

SEQ ID NO: 370944 - RNA, 22 nt, Human
auuauucaaucauauuaaaagu

SEQ ID NO: 370945 - RNA, 18 nt, Human
cucucuggucuggauccc

SEQ ID NO: 370946 - RNA, 22 nt, Human
cccagcuaccucugcuaggaga

SEQ ID NO: 370947 - RNA, 22 nt, Human
ugucacauguguggcauuuuuc

SEQ ID NO: 370948 - RNA, 22 nt, Human
gacaaaggaucagagguuggga

SEQ ID NO: 370949 - RNA, 22 nt, Human
gaaaugcagaaccugagaccau

SEQ ID NO: 370950 - RNA, 22 nt, Human
aagggcagcugacagaugcuua

SEQ ID NO: 370951 - RNA, 22 nt, Human
ugcugcugauggcaccuaggca

SEQ ID NO: 370952 - RNA, 22 nt, Human
agaaaucauugaauuauuugcu

SEQ ID NO: 370953 - RNA, 22 nt, Human
agcccaaggcuucccugcuggc

SEQ ID NO: 370954 - RNA, 22 nt, Human
gaaggcugcgaggggagugccg

SEQ ID NO: 370955 - RNA, 22 nt, Human
cugggcaguaugaauauucaaa

SEQ ID NO: 370956 - RNA, 21 nt, Human
aaugaaguggcuauuuugagg

SEQ ID NO: 370957 - RNA, 19 nt, Human
ccaggagagcuuggagaag

SEQ ID NO: 370958 - RNA, 22 nt, Human
aucaguuuauacuuauaaaucu

SEQ ID NO: 370959 - RNA, 22 nt, Human
acaguggaguugggguagcccu

SEQ ID NO: 370960 - RNA, 22 nt, Human
uuaaaauagccagugccccucu

SEQ ID NO: 370961 - RNA, 22 nt, Human
uuuucaguuccaucucugcucu

SEQ ID NO: 370962 - RNA, 22 nt, Human
aaucaguguguaaaguggcugc

SEQ ID NO: 370963 - RNA, 22 nt, Human
cagggcaguaccgcccucuggc

SEQ ID NO: 370964 - RNA, 22 nt, Human
gcaguggggaaugcuggggaga

SEQ ID NO: 370965 - RNA, 22 nt, Human
ggguggagaggcuaaguccagu

SEQ ID NO: 370966 - RNA, 22 nt, Human
aaggcuuuugggaauuuucaac

SEQ ID NO: 370967 - RNA, 22 nt, Human
acagauuugacugguaccuggc

SEQ ID NO: 370968 - RNA, 22 nt, Human
augcuuaaugaggguauauaug

SEQ ID NO: 370969 - RNA, 22 nt, Human
uccagugguuugaaaggggugu

SEQ ID NO: 370970 - RNA, 22 nt, Human
uuuugaauaauucagaaacagc

SEQ ID NO: 370971 - RNA, 22 nt, Human
gccuggugguauccuggcaaga

SEQ ID NO: 370972 - RNA, 22 nt, Human
uuugacaggacuaacauauggc

SEQ ID NO: 370973 - RNA, 20 nt, Human
ucagaggcugccagcugggg

SEQ ID NO: 370974 - RNA, 22 nt, Human
agagugaagguugacacuucac

SEQ ID NO: 370975 - RNA, 22 nt, Human
aaguuacuggcaagggcugcag

SEQ ID NO: 370976 - RNA, 22 nt, Human
aagggcucugugugccucccca

SEQ ID NO: 370977 - RNA, 18 nt, Human
ggcuguggacaagauuag

SEQ ID NO: 370978 - RNA, 23 nt, Human
uggcaccaggcauucuaggggua

SEQ ID NO: 370979 - RNA, 19 nt, Human
aggacucuggaggcaugag

SEQ ID NO: 370980 - RNA, 22 nt, Human
aaguucaaggcagguccugagg

SEQ ID NO: 370981 - RNA, 22 nt, Human
uagggcuauucugaguaauaau

SEQ ID NO: 370982 - RNA, 22 nt, Human
agugaccauuuucagcuagagg

SEQ ID NO: 370983 - RNA, 22 nt, Human
uccugccucaggcucuggagua

SEQ ID NO: 370984 - RNA, 22 nt, Human
ugcauggaggaagaugaaugca

SEQ ID NO: 370985 - RNA, 22 nt, Human
acagccauagaugcuuauguaa

SEQ ID NO: 370986 - RNA, 22 nt, Human
cauuuuaagaugaccugguuuc

SEQ ID NO: 370987 - RNA, 22 nt, Human
gcaggaguuaggcgucguggau

SEQ ID NO: 370988 - RNA, 22 nt, Human
cucucugaggcaggccuguggg

SEQ ID NO: 370989 - RNA, 22 nt, Human
gcugucucauacaaggcccugc

SEQ ID NO: 370990 - RNA, 22 nt, Human
gauuuacagaucuaagggucac

SEQ ID NO: 370991 - RNA, 22 nt, Human
aaagcugcugccaaucaggcuu

SEQ ID NO: 370992 - RNA, 21 nt, Human
gcucucugcaugguggcucag

SEQ ID NO: 370993 - RNA, 22 nt, Human
ggguccaggucuucaggcagag

SEQ ID NO: 370994 - RNA, 22 nt, Human
uuagucuucuuccuuauauguu

SEQ ID NO: 370995 - RNA, 17 nt, Human
cuuuuaauuuacuuccc

SEQ ID NO: 370996 - RNA, 22 nt, Human
acacagauuuuacauguuaugc

SEQ ID NO: 370997 - RNA, 22 nt, Human
gagggacagcuaaagagaaauu

SEQ ID NO: 370998 - RNA, 23 nt, Human
ucccagggaaggugagcgaggcu

SEQ ID NO: 370999 - RNA, 22 nt, Human
agugagcauucguuuggaaccc

SEQ ID NO: 371000 - RNA, 22 nt, Human
uacugaaaguggucaacagugg

SEQ ID NO: 371001 - RNA, 22 nt, Human
aagacagaccacgugacagggc

SEQ ID NO: 371002 - RNA, 22 nt, Human
acugucugcccugagaugccag

SEQ ID NO: 371003 - RNA, 22 nt, Human
cugccugugugugccugcagaa

SEQ ID NO: 371004 - RNA, 22 nt, Human
gccagcucagugccaggccccu

SEQ ID NO: 371005 - RNA, 22 nt, Human
aaauauagugacacuuauaguc

SEQ ID NO: 371006 - RNA, 22 nt, Human
auguccagagccggccugcuga

SEQ ID NO: 371007 - RNA, 21 nt, Human
gccaccucgucucggagcagc

SEQ ID NO: 371008 - RNA, 22 nt, Human
uagacagauuuaaaggaaugga

SEQ ID NO: 371009 - RNA, 22 nt, Human
ccaggcucugucuggucagaag

SEQ ID NO: 371010 - RNA, 21 nt, Human
ggggcagagcuaggcccugca

SEQ ID NO: 371011 - RNA, 22 nt, Human
aggaagcugccugggaugggaa

SEQ ID NO: 371012 - RNA, 23 nt, Human
agggcuccuuguugauuagcauu

SEQ ID NO: 371013 - RNA, 21 nt, Human
uuuuauugaugaauggccacu

SEQ ID NO: 371014 - RNA, 22 nt, Human
uacugaaauacuaagaaguuaa

SEQ ID NO: 371015 - RNA, 22 nt, Human
acuuugaaucucagauaaccaa

SEQ ID NO: 371016 - RNA, 20 nt, Human
uuucuugucggcuguugcug

SEQ ID NO: 371017 - RNA, 23 nt, Human
ccucccaggcugcgagucccgag

SEQ ID NO: 371018 - RNA, 22 nt, Human
uggcugggagcuggaacugggc

SEQ ID NO: 371019 - RNA, 22 nt, Human
agccuggaggaggaguugagca

SEQ ID NO: 371020 - RNA, 22 nt, Human
accaucagucauugucaguggg

SEQ ID NO: 371021 - RNA, 22 nt, Human
agucccagaucuacaggaggga

SEQ ID NO: 371022 - RNA, 22 nt, Human
cagauuucagcucauauauuau

SEQ ID NO: 371023 - RNA, 22 nt, Human
caggaggcaucauggagcggac

SEQ ID NO: 371024 - RNA, 22 nt, Human
aggagaggcucuaacucugugu

SEQ ID NO: 371025 - RNA, 22 nt, Human
aaucaguguggugacuugucug

SEQ ID NO: 371026 - RNA, 22 nt, Human
aggcagugagugugacuucaca

SEQ ID NO: 371027 - RNA, 19 nt, Human
ugucacugucauggcccag

SEQ ID NO: 371028 - RNA, 22 nt, Human
ugccaggagagugcaugcaggg

SEQ ID NO: 371029 - RNA, 20 nt, Human
uccuggccuucucgggcagu

SEQ ID NO: 371030 - RNA, 22 nt, Human
uuugaaauaugaggcauuauga

SEQ ID NO: 371031 - RNA, 22 nt, Human
acagccuggccugaguuaaggc

SEQ ID NO: 371032 - RNA, 20 nt, Human
uauuuagauucaaguaugga

SEQ ID NO: 371033 - RNA, 21 nt, Human
ugaagccugaggcauagcccc

SEQ ID NO: 371034 - RNA, 22 nt, Human
ugaagcaacuggacaaguuggc

SEQ ID NO: 371035 - RNA, 22 nt, Human
uauuuccaggccccacucuaga

SEQ ID NO: 371036 - RNA, 22 nt, Human
cauagaaacugagacaaggauu

SEQ ID NO: 371037 - RNA, 22 nt, Human
ugcagaagacacaagguaacgu

SEQ ID NO: 371038 - RNA, 22 nt, Human
aaucgguugaacccaggaagug

SEQ ID NO: 371039 - RNA, 22 nt, Human
gcugccucugcgacucugggcg

SEQ ID NO: 371040 - RNA, 22 nt, Human
cagacuugacggcagcugcuuu

SEQ ID NO: 371041 - RNA, 22 nt, Human
gaggcagugcauugucuagggg

SEQ ID NO: 371042 - RNA, 22 nt, Human
aagggcaggugggcauuucugg

SEQ ID NO: 371043 - RNA, 22 nt, Human
agguggagacccagagaaggcg

SEQ ID NO: 371044 - RNA, 22 nt, Human
cugucagguuggucucagagcu

SEQ ID NO: 371045 - RNA, 22 nt, Human
gggcagcucggaagugggaaag

SEQ ID NO: 371046 - RNA, 22 nt, Human
uccaguggagugugggggugaa

SEQ ID NO: 371047 - RNA, 22 nt, Human
aagggcagcuuaaauugguagc

SEQ ID NO: 371048 - RNA, 22 nt, Human
ugccugaggagucagggcaggu

SEQ ID NO: 371049 - RNA, 22 nt, Human
aguugaagguuggcugauccau

SEQ ID NO: 371050 - RNA, 22 nt, Human
gcugucugcaagccaggaaaug

SEQ ID NO: 371051 - RNA, 22 nt, Human
aucuggguucaccaugcuccug

SEQ ID NO: 371052 - RNA, 22 nt, Human
uugcagcuucgagucuaucugu

SEQ ID NO: 371053 - RNA, 22 nt, Human
uguuacacagcagaauagcaag

SEQ ID NO: 371054 - RNA, 22 nt, Human
augcaguagauaggcacuuuua

SEQ ID NO: 371055 - RNA, 19 nt, Human
uguuuuguuaaagcagucc

SEQ ID NO: 371056 - RNA, 22 nt, Human
ccagagagaaauggauuugagu

SEQ ID NO: 371057 - RNA, 22 nt, Human
ggugaggcccagugaucugugu

SEQ ID NO: 371058 - RNA, 23 nt, Human
uagaauucaaucuguuccacauc

SEQ ID NO: 371059 - RNA, 22 nt, Human
cagagaaagaagcccauucauu

SEQ ID NO: 371060 - RNA, 20 nt, Human
ugacucugcaaccgucucuc

SEQ ID NO: 371061 - RNA, 22 nt, Human
uuccaugugaguacacugugau

SEQ ID NO: 371062 - RNA, 22 nt, Human
gccugccuucggugcgcagcgg

SEQ ID NO: 371063 - RNA, 22 nt, Human
cuuccuucugaagcauagaagc

SEQ ID NO: 371064 - RNA, 22 nt, Human
ugcagcugguuuagaacuagau

SEQ ID NO: 371065 - RNA, 22 nt, Human
cagaauuuuucgaauguacugu

SEQ ID NO: 371066 - RNA, 22 nt, Human
acuuugcaaugggcagaaccca

SEQ ID NO: 371067 - RNA, 22 nt, Human
cagauaaaggcuuacuaguagu

SEQ ID NO: 371068 - RNA, 22 nt, Human
uagacacaucaaguauaguuaa

SEQ ID NO: 371069 - RNA, 22 nt, Human
ggccuuggggaggauggugucc

SEQ ID NO: 371070 - RNA, 22 nt, Human
cuggacuuuggcccaucugcca

SEQ ID NO: 371071 - RNA, 22 nt, Human
aggccugggcaagaaggggcgu

SEQ ID NO: 371072 - RNA, 21 nt, Human
ugcuuuaugggaaaaauguca

SEQ ID NO: 371073 - RNA, 22 nt, Human
gccacucaugggaggugugcaa

SEQ ID NO: 371074 - RNA, 22 nt, Human
ucugucugacaggguaugaacu

SEQ ID NO: 371075 - RNA, 22 nt, Human
ccagaggaaaaauaucucccua

SEQ ID NO: 371076 - RNA, 22 nt, Human
cugugucucuccuuacaagacu

SEQ ID NO: 371077 - RNA, 22 nt, Human
cagcuucuggcguggagccuga

SEQ ID NO: 371078 - RNA, 22 nt, Human
caguuuauuuccaagaugacaa

SEQ ID NO: 371079 - RNA, 22 nt, Human
agaaauguauucuguauguuuu

SEQ ID NO: 371080 - RNA, 22 nt, Human
uuguuucaaauauuucagaaua

SEQ ID NO: 371081 - RNA, 22 nt, Human
aaagcucuuuuccaaguauuga

SEQ ID NO: 371082 - RNA, 22 nt, Human
ucagucucuggggcuucuguuu

SEQ ID NO: 371083 - RNA, 22 nt, Human
ucacauacacuaggauauuuuu

SEQ ID NO: 371084 - RNA, 22 nt, Human
uucuuucacucaagaaggaucu

SEQ ID NO: 371085 - RNA, 22 nt, Human
gcacacacaugugaguacaugc

SEQ ID NO: 371086 - RNA, 22 nt, Human
cucccugguguccccuccagga

SEQ ID NO: 371087 - RNA, 22 nt, Human
cauucuuauauuuacucauuca

SEQ ID NO: 371088 - RNA, 22 nt, Human
aauaaauguuaagauugucuca

SEQ ID NO: 371089 - RNA, 22 nt, Human
ucugucugagggagugacauuu

SEQ ID NO: 371090 - RNA, 22 nt, Human
ccucccaccauuuagagagagc

SEQ ID NO: 371091 - RNA, 22 nt, Human
augggcagagcuggugggaggc

SEQ ID NO: 371092 - RNA, 22 nt, Human
ugugaauacagcaugugcuucu

SEQ ID NO: 371093 - RNA, 22 nt, Human
ucagagugcagcgggaggcugg

SEQ ID NO: 371094 - RNA, 22 nt, Human
caagauggaguccgggaaugug

SEQ ID NO: 371095 - RNA, 23 nt, Human
cuuuuaacuugaucugagaccag

SEQ ID NO: 371096 - RNA, 22 nt, Human
cugaggcaguuuaauuuuugaa

SEQ ID NO: 371097 - RNA, 22 nt, Human
ccugagggaggguauaggcugu

SEQ ID NO: 371098 - RNA, 21 nt, Human
accaaaaccuauacuuucugu

SEQ ID NO: 371099 - RNA, 22 nt, Human
gaucuucuauguaaugaagugu

SEQ ID NO: 371100 - RNA, 21 nt, Human
ugggcacugagggugcugcuc

SEQ ID NO: 371101 - RNA, 21 nt, Human
cugugcuucuuccuaagccag

SEQ ID NO: 371102 - RNA, 22 nt, Human
uagggcagccacccaggcugcu

SEQ ID NO: 371103 - RNA, 18 nt, Human
ggagccagucugucucug

SEQ ID NO: 371104 - RNA, 22 nt, Human
aucaggauccaccuugagccug

SEQ ID NO: 371105 - RNA, 22 nt, Human
ucuagaaauuuugccuuguauu

SEQ ID NO: 371106 - RNA, 22 nt, Human
gaaucucaaggcuugugaggau

SEQ ID NO: 371107 - RNA, 22 nt, Human
cugccugcaugcugccauagcu

SEQ ID NO: 371108 - RNA, 22 nt, Human
cagggugacugcccuggccacu

SEQ ID NO: 371109 - RNA, 22 nt, Human
cagcauggcuugaguguuuccu

SEQ ID NO: 371110 - RNA, 22 nt, Human
aggcaagcauuuaaccacucau

SEQ ID NO: 371111 - RNA, 22 nt, Human
ucuggcucuccagugcucuuag

SEQ ID NO: 371112 - RNA, 22 nt, Human
acauuaucccuggcacaacugc

SEQ ID NO: 371113 - RNA, 22 nt, Human
auuccaaacgccucgcggacuu

SEQ ID NO: 371114 - RNA, 22 nt, Human
gaggccugguagccgagcccca

SEQ ID NO: 371115 - RNA, 22 nt, Human
caagagcuacccugugccauau

SEQ ID NO: 371116 - RNA, 22 nt, Human
auggaaaggcuguggaaacuua

SEQ ID NO: 371117 - RNA, 22 nt, Human
acauuuaggauguuuugagaga

SEQ ID NO: 371118 - RNA, 22 nt, Human
ggaggccuagccagcuccaguu

SEQ ID NO: 371119 - RNA, 22 nt, Human
auaaacaguagagaaagguggu

SEQ ID NO: 371120 - RNA, 20 nt, Human
aagagaggaaguuauacuag

SEQ ID NO: 371121 - RNA, 22 nt, Human
cugcccuguuuggacagcccgg

SEQ ID NO: 371122 - RNA, 22 nt, Human
cagggcugcuggccgugcccuc

SEQ ID NO: 371123 - RNA, 22 nt, Human
agagccagagaccuggguucac

SEQ ID NO: 371124 - RNA, 21 nt, Human
augaagucuaugcuucugugu

SEQ ID NO: 371125 - RNA, 22 nt, Human
cugagguggaacagaggugaag

SEQ ID NO: 371126 - RNA, 22 nt, Human
ucucucagggggaaggcugaag

SEQ ID NO: 371127 - RNA, 22 nt, Human
ugagcccuaagggucaagcagg

SEQ ID NO: 371128 - RNA, 22 nt, Human
auaucacaaacaagucuguacu

SEQ ID NO: 371129 - RNA, 22 nt, Human
ccagcucccugaagccuggucu

SEQ ID NO: 371130 - RNA, 22 nt, Human
gucugucaucugagauggagug

SEQ ID NO: 371131 - RNA, 22 nt, Human
uaaagcacauaucuuacaauaa

SEQ ID NO: 371132 - RNA, 23 nt, Human
guuuucaacacaauaaauguaac

SEQ ID NO: 371133 - RNA, 22 nt, Human
cccugcagagaccacugaccuu

SEQ ID NO: 371134 - RNA, 22 nt, Human
auaaacagaguaguugcuacug

SEQ ID NO: 371135 - RNA, 22 nt, Human
gucacaggccuggaugaggggc

SEQ ID NO: 371136 - RNA, 22 nt, Human
ucaaauaccagcuuuuccagaa

SEQ ID NO: 371137 - RNA, 22 nt, Human
aggccuagaggaauggccaggg

SEQ ID NO: 371138 - RNA, 20 nt, Human
ggcugugcccuuccguggcc

SEQ ID NO: 371139 - RNA, 22 nt, Human
aggugcagaaaaaaguccuuua

SEQ ID NO: 371140 - RNA, 21 nt, Human
ucuugaaaauuguagcaguuu

SEQ ID NO: 371141 - RNA, 21 nt, Human
ucaguaaaccuaaagauugua

SEQ ID NO: 371142 - RNA, 22 nt, Human
uagaaacagcauauauuagccc

SEQ ID NO: 371143 - RNA, 18 nt, Human
ucugucucuguccuugcu

SEQ ID NO: 371144 - RNA, 22 nt, Human
caaauguauaaauguacuuucu

SEQ ID NO: 371145 - RNA, 22 nt, Human
gggaucagcaagccacugcacc

SEQ ID NO: 371146 - RNA, 22 nt, Human
cugagagcagggacuugagcca

SEQ ID NO: 371147 - RNA, 22 nt, Human
ugcuucaggaagaaacgccagg

SEQ ID NO: 371148 - RNA, 22 nt, Human
uuugacauugccaauuugcuca

SEQ ID NO: 371149 - RNA, 22 nt, Human
acgagagguccuuagaaucugu

SEQ ID NO: 371150 - RNA, 22 nt, Human
aaagcagcagcaccugcauuuc

SEQ ID NO: 371151 - RNA, 22 nt, Human
uucaagauaauaggaaugaaaa

SEQ ID NO: 371152 - RNA, 22 nt, Human
gugccagcaguuauggugauuu

SEQ ID NO: 371153 - RNA, 22 nt, Human
gagcagugguugaacagaggca

SEQ ID NO: 371154 - RNA, 22 nt, Human
cccaggcagggacgugcucugg

SEQ ID NO: 371155 - RNA, 22 nt, Human
gaggcucaguuaugucaucagg

SEQ ID NO: 371156 - RNA, 22 nt, Human
aggcccaguccucugccgucug

SEQ ID NO: 371157 - RNA, 22 nt, Human
agggccugggccagcacccuuu

SEQ ID NO: 371158 - RNA, 19 nt, Human
cagaaauagcgaaguguaa

SEQ ID NO: 371159 - RNA, 22 nt, Human
aagauuauggcagauaacaauu

SEQ ID NO: 371160 - RNA, 22 nt, Human
cagcagggcccccgggugcgcc

SEQ ID NO: 371161 - RNA, 22 nt, Human
acaggcuggugguccuggccau

SEQ ID NO: 371162 - RNA, 22 nt, Human
aauauaugagggagcuauuuga

SEQ ID NO: 371163 - RNA, 22 nt, Human
cccagccucugggcucacccaa

SEQ ID NO: 371164 - RNA, 22 nt, Human
gaagcucucaaacucuccccuu

SEQ ID NO: 371165 - RNA, 19 nt, Human
cucuccagcuccaguagcu

SEQ ID NO: 371166 - RNA, 22 nt, Human
auacaugugggucuaaacauau

SEQ ID NO: 371167 - RNA, 22 nt, Human
agcugcucugauaaaccuacuu

SEQ ID NO: 371168 - RNA, 22 nt, Human
aagucagagcaacugagacauu

SEQ ID NO: 371169 - RNA, 22 nt, Human
uucccaggcugugcuaccagag

SEQ ID NO: 371170 - RNA, 22 nt, Human
gcccagcaccucucucaggguu

SEQ ID NO: 371171 - RNA, 22 nt, Human
aaggcacugcuuugcugcgccc

SEQ ID NO: 371172 - RNA, 22 nt, Human
uacccagcuccucagaagacca

SEQ ID NO: 371173 - RNA, 22 nt, Human
acucuugucucaacuuuuguau

SEQ ID NO: 371174 - RNA, 18 nt, Human
acccucuggcuucugagc

SEQ ID NO: 371175 - RNA, 22 nt, Human
gaggccagaguuccccgaguca

SEQ ID NO: 371176 - RNA, 22 nt, Human
caaacugagcaucagaaaguuu

SEQ ID NO: 371177 - RNA, 22 nt, Human
cucaugauguagcgaaugagaa

SEQ ID NO: 371178 - RNA, 22 nt, Human
ccuuagagaguacugggcugcc

SEQ ID NO: 371179 - RNA, 22 nt, Human
aucagcaagauguaauuucuau

SEQ ID NO: 371180 - RNA, 22 nt, Human
ugucucaguucccuucucugga

SEQ ID NO: 371181 - RNA, 22 nt, Human
cacagccugcugcacucaagaa

SEQ ID NO: 371182 - RNA, 22 nt, Human
aaagccacguggccuggggagc

SEQ ID NO: 371183 - RNA, 22 nt, Human
ucccaggguccucuucuggaau

SEQ ID NO: 371184 - RNA, 20 nt, Human
caauuucaucauuuccugug

SEQ ID NO: 371185 - RNA, 22 nt, Human
ggcugccaggagggaggccagu

SEQ ID NO: 371186 - RNA, 22 nt, Human
uagaaucuaguucauucauuug

SEQ ID NO: 371187 - RNA, 22 nt, Human
uaacagaagagcaggcagcccu

SEQ ID NO: 371188 - RNA, 22 nt, Human
ucccacugugccuguuguaauc

SEQ ID NO: 371189 - RNA, 22 nt, Human
uuuccuaugauauucuaugugu

SEQ ID NO: 371190 - RNA, 22 nt, Human
ggacagcugcuuucaggccaca

SEQ ID NO: 371191 - RNA, 22 nt, Human
ugaggccaaugacccugggcag

SEQ ID NO: 371192 - RNA, 22 nt, Human
auaugaaaagaagucaccauug

SEQ ID NO: 371193 - RNA, 22 nt, Human
uuuccucuucuucccaugucau

SEQ ID NO: 371194 - RNA, 22 nt, Human
cagaauuuaaguggauuauucu

SEQ ID NO: 371195 - RNA, 22 nt, Human
guacagaaggagcuuuggauuc

SEQ ID NO: 371196 - RNA, 22 nt, Human
uuuccaaaguugccauaagcuu

SEQ ID NO: 371197 - RNA, 22 nt, Human
ugaguucucacccauucuucuu

SEQ ID NO: 371198 - RNA, 19 nt, Human
acaagucacuuacuuagua

SEQ ID NO: 371199 - RNA, 22 nt, Human
cuuagggagaaugccucugcag

SEQ ID NO: 371200 - RNA, 22 nt, Human
ggcugccuggaccuccucuuuc

SEQ ID NO: 371201 - RNA, 22 nt, Human
ccaucagcuccaguaucuucug

SEQ ID NO: 371202 - RNA, 22 nt, Human
ucuggauccuaugcacuggacu

SEQ ID NO: 371203 - RNA, 19 nt, Human
ccaggccaucccaguuccc

SEQ ID NO: 371204 - RNA, 22 nt, Human
cauuugaaccuggauguucuua

SEQ ID NO: 371205 - RNA, 22 nt, Human
uauguguacaucugguugagca

SEQ ID NO: 371206 - RNA, 22 nt, Human
cccaggagguuggggcuacagu

SEQ ID NO: 371207 - RNA, 22 nt, Human
gggcugaguuccugccucacuc

SEQ ID NO: 371208 - RNA, 22 nt, Human
cugugcagcuggcuuccuggaa

SEQ ID NO: 371209 - RNA, 22 nt, Human
ucuuuccuagaggcugaugagu

SEQ ID NO: 371210 - RNA, 22 nt, Human
cugaaagaauaagauguuuaca

SEQ ID NO: 371211 - RNA, 22 nt, Human
cggagggguuugaacagaggag

SEQ ID NO: 371212 - RNA, 18 nt, Human
aggccugggaagcugagg

SEQ ID NO: 371213 - RNA, 22 nt, Human
uccuggccgccgcguggggccg

SEQ ID NO: 371214 - RNA, 22 nt, Human
cucugcugcccaggccugcuag

SEQ ID NO: 371215 - RNA, 22 nt, Human
uauggcuugucuuuauaccagg

SEQ ID NO: 371216 - RNA, 22 nt, Human
ggauuuacaaguuuaacucuca

SEQ ID NO: 371217 - RNA, 22 nt, Human
aaggugucaccagauuggcagg

SEQ ID NO: 371218 - RNA, 21 nt, Human
ugaaagaaggugcagucugaa

SEQ ID NO: 371219 - RNA, 22 nt, Human
acuauacagaagaggauaggaa

SEQ ID NO: 371220 - RNA, 22 nt, Human
cuccagggagcuuggaaagacc

SEQ ID NO: 371221 - RNA, 22 nt, Human
guuccaaauuuggaucuuuagg

SEQ ID NO: 371222 - RNA, 22 nt, Human
cuucuuuacuuucuagaaauaa

SEQ ID NO: 371223 - RNA, 22 nt, Human
cugcuguggccagccaggucaa

SEQ ID NO: 371224 - RNA, 22 nt, Human
uaaaggcuucugcagggacuga

SEQ ID NO: 371225 - RNA, 18 nt, Human
uuucacaaccuccagagg

SEQ ID NO: 371226 - RNA, 22 nt, Human
gggagggaaagcuugaucuguc

SEQ ID NO: 371227 - RNA, 22 nt, Human
agggagguaggagcuucuagcu

SEQ ID NO: 371228 - RNA, 22 nt, Human
ggcagugguuagaaacaugagc

SEQ ID NO: 371229 - RNA, 22 nt, Human
caggaagcugagcugcacugca

SEQ ID NO: 371230 - RNA, 22 nt, Human
guacagaaauggggccccaggu

SEQ ID NO: 371231 - RNA, 22 nt, Human
uggagccaugccuggccuuucc

SEQ ID NO: 371232 - RNA, 22 nt, Human
uuguuaaaaugcauauucuggu

SEQ ID NO: 371233 - RNA, 22 nt, Human
acaugcuucauauuauaaccaa

SEQ ID NO: 371234 - RNA, 22 nt, Human
aacaugaaguuuucuauaguga

SEQ ID NO: 371235 - RNA, 22 nt, Human
uagggaggaggguuuucaaauc

SEQ ID NO: 371236 - RNA, 22 nt, Human
cuggccuuuuguuucuggagaa

SEQ ID NO: 371237 - RNA, 22 nt, Human
aaggcagcccuggcucagccug

SEQ ID NO: 371238 - RNA, 22 nt, Human
aaagggaggggcgauaagccgg

SEQ ID NO: 371239 - RNA, 23 nt, Human
cagaggcaucggauucaacauca

SEQ ID NO: 371240 - RNA, 22 nt, Human
cugugauuguuaguuccuauac

SEQ ID NO: 371241 - RNA, 22 nt, Human
gaggcugaggguuagagaguca

SEQ ID NO: 371242 - RNA, 22 nt, Human
caucacagauguuguguggagu

SEQ ID NO: 371243 - RNA, 23 nt, Human
uggcucugagcuuccugguggcc

SEQ ID NO: 371244 - RNA, 22 nt, Human
agauuucaauggauauugcaag

SEQ ID NO: 371245 - RNA, 22 nt, Human
aaagcagcagcacguggaagag

SEQ ID NO: 371246 - RNA, 22 nt, Human
ucgagcucuggagccaaggaug

SEQ ID NO: 371247 - RNA, 22 nt, Human
guuaggcaauaccucuuacacc

SEQ ID NO: 371248 - RNA, 22 nt, Human
cuggagcuggcuuccuuccacu

SEQ ID NO: 371249 - RNA, 23 nt, Human
gggaccugguaggaggugauugg

SEQ ID NO: 371250 - RNA, 22 nt, Human
aauguguguauuucuaggcgag

SEQ ID NO: 371251 - RNA, 22 nt, Human
gacagcagacagaacuaccugc

SEQ ID NO: 371252 - RNA, 22 nt, Human
ucagaagguggagguugcagug

SEQ ID NO: 371253 - RNA, 22 nt, Human
cagggcuccccgcaccgcagcc

SEQ ID NO: 371254 - RNA, 21 nt, Human
auuuccaaggguaccuaagau

SEQ ID NO: 371255 - RNA, 22 nt, Human
acuuccaaauaccaucacauug

SEQ ID NO: 371256 - RNA, 22 nt, Human
ggcagcuaggggcagggaauuc

SEQ ID NO: 371257 - RNA, 22 nt, Human
ugcugucaguuggcaggaugag

SEQ ID NO: 371258 - RNA, 22 nt, Human
acagaauuugcuugggcaaugg

SEQ ID NO: 371259 - RNA, 22 nt, Human
gcugcaggcauuuuccugggca

SEQ ID NO: 371260 - RNA, 19 nt, Human
cugugcuuuaaacuccuau

SEQ ID NO: 371261 - RNA, 22 nt, Human
cacaggcuccggccuugcagcc

SEQ ID NO: 371262 - RNA, 22 nt, Human
gguggccaggccagcucuggcc

SEQ ID NO: 371263 - RNA, 22 nt, Human
cauaacaguggcuucagcaagu

SEQ ID NO: 371264 - RNA, 22 nt, Human
ugaggcaggagaaucaccggaa

SEQ ID NO: 371265 - RNA, 22 nt, Human
caggacagcucaacaccuccuc

SEQ ID NO: 371266 - RNA, 22 nt, Human
aaagaaggaugggagaaauccu

SEQ ID NO: 371267 - RNA, 22 nt, Human
agccaacuaggagauuaaggua

SEQ ID NO: 371268 - RNA, 17 nt, Human
ccagagaguaguuagga

SEQ ID NO: 371269 - RNA, 22 nt, Human
cgcugccaggauccccugccgg

SEQ ID NO: 371270 - RNA, 20 nt, Human
ccugucuccucuuaccuggc

SEQ ID NO: 371271 - RNA, 22 nt, Human
acaacacagcaaaaccccaucu

SEQ ID NO: 371272 - RNA, 22 nt, Human
uagggcugccuauggcuagaua

SEQ ID NO: 371273 - RNA, 22 nt, Human
ggaggccaguccuggccgggcu

SEQ ID NO: 371274 - RNA, 22 nt, Human
aguccuuaugugguggagagag

SEQ ID NO: 371275 - RNA, 22 nt, Human
cauuguuaauugguaucuuaca

SEQ ID NO: 371276 - RNA, 22 nt, Human
ggcagauggaagaggcuggguc

SEQ ID NO: 371277 - RNA, 22 nt, Human
uugaaagggauauaucuuucug

SEQ ID NO: 371278 - RNA, 22 nt, Human
ggaggaugccaagcugugcaca

SEQ ID NO: 371279 - RNA, 22 nt, Human
gcuauacacauuucuugguagu

SEQ ID NO: 371280 - RNA, 22 nt, Human
ucugucacugagcucaggauuc

SEQ ID NO: 371281 - RNA, 22 nt, Human
ggcagaggugaaguucacaagg

SEQ ID NO: 371282 - RNA, 21 nt, Human
gccucugcugucuuauuguga

SEQ ID NO: 371283 - RNA, 22 nt, Human
uugucugaaagaucauuacauu

SEQ ID NO: 371284 - RNA, 22 nt, Human
uuucagggagccuagaagagcu

SEQ ID NO: 371285 - RNA, 22 nt, Human
ccugucacgaugacugcacucu

SEQ ID NO: 371286 - RNA, 22 nt, Human
agcugcugugugcucaggcagg

SEQ ID NO: 371287 - RNA, 22 nt, Human
uucaugugaucacagauuguaa

SEQ ID NO: 371288 - RNA, 21 nt, Human
agaagccaugugguggagaac

SEQ ID NO: 371289 - RNA, 22 nt, Human
gugucauggaaaauugcaaugg

SEQ ID NO: 371290 - RNA, 22 nt, Human
guaggaaagggagugaagggaa

SEQ ID NO: 371291 - RNA, 22 nt, Human
cucugugccucaguuuucuucu

SEQ ID NO: 371292 - RNA, 20 nt, Human
agauuauuccuaagauuucu

SEQ ID NO: 371293 - RNA, 22 nt, Human
aagcagccuggcaugaugcuuu

SEQ ID NO: 371294 - RNA, 22 nt, Human
gagccaggcccguacuugcugu

SEQ ID NO: 371295 - RNA, 17 nt, Human
cccacggaggugugaaa

SEQ ID NO: 371296 - RNA, 22 nt, Human
cagcccugagagaaccaucuau

SEQ ID NO: 371297 - RNA, 22 nt, Human
agccaaggacacggagccuccu

SEQ ID NO: 371298 - RNA, 20 nt, Human
ucugaggcugagcucuacuu

SEQ ID NO: 371299 - RNA, 22 nt, Human
uguagaaagaauauguuucaua

SEQ ID NO: 371300 - RNA, 22 nt, Human
aaauacuguagauaauagaguu

SEQ ID NO: 371301 - RNA, 22 nt, Human
augaaggauggcuggcugcccu

SEQ ID NO: 371302 - RNA, 22 nt, Human
gcagggccuuagcagcggcugc

SEQ ID NO: 371303 - RNA, 22 nt, Human
gcuccaggagagggaagcagau

SEQ ID NO: 371304 - RNA, 20 nt, Human
ucucugcuguccacauuugc

SEQ ID NO: 371305 - RNA, 22 nt, Human
ccuggaaggugaugguacagca

SEQ ID NO: 371306 - RNA, 22 nt, Human
aauaacaggcucaucagaugcu

SEQ ID NO: 371307 - RNA, 22 nt, Human
aaugcuguauaucuuagcuaau

SEQ ID NO: 371308 - RNA, 22 nt, Human
ggcuccuguccccucagcugcu

SEQ ID NO: 371309 - RNA, 22 nt, Human
ccagcagguguagggcucaugg

SEQ ID NO: 371310 - RNA, 22 nt, Human
aaccugcaguuuuuauucugag

SEQ ID NO: 371311 - RNA, 22 nt, Human
gaggcaguguuuacugcccugu

SEQ ID NO: 371312 - RNA, 22 nt, Human
ccugccagugaagcugacgggc

SEQ ID NO: 371313 - RNA, 22 nt, Human
uggauuuaccacagggccacag

SEQ ID NO: 371314 - RNA, 22 nt, Human
uguggccaccagagcugcuauu

SEQ ID NO: 371315 - RNA, 22 nt, Human
ggcugccuucccugagccccgg

SEQ ID NO: 371316 - RNA, 22 nt, Human
auuuguagugaagugaaaauaa

SEQ ID NO: 371317 - RNA, 22 nt, Human
guuagaaagugucugcuugggu

SEQ ID NO: 371318 - RNA, 22 nt, Human
ggcugucucugugacugccacc

SEQ ID NO: 371319 - RNA, 22 nt, Human
ccacguccagcuaauuuucgua

SEQ ID NO: 371320 - RNA, 21 nt, Human
ucaggggcuguguuuuccauc

SEQ ID NO: 371321 - RNA, 22 nt, Human
ggccaggagaggagggcacuga

SEQ ID NO: 371322 - RNA, 21 nt, Human
uucuuuccccagaggacuaaa

SEQ ID NO: 371323 - RNA, 22 nt, Human
ugccucugggugaccaaggagc

SEQ ID NO: 371324 - RNA, 20 nt, Human
augccucuaauuuugcaaac

SEQ ID NO: 371325 - RNA, 22 nt, Human
acagcugugaagcaagcacucu

SEQ ID NO: 371326 - RNA, 22 nt, Human
uuuguuaauucuuauguuagag

SEQ ID NO: 371327 - RNA, 22 nt, Human
gaagcuucguggcucuucaaau

SEQ ID NO: 371328 - RNA, 19 nt, Human
ggccaccucucuucccagg

SEQ ID NO: 371329 - RNA, 22 nt, Human
gcaccugggcaaggauucagag

SEQ ID NO: 371330 - RNA, 22 nt, Human
gagagcugggcuuugggugaag

SEQ ID NO: 371331 - RNA, 22 nt, Human
cuucucucccuggcacucagac

SEQ ID NO: 371332 - RNA, 22 nt, Human
ucagggcagaauccaaagaauu

SEQ ID NO: 371333 - RNA, 22 nt, Human
acagaauuuaaagcucuagacu

SEQ ID NO: 371334 - RNA, 22 nt, Human
ccaggagauuuuuccauagcac

SEQ ID NO: 371335 - RNA, 22 nt, Human
ggagggacccacucuagaggug

SEQ ID NO: 371336 - RNA, 22 nt, Human
ucauuauuuuggacuggagugu

SEQ ID NO: 371337 - RNA, 22 nt, Human
aggcagaugggagcuggaaguu

SEQ ID NO: 371338 - RNA, 22 nt, Human
uaagugcaauguuuuacuuaaa

SEQ ID NO: 371339 - RNA, 22 nt, Human
gggauggacuuggggacuccag

SEQ ID NO: 371340 - RNA, 22 nt, Human
cuuauaaaguccaucugaacaa

SEQ ID NO: 371341 - RNA, 22 nt, Human
uggcgugcccuccagacuuggc

SEQ ID NO: 371342 - RNA, 21 nt, Human
gccugcagaccccaccaggcu

SEQ ID NO: 371343 - RNA, 22 nt, Human
uuucacaucagagguagauuag

SEQ ID NO: 371344 - RNA, 22 nt, Human
ccugagggaaggaugcuaccca

SEQ ID NO: 371345 - RNA, 22 nt, Human
gcaggagagccagcaggcuucc

SEQ ID NO: 371346 - RNA, 22 nt, Human
ucagaggacgcacuaggguugu

SEQ ID NO: 371347 - RNA, 22 nt, Human
cccaguccuaaagcagacgcca

SEQ ID NO: 371348 - RNA, 22 nt, Human
gcguuaauaacauuaauaaugc

SEQ ID NO: 371349 - RNA, 23 nt, Human
cuggccuccgacacuggccaaga

SEQ ID NO: 371350 - RNA, 22 nt, Human
uugggcugaaguagagggcaga

SEQ ID NO: 371351 - RNA, 20 nt, Human
cagggcucugggccuggccu

SEQ ID NO: 371352 - RNA, 22 nt, Human
uggaaagaaaaacaggccauga

SEQ ID NO: 371353 - RNA, 22 nt, Human
ugcagucuuccagcugcacaaa

SEQ ID NO: 371354 - RNA, 22 nt, Human
cugccuugaaaaugaagcuuua

SEQ ID NO: 371355 - RNA, 22 nt, Human
ccugucuggaacauggccuguu

SEQ ID NO: 371356 - RNA, 22 nt, Human
cagcuggcauaccugggcccgg

SEQ ID NO: 371357 - RNA, 22 nt, Human
gcccagagagaugcuguagacc

SEQ ID NO: 371358 - RNA, 22 nt, Human
cugagcgcaugguugcugggga

SEQ ID NO: 371359 - RNA, 21 nt, Human
auaagcaugcugauuacauuu

SEQ ID NO: 371360 - RNA, 22 nt, Human
gcagggcaugggcccugucugc

SEQ ID NO: 371361 - RNA, 22 nt, Human
cugcagcuguagaggacagugg

SEQ ID NO: 371362 - RNA, 22 nt, Human
ugugaccucaucuuaacuggaa

SEQ ID NO: 371363 - RNA, 22 nt, Human
ucauuuuucacacagggucacc

SEQ ID NO: 371364 - RNA, 19 nt, Human
agugguagaugagcaggag

SEQ ID NO: 371365 - RNA, 22 nt, Human
uacaguaagaugaaauagcaau

SEQ ID NO: 371366 - RNA, 22 nt, Human
ggccucugcaacuggcuguggc

SEQ ID NO: 371367 - RNA, 22 nt, Human
acuguguguuugucuagcacag

SEQ ID NO: 371368 - RNA, 22 nt, Human
ucauccagccucaucaggagcu

SEQ ID NO: 371369 - RNA, 22 nt, Human
acuuucuaggucucaguccuuu

SEQ ID NO: 371370 - RNA, 16 nt, Human
ugggaccuguggccaa

SEQ ID NO: 371371 - RNA, 22 nt, Human
ggcagaaggccucccagcuccu

SEQ ID NO: 371372 - RNA, 18 nt, Human
uccugccugugccccagg

SEQ ID NO: 371373 - RNA, 22 nt, Human
ucucucagucagaugcuaaaga

SEQ ID NO: 371374 - RNA, 22 nt, Human
cagagccaggccugcccucuuu

SEQ ID NO: 371375 - RNA, 22 nt, Human
gcacagggcaacaggucuguua

SEQ ID NO: 371376 - RNA, 22 nt, Human
gcucugaggcugugaggugcug

SEQ ID NO: 371377 - RNA, 22 nt, Human
gggcuggcaucaguugccgaga

SEQ ID NO: 371378 - RNA, 22 nt, Human
uauguuaagugggauaaucaaa

SEQ ID NO: 371379 - RNA, 22 nt, Human
gaaagaagcuuuagauggcuau

SEQ ID NO: 371380 - RNA, 22 nt, Human
ggcugagccuggagcaucuggu

SEQ ID NO: 371381 - RNA, 22 nt, Human
ucaguuuucauuucaugagcag

SEQ ID NO: 371382 - RNA, 22 nt, Human
gugacagucaaagacaugacuu

SEQ ID NO: 371383 - RNA, 22 nt, Human
uguaugcaaauuuauuagcaca

SEQ ID NO: 371384 - RNA, 22 nt, Human
aagaagaugguuaacuuucagu

SEQ ID NO: 371385 - RNA, 22 nt, Human
ggucagcagugcagggcagagc

SEQ ID NO: 371386 - RNA, 22 nt, Human
uuuuccagauuggacuuagucc

SEQ ID NO: 371387 - RNA, 20 nt, Human
ucagaugggagugagccauc

SEQ ID NO: 371388 - RNA, 22 nt, Human
ugugccugaguuggcugaguac

SEQ ID NO: 371389 - RNA, 22 nt, Human
caaagccaggcuuucuaaugua

SEQ ID NO: 371390 - RNA, 22 nt, Human
ugcacauuuguuauuuugaggu

SEQ ID NO: 371391 - RNA, 23 nt, Human
uuguuuuuagagguggcaugaga

SEQ ID NO: 371392 - RNA, 22 nt, Human
auaaaauuugcuacuguuaaau

SEQ ID NO: 371393 - RNA, 22 nt, Human
aguggccagugcugcucugggg

SEQ ID NO: 371394 - RNA, 22 nt, Human
cagucccaguuugagacucugg

SEQ ID NO: 371395 - RNA, 22 nt, Human
ggaaccaguggaaugauaugcu

SEQ ID NO: 371396 - RNA, 22 nt, Human
uucagaaaaaacuucaauaagu

SEQ ID NO: 371397 - RNA, 22 nt, Human
gcucacugcaaccucugcuucc

SEQ ID NO: 371398 - RNA, 22 nt, Human
aagcugcccaagacugaagcau

SEQ ID NO: 371399 - RNA, 22 nt, Human
auucuuaauugccaugcuguau

SEQ ID NO: 371400 - RNA, 22 nt, Human
aaugaaauguagcuuauccaua

SEQ ID NO: 371401 - RNA, 22 nt, Human
uguaauauuguagugacaguac

SEQ ID NO: 371402 - RNA, 22 nt, Human
ucuucaaguuccaaagugcagg

SEQ ID NO: 371403 - RNA, 22 nt, Human
ugagcccaggaguuggagaccg

SEQ ID NO: 371404 - RNA, 22 nt, Human
aggguggccaugagggagagau

SEQ ID NO: 371405 - RNA, 22 nt, Human
aggaggcacucacucucagggu

SEQ ID NO: 371406 - RNA, 22 nt, Human
uuaaauauuuucagcaggguca

SEQ ID NO: 371407 - RNA, 22 nt, Human
cacacaugagucuccccauugg

SEQ ID NO: 371408 - RNA, 22 nt, Human
uaagucauaagucaugauguua

SEQ ID NO: 371409 - RNA, 22 nt, Human
ggaggggaacuaaucccgugac

SEQ ID NO: 371410 - RNA, 22 nt, Human
accugcagguguuuccacacuu

SEQ ID NO: 371411 - RNA, 22 nt, Human
uagcuuuagaaauauucucaga

SEQ ID NO: 371412 - RNA, 22 nt, Human
ucaaacaggacuacauucucau

SEQ ID NO: 371413 - RNA, 22 nt, Human
ggucucaggagacuggagagca

SEQ ID NO: 371414 - RNA, 22 nt, Human
aauguuuuaaaagagauugaga

SEQ ID NO: 371415 - RNA, 22 nt, Human
gacauuucaaucucauuauggg

SEQ ID NO: 371416 - RNA, 22 nt, Human
agagucuuccaggcagccugag

SEQ ID NO: 371417 - RNA, 22 nt, Human
uuucuucucacccaggacagag

SEQ ID NO: 371418 - RNA, 22 nt, Human
uaucaaaguuguccugugaagu

SEQ ID NO: 371419 - RNA, 22 nt, Human
uuucagaaagcugaacauauga

SEQ ID NO: 371420 - RNA, 22 nt, Human
uccugcagagacagaggccuca

SEQ ID NO: 371421 - RNA, 22 nt, Human
gaggcucagggaguauaugaau

SEQ ID NO: 371422 - RNA, 22 nt, Human
aaguguguauuguuuaugcugc

SEQ ID NO: 371423 - RNA, 22 nt, Human
ggccccuggcaccaggcugauu

SEQ ID NO: 371424 - RNA, 22 nt, Human
aggcagacugugcgggaagagu

SEQ ID NO: 371425 - RNA, 19 nt, Human
gccacuccugaugcugccc

SEQ ID NO: 371426 - RNA, 20 nt, Human
agugugcauuuagagucugc

SEQ ID NO: 371427 - RNA, 22 nt, Human
guuaggcaaauaacuguggagc

SEQ ID NO: 371428 - RNA, 22 nt, Human
acauucuuaacaguuaaaaacu

SEQ ID NO: 371429 - RNA, 22 nt, Human
cccaccaguacagaugguagau

SEQ ID NO: 371430 - RNA, 22 nt, Human
ccuggccucuccgaguaaccug

SEQ ID NO: 371431 - RNA, 22 nt, Human
agggccaguaccaggugggugg

SEQ ID NO: 371432 - RNA, 22 nt, Human
ucaguuucuaaaucuuaccaau

SEQ ID NO: 371433 - RNA, 22 nt, Human
uugagaagaggcuuuguaggaa

SEQ ID NO: 371434 - RNA, 22 nt, Human
acuuccuggcguagcugacauu

SEQ ID NO: 371435 - RNA, 22 nt, Human
uauaauccauucauugauuucu

SEQ ID NO: 371436 - RNA, 22 nt, Human
agcucacagaaauccugcagga

SEQ ID NO: 371437 - RNA, 22 nt, Human
uggcagagcccagaacugagca

SEQ ID NO: 371438 - RNA, 22 nt, Human
gggagggauuaguucugccugg

SEQ ID NO: 371439 - RNA, 23 nt, Human
ucugucaccuauggcugcucuuc

SEQ ID NO: 371440 - RNA, 22 nt, Human
gcuggugcauuagcugcaguuc

SEQ ID NO: 371441 - RNA, 22 nt, Human
uuugaagauaaauauggagaaa

SEQ ID NO: 371442 - RNA, 22 nt, Human
uuuccaaauaaggucacacuca

SEQ ID NO: 371443 - RNA, 22 nt, Human
uggagccugagucagcggaggc

SEQ ID NO: 371444 - RNA, 22 nt, Human
gucugagaaucuugcauaucau

SEQ ID NO: 371445 - RNA, 22 nt, Human
agcagagaagacacaggcuuca

SEQ ID NO: 371446 - RNA, 22 nt, Human
ggcccucccugagccagguggg

SEQ ID NO: 371447 - RNA, 22 nt, Human
aaucuggcucagaagaagauga

SEQ ID NO: 371448 - RNA, 22 nt, Human
gagcucccuggagguucagaua

SEQ ID NO: 371449 - RNA, 22 nt, Human
ugagccagauaagggcucacgc

SEQ ID NO: 371450 - RNA, 22 nt, Human
uaccugcacagccagccaugug

SEQ ID NO: 371451 - RNA, 22 nt, Human
ugcauuucagaagaaaauucgg

SEQ ID NO: 371452 - RNA, 22 nt, Human
auagugggaauuacgauauacu

SEQ ID NO: 371453 - RNA, 22 nt, Human
caaugugugcuuacaggccagu

SEQ ID NO: 371454 - RNA, 22 nt, Human
accucaggauguggacacagaa

SEQ ID NO: 371455 - RNA, 19 nt, Human
agcagagcagggccguggg

SEQ ID NO: 371456 - RNA, 22 nt, Human
guucuucaucauuuuagauagg

SEQ ID NO: 371457 - RNA, 22 nt, Human
ccauguggugggaaggagaaug

SEQ ID NO: 371458 - RNA, 18 nt, Human
cauuaugugguuauagaa

SEQ ID NO: 371459 - RNA, 22 nt, Human
agcugagcauuugauccaccuc

SEQ ID NO: 371460 - RNA, 22 nt, Human
auacaucuaugccuuucugaca

SEQ ID NO: 371461 - RNA, 23 nt, Human
ucacagggcacuggcugggguug

SEQ ID NO: 371462 - RNA, 22 nt, Human
gaggccuggguuggaggugcau

SEQ ID NO: 371463 - RNA, 22 nt, Human
agggcccaggacagcaucaggg

SEQ ID NO: 371464 - RNA, 22 nt, Human
gaaacuguauguaguuuuuggg

SEQ ID NO: 371465 - RNA, 22 nt, Human
agcuggccuguuagagcugagu

SEQ ID NO: 371466 - RNA, 22 nt, Human
uucuacaugguugcucagaggg

SEQ ID NO: 371467 - RNA, 22 nt, Human
caguggucugugcuucuguaca

SEQ ID NO: 371468 - RNA, 22 nt, Human
agcugcccuggcggagcugcuc

SEQ ID NO: 371469 - RNA, 22 nt, Human
uuuauuguuaucaugggugagu

SEQ ID NO: 371470 - RNA, 22 nt, Human
ucugucacccaggcuggagugc

SEQ ID NO: 371471 - RNA, 22 nt, Human
cuggggaggcagggcugccccu

SEQ ID NO: 371472 - RNA, 22 nt, Human
gagcuuaggccagggacaggga

SEQ ID NO: 371473 - RNA, 22 nt, Human
agcaggggcaggguuuugugcu

SEQ ID NO: 371474 - RNA, 22 nt, Human
agaacagaugugggcagaccug

SEQ ID NO: 371475 - RNA, 15 nt, Human
cagucccagggaccc

SEQ ID NO: 371476 - RNA, 22 nt, Human
gagugcaguaugagaggcugcu

SEQ ID NO: 371477 - RNA, 22 nt, Human
gcaaaggcuagagacacaggga

SEQ ID NO: 371478 - RNA, 22 nt, Human
agcugcucaggagagccagguc

SEQ ID NO: 371479 - RNA, 20 nt, Human
uaaggcuguuuuguauuccu

SEQ ID NO: 371480 - RNA, 22 nt, Human
acaugcauacaagcacauguag

SEQ ID NO: 371481 - RNA, 22 nt, Human
auggcaagcaagcugaagagau

SEQ ID NO: 371482 - RNA, 22 nt, Human
caagaaauguuuacugagcauc

SEQ ID NO: 371483 - RNA, 21 nt, Human
uuguucuuccagaagcaaagu

SEQ ID NO: 371484 - RNA, 22 nt, Human
caauuucuggaacuaauucuga

SEQ ID NO: 371485 - RNA, 17 nt, Human
ccagagcuacugagacu

SEQ ID NO: 371486 - RNA, 22 nt, Human
aagaugauaggacuugcuuaag

SEQ ID NO: 371487 - RNA, 22 nt, Human
gugcugucaauugcuuucagua

SEQ ID NO: 371488 - RNA, 22 nt, Human
aagugauuuguacaaaaugucg

SEQ ID NO: 371489 - RNA, 22 nt, Human
aagccgaggccacacagcagga

SEQ ID NO: 371490 - RNA, 22 nt, Human
ggagccuggcaaugcugcgucc

SEQ ID NO: 371491 - RNA, 22 nt, Human
uuacagaaggaacacuacucag

SEQ ID NO: 371492 - RNA, 22 nt, Human
gggcuggugaggcugcccugca

SEQ ID NO: 371493 - RNA, 22 nt, Human
agaaauguuuauggcugccuau

SEQ ID NO: 371494 - RNA, 22 nt, Human
aggcugagcugaccugguuugg

SEQ ID NO: 371495 - RNA, 19 nt, Human
cugcugggugcugagggag

SEQ ID NO: 371496 - RNA, 23 nt, Human
agggguggucaguacccgcagug

SEQ ID NO: 371497 - RNA, 22 nt, Human
gagagugaaggcuucccagcaa

SEQ ID NO: 371498 - RNA, 17 nt, Human
guccugggaggagagag

SEQ ID NO: 371499 - RNA, 22 nt, Human
ccaggagaugggaaaguagcag

SEQ ID NO: 371500 - RNA, 22 nt, Human
uaaaggcucguauuguugugug

SEQ ID NO: 371501 - RNA, 23 nt, Human
ucagagagcuguugagagcugcc

SEQ ID NO: 371502 - RNA, 22 nt, Human
ucauaaaguuacccaaauuuua

SEQ ID NO: 371503 - RNA, 22 nt, Human
auguucuguuuuguaauucaua

SEQ ID NO: 371504 - RNA, 21 nt, Human
uggcagggguaguaguacagc

SEQ ID NO: 371505 - RNA, 22 nt, Human
cagcugcccaggccaccuggag

SEQ ID NO: 371506 - RNA, 22 nt, Human
ggucaggguauaaucaagugag

SEQ ID NO: 371507 - RNA, 22 nt, Human
ugccaggccacguagcuucaag

SEQ ID NO: 371508 - RNA, 22 nt, Human
cugugucccccucagccaggug

SEQ ID NO: 371509 - RNA, 22 nt, Human
gcaggugggggucggugcaucu

SEQ ID NO: 371510 - RNA, 22 nt, Human
uggcuggcaguaggcuaguggc

SEQ ID NO: 371511 - RNA, 22 nt, Human
ucucagaggugcccuggcaucu

SEQ ID NO: 371512 - RNA, 22 nt, Human
ucaaaugcggucauggcuuuua

SEQ ID NO: 371513 - RNA, 22 nt, Human
cauggcuuuguucuguuagaug

SEQ ID NO: 371514 - RNA, 22 nt, Human
gaauuucaaagagguuaagagg

SEQ ID NO: 371515 - RNA, 22 nt, Human
aaaacuuucagggauacagaaa

SEQ ID NO: 371516 - RNA, 22 nt, Human
uaggagaggugaauggcacacu

SEQ ID NO: 371517 - RNA, 22 nt, Human
acauaccauacauggugagaug

SEQ ID NO: 371518 - RNA, 22 nt, Human
ccuggagcuuggucacgcugcg

SEQ ID NO: 371519 - RNA, 22 nt, Human
uauauucaaugauuaguaucag

SEQ ID NO: 371520 - RNA, 22 nt, Human
uuuauguuugacaaugaucugg

SEQ ID NO: 371521 - RNA, 21 nt, Human
uggcaggcagcuggaagcuug

SEQ ID NO: 371522 - RNA, 22 nt, Human
agggagaaugaccaagguauau

SEQ ID NO: 371523 - RNA, 22 nt, Human
auuccaaagccugaauaaugga

SEQ ID NO: 371524 - RNA, 19 nt, Human
accaggagacagugagcuu

SEQ ID NO: 371525 - RNA, 22 nt, Human
aggcucccaagcacugacccca

SEQ ID NO: 371526 - RNA, 22 nt, Human
caggguccaucuuucaucacug

SEQ ID NO: 371527 - RNA, 22 nt, Human
uucaggauggaguaccuuuuau

SEQ ID NO: 371528 - RNA, 22 nt, Human
gcucccagcaauugaggcagcc

SEQ ID NO: 371529 - RNA, 22 nt, Human
cucuggacagcaggugcugugg

SEQ ID NO: 371530 - RNA, 22 nt, Human
guucauauuacuuugagugcag

SEQ ID NO: 371531 - RNA, 22 nt, Human
gagaggaguagacacuuugguu

SEQ ID NO: 371532 - RNA, 22 nt, Human
acccaggguagaaccucagagc

SEQ ID NO: 371533 - RNA, 22 nt, Human
gcugagcucccagcaguaucug

SEQ ID NO: 371534 - RNA, 22 nt, Human
cuggaaugccucccugucagag

SEQ ID NO: 371535 - RNA, 22 nt, Human
ugugugccagccuacgaggagc

SEQ ID NO: 371536 - RNA, 22 nt, Human
uagggcuauaagagaauaagac

SEQ ID NO: 371537 - RNA, 22 nt, Human
gccagcagggcccaaaugcugg

SEQ ID NO: 371538 - RNA, 23 nt, Human
cagugcagggcaacucagacucc

SEQ ID NO: 371539 - RNA, 22 nt, Human
agugucauuuuguccaucuucu

SEQ ID NO: 371540 - RNA, 19 nt, Human
uugcauuguaguuggacug

SEQ ID NO: 371541 - RNA, 22 nt, Human
auccaugaucaauuuauuacua

SEQ ID NO: 371542 - RNA, 22 nt, Human
uggcucugagacacaggcucuc

SEQ ID NO: 371543 - RNA, 22 nt, Human
cugcugugaguuuggaggucua

SEQ ID NO: 371544 - RNA, 22 nt, Human
gcacccaggcuugggcagcaac

SEQ ID NO: 371545 - RNA, 22 nt, Human
uauguuuuucaagugcacacua

SEQ ID NO: 371546 - RNA, 22 nt, Human
ugcaaacuauugguagagaugg

SEQ ID NO: 371547 - RNA, 22 nt, Human
auacauuagcucauaugauuaa

SEQ ID NO: 371548 - RNA, 16 nt, Human
cuacccagugagaagg

SEQ ID NO: 371549 - RNA, 22 nt, Human
gagggaggcaucaugaauccag

SEQ ID NO: 371550 - RNA, 22 nt, Human
uauaauuuaucaugucacaguu

SEQ ID NO: 371551 - RNA, 22 nt, Human
ugaagcaggugaauggaugucg

SEQ ID NO: 371552 - RNA, 22 nt, Human
gcuuccuucuaccacaucaugc

SEQ ID NO: 371553 - RNA, 22 nt, Human
gcagggucgcucuaggagauca

SEQ ID NO: 371554 - RNA, 22 nt, Human
agaaaaaucuuggcgcuugucu

SEQ ID NO: 371555 - RNA, 22 nt, Human
uucagucagugacuaagcaguu

SEQ ID NO: 371556 - RNA, 22 nt, Human
cagagacagggcagggagugug

SEQ ID NO: 371557 - RNA, 22 nt, Human
cugagcugguggaagcaugcag

SEQ ID NO: 371558 - RNA, 20 nt, Human
gcugaggucauuaugccuca

SEQ ID NO: 371559 - RNA, 22 nt, Human
cauugcugugggcauuugcugc

SEQ ID NO: 371560 - RNA, 22 nt, Human
gaugcacuuucuuuucaacagu

SEQ ID NO: 371561 - RNA, 22 nt, Human
ugcauuauaacugaauguuguu

SEQ ID NO: 371562 - RNA, 19 nt, Human
aucugaaguaggugcagcu

SEQ ID NO: 371563 - RNA, 22 nt, Human
gcucugcuggagggaaagagaa

SEQ ID NO: 371564 - RNA, 22 nt, Human
aucugcaggaaugugugcagag

SEQ ID NO: 371565 - RNA, 22 nt, Human
uccugagagcagcugcuuugga

SEQ ID NO: 371566 - RNA, 22 nt, Human
uaucaauacauguuaucagugu

SEQ ID NO: 371567 - RNA, 23 nt, Human
uggcagcuguguaagagaaagca

SEQ ID NO: 371568 - RNA, 22 nt, Human
uguacauugucacucaucaagu

SEQ ID NO: 371569 - RNA, 22 nt, Human
gcaaaugcuaaaguguagagac

SEQ ID NO: 371570 - RNA, 22 nt, Human
ugcaggugguuuggacacugcu

SEQ ID NO: 371571 - RNA, 22 nt, Human
uaaugucaaggugauagauuug

SEQ ID NO: 371572 - RNA, 22 nt, Human
ugggcagagucauacaggagac

SEQ ID NO: 371573 - RNA, 22 nt, Human
gggcacuguguucagagugcag

SEQ ID NO: 371574 - RNA, 22 nt, Human
uagucccauuuugagguauuug

SEQ ID NO: 371575 - RNA, 22 nt, Human
ucagcaguggcucucaugcagu

SEQ ID NO: 371576 - RNA, 22 nt, Human
ggaggagacaguaaaaagcacg

SEQ ID NO: 371577 - RNA, 22 nt, Human
aagcaccuggguuauaucuuag

SEQ ID NO: 371578 - RNA, 22 nt, Human
cucuggaguucucaugaggaac

SEQ ID NO: 371579 - RNA, 22 nt, Human
aggcuggcgacaucuggcgggc

SEQ ID NO: 371580 - RNA, 22 nt, Human
acagggcaugugcaagagacau

SEQ ID NO: 371581 - RNA, 22 nt, Human
cauaagaagguaacauccuuaa

SEQ ID NO: 371582 - RNA, 19 nt, Human
caccacuucuuuuugcauc

SEQ ID NO: 371583 - RNA, 22 nt, Human
ggcaguggaggacccugugucu

SEQ ID NO: 371584 - RNA, 22 nt, Human
cugggccagggaggugucugua

SEQ ID NO: 371585 - RNA, 22 nt, Human
agggaaauuaaugugagcaaug

SEQ ID NO: 371586 - RNA, 19 nt, Human
uccucaggggcucacagac

SEQ ID NO: 371587 - RNA, 22 nt, Human
guccucugaaguugugcaaugc

SEQ ID NO: 371588 - RNA, 22 nt, Human
gcccacagcucguuccucuccu

SEQ ID NO: 371589 - RNA, 22 nt, Human
auuugcaugcuucuauugugaa

SEQ ID NO: 371590 - RNA, 22 nt, Human
cccagccaaggugcugguguug

SEQ ID NO: 371591 - RNA, 22 nt, Human
guguuuccucuagaagccaugg

SEQ ID NO: 371592 - RNA, 22 nt, Human
ugucagaggcucagggucucag

SEQ ID NO: 371593 - RNA, 22 nt, Human
aaaagucugcucucauuucaga

SEQ ID NO: 371594 - RNA, 22 nt, Human
gggcagaggggcgcuucccucu

SEQ ID NO: 371595 - RNA, 22 nt, Human
ggaccugcccuggcucagaugc

SEQ ID NO: 371596 - RNA, 22 nt, Human
uuaguuaguggggcugucaguc

SEQ ID NO: 371597 - RNA, 22 nt, Human
gcccugucggaacugcgaccuc

SEQ ID NO: 371598 - RNA, 22 nt, Human
uuaugauuugccacagauuggu

SEQ ID NO: 371599 - RNA, 22 nt, Human
uuccuuagugacuucuagcuac

SEQ ID NO: 371600 - RNA, 18 nt, Human
ccucacagacuuccaugu

SEQ ID NO: 371601 - RNA, 22 nt, Human
cugcuuuagacaacugcuggga

SEQ ID NO: 371602 - RNA, 22 nt, Human
ucuacagacagagcagguggga

SEQ ID NO: 371603 - RNA, 22 nt, Human
agugaaaacacuaguucuugcc

SEQ ID NO: 371604 - RNA, 22 nt, Human
caggcugcggucggcucugguc

SEQ ID NO: 371605 - RNA, 19 nt, Human
acuggcaguuucugcaugg

SEQ ID NO: 371606 - RNA, 22 nt, Human
cccugcagaucagugagaacuu

SEQ ID NO: 371607 - RNA, 22 nt, Human
uucuuaacuggaaaaugucaga

SEQ ID NO: 371608 - RNA, 22 nt, Human
ugcugcugaucauuuauagucu

SEQ ID NO: 371609 - RNA, 23 nt, Human
agugcugaauugaaagcuccagg

SEQ ID NO: 371610 - RNA, 22 nt, Human
ugaggcagcuuuuucugugugu

SEQ ID NO: 371611 - RNA, 22 nt, Human
caggcagcucuaauggaaagug

SEQ ID NO: 371612 - RNA, 22 nt, Human
ccagggcagcagaauuggggca

SEQ ID NO: 371613 - RNA, 22 nt, Human
uuggcagggccaggcucucucu

SEQ ID NO: 371614 - RNA, 22 nt, Human
guaggcagucucucaggugauc

SEQ ID NO: 371615 - RNA, 22 nt, Human
gaggccuggcucugcccuccug

SEQ ID NO: 371616 - RNA, 22 nt, Human
uaauuucaauagcuugcauaau

SEQ ID NO: 371617 - RNA, 22 nt, Human
cuggagccggaccagggacggu

SEQ ID NO: 371618 - RNA, 22 nt, Human
uuugcauuaucucacuuauaua

SEQ ID NO: 371619 - RNA, 22 nt, Human
gccugagauucccggagccgug

SEQ ID NO: 371620 - RNA, 22 nt, Human
aaucuucauuuugacaagauuc

SEQ ID NO: 371621 - RNA, 22 nt, Human
ccagccaguccagcauuggugu

SEQ ID NO: 371622 - RNA, 22 nt, Human
ccugccugcuuucugcuuugca

SEQ ID NO: 371623 - RNA, 22 nt, Human
acaggugggcuuaagagucggc

SEQ ID NO: 371624 - RNA, 22 nt, Human
augguuuaguuagggcuuuuca

SEQ ID NO: 371625 - RNA, 21 nt, Human
aaauguguuccauaaugcuuu

SEQ ID NO: 371626 - RNA, 22 nt, Human
aaggggaauagaguggguugug

SEQ ID NO: 371627 - RNA, 22 nt, Human
gagggcagaaaauuaugcggug

SEQ ID NO: 371628 - RNA, 22 nt, Human
ggaggagcacuucugagcucag

SEQ ID NO: 371629 - RNA, 19 nt, Human
cugcucaggucagucuguc

SEQ ID NO: 371630 - RNA, 22 nt, Human
uucaugaauggaaucaaugcuc

SEQ ID NO: 371631 - RNA, 22 nt, Human
auguuuuauauuuugcagcagu

SEQ ID NO: 371632 - RNA, 22 nt, Human
cuggcucaccuccgcuccagca

SEQ ID NO: 371633 - RNA, 22 nt, Human
ucccaaggcacagggcagggac

SEQ ID NO: 371634 - RNA, 22 nt, Human
ggccugcugcuaugacuuccug

SEQ ID NO: 371635 - RNA, 19 nt, Human
uguguaaagucugugguca

SEQ ID NO: 371636 - RNA, 22 nt, Human
uggcucaggagggaucuuugcu

SEQ ID NO: 371637 - RNA, 22 nt, Human
ugcuuuaucaaagcuauaguga

SEQ ID NO: 371638 - RNA, 22 nt, Human
gcaggccuccccugcuggagcu

SEQ ID NO: 371639 - RNA, 22 nt, Human
cuggagaggccccaagauauuu

SEQ ID NO: 371640 - RNA, 22 nt, Human
gugaaaauaaggcugguucuug

SEQ ID NO: 371641 - RNA, 22 nt, Human
caagcuggaguuccucagagug

SEQ ID NO: 371642 - RNA, 22 nt, Human
ccugccugauuccaggauggcu

SEQ ID NO: 371643 - RNA, 22 nt, Human
gagcucauccccaugguccguc

SEQ ID NO: 371644 - RNA, 20 nt, Human
cugagcugagcuccaugggu

SEQ ID NO: 371645 - RNA, 22 nt, Human
ucauuuaauaauuuuugaguag

SEQ ID NO: 371646 - RNA, 22 nt, Human
cuuacauugugugcaugagggg

SEQ ID NO: 371647 - RNA, 22 nt, Human
cggcagcaaaggaagccagguc

SEQ ID NO: 371648 - RNA, 22 nt, Human
cugugcuggcagaccuggaguu

SEQ ID NO: 371649 - RNA, 22 nt, Human
agacaucaaugaucagagguag

SEQ ID NO: 371650 - RNA, 22 nt, Human
auucauaaguaaaugauuaccu

SEQ ID NO: 371651 - RNA, 22 nt, Human
gaaggccacggaauggagcugg

SEQ ID NO: 371652 - RNA, 22 nt, Human
gccucucucuacccaguaugau

SEQ ID NO: 371653 - RNA, 22 nt, Human
ggcccagccggcgagucucgcg

SEQ ID NO: 371654 - RNA, 21 nt, Human
uagcacuucgcuguaauuggg

SEQ ID NO: 371655 - RNA, 19 nt, Human
aaaagucuauucaauuaca

SEQ ID NO: 371656 - RNA, 22 nt, Human
uggcagcugaggggaggcuuug

SEQ ID NO: 371657 - RNA, 22 nt, Human
gaauucugguccuguccaaggu

SEQ ID NO: 371658 - RNA, 22 nt, Human
cggggcugcgcucuuccugccg

SEQ ID NO: 371659 - RNA, 22 nt, Human
uuucucuguucucuaacuguaa

SEQ ID NO: 371660 - RNA, 22 nt, Human
ggcacugauaauguccucucuc

SEQ ID NO: 371661 - RNA, 19 nt, Human
ccagcagacacagcugccc

SEQ ID NO: 371662 - RNA, 22 nt, Human
aaguuguauauaccgcuuuaag

SEQ ID NO: 371663 - RNA, 22 nt, Human
cccaggcuggauuucgguggca

SEQ ID NO: 371664 - RNA, 22 nt, Human
acaggcuucucacagaaaaggg

SEQ ID NO: 371665 - RNA, 22 nt, Human
ggcugcuugcuguuucuuggau

SEQ ID NO: 371666 - RNA, 22 nt, Human
cugcaggauucucccaguugga

SEQ ID NO: 371667 - RNA, 22 nt, Human
ucacaucaacauuauagcauga

SEQ ID NO: 371668 - RNA, 22 nt, Human
uugaaauaucaaguuauuagug

SEQ ID NO: 371669 - RNA, 20 nt, Human
ugcaggaauuugcauuccuu

SEQ ID NO: 371670 - RNA, 22 nt, Human
gauggcagcauauugacagcau

SEQ ID NO: 371671 - RNA, 22 nt, Human
acgcagaagggccuggcgugcc

SEQ ID NO: 371672 - RNA, 22 nt, Human
aagcugcccucauucccagugc

SEQ ID NO: 371673 - RNA, 22 nt, Human
acaagccaauuacugugccagg

SEQ ID NO: 371674 - RNA, 21 nt, Human
uguaugcacgcacaugcacac

SEQ ID NO: 371675 - RNA, 22 nt, Human
cugagcuuggccaggaaugaau

SEQ ID NO: 371676 - RNA, 22 nt, Human
ggguuccuccaguuccuagagc

SEQ ID NO: 371677 - RNA, 22 nt, Human
aaggaagggaaauagugauguc

SEQ ID NO: 371678 - RNA, 22 nt, Human
gagggcugauaaaugcgcaugg

SEQ ID NO: 371679 - RNA, 21 nt, Human
aggcugcuggcucaggguccu

SEQ ID NO: 371680 - RNA, 16 nt, Human
gggcugggggauucug

SEQ ID NO: 371681 - RNA, 22 nt, Human
uuugaauguuuuagguacuuaa

SEQ ID NO: 371682 - RNA, 22 nt, Human
cuucaguuuaucccaucaucca

SEQ ID NO: 371683 - RNA, 22 nt, Human
guuucauuuacaucuguaggua

SEQ ID NO: 371684 - RNA, 22 nt, Human
cuauacagagcauccuuaacuu

SEQ ID NO: 371685 - RNA, 19 nt, Human
gcaggaaaugagugauugc

SEQ ID NO: 371686 - RNA, 22 nt, Human
ugucucugugagaucugacgau

SEQ ID NO: 371687 - RNA, 20 nt, Human
aggcaccugucacaggugag

SEQ ID NO: 371688 - RNA, 22 nt, Human
uaaguucaaugaacucaguucu

SEQ ID NO: 371689 - RNA, 22 nt, Human
ucccagagaagagcuggaugga

SEQ ID NO: 371690 - RNA, 20 nt, Human
ccugccugccucggcucauu

SEQ ID NO: 371691 - RNA, 23 nt, Human
aggcagcagguuguccaggguga

SEQ ID NO: 371692 - RNA, 22 nt, Human
gcccagaguucaaggcugcagu

SEQ ID NO: 371693 - RNA, 23 nt, Human
aauaucaaggugauguucccaga

SEQ ID NO: 371694 - RNA, 22 nt, Human
uccaaaguaauuucacuucugu

SEQ ID NO: 371695 - RNA, 22 nt, Human
cauucugcauuuggaaggggca

SEQ ID NO: 371696 - RNA, 22 nt, Human
caggccuggcccccggcacacc

SEQ ID NO: 371697 - RNA, 23 nt, Human
cagaggguuccauggagcauggu

SEQ ID NO: 371698 - RNA, 22 nt, Human
uucuggaguauuccuggcaccu

SEQ ID NO: 371699 - RNA, 20 nt, Human
gggcaguggcgcuaucucag

SEQ ID NO: 371700 - RNA, 22 nt, Human
augaguugaagcuacaagaggc

SEQ ID NO: 371701 - RNA, 22 nt, Human
gguguccucaugauuuucuaga

SEQ ID NO: 371702 - RNA, 22 nt, Human
uaaagcaguguugggucggacg

SEQ ID NO: 371703 - RNA, 22 nt, Human
agagggagcccagucauagcug

SEQ ID NO: 371704 - RNA, 22 nt, Human
auuuaagauugcguauucaugu

SEQ ID NO: 371705 - RNA, 22 nt, Human
acauuucucauaggagagccac

SEQ ID NO: 371706 - RNA, 22 nt, Human
uucaacuauuaugaauaaaauu

SEQ ID NO: 371707 - RNA, 18 nt, Human
ggcucaggcuauccuaac

SEQ ID NO: 371708 - RNA, 22 nt, Human
uggcagcucccagagcuuccaa

SEQ ID NO: 371709 - RNA, 22 nt, Human
gguccccagcaguggcugcuuc

SEQ ID NO: 371710 - RNA, 22 nt, Human
gaggggaaaguucugcacaagg

SEQ ID NO: 371711 - RNA, 22 nt, Human
uuuaacagaugugaaauuuuca

SEQ ID NO: 371712 - RNA, 22 nt, Human
ccuggaucgaugccgagggaaa

SEQ ID NO: 371713 - RNA, 22 nt, Human
ccuggccucagacagagggugg

SEQ ID NO: 371714 - RNA, 22 nt, Human
acugggccggugcagaguaguu

SEQ ID NO: 371715 - RNA, 23 nt, Human
uucuuucaagaaguucacagugc

SEQ ID NO: 371716 - RNA, 20 nt, Human
agaggccaguuaggagucua

SEQ ID NO: 371717 - RNA, 22 nt, Human
aagggcugaaugaaggguugaa

SEQ ID NO: 371718 - RNA, 22 nt, Human
uaucagaaggaagugccuuuaa

SEQ ID NO: 371719 - RNA, 22 nt, Human
cugcagcuuuggaaaccuguuu

SEQ ID NO: 371720 - RNA, 18 nt, Human
cuuguucuucucuuggcg

SEQ ID NO: 371721 - RNA, 22 nt, Human
cuggaagagcauuugcauaggg

SEQ ID NO: 371722 - RNA, 21 nt, Human
gguugguguguccaguggcca

SEQ ID NO: 371723 - RNA, 22 nt, Human
ccagaagagaucacaguucuug

SEQ ID NO: 371724 - RNA, 22 nt, Human
ccacaggcugcugcaggucccg

SEQ ID NO: 371725 - RNA, 22 nt, Human
ucacagaaauaagauaguuauu

SEQ ID NO: 371726 - RNA, 22 nt, Human
gagucacaaagccuuucuuauu

SEQ ID NO: 371727 - RNA, 22 nt, Human
gggcugacaaccaucugacaag

SEQ ID NO: 371728 - RNA, 22 nt, Human
uauuucuuguuauucucguuga

SEQ ID NO: 371729 - RNA, 22 nt, Human
cugucccaggagcuguaagaca

SEQ ID NO: 371730 - RNA, 22 nt, Human
ccagcuggugggucuuucucug

SEQ ID NO: 371731 - RNA, 22 nt, Human
aucagcaagacuaggggaauac

SEQ ID NO: 371732 - RNA, 19 nt, Human
cugccuguuauggagagaa

SEQ ID NO: 371733 - RNA, 22 nt, Human
aaggccaucuacuuacggaauu

SEQ ID NO: 371734 - RNA, 22 nt, Human
auggccuggggagcaugggaag

SEQ ID NO: 371735 - RNA, 22 nt, Human
ucaacugcaaguuugcuuaguu

SEQ ID NO: 371736 - RNA, 22 nt, Human
ggaggaccugcuggcccugcaa

SEQ ID NO: 371737 - RNA, 22 nt, Human
aggcuucacgaugggugaggug

SEQ ID NO: 371738 - RNA, 22 nt, Human
cccaggagagagacuugaaucu

SEQ ID NO: 371739 - RNA, 18 nt, Human
gccagagggaagcaggug

SEQ ID NO: 371740 - RNA, 22 nt, Human
aagagccagcuagugaagaggc

SEQ ID NO: 371741 - RNA, 22 nt, Human
ggcaggagaaaggucucuucuu

SEQ ID NO: 371742 - RNA, 22 nt, Human
gcugggcagccuggccgcugcc

SEQ ID NO: 371743 - RNA, 21 nt, Human
ugacauuuccaauauaaagcc

SEQ ID NO: 371744 - RNA, 22 nt, Human
ucuucaaaaaauauccaucagu

SEQ ID NO: 371745 - RNA, 22 nt, Human
ccugggcaacauagggagaccc

SEQ ID NO: 371746 - RNA, 21 nt, Human
cugugcuuuuuaagugugaug

SEQ ID NO: 371747 - RNA, 22 nt, Human
uguuuauucauggcuaaugaaa

SEQ ID NO: 371748 - RNA, 22 nt, Human
guaacagaaagucaugcucauu

SEQ ID NO: 371749 - RNA, 22 nt, Human
ucaauucaacacaugcacauug

SEQ ID NO: 371750 - RNA, 23 nt, Human
uaugaacugcauugcuggugugu

SEQ ID NO: 371751 - RNA, 22 nt, Human
ccaaaauuaagccucuuauguu

SEQ ID NO: 371752 - RNA, 19 nt, Human
aggacccuuauccuggcuu

SEQ ID NO: 371753 - RNA, 22 nt, Human
cugaggugagcuucccugggcu

SEQ ID NO: 371754 - RNA, 23 nt, Human
cuuuucauugccuuagcgcagag

SEQ ID NO: 371755 - RNA, 22 nt, Human
auaugaaaauguuuuagcugua

SEQ ID NO: 371756 - RNA, 22 nt, Human
cagagcucagagcagggcacuc

SEQ ID NO: 371757 - RNA, 22 nt, Human
ggacagcccauacacaugucug

SEQ ID NO: 371758 - RNA, 22 nt, Human
cucuccuugcagauggcugccu

SEQ ID NO: 371759 - RNA, 22 nt, Human
agcugcccugggucuugcugcu

SEQ ID NO: 371760 - RNA, 22 nt, Human
cacaaagucugcagcugcugua

SEQ ID NO: 371761 - RNA, 22 nt, Human
uacacauguuuggcaaguaugu

SEQ ID NO: 371762 - RNA, 22 nt, Human
gcuggccugggcucaagaccag

SEQ ID NO: 371763 - RNA, 22 nt, Human
uccuucagcuacucaguuucca

SEQ ID NO: 371764 - RNA, 22 nt, Human
uggggagugaugccucggauaa

SEQ ID NO: 371765 - RNA, 22 nt, Human
gcaguggaagccucuuuaagca

SEQ ID NO: 371766 - RNA, 22 nt, Human
ucaggcugcuguacugugaaug

SEQ ID NO: 371767 - RNA, 22 nt, Human
cucuugggagugcucuggagaa

SEQ ID NO: 371768 - RNA, 22 nt, Human
cagggccagccgcagcauccac

SEQ ID NO: 371769 - RNA, 22 nt, Human
ugggcacaggggaauggaugaa

SEQ ID NO: 371770 - RNA, 22 nt, Human
ggcaugggccgaggugccuccu

SEQ ID NO: 371771 - RNA, 22 nt, Human
ugcaggugccucuugagcuugu

SEQ ID NO: 371772 - RNA, 22 nt, Human
augacaguucuacacuuaaucu

SEQ ID NO: 371773 - RNA, 23 nt, Human
ugcucugggaggcccuggagagc

SEQ ID NO: 371774 - RNA, 22 nt, Human
ucugcgcugccuugauccuugg

SEQ ID NO: 371775 - RNA, 22 nt, Human
cacugaagccugggaguaagac

SEQ ID NO: 371776 - RNA, 22 nt, Human
caaggcaggcaguucacuugag

SEQ ID NO: 371777 - RNA, 22 nt, Human
uagcauuuauggucaugugucc

SEQ ID NO: 371778 - RNA, 19 nt, Human
ucaguggaugaacauguuu

SEQ ID NO: 371779 - RNA, 22 nt, Human
cagggcugagaauuuagagaca

SEQ ID NO: 371780 - RNA, 22 nt, Human
ugugaggagaggcccagcuccc

SEQ ID NO: 371781 - RNA, 22 nt, Human
uuguaaaugaccuuuucuaauu

SEQ ID NO: 371782 - RNA, 19 nt, Human
ucauaaggagagaggaaau

SEQ ID NO: 371783 - RNA, 20 nt, Human
uacagaaugcaauaaaaugg

SEQ ID NO: 371784 - RNA, 22 nt, Human
ucccaggguuacagccagggca

SEQ ID NO: 371785 - RNA, 22 nt, Human
gcuguuccugcuuagaggucgg

SEQ ID NO: 371786 - RNA, 22 nt, Human
ccagcuggagcucgcagauagg

SEQ ID NO: 371787 - RNA, 22 nt, Human
uuggccuuaaccucucugugcc

SEQ ID NO: 371788 - RNA, 22 nt, Human
gugucccacucuggaggugaag

SEQ ID NO: 371789 - RNA, 22 nt, Human
uuccucaggcuucccuuugucc

SEQ ID NO: 371790 - RNA, 22 nt, Human
ucuggcucucucaucacccaau

SEQ ID NO: 371791 - RNA, 22 nt, Human
acuugcugguggcauuuacagu

SEQ ID NO: 371792 - RNA, 21 nt, Human
gggcaggucucugaugucaac

SEQ ID NO: 371793 - RNA, 22 nt, Human
aguauugugacucaaguauucu

SEQ ID NO: 371794 - RNA, 22 nt, Human
acuucacacagcaaauuuaucu

SEQ ID NO: 371795 - RNA, 22 nt, Human
agaccauggccauccuaggaaa

SEQ ID NO: 371796 - RNA, 22 nt, Human
cuggguggcuguccagccagcc

SEQ ID NO: 371797 - RNA, 22 nt, Human
aaaggcuaugagauagaagaua

SEQ ID NO: 371798 - RNA, 22 nt, Human
caguggaaacuaugcugcugga

SEQ ID NO: 371799 - RNA, 22 nt, Human
ggaggccauaguuugggaguca

SEQ ID NO: 371800 - RNA, 22 nt, Human
ggcagugagcuggagggaagga

SEQ ID NO: 371801 - RNA, 22 nt, Human
aggguggcugaguagauggaag

SEQ ID NO: 371802 - RNA, 21 nt, Human
ucuuccuccacagcgugccac

SEQ ID NO: 371803 - RNA, 22 nt, Human
uaguggaggguguagcugcugg

SEQ ID NO: 371804 - RNA, 22 nt, Human
aagcagcauaauugcuauuuua

SEQ ID NO: 371805 - RNA, 19 nt, Human
auuccucaaggacagaaau

SEQ ID NO: 371806 - RNA, 22 nt, Human
uggucgaccaguuggaaaguaa

SEQ ID NO: 371807 - RNA, 18 nt, Human
cugcugcaggcacucagg

SEQ ID NO: 371808 - RNA, 22 nt, Human
gaggcagaggaagguggucucu

SEQ ID NO: 371809 - RNA, 22 nt, Human
ugagguaggugguaagagauac

SEQ ID NO: 371810 - RNA, 22 nt, Human
ugcuucugggcaaaugugugug

SEQ ID NO: 371811 - RNA, 22 nt, Human
accugccucuaagcagcaggug

SEQ ID NO: 371812 - RNA, 22 nt, Human
acacauuuacauguuuacguau

SEQ ID NO: 371813 - RNA, 22 nt, Human
ucugggaacacacgucacuuca

SEQ ID NO: 371814 - RNA, 22 nt, Human
guuuaauaauguugaauuacua

SEQ ID NO: 371815 - RNA, 22 nt, Human
cauucucaauaguagaugagua

SEQ ID NO: 371816 - RNA, 22 nt, Human
uucugugaaucuuuuuucccac

SEQ ID NO: 371817 - RNA, 22 nt, Human
cagcaggaggcauggcuucccu

SEQ ID NO: 371818 - RNA, 22 nt, Human
gaaggcugucagagaggagggc

SEQ ID NO: 371819 - RNA, 22 nt, Human
cuggcccuucucuugcuuccug

SEQ ID NO: 371820 - RNA, 22 nt, Human
uugcuuuguggugguucuucca

SEQ ID NO: 371821 - RNA, 22 nt, Human
gcugcuucucugauggagucca

SEQ ID NO: 371822 - RNA, 22 nt, Human
uaccauuucauucuuuccucau

SEQ ID NO: 371823 - RNA, 22 nt, Human
auaaacucaugccaagaaauga

SEQ ID NO: 371824 - RNA, 22 nt, Human
caugcacaaagguaagaugcgu

SEQ ID NO: 371825 - RNA, 22 nt, Human
ugucucagggcagcagcagggg

SEQ ID NO: 371826 - RNA, 22 nt, Human
ccucccucuuucagucccacag

SEQ ID NO: 371827 - RNA, 22 nt, Human
cucuggagaugguucucaauug

SEQ ID NO: 371828 - RNA, 22 nt, Human
cagaaauggagcccaggaaucu

SEQ ID NO: 371829 - RNA, 23 nt, Human
acacauuuuucccguucugaggu

SEQ ID NO: 371830 - RNA, 22 nt, Human
caaaugcauagaaagaugaaac

SEQ ID NO: 371831 - RNA, 22 nt, Human
aagcauuugugaaauucagaug

SEQ ID NO: 371832 - RNA, 22 nt, Human
gcagggccagggcucaggcugu

SEQ ID NO: 371833 - RNA, 22 nt, Human
acugucacuccaacugagucgu

SEQ ID NO: 371834 - RNA, 22 nt, Human
ggccaggcacugugugagauau

SEQ ID NO: 371835 - RNA, 19 nt, Human
cugguccugacugaggggu

SEQ ID NO: 371836 - RNA, 19 nt, Human
aagaagcaauaagcuguga

SEQ ID NO: 371837 - RNA, 22 nt, Human
acaaagugcacaagaugagaac

SEQ ID NO: 371838 - RNA, 22 nt, Human
cuguggaauugaugcuuagugu

SEQ ID NO: 371839 - RNA, 22 nt, Human
uuuaagaugguauuuuauaaag

SEQ ID NO: 371840 - RNA, 22 nt, Human
augggcagcugcagcaguggug

SEQ ID NO: 371841 - RNA, 22 nt, Human
agagccuggggauuggcaaggg

SEQ ID NO: 371842 - RNA, 22 nt, Human
ugaggcagugcugggaagccug

SEQ ID NO: 371843 - RNA, 22 nt, Human
uaaguccuagcuuugguaggaa

SEQ ID NO: 371844 - RNA, 22 nt, Human
acagccuggacuggcucucugc

SEQ ID NO: 371845 - RNA, 22 nt, Human
ccugggcauucuuugaguucuc

SEQ ID NO: 371846 - RNA, 22 nt, Human
uagggcuccacucccagagauu

SEQ ID NO: 371847 - RNA, 22 nt, Human
aaugugaucgcuuuagaagcuu

SEQ ID NO: 371848 - RNA, 22 nt, Human
gaagcagcuuucuggugaggag

SEQ ID NO: 371849 - RNA, 19 nt, Human
agggaaggauucugucauu

SEQ ID NO: 371850 - RNA, 22 nt, Human
aguucucauugcaugagacaga

SEQ ID NO: 371851 - RNA, 22 nt, Human
uguacaaugcugagguuugggg

SEQ ID NO: 371852 - RNA, 22 nt, Human
gauggcagucaaccaggugagg

SEQ ID NO: 371853 - RNA, 22 nt, Human
agagcuuagaauuucagaugau

SEQ ID NO: 371854 - RNA, 22 nt, Human
ucagggcaaaagggaaaccauu

SEQ ID NO: 371855 - RNA, 22 nt, Human
aggccuggugaaugaaguaucu

SEQ ID NO: 371856 - RNA, 22 nt, Human
aggcagcauuucugcuuaucca

SEQ ID NO: 371857 - RNA, 20 nt, Human
gggaguggugguagccugug

SEQ ID NO: 371858 - RNA, 22 nt, Human
agaagggccagcuggacaccug

SEQ ID NO: 371859 - RNA, 22 nt, Human
gcugguccacucccuggaggcu

SEQ ID NO: 371860 - RNA, 22 nt, Human
cuacagaaacacuggacaugug

SEQ ID NO: 371861 - RNA, 22 nt, Human
aucagcaaggcaaucacugcag

SEQ ID NO: 371862 - RNA, 19 nt, Human
gucacauuugucucccagg

SEQ ID NO: 371863 - RNA, 22 nt, Human
ggcucuggucagugaggggccu

SEQ ID NO: 371864 - RNA, 22 nt, Human
gagagcugugguuugaccaggc

SEQ ID NO: 371865 - RNA, 22 nt, Human
agcugcccagauaggaggaggc

SEQ ID NO: 371866 - RNA, 22 nt, Human
uuauuccauagaagucaaggaa

SEQ ID NO: 371867 - RNA, 22 nt, Human
gaggcagcagaacauggaagag

SEQ ID NO: 371868 - RNA, 22 nt, Human
uuuagggaugucagaacaggga

SEQ ID NO: 371869 - RNA, 22 nt, Human
ucaguguccggagccugagugc

SEQ ID NO: 371870 - RNA, 22 nt, Human
auccaggguguggagagagcuc

SEQ ID NO: 371871 - RNA, 22 nt, Human
uucuuucccagaagauauguuu

SEQ ID NO: 371872 - RNA, 22 nt, Human
cugcuguguuucugcuagaaaa

SEQ ID NO: 371873 - RNA, 22 nt, Human
agcugguucauucauucauggu

SEQ ID NO: 371874 - RNA, 22 nt, Human
caggagcuacucagguuggguu

SEQ ID NO: 371875 - RNA, 22 nt, Human
gacuucaaaggucaaacaucgc

SEQ ID NO: 371876 - RNA, 20 nt, Human
aagagaagaagucuuugaaa

SEQ ID NO: 371877 - RNA, 22 nt, Human
auuugcuuuaagguauaaaagg

SEQ ID NO: 371878 - RNA, 22 nt, Human
ggcuccuguggcaagacagcuu

SEQ ID NO: 371879 - RNA, 22 nt, Human
ccugccugcagaaaguaucucc

SEQ ID NO: 371880 - RNA, 22 nt, Human
uuaaagaugcagcuuuagagaa

SEQ ID NO: 371881 - RNA, 22 nt, Human
cagaaugagauaacccagauug

SEQ ID NO: 371882 - RNA, 22 nt, Human
aggagugagcuuuggggucaga

SEQ ID NO: 371883 - RNA, 22 nt, Human
ccuuuggguucaaucucggucu

SEQ ID NO: 371884 - RNA, 22 nt, Human
ugauuuccuaggucuggagaag

SEQ ID NO: 371885 - RNA, 22 nt, Human
uuguaacagcugcuuaauagag

SEQ ID NO: 371886 - RNA, 22 nt, Human
uuuaagaaguuauguuauaaau

SEQ ID NO: 371887 - RNA, 22 nt, Human
cccuggagcaucucugcugucu

SEQ ID NO: 371888 - RNA, 23 nt, Human
aggcagagccaaggucaaaaccc

SEQ ID NO: 371889 - RNA, 22 nt, Human
cccaggagguagagguugcagu

SEQ ID NO: 371890 - RNA, 22 nt, Human
auaagagcuagucuuuuccuug

SEQ ID NO: 371891 - RNA, 22 nt, Human
cauuucugauuacagaauacua

SEQ ID NO: 371892 - RNA, 22 nt, Human
agcaaaguagcugcuguucuua

SEQ ID NO: 371893 - RNA, 22 nt, Human
aggcagacaaggacacaguggg

SEQ ID NO: 371894 - RNA, 22 nt, Human
gugcuuccugccuggugccuuu

SEQ ID NO: 371895 - RNA, 22 nt, Human
cccagagcugagucugauauau

SEQ ID NO: 371896 - RNA, 22 nt, Human
aaaagagguuaaccaggugugu

SEQ ID NO: 371897 - RNA, 22 nt, Human
gaagccacaacuuuuucuuagc

SEQ ID NO: 371898 - RNA, 23 nt, Human
ccuccugggcacaggccugaugg

SEQ ID NO: 371899 - RNA, 22 nt, Human
ugggcaggagagaagcuaaaga

SEQ ID NO: 371900 - RNA, 22 nt, Human
caagagcugcaaauagcgugac

SEQ ID NO: 371901 - RNA, 22 nt, Human
ugguggcuguugcagaacugag

SEQ ID NO: 371902 - RNA, 23 nt, Human
aaggucacagaacuuagcaagcc

SEQ ID NO: 371903 - RNA, 22 nt, Human
uaaggccagccagcaaaucugu

SEQ ID NO: 371904 - RNA, 23 nt, Human
gggcagcuuaagcuuguuuuucu

SEQ ID NO: 371905 - RNA, 22 nt, Human
uggcagcugagugcacccccuc

SEQ ID NO: 371906 - RNA, 22 nt, Human
uggauuaaagauuaaaaugaca

SEQ ID NO: 371907 - RNA, 22 nt, Human
ggccuuuaagcaauugaaaaga

SEQ ID NO: 371908 - RNA, 22 nt, Human
cagagccagcaguggggacagg

SEQ ID NO: 371909 - RNA, 22 nt, Human
uugcaauagccuuauuuccaaa

SEQ ID NO: 371910 - RNA, 22 nt, Human
accaaaaauuguggggcugaau

SEQ ID NO: 371911 - RNA, 22 nt, Human
gcugccaugguccaggcuccag

SEQ ID NO: 371912 - RNA, 18 nt, Human
guucaaggucaagagaga

SEQ ID NO: 371913 - RNA, 22 nt, Human
uucuacagacuauaacugugau

SEQ ID NO: 371914 - RNA, 22 nt, Human
cccagguggguuggccucuguc

SEQ ID NO: 371915 - RNA, 21 nt, Human
aagagcugucaggaaggcugc

SEQ ID NO: 371916 - RNA, 22 nt, Human
ggugccaggcuguagucagggu

SEQ ID NO: 371917 - RNA, 22 nt, Human
agguacaguagacagacaguua

SEQ ID NO: 371918 - RNA, 22 nt, Human
uuuccuuccuugcuagccugag

SEQ ID NO: 371919 - RNA, 22 nt, Human
ccaggccuggccaggggaugcc

SEQ ID NO: 371920 - RNA, 22 nt, Human
aaauauaguaaaugcauaguuc

SEQ ID NO: 371921 - RNA, 22 nt, Human
gucauaaagcuuguugcauuua

SEQ ID NO: 371922 - RNA, 19 nt, Human
uggaccugugcccauggcu

SEQ ID NO: 371923 - RNA, 23 nt, Human
caggacaugggaggaaguauggc

SEQ ID NO: 371924 - RNA, 22 nt, Human
cagggccaagcugcagcaucug

SEQ ID NO: 371925 - RNA, 22 nt, Human
ugggaggacuugugggcuucau

SEQ ID NO: 371926 - RNA, 22 nt, Human
gcaguaggagaagaggaugcuu

SEQ ID NO: 371927 - RNA, 22 nt, Human
agucccagcucugccacuuacu

SEQ ID NO: 371928 - RNA, 22 nt, Human
caggcacuagcagaaugaggcu

SEQ ID NO: 371929 - RNA, 22 nt, Human
uggcagagguaauucaaauccc

SEQ ID NO: 371930 - RNA, 22 nt, Human
aauaguguuguucacucaggag

SEQ ID NO: 371931 - RNA, 22 nt, Human
uuccuuccauagcaaaacaugc

SEQ ID NO: 371932 - RNA, 22 nt, Human
uuaacagagugccuggcaugua

SEQ ID NO: 371933 - RNA, 22 nt, Human
uccucagaaaccccugugaggu

SEQ ID NO: 371934 - RNA, 22 nt, Human
aaaggucagacuuaggcugggc

SEQ ID NO: 371935 - RNA, 22 nt, Human
gugaagagcuguugcagagauu

SEQ ID NO: 371936 - RNA, 20 nt, Human
uccugggguaagccaugguc

SEQ ID NO: 371937 - RNA, 22 nt, Human
ggaggccaccugaccugcuguu

SEQ ID NO: 371938 - RNA, 22 nt, Human
accaggcagcacuuuccuugca

SEQ ID NO: 371939 - RNA, 22 nt, Human
auuuaaauuuucugauggagag

SEQ ID NO: 371940 - RNA, 22 nt, Human
ucaaauaaugccauucaucauc

SEQ ID NO: 371941 - RNA, 22 nt, Human
uaauagaauaguggaaacauug

SEQ ID NO: 371942 - RNA, 22 nt, Human
cagcuucugcuaucgaacaucu

SEQ ID NO: 371943 - RNA, 22 nt, Human
ugcagcccuuccuuccucuggg

SEQ ID NO: 371944 - RNA, 22 nt, Human
agccuauuccaggaugagcuca

SEQ ID NO: 371945 - RNA, 18 nt, Human
cuucagugacagucuggc

SEQ ID NO: 371946 - RNA, 20 nt, Human
ucugugugccaucaccuaac

SEQ ID NO: 371947 - RNA, 22 nt, Human
uggcagagccuugccaaacucc

SEQ ID NO: 371948 - RNA, 22 nt, Human
acaggcugacuuccugccaugu

SEQ ID NO: 371949 - RNA, 22 nt, Human
cauuuagagucuugcaauuuua

SEQ ID NO: 371950 - RNA, 20 nt, Human
uuucaguugguuaauggcau

SEQ ID NO: 371951 - RNA, 22 nt, Human
agccacagcgaaccucucuucc

SEQ ID NO: 371952 - RNA, 22 nt, Human
agaaaucagaacccugaaguuc

SEQ ID NO: 371953 - RNA, 22 nt, Human
agucauaaagccagugggaggc

SEQ ID NO: 371954 - RNA, 19 nt, Human
gcucugugaugcugagggg

SEQ ID NO: 371955 - RNA, 22 nt, Human
cuuguacaggaauccaugguau

SEQ ID NO: 371956 - RNA, 22 nt, Human
agugaaauugcuguaagaggaa

SEQ ID NO: 371957 - RNA, 22 nt, Human
ggagagaauuccauggacaugu

SEQ ID NO: 371958 - RNA, 22 nt, Human
aggucagaagugccagggaauu

SEQ ID NO: 371959 - RNA, 22 nt, Human
aaaaguguccagauuaugaaga

SEQ ID NO: 371960 - RNA, 22 nt, Human
gagcccuccauggagccaggca

SEQ ID NO: 371961 - RNA, 22 nt, Human
gaaaacacuuugaucugaaagu

SEQ ID NO: 371962 - RNA, 21 nt, Human
ucucugguuggaguugugcca

SEQ ID NO: 371963 - RNA, 22 nt, Human
cugcugugcaacauugcaccua

SEQ ID NO: 371964 - RNA, 22 nt, Human
uuuaauuuguauuucuagaggg

SEQ ID NO: 371965 - RNA, 22 nt, Human
ugagagagccugaaucucuuac

SEQ ID NO: 371966 - RNA, 22 nt, Human
aaggccagccugagagcuaaca

SEQ ID NO: 371967 - RNA, 22 nt, Human
gccugucaauuuuguguacaau

SEQ ID NO: 371968 - RNA, 22 nt, Human
uagggcagauucgguggaguuu

SEQ ID NO: 371969 - RNA, 22 nt, Human
uggcuucugcuuucaguggagg

SEQ ID NO: 371970 - RNA, 22 nt, Human
uggcacugggacagaugcucuc

SEQ ID NO: 371971 - RNA, 22 nt, Human
aggcaggugcuuaugacuugcu

SEQ ID NO: 371972 - RNA, 22 nt, Human
augggcugugagguccggcagg

SEQ ID NO: 371973 - RNA, 22 nt, Human
augauggugagguugagcacag

SEQ ID NO: 371974 - RNA, 23 nt, Human
gggaccagcuagggcugugaccu

SEQ ID NO: 371975 - RNA, 22 nt, Human
gcaaggcugugcacuuugcauu

SEQ ID NO: 371976 - RNA, 22 nt, Human
gcucugggaacugacugccuuc

SEQ ID NO: 371977 - RNA, 22 nt, Human
ucagagucauugcaaguagaag

SEQ ID NO: 371978 - RNA, 22 nt, Human
ucuuuucuggacucugcaugga

SEQ ID NO: 371979 - RNA, 22 nt, Human
auguguauacuugugcuuacuc

SEQ ID NO: 371980 - RNA, 20 nt, Human
agauggugaaggccagggag

SEQ ID NO: 371981 - RNA, 22 nt, Human
agaggccaguggcugugcuguc

SEQ ID NO: 371982 - RNA, 22 nt, Human
acacaugcauaagccuucccuu

SEQ ID NO: 371983 - RNA, 22 nt, Human
uccaggcugggcugaagggugc

SEQ ID NO: 371984 - RNA, 22 nt, Human
aaaucauguuggcacaauaaaa

SEQ ID NO: 371985 - RNA, 22 nt, Human
aguucacauuccgagguacugg

SEQ ID NO: 371986 - RNA, 22 nt, Human
aaggucauuuuuuccucuguug

SEQ ID NO: 371987 - RNA, 22 nt, Human
acagguuugucugauguaauga

SEQ ID NO: 371988 - RNA, 22 nt, Human
aauuuccagaccccauccacag

SEQ ID NO: 371989 - RNA, 22 nt, Human
gcuggccacacugcugauggag

SEQ ID NO: 371990 - RNA, 22 nt, Human
agaaaucaugucuuauuucuau

SEQ ID NO: 371991 - RNA, 22 nt, Human
acauaauagcauuucuaauuug

SEQ ID NO: 371992 - RNA, 22 nt, Human
ggagagugggagcaacuguugc

SEQ ID NO: 371993 - RNA, 22 nt, Human
gucccaggaguugcugggccuu

SEQ ID NO: 371994 - RNA, 22 nt, Human
uaucagaacacauguuuugcag

SEQ ID NO: 371995 - RNA, 22 nt, Human
uauacagauggaaagauacaca

SEQ ID NO: 371996 - RNA, 22 nt, Human
uggaauaaagugcuuugaucag

SEQ ID NO: 371997 - RNA, 22 nt, Human
gggaucagaaacauagcccuga

SEQ ID NO: 371998 - RNA, 22 nt, Human
gaaguuuauuucaaucuauuca

SEQ ID NO: 371999 - RNA, 22 nt, Human
auuauuagacuuauaugguagu

SEQ ID NO: 372000 - RNA, 22 nt, Human
uauuuugacuauuaaaccaaca

SEQ ID NO: 372001 - RNA, 22 nt, Human
cccugcagaaccacagacaaac

SEQ ID NO: 372002 - RNA, 22 nt, Human
aaugaugguauugaugagcuaa

SEQ ID NO: 372003 - RNA, 22 nt, Human
uuugacagacauuuacuacauu

SEQ ID NO: 372004 - RNA, 22 nt, Human
ccaaaguccuuucuccaccugc

SEQ ID NO: 372005 - RNA, 22 nt, Human
cuggccagguuuugaacaguug

SEQ ID NO: 372006 - RNA, 22 nt, Human
gcuuugaagacuuuuccagggu

SEQ ID NO: 372007 - RNA, 22 nt, Human
uugucuuaaauggauggacaau

SEQ ID NO: 372008 - RNA, 18 nt, Human
aguaguggguuuagcuuc

SEQ ID NO: 372009 - RNA, 22 nt, Human
agcaccauugcaaauauggcag

SEQ ID NO: 372010 - RNA, 22 nt, Human
cccaggcacaccccgaacggaa

SEQ ID NO: 372011 - RNA, 23 nt, Human
uacagaaggaguagucacuaaga

SEQ ID NO: 372012 - RNA, 22 nt, Human
gggagccaaggagagaggccuu

SEQ ID NO: 372013 - RNA, 22 nt, Human
ugaagugaccuggggcagugua

SEQ ID NO: 372014 - RNA, 22 nt, Human
aaaguuacuaucacaaugaaau

SEQ ID NO: 372015 - RNA, 22 nt, Human
gcagcugggacacugaggccag

SEQ ID NO: 372016 - RNA, 22 nt, Human
cgaggcagaggcugaaacggcu

SEQ ID NO: 372017 - RNA, 22 nt, Human
uggaguucucaggugagggcuu

SEQ ID NO: 372018 - RNA, 22 nt, Human
uucauaaucaccaaaaacugga

SEQ ID NO: 372019 - RNA, 22 nt, Human
aaggguggauuucugagcucua

SEQ ID NO: 372020 - RNA, 22 nt, Human
acacagggcggaaagcaugaga

SEQ ID NO: 372021 - RNA, 22 nt, Human
uaucuuguaauagguccacuug

SEQ ID NO: 372022 - RNA, 22 nt, Human
uugaaaaaauugguagaggaug

SEQ ID NO: 372023 - RNA, 22 nt, Human
cagucuuuguucccauuacuga

SEQ ID NO: 372024 - RNA, 21 nt, Human
agggucaggaaccaggguacc

SEQ ID NO: 372025 - RNA, 22 nt, Human
ugggcagguuguuauuugacau

SEQ ID NO: 372026 - RNA, 22 nt, Human
cagcuuugauucuuucugccau

SEQ ID NO: 372027 - RNA, 22 nt, Human
aggcaccuugcgguccagugaa

SEQ ID NO: 372028 - RNA, 22 nt, Human
cuggcagucugccucuucacug

SEQ ID NO: 372029 - RNA, 22 nt, Human
uucauuaguucugaagaugucu

SEQ ID NO: 372030 - RNA, 22 nt, Human
uccaggcaagggaggagcaugg

SEQ ID NO: 372031 - RNA, 19 nt, Human
ugcagggcugcgccugggg

SEQ ID NO: 372032 - RNA, 22 nt, Human
cugaagaugucugagaugcuca

SEQ ID NO: 372033 - RNA, 21 nt, Human
uagggcucucugugucaggug

SEQ ID NO: 372034 - RNA, 22 nt, Human
ccugcagggugcugccacagau

SEQ ID NO: 372035 - RNA, 22 nt, Human
gcagggacaucuucagaucacu

SEQ ID NO: 372036 - RNA, 22 nt, Human
gcauuucuuccuggugugagcc

SEQ ID NO: 372037 - RNA, 22 nt, Human
guugaaagaugucuugguuccc

SEQ ID NO: 372038 - RNA, 19 nt, Human
aaagcagaggagcaucuga

SEQ ID NO: 372039 - RNA, 22 nt, Human
cucaggauauugggcuggagca

SEQ ID NO: 372040 - RNA, 22 nt, Human
uggggugguaauacaccguucu

SEQ ID NO: 372041 - RNA, 22 nt, Human
aguuuagaguucaaauuaguuc

SEQ ID NO: 372042 - RNA, 22 nt, Human
uuaugacaggaaaaucacagaa

SEQ ID NO: 372043 - RNA, 22 nt, Human
aucaggauagucuguaaauugu

SEQ ID NO: 372044 - RNA, 22 nt, Human
aggcaacuguuugauaauguug

SEQ ID NO: 372045 - RNA, 22 nt, Human
gacaauacagaaagggacaugc

SEQ ID NO: 372046 - RNA, 22 nt, Human
cuacauaaauauuuaugugucu

SEQ ID NO: 372047 - RNA, 22 nt, Human
ccucacucugcacccugcagca

SEQ ID NO: 372048 - RNA, 22 nt, Human
cuuguccccagcagguugguuu

SEQ ID NO: 372049 - RNA, 22 nt, Human
gguuuaauggagauauuucaga

SEQ ID NO: 372050 - RNA, 22 nt, Human
auagaaaacagauguccuuaaa

SEQ ID NO: 372051 - RNA, 22 nt, Human
uagggcagccuuauagcuccca

SEQ ID NO: 372052 - RNA, 22 nt, Human
ucuaauccuugcuaccugggug

SEQ ID NO: 372053 - RNA, 22 nt, Human
gacagacauuuccugauccaau

SEQ ID NO: 372054 - RNA, 22 nt, Human
cagagguaccagcagccucugg

SEQ ID NO: 372055 - RNA, 22 nt, Human
aauuaacagagggcuuauuacu

SEQ ID NO: 372056 - RNA, 22 nt, Human
ggccuguguccuccuugcccug

SEQ ID NO: 372057 - RNA, 22 nt, Human
gcagaggcucuuuaaugcuuag

SEQ ID NO: 372058 - RNA, 22 nt, Human
uccagugguacauggagacacu

SEQ ID NO: 372059 - RNA, 22 nt, Human
cuacccaggcuggagugcagua

SEQ ID NO: 372060 - RNA, 22 nt, Human
aaaugcagauugucauucagga

SEQ ID NO: 372061 - RNA, 22 nt, Human
cugaggcacagugaacuucucc

SEQ ID NO: 372062 - RNA, 21 nt, Human
ucagggcagugggagguuccu

SEQ ID NO: 372063 - RNA, 23 nt, Human
aaacugcuuccaauuccugccau

SEQ ID NO: 372064 - RNA, 22 nt, Human
gcauuuguguucuuccuagagc

SEQ ID NO: 372065 - RNA, 22 nt, Human
ccugcagaccacacucaguccu

SEQ ID NO: 372066 - RNA, 22 nt, Human
ccacccugagccgcaagagcag

SEQ ID NO: 372067 - RNA, 22 nt, Human
gcucugggugaacuuggagcaa

SEQ ID NO: 372068 - RNA, 22 nt, Human
uugaaguuguaguucagugaag

SEQ ID NO: 372069 - RNA, 17 nt, Human
gaauuucuuggucaaaa

SEQ ID NO: 372070 - RNA, 22 nt, Human
cacaauuuggugcuaaagaaag

SEQ ID NO: 372071 - RNA, 22 nt, Human
ugcuuuaaaauggacuguuuug

SEQ ID NO: 372072 - RNA, 20 nt, Human
aaguuuucuccaaauacagu

SEQ ID NO: 372073 - RNA, 22 nt, Human
ucugucacuuuuauuuacugaa

SEQ ID NO: 372074 - RNA, 22 nt, Human
auaaauuuauaauuguuuccug

SEQ ID NO: 372075 - RNA, 22 nt, Human
uguuuucagucauauagcaggu

SEQ ID NO: 372076 - RNA, 22 nt, Human
caggaugguggcaugaucagaa

SEQ ID NO: 372077 - RNA, 20 nt, Human
aagggagaauaaugauugua

SEQ ID NO: 372078 - RNA, 22 nt, Human
ccaggagucaauaaaggaagcu

SEQ ID NO: 372079 - RNA, 22 nt, Human
gguggccucucaugcaagguag

SEQ ID NO: 372080 - RNA, 22 nt, Human
uuugcaguuucauugcugaaau

SEQ ID NO: 372081 - RNA, 22 nt, Human
aggcccagagagccaguuagug

SEQ ID NO: 372082 - RNA, 22 nt, Human
ugcagggcuaagucagagccug

SEQ ID NO: 372083 - RNA, 22 nt, Human
uuuucauuagaaugacugagaa

SEQ ID NO: 372084 - RNA, 19 nt, Human
ggcucucccuugagagagc

SEQ ID NO: 372085 - RNA, 21 nt, Human
agcuggugucagagcucuggg

SEQ ID NO: 372086 - RNA, 22 nt, Human
uccuguguuacugccuggagcg

SEQ ID NO: 372087 - RNA, 22 nt, Human
cucuggaguggguggccgggag

SEQ ID NO: 372088 - RNA, 22 nt, Human
gggugcugacuggggccugaaa

SEQ ID NO: 372089 - RNA, 22 nt, Human
gagcagggagacaacucuggug

SEQ ID NO: 372090 - RNA, 22 nt, Human
cauuuucagcacccaucugaaa

SEQ ID NO: 372091 - RNA, 22 nt, Human
ggagccagagucugcaguguaa

SEQ ID NO: 372092 - RNA, 22 nt, Human
gcuggcagucccaucagcuggg

SEQ ID NO: 372093 - RNA, 22 nt, Human
uccugcugagcgucugucauuu

SEQ ID NO: 372094 - RNA, 22 nt, Human
uaucuacuccucuuucagaugc

SEQ ID NO: 372095 - RNA, 22 nt, Human
gagccucguggcggccacugcg

SEQ ID NO: 372096 - RNA, 18 nt, Human
aggcagcagcaucuucuc

SEQ ID NO: 372097 - RNA, 22 nt, Human
gggacuggcacagggcugggag

SEQ ID NO: 372098 - RNA, 22 nt, Human
cugggcuggagugcaauggcgc

SEQ ID NO: 372099 - RNA, 22 nt, Human
caaaauuguugaugcugcuuug

SEQ ID NO: 372100 - RNA, 22 nt, Human
guggccaggccgacugccaggc

SEQ ID NO: 372101 - RNA, 22 nt, Human
agcucauggugcuaucucaggg

SEQ ID NO: 372102 - RNA, 22 nt, Human
gcagaggaggacccaggaauua

SEQ ID NO: 372103 - RNA, 16 nt, Human
uccaggcauaucugag

SEQ ID NO: 372104 - RNA, 22 nt, Human
caguagcauguaauaaagacag

SEQ ID NO: 372105 - RNA, 22 nt, Human
auuaaaauuccaagguaugcca

SEQ ID NO: 372106 - RNA, 22 nt, Human
uguggugagaaacugguagauu

SEQ ID NO: 372107 - RNA, 22 nt, Human
uugcauaaaagaguauaucuua

SEQ ID NO: 372108 - RNA, 22 nt, Human
uggagccuguguuucugcccag

SEQ ID NO: 372109 - RNA, 22 nt, Human
auuuucugguugagguuuaaca

SEQ ID NO: 372110 - RNA, 22 nt, Human
uucuuucccuuccagcagcucc

SEQ ID NO: 372111 - RNA, 22 nt, Human
cagggccauaucuugugcacca

SEQ ID NO: 372112 - RNA, 22 nt, Human
cagucaccauagaauaaaacau

SEQ ID NO: 372113 - RNA, 22 nt, Human
acacugaagagcacuuucaaag

SEQ ID NO: 372114 - RNA, 22 nt, Human
guaggcagguggaggagugaag

SEQ ID NO: 372115 - RNA, 22 nt, Human
agauuucucuuucccuggcuga

SEQ ID NO: 372116 - RNA, 22 nt, Human
gggcauggaggucugucugcag

SEQ ID NO: 372117 - RNA, 19 nt, Human
cugagcagcggcagcacuu

SEQ ID NO: 372118 - RNA, 22 nt, Human
agaaacagcauuagcaucaauu

SEQ ID NO: 372119 - RNA, 22 nt, Human
cagaguguugaccauaagccca

SEQ ID NO: 372120 - RNA, 22 nt, Human
cuucuucaauagcaagcgcaua

SEQ ID NO: 372121 - RNA, 22 nt, Human
aggaaucccgcaccagcugcug

SEQ ID NO: 372122 - RNA, 22 nt, Human
gugccugccccacuccucagca

SEQ ID NO: 372123 - RNA, 22 nt, Human
ugguaauuaauuugauagguuc

SEQ ID NO: 372124 - RNA, 22 nt, Human
uagcauaacagguaagagugag

SEQ ID NO: 372125 - RNA, 22 nt, Human
cugucauuuaagacauucugga

SEQ ID NO: 372126 - RNA, 22 nt, Human
ugaggaagccaaacagcuacac

SEQ ID NO: 372127 - RNA, 22 nt, Human
aaggcacuagcaagcugccugg

SEQ ID NO: 372128 - RNA, 22 nt, Human
uucauguguauggaacauuuuu

SEQ ID NO: 372129 - RNA, 22 nt, Human
ucuuuauuuaagucuguuguaa

SEQ ID NO: 372130 - RNA, 22 nt, Human
uuaaagaauagugccccuauug

SEQ ID NO: 372131 - RNA, 22 nt, Human
agggccaccagagcagggcagu

SEQ ID NO: 372132 - RNA, 22 nt, Human
uacagagaguacagcauccaca

SEQ ID NO: 372133 - RNA, 22 nt, Human
uugaaggacaucuuguuucuag

SEQ ID NO: 372134 - RNA, 22 nt, Human
cugggagucaccaggagcaagg

SEQ ID NO: 372135 - RNA, 23 nt, Human
aucaaaggauguagagaagaagc

SEQ ID NO: 372136 - RNA, 22 nt, Human
gaugagggccugguggcugugc

SEQ ID NO: 372137 - RNA, 22 nt, Human
gaauacaaacuuaaggcuuuac

SEQ ID NO: 372138 - RNA, 22 nt, Human
uccuguggaagacaguguuggg

SEQ ID NO: 372139 - RNA, 22 nt, Human
ugggcugcacccucagccucug

SEQ ID NO: 372140 - RNA, 22 nt, Human
gcucccagcauugcugcugaau

SEQ ID NO: 372141 - RNA, 17 nt, Human
aaucuguuuacagucag

SEQ ID NO: 372142 - RNA, 22 nt, Human
ugcagcuguuacggacccuguc

SEQ ID NO: 372143 - RNA, 22 nt, Human
cagaagagaugaaauaguauua

SEQ ID NO: 372144 - RNA, 22 nt, Human
aaaugcacaggagaaccaauuc

SEQ ID NO: 372145 - RNA, 20 nt, Human
cagggcacacugcagccucg

SEQ ID NO: 372146 - RNA, 22 nt, Human
aagucauugguagcuugauagg

SEQ ID NO: 372147 - RNA, 22 nt, Human
ucuggcuccaggaccgggcaca

SEQ ID NO: 372148 - RNA, 22 nt, Human
uagggcucagagaaguggggcc

SEQ ID NO: 372149 - RNA, 21 nt, Human
aacauuucugggagaacucac

SEQ ID NO: 372150 - RNA, 22 nt, Human
cccagccucuggguucugccgg

SEQ ID NO: 372151 - RNA, 22 nt, Human
ucagcugccucucccuggaaga

SEQ ID NO: 372152 - RNA, 22 nt, Human
ucauuuguaccauuuuuuaaga

SEQ ID NO: 372153 - RNA, 22 nt, Human
agucacccuccaacucuccacu

SEQ ID NO: 372154 - RNA, 22 nt, Human
accagagcagacuacuggaggu

SEQ ID NO: 372155 - RNA, 22 nt, Human
ucugucacuauuggccagaaca

SEQ ID NO: 372156 - RNA, 22 nt, Human
aggaggccgggauucuggagau

SEQ ID NO: 372157 - RNA, 22 nt, Human
ugggugcuucgucagcucugag

SEQ ID NO: 372158 - RNA, 19 nt, Human
caaggccaccauuucuccg

SEQ ID NO: 372159 - RNA, 22 nt, Human
cagcccugagaaggaggaucuc

SEQ ID NO: 372160 - RNA, 22 nt, Human
uugaagcagcucaggaggcuua

SEQ ID NO: 372161 - RNA, 22 nt, Human
guggcucuaggugagcauggag

SEQ ID NO: 372162 - RNA, 22 nt, Human
uccaggcuagaagucacaggcc

SEQ ID NO: 372163 - RNA, 22 nt, Human
accaggcuggagugcaguggcg

SEQ ID NO: 372164 - RNA, 22 nt, Human
aaaauugaggcucauguuaaau

SEQ ID NO: 372165 - RNA, 18 nt, Human
auuguuaauagaguacuu

SEQ ID NO: 372166 - RNA, 23 nt, Human
agaagcagcuucuggaguaucgg

SEQ ID NO: 372167 - RNA, 20 nt, Human
ugugcccaauguccagguuc

SEQ ID NO: 372168 - RNA, 22 nt, Human
guaaacauuacugugcuguaua

SEQ ID NO: 372169 - RNA, 22 nt, Human
caccugagugucaguauucuca

SEQ ID NO: 372170 - RNA, 22 nt, Human
auuccaaagguuaaugcccauu

SEQ ID NO: 372171 - RNA, 22 nt, Human
ugccugucagggggagugggaa

SEQ ID NO: 372172 - RNA, 22 nt, Human
gcagcagagaacacaaugaugg

SEQ ID NO: 372173 - RNA, 22 nt, Human
cuuugcaaacugucacacuuuc

SEQ ID NO: 372174 - RNA, 22 nt, Human
gccugcagggugaugggcugcc

SEQ ID NO: 372175 - RNA, 22 nt, Human
gaggcacuggaggaaaggagaa

SEQ ID NO: 372176 - RNA, 22 nt, Human
agccaggccuuuucucaagguu

SEQ ID NO: 372177 - RNA, 22 nt, Human
uacauguuuacuccaagucagg

SEQ ID NO: 372178 - RNA, 22 nt, Human
uacagaauuagauuauuagaga

SEQ ID NO: 372179 - RNA, 20 nt, Human
aagauucauuguaauuaggg

SEQ ID NO: 372180 - RNA, 21 nt, Human
uuucaauguguucuuuguagu

SEQ ID NO: 372181 - RNA, 22 nt, Human
uuucaguuguccuguuaauagc

SEQ ID NO: 372182 - RNA, 22 nt, Human
ccacugggggcugcaggcacuc

SEQ ID NO: 372183 - RNA, 22 nt, Human
gcacaauuauuuaugcaguaug

SEQ ID NO: 372184 - RNA, 22 nt, Human
guuuucuuugaaugcuucuaga

SEQ ID NO: 372185 - RNA, 22 nt, Human
aaaggcaugauuaauucugugu

SEQ ID NO: 372186 - RNA, 22 nt, Human
cagaaauggaauuuuccaucac

SEQ ID NO: 372187 - RNA, 22 nt, Human
ccccaccugugcgucugccgca

SEQ ID NO: 372188 - RNA, 22 nt, Human
uccucagacacccugcuggcuu

SEQ ID NO: 372189 - RNA, 22 nt, Human
uccaagggcagccauagaacuu

SEQ ID NO: 372190 - RNA, 22 nt, Human
uccuggcccacuaugccagcau

SEQ ID NO: 372191 - RNA, 22 nt, Human
gggcacugcuggaggcucccug

SEQ ID NO: 372192 - RNA, 22 nt, Human
gagcacaggcuuugguggacac

SEQ ID NO: 372193 - RNA, 21 nt, Human
uggcugcuggcccucucucca

SEQ ID NO: 372194 - RNA, 20 nt, Human
caucagaaauccugacccac

SEQ ID NO: 372195 - RNA, 22 nt, Human
ugcugagcgcauccggcggccg

SEQ ID NO: 372196 - RNA, 22 nt, Human
aggcucagucuguucaugcacu

SEQ ID NO: 372197 - RNA, 22 nt, Human
acaggugaccugcucauaugaa

SEQ ID NO: 372198 - RNA, 22 nt, Human
aaucagaacgcucgaucuucgg

SEQ ID NO: 372199 - RNA, 22 nt, Human
uugcagagagguuaggaacuca

SEQ ID NO: 372200 - RNA, 22 nt, Human
ucugcuggccuuagcaggucua

SEQ ID NO: 372201 - RNA, 22 nt, Human
cuuuuccacugagccucacaaa

SEQ ID NO: 372202 - RNA, 21 nt, Human
aaggccugcuuacugcuaguu

SEQ ID NO: 372203 - RNA, 20 nt, Human
aggaaaaggguggugguaga

SEQ ID NO: 372204 - RNA, 22 nt, Human
cugcuguguuggcauuggauag

SEQ ID NO: 372205 - RNA, 22 nt, Human
cuggagccuucaccaggggaaa

SEQ ID NO: 372206 - RNA, 21 nt, Human
gagagggcauuauaggaagug

SEQ ID NO: 372207 - RNA, 16 nt, Human
gagaagagcccggcag

SEQ ID NO: 372208 - RNA, 22 nt, Human
uaugcacaguuacaagaauauc

SEQ ID NO: 372209 - RNA, 22 nt, Human
ucagaauugucuggggaauguu

SEQ ID NO: 372210 - RNA, 22 nt, Human
caggcagcucugcuuuuccuaa

SEQ ID NO: 372211 - RNA, 22 nt, Human
ucuuggagaauggcagagaagc

SEQ ID NO: 372212 - RNA, 22 nt, Human
uggagaagauuggucaccauuc

SEQ ID NO: 372213 - RNA, 22 nt, Human
gcagcuggaagugacacucugu

SEQ ID NO: 372214 - RNA, 22 nt, Human
uaaugcacagaauugacauggg

SEQ ID NO: 372215 - RNA, 22 nt, Human
augcacagcagugaguucagug

SEQ ID NO: 372216 - RNA, 22 nt, Human
ccagcugguuaaaauagagaaa

SEQ ID NO: 372217 - RNA, 22 nt, Human
agaauuagucacaauuauagga

SEQ ID NO: 372218 - RNA, 22 nt, Human
ccucagcugcuucccuggagcc

SEQ ID NO: 372219 - RNA, 22 nt, Human
agaaacuucagcuauucuuuug

SEQ ID NO: 372220 - RNA, 22 nt, Human
gcaggcaguugcaguuuucuag

SEQ ID NO: 372221 - RNA, 22 nt, Human
gggagccacaguuuauagugau

SEQ ID NO: 372222 - RNA, 22 nt, Human
uggcagggaauacagauguuua

SEQ ID NO: 372223 - RNA, 22 nt, Human
gcccaggaaagauagggccuca

SEQ ID NO: 372224 - RNA, 22 nt, Human
cugggagauugcuagagaugca

SEQ ID NO: 372225 - RNA, 22 nt, Human
cuucucaaaguugugaaucagg

SEQ ID NO: 372226 - RNA, 18 nt, Human
uuccauaauguauguaac

SEQ ID NO: 372227 - RNA, 23 nt, Human
aguaaagcaauuguuggcgagag

SEQ ID NO: 372228 - RNA, 22 nt, Human
augaagucugcacaugcaugug

SEQ ID NO: 372229 - RNA, 21 nt, Human
aaugugugcuauuuaucuuuu

SEQ ID NO: 372230 - RNA, 21 nt, Human
aggcagcaggauccagggaca

SEQ ID NO: 372231 - RNA, 22 nt, Human
augggaggaaggaggcccuuga

SEQ ID NO: 372232 - RNA, 18 nt, Human
ucagcuggggcugcagcc

SEQ ID NO: 372233 - RNA, 22 nt, Human
gggagcuguaguccagauaccg

SEQ ID NO: 372234 - RNA, 22 nt, Human
uggcugagccuuuggggcuuuc

SEQ ID NO: 372235 - RNA, 19 nt, Human
ucauuguugguuugucggg

SEQ ID NO: 372236 - RNA, 22 nt, Human
agaggaaguaaucaggaccugc

SEQ ID NO: 372237 - RNA, 22 nt, Human
agcugguucagaaauuagaugg

SEQ ID NO: 372238 - RNA, 22 nt, Human
uagcugccaaaagggugggcua

SEQ ID NO: 372239 - RNA, 22 nt, Human
cagaauaaaagucccaaggcau

SEQ ID NO: 372240 - RNA, 22 nt, Human
gcuggcagguccaagauagagc

SEQ ID NO: 372241 - RNA, 22 nt, Human
uguagcucuccagccagcaagg

SEQ ID NO: 372242 - RNA, 22 nt, Human
caugaagcacagcucucuuuuu

SEQ ID NO: 372243 - RNA, 19 nt, Human
ucugccucuggucaggcuc

SEQ ID NO: 372244 - RNA, 22 nt, Human
caguggguggcuaaguggcuga

SEQ ID NO: 372245 - RNA, 22 nt, Human
augauauuugcaaugugcuugc

SEQ ID NO: 372246 - RNA, 22 nt, Human
ccagcuccaggacugggagcug

SEQ ID NO: 372247 - RNA, 22 nt, Human
gcagcuggggccacacuuaggc

SEQ ID NO: 372248 - RNA, 22 nt, Human
gcuguucauuagaaauagaaug

SEQ ID NO: 372249 - RNA, 22 nt, Human
uggcagagugcagaagaggcau

SEQ ID NO: 372250 - RNA, 22 nt, Human
uggcugaguguuccaaggagca

SEQ ID NO: 372251 - RNA, 22 nt, Human
cagcuguguaugagagcaugcu

SEQ ID NO: 372252 - RNA, 22 nt, Human
uccuuguugcugcagucaccug

SEQ ID NO: 372253 - RNA, 22 nt, Human
cagccugggcuccagagucccu

SEQ ID NO: 372254 - RNA, 22 nt, Human
ucagggcaaugucccucagaag

SEQ ID NO: 372255 - RNA, 22 nt, Human
ugaaggcccagccacagaaugg

SEQ ID NO: 372256 - RNA, 22 nt, Human
uccgccaggacugagggcccau

SEQ ID NO: 372257 - RNA, 23 nt, Human
ugaugggaaggaacgacuaccac

SEQ ID NO: 372258 - RNA, 22 nt, Human
ucagaggauagaaauacuuauu

SEQ ID NO: 372259 - RNA, 22 nt, Human
aaacucuguagcuaaacauaau

SEQ ID NO: 372260 - RNA, 22 nt, Human
ccuucuucuguguggcccaaga

SEQ ID NO: 372261 - RNA, 22 nt, Human
ucccugggcaucacguugcuuc

SEQ ID NO: 372262 - RNA, 22 nt, Human
aaccauuugcaguuacugagac

SEQ ID NO: 372263 - RNA, 21 nt, Human
gcacagggacagaucaucaca

SEQ ID NO: 372264 - RNA, 22 nt, Human
cuuaggaacgcucugccuagug

SEQ ID NO: 372265 - RNA, 22 nt, Human
ugggcugaguggcagccagagu

SEQ ID NO: 372266 - RNA, 22 nt, Human
gcagagugagauaugaacccag

SEQ ID NO: 372267 - RNA, 22 nt, Human
agaauuagaggccauguacuug

SEQ ID NO: 372268 - RNA, 22 nt, Human
auaggcuuauauaaaaacaucu

SEQ ID NO: 372269 - RNA, 22 nt, Human
cucuucuugcuagacugagugc

SEQ ID NO: 372270 - RNA, 22 nt, Human
aaguucaagagugacauauuag

SEQ ID NO: 372271 - RNA, 22 nt, Human
cagggagggaggaaaauuugcu

SEQ ID NO: 372272 - RNA, 22 nt, Human
ucuggccacccgaggccccugc

SEQ ID NO: 372273 - RNA, 22 nt, Human
cuucccacagaauucaaucagu

SEQ ID NO: 372274 - RNA, 19 nt, Human
auuugaaagcugugcuugc

SEQ ID NO: 372275 - RNA, 22 nt, Human
ccauaaggagccagacauucca

SEQ ID NO: 372276 - RNA, 19 nt, Human
uaguggagugacaaguucu

SEQ ID NO: 372277 - RNA, 22 nt, Human
uuauuugcccauguuuagcaga

SEQ ID NO: 372278 - RNA, 22 nt, Human
ucagggcagccuaaggcaccuc

SEQ ID NO: 372279 - RNA, 22 nt, Human
ggucacaggggagaagagugau

SEQ ID NO: 372280 - RNA, 22 nt, Human
cuggcagcauggagccugugcu

SEQ ID NO: 372281 - RNA, 22 nt, Human
ugagcuucuuuauuuggccaga

SEQ ID NO: 372282 - RNA, 22 nt, Human
ucuguuccaguagaaaggugca

SEQ ID NO: 372283 - RNA, 17 nt, Human
agaggcagauacuugga

SEQ ID NO: 372284 - RNA, 22 nt, Human
auagaacagaaacagaugcaca

SEQ ID NO: 372285 - RNA, 22 nt, Human
cuuauauuuuaggaacagacaa

SEQ ID NO: 372286 - RNA, 22 nt, Human
cauuuacauaacaguaacgcug

SEQ ID NO: 372287 - RNA, 21 nt, Human
ccaaaggcuauguaucuucug

SEQ ID NO: 372288 - RNA, 22 nt, Human
uuaauucugccuuucauguaac

SEQ ID NO: 372289 - RNA, 22 nt, Human
aaaucaguuagugguaggauug

SEQ ID NO: 372290 - RNA, 22 nt, Human
cucugugggggagaggcagcug

SEQ ID NO: 372291 - RNA, 22 nt, Human
agcauggggcuccgcaaugaac

SEQ ID NO: 372292 - RNA, 22 nt, Human
uuauuuucuccucagaaagugg

SEQ ID NO: 372293 - RNA, 19 nt, Human
uuccuuagaggaggcggug

SEQ ID NO: 372294 - RNA, 23 nt, Human
agagcuuucuaaaauguaaaucu

SEQ ID NO: 372295 - RNA, 22 nt, Human
gcaggaguguggugggacaucc

SEQ ID NO: 372296 - RNA, 22 nt, Human
uguacaauagcuauuaucucca

SEQ ID NO: 372297 - RNA, 22 nt, Human
aacuucuugguccugagcuguu

SEQ ID NO: 372298 - RNA, 22 nt, Human
uggagcuggaauuugagcugga

SEQ ID NO: 372299 - RNA, 21 nt, Human
acaggagaccgccuggcaguc

SEQ ID NO: 372300 - RNA, 22 nt, Human
auguguaggugaaucgaggcug

SEQ ID NO: 372301 - RNA, 22 nt, Human
gcaggcuggucugaccaucccu

SEQ ID NO: 372302 - RNA, 22 nt, Human
ugagcuguagcagaugcuguug

SEQ ID NO: 372303 - RNA, 22 nt, Human
augcagcugugggcaagaaaug

SEQ ID NO: 372304 - RNA, 22 nt, Human
ugaggcucagagaagugcuguu

SEQ ID NO: 372305 - RNA, 18 nt, Human
agcuggggccucuggucc

SEQ ID NO: 372306 - RNA, 20 nt, Human
uauuuacaacuuagagccuc

SEQ ID NO: 372307 - RNA, 22 nt, Human
agucaguguucuccggagaggc

SEQ ID NO: 372308 - RNA, 22 nt, Human
ugagccuguggggugacaacca

SEQ ID NO: 372309 - RNA, 22 nt, Human
ucauugcagacuaacaaucuca

SEQ ID NO: 372310 - RNA, 22 nt, Human
gugcagguguuuuggcugccag

SEQ ID NO: 372311 - RNA, 22 nt, Human
ggugaaggaggaagcugaugga

SEQ ID NO: 372312 - RNA, 22 nt, Human
agggcuccaggggcugggugac

SEQ ID NO: 372313 - RNA, 22 nt, Human
ggcauuuaguuuucauauucug

SEQ ID NO: 372314 - RNA, 22 nt, Human
cacaggcucuucucacuugauu

SEQ ID NO: 372315 - RNA, 22 nt, Human
ccaguggaauuaaaaauaagug

SEQ ID NO: 372316 - RNA, 22 nt, Human
cuuguaauuauaauguacuguu

SEQ ID NO: 372317 - RNA, 22 nt, Human
uugaaaggguuaaagugguaaa

SEQ ID NO: 372318 - RNA, 22 nt, Human
gugguaaucggauucuuaccgg

SEQ ID NO: 372319 - RNA, 22 nt, Human
ugccaggcaggacccuagaacc

SEQ ID NO: 372320 - RNA, 22 nt, Human
gcugcccugugguccagcaggu

SEQ ID NO: 372321 - RNA, 22 nt, Human
cugccuggaccggcagcccucc

SEQ ID NO: 372322 - RNA, 22 nt, Human
gccucccuguagaggccagccu

SEQ ID NO: 372323 - RNA, 22 nt, Human
ugcgcaggagcucugccaggag

SEQ ID NO: 372324 - RNA, 22 nt, Human
aauucauccaugaacaauucca

SEQ ID NO: 372325 - RNA, 22 nt, Human
uaagacacaugcguacaagaua

SEQ ID NO: 372326 - RNA, 22 nt, Human
auccuucaaggggcugacagcu

SEQ ID NO: 372327 - RNA, 22 nt, Human
guuuuccuucucagccauugcc

SEQ ID NO: 372328 - RNA, 22 nt, Human
ugguggcuucugaggauggcga

SEQ ID NO: 372329 - RNA, 22 nt, Human
cuggcucccucgcugaggugcu

SEQ ID NO: 372330 - RNA, 22 nt, Human
gcacaauaauuuuuuuaagagg

SEQ ID NO: 372331 - RNA, 22 nt, Human
uucaagaugcacaguggcauuc

SEQ ID NO: 372332 - RNA, 22 nt, Human
uggaggagggcuggugucugua

SEQ ID NO: 372333 - RNA, 22 nt, Human
ugcauuuuuaacaaggcuaauu

SEQ ID NO: 372334 - RNA, 23 nt, Human
uggagaugccccacucccugucu

SEQ ID NO: 372335 - RNA, 22 nt, Human
ccuauacagccucagcugagau

SEQ ID NO: 372336 - RNA, 22 nt, Human
cagacacaccaggcccauucug

SEQ ID NO: 372337 - RNA, 22 nt, Human
uugcagcagggugaauucacuc

SEQ ID NO: 372338 - RNA, 22 nt, Human
ucuuccucuagaucugaggccc

SEQ ID NO: 372339 - RNA, 22 nt, Human
cugagacuuucaugugcuuuua

SEQ ID NO: 372340 - RNA, 22 nt, Human
gaggaggcuaagugggcucugg

SEQ ID NO: 372341 - RNA, 22 nt, Human
cucccagguuccgacgccucuu

SEQ ID NO: 372342 - RNA, 22 nt, Human
acacagaaccucauagccucuc

SEQ ID NO: 372343 - RNA, 22 nt, Human
cagaaauaaacuucucacaucg

SEQ ID NO: 372344 - RNA, 22 nt, Human
aauguacaauaagacaaagagg

SEQ ID NO: 372345 - RNA, 21 nt, Human
uuagcaaagcaaacacaugcu

SEQ ID NO: 372346 - RNA, 22 nt, Human
ugugucagaaggcaauggggau

SEQ ID NO: 372347 - RNA, 22 nt, Human
ucugaacagaaaagaugcacaa

SEQ ID NO: 372348 - RNA, 22 nt, Human
acaguguccuuguggucccugu

SEQ ID NO: 372349 - RNA, 22 nt, Human
aucuacccacugaacacaauau

SEQ ID NO: 372350 - RNA, 22 nt, Human
cacccagcuuuugcauccuccg

SEQ ID NO: 372351 - RNA, 22 nt, Human
gagggucccugcucagggccag

SEQ ID NO: 372352 - RNA, 22 nt, Human
ugcuuccuucccguucuucucc

SEQ ID NO: 372353 - RNA, 22 nt, Human
aauauuucuccuucguuauagc

SEQ ID NO: 372354 - RNA, 22 nt, Human
auuccaaagcacaucagaacua

SEQ ID NO: 372355 - RNA, 22 nt, Human
guggcugcagcccagcggcacg

SEQ ID NO: 372356 - RNA, 22 nt, Human
ugcauauuauguguaucugucu

SEQ ID NO: 372357 - RNA, 22 nt, Human
cugagccagcuggcaugugcua

SEQ ID NO: 372358 - RNA, 22 nt, Human
ugcacacaaaugugaacgugcc

SEQ ID NO: 372359 - RNA, 19 nt, Human
cugucaggggcuggauguu

SEQ ID NO: 372360 - RNA, 22 nt, Human
cucugggcaggaccaguggacc

SEQ ID NO: 372361 - RNA, 22 nt, Human
aacucagcauccugcacagaga

SEQ ID NO: 372362 - RNA, 22 nt, Human
ccaaggagcucauauucuuguu

SEQ ID NO: 372363 - RNA, 22 nt, Human
uagcagcugugaguaaaagcca

SEQ ID NO: 372364 - RNA, 22 nt, Human
cagcuucugagcaagccagggg

SEQ ID NO: 372365 - RNA, 22 nt, Human
caguacuuaguucucaugguuu

SEQ ID NO: 372366 - RNA, 19 nt, Human
cagucccaaauucuuguca

SEQ ID NO: 372367 - RNA, 22 nt, Human
caaagugcuaggauuacaggcc

SEQ ID NO: 372368 - RNA, 22 nt, Human
gccaaagcagucuugccucugc

SEQ ID NO: 372369 - RNA, 21 nt, Human
cagcagaguaaugcauucgua

SEQ ID NO: 372370 - RNA, 22 nt, Human
auuguguaauuuucagcucaua

SEQ ID NO: 372371 - RNA, 22 nt, Human
ucucagaguuuacggggcugaa

SEQ ID NO: 372372 - RNA, 22 nt, Human
ucacuuagauggggaucaucac

SEQ ID NO: 372373 - RNA, 22 nt, Human
ugcuggcccaguauggacugca

SEQ ID NO: 372374 - RNA, 22 nt, Human
aggaggcuguggagcacuccau

SEQ ID NO: 372375 - RNA, 22 nt, Human
uguucuugggaaucuuacaguu

SEQ ID NO: 372376 - RNA, 22 nt, Human
augcuuaaccuugguguacaau

SEQ ID NO: 372377 - RNA, 20 nt, Human
cugcugugauucccuccucc

SEQ ID NO: 372378 - RNA, 22 nt, Human
uggagccaaugaacauuugcug

SEQ ID NO: 372379 - RNA, 22 nt, Human
ugugaaggcagagccagugaaa

SEQ ID NO: 372380 - RNA, 22 nt, Human
caggcacuggggaugcugggau

SEQ ID NO: 372381 - RNA, 22 nt, Human
ugcuuuauggagcccaucucau

SEQ ID NO: 372382 - RNA, 18 nt, Human
gucauugcaacauacugu

SEQ ID NO: 372383 - RNA, 18 nt, Human
ugaaacaagaauggugca

SEQ ID NO: 372384 - RNA, 22 nt, Human
uagaggcauuaaugaauaaaca

SEQ ID NO: 372385 - RNA, 22 nt, Human
agauuuccuaugguaauuauag

SEQ ID NO: 372386 - RNA, 22 nt, Human
cccuggcauaaaacuucuccag

SEQ ID NO: 372387 - RNA, 22 nt, Human
uguauacaauucacacuuccca

SEQ ID NO: 372388 - RNA, 22 nt, Human
uuguuucaugaguguaaaggga

SEQ ID NO: 372389 - RNA, 22 nt, Human
auacaaugaaguauagaugaaa

SEQ ID NO: 372390 - RNA, 22 nt, Human
caaugucaugauuuuccauuag

SEQ ID NO: 372391 - RNA, 22 nt, Human
uggaaggcaacggagugagcug

SEQ ID NO: 372392 - RNA, 22 nt, Human
agaagucaaguggucuaugaaa

SEQ ID NO: 372393 - RNA, 22 nt, Human
gaggcuggugguuaguuccauu

SEQ ID NO: 372394 - RNA, 22 nt, Human
aggauuuaaauccuuaaccacu

SEQ ID NO: 372395 - RNA, 22 nt, Human
ccugggcuugcaucugugcugg

SEQ ID NO: 372396 - RNA, 22 nt, Human
uacacaugaucauuuaguagca

SEQ ID NO: 372397 - RNA, 22 nt, Human
gcagggaagaucuuggagcugc

SEQ ID NO: 372398 - RNA, 22 nt, Human
cacugucuuuugugaagacaau

SEQ ID NO: 372399 - RNA, 22 nt, Human
agcaccaucagaugcaauaucu

SEQ ID NO: 372400 - RNA, 22 nt, Human
cucuggaguuagugaucugggc

SEQ ID NO: 372401 - RNA, 22 nt, Human
uggcagcagacaaaaggccauu

SEQ ID NO: 372402 - RNA, 22 nt, Human
agggcagcuagcuguagaaaga

SEQ ID NO: 372403 - RNA, 22 nt, Human
cagcauuggguuaccuuuguuu

SEQ ID NO: 372404 - RNA, 22 nt, Human
agcaggaacgaguucaugggga

SEQ ID NO: 372405 - RNA, 22 nt, Human
cugccuggagcauucugaaggu

SEQ ID NO: 372406 - RNA, 18 nt, Human
uacaggaaaaguguuaca

SEQ ID NO: 372407 - RNA, 22 nt, Human
caguggggaggccaggauagaa

SEQ ID NO: 372408 - RNA, 22 nt, Human
ggagccuggucagguuggcucc

SEQ ID NO: 372409 - RNA, 22 nt, Human
acauuuaaccaaacuguuuaau

SEQ ID NO: 372410 - RNA, 22 nt, Human
uuuuaaucaugcuucuaugucc

SEQ ID NO: 372411 - RNA, 22 nt, Human
uaacaagucauuuuaaauuaug

SEQ ID NO: 372412 - RNA, 22 nt, Human
aaaauccucuaauucuagaaua

SEQ ID NO: 372413 - RNA, 22 nt, Human
augccacugacauggacaauuu

SEQ ID NO: 372414 - RNA, 22 nt, Human
aaguuugagagccuuuaguaua

SEQ ID NO: 372415 - RNA, 23 nt, Human
cugcagccgcguggggacgugga

SEQ ID NO: 372416 - RNA, 22 nt, Human
cuugaaucuucugaguauuugc

SEQ ID NO: 372417 - RNA, 22 nt, Human
gagccuggagcuggaacgaagc

SEQ ID NO: 372418 - RNA, 23 nt, Human
aggaggaaaaguuaucugcugag

SEQ ID NO: 372419 - RNA, 18 nt, Human
gaagggagcuggaaugca

SEQ ID NO: 372420 - RNA, 22 nt, Human
cagcagcaaaucuagaagagga

SEQ ID NO: 372421 - RNA, 17 nt, Human
uggcuucccugggccac

SEQ ID NO: 372422 - RNA, 22 nt, Human
agggccagcacuccuggcagga

SEQ ID NO: 372423 - RNA, 22 nt, Human
uggagcagggcaucacugugcg

SEQ ID NO: 372424 - RNA, 22 nt, Human
cagcagagcuuauguuggguca

SEQ ID NO: 372425 - RNA, 22 nt, Human
ugcuggcuguauaugugagagu

SEQ ID NO: 372426 - RNA, 22 nt, Human
aucagagaaauggagggcgcuu

SEQ ID NO: 372427 - RNA, 20 nt, Human
cuggcaggagcgagucuacc

SEQ ID NO: 372428 - RNA, 22 nt, Human
acauacauaugacaacuuuccu

SEQ ID NO: 372429 - RNA, 22 nt, Human
guaaacaacacaaaucauuuga

SEQ ID NO: 372430 - RNA, 22 nt, Human
guuauuuuaacuucucaguaau

SEQ ID NO: 372431 - RNA, 22 nt, Human
ggcaggaggaagaguuagcacc

SEQ ID NO: 372432 - RNA, 22 nt, Human
gagccuggccuccugccucagc

SEQ ID NO: 372433 - RNA, 22 nt, Human
aucuucucauguguaaugaggu

SEQ ID NO: 372434 - RNA, 22 nt, Human
gccaggcuccaggcccuccuga

SEQ ID NO: 372435 - RNA, 22 nt, Human
cagcuuuuuagaaucuagggca

SEQ ID NO: 372436 - RNA, 22 nt, Human
gcaguccucucauuggccuccu

SEQ ID NO: 372437 - RNA, 22 nt, Human
gcugucugacuccaaguuggag

SEQ ID NO: 372438 - RNA, 22 nt, Human
guaaacaucgacccaacagggg

SEQ ID NO: 372439 - RNA, 22 nt, Human
ccaugagcuuccuauauagggu

SEQ ID NO: 372440 - RNA, 22 nt, Human
acagaauuaaaguguuugugga

SEQ ID NO: 372441 - RNA, 22 nt, Human
ggucucagcccucgccagcagc

SEQ ID NO: 372442 - RNA, 20 nt, Human
accaauguuagcuuaguacu

SEQ ID NO: 372443 - RNA, 22 nt, Human
uuugggaaacuuaggggucaga

SEQ ID NO: 372444 - RNA, 22 nt, Human
caguggguaggaaaggcucuuc

SEQ ID NO: 372445 - RNA, 22 nt, Human
gcagcccaauggacugagacag

SEQ ID NO: 372446 - RNA, 22 nt, Human
cugagccaugagccugcgccca

SEQ ID NO: 372447 - RNA, 22 nt, Human
ggccucggcccacugcugcggu

SEQ ID NO: 372448 - RNA, 22 nt, Human
agcccucauggaacagcuccua

SEQ ID NO: 372449 - RNA, 22 nt, Human
ggcccugugguuuugcaaaguc

SEQ ID NO: 372450 - RNA, 20 nt, Human
cacagcuugccuuuuaugac

SEQ ID NO: 372451 - RNA, 22 nt, Human
ucagcuggcaguucagaggcug

SEQ ID NO: 372452 - RNA, 22 nt, Human
gcucucuuuuuccagugguggu

SEQ ID NO: 372453 - RNA, 22 nt, Human
guuauuuucauuggcucagacu

SEQ ID NO: 372454 - RNA, 22 nt, Human
agaggacaaaaugagaagugcu

SEQ ID NO: 372455 - RNA, 22 nt, Human
agcccagcagaaaguccagccu

SEQ ID NO: 372456 - RNA, 22 nt, Human
acaaagaucuugcuuuccuacu

SEQ ID NO: 372457 - RNA, 22 nt, Human
cagcugacccgugggaggcggg

SEQ ID NO: 372458 - RNA, 22 nt, Human
uucaagaugacccagucacacg

SEQ ID NO: 372459 - RNA, 22 nt, Human
aaggccugggaggccucucuuc

SEQ ID NO: 372460 - RNA, 22 nt, Human
gggcagcucuggcugugggaag

SEQ ID NO: 372461 - RNA, 22 nt, Human
acauacauauguuuaaaugcau

SEQ ID NO: 372462 - RNA, 22 nt, Human
cugggagaugacucagagcagg

SEQ ID NO: 372463 - RNA, 22 nt, Human
acucugaggagugacuagaggu

SEQ ID NO: 372464 - RNA, 22 nt, Human
cagcuggggcagccacgugcgg

SEQ ID NO: 372465 - RNA, 20 nt, Human
aguacaauguaugauucaga

SEQ ID NO: 372466 - RNA, 22 nt, Human
caggagcccguugcuccggcgg

SEQ ID NO: 372467 - RNA, 20 nt, Human
agucccuuuggucagguauu

SEQ ID NO: 372468 - RNA, 22 nt, Human
ugcuucagaggaaaggcaaaag

SEQ ID NO: 372469 - RNA, 17 nt, Human
uccaggcauaucuccua

SEQ ID NO: 372470 - RNA, 16 nt, Human
ccuggauccccugugg

SEQ ID NO: 372471 - RNA, 22 nt, Human
uccugugccuccaccugcuccg

SEQ ID NO: 372472 - RNA, 22 nt, Human
auauaauacaaccugcuaagug

SEQ ID NO: 372473 - RNA, 22 nt, Human
cgggcuccgggucuuugcaguc

SEQ ID NO: 372474 - RNA, 20 nt, Human
agaauucuuacccuuugaug

SEQ ID NO: 372475 - RNA, 22 nt, Human
cagggcacggagaagucacccc

SEQ ID NO: 372476 - RNA, 17 nt, Human
agagagagcaugccacc

SEQ ID NO: 372477 - RNA, 22 nt, Human
ggagaugguggaagcuggugca

SEQ ID NO: 372478 - RNA, 22 nt, Human
agugcagcaugcuggggaggcu

SEQ ID NO: 372479 - RNA, 22 nt, Human
aggcuucccagcugagcucagc

SEQ ID NO: 372480 - RNA, 22 nt, Human
ucaggcagguggcuggcuaugg

SEQ ID NO: 372481 - RNA, 22 nt, Human
gagacacaaacauuuauuccac

SEQ ID NO: 372482 - RNA, 22 nt, Human
agguacagaugaaagucuaguu

SEQ ID NO: 372483 - RNA, 23 nt, Human
uuaagacuggcugaacuuaguag

SEQ ID NO: 372484 - RNA, 22 nt, Human
gcaguggcaugaugugggcuca

SEQ ID NO: 372485 - RNA, 23 nt, Human
aucauucuccaaucuggagcagg

SEQ ID NO: 372486 - RNA, 22 nt, Human
aucagagaaguuucacuggcau

SEQ ID NO: 372487 - RNA, 22 nt, Human
ccaggaguuggagguugcagug

SEQ ID NO: 372488 - RNA, 22 nt, Human
cugccuggguucaaguccuguu

SEQ ID NO: 372489 - RNA, 22 nt, Human
uuuauuuaaagucguguguuaa

SEQ ID NO: 372490 - RNA, 22 nt, Human
gccuucaggaaaucaguccuug

SEQ ID NO: 372491 - RNA, 22 nt, Human
aggcugagacugugcauuagug

SEQ ID NO: 372492 - RNA, 22 nt, Human
uggaggaaaaaaccaggcagag

SEQ ID NO: 372493 - RNA, 22 nt, Human
gcaggggcuaaggacacagaga

SEQ ID NO: 372494 - RNA, 22 nt, Human
uucauauauaugcacuacguac

SEQ ID NO: 372495 - RNA, 22 nt, Human
gccuccugaaaggaagagcucc

SEQ ID NO: 372496 - RNA, 22 nt, Human
caggaucccuggccuccgccca

SEQ ID NO: 372497 - RNA, 22 nt, Human
ugcucccaggcucuguggucug

SEQ ID NO: 372498 - RNA, 23 nt, Human
aggaggccugaaacugaggcuga

SEQ ID NO: 372499 - RNA, 22 nt, Human
guuugaaaaaagcaguauguaa

SEQ ID NO: 372500 - RNA, 22 nt, Human
gauucuuacuucuaagcaagcu

SEQ ID NO: 372501 - RNA, 22 nt, Human
gaaaggagggaaacagagcggu

SEQ ID NO: 372502 - RNA, 22 nt, Human
caaauaguaugagcaaugauuc

SEQ ID NO: 372503 - RNA, 18 nt, Human
aggccagcccugcuacug

SEQ ID NO: 372504 - RNA, 22 nt, Human
aagaacauguuaaaagauucac

SEQ ID NO: 372505 - RNA, 22 nt, Human
ucccaggcuggggccaggugac

SEQ ID NO: 372506 - RNA, 22 nt, Human
caaauauuccagguacaucccu

SEQ ID NO: 372507 - RNA, 22 nt, Human
ucugaggccccugggcaggaug

SEQ ID NO: 372508 - RNA, 23 nt, Human
agggcugaugccauugcagcucu

SEQ ID NO: 372509 - RNA, 22 nt, Human
agaggucagauuucuccuggug

SEQ ID NO: 372510 - RNA, 22 nt, Human
cuggggcucucuggaaugcuug

SEQ ID NO: 372511 - RNA, 22 nt, Human
uauuuugagguauuuuugagcu

SEQ ID NO: 372512 - RNA, 22 nt, Human
uuugacaucuaagaauucuuac

SEQ ID NO: 372513 - RNA, 18 nt, Human
acaaauguagugucuuaa

SEQ ID NO: 372514 - RNA, 22 nt, Human
uaauuucaaauuucuuagcgug

SEQ ID NO: 372515 - RNA, 22 nt, Human
auacauuagaaucugguacuca

SEQ ID NO: 372516 - RNA, 22 nt, Human
ggaggccaaggagggcggauca

SEQ ID NO: 372517 - RNA, 22 nt, Human
ucagagagcagaacuuuuuuac

SEQ ID NO: 372518 - RNA, 22 nt, Human
guggcuucugcggugugcgcag

SEQ ID NO: 372519 - RNA, 22 nt, Human
ggcagcuggccuccucgcccac

SEQ ID NO: 372520 - RNA, 22 nt, Human
cuguaaauaugaagaauauaug

SEQ ID NO: 372521 - RNA, 22 nt, Human
ucuccuuuaagauuuccucagg

SEQ ID NO: 372522 - RNA, 20 nt, Human
ugcagggcugccucccagcu

SEQ ID NO: 372523 - RNA, 22 nt, Human
cuguggaaaauuuguauguaau

SEQ ID NO: 372524 - RNA, 22 nt, Human
augggaugcauggcuguggcca

SEQ ID NO: 372525 - RNA, 22 nt, Human
uucaaagcugcagacuccuggg

SEQ ID NO: 372526 - RNA, 22 nt, Human
aaaugucuuuaucucauguaac

SEQ ID NO: 372527 - RNA, 22 nt, Human
auaauuuacuaagcucuaccuu

SEQ ID NO: 372528 - RNA, 22 nt, Human
ggcaggcucagcagccaaggag

SEQ ID NO: 372529 - RNA, 18 nt, Human
agccuggaggguugaagu

SEQ ID NO: 372530 - RNA, 22 nt, Human
ugggcugcuucuauuggugguc

SEQ ID NO: 372531 - RNA, 22 nt, Human
ucucaccauggugcuugcuuau

SEQ ID NO: 372532 - RNA, 22 nt, Human
uguugauuaguguuuagacuua

SEQ ID NO: 372533 - RNA, 22 nt, Human
acagcuuuucugauagauccug

SEQ ID NO: 372534 - RNA, 22 nt, Human
uagaaacucaggauacucuucc

SEQ ID NO: 372535 - RNA, 22 nt, Human
cagagugagggccugcaccugc

SEQ ID NO: 372536 - RNA, 22 nt, Human
caguaaauuugagggaucuaau

SEQ ID NO: 372537 - RNA, 22 nt, Human
cagagcuggagaaguggauuua

SEQ ID NO: 372538 - RNA, 22 nt, Human
gccuguuggguaacagaguuca

SEQ ID NO: 372539 - RNA, 22 nt, Human
agugugugcaugcauucgugca

SEQ ID NO: 372540 - RNA, 22 nt, Human
acagagcacauagauuggaguu

SEQ ID NO: 372541 - RNA, 22 nt, Human
gcagagaaaguuuuguccucag

SEQ ID NO: 372542 - RNA, 21 nt, Human
auggcuuuuuuaaagcuugug

SEQ ID NO: 372543 - RNA, 22 nt, Human
uaggggaacuggcacagggcag

SEQ ID NO: 372544 - RNA, 22 nt, Human
ugucccagaucacaggagggga

SEQ ID NO: 372545 - RNA, 22 nt, Human
uaggauuuaggcuuuaacaucu

SEQ ID NO: 372546 - RNA, 22 nt, Human
ggcugccucaaagcucaagcuc

SEQ ID NO: 372547 - RNA, 22 nt, Human
cagauggaacacagaaaggaga

SEQ ID NO: 372548 - RNA, 22 nt, Human
ggcucuggugaggguaggagau

SEQ ID NO: 372549 - RNA, 20 nt, Human
uggcuccucuuggcuguggc

SEQ ID NO: 372550 - RNA, 22 nt, Human
augcaguacagauaauucuaca

SEQ ID NO: 372551 - RNA, 22 nt, Human
ccuguucacgguguguuguuag

SEQ ID NO: 372552 - RNA, 22 nt, Human
uggcagagaauaaaucuugacu

SEQ ID NO: 372553 - RNA, 22 nt, Human
auguucaaacuuuuuacacacc

SEQ ID NO: 372554 - RNA, 19 nt, Human
cucagagaggggcagugcc

SEQ ID NO: 372555 - RNA, 22 nt, Human
uacauguuauuucacuauuggu

SEQ ID NO: 372556 - RNA, 22 nt, Human
aggcaggcuggucugaagagug

SEQ ID NO: 372557 - RNA, 22 nt, Human
cagggccugcuuccuucuuguu

SEQ ID NO: 372558 - RNA, 22 nt, Human
aagccagggucaggggccuccu

SEQ ID NO: 372559 - RNA, 22 nt, Human
cagcaggauagguuucuuugga

SEQ ID NO: 372560 - RNA, 22 nt, Human
ucaauaaaauuguuuuccuauc

SEQ ID NO: 372561 - RNA, 22 nt, Human
acaaaaguguaggaauuccuua

SEQ ID NO: 372562 - RNA, 22 nt, Human
uaggcagcugcaaacuucgguc

SEQ ID NO: 372563 - RNA, 22 nt, Human
uggaggaaguggacaguugugu

SEQ ID NO: 372564 - RNA, 22 nt, Human
acaggcagguccugucccagcu

SEQ ID NO: 372565 - RNA, 22 nt, Human
ccugucucuuucaaucugagag

SEQ ID NO: 372566 - RNA, 18 nt, Human
cugaggcuggcaggagcc

SEQ ID NO: 372567 - RNA, 22 nt, Human
uggcuuuaaaucuguauucaua

SEQ ID NO: 372568 - RNA, 22 nt, Human
agauuuagugguggaauuuugg

SEQ ID NO: 372569 - RNA, 22 nt, Human
uuaauuuuaaccuguuuguguc

SEQ ID NO: 372570 - RNA, 22 nt, Human
ucauuuguacuugugugcuugu

SEQ ID NO: 372571 - RNA, 22 nt, Human
agcaugaagacuucagagcuag

SEQ ID NO: 372572 - RNA, 22 nt, Human
uucauaguguuuccuuccagug

SEQ ID NO: 372573 - RNA, 22 nt, Human
ggaagccaggcugggggaucug

SEQ ID NO: 372574 - RNA, 22 nt, Human
uccaggcacuauauauacuuuu

SEQ ID NO: 372575 - RNA, 22 nt, Human
agaggcccucucucuccugaug

SEQ ID NO: 372576 - RNA, 22 nt, Human
uacaggaggauuaucaaaggau

SEQ ID NO: 372577 - RNA, 22 nt, Human
cuccagggagcuguggagguuu

SEQ ID NO: 372578 - RNA, 23 nt, Human
uggccucuccccaccuggcagaa

SEQ ID NO: 372579 - RNA, 22 nt, Human
gucuccugagacugcagucacc

SEQ ID NO: 372580 - RNA, 21 nt, Human
aguuugaugcaauuucugaga

SEQ ID NO: 372581 - RNA, 22 nt, Human
uggcuggggccugaauccugca

SEQ ID NO: 372582 - RNA, 22 nt, Human
augugcuuuauuaaguaaaaau

SEQ ID NO: 372583 - RNA, 22 nt, Human
ccagagagucgaugggggacac

SEQ ID NO: 372584 - RNA, 22 nt, Human
aagggcuggaauaucucuuaga

SEQ ID NO: 372585 - RNA, 22 nt, Human
gccucacugcagccccaggaag

SEQ ID NO: 372586 - RNA, 22 nt, Human
auggggcuguucucugcccugc

SEQ ID NO: 372587 - RNA, 22 nt, Human
aaagcccauguggaaguacagg

SEQ ID NO: 372588 - RNA, 22 nt, Human
gugggagcuuuggcaucaggcu

SEQ ID NO: 372589 - RNA, 22 nt, Human
auggcuuugaaguaauguaauu

SEQ ID NO: 372590 - RNA, 23 nt, Human
acagcugcaccuggccgccuggc

SEQ ID NO: 372591 - RNA, 22 nt, Human
uuuccaagagcuuauuucugaa

SEQ ID NO: 372592 - RNA, 17 nt, Human
cagucgaggaggaccug

SEQ ID NO: 372593 - RNA, 22 nt, Human
agcaguggccuggggcucugug

SEQ ID NO: 372594 - RNA, 22 nt, Human
acagcagccuuguugguuucga

SEQ ID NO: 372595 - RNA, 22 nt, Human
ugucuuuaaaauuaaacacauc

SEQ ID NO: 372596 - RNA, 22 nt, Human
gccaggcacaguucuaggugcu

SEQ ID NO: 372597 - RNA, 22 nt, Human
aggcccaguagugcugccuuua

SEQ ID NO: 372598 - RNA, 19 nt, Human
uuucagacucaucuccagc

SEQ ID NO: 372599 - RNA, 23 nt, Human
aaacaugcagcacaugaaugcua

SEQ ID NO: 372600 - RNA, 22 nt, Human
guuuagaauucuaacuuuaagg

SEQ ID NO: 372601 - RNA, 23 nt, Human
agucucagcuggaaacauguguc

SEQ ID NO: 372602 - RNA, 22 nt, Human
agccugguguggggcugcagag

SEQ ID NO: 372603 - RNA, 22 nt, Human
aaagcaaugaugguagacacgu

SEQ ID NO: 372604 - RNA, 22 nt, Human
augaagauaagaccaggcugga

SEQ ID NO: 372605 - RNA, 22 nt, Human
gccuggagcucuccacuugggg

SEQ ID NO: 372606 - RNA, 22 nt, Human
aagggacccuggaucaaaugga

SEQ ID NO: 372607 - RNA, 22 nt, Human
agggcccuccccgcucagggca

SEQ ID NO: 372608 - RNA, 22 nt, Human
gcuggcaccugcaccaagcagg

SEQ ID NO: 372609 - RNA, 22 nt, Human
gggcugccuuucuucugggagc

SEQ ID NO: 372610 - RNA, 22 nt, Human
caguccuucuccauuaaggcuc

SEQ ID NO: 372611 - RNA, 22 nt, Human
uuguccaaggucccacaguuag

SEQ ID NO: 372612 - RNA, 22 nt, Human
aucagagauggcuccagugcuc

SEQ ID NO: 372613 - RNA, 22 nt, Human
ccagagcccagggucaugcagg

SEQ ID NO: 372614 - RNA, 22 nt, Human
ucacugcucucuaagcaucgcc

SEQ ID NO: 372615 - RNA, 22 nt, Human
uuacuuuggauggucaagaaag

SEQ ID NO: 372616 - RNA, 22 nt, Human
ugcauauugugaaaauguagau

SEQ ID NO: 372617 - RNA, 22 nt, Human
gccagucugcucccacaaguuc

SEQ ID NO: 372618 - RNA, 22 nt, Human
uucauuugccaucaguguaaug

SEQ ID NO: 372619 - RNA, 22 nt, Human
cauuacauuucaaaauguuucc

SEQ ID NO: 372620 - RNA, 22 nt, Human
ccucuccuugcacccgucccgc

SEQ ID NO: 372621 - RNA, 22 nt, Human
cacaaaaguaggaggcaggcgg

SEQ ID NO: 372622 - RNA, 22 nt, Human
cccaccccuggacaggugagug

SEQ ID NO: 372623 - RNA, 22 nt, Human
ucaaaaguggccuguaaaaucu

SEQ ID NO: 372624 - RNA, 22 nt, Human
aaauguauccuacuuccugagu

SEQ ID NO: 372625 - RNA, 22 nt, Human
uagcuuuccuuguugccugugc

SEQ ID NO: 372626 - RNA, 22 nt, Human
auggacagugugucuguuucca

SEQ ID NO: 372627 - RNA, 22 nt, Human
gaggcagcggcucacagagaaa

SEQ ID NO: 372628 - RNA, 22 nt, Human
uuuccucugagugagcugggag

SEQ ID NO: 372629 - RNA, 22 nt, Human
ugugugaaggaauauauacuca

SEQ ID NO: 372630 - RNA, 22 nt, Human
acacaaauuguaggauaauugc

SEQ ID NO: 372631 - RNA, 23 nt, Human
cagcaggagggugccugggcugc

SEQ ID NO: 372632 - RNA, 22 nt, Human
cagugggugaugaguccugggg

SEQ ID NO: 372633 - RNA, 22 nt, Human
caguccuuggcuucauccgagu

SEQ ID NO: 372634 - RNA, 22 nt, Human
ucaccugggagggcugugguag

SEQ ID NO: 372635 - RNA, 22 nt, Human
guggagcccugguagggacccc

SEQ ID NO: 372636 - RNA, 22 nt, Human
uggggaagggcacccuggagac

SEQ ID NO: 372637 - RNA, 22 nt, Human
ucucagggagggcgagucagcg

SEQ ID NO: 372638 - RNA, 22 nt, Human
aaaggucaagcuggacucaggu

SEQ ID NO: 372639 - RNA, 22 nt, Human
aaauuucuguuguuuugagcca

SEQ ID NO: 372640 - RNA, 22 nt, Human
auugucugaauccaaagcucug

SEQ ID NO: 372641 - RNA, 22 nt, Human
cuugaaagcacuccuuugacug

SEQ ID NO: 372642 - RNA, 22 nt, Human
cacauguaguaagcaggcaaug

SEQ ID NO: 372643 - RNA, 22 nt, Human
ucucagagaggggccgggccuu

SEQ ID NO: 372644 - RNA, 21 nt, Human
ggucuuccaaauaaggagaaa

SEQ ID NO: 372645 - RNA, 22 nt, Human
cuggggcucacuuuggucaggc

SEQ ID NO: 372646 - RNA, 22 nt, Human
cauguuaauaugcauugaguac

SEQ ID NO: 372647 - RNA, 22 nt, Human
uucuucaaccaucuacauaaac

SEQ ID NO: 372648 - RNA, 22 nt, Human
agaaagcacucugucuuuuacc

SEQ ID NO: 372649 - RNA, 23 nt, Human
cuggcuccgaagacuccaggauc

SEQ ID NO: 372650 - RNA, 22 nt, Human
guuuuucuuugugugaagacaa

SEQ ID NO: 372651 - RNA, 22 nt, Human
acagggccagccugggaccugg

SEQ ID NO: 372652 - RNA, 22 nt, Human
gccugccuguuggcugaggugc

SEQ ID NO: 372653 - RNA, 22 nt, Human
guuuucugauuagcaaaucuga

SEQ ID NO: 372654 - RNA, 22 nt, Human
guacagaauuaugccaugaggg

SEQ ID NO: 372655 - RNA, 19 nt, Human
ggcccaaguacugagugcc

SEQ ID NO: 372656 - RNA, 22 nt, Human
gccagggcugugcagguuuguu

SEQ ID NO: 372657 - RNA, 22 nt, Human
agagggcaugcuugguggccug

SEQ ID NO: 372658 - RNA, 22 nt, Human
augugguugaagaauuacaucu

SEQ ID NO: 372659 - RNA, 22 nt, Human
ucacagggcauuauggcuccag

SEQ ID NO: 372660 - RNA, 22 nt, Human
aggccagcgcugcuagcucccg

SEQ ID NO: 372661 - RNA, 22 nt, Human
gcagcuggcccugacacgcaga

SEQ ID NO: 372662 - RNA, 22 nt, Human
augugaaacugaagcauccaua

SEQ ID NO: 372663 - RNA, 22 nt, Human
gcuggagccauuggcuuggccu

SEQ ID NO: 372664 - RNA, 22 nt, Human
aagaaugucguugguauuuuaa

SEQ ID NO: 372665 - RNA, 22 nt, Human
cauccugguuaccccauaguca

SEQ ID NO: 372666 - RNA, 22 nt, Human
aaauuucuggaagugucagagu

SEQ ID NO: 372667 - RNA, 22 nt, Human
ggggcagcucccgagggcagga

SEQ ID NO: 372668 - RNA, 22 nt, Human
uccuuucccuuuccauccuggc

SEQ ID NO: 372669 - RNA, 22 nt, Human
ugcugcuguuuccuacaucuca

SEQ ID NO: 372670 - RNA, 22 nt, Human
aacuuuauuguuaggggcuaaa

SEQ ID NO: 372671 - RNA, 22 nt, Human
ugaauaauuaugggaguccuaa

SEQ ID NO: 372672 - RNA, 22 nt, Human
agagggauggccccguaacuca

SEQ ID NO: 372673 - RNA, 22 nt, Human
auucagugugagguuuucaagu

SEQ ID NO: 372674 - RNA, 22 nt, Human
ucacauuucgcaucaguccgau

SEQ ID NO: 372675 - RNA, 22 nt, Human
ugccuggguucccaccccaaag

SEQ ID NO: 372676 - RNA, 22 nt, Human
uauuaguagcuugaaauuggug

SEQ ID NO: 372677 - RNA, 22 nt, Human
auggggcugggauucuccucgg

SEQ ID NO: 372678 - RNA, 22 nt, Human
uccagggguaccggccaggcag

SEQ ID NO: 372679 - RNA, 22 nt, Human
ggccugaggcgucccagcugug

SEQ ID NO: 372680 - RNA, 22 nt, Human
cccaggugggcaccucgaggaa

SEQ ID NO: 372681 - RNA, 22 nt, Human
gaguccaguuguucacagaggc

SEQ ID NO: 372682 - RNA, 22 nt, Human
cagccagcuggcacugugagua

SEQ ID NO: 372683 - RNA, 22 nt, Human
ugaggaaacuuacaaggcagaa

SEQ ID NO: 372684 - RNA, 22 nt, Human
uggcucagcauucacuggucuu

SEQ ID NO: 372685 - RNA, 22 nt, Human
agggccagaggcaccuugcagc

SEQ ID NO: 372686 - RNA, 22 nt, Human
ugaggcaggaauggggaaaagu

SEQ ID NO: 372687 - RNA, 22 nt, Human
caggguggcaggcaccauggcc

SEQ ID NO: 372688 - RNA, 22 nt, Human
gcagcuuuguggagaggcccau

SEQ ID NO: 372689 - RNA, 22 nt, Human
ucaggcugcaucuguaagggug

SEQ ID NO: 372690 - RNA, 22 nt, Human
cccagguggcagaagcugcagu

SEQ ID NO: 372691 - RNA, 22 nt, Human
ccuggcagcaggugggcccgug

SEQ ID NO: 372692 - RNA, 22 nt, Human
uccaggcauaaugcccaguggu

SEQ ID NO: 372693 - RNA, 22 nt, Human
gcugugcuauaucucugagugu

SEQ ID NO: 372694 - RNA, 22 nt, Human
gugaauaagaccuaaggaugaa

SEQ ID NO: 372695 - RNA, 22 nt, Human
ucuggcccagccccugagguca

SEQ ID NO: 372696 - RNA, 22 nt, Human
ccagucccaucucugucgcuua

SEQ ID NO: 372697 - RNA, 22 nt, Human
agggcgaggagacggaggcaca

SEQ ID NO: 372698 - RNA, 22 nt, Human
ugucucagaggcaggaagagcc

SEQ ID NO: 372699 - RNA, 22 nt, Human
caugggcaguuggcagggcuca

SEQ ID NO: 372700 - RNA, 21 nt, Human
gcucccugcucagcuccuggg

SEQ ID NO: 372701 - RNA, 22 nt, Human
cucuuaaagaauguuccagcug

SEQ ID NO: 372702 - RNA, 22 nt, Human
cagauggccagaggcagcugca

SEQ ID NO: 372703 - RNA, 22 nt, Human
gaaacaaucaucaugugauuug

SEQ ID NO: 372704 - RNA, 22 nt, Human
ccaggacagugaacauguaaga

SEQ ID NO: 372705 - RNA, 22 nt, Human
aggaagccuggcauuaaaaagc

SEQ ID NO: 372706 - RNA, 22 nt, Human
cuggagagaccgaaagaggcug

SEQ ID NO: 372707 - RNA, 22 nt, Human
cuaucaaacagccauuaauaua

SEQ ID NO: 372708 - RNA, 22 nt, Human
agcagcuucuuucacuccugga

SEQ ID NO: 372709 - RNA, 22 nt, Human
ugaauaugugacuuugauuuca

SEQ ID NO: 372710 - RNA, 22 nt, Human
agagaauuacagaagaauguca

SEQ ID NO: 372711 - RNA, 22 nt, Human
acugccuugucucuugccuguu

SEQ ID NO: 372712 - RNA, 22 nt, Human
acauaugcucaucugcauuccc

SEQ ID NO: 372713 - RNA, 22 nt, Human
caggggaagaugccaagggaga

SEQ ID NO: 372714 - RNA, 21 nt, Human
ggacagcugcgcgcagggcuc

SEQ ID NO: 372715 - RNA, 22 nt, Human
uagcuuuaaaaaucaucaaagc

SEQ ID NO: 372716 - RNA, 22 nt, Human
gcucccaggaugaggagccagg

SEQ ID NO: 372717 - RNA, 22 nt, Human
ggccaccuuccaguugccugca

SEQ ID NO: 372718 - RNA, 22 nt, Human
guucagggagggacagaugaag

SEQ ID NO: 372719 - RNA, 22 nt, Human
gggacaggcugagacuugagcu

SEQ ID NO: 372720 - RNA, 23 nt, Human
ggucccaguggagaggccucacc

SEQ ID NO: 372721 - RNA, 22 nt, Human
agcugcugcgccucacccuggc

SEQ ID NO: 372722 - RNA, 22 nt, Human
agagauguucauucagcauguu

SEQ ID NO: 372723 - RNA, 22 nt, Human
caaauccagaucccagucguag

SEQ ID NO: 372724 - RNA, 22 nt, Human
uuugcauucuagaaaaauuucu

SEQ ID NO: 372725 - RNA, 22 nt, Human
cugcagagaccuaggucagguu

SEQ ID NO: 372726 - RNA, 22 nt, Human
uaggcagcauggauucugaaua

SEQ ID NO: 372727 - RNA, 22 nt, Human
gcugcugguccucagagcucau

SEQ ID NO: 372728 - RNA, 17 nt, Human
auuuccucagggcugag

SEQ ID NO: 372729 - RNA, 22 nt, Human
ugggcugcugagaaugagagag

SEQ ID NO: 372730 - RNA, 20 nt, Human
agacccucuggacugggccc

SEQ ID NO: 372731 - RNA, 22 nt, Human
gcugaagggagugcugagucug

SEQ ID NO: 372732 - RNA, 22 nt, Human
auuuucuauucugcugguuuag

SEQ ID NO: 372733 - RNA, 22 nt, Human
agcaccugcuuaaugugcagug

SEQ ID NO: 372734 - RNA, 22 nt, Human
cccaaggcauggcaugguggca

SEQ ID NO: 372735 - RNA, 22 nt, Human
cugaggcuuugugugcaugccu

SEQ ID NO: 372736 - RNA, 22 nt, Human
aucauucuagcuguuguguuga

SEQ ID NO: 372737 - RNA, 22 nt, Human
guauuagggccaaaggcaggaa

SEQ ID NO: 372738 - RNA, 22 nt, Human
cucuuaaaaacuugauauauuu

SEQ ID NO: 372739 - RNA, 23 nt, Human
acagaaaucauuuguaagguacc

SEQ ID NO: 372740 - RNA, 21 nt, Human
aucauucuggaaaauucaagc

SEQ ID NO: 372741 - RNA, 22 nt, Human
gauuucuucauuuguggugaau

SEQ ID NO: 372742 - RNA, 22 nt, Human
gucccagaggcuuuggccacag

SEQ ID NO: 372743 - RNA, 22 nt, Human
ucagggcucaccagccucugcc

SEQ ID NO: 372744 - RNA, 22 nt, Human
uuuugagauggugucucgcucc

SEQ ID NO: 372745 - RNA, 22 nt, Human
ucugcagcuuuuugguggggug

SEQ ID NO: 372746 - RNA, 20 nt, Human
agucccagaucaaauuucug

SEQ ID NO: 372747 - RNA, 22 nt, Human
gaaguccuccuaucuugcucuu

SEQ ID NO: 372748 - RNA, 22 nt, Human
gugaaggacuagcauggagggc

SEQ ID NO: 372749 - RNA, 22 nt, Human
ugcagcauugcaaagcagucuu

SEQ ID NO: 372750 - RNA, 22 nt, Human
ccaaaauuauuacauuuguagg

SEQ ID NO: 372751 - RNA, 22 nt, Human
ugcuaucucuauauccauuuau

SEQ ID NO: 372752 - RNA, 22 nt, Human
gcuggccauagaagccaaagag

SEQ ID NO: 372753 - RNA, 22 nt, Human
aguauacauauauuagccuucg

SEQ ID NO: 372754 - RNA, 22 nt, Human
aggccuuccucggagacaggga

SEQ ID NO: 372755 - RNA, 22 nt, Human
auuuagcaaaaaaugaugaagc

SEQ ID NO: 372756 - RNA, 22 nt, Human
uccaaauucuagggccuugguu

SEQ ID NO: 372757 - RNA, 22 nt, Human
cagagcagguaucuuuggugaa

SEQ ID NO: 372758 - RNA, 22 nt, Human
aaacaggcuuccauuagagcaa

SEQ ID NO: 372759 - RNA, 22 nt, Human
uaugagaaaauaaauaucuguu

SEQ ID NO: 372760 - RNA, 22 nt, Human
ucucagagugacaaugagaauu

SEQ ID NO: 372761 - RNA, 22 nt, Human
uuucuagggcucuugucuucug

SEQ ID NO: 372762 - RNA, 22 nt, Human
caggaaagagcugccaggcagg

SEQ ID NO: 372763 - RNA, 22 nt, Human
ugggccuggcccuguggaggag

SEQ ID NO: 372764 - RNA, 22 nt, Human
auuuauuaccucggaguuucug

SEQ ID NO: 372765 - RNA, 22 nt, Human
guggcccaggcuuggcgcuggc

SEQ ID NO: 372766 - RNA, 22 nt, Human
cacagaauuaagggagaaauau

SEQ ID NO: 372767 - RNA, 22 nt, Human
cccagcuccaagggacagcgaa

SEQ ID NO: 372768 - RNA, 22 nt, Human
uguggcagcuggagguggagaa

SEQ ID NO: 372769 - RNA, 23 nt, Human
ccugucugugcuggguggacaca

SEQ ID NO: 372770 - RNA, 22 nt, Human
aguagaaagaaggcacugggcc

SEQ ID NO: 372771 - RNA, 22 nt, Human
aucauaaagugcuaucugauug

SEQ ID NO: 372772 - RNA, 22 nt, Human
gcugagguggagauugcaguga

SEQ ID NO: 372773 - RNA, 22 nt, Human
guagaaauauuuaucucugaga

SEQ ID NO: 372774 - RNA, 22 nt, Human
uauuggugggggcagagagaga

SEQ ID NO: 372775 - RNA, 22 nt, Human
aauauuuguuaguguuuuaaug

SEQ ID NO: 372776 - RNA, 22 nt, Human
ccagucccaggcagaaauccag

SEQ ID NO: 372777 - RNA, 22 nt, Human
cccagcuugcaaauggguugcu

SEQ ID NO: 372778 - RNA, 22 nt, Human
caaguccucaaagggcucugcu

SEQ ID NO: 372779 - RNA, 22 nt, Human
ugaaccagagucuccagugguu

SEQ ID NO: 372780 - RNA, 22 nt, Human
aagauuuaccacuuuauucaag

SEQ ID NO: 372781 - RNA, 22 nt, Human
aggagccaagauggggcaagua

SEQ ID NO: 372782 - RNA, 21 nt, Human
ccaagacucccaucuaguggu

SEQ ID NO: 372783 - RNA, 22 nt, Human
gggcaaguccggugcccagagc

SEQ ID NO: 372784 - RNA, 21 nt, Human
ucauuuauugagaaaugacug

SEQ ID NO: 372785 - RNA, 22 nt, Human
ucaggcagaggauggggagcgu

SEQ ID NO: 372786 - RNA, 22 nt, Human
uauuccaagcacagcaacccag

SEQ ID NO: 372787 - RNA, 22 nt, Human
aucugccuccaaguccaugugu

SEQ ID NO: 372788 - RNA, 22 nt, Human
gacccuggaguuaguccugugu

SEQ ID NO: 372789 - RNA, 18 nt, Human
ugagaggcuauuuuuugc

SEQ ID NO: 372790 - RNA, 22 nt, Human
cccauugugguuguugaggaua

SEQ ID NO: 372791 - RNA, 19 nt, Human
gucagcaccauggacaggg

SEQ ID NO: 372792 - RNA, 22 nt, Human
ugaagcagcaaaugaugggaga

SEQ ID NO: 372793 - RNA, 22 nt, Human
augaggcagucuggccugaggg

SEQ ID NO: 372794 - RNA, 22 nt, Human
uccauuuuagagaugaagaaac

SEQ ID NO: 372795 - RNA, 22 nt, Human
gagagggccgggggccagcucc

SEQ ID NO: 372796 - RNA, 22 nt, Human
ggcucugggucuguggggagcg

SEQ ID NO: 372797 - RNA, 22 nt, Human
cggcagagcuuccugcucagcg

SEQ ID NO: 372798 - RNA, 22 nt, Human
ccuggguggcagagguugcagu

SEQ ID NO: 372799 - RNA, 22 nt, Human
uucuagaugauaaaccagcagc

SEQ ID NO: 372800 - RNA, 22 nt, Human
aggcaguuuaggcagcgauuua

SEQ ID NO: 372801 - RNA, 22 nt, Human
aaaguccuuuuugccaugcaag

SEQ ID NO: 372802 - RNA, 22 nt, Human
cagggcugaaaucaagguguag

SEQ ID NO: 372803 - RNA, 21 nt, Human
ugaggcucaucuuauguggcu

SEQ ID NO: 372804 - RNA, 22 nt, Human
guaggaaaguaaaugaaauaca

SEQ ID NO: 372805 - RNA, 22 nt, Human
ucucuggaauuggcugaggcaa

SEQ ID NO: 372806 - RNA, 22 nt, Human
uucuaacaaguggcuuguuagu

SEQ ID NO: 372807 - RNA, 23 nt, Human
gccaggcuccggucuguggccac

SEQ ID NO: 372808 - RNA, 22 nt, Human
cuguuaauugugaauuuuacau

SEQ ID NO: 372809 - RNA, 22 nt, Human
acagcauugagagcuaaauuua

SEQ ID NO: 372810 - RNA, 22 nt, Human
ucuuuacaaucuaagcauaguu

SEQ ID NO: 372811 - RNA, 22 nt, Human
cuuaacagagagaaguguugcu

SEQ ID NO: 372812 - RNA, 22 nt, Human
uggagaugcacgagcaggugga

SEQ ID NO: 372813 - RNA, 22 nt, Human
ccagccuccauguagauagcug

SEQ ID NO: 372814 - RNA, 22 nt, Human
ugguccuggggaucugcaguga

SEQ ID NO: 372815 - RNA, 22 nt, Human
ucagggcaucaucaugaauaua

SEQ ID NO: 372816 - RNA, 22 nt, Human
aucagaaacucuuagagcaggg

SEQ ID NO: 372817 - RNA, 22 nt, Human
auauuaggugcucaauacaugc

SEQ ID NO: 372818 - RNA, 22 nt, Human
ucugucccugagagcucaggag

SEQ ID NO: 372819 - RNA, 22 nt, Human
gagcucagcacuaaaaucaugu

SEQ ID NO: 372820 - RNA, 22 nt, Human
acagaaugggauuugaauauuu

SEQ ID NO: 372821 - RNA, 22 nt, Human
gagagcacaugaacauggagga

SEQ ID NO: 372822 - RNA, 22 nt, Human
agugcugaagacuggcuaggga

SEQ ID NO: 372823 - RNA, 22 nt, Human
agaggaggcucugggaucgucc

SEQ ID NO: 372824 - RNA, 22 nt, Human
uuugaaagccuggcuuuucucu

SEQ ID NO: 372825 - RNA, 22 nt, Human
aaagccaucaguaaaaugauuu

SEQ ID NO: 372826 - RNA, 22 nt, Human
gaauuucuggacccuuugagaa

SEQ ID NO: 372827 - RNA, 22 nt, Human
gagaaagggauaauuugaagag

SEQ ID NO: 372828 - RNA, 16 nt, Human
gcagaggaaaggggag

SEQ ID NO: 372829 - RNA, 22 nt, Human
agucccagagaggucggggcca

SEQ ID NO: 372830 - RNA, 22 nt, Human
aauucucagguaaaaguuaagu

SEQ ID NO: 372831 - RNA, 22 nt, Human
uuuccucuccggggccuccagg

SEQ ID NO: 372832 - RNA, 22 nt, Human
gcacacaggcaguuuccagcca

SEQ ID NO: 372833 - RNA, 22 nt, Human
cauuuacagcagacugaugaaa

SEQ ID NO: 372834 - RNA, 22 nt, Human
aauauuucugcagaaugguuuu

SEQ ID NO: 372835 - RNA, 22 nt, Human
ggcucugcuucagaaggcucau

SEQ ID NO: 372836 - RNA, 22 nt, Human
gggcugccaagccugccugccu

SEQ ID NO: 372837 - RNA, 22 nt, Human
cucagagagggcaccagggcca

SEQ ID NO: 372838 - RNA, 22 nt, Human
ccaguggccaugcacgagcagc

SEQ ID NO: 372839 - RNA, 22 nt, Human
ucccugcacagccgagccaugc

SEQ ID NO: 372840 - RNA, 22 nt, Human
auacaaauuuauagaugcauuu

SEQ ID NO: 372841 - RNA, 22 nt, Human
uucuucaauuauuggaaagaaa

SEQ ID NO: 372842 - RNA, 22 nt, Human
aaugcacagcuaaagugguucc

SEQ ID NO: 372843 - RNA, 17 nt, Human
gaaagguccuagaaauc

SEQ ID NO: 372844 - RNA, 22 nt, Human
auaauucagguuuucuggcaca

SEQ ID NO: 372845 - RNA, 22 nt, Human
guuuuccauggaggucugaccu

SEQ ID NO: 372846 - RNA, 22 nt, Human
ugggcacuggaagccugcugug

SEQ ID NO: 372847 - RNA, 22 nt, Human
gaggcagaaguugcagugagca

SEQ ID NO: 372848 - RNA, 22 nt, Human
cucuggccugcuuccucaggua

SEQ ID NO: 372849 - RNA, 22 nt, Human
uuugcaauuugugcugcaaaug

SEQ ID NO: 372850 - RNA, 22 nt, Human
guccacauaggaacccagcuuc

SEQ ID NO: 372851 - RNA, 22 nt, Human
gaagccaacauuccaaguagaa

SEQ ID NO: 372852 - RNA, 22 nt, Human
cccagcucuuuuagcggcaucu

SEQ ID NO: 372853 - RNA, 18 nt, Human
aggcuucccaggcaggcc

SEQ ID NO: 372854 - RNA, 22 nt, Human
uaccaaaaccaagccauuaucu

SEQ ID NO: 372855 - RNA, 22 nt, Human
auuguacaaugccuggaacauu

SEQ ID NO: 372856 - RNA, 22 nt, Human
cagcaguggcugcaggcagcug

SEQ ID NO: 372857 - RNA, 22 nt, Human
cccccaaggccaggcugagacc

SEQ ID NO: 372858 - RNA, 20 nt, Human
aaagucuguuuaucucugga

SEQ ID NO: 372859 - RNA, 20 nt, Human
aucuucuuggccagcuugcu

SEQ ID NO: 372860 - RNA, 22 nt, Human
aggaccugaaauucuugcuuuu

SEQ ID NO: 372861 - RNA, 19 nt, Human
ugccuggacaaaugugggg

SEQ ID NO: 372862 - RNA, 22 nt, Human
aggcaguggcugagaccagggg

SEQ ID NO: 372863 - RNA, 22 nt, Human
agagggcugcugcacagugcuc

SEQ ID NO: 372864 - RNA, 22 nt, Human
ugucccaguuuaucugggacug

SEQ ID NO: 372865 - RNA, 22 nt, Human
gaaauauucuugucuuguuuuc

SEQ ID NO: 372866 - RNA, 22 nt, Human
ggggccagcacugugccuuugu

SEQ ID NO: 372867 - RNA, 22 nt, Human
ugaagcagagaauuugacaguc

SEQ ID NO: 372868 - RNA, 22 nt, Human
uuucuguagggauuucacaguu

SEQ ID NO: 372869 - RNA, 22 nt, Human
uggccugggcaugaagcaucgu

SEQ ID NO: 372870 - RNA, 22 nt, Human
agccacagcaacaagugcaauu

SEQ ID NO: 372871 - RNA, 22 nt, Human
gacccaggagugcagagagugg

SEQ ID NO: 372872 - RNA, 22 nt, Human
aaacuuuaagacaguccucaag

SEQ ID NO: 372873 - RNA, 22 nt, Human
aagcauuuuguuuuaagaauga

SEQ ID NO: 372874 - RNA, 22 nt, Human
ggacagcucugccaggagcuca

SEQ ID NO: 372875 - RNA, 21 nt, Human
ucuguacaucauugagucccc

SEQ ID NO: 372876 - RNA, 22 nt, Human
agggcagugggaaagccugcuc

SEQ ID NO: 372877 - RNA, 22 nt, Human
agugcuuuaccuagauaauguu

SEQ ID NO: 372878 - RNA, 22 nt, Human
ucuuugcaaaauacaacaaugg

SEQ ID NO: 372879 - RNA, 22 nt, Human
gagauuggauuuaauggccaaa

SEQ ID NO: 372880 - RNA, 22 nt, Human
uucugaaccauugagcacugcc

SEQ ID NO: 372881 - RNA, 22 nt, Human
acccagggaccccgcugacgcc

SEQ ID NO: 372882 - RNA, 22 nt, Human
ccacagcaugcaggccugacac

SEQ ID NO: 372883 - RNA, 22 nt, Human
caugcuuaugauuugcuaagcc

SEQ ID NO: 372884 - RNA, 22 nt, Human
ucuagacacuacuaguaaccgg

SEQ ID NO: 372885 - RNA, 22 nt, Human
gugaauaauauuguuuauaaaa

SEQ ID NO: 372886 - RNA, 22 nt, Human
uacgacacaucugaucucaaaa

SEQ ID NO: 372887 - RNA, 22 nt, Human
uauuucaagaacuucuauccau

SEQ ID NO: 372888 - RNA, 22 nt, Human
uagggauguaaacauaguaauu

SEQ ID NO: 372889 - RNA, 22 nt, Human
uacauggguagguuaagucaua

SEQ ID NO: 372890 - RNA, 22 nt, Human
agccaggcagacucucuuucuu

SEQ ID NO: 372891 - RNA, 22 nt, Human
agggcaugaagcaguggacagc

SEQ ID NO: 372892 - RNA, 22 nt, Human
aaagccaugggucuuuggcaua

SEQ ID NO: 372893 - RNA, 22 nt, Human
ucucagggugaggaaagaauuu

SEQ ID NO: 372894 - RNA, 22 nt, Human
agucccagcucagaaccacuag

SEQ ID NO: 372895 - RNA, 22 nt, Human
uacaaagugagcaaccucuuuu

SEQ ID NO: 372896 - RNA, 22 nt, Human
aggaggaggcuggaguacaccc

SEQ ID NO: 372897 - RNA, 21 nt, Human
ucacaucuauguuaagcaaac

SEQ ID NO: 372898 - RNA, 22 nt, Human
uggccaggggaguuccccucca

SEQ ID NO: 372899 - RNA, 22 nt, Human
ucaaggaggugcuuggcuucac

SEQ ID NO: 372900 - RNA, 22 nt, Human
cuggcagccaagugggauacuc

SEQ ID NO: 372901 - RNA, 22 nt, Human
agcugccauggccugaauuuac

SEQ ID NO: 372902 - RNA, 22 nt, Human
cccugaggggaguggugaggug

SEQ ID NO: 372903 - RNA, 22 nt, Human
cauguuaaugaauuuuugcagu

SEQ ID NO: 372904 - RNA, 22 nt, Human
caguggaauauauaggggauuu

SEQ ID NO: 372905 - RNA, 22 nt, Human
acaaagucuuuuacaacaguca

SEQ ID NO: 372906 - RNA, 22 nt, Human
cugaauaauauuccauuaugag

SEQ ID NO: 372907 - RNA, 22 nt, Human
aggcagcaugggccccagcucc

SEQ ID NO: 372908 - RNA, 22 nt, Human
acagaguucccacuccagaagc

SEQ ID NO: 372909 - RNA, 22 nt, Human
gucagaggaggcugaguaggaa

SEQ ID NO: 372910 - RNA, 22 nt, Human
aggccagggucccacacucgca

SEQ ID NO: 372911 - RNA, 22 nt, Human
ucaaaugcaggucuggucuugg

SEQ ID NO: 372912 - RNA, 22 nt, Human
cugaggcugcccagggccaggu

SEQ ID NO: 372913 - RNA, 22 nt, Human
aguguuuauauuauggaaauau

SEQ ID NO: 372914 - RNA, 22 nt, Human
cagcgucucguugugggccucg

SEQ ID NO: 372915 - RNA, 17 nt, Human
cagugcagagcccuuuc

SEQ ID NO: 372916 - RNA, 22 nt, Human
acucugcuuauugcugcaggca

SEQ ID NO: 372917 - RNA, 22 nt, Human
gcuggagccuucugcucuguug

SEQ ID NO: 372918 - RNA, 20 nt, Human
ugcuccaucuaaagugauua

SEQ ID NO: 372919 - RNA, 22 nt, Human
auuucuacaguacacaugcauu

SEQ ID NO: 372920 - RNA, 22 nt, Human
gcagaggcauuucugacgcugc

SEQ ID NO: 372921 - RNA, 22 nt, Human
aggagguggcugaacuugaggg

SEQ ID NO: 372922 - RNA, 22 nt, Human
aguggcagagccaagauaugau

SEQ ID NO: 372923 - RNA, 22 nt, Human
ugcaucuuacguuuugaaaggg

SEQ ID NO: 372924 - RNA, 22 nt, Human
auguaacaggugaagcucugag

SEQ ID NO: 372925 - RNA, 22 nt, Human
uggccuggcucacagugagauu

SEQ ID NO: 372926 - RNA, 22 nt, Human
gcugccugauuuacauagugaa

SEQ ID NO: 372927 - RNA, 23 nt, Human
agcaauaagaagggauacaugug

SEQ ID NO: 372928 - RNA, 20 nt, Human
caguagcaauaauuagaagc

SEQ ID NO: 372929 - RNA, 22 nt, Human
accacugggcgggcagccugcu

SEQ ID NO: 372930 - RNA, 22 nt, Human
agcugcccuucucuugcccuug

SEQ ID NO: 372931 - RNA, 22 nt, Human
cagggcucgcugccagcuucag

SEQ ID NO: 372932 - RNA, 22 nt, Human
agccauuuuccugaaauauaac

SEQ ID NO: 372933 - RNA, 22 nt, Human
uucaaugauuuuuagggaucau

SEQ ID NO: 372934 - RNA, 22 nt, Human
ggaaagccaggugcucuggugu

SEQ ID NO: 372935 - RNA, 22 nt, Human
ucagaagagcuggugcugccug

SEQ ID NO: 372936 - RNA, 22 nt, Human
ugugugaauggauuauucuauu

SEQ ID NO: 372937 - RNA, 22 nt, Human
cagggccuccccggcagucuuu

SEQ ID NO: 372938 - RNA, 22 nt, Human
cuuugaagagauuacugugcuc

SEQ ID NO: 372939 - RNA, 21 nt, Human
aggcacuguuugugguuuggg

SEQ ID NO: 372940 - RNA, 22 nt, Human
cccaggaaaguggaggcggcug

SEQ ID NO: 372941 - RNA, 18 nt, Human
uccucucuuuccccaggg

SEQ ID NO: 372942 - RNA, 22 nt, Human
aaggcagcucagcucauggcag

SEQ ID NO: 372943 - RNA, 22 nt, Human
cggcagagcccugagucagccu

SEQ ID NO: 372944 - RNA, 22 nt, Human
ugcauugcaguuaacucaguau

SEQ ID NO: 372945 - RNA, 22 nt, Human
gaugcacuugccccuccucaga

SEQ ID NO: 372946 - RNA, 22 nt, Human
aaaucucaauuugaauuguagc

SEQ ID NO: 372947 - RNA, 22 nt, Human
caguucuuaauaccaugugguu

SEQ ID NO: 372948 - RNA, 22 nt, Human
cuuugcaauagaggcacacaug

SEQ ID NO: 372949 - RNA, 22 nt, Human
gaguuauuaauggcugaguuug

SEQ ID NO: 372950 - RNA, 22 nt, Human
cauggacucugguuuggggagc

SEQ ID NO: 372951 - RNA, 23 nt, Human
ucuggcuccauccuuggggaucc

SEQ ID NO: 372952 - RNA, 22 nt, Human
cagcuggacuuuugauagaagu

SEQ ID NO: 372953 - RNA, 22 nt, Human
cugauuccugauucaugcucuu

SEQ ID NO: 372954 - RNA, 22 nt, Human
cacagcagaaauaugaaggcag

SEQ ID NO: 372955 - RNA, 22 nt, Human
aaggcucccucuucucgagugu

SEQ ID NO: 372956 - RNA, 21 nt, Human
uuaagagcuuagcaguaggcc

SEQ ID NO: 372957 - RNA, 22 nt, Human
cugcccuggucccauggcugau

SEQ ID NO: 372958 - RNA, 22 nt, Human
ccuuuaauuuacaauguuaauu

SEQ ID NO: 372959 - RNA, 22 nt, Human
auguuucauuuagauaucaggc

SEQ ID NO: 372960 - RNA, 22 nt, Human
gcugcccagcaggccccagggg

SEQ ID NO: 372961 - RNA, 22 nt, Human
ucccccacucuaaaggagccuu

SEQ ID NO: 372962 - RNA, 20 nt, Human
ucccuggaggugguggcauc

SEQ ID NO: 372963 - RNA, 21 nt, Human
agaaaaaccagcauguuuuca

SEQ ID NO: 372964 - RNA, 22 nt, Human
aaggcuuuuguuccuauuuagu

SEQ ID NO: 372965 - RNA, 22 nt, Human
uggcagagacuccuccugggag

SEQ ID NO: 372966 - RNA, 20 nt, Human
uucuuaaagaccucacuuug

SEQ ID NO: 372967 - RNA, 22 nt, Human
caucagucuagauucuaguacc

SEQ ID NO: 372968 - RNA, 22 nt, Human
agagcugcaauuucauguggug

SEQ ID NO: 372969 - RNA, 22 nt, Human
cagcagcugcgugcccaggccg

SEQ ID NO: 372970 - RNA, 22 nt, Human
uggggacauagccagucuggcu

SEQ ID NO: 372971 - RNA, 22 nt, Human
gggcugcugcugccagcgacac

SEQ ID NO: 372972 - RNA, 22 nt, Human
cuuccuguugucacagucugcg

SEQ ID NO: 372973 - RNA, 22 nt, Human
aguguccaacucagcuugucaa

SEQ ID NO: 372974 - RNA, 22 nt, Human
gaggcaccucgcgggaggaggc

SEQ ID NO: 372975 - RNA, 22 nt, Human
cacaggcuugucagcaugaggc

SEQ ID NO: 372976 - RNA, 22 nt, Human
uaauuuuuccacguacacuggg

SEQ ID NO: 372977 - RNA, 22 nt, Human
gcaggcugaugacuggaguugg

SEQ ID NO: 372978 - RNA, 22 nt, Human
ucugggaauuuauuggcacuuu

SEQ ID NO: 372979 - RNA, 22 nt, Human
auuuuucucuccacuccauuaa

SEQ ID NO: 372980 - RNA, 22 nt, Human
cucccuggaggcccagaccugg

SEQ ID NO: 372981 - RNA, 22 nt, Human
uccaggagggggagccgugccg

SEQ ID NO: 372982 - RNA, 22 nt, Human
ucccuggccauuccucuaggcc

SEQ ID NO: 372983 - RNA, 22 nt, Human
uguggcugacuccuggucccca

SEQ ID NO: 372984 - RNA, 18 nt, Human
gcaggagauggguggggu

SEQ ID NO: 372985 - RNA, 22 nt, Human
aaagaguucuaugaucuuucca

SEQ ID NO: 372986 - RNA, 17 nt, Human
gagccacccugugcgag

SEQ ID NO: 372987 - RNA, 22 nt, Human
aaagguaguacuucuagaaggg

SEQ ID NO: 372988 - RNA, 22 nt, Human
aaugcacacauuugguacugaa

SEQ ID NO: 372989 - RNA, 17 nt, Human
gagaguguauuggaugc

SEQ ID NO: 372990 - RNA, 22 nt, Human
augggcaguuaggaggccagga

SEQ ID NO: 372991 - RNA, 21 nt, Human
aauuagggugccucuuauaau

SEQ ID NO: 372992 - RNA, 22 nt, Human
gcagcauuucucaaaggguggu

SEQ ID NO: 372993 - RNA, 22 nt, Human
uauuuugucuucugcucaucac

SEQ ID NO: 372994 - RNA, 22 nt, Human
agcaccuguggcucaugcucgu

SEQ ID NO: 372995 - RNA, 22 nt, Human
uuagauaaauugcaacuugauu

SEQ ID NO: 372996 - RNA, 22 nt, Human
ugggcucucuggcaggaaggcu

SEQ ID NO: 372997 - RNA, 22 nt, Human
uggcagcuagcuguuuucaugc

SEQ ID NO: 372998 - RNA, 22 nt, Human
cuggcucuaucuccaaggcugg

SEQ ID NO: 372999 - RNA, 22 nt, Human
auauuguugacuauaagaguaa

SEQ ID NO: 373000 - RNA, 22 nt, Human
agaagcuuccuacauuguucuu

SEQ ID NO: 373001 - RNA, 22 nt, Human
acuguccaagcaugccuggcuu

SEQ ID NO: 373002 - RNA, 22 nt, Human
gaggccugcuuuggcacucugg

SEQ ID NO: 373003 - RNA, 22 nt, Human
ugcagggcaguuuguuucggca

SEQ ID NO: 373004 - RNA, 22 nt, Human
uucaaacaguguagaauauaug

SEQ ID NO: 373005 - RNA, 19 nt, Human
ccuggaggugaagguucuc

SEQ ID NO: 373006 - RNA, 22 nt, Human
ccuggaggagcgcugaccagcu

SEQ ID NO: 373007 - RNA, 22 nt, Human
agagcuggcugguagcccugau

SEQ ID NO: 373008 - RNA, 22 nt, Human
gagcuggcaggaggcuccccga

SEQ ID NO: 373009 - RNA, 22 nt, Human
gagaaaugcaugcaugucauca

SEQ ID NO: 373010 - RNA, 23 nt, Human
ucagucuucccugucaguaauag

SEQ ID NO: 373011 - RNA, 22 nt, Human
uccagagccuauauguucaacu

SEQ ID NO: 373012 - RNA, 19 nt, Human
agccacagaacuugcagga

SEQ ID NO: 373013 - RNA, 22 nt, Human
agggccacaguggggccugaga

SEQ ID NO: 373014 - RNA, 22 nt, Human
aaggaagaagacucuuuacucc

SEQ ID NO: 373015 - RNA, 22 nt, Human
gcucuccacugaccacggggca

SEQ ID NO: 373016 - RNA, 22 nt, Human
agaaugcaguuugaaauaaggu

SEQ ID NO: 373017 - RNA, 22 nt, Human
aggauccuuuuucugcuguuug

SEQ ID NO: 373018 - RNA, 22 nt, Human
ugcagaggagucagccugggca

SEQ ID NO: 373019 - RNA, 22 nt, Human
ugcagagagauauggcaagagg

SEQ ID NO: 373020 - RNA, 20 nt, Human
ggcaggcuuuauauggaggg

SEQ ID NO: 373021 - RNA, 22 nt, Human
cugggcucagaugagaggaagg

SEQ ID NO: 373022 - RNA, 22 nt, Human
uguguccauucaggcacugacc

SEQ ID NO: 373023 - RNA, 22 nt, Human
acuguacuguguauuguagaau

SEQ ID NO: 373024 - RNA, 20 nt, Human
ccagguggugccuggagagg

SEQ ID NO: 373025 - RNA, 22 nt, Human
ugcagggcagauaugacuguag

SEQ ID NO: 373026 - RNA, 22 nt, Human
gaugaucaucuguaaaguuaga

SEQ ID NO: 373027 - RNA, 22 nt, Human
cugagaggaugcugcaguggag

SEQ ID NO: 373028 - RNA, 22 nt, Human
aggagucaggaccaaauggaaa

SEQ ID NO: 373029 - RNA, 22 nt, Human
ucagaaaauaacuguuaguuug

SEQ ID NO: 373030 - RNA, 20 nt, Human
aaaagcagccagagauggua

SEQ ID NO: 373031 - RNA, 22 nt, Human
ugcucagacaagcugaacagua

SEQ ID NO: 373032 - RNA, 22 nt, Human
gcugucaggccaugugggccuu

SEQ ID NO: 373033 - RNA, 22 nt, Human
aaguuugagaagcuuauagaua

SEQ ID NO: 373034 - RNA, 22 nt, Human
cagucaccaccagguggcagua

SEQ ID NO: 373035 - RNA, 22 nt, Human
ccugacucuggccaggccagcu

SEQ ID NO: 373036 - RNA, 22 nt, Human
uagcacauacauaauagauaga

SEQ ID NO: 373037 - RNA, 22 nt, Human
gaaaugugggucaugacccauu

SEQ ID NO: 373038 - RNA, 17 nt, Human
ggugaguguccaggugg

SEQ ID NO: 373039 - RNA, 22 nt, Human
uaaauuuacccaaggaacaugu

SEQ ID NO: 373040 - RNA, 22 nt, Human
gggcccagcgugguuccaucug

SEQ ID NO: 373041 - RNA, 22 nt, Human
ggaggccuugaggccaggagcu

SEQ ID NO: 373042 - RNA, 22 nt, Human
ggcagcaucucuggcagcagcu

SEQ ID NO: 373043 - RNA, 22 nt, Human
uaaggccagcaugaaugcagca

SEQ ID NO: 373044 - RNA, 22 nt, Human
agugcuuugagcguuugaaaag

SEQ ID NO: 373045 - RNA, 22 nt, Human
ucugggcucuuaguguacccuc

SEQ ID NO: 373046 - RNA, 22 nt, Human
agugauggagcuuccucugcua

SEQ ID NO: 373047 - RNA, 22 nt, Human
agcugcuaugacaacaccagcc

SEQ ID NO: 373048 - RNA, 22 nt, Human
uggcagcuguguccagguagaa

SEQ ID NO: 373049 - RNA, 22 nt, Human
ucacuucacacccacuaucaug

SEQ ID NO: 373050 - RNA, 22 nt, Human
ugcuggcucaguuugcagacuc

SEQ ID NO: 373051 - RNA, 22 nt, Human
ugcugucugcaacaguacuaca

SEQ ID NO: 373052 - RNA, 22 nt, Human
acccaggacaugggcacccgug

SEQ ID NO: 373053 - RNA, 22 nt, Human
acuuuguauaagacaauaaaga

SEQ ID NO: 373054 - RNA, 22 nt, Human
ccugucuguauugguuugcuau

SEQ ID NO: 373055 - RNA, 22 nt, Human
auaucaaagcuaguggaaauuu

SEQ ID NO: 373056 - RNA, 22 nt, Human
uggcagcacuugaacuugagcc

SEQ ID NO: 373057 - RNA, 22 nt, Human
ggcaaaaaguucccaucagugu

SEQ ID NO: 373058 - RNA, 22 nt, Human
uaugaaaauuuagcugaagcau

SEQ ID NO: 373059 - RNA, 22 nt, Human
ugaacaacugcaaaaaucucca

SEQ ID NO: 373060 - RNA, 20 nt, Human
cccaggugucugaagcucug

SEQ ID NO: 373061 - RNA, 22 nt, Human
gcugucugucucugugacuuaa

SEQ ID NO: 373062 - RNA, 22 nt, Human
aucuggcuauuucuggucgggg

SEQ ID NO: 373063 - RNA, 22 nt, Human
agcagcauaucagagaaaguca

SEQ ID NO: 373064 - RNA, 19 nt, Human
uacuaaacaugcauauugg

SEQ ID NO: 373065 - RNA, 22 nt, Human
ggccugagcucuggggaggcaa

SEQ ID NO: 373066 - RNA, 22 nt, Human
cugugugugucugcagcauacu

SEQ ID NO: 373067 - RNA, 22 nt, Human
ggcugagacuagagugaggcau

SEQ ID NO: 373068 - RNA, 22 nt, Human
ggagccaguuuagaccucaguu

SEQ ID NO: 373069 - RNA, 22 nt, Human
accgggaaguccugcacugggc

SEQ ID NO: 373070 - RNA, 22 nt, Human
uuucaacuagccccuaaguccu

SEQ ID NO: 373071 - RNA, 22 nt, Human
gcuggggucugugaggagggcu

SEQ ID NO: 373072 - RNA, 22 nt, Human
ccugagaggcccucucacuguc

SEQ ID NO: 373073 - RNA, 22 nt, Human
ggcuuggaaauugcaggacaca

SEQ ID NO: 373074 - RNA, 22 nt, Human
cugaggcucaagggcagguggg

SEQ ID NO: 373075 - RNA, 22 nt, Human
cuuaggcaagcagagcccaucc

SEQ ID NO: 373076 - RNA, 22 nt, Human
cagacacagcaauucuguguug

SEQ ID NO: 373077 - RNA, 22 nt, Human
acagcauucaauaaauaauaac

SEQ ID NO: 373078 - RNA, 22 nt, Human
agggcacaucugcugggaaugg

SEQ ID NO: 373079 - RNA, 22 nt, Human
gcuucauuacugacagucugug

SEQ ID NO: 373080 - RNA, 22 nt, Human
ggagccaguauuuaguggucuu

SEQ ID NO: 373081 - RNA, 22 nt, Human
cggcuggguucggcugcaggcc

SEQ ID NO: 373082 - RNA, 22 nt, Human
cagagggagcccuccaggagca

SEQ ID NO: 373083 - RNA, 22 nt, Human
gcugccuggaauaacggcuggc

SEQ ID NO: 373084 - RNA, 22 nt, Human
acagccugcagccccaggucgc

SEQ ID NO: 373085 - RNA, 22 nt, Human
aggugcuggaguagaagaaaaa

SEQ ID NO: 373086 - RNA, 19 nt, Human
gcuggggccugaccagaca

SEQ ID NO: 373087 - RNA, 22 nt, Human
cuagaaaucucuguuuacauca

SEQ ID NO: 373088 - RNA, 22 nt, Human
gagcugcugguugcuggugccu

SEQ ID NO: 373089 - RNA, 22 nt, Human
caugucuuauauccugucuuca

SEQ ID NO: 373090 - RNA, 22 nt, Human
gagggugguggcuuaaggugcu

SEQ ID NO: 373091 - RNA, 22 nt, Human
cacacacaguuuuguauucugu

SEQ ID NO: 373092 - RNA, 22 nt, Human
ugugcccauuacacagaggcau

SEQ ID NO: 373093 - RNA, 20 nt, Human
acuuucucgguuucucaccu

SEQ ID NO: 373094 - RNA, 22 nt, Human
cugggggcaauggucagagugu

SEQ ID NO: 373095 - RNA, 22 nt, Human
gaagagcugcucagaacaugau

SEQ ID NO: 373096 - RNA, 22 nt, Human
aaguucaagucugcaucuuuuu

SEQ ID NO: 373097 - RNA, 22 nt, Human
cugcgcagcaaucagagaggag

SEQ ID NO: 373098 - RNA, 22 nt, Human
ugggcagaauugugguaguuaa

SEQ ID NO: 373099 - RNA, 22 nt, Human
uuacaagauuaauuauuggagu

SEQ ID NO: 373100 - RNA, 22 nt, Human
aguuauauaacuaucuagaugc

SEQ ID NO: 373101 - RNA, 22 nt, Human
ggccugucucacccccgggugc

SEQ ID NO: 373102 - RNA, 18 nt, Human
uccuccuuuggccuuuuc

SEQ ID NO: 373103 - RNA, 22 nt, Human
ggcaguggguuccccaaggcac

SEQ ID NO: 373104 - RNA, 22 nt, Human
aguacuuugcacuuugcucaga

SEQ ID NO: 373105 - RNA, 22 nt, Human
auauacugaggagacuuuauau

SEQ ID NO: 373106 - RNA, 18 nt, Human
agaguguucucagugaaa

SEQ ID NO: 373107 - RNA, 22 nt, Human
auguuucaaauauauagaguug

SEQ ID NO: 373108 - RNA, 22 nt, Human
auuucaacguuagauguaauag

SEQ ID NO: 373109 - RNA, 22 nt, Human
agcagggccugagugaccuaac

SEQ ID NO: 373110 - RNA, 22 nt, Human
agguaggggguuugggaacugc

SEQ ID NO: 373111 - RNA, 22 nt, Human
cucuuucugauucgcugggacc

SEQ ID NO: 373112 - RNA, 22 nt, Human
uaguacaguuuaaauauuaaua

SEQ ID NO: 373113 - RNA, 22 nt, Human
caggugggagcggagacugauu

SEQ ID NO: 373114 - RNA, 22 nt, Human
gucccuggaauggacucugcgc

SEQ ID NO: 373115 - RNA, 22 nt, Human
aaaugcuuauuagugucacaaa

SEQ ID NO: 373116 - RNA, 22 nt, Human
uuggaucagaugauaucuuugu

SEQ ID NO: 373117 - RNA, 18 nt, Human
aggcccuggccucgaaca

SEQ ID NO: 373118 - RNA, 22 nt, Human
ccagcccugaacccugcugcau

SEQ ID NO: 373119 - RNA, 22 nt, Human
uucuuauagaagcaaccauugu

SEQ ID NO: 373120 - RNA, 22 nt, Human
augaacaaguauuugcaugagc

SEQ ID NO: 373121 - RNA, 23 nt, Human
uccugcagauaagcugguugaca

SEQ ID NO: 373122 - RNA, 22 nt, Human
ucaggagacuggcagugcccac

SEQ ID NO: 373123 - RNA, 22 nt, Human
agagccugaggaugucccagcu

SEQ ID NO: 373124 - RNA, 22 nt, Human
ccaguggguaggccauggugag

SEQ ID NO: 373125 - RNA, 22 nt, Human
caaagucauggggaugcagguc

SEQ ID NO: 373126 - RNA, 22 nt, Human
cauugcaacuucaaacuccugg

SEQ ID NO: 373127 - RNA, 22 nt, Human
ucucucuuuuuaaucauguaau

SEQ ID NO: 373128 - RNA, 22 nt, Human
gcugucuuccuugcuccaaggg

SEQ ID NO: 373129 - RNA, 22 nt, Human
agaucucaccucuguguauuau

SEQ ID NO: 373130 - RNA, 22 nt, Human
uguaagauauucagcuuauuga

SEQ ID NO: 373131 - RNA, 21 nt, Human
ccuggccaaucugauaggguu

SEQ ID NO: 373132 - RNA, 22 nt, Human
aggauccugcgcuuugggggag

SEQ ID NO: 373133 - RNA, 22 nt, Human
ucaggagaaggcaauguggaaa

SEQ ID NO: 373134 - RNA, 22 nt, Human
gcaggcagaucaccugucagga

SEQ ID NO: 373135 - RNA, 22 nt, Human
cacucugcgcugggcgccagcg

SEQ ID NO: 373136 - RNA, 20 nt, Human
aguaggggaaugcaagagca

SEQ ID NO: 373137 - RNA, 22 nt, Human
uggagugaaguaaagaggacaa

SEQ ID NO: 373138 - RNA, 22 nt, Human
cugugcugauucagcacaggcc

SEQ ID NO: 373139 - RNA, 20 nt, Human
ggcucuggaaucuggugggc

SEQ ID NO: 373140 - RNA, 22 nt, Human
cagcagugcuucagugugagau

SEQ ID NO: 373141 - RNA, 21 nt, Human
ggcagccucuguggaagggga

SEQ ID NO: 373142 - RNA, 22 nt, Human
agucagcagugaaagcacagcc

SEQ ID NO: 373143 - RNA, 22 nt, Human
acaggugauucaggcucuggga

SEQ ID NO: 373144 - RNA, 22 nt, Human
cguuggagacacuugaggacuu

SEQ ID NO: 373145 - RNA, 22 nt, Human
acuguguggaaauuugugaggg

SEQ ID NO: 373146 - RNA, 22 nt, Human
ucucugggaaugggccugggua

SEQ ID NO: 373147 - RNA, 22 nt, Human
aguuuauguagaauuggcaaua

SEQ ID NO: 373148 - RNA, 22 nt, Human
uggaguucauccaugacagcuu

SEQ ID NO: 373149 - RNA, 22 nt, Human
ucucuccuuaucauuguguuua

SEQ ID NO: 373150 - RNA, 22 nt, Human
gagucccaugaugauagccaca

SEQ ID NO: 373151 - RNA, 22 nt, Human
uuauuagguuuacauaaagguu

SEQ ID NO: 373152 - RNA, 22 nt, Human
uaucaucuuguugucaugcagc

SEQ ID NO: 373153 - RNA, 22 nt, Human
agagaaaacucauugagguguc

SEQ ID NO: 373154 - RNA, 22 nt, Human
gcaggcaggagcccaacugccu

SEQ ID NO: 373155 - RNA, 22 nt, Human
cacugaaggaaggacuacugca

SEQ ID NO: 373156 - RNA, 22 nt, Human
gaggagagagggacugucugca

SEQ ID NO: 373157 - RNA, 22 nt, Human
aggccaggaccauuagcccaga

SEQ ID NO: 373158 - RNA, 22 nt, Human
ucccaggaagaucccagggacc

SEQ ID NO: 373159 - RNA, 22 nt, Human
acccagcaugacaccugcacau

SEQ ID NO: 373160 - RNA, 22 nt, Human
acuguggaugccaaaggggagg

SEQ ID NO: 373161 - RNA, 22 nt, Human
cccaggaauuggaggcugcagu

SEQ ID NO: 373162 - RNA, 22 nt, Human
ugacacaggcagcucccagcac

SEQ ID NO: 373163 - RNA, 22 nt, Human
cccuugcacauuugucuuuaau

SEQ ID NO: 373164 - RNA, 22 nt, Human
agccaggaauuggacaacacau

SEQ ID NO: 373165 - RNA, 22 nt, Human
aaagucugagcagaauuucuca

SEQ ID NO: 373166 - RNA, 22 nt, Human
cuggcccagagagcagagcuua

SEQ ID NO: 373167 - RNA, 22 nt, Human
ugggcuggcccaccacaccucg

SEQ ID NO: 373168 - RNA, 22 nt, Human
ucucagaguuuuuuuccaggac

SEQ ID NO: 373169 - RNA, 19 nt, Human
agcagagcccugaagaucc

SEQ ID NO: 373170 - RNA, 22 nt, Human
cucccaggguagggagagacua

SEQ ID NO: 373171 - RNA, 22 nt, Human
ucuggagaacuugcaagaggau

SEQ ID NO: 373172 - RNA, 22 nt, Human
cagccagugguugaagaugcag

SEQ ID NO: 373173 - RNA, 22 nt, Human
ucccagaaaaaggaggcuauga

SEQ ID NO: 373174 - RNA, 22 nt, Human
ugcaauaaagugcuauaaaucc

SEQ ID NO: 373175 - RNA, 22 nt, Human
agcgggugcugugucagcccuc

SEQ ID NO: 373176 - RNA, 22 nt, Human
caccagggcucugagcucugaa

SEQ ID NO: 373177 - RNA, 22 nt, Human
gggcucagacaucccuccugga

SEQ ID NO: 373178 - RNA, 22 nt, Human
aaacugcuuuccacaguggcua

SEQ ID NO: 373179 - RNA, 19 nt, Human
caagugaagccugggaugg

SEQ ID NO: 373180 - RNA, 22 nt, Human
agcagggcucacauuaguggau

SEQ ID NO: 373181 - RNA, 22 nt, Human
agucccagcuacucaagaggcu

SEQ ID NO: 373182 - RNA, 22 nt, Human
acccaggggcagccuugcugug

SEQ ID NO: 373183 - RNA, 22 nt, Human
uggagggaacccaggcugcucu

SEQ ID NO: 373184 - RNA, 22 nt, Human
cagaggcaggauaagaacugcg

SEQ ID NO: 373185 - RNA, 22 nt, Human
ugccaggcagugucagauugag

SEQ ID NO: 373186 - RNA, 22 nt, Human
aaacuuuggauugugauugugc

SEQ ID NO: 373187 - RNA, 22 nt, Human
cugccuuugcccuugacacugu

SEQ ID NO: 373188 - RNA, 22 nt, Human
cucacugugccuuuucccaaac

SEQ ID NO: 373189 - RNA, 22 nt, Human
agcagaugagccucaugacugg

SEQ ID NO: 373190 - RNA, 22 nt, Human
ugccucagaguugucccuacca

SEQ ID NO: 373191 - RNA, 22 nt, Human
ccagguggacggcgaguacagg

SEQ ID NO: 373192 - RNA, 22 nt, Human
ugcacccucaucagucaaaugg

SEQ ID NO: 373193 - RNA, 22 nt, Human
uacuuucuagcucuccccaguu

SEQ ID NO: 373194 - RNA, 22 nt, Human
agacucaagacugcagaagacg

SEQ ID NO: 373195 - RNA, 22 nt, Human
gcucuggacccuggaguggcug

SEQ ID NO: 373196 - RNA, 22 nt, Human
ucacacacauaaucuaagauua

SEQ ID NO: 373197 - RNA, 22 nt, Human
gagaagcaaucgugacaucucc

SEQ ID NO: 373198 - RNA, 22 nt, Human
acagagauggcacagagaaggu

SEQ ID NO: 373199 - RNA, 22 nt, Human
cacagggccacuuucccaguaa

SEQ ID NO: 373200 - RNA, 22 nt, Human
ccuggccuccuggccuucucau

SEQ ID NO: 373201 - RNA, 22 nt, Human
ugaaaauggccugaagaagcaa

SEQ ID NO: 373202 - RNA, 22 nt, Human
agaaacauuuagauuauauguc

SEQ ID NO: 373203 - RNA, 22 nt, Human
gguggcagaauaauugaagguc

SEQ ID NO: 373204 - RNA, 22 nt, Human
cugagcugggaguagagacucu

SEQ ID NO: 373205 - RNA, 22 nt, Human
uugauccaguugaaagugauga

SEQ ID NO: 373206 - RNA, 22 nt, Human
gcaggagagucugugccagguu

SEQ ID NO: 373207 - RNA, 22 nt, Human
gagggaccuuuacacagacauu

SEQ ID NO: 373208 - RNA, 22 nt, Human
aaggcugagggcuguaccuggc

SEQ ID NO: 373209 - RNA, 22 nt, Human
guaaaugugcuucuuuuaacuu

SEQ ID NO: 373210 - RNA, 22 nt, Human
caagucauuacugaaaugucac

SEQ ID NO: 373211 - RNA, 22 nt, Human
guggccuggauagacuccaucu

SEQ ID NO: 373212 - RNA, 22 nt, Human
uuugaaagacagaauauuuuug

SEQ ID NO: 373213 - RNA, 22 nt, Human
uaaaggcucacuggcuuggggu

SEQ ID NO: 373214 - RNA, 22 nt, Human
auguacauuuagaucauuucug

SEQ ID NO: 373215 - RNA, 22 nt, Human
caggagacaauggcuguggggc

SEQ ID NO: 373216 - RNA, 22 nt, Human
caggggcucccugggugccagu

SEQ ID NO: 373217 - RNA, 22 nt, Human
gaggaguguauuccacaccacu

SEQ ID NO: 373218 - RNA, 22 nt, Human
gacccagcuuaagucacauguu

SEQ ID NO: 373219 - RNA, 22 nt, Human
aguguuuaaacugaagugauga

SEQ ID NO: 373220 - RNA, 22 nt, Human
ugggugagugggaaaagcccag

SEQ ID NO: 373221 - RNA, 22 nt, Human
guuuauuaacugucaagugauu

SEQ ID NO: 373222 - RNA, 22 nt, Human
ugggagcccaagggagcugccg

SEQ ID NO: 373223 - RNA, 22 nt, Human
uguacaaucugaugauguaugg

SEQ ID NO: 373224 - RNA, 22 nt, Human
cagucccaggguugguucagcu

SEQ ID NO: 373225 - RNA, 23 nt, Human
cagggccaggcagcagcugucac

SEQ ID NO: 373226 - RNA, 22 nt, Human
aguguuucccaguaggaugaaa

SEQ ID NO: 373227 - RNA, 21 nt, Human
ggccucugucauccugggaag

SEQ ID NO: 373228 - RNA, 22 nt, Human
aggagagaauguuccaggcuug

SEQ ID NO: 373229 - RNA, 22 nt, Human
uuagggcuuuucugaauaggcc

SEQ ID NO: 373230 - RNA, 22 nt, Human
acagcuuuaucucagggaucag

SEQ ID NO: 373231 - RNA, 22 nt, Human
acuagaaauuacucagaauaaa

SEQ ID NO: 373232 - RNA, 18 nt, Human
gggcaucauucacaaagu

SEQ ID NO: 373233 - RNA, 18 nt, Human
uguuccaaggaaggaauc

SEQ ID NO: 373234 - RNA, 21 nt, Human
uuacaaagcaagugcuguguc

SEQ ID NO: 373235 - RNA, 22 nt, Human
augauugaaaaugacauugcca

SEQ ID NO: 373236 - RNA, 22 nt, Human
auauacaaagggcaaccucgcu

SEQ ID NO: 373237 - RNA, 22 nt, Human
aagagcauauuaauaguggaga

SEQ ID NO: 373238 - RNA, 22 nt, Human
ccagcagccaccuucucgaaau

SEQ ID NO: 373239 - RNA, 22 nt, Human
auaaagucuaccguauuaaaga

SEQ ID NO: 373240 - RNA, 22 nt, Human
uucuucuucaagugcugcauuc

SEQ ID NO: 373241 - RNA, 22 nt, Human
cagagcuguuacuauucaugaa

SEQ ID NO: 373242 - RNA, 22 nt, Human
cuucaguucuaaaguagaaugu

SEQ ID NO: 373243 - RNA, 22 nt, Human
cagaggcacaagaaagcaaggc

SEQ ID NO: 373244 - RNA, 22 nt, Human
gcagcagcccagggcucucaga

SEQ ID NO: 373245 - RNA, 22 nt, Human
aagagcugcacauauuuauauc

SEQ ID NO: 373246 - RNA, 22 nt, Human
uggccugguccuugucaaggca

SEQ ID NO: 373247 - RNA, 22 nt, Human
uuuauuaugauggacaccuucg

SEQ ID NO: 373248 - RNA, 22 nt, Human
caggcagcagaggaguguggga

SEQ ID NO: 373249 - RNA, 22 nt, Human
ggagugaaucacuagaugcaga

SEQ ID NO: 373250 - RNA, 22 nt, Human
gaggcaacacauuuggaaagca

SEQ ID NO: 373251 - RNA, 22 nt, Human
ggccaggagcaagccaggcucu

SEQ ID NO: 373252 - RNA, 22 nt, Human
ugucagagcaaugagguucagc

SEQ ID NO: 373253 - RNA, 22 nt, Human
gucagugucuuaacagagauua

SEQ ID NO: 373254 - RNA, 22 nt, Human
ccauuguaaauucuguggaagu

SEQ ID NO: 373255 - RNA, 22 nt, Human
ugaggcaggaugcuugcacagg

SEQ ID NO: 373256 - RNA, 22 nt, Human
aucagcaagcaugguuaggugu

SEQ ID NO: 373257 - RNA, 22 nt, Human
cagguccccuccccuaccaggc

SEQ ID NO: 373258 - RNA, 22 nt, Human
uggcucugaucagauguccagu

SEQ ID NO: 373259 - RNA, 22 nt, Human
ugggaggaaugucacugagcca

SEQ ID NO: 373260 - RNA, 22 nt, Human
uuccuuagcagaccugguaucc

SEQ ID NO: 373261 - RNA, 22 nt, Human
ggcauuuaucuaauauaguuua

SEQ ID NO: 373262 - RNA, 22 nt, Human
gggagggaucugcuaggcaaug

SEQ ID NO: 373263 - RNA, 22 nt, Human
acauuucugucuuagggacugu

SEQ ID NO: 373264 - RNA, 23 nt, Human
aggcugagcucucccagcuucag

SEQ ID NO: 373265 - RNA, 22 nt, Human
uaucuguuguaguacagaugau

SEQ ID NO: 373266 - RNA, 22 nt, Human
accagagcgcucaagccuuccc

SEQ ID NO: 373267 - RNA, 22 nt, Human
gugaccaucagagaauaacaaa

SEQ ID NO: 373268 - RNA, 22 nt, Human
cagagccugccucuggcugugg

SEQ ID NO: 373269 - RNA, 22 nt, Human
acuuaaaaccagacagcgucau

SEQ ID NO: 373270 - RNA, 22 nt, Human
gggaggucagggugccugcugg

SEQ ID NO: 373271 - RNA, 22 nt, Human
gcucaagggaugggagugggug

SEQ ID NO: 373272 - RNA, 22 nt, Human
uccucacauggugagccacaca

SEQ ID NO: 373273 - RNA, 22 nt, Human
ucauagaaugaguuaaugaacu

SEQ ID NO: 373274 - RNA, 22 nt, Human
acaacuuuagucuggagggaaa

SEQ ID NO: 373275 - RNA, 22 nt, Human
cuuuaagacucugcucuuggug

SEQ ID NO: 373276 - RNA, 22 nt, Human
cauuagaagaacaguuauauua

SEQ ID NO: 373277 - RNA, 22 nt, Human
cagcugcccugccuugcccuua

SEQ ID NO: 373278 - RNA, 22 nt, Human
ccugcagcuccggauuucuggg

SEQ ID NO: 373279 - RNA, 22 nt, Human
cuuaaacugaaagcuacaagau

SEQ ID NO: 373280 - RNA, 22 nt, Human
guacuuccagccaagugagaca

SEQ ID NO: 373281 - RNA, 22 nt, Human
gccugcagaacugugaggcaau

SEQ ID NO: 373282 - RNA, 22 nt, Human
ccagucacuggaaaaugggaau

SEQ ID NO: 373283 - RNA, 21 nt, Human
aggugggagaccauguagguc

SEQ ID NO: 373284 - RNA, 22 nt, Human
acauauuuccaugcagcauguc

SEQ ID NO: 373285 - RNA, 22 nt, Human
gagauuuagcugcuuaacuccu

SEQ ID NO: 373286 - RNA, 22 nt, Human
cuucccagaccuuagagugcag

SEQ ID NO: 373287 - RNA, 22 nt, Human
ugaggaugacgauggcaauggc

SEQ ID NO: 373288 - RNA, 22 nt, Human
aggagcagaacugauucugacu

SEQ ID NO: 373289 - RNA, 22 nt, Human
cugcaucaguggauaugauggu

SEQ ID NO: 373290 - RNA, 22 nt, Human
aggcacaguuucauccccgggc

SEQ ID NO: 373291 - RNA, 22 nt, Human
ucacaucauuaagacuucuccu

SEQ ID NO: 373292 - RNA, 19 nt, Human
uccccagcaccucugaguc

SEQ ID NO: 373293 - RNA, 22 nt, Human
aaacugaauucccaagggcaug

SEQ ID NO: 373294 - RNA, 22 nt, Human
agccucugguccucccucagcu

SEQ ID NO: 373295 - RNA, 22 nt, Human
uuuauccaguguuggaauuuuu

SEQ ID NO: 373296 - RNA, 22 nt, Human
guggcagugugaggauccugcu

SEQ ID NO: 373297 - RNA, 22 nt, Human
ggaaggaggggcaaagcaguuc

SEQ ID NO: 373298 - RNA, 22 nt, Human
uaaaggcuuuuagugaugguaa

SEQ ID NO: 373299 - RNA, 22 nt, Human
caaugaaauugagauccagaga

SEQ ID NO: 373300 - RNA, 22 nt, Human
agggagaagguuuagcugugag

SEQ ID NO: 373301 - RNA, 22 nt, Human
uucaaagugcauguuccucaga

SEQ ID NO: 373302 - RNA, 22 nt, Human
gauuuagagaauguuuuguaag

SEQ ID NO: 373303 - RNA, 22 nt, Human
ugaaagguuauuuaggucugcu

SEQ ID NO: 373304 - RNA, 22 nt, Human
agcagggguaacagaaggaaag

SEQ ID NO: 373305 - RNA, 22 nt, Human
uucuucaguuugguaaauguaa

SEQ ID NO: 373306 - RNA, 22 nt, Human
ccuggccugcucggcucuuaag

SEQ ID NO: 373307 - RNA, 22 nt, Human
gggcagguuauuggaguaggga

SEQ ID NO: 373308 - RNA, 22 nt, Human
cuggaggcacccuuagagaggc

SEQ ID NO: 373309 - RNA, 20 nt, Human
aggcagcugggaaaugaggg

SEQ ID NO: 373310 - RNA, 22 nt, Human
aagacuuucucccaaauccuca

SEQ ID NO: 373311 - RNA, 22 nt, Human
guggggcaguggccugggagca

SEQ ID NO: 373312 - RNA, 22 nt, Human
uguggaaaagaauaagggagau

SEQ ID NO: 373313 - RNA, 22 nt, Human
acagagcauauaaagugcuuug

SEQ ID NO: 373314 - RNA, 22 nt, Human
caggccugaguguggaagucuu

SEQ ID NO: 373315 - RNA, 23 nt, Human
aguuccagaaaaaugcucaagca

SEQ ID NO: 373316 - RNA, 22 nt, Human
caauuucacugacacccuggaa

SEQ ID NO: 373317 - RNA, 22 nt, Human
ucagaagacuacuaggacacau

SEQ ID NO: 373318 - RNA, 22 nt, Human
gcucccagguucuugggccuug

SEQ ID NO: 373319 - RNA, 22 nt, Human
cagcaauaagguaagcuucucc

SEQ ID NO: 373320 - RNA, 22 nt, Human
ugucccaguuuugcagguuaga

SEQ ID NO: 373321 - RNA, 18 nt, Human
gugccaggaggcgcagcc

SEQ ID NO: 373322 - RNA, 22 nt, Human
gcucccuccaugaggcagaccg

SEQ ID NO: 373323 - RNA, 22 nt, Human
gagaggcauggaacagauucuu

SEQ ID NO: 373324 - RNA, 22 nt, Human
aaggcacuagcagaauuaguga

SEQ ID NO: 373325 - RNA, 22 nt, Human
gggcagcagaggaucccuuaau

SEQ ID NO: 373326 - RNA, 21 nt, Human
agcagaggcagaauguaugca

SEQ ID NO: 373327 - RNA, 22 nt, Human
ugcaggaacauagguuccuugg

SEQ ID NO: 373328 - RNA, 22 nt, Human
acaguuucuccauuuacaccuu

SEQ ID NO: 373329 - RNA, 22 nt, Human
caggagaggaggcuacuucuua

SEQ ID NO: 373330 - RNA, 22 nt, Human
agauacaugucaagagacuuau

SEQ ID NO: 373331 - RNA, 22 nt, Human
ccucuucugcuucaggagcacu

SEQ ID NO: 373332 - RNA, 17 nt, Human
cccaugagcccacuccc

SEQ ID NO: 373333 - RNA, 22 nt, Human
ugaaagggguugaguuacagcu

SEQ ID NO: 373334 - RNA, 22 nt, Human
ugcaauaaggaguaauaguaaa

SEQ ID NO: 373335 - RNA, 22 nt, Human
cuggccagaguuggagggugug

SEQ ID NO: 373336 - RNA, 19 nt, Human
cauaauacaguggaucuga

SEQ ID NO: 373337 - RNA, 22 nt, Human
ucagcuuucucagaggccuaac

SEQ ID NO: 373338 - RNA, 23 nt, Human
ucugagagaacaaugccuccuau

SEQ ID NO: 373339 - RNA, 22 nt, Human
ccucugcagcagagagccagag

SEQ ID NO: 373340 - RNA, 22 nt, Human
accauuugacucucuaaggaua

SEQ ID NO: 373341 - RNA, 22 nt, Human
ccugggagggcaagugcugaug

SEQ ID NO: 373342 - RNA, 22 nt, Human
cuccuucccuucaaguguuccu

SEQ ID NO: 373343 - RNA, 22 nt, Human
uacaguucacaguaucauaaau

SEQ ID NO: 373344 - RNA, 22 nt, Human
ccuggcaggcuggggacagugc

SEQ ID NO: 373345 - RNA, 22 nt, Human
uuaaaauuauggcccauuugga

SEQ ID NO: 373346 - RNA, 22 nt, Human
auccuuagaagggagugaggac

SEQ ID NO: 373347 - RNA, 21 nt, Human
agcuggcagauauggugucug

SEQ ID NO: 373348 - RNA, 23 nt, Human
uuuuccagaaucgacucuguaga

SEQ ID NO: 373349 - RNA, 19 nt, Human
uggcagggagugauauuag

SEQ ID NO: 373350 - RNA, 22 nt, Human
agccaggaaccagcuacagucu

SEQ ID NO: 373351 - RNA, 17 nt, Human
gugcagggaugaaggau

SEQ ID NO: 373352 - RNA, 22 nt, Human
ucuguucaucucaugggagaau

SEQ ID NO: 373353 - RNA, 22 nt, Human
ccuggcuggcaagaucgugaag

SEQ ID NO: 373354 - RNA, 22 nt, Human
agcccuccucacaucagcgucc

SEQ ID NO: 373355 - RNA, 22 nt, Human
acugggaguucuccaugucccu

SEQ ID NO: 373356 - RNA, 22 nt, Human
ugaaaugaagggcuuguucugg

SEQ ID NO: 373357 - RNA, 22 nt, Human
uucuaacucuguuauguguuuc

SEQ ID NO: 373358 - RNA, 22 nt, Human
cugugagcuggguggccaggac

SEQ ID NO: 373359 - RNA, 22 nt, Human
ccucuggggugagugggccacu

SEQ ID NO: 373360 - RNA, 23 nt, Human
ugggggugcacgggccacaucuu

SEQ ID NO: 373361 - RNA, 22 nt, Human
guguccuuauuucugucucuca

SEQ ID NO: 373362 - RNA, 22 nt, Human
acccaggagcucugggguccuc

SEQ ID NO: 373363 - RNA, 23 nt, Human
aguguuccaguugguugagagug

SEQ ID NO: 373364 - RNA, 22 nt, Human
uccuucagauuccugcuucugg

SEQ ID NO: 373365 - RNA, 22 nt, Human
aaaaaugucauuauggaacuga

SEQ ID NO: 373366 - RNA, 22 nt, Human
ucauugcagugauguuguaugu

SEQ ID NO: 373367 - RNA, 22 nt, Human
aaaggugacugcagcagcuauu

SEQ ID NO: 373368 - RNA, 22 nt, Human
ggcacugaauuucuuggcaucu

SEQ ID NO: 373369 - RNA, 22 nt, Human
ucauccaguaccauggaaggca

SEQ ID NO: 373370 - RNA, 22 nt, Human
ggggagugacgcagggccauag

SEQ ID NO: 373371 - RNA, 22 nt, Human
aagauuucucuccuggaaagca

SEQ ID NO: 373372 - RNA, 22 nt, Human
uucaagauggccccagugagcc

SEQ ID NO: 373373 - RNA, 22 nt, Human
acuuuaucaggaaucacacagc

SEQ ID NO: 373374 - RNA, 23 nt, Human
acaguuauagcugugaauaacau

SEQ ID NO: 373375 - RNA, 22 nt, Human
gugaggcagcaggagccucugu

SEQ ID NO: 373376 - RNA, 22 nt, Human
ugcuuuggaucuauuugcugag

SEQ ID NO: 373377 - RNA, 22 nt, Human
uaugaagaaguucugugaaaug

SEQ ID NO: 373378 - RNA, 22 nt, Human
cuaugacacaggccauuauaua

SEQ ID NO: 373379 - RNA, 22 nt, Human
gagggccagcagccucagcaug

SEQ ID NO: 373380 - RNA, 22 nt, Human
uuggcuuccaggaucucagcag

SEQ ID NO: 373381 - RNA, 22 nt, Human
gagccaaggguugccauggaga

SEQ ID NO: 373382 - RNA, 22 nt, Human
uuuauguaguuacggacuauca

SEQ ID NO: 373383 - RNA, 22 nt, Human
caggcagaaauuuuguuucauu

SEQ ID NO: 373384 - RNA, 22 nt, Human
cauuuguacagaacagcuuuau

SEQ ID NO: 373385 - RNA, 22 nt, Human
cagaggcugaugugggaugggc

SEQ ID NO: 373386 - RNA, 22 nt, Human
gaggcugcuuugaugacaggag

SEQ ID NO: 373387 - RNA, 22 nt, Human
cugcagggaccacaagcagguu

SEQ ID NO: 373388 - RNA, 22 nt, Human
ucccuggcuguguucaggugcg

SEQ ID NO: 373389 - RNA, 22 nt, Human
ugagguggcuagggaggcacuc

SEQ ID NO: 373390 - RNA, 22 nt, Human
aaggugaaacuggaagcuggcc

SEQ ID NO: 373391 - RNA, 22 nt, Human
acucugaaugugcauguaaauc

SEQ ID NO: 373392 - RNA, 22 nt, Human
acagaaguuggaauuagauacu

SEQ ID NO: 373393 - RNA, 22 nt, Human
auggacagugugaagcagauag

SEQ ID NO: 373394 - RNA, 20 nt, Human
aggagcugaauuagaggguu

SEQ ID NO: 373395 - RNA, 22 nt, Human
cagcugccccuccagggcuggg

SEQ ID NO: 373396 - RNA, 22 nt, Human
aaauuagucgguuuaggaauuu

SEQ ID NO: 373397 - RNA, 22 nt, Human
ucuauacaaguuucacuuugac

SEQ ID NO: 373398 - RNA, 22 nt, Human
auggcauuccaagucuucuuuu

SEQ ID NO: 373399 - RNA, 22 nt, Human
gcugcuuccuuuccugcugacc

SEQ ID NO: 373400 - RNA, 22 nt, Human
agagccaguuacaacuguggag

SEQ ID NO: 373401 - RNA, 22 nt, Human
ugcugccacauuuaaagagggg

SEQ ID NO: 373402 - RNA, 22 nt, Human
gggaggagugaagauucaccug

SEQ ID NO: 373403 - RNA, 22 nt, Human
uuguaacacuuuucuauuaaua

SEQ ID NO: 373404 - RNA, 20 nt, Human
gugggcagaugugugcaugg

SEQ ID NO: 373405 - RNA, 22 nt, Human
gcagggacgccagggacagcaa

SEQ ID NO: 373406 - RNA, 22 nt, Human
ccacaggggucucuguagcuga

SEQ ID NO: 373407 - RNA, 22 nt, Human
aggcuggcuuggcucuccugug

SEQ ID NO: 373408 - RNA, 22 nt, Human
cacagggcagugauuguccaca

SEQ ID NO: 373409 - RNA, 22 nt, Human
cucuucaauagauuguugaggg

SEQ ID NO: 373410 - RNA, 22 nt, Human
ugcuuuauaucucucuucuuag

SEQ ID NO: 373411 - RNA, 20 nt, Human
augugucuguaaacaacucu

SEQ ID NO: 373412 - RNA, 22 nt, Human
ucagggacgugagcucagaguc

SEQ ID NO: 373413 - RNA, 22 nt, Human
uuggcagugucugcaaaaugga

SEQ ID NO: 373414 - RNA, 22 nt, Human
uugaauaaaugagcagugaauu

SEQ ID NO: 373415 - RNA, 22 nt, Human
gauaccagacagggagggagaa

SEQ ID NO: 373416 - RNA, 22 nt, Human
auaucuuuuagagcaagcuugu

SEQ ID NO: 373417 - RNA, 23 nt, Human
cucugcaggagagugggcagggc

SEQ ID NO: 373418 - RNA, 22 nt, Human
cagggcaguuuuacuucucucu

SEQ ID NO: 373419 - RNA, 22 nt, Human
aaauacugggcucaaaaggguu

SEQ ID NO: 373420 - RNA, 22 nt, Human
ugggcuccagcaccugugcucu

SEQ ID NO: 373421 - RNA, 22 nt, Human
cccagggaagggcuaccugagg

SEQ ID NO: 373422 - RNA, 22 nt, Human
cuauuucugccuaaugaccugu

SEQ ID NO: 373423 - RNA, 22 nt, Human
cagagagcaugggaggcccgag

SEQ ID NO: 373424 - RNA, 22 nt, Human
aaggcucucugauggcagcagu

SEQ ID NO: 373425 - RNA, 22 nt, Human
ggucagccuuggauuugguagc

SEQ ID NO: 373426 - RNA, 22 nt, Human
uuccucaguuagugccugaggc

SEQ ID NO: 373427 - RNA, 22 nt, Human
cuucuuaacuguauauacuaug

SEQ ID NO: 373428 - RNA, 22 nt, Human
uaagaacaagauguuccuguuu

SEQ ID NO: 373429 - RNA, 22 nt, Human
uucaagaugccagggacgcggc

SEQ ID NO: 373430 - RNA, 22 nt, Human
gaaaggagaggguuaaggagcu

SEQ ID NO: 373431 - RNA, 22 nt, Human
aaugauuuccccuacacagaag

SEQ ID NO: 373432 - RNA, 22 nt, Human
ucuggagcaacagagcaggaca

SEQ ID NO: 373433 - RNA, 22 nt, Human
cugggagucuggccucuggucc

SEQ ID NO: 373434 - RNA, 22 nt, Human
aagcuuuagagaugaguuccuu

SEQ ID NO: 373435 - RNA, 21 nt, Human
uguucacauggagcagaaugu

SEQ ID NO: 373436 - RNA, 22 nt, Human
gguacaaugguucauuuuaugu

SEQ ID NO: 373437 - RNA, 22 nt, Human
aggcaggggagcuggaagggua

SEQ ID NO: 373438 - RNA, 22 nt, Human
ccagaggcauguucaaagcaau

SEQ ID NO: 373439 - RNA, 22 nt, Human
aggcugugcacagggcaccugc

SEQ ID NO: 373440 - RNA, 22 nt, Human
uuaagauagaacccaguagucu

SEQ ID NO: 373441 - RNA, 22 nt, Human
aaguccaguuucauuugagguc

SEQ ID NO: 373442 - RNA, 22 nt, Human
aaaguguugggauuacaggugu

SEQ ID NO: 373443 - RNA, 22 nt, Human
uaguccauuuucacacugcuga

SEQ ID NO: 373444 - RNA, 22 nt, Human
cagagguacaagcuaaguuggg

SEQ ID NO: 373445 - RNA, 22 nt, Human
uuuaggcaauagauggcagugu

SEQ ID NO: 373446 - RNA, 22 nt, Human
auggcuuucucuaaugugguau

SEQ ID NO: 373447 - RNA, 22 nt, Human
aucuucaaagggauguccaugg

SEQ ID NO: 373448 - RNA, 22 nt, Human
gccuggccgcuccgagcuccgc

SEQ ID NO: 373449 - RNA, 22 nt, Human
acauucacuauguccaaacucu

SEQ ID NO: 373450 - RNA, 22 nt, Human
agccucugauggcucccaagga

SEQ ID NO: 373451 - RNA, 22 nt, Human
auacuuuggucacuauuauugg

SEQ ID NO: 373452 - RNA, 22 nt, Human
ccagcagaagcucccgcugggu

SEQ ID NO: 373453 - RNA, 22 nt, Human
gggcugagggccaauuccuacu

SEQ ID NO: 373454 - RNA, 22 nt, Human
agggaagagcuugcaagaaacc

SEQ ID NO: 373455 - RNA, 22 nt, Human
auuuccagcagcauauuugucu

SEQ ID NO: 373456 - RNA, 22 nt, Human
ugagccugaguucaaggcugca

SEQ ID NO: 373457 - RNA, 22 nt, Human
cccagacuccucuggcuggugg

SEQ ID NO: 373458 - RNA, 22 nt, Human
ucuuuaaugugauuguaauuau

SEQ ID NO: 373459 - RNA, 18 nt, Human
uucagcagcagacacacu

SEQ ID NO: 373460 - RNA, 22 nt, Human
uggccugccugggagcagcagg

SEQ ID NO: 373461 - RNA, 22 nt, Human
uauuccagaugaaaucauucag

SEQ ID NO: 373462 - RNA, 22 nt, Human
cagggcucaucugugugaccag

SEQ ID NO: 373463 - RNA, 22 nt, Human
agucucuuauucccuauugcug

SEQ ID NO: 373464 - RNA, 22 nt, Human
auucaguucuaaggucagugcc

SEQ ID NO: 373465 - RNA, 22 nt, Human
uccaggcagcccuuccugacuc

SEQ ID NO: 373466 - RNA, 22 nt, Human
ugagcuggucuugaguguagcu

SEQ ID NO: 373467 - RNA, 22 nt, Human
ucaguuuucucaucuguaauuu

SEQ ID NO: 373468 - RNA, 22 nt, Human
ucagugcuucggcgagcaccua

SEQ ID NO: 373469 - RNA, 22 nt, Human
cauccugcggggagcagagggc

SEQ ID NO: 373470 - RNA, 22 nt, Human
uccagcagcccgaaggcccauc

SEQ ID NO: 373471 - RNA, 22 nt, Human
cuuucacauaauugaccuugaa

SEQ ID NO: 373472 - RNA, 22 nt, Human
auggauaagucaaagaguaucc

SEQ ID NO: 373473 - RNA, 22 nt, Human
uaugcacauauaaccugcacug

SEQ ID NO: 373474 - RNA, 22 nt, Human
uaaggcacgcauaagagggggc

SEQ ID NO: 373475 - RNA, 22 nt, Human
agcugccugggcuuguacaccu

SEQ ID NO: 373476 - RNA, 22 nt, Human
gcaggagaaaugaagauugggu

SEQ ID NO: 373477 - RNA, 22 nt, Human
aggcagggugaugauaaugauu

SEQ ID NO: 373478 - RNA, 22 nt, Human
uugucugucccagcuugugcau

SEQ ID NO: 373479 - RNA, 22 nt, Human
aggucauuuccuuagaggcaga

SEQ ID NO: 373480 - RNA, 22 nt, Human
uuacagaaaagggcuuuaagag

SEQ ID NO: 373481 - RNA, 20 nt, Human
gcugccuuguccugcuuggu

SEQ ID NO: 373482 - RNA, 22 nt, Human
ugcagucuggauguccucagau

SEQ ID NO: 373483 - RNA, 22 nt, Human
ucuguucagacacuuuacaugu

SEQ ID NO: 373484 - RNA, 22 nt, Human
ccucccuggccagagcagcagc

SEQ ID NO: 373485 - RNA, 23 nt, Human
ugagcugguauuguccaucucca

SEQ ID NO: 373486 - RNA, 22 nt, Human
aaggcagccauagcaccaucca

SEQ ID NO: 373487 - RNA, 22 nt, Human
uuuaagagcuaguaugucauuu

SEQ ID NO: 373488 - RNA, 22 nt, Human
aggcagucuaucucuggagccu

SEQ ID NO: 373489 - RNA, 22 nt, Human
ugcucuguauucuauggcaguu

SEQ ID NO: 373490 - RNA, 22 nt, Human
aaucagugguucccagcccagg

SEQ ID NO: 373491 - RNA, 19 nt, Human
aaaugugaugguacaauuc

SEQ ID NO: 373492 - RNA, 22 nt, Human
uccaucagauucccuccugaga

SEQ ID NO: 373493 - RNA, 22 nt, Human
uugcucugaacccagggcacca

SEQ ID NO: 373494 - RNA, 22 nt, Human
agggacugagcuaggaucuagu

SEQ ID NO: 373495 - RNA, 21 nt, Human
uccaaaucccauucuguaguc

SEQ ID NO: 373496 - RNA, 21 nt, Human
aucccagcacccaggagugca

SEQ ID NO: 373497 - RNA, 22 nt, Human
caggaaggcgcggcugugccug

SEQ ID NO: 373498 - RNA, 19 nt, Human
ggcugucuggcguguggau

SEQ ID NO: 373499 - RNA, 22 nt, Human
cuguccucuguccucagcagga

SEQ ID NO: 373500 - RNA, 22 nt, Human
acagagcugggaucugaaccca

SEQ ID NO: 373501 - RNA, 22 nt, Human
gcagugauuggaucagagaugg

SEQ ID NO: 373502 - RNA, 22 nt, Human
gagcagugacuggagcaugaga

SEQ ID NO: 373503 - RNA, 22 nt, Human
acacacaacucauuguguaaua

SEQ ID NO: 373504 - RNA, 22 nt, Human
augguuuaagggagaauauuga

SEQ ID NO: 373505 - RNA, 22 nt, Human
ucagguggcuucggggaguggc

SEQ ID NO: 373506 - RNA, 22 nt, Human
gccugcagccucaagggcugag

SEQ ID NO: 373507 - RNA, 22 nt, Human
gggcagguguuuccaaggugag

SEQ ID NO: 373508 - RNA, 22 nt, Human
ugggcagacugagcccuguccc

SEQ ID NO: 373509 - RNA, 22 nt, Human
gccugugcuuaacugacgugag

SEQ ID NO: 373510 - RNA, 22 nt, Human
uuuauuguuuagaagggggcug

SEQ ID NO: 373511 - RNA, 22 nt, Human
augcuaaauggccaguaccaaa

SEQ ID NO: 373512 - RNA, 22 nt, Human
cucuaacaccacagugugguuu

SEQ ID NO: 373513 - RNA, 22 nt, Human
gcagcaggcuuuucauaccuug

SEQ ID NO: 373514 - RNA, 22 nt, Human
gcagcugcuggagggaggcagg

SEQ ID NO: 373515 - RNA, 19 nt, Human
acauggcaucccaggaggu

SEQ ID NO: 373516 - RNA, 22 nt, Human
uggcuuuaggagcuauauaccu

SEQ ID NO: 373517 - RNA, 22 nt, Human
gggcugagugucccaggccgaa

SEQ ID NO: 373518 - RNA, 22 nt, Human
uuuuagauugggaaauguaaag

SEQ ID NO: 373519 - RNA, 22 nt, Human
cugggaugucuauagaacacuu

SEQ ID NO: 373520 - RNA, 22 nt, Human
uagaggcagaagaaauugacaa

SEQ ID NO: 373521 - RNA, 22 nt, Human
agagaauuggagcagugacagg

SEQ ID NO: 373522 - RNA, 19 nt, Human
aucugccuuagugcugcug

SEQ ID NO: 373523 - RNA, 22 nt, Human
cuuugaaaacuuaaauaacagc

SEQ ID NO: 373524 - RNA, 22 nt, Human
gcagauggcugagccugcagau

SEQ ID NO: 373525 - RNA, 22 nt, Human
uugaggaguguuuagggugagg

SEQ ID NO: 373526 - RNA, 22 nt, Human
caauuucaugccauguauugcu

SEQ ID NO: 373527 - RNA, 19 nt, Human
ggaaacaggggccagagga

SEQ ID NO: 373528 - RNA, 22 nt, Human
caggaugagaggcccagggaag

SEQ ID NO: 373529 - RNA, 22 nt, Human
ccaggagcaacuugaaggcaag

SEQ ID NO: 373530 - RNA, 22 nt, Human
aaagucaugcaguugaacuuuu

SEQ ID NO: 373531 - RNA, 22 nt, Human
auauaaguuaguggucauguuu

SEQ ID NO: 373532 - RNA, 22 nt, Human
uggccucuuaggacauccucua

SEQ ID NO: 373533 - RNA, 22 nt, Human
ggcuuuauguuuuucauguggu

SEQ ID NO: 373534 - RNA, 22 nt, Human
ugucagaacucuauugaugucc

SEQ ID NO: 373535 - RNA, 21 nt, Human
agauuguauggaggugagagg

SEQ ID NO: 373536 - RNA, 22 nt, Human
cagggcuggcucaugaaaaguu

SEQ ID NO: 373537 - RNA, 22 nt, Human
ucugggggcgaccagggacugc

SEQ ID NO: 373538 - RNA, 22 nt, Human
gcccacacaccagcucaggagg

SEQ ID NO: 373539 - RNA, 22 nt, Human
gggagaaguggaaaucucauua

SEQ ID NO: 373540 - RNA, 22 nt, Human
gagcugcagcggcugacgcaac

SEQ ID NO: 373541 - RNA, 22 nt, Human
aguccagugucaaggugccauu

SEQ ID NO: 373542 - RNA, 20 nt, Human
gcuguugccaguacagaugg

SEQ ID NO: 373543 - RNA, 21 nt, Human
gcacagcaugaguguuggcau

SEQ ID NO: 373544 - RNA, 22 nt, Human
acugugugcccugacgccaggg

SEQ ID NO: 373545 - RNA, 22 nt, Human
cuggccuguccugacccagccu

SEQ ID NO: 373546 - RNA, 22 nt, Human
gcucccugcagcugagaguucc

SEQ ID NO: 373547 - RNA, 22 nt, Human
guuauuagaagugaaggauugu

SEQ ID NO: 373548 - RNA, 22 nt, Human
uuugaaguaccugguucugacu

SEQ ID NO: 373549 - RNA, 22 nt, Human
gguggguauugaauacaggugu

SEQ ID NO: 373550 - RNA, 19 nt, Human
uggcuuccaucucucucau

SEQ ID NO: 373551 - RNA, 22 nt, Human
auuuugaaaagcauuugaguaa

SEQ ID NO: 373552 - RNA, 22 nt, Human
cuugccuucuguuccuauagaa

SEQ ID NO: 373553 - RNA, 22 nt, Human
ccagcugucacucagaaaggcc

SEQ ID NO: 373554 - RNA, 22 nt, Human
uuuguuagagugugggaggcug

SEQ ID NO: 373555 - RNA, 23 nt, Human
aagcugccagucugaagccuggg

SEQ ID NO: 373556 - RNA, 22 nt, Human
augcuuuagugucaaguuuggg

SEQ ID NO: 373557 - RNA, 22 nt, Human
cuugcugggguaagucugugcu

SEQ ID NO: 373558 - RNA, 20 nt, Human
ccuccaggcacacccaugug

SEQ ID NO: 373559 - RNA, 22 nt, Human
gaggagcaugggaaggcucugg

SEQ ID NO: 373560 - RNA, 22 nt, Human
gcugaguugaaagcagaggaua

SEQ ID NO: 373561 - RNA, 22 nt, Human
cccagcauccucagggagcggg

SEQ ID NO: 373562 - RNA, 22 nt, Human
uuuaggcaaacucauugucaga

SEQ ID NO: 373563 - RNA, 22 nt, Human
ccagggugcucuguggcgucgc

SEQ ID NO: 373564 - RNA, 22 nt, Human
ugcaccugagaggucucugagg

SEQ ID NO: 373565 - RNA, 22 nt, Human
ccuuguccucugguuuccuguu

SEQ ID NO: 373566 - RNA, 22 nt, Human
uuauuucauguaaaauuuaugu

SEQ ID NO: 373567 - RNA, 22 nt, Human
ugccagcacaaguuaagagauc

SEQ ID NO: 373568 - RNA, 22 nt, Human
gaggccugcagcguggucccug

SEQ ID NO: 373569 - RNA, 21 nt, Human
aggcuguccuuugccagcccu

SEQ ID NO: 373570 - RNA, 22 nt, Human
ccaaaggccaagcucagguaaa

SEQ ID NO: 373571 - RNA, 17 nt, Human
uagcugccccgaaugcu

SEQ ID NO: 373572 - RNA, 22 nt, Human
ggagaccagaaggaagcuucga

SEQ ID NO: 373573 - RNA, 22 nt, Human
gaugaaaaaagacgagcauaua

SEQ ID NO: 373574 - RNA, 22 nt, Human
ccagcuuguuugaagcucguca

SEQ ID NO: 373575 - RNA, 22 nt, Human
acagggucaagggugcuacaag

SEQ ID NO: 373576 - RNA, 22 nt, Human
ggcuuuauuuugcaugaaugcu

SEQ ID NO: 373577 - RNA, 22 nt, Human
uuuaggcaaauuucagaugugc

SEQ ID NO: 373578 - RNA, 22 nt, Human
guggcucuccauugacauggaa

SEQ ID NO: 373579 - RNA, 22 nt, Human
cuuggcagcuuuuggaggagcc

SEQ ID NO: 373580 - RNA, 22 nt, Human
ugaaggccagggauuugcagcc

SEQ ID NO: 373581 - RNA, 22 nt, Human
gagcagcuggacaggccucccu

SEQ ID NO: 373582 - RNA, 22 nt, Human
gggcugagucaucuggggccuc

SEQ ID NO: 373583 - RNA, 21 nt, Human
auacauucuauuaagcauuua

SEQ ID NO: 373584 - RNA, 22 nt, Human
ucccaguuuuucuccacuaagg

SEQ ID NO: 373585 - RNA, 22 nt, Human
ucugggagacguguguugucag

SEQ ID NO: 373586 - RNA, 22 nt, Human
ugauuuccaugaagcugaaggc

SEQ ID NO: 373587 - RNA, 22 nt, Human
augauuucuauauaaacuuaaa

SEQ ID NO: 373588 - RNA, 22 nt, Human
uccaggcuccccugcgugcucc

SEQ ID NO: 373589 - RNA, 22 nt, Human
ccuauugacaauucucuucucc

SEQ ID NO: 373590 - RNA, 19 nt, Human
accugcaguaauaauuccu

SEQ ID NO: 373591 - RNA, 22 nt, Human
caucugcuguuccuuggacuca

SEQ ID NO: 373592 - RNA, 22 nt, Human
caaauguguaaggaaguguuag

SEQ ID NO: 373593 - RNA, 22 nt, Human
ggagccuguggccgucacgacu

SEQ ID NO: 373594 - RNA, 22 nt, Human
ccaggugucaugcgugugaccc

SEQ ID NO: 373595 - RNA, 22 nt, Human
aguacaacauuagaguaucuua

SEQ ID NO: 373596 - RNA, 22 nt, Human
agagggcagggcgguaaguccu

SEQ ID NO: 373597 - RNA, 23 nt, Human
ugcagccacucaggagcucagug

SEQ ID NO: 373598 - RNA, 22 nt, Human
acacuucucccaucuccuguug

SEQ ID NO: 373599 - RNA, 22 nt, Human
cuuauuagaguuguguucuguu

SEQ ID NO: 373600 - RNA, 22 nt, Human
uuaguacugauagggucaauca

SEQ ID NO: 373601 - RNA, 22 nt, Human
ccugugcauccgguggucauug

SEQ ID NO: 373602 - RNA, 22 nt, Human
ucucagagugguggucccucug

SEQ ID NO: 373603 - RNA, 22 nt, Human
gccugggagugcacagugaggu

SEQ ID NO: 373604 - RNA, 19 nt, Human
gggcuuggggcugaagccu

SEQ ID NO: 373605 - RNA, 22 nt, Human
uuucuuaggcucuaaaaugacu

SEQ ID NO: 373606 - RNA, 22 nt, Human
aagggcagagggaaucccacau

SEQ ID NO: 373607 - RNA, 22 nt, Human
cagcugaggucaaagaagcagg

SEQ ID NO: 373608 - RNA, 22 nt, Human
uugcagcuucuaccacuguuuc

SEQ ID NO: 373609 - RNA, 22 nt, Human
ugacauuucgguguaugugaug

SEQ ID NO: 373610 - RNA, 22 nt, Human
ucaguaaaguucuuucuugcug

SEQ ID NO: 373611 - RNA, 22 nt, Human
uuagauaauguuauuguaauuu

SEQ ID NO: 373612 - RNA, 22 nt, Human
guggaggguuugcaaugugcag

SEQ ID NO: 373613 - RNA, 22 nt, Human
uagaagcaguaauagaaauagg

SEQ ID NO: 373614 - RNA, 22 nt, Human
cuucaagauccauagauauugc

SEQ ID NO: 373615 - RNA, 22 nt, Human
cauacauugcucauucaguauc

SEQ ID NO: 373616 - RNA, 22 nt, Human
cagcuuggaggaggaucuaaga

SEQ ID NO: 373617 - RNA, 20 nt, Human
gucaggauuaguaaacucug

SEQ ID NO: 373618 - RNA, 22 nt, Human
ucuguuccauguuuuguuccau

SEQ ID NO: 373619 - RNA, 22 nt, Human
gcagcuggauuucaagagggag

SEQ ID NO: 373620 - RNA, 22 nt, Human
cagcaggaagguuuccccugca

SEQ ID NO: 373621 - RNA, 22 nt, Human
uccuugaaugaauguucucucc

SEQ ID NO: 373622 - RNA, 22 nt, Human
uugaagaggacuuugcagcugu

SEQ ID NO: 373623 - RNA, 22 nt, Human
aauuugauucccugcaccuguu

SEQ ID NO: 373624 - RNA, 22 nt, Human
agggcagccauugagggauucu

SEQ ID NO: 373625 - RNA, 22 nt, Human
aaaauccugcugacucgagaug

SEQ ID NO: 373626 - RNA, 22 nt, Human
cuccugagcucugaggaagcuu

SEQ ID NO: 373627 - RNA, 22 nt, Human
uggcagcuguuaauguuuuguu

SEQ ID NO: 373628 - RNA, 22 nt, Human
agacaacaucacuaaagcugag

SEQ ID NO: 373629 - RNA, 20 nt, Human
cguaaggcaagugcugcauc

SEQ ID NO: 373630 - RNA, 22 nt, Human
agauaucaccaguuuuacauac

SEQ ID NO: 373631 - RNA, 22 nt, Human
agaggucagaacaggaaagugu

SEQ ID NO: 373632 - RNA, 21 nt, Human
agcagcagaucuggugagggc

SEQ ID NO: 373633 - RNA, 22 nt, Human
uuuucauuguuacuaugagcua

SEQ ID NO: 373634 - RNA, 21 nt, Human
ggcagcguguggacaggaagg

SEQ ID NO: 373635 - RNA, 23 nt, Human
ugcaugugaauucauacuuguuu

SEQ ID NO: 373636 - RNA, 22 nt, Human
uucugagacaauugagagucua

SEQ ID NO: 373637 - RNA, 22 nt, Human
gaaugcacuuccaacaucuauu

SEQ ID NO: 373638 - RNA, 22 nt, Human
gaagaagguggcccagggguag

SEQ ID NO: 373639 - RNA, 22 nt, Human
aaguuucauguggagguagacu

SEQ ID NO: 373640 - RNA, 22 nt, Human
gacuucuauuaauaccucuacu

SEQ ID NO: 373641 - RNA, 22 nt, Human
ucuggcucuauaacuccuagcu

SEQ ID NO: 373642 - RNA, 22 nt, Human
ggcagcuccucucagcaaaaga

SEQ ID NO: 373643 - RNA, 22 nt, Human
aaaaguguucaggaagaauaau

SEQ ID NO: 373644 - RNA, 22 nt, Human
gccuggaguucagccaaguccc

SEQ ID NO: 373645 - RNA, 22 nt, Human
ucaggaauccagacagggcaca

SEQ ID NO: 373646 - RNA, 22 nt, Human
uagcugucaccagaaauggcca

SEQ ID NO: 373647 - RNA, 22 nt, Human
uuuaggcauugggugcucaagu

SEQ ID NO: 373648 - RNA, 22 nt, Human
ggcuuccuaauacucccuacac

SEQ ID NO: 373649 - RNA, 19 nt, Human
uggcagcauugguaccuug

SEQ ID NO: 373650 - RNA, 22 nt, Human
uugaaaggcacaggcaccuggg

SEQ ID NO: 373651 - RNA, 22 nt, Human
aaauguguuucgaaaacuggug

SEQ ID NO: 373652 - RNA, 22 nt, Human
gccaggggacgcggagcgacga

SEQ ID NO: 373653 - RNA, 22 nt, Human
cauuucugucacguucuuuuau

SEQ ID NO: 373654 - RNA, 22 nt, Human
uguaauggaagugggauugcau

SEQ ID NO: 373655 - RNA, 22 nt, Human
ucaccaggcaacuauguacucc

SEQ ID NO: 373656 - RNA, 22 nt, Human
caauuuuuuccaugcucuuaca

SEQ ID NO: 373657 - RNA, 22 nt, Human
gaaaagcuaggccaguucagcu

SEQ ID NO: 373658 - RNA, 22 nt, Human
uuauuuaauuuucucacucaga

SEQ ID NO: 373659 - RNA, 22 nt, Human
ucagagaguuacacaaauuguu

SEQ ID NO: 373660 - RNA, 22 nt, Human
gcugccuggagcucagccugcc

SEQ ID NO: 373661 - RNA, 22 nt, Human
uccguauuugacuauugcaccg

SEQ ID NO: 373662 - RNA, 22 nt, Human
caaggccaaagggccacuguca

SEQ ID NO: 373663 - RNA, 22 nt, Human
aaaaaugcuuggacuuaauaaa

SEQ ID NO: 373664 - RNA, 22 nt, Human
gagcucaggagcaucagaagaa

SEQ ID NO: 373665 - RNA, 22 nt, Human
uaguuaggaauagcagcgacuc

SEQ ID NO: 373666 - RNA, 20 nt, Human
ugugaaagcaguagaaugac

SEQ ID NO: 373667 - RNA, 18 nt, Human
ucaaagucuggcuccacu

SEQ ID NO: 373668 - RNA, 22 nt, Human
uuuaaauuuguguuuagagggu

SEQ ID NO: 373669 - RNA, 22 nt, Human
agagggcauuaacucugucuug

SEQ ID NO: 373670 - RNA, 22 nt, Human
aagagggcugcaaucuuauugc

SEQ ID NO: 373671 - RNA, 22 nt, Human
uggcucaguuucaguccugguu

SEQ ID NO: 373672 - RNA, 22 nt, Human
gccuggaguacuccuugaagug

SEQ ID NO: 373673 - RNA, 22 nt, Human
ccugugugcacacgaggccaug

SEQ ID NO: 373674 - RNA, 22 nt, Human
acugucugcaaaacucauacuc

SEQ ID NO: 373675 - RNA, 22 nt, Human
uacuuguagcagguggcauuua

SEQ ID NO: 373676 - RNA, 22 nt, Human
guuacacaggaaaacauuagca

SEQ ID NO: 373677 - RNA, 19 nt, Human
uaucuguuuccugcuuguc

SEQ ID NO: 373678 - RNA, 22 nt, Human
agguuuucagcuguauccugag

SEQ ID NO: 373679 - RNA, 22 nt, Human
ucaggagauggucuuuauaggc

SEQ ID NO: 373680 - RNA, 22 nt, Human
aaagucauuguaauauaugcua

SEQ ID NO: 373681 - RNA, 22 nt, Human
aggugcagcugacaccaugugg

SEQ ID NO: 373682 - RNA, 22 nt, Human
gccuucugaucgcuggacugac

SEQ ID NO: 373683 - RNA, 22 nt, Human
uuauuauagauuaugcaagauu

SEQ ID NO: 373684 - RNA, 22 nt, Human
uuuucagaggccuaagagguuu

SEQ ID NO: 373685 - RNA, 22 nt, Human
uacaggcauguagcauggugau

SEQ ID NO: 373686 - RNA, 22 nt, Human
caaauuccucagaaucagaaaa

SEQ ID NO: 373687 - RNA, 22 nt, Human
ggggcagggagguuaucgccga

SEQ ID NO: 373688 - RNA, 22 nt, Human
gcaggcagagaaggaacauuua

SEQ ID NO: 373689 - RNA, 22 nt, Human
gauuuccuagacauggggcaga

SEQ ID NO: 373690 - RNA, 22 nt, Human
ucaguauccacaaaugcucaaa

SEQ ID NO: 373691 - RNA, 21 nt, Human
uagggcucuauuuuuauuuca

SEQ ID NO: 373692 - RNA, 22 nt, Human
ccuggcaguggugaagaagagg

SEQ ID NO: 373693 - RNA, 21 nt, Human
ccugggccaaauucccuggac

SEQ ID NO: 373694 - RNA, 22 nt, Human
cugagcuuccaguuccuccagg

SEQ ID NO: 373695 - RNA, 22 nt, Human
cuguggcuaggaagcuguggga

SEQ ID NO: 373696 - RNA, 22 nt, Human
aguggcaggcggagauguagga

SEQ ID NO: 373697 - RNA, 22 nt, Human
ugacacagaaauuaagcuguca

SEQ ID NO: 373698 - RNA, 22 nt, Human
acccaggagacagguugcagug

SEQ ID NO: 373699 - RNA, 22 nt, Human
caucagcagucacaugaugcug

SEQ ID NO: 373700 - RNA, 22 nt, Human
aggaagugcuaagagaacauca

SEQ ID NO: 373701 - RNA, 22 nt, Human
ucagcuuugcaaguuagaaaau

SEQ ID NO: 373702 - RNA, 18 nt, Human
uucaccagugugaugggu

SEQ ID NO: 373703 - RNA, 22 nt, Human
ucagcagucacauguuguccca

SEQ ID NO: 373704 - RNA, 22 nt, Human
cccagcucaagcagagagcuaa

SEQ ID NO: 373705 - RNA, 20 nt, Human
gcagcugaaaguaugacacc

SEQ ID NO: 373706 - RNA, 19 nt, Human
ugcucauggggacuucucc

SEQ ID NO: 373707 - RNA, 21 nt, Human
aagaaguuuggauuuuguccu

SEQ ID NO: 373708 - RNA, 22 nt, Human
aaugauugcaaacauugagaac

SEQ ID NO: 373709 - RNA, 22 nt, Human
uugaaucauuacaauagauaag

SEQ ID NO: 373710 - RNA, 22 nt, Human
gggcaguggcucacgccuguaa

SEQ ID NO: 373711 - RNA, 22 nt, Human
ggugaaggucagagcaggaaaa

SEQ ID NO: 373712 - RNA, 22 nt, Human
ccugugccauccugagcauccc

SEQ ID NO: 373713 - RNA, 22 nt, Human
caggagacaaguuagcagcuga

SEQ ID NO: 373714 - RNA, 22 nt, Human
gugugcaggccacaggccaggg

SEQ ID NO: 373715 - RNA, 22 nt, Human
uuucuagucucgaucucuuaau

SEQ ID NO: 373716 - RNA, 20 nt, Human
gcaaggcacagugaggaggg

SEQ ID NO: 373717 - RNA, 22 nt, Human
acagauuuaggacuguagcgau

SEQ ID NO: 373718 - RNA, 20 nt, Human
uccagcugucuuucagagac

SEQ ID NO: 373719 - RNA, 22 nt, Human
cuggcaaguacugggccagcuc

SEQ ID NO: 373720 - RNA, 22 nt, Human
ggagggcugccagguggagcgg

SEQ ID NO: 373721 - RNA, 22 nt, Human
ugggcuccaauuuguccuuuca

SEQ ID NO: 373722 - RNA, 22 nt, Human
agaacagaagggaggaaggccu

SEQ ID NO: 373723 - RNA, 22 nt, Human
cucccagguuacaucugagccu

SEQ ID NO: 373724 - RNA, 22 nt, Human
ugcagaaguauuccaggcccca

SEQ ID NO: 373725 - RNA, 20 nt, Human
aggcacuggauuucuuauau

SEQ ID NO: 373726 - RNA, 22 nt, Human
caugagaaguggccuucaaaaa

SEQ ID NO: 373727 - RNA, 22 nt, Human
ugccagaguuacaugaggguca

SEQ ID NO: 373728 - RNA, 22 nt, Human
auuugucuagugguauucacgu

SEQ ID NO: 373729 - RNA, 20 nt, Human
cugcaggguuagaggcucca

SEQ ID NO: 373730 - RNA, 22 nt, Human
cugcugugagugguucuugccu

SEQ ID NO: 373731 - RNA, 21 nt, Human
ugccagcauuaaacagucauu

SEQ ID NO: 373732 - RNA, 22 nt, Human
cggucaggugcagcguuggcac

SEQ ID NO: 373733 - RNA, 22 nt, Human
cuuggcugucuauaggaaagag

SEQ ID NO: 373734 - RNA, 23 nt, Human
uucaaaacuggaaaaucagaugc

SEQ ID NO: 373735 - RNA, 22 nt, Human
guguggcugccagccaagaggc

SEQ ID NO: 373736 - RNA, 22 nt, Human
gaggcaugucuggccuguccca

SEQ ID NO: 373737 - RNA, 22 nt, Human
uaaagucagauaucuggguuga

SEQ ID NO: 373738 - RNA, 22 nt, Human
aaauuucaagcaaaguagcuau

SEQ ID NO: 373739 - RNA, 18 nt, Human
cacaggcaggugauaggu

SEQ ID NO: 373740 - RNA, 22 nt, Human
gccugggaagacuaagugggag

SEQ ID NO: 373741 - RNA, 19 nt, Human
gguaaaagugagcuucagg

SEQ ID NO: 373742 - RNA, 22 nt, Human
aagugacacauggcacuucuau

SEQ ID NO: 373743 - RNA, 22 nt, Human
ucugggaaugaauaagaccugu

SEQ ID NO: 373744 - RNA, 22 nt, Human
uuuauucugugcuacaugaaga

SEQ ID NO: 373745 - RNA, 22 nt, Human
cucugagcuccuggaagcgugc

SEQ ID NO: 373746 - RNA, 22 nt, Human
uuuucucuacaaaauaaccagc

SEQ ID NO: 373747 - RNA, 22 nt, Human
guccugggccugcugaggcuga

SEQ ID NO: 373748 - RNA, 22 nt, Human
gagcccaggcagagguugcagu

SEQ ID NO: 373749 - RNA, 22 nt, Human
aauuucaaguggcaucuuugau

SEQ ID NO: 373750 - RNA, 22 nt, Human
uuaggaaauuaugguuucagau

SEQ ID NO: 373751 - RNA, 22 nt, Human
aagccaguguccagaaugggca

SEQ ID NO: 373752 - RNA, 22 nt, Human
caguccagcccccugcuaaaag

SEQ ID NO: 373753 - RNA, 22 nt, Human
aaauguguuccuuugcuacaga

SEQ ID NO: 373754 - RNA, 22 nt, Human
uauuucuguaugcauaaaagga

SEQ ID NO: 373755 - RNA, 22 nt, Human
cauuugugugggaacccaucag

SEQ ID NO: 373756 - RNA, 22 nt, Human
cccucugcucaggugcauaggc

SEQ ID NO: 373757 - RNA, 22 nt, Human
gcaggcagguggcaucuuguga

SEQ ID NO: 373758 - RNA, 20 nt, Human
gacauucauaguuauuacca

SEQ ID NO: 373759 - RNA, 22 nt, Human
ucuuugcaaauguuauuaucuu

SEQ ID NO: 373760 - RNA, 22 nt, Human
cagagcugggcauggugaaagg

SEQ ID NO: 373761 - RNA, 22 nt, Human
agggagcuuccgaacuacagcu

SEQ ID NO: 373762 - RNA, 22 nt, Human
gcagaagcugggcagcgaggug

SEQ ID NO: 373763 - RNA, 22 nt, Human
uggcuucugggacuugugagca

SEQ ID NO: 373764 - RNA, 22 nt, Human
gugucauuaaccaccaugcaaa

SEQ ID NO: 373765 - RNA, 22 nt, Human
ucugucuccucugaggugccag

SEQ ID NO: 373766 - RNA, 22 nt, Human
uugauacaggcucuauuucauc

SEQ ID NO: 373767 - RNA, 22 nt, Human
augcagcugucagggagaacau

SEQ ID NO: 373768 - RNA, 22 nt, Human
ccagccuggagggcaguggugg

SEQ ID NO: 373769 - RNA, 22 nt, Human
cccugcagagggaugggggcag

SEQ ID NO: 373770 - RNA, 22 nt, Human
cagaggcagugggguugcuccu

SEQ ID NO: 373771 - RNA, 22 nt, Human
acccucccauuuccauguagca

SEQ ID NO: 373772 - RNA, 21 nt, Human
cagugagguccccagccuagg

SEQ ID NO: 373773 - RNA, 22 nt, Human
cuggcucauagagcagcuccaa

SEQ ID NO: 373774 - RNA, 22 nt, Human
aggagcugcagauucugccuug

SEQ ID NO: 373775 - RNA, 22 nt, Human
acccugggcuuggccugcucag

SEQ ID NO: 373776 - RNA, 22 nt, Human
uggggccugagguggagcugca

SEQ ID NO: 373777 - RNA, 22 nt, Human
gggcccacuggcugucugaccc

SEQ ID NO: 373778 - RNA, 18 nt, Human
gagcccugagucugcaca

SEQ ID NO: 373779 - RNA, 22 nt, Human
gcugccugggcaggaggcgcug

SEQ ID NO: 373780 - RNA, 22 nt, Human
gaggcaugcagagcuggagcag

SEQ ID NO: 373781 - RNA, 22 nt, Human
ucagagaaauaauugcugaguu

SEQ ID NO: 373782 - RNA, 22 nt, Human
cagacuuucaaggagugaaggc

SEQ ID NO: 373783 - RNA, 22 nt, Human
augcagguugggcaaguguggg

SEQ ID NO: 373784 - RNA, 22 nt, Human
ggggaccugggcuucaaggguu

SEQ ID NO: 373785 - RNA, 22 nt, Human
gucaaguuaagauaaggucaug

SEQ ID NO: 373786 - RNA, 22 nt, Human
uaugaaagaaucucagagcaca

SEQ ID NO: 373787 - RNA, 22 nt, Human
ccagcuuuucagaaucugccug

SEQ ID NO: 373788 - RNA, 22 nt, Human
ccugagcugaacuaagcaguuu

SEQ ID NO: 373789 - RNA, 22 nt, Human
uguccucuaauuggccucuugc

SEQ ID NO: 373790 - RNA, 22 nt, Human
ucagaggaaaggucagauggcu

SEQ ID NO: 373791 - RNA, 22 nt, Human
gugugcagcagagacaggacuc

SEQ ID NO: 373792 - RNA, 22 nt, Human
ggagugaaguggcgcgaucucg

SEQ ID NO: 373793 - RNA, 22 nt, Human
cagaccucaguccucaguagga

SEQ ID NO: 373794 - RNA, 22 nt, Human
agcagggggaguuagacuagau

SEQ ID NO: 373795 - RNA, 22 nt, Human
acauccagaucucagcauggcu

SEQ ID NO: 373796 - RNA, 22 nt, Human
cuguacaaguccuucaucaggg

SEQ ID NO: 373797 - RNA, 22 nt, Human
agccaggcuaaaugagccauga

SEQ ID NO: 373798 - RNA, 23 nt, Human
cuuuccuuucuuugacacccagc

SEQ ID NO: 373799 - RNA, 22 nt, Human
uauuugauagagauaaaugaua

SEQ ID NO: 373800 - RNA, 19 nt, Human
ugggcagguucaguaaugg

SEQ ID NO: 373801 - RNA, 22 nt, Human
aucaggaagaagaauguguugg

SEQ ID NO: 373802 - RNA, 22 nt, Human
cagggagaagucuggucagucc

SEQ ID NO: 373803 - RNA, 22 nt, Human
gcagcugcagguggucccaugc

SEQ ID NO: 373804 - RNA, 19 nt, Human
gugauuucuuuccacaagc

SEQ ID NO: 373805 - RNA, 22 nt, Human
ggcagccuugagggaggccugg

SEQ ID NO: 373806 - RNA, 21 nt, Human
ugcagcagaguaagcagggga

SEQ ID NO: 373807 - RNA, 22 nt, Human
guugaaugaaucauucuaugua

SEQ ID NO: 373808 - RNA, 22 nt, Human
ugcccagcugucaaaguagaua

SEQ ID NO: 373809 - RNA, 23 nt, Human
ucuuuacauacugaugaguucuc

SEQ ID NO: 373810 - RNA, 22 nt, Human
gggcaugccugcgcagugcaug

SEQ ID NO: 373811 - RNA, 22 nt, Human
uggcagggaguugcaggauuuc

SEQ ID NO: 373812 - RNA, 22 nt, Human
aucaauucuuaggaaaauagcu

SEQ ID NO: 373813 - RNA, 23 nt, Human
gccaggcacaugguggacacgca

SEQ ID NO: 373814 - RNA, 22 nt, Human
uguacaugugucuguauaucuu

SEQ ID NO: 373815 - RNA, 21 nt, Human
cuacagaagcucuccuaucca

SEQ ID NO: 373816 - RNA, 20 nt, Human
gcacugaagguuccagggga

SEQ ID NO: 373817 - RNA, 21 nt, Human
ucauuuuuauugcuaccuugc

SEQ ID NO: 373818 - RNA, 22 nt, Human
gaaugcagauggcugguguaug

SEQ ID NO: 373819 - RNA, 22 nt, Human
ccuccuggcccugggccuggaa

SEQ ID NO: 373820 - RNA, 22 nt, Human
uccuggaggcaaaugaagacuc

SEQ ID NO: 373821 - RNA, 22 nt, Human
uuaaaaugcagauucugauuca

SEQ ID NO: 373822 - RNA, 23 nt, Human
uccaggagcaugcuggcuggcga

SEQ ID NO: 373823 - RNA, 21 nt, Human
cacaggugggucagugaggcc

SEQ ID NO: 373824 - RNA, 22 nt, Human
cugaggaggggccugagugaga

SEQ ID NO: 373825 - RNA, 22 nt, Human
auucaaguucuucugucuuugc

SEQ ID NO: 373826 - RNA, 22 nt, Human
agcucccagaagccagagucgg

SEQ ID NO: 373827 - RNA, 18 nt, Human
caugucugcgccacaagg

SEQ ID NO: 373828 - RNA, 22 nt, Human
gcagggacaccuuugugaagcu

SEQ ID NO: 373829 - RNA, 19 nt, Human
ugccuggcaccagcuccac

SEQ ID NO: 373830 - RNA, 22 nt, Human
uggagcuggcuuguggaaguug

SEQ ID NO: 373831 - RNA, 21 nt, Human
gagacagcccagugccagggc

SEQ ID NO: 373832 - RNA, 19 nt, Human
ucaguggagaaaggggaag

SEQ ID NO: 373833 - RNA, 22 nt, Human
aggggcucaguuacuuuggcag

SEQ ID NO: 373834 - RNA, 22 nt, Human
uucuucuuuaucucaguauccu

SEQ ID NO: 373835 - RNA, 22 nt, Human
accaugaucugcucugguguuu

SEQ ID NO: 373836 - RNA, 22 nt, Human
caggagugcagguggugaggca

SEQ ID NO: 373837 - RNA, 22 nt, Human
uaaaucuccuguuuuucaucua

SEQ ID NO: 373838 - RNA, 22 nt, Human
cuguggaccugcucuuagagac

SEQ ID NO: 373839 - RNA, 22 nt, Human
agccaggcuacuccuugcugac

SEQ ID NO: 373840 - RNA, 22 nt, Human
acuagaaacuaauggauuauua

SEQ ID NO: 373841 - RNA, 22 nt, Human
auggggugaccaugagcauuua

SEQ ID NO: 373842 - RNA, 22 nt, Human
aauauuguuucaagaucacaga

SEQ ID NO: 373843 - RNA, 22 nt, Human
uacuuuggauccuuacaauagc

SEQ ID NO: 373844 - RNA, 22 nt, Human
caagccucagaaucuucuccau

SEQ ID NO: 373845 - RNA, 22 nt, Human
ugcagggcaguggagguugagu

SEQ ID NO: 373846 - RNA, 19 nt, Human
ccugugacuaucuuuguaa

SEQ ID NO: 373847 - RNA, 22 nt, Human
ggcauggcuggguucuggugag

SEQ ID NO: 373848 - RNA, 19 nt, Human
uucacauuggaagaaguag

SEQ ID NO: 373849 - RNA, 22 nt, Human
cccaggcagccugcagggaagg

SEQ ID NO: 373850 - RNA, 22 nt, Human
uagcuaucuguguccagaucca

SEQ ID NO: 373851 - RNA, 22 nt, Human
ccaaaggcggaacugagucucu

SEQ ID NO: 373852 - RNA, 22 nt, Human
auuucaggagcaguuucagugg

SEQ ID NO: 373853 - RNA, 22 nt, Human
gcccagcuccucugcagacccu

SEQ ID NO: 373854 - RNA, 17 nt, Human
cucagaguugcuuuguc

SEQ ID NO: 373855 - RNA, 22 nt, Human
uuuacuuugugucaagucaaga

SEQ ID NO: 373856 - RNA, 20 nt, Human
ucccaggcuccacccuagac

SEQ ID NO: 373857 - RNA, 22 nt, Human
acaaaagugagugugucucaga

SEQ ID NO: 373858 - RNA, 22 nt, Human
gcacugaaugccaaaguguagg

SEQ ID NO: 373859 - RNA, 23 nt, Human
ggguccagagacaggcaugggug

SEQ ID NO: 373860 - RNA, 22 nt, Human
ggcagccauacucagaccuggg

SEQ ID NO: 373861 - RNA, 20 nt, Human
uucuucucuaguuaucuuca

SEQ ID NO: 373862 - RNA, 22 nt, Human
cauguuaaaauauacauucuga

SEQ ID NO: 373863 - RNA, 22 nt, Human
aagauggaguaguguaaugguu

SEQ ID NO: 373864 - RNA, 22 nt, Human
gccagggggucagcaggcacuu

SEQ ID NO: 373865 - RNA, 22 nt, Human
cagcuguggagauggggugcau

SEQ ID NO: 373866 - RNA, 22 nt, Human
agucuucacucuucacuacuau

SEQ ID NO: 373867 - RNA, 19 nt, Human
cagaggcaccagguauaga

SEQ ID NO: 373868 - RNA, 22 nt, Human
ugcugccagagagacagggacu

SEQ ID NO: 373869 - RNA, 22 nt, Human
ucccaggcaaaggcagcucauu

SEQ ID NO: 373870 - RNA, 23 nt, Human
ccaggccucucagagggugugcc

SEQ ID NO: 373871 - RNA, 23 nt, Human
uucuucucaauuaguugauucag

SEQ ID NO: 373872 - RNA, 22 nt, Human
augagcuucccagacaggaugg

SEQ ID NO: 373873 - RNA, 22 nt, Human
aacaaaugauaccaguucucaa

SEQ ID NO: 373874 - RNA, 22 nt, Human
ucuucagauggccaguuguccc

SEQ ID NO: 373875 - RNA, 22 nt, Human
cagcaagauuuuuaaagcaagg

SEQ ID NO: 373876 - RNA, 22 nt, Human
aagaaaugcagaaaugugcugg

SEQ ID NO: 373877 - RNA, 22 nt, Human
agcugcugaaugacacugcaag

SEQ ID NO: 373878 - RNA, 22 nt, Human
gcccaggccggagagcagugcu

SEQ ID NO: 373879 - RNA, 22 nt, Human
uauuccaguucaccuuuucauc

SEQ ID NO: 373880 - RNA, 22 nt, Human
gcugcagcucgccuuccggccu

SEQ ID NO: 373881 - RNA, 22 nt, Human
ugauuuccccagucuugcugcu

SEQ ID NO: 373882 - RNA, 22 nt, Human
cuggagggggaaauguucauug

SEQ ID NO: 373883 - RNA, 22 nt, Human
ggcagcuuccugagccagcagc

SEQ ID NO: 373884 - RNA, 22 nt, Human
cagagcugauuggauccagaga

SEQ ID NO: 373885 - RNA, 22 nt, Human
cagaguggcacucugcuggaug

SEQ ID NO: 373886 - RNA, 22 nt, Human
uggaggaugagugugggcucug

SEQ ID NO: 373887 - RNA, 22 nt, Human
ucucaagagggaggcaaucaug

SEQ ID NO: 373888 - RNA, 22 nt, Human
aggacaggauugagcugaacug

SEQ ID NO: 373889 - RNA, 22 nt, Human
uccaggagauucauuaggucau

SEQ ID NO: 373890 - RNA, 22 nt, Human
ucauuugugugagugauuugac

SEQ ID NO: 373891 - RNA, 22 nt, Human
aguuuuaugcaguguucugaua

SEQ ID NO: 373892 - RNA, 21 nt, Human
guggcucugccaggacugaaa

SEQ ID NO: 373893 - RNA, 22 nt, Human
caaaucuauauguugauauucu

SEQ ID NO: 373894 - RNA, 22 nt, Human
ugauuuccaaaaggcuucuaag

SEQ ID NO: 373895 - RNA, 22 nt, Human
gcaggcucuucuuucugcccag

SEQ ID NO: 373896 - RNA, 22 nt, Human
agcaggguauguuagagcugua

SEQ ID NO: 373897 - RNA, 22 nt, Human
aguauaauuagauaucaaaagu

SEQ ID NO: 373898 - RNA, 22 nt, Human
gugccagggaguggaggagcuu

SEQ ID NO: 373899 - RNA, 22 nt, Human
aagggcuguaagccaaguaaag

SEQ ID NO: 373900 - RNA, 22 nt, Human
gagcuguccgccccugggccga

SEQ ID NO: 373901 - RNA, 22 nt, Human
gagugugucggucagcguggcg

SEQ ID NO: 373902 - RNA, 22 nt, Human
caagaugccccugguagggauc

SEQ ID NO: 373903 - RNA, 22 nt, Human
gcaggcuggaggcuguucuggg

SEQ ID NO: 373904 - RNA, 22 nt, Human
uccugggcugugugccacucug

SEQ ID NO: 373905 - RNA, 22 nt, Human
ugugacaugugucaucuuuucu

SEQ ID NO: 373906 - RNA, 22 nt, Human
acacagccaggguaguaaggcu

SEQ ID NO: 373907 - RNA, 19 nt, Human
uauuucaaagugccgucua

SEQ ID NO: 373908 - RNA, 22 nt, Human
caggagcaaggagcagugggau

SEQ ID NO: 373909 - RNA, 22 nt, Human
uggcagcuagauaguguguuua

SEQ ID NO: 373910 - RNA, 22 nt, Human
gugagcagaacagguggcuucu

SEQ ID NO: 373911 - RNA, 22 nt, Human
ucacugcaaucucugccuucca

SEQ ID NO: 373912 - RNA, 22 nt, Human
ugguaaauauguccauucucuu

SEQ ID NO: 373913 - RNA, 22 nt, Human
ucccagcauaacaaacugcccg

SEQ ID NO: 373914 - RNA, 22 nt, Human
aaagccagcaaggugaguuuca

SEQ ID NO: 373915 - RNA, 22 nt, Human
uccuugaaaagaaugucuccau

SEQ ID NO: 373916 - RNA, 22 nt, Human
uuccaggauggcaauaaugaau

SEQ ID NO: 373917 - RNA, 22 nt, Human
aaggccugaacaugaggagaug

SEQ ID NO: 373918 - RNA, 22 nt, Human
ggcagccuccagggcacuggug

SEQ ID NO: 373919 - RNA, 22 nt, Human
gcaaaucaccaccuagcuggau

SEQ ID NO: 373920 - RNA, 22 nt, Human
uguaccuuuuucugugcaugcu

SEQ ID NO: 373921 - RNA, 22 nt, Human
cccucugcugccuggcuggguc

SEQ ID NO: 373922 - RNA, 22 nt, Human
ugccaggcugucaauucaccca

SEQ ID NO: 373923 - RNA, 22 nt, Human
agcuuccuguugagagagggag

SEQ ID NO: 373924 - RNA, 22 nt, Human
gccagagccggcuucacaggau

SEQ ID NO: 373925 - RNA, 22 nt, Human
agcacagguacggagaugcuac

SEQ ID NO: 373926 - RNA, 22 nt, Human
ccagagccggcucccucagcuu

SEQ ID NO: 373927 - RNA, 22 nt, Human
cugcugggaaggucugcucagu

SEQ ID NO: 373928 - RNA, 22 nt, Human
cagugcaguuucccagaugcug

SEQ ID NO: 373929 - RNA, 22 nt, Human
cccuggaagguucucuggcuca

SEQ ID NO: 373930 - RNA, 22 nt, Human
ccugggugaaaucucuccugca

SEQ ID NO: 373931 - RNA, 22 nt, Human
uagacacaagagaaggguauaa

SEQ ID NO: 373932 - RNA, 22 nt, Human
cugaggccucucuccugggcuu

SEQ ID NO: 373933 - RNA, 22 nt, Human
uggacucagugcugccauuccc

SEQ ID NO: 373934 - RNA, 22 nt, Human
aggaagagcuggaccagaggac

SEQ ID NO: 373935 - RNA, 22 nt, Human
uugaagcagagaaauacuugaa

SEQ ID NO: 373936 - RNA, 22 nt, Human
ucuuagaaguucauguuccagc

SEQ ID NO: 373937 - RNA, 22 nt, Human
gcaggaagcauagaagaaugcc

SEQ ID NO: 373938 - RNA, 22 nt, Human
aggcagccaguucagguuucuu

SEQ ID NO: 373939 - RNA, 22 nt, Human
gggugcagggucuccagcagcu

SEQ ID NO: 373940 - RNA, 21 nt, Human
cauuucaaagagcuggaaauc

SEQ ID NO: 373941 - RNA, 22 nt, Human
ccaggcaggcuagaauguaaau

SEQ ID NO: 373942 - RNA, 22 nt, Human
uuagaaaugauuucaccucuuu

SEQ ID NO: 373943 - RNA, 22 nt, Human
uagggcaggugaagaaaagcua

SEQ ID NO: 373944 - RNA, 22 nt, Human
gagggugggccagauaugaggg

SEQ ID NO: 373945 - RNA, 23 nt, Human
acucacaaagcaggaucauguug

SEQ ID NO: 373946 - RNA, 22 nt, Human
ugagccugguugcagugucugg

SEQ ID NO: 373947 - RNA, 22 nt, Human
uaagacauuugaaaugugaucc

SEQ ID NO: 373948 - RNA, 22 nt, Human
acaauacaggcuucuggacuua

SEQ ID NO: 373949 - RNA, 22 nt, Human
caggaaccuaaugaaggcucac

SEQ ID NO: 373950 - RNA, 22 nt, Human
aauacugucuuucacagauauu

SEQ ID NO: 373951 - RNA, 22 nt, Human
uuccauaaucaccuuauucuuu

SEQ ID NO: 373952 - RNA, 22 nt, Human
ucuuguccuaagagcuggauuc

SEQ ID NO: 373953 - RNA, 22 nt, Human
gugguaauagagcuccaaacua

SEQ ID NO: 373954 - RNA, 22 nt, Human
gcugucacaucaaggcacuaaa

SEQ ID NO: 373955 - RNA, 22 nt, Human
aggcugagccacggggcuggcu

SEQ ID NO: 373956 - RNA, 23 nt, Human
ugccucugccucccuagucugca

SEQ ID NO: 373957 - RNA, 22 nt, Human
gccaucacauccaggcuaccuc

SEQ ID NO: 373958 - RNA, 22 nt, Human
guggccugccagcagauggcgc

SEQ ID NO: 373959 - RNA, 22 nt, Human
ugggcugccggcaggcucugcc

SEQ ID NO: 373960 - RNA, 22 nt, Human
uuauugccugauugaggucauu

SEQ ID NO: 373961 - RNA, 22 nt, Human
gcaggagugacauggaugugga

SEQ ID NO: 373962 - RNA, 21 nt, Human
auugaaagucaacaaucaguu

SEQ ID NO: 373963 - RNA, 22 nt, Human
cagaagcacuaggaggaaacgu

SEQ ID NO: 373964 - RNA, 22 nt, Human
caggugcccagcuccugcugug

SEQ ID NO: 373965 - RNA, 22 nt, Human
ucacacgugagguucuauccug

SEQ ID NO: 373966 - RNA, 22 nt, Human
gcaggagcccuggcauguucuu

SEQ ID NO: 373967 - RNA, 21 nt, Human
ugaaaucugaugggacaaaug

SEQ ID NO: 373968 - RNA, 22 nt, Human
gaaauauacaugaagucggcug

SEQ ID NO: 373969 - RNA, 22 nt, Human
ugcagaagcugcaggucagugg

SEQ ID NO: 373970 - RNA, 22 nt, Human
ccagcccugccucucagggccc

SEQ ID NO: 373971 - RNA, 22 nt, Human
aauguucaaacagaucacuuag

SEQ ID NO: 373972 - RNA, 22 nt, Human
cuccuuagugccucugcacgag

SEQ ID NO: 373973 - RNA, 22 nt, Human
aggggaugauccucccgcagcg

SEQ ID NO: 373974 - RNA, 20 nt, Human
gcaggcagggaaugggggug

SEQ ID NO: 373975 - RNA, 22 nt, Human
gagacacacacaggagguggca

SEQ ID NO: 373976 - RNA, 22 nt, Human
gcccaggaugguguguaguggu

SEQ ID NO: 373977 - RNA, 22 nt, Human
caggaggaacaagagguucugg

SEQ ID NO: 373978 - RNA, 22 nt, Human
caaggccugccucuggcagaaa

SEQ ID NO: 373979 - RNA, 22 nt, Human
aaguuugcauagauuaagcauu

SEQ ID NO: 373980 - RNA, 22 nt, Human
gcagaauuuggggguaaccuuu

SEQ ID NO: 373981 - RNA, 22 nt, Human
auuugucuuugagugcccugcu

SEQ ID NO: 373982 - RNA, 20 nt, Human
gaaguccuuucacucuuccc

SEQ ID NO: 373983 - RNA, 22 nt, Human
guacccagaggcaugaucccag

SEQ ID NO: 373984 - RNA, 22 nt, Human
agacgagggcccccaggacagc

SEQ ID NO: 373985 - RNA, 22 nt, Human
uagaugaccuuguguuaggcaa

SEQ ID NO: 373986 - RNA, 22 nt, Human
agcuucucaggagucugaggca

SEQ ID NO: 373987 - RNA, 22 nt, Human
aaguccuuuaauaucacauagu

SEQ ID NO: 373988 - RNA, 22 nt, Human
cacaaaugugcagaaaugugag

SEQ ID NO: 373989 - RNA, 22 nt, Human
agugcuguccaguuucacaggu

SEQ ID NO: 373990 - RNA, 21 nt, Human
cgggcuggccgggcccucacc

SEQ ID NO: 373991 - RNA, 22 nt, Human
ucagcuuuccuugcuuuagauu

SEQ ID NO: 373992 - RNA, 22 nt, Human
uacagauauagagauuuauaga

SEQ ID NO: 373993 - RNA, 22 nt, Human
aggugccagugcuguggucccc

SEQ ID NO: 373994 - RNA, 22 nt, Human
ugggaggaucgcuugagcccag

SEQ ID NO: 373995 - RNA, 22 nt, Human
ccaggcugcagucaaggggcau

SEQ ID NO: 373996 - RNA, 22 nt, Human
acuccagggcuccaucccuugu

SEQ ID NO: 373997 - RNA, 22 nt, Human
aaugcugcaagaggugaaaaga

SEQ ID NO: 373998 - RNA, 22 nt, Human
agggaccugucaaugacaguua

SEQ ID NO: 373999 - RNA, 22 nt, Human
agcuguguggugucugacagcu

SEQ ID NO: 374000 - RNA, 22 nt, Human
ucucuggccgagagucccuggg

SEQ ID NO: 374001 - RNA, 20 nt, Human
guugaaaguaauaugaugcu

SEQ ID NO: 374002 - RNA, 22 nt, Human
cugugccuaagaugcaugucuc

SEQ ID NO: 374003 - RNA, 22 nt, Human
uuuauucaucaucuguucauau

SEQ ID NO: 374004 - RNA, 22 nt, Human
uggcagcaauuagcuagagcug

SEQ ID NO: 374005 - RNA, 22 nt, Human
uucagaaugugaccuuauuugg

SEQ ID NO: 374006 - RNA, 22 nt, Human
gucuucuuuaaccuacuaaagc

SEQ ID NO: 374007 - RNA, 22 nt, Human
uggcucugcaccucaguguacc

SEQ ID NO: 374008 - RNA, 22 nt, Human
guucuucaguaaaauuaaaugu

SEQ ID NO: 374009 - RNA, 22 nt, Human
agacuucucaguuuuauuagua

SEQ ID NO: 374010 - RNA, 22 nt, Human
gagagcugucagcguagcaccg

SEQ ID NO: 374011 - RNA, 22 nt, Human
caggccagguggcaggcaaaac

SEQ ID NO: 374012 - RNA, 22 nt, Human
uagauauaagguccuuagaaca

SEQ ID NO: 374013 - RNA, 22 nt, Human
cuuuccaacucuagugaaauuu

SEQ ID NO: 374014 - RNA, 22 nt, Human
aaccccgcucaggcugggugag

SEQ ID NO: 374015 - RNA, 20 nt, Human
uagauuucauacuucucuuu

SEQ ID NO: 374016 - RNA, 22 nt, Human
aaggaaccauuugugugcaugg

SEQ ID NO: 374017 - RNA, 22 nt, Human
cagcuggaugggagaccauguu

SEQ ID NO: 374018 - RNA, 22 nt, Human
gcaguggcaccgcuggcucugg

SEQ ID NO: 374019 - RNA, 21 nt, Human
agaagccuggguggagguggg

SEQ ID NO: 374020 - RNA, 22 nt, Human
uuagggacagcucuguagguga

SEQ ID NO: 374021 - RNA, 20 nt, Human
cuucaggacccauccucccc

SEQ ID NO: 374022 - RNA, 22 nt, Human
cagguaaaaauaaauuugugag

SEQ ID NO: 374023 - RNA, 22 nt, Human
gcccagcagcugguggagaagg

SEQ ID NO: 374024 - RNA, 22 nt, Human
acagcagcauaaacugacuaag

SEQ ID NO: 374025 - RNA, 22 nt, Human
auagaauucuuugaaauuuaug

SEQ ID NO: 374026 - RNA, 22 nt, Human
uggcauuuagaaaacaacaugu

SEQ ID NO: 374027 - RNA, 21 nt, Human
uggaccuguccuucucgcugu

SEQ ID NO: 374028 - RNA, 22 nt, Human
aaaaacuguaauuacuuuugca

SEQ ID NO: 374029 - RNA, 22 nt, Human
ggaaagagcuaaaagggugaga

SEQ ID NO: 374030 - RNA, 22 nt, Human
cugccaggccuccgcugucccc

SEQ ID NO: 374031 - RNA, 22 nt, Human
ggcacucagagauucaggcugu

SEQ ID NO: 374032 - RNA, 22 nt, Human
acuggcucagaguuccuagaga

SEQ ID NO: 374033 - RNA, 22 nt, Human
uugggacagaaaaggagaagau

SEQ ID NO: 374034 - RNA, 22 nt, Human
uccugcagagucccacugauuu

SEQ ID NO: 374035 - RNA, 22 nt, Human
aaacauguaauucugcuuaaga

SEQ ID NO: 374036 - RNA, 21 nt, Human
uucuucaaagaagaaggcaca

SEQ ID NO: 374037 - RNA, 22 nt, Human
cugggcugucaauggcccucug

SEQ ID NO: 374038 - RNA, 22 nt, Human
agaaugcaagauaaacuuuauu

SEQ ID NO: 374039 - RNA, 22 nt, Human
caggaggagcauuagcgucuca

SEQ ID NO: 374040 - RNA, 20 nt, Human
agaaggcuccuuuugccaag

SEQ ID NO: 374041 - RNA, 22 nt, Human
uucacaggaauguaggggucuu

SEQ ID NO: 374042 - RNA, 22 nt, Human
uuuauguacauauccacaagga

SEQ ID NO: 374043 - RNA, 22 nt, Human
gggcagguggcagggucucugg

SEQ ID NO: 374044 - RNA, 22 nt, Human
caaggccaguuucuccuaguca

SEQ ID NO: 374045 - RNA, 22 nt, Human
acuuagaacaggcagaauucca

SEQ ID NO: 374046 - RNA, 22 nt, Human
accagccugucugagucguggg

SEQ ID NO: 374047 - RNA, 22 nt, Human
uuuccucugacugcuccccugc

SEQ ID NO: 374048 - RNA, 22 nt, Human
gaugugggguugagggaccagc

SEQ ID NO: 374049 - RNA, 22 nt, Human
gggacaggccccucgcuagcuu

SEQ ID NO: 374050 - RNA, 19 nt, Human
aauguaguguuaugucaac

SEQ ID NO: 374051 - RNA, 22 nt, Human
cugacucuccucaagcauaaau

SEQ ID NO: 374052 - RNA, 22 nt, Human
uucauucccaagaguaaacaua

SEQ ID NO: 374053 - RNA, 22 nt, Human
gugggggcaggcagugcuagga

SEQ ID NO: 374054 - RNA, 23 nt, Human
ggcugagacuacaggcgcuugcc

SEQ ID NO: 374055 - RNA, 22 nt, Human
ggcauuaagaauaucauuaaaa

SEQ ID NO: 374056 - RNA, 22 nt, Human
gcagacagcauguugggcuauu

SEQ ID NO: 374057 - RNA, 20 nt, Human
uaugaagauaugugaacagc

SEQ ID NO: 374058 - RNA, 22 nt, Human
gagcaggcuugcagagaagggg

SEQ ID NO: 374059 - RNA, 22 nt, Human
acauuucucagggaguuuugcu

SEQ ID NO: 374060 - RNA, 22 nt, Human
ggccuagggaguggccaugccu

SEQ ID NO: 374061 - RNA, 22 nt, Human
cugccagcaaugugaccaugcu

SEQ ID NO: 374062 - RNA, 22 nt, Human
aggcagcuggcaaauucuagag

SEQ ID NO: 374063 - RNA, 22 nt, Human
agcaggugagcacagccaggcu

SEQ ID NO: 374064 - RNA, 22 nt, Human
acaaagucaaauugcagccgcc

SEQ ID NO: 374065 - RNA, 22 nt, Human
ugaggcucaagaaagauuuguu

SEQ ID NO: 374066 - RNA, 22 nt, Human
auacacagcgaugagaggaggc

SEQ ID NO: 374067 - RNA, 21 nt, Human
cuacagaaucgagcauucugg

SEQ ID NO: 374068 - RNA, 22 nt, Human
acaacuuuucuaucauguggaa

SEQ ID NO: 374069 - RNA, 20 nt, Human
uuucacagucccuguuuccu

SEQ ID NO: 374070 - RNA, 22 nt, Human
cagagccaggguugcaccccug

SEQ ID NO: 374071 - RNA, 22 nt, Human
uuugaaaggaaguuaauacuuu

SEQ ID NO: 374072 - RNA, 22 nt, Human
ugguccagacauuucugaggua

SEQ ID NO: 374073 - RNA, 22 nt, Human
uccauuuagcuggcaaacaaug

SEQ ID NO: 374074 - RNA, 22 nt, Human
gcugccacgaucucugcuguag

SEQ ID NO: 374075 - RNA, 22 nt, Human
auucuucagcaggggacacuau

SEQ ID NO: 374076 - RNA, 22 nt, Human
uuucaaagguggaagagugaau

SEQ ID NO: 374077 - RNA, 22 nt, Human
caggccuccacuccacgcagac

SEQ ID NO: 374078 - RNA, 22 nt, Human
cccucugccugggaccaagucc

SEQ ID NO: 374079 - RNA, 22 nt, Human
auucuucacaccuguuccuguu

SEQ ID NO: 374080 - RNA, 22 nt, Human
cagagcagugaggaguugugua

SEQ ID NO: 374081 - RNA, 22 nt, Human
ggucagagggugggcugccugu

SEQ ID NO: 374082 - RNA, 22 nt, Human
ucugucacccgagcaggcgaga

SEQ ID NO: 374083 - RNA, 22 nt, Human
ucuggagccacaaaccucagcu

SEQ ID NO: 374084 - RNA, 22 nt, Human
agagcugagcaccaagcauggu

SEQ ID NO: 374085 - RNA, 22 nt, Human
guaggcagggcuguggggagaa

SEQ ID NO: 374086 - RNA, 22 nt, Human
agaaaugcucaggucaacuuaa

SEQ ID NO: 374087 - RNA, 22 nt, Human
uccugcagcugaagcucaugug

SEQ ID NO: 374088 - RNA, 22 nt, Human
accaucaguacuggaugcugac

SEQ ID NO: 374089 - RNA, 22 nt, Human
cuuagggaaucuuagagcugga

SEQ ID NO: 374090 - RNA, 22 nt, Human
uagaaacccauguuuauucagu

SEQ ID NO: 374091 - RNA, 22 nt, Human
uaaggcaccuguccaggcuggg

SEQ ID NO: 374092 - RNA, 22 nt, Human
cccuggugguacggcacuggca

SEQ ID NO: 374093 - RNA, 22 nt, Human
agauuucccaaauacuuguuau

SEQ ID NO: 374094 - RNA, 22 nt, Human
agugcuuuagcauccaacuguc

SEQ ID NO: 374095 - RNA, 22 nt, Human
uucaugugaauauauuugucuu

SEQ ID NO: 374096 - RNA, 22 nt, Human
uguuuauaccugcaaccuguca

SEQ ID NO: 374097 - RNA, 22 nt, Human
uuccagaauuuuguucugcuug

SEQ ID NO: 374098 - RNA, 22 nt, Human
gcucuggagauggagccuugag

SEQ ID NO: 374099 - RNA, 22 nt, Human
cagucccaccaggaucgcucuu

SEQ ID NO: 374100 - RNA, 22 nt, Human
ggggcagaaguagugccccuga

SEQ ID NO: 374101 - RNA, 19 nt, Human
ucccagagucuagagguug

SEQ ID NO: 374102 - RNA, 22 nt, Human
uccucaggcugccuggaagacu

SEQ ID NO: 374103 - RNA, 22 nt, Human
aguguuccuugcuuucccagag

SEQ ID NO: 374104 - RNA, 22 nt, Human
ucagagagguuggugauaagaa

SEQ ID NO: 374105 - RNA, 22 nt, Human
gggcugacucaaccuugcaaag

SEQ ID NO: 374106 - RNA, 20 nt, Human
ugccaggcacggagugcaug

SEQ ID NO: 374107 - RNA, 22 nt, Human
uggcucucagcucccagcagcc

SEQ ID NO: 374108 - RNA, 21 nt, Human
cacucaggguaugugccaggc

SEQ ID NO: 374109 - RNA, 22 nt, Human
cugagccaaccacagcaggagc

SEQ ID NO: 374110 - RNA, 22 nt, Human
gcucuggcuacuguggcuaccg

SEQ ID NO: 374111 - RNA, 22 nt, Human
ccagcuuuauagcuucaaagga

SEQ ID NO: 374112 - RNA, 22 nt, Human
gcagcuguguaaugagcccaca

SEQ ID NO: 374113 - RNA, 22 nt, Human
auuagagguacaaaccuucacu

SEQ ID NO: 374114 - RNA, 22 nt, Human
acaguggaagcaugaugcuauc

SEQ ID NO: 374115 - RNA, 22 nt, Human
cuugcaggccuuucuagcucua

SEQ ID NO: 374116 - RNA, 22 nt, Human
gagcuggcuccgccaugcugcu

SEQ ID NO: 374117 - RNA, 19 nt, Human
cccaaggcccugggcaggc

SEQ ID NO: 374118 - RNA, 22 nt, Human
uggccuuggcagugagaagagu

SEQ ID NO: 374119 - RNA, 22 nt, Human
ugugcagggaagggcaugcuau

SEQ ID NO: 374120 - RNA, 22 nt, Human
aacucagucauaaagcgaaugc

SEQ ID NO: 374121 - RNA, 23 nt, Human
ccugcagcugcuggggcuccacc

SEQ ID NO: 374122 - RNA, 22 nt, Human
ccagugcccagucucccugguc

SEQ ID NO: 374123 - RNA, 22 nt, Human
ucucugaguaagugacaguuca

SEQ ID NO: 374124 - RNA, 22 nt, Human
acacccagagcgccagugccga

SEQ ID NO: 374125 - RNA, 22 nt, Human
agauuucaaugugagcauuagu

SEQ ID NO: 374126 - RNA, 21 nt, Human
ccugagggugguugugaagau

SEQ ID NO: 374127 - RNA, 23 nt, Human
cagaaaucugaaaucuagaaaug

SEQ ID NO: 374128 - RNA, 22 nt, Human
cugaaaauguuacacaggaaga

SEQ ID NO: 374129 - RNA, 22 nt, Human
cccucccaagcacucugacaua

SEQ ID NO: 374130 - RNA, 22 nt, Human
uacuuagagcgauaauuuauac

SEQ ID NO: 374131 - RNA, 22 nt, Human
caggaugcacuaggaaccaggg

SEQ ID NO: 374132 - RNA, 22 nt, Human
ugaaaugagauagauaaucagg

SEQ ID NO: 374133 - RNA, 18 nt, Human
cccagugcucacugccuc

SEQ ID NO: 374134 - RNA, 22 nt, Human
aacaugcugccuuucuacgagu

SEQ ID NO: 374135 - RNA, 22 nt, Human
gcugugugaaaacugggccugg

SEQ ID NO: 374136 - RNA, 22 nt, Human
ccugagagagaagcgaccuggu

SEQ ID NO: 374137 - RNA, 22 nt, Human
gcuguucaagacuaggaaauuu

SEQ ID NO: 374138 - RNA, 22 nt, Human
uucaaacacagacagcagcaug

SEQ ID NO: 374139 - RNA, 22 nt, Human
cugggcuucucccccuggcaga

SEQ ID NO: 374140 - RNA, 22 nt, Human
uguacauuuagagcucaauaga

SEQ ID NO: 374141 - RNA, 22 nt, Human
ucuaaacagccucuuaccaacu

SEQ ID NO: 374142 - RNA, 19 nt, Human
ucucagaggaaaaauugcu

SEQ ID NO: 374143 - RNA, 22 nt, Human
ccucaggauacaggagccacag

SEQ ID NO: 374144 - RNA, 22 nt, Human
aggagugcaaauaguccagaga

SEQ ID NO: 374145 - RNA, 22 nt, Human
ucauagaagcaccagaagauau

SEQ ID NO: 374146 - RNA, 22 nt, Human
caggccucuccuuagucuggca

SEQ ID NO: 374147 - RNA, 22 nt, Human
uugggaaggcguggaagcagaa

SEQ ID NO: 374148 - RNA, 22 nt, Human
cugccugggccggccacccucu

SEQ ID NO: 374149 - RNA, 22 nt, Human
cauuucaauacuaucugagaau

SEQ ID NO: 374150 - RNA, 22 nt, Human
ucuguucagaagaggugaaagu

SEQ ID NO: 374151 - RNA, 22 nt, Human
uuucugaagggcagcagacucu

SEQ ID NO: 374152 - RNA, 22 nt, Human
ucccagagauuuccucuccuuc

SEQ ID NO: 374153 - RNA, 20 nt, Human
ugucauuguuucuaggaccu

SEQ ID NO: 374154 - RNA, 22 nt, Human
uauguacacacacaugcaugua

SEQ ID NO: 374155 - RNA, 22 nt, Human
agugcagaguacauuuguggca

SEQ ID NO: 374156 - RNA, 22 nt, Human
gccaguggcccucuggagaagg

SEQ ID NO: 374157 - RNA, 22 nt, Human
ccuggcagcuccuccccggcgg

SEQ ID NO: 374158 - RNA, 22 nt, Human
cuggagagauccuccugaaaaa

SEQ ID NO: 374159 - RNA, 22 nt, Human
uuaaaaccaucagcuguaagau

SEQ ID NO: 374160 - RNA, 22 nt, Human
cagaacauuccaugugcccugc

SEQ ID NO: 374161 - RNA, 22 nt, Human
gcuuucucuucacugauguuca

SEQ ID NO: 374162 - RNA, 22 nt, Human
uguaacaauuucuuacuauugu

SEQ ID NO: 374163 - RNA, 22 nt, Human
uugaaaggaauacagaggccua

SEQ ID NO: 374164 - RNA, 15 nt, Human
aaucagaaguguggc

SEQ ID NO: 374165 - RNA, 20 nt, Human
auacaaagagauugauguau

SEQ ID NO: 374166 - RNA, 22 nt, Human
caugaguuuuuuaguucaugca

SEQ ID NO: 374167 - RNA, 22 nt, Human
gcugccuuugugagccaagggg

SEQ ID NO: 374168 - RNA, 22 nt, Human
gcacaugguaggcauuugaugu

SEQ ID NO: 374169 - RNA, 20 nt, Human
agcaccagugggggcagccc

SEQ ID NO: 374170 - RNA, 22 nt, Human
caagauggguguugugaugguu

SEQ ID NO: 374171 - RNA, 23 nt, Human
agcccagcagagaaccuaggucc

SEQ ID NO: 374172 - RNA, 22 nt, Human
cuggaaguauaggggagaugau

SEQ ID NO: 374173 - RNA, 22 nt, Human
gauuuacagguuagguccugua

SEQ ID NO: 374174 - RNA, 22 nt, Human
gagcagugagugaauguugccu

SEQ ID NO: 374175 - RNA, 22 nt, Human
gcacagguugcaaaaguucaca

SEQ ID NO: 374176 - RNA, 22 nt, Human
gcugcagcuguaggacacaauu

SEQ ID NO: 374177 - RNA, 22 nt, Human
gcagcuuucuacuuccuacagc

SEQ ID NO: 374178 - RNA, 22 nt, Human
uuguuucagcuguaugcuaugu

SEQ ID NO: 374179 - RNA, 22 nt, Human
caacagcugaucuuugaugaag

SEQ ID NO: 374180 - RNA, 22 nt, Human
gcagacaauuuauuagcagauu

SEQ ID NO: 374181 - RNA, 22 nt, Human
uuccaugacaccgagggaaguc

SEQ ID NO: 374182 - RNA, 19 nt, Human
gccugcagaaaaggcaggg

SEQ ID NO: 374183 - RNA, 22 nt, Human
uuuuuggguccaggcuguaucu

SEQ ID NO: 374184 - RNA, 22 nt, Human
uugaacuguaagcaugucugcc

SEQ ID NO: 374185 - RNA, 22 nt, Human
ugauuuccuagcugacaugaaa

SEQ ID NO: 374186 - RNA, 19 nt, Human
uccugggcugggccagguc

SEQ ID NO: 374187 - RNA, 19 nt, Human
gggcaguggcacuagggag

SEQ ID NO: 374188 - RNA, 22 nt, Human
aaaucaguucacguucugaggu

SEQ ID NO: 374189 - RNA, 22 nt, Human
aucuguaaaugcaaauguagcu

SEQ ID NO: 374190 - RNA, 22 nt, Human
aguggcagacacaaugugggca

SEQ ID NO: 374191 - RNA, 22 nt, Human
cuucagaggggacucaaaguca

SEQ ID NO: 374192 - RNA, 22 nt, Human
auguccagccaaccacuggauu

SEQ ID NO: 374193 - RNA, 22 nt, Human
agacaggcuuugcuguauauca

SEQ ID NO: 374194 - RNA, 23 nt, Human
aaauaggaguaucuggaucauga

SEQ ID NO: 374195 - RNA, 22 nt, Human
caggaaagggaugggcugccac

SEQ ID NO: 374196 - RNA, 22 nt, Human
gucccugcaucaccacgggacu

SEQ ID NO: 374197 - RNA, 22 nt, Human
agagccaggcggcugggcaccu

SEQ ID NO: 374198 - RNA, 19 nt, Human
ggaccagguccugggcagc

SEQ ID NO: 374199 - RNA, 22 nt, Human
uccuuuuuauaguuagagaaac

SEQ ID NO: 374200 - RNA, 18 nt, Human
cuguucuagaacuccugu

SEQ ID NO: 374201 - RNA, 22 nt, Human
ccuggcucuucagagguuccua

SEQ ID NO: 374202 - RNA, 22 nt, Human
aggagcugaagucucugcacuc

SEQ ID NO: 374203 - RNA, 22 nt, Human
uucaauaggaugcaugauauaa

SEQ ID NO: 374204 - RNA, 22 nt, Human
gccaggagugucccacucauuu

SEQ ID NO: 374205 - RNA, 22 nt, Human
aaggcacugaacuuaaauucug

SEQ ID NO: 374206 - RNA, 22 nt, Human
acugcagagguggggugcagag

SEQ ID NO: 374207 - RNA, 22 nt, Human
ccugaagaugcuguggccuggu

SEQ ID NO: 374208 - RNA, 22 nt, Human
cugaaggagaaggccacuguuc

SEQ ID NO: 374209 - RNA, 22 nt, Human
gcagggcugggugggagacaga

SEQ ID NO: 374210 - RNA, 22 nt, Human
augcaguaaaauaggagguaau

SEQ ID NO: 374211 - RNA, 22 nt, Human
uucaaauacauucuuugccacu

SEQ ID NO: 374212 - RNA, 22 nt, Human
uuauuauuccccaagucauuau

SEQ ID NO: 374213 - RNA, 22 nt, Human
gggcucuguccauuccuucaua

SEQ ID NO: 374214 - RNA, 20 nt, Human
ggagagcagggaagacagua

SEQ ID NO: 374215 - RNA, 22 nt, Human
aauuccaggcagaaaugugagu

SEQ ID NO: 374216 - RNA, 22 nt, Human
gagccagccgcaagagcuguga

SEQ ID NO: 374217 - RNA, 19 nt, Human
agaaucaggucaggugaca

SEQ ID NO: 374218 - RNA, 22 nt, Human
ggccagaaguuggaaaagagcc

SEQ ID NO: 374219 - RNA, 22 nt, Human
ggcucaccauggccucccugcu

SEQ ID NO: 374220 - RNA, 22 nt, Human
ugucagggcaugcgguccagcc

SEQ ID NO: 374221 - RNA, 22 nt, Human
gccuggagugcaguggcgugau

SEQ ID NO: 374222 - RNA, 23 nt, Human
uggcccugugcaugcugcuuccc

SEQ ID NO: 374223 - RNA, 22 nt, Human
aaaguccagagggcacacugaa

SEQ ID NO: 374224 - RNA, 22 nt, Human
auuaagggccaauccuccagcc

SEQ ID NO: 374225 - RNA, 22 nt, Human
cucacuguccaacaggcuuuac

SEQ ID NO: 374226 - RNA, 22 nt, Human
acuuccugcaaucguccacucc

SEQ ID NO: 374227 - RNA, 22 nt, Human
guuugcauuccaauuuagggga

SEQ ID NO: 374228 - RNA, 22 nt, Human
ccugggcuggaguacagcagug

SEQ ID NO: 374229 - RNA, 22 nt, Human
auauauaaccuggauaaggcuu

SEQ ID NO: 374230 - RNA, 22 nt, Human
uaugcauacaaugagauauucc

SEQ ID NO: 374231 - RNA, 22 nt, Human
cuguccugauggugccacuggu

SEQ ID NO: 374232 - RNA, 22 nt, Human
ccaggagcagggcuggcugcac

SEQ ID NO: 374233 - RNA, 22 nt, Human
aucuaggauuugaaugcacagu

SEQ ID NO: 374234 - RNA, 22 nt, Human
aaagucaugaugaaccaccgua

SEQ ID NO: 374235 - RNA, 22 nt, Human
uggaagaauaggauagaagaac

SEQ ID NO: 374236 - RNA, 22 nt, Human
cuauugaaaguguacaauucaa

SEQ ID NO: 374237 - RNA, 22 nt, Human
cuucccagacgggguggcagcc

SEQ ID NO: 374238 - RNA, 22 nt, Human
ucuacuguagugaugcugcagu

SEQ ID NO: 374239 - RNA, 22 nt, Human
aggcucaggucucaggucuggc

SEQ ID NO: 374240 - RNA, 22 nt, Human
aauuuagauugauaaacaugga

SEQ ID NO: 374241 - RNA, 22 nt, Human
ugccacacagcuguaugaggga

SEQ ID NO: 374242 - RNA, 19 nt, Human
ucucuggggacacuuucac

SEQ ID NO: 374243 - RNA, 22 nt, Human
uccagggagagccgcugcucca

SEQ ID NO: 374244 - RNA, 22 nt, Human
ggcugaaacagauuucaagaca

SEQ ID NO: 374245 - RNA, 22 nt, Human
gcacccaguuugucucaggguu

SEQ ID NO: 374246 - RNA, 22 nt, Human
auuauuucucacucacauaaua

SEQ ID NO: 374247 - RNA, 22 nt, Human
aggggcuggaguucgagguuac

SEQ ID NO: 374248 - RNA, 22 nt, Human
agggaaagguagugaggucaca

SEQ ID NO: 374249 - RNA, 22 nt, Human
acaccagggccuagccagggcg

SEQ ID NO: 374250 - RNA, 22 nt, Human
uucacaggugacuggggauaac

SEQ ID NO: 374251 - RNA, 22 nt, Human
gcuucuggaggagcugggcuga

SEQ ID NO: 374252 - RNA, 22 nt, Human
ucugaaaugcaaauuugacuga

SEQ ID NO: 374253 - RNA, 22 nt, Human
cucccaagcugugcugaacugu

SEQ ID NO: 374254 - RNA, 22 nt, Human
aaaguguaaggaauuuaaguaa

SEQ ID NO: 374255 - RNA, 22 nt, Human
ucagaggauugccucagcgagc

SEQ ID NO: 374256 - RNA, 22 nt, Human
caggcugcagaggccuuucaug

SEQ ID NO: 374257 - RNA, 22 nt, Human
caagacaagaucuaagcaugcu

SEQ ID NO: 374258 - RNA, 22 nt, Human
caaguaaagaaucacauuucuu

SEQ ID NO: 374259 - RNA, 22 nt, Human
guacauuuugagguuaaaacaa

SEQ ID NO: 374260 - RNA, 22 nt, Human
cugcuggccuagcccauccucu

SEQ ID NO: 374261 - RNA, 22 nt, Human
ccugccugcguccucugagggc

SEQ ID NO: 374262 - RNA, 22 nt, Human
ucucccacuggccuuguaugau

SEQ ID NO: 374263 - RNA, 22 nt, Human
gaaaggugccccauaggcagga

SEQ ID NO: 374264 - RNA, 23 nt, Human
agcagggccagaauacuugcugu

SEQ ID NO: 374265 - RNA, 22 nt, Human
ugcuggaggauuaaacaaguca

SEQ ID NO: 374266 - RNA, 22 nt, Human
caauuucauuaauagauauaga

SEQ ID NO: 374267 - RNA, 22 nt, Human
aguauggggcugugugugcaca

SEQ ID NO: 374268 - RNA, 22 nt, Human
ucagaauucugaccuuggguca

SEQ ID NO: 374269 - RNA, 22 nt, Human
aaagaaucacauccuucagcaa

SEQ ID NO: 374270 - RNA, 22 nt, Human
ggcuggcuggcugguagacaag

SEQ ID NO: 374271 - RNA, 22 nt, Human
ccagcaggguugguuucuucug

SEQ ID NO: 374272 - RNA, 22 nt, Human
uaauuauagccgcuauuuugcu

SEQ ID NO: 374273 - RNA, 21 nt, Human
agucccaggggugagugaugu

SEQ ID NO: 374274 - RNA, 22 nt, Human
gugucccaggccucuggaauua

SEQ ID NO: 374275 - RNA, 22 nt, Human
cuguugucuccucucagauuau

SEQ ID NO: 374276 - RNA, 22 nt, Human
cagaaguaagauuacugugagu

SEQ ID NO: 374277 - RNA, 22 nt, Human
uauauagaaaagcagauguugg

SEQ ID NO: 374278 - RNA, 22 nt, Human
auccaaagauggaaagaacuuu

SEQ ID NO: 374279 - RNA, 22 nt, Human
aucaaaguuucccagaaguugu

SEQ ID NO: 374280 - RNA, 22 nt, Human
agucagugaaggcauugcucaa

SEQ ID NO: 374281 - RNA, 21 nt, Human
aaugcauuaacauaaagcuga

SEQ ID NO: 374282 - RNA, 22 nt, Human
gccucugcgccucagccgaccu

SEQ ID NO: 374283 - RNA, 22 nt, Human
ccugagagcauuccacacugaa

SEQ ID NO: 374284 - RNA, 22 nt, Human
auuagggaaggauuuggccuga

SEQ ID NO: 374285 - RNA, 22 nt, Human
acucaggaaaugagaggcucuc

SEQ ID NO: 374286 - RNA, 22 nt, Human
augcauaauguauguauugacu

SEQ ID NO: 374287 - RNA, 22 nt, Human
ucccaggacccaggcauucaca

SEQ ID NO: 374288 - RNA, 22 nt, Human
ggcuucccagcagagggcgcac

SEQ ID NO: 374289 - RNA, 21 nt, Human
agcucagccgggcacaguggc

SEQ ID NO: 374290 - RNA, 22 nt, Human
auucuccacacauccagaccuu

SEQ ID NO: 374291 - RNA, 22 nt, Human
cccaggagacagaaacagaggu

SEQ ID NO: 374292 - RNA, 23 nt, Human
agcagccagagauccucggcccu

SEQ ID NO: 374293 - RNA, 22 nt, Human
augcuguguauuuuacucuuuc

SEQ ID NO: 374294 - RNA, 22 nt, Human
aggcgcagacauacagggucug

SEQ ID NO: 374295 - RNA, 22 nt, Human
uuaaaugaggcugauguagauu

SEQ ID NO: 374296 - RNA, 22 nt, Human
cccagagcuccgguccugccca

SEQ ID NO: 374297 - RNA, 22 nt, Human
ucccaguguggcaggccaugga

SEQ ID NO: 374298 - RNA, 22 nt, Human
ucaguuuccucaucuacaaaag

SEQ ID NO: 374299 - RNA, 22 nt, Human
cacaggagguuaggaagugguc

SEQ ID NO: 374300 - RNA, 22 nt, Human
cuggccuagcucucugcuugaa

SEQ ID NO: 374301 - RNA, 22 nt, Human
uccagggaugguaaugagcagu

SEQ ID NO: 374302 - RNA, 22 nt, Human
cagcagugaugugugaggguuc

SEQ ID NO: 374303 - RNA, 22 nt, Human
ccucugagaccagcucugcacc

SEQ ID NO: 374304 - RNA, 22 nt, Human
agaaggcacucacacuggcacg

SEQ ID NO: 374305 - RNA, 22 nt, Human
cucuggaauuaaggaagccugu

SEQ ID NO: 374306 - RNA, 22 nt, Human
guuauguaugggggccuuauga

SEQ ID NO: 374307 - RNA, 22 nt, Human
caguauuuauggcuugaguauu

SEQ ID NO: 374308 - RNA, 22 nt, Human
acagugcuaaacacuucuugaa

SEQ ID NO: 374309 - RNA, 20 nt, Human
acuggagccaucucagccua

SEQ ID NO: 374310 - RNA, 22 nt, Human
aacaugaaaagcccagagaggu

SEQ ID NO: 374311 - RNA, 22 nt, Human
auuucacucuuaauugcuuccu

SEQ ID NO: 374312 - RNA, 22 nt, Human
uucucuuaucuggcauuauugg

SEQ ID NO: 374313 - RNA, 22 nt, Human
gcauguguuauuuuauguauga

SEQ ID NO: 374314 - RNA, 22 nt, Human
guuguauagagggcaugaaucu

SEQ ID NO: 374315 - RNA, 22 nt, Human
auguaauaggguaacauaacau

SEQ ID NO: 374316 - RNA, 22 nt, Human
gcuguucacauuuugggccaaa

SEQ ID NO: 374317 - RNA, 22 nt, Human
agcagggcucuguggagggugg

SEQ ID NO: 374318 - RNA, 23 nt, Human
ccuucagaagaaguaacaggggc

SEQ ID NO: 374319 - RNA, 22 nt, Human
uagaaacauguucuguucuguu

SEQ ID NO: 374320 - RNA, 22 nt, Human
ugcagcauucuuggccacuacu

SEQ ID NO: 374321 - RNA, 22 nt, Human
uugucccaggacuugcauagau

SEQ ID NO: 374322 - RNA, 23 nt, Human
ucagaggaucaucaaacguuuuc

SEQ ID NO: 374323 - RNA, 22 nt, Human
gccuggcuccuaagagcacaac

SEQ ID NO: 374324 - RNA, 22 nt, Human
aggccugaaguguggagugggg

SEQ ID NO: 374325 - RNA, 22 nt, Human
aucaggaucugggagccugaaa

SEQ ID NO: 374326 - RNA, 22 nt, Human
uccaugagaacccuuggagaua

SEQ ID NO: 374327 - RNA, 21 nt, Human
uguccuuaaugcaauguccuu

SEQ ID NO: 374328 - RNA, 22 nt, Human
cuggaaggcucugcugccuguc

SEQ ID NO: 374329 - RNA, 21 nt, Human
ccagcugucuguccuuaggca

SEQ ID NO: 374330 - RNA, 22 nt, Human
uugaggagucaggggcacggaa

SEQ ID NO: 374331 - RNA, 17 nt, Human
agcugaccagauggacu

SEQ ID NO: 374332 - RNA, 22 nt, Human
guacauaaaggaggcucuuugc

SEQ ID NO: 374333 - RNA, 22 nt, Human
ucucucuucaacccuuaacuag

SEQ ID NO: 374334 - RNA, 22 nt, Human
uuaauucagucaaagaaaccau

SEQ ID NO: 374335 - RNA, 22 nt, Human
acagccugagaguggagcuggc

SEQ ID NO: 374336 - RNA, 22 nt, Human
ccagggaguuuccaaucugaga

SEQ ID NO: 374337 - RNA, 22 nt, Human
cagcucugggugacaggagggc

SEQ ID NO: 374338 - RNA, 22 nt, Human
ucacacguccuugcuacuccuc

SEQ ID NO: 374339 - RNA, 22 nt, Human
ucucuuucuauaugugagucuu

SEQ ID NO: 374340 - RNA, 22 nt, Human
ucccagagguugagucacuuau

SEQ ID NO: 374341 - RNA, 22 nt, Human
ugccugucuuggaguccuggcc

SEQ ID NO: 374342 - RNA, 22 nt, Human
cagcucccuauggugaggcgac

SEQ ID NO: 374343 - RNA, 23 nt, Human
ccugggcauuggcugcagcuucu

SEQ ID NO: 374344 - RNA, 22 nt, Human
cuguuucaagugaagucagaca

SEQ ID NO: 374345 - RNA, 22 nt, Human
aaguggugguaugaaccgaggg

SEQ ID NO: 374346 - RNA, 22 nt, Human
cccagggaagccauuucugacu

SEQ ID NO: 374347 - RNA, 22 nt, Human
ucuggaucgccggcgccugggc

SEQ ID NO: 374348 - RNA, 22 nt, Human
aggcuccaugcaaaggcuguuu

SEQ ID NO: 374349 - RNA, 22 nt, Human
cugagauggccacugggucuca

SEQ ID NO: 374350 - RNA, 22 nt, Human
aagauuucuuacuuauugaugc

SEQ ID NO: 374351 - RNA, 17 nt, Human
gccuuccuuccuccaca

SEQ ID NO: 374352 - RNA, 22 nt, Human
gugaauaauuuuuuaguauaag

SEQ ID NO: 374353 - RNA, 20 nt, Human
agugcaagaaagcacagcug

SEQ ID NO: 374354 - RNA, 22 nt, Human
cucuggagguugagcccagcaa

SEQ ID NO: 374355 - RNA, 22 nt, Human
gggcugugggacccggcacuuu

SEQ ID NO: 374356 - RNA, 22 nt, Human
cagcagagcugugugggaaggg

SEQ ID NO: 374357 - RNA, 22 nt, Human
cauuugcauaugaagaaguaag

SEQ ID NO: 374358 - RNA, 22 nt, Human
gcugucuggguugagggcccug

SEQ ID NO: 374359 - RNA, 22 nt, Human
uaugcacgucuauuuaugaaga

SEQ ID NO: 374360 - RNA, 22 nt, Human
aagugguaggaagagagcacug

SEQ ID NO: 374361 - RNA, 22 nt, Human
guguccaucagcagccacugug

SEQ ID NO: 374362 - RNA, 22 nt, Human
uccuugaagagugggcggucga

SEQ ID NO: 374363 - RNA, 22 nt, Human
uccaggcaggguuaaggguccu

SEQ ID NO: 374364 - RNA, 22 nt, Human
cagagcugggaucccaugggcg

SEQ ID NO: 374365 - RNA, 22 nt, Human
gugccuggagcuaauguguaua

SEQ ID NO: 374366 - RNA, 22 nt, Human
cucagaguccauaguuuacagu

SEQ ID NO: 374367 - RNA, 22 nt, Human
aagagcuggcucuugcagcagc

SEQ ID NO: 374368 - RNA, 22 nt, Human
uaaggccauuauggugggcccg

SEQ ID NO: 374369 - RNA, 22 nt, Human
cugcugugauugggagaaaccg

SEQ ID NO: 374370 - RNA, 22 nt, Human
gcuggaucaaguccuucaccca

SEQ ID NO: 374371 - RNA, 22 nt, Human
gcaggaaagguugagacuuugc

SEQ ID NO: 374372 - RNA, 22 nt, Human
ccagcuggugacauccccaacc

SEQ ID NO: 374373 - RNA, 22 nt, Human
gcagcugcaauaggcaucaagc

SEQ ID NO: 374374 - RNA, 22 nt, Human
cccugcagugugaccucaccua

SEQ ID NO: 374375 - RNA, 22 nt, Human
aguuccagcugugaccagaaaa

SEQ ID NO: 374376 - RNA, 22 nt, Human
aguguccccuacagaggcauuc

SEQ ID NO: 374377 - RNA, 22 nt, Human
uaauuauuaugacaacaauugc

SEQ ID NO: 374378 - RNA, 22 nt, Human
uuugcaaauaccaugaaacuug

SEQ ID NO: 374379 - RNA, 22 nt, Human
ugagcuuacgugggaacagacu

SEQ ID NO: 374380 - RNA, 22 nt, Human
uuagacaagggcuccuuaaaag

SEQ ID NO: 374381 - RNA, 22 nt, Human
ugaauaaucauguccauagugu

SEQ ID NO: 374382 - RNA, 22 nt, Human
uucaggaucacuaaacccucca

SEQ ID NO: 374383 - RNA, 22 nt, Human
ggaggaagcacacggcuuguau

SEQ ID NO: 374384 - RNA, 22 nt, Human
aaugcacaugccacauguggua

SEQ ID NO: 374385 - RNA, 22 nt, Human
gccaggaggucagccccucaac

SEQ ID NO: 374386 - RNA, 22 nt, Human
ugaagacagaccaaggagaaug

SEQ ID NO: 374387 - RNA, 22 nt, Human
gcucccacaaccuucuugcucc

SEQ ID NO: 374388 - RNA, 22 nt, Human
ugaagaauaagauagauggagc

SEQ ID NO: 374389 - RNA, 22 nt, Human
aggcccuguuaugagccacugu

SEQ ID NO: 374390 - RNA, 22 nt, Human
ggggauggaggcgugugguccu

SEQ ID NO: 374391 - RNA, 22 nt, Human
ggguggggcccaggaaaucuau

SEQ ID NO: 374392 - RNA, 22 nt, Human
gugcucaggaagcuguuccugc

SEQ ID NO: 374393 - RNA, 22 nt, Human
aagggcaggaaaagauggaugu

SEQ ID NO: 374394 - RNA, 22 nt, Human
gccuggguccacugaucaugcu

SEQ ID NO: 374395 - RNA, 22 nt, Human
auucuucauguugaagcuguca

SEQ ID NO: 374396 - RNA, 22 nt, Human
ugggcuggagcuuguugcuucc

SEQ ID NO: 374397 - RNA, 22 nt, Human
guuccaaagcaaaggaggugag

SEQ ID NO: 374398 - RNA, 22 nt, Human
gcaggaugaaggcagaggcuga

SEQ ID NO: 374399 - RNA, 22 nt, Human
ugaaauagaaaaacaggcuucu

SEQ ID NO: 374400 - RNA, 22 nt, Human
ugcuagaauaccuaccuggagg

SEQ ID NO: 374401 - RNA, 19 nt, Human
aaggcagcaguagcaucca

SEQ ID NO: 374402 - RNA, 22 nt, Human
ugcauauuuguaugauguuuag

SEQ ID NO: 374403 - RNA, 22 nt, Human
guuauaaaggugauaaugguca

SEQ ID NO: 374404 - RNA, 22 nt, Human
ucagccagugccuugaucuugc

SEQ ID NO: 374405 - RNA, 22 nt, Human
ccacugcccaccccgacgucua

SEQ ID NO: 374406 - RNA, 19 nt, Human
ccagagcccgccagauggg

SEQ ID NO: 374407 - RNA, 22 nt, Human
gggcugcugcccaggaggcacc

SEQ ID NO: 374408 - RNA, 17 nt, Human
agcagaagucagaggga

SEQ ID NO: 374409 - RNA, 20 nt, Human
agcuggagaagggcccuucc

SEQ ID NO: 374410 - RNA, 22 nt, Human
ggugacuggagggacccaggcc

SEQ ID NO: 374411 - RNA, 22 nt, Human
gccugccuagaauugcagcuuu

SEQ ID NO: 374412 - RNA, 22 nt, Human
uccugggagagugggacuguau

SEQ ID NO: 374413 - RNA, 22 nt, Human
gcugucuugcucacucuugcag

SEQ ID NO: 374414 - RNA, 22 nt, Human
uuuguacauccuaauucugagu

SEQ ID NO: 374415 - RNA, 22 nt, Human
cucucccagucaggcucaggau

SEQ ID NO: 374416 - RNA, 22 nt, Human
aaguccuuucucauggaggaau

SEQ ID NO: 374417 - RNA, 22 nt, Human
guccuggggauacagaagugaa

SEQ ID NO: 374418 - RNA, 22 nt, Human
gagcagcucgagaaggaagcag

SEQ ID NO: 374419 - RNA, 22 nt, Human
aggcagcccugugcuggaugcu

SEQ ID NO: 374420 - RNA, 22 nt, Human
cuauacaguaaccacagugauu

SEQ ID NO: 374421 - RNA, 22 nt, Human
cggcagagugugugcgugcaug

SEQ ID NO: 374422 - RNA, 22 nt, Human
aaguuuaagguggaaguggugg

SEQ ID NO: 374423 - RNA, 22 nt, Human
cuucauuaaccaaaaugcaaua

SEQ ID NO: 374424 - RNA, 22 nt, Human
aaaucugggucaagguggagug

SEQ ID NO: 374425 - RNA, 22 nt, Human
gccuggcaggccucaugagggg

SEQ ID NO: 374426 - RNA, 22 nt, Human
ucagaacagaagcuggcuauaa

SEQ ID NO: 374427 - RNA, 22 nt, Human
uggaggcaccacuggcugcccg

SEQ ID NO: 374428 - RNA, 21 nt, Human
ccagcuuucccaagucccuuu

SEQ ID NO: 374429 - RNA, 22 nt, Human
gcauucaucuuccuccaugcag

SEQ ID NO: 374430 - RNA, 22 nt, Human
gaauacauuggaaaucagaaua

SEQ ID NO: 374431 - RNA, 22 nt, Human
uugcccagaguccacagcguac

SEQ ID NO: 374432 - RNA, 20 nt, Human
ugggagcuggugaggucuca

SEQ ID NO: 374433 - RNA, 22 nt, Human
ucucuucuagcuucuugugguu

SEQ ID NO: 374434 - RNA, 22 nt, Human
uggcucaguaaucgagucuccu

SEQ ID NO: 374435 - RNA, 22 nt, Human
ugucaccaaguugaugaaugca

SEQ ID NO: 374436 - RNA, 22 nt, Human
ugcugccagccaggccauggag

SEQ ID NO: 374437 - RNA, 22 nt, Human
gaaaggaaauauucuaagcacu

SEQ ID NO: 374438 - RNA, 22 nt, Human
uccaggagguugagacugcagu

SEQ ID NO: 374439 - RNA, 22 nt, Human
ucccaaggauaagagagucuga

SEQ ID NO: 374440 - RNA, 22 nt, Human
aucagaaaguucaucauguuug

SEQ ID NO: 374441 - RNA, 22 nt, Human
agaugcuucaguguuuaauuua

SEQ ID NO: 374442 - RNA, 22 nt, Human
ucccagccacagguguagcccu

SEQ ID NO: 374443 - RNA, 22 nt, Human
gaggcagugaacaauuccugug

SEQ ID NO: 374444 - RNA, 21 nt, Human
ggcagugaugugaagugcauc

SEQ ID NO: 374445 - RNA, 22 nt, Human
ggaggggagucucccaaagccg

SEQ ID NO: 374446 - RNA, 22 nt, Human
uggaagaaggcagagaggcauu

SEQ ID NO: 374447 - RNA, 22 nt, Human
gaugggcguggcgcguuuggug

SEQ ID NO: 374448 - RNA, 22 nt, Human
cugcugugugcuuacuuggguu

SEQ ID NO: 374449 - RNA, 22 nt, Human
gcuggcagaauuucuucuugcu

SEQ ID NO: 374450 - RNA, 22 nt, Human
cugagaaggaagccuccacucu

SEQ ID NO: 374451 - RNA, 22 nt, Human
ccagucagccaagcugcagcgg

SEQ ID NO: 374452 - RNA, 22 nt, Human
uggcugaguuucaugcaucaug

SEQ ID NO: 374453 - RNA, 19 nt, Human
uacauuuguguacacuugu

SEQ ID NO: 374454 - RNA, 22 nt, Human
ucagaggagggacucagaccca

SEQ ID NO: 374455 - RNA, 22 nt, Human
uccuggagcuuccuucauggua

SEQ ID NO: 374456 - RNA, 22 nt, Human
ugcagagacuugugugcauuug

SEQ ID NO: 374457 - RNA, 22 nt, Human
aaggcacugacugugcagggga

SEQ ID NO: 374458 - RNA, 22 nt, Human
gggcagugguuacacagcugag

SEQ ID NO: 374459 - RNA, 22 nt, Human
agauggagaccuuggaugaacu

SEQ ID NO: 374460 - RNA, 22 nt, Human
uacaugaaguugucuaaacugg

SEQ ID NO: 374461 - RNA, 22 nt, Human
auucuccagcucacuguccaua

SEQ ID NO: 374462 - RNA, 22 nt, Human
ucagggcagguuaacuugggug

SEQ ID NO: 374463 - RNA, 22 nt, Human
aaaucaaaagacauguguuuua

SEQ ID NO: 374464 - RNA, 22 nt, Human
cagggcaggacagauacauuac

SEQ ID NO: 374465 - RNA, 22 nt, Human
cuucagggugacgcaggcugca

SEQ ID NO: 374466 - RNA, 17 nt, Human
cugaggcccagggccca

SEQ ID NO: 374467 - RNA, 22 nt, Human
uucuuuccccauggaguucgga

SEQ ID NO: 374468 - RNA, 22 nt, Human
cucucugaggaaggagcaucug

SEQ ID NO: 374469 - RNA, 22 nt, Human
auuguacaugcagugagucauc

SEQ ID NO: 374470 - RNA, 22 nt, Human
aaaaguaauugaugcaaucgua

SEQ ID NO: 374471 - RNA, 22 nt, Human
agggccagcccauaaugccaaa

SEQ ID NO: 374472 - RNA, 22 nt, Human
cccaaggccuucaagccagcuc

SEQ ID NO: 374473 - RNA, 22 nt, Human
uggcagcugauuagauggugcc

SEQ ID NO: 374474 - RNA, 22 nt, Human
agaaaucaugacuaagagcagu

SEQ ID NO: 374475 - RNA, 22 nt, Human
agcccucugcaaacaccugaua

SEQ ID NO: 374476 - RNA, 22 nt, Human
gaaaauguuagcuucauaguca

SEQ ID NO: 374477 - RNA, 22 nt, Human
uccuucaggccucauucucaua

SEQ ID NO: 374478 - RNA, 22 nt, Human
caccuggcuggaagugcuccgg

SEQ ID NO: 374479 - RNA, 22 nt, Human
uggggcaguuaauaaacauucu

SEQ ID NO: 374480 - RNA, 22 nt, Human
aaaggccaauaaagacaagcug

SEQ ID NO: 374481 - RNA, 22 nt, Human
ccagcagagucuaggaaggagg

SEQ ID NO: 374482 - RNA, 18 nt, Human
ggagagugacagagucgu

SEQ ID NO: 374483 - RNA, 22 nt, Human
gcaaauucuuaacuggacugug

SEQ ID NO: 374484 - RNA, 22 nt, Human
cuugcacacauguacaugugua

SEQ ID NO: 374485 - RNA, 22 nt, Human
uuucacauuagauaugucauuu

SEQ ID NO: 374486 - RNA, 22 nt, Human
gcugcagcagaaguucucagag

SEQ ID NO: 374487 - RNA, 19 nt, Human
ugccagcauuaggcugaag

SEQ ID NO: 374488 - RNA, 17 nt, Human
gcacugaacaauccugu

SEQ ID NO: 374489 - RNA, 22 nt, Human
ucccagagucuucuccuguaau

SEQ ID NO: 374490 - RNA, 22 nt, Human
aaauugugcucacacugauauu

SEQ ID NO: 374491 - RNA, 22 nt, Human
uggcuucaucugcagcacugcc

SEQ ID NO: 374492 - RNA, 22 nt, Human
uaaucacaucaggguaaauggg

SEQ ID NO: 374493 - RNA, 22 nt, Human
ucaugacaucuguuuaucucaa

SEQ ID NO: 374494 - RNA, 22 nt, Human
agcagcugcagagggcuccccc

SEQ ID NO: 374495 - RNA, 22 nt, Human
ucacugcucuccaauguggagu

SEQ ID NO: 374496 - RNA, 22 nt, Human
aguugaaauuagaguccuggcu

SEQ ID NO: 374497 - RNA, 22 nt, Human
gagcaccucaauuugcuauuug

SEQ ID NO: 374498 - RNA, 22 nt, Human
uccaaagggaagcgcuuucugu

SEQ ID NO: 374499 - RNA, 22 nt, Human
agggcugagcccaggcauguag

SEQ ID NO: 374500 - RNA, 22 nt, Human
ccaaacaaauccccauucuuag

SEQ ID NO: 374501 - RNA, 22 nt, Human
acagagcacugcccugugccgc

SEQ ID NO: 374502 - RNA, 22 nt, Human
aggcuuccuggaggaagaggua

SEQ ID NO: 374503 - RNA, 22 nt, Human
aguugacauccagagacauucu

SEQ ID NO: 374504 - RNA, 22 nt, Human
uuuaggcacagaguugagggac

SEQ ID NO: 374505 - RNA, 22 nt, Human
uugcauugaaugcacauuuuua

SEQ ID NO: 374506 - RNA, 22 nt, Human
guggcaggucccauuggagcag

SEQ ID NO: 374507 - RNA, 22 nt, Human
gaaugaauagguguccagaugg

SEQ ID NO: 374508 - RNA, 22 nt, Human
cuggguaaguuccuaaggcuca

SEQ ID NO: 374509 - RNA, 22 nt, Human
agcagggcuguguagguaauga

SEQ ID NO: 374510 - RNA, 22 nt, Human
uggcagcucuguucaacaugag

SEQ ID NO: 374511 - RNA, 22 nt, Human
uaaaucacuccuaauaaucagu

SEQ ID NO: 374512 - RNA, 22 nt, Human
agccagcuggugggucagcugg

SEQ ID NO: 374513 - RNA, 22 nt, Human
uccugguggcuuucccugccuu

SEQ ID NO: 374514 - RNA, 22 nt, Human
ggaggcagaacuucccgucagu

SEQ ID NO: 374515 - RNA, 22 nt, Human
ccccaggacacauggaccaagu

SEQ ID NO: 374516 - RNA, 22 nt, Human
gggagccacagugaggugcaug

SEQ ID NO: 374517 - RNA, 22 nt, Human
uuuccaauaaagugucauuguu

SEQ ID NO: 374518 - RNA, 22 nt, Human
aggcagcaugggcccagagucc

SEQ ID NO: 374519 - RNA, 22 nt, Human
ucagaguguuuuacuaaacaag

SEQ ID NO: 374520 - RNA, 22 nt, Human
aaugaugggaaggagaaaagca

SEQ ID NO: 374521 - RNA, 22 nt, Human
uccagaggcuccaaagggagau

SEQ ID NO: 374522 - RNA, 22 nt, Human
cuccagggaaaggggcguccgc

SEQ ID NO: 374523 - RNA, 19 nt, Human
uuccaaaaucaggauuuga

SEQ ID NO: 374524 - RNA, 22 nt, Human
ugcugugcuggcggcagaggcc

SEQ ID NO: 374525 - RNA, 22 nt, Human
guuccaaagucucugagcugag

SEQ ID NO: 374526 - RNA, 22 nt, Human
augcuguggggagugaggguag

SEQ ID NO: 374527 - RNA, 22 nt, Human
aagcugaggcccauggcaaggu

SEQ ID NO: 374528 - RNA, 22 nt, Human
gcccugucccuuggcuucuagg

SEQ ID NO: 374529 - RNA, 22 nt, Human
ugcuuaaaauaguucauuuuug

SEQ ID NO: 374530 - RNA, 22 nt, Human
gugaaggcuacaagagaucaag

SEQ ID NO: 374531 - RNA, 22 nt, Human
aagugaaacauguaucucuuua

SEQ ID NO: 374532 - RNA, 21 nt, Human
acagacagggccagugucccc

SEQ ID NO: 374533 - RNA, 22 nt, Human
agggcgacaauggagagcguuu

SEQ ID NO: 374534 - RNA, 22 nt, Human
augugaaauauuaagccgagga

SEQ ID NO: 374535 - RNA, 22 nt, Human
ucucagagauucagggagaagu

SEQ ID NO: 374536 - RNA, 22 nt, Human
ggucccugcugaagccuuggug

SEQ ID NO: 374537 - RNA, 22 nt, Human
agccaguguuaagugacugguu

SEQ ID NO: 374538 - RNA, 22 nt, Human
uuauagugggcccaacauggcg

SEQ ID NO: 374539 - RNA, 22 nt, Human
uacagcuaggcaaaaaugacau

SEQ ID NO: 374540 - RNA, 22 nt, Human
auaaaaacugacccauccuuug

SEQ ID NO: 374541 - RNA, 22 nt, Human
gugucaugggagucagaaguga

SEQ ID NO: 374542 - RNA, 19 nt, Human
ggagaggcuggagggaugc

SEQ ID NO: 374543 - RNA, 22 nt, Human
ggaugcaggggcagcagagccu

SEQ ID NO: 374544 - RNA, 22 nt, Human
ucuccucucuuaccugguacaa

SEQ ID NO: 374545 - RNA, 22 nt, Human
cagggagcuggcuggcugugcc

SEQ ID NO: 374546 - RNA, 22 nt, Human
acagguggagugguuagcaggc

SEQ ID NO: 374547 - RNA, 22 nt, Human
agcaauaugacauugcuacauc

SEQ ID NO: 374548 - RNA, 22 nt, Human
gugcaggggaucagguugcagc

SEQ ID NO: 374549 - RNA, 22 nt, Human
aggcaggcucaaugcccagucu

SEQ ID NO: 374550 - RNA, 22 nt, Human
aucacaaaggcugcuucaugau

SEQ ID NO: 374551 - RNA, 22 nt, Human
ggccuguccagccugccuggcu

SEQ ID NO: 374552 - RNA, 22 nt, Human
ggugcagaucuuucucuucagg

SEQ ID NO: 374553 - RNA, 22 nt, Human
cccuggaggcuggaggcaguag

SEQ ID NO: 374554 - RNA, 22 nt, Human
aagcuuuaugacuuggagacag

SEQ ID NO: 374555 - RNA, 22 nt, Human
uuauuuauggcccucaccugau

SEQ ID NO: 374556 - RNA, 22 nt, Human
cuggagaggcugggaacagguu

SEQ ID NO: 374557 - RNA, 22 nt, Human
ucuccucuauuucuguauguau

SEQ ID NO: 374558 - RNA, 22 nt, Human
guuugcauaucugugaaaugga

SEQ ID NO: 374559 - RNA, 22 nt, Human
ugcaggagcugugcggugaggg

SEQ ID NO: 374560 - RNA, 22 nt, Human
ccucugaguccucccugguugc

SEQ ID NO: 374561 - RNA, 22 nt, Human
ggugggcaacauuuggccugag

SEQ ID NO: 374562 - RNA, 22 nt, Human
cugagcugcucccgcugcagcg

SEQ ID NO: 374563 - RNA, 20 nt, Human
gacaucauguacacauugcc

SEQ ID NO: 374564 - RNA, 22 nt, Human
cugagcaggauauucacagcag

SEQ ID NO: 374565 - RNA, 22 nt, Human
gagcagcuagauaaagcccuuc

SEQ ID NO: 374566 - RNA, 22 nt, Human
gaggcagagguuguugcaguga

SEQ ID NO: 374567 - RNA, 22 nt, Human
ccagagagauugcuucuaaaga

SEQ ID NO: 374568 - RNA, 22 nt, Human
gugcuuccaucuagagggucac

SEQ ID NO: 374569 - RNA, 22 nt, Human
ccagcucuuuuggcugagugag

SEQ ID NO: 374570 - RNA, 22 nt, Human
cuuaaagaguauuuaauauaau

SEQ ID NO: 374571 - RNA, 22 nt, Human
caucaaauggcaagugaaagcu

SEQ ID NO: 374572 - RNA, 22 nt, Human
aguuugaauugaaaugcagaug

SEQ ID NO: 374573 - RNA, 22 nt, Human
uuauacauguguuuugagauga

SEQ ID NO: 374574 - RNA, 19 nt, Human
auggaaaaugccagacuga

SEQ ID NO: 374575 - RNA, 22 nt, Human
uggcugagagcaauugacucug

SEQ ID NO: 374576 - RNA, 22 nt, Human
aauauaaauuccugggcccagc

SEQ ID NO: 374577 - RNA, 17 nt, Human
uguagcuucuccuucuc

SEQ ID NO: 374578 - RNA, 22 nt, Human
ugucucagauacgccaucaagg

SEQ ID NO: 374579 - RNA, 18 nt, Human
ugucauugccagggaagc

SEQ ID NO: 374580 - RNA, 23 nt, Human
ugugaagguggguccaagggcug

SEQ ID NO: 374581 - RNA, 22 nt, Human
ugucauugaggaaaacuaggug

SEQ ID NO: 374582 - RNA, 22 nt, Human
guucuucaucuuaaccaucugu

SEQ ID NO: 374583 - RNA, 22 nt, Human
uaacacugauuuguucucaggg

SEQ ID NO: 374584 - RNA, 23 nt, Human
aagaauaaaugacauuaaaggug

SEQ ID NO: 374585 - RNA, 22 nt, Human
cagcuuuauuaaugauugucuu

SEQ ID NO: 374586 - RNA, 22 nt, Human
aggacagcaguuggugagguuc

SEQ ID NO: 374587 - RNA, 22 nt, Human
cagagccccccuucugaucaca

SEQ ID NO: 374588 - RNA, 22 nt, Human
gcuggccucgcaggcaggaugu

SEQ ID NO: 374589 - RNA, 22 nt, Human
ugccuacauuccuugcuuaugg

SEQ ID NO: 374590 - RNA, 21 nt, Human
cccaggaggagcuccggcucc

SEQ ID NO: 374591 - RNA, 22 nt, Human
acguuuucagugacugugcuuc

SEQ ID NO: 374592 - RNA, 22 nt, Human
acagcagagugugagauagcca

SEQ ID NO: 374593 - RNA, 22 nt, Human
agagaggcgaguuaccugugcu

SEQ ID NO: 374594 - RNA, 22 nt, Human
ucccugggcuucuccagacuug

SEQ ID NO: 374595 - RNA, 22 nt, Human
gaggggcugggcagucccugga

SEQ ID NO: 374596 - RNA, 22 nt, Human
ccuccugggacaggcuggcaca

SEQ ID NO: 374597 - RNA, 18 nt, Human
aggagccuuugcacugga

SEQ ID NO: 374598 - RNA, 22 nt, Human
gggagccaugcuggucuucuuu

SEQ ID NO: 374599 - RNA, 22 nt, Human
agucauuuugccagucuucagg

SEQ ID NO: 374600 - RNA, 22 nt, Human
ggcaccagccaccuauuucuag

SEQ ID NO: 374601 - RNA, 22 nt, Human
uguucccauuuucugcauaauc

SEQ ID NO: 374602 - RNA, 22 nt, Human
cguguggucccggcaaggcaag

SEQ ID NO: 374603 - RNA, 23 nt, Human
gcagaggagcaagcuggacacca

SEQ ID NO: 374604 - RNA, 21 nt, Human
acaugucucuaaucucaguga

SEQ ID NO: 374605 - RNA, 22 nt, Human
aagaugcacaauguggcaauua

SEQ ID NO: 374606 - RNA, 22 nt, Human
aaaagguuuugaguacaaauau

SEQ ID NO: 374607 - RNA, 22 nt, Human
agcauuuaugacuaauguaaaa

SEQ ID NO: 374608 - RNA, 20 nt, Human
cagaggcaaggagacuugga

SEQ ID NO: 374609 - RNA, 22 nt, Human
auaugcuugggacugauacagu

SEQ ID NO: 374610 - RNA, 22 nt, Human
gcagcauuaccaagacauggca

SEQ ID NO: 374611 - RNA, 22 nt, Human
gcucccaggcauggagguaauu

SEQ ID NO: 374612 - RNA, 22 nt, Human
ccugucugcaugagugagcaua

SEQ ID NO: 374613 - RNA, 22 nt, Human
aucugguuuggggauccuugug

SEQ ID NO: 374614 - RNA, 22 nt, Human
acaggacaggcugggcuagacu

SEQ ID NO: 374615 - RNA, 22 nt, Human
gggcuguaggagcuggaauggg

SEQ ID NO: 374616 - RNA, 22 nt, Human
gggccugugcacaguucuguua

SEQ ID NO: 374617 - RNA, 22 nt, Human
caguacuugggaaugcugggga

SEQ ID NO: 374618 - RNA, 22 nt, Human
cuccaggaaagccugaggcccg

SEQ ID NO: 374619 - RNA, 22 nt, Human
acugugugggccgcucacuggg

SEQ ID NO: 374620 - RNA, 22 nt, Human
aaucaguuguucacucugaaaa

SEQ ID NO: 374621 - RNA, 22 nt, Human
uggcaugauaggaggugcagaa

SEQ ID NO: 374622 - RNA, 20 nt, Human
acagccagaggaggcagaca

SEQ ID NO: 374623 - RNA, 22 nt, Human
aaaugcauuuuuaauuagaccc

SEQ ID NO: 374624 - RNA, 22 nt, Human
augcagcaguuuacaaagcaau

SEQ ID NO: 374625 - RNA, 20 nt, Human
uccagcugggaacagcugau

SEQ ID NO: 374626 - RNA, 22 nt, Human
cugcugugcuuguggccacccg

SEQ ID NO: 374627 - RNA, 18 nt, Human
guaggucaguaccaagca

SEQ ID NO: 374628 - RNA, 22 nt, Human
ugaaaguugcacauaagagaau

SEQ ID NO: 374629 - RNA, 22 nt, Human
ggccagcucuuguccacggagg

SEQ ID NO: 374630 - RNA, 22 nt, Human
caggagggcccgagacucuucc

SEQ ID NO: 374631 - RNA, 22 nt, Human
cccccaggcucugacacaggag

SEQ ID NO: 374632 - RNA, 22 nt, Human
cucaggauguacuacagaaggc

SEQ ID NO: 374633 - RNA, 22 nt, Human
gcagcccagguguagcucuuug

SEQ ID NO: 374634 - RNA, 22 nt, Human
aaacuuuguagagaaugcuggc

SEQ ID NO: 374635 - RNA, 22 nt, Human
uuaauuaugcaaaaggccccau

SEQ ID NO: 374636 - RNA, 22 nt, Human
cugcucuguuucuuagcugggu

SEQ ID NO: 374637 - RNA, 22 nt, Human
uugcacauuuccuagaauuuca

SEQ ID NO: 374638 - RNA, 20 nt, Human
gauuucaaagcagaguggcc

SEQ ID NO: 374639 - RNA, 17 nt, Human
gcuuccugugcugggga

SEQ ID NO: 374640 - RNA, 22 nt, Human
uccagccuaauguucuucccac

SEQ ID NO: 374641 - RNA, 20 nt, Human
ucucagcauaagaacccuuc

SEQ ID NO: 374642 - RNA, 22 nt, Human
gcagggcagcucacugugguuc

SEQ ID NO: 374643 - RNA, 22 nt, Human
cugaacuuauugagugcuugcu

SEQ ID NO: 374644 - RNA, 22 nt, Human
aggcagaaaauagucauccaaa

SEQ ID NO: 374645 - RNA, 22 nt, Human
gccugggagggcagcagugugg

SEQ ID NO: 374646 - RNA, 22 nt, Human
gggacuucauagcuaggcacuu

SEQ ID NO: 374647 - RNA, 22 nt, Human
gacaucauagggugggaggaaa

SEQ ID NO: 374648 - RNA, 22 nt, Human
acagcugugagggucacuugua

SEQ ID NO: 374649 - RNA, 22 nt, Human
ucagaauugcagggagggcagg

SEQ ID NO: 374650 - RNA, 22 nt, Human
agaggauguucuaggcacucau

SEQ ID NO: 374651 - RNA, 22 nt, Human
accaaagggcagaacaugagca

SEQ ID NO: 374652 - RNA, 22 nt, Human
ugucauguguucuuaaauacau

SEQ ID NO: 374653 - RNA, 22 nt, Human
gggcagauggggcacaggcuga

SEQ ID NO: 374654 - RNA, 22 nt, Human
gaggcugcggggaggagccugc

SEQ ID NO: 374655 - RNA, 22 nt, Human
ucaggagcugcacugggcccac

SEQ ID NO: 374656 - RNA, 22 nt, Human
cacauuuagagguuagcauggu

SEQ ID NO: 374657 - RNA, 22 nt, Human
ugugggcacuaaugacaugcag

SEQ ID NO: 374658 - RNA, 22 nt, Human
uauuaaagggaaguuaugcaug

SEQ ID NO: 374659 - RNA, 22 nt, Human
uagaugcuacaauuuuguacuc

SEQ ID NO: 374660 - RNA, 21 nt, Human
aagaagcaauuuauuggaagg

SEQ ID NO: 374661 - RNA, 22 nt, Human
aggccaggcaacauucugaagu

SEQ ID NO: 374662 - RNA, 22 nt, Human
gcccucagcuccuggacacaug

SEQ ID NO: 374663 - RNA, 22 nt, Human
auucuucaucagagaugcacua

SEQ ID NO: 374664 - RNA, 22 nt, Human
cccaggagagggaaccaaaugu

SEQ ID NO: 374665 - RNA, 22 nt, Human
guuccaaaguuagaguguauug

SEQ ID NO: 374666 - RNA, 22 nt, Human
cagcccugccauggagccuccu

SEQ ID NO: 374667 - RNA, 22 nt, Human
ggcagaggaggggugaauuugc

SEQ ID NO: 374668 - RNA, 22 nt, Human
cugggaguguucuaggucacau

SEQ ID NO: 374669 - RNA, 22 nt, Human
cugccacuuacuaggcauggug

SEQ ID NO: 374670 - RNA, 18 nt, Human
agaggggagguaagucug

SEQ ID NO: 374671 - RNA, 22 nt, Human
agucucagccacacagaccuau

SEQ ID NO: 374672 - RNA, 22 nt, Human
aggcgcaggguuuggacccagg

SEQ ID NO: 374673 - RNA, 22 nt, Human
acagcuuuuaugggaccagcca

SEQ ID NO: 374674 - RNA, 22 nt, Human
caggagaggcuguacguuucuc

SEQ ID NO: 374675 - RNA, 22 nt, Human
auugaaagaguuuucugcugca

SEQ ID NO: 374676 - RNA, 22 nt, Human
uggcucaguuucugcccagcug

SEQ ID NO: 374677 - RNA, 22 nt, Human
aaaugccucugcuguacacaau

SEQ ID NO: 374678 - RNA, 22 nt, Human
uggcacugagcagccgcggcag

SEQ ID NO: 374679 - RNA, 22 nt, Human
augcaacaaaugcuacgaaucg

SEQ ID NO: 374680 - RNA, 22 nt, Human
cagcugccugucuggaggcaau

SEQ ID NO: 374681 - RNA, 22 nt, Human
ucagggacugcagagggaagcu

SEQ ID NO: 374682 - RNA, 16 nt, Human
uuuccaaagggcagcu

SEQ ID NO: 374683 - RNA, 22 nt, Human
uccucuggcucuuucccuagga

SEQ ID NO: 374684 - RNA, 22 nt, Human
caaaugcagauucaggaguucu

SEQ ID NO: 374685 - RNA, 22 nt, Human
acuuccuguguuggucuugcug

SEQ ID NO: 374686 - RNA, 18 nt, Human
aggcaggcuggagugacu

SEQ ID NO: 374687 - RNA, 22 nt, Human
uuggcaggaauauugcagaggu

SEQ ID NO: 374688 - RNA, 23 nt, Human
uugugggcagauuccauggggag

SEQ ID NO: 374689 - RNA, 22 nt, Human
agaagccaaaugccagugaccu

SEQ ID NO: 374690 - RNA, 19 nt, Human
ggcugccuggagcgagggc

SEQ ID NO: 374691 - RNA, 22 nt, Human
aggauuuaccgucauuuagucu

SEQ ID NO: 374692 - RNA, 19 nt, Human
ugaaauggcaguugcuaaa

SEQ ID NO: 374693 - RNA, 22 nt, Human
uuccaggaauucagcucucagu

SEQ ID NO: 374694 - RNA, 22 nt, Human
caguccuuucaauggugaccuu

SEQ ID NO: 374695 - RNA, 22 nt, Human
agaguuaagacguacaugagug

SEQ ID NO: 374696 - RNA, 22 nt, Human
agaucaaagccaugagagauuu

SEQ ID NO: 374697 - RNA, 22 nt, Human
gcagccagaagacucagaacaa

SEQ ID NO: 374698 - RNA, 22 nt, Human
ugggagaugguucugagacuuu

SEQ ID NO: 374699 - RNA, 22 nt, Human
gcccauggcagaacugugagca

SEQ ID NO: 374700 - RNA, 22 nt, Human
ucauuuaauagcuuuugucuuu

SEQ ID NO: 374701 - RNA, 22 nt, Human
guacucucuugaaggccuuucu

SEQ ID NO: 374702 - RNA, 22 nt, Human
ugcagaagaaugagcuuggagu

SEQ ID NO: 374703 - RNA, 22 nt, Human
uuauggcauauuccucauugua

SEQ ID NO: 374704 - RNA, 22 nt, Human
cagguggcaugacugccuacaa

SEQ ID NO: 374705 - RNA, 20 nt, Human
caucaucacaugagccaauu

SEQ ID NO: 374706 - RNA, 22 nt, Human
ugggcagacgcuguuggaaggc

SEQ ID NO: 374707 - RNA, 22 nt, Human
ugaagccacacuagcuuguccu

SEQ ID NO: 374708 - RNA, 22 nt, Human
gagcagggccacuucuguaccu

SEQ ID NO: 374709 - RNA, 22 nt, Human
augggagugacagggccacugg

SEQ ID NO: 374710 - RNA, 22 nt, Human
guucuucaaagugacaacuaaa

SEQ ID NO: 374711 - RNA, 22 nt, Human
ccugcagguaaggcuaacugcc

SEQ ID NO: 374712 - RNA, 22 nt, Human
caagaaggcuauaugggccagg

SEQ ID NO: 374713 - RNA, 22 nt, Human
ugagugccugaacauagaguag

SEQ ID NO: 374714 - RNA, 22 nt, Human
auggaaagccaguguuccauca

SEQ ID NO: 374715 - RNA, 20 nt, Human
agaaaucagaccacacacua

SEQ ID NO: 374716 - RNA, 22 nt, Human
uugaacauuggcaauuucauau

SEQ ID NO: 374717 - RNA, 22 nt, Human
uugccuugauucuucucaugug

SEQ ID NO: 374718 - RNA, 22 nt, Human
uucaacccaaguucuccauuuu

SEQ ID NO: 374719 - RNA, 22 nt, Human
agugucugccaacugcaugguc

SEQ ID NO: 374720 - RNA, 22 nt, Human
cuccagugagcgcggggcaugg

SEQ ID NO: 374721 - RNA, 22 nt, Human
cuauuagguuggugcaaaagua

SEQ ID NO: 374722 - RNA, 22 nt, Human
agugucugaaccaccggggcau

SEQ ID NO: 374723 - RNA, 22 nt, Human
ccuggggagaagagcuuccccc

SEQ ID NO: 374724 - RNA, 22 nt, Human
uuagaaaauuugcuucuuugga

SEQ ID NO: 374725 - RNA, 21 nt, Human
gugucaugguugacuuuggca

SEQ ID NO: 374726 - RNA, 22 nt, Human
ucuuugaauuucugacugucuu

SEQ ID NO: 374727 - RNA, 22 nt, Human
gucauucuuaacaacucaguag

SEQ ID NO: 374728 - RNA, 22 nt, Human
agagcugggugaagugccauca

SEQ ID NO: 374729 - RNA, 22 nt, Human
uucagaaagguaaauggauuuc

SEQ ID NO: 374730 - RNA, 22 nt, Human
uccuccucuaucagacagugcc

SEQ ID NO: 374731 - RNA, 22 nt, Human
ccaguugguuucaaugggacag

SEQ ID NO: 374732 - RNA, 20 nt, Human
uugauaggcagcuugucagg

SEQ ID NO: 374733 - RNA, 22 nt, Human
ucacaggcuugugaacauugca

SEQ ID NO: 374734 - RNA, 22 nt, Human
gagccugaauuugaccugcuua

SEQ ID NO: 374735 - RNA, 22 nt, Human
auauacugauagcugcacuucu

SEQ ID NO: 374736 - RNA, 22 nt, Human
cccacaggcuagggguagggca

SEQ ID NO: 374737 - RNA, 22 nt, Human
accuugaugccuuuccaagaug

SEQ ID NO: 374738 - RNA, 22 nt, Human
uggcagcuauuacaaggaaguc

SEQ ID NO: 374739 - RNA, 22 nt, Human
ugaguagcggcuauguguaacu

SEQ ID NO: 374740 - RNA, 22 nt, Human
cagacccucgggugaguuggcc

SEQ ID NO: 374741 - RNA, 22 nt, Human
auuugucugcuugcugccuucc

SEQ ID NO: 374742 - RNA, 22 nt, Human
aggcagugcugugcccugaacc

SEQ ID NO: 374743 - RNA, 22 nt, Human
gcccaggcuagcguagagugca

SEQ ID NO: 374744 - RNA, 22 nt, Human
ugugaaagagucuuauaguuuc

SEQ ID NO: 374745 - RNA, 22 nt, Human
ggaucugauuaauaagguggac

SEQ ID NO: 374746 - RNA, 20 nt, Human
cugccuggaggccucuaccu

SEQ ID NO: 374747 - RNA, 22 nt, Human
uguuuaaucuauaaaauggaga

SEQ ID NO: 374748 - RNA, 22 nt, Human
aggcgcagaaggccaggggccu

SEQ ID NO: 374749 - RNA, 22 nt, Human
uuuccaaagguggcaggaacaa

SEQ ID NO: 374750 - RNA, 22 nt, Human
uuacagaaucuacucgugguga

SEQ ID NO: 374751 - RNA, 16 nt, Human
cagaguguaaacagga

SEQ ID NO: 374752 - RNA, 22 nt, Human
uauuuucuggacagucuugcuu

SEQ ID NO: 374753 - RNA, 22 nt, Human
agggaguguaaauggugcucag

SEQ ID NO: 374754 - RNA, 22 nt, Human
gcagccacugggagugcuuaua

SEQ ID NO: 374755 - RNA, 22 nt, Human
uguucucacuggaugcuucaca

SEQ ID NO: 374756 - RNA, 22 nt, Human
aggccuggccuuuauguucaag

SEQ ID NO: 374757 - RNA, 20 nt, Human
gucagugucuucaguaguga

SEQ ID NO: 374758 - RNA, 18 nt, Human
cacaggcucccagugagg

SEQ ID NO: 374759 - RNA, 22 nt, Human
uuuuaauacugcuauuguagga

SEQ ID NO: 374760 - RNA, 22 nt, Human
uuggagcccugaggaucuggau

SEQ ID NO: 374761 - RNA, 22 nt, Human
ucuuuaauauaaaggaaugaau

SEQ ID NO: 374762 - RNA, 22 nt, Human
aaaggucagcugccaucguucu

SEQ ID NO: 374763 - RNA, 22 nt, Human
uacuaucucuucuaacuucaga

SEQ ID NO: 374764 - RNA, 22 nt, Human
agggauggaagcucgucugcaa

SEQ ID NO: 374765 - RNA, 22 nt, Human
agagcugcccacacagcagauu

SEQ ID NO: 374766 - RNA, 18 nt, Human
gagcugggagaaggaagg

SEQ ID NO: 374767 - RNA, 22 nt, Human
cacaguggauugggugaugccc

SEQ ID NO: 374768 - RNA, 22 nt, Human
ccagcuuucucagaggcuucua

SEQ ID NO: 374769 - RNA, 22 nt, Human
gcacccagcccagggcgugaug

SEQ ID NO: 374770 - RNA, 22 nt, Human
agaaaucacaggaggcagaagg

SEQ ID NO: 374771 - RNA, 22 nt, Human
acuggcugaaguuuacuuuuug

SEQ ID NO: 374772 - RNA, 22 nt, Human
agaggcugggaaggguccccgg

SEQ ID NO: 374773 - RNA, 22 nt, Human
ugccugucuucaggagugucac

SEQ ID NO: 374774 - RNA, 22 nt, Human
aggcagauuacuugaggccagg

SEQ ID NO: 374775 - RNA, 22 nt, Human
caugggcuacagaagcaugcug

SEQ ID NO: 374776 - RNA, 22 nt, Human
caggauggucucgaucuccuga

SEQ ID NO: 374777 - RNA, 20 nt, Human
cuguggcaucugucauggug

SEQ ID NO: 374778 - RNA, 22 nt, Human
ggcagcaggagccaucugguag

SEQ ID NO: 374779 - RNA, 22 nt, Human
uuucacaaugcaauccuacuuc

SEQ ID NO: 374780 - RNA, 22 nt, Human
ggaggugguggcagugacaauu

SEQ ID NO: 374781 - RNA, 21 nt, Human
uuuauguacuucauagaguag

SEQ ID NO: 374782 - RNA, 22 nt, Human
ucaugcuuauugcauauuugga

SEQ ID NO: 374783 - RNA, 22 nt, Human
aggcaggagugacccugacagg

SEQ ID NO: 374784 - RNA, 22 nt, Human
cuaaaugcccuacaaugacugg

SEQ ID NO: 374785 - RNA, 22 nt, Human
ggcucugcuggauugaggccag

SEQ ID NO: 374786 - RNA, 22 nt, Human
acagggcagaaauguugcaucu

SEQ ID NO: 374787 - RNA, 23 nt, Human
uacuuaggguuuagaucugacug

SEQ ID NO: 374788 - RNA, 22 nt, Human
uaauuuuaacugugcuguuugg

SEQ ID NO: 374789 - RNA, 22 nt, Human
agcagcuggggccugugacgau

SEQ ID NO: 374790 - RNA, 22 nt, Human
gaggccaaucaauagggcaaua

SEQ ID NO: 374791 - RNA, 22 nt, Human
aauuauauuguggugugaaugu

SEQ ID NO: 374792 - RNA, 22 nt, Human
gcugccuccugaaagcgcucug

SEQ ID NO: 374793 - RNA, 22 nt, Human
ugucccaggcugaaguacagug

SEQ ID NO: 374794 - RNA, 22 nt, Human
uagcccagagucccaauuccag

SEQ ID NO: 374795 - RNA, 22 nt, Human
uauguacauguuaaagggcaaa

SEQ ID NO: 374796 - RNA, 22 nt, Human
cugggccugggaggccaggucu

SEQ ID NO: 374797 - RNA, 22 nt, Human
caggaggaaaugugacccugcu

SEQ ID NO: 374798 - RNA, 22 nt, Human
aggcucagaggugagcaucugc

SEQ ID NO: 374799 - RNA, 22 nt, Human
gucacacuagggccaaguggag

SEQ ID NO: 374800 - RNA, 22 nt, Human
uuucuaggcacagugucuuccc

SEQ ID NO: 374801 - RNA, 22 nt, Human
ucaguggauuguagaaggcuua

SEQ ID NO: 374802 - RNA, 22 nt, Human
caggugccgggaaugcagcaau

SEQ ID NO: 374803 - RNA, 22 nt, Human
cauggcuuuuuagcauauucaa

SEQ ID NO: 374804 - RNA, 22 nt, Human
ucaggauguuaauauagcauua

SEQ ID NO: 374805 - RNA, 17 nt, Human
ugcauuguaggcuagcc

SEQ ID NO: 374806 - RNA, 22 nt, Human
aaagaucagucugaagcaacau

SEQ ID NO: 374807 - RNA, 22 nt, Human
aaaguccugacugcaggggaug

SEQ ID NO: 374808 - RNA, 22 nt, Human
caggauggagaguuguugguug

SEQ ID NO: 374809 - RNA, 22 nt, Human
ugagcccaggaguaugaggcug

SEQ ID NO: 374810 - RNA, 22 nt, Human
gaacagcuucuugggagcuggg

SEQ ID NO: 374811 - RNA, 22 nt, Human
agcagcaucuucuguucuccgc

SEQ ID NO: 374812 - RNA, 22 nt, Human
aggaccuguaccucagcaucua

SEQ ID NO: 374813 - RNA, 22 nt, Human
gccagagguaucaaagauagua

SEQ ID NO: 374814 - RNA, 22 nt, Human
uggagcauauucuggagcuugg

SEQ ID NO: 374815 - RNA, 22 nt, Human
agcugugggauuugggugugcc

SEQ ID NO: 374816 - RNA, 20 nt, Human
cacguuuuuccacuagcaaa

SEQ ID NO: 374817 - RNA, 22 nt, Human
uggcacuggcgcaggauggcgg

SEQ ID NO: 374818 - RNA, 19 nt, Human
ucugugcugggaggcagca

SEQ ID NO: 374819 - RNA, 22 nt, Human
gcuggaucccugugggaguggu

SEQ ID NO: 374820 - RNA, 22 nt, Human
agaccuggauuccaauccuacc

SEQ ID NO: 374821 - RNA, 22 nt, Human
agaaaugaagagagucaagguu

SEQ ID NO: 374822 - RNA, 22 nt, Human
gucacagaguuauuaauugugu

SEQ ID NO: 374823 - RNA, 22 nt, Human
aaaauuauagaucuagugccug

SEQ ID NO: 374824 - RNA, 18 nt, Human
cagggccccagaauuauc

SEQ ID NO: 374825 - RNA, 22 nt, Human
auucaacggguagaagggucuu

SEQ ID NO: 374826 - RNA, 22 nt, Human
agagccuggacuuuucugagcc

SEQ ID NO: 374827 - RNA, 22 nt, Human
uugacagcuauuuugcuuugau

SEQ ID NO: 374828 - RNA, 22 nt, Human
ggggaccuucccagagcaguug

SEQ ID NO: 374829 - RNA, 23 nt, Human
uggaaagcggaccuggggcagag

SEQ ID NO: 374830 - RNA, 22 nt, Human
auggcagccugagcagaggaau

SEQ ID NO: 374831 - RNA, 22 nt, Human
cauauucuuuaagcaaugcucu

SEQ ID NO: 374832 - RNA, 22 nt, Human
cuggcuuccucaggagcagugg

SEQ ID NO: 374833 - RNA, 22 nt, Human
caggacagaaauaaggaauaua

SEQ ID NO: 374834 - RNA, 22 nt, Human
agggcagaaaccaccuugaugg

SEQ ID NO: 374835 - RNA, 22 nt, Human
ccucugaggucauggacuuggc

SEQ ID NO: 374836 - RNA, 22 nt, Human
agaugaagacucaggagcaggu

SEQ ID NO: 374837 - RNA, 22 nt, Human
uagaaaggauauugagaugaau

SEQ ID NO: 374838 - RNA, 22 nt, Human
aucuggcuggauucuuagcguu

SEQ ID NO: 374839 - RNA, 22 nt, Human
cugcagagguugguucuaagau

SEQ ID NO: 374840 - RNA, 22 nt, Human
cagccugcauuuguaucuguau

SEQ ID NO: 374841 - RNA, 22 nt, Human
aguugcagacgcagagauguug

SEQ ID NO: 374842 - RNA, 22 nt, Human
guuagguagaaguuuacuuuga

SEQ ID NO: 374843 - RNA, 22 nt, Human
auaaggcagucccuuaacaagg

SEQ ID NO: 374844 - RNA, 22 nt, Human
aggauccuuuggccacuucuua

SEQ ID NO: 374845 - RNA, 22 nt, Human
cuccuugguguaguacugagca

SEQ ID NO: 374846 - RNA, 22 nt, Human
ggauccuuaacuaucacaguga

SEQ ID NO: 374847 - RNA, 18 nt, Human
gcaggcuuuuccuggguc

SEQ ID NO: 374848 - RNA, 22 nt, Human
uuucugaauaacucuaugauau

SEQ ID NO: 374849 - RNA, 20 nt, Human
ucauccaggacaggaguggc

SEQ ID NO: 374850 - RNA, 22 nt, Human
gaaucauuggaaccacauccaa

SEQ ID NO: 374851 - RNA, 21 nt, Human
gccacguuucagucuucucag

SEQ ID NO: 374852 - RNA, 18 nt, Human
gcaaggcucaggccaggc

SEQ ID NO: 374853 - RNA, 22 nt, Human
ucuggcucaggucagacaggga

SEQ ID NO: 374854 - RNA, 22 nt, Human
aggccagaugucgggcuagaag

SEQ ID NO: 374855 - RNA, 22 nt, Human
aggacuuagaacauuauguacu

SEQ ID NO: 374856 - RNA, 22 nt, Human
ccuggcagcgccgaagcuggcc

SEQ ID NO: 374857 - RNA, 22 nt, Human
aaugcuguaaagaugcuaucug

SEQ ID NO: 374858 - RNA, 22 nt, Human
augaggcagauguugcaugagg

SEQ ID NO: 374859 - RNA, 22 nt, Human
caaaaguucucacccagacaug

SEQ ID NO: 374860 - RNA, 22 nt, Human
guuauuaguaagacucgcacau

SEQ ID NO: 374861 - RNA, 22 nt, Human
uugcauugugauuacagaggug

SEQ ID NO: 374862 - RNA, 22 nt, Human
gucccugcccuccugggacuca

SEQ ID NO: 374863 - RNA, 22 nt, Human
gugugcaugcauagacaccaca

SEQ ID NO: 374864 - RNA, 22 nt, Human
cauagaaaguauuauggaauuu

SEQ ID NO: 374865 - RNA, 21 nt, Human
uggccaaaaccauauuauuaa

SEQ ID NO: 374866 - RNA, 22 nt, Human
cuguccagucuuuagcaagcug

SEQ ID NO: 374867 - RNA, 22 nt, Human
cagggcccagucccugcuguca

SEQ ID NO: 374868 - RNA, 22 nt, Human
uuaucauugucgcagucuaauu

SEQ ID NO: 374869 - RNA, 22 nt, Human
gcaccaggcagcugagcaggcc

SEQ ID NO: 374870 - RNA, 19 nt, Human
ccuuggaguuccaggugga

SEQ ID NO: 374871 - RNA, 22 nt, Human
aggaccugcuaaugugccaagu

SEQ ID NO: 374872 - RNA, 22 nt, Human
gaggagaagcuaagaaacacag

SEQ ID NO: 374873 - RNA, 22 nt, Human
acuccuggguugcaguccucaa

SEQ ID NO: 374874 - RNA, 22 nt, Human
cagagcauugagggucugccaa

SEQ ID NO: 374875 - RNA, 22 nt, Human
ugcuuuauuggaaccucauccu

SEQ ID NO: 374876 - RNA, 22 nt, Human
auuucugugcaguaaaugguga

SEQ ID NO: 374877 - RNA, 19 nt, Human
uuucaauggcuuagagaaa

SEQ ID NO: 374878 - RNA, 22 nt, Human
ugguuuuagaugccuuuacugc

SEQ ID NO: 374879 - RNA, 19 nt, Human
uucaggauugacccuacug

SEQ ID NO: 374880 - RNA, 22 nt, Human
ggucaggggcugcucuacagag

SEQ ID NO: 374881 - RNA, 22 nt, Human
ugggcagggaucucuuuugcaa

SEQ ID NO: 374882 - RNA, 22 nt, Human
agaggucauaucucagaagaga

SEQ ID NO: 374883 - RNA, 22 nt, Human
gggcagguggcaaagccagagg

SEQ ID NO: 374884 - RNA, 22 nt, Human
acaaagugaauugcaucgaguu

SEQ ID NO: 374885 - RNA, 22 nt, Human
agcugcccagcuaggaagaagg

SEQ ID NO: 374886 - RNA, 22 nt, Human
aaagccagugguaugagagaaa

SEQ ID NO: 374887 - RNA, 22 nt, Human
aucuauacccaucaugauuuaa

SEQ ID NO: 374888 - RNA, 22 nt, Human
uccuguggcguuaucaugugau

SEQ ID NO: 374889 - RNA, 22 nt, Human
uuucacauuuaggcgugaauug

SEQ ID NO: 374890 - RNA, 18 nt, Human
uauauuucacacauauuc

SEQ ID NO: 374891 - RNA, 20 nt, Human
ggccuuggccucuuugcagc

SEQ ID NO: 374892 - RNA, 22 nt, Human
ugaacccaggagguugcaguga

SEQ ID NO: 374893 - RNA, 22 nt, Human
cugcagcuccccugagaucaag

SEQ ID NO: 374894 - RNA, 22 nt, Human
ugugaaggagcaugcagagggg

SEQ ID NO: 374895 - RNA, 18 nt, Human
agcagagcccaugcauuc

SEQ ID NO: 374896 - RNA, 19 nt, Human
cuuuucaucaacagccaau

SEQ ID NO: 374897 - RNA, 22 nt, Human
cuggccagcauuuuugcuuuag

SEQ ID NO: 374898 - RNA, 22 nt, Human
cagugucuuauuuguagcucag

SEQ ID NO: 374899 - RNA, 22 nt, Human
cuuauuuuaagucaguuugggu

SEQ ID NO: 374900 - RNA, 22 nt, Human
uggucucugacucugaagaccc

SEQ ID NO: 374901 - RNA, 22 nt, Human
cacacagaugguaagggaggga

SEQ ID NO: 374902 - RNA, 22 nt, Human
aguauuuagcauagugguuagu

SEQ ID NO: 374903 - RNA, 22 nt, Human
uuccagggcuaauuccugugga

SEQ ID NO: 374904 - RNA, 22 nt, Human
cugaggugcuagggucccugcu

SEQ ID NO: 374905 - RNA, 23 nt, Human
uuucaaauuacucugcagaugac

SEQ ID NO: 374906 - RNA, 22 nt, Human
uccuggcccuguggccugcagu

SEQ ID NO: 374907 - RNA, 22 nt, Human
aaggaggagcggaggcuuguug

SEQ ID NO: 374908 - RNA, 22 nt, Human
uuguccuuaccucaaucuggaa

SEQ ID NO: 374909 - RNA, 22 nt, Human
caugcuuugggucagaaaugcc

SEQ ID NO: 374910 - RNA, 22 nt, Human
cacaugggugugccuggaggaa

SEQ ID NO: 374911 - RNA, 21 nt, Human
uaauaauuccacuacagagua

SEQ ID NO: 374912 - RNA, 22 nt, Human
cuuaaccagaaaaugcacuugu

SEQ ID NO: 374913 - RNA, 22 nt, Human
ugagccagccuugcagcugugc

SEQ ID NO: 374914 - RNA, 22 nt, Human
gaccauuuuuacagagcauuca

SEQ ID NO: 374915 - RNA, 22 nt, Human
aaggugucacugggacaggaaa

SEQ ID NO: 374916 - RNA, 22 nt, Human
uggcugaauaaaauaugguguu

SEQ ID NO: 374917 - RNA, 22 nt, Human
cuuccugcaggacagccaucug

SEQ ID NO: 374918 - RNA, 22 nt, Human
aauuuagaauucgcuagcuaau

SEQ ID NO: 374919 - RNA, 22 nt, Human
gggauggcucaaaggagucagg

SEQ ID NO: 374920 - RNA, 22 nt, Human
uccaggagguugagugaguucc

SEQ ID NO: 374921 - RNA, 22 nt, Human
uugaaaggugaacaugaugcac

SEQ ID NO: 374922 - RNA, 22 nt, Human
gaugaagccugacuucucggug

SEQ ID NO: 374923 - RNA, 22 nt, Human
gcaaguacaaacgcaucggcug

SEQ ID NO: 374924 - RNA, 22 nt, Human
uuuaucuguuguacauuuaugc

SEQ ID NO: 374925 - RNA, 22 nt, Human
ucaaaugcacguagagaaaaua

SEQ ID NO: 374926 - RNA, 22 nt, Human
gcaggcaggcuuccuugaacug

SEQ ID NO: 374927 - RNA, 22 nt, Human
caugguuuugagccuauuaugc

SEQ ID NO: 374928 - RNA, 21 nt, Human
ucucuggaguuagcagagaga

SEQ ID NO: 374929 - RNA, 22 nt, Human
caucacccggaacugugucugc

SEQ ID NO: 374930 - RNA, 22 nt, Human
ucuuaauucugugucuucacua

SEQ ID NO: 374931 - RNA, 22 nt, Human
cuuguacauagagaagaagccu

SEQ ID NO: 374932 - RNA, 22 nt, Human
uccuccaggucuaggguggcuu

SEQ ID NO: 374933 - RNA, 22 nt, Human
uccagccaacugccuagggagc

SEQ ID NO: 374934 - RNA, 22 nt, Human
agggugccuggaagccacucac

SEQ ID NO: 374935 - RNA, 22 nt, Human
cugccuggaaggagcaagggga

SEQ ID NO: 374936 - RNA, 22 nt, Human
uucuguguggguagcuccuguu

SEQ ID NO: 374937 - RNA, 22 nt, Human
agccugguuuaagcauuuuaua

SEQ ID NO: 374938 - RNA, 22 nt, Human
agccuguccagaggacagggcu

SEQ ID NO: 374939 - RNA, 22 nt, Human
uuauuuaaugugaucugaagag

SEQ ID NO: 374940 - RNA, 21 nt, Human
uuuaauuugcauguaugacgc

SEQ ID NO: 374941 - RNA, 22 nt, Human
ucuauacacacaaagaaugcuu

SEQ ID NO: 374942 - RNA, 19 nt, Human
ucucuacacuacauuucua

SEQ ID NO: 374943 - RNA, 22 nt, Human
aauuuacaggugcacucgccau

SEQ ID NO: 374944 - RNA, 20 nt, Human
ggaagccagggugcagggga

SEQ ID NO: 374945 - RNA, 22 nt, Human
agcagaacauuuucagggcugu

SEQ ID NO: 374946 - RNA, 22 nt, Human
ggguggcacaggugcagagggu

SEQ ID NO: 374947 - RNA, 22 nt, Human
uaccugagcccagugcagcaua

SEQ ID NO: 374948 - RNA, 18 nt, Human
agcagcugucagaaugcc

SEQ ID NO: 374949 - RNA, 22 nt, Human
ggucagggggaucugugaggua

SEQ ID NO: 374950 - RNA, 22 nt, Human
agccuggaguucccaggagaag

SEQ ID NO: 374951 - RNA, 22 nt, Human
guaagcaucugucucuucugca

SEQ ID NO: 374952 - RNA, 22 nt, Human
gugaggugguacaauauuaacu

SEQ ID NO: 374953 - RNA, 22 nt, Human
aggagcugaaacuucucauaug

SEQ ID NO: 374954 - RNA, 22 nt, Human
acccaggagccgugagagguua

SEQ ID NO: 374955 - RNA, 22 nt, Human
ggaaagaccugagauaggaaua

SEQ ID NO: 374956 - RNA, 22 nt, Human
ccuaagaauuaaugaauacacc

SEQ ID NO: 374957 - RNA, 22 nt, Human
caaagucccagcugcuuagaga

SEQ ID NO: 374958 - RNA, 22 nt, Human
uuccaggacuggguguuugaag

SEQ ID NO: 374959 - RNA, 22 nt, Human
uggaaggggagcuggaaagggg

SEQ ID NO: 374960 - RNA, 23 nt, Human
cuugcagggcuggaggcuuagaa

SEQ ID NO: 374961 - RNA, 22 nt, Human
acccaggaggcagagguugcag

SEQ ID NO: 374962 - RNA, 22 nt, Human
aaaaaucacuuuuauaggcagc

SEQ ID NO: 374963 - RNA, 22 nt, Human
uggcagcugcaggccuccugag

SEQ ID NO: 374964 - RNA, 23 nt, Human
uggcagugaucaaaagcuuacau

SEQ ID NO: 374965 - RNA, 22 nt, Human
cagcugccccgcuggcugacca

SEQ ID NO: 374966 - RNA, 22 nt, Human
gccugguggugugcucaagugg

SEQ ID NO: 374967 - RNA, 22 nt, Human
ucccaaggugcucggcaacagg

SEQ ID NO: 374968 - RNA, 22 nt, Human
uggcagagcccagacuccaguc

SEQ ID NO: 374969 - RNA, 22 nt, Human
ccagaauagaaggcagcuguca

SEQ ID NO: 374970 - RNA, 22 nt, Human
acaugucuuuuaaagucuaaua

SEQ ID NO: 374971 - RNA, 22 nt, Human
uuucacagcuggguggcagagu

SEQ ID NO: 374972 - RNA, 22 nt, Human
ugccaggcucaggaugucccug

SEQ ID NO: 374973 - RNA, 22 nt, Human
uuuaauuuucugggcccagcag

SEQ ID NO: 374974 - RNA, 22 nt, Human
uugcaucuagggcaacccagag

SEQ ID NO: 374975 - RNA, 22 nt, Human
ccagagcccagcacacggugcu

SEQ ID NO: 374976 - RNA, 22 nt, Human
uggcccugugugcaggcugcac

SEQ ID NO: 374977 - RNA, 22 nt, Human
uucacagggccacuggcaggag

SEQ ID NO: 374978 - RNA, 22 nt, Human
ccaaggcuucccagagaugcuc

SEQ ID NO: 374979 - RNA, 22 nt, Human
cuggauuuaauuaacuguugcu

SEQ ID NO: 374980 - RNA, 17 nt, Human
uucaaugauuaaugcau

SEQ ID NO: 374981 - RNA, 22 nt, Human
cuggagccuagguugaccuggg

SEQ ID NO: 374982 - RNA, 21 nt, Human
uccugccuuaguccagagcag

SEQ ID NO: 374983 - RNA, 22 nt, Human
ucucugaaggggagcuguuuaa

SEQ ID NO: 374984 - RNA, 22 nt, Human
ggcugagcaauuuugaugacau

SEQ ID NO: 374985 - RNA, 22 nt, Human
agggucagagaucggccaugug

SEQ ID NO: 374986 - RNA, 22 nt, Human
accagcuguguccuggcugcag

SEQ ID NO: 374987 - RNA, 22 nt, Human
ugaagaaucccagggaauuugg

SEQ ID NO: 374988 - RNA, 22 nt, Human
cugcccaggaaggagaggaugg

SEQ ID NO: 374989 - RNA, 22 nt, Human
gccucugcaacuccgccuuggu

SEQ ID NO: 374990 - RNA, 22 nt, Human
uccuuuuuaagucguuguggua

SEQ ID NO: 374991 - RNA, 22 nt, Human
uuuugugagcccauaaaugcca

SEQ ID NO: 374992 - RNA, 22 nt, Human
gagcucagcccaaagagcagug

SEQ ID NO: 374993 - RNA, 22 nt, Human
gagaggagguggcuaugacagc

SEQ ID NO: 374994 - RNA, 22 nt, Human
gccuaggagacaagcgugaaag

SEQ ID NO: 374995 - RNA, 22 nt, Human
gcucugagauugagccuuuggu

SEQ ID NO: 374996 - RNA, 22 nt, Human
accaggagucuagccuagucaa

SEQ ID NO: 374997 - RNA, 22 nt, Human
gcagggugccgacuucagggau

SEQ ID NO: 374998 - RNA, 19 nt, Human
gccaggagggcucuggcug

SEQ ID NO: 374999 - RNA, 20 nt, Human
aggagaaauucgggacaccu

SEQ ID NO: 375000 - RNA, 21 nt, Human
uuacagaauccaugggaaguc

SEQ ID NO: 375001 - RNA, 22 nt, Human
ucugcaggaaaaaagugccugg

SEQ ID NO: 375002 - RNA, 22 nt, Human
agcugccaccucugccuuuggg

SEQ ID NO: 375003 - RNA, 22 nt, Human
agcugccacaugcccaagggca

SEQ ID NO: 375004 - RNA, 22 nt, Human
uaccugcagcgggaauccauua

SEQ ID NO: 375005 - RNA, 22 nt, Human
agcuguggaguaggggguugga

SEQ ID NO: 375006 - RNA, 22 nt, Human
uuguucaugguuguaaguuuga

SEQ ID NO: 375007 - RNA, 21 nt, Human
uggcucuguucaauauaugga

SEQ ID NO: 375008 - RNA, 22 nt, Human
acaguaccugcucucaagcaaa

SEQ ID NO: 375009 - RNA, 22 nt, Human
gggugggacugaagucugaggg

SEQ ID NO: 375010 - RNA, 22 nt, Human
cagaaaucauugugaugacagg

SEQ ID NO: 375011 - RNA, 22 nt, Human
cuucuucaucuguaaaacuugg

SEQ ID NO: 375012 - RNA, 22 nt, Human
gaggcaggguguugauuacaga

SEQ ID NO: 375013 - RNA, 22 nt, Human
acugucuguccugcucuccgug

SEQ ID NO: 375014 - RNA, 22 nt, Human
caguggauuagccagagcugga

SEQ ID NO: 375015 - RNA, 22 nt, Human
cugggcucagcccaugcugucc

SEQ ID NO: 375016 - RNA, 22 nt, Human
aacauuggauauuuauuaaaag

SEQ ID NO: 375017 - RNA, 21 nt, Human
aguucauacugaguaacaaaa

SEQ ID NO: 375018 - RNA, 22 nt, Human
caauuucugggccucacacaag

SEQ ID NO: 375019 - RNA, 22 nt, Human
cagggacccgcacagguagcau

SEQ ID NO: 375020 - RNA, 22 nt, Human
aggcaguguauugcuagcggcu

SEQ ID NO: 375021 - RNA, 22 nt, Human
caaucaguuucuguuguauaau

SEQ ID NO: 375022 - RNA, 22 nt, Human
aguuuuuccguggcuacgauaa

SEQ ID NO: 375023 - RNA, 22 nt, Human
auuuauuaugggauuuggcaca

SEQ ID NO: 375024 - RNA, 22 nt, Human
agggaggauaguagucaguuua

SEQ ID NO: 375025 - RNA, 22 nt, Human
uuuaaauuauaguuaaugucug

SEQ ID NO: 375026 - RNA, 22 nt, Human
acagaacugggggcacagauag

SEQ ID NO: 375027 - RNA, 22 nt, Human
aguggggacuuaugccagcauu

SEQ ID NO: 375028 - RNA, 22 nt, Human
agggcagagcugucuaaauggc

SEQ ID NO: 375029 - RNA, 22 nt, Human
caagagagaugcagcucacuca

SEQ ID NO: 375030 - RNA, 22 nt, Human
cugcuuugggcagcuuuguggc

SEQ ID NO: 375031 - RNA, 18 nt, Human
gggaagaggaucuggccc

SEQ ID NO: 375032 - RNA, 22 nt, Human
acaguccuuguguggaacauua

SEQ ID NO: 375033 - RNA, 22 nt, Human
aucaaguuuucuuaguugacug

SEQ ID NO: 375034 - RNA, 22 nt, Human
uuaaagucccugccuuaauucc

SEQ ID NO: 375035 - RNA, 22 nt, Human
gacauaauccuccucaccuacu

SEQ ID NO: 375036 - RNA, 22 nt, Human
gcagggugauagugaggcucag

SEQ ID NO: 375037 - RNA, 22 nt, Human
uuccagaaaucuuucagcucaa

SEQ ID NO: 375038 - RNA, 22 nt, Human
ccacccuggacaggccucugag

SEQ ID NO: 375039 - RNA, 22 nt, Human
uggcuuccuggacagaugcggu

SEQ ID NO: 375040 - RNA, 22 nt, Human
uccucacaagcaagcacaggua

SEQ ID NO: 375041 - RNA, 22 nt, Human
cagcaggcugcgauugcucauu

SEQ ID NO: 375042 - RNA, 22 nt, Human
gcucagaaaagugaggcucagu

SEQ ID NO: 375043 - RNA, 22 nt, Human
ucacauuuguucuugaaucuaa

SEQ ID NO: 375044 - RNA, 22 nt, Human
ucacagaaggcaucacagaaga

SEQ ID NO: 375045 - RNA, 22 nt, Human
ugaaacagucuccagacuugga

SEQ ID NO: 375046 - RNA, 22 nt, Human
caggugggccgggguuuguucu

SEQ ID NO: 375047 - RNA, 18 nt, Human
gggcuguguucaugccca

SEQ ID NO: 375048 - RNA, 22 nt, Human
aaacugauaaaauaaguacauu

SEQ ID NO: 375049 - RNA, 22 nt, Human
agcccaagcuaugaggugaccu

SEQ ID NO: 375050 - RNA, 22 nt, Human
gggcuggaucuccugcaggcag

SEQ ID NO: 375051 - RNA, 22 nt, Human
uauuucuaagagauaucuguac

SEQ ID NO: 375052 - RNA, 22 nt, Human
gcucuggguagccacugccugg

SEQ ID NO: 375053 - RNA, 22 nt, Human
ugcaggaguccaaucaggagac

SEQ ID NO: 375054 - RNA, 22 nt, Human
cauuuuaaaugauuuaagccaa

SEQ ID NO: 375055 - RNA, 22 nt, Human
acuguggccugcuguaugggcu

SEQ ID NO: 375056 - RNA, 22 nt, Human
auuuggcaacauuaauugaauc

SEQ ID NO: 375057 - RNA, 22 nt, Human
ccugggcagggagaccaggcuc

SEQ ID NO: 375058 - RNA, 22 nt, Human
gcauguuauguaucugcccagc

SEQ ID NO: 375059 - RNA, 22 nt, Human
uugcauguguaauuuuucuaaa

SEQ ID NO: 375060 - RNA, 22 nt, Human
aaaagcagagacucuggagcua

SEQ ID NO: 375061 - RNA, 22 nt, Human
ucaaaugcucuuugcagagagg

SEQ ID NO: 375062 - RNA, 22 nt, Human
ugucccagcagcuggguucucu

SEQ ID NO: 375063 - RNA, 22 nt, Human
aggcuauuuccacucuucucau

SEQ ID NO: 375064 - RNA, 22 nt, Human
augcaguggcagcuccuggugu

SEQ ID NO: 375065 - RNA, 22 nt, Human
cauuacaugguccaggauauau

SEQ ID NO: 375066 - RNA, 22 nt, Human
aagaggcagcccgcugaggcug

SEQ ID NO: 375067 - RNA, 22 nt, Human
ucugccugaaauucacauguaa

SEQ ID NO: 375068 - RNA, 22 nt, Human
ggggcagagaauaaaaaccuaa

SEQ ID NO: 375069 - RNA, 22 nt, Human
guccucagucaguuuggugggg

SEQ ID NO: 375070 - RNA, 22 nt, Human
gggagcugaauggcaauggaga

SEQ ID NO: 375071 - RNA, 22 nt, Human
uggccugucuuguugugcuaga

SEQ ID NO: 375072 - RNA, 22 nt, Human
uguacacaauucuuaacauaca

SEQ ID NO: 375073 - RNA, 22 nt, Human
ugaccugcguaggugguuucug

SEQ ID NO: 375074 - RNA, 23 nt, Human
cagcugaagcagccugggcugga

SEQ ID NO: 375075 - RNA, 22 nt, Human
cugguccuugacgcgugggagg

SEQ ID NO: 375076 - RNA, 22 nt, Human
aggcugcucugcgaagucagcu

SEQ ID NO: 375077 - RNA, 22 nt, Human
acagcuuuuuacuaauagauug

SEQ ID NO: 375078 - RNA, 22 nt, Human
ugaugggaaaaugaggccuggg

SEQ ID NO: 375079 - RNA, 22 nt, Human
caguccuucauuccuccuuuga

SEQ ID NO: 375080 - RNA, 22 nt, Human
ggccugggcccacugucaagag

SEQ ID NO: 375081 - RNA, 22 nt, Human
cugagcccaggcgggagcugag

SEQ ID NO: 375082 - RNA, 20 nt, Human
auccaugagagucuggauuc

SEQ ID NO: 375083 - RNA, 22 nt, Human
gagggcuccauuccccgugccc

SEQ ID NO: 375084 - RNA, 22 nt, Human
gggcgccgugggaaacagccgg

SEQ ID NO: 375085 - RNA, 21 nt, Human
auacagaagguggcaaaguac

SEQ ID NO: 375086 - RNA, 20 nt, Human
cccucccagaugcuucccaa

SEQ ID NO: 375087 - RNA, 22 nt, Human
ugggcccugacuucaagcaucc

SEQ ID NO: 375088 - RNA, 22 nt, Human
ccaguccagugccaugcauggc

SEQ ID NO: 375089 - RNA, 22 nt, Human
ucuggcucaggagcuguguuca

SEQ ID NO: 375090 - RNA, 21 nt, Human
gcugagagguugggaaguuca

SEQ ID NO: 375091 - RNA, 22 nt, Human
ugcagcaggcacaggacggaag

SEQ ID NO: 375092 - RNA, 22 nt, Human
aguggcagaagccaagucugca

SEQ ID NO: 375093 - RNA, 22 nt, Human
gucccaggcuuauguggagcuu

SEQ ID NO: 375094 - RNA, 22 nt, Human
uucagagaagcaaaggcagauu

SEQ ID NO: 375095 - RNA, 22 nt, Human
cuggcugugcagucuuccagaa

SEQ ID NO: 375096 - RNA, 22 nt, Human
uggcagagucucuccuuuccag

SEQ ID NO: 375097 - RNA, 22 nt, Human
uccugccucuccaugcuaacua

SEQ ID NO: 375098 - RNA, 22 nt, Human
cagagcuggagcuugaauggag

SEQ ID NO: 375099 - RNA, 22 nt, Human
gaaggcugaguggguacggagg

SEQ ID NO: 375100 - RNA, 22 nt, Human
uaaaugugggggccacgggcuu

SEQ ID NO: 375101 - RNA, 22 nt, Human
ucuguucuauuggucuaugugu

SEQ ID NO: 375102 - RNA, 22 nt, Human
ugaaaugauaucugauaacaaa

SEQ ID NO: 375103 - RNA, 22 nt, Human
ucaaaguuuuugagaauuacau

SEQ ID NO: 375104 - RNA, 22 nt, Human
ccagcagcccucuuccaagacu

SEQ ID NO: 375105 - RNA, 22 nt, Human
ugggccacacacagaagaauca

SEQ ID NO: 375106 - RNA, 22 nt, Human
accaggaguugggggugggacc

SEQ ID NO: 375107 - RNA, 22 nt, Human
aacauaaauuugaaguggcaaa

SEQ ID NO: 375108 - RNA, 22 nt, Human
aaugcacaugucuuggccucac

SEQ ID NO: 375109 - RNA, 19 nt, Human
auuuacugccuaaaaucuc

SEQ ID NO: 375110 - RNA, 22 nt, Human
uguagaaauuaguaagaucaac

SEQ ID NO: 375111 - RNA, 18 nt, Human
aaggcuucaaagaguaga

SEQ ID NO: 375112 - RNA, 22 nt, Human
aggcagccuauggggagcucag

SEQ ID NO: 375113 - RNA, 22 nt, Human
gcagugcuuuagucuguccuuu

SEQ ID NO: 375114 - RNA, 22 nt, Human
agccccuuccaguucucagauc

SEQ ID NO: 375115 - RNA, 22 nt, Human
aauaugcauguauacaugugua

SEQ ID NO: 375116 - RNA, 22 nt, Human
agggggcaggagagaccugcug

SEQ ID NO: 375117 - RNA, 21 nt, Human
cagaggcugagagggcaaucu

SEQ ID NO: 375118 - RNA, 22 nt, Human
augcccaaugucacaauuuuug

SEQ ID NO: 375119 - RNA, 22 nt, Human
uguguacaagaguguuuacugu

SEQ ID NO: 375120 - RNA, 22 nt, Human
cagcccuuuccuucucagcuuu

SEQ ID NO: 375121 - RNA, 22 nt, Human
uggccacagccucugccaguuc

SEQ ID NO: 375122 - RNA, 22 nt, Human
ugccuuggugcuucuucaugug

SEQ ID NO: 375123 - RNA, 22 nt, Human
ugccaggcuguccugggccugg

SEQ ID NO: 375124 - RNA, 22 nt, Human
gcuuccuagaucugugguacuc

SEQ ID NO: 375125 - RNA, 22 nt, Human
aaucaaaaccuacagagguaau

SEQ ID NO: 375126 - RNA, 22 nt, Human
ucuuugcaugcauuuucccuua

SEQ ID NO: 375127 - RNA, 22 nt, Human
cucaggauugugccuagggaga

SEQ ID NO: 375128 - RNA, 22 nt, Human
ccagcugucagugugaaaauaa

SEQ ID NO: 375129 - RNA, 21 nt, Human
ggcccugguuacgccuccucu

SEQ ID NO: 375130 - RNA, 22 nt, Human
agcuuuaugcuuccuacaagcu

SEQ ID NO: 375131 - RNA, 19 nt, Human
uuacuuggcaaagucaguc

SEQ ID NO: 375132 - RNA, 22 nt, Human
uaaaugugucuuuuuaaggccu

SEQ ID NO: 375133 - RNA, 22 nt, Human
acagagagaaacaaucagcagc

SEQ ID NO: 375134 - RNA, 22 nt, Human
uauguuaaauguuugauguuua

SEQ ID NO: 375135 - RNA, 22 nt, Human
cugguacaaaaugcugauauca

SEQ ID NO: 375136 - RNA, 22 nt, Human
uguccuuuucuuuagugcagcu

SEQ ID NO: 375137 - RNA, 22 nt, Human
caggaaggcccaccuguccugu

SEQ ID NO: 375138 - RNA, 22 nt, Human
aguaacuaugcuugagaaucag

SEQ ID NO: 375139 - RNA, 22 nt, Human
uggggcuguccuuagucugaga

SEQ ID NO: 375140 - RNA, 22 nt, Human
uuucaauguaugucuuucugag

SEQ ID NO: 375141 - RNA, 22 nt, Human
ucugaagauuaccagcuaaaug

SEQ ID NO: 375142 - RNA, 17 nt, Human
uuccucucacauuuuuu

SEQ ID NO: 375143 - RNA, 22 nt, Human
guccagggcuaaaucagguucc

SEQ ID NO: 375144 - RNA, 21 nt, Human
ucagaguguguuacagcaagc

SEQ ID NO: 375145 - RNA, 22 nt, Human
uuucagaaccgcuaaaauaaau

SEQ ID NO: 375146 - RNA, 22 nt, Human
agagugggugaucucuguuguc

SEQ ID NO: 375147 - RNA, 22 nt, Human
uucacaggaggguggaugcaug

SEQ ID NO: 375148 - RNA, 22 nt, Human
agaagcaguuauuuuuugcaca

SEQ ID NO: 375149 - RNA, 22 nt, Human
ggccaagauggaaggagagaug

SEQ ID NO: 375150 - RNA, 23 nt, Human
uuauuuugucagaagggacuuuu

SEQ ID NO: 375151 - RNA, 22 nt, Human
aggaucugugagugcugcagac

SEQ ID NO: 375152 - RNA, 22 nt, Human
uaacacacugaaggugagaugg

SEQ ID NO: 375153 - RNA, 22 nt, Human
aaagaggaaccaagagcacgug

SEQ ID NO: 375154 - RNA, 22 nt, Human
agccagucggggccaugcuggg

SEQ ID NO: 375155 - RNA, 22 nt, Human
uaaggguucagaaugcaguggu

SEQ ID NO: 375156 - RNA, 22 nt, Human
ccagcucuggcuucuugcuggg

SEQ ID NO: 375157 - RNA, 22 nt, Human
agugcuuucccugaaaccuucc

SEQ ID NO: 375158 - RNA, 22 nt, Human
cauuuucucaaugaacccucuu

SEQ ID NO: 375159 - RNA, 22 nt, Human
aauaaacugcucaauugcauca

SEQ ID NO: 375160 - RNA, 22 nt, Human
aguacaauuuaaugaagauagc

SEQ ID NO: 375161 - RNA, 22 nt, Human
gaauuagguaauagaacuagua

SEQ ID NO: 375162 - RNA, 22 nt, Human
gccuaauaugcaaaauugauac

SEQ ID NO: 375163 - RNA, 22 nt, Human
ccagagcagggcagcagggcuc

SEQ ID NO: 375164 - RNA, 22 nt, Human
uggccaggcagguagaacggcc

SEQ ID NO: 375165 - RNA, 22 nt, Human
aaaguuugcaauuuauguuaau

SEQ ID NO: 375166 - RNA, 22 nt, Human
aucacugucgucaucugagauu

SEQ ID NO: 375167 - RNA, 22 nt, Human
uagaaaugauuuugaugcuuca

SEQ ID NO: 375168 - RNA, 22 nt, Human
ccagcuccagguagaugggcag

SEQ ID NO: 375169 - RNA, 19 nt, Human
auagaaaggguuaaagaca

SEQ ID NO: 375170 - RNA, 22 nt, Human
gagggcugcuggaaaaaugcag

SEQ ID NO: 375171 - RNA, 22 nt, Human
ggcugagcccccucugcguagg

SEQ ID NO: 375172 - RNA, 22 nt, Human
agcccaggagguggagguugca

SEQ ID NO: 375173 - RNA, 23 nt, Human
uggauaaagcugugcugcauagg

SEQ ID NO: 375174 - RNA, 22 nt, Human
acagcagcuggguucccaccau

SEQ ID NO: 375175 - RNA, 21 nt, Human
uguggcagauguugggaggca

SEQ ID NO: 375176 - RNA, 22 nt, Human
ccagacccugcucuggggcucu

SEQ ID NO: 375177 - RNA, 23 nt, Human
gcagagcugcccuauugccuugg

SEQ ID NO: 375178 - RNA, 22 nt, Human
gcugucucggggcuuucuccug

SEQ ID NO: 375179 - RNA, 22 nt, Human
gcauggaauucccuuaugggcc

SEQ ID NO: 375180 - RNA, 22 nt, Human
acagugacguuuauuugagacg

SEQ ID NO: 375181 - RNA, 18 nt, Human
uguggcaggggugggaga

SEQ ID NO: 375182 - RNA, 22 nt, Human
ucaaaauuuuauuucucaagga

SEQ ID NO: 375183 - RNA, 22 nt, Human
aaacucuggagauguuuaugca

SEQ ID NO: 375184 - RNA, 22 nt, Human
ccucagggccaucucugucccu

SEQ ID NO: 375185 - RNA, 22 nt, Human
uuuccauauuuaaucaaaauaa

SEQ ID NO: 375186 - RNA, 22 nt, Human
gcagcagaggcccuacucuuug

SEQ ID NO: 375187 - RNA, 22 nt, Human
gaggcucagagggacuuucaag

SEQ ID NO: 375188 - RNA, 21 nt, Human
uccacaaguuagaaggaaauu

SEQ ID NO: 375189 - RNA, 22 nt, Human
aaauccuaaggagaauaugauu

SEQ ID NO: 375190 - RNA, 22 nt, Human
gaggcucaaaccuggacagagc

SEQ ID NO: 375191 - RNA, 22 nt, Human
cagcugccuguauuguccucau

SEQ ID NO: 375192 - RNA, 22 nt, Human
aagcuguucucuaaguuucaug

SEQ ID NO: 375193 - RNA, 22 nt, Human
uccugcagccaagggucaucga

SEQ ID NO: 375194 - RNA, 22 nt, Human
cuccugaguaguagcauuguca

SEQ ID NO: 375195 - RNA, 22 nt, Human
uuccucuagcuucucacuaaca

SEQ ID NO: 375196 - RNA, 22 nt, Human
uccaggcauagaaggcacgcac

SEQ ID NO: 375197 - RNA, 22 nt, Human
accauuuuggguauuuucagag

SEQ ID NO: 375198 - RNA, 22 nt, Human
caguucuuauuuggccaguguc

SEQ ID NO: 375199 - RNA, 22 nt, Human
cuguacauauacauuuuuuucc

SEQ ID NO: 375200 - RNA, 22 nt, Human
accaggcagucaccguccagga

SEQ ID NO: 375201 - RNA, 22 nt, Human
ccagagcccgggaccuggacuu

SEQ ID NO: 375202 - RNA, 22 nt, Human
auucaguuucauggcacagcua

SEQ ID NO: 375203 - RNA, 22 nt, Human
gaggccagaagucugagaucag

SEQ ID NO: 375204 - RNA, 23 nt, Human
ugguucuaggccuauaauuauau

SEQ ID NO: 375205 - RNA, 22 nt, Human
cagggccuccuaaggcaucuaa

SEQ ID NO: 375206 - RNA, 22 nt, Human
gagggcugaagauuguggcccc

SEQ ID NO: 375207 - RNA, 20 nt, Human
ggcaccaggcuaggauugga

SEQ ID NO: 375208 - RNA, 22 nt, Human
aagauaaacucuugauuucuga

SEQ ID NO: 375209 - RNA, 22 nt, Human
ggcugcagggcagcuggugugg

SEQ ID NO: 375210 - RNA, 22 nt, Human
gcugagagcggccagcugggaa

SEQ ID NO: 375211 - RNA, 22 nt, Human
ggguggcuccuaugggcauagc

SEQ ID NO: 375212 - RNA, 22 nt, Human
guuccauaucacagcagacgaa

SEQ ID NO: 375213 - RNA, 22 nt, Human
cuggaaggucuguccccacugc

SEQ ID NO: 375214 - RNA, 21 nt, Human
uucaauacuauuucaauaguc

SEQ ID NO: 375215 - RNA, 22 nt, Human
ugcucagggacaauggagaggg

SEQ ID NO: 375216 - RNA, 22 nt, Human
uuuuuccuaagcaguggagcug

SEQ ID NO: 375217 - RNA, 22 nt, Human
ggcaggcuggcuuuguuccagg

SEQ ID NO: 375218 - RNA, 22 nt, Human
cggcugugucuucacaggagcc

SEQ ID NO: 375219 - RNA, 22 nt, Human
uauucacaggcuggagugaugu

SEQ ID NO: 375220 - RNA, 22 nt, Human
uggagcagcacaagaaagggga

SEQ ID NO: 375221 - RNA, 22 nt, Human
gauuucuugauaauucaaaucc

SEQ ID NO: 375222 - RNA, 22 nt, Human
gagggcugaugcuuacuuauuu

SEQ ID NO: 375223 - RNA, 20 nt, Human
ccugccuguguuugugauga

SEQ ID NO: 375224 - RNA, 22 nt, Human
aggcucagugauguaaaauaua

SEQ ID NO: 375225 - RNA, 22 nt, Human
gugggacucuucuuuggcagug

SEQ ID NO: 375226 - RNA, 22 nt, Human
auugauggcggccucuccauau

SEQ ID NO: 375227 - RNA, 22 nt, Human
gccccucccagucaggagcacu

SEQ ID NO: 375228 - RNA, 22 nt, Human
aaagaacaaaugauauaugguu

SEQ ID NO: 375229 - RNA, 22 nt, Human
caugaaaauaacauuguuguga

SEQ ID NO: 375230 - RNA, 22 nt, Human
gcagagugccgagauggaagcg

SEQ ID NO: 375231 - RNA, 22 nt, Human
cucagagcaaugaacaugcaaa

SEQ ID NO: 375232 - RNA, 22 nt, Human
guccuggguccccgcaggucag

SEQ ID NO: 375233 - RNA, 22 nt, Human
agcccaugcaacaggccuagcg

SEQ ID NO: 375234 - RNA, 22 nt, Human
uugguacaaugugcuagguagg

SEQ ID NO: 375235 - RNA, 22 nt, Human
uuuaaugaauaauucaaaucug

SEQ ID NO: 375236 - RNA, 23 nt, Human
aagucaccaagaggaaggcggag

SEQ ID NO: 375237 - RNA, 19 nt, Human
ccagcagcuuugauucucu

SEQ ID NO: 375238 - RNA, 22 nt, Human
ucaguucugcuagaaaaacagu

SEQ ID NO: 375239 - RNA, 22 nt, Human
aagcaggauggaucuaguguuc

SEQ ID NO: 375240 - RNA, 22 nt, Human
uuugugcagauguauauuugug

SEQ ID NO: 375241 - RNA, 22 nt, Human
agagcugcaggguggacccagg

SEQ ID NO: 375242 - RNA, 22 nt, Human
cagcagcuuugccaagucagcc

SEQ ID NO: 375243 - RNA, 22 nt, Human
ugaagcagagugaaggugaauu

SEQ ID NO: 375244 - RNA, 22 nt, Human
caggccacaaguuggguucaag

SEQ ID NO: 375245 - RNA, 22 nt, Human
aaugcauauguaggcaagcagu

SEQ ID NO: 375246 - RNA, 22 nt, Human
aggcugccaaagcuucugucuc

SEQ ID NO: 375247 - RNA, 22 nt, Human
cugcagagcuuucugaaugaag

SEQ ID NO: 375248 - RNA, 22 nt, Human
gguggcaggcccugagcauccc

SEQ ID NO: 375249 - RNA, 22 nt, Human
ugaggcaggagguugagaacug

SEQ ID NO: 375250 - RNA, 22 nt, Human
cacaauguauauguauaucaaa

SEQ ID NO: 375251 - RNA, 21 nt, Human
ggcagaaguagcauggacggg

SEQ ID NO: 375252 - RNA, 22 nt, Human
uggcugcaguucacaggagcaa

SEQ ID NO: 375253 - RNA, 22 nt, Human
ccagcuccccucagcagguaau

SEQ ID NO: 375254 - RNA, 22 nt, Human
acaguaauauugaugcucguca

SEQ ID NO: 375255 - RNA, 22 nt, Human
aaagagcuucauuuccauuuau

SEQ ID NO: 375256 - RNA, 22 nt, Human
ugacacauuaaaugcucacaaa

SEQ ID NO: 375257 - RNA, 20 nt, Human
agccagaagaaggcuggaga

SEQ ID NO: 375258 - RNA, 22 nt, Human
aguccuuacaccuggaaccuau

SEQ ID NO: 375259 - RNA, 19 nt, Human
caggaugaucccaugacac

SEQ ID NO: 375260 - RNA, 22 nt, Human
guugacagcuggugagcugcua

SEQ ID NO: 375261 - RNA, 22 nt, Human
acagccagggcauugucgccga

SEQ ID NO: 375262 - RNA, 22 nt, Human
aaaacugaaauacgauccaaug

SEQ ID NO: 375263 - RNA, 22 nt, Human
cucaggauuaaggaaucuaaau

SEQ ID NO: 375264 - RNA, 22 nt, Human
gucagaggggacaagacacaga

SEQ ID NO: 375265 - RNA, 22 nt, Human
ggcaccuggauguagcagugaa

SEQ ID NO: 375266 - RNA, 22 nt, Human
ugaaauguuugaagaccacuga

SEQ ID NO: 375267 - RNA, 22 nt, Human
ucaccccuacauuucccuugcu

SEQ ID NO: 375268 - RNA, 22 nt, Human
uuauuagcugggcuucagggug

SEQ ID NO: 375269 - RNA, 22 nt, Human
guguggcugugggagauguuca

SEQ ID NO: 375270 - RNA, 22 nt, Human
cacccacccacugcucauuggc

SEQ ID NO: 375271 - RNA, 22 nt, Human
aauauguucaaaauagaucacu

SEQ ID NO: 375272 - RNA, 22 nt, Human
ucucacuggguauaaaugagua

SEQ ID NO: 375273 - RNA, 22 nt, Human
gaagccacagagauuguggggg

SEQ ID NO: 375274 - RNA, 19 nt, Human
uccaggaggcugccauuga

SEQ ID NO: 375275 - RNA, 22 nt, Human
agagcugugcuuugcaccacgu

SEQ ID NO: 375276 - RNA, 22 nt, Human
uccucugcuguucugguucuuu

SEQ ID NO: 375277 - RNA, 22 nt, Human
uggaggcaucagagugcuuggc

SEQ ID NO: 375278 - RNA, 22 nt, Human
ugaggggagguuggggcacauc

SEQ ID NO: 375279 - RNA, 22 nt, Human
agggaaaguaagcauuucauua

SEQ ID NO: 375280 - RNA, 22 nt, Human
cuuucuuauaccugucagggcc

SEQ ID NO: 375281 - RNA, 22 nt, Human
uuuacaaguuuacagaaugaug

SEQ ID NO: 375282 - RNA, 22 nt, Human
aggucauuacaauuaucauuuu

SEQ ID NO: 375283 - RNA, 22 nt, Human
gagguggugguggaggcauagc

SEQ ID NO: 375284 - RNA, 22 nt, Human
cagugcagaggugcaagcaugu

SEQ ID NO: 375285 - RNA, 22 nt, Human
cauuugaaauaguucauucuug

SEQ ID NO: 375286 - RNA, 22 nt, Human
gaggccagaagugccucgggcu

SEQ ID NO: 375287 - RNA, 22 nt, Human
caguguuccaggcggcagugaa

SEQ ID NO: 375288 - RNA, 22 nt, Human
acagaggaaggcugagcugccc

SEQ ID NO: 375289 - RNA, 22 nt, Human
cagauuuaccuaacuccaaguu

SEQ ID NO: 375290 - RNA, 22 nt, Human
aaggagagguuguccguguugu

SEQ ID NO: 375291 - RNA, 22 nt, Human
ugaggcaggacuugcauaaagu

SEQ ID NO: 375292 - RNA, 22 nt, Human
uagcugccagaccauucuuacu

SEQ ID NO: 375293 - RNA, 22 nt, Human
ucuguggauuuuaguguucaug

SEQ ID NO: 375294 - RNA, 16 nt, Human
uguuagcugugcauua

SEQ ID NO: 375295 - RNA, 22 nt, Human
ugcccaggauugugaggucagg

SEQ ID NO: 375296 - RNA, 22 nt, Human
acauauauuacuaguaaagaca

SEQ ID NO: 375297 - RNA, 22 nt, Human
uuuccagguauuaauacuguau

SEQ ID NO: 375298 - RNA, 22 nt, Human
cccagcaggcauguugggagga

SEQ ID NO: 375299 - RNA, 22 nt, Human
gcuggagccaagcugcucuugg

SEQ ID NO: 375300 - RNA, 22 nt, Human
ugcauuguaggauguuuagcag

SEQ ID NO: 375301 - RNA, 22 nt, Human
ccugggaggcagagguugcagu

SEQ ID NO: 375302 - RNA, 22 nt, Human
ggcagagcuugcagugagccga

SEQ ID NO: 375303 - RNA, 22 nt, Human
auuaaauuuucacuaggcuccc

SEQ ID NO: 375304 - RNA, 22 nt, Human
aagguuaaauagguauuuucca

SEQ ID NO: 375305 - RNA, 22 nt, Human
cccaggaggcagauguugcagu

SEQ ID NO: 375306 - RNA, 22 nt, Human
cucaggaucgcuugcccuaggg

SEQ ID NO: 375307 - RNA, 22 nt, Human
ugaaaugauuauaugguguuug

SEQ ID NO: 375308 - RNA, 22 nt, Human
aagcaucucuauguggagagug

SEQ ID NO: 375309 - RNA, 22 nt, Human
gcagagcacccugcagugguau

SEQ ID NO: 375310 - RNA, 22 nt, Human
uguggcaggaagagcuucugag

SEQ ID NO: 375311 - RNA, 22 nt, Human
ggagccagugcccucuggugga

SEQ ID NO: 375312 - RNA, 22 nt, Human
uuauccuggauuauauauguga

SEQ ID NO: 375313 - RNA, 22 nt, Human
ucugcagcuugcacaggcaggc

SEQ ID NO: 375314 - RNA, 21 nt, Human
uucaaaaugguguguuugucu

SEQ ID NO: 375315 - RNA, 22 nt, Human
ggggcucaguucggacagccug

SEQ ID NO: 375316 - RNA, 20 nt, Human
agcaggaaaagugccagucu

SEQ ID NO: 375317 - RNA, 22 nt, Human
ucucccaggcugcccuguggac

SEQ ID NO: 375318 - RNA, 22 nt, Human
cagugcagguggcagaggacag

SEQ ID NO: 375319 - RNA, 22 nt, Human
aggcugcguuagccucacuccc

SEQ ID NO: 375320 - RNA, 21 nt, Human
gacaggggaagaagcaaggag

SEQ ID NO: 375321 - RNA, 22 nt, Human
gcagggcagugugucugugggg

SEQ ID NO: 375322 - RNA, 22 nt, Human
aucaguuuggugcuuucaguga

SEQ ID NO: 375323 - RNA, 22 nt, Human
caguaaaugcagauauagauac

SEQ ID NO: 375324 - RNA, 22 nt, Human
gaggcagcugggcuggugguuu

SEQ ID NO: 375325 - RNA, 20 nt, Human
ugaaaaggucaggagacaug

SEQ ID NO: 375326 - RNA, 22 nt, Human
ucaggagagagaaauuggggcu

SEQ ID NO: 375327 - RNA, 22 nt, Human
aggcagcagugauaagauagga

SEQ ID NO: 375328 - RNA, 22 nt, Human
uguguauuaccauuuuacagcu

SEQ ID NO: 375329 - RNA, 22 nt, Human
gcugagagaucaaggcaggauu

SEQ ID NO: 375330 - RNA, 21 nt, Human
auacagaaggcagacucucuc

SEQ ID NO: 375331 - RNA, 22 nt, Human
uuccuguauucuaaagggaaag

SEQ ID NO: 375332 - RNA, 22 nt, Human
gccuggucucuuucaugucagu

SEQ ID NO: 375333 - RNA, 22 nt, Human
ggucucugacuuagagauggau

SEQ ID NO: 375334 - RNA, 22 nt, Human
acacuaauuaagcugcuuuacu

SEQ ID NO: 375335 - RNA, 22 nt, Human
uagucaccugugagcugcguag

SEQ ID NO: 375336 - RNA, 22 nt, Human
gcugggagcaaagccaugcaua

SEQ ID NO: 375337 - RNA, 22 nt, Human
aaagaagguagggcuggugacu

SEQ ID NO: 375338 - RNA, 22 nt, Human
agaagccagaggcaguggguac

SEQ ID NO: 375339 - RNA, 22 nt, Human
gauggcuuugugcaccaugauu

SEQ ID NO: 375340 - RNA, 22 nt, Human
gcuggaucauauggugguucua

SEQ ID NO: 375341 - RNA, 21 nt, Human
gagacagacuuucguccccug

SEQ ID NO: 375342 - RNA, 22 nt, Human
cugggccugguagggcuugaaa

SEQ ID NO: 375343 - RNA, 22 nt, Human
uucaggaugcagagguuguagu

SEQ ID NO: 375344 - RNA, 22 nt, Human
ugggccugaguuugggaacugg

SEQ ID NO: 375345 - RNA, 22 nt, Human
aucaguuugagugcugugucaa

SEQ ID NO: 375346 - RNA, 22 nt, Human
ugcagggauuguuggcauccau

SEQ ID NO: 375347 - RNA, 22 nt, Human
uuacagaacugcccuaguuggc

SEQ ID NO: 375348 - RNA, 22 nt, Human
ugcuggcuacugauggcaggcc

SEQ ID NO: 375349 - RNA, 22 nt, Human
gcagaauugauggagaacuuaa

SEQ ID NO: 375350 - RNA, 20 nt, Human
gagauggacagaugaagggg

SEQ ID NO: 375351 - RNA, 23 nt, Human
uuuggacuugugacucuucuccu

SEQ ID NO: 375352 - RNA, 22 nt, Human
auggaucacagugccgugggug

SEQ ID NO: 375353 - RNA, 22 nt, Human
uauuugaaggcauacauuuuga

SEQ ID NO: 375354 - RNA, 22 nt, Human
aucugcuugaaugagcaacagg

SEQ ID NO: 375355 - RNA, 22 nt, Human
cagagacauucaguaaauuauc

SEQ ID NO: 375356 - RNA, 22 nt, Human
cuggcuguauuaguuugauccu

SEQ ID NO: 375357 - RNA, 22 nt, Human
uuuguaaauagcaguacucaug

SEQ ID NO: 375358 - RNA, 22 nt, Human
aggcucugguuggcaaguaaag

SEQ ID NO: 375359 - RNA, 22 nt, Human
aaagccagguugugugcaggaa

SEQ ID NO: 375360 - RNA, 20 nt, Human
cccagagccauagccagaca

SEQ ID NO: 375361 - RNA, 22 nt, Human
gacagggaggagcagagcuucu

SEQ ID NO: 375362 - RNA, 22 nt, Human
ugcccugcagugagugcgucug

SEQ ID NO: 375363 - RNA, 22 nt, Human
agugaguggguuacagauggga

SEQ ID NO: 375364 - RNA, 22 nt, Human
ccugggaggcuguuuccagccu

SEQ ID NO: 375365 - RNA, 22 nt, Human
agcuguucccucacugcaguca

SEQ ID NO: 375366 - RNA, 22 nt, Human
gcacuaaaccaacauguaauaa

SEQ ID NO: 375367 - RNA, 22 nt, Human
gguccagggaacuuugaaggau

SEQ ID NO: 375368 - RNA, 22 nt, Human
aaaguguugggaagaaagugca

SEQ ID NO: 375369 - RNA, 22 nt, Human
uuuauuagauuaucaaagaggu

SEQ ID NO: 375370 - RNA, 22 nt, Human
uaaaguucuggugagagguaag

SEQ ID NO: 375371 - RNA, 22 nt, Human
ggggcagcuaccggaaguaggg

SEQ ID NO: 375372 - RNA, 22 nt, Human
ccagggugaggaggcucccacg

SEQ ID NO: 375373 - RNA, 22 nt, Human
aauguauuccucaugcaagagu

SEQ ID NO: 375374 - RNA, 22 nt, Human
caagagcuuuagaaaugcucau

SEQ ID NO: 375375 - RNA, 22 nt, Human
ggucccagcuggucacugucag

SEQ ID NO: 375376 - RNA, 22 nt, Human
ggugagaggcagaggacagcuu

SEQ ID NO: 375377 - RNA, 22 nt, Human
auacacauauguguguauaugu

SEQ ID NO: 375378 - RNA, 22 nt, Human
gaauuucagaucagagaccauu

SEQ ID NO: 375379 - RNA, 23 nt, Human
cuccucguaacucuguggugggu

SEQ ID NO: 375380 - RNA, 23 nt, Human
cagggcugggcuugguguuaggc

SEQ ID NO: 375381 - RNA, 22 nt, Human
ugaaacauuugaugaucuuugg

SEQ ID NO: 375382 - RNA, 22 nt, Human
cagggagaucuuggcuccuggu

SEQ ID NO: 375383 - RNA, 22 nt, Human
uuuucaucucugcuuuguaccu

SEQ ID NO: 375384 - RNA, 22 nt, Human
ggcugcaggcagaggcugucug

SEQ ID NO: 375385 - RNA, 22 nt, Human
ucacagacacagggagaagcau

SEQ ID NO: 375386 - RNA, 22 nt, Human
ucagagaggcaauacuguuuaa

SEQ ID NO: 375387 - RNA, 19 nt, Human
uggcuccugccugccuucu

SEQ ID NO: 375388 - RNA, 22 nt, Human
gcaaugauauugaagugaugaa

SEQ ID NO: 375389 - RNA, 22 nt, Human
uuauuuugccacaggugaccuu

SEQ ID NO: 375390 - RNA, 22 nt, Human
aggagcugucagagugccagag

SEQ ID NO: 375391 - RNA, 22 nt, Human
agcucugacauugauucucagc

SEQ ID NO: 375392 - RNA, 22 nt, Human
gguuugcauucugaaaggcuca

SEQ ID NO: 375393 - RNA, 22 nt, Human
aggcaagcgcagaagcggagga

SEQ ID NO: 375394 - RNA, 22 nt, Human
aaagaaauagauggcauuuaaa

SEQ ID NO: 375395 - RNA, 22 nt, Human
gguagcagggcugugagucaga

SEQ ID NO: 375396 - RNA, 22 nt, Human
accugagcaugccaggagagug

SEQ ID NO: 375397 - RNA, 22 nt, Human
aagcaaaagguuacacuucugg

SEQ ID NO: 375398 - RNA, 20 nt, Human
ugaaggccagcagcauaggg

SEQ ID NO: 375399 - RNA, 22 nt, Human
auguccuucuccucuuaccugc

SEQ ID NO: 375400 - RNA, 22 nt, Human
ucuuuuggguucuuaugauuua

SEQ ID NO: 375401 - RNA, 22 nt, Human
agcuaggaaauugaggcugaga

SEQ ID NO: 375402 - RNA, 21 nt, Human
auccuugaucagaagagugcu

SEQ ID NO: 375403 - RNA, 22 nt, Human
gagcagaacaggccggguggga

SEQ ID NO: 375404 - RNA, 22 nt, Human
cuuuggcagccucugcuauuga

SEQ ID NO: 375405 - RNA, 22 nt, Human
acaggcagcgucauugcugcuc

SEQ ID NO: 375406 - RNA, 22 nt, Human
ugcuuuauuaagagagaaauuu

SEQ ID NO: 375407 - RNA, 22 nt, Human
uuauccaacaugacuuaugucc

SEQ ID NO: 375408 - RNA, 20 nt, Human
ucaggcaguggggaaaggca

SEQ ID NO: 375409 - RNA, 22 nt, Human
uccuggguccauggcagccgaa

SEQ ID NO: 375410 - RNA, 22 nt, Human
uuucuguuaggcaucauuuuaa

SEQ ID NO: 375411 - RNA, 21 nt, Human
aaagagguuaauauuguaagu

SEQ ID NO: 375412 - RNA, 22 nt, Human
uccaggagaccagauguaggcc

SEQ ID NO: 375413 - RNA, 22 nt, Human
guuuccaaccccaccaaagugc

SEQ ID NO: 375414 - RNA, 22 nt, Human
aaucuucacagaaaaaugucug

SEQ ID NO: 375415 - RNA, 22 nt, Human
uccaaauacauuuacuguauuu

SEQ ID NO: 375416 - RNA, 22 nt, Human
gcuguguuuuauguuagguuaa

SEQ ID NO: 375417 - RNA, 22 nt, Human
cccaggaaugaggggcggaggc

SEQ ID NO: 375418 - RNA, 21 nt, Human
cucaggaucuuauauauuagu

SEQ ID NO: 375419 - RNA, 22 nt, Human
ugcaggagacauaauagggacu

SEQ ID NO: 375420 - RNA, 22 nt, Human
uugugugguagcuucauugaac

SEQ ID NO: 375421 - RNA, 22 nt, Human
aggcaagcugcagagaguccuu

SEQ ID NO: 375422 - RNA, 22 nt, Human
ugaaggaauggaggaucagagc

SEQ ID NO: 375423 - RNA, 22 nt, Human
uuauuuugguaaauguuugccu

SEQ ID NO: 375424 - RNA, 22 nt, Human
caagccugucucaccagugcua

SEQ ID NO: 375425 - RNA, 22 nt, Human
gcaaaugcucuccuuggucagg

SEQ ID NO: 375426 - RNA, 22 nt, Human
ugaaggaagaauaggcaguguu

SEQ ID NO: 375427 - RNA, 22 nt, Human
cauuaggguaauugaacacuua

SEQ ID NO: 375428 - RNA, 22 nt, Human
uugaacauuagaauaaguaauu

SEQ ID NO: 375429 - RNA, 22 nt, Human
ugcugccaccccucaccagagc

SEQ ID NO: 375430 - RNA, 22 nt, Human
ccuugcaggggaacaggcagug

SEQ ID NO: 375431 - RNA, 22 nt, Human
uaaauucugaucaaguuccuuc

SEQ ID NO: 375432 - RNA, 22 nt, Human
uacuacauuaauaaaacauuca

SEQ ID NO: 375433 - RNA, 22 nt, Human
cucuguccuugcacaguuccua

SEQ ID NO: 375434 - RNA, 22 nt, Human
guauuugcaaaucuaaaagaga

SEQ ID NO: 375435 - RNA, 22 nt, Human
aucuggcuuaccuagggugccu

SEQ ID NO: 375436 - RNA, 22 nt, Human
ggaagaagggucauuggcagcc

SEQ ID NO: 375437 - RNA, 22 nt, Human
uuuaaagaaauuccucaucuuu

SEQ ID NO: 375438 - RNA, 22 nt, Human
ugcacacacucugcauauacuu

SEQ ID NO: 375439 - RNA, 22 nt, Human
ugagacaguucugcagcugggu

SEQ ID NO: 375440 - RNA, 22 nt, Human
uuugacaugcaaagcacuuuag

SEQ ID NO: 375441 - RNA, 21 nt, Human
agaugaggauacugaggccua

SEQ ID NO: 375442 - RNA, 22 nt, Human
agaggccuaaccaagauguccu

SEQ ID NO: 375443 - RNA, 22 nt, Human
ccuucaaucuuaagucagccca

SEQ ID NO: 375444 - RNA, 22 nt, Human
uagccaggcgaggucagugucg

SEQ ID NO: 375445 - RNA, 22 nt, Human
ggcuggucacaccacugcaggg

SEQ ID NO: 375446 - RNA, 22 nt, Human
uaaauaucaccuggaauuguua

SEQ ID NO: 375447 - RNA, 22 nt, Human
aggcccugggcaguucuguagc

SEQ ID NO: 375448 - RNA, 22 nt, Human
agacagcaggggagucugguuu

SEQ ID NO: 375449 - RNA, 22 nt, Human
agcagcauuaugauauaucuua

SEQ ID NO: 375450 - RNA, 22 nt, Human
ucuggcucugaauucacuucug

SEQ ID NO: 375451 - RNA, 22 nt, Human
ggccugugucugugccuguccu

SEQ ID NO: 375452 - RNA, 22 nt, Human
ccagcugcccaagaggcauccu

SEQ ID NO: 375453 - RNA, 22 nt, Human
cagaggaugaucuggccucucu

SEQ ID NO: 375454 - RNA, 22 nt, Human
agcuccuccugugccaggccag

SEQ ID NO: 375455 - RNA, 22 nt, Human
gguguagcucugugucccacug

SEQ ID NO: 375456 - RNA, 22 nt, Human
agagaagggccuguauguaauc

SEQ ID NO: 375457 - RNA, 22 nt, Human
augaggcagcugcuggagaacg

SEQ ID NO: 375458 - RNA, 23 nt, Human
cuggggcuuucaaaucugggcag

SEQ ID NO: 375459 - RNA, 22 nt, Human
auaaaaguucaagagaguacag

SEQ ID NO: 375460 - RNA, 22 nt, Human
ugcuucaggagaugucaccaug

SEQ ID NO: 375461 - RNA, 22 nt, Human
agcuacccgaggacaggcuaag

SEQ ID NO: 375462 - RNA, 22 nt, Human
ugcaggaagacuucccaagcca

SEQ ID NO: 375463 - RNA, 23 nt, Human
ucucuuucaagagcuuaaugugc

SEQ ID NO: 375464 - RNA, 22 nt, Human
uucuucucucauagauuaaggu

SEQ ID NO: 375465 - RNA, 22 nt, Human
cccaggaagaaauucugauuug

SEQ ID NO: 375466 - RNA, 22 nt, Human
aguccaggaguugggugacauu

SEQ ID NO: 375467 - RNA, 22 nt, Human
agguaacacuacuuaguauacu

SEQ ID NO: 375468 - RNA, 22 nt, Human
uuaauaaacaggugcagcugaa

SEQ ID NO: 375469 - RNA, 22 nt, Human
agagccagcaagugaauaguga

SEQ ID NO: 375470 - RNA, 17 nt, Human
uuucagauucacuuucu

SEQ ID NO: 375471 - RNA, 22 nt, Human
agagcuguagcuuccuagagcc

SEQ ID NO: 375472 - RNA, 17 nt, Human
uguggccuucugagcuu

SEQ ID NO: 375473 - RNA, 22 nt, Human
acagaauacuacagacugguua

SEQ ID NO: 375474 - RNA, 22 nt, Human
cugcuccacaccuccauuuccu

SEQ ID NO: 375475 - RNA, 22 nt, Human
cugcagggcccgccugagcccu

SEQ ID NO: 375476 - RNA, 22 nt, Human
gcagggaagacccggagcagcg

SEQ ID NO: 375477 - RNA, 22 nt, Human
cugccugugccaaugcuccuuu

SEQ ID NO: 375478 - RNA, 22 nt, Human
gaaguacaguuuuaucuagcca

SEQ ID NO: 375479 - RNA, 22 nt, Human
accaggaguagaauaucuguga

SEQ ID NO: 375480 - RNA, 22 nt, Human
aagcugccagcugagcugaggc

SEQ ID NO: 375481 - RNA, 22 nt, Human
aggacugggugcagagggcauc

SEQ ID NO: 375482 - RNA, 22 nt, Human
acuccugggugcugaccagcgu

SEQ ID NO: 375483 - RNA, 22 nt, Human
ucaggcagaaaaaucacuaauu

SEQ ID NO: 375484 - RNA, 22 nt, Human
cuuauuagaaagaaaagacaug

SEQ ID NO: 375485 - RNA, 22 nt, Human
gcagagugaggaagagcuucca

SEQ ID NO: 375486 - RNA, 22 nt, Human
cagggccaugaggcacaggguc

SEQ ID NO: 375487 - RNA, 22 nt, Human
guggggaaaggaguggggcuca

SEQ ID NO: 375488 - RNA, 20 nt, Human
gcagcugcccccagucccug

SEQ ID NO: 375489 - RNA, 22 nt, Human
gaggccuggaccagccacagag

SEQ ID NO: 375490 - RNA, 22 nt, Human
agcuguggcagcagccguggca

SEQ ID NO: 375491 - RNA, 22 nt, Human
uggaccugaagaauaggaagua

SEQ ID NO: 375492 - RNA, 22 nt, Human
cagcuucccuuggcugagcaga

SEQ ID NO: 375493 - RNA, 22 nt, Human
gaggagagggcugcgggcccac

SEQ ID NO: 375494 - RNA, 22 nt, Human
uuccuuaguuauuugguccccu

SEQ ID NO: 375495 - RNA, 22 nt, Human
ucugggaacucugucauuuccc

SEQ ID NO: 375496 - RNA, 22 nt, Human
cauugcuuugugcauauuuaaa

SEQ ID NO: 375497 - RNA, 22 nt, Human
gccuggagaggaagccggugga

SEQ ID NO: 375498 - RNA, 22 nt, Human
ccuuggaggacugcugcuucuu

SEQ ID NO: 375499 - RNA, 22 nt, Human
aauaaaauggucaguuuucuca

SEQ ID NO: 375500 - RNA, 20 nt, Human
ugcagcugcaggaggguggg

SEQ ID NO: 375501 - RNA, 22 nt, Human
augcugugcuggcuaaccaugg

SEQ ID NO: 375502 - RNA, 22 nt, Human
aaucagcuaaauaaacuaguca

SEQ ID NO: 375503 - RNA, 22 nt, Human
agggcugcuuugcuaaauaugg

SEQ ID NO: 375504 - RNA, 22 nt, Human
ggcagcucugaugaugcucugg

SEQ ID NO: 375505 - RNA, 22 nt, Human
cacugaagaugcgacuagugcu

SEQ ID NO: 375506 - RNA, 22 nt, Human
cagguuuagguggacgugcagg

SEQ ID NO: 375507 - RNA, 22 nt, Human
ucucaggggccuggaguccugg

SEQ ID NO: 375508 - RNA, 22 nt, Human
cuguggcuuucucugccuccuu

SEQ ID NO: 375509 - RNA, 22 nt, Human
aguuuuauuccaaugugcagca

SEQ ID NO: 375510 - RNA, 22 nt, Human
cugaagccaugugcucacuggu

SEQ ID NO: 375511 - RNA, 22 nt, Human
guagaaauguaaccaggagaua

SEQ ID NO: 375512 - RNA, 22 nt, Human
gauaugaaguggcauugugaag

SEQ ID NO: 375513 - RNA, 22 nt, Human
uguuuuaaucucccauugcucu

SEQ ID NO: 375514 - RNA, 22 nt, Human
ccacccagaccagggaucuggg

SEQ ID NO: 375515 - RNA, 22 nt, Human
acagggccucagccagggcaga

SEQ ID NO: 375516 - RNA, 22 nt, Human
ugguuuaccccuguccuauauc

SEQ ID NO: 375517 - RNA, 23 nt, Human
uuccuuaacuguuaagauugucu

SEQ ID NO: 375518 - RNA, 22 nt, Human
aaauagcauaaaauaggaagcu

SEQ ID NO: 375519 - RNA, 22 nt, Human
cccagccugucuuucccaauga

SEQ ID NO: 375520 - RNA, 17 nt, Human
aagauuucauuagcuga

SEQ ID NO: 375521 - RNA, 22 nt, Human
cagggcugucuccaaaggcccc

SEQ ID NO: 375522 - RNA, 22 nt, Human
uacuuucuguccuucuguuaaa

SEQ ID NO: 375523 - RNA, 22 nt, Human
gagagaggccuccauguacuga

SEQ ID NO: 375524 - RNA, 22 nt, Human
gcugagggcuguaacagcagag

SEQ ID NO: 375525 - RNA, 22 nt, Human
ggaaaugacuuggugcuucguu

SEQ ID NO: 375526 - RNA, 19 nt, Human
cugaggcccauguaccaug

SEQ ID NO: 375527 - RNA, 21 nt, Human
auuuccaaauaaggucacauu

SEQ ID NO: 375528 - RNA, 22 nt, Human
caguguccucagccagcagcua

SEQ ID NO: 375529 - RNA, 22 nt, Human
aggcugagggcuccugagggca

SEQ ID NO: 375530 - RNA, 22 nt, Human
uagugcuuggcccuaccagaua

SEQ ID NO: 375531 - RNA, 22 nt, Human
uggcucugaccagguagaggag

SEQ ID NO: 375532 - RNA, 22 nt, Human
gcaguggcuaagcucgcaugca

SEQ ID NO: 375533 - RNA, 22 nt, Human
aucaguuucugugaagaacaca

SEQ ID NO: 375534 - RNA, 22 nt, Human
cucugcuuggaacuggacagaa

SEQ ID NO: 375535 - RNA, 22 nt, Human
cccuggaggcggauguugcagu

SEQ ID NO: 375536 - RNA, 22 nt, Human
auaugugugaugcauggacuaa

SEQ ID NO: 375537 - RNA, 22 nt, Human
auucucaguucacuaguuucuu

SEQ ID NO: 375538 - RNA, 22 nt, Human
gcagggcagaaggugcugagga

SEQ ID NO: 375539 - RNA, 21 nt, Human
aaagaacaggcagauguucuu

SEQ ID NO: 375540 - RNA, 22 nt, Human
ccuggagauuauuugguccaau

SEQ ID NO: 375541 - RNA, 22 nt, Human
uggcccgaccucugcucaugca

SEQ ID NO: 375542 - RNA, 21 nt, Human
ucuguucaaggaacuacggau

SEQ ID NO: 375543 - RNA, 22 nt, Human
cagccucucuguaucucaggau

SEQ ID NO: 375544 - RNA, 22 nt, Human
agcccaggcagagggaugcuug

SEQ ID NO: 375545 - RNA, 22 nt, Human
gggaccugggccagaggacagu

SEQ ID NO: 375546 - RNA, 22 nt, Human
ggcagcugggucacaccgaucu

SEQ ID NO: 375547 - RNA, 20 nt, Human
acauguacuaaugaauacag

SEQ ID NO: 375548 - RNA, 22 nt, Human
caggggcuguuugccucaggcc

SEQ ID NO: 375549 - RNA, 22 nt, Human
aaagaugucauacacauuaaga

SEQ ID NO: 375550 - RNA, 22 nt, Human
uauuuguauguguguacauaua

SEQ ID NO: 375551 - RNA, 22 nt, Human
gugcaugaagacucagaaaguc

SEQ ID NO: 375552 - RNA, 22 nt, Human
cccaggcacucuuggucauuuu

SEQ ID NO: 375553 - RNA, 22 nt, Human
ugucuucaguaaaauacacuau

SEQ ID NO: 375554 - RNA, 22 nt, Human
ccccaggaagccucagauuugc

SEQ ID NO: 375555 - RNA, 22 nt, Human
ucauugucuugauaugauuguc

SEQ ID NO: 375556 - RNA, 22 nt, Human
agcagcucacaggauuccugaa

SEQ ID NO: 375557 - RNA, 22 nt, Human
cuuaaauucuuaaugcccucau

SEQ ID NO: 375558 - RNA, 22 nt, Human
uggagaaggggcagggucucca

SEQ ID NO: 375559 - RNA, 22 nt, Human
guuaauauuuaccugucaagaa

SEQ ID NO: 375560 - RNA, 22 nt, Human
gagagaaaugugcaguuugggc

SEQ ID NO: 375561 - RNA, 22 nt, Human
gccuggcacucacugaagaggc

SEQ ID NO: 375562 - RNA, 22 nt, Human
gucagaggaauggaugagugau

SEQ ID NO: 375563 - RNA, 22 nt, Human
aaauccuuuggaggacaugaug

SEQ ID NO: 375564 - RNA, 22 nt, Human
caagggcagcagccucaagcgg

SEQ ID NO: 375565 - RNA, 22 nt, Human
acagaggcagugugagauacug

SEQ ID NO: 375566 - RNA, 22 nt, Human
cagcuuccaucuccacugcccu

SEQ ID NO: 375567 - RNA, 22 nt, Human
ugcugggggcuuucuggauacc

SEQ ID NO: 375568 - RNA, 22 nt, Human
caggcagaguuagugauuuagg

SEQ ID NO: 375569 - RNA, 22 nt, Human
aaggcaguacuuuauguccaua

SEQ ID NO: 375570 - RNA, 22 nt, Human
gagagcuggauucuggauaggu

SEQ ID NO: 375571 - RNA, 22 nt, Human
ccagcugggauuaagggaaaau

SEQ ID NO: 375572 - RNA, 20 nt, Human
gggcuggcgcauggggaaag

SEQ ID NO: 375573 - RNA, 22 nt, Human
caggaggccaacugugggacuu

SEQ ID NO: 375574 - RNA, 22 nt, Human
cacagguguucuugcagugaaa

SEQ ID NO: 375575 - RNA, 21 nt, Human
guauucuuuaugaagugaaaa

SEQ ID NO: 375576 - RNA, 23 nt, Human
uggcagagacccagaaucuacau

SEQ ID NO: 375577 - RNA, 22 nt, Human
ugggcuggugagggaucauuua

SEQ ID NO: 375578 - RNA, 22 nt, Human
gagacagcagggccagggccug

SEQ ID NO: 375579 - RNA, 22 nt, Human
acagaugauuuuuaugaaaaca

SEQ ID NO: 375580 - RNA, 22 nt, Human
cagaggcuguguaggcagacug

SEQ ID NO: 375581 - RNA, 22 nt, Human
aggagggcaggcuggcugccua

SEQ ID NO: 375582 - RNA, 17 nt, Human
agguggguggaucaccu

SEQ ID NO: 375583 - RNA, 22 nt, Human
aaugcacaaaaauuguauguaa

SEQ ID NO: 375584 - RNA, 22 nt, Human
aaaagguagauucuccuucuau

SEQ ID NO: 375585 - RNA, 22 nt, Human
uccuuugacuucuugcagucca

SEQ ID NO: 375586 - RNA, 22 nt, Human
agacaaagacagcaucucaggu

SEQ ID NO: 375587 - RNA, 21 nt, Human
cacuggaauuuucugugacau

SEQ ID NO: 375588 - RNA, 22 nt, Human
gugugaaaguuccuaagacuau

SEQ ID NO: 375589 - RNA, 22 nt, Human
ucuccugguuuguuaaauaauu

SEQ ID NO: 375590 - RNA, 22 nt, Human
cagccagggucaggcagcuucu

SEQ ID NO: 375591 - RNA, 20 nt, Human
ggggcagguuuuuauggcua

SEQ ID NO: 375592 - RNA, 22 nt, Human
uauguacauaacaugaaaugca

SEQ ID NO: 375593 - RNA, 22 nt, Human
guugaaagcuuuucauuuaguu

SEQ ID NO: 375594 - RNA, 22 nt, Human
ggcccugagcugaaguacugug

SEQ ID NO: 375595 - RNA, 21 nt, Human
ugguuugcggccaaaguuaaa

SEQ ID NO: 375596 - RNA, 22 nt, Human
uggcucagcagguuagaaacua

SEQ ID NO: 375597 - RNA, 22 nt, Human
gagggcagagacagugauucac

SEQ ID NO: 375598 - RNA, 22 nt, Human
gugcucuguguauuaggauguc

SEQ ID NO: 375599 - RNA, 22 nt, Human
gcacagaacagagaaauagcca

SEQ ID NO: 375600 - RNA, 22 nt, Human
cucacaggagaaagucaugguc

SEQ ID NO: 375601 - RNA, 22 nt, Human
gggcaagcacagcgagcgugcg

SEQ ID NO: 375602 - RNA, 17 nt, Human
cagggcugucugccuag

SEQ ID NO: 375603 - RNA, 22 nt, Human
agucucuuccuucaaggcuggu

SEQ ID NO: 375604 - RNA, 22 nt, Human
caucugccuaaguggcccuguu

SEQ ID NO: 375605 - RNA, 22 nt, Human
ggcaaaaacagcaaugacuuuu

SEQ ID NO: 375606 - RNA, 22 nt, Human
ugaaaaggaguccuuguuuuca

SEQ ID NO: 375607 - RNA, 22 nt, Human
cuggcuuucuauuuggugcuau

SEQ ID NO: 375608 - RNA, 22 nt, Human
gaaucauuuauuuuugacagca

SEQ ID NO: 375609 - RNA, 22 nt, Human
uugugucccccuuugagagcca

SEQ ID NO: 375610 - RNA, 22 nt, Human
gaggcacaccagggagucuugu

SEQ ID NO: 375611 - RNA, 22 nt, Human
uguaagaaucagucuuuaaugu

SEQ ID NO: 375612 - RNA, 22 nt, Human
uagcagcucacagccucccauu

SEQ ID NO: 375613 - RNA, 22 nt, Human
agggccagcugcagaauuagca

SEQ ID NO: 375614 - RNA, 22 nt, Human
ugaugcugcugggaguggugcu

SEQ ID NO: 375615 - RNA, 22 nt, Human
uggaaggagacugggaagugug

SEQ ID NO: 375616 - RNA, 22 nt, Human
cauugcacuccacccuaggcaa

SEQ ID NO: 375617 - RNA, 22 nt, Human
ggcagcaggcgacuucccuauu

SEQ ID NO: 375618 - RNA, 22 nt, Human
gcuggggagcuagaccucagca

SEQ ID NO: 375619 - RNA, 22 nt, Human
guaauugacucagcucuguuca

SEQ ID NO: 375620 - RNA, 22 nt, Human
ucagagugggagaaugugccaa

SEQ ID NO: 375621 - RNA, 22 nt, Human
uguuuuaaagccauugccuuuc

SEQ ID NO: 375622 - RNA, 22 nt, Human
auucuucauuuacuguuacuug

SEQ ID NO: 375623 - RNA, 22 nt, Human
acagggcagguggcuacugguc

SEQ ID NO: 375624 - RNA, 22 nt, Human
aggauuuagauuuggaggaacu

SEQ ID NO: 375625 - RNA, 22 nt, Human
cacugugucaguuugguuagac

SEQ ID NO: 375626 - RNA, 22 nt, Human
caaguccuaaauguauuuguug

SEQ ID NO: 375627 - RNA, 22 nt, Human
uuucagaucauuuuuuaaguac

SEQ ID NO: 375628 - RNA, 22 nt, Human
uuuagggaaauugaggguuaag

SEQ ID NO: 375629 - RNA, 22 nt, Human
ucacacagguuugcaaugauuu

SEQ ID NO: 375630 - RNA, 22 nt, Human
ccagggcagugggagaaggugc

SEQ ID NO: 375631 - RNA, 22 nt, Human
gcugucacaagcaucuggggca

SEQ ID NO: 375632 - RNA, 21 nt, Human
aaguaaaucagagaaauaacc

SEQ ID NO: 375633 - RNA, 22 nt, Human
aaaguuugaaugauauauuagu

SEQ ID NO: 375634 - RNA, 22 nt, Human
gcagggcagggcaagaacuggg

SEQ ID NO: 375635 - RNA, 19 nt, Human
gcacugaagaguuggucac

SEQ ID NO: 375636 - RNA, 22 nt, Human
auguaucagaaauagcauuggc

SEQ ID NO: 375637 - RNA, 22 nt, Human
gcugauguuuaguugauguuac

SEQ ID NO: 375638 - RNA, 22 nt, Human
aggguagggcccggagacagac

SEQ ID NO: 375639 - RNA, 22 nt, Human
guccuggcuuaguucgcuguaa

SEQ ID NO: 375640 - RNA, 22 nt, Human
uggccugcuuucauuugaugcu

SEQ ID NO: 375641 - RNA, 22 nt, Human
ugcucugggcaacagccucccu

SEQ ID NO: 375642 - RNA, 22 nt, Human
ccccaccagcacccucucuauc

SEQ ID NO: 375643 - RNA, 22 nt, Human
cuggcucccguuguccuugaag

SEQ ID NO: 375644 - RNA, 22 nt, Human
aaaugcaccuugcugugagacu

SEQ ID NO: 375645 - RNA, 22 nt, Human
ccccagcugcauacuugccaag

SEQ ID NO: 375646 - RNA, 22 nt, Human
ucccaaggccaggcaucuagaa

SEQ ID NO: 375647 - RNA, 22 nt, Human
gcagaagucagaccaucugaau

SEQ ID NO: 375648 - RNA, 22 nt, Human
aaggcuuuuaacuacuguuuua

SEQ ID NO: 375649 - RNA, 18 nt, Human
ggcagcaagaagggaggg

SEQ ID NO: 375650 - RNA, 22 nt, Human
agucaguuaaccucacagcauc

SEQ ID NO: 375651 - RNA, 22 nt, Human
ucucagagcuucagaaagcacc

SEQ ID NO: 375652 - RNA, 22 nt, Human
augucccagcugagagacaacu

SEQ ID NO: 375653 - RNA, 22 nt, Human
uuaugcaacaggugagcagaca

SEQ ID NO: 375654 - RNA, 22 nt, Human
uggaggggcaauggagcgcgga

SEQ ID NO: 375655 - RNA, 19 nt, Human
guaagggcuaauggacuau

SEQ ID NO: 375656 - RNA, 20 nt, Human
ucauuucuugggguuccaag

SEQ ID NO: 375657 - RNA, 22 nt, Human
gacucugcuacaggccgagguu

SEQ ID NO: 375658 - RNA, 22 nt, Human
uggcaggguggcaacuuuuggu

SEQ ID NO: 375659 - RNA, 22 nt, Human
ggggccagguccagcuuccaaa

SEQ ID NO: 375660 - RNA, 22 nt, Human
ccaaaguccacaguuuacauua

SEQ ID NO: 375661 - RNA, 23 nt, Human
uaaagacagccuucaggauucug

SEQ ID NO: 375662 - RNA, 22 nt, Human
gccuuccuuacaccugcucagc

SEQ ID NO: 375663 - RNA, 20 nt, Human
aguguuccggaagacuggca

SEQ ID NO: 375664 - RNA, 22 nt, Human
auuuuaucugcuuacuuucagg

SEQ ID NO: 375665 - RNA, 21 nt, Human
uccaggaguucuaauaggugu

SEQ ID NO: 375666 - RNA, 22 nt, Human
aaggagaguacaggaguuggua

SEQ ID NO: 375667 - RNA, 22 nt, Human
gcugccagcucacucuccugag

SEQ ID NO: 375668 - RNA, 21 nt, Human
ucacaugcccauuacuggagc

SEQ ID NO: 375669 - RNA, 22 nt, Human
agcugucagugcugugccugua

SEQ ID NO: 375670 - RNA, 22 nt, Human
gaaaaaugcuccaaaucugugg

SEQ ID NO: 375671 - RNA, 22 nt, Human
agcuuuauuaacucuccaggug

SEQ ID NO: 375672 - RNA, 22 nt, Human
ugagcccagagaucugagcuau

SEQ ID NO: 375673 - RNA, 22 nt, Human
uccacuuuagcaaugauugaau

SEQ ID NO: 375674 - RNA, 22 nt, Human
ugggcagagucguggggaauag

SEQ ID NO: 375675 - RNA, 22 nt, Human
gagcagagacaguacaacuggc

SEQ ID NO: 375676 - RNA, 22 nt, Human
agucauauguggcauuuucuaa

SEQ ID NO: 375677 - RNA, 22 nt, Human
uguguuccuucgucuucccuuc

SEQ ID NO: 375678 - RNA, 22 nt, Human
ccagaggaugcuggucagccuc

SEQ ID NO: 375679 - RNA, 21 nt, Human
ucauuugugaucugauuucca

SEQ ID NO: 375680 - RNA, 17 nt, Human
ggcagcugugugcaugc

SEQ ID NO: 375681 - RNA, 22 nt, Human
agccuggagguaaugaggaaac

SEQ ID NO: 375682 - RNA, 21 nt, Human
caagccagaccaauagcagcc

SEQ ID NO: 375683 - RNA, 22 nt, Human
uucaagaucuuccaaaggauac

SEQ ID NO: 375684 - RNA, 22 nt, Human
gcuguggccuggcgcagagcug

SEQ ID NO: 375685 - RNA, 22 nt, Human
ggcagcucacugauuagcaauu

SEQ ID NO: 375686 - RNA, 22 nt, Human
agcagggcuccauuucacugcc

SEQ ID NO: 375687 - RNA, 22 nt, Human
agcagcaugaugacagagucuc

SEQ ID NO: 375688 - RNA, 19 nt, Human
ugacaggcuguugccuuga

SEQ ID NO: 375689 - RNA, 22 nt, Human
gaaggaggcguuagcccuagga

SEQ ID NO: 375690 - RNA, 22 nt, Human
uaugaacuuuugaugugacaug

SEQ ID NO: 375691 - RNA, 22 nt, Human
ugucaaaaugacuuuacuacag

SEQ ID NO: 375692 - RNA, 20 nt, Human
ccagcugagccaaggggaga

SEQ ID NO: 375693 - RNA, 22 nt, Human
ucagaggaugcuguucuuuaau

SEQ ID NO: 375694 - RNA, 22 nt, Human
agggagguccaucccugcagag

SEQ ID NO: 375695 - RNA, 22 nt, Human
cuuaaagaaauugaggagagga

SEQ ID NO: 375696 - RNA, 22 nt, Human
guuagggaagcgcuguguucuu

SEQ ID NO: 375697 - RNA, 22 nt, Human
cuuucaacuacauacaggcgau

SEQ ID NO: 375698 - RNA, 22 nt, Human
agccagcugccuuucacaucug

SEQ ID NO: 375699 - RNA, 22 nt, Human
auucuucaaagagugucaaagu

SEQ ID NO: 375700 - RNA, 22 nt, Human
gcugggaggaauuuggggaaua

SEQ ID NO: 375701 - RNA, 22 nt, Human
ugucucugggugauucaguccu

SEQ ID NO: 375702 - RNA, 23 nt, Human
uuaaacuucagugcagaacacuc

SEQ ID NO: 375703 - RNA, 22 nt, Human
agccucuguagaaagcagugug

SEQ ID NO: 375704 - RNA, 22 nt, Human
aucuaacagcaacaccagaaua

SEQ ID NO: 375705 - RNA, 22 nt, Human
caccacuucauaggcuuuaagg

SEQ ID NO: 375706 - RNA, 22 nt, Human
gauggcaggugauagccgaguc

SEQ ID NO: 375707 - RNA, 22 nt, Human
ugggcucauggcccagcacugg

SEQ ID NO: 375708 - RNA, 22 nt, Human
uggggcugucccgguuuggcga

SEQ ID NO: 375709 - RNA, 22 nt, Human
ugccucugaggaagauuguguu

SEQ ID NO: 375710 - RNA, 22 nt, Human
aagaauguucuuguagucauga

SEQ ID NO: 375711 - RNA, 22 nt, Human
aagacauuacuggaaucugacu

SEQ ID NO: 375712 - RNA, 22 nt, Human
cauugucacccaaagcucauag

SEQ ID NO: 375713 - RNA, 22 nt, Human
aaaggaagauugagcuuuucca

SEQ ID NO: 375714 - RNA, 22 nt, Human
cacagcagaaaguguaggagga

SEQ ID NO: 375715 - RNA, 22 nt, Human
gccaggagccagcuucuuagca

SEQ ID NO: 375716 - RNA, 22 nt, Human
aagggcuggcccugggaagagu

SEQ ID NO: 375717 - RNA, 22 nt, Human
cuggaaauuggagaugauguuu

SEQ ID NO: 375718 - RNA, 22 nt, Human
auuucuuccucugucaguaacu

SEQ ID NO: 375719 - RNA, 22 nt, Human
agagccaggaucuguuuugggg

SEQ ID NO: 375720 - RNA, 22 nt, Human
cugagagaaucaugcugcaggu

SEQ ID NO: 375721 - RNA, 22 nt, Human
uuuuuaguagagguggguuuca

SEQ ID NO: 375722 - RNA, 21 nt, Human
gggcgaggccugauguggcuc

SEQ ID NO: 375723 - RNA, 22 nt, Human
ggcagagaugugggucagaauc

SEQ ID NO: 375724 - RNA, 22 nt, Human
gaauuguacgcuuuacauaggu

SEQ ID NO: 375725 - RNA, 22 nt, Human
ugccuggcaagaggggcuggcu

SEQ ID NO: 375726 - RNA, 22 nt, Human
agggccagcugaugagaaugag

SEQ ID NO: 375727 - RNA, 22 nt, Human
gaagccagcaguggagaaagga

SEQ ID NO: 375728 - RNA, 22 nt, Human
guagaaauagugguugacagga

SEQ ID NO: 375729 - RNA, 22 nt, Human
ucacuuaaaaauucuaguuaug

SEQ ID NO: 375730 - RNA, 22 nt, Human
agauuuccugcacugccuuuga

SEQ ID NO: 375731 - RNA, 22 nt, Human
agaggggaaggaugugauguga

SEQ ID NO: 375732 - RNA, 22 nt, Human
uaaaauugcggugaauauuucc

SEQ ID NO: 375733 - RNA, 22 nt, Human
aagugguagacaaagauaauug

SEQ ID NO: 375734 - RNA, 22 nt, Human
aucaguuuggaacauucaggcc

SEQ ID NO: 375735 - RNA, 22 nt, Human
cuccucacacccacugcaacca

SEQ ID NO: 375736 - RNA, 20 nt, Human
gagagcuggggaugaggcug

SEQ ID NO: 375737 - RNA, 22 nt, Human
ucaccagucuuucuuaccauug

SEQ ID NO: 375738 - RNA, 22 nt, Human
aucagaagaaauggaugugacu

SEQ ID NO: 375739 - RNA, 22 nt, Human
ccagggcugcugugggacucca

SEQ ID NO: 375740 - RNA, 22 nt, Human
ucucaggguuuguacaagugua

SEQ ID NO: 375741 - RNA, 22 nt, Human
aauaaccuuacuuauuacaugg

SEQ ID NO: 375742 - RNA, 22 nt, Human
uacuuuagaaggaaauaaguuc

SEQ ID NO: 375743 - RNA, 22 nt, Human
augaaauauuucagagcagagu

SEQ ID NO: 375744 - RNA, 22 nt, Human
caggcacuucugcugcuugucu

SEQ ID NO: 375745 - RNA, 22 nt, Human
aggcaggcaaccaccugggaag

SEQ ID NO: 375746 - RNA, 17 nt, Human
ugaaggccaugaccacg

SEQ ID NO: 375747 - RNA, 22 nt, Human
ucacacauucuagguauguuga

SEQ ID NO: 375748 - RNA, 22 nt, Human
cuugauguauaaguugauaugu

SEQ ID NO: 375749 - RNA, 22 nt, Human
uccugccucuuuucuuauucca

SEQ ID NO: 375750 - RNA, 22 nt, Human
gccaggcugcuccagggaggcc

SEQ ID NO: 375751 - RNA, 22 nt, Human
aacaaauggggccuuguaugaa

SEQ ID NO: 375752 - RNA, 22 nt, Human
ggcccugggaugcucagcagug

SEQ ID NO: 375753 - RNA, 22 nt, Human
aaaguuuuagaacuaggaagca

SEQ ID NO: 375754 - RNA, 22 nt, Human
aaagccuuugucucaggcucug

SEQ ID NO: 375755 - RNA, 22 nt, Human
agagccuggcucccagcuaccg

SEQ ID NO: 375756 - RNA, 22 nt, Human
cuggagcauccaugcccagggu

SEQ ID NO: 375757 - RNA, 22 nt, Human
ccugccugaaggucagccaccc

SEQ ID NO: 375758 - RNA, 22 nt, Human
aggcugaggcuuuccuuggaga

SEQ ID NO: 375759 - RNA, 22 nt, Human
uucauucuugggaucagagagu

SEQ ID NO: 375760 - RNA, 22 nt, Human
ccuccuuuccuguuuuccugag

SEQ ID NO: 375761 - RNA, 22 nt, Human
uccucaggauguggaguagaau

SEQ ID NO: 375762 - RNA, 22 nt, Human
ggcugaaguguaguggcucacu

SEQ ID NO: 375763 - RNA, 22 nt, Human
auacauguaacugcauuguaau

SEQ ID NO: 375764 - RNA, 22 nt, Human
ucuggagcuuguuucagauggu

SEQ ID NO: 375765 - RNA, 22 nt, Human
augcacuugcguguuugcaaau

SEQ ID NO: 375766 - RNA, 22 nt, Human
aggcagcuuucuggugcaccau

SEQ ID NO: 375767 - RNA, 23 nt, Human
uuaggcacuuaguagggccagag

SEQ ID NO: 375768 - RNA, 22 nt, Human
augguuuaaagaguaugacuuu

SEQ ID NO: 375769 - RNA, 22 nt, Human
cagggagaaaucuccaggaggu

SEQ ID NO: 375770 - RNA, 22 nt, Human
cauugaaaccuaacauaggcug

SEQ ID NO: 375771 - RNA, 22 nt, Human
gcugucugagaacaugguggaa

SEQ ID NO: 375772 - RNA, 22 nt, Human
ugacagggugauuaugagagcu

SEQ ID NO: 375773 - RNA, 22 nt, Human
ccagaggugcugggagaggucu

SEQ ID NO: 375774 - RNA, 22 nt, Human
ggacuggccggcgcugaggccc

SEQ ID NO: 375775 - RNA, 22 nt, Human
ugcagcagguuccaaaggguua

SEQ ID NO: 375776 - RNA, 22 nt, Human
aggcagcuggaggcagagacua

SEQ ID NO: 375777 - RNA, 22 nt, Human
ucccagggacucucugccuucc

SEQ ID NO: 375778 - RNA, 22 nt, Human
ugggcuggcguggagaguuuag

SEQ ID NO: 375779 - RNA, 22 nt, Human
gggccuggggugacguaccccu

SEQ ID NO: 375780 - RNA, 22 nt, Human
ugaggcagucacccccuccugc

SEQ ID NO: 375781 - RNA, 22 nt, Human
aggccacaguacuuugcagacc

SEQ ID NO: 375782 - RNA, 22 nt, Human
ucccagaguauuagcaauugcu

SEQ ID NO: 375783 - RNA, 22 nt, Human
gagguggaaggcaggaacaaau

SEQ ID NO: 375784 - RNA, 22 nt, Human
cucacugucuguacuagcugau

SEQ ID NO: 375785 - RNA, 22 nt, Human
uugcugaaaucuaugacauccu

SEQ ID NO: 375786 - RNA, 22 nt, Human
ucucagagauuuauggaaaacu

SEQ ID NO: 375787 - RNA, 18 nt, Human
gccugccuagagcuugcc

SEQ ID NO: 375788 - RNA, 22 nt, Human
auugcuguaaauuaucuuauua

SEQ ID NO: 375789 - RNA, 22 nt, Human
ugaggcagaaaauagcaguuca

SEQ ID NO: 375790 - RNA, 22 nt, Human
ggccugcucugcagccucuaca

SEQ ID NO: 375791 - RNA, 22 nt, Human
cugcuuugauuagaagaguaca

SEQ ID NO: 375792 - RNA, 22 nt, Human
agggcuacugccugccuucagg

SEQ ID NO: 375793 - RNA, 22 nt, Human
aggggcugcuggguccgccccu

SEQ ID NO: 375794 - RNA, 20 nt, Human
ccugucucacguuccgcccc

SEQ ID NO: 375795 - RNA, 21 nt, Human
guagggacagagaguugguga

SEQ ID NO: 375796 - RNA, 22 nt, Human
gagcacagaaucuucccaugca

SEQ ID NO: 375797 - RNA, 22 nt, Human
ggcaggagauaaaauauuaguu

SEQ ID NO: 375798 - RNA, 22 nt, Human
aacugcauuugcauaaguccau

SEQ ID NO: 375799 - RNA, 22 nt, Human
ucuguucagguuucagagaacu

SEQ ID NO: 375800 - RNA, 22 nt, Human
auaaggcacacauagauagggu

SEQ ID NO: 375801 - RNA, 21 nt, Human
uauuucuuugacucucucccu

SEQ ID NO: 375802 - RNA, 22 nt, Human
ggaaggaggaugcucuggccuu

SEQ ID NO: 375803 - RNA, 22 nt, Human
acauuucugagcagggagcugu

SEQ ID NO: 375804 - RNA, 22 nt, Human
acagaccaaguuuccagcaggu

SEQ ID NO: 375805 - RNA, 22 nt, Human
agcaggcuccuuccuucucugg

SEQ ID NO: 375806 - RNA, 22 nt, Human
ugaaggcauugaugaaggaauc

SEQ ID NO: 375807 - RNA, 22 nt, Human
cacaaugugguuugucaucuuu

SEQ ID NO: 375808 - RNA, 22 nt, Human
uggcacugggaugcuacuguua

SEQ ID NO: 375809 - RNA, 22 nt, Human
uuaauacagucuccagaaguaa

SEQ ID NO: 375810 - RNA, 22 nt, Human
aacaugcuuugauaaauaaaag

SEQ ID NO: 375811 - RNA, 22 nt, Human
uggccucugugggagcugagca

SEQ ID NO: 375812 - RNA, 22 nt, Human
gucccuggucuaccguggcuuc

SEQ ID NO: 375813 - RNA, 22 nt, Human
aaauugcaaaaguacuuuuagg

SEQ ID NO: 375814 - RNA, 22 nt, Human
cagucccaugagcccagaacau

SEQ ID NO: 375815 - RNA, 22 nt, Human
gauguguuuccaggauuuguuu

SEQ ID NO: 375816 - RNA, 22 nt, Human
aggguauaaagagcaagcagaa

SEQ ID NO: 375817 - RNA, 22 nt, Human
agucuucagagaaauuaacucu

SEQ ID NO: 375818 - RNA, 22 nt, Human
uggcugagccacuuguucagau

SEQ ID NO: 375819 - RNA, 22 nt, Human
cagagcauuuggaagccacgug

SEQ ID NO: 375820 - RNA, 22 nt, Human
uggcuuccacugugugcccccu

SEQ ID NO: 375821 - RNA, 22 nt, Human
gcuggccuucugcagaguucug

SEQ ID NO: 375822 - RNA, 22 nt, Human
uaaagguaugucuuaaucaaac

SEQ ID NO: 375823 - RNA, 22 nt, Human
ccagucacagguguguuuauau

SEQ ID NO: 375824 - RNA, 23 nt, Human
cccagcagagaugaggagggguc

SEQ ID NO: 375825 - RNA, 22 nt, Human
uaguuaaaauaauggagauguu

SEQ ID NO: 375826 - RNA, 22 nt, Human
ugaagcagcaccauuuuagagc

SEQ ID NO: 375827 - RNA, 22 nt, Human
aggccugggacgggagccguga

SEQ ID NO: 375828 - RNA, 22 nt, Human
uuauuuuuaaaaguucacacag

SEQ ID NO: 375829 - RNA, 22 nt, Human
gaaggcaggcuucugauuaggu

SEQ ID NO: 375830 - RNA, 21 nt, Human
gacaaagugaagcaggcagga

SEQ ID NO: 375831 - RNA, 22 nt, Human
aguucucagcuuaguaugcugu

SEQ ID NO: 375832 - RNA, 22 nt, Human
uuaugcuaaaugaaucaaguca

SEQ ID NO: 375833 - RNA, 22 nt, Human
agcucagcuuccucuccaugcu

SEQ ID NO: 375834 - RNA, 22 nt, Human
cuggcucaggaaaguugcugcu

SEQ ID NO: 375835 - RNA, 22 nt, Human
gaggagagaacauuccuccaua

SEQ ID NO: 375836 - RNA, 22 nt, Human
caaauucacaugauugcuucug

SEQ ID NO: 375837 - RNA, 22 nt, Human
ucccaggaugaagacaguguug

SEQ ID NO: 375838 - RNA, 19 nt, Human
ugcccaggccagguugggc

SEQ ID NO: 375839 - RNA, 22 nt, Human
acacauuucuaaauuuuuaccg

SEQ ID NO: 375840 - RNA, 22 nt, Human
ccagggcaggggcuggaguuca

SEQ ID NO: 375841 - RNA, 22 nt, Human
ucuucucccaucuccaggcagg

SEQ ID NO: 375842 - RNA, 22 nt, Human
aggcucagcaucugauucauau

SEQ ID NO: 375843 - RNA, 22 nt, Human
ugcagauucaaaugaaaugcaa

SEQ ID NO: 375844 - RNA, 22 nt, Human
ccacagggacuguuaaaacccu

SEQ ID NO: 375845 - RNA, 22 nt, Human
cucacugcccugaaguuggguu

SEQ ID NO: 375846 - RNA, 22 nt, Human
uagcagcuuccagagagggcag

SEQ ID NO: 375847 - RNA, 21 nt, Human
auuucagagcacacaaguaaa

SEQ ID NO: 375848 - RNA, 22 nt, Human
cucaggaggaggaaguucauug

SEQ ID NO: 375849 - RNA, 22 nt, Human
caaaagaagcucuuggggcuag

SEQ ID NO: 375850 - RNA, 22 nt, Human
ucucugaagauauuuauuauua

SEQ ID NO: 375851 - RNA, 22 nt, Human
cagggugggcacccagccucca

SEQ ID NO: 375852 - RNA, 22 nt, Human
uccuggccuugcuccugaugcc

SEQ ID NO: 375853 - RNA, 22 nt, Human
aaggaagauauaucaagcuuaa

SEQ ID NO: 375854 - RNA, 22 nt, Human
ugaccuauuagauuuccuugcc

SEQ ID NO: 375855 - RNA, 22 nt, Human
ucagagcuaaggggagagcaaa

SEQ ID NO: 375856 - RNA, 22 nt, Human
cugggaggcggagguuguagug

SEQ ID NO: 375857 - RNA, 22 nt, Human
agggcucuguccccagaggccc

SEQ ID NO: 375858 - RNA, 22 nt, Human
auuauaaaccuuugaggguggg

SEQ ID NO: 375859 - RNA, 22 nt, Human
acagcuugcaauggcuuucaac

SEQ ID NO: 375860 - RNA, 22 nt, Human
ugcuguguucuccugacucacc

SEQ ID NO: 375861 - RNA, 22 nt, Human
ccugcaggggagagacuucuag

SEQ ID NO: 375862 - RNA, 21 nt, Human
gcagagccugagguucuugag

SEQ ID NO: 375863 - RNA, 22 nt, Human
gcagagccccauugcuggcggg

SEQ ID NO: 375864 - RNA, 22 nt, Human
aacauacauauuucagugucca

SEQ ID NO: 375865 - RNA, 22 nt, Human
auggggugagacuaggauuaaa

SEQ ID NO: 375866 - RNA, 22 nt, Human
uggcagggccuaccccaauauc

SEQ ID NO: 375867 - RNA, 22 nt, Human
cagucucuaaaucaaucugaau

SEQ ID NO: 375868 - RNA, 22 nt, Human
gcccaggaguugaagggcugac

SEQ ID NO: 375869 - RNA, 20 nt, Human
gggagaagggcugaugagag

SEQ ID NO: 375870 - RNA, 22 nt, Human
ggccucagugggccgcugcagg

SEQ ID NO: 375871 - RNA, 22 nt, Human
cuuuaagagaucaccaaucaca

SEQ ID NO: 375872 - RNA, 22 nt, Human
acagaacugcaggaggaaaagc

SEQ ID NO: 375873 - RNA, 22 nt, Human
cucuggcuucuaccuugcaguu

SEQ ID NO: 375874 - RNA, 22 nt, Human
uacaaaguauauuucuagcugu

SEQ ID NO: 375875 - RNA, 22 nt, Human
agaagccauucccuguaggcuc

SEQ ID NO: 375876 - RNA, 22 nt, Human
agugggcagugcgcucggaugc

SEQ ID NO: 375877 - RNA, 22 nt, Human
aggugucuuugcggcccgccgc

SEQ ID NO: 375878 - RNA, 21 nt, Human
ccuggcugcacaguugcuggu

SEQ ID NO: 375879 - RNA, 22 nt, Human
aggugucugggcuuuggaguca

SEQ ID NO: 375880 - RNA, 22 nt, Human
ggcugggagcuggacaggccgg

SEQ ID NO: 375881 - RNA, 22 nt, Human
ugcucugugguccaagauggcu

SEQ ID NO: 375882 - RNA, 22 nt, Human
uaagaaacccaggaauuucuua

SEQ ID NO: 375883 - RNA, 22 nt, Human
uugggcuggcagagguggucuu

SEQ ID NO: 375884 - RNA, 23 nt, Human
uacaugcuauaauuucacccuca

SEQ ID NO: 375885 - RNA, 22 nt, Human
agccuggaggccaggagacagu

SEQ ID NO: 375886 - RNA, 22 nt, Human
acuuaaaaagaaucuuuucacg

SEQ ID NO: 375887 - RNA, 22 nt, Human
uggcucagugaagagauaacuu

SEQ ID NO: 375888 - RNA, 22 nt, Human
uccccagccgugaaggagagga

SEQ ID NO: 375889 - RNA, 22 nt, Human
gccucugcaugcucagcaccca

SEQ ID NO: 375890 - RNA, 22 nt, Human
cuguccuggagggcauaggacg

SEQ ID NO: 375891 - RNA, 22 nt, Human
cucccugggccucaguuucucu

SEQ ID NO: 375892 - RNA, 22 nt, Human
gggcugcuuauacugaugauaa

SEQ ID NO: 375893 - RNA, 22 nt, Human
gagccagguuggaggcugcagu

SEQ ID NO: 375894 - RNA, 22 nt, Human
cugcuguggaugcaggaccuca

SEQ ID NO: 375895 - RNA, 22 nt, Human
aguggugcugcgcgcggagcuc

SEQ ID NO: 375896 - RNA, 22 nt, Human
cagagguagaaggcaugcagug

SEQ ID NO: 375897 - RNA, 22 nt, Human
uggaggccagagguacugggac

SEQ ID NO: 375898 - RNA, 22 nt, Human
gagggcaguagccucguacccu

SEQ ID NO: 375899 - RNA, 22 nt, Human
ugccaggaggaggugggacaga

SEQ ID NO: 375900 - RNA, 22 nt, Human
gcccuuccaacccagagggcaa

SEQ ID NO: 375901 - RNA, 22 nt, Human
cuggcucaauaaauauuagcug

SEQ ID NO: 375902 - RNA, 22 nt, Human
augauuuccaguuguugcuaag

SEQ ID NO: 375903 - RNA, 22 nt, Human
auucuucagaauaucuggcacu

SEQ ID NO: 375904 - RNA, 22 nt, Human
gcucucuggaggccauggacag

SEQ ID NO: 375905 - RNA, 22 nt, Human
acgugcaggaucugguuggcga

SEQ ID NO: 375906 - RNA, 19 nt, Human
agcuguggaugugggauuu

SEQ ID NO: 375907 - RNA, 22 nt, Human
uuaaacagguuuuugaauggcc

SEQ ID NO: 375908 - RNA, 22 nt, Human
aaaguucaugguguuauagaaa

SEQ ID NO: 375909 - RNA, 22 nt, Human
aggguccugggugcaguugcuu

SEQ ID NO: 375910 - RNA, 22 nt, Human
uuucauguuuauggaaaaugag

SEQ ID NO: 375911 - RNA, 22 nt, Human
uucauugugauucuuggcuagc

SEQ ID NO: 375912 - RNA, 22 nt, Human
uguacaaugccagggaacacca

SEQ ID NO: 375913 - RNA, 22 nt, Human
ccagggcaucacauccaguguu

SEQ ID NO: 375914 - RNA, 22 nt, Human
cagagccaacgccaccugccca

SEQ ID NO: 375915 - RNA, 22 nt, Human
agaauuuuugauuaucuacucg

SEQ ID NO: 375916 - RNA, 20 nt, Human
ggccugagcauggcuggcag

SEQ ID NO: 375917 - RNA, 22 nt, Human
gaagcagcugccagagaugucu

SEQ ID NO: 375918 - RNA, 22 nt, Human
aaugcugcucucauaauuauag

SEQ ID NO: 375919 - RNA, 22 nt, Human
cuauuacauuucuggacauuca

SEQ ID NO: 375920 - RNA, 22 nt, Human
ugucccagacauaaguggacau

SEQ ID NO: 375921 - RNA, 22 nt, Human
ccucaggauccgcaggugcagu

SEQ ID NO: 375922 - RNA, 22 nt, Human
ugggcucugugccagguuggug

SEQ ID NO: 375923 - RNA, 22 nt, Human
gcaguucuacuuauccauagac

SEQ ID NO: 375924 - RNA, 22 nt, Human
agagggaaugugauugcaccau

SEQ ID NO: 375925 - RNA, 22 nt, Human
gccaguggucacugaggaagaa

SEQ ID NO: 375926 - RNA, 22 nt, Human
cuguagccagaagcagaaggcc

SEQ ID NO: 375927 - RNA, 22 nt, Human
gaugggaggaaccugggucccu

SEQ ID NO: 375928 - RNA, 22 nt, Human
agggcuggcaucucuaaugcug

SEQ ID NO: 375929 - RNA, 22 nt, Human
uuauucugcacuuuuaaaauau

SEQ ID NO: 375930 - RNA, 22 nt, Human
gccuuggcugaugugcgaauga

SEQ ID NO: 375931 - RNA, 22 nt, Human
auccucagaccucagcaaagcc

SEQ ID NO: 375932 - RNA, 22 nt, Human
gaguuauucuagguccuuugua

SEQ ID NO: 375933 - RNA, 22 nt, Human
uugugaaacauucauggauuug

SEQ ID NO: 375934 - RNA, 22 nt, Human
gagacacagagaggcuguguga

SEQ ID NO: 375935 - RNA, 22 nt, Human
agaaaaggauugauggaucaga

SEQ ID NO: 375936 - RNA, 22 nt, Human
ugugcuucagguugucgccacg

SEQ ID NO: 375937 - RNA, 22 nt, Human
cugcucuggcuguguacuucag

SEQ ID NO: 375938 - RNA, 22 nt, Human
aucuggcucgcuaggcucuggg

SEQ ID NO: 375939 - RNA, 22 nt, Human
ccaaagucugcauuuuaacaug

SEQ ID NO: 375940 - RNA, 22 nt, Human
ccagcuugaagaugugcugguu

SEQ ID NO: 375941 - RNA, 22 nt, Human
auauucuucuuguucagacuau

SEQ ID NO: 375942 - RNA, 22 nt, Human
ggagucaccaaguaggagucuu

SEQ ID NO: 375943 - RNA, 22 nt, Human
aucugccucuucuucauugcga

SEQ ID NO: 375944 - RNA, 22 nt, Human
uaucuguuggcuccuaguugua

SEQ ID NO: 375945 - RNA, 22 nt, Human
aaaugguauuuacucuguauua

SEQ ID NO: 375946 - RNA, 22 nt, Human
uacccaggagaaacagcagggc

SEQ ID NO: 375947 - RNA, 22 nt, Human
aauccagguggcggagguugug

SEQ ID NO: 375948 - RNA, 22 nt, Human
ucucucagcuuugagaccugcu

SEQ ID NO: 375949 - RNA, 22 nt, Human
ggucccagguugacagggagac

SEQ ID NO: 375950 - RNA, 22 nt, Human
guccaugauucuguguaguaga

SEQ ID NO: 375951 - RNA, 19 nt, Human
acacagggaucagaggguu

SEQ ID NO: 375952 - RNA, 22 nt, Human
aaugagcuagaccugcuuccuc

SEQ ID NO: 375953 - RNA, 20 nt, Human
accaggagauggaggcaggg

SEQ ID NO: 375954 - RNA, 22 nt, Human
gcagaggcuguagggaagguug

SEQ ID NO: 375955 - RNA, 22 nt, Human
aggggcaguuccaaguuuugug

SEQ ID NO: 375956 - RNA, 22 nt, Human
cagggcccaggccacuggguug

SEQ ID NO: 375957 - RNA, 22 nt, Human
ugccacccagccaggaguggga

SEQ ID NO: 375958 - RNA, 18 nt, Human
ugcucuguuuaaugauuu

SEQ ID NO: 375959 - RNA, 22 nt, Human
cacagaggcaaccuucuggggu

SEQ ID NO: 375960 - RNA, 22 nt, Human
auggcauuugaccgcuuugugg

SEQ ID NO: 375961 - RNA, 22 nt, Human
gccugggugaauuugauccuaa

SEQ ID NO: 375962 - RNA, 22 nt, Human
uaugcacacauuagcacagggu

SEQ ID NO: 375963 - RNA, 22 nt, Human
aauuuccaaauuucugucacac

SEQ ID NO: 375964 - RNA, 18 nt, Human
augggaggggccaagaga

SEQ ID NO: 375965 - RNA, 22 nt, Human
uaugauuuguagacauuugauu

SEQ ID NO: 375966 - RNA, 22 nt, Human
uacuagaaccucacaacaaucc

SEQ ID NO: 375967 - RNA, 22 nt, Human
ucucaggaaauaggauuugagu

SEQ ID NO: 375968 - RNA, 22 nt, Human
agcuggcagcucucagggguac

SEQ ID NO: 375969 - RNA, 22 nt, Human
acugcagcaaagcccgugucuu

SEQ ID NO: 375970 - RNA, 22 nt, Human
ccagagucuaugaguccucauu

SEQ ID NO: 375971 - RNA, 23 nt, Human
gcugcagcuguggauguucucag

SEQ ID NO: 375972 - RNA, 22 nt, Human
ccacaggggcccacgagccgcu

SEQ ID NO: 375973 - RNA, 22 nt, Human
cagccagggagggcaaaugaga

SEQ ID NO: 375974 - RNA, 22 nt, Human
caccugcaaggagcuuucauuu

SEQ ID NO: 375975 - RNA, 22 nt, Human
ucucccaggugggugccuggag

SEQ ID NO: 375976 - RNA, 22 nt, Human
ugugaauagugccgcaauaaac

SEQ ID NO: 375977 - RNA, 22 nt, Human
aaucaagucaaccaucaugugc

SEQ ID NO: 375978 - RNA, 22 nt, Human
augcugugucaccuuaggauuu

SEQ ID NO: 375979 - RNA, 22 nt, Human
cauuuacacacagaggugugcu

SEQ ID NO: 375980 - RNA, 22 nt, Human
cagccccucacagagcuguccu

SEQ ID NO: 375981 - RNA, 23 nt, Human
auguauuuaaauuucagugauga

SEQ ID NO: 375982 - RNA, 22 nt, Human
aggugagugugacugcaagaga

SEQ ID NO: 375983 - RNA, 22 nt, Human
ucuggccuacuggaguccauga

SEQ ID NO: 375984 - RNA, 22 nt, Human
cugagggcccugaagcuuggca

SEQ ID NO: 375985 - RNA, 22 nt, Human
gcuggccuccugcuagauggaa

SEQ ID NO: 375986 - RNA, 22 nt, Human
aagggccuccuggggagccugg

SEQ ID NO: 375987 - RNA, 22 nt, Human
cuggccuggucuggccucucca

SEQ ID NO: 375988 - RNA, 22 nt, Human
aguaaaucagaccucauuaugu

SEQ ID NO: 375989 - RNA, 22 nt, Human
aagaggaacugggggcugaguc

SEQ ID NO: 375990 - RNA, 19 nt, Human
gcuuuggagggagguucua

SEQ ID NO: 375991 - RNA, 22 nt, Human
gagugcaucguggccauuuuaa

SEQ ID NO: 375992 - RNA, 22 nt, Human
agcagcaggcuguguggacuga

SEQ ID NO: 375993 - RNA, 22 nt, Human
agaauucuccuucagggcagga

SEQ ID NO: 375994 - RNA, 22 nt, Human
uucacauuagugguucuauaua

SEQ ID NO: 375995 - RNA, 22 nt, Human
uuccucagacccucauugugag

SEQ ID NO: 375996 - RNA, 22 nt, Human
uguacaaucuuggucccuuuau

SEQ ID NO: 375997 - RNA, 22 nt, Human
augcuuuuaugucacaugguca

SEQ ID NO: 375998 - RNA, 22 nt, Human
auuccaaaaggauguuagaaug

SEQ ID NO: 375999 - RNA, 22 nt, Human
gaguggggcccacugcugggug

SEQ ID NO: 376000 - RNA, 22 nt, Human
ccagagcuccagggcuacagaa

SEQ ID NO: 376001 - RNA, 22 nt, Human
aggugaguugguaggaaguuug

SEQ ID NO: 376002 - RNA, 22 nt, Human
uuuauaaacaguaccacggugc

SEQ ID NO: 376003 - RNA, 22 nt, Human
gccuggagaagauggaacuagc

SEQ ID NO: 376004 - RNA, 22 nt, Human
ggugggugagcccugggagcug

SEQ ID NO: 376005 - RNA, 22 nt, Human
accaggagagauuuuauugaga

SEQ ID NO: 376006 - RNA, 22 nt, Human
agcccagcaaagggagguucag

SEQ ID NO: 376007 - RNA, 22 nt, Human
aggaccauccuaagguaggcaa

SEQ ID NO: 376008 - RNA, 22 nt, Human
uuuuaguguagucaccgugggu

SEQ ID NO: 376009 - RNA, 22 nt, Human
cacugaaucucaaggggagggu

SEQ ID NO: 376010 - RNA, 22 nt, Human
aucagaagcuuguagucucucu

SEQ ID NO: 376011 - RNA, 22 nt, Human
ucauugcauuuauucacuggca

SEQ ID NO: 376012 - RNA, 22 nt, Human
aggagccaguuccaccccagga

SEQ ID NO: 376013 - RNA, 19 nt, Human
gggaugggcccucacccuc

SEQ ID NO: 376014 - RNA, 19 nt, Human
uuagccauccacagugaaa

SEQ ID NO: 376015 - RNA, 20 nt, Human
guaaugaauguaaacaguaa

SEQ ID NO: 376016 - RNA, 22 nt, Human
uggauuuaguucuucacaggcc

SEQ ID NO: 376017 - RNA, 22 nt, Human
aauacaagauuuauaguuguuu

SEQ ID NO: 376018 - RNA, 22 nt, Human
gggauuugugggauggccagug

SEQ ID NO: 376019 - RNA, 22 nt, Human
aguuuucuguucuacaauuuga

SEQ ID NO: 376020 - RNA, 22 nt, Human
ugagccuguccugugcauguga

SEQ ID NO: 376021 - RNA, 22 nt, Human
uucacagacuuuccauagauug

SEQ ID NO: 376022 - RNA, 20 nt, Human
agaaucugacccagagagac

SEQ ID NO: 376023 - RNA, 22 nt, Human
agcugguuagcaaucuaaguga

SEQ ID NO: 376024 - RNA, 22 nt, Human
caucagagugguggccuggugu

SEQ ID NO: 376025 - RNA, 22 nt, Human
aagccagguguuuaggccagcg

SEQ ID NO: 376026 - RNA, 22 nt, Human
cccaggagguggagguugcagu

SEQ ID NO: 376027 - RNA, 22 nt, Human
cugaacucuuuaugacagcuug

SEQ ID NO: 376028 - RNA, 22 nt, Human
augugacaauauuuggucuuau

SEQ ID NO: 376029 - RNA, 22 nt, Human
ccacagggucagccacucugca

SEQ ID NO: 376030 - RNA, 22 nt, Human
agccauccuacuaccucagcau

SEQ ID NO: 376031 - RNA, 20 nt, Human
acaauagauuugagcaaagu

SEQ ID NO: 376032 - RNA, 22 nt, Human
aagagagggguugcauggaaau

SEQ ID NO: 376033 - RNA, 22 nt, Human
ucucagagggaggauuacugcc

SEQ ID NO: 376034 - RNA, 22 nt, Human
ugcaugcauaaauguacacaca

SEQ ID NO: 376035 - RNA, 22 nt, Human
cagccaucccagccugugguuc

SEQ ID NO: 376036 - RNA, 20 nt, Human
ucccaaggaugccugggugu

SEQ ID NO: 376037 - RNA, 22 nt, Human
ugagcaguaacagcucacaggg

SEQ ID NO: 376038 - RNA, 22 nt, Human
ucaaaggcauugccaauaagua

SEQ ID NO: 376039 - RNA, 22 nt, Human
ggcuccacccugcuuccagaag

SEQ ID NO: 376040 - RNA, 22 nt, Human
gcugccugccuaguuccacagu

SEQ ID NO: 376041 - RNA, 22 nt, Human
aucuaaaaggagcucuuuaucu

SEQ ID NO: 376042 - RNA, 22 nt, Human
agcaccuguugcacuucauaau

SEQ ID NO: 376043 - RNA, 22 nt, Human
uggcagcucauuuggaaaugga

SEQ ID NO: 376044 - RNA, 22 nt, Human
uguaucaaggguuuauguaagc

SEQ ID NO: 376045 - RNA, 22 nt, Human
gcagaggauagcauaugaaccu

SEQ ID NO: 376046 - RNA, 22 nt, Human
auacauacauguacacauaaau

SEQ ID NO: 376047 - RNA, 22 nt, Human
ucuccgaucacagguuuucaau

SEQ ID NO: 376048 - RNA, 22 nt, Human
gcagaugguggggcaggaaaau

SEQ ID NO: 376049 - RNA, 22 nt, Human
ucucagaggucuucagccucug

SEQ ID NO: 376050 - RNA, 22 nt, Human
cgcauacauagaaacacacaga

SEQ ID NO: 376051 - RNA, 22 nt, Human
gaacaguaucaguagugccagu

SEQ ID NO: 376052 - RNA, 22 nt, Human
aaagccaucuguauuaagugaa

SEQ ID NO: 376053 - RNA, 22 nt, Human
ggcagcuggguuggccagaaac

SEQ ID NO: 376054 - RNA, 22 nt, Human
aguaaaauuguauuggaaaaca

SEQ ID NO: 376055 - RNA, 22 nt, Human
ugccuguguccccuucuuggca

SEQ ID NO: 376056 - RNA, 22 nt, Human
acaaagguggaccauguggcuu

SEQ ID NO: 376057 - RNA, 22 nt, Human
agccccaguaagggagggccug

SEQ ID NO: 376058 - RNA, 22 nt, Human
gcuggaggaucacuugagccca

SEQ ID NO: 376059 - RNA, 22 nt, Human
uggcucaguggcagccgcagcu

SEQ ID NO: 376060 - RNA, 23 nt, Human
cauguacacacagcuguacagug

SEQ ID NO: 376061 - RNA, 22 nt, Human
uguacaauguggccaguguuaa

SEQ ID NO: 376062 - RNA, 22 nt, Human
ucugggaagcugcgugccuguu

SEQ ID NO: 376063 - RNA, 19 nt, Human
cccucaggucugagcaguc

SEQ ID NO: 376064 - RNA, 22 nt, Human
uuuccaagacuccaguucuccc

SEQ ID NO: 376065 - RNA, 22 nt, Human
gccugagacagugugguccaau

SEQ ID NO: 376066 - RNA, 22 nt, Human
uggaagugcucuucugaccaac

SEQ ID NO: 376067 - RNA, 22 nt, Human
acaaauguggacauggauaaug

SEQ ID NO: 376068 - RNA, 22 nt, Human
uauuucccagggagcaacaagc

SEQ ID NO: 376069 - RNA, 17 nt, Human
gccaggagguuugagcu

SEQ ID NO: 376070 - RNA, 22 nt, Human
uuuauauuucccaggauuggcc

SEQ ID NO: 376071 - RNA, 22 nt, Human
gagggcucaacuacuacuaggc

SEQ ID NO: 376072 - RNA, 22 nt, Human
uuuauuauguacaggcacuaua

SEQ ID NO: 376073 - RNA, 22 nt, Human
uagcagggaagaugaucagaau

SEQ ID NO: 376074 - RNA, 19 nt, Human
gcugugugaccuugggcaa

SEQ ID NO: 376075 - RNA, 22 nt, Human
ggugcugguucaggguggcugu

SEQ ID NO: 376076 - RNA, 21 nt, Human
ucccagagugcuugggacugc

SEQ ID NO: 376077 - RNA, 22 nt, Human
gccagcugcuggaacagcgcga

SEQ ID NO: 376078 - RNA, 22 nt, Human
ugaaaucuacccuauucagggu

SEQ ID NO: 376079 - RNA, 22 nt, Human
uugcaggggaaggagcagagcu

SEQ ID NO: 376080 - RNA, 21 nt, Human
cagaggcagguccugggacgg

SEQ ID NO: 376081 - RNA, 22 nt, Human
uuggaucacucugaagccuuac

SEQ ID NO: 376082 - RNA, 22 nt, Human
uaaaaguauacuuucaaaggag

SEQ ID NO: 376083 - RNA, 22 nt, Human
ugcuggcugggcugcuggagac

SEQ ID NO: 376084 - RNA, 22 nt, Human
uguauuuucugaagauaaucaa

SEQ ID NO: 376085 - RNA, 22 nt, Human
accaggagggacccugguggcc

SEQ ID NO: 376086 - RNA, 22 nt, Human
cagcuuggcuuccgcuuuacug

SEQ ID NO: 376087 - RNA, 22 nt, Human
uggcagaggaaaaagucacugg

SEQ ID NO: 376088 - RNA, 22 nt, Human
aggcuuuaauuaucuacaggag

SEQ ID NO: 376089 - RNA, 22 nt, Human
ggaucauuaacacauccaucac

SEQ ID NO: 376090 - RNA, 22 nt, Human
gcuuuuauugucuuuacgacga

SEQ ID NO: 376091 - RNA, 22 nt, Human
aaagacuuggcuuaugauuugc

SEQ ID NO: 376092 - RNA, 22 nt, Human
cagaggccuauccaguguccau

SEQ ID NO: 376093 - RNA, 22 nt, Human
caaggccacugcucagguuucc

SEQ ID NO: 376094 - RNA, 22 nt, Human
agaaaauuagauuuuacugugu

SEQ ID NO: 376095 - RNA, 22 nt, Human
ccacagaaaguugucuagagua

SEQ ID NO: 376096 - RNA, 22 nt, Human
uucaacuuuaugcauauguauu

SEQ ID NO: 376097 - RNA, 22 nt, Human
cauugcacucuggcuggaacgg

SEQ ID NO: 376098 - RNA, 22 nt, Human
gaguccuugacacauaguaggu

SEQ ID NO: 376099 - RNA, 22 nt, Human
ucaggcagaugcagggauggau

SEQ ID NO: 376100 - RNA, 20 nt, Human
uccagccacuuccgcugguc

SEQ ID NO: 376101 - RNA, 22 nt, Human
uugcauuuaaguagauguuaca

SEQ ID NO: 376102 - RNA, 22 nt, Human
uggcucagugacauuccuccca

SEQ ID NO: 376103 - RNA, 22 nt, Human
gccaggcuguggggaacuugaa

SEQ ID NO: 376104 - RNA, 22 nt, Human
auggauaauggugauaguugca

SEQ ID NO: 376105 - RNA, 22 nt, Human
uccucugcucagcauuccucac

SEQ ID NO: 376106 - RNA, 22 nt, Human
uggcugagugauauuugcaaag

SEQ ID NO: 376107 - RNA, 22 nt, Human
gcagggcuguucaggagggugg

SEQ ID NO: 376108 - RNA, 19 nt, Human
ccaggccugcgggcguugg

SEQ ID NO: 376109 - RNA, 22 nt, Human
ugucccagguccuagaugacca

SEQ ID NO: 376110 - RNA, 22 nt, Human
accagaguaauguguggaaauu

SEQ ID NO: 376111 - RNA, 22 nt, Human
uccauccauguaggaagauggu

SEQ ID NO: 376112 - RNA, 22 nt, Human
gugagcaggauaggggcucccu

SEQ ID NO: 376113 - RNA, 22 nt, Human
uuuccuucaucaucugagagcu

SEQ ID NO: 376114 - RNA, 22 nt, Human
cugugcccuggccaggccucuc

SEQ ID NO: 376115 - RNA, 22 nt, Human
agaguggggaagguguugagaa

SEQ ID NO: 376116 - RNA, 22 nt, Human
agugucauuccagggacccucg

SEQ ID NO: 376117 - RNA, 22 nt, Human
cugguuuagcuguaagguuccc

SEQ ID NO: 376118 - RNA, 22 nt, Human
gcagaggccaucaacuuugcca

SEQ ID NO: 376119 - RNA, 22 nt, Human
ggcugccugccuccaagccggg

SEQ ID NO: 376120 - RNA, 22 nt, Human
uuugcauuuauaaguuggugga

SEQ ID NO: 376121 - RNA, 22 nt, Human
cagcuuucaucagugacacuca

SEQ ID NO: 376122 - RNA, 18 nt, Human
cugagggcagccccuggg

SEQ ID NO: 376123 - RNA, 22 nt, Human
ggcuccagggaguggagagaag

SEQ ID NO: 376124 - RNA, 20 nt, Human
uccaguggccugaaucugga

SEQ ID NO: 376125 - RNA, 19 nt, Human
ugggccugcaucugggucu

SEQ ID NO: 376126 - RNA, 19 nt, Human
auuucaagagguuuauugg

SEQ ID NO: 376127 - RNA, 22 nt, Human
aacugcuguggccuaguacuua

SEQ ID NO: 376128 - RNA, 22 nt, Human
ggauggagaugaccauggugac

SEQ ID NO: 376129 - RNA, 22 nt, Human
ugccaggauggccagggggcca

SEQ ID NO: 376130 - RNA, 22 nt, Human
agggaggaaggauguuccaaag

SEQ ID NO: 376131 - RNA, 22 nt, Human
cuccagggcagcauggcagugg

SEQ ID NO: 376132 - RNA, 22 nt, Human
auaagguaugaaaaguaaaugg

SEQ ID NO: 376133 - RNA, 22 nt, Human
agcagccacagucugggacagg

SEQ ID NO: 376134 - RNA, 22 nt, Human
cccaggcagugugugcaugcgu

SEQ ID NO: 376135 - RNA, 22 nt, Human
agaagccauugaagcagaccuc

SEQ ID NO: 376136 - RNA, 22 nt, Human
ugccagggugucaggagagcua

SEQ ID NO: 376137 - RNA, 22 nt, Human
aguauuucuaguugguucuacu

SEQ ID NO: 376138 - RNA, 22 nt, Human
guuagggagggugcauaugugu

SEQ ID NO: 376139 - RNA, 22 nt, Human
ugcguugcgcuccugcagcagg

SEQ ID NO: 376140 - RNA, 22 nt, Human
cagcagcaaggugaggguggag

SEQ ID NO: 376141 - RNA, 22 nt, Human
uuucaacuugaagaauugauac

SEQ ID NO: 376142 - RNA, 22 nt, Human
gggauggcuuuguggcugacuc

SEQ ID NO: 376143 - RNA, 22 nt, Human
cugcccugagucaugccagaug

SEQ ID NO: 376144 - RNA, 22 nt, Human
ggcucuggcaaggggaggcuac

SEQ ID NO: 376145 - RNA, 22 nt, Human
ucccagcauuaaugccugucag

SEQ ID NO: 376146 - RNA, 22 nt, Human
auaugucgcuacaucauuagau

SEQ ID NO: 376147 - RNA, 22 nt, Human
caaggcugugcaggguccauau

SEQ ID NO: 376148 - RNA, 22 nt, Human
uaacaguguggacuugagaucu

SEQ ID NO: 376149 - RNA, 22 nt, Human
aauucuuguuguuaguauauuu

SEQ ID NO: 376150 - RNA, 20 nt, Human
agccugccagcuggcccaga

SEQ ID NO: 376151 - RNA, 22 nt, Human
gggcucagccccauugaaccag

SEQ ID NO: 376152 - RNA, 22 nt, Human
gccagguggagguugcagugag

SEQ ID NO: 376153 - RNA, 22 nt, Human
cagcauugaucccaggcugugg

SEQ ID NO: 376154 - RNA, 20 nt, Human
cucuggcuccgcgugaccgc

SEQ ID NO: 376155 - RNA, 22 nt, Human
ugaggugaagaguggagcucag

SEQ ID NO: 376156 - RNA, 22 nt, Human
uauauuuaaauccagguugaaa

SEQ ID NO: 376157 - RNA, 22 nt, Human
ugcuuggcuuucugagcuucug

SEQ ID NO: 376158 - RNA, 22 nt, Human
uucuguuuuagaaauaaguagu

SEQ ID NO: 376159 - RNA, 22 nt, Human
ugucucaggggcauugaaauaa

SEQ ID NO: 376160 - RNA, 23 nt, Human
acuuuauccuauaucuuuguucu

SEQ ID NO: 376161 - RNA, 22 nt, Human
agaucaguuagauagcuugaug

SEQ ID NO: 376162 - RNA, 22 nt, Human
ucacauuugcaauugcauuguu

SEQ ID NO: 376163 - RNA, 22 nt, Human
ucuuuccuuagaauaauucuuu

SEQ ID NO: 376164 - RNA, 22 nt, Human
uuucaucucucuaaaagacagu

SEQ ID NO: 376165 - RNA, 22 nt, Human
ugcagccuugccuccucccagc

SEQ ID NO: 376166 - RNA, 20 nt, Human
gcccuggagccuuguccugg

SEQ ID NO: 376167 - RNA, 22 nt, Human
uuucacacaacgugaauauacu

SEQ ID NO: 376168 - RNA, 20 nt, Human
acugccuugguucaguaggu

SEQ ID NO: 376169 - RNA, 22 nt, Human
uuugaacaugcugcaugauaau

SEQ ID NO: 376170 - RNA, 22 nt, Human
agcaucuggugagggccuaguu

SEQ ID NO: 376171 - RNA, 22 nt, Human
aagguacaaaguauuauuuaaa

SEQ ID NO: 376172 - RNA, 22 nt, Human
gcacagggagacagccguggcc

SEQ ID NO: 376173 - RNA, 22 nt, Human
auguaaaucaagcagugcuggu

SEQ ID NO: 376174 - RNA, 22 nt, Human
ucccuggaacagagagacaacg

SEQ ID NO: 376175 - RNA, 22 nt, Human
ggcucuggugcccuggcuccca

SEQ ID NO: 376176 - RNA, 22 nt, Human
cuuacauuaaguaagagauuga

SEQ ID NO: 376177 - RNA, 22 nt, Human
uugcucaggcuuagagcuacua

SEQ ID NO: 376178 - RNA, 22 nt, Human
ggcagcuuguccuggaggaugg

SEQ ID NO: 376179 - RNA, 22 nt, Human
uuuguagaggguaauugacaga

SEQ ID NO: 376180 - RNA, 22 nt, Human
uggcucaguagcagugugguca

SEQ ID NO: 376181 - RNA, 22 nt, Human
ggaaagagcccagcagugcuug

SEQ ID NO: 376182 - RNA, 22 nt, Human
auaaggcagugacuucaucuau

SEQ ID NO: 376183 - RNA, 22 nt, Human
ucugucacccagagugcagugg

SEQ ID NO: 376184 - RNA, 22 nt, Human
gcucucugaggugcuggcagag

SEQ ID NO: 376185 - RNA, 22 nt, Human
agagcagccugugaugaugcac

SEQ ID NO: 376186 - RNA, 21 nt, Human
ucccugcuuucuggcccaguc

SEQ ID NO: 376187 - RNA, 22 nt, Human
gagcacugagcuggaauuggag

SEQ ID NO: 376188 - RNA, 22 nt, Human
aucuagaaaguguugaagauca

SEQ ID NO: 376189 - RNA, 22 nt, Human
accugcaguggccacuccuaau

SEQ ID NO: 376190 - RNA, 22 nt, Human
auuuccuagccucucuugcagu

SEQ ID NO: 376191 - RNA, 21 nt, Human
ucaggcaggcgcagagggaag

SEQ ID NO: 376192 - RNA, 23 nt, Human
ggcucugugcugggccugcagga

SEQ ID NO: 376193 - RNA, 22 nt, Human
ugccugagugauguggcagcca

SEQ ID NO: 376194 - RNA, 22 nt, Human
agucacuguucugucaugucaa

SEQ ID NO: 376195 - RNA, 22 nt, Human
aaaacagacagccaguguagag

SEQ ID NO: 376196 - RNA, 22 nt, Human
cccaggucugccagccuguggg

SEQ ID NO: 376197 - RNA, 22 nt, Human
cagagccagcccacuguucccg

SEQ ID NO: 376198 - RNA, 22 nt, Human
ccaggcagcucugauuuauguc

SEQ ID NO: 376199 - RNA, 22 nt, Human
ccaguacugucuccaauauucc

SEQ ID NO: 376200 - RNA, 21 nt, Human
gcaggggauagaaauggucug

SEQ ID NO: 376201 - RNA, 20 nt, Human
cugccaugauugauagagug

SEQ ID NO: 376202 - RNA, 23 nt, Human
agcuggaggcugucuacucccaa

SEQ ID NO: 376203 - RNA, 22 nt, Human
ucaaugauaguacaaucagccu

SEQ ID NO: 376204 - RNA, 18 nt, Human
aaugcacacauuuacucc

SEQ ID NO: 376205 - RNA, 22 nt, Human
ggaggccaggaaggcucggaga

SEQ ID NO: 376206 - RNA, 22 nt, Human
agagugcaaccgaaacaagcag

SEQ ID NO: 376207 - RNA, 22 nt, Human
uaaaugugcacuuuacuuuuca

SEQ ID NO: 376208 - RNA, 22 nt, Human
ugggcagcauccuccacaguca

SEQ ID NO: 376209 - RNA, 22 nt, Human
ggcagcuguaagaugagugaau

SEQ ID NO: 376210 - RNA, 21 nt, Human
ccucuggcuugugcugugccc

SEQ ID NO: 376211 - RNA, 22 nt, Human
caacagagagaccagaaacagg

SEQ ID NO: 376212 - RNA, 21 nt, Human
cucaggauggcggccuggugg

SEQ ID NO: 376213 - RNA, 22 nt, Human
cauccacuagaaugacagaguu

SEQ ID NO: 376214 - RNA, 22 nt, Human
aggcugagaaagugggaagaug

SEQ ID NO: 376215 - RNA, 22 nt, Human
cugcuguguugccagugucacc

SEQ ID NO: 376216 - RNA, 23 nt, Human
ugcucugugaauaguuggugacu

SEQ ID NO: 376217 - RNA, 22 nt, Human
ggaagccacccagcuuugauag

SEQ ID NO: 376218 - RNA, 22 nt, Human
auuugaauggcuuaacacaacg

SEQ ID NO: 376219 - RNA, 22 nt, Human
ucugucacucccugaugaugaa

SEQ ID NO: 376220 - RNA, 22 nt, Human
gucucagauucagacaucuaca

SEQ ID NO: 376221 - RNA, 22 nt, Human
ugucucugagaugacucccacc

SEQ ID NO: 376222 - RNA, 22 nt, Human
uggcugcagaucaagggcaggc

SEQ ID NO: 376223 - RNA, 22 nt, Human
ccagcccuguaaggaugaggca

SEQ ID NO: 376224 - RNA, 21 nt, Human
uuuagggaggauauuuaacuu

SEQ ID NO: 376225 - RNA, 22 nt, Human
ggccagagagcagccaggauuc

SEQ ID NO: 376226 - RNA, 22 nt, Human
aucagaaauugcuaccagugga

SEQ ID NO: 376227 - RNA, 22 nt, Human
cagagggaaaaggggaguaaua

SEQ ID NO: 376228 - RNA, 22 nt, Human
caucagaauuacuuggggagcu

SEQ ID NO: 376229 - RNA, 22 nt, Human
guucacaucacuucacugaacc

SEQ ID NO: 376230 - RNA, 17 nt, Human
caagagagaugacugga

SEQ ID NO: 376231 - RNA, 22 nt, Human
accugcagcuaaagauguaggg

SEQ ID NO: 376232 - RNA, 22 nt, Human
auuuccauagagcgucucacag

SEQ ID NO: 376233 - RNA, 22 nt, Human
ucauaaaguuaucaccaaaucc

SEQ ID NO: 376234 - RNA, 22 nt, Human
gaagggugcauggagggaaguc

SEQ ID NO: 376235 - RNA, 22 nt, Human
aaagcagggaugaggcuagagg

SEQ ID NO: 376236 - RNA, 22 nt, Human
uuuccagagcaugucugcucag

SEQ ID NO: 376237 - RNA, 22 nt, Human
ugaaagcuguccacuaggcugu

SEQ ID NO: 376238 - RNA, 22 nt, Human
cuuucacagcugugcuuaugau

SEQ ID NO: 376239 - RNA, 22 nt, Human
cugaauaauuuucuguuguaug

SEQ ID NO: 376240 - RNA, 22 nt, Human
ucuguaucacccguucccagaa

SEQ ID NO: 376241 - RNA, 22 nt, Human
uugaauaauaugcuucguucuc

SEQ ID NO: 376242 - RNA, 22 nt, Human
cugccgaguacagccauagaaa

SEQ ID NO: 376243 - RNA, 22 nt, Human
gaggcucagagugguuaaauaa

SEQ ID NO: 376244 - RNA, 19 nt, Human
uggggccuccugucccugg

SEQ ID NO: 376245 - RNA, 22 nt, Human
aguguuguaugggaugacugcu

SEQ ID NO: 376246 - RNA, 22 nt, Human
gggcugagugaccucaggccaa

SEQ ID NO: 376247 - RNA, 22 nt, Human
uaagaauuguguugaauagagu

SEQ ID NO: 376248 - RNA, 22 nt, Human
uucugugacuccucagagauuu

SEQ ID NO: 376249 - RNA, 22 nt, Human
uguaaauaauuccuaggcuuuu

SEQ ID NO: 376250 - RNA, 22 nt, Human
agaggcaguauacaauccgagc

SEQ ID NO: 376251 - RNA, 22 nt, Human
gaggaaccaaucugugauauuc

SEQ ID NO: 376252 - RNA, 20 nt, Human
uucaggauucuagaccacac

SEQ ID NO: 376253 - RNA, 20 nt, Human
ucagggcaugggacagcccc

SEQ ID NO: 376254 - RNA, 22 nt, Human
cccaggagguggagguugcagc

SEQ ID NO: 376255 - RNA, 22 nt, Human
augucuuucgcaucaguagcua

SEQ ID NO: 376256 - RNA, 22 nt, Human
gagggcucuacucaccacccug

SEQ ID NO: 376257 - RNA, 22 nt, Human
auccaguucucagugcuuacag

SEQ ID NO: 376258 - RNA, 22 nt, Human
cacagaaucugugacuccaaga

SEQ ID NO: 376259 - RNA, 22 nt, Human
uggcugaaggaagauucuucua

SEQ ID NO: 376260 - RNA, 18 nt, Human
uggccuggagacaacucu

SEQ ID NO: 376261 - RNA, 22 nt, Human
aaagagcuaacauugccgagau

SEQ ID NO: 376262 - RNA, 22 nt, Human
acagggcccuugccagcacaag

SEQ ID NO: 376263 - RNA, 22 nt, Human
gccuggagcagacgugucccgg

SEQ ID NO: 376264 - RNA, 22 nt, Human
cugugacuguguuggaugcaca

SEQ ID NO: 376265 - RNA, 18 nt, Human
uggcucagauggcuuuaa

SEQ ID NO: 376266 - RNA, 22 nt, Human
uagggcagaguccaggaugggc

SEQ ID NO: 376267 - RNA, 22 nt, Human
ugacagcugagccccaggcaag

SEQ ID NO: 376268 - RNA, 22 nt, Human
ggggccagcuucgcgugcucuu

SEQ ID NO: 376269 - RNA, 22 nt, Human
gaaauuuauuaucuacaucauu

SEQ ID NO: 376270 - RNA, 22 nt, Human
ugagcuuccucccugcauccau

SEQ ID NO: 376271 - RNA, 22 nt, Human
cagagcauaauugacaugaggu

SEQ ID NO: 376272 - RNA, 22 nt, Human
guaugaaaauuguaaaguucuu

SEQ ID NO: 376273 - RNA, 22 nt, Human
gagaggaguuacuauuuccgag

SEQ ID NO: 376274 - RNA, 22 nt, Human
accacuguaucuccagcacauu

SEQ ID NO: 376275 - RNA, 22 nt, Human
aagccagauagaagaacucauu

SEQ ID NO: 376276 - RNA, 22 nt, Human
caucacugacgcugagauucca

SEQ ID NO: 376277 - RNA, 20 nt, Human
cucuccuugccgacuuggca

SEQ ID NO: 376278 - RNA, 22 nt, Human
agagaugucgccuugcccaggg

SEQ ID NO: 376279 - RNA, 22 nt, Human
aucaaaguccaucagaagguag

SEQ ID NO: 376280 - RNA, 22 nt, Human
acuggcagagacccugauggcc

SEQ ID NO: 376281 - RNA, 22 nt, Human
augcuuaauacacuguuaaagg

SEQ ID NO: 376282 - RNA, 22 nt, Human
agggacuuguguccuauguaug

SEQ ID NO: 376283 - RNA, 22 nt, Human
gguucacacuuucaugauuuca

SEQ ID NO: 376284 - RNA, 22 nt, Human
uuuccuguugccaucaagaaug

SEQ ID NO: 376285 - RNA, 22 nt, Human
caggaggcagaggaugcccagu

SEQ ID NO: 376286 - RNA, 22 nt, Human
gugauuucaaauauagagugag

SEQ ID NO: 376287 - RNA, 22 nt, Human
uguaguaagugcgcaauaaaua

SEQ ID NO: 376288 - RNA, 22 nt, Human
agccaggacguugcucagcucc

SEQ ID NO: 376289 - RNA, 22 nt, Human
cuggcucccagcuuucagggag

SEQ ID NO: 376290 - RNA, 22 nt, Human
caagagcucagaaacccuugcu

SEQ ID NO: 376291 - RNA, 22 nt, Human
uggcccugacuuggaggccuga

SEQ ID NO: 376292 - RNA, 22 nt, Human
gcugucacauuuggagcacugg

SEQ ID NO: 376293 - RNA, 22 nt, Human
aaugcaguuucauuuguagaau

SEQ ID NO: 376294 - RNA, 22 nt, Human
aaugauggauuuagacaagcug

SEQ ID NO: 376295 - RNA, 19 nt, Human
ucucugcuucucuuggcau

SEQ ID NO: 376296 - RNA, 22 nt, Human
ucucaagaucucaagauggccc

SEQ ID NO: 376297 - RNA, 22 nt, Human
gucuggggaagucagggcauca

SEQ ID NO: 376298 - RNA, 22 nt, Human
gccuggagaaaggaagguggga

SEQ ID NO: 376299 - RNA, 22 nt, Human
aggcuggcuggcaggggacaca

SEQ ID NO: 376300 - RNA, 22 nt, Human
uuacaguaugaucaacuuuuca

SEQ ID NO: 376301 - RNA, 22 nt, Human
uccucagaugcucuuggacgcc

SEQ ID NO: 376302 - RNA, 22 nt, Human
ggggaggaagcuggaacacggg

SEQ ID NO: 376303 - RNA, 22 nt, Human
caaugguggugucagaagagau

SEQ ID NO: 376304 - RNA, 21 nt, Human
acacugugucauaaugcuuaa

SEQ ID NO: 376305 - RNA, 22 nt, Human
ucacagcaaaagugugcagagc

SEQ ID NO: 376306 - RNA, 22 nt, Human
ucccagagccucugccacucug

SEQ ID NO: 376307 - RNA, 22 nt, Human
uucuuuuacauuaagauuucag

SEQ ID NO: 376308 - RNA, 22 nt, Human
ucaccgucgggggucgcugucu

SEQ ID NO: 376309 - RNA, 22 nt, Human
agccuuguuggucugaguuugg

SEQ ID NO: 376310 - RNA, 22 nt, Human
ucccagagcaguacuccaggag

SEQ ID NO: 376311 - RNA, 22 nt, Human
augauacaagcaaaacuaauca

SEQ ID NO: 376312 - RNA, 22 nt, Human
cucugagcagaggccguggcua

SEQ ID NO: 376313 - RNA, 22 nt, Human
agggcugaagggaggugcucau

SEQ ID NO: 376314 - RNA, 22 nt, Human
uugugcauuucucugagugugu

SEQ ID NO: 376315 - RNA, 22 nt, Human
aucacaggugguaggaaaagaa

SEQ ID NO: 376316 - RNA, 22 nt, Human
acuauaaccuguuagaauagau

SEQ ID NO: 376317 - RNA, 17 nt, Human
ccagguggaaucgugga

SEQ ID NO: 376318 - RNA, 22 nt, Human
uuugaagugggcauuagaaccu

SEQ ID NO: 376319 - RNA, 19 nt, Human
ucaggacugacuugaaguc

SEQ ID NO: 376320 - RNA, 22 nt, Human
ugcuccuuccucauccugugca

SEQ ID NO: 376321 - RNA, 22 nt, Human
gcagaagcccggucagcgcacg

SEQ ID NO: 376322 - RNA, 22 nt, Human
ucccacucccaggcaggccucu

SEQ ID NO: 376323 - RNA, 22 nt, Human
aggcaggaaaaucgcuugaacc

SEQ ID NO: 376324 - RNA, 22 nt, Human
ugccaggcauauggccucuuug

SEQ ID NO: 376325 - RNA, 22 nt, Human
auucucuuuguauaacaucuug

SEQ ID NO: 376326 - RNA, 22 nt, Human
auuucucaguguacauuauguu

SEQ ID NO: 376327 - RNA, 22 nt, Human
aaguugaagcaugaaccaaggu

SEQ ID NO: 376328 - RNA, 22 nt, Human
gaugguuuggaaugaaguagcu

SEQ ID NO: 376329 - RNA, 22 nt, Human
caguagccacuagacacaugua

SEQ ID NO: 376330 - RNA, 22 nt, Human
ccucuggguaucuguggaagua

SEQ ID NO: 376331 - RNA, 22 nt, Human
auaguuugaaggcuguucuacu

SEQ ID NO: 376332 - RNA, 21 nt, Human
uacagaaugcgcuucagucug

SEQ ID NO: 376333 - RNA, 22 nt, Human
ccaggaagcggugagggcugcc

SEQ ID NO: 376334 - RNA, 22 nt, Human
ucagccuacacuccaacagcau

SEQ ID NO: 376335 - RNA, 20 nt, Human
cuuggccuacuuagcuuugu

SEQ ID NO: 376336 - RNA, 22 nt, Human
cauuuaguuauacuaaaacauu

SEQ ID NO: 376337 - RNA, 19 nt, Human
uccaggcauccuucaggcu

SEQ ID NO: 376338 - RNA, 22 nt, Human
gcagggucugaggccacagagg

SEQ ID NO: 376339 - RNA, 22 nt, Human
gcauguguggaggagaugugcu

SEQ ID NO: 376340 - RNA, 22 nt, Human
cugaggcaugaaugugggcuuu

SEQ ID NO: 376341 - RNA, 19 nt, Human
aaaauugcguauuuugagg

SEQ ID NO: 376342 - RNA, 22 nt, Human
uacaaaaguaauuacgguuuuu

SEQ ID NO: 376343 - RNA, 22 nt, Human
uggggcagcuccaucuauucca

SEQ ID NO: 376344 - RNA, 22 nt, Human
ugcagaagugagucaugaggaa

SEQ ID NO: 376345 - RNA, 22 nt, Human
ccauuucacucuuccugaagga

SEQ ID NO: 376346 - RNA, 19 nt, Human
ggcucucuuaaagcuguuu

SEQ ID NO: 376347 - RNA, 22 nt, Human
aaaugcagauuuugaugcagca

SEQ ID NO: 376348 - RNA, 17 nt, Human
agccccucagcgucacc

SEQ ID NO: 376349 - RNA, 22 nt, Human
caggaagagguaucaccgagca

SEQ ID NO: 376350 - RNA, 22 nt, Human
cugcugagcaucagggcugccc

SEQ ID NO: 376351 - RNA, 20 nt, Human
agugucugggccucaggccc

SEQ ID NO: 376352 - RNA, 22 nt, Human
agucucagaguaccugagggac

SEQ ID NO: 376353 - RNA, 22 nt, Human
gccaguggcaugcggcagggac

SEQ ID NO: 376354 - RNA, 20 nt, Human
gcugcucuccacggucugca

SEQ ID NO: 376355 - RNA, 22 nt, Human
aggucauugaaguuauuuucuu

SEQ ID NO: 376356 - RNA, 18 nt, Human
gcuggcugcacuucugcu

SEQ ID NO: 376357 - RNA, 22 nt, Human
uggacucagaaguguucuuuua

SEQ ID NO: 376358 - RNA, 22 nt, Human
ucagcaaugugauacugugcaa

SEQ ID NO: 376359 - RNA, 22 nt, Human
ggcugggcucgcugauuggcug

SEQ ID NO: 376360 - RNA, 22 nt, Human
uccuuccuggggucucugcugc

SEQ ID NO: 376361 - RNA, 22 nt, Human
caugcuuuucaaucuaucuuaa

SEQ ID NO: 376362 - RNA, 22 nt, Human
agauuucagaugcucggcaguu

SEQ ID NO: 376363 - RNA, 22 nt, Human
cagcccaggccgacaguuccuc

SEQ ID NO: 376364 - RNA, 22 nt, Human
uagcugcccaucuuuccuuuag

SEQ ID NO: 376365 - RNA, 22 nt, Human
augcuauacucaaagaaauuca

SEQ ID NO: 376366 - RNA, 22 nt, Human
aaaacucugcaguuaguuucua

SEQ ID NO: 376367 - RNA, 22 nt, Human
acaguggaugugauguccaggu

SEQ ID NO: 376368 - RNA, 22 nt, Human
cagcucugugggagcguaugug

SEQ ID NO: 376369 - RNA, 22 nt, Human
uccugcagucugcacucugccu

SEQ ID NO: 376370 - RNA, 22 nt, Human
uaacagaaauagaaaugagagu

SEQ ID NO: 376371 - RNA, 22 nt, Human
cacagggcaggccccaggccuc

SEQ ID NO: 376372 - RNA, 22 nt, Human
ugaaaucuuagccauucugccu

SEQ ID NO: 376373 - RNA, 22 nt, Human
gccaccagggggcuccagugag

SEQ ID NO: 376374 - RNA, 22 nt, Human
gcucugagagugggugauucug

SEQ ID NO: 376375 - RNA, 23 nt, Human
acagagguccaaacaguauaagc

SEQ ID NO: 376376 - RNA, 22 nt, Human
gaggcucagggaaacagcgcag

SEQ ID NO: 376377 - RNA, 22 nt, Human
acuguucauccuuuuugaacaa

SEQ ID NO: 376378 - RNA, 22 nt, Human
cuggccugaggucggcuguagg

SEQ ID NO: 376379 - RNA, 22 nt, Human
gccucugcccauccaccaucag

SEQ ID NO: 376380 - RNA, 22 nt, Human
ggaagaggcugaggccaugcug

SEQ ID NO: 376381 - RNA, 22 nt, Human
ugucaugcagguuuguuauaga

SEQ ID NO: 376382 - RNA, 22 nt, Human
guuucaaauagguuucagcaaa

SEQ ID NO: 376383 - RNA, 22 nt, Human
agugcuuugaacgaaaggcuga

SEQ ID NO: 376384 - RNA, 22 nt, Human
gaagcagcagcuggggacaguu

SEQ ID NO: 376385 - RNA, 22 nt, Human
gcagcacauauaaacaaagaga

SEQ ID NO: 376386 - RNA, 22 nt, Human
cuggcagcgugagcagcaucca

SEQ ID NO: 376387 - RNA, 22 nt, Human
ucccugggccuccugcuaugca

SEQ ID NO: 376388 - RNA, 22 nt, Human
accuuucauuaaagucuguagu

SEQ ID NO: 376389 - RNA, 22 nt, Human
ggcucagguuuaaagugcuuua

SEQ ID NO: 376390 - RNA, 22 nt, Human
ggcagcuccaaaaggaaacacu

SEQ ID NO: 376391 - RNA, 22 nt, Human
uugacaauugggagauauaaag

SEQ ID NO: 376392 - RNA, 22 nt, Human
uuccggaagguucucuagaauu

SEQ ID NO: 376393 - RNA, 22 nt, Human
ugagcaucuuuuuacagguuua

SEQ ID NO: 376394 - RNA, 22 nt, Human
gagcagcugagcuggaaugaga

SEQ ID NO: 376395 - RNA, 22 nt, Human
aaaaccuucagguuuggaguuu

SEQ ID NO: 376396 - RNA, 22 nt, Human
agaaccucaauuauuuuugcac

SEQ ID NO: 376397 - RNA, 22 nt, Human
ugaagcaggaucguuugcuuca

SEQ ID NO: 376398 - RNA, 17 nt, Human
caaggccagcaucuuca

SEQ ID NO: 376399 - RNA, 22 nt, Human
cugccagcucucuggaggcucu

SEQ ID NO: 376400 - RNA, 22 nt, Human
ggguccagaguugaagagguua

SEQ ID NO: 376401 - RNA, 18 nt, Human
aaaaugcaggcgacaugg

SEQ ID NO: 376402 - RNA, 22 nt, Human
uugagaagaauguguugaguuu

SEQ ID NO: 376403 - RNA, 22 nt, Human
uguacaguaggaacuuguuauu

SEQ ID NO: 376404 - RNA, 22 nt, Human
ggcagcagggcugucucccuac

SEQ ID NO: 376405 - RNA, 22 nt, Human
agacaggacacaagcugcauaa

SEQ ID NO: 376406 - RNA, 17 nt, Human
acagggcagaaacagcu

SEQ ID NO: 376407 - RNA, 22 nt, Human
ccaaagugcugagauuacaggu

SEQ ID NO: 376408 - RNA, 22 nt, Human
aaggcagcaagaauuccagguu

SEQ ID NO: 376409 - RNA, 22 nt, Human
ggcaccaggcugggcauaggcc

SEQ ID NO: 376410 - RNA, 22 nt, Human
aagagcuggucacagguccauu

SEQ ID NO: 376411 - RNA, 22 nt, Human
guccagagauggacgagcagau

SEQ ID NO: 376412 - RNA, 22 nt, Human
gagaggccaaaaucccugcccc

SEQ ID NO: 376413 - RNA, 22 nt, Human
agucugucuacuuaaagucugu

SEQ ID NO: 376414 - RNA, 22 nt, Human
cagggugcgccacucagaugua

SEQ ID NO: 376415 - RNA, 22 nt, Human
cucuggagaacuccuugugucu

SEQ ID NO: 376416 - RNA, 22 nt, Human
gaccuggaggauccucuucuug

SEQ ID NO: 376417 - RNA, 22 nt, Human
agcugagcuaguaguuccagug

SEQ ID NO: 376418 - RNA, 22 nt, Human
uggcaguccccugugccuggaa

SEQ ID NO: 376419 - RNA, 22 nt, Human
ucacuguauuugcugaugcaua

SEQ ID NO: 376420 - RNA, 22 nt, Human
gcauggcauuugaagguagaag

SEQ ID NO: 376421 - RNA, 22 nt, Human
auagaaauguauuuuggacuag

SEQ ID NO: 376422 - RNA, 23 nt, Human
ugaguucucaucuuggcuucuau

SEQ ID NO: 376423 - RNA, 22 nt, Human
guuucauucggcagcucauaag

SEQ ID NO: 376424 - RNA, 22 nt, Human
caauacaauuaccaguuaauca

SEQ ID NO: 376425 - RNA, 22 nt, Human
cagaggccccagaacuagcucu

SEQ ID NO: 376426 - RNA, 21 nt, Human
ggccugagcaccuguccaccu

SEQ ID NO: 376427 - RNA, 18 nt, Human
acagaggcagacauguau

SEQ ID NO: 376428 - RNA, 22 nt, Human
ugacccauggucugaucauagg

SEQ ID NO: 376429 - RNA, 22 nt, Human
auggcuuaagaaugcuuuugug

SEQ ID NO: 376430 - RNA, 22 nt, Human
aagauuucagaguuugggggaa

SEQ ID NO: 376431 - RNA, 22 nt, Human
uuuguuuagaugguaaaucagu

SEQ ID NO: 376432 - RNA, 22 nt, Human
agggcuccaggggaccaucagu

SEQ ID NO: 376433 - RNA, 23 nt, Human
cagcuuucagggcuuuagggaag

SEQ ID NO: 376434 - RNA, 22 nt, Human
gugauugcccagcaccauuguu

SEQ ID NO: 376435 - RNA, 22 nt, Human
gcuuccaaaucuguucaaaaug

SEQ ID NO: 376436 - RNA, 22 nt, Human
cccugcagccggccagcucauu

SEQ ID NO: 376437 - RNA, 23 nt, Human
cuggcucuguagguggcauccuu

SEQ ID NO: 376438 - RNA, 22 nt, Human
acccaggauaaucuguguaucu

SEQ ID NO: 376439 - RNA, 22 nt, Human
augucacagucugacucaguga

SEQ ID NO: 376440 - RNA, 22 nt, Human
ugaguccacuuuaaaaugucag

SEQ ID NO: 376441 - RNA, 22 nt, Human
uggcagaguucgcuccuauuca

SEQ ID NO: 376442 - RNA, 22 nt, Human
ucuucucuacaccagcagcccc

SEQ ID NO: 376443 - RNA, 22 nt, Human
gagaaacuuggaguuauucugg

SEQ ID NO: 376444 - RNA, 22 nt, Human
ucacucagguucaugucuuugu

SEQ ID NO: 376445 - RNA, 22 nt, Human
augaggcauucacagaaggcac

SEQ ID NO: 376446 - RNA, 22 nt, Human
ccagaagaccccguccaccucc

SEQ ID NO: 376447 - RNA, 22 nt, Human
uggauuuauuagguuggugaaa

SEQ ID NO: 376448 - RNA, 23 nt, Human
augcaguauaugucaguaguuua

SEQ ID NO: 376449 - RNA, 22 nt, Human
gaggaagcagggcuuggcugag

SEQ ID NO: 376450 - RNA, 20 nt, Human
agguggcuccugcugggggu

SEQ ID NO: 376451 - RNA, 22 nt, Human
uacuguauuugauaagugaagu

SEQ ID NO: 376452 - RNA, 22 nt, Human
aaugauggucauggcaacuuuu

SEQ ID NO: 376453 - RNA, 22 nt, Human
aggcccuguccauggugcugaa

SEQ ID NO: 376454 - RNA, 22 nt, Human
cagcugaacauguagagcaucu

SEQ ID NO: 376455 - RNA, 22 nt, Human
agcugccagaugacagugcuau

SEQ ID NO: 376456 - RNA, 22 nt, Human
ccaaaggccaggcacugagguu

SEQ ID NO: 376457 - RNA, 22 nt, Human
aauaauuacccaucuuuuugua

SEQ ID NO: 376458 - RNA, 22 nt, Human
ucugccagugguuuggcccuga

SEQ ID NO: 376459 - RNA, 22 nt, Human
ugggcaagucacuucugucuuu

SEQ ID NO: 376460 - RNA, 22 nt, Human
cugggcugagccugggcugugu

SEQ ID NO: 376461 - RNA, 22 nt, Human
ggcugccugugcccaggcacac

SEQ ID NO: 376462 - RNA, 22 nt, Human
ccugagagcgaguggccucaug

SEQ ID NO: 376463 - RNA, 22 nt, Human
agaaguaggcagggcuguauca

SEQ ID NO: 376464 - RNA, 22 nt, Human
agcaccugcuaugugucaggga

SEQ ID NO: 376465 - RNA, 23 nt, Human
aggcagugggggccacuuugcuu

SEQ ID NO: 376466 - RNA, 22 nt, Human
gggcaugguggugcacaccugu

SEQ ID NO: 376467 - RNA, 22 nt, Human
aaugggagguaguaugggaggu

SEQ ID NO: 376468 - RNA, 22 nt, Human
aacaguaaaaaucauuuaguug

SEQ ID NO: 376469 - RNA, 22 nt, Human
cacagagagcuacgugcagcgu

SEQ ID NO: 376470 - RNA, 22 nt, Human
ggagagcaggguccugagauac

SEQ ID NO: 376471 - RNA, 20 nt, Human
guguuucaugugauacaaug

SEQ ID NO: 376472 - RNA, 22 nt, Human
uuucuucauucaccuucacccc

SEQ ID NO: 376473 - RNA, 22 nt, Human
caggcuggaguuaccuuuaggg

SEQ ID NO: 376474 - RNA, 17 nt, Human
accaggcaacacgccca

SEQ ID NO: 376475 - RNA, 22 nt, Human
uauuccuauggccacugcuacu

SEQ ID NO: 376476 - RNA, 22 nt, Human
gagugcagaugccagccccagu

SEQ ID NO: 376477 - RNA, 22 nt, Human
gugaauggggcaggaaggaugg

SEQ ID NO: 376478 - RNA, 22 nt, Human
uccaggcuggccucgcgugaca

SEQ ID NO: 376479 - RNA, 22 nt, Human
ucauaaaaguacucauguucau

SEQ ID NO: 376480 - RNA, 22 nt, Human
aaaauugagagucuugugcaag

SEQ ID NO: 376481 - RNA, 21 nt, Human
ugaaugaggaggauggcauuu

SEQ ID NO: 376482 - RNA, 22 nt, Human
cagcccuggaacagcugacuca

SEQ ID NO: 376483 - RNA, 22 nt, Human
agaauuccucuaggaucugccc

SEQ ID NO: 376484 - RNA, 21 nt, Human
gcagaugggagucaucaggcu

SEQ ID NO: 376485 - RNA, 22 nt, Human
agccaggccagcugucuugagu

SEQ ID NO: 376486 - RNA, 23 nt, Human
aggaaggagguccuaacaguauc

SEQ ID NO: 376487 - RNA, 22 nt, Human
gggcugugcugaguaggaggug

SEQ ID NO: 376488 - RNA, 22 nt, Human
aaagcuaugaggcaugcauuuc

SEQ ID NO: 376489 - RNA, 22 nt, Human
uggguaaacugggucuggagag

SEQ ID NO: 376490 - RNA, 22 nt, Human
acagaguaucuaucaggaguau

SEQ ID NO: 376491 - RNA, 22 nt, Human
ggcugcuggcauugagguaggu

SEQ ID NO: 376492 - RNA, 22 nt, Human
acccaggguagagugcaguggc

SEQ ID NO: 376493 - RNA, 22 nt, Human
gcccaggagguugggcugugca

SEQ ID NO: 376494 - RNA, 22 nt, Human
ugccaggcugcccuccagucug

SEQ ID NO: 376495 - RNA, 22 nt, Human
gguggagcuggaccaggagagg

SEQ ID NO: 376496 - RNA, 22 nt, Human
ugucugugaccucuuuggagcc

SEQ ID NO: 376497 - RNA, 22 nt, Human
cugagccauaagggaggcuggg

SEQ ID NO: 376498 - RNA, 22 nt, Human
ugaggggagacagaguggacuc

SEQ ID NO: 376499 - RNA, 22 nt, Human
uuagcaucugcuguaagcuuau

SEQ ID NO: 376500 - RNA, 22 nt, Human
gucuucuuguguugccugucuu

SEQ ID NO: 376501 - RNA, 22 nt, Human
ucacaguaaaagcauggaagag

SEQ ID NO: 376502 - RNA, 22 nt, Human
gggcucugcgcucagcuccagc

SEQ ID NO: 376503 - RNA, 21 nt, Human
gauuugcagaaacuagacagg

SEQ ID NO: 376504 - RNA, 22 nt, Human
acccagcuggaugcauggaggc

SEQ ID NO: 376505 - RNA, 22 nt, Human
uaugaacucuggagucugagug

SEQ ID NO: 376506 - RNA, 22 nt, Human
uuuucuuauggugaagcacaaa

SEQ ID NO: 376507 - RNA, 22 nt, Human
cagagacagaaaauggaucuag

SEQ ID NO: 376508 - RNA, 22 nt, Human
agcugcugcggaaagaugccac

SEQ ID NO: 376509 - RNA, 22 nt, Human
ccuucaaucagcagucuagcuu

SEQ ID NO: 376510 - RNA, 22 nt, Human
gcucugggauuaccagccuuag

SEQ ID NO: 376511 - RNA, 22 nt, Human
ggaggaugagcuacgaggagcu

SEQ ID NO: 376512 - RNA, 18 nt, Human
ugcuuggagcauuuacca

SEQ ID NO: 376513 - RNA, 22 nt, Human
cccuggaggagcuuagagcuug

SEQ ID NO: 376514 - RNA, 19 nt, Human
agcaaauauaauaguguuc

SEQ ID NO: 376515 - RNA, 22 nt, Human
aucuaaaguguuucaugaaaga

SEQ ID NO: 376516 - RNA, 22 nt, Human
cauuucugugacacuuccaucu

SEQ ID NO: 376517 - RNA, 22 nt, Human
uucagaaacaucaguggaugga

SEQ ID NO: 376518 - RNA, 22 nt, Human
ccagccuucugagcugccugga

SEQ ID NO: 376519 - RNA, 22 nt, Human
acagaacugggaaaugcacaua

SEQ ID NO: 376520 - RNA, 22 nt, Human
gauuuacaaagcucucuagugu

SEQ ID NO: 376521 - RNA, 22 nt, Human
ucagaggacuaccuucuccagu

SEQ ID NO: 376522 - RNA, 22 nt, Human
uccaggaguuugaccugugggc

SEQ ID NO: 376523 - RNA, 19 nt, Human
gaaggagagcugaguuagg

SEQ ID NO: 376524 - RNA, 22 nt, Human
gaagcccaggcuuccuuggcuu

SEQ ID NO: 376525 - RNA, 18 nt, Human
ccagagcuggcuccucgc

SEQ ID NO: 376526 - RNA, 22 nt, Human
ucagagaguuagugucuuagcu

SEQ ID NO: 376527 - RNA, 22 nt, Human
cuuaaauuuucaucuacaagaa

SEQ ID NO: 376528 - RNA, 22 nt, Human
auaaacacuucuagggcacaca

SEQ ID NO: 376529 - RNA, 22 nt, Human
auuuccaaucucugcauauggg

SEQ ID NO: 376530 - RNA, 22 nt, Human
agccccacacucucucugagaa

SEQ ID NO: 376531 - RNA, 22 nt, Human
ugcagggagggcccagcaaucu

SEQ ID NO: 376532 - RNA, 22 nt, Human
ggugaggcuaagugacacaggg

SEQ ID NO: 376533 - RNA, 22 nt, Human
ugggggugugccagggaccucc

SEQ ID NO: 376534 - RNA, 20 nt, Human
aaacauucauguacaaguga

SEQ ID NO: 376535 - RNA, 22 nt, Human
caggccugcaggaaaggcuccc

SEQ ID NO: 376536 - RNA, 22 nt, Human
uuuacauugcauuagguauuau

SEQ ID NO: 376537 - RNA, 23 nt, Human
acugagccagggccugggucagc

SEQ ID NO: 376538 - RNA, 22 nt, Human
acccaggaugauaauguucaca

SEQ ID NO: 376539 - RNA, 22 nt, Human
aggcucagauccuuguguccug

SEQ ID NO: 376540 - RNA, 22 nt, Human
agcugcccugggcuggagaugg

SEQ ID NO: 376541 - RNA, 22 nt, Human
uggcucaguuugggggauugaa

SEQ ID NO: 376542 - RNA, 22 nt, Human
aaggcagcagaggaaaggugcu

SEQ ID NO: 376543 - RNA, 22 nt, Human
gcugagaggcacuaucuccgga

SEQ ID NO: 376544 - RNA, 22 nt, Human
gggcagcugccccucucugggc

SEQ ID NO: 376545 - RNA, 20 nt, Human
ucagagagagggugccacuu

SEQ ID NO: 376546 - RNA, 22 nt, Human
uccuggagaauccugccaccug

SEQ ID NO: 376547 - RNA, 22 nt, Human
uaagauaugguaggaaguuugg

SEQ ID NO: 376548 - RNA, 22 nt, Human
caguacuuggucaaggaagcag

SEQ ID NO: 376549 - RNA, 22 nt, Human
aggguagguguaagauagcccu

SEQ ID NO: 376550 - RNA, 22 nt, Human
aagauauagauaaaacuaugca

SEQ ID NO: 376551 - RNA, 22 nt, Human
ucuaaccuuugaaacugcuuuc

SEQ ID NO: 376552 - RNA, 22 nt, Human
ugauucacagacuucacaaggc

SEQ ID NO: 376553 - RNA, 22 nt, Human
gcuuccucgcugggcagaggca

SEQ ID NO: 376554 - RNA, 22 nt, Human
acagaauucuaguauguggcuu

SEQ ID NO: 376555 - RNA, 22 nt, Human
uaaaaugaucucucauguucuu

SEQ ID NO: 376556 - RNA, 22 nt, Human
ccugggagagccaucuguggcc

SEQ ID NO: 376557 - RNA, 22 nt, Human
ccugaggacacacgcugcagga

SEQ ID NO: 376558 - RNA, 21 nt, Human
ugucagaaauaagcaugugau

SEQ ID NO: 376559 - RNA, 22 nt, Human
uaacagaaacagauaaguguaa

SEQ ID NO: 376560 - RNA, 22 nt, Human
gcuggcaucacuggcuucggug

SEQ ID NO: 376561 - RNA, 22 nt, Human
agucaaagcuacaggcauuuga

SEQ ID NO: 376562 - RNA, 22 nt, Human
acugagcucuugacugggaguu

SEQ ID NO: 376563 - RNA, 22 nt, Human
agccuucauaaucuugggcuuu

SEQ ID NO: 376564 - RNA, 22 nt, Human
cccagcucucucaguucugcuu

SEQ ID NO: 376565 - RNA, 22 nt, Human
acaucuguuugagaaaaagaag

SEQ ID NO: 376566 - RNA, 22 nt, Human
auacaguauuaccuguucagga

SEQ ID NO: 376567 - RNA, 22 nt, Human
auuuccucaugaucauaaugca

SEQ ID NO: 376568 - RNA, 22 nt, Human
ccuggugcuuaccagagcuuuu

SEQ ID NO: 376569 - RNA, 22 nt, Human
acuuucucccacccacccgucu

SEQ ID NO: 376570 - RNA, 22 nt, Human
auggaagguccuacagagcgca

SEQ ID NO: 376571 - RNA, 18 nt, Human
ugcuggcaacuacuauug

SEQ ID NO: 376572 - RNA, 22 nt, Human
caaggccaagguuuugugaacu

SEQ ID NO: 376573 - RNA, 19 nt, Human
ggugugaagugaggaguua

SEQ ID NO: 376574 - RNA, 22 nt, Human
aucuggcugcugugcuuaagcu

SEQ ID NO: 376575 - RNA, 22 nt, Human
cagagccaggucuaggagucuc

SEQ ID NO: 376576 - RNA, 22 nt, Human
ucacauuuguguuuuauuagag

SEQ ID NO: 376577 - RNA, 22 nt, Human
gcagcguggggcugagucagcu

SEQ ID NO: 376578 - RNA, 22 nt, Human
aucccuggacggcgccucccca

SEQ ID NO: 376579 - RNA, 22 nt, Human
cagcuuugugcaaugcagucuc

SEQ ID NO: 376580 - RNA, 19 nt, Human
aggcugugagggaggacuc

SEQ ID NO: 376581 - RNA, 20 nt, Human
gggcaguucaaugccacucu

SEQ ID NO: 376582 - RNA, 22 nt, Human
gcugccuuuugcuccucccacc

SEQ ID NO: 376583 - RNA, 22 nt, Human
acuaaagaagccaaaguuuucu

SEQ ID NO: 376584 - RNA, 22 nt, Human
uuugaaucugauauggcagcau

SEQ ID NO: 376585 - RNA, 22 nt, Human
ccagggcauccucacaucgcag

SEQ ID NO: 376586 - RNA, 19 nt, Human
agaaguuagacauugcaau

SEQ ID NO: 376587 - RNA, 22 nt, Human
ugaggcaguauucuccauucca

SEQ ID NO: 376588 - RNA, 22 nt, Human
ugccucuguugagccuuggcug

SEQ ID NO: 376589 - RNA, 22 nt, Human
cagagcuggguuugggaaaccu

SEQ ID NO: 376590 - RNA, 22 nt, Human
uggcagcaauuugugauguuga

SEQ ID NO: 376591 - RNA, 22 nt, Human
acuauacaccaaaauauuaagg

SEQ ID NO: 376592 - RNA, 22 nt, Human
auaucagaaauaguaagcagag

SEQ ID NO: 376593 - RNA, 22 nt, Human
ucagggacauuuagacacugau

SEQ ID NO: 376594 - RNA, 22 nt, Human
uccucugcuccaucuuuacugu

SEQ ID NO: 376595 - RNA, 22 nt, Human
cuucaucaacucuaacaaaugu

SEQ ID NO: 376596 - RNA, 22 nt, Human
gccugcagcugcuuccacacac

SEQ ID NO: 376597 - RNA, 21 nt, Human
augugaaauaucaucagagca

SEQ ID NO: 376598 - RNA, 22 nt, Human
caguuucagaaucaaaacauca

SEQ ID NO: 376599 - RNA, 22 nt, Human
ggcugagcguggcugccguggg

SEQ ID NO: 376600 - RNA, 22 nt, Human
ucagguguuagaagaaauuuca

SEQ ID NO: 376601 - RNA, 22 nt, Human
cacuuagucucaccaguucagu

SEQ ID NO: 376602 - RNA, 22 nt, Human
aggagagggguaggauuaauuu

SEQ ID NO: 376603 - RNA, 22 nt, Human
uccaggcuagguuuacaggaca

SEQ ID NO: 376604 - RNA, 22 nt, Human
uuugacauuggcuuauucuguu

SEQ ID NO: 376605 - RNA, 22 nt, Human
ucuaggagcaugaagggaaggc

SEQ ID NO: 376606 - RNA, 22 nt, Human
agcugaaggcuagaacagcugg

SEQ ID NO: 376607 - RNA, 22 nt, Human
agggacagucuacuguucacug

SEQ ID NO: 376608 - RNA, 22 nt, Human
agggaagaagcugguaguaggu

SEQ ID NO: 376609 - RNA, 22 nt, Human
aacuuucagaauccuaugcauu

SEQ ID NO: 376610 - RNA, 22 nt, Human
gaggagagaagcuaacggugcu

SEQ ID NO: 376611 - RNA, 22 nt, Human
ugcaucuguucagagcugucga

SEQ ID NO: 376612 - RNA, 22 nt, Human
guccuuugaaggcaaaaggaga

SEQ ID NO: 376613 - RNA, 22 nt, Human
uguaacaguaagccugugagcu

SEQ ID NO: 376614 - RNA, 22 nt, Human
gcaacuuuagggccagcaagua

SEQ ID NO: 376615 - RNA, 22 nt, Human
ucagaagccggaagugcuccuc

SEQ ID NO: 376616 - RNA, 22 nt, Human
auauuugucaauucacuguuca

SEQ ID NO: 376617 - RNA, 22 nt, Human
aguggcagagugcacucaggca

SEQ ID NO: 376618 - RNA, 22 nt, Human
agccucugugacucacagguca

SEQ ID NO: 376619 - RNA, 22 nt, Human
aagggcagggaguuugugucua

SEQ ID NO: 376620 - RNA, 22 nt, Human
ccucagagccuccagaaggaau

SEQ ID NO: 376621 - RNA, 22 nt, Human
caguaaaagauggaaauagaau

SEQ ID NO: 376622 - RNA, 22 nt, Human
uguucagagacagaaauucuaa

SEQ ID NO: 376623 - RNA, 22 nt, Human
cucuaacacuguaaugcuuucu

SEQ ID NO: 376624 - RNA, 22 nt, Human
agaaauguacgauguuaugcag

SEQ ID NO: 376625 - RNA, 21 nt, Human
gaggccacuaauaggggcaga

SEQ ID NO: 376626 - RNA, 22 nt, Human
guacacauuaugcuucucuaaa

SEQ ID NO: 376627 - RNA, 22 nt, Human
cauuucaaguaacagauugcuu

SEQ ID NO: 376628 - RNA, 22 nt, Human
acauaauaaaaauaacagcuca

SEQ ID NO: 376629 - RNA, 22 nt, Human
acacuucuauucccugcacaaa

SEQ ID NO: 376630 - RNA, 22 nt, Human
aucuuucaaucaggaaaaaucu

SEQ ID NO: 376631 - RNA, 22 nt, Human
aguguuugucccguuagaaaug

SEQ ID NO: 376632 - RNA, 22 nt, Human
aggggaggagcuuuucuugccu

SEQ ID NO: 376633 - RNA, 22 nt, Human
aggagggcuaggaaaaccagga

SEQ ID NO: 376634 - RNA, 22 nt, Human
uaugugcaguuugcucuuaaca

SEQ ID NO: 376635 - RNA, 22 nt, Human
cuucagaacuauaaaaaguacu

SEQ ID NO: 376636 - RNA, 22 nt, Human
ucaucaguuuagaaaaaauaug

SEQ ID NO: 376637 - RNA, 22 nt, Human
cagagacauuaagugccaugau

SEQ ID NO: 376638 - RNA, 22 nt, Human
uauucacauucucaggccuggu

SEQ ID NO: 376639 - RNA, 22 nt, Human
gcagauggaaagugcuugaggg

SEQ ID NO: 376640 - RNA, 22 nt, Human
ggcugccugggagcccuccucu

SEQ ID NO: 376641 - RNA, 22 nt, Human
ugccaggcccagcagggcggcc

SEQ ID NO: 376642 - RNA, 22 nt, Human
acaugcuuugcacuuacaucau

SEQ ID NO: 376643 - RNA, 22 nt, Human
uagagaaaagcagggaucagga

SEQ ID NO: 376644 - RNA, 22 nt, Human
uggcucagcgcggccuggucuu

SEQ ID NO: 376645 - RNA, 22 nt, Human
uagaaaucagguuuuuagaaag

SEQ ID NO: 376646 - RNA, 22 nt, Human
uucuuuccucccagccuuugga

SEQ ID NO: 376647 - RNA, 20 nt, Human
ggguggaguugcggucugug

SEQ ID NO: 376648 - RNA, 22 nt, Human
ggaggcucugcuccguguguuc

SEQ ID NO: 376649 - RNA, 22 nt, Human
cccagcuugucugauucagccu

SEQ ID NO: 376650 - RNA, 22 nt, Human
uccaggcugauccaugaagaau

SEQ ID NO: 376651 - RNA, 22 nt, Human
uccaugagacagauacuguaag

SEQ ID NO: 376652 - RNA, 22 nt, Human
uccaggcucucaggugucagca

SEQ ID NO: 376653 - RNA, 22 nt, Human
uacuguuuuuuagacucauggu

SEQ ID NO: 376654 - RNA, 22 nt, Human
uuugcauugccucugacuuaug

SEQ ID NO: 376655 - RNA, 22 nt, Human
cugagcugaaacuugagaggcu

SEQ ID NO: 376656 - RNA, 22 nt, Human
ucacaaaugaggaaaucgagca

SEQ ID NO: 376657 - RNA, 22 nt, Human
augauguugauaaauuacuuua

SEQ ID NO: 376658 - RNA, 22 nt, Human
uggcccugacugauguggaggg

SEQ ID NO: 376659 - RNA, 22 nt, Human
gcugcucuugaggggcucacug

SEQ ID NO: 376660 - RNA, 22 nt, Human
gcagauggcagcccaggcuggg

SEQ ID NO: 376661 - RNA, 22 nt, Human
agcuggagccagugugaggcuu

SEQ ID NO: 376662 - RNA, 17 nt, Human
uauguaguacuuauaaa

SEQ ID NO: 376663 - RNA, 22 nt, Human
aacauguugcuuuaauaauauu

SEQ ID NO: 376664 - RNA, 22 nt, Human
aaggcagccuuuguuugauuga

SEQ ID NO: 376665 - RNA, 22 nt, Human
aaguauaagcuauucuucauga

SEQ ID NO: 376666 - RNA, 23 nt, Human
cugcccugaucuugaucuauugu

SEQ ID NO: 376667 - RNA, 20 nt, Human
uacauucaaaacaaacucug

SEQ ID NO: 376668 - RNA, 22 nt, Human
aaguccagacuccuuugcgugg

SEQ ID NO: 376669 - RNA, 19 nt, Human
aggugcaggucacagggga

SEQ ID NO: 376670 - RNA, 22 nt, Human
aaauauguauggaguucaugaa

SEQ ID NO: 376671 - RNA, 22 nt, Human
aagagagagcauucuucuguua

SEQ ID NO: 376672 - RNA, 22 nt, Human
ucagaaauacuaucagcuuuug

SEQ ID NO: 376673 - RNA, 22 nt, Human
aagcuccccgaaacccaccucu

SEQ ID NO: 376674 - RNA, 22 nt, Human
gagaaggcuggucuuaagucga

SEQ ID NO: 376675 - RNA, 22 nt, Human
cccaggagguggagguugcggu

SEQ ID NO: 376676 - RNA, 22 nt, Human
ggcugccacgucgaggguccaa

SEQ ID NO: 376677 - RNA, 22 nt, Human
gcugauguaagacuuuugguuu

SEQ ID NO: 376678 - RNA, 22 nt, Human
ccagaauucagaaagggcauaa

SEQ ID NO: 376679 - RNA, 22 nt, Human
cagcucugaagaaaggugucua

SEQ ID NO: 376680 - RNA, 22 nt, Human
uauuuccugcauggugauguaa

SEQ ID NO: 376681 - RNA, 22 nt, Human
gcaaagcauucuguggagucua

SEQ ID NO: 376682 - RNA, 22 nt, Human
aaucucuuuggcucaaggaucc

SEQ ID NO: 376683 - RNA, 22 nt, Human
ucugaggcuauguucaggcuaa

SEQ ID NO: 376684 - RNA, 20 nt, Human
ucucccaggcucagggaaga

SEQ ID NO: 376685 - RNA, 22 nt, Human
auugucuucuggucuuaucuuu

SEQ ID NO: 376686 - RNA, 22 nt, Human
uuucaguguaagguuuccagga

SEQ ID NO: 376687 - RNA, 22 nt, Human
ugaggaaacugaggcacagaug

SEQ ID NO: 376688 - RNA, 22 nt, Human
cauguaaaacacucagaacagu

SEQ ID NO: 376689 - RNA, 18 nt, Human
ccugcagcccaggaggcc

SEQ ID NO: 376690 - RNA, 22 nt, Human
aguacuuuacuucuuacaguuu

SEQ ID NO: 376691 - RNA, 22 nt, Human
gacagaggcaagaccagaagcc

SEQ ID NO: 376692 - RNA, 22 nt, Human
gcaguaaaaaaggauaugugca

SEQ ID NO: 376693 - RNA, 22 nt, Human
agugggggccaacgagggcagc

SEQ ID NO: 376694 - RNA, 22 nt, Human
cccaggaguuggaggcuacggu

SEQ ID NO: 376695 - RNA, 22 nt, Human
aaugggaagucacuacuguuac

SEQ ID NO: 376696 - RNA, 22 nt, Human
gagaaccucuccacaagucugg

SEQ ID NO: 376697 - RNA, 22 nt, Human
auuucccuccagggaaagcuua

SEQ ID NO: 376698 - RNA, 22 nt, Human
ugaugaaacugagguuccaaga

SEQ ID NO: 376699 - RNA, 22 nt, Human
ucacguuuuacugagugagaua

SEQ ID NO: 376700 - RNA, 22 nt, Human
gaucauuugcaggaaacauuaa

SEQ ID NO: 376701 - RNA, 22 nt, Human
cuuaagaugaggucaugcuaua

SEQ ID NO: 376702 - RNA, 22 nt, Human
guaacagaggguuugcagauau

SEQ ID NO: 376703 - RNA, 22 nt, Human
uuggcucaggaccccugugacu

SEQ ID NO: 376704 - RNA, 22 nt, Human
auccugugcaaugacugcaucu

SEQ ID NO: 376705 - RNA, 22 nt, Human
agggccuggaacugugggcagg

SEQ ID NO: 376706 - RNA, 22 nt, Human
aggcugaggaucguacuuucca

SEQ ID NO: 376707 - RNA, 22 nt, Human
ccacccagccagaugcaggaag

SEQ ID NO: 376708 - RNA, 22 nt, Human
uuaacaauagaguuucuucagg

SEQ ID NO: 376709 - RNA, 22 nt, Human
uuacaaagaguguucuuuucca

SEQ ID NO: 376710 - RNA, 22 nt, Human
uggcccugcugggucagagcug

SEQ ID NO: 376711 - RNA, 22 nt, Human
caaauguaaauucuuuugaagc

SEQ ID NO: 376712 - RNA, 22 nt, Human
uggcccugcuuaugucucucuu

SEQ ID NO: 376713 - RNA, 22 nt, Human
ccagggugaccagcuggccuag

SEQ ID NO: 376714 - RNA, 22 nt, Human
cauacauaugcauguguguaua

SEQ ID NO: 376715 - RNA, 22 nt, Human
uuguuaaaaauagauuuccagg

SEQ ID NO: 376716 - RNA, 22 nt, Human
ggcuggagugggcuccagaguu

SEQ ID NO: 376717 - RNA, 22 nt, Human
aaauccuaaaaguuugacuuaa

SEQ ID NO: 376718 - RNA, 22 nt, Human
caggcaggagccagggauucca

SEQ ID NO: 376719 - RNA, 20 nt, Human
gccaggcacuguucucaaua

SEQ ID NO: 376720 - RNA, 20 nt, Human
gcauugaguauagacagaug

SEQ ID NO: 376721 - RNA, 22 nt, Human
agcugagcacauucaaacaggu

SEQ ID NO: 376722 - RNA, 22 nt, Human
aauguuaauuuacugucuucau

SEQ ID NO: 376723 - RNA, 22 nt, Human
agauauaauaauuuacaagugu

SEQ ID NO: 376724 - RNA, 22 nt, Human
cagcuugaaauauuaggagaug

SEQ ID NO: 376725 - RNA, 22 nt, Human
cucuucuuauggccguggcuga

SEQ ID NO: 376726 - RNA, 21 nt, Human
aaucauacaaaacaugucagg

SEQ ID NO: 376727 - RNA, 22 nt, Human
ucagcauaucuugagcuucaug

SEQ ID NO: 376728 - RNA, 17 nt, Human
aggccagaugaggcaag

SEQ ID NO: 376729 - RNA, 21 nt, Human
gcucccuggcugugugaccug

SEQ ID NO: 376730 - RNA, 22 nt, Human
ucuuugaacuuggcugaucucu

SEQ ID NO: 376731 - RNA, 18 nt, Human
ugagaggcagguagagga

SEQ ID NO: 376732 - RNA, 22 nt, Human
agagcuguggauaguccuggau

SEQ ID NO: 376733 - RNA, 22 nt, Human
uuucauuuugguuaugccauaa

SEQ ID NO: 376734 - RNA, 22 nt, Human
ucaaaccaccuuguuacugggg

SEQ ID NO: 376735 - RNA, 22 nt, Human
cccaguggaaggaguagaagac

SEQ ID NO: 376736 - RNA, 22 nt, Human
acagggccucagcugauucugg

SEQ ID NO: 376737 - RNA, 22 nt, Human
gcuggagauaguaggauccaua

SEQ ID NO: 376738 - RNA, 22 nt, Human
caggaaagguagucacaaugua

SEQ ID NO: 376739 - RNA, 22 nt, Human
cugagagccuccuguuggcuag

SEQ ID NO: 376740 - RNA, 22 nt, Human
agggcaguucaacuucauagug

SEQ ID NO: 376741 - RNA, 22 nt, Human
ucugggagagcacguggcugac

SEQ ID NO: 376742 - RNA, 22 nt, Human
gcucugcuugcaucaugacugc

SEQ ID NO: 376743 - RNA, 22 nt, Human
auugucuuuggugcuuccagga

SEQ ID NO: 376744 - RNA, 22 nt, Human
uuugaaguguuauuucuaucac

SEQ ID NO: 376745 - RNA, 22 nt, Human
caggaggcuuugggauccaagu

SEQ ID NO: 376746 - RNA, 22 nt, Human
gagggaggugauacugaacgua

SEQ ID NO: 376747 - RNA, 22 nt, Human
gcucccuguucucagccaugau

SEQ ID NO: 376748 - RNA, 21 nt, Human
cccaagggaggcaggauaagg

SEQ ID NO: 376749 - RNA, 22 nt, Human
ugacauuuaucaaagaaauggu

SEQ ID NO: 376750 - RNA, 22 nt, Human
ugaguccaucgcagggaagugg

SEQ ID NO: 376751 - RNA, 22 nt, Human
ugcagugggccggaggccaggg

SEQ ID NO: 376752 - RNA, 22 nt, Human
ugagcugggcugggcugagcug

SEQ ID NO: 376753 - RNA, 22 nt, Human
uggaggaugccauccaggauac

SEQ ID NO: 376754 - RNA, 22 nt, Human
agcuggguggagggcccacggu

SEQ ID NO: 376755 - RNA, 22 nt, Human
agcagcugagaugguaagauuc

SEQ ID NO: 376756 - RNA, 22 nt, Human
uuccucuccucacaugagucac

SEQ ID NO: 376757 - RNA, 22 nt, Human
aaguggagccagggaaacugaa

SEQ ID NO: 376758 - RNA, 22 nt, Human
gccagguggucuggcuccagag

SEQ ID NO: 376759 - RNA, 22 nt, Human
ggcugcagauagccagccacca

SEQ ID NO: 376760 - RNA, 22 nt, Human
ggaggggagguccagcugaucu

SEQ ID NO: 376761 - RNA, 22 nt, Human
gagcucagauucuggugucaga

SEQ ID NO: 376762 - RNA, 22 nt, Human
cuuuuauuuugaauuaagggcu

SEQ ID NO: 376763 - RNA, 22 nt, Human
ccaccagcuuugccacccugcu

SEQ ID NO: 376764 - RNA, 19 nt, Human
auaaggcaggaggaaauuu

SEQ ID NO: 376765 - RNA, 22 nt, Human
uauuuuaaagacugccagccua

SEQ ID NO: 376766 - RNA, 22 nt, Human
ggcagcucugcuccacaugagu

SEQ ID NO: 376767 - RNA, 22 nt, Human
gccagggcaggggagcaucugc

SEQ ID NO: 376768 - RNA, 22 nt, Human
aggaggcugguucaggccauau

SEQ ID NO: 376769 - RNA, 22 nt, Human
aggcagguguuaccucugguuu

SEQ ID NO: 376770 - RNA, 22 nt, Human
uugcugugucugauggcugaga

SEQ ID NO: 376771 - RNA, 22 nt, Human
uuucagaugugugucucugaag

SEQ ID NO: 376772 - RNA, 18 nt, Human
uggacaggguggagaaaa

SEQ ID NO: 376773 - RNA, 22 nt, Human
agccagaggccagccugccuca

SEQ ID NO: 376774 - RNA, 22 nt, Human
caguguggugagauuccaggug

SEQ ID NO: 376775 - RNA, 22 nt, Human
ucugcugugauuugcuaccugu

SEQ ID NO: 376776 - RNA, 22 nt, Human
cacagggcagugcugcccacuc

SEQ ID NO: 376777 - RNA, 22 nt, Human
gcagaggagugauuaugccgug

SEQ ID NO: 376778 - RNA, 22 nt, Human
uagaaauguugguauuaacauu

SEQ ID NO: 376779 - RNA, 22 nt, Human
aaaaaugcugugguagcugugu

SEQ ID NO: 376780 - RNA, 22 nt, Human
ugcucugcaagcaggagcaaga

SEQ ID NO: 376781 - RNA, 22 nt, Human
ccagggugggaggcugaaggcg

SEQ ID NO: 376782 - RNA, 22 nt, Human
ucagggcaaagggcagaguuug

SEQ ID NO: 376783 - RNA, 22 nt, Human
gagccuggggacccuccugagu

SEQ ID NO: 376784 - RNA, 22 nt, Human
ccugggaagagcugacaggagg

SEQ ID NO: 376785 - RNA, 22 nt, Human
uuucuucacaggguauugggug

SEQ ID NO: 376786 - RNA, 23 nt, Human
ucccagccucuucucuugcauac

SEQ ID NO: 376787 - RNA, 22 nt, Human
agagcuggggccagagucaagg

SEQ ID NO: 376788 - RNA, 22 nt, Human
agcugaugccauguggaacagu

SEQ ID NO: 376789 - RNA, 22 nt, Human
gggaaauugucaacacucucaa

SEQ ID NO: 376790 - RNA, 22 nt, Human
uuuuaugugcuggacuggcagu

SEQ ID NO: 376791 - RNA, 22 nt, Human
ugggcaggggcccugcuuccgu

SEQ ID NO: 376792 - RNA, 22 nt, Human
ugcccagcacugugccagucac

SEQ ID NO: 376793 - RNA, 22 nt, Human
augaaggcaguuaaacgucauc

SEQ ID NO: 376794 - RNA, 22 nt, Human
uccuguaguugcuaaguuuguu

SEQ ID NO: 376795 - RNA, 22 nt, Human
ggcagugacuguucagacgucc

SEQ ID NO: 376796 - RNA, 22 nt, Human
gaggcagcugggauacaaggga

SEQ ID NO: 376797 - RNA, 22 nt, Human
agcagcuccugccaugagugcu

SEQ ID NO: 376798 - RNA, 20 nt, Human
ugggccugagccugugggcu

SEQ ID NO: 376799 - RNA, 22 nt, Human
auucugucuuuuuaaaauaaua

SEQ ID NO: 376800 - RNA, 22 nt, Human
gauuuccauuuucaacuccugc

SEQ ID NO: 376801 - RNA, 22 nt, Human
aauuaaauugguuuagagagga

SEQ ID NO: 376802 - RNA, 22 nt, Human
aauuuuauuagaaggcaagggg

SEQ ID NO: 376803 - RNA, 22 nt, Human
gcuggcagagacaagaagacua

SEQ ID NO: 376804 - RNA, 22 nt, Human
agcccaggucucaaaguacagg

SEQ ID NO: 376805 - RNA, 22 nt, Human
uuuaggcauacuuuugggagaa

SEQ ID NO: 376806 - RNA, 22 nt, Human
caaaggcaguuacugaaugaag

SEQ ID NO: 376807 - RNA, 22 nt, Human
caguucacacugugcuaucugc

SEQ ID NO: 376808 - RNA, 22 nt, Human
agcuucuuggcucagcacuugg

SEQ ID NO: 376809 - RNA, 22 nt, Human
cauugcacuccaucuugggcaa

SEQ ID NO: 376810 - RNA, 22 nt, Human
agaggcugaaugaugucaucau

SEQ ID NO: 376811 - RNA, 22 nt, Human
gggugggagucuggcccucaaa

SEQ ID NO: 376812 - RNA, 22 nt, Human
cagaaugcaaauuuuauaauau

SEQ ID NO: 376813 - RNA, 22 nt, Human
cuucucagucaccugugagucu

SEQ ID NO: 376814 - RNA, 22 nt, Human
guuuuauaggugaaauauuacu

SEQ ID NO: 376815 - RNA, 22 nt, Human
gccucugcugacaagauggaca

SEQ ID NO: 376816 - RNA, 22 nt, Human
ugaagccaaucugccaggcaga

SEQ ID NO: 376817 - RNA, 22 nt, Human
ugcugugagguugagaaggaag

SEQ ID NO: 376818 - RNA, 22 nt, Human
aaacuuugguauguagcaaaac

SEQ ID NO: 376819 - RNA, 22 nt, Human
gaaaugugaccuacuuccuugu

SEQ ID NO: 376820 - RNA, 22 nt, Human
ggcagcuccucaaaaaauuaaa

SEQ ID NO: 376821 - RNA, 22 nt, Human
agggugguucuuuuaguggaag

SEQ ID NO: 376822 - RNA, 22 nt, Human
gccauuuagggaggcaagguga

SEQ ID NO: 376823 - RNA, 22 nt, Human
ugucucagaguaucccugaacu

SEQ ID NO: 376824 - RNA, 22 nt, Human
uggccugggugcugcugacauc

SEQ ID NO: 376825 - RNA, 22 nt, Human
uucaggauuguguuuuuccuga

SEQ ID NO: 376826 - RNA, 22 nt, Human
ggcaguggguggaucucaggga

SEQ ID NO: 376827 - RNA, 20 nt, Human
gaaggaagggggcaagguga

SEQ ID NO: 376828 - RNA, 20 nt, Human
cuaucuccuggcgugccuuc

SEQ ID NO: 376829 - RNA, 22 nt, Human
cuuccugaacaaugccaucaau

SEQ ID NO: 376830 - RNA, 21 nt, Human
gccuggcagguggaagggcuc

SEQ ID NO: 376831 - RNA, 22 nt, Human
guucuaauauuuuaaaagccaa

SEQ ID NO: 376832 - RNA, 20 nt, Human
uuucaagucagcaauucuca

SEQ ID NO: 376833 - RNA, 23 nt, Human
uccucccaaauuucagccucauu

SEQ ID NO: 376834 - RNA, 22 nt, Human
aauauaaugcuguuuuaugcca

SEQ ID NO: 376835 - RNA, 22 nt, Human
uccuugaauccuagcauccuau

SEQ ID NO: 376836 - RNA, 22 nt, Human
cuggaguguaaagagcauagaa

SEQ ID NO: 376837 - RNA, 22 nt, Human
aggguagggccguagggccaug

SEQ ID NO: 376838 - RNA, 22 nt, Human
cucagaguccccacaucugggu

SEQ ID NO: 376839 - RNA, 22 nt, Human
cugcucucuguuccccuggauc

SEQ ID NO: 376840 - RNA, 22 nt, Human
ugagggaggcccuuugagcaga

SEQ ID NO: 376841 - RNA, 22 nt, Human
aggcacugauucucagaguuac

SEQ ID NO: 376842 - RNA, 22 nt, Human
agagugcagauaagagaauguu

SEQ ID NO: 376843 - RNA, 22 nt, Human
ucaggcagaauuaucaaaagau

SEQ ID NO: 376844 - RNA, 22 nt, Human
agcugcagucaagcugggccac

SEQ ID NO: 376845 - RNA, 22 nt, Human
gaggccugaaaggggaccuaug

SEQ ID NO: 376846 - RNA, 22 nt, Human
ucaacuuuaguguagcuauuua

SEQ ID NO: 376847 - RNA, 23 nt, Human
agcacacuuguacaaugcccuag

SEQ ID NO: 376848 - RNA, 22 nt, Human
ccaggggcuggugcugagcugg

SEQ ID NO: 376849 - RNA, 17 nt, Human
gguggccugcaguggcu

SEQ ID NO: 376850 - RNA, 22 nt, Human
acagagagaggcccgaggcugc

SEQ ID NO: 376851 - RNA, 22 nt, Human
gcagagccaggcuggggcaggu

SEQ ID NO: 376852 - RNA, 22 nt, Human
ccugugucuuccccacuggugu

SEQ ID NO: 376853 - RNA, 22 nt, Human
ugucagugguagacccagaggu

SEQ ID NO: 376854 - RNA, 22 nt, Human
uuuugaaagccagguuuguaug

SEQ ID NO: 376855 - RNA, 22 nt, Human
uuacuuugaugaucaaugagcg

SEQ ID NO: 376856 - RNA, 22 nt, Human
gcacagggagcaggucucuggu

SEQ ID NO: 376857 - RNA, 22 nt, Human
ccagcugcagguguuccagaug

SEQ ID NO: 376858 - RNA, 23 nt, Human
caugccaguuugugcaggcagau

SEQ ID NO: 376859 - RNA, 20 nt, Human
uggggccuguuucugugguu

SEQ ID NO: 376860 - RNA, 15 nt, Human
caggagaggaagguu

SEQ ID NO: 376861 - RNA, 23 nt, Human
agucaguguaaguuuggaaugca

SEQ ID NO: 376862 - RNA, 22 nt, Human
gacagccaugcacuucugcugu

SEQ ID NO: 376863 - RNA, 22 nt, Human
uuguaaauaguaguaagaugcc

SEQ ID NO: 376864 - RNA, 22 nt, Human
ucuguucacugagcaauggcaa

SEQ ID NO: 376865 - RNA, 22 nt, Human
aggcacugugcugaugucuuau

SEQ ID NO: 376866 - RNA, 22 nt, Human
gccuguccacuaaacagccaag

SEQ ID NO: 376867 - RNA, 22 nt, Human
cauuuguaucugggcugcugug

SEQ ID NO: 376868 - RNA, 16 nt, Human
auuuccagauuaugca

SEQ ID NO: 376869 - RNA, 22 nt, Human
gggcagaggcucuggcccaucc

SEQ ID NO: 376870 - RNA, 21 nt, Human
guuuucaugauagagucugua

SEQ ID NO: 376871 - RNA, 19 nt, Human
cucugccucccuccugggu

SEQ ID NO: 376872 - RNA, 22 nt, Human
ccagggcauguccaagacuuag

SEQ ID NO: 376873 - RNA, 22 nt, Human
cccaggcacacugaagugacau

SEQ ID NO: 376874 - RNA, 22 nt, Human
agaaauacuuuguaaaucucac

SEQ ID NO: 376875 - RNA, 22 nt, Human
agcugucuuucugccuccugau

SEQ ID NO: 376876 - RNA, 22 nt, Human
gauucaauguugcagauggaau

SEQ ID NO: 376877 - RNA, 22 nt, Human
uggcucagcaagacauugaccu

SEQ ID NO: 376878 - RNA, 20 nt, Human
ggaggguggaagaaagcaag

SEQ ID NO: 376879 - RNA, 19 nt, Human
uucacaauuaugaaauuag

SEQ ID NO: 376880 - RNA, 22 nt, Human
uuacugaaaauucuucaggauu

SEQ ID NO: 376881 - RNA, 22 nt, Human
auaugaagucagacaaacuggg

SEQ ID NO: 376882 - RNA, 22 nt, Human
ccuuccaggagucucugcaggu

SEQ ID NO: 376883 - RNA, 22 nt, Human
agaauuuccuaugagagauucc

SEQ ID NO: 376884 - RNA, 18 nt, Human
cagucccaaaccuuagga

SEQ ID NO: 376885 - RNA, 22 nt, Human
ggucccaggcucccucuugucc

SEQ ID NO: 376886 - RNA, 22 nt, Human
gaggagggagcuggaagcucuu

SEQ ID NO: 376887 - RNA, 22 nt, Human
ugcagcuucuuguccugugauu

SEQ ID NO: 376888 - RNA, 22 nt, Human
gauuuucauuauagcuaguuuc

SEQ ID NO: 376889 - RNA, 19 nt, Human
ccugggaggcggagguugc

SEQ ID NO: 376890 - RNA, 22 nt, Human
ccgggcgggggcucucgucacc

SEQ ID NO: 376891 - RNA, 22 nt, Human
cucacagguaccagcacccucc

SEQ ID NO: 376892 - RNA, 22 nt, Human
uuccuucucagcccucgaggau

SEQ ID NO: 376893 - RNA, 22 nt, Human
acaggccuuggcaggcauguga

SEQ ID NO: 376894 - RNA, 22 nt, Human
ggagcugcuuugaucugaagaa

SEQ ID NO: 376895 - RNA, 22 nt, Human
auuauauugaguauaaccagag

SEQ ID NO: 376896 - RNA, 22 nt, Human
ggccucuggcaggcaggcccuc

SEQ ID NO: 376897 - RNA, 22 nt, Human
uguguauucagcaagcgaaaca

SEQ ID NO: 376898 - RNA, 22 nt, Human
acagaagagcacauuuaguaug

SEQ ID NO: 376899 - RNA, 22 nt, Human
aggcaggcuagucgcuugagcc

SEQ ID NO: 376900 - RNA, 22 nt, Human
cagagcaugaauaaaaguuaca

SEQ ID NO: 376901 - RNA, 22 nt, Human
acagcuguggucuccuuagugu

SEQ ID NO: 376902 - RNA, 21 nt, Human
guuugcaugaacaagucagcc

SEQ ID NO: 376903 - RNA, 22 nt, Human
ucagggacuaggugcugccuga

SEQ ID NO: 376904 - RNA, 22 nt, Human
augugaaaccugugaguagagu

SEQ ID NO: 376905 - RNA, 22 nt, Human
ucuucagagacucugagccccu

SEQ ID NO: 376906 - RNA, 22 nt, Human
caagagcauuuaguuagcuggu

SEQ ID NO: 376907 - RNA, 22 nt, Human
ucagagugguagccuauuuucu

SEQ ID NO: 376908 - RNA, 22 nt, Human
gcaggcugugaggcucagaugg

SEQ ID NO: 376909 - RNA, 22 nt, Human
gagaccaggaaguacagcagcc

SEQ ID NO: 376910 - RNA, 21 nt, Human
acagauuuuauaucucugcug

SEQ ID NO: 376911 - RNA, 22 nt, Human
uucuauacaaagauuucucaca

SEQ ID NO: 376912 - RNA, 22 nt, Human
uagcugcugcagcacagggagg

SEQ ID NO: 376913 - RNA, 22 nt, Human
acccuguaugcuauaucccuaa

SEQ ID NO: 376914 - RNA, 20 nt, Human
guccugggagccacagcaca

SEQ ID NO: 376915 - RNA, 22 nt, Human
ugaaggaaugaguauacuguuu

SEQ ID NO: 376916 - RNA, 22 nt, Human
ugcuuuauguuaucagaagggu

SEQ ID NO: 376917 - RNA, 19 nt, Human
agacacacuugauaugugu

SEQ ID NO: 376918 - RNA, 22 nt, Human
ugggcugaaaugcuguggacua

SEQ ID NO: 376919 - RNA, 17 nt, Human
gcagcagagagacccuc

SEQ ID NO: 376920 - RNA, 22 nt, Human
uugaaaacuuucuagaccaaga

SEQ ID NO: 376921 - RNA, 22 nt, Human
uucauugugaacacauucugcc

SEQ ID NO: 376922 - RNA, 22 nt, Human
aacagacagaaaaaugugaucu

SEQ ID NO: 376923 - RNA, 22 nt, Human
cagcagugugcaggugugcugg

SEQ ID NO: 376924 - RNA, 22 nt, Human
uuguuacagcagugauuucaga

SEQ ID NO: 376925 - RNA, 19 nt, Human
gcagccaccgcggcggccg

SEQ ID NO: 376926 - RNA, 22 nt, Human
ccucaggaaaugaauaaauggc

SEQ ID NO: 376927 - RNA, 22 nt, Human
gccugggugucgaucacuagug

SEQ ID NO: 376928 - RNA, 19 nt, Human
gcaugcuugguggcuucug

SEQ ID NO: 376929 - RNA, 22 nt, Human
gagcucccaggccccagcaagg

SEQ ID NO: 376930 - RNA, 22 nt, Human
cuucaagaagacagcagagcau

SEQ ID NO: 376931 - RNA, 22 nt, Human
cuguccauuuucgugccuccuu

SEQ ID NO: 376932 - RNA, 22 nt, Human
uggcucagccagcccuaggaac

SEQ ID NO: 376933 - RNA, 22 nt, Human
uggcccuguggaggucagugag

SEQ ID NO: 376934 - RNA, 22 nt, Human
gugucccaggagaggagacaau

SEQ ID NO: 376935 - RNA, 22 nt, Human
aagcagaaguugaucuaccaua

SEQ ID NO: 376936 - RNA, 22 nt, Human
gcccugugccagucacgcugug

SEQ ID NO: 376937 - RNA, 22 nt, Human
cacagcugccauggcugcacuu

SEQ ID NO: 376938 - RNA, 22 nt, Human
ucugugcaggaagucauuauga

SEQ ID NO: 376939 - RNA, 22 nt, Human
gaaguucaaaagacagauuuga

SEQ ID NO: 376940 - RNA, 22 nt, Human
ucuggcugcugcgugagugcuu

SEQ ID NO: 376941 - RNA, 22 nt, Human
agcagggcuggggcacgagcca

SEQ ID NO: 376942 - RNA, 22 nt, Human
ucuguagcaagugagaggcauu

SEQ ID NO: 376943 - RNA, 22 nt, Human
uuugggcaguagauguaucacu

SEQ ID NO: 376944 - RNA, 22 nt, Human
ggcacugauuccauucaugaag

SEQ ID NO: 376945 - RNA, 23 nt, Human
aucagucuugguagcugugccca

SEQ ID NO: 376946 - RNA, 22 nt, Human
gccuggguuccaugaucuccag

SEQ ID NO: 376947 - RNA, 18 nt, Human
cucugcuaaugggcagcu

SEQ ID NO: 376948 - RNA, 22 nt, Human
gagaagucauuugaccaccuag

SEQ ID NO: 376949 - RNA, 22 nt, Human
uggcugcuagccagagcuucag

SEQ ID NO: 376950 - RNA, 22 nt, Human
gcagaugaggaagcuaaugcug

SEQ ID NO: 376951 - RNA, 23 nt, Human
ggggccugcaccggucugcgcgg

SEQ ID NO: 376952 - RNA, 22 nt, Human
cuucaggauuuaggaagaugaa

SEQ ID NO: 376953 - RNA, 22 nt, Human
ccaggguaccccaagggcaggu

SEQ ID NO: 376954 - RNA, 22 nt, Human
gccaggagaaaaggcgaaugau

SEQ ID NO: 376955 - RNA, 23 nt, Human
aaguaacagggauaauagcaguu

SEQ ID NO: 376956 - RNA, 22 nt, Human
uauugaguuacagaaaauacuu

SEQ ID NO: 376957 - RNA, 22 nt, Human
agaacagaggccuuauguuuca

SEQ ID NO: 376958 - RNA, 22 nt, Human
aaauguauugcauaggauauuu

SEQ ID NO: 376959 - RNA, 22 nt, Human
ccuuggagcggucagcacuggu

SEQ ID NO: 376960 - RNA, 22 nt, Human
guucuucagcauuagaagucau

SEQ ID NO: 376961 - RNA, 22 nt, Human
uauuuguauuucaugcaguaaa

SEQ ID NO: 376962 - RNA, 19 nt, Human
ucugcuggcagaauucccu

SEQ ID NO: 376963 - RNA, 22 nt, Human
cugccagcucaaagcgcagcua

SEQ ID NO: 376964 - RNA, 22 nt, Human
gagguucacaggcuaucacagu

SEQ ID NO: 376965 - RNA, 22 nt, Human
ccagcagacacacaggcguggg

SEQ ID NO: 376966 - RNA, 22 nt, Human
uuccugagggacuuuugagauu

SEQ ID NO: 376967 - RNA, 22 nt, Human
agaaaugacacacaugagacau

SEQ ID NO: 376968 - RNA, 22 nt, Human
gcccaggagaggccagggcuga

SEQ ID NO: 376969 - RNA, 22 nt, Human
ugcagggcuccuggcuccaauc

SEQ ID NO: 376970 - RNA, 15 nt, Human
aggcacugugggacc

SEQ ID NO: 376971 - RNA, 22 nt, Human
cuuaauuucaaacugcuaguga

SEQ ID NO: 376972 - RNA, 22 nt, Human
uuuagaaugugacuguauuuga

SEQ ID NO: 376973 - RNA, 22 nt, Human
uaaauucccaacucugcucuuc

SEQ ID NO: 376974 - RNA, 22 nt, Human
cacaggagauugaucuauuggu

SEQ ID NO: 376975 - RNA, 22 nt, Human
uuuguuaaauauuuauugagug

SEQ ID NO: 376976 - RNA, 22 nt, Human
aucagcugaaaaacaggcagca

SEQ ID NO: 376977 - RNA, 22 nt, Human
cucucuggcuuggcacggagau

SEQ ID NO: 376978 - RNA, 22 nt, Human
gucccagagagcacuaguccau

SEQ ID NO: 376979 - RNA, 22 nt, Human
caggcagcuagauuuauaacaa

SEQ ID NO: 376980 - RNA, 23 nt, Human
agccucuuuucuccugcccugca

SEQ ID NO: 376981 - RNA, 22 nt, Human
aacaguaaagacagaauuuauc

SEQ ID NO: 376982 - RNA, 22 nt, Human
accaggaggccuggagcacaaa

SEQ ID NO: 376983 - RNA, 22 nt, Human
ucgagucauguucucccauuaa

SEQ ID NO: 376984 - RNA, 22 nt, Human
ccagcugcuugggaaaaugucu

SEQ ID NO: 376985 - RNA, 22 nt, Human
ccucucucuccugcacacacac

SEQ ID NO: 376986 - RNA, 22 nt, Human
ugggggaagagcuuguuaaagu

SEQ ID NO: 376987 - RNA, 22 nt, Human
aggacaguccgggguccuccac

SEQ ID NO: 376988 - RNA, 22 nt, Human
gagcucugggaaacaaagugua

SEQ ID NO: 376989 - RNA, 22 nt, Human
cuacagaaaccuuuuucauaca

SEQ ID NO: 376990 - RNA, 22 nt, Human
uggcugaguuccuggcacacgg

SEQ ID NO: 376991 - RNA, 22 nt, Human
guuaggcauuugccuuaauuuu

SEQ ID NO: 376992 - RNA, 22 nt, Human
ucacuuauugcucaucucaugc

SEQ ID NO: 376993 - RNA, 23 nt, Human
ggaguuggauuguacuugcugcu

SEQ ID NO: 376994 - RNA, 21 nt, Human
aucuuuauuacgcagagaaga

SEQ ID NO: 376995 - RNA, 22 nt, Human
ucaggaggccaccaggaccugu

SEQ ID NO: 376996 - RNA, 21 nt, Human
acagcaagccuuccuuucagg

SEQ ID NO: 376997 - RNA, 22 nt, Human
uggggcugugagacuacaggau

SEQ ID NO: 376998 - RNA, 22 nt, Human
auggaguucugccagcgcugcu

SEQ ID NO: 376999 - RNA, 22 nt, Human
ugcugccaagcccgugcuccug

SEQ ID NO: 377000 - RNA, 22 nt, Human
auguccaguuucuacacacaua

SEQ ID NO: 377001 - RNA, 22 nt, Human
cuccugggcucaagugauccuc

SEQ ID NO: 377002 - RNA, 22 nt, Human
cccucugccucugaguaggaca

SEQ ID NO: 377003 - RNA, 22 nt, Human
ccucuggcaacuucacagccca

SEQ ID NO: 377004 - RNA, 22 nt, Human
aagaauguggguggauaugaug

SEQ ID NO: 377005 - RNA, 22 nt, Human
ccacagagacaggguccuugcu

SEQ ID NO: 377006 - RNA, 22 nt, Human
aaggaagagaauccuucucaga

SEQ ID NO: 377007 - RNA, 22 nt, Human
gcagggccagugcagagaggaa

SEQ ID NO: 377008 - RNA, 22 nt, Human
caaauguauucucacuucaggg

SEQ ID NO: 377009 - RNA, 22 nt, Human
uaacagaauuugcuaaacuccg

SEQ ID NO: 377010 - RNA, 22 nt, Human
caggcagccugcggucugcaca

SEQ ID NO: 377011 - RNA, 22 nt, Human
uucucagguagugcugaugcug

SEQ ID NO: 377012 - RNA, 22 nt, Human
aauauucaaguuauucuuucuu

SEQ ID NO: 377013 - RNA, 22 nt, Human
ccagagcugauuccugggacuu

SEQ ID NO: 377014 - RNA, 22 nt, Human
uauucauaguaaacaaaagugg

SEQ ID NO: 377015 - RNA, 22 nt, Human
cagcagcugauggggaagugau

SEQ ID NO: 377016 - RNA, 22 nt, Human
caggcacagaguuauucauuua

SEQ ID NO: 377017 - RNA, 22 nt, Human
augaauaaaacauuuuaaucag

SEQ ID NO: 377018 - RNA, 22 nt, Human
guauccuuugcggaaauuucua

SEQ ID NO: 377019 - RNA, 22 nt, Human
ccagccaggcauugcaaacuga

SEQ ID NO: 377020 - RNA, 22 nt, Human
uccuguuuaucugugugacucg

SEQ ID NO: 377021 - RNA, 22 nt, Human
agguggguccuggcucugccau

SEQ ID NO: 377022 - RNA, 18 nt, Human
uggcucugcagccagaug

SEQ ID NO: 377023 - RNA, 22 nt, Human
gcagggcucauucuaguacaau

SEQ ID NO: 377024 - RNA, 22 nt, Human
ucugggagguaaccaugcugau

SEQ ID NO: 377025 - RNA, 22 nt, Human
cugcaggggcuggaguuggcuu

SEQ ID NO: 377026 - RNA, 22 nt, Human
cucaacagcucugccauacucc

SEQ ID NO: 377027 - RNA, 22 nt, Human
guauucauauuaaacauaucaa

SEQ ID NO: 377028 - RNA, 22 nt, Human
acagggcagugucuugaaaaau

SEQ ID NO: 377029 - RNA, 22 nt, Human
uucugggacaucuggacaguuu

SEQ ID NO: 377030 - RNA, 22 nt, Human
cagagccagcuguccuuggcau

SEQ ID NO: 377031 - RNA, 23 nt, Human
uggcugagauccuacuguuugcu

SEQ ID NO: 377032 - RNA, 20 nt, Human
agagccuggaaaaagacauc

SEQ ID NO: 377033 - RNA, 22 nt, Human
acagauuuuugguaaauaauuu

SEQ ID NO: 377034 - RNA, 22 nt, Human
accugccuaucagcugccugcu

SEQ ID NO: 377035 - RNA, 22 nt, Human
ccaaggagaaaugcugugcuuu

SEQ ID NO: 377036 - RNA, 22 nt, Human
agggccugucagcgguguccug

SEQ ID NO: 377037 - RNA, 22 nt, Human
cccuggcaaaacacucucuuga

SEQ ID NO: 377038 - RNA, 22 nt, Human
ucagugucuugaccugggugug

SEQ ID NO: 377039 - RNA, 22 nt, Human
auaucaguaucuauguauuugu

SEQ ID NO: 377040 - RNA, 22 nt, Human
caccagcuacagacuacugugu

SEQ ID NO: 377041 - RNA, 22 nt, Human
ccaggagcaggagcuggacaga

SEQ ID NO: 377042 - RNA, 22 nt, Human
acagagccacuuuggugccuac

SEQ ID NO: 377043 - RNA, 22 nt, Human
ugcugccauggucgcugguguc

SEQ ID NO: 377044 - RNA, 22 nt, Human
aacaugauuuaguauaaugcag

SEQ ID NO: 377045 - RNA, 22 nt, Human
ugaaauagucuaaaaaaccaga

SEQ ID NO: 377046 - RNA, 22 nt, Human
ccagcagagcauggggaggaag

SEQ ID NO: 377047 - RNA, 22 nt, Human
ggccagggggcuucagacucca

SEQ ID NO: 377048 - RNA, 22 nt, Human
caggccuggagugcaauggcac

SEQ ID NO: 377049 - RNA, 22 nt, Human
uccuuggcuuucuggagcuucu

SEQ ID NO: 377050 - RNA, 22 nt, Human
ugaggcaggagaaucacaugaa

SEQ ID NO: 377051 - RNA, 22 nt, Human
ugcaggagaaaguacggagcgu

SEQ ID NO: 377052 - RNA, 22 nt, Human
auuacaguaacagcuacaaugc

SEQ ID NO: 377053 - RNA, 22 nt, Human
ccugcugugaagccaggccugu

SEQ ID NO: 377054 - RNA, 22 nt, Human
auuugcuucugugaaaucaagu

SEQ ID NO: 377055 - RNA, 22 nt, Human
cuucuugcugggggccucagug

SEQ ID NO: 377056 - RNA, 22 nt, Human
ggagccuguggcugcuugaagc

SEQ ID NO: 377057 - RNA, 22 nt, Human
gggcuggcaggaccugggcuga

SEQ ID NO: 377058 - RNA, 22 nt, Human
gaggugggaugugugugcuacu

SEQ ID NO: 377059 - RNA, 22 nt, Human
uuuacagaaugucaauuucuau

SEQ ID NO: 377060 - RNA, 22 nt, Human
agccaaggagugcagguggcuu

SEQ ID NO: 377061 - RNA, 22 nt, Human
uauuugcaaagaacuacacuag

SEQ ID NO: 377062 - RNA, 22 nt, Human
aaaaaugaaacggcugguuggc

SEQ ID NO: 377063 - RNA, 22 nt, Human
uccaggagaaaacugacggugg

SEQ ID NO: 377064 - RNA, 22 nt, Human
gaggcagcaaaauauaucauaa

SEQ ID NO: 377065 - RNA, 22 nt, Human
auugcuguacacuucuagaucu

SEQ ID NO: 377066 - RNA, 22 nt, Human
cagcagcuggugagacacagcc

SEQ ID NO: 377067 - RNA, 22 nt, Human
uuccauaacugaccgaaugcau

SEQ ID NO: 377068 - RNA, 22 nt, Human
ccaagggaaaccgagaggcugg

SEQ ID NO: 377069 - RNA, 22 nt, Human
caguccuuagucuggauggcuu

SEQ ID NO: 377070 - RNA, 22 nt, Human
uauauacuuucuuccuggguag

SEQ ID NO: 377071 - RNA, 22 nt, Human
auugaaaaauucacaauucugg

SEQ ID NO: 377072 - RNA, 22 nt, Human
caggaaaaaugccaggagucag

SEQ ID NO: 377073 - RNA, 22 nt, Human
aaaucagugcucauuugaaagg

SEQ ID NO: 377074 - RNA, 22 nt, Human
ggaagaggcucucauugagggc

SEQ ID NO: 377075 - RNA, 22 nt, Human
uagaacauaagucauucauuug

SEQ ID NO: 377076 - RNA, 22 nt, Human
ugugcuucuugcagcuccugua

SEQ ID NO: 377077 - RNA, 22 nt, Human
aaaguucagugccuucuauaca

SEQ ID NO: 377078 - RNA, 22 nt, Human
ucacaugcucaccuaagccaca

SEQ ID NO: 377079 - RNA, 20 nt, Human
gaggaaaagcugccaggccu

SEQ ID NO: 377080 - RNA, 18 nt, Human
acagacaaaauggaaaug

SEQ ID NO: 377081 - RNA, 22 nt, Human
agccagcagggcuuagaggaca

SEQ ID NO: 377082 - RNA, 22 nt, Human
augauugaccaucugcugggcu

SEQ ID NO: 377083 - RNA, 22 nt, Human
uccugcagacauuuacaccuuu

SEQ ID NO: 377084 - RNA, 22 nt, Human
cagccuucugaaugaacguacu

SEQ ID NO: 377085 - RNA, 22 nt, Human
uauagaagagacaugugcauag

SEQ ID NO: 377086 - RNA, 22 nt, Human
gagaggcuaugagguucugugu

SEQ ID NO: 377087 - RNA, 21 nt, Human
aggugccaaggagaagcaggc

SEQ ID NO: 377088 - RNA, 22 nt, Human
aaagucauuuuccagaccagua

SEQ ID NO: 377089 - RNA, 22 nt, Human
cucaccacagagccuguccagc

SEQ ID NO: 377090 - RNA, 22 nt, Human
aaacagaaggguagguaaacau

SEQ ID NO: 377091 - RNA, 22 nt, Human
ggccaggcugcugggaccccgc

SEQ ID NO: 377092 - RNA, 22 nt, Human
ccaaugauggugcccacgauga

SEQ ID NO: 377093 - RNA, 22 nt, Human
guucacaagaguuacagacaga

SEQ ID NO: 377094 - RNA, 18 nt, Human
ugaauagggguuugcaga

SEQ ID NO: 377095 - RNA, 22 nt, Human
aaucaguuagaaggaagagaau

SEQ ID NO: 377096 - RNA, 16 nt, Human
gcccaggacgggaggc

SEQ ID NO: 377097 - RNA, 22 nt, Human
gaucuucucuuuaguagaaaca

SEQ ID NO: 377098 - RNA, 22 nt, Human
aagcagaauuuaauagaaaggu

SEQ ID NO: 377099 - RNA, 22 nt, Human
ugauauuuaagcaaaaauaugg

SEQ ID NO: 377100 - RNA, 22 nt, Human
gcagagccaggagcccaggauc

SEQ ID NO: 377101 - RNA, 17 nt, Human
auccccagcaucuagaa

SEQ ID NO: 377102 - RNA, 22 nt, Human
uagauuuccucuuccucauucc

SEQ ID NO: 377103 - RNA, 22 nt, Human
cucucugggggccaugccaaga

SEQ ID NO: 377104 - RNA, 22 nt, Human
ccuggaucccgauggcugugag

SEQ ID NO: 377105 - RNA, 22 nt, Human
cuaaaugccuuuccuaccuaac

SEQ ID NO: 377106 - RNA, 22 nt, Human
ccagaauuuggaucaugauuuu

SEQ ID NO: 377107 - RNA, 22 nt, Human
ugggacuugccucgagggcugc

SEQ ID NO: 377108 - RNA, 22 nt, Human
gaagcagcuggugagauggagc

SEQ ID NO: 377109 - RNA, 22 nt, Human
cagagcugagaauguugaugcu

SEQ ID NO: 377110 - RNA, 22 nt, Human
gcuggccacauugugccguccu

SEQ ID NO: 377111 - RNA, 22 nt, Human
aaggccaggagacuuggaguca

SEQ ID NO: 377112 - RNA, 21 nt, Human
ggugggcacaggagagcagag

SEQ ID NO: 377113 - RNA, 22 nt, Human
cauuaaaauaucucaugguguu

SEQ ID NO: 377114 - RNA, 22 nt, Human
agcagcauacacaucauguuga

SEQ ID NO: 377115 - RNA, 23 nt, Human
acacaauagaguacuauucagcc

SEQ ID NO: 377116 - RNA, 22 nt, Human
aaugggagagaacacaaagucc

SEQ ID NO: 377117 - RNA, 22 nt, Human
ccugcagagccacgugccagcg

SEQ ID NO: 377118 - RNA, 22 nt, Human
agcuggggguuggauaagggua

SEQ ID NO: 377119 - RNA, 22 nt, Human
ggugcucaagagggcauccucu

SEQ ID NO: 377120 - RNA, 22 nt, Human
ucuuaaagagcgcaauuugagg

SEQ ID NO: 377121 - RNA, 22 nt, Human
cccaggcucccaggugggacaa

SEQ ID NO: 377122 - RNA, 22 nt, Human
guggcugguuuccugcaugcaa

SEQ ID NO: 377123 - RNA, 18 nt, Human
aucucccauuggccaagg

SEQ ID NO: 377124 - RNA, 22 nt, Human
uaaaauguuugcaagagaccag

SEQ ID NO: 377125 - RNA, 22 nt, Human
auuucuguaguccacauucuuu

SEQ ID NO: 377126 - RNA, 22 nt, Human
ggucaugcugugaaucagugcu

SEQ ID NO: 377127 - RNA, 22 nt, Human
uugagucaguaauuccauuucu

SEQ ID NO: 377128 - RNA, 22 nt, Human
ugggagcacccugaggagcuuc

SEQ ID NO: 377129 - RNA, 22 nt, Human
ugcugccacugguagucucauu

SEQ ID NO: 377130 - RNA, 22 nt, Human
gccuucccaagacgccugaguu

SEQ ID NO: 377131 - RNA, 21 nt, Human
agccugcaauguagguaccgg

SEQ ID NO: 377132 - RNA, 22 nt, Human
uucauauaaauggaaucagaau

SEQ ID NO: 377133 - RNA, 22 nt, Human
ccaggagacuguacugauauuu

SEQ ID NO: 377134 - RNA, 22 nt, Human
uggcagcuccggguaggggcug

SEQ ID NO: 377135 - RNA, 21 nt, Human
ggcagcugaccgcgcggugca

SEQ ID NO: 377136 - RNA, 22 nt, Human
aaggacagaaacagauugcugg

SEQ ID NO: 377137 - RNA, 22 nt, Human
uuuauccagcagcuauucaaaa

SEQ ID NO: 377138 - RNA, 22 nt, Human
aggccagcaccagagucaagaa

SEQ ID NO: 377139 - RNA, 22 nt, Human
gcagagaccccgcagugaggcc

SEQ ID NO: 377140 - RNA, 22 nt, Human
cugggggcaagcagacagcugu

SEQ ID NO: 377141 - RNA, 22 nt, Human
agcaauauuuaaagguuugcaa

SEQ ID NO: 377142 - RNA, 22 nt, Human
ugaggccagugacauauauuaa

SEQ ID NO: 377143 - RNA, 22 nt, Human
gcagggacgcagcacucuccgu

SEQ ID NO: 377144 - RNA, 22 nt, Human
acauuuuaauaugcuuagugug

SEQ ID NO: 377145 - RNA, 22 nt, Human
aaaguguggagauugaacuaaa

SEQ ID NO: 377146 - RNA, 22 nt, Human
ugcuuuaagacacuaaguuuga

SEQ ID NO: 377147 - RNA, 22 nt, Human
aaacugugaagcaaguacaagg

SEQ ID NO: 377148 - RNA, 22 nt, Human
ucagagugaggcgucaacauga

SEQ ID NO: 377149 - RNA, 22 nt, Human
ugccaggcugaacagggucuua

SEQ ID NO: 377150 - RNA, 22 nt, Human
ucuggagcuuccucauuuacag

SEQ ID NO: 377151 - RNA, 22 nt, Human
auaagaaacauuauucuuucca

SEQ ID NO: 377152 - RNA, 20 nt, Human
aggcugagggugauuguguc

SEQ ID NO: 377153 - RNA, 22 nt, Human
auagauauuugaguuguuucca

SEQ ID NO: 377154 - RNA, 22 nt, Human
ccugcucagccccagcucaccc

SEQ ID NO: 377155 - RNA, 22 nt, Human
ugcuggaauaauuucauguuaa

SEQ ID NO: 377156 - RNA, 22 nt, Human
aaaaauaggucaaccguguaug

SEQ ID NO: 377157 - RNA, 22 nt, Human
uggcuccuucauucuccugcca

SEQ ID NO: 377158 - RNA, 22 nt, Human
ucucccacagccgugcuucaag

SEQ ID NO: 377159 - RNA, 22 nt, Human
gggccccaaaaugccaggcucu

SEQ ID NO: 377160 - RNA, 23 nt, Human
aggaaagcauucauuuuuaccau

SEQ ID NO: 377161 - RNA, 22 nt, Human
uacauuaucuuguuaucuuuca

SEQ ID NO: 377162 - RNA, 17 nt, Human
aggcauggucuggggug

SEQ ID NO: 377163 - RNA, 22 nt, Human
aucuuucaguuucauaccaauu

SEQ ID NO: 377164 - RNA, 22 nt, Human
guauucuugguuaucaaaauac

SEQ ID NO: 377165 - RNA, 18 nt, Human
ggcuuugcugggguuucu

SEQ ID NO: 377166 - RNA, 22 nt, Human
agcugcccuuuaugaugcugaa

SEQ ID NO: 377167 - RNA, 20 nt, Human
ccaagagcaugcaugaggaa

SEQ ID NO: 377168 - RNA, 22 nt, Human
uuguuuuaucuuucuacagacu

SEQ ID NO: 377169 - RNA, 22 nt, Human
ucacagacaauuguuuuggugu

SEQ ID NO: 377170 - RNA, 22 nt, Human
gacagaagaggaacuuggacag

SEQ ID NO: 377171 - RNA, 22 nt, Human
accaggcaacugugaaugggcu

SEQ ID NO: 377172 - RNA, 22 nt, Human
cuggcagcuuagcacucugguu

SEQ ID NO: 377173 - RNA, 19 nt, Human
gcuuuuuguugucaaaggu

SEQ ID NO: 377174 - RNA, 22 nt, Human
uuacaaagagugccagagugug

SEQ ID NO: 377175 - RNA, 22 nt, Human
uugggcaaaguguuucuggagc

SEQ ID NO: 377176 - RNA, 22 nt, Human
uuguggcagaccaugagucuaa

SEQ ID NO: 377177 - RNA, 22 nt, Human
ugucacauugaauaugauuuau

SEQ ID NO: 377178 - RNA, 22 nt, Human
acaggcacugucaagucaugaa

SEQ ID NO: 377179 - RNA, 22 nt, Human
auguguccacaggugugagaga

SEQ ID NO: 377180 - RNA, 22 nt, Human
ugcuuuauugcaucaguguggg

SEQ ID NO: 377181 - RNA, 22 nt, Human
uauuuagaacagacaauagaaa

SEQ ID NO: 377182 - RNA, 21 nt, Human
acuguucaucuguucagaagc

SEQ ID NO: 377183 - RNA, 22 nt, Human
ugccuugguucucuacuuggag

SEQ ID NO: 377184 - RNA, 20 nt, Human
gccuggaggcaaugggaaga

SEQ ID NO: 377185 - RNA, 22 nt, Human
uaaguccuggcugguuugaagc

SEQ ID NO: 377186 - RNA, 22 nt, Human
ccucagagguguggcaucucug

SEQ ID NO: 377187 - RNA, 20 nt, Human
aggacagcagcugccacuug

SEQ ID NO: 377188 - RNA, 20 nt, Human
ccaccuggccaaggcugugc

SEQ ID NO: 377189 - RNA, 22 nt, Human
cacauauuugaugaagcuuugu

SEQ ID NO: 377190 - RNA, 22 nt, Human
cacugccuccccaggcuccaca

SEQ ID NO: 377191 - RNA, 22 nt, Human
acaugauauuaaugucuuauuu

SEQ ID NO: 377192 - RNA, 22 nt, Human
ugcccacauggugccauggcca

SEQ ID NO: 377193 - RNA, 22 nt, Human
agcugguggauuaugcuguaca

SEQ ID NO: 377194 - RNA, 22 nt, Human
gcagaagcuguucgaaggccgc

SEQ ID NO: 377195 - RNA, 22 nt, Human
cagcugccugcaacacaagcuu

SEQ ID NO: 377196 - RNA, 16 nt, Human
uagggcugggaaggag

SEQ ID NO: 377197 - RNA, 22 nt, Human
acagugucuccugguacccagu

SEQ ID NO: 377198 - RNA, 22 nt, Human
uagggauguggugagaacugag

SEQ ID NO: 377199 - RNA, 22 nt, Human
acagcagagacacucaggaggc

SEQ ID NO: 377200 - RNA, 22 nt, Human
ccuuucagaugggcauggaccg

SEQ ID NO: 377201 - RNA, 22 nt, Human
cuuccagagauagggccucaag

SEQ ID NO: 377202 - RNA, 22 nt, Human
auuauucuuaugucaucauggc

SEQ ID NO: 377203 - RNA, 22 nt, Human
auccauuugaaagaacagucca

SEQ ID NO: 377204 - RNA, 21 nt, Human
ugcuggccucaagggugacuu

SEQ ID NO: 377205 - RNA, 22 nt, Human
agagacaggguuuugccauguu

SEQ ID NO: 377206 - RNA, 22 nt, Human
agagccugugggagaugcagcu

SEQ ID NO: 377207 - RNA, 22 nt, Human
uggagccaggagccugggaguc

SEQ ID NO: 377208 - RNA, 22 nt, Human
cugcucugaagccaggauucug

SEQ ID NO: 377209 - RNA, 22 nt, Human
gaaugaauucagcacauggaau

SEQ ID NO: 377210 - RNA, 22 nt, Human
gcccagcugucuggcagggaug

SEQ ID NO: 377211 - RNA, 20 nt, Human
cucuuaaauguaaaguaggc

SEQ ID NO: 377212 - RNA, 21 nt, Human
cagagguggccugaccucuga

SEQ ID NO: 377213 - RNA, 22 nt, Human
ggcugcuguacugaugucaguu

SEQ ID NO: 377214 - RNA, 22 nt, Human
uuauacaguuuauacuuagaau

SEQ ID NO: 377215 - RNA, 22 nt, Human
auacagaagaacuauagccacu

SEQ ID NO: 377216 - RNA, 22 nt, Human
agauggaguuaguaccagaguc

SEQ ID NO: 377217 - RNA, 22 nt, Human
ggcagcauauauucagugggca

SEQ ID NO: 377218 - RNA, 22 nt, Human
uucucuuuucaccaguugcuaa

SEQ ID NO: 377219 - RNA, 22 nt, Human
gucagcagugucagcucugggg

SEQ ID NO: 377220 - RNA, 22 nt, Human
cagcugaguguuggcauguuca

SEQ ID NO: 377221 - RNA, 23 nt, Human
gccucuggagccccagugcucag

SEQ ID NO: 377222 - RNA, 22 nt, Human
gaggaagaaagcauaggugggg

SEQ ID NO: 377223 - RNA, 22 nt, Human
cugugccuuuguagcugugccu

SEQ ID NO: 377224 - RNA, 20 nt, Human
acugcuucuuucucugaccu

SEQ ID NO: 377225 - RNA, 22 nt, Human
uuauagaaggagcauucacuua

SEQ ID NO: 377226 - RNA, 22 nt, Human
cucuggcuuugcucaugcaucc

SEQ ID NO: 377227 - RNA, 22 nt, Human
agguaaagacagugaaagaggg

SEQ ID NO: 377228 - RNA, 18 nt, Human
ucacagugcucuugccua

SEQ ID NO: 377229 - RNA, 22 nt, Human
cccaggaguuagagguuguggu

SEQ ID NO: 377230 - RNA, 22 nt, Human
agaagccagaauauucauggau

SEQ ID NO: 377231 - RNA, 22 nt, Human
auugagaauccauuugagauga

SEQ ID NO: 377232 - RNA, 22 nt, Human
cagugauguuucugcaucagag

SEQ ID NO: 377233 - RNA, 22 nt, Human
auugaaagcauggauuuggauu

SEQ ID NO: 377234 - RNA, 22 nt, Human
uacauauagacaguuacucuag

SEQ ID NO: 377235 - RNA, 19 nt, Human
uuugaaagaguuuuauugg

SEQ ID NO: 377236 - RNA, 22 nt, Human
gccaggcauuuguuaggugcug

SEQ ID NO: 377237 - RNA, 22 nt, Human
cccagcagaccgcugugauggc

SEQ ID NO: 377238 - RNA, 22 nt, Human
agcagggcagcuuuuuucagaa

SEQ ID NO: 377239 - RNA, 19 nt, Human
uggcaggcccaggauggac

SEQ ID NO: 377240 - RNA, 22 nt, Human
ucagaguguggugagaugugca

SEQ ID NO: 377241 - RNA, 22 nt, Human
gguuucaacucagcuaguaagg

SEQ ID NO: 377242 - RNA, 22 nt, Human
gggugggaucuguggagccuca

SEQ ID NO: 377243 - RNA, 23 nt, Human
ggccauuucauuugguucaaacu

SEQ ID NO: 377244 - RNA, 21 nt, Human
uccugcaggaggccugagagg

SEQ ID NO: 377245 - RNA, 22 nt, Human
cacagggcagaggguccguggc

SEQ ID NO: 377246 - RNA, 21 nt, Human
aagccucaagcagaagacaga

SEQ ID NO: 377247 - RNA, 22 nt, Human
acuucacagaaauuuuaugagg

SEQ ID NO: 377248 - RNA, 22 nt, Human
gaaauauuacaguggaggggau

SEQ ID NO: 377249 - RNA, 22 nt, Human
ugggaccugcuccuggaaugag

SEQ ID NO: 377250 - RNA, 22 nt, Human
uagggaccuuagaauuguaugu

SEQ ID NO: 377251 - RNA, 22 nt, Human
uucacaggauauaugugcaggg

SEQ ID NO: 377252 - RNA, 22 nt, Human
cagcauuuucuuaauguaggug

SEQ ID NO: 377253 - RNA, 22 nt, Human
ucaguuuuuguuugccagauag

SEQ ID NO: 377254 - RNA, 22 nt, Human
gcugaagcccacguggcuugua

SEQ ID NO: 377255 - RNA, 22 nt, Human
uaaagucauaagaguggauccg

SEQ ID NO: 377256 - RNA, 19 nt, Human
guggccugcgcugggugcg

SEQ ID NO: 377257 - RNA, 22 nt, Human
cagaguguuucuuugggugggu

SEQ ID NO: 377258 - RNA, 22 nt, Human
auauaauuguucugaaguguuu

SEQ ID NO: 377259 - RNA, 22 nt, Human
cccaggcacagauuaucccaau

SEQ ID NO: 377260 - RNA, 22 nt, Human
ggcucagguugggucacaugac

SEQ ID NO: 377261 - RNA, 22 nt, Human
agugcuuugugcucucacugca

SEQ ID NO: 377262 - RNA, 20 nt, Human
ccagagaguagguuagugau

SEQ ID NO: 377263 - RNA, 22 nt, Human
uaauuauucuagucacauagca

SEQ ID NO: 377264 - RNA, 22 nt, Human
cagugcauaaucuaaauggggg

SEQ ID NO: 377265 - RNA, 22 nt, Human
uggcucuggauuaaucuaggaa

SEQ ID NO: 377266 - RNA, 22 nt, Human
ugaaagguuaaaaguaguauug

SEQ ID NO: 377267 - RNA, 23 nt, Human
cuuucauugugguuucacagagc

SEQ ID NO: 377268 - RNA, 22 nt, Human
uugaaggacauccuauuucuag

SEQ ID NO: 377269 - RNA, 22 nt, Human
agucaguggcuccgagccuggu

SEQ ID NO: 377270 - RNA, 22 nt, Human
acagauuuuauuauucagguau

SEQ ID NO: 377271 - RNA, 19 nt, Human
caggccagugucagggggc

SEQ ID NO: 377272 - RNA, 22 nt, Human
ggagggugcauuuuacccugug

SEQ ID NO: 377273 - RNA, 22 nt, Human
ugagguguguccccagggaggu

SEQ ID NO: 377274 - RNA, 22 nt, Human
agccugccuugggcugcuugag

SEQ ID NO: 377275 - RNA, 22 nt, Human
ucacaugcccuguauuuaccag

SEQ ID NO: 377276 - RNA, 22 nt, Human
ggcugugggaugcauaggagcu

SEQ ID NO: 377277 - RNA, 22 nt, Human
agaaaugaauauguagugguua

SEQ ID NO: 377278 - RNA, 22 nt, Human
guggccugccgugugguauggg

SEQ ID NO: 377279 - RNA, 22 nt, Human
uagugcuuuaaguuuacagaga

SEQ ID NO: 377280 - RNA, 22 nt, Human
ucuggcucuguguccucaccca

SEQ ID NO: 377281 - RNA, 22 nt, Human
agcucacaguguccuuccucaa

SEQ ID NO: 377282 - RNA, 21 nt, Human
auuauuauaaagaccacaggg

SEQ ID NO: 377283 - RNA, 22 nt, Human
ccugcuguaaugugucuuuauu

SEQ ID NO: 377284 - RNA, 22 nt, Human
uucuuaaucuguguggguucga

SEQ ID NO: 377285 - RNA, 22 nt, Human
acagcuuuucaauucugcugag

SEQ ID NO: 377286 - RNA, 22 nt, Human
gugugcagggggccagcgcagc

SEQ ID NO: 377287 - RNA, 22 nt, Human
ucaggcugguggucagauggcu

SEQ ID NO: 377288 - RNA, 20 nt, Human
cuguccccgaggucaccagg

SEQ ID NO: 377289 - RNA, 22 nt, Human
guaguucugcagugucaccuga

SEQ ID NO: 377290 - RNA, 22 nt, Human
auguaauuugcccucaaguuaa

SEQ ID NO: 377291 - RNA, 22 nt, Human
ugcaagaggaauucuagaagca

SEQ ID NO: 377292 - RNA, 22 nt, Human
agaaaugugaauuucauuuccu

SEQ ID NO: 377293 - RNA, 22 nt, Human
uuucuggcagcgggacaggggu

SEQ ID NO: 377294 - RNA, 22 nt, Human
gaugcugaagugaagugaucuu

SEQ ID NO: 377295 - RNA, 22 nt, Human
aagcaggcauuccagagacaau

SEQ ID NO: 377296 - RNA, 22 nt, Human
cccuggagggacagcugcucua

SEQ ID NO: 377297 - RNA, 22 nt, Human
ucauuucuccgaccugcugucc

SEQ ID NO: 377298 - RNA, 18 nt, Human
agucucagcggaggagua

SEQ ID NO: 377299 - RNA, 22 nt, Human
gucaggauuaaugggaguaugc

SEQ ID NO: 377300 - RNA, 22 nt, Human
uuauuccauucaguucaacaag

SEQ ID NO: 377301 - RNA, 22 nt, Human
ugcugccuugaccuccugggcu

SEQ ID NO: 377302 - RNA, 20 nt, Human
uuuuccagaaaguaucauug

SEQ ID NO: 377303 - RNA, 22 nt, Human
aaggaaaggaugagcaugcauu

SEQ ID NO: 377304 - RNA, 22 nt, Human
aaauccuuuucuauacagcaua

SEQ ID NO: 377305 - RNA, 22 nt, Human
gaacccaguccaggugcagccu

SEQ ID NO: 377306 - RNA, 22 nt, Human
agugcauugcaucucugcuuca

SEQ ID NO: 377307 - RNA, 22 nt, Human
agcaggaaggcuuuggggguuc

SEQ ID NO: 377308 - RNA, 22 nt, Human
accugccuaguugguucugccc

SEQ ID NO: 377309 - RNA, 20 nt, Human
ggcagcuugggcagcaguua

SEQ ID NO: 377310 - RNA, 21 nt, Human
ugcagcugacacugguaugcc

SEQ ID NO: 377311 - RNA, 22 nt, Human
ggcugcuggaagacugaacaag

SEQ ID NO: 377312 - RNA, 19 nt, Human
aauucuguuucagcagauc

SEQ ID NO: 377313 - RNA, 22 nt, Human
acagcuguauccccagagcuca

SEQ ID NO: 377314 - RNA, 22 nt, Human
uacauuaacuuacguccacaug

SEQ ID NO: 377315 - RNA, 22 nt, Human
cagagguagccgagugcaaucg

SEQ ID NO: 377316 - RNA, 22 nt, Human
uauacagaaagaauucaagucu

SEQ ID NO: 377317 - RNA, 22 nt, Human
ucuacuuuucccuauacaguuu

SEQ ID NO: 377318 - RNA, 22 nt, Human
acagcuggcaggggggcaugaa

SEQ ID NO: 377319 - RNA, 22 nt, Human
ccagaggaggggggucuuucug

SEQ ID NO: 377320 - RNA, 22 nt, Human
gucccucugugucccugcaguc

SEQ ID NO: 377321 - RNA, 22 nt, Human
ugcugucugauucagggugauu

SEQ ID NO: 377322 - RNA, 21 nt, Human
ugaggcaggggugcuuuuguc

SEQ ID NO: 377323 - RNA, 22 nt, Human
uuugacagauccuuaacucagc

SEQ ID NO: 377324 - RNA, 22 nt, Human
gauuauauaauggaagcucuug

SEQ ID NO: 377325 - RNA, 22 nt, Human
uggaccugagccuggcccugcc

SEQ ID NO: 377326 - RNA, 20 nt, Human
cagcuuuagaucuuugauua

SEQ ID NO: 377327 - RNA, 22 nt, Human
ucagaacaauugggaaccauua

SEQ ID NO: 377328 - RNA, 22 nt, Human
cuguggaaauaaacaaugcuaa

SEQ ID NO: 377329 - RNA, 22 nt, Human
uagggcaggggaggaaucugaa

SEQ ID NO: 377330 - RNA, 22 nt, Human
cccaggaugucgaggcugcagu

SEQ ID NO: 377331 - RNA, 22 nt, Human
gauuuauuuuuaaucagcaggg

SEQ ID NO: 377332 - RNA, 22 nt, Human
cuuccucugcggcgccgggcgc

SEQ ID NO: 377333 - RNA, 19 nt, Human
ugcucaggccaaggagccc

SEQ ID NO: 377334 - RNA, 22 nt, Human
agacaucagcuugugugcaggg

SEQ ID NO: 377335 - RNA, 22 nt, Human
cccagcucucugcucuuagccu

SEQ ID NO: 377336 - RNA, 22 nt, Human
agggcaguguggugggacugac

SEQ ID NO: 377337 - RNA, 22 nt, Human
caaaugauacuguuuuuagucu

SEQ ID NO: 377338 - RNA, 20 nt, Human
uauuuguauuugggaaaguu

SEQ ID NO: 377339 - RNA, 22 nt, Human
uggcucugcugaaccuagugca

SEQ ID NO: 377340 - RNA, 22 nt, Human
uuuccucuuugugacacagcug

SEQ ID NO: 377341 - RNA, 22 nt, Human
uggcuggcuuguucacugacug

SEQ ID NO: 377342 - RNA, 22 nt, Human
aggaaagguagcgugccagcag

SEQ ID NO: 377343 - RNA, 20 nt, Human
cucugcugcccgccggcugc

SEQ ID NO: 377344 - RNA, 19 nt, Human
ucaaaggcuuuuaggagac

SEQ ID NO: 377345 - RNA, 22 nt, Human
gcagcugauggaaguccuauug

SEQ ID NO: 377346 - RNA, 22 nt, Human
gucccaggcagagucaggaggg

SEQ ID NO: 377347 - RNA, 22 nt, Human
uucacacacagcuuccuauugu

SEQ ID NO: 377348 - RNA, 21 nt, Human
uccugcagaaugccuuccuac

SEQ ID NO: 377349 - RNA, 20 nt, Human
agugggagagggcagacugc

SEQ ID NO: 377350 - RNA, 22 nt, Human
cuaugaaaugucagauucugca

SEQ ID NO: 377351 - RNA, 22 nt, Human
caaguccuuagaugguucuuug

SEQ ID NO: 377352 - RNA, 22 nt, Human
ccguggaguugugcugaguaug

SEQ ID NO: 377353 - RNA, 22 nt, Human
ucuggcagggguucugcacuug

SEQ ID NO: 377354 - RNA, 22 nt, Human
uguucacaucgauggauuuugc

SEQ ID NO: 377355 - RNA, 22 nt, Human
ucucacugcaaauauuauguau

SEQ ID NO: 377356 - RNA, 22 nt, Human
agagccagcauuugacacuggc

SEQ ID NO: 377357 - RNA, 22 nt, Human
aucuucaaagcacaucguuugu

SEQ ID NO: 377358 - RNA, 22 nt, Human
agguggagugaaggaaaggcag

SEQ ID NO: 377359 - RNA, 22 nt, Human
cagcuggaucccugcagaacuu

SEQ ID NO: 377360 - RNA, 22 nt, Human
cacccaggcuggagugcagggg

SEQ ID NO: 377361 - RNA, 22 nt, Human
uacaaaguaauguauaauaucg

SEQ ID NO: 377362 - RNA, 22 nt, Human
ugggcugaguguggaacuaguu

SEQ ID NO: 377363 - RNA, 22 nt, Human
aguggcagccgagcaggagaug

SEQ ID NO: 377364 - RNA, 22 nt, Human
guuauaaauaccuaauaggauu

SEQ ID NO: 377365 - RNA, 21 nt, Human
agggcagauuagcuguaagag

SEQ ID NO: 377366 - RNA, 19 nt, Human
aacuagaaagguuuugaga

SEQ ID NO: 377367 - RNA, 22 nt, Human
uggaguuccuuugaaaggcucu

SEQ ID NO: 377368 - RNA, 22 nt, Human
auuauccagcaccaaugucaga

SEQ ID NO: 377369 - RNA, 22 nt, Human
cagcugggugaucuugggcagg

SEQ ID NO: 377370 - RNA, 22 nt, Human
caagaugaucccugaaggcagc

SEQ ID NO: 377371 - RNA, 22 nt, Human
cuuacagagaagaaaauguagu

SEQ ID NO: 377372 - RNA, 22 nt, Human
ugggagaagcagcagccaagug

SEQ ID NO: 377373 - RNA, 20 nt, Human
ggcagagggccugggagaag

SEQ ID NO: 377374 - RNA, 22 nt, Human
uauaauuuggggaaaguggugu

SEQ ID NO: 377375 - RNA, 22 nt, Human
ugugaauaaugccgcaauaaac

SEQ ID NO: 377376 - RNA, 22 nt, Human
uuucacaaguaaaguccuaagu

SEQ ID NO: 377377 - RNA, 21 nt, Human
agcagaacagucgagcacugc

SEQ ID NO: 377378 - RNA, 22 nt, Human
aguuuauagcccagauucaugg

SEQ ID NO: 377379 - RNA, 22 nt, Human
cugcuuccaugcaauggcaguc

SEQ ID NO: 377380 - RNA, 22 nt, Human
cacaggugcuccucggggagcu

SEQ ID NO: 377381 - RNA, 22 nt, Human
aagcugccaccagcccagggca

SEQ ID NO: 377382 - RNA, 22 nt, Human
gagagucuaggaaccucauaua

SEQ ID NO: 377383 - RNA, 22 nt, Human
uacaguaucuucuggcaagcau

SEQ ID NO: 377384 - RNA, 22 nt, Human
uacuuugaagacaauaucugga

SEQ ID NO: 377385 - RNA, 22 nt, Human
gugugccagacaugaugcuaug

SEQ ID NO: 377386 - RNA, 22 nt, Human
cuaucuuucgauucuagcuuaa

SEQ ID NO: 377387 - RNA, 22 nt, Human
uggcuuucucccccagcuucuc

SEQ ID NO: 377388 - RNA, 22 nt, Human
cccaggcaguagaaagaagagg

SEQ ID NO: 377389 - RNA, 22 nt, Human
gcugcccaguucugcugcugcc

SEQ ID NO: 377390 - RNA, 22 nt, Human
acagcugugaaaauccacagga

SEQ ID NO: 377391 - RNA, 18 nt, Human
agaaggagcuaugggcag

SEQ ID NO: 377392 - RNA, 22 nt, Human
uucucagaugauucagauaaac

SEQ ID NO: 377393 - RNA, 22 nt, Human
aauuaacaaauguagcugugau

SEQ ID NO: 377394 - RNA, 22 nt, Human
ugucuuuagaaagaagcagaca

SEQ ID NO: 377395 - RNA, 22 nt, Human
gcuggccugggcagccugucgg

SEQ ID NO: 377396 - RNA, 22 nt, Human
ugcagcucauugguguccuggu

SEQ ID NO: 377397 - RNA, 22 nt, Human
gcugccuucaguucugauucau

SEQ ID NO: 377398 - RNA, 22 nt, Human
gcucaggaaacagcagggcuug

SEQ ID NO: 377399 - RNA, 22 nt, Human
cagguaggauggaagggcucaa

SEQ ID NO: 377400 - RNA, 22 nt, Human
auagcuuucuuaaauauauaaa

SEQ ID NO: 377401 - RNA, 22 nt, Human
ucccuggguccugcuugcucuc

SEQ ID NO: 377402 - RNA, 22 nt, Human
uccuugaacagagggccugggu

SEQ ID NO: 377403 - RNA, 17 nt, Human
agcagcuggcacaggag

SEQ ID NO: 377404 - RNA, 22 nt, Human
accaggagaggcacuugcaaug

SEQ ID NO: 377405 - RNA, 22 nt, Human
uuaauaaaguaugaauuggaaa

SEQ ID NO: 377406 - RNA, 22 nt, Human
ggccuggaagaggacagagaaa

SEQ ID NO: 377407 - RNA, 19 nt, Human
agcuggagauuggagggca

SEQ ID NO: 377408 - RNA, 22 nt, Human
aagaaaagaaaccugaggcuuu

SEQ ID NO: 377409 - RNA, 22 nt, Human
ccaucccuucucuggccagcag

SEQ ID NO: 377410 - RNA, 22 nt, Human
ucuggaucuccagcacuuauca

SEQ ID NO: 377411 - RNA, 17 nt, Human
uuagcaaaauagcacuu

SEQ ID NO: 377412 - RNA, 21 nt, Human
aggucagcccagcucuggaag

SEQ ID NO: 377413 - RNA, 21 nt, Human
ccuccaggagcagagcccuga

SEQ ID NO: 377414 - RNA, 22 nt, Human
aggagcagcccacuccuguccu

SEQ ID NO: 377415 - RNA, 22 nt, Human
cagagccauuauggagacuugc

SEQ ID NO: 377416 - RNA, 22 nt, Human
gcugagucuugagcacugagca

SEQ ID NO: 377417 - RNA, 22 nt, Human
auguagagcaguguuguccaau

SEQ ID NO: 377418 - RNA, 17 nt, Human
cagcuuuaugcuacugu

SEQ ID NO: 377419 - RNA, 22 nt, Human
ggcaucuguccaucucuccagc

SEQ ID NO: 377420 - RNA, 21 nt, Human
ccagacuggccuaugugguag

SEQ ID NO: 377421 - RNA, 22 nt, Human
uguuucaugauugcugucauuu

SEQ ID NO: 377422 - RNA, 22 nt, Human
ccaggguuuaaauucugacuau

SEQ ID NO: 377423 - RNA, 22 nt, Human
cagccaggagcucccccugcuc

SEQ ID NO: 377424 - RNA, 22 nt, Human
gauuuucauuugcacucuagaa

SEQ ID NO: 377425 - RNA, 22 nt, Human
caaagguauucucauuuuggaa

SEQ ID NO: 377426 - RNA, 19 nt, Human
aucugagauuauaaacaga

SEQ ID NO: 377427 - RNA, 22 nt, Human
aaagcuuuucaguauguucaug

SEQ ID NO: 377428 - RNA, 22 nt, Human
accaggcagcaccaaagccggu

SEQ ID NO: 377429 - RNA, 22 nt, Human
aggcugaggaucccuguguucu

SEQ ID NO: 377430 - RNA, 22 nt, Human
uuuccaaaggcuaaacucaguu

SEQ ID NO: 377431 - RNA, 22 nt, Human
caguagcaggcaggugcuuuug

SEQ ID NO: 377432 - RNA, 22 nt, Human
aagcgccacgagaagcuggacc

SEQ ID NO: 377433 - RNA, 22 nt, Human
uccagaccauggauggcugcaa

SEQ ID NO: 377434 - RNA, 22 nt, Human
uggcucaggccacuucuuuuau

SEQ ID NO: 377435 - RNA, 22 nt, Human
ucaccagggcuccagccagccu

SEQ ID NO: 377436 - RNA, 22 nt, Human
aggcaggaacccugugugcgcc

SEQ ID NO: 377437 - RNA, 22 nt, Human
uacacagaggcugaugucuuag

SEQ ID NO: 377438 - RNA, 19 nt, Human
ugagacagagaccaguucu

SEQ ID NO: 377439 - RNA, 20 nt, Human
uguuucuuuuaaugagcggc

SEQ ID NO: 377440 - RNA, 22 nt, Human
caggcugggaacgccacccgcu

SEQ ID NO: 377441 - RNA, 22 nt, Human
gagagugagauccuccugggga

SEQ ID NO: 377442 - RNA, 22 nt, Human
uugaaagaggcaaaguuugauc

SEQ ID NO: 377443 - RNA, 23 nt, Human
cuagggcaguauuucacagacac

SEQ ID NO: 377444 - RNA, 22 nt, Human
aggaauucaagaccagcugggc

SEQ ID NO: 377445 - RNA, 22 nt, Human
cucaggaugucggugacuauug

SEQ ID NO: 377446 - RNA, 22 nt, Human
cagagauuauuauaacuaauua

SEQ ID NO: 377447 - RNA, 22 nt, Human
aggcucagccccugggaggaga

SEQ ID NO: 377448 - RNA, 22 nt, Human
ggucccaguccucucccugcua

SEQ ID NO: 377449 - RNA, 22 nt, Human
cauuucauaguugucacaauaa

SEQ ID NO: 377450 - RNA, 22 nt, Human
acaggccacaguggagucucug

SEQ ID NO: 377451 - RNA, 22 nt, Human
uggccuggugucugcgaggccu

SEQ ID NO: 377452 - RNA, 22 nt, Human
ggugucuguugccuccugguua

SEQ ID NO: 377453 - RNA, 22 nt, Human
ugugcuucaucacuucucaguu

SEQ ID NO: 377454 - RNA, 23 nt, Human
uggccuggagagaaaagaugagu

SEQ ID NO: 377455 - RNA, 22 nt, Human
uucuucaaagaugucuguugga

SEQ ID NO: 377456 - RNA, 22 nt, Human
cauugacaucaggcuuggccaa

SEQ ID NO: 377457 - RNA, 22 nt, Human
uucuucuugucugcccucacau

SEQ ID NO: 377458 - RNA, 22 nt, Human
aagugaagaaauacaugagaau

SEQ ID NO: 377459 - RNA, 22 nt, Human
cuguuuuugugcugugucuccc

SEQ ID NO: 377460 - RNA, 22 nt, Human
cugagcauggccgguccauggu

SEQ ID NO: 377461 - RNA, 22 nt, Human
aggagggagaugcccauccugg

SEQ ID NO: 377462 - RNA, 22 nt, Human
uaacagaaauauuuccagguga

SEQ ID NO: 377463 - RNA, 18 nt, Human
ccucagggagagagacgc

SEQ ID NO: 377464 - RNA, 20 nt, Human
uuuaggcauuacucuuuugu

SEQ ID NO: 377465 - RNA, 22 nt, Human
ugcugccaccugguggcugaag

SEQ ID NO: 377466 - RNA, 22 nt, Human
aaaugcagaucccugaaucuca

SEQ ID NO: 377467 - RNA, 22 nt, Human
auggccugggcccgcuucagau

SEQ ID NO: 377468 - RNA, 22 nt, Human
gucucagaccacccucuuuggc

SEQ ID NO: 377469 - RNA, 22 nt, Human
ggcaggcugcuugggucauguc

SEQ ID NO: 377470 - RNA, 22 nt, Human
gaauuucauugcucugcugugu

SEQ ID NO: 377471 - RNA, 18 nt, Human
auacaagaucaaguguuc

SEQ ID NO: 377472 - RNA, 22 nt, Human
gucuuucuuaauucaagugcuu

SEQ ID NO: 377473 - RNA, 22 nt, Human
ugucccagacacaguaugcgcu

SEQ ID NO: 377474 - RNA, 16 nt, Human
ucagggcagaauggca

SEQ ID NO: 377475 - RNA, 22 nt, Human
cagcaggggaacugugggccag

SEQ ID NO: 377476 - RNA, 22 nt, Human
uucucagagcacugcugacaaa

SEQ ID NO: 377477 - RNA, 20 nt, Human
aacagggggcugcagagggc

SEQ ID NO: 377478 - RNA, 22 nt, Human
aaguccuuauguggaggggcua

SEQ ID NO: 377479 - RNA, 22 nt, Human
augaaacacacacgcgcauacu

SEQ ID NO: 377480 - RNA, 22 nt, Human
ucuuucagccacuuaccugucu

SEQ ID NO: 377481 - RNA, 22 nt, Human
gaguccaguguuuaccaggggu

SEQ ID NO: 377482 - RNA, 22 nt, Human
ucugcaucauuuuucagagccg

SEQ ID NO: 377483 - RNA, 22 nt, Human
cccucagcuucucccugcagcu

SEQ ID NO: 377484 - RNA, 22 nt, Human
ggccagcuuugagcugcaggaa

SEQ ID NO: 377485 - RNA, 22 nt, Human
acuuaaaaacagauccagcagg

SEQ ID NO: 377486 - RNA, 22 nt, Human
cucugguguccuuuagaauuua

SEQ ID NO: 377487 - RNA, 22 nt, Human
gccagacacuccccugggcagg

SEQ ID NO: 377488 - RNA, 22 nt, Human
cagggccaagccccuuuggcug

SEQ ID NO: 377489 - RNA, 22 nt, Human
uccugccuaccuugcggaggug

SEQ ID NO: 377490 - RNA, 18 nt, Human
cccagccucuccuuucua

SEQ ID NO: 377491 - RNA, 22 nt, Human
acagcuguggccacuugcaucc

SEQ ID NO: 377492 - RNA, 22 nt, Human
caagauggagaagcagcaaggg

SEQ ID NO: 377493 - RNA, 22 nt, Human
agggagagguugaaaccucagu

SEQ ID NO: 377494 - RNA, 23 nt, Human
uuugaaaguaucaacucgccuga

SEQ ID NO: 377495 - RNA, 22 nt, Human
ucucacuuuguugcccagacuu

SEQ ID NO: 377496 - RNA, 22 nt, Human
aggcaguggaugucaggaaugg

SEQ ID NO: 377497 - RNA, 22 nt, Human
uaccuugggcuauuaucuuuga

SEQ ID NO: 377498 - RNA, 22 nt, Human
caucaucaaaacaaauggaguc

SEQ ID NO: 377499 - RNA, 21 nt, Human
uccagggaacuucucaggaau

SEQ ID NO: 377500 - RNA, 22 nt, Human
acacaauacagggcucaaaaua

SEQ ID NO: 377501 - RNA, 20 nt, Human
cuuugccuauucucugccug

SEQ ID NO: 377502 - RNA, 22 nt, Human
gggccuggugcuucugacuccu

SEQ ID NO: 377503 - RNA, 22 nt, Human
gucaggauuuacaaacuucagu

SEQ ID NO: 377504 - RNA, 22 nt, Human
accucugcuucccggguucaag

SEQ ID NO: 377505 - RNA, 22 nt, Human
aaagccacugcauguguaguau

SEQ ID NO: 377506 - RNA, 22 nt, Human
cuggcugcaggaaggagugggc

SEQ ID NO: 377507 - RNA, 22 nt, Human
uuugaauaucacaaacuuucaa

SEQ ID NO: 377508 - RNA, 17 nt, Human
agguggcugcugcgccu

SEQ ID NO: 377509 - RNA, 22 nt, Human
uaaagacaauaggaaaguuguu

SEQ ID NO: 377510 - RNA, 22 nt, Human
uuugaaagaaaccagugaguga

SEQ ID NO: 377511 - RNA, 22 nt, Human
aaaugaaaugagugccuggagg

SEQ ID NO: 377512 - RNA, 22 nt, Human
uccaugccaggcagucgaugca

SEQ ID NO: 377513 - RNA, 22 nt, Human
cuacagacccaccuuggaagaa

SEQ ID NO: 377514 - RNA, 22 nt, Human
cccagguguuuguggcagaggu

SEQ ID NO: 377515 - RNA, 21 nt, Human
gcagcagaggcuugacagaca

SEQ ID NO: 377516 - RNA, 22 nt, Human
uaguccuuuaucaaacauuuau

SEQ ID NO: 377517 - RNA, 22 nt, Human
ugccugccaugcagaaagcuga

SEQ ID NO: 377518 - RNA, 20 nt, Human
aauaaacuacugagagaugu

SEQ ID NO: 377519 - RNA, 18 nt, Human
ugacagaaccuggagccu

SEQ ID NO: 377520 - RNA, 22 nt, Human
uauuuaucgagugucuacuaug

SEQ ID NO: 377521 - RNA, 21 nt, Human
agggagcuauuuauaguaagc

SEQ ID NO: 377522 - RNA, 22 nt, Human
gaggucaauaauaugugcuuua

SEQ ID NO: 377523 - RNA, 22 nt, Human
gggaagggagggccuccaguca

SEQ ID NO: 377524 - RNA, 22 nt, Human
aaaaaucuaugacugcuucucc

SEQ ID NO: 377525 - RNA, 22 nt, Human
cauggggagacaccuagggaaa

SEQ ID NO: 377526 - RNA, 22 nt, Human
gaaaccucuuagccucucuuug

SEQ ID NO: 377527 - RNA, 22 nt, Human
cucaguuucuucauauuguagg

SEQ ID NO: 377528 - RNA, 22 nt, Human
cugccgagugggucaugaggca

SEQ ID NO: 377529 - RNA, 22 nt, Human
agaaacauccugcuuuccauuu

SEQ ID NO: 377530 - RNA, 22 nt, Human
uggcucugugcuucuaguaucu

SEQ ID NO: 377531 - RNA, 22 nt, Human
agcauaaaggcacuagaaagag

SEQ ID NO: 377532 - RNA, 22 nt, Human
aagauggagcacgagcagaagc

SEQ ID NO: 377533 - RNA, 22 nt, Human
gcugccugaucauacaccaggg

SEQ ID NO: 377534 - RNA, 22 nt, Human
aagcagaugggacuccaaggca

SEQ ID NO: 377535 - RNA, 22 nt, Human
uaagacuucauuaguaauaugg

SEQ ID NO: 377536 - RNA, 22 nt, Human
gaaguccucaaugcauugucuu

SEQ ID NO: 377537 - RNA, 22 nt, Human
ggucccaggcugcgggcuggug

SEQ ID NO: 377538 - RNA, 22 nt, Human
agcccagaggcugggcgugcau

SEQ ID NO: 377539 - RNA, 21 nt, Human
gagugucuaauccaggcuguc

SEQ ID NO: 377540 - RNA, 22 nt, Human
gcagacuggucuucagccuugg

SEQ ID NO: 377541 - RNA, 22 nt, Human
caggagcagaggguggucagca

SEQ ID NO: 377542 - RNA, 22 nt, Human
ugugugcauucacaugcaugcc

SEQ ID NO: 377543 - RNA, 22 nt, Human
aucuaaacagguguucuuuaga

SEQ ID NO: 377544 - RNA, 22 nt, Human
cugggcagugguggcccuuccc

SEQ ID NO: 377545 - RNA, 20 nt, Human
aauaaaagaagccuucaccc

SEQ ID NO: 377546 - RNA, 22 nt, Human
ccuggccugugaaucugagagc

SEQ ID NO: 377547 - RNA, 22 nt, Human
acccagccuacaaagcucaccu

SEQ ID NO: 377548 - RNA, 19 nt, Human
aucuuacagagcagaguac

SEQ ID NO: 377549 - RNA, 22 nt, Human
uuuguaugugauaagacuauuc

SEQ ID NO: 377550 - RNA, 21 nt, Human
gcagcaguguucuagaauacu

SEQ ID NO: 377551 - RNA, 22 nt, Human
ggccagaaaguuaagcuguggc

SEQ ID NO: 377552 - RNA, 22 nt, Human
guggagaccuccuaggaugugu

SEQ ID NO: 377553 - RNA, 17 nt, Human
uuauuuuuugggcugag

SEQ ID NO: 377554 - RNA, 22 nt, Human
gcagcuuucuuuuugcaugucu

SEQ ID NO: 377555 - RNA, 22 nt, Human
cuggauuugccuauggugcuuu

SEQ ID NO: 377556 - RNA, 22 nt, Human
cugcagggagaggggacagccu

SEQ ID NO: 377557 - RNA, 22 nt, Human
ggcuucugaaaucucugugcgu

SEQ ID NO: 377558 - RNA, 22 nt, Human
gaguggggucugggcaucaguc

SEQ ID NO: 377559 - RNA, 17 nt, Human
uaaauacacaaggguau

SEQ ID NO: 377560 - RNA, 22 nt, Human
uagagcuguaucaaagagccuu

SEQ ID NO: 377561 - RNA, 22 nt, Human
guuucauuaccugacccaugag

SEQ ID NO: 377562 - RNA, 22 nt, Human
gauuuccuugcauauugguaau

SEQ ID NO: 377563 - RNA, 22 nt, Human
ugagcccaggaguuggaggcug

SEQ ID NO: 377564 - RNA, 21 nt, Human
agugaaaugaaguguaugcuc

SEQ ID NO: 377565 - RNA, 22 nt, Human
agcagggcagcugaugcgcacg

SEQ ID NO: 377566 - RNA, 21 nt, Human
ugaggcucuguugugccugca

SEQ ID NO: 377567 - RNA, 22 nt, Human
ggcuucugccacgagagggaag

SEQ ID NO: 377568 - RNA, 22 nt, Human
acagggccaggugagaggugcu

SEQ ID NO: 377569 - RNA, 22 nt, Human
agcagcauguugggaugugaaa

SEQ ID NO: 377570 - RNA, 22 nt, Human
gggaccugaggagggguuucag

SEQ ID NO: 377571 - RNA, 22 nt, Human
uucacauugguucuugauagcu

SEQ ID NO: 377572 - RNA, 22 nt, Human
cagcugacuucauaggaagaca

SEQ ID NO: 377573 - RNA, 22 nt, Human
agcaggugacccaagcaggcug

SEQ ID NO: 377574 - RNA, 22 nt, Human
uuuacagaugaggaaacugaga

SEQ ID NO: 377575 - RNA, 18 nt, Human
ggaaaaggagugucuagc

SEQ ID NO: 377576 - RNA, 22 nt, Human
auaugaaaguaagcaugugugu

SEQ ID NO: 377577 - RNA, 22 nt, Human
uugaagcacaaugucuuuuauc

SEQ ID NO: 377578 - RNA, 22 nt, Human
cagcuggccaaucagggcgccc

SEQ ID NO: 377579 - RNA, 22 nt, Human
uggagacugugcuaagggaguu

SEQ ID NO: 377580 - RNA, 22 nt, Human
aauguguagcauuuaaugcagu

SEQ ID NO: 377581 - RNA, 22 nt, Human
cagcaguguacaaggugucaga

SEQ ID NO: 377582 - RNA, 22 nt, Human
caaggagauaaaauguugagcu

SEQ ID NO: 377583 - RNA, 20 nt, Human
ccugaggguuuguguucuuu

SEQ ID NO: 377584 - RNA, 22 nt, Human
acccaggagguggaggcugcag

SEQ ID NO: 377585 - RNA, 22 nt, Human
uacuucauuccuuuguaaaaug

SEQ ID NO: 377586 - RNA, 22 nt, Human
augaggcagaaaaaagucggag

SEQ ID NO: 377587 - RNA, 17 nt, Human
aaucagauuucugagga

SEQ ID NO: 377588 - RNA, 22 nt, Human
ccucccuuggccauagccagcc

SEQ ID NO: 377589 - RNA, 22 nt, Human
agacccucuccaugcccacugc

SEQ ID NO: 377590 - RNA, 22 nt, Human
ugcauauuguccuugauauuau

SEQ ID NO: 377591 - RNA, 22 nt, Human
auguccagggcacacagcagug

SEQ ID NO: 377592 - RNA, 22 nt, Human
cuggagcccugaaugggcagga

SEQ ID NO: 377593 - RNA, 22 nt, Human
caauuucucuuuauaucucaca

SEQ ID NO: 377594 - RNA, 22 nt, Human
acauuuguaugcguuuuuacug

SEQ ID NO: 377595 - RNA, 22 nt, Human
caaauucagaaaauugguagag

SEQ ID NO: 377596 - RNA, 22 nt, Human
cuuagcaugugguguccuugua

SEQ ID NO: 377597 - RNA, 23 nt, Human
aaccagauaaauggcuccagggc

SEQ ID NO: 377598 - RNA, 22 nt, Human
gaggaaaauggaguguaauuaa

SEQ ID NO: 377599 - RNA, 20 nt, Human
ugcucaggauggagaggugu

SEQ ID NO: 377600 - RNA, 22 nt, Human
ugucagcagcugguuugcuguu

SEQ ID NO: 377601 - RNA, 22 nt, Human
cuggguggcgucuggggccagu

SEQ ID NO: 377602 - RNA, 22 nt, Human
uugauacuauuaagcacugggc

SEQ ID NO: 377603 - RNA, 22 nt, Human
aggagccaggaaaccugcucug

SEQ ID NO: 377604 - RNA, 22 nt, Human
cguggccuuugagugagcuccc

SEQ ID NO: 377605 - RNA, 22 nt, Human
agagcccuuucuccaggcaccu

SEQ ID NO: 377606 - RNA, 22 nt, Human
cagagccaugguaugggcuugu

SEQ ID NO: 377607 - RNA, 22 nt, Human
ugucaugccauuuaaaauguuu

SEQ ID NO: 377608 - RNA, 20 nt, Human
accagguggcugaugacacc

SEQ ID NO: 377609 - RNA, 22 nt, Human
acagauguacacucauauauaa

SEQ ID NO: 377610 - RNA, 22 nt, Human
uccugagauguggagcuccaug

SEQ ID NO: 377611 - RNA, 22 nt, Human
ugaauaauccacagucauucau

SEQ ID NO: 377612 - RNA, 22 nt, Human
cucuucuugucucugguuagaa

SEQ ID NO: 377613 - RNA, 22 nt, Human
aagaugcaugcugaagcuggcu

SEQ ID NO: 377614 - RNA, 22 nt, Human
agggcugacaaauggcagugac

SEQ ID NO: 377615 - RNA, 18 nt, Human
gagacacaagggccugga

SEQ ID NO: 377616 - RNA, 22 nt, Human
ccuggagggcgccgcacagucc

SEQ ID NO: 377617 - RNA, 22 nt, Human
ggcauuuacauaaucuuauuua

SEQ ID NO: 377618 - RNA, 22 nt, Human
agggcagaaauauugauacugu

SEQ ID NO: 377619 - RNA, 19 nt, Human
ggcagaagguguaggggga

SEQ ID NO: 377620 - RNA, 22 nt, Human
agcuaagacuuagugacuuagu

SEQ ID NO: 377621 - RNA, 22 nt, Human
gagagcccugcuccuaucccag

SEQ ID NO: 377622 - RNA, 18 nt, Human
agcagaauucuaggguuc

SEQ ID NO: 377623 - RNA, 22 nt, Human
auuuggaaacaauuauauucuu

SEQ ID NO: 377624 - RNA, 22 nt, Human
aggcuuguggauuggagcgagu

SEQ ID NO: 377625 - RNA, 22 nt, Human
ggagaagcaggugcuuuggguc

SEQ ID NO: 377626 - RNA, 22 nt, Human
uauaaaguuucgaaagauguau

SEQ ID NO: 377627 - RNA, 22 nt, Human
ucauuucuauugcuacugucug

SEQ ID NO: 377628 - RNA, 22 nt, Human
uucagaaagguuaaucuggauu

SEQ ID NO: 377629 - RNA, 22 nt, Human
aauuuuauuaacuggauguagc

SEQ ID NO: 377630 - RNA, 22 nt, Human
aaagccagagcaagcugucaca

SEQ ID NO: 377631 - RNA, 22 nt, Human
agggggcccuugcaggugagcg

SEQ ID NO: 377632 - RNA, 17 nt, Human
aggugcagaggcagagc

SEQ ID NO: 377633 - RNA, 21 nt, Human
caauuucaugggaagauggga

SEQ ID NO: 377634 - RNA, 22 nt, Human
ucgcugugguuucuguacaugg

SEQ ID NO: 377635 - RNA, 17 nt, Human
uccuucagugccucugc

SEQ ID NO: 377636 - RNA, 22 nt, Human
acacaugcugauaagaauauaa

SEQ ID NO: 377637 - RNA, 22 nt, Human
gccugagagucugcauuucuaa

SEQ ID NO: 377638 - RNA, 22 nt, Human
uccugagauucugcauuucuaa

SEQ ID NO: 377639 - RNA, 22 nt, Human
gaggagcuggcagcgucuccgc

SEQ ID NO: 377640 - RNA, 22 nt, Human
accaggagccauagagucaggc

SEQ ID NO: 377641 - RNA, 20 nt, Human
ucaggaugugcugagugaag

SEQ ID NO: 377642 - RNA, 22 nt, Human
ucaguggauugacaugaaaaag

SEQ ID NO: 377643 - RNA, 19 nt, Human
uggcugggugccaauggcc

SEQ ID NO: 377644 - RNA, 22 nt, Human
uaucagaacacagccacagcca

SEQ ID NO: 377645 - RNA, 22 nt, Human
gccaggcauguccucugcagaa

SEQ ID NO: 377646 - RNA, 22 nt, Human
uccacugcagcuucugauggaa

SEQ ID NO: 377647 - RNA, 22 nt, Human
ugagagugguucagcucagaag

SEQ ID NO: 377648 - RNA, 22 nt, Human
ggugucccaggccagcugugug

SEQ ID NO: 377649 - RNA, 22 nt, Human
cugcugugccucuuuucacgug

SEQ ID NO: 377650 - RNA, 22 nt, Human
ucacauuuuaucugagauugac

SEQ ID NO: 377651 - RNA, 22 nt, Human
uauuccagugugaucuuuguag

SEQ ID NO: 377652 - RNA, 22 nt, Human
uggaggaaguugcuggaaguca

SEQ ID NO: 377653 - RNA, 22 nt, Human
acaaauuuauugaagggcauau

SEQ ID NO: 377654 - RNA, 22 nt, Human
ugcagucuccaccuccugggug

SEQ ID NO: 377655 - RNA, 22 nt, Human
aagaauuauugcaauacuagau

SEQ ID NO: 377656 - RNA, 22 nt, Human
agaggccagguccagaguuugu

SEQ ID NO: 377657 - RNA, 22 nt, Human
agcagccauuuaaaaugaauug

SEQ ID NO: 377658 - RNA, 22 nt, Human
uugucugugaaauggaaauagu

SEQ ID NO: 377659 - RNA, 22 nt, Human
gagggaggggagcuccacccuc

SEQ ID NO: 377660 - RNA, 22 nt, Human
cccaggaacagcacagaacagc

SEQ ID NO: 377661 - RNA, 22 nt, Human
ugaggcucagugagcccugcag

SEQ ID NO: 377662 - RNA, 22 nt, Human
gcccuggccuucaucucagaca

SEQ ID NO: 377663 - RNA, 22 nt, Human
aguggacucuucccagugcuug

SEQ ID NO: 377664 - RNA, 22 nt, Human
caccagggcagcagccuagucu

SEQ ID NO: 377665 - RNA, 22 nt, Human
ugggcugcuguuacaggggcug

SEQ ID NO: 377666 - RNA, 22 nt, Human
ggaccugaacauaaaacgaggc

SEQ ID NO: 377667 - RNA, 19 nt, Human
ucuggcuccgccucuuagu

SEQ ID NO: 377668 - RNA, 22 nt, Human
cuucucagcauuuugucagucu

SEQ ID NO: 377669 - RNA, 22 nt, Human
ugaaggccagcagagugaaggc

SEQ ID NO: 377670 - RNA, 22 nt, Human
guacaauagucccuguuuggau

SEQ ID NO: 377671 - RNA, 22 nt, Human
uguauauucugccuaaaagcuu

SEQ ID NO: 377672 - RNA, 21 nt, Human
agcagccauuucacagagacu

SEQ ID NO: 377673 - RNA, 22 nt, Human
ccaggccuccugugaguggacc

SEQ ID NO: 377674 - RNA, 22 nt, Human
cccagccugugacagccguccu

SEQ ID NO: 377675 - RNA, 22 nt, Human
ccagaagaggacacagugugga

SEQ ID NO: 377676 - RNA, 19 nt, Human
gcuucccaccagccagccc

SEQ ID NO: 377677 - RNA, 22 nt, Human
ccacagaggacaacugccuggc

SEQ ID NO: 377678 - RNA, 22 nt, Human
agcugccacauggugucacugu

SEQ ID NO: 377679 - RNA, 22 nt, Human
gagugguaggcaguguuaggaa

SEQ ID NO: 377680 - RNA, 21 nt, Human
ccagcuccaggaccuuggauc

SEQ ID NO: 377681 - RNA, 22 nt, Human
cgaggcaggcaggcggaggaua

SEQ ID NO: 377682 - RNA, 22 nt, Human
ggccucuguucugcauuccucc

SEQ ID NO: 377683 - RNA, 22 nt, Human
gucucccaucguuugugaggaa

SEQ ID NO: 377684 - RNA, 23 nt, Human
uggccugcagaguuucugcuggg

SEQ ID NO: 377685 - RNA, 22 nt, Human
uuucaguucaguuuauuauauc

SEQ ID NO: 377686 - RNA, 22 nt, Human
ugucauuuucuaaucuguuguc

SEQ ID NO: 377687 - RNA, 22 nt, Human
ugcuuaauagugcacugguuuc

SEQ ID NO: 377688 - RNA, 22 nt, Human
aaucuagucuccuuaagucuuu

SEQ ID NO: 377689 - RNA, 22 nt, Human
cauucuuacacaauauuuuaau

SEQ ID NO: 377690 - RNA, 22 nt, Human
ggagccuuccagacugcccaca

SEQ ID NO: 377691 - RNA, 22 nt, Human
ggcugcaggaugcccagccgug

SEQ ID NO: 377692 - RNA, 22 nt, Human
aggcacugaagugguaaaugua

SEQ ID NO: 377693 - RNA, 22 nt, Human
cugggcagguauacaaaaaaug

SEQ ID NO: 377694 - RNA, 20 nt, Human
ccuggcuuugcaucugugau

SEQ ID NO: 377695 - RNA, 22 nt, Human
uaggcagcuuagguuagaagug

SEQ ID NO: 377696 - RNA, 22 nt, Human
gccagcucccaagugagccccu

SEQ ID NO: 377697 - RNA, 22 nt, Human
uucaacucuucaagaucacauc

SEQ ID NO: 377698 - RNA, 22 nt, Human
agucccaggcagccgagccggu

SEQ ID NO: 377699 - RNA, 22 nt, Human
ggcugccuucagacuccagcuu

SEQ ID NO: 377700 - RNA, 19 nt, Human
uagucuuuauucuuaauuu

SEQ ID NO: 377701 - RNA, 22 nt, Human
aacaaaugauuguugguuggag

SEQ ID NO: 377702 - RNA, 22 nt, Human
guggccuggaaaggcuggucug

SEQ ID NO: 377703 - RNA, 22 nt, Human
gggcugggcaugguguucccuc

SEQ ID NO: 377704 - RNA, 22 nt, Human
aucagagauuguaguaugugca

SEQ ID NO: 377705 - RNA, 22 nt, Human
gagggcuguggggcaugaccag

SEQ ID NO: 377706 - RNA, 22 nt, Human
uggcucagauuuuuguaggcuu

SEQ ID NO: 377707 - RNA, 22 nt, Human
auaaggcaucucucaguuagca

SEQ ID NO: 377708 - RNA, 22 nt, Human
uuccauauguauauagcuguua

SEQ ID NO: 377709 - RNA, 22 nt, Human
ucaggagggugacaggcccugg

SEQ ID NO: 377710 - RNA, 22 nt, Human
ugaggggaaggcaugauaaaua

SEQ ID NO: 377711 - RNA, 22 nt, Human
gcaggcagagagggguuuccag

SEQ ID NO: 377712 - RNA, 22 nt, Human
uggcccugaggacccagugugg

SEQ ID NO: 377713 - RNA, 22 nt, Human
aaggcagccuuuugaguugauu

SEQ ID NO: 377714 - RNA, 21 nt, Human
gggccacaccuucugcagacc

SEQ ID NO: 377715 - RNA, 22 nt, Human
agcaauuuucccuuagucuuug

SEQ ID NO: 377716 - RNA, 22 nt, Human
uuucauaauacuguacaugaaa

SEQ ID NO: 377717 - RNA, 22 nt, Human
uauguguuugacacccugcaag

SEQ ID NO: 377718 - RNA, 22 nt, Human
aggggcaggugcugcacuuaga

SEQ ID NO: 377719 - RNA, 22 nt, Human
ggccugcugacccaaguccugu

SEQ ID NO: 377720 - RNA, 22 nt, Human
aggucagcaugaguagaaggua

SEQ ID NO: 377721 - RNA, 22 nt, Human
gcuuggccagcagccgggaugc

SEQ ID NO: 377722 - RNA, 22 nt, Human
gccaggagacuccauucauuug

SEQ ID NO: 377723 - RNA, 22 nt, Human
ugacauuuaagccucugauuuc

SEQ ID NO: 377724 - RNA, 22 nt, Human
ucagaggguggcugggagcauc

SEQ ID NO: 377725 - RNA, 22 nt, Human
auggauuuggaugagauuacuu

SEQ ID NO: 377726 - RNA, 22 nt, Human
ucuucuccagugcuucugcaca

SEQ ID NO: 377727 - RNA, 22 nt, Human
ucugcagaauucgaggaagaaa

SEQ ID NO: 377728 - RNA, 20 nt, Human
ugggcagcacugcuggcugg

SEQ ID NO: 377729 - RNA, 22 nt, Human
acagugugugcuuucccuuacg

SEQ ID NO: 377730 - RNA, 22 nt, Human
ugggcuccggcggccucaggcu

SEQ ID NO: 377731 - RNA, 22 nt, Human
ggcugugcgggcagccguggga

SEQ ID NO: 377732 - RNA, 22 nt, Human
ccagggcagcgccccuccacgc

SEQ ID NO: 377733 - RNA, 22 nt, Human
gcagcuuucuugcccuaaucuu

SEQ ID NO: 377734 - RNA, 22 nt, Human
gaggaguggaguugcuggguug

SEQ ID NO: 377735 - RNA, 22 nt, Human
gagcugugagggacacauugcu

SEQ ID NO: 377736 - RNA, 22 nt, Human
ucaagauaccaccauuauaugu

SEQ ID NO: 377737 - RNA, 22 nt, Human
ccugcagggaaucgaggcagaa

SEQ ID NO: 377738 - RNA, 17 nt, Human
ggcagccucaggcguuu

SEQ ID NO: 377739 - RNA, 17 nt, Human
ucagcaggggccaagcu

SEQ ID NO: 377740 - RNA, 22 nt, Human
uaauaaacugcuacgcuuaguu

SEQ ID NO: 377741 - RNA, 22 nt, Human
cuggguggcagagccugcagug

SEQ ID NO: 377742 - RNA, 22 nt, Human
gcuggcccagggucaccuagga

SEQ ID NO: 377743 - RNA, 22 nt, Human
auuccaguucuccucucuaaag

SEQ ID NO: 377744 - RNA, 20 nt, Human
uggccuuuaaauaguauucc

SEQ ID NO: 377745 - RNA, 22 nt, Human
gaccagagaaaggcacuggaag

SEQ ID NO: 377746 - RNA, 22 nt, Human
aggaugagaagauuggaaucuu

SEQ ID NO: 377747 - RNA, 22 nt, Human
uucacagacauugcagacugaa

SEQ ID NO: 377748 - RNA, 22 nt, Human
ucagaauaugcuaaugacauuu

SEQ ID NO: 377749 - RNA, 22 nt, Human
cugcugugugaccauggacagg

SEQ ID NO: 377750 - RNA, 22 nt, Human
cccuggagggauuucucaauca

SEQ ID NO: 377751 - RNA, 22 nt, Human
acuuuaauuaaugaacuguggc

SEQ ID NO: 377752 - RNA, 22 nt, Human
gcucccacgcaauucuuuucag

SEQ ID NO: 377753 - RNA, 22 nt, Human
aggugcagcaugaguccaacgg

SEQ ID NO: 377754 - RNA, 22 nt, Human
cccugcagccuugcaugccuuc

SEQ ID NO: 377755 - RNA, 22 nt, Human
gcucugcucuaacauuccugac

SEQ ID NO: 377756 - RNA, 22 nt, Human
ugaagcagcuucuuucugucaa

SEQ ID NO: 377757 - RNA, 23 nt, Human
gccauggcugccccacaggccuc

SEQ ID NO: 377758 - RNA, 22 nt, Human
uagagcugcuggacuguaacag

SEQ ID NO: 377759 - RNA, 22 nt, Human
aagggcuggaucucucugagca

SEQ ID NO: 377760 - RNA, 22 nt, Human
gccugcagccccucugcaguag

SEQ ID NO: 377761 - RNA, 22 nt, Human
cagagccaaaccucagggcccg

SEQ ID NO: 377762 - RNA, 22 nt, Human
augaggcaggauuaagcuauca

SEQ ID NO: 377763 - RNA, 22 nt, Human
caugauuuugucuuguguuaau

SEQ ID NO: 377764 - RNA, 22 nt, Human
aggcagcguagcaaggcuagua

SEQ ID NO: 377765 - RNA, 17 nt, Human
cucacggaggaugaauc

SEQ ID NO: 377766 - RNA, 22 nt, Human
gggcucucaugaguguguggua

SEQ ID NO: 377767 - RNA, 22 nt, Human
caaaugugacuuuugggcuucu

SEQ ID NO: 377768 - RNA, 22 nt, Human
ugcuuggccuacuuguccuuug

SEQ ID NO: 377769 - RNA, 18 nt, Human
ggcaucugcacagcagcc

SEQ ID NO: 377770 - RNA, 22 nt, Human
uuucucugcugccugugucgau

SEQ ID NO: 377771 - RNA, 22 nt, Human
gcugagagcaguguggccuuaa

SEQ ID NO: 377772 - RNA, 22 nt, Human
ucagggaccccucugaguggag

SEQ ID NO: 377773 - RNA, 22 nt, Human
uacauuguucaugcaugagaaa

SEQ ID NO: 377774 - RNA, 21 nt, Human
ucccacucuaaauggacugaa

SEQ ID NO: 377775 - RNA, 22 nt, Human
uacaaagugugcccaugcugag

SEQ ID NO: 377776 - RNA, 22 nt, Human
uaagaacaguguuucaucucua

SEQ ID NO: 377777 - RNA, 22 nt, Human
augcugaggacaaagagaucaa

SEQ ID NO: 377778 - RNA, 21 nt, Human
gagcauggcuuacaucagcag

SEQ ID NO: 377779 - RNA, 22 nt, Human
acaugcauacacguacauaccu

SEQ ID NO: 377780 - RNA, 22 nt, Human
ucagcuuuccugcagcuaaggg

SEQ ID NO: 377781 - RNA, 22 nt, Human
gccacaggcacuuaagggcugg

SEQ ID NO: 377782 - RNA, 22 nt, Human
aguguuuaccccaaucaguuua

SEQ ID NO: 377783 - RNA, 19 nt, Human
accucugcagagauguuua

SEQ ID NO: 377784 - RNA, 22 nt, Human
gcaggaagaggcucgaagcccc

SEQ ID NO: 377785 - RNA, 22 nt, Human
ugagaagcagcuuacagguguc

SEQ ID NO: 377786 - RNA, 22 nt, Human
aaagcaaugggucuaagguaaa

SEQ ID NO: 377787 - RNA, 22 nt, Human
ccagcuuuugcacuggacuggg

SEQ ID NO: 377788 - RNA, 22 nt, Human
cagagcaucgcgcagagagccu

SEQ ID NO: 377789 - RNA, 19 nt, Human
gaagaagcuugagaaguag

SEQ ID NO: 377790 - RNA, 22 nt, Human
gcugagagugagcacuggauau

SEQ ID NO: 377791 - RNA, 22 nt, Human
cuguauuuaguuaaaaugcuaa

SEQ ID NO: 377792 - RNA, 22 nt, Human
gacccaggagagaggguugcau

SEQ ID NO: 377793 - RNA, 22 nt, Human
auacaugucaucauauguuugu

SEQ ID NO: 377794 - RNA, 22 nt, Human
aaugugguuaacccauuuaaga

SEQ ID NO: 377795 - RNA, 22 nt, Human
uuucagugcuucuguuuaccgg

SEQ ID NO: 377796 - RNA, 22 nt, Human
uaucagaagacuuacaguaucg

SEQ ID NO: 377797 - RNA, 22 nt, Human
cagagaaacucagauagcugau

SEQ ID NO: 377798 - RNA, 22 nt, Human
acagagaugcaaguguguauuu

SEQ ID NO: 377799 - RNA, 22 nt, Human
augaaacaugagaaauggagag

SEQ ID NO: 377800 - RNA, 21 nt, Human
ccaccaggucuucugcucggg

SEQ ID NO: 377801 - RNA, 22 nt, Human
caagagcuagaaauugguuaga

SEQ ID NO: 377802 - RNA, 22 nt, Human
aaaaugcugggaaaguuggaau

SEQ ID NO: 377803 - RNA, 22 nt, Human
aggagaaggaagugcaucacua

SEQ ID NO: 377804 - RNA, 22 nt, Human
ggcagagguagcuggaaccagg

SEQ ID NO: 377805 - RNA, 22 nt, Human
agcagcauguucauuacauuau

SEQ ID NO: 377806 - RNA, 22 nt, Human
uaguaacagauuuauacagucu

SEQ ID NO: 377807 - RNA, 22 nt, Human
cuguauuuguccucuauuuauu

SEQ ID NO: 377808 - RNA, 22 nt, Human
uguaugcaccauuguauuaccu

SEQ ID NO: 377809 - RNA, 22 nt, Human
agaccugcagggccaggccugc

SEQ ID NO: 377810 - RNA, 22 nt, Human
ucaggcagcauuaaacuucagc

SEQ ID NO: 377811 - RNA, 22 nt, Human
agccccaguccgcugcgggcgg

SEQ ID NO: 377812 - RNA, 22 nt, Human
cugcaggggccucgagcacagg

SEQ ID NO: 377813 - RNA, 21 nt, Human
cccacggaaugaugaggcacu

SEQ ID NO: 377814 - RNA, 22 nt, Human
ucaucugucauccacaaagcug

SEQ ID NO: 377815 - RNA, 22 nt, Human
uggcaggguuggccaccuuacc

SEQ ID NO: 377816 - RNA, 22 nt, Human
gugggcugcccuugaggucagc

SEQ ID NO: 377817 - RNA, 22 nt, Human
cagguggaucucuaaggacuga

SEQ ID NO: 377818 - RNA, 22 nt, Human
uggcugcugagaaggcagcugu

SEQ ID NO: 377819 - RNA, 22 nt, Human
ugcuuuuaagaacaaugcugcu

SEQ ID NO: 377820 - RNA, 22 nt, Human
auugacaaucuacuauguucug

SEQ ID NO: 377821 - RNA, 22 nt, Human
gaggagcuugugagaagauguc

SEQ ID NO: 377822 - RNA, 22 nt, Human
cugaggcuggggaagggaagug

SEQ ID NO: 377823 - RNA, 22 nt, Human
cuuguccuuuacuugagacuca

SEQ ID NO: 377824 - RNA, 22 nt, Human
ugcucacugaacucuugcuguc

SEQ ID NO: 377825 - RNA, 22 nt, Human
agcagggcuuuggcuggcuuuc

SEQ ID NO: 377826 - RNA, 18 nt, Human
agcugcagaccaggaggu

SEQ ID NO: 377827 - RNA, 22 nt, Human
uuauuuauggcacuguuggugg

SEQ ID NO: 377828 - RNA, 22 nt, Human
accugccuucucaaggacauga

SEQ ID NO: 377829 - RNA, 22 nt, Human
ucugggaaguccucugucaugc

SEQ ID NO: 377830 - RNA, 22 nt, Human
augucuuuauaaauguauaaug

SEQ ID NO: 377831 - RNA, 22 nt, Human
aaggccugggaguacugggaca

SEQ ID NO: 377832 - RNA, 22 nt, Human
uuaaauuagucaagcuucucug

SEQ ID NO: 377833 - RNA, 22 nt, Human
ugucauuuaguccucugugugu

SEQ ID NO: 377834 - RNA, 17 nt, Human
agugacuuggaaagagc

SEQ ID NO: 377835 - RNA, 23 nt, Human
uguugaaguaacuguuacauaga

SEQ ID NO: 377836 - RNA, 22 nt, Human
aguguccccuccaagggccugg

SEQ ID NO: 377837 - RNA, 22 nt, Human
ucagagagcuggugggcagagg

SEQ ID NO: 377838 - RNA, 22 nt, Human
aggccugagcagaggaguggac

SEQ ID NO: 377839 - RNA, 22 nt, Human
uugauaaaaugauaucuucuuu

SEQ ID NO: 377840 - RNA, 22 nt, Human
gaagaaucaagcaguaauuugu

SEQ ID NO: 377841 - RNA, 18 nt, Human
ucagcuuuugaaaaccaa

SEQ ID NO: 377842 - RNA, 22 nt, Human
auccccagaaaauaggugccua

SEQ ID NO: 377843 - RNA, 22 nt, Human
uuccaguuaaggaagcuauucu

SEQ ID NO: 377844 - RNA, 22 nt, Human
ugccacacagucugguagaaua

SEQ ID NO: 377845 - RNA, 22 nt, Human
cagcagcaggcgcacggccguc

SEQ ID NO: 377846 - RNA, 22 nt, Human
ccacugcccccugaagaccagg

SEQ ID NO: 377847 - RNA, 22 nt, Human
ucaaggagcccacagucuaaug

SEQ ID NO: 377848 - RNA, 22 nt, Human
ucaagugcuugugagguauuug

SEQ ID NO: 377849 - RNA, 22 nt, Human
agaguccaugaagacagcugag

SEQ ID NO: 377850 - RNA, 22 nt, Human
uuuaaaaaacuagucugagucu

SEQ ID NO: 377851 - RNA, 22 nt, Human
uuugcuuguucaagauuucugu

SEQ ID NO: 377852 - RNA, 22 nt, Human
augugcuucauucuacaugaca

SEQ ID NO: 377853 - RNA, 22 nt, Human
uuccaguucccaugaggauuaa

SEQ ID NO: 377854 - RNA, 18 nt, Human
augaucuuagcaaauauu

SEQ ID NO: 377855 - RNA, 22 nt, Human
cuguuauuucugccaggugagu

SEQ ID NO: 377856 - RNA, 22 nt, Human
acaggugguaaaauggacuguc

SEQ ID NO: 377857 - RNA, 22 nt, Human
agccaggcugcaguuggcuggc

SEQ ID NO: 377858 - RNA, 22 nt, Human
cagcucccagagugaccagcag

SEQ ID NO: 377859 - RNA, 22 nt, Human
gaaggucaccuccccucucugg

SEQ ID NO: 377860 - RNA, 22 nt, Human
aggcuucagaaagaguaauugg

SEQ ID NO: 377861 - RNA, 22 nt, Human
caucagaaggccagaggguagc

SEQ ID NO: 377862 - RNA, 22 nt, Human
ucacaacucuuuccauuuaaua

SEQ ID NO: 377863 - RNA, 22 nt, Human
uagaacagaggguugcccagau

SEQ ID NO: 377864 - RNA, 22 nt, Human
uaaagguagcaugaaacugcaa

SEQ ID NO: 377865 - RNA, 22 nt, Human
uccugaaaauaauuucacaaga

SEQ ID NO: 377866 - RNA, 22 nt, Human
uucagaaacagagugagugagu

SEQ ID NO: 377867 - RNA, 22 nt, Human
gccugcuguuaacugcaggaau

SEQ ID NO: 377868 - RNA, 22 nt, Human
aggcagcaagauuauuuaaucc

SEQ ID NO: 377869 - RNA, 22 nt, Human
aggccuguuggcgugggcucua

SEQ ID NO: 377870 - RNA, 22 nt, Human
ugcauuguugaccaguugugca

SEQ ID NO: 377871 - RNA, 17 nt, Human
agcagcuggguugaucu

SEQ ID NO: 377872 - RNA, 22 nt, Human
ggcagcucacgggcauggggug

SEQ ID NO: 377873 - RNA, 22 nt, Human
agccuggcacugaggcagggcg

SEQ ID NO: 377874 - RNA, 22 nt, Human
uucagugucaauuuuuaaauau

SEQ ID NO: 377875 - RNA, 22 nt, Human
aagggcugcauuugauguguca

SEQ ID NO: 377876 - RNA, 22 nt, Human
cuacccagcaccuaggcugccu

SEQ ID NO: 377877 - RNA, 22 nt, Human
ggaagggccucgggcgugggac

SEQ ID NO: 377878 - RNA, 22 nt, Human
agugguaacuaaguccugcuua

SEQ ID NO: 377879 - RNA, 22 nt, Human
gccuaggaguggggauggcggu

SEQ ID NO: 377880 - RNA, 22 nt, Human
agcucccagaaggcccugcgcc

SEQ ID NO: 377881 - RNA, 22 nt, Human
gcaggcuccaaggccugggaga

SEQ ID NO: 377882 - RNA, 23 nt, Human
uggcccugaaucuguccuggagg

SEQ ID NO: 377883 - RNA, 22 nt, Human
gagagcugcauucucagacaca

SEQ ID NO: 377884 - RNA, 22 nt, Human
caagggcucacggucugcuggg

SEQ ID NO: 377885 - RNA, 22 nt, Human
caggcagcugggucaccguccc

SEQ ID NO: 377886 - RNA, 22 nt, Human
aagcaagacagaaguuacugcc

SEQ ID NO: 377887 - RNA, 22 nt, Human
agaaguuguagguuugcauauu

SEQ ID NO: 377888 - RNA, 22 nt, Human
augaauaaguaaacuccuuugg

SEQ ID NO: 377889 - RNA, 22 nt, Human
caugggagguuggcuuggcaug

SEQ ID NO: 377890 - RNA, 22 nt, Human
caugugguucaaguacuccaca

SEQ ID NO: 377891 - RNA, 22 nt, Human
cugcaucacagcaggaggcaca

SEQ ID NO: 377892 - RNA, 22 nt, Human
aggccucuucagggagcaugga

SEQ ID NO: 377893 - RNA, 22 nt, Human
ucccagagacagagccuccucc

SEQ ID NO: 377894 - RNA, 22 nt, Human
ugaagggcaaccccaggcccag

SEQ ID NO: 377895 - RNA, 22 nt, Human
aaacaccagucccaguauacac

SEQ ID NO: 377896 - RNA, 22 nt, Human
ucaaacauguuagcagucugug

SEQ ID NO: 377897 - RNA, 20 nt, Human
aaagucuuaugguuaauuuu

SEQ ID NO: 377898 - RNA, 22 nt, Human
cagcugccuaugaccuagccuc

SEQ ID NO: 377899 - RNA, 22 nt, Human
uaaaugaagaaauggagauugu

SEQ ID NO: 377900 - RNA, 22 nt, Human
cagaggguugucaggcgccuug

SEQ ID NO: 377901 - RNA, 22 nt, Human
cagaccagaaggaagccgacaa

SEQ ID NO: 377902 - RNA, 22 nt, Human
cccaugagaccugguuuaaggc

SEQ ID NO: 377903 - RNA, 22 nt, Human
gguuucaacuucaaccucucca

SEQ ID NO: 377904 - RNA, 22 nt, Human
uucauuccuucccuaagcaacu

SEQ ID NO: 377905 - RNA, 22 nt, Human
ccuggagcccaaggcagugaga

SEQ ID NO: 377906 - RNA, 22 nt, Human
cuucugugauuugguuaggaua

SEQ ID NO: 377907 - RNA, 22 nt, Human
cugcccugggaguaccuguccu

SEQ ID NO: 377908 - RNA, 22 nt, Human
ucugucacucuagagauggcag

SEQ ID NO: 377909 - RNA, 22 nt, Human
gugcuuucugcaugguuccuac

SEQ ID NO: 377910 - RNA, 22 nt, Human
aaggcuuuaugugaccaaaaga

SEQ ID NO: 377911 - RNA, 22 nt, Human
uaauuucaccguugcuagaaau

SEQ ID NO: 377912 - RNA, 22 nt, Human
ggcuugggagcaggcaugugac

SEQ ID NO: 377913 - RNA, 23 nt, Human
guaaaauacgcagugcaguguga

SEQ ID NO: 377914 - RNA, 17 nt, Human
ucaggauccaggguucu

SEQ ID NO: 377915 - RNA, 22 nt, Human
gaggcagcugaaggagugacag

SEQ ID NO: 377916 - RNA, 22 nt, Human
ucaaguuuaauugagauguuua

SEQ ID NO: 377917 - RNA, 22 nt, Human
agaagcagcuuucaaggugauu

SEQ ID NO: 377918 - RNA, 22 nt, Human
gaaugcacucacccaucacuca

SEQ ID NO: 377919 - RNA, 22 nt, Human
ucaaagucucugcuucuguaac

SEQ ID NO: 377920 - RNA, 22 nt, Human
uguuuucauuugauguaacaaa

SEQ ID NO: 377921 - RNA, 22 nt, Human
uggcugagaccaucagggugua

SEQ ID NO: 377922 - RNA, 22 nt, Human
uuuagggaauagaagaucugaa

SEQ ID NO: 377923 - RNA, 22 nt, Human
aaugaacauauaaagagaucuu

SEQ ID NO: 377924 - RNA, 22 nt, Human
ugccuugcgggcguuucuguug

SEQ ID NO: 377925 - RNA, 17 nt, Human
auuucacuuagcaugag

SEQ ID NO: 377926 - RNA, 20 nt, Human
accccagccccucuaucuga

SEQ ID NO: 377927 - RNA, 18 nt, Human
ucaggagacacagacgca

SEQ ID NO: 377928 - RNA, 22 nt, Human
agggcccuuacgcaggcccuuc

SEQ ID NO: 377929 - RNA, 22 nt, Human
cugaggcuggcguuugaggaag

SEQ ID NO: 377930 - RNA, 23 nt, Human
agcuggguggccugcgugaagcu

SEQ ID NO: 377931 - RNA, 22 nt, Human
ugugucccuuggaaccucagcu

SEQ ID NO: 377932 - RNA, 22 nt, Human
gaggggcagaaugugaucaggg

SEQ ID NO: 377933 - RNA, 22 nt, Human
caggugggagccacagcguaca

SEQ ID NO: 377934 - RNA, 22 nt, Human
aaaaugaauaaguuaacccagg

SEQ ID NO: 377935 - RNA, 22 nt, Human
gauggcagcagcagccagggau

SEQ ID NO: 377936 - RNA, 22 nt, Human
ccuucugcucccuggccagggc

SEQ ID NO: 377937 - RNA, 22 nt, Human
accagggcaaauguuuguacuc

SEQ ID NO: 377938 - RNA, 20 nt, Human
aucuggcucagauccugcag

SEQ ID NO: 377939 - RNA, 22 nt, Human
ucaucacauaugucaugauuug

SEQ ID NO: 377940 - RNA, 22 nt, Human
auauacuuggagacuaucauug

SEQ ID NO: 377941 - RNA, 22 nt, Human
ccugcccagcuucaccucaggc

SEQ ID NO: 377942 - RNA, 22 nt, Human
ccagaccacccuggccaugcac

SEQ ID NO: 377943 - RNA, 22 nt, Human
caggaggaggguacaccaucag

SEQ ID NO: 377944 - RNA, 20 nt, Human
ccuuuauuauuuguaugaug

SEQ ID NO: 377945 - RNA, 22 nt, Human
aaggagcuuguucgccuuccuc

SEQ ID NO: 377946 - RNA, 22 nt, Human
auacauacguacauacguaugu

SEQ ID NO: 377947 - RNA, 22 nt, Human
gugcagcagggggaagacagug

SEQ ID NO: 377948 - RNA, 22 nt, Human
cucuccaggacuuuggcccaau

SEQ ID NO: 377949 - RNA, 22 nt, Human
ccuugcugaccaucaccuuuga

SEQ ID NO: 377950 - RNA, 22 nt, Human
gcuggcuuugcacugggugcau

SEQ ID NO: 377951 - RNA, 22 nt, Human
augcauugucugguuucauuuu

SEQ ID NO: 377952 - RNA, 22 nt, Human
ucuggccagugaaaugcagaau

SEQ ID NO: 377953 - RNA, 21 nt, Human
uacugagaccucacagugugc

SEQ ID NO: 377954 - RNA, 22 nt, Human
accugagaaugggggcaugugu

SEQ ID NO: 377955 - RNA, 22 nt, Human
caggagugucuccacacagcaa

SEQ ID NO: 377956 - RNA, 22 nt, Human
aucaggauucaguaucuccagc

SEQ ID NO: 377957 - RNA, 22 nt, Human
agucccagccuaggcugugcug

SEQ ID NO: 377958 - RNA, 22 nt, Human
aauggcugggaguguauuuugg

SEQ ID NO: 377959 - RNA, 22 nt, Human
ugcaacuuguuuggagagaaag

SEQ ID NO: 377960 - RNA, 18 nt, Human
ucugggcuucccgaggcu

SEQ ID NO: 377961 - RNA, 22 nt, Human
caaauucucaagguuuauccca

SEQ ID NO: 377962 - RNA, 19 nt, Human
uccugcagaccagaccugu

SEQ ID NO: 377963 - RNA, 23 nt, Human
auucuucauuaucuucuagaaaa

SEQ ID NO: 377964 - RNA, 22 nt, Human
cugagccacugcuuguucagug

SEQ ID NO: 377965 - RNA, 22 nt, Human
gcguccagggaaggcccagcug

SEQ ID NO: 377966 - RNA, 22 nt, Human
agauacauuguucuaagcauug

SEQ ID NO: 377967 - RNA, 22 nt, Human
gagggcagagucuaaugaugca

SEQ ID NO: 377968 - RNA, 22 nt, Human
ucccagaggucucugcugguuc

SEQ ID NO: 377969 - RNA, 22 nt, Human
auucauuuagguauucacuuac

SEQ ID NO: 377970 - RNA, 21 nt, Human
ucagggcagcugcucuucaga

SEQ ID NO: 377971 - RNA, 22 nt, Human
gcagggacaacugugcaccuga

SEQ ID NO: 377972 - RNA, 22 nt, Human
ggcuuuaugcacagcagauggu

SEQ ID NO: 377973 - RNA, 22 nt, Human
cagaggcaggaagaugggcagu

SEQ ID NO: 377974 - RNA, 22 nt, Human
aauccugugugacucuggggag

SEQ ID NO: 377975 - RNA, 22 nt, Human
gcugucugcaucucuagagcuu

SEQ ID NO: 377976 - RNA, 22 nt, Human
uaucuaaauggaauauuccaga

SEQ ID NO: 377977 - RNA, 23 nt, Human
agaguccacaagauuuuccagug

SEQ ID NO: 377978 - RNA, 22 nt, Human
aggagcuguuuuguucagcaaa

SEQ ID NO: 377979 - RNA, 20 nt, Human
ccucaagcagacugacagcu

SEQ ID NO: 377980 - RNA, 22 nt, Human
gaggccaaguuggagaccaggu

SEQ ID NO: 377981 - RNA, 22 nt, Human
cccuucagcugagugggacagc

SEQ ID NO: 377982 - RNA, 22 nt, Human
ugcagugccucggcagugcagc

SEQ ID NO: 377983 - RNA, 22 nt, Human
uuuuccucuguuauuaguguga

SEQ ID NO: 377984 - RNA, 22 nt, Human
ccugccuggagcugagugugga

SEQ ID NO: 377985 - RNA, 21 nt, Human
gagauuuagaaggaucaauuu

SEQ ID NO: 377986 - RNA, 22 nt, Human
uggcagcuugaaugcagucuuu

SEQ ID NO: 377987 - RNA, 22 nt, Human
aaacaugcauucaagaaaaucu

SEQ ID NO: 377988 - RNA, 22 nt, Human
gcagguguggaguggggugagc

SEQ ID NO: 377989 - RNA, 20 nt, Human
ucagagucaucaaagauggu

SEQ ID NO: 377990 - RNA, 22 nt, Human
ugccacacucacuucuguggac

SEQ ID NO: 377991 - RNA, 22 nt, Human
gccuggagcucggcugagggcg

SEQ ID NO: 377992 - RNA, 22 nt, Human
aagcugcagacccccugucuca

SEQ ID NO: 377993 - RNA, 21 nt, Human
agagucugcauuucugacaag

SEQ ID NO: 377994 - RNA, 22 nt, Human
ccaggaggcagagguuacagug

SEQ ID NO: 377995 - RNA, 22 nt, Human
gcugcagcuuuaggauccagug

SEQ ID NO: 377996 - RNA, 22 nt, Human
ggcuccugggaugggacugagc

SEQ ID NO: 377997 - RNA, 22 nt, Human
uggcuucagacuucugcuacgu

SEQ ID NO: 377998 - RNA, 22 nt, Human
aaagcaaucagauucagauguc

SEQ ID NO: 377999 - RNA, 19 nt, Human
gagcgcagagggcagggga

SEQ ID NO: 378000 - RNA, 20 nt, Human
cauuaugguugggcacagug

SEQ ID NO: 378001 - RNA, 22 nt, Human
aggacagcccuugagagcacau

SEQ ID NO: 378002 - RNA, 22 nt, Human
ccuggcugggccugauuucuca

SEQ ID NO: 378003 - RNA, 22 nt, Human
caaagguaguauauauauuguu

SEQ ID NO: 378004 - RNA, 22 nt, Human
ccacagagagugucagccuuug

SEQ ID NO: 378005 - RNA, 22 nt, Human
ggagcugggacccugucaucug

SEQ ID NO: 378006 - RNA, 22 nt, Human
uaaauuauggcuggcagagcag

SEQ ID NO: 378007 - RNA, 22 nt, Human
uauguagaagcugcucaaagaa

SEQ ID NO: 378008 - RNA, 23 nt, Human
uagagcagggaaaucugucagag

SEQ ID NO: 378009 - RNA, 22 nt, Human
agccagcaugaagacagaggcc

SEQ ID NO: 378010 - RNA, 22 nt, Human
cucccucugucuuguccagaaa

SEQ ID NO: 378011 - RNA, 21 nt, Human
uggagcugccacuuguccucc

SEQ ID NO: 378012 - RNA, 17 nt, Human
ugaagaugcauggcagc

SEQ ID NO: 378013 - RNA, 22 nt, Human
uagcacauuguugaccagaagg

SEQ ID NO: 378014 - RNA, 22 nt, Human
uuguuucaggaugguuuguuac

SEQ ID NO: 378015 - RNA, 22 nt, Human
agacagcuaauaaaugagugug

SEQ ID NO: 378016 - RNA, 22 nt, Human
gcauagucaguaggauucucaa

SEQ ID NO: 378017 - RNA, 22 nt, Human
ccugggagguggagguugcagc

SEQ ID NO: 378018 - RNA, 22 nt, Human
gucaggauuggggucaugaguc

SEQ ID NO: 378019 - RNA, 22 nt, Human
aaggcucuuggagugaaugcag

SEQ ID NO: 378020 - RNA, 22 nt, Human
cagcacaauuuucaggagucca

SEQ ID NO: 378021 - RNA, 22 nt, Human
aaauauaauuucugccucaaua

SEQ ID NO: 378022 - RNA, 22 nt, Human
aguuauuacucuuuaacauauu

SEQ ID NO: 378023 - RNA, 22 nt, Human
uacuuccuguuuccaugucugu

SEQ ID NO: 378024 - RNA, 22 nt, Human
ccuggagcaaaaaucuaaggag

SEQ ID NO: 378025 - RNA, 22 nt, Human
cagcuguggagggaggaaaugc

SEQ ID NO: 378026 - RNA, 22 nt, Human
ggagccugcgggagcucccauu

SEQ ID NO: 378027 - RNA, 22 nt, Human
uucuaugccauguucagcuacu

SEQ ID NO: 378028 - RNA, 22 nt, Human
aaugaucuacucucauuaucuc

SEQ ID NO: 378029 - RNA, 22 nt, Human
uuuaguaaguucacugcaaagc

SEQ ID NO: 378030 - RNA, 22 nt, Human
gggcugugagaguggggcugcu

SEQ ID NO: 378031 - RNA, 22 nt, Human
ccuggcucuguccucgcgcaaa

SEQ ID NO: 378032 - RNA, 22 nt, Human
uacauaauaaggggcauggugu

SEQ ID NO: 378033 - RNA, 22 nt, Human
gccucccuggcccacagcagcg

SEQ ID NO: 378034 - RNA, 22 nt, Human
cagcagcagccccaggaagguu

SEQ ID NO: 378035 - RNA, 22 nt, Human
uuacagaagagaaagaauucag

SEQ ID NO: 378036 - RNA, 22 nt, Human
cuaaucaucuuucucuuaaagc

SEQ ID NO: 378037 - RNA, 22 nt, Human
ccuggcagacugugagggcagg

SEQ ID NO: 378038 - RNA, 20 nt, Human
cccagccccuaccuguugcc

SEQ ID NO: 378039 - RNA, 22 nt, Human
gcugagaguguaggauguuuac

SEQ ID NO: 378040 - RNA, 22 nt, Human
aaugcacagcguuccaugcuug

SEQ ID NO: 378041 - RNA, 22 nt, Human
caggccugugacaccgugucug

SEQ ID NO: 378042 - RNA, 22 nt, Human
gcagagccccucaagccagccu

SEQ ID NO: 378043 - RNA, 22 nt, Human
guagcuuauuagggauaauagu

SEQ ID NO: 378044 - RNA, 22 nt, Human
aaaaaugugaccacaggguguu

SEQ ID NO: 378045 - RNA, 22 nt, Human
auguucaaacaaguuaaugcca

SEQ ID NO: 378046 - RNA, 22 nt, Human
ggcuggccuguguggccgccac

SEQ ID NO: 378047 - RNA, 22 nt, Human
acuuguguaacacagaaagaac

SEQ ID NO: 378048 - RNA, 22 nt, Human
cccaggacucggcacucuccuu

SEQ ID NO: 378049 - RNA, 19 nt, Human
acauuuaaauucagaucuc

SEQ ID NO: 378050 - RNA, 23 nt, Human
aucaaacuggugagaaugucagu

SEQ ID NO: 378051 - RNA, 22 nt, Human
gggcagcuccuguggaauccac

SEQ ID NO: 378052 - RNA, 22 nt, Human
agggcagcauugccuuucucca

SEQ ID NO: 378053 - RNA, 22 nt, Human
gcccugugcgacucuagagguu

SEQ ID NO: 378054 - RNA, 22 nt, Human
ucaguggagcuaagcaugagau

SEQ ID NO: 378055 - RNA, 22 nt, Human
cagggcacaguuauggaggugg

SEQ ID NO: 378056 - RNA, 22 nt, Human
uuggauccaucucaggcauagg

SEQ ID NO: 378057 - RNA, 22 nt, Human
cagagagcuuagugugcugcau

SEQ ID NO: 378058 - RNA, 22 nt, Human
caucagaauguuagagaaggga

SEQ ID NO: 378059 - RNA, 22 nt, Human
uuucaaagaguuguaaauuacu

SEQ ID NO: 378060 - RNA, 22 nt, Human
uuuaauauucugcauucuccuu

SEQ ID NO: 378061 - RNA, 22 nt, Human
uuuuaucuucauuccuaucuac

SEQ ID NO: 378062 - RNA, 22 nt, Human
cuccaggagggggauggcugua

SEQ ID NO: 378063 - RNA, 22 nt, Human
ugccugggagugaccaagacuc

SEQ ID NO: 378064 - RNA, 22 nt, Human
gggcacuguacacugugcaugg

SEQ ID NO: 378065 - RNA, 22 nt, Human
uccaggcagagcaacaaaauau

SEQ ID NO: 378066 - RNA, 22 nt, Human
ugaagccacagagcaucugccu

SEQ ID NO: 378067 - RNA, 22 nt, Human
augauacaucuucaugucagug

SEQ ID NO: 378068 - RNA, 22 nt, Human
gcagagccugugucugagcaaa

SEQ ID NO: 378069 - RNA, 22 nt, Human
cuggcuuucauuucaagcacgu

SEQ ID NO: 378070 - RNA, 22 nt, Human
agggcagaaaucgauuacaccu

SEQ ID NO: 378071 - RNA, 22 nt, Human
ugcugucuuccaggauggugaa

SEQ ID NO: 378072 - RNA, 22 nt, Human
aggugauguccacagcuugcag

SEQ ID NO: 378073 - RNA, 23 nt, Human
ggccucuguguucugcccacaug

SEQ ID NO: 378074 - RNA, 22 nt, Human
auauuucuugagcaccugguau

SEQ ID NO: 378075 - RNA, 22 nt, Human
uaucuguuaggaucagagcugg

SEQ ID NO: 378076 - RNA, 22 nt, Human
cagcugccacaccucuuucucu

SEQ ID NO: 378077 - RNA, 22 nt, Human
uuguugguggaauugaugcuag

SEQ ID NO: 378078 - RNA, 22 nt, Human
gaggcagcuuaggguacugacu

SEQ ID NO: 378079 - RNA, 19 nt, Human
cagagccucagagcuagaa

SEQ ID NO: 378080 - RNA, 23 nt, Human
cacuccuguuucuaagccagcau

SEQ ID NO: 378081 - RNA, 22 nt, Human
agaggcuccuagccacuggcuu

SEQ ID NO: 378082 - RNA, 22 nt, Human
cugggagguggagguugcauug

SEQ ID NO: 378083 - RNA, 22 nt, Human
agcagcugagccccagcuguga

SEQ ID NO: 378084 - RNA, 22 nt, Human
gggaccuggcaccuuugcucug

SEQ ID NO: 378085 - RNA, 22 nt, Human
cagggcuguaaauuagugcuga

SEQ ID NO: 378086 - RNA, 22 nt, Human
ccagguguggggaggacucaca

SEQ ID NO: 378087 - RNA, 22 nt, Human
aaugggaggauuuucucucuug

SEQ ID NO: 378088 - RNA, 22 nt, Human
gggagagguuacccgagcaacu

SEQ ID NO: 378089 - RNA, 22 nt, Human
ugcagcuucuccaucuccuugu

SEQ ID NO: 378090 - RNA, 22 nt, Human
auguuaaauaaucccuuaaagc

SEQ ID NO: 378091 - RNA, 19 nt, Human
ggccaggcugacugugguc

SEQ ID NO: 378092 - RNA, 22 nt, Human
uaggcagagguaugguaaggac

SEQ ID NO: 378093 - RNA, 22 nt, Human
gggcugaggcuaccacuggucu

SEQ ID NO: 378094 - RNA, 22 nt, Human
aggagccccucuucaguccugg

SEQ ID NO: 378095 - RNA, 22 nt, Human
ucagugaucuaaggguauggcc

SEQ ID NO: 378096 - RNA, 22 nt, Human
uggauuagugcugaaaugaugg

SEQ ID NO: 378097 - RNA, 22 nt, Human
agcagccaagguaaccugugcu

SEQ ID NO: 378098 - RNA, 22 nt, Human
cugcaggcugagcgccugccgg

SEQ ID NO: 378099 - RNA, 22 nt, Human
uuagcugcauuaucaaaguuau

SEQ ID NO: 378100 - RNA, 22 nt, Human
cacagguguaugaauaugucca

SEQ ID NO: 378101 - RNA, 22 nt, Human
gagagcuguguucauucuacca

SEQ ID NO: 378102 - RNA, 22 nt, Human
cagggagcuggcuggcgugagu

SEQ ID NO: 378103 - RNA, 22 nt, Human
gcugucuguggugucagcugac

SEQ ID NO: 378104 - RNA, 22 nt, Human
gcccagaaguugaggcugcagu

SEQ ID NO: 378105 - RNA, 22 nt, Human
gagggggagaugugcacacacu

SEQ ID NO: 378106 - RNA, 20 nt, Human
uguacacaguacuuuacaau

SEQ ID NO: 378107 - RNA, 22 nt, Human
aauucuauguucuugaguaaga

SEQ ID NO: 378108 - RNA, 22 nt, Human
aaagauuugaaauuaggcauca

SEQ ID NO: 378109 - RNA, 22 nt, Human
caucaucaaaagugacagagaa

SEQ ID NO: 378110 - RNA, 22 nt, Human
cucagagaagucuuugcuaaac

SEQ ID NO: 378111 - RNA, 22 nt, Human
aagacugugucuauggcuacuc

SEQ ID NO: 378112 - RNA, 22 nt, Human
cuuauguaugcuacuuuguggu

SEQ ID NO: 378113 - RNA, 18 nt, Human
caauuucaauggucugaa

SEQ ID NO: 378114 - RNA, 22 nt, Human
aagauuucugcuuuuggaggca

SEQ ID NO: 378115 - RNA, 22 nt, Human
cuggccuucagacucggacuga

SEQ ID NO: 378116 - RNA, 22 nt, Human
uggcugggcccccaccugccuc

SEQ ID NO: 378117 - RNA, 22 nt, Human
ugaggcuccagccaggccagca

SEQ ID NO: 378118 - RNA, 19 nt, Human
ccaggccuggcgucuccgc

SEQ ID NO: 378119 - RNA, 22 nt, Human
cccugccuucuuggccuuuaaa

SEQ ID NO: 378120 - RNA, 22 nt, Human
uaagaacagugacagccaacau

SEQ ID NO: 378121 - RNA, 22 nt, Human
gaugcacaugugaguauagaag

SEQ ID NO: 378122 - RNA, 22 nt, Human
guccagugacaaguagcuggcc

SEQ ID NO: 378123 - RNA, 22 nt, Human
cacagcugcacagaggaggugc

SEQ ID NO: 378124 - RNA, 22 nt, Human
aucuggcucucucauuuacaaa

SEQ ID NO: 378125 - RNA, 22 nt, Human
aaauucaauuaacuuucaugcu

SEQ ID NO: 378126 - RNA, 22 nt, Human
ucaucuaagagucuuacauuua

SEQ ID NO: 378127 - RNA, 22 nt, Human
uuugcauuuuagauuuaggccu

SEQ ID NO: 378128 - RNA, 22 nt, Human
uccugucugucuuuggucccuu

SEQ ID NO: 378129 - RNA, 22 nt, Human
ggcagcucaccucugguccagg

SEQ ID NO: 378130 - RNA, 22 nt, Human
ccaaagcaagucacaugaucaa

SEQ ID NO: 378131 - RNA, 20 nt, Human
guggccucucacauucugag

SEQ ID NO: 378132 - RNA, 18 nt, Human
aggcaggugcuggaaguc

SEQ ID NO: 378133 - RNA, 22 nt, Human
gccaaaucacagggccaaaagc

SEQ ID NO: 378134 - RNA, 21 nt, Human
aaaaugugagcgugaugcuua

SEQ ID NO: 378135 - RNA, 22 nt, Human
aaagaaggaccuggaggaggau

SEQ ID NO: 378136 - RNA, 23 nt, Human
auauggcuguuguguguuaacau

SEQ ID NO: 378137 - RNA, 22 nt, Human
agagccugcaucaggcuugggg

SEQ ID NO: 378138 - RNA, 22 nt, Human
gggcagagacucagaaacagaa

SEQ ID NO: 378139 - RNA, 22 nt, Human
aagcuuuaaggaauuuuaugga

SEQ ID NO: 378140 - RNA, 22 nt, Human
auggcagcaaaugucuggcugg

SEQ ID NO: 378141 - RNA, 22 nt, Human
gagagggagccagccaggaacc

SEQ ID NO: 378142 - RNA, 21 nt, Human
aggaaaggccagcacguaggg

SEQ ID NO: 378143 - RNA, 22 nt, Human
guaggcagauaggagugcagcc

SEQ ID NO: 378144 - RNA, 22 nt, Human
ucucuuaauuuuggaauagugu

SEQ ID NO: 378145 - RNA, 22 nt, Human
uccaggaguuugagacugcagu

SEQ ID NO: 378146 - RNA, 22 nt, Human
uuccaaaguuaguuauuagaaa

SEQ ID NO: 378147 - RNA, 22 nt, Human
auuaaauuagcaaacugugaaa

SEQ ID NO: 378148 - RNA, 22 nt, Human
ccauuuguucgcccagcuccaa

SEQ ID NO: 378149 - RNA, 23 nt, Human
ccuggcuggauucucugcauuca

SEQ ID NO: 378150 - RNA, 22 nt, Human
ugagauguaagguaugcuuacu

SEQ ID NO: 378151 - RNA, 22 nt, Human
gccugcagccucagagaauuuu

SEQ ID NO: 378152 - RNA, 22 nt, Human
ugauuuaugcauuauacuguug

SEQ ID NO: 378153 - RNA, 22 nt, Human
aggggagaguuaaugugaaugu

SEQ ID NO: 378154 - RNA, 22 nt, Human
agcugccagcaucccggaaggg

SEQ ID NO: 378155 - RNA, 22 nt, Human
auuacaagaugcauccauauuu

SEQ ID NO: 378156 - RNA, 22 nt, Human
ugcugccuuugggaccuggccu

SEQ ID NO: 378157 - RNA, 22 nt, Human
gccuggagcccaguguggggcu

SEQ ID NO: 378158 - RNA, 22 nt, Human
uggagaugaauauguguaccug

SEQ ID NO: 378159 - RNA, 22 nt, Human
ugggaccugaagcagguuggca

SEQ ID NO: 378160 - RNA, 22 nt, Human
ugcagggaaaguguuggcagca

SEQ ID NO: 378161 - RNA, 17 nt, Human
ugcuuaauuuugacugg

SEQ ID NO: 378162 - RNA, 22 nt, Human
gcugagugauugauauuuuagu

SEQ ID NO: 378163 - RNA, 22 nt, Human
caugucuuuguuaugcucacca

SEQ ID NO: 378164 - RNA, 22 nt, Human
gcagcuuucugcaaugucaucc

SEQ ID NO: 378165 - RNA, 23 nt, Human
uguaacaauuucauauacaugca

SEQ ID NO: 378166 - RNA, 22 nt, Human
caaaugcuggcccugcuacuua

SEQ ID NO: 378167 - RNA, 22 nt, Human
cccagcuccuuggaugggcagg

SEQ ID NO: 378168 - RNA, 20 nt, Human
gcugccuguuucuguaagua

SEQ ID NO: 378169 - RNA, 22 nt, Human
agaggcucugccgccucaggua

SEQ ID NO: 378170 - RNA, 22 nt, Human
uuucuagaggcuccaggggagu

SEQ ID NO: 378171 - RNA, 22 nt, Human
gcuuugaagucugugucuuuug

SEQ ID NO: 378172 - RNA, 22 nt, Human
ugggccaggcaugugaucagca

SEQ ID NO: 378173 - RNA, 22 nt, Human
gagggccaacuagcaccacuuu

SEQ ID NO: 378174 - RNA, 22 nt, Human
aggugccagaugcacagcugaa

SEQ ID NO: 378175 - RNA, 22 nt, Human
aaaggcauuuuaauucuaaaga

SEQ ID NO: 378176 - RNA, 22 nt, Human
gaagaaggugcuacacagggca

SEQ ID NO: 378177 - RNA, 22 nt, Human
ugcaccccauuuuacauuuaca

SEQ ID NO: 378178 - RNA, 22 nt, Human
auuucucacucacaguccaugu

SEQ ID NO: 378179 - RNA, 22 nt, Human
uccagccacucagcagggauug

SEQ ID NO: 378180 - RNA, 22 nt, Human
ucacauuuguuccucugcacuu

SEQ ID NO: 378181 - RNA, 22 nt, Human
gcaccugggacccagaggcacc

SEQ ID NO: 378182 - RNA, 22 nt, Human
uagucuuuugagaaguauaucu

SEQ ID NO: 378183 - RNA, 22 nt, Human
guggccucugugcuccugccua

SEQ ID NO: 378184 - RNA, 22 nt, Human
cacccagcacagagggaggcga

SEQ ID NO: 378185 - RNA, 22 nt, Human
aacauucuauuuugcuaaaaca

SEQ ID NO: 378186 - RNA, 22 nt, Human
aggacccugagcgggcaugccg

SEQ ID NO: 378187 - RNA, 22 nt, Human
aggcucugcagugcuggaggac

SEQ ID NO: 378188 - RNA, 21 nt, Human
uggccaaacuggagcauuuga

SEQ ID NO: 378189 - RNA, 22 nt, Human
ggaaggucgagcugcaucuggc

SEQ ID NO: 378190 - RNA, 22 nt, Human
ucuuugcaugugcuucuuggcc

SEQ ID NO: 378191 - RNA, 20 nt, Human
aguuauaguaucuagccaug

SEQ ID NO: 378192 - RNA, 22 nt, Human
gcugcugugccuggcguccugu

SEQ ID NO: 378193 - RNA, 22 nt, Human
uuucaaguguccugauuaaugg

SEQ ID NO: 378194 - RNA, 22 nt, Human
ugcuauacggagcaucuucagg

SEQ ID NO: 378195 - RNA, 22 nt, Human
cagcaggguauacagggaauuu

SEQ ID NO: 378196 - RNA, 22 nt, Human
cuggagagaaaugacaaagcua

SEQ ID NO: 378197 - RNA, 22 nt, Human
gaggcuggaauauuagaaaugu

SEQ ID NO: 378198 - RNA, 22 nt, Human
ggaggcuccacugcucuuccug

SEQ ID NO: 378199 - RNA, 22 nt, Human
auuauagaggguuacaguuaau

SEQ ID NO: 378200 - RNA, 22 nt, Human
uagugcuuaacacaaagugauu

SEQ ID NO: 378201 - RNA, 22 nt, Human
cagggucuuauaaggccaauuu

SEQ ID NO: 378202 - RNA, 22 nt, Human
ggacacaagcuccggggcugca

SEQ ID NO: 378203 - RNA, 19 nt, Human
agcagcuggagguggagug

SEQ ID NO: 378204 - RNA, 22 nt, Human
cauuagggucucucagcugaau

SEQ ID NO: 378205 - RNA, 22 nt, Human
ugucuuuggaauauuuagcuga

SEQ ID NO: 378206 - RNA, 22 nt, Human
agaggccuaauugcuacccuuu

SEQ ID NO: 378207 - RNA, 22 nt, Human
uggcucagcgguggcagcagac

SEQ ID NO: 378208 - RNA, 22 nt, Human
gcaggggcugagcaccagcggg

SEQ ID NO: 378209 - RNA, 23 nt, Human
uauuacaauuggucuuauuaaga

SEQ ID NO: 378210 - RNA, 22 nt, Human
cagugcaguggcugagcuggag

SEQ ID NO: 378211 - RNA, 22 nt, Human
gagaaggacuacacaucuggcc

SEQ ID NO: 378212 - RNA, 22 nt, Human
cuguauuucccacauucucuau

SEQ ID NO: 378213 - RNA, 22 nt, Human
acccaggaaaacauggugcaga

SEQ ID NO: 378214 - RNA, 22 nt, Human
cuggaucaugggaaagggauca

SEQ ID NO: 378215 - RNA, 22 nt, Human
auacagaauucacuacaguuuc

SEQ ID NO: 378216 - RNA, 22 nt, Human
caugcagugacucagacacagg

SEQ ID NO: 378217 - RNA, 22 nt, Human
aacauauaaacucuuaaguuca

SEQ ID NO: 378218 - RNA, 22 nt, Human
uacugugaauacaaaauaaauu

SEQ ID NO: 378219 - RNA, 22 nt, Human
uuuuccuaguaggccuauuaga

SEQ ID NO: 378220 - RNA, 22 nt, Human
ugaggaagggugugacggcacc

SEQ ID NO: 378221 - RNA, 22 nt, Human
cacauuuaauccuuuauaagua

SEQ ID NO: 378222 - RNA, 22 nt, Human
ucuauacugaugggauacuauu

SEQ ID NO: 378223 - RNA, 22 nt, Human
uuauauaaagauaacuuuucuu

SEQ ID NO: 378224 - RNA, 22 nt, Human
augugaggaagaaagagguaag

SEQ ID NO: 378225 - RNA, 21 nt, Human
ucuuuccugcccaguugcccu

SEQ ID NO: 378226 - RNA, 22 nt, Human
aggagccuccuucucaugugca

SEQ ID NO: 378227 - RNA, 22 nt, Human
uucugggagagaaagggccuug

SEQ ID NO: 378228 - RNA, 22 nt, Human
uguaggaguccaaucaggagac

SEQ ID NO: 378229 - RNA, 22 nt, Human
uaauuucacugauaugaaguca

SEQ ID NO: 378230 - RNA, 22 nt, Human
auuugcaaagucguaucuguga

SEQ ID NO: 378231 - RNA, 22 nt, Human
ugccuuccuggagcugaaggcu

SEQ ID NO: 378232 - RNA, 22 nt, Human
ugccauuuugagauguuaauga

SEQ ID NO: 378233 - RNA, 19 nt, Human
caguggagauuggaggagg

SEQ ID NO: 378234 - RNA, 22 nt, Human
augaggcaggagugcaguggca

SEQ ID NO: 378235 - RNA, 22 nt, Human
ggagaaggaagaaagcuacuau

SEQ ID NO: 378236 - RNA, 22 nt, Human
gagaggcaggcgcugcaauggu

SEQ ID NO: 378237 - RNA, 22 nt, Human
gggcuccaccuagggacacugg

SEQ ID NO: 378238 - RNA, 22 nt, Human
uuaacacuccuaacuacagucu

SEQ ID NO: 378239 - RNA, 22 nt, Human
cagcccugcacgcugccuccgc

SEQ ID NO: 378240 - RNA, 21 nt, Human
agcuuccugcagugggagguc

SEQ ID NO: 378241 - RNA, 22 nt, Human
guccugucccccaaggcugugg

SEQ ID NO: 378242 - RNA, 22 nt, Human
cugcuguggugucaagcaucuc

SEQ ID NO: 378243 - RNA, 22 nt, Human
ugguccugagcaccagccugac

SEQ ID NO: 378244 - RNA, 22 nt, Human
guaauuaggaauaaaaugggaa

SEQ ID NO: 378245 - RNA, 19 nt, Human
ggcugggucuggcagguuc

SEQ ID NO: 378246 - RNA, 22 nt, Human
agccacaccuguccugccagcu

SEQ ID NO: 378247 - RNA, 22 nt, Human
aaagccagaguguguuagagac

SEQ ID NO: 378248 - RNA, 22 nt, Human
gcauugucaaaagugguaugac

SEQ ID NO: 378249 - RNA, 19 nt, Human
gagggcucauuugaacaau

SEQ ID NO: 378250 - RNA, 22 nt, Human
uggcucuggggacaguaagucc

SEQ ID NO: 378251 - RNA, 22 nt, Human
ugagaauuacaaaugagucaca

SEQ ID NO: 378252 - RNA, 22 nt, Human
gcugccacuuggucaugucaug

SEQ ID NO: 378253 - RNA, 22 nt, Human
caauuucucgaacucuaaucca

SEQ ID NO: 378254 - RNA, 22 nt, Human
uuugaaagggaaauaaacuccu

SEQ ID NO: 378255 - RNA, 22 nt, Human
gcugucuucacuuccugguuuc

SEQ ID NO: 378256 - RNA, 22 nt, Human
ucugagaguccaucuccaagcc

SEQ ID NO: 378257 - RNA, 22 nt, Human
ggauggagguucucagaugcuc

SEQ ID NO: 378258 - RNA, 22 nt, Human
agagcaucuaacacauaagccu

SEQ ID NO: 378259 - RNA, 22 nt, Human
agcugcaguaaagcucuccagg

SEQ ID NO: 378260 - RNA, 22 nt, Human
gccugcagaggugcugcuagcu

SEQ ID NO: 378261 - RNA, 17 nt, Human
gcuuccucaugcaguuc

SEQ ID NO: 378262 - RNA, 22 nt, Human
uaugaaaagguggccaauguag

SEQ ID NO: 378263 - RNA, 22 nt, Human
gggcagcuguaucugagcuuau

SEQ ID NO: 378264 - RNA, 19 nt, Human
ccagcagguucauuucagg

SEQ ID NO: 378265 - RNA, 22 nt, Human
caguuuauaugucagagcugua

SEQ ID NO: 378266 - RNA, 20 nt, Human
uuaagaaaagcacauccugc

SEQ ID NO: 378267 - RNA, 22 nt, Human
ccaccagcagugugcaaggauu

SEQ ID NO: 378268 - RNA, 21 nt, Human
acaugucuggucauuuuuagc

SEQ ID NO: 378269 - RNA, 22 nt, Human
ccaggcugggcuacaaguugag

SEQ ID NO: 378270 - RNA, 22 nt, Human
uuacagaaguauugagagaucc

SEQ ID NO: 378271 - RNA, 22 nt, Human
aacauucugguucuaaaaaccu

SEQ ID NO: 378272 - RNA, 22 nt, Human
gaggccugggagccuguccucc

SEQ ID NO: 378273 - RNA, 22 nt, Human
cagcaggaaacuuaaagguaau

SEQ ID NO: 378274 - RNA, 22 nt, Human
ccuggccuggcacucccucugc

SEQ ID NO: 378275 - RNA, 22 nt, Human
cugggaggcccacguugggaag

SEQ ID NO: 378276 - RNA, 22 nt, Human
aaaggagacuucagaucuccuu

SEQ ID NO: 378277 - RNA, 22 nt, Human
agagcuggccagggaucacucu

SEQ ID NO: 378278 - RNA, 22 nt, Human
ugaguacucggagugcuuugga

SEQ ID NO: 378279 - RNA, 22 nt, Human
gggauggggggaagcguccaug

SEQ ID NO: 378280 - RNA, 22 nt, Human
acuaaacugaagcaugaaaagg

SEQ ID NO: 378281 - RNA, 22 nt, Human
cagcuccugcagcugcugccgu

SEQ ID NO: 378282 - RNA, 22 nt, Human
ggcagggguccugguguugacu

SEQ ID NO: 378283 - RNA, 22 nt, Human
ccaggcagcaaauuuucugaau

SEQ ID NO: 378284 - RNA, 22 nt, Human
gcaggagcagucaggggcagcu

SEQ ID NO: 378285 - RNA, 22 nt, Human
guuaaauucgaugauggauaaa

SEQ ID NO: 378286 - RNA, 21 nt, Human
augucaaaugcuuuauuuuau

SEQ ID NO: 378287 - RNA, 23 nt, Human
aggagccaggugcagcccuugug

SEQ ID NO: 378288 - RNA, 18 nt, Human
gcugagguggugucagag

SEQ ID NO: 378289 - RNA, 21 nt, Human
ugauccuuucccccauguugc

SEQ ID NO: 378290 - RNA, 22 nt, Human
uaguaucuuucuauauuuccca

SEQ ID NO: 378291 - RNA, 22 nt, Human
cucagcagugacaagagaguau

SEQ ID NO: 378292 - RNA, 22 nt, Human
auacaucuuccuuuuaaaaugc

SEQ ID NO: 378293 - RNA, 22 nt, Human
uucauugucucuguuugccuuc

SEQ ID NO: 378294 - RNA, 22 nt, Human
uaucagaaaucaacacacagug

SEQ ID NO: 378295 - RNA, 22 nt, Human
aggcugugcaauuaggguaaga

SEQ ID NO: 378296 - RNA, 22 nt, Human
agcagcauggcugacuaaagac

SEQ ID NO: 378297 - RNA, 22 nt, Human
gaggccaggguaccaucaacau

SEQ ID NO: 378298 - RNA, 22 nt, Human
cacuguguaagaagaugggcuu

SEQ ID NO: 378299 - RNA, 22 nt, Human
ucaggagaaaauaucaggaagu

SEQ ID NO: 378300 - RNA, 22 nt, Human
ucuguucaagacugaggugaca

SEQ ID NO: 378301 - RNA, 22 nt, Human
ugagacaguuuuucuauuucca

SEQ ID NO: 378302 - RNA, 22 nt, Human
ugcuuaaacccugaucaugugu

SEQ ID NO: 378303 - RNA, 22 nt, Human
cccagcuccgagcuccgagccg

SEQ ID NO: 378304 - RNA, 22 nt, Human
gcaucuuucuguccauucagca

SEQ ID NO: 378305 - RNA, 22 nt, Human
acugaaggaagcgggcaggggu

SEQ ID NO: 378306 - RNA, 22 nt, Human
uguggccagcagguggcugugu

SEQ ID NO: 378307 - RNA, 22 nt, Human
uaaaugugagugaugcggugaa

SEQ ID NO: 378308 - RNA, 21 nt, Human
gccagagcaguacaaugaggu

SEQ ID NO: 378309 - RNA, 22 nt, Human
gccagcuggagacuggcagggg

SEQ ID NO: 378310 - RNA, 22 nt, Human
cuggcuggccggagcgaggcgg

SEQ ID NO: 378311 - RNA, 22 nt, Human
acauuugucuucuuucagauua

SEQ ID NO: 378312 - RNA, 22 nt, Human
gucuucuuguuuugaaggaaau

SEQ ID NO: 378313 - RNA, 22 nt, Human
cucuuuccucagccacagucua

SEQ ID NO: 378314 - RNA, 22 nt, Human
uugcauugcuuggucuucaaga

SEQ ID NO: 378315 - RNA, 22 nt, Human
cccaggcagugcugaucccuca

SEQ ID NO: 378316 - RNA, 22 nt, Human
aguaugaacggaaggccuggga

SEQ ID NO: 378317 - RNA, 22 nt, Human
ucacaaauagcuauauuaagga

SEQ ID NO: 378318 - RNA, 22 nt, Human
ucugccuggaugauggcagggc

SEQ ID NO: 378319 - RNA, 22 nt, Human
uggcagcaaaaccagaaucaga

SEQ ID NO: 378320 - RNA, 22 nt, Human
cccagcucucgcacuuacuagc

SEQ ID NO: 378321 - RNA, 22 nt, Human
aguggagacaggacagucgaua

SEQ ID NO: 378322 - RNA, 22 nt, Human
uuuauuuggcauccagggagaa

SEQ ID NO: 378323 - RNA, 22 nt, Human
ccacugaaggucaacauagagc

SEQ ID NO: 378324 - RNA, 22 nt, Human
auacuguuuugugacuuaucuu

SEQ ID NO: 378325 - RNA, 22 nt, Human
ucaccagggagcuuguccucug

SEQ ID NO: 378326 - RNA, 20 nt, Human
ccugggguacacuggcaugu

SEQ ID NO: 378327 - RNA, 22 nt, Human
uccaggcauaagccuugagugu

SEQ ID NO: 378328 - RNA, 22 nt, Human
aaauugcauuuuaaagguagau

SEQ ID NO: 378329 - RNA, 22 nt, Human
gugugccaccagucaaggugaa

SEQ ID NO: 378330 - RNA, 22 nt, Human
cagcaggaggugaguagcaggu

SEQ ID NO: 378331 - RNA, 20 nt, Human
uuucaguuaucuugaccuuc

SEQ ID NO: 378332 - RNA, 22 nt, Human
aaccauuugccauuaucuuaag

SEQ ID NO: 378333 - RNA, 22 nt, Human
aauuucagagguagagauucua

SEQ ID NO: 378334 - RNA, 22 nt, Human
gcugggagaggcccugaaguga

SEQ ID NO: 378335 - RNA, 22 nt, Human
uuuuccucaggaaugcuaagcu

SEQ ID NO: 378336 - RNA, 22 nt, Human
aguggagaagaggauggucucc

SEQ ID NO: 378337 - RNA, 22 nt, Human
aaguccagcagugcuuguugau

SEQ ID NO: 378338 - RNA, 22 nt, Human
cuuucauucuuagauauuagug

SEQ ID NO: 378339 - RNA, 22 nt, Human
cgggcagaucacacagggcuug

SEQ ID NO: 378340 - RNA, 22 nt, Human
guucuucagucacaucacagaa

SEQ ID NO: 378341 - RNA, 22 nt, Human
ugugaaaagcaggcuacuuucu

SEQ ID NO: 378342 - RNA, 22 nt, Human
uagucucugcuuugcccuuggc

SEQ ID NO: 378343 - RNA, 19 nt, Human
caaggguugggucugucau

SEQ ID NO: 378344 - RNA, 22 nt, Human
uugaaaggugcugugugcugau

SEQ ID NO: 378345 - RNA, 22 nt, Human
guauuugauagauuucaaagga

SEQ ID NO: 378346 - RNA, 22 nt, Human
ucagggcauacucuucaagguc

SEQ ID NO: 378347 - RNA, 22 nt, Human
gcagaaggauccgcaggugcaa

SEQ ID NO: 378348 - RNA, 22 nt, Human
uccagcagaaaagagguaggga

SEQ ID NO: 378349 - RNA, 22 nt, Human
acaaauaugguacucggagaaa

SEQ ID NO: 378350 - RNA, 22 nt, Human
ccagugcuaagguagccucugc

SEQ ID NO: 378351 - RNA, 22 nt, Human
aaagucauuggaauauuaauga

SEQ ID NO: 378352 - RNA, 22 nt, Human
agucucugcaugaugcagcaca

SEQ ID NO: 378353 - RNA, 22 nt, Human
gggaccuggacaugugugugcu

SEQ ID NO: 378354 - RNA, 22 nt, Human
caggcgagugaacagacucuca

SEQ ID NO: 378355 - RNA, 22 nt, Human
ugggggagccuucacaguagcu

SEQ ID NO: 378356 - RNA, 22 nt, Human
ugucuucaucuccaugcacaga

SEQ ID NO: 378357 - RNA, 22 nt, Human
agcucagggcgaucugucucgg

SEQ ID NO: 378358 - RNA, 22 nt, Human
ccaugagacagcaacugaaagu

SEQ ID NO: 378359 - RNA, 22 nt, Human
auucuucacaaauauauagaag

SEQ ID NO: 378360 - RNA, 22 nt, Human
agcccuggcccggcugugcuuu

SEQ ID NO: 378361 - RNA, 22 nt, Human
cagaguggcagucccaggccca

SEQ ID NO: 378362 - RNA, 22 nt, Human
uaaauuaugucacaugacucug

SEQ ID NO: 378363 - RNA, 22 nt, Human
ugccugcucuuaccacucuccc

SEQ ID NO: 378364 - RNA, 22 nt, Human
gcuccugggcucuaccuugcua

SEQ ID NO: 378365 - RNA, 22 nt, Human
gugcaugugucuuuauaguaga

SEQ ID NO: 378366 - RNA, 22 nt, Human
ucacaccaguuuccuuucaauu

SEQ ID NO: 378367 - RNA, 22 nt, Human
acaggcuuacaggcugcaagua

SEQ ID NO: 378368 - RNA, 22 nt, Human
agaugaaagauuuuuauagaga

SEQ ID NO: 378369 - RNA, 22 nt, Human
ucuggaucaccacuucugccuc

SEQ ID NO: 378370 - RNA, 22 nt, Human
cauuugaaauucuuagaacaaa

SEQ ID NO: 378371 - RNA, 22 nt, Human
ucaguaaaugguugcuguuauu

SEQ ID NO: 378372 - RNA, 22 nt, Human
gagauguacaauguguauuaau

SEQ ID NO: 378373 - RNA, 22 nt, Human
augcaguacugauacaugccac

SEQ ID NO: 378374 - RNA, 22 nt, Human
ucaggcagguuggcugcagguc

SEQ ID NO: 378375 - RNA, 18 nt, Human
auggucucauacugggag

SEQ ID NO: 378376 - RNA, 22 nt, Human
ccuggccucgugcucacggcuc

SEQ ID NO: 378377 - RNA, 22 nt, Human
aggcagccagauggcagccugc

SEQ ID NO: 378378 - RNA, 22 nt, Human
cagugcaggcugggggcccugc

SEQ ID NO: 378379 - RNA, 22 nt, Human
gagagcuguccggcugagcagc

SEQ ID NO: 378380 - RNA, 22 nt, Human
aggcugagguaggaggaucgcu

SEQ ID NO: 378381 - RNA, 22 nt, Human
auucacaauuagaaguagauaa

SEQ ID NO: 378382 - RNA, 22 nt, Human
auuaucuauguagaaugauuuu

SEQ ID NO: 378383 - RNA, 22 nt, Human
agcuuuauuugucauucacggc

SEQ ID NO: 378384 - RNA, 22 nt, Human
auauauuuacucuccuguugca

SEQ ID NO: 378385 - RNA, 22 nt, Human
cauggccucaaaggacugcaga

SEQ ID NO: 378386 - RNA, 22 nt, Human
gggcucuggauggagccugcag

SEQ ID NO: 378387 - RNA, 22 nt, Human
gcccugagggguggugucugua

SEQ ID NO: 378388 - RNA, 22 nt, Human
cucaggacccgguccagguggg

SEQ ID NO: 378389 - RNA, 22 nt, Human
ucaguaacuuacuuauucaccu

SEQ ID NO: 378390 - RNA, 22 nt, Human
uucuaccuacccucugcauaca

SEQ ID NO: 378391 - RNA, 23 nt, Human
ugggcagcuucugcaugcccacc

SEQ ID NO: 378392 - RNA, 22 nt, Human
ggaggcugcugccucacguggg

SEQ ID NO: 378393 - RNA, 22 nt, Human
uccagggaagagcagaggcuac

SEQ ID NO: 378394 - RNA, 22 nt, Human
uggcucaggccuacgacgccuu

SEQ ID NO: 378395 - RNA, 22 nt, Human
gugaauaacuuucuauguuaau

SEQ ID NO: 378396 - RNA, 22 nt, Human
aaggcagcagugcacgacugau

SEQ ID NO: 378397 - RNA, 22 nt, Human
acaugcuuguuuuucacaaccu

SEQ ID NO: 378398 - RNA, 19 nt, Human
ucacaggcaucuccccaga

SEQ ID NO: 378399 - RNA, 22 nt, Human
uuccucaugggguuccuucaga

SEQ ID NO: 378400 - RNA, 22 nt, Human
acugggaggcaaagagcaagga

SEQ ID NO: 378401 - RNA, 22 nt, Human
ugccaggcuuagagcaggggcu

SEQ ID NO: 378402 - RNA, 22 nt, Human
ucugggcuuuacacugugcuua

SEQ ID NO: 378403 - RNA, 22 nt, Human
aacagugagaagguggacagga

SEQ ID NO: 378404 - RNA, 22 nt, Human
acaaaugcaaguuuuaugucaa

SEQ ID NO: 378405 - RNA, 22 nt, Human
gcagggcacaaggacgcacagg

SEQ ID NO: 378406 - RNA, 22 nt, Human
caggagcaugcugaugccagaa

SEQ ID NO: 378407 - RNA, 22 nt, Human
cccaguuucaacuuuccagugg

SEQ ID NO: 378408 - RNA, 22 nt, Human
auuuguugcuagcagcacugau

SEQ ID NO: 378409 - RNA, 22 nt, Human
cagcagcaguggcugcagaaca

SEQ ID NO: 378410 - RNA, 22 nt, Human
cagcagagacgguaagcagaac

SEQ ID NO: 378411 - RNA, 22 nt, Human
ugugacaucgcugugucuguuu

SEQ ID NO: 378412 - RNA, 23 nt, Human
acucagagaccccgggaagugac

SEQ ID NO: 378413 - RNA, 22 nt, Human
aauuucaaacucuugcccucag

SEQ ID NO: 378414 - RNA, 22 nt, Human
agggccuggcuucacuuucuca

SEQ ID NO: 378415 - RNA, 22 nt, Human
auggcaggcccagguguucauu

SEQ ID NO: 378416 - RNA, 22 nt, Human
aggggacacggcuucuccaggg

SEQ ID NO: 378417 - RNA, 22 nt, Human
ucuucacaggagccugccugcc

SEQ ID NO: 378418 - RNA, 22 nt, Human
auacagaaaaugaugcagaguu

SEQ ID NO: 378419 - RNA, 22 nt, Human
uuugcauuucucguaaggaaac

SEQ ID NO: 378420 - RNA, 22 nt, Human
uuacauaacgguaugaaaaaug

SEQ ID NO: 378421 - RNA, 19 nt, Human
uguagcaguuuaaaacaac

SEQ ID NO: 378422 - RNA, 22 nt, Human
ucuuuauuuuaugcuugugcaa

SEQ ID NO: 378423 - RNA, 22 nt, Human
ggggcaggagguguucucuuuu

SEQ ID NO: 378424 - RNA, 22 nt, Human
ugguagggacacuaugcagaaa

SEQ ID NO: 378425 - RNA, 22 nt, Human
agucaaaugaguaaauauauaa

SEQ ID NO: 378426 - RNA, 22 nt, Human
auaaugaggauuugcauauuag

SEQ ID NO: 378427 - RNA, 22 nt, Human
aaaguccuguuaacuguuaaca

SEQ ID NO: 378428 - RNA, 22 nt, Human
agcaugcugguguucauggcag

SEQ ID NO: 378429 - RNA, 22 nt, Human
ugggccuguggcuuggcucuag

SEQ ID NO: 378430 - RNA, 22 nt, Human
guaucuuuugguggaaaaauaa

SEQ ID NO: 378431 - RNA, 22 nt, Human
gcagaaggucuggcacuucagg

SEQ ID NO: 378432 - RNA, 23 nt, Human
auuucuaggggauuuucuggugc

SEQ ID NO: 378433 - RNA, 22 nt, Human
gcagguggagcaguagucuggu

SEQ ID NO: 378434 - RNA, 22 nt, Human
ggccugaggccaccagcagccc

SEQ ID NO: 378435 - RNA, 22 nt, Human
uggcuuccugcauggauccucu

SEQ ID NO: 378436 - RNA, 22 nt, Human
aggccugagguuccugugcuca

SEQ ID NO: 378437 - RNA, 22 nt, Human
caggccucagagaguggcgggg

SEQ ID NO: 378438 - RNA, 22 nt, Human
uauuucugaggcccaggaagug

SEQ ID NO: 378439 - RNA, 22 nt, Human
ugaagacacauacaagggaaug

SEQ ID NO: 378440 - RNA, 22 nt, Human
ucugagagguuaagcaauuuga

SEQ ID NO: 378441 - RNA, 22 nt, Human
aaggccaggacaccaggggacu

SEQ ID NO: 378442 - RNA, 21 nt, Human
ccuccaggugauuccgugcuc

SEQ ID NO: 378443 - RNA, 22 nt, Human
aguguucauuuauucauucacu

SEQ ID NO: 378444 - RNA, 18 nt, Human
ucuuuggacaacuacugg

SEQ ID NO: 378445 - RNA, 22 nt, Human
gcagggcacacaagaaugauaa

SEQ ID NO: 378446 - RNA, 23 nt, Human
ucagagaaguuguaggcugggga

SEQ ID NO: 378447 - RNA, 22 nt, Human
acuugauuuugaaccuuucuac

SEQ ID NO: 378448 - RNA, 22 nt, Human
uggcuuccugcacagugucugc

SEQ ID NO: 378449 - RNA, 22 nt, Human
uacauguaagacaugagacucu

SEQ ID NO: 378450 - RNA, 22 nt, Human
agcaccuugcucuuggccuucc

SEQ ID NO: 378451 - RNA, 22 nt, Human
ucauuucucccggccaaaaacu

SEQ ID NO: 378452 - RNA, 22 nt, Human
uggccugguuauauugcuauca

SEQ ID NO: 378453 - RNA, 22 nt, Human
gagcagcucugggugacccagu

SEQ ID NO: 378454 - RNA, 22 nt, Human
uccuggagccacggagcuuuca

SEQ ID NO: 378455 - RNA, 22 nt, Human
guauuuauaggggaaugagagu

SEQ ID NO: 378456 - RNA, 22 nt, Human
ggcagcucugugucugggaagc

SEQ ID NO: 378457 - RNA, 18 nt, Human
cagaaaucacaccagcac

SEQ ID NO: 378458 - RNA, 22 nt, Human
cugggccagauccagccucaca

SEQ ID NO: 378459 - RNA, 22 nt, Human
ccucccaccguaucucaguggc

SEQ ID NO: 378460 - RNA, 22 nt, Human
auguuacacauaggcauaaaug

SEQ ID NO: 378461 - RNA, 22 nt, Human
ucagcugaaguggagaagcaga

SEQ ID NO: 378462 - RNA, 22 nt, Human
ucaggacagccagggugcagac

SEQ ID NO: 378463 - RNA, 22 nt, Human
ucuuuggauaucgcuagaccgu

SEQ ID NO: 378464 - RNA, 22 nt, Human
aaucuuucccuauuaaaugugg

SEQ ID NO: 378465 - RNA, 22 nt, Human
gccccagccaaggugacacgaa

SEQ ID NO: 378466 - RNA, 22 nt, Human
aguaucaaggaucuccagcacc

SEQ ID NO: 378467 - RNA, 22 nt, Human
ccuaugccugucacucugcgcu

SEQ ID NO: 378468 - RNA, 22 nt, Human
augaguaagaccauaauuuuug

SEQ ID NO: 378469 - RNA, 21 nt, Human
acagcaagccuucacaugagu

SEQ ID NO: 378470 - RNA, 22 nt, Human
aagagcugugggugguaguccu

SEQ ID NO: 378471 - RNA, 22 nt, Human
gaagagcuuaguuguccuagaa

SEQ ID NO: 378472 - RNA, 23 nt, Human
uuucaacuccugccauuauuucu

SEQ ID NO: 378473 - RNA, 22 nt, Human
cucacaguguaauauugaaccc

SEQ ID NO: 378474 - RNA, 22 nt, Human
uccaggaguccuggguggcccc

SEQ ID NO: 378475 - RNA, 22 nt, Human
gcagggcugcugaaacuuguuu

SEQ ID NO: 378476 - RNA, 22 nt, Human
aagagguugucugugaugaguu

SEQ ID NO: 378477 - RNA, 22 nt, Human
ucacagacauggugagguaaca

SEQ ID NO: 378478 - RNA, 22 nt, Human
ccucugggugggaggccgggcg

SEQ ID NO: 378479 - RNA, 22 nt, Human
auuucaacacuuuuggaauuag

SEQ ID NO: 378480 - RNA, 22 nt, Human
acauuuaaugauccuacuguga

SEQ ID NO: 378481 - RNA, 22 nt, Human
ggcuuaaugguucuuuuucuca

SEQ ID NO: 378482 - RNA, 22 nt, Human
aaaacaggugucagcaaacuau

SEQ ID NO: 378483 - RNA, 22 nt, Human
acuuccugcagcuucucagccc

SEQ ID NO: 378484 - RNA, 22 nt, Human
cagagcuggagggaacccuggc

SEQ ID NO: 378485 - RNA, 22 nt, Human
guguuuuaucagacaaaguaua

SEQ ID NO: 378486 - RNA, 21 nt, Human
ccaggcagagcugugaguucu

SEQ ID NO: 378487 - RNA, 21 nt, Human
ugcucacagaugugcucagug

SEQ ID NO: 378488 - RNA, 22 nt, Human
agggcagagaaauguaguugag

SEQ ID NO: 378489 - RNA, 22 nt, Human
caccugcagggggagucaagag

SEQ ID NO: 378490 - RNA, 22 nt, Human
ucccagccuuccagucugguuu

SEQ ID NO: 378491 - RNA, 22 nt, Human
cagaggcauuacugaaaaggug

SEQ ID NO: 378492 - RNA, 22 nt, Human
ggagaggagauuguggcauuuu

SEQ ID NO: 378493 - RNA, 22 nt, Human
gggcagguggagggcccagcca

SEQ ID NO: 378494 - RNA, 22 nt, Human
ggcuuuaugcagggauagaaau

SEQ ID NO: 378495 - RNA, 22 nt, Human
cuuucacagcacaagccugccu

SEQ ID NO: 378496 - RNA, 22 nt, Human
caauuucagaccuuuccuugga

SEQ ID NO: 378497 - RNA, 22 nt, Human
aaggucauggcaaauuacuuuu

SEQ ID NO: 378498 - RNA, 19 nt, Human
ccugcagggaugagagguu

SEQ ID NO: 378499 - RNA, 22 nt, Human
gcccagcugcacccuggugggu

SEQ ID NO: 378500 - RNA, 22 nt, Human
ugcuccagugagcuggccaucc

SEQ ID NO: 378501 - RNA, 22 nt, Human
cagcuugugcaaagguccuggg

SEQ ID NO: 378502 - RNA, 22 nt, Human
uuucaucuaacacuacauaggg

SEQ ID NO: 378503 - RNA, 22 nt, Human
auucagagcacuggguagaauu

SEQ ID NO: 378504 - RNA, 22 nt, Human
gccaggugcuaucccugcgcug

SEQ ID NO: 378505 - RNA, 22 nt, Human
auuaaagacagcagauggaugg

SEQ ID NO: 378506 - RNA, 22 nt, Human
ggcucagguuuccuucccagcu

SEQ ID NO: 378507 - RNA, 22 nt, Human
gagcgggaggaacggcucgggc

SEQ ID NO: 378508 - RNA, 22 nt, Human
acuuuuaaggggccuugauuua

SEQ ID NO: 378509 - RNA, 22 nt, Human
cuggagcagguuuaggaguccc

SEQ ID NO: 378510 - RNA, 22 nt, Human
ggugggcaggcgaggcccaggu

SEQ ID NO: 378511 - RNA, 22 nt, Human
acacugaauauacaaugaauau

SEQ ID NO: 378512 - RNA, 22 nt, Human
agggcccuaaggaaggcacaca

SEQ ID NO: 378513 - RNA, 22 nt, Human
agggcugacagugaggagucaa

SEQ ID NO: 378514 - RNA, 22 nt, Human
acauucuguuuccccaaagaga

SEQ ID NO: 378515 - RNA, 22 nt, Human
augcaaaauuaccauucuguuc

SEQ ID NO: 378516 - RNA, 22 nt, Human
agcuggccuuagugagcaccug

SEQ ID NO: 378517 - RNA, 22 nt, Human
uacauuguuuuuucuugccauc

SEQ ID NO: 378518 - RNA, 22 nt, Human
uggcugaggagggucuucuggu

SEQ ID NO: 378519 - RNA, 22 nt, Human
aauaauauuugaagcuucaaag

SEQ ID NO: 378520 - RNA, 22 nt, Human
cugagcugggcucucuugaggg

SEQ ID NO: 378521 - RNA, 22 nt, Human
ugccgcagugcggggagggccc

SEQ ID NO: 378522 - RNA, 22 nt, Human
ccagggcugagcugugaccaug

SEQ ID NO: 378523 - RNA, 22 nt, Human
gucaaguuuauccgcucauuca

SEQ ID NO: 378524 - RNA, 22 nt, Human
augcugugauuguagaaauauu

SEQ ID NO: 378525 - RNA, 22 nt, Human
gcaagcuggcuguuagaggaug

SEQ ID NO: 378526 - RNA, 18 nt, Human
cugcugugucgucugggc

SEQ ID NO: 378527 - RNA, 22 nt, Human
uagucaccucuuuaaauguccu

SEQ ID NO: 378528 - RNA, 22 nt, Human
uuccaggacaagauguuucagg

SEQ ID NO: 378529 - RNA, 21 nt, Human
uggcugagccaggugugugga

SEQ ID NO: 378530 - RNA, 22 nt, Human
agaaacugaauuauuucugagg

SEQ ID NO: 378531 - RNA, 22 nt, Human
caucuucagguucauggucaua

SEQ ID NO: 378532 - RNA, 22 nt, Human
gcccagcuuuucacuuccacac

SEQ ID NO: 378533 - RNA, 22 nt, Human
ccauuguaguaucuguuuuagu

SEQ ID NO: 378534 - RNA, 22 nt, Human
acaacaaagacacuugaaauga

SEQ ID NO: 378535 - RNA, 22 nt, Human
uguauagaguuggaagaugacu

SEQ ID NO: 378536 - RNA, 22 nt, Human
ccugggugucaugggcagcugg

SEQ ID NO: 378537 - RNA, 22 nt, Human
aggagggugauccgggcugguc

SEQ ID NO: 378538 - RNA, 22 nt, Human
uccuggugucgccuggucaguu

SEQ ID NO: 378539 - RNA, 22 nt, Human
caggggacauuaaagcuccaua

SEQ ID NO: 378540 - RNA, 22 nt, Human
agguggcucugacagcucuggu

SEQ ID NO: 378541 - RNA, 22 nt, Human
cuccaggagcugugucuuucuu

SEQ ID NO: 378542 - RNA, 22 nt, Human
agcuggggcugcagagaacagg

SEQ ID NO: 378543 - RNA, 22 nt, Human
ugggcagaggcucugaagucca

SEQ ID NO: 378544 - RNA, 18 nt, Human
gaggauggaaggagaugc

SEQ ID NO: 378545 - RNA, 20 nt, Human
ggagaugcagcccaggugcc

SEQ ID NO: 378546 - RNA, 22 nt, Human
aggccuguuccaggccccuuuu

SEQ ID NO: 378547 - RNA, 22 nt, Human
aagcaccugcaguugacaaaaa

SEQ ID NO: 378548 - RNA, 22 nt, Human
gaguccagacaccauaccugau

SEQ ID NO: 378549 - RNA, 22 nt, Human
aagcucauuaauuagaagcuaa

SEQ ID NO: 378550 - RNA, 22 nt, Human
ccuugcguuuuacagcuucuag

SEQ ID NO: 378551 - RNA, 22 nt, Human
ccuggaucagagccagagaagc

SEQ ID NO: 378552 - RNA, 22 nt, Human
ggcauccaguucugaucaacaa

SEQ ID NO: 378553 - RNA, 22 nt, Human
auaauuaauuucaguaaucucc

SEQ ID NO: 378554 - RNA, 22 nt, Human
acagcauugcuccaucucaaga

SEQ ID NO: 378555 - RNA, 22 nt, Human
cugaggccuaagacaugaauga

SEQ ID NO: 378556 - RNA, 22 nt, Human
cagucuucuaaccuagcagccu

SEQ ID NO: 378557 - RNA, 22 nt, Human
uuuccucugcugccauugcccc

SEQ ID NO: 378558 - RNA, 20 nt, Human
gccugccucagcuagcugag

SEQ ID NO: 378559 - RNA, 22 nt, Human
ugaaccaggaggcagccagcac

SEQ ID NO: 378560 - RNA, 22 nt, Human
gggcuucucuuaugcuaacugg

SEQ ID NO: 378561 - RNA, 22 nt, Human
ucuggcucaucucuccagguaa

SEQ ID NO: 378562 - RNA, 22 nt, Human
ccucccacauccuagcucugcu

SEQ ID NO: 378563 - RNA, 22 nt, Human
agucugcacucagguggagguc

SEQ ID NO: 378564 - RNA, 21 nt, Human
ggccucugccuugccccacuc

SEQ ID NO: 378565 - RNA, 22 nt, Human
uggagggcucuuucaccuggua

SEQ ID NO: 378566 - RNA, 19 nt, Human
ugggaguggggaagguccu

SEQ ID NO: 378567 - RNA, 22 nt, Human
uacuguuuucuauaauggcugu

SEQ ID NO: 378568 - RNA, 22 nt, Human
ggccagcagucacagggucaga

SEQ ID NO: 378569 - RNA, 21 nt, Human
ggagggcagcccagacuggcu

SEQ ID NO: 378570 - RNA, 22 nt, Human
gcagcaggagaguuuguccugc

SEQ ID NO: 378571 - RNA, 21 nt, Human
agaaauguaucauucuuuucc

SEQ ID NO: 378572 - RNA, 22 nt, Human
acugugcacaauucuaaguccu

SEQ ID NO: 378573 - RNA, 21 nt, Human
cucuggaggcaagggagagug

SEQ ID NO: 378574 - RNA, 19 nt, Human
cuggccaggccaggggccc

SEQ ID NO: 378575 - RNA, 22 nt, Human
auuuucaucgcuagguuggccu

SEQ ID NO: 378576 - RNA, 22 nt, Human
ggcucugccugcccagcagcac

SEQ ID NO: 378577 - RNA, 22 nt, Human
aguaaacauuucagauuuauuu

SEQ ID NO: 378578 - RNA, 22 nt, Human
aagagcugcccaaggugaacag

SEQ ID NO: 378579 - RNA, 22 nt, Human
ucccagggugcgccugcccucg

SEQ ID NO: 378580 - RNA, 21 nt, Human
uggcagagugcagucuauaca

SEQ ID NO: 378581 - RNA, 22 nt, Human
auggauaagaacaaauaucuga

SEQ ID NO: 378582 - RNA, 19 nt, Human
uugguggugguuuugguuc

SEQ ID NO: 378583 - RNA, 22 nt, Human
auaucuuuguuuuugccaagau

SEQ ID NO: 378584 - RNA, 17 nt, Human
aggaaacauuuucuuuc

SEQ ID NO: 378585 - RNA, 22 nt, Human
ugucuuuauauauuuggaaaau

SEQ ID NO: 378586 - RNA, 22 nt, Human
uuccuauuuccaugaaacacaa

SEQ ID NO: 378587 - RNA, 22 nt, Human
ugaaaagacugcaagagagcau

SEQ ID NO: 378588 - RNA, 22 nt, Human
auuuaagacugacuucaccagu

SEQ ID NO: 378589 - RNA, 22 nt, Human
uagagcauuuagaggggcagga

SEQ ID NO: 378590 - RNA, 22 nt, Human
cuuaggcagacugcugaugcag

SEQ ID NO: 378591 - RNA, 22 nt, Human
agucccuucucaaagugugcgg

SEQ ID NO: 378592 - RNA, 22 nt, Human
caggcagcucaaccuugggagc

SEQ ID NO: 378593 - RNA, 22 nt, Human
gauuuauuggucuuucauuggu

SEQ ID NO: 378594 - RNA, 22 nt, Human
gaaaggccauuucugaggguuu

SEQ ID NO: 378595 - RNA, 22 nt, Human
gaugggauuuuuuauguguuca

SEQ ID NO: 378596 - RNA, 22 nt, Human
acauaaguuauggauaaaaugu

SEQ ID NO: 378597 - RNA, 22 nt, Human
uugaucaucuaagaguaauagu

SEQ ID NO: 378598 - RNA, 22 nt, Human
uucugugauugacauguggcuu

SEQ ID NO: 378599 - RNA, 22 nt, Human
cugagaggcggagcuugcagug

SEQ ID NO: 378600 - RNA, 22 nt, Human
auuuaguuuaggaaaaguaggu

SEQ ID NO: 378601 - RNA, 22 nt, Human
caacuuugugugaccuagauag

SEQ ID NO: 378602 - RNA, 22 nt, Human
uuucaugugcaauuagcaauau

SEQ ID NO: 378603 - RNA, 22 nt, Human
gagaggugaaggcugcccuggg

SEQ ID NO: 378604 - RNA, 22 nt, Human
ccucaggguggcaucagaucuu

SEQ ID NO: 378605 - RNA, 22 nt, Human
cagggguggcugcagcagaggu

SEQ ID NO: 378606 - RNA, 22 nt, Human
guggccagaagacugcaaugcu

SEQ ID NO: 378607 - RNA, 22 nt, Human
guuugaaugcaguaugcauuuu

SEQ ID NO: 378608 - RNA, 22 nt, Human
gaagccacccuccuuccagccc

SEQ ID NO: 378609 - RNA, 22 nt, Human
ucccagcagcauagcucagaau

SEQ ID NO: 378610 - RNA, 22 nt, Human
cugaaggagcauagucaguuuu

SEQ ID NO: 378611 - RNA, 21 nt, Human
aagccagcccacagugguuug

SEQ ID NO: 378612 - RNA, 22 nt, Human
gcagccugaugaucuggguugu

SEQ ID NO: 378613 - RNA, 22 nt, Human
ugcuuuauucagucucugccau

SEQ ID NO: 378614 - RNA, 22 nt, Human
uucaacuuuggagauuuaauaa

SEQ ID NO: 378615 - RNA, 18 nt, Human
auuuugaacaaugcugua

SEQ ID NO: 378616 - RNA, 22 nt, Human
ggcugcuuuaucggcugcugaa

SEQ ID NO: 378617 - RNA, 22 nt, Human
uucauguaauuccauaagguaa

SEQ ID NO: 378618 - RNA, 22 nt, Human
cauaacuagagugaaauguuga

SEQ ID NO: 378619 - RNA, 22 nt, Human
caggaugggugucggccagcac

SEQ ID NO: 378620 - RNA, 22 nt, Human
agggccaggaucacagccaaga

SEQ ID NO: 378621 - RNA, 22 nt, Human
acucucucacagcuuggcugau

SEQ ID NO: 378622 - RNA, 22 nt, Human
gaaggaaaggucucaugccuuu

SEQ ID NO: 378623 - RNA, 22 nt, Human
ccaggugcucuugccagggcug

SEQ ID NO: 378624 - RNA, 20 nt, Human
ccagcuuucccugcagcauc

SEQ ID NO: 378625 - RNA, 22 nt, Human
gcugaggcuccucgggaggaca

SEQ ID NO: 378626 - RNA, 22 nt, Human
ggcuuuauuaagcaggguaagu

SEQ ID NO: 378627 - RNA, 21 nt, Human
gauuuauaagccuuaagccua

SEQ ID NO: 378628 - RNA, 22 nt, Human
uuaguuagucccugguaccuuu

SEQ ID NO: 378629 - RNA, 22 nt, Human
ucugaacauccagcaaugcaca

SEQ ID NO: 378630 - RNA, 22 nt, Human
ccucaggaaccacauugcugcu

SEQ ID NO: 378631 - RNA, 22 nt, Human
gggccacacagaaccuccuggu

SEQ ID NO: 378632 - RNA, 22 nt, Human
gaggaaugucagcacaggccuc

SEQ ID NO: 378633 - RNA, 22 nt, Human
aguaaacauuuucauauuuucu

SEQ ID NO: 378634 - RNA, 23 nt, Human
uuucuucagaagccuugcgaggc

SEQ ID NO: 378635 - RNA, 22 nt, Human
caaaagucuguccuuuaacuuc

SEQ ID NO: 378636 - RNA, 22 nt, Human
cccuccagccauggacccaggu

SEQ ID NO: 378637 - RNA, 22 nt, Human
ucccacugcuuugcucugcuca

SEQ ID NO: 378638 - RNA, 22 nt, Human
uccauuuuagaagaaaauccac

SEQ ID NO: 378639 - RNA, 22 nt, Human
gagucacaaaagaugcccaggg

SEQ ID NO: 378640 - RNA, 22 nt, Human
ugucaccucuuuggcugcagcu

SEQ ID NO: 378641 - RNA, 22 nt, Human
auccagcuuugucuggucuucg

SEQ ID NO: 378642 - RNA, 22 nt, Human
acuuauuagcugugugaccuug

SEQ ID NO: 378643 - RNA, 22 nt, Human
ugccaaauugcccuauaaauga

SEQ ID NO: 378644 - RNA, 22 nt, Human
aaucagaaccuugggucauaac

SEQ ID NO: 378645 - RNA, 22 nt, Human
uaauuuaugaugcaaagaaaag

SEQ ID NO: 378646 - RNA, 22 nt, Human
ucagcugccccaguggccccag

SEQ ID NO: 378647 - RNA, 22 nt, Human
agguaaagacugcaaggagaau

SEQ ID NO: 378648 - RNA, 22 nt, Human
uaaggcacacaguugcugcaug

SEQ ID NO: 378649 - RNA, 22 nt, Human
uuugaaaguguuuacuugggaa

SEQ ID NO: 378650 - RNA, 22 nt, Human
ucagagguaagggcugagagga

SEQ ID NO: 378651 - RNA, 19 nt, Human
gaggaggaaaacuagugua

SEQ ID NO: 378652 - RNA, 20 nt, Human
ggcagagcuaugucuguugc

SEQ ID NO: 378653 - RNA, 22 nt, Human
uccuucaguucaauuaguccgu

SEQ ID NO: 378654 - RNA, 22 nt, Human
aagaacuuccuaauauauuuuc

SEQ ID NO: 378655 - RNA, 22 nt, Human
aaguuugacagaaguuucuaau

SEQ ID NO: 378656 - RNA, 22 nt, Human
gaggcagcucuucugaaugggg

SEQ ID NO: 378657 - RNA, 22 nt, Human
agcagagucugugugcacuuua

SEQ ID NO: 378658 - RNA, 22 nt, Human
ggcagcaguccauggcccaagg

SEQ ID NO: 378659 - RNA, 17 nt, Human
gggcagggacuccuggg

SEQ ID NO: 378660 - RNA, 21 nt, Human
gcugccaccgcgugcuccagg

SEQ ID NO: 378661 - RNA, 22 nt, Human
uaugcauaugaccccaagcuug

SEQ ID NO: 378662 - RNA, 22 nt, Human
agaugguguuuccccaggugga

SEQ ID NO: 378663 - RNA, 19 nt, Human
ggaugagggucaggcauag

SEQ ID NO: 378664 - RNA, 22 nt, Human
cugguccuccuugccuucagau

SEQ ID NO: 378665 - RNA, 22 nt, Human
ucagugucuugggcuugaaugc

SEQ ID NO: 378666 - RNA, 22 nt, Human
uauuucagacacugaucuugca

SEQ ID NO: 378667 - RNA, 22 nt, Human
ucagggcacaggccuguggguu

SEQ ID NO: 378668 - RNA, 19 nt, Human
cuccucagucccagagguc

SEQ ID NO: 378669 - RNA, 22 nt, Human
uuucacacuagucagaauacca

SEQ ID NO: 378670 - RNA, 22 nt, Human
uuaugcuaguauaguccuuaga

SEQ ID NO: 378671 - RNA, 22 nt, Human
auguuacagaaagcaaagauga

SEQ ID NO: 378672 - RNA, 22 nt, Human
agcuuuaugggagcuuagauaa

SEQ ID NO: 378673 - RNA, 22 nt, Human
auacaagacucagcacagacgg

SEQ ID NO: 378674 - RNA, 22 nt, Human
cccucagcuccacccucagcag

SEQ ID NO: 378675 - RNA, 22 nt, Human
uagagugguuaacaguuuagaa

SEQ ID NO: 378676 - RNA, 20 nt, Human
cugcucugcuuugcaggugg

SEQ ID NO: 378677 - RNA, 22 nt, Human
gaggcccuccagcugucagcug

SEQ ID NO: 378678 - RNA, 22 nt, Human
ccacagggccuuuccugcuggc

SEQ ID NO: 378679 - RNA, 22 nt, Human
ucuaaagccuuccauauaacgc

SEQ ID NO: 378680 - RNA, 22 nt, Human
agaaaacauuacauaggugugu

SEQ ID NO: 378681 - RNA, 22 nt, Human
uuucaaagaccauuaacuauca

SEQ ID NO: 378682 - RNA, 22 nt, Human
auguaucaugcaggguccauga

SEQ ID NO: 378683 - RNA, 22 nt, Human
uggccucucuaccaggcagccu

SEQ ID NO: 378684 - RNA, 22 nt, Human
guuugauucaagaacaaagagu

SEQ ID NO: 378685 - RNA, 22 nt, Human
agccuccuguagcccucaccca

SEQ ID NO: 378686 - RNA, 22 nt, Human
aaaugaccagaauacaggcuuc

SEQ ID NO: 378687 - RNA, 22 nt, Human
gagagaagaauguuccgaggcc

SEQ ID NO: 378688 - RNA, 22 nt, Human
aauuccagcuaggaaaagcuuc

SEQ ID NO: 378689 - RNA, 22 nt, Human
acugccauuggucaaaugagug

SEQ ID NO: 378690 - RNA, 22 nt, Human
uagcaucuggagaaacaagucc

SEQ ID NO: 378691 - RNA, 22 nt, Human
uuuuucagccaugaauuacacu

SEQ ID NO: 378692 - RNA, 22 nt, Human
uggccugggccugccggugcaa

SEQ ID NO: 378693 - RNA, 23 nt, Human
agacagaggcugaggcuggccgc

SEQ ID NO: 378694 - RNA, 22 nt, Human
uuccucagaaaauacuguccaa

SEQ ID NO: 378695 - RNA, 22 nt, Human
ucagaauuuuuguuacccuuga

SEQ ID NO: 378696 - RNA, 22 nt, Human
ucccuggacagccuugccuggg

SEQ ID NO: 378697 - RNA, 21 nt, Human
gcugugcacauaguagaagug

SEQ ID NO: 378698 - RNA, 20 nt, Human
ugccagggccagcagaggcu

SEQ ID NO: 378699 - RNA, 22 nt, Human
agcagggcuugccgcuuguccu

SEQ ID NO: 378700 - RNA, 22 nt, Human
agggcugaguggugcagucaaa

SEQ ID NO: 378701 - RNA, 22 nt, Human
ccugggaggcggagguugcagu

SEQ ID NO: 378702 - RNA, 22 nt, Human
cccaggaggcggagguuguggu

SEQ ID NO: 378703 - RNA, 22 nt, Human
ugaagcaguucucagaaguggg

SEQ ID NO: 378704 - RNA, 22 nt, Human
cugugcuuaccugcccagguga

SEQ ID NO: 378705 - RNA, 22 nt, Human
ugucugucugcaagccagaaag

SEQ ID NO: 378706 - RNA, 19 nt, Human
augagcuggcauuucaggu

SEQ ID NO: 378707 - RNA, 22 nt, Human
ccaggaaauagugcugugaucu

SEQ ID NO: 378708 - RNA, 22 nt, Human
ccugacgaaaggcgugcuggag

SEQ ID NO: 378709 - RNA, 22 nt, Human
ggcuguggcauuaggugaggcc

SEQ ID NO: 378710 - RNA, 22 nt, Human
ugcaguggaaucuggagagcag

SEQ ID NO: 378711 - RNA, 22 nt, Human
uaccaaaagcuuguuucauaca

SEQ ID NO: 378712 - RNA, 22 nt, Human
cucccuggcacagcgagagguu

SEQ ID NO: 378713 - RNA, 21 nt, Human
gagcugggcgaggcuccgggg

SEQ ID NO: 378714 - RNA, 22 nt, Human
uugcaggaaacugagugugagc

SEQ ID NO: 378715 - RNA, 19 nt, Human
uguguguuuauauauguau

SEQ ID NO: 378716 - RNA, 22 nt, Human
uccugccuuagagcaaggaaaa

SEQ ID NO: 378717 - RNA, 22 nt, Human
ccugggcuuucaaaaccagccu

SEQ ID NO: 378718 - RNA, 20 nt, Human
uuccaacucacaucucuaca

SEQ ID NO: 378719 - RNA, 22 nt, Human
ugaggggauacgguacacauug

SEQ ID NO: 378720 - RNA, 22 nt, Human
uaagaacauuuucggaaagaua

SEQ ID NO: 378721 - RNA, 22 nt, Human
ugucccauggacacaacuucuu

SEQ ID NO: 378722 - RNA, 22 nt, Human
acaugauuaaaagauuuuaaag

SEQ ID NO: 378723 - RNA, 22 nt, Human
gaagcagcucagauugacugaa

SEQ ID NO: 378724 - RNA, 22 nt, Human
cagaggaggccaccgcauaggc

SEQ ID NO: 378725 - RNA, 22 nt, Human
ucaucacucauuggacaacaga

SEQ ID NO: 378726 - RNA, 22 nt, Human
agcugccaaguuucucaguuua

SEQ ID NO: 378727 - RNA, 22 nt, Human
cuguccuguagcuccaucaguc

SEQ ID NO: 378728 - RNA, 22 nt, Human
agggagcuucuggccucagccu

SEQ ID NO: 378729 - RNA, 22 nt, Human
caaugugguggcagaugucagu

SEQ ID NO: 378730 - RNA, 22 nt, Human
cagcugcccauccugggaaaug

SEQ ID NO: 378731 - RNA, 22 nt, Human
ucccagauuguugauggcuuaa

SEQ ID NO: 378732 - RNA, 22 nt, Human
uucuccucuguuggccuucccu

SEQ ID NO: 378733 - RNA, 22 nt, Human
gagguggucgaggagggguacc

SEQ ID NO: 378734 - RNA, 19 nt, Human
aauuagggagucgguuaag

SEQ ID NO: 378735 - RNA, 22 nt, Human
gccagagcaugcacugccugca

SEQ ID NO: 378736 - RNA, 17 nt, Human
aagagaggcugagcugg

SEQ ID NO: 378737 - RNA, 22 nt, Human
ugcagggaauccagucuagggu

SEQ ID NO: 378738 - RNA, 22 nt, Human
aaggcugaguaaaacagagaac

SEQ ID NO: 378739 - RNA, 22 nt, Human
ccugucaguugcugucagggau

SEQ ID NO: 378740 - RNA, 22 nt, Human
ggcucuggcguccaauggagcg

SEQ ID NO: 378741 - RNA, 20 nt, Human
agacaaaaugacuucaugca

SEQ ID NO: 378742 - RNA, 22 nt, Human
aucuggcuugacuuugcgacuu

SEQ ID NO: 378743 - RNA, 20 nt, Human
cauauauaccuagaagugga

SEQ ID NO: 378744 - RNA, 22 nt, Human
cacccagccuucacacaggagu

SEQ ID NO: 378745 - RNA, 22 nt, Human
ucaaaggcuugugguucuggga

SEQ ID NO: 378746 - RNA, 20 nt, Human
ggccuuggguuucgccuguu

SEQ ID NO: 378747 - RNA, 22 nt, Human
agagggcagucucagauuggga

SEQ ID NO: 378748 - RNA, 22 nt, Human
gcagagccugacgggauuuuuc

SEQ ID NO: 378749 - RNA, 22 nt, Human
caagagcucaccggagagcauu

SEQ ID NO: 378750 - RNA, 22 nt, Human
uggcugagguaacuaugaauaa

SEQ ID NO: 378751 - RNA, 22 nt, Human
cugcccugacugaccuuuugaa

SEQ ID NO: 378752 - RNA, 22 nt, Human
agaaaucauucccaaacccaua

SEQ ID NO: 378753 - RNA, 22 nt, Human
uauauuaaaugaccaguuuuaa

SEQ ID NO: 378754 - RNA, 22 nt, Human
uguuauugagguuacuuauaag

SEQ ID NO: 378755 - RNA, 22 nt, Human
agcuccugcacccagccuugag

SEQ ID NO: 378756 - RNA, 22 nt, Human
guggccugaugccagcccugug

SEQ ID NO: 378757 - RNA, 22 nt, Human
aggcucagucccggcccgcgcc

SEQ ID NO: 378758 - RNA, 22 nt, Human
ccagagccucaacacagguccu

SEQ ID NO: 378759 - RNA, 22 nt, Human
aggagcugcuuaaaugguuggu

SEQ ID NO: 378760 - RNA, 22 nt, Human
aagccucuggggccucaucugu

SEQ ID NO: 378761 - RNA, 22 nt, Human
ugccaggcauguaguagacuug

SEQ ID NO: 378762 - RNA, 22 nt, Human
uccagaaacuuuuccagucuca

SEQ ID NO: 378763 - RNA, 23 nt, Human
cuccccaguguccucaugcaucu

SEQ ID NO: 378764 - RNA, 22 nt, Human
agaggccuccgaaaggugggcu

SEQ ID NO: 378765 - RNA, 22 nt, Human
cugggaggauacacaagaucag

SEQ ID NO: 378766 - RNA, 20 nt, Human
ugcagaagaacguucugguu

SEQ ID NO: 378767 - RNA, 22 nt, Human
gcacugaaugcuuuuacuguaa

SEQ ID NO: 378768 - RNA, 21 nt, Human
uguguaaaguugaaauccugu

SEQ ID NO: 378769 - RNA, 22 nt, Human
gaauuaguguugaaaucagggc

SEQ ID NO: 378770 - RNA, 22 nt, Human
cagcuggcugcaugaugccaaa

SEQ ID NO: 378771 - RNA, 22 nt, Human
gaggccuggcugucagucccca

SEQ ID NO: 378772 - RNA, 22 nt, Human
uaagaacauaaauucauacggg

SEQ ID NO: 378773 - RNA, 22 nt, Human
gugucccaaucuacuuuucccu

SEQ ID NO: 378774 - RNA, 22 nt, Human
cagggccagccauccugcuggg

SEQ ID NO: 378775 - RNA, 22 nt, Human
ucuuuaauucagcaugaugcgg

SEQ ID NO: 378776 - RNA, 22 nt, Human
cccaggcugauguucagcgggu

SEQ ID NO: 378777 - RNA, 22 nt, Human
uggcagaguggaccauacucaa

SEQ ID NO: 378778 - RNA, 22 nt, Human
cugaggaagacagcagcugugu

SEQ ID NO: 378779 - RNA, 22 nt, Human
uccuggccucacaguccugggu

SEQ ID NO: 378780 - RNA, 22 nt, Human
cagcagcucccauccgcugagc

SEQ ID NO: 378781 - RNA, 22 nt, Human
aaugguuugauggacaaaauga

SEQ ID NO: 378782 - RNA, 22 nt, Human
cagggaguuuuuguuccucuag

SEQ ID NO: 378783 - RNA, 22 nt, Human
caauguaucaaccagaaaguuc

SEQ ID NO: 378784 - RNA, 17 nt, Human
uggacccuugggccucc

SEQ ID NO: 378785 - RNA, 22 nt, Human
accagggcccgggagagcucuc

SEQ ID NO: 378786 - RNA, 23 nt, Human
gugugccaagcacugugccagga

SEQ ID NO: 378787 - RNA, 22 nt, Human
ggccuucacgugaccuggcgug

SEQ ID NO: 378788 - RNA, 22 nt, Human
agaggcagcagucauacuacag

SEQ ID NO: 378789 - RNA, 22 nt, Human
cugccaggcgauggauuggcug

SEQ ID NO: 378790 - RNA, 22 nt, Human
caguguggagggagagagccug

SEQ ID NO: 378791 - RNA, 22 nt, Human
ugcaccauuaauuuaugugaga

SEQ ID NO: 378792 - RNA, 22 nt, Human
cagggccaguucucgcagcagu

SEQ ID NO: 378793 - RNA, 22 nt, Human
acuucuggugucauacugcauu

SEQ ID NO: 378794 - RNA, 23 nt, Human
ucuaauacaugaaaccuagaugu

SEQ ID NO: 378795 - RNA, 20 nt, Human
uggaccugucucuuuaggga

SEQ ID NO: 378796 - RNA, 22 nt, Human
agcuggugcugaagcucuugag

SEQ ID NO: 378797 - RNA, 22 nt, Human
cucucuucccgugaguguugca

SEQ ID NO: 378798 - RNA, 22 nt, Human
acucaguacaucuggaguuggc

SEQ ID NO: 378799 - RNA, 22 nt, Human
agccaggcagggcucucgcucu

SEQ ID NO: 378800 - RNA, 22 nt, Human
gcagaggcuccauuuuacagau

SEQ ID NO: 378801 - RNA, 22 nt, Human
cagcacagggacaauagcagau

SEQ ID NO: 378802 - RNA, 22 nt, Human
ucagaggaggcauuuaaacaga

SEQ ID NO: 378803 - RNA, 22 nt, Human
uggaaguggcagaaaaugaaca

SEQ ID NO: 378804 - RNA, 22 nt, Human
uucuccccugacccugaugagg

SEQ ID NO: 378805 - RNA, 20 nt, Human
gucucaaguaucucacaguc

SEQ ID NO: 378806 - RNA, 22 nt, Human
uaagcauucaaugcuuagcacu

SEQ ID NO: 378807 - RNA, 22 nt, Human
gggcacagaagucuaagacauc

SEQ ID NO: 378808 - RNA, 22 nt, Human
caggcagccugagggaucuggg

SEQ ID NO: 378809 - RNA, 22 nt, Human
ugggccacaagccaugggacca

SEQ ID NO: 378810 - RNA, 22 nt, Human
uuuaauauuucuuuccugaagc

SEQ ID NO: 378811 - RNA, 22 nt, Human
gcugagagaaaagugagguucu

SEQ ID NO: 378812 - RNA, 22 nt, Human
aucuggcucccuuggaauccgu

SEQ ID NO: 378813 - RNA, 22 nt, Human
ucucaggaagugauauugagac

SEQ ID NO: 378814 - RNA, 22 nt, Human
aggcucagagaugaguaagcac

SEQ ID NO: 378815 - RNA, 22 nt, Human
uucauucuuugaaucugaggua

SEQ ID NO: 378816 - RNA, 19 nt, Human
ugaggccaaggucacagau

SEQ ID NO: 378817 - RNA, 22 nt, Human
aggaggggcaaugauagucugg

SEQ ID NO: 378818 - RNA, 23 nt, Human
uaagaacagacaagcauuuacau

SEQ ID NO: 378819 - RNA, 22 nt, Human
cucagggccaaggaugcuguug

SEQ ID NO: 378820 - RNA, 22 nt, Human
agggaucaaaaaauguacaugc

SEQ ID NO: 378821 - RNA, 22 nt, Human
uccagccaagggagguuacuag

SEQ ID NO: 378822 - RNA, 22 nt, Human
ugggauaguggccaggaccccc

SEQ ID NO: 378823 - RNA, 22 nt, Human
acaugcaugucuaugggcaggu

SEQ ID NO: 378824 - RNA, 22 nt, Human
ugagccuggguggucgaggcug

SEQ ID NO: 378825 - RNA, 23 nt, Human
ccagcucccaggucugaggacug

SEQ ID NO: 378826 - RNA, 22 nt, Human
acccagcuguuucccgugucau

SEQ ID NO: 378827 - RNA, 22 nt, Human
ccaggacuuauuacaguauaac

SEQ ID NO: 378828 - RNA, 22 nt, Human
agcagcagaagggagacccagg

SEQ ID NO: 378829 - RNA, 22 nt, Human
gagcuggaagucuguggucaga

SEQ ID NO: 378830 - RNA, 22 nt, Human
cugagaggcacaaggcauuucg

SEQ ID NO: 378831 - RNA, 22 nt, Human
uguccuuacaaggucccuuucg

SEQ ID NO: 378832 - RNA, 22 nt, Human
uucuucuuucccccugugguac

SEQ ID NO: 378833 - RNA, 22 nt, Human
cgcagggccgcgagcgggacca

SEQ ID NO: 378834 - RNA, 22 nt, Human
agugugggugagggaggcccuc

SEQ ID NO: 378835 - RNA, 22 nt, Human
ggcaggcugggugucauggagu

SEQ ID NO: 378836 - RNA, 22 nt, Human
ccagcauggcaccugagaugag

SEQ ID NO: 378837 - RNA, 22 nt, Human
agggcagcucucaccucuggcc

SEQ ID NO: 378838 - RNA, 22 nt, Human
aauuuacacuucauuuggaggg

SEQ ID NO: 378839 - RNA, 22 nt, Human
uggggcucaccuaggcuggaag

SEQ ID NO: 378840 - RNA, 22 nt, Human
caauuucuuguuaauucucagg

SEQ ID NO: 378841 - RNA, 22 nt, Human
accugggagucacaccugagaa

SEQ ID NO: 378842 - RNA, 22 nt, Human
guaagggauuugaacauagguu

SEQ ID NO: 378843 - RNA, 19 nt, Human
cuggggcuuugguacugcc

SEQ ID NO: 378844 - RNA, 22 nt, Human
cuacccagagugaaucucuuaa

SEQ ID NO: 378845 - RNA, 19 nt, Human
aggaaagguggccuuagca

SEQ ID NO: 378846 - RNA, 22 nt, Human
uccauguguuuuccuguccaca

SEQ ID NO: 378847 - RNA, 21 nt, Human
gcagagccggggcgagaaggc

SEQ ID NO: 378848 - RNA, 22 nt, Human
cacaggaggaggugcccgggcc

SEQ ID NO: 378849 - RNA, 22 nt, Human
ggaagagggaaccacgacugua

SEQ ID NO: 378850 - RNA, 20 nt, Human
caggaugauuggacacgaug

SEQ ID NO: 378851 - RNA, 21 nt, Human
ccuggcagaagccugauaugc

SEQ ID NO: 378852 - RNA, 22 nt, Human
uuucuuaguccuagagugauuu

SEQ ID NO: 378853 - RNA, 22 nt, Human
cauuucaauuauuugcucuucu

SEQ ID NO: 378854 - RNA, 17 nt, Human
agauggcaggaggcaga

SEQ ID NO: 378855 - RNA, 22 nt, Human
gggcacagagggucuugaagaa

SEQ ID NO: 378856 - RNA, 22 nt, Human
ucugucacuuauuaagauggau

SEQ ID NO: 378857 - RNA, 22 nt, Human
aguucacauaucuguuuuauuu

SEQ ID NO: 378858 - RNA, 22 nt, Human
ugcugcacaauuggaaaguauc

SEQ ID NO: 378859 - RNA, 22 nt, Human
ucagcagaggggaaggcaucug

SEQ ID NO: 378860 - RNA, 22 nt, Human
ucuucauuccguagauauuuau

SEQ ID NO: 378861 - RNA, 22 nt, Human
uaguccaguaaaacagcuaacg

SEQ ID NO: 378862 - RNA, 22 nt, Human
ugauuauauucuaacuucauaa

SEQ ID NO: 378863 - RNA, 22 nt, Human
ucaaagcuuagauaauuucuuu

SEQ ID NO: 378864 - RNA, 22 nt, Human
agcaguggcuggauggugugcu

SEQ ID NO: 378865 - RNA, 22 nt, Human
agcucccagucuccucuccaug

SEQ ID NO: 378866 - RNA, 22 nt, Human
ugcuguguggaugugaagaauc

SEQ ID NO: 378867 - RNA, 22 nt, Human
ccaggagcauuaagagaacaua

SEQ ID NO: 378868 - RNA, 18 nt, Human
gguggcaggucagaugcc

SEQ ID NO: 378869 - RNA, 22 nt, Human
ggcucaagcagucugccugccu

SEQ ID NO: 378870 - RNA, 22 nt, Human
uggugcugauaauggcaggauu

SEQ ID NO: 378871 - RNA, 22 nt, Human
gaaggccauugcguccugggau

SEQ ID NO: 378872 - RNA, 17 nt, Human
uuccccugaccaagccu

SEQ ID NO: 378873 - RNA, 22 nt, Human
cacagguggcuccaaguuagag

SEQ ID NO: 378874 - RNA, 22 nt, Human
aaaugguaagacaacacauuau

SEQ ID NO: 378875 - RNA, 22 nt, Human
cccugccuugggguccacaccg

SEQ ID NO: 378876 - RNA, 22 nt, Human
aucaggaaugaauacuuuugga

SEQ ID NO: 378877 - RNA, 22 nt, Human
ucuacccagagcuaugaccuga

SEQ ID NO: 378878 - RNA, 21 nt, Human
gugcucugggcagcagagggc

SEQ ID NO: 378879 - RNA, 22 nt, Human
cugggcugcaucaaagaggcau

SEQ ID NO: 378880 - RNA, 22 nt, Human
gcagauggugggggaggaguac

SEQ ID NO: 378881 - RNA, 22 nt, Human
uggccugccuucgcugagcuga

SEQ ID NO: 378882 - RNA, 22 nt, Human
aaugccaacuuggauauacauu

SEQ ID NO: 378883 - RNA, 22 nt, Human
ccuguucacccuccaugcacag

SEQ ID NO: 378884 - RNA, 22 nt, Human
uggaccugggguggccuccucu

SEQ ID NO: 378885 - RNA, 21 nt, Human
auggagccuaagaguggaggu

SEQ ID NO: 378886 - RNA, 22 nt, Human
cagcuuugccaaguaaggucuu

SEQ ID NO: 378887 - RNA, 18 nt, Human
auagaaaccuuuaaucag

SEQ ID NO: 378888 - RNA, 22 nt, Human
gcacugaaaauguuggauucca

SEQ ID NO: 378889 - RNA, 22 nt, Human
uauauuaacacccacuugccuc

SEQ ID NO: 378890 - RNA, 22 nt, Human
aauuuauauguaauuaggcaca

SEQ ID NO: 378891 - RNA, 22 nt, Human
accaggagcauuuuuuauuagu

SEQ ID NO: 378892 - RNA, 22 nt, Human
acagggcauuuccucuaugugu

SEQ ID NO: 378893 - RNA, 22 nt, Human
gggugggccugucuggccaugu

SEQ ID NO: 378894 - RNA, 22 nt, Human
uccaggcuggaaaugucaaacu

SEQ ID NO: 378895 - RNA, 22 nt, Human
uagugcuuaauaaauuucagaa

SEQ ID NO: 378896 - RNA, 22 nt, Human
ugcauaaacagauacuucaugu

SEQ ID NO: 378897 - RNA, 22 nt, Human
aaagcagguugcaauuacagug

SEQ ID NO: 378898 - RNA, 22 nt, Human
gaguccuuggcaucaucaguac

SEQ ID NO: 378899 - RNA, 22 nt, Human
ucccaggugaugcugaggccac

SEQ ID NO: 378900 - RNA, 22 nt, Human
cucagggggaaucaggucacag

SEQ ID NO: 378901 - RNA, 22 nt, Human
cugggcacaaguggcccuggau

SEQ ID NO: 378902 - RNA, 22 nt, Human
gaggagcuugaggcuaggagcc

SEQ ID NO: 378903 - RNA, 22 nt, Human
gucagcaccucuuuggggagcu

SEQ ID NO: 378904 - RNA, 22 nt, Human
aggcagaugguaacugugauau

SEQ ID NO: 378905 - RNA, 22 nt, Human
uccugcaggggcugaggaacca

SEQ ID NO: 378906 - RNA, 22 nt, Human
ggagugggcagcacugcccugu

SEQ ID NO: 378907 - RNA, 22 nt, Human
aggucacauggauaaugaucag

SEQ ID NO: 378908 - RNA, 22 nt, Human
ucaucacuguaucauugauaga

SEQ ID NO: 378909 - RNA, 22 nt, Human
ccaggguggcguagaugcuggg

SEQ ID NO: 378910 - RNA, 17 nt, Human
uccuggcucugccacug

SEQ ID NO: 378911 - RNA, 22 nt, Human
gggagaagaaugugucaauugu

SEQ ID NO: 378912 - RNA, 22 nt, Human
uacagaaaucacaucgcuuuga

SEQ ID NO: 378913 - RNA, 22 nt, Human
cagcugccacaggacuuucuga

SEQ ID NO: 378914 - RNA, 22 nt, Human
ggccugcuccgggggcugagcu

SEQ ID NO: 378915 - RNA, 22 nt, Human
aucugacuucacgcccaugcca

SEQ ID NO: 378916 - RNA, 22 nt, Human
cuccucuuuggggauuuacaca

SEQ ID NO: 378917 - RNA, 22 nt, Human
cucugaccauucccuugauuuu

SEQ ID NO: 378918 - RNA, 22 nt, Human
caccaucagcagcaggugucaa

SEQ ID NO: 378919 - RNA, 22 nt, Human
uucccucucacuuaaagcuugg

SEQ ID NO: 378920 - RNA, 22 nt, Human
cagugcagucaaggaagaacca

SEQ ID NO: 378921 - RNA, 20 nt, Human
uaggcagagcugugcagccu

SEQ ID NO: 378922 - RNA, 22 nt, Human
aggcuucugugagcucauacaa

SEQ ID NO: 378923 - RNA, 22 nt, Human
gaaugcacacgugugugcaugc

SEQ ID NO: 378924 - RNA, 22 nt, Human
ccauaagguuuggggccaugca

SEQ ID NO: 378925 - RNA, 22 nt, Human
gccaguuccuguggagucagag

SEQ ID NO: 378926 - RNA, 22 nt, Human
uaaauaugcauguauccuuauc

SEQ ID NO: 378927 - RNA, 22 nt, Human
auuauguagcuaaaaauugugu

SEQ ID NO: 378928 - RNA, 22 nt, Human
uagaucugauacaauucaucug

SEQ ID NO: 378929 - RNA, 21 nt, Human
aacauuucaggauccaaauug

SEQ ID NO: 378930 - RNA, 22 nt, Human
cagcaggauuggauacaucuca

SEQ ID NO: 378931 - RNA, 22 nt, Human
uucucuggaacugaaacaagau

SEQ ID NO: 378932 - RNA, 22 nt, Human
ucauugcaggcauuccccugcc

SEQ ID NO: 378933 - RNA, 22 nt, Human
aggggcagccucacaauccucu

SEQ ID NO: 378934 - RNA, 22 nt, Human
uggguagaggaauugggcuacc

SEQ ID NO: 378935 - RNA, 22 nt, Human
ggagugacucacagcugggaca

SEQ ID NO: 378936 - RNA, 22 nt, Human
cucccuggaggugagcuggcac

SEQ ID NO: 378937 - RNA, 21 nt, Human
agaagucaauugaacugaaau

SEQ ID NO: 378938 - RNA, 22 nt, Human
agaaggggagaagcuaccagga

SEQ ID NO: 378939 - RNA, 22 nt, Human
auuauuuuaugugcggccugau

SEQ ID NO: 378940 - RNA, 22 nt, Human
uuugacauuauccuguuacugg

SEQ ID NO: 378941 - RNA, 22 nt, Human
uauaauccugcuucacauugaa

SEQ ID NO: 378942 - RNA, 22 nt, Human
ccuuaaaagaacuaucucuucu

SEQ ID NO: 378943 - RNA, 22 nt, Human
aguaaaauuucugcugaggaga

SEQ ID NO: 378944 - RNA, 22 nt, Human
cacuggggaaaacaggcuucuu

SEQ ID NO: 378945 - RNA, 22 nt, Human
agggcugcugcuccgggcccag

SEQ ID NO: 378946 - RNA, 23 nt, Human
gggcaguuauguuguccuuggcu

SEQ ID NO: 378947 - RNA, 22 nt, Human
ggagcagccgcgucucagggca

SEQ ID NO: 378948 - RNA, 22 nt, Human
uagggaggcuacuucuuguagg

SEQ ID NO: 378949 - RNA, 22 nt, Human
augggggccugaacaggcaaaa

SEQ ID NO: 378950 - RNA, 22 nt, Human
cuauugaauagcccaaaucauu

SEQ ID NO: 378951 - RNA, 22 nt, Human
acaguggaauuuguagaugugu

SEQ ID NO: 378952 - RNA, 22 nt, Human
agggaagcuuguuacugagaag

SEQ ID NO: 378953 - RNA, 22 nt, Human
ccagagaguaucauggagagua

SEQ ID NO: 378954 - RNA, 22 nt, Human
aaagccaaaugaaagaugguuc

SEQ ID NO: 378955 - RNA, 22 nt, Human
aaagaaucagaagucucaaaca

SEQ ID NO: 378956 - RNA, 22 nt, Human
gcuggccugggcagaggcuaug

SEQ ID NO: 378957 - RNA, 22 nt, Human
auccacagucuuagccaucaaa

SEQ ID NO: 378958 - RNA, 23 nt, Human
auuuccuacuauaaaagagguaa

SEQ ID NO: 378959 - RNA, 22 nt, Human
cucucugguacauagaguuugg

SEQ ID NO: 378960 - RNA, 22 nt, Human
agagaugaaaaguggagacugg

SEQ ID NO: 378961 - RNA, 22 nt, Human
ccucagggucugaggagaccgu

SEQ ID NO: 378962 - RNA, 22 nt, Human
ggcacugagcugccuuggggca

SEQ ID NO: 378963 - RNA, 20 nt, Human
cugcugugguccuuuauuuu

SEQ ID NO: 378964 - RNA, 22 nt, Human
cagcagaggcacgucugugaau

SEQ ID NO: 378965 - RNA, 22 nt, Human
agagccagcaacucuagcccug

SEQ ID NO: 378966 - RNA, 22 nt, Human
gggcugcugccaccagguggau

SEQ ID NO: 378967 - RNA, 22 nt, Human
aggauuuaggagcuggcuaacg

SEQ ID NO: 378968 - RNA, 22 nt, Human
uaaaugagggcugacaugauug

SEQ ID NO: 378969 - RNA, 22 nt, Human
gcagccacacuguuacagaaug

SEQ ID NO: 378970 - RNA, 22 nt, Human
gugccaaaagcuauaauuuggu

SEQ ID NO: 378971 - RNA, 22 nt, Human
uccaggaggccucauuuccugu

SEQ ID NO: 378972 - RNA, 22 nt, Human
ccugggcauaaaucacuccaag

SEQ ID NO: 378973 - RNA, 22 nt, Human
uauguacauggagagcaauuga

SEQ ID NO: 378974 - RNA, 22 nt, Human
aaaugcuguaacugauauucug

SEQ ID NO: 378975 - RNA, 22 nt, Human
gguuucaacuuuugugaggaau

SEQ ID NO: 378976 - RNA, 22 nt, Human
gagacagcacaggccacuggga

SEQ ID NO: 378977 - RNA, 22 nt, Human
cucugcaggggaggcaugcacu

SEQ ID NO: 378978 - RNA, 22 nt, Human
ugccaggcgugguggugcgcac

SEQ ID NO: 378979 - RNA, 22 nt, Human
auuugcuugugcuaugaaaguu

SEQ ID NO: 378980 - RNA, 22 nt, Human
aaagaacagauguguggugcau

SEQ ID NO: 378981 - RNA, 22 nt, Human
gggcuagaaauucugcagugga

SEQ ID NO: 378982 - RNA, 22 nt, Human
ugcagggccuuguugaugugcu

SEQ ID NO: 378983 - RNA, 22 nt, Human
uuacagaacugucuugaaauuu

SEQ ID NO: 378984 - RNA, 22 nt, Human
gcucuguccagcgugcacagaa

SEQ ID NO: 378985 - RNA, 22 nt, Human
gaaggagagagacaucgucccu

SEQ ID NO: 378986 - RNA, 22 nt, Human
gacauucacaguuuccgauggu

SEQ ID NO: 378987 - RNA, 22 nt, Human
gcaccacaucaaugaggggagc

SEQ ID NO: 378988 - RNA, 22 nt, Human
uuauuagggugguuuauguucu

SEQ ID NO: 378989 - RNA, 22 nt, Human
agcccaagcauaggagggaggc

SEQ ID NO: 378990 - RNA, 22 nt, Human
ucuaggagaaccaucagggagg

SEQ ID NO: 378991 - RNA, 21 nt, Human
cuccugggcuaagauauagug

SEQ ID NO: 378992 - RNA, 22 nt, Human
ucagaggaacacuguuucaugc

SEQ ID NO: 378993 - RNA, 22 nt, Human
augaugguaaauucaguauccg

SEQ ID NO: 378994 - RNA, 22 nt, Human
gagguuagaggucagugcaguc

SEQ ID NO: 378995 - RNA, 22 nt, Human
gauagaaagagugguucuuuuu

SEQ ID NO: 378996 - RNA, 22 nt, Human
uggcagcauguuauguaaggaa

SEQ ID NO: 378997 - RNA, 22 nt, Human
aaagucauccaaauuuuuaugu

SEQ ID NO: 378998 - RNA, 22 nt, Human
uauuacugagguuuuauggagu

SEQ ID NO: 378999 - RNA, 22 nt, Human
augcaguacauacaaacacuga

SEQ ID NO: 379000 - RNA, 22 nt, Human
agcucuccacacauaggacuag

SEQ ID NO: 379001 - RNA, 22 nt, Human
ugaggccacuuccccacagccc

SEQ ID NO: 379002 - RNA, 22 nt, Human
uccuggagauaauugcagugaa

SEQ ID NO: 379003 - RNA, 19 nt, Human
guggccucggagcgcgcgg

SEQ ID NO: 379004 - RNA, 22 nt, Human
uccucuggauauaagccucacc

SEQ ID NO: 379005 - RNA, 22 nt, Human
cugucagcacucuacuacagau

SEQ ID NO: 379006 - RNA, 20 nt, Human
agugccagggcaggugagag

SEQ ID NO: 379007 - RNA, 22 nt, Human
acagagcuguacaugugccaug

SEQ ID NO: 379008 - RNA, 22 nt, Human
gaguuauuuguagggauuauau

SEQ ID NO: 379009 - RNA, 22 nt, Human
uuuaggcacagggaguugguuu

SEQ ID NO: 379010 - RNA, 22 nt, Human
ugcugccaggucuugcugucca

SEQ ID NO: 379011 - RNA, 22 nt, Human
uuucauugaacuaaagaaucug

SEQ ID NO: 379012 - RNA, 22 nt, Human
agaucacagcccccagaugcca

SEQ ID NO: 379013 - RNA, 22 nt, Human
ucaguuuuuacggucacaggga

SEQ ID NO: 379014 - RNA, 22 nt, Human
agaguguaauaagggcaagggc

SEQ ID NO: 379015 - RNA, 22 nt, Human
gaagagcuuagacagaaucaaa

SEQ ID NO: 379016 - RNA, 22 nt, Human
gggcagggguagcauuccaagu

SEQ ID NO: 379017 - RNA, 22 nt, Human
augagacuaccuguaauguggc

SEQ ID NO: 379018 - RNA, 22 nt, Human
ucugaggcuucagacuguacug

SEQ ID NO: 379019 - RNA, 22 nt, Human
ggcuuucuagaucuagcucugu

SEQ ID NO: 379020 - RNA, 22 nt, Human
uuccaagagcuuuaauuguuga

SEQ ID NO: 379021 - RNA, 22 nt, Human
uggcuaggcuccaagagcugga

SEQ ID NO: 379022 - RNA, 22 nt, Human
acuggcagcuguaggaugcaug

SEQ ID NO: 379023 - RNA, 22 nt, Human
ucccuggagauaacuucuggga

SEQ ID NO: 379024 - RNA, 22 nt, Human
ccagucacucugugagagcuac

SEQ ID NO: 379025 - RNA, 22 nt, Human
cagaggcacagcuucuuuuaau

SEQ ID NO: 379026 - RNA, 22 nt, Human
agcccagggaaccaggaagugg

SEQ ID NO: 379027 - RNA, 22 nt, Human
ggcagcugauuagcaucaagga

SEQ ID NO: 379028 - RNA, 22 nt, Human
cuuauaguaugauguugagaau

SEQ ID NO: 379029 - RNA, 22 nt, Human
ccaugcacaccagcaggcagac

SEQ ID NO: 379030 - RNA, 22 nt, Human
uagaaaauagggccuguggagc

SEQ ID NO: 379031 - RNA, 22 nt, Human
cagggcucugccuugagggaug

SEQ ID NO: 379032 - RNA, 22 nt, Human
uggcugaggucuggggcuucug

SEQ ID NO: 379033 - RNA, 22 nt, Human
ggagaugcuuuccaguggggau

SEQ ID NO: 379034 - RNA, 22 nt, Human
cugccugcuucugagccagagg

SEQ ID NO: 379035 - RNA, 20 nt, Human
aucaaaggcugauucagucc

SEQ ID NO: 379036 - RNA, 22 nt, Human
aaguucaagcucugccuaaaau

SEQ ID NO: 379037 - RNA, 21 nt, Human
ugcucaugcaaugcaugucca

SEQ ID NO: 379038 - RNA, 22 nt, Human
caggaagcugugaaggagacgg

SEQ ID NO: 379039 - RNA, 22 nt, Human
guccugggaaggaagccaggga

SEQ ID NO: 379040 - RNA, 19 nt, Human
ccugucugucuucagcuag

SEQ ID NO: 379041 - RNA, 22 nt, Human
cccuggaguagcacugggucgc

SEQ ID NO: 379042 - RNA, 22 nt, Human
gcugguuaggugagggugcgcc

SEQ ID NO: 379043 - RNA, 22 nt, Human
ugaaagaacuagcaucuucaag

SEQ ID NO: 379044 - RNA, 22 nt, Human
aaguccagguccucauuccauc

SEQ ID NO: 379045 - RNA, 20 nt, Human
cugaacacagaauaagcaca

SEQ ID NO: 379046 - RNA, 22 nt, Human
gcugcccaggguggagccggcu

SEQ ID NO: 379047 - RNA, 22 nt, Human
gcagagcaguacucucuugacu

SEQ ID NO: 379048 - RNA, 22 nt, Human
gugccuuccccgguggucuguu

SEQ ID NO: 379049 - RNA, 22 nt, Human
gcagugaagccagaucugaaau

SEQ ID NO: 379050 - RNA, 22 nt, Human
ccuggcagcuaagugcuuugag

SEQ ID NO: 379051 - RNA, 22 nt, Human
auggcuuaugaauaacaguagg

SEQ ID NO: 379052 - RNA, 22 nt, Human
cuuuauguccuugaagaguugu

SEQ ID NO: 379053 - RNA, 22 nt, Human
agccuccacagaugcaaagggc

SEQ ID NO: 379054 - RNA, 22 nt, Human
uguccacaucacucacuuguca

SEQ ID NO: 379055 - RNA, 20 nt, Human
ccagagcagccacugaaguu

SEQ ID NO: 379056 - RNA, 22 nt, Human
uggcugagcugcagcguggcuu

SEQ ID NO: 379057 - RNA, 22 nt, Human
agcagugggggaguguuaguuu

SEQ ID NO: 379058 - RNA, 22 nt, Human
cugccuggaaugccagcuucuc

SEQ ID NO: 379059 - RNA, 22 nt, Human
ccaaagugcugggguuacaggc

SEQ ID NO: 379060 - RNA, 22 nt, Human
agggagccuuccuggcuguggu

SEQ ID NO: 379061 - RNA, 21 nt, Human
auagaacaccaggcauauaua

SEQ ID NO: 379062 - RNA, 22 nt, Human
ugcauacacaagcauacaugua

SEQ ID NO: 379063 - RNA, 22 nt, Human
uccucagggcggccuccgucuu

SEQ ID NO: 379064 - RNA, 22 nt, Human
ccucagagaaagguauggcuga

SEQ ID NO: 379065 - RNA, 22 nt, Human
ccaguuuuuccagugcuuucug

SEQ ID NO: 379066 - RNA, 22 nt, Human
uucugugcccauuuuaaaaugg

SEQ ID NO: 379067 - RNA, 22 nt, Human
gggaccaggugggugcauuccg

SEQ ID NO: 379068 - RNA, 22 nt, Human
acuuugcaauacuuaauacaaa

SEQ ID NO: 379069 - RNA, 22 nt, Human
gccucugcucggacuuugccuc

SEQ ID NO: 379070 - RNA, 22 nt, Human
gcagggcagagggagaaucucu

SEQ ID NO: 379071 - RNA, 22 nt, Human
gcagagaggauauuauugucca

SEQ ID NO: 379072 - RNA, 22 nt, Human
cucugagagagcuggugagcac

SEQ ID NO: 379073 - RNA, 22 nt, Human
uuccauaauaaccugagagaaa

SEQ ID NO: 379074 - RNA, 22 nt, Human
agcuucuguucaucuuccaggc

SEQ ID NO: 379075 - RNA, 22 nt, Human
acaaagucucuaauaaucuucu

SEQ ID NO: 379076 - RNA, 21 nt, Human
acucaggagacuaacuauguc

SEQ ID NO: 379077 - RNA, 20 nt, Human
gguagcagcugcugucaucc

SEQ ID NO: 379078 - RNA, 22 nt, Human
ugaggggagaagcagcagccug

SEQ ID NO: 379079 - RNA, 23 nt, Human
ucagugauguugaaccuagcagu

SEQ ID NO: 379080 - RNA, 22 nt, Human
uauguacaugauuucauuugcu

SEQ ID NO: 379081 - RNA, 22 nt, Human
aagacagugacagucacaauug

SEQ ID NO: 379082 - RNA, 22 nt, Human
aacagcaugcuggguaacauug

SEQ ID NO: 379083 - RNA, 22 nt, Human
agggcagcugugagccacugug

SEQ ID NO: 379084 - RNA, 18 nt, Human
auauguuaauuagguagg

SEQ ID NO: 379085 - RNA, 22 nt, Human
aagugagauuauauguacggga

SEQ ID NO: 379086 - RNA, 19 nt, Human
gcuggcagauguggccgug

SEQ ID NO: 379087 - RNA, 22 nt, Human
ucucagagggaaaggccaauuu

SEQ ID NO: 379088 - RNA, 22 nt, Human
gcugucuguucgagcguguguu

SEQ ID NO: 379089 - RNA, 22 nt, Human
aggcugggcuccgcccaacucc

SEQ ID NO: 379090 - RNA, 22 nt, Human
uugaaaguuuauggagucugca

SEQ ID NO: 379091 - RNA, 22 nt, Human
agcagccaaccuuacauucauc

SEQ ID NO: 379092 - RNA, 22 nt, Human
ucuuugaauccuuuacaucuga

SEQ ID NO: 379093 - RNA, 23 nt, Human
uaguuauuuucucuguaauuugc

SEQ ID NO: 379094 - RNA, 22 nt, Human
ggcagauggagaagcagcaggu

SEQ ID NO: 379095 - RNA, 21 nt, Human
uguaaguuucaucugaauugg

SEQ ID NO: 379096 - RNA, 22 nt, Human
uugcugaaguuaaugcuugcaa

SEQ ID NO: 379097 - RNA, 22 nt, Human
caauauauaaugaguacuuucc

SEQ ID NO: 379098 - RNA, 22 nt, Human
accaggcuugaugauuugcuua

SEQ ID NO: 379099 - RNA, 22 nt, Human
ugccaaggguaugggcaagaua

SEQ ID NO: 379100 - RNA, 22 nt, Human
ggccucucauguccugggcuuc

SEQ ID NO: 379101 - RNA, 17 nt, Human
ugaaggaaggaugaugu

SEQ ID NO: 379102 - RNA, 19 nt, Human
ccucugccagcccgccucu

SEQ ID NO: 379103 - RNA, 22 nt, Human
aaagauuuaugaaguucaauua

SEQ ID NO: 379104 - RNA, 22 nt, Human
augaggcaugugaggagaaggg

SEQ ID NO: 379105 - RNA, 22 nt, Human
gguacaauccacuguggguuag

SEQ ID NO: 379106 - RNA, 22 nt, Human
auucuguauuucuaauaagauc

SEQ ID NO: 379107 - RNA, 23 nt, Human
uccagcagccaagaaggguagaa

SEQ ID NO: 379108 - RNA, 19 nt, Human
ucuguucacauuguuucgc

SEQ ID NO: 379109 - RNA, 22 nt, Human
uugcagggcaggaccauggaca

SEQ ID NO: 379110 - RNA, 22 nt, Human
agccucuggcccuagacugcuu

SEQ ID NO: 379111 - RNA, 22 nt, Human
auggccuggccagagcucugcu

SEQ ID NO: 379112 - RNA, 22 nt, Human
uugaggagcaggaugggaggcu

SEQ ID NO: 379113 - RNA, 22 nt, Human
ccuccuggugggcgcuucuggc

SEQ ID NO: 379114 - RNA, 22 nt, Human
acagccagggucucaggaggcg

SEQ ID NO: 379115 - RNA, 22 nt, Human
gcaaggaccuuugagcgugcca

SEQ ID NO: 379116 - RNA, 22 nt, Human
gugcuucucuucacacccaacu

SEQ ID NO: 379117 - RNA, 22 nt, Human
agcagugggugacagagcugag

SEQ ID NO: 379118 - RNA, 19 nt, Human
agacaaguuuccagaagcc

SEQ ID NO: 379119 - RNA, 22 nt, Human
uuuggacuuagccugcagaauu

SEQ ID NO: 379120 - RNA, 22 nt, Human
gggcugagccacagcuuuuguu

SEQ ID NO: 379121 - RNA, 22 nt, Human
gagccuucaucgcagccuuguu

SEQ ID NO: 379122 - RNA, 22 nt, Human
gggcagcugucuugguucucaa

SEQ ID NO: 379123 - RNA, 21 nt, Human
ugucagcaacaauacuuucuc

SEQ ID NO: 379124 - RNA, 22 nt, Human
agggcccucuggcaggccaggc

SEQ ID NO: 379125 - RNA, 22 nt, Human
uugcagagccaugaggcuggcu

SEQ ID NO: 379126 - RNA, 19 nt, Human
uucuccagccugaccugag

SEQ ID NO: 379127 - RNA, 22 nt, Human
uaaagguacgaagugagggauu

SEQ ID NO: 379128 - RNA, 22 nt, Human
ucccagggcacucacccucccu

SEQ ID NO: 379129 - RNA, 22 nt, Human
gcagcaugagcuauacaaagua

SEQ ID NO: 379130 - RNA, 22 nt, Human
ggugacugguuuaucuggcagu

SEQ ID NO: 379131 - RNA, 22 nt, Human
aagcagcauucagugaaaugug

SEQ ID NO: 379132 - RNA, 22 nt, Human
caugugucaaaugauguagcug

SEQ ID NO: 379133 - RNA, 22 nt, Human
caggaccccauauucacugaac

SEQ ID NO: 379134 - RNA, 21 nt, Human
cuguccaguaauuccuggcac

SEQ ID NO: 379135 - RNA, 22 nt, Human
aggaagcucggagagggcaaau

SEQ ID NO: 379136 - RNA, 22 nt, Human
ugcagaaggccugacauugcac

SEQ ID NO: 379137 - RNA, 22 nt, Human
uuauuaaugaguacaaguuauu

SEQ ID NO: 379138 - RNA, 22 nt, Human
auagacauagccguaauuuauu

SEQ ID NO: 379139 - RNA, 22 nt, Human
cugggaaauggcuucgagcuca

SEQ ID NO: 379140 - RNA, 22 nt, Human
ggcacugggcaccggcugaggg

SEQ ID NO: 379141 - RNA, 22 nt, Human
aaagaaucguguguaguuugaa

SEQ ID NO: 379142 - RNA, 22 nt, Human
augccaggaacaaacaguggug

SEQ ID NO: 379143 - RNA, 17 nt, Human
uugggagagaaagguau

SEQ ID NO: 379144 - RNA, 22 nt, Human
uucuucaaugugcccuguuuuc

SEQ ID NO: 379145 - RNA, 22 nt, Human
cugccucugguuuuggucccug

SEQ ID NO: 379146 - RNA, 22 nt, Human
uuuuaguuuggauuucuaaagc

SEQ ID NO: 379147 - RNA, 22 nt, Human
agggguggccugccuuacuccc

SEQ ID NO: 379148 - RNA, 22 nt, Human
auagacuugguuaguaaauuug

SEQ ID NO: 379149 - RNA, 22 nt, Human
ucauuuccucaaauucaagguu

SEQ ID NO: 379150 - RNA, 22 nt, Human
ugcagggccgcuggaggucaug

SEQ ID NO: 379151 - RNA, 22 nt, Human
uggggcuggcuauugucucccu

SEQ ID NO: 379152 - RNA, 22 nt, Human
cacaagacuuauuuguguagaa

SEQ ID NO: 379153 - RNA, 22 nt, Human
gaagcagcaaaucugcaguauc

SEQ ID NO: 379154 - RNA, 22 nt, Human
gcucaggauuucauccaugugu

SEQ ID NO: 379155 - RNA, 20 nt, Human
ugagugauggaggcggguca

SEQ ID NO: 379156 - RNA, 22 nt, Human
cagaaggcuuuguggaguagac

SEQ ID NO: 379157 - RNA, 22 nt, Human
caagggcagaggcagggccccg

SEQ ID NO: 379158 - RNA, 22 nt, Human
uauacagaaccgccugaagucu

SEQ ID NO: 379159 - RNA, 22 nt, Human
gcagccaccucccauggcgggg

SEQ ID NO: 379160 - RNA, 22 nt, Human
uagggcucagaguccaguuucu

SEQ ID NO: 379161 - RNA, 22 nt, Human
acagugugaugggccugccuga

SEQ ID NO: 379162 - RNA, 22 nt, Human
augcucuggaguacgugaaauu

SEQ ID NO: 379163 - RNA, 19 nt, Human
cuauacagccucugaggaa

SEQ ID NO: 379164 - RNA, 22 nt, Human
gggagggaagguaccuguguga

SEQ ID NO: 379165 - RNA, 16 nt, Human
cuuccucuucacuggc

SEQ ID NO: 379166 - RNA, 22 nt, Human
ggcaugggguguauguggcacg

SEQ ID NO: 379167 - RNA, 17 nt, Human
caggcagacauguaagc

SEQ ID NO: 379168 - RNA, 22 nt, Human
gggacuggaguagaggccggug

SEQ ID NO: 379169 - RNA, 22 nt, Human
cugggcaguuuauucaguucug

SEQ ID NO: 379170 - RNA, 22 nt, Human
aggauuuauuggugggaaguua

SEQ ID NO: 379171 - RNA, 22 nt, Human
caagcugguaucagcuagagcg

SEQ ID NO: 379172 - RNA, 22 nt, Human
ucaaagagcuauucaguugugg

SEQ ID NO: 379173 - RNA, 22 nt, Human
gauagaaagaauauagauucca

SEQ ID NO: 379174 - RNA, 23 nt, Human
uauuagggccaggacuggcaaau

SEQ ID NO: 379175 - RNA, 17 nt, Human
agggucaggugaaguuc

SEQ ID NO: 379176 - RNA, 18 nt, Human
cccagcuggugggucagu

SEQ ID NO: 379177 - RNA, 22 nt, Human
agcagccaguucucugugguag

SEQ ID NO: 379178 - RNA, 22 nt, Human
gaggcugauucggggaacagca

SEQ ID NO: 379179 - RNA, 22 nt, Human
cacugaaggcugcagcucagcc

SEQ ID NO: 379180 - RNA, 22 nt, Human
cuggugggaggcaagguggaag

SEQ ID NO: 379181 - RNA, 22 nt, Human
aggaccagaggccagagucagc

SEQ ID NO: 379182 - RNA, 22 nt, Human
agccauugaguuuuaugugcua

SEQ ID NO: 379183 - RNA, 19 nt, Human
gcauuucucuuuacagcca

SEQ ID NO: 379184 - RNA, 22 nt, Human
uauuuaaaaagaggccagcugg

SEQ ID NO: 379185 - RNA, 21 nt, Human
gcugucucuggcuccugggaa

SEQ ID NO: 379186 - RNA, 22 nt, Human
acucccacuccagaguagaagc

SEQ ID NO: 379187 - RNA, 22 nt, Human
aaacaaguguaaacuagucugu

SEQ ID NO: 379188 - RNA, 22 nt, Human
ccccuuccacagugcuuccuaa

SEQ ID NO: 379189 - RNA, 22 nt, Human
ucagggcacauucugcaguggc

SEQ ID NO: 379190 - RNA, 22 nt, Human
gccuggcccagggcucuuguug

SEQ ID NO: 379191 - RNA, 20 nt, Human
cucaggauacugcaaaguug

SEQ ID NO: 379192 - RNA, 22 nt, Human
aguggcaguagaugagcugguu

SEQ ID NO: 379193 - RNA, 18 nt, Human
ccuggagcuccacagcaa

SEQ ID NO: 379194 - RNA, 22 nt, Human
agcuuguuagaaauguagacuc

SEQ ID NO: 379195 - RNA, 20 nt, Human
cagaccugcacccacuucga

SEQ ID NO: 379196 - RNA, 22 nt, Human
aacaaauguguuuuguaauuaa

SEQ ID NO: 379197 - RNA, 22 nt, Human
uggcaggcagugugggagcugg

SEQ ID NO: 379198 - RNA, 22 nt, Human
uuuguuuacucauucauugaug

SEQ ID NO: 379199 - RNA, 22 nt, Human
ggaccugcauuuuaacaagauc

SEQ ID NO: 379200 - RNA, 22 nt, Human
gcuggcauuacaggagagaacc

SEQ ID NO: 379201 - RNA, 22 nt, Human
caaagcucaugcucuuagccau

SEQ ID NO: 379202 - RNA, 22 nt, Human
agaugcugucacacacacuguu

SEQ ID NO: 379203 - RNA, 22 nt, Human
uuccuuagaguuuccagaaagc

SEQ ID NO: 379204 - RNA, 22 nt, Human
aggcaguguguagcuggaagag

SEQ ID NO: 379205 - RNA, 22 nt, Human
aaacauugcuaaauaaugcugc

SEQ ID NO: 379206 - RNA, 22 nt, Human
ccuguccuccaagagcacaucu

SEQ ID NO: 379207 - RNA, 22 nt, Human
gagggcagugaauuuugaagcu

SEQ ID NO: 379208 - RNA, 22 nt, Human
gccucugcugcaagccugguug

SEQ ID NO: 379209 - RNA, 22 nt, Human
uggagucugugaugcucugggu

SEQ ID NO: 379210 - RNA, 22 nt, Human
cccauucauccucgcuuccuuc

SEQ ID NO: 379211 - RNA, 23 nt, Human
uuccagaguccacaucugccacc

SEQ ID NO: 379212 - RNA, 22 nt, Human
ugugaauaccuugaauucauca

SEQ ID NO: 379213 - RNA, 22 nt, Human
ugugcccauuccacuugaguac

SEQ ID NO: 379214 - RNA, 22 nt, Human
aagacuuucaaguaugcaugca

SEQ ID NO: 379215 - RNA, 22 nt, Human
cagaggaaaguauuucuggaag

SEQ ID NO: 379216 - RNA, 22 nt, Human
caugggagcuaucuccaucacu

SEQ ID NO: 379217 - RNA, 22 nt, Human
aggcagguguuaacccucugag

SEQ ID NO: 379218 - RNA, 22 nt, Human
caggguggcccuguggucucau

SEQ ID NO: 379219 - RNA, 22 nt, Human
agcaaggcagucagcuggcugg

SEQ ID NO: 379220 - RNA, 22 nt, Human
augaggcaucuaacauugcaaa

SEQ ID NO: 379221 - RNA, 22 nt, Human
gucaggaucucccaguacauau

SEQ ID NO: 379222 - RNA, 22 nt, Human
ugcagccaccaccucugcugaa

SEQ ID NO: 379223 - RNA, 22 nt, Human
uaaauguguuagucaugguuuu

SEQ ID NO: 379224 - RNA, 22 nt, Human
accugaggcuguuagucuaggu

SEQ ID NO: 379225 - RNA, 22 nt, Human
aggagggacaccaauauauguu

SEQ ID NO: 379226 - RNA, 22 nt, Human
aggcaguuuauccccagagccu

SEQ ID NO: 379227 - RNA, 22 nt, Human
agcagcuuacauguggccuauc

SEQ ID NO: 379228 - RNA, 22 nt, Human
ccuggcugcuauagcagcaugu

SEQ ID NO: 379229 - RNA, 21 nt, Human
aguguccuugaucuugccuug

SEQ ID NO: 379230 - RNA, 22 nt, Human
ccucagggaggccucuguggcu

SEQ ID NO: 379231 - RNA, 22 nt, Human
gaggcugccccuuccucagcug

SEQ ID NO: 379232 - RNA, 22 nt, Human
gaucuucuagcagaaguaauuu

SEQ ID NO: 379233 - RNA, 22 nt, Human
uuuacagagagagaacuggacu

SEQ ID NO: 379234 - RNA, 22 nt, Human
gagcacagggaauagacagaua

SEQ ID NO: 379235 - RNA, 22 nt, Human
ugcccaggcuccucgcagccuu

SEQ ID NO: 379236 - RNA, 22 nt, Human
cuugaaagucacaugcagcccu

SEQ ID NO: 379237 - RNA, 22 nt, Human
ggacaagccugugaguggguuu

SEQ ID NO: 379238 - RNA, 22 nt, Human
gaagccaagugcaaaugccuua

SEQ ID NO: 379239 - RNA, 22 nt, Human
agccagggagguggagguugca

SEQ ID NO: 379240 - RNA, 22 nt, Human
aggaccuguagggccugcaucc

SEQ ID NO: 379241 - RNA, 22 nt, Human
accaggaguuuugaccaggggc

SEQ ID NO: 379242 - RNA, 22 nt, Human
gcauuauuaauagcugcaugag

SEQ ID NO: 379243 - RNA, 22 nt, Human
ggaggcccagagaggugaagug

SEQ ID NO: 379244 - RNA, 22 nt, Human
gacaggcuuugagucccagaac

SEQ ID NO: 379245 - RNA, 21 nt, Human
cgcagagcgaacuugcggcgc

SEQ ID NO: 379246 - RNA, 22 nt, Human
ccagcuggcaggagagucaggg

SEQ ID NO: 379247 - RNA, 22 nt, Human
ugggccuccaauuccagcggga

SEQ ID NO: 379248 - RNA, 22 nt, Human
gccuggaggaauguagcugagg

SEQ ID NO: 379249 - RNA, 22 nt, Human
aaaauucugucauuaaauugug

SEQ ID NO: 379250 - RNA, 22 nt, Human
aggcugaggcggguagaucacc

SEQ ID NO: 379251 - RNA, 22 nt, Human
uuuauacauggagaauuuuugc

SEQ ID NO: 379252 - RNA, 22 nt, Human
gcagggcuauuggaaggagaug

SEQ ID NO: 379253 - RNA, 22 nt, Human
uuaagucacuuaucuaaagaca

SEQ ID NO: 379254 - RNA, 22 nt, Human
agagucugaggcagcugcagcc

SEQ ID NO: 379255 - RNA, 22 nt, Human
agccacaggaaacagagacagc

SEQ ID NO: 379256 - RNA, 22 nt, Human
gcugugcagccaagugccucug

SEQ ID NO: 379257 - RNA, 22 nt, Human
augucacagcucccauuccucc

SEQ ID NO: 379258 - RNA, 22 nt, Human
uggcuucaaaaucuaguggucu

SEQ ID NO: 379259 - RNA, 22 nt, Human
cagugccaugucugagccccua

SEQ ID NO: 379260 - RNA, 21 nt, Human
aggccucuucauggccaugau

SEQ ID NO: 379261 - RNA, 22 nt, Human
acuuugaaacuaaaauucauua

SEQ ID NO: 379262 - RNA, 23 nt, Human
acagagaucuugacuuguaugga

SEQ ID NO: 379263 - RNA, 22 nt, Human
uccuguggucuggaaggaaugg

SEQ ID NO: 379264 - RNA, 22 nt, Human
aagagggcagcacagguggguc

SEQ ID NO: 379265 - RNA, 22 nt, Human
uuagaaaaaacgucuucuagug

SEQ ID NO: 379266 - RNA, 22 nt, Human
aaaaggcauggagguugauagu

SEQ ID NO: 379267 - RNA, 22 nt, Human
ccagaggacuugggggcugaau

SEQ ID NO: 379268 - RNA, 22 nt, Human
agcuggagaugcccagcaccgg

SEQ ID NO: 379269 - RNA, 22 nt, Human
uuaagaauggaaugaggaauuu

SEQ ID NO: 379270 - RNA, 22 nt, Human
agggcugcaggcaagauauggc

SEQ ID NO: 379271 - RNA, 22 nt, Human
cagcuuuaggacucauaauaaa

SEQ ID NO: 379272 - RNA, 22 nt, Human
agugaccaacaaugcugagaag

SEQ ID NO: 379273 - RNA, 22 nt, Human
ugcugaugaguccuucuaucgc

SEQ ID NO: 379274 - RNA, 22 nt, Human
agggaagugaaugacagauauc

SEQ ID NO: 379275 - RNA, 22 nt, Human
agggaauguagcaagaugccaa

SEQ ID NO: 379276 - RNA, 22 nt, Human
uucuuugcccuuaaugaaauaa

SEQ ID NO: 379277 - RNA, 22 nt, Human
aggagcugggcugcugcuggga

SEQ ID NO: 379278 - RNA, 22 nt, Human
auccuuggaugugucuuuuugu

SEQ ID NO: 379279 - RNA, 22 nt, Human
aggccuuaccauagcuguagca

SEQ ID NO: 379280 - RNA, 22 nt, Human
gcuugcucaacccccgucucuc

SEQ ID NO: 379281 - RNA, 21 nt, Human
ugauuuccagaaaauuggccc

SEQ ID NO: 379282 - RNA, 22 nt, Human
ggccugagcagacagcaugaug

SEQ ID NO: 379283 - RNA, 22 nt, Human
aggcugaggugugcugugaucg

SEQ ID NO: 379284 - RNA, 22 nt, Human
gcagcugggccccagccucucc

SEQ ID NO: 379285 - RNA, 22 nt, Human
uccaggagucagacagauggug

SEQ ID NO: 379286 - RNA, 22 nt, Human
gccugccuuuguaugacccuga

SEQ ID NO: 379287 - RNA, 22 nt, Human
aaauguguuugauaggaauauu

SEQ ID NO: 379288 - RNA, 22 nt, Human
cacaggcugcccgcagcuggga

SEQ ID NO: 379289 - RNA, 22 nt, Human
ugggacugcucuugcugggguc

SEQ ID NO: 379290 - RNA, 22 nt, Human
aggagaaggaggccccucacac

SEQ ID NO: 379291 - RNA, 22 nt, Human
gcuuuggagccuguguucugcc

SEQ ID NO: 379292 - RNA, 22 nt, Human
ccagucccagcucugccaugcu

SEQ ID NO: 379293 - RNA, 22 nt, Human
gaggccuggagccgccuaggcg

SEQ ID NO: 379294 - RNA, 22 nt, Human
auaaggcauauagucacuuuuu

SEQ ID NO: 379295 - RNA, 22 nt, Human
ugcugggggugucucaccaggc

SEQ ID NO: 379296 - RNA, 18 nt, Human
acaaaggucugcaagacc

SEQ ID NO: 379297 - RNA, 22 nt, Human
aggccuggcuuugguuugcuga

SEQ ID NO: 379298 - RNA, 23 nt, Human
uagggcagcugggagggacaugc

SEQ ID NO: 379299 - RNA, 22 nt, Human
aucuauacucagaguuaauauc

SEQ ID NO: 379300 - RNA, 18 nt, Human
cagaugagaugcaaucuc

SEQ ID NO: 379301 - RNA, 19 nt, Human
uucuaccuuacuguaggcu

SEQ ID NO: 379302 - RNA, 22 nt, Human
auuaggcauuauggggauaagg

SEQ ID NO: 379303 - RNA, 22 nt, Human
gcuggagcugcagccugggccu

SEQ ID NO: 379304 - RNA, 22 nt, Human
ucacagaagagauauugacaga

SEQ ID NO: 379305 - RNA, 22 nt, Human
ucugccugcuaacuccugcacc

SEQ ID NO: 379306 - RNA, 22 nt, Human
ugcuuaaacacauacauacaua

SEQ ID NO: 379307 - RNA, 22 nt, Human
cagcaggaaaaucaauucugug

SEQ ID NO: 379308 - RNA, 22 nt, Human
auggggcucugcggcugcuccc

SEQ ID NO: 379309 - RNA, 22 nt, Human
uaacugauauugaaaaacauca

SEQ ID NO: 379310 - RNA, 22 nt, Human
acugggccuugccauggcagcc

SEQ ID NO: 379311 - RNA, 18 nt, Human
gaggcagcuagcaauuuu

SEQ ID NO: 379312 - RNA, 22 nt, Human
uuggaugaagucuagcuuuagu

SEQ ID NO: 379313 - RNA, 22 nt, Human
auguaagguucagaguauguga

SEQ ID NO: 379314 - RNA, 22 nt, Human
cugggcaggagggcucuaugga

SEQ ID NO: 379315 - RNA, 23 nt, Human
agaggccaacuucuugccccucc

SEQ ID NO: 379316 - RNA, 22 nt, Human
agggucuguggaugcaucuggg

SEQ ID NO: 379317 - RNA, 22 nt, Human
uucaacuaauguuuauuuuaug

SEQ ID NO: 379318 - RNA, 22 nt, Human
aggccucaggaagguaaagaag

SEQ ID NO: 379319 - RNA, 22 nt, Human
gacccuguuucuacaaauaauu

SEQ ID NO: 379320 - RNA, 22 nt, Human
gcacccagccagcaucucagag

SEQ ID NO: 379321 - RNA, 22 nt, Human
ugggagcugggguuggacgucu

SEQ ID NO: 379322 - RNA, 22 nt, Human
ugcauaauacguuuccuauaac

SEQ ID NO: 379323 - RNA, 22 nt, Human
uuccaugaaggagacugagaag

SEQ ID NO: 379324 - RNA, 22 nt, Human
gaaggcuggaaggcaaguagga

SEQ ID NO: 379325 - RNA, 22 nt, Human
cagcagagaccaagugauuuga

SEQ ID NO: 379326 - RNA, 22 nt, Human
uguauuuuuaggaaugcgcuau

SEQ ID NO: 379327 - RNA, 22 nt, Human
ucuucagacccuuagcugugau

SEQ ID NO: 379328 - RNA, 22 nt, Human
auuacagaaugcaguuccuuau

SEQ ID NO: 379329 - RNA, 22 nt, Human
agugcagugguuaggagccagg

SEQ ID NO: 379330 - RNA, 21 nt, Human
uccaaaaaggagcguccuucu

SEQ ID NO: 379331 - RNA, 22 nt, Human
gaugcugagagguggagggaac

SEQ ID NO: 379332 - RNA, 22 nt, Human
aaguaugacauuuaagacaauu

SEQ ID NO: 379333 - RNA, 22 nt, Human
aaauucuuucauggcuaauaag

SEQ ID NO: 379334 - RNA, 22 nt, Human
aggcucaguucacgucaacuuu

SEQ ID NO: 379335 - RNA, 22 nt, Human
ucagagcugcccaugcaagggg

SEQ ID NO: 379336 - RNA, 22 nt, Human
uucacagauuucccugcacaug

SEQ ID NO: 379337 - RNA, 22 nt, Human
caguccuugcuaugacccugag

SEQ ID NO: 379338 - RNA, 22 nt, Human
agauauuuguaucuugcuauug

SEQ ID NO: 379339 - RNA, 22 nt, Human
ugcagggauuauguagggguug

SEQ ID NO: 379340 - RNA, 19 nt, Human
agggcugcucuggccuggg

SEQ ID NO: 379341 - RNA, 22 nt, Human
gagguauguaugcuacauucuu

SEQ ID NO: 379342 - RNA, 22 nt, Human
acagcuggaggccccauugucc

SEQ ID NO: 379343 - RNA, 22 nt, Human
cauguacaaaaggcaaaugccu

SEQ ID NO: 379344 - RNA, 22 nt, Human
cauaauuucuguaucagcacca

SEQ ID NO: 379345 - RNA, 18 nt, Human
acagggagggcgcugggg

SEQ ID NO: 379346 - RNA, 22 nt, Human
uucuucaaaacaacacuggccu

SEQ ID NO: 379347 - RNA, 22 nt, Human
guucuugccagcauccucaggu

SEQ ID NO: 379348 - RNA, 22 nt, Human
uuucauaaacaguagaagacua

SEQ ID NO: 379349 - RNA, 19 nt, Human
cccaggaggcggagguugc

SEQ ID NO: 379350 - RNA, 22 nt, Human
gagcuuuaggagaaggagguca

SEQ ID NO: 379351 - RNA, 19 nt, Human
ggcuggaguggccaucugu

SEQ ID NO: 379352 - RNA, 22 nt, Human
gccaccuguuucgcuugcccag

SEQ ID NO: 379353 - RNA, 22 nt, Human
ucucugagaaguuccuuuguga

SEQ ID NO: 379354 - RNA, 22 nt, Human
cccuggcaugcaugucccuggc

SEQ ID NO: 379355 - RNA, 22 nt, Human
ucucucuugucaccccaucugc

SEQ ID NO: 379356 - RNA, 22 nt, Human
guuaaagaagaauaguuccuuu

SEQ ID NO: 379357 - RNA, 22 nt, Human
cuggcucagugccuucagaagu

SEQ ID NO: 379358 - RNA, 22 nt, Human
ccagugcuuccaggaauacggu

SEQ ID NO: 379359 - RNA, 22 nt, Human
aaguuuaacuugaauucuuucu

SEQ ID NO: 379360 - RNA, 22 nt, Human
uuaugcuaagugcaacaagcca

SEQ ID NO: 379361 - RNA, 22 nt, Human
uucuuguaauuuggagaaauga

SEQ ID NO: 379362 - RNA, 22 nt, Human
ucacagcaaaugcugcuucuca

SEQ ID NO: 379363 - RNA, 22 nt, Human
uacauguaggugacauuuuaau

SEQ ID NO: 379364 - RNA, 22 nt, Human
cucagaagaacccaggguccca

SEQ ID NO: 379365 - RNA, 21 nt, Human
ugggcagauggcaguguggcu

SEQ ID NO: 379366 - RNA, 22 nt, Human
ucuucaauuagauuuaccaauu

SEQ ID NO: 379367 - RNA, 22 nt, Human
uaguggaggccuguugugugca

SEQ ID NO: 379368 - RNA, 22 nt, Human
aaaugcuugcucuugauuauuu

SEQ ID NO: 379369 - RNA, 20 nt, Human
ucagugauuaucucugagug

SEQ ID NO: 379370 - RNA, 22 nt, Human
uagggcaguuauaacauuagug

SEQ ID NO: 379371 - RNA, 22 nt, Human
auaguauuuaauaguuagcuca

SEQ ID NO: 379372 - RNA, 22 nt, Human
cuggccuuuaaaaugaccuuau

SEQ ID NO: 379373 - RNA, 22 nt, Human
caggacaguuugcuuugcccug

SEQ ID NO: 379374 - RNA, 22 nt, Human
gcugccucccagagcccugcag

SEQ ID NO: 379375 - RNA, 22 nt, Human
ugaaugaacuaaaucauaguuc

SEQ ID NO: 379376 - RNA, 22 nt, Human
guacuucccugggaggcaagca

SEQ ID NO: 379377 - RNA, 20 nt, Human
caggcacacucauuccugcu

SEQ ID NO: 379378 - RNA, 22 nt, Human
uagagcuauuuagagcauuuua

SEQ ID NO: 379379 - RNA, 22 nt, Human
ccuuuugcucucccauccagaa

SEQ ID NO: 379380 - RNA, 22 nt, Human
ucaggcaggcagagggcaaaug

SEQ ID NO: 379381 - RNA, 22 nt, Human
caagcuccuuacauccacaggg

SEQ ID NO: 379382 - RNA, 22 nt, Human
ggggcagagagaaggaagcuug

SEQ ID NO: 379383 - RNA, 22 nt, Human
agucaggauaugccuugugggc

SEQ ID NO: 379384 - RNA, 22 nt, Human
uuagaaauacaagugagguuga

SEQ ID NO: 379385 - RNA, 22 nt, Human
cauucugugauucuaaaucccu

SEQ ID NO: 379386 - RNA, 22 nt, Human
auuaggcagacaacguagccgg

SEQ ID NO: 379387 - RNA, 22 nt, Human
uaacagaaguuguucauugugg

SEQ ID NO: 379388 - RNA, 21 nt, Human
uuacuuuugcagcaaccuaau

SEQ ID NO: 379389 - RNA, 22 nt, Human
gagagcugcagccgagaggggg

SEQ ID NO: 379390 - RNA, 22 nt, Human
aggcagacucaauggcuagaua

SEQ ID NO: 379391 - RNA, 22 nt, Human
uucuccaacacaagcaugaugu

SEQ ID NO: 379392 - RNA, 22 nt, Human
uuacagaagaguaacuuggcaa

SEQ ID NO: 379393 - RNA, 22 nt, Human
gucacacucagaaugacuagag

SEQ ID NO: 379394 - RNA, 22 nt, Human
cagggccuuuuagcaucuucuc

SEQ ID NO: 379395 - RNA, 22 nt, Human
guuauauauaguauuucucuga

SEQ ID NO: 379396 - RNA, 21 nt, Human
ccaggguccagcugccauggu

SEQ ID NO: 379397 - RNA, 22 nt, Human
ccuggagcacauggcaggaggc

SEQ ID NO: 379398 - RNA, 22 nt, Human
auuauaaagaacaugugugugg

SEQ ID NO: 379399 - RNA, 22 nt, Human
ggagcacccugcucagccaagc

SEQ ID NO: 379400 - RNA, 21 nt, Human
agaugcugugcuccaggagca

SEQ ID NO: 379401 - RNA, 23 nt, Human
gugagcagcccacuaggaaugcc

SEQ ID NO: 379402 - RNA, 19 nt, Human
caggaaugagguaauggcu

SEQ ID NO: 379403 - RNA, 22 nt, Human
ucagagcuuaucucuugcugga

SEQ ID NO: 379404 - RNA, 22 nt, Human
uuguaacagcuguuuauauagu

SEQ ID NO: 379405 - RNA, 22 nt, Human
ucuacugcacuggugucucauc

SEQ ID NO: 379406 - RNA, 22 nt, Human
ugagcccagagcccuuguaggg

SEQ ID NO: 379407 - RNA, 20 nt, Human
accuugaacccgccagccau

SEQ ID NO: 379408 - RNA, 22 nt, Human
acaugauucuugauaggcauug

SEQ ID NO: 379409 - RNA, 22 nt, Human
ccuguucaugaaacugcuuucc

SEQ ID NO: 379410 - RNA, 22 nt, Human
ccucucuguguggccucuccau

SEQ ID NO: 379411 - RNA, 22 nt, Human
guggcagcggugugcaaggagg

SEQ ID NO: 379412 - RNA, 22 nt, Human
agcaggaguguccccuggcugu

SEQ ID NO: 379413 - RNA, 22 nt, Human
uuauucuuuucuccagaauccc

SEQ ID NO: 379414 - RNA, 22 nt, Human
ggccaggagcugcacagggcuc

SEQ ID NO: 379415 - RNA, 19 nt, Human
gaggagcuaucggagacag

SEQ ID NO: 379416 - RNA, 22 nt, Human
aaauagauugcugaggcauuac

SEQ ID NO: 379417 - RNA, 22 nt, Human
ggcgcuggccacgguggcucug

SEQ ID NO: 379418 - RNA, 22 nt, Human
uaaaaucauucuggugucagua

SEQ ID NO: 379419 - RNA, 22 nt, Human
gacacagagauaggccuguguu

SEQ ID NO: 379420 - RNA, 22 nt, Human
aucucagggcuggagcccugga

SEQ ID NO: 379421 - RNA, 22 nt, Human
cccaggaaaagcagugccagca

SEQ ID NO: 379422 - RNA, 20 nt, Human
agagcagcaguuggugaggu

SEQ ID NO: 379423 - RNA, 22 nt, Human
aggcaacuuuuggggaugaugg

SEQ ID NO: 379424 - RNA, 18 nt, Human
aagccagagaccacugcc

SEQ ID NO: 379425 - RNA, 22 nt, Human
ccuggcaggccccuccuggauu

SEQ ID NO: 379426 - RNA, 19 nt, Human
agagaggcugugugaggga

SEQ ID NO: 379427 - RNA, 22 nt, Human
ggcuucaccaggugcaugcaug

SEQ ID NO: 379428 - RNA, 22 nt, Human
agggacuugaugucagggagau

SEQ ID NO: 379429 - RNA, 22 nt, Human
uauaguaaaauuuucauuuaug

SEQ ID NO: 379430 - RNA, 18 nt, Human
uuuuacucauagcaggcc

SEQ ID NO: 379431 - RNA, 20 nt, Human
agggcagcuugaggagccgg

SEQ ID NO: 379432 - RNA, 22 nt, Human
ccuggaguuuuuugguugacuc

SEQ ID NO: 379433 - RNA, 22 nt, Human
aggagucauugagagggguccu

SEQ ID NO: 379434 - RNA, 22 nt, Human
guucuguacuccaagcucuucc

SEQ ID NO: 379435 - RNA, 23 nt, Human
uggcugagcccacuaucuuggcc

SEQ ID NO: 379436 - RNA, 22 nt, Human
gucccuuggcucacaaacagcu

SEQ ID NO: 379437 - RNA, 22 nt, Human
gcauggcaaauaucgagggcag

SEQ ID NO: 379438 - RNA, 22 nt, Human
uguucuugagccuuuagaccua

SEQ ID NO: 379439 - RNA, 22 nt, Human
gcccaggaaguugaggcugccg

SEQ ID NO: 379440 - RNA, 22 nt, Human
gggagggguugcauguuugagu

SEQ ID NO: 379441 - RNA, 18 nt, Human
aggugcagccucugaggc

SEQ ID NO: 379442 - RNA, 22 nt, Human
ccaaguacucucaccaaagcuu

SEQ ID NO: 379443 - RNA, 22 nt, Human
ugcagaguaaaagcagaugcua

SEQ ID NO: 379444 - RNA, 22 nt, Human
cugggguggugcaggccucaug

SEQ ID NO: 379445 - RNA, 22 nt, Human
cccaaggaagacgcuugugaua

SEQ ID NO: 379446 - RNA, 22 nt, Human
auguuauaguuauaaaaugagg

SEQ ID NO: 379447 - RNA, 22 nt, Human
caggagaaacauaauuuucugg

SEQ ID NO: 379448 - RNA, 22 nt, Human
ugucucugaggugagggucagc

SEQ ID NO: 379449 - RNA, 19 nt, Human
agacagagcucaguggguu

SEQ ID NO: 379450 - RNA, 22 nt, Human
uuagccauugucagcacauggc

SEQ ID NO: 379451 - RNA, 18 nt, Human
cagcugugcccuguuugg

SEQ ID NO: 379452 - RNA, 22 nt, Human
auugugcaaauauuaucuguag

SEQ ID NO: 379453 - RNA, 22 nt, Human
agacagggucuugaucagagcu

SEQ ID NO: 379454 - RNA, 22 nt, Human
cagcauggagacaaagugggca

SEQ ID NO: 379455 - RNA, 23 nt, Human
cuuuuaacuagaguaucagcugc

SEQ ID NO: 379456 - RNA, 22 nt, Human
aggcggcugguguccugcaggu

SEQ ID NO: 379457 - RNA, 22 nt, Human
cacugcuuucacaguuuguucc

SEQ ID NO: 379458 - RNA, 21 nt, Human
acaugcauagagagauuucug

SEQ ID NO: 379459 - RNA, 22 nt, Human
ccuuugggugaauuccucucuu

SEQ ID NO: 379460 - RNA, 22 nt, Human
aaaugcacugaacacauguugu

SEQ ID NO: 379461 - RNA, 22 nt, Human
uggaccugcuggaugggcaggu

SEQ ID NO: 379462 - RNA, 22 nt, Human
agcucuggaauaaugaugugau

SEQ ID NO: 379463 - RNA, 22 nt, Human
gagggaccccaggcuggcccuu

SEQ ID NO: 379464 - RNA, 22 nt, Human
auguccaggaucuauccccaga

SEQ ID NO: 379465 - RNA, 22 nt, Human
uuugaacaagagcuucacauua

SEQ ID NO: 379466 - RNA, 22 nt, Human
aggcccaguuauccuacuuguu

SEQ ID NO: 379467 - RNA, 22 nt, Human
ccuggcugccgagugugcagcg

SEQ ID NO: 379468 - RNA, 22 nt, Human
uaaaugugaccuucauuuuaua

SEQ ID NO: 379469 - RNA, 22 nt, Human
aagcugccaaugguaagcugcu

SEQ ID NO: 379470 - RNA, 22 nt, Human
gagccagcugagcugcacuguc

SEQ ID NO: 379471 - RNA, 22 nt, Human
ggucccugguucccucugagcu

SEQ ID NO: 379472 - RNA, 22 nt, Human
uguuguuuucucauggagaaua

SEQ ID NO: 379473 - RNA, 22 nt, Human
uggcuggcaaggcuggagucag

SEQ ID NO: 379474 - RNA, 22 nt, Human
ugcccugugugugcaagcacug

SEQ ID NO: 379475 - RNA, 22 nt, Human
guacaaaguggaccugauagua

SEQ ID NO: 379476 - RNA, 22 nt, Human
augcugugguagacagcauucc

SEQ ID NO: 379477 - RNA, 22 nt, Human
aaagacauuagcuuagauguca

SEQ ID NO: 379478 - RNA, 22 nt, Human
caaacuggcuaugggaaucuug

SEQ ID NO: 379479 - RNA, 22 nt, Human
gaaggcugagcagacaggccaa

SEQ ID NO: 379480 - RNA, 16 nt, Human
ggagagugucugcaaa

SEQ ID NO: 379481 - RNA, 22 nt, Human
acuucucuucauagguggcaau

SEQ ID NO: 379482 - RNA, 21 nt, Human
cagggcacacagaggauggua

SEQ ID NO: 379483 - RNA, 22 nt, Human
uggcagcaaguucuugggaggu

SEQ ID NO: 379484 - RNA, 22 nt, Human
gggcagguuggcaucccgggca

SEQ ID NO: 379485 - RNA, 17 nt, Human
uggcucugaggcugaau

SEQ ID NO: 379486 - RNA, 22 nt, Human
acucugaggcaggucagggcag

SEQ ID NO: 379487 - RNA, 22 nt, Human
uacaugaaccuuuaugugugau

SEQ ID NO: 379488 - RNA, 22 nt, Human
ugcagagguguugcugagauaa

SEQ ID NO: 379489 - RNA, 22 nt, Human
gcagugcugaucccauggcaga

SEQ ID NO: 379490 - RNA, 22 nt, Human
gguguccuugcagaaggcggcg

SEQ ID NO: 379491 - RNA, 22 nt, Human
ccaggugggaggaaagcagaga

SEQ ID NO: 379492 - RNA, 22 nt, Human
augaaaaguucgaucuagaagg

SEQ ID NO: 379493 - RNA, 22 nt, Human
ggcagcaguggcugcuauuguc

SEQ ID NO: 379494 - RNA, 22 nt, Human
cccaggccccagggcuugucag

SEQ ID NO: 379495 - RNA, 22 nt, Human
uucuuuggggaauauucugguu

SEQ ID NO: 379496 - RNA, 22 nt, Human
acaacuuugacccuuguucuua

SEQ ID NO: 379497 - RNA, 22 nt, Human
auuguauuuccagcuugaaugu

SEQ ID NO: 379498 - RNA, 21 nt, Human
agaauaaugguaucauuugcu

SEQ ID NO: 379499 - RNA, 22 nt, Human
guucuaauaggagaaaagacag

SEQ ID NO: 379500 - RNA, 22 nt, Human
agagaagacuuacagccacagu

SEQ ID NO: 379501 - RNA, 22 nt, Human
ugggcagaaggaagagccaccu

SEQ ID NO: 379502 - RNA, 22 nt, Human
uaaaaguuuuaguuguacauaa

SEQ ID NO: 379503 - RNA, 22 nt, Human
cugcaggguuuuucaaggacaa

SEQ ID NO: 379504 - RNA, 22 nt, Human
uguuucagucccuguguucaau

SEQ ID NO: 379505 - RNA, 22 nt, Human
ggagcuguuggcagcuaucuug

SEQ ID NO: 379506 - RNA, 22 nt, Human
aaugggaagccagaagacaagg

SEQ ID NO: 379507 - RNA, 22 nt, Human
aaaugcagguaguauuuauuuu

SEQ ID NO: 379508 - RNA, 22 nt, Human
acuggcaguuugagaaugcauu

SEQ ID NO: 379509 - RNA, 22 nt, Human
aagaacagguucuagaaccauu

SEQ ID NO: 379510 - RNA, 20 nt, Human
gagauuuccaaucaugccca

SEQ ID NO: 379511 - RNA, 22 nt, Human
ugcagggaaagggcacugggcu

SEQ ID NO: 379512 - RNA, 22 nt, Human
cccucuacagggaagcgcuuuc

SEQ ID NO: 379513 - RNA, 17 nt, Human
ggugagaccucccacuc

SEQ ID NO: 379514 - RNA, 22 nt, Human
uggccugacugucaggcuguau

SEQ ID NO: 379515 - RNA, 22 nt, Human
acaggcugcugagccauuugcu

SEQ ID NO: 379516 - RNA, 22 nt, Human
cugggccuagcaacagaggagu

SEQ ID NO: 379517 - RNA, 21 nt, Human
uaucagaagagaaagaaugau

SEQ ID NO: 379518 - RNA, 22 nt, Human
ccagugcccagcugcccaggca

SEQ ID NO: 379519 - RNA, 22 nt, Human
ugauuuaaaagaaacauugucu

SEQ ID NO: 379520 - RNA, 22 nt, Human
cugccaggcagggagauggcug

SEQ ID NO: 379521 - RNA, 22 nt, Human
caaagccucugauuucacuugu

SEQ ID NO: 379522 - RNA, 22 nt, Human
cacagcuuccauuagaaugaga

SEQ ID NO: 379523 - RNA, 22 nt, Human
gcagggcagcugaagcuaggug

SEQ ID NO: 379524 - RNA, 22 nt, Human
cuucucagaggccagaagcuau

SEQ ID NO: 379525 - RNA, 22 nt, Human
ccugcagacacuuguccagcaa

SEQ ID NO: 379526 - RNA, 22 nt, Human
ucccaggaauccguccucuaga

SEQ ID NO: 379527 - RNA, 22 nt, Human
auuuccaguccuaaugaucugg

SEQ ID NO: 379528 - RNA, 22 nt, Human
agccagggacgcugcaggcuac

SEQ ID NO: 379529 - RNA, 22 nt, Human
gcagagugaagcaguauggaaa

SEQ ID NO: 379530 - RNA, 22 nt, Human
uucuucaauuuuccauauacug

SEQ ID NO: 379531 - RNA, 22 nt, Human
gaaggccauuuuuagguagaau

SEQ ID NO: 379532 - RNA, 22 nt, Human
caggucagagucccccuguccu

SEQ ID NO: 379533 - RNA, 22 nt, Human
uaguccuuuaauaguuaaugug

SEQ ID NO: 379534 - RNA, 20 nt, Human
uuguuucugcuauuuucuaa

SEQ ID NO: 379535 - RNA, 22 nt, Human
auggcagggcagccucucagag

SEQ ID NO: 379536 - RNA, 22 nt, Human
ggccacuccgcugcuacuggaa

SEQ ID NO: 379537 - RNA, 22 nt, Human
agagcugggacuuggacucaau

SEQ ID NO: 379538 - RNA, 22 nt, Human
aaauuccagaaacucaguauau

SEQ ID NO: 379539 - RNA, 22 nt, Human
ccaggccucccuuuuccagcca

SEQ ID NO: 379540 - RNA, 22 nt, Human
ucacagugagccaugucagaga

SEQ ID NO: 379541 - RNA, 22 nt, Human
ugcccugucuaagcugucagua

SEQ ID NO: 379542 - RNA, 22 nt, Human
ccacucugcugugcuccaugau

SEQ ID NO: 379543 - RNA, 22 nt, Human
uuucugugguggguaguucaga

SEQ ID NO: 379544 - RNA, 22 nt, Human
ucaggcugguccccacagugga

SEQ ID NO: 379545 - RNA, 22 nt, Human
acccaggagcaggcugggcagu

SEQ ID NO: 379546 - RNA, 22 nt, Human
gcagggcaguaagagcuagagu

SEQ ID NO: 379547 - RNA, 22 nt, Human
ugcaggggcuugucugggccug

SEQ ID NO: 379548 - RNA, 22 nt, Human
auuaugcugguuuacacauuuu

SEQ ID NO: 379549 - RNA, 22 nt, Human
gccuggagaauuaaaaggaagg

SEQ ID NO: 379550 - RNA, 22 nt, Human
ucagccuggcaggauggccugg

SEQ ID NO: 379551 - RNA, 22 nt, Human
ucacugaauacuugucucaucc

SEQ ID NO: 379552 - RNA, 20 nt, Human
cagggccacgcuccaaggca

SEQ ID NO: 379553 - RNA, 22 nt, Human
gccagcccagcuccaggggaaa

SEQ ID NO: 379554 - RNA, 22 nt, Human
ucaggcaguagaauugcuugaa

SEQ ID NO: 379555 - RNA, 19 nt, Human
agugaaauggaguauucaa

SEQ ID NO: 379556 - RNA, 22 nt, Human
agggguggagaguguugccagu

SEQ ID NO: 379557 - RNA, 22 nt, Human
ucucaguguguuuucucucaga

SEQ ID NO: 379558 - RNA, 22 nt, Human
gcuggccugcugggcaccaccg

SEQ ID NO: 379559 - RNA, 22 nt, Human
aggagaguucacacuggucaga

SEQ ID NO: 379560 - RNA, 22 nt, Human
auaccuuuuagacauguaguug

SEQ ID NO: 379561 - RNA, 22 nt, Human
uaagaacaguagaacaguaggu

SEQ ID NO: 379562 - RNA, 22 nt, Human
cauugcuuccuaugucccuucu

SEQ ID NO: 379563 - RNA, 22 nt, Human
agaggcugcacuugcucaugau

SEQ ID NO: 379564 - RNA, 22 nt, Human
cacaugggcguaauguccaugg

SEQ ID NO: 379565 - RNA, 22 nt, Human
ggccuuggugccauggccaguu

SEQ ID NO: 379566 - RNA, 22 nt, Human
uggaaauggaucugaugagucu

SEQ ID NO: 379567 - RNA, 22 nt, Human
cuggccacuggagguggcaccc

SEQ ID NO: 379568 - RNA, 18 nt, Human
agagcagcggcaucacac

SEQ ID NO: 379569 - RNA, 22 nt, Human
gggcuucucuuuagugagcuga

SEQ ID NO: 379570 - RNA, 22 nt, Human
cccagcagauggcuaugugcua

SEQ ID NO: 379571 - RNA, 22 nt, Human
ucagaaaugaucguuauucauu

SEQ ID NO: 379572 - RNA, 22 nt, Human
uuucuucugagaucagggagaa

SEQ ID NO: 379573 - RNA, 22 nt, Human
agcucugcaggcacagcugagg

SEQ ID NO: 379574 - RNA, 22 nt, Human
uaaguccuagaugauucacaga

SEQ ID NO: 379575 - RNA, 22 nt, Human
ggagucccagcaaagccuuccc

SEQ ID NO: 379576 - RNA, 22 nt, Human
uuuuauuaucuuugaaugggac

SEQ ID NO: 379577 - RNA, 22 nt, Human
aagacuguacauuuuccagucu

SEQ ID NO: 379578 - RNA, 22 nt, Human
ggagagcagggaggcugcucug

SEQ ID NO: 379579 - RNA, 22 nt, Human
acugagcugcaagucagggagg

SEQ ID NO: 379580 - RNA, 22 nt, Human
cugggacacccaaggaaagagc

SEQ ID NO: 379581 - RNA, 22 nt, Human
cuggugguucaggagaauggcu

SEQ ID NO: 379582 - RNA, 23 nt, Human
agaugaaagcuucccaucacagu

SEQ ID NO: 379583 - RNA, 22 nt, Human
cucuggagugcagccugguggc

SEQ ID NO: 379584 - RNA, 22 nt, Human
gccaggcaaauuaaggaaugca

SEQ ID NO: 379585 - RNA, 22 nt, Human
cugcucugcagcuuggacuccc

SEQ ID NO: 379586 - RNA, 19 nt, Human
ucaaaugccaaugucacag

SEQ ID NO: 379587 - RNA, 22 nt, Human
ccaggagaagcaucugagugua

SEQ ID NO: 379588 - RNA, 22 nt, Human
ugggauggcauccugggccuug

SEQ ID NO: 379589 - RNA, 22 nt, Human
aaaugcauaucaaagacuugaa

SEQ ID NO: 379590 - RNA, 22 nt, Human
uaaaugcagauuccugagccua

SEQ ID NO: 379591 - RNA, 22 nt, Human
cagguggggcagcugugggagc

SEQ ID NO: 379592 - RNA, 22 nt, Human
ggaggggaugguuugacccugg

SEQ ID NO: 379593 - RNA, 22 nt, Human
accaggaguaacagugaguggu

SEQ ID NO: 379594 - RNA, 22 nt, Human
ucaauucugguccucaggaacu

SEQ ID NO: 379595 - RNA, 22 nt, Human
uauuaggguuuugaagguuugu

SEQ ID NO: 379596 - RNA, 22 nt, Human
aggacccagaggcagaggacgu

SEQ ID NO: 379597 - RNA, 22 nt, Human
caugcuguguguuuuagcucca

SEQ ID NO: 379598 - RNA, 21 nt, Human
ccacaggggcuccccugucag

SEQ ID NO: 379599 - RNA, 22 nt, Human
cuuuauuagauguagacuuucu

SEQ ID NO: 379600 - RNA, 22 nt, Human
caggacagagcccagacugugu

SEQ ID NO: 379601 - RNA, 22 nt, Human
uaaaugugucuauggacccgcc

SEQ ID NO: 379602 - RNA, 22 nt, Human
gaaggaagugcucauacuaguu

SEQ ID NO: 379603 - RNA, 22 nt, Human
ggcagugaaaaaguauguuucc

SEQ ID NO: 379604 - RNA, 22 nt, Human
aucauucugauggucaaugcua

SEQ ID NO: 379605 - RNA, 22 nt, Human
uucaaugagcccggggccauag

SEQ ID NO: 379606 - RNA, 22 nt, Human
uuuaauuugaaaugaguaaccc

SEQ ID NO: 379607 - RNA, 22 nt, Human
uccauggguagcccugguugag

SEQ ID NO: 379608 - RNA, 22 nt, Human
gauggacagccuggaaggaaag

SEQ ID NO: 379609 - RNA, 22 nt, Human
cauggcaggaggcugcuggcag

SEQ ID NO: 379610 - RNA, 22 nt, Human
ggcuuuauuauguggccaugug

SEQ ID NO: 379611 - RNA, 22 nt, Human
uuuuccucugagcuuugaauaa

SEQ ID NO: 379612 - RNA, 22 nt, Human
ugcauguguuugccacagugag

SEQ ID NO: 379613 - RNA, 22 nt, Human
uuuuauuaguggcuagaugggg

SEQ ID NO: 379614 - RNA, 18 nt, Human
aaauguacuguccauggc

SEQ ID NO: 379615 - RNA, 22 nt, Human
cuacauuucccagcugccuucc

SEQ ID NO: 379616 - RNA, 22 nt, Human
uggcaccugaacuuagaggugu

SEQ ID NO: 379617 - RNA, 22 nt, Human
uggggcagggaugggaaacuau

SEQ ID NO: 379618 - RNA, 22 nt, Human
ggguuucaugguucucacaaug

SEQ ID NO: 379619 - RNA, 21 nt, Human
gcaggaugcaucuuggugucu

SEQ ID NO: 379620 - RNA, 22 nt, Human
uaucuugagagacaacacagca

SEQ ID NO: 379621 - RNA, 22 nt, Human
uccaugucuucaugugucuaac

SEQ ID NO: 379622 - RNA, 22 nt, Human
cccagagccucauucuguuggg

SEQ ID NO: 379623 - RNA, 22 nt, Human
ugucaccaccggaagaaacugc

SEQ ID NO: 379624 - RNA, 22 nt, Human
gcauacagagaggauguggcau

SEQ ID NO: 379625 - RNA, 22 nt, Human
uguuuaagcugaugagguaucg

SEQ ID NO: 379626 - RNA, 22 nt, Human
gagaaagcuucuuucccacagg

SEQ ID NO: 379627 - RNA, 22 nt, Human
gaagaaagauuggcaugcuuca

SEQ ID NO: 379628 - RNA, 22 nt, Human
caaauguguagagcuuuugggg

SEQ ID NO: 379629 - RNA, 22 nt, Human
cugccagcucgccacaaugaca

SEQ ID NO: 379630 - RNA, 22 nt, Human
ggaggacaggggcugcagcaca

SEQ ID NO: 379631 - RNA, 22 nt, Human
uuagaaaugcacccaagaccua

SEQ ID NO: 379632 - RNA, 22 nt, Human
aacagcuuugcuucuggagaca

SEQ ID NO: 379633 - RNA, 22 nt, Human
ugcagggcuuccucuuggaguu

SEQ ID NO: 379634 - RNA, 22 nt, Human
ggccuggaaugcuuuccuacca

SEQ ID NO: 379635 - RNA, 21 nt, Human
uucaaaguuugccuaaagauu

SEQ ID NO: 379636 - RNA, 20 nt, Human
caccacagaauuggggacag

SEQ ID NO: 379637 - RNA, 20 nt, Human
cugggcugcccagcuauggg

SEQ ID NO: 379638 - RNA, 22 nt, Human
aguuuuucugcuggucucacua

SEQ ID NO: 379639 - RNA, 22 nt, Human
uagcccagaagagggaagcaac

SEQ ID NO: 379640 - RNA, 22 nt, Human
uuacuacugcuuuacuacuggg

SEQ ID NO: 379641 - RNA, 22 nt, Human
ucugcaggccucgacaaggcca

SEQ ID NO: 379642 - RNA, 22 nt, Human
uccaugagggacacuggaugcu

SEQ ID NO: 379643 - RNA, 22 nt, Human
ugccaggcccugcgggguccca

SEQ ID NO: 379644 - RNA, 22 nt, Human
caagauggacauaaggagagaa

SEQ ID NO: 379645 - RNA, 22 nt, Human
agaggagugggaagcagugcaa

SEQ ID NO: 379646 - RNA, 22 nt, Human
aaauggaucuguggaauacauu

SEQ ID NO: 379647 - RNA, 22 nt, Human
agugcagagagcaauacucuac

SEQ ID NO: 379648 - RNA, 22 nt, Human
uuggcuucuggcagucuggacg

SEQ ID NO: 379649 - RNA, 22 nt, Human
ucaggccacggcucacugagac

SEQ ID NO: 379650 - RNA, 22 nt, Human
gaagccaguguuugaagaauuu

SEQ ID NO: 379651 - RNA, 22 nt, Human
cagagccacugucugccaggca

SEQ ID NO: 379652 - RNA, 22 nt, Human
cugccacuuucacccagugcuc

SEQ ID NO: 379653 - RNA, 22 nt, Human
ugggggagauuagagcuucuua

SEQ ID NO: 379654 - RNA, 22 nt, Human
ugcuuuauguggcugauacuca

SEQ ID NO: 379655 - RNA, 22 nt, Human
uuccauauuuguguggcaaaag

SEQ ID NO: 379656 - RNA, 22 nt, Human
ucuuagcacagcuauauaaguu

SEQ ID NO: 379657 - RNA, 22 nt, Human
cacauguuuggcaugucaccaa

SEQ ID NO: 379658 - RNA, 22 nt, Human
ugggggugaaagucuggacagu

SEQ ID NO: 379659 - RNA, 22 nt, Human
auagauacauuagguaacuugu

SEQ ID NO: 379660 - RNA, 22 nt, Human
agcaggaaggucugugugaguc

SEQ ID NO: 379661 - RNA, 22 nt, Human
auuuaucucuggaaacuaagca

SEQ ID NO: 379662 - RNA, 22 nt, Human
uauguacaucguugaauucaaa

SEQ ID NO: 379663 - RNA, 22 nt, Human
uggcugggggugcuauagcugc

SEQ ID NO: 379664 - RNA, 22 nt, Human
ucaguggaacugucugggugag

SEQ ID NO: 379665 - RNA, 22 nt, Human
ggcugcuggggacgugggagag

SEQ ID NO: 379666 - RNA, 22 nt, Human
ugcagcugcuggcccaggugcu

SEQ ID NO: 379667 - RNA, 22 nt, Human
caaugauguuuagauaaaaucc

SEQ ID NO: 379668 - RNA, 22 nt, Human
cagagccccucagcucucuccc

SEQ ID NO: 379669 - RNA, 22 nt, Human
uguucuagcaacacaguuuugg

SEQ ID NO: 379670 - RNA, 22 nt, Human
cuuaagauuugcgauaccuaau

SEQ ID NO: 379671 - RNA, 22 nt, Human
ucucugguggcuccaucaguag

SEQ ID NO: 379672 - RNA, 22 nt, Human
uggaggugagugugguacagca

SEQ ID NO: 379673 - RNA, 22 nt, Human
cuguaauucacuagggucagcg

SEQ ID NO: 379674 - RNA, 22 nt, Human
aggaagcucaaagccaugaugu

SEQ ID NO: 379675 - RNA, 22 nt, Human
ggcaaaaaccgcaauaacuucu

SEQ ID NO: 379676 - RNA, 22 nt, Human
acauuguagacuuuucauaugu

SEQ ID NO: 379677 - RNA, 22 nt, Human
ucucugagacaguagccucugc

SEQ ID NO: 379678 - RNA, 22 nt, Human
cucagagauauagucccugcuu

SEQ ID NO: 379679 - RNA, 22 nt, Human
aacaacugaaaagcuuuuucug

SEQ ID NO: 379680 - RNA, 22 nt, Human
aaaucucaggccucuauuuacu

SEQ ID NO: 379681 - RNA, 22 nt, Human
caggaggcagagguugcagcga

SEQ ID NO: 379682 - RNA, 22 nt, Human
auuuagaacuuuguuugccaau

SEQ ID NO: 379683 - RNA, 22 nt, Human
aggcacugaauauccaguaaaa

SEQ ID NO: 379684 - RNA, 22 nt, Human
uaagaacaagcuggggguucca

SEQ ID NO: 379685 - RNA, 22 nt, Human
agggcuggcaagggauugaaau

SEQ ID NO: 379686 - RNA, 22 nt, Human
agccauugaauuuagugccuuu

SEQ ID NO: 379687 - RNA, 22 nt, Human
aucaggaugaagcuguagcgaa

SEQ ID NO: 379688 - RNA, 22 nt, Human
ucuggcuccugaguccaugcuc

SEQ ID NO: 379689 - RNA, 22 nt, Human
uuuaggcauugaauuagaauag

SEQ ID NO: 379690 - RNA, 22 nt, Human
gccaggcagcugggagggugcc

SEQ ID NO: 379691 - RNA, 22 nt, Human
uuaaugcagaaaucaaacugac

SEQ ID NO: 379692 - RNA, 22 nt, Human
aaccaggacaauuuugaaagua

SEQ ID NO: 379693 - RNA, 22 nt, Human
cagcagagaaauuaaacuucug

SEQ ID NO: 379694 - RNA, 22 nt, Human
ggaggccaaggaggagcuugcc

SEQ ID NO: 379695 - RNA, 23 nt, Human
gcaguggaaugucucuguuugga

SEQ ID NO: 379696 - RNA, 21 nt, Human
acagcagacaggcuuaggacc

SEQ ID NO: 379697 - RNA, 23 nt, Human
uccaggcacgcauuucuucuagc

SEQ ID NO: 379698 - RNA, 22 nt, Human
aaguucaagucuccugaguaua

SEQ ID NO: 379699 - RNA, 22 nt, Human
gaugaaaaauugcugugucaua

SEQ ID NO: 379700 - RNA, 22 nt, Human
uggcuuuauaaauccacugguu

SEQ ID NO: 379701 - RNA, 22 nt, Human
aaguauuucguucugaaaaagu

SEQ ID NO: 379702 - RNA, 22 nt, Human
uuaaagggccgauuuccaggcc

SEQ ID NO: 379703 - RNA, 22 nt, Human
gaggcaucugggcacagaagug

SEQ ID NO: 379704 - RNA, 22 nt, Human
ugaaugauguauaauauugaga

SEQ ID NO: 379705 - RNA, 22 nt, Human
cugcuuugcauagcugccagag

SEQ ID NO: 379706 - RNA, 22 nt, Human
aggcccugcccagugccacaag

SEQ ID NO: 379707 - RNA, 16 nt, Human
cagccugcagugguca

SEQ ID NO: 379708 - RNA, 23 nt, Human
augcaagaguuucucaaacugga

SEQ ID NO: 379709 - RNA, 22 nt, Human
ccucugcaccauagccuucagc

SEQ ID NO: 379710 - RNA, 22 nt, Human
guuugcauguauuaagucaaua

SEQ ID NO: 379711 - RNA, 22 nt, Human
gcuguucacaucuggaccauuu

SEQ ID NO: 379712 - RNA, 21 nt, Human
gggcagaggggccuccugggu

SEQ ID NO: 379713 - RNA, 23 nt, Human
aaaguguagccagguuaagaacc

SEQ ID NO: 379714 - RNA, 22 nt, Human
ugucccagggaaggcccagcac

SEQ ID NO: 379715 - RNA, 22 nt, Human
uauggcuuuuuauucaucuuac

SEQ ID NO: 379716 - RNA, 22 nt, Human
cagcaucccucaggggccucug

SEQ ID NO: 379717 - RNA, 22 nt, Human
cagcugugggccugacguggca

SEQ ID NO: 379718 - RNA, 22 nt, Human
ugagaggccccagcucuuggcc

SEQ ID NO: 379719 - RNA, 22 nt, Human
cagcagagggagccauugaaau

SEQ ID NO: 379720 - RNA, 22 nt, Human
gucucagagagcuacucucuua

SEQ ID NO: 379721 - RNA, 22 nt, Human
gucccugggaugcccuucuggg

SEQ ID NO: 379722 - RNA, 22 nt, Human
gggagcuggagcuggaagacuc

SEQ ID NO: 379723 - RNA, 22 nt, Human
acaauucuggguauuuauauag

SEQ ID NO: 379724 - RNA, 22 nt, Human
agaggggaguccuaaucugauu

SEQ ID NO: 379725 - RNA, 20 nt, Human
agggucagagagcgugagug

SEQ ID NO: 379726 - RNA, 22 nt, Human
guggguggaucaccugagguca

SEQ ID NO: 379727 - RNA, 21 nt, Human
ugaaacaaucagacagagucu

SEQ ID NO: 379728 - RNA, 22 nt, Human
caaagugcuggaauuacaggug

SEQ ID NO: 379729 - RNA, 22 nt, Human
aggcccagacucagcggggcgg

SEQ ID NO: 379730 - RNA, 22 nt, Human
accaaggaagaaucuauuugag

SEQ ID NO: 379731 - RNA, 22 nt, Human
ucagugcacagagauuuuuguu

SEQ ID NO: 379732 - RNA, 22 nt, Human
gcugugcagucuuuggugugcc

SEQ ID NO: 379733 - RNA, 22 nt, Human
caguccuggggaccaggcugag

SEQ ID NO: 379734 - RNA, 22 nt, Human
cugcugcauuccucuuuaugag

SEQ ID NO: 379735 - RNA, 22 nt, Human
cccaggagacugagcuguaacc

SEQ ID NO: 379736 - RNA, 22 nt, Human
augguuuugaagggaggucaaa

SEQ ID NO: 379737 - RNA, 22 nt, Human
gggcagcucugcccaucagagg

SEQ ID NO: 379738 - RNA, 20 nt, Human
uuugagaccagucugcccaa

SEQ ID NO: 379739 - RNA, 20 nt, Human
acaauauguagaugaauagc

SEQ ID NO: 379740 - RNA, 22 nt, Human
caggauggucagaugcauuguc

SEQ ID NO: 379741 - RNA, 21 nt, Human
aaaugaaugugguagugcaag

SEQ ID NO: 379742 - RNA, 22 nt, Human
ucagagagugcaaaauauagcu

SEQ ID NO: 379743 - RNA, 22 nt, Human
ucucagagaaaugugucaccau

SEQ ID NO: 379744 - RNA, 23 nt, Human
uugucugugcuuuuccaguugcu

SEQ ID NO: 379745 - RNA, 22 nt, Human
auguguaaaaagugcuuaauau

SEQ ID NO: 379746 - RNA, 22 nt, Human
ucaguuucacagucugugcaga

SEQ ID NO: 379747 - RNA, 19 nt, Human
agggccaggauucuggaac

SEQ ID NO: 379748 - RNA, 16 nt, Human
gagccaggugccuuga

SEQ ID NO: 379749 - RNA, 22 nt, Human
caguugaugggacucauguggg

SEQ ID NO: 379750 - RNA, 22 nt, Human
gcaagcugaugugauagugaaa

SEQ ID NO: 379751 - RNA, 22 nt, Human
ugggcagccaucccagccucuc

SEQ ID NO: 379752 - RNA, 22 nt, Human
cugagccuuauucaccagcccu

SEQ ID NO: 379753 - RNA, 22 nt, Human
uaccuuuugcuuauuaugacac

SEQ ID NO: 379754 - RNA, 22 nt, Human
ucugaggcccugcaggcagugu

SEQ ID NO: 379755 - RNA, 22 nt, Human
ggagcuguaacgagccauugcu

SEQ ID NO: 379756 - RNA, 22 nt, Human
agcuucuggaagccuggcagca

SEQ ID NO: 379757 - RNA, 22 nt, Human
ucucaggaagauuagggcuaag

SEQ ID NO: 379758 - RNA, 22 nt, Human
agcuuuauauuuaaugaauucu

SEQ ID NO: 379759 - RNA, 22 nt, Human
ugucugugaccucuuaggcaag

SEQ ID NO: 379760 - RNA, 22 nt, Human
uaaauguaccuucugccuuacu

SEQ ID NO: 379761 - RNA, 22 nt, Human
cccaggaaaugggcucuugccu

SEQ ID NO: 379762 - RNA, 22 nt, Human
cuuugcaaacgauuaccacaug

SEQ ID NO: 379763 - RNA, 22 nt, Human
gguuggggcgagcuggaggccc

SEQ ID NO: 379764 - RNA, 22 nt, Human
ucugccuucgcugcucccugaa

SEQ ID NO: 379765 - RNA, 22 nt, Human
aaguucaagaucaagguuccag

SEQ ID NO: 379766 - RNA, 19 nt, Human
auuuccaagaauuggagag

SEQ ID NO: 379767 - RNA, 22 nt, Human
uuucacauaucaacucuauccu

SEQ ID NO: 379768 - RNA, 22 nt, Human
cucccaggacucagaggagaag

SEQ ID NO: 379769 - RNA, 22 nt, Human
gaggcacaguguuuggucagug

SEQ ID NO: 379770 - RNA, 22 nt, Human
uuggcaguaaaagaaaaugcuu

SEQ ID NO: 379771 - RNA, 21 nt, Human
ccuauugaauauaggaagauu

SEQ ID NO: 379772 - RNA, 22 nt, Human
ggaggccaggguggguggaucg

SEQ ID NO: 379773 - RNA, 22 nt, Human
uucacauuugcccuuaugugug

SEQ ID NO: 379774 - RNA, 22 nt, Human
agccagcaggugagugcagccu

SEQ ID NO: 379775 - RNA, 22 nt, Human
aagaauucacugguagagucaa

SEQ ID NO: 379776 - RNA, 22 nt, Human
cccagggagguagcaggagaaa

SEQ ID NO: 379777 - RNA, 23 nt, Human
gagguacagcaccagugaauagg

SEQ ID NO: 379778 - RNA, 22 nt, Human
aggcaggcacuccggaaguguc

SEQ ID NO: 379779 - RNA, 22 nt, Human
cucugaauggacacuccagugu

SEQ ID NO: 379780 - RNA, 22 nt, Human
ucuggaguccagauccauuugg

SEQ ID NO: 379781 - RNA, 22 nt, Human
aucagugcuaaagcaaaugccc

SEQ ID NO: 379782 - RNA, 22 nt, Human
gccugccugcugucaucugccu

SEQ ID NO: 379783 - RNA, 22 nt, Human
ccacagagcauuagauuucaga

SEQ ID NO: 379784 - RNA, 22 nt, Human
ucaggauguccaaaauccagcc

SEQ ID NO: 379785 - RNA, 22 nt, Human
gugcagcugcaggagucagguc

SEQ ID NO: 379786 - RNA, 21 nt, Human
auacagaacauugauccaaga

SEQ ID NO: 379787 - RNA, 22 nt, Human
uguuuauugagugccuacuaua

SEQ ID NO: 379788 - RNA, 22 nt, Human
cugaaggaagcagguggccugu

SEQ ID NO: 379789 - RNA, 22 nt, Human
caaggccaguccauuuuggaag

SEQ ID NO: 379790 - RNA, 22 nt, Human
cccaggaaaucaggcuuucuag

SEQ ID NO: 379791 - RNA, 22 nt, Human
uaaguccuaauggcagaagucu

SEQ ID NO: 379792 - RNA, 22 nt, Human
uuuaggcagcacgggcagcccu

SEQ ID NO: 379793 - RNA, 22 nt, Human
caguauguacucuuaucaugua

SEQ ID NO: 379794 - RNA, 22 nt, Human
cccagcagaaucugaugagggc

SEQ ID NO: 379795 - RNA, 22 nt, Human
aacauugccaugguuaauuuua

SEQ ID NO: 379796 - RNA, 22 nt, Human
agagcagauggccagggggccu

SEQ ID NO: 379797 - RNA, 22 nt, Human
gaggcacugcaguacagugacu

SEQ ID NO: 379798 - RNA, 22 nt, Human
cccaggaguuugaguucagcau

SEQ ID NO: 379799 - RNA, 22 nt, Human
cugcaggcccccuuccuggagu

SEQ ID NO: 379800 - RNA, 19 nt, Human
ucaaggcucccugagggau

SEQ ID NO: 379801 - RNA, 22 nt, Human
uuggagagaggcugcucaggcu

SEQ ID NO: 379802 - RNA, 22 nt, Human
gaauuacaugacccugaguaga

SEQ ID NO: 379803 - RNA, 22 nt, Human
gaaacaacuacuauugauuucu

SEQ ID NO: 379804 - RNA, 22 nt, Human
ggccagagaagucagacccuug

SEQ ID NO: 379805 - RNA, 22 nt, Human
ugggcagacauugaguuuguuc

SEQ ID NO: 379806 - RNA, 22 nt, Human
cauagaaaucaggugagaaucu

SEQ ID NO: 379807 - RNA, 19 nt, Human
accaggccucagaggcccu

SEQ ID NO: 379808 - RNA, 23 nt, Human
augguuuaugucacacuuuugau

SEQ ID NO: 379809 - RNA, 22 nt, Human
acagcuggaggucugugagcac

SEQ ID NO: 379810 - RNA, 22 nt, Human
uguauaaauuuaaauuccugcu

SEQ ID NO: 379811 - RNA, 22 nt, Human
gcuggcagccaagugaagaggg

SEQ ID NO: 379812 - RNA, 22 nt, Human
caggccugauacacugaacucu

SEQ ID NO: 379813 - RNA, 17 nt, Human
ccuguguuugcuccuuc

SEQ ID NO: 379814 - RNA, 22 nt, Human
ucugagccguauggcuuggcua

SEQ ID NO: 379815 - RNA, 22 nt, Human
ugugugcagccucugucuuugg

SEQ ID NO: 379816 - RNA, 22 nt, Human
uacauaauuaaucuuuaaguuc

SEQ ID NO: 379817 - RNA, 22 nt, Human
agcagccaauuggaggaugaag

SEQ ID NO: 379818 - RNA, 20 nt, Human
ugcccagcaagagugcaguu

SEQ ID NO: 379819 - RNA, 22 nt, Human
aaacaaacaauuaguugugugg

SEQ ID NO: 379820 - RNA, 22 nt, Human
gaggcacaucacuuggugcauu

SEQ ID NO: 379821 - RNA, 22 nt, Human
auucuuauuuaaauagagucug

SEQ ID NO: 379822 - RNA, 22 nt, Human
ucugccuuuucacugccacuaa

SEQ ID NO: 379823 - RNA, 22 nt, Human
agacagaacagaauaauuguug

SEQ ID NO: 379824 - RNA, 22 nt, Human
acugaguguaggacuuugaguu

SEQ ID NO: 379825 - RNA, 19 nt, Human
uggagggguuugaaugugg

SEQ ID NO: 379826 - RNA, 22 nt, Human
ucuucacauggaacaugaagcu

SEQ ID NO: 379827 - RNA, 23 nt, Human
ucugucacuuucugcuguggagu

SEQ ID NO: 379828 - RNA, 22 nt, Human
gacugccagaaugugaggccug

SEQ ID NO: 379829 - RNA, 19 nt, Human
gcagcugcuugaaaagaaa

SEQ ID NO: 379830 - RNA, 22 nt, Human
gaagcccagcaaacugugauca

SEQ ID NO: 379831 - RNA, 22 nt, Human
cagaguaaggagcugucaaacg

SEQ ID NO: 379832 - RNA, 22 nt, Human
ggguggaguagaaagaugaauu

SEQ ID NO: 379833 - RNA, 21 nt, Human
ugaaaugagaaugcugagcac

SEQ ID NO: 379834 - RNA, 22 nt, Human
ugggcaggugcuauuuuccaug

SEQ ID NO: 379835 - RNA, 22 nt, Human
auaugcauuuaccuggcauaua

SEQ ID NO: 379836 - RNA, 19 nt, Human
ugggcuuccccagggcaga

SEQ ID NO: 379837 - RNA, 19 nt, Human
uuagaaacuguugacacug

SEQ ID NO: 379838 - RNA, 22 nt, Human
gccuggagacagcagaggcggc

SEQ ID NO: 379839 - RNA, 22 nt, Human
ggaguucacugugcaggcucug

SEQ ID NO: 379840 - RNA, 22 nt, Human
ccauaagguugaaaacuguaca

SEQ ID NO: 379841 - RNA, 22 nt, Human
uaaagccacgcuggaaaucagg

SEQ ID NO: 379842 - RNA, 22 nt, Human
agcagaggacaguucuuaggaa

SEQ ID NO: 379843 - RNA, 22 nt, Human
cccugcagagccagcccugacc

SEQ ID NO: 379844 - RNA, 22 nt, Human
ucuugggauugcccugcaguuc

SEQ ID NO: 379845 - RNA, 22 nt, Human
uggcugaggagagggcggaagu

SEQ ID NO: 379846 - RNA, 22 nt, Human
caggagaucuuaggaauucuua

SEQ ID NO: 379847 - RNA, 22 nt, Human
agggcugccugcucugcauuga

SEQ ID NO: 379848 - RNA, 22 nt, Human
ucuuccucucuaauugaucaga

SEQ ID NO: 379849 - RNA, 22 nt, Human
ugccuucaaucaggauggucuc

SEQ ID NO: 379850 - RNA, 22 nt, Human
ugaccugcagucaagaggggaa

SEQ ID NO: 379851 - RNA, 22 nt, Human
uguuaacaucuuggacucguga

SEQ ID NO: 379852 - RNA, 22 nt, Human
aauuagggaggacaaagguaca

SEQ ID NO: 379853 - RNA, 22 nt, Human
ucugccugcaguguggcagggc

SEQ ID NO: 379854 - RNA, 22 nt, Human
ucuuuuggaaaugaugugcagg

SEQ ID NO: 379855 - RNA, 22 nt, Human
gcggagggcgagcccgcggagc

SEQ ID NO: 379856 - RNA, 22 nt, Human
ggauggcagucugcaugagaaa

SEQ ID NO: 379857 - RNA, 19 nt, Human
uccuccuuacuuccucuug

SEQ ID NO: 379858 - RNA, 22 nt, Human
ugcuggcuacauuauugcuguc

SEQ ID NO: 379859 - RNA, 22 nt, Human
uaucuguuguccaugcagaaag

SEQ ID NO: 379860 - RNA, 19 nt, Human
cugugcaggccgggcugag

SEQ ID NO: 379861 - RNA, 22 nt, Human
gaucauuuacuuguucuggacu

SEQ ID NO: 379862 - RNA, 22 nt, Human
ccagagagagaggucaauggca

SEQ ID NO: 379863 - RNA, 22 nt, Human
ccagcugcaggggagcagugga

SEQ ID NO: 379864 - RNA, 22 nt, Human
ccucaggggugcccacagcugc

SEQ ID NO: 379865 - RNA, 22 nt, Human
agauuggaucaagcagcaguug

SEQ ID NO: 379866 - RNA, 22 nt, Human
uggcucagccauucguguugcc

SEQ ID NO: 379867 - RNA, 22 nt, Human
agaauuccuccucugggacacu

SEQ ID NO: 379868 - RNA, 22 nt, Human
auaguuugugaaacacagcagu

SEQ ID NO: 379869 - RNA, 22 nt, Human
agcugcagagguuugugcaaca

SEQ ID NO: 379870 - RNA, 22 nt, Human
ggguuggggcccagcagucugc

SEQ ID NO: 379871 - RNA, 22 nt, Human
uccugagaugagacagugcugc

SEQ ID NO: 379872 - RNA, 20 nt, Human
aucaggauucuugcuuuguu

SEQ ID NO: 379873 - RNA, 22 nt, Human
ccaguguucauaauuuuacacu

SEQ ID NO: 379874 - RNA, 21 nt, Human
cccaggaguccuauuuaaaug

SEQ ID NO: 379875 - RNA, 22 nt, Human
gacaauaaaaugaucuuacagu

SEQ ID NO: 379876 - RNA, 22 nt, Human
cuguagcaaguuauucaauaaa

SEQ ID NO: 379877 - RNA, 22 nt, Human
uauuccaaaauaguuaagcacu

SEQ ID NO: 379878 - RNA, 22 nt, Human
caguauguuugggagacaugac

SEQ ID NO: 379879 - RNA, 20 nt, Human
cgugcugugaccuugagcau

SEQ ID NO: 379880 - RNA, 22 nt, Human
agcugccagggacugggcaugg

SEQ ID NO: 379881 - RNA, 22 nt, Human
aaagaacaaauuagcuguuuua

SEQ ID NO: 379882 - RNA, 22 nt, Human
uuucuguagugugguauguagg

SEQ ID NO: 379883 - RNA, 22 nt, Human
uuucacagguacaaacacuccu

SEQ ID NO: 379884 - RNA, 22 nt, Human
acaugcuuucuagguccuucug

SEQ ID NO: 379885 - RNA, 22 nt, Human
cugaaggacacgugaggagcca

SEQ ID NO: 379886 - RNA, 22 nt, Human
uuucaauguaacauuuccaggc

SEQ ID NO: 379887 - RNA, 22 nt, Human
uuguuuuggagaugagcuaaaa

SEQ ID NO: 379888 - RNA, 22 nt, Human
gcugucagaaggugaaggguaa

SEQ ID NO: 379889 - RNA, 22 nt, Human
gcucccucugcucaggcacuug

SEQ ID NO: 379890 - RNA, 22 nt, Human
uauuucuguaacucagggucug

SEQ ID NO: 379891 - RNA, 22 nt, Human
uuguggaaauacagacuccaag

SEQ ID NO: 379892 - RNA, 22 nt, Human
ucccuggcugggggcugccuug

SEQ ID NO: 379893 - RNA, 22 nt, Human
ugucaaauuuuuauugcaguau

SEQ ID NO: 379894 - RNA, 22 nt, Human
uucauacucacuccaauaacug

SEQ ID NO: 379895 - RNA, 22 nt, Human
gggcuggucuggcuuagucagg

SEQ ID NO: 379896 - RNA, 22 nt, Human
ugaaugaugcaguauaaugaua

SEQ ID NO: 379897 - RNA, 22 nt, Human
ggaugcugacuuuggagcaugg

SEQ ID NO: 379898 - RNA, 22 nt, Human
acagugcuggcuacaacccugg

SEQ ID NO: 379899 - RNA, 22 nt, Human
uuugaagacauauuguuacaua

SEQ ID NO: 379900 - RNA, 22 nt, Human
aaggcaguagguguuucaaacu

SEQ ID NO: 379901 - RNA, 22 nt, Human
cccacucccugcacgccugccg

SEQ ID NO: 379902 - RNA, 22 nt, Human
ugcaggcuggaggagggacuaa

SEQ ID NO: 379903 - RNA, 20 nt, Human
cuuguacaugauaaagauuu

SEQ ID NO: 379904 - RNA, 22 nt, Human
ccucagaggugaacaucagugc

SEQ ID NO: 379905 - RNA, 22 nt, Human
uccugucugcucacagagcugg

SEQ ID NO: 379906 - RNA, 22 nt, Human
ucucuguacaguacaugccgug

SEQ ID NO: 379907 - RNA, 22 nt, Human
uuucaaauggagucgugaaaug

SEQ ID NO: 379908 - RNA, 20 nt, Human
aacaguaccauuuaucucag

SEQ ID NO: 379909 - RNA, 22 nt, Human
uaauauauuucugcuaagcuca

SEQ ID NO: 379910 - RNA, 22 nt, Human
aggggccuggacauggacgcgc

SEQ ID NO: 379911 - RNA, 22 nt, Human
uucauuccugagcccauauuua

SEQ ID NO: 379912 - RNA, 19 nt, Human
ggcucagggcgcugccgcc

SEQ ID NO: 379913 - RNA, 22 nt, Human
ccugcagguccccggaugcgca

SEQ ID NO: 379914 - RNA, 22 nt, Human
gaagcccacguuuggugaugua

SEQ ID NO: 379915 - RNA, 22 nt, Human
aaaugcuacauacacaucaggg

SEQ ID NO: 379916 - RNA, 22 nt, Human
agggacacaugugauuauuuau

SEQ ID NO: 379917 - RNA, 22 nt, Human
cauuuccugucuggaggucaaa

SEQ ID NO: 379918 - RNA, 22 nt, Human
cacccagggcugugccugccca

SEQ ID NO: 379919 - RNA, 22 nt, Human
ucagcagggagaggagaaugca

SEQ ID NO: 379920 - RNA, 22 nt, Human
aggcugaggcagguggaucacu

SEQ ID NO: 379921 - RNA, 21 nt, Human
ugcaugcuauguuuuuauuuc

SEQ ID NO: 379922 - RNA, 22 nt, Human
cuucuggaggacacuggcccca

SEQ ID NO: 379923 - RNA, 20 nt, Human
agagugagacuccaucucag

SEQ ID NO: 379924 - RNA, 22 nt, Human
aaugucugagucucuguauccc

SEQ ID NO: 379925 - RNA, 22 nt, Human
gagaaagauggaaucuuacagg

SEQ ID NO: 379926 - RNA, 22 nt, Human
augugugccccuuuuacucuuu

SEQ ID NO: 379927 - RNA, 22 nt, Human
cuguugucuucauugucauauc

SEQ ID NO: 379928 - RNA, 22 nt, Human
gaggcugggaaguccaagacca

SEQ ID NO: 379929 - RNA, 22 nt, Human
acacaggagauauguaauggcu

SEQ ID NO: 379930 - RNA, 22 nt, Human
guggcucucgccagccugcggg

SEQ ID NO: 379931 - RNA, 22 nt, Human
gcacccagaauaaggacaggac

SEQ ID NO: 379932 - RNA, 22 nt, Human
acagcagcgucaacuuaaaauu

SEQ ID NO: 379933 - RNA, 22 nt, Human
cauucacucagcgaugccagua

SEQ ID NO: 379934 - RNA, 22 nt, Human
aagucauagucgggaaagacau

SEQ ID NO: 379935 - RNA, 22 nt, Human
ccagccuuacugcccuucagug

SEQ ID NO: 379936 - RNA, 22 nt, Human
gugaauaaaacaccugccaaga

SEQ ID NO: 379937 - RNA, 22 nt, Human
guguccacggcugagaaugauu

SEQ ID NO: 379938 - RNA, 22 nt, Human
caauacuuccuuguuagaggca

SEQ ID NO: 379939 - RNA, 22 nt, Human
agugaaauccuggucaacaggu

SEQ ID NO: 379940 - RNA, 22 nt, Human
aauuccaaguagcaucccauca

SEQ ID NO: 379941 - RNA, 22 nt, Human
uuguggcucgugagauguuagg

SEQ ID NO: 379942 - RNA, 22 nt, Human
cggagcugccugccaagccugc

SEQ ID NO: 379943 - RNA, 22 nt, Human
cuuauuuugcugaugacccagg

SEQ ID NO: 379944 - RNA, 22 nt, Human
uuauuauuuuguguacagcaaa

SEQ ID NO: 379945 - RNA, 22 nt, Human
uuuucuuaggugcuccaaguag

SEQ ID NO: 379946 - RNA, 22 nt, Human
aguccggggucuggacaccugg

SEQ ID NO: 379947 - RNA, 22 nt, Human
ucugggaagcugguccuguucu

SEQ ID NO: 379948 - RNA, 22 nt, Human
gacagggccgcagauggagacu

SEQ ID NO: 379949 - RNA, 23 nt, Human
auaaggcauaaagguacauugga

SEQ ID NO: 379950 - RNA, 22 nt, Human
cccucugccugcgcccuggugu

SEQ ID NO: 379951 - RNA, 22 nt, Human
cugcucugaguauuaacggagg

SEQ ID NO: 379952 - RNA, 22 nt, Human
ucaggauccauagacucccaaa

SEQ ID NO: 379953 - RNA, 22 nt, Human
cauuuauugaguggccacagug

SEQ ID NO: 379954 - RNA, 22 nt, Human
augacagaaggccucccugaca

SEQ ID NO: 379955 - RNA, 22 nt, Human
aagauuuccuggauguaauucc

SEQ ID NO: 379956 - RNA, 21 nt, Human
aagagcuggaucaaggauaag

SEQ ID NO: 379957 - RNA, 22 nt, Human
agagccaggugcugcuguuuga

SEQ ID NO: 379958 - RNA, 22 nt, Human
cacaggagagcugggaggugcc

SEQ ID NO: 379959 - RNA, 22 nt, Human
ggcagaggagcuggaaacaugg

SEQ ID NO: 379960 - RNA, 22 nt, Human
uggagagguuuaaacaaaaguu

SEQ ID NO: 379961 - RNA, 22 nt, Human
aauguguagggugccuguuuuu

SEQ ID NO: 379962 - RNA, 22 nt, Human
uccagccaccaccuugauugcc

SEQ ID NO: 379963 - RNA, 22 nt, Human
aaguucaaggugauaguggcag

SEQ ID NO: 379964 - RNA, 22 nt, Human
acuacuuugggccauuuguuua

SEQ ID NO: 379965 - RNA, 22 nt, Human
agggcuggaggguacuaguuua

SEQ ID NO: 379966 - RNA, 22 nt, Human
uucaaguuuugccuccccaucc

SEQ ID NO: 379967 - RNA, 22 nt, Human
gggcuggaggaccggccucgga

SEQ ID NO: 379968 - RNA, 22 nt, Human
uaaauuauguuccauguccuuu

SEQ ID NO: 379969 - RNA, 22 nt, Human
ugucuagggagcugcucaggcu

SEQ ID NO: 379970 - RNA, 23 nt, Human
agggcccaagccuggacagcagg

SEQ ID NO: 379971 - RNA, 22 nt, Human
cagugcagaacacauggaaaau

SEQ ID NO: 379972 - RNA, 20 nt, Human
ugcagcugguuucacaggga

SEQ ID NO: 379973 - RNA, 23 nt, Human
gaagccacacaaaggucgccaag

SEQ ID NO: 379974 - RNA, 22 nt, Human
aagcccagaugugagaacugag

SEQ ID NO: 379975 - RNA, 22 nt, Human
guuaauuugcagcuuucgagcu

SEQ ID NO: 379976 - RNA, 22 nt, Human
uggagcugauacagcuggcuuu

SEQ ID NO: 379977 - RNA, 22 nt, Human
uccucucagugugguuguggga

SEQ ID NO: 379978 - RNA, 22 nt, Human
cuaauacacccuauugcuuguu

SEQ ID NO: 379979 - RNA, 22 nt, Human
ggagguggcagggaacauaauu

SEQ ID NO: 379980 - RNA, 23 nt, Human
cccuggaguaaauucuuggaagg

SEQ ID NO: 379981 - RNA, 20 nt, Human
cccagggaccugagcuccau

SEQ ID NO: 379982 - RNA, 22 nt, Human
ugcuuaauauugugauguaaua

SEQ ID NO: 379983 - RNA, 22 nt, Human
gcccccucuuuggagccagcca

SEQ ID NO: 379984 - RNA, 23 nt, Human
cugcagucgccggccugggugcc

SEQ ID NO: 379985 - RNA, 22 nt, Human
agcugcugagagucugccgggc

SEQ ID NO: 379986 - RNA, 22 nt, Human
ccuggccagccagggcuggggu

SEQ ID NO: 379987 - RNA, 22 nt, Human
cccaggaccgcgcggcugagcg

SEQ ID NO: 379988 - RNA, 22 nt, Human
auuguucaaagugcuuugcaug

SEQ ID NO: 379989 - RNA, 22 nt, Human
gggaggugauuaggaccaugua

SEQ ID NO: 379990 - RNA, 22 nt, Human
gcugcugucagugguggcaguu

SEQ ID NO: 379991 - RNA, 22 nt, Human
ccuguggcucucuuuggagguc

SEQ ID NO: 379992 - RNA, 22 nt, Human
uucaggauaugugauaucugaa

SEQ ID NO: 379993 - RNA, 22 nt, Human
agcauuuaagcuucugcaaagc

SEQ ID NO: 379994 - RNA, 22 nt, Human
cuggaucaugcauugcuugucc

SEQ ID NO: 379995 - RNA, 22 nt, Human
gcaaaggccacuggggcgaugg

SEQ ID NO: 379996 - RNA, 22 nt, Human
gcucagagaaucagcagacacc

SEQ ID NO: 379997 - RNA, 22 nt, Human
acaggugugagaacaugccuug

SEQ ID NO: 379998 - RNA, 22 nt, Human
gaggggcucuuuaauaguaaca

SEQ ID NO: 379999 - RNA, 22 nt, Human
caucagaaugaauguucuggag

SEQ ID NO: 380000 - RNA, 22 nt, Human
agcugccauccgaggugucaga

SEQ ID NO: 380001 - RNA, 22 nt, Human
gcgaaaaauguguaaauauguu

SEQ ID NO: 380002 - RNA, 22 nt, Human
auucccaucgucaacuucacug

SEQ ID NO: 380003 - RNA, 22 nt, Human
caaguccuuuucuuggcucagg

SEQ ID NO: 380004 - RNA, 22 nt, Human
cuacagaaggagaaauggguaa

SEQ ID NO: 380005 - RNA, 22 nt, Human
caucagaacaaaucgguuaaga

SEQ ID NO: 380006 - RNA, 22 nt, Human
gggcagcagcaggaggucucug

SEQ ID NO: 380007 - RNA, 22 nt, Human
ccaggugugauuuggcaguguc

SEQ ID NO: 380008 - RNA, 22 nt, Human
agcagagcgccugcucagaggg

SEQ ID NO: 380009 - RNA, 21 nt, Human
ucagcuuugcaacugcacauc

SEQ ID NO: 380010 - RNA, 22 nt, Human
ugguggccuugauggcaucugc

SEQ ID NO: 380011 - RNA, 22 nt, Human
accugccuauggagccacaugg

SEQ ID NO: 380012 - RNA, 22 nt, Human
gcagagcauguccucaggacag

SEQ ID NO: 380013 - RNA, 22 nt, Human
ucccaggagcaccuuuugagcc

SEQ ID NO: 380014 - RNA, 22 nt, Human
aggccugacuugaauuuagggc

SEQ ID NO: 380015 - RNA, 22 nt, Human
gcccagcaggggauggcagcuc

SEQ ID NO: 380016 - RNA, 22 nt, Human
gagcaggaugggagcuggggcc

SEQ ID NO: 380017 - RNA, 22 nt, Human
gaugcaggauagcuucacccag

SEQ ID NO: 380018 - RNA, 22 nt, Human
acuauacaguauguacgugcac

SEQ ID NO: 380019 - RNA, 22 nt, Human
gaggucagucagaccaggguuu

SEQ ID NO: 380020 - RNA, 22 nt, Human
aaagauaauguuuccuuauucu

SEQ ID NO: 380021 - RNA, 22 nt, Human
aaugaacaggugaaugucagau

SEQ ID NO: 380022 - RNA, 21 nt, Human
ugcauaaagaaauacaaauac

SEQ ID NO: 380023 - RNA, 22 nt, Human
gagccagggcugugagcugagc

SEQ ID NO: 380024 - RNA, 22 nt, Human
uggcuuuacaucaaauugagua

SEQ ID NO: 380025 - RNA, 17 nt, Human
ucagagggaugagcagg

SEQ ID NO: 380026 - RNA, 22 nt, Human
auguauccuuauacacauuuau

SEQ ID NO: 380027 - RNA, 22 nt, Human
uggggcagaguaggauuuuggc

SEQ ID NO: 380028 - RNA, 22 nt, Human
uuucacaaacugaggagacaau

SEQ ID NO: 380029 - RNA, 22 nt, Human
gguggccuuucaguggaucagg

SEQ ID NO: 380030 - RNA, 22 nt, Human
cucuuuccaggguaccccaggu

SEQ ID NO: 380031 - RNA, 22 nt, Human
uuuaccaaauagauuaugucag

SEQ ID NO: 380032 - RNA, 22 nt, Human
gccucugcaauuacauugugcc

SEQ ID NO: 380033 - RNA, 22 nt, Human
uccaggagagguagaggguucc

SEQ ID NO: 380034 - RNA, 22 nt, Human
agaccaagaaaggaugaggauc

SEQ ID NO: 380035 - RNA, 22 nt, Human
auuauuauuguugauguuaggg

SEQ ID NO: 380036 - RNA, 21 nt, Human
gggcuggacaugguggcucau

SEQ ID NO: 380037 - RNA, 22 nt, Human
acuuaguauuuuucagcuuuga

SEQ ID NO: 380038 - RNA, 22 nt, Human
agucuucccugugccagagugu

SEQ ID NO: 380039 - RNA, 22 nt, Human
uuccuuaguugacugucuuagu

SEQ ID NO: 380040 - RNA, 22 nt, Human
ccaaaguccauaguuuacauua

SEQ ID NO: 380041 - RNA, 18 nt, Human
gggcauggaugcagcauc

SEQ ID NO: 380042 - RNA, 22 nt, Human
gggggcaguaaggauauggaaa

SEQ ID NO: 380043 - RNA, 22 nt, Human
cauguugaauggccuugauuuu

SEQ ID NO: 380044 - RNA, 22 nt, Human
gccagguggcugagcagcugca

SEQ ID NO: 380045 - RNA, 22 nt, Human
accugcaggcacaggugugcgc

SEQ ID NO: 380046 - RNA, 22 nt, Human
aggcucaguuugguuuccauug

SEQ ID NO: 380047 - RNA, 22 nt, Human
cugaggaguuuggguuguucaa

SEQ ID NO: 380048 - RNA, 22 nt, Human
cacugccuggaaggagagacau

SEQ ID NO: 380049 - RNA, 22 nt, Human
aguacauuuauuaaugguaaaa

SEQ ID NO: 380050 - RNA, 20 nt, Human
gagccuuccccucaccacug

SEQ ID NO: 380051 - RNA, 22 nt, Human
ggugaagggccuuaggagacag

SEQ ID NO: 380052 - RNA, 22 nt, Human
auucuucauacagacaaguccu

SEQ ID NO: 380053 - RNA, 22 nt, Human
uauuccaaaaucccaaacugcc

SEQ ID NO: 380054 - RNA, 23 nt, Human
uguaaaaugggguaguguuacca

SEQ ID NO: 380055 - RNA, 22 nt, Human
aagccagccagugccagucuua

SEQ ID NO: 380056 - RNA, 20 nt, Human
ugcagcuucaccugugucau

SEQ ID NO: 380057 - RNA, 22 nt, Human
agcagcaacuuauuuuucuuau

SEQ ID NO: 380058 - RNA, 22 nt, Human
uugaaaguuaucuagauucuga

SEQ ID NO: 380059 - RNA, 22 nt, Human
ccauggcauuuuaugugucuua

SEQ ID NO: 380060 - RNA, 22 nt, Human
ugacauuuuaucaauaucacag

SEQ ID NO: 380061 - RNA, 22 nt, Human
cauggauugaauauaaauuaga

SEQ ID NO: 380062 - RNA, 22 nt, Human
aagugagugguaaggagcaugg

SEQ ID NO: 380063 - RNA, 22 nt, Human
uaugucaaaguuaagaaauagg

SEQ ID NO: 380064 - RNA, 22 nt, Human
uucaggaugacaccauguccag

SEQ ID NO: 380065 - RNA, 22 nt, Human
agccacagcauguguguaugua

SEQ ID NO: 380066 - RNA, 22 nt, Human
uccuuuccaugcuucuagaggc

SEQ ID NO: 380067 - RNA, 23 nt, Human
ucaguuuuggcuguucaguguug

SEQ ID NO: 380068 - RNA, 23 nt, Human
uauggcuuacagugcuuuaggua

SEQ ID NO: 380069 - RNA, 22 nt, Human
ugcagaccucccauggcugccu

SEQ ID NO: 380070 - RNA, 22 nt, Human
cuggggggagcugcguccagca

SEQ ID NO: 380071 - RNA, 22 nt, Human
uucuuuugggaauuacguaugc

SEQ ID NO: 380072 - RNA, 22 nt, Human
ugucacauaggcaaaauguuuu

SEQ ID NO: 380073 - RNA, 21 nt, Human
gcagacugcccugcugucccc

SEQ ID NO: 380074 - RNA, 21 nt, Human
gaaaagcaagggaguagaaca

SEQ ID NO: 380075 - RNA, 22 nt, Human
aggugagguuugggagguguca

SEQ ID NO: 380076 - RNA, 22 nt, Human
uuucaguggguuuauuucaugu

SEQ ID NO: 380077 - RNA, 22 nt, Human
uugcucugauuagguggaaaca

SEQ ID NO: 380078 - RNA, 23 nt, Human
gugcugugagccccuuggccucc

SEQ ID NO: 380079 - RNA, 22 nt, Human
uuauccaaacuggugaaucauu

SEQ ID NO: 380080 - RNA, 18 nt, Human
gagucuuuguuacugcug

SEQ ID NO: 380081 - RNA, 22 nt, Human
cggcagagacggcgcuuugaac

SEQ ID NO: 380082 - RNA, 22 nt, Human
uacuuuuagccuauuugauucu

SEQ ID NO: 380083 - RNA, 22 nt, Human
auucauuugcuauuguguaugg

SEQ ID NO: 380084 - RNA, 22 nt, Human
ucagagaguuggaaagaauuaa

SEQ ID NO: 380085 - RNA, 22 nt, Human
acauuucuuugcuagacagcag

SEQ ID NO: 380086 - RNA, 22 nt, Human
agcuggaggauaacucacuucu

SEQ ID NO: 380087 - RNA, 22 nt, Human
caggccagugugcuucccaggc

SEQ ID NO: 380088 - RNA, 22 nt, Human
uugcaggauuuuagagaugaca

SEQ ID NO: 380089 - RNA, 22 nt, Human
acaagaauuuacauguagugga

SEQ ID NO: 380090 - RNA, 22 nt, Human
aaauuuaagaagugugugcgug

SEQ ID NO: 380091 - RNA, 22 nt, Human
cagacacagauaugcauauggc

SEQ ID NO: 380092 - RNA, 22 nt, Human
ccaugagcuucaacugacacag

SEQ ID NO: 380093 - RNA, 22 nt, Human
ccuccagggcagacggggagca

SEQ ID NO: 380094 - RNA, 22 nt, Human
cagaaguggccucagagggagu

SEQ ID NO: 380095 - RNA, 22 nt, Human
uauaaaauucucaguuuggggu

SEQ ID NO: 380096 - RNA, 22 nt, Human
gcaaaauuaaacuuagcaucau

SEQ ID NO: 380097 - RNA, 22 nt, Human
aaauaugaaugauaagaguuau

SEQ ID NO: 380098 - RNA, 22 nt, Human
gggucccaggaaggagcagugu

SEQ ID NO: 380099 - RNA, 22 nt, Human
ucaccuuagcuagaggaagaga

SEQ ID NO: 380100 - RNA, 20 nt, Human
uggcaucucucaauuguagg

SEQ ID NO: 380101 - RNA, 22 nt, Human
ucccagauucuucugugugggc

SEQ ID NO: 380102 - RNA, 22 nt, Human
ugccaggcgauugcuaucagca

SEQ ID NO: 380103 - RNA, 22 nt, Human
acccacgaagaugagcggcaug

SEQ ID NO: 380104 - RNA, 18 nt, Human
gccugcaggcacgggggu

SEQ ID NO: 380105 - RNA, 22 nt, Human
caaugaaagcaacugccuauaa

SEQ ID NO: 380106 - RNA, 22 nt, Human
agcacagauucugaagaguccu

SEQ ID NO: 380107 - RNA, 22 nt, Human
guacauguugguuguuuccagu

SEQ ID NO: 380108 - RNA, 22 nt, Human
cugcagccuaggugcagcuggg

SEQ ID NO: 380109 - RNA, 22 nt, Human
uggaaggcaugggaacuguucu

SEQ ID NO: 380110 - RNA, 22 nt, Human
cuccucccucuuugccacacau

SEQ ID NO: 380111 - RNA, 22 nt, Human
aguggcaggaaaguggaagaga

SEQ ID NO: 380112 - RNA, 17 nt, Human
ucaggcugugccuggua

SEQ ID NO: 380113 - RNA, 22 nt, Human
ggugauuuucgaguuucauguu

SEQ ID NO: 380114 - RNA, 22 nt, Human
uggcagcuggaucccaaggcag

SEQ ID NO: 380115 - RNA, 22 nt, Human
uaaagccaacacuuuacugcuc

SEQ ID NO: 380116 - RNA, 22 nt, Human
cuggcuccaucacugggugaug

SEQ ID NO: 380117 - RNA, 22 nt, Human
gcccaggacucagggugucgcg

SEQ ID NO: 380118 - RNA, 22 nt, Human
ugaagcugugggcaguggagcc

SEQ ID NO: 380119 - RNA, 22 nt, Human
aauuuguuaaaagugagugaca

SEQ ID NO: 380120 - RNA, 22 nt, Human
gaggcugcccaacuggagugga

SEQ ID NO: 380121 - RNA, 22 nt, Human
aguacaauuauauuuagauggu

SEQ ID NO: 380122 - RNA, 22 nt, Human
gcaggagccaggccgagcuggu

SEQ ID NO: 380123 - RNA, 22 nt, Human
ggugggcacccgagacuggauc

SEQ ID NO: 380124 - RNA, 22 nt, Human
ugccaggcacgugagaguggcc

SEQ ID NO: 380125 - RNA, 22 nt, Human
ccuuucucauuuuaagcauuag

SEQ ID NO: 380126 - RNA, 22 nt, Human
gaaaaaugagcugaugucaggg

SEQ ID NO: 380127 - RNA, 22 nt, Human
aaggcacucauucaaggagaua

SEQ ID NO: 380128 - RNA, 22 nt, Human
gcugucacaaauauuucucagc

SEQ ID NO: 380129 - RNA, 22 nt, Human
aagaauguuaguuucugauaca

SEQ ID NO: 380130 - RNA, 22 nt, Human
ucaagagaaggggaaauagacu

SEQ ID NO: 380131 - RNA, 22 nt, Human
uugucuguccaggcaccccaag

SEQ ID NO: 380132 - RNA, 22 nt, Human
aagauacugaugauguaggcua

SEQ ID NO: 380133 - RNA, 17 nt, Human
uggcagcugaaagcucu

SEQ ID NO: 380134 - RNA, 22 nt, Human
auuucaguguuuuaagaguuca

SEQ ID NO: 380135 - RNA, 18 nt, Human
gcaggugccacugcuguu

SEQ ID NO: 380136 - RNA, 22 nt, Human
ggcagucuuaucagcauuggac

SEQ ID NO: 380137 - RNA, 22 nt, Human
cagcuuuauuucacguguuugu

SEQ ID NO: 380138 - RNA, 22 nt, Human
agauuucccucuuguauuugca

SEQ ID NO: 380139 - RNA, 22 nt, Human
ggcuucucgugccgaagcaaga

SEQ ID NO: 380140 - RNA, 22 nt, Human
uuuauucuugagagugagaaga

SEQ ID NO: 380141 - RNA, 22 nt, Human
cuguggaaggccuguccugaaa

SEQ ID NO: 380142 - RNA, 22 nt, Human
aggaaaugcugaugcuccugga

SEQ ID NO: 380143 - RNA, 22 nt, Human
aggccuguuccuuccugggcac

SEQ ID NO: 380144 - RNA, 17 nt, Human
uggagcugcguguguuc

SEQ ID NO: 380145 - RNA, 22 nt, Human
auuauaggcuugagccaccgug

SEQ ID NO: 380146 - RNA, 22 nt, Human
agggcacaagacucugagcccc

SEQ ID NO: 380147 - RNA, 22 nt, Human
gccuggagugguccugcugccc

SEQ ID NO: 380148 - RNA, 22 nt, Human
agauacauuaguaguuacuugu

SEQ ID NO: 380149 - RNA, 21 nt, Human
cuggacugaggagacagucgc

SEQ ID NO: 380150 - RNA, 21 nt, Human
agacagagugcagucuacaua

SEQ ID NO: 380151 - RNA, 22 nt, Human
ucaguaaaugaaugaauauaug

SEQ ID NO: 380152 - RNA, 22 nt, Human
cuggagcaggcuugucccagcu

SEQ ID NO: 380153 - RNA, 23 nt, Human
uuccacaaugaaaauaaagcagg

SEQ ID NO: 380154 - RNA, 23 nt, Human
cagagcuggcucagagcugccug

SEQ ID NO: 380155 - RNA, 22 nt, Human
aggccugcagcaggagcaaacc

SEQ ID NO: 380156 - RNA, 22 nt, Human
aagggcucugcugucucucccc

SEQ ID NO: 380157 - RNA, 22 nt, Human
gagucugagucuaauggcccca

SEQ ID NO: 380158 - RNA, 18 nt, Human
ucuuccaacacugacacc

SEQ ID NO: 380159 - RNA, 22 nt, Human
caaggccagagccagcgauaag

SEQ ID NO: 380160 - RNA, 22 nt, Human
caguggccugagccaggcuucc

SEQ ID NO: 380161 - RNA, 22 nt, Human
cucacugacgaggaagcugaga

SEQ ID NO: 380162 - RNA, 19 nt, Human
ucaggaguuaguugugcuc

SEQ ID NO: 380163 - RNA, 22 nt, Human
ugccugggccucugaggaaggc

SEQ ID NO: 380164 - RNA, 22 nt, Human
ccaggagagcaaaggucacucu

SEQ ID NO: 380165 - RNA, 22 nt, Human
gcugcccagacauugaaucagg

SEQ ID NO: 380166 - RNA, 22 nt, Human
cuggagcucuguguguuccuga

SEQ ID NO: 380167 - RNA, 22 nt, Human
acuaaggaauaugacaaacuca

SEQ ID NO: 380168 - RNA, 22 nt, Human
cuccagggaggucugcaggacu

SEQ ID NO: 380169 - RNA, 21 nt, Human
cacugcagccuugaccugggc

SEQ ID NO: 380170 - RNA, 22 nt, Human
cacaggagaacccacagauucu

SEQ ID NO: 380171 - RNA, 22 nt, Human
agggagcuguggucagcucagu

SEQ ID NO: 380172 - RNA, 19 nt, Human
cugaggugcaguaagaggc

SEQ ID NO: 380173 - RNA, 22 nt, Human
guucuucagaggggaaagaacc

SEQ ID NO: 380174 - RNA, 22 nt, Human
accuuucaaaguggcuaucacu

SEQ ID NO: 380175 - RNA, 22 nt, Human
cagcaguggccaucuguguggu

SEQ ID NO: 380176 - RNA, 22 nt, Human
uuuccauauucugcgucugcca

SEQ ID NO: 380177 - RNA, 22 nt, Human
uguguccuuuggaggaucagcg

SEQ ID NO: 380178 - RNA, 22 nt, Human
uggcaggaaaaagggccagagg

SEQ ID NO: 380179 - RNA, 22 nt, Human
gggcagcugcagggauggugac

SEQ ID NO: 380180 - RNA, 23 nt, Human
uccuucagagccucccuccaagc

SEQ ID NO: 380181 - RNA, 22 nt, Human
gaauuucacaaggugaggauaa

SEQ ID NO: 380182 - RNA, 22 nt, Human
aaaguauucuugacuguuuuuc

SEQ ID NO: 380183 - RNA, 22 nt, Human
ugaguuuugucuugcuagaagu

SEQ ID NO: 380184 - RNA, 18 nt, Human
agaugaaagcaaaugaca

SEQ ID NO: 380185 - RNA, 22 nt, Human
ggcugcugguggaaugguaggc

SEQ ID NO: 380186 - RNA, 22 nt, Human
aggcuggcccuacuggcugccu

SEQ ID NO: 380187 - RNA, 22 nt, Human
uuagaaaucaccucugaagauc

SEQ ID NO: 380188 - RNA, 22 nt, Human
uaaagacaaacccacuaggguu

SEQ ID NO: 380189 - RNA, 22 nt, Human
aaauccuaaugacaaguuuagu

SEQ ID NO: 380190 - RNA, 22 nt, Human
aggagagucuugagucacuggu

SEQ ID NO: 380191 - RNA, 22 nt, Human
agggaggaucugcuccuugucu

SEQ ID NO: 380192 - RNA, 21 nt, Human
ugggggagaauugguugcuuu

SEQ ID NO: 380193 - RNA, 19 nt, Human
accaggcuuauggucagug

SEQ ID NO: 380194 - RNA, 20 nt, Human
aggcugccaggucucacauc

SEQ ID NO: 380195 - RNA, 22 nt, Human
auuuaguguguauugcuauuau

SEQ ID NO: 380196 - RNA, 22 nt, Human
gaggaagggcugccugccgggc

SEQ ID NO: 380197 - RNA, 22 nt, Human
aaagucauggaaaaucuuggaa

SEQ ID NO: 380198 - RNA, 22 nt, Human
ccacagggauaggaauggggcu

SEQ ID NO: 380199 - RNA, 22 nt, Human
gaggaggcuuccgggaggcacg

SEQ ID NO: 380200 - RNA, 22 nt, Human
agcagcugguaggaguggccac

SEQ ID NO: 380201 - RNA, 20 nt, Human
uucauucauuccacaacuuc

SEQ ID NO: 380202 - RNA, 22 nt, Human
cugccacuagcuuucacaucuu

SEQ ID NO: 380203 - RNA, 22 nt, Human
gcaggagcuggaaagugauguu

SEQ ID NO: 380204 - RNA, 22 nt, Human
gugcuugggggaaguaacagac

SEQ ID NO: 380205 - RNA, 22 nt, Human
ggccagagagccgcuguuagga

SEQ ID NO: 380206 - RNA, 22 nt, Human
agcaucuggucaugagugagaa

SEQ ID NO: 380207 - RNA, 22 nt, Human
caggcagcaggagcccugcucg

SEQ ID NO: 380208 - RNA, 22 nt, Human
gggcauggugaugugcaccugu

SEQ ID NO: 380209 - RNA, 22 nt, Human
ccugucugaggaggugcucuuu

SEQ ID NO: 380210 - RNA, 22 nt, Human
ccuuucucuuggauaccgauug

SEQ ID NO: 380211 - RNA, 22 nt, Human
gucccuggggaaucagcuggag

SEQ ID NO: 380212 - RNA, 21 nt, Human
ccuuuacaauuuugcauuccu

SEQ ID NO: 380213 - RNA, 22 nt, Human
aagauuuccauuucuagcucau

SEQ ID NO: 380214 - RNA, 19 nt, Human
agccagugagccucugggu

SEQ ID NO: 380215 - RNA, 22 nt, Human
ucccagagcagaugugcuaaag

SEQ ID NO: 380216 - RNA, 22 nt, Human
auacagauguugaauguuauau

SEQ ID NO: 380217 - RNA, 20 nt, Human
cuggguggcaagcaaggggg

SEQ ID NO: 380218 - RNA, 22 nt, Human
uucaggauuauacucucuuccc

SEQ ID NO: 380219 - RNA, 22 nt, Human
ugcuuuauucgacaucugguag

SEQ ID NO: 380220 - RNA, 22 nt, Human
gccacccccaaguagguggucu

SEQ ID NO: 380221 - RNA, 22 nt, Human
agcaggaacucagggaguucuc

SEQ ID NO: 380222 - RNA, 22 nt, Human
gaaaugugcagaauguguuaga

SEQ ID NO: 380223 - RNA, 22 nt, Human
ggcccacacugacagcugagcu

SEQ ID NO: 380224 - RNA, 21 nt, Human
agcuuguguguaucacagugu

SEQ ID NO: 380225 - RNA, 22 nt, Human
acuuugcagggcuugauaucca

SEQ ID NO: 380226 - RNA, 22 nt, Human
gcugggcaccggagagacccca

SEQ ID NO: 380227 - RNA, 22 nt, Human
acaggcuuuuuuagaaugacau

SEQ ID NO: 380228 - RNA, 22 nt, Human
uggcagugggaagcuggaaguc

SEQ ID NO: 380229 - RNA, 22 nt, Human
gcaaaauuuacacuccuucuuc

SEQ ID NO: 380230 - RNA, 22 nt, Human
gaaggaaaacagaucugccuga

SEQ ID NO: 380231 - RNA, 22 nt, Human
cagcaucaccgccauuucugau

SEQ ID NO: 380232 - RNA, 22 nt, Human
uacagaaguaaauaccaaaagc

SEQ ID NO: 380233 - RNA, 22 nt, Human
accucugcaaugcaaugucaug

SEQ ID NO: 380234 - RNA, 22 nt, Human
aagcugccuuccaugugaggaa

SEQ ID NO: 380235 - RNA, 19 nt, Human
ggcuggcaagugacagugu

SEQ ID NO: 380236 - RNA, 22 nt, Human
uguuucauguggacauaguugu

SEQ ID NO: 380237 - RNA, 22 nt, Human
uuccuccacgugacaggagcca

SEQ ID NO: 380238 - RNA, 22 nt, Human
guaaaguucuacuagaaucaac

SEQ ID NO: 380239 - RNA, 22 nt, Human
accaaaggcagagcugaacacu

SEQ ID NO: 380240 - RNA, 22 nt, Human
aggccuggguguucaccagaag

SEQ ID NO: 380241 - RNA, 22 nt, Human
uccagggauguccuguagcacu

SEQ ID NO: 380242 - RNA, 22 nt, Human
gccuucugauugcuggacugac

SEQ ID NO: 380243 - RNA, 22 nt, Human
agggucagcuggcugucagggg

SEQ ID NO: 380244 - RNA, 22 nt, Human
cagaagcagugagagaugugca

SEQ ID NO: 380245 - RNA, 22 nt, Human
gagggcuccacacgggcccagc

SEQ ID NO: 380246 - RNA, 22 nt, Human
ugcauaaagugccauaguauua

SEQ ID NO: 380247 - RNA, 22 nt, Human
agaaggcagaugggacggagca

SEQ ID NO: 380248 - RNA, 22 nt, Human
uuucacauguggaaugccaggu

SEQ ID NO: 380249 - RNA, 21 nt, Human
agucccauccgguaagcaagc

SEQ ID NO: 380250 - RNA, 22 nt, Human
uggcucagaaggcugccuucac

SEQ ID NO: 380251 - RNA, 22 nt, Human
gcacugaaauuauaugcauuug

SEQ ID NO: 380252 - RNA, 22 nt, Human
ugggcucugcaucagugcccau

SEQ ID NO: 380253 - RNA, 22 nt, Human
guuauguacuuuuuaaaucuug

SEQ ID NO: 380254 - RNA, 22 nt, Human
ccuguucagagcuaagcaucau

SEQ ID NO: 380255 - RNA, 22 nt, Human
uauagccauuuccaguggcauc

SEQ ID NO: 380256 - RNA, 22 nt, Human
gagccaggguuugaaacuagac

SEQ ID NO: 380257 - RNA, 22 nt, Human
gagcucuggcagggcaggucug

SEQ ID NO: 380258 - RNA, 22 nt, Human
gauuuuauauggcauacugugg

SEQ ID NO: 380259 - RNA, 22 nt, Human
aauucuagcauugugaaaauau

SEQ ID NO: 380260 - RNA, 22 nt, Human
aaaaagguugauccagauuagg

SEQ ID NO: 380261 - RNA, 22 nt, Human
ggagugggaacaaugacauggu

SEQ ID NO: 380262 - RNA, 20 nt, Human
cgcccaggagggcccaugug

SEQ ID NO: 380263 - RNA, 22 nt, Human
aaucaguuaaauauugaguaca

SEQ ID NO: 380264 - RNA, 22 nt, Human
auuuacagaugaugcuauuuga

SEQ ID NO: 380265 - RNA, 19 nt, Human
gggaccugacuaauuggca

SEQ ID NO: 380266 - RNA, 22 nt, Human
agagccacugggagacagagca

SEQ ID NO: 380267 - RNA, 23 nt, Human
aggauccugguacaggagcagag

SEQ ID NO: 380268 - RNA, 19 nt, Human
uggcauuuggaggcaaccu

SEQ ID NO: 380269 - RNA, 22 nt, Human
uccuucuuugacaaguggcaga

SEQ ID NO: 380270 - RNA, 22 nt, Human
ugagccuggccugcagagacca

SEQ ID NO: 380271 - RNA, 17 nt, Human
uucucuuccuggauagu

SEQ ID NO: 380272 - RNA, 22 nt, Human
cugcugagcccuggcacaggug

SEQ ID NO: 380273 - RNA, 20 nt, Human
aggccaggaaauguaguucu

SEQ ID NO: 380274 - RNA, 23 nt, Human
uggggagaguuacccuggaagcg

SEQ ID NO: 380275 - RNA, 22 nt, Human
cuggcucauuuuagcaucaggu

SEQ ID NO: 380276 - RNA, 22 nt, Human
gagucaccuugggucagcgaua

SEQ ID NO: 380277 - RNA, 20 nt, Human
aggagaugauccagagucag

SEQ ID NO: 380278 - RNA, 21 nt, Human
aaaaagcuggggcaugcaugc

SEQ ID NO: 380279 - RNA, 22 nt, Human
auuuuuaugacaaaccauccuc

SEQ ID NO: 380280 - RNA, 22 nt, Human
uucagcaagaccaccauguacc

SEQ ID NO: 380281 - RNA, 22 nt, Human
uauaaaacagaaagcacuaccu

SEQ ID NO: 380282 - RNA, 22 nt, Human
aucuaucccaguuuaacucauu

SEQ ID NO: 380283 - RNA, 22 nt, Human
uggccuuccuggugacucauga

SEQ ID NO: 380284 - RNA, 22 nt, Human
cagucacauugcccugcauuua

SEQ ID NO: 380285 - RNA, 22 nt, Human
caggaggcagagguugcaguga

SEQ ID NO: 380286 - RNA, 22 nt, Human
uuuucuuacugucugugauccu

SEQ ID NO: 380287 - RNA, 22 nt, Human
cucuggagcauuucaccuacau

SEQ ID NO: 380288 - RNA, 22 nt, Human
uggugccuugggccuacagcgc

SEQ ID NO: 380289 - RNA, 22 nt, Human
caguuucugggcguucacaggu

SEQ ID NO: 380290 - RNA, 22 nt, Human
cacucacuuauuucuaacagaa

SEQ ID NO: 380291 - RNA, 22 nt, Human
cacugaagcuuucauucucuug

SEQ ID NO: 380292 - RNA, 22 nt, Human
gcagggcugcagagggcacugu

SEQ ID NO: 380293 - RNA, 22 nt, Human
caggagugagaugcgaucacuu

SEQ ID NO: 380294 - RNA, 22 nt, Human
cagaggccaccuguggccacug

SEQ ID NO: 380295 - RNA, 22 nt, Human
auguaucagauaaagcaugugg

SEQ ID NO: 380296 - RNA, 22 nt, Human
ccugggagguggagguugcagu

SEQ ID NO: 380297 - RNA, 22 nt, Human
uaucugagaaagaagcaccaga

SEQ ID NO: 380298 - RNA, 22 nt, Human
uagccaggucacacuguguguu

SEQ ID NO: 380299 - RNA, 21 nt, Human
cagcuucuucugugaccuggu

SEQ ID NO: 380300 - RNA, 22 nt, Human
cugcuuugaggggcucuguaua

SEQ ID NO: 380301 - RNA, 22 nt, Human
ucucugucugagccuggcagac

SEQ ID NO: 380302 - RNA, 22 nt, Human
uacagauacagaucuagauaca

SEQ ID NO: 380303 - RNA, 22 nt, Human
cuguguggccucaagccagccu

SEQ ID NO: 380304 - RNA, 22 nt, Human
ccagcucuagccccauguggcu

SEQ ID NO: 380305 - RNA, 22 nt, Human
uagaugcuguagaaauacuuau

SEQ ID NO: 380306 - RNA, 22 nt, Human
caugccaguuuugagaugcacc

SEQ ID NO: 380307 - RNA, 22 nt, Human
aacauugcagcuuaauugcagg

SEQ ID NO: 380308 - RNA, 22 nt, Human
gacccaggaagcuacuucuggu

SEQ ID NO: 380309 - RNA, 22 nt, Human
uuuccucauuuaucugcuggga

SEQ ID NO: 380310 - RNA, 22 nt, Human
cagaguccuggacacagagaca

SEQ ID NO: 380311 - RNA, 22 nt, Human
agccacagagcaggagaccuuu

SEQ ID NO: 380312 - RNA, 22 nt, Human
uuuuagcacuaagugauaugcu

SEQ ID NO: 380313 - RNA, 22 nt, Human
caggauccuggcugcauggacg

SEQ ID NO: 380314 - RNA, 20 nt, Human
ucauuacagugcuaagaugu

SEQ ID NO: 380315 - RNA, 22 nt, Human
cugggaggacaacuuggagcuc

SEQ ID NO: 380316 - RNA, 22 nt, Human
uacaagaaugucuuaaaagcuc

SEQ ID NO: 380317 - RNA, 22 nt, Human
augguguagcaugugauaugac

SEQ ID NO: 380318 - RNA, 22 nt, Human
caaacauucaaguacaagucuu

SEQ ID NO: 380319 - RNA, 19 nt, Human
ugucucagugucccuuccu

SEQ ID NO: 380320 - RNA, 22 nt, Human
caggcagaugcugacaagaguu

SEQ ID NO: 380321 - RNA, 22 nt, Human
gggcugagggguaucucauggg

SEQ ID NO: 380322 - RNA, 22 nt, Human
agcagccacccagcugcucauu

SEQ ID NO: 380323 - RNA, 22 nt, Human
gaggcauggccugaggcuagga

SEQ ID NO: 380324 - RNA, 22 nt, Human
ugcacagcgggugucugucagg

SEQ ID NO: 380325 - RNA, 22 nt, Human
caagagcugaggcuggagaggu

SEQ ID NO: 380326 - RNA, 22 nt, Human
ggcagcuaguuuaagaaagagg

SEQ ID NO: 380327 - RNA, 22 nt, Human
uagacacauccguggaagcuuc

SEQ ID NO: 380328 - RNA, 22 nt, Human
cugggcagugcagcuauagaac

SEQ ID NO: 380329 - RNA, 19 nt, Human
agcagccaucgaccaugga

SEQ ID NO: 380330 - RNA, 22 nt, Human
acagaaggcggggacaaggcgg

SEQ ID NO: 380331 - RNA, 22 nt, Human
ugcacacacgcggcacaucugu

SEQ ID NO: 380332 - RNA, 22 nt, Human
cauacuuucuuuuucacgcaua

SEQ ID NO: 380333 - RNA, 22 nt, Human
gucaggggccaugggccaagga

SEQ ID NO: 380334 - RNA, 22 nt, Human
ggaggccaaggcagguggauca

SEQ ID NO: 380335 - RNA, 22 nt, Human
auuucccagcuuugaucaguuu

SEQ ID NO: 380336 - RNA, 22 nt, Human
aggugcuagguguguaguggag

SEQ ID NO: 380337 - RNA, 22 nt, Human
cucagagaaccuaagcggagga

SEQ ID NO: 380338 - RNA, 20 nt, Human
cucuccucacccgugucagg

SEQ ID NO: 380339 - RNA, 22 nt, Human
ugaacucgggaggaggcugcag

SEQ ID NO: 380340 - RNA, 22 nt, Human
aggagcugagucagcccgacag

SEQ ID NO: 380341 - RNA, 22 nt, Human
agagugauggguugugcugacc

SEQ ID NO: 380342 - RNA, 22 nt, Human
aggccagguuccucaaucuuga

SEQ ID NO: 380343 - RNA, 18 nt, Human
uuugcaaaggaaguaugg

SEQ ID NO: 380344 - RNA, 22 nt, Human
ucaggaucaggggccuuuccuu

SEQ ID NO: 380345 - RNA, 23 nt, Human
uugauuucaaaugcagagaacac

SEQ ID NO: 380346 - RNA, 22 nt, Human
cggggacacacuggcagcuccu

SEQ ID NO: 380347 - RNA, 22 nt, Human
cuucccacuaguaucacagagc

SEQ ID NO: 380348 - RNA, 22 nt, Human
ucacagugaugacgugggagca

SEQ ID NO: 380349 - RNA, 22 nt, Human
agcuuuaucccuugcccaucga

SEQ ID NO: 380350 - RNA, 22 nt, Human
agcaggcuaagggaccuguuua

SEQ ID NO: 380351 - RNA, 22 nt, Human
ggaggggauuuaguagaugcua

SEQ ID NO: 380352 - RNA, 22 nt, Human
caguuucuuaucuucaaaauug

SEQ ID NO: 380353 - RNA, 22 nt, Human
caggaaagaaaugagaacacca

SEQ ID NO: 380354 - RNA, 22 nt, Human
uacaacauguaaagugguuuaa

SEQ ID NO: 380355 - RNA, 22 nt, Human
ucccagaggcuccagucucuau

SEQ ID NO: 380356 - RNA, 22 nt, Human
uucaggauggcggauguugggg

SEQ ID NO: 380357 - RNA, 22 nt, Human
aggguggcaguuacuggagcaa

SEQ ID NO: 380358 - RNA, 20 nt, Human
gcagggcaagggauaugaaa

SEQ ID NO: 380359 - RNA, 22 nt, Human
aaggaaagacauauaaaugacu

SEQ ID NO: 380360 - RNA, 22 nt, Human
uaauauguguuacugacuuuuu

SEQ ID NO: 380361 - RNA, 22 nt, Human
cagcugccccauaaaucacagu

SEQ ID NO: 380362 - RNA, 22 nt, Human
cuuaaaaucuggcaguuagcua

SEQ ID NO: 380363 - RNA, 22 nt, Human
guauacauagaugaugaacaag

SEQ ID NO: 380364 - RNA, 22 nt, Human
agcagccagugggagugauaca

SEQ ID NO: 380365 - RNA, 22 nt, Human
auuagggcuggaugcaaggaaa

SEQ ID NO: 380366 - RNA, 22 nt, Human
uugauuuauagaauguucaagc

SEQ ID NO: 380367 - RNA, 22 nt, Human
uuucuucagccacuccaaacug

SEQ ID NO: 380368 - RNA, 22 nt, Human
agcaaucaccaccucuauauuu

SEQ ID NO: 380369 - RNA, 22 nt, Human
uggcagagcuggcugcggauga

SEQ ID NO: 380370 - RNA, 22 nt, Human
guggccagcaagugcugccucu

SEQ ID NO: 380371 - RNA, 22 nt, Human
acagggcagagaggcaggcuug

SEQ ID NO: 380372 - RNA, 17 nt, Human
ucaggauguagcaguag

SEQ ID NO: 380373 - RNA, 17 nt, Human
ggagagugggaauggcc

SEQ ID NO: 380374 - RNA, 22 nt, Human
cagggcagaaggcacucuacuc

SEQ ID NO: 380375 - RNA, 22 nt, Human
ggugcccaccugucuuccugga

SEQ ID NO: 380376 - RNA, 22 nt, Human
ugcucuggguccugggccuccu

SEQ ID NO: 380377 - RNA, 22 nt, Human
ggcuuccuggggccuccugcaa

SEQ ID NO: 380378 - RNA, 22 nt, Human
gucaccaggucugaugcagcca

SEQ ID NO: 380379 - RNA, 23 nt, Human
uggcuucugccccauucucucca

SEQ ID NO: 380380 - RNA, 22 nt, Human
cccuggaggaaaaucugaggcu

SEQ ID NO: 380381 - RNA, 22 nt, Human
uagugaaacaguuaucaaucug

SEQ ID NO: 380382 - RNA, 22 nt, Human
gcaggggcuacucugagcuucc

SEQ ID NO: 380383 - RNA, 19 nt, Human
ggcauccagaacuaccagu

SEQ ID NO: 380384 - RNA, 22 nt, Human
caaaggcuuccacugcauccuu

SEQ ID NO: 380385 - RNA, 21 nt, Human
uccuccuucaaguccuggccu

SEQ ID NO: 380386 - RNA, 22 nt, Human
aaucagaaaauucaguggaauu

SEQ ID NO: 380387 - RNA, 22 nt, Human
uggacagguuugggugccuguu

SEQ ID NO: 380388 - RNA, 22 nt, Human
uuuaaauggcauuuucccagau

SEQ ID NO: 380389 - RNA, 22 nt, Human
auuucuguugcuuauaaauuac

SEQ ID NO: 380390 - RNA, 17 nt, Human
uagagcugguucaggag

SEQ ID NO: 380391 - RNA, 22 nt, Human
cuccacagccccuccaguggca

SEQ ID NO: 380392 - RNA, 22 nt, Human
gacacauagaucuaucucacuc

SEQ ID NO: 380393 - RNA, 22 nt, Human
ccccagccagcaggaccucuga

SEQ ID NO: 380394 - RNA, 22 nt, Human
ugcaggaacugggagggauagu

SEQ ID NO: 380395 - RNA, 22 nt, Human
agaagagccuggggaccauggc

SEQ ID NO: 380396 - RNA, 22 nt, Human
uuucuucagccuucacaaccug

SEQ ID NO: 380397 - RNA, 22 nt, Human
agguauagaauugaaaggguuu

SEQ ID NO: 380398 - RNA, 22 nt, Human
caguaugagaguugaaucaagg

SEQ ID NO: 380399 - RNA, 22 nt, Human
agcaggcuuucaagagucuucu

SEQ ID NO: 380400 - RNA, 22 nt, Human
ggcagcacugcagcuuguuggg

SEQ ID NO: 380401 - RNA, 22 nt, Human
cugaaggaagcagaagcgaggu

SEQ ID NO: 380402 - RNA, 22 nt, Human
ccagagagaaaauggagggcca

SEQ ID NO: 380403 - RNA, 22 nt, Human
cagcacaguacaaggcacggau

SEQ ID NO: 380404 - RNA, 22 nt, Human
agggcugcuauguugauucaga

SEQ ID NO: 380405 - RNA, 22 nt, Human
cuucaagauauuucuagaauca

SEQ ID NO: 380406 - RNA, 22 nt, Human
uuucuguaauuaaaagggcagg

SEQ ID NO: 380407 - RNA, 22 nt, Human
ucugagggcuugaggggaagua

SEQ ID NO: 380408 - RNA, 22 nt, Human
ugaacgcagguccacauggcuc

SEQ ID NO: 380409 - RNA, 22 nt, Human
aaaauguguuuaugcauuucgu

SEQ ID NO: 380410 - RNA, 22 nt, Human
uauaucaccaaaaacaguucug

SEQ ID NO: 380411 - RNA, 22 nt, Human
acauguauugacauuauauucu

SEQ ID NO: 380412 - RNA, 22 nt, Human
cugagccauccauaccagcuua

SEQ ID NO: 380413 - RNA, 22 nt, Human
ugagggaguuggguguauagga

SEQ ID NO: 380414 - RNA, 18 nt, Human
cugaaggauccaggugua

SEQ ID NO: 380415 - RNA, 22 nt, Human
gcugcaggggggucuggacuug

SEQ ID NO: 380416 - RNA, 22 nt, Human
cacauuuaaagguugaagcuga

SEQ ID NO: 380417 - RNA, 22 nt, Human
ugggagcaagcuggugcuggag

SEQ ID NO: 380418 - RNA, 22 nt, Human
ggccucugcccucacuccuguc

SEQ ID NO: 380419 - RNA, 22 nt, Human
auguauaaugcuaauuagcuag

SEQ ID NO: 380420 - RNA, 22 nt, Human
uacaaaugaccauagccacuua

SEQ ID NO: 380421 - RNA, 22 nt, Human
auuucaguguugguuagcaagc

SEQ ID NO: 380422 - RNA, 22 nt, Human
gaguccaggcucagaaacccgu

SEQ ID NO: 380423 - RNA, 22 nt, Human
ugcaggaaugagguucucaguu

SEQ ID NO: 380424 - RNA, 22 nt, Human
gaaaucugaacucuguauccuu

SEQ ID NO: 380425 - RNA, 22 nt, Human
uuauuagguuauucucuguacu

SEQ ID NO: 380426 - RNA, 22 nt, Human
uaauccaaaacugaaucugugg

SEQ ID NO: 380427 - RNA, 22 nt, Human
cagaaaauaaaguuucuacgca

SEQ ID NO: 380428 - RNA, 22 nt, Human
ucuguucaguugauguaguuuu

SEQ ID NO: 380429 - RNA, 22 nt, Human
cagaggaggcgguauacacugc

SEQ ID NO: 380430 - RNA, 22 nt, Human
uguccuuuuggcugucuauggu

SEQ ID NO: 380431 - RNA, 22 nt, Human
augguuuuucaaguauucagaa

SEQ ID NO: 380432 - RNA, 23 nt, Human
aagaaugcuucugaagagcugcc

SEQ ID NO: 380433 - RNA, 22 nt, Human
augcaguguuuggaagcuuaag

SEQ ID NO: 380434 - RNA, 22 nt, Human
cugcagagaauuguggggcuuc

SEQ ID NO: 380435 - RNA, 22 nt, Human
cugccuggcuaaacucaagucg

SEQ ID NO: 380436 - RNA, 21 nt, Human
uuuaaagaauaggaagggagg

SEQ ID NO: 380437 - RNA, 22 nt, Human
auagcuuuacagaagaguuuag

SEQ ID NO: 380438 - RNA, 22 nt, Human
cagcucuguaaauuccuucauc

SEQ ID NO: 380439 - RNA, 22 nt, Human
uaaggccaauuacauauguuca

SEQ ID NO: 380440 - RNA, 22 nt, Human
agcagugaugcaugacagccua

SEQ ID NO: 380441 - RNA, 22 nt, Human
agucuccuuggccucaaugccu

SEQ ID NO: 380442 - RNA, 18 nt, Human
uggaggcagaguucuggc

SEQ ID NO: 380443 - RNA, 22 nt, Human
uaaaguuuguagcaauugauau

SEQ ID NO: 380444 - RNA, 22 nt, Human
guuauaaaaugcacaguuguuu

SEQ ID NO: 380445 - RNA, 22 nt, Human
cauggccugccuccuccuggug

SEQ ID NO: 380446 - RNA, 22 nt, Human
agggagcucuaaguagagggac

SEQ ID NO: 380447 - RNA, 22 nt, Human
guggcugcagagggcacagcau

SEQ ID NO: 380448 - RNA, 22 nt, Human
uccuugaauauaauaacaguag

SEQ ID NO: 380449 - RNA, 22 nt, Human
cugagcugggacucaguagcaa

SEQ ID NO: 380450 - RNA, 22 nt, Human
caggcagaagaaguggaaggac

SEQ ID NO: 380451 - RNA, 22 nt, Human
aaaggccauuacuugcuuuuag

SEQ ID NO: 380452 - RNA, 22 nt, Human
aggaaggguucuuugugaaaga

SEQ ID NO: 380453 - RNA, 22 nt, Human
uauuaucauuaacuguugaauu

SEQ ID NO: 380454 - RNA, 21 nt, Human
agcaacucugacuagaugagg

SEQ ID NO: 380455 - RNA, 19 nt, Human
cccagcuugaccaccugcu

SEQ ID NO: 380456 - RNA, 22 nt, Human
gugaauaaucacccuucuggau

SEQ ID NO: 380457 - RNA, 22 nt, Human
aaucaguuguccaaaguucaca

SEQ ID NO: 380458 - RNA, 22 nt, Human
aauuucuccaagaaugcuuaga

SEQ ID NO: 380459 - RNA, 22 nt, Human
uacaguaaagcugcuaugaauu

SEQ ID NO: 380460 - RNA, 22 nt, Human
uaggaaaacgugauuuucucac

SEQ ID NO: 380461 - RNA, 22 nt, Human
aagcuggacucugccauuuacu

SEQ ID NO: 380462 - RNA, 22 nt, Human
gaggagaggggcucccaagagc

SEQ ID NO: 380463 - RNA, 22 nt, Human
ucuggcucauaggaaggccauu

SEQ ID NO: 380464 - RNA, 22 nt, Human
uagggcucacugagaugaauau

SEQ ID NO: 380465 - RNA, 22 nt, Human
ucucugagcgcauuccuccggc

SEQ ID NO: 380466 - RNA, 22 nt, Human
cagccccucccucaggcaggug

SEQ ID NO: 380467 - RNA, 22 nt, Human
agucucugugagcucccaaugg

SEQ ID NO: 380468 - RNA, 22 nt, Human
augaagucuagcaagcauugaa

SEQ ID NO: 380469 - RNA, 22 nt, Human
caguggcugugaccagggaccu

SEQ ID NO: 380470 - RNA, 22 nt, Human
gccaccagccccaugcgcugug

SEQ ID NO: 380471 - RNA, 22 nt, Human
aagaaauuaaggaaugcaacga

SEQ ID NO: 380472 - RNA, 23 nt, Human
ugcugggguaguuuguggcacag

SEQ ID NO: 380473 - RNA, 22 nt, Human
uuggaucaaauuucaugcuguc

SEQ ID NO: 380474 - RNA, 22 nt, Human
aggcucagugcaaaucauucug

SEQ ID NO: 380475 - RNA, 22 nt, Human
gacuuuuagaauggugaggaau

SEQ ID NO: 380476 - RNA, 22 nt, Human
cccaggaggccaagguugcagu

SEQ ID NO: 380477 - RNA, 22 nt, Human
ugugcaguuucuauguugucca

SEQ ID NO: 380478 - RNA, 22 nt, Human
uggcagggugggcuucagcccc

SEQ ID NO: 380479 - RNA, 22 nt, Human
gaggcugcaggcaaugcugccc

SEQ ID NO: 380480 - RNA, 22 nt, Human
ugggcagaggcagcagaaaccu

SEQ ID NO: 380481 - RNA, 22 nt, Human
auucuucaucacuaccuuguga

SEQ ID NO: 380482 - RNA, 22 nt, Human
ugaacucucucaagugacagaa

SEQ ID NO: 380483 - RNA, 22 nt, Human
gaaauagacacuuucuaugaau

SEQ ID NO: 380484 - RNA, 22 nt, Human
ucacaugcuugaggaaagaaaa

SEQ ID NO: 380485 - RNA, 17 nt, Human
ucucuuucccuuucugc

SEQ ID NO: 380486 - RNA, 22 nt, Human
aggcaggcucaggcccaugcuu

SEQ ID NO: 380487 - RNA, 22 nt, Human
cccuucucuuucacucacuauu

SEQ ID NO: 380488 - RNA, 22 nt, Human
cagaggaaguuccuugaugaga

SEQ ID NO: 380489 - RNA, 22 nt, Human
caacuuuucugugaauuuaagu

SEQ ID NO: 380490 - RNA, 22 nt, Human
uuuuaacuuaaaauacauagau

SEQ ID NO: 380491 - RNA, 22 nt, Human
cacauuugaaggaauuagcauu

SEQ ID NO: 380492 - RNA, 22 nt, Human
aaggcugauuagacugauagcu

SEQ ID NO: 380493 - RNA, 22 nt, Human
aggccuggccccaguugcuagg

SEQ ID NO: 380494 - RNA, 22 nt, Human
cuggccaacuugcuuguuggca

SEQ ID NO: 380495 - RNA, 22 nt, Human
ccaggagaaugggauuacccua

SEQ ID NO: 380496 - RNA, 22 nt, Human
cagcuucugucugauuagcaag

SEQ ID NO: 380497 - RNA, 22 nt, Human
gacagcuguggagaggcaugug

SEQ ID NO: 380498 - RNA, 21 nt, Human
uagcuuuaauauucccacauu

SEQ ID NO: 380499 - RNA, 22 nt, Human
gucuggagccacccuaagcauu

SEQ ID NO: 380500 - RNA, 21 nt, Human
agcugagcccagaagacuggu

SEQ ID NO: 380501 - RNA, 22 nt, Human
caggcacuggccagucagcaca

SEQ ID NO: 380502 - RNA, 22 nt, Human
uaugcacauugguuuccucauu

SEQ ID NO: 380503 - RNA, 22 nt, Human
ugcuugugagaguuuuuucaga

SEQ ID NO: 380504 - RNA, 22 nt, Human
ucagcagggaggcucugugccc

SEQ ID NO: 380505 - RNA, 20 nt, Human
aggagccauugacugcagca

SEQ ID NO: 380506 - RNA, 22 nt, Human
aggccugggucucgugccuacc

SEQ ID NO: 380507 - RNA, 22 nt, Human
cagggccaaguuggugccuuuu

SEQ ID NO: 380508 - RNA, 22 nt, Human
ugucucaguacacuccgauguu

SEQ ID NO: 380509 - RNA, 22 nt, Human
cuuuacauccuguuucccguuu

SEQ ID NO: 380510 - RNA, 20 nt, Human
uaggcagcuugacccuuggu

SEQ ID NO: 380511 - RNA, 22 nt, Human
cagugggcugugauggauucac

SEQ ID NO: 380512 - RNA, 22 nt, Human
cccaggucuaugccagcucuga

SEQ ID NO: 380513 - RNA, 22 nt, Human
agcagggcagguaaggaucaga

SEQ ID NO: 380514 - RNA, 22 nt, Human
acacaguauuacaauaggugcu

SEQ ID NO: 380515 - RNA, 22 nt, Human
caguggaggccuugggaccuuu

SEQ ID NO: 380516 - RNA, 22 nt, Human
gcucucuguuauuaagaucuuu

SEQ ID NO: 380517 - RNA, 21 nt, Human
ugggagagggcucagcuaccc

SEQ ID NO: 380518 - RNA, 22 nt, Human
ucugcagaaguggcugggccac

SEQ ID NO: 380519 - RNA, 22 nt, Human
aacaggcaacaguugacucuga

SEQ ID NO: 380520 - RNA, 21 nt, Human
guuauuuuaagugagcuuugc

SEQ ID NO: 380521 - RNA, 22 nt, Human
agggccagggaaacgaucagca

SEQ ID NO: 380522 - RNA, 22 nt, Human
agcugauuccacuuuuucccca

SEQ ID NO: 380523 - RNA, 22 nt, Human
gggcugagaauucagcuuuccu

SEQ ID NO: 380524 - RNA, 22 nt, Human
acagauuuguucuuuugggcua

SEQ ID NO: 380525 - RNA, 22 nt, Human
ggcaggcaagucugcucuguga

SEQ ID NO: 380526 - RNA, 22 nt, Human
ucacaaauauuuuaacaguagg

SEQ ID NO: 380527 - RNA, 22 nt, Human
ucccaggcuggcaggcagcagu

SEQ ID NO: 380528 - RNA, 22 nt, Human
gugggcagacagugcuuugcag

SEQ ID NO: 380529 - RNA, 22 nt, Human
cugggcugcaguuccugguccu

SEQ ID NO: 380530 - RNA, 22 nt, Human
ccagagacgucggucagggcgc

SEQ ID NO: 380531 - RNA, 22 nt, Human
caggcuugggagcagagccacu

SEQ ID NO: 380532 - RNA, 20 nt, Human
aggcagagcgcacuuuuaga

SEQ ID NO: 380533 - RNA, 22 nt, Human
guagggacaauauguuauuaga

SEQ ID NO: 380534 - RNA, 22 nt, Human
gaggcuggaggucaaagaugaa

SEQ ID NO: 380535 - RNA, 22 nt, Human
cuggaugcuuccucucugcuag

SEQ ID NO: 380536 - RNA, 22 nt, Human
uagcucuucaaucacugucucc

SEQ ID NO: 380537 - RNA, 22 nt, Human
caggcagagucagauuagacuu

SEQ ID NO: 380538 - RNA, 22 nt, Human
augugcauuaaaugucaauguu

SEQ ID NO: 380539 - RNA, 22 nt, Human
aauauguuccacuuaaagcugg

SEQ ID NO: 380540 - RNA, 22 nt, Human
aacauacagugagcaguggacu

SEQ ID NO: 380541 - RNA, 22 nt, Human
ucucaggacuuugggaagcuca

SEQ ID NO: 380542 - RNA, 22 nt, Human
ucagagccccuccgcuguccca

SEQ ID NO: 380543 - RNA, 22 nt, Human
cugaaauuccauuucagccaca

SEQ ID NO: 380544 - RNA, 22 nt, Human
gcagggugaaggucacauagaa

SEQ ID NO: 380545 - RNA, 22 nt, Human
cuguccuuacugcuucuggcuu

SEQ ID NO: 380546 - RNA, 22 nt, Human
aucuacaggauuuuacagaguu

SEQ ID NO: 380547 - RNA, 22 nt, Human
aggcccuggguuagggcccacu

SEQ ID NO: 380548 - RNA, 22 nt, Human
cauucauuuacuuucaacagcu

SEQ ID NO: 380549 - RNA, 22 nt, Human
gcugccugcucggcuccuggga

SEQ ID NO: 380550 - RNA, 22 nt, Human
ucuagggaacaugggucaagcu

SEQ ID NO: 380551 - RNA, 22 nt, Human
uauuucaugugcaccauaauuc

SEQ ID NO: 380552 - RNA, 22 nt, Human
gaggcugcuguuagcccugggc

SEQ ID NO: 380553 - RNA, 18 nt, Human
aaaugcuaggcuacauga

SEQ ID NO: 380554 - RNA, 22 nt, Human
ugguaauuuacgcauuucugua

SEQ ID NO: 380555 - RNA, 22 nt, Human
gcagaggccaggccaccagcaa

SEQ ID NO: 380556 - RNA, 22 nt, Human
cuguugucccugggagcucagc

SEQ ID NO: 380557 - RNA, 22 nt, Human
aucagagacaaaaccagcacuu

SEQ ID NO: 380558 - RNA, 22 nt, Human
ccaggacaaguguggccauggc

SEQ ID NO: 380559 - RNA, 22 nt, Human
aagccucaccuuuuagaagcua

SEQ ID NO: 380560 - RNA, 17 nt, Human
uaaagccagucaaguca

SEQ ID NO: 380561 - RNA, 22 nt, Human
uuugaaguggaaaaggauuuaa

SEQ ID NO: 380562 - RNA, 22 nt, Human
gaggacagcuuagggcuuccug

SEQ ID NO: 380563 - RNA, 22 nt, Human
ucauucuugaucacuaguuagu

SEQ ID NO: 380564 - RNA, 22 nt, Human
aaaugucugagacuucugaacu

SEQ ID NO: 380565 - RNA, 20 nt, Human
cacaagagaauacacacugg

SEQ ID NO: 380566 - RNA, 19 nt, Human
guuuuucccagacgaggca

SEQ ID NO: 380567 - RNA, 22 nt, Human
cuccugggaauuuaguugugag

SEQ ID NO: 380568 - RNA, 22 nt, Human
uuuuucaugagacuagaaguca

SEQ ID NO: 380569 - RNA, 22 nt, Human
gaagaacacuucaugauucauu

SEQ ID NO: 380570 - RNA, 22 nt, Human
gccacguugccacccgggugac

SEQ ID NO: 380571 - RNA, 22 nt, Human
agcagcugaucaaagcacuuau

SEQ ID NO: 380572 - RNA, 22 nt, Human
uccugggguccugacugcuucc

SEQ ID NO: 380573 - RNA, 20 nt, Human
gcccacucuaauccacuguc

SEQ ID NO: 380574 - RNA, 22 nt, Human
cugucaguucuuccagauagag

SEQ ID NO: 380575 - RNA, 22 nt, Human
guguugaugacauuuuagaaac

SEQ ID NO: 380576 - RNA, 22 nt, Human
caccagguuccgggcagagcug

SEQ ID NO: 380577 - RNA, 22 nt, Human
ugucugagugugccugggcauu

SEQ ID NO: 380578 - RNA, 22 nt, Human
ggcauggcucggagucagaaca

SEQ ID NO: 380579 - RNA, 22 nt, Human
gaccauuugcuaguaaauugca

SEQ ID NO: 380580 - RNA, 22 nt, Human
acauuucucaucuaguagagua

SEQ ID NO: 380581 - RNA, 22 nt, Human
caacauuugaguaaagaaaugg

SEQ ID NO: 380582 - RNA, 22 nt, Human
ccaggcugcuguugguguccgc

SEQ ID NO: 380583 - RNA, 22 nt, Human
uguacaguguagucaugagguu

SEQ ID NO: 380584 - RNA, 22 nt, Human
gugauuucagguuuuucauacu

SEQ ID NO: 380585 - RNA, 22 nt, Human
aggccuccugcagggaugagug

SEQ ID NO: 380586 - RNA, 22 nt, Human
gaggaggaaacccuguuccucu

SEQ ID NO: 380587 - RNA, 22 nt, Human
cagccagcuucagauccaagcc

SEQ ID NO: 380588 - RNA, 22 nt, Human
uauuagguaaaggacuugcagg

SEQ ID NO: 380589 - RNA, 22 nt, Human
cugcagccuccugggguacaug

SEQ ID NO: 380590 - RNA, 22 nt, Human
ucucuuccaguaagagucuuua

SEQ ID NO: 380591 - RNA, 22 nt, Human
aaaggugacacucugccagcug

SEQ ID NO: 380592 - RNA, 22 nt, Human
aggacagugguguucuggagug

SEQ ID NO: 380593 - RNA, 22 nt, Human
ggcagcuuucaauaggguuaug

SEQ ID NO: 380594 - RNA, 18 nt, Human
agggaucaucacugcagc

SEQ ID NO: 380595 - RNA, 22 nt, Human
auauauuuugcggucacguggc

SEQ ID NO: 380596 - RNA, 22 nt, Human
cuugccuuugucuucaaaggcu

SEQ ID NO: 380597 - RNA, 22 nt, Human
gaaaagagaacaucugaggauc

SEQ ID NO: 380598 - RNA, 22 nt, Human
agggccagggaagcuguauuuu

SEQ ID NO: 380599 - RNA, 22 nt, Human
caggagccagcugucccaacca

SEQ ID NO: 380600 - RNA, 22 nt, Human
cuugcuggugguguuuucuaug

SEQ ID NO: 380601 - RNA, 22 nt, Human
aguguugucaaacggcucagca

SEQ ID NO: 380602 - RNA, 22 nt, Human
ugguuucccauuaucugcagga

SEQ ID NO: 380603 - RNA, 22 nt, Human
uaaaucucacuggguauauugg

SEQ ID NO: 380604 - RNA, 22 nt, Human
gguuuauuaaugugaacuguau

SEQ ID NO: 380605 - RNA, 23 nt, Human
ugucacauuuaguuggcauuguu

SEQ ID NO: 380606 - RNA, 21 nt, Human
agagagaaggccauauggucc

SEQ ID NO: 380607 - RNA, 22 nt, Human
agcuggagaucaugcugauacu

SEQ ID NO: 380608 - RNA, 22 nt, Human
cagagcugcgcuuuuuccuggu

SEQ ID NO: 380609 - RNA, 22 nt, Human
accaggagacaugaccaaugag

SEQ ID NO: 380610 - RNA, 22 nt, Human
acuucuugggacccuggcaccg

SEQ ID NO: 380611 - RNA, 22 nt, Human
ucugggugcccuuugcucuguu

SEQ ID NO: 380612 - RNA, 22 nt, Human
auacaaagcuaaauaugguuuc

SEQ ID NO: 380613 - RNA, 22 nt, Human
ccacagggcacagacaggaagc

SEQ ID NO: 380614 - RNA, 22 nt, Human
uauaguacauggaaucuucaua

SEQ ID NO: 380615 - RNA, 22 nt, Human
ccaucagcaugggagcaugggc

SEQ ID NO: 380616 - RNA, 22 nt, Human
ugcagagguuuccaggcaaguu

SEQ ID NO: 380617 - RNA, 22 nt, Human
uggggcuguggauucucacgaa

SEQ ID NO: 380618 - RNA, 22 nt, Human
acaagcaugggcuuugacauca

SEQ ID NO: 380619 - RNA, 22 nt, Human
uccuggcccggccgggccugcu

SEQ ID NO: 380620 - RNA, 22 nt, Human
uuacaaagagaaguuguagaau

SEQ ID NO: 380621 - RNA, 22 nt, Human
uugauacaggccuucuagauga

SEQ ID NO: 380622 - RNA, 22 nt, Human
cagggcuguggaaaacuggugc

SEQ ID NO: 380623 - RNA, 19 nt, Human
ucucagagcccuagaggcc

SEQ ID NO: 380624 - RNA, 22 nt, Human
cccaggcagcggggucuccuug

SEQ ID NO: 380625 - RNA, 22 nt, Human
auguuuauguugggcuauauuu

SEQ ID NO: 380626 - RNA, 20 nt, Human
agugacagagacuguguggc

SEQ ID NO: 380627 - RNA, 22 nt, Human
agagccugaggccaggaaaaug

SEQ ID NO: 380628 - RNA, 22 nt, Human
uaguggagaggauguggagaaa

SEQ ID NO: 380629 - RNA, 17 nt, Human
gggcugacaguggccuc

SEQ ID NO: 380630 - RNA, 22 nt, Human
gcccucucuucugcagccucca

SEQ ID NO: 380631 - RNA, 22 nt, Human
aagggcucccugccugaggugg

SEQ ID NO: 380632 - RNA, 22 nt, Human
accaggcagagcugggccuuaa

SEQ ID NO: 380633 - RNA, 22 nt, Human
gccugggagagggauagugcag

SEQ ID NO: 380634 - RNA, 22 nt, Human
cagcuuuggcccagucgggagg

SEQ ID NO: 380635 - RNA, 22 nt, Human
uauaaaauggcaucagcuccaa

SEQ ID NO: 380636 - RNA, 22 nt, Human
uguuuaauaauucuaugauagu

SEQ ID NO: 380637 - RNA, 22 nt, Human
uuucauaaggguuucuagacuu

SEQ ID NO: 380638 - RNA, 21 nt, Human
acagaacuguauagugauaaa

SEQ ID NO: 380639 - RNA, 22 nt, Human
ccagaggugccacagaaagagc

SEQ ID NO: 380640 - RNA, 22 nt, Human
ccuugcauauauuauaucuuug

SEQ ID NO: 380641 - RNA, 22 nt, Human
aguacuucagaggcugcccagg

SEQ ID NO: 380642 - RNA, 22 nt, Human
gugugcagggaugagugcaggu

SEQ ID NO: 380643 - RNA, 22 nt, Human
aggcaggccccugagaauagac

SEQ ID NO: 380644 - RNA, 22 nt, Human
aggacagaccuaggacuggagc

SEQ ID NO: 380645 - RNA, 22 nt, Human
cuucuggggauggagcccagaa

SEQ ID NO: 380646 - RNA, 22 nt, Human
guuagaauaaaaggucagagag

SEQ ID NO: 380647 - RNA, 22 nt, Human
ugcaggugaaaauuaugaggau

SEQ ID NO: 380648 - RNA, 22 nt, Human
cacccaggacaggccagaugug

SEQ ID NO: 380649 - RNA, 22 nt, Human
ucuguucauuugccucggcucu

SEQ ID NO: 380650 - RNA, 22 nt, Human
gcaggugauucacccugggccu

SEQ ID NO: 380651 - RNA, 17 nt, Human
gcuggcugacccaugcc

SEQ ID NO: 380652 - RNA, 22 nt, Human
acagagcugggugcccccugga

SEQ ID NO: 380653 - RNA, 22 nt, Human
ugcacacaaguuggagaaugaa

SEQ ID NO: 380654 - RNA, 22 nt, Human
uagcuuuaauaagcugcugaau

SEQ ID NO: 380655 - RNA, 22 nt, Human
cagaagcaaaugccuugcugag

SEQ ID NO: 380656 - RNA, 22 nt, Human
uuugcauugcauuaaguauucu

SEQ ID NO: 380657 - RNA, 22 nt, Human
cacaaugcguacauauaucaaa

SEQ ID NO: 380658 - RNA, 22 nt, Human
acagucuugagcaucagccaga

SEQ ID NO: 380659 - RNA, 19 nt, Human
ugagacagggauucaggug

SEQ ID NO: 380660 - RNA, 21 nt, Human
ccugccaggaaacugaguguc

SEQ ID NO: 380661 - RNA, 22 nt, Human
uagagcuggaaaacugcaggua

SEQ ID NO: 380662 - RNA, 22 nt, Human
gcagucaguaaggcagccagaa

SEQ ID NO: 380663 - RNA, 22 nt, Human
guauuaggaaauaugaagaaag

SEQ ID NO: 380664 - RNA, 22 nt, Human
guccaguguguuuaucuuggau

SEQ ID NO: 380665 - RNA, 22 nt, Human
gagucaguaauggauaugucau

SEQ ID NO: 380666 - RNA, 22 nt, Human
gaggcaggcacuguuaucagca

SEQ ID NO: 380667 - RNA, 22 nt, Human
caucccugcccucaugccuaua

SEQ ID NO: 380668 - RNA, 22 nt, Human
gcagcugagcgugaggaagagu

SEQ ID NO: 380669 - RNA, 22 nt, Human
uauuaaagagagaaucaucauc

SEQ ID NO: 380670 - RNA, 22 nt, Human
cuggcagcuggaggcuagaggc

SEQ ID NO: 380671 - RNA, 22 nt, Human
agcugcuguggggcucggccug

SEQ ID NO: 380672 - RNA, 22 nt, Human
aggugaaguugaggaggcagaa

SEQ ID NO: 380673 - RNA, 22 nt, Human
uccugggcuugcuccuccagcu

SEQ ID NO: 380674 - RNA, 22 nt, Human
agaagugcuccagugaguuggg

SEQ ID NO: 380675 - RNA, 22 nt, Human
acugaaggaaacuuuuguguuu

SEQ ID NO: 380676 - RNA, 22 nt, Human
uagaaaagaauuuuauuugaua

SEQ ID NO: 380677 - RNA, 22 nt, Human
cuggaagguucuuugugugccu

SEQ ID NO: 380678 - RNA, 20 nt, Human
ugcuggggacauacagggug

SEQ ID NO: 380679 - RNA, 22 nt, Human
cugccugugccaccgccucauu

SEQ ID NO: 380680 - RNA, 22 nt, Human
uuuccuaggagauugaucacau

SEQ ID NO: 380681 - RNA, 22 nt, Human
ucaggggagguugaaucgucuc

SEQ ID NO: 380682 - RNA, 22 nt, Human
uaagaacagauaaaguuucccc

SEQ ID NO: 380683 - RNA, 22 nt, Human
ucaggcagagcuguggagcucu

SEQ ID NO: 380684 - RNA, 22 nt, Human
ggcucugcaugugagugggugg

SEQ ID NO: 380685 - RNA, 22 nt, Human
ccagcagcccacaggcgucccu

SEQ ID NO: 380686 - RNA, 23 nt, Human
aagcuuccuucacgucuccuggg

SEQ ID NO: 380687 - RNA, 22 nt, Human
cacagaggaaaggcaguuggua

SEQ ID NO: 380688 - RNA, 22 nt, Human
gcugcuguugauuuaguccaau

SEQ ID NO: 380689 - RNA, 21 nt, Human
ggccuuggcgggggccgaauu

SEQ ID NO: 380690 - RNA, 22 nt, Human
cccaggagacauauagaaggac

SEQ ID NO: 380691 - RNA, 21 nt, Human
aucaccagcagaagcugcaga

SEQ ID NO: 380692 - RNA, 22 nt, Human
gauaucauaucagacaaccucu

SEQ ID NO: 380693 - RNA, 22 nt, Human
aucacauugccagugauuaccc

SEQ ID NO: 380694 - RNA, 23 nt, Human
uuugaaguugacugccuuccaga

SEQ ID NO: 380695 - RNA, 22 nt, Human
accacugcccauggugaaaacu

SEQ ID NO: 380696 - RNA, 22 nt, Human
guggcccugucccaggccuccu

SEQ ID NO: 380697 - RNA, 22 nt, Human
ucaggauggcuucugcaucaaa

SEQ ID NO: 380698 - RNA, 22 nt, Human
guggaggagaggcgccuugcgg

SEQ ID NO: 380699 - RNA, 22 nt, Human
gaggauggaggugugagcuaug

SEQ ID NO: 380700 - RNA, 22 nt, Human
ugaaaucaauugcaauguuuau

SEQ ID NO: 380701 - RNA, 22 nt, Human
cugucaccuguucacugcagca

SEQ ID NO: 380702 - RNA, 22 nt, Human
gcaucuaaauaaacgugggagu

SEQ ID NO: 380703 - RNA, 22 nt, Human
caagagcucccagaccugggca

SEQ ID NO: 380704 - RNA, 22 nt, Human
aaagccaugaauguuauagagg

SEQ ID NO: 380705 - RNA, 22 nt, Human
agcucccagcagagcuggccac

SEQ ID NO: 380706 - RNA, 22 nt, Human
acagggucauuuuaugaucugu

SEQ ID NO: 380707 - RNA, 22 nt, Human
acaggcaggcuucggccagagc

SEQ ID NO: 380708 - RNA, 22 nt, Human
caguacuuguccucagguguua

SEQ ID NO: 380709 - RNA, 22 nt, Human
uagaaauccccagucucauagu

SEQ ID NO: 380710 - RNA, 18 nt, Human
gucaccuggaucagauua

SEQ ID NO: 380711 - RNA, 22 nt, Human
gucaggauuauuuuauuaaaag

SEQ ID NO: 380712 - RNA, 22 nt, Human
cuggguggaaagugcugagaau

SEQ ID NO: 380713 - RNA, 22 nt, Human
ccagauuugagcgucuuaaacc

SEQ ID NO: 380714 - RNA, 22 nt, Human
uuuuauuggagugauaccaagc

SEQ ID NO: 380715 - RNA, 22 nt, Human
cucuggccgcagcucagcucug

SEQ ID NO: 380716 - RNA, 22 nt, Human
aggugccagcucucaggcagga

SEQ ID NO: 380717 - RNA, 22 nt, Human
gggcaguagcuucguaggcauc

SEQ ID NO: 380718 - RNA, 21 nt, Human
agagcugggacuugccugaga

SEQ ID NO: 380719 - RNA, 22 nt, Human
ggggaccuuuccauuucugaga

SEQ ID NO: 380720 - RNA, 22 nt, Human
ugcagaagaccuuccagggcug

SEQ ID NO: 380721 - RNA, 22 nt, Human
acccugggucauauacagugug

SEQ ID NO: 380722 - RNA, 22 nt, Human
ggagccagcagggugacacuga

SEQ ID NO: 380723 - RNA, 22 nt, Human
uagcuuuagugaaaaauaucag

SEQ ID NO: 380724 - RNA, 23 nt, Human
aggugcagcccuggaccugcccc

SEQ ID NO: 380725 - RNA, 22 nt, Human
aguuuuucugggaggcacugcu

SEQ ID NO: 380726 - RNA, 22 nt, Human
ucugcagcgugcaggcuggugc

SEQ ID NO: 380727 - RNA, 22 nt, Human
uguuugaauuuugcuaacgugu

SEQ ID NO: 380728 - RNA, 22 nt, Human
ucagaacauuuaaaaagugguu

SEQ ID NO: 380729 - RNA, 22 nt, Human
agcccccaaaagugcuuaugau

SEQ ID NO: 380730 - RNA, 19 nt, Human
augucuguugaauuucaua

SEQ ID NO: 380731 - RNA, 22 nt, Human
cucuggaauguuuacaugcccu

SEQ ID NO: 380732 - RNA, 22 nt, Human
uguucaauccccagguccugaa

SEQ ID NO: 380733 - RNA, 22 nt, Human
cccugggacccgcugcagaggc

SEQ ID NO: 380734 - RNA, 22 nt, Human
uucucuagguuuuagaugaaga

SEQ ID NO: 380735 - RNA, 22 nt, Human
cugcugugccuuaaaaugcaag

SEQ ID NO: 380736 - RNA, 22 nt, Human
gagcagcuguccccaaagcuuc

SEQ ID NO: 380737 - RNA, 22 nt, Human
ggagcagagcugggcuuggcug

SEQ ID NO: 380738 - RNA, 22 nt, Human
uggcagcacuagguacugagcu

SEQ ID NO: 380739 - RNA, 22 nt, Human
aagacaauuugauacuaguugc

SEQ ID NO: 380740 - RNA, 22 nt, Human
ugagcuggucacuccuucugaa

SEQ ID NO: 380741 - RNA, 22 nt, Human
uggccuggggaagaccaugggc

SEQ ID NO: 380742 - RNA, 21 nt, Human
uuugaaagugggugauucuuu

SEQ ID NO: 380743 - RNA, 22 nt, Human
agcugucucugguauuauguga

SEQ ID NO: 380744 - RNA, 22 nt, Human
uguguccuucugggagucccag

SEQ ID NO: 380745 - RNA, 22 nt, Human
auuucagauucagaaauguagg

SEQ ID NO: 380746 - RNA, 17 nt, Human
ugauaguucauuuuaag

SEQ ID NO: 380747 - RNA, 19 nt, Human
gccugagccagccaugcaa

SEQ ID NO: 380748 - RNA, 22 nt, Human
uaugcauauagaugcacacaca

SEQ ID NO: 380749 - RNA, 22 nt, Human
cugcucugacccuuucaccuuc

SEQ ID NO: 380750 - RNA, 22 nt, Human
cagcuggcccuuugguagccuu

SEQ ID NO: 380751 - RNA, 22 nt, Human
uccuucagaggacggcagccag

SEQ ID NO: 380752 - RNA, 22 nt, Human
uucuucuccgaggagggcuggu

SEQ ID NO: 380753 - RNA, 20 nt, Human
caggaggcaaggucaagguc

SEQ ID NO: 380754 - RNA, 22 nt, Human
guggccuggaugagcuucgaca

SEQ ID NO: 380755 - RNA, 22 nt, Human
ucaguucuuuauuucacaguga

SEQ ID NO: 380756 - RNA, 22 nt, Human
ccauggcucuuaccuuguuaua

SEQ ID NO: 380757 - RNA, 19 nt, Human
aaggcagaaguuggauaug

SEQ ID NO: 380758 - RNA, 17 nt, Human
aggccucccuccaggcc

SEQ ID NO: 380759 - RNA, 20 nt, Human
uguaacaaucuggauguugc

SEQ ID NO: 380760 - RNA, 23 nt, Human
aguacauucgaaaaauucuguga

SEQ ID NO: 380761 - RNA, 22 nt, Human
ugggccugauucuugaauccug

SEQ ID NO: 380762 - RNA, 22 nt, Human
gcagcuggagccagccagacac

SEQ ID NO: 380763 - RNA, 22 nt, Human
aggcuuuaaguggccuacagcu

SEQ ID NO: 380764 - RNA, 22 nt, Human
gauaauaagcacagcaggaugu

SEQ ID NO: 380765 - RNA, 22 nt, Human
gaaacaugucugacaauuuacc

SEQ ID NO: 380766 - RNA, 22 nt, Human
uuugaguugcuuauuuaauagg

SEQ ID NO: 380767 - RNA, 22 nt, Human
agggccagcuagagcccucgcc

SEQ ID NO: 380768 - RNA, 22 nt, Human
uccagggcuggguuggcucagc

SEQ ID NO: 380769 - RNA, 22 nt, Human
ugcuggcuggccuggccuggac

SEQ ID NO: 380770 - RNA, 22 nt, Human
cucucugggcccaguuggcacc

SEQ ID NO: 380771 - RNA, 22 nt, Human
agugcuguaacaacuuauuugg

SEQ ID NO: 380772 - RNA, 15 nt, Human
ugggcagaucacuug

SEQ ID NO: 380773 - RNA, 19 nt, Human
ugagcaugcgagcugagaa

SEQ ID NO: 380774 - RNA, 22 nt, Human
ggacaggaugcugaagaugaag

SEQ ID NO: 380775 - RNA, 22 nt, Human
ggcaggagggcggacaaugacc

SEQ ID NO: 380776 - RNA, 22 nt, Human
accagugcuuccugcuggagcu

SEQ ID NO: 380777 - RNA, 22 nt, Human
uguguacacagauaguaauggc

SEQ ID NO: 380778 - RNA, 22 nt, Human
ggcuucuccagguacugagcau

SEQ ID NO: 380779 - RNA, 22 nt, Human
gcuccucugucaaaugagagug

SEQ ID NO: 380780 - RNA, 22 nt, Human
agccuggcuguaaccucauggu

SEQ ID NO: 380781 - RNA, 22 nt, Human
ugcaccauacccauuccccucu

SEQ ID NO: 380782 - RNA, 22 nt, Human
gggugggccacugagcagcgug

SEQ ID NO: 380783 - RNA, 20 nt, Human
uccuggccucccuggggcuc

SEQ ID NO: 380784 - RNA, 22 nt, Human
agaauuguugggguaauaaaag

SEQ ID NO: 380785 - RNA, 21 nt, Human
aggagggcacaaggccaggaa

SEQ ID NO: 380786 - RNA, 22 nt, Human
agccuggauccauguggcuacc

SEQ ID NO: 380787 - RNA, 22 nt, Human
auguacaguuucuagacucaaa

SEQ ID NO: 380788 - RNA, 22 nt, Human
gcugccuguggcccuucugggu

SEQ ID NO: 380789 - RNA, 22 nt, Human
ucuggaaguuagaggaggaaag

SEQ ID NO: 380790 - RNA, 22 nt, Human
agccuggauucgugcauccaca

SEQ ID NO: 380791 - RNA, 22 nt, Human
cucugugauuuugugagccaga

SEQ ID NO: 380792 - RNA, 22 nt, Human
ucaaacuguuuacagugagaua

SEQ ID NO: 380793 - RNA, 22 nt, Human
ggugaggcagguggcugcugag

SEQ ID NO: 380794 - RNA, 22 nt, Human
gcugccugcacagagcugcuuu

SEQ ID NO: 380795 - RNA, 22 nt, Human
acauuucuuccuaauuaucccu

SEQ ID NO: 380796 - RNA, 22 nt, Human
gaugguuugguaaaaguauguu

SEQ ID NO: 380797 - RNA, 22 nt, Human
aacuuucuuggaugucucaaca

SEQ ID NO: 380798 - RNA, 22 nt, Human
guuuuauaauugcuucauaaga

SEQ ID NO: 380799 - RNA, 22 nt, Human
uugguacagaugagguauucuc

SEQ ID NO: 380800 - RNA, 22 nt, Human
agggcagagauuaauuaagaca

SEQ ID NO: 380801 - RNA, 22 nt, Human
gcccggcagucacacacccagg

SEQ ID NO: 380802 - RNA, 22 nt, Human
auaugcauguacgugugcacaa

SEQ ID NO: 380803 - RNA, 22 nt, Human
uuucuaggucuuccauacugcc

SEQ ID NO: 380804 - RNA, 22 nt, Human
uuucagacagauucuucucagu

SEQ ID NO: 380805 - RNA, 19 nt, Human
agauggcaaaaugcaaaga

SEQ ID NO: 380806 - RNA, 22 nt, Human
gcccagcagaucucagugucuc

SEQ ID NO: 380807 - RNA, 19 nt, Human
gugaggauacugcucagag

SEQ ID NO: 380808 - RNA, 22 nt, Human
acaugcauucucuaaaagcaaa

SEQ ID NO: 380809 - RNA, 22 nt, Human
ccacagaguuacaaaacaguca

SEQ ID NO: 380810 - RNA, 22 nt, Human
auucuagaugcuguaaguagca

SEQ ID NO: 380811 - RNA, 22 nt, Human
uuugcauaaaggagcauuucuc

SEQ ID NO: 380812 - RNA, 22 nt, Human
aagccagauuucacucuuaauu

SEQ ID NO: 380813 - RNA, 22 nt, Human
aacauguaaauaucauuguacu

SEQ ID NO: 380814 - RNA, 22 nt, Human
caaauucucacccuguuugauu

SEQ ID NO: 380815 - RNA, 19 nt, Human
acagaagcauagaaaagga

SEQ ID NO: 380816 - RNA, 22 nt, Human
uguaaauaguuagcuugccucu

SEQ ID NO: 380817 - RNA, 22 nt, Human
ggccucugccccagccacaccu

SEQ ID NO: 380818 - RNA, 22 nt, Human
ucucaggcuaccuugcacaagg

SEQ ID NO: 380819 - RNA, 22 nt, Human
ccuggauucaagucuuucuuuc

SEQ ID NO: 380820 - RNA, 22 nt, Human
guacccaggcacgccuugcuga

SEQ ID NO: 380821 - RNA, 22 nt, Human
ugcauugauagaaaaacaugga

SEQ ID NO: 380822 - RNA, 22 nt, Human
cucucccccacagcagccuucu

SEQ ID NO: 380823 - RNA, 22 nt, Human
cagcuuauucaguaagcacaua

SEQ ID NO: 380824 - RNA, 22 nt, Human
agcagggcuucugugccugugc

SEQ ID NO: 380825 - RNA, 22 nt, Human
aggugaguuacaggaggagguc

SEQ ID NO: 380826 - RNA, 22 nt, Human
guaggaagcucugaggcuaguu

SEQ ID NO: 380827 - RNA, 23 nt, Human
uguaacaauucccagccuuugcc

SEQ ID NO: 380828 - RNA, 22 nt, Human
aaauuugauaagccauuguuac

SEQ ID NO: 380829 - RNA, 22 nt, Human
aggcaggucacaugcuuggcga

SEQ ID NO: 380830 - RNA, 22 nt, Human
ccagaucuaguguuguaaagcu

SEQ ID NO: 380831 - RNA, 22 nt, Human
ggguaccaagcugcuugggggc

SEQ ID NO: 380832 - RNA, 22 nt, Human
gaaguggaauuacugggucaua

SEQ ID NO: 380833 - RNA, 22 nt, Human
gccuguuggugacuuucuguug

SEQ ID NO: 380834 - RNA, 21 nt, Human
ugucagagcuuguaggacauu

SEQ ID NO: 380835 - RNA, 22 nt, Human
gauuucaaggauguuagaggug

SEQ ID NO: 380836 - RNA, 22 nt, Human
cuggcucucugagauauugagu

SEQ ID NO: 380837 - RNA, 22 nt, Human
ccacccuuggguucggaggccg

SEQ ID NO: 380838 - RNA, 22 nt, Human
caggauggagggagggcuguua

SEQ ID NO: 380839 - RNA, 22 nt, Human
cuggccagacuacacaugugug

SEQ ID NO: 380840 - RNA, 22 nt, Human
gggcuguggagccgcgagggcu

SEQ ID NO: 380841 - RNA, 22 nt, Human
cuggccugcugggugagguccu

SEQ ID NO: 380842 - RNA, 20 nt, Human
uuuacauuuugaaacaguga

SEQ ID NO: 380843 - RNA, 22 nt, Human
agccagacauggcuccugcucc

SEQ ID NO: 380844 - RNA, 22 nt, Human
ccuguucauuuguauuugucuu

SEQ ID NO: 380845 - RNA, 20 nt, Human
auacuuguuuucaggcuuuu

SEQ ID NO: 380846 - RNA, 20 nt, Human
ccuccuggucaggugugcag

SEQ ID NO: 380847 - RNA, 22 nt, Human
ugccaggcaacugcccagccau

SEQ ID NO: 380848 - RNA, 22 nt, Human
uuuuaccugaaccacacaguau

SEQ ID NO: 380849 - RNA, 20 nt, Human
gcugaagauucccaugcaag

SEQ ID NO: 380850 - RNA, 23 nt, Human
gccuucagcucgggaaggcuccc

SEQ ID NO: 380851 - RNA, 22 nt, Human
uuuaggaaugugguuuuugagc

SEQ ID NO: 380852 - RNA, 22 nt, Human
aaguccaguuuuuccagguggu

SEQ ID NO: 380853 - RNA, 22 nt, Human
uuccagagaaaagguuuauuuc

SEQ ID NO: 380854 - RNA, 22 nt, Human
cuguggcaggaagggacuagca

SEQ ID NO: 380855 - RNA, 22 nt, Human
gagaggagucccuaucacaguu

SEQ ID NO: 380856 - RNA, 22 nt, Human
gccucugcaggugcgguuaucc

SEQ ID NO: 380857 - RNA, 22 nt, Human
gcuguguuggugaagcuguagc

SEQ ID NO: 380858 - RNA, 22 nt, Human
agaggcugagaaacccucuucu

SEQ ID NO: 380859 - RNA, 21 nt, Human
uucauaaaccauucucaugca

SEQ ID NO: 380860 - RNA, 22 nt, Human
aaacggauauaacagcaaacgc

SEQ ID NO: 380861 - RNA, 22 nt, Human
uugaauaguuuuggauagcaua

SEQ ID NO: 380862 - RNA, 22 nt, Human
gugugcagucugcuaggcaggg

SEQ ID NO: 380863 - RNA, 22 nt, Human
aggggcugacuggaaagugcca

SEQ ID NO: 380864 - RNA, 19 nt, Human
aguagcagaaagugcagug

SEQ ID NO: 380865 - RNA, 23 nt, Human
gccuggccaccccagggcugcuu

SEQ ID NO: 380866 - RNA, 22 nt, Human
gaggccagcuaguccaggaagu

SEQ ID NO: 380867 - RNA, 22 nt, Human
uuacagaauguucuuccaacag

SEQ ID NO: 380868 - RNA, 22 nt, Human
agcuaccuggcuuaucacuguc

SEQ ID NO: 380869 - RNA, 22 nt, Human
ccucgaccuccccaggcucagg

SEQ ID NO: 380870 - RNA, 22 nt, Human
aaugauuuggcaaaggaaucca

SEQ ID NO: 380871 - RNA, 22 nt, Human
ucuggagcuggcagggcccugg

SEQ ID NO: 380872 - RNA, 22 nt, Human
cuuuauuccuacaagauuuucu

SEQ ID NO: 380873 - RNA, 22 nt, Human
cuuuauguccaccagacugcaa

SEQ ID NO: 380874 - RNA, 22 nt, Human
ugcagaagcagagccgguggcc

SEQ ID NO: 380875 - RNA, 22 nt, Human
guggagacgggacagaagcuaa

SEQ ID NO: 380876 - RNA, 22 nt, Human
aggccugaggaccagauaaaug

SEQ ID NO: 380877 - RNA, 23 nt, Human
gcugagguacauuuacaggaaga

SEQ ID NO: 380878 - RNA, 22 nt, Human
gggcugagccauuugaaccuug

SEQ ID NO: 380879 - RNA, 22 nt, Human
acucaggaaaugaagacugguu

SEQ ID NO: 380880 - RNA, 22 nt, Human
auaucagacagaaagcauugac

SEQ ID NO: 380881 - RNA, 23 nt, Human
uccuccuuuugcuugugcuuccc

SEQ ID NO: 380882 - RNA, 22 nt, Human
aguaaaaauugaggugcaaaau

SEQ ID NO: 380883 - RNA, 22 nt, Human
agcugcucuugggugacuucaa

SEQ ID NO: 380884 - RNA, 22 nt, Human
gugugcagugagcaaaagaucu

SEQ ID NO: 380885 - RNA, 20 nt, Human
cuuagaaauuuuuacccugg

SEQ ID NO: 380886 - RNA, 22 nt, Human
gccaccagugggggccugggca

SEQ ID NO: 380887 - RNA, 22 nt, Human
gcuggcucccauugguccuucc

SEQ ID NO: 380888 - RNA, 22 nt, Human
gacaauuucucaauauagaaac

SEQ ID NO: 380889 - RNA, 22 nt, Human
ccaggccucaccugcccaccua

SEQ ID NO: 380890 - RNA, 22 nt, Human
aaggcacuuaacgugggaggau

SEQ ID NO: 380891 - RNA, 22 nt, Human
caguacuugggggguucuaagu

SEQ ID NO: 380892 - RNA, 22 nt, Human
agguacagcaauauaagagguc

SEQ ID NO: 380893 - RNA, 22 nt, Human
gcagagcuucuguccuucagga

SEQ ID NO: 380894 - RNA, 21 nt, Human
gccugccugcgugacccucuu

SEQ ID NO: 380895 - RNA, 22 nt, Human
ucacuccucauugcugcccauu

SEQ ID NO: 380896 - RNA, 20 nt, Human
ccacaggaguccagucgacc

SEQ ID NO: 380897 - RNA, 22 nt, Human
ucaggagacaaagggugcggag

SEQ ID NO: 380898 - RNA, 22 nt, Human
uccugcagccauuagaggucaa

SEQ ID NO: 380899 - RNA, 22 nt, Human
caggcagcugaggacuuugcua

SEQ ID NO: 380900 - RNA, 22 nt, Human
ugagaguauuuuggcauuauca

SEQ ID NO: 380901 - RNA, 18 nt, Human
aggaagcaggaggaaggc

SEQ ID NO: 380902 - RNA, 22 nt, Human
ugaggcucacaaaucugcauuu

SEQ ID NO: 380903 - RNA, 22 nt, Human
agcucucaagauaagaaagaac

SEQ ID NO: 380904 - RNA, 22 nt, Human
uccugcagugugucuccugcac

SEQ ID NO: 380905 - RNA, 22 nt, Human
aggcacaggaaugucauccagu

SEQ ID NO: 380906 - RNA, 22 nt, Human
agagggcuuugauucucaguuc

SEQ ID NO: 380907 - RNA, 22 nt, Human
auugcagcuggucaggguaauu

SEQ ID NO: 380908 - RNA, 22 nt, Human
uucauguauuuaucauguaaau

SEQ ID NO: 380909 - RNA, 22 nt, Human
uuuucauuuuuguagaugcaag

SEQ ID NO: 380910 - RNA, 17 nt, Human
ggcuggagcagcucccc

SEQ ID NO: 380911 - RNA, 22 nt, Human
cccuggagucagguuggccugg

SEQ ID NO: 380912 - RNA, 21 nt, Human
gcagggacaaagcuucaggag

SEQ ID NO: 380913 - RNA, 22 nt, Human
uuugcagucuggccugcuuugg

SEQ ID NO: 380914 - RNA, 22 nt, Human
agagcagagggcucugggacaa

SEQ ID NO: 380915 - RNA, 23 nt, Human
uaaagucacauauuagagugagc

SEQ ID NO: 380916 - RNA, 22 nt, Human
ugcauuguugaauauuucauag

SEQ ID NO: 380917 - RNA, 21 nt, Human
agcagaggcugccuggugacu

SEQ ID NO: 380918 - RNA, 22 nt, Human
uuaaacaguguuucaugugggg

SEQ ID NO: 380919 - RNA, 22 nt, Human
agccuggcuaaauucucccaug

SEQ ID NO: 380920 - RNA, 22 nt, Human
aaaauuuugcccuauccuucau

SEQ ID NO: 380921 - RNA, 22 nt, Human
ccagcagcuguggcuuugccuc

SEQ ID NO: 380922 - RNA, 22 nt, Human
cagcccaaagccccaggcuaga

SEQ ID NO: 380923 - RNA, 22 nt, Human
agacagcaugauacaugaugcu

SEQ ID NO: 380924 - RNA, 22 nt, Human
uagcuuuaggaugguucucuug

SEQ ID NO: 380925 - RNA, 22 nt, Human
agacucaagcagauaggaauua

SEQ ID NO: 380926 - RNA, 22 nt, Human
cacagcuggugacagagcccag

SEQ ID NO: 380927 - RNA, 22 nt, Human
ggagggcucaauugacuccuga

SEQ ID NO: 380928 - RNA, 22 nt, Human
cccaggaaguggagguugcagu

SEQ ID NO: 380929 - RNA, 22 nt, Human
ggcaagcucaggccucaggugu

SEQ ID NO: 380930 - RNA, 22 nt, Human
ccugggcaauauagugaggccc

SEQ ID NO: 380931 - RNA, 17 nt, Human
uucaagauauugaaaug

SEQ ID NO: 380932 - RNA, 22 nt, Human
uaggcagcagugcuaugauucu

SEQ ID NO: 380933 - RNA, 22 nt, Human
agcuggagaauguggaugaucc

SEQ ID NO: 380934 - RNA, 22 nt, Human
caguggaagcuggcugugaaga

SEQ ID NO: 380935 - RNA, 19 nt, Human
ucaaagcaagcauguucug

SEQ ID NO: 380936 - RNA, 22 nt, Human
aggccugaggaccuucuggagg

SEQ ID NO: 380937 - RNA, 22 nt, Human
caaaauguucuggcaccuuuaa

SEQ ID NO: 380938 - RNA, 22 nt, Human
auugaaaguccuaucuaaggga

SEQ ID NO: 380939 - RNA, 22 nt, Human
ucuguuuaggcaaaauagcuac

SEQ ID NO: 380940 - RNA, 22 nt, Human
cacauaaucaccaaguccuuuc

SEQ ID NO: 380941 - RNA, 22 nt, Human
ugugccaugaggcucugauaug

SEQ ID NO: 380942 - RNA, 22 nt, Human
ggcuucauggaggaggugaguc

SEQ ID NO: 380943 - RNA, 22 nt, Human
ccugccugcggcccgcggggag

SEQ ID NO: 380944 - RNA, 22 nt, Human
ucucuucacaugcuugcuccaa

SEQ ID NO: 380945 - RNA, 22 nt, Human
guucauuuaugauguaacaugu

SEQ ID NO: 380946 - RNA, 22 nt, Human
cugggagagaagcgaagcuggg

SEQ ID NO: 380947 - RNA, 22 nt, Human
acugccaaugguaguuugaugg

SEQ ID NO: 380948 - RNA, 22 nt, Human
ugaaagcagcaccaauaccauu

SEQ ID NO: 380949 - RNA, 19 nt, Human
aggauuuauuaugugcuca

SEQ ID NO: 380950 - RNA, 22 nt, Human
gggacugggagauccuccuggc

SEQ ID NO: 380951 - RNA, 22 nt, Human
auggaguucuuuaaauucacag

SEQ ID NO: 380952 - RNA, 22 nt, Human
ggcagaggaagcuggaaguggg

SEQ ID NO: 380953 - RNA, 21 nt, Human
ggcagccugacccccagagag

SEQ ID NO: 380954 - RNA, 22 nt, Human
aauaugcauuaacuguguacau

SEQ ID NO: 380955 - RNA, 22 nt, Human
ggucaggguuccagguaucuuc

SEQ ID NO: 380956 - RNA, 22 nt, Human
ugucuuuagccagcagucuucu

SEQ ID NO: 380957 - RNA, 22 nt, Human
agggcacagccuaaagccuaug

SEQ ID NO: 380958 - RNA, 22 nt, Human
agggcugaaacauaauccuucu

SEQ ID NO: 380959 - RNA, 22 nt, Human
gcuggcugggucccugagaggc

SEQ ID NO: 380960 - RNA, 22 nt, Human
aguuaacaaguuggcaaucaac

SEQ ID NO: 380961 - RNA, 22 nt, Human
uuagauaauguagagauaugag

SEQ ID NO: 380962 - RNA, 22 nt, Human
cauuuauucucagauccuuguc

SEQ ID NO: 380963 - RNA, 22 nt, Human
gcacagaagagcuuuggaauga

SEQ ID NO: 380964 - RNA, 23 nt, Human
uuacuuuugcaccaaccuaauau

SEQ ID NO: 380965 - RNA, 22 nt, Human
auguccuuugcuucucuggucc

SEQ ID NO: 380966 - RNA, 22 nt, Human
cuggggugucucgucugccauu

SEQ ID NO: 380967 - RNA, 22 nt, Human
uuacagaagugaaggccuuuaa

SEQ ID NO: 380968 - RNA, 22 nt, Human
ugaagcaguuacuggguguuaa

SEQ ID NO: 380969 - RNA, 22 nt, Human
ggcuucugagugcucugcuguu

SEQ ID NO: 380970 - RNA, 22 nt, Human
guuguauucuucaauaucagag

SEQ ID NO: 380971 - RNA, 22 nt, Human
agcuggcaguaugacuggugac

SEQ ID NO: 380972 - RNA, 22 nt, Human
cccaaggccucuccuuggcuug

SEQ ID NO: 380973 - RNA, 22 nt, Human
ucuuugcaggagcccuuugaac

SEQ ID NO: 380974 - RNA, 22 nt, Human
augggcuguccuaguccagccc

SEQ ID NO: 380975 - RNA, 22 nt, Human
gggcugcuuccuggggaaugcu

SEQ ID NO: 380976 - RNA, 22 nt, Human
cccaggaaccuaccagcucgag

SEQ ID NO: 380977 - RNA, 22 nt, Human
guccucuguguaggcugcagac

SEQ ID NO: 380978 - RNA, 22 nt, Human
ucacuuuugaucccuaugcagu

SEQ ID NO: 380979 - RNA, 22 nt, Human
cuuugaagauggcaaauuuaga

SEQ ID NO: 380980 - RNA, 22 nt, Human
cucuuaguaaugccaugaagca

SEQ ID NO: 380981 - RNA, 22 nt, Human
gccuccuggccuuugcuccuca

SEQ ID NO: 380982 - RNA, 22 nt, Human
uuauuuacaacucuucucuucc

SEQ ID NO: 380983 - RNA, 21 nt, Human
uaucuacuggugucuuucaga

SEQ ID NO: 380984 - RNA, 19 nt, Human
ucccaggaaccuuuuauuu

SEQ ID NO: 380985 - RNA, 22 nt, Human
acuggaucagaaucugauuuuu

SEQ ID NO: 380986 - RNA, 22 nt, Human
guggccuggaguuugauguagg

SEQ ID NO: 380987 - RNA, 22 nt, Human
agggggugcccagaugaaggau

SEQ ID NO: 380988 - RNA, 22 nt, Human
ggccuuggugcucuguguugca

SEQ ID NO: 380989 - RNA, 22 nt, Human
cagcagguauguuuguucagca

SEQ ID NO: 380990 - RNA, 22 nt, Human
cugcuguguggauucaauggcu

SEQ ID NO: 380991 - RNA, 22 nt, Human
uccugggaagagaccugagcau

SEQ ID NO: 380992 - RNA, 22 nt, Human
caggcagagaggagcauuuaau

SEQ ID NO: 380993 - RNA, 22 nt, Human
gucacuguauccagguuccagc

SEQ ID NO: 380994 - RNA, 22 nt, Human
cauagcaacagcaucaagucaa

SEQ ID NO: 380995 - RNA, 22 nt, Human
uacuuaaugccacugaauugua

SEQ ID NO: 380996 - RNA, 22 nt, Human
gccaccaggagcccaguccaaa

SEQ ID NO: 380997 - RNA, 22 nt, Human
gaggaacccagcugggguugcc

SEQ ID NO: 380998 - RNA, 22 nt, Human
agcagaagaaagccacaugacu

SEQ ID NO: 380999 - RNA, 22 nt, Human
accaggaggcuacacuguccca

SEQ ID NO: 381000 - RNA, 22 nt, Human
ucagccagguaauguggagaug

SEQ ID NO: 381001 - RNA, 22 nt, Human
caucacuguccucagcauucca

SEQ ID NO: 381002 - RNA, 22 nt, Human
gcugucagcgcccaaggagcuc

SEQ ID NO: 381003 - RNA, 22 nt, Human
gaguccuuuugugccacaggga

SEQ ID NO: 381004 - RNA, 22 nt, Human
caggucagaggcgcagccccca

SEQ ID NO: 381005 - RNA, 22 nt, Human
agggugcagaaggagccuagga

SEQ ID NO: 381006 - RNA, 22 nt, Human
agcagccacacgccuccuucuc

SEQ ID NO: 381007 - RNA, 22 nt, Human
agagcuggauggucaagauggc

SEQ ID NO: 381008 - RNA, 22 nt, Human
guuuacauauuuuaauugguga

SEQ ID NO: 381009 - RNA, 22 nt, Human
augaggcaaggcuggccguguu

SEQ ID NO: 381010 - RNA, 22 nt, Human
uguggcaguauaagagcuagaa

SEQ ID NO: 381011 - RNA, 20 nt, Human
auucuacaagaauaagcaug

SEQ ID NO: 381012 - RNA, 22 nt, Human
ugcagggccuugggaugugucc

SEQ ID NO: 381013 - RNA, 22 nt, Human
ggaggagacggagugauuagug

SEQ ID NO: 381014 - RNA, 22 nt, Human
acuuucuauucccacagagaua

SEQ ID NO: 381015 - RNA, 22 nt, Human
cugggccuggcguuccaggcug

SEQ ID NO: 381016 - RNA, 22 nt, Human
uggcuggcccugggagugcaga

SEQ ID NO: 381017 - RNA, 22 nt, Human
aggcugcugaggccaccacgcu

SEQ ID NO: 381018 - RNA, 19 nt, Human
ggcaggcuggauagagagg

SEQ ID NO: 381019 - RNA, 20 nt, Human
ugaggcaggagaauggcaug

SEQ ID NO: 381020 - RNA, 22 nt, Human
agauguguuucuaguuccugca

SEQ ID NO: 381021 - RNA, 22 nt, Human
uaaugcacaugacugaacuauu

SEQ ID NO: 381022 - RNA, 22 nt, Human
caucagaaccaguggggacauu

SEQ ID NO: 381023 - RNA, 22 nt, Human
gggcccuggacguggcggcaga

SEQ ID NO: 381024 - RNA, 22 nt, Human
accugagccuagggagguugag

SEQ ID NO: 381025 - RNA, 22 nt, Human
auccugggaagcugacauugaa

SEQ ID NO: 381026 - RNA, 22 nt, Human
aaugguauuugucaagcauagu

SEQ ID NO: 381027 - RNA, 22 nt, Human
gcaaagcugggugugaaugcac

SEQ ID NO: 381028 - RNA, 22 nt, Human
cuggcucacuagcccugcccug

SEQ ID NO: 381029 - RNA, 22 nt, Human
uacauagcaaggaaaugacaga

SEQ ID NO: 381030 - RNA, 22 nt, Human
ucaaaguuuguggcaauuuauu

SEQ ID NO: 381031 - RNA, 22 nt, Human
ucccagagaaagucaaggucuu

SEQ ID NO: 381032 - RNA, 22 nt, Human
uuacagaaaauguguuuuaacu

SEQ ID NO: 381033 - RNA, 22 nt, Human
ugugccuucucaguccugcuca

SEQ ID NO: 381034 - RNA, 20 nt, Human
gcagagcuguucugugggga

SEQ ID NO: 381035 - RNA, 22 nt, Human
aguuauuucaguaacauaauag

SEQ ID NO: 381036 - RNA, 22 nt, Human
agaucugaccuaaccccaccac

SEQ ID NO: 381037 - RNA, 22 nt, Human
cugaggcagagggcagaccaga

SEQ ID NO: 381038 - RNA, 22 nt, Human
cugcccagaagcuuagagcuua

SEQ ID NO: 381039 - RNA, 22 nt, Human
augugucaauuuucaaaugcuu

SEQ ID NO: 381040 - RNA, 22 nt, Human
auuucauugaaguuaauucuuc

SEQ ID NO: 381041 - RNA, 22 nt, Human
caauaauauccugugcuguuug

SEQ ID NO: 381042 - RNA, 22 nt, Human
ccuagaugggauggcggccggg

SEQ ID NO: 381043 - RNA, 22 nt, Human
aggcagcagccacaaggccuga

SEQ ID NO: 381044 - RNA, 22 nt, Human
uuuagaaguucacacauuuaaa

SEQ ID NO: 381045 - RNA, 22 nt, Human
ggcaggcagaggcugagacagg

SEQ ID NO: 381046 - RNA, 22 nt, Human
agcaccuucacaggcucucagg

SEQ ID NO: 381047 - RNA, 22 nt, Human
ggcaaaaaccacaauuacuuuu

SEQ ID NO: 381048 - RNA, 22 nt, Human
ggcuguggccagcggggcugag

SEQ ID NO: 381049 - RNA, 22 nt, Human
ucaaaucagcaagcagcuuccc

SEQ ID NO: 381050 - RNA, 22 nt, Human
aggguaggguaaaugaugcauc

SEQ ID NO: 381051 - RNA, 22 nt, Human
ugauuucccucaucauaacaga

SEQ ID NO: 381052 - RNA, 22 nt, Human
gcuuagucaauuauaaauaggc

SEQ ID NO: 381053 - RNA, 22 nt, Human
aaaugugcuugugaucagcugu

SEQ ID NO: 381054 - RNA, 22 nt, Human
augaaaauucuaugcaggccag

SEQ ID NO: 381055 - RNA, 22 nt, Human
agagcuggaaucagaccucagg

SEQ ID NO: 381056 - RNA, 21 nt, Human
gggaaauuaggauugcucauc

SEQ ID NO: 381057 - RNA, 22 nt, Human
auuauuaggacuacugggguug

SEQ ID NO: 381058 - RNA, 22 nt, Human
ucacauuuuccuugguaucugu

SEQ ID NO: 381059 - RNA, 20 nt, Human
uucuggaggcuacaagucug

SEQ ID NO: 381060 - RNA, 22 nt, Human
ccaguuugagguuucaagaugu

SEQ ID NO: 381061 - RNA, 22 nt, Human
ugucauaacuuagugacaaauc

SEQ ID NO: 381062 - RNA, 22 nt, Human
cauuuacuguugaaucccuagc

SEQ ID NO: 381063 - RNA, 22 nt, Human
uguauuuucuucuggaagcuua

SEQ ID NO: 381064 - RNA, 22 nt, Human
ucauuucaaguucugacagcua

SEQ ID NO: 381065 - RNA, 22 nt, Human
acagguuuuuguggauauaugu

SEQ ID NO: 381066 - RNA, 22 nt, Human
ggagaggcuuggcccagccugg

SEQ ID NO: 381067 - RNA, 22 nt, Human
ccaccuccaccuauugccagcc

SEQ ID NO: 381068 - RNA, 22 nt, Human
uccuuagagacaagaccaguuu

SEQ ID NO: 381069 - RNA, 22 nt, Human
uccaagaucuacagcaguuuag

SEQ ID NO: 381070 - RNA, 22 nt, Human
agaacuuaggaacaacagcuua

SEQ ID NO: 381071 - RNA, 22 nt, Human
aaagauuugaguucugcuuaua

SEQ ID NO: 381072 - RNA, 22 nt, Human
uccuugaagcaacgugcagaca

SEQ ID NO: 381073 - RNA, 22 nt, Human
cagcuagcuaagaaggccagag

SEQ ID NO: 381074 - RNA, 22 nt, Human
agagaaaagaguucaggcuuug

SEQ ID NO: 381075 - RNA, 22 nt, Human
ggcugcagcggauuggggauug

SEQ ID NO: 381076 - RNA, 23 nt, Human
uuuauccaacucuguaaucucuc

SEQ ID NO: 381077 - RNA, 22 nt, Human
agucucuuuugcgaagaguguu

SEQ ID NO: 381078 - RNA, 22 nt, Human
acagaacuuccugcuggagugg

SEQ ID NO: 381079 - RNA, 22 nt, Human
aggaagcuaaccagggagugag

SEQ ID NO: 381080 - RNA, 22 nt, Human
gggcaagcucuucagaagcucu

SEQ ID NO: 381081 - RNA, 22 nt, Human
cauuuggccauuccagucacau

SEQ ID NO: 381082 - RNA, 22 nt, Human
ucauaaaaugcuccugauauug

SEQ ID NO: 381083 - RNA, 22 nt, Human
gugcugcagagucucgugccgc

SEQ ID NO: 381084 - RNA, 22 nt, Human
ugucauaaaacacaagcuguug

SEQ ID NO: 381085 - RNA, 22 nt, Human
cuguuuaucccuuuggucagca

SEQ ID NO: 381086 - RNA, 22 nt, Human
aaaucugguucaguaaguccuc

SEQ ID NO: 381087 - RNA, 22 nt, Human
gauacauuuuaucuccuaacag

SEQ ID NO: 381088 - RNA, 22 nt, Human
gcaugcugcaccagagccucuc

SEQ ID NO: 381089 - RNA, 22 nt, Human
uggcugccuagugucugagcag

SEQ ID NO: 381090 - RNA, 22 nt, Human
augcaguaaauguuaagaaaaa

SEQ ID NO: 381091 - RNA, 22 nt, Human
gagggagggccaggucccaacc

SEQ ID NO: 381092 - RNA, 22 nt, Human
uggcagagcaaaaagauagaau

SEQ ID NO: 381093 - RNA, 22 nt, Human
aauguguauacuggcaauuaag

SEQ ID NO: 381094 - RNA, 22 nt, Human
cauuuguaauacugacuugcag

SEQ ID NO: 381095 - RNA, 20 nt, Human
ucagugauuuugaagaggaa

SEQ ID NO: 381096 - RNA, 22 nt, Human
uccuucagggcugaccacaggc

SEQ ID NO: 381097 - RNA, 22 nt, Human
ccagggucuuggagaggagugc

SEQ ID NO: 381098 - RNA, 22 nt, Human
uaaucauggccucaaauuuuau

SEQ ID NO: 381099 - RNA, 22 nt, Human
auuaggcauucaugcagcuccu

SEQ ID NO: 381100 - RNA, 22 nt, Human
aaacagcuaauggccaggaaua

SEQ ID NO: 381101 - RNA, 22 nt, Human
gggaccuggucuagcacugagc

SEQ ID NO: 381102 - RNA, 17 nt, Human
aggaagggcaaguuucu

SEQ ID NO: 381103 - RNA, 22 nt, Human
gggcugggaauggcuaaguaug

SEQ ID NO: 381104 - RNA, 22 nt, Human
aagagcuggaugaagaaaucaa

SEQ ID NO: 381105 - RNA, 22 nt, Human
cugcugcucagugucaucaugu

SEQ ID NO: 381106 - RNA, 22 nt, Human
uguguuauugccacugaagacc

SEQ ID NO: 381107 - RNA, 21 nt, Human
aggcccagcuuuccucuugcu

SEQ ID NO: 381108 - RNA, 22 nt, Human
aguaggaggcgggagcaugaag

SEQ ID NO: 381109 - RNA, 22 nt, Human
ugaggaggucagagucuggcug

SEQ ID NO: 381110 - RNA, 22 nt, Human
cccacacauuuuucacuuaccg

SEQ ID NO: 381111 - RNA, 22 nt, Human
aacagaauugcugcugccaaug

SEQ ID NO: 381112 - RNA, 22 nt, Human
ugaggcuuagagaagaugggau

SEQ ID NO: 381113 - RNA, 22 nt, Human
cagcaauaacucaaagccauuu

SEQ ID NO: 381114 - RNA, 22 nt, Human
gccugcagauauauaggauggu

SEQ ID NO: 381115 - RNA, 22 nt, Human
acaaaauuaccuaguuauuuuc

SEQ ID NO: 381116 - RNA, 22 nt, Human
gggcagugguccaggcuacagc

SEQ ID NO: 381117 - RNA, 22 nt, Human
uuucccaauugagagguucugu

SEQ ID NO: 381118 - RNA, 22 nt, Human
ugaggccagucucaucacaggc

SEQ ID NO: 381119 - RNA, 22 nt, Human
acagagcaauaacagggagagg

SEQ ID NO: 381120 - RNA, 22 nt, Human
uggaaggaagccaaggaagguu

SEQ ID NO: 381121 - RNA, 22 nt, Human
aggugagggugccagugcaugg

SEQ ID NO: 381122 - RNA, 23 nt, Human
gagcugggauacaggcuuacugc

SEQ ID NO: 381123 - RNA, 22 nt, Human
aucaguuuugggggacauacug

SEQ ID NO: 381124 - RNA, 22 nt, Human
aggguggcuggaggaaucagaa

SEQ ID NO: 381125 - RNA, 22 nt, Human
aaaucugggagcagcucggcca

SEQ ID NO: 381126 - RNA, 22 nt, Human
caguacuuauuucuauuuaggg

SEQ ID NO: 381127 - RNA, 22 nt, Human
uucagagaugacaccugguguu

SEQ ID NO: 381128 - RNA, 22 nt, Human
auauuaggaguuaaauguauua

SEQ ID NO: 381129 - RNA, 22 nt, Human
ggaggccaaagugugggcggcu

SEQ ID NO: 381130 - RNA, 22 nt, Human
acauucaugucccacuucuagc

SEQ ID NO: 381131 - RNA, 22 nt, Human
ugucucugguauuaggugaaaa

SEQ ID NO: 381132 - RNA, 22 nt, Human
uacaaaugaguuguaugaacca

SEQ ID NO: 381133 - RNA, 22 nt, Human
auaaggcaagcugucaguuugu

SEQ ID NO: 381134 - RNA, 22 nt, Human
aggggcuggcuuaucugagagu

SEQ ID NO: 381135 - RNA, 22 nt, Human
aggugcuggagucugggcagga

SEQ ID NO: 381136 - RNA, 22 nt, Human
gagaaacuaacaucugaaggug

SEQ ID NO: 381137 - RNA, 22 nt, Human
uucucagugaaguuuagaacau

SEQ ID NO: 381138 - RNA, 22 nt, Human
acagggcagagugaaaugcuau

SEQ ID NO: 381139 - RNA, 22 nt, Human
aggaaagggguagguguggacg

SEQ ID NO: 381140 - RNA, 22 nt, Human
uuggccuuguuaaggaggcccu

SEQ ID NO: 381141 - RNA, 22 nt, Human
gcaaagucucaagacccaagug

SEQ ID NO: 381142 - RNA, 22 nt, Human
augguuuauugcuuuaaugaaa

SEQ ID NO: 381143 - RNA, 22 nt, Human
uggagcaggaagucuauggcug

SEQ ID NO: 381144 - RNA, 22 nt, Human
ucccaggaaggauucggcauuu

SEQ ID NO: 381145 - RNA, 19 nt, Human
guuucauuaagauaggaaa

SEQ ID NO: 381146 - RNA, 22 nt, Human
agaagccaaucagcucucugcu

SEQ ID NO: 381147 - RNA, 22 nt, Human
uuuccucuccaccaggaggucu

SEQ ID NO: 381148 - RNA, 22 nt, Human
ugccucugugggccuuccuggc

SEQ ID NO: 381149 - RNA, 22 nt, Human
gccuggcaggccuguuggggcu

SEQ ID NO: 381150 - RNA, 22 nt, Human
gccaccagcagaaaaggggcca

SEQ ID NO: 381151 - RNA, 22 nt, Human
ccagcuccucuucccaguguca

SEQ ID NO: 381152 - RNA, 22 nt, Human
agggaggucuggcugcccugag

SEQ ID NO: 381153 - RNA, 22 nt, Human
cuggcagcagcuucuggaucga

SEQ ID NO: 381154 - RNA, 22 nt, Human
ccagcugcugugaggaccacag

SEQ ID NO: 381155 - RNA, 22 nt, Human
uaaguaaauuuauaaugugauu

SEQ ID NO: 381156 - RNA, 22 nt, Human
gaccauuuguugaaaagauuau

SEQ ID NO: 381157 - RNA, 22 nt, Human
augaaaauacugugguugauag

SEQ ID NO: 381158 - RNA, 22 nt, Human
cuguucauggaaaaauaguugg

SEQ ID NO: 381159 - RNA, 22 nt, Human
gccaggcaggugucggagcccu

SEQ ID NO: 381160 - RNA, 19 nt, Human
cagaccuguccagccugug

SEQ ID NO: 381161 - RNA, 22 nt, Human
cuucugggcauucagcugcaca

SEQ ID NO: 381162 - RNA, 22 nt, Human
ggaggagacccugugucaguuu

SEQ ID NO: 381163 - RNA, 20 nt, Human
aguagcagugugacauugac

SEQ ID NO: 381164 - RNA, 22 nt, Human
uucucagaauugacugggagca

SEQ ID NO: 381165 - RNA, 22 nt, Human
ggagcagagcauuucacagccu

SEQ ID NO: 381166 - RNA, 22 nt, Human
cuacagaaaaucagccacaggc

SEQ ID NO: 381167 - RNA, 22 nt, Human
guucuuaagaccacaauaaaaa

SEQ ID NO: 381168 - RNA, 23 nt, Human
ucaugcccaggcuccagauguca

SEQ ID NO: 381169 - RNA, 22 nt, Human
ucauugaacgaagagcuccauu

SEQ ID NO: 381170 - RNA, 22 nt, Human
auuucugauaaacguaagcugc

SEQ ID NO: 381171 - RNA, 21 nt, Human
acagcagggcuggcaugacag

SEQ ID NO: 381172 - RNA, 22 nt, Human
gaggcucugugaugugccaggc

SEQ ID NO: 381173 - RNA, 22 nt, Human
agggggcaucagguccuggcuc

SEQ ID NO: 381174 - RNA, 20 nt, Human
uccaggcagcucagaguguc

SEQ ID NO: 381175 - RNA, 22 nt, Human
ucagccaguuuguuuauuccgg

SEQ ID NO: 381176 - RNA, 22 nt, Human
agguauuauuagcaucucuauu

SEQ ID NO: 381177 - RNA, 20 nt, Human
cugggcagguguuugaucuc

SEQ ID NO: 381178 - RNA, 22 nt, Human
aggcagauuuaggagaaaagaa

SEQ ID NO: 381179 - RNA, 22 nt, Human
aucuacagcugucugcacagua

SEQ ID NO: 381180 - RNA, 21 nt, Human
uccuucaguucugcacuuucu

SEQ ID NO: 381181 - RNA, 22 nt, Human
uuacagaaaguuucccaugccg

SEQ ID NO: 381182 - RNA, 22 nt, Human
ccugucucuguuaccacauuug

SEQ ID NO: 381183 - RNA, 22 nt, Human
ggauguugauugaauggccauu

SEQ ID NO: 381184 - RNA, 22 nt, Human
ggcagugaacagaaaugcagaa

SEQ ID NO: 381185 - RNA, 23 nt, Human
ggagaggggugugggcaucuuua

SEQ ID NO: 381186 - RNA, 22 nt, Human
acugaaagauaaaucaguuagc

SEQ ID NO: 381187 - RNA, 22 nt, Human
cccaggagguguagcugcgugg

SEQ ID NO: 381188 - RNA, 22 nt, Human
gaauauauuggugaaaauaguu

SEQ ID NO: 381189 - RNA, 22 nt, Human
cagguacacucccuugugcuga

SEQ ID NO: 381190 - RNA, 20 nt, Human
aauguauauuuuaugccagg

SEQ ID NO: 381191 - RNA, 22 nt, Human
ggagaggacauggcucccacag

SEQ ID NO: 381192 - RNA, 22 nt, Human
ucuucacagaugcauauacuuc

SEQ ID NO: 381193 - RNA, 22 nt, Human
agagccuguuuugugggagaug

SEQ ID NO: 381194 - RNA, 22 nt, Human
agggggaggcugugcugcgucu

SEQ ID NO: 381195 - RNA, 21 nt, Human
ucacacacguuuccaagggca

SEQ ID NO: 381196 - RNA, 22 nt, Human
aucagcaaucucguguauuagg

SEQ ID NO: 381197 - RNA, 18 nt, Human
uauaaacacacuuagguu

SEQ ID NO: 381198 - RNA, 21 nt, Human
gcaaauguucaggaaaaaaga

SEQ ID NO: 381199 - RNA, 22 nt, Human
uaaaugauuuauguaugugaaa

SEQ ID NO: 381200 - RNA, 20 nt, Human
cagcuuggaugagaggcuga

SEQ ID NO: 381201 - RNA, 22 nt, Human
aguguuucucagaagggccuau

SEQ ID NO: 381202 - RNA, 22 nt, Human
aaugaaugaaccacauauaaca

SEQ ID NO: 381203 - RNA, 22 nt, Human
auacauauaugguacuuccugg

SEQ ID NO: 381204 - RNA, 22 nt, Human
ucacaggacccugaggguggcg

SEQ ID NO: 381205 - RNA, 22 nt, Human
ucucugaguauccugaacugcc

SEQ ID NO: 381206 - RNA, 22 nt, Human
uggcugagagaagacggggaag

SEQ ID NO: 381207 - RNA, 22 nt, Human
caaguccaucagauaagcaaga

SEQ ID NO: 381208 - RNA, 22 nt, Human
ccaggagauaagcugaguuuau

SEQ ID NO: 381209 - RNA, 22 nt, Human
agagugaaguucaucgugcagc

SEQ ID NO: 381210 - RNA, 22 nt, Human
gaggcagcaggcugaggaggau

SEQ ID NO: 381211 - RNA, 22 nt, Human
agaggcggagguugcagugagc

SEQ ID NO: 381212 - RNA, 22 nt, Human
aucauuacuccuguaaaauugu

SEQ ID NO: 381213 - RNA, 22 nt, Human
ucaaaauuucagcacuagcccu

SEQ ID NO: 381214 - RNA, 22 nt, Human
cucaggauggaagccuacagga

SEQ ID NO: 381215 - RNA, 22 nt, Human
gaggccugguuugcaugagaau

SEQ ID NO: 381216 - RNA, 22 nt, Human
uaugcccagcuuaaaguacaca

SEQ ID NO: 381217 - RNA, 22 nt, Human
cucaggauagcugcgcagccug

SEQ ID NO: 381218 - RNA, 22 nt, Human
ccaggcagagggauccccaucc

SEQ ID NO: 381219 - RNA, 22 nt, Human
cugggcagcuaccaccacugcu

SEQ ID NO: 381220 - RNA, 22 nt, Human
caguguuuaaucauugugaauu

SEQ ID NO: 381221 - RNA, 22 nt, Human
uaagauaaguggguugagaugg

SEQ ID NO: 381222 - RNA, 22 nt, Human
uuugcauuaguuuagauuucaa

SEQ ID NO: 381223 - RNA, 22 nt, Human
gcaacuuuagaaaaaucuauaa

SEQ ID NO: 381224 - RNA, 22 nt, Human
gggagaaggagcuaguucuuga

SEQ ID NO: 381225 - RNA, 22 nt, Human
cagcugccaagaaucuuuucua

SEQ ID NO: 381226 - RNA, 22 nt, Human
aagccaguccucuacugggcac

SEQ ID NO: 381227 - RNA, 22 nt, Human
uagaaacacagaucugguguca

SEQ ID NO: 381228 - RNA, 22 nt, Human
ggcagcacgacaggaguggaag

SEQ ID NO: 381229 - RNA, 22 nt, Human
ucugggcucugucagcaccucu

SEQ ID NO: 381230 - RNA, 22 nt, Human
ugucccuggaacuauggcucca

SEQ ID NO: 381231 - RNA, 22 nt, Human
cucagagcccaggguacacccg

SEQ ID NO: 381232 - RNA, 22 nt, Human
uagggacccucccugcucuaac

SEQ ID NO: 381233 - RNA, 22 nt, Human
acaguguuuuagaaaagcuuga

SEQ ID NO: 381234 - RNA, 22 nt, Human
gguuugcacgauauuuccaugg

SEQ ID NO: 381235 - RNA, 22 nt, Human
ucagcuggagaugagaaccgaa

SEQ ID NO: 381236 - RNA, 22 nt, Human
cugcugugcacccaggaaggcu

SEQ ID NO: 381237 - RNA, 22 nt, Human
cagcugaauucuucagacucca

SEQ ID NO: 381238 - RNA, 22 nt, Human
ugagagugaaaugucacauguc

SEQ ID NO: 381239 - RNA, 22 nt, Human
uuagaaaugucacagaucugau

SEQ ID NO: 381240 - RNA, 22 nt, Human
auguguacaaccaagcacuaaa

SEQ ID NO: 381241 - RNA, 22 nt, Human
cuggagcugucuucacaggccu

SEQ ID NO: 381242 - RNA, 22 nt, Human
ccuuccuggagcccaugcagau

SEQ ID NO: 381243 - RNA, 22 nt, Human
acaaggaggucuggggggcccu

SEQ ID NO: 381244 - RNA, 22 nt, Human
aaaguuucaauagaggaagugg

SEQ ID NO: 381245 - RNA, 21 nt, Human
uagaaaucagcuggugccucu

SEQ ID NO: 381246 - RNA, 22 nt, Human
ccccaggagauuugggagcaca

SEQ ID NO: 381247 - RNA, 22 nt, Human
uaucagaaugcagccaugugca

SEQ ID NO: 381248 - RNA, 22 nt, Human
ugauuuccucuacuagcaauua

SEQ ID NO: 381249 - RNA, 22 nt, Human
uuucacaacguuguggugagag

SEQ ID NO: 381250 - RNA, 22 nt, Human
augggaguuuucucugaugcuc

SEQ ID NO: 381251 - RNA, 22 nt, Human
gucuuuauuugagauugucauu

SEQ ID NO: 381252 - RNA, 22 nt, Human
aucuacaggcugaggugggagg

SEQ ID NO: 381253 - RNA, 22 nt, Human
cacuggaauucaagauacugag

SEQ ID NO: 381254 - RNA, 20 nt, Human
cccugcagccaugggagugg

SEQ ID NO: 381255 - RNA, 21 nt, Human
agcagagugcuuugacuuugu

SEQ ID NO: 381256 - RNA, 22 nt, Human
gcuggccauauauuuugcuguu

SEQ ID NO: 381257 - RNA, 22 nt, Human
gccaggcuggugucacaacucu

SEQ ID NO: 381258 - RNA, 22 nt, Human
caagggccuccaccuugcucgu

SEQ ID NO: 381259 - RNA, 22 nt, Human
uuuguaaagucuguucugaguu

SEQ ID NO: 381260 - RNA, 22 nt, Human
uauccaaaggaacaaucacagc

SEQ ID NO: 381261 - RNA, 23 nt, Human
uacauuguggauggaguccuggg

SEQ ID NO: 381262 - RNA, 22 nt, Human
caggcagcagccacucugguau

SEQ ID NO: 381263 - RNA, 22 nt, Human
guucuucagauuccauuucagu

SEQ ID NO: 381264 - RNA, 22 nt, Human
ccuguucauuuuuugacucugc

SEQ ID NO: 381265 - RNA, 22 nt, Human
caguaucugucaguaaucaggu

SEQ ID NO: 381266 - RNA, 20 nt, Human
uugagcuuuuaguacagaca

SEQ ID NO: 381267 - RNA, 22 nt, Human
ggccugagucacaucaggagag

SEQ ID NO: 381268 - RNA, 22 nt, Human
agggcagcacaaggcauggacu

SEQ ID NO: 381269 - RNA, 21 nt, Human
uucuucaugaugauuaauggc

SEQ ID NO: 381270 - RNA, 18 nt, Human
uugagggaggggcagagu

SEQ ID NO: 381271 - RNA, 22 nt, Human
gggcuggaggagauccagaggc

SEQ ID NO: 381272 - RNA, 22 nt, Human
agugaaaugauucugagcaaga

SEQ ID NO: 381273 - RNA, 22 nt, Human
auuuccagacuuuuuccaggaa

SEQ ID NO: 381274 - RNA, 22 nt, Human
agggaggugguuccccagugga

SEQ ID NO: 381275 - RNA, 22 nt, Human
uugcagggaccugcagaaagcu

SEQ ID NO: 381276 - RNA, 22 nt, Human
cagacaugauguaagcagaggc

SEQ ID NO: 381277 - RNA, 21 nt, Human
ucugucucuccacugcccugc

SEQ ID NO: 381278 - RNA, 22 nt, Human
agucaccaucuguggcagccug

SEQ ID NO: 381279 - RNA, 22 nt, Human
agucaccaggguuugcuggguu

SEQ ID NO: 381280 - RNA, 22 nt, Human
aguuacaaccaugacacaagca

SEQ ID NO: 381281 - RNA, 22 nt, Human
ccuccuagaggaaccccagggc

SEQ ID NO: 381282 - RNA, 22 nt, Human
agcccuagagcuggaggucagu

SEQ ID NO: 381283 - RNA, 22 nt, Human
auauuucaugggguuccauacu

SEQ ID NO: 381284 - RNA, 22 nt, Human
ccaggagcuggagggugcagug

SEQ ID NO: 381285 - RNA, 17 nt, Human
ugaaacaccaagacugu

SEQ ID NO: 381286 - RNA, 20 nt, Human
uuacagaaaugauguuauuu

SEQ ID NO: 381287 - RNA, 22 nt, Human
ucagaauucuacaauagaucag

SEQ ID NO: 381288 - RNA, 22 nt, Human
ccuccagguguuacauaugacu

SEQ ID NO: 381289 - RNA, 22 nt, Human
aagggccauaacuugcaguguu

SEQ ID NO: 381290 - RNA, 22 nt, Human
gagcuuuacuucugacuggugc

SEQ ID NO: 381291 - RNA, 22 nt, Human
aaaacaguuuaggcaucacagu

SEQ ID NO: 381292 - RNA, 22 nt, Human
ggccugccucacagucagcacc

SEQ ID NO: 381293 - RNA, 19 nt, Human
uggcauugguccagauaaa

SEQ ID NO: 381294 - RNA, 22 nt, Human
caauuuuuguacuuauaguacu

SEQ ID NO: 381295 - RNA, 20 nt, Human
ugcuuccuggccacugcggg

SEQ ID NO: 381296 - RNA, 22 nt, Human
ccaggacucaguggggaaaggg

SEQ ID NO: 381297 - RNA, 21 nt, Human
aggcucagcagguguauaaag

SEQ ID NO: 381298 - RNA, 22 nt, Human
auuuccacauaagggaaauaag

SEQ ID NO: 381299 - RNA, 19 nt, Human
cuggaaugagaacaugccc

SEQ ID NO: 381300 - RNA, 22 nt, Human
gccuucaguaguauccucauga

SEQ ID NO: 381301 - RNA, 22 nt, Human
aggucauuccagccauuccccu

SEQ ID NO: 381302 - RNA, 22 nt, Human
aaauuauucucauguguuucuu

SEQ ID NO: 381303 - RNA, 22 nt, Human
agcaggugggcaugaaagcuga

SEQ ID NO: 381304 - RNA, 22 nt, Human
uucuuuccacagaggggaugau

SEQ ID NO: 381305 - RNA, 22 nt, Human
uaagcauaacuaaaaaugauuu

SEQ ID NO: 381306 - RNA, 22 nt, Human
ucucagaguuccucuggagucc

SEQ ID NO: 381307 - RNA, 22 nt, Human
aggccuggugugccggaugcag

SEQ ID NO: 381308 - RNA, 22 nt, Human
agaacuguccuuggaggagagu

SEQ ID NO: 381309 - RNA, 22 nt, Human
uggaggcaacugaagauguagu

SEQ ID NO: 381310 - RNA, 22 nt, Human
agcagcaucuucuaaguaaggc

SEQ ID NO: 381311 - RNA, 20 nt, Human
uaacagaaguagaagugggu

SEQ ID NO: 381312 - RNA, 22 nt, Human
agacuucuuugugagcauuuuc

SEQ ID NO: 381313 - RNA, 19 nt, Human
uuucuuaggccuuuggccu

SEQ ID NO: 381314 - RNA, 22 nt, Human
uauugaggaucuccugcuaauu

SEQ ID NO: 381315 - RNA, 19 nt, Human
aggugaugugacucuagaa

SEQ ID NO: 381316 - RNA, 22 nt, Human
uccucaugccgggucucacgcu

SEQ ID NO: 381317 - RNA, 22 nt, Human
gcauccagagguagccacugug

SEQ ID NO: 381318 - RNA, 22 nt, Human
aaacaucaauugcaucucccaa

SEQ ID NO: 381319 - RNA, 22 nt, Human
ccagggcucaggcucccagugg

SEQ ID NO: 381320 - RNA, 22 nt, Human
gauuuucaugauaaacuuguga

SEQ ID NO: 381321 - RNA, 22 nt, Human
aucuggcuuggguguggguagc

SEQ ID NO: 381322 - RNA, 22 nt, Human
gcuucacaggcaaguuaagccu

SEQ ID NO: 381323 - RNA, 22 nt, Human
agccaagcugaucuccugcuga

SEQ ID NO: 381324 - RNA, 22 nt, Human
agcuggagcuucaagcagguaa

SEQ ID NO: 381325 - RNA, 22 nt, Human
ucacaugaguauuauuuuccaa

SEQ ID NO: 381326 - RNA, 22 nt, Human
aagagagaacucccuucgccag

SEQ ID NO: 381327 - RNA, 22 nt, Human
agggccuggugaccuggguccu

SEQ ID NO: 381328 - RNA, 22 nt, Human
ccuggaucuccucuauucauau

SEQ ID NO: 381329 - RNA, 19 nt, Human
ccugugugggguagagauc

SEQ ID NO: 381330 - RNA, 22 nt, Human
gguguccaucaggcugugcuuc

SEQ ID NO: 381331 - RNA, 22 nt, Human
ugcagggaacuuggacagcuag

SEQ ID NO: 381332 - RNA, 22 nt, Human
uauuuagaaugcguguacgugu

SEQ ID NO: 381333 - RNA, 22 nt, Human
ucugaaggugcuagagaaagcu

SEQ ID NO: 381334 - RNA, 22 nt, Human
aagacacagcgaaauguuccug

SEQ ID NO: 381335 - RNA, 22 nt, Human
uggaggcaguaacugagcaaca

SEQ ID NO: 381336 - RNA, 20 nt, Human
gcccaggaauuugcauuucu

SEQ ID NO: 381337 - RNA, 20 nt, Human
ugugugcacacaugacauuc

SEQ ID NO: 381338 - RNA, 22 nt, Human
uuuuguuguaauauaccuaucc

SEQ ID NO: 381339 - RNA, 18 nt, Human
uguuuauuuuucucuuac

SEQ ID NO: 381340 - RNA, 22 nt, Human
aaaagccaagguccucuucaga

SEQ ID NO: 381341 - RNA, 22 nt, Human
acacugugagcugaagggcugc

SEQ ID NO: 381342 - RNA, 22 nt, Human
ugauuuccaauaaggagaaugu

SEQ ID NO: 381343 - RNA, 22 nt, Human
agacaggcagaggcugcagagg

SEQ ID NO: 381344 - RNA, 22 nt, Human
agcuguccuggcucaggcugug

SEQ ID NO: 381345 - RNA, 22 nt, Human
agucaguguagaaagcccaggc

SEQ ID NO: 381346 - RNA, 19 nt, Human
caugagcugcucacuuccc

SEQ ID NO: 381347 - RNA, 22 nt, Human
auuucuguuugcuacuauaagu

SEQ ID NO: 381348 - RNA, 20 nt, Human
uggagcugugguaaggagca

SEQ ID NO: 381349 - RNA, 19 nt, Human
ucaaaggcaaggaggaacu

SEQ ID NO: 381350 - RNA, 22 nt, Human
agucacaguuccuacccaguaa

SEQ ID NO: 381351 - RNA, 22 nt, Human
ugggcacuauggcucugugcac

SEQ ID NO: 381352 - RNA, 22 nt, Human
caggguggggcuggcuaucaaa

SEQ ID NO: 381353 - RNA, 22 nt, Human
ucucauucauacccuacaugcu

SEQ ID NO: 381354 - RNA, 22 nt, Human
ggcuccuguccuccuggagcuc

SEQ ID NO: 381355 - RNA, 19 nt, Human
ucuggagcugaugcaggug

SEQ ID NO: 381356 - RNA, 22 nt, Human
uauuucagucacuucuucucug

SEQ ID NO: 381357 - RNA, 22 nt, Human
cuugaaguugcaaaacauuaau

SEQ ID NO: 381358 - RNA, 22 nt, Human
ccuucccuaaagcgucgcuuag

SEQ ID NO: 381359 - RNA, 22 nt, Human
gccccagcguggcuguguuagg

SEQ ID NO: 381360 - RNA, 21 nt, Human
acagaugggaugagcacacug

SEQ ID NO: 381361 - RNA, 22 nt, Human
caguggagugggacuggucuga

SEQ ID NO: 381362 - RNA, 22 nt, Human
uuggcugagagaggaaaagggc

SEQ ID NO: 381363 - RNA, 22 nt, Human
ggcucccaggagggccuggagg

SEQ ID NO: 381364 - RNA, 22 nt, Human
auguaacuguuauauuuuguug

SEQ ID NO: 381365 - RNA, 22 nt, Human
aaggcugaggagggccugcagg

SEQ ID NO: 381366 - RNA, 22 nt, Human
gagagcuguaauagucaugucu

SEQ ID NO: 381367 - RNA, 22 nt, Human
uggcucagcugucacagccugg

SEQ ID NO: 381368 - RNA, 22 nt, Human
ugucuuuucuacuguaagcaua

SEQ ID NO: 381369 - RNA, 22 nt, Human
gcagggaccugccacugcuguc

SEQ ID NO: 381370 - RNA, 22 nt, Human
ugcuccauucucuagccagugc

SEQ ID NO: 381371 - RNA, 22 nt, Human
caguguggugugcacagcuuag

SEQ ID NO: 381372 - RNA, 22 nt, Human
ugcugccuucuaggcgugcccu

SEQ ID NO: 381373 - RNA, 22 nt, Human
aaguuauuuccucgugacugaa

SEQ ID NO: 381374 - RNA, 22 nt, Human
ucagggcacugucaccugauau

SEQ ID NO: 381375 - RNA, 22 nt, Human
ggcucugcccagguggacagca

SEQ ID NO: 381376 - RNA, 22 nt, Human
aagccaggggcugcuuaggaga

SEQ ID NO: 381377 - RNA, 22 nt, Human
acaaguaccaaaugcucaagua

SEQ ID NO: 381378 - RNA, 23 nt, Human
ccuggcagcaaacgaggagguua

SEQ ID NO: 381379 - RNA, 22 nt, Human
ugcuuuaucugacuuggcgcug

SEQ ID NO: 381380 - RNA, 22 nt, Human
ugcauuauacuuuuagaaauuu

SEQ ID NO: 381381 - RNA, 22 nt, Human
uacauuccacuagugacuggcg

SEQ ID NO: 381382 - RNA, 22 nt, Human
ccagagccugcugagccccauu

SEQ ID NO: 381383 - RNA, 22 nt, Human
acagagguaggacaugagauau

SEQ ID NO: 381384 - RNA, 22 nt, Human
gccuccugguugcuucuccaac

SEQ ID NO: 381385 - RNA, 22 nt, Human
acagagcuuaggaugacuccca

SEQ ID NO: 381386 - RNA, 22 nt, Human
gggcugaaaggccgccucagau

SEQ ID NO: 381387 - RNA, 22 nt, Human
uucaagaucuggguuuucagcu

SEQ ID NO: 381388 - RNA, 22 nt, Human
ucuggcucucaacaaauauuua

SEQ ID NO: 381389 - RNA, 22 nt, Human
aggcugaugcuggcugaggcug

SEQ ID NO: 381390 - RNA, 22 nt, Human
cuacagaaguuucccuugcuua

SEQ ID NO: 381391 - RNA, 22 nt, Human
uggcuauugagugaucucuaga

SEQ ID NO: 381392 - RNA, 22 nt, Human
uccaggcagggcagccaucaag

SEQ ID NO: 381393 - RNA, 22 nt, Human
uguuuuucaaauauugcucugu

SEQ ID NO: 381394 - RNA, 22 nt, Human
agagagagggaaacugcuaaac

SEQ ID NO: 381395 - RNA, 22 nt, Human
auuuugaaaccaaguuauuucc

SEQ ID NO: 381396 - RNA, 22 nt, Human
aauuaggggaggacguaucaua

SEQ ID NO: 381397 - RNA, 22 nt, Human
aagggcagaauagagaagaugg

SEQ ID NO: 381398 - RNA, 22 nt, Human
ucauaaaacacaccagguaguu

SEQ ID NO: 381399 - RNA, 23 nt, Human
agagcaucaugaugcuaagucug

SEQ ID NO: 381400 - RNA, 22 nt, Human
uuaagucauuucugauuauaga

SEQ ID NO: 381401 - RNA, 22 nt, Human
uaaaucccuacaucuguguuuu

SEQ ID NO: 381402 - RNA, 22 nt, Human
auuuccaauuucauccaugucc

SEQ ID NO: 381403 - RNA, 22 nt, Human
uuaacaugucuugacuucaucu

SEQ ID NO: 381404 - RNA, 22 nt, Human
ucuuggagacucuuguauauuu

SEQ ID NO: 381405 - RNA, 22 nt, Human
ugccuggcaacuguggugggcu

SEQ ID NO: 381406 - RNA, 22 nt, Human
ugugcucuggaguugccuucac

SEQ ID NO: 381407 - RNA, 22 nt, Human
auugcuaggaacagguugcacc

SEQ ID NO: 381408 - RNA, 22 nt, Human
uuacaaagcguugagacaagua

SEQ ID NO: 381409 - RNA, 17 nt, Human
gucauucucagaaaaug

SEQ ID NO: 381410 - RNA, 22 nt, Human
aggcagcagggccacuggcuga

SEQ ID NO: 381411 - RNA, 22 nt, Human
guacagaaaugugaugacgcaa

SEQ ID NO: 381412 - RNA, 22 nt, Human
gcagauggcucagacacugggg

SEQ ID NO: 381413 - RNA, 22 nt, Human
uucacaauagcuggcaucaucu

SEQ ID NO: 381414 - RNA, 22 nt, Human
ccugucugcggaggaguggaag

SEQ ID NO: 381415 - RNA, 22 nt, Human
gggugggguguaucggauccua

SEQ ID NO: 381416 - RNA, 22 nt, Human
uguccuuagggauauaaaauau

SEQ ID NO: 381417 - RNA, 22 nt, Human
augcuucagugcuaccuucaaa

SEQ ID NO: 381418 - RNA, 22 nt, Human
cuggcuuucucugugguguuca

SEQ ID NO: 381419 - RNA, 22 nt, Human
uacaagaaauuucugcauauau

SEQ ID NO: 381420 - RNA, 22 nt, Human
gcagagaacccagcagauuggc

SEQ ID NO: 381421 - RNA, 22 nt, Human
uagucucuggagacucuagggg

SEQ ID NO: 381422 - RNA, 22 nt, Human
gccagccccuuagggcucuccc

SEQ ID NO: 381423 - RNA, 22 nt, Human
ccagaggaguugaggcuuuggg

SEQ ID NO: 381424 - RNA, 22 nt, Human
gaguccuuuucauagcaguggg

SEQ ID NO: 381425 - RNA, 22 nt, Human
aggcugaggcuggcagcuccag

SEQ ID NO: 381426 - RNA, 22 nt, Human
aggcugcaggucugggucaugu

SEQ ID NO: 381427 - RNA, 22 nt, Human
ggccuugggcuggcugcaguau

SEQ ID NO: 381428 - RNA, 22 nt, Human
uuucacauuuuauacuuaagcc

SEQ ID NO: 381429 - RNA, 22 nt, Human
cuggugccauucuguggccuag

SEQ ID NO: 381430 - RNA, 22 nt, Human
gcaggguccauggaggcagccc

SEQ ID NO: 381431 - RNA, 22 nt, Human
agccuggaauuaaggaaaugca

SEQ ID NO: 381432 - RNA, 18 nt, Human
cggcagagugcuucuagc

SEQ ID NO: 381433 - RNA, 22 nt, Human
uucuccgcuaaguucucugcag

SEQ ID NO: 381434 - RNA, 22 nt, Human
uaagaaucuauuaggaauaugu

SEQ ID NO: 381435 - RNA, 22 nt, Human
ggucagggcucuuccaguggcu

SEQ ID NO: 381436 - RNA, 22 nt, Human
auccagucaaaauuaguaaggu

SEQ ID NO: 381437 - RNA, 22 nt, Human
uagcagaaccagcagucaauuu

SEQ ID NO: 381438 - RNA, 22 nt, Human
ccucucccacguggcagaggcu

SEQ ID NO: 381439 - RNA, 22 nt, Human
guuaggcagcccaagaugucag

SEQ ID NO: 381440 - RNA, 22 nt, Human
cuggacagaaaccaguccuggg

SEQ ID NO: 381441 - RNA, 22 nt, Human
ccagcuccgggaguugcugcug

SEQ ID NO: 381442 - RNA, 19 nt, Human
cucuggccucuggaugcug

SEQ ID NO: 381443 - RNA, 21 nt, Human
ugcagccauucagcccuaugc

SEQ ID NO: 381444 - RNA, 22 nt, Human
uucacagaauggcaaguuaugg

SEQ ID NO: 381445 - RNA, 22 nt, Human
agcagggcagugaucagaaagg

SEQ ID NO: 381446 - RNA, 22 nt, Human
aggccagagaggggaccagccu

SEQ ID NO: 381447 - RNA, 22 nt, Human
acuauacauaaaacauuugggu

SEQ ID NO: 381448 - RNA, 22 nt, Human
cacagggcuuugauggcugagu

SEQ ID NO: 381449 - RNA, 22 nt, Human
gagcuucccucugcagucccug

SEQ ID NO: 381450 - RNA, 20 nt, Human
gcugggggugugcugaguga

SEQ ID NO: 381451 - RNA, 22 nt, Human
gccucugcaccaguacugugcc

SEQ ID NO: 381452 - RNA, 22 nt, Human
gcagaagaccaugguggaaaga

SEQ ID NO: 381453 - RNA, 19 nt, Human
ucuuucauuucuagcucug

SEQ ID NO: 381454 - RNA, 22 nt, Human
cagggcucgcucuugcccuucg

SEQ ID NO: 381455 - RNA, 22 nt, Human
ugccacacuccccugcugcagu

SEQ ID NO: 381456 - RNA, 22 nt, Human
uggccugggucacaccaggguc

SEQ ID NO: 381457 - RNA, 22 nt, Human
ugcagggcccucauuccugucc

SEQ ID NO: 381458 - RNA, 22 nt, Human
agagccagccuucucagcuuac

SEQ ID NO: 381459 - RNA, 22 nt, Human
ucaaacagaggaacaauuguuu

SEQ ID NO: 381460 - RNA, 22 nt, Human
gggcagcucuuugguauccuuc

SEQ ID NO: 381461 - RNA, 22 nt, Human
uguccaggucagcagcagggac

SEQ ID NO: 381462 - RNA, 22 nt, Human
aaacaugaauagauauuaaaca

SEQ ID NO: 381463 - RNA, 22 nt, Human
cuuugaauugccguuucaucug

SEQ ID NO: 381464 - RNA, 22 nt, Human
ccugccuggcuuccagaagaga

SEQ ID NO: 381465 - RNA, 22 nt, Human
acuuuuaucaaggaagugaucu

SEQ ID NO: 381466 - RNA, 22 nt, Human
cuccaggggccagaagccuggc

SEQ ID NO: 381467 - RNA, 22 nt, Human
ugccaggggaccuagggauguc

SEQ ID NO: 381468 - RNA, 22 nt, Human
ugccuggauucgguuguuguca

SEQ ID NO: 381469 - RNA, 22 nt, Human
ggcagauguuauaugaucugag

SEQ ID NO: 381470 - RNA, 22 nt, Human
auucucaaacaagugguuugau

SEQ ID NO: 381471 - RNA, 22 nt, Human
ucaggcugaaggaggccuaucu

SEQ ID NO: 381472 - RNA, 23 nt, Human
ccacuagcaccuguucaacuucu

SEQ ID NO: 381473 - RNA, 22 nt, Human
uaauuauuugaagacauuagag

SEQ ID NO: 381474 - RNA, 22 nt, Human
aggcagugcaugcaaaggucgg

SEQ ID NO: 381475 - RNA, 22 nt, Human
agauggagaaugacaauuaagg

SEQ ID NO: 381476 - RNA, 22 nt, Human
gaacccaggcuuuugaggcugu

SEQ ID NO: 381477 - RNA, 22 nt, Human
cagugcccuuccaggacugcag

SEQ ID NO: 381478 - RNA, 22 nt, Human
gcagagacuccacugucuugug

SEQ ID NO: 381479 - RNA, 22 nt, Human
ugccuaggaaaccucaugcuuc

SEQ ID NO: 381480 - RNA, 22 nt, Human
auuucucagugaaaugacaggc

SEQ ID NO: 381481 - RNA, 22 nt, Human
uugcauuguaggauguuagaag

SEQ ID NO: 381482 - RNA, 22 nt, Human
auugacaagcaguaugucuuag

SEQ ID NO: 381483 - RNA, 22 nt, Human
ccagcugcugugcagggaggcu

SEQ ID NO: 381484 - RNA, 22 nt, Human
agauuccagaucccaaaaauga

SEQ ID NO: 381485 - RNA, 22 nt, Human
auugacaaauggauguugacau

SEQ ID NO: 381486 - RNA, 22 nt, Human
gcccaggaguuugcauuuuaac

SEQ ID NO: 381487 - RNA, 22 nt, Human
uuauuccaauuucuccuacaaa

SEQ ID NO: 381488 - RNA, 22 nt, Human
aggcagagagcaguggccgucu

SEQ ID NO: 381489 - RNA, 22 nt, Human
auucucaauggcuacuuucaua

SEQ ID NO: 381490 - RNA, 22 nt, Human
ggcagcuccuccuagucugccc

SEQ ID NO: 381491 - RNA, 22 nt, Human
ggcacugagaacaggcugacuu

SEQ ID NO: 381492 - RNA, 22 nt, Human
auggcuuugcucaaguuuagcc

SEQ ID NO: 381493 - RNA, 22 nt, Human
uccuggagggaggcggugcuac

SEQ ID NO: 381494 - RNA, 21 nt, Human
ccuguucacagaucuguaacu

SEQ ID NO: 381495 - RNA, 22 nt, Human
acuuguucauugaguacauaug

SEQ ID NO: 381496 - RNA, 22 nt, Human
uauaagaaacaaggcaaauuuu

SEQ ID NO: 381497 - RNA, 22 nt, Human
agauuuacuggagucuuuggug

SEQ ID NO: 381498 - RNA, 22 nt, Human
ugcaguggugguaaagaugcuc

SEQ ID NO: 381499 - RNA, 22 nt, Human
uggggacacagagguucguugg

SEQ ID NO: 381500 - RNA, 18 nt, Human
ggcugccuguuccugaag

SEQ ID NO: 381501 - RNA, 22 nt, Human
uauugacaauaggcaacugagg

SEQ ID NO: 381502 - RNA, 20 nt, Human
uuccuguauacaaagaguuc

SEQ ID NO: 381503 - RNA, 22 nt, Human
aucuuucuauuucuaaaaacua

SEQ ID NO: 381504 - RNA, 22 nt, Human
aggcugaguuucucauucucgc

SEQ ID NO: 381505 - RNA, 21 nt, Human
uccucugcucucauaccacaa

SEQ ID NO: 381506 - RNA, 22 nt, Human
uggcugagugaacauguccauu

SEQ ID NO: 381507 - RNA, 22 nt, Human
guggugcaggccagcaggggcg

SEQ ID NO: 381508 - RNA, 22 nt, Human
uuuaaauuuagaagaaacacug

SEQ ID NO: 381509 - RNA, 22 nt, Human
ugggacagugugccuugcuccu

SEQ ID NO: 381510 - RNA, 17 nt, Human
guccuacccauggucua

SEQ ID NO: 381511 - RNA, 22 nt, Human
agauacaucuugaacuucuaga

SEQ ID NO: 381512 - RNA, 22 nt, Human
ggcugcuucucacucauuugca

SEQ ID NO: 381513 - RNA, 17 nt, Human
cuggagccuccaacucc

SEQ ID NO: 381514 - RNA, 22 nt, Human
caggggccggcuguccgugccc

SEQ ID NO: 381515 - RNA, 22 nt, Human
cccaggagagaggggauaaagc

SEQ ID NO: 381516 - RNA, 22 nt, Human
cugagucucccggcaguggagg

SEQ ID NO: 381517 - RNA, 22 nt, Human
ugugcccaucccucuggagugu

SEQ ID NO: 381518 - RNA, 22 nt, Human
ucaauaauggcaggauaaauuu

SEQ ID NO: 381519 - RNA, 22 nt, Human
uccaguggcaccuuggcccuca

SEQ ID NO: 381520 - RNA, 22 nt, Human
ggaagaggaggagccaggcuuu

SEQ ID NO: 381521 - RNA, 20 nt, Human
ucauaaagaggaaauaaaua

SEQ ID NO: 381522 - RNA, 22 nt, Human
gcuguccucuuggacucagggc

SEQ ID NO: 381523 - RNA, 21 nt, Human
uuuuuucuugcgugaggccug

SEQ ID NO: 381524 - RNA, 22 nt, Human
agucagugaaaacuagaauguu

SEQ ID NO: 381525 - RNA, 20 nt, Human
auuucaguguuugcaauuuc

SEQ ID NO: 381526 - RNA, 22 nt, Human
ugccaggcuaaguggaggacuu

SEQ ID NO: 381527 - RNA, 22 nt, Human
ugaggaaguuguuucucuucua

SEQ ID NO: 381528 - RNA, 22 nt, Human
gcucugucuucagcacacagua

SEQ ID NO: 381529 - RNA, 22 nt, Human
cccagggauuauaaaggugaaa

SEQ ID NO: 381530 - RNA, 22 nt, Human
ccagguguaggacaccaaggga

SEQ ID NO: 381531 - RNA, 22 nt, Human
gggcagcuggccagguauucug

SEQ ID NO: 381532 - RNA, 22 nt, Human
ucagagagguuaaauaucuugu

SEQ ID NO: 381533 - RNA, 22 nt, Human
acauuucucuuagaguuggacu

SEQ ID NO: 381534 - RNA, 22 nt, Human
cuucuucacacuggucugaagc

SEQ ID NO: 381535 - RNA, 17 nt, Human
uuccaguuuaguauugu

SEQ ID NO: 381536 - RNA, 22 nt, Human
gcaggguaggugacagguaguc

SEQ ID NO: 381537 - RNA, 22 nt, Human
aucaggaagccagucuaaugga

SEQ ID NO: 381538 - RNA, 22 nt, Human
uaguaaaaguuuaguugaaagu

SEQ ID NO: 381539 - RNA, 22 nt, Human
ccaggagacaaagaugacugcu

SEQ ID NO: 381540 - RNA, 22 nt, Human
agggacccugaugacugaggag

SEQ ID NO: 381541 - RNA, 22 nt, Human
uugcagcuuagugauguuaucu

SEQ ID NO: 381542 - RNA, 22 nt, Human
caguucagcuagaagaaacaaa

SEQ ID NO: 381543 - RNA, 22 nt, Human
gcacccagaggucagcagugcu

SEQ ID NO: 381544 - RNA, 22 nt, Human
gaguuauuggguggaaagguag

SEQ ID NO: 381545 - RNA, 21 nt, Human
gccagccuguuuaccuguggu

SEQ ID NO: 381546 - RNA, 22 nt, Human
ccugagacaugaaccaggcucc

SEQ ID NO: 381547 - RNA, 18 nt, Human
gcagcugcaguuguagcu

SEQ ID NO: 381548 - RNA, 22 nt, Human
ucaggaaagaagaugcucagug

SEQ ID NO: 381549 - RNA, 22 nt, Human
auguggaaugaacaaaggaggc

SEQ ID NO: 381550 - RNA, 22 nt, Human
uggcagcaguagccaccccagc

SEQ ID NO: 381551 - RNA, 22 nt, Human
ggcaguggcuccucucuacucc

SEQ ID NO: 381552 - RNA, 22 nt, Human
aggccagcucuacccuuggacu

SEQ ID NO: 381553 - RNA, 22 nt, Human
ucugcagauuuaucagcagcug

SEQ ID NO: 381554 - RNA, 22 nt, Human
aauuaguauugcgauucauuag

SEQ ID NO: 381555 - RNA, 22 nt, Human
uggcagcugucagaaugcaaau

SEQ ID NO: 381556 - RNA, 22 nt, Human
aauacuaguuauuaaagcuuuu

SEQ ID NO: 381557 - RNA, 21 nt, Human
ggagaaggacaauguugagua

SEQ ID NO: 381558 - RNA, 22 nt, Human
gaauaaucaugaaauucaguga

SEQ ID NO: 381559 - RNA, 22 nt, Human
caaaugcaggucauaaccugag

SEQ ID NO: 381560 - RNA, 22 nt, Human
ggcagcuuucucacccaugacc

SEQ ID NO: 381561 - RNA, 22 nt, Human
gcaguguuguuaaaagauuaga

SEQ ID NO: 381562 - RNA, 22 nt, Human
uggaagccaggcccgcuccuaa

SEQ ID NO: 381563 - RNA, 22 nt, Human
acauucacgcucucaaagcuga

SEQ ID NO: 381564 - RNA, 22 nt, Human
aaaucaguuaagaugaggccau

SEQ ID NO: 381565 - RNA, 22 nt, Human
uuuuaucaaucauuaagacauu

SEQ ID NO: 381566 - RNA, 22 nt, Human
uaaugcuuaacagcuggcuuuu

SEQ ID NO: 381567 - RNA, 22 nt, Human
uguucauuuggcccuuuuguau

SEQ ID NO: 381568 - RNA, 22 nt, Human
ugccugucuuaauaucuggaaa

SEQ ID NO: 381569 - RNA, 22 nt, Human
gggcugucaugugucagugacc

SEQ ID NO: 381570 - RNA, 22 nt, Human
gggccagugaacaaugagggaa

SEQ ID NO: 381571 - RNA, 22 nt, Human
gaaaugcagauucugauucugu

SEQ ID NO: 381572 - RNA, 22 nt, Human
uagaaaucauuuagaaguauug

SEQ ID NO: 381573 - RNA, 22 nt, Human
agcagccagaaauccagaggug

SEQ ID NO: 381574 - RNA, 22 nt, Human
agcugguguccuccuggagcug

SEQ ID NO: 381575 - RNA, 22 nt, Human
ucacauuuucuacuacuguacg

SEQ ID NO: 381576 - RNA, 22 nt, Human
acagagcauuugggacagagag

SEQ ID NO: 381577 - RNA, 22 nt, Human
agggucugacuccucuggcaag

SEQ ID NO: 381578 - RNA, 22 nt, Human
gccucugcaucuucgccgcacu

SEQ ID NO: 381579 - RNA, 22 nt, Human
cacagggcuucucauggggugc

SEQ ID NO: 381580 - RNA, 22 nt, Human
guauuuucaugauuucagacca

SEQ ID NO: 381581 - RNA, 18 nt, Human
gucuggaggucaggagcu

SEQ ID NO: 381582 - RNA, 18 nt, Human
uggcagcaggaagccauu

SEQ ID NO: 381583 - RNA, 22 nt, Human
auguuucagauacagaucaaau

SEQ ID NO: 381584 - RNA, 22 nt, Human
gccuggagggucccucucugga

SEQ ID NO: 381585 - RNA, 22 nt, Human
ccaguuuaagacuuaucucaau

SEQ ID NO: 381586 - RNA, 18 nt, Human
aaaaagugcucaggccua

SEQ ID NO: 381587 - RNA, 22 nt, Human
gcucaggaaaacagucuaguaa

SEQ ID NO: 381588 - RNA, 22 nt, Human
uuucacauucagauauagacuu

SEQ ID NO: 381589 - RNA, 22 nt, Human
uuaugcaaaggggccucuuccu

SEQ ID NO: 381590 - RNA, 22 nt, Human
aacaaagucguugccuagaaga

SEQ ID NO: 381591 - RNA, 22 nt, Human
auuuucauggcuucugcucagu

SEQ ID NO: 381592 - RNA, 22 nt, Human
cuuaggcagggcuggaagaucu

SEQ ID NO: 381593 - RNA, 22 nt, Human
aaaaauugcugagaacggaauu

SEQ ID NO: 381594 - RNA, 22 nt, Human
uuccuaaaagaauacacuggau

SEQ ID NO: 381595 - RNA, 22 nt, Human
aggcacuguucccaguuauccu

SEQ ID NO: 381596 - RNA, 22 nt, Human
uaaggcaccauaauauauuuaa

SEQ ID NO: 381597 - RNA, 22 nt, Human
uuccagaagccuccauauuacu

SEQ ID NO: 381598 - RNA, 22 nt, Human
uugauuaaucccaugugaguag

SEQ ID NO: 381599 - RNA, 23 nt, Human
uggggcugauggagacggaccag

SEQ ID NO: 381600 - RNA, 22 nt, Human
cuucccuuggugaacagagcau

SEQ ID NO: 381601 - RNA, 22 nt, Human
uggcugaaucugcagcaggaag

SEQ ID NO: 381602 - RNA, 22 nt, Human
acugugugacuguuauuacugu

SEQ ID NO: 381603 - RNA, 22 nt, Human
gcagacagacugcagugauuuu

SEQ ID NO: 381604 - RNA, 21 nt, Human
aggagcuguguuagcuggucg

SEQ ID NO: 381605 - RNA, 22 nt, Human
uauucugugugauauguaaaug

SEQ ID NO: 381606 - RNA, 22 nt, Human
cagucucagaggugggaguggg

SEQ ID NO: 381607 - RNA, 22 nt, Human
cuggccagcugacagcagggcu

SEQ ID NO: 381608 - RNA, 22 nt, Human
cccaggcagcccuucugacgca

SEQ ID NO: 381609 - RNA, 22 nt, Human
cccucaggagaugucagcugga

SEQ ID NO: 381610 - RNA, 22 nt, Human
aaugaaaauuggacccuagaac

SEQ ID NO: 381611 - RNA, 22 nt, Human
aaguguauauaugacuuauaaa

SEQ ID NO: 381612 - RNA, 22 nt, Human
cagggcagggagcuuagaauga

SEQ ID NO: 381613 - RNA, 22 nt, Human
gaguguggugaacaggagcacc

SEQ ID NO: 381614 - RNA, 22 nt, Human
auuuucauuuugcagggugaga

SEQ ID NO: 381615 - RNA, 22 nt, Human
cagggacaauggcagagccuga

SEQ ID NO: 381616 - RNA, 22 nt, Human
uucagaaaucgaguuucauguc

SEQ ID NO: 381617 - RNA, 22 nt, Human
gccugccuuuuggaggcacauu

SEQ ID NO: 381618 - RNA, 17 nt, Human
acaggccugcuugcacu

SEQ ID NO: 381619 - RNA, 22 nt, Human
auauguguacgugcaguauaua

SEQ ID NO: 381620 - RNA, 22 nt, Human
uugcauugaugucuauacgcug

SEQ ID NO: 381621 - RNA, 22 nt, Human
cagggugccucccgcucgccgg

SEQ ID NO: 381622 - RNA, 22 nt, Human
cucagaguucuccugggaggug

SEQ ID NO: 381623 - RNA, 22 nt, Human
uggccuccccuaacagccucuu

SEQ ID NO: 381624 - RNA, 22 nt, Human
ucuuuacaguccucugucaauc

SEQ ID NO: 381625 - RNA, 22 nt, Human
cauaagaauauuccauccuuug

SEQ ID NO: 381626 - RNA, 22 nt, Human
cuacauaaauuuaucacagacu

SEQ ID NO: 381627 - RNA, 22 nt, Human
acaggccugagauuuugcauuu

SEQ ID NO: 381628 - RNA, 22 nt, Human
agguaagggucacaguucauau

SEQ ID NO: 381629 - RNA, 22 nt, Human
agcaguggagcgagauguuuaa

SEQ ID NO: 381630 - RNA, 22 nt, Human
aaaguguacuaugucaugaaca

SEQ ID NO: 381631 - RNA, 22 nt, Human
agauaacuuuuggguauucaug

SEQ ID NO: 381632 - RNA, 22 nt, Human
uugcuuccaguccaagucuguu

SEQ ID NO: 381633 - RNA, 21 nt, Human
ccugugugucugacugggcua

SEQ ID NO: 381634 - RNA, 23 nt, Human
aaaugcagggucgcagguuacag

SEQ ID NO: 381635 - RNA, 22 nt, Human
augaaaacggaccagagcuauu

SEQ ID NO: 381636 - RNA, 22 nt, Human
gccuaauaacuagcuguguaac

SEQ ID NO: 381637 - RNA, 22 nt, Human
uuuuggucagguuggucucgaa

SEQ ID NO: 381638 - RNA, 22 nt, Human
gucuucaacaauaacuaccacu

SEQ ID NO: 381639 - RNA, 22 nt, Human
cccaggcuggagugcaauggug

SEQ ID NO: 381640 - RNA, 22 nt, Human
gaggccuggugugucucccgcu

SEQ ID NO: 381641 - RNA, 22 nt, Human
cagcagggggcagcgcagauca

SEQ ID NO: 381642 - RNA, 22 nt, Human
aucaaaaugcuccagugauggu

SEQ ID NO: 381643 - RNA, 20 nt, Human
acccagcucugugcccuggg

SEQ ID NO: 381644 - RNA, 22 nt, Human
gagcacugauuuauuuuugucu

SEQ ID NO: 381645 - RNA, 22 nt, Human
agaggcagaaguguucaaaccc

SEQ ID NO: 381646 - RNA, 21 nt, Human
cccugcaggccagggcugagc

SEQ ID NO: 381647 - RNA, 21 nt, Human
ccauaccuaccucaccugguu

SEQ ID NO: 381648 - RNA, 22 nt, Human
cagcaucuuucucuucuggagu

SEQ ID NO: 381649 - RNA, 22 nt, Human
guugggaagcagauggaugagc

SEQ ID NO: 381650 - RNA, 22 nt, Human
agauaaugaaugccaugacauu

SEQ ID NO: 381651 - RNA, 23 nt, Human
auggagcugguacuagcuaccuc

SEQ ID NO: 381652 - RNA, 23 nt, Human
ucacaggggccagcgcucugugg

SEQ ID NO: 381653 - RNA, 22 nt, Human
agacagcauggagcugauaaca

SEQ ID NO: 381654 - RNA, 22 nt, Human
uuuccuuccagguuccuaaggc

SEQ ID NO: 381655 - RNA, 22 nt, Human
aggcugucugaccccagagccc

SEQ ID NO: 381656 - RNA, 22 nt, Human
uguucaaaugaucuucuuaaau

SEQ ID NO: 381657 - RNA, 22 nt, Human
uaagcuauuccugaagaagguu

SEQ ID NO: 381658 - RNA, 22 nt, Human
uuuacaaccucauauucugaug

SEQ ID NO: 381659 - RNA, 23 nt, Human
uggaccugaaccagugccucugu

SEQ ID NO: 381660 - RNA, 22 nt, Human
uuaauuuucucaucugugaaau

SEQ ID NO: 381661 - RNA, 22 nt, Human
cacagggcagguacucucagag

SEQ ID NO: 381662 - RNA, 22 nt, Human
uagagcuggccgggacagcugg

SEQ ID NO: 381663 - RNA, 22 nt, Human
cuagagggauguuaggauagca

SEQ ID NO: 381664 - RNA, 22 nt, Human
uugacaauguccuuugaauuuc

SEQ ID NO: 381665 - RNA, 23 nt, Human
ggcuggcccggggcugcuccuga

SEQ ID NO: 381666 - RNA, 22 nt, Human
ccucagccuuggccccaggcag

SEQ ID NO: 381667 - RNA, 22 nt, Human
uggcaggagguuuucuccagga

SEQ ID NO: 381668 - RNA, 22 nt, Human
gaggcagcaugguaccuuggag

SEQ ID NO: 381669 - RNA, 17 nt, Human
gcaagggaugggagauu

SEQ ID NO: 381670 - RNA, 22 nt, Human
cacagcuucugagugaggauuu

SEQ ID NO: 381671 - RNA, 22 nt, Human
gcugagugagguccagagcuug

SEQ ID NO: 381672 - RNA, 20 nt, Human
uccaggcagacagcuauggg

SEQ ID NO: 381673 - RNA, 22 nt, Human
aaacauuugcaacucgguuugg

SEQ ID NO: 381674 - RNA, 22 nt, Human
acuguguccucauguggcagaa

SEQ ID NO: 381675 - RNA, 17 nt, Human
agaaagaggauccacag

SEQ ID NO: 381676 - RNA, 22 nt, Human
agcuggcccucgagagccaauu

SEQ ID NO: 381677 - RNA, 19 nt, Human
ucaucucacagggccuggc

SEQ ID NO: 381678 - RNA, 22 nt, Human
aggcagcugcccucuccuuccu

SEQ ID NO: 381679 - RNA, 22 nt, Human
gccugcagcaugcuaggucuug

SEQ ID NO: 381680 - RNA, 22 nt, Human
cuagggcacuaggacucaugug

SEQ ID NO: 381681 - RNA, 22 nt, Human
uaguccuuacuuacuagaauaa

SEQ ID NO: 381682 - RNA, 22 nt, Human
cuugucagccaauuguggauuu

SEQ ID NO: 381683 - RNA, 22 nt, Human
cucaggagaugacagaagguau

SEQ ID NO: 381684 - RNA, 22 nt, Human
gcagggcuaauggggcaaguag

SEQ ID NO: 381685 - RNA, 22 nt, Human
agugcugacucugggcacagug

SEQ ID NO: 381686 - RNA, 22 nt, Human
gccagggaggcuguaggguccu

SEQ ID NO: 381687 - RNA, 22 nt, Human
agcagcagaggucagaaaggua

SEQ ID NO: 381688 - RNA, 22 nt, Human
uaaauguauaggcacuaaaccu

SEQ ID NO: 381689 - RNA, 22 nt, Human
caaugaaaauuuaaguugcagc

SEQ ID NO: 381690 - RNA, 22 nt, Human
augucuaaaagauaaaguuuaa

SEQ ID NO: 381691 - RNA, 22 nt, Human
uuguacaaguauuaugugaaca

SEQ ID NO: 381692 - RNA, 22 nt, Human
auccaguuuaugucauauucuu

SEQ ID NO: 381693 - RNA, 22 nt, Human
gaaggcacugaacuccuucugg

SEQ ID NO: 381694 - RNA, 22 nt, Human
aggaccuggaucacagagaucu

SEQ ID NO: 381695 - RNA, 22 nt, Human
caugaaaaugucaaguucugcu

SEQ ID NO: 381696 - RNA, 22 nt, Human
guugaguggguuaggaugcuga

SEQ ID NO: 381697 - RNA, 22 nt, Human
uccaggagguagugcuuaauuu

SEQ ID NO: 381698 - RNA, 22 nt, Human
aagucacagcuaaauagcuaag

SEQ ID NO: 381699 - RNA, 22 nt, Human
augguuuacugaucuuuuuggu

SEQ ID NO: 381700 - RNA, 22 nt, Human
aggcucugaucagguggcugug

SEQ ID NO: 381701 - RNA, 22 nt, Human
ggaggaccccagcagcucccca

SEQ ID NO: 381702 - RNA, 22 nt, Human
caagggaccugagauggucucu

SEQ ID NO: 381703 - RNA, 22 nt, Human
uggaaagucucuuuugacugua

SEQ ID NO: 381704 - RNA, 20 nt, Human
cagaggcauuuucagacucu

SEQ ID NO: 381705 - RNA, 22 nt, Human
gcugcugcgcuugucuacuguu

SEQ ID NO: 381706 - RNA, 22 nt, Human
ggguccagacacuccagaggaa

SEQ ID NO: 381707 - RNA, 22 nt, Human
augcugaagagugcacaggcua

SEQ ID NO: 381708 - RNA, 22 nt, Human
agcaccugucacaagcagaagg

SEQ ID NO: 381709 - RNA, 23 nt, Human
ugggccuggccucccaguccagc

SEQ ID NO: 381710 - RNA, 22 nt, Human
ugggcuccguugccuggggcag

SEQ ID NO: 381711 - RNA, 22 nt, Human
ggcuuccuuucacuacccucag

SEQ ID NO: 381712 - RNA, 22 nt, Human
gacccaggguuucugcacaggg

SEQ ID NO: 381713 - RNA, 20 nt, Human
aggcagacaaggagucuguu

SEQ ID NO: 381714 - RNA, 22 nt, Human
cccaggauggggcugcaguuau

SEQ ID NO: 381715 - RNA, 22 nt, Human
uccagaccuagggcaccccagu

SEQ ID NO: 381716 - RNA, 22 nt, Human
acaguggauauauuaaaugaga

SEQ ID NO: 381717 - RNA, 22 nt, Human
ccagcaggggaauauuuuuagg

SEQ ID NO: 381718 - RNA, 22 nt, Human
ugaagccagcuuuggaagacac

SEQ ID NO: 381719 - RNA, 22 nt, Human
uccuuugguucucuaagaugcu

SEQ ID NO: 381720 - RNA, 22 nt, Human
ccaaggagcaaguuuacaccug

SEQ ID NO: 381721 - RNA, 18 nt, Human
guccugagcucugcugua

SEQ ID NO: 381722 - RNA, 22 nt, Human
ggucucagcaguugcuuugacu

SEQ ID NO: 381723 - RNA, 22 nt, Human
aauuaggaauaaaugaguacuu

SEQ ID NO: 381724 - RNA, 22 nt, Human
caagaacaguuugccaaauugg

SEQ ID NO: 381725 - RNA, 22 nt, Human
caggcugaggcaguaggguuug

SEQ ID NO: 381726 - RNA, 22 nt, Human
ugcuagaaaucugaaacuagca

SEQ ID NO: 381727 - RNA, 22 nt, Human
uggggcuccuccuggcaggagg

SEQ ID NO: 381728 - RNA, 22 nt, Human
uuauuaggaaaaggucagaugu

SEQ ID NO: 381729 - RNA, 22 nt, Human
augcagagacagauguggcaug

SEQ ID NO: 381730 - RNA, 22 nt, Human
ugagacaaaauugacagacaaa

SEQ ID NO: 381731 - RNA, 22 nt, Human
cugcccugugaggguccuuggg

SEQ ID NO: 381732 - RNA, 22 nt, Human
cuugaaagcacuuaguaaauua

SEQ ID NO: 381733 - RNA, 22 nt, Human
cucugggcaaguuucuucauga

SEQ ID NO: 381734 - RNA, 22 nt, Human
uuauguacaauguuaauguaaa

SEQ ID NO: 381735 - RNA, 22 nt, Human
gcaccuggacagugacccuagc

SEQ ID NO: 381736 - RNA, 22 nt, Human
guaacauaguuugugcuucauc

SEQ ID NO: 381737 - RNA, 22 nt, Human
guuccacaaaauguacccaguu

SEQ ID NO: 381738 - RNA, 22 nt, Human
aggcagaauguuggaaaggaag

SEQ ID NO: 381739 - RNA, 22 nt, Human
uggcucagcuuacuuuugaggg

SEQ ID NO: 381740 - RNA, 22 nt, Human
auugacaauguauuuguaucug

SEQ ID NO: 381741 - RNA, 22 nt, Human
ccagcccugucaccaacuggag

SEQ ID NO: 381742 - RNA, 22 nt, Human
cuggcagcguguuuaugaacau

SEQ ID NO: 381743 - RNA, 22 nt, Human
gcaggccucuguugagggccuu

SEQ ID NO: 381744 - RNA, 22 nt, Human
guccucuggugaaagcauuccc

SEQ ID NO: 381745 - RNA, 23 nt, Human
ugauuuccagugagucaguggga

SEQ ID NO: 381746 - RNA, 22 nt, Human
ucagagagccucaggcacugcc

SEQ ID NO: 381747 - RNA, 22 nt, Human
uucacagucacccuucuccaug

SEQ ID NO: 381748 - RNA, 21 nt, Human
uauacaugugugcauacgugu

SEQ ID NO: 381749 - RNA, 22 nt, Human
uuaguaauguguuaauaugaau

SEQ ID NO: 381750 - RNA, 22 nt, Human
uggcucuguuuguuaacuagac

SEQ ID NO: 381751 - RNA, 22 nt, Human
gauuuccaggucauuaauaaag

SEQ ID NO: 381752 - RNA, 22 nt, Human
ccaggcuggagugcaauggugc

SEQ ID NO: 381753 - RNA, 22 nt, Human
cugcuggagguuggagcaugca

SEQ ID NO: 381754 - RNA, 22 nt, Human
gcaaggagacuguagggccaag

SEQ ID NO: 381755 - RNA, 22 nt, Human
aggcacuguacuagguacaggg

SEQ ID NO: 381756 - RNA, 22 nt, Human
ucuggauggucagcucuuccug

SEQ ID NO: 381757 - RNA, 22 nt, Human
ugggcagaucuuugguggcuag

SEQ ID NO: 381758 - RNA, 22 nt, Human
auuucuuacauaacaaauuguu

SEQ ID NO: 381759 - RNA, 22 nt, Human
cccagccuggugcacugugggg

SEQ ID NO: 381760 - RNA, 22 nt, Human
uuugaaagcaggugugggaggg

SEQ ID NO: 381761 - RNA, 22 nt, Human
aaguucaaggaagccuccaguu

SEQ ID NO: 381762 - RNA, 21 nt, Human
agggaaagaaaaugagcuaau

SEQ ID NO: 381763 - RNA, 22 nt, Human
aucaggaugacuauaaggcugc

SEQ ID NO: 381764 - RNA, 22 nt, Human
guuuuacacaccuaugaaagac

SEQ ID NO: 381765 - RNA, 22 nt, Human
uggcuggcgccgggcuagccac

SEQ ID NO: 381766 - RNA, 22 nt, Human
gagcucuguguagccugagggu

SEQ ID NO: 381767 - RNA, 22 nt, Human
caauagcagcuucugaaugcaa

SEQ ID NO: 381768 - RNA, 22 nt, Human
uugaaagacuucuccugugaaa

SEQ ID NO: 381769 - RNA, 22 nt, Human
ccagcaugagacgaugaugaag

SEQ ID NO: 381770 - RNA, 22 nt, Human
ugcuuuauaaccauuucugugg

SEQ ID NO: 381771 - RNA, 22 nt, Human
aauguuguuuuucugcaugucu

SEQ ID NO: 381772 - RNA, 22 nt, Human
gcacacagauuaggaaacagaa

SEQ ID NO: 381773 - RNA, 22 nt, Human
agccuggcccugcugaacucug

SEQ ID NO: 381774 - RNA, 21 nt, Human
agcagcaucagccucaccuga

SEQ ID NO: 381775 - RNA, 22 nt, Human
ucaggagacauucuuaaaguag

SEQ ID NO: 381776 - RNA, 22 nt, Human
agcagcauccccggccuccacc

SEQ ID NO: 381777 - RNA, 22 nt, Human
gaggaagaagcaaaccagcuaa

SEQ ID NO: 381778 - RNA, 17 nt, Human
cauguguaugugggagu

SEQ ID NO: 381779 - RNA, 22 nt, Human
ucuuuguaaaugccuagcauaa

SEQ ID NO: 381780 - RNA, 22 nt, Human
gaugcacagugacccugccagu

SEQ ID NO: 381781 - RNA, 22 nt, Human
augcacccagugucuggacuau

SEQ ID NO: 381782 - RNA, 22 nt, Human
gcccagugguaaaagcaggccu

SEQ ID NO: 381783 - RNA, 19 nt, Human
uagcugccuguuaccucca

SEQ ID NO: 381784 - RNA, 22 nt, Human
auuuauuauugugguuacuucu

SEQ ID NO: 381785 - RNA, 22 nt, Human
gaggcuccccaugaggccccag

SEQ ID NO: 381786 - RNA, 22 nt, Human
aggcugucucaccucaggaggg

SEQ ID NO: 381787 - RNA, 22 nt, Human
ggcagcuucuuaauauggagac

SEQ ID NO: 381788 - RNA, 22 nt, Human
aggcugggcaccguuuugaucc

SEQ ID NO: 381789 - RNA, 22 nt, Human
augcuguggaugccuugcccca

SEQ ID NO: 381790 - RNA, 22 nt, Human
aaugucugccugaacuuuauau

SEQ ID NO: 381791 - RNA, 22 nt, Human
gccugguggacacugggcauca

SEQ ID NO: 381792 - RNA, 22 nt, Human
aggagggaccuaggaauauugc

SEQ ID NO: 381793 - RNA, 18 nt, Human
ccuggcuuccaucuuggu

SEQ ID NO: 381794 - RNA, 22 nt, Human
ucauuacaguguuuauaugucu

SEQ ID NO: 381795 - RNA, 22 nt, Human
gccugagcuacuagggagucug

SEQ ID NO: 381796 - RNA, 22 nt, Human
augcuuuaaaugucuuuugcuu

SEQ ID NO: 381797 - RNA, 22 nt, Human
cugauuccaaagccaaagcuau

SEQ ID NO: 381798 - RNA, 19 nt, Human
agugucaucagcuacucag

SEQ ID NO: 381799 - RNA, 23 nt, Human
uucauuugucuacuucacuuguu

SEQ ID NO: 381800 - RNA, 22 nt, Human
aggagucauaaaugugaacaaa

SEQ ID NO: 381801 - RNA, 21 nt, Human
guccagagagccggcuccuga

SEQ ID NO: 381802 - RNA, 22 nt, Human
agagacagaggcaauauagcuu

SEQ ID NO: 381803 - RNA, 22 nt, Human
caguguuucugaguuccagcuc

SEQ ID NO: 381804 - RNA, 22 nt, Human
uuuugucuaagaacuuugcaaa

SEQ ID NO: 381805 - RNA, 22 nt, Human
cugcccugccuggccagugugg

SEQ ID NO: 381806 - RNA, 22 nt, Human
gcucugagcacugugcggcugg

SEQ ID NO: 381807 - RNA, 22 nt, Human
gcccucucggcauagcaggggc

SEQ ID NO: 381808 - RNA, 22 nt, Human
guuaggcaguuuucuucauucu

SEQ ID NO: 381809 - RNA, 22 nt, Human
cagcuuguuaccgagggagggu

SEQ ID NO: 381810 - RNA, 22 nt, Human
cagggugccuguccucagcaaa

SEQ ID NO: 381811 - RNA, 22 nt, Human
agcugcaggcccaugcucaguc

SEQ ID NO: 381812 - RNA, 22 nt, Human
gcuguggcugaagaugcaggga

SEQ ID NO: 381813 - RNA, 22 nt, Human
gucuuucuaugaugaacuguug

SEQ ID NO: 381814 - RNA, 22 nt, Human
aacaucuacuaagugccaggca

SEQ ID NO: 381815 - RNA, 22 nt, Human
uacaugcuccacuuucuccugu

SEQ ID NO: 381816 - RNA, 22 nt, Human
uggcagagaaccugggcuuugu

SEQ ID NO: 381817 - RNA, 22 nt, Human
gcugucacacaugggaucucag

SEQ ID NO: 381818 - RNA, 22 nt, Human
aggacagggauucaaacuccca

SEQ ID NO: 381819 - RNA, 22 nt, Human
cuuuauguuggggugucuuagu

SEQ ID NO: 381820 - RNA, 22 nt, Human
cuggccuuggaagggagcccgu

SEQ ID NO: 381821 - RNA, 22 nt, Human
gaagugaagguuacucuagauu

SEQ ID NO: 381822 - RNA, 22 nt, Human
uuacauuuuaguuaaccuguga

SEQ ID NO: 381823 - RNA, 20 nt, Human
auauguguacguguauacau

SEQ ID NO: 381824 - RNA, 22 nt, Human
uggaggcauuuuagguugucac

SEQ ID NO: 381825 - RNA, 22 nt, Human
acauaauaccuaggacaguuug

SEQ ID NO: 381826 - RNA, 22 nt, Human
cauggcaggugcagauucugug

SEQ ID NO: 381827 - RNA, 21 nt, Human
caaguccuuugccaaagugcu

SEQ ID NO: 381828 - RNA, 22 nt, Human
cagcucugcugggaggaugcag

SEQ ID NO: 381829 - RNA, 22 nt, Human
ucgugucagaucagagguuccu

SEQ ID NO: 381830 - RNA, 22 nt, Human
agcuggccuucggugucacugg

SEQ ID NO: 381831 - RNA, 22 nt, Human
ggugaccucaccuggucccacc

SEQ ID NO: 381832 - RNA, 22 nt, Human
ggacagaggguugacagaguau

SEQ ID NO: 381833 - RNA, 22 nt, Human
cugggagcugucaggagcgugu

SEQ ID NO: 381834 - RNA, 22 nt, Human
cuuucucugugugguaaagggc

SEQ ID NO: 381835 - RNA, 22 nt, Human
gaggaggcacuugagcagaugu

SEQ ID NO: 381836 - RNA, 22 nt, Human
agccuccaucccaugcacaaag

SEQ ID NO: 381837 - RNA, 22 nt, Human
ucaaagucuaucuguaauuacu

SEQ ID NO: 381838 - RNA, 22 nt, Human
ugaagcaaacgcuucuguuccu

SEQ ID NO: 381839 - RNA, 22 nt, Human
aaagaagggacagacugccucu

SEQ ID NO: 381840 - RNA, 22 nt, Human
ugaagcaggguggccagauugu

SEQ ID NO: 381841 - RNA, 22 nt, Human
uuccaaagaaauugaccaagac

SEQ ID NO: 381842 - RNA, 22 nt, Human
cugaaggauuagagagcacuua

SEQ ID NO: 381843 - RNA, 22 nt, Human
gggguggauuccuacaggucca

SEQ ID NO: 381844 - RNA, 22 nt, Human
agucuugcucuugcaucugcuu

SEQ ID NO: 381845 - RNA, 18 nt, Human
ucagaggagauaccuaaa

SEQ ID NO: 381846 - RNA, 22 nt, Human
agggacuggcucucugagcagg

SEQ ID NO: 381847 - RNA, 23 nt, Human
ccucagcauggcaggagcccagc

SEQ ID NO: 381848 - RNA, 22 nt, Human
gagcuuuaagggcacuggucuu

SEQ ID NO: 381849 - RNA, 22 nt, Human
caagggaguuacugagggcggg

SEQ ID NO: 381850 - RNA, 22 nt, Human
gagcuuccauggacgccaucug

SEQ ID NO: 381851 - RNA, 22 nt, Human
uucuuguauauaaaaaucauuu

SEQ ID NO: 381852 - RNA, 22 nt, Human
guccagggaaauagcgacaggg

SEQ ID NO: 381853 - RNA, 22 nt, Human
guuugcauggaagacagugagu

SEQ ID NO: 381854 - RNA, 22 nt, Human
ucccagaguucaaugggaaggu

SEQ ID NO: 381855 - RNA, 22 nt, Human
acuccuggggcugccaucacag

SEQ ID NO: 381856 - RNA, 22 nt, Human
cacucuccagcacaccccauuu

SEQ ID NO: 381857 - RNA, 22 nt, Human
cugcauuagucaugcuuugcag

SEQ ID NO: 381858 - RNA, 22 nt, Human
cauggcagaaaccugagcugcu

SEQ ID NO: 381859 - RNA, 22 nt, Human
guuugcauuuauuagucuucug

SEQ ID NO: 381860 - RNA, 22 nt, Human
uuuggaaaguguacaaauuuga

SEQ ID NO: 381861 - RNA, 22 nt, Human
cauuugaauuguucugugggaa

SEQ ID NO: 381862 - RNA, 17 nt, Human
ucuuuccugccaugcuc

SEQ ID NO: 381863 - RNA, 21 nt, Human
agaggcaggcauuaaguacac

SEQ ID NO: 381864 - RNA, 22 nt, Human
gaaggccauuagagccugugcc

SEQ ID NO: 381865 - RNA, 20 nt, Human
gaggcucugggcauggcgcc

SEQ ID NO: 381866 - RNA, 22 nt, Human
aaauuucuaagcagccacuucc

SEQ ID NO: 381867 - RNA, 22 nt, Human
aguguauugauuggaacagccu

SEQ ID NO: 381868 - RNA, 22 nt, Human
guugaaagagcauggacuugaa

SEQ ID NO: 381869 - RNA, 22 nt, Human
uaaauguguuguggaugaaguu

SEQ ID NO: 381870 - RNA, 22 nt, Human
uucacaaaacacuauuuucugg

SEQ ID NO: 381871 - RNA, 22 nt, Human
uugcugaaaacaguggguauug

SEQ ID NO: 381872 - RNA, 22 nt, Human
gcccucugcuggccucaccucg

SEQ ID NO: 381873 - RNA, 22 nt, Human
uggaaagacauucagccgcugg

SEQ ID NO: 381874 - RNA, 22 nt, Human
agagaacacgugcaucugcaau

SEQ ID NO: 381875 - RNA, 22 nt, Human
aggcugagucaaguuaggguga

SEQ ID NO: 381876 - RNA, 22 nt, Human
agggaccugcucacugccuggc

SEQ ID NO: 381877 - RNA, 19 nt, Human
acuguaaggcauuuuuuuc

SEQ ID NO: 381878 - RNA, 20 nt, Human
agcaagaguaaggacagcga

SEQ ID NO: 381879 - RNA, 22 nt, Human
uauuugcaacauaaaacucuga

SEQ ID NO: 381880 - RNA, 22 nt, Human
gcagugugaccgagcuugcuuc

SEQ ID NO: 381881 - RNA, 22 nt, Human
aggguggcaccuggaagggaug

SEQ ID NO: 381882 - RNA, 22 nt, Human
aggagaguaccauugggccgca

SEQ ID NO: 381883 - RNA, 22 nt, Human
ugagccaggaguuugaggcugu

SEQ ID NO: 381884 - RNA, 21 nt, Human
cagaaguaaggguaacuucuc

SEQ ID NO: 381885 - RNA, 22 nt, Human
aagggcugggucugguuaaccc

SEQ ID NO: 381886 - RNA, 22 nt, Human
agagugucugguagcugcucug

SEQ ID NO: 381887 - RNA, 22 nt, Human
gugcucuccuggcugcccugac

SEQ ID NO: 381888 - RNA, 22 nt, Human
ggcacugaucugauuucccucc

SEQ ID NO: 381889 - RNA, 20 nt, Human
agcugaggcaccugagguua

SEQ ID NO: 381890 - RNA, 22 nt, Human
uucauacaguggcugcacucca

SEQ ID NO: 381891 - RNA, 18 nt, Human
aaacuggcuuggccugug

SEQ ID NO: 381892 - RNA, 22 nt, Human
gagguagcgaguggacagugca

SEQ ID NO: 381893 - RNA, 22 nt, Human
gcagggcauagaggcacggagg

SEQ ID NO: 381894 - RNA, 22 nt, Human
auuauuaggugcucucugacaa

SEQ ID NO: 381895 - RNA, 22 nt, Human
agcagagcccuuccauggccuu

SEQ ID NO: 381896 - RNA, 23 nt, Human
ucagagaacucgggcagaugacc

SEQ ID NO: 381897 - RNA, 22 nt, Human
ugcagaaggaggaggaaaucca

SEQ ID NO: 381898 - RNA, 22 nt, Human
ugaggaagaacaagaauuuaga

SEQ ID NO: 381899 - RNA, 22 nt, Human
cauccaggcaccacaaccagcu

SEQ ID NO: 381900 - RNA, 22 nt, Human
cucagaagaacaaaggcucuac

SEQ ID NO: 381901 - RNA, 22 nt, Human
gcucugcuggaaguucucugga

SEQ ID NO: 381902 - RNA, 22 nt, Human
ugggcuguggagcaccuuugca

SEQ ID NO: 381903 - RNA, 22 nt, Human
aacccgggaggcagagguugug

SEQ ID NO: 381904 - RNA, 22 nt, Human
agagagcccgggccagggcaca

SEQ ID NO: 381905 - RNA, 22 nt, Human
ucugggaacagccuggcugugu

SEQ ID NO: 381906 - RNA, 22 nt, Human
caagggcauugcuugggaccuu

SEQ ID NO: 381907 - RNA, 22 nt, Human
gccagaaacauacacaucacuu

SEQ ID NO: 381908 - RNA, 22 nt, Human
gccaggcagauaugugagcuua

SEQ ID NO: 381909 - RNA, 22 nt, Human
gaguucuaaaggcagaacauaa

SEQ ID NO: 381910 - RNA, 21 nt, Human
acagagcauaaugguguggca

SEQ ID NO: 381911 - RNA, 22 nt, Human
cagggcccaagacacaaugagg

SEQ ID NO: 381912 - RNA, 22 nt, Human
cacaggguuguucugaggauuc

SEQ ID NO: 381913 - RNA, 22 nt, Human
gcagugggagcuuaggcagugc

SEQ ID NO: 381914 - RNA, 22 nt, Human
gcuauacagcaggagaauggaa

SEQ ID NO: 381915 - RNA, 22 nt, Human
gcagcaaucuucacagugucau

SEQ ID NO: 381916 - RNA, 21 nt, Human
aaggagccuaggaggcucagg

SEQ ID NO: 381917 - RNA, 22 nt, Human
uuaaguccuugguaauuuucuu

SEQ ID NO: 381918 - RNA, 22 nt, Human
ucaauaaauagcuuggcucagc

SEQ ID NO: 381919 - RNA, 22 nt, Human
caggagagauaugaguccccac

SEQ ID NO: 381920 - RNA, 22 nt, Human
aagauucucagagugaaagaau

SEQ ID NO: 381921 - RNA, 22 nt, Human
uauagagguggaaacugagguu

SEQ ID NO: 381922 - RNA, 22 nt, Human
cagacagacagccguggccacc

SEQ ID NO: 381923 - RNA, 22 nt, Human
aaagcauuucaugucuagaaag

SEQ ID NO: 381924 - RNA, 22 nt, Human
ccaggccuguguuguguggagg

SEQ ID NO: 381925 - RNA, 22 nt, Human
uuauuuucagcuaggaaagcca

SEQ ID NO: 381926 - RNA, 22 nt, Human
ccugucagcugauggcuaugua

SEQ ID NO: 381927 - RNA, 22 nt, Human
ugaagccaucaggaagccagca

SEQ ID NO: 381928 - RNA, 21 nt, Human
ucaggcagugcaaauacaugg

SEQ ID NO: 381929 - RNA, 21 nt, Human
ugcugccaucaugcagagaug

SEQ ID NO: 381930 - RNA, 22 nt, Human
ccucagagguuuucauucugua

SEQ ID NO: 381931 - RNA, 22 nt, Human
guucuucaucauuaacacucug

SEQ ID NO: 381932 - RNA, 22 nt, Human
gagggccaauggauuucaacug

SEQ ID NO: 381933 - RNA, 22 nt, Human
uuugaagucaaagauugauucc

SEQ ID NO: 381934 - RNA, 22 nt, Human
ugcuggguagaaguauuagucu

SEQ ID NO: 381935 - RNA, 22 nt, Human
uugugguuaaccgcacauuuuu

SEQ ID NO: 381936 - RNA, 22 nt, Human
ucugaacuccagcccugcucuc

SEQ ID NO: 381937 - RNA, 22 nt, Human
auaacagauacucucugugagg

SEQ ID NO: 381938 - RNA, 22 nt, Human
ggccugcacagagguggcucua

SEQ ID NO: 381939 - RNA, 22 nt, Human
uaaggcauucucaugcugugaa

SEQ ID NO: 381940 - RNA, 22 nt, Human
ucucacuuuccagacuuuucaa

SEQ ID NO: 381941 - RNA, 22 nt, Human
gaauucuuuucuuucugaaagu

SEQ ID NO: 381942 - RNA, 23 nt, Human
gggcuccagucucugcucaguug

SEQ ID NO: 381943 - RNA, 22 nt, Human
guggcgcagaggguggcagaga

SEQ ID NO: 381944 - RNA, 22 nt, Human
guuauuuuaucucugagagguu

SEQ ID NO: 381945 - RNA, 22 nt, Human
cccugagagugagugccaccuu

SEQ ID NO: 381946 - RNA, 22 nt, Human
uauuucugaauccaaaagguca

SEQ ID NO: 381947 - RNA, 22 nt, Human
auggcauuauagcaaugguuug

SEQ ID NO: 381948 - RNA, 22 nt, Human
aguuuaugaaacacagauuuga

SEQ ID NO: 381949 - RNA, 22 nt, Human
cccaggaguucgaggcuguagu

SEQ ID NO: 381950 - RNA, 21 nt, Human
auggauuuaaacaggccacaa

SEQ ID NO: 381951 - RNA, 22 nt, Human
cagagccugccaccuuucuccc

SEQ ID NO: 381952 - RNA, 22 nt, Human
uggagagguugaauaacuuguc

SEQ ID NO: 381953 - RNA, 22 nt, Human
aagcaguguucccagcuggccc

SEQ ID NO: 381954 - RNA, 22 nt, Human
uucuucaugcuguugcugcuug

SEQ ID NO: 381955 - RNA, 22 nt, Human
caggaaacauaugugcuugagg

SEQ ID NO: 381956 - RNA, 22 nt, Human
uccuugaauggacauuacacug

SEQ ID NO: 381957 - RNA, 22 nt, Human
caaauaguuuuucauguauuau

SEQ ID NO: 381958 - RNA, 22 nt, Human
ggacaggguaaguacuagugug

SEQ ID NO: 381959 - RNA, 22 nt, Human
acauuucuuagccuaguuccag

SEQ ID NO: 381960 - RNA, 22 nt, Human
guuauguauugggaaauccaag

SEQ ID NO: 381961 - RNA, 22 nt, Human
gcagagugauggaaugugggug

SEQ ID NO: 381962 - RNA, 22 nt, Human
ucauuacagagauauaaucuac

SEQ ID NO: 381963 - RNA, 22 nt, Human
ucuggcuccuggcuccacugcc

SEQ ID NO: 381964 - RNA, 21 nt, Human
gaacauuuggguuguuucuac

SEQ ID NO: 381965 - RNA, 22 nt, Human
aucugccugcaguggagguggg

SEQ ID NO: 381966 - RNA, 22 nt, Human
uccaggcauuccagccauucca

SEQ ID NO: 381967 - RNA, 22 nt, Human
ggggcagagcauagcuccaauu

SEQ ID NO: 381968 - RNA, 22 nt, Human
agccugugugcuuuggacaggg

SEQ ID NO: 381969 - RNA, 22 nt, Human
cuucuugcaauuuucaucuuau

SEQ ID NO: 381970 - RNA, 22 nt, Human
uacauucuggaaaggcacagac

SEQ ID NO: 381971 - RNA, 22 nt, Human
agaugagggguagaaaggacuu

SEQ ID NO: 381972 - RNA, 22 nt, Human
ugugccauuucuauucugcagc

SEQ ID NO: 381973 - RNA, 22 nt, Human
uuauuuaaaagugguaagauuc

SEQ ID NO: 381974 - RNA, 22 nt, Human
ugagaggcagaauggugccugc

SEQ ID NO: 381975 - RNA, 19 nt, Human
uggauuuauauucuuuauc

SEQ ID NO: 381976 - RNA, 22 nt, Human
aaauguuucuacuugugagcau

SEQ ID NO: 381977 - RNA, 22 nt, Human
acacuuuguuguggcauauacg

SEQ ID NO: 381978 - RNA, 22 nt, Human
cagcagagguuggaacaguucu

SEQ ID NO: 381979 - RNA, 22 nt, Human
uaaaauagcaugugcagugaaa

SEQ ID NO: 381980 - RNA, 22 nt, Human
ucuugccucuuccccuuuccau

SEQ ID NO: 381981 - RNA, 22 nt, Human
cuaguucuagaucccugaggaa

SEQ ID NO: 381982 - RNA, 22 nt, Human
uuaagacauucagauauuucua

SEQ ID NO: 381983 - RNA, 21 nt, Human
cccuguguuccacagcagaca

SEQ ID NO: 381984 - RNA, 22 nt, Human
ggaaccaggaguuacacgaguu

SEQ ID NO: 381985 - RNA, 19 nt, Human
gaaguccucuaguaaauuu

SEQ ID NO: 381986 - RNA, 22 nt, Human
gagggcaggggucuugcacggu

SEQ ID NO: 381987 - RNA, 22 nt, Human
gggcagcucucacagcagccaa

SEQ ID NO: 381988 - RNA, 22 nt, Human
auauauuugagaauauucauga

SEQ ID NO: 381989 - RNA, 22 nt, Human
ugagaaccaugaaaagcuguca

SEQ ID NO: 381990 - RNA, 22 nt, Human
gggagggaggugcugguucacg

SEQ ID NO: 381991 - RNA, 22 nt, Human
ugaaacacugcgauaaaauccu

SEQ ID NO: 381992 - RNA, 22 nt, Human
aguugacauccauaacaggaag

SEQ ID NO: 381993 - RNA, 22 nt, Human
uucucuuagcuguaaagucaau

SEQ ID NO: 381994 - RNA, 22 nt, Human
agggcuccgggcaggcgaugga

SEQ ID NO: 381995 - RNA, 22 nt, Human
cugugcuugcggguguggagcc

SEQ ID NO: 381996 - RNA, 22 nt, Human
ugcugggcuaggguggagcucu

SEQ ID NO: 381997 - RNA, 22 nt, Human
acucaggaauggggcugggacu

SEQ ID NO: 381998 - RNA, 19 nt, Human
cccagagcauccugaacuu

SEQ ID NO: 381999 - RNA, 22 nt, Human
gccuccccugcaauuguccuug

SEQ ID NO: 382000 - RNA, 22 nt, Human
uuccugaugcacacagucauuu

SEQ ID NO: 382001 - RNA, 21 nt, Human
guggcccugccgcagugucca

SEQ ID NO: 382002 - RNA, 22 nt, Human
ugugucaauuuucauuccuacu

SEQ ID NO: 382003 - RNA, 22 nt, Human
gacacagggggauguguggacg

SEQ ID NO: 382004 - RNA, 22 nt, Human
ucugaagaacugaguaaacaug

SEQ ID NO: 382005 - RNA, 22 nt, Human
ccucagggacuccaugcugcag

SEQ ID NO: 382006 - RNA, 22 nt, Human
gccaggcaguucaaguacacca

SEQ ID NO: 382007 - RNA, 22 nt, Human
cuggcugcuuguagacucgacu

SEQ ID NO: 382008 - RNA, 22 nt, Human
gagcuuugcuggaagccugggg

SEQ ID NO: 382009 - RNA, 22 nt, Human
gcagggacugugaucucacaga

SEQ ID NO: 382010 - RNA, 22 nt, Human
uccaugagcuagcuuuccaaag

SEQ ID NO: 382011 - RNA, 22 nt, Human
agucagcagccuggccaggaga

SEQ ID NO: 382012 - RNA, 20 nt, Human
gggcuagaccagggcagagg

SEQ ID NO: 382013 - RNA, 22 nt, Human
aggcacugcuucuaaguaggaa

SEQ ID NO: 382014 - RNA, 22 nt, Human
uuuucagugggcaaugauguga

SEQ ID NO: 382015 - RNA, 19 nt, Human
ugcaggaggacugagcaga

SEQ ID NO: 382016 - RNA, 22 nt, Human
aagcugccugccacgcuagaua

SEQ ID NO: 382017 - RNA, 20 nt, Human
gugcuucagaagccauugcu

SEQ ID NO: 382018 - RNA, 22 nt, Human
ucauuguuauguuuugcugucu

SEQ ID NO: 382019 - RNA, 22 nt, Human
gggggcuggaauauccaucaac

SEQ ID NO: 382020 - RNA, 22 nt, Human
ccuggccucagccuagggcuga

SEQ ID NO: 382021 - RNA, 22 nt, Human
aguucuagaagacuuuuccauu

SEQ ID NO: 382022 - RNA, 22 nt, Human
guaacaaaguuucuaggugcug

SEQ ID NO: 382023 - RNA, 22 nt, Human
aaagaggauggaguagucagcu

SEQ ID NO: 382024 - RNA, 22 nt, Human
agggagcugagcugugagcagc

SEQ ID NO: 382025 - RNA, 22 nt, Human
aaggcagcaugaaucccuguac

SEQ ID NO: 382026 - RNA, 20 nt, Human
uuucagugguuugugccuag

SEQ ID NO: 382027 - RNA, 22 nt, Human
ugcauuaugcuacccagaagcu

SEQ ID NO: 382028 - RNA, 22 nt, Human
uggcugaauaauauucuguugu

SEQ ID NO: 382029 - RNA, 22 nt, Human
cuuaacagcaagaucuguguca

SEQ ID NO: 382030 - RNA, 22 nt, Human
aauguucagaggacaauauaaa

SEQ ID NO: 382031 - RNA, 22 nt, Human
gcuccucucccagagcugcagg

SEQ ID NO: 382032 - RNA, 22 nt, Human
uaaaugugcacagguuagaagg

SEQ ID NO: 382033 - RNA, 22 nt, Human
gcugcucuccauggccgugagu

SEQ ID NO: 382034 - RNA, 22 nt, Human
aauauaauuuuauuccuagagu

SEQ ID NO: 382035 - RNA, 22 nt, Human
aaguccaucucugccccacaca

SEQ ID NO: 382036 - RNA, 22 nt, Human
agagucagcuuaugacacaguc

SEQ ID NO: 382037 - RNA, 22 nt, Human
caggugggccaugaaaaaugac

SEQ ID NO: 382038 - RNA, 22 nt, Human
uguccauggauagagcugcucg

SEQ ID NO: 382039 - RNA, 22 nt, Human
uacccagcaaucccuagagguu

SEQ ID NO: 382040 - RNA, 22 nt, Human
ggcuccucucuggccgcucccg

SEQ ID NO: 382041 - RNA, 22 nt, Human
gcagggucuugagaggcagcca

SEQ ID NO: 382042 - RNA, 19 nt, Human
agcuggggcgguguguguu

SEQ ID NO: 382043 - RNA, 22 nt, Human
uguggccuccccacuucugggg

SEQ ID NO: 382044 - RNA, 21 nt, Human
ucuccaguauccuucucugag

SEQ ID NO: 382045 - RNA, 22 nt, Human
ggggccugcgagguucaacuuc

SEQ ID NO: 382046 - RNA, 22 nt, Human
gauuuacagcuauacccaaugg

SEQ ID NO: 382047 - RNA, 22 nt, Human
agagcuggguggacuuguaguu

SEQ ID NO: 382048 - RNA, 18 nt, Human
gccaggcaggguggggaa

SEQ ID NO: 382049 - RNA, 22 nt, Human
ccaggcugccgaggaaagaaag

SEQ ID NO: 382050 - RNA, 19 nt, Human
acagagcucucugcuucug

SEQ ID NO: 382051 - RNA, 22 nt, Human
agcagcauggagaaaccguuca

SEQ ID NO: 382052 - RNA, 22 nt, Human
cagagacuggagugcaguggcg

SEQ ID NO: 382053 - RNA, 22 nt, Human
uggcagucuggguuggcaguua

SEQ ID NO: 382054 - RNA, 22 nt, Human
cccuggcagaaugucucugggc

SEQ ID NO: 382055 - RNA, 22 nt, Human
ucagaacauugacauucuuauu

SEQ ID NO: 382056 - RNA, 22 nt, Human
ccacugggcguuucuguccaau

SEQ ID NO: 382057 - RNA, 22 nt, Human
cuguggcuaugguguacauacu

SEQ ID NO: 382058 - RNA, 22 nt, Human
gccucuggucccucaugcugug

SEQ ID NO: 382059 - RNA, 22 nt, Human
acugcccuguaacugccaggua

SEQ ID NO: 382060 - RNA, 22 nt, Human
auuguaucuugucauuaugcau

SEQ ID NO: 382061 - RNA, 22 nt, Human
ugcuuuaucugugagaaccuga

SEQ ID NO: 382062 - RNA, 22 nt, Human
gcauuuauuucuuuacugcauc

SEQ ID NO: 382063 - RNA, 22 nt, Human
ucaggggacagccagcuggagg

SEQ ID NO: 382064 - RNA, 22 nt, Human
ucucugauguauaucagagaac

SEQ ID NO: 382065 - RNA, 22 nt, Human
caauuucaucuugugcuucaau

SEQ ID NO: 382066 - RNA, 22 nt, Human
ucacaccuguaaucccaggccu

SEQ ID NO: 382067 - RNA, 22 nt, Human
gcacagccagcaucugagggau

SEQ ID NO: 382068 - RNA, 22 nt, Human
gggcacugaaugccaagcuagg

SEQ ID NO: 382069 - RNA, 22 nt, Human
gccuucugauaucucuuggcau

SEQ ID NO: 382070 - RNA, 22 nt, Human
uccucugcuccaggcuggacuu

SEQ ID NO: 382071 - RNA, 22 nt, Human
cccagcagggucucugugucua

SEQ ID NO: 382072 - RNA, 22 nt, Human
uauucacaguugauuuacaguu

SEQ ID NO: 382073 - RNA, 22 nt, Human
acagaauauugguuacuguugc

SEQ ID NO: 382074 - RNA, 22 nt, Human
aggcugaggagggauguugcuu

SEQ ID NO: 382075 - RNA, 22 nt, Human
uaaaugcagcaguuucuguucu

SEQ ID NO: 382076 - RNA, 22 nt, Human
aaauacagaguugcuuaaaagc

SEQ ID NO: 382077 - RNA, 22 nt, Human
uggggaggacgggcgccuuccu

SEQ ID NO: 382078 - RNA, 22 nt, Human
ccugaagagcacucuagaguug

SEQ ID NO: 382079 - RNA, 23 nt, Human
ggccuccuggucuaggcuagacu

SEQ ID NO: 382080 - RNA, 22 nt, Human
ugcugccaugcagagcaacaga

SEQ ID NO: 382081 - RNA, 22 nt, Human
augcugugucaggaauuugaua

SEQ ID NO: 382082 - RNA, 22 nt, Human
cucuggagcgcugcuucccgcg

SEQ ID NO: 382083 - RNA, 22 nt, Human
aacuuucaggcaaugaauauuu

SEQ ID NO: 382084 - RNA, 22 nt, Human
ggagcugcauuuagggagccuu

SEQ ID NO: 382085 - RNA, 22 nt, Human
ggcugggcugcugggucagagc

SEQ ID NO: 382086 - RNA, 22 nt, Human
gggagcugagggaccucugugg

SEQ ID NO: 382087 - RNA, 22 nt, Human
ccuggcuuccuggagcucacaa

SEQ ID NO: 382088 - RNA, 22 nt, Human
augaggcaaggaucagguaagg

SEQ ID NO: 382089 - RNA, 22 nt, Human
acacugaaugcuguuuagaaau

SEQ ID NO: 382090 - RNA, 22 nt, Human
gcaggagacaacuguaaggaga

SEQ ID NO: 382091 - RNA, 22 nt, Human
cacagaauaaauugguaucaga

SEQ ID NO: 382092 - RNA, 22 nt, Human
ccagcugauucgguggugguug

SEQ ID NO: 382093 - RNA, 22 nt, Human
gccucugcggggcccgagcccg

SEQ ID NO: 382094 - RNA, 22 nt, Human
ucuggcucuguguccccaccca

SEQ ID NO: 382095 - RNA, 23 nt, Human
gugagucuugccuuugcugugga

SEQ ID NO: 382096 - RNA, 22 nt, Human
gaaauauacauugcaggaagag

SEQ ID NO: 382097 - RNA, 22 nt, Human
cccugcagggaggauucugaag

SEQ ID NO: 382098 - RNA, 22 nt, Human
ggagccagagggaugcaguuga

SEQ ID NO: 382099 - RNA, 22 nt, Human
aaucaggaugacugucauuuca

SEQ ID NO: 382100 - RNA, 21 nt, Human
aggaaguggccagauugggaa

SEQ ID NO: 382101 - RNA, 22 nt, Human
ugcaggugugguuccucagcca

SEQ ID NO: 382102 - RNA, 22 nt, Human
aaaguuuccugcuaagugcuau

SEQ ID NO: 382103 - RNA, 22 nt, Human
uaaggcacccuucugaguagag

SEQ ID NO: 382104 - RNA, 22 nt, Human
uuucaucuuccuuggcauaggu

SEQ ID NO: 382105 - RNA, 21 nt, Human
ucuuguccuugcucucccacu

SEQ ID NO: 382106 - RNA, 22 nt, Human
caagaaucuugcagcuuagacu

SEQ ID NO: 382107 - RNA, 22 nt, Human
auuaaagaaacccagcauguga

SEQ ID NO: 382108 - RNA, 22 nt, Human
ugugccugucacccucagagag

SEQ ID NO: 382109 - RNA, 22 nt, Human
aucuaagaguuaacaucaagaa

SEQ ID NO: 382110 - RNA, 22 nt, Human
gucccuggaucugggacagcug

SEQ ID NO: 382111 - RNA, 22 nt, Human
gggaguggagagcaauggauga

SEQ ID NO: 382112 - RNA, 22 nt, Human
uaggcugggaagaaagauucuc

SEQ ID NO: 382113 - RNA, 22 nt, Human
auccagggauaaaaguaagguu

SEQ ID NO: 382114 - RNA, 22 nt, Human
ucagcagauggguuguguuggc

SEQ ID NO: 382115 - RNA, 22 nt, Human
uauuugaagauucuucugaugu

SEQ ID NO: 382116 - RNA, 22 nt, Human
aucaggaucaugcuggguggga

SEQ ID NO: 382117 - RNA, 21 nt, Human
ggcacugagccagauggacuc

SEQ ID NO: 382118 - RNA, 22 nt, Human
caggagcugggucuggaagcag

SEQ ID NO: 382119 - RNA, 22 nt, Human
ucuccucaccaccagcagcaga

SEQ ID NO: 382120 - RNA, 18 nt, Human
ugugguggagcugccuuc

SEQ ID NO: 382121 - RNA, 22 nt, Human
gaaaucugucuuuguuugaaua

SEQ ID NO: 382122 - RNA, 22 nt, Human
aggaggccgcugaugggcuccc

SEQ ID NO: 382123 - RNA, 22 nt, Human
ggcacugggagaggugagacgg

SEQ ID NO: 382124 - RNA, 22 nt, Human
ugugccaggcacuugcccaggc

SEQ ID NO: 382125 - RNA, 22 nt, Human
cuugaaagucagcagaguggau

SEQ ID NO: 382126 - RNA, 22 nt, Human
cuuccugguuugaagcucgccg

SEQ ID NO: 382127 - RNA, 22 nt, Human
uuugcauugcauacaaggaacu

SEQ ID NO: 382128 - RNA, 22 nt, Human
cucagaaucugccaaguucagg

SEQ ID NO: 382129 - RNA, 22 nt, Human
gugagcaggauuucauggugua

SEQ ID NO: 382130 - RNA, 23 nt, Human
uugcacauuggagcuggucuucu

SEQ ID NO: 382131 - RNA, 22 nt, Human
aaagauuucagaagccugugcc

SEQ ID NO: 382132 - RNA, 22 nt, Human
agccuggauccuaggcucagcu

SEQ ID NO: 382133 - RNA, 22 nt, Human
uacauacaagauguguuuaaaa

SEQ ID NO: 382134 - RNA, 22 nt, Human
aaggagcucccggcagaccagg

SEQ ID NO: 382135 - RNA, 22 nt, Human
ugugccuuaugaauucuuucug

SEQ ID NO: 382136 - RNA, 22 nt, Human
agcuuuauauguuguuucucca

SEQ ID NO: 382137 - RNA, 22 nt, Human
cuggccaggcuugggacagaca

SEQ ID NO: 382138 - RNA, 22 nt, Human
aagcauuuugccacuugaaguu

SEQ ID NO: 382139 - RNA, 22 nt, Human
uacacauguauuuauguguaca

SEQ ID NO: 382140 - RNA, 22 nt, Human
cagaagcauugacuccuugcuc

SEQ ID NO: 382141 - RNA, 22 nt, Human
augucuuucucacagccaguuc

SEQ ID NO: 382142 - RNA, 22 nt, Human
uccugcagcugcagaccugggg

SEQ ID NO: 382143 - RNA, 17 nt, Human
ugcauuguuggaaauuu

SEQ ID NO: 382144 - RNA, 22 nt, Human
gcaggaggaucacuugagccca

SEQ ID NO: 382145 - RNA, 22 nt, Human
ccaggagcaaagaucacuggga

SEQ ID NO: 382146 - RNA, 22 nt, Human
cuagagaggcagauguccugug

SEQ ID NO: 382147 - RNA, 22 nt, Human
accgaaggaaacuggaaccguu

SEQ ID NO: 382148 - RNA, 22 nt, Human
cugcaagauuggaagaugcaau

SEQ ID NO: 382149 - RNA, 16 nt, Human
gccuggaguggcaggg

SEQ ID NO: 382150 - RNA, 22 nt, Human
agacaaaugguaauuaugucua

SEQ ID NO: 382151 - RNA, 22 nt, Human
gccaggcacugcucuaagcccu

SEQ ID NO: 382152 - RNA, 22 nt, Human
guggcuucacauggcauuuggc

SEQ ID NO: 382153 - RNA, 22 nt, Human
aaacaaacauagguuugaaagu

SEQ ID NO: 382154 - RNA, 22 nt, Human
agggccagagucuguguagaua

SEQ ID NO: 382155 - RNA, 20 nt, Human
ggggcaguggcucaugccug

SEQ ID NO: 382156 - RNA, 22 nt, Human
gcuccugucuuggggcacuggc

SEQ ID NO: 382157 - RNA, 22 nt, Human
ggcagcuucucccaggcuguuu

SEQ ID NO: 382158 - RNA, 22 nt, Human
accaggcacucuuguggcagug

SEQ ID NO: 382159 - RNA, 23 nt, Human
agaccugcaucugauaggcccug

SEQ ID NO: 382160 - RNA, 22 nt, Human
gcagugaaacaauaggaucaaa

SEQ ID NO: 382161 - RNA, 22 nt, Human
aaucuucacagagaaaauuagg

SEQ ID NO: 382162 - RNA, 22 nt, Human
uuacaugguuguuggaaaugcu

SEQ ID NO: 382163 - RNA, 22 nt, Human
uccacauccauugcuugacuuu

SEQ ID NO: 382164 - RNA, 19 nt, Human
uucauucuuucuacuuacc

SEQ ID NO: 382165 - RNA, 22 nt, Human
ggcagcaacucggagagaagag

SEQ ID NO: 382166 - RNA, 22 nt, Human
cccauuuaucccaagguuacuc

SEQ ID NO: 382167 - RNA, 22 nt, Human
agggcagcaaugcagcugcugc

SEQ ID NO: 382168 - RNA, 22 nt, Human
agcagccagagucugaacauua

SEQ ID NO: 382169 - RNA, 21 nt, Human
uaagaacauuaucuucuuccu

SEQ ID NO: 382170 - RNA, 22 nt, Human
ucuuagaaaugaaguucuuucu

SEQ ID NO: 382171 - RNA, 22 nt, Human
auuuccaccggcucaggaaguu

SEQ ID NO: 382172 - RNA, 22 nt, Human
ugggcccaagagagucuccaac

SEQ ID NO: 382173 - RNA, 22 nt, Human
ccaaggcaggggaucaaaguuu

SEQ ID NO: 382174 - RNA, 22 nt, Human
gccucugggcucugccccuggc

SEQ ID NO: 382175 - RNA, 22 nt, Human
caggcugcagcagcaguggccc

SEQ ID NO: 382176 - RNA, 22 nt, Human
gcucaggaucagccaccucuuu

SEQ ID NO: 382177 - RNA, 22 nt, Human
gcucagagauguucaguagcuu

SEQ ID NO: 382178 - RNA, 22 nt, Human
caguuauuaugaggucauuagg

SEQ ID NO: 382179 - RNA, 22 nt, Human
agggaagcccuggcugagaccc

SEQ ID NO: 382180 - RNA, 22 nt, Human
auugaaaggcaaaguaggaagc

SEQ ID NO: 382181 - RNA, 22 nt, Human
ugaauaguccuuggaauaacug

SEQ ID NO: 382182 - RNA, 22 nt, Human
aaaaugaugcuguaauuuggca

SEQ ID NO: 382183 - RNA, 22 nt, Human
ccucuggggguccucagagucu

SEQ ID NO: 382184 - RNA, 22 nt, Human
agggcagcagcccauggcucug

SEQ ID NO: 382185 - RNA, 22 nt, Human
ggucccaggagaauaggugcaa

SEQ ID NO: 382186 - RNA, 22 nt, Human
agacaaauggaguaugagcaac

SEQ ID NO: 382187 - RNA, 22 nt, Human
aguggcaguuugggagcuacag

SEQ ID NO: 382188 - RNA, 22 nt, Human
gguggggucacgacagagggaa

SEQ ID NO: 382189 - RNA, 22 nt, Human
aaggugugaagagaugggaaga

SEQ ID NO: 382190 - RNA, 22 nt, Human
ucagaggaucaugucccuacuc

SEQ ID NO: 382191 - RNA, 22 nt, Human
auucagcaaugagcuuggauuu

SEQ ID NO: 382192 - RNA, 22 nt, Human
agggcaguucagccacaggcuc

SEQ ID NO: 382193 - RNA, 20 nt, Human
cccuccagcaaccaggacuu

SEQ ID NO: 382194 - RNA, 22 nt, Human
cuauugaauuaacuauuaaagu

SEQ ID NO: 382195 - RNA, 22 nt, Human
augaagcugaccuugucuugcu

SEQ ID NO: 382196 - RNA, 22 nt, Human
uguauuagaucugagaacuucu

SEQ ID NO: 382197 - RNA, 19 nt, Human
uagaggagaagggaagugg

SEQ ID NO: 382198 - RNA, 22 nt, Human
auucacaaaaugauauagauac

SEQ ID NO: 382199 - RNA, 22 nt, Human
auguuuuugagauacaaacaga

SEQ ID NO: 382200 - RNA, 22 nt, Human
cccagcaguuguuggugcacau

SEQ ID NO: 382201 - RNA, 19 nt, Human
augucccaccgccccugag

SEQ ID NO: 382202 - RNA, 22 nt, Human
aauacauauggaauuccauguu

SEQ ID NO: 382203 - RNA, 22 nt, Human
gccagggagucugggccacaga

SEQ ID NO: 382204 - RNA, 22 nt, Human
ugucccaggccucauguugcca

SEQ ID NO: 382205 - RNA, 22 nt, Human
uggcagagucaucacaucugga

SEQ ID NO: 382206 - RNA, 22 nt, Human
cuugaaagcuuugcgucuucua

SEQ ID NO: 382207 - RNA, 22 nt, Human
gcagcauugugagguccugccc

SEQ ID NO: 382208 - RNA, 22 nt, Human
uccugccuucauacugcuguau

SEQ ID NO: 382209 - RNA, 22 nt, Human
uuacagaaugugccauuugguc

SEQ ID NO: 382210 - RNA, 22 nt, Human
acagacagauuuugucugaugu

SEQ ID NO: 382211 - RNA, 22 nt, Human
uguugagacugagggagucagc

SEQ ID NO: 382212 - RNA, 19 nt, Human
gcauaaaaugucaaugugu

SEQ ID NO: 382213 - RNA, 22 nt, Human
cuuagaugaagucacagaaccc

SEQ ID NO: 382214 - RNA, 22 nt, Human
caggcugggcagccuccccggc

SEQ ID NO: 382215 - RNA, 20 nt, Human
agguauaagaaaugugauuu

SEQ ID NO: 382216 - RNA, 22 nt, Human
ucccagccggugccuggguccc

SEQ ID NO: 382217 - RNA, 22 nt, Human
ggcuccugaaagacuaugggaa

SEQ ID NO: 382218 - RNA, 22 nt, Human
gcagcugccgugagcucacgcc

SEQ ID NO: 382219 - RNA, 22 nt, Human
ucagccacuacccaccuuaaca

SEQ ID NO: 382220 - RNA, 22 nt, Human
gugcccaggcccaaggcaccac

SEQ ID NO: 382221 - RNA, 22 nt, Human
ugcaggugcguuuucaagccuc

SEQ ID NO: 382222 - RNA, 17 nt, Human
uucucugagcuguauug

SEQ ID NO: 382223 - RNA, 22 nt, Human
cugaagcaaaggaucgagcuaa

SEQ ID NO: 382224 - RNA, 22 nt, Human
caucagaaaccuugaggaaacu

SEQ ID NO: 382225 - RNA, 22 nt, Human
ggaucugagagcaagcaggacc

SEQ ID NO: 382226 - RNA, 22 nt, Human
uugcacuccagcccgagcaaca

SEQ ID NO: 382227 - RNA, 22 nt, Human
agaagaaacugucggggauauu

SEQ ID NO: 382228 - RNA, 22 nt, Human
uuuaacuuaaucugcuugauga

SEQ ID NO: 382229 - RNA, 22 nt, Human
uuccuuaguguuagauucugug

SEQ ID NO: 382230 - RNA, 22 nt, Human
uauugaugcuuggauugggcca

SEQ ID NO: 382231 - RNA, 22 nt, Human
uuuccucugggcccugccaccc

SEQ ID NO: 382232 - RNA, 22 nt, Human
ugucuucaucucagacacaguu

SEQ ID NO: 382233 - RNA, 22 nt, Human
caguuuauagcucuagcagcuu

SEQ ID NO: 382234 - RNA, 22 nt, Human
cauggaaggcaaaagacacaga

SEQ ID NO: 382235 - RNA, 22 nt, Human
cuggcucaauuuguacugcugu

SEQ ID NO: 382236 - RNA, 22 nt, Human
uccaagaagucaucuaaacugu

SEQ ID NO: 382237 - RNA, 22 nt, Human
uagaaagugaagguuaauuaau

SEQ ID NO: 382238 - RNA, 22 nt, Human
agggccugggauguccuccuag

SEQ ID NO: 382239 - RNA, 22 nt, Human
aggucauuuuugccuucuauuu

SEQ ID NO: 382240 - RNA, 22 nt, Human
guauuaggaggaacacaggccu

SEQ ID NO: 382241 - RNA, 22 nt, Human
cuauuauuuccucaucuauaaa

SEQ ID NO: 382242 - RNA, 22 nt, Human
agagauucauguuuacuguagg

SEQ ID NO: 382243 - RNA, 22 nt, Human
uugaccuauguuucuucaucug

SEQ ID NO: 382244 - RNA, 22 nt, Human
uuuugaaagaguccugcuacag

SEQ ID NO: 382245 - RNA, 22 nt, Human
ccagggcagggaccacgugucu

SEQ ID NO: 382246 - RNA, 22 nt, Human
auucuuauuauaguaaaacagu

SEQ ID NO: 382247 - RNA, 22 nt, Human
ucucuucuauuugagacuauuu

SEQ ID NO: 382248 - RNA, 22 nt, Human
auccuugagccuuaucuuuugu

SEQ ID NO: 382249 - RNA, 23 nt, Human
aacaccaaggcucagagagauaa

SEQ ID NO: 382250 - RNA, 22 nt, Human
cagaaauucccauuucagauuc

SEQ ID NO: 382251 - RNA, 22 nt, Human
caauauucaguggaaaagccau

SEQ ID NO: 382252 - RNA, 19 nt, Human
ucaguuuuagucaucaguu

SEQ ID NO: 382253 - RNA, 17 nt, Human
agggacagcaguuuagg

SEQ ID NO: 382254 - RNA, 22 nt, Human
uccagcagguuggucaggugca

SEQ ID NO: 382255 - RNA, 22 nt, Human
uguaucaaaccaaauuaauucu

SEQ ID NO: 382256 - RNA, 22 nt, Human
cacccacauggaaauucacagu

SEQ ID NO: 382257 - RNA, 22 nt, Human
caaggcugcugcgggucgcacc

SEQ ID NO: 382258 - RNA, 22 nt, Human
ggagcagagcucuucaucugca

SEQ ID NO: 382259 - RNA, 17 nt, Human
gcauccaguaacaugcc

SEQ ID NO: 382260 - RNA, 22 nt, Human
ccagcagcuuuauuggcucucc

SEQ ID NO: 382261 - RNA, 22 nt, Human
aacacagcuaauuucugucaau

SEQ ID NO: 382262 - RNA, 22 nt, Human
ugcagaagcagagaguugccaa

SEQ ID NO: 382263 - RNA, 21 nt, Human
uucuucuuggacuguuuuggc

SEQ ID NO: 382264 - RNA, 20 nt, Human
aggcugggguguuuugccca

SEQ ID NO: 382265 - RNA, 17 nt, Human
gcugagugcagggaguc

SEQ ID NO: 382266 - RNA, 22 nt, Human
agugcuuucuugcuccaucagu

SEQ ID NO: 382267 - RNA, 22 nt, Human
aguggggagguccaggccaccc

SEQ ID NO: 382268 - RNA, 22 nt, Human
uguccuuagaagaagugaaaga

SEQ ID NO: 382269 - RNA, 22 nt, Human
gggcagcuagcccucuagccca

SEQ ID NO: 382270 - RNA, 21 nt, Human
ccagaggccucucuuggccac

SEQ ID NO: 382271 - RNA, 22 nt, Human
aaauggauggaaagcaauuuuu

SEQ ID NO: 382272 - RNA, 22 nt, Human
cagcaggcccagaguuucaugg

SEQ ID NO: 382273 - RNA, 22 nt, Human
uuuguaaaggccugaauuucag

SEQ ID NO: 382274 - RNA, 22 nt, Human
uuguuuuuaugaacauccagga

SEQ ID NO: 382275 - RNA, 22 nt, Human
uuuaggcacaacuacucagcua

SEQ ID NO: 382276 - RNA, 22 nt, Human
agcagcauggaugggccucagc

SEQ ID NO: 382277 - RNA, 22 nt, Human
gccagggcucgcggucccucgu

SEQ ID NO: 382278 - RNA, 22 nt, Human
cuccuuccugccccagugauaa

SEQ ID NO: 382279 - RNA, 22 nt, Human
uguaaauaaugcauguaaauca

SEQ ID NO: 382280 - RNA, 22 nt, Human
gcugggagucgcgucuguggcc

SEQ ID NO: 382281 - RNA, 22 nt, Human
gucaccagcaccaaugccacau

SEQ ID NO: 382282 - RNA, 22 nt, Human
ucaguuuucucaucugugaaau

SEQ ID NO: 382283 - RNA, 22 nt, Human
cugcagggaugugaggcccguu

SEQ ID NO: 382284 - RNA, 23 nt, Human
agggccacugggaaggauuacug

SEQ ID NO: 382285 - RNA, 23 nt, Human
acagugugguggacaaggagcag

SEQ ID NO: 382286 - RNA, 22 nt, Human
ugaaaucuucacuaagucucuu

SEQ ID NO: 382287 - RNA, 22 nt, Human
aguuuucacacucaccaaaagg

SEQ ID NO: 382288 - RNA, 22 nt, Human
gcugucacacauggccccagcu

SEQ ID NO: 382289 - RNA, 22 nt, Human
agaaaagguugaaaguaggauu

SEQ ID NO: 382290 - RNA, 22 nt, Human
ggucauugaaaucagaaggguu

SEQ ID NO: 382291 - RNA, 20 nt, Human
agccaggccucaaguuaagu

SEQ ID NO: 382292 - RNA, 19 nt, Human
ucccaggaagcaaauguca

SEQ ID NO: 382293 - RNA, 19 nt, Human
auacagauguauccaugau

SEQ ID NO: 382294 - RNA, 22 nt, Human
gggcaggaggcuaauucugcau

SEQ ID NO: 382295 - RNA, 22 nt, Human
ugauuuccaguugcugggugcu

SEQ ID NO: 382296 - RNA, 22 nt, Human
caggccuggguucaaaucccuu

SEQ ID NO: 382297 - RNA, 18 nt, Human
ucucuuuuccccucauug

SEQ ID NO: 382298 - RNA, 22 nt, Human
ugugucagagguagagauggca

SEQ ID NO: 382299 - RNA, 22 nt, Human
cuggcucuucagugcuugguuc

SEQ ID NO: 382300 - RNA, 22 nt, Human
agacaaguucugugggucaccu

SEQ ID NO: 382301 - RNA, 22 nt, Human
ucuucaucucagauuaacagga

SEQ ID NO: 382302 - RNA, 22 nt, Human
uuucuauugaucuaauaaacau

SEQ ID NO: 382303 - RNA, 22 nt, Human
ccugagugccaugagagcaccc

SEQ ID NO: 382304 - RNA, 22 nt, Human
ugccugcuaggcccugcugggu

SEQ ID NO: 382305 - RNA, 22 nt, Human
aggauuuauuacaagccauggu

SEQ ID NO: 382306 - RNA, 22 nt, Human
ugagcauggugggugcagagca

SEQ ID NO: 382307 - RNA, 22 nt, Human
gccaggcaugggcuucugggcg

SEQ ID NO: 382308 - RNA, 22 nt, Human
uagggaugagccaguggguagu

SEQ ID NO: 382309 - RNA, 22 nt, Human
caugcuccaaaaacaagagaau

SEQ ID NO: 382310 - RNA, 22 nt, Human
gccuggccugaacuaggaggug

SEQ ID NO: 382311 - RNA, 22 nt, Human
uuugucagucaugucugcuuuu

SEQ ID NO: 382312 - RNA, 22 nt, Human
ccaggccucuggcugcuuaguc

SEQ ID NO: 382313 - RNA, 22 nt, Human
ucaugaaucguggaaugauuua

SEQ ID NO: 382314 - RNA, 21 nt, Human
ggauggauagggaagagauuu

SEQ ID NO: 382315 - RNA, 22 nt, Human
ucagcaggcgguuccuuguggg

SEQ ID NO: 382316 - RNA, 22 nt, Human
ggcuguggggccggguacagug

SEQ ID NO: 382317 - RNA, 22 nt, Human
ccagccacugggccacugccag

SEQ ID NO: 382318 - RNA, 22 nt, Human
auucuucacauggauaggaucu

SEQ ID NO: 382319 - RNA, 22 nt, Human
agcaggaggguuuuguagaguc

SEQ ID NO: 382320 - RNA, 22 nt, Human
ucagcuuucucaaagaagcugg

SEQ ID NO: 382321 - RNA, 22 nt, Human
agccacagugcaagagagaaaa

SEQ ID NO: 382322 - RNA, 22 nt, Human
auagcuguuagauuggggucga

SEQ ID NO: 382323 - RNA, 22 nt, Human
gcaaacaagcugccugaagauu

SEQ ID NO: 382324 - RNA, 22 nt, Human
caccaggcuggagugcagaggu

SEQ ID NO: 382325 - RNA, 21 nt, Human
uccucugcagugagguggccu

SEQ ID NO: 382326 - RNA, 22 nt, Human
ccuggcagaauauuaaagugca

SEQ ID NO: 382327 - RNA, 22 nt, Human
ucucccacugcaagcccaggcu

SEQ ID NO: 382328 - RNA, 22 nt, Human
gcacagaaguaaaauacaaguc

SEQ ID NO: 382329 - RNA, 22 nt, Human
ugggacagagugagcuuuggcc

SEQ ID NO: 382330 - RNA, 22 nt, Human
gggcugagagcuggaaucugag

SEQ ID NO: 382331 - RNA, 22 nt, Human
acuaaauaguuuugacagaaca

SEQ ID NO: 382332 - RNA, 22 nt, Human
cagaaaaccugacucuagaacu

SEQ ID NO: 382333 - RNA, 22 nt, Human
gcagugguccaguucacaccca

SEQ ID NO: 382334 - RNA, 22 nt, Human
auaguggugagcugcauuuaug

SEQ ID NO: 382335 - RNA, 18 nt, Human
ugaccugcgcuucacggu

SEQ ID NO: 382336 - RNA, 18 nt, Human
cugucaccgccaccacac

SEQ ID NO: 382337 - RNA, 22 nt, Human
aaagcagaacugagagagcugg

SEQ ID NO: 382338 - RNA, 22 nt, Human
acacaggggaaaguggagcuga

SEQ ID NO: 382339 - RNA, 22 nt, Human
cagcaugguggagcugcucuuu

SEQ ID NO: 382340 - RNA, 22 nt, Human
guggcccucugauagggucagg

SEQ ID NO: 382341 - RNA, 22 nt, Human
cauugcacuuuggguccaggac

SEQ ID NO: 382342 - RNA, 22 nt, Human
uccaggacuagcauuucugaua

SEQ ID NO: 382343 - RNA, 19 nt, Human
ucccgcccacugagcgugc

SEQ ID NO: 382344 - RNA, 21 nt, Human
aaauacagaugcaaaucuguu

SEQ ID NO: 382345 - RNA, 20 nt, Human
agaagccaagugacauguuu

SEQ ID NO: 382346 - RNA, 22 nt, Human
uuguacaaaggauuuggaagag

SEQ ID NO: 382347 - RNA, 22 nt, Human
ucugagagccucuagccuaagu

SEQ ID NO: 382348 - RNA, 22 nt, Human
aagguucuaagggaagccaugc

SEQ ID NO: 382349 - RNA, 19 nt, Human
gggcuccuugggccucucu

SEQ ID NO: 382350 - RNA, 22 nt, Human
gugagaguguuuggaaauagaa

SEQ ID NO: 382351 - RNA, 22 nt, Human
cacugaaauauuaauaucuuau

SEQ ID NO: 382352 - RNA, 22 nt, Human
uauccaauucaccauugauggg

SEQ ID NO: 382353 - RNA, 22 nt, Human
cuugugcauuucauuccucagg

SEQ ID NO: 382354 - RNA, 22 nt, Human
caguugcuacaguucaagugug

SEQ ID NO: 382355 - RNA, 18 nt, Human
uccauuguucuacuguga

SEQ ID NO: 382356 - RNA, 19 nt, Human
gcagccaggugcucuaccu

SEQ ID NO: 382357 - RNA, 22 nt, Human
uggcccugacagguccugggca

SEQ ID NO: 382358 - RNA, 22 nt, Human
auccaaaccuggacaugagugg

SEQ ID NO: 382359 - RNA, 22 nt, Human
ccagcgcuucccaucagggagg

SEQ ID NO: 382360 - RNA, 19 nt, Human
agucuuucccacucgucuu

SEQ ID NO: 382361 - RNA, 22 nt, Human
uaauacuuuugccuuguauuca

SEQ ID NO: 382362 - RNA, 22 nt, Human
aaauguaguauguugcauguau

SEQ ID NO: 382363 - RNA, 22 nt, Human
gagaagcagguuuagcagacaa

SEQ ID NO: 382364 - RNA, 22 nt, Human
ucucuucauagugacacccauc

SEQ ID NO: 382365 - RNA, 22 nt, Human
cccaggugcugcgugaagccuc

SEQ ID NO: 382366 - RNA, 22 nt, Human
caugagauaauuuuucuccagu

SEQ ID NO: 382367 - RNA, 21 nt, Human
uaaaugugagcagggcugggc

SEQ ID NO: 382368 - RNA, 22 nt, Human
aaaagguaguugccaaauaagg

SEQ ID NO: 382369 - RNA, 18 nt, Human
uccagagcuacuguggug

SEQ ID NO: 382370 - RNA, 22 nt, Human
aagcauuugguucugaagacuc

SEQ ID NO: 382371 - RNA, 22 nt, Human
gcccaggaggcagagguugugg

SEQ ID NO: 382372 - RNA, 22 nt, Human
gaagaauccuguccucuuuagg

SEQ ID NO: 382373 - RNA, 22 nt, Human
gcugagguggcugccuuaguaa

SEQ ID NO: 382374 - RNA, 22 nt, Human
agaauuguaagcaauuugauua

SEQ ID NO: 382375 - RNA, 22 nt, Human
aaugcacauauauguguauaca

SEQ ID NO: 382376 - RNA, 22 nt, Human
gggcagcucagccaccaugcag

SEQ ID NO: 382377 - RNA, 22 nt, Human
gcaggggaguggaugauggauu

SEQ ID NO: 382378 - RNA, 21 nt, Human
acauuuucuguuuuaggaagu

SEQ ID NO: 382379 - RNA, 22 nt, Human
cugaaugucgaucagcuugggu

SEQ ID NO: 382380 - RNA, 22 nt, Human
cugcucuguucccccaucaucu

SEQ ID NO: 382381 - RNA, 22 nt, Human
augaauaaacaggugccucuuc

SEQ ID NO: 382382 - RNA, 22 nt, Human
agagcagcuggggcagagacca

SEQ ID NO: 382383 - RNA, 22 nt, Human
guugaaagaucauguggcugcc

SEQ ID NO: 382384 - RNA, 22 nt, Human
uuuauugacccaaagcgagagu

SEQ ID NO: 382385 - RNA, 22 nt, Human
aggaagccaugguggacgucua

SEQ ID NO: 382386 - RNA, 22 nt, Human
gagaaguuucugguuugcauag

SEQ ID NO: 382387 - RNA, 22 nt, Human
ggccucgcggcuucugguggcu

SEQ ID NO: 382388 - RNA, 20 nt, Human
aacacagauaccaaagguug

SEQ ID NO: 382389 - RNA, 18 nt, Human
uccagcgugcuccagggc

SEQ ID NO: 382390 - RNA, 22 nt, Human
agcugcuguccuaggcacugua

SEQ ID NO: 382391 - RNA, 22 nt, Human
aucagagaccggucaagucaug

SEQ ID NO: 382392 - RNA, 22 nt, Human
ugucaccacuggcugaaacacc

SEQ ID NO: 382393 - RNA, 22 nt, Human
agugaguggacccugcaaggaa

SEQ ID NO: 382394 - RNA, 22 nt, Human
aagccaagaguuaacuauuugu

SEQ ID NO: 382395 - RNA, 22 nt, Human
cugaggcugaagagggccuacg

SEQ ID NO: 382396 - RNA, 22 nt, Human
auuucuucaggucagaaauaga

SEQ ID NO: 382397 - RNA, 22 nt, Human
cuuaauuuaagccuagaaugca

SEQ ID NO: 382398 - RNA, 22 nt, Human
caggacaguauaggcuuuagga

SEQ ID NO: 382399 - RNA, 22 nt, Human
uggcagcuuccugcucauagga

SEQ ID NO: 382400 - RNA, 22 nt, Human
aguccaguguguucuggcagca

SEQ ID NO: 382401 - RNA, 22 nt, Human
uagugcacacgcauguagcagu

SEQ ID NO: 382402 - RNA, 22 nt, Human
gggauggggucaacauguaccu

SEQ ID NO: 382403 - RNA, 22 nt, Human
uuccaggaggagguacuagagg

SEQ ID NO: 382404 - RNA, 22 nt, Human
gugucccaaagauuagaaauca

SEQ ID NO: 382405 - RNA, 22 nt, Human
augaugguggguaauguguaaa

SEQ ID NO: 382406 - RNA, 22 nt, Human
ccagcagcgauagggugagugc

SEQ ID NO: 382407 - RNA, 22 nt, Human
cucaggauuuacuaauuucaag

SEQ ID NO: 382408 - RNA, 22 nt, Human
acaaaguuaacaguuggauagu

SEQ ID NO: 382409 - RNA, 22 nt, Human
ucucagaguaauucuuuaaggu

SEQ ID NO: 382410 - RNA, 22 nt, Human
ccacagagacagagcccagggu

SEQ ID NO: 382411 - RNA, 22 nt, Human
ucccaggauguuuauggcuggu

SEQ ID NO: 382412 - RNA, 23 nt, Human
gcucugagggcuuaucccuccca

SEQ ID NO: 382413 - RNA, 22 nt, Human
gagguggccucaagcagucuuc

SEQ ID NO: 382414 - RNA, 22 nt, Human
ggagcuguugcgcaugcgcucg

SEQ ID NO: 382415 - RNA, 19 nt, Human
cagagcugcuggccucguc

SEQ ID NO: 382416 - RNA, 21 nt, Human
agagacugucacugcaguacc

SEQ ID NO: 382417 - RNA, 22 nt, Human
aucauaaaauugcaccauuucu

SEQ ID NO: 382418 - RNA, 22 nt, Human
gggcugaccaaugccuugcuuu

SEQ ID NO: 382419 - RNA, 22 nt, Human
aauaauuuugagagccuggaaa

SEQ ID NO: 382420 - RNA, 22 nt, Human
gucagagagggcacgugcacac

SEQ ID NO: 382421 - RNA, 22 nt, Human
acccaggacaaaauaaccaggu

SEQ ID NO: 382422 - RNA, 22 nt, Human
agcagcaucaacccucccgugu

SEQ ID NO: 382423 - RNA, 22 nt, Human
ugcaaucucggcacuuugggag

SEQ ID NO: 382424 - RNA, 22 nt, Human
uccacagaauguaagauccaca

SEQ ID NO: 382425 - RNA, 22 nt, Human
ugacaauacagagagagcaaaa

SEQ ID NO: 382426 - RNA, 22 nt, Human
cagggcagagccaggauuucaa

SEQ ID NO: 382427 - RNA, 22 nt, Human
gaggucaggggagaggcugaug

SEQ ID NO: 382428 - RNA, 22 nt, Human
gagaaagauguaggcugggagg

SEQ ID NO: 382429 - RNA, 22 nt, Human
ccugccuguacuagagacccag

SEQ ID NO: 382430 - RNA, 22 nt, Human
ucagugugaggucuuccacccg

SEQ ID NO: 382431 - RNA, 22 nt, Human
aggccuggccugggcggcauug

SEQ ID NO: 382432 - RNA, 21 nt, Human
uucugggaaaugagcuggggc

SEQ ID NO: 382433 - RNA, 22 nt, Human
cccgggaggaggaaguugcagu

SEQ ID NO: 382434 - RNA, 22 nt, Human
aucucagacauguuguccauga

SEQ ID NO: 382435 - RNA, 22 nt, Human
gaacuguaguuaauacuacaca

SEQ ID NO: 382436 - RNA, 20 nt, Human
gaggccucagccucagcucc

SEQ ID NO: 382437 - RNA, 17 nt, Human
gguguauggggagggaa

SEQ ID NO: 382438 - RNA, 22 nt, Human
ggcacugagaggcucuuccuaa

SEQ ID NO: 382439 - RNA, 22 nt, Human
cuagaaauguagauucuuagug

SEQ ID NO: 382440 - RNA, 22 nt, Human
ucagguggcuuggagggggacg

SEQ ID NO: 382441 - RNA, 22 nt, Human
ccugaggcuuaaucugucccaa

SEQ ID NO: 382442 - RNA, 22 nt, Human
gcagccagccccucugaccucu

SEQ ID NO: 382443 - RNA, 23 nt, Human
uuuauuuauuuaggcugagggau

SEQ ID NO: 382444 - RNA, 22 nt, Human
ugaaggugucuuugugaacauc

SEQ ID NO: 382445 - RNA, 22 nt, Human
cuuguucaguccugacuuccug

SEQ ID NO: 382446 - RNA, 22 nt, Human
ugccaaggagcuggaucagggc

SEQ ID NO: 382447 - RNA, 22 nt, Human
agaauucauaggaaguuuccua

SEQ ID NO: 382448 - RNA, 22 nt, Human
gcaggggcugcugggaacucgg

SEQ ID NO: 382449 - RNA, 20 nt, Human
uuugucuguuaaguguuucu

SEQ ID NO: 382450 - RNA, 22 nt, Human
gggcugcacguauucugcucac

SEQ ID NO: 382451 - RNA, 18 nt, Human
gagcugccauauuuaguu

SEQ ID NO: 382452 - RNA, 22 nt, Human
agucccagcuucccccaugcag

SEQ ID NO: 382453 - RNA, 20 nt, Human
auguccagugacuggaccau

SEQ ID NO: 382454 - RNA, 22 nt, Human
gaggcagcaauaaaaagaauuu

SEQ ID NO: 382455 - RNA, 21 nt, Human
uggcacugcuuagcagguucc

SEQ ID NO: 382456 - RNA, 22 nt, Human
cccagcagccuggauguucuuu

SEQ ID NO: 382457 - RNA, 21 nt, Human
agcagaggggacauguuugau

SEQ ID NO: 382458 - RNA, 22 nt, Human
cacagcuugggcucugacaaua

SEQ ID NO: 382459 - RNA, 22 nt, Human
ggcagaggugacagugucuuuu

SEQ ID NO: 382460 - RNA, 22 nt, Human
ccaggguggaggcuggauggag

SEQ ID NO: 382461 - RNA, 17 nt, Human
agugaaauuuacauugc

SEQ ID NO: 382462 - RNA, 22 nt, Human
agggcaaguugagugugcgugg

SEQ ID NO: 382463 - RNA, 22 nt, Human
agccagggauggcagugcccag

SEQ ID NO: 382464 - RNA, 22 nt, Human
aggcagcagacuguuaaucaga

SEQ ID NO: 382465 - RNA, 22 nt, Human
cccugcagcuuuugcauaguca

SEQ ID NO: 382466 - RNA, 19 nt, Human
agucccaggcccgaaagag

SEQ ID NO: 382467 - RNA, 22 nt, Human
cucccugggcagauguggcucu

SEQ ID NO: 382468 - RNA, 21 nt, Human
gggagcuggaaacugggugac

SEQ ID NO: 382469 - RNA, 22 nt, Human
uugcuguguaacuccuggccug

SEQ ID NO: 382470 - RNA, 22 nt, Human
caguggugaagagcaggggcuc

SEQ ID NO: 382471 - RNA, 22 nt, Human
guucuaauuuggggcuccuuag

SEQ ID NO: 382472 - RNA, 22 nt, Human
uuugcuauaaaagggucacacg

SEQ ID NO: 382473 - RNA, 20 nt, Human
ugcugucguguuuucugcuu

SEQ ID NO: 382474 - RNA, 22 nt, Human
uagggcucugagaguucagccu

SEQ ID NO: 382475 - RNA, 22 nt, Human
ucagggcauucaagaggccugg

SEQ ID NO: 382476 - RNA, 22 nt, Human
cagcuuuaguaacccacugcuc

SEQ ID NO: 382477 - RNA, 23 nt, Human
gaagcagaugucugaguaggcag

SEQ ID NO: 382478 - RNA, 22 nt, Human
ggacccugggcuugcuccuggg

SEQ ID NO: 382479 - RNA, 23 nt, Human
gugcucugcggucugcuagucug

SEQ ID NO: 382480 - RNA, 22 nt, Human
gaauguaauagucaguagaaca

SEQ ID NO: 382481 - RNA, 22 nt, Human
uuucaugaggggcaaaaucuca

SEQ ID NO: 382482 - RNA, 22 nt, Human
ccugcuggccaguggagggcug

SEQ ID NO: 382483 - RNA, 23 nt, Human
ugcagcugccucuggcgggccgg

SEQ ID NO: 382484 - RNA, 22 nt, Human
gcuggggcugggcugaggaaga

SEQ ID NO: 382485 - RNA, 22 nt, Human
aauguguacuuuuucaugcuca

SEQ ID NO: 382486 - RNA, 22 nt, Human
acuguccauucacucauauuca

SEQ ID NO: 382487 - RNA, 22 nt, Human
aaaucuggccccuugccuauuu

SEQ ID NO: 382488 - RNA, 22 nt, Human
ugauaauauuuugaaucauaag

SEQ ID NO: 382489 - RNA, 22 nt, Human
uugauuaaacaggcauauucaa

SEQ ID NO: 382490 - RNA, 22 nt, Human
augaaacaguguguauagcaaa

SEQ ID NO: 382491 - RNA, 22 nt, Human
uuauucuucuucucuugccagg

SEQ ID NO: 382492 - RNA, 22 nt, Human
gggaagguauuuagcugcugaa

SEQ ID NO: 382493 - RNA, 21 nt, Human
cccuugccugcacuccucggc

SEQ ID NO: 382494 - RNA, 17 nt, Human
cugagcauccgugcucu

SEQ ID NO: 382495 - RNA, 22 nt, Human
aagcugccagauucagucugcu

SEQ ID NO: 382496 - RNA, 22 nt, Human
cagcuucucagaaagcugaggu

SEQ ID NO: 382497 - RNA, 22 nt, Human
aaucauaauucaaauaagcuua

SEQ ID NO: 382498 - RNA, 23 nt, Human
aguuuuucugcaugguucuguau

SEQ ID NO: 382499 - RNA, 23 nt, Human
aagcugccuucgcaguuggucug

SEQ ID NO: 382500 - RNA, 22 nt, Human
uaagacaauucuucagucacaa

SEQ ID NO: 382501 - RNA, 22 nt, Human
cccuguacagucucuguggcac

SEQ ID NO: 382502 - RNA, 22 nt, Human
ggagaggagcuauugggggcuc

SEQ ID NO: 382503 - RNA, 22 nt, Human
uucaggaucaaguugccaguag

SEQ ID NO: 382504 - RNA, 22 nt, Human
auuucauacuaaggcucaaaaa

SEQ ID NO: 382505 - RNA, 22 nt, Human
ucucugggugauggcagggcac

SEQ ID NO: 382506 - RNA, 23 nt, Human
uuugcaaauuggacacaaccaca

SEQ ID NO: 382507 - RNA, 22 nt, Human
agcagcauucucugguaugggg

SEQ ID NO: 382508 - RNA, 22 nt, Human
aagucuguuugagugucacacu

SEQ ID NO: 382509 - RNA, 22 nt, Human
ugaguccaccuuaguauauggg

SEQ ID NO: 382510 - RNA, 22 nt, Human
agggccuggaacuggagaccac

SEQ ID NO: 382511 - RNA, 22 nt, Human
uggaggcaguuuaagucugaga

SEQ ID NO: 382512 - RNA, 22 nt, Human
ugccaggcauuugacagacacu

SEQ ID NO: 382513 - RNA, 22 nt, Human
cacccuagcugucauuucaguu

SEQ ID NO: 382514 - RNA, 22 nt, Human
agaggggcucauauccugucau

SEQ ID NO: 382515 - RNA, 22 nt, Human
uguggcccagaugagugugcua

SEQ ID NO: 382516 - RNA, 22 nt, Human
agcaguggugugaggagggcuc

SEQ ID NO: 382517 - RNA, 22 nt, Human
cccagcaguaaccaguggaaau

SEQ ID NO: 382518 - RNA, 22 nt, Human
ucacauuuucauauucucugag

SEQ ID NO: 382519 - RNA, 22 nt, Human
ccaagaugaucuuuacaguguu

SEQ ID NO: 382520 - RNA, 22 nt, Human
aagucacccuagggccuggacu

SEQ ID NO: 382521 - RNA, 22 nt, Human
uugcauuugagaaaguucuccu

SEQ ID NO: 382522 - RNA, 22 nt, Human
ucaucuugcugccauugcuuua

SEQ ID NO: 382523 - RNA, 20 nt, Human
aggcacuguugucuguaucc

SEQ ID NO: 382524 - RNA, 22 nt, Human
augggcagcagcugccauucau

SEQ ID NO: 382525 - RNA, 22 nt, Human
auugcacaaacacagucagacu

SEQ ID NO: 382526 - RNA, 22 nt, Human
cucugagcccgcugcagcccca

SEQ ID NO: 382527 - RNA, 22 nt, Human
aaaagagucuuaggcagucaua

SEQ ID NO: 382528 - RNA, 21 nt, Human
gagcucucaggcaagaagcag

SEQ ID NO: 382529 - RNA, 22 nt, Human
auggcagauggcuggagcaggu

SEQ ID NO: 382530 - RNA, 22 nt, Human
gaaaugcaaauucucucucgcu

SEQ ID NO: 382531 - RNA, 22 nt, Human
cugcagggugacguugcccacc

SEQ ID NO: 382532 - RNA, 22 nt, Human
ggcugccagugagugcagaccg

SEQ ID NO: 382533 - RNA, 22 nt, Human
auagaauuauggaaagcaucuu

SEQ ID NO: 382534 - RNA, 17 nt, Human
agagggaaaaugcgguu

SEQ ID NO: 382535 - RNA, 22 nt, Human
auuguuaauguugcacuaaggu

SEQ ID NO: 382536 - RNA, 22 nt, Human
auuuagccucauuuuugacaua

SEQ ID NO: 382537 - RNA, 22 nt, Human
auucuuggagcagucaaagaag

SEQ ID NO: 382538 - RNA, 22 nt, Human
aaaaugugcaguuuuuaagcug

SEQ ID NO: 382539 - RNA, 22 nt, Human
ccucugccaccucccacgaggc

SEQ ID NO: 382540 - RNA, 22 nt, Human
augggaggaucacuugaggcca

SEQ ID NO: 382541 - RNA, 22 nt, Human
uggcccuguguccugcugccag

SEQ ID NO: 382542 - RNA, 22 nt, Human
cagcaugacagucugcagcaga

SEQ ID NO: 382543 - RNA, 21 nt, Human
aaauacagaaacuuguuuuca

SEQ ID NO: 382544 - RNA, 22 nt, Human
caacagaagguguacuacugaa

SEQ ID NO: 382545 - RNA, 22 nt, Human
acuggaugaggggaaagagaca

SEQ ID NO: 382546 - RNA, 18 nt, Human
agaagccacgaggagucc

SEQ ID NO: 382547 - RNA, 17 nt, Human
uugaacugcugagucag

SEQ ID NO: 382548 - RNA, 22 nt, Human
agcagcauagaugcuauccgag

SEQ ID NO: 382549 - RNA, 22 nt, Human
caggugucaaaauacuaagugg

SEQ ID NO: 382550 - RNA, 22 nt, Human
caugcacagugauaucugaaga

SEQ ID NO: 382551 - RNA, 22 nt, Human
guggggcaugcacgcugcuccu

SEQ ID NO: 382552 - RNA, 22 nt, Human
uuacaggggacauuggggacau

SEQ ID NO: 382553 - RNA, 22 nt, Human
uaaacauguugacaucuuaccu

SEQ ID NO: 382554 - RNA, 22 nt, Human
ggccaggcugcccugggagcag

SEQ ID NO: 382555 - RNA, 22 nt, Human
gagggauggugugagaggcuca

SEQ ID NO: 382556 - RNA, 22 nt, Human
ucagggcaggacaguguaggcc

SEQ ID NO: 382557 - RNA, 22 nt, Human
acagugucugacacauuguagc

SEQ ID NO: 382558 - RNA, 22 nt, Human
ugaaggaaugagggaguggguc

SEQ ID NO: 382559 - RNA, 22 nt, Human
gccugcagugagugcagaaggu

SEQ ID NO: 382560 - RNA, 22 nt, Human
auacauguuguaccauauguuu

SEQ ID NO: 382561 - RNA, 22 nt, Human
agagggaucacccuguuucugg

SEQ ID NO: 382562 - RNA, 22 nt, Human
aaguuacaggagaaagagauca

SEQ ID NO: 382563 - RNA, 22 nt, Human
ugugcaggugcaggaagggggc

SEQ ID NO: 382564 - RNA, 22 nt, Human
uuuuuaagcuccuuugauguca

SEQ ID NO: 382565 - RNA, 22 nt, Human
cccuggccagcucaugucugag

SEQ ID NO: 382566 - RNA, 22 nt, Human
caccagcagaagacugagggug

SEQ ID NO: 382567 - RNA, 22 nt, Human
cuguggagcuuguggcaguggg

SEQ ID NO: 382568 - RNA, 22 nt, Human
ccagaucuucuuuucagugucu

SEQ ID NO: 382569 - RNA, 22 nt, Human
gcaguguuuacauauuagaaac

SEQ ID NO: 382570 - RNA, 22 nt, Human
ucucacagugcaggucugucuc

SEQ ID NO: 382571 - RNA, 22 nt, Human
gggcucugguacuuccuggcuc

SEQ ID NO: 382572 - RNA, 22 nt, Human
gcagccacuaguuuuccuguuu

SEQ ID NO: 382573 - RNA, 22 nt, Human
gggcagccucggugccugcugc

SEQ ID NO: 382574 - RNA, 22 nt, Human
gucccagaggacagggucacau

SEQ ID NO: 382575 - RNA, 23 nt, Human
gcugucugucaucucugcgggag

SEQ ID NO: 382576 - RNA, 22 nt, Human
ccagagccuggcaucugcauaa

SEQ ID NO: 382577 - RNA, 22 nt, Human
agugugucugaucacuugugag

SEQ ID NO: 382578 - RNA, 22 nt, Human
ugcagcucauugcuggggucug

SEQ ID NO: 382579 - RNA, 22 nt, Human
cuguguuugaugagaagccacc

SEQ ID NO: 382580 - RNA, 22 nt, Human
aauguguagauguugcauuccu

SEQ ID NO: 382581 - RNA, 22 nt, Human
cugaagcaaaugaaacagcucu

SEQ ID NO: 382582 - RNA, 22 nt, Human
uuuaggcaugcaguucuauuua

SEQ ID NO: 382583 - RNA, 22 nt, Human
agcauuuaggagaauuugagaa

SEQ ID NO: 382584 - RNA, 22 nt, Human
aggugccaauuuucagugaaca

SEQ ID NO: 382585 - RNA, 22 nt, Human
cagcugugaauugucuuaucua

SEQ ID NO: 382586 - RNA, 21 nt, Human
ccugcagcaccagaaggagau

SEQ ID NO: 382587 - RNA, 22 nt, Human
auguuucaugacugagcaaaau

SEQ ID NO: 382588 - RNA, 19 nt, Human
aggcugcaagguggugggc

SEQ ID NO: 382589 - RNA, 22 nt, Human
ucaaaauuagugaccaaaggca

SEQ ID NO: 382590 - RNA, 22 nt, Human
agaaaucuaagaugcucaagga

SEQ ID NO: 382591 - RNA, 22 nt, Human
cagcugacgccagaguggaauu

SEQ ID NO: 382592 - RNA, 22 nt, Human
aaugaaacuguauauagacugu

SEQ ID NO: 382593 - RNA, 22 nt, Human
gaauagcuuccuuuuuuccaaa

SEQ ID NO: 382594 - RNA, 22 nt, Human
cuccagggaugagacagaguag

SEQ ID NO: 382595 - RNA, 22 nt, Human
accuuucacgguaucagacauc

SEQ ID NO: 382596 - RNA, 22 nt, Human
ccagggcagaaaaagagggaau

SEQ ID NO: 382597 - RNA, 22 nt, Human
aggagagagaacacuugggucc

SEQ ID NO: 382598 - RNA, 22 nt, Human
gucauugcaguggcaaaucaca

SEQ ID NO: 382599 - RNA, 22 nt, Human
uugguuuacuaggauucaaauu

SEQ ID NO: 382600 - RNA, 22 nt, Human
ugucuccucauacugucauauu

SEQ ID NO: 382601 - RNA, 22 nt, Human
auuaauuuccaggcacugugcu

SEQ ID NO: 382602 - RNA, 22 nt, Human
ccaggaaaauaccaagcuuuaa

SEQ ID NO: 382603 - RNA, 22 nt, Human
gagccaccuucaacucaggaau

SEQ ID NO: 382604 - RNA, 22 nt, Human
gccuaggaguacagaaugguuu

SEQ ID NO: 382605 - RNA, 22 nt, Human
aagaaugagcucaaagaucuua

SEQ ID NO: 382606 - RNA, 22 nt, Human
ggagacaguauggcuuguagcu

SEQ ID NO: 382607 - RNA, 20 nt, Human
cuuuggcaaugagaacaggg

SEQ ID NO: 382608 - RNA, 20 nt, Human
ggaagcagagaacuguuuuc

SEQ ID NO: 382609 - RNA, 22 nt, Human
gagcugagccuggguggaccgc

SEQ ID NO: 382610 - RNA, 22 nt, Human
aagccaggcugcacuugcuggg

SEQ ID NO: 382611 - RNA, 22 nt, Human
acauuguuugagaauacagaug

SEQ ID NO: 382612 - RNA, 23 nt, Human
cauuucaacgaauuuuccuucug

SEQ ID NO: 382613 - RNA, 22 nt, Human
gagagggccagggugagaacua

SEQ ID NO: 382614 - RNA, 22 nt, Human
ugaaggccagcucuuuaucagc

SEQ ID NO: 382615 - RNA, 22 nt, Human
uguuucuuuguagauauucuuu

SEQ ID NO: 382616 - RNA, 22 nt, Human
aaagucauugcuguuaucaaug

SEQ ID NO: 382617 - RNA, 22 nt, Human
cauuuguaggaugcuucuuguu

SEQ ID NO: 382618 - RNA, 22 nt, Human
acauguaaaaggaacaugcaug

SEQ ID NO: 382619 - RNA, 22 nt, Human
cacucccuucaggagccuagga

SEQ ID NO: 382620 - RNA, 22 nt, Human
ucuuuguaacugucuauugaga

SEQ ID NO: 382621 - RNA, 22 nt, Human
aggcuuccgaguagcugggacu

SEQ ID NO: 382622 - RNA, 20 nt, Human
auuuggcaugaaguauugau

SEQ ID NO: 382623 - RNA, 22 nt, Human
gcuucccagcagaggaaagacu

SEQ ID NO: 382624 - RNA, 22 nt, Human
aggcugagagcaacgugucaga

SEQ ID NO: 382625 - RNA, 22 nt, Human
cuugcuuuguccagaaauucag

SEQ ID NO: 382626 - RNA, 22 nt, Human
guucccauacaguaucagugcu

SEQ ID NO: 382627 - RNA, 22 nt, Human
ucauugaauuucacagcuuuau

SEQ ID NO: 382628 - RNA, 22 nt, Human
aggcugcagaacagucaggugc

SEQ ID NO: 382629 - RNA, 23 nt, Human
agccacuucuaucuugcuccugg

SEQ ID NO: 382630 - RNA, 22 nt, Human
agaugcugugaggaagcuagga

SEQ ID NO: 382631 - RNA, 22 nt, Human
ucaguggauuggaugagaucug

SEQ ID NO: 382632 - RNA, 22 nt, Human
gcagcugaaagggaucucuaca

SEQ ID NO: 382633 - RNA, 22 nt, Human
uggcucuggcgugaagcccaga

SEQ ID NO: 382634 - RNA, 22 nt, Human
ugugaugguucacugggcauga

SEQ ID NO: 382635 - RNA, 22 nt, Human
cugaggcucccucgggucugcu

SEQ ID NO: 382636 - RNA, 17 nt, Human
gccucugcuugugucau

SEQ ID NO: 382637 - RNA, 20 nt, Human
cugggaggucuuccaaauca

SEQ ID NO: 382638 - RNA, 22 nt, Human
gggcagagagcuggaacuccuu

SEQ ID NO: 382639 - RNA, 22 nt, Human
acaagagacaagagguucuucu

SEQ ID NO: 382640 - RNA, 22 nt, Human
guggcaggagacuggaagaugg

SEQ ID NO: 382641 - RNA, 22 nt, Human
ccuguggcacaugcagggauuc

SEQ ID NO: 382642 - RNA, 22 nt, Human
acaguggaugacauccuuuugc

SEQ ID NO: 382643 - RNA, 22 nt, Human
agagcagaggcauggccguggg

SEQ ID NO: 382644 - RNA, 22 nt, Human
agcagcauuuaaguuucuucua

SEQ ID NO: 382645 - RNA, 22 nt, Human
ccugccagauccccugagcuga

SEQ ID NO: 382646 - RNA, 22 nt, Human
gguuauauaauucagugcuuuc

SEQ ID NO: 382647 - RNA, 22 nt, Human
ggacacaguggaagacagcuug

SEQ ID NO: 382648 - RNA, 22 nt, Human
ggcagccaugucccagggcuuc

SEQ ID NO: 382649 - RNA, 22 nt, Human
cuacagaaucuaccucaagcca

SEQ ID NO: 382650 - RNA, 22 nt, Human
gggucuggacggcugcaggaag

SEQ ID NO: 382651 - RNA, 22 nt, Human
gcuuuggaugugugccugaggu

SEQ ID NO: 382652 - RNA, 22 nt, Human
ucccagcagggccgaccagccu

SEQ ID NO: 382653 - RNA, 22 nt, Human
agcccagguugaggcugcagug

SEQ ID NO: 382654 - RNA, 22 nt, Human
ugcagcucugaacagucaugaa

SEQ ID NO: 382655 - RNA, 22 nt, Human
acaggcagcacuaaucucuggu

SEQ ID NO: 382656 - RNA, 22 nt, Human
auucauucugaccucaagagaa

SEQ ID NO: 382657 - RNA, 22 nt, Human
auagaaauggcagcuggugcua

SEQ ID NO: 382658 - RNA, 22 nt, Human
ugaaaaaacaaguuggcccauu

SEQ ID NO: 382659 - RNA, 22 nt, Human
aucaguuuuguucacuacuaua

SEQ ID NO: 382660 - RNA, 22 nt, Human
gucuaacaagcauuaggaaccc

SEQ ID NO: 382661 - RNA, 22 nt, Human
cucuggagguggagguugcagu

SEQ ID NO: 382662 - RNA, 22 nt, Human
caguugccuacuacauggcagg

SEQ ID NO: 382663 - RNA, 22 nt, Human
gcuguggcuugcagcuggggcu

SEQ ID NO: 382664 - RNA, 22 nt, Human
uggcugagaccuucccaaauuc

SEQ ID NO: 382665 - RNA, 22 nt, Human
uugguacaaaaguaacuguggu

SEQ ID NO: 382666 - RNA, 22 nt, Human
aauuagagaucaguucuuugac

SEQ ID NO: 382667 - RNA, 22 nt, Human
gugacaguggucacuuguaguu

SEQ ID NO: 382668 - RNA, 22 nt, Human
gagaggauccacaaaccaggaa

SEQ ID NO: 382669 - RNA, 18 nt, Human
gcccugguggagcuggug

SEQ ID NO: 382670 - RNA, 22 nt, Human
aaggggaaaaaguguuaggagu

SEQ ID NO: 382671 - RNA, 22 nt, Human
gaguccaguuagugaggcuggg

SEQ ID NO: 382672 - RNA, 22 nt, Human
acagcaagccagcuugucacug

SEQ ID NO: 382673 - RNA, 22 nt, Human
gcaccugggguacacagcuaca

SEQ ID NO: 382674 - RNA, 22 nt, Human
aggaaaggccuuugcauuuggu

SEQ ID NO: 382675 - RNA, 18 nt, Human
ucagagagcagcuuuauu

SEQ ID NO: 382676 - RNA, 22 nt, Human
uucacagaauugucuugacugg

SEQ ID NO: 382677 - RNA, 22 nt, Human
acagccugcugccugcuucuug

SEQ ID NO: 382678 - RNA, 22 nt, Human
agaaaugaagcaggaguuauua

SEQ ID NO: 382679 - RNA, 22 nt, Human
uggcccugucccuggagccugg

SEQ ID NO: 382680 - RNA, 22 nt, Human
ugggcugcccaagguggccaug

SEQ ID NO: 382681 - RNA, 22 nt, Human
uaaguucaguuggucgaaguag

SEQ ID NO: 382682 - RNA, 18 nt, Human
gagguccugcucuagccc

SEQ ID NO: 382683 - RNA, 22 nt, Human
uagcacaucuucuuggccugca

SEQ ID NO: 382684 - RNA, 19 nt, Human
agggucaggacaaggacuu

SEQ ID NO: 382685 - RNA, 22 nt, Human
uugagggucuggaucugcugcu

SEQ ID NO: 382686 - RNA, 22 nt, Human
caaaugauaccuauuacuaggc

SEQ ID NO: 382687 - RNA, 22 nt, Human
uaauuucaaguuuagggcucua

SEQ ID NO: 382688 - RNA, 22 nt, Human
uccuccuucgggacugcuugac

SEQ ID NO: 382689 - RNA, 23 nt, Human
cuugcaggaagcagauggcacac

SEQ ID NO: 382690 - RNA, 22 nt, Human
caggguagacaguaggugucug

SEQ ID NO: 382691 - RNA, 22 nt, Human
auuauauaggacuugcccuucc

SEQ ID NO: 382692 - RNA, 22 nt, Human
aagcugccuagaguugaauguc

SEQ ID NO: 382693 - RNA, 22 nt, Human
uagcacauaacuuagaauaguu

SEQ ID NO: 382694 - RNA, 22 nt, Human
gaggcucagagacuuuaaguuu

SEQ ID NO: 382695 - RNA, 22 nt, Human
agaccaagugcaggugccacua

SEQ ID NO: 382696 - RNA, 21 nt, Human
guggccugauuaugaaugggu

SEQ ID NO: 382697 - RNA, 22 nt, Human
cagaaauguacugacaugcagu

SEQ ID NO: 382698 - RNA, 22 nt, Human
gugcauuugacgaauacucacu

SEQ ID NO: 382699 - RNA, 22 nt, Human
ggcuuugccuggaauuuccuug

SEQ ID NO: 382700 - RNA, 22 nt, Human
ucuggcucacuucaggcuucac

SEQ ID NO: 382701 - RNA, 22 nt, Human
aguaacaagugccaacguuaga

SEQ ID NO: 382702 - RNA, 22 nt, Human
ucagagucucccccaguuuggg

SEQ ID NO: 382703 - RNA, 22 nt, Human
gcuguucagggcacucaugggc

SEQ ID NO: 382704 - RNA, 22 nt, Human
gcucaagagagaugcaguucuu

SEQ ID NO: 382705 - RNA, 22 nt, Human
agaggggagagcuaagcaauuc

SEQ ID NO: 382706 - RNA, 22 nt, Human
ggagacagugacuuagagacug

SEQ ID NO: 382707 - RNA, 22 nt, Human
gagcacagccaaaguaagaagg

SEQ ID NO: 382708 - RNA, 21 nt, Human
gcagccacagccaccaagcua

SEQ ID NO: 382709 - RNA, 22 nt, Human
uuggaauucaaguuguagcuua

SEQ ID NO: 382710 - RNA, 18 nt, Human
uggagcaggaagccuggc

SEQ ID NO: 382711 - RNA, 22 nt, Human
ccagggcaauaggaacacuuuu

SEQ ID NO: 382712 - RNA, 20 nt, Human
gauuacaaaaugaaaugcau

SEQ ID NO: 382713 - RNA, 22 nt, Human
ucaggaugguguggaggaaaua

SEQ ID NO: 382714 - RNA, 19 nt, Human
ccaguagagacagcugcag

SEQ ID NO: 382715 - RNA, 22 nt, Human
aguuuccaaauauuguuuuagc

SEQ ID NO: 382716 - RNA, 22 nt, Human
ugaaaugaaacagaacauauca

SEQ ID NO: 382717 - RNA, 22 nt, Human
ggcagcuuccuaggagagggca

SEQ ID NO: 382718 - RNA, 22 nt, Human
aacaguaacgagauguccuaac

SEQ ID NO: 382719 - RNA, 22 nt, Human
ucaggcagcuccaggaauggua

SEQ ID NO: 382720 - RNA, 22 nt, Human
gaauuucaacaguccucaaaug

SEQ ID NO: 382721 - RNA, 22 nt, Human
cucaggauagauuguccucuca

SEQ ID NO: 382722 - RNA, 22 nt, Human
aauaagauccugaagauauguu

SEQ ID NO: 382723 - RNA, 22 nt, Human
agcuucuugggcuuuacacaaa

SEQ ID NO: 382724 - RNA, 22 nt, Human
uuucucaaguucagauauuuga

SEQ ID NO: 382725 - RNA, 22 nt, Human
aggcucugugacaaucaagcug

SEQ ID NO: 382726 - RNA, 22 nt, Human
ucaugcacaugugucaccauca

SEQ ID NO: 382727 - RNA, 22 nt, Human
agguggguaucaugagagauua

SEQ ID NO: 382728 - RNA, 22 nt, Human
auaugccauuagcuagaaauaa

SEQ ID NO: 382729 - RNA, 22 nt, Human
uauuccagguauucuucaagag

SEQ ID NO: 382730 - RNA, 22 nt, Human
agggccucuaccauccaagguu

SEQ ID NO: 382731 - RNA, 22 nt, Human
aaaggccacuugaaggauuuuu

SEQ ID NO: 382732 - RNA, 22 nt, Human
agccuggagaggcgccauacac

SEQ ID NO: 382733 - RNA, 22 nt, Human
uccaugagcuagggauucauca

SEQ ID NO: 382734 - RNA, 22 nt, Human
uacauguaauuuucauaguaag

SEQ ID NO: 382735 - RNA, 22 nt, Human
cguguacagucuaucuuuuuuc

SEQ ID NO: 382736 - RNA, 22 nt, Human
aagcagccaccucaucuccacu

SEQ ID NO: 382737 - RNA, 22 nt, Human
agggagcucacaguccaguaga

SEQ ID NO: 382738 - RNA, 22 nt, Human
uggcagcugccauguccacgug

SEQ ID NO: 382739 - RNA, 22 nt, Human
ucaucugucccaggcuuuuuuc

SEQ ID NO: 382740 - RNA, 22 nt, Human
aggaaagcucccaguagggcuc

SEQ ID NO: 382741 - RNA, 22 nt, Human
uuagauaaauuaagacuuuaca

SEQ ID NO: 382742 - RNA, 19 nt, Human
ugccugucaguagaucuca

SEQ ID NO: 382743 - RNA, 17 nt, Human
aguguuuccuuaucauu

SEQ ID NO: 382744 - RNA, 22 nt, Human
cuugccuucuuuuccuauagaa

SEQ ID NO: 382745 - RNA, 22 nt, Human
cauuuucaugaguuucuguuca

SEQ ID NO: 382746 - RNA, 21 nt, Human
uuagaaagcucacuacaguua

SEQ ID NO: 382747 - RNA, 22 nt, Human
aggagcagaauuuaaugugcag

SEQ ID NO: 382748 - RNA, 23 nt, Human
uggcucucucagugcugcagagg

SEQ ID NO: 382749 - RNA, 22 nt, Human
cugcacagagcagggcagacac

SEQ ID NO: 382750 - RNA, 22 nt, Human
acaucucaugaaugauaaauca

SEQ ID NO: 382751 - RNA, 22 nt, Human
gugaaaucugaggcccaugaug

SEQ ID NO: 382752 - RNA, 22 nt, Human
agggcagcuaaggugcugacug

SEQ ID NO: 382753 - RNA, 22 nt, Human
ucugagggugggagaaggagcu

SEQ ID NO: 382754 - RNA, 22 nt, Human
aaccugcauguuucuaaaagca

SEQ ID NO: 382755 - RNA, 22 nt, Human
accauguuggccaagcuggucu

SEQ ID NO: 382756 - RNA, 22 nt, Human
gugcugcucacaucuggaggua

SEQ ID NO: 382757 - RNA, 22 nt, Human
uacauacacaaauauacuguuu

SEQ ID NO: 382758 - RNA, 22 nt, Human
cauuuagaaacuguuuuuaaca

SEQ ID NO: 382759 - RNA, 22 nt, Human
gcuggccauucucuuugagaug

SEQ ID NO: 382760 - RNA, 22 nt, Human
cauugcacgggcgucugucugu

SEQ ID NO: 382761 - RNA, 22 nt, Human
cuugaauccaaaugggagauga

SEQ ID NO: 382762 - RNA, 22 nt, Human
ccaucccuccuccaccagcuag

SEQ ID NO: 382763 - RNA, 22 nt, Human
caggccugacccugagcuucac

SEQ ID NO: 382764 - RNA, 22 nt, Human
gugugggcugcagaggcacagc

SEQ ID NO: 382765 - RNA, 22 nt, Human
gagagugagauaauuucacaua

SEQ ID NO: 382766 - RNA, 22 nt, Human
augaaggcuguguggagccccc

SEQ ID NO: 382767 - RNA, 22 nt, Human
cuguccuguggaccugaggacg

SEQ ID NO: 382768 - RNA, 22 nt, Human
gcuaugcaggagccuaaugaca

SEQ ID NO: 382769 - RNA, 22 nt, Human
cuccugguucagagagcugaga

SEQ ID NO: 382770 - RNA, 20 nt, Human
gugcauuucaccuguacugu

SEQ ID NO: 382771 - RNA, 22 nt, Human
ucuccuggucaccucagaaguc

SEQ ID NO: 382772 - RNA, 20 nt, Human
uauuucugggcaaccauuua

SEQ ID NO: 382773 - RNA, 19 nt, Human
ggccuggauuuagggcucc

SEQ ID NO: 382774 - RNA, 22 nt, Human
cugcuguguaucauuuuagaug

SEQ ID NO: 382775 - RNA, 22 nt, Human
cagccaggcccccgagucguug

SEQ ID NO: 382776 - RNA, 23 nt, Human
cccauuuucauguuaacuccugg

SEQ ID NO: 382777 - RNA, 22 nt, Human
uauaauuuuagaagagauggaa

SEQ ID NO: 382778 - RNA, 22 nt, Human
acauuucugcauguaggguaau

SEQ ID NO: 382779 - RNA, 22 nt, Human
cagcagccuacaaugcacagaa

SEQ ID NO: 382780 - RNA, 22 nt, Human
gcuacugauugaccuuggagag

SEQ ID NO: 382781 - RNA, 22 nt, Human
agaaggaguguacaggucaugc

SEQ ID NO: 382782 - RNA, 22 nt, Human
aggcacuggucuaccccuuagu

SEQ ID NO: 382783 - RNA, 22 nt, Human
gaguucaguguuucuaguagug

SEQ ID NO: 382784 - RNA, 22 nt, Human
uggcucagcugacucggcuucu

SEQ ID NO: 382785 - RNA, 22 nt, Human
ugcaggaacuugguuuuacuca

SEQ ID NO: 382786 - RNA, 23 nt, Human
ggcagagagcauggcuggggccc

SEQ ID NO: 382787 - RNA, 22 nt, Human
ucucuggaauuuugagagugac

SEQ ID NO: 382788 - RNA, 22 nt, Human
gccuucugcgcucgugucuccg

SEQ ID NO: 382789 - RNA, 22 nt, Human
gcccaggagccuggagaugugu

SEQ ID NO: 382790 - RNA, 22 nt, Human
augaggcaguacacacaaagcc

SEQ ID NO: 382791 - RNA, 22 nt, Human
acagcuguggggacucuugccc

SEQ ID NO: 382792 - RNA, 22 nt, Human
cugcuuuguguggucccuccag

SEQ ID NO: 382793 - RNA, 22 nt, Human
gagagugaggcaucaggggcag

SEQ ID NO: 382794 - RNA, 22 nt, Human
ggugcagaggagccagcugggg

SEQ ID NO: 382795 - RNA, 22 nt, Human
aggugucuucagggugagacag

SEQ ID NO: 382796 - RNA, 22 nt, Human
cuggcucaggguggucuggguc

SEQ ID NO: 382797 - RNA, 22 nt, Human
uuugugaaaugaagucacaacu

SEQ ID NO: 382798 - RNA, 22 nt, Human
guagggacccacagucuauauu

SEQ ID NO: 382799 - RNA, 22 nt, Human
aucuggcuuuuaccccacggcc

SEQ ID NO: 382800 - RNA, 22 nt, Human
gcugccugauguccagcaggac

SEQ ID NO: 382801 - RNA, 22 nt, Human
gcacccagggacuuggcuggcc

SEQ ID NO: 382802 - RNA, 19 nt, Human
cgcaggagccgaggugacc

SEQ ID NO: 382803 - RNA, 22 nt, Human
agcagagguguuuauuauggga

SEQ ID NO: 382804 - RNA, 22 nt, Human
aacaguaucuuuuaucagaaau

SEQ ID NO: 382805 - RNA, 22 nt, Human
aaugaugguuaaacacuggagg

SEQ ID NO: 382806 - RNA, 22 nt, Human
gagcugccggcccacaguacua

SEQ ID NO: 382807 - RNA, 22 nt, Human
guaacacagaaaugaaauucca

SEQ ID NO: 382808 - RNA, 22 nt, Human
uccuggcccgaucccugugaag

SEQ ID NO: 382809 - RNA, 22 nt, Human
cuggggacuugcagacacaauu

SEQ ID NO: 382810 - RNA, 22 nt, Human
agugccuugugugugggcagcc

SEQ ID NO: 382811 - RNA, 22 nt, Human
gcagagaguugggcugcgccag

SEQ ID NO: 382812 - RNA, 22 nt, Human
agaggaugguugaggaagaccu

SEQ ID NO: 382813 - RNA, 22 nt, Human
ugguccagaugccuuggcuuua

SEQ ID NO: 382814 - RNA, 22 nt, Human
uccuuccugcaggccaaguccu

SEQ ID NO: 382815 - RNA, 22 nt, Human
cugcugggucuaugcaagugga

SEQ ID NO: 382816 - RNA, 22 nt, Human
cacaagagagugcgcguugcaa

SEQ ID NO: 382817 - RNA, 22 nt, Human
aaaaguucccugguuagaaaag

SEQ ID NO: 382818 - RNA, 22 nt, Human
auuuccaagaaagcuuuaggau

SEQ ID NO: 382819 - RNA, 22 nt, Human
ccagggcaauuauuuggagggu

SEQ ID NO: 382820 - RNA, 22 nt, Human
ccugcccuagagaugacacaau

SEQ ID NO: 382821 - RNA, 22 nt, Human
ucauuguuucugcuuuucauga

SEQ ID NO: 382822 - RNA, 22 nt, Human
uuagccaugugggaaaaacagc

SEQ ID NO: 382823 - RNA, 22 nt, Human
uaggugugggcucaggaaugug

SEQ ID NO: 382824 - RNA, 22 nt, Human
acuuccuguuaugugugccucu

SEQ ID NO: 382825 - RNA, 22 nt, Human
cuggcaguguccagcucgugau

SEQ ID NO: 382826 - RNA, 19 nt, Human
cucagcuguagcucaugug

SEQ ID NO: 382827 - RNA, 22 nt, Human
ucugagaggcagaccuuccuaa

SEQ ID NO: 382828 - RNA, 19 nt, Human
uagaaugcccacuuaaaaa

SEQ ID NO: 382829 - RNA, 22 nt, Human
accugcagccacuucucuccuu

SEQ ID NO: 382830 - RNA, 20 nt, Human
uacugggcaagcccacagac

SEQ ID NO: 382831 - RNA, 21 nt, Human
aggucccagguuugggcagca

SEQ ID NO: 382832 - RNA, 22 nt, Human
ccagaggucuccugcacgggau

SEQ ID NO: 382833 - RNA, 22 nt, Human
ccuggaucuuucugacugacaa

SEQ ID NO: 382834 - RNA, 22 nt, Human
acacauaagccuaaucaucucc

SEQ ID NO: 382835 - RNA, 22 nt, Human
uggaaugacagagagucugaau

SEQ ID NO: 382836 - RNA, 22 nt, Human
acuugcauuauauuuaucacaa

SEQ ID NO: 382837 - RNA, 22 nt, Human
ggcucugcccagaugaagagga

SEQ ID NO: 382838 - RNA, 18 nt, Human
guuaauuuugaaguucau

SEQ ID NO: 382839 - RNA, 22 nt, Human
ugcacacacaugaaguagcaug

SEQ ID NO: 382840 - RNA, 22 nt, Human
gccaggaguucagaugcauguu

SEQ ID NO: 382841 - RNA, 20 nt, Human
auaaaauaacugccacaaga

SEQ ID NO: 382842 - RNA, 23 nt, Human
ggccauggagacuuagaaugggc

SEQ ID NO: 382843 - RNA, 22 nt, Human
uguuugcucugacuaucuugcg

SEQ ID NO: 382844 - RNA, 19 nt, Human
agaggccucagcagcuggc

SEQ ID NO: 382845 - RNA, 22 nt, Human
cuggggccacaacggcgcacgc

SEQ ID NO: 382846 - RNA, 22 nt, Human
agcagguguagggcucuuugua

SEQ ID NO: 382847 - RNA, 19 nt, Human
aggcagcaggccagggaug

SEQ ID NO: 382848 - RNA, 22 nt, Human
auagucacugccuuccauuugu

SEQ ID NO: 382849 - RNA, 22 nt, Human
gagcucauucauucauugccug

SEQ ID NO: 382850 - RNA, 18 nt, Human
caagaaucucuaaagaag

SEQ ID NO: 382851 - RNA, 22 nt, Human
ugggggagauugugcaucucua

SEQ ID NO: 382852 - RNA, 22 nt, Human
uccaggagguaugaguggcccc

SEQ ID NO: 382853 - RNA, 22 nt, Human
aggaaaaauaaggcagcagggc

SEQ ID NO: 382854 - RNA, 22 nt, Human
agaaauuccuaagguacacaag

SEQ ID NO: 382855 - RNA, 22 nt, Human
cugccagccaggccagguaggc

SEQ ID NO: 382856 - RNA, 22 nt, Human
ugccacagaggugaagcccacu

SEQ ID NO: 382857 - RNA, 23 nt, Human
uccuuccuuugagaggcuccauc

SEQ ID NO: 382858 - RNA, 22 nt, Human
aagcagcagaccugauuuugaa

SEQ ID NO: 382859 - RNA, 21 nt, Human
cugcucuggggaccggcugug

SEQ ID NO: 382860 - RNA, 22 nt, Human
uuguccuuggaugaagcuggga

SEQ ID NO: 382861 - RNA, 22 nt, Human
aaagcagacugauuugcaucac

SEQ ID NO: 382862 - RNA, 22 nt, Human
uucaaaacagcuagauauugga

SEQ ID NO: 382863 - RNA, 22 nt, Human
ggauucuaacugaacagaauau

SEQ ID NO: 382864 - RNA, 22 nt, Human
caggauccccaggucgccgucc

SEQ ID NO: 382865 - RNA, 22 nt, Human
uccagggagauacuggcugcca

SEQ ID NO: 382866 - RNA, 22 nt, Human
agacagagauacuauguuguca

SEQ ID NO: 382867 - RNA, 20 nt, Human
gugugaagcccucaggagga

SEQ ID NO: 382868 - RNA, 22 nt, Human
ucuuugcaggccaaauuguuaa

SEQ ID NO: 382869 - RNA, 22 nt, Human
augggugugaaaauggucaucu

SEQ ID NO: 382870 - RNA, 22 nt, Human
ugcuuaauacguauuugcugga

SEQ ID NO: 382871 - RNA, 22 nt, Human
uuuggaauauuaaaaugucuca

SEQ ID NO: 382872 - RNA, 22 nt, Human
ccaguggaaauguggucaggau

SEQ ID NO: 382873 - RNA, 22 nt, Human
aaagccagggacagugugcaug

SEQ ID NO: 382874 - RNA, 20 nt, Human
ucacauccucucccaacaug

SEQ ID NO: 382875 - RNA, 22 nt, Human
gccugaaguuucaugccucuau

SEQ ID NO: 382876 - RNA, 22 nt, Human
cuaggaggcgggggcugcagua

SEQ ID NO: 382877 - RNA, 22 nt, Human
aggacuccauguguccuggaga

SEQ ID NO: 382878 - RNA, 22 nt, Human
auccuugaaugacucugcccuc

SEQ ID NO: 382879 - RNA, 22 nt, Human
uacuuuuugucucuuugaaugu

SEQ ID NO: 382880 - RNA, 22 nt, Human
gucuugaucuccugaccuugug

SEQ ID NO: 382881 - RNA, 22 nt, Human
uagauaaauuagaaaguuuacu

SEQ ID NO: 382882 - RNA, 22 nt, Human
cucuuccucucaugcggucaua

SEQ ID NO: 382883 - RNA, 22 nt, Human
aaacagacugcacugccaguca

SEQ ID NO: 382884 - RNA, 22 nt, Human
agccauucauugugcucucaga

SEQ ID NO: 382885 - RNA, 22 nt, Human
gagcagaugugugccaggaugc

SEQ ID NO: 382886 - RNA, 22 nt, Human
cacucugacuggcccugcagga

SEQ ID NO: 382887 - RNA, 16 nt, Human
gcacacacaucaauga

SEQ ID NO: 382888 - RNA, 22 nt, Human
uucuggaggccccuuccuucuc

SEQ ID NO: 382889 - RNA, 22 nt, Human
ggcaggugcucugugggccugg

SEQ ID NO: 382890 - RNA, 22 nt, Human
uuauuauaaugagggauaaaaa

SEQ ID NO: 382891 - RNA, 22 nt, Human
gcuggcagacugggggcagaac

SEQ ID NO: 382892 - RNA, 22 nt, Human
uguaaaaccaaaucaaucuagu

SEQ ID NO: 382893 - RNA, 22 nt, Human
cuggcugccacuucagggucuu

SEQ ID NO: 382894 - RNA, 22 nt, Human
uggagcugggaguccugggcug

SEQ ID NO: 382895 - RNA, 22 nt, Human
gggacagcuguagugcuuggcu

SEQ ID NO: 382896 - RNA, 22 nt, Human
auguacaguggaaacuaacaaa

SEQ ID NO: 382897 - RNA, 22 nt, Human
cucagcagcagggaagagguca

SEQ ID NO: 382898 - RNA, 22 nt, Human
ugaccaaaggugguuuauuugg

SEQ ID NO: 382899 - RNA, 22 nt, Human
gcaagcaguuguggcuucugag

SEQ ID NO: 382900 - RNA, 22 nt, Human
ugaagguggcauaggagagaug

SEQ ID NO: 382901 - RNA, 22 nt, Human
aauggccagcugggagaguuga

SEQ ID NO: 382902 - RNA, 22 nt, Human
gcacacagccagcugagggcua

SEQ ID NO: 382903 - RNA, 22 nt, Human
uuugagaaaugggcucugugcu

SEQ ID NO: 382904 - RNA, 22 nt, Human
gugcuuaauacaugucaauaac

SEQ ID NO: 382905 - RNA, 22 nt, Human
gcuuugcauuguuuaaucagga

SEQ ID NO: 382906 - RNA, 22 nt, Human
uaaggccaauuaacaaccaggg

SEQ ID NO: 382907 - RNA, 17 nt, Human
cccugccaccaggaagc

SEQ ID NO: 382908 - RNA, 22 nt, Human
uaauuuauuucaacugccaagg

SEQ ID NO: 382909 - RNA, 22 nt, Human
aaggaagacacagaugaaguga

SEQ ID NO: 382910 - RNA, 22 nt, Human
ggcugcugcccaccccugcaug

SEQ ID NO: 382911 - RNA, 22 nt, Human
uucaaucauuuuuacauagucc

SEQ ID NO: 382912 - RNA, 22 nt, Human
ucagggcaccaaaaaagaugcc

SEQ ID NO: 382913 - RNA, 22 nt, Human
uccuucaguuaaagaucucaca

SEQ ID NO: 382914 - RNA, 22 nt, Human
agcagccaaaugaagauuuuac

SEQ ID NO: 382915 - RNA, 22 nt, Human
cacauaaguggguuccauugca

SEQ ID NO: 382916 - RNA, 22 nt, Human
aggaggaauacaauccagcagc

SEQ ID NO: 382917 - RNA, 22 nt, Human
aaggcagcaacuaauggaucuc

SEQ ID NO: 382918 - RNA, 22 nt, Human
cucuccagaauaugccgccgug

SEQ ID NO: 382919 - RNA, 22 nt, Human
agcuuuaugaggagaccuuagu

SEQ ID NO: 382920 - RNA, 22 nt, Human
ggcaccugcucaucuggacuca

SEQ ID NO: 382921 - RNA, 22 nt, Human
agaugcagaaaaacuaagugau

SEQ ID NO: 382922 - RNA, 22 nt, Human
gugcagugagcagugcagcacc

SEQ ID NO: 382923 - RNA, 19 nt, Human
acaagggcaggcaagguga

SEQ ID NO: 382924 - RNA, 22 nt, Human
agggucaguucugugagguguu

SEQ ID NO: 382925 - RNA, 22 nt, Human
cccaggucccgccccagcucua

SEQ ID NO: 382926 - RNA, 20 nt, Human
uucacagaggacucagguca

SEQ ID NO: 382927 - RNA, 22 nt, Human
uuucaguguaucuuccaaaagc

SEQ ID NO: 382928 - RNA, 22 nt, Human
ucuccuggauggaccuucucuu

SEQ ID NO: 382929 - RNA, 22 nt, Human
cccaggagcuucucucugccuc

SEQ ID NO: 382930 - RNA, 22 nt, Human
cagggcuagugacaccccaguc

SEQ ID NO: 382931 - RNA, 22 nt, Human
cagggccagcgucucgggcuau

SEQ ID NO: 382932 - RNA, 22 nt, Human
cagacagaccugcaagggcaca

SEQ ID NO: 382933 - RNA, 22 nt, Human
aggcagugcagaguccucuucu

SEQ ID NO: 382934 - RNA, 22 nt, Human
aaggcagcacagcaacugcuca

SEQ ID NO: 382935 - RNA, 22 nt, Human
uagaaguuaaaggaauacagaa

SEQ ID NO: 382936 - RNA, 21 nt, Human
agggccugugcucuccagguc

SEQ ID NO: 382937 - RNA, 22 nt, Human
cccaucaggaacccaggagccc

SEQ ID NO: 382938 - RNA, 22 nt, Human
uagaaaucagcaggcauaugua

SEQ ID NO: 382939 - RNA, 22 nt, Human
gacagggcgcccagccuguuuc

SEQ ID NO: 382940 - RNA, 22 nt, Human
aaagaauuuguacacccuacua

SEQ ID NO: 382941 - RNA, 22 nt, Human
uugcacagaugagggugaugcu

SEQ ID NO: 382942 - RNA, 22 nt, Human
cuggagccagccagggcccucu

SEQ ID NO: 382943 - RNA, 19 nt, Human
ugcuuccucaccaucuccc

SEQ ID NO: 382944 - RNA, 22 nt, Human
cagcugggagcuccauuagaua

SEQ ID NO: 382945 - RNA, 22 nt, Human
caggugcugcguggcggagcug

SEQ ID NO: 382946 - RNA, 21 nt, Human
acagagccgggcacaaagcug

SEQ ID NO: 382947 - RNA, 22 nt, Human
ugaagcaggcauugacugauga

SEQ ID NO: 382948 - RNA, 22 nt, Human
gauuuagagcaggaaugcaugg

SEQ ID NO: 382949 - RNA, 22 nt, Human
ggucucagacuggcaggcagug

SEQ ID NO: 382950 - RNA, 22 nt, Human
cucagggcuugaguguccagga

SEQ ID NO: 382951 - RNA, 22 nt, Human
uggcagcuccuggggccagcac

SEQ ID NO: 382952 - RNA, 22 nt, Human
gcauuguccugcuucugagugu

SEQ ID NO: 382953 - RNA, 22 nt, Human
cccagcuugcccaggacugagg

SEQ ID NO: 382954 - RNA, 22 nt, Human
uggccugguaccacauagauuu

SEQ ID NO: 382955 - RNA, 22 nt, Human
agggacagaugaaugacugagu

SEQ ID NO: 382956 - RNA, 22 nt, Human
ggcugaggcucaugccaucuug

SEQ ID NO: 382957 - RNA, 22 nt, Human
caauuucauggauaaaagaugu

SEQ ID NO: 382958 - RNA, 22 nt, Human
ggcauuuagagggcuuuucuga

SEQ ID NO: 382959 - RNA, 22 nt, Human
aaggagagagcuuugcuggaac

SEQ ID NO: 382960 - RNA, 22 nt, Human
aggggcuguggaaaccaacucu

SEQ ID NO: 382961 - RNA, 22 nt, Human
aaggccugcucagcugucugug

SEQ ID NO: 382962 - RNA, 22 nt, Human
caagagcuggguggcaagcuag

SEQ ID NO: 382963 - RNA, 22 nt, Human
guuccaaacaagucauaaagua

SEQ ID NO: 382964 - RNA, 22 nt, Human
ccagugggugcugggcucugcc

SEQ ID NO: 382965 - RNA, 22 nt, Human
uuagagucaaaauggcauguua

SEQ ID NO: 382966 - RNA, 22 nt, Human
gcauggcauuaacaagauggaa

SEQ ID NO: 382967 - RNA, 22 nt, Human
aggcaggagcaagcccuacaag

SEQ ID NO: 382968 - RNA, 21 nt, Human
uucucagagucuauuacaguu

SEQ ID NO: 382969 - RNA, 22 nt, Human
ugcuggguuaccuaagccuaaa

SEQ ID NO: 382970 - RNA, 22 nt, Human
gcccaggaggucaaguagcuau

SEQ ID NO: 382971 - RNA, 22 nt, Human
cagggcucccaaauaucucuuc

SEQ ID NO: 382972 - RNA, 22 nt, Human
auccaaaggugacacagaauac

SEQ ID NO: 382973 - RNA, 22 nt, Human
aaagacuagcauuuauauguac

SEQ ID NO: 382974 - RNA, 22 nt, Human
gggcaugguggcaggcaccugu

SEQ ID NO: 382975 - RNA, 22 nt, Human
agggcaugcuggaggagagaca

SEQ ID NO: 382976 - RNA, 22 nt, Human
uucaggauccccaccgcguuua

SEQ ID NO: 382977 - RNA, 22 nt, Human
ccggggacuuaaagugaaggaa

SEQ ID NO: 382978 - RNA, 22 nt, Human
ugucuuuagagucacaaaacca

SEQ ID NO: 382979 - RNA, 22 nt, Human
uggcagagagagugcagucgac

SEQ ID NO: 382980 - RNA, 18 nt, Human
acauacauucugucugca

SEQ ID NO: 382981 - RNA, 22 nt, Human
cagggccaccguguuugcugcu

SEQ ID NO: 382982 - RNA, 22 nt, Human
cacccaggcagguggcugagaa

SEQ ID NO: 382983 - RNA, 22 nt, Human
gggacagaaggaagugagcaca

SEQ ID NO: 382984 - RNA, 19 nt, Human
uggcugggcgugccuccgu

SEQ ID NO: 382985 - RNA, 22 nt, Human
ucccuguccugggcaaucccag

SEQ ID NO: 382986 - RNA, 22 nt, Human
agugggaggcggcugacgggcg

SEQ ID NO: 382987 - RNA, 22 nt, Human
aggagccaagcagaacuaagga

SEQ ID NO: 382988 - RNA, 22 nt, Human
gagggcugcaaugagacagaga

SEQ ID NO: 382989 - RNA, 23 nt, Human
ccuggaguacuaaggggauggaa

SEQ ID NO: 382990 - RNA, 22 nt, Human
ggaggaggggugacugaaugcu

SEQ ID NO: 382991 - RNA, 22 nt, Human
uaaaacugaauacauacugagg

SEQ ID NO: 382992 - RNA, 22 nt, Human
ccuggcagcuguuuggcuuggc

SEQ ID NO: 382993 - RNA, 22 nt, Human
agccucugcuuaugcaaaggua

SEQ ID NO: 382994 - RNA, 22 nt, Human
uggcugaguuacgaacagagca

SEQ ID NO: 382995 - RNA, 22 nt, Human
caguagcagggauuauuuuagg

SEQ ID NO: 382996 - RNA, 22 nt, Human
gcagaauuuucuguuuucuaga

SEQ ID NO: 382997 - RNA, 22 nt, Human
aacauuuaugguagucauugca

SEQ ID NO: 382998 - RNA, 22 nt, Human
ggaccagagaagugagcaccug

SEQ ID NO: 382999 - RNA, 22 nt, Human
acugaaggcuuucccaagguca

SEQ ID NO: 383000 - RNA, 23 nt, Human
uuccagaggaagaagucaugacu

SEQ ID NO: 383001 - RNA, 22 nt, Human
ucucagagaucuuucugcaugu

SEQ ID NO: 383002 - RNA, 22 nt, Human
gucauuccuuauguugauucag

SEQ ID NO: 383003 - RNA, 22 nt, Human
uucagugugugauaccugcugu

SEQ ID NO: 383004 - RNA, 22 nt, Human
uccucaggugacuagguaucuu

SEQ ID NO: 383005 - RNA, 22 nt, Human
aggcucaggugccucauucaca

SEQ ID NO: 383006 - RNA, 22 nt, Human
cauuucaaggaccacccuggga

SEQ ID NO: 383007 - RNA, 22 nt, Human
cagcacugcuucgcagccaggg

SEQ ID NO: 383008 - RNA, 22 nt, Human
cacaggagugcugcuauuguug

SEQ ID NO: 383009 - RNA, 22 nt, Human
ucucagggaccaugaugaugac

SEQ ID NO: 383010 - RNA, 22 nt, Human
agggcagagcacugaauuggga

SEQ ID NO: 383011 - RNA, 18 nt, Human
uucacaggaaaugucuuu

SEQ ID NO: 383012 - RNA, 22 nt, Human
auugaaagauaggcuacugugg

SEQ ID NO: 383013 - RNA, 22 nt, Human
aaagucaucagaaccuuccaga

SEQ ID NO: 383014 - RNA, 22 nt, Human
gcaaggcuuugugaauuuuaaa

SEQ ID NO: 383015 - RNA, 22 nt, Human
aggcuucuacguggucccaggg

SEQ ID NO: 383016 - RNA, 22 nt, Human
ugcaagggcuuagggggcugug

SEQ ID NO: 383017 - RNA, 22 nt, Human
ugaggcagccugcauuaaagag

SEQ ID NO: 383018 - RNA, 22 nt, Human
agggagccagaguugggagcuc

SEQ ID NO: 383019 - RNA, 22 nt, Human
ucuggccaacaaaaacuaaguc

SEQ ID NO: 383020 - RNA, 22 nt, Human
ggcucccugccuguccucaguc

SEQ ID NO: 383021 - RNA, 22 nt, Human
gcaggagacuggcugugguagu

SEQ ID NO: 383022 - RNA, 22 nt, Human
gcccaggaguugaaugcagcag

SEQ ID NO: 383023 - RNA, 22 nt, Human
aucaggauagugguuaccuggg

SEQ ID NO: 383024 - RNA, 22 nt, Human
cuuccucacggugcaacaggaa

SEQ ID NO: 383025 - RNA, 22 nt, Human
aggugcaguggcucaugccugu

SEQ ID NO: 383026 - RNA, 22 nt, Human
ccugggcucaagugauccuccu

SEQ ID NO: 383027 - RNA, 22 nt, Human
ucacagaagaugcuggauguug

SEQ ID NO: 383028 - RNA, 22 nt, Human
ugggcuccuugggagcaaguga

SEQ ID NO: 383029 - RNA, 22 nt, Human
cagggcucgcucgcucgcucgc

SEQ ID NO: 383030 - RNA, 22 nt, Human
cagcuuugcaggcuggucagug

SEQ ID NO: 383031 - RNA, 22 nt, Human
cugggcuguucugccccugggu

SEQ ID NO: 383032 - RNA, 22 nt, Human
guuuccauggcucuguuaaugg

SEQ ID NO: 383033 - RNA, 22 nt, Human
auugaaagcacaaagaacaagu

SEQ ID NO: 383034 - RNA, 22 nt, Human
ugccucagucuaaagucucuca

SEQ ID NO: 383035 - RNA, 22 nt, Human
agggcugacacaccuuauccuc

SEQ ID NO: 383036 - RNA, 21 nt, Human
uucaaagagugggcauuguca

SEQ ID NO: 383037 - RNA, 22 nt, Human
accauccugaaaccuucaugcu

SEQ ID NO: 383038 - RNA, 22 nt, Human
gcaggaagaugagcucagguaa

SEQ ID NO: 383039 - RNA, 22 nt, Human
guuuggggucugcagagcggcg

SEQ ID NO: 383040 - RNA, 22 nt, Human
uggggguguccuggugcacaca

SEQ ID NO: 383041 - RNA, 22 nt, Human
uacccagggcuuuucugaugca

SEQ ID NO: 383042 - RNA, 18 nt, Human
uggagccauugccaccau

SEQ ID NO: 383043 - RNA, 20 nt, Human
uacagacaugacaauaaugg

SEQ ID NO: 383044 - RNA, 22 nt, Human
ccuggccacucagguguggggc

SEQ ID NO: 383045 - RNA, 22 nt, Human
agugugaccuuauuuggaaaca

SEQ ID NO: 383046 - RNA, 22 nt, Human
uggccugcagaggcuguggggc

SEQ ID NO: 383047 - RNA, 22 nt, Human
uaaagacaugguguaggugaac

SEQ ID NO: 383048 - RNA, 22 nt, Human
ucagcuuuuuacaugugaaaua

SEQ ID NO: 383049 - RNA, 19 nt, Human
uggagaggaaaugcugcuc

SEQ ID NO: 383050 - RNA, 22 nt, Human
ccugccaggcuuugggcuucug

SEQ ID NO: 383051 - RNA, 22 nt, Human
gccagcaguauguccuggcagu

SEQ ID NO: 383052 - RNA, 22 nt, Human
ucucccacagucucccauggcu

SEQ ID NO: 383053 - RNA, 22 nt, Human
gggcccuggauuuaagcaugga

SEQ ID NO: 383054 - RNA, 22 nt, Human
gcugucccgcugacuuccagcu

SEQ ID NO: 383055 - RNA, 22 nt, Human
gcucaggagcucuugguggcgc

SEQ ID NO: 383056 - RNA, 22 nt, Human
cagcaaaauuugaggauugccu

SEQ ID NO: 383057 - RNA, 22 nt, Human
aauacaguaauuuugaugaguu

SEQ ID NO: 383058 - RNA, 22 nt, Human
cagaguacugggagaacagaag

SEQ ID NO: 383059 - RNA, 21 nt, Human
ccucugcucgggcaugcguuu

SEQ ID NO: 383060 - RNA, 22 nt, Human
augcuguguuugagaaccuagg

SEQ ID NO: 383061 - RNA, 22 nt, Human
ugcaggcuuuagccccauggcu

SEQ ID NO: 383062 - RNA, 23 nt, Human
cagcccuuccugcauguuuuugu

SEQ ID NO: 383063 - RNA, 22 nt, Human
cggagaggaccugcaacucgcu

SEQ ID NO: 383064 - RNA, 17 nt, Human
ccugggaggaguuauga

SEQ ID NO: 383065 - RNA, 22 nt, Human
agaugguuuugucuuuaugauu

SEQ ID NO: 383066 - RNA, 22 nt, Human
cagaggaaaugggaaggagaua

SEQ ID NO: 383067 - RNA, 22 nt, Human
aggcaucugaguuugcaagcuu

SEQ ID NO: 383068 - RNA, 22 nt, Human
uggcagcugcguuguguuucug

SEQ ID NO: 383069 - RNA, 22 nt, Human
ccagcuauugcuguguaacagu

SEQ ID NO: 383070 - RNA, 22 nt, Human
gcuuccuaaaugcacagggcag

SEQ ID NO: 383071 - RNA, 22 nt, Human
aggggugugcauccuggaggau

SEQ ID NO: 383072 - RNA, 22 nt, Human
agugaaaugauaguguaaauac

SEQ ID NO: 383073 - RNA, 21 nt, Human
ugcagagauaucugaagcaga

SEQ ID NO: 383074 - RNA, 22 nt, Human
gucuucuguaagaugagguccc

SEQ ID NO: 383075 - RNA, 22 nt, Human
ccagagagcuacaaggcauaaa

SEQ ID NO: 383076 - RNA, 22 nt, Human
aaaucaguucucccuuucuuca

SEQ ID NO: 383077 - RNA, 22 nt, Human
uccuuuggagcuugacugguag

SEQ ID NO: 383078 - RNA, 22 nt, Human
uagagcuggaauuugcagcaag

SEQ ID NO: 383079 - RNA, 22 nt, Human
uauggcuuuucauuccuaugug

SEQ ID NO: 383080 - RNA, 22 nt, Human
ugcacauucacuuagguauugu

SEQ ID NO: 383081 - RNA, 20 nt, Human
ucagauuuuucuaacuuuga

SEQ ID NO: 383082 - RNA, 22 nt, Human
aaacaggcaucacucagcaaag

SEQ ID NO: 383083 - RNA, 19 nt, Human
ggucagcugggcuagaggc

SEQ ID NO: 383084 - RNA, 21 nt, Human
cugcuguggcccccgacaugc

SEQ ID NO: 383085 - RNA, 23 nt, Human
gagauuuagcagacaaagcucuu

SEQ ID NO: 383086 - RNA, 22 nt, Human
ucugcugucacucauuugcuuc

SEQ ID NO: 383087 - RNA, 22 nt, Human
ugugaaagcaagucuaguucuc

SEQ ID NO: 383088 - RNA, 22 nt, Human
uggaaggaaagguagcagagaa

SEQ ID NO: 383089 - RNA, 22 nt, Human
gggagggaaggaggcgccgugu

SEQ ID NO: 383090 - RNA, 23 nt, Human
gaguguucauagcaggcucuugc

SEQ ID NO: 383091 - RNA, 22 nt, Human
ucaauacuuaagcuuaauucua

SEQ ID NO: 383092 - RNA, 22 nt, Human
caauauauaggaacaacuuagg

SEQ ID NO: 383093 - RNA, 22 nt, Human
cacaccuguaauaccagcuacu

SEQ ID NO: 383094 - RNA, 22 nt, Human
agcagcuguggaaaaguaacua

SEQ ID NO: 383095 - RNA, 22 nt, Human
aggguggagggagucccugagc

SEQ ID NO: 383096 - RNA, 22 nt, Human
ggcuuuauauuguuugagcaga

SEQ ID NO: 383097 - RNA, 22 nt, Human
ugucaugcccaggagcaaggua

SEQ ID NO: 383098 - RNA, 22 nt, Human
gugcuuuuaaaggcaauuagua

SEQ ID NO: 383099 - RNA, 22 nt, Human
ucugcuguauuagguugaacug

SEQ ID NO: 383100 - RNA, 22 nt, Human
uguuuguucccucucuuuccug

SEQ ID NO: 383101 - RNA, 22 nt, Human
gaagcacauggcuauagcuauu

SEQ ID NO: 383102 - RNA, 22 nt, Human
augcugaauugaugcgagggag

SEQ ID NO: 383103 - RNA, 19 nt, Human
acccagagcccuuugcagg

SEQ ID NO: 383104 - RNA, 22 nt, Human
aggcugcuucaauggauaagau

SEQ ID NO: 383105 - RNA, 22 nt, Human
aaucauaauuguauacauucau

SEQ ID NO: 383106 - RNA, 22 nt, Human
aagggcagccugacucacgguc

SEQ ID NO: 383107 - RNA, 22 nt, Human
acuucuucuucagcugggggau

SEQ ID NO: 383108 - RNA, 22 nt, Human
uccaggcacgaggcccugugca

SEQ ID NO: 383109 - RNA, 22 nt, Human
gcucccagggcagcgcagaaga

SEQ ID NO: 383110 - RNA, 22 nt, Human
acagauuuauugaagcugcugc

SEQ ID NO: 383111 - RNA, 22 nt, Human
ccuggcagacagcacugaagcu

SEQ ID NO: 383112 - RNA, 22 nt, Human
acccagaggcggagguugcagu

SEQ ID NO: 383113 - RNA, 23 nt, Human
agcaggaaaccgagggugauguu

SEQ ID NO: 383114 - RNA, 22 nt, Human
aaaguguagagacuuuggaacc

SEQ ID NO: 383115 - RNA, 22 nt, Human
gaggagaaauuuggggaccuga

SEQ ID NO: 383116 - RNA, 22 nt, Human
ugaaaaggguagaucccuaagu

SEQ ID NO: 383117 - RNA, 18 nt, Human
cucucugggugaggacaa

SEQ ID NO: 383118 - RNA, 22 nt, Human
gggagaaggaggacugugcugu

SEQ ID NO: 383119 - RNA, 22 nt, Human
uuuaaauucugucugccgcuua

SEQ ID NO: 383120 - RNA, 23 nt, Human
aggcccugccugucccucuuuuu

SEQ ID NO: 383121 - RNA, 22 nt, Human
aucuggcuuacgaagcacuggu

SEQ ID NO: 383122 - RNA, 22 nt, Human
ucagagugcagggaguagcagc

SEQ ID NO: 383123 - RNA, 22 nt, Human
accaaggaagagauucucaguu

SEQ ID NO: 383124 - RNA, 22 nt, Human
agcugagagguggcaagcugua

SEQ ID NO: 383125 - RNA, 22 nt, Human
ccaggcagggcucaaggaaccu

SEQ ID NO: 383126 - RNA, 22 nt, Human
caccaggcugaaccagagggga

SEQ ID NO: 383127 - RNA, 22 nt, Human
uggaccugcguaggugcugggc

SEQ ID NO: 383128 - RNA, 22 nt, Human
cccuuccuugugacuggugggg

SEQ ID NO: 383129 - RNA, 22 nt, Human
ucauugcaguugaguuguguua

SEQ ID NO: 383130 - RNA, 22 nt, Human
cauugacaguucuuuaaguugc

SEQ ID NO: 383131 - RNA, 22 nt, Human
cauauuucagucuaagaugugu

SEQ ID NO: 383132 - RNA, 22 nt, Human
uuauuauuggugaguuaaggaa

SEQ ID NO: 383133 - RNA, 22 nt, Human
agaggcuguuacacucccagau

SEQ ID NO: 383134 - RNA, 22 nt, Human
guuuuccacuggauuguuugga

SEQ ID NO: 383135 - RNA, 22 nt, Human
agcccuucaaccugccuacucc

SEQ ID NO: 383136 - RNA, 22 nt, Human
ugugcugguacaugugaggaug

SEQ ID NO: 383137 - RNA, 22 nt, Human
cuuuggcaaugucauuuucaau

SEQ ID NO: 383138 - RNA, 22 nt, Human
ucaguuuuuaaaugauauaauu

SEQ ID NO: 383139 - RNA, 22 nt, Human
guuuucaugucuauugggcaua

SEQ ID NO: 383140 - RNA, 22 nt, Human
cacauacaaugguguuauuugg

SEQ ID NO: 383141 - RNA, 22 nt, Human
ugaaaugacagucuuaagcucu

SEQ ID NO: 383142 - RNA, 22 nt, Human
aagagcauggaauggagaucca

SEQ ID NO: 383143 - RNA, 22 nt, Human
uggcaagagggaugcaagguuu

SEQ ID NO: 383144 - RNA, 21 nt, Human
cagacccucuagaggccaccu

SEQ ID NO: 383145 - RNA, 22 nt, Human
aucacuguguauguauaugcag

SEQ ID NO: 383146 - RNA, 22 nt, Human
aggaaccagagguugagcaacu

SEQ ID NO: 383147 - RNA, 21 nt, Human
aaggaaaagcuuggucucuga

SEQ ID NO: 383148 - RNA, 22 nt, Human
uuugcauuccugccugcauuca

SEQ ID NO: 383149 - RNA, 19 nt, Human
ugagaaggcaguggggagc

SEQ ID NO: 383150 - RNA, 22 nt, Human
guccucuguuagaaaugugcuu

SEQ ID NO: 383151 - RNA, 22 nt, Human
ucccagagucagagguggggcc

SEQ ID NO: 383152 - RNA, 22 nt, Human
aucauguuccagaaacagugau

SEQ ID NO: 383153 - RNA, 22 nt, Human
ggagaagccacacauugggugu

SEQ ID NO: 383154 - RNA, 22 nt, Human
uggcugagaaaaugguuuuagg

SEQ ID NO: 383155 - RNA, 22 nt, Human
ugaggcagggaguuuaauuguc

SEQ ID NO: 383156 - RNA, 22 nt, Human
agauuucagguuggggcagaag

SEQ ID NO: 383157 - RNA, 22 nt, Human
gcagacuguaucaaugucagua

SEQ ID NO: 383158 - RNA, 22 nt, Human
uuucagauuaucucaacuuugg

SEQ ID NO: 383159 - RNA, 22 nt, Human
ucauaaaguucuaagaauugua

SEQ ID NO: 383160 - RNA, 22 nt, Human
gccacagggcagaugcgcagag

SEQ ID NO: 383161 - RNA, 22 nt, Human
cagaagaggacuggguagcuca

SEQ ID NO: 383162 - RNA, 22 nt, Human
aauugcuaaagauuauguuuuc

SEQ ID NO: 383163 - RNA, 22 nt, Human
ggacacagauaaucacacagau

SEQ ID NO: 383164 - RNA, 22 nt, Human
cugggugguucuaacuguugau

SEQ ID NO: 383165 - RNA, 22 nt, Human
uggcagagugcggcauccccug

SEQ ID NO: 383166 - RNA, 22 nt, Human
ugaugaauaaacuugagaguca

SEQ ID NO: 383167 - RNA, 17 nt, Human
aggcaggcagagcggga

SEQ ID NO: 383168 - RNA, 23 nt, Human
cugucuccugggcuagguggaau

SEQ ID NO: 383169 - RNA, 22 nt, Human
uaugaagaaaccuauccucuag

SEQ ID NO: 383170 - RNA, 22 nt, Human
acagaggucauggagaguucuc

SEQ ID NO: 383171 - RNA, 22 nt, Human
gcuggcuguuggagguaccugc

SEQ ID NO: 383172 - RNA, 23 nt, Human
auagaagauuauugcaacagucc

SEQ ID NO: 383173 - RNA, 22 nt, Human
guaugcaucgacucaagucuga

SEQ ID NO: 383174 - RNA, 22 nt, Human
ccugccagucacuaugucaccu

SEQ ID NO: 383175 - RNA, 22 nt, Human
acugcccucccaucuauugcaa

SEQ ID NO: 383176 - RNA, 22 nt, Human
gccugcagggcccuuguggguc

SEQ ID NO: 383177 - RNA, 22 nt, Human
ggacucagcagccaggaguggc

SEQ ID NO: 383178 - RNA, 22 nt, Human
gcuguguccucacacagccuuu

SEQ ID NO: 383179 - RNA, 20 nt, Human
cagcaguggaugagaguuuu

SEQ ID NO: 383180 - RNA, 20 nt, Human
uuggcucugaucaguggagc

SEQ ID NO: 383181 - RNA, 22 nt, Human
agaugauggccauguccucucc

SEQ ID NO: 383182 - RNA, 22 nt, Human
cagcuuccgaccgggggcugca

SEQ ID NO: 383183 - RNA, 20 nt, Human
auaauuuacccugcaccacu

SEQ ID NO: 383184 - RNA, 22 nt, Human
cuucuucaaccugaaaguuuca

SEQ ID NO: 383185 - RNA, 22 nt, Human
aaucagaacuccuaccacagag

SEQ ID NO: 383186 - RNA, 22 nt, Human
uucaaacaaaacuguucccaua

SEQ ID NO: 383187 - RNA, 22 nt, Human
aaguuucaugauguaauuauug

SEQ ID NO: 383188 - RNA, 22 nt, Human
cuucuuaaaguugucacagcug

SEQ ID NO: 383189 - RNA, 22 nt, Human
gucaugccuggcuucuuagaca

SEQ ID NO: 383190 - RNA, 22 nt, Human
cucuccuggggagcacacacac

SEQ ID NO: 383191 - RNA, 21 nt, Human
gugguucuagagaaacagaau

SEQ ID NO: 383192 - RNA, 22 nt, Human
cccugagaugccucacccuagu

SEQ ID NO: 383193 - RNA, 22 nt, Human
ugcauuauuugcaugugccugu

SEQ ID NO: 383194 - RNA, 22 nt, Human
acuuuggaucugauguaaucag

SEQ ID NO: 383195 - RNA, 22 nt, Human
gggcagagguucaacuucaaca

SEQ ID NO: 383196 - RNA, 22 nt, Human
ccuggugccacuagagaauguc

SEQ ID NO: 383197 - RNA, 22 nt, Human
gggcuggcaucgguugcugaga

SEQ ID NO: 383198 - RNA, 22 nt, Human
aguccuuagaacagugccuggg

SEQ ID NO: 383199 - RNA, 22 nt, Human
caggcugagcucuggccugggc

SEQ ID NO: 383200 - RNA, 20 nt, Human
agcccaggccugugugaguc

SEQ ID NO: 383201 - RNA, 22 nt, Human
ugggccacgugacccuuacccu

SEQ ID NO: 383202 - RNA, 22 nt, Human
aggcccagggcugcucucugaa

SEQ ID NO: 383203 - RNA, 22 nt, Human
aggagcugacuuguaaagcauu

SEQ ID NO: 383204 - RNA, 22 nt, Human
ugcagugguguccagguguacu

SEQ ID NO: 383205 - RNA, 22 nt, Human
uugcuucaguagcucuuuaaag

SEQ ID NO: 383206 - RNA, 22 nt, Human
cugggccagucucggccgcucu

SEQ ID NO: 383207 - RNA, 22 nt, Human
guaaaucccauccuuucucugg

SEQ ID NO: 383208 - RNA, 22 nt, Human
caagcagagacuagauagcugu

SEQ ID NO: 383209 - RNA, 22 nt, Human
uccuuugguuguagacaggaau

SEQ ID NO: 383210 - RNA, 22 nt, Human
agagcuguucagcagccagguu

SEQ ID NO: 383211 - RNA, 22 nt, Human
uccaugaguuugaggaaaagag

SEQ ID NO: 383212 - RNA, 20 nt, Human
cuccagggaacagacuggag

SEQ ID NO: 383213 - RNA, 22 nt, Human
auucuuaaauuuaggucuguga

SEQ ID NO: 383214 - RNA, 22 nt, Human
agcucccaauugacuugaacua

SEQ ID NO: 383215 - RNA, 23 nt, Human
uucaagauacgguuuccaggcug

SEQ ID NO: 383216 - RNA, 22 nt, Human
ugucucugaacagcuuacuaaa

SEQ ID NO: 383217 - RNA, 22 nt, Human
gcagaggacagggauuuagauu

SEQ ID NO: 383218 - RNA, 22 nt, Human
auucuuggcaaggagauuuaaa

SEQ ID NO: 383219 - RNA, 22 nt, Human
uaguggagaaguggagucugug

SEQ ID NO: 383220 - RNA, 21 nt, Human
uccaggagcacgggacuagga

SEQ ID NO: 383221 - RNA, 18 nt, Human
ggccugaggauuucagca

SEQ ID NO: 383222 - RNA, 22 nt, Human
gugcauuuaggucacaugaugu

SEQ ID NO: 383223 - RNA, 22 nt, Human
ucuggaucucccucauccuggg

SEQ ID NO: 383224 - RNA, 18 nt, Human
caguuuuuauaucuggca

SEQ ID NO: 383225 - RNA, 22 nt, Human
aagcuggagaguuaggugaaua

SEQ ID NO: 383226 - RNA, 22 nt, Human
auuuccuauagauauggugagu

SEQ ID NO: 383227 - RNA, 22 nt, Human
aaggcagccagauccuuugggu

SEQ ID NO: 383228 - RNA, 22 nt, Human
acuuggagagcauugcugggga

SEQ ID NO: 383229 - RNA, 22 nt, Human
accaugggucagccaccucagc

SEQ ID NO: 383230 - RNA, 19 nt, Human
acaggcagaauugggugug

SEQ ID NO: 383231 - RNA, 22 nt, Human
guauuauuggguaguaugguaa

SEQ ID NO: 383232 - RNA, 22 nt, Human
gcuggcugaggucuagcucuuu

SEQ ID NO: 383233 - RNA, 22 nt, Human
aaaggccagguuggcugguauu

SEQ ID NO: 383234 - RNA, 22 nt, Human
cccaggaggucgaagcugcagu

SEQ ID NO: 383235 - RNA, 22 nt, Human
cccagaaggucgaggcugcagu

SEQ ID NO: 383236 - RNA, 22 nt, Human
ugcuuuauucaggguuuacccc

SEQ ID NO: 383237 - RNA, 22 nt, Human
agugaggcuaauaggcaauggu

SEQ ID NO: 383238 - RNA, 22 nt, Human
gagaaagacguaggcugggagg

SEQ ID NO: 383239 - RNA, 19 nt, Human
guucaaacacugauucagc

SEQ ID NO: 383240 - RNA, 21 nt, Human
cugaggcagcacagcuaguca

SEQ ID NO: 383241 - RNA, 22 nt, Human
ugaaagcacaaguucuaacagg

SEQ ID NO: 383242 - RNA, 22 nt, Human
ccacagggaacaugacagccuu

SEQ ID NO: 383243 - RNA, 22 nt, Human
ucauugcaagcucauuuaucug

SEQ ID NO: 383244 - RNA, 22 nt, Human
agaaaguucacugguauauuuu

SEQ ID NO: 383245 - RNA, 22 nt, Human
cuagaaauacaggcacgugcca

SEQ ID NO: 383246 - RNA, 22 nt, Human
ucugggcccuaaaccagcucua

SEQ ID NO: 383247 - RNA, 22 nt, Human
uguacaauggcuauaauacccu

SEQ ID NO: 383248 - RNA, 22 nt, Human
cagaggcucaccagccuuucac

SEQ ID NO: 383249 - RNA, 18 nt, Human
acauuucuaugcuucugg

SEQ ID NO: 383250 - RNA, 22 nt, Human
uuaugggagcaauuggggaggu

SEQ ID NO: 383251 - RNA, 22 nt, Human
cagcugcccaagccccagaugu

SEQ ID NO: 383252 - RNA, 22 nt, Human
agccagugggauuagagccucu

SEQ ID NO: 383253 - RNA, 22 nt, Human
ccuggagaccagaggauacuuc

SEQ ID NO: 383254 - RNA, 22 nt, Human
aggagugggggcgagaaguuaa

SEQ ID NO: 383255 - RNA, 22 nt, Human
uggcagaguaggauggcccugu

SEQ ID NO: 383256 - RNA, 22 nt, Human
uaagaaucgauguuuauuuaga

SEQ ID NO: 383257 - RNA, 22 nt, Human
gcugcagugagccaagaucgug

SEQ ID NO: 383258 - RNA, 22 nt, Human
cugggagcccgcguccuggugg

SEQ ID NO: 383259 - RNA, 22 nt, Human
aucaggauuauuaaaucuggau

SEQ ID NO: 383260 - RNA, 22 nt, Human
aggcaccuugagagcaggagcu

SEQ ID NO: 383261 - RNA, 21 nt, Human
uggcucuggguaggagagugc

SEQ ID NO: 383262 - RNA, 22 nt, Human
cccagcccagcguucgaggggu

SEQ ID NO: 383263 - RNA, 22 nt, Human
auuguggugucaguuauaggca

SEQ ID NO: 383264 - RNA, 22 nt, Human
ggcuucuuccugugaacauguu

SEQ ID NO: 383265 - RNA, 22 nt, Human
uaaguccuucaccuaauccuca

SEQ ID NO: 383266 - RNA, 22 nt, Human
aaaugcaggaaauuaugcuuuu

SEQ ID NO: 383267 - RNA, 22 nt, Human
ucccaggaugugcgugccgccg

SEQ ID NO: 383268 - RNA, 22 nt, Human
uuuuccuauaugcaaagaaugc

SEQ ID NO: 383269 - RNA, 19 nt, Human
auagucuuuccaauuauac

SEQ ID NO: 383270 - RNA, 22 nt, Human
aagagcugauuaagucaugagg

SEQ ID NO: 383271 - RNA, 20 nt, Human
cauuugaaucuccauucugc

SEQ ID NO: 383272 - RNA, 22 nt, Human
cuggcagcgguuugcagccugg

SEQ ID NO: 383273 - RNA, 22 nt, Human
gccaggcugacucccccggccu

SEQ ID NO: 383274 - RNA, 22 nt, Human
gaagccacuauagauauucuaa

SEQ ID NO: 383275 - RNA, 22 nt, Human
agacaaagaaaccguagaagca

SEQ ID NO: 383276 - RNA, 22 nt, Human
gcuuccugagaaacaaucugau

SEQ ID NO: 383277 - RNA, 22 nt, Human
agggcagccucucagccuaggu

SEQ ID NO: 383278 - RNA, 22 nt, Human
gggacuggaacuacuggugcag

SEQ ID NO: 383279 - RNA, 22 nt, Human
gaggugagaagggggucagaug

SEQ ID NO: 383280 - RNA, 22 nt, Human
agcugcaggccucuccugggga

SEQ ID NO: 383281 - RNA, 22 nt, Human
aaaugcacagguuuuaaauccu

SEQ ID NO: 383282 - RNA, 22 nt, Human
caauguguguguuuuucucaac

SEQ ID NO: 383283 - RNA, 22 nt, Human
ucucccuggagcccugaagcau

SEQ ID NO: 383284 - RNA, 22 nt, Human
uguggcagaaccagaauucaaa

SEQ ID NO: 383285 - RNA, 22 nt, Human
gccaggcagccacccucugcga

SEQ ID NO: 383286 - RNA, 22 nt, Human
acuccugguuuguguccuggcu

SEQ ID NO: 383287 - RNA, 22 nt, Human
agcuuguuaaggaugcauauua

SEQ ID NO: 383288 - RNA, 21 nt, Human
agaggccuuacaggauagacc

SEQ ID NO: 383289 - RNA, 22 nt, Human
ucccagagcucugacaccagcu

SEQ ID NO: 383290 - RNA, 22 nt, Human
caagaaucaacauuauuuagug

SEQ ID NO: 383291 - RNA, 17 nt, Human
gauuuccugaaguucuu

SEQ ID NO: 383292 - RNA, 22 nt, Human
ugcauccuuaaccagcaucacu

SEQ ID NO: 383293 - RNA, 22 nt, Human
ucuuccugaaacccuguuccag

SEQ ID NO: 383294 - RNA, 22 nt, Human
ggacuccucuagaaguugaggc

SEQ ID NO: 383295 - RNA, 22 nt, Human
auguauguuaguguauuaucua

SEQ ID NO: 383296 - RNA, 21 nt, Human
uucaaugaaaacaaagugagg

SEQ ID NO: 383297 - RNA, 22 nt, Human
agaggagguggugaugcuuuaa

SEQ ID NO: 383298 - RNA, 22 nt, Human
ccucaugguacuuacuguagcu

SEQ ID NO: 383299 - RNA, 22 nt, Human
uucuuaaagaggcaaaacacag

SEQ ID NO: 383300 - RNA, 22 nt, Human
acaaaggcauagugaauguuuu

SEQ ID NO: 383301 - RNA, 22 nt, Human
ccugugugucugucacugcaca

SEQ ID NO: 383302 - RNA, 22 nt, Human
acauuucuauagugcaucuguu

SEQ ID NO: 383303 - RNA, 22 nt, Human
aauguucauugauuaaaugaau

SEQ ID NO: 383304 - RNA, 22 nt, Human
gacaguccuugcccaguaucua

SEQ ID NO: 383305 - RNA, 22 nt, Human
ucuggcaggcaaucggcucugg

SEQ ID NO: 383306 - RNA, 22 nt, Human
gggcuggcgggaaaggcaauuc

SEQ ID NO: 383307 - RNA, 22 nt, Human
cuggcuugcagcucaucauaaa

SEQ ID NO: 383308 - RNA, 22 nt, Human
aggcacugggaauaugcugagg

SEQ ID NO: 383309 - RNA, 21 nt, Human
ggagauggguaucgccugggc

SEQ ID NO: 383310 - RNA, 22 nt, Human
cucugggcuuguugaccugcac

SEQ ID NO: 383311 - RNA, 22 nt, Human
ucucccagugucuggcagucag

SEQ ID NO: 383312 - RNA, 22 nt, Human
acuauacauugaauguuaaggu

SEQ ID NO: 383313 - RNA, 22 nt, Human
augaaaacuuuagccucauuag

SEQ ID NO: 383314 - RNA, 22 nt, Human
cgugagcaaaauggacacuccc

SEQ ID NO: 383315 - RNA, 18 nt, Human
agcuggcccuggcugccg

SEQ ID NO: 383316 - RNA, 17 nt, Human
aggcuggcucacaggga

SEQ ID NO: 383317 - RNA, 22 nt, Human
aauuagggaaaacauuugcuuu

SEQ ID NO: 383318 - RNA, 22 nt, Human
cugugcaguaggucagggcugg

SEQ ID NO: 383319 - RNA, 22 nt, Human
uggaggaaguggcuggccagaa

SEQ ID NO: 383320 - RNA, 22 nt, Human
uaggccagcccuuaguccuguc

SEQ ID NO: 383321 - RNA, 22 nt, Human
cagaggcagaauggagauuugg

SEQ ID NO: 383322 - RNA, 22 nt, Human
ccccuuccaggaagcagaaucg

SEQ ID NO: 383323 - RNA, 22 nt, Human
auucugauaucuuauucuagcu

SEQ ID NO: 383324 - RNA, 22 nt, Human
aaaauguaaagcuugaguguag

SEQ ID NO: 383325 - RNA, 20 nt, Human
uuggucagugguucaguuug

SEQ ID NO: 383326 - RNA, 22 nt, Human
cucacugugaccucagcagaca

SEQ ID NO: 383327 - RNA, 22 nt, Human
cacaauacuauuuuuaggucuu

SEQ ID NO: 383328 - RNA, 22 nt, Human
agguaaaauagauaguauuucu

SEQ ID NO: 383329 - RNA, 22 nt, Human
auaaauaucacuguugucccuc

SEQ ID NO: 383330 - RNA, 22 nt, Human
aaaugcauguagaauaauagag

SEQ ID NO: 383331 - RNA, 22 nt, Human
uagaggcacccuggaggagacu

SEQ ID NO: 383332 - RNA, 22 nt, Human
uuucccaaguguaaacauggca

SEQ ID NO: 383333 - RNA, 18 nt, Human
gacccagcagaugggcuu

SEQ ID NO: 383334 - RNA, 22 nt, Human
uucacagggcagcagcugagcc

SEQ ID NO: 383335 - RNA, 22 nt, Human
agcuuccuuggcgcugaggccu

SEQ ID NO: 383336 - RNA, 22 nt, Human
aaauaaguaguuuaguguugug

SEQ ID NO: 383337 - RNA, 22 nt, Human
cacagggcuaaaugaaggguug

SEQ ID NO: 383338 - RNA, 22 nt, Human
aauauaugugguauugaccagc

SEQ ID NO: 383339 - RNA, 22 nt, Human
guugaaaguggagaaccugguu

SEQ ID NO: 383340 - RNA, 22 nt, Human
cagaguguuagcgcugguuggg

SEQ ID NO: 383341 - RNA, 20 nt, Human
aggagggaccuggauuggcg

SEQ ID NO: 383342 - RNA, 22 nt, Human
uccuuggcagcagggagcauga

SEQ ID NO: 383343 - RNA, 22 nt, Human
uaaaaguggauaagcuguagga

SEQ ID NO: 383344 - RNA, 22 nt, Human
agcaggcuuguuaugucugaga

SEQ ID NO: 383345 - RNA, 21 nt, Human
aaguggagaagaaaagcugga

SEQ ID NO: 383346 - RNA, 22 nt, Human
augauggugggagaugacccag

SEQ ID NO: 383347 - RNA, 22 nt, Human
aggcaugugacccuggacucag

SEQ ID NO: 383348 - RNA, 22 nt, Human
uuaacacuaucugucauaauua

SEQ ID NO: 383349 - RNA, 22 nt, Human
uaagcugugggagauuggcaua

SEQ ID NO: 383350 - RNA, 17 nt, Human
ugaaaucagcacccagg

SEQ ID NO: 383351 - RNA, 22 nt, Human
uucaacacaggaacaugauaua

SEQ ID NO: 383352 - RNA, 22 nt, Human
cagugagggcccccuuccaggu

SEQ ID NO: 383353 - RNA, 22 nt, Human
agcaugcacaugacuggcuuaa

SEQ ID NO: 383354 - RNA, 22 nt, Human
ggccaggccaagaggguuggaa

SEQ ID NO: 383355 - RNA, 22 nt, Human
uugaaucucuugaaucucuguu

SEQ ID NO: 383356 - RNA, 22 nt, Human
uguuaaucaaucaacaguauua

SEQ ID NO: 383357 - RNA, 22 nt, Human
cuuccaaauguaaauaaguuuc

SEQ ID NO: 383358 - RNA, 22 nt, Human
ggcagcugcaaaucugcucugu

SEQ ID NO: 383359 - RNA, 20 nt, Human
ccagagcugauggcugcccg

SEQ ID NO: 383360 - RNA, 23 nt, Human
ucacacagcuggucagguacaga

SEQ ID NO: 383361 - RNA, 22 nt, Human
ugguccugccccgugcacagag

SEQ ID NO: 383362 - RNA, 22 nt, Human
caagggugguauugggagcaua

SEQ ID NO: 383363 - RNA, 22 nt, Human
agcaggaaguagucuguaagca

SEQ ID NO: 383364 - RNA, 22 nt, Human
uucaaaggcaggauagcagcug

SEQ ID NO: 383365 - RNA, 22 nt, Human
aaauaucauuuauaacuuuuaa

SEQ ID NO: 383366 - RNA, 22 nt, Human
ccucacuggccagccaggggug

SEQ ID NO: 383367 - RNA, 22 nt, Human
gcccauggacacccaagugcca

SEQ ID NO: 383368 - RNA, 17 nt, Human
ucccaggaacagggaau

SEQ ID NO: 383369 - RNA, 22 nt, Human
auaaacagcuccauuuagugcc

SEQ ID NO: 383370 - RNA, 22 nt, Human
gggcagcuggauaguuuuaaau

SEQ ID NO: 383371 - RNA, 22 nt, Human
aaucaguuaggguguuaaugag

SEQ ID NO: 383372 - RNA, 18 nt, Human
ucaagacaucaugaaaua

SEQ ID NO: 383373 - RNA, 22 nt, Human
aucaccaggcaaaaugucagag

SEQ ID NO: 383374 - RNA, 22 nt, Human
auggcucauuuaucuugcagcc

SEQ ID NO: 383375 - RNA, 22 nt, Human
ugaaaugaucaguuugguuacu

SEQ ID NO: 383376 - RNA, 22 nt, Human
augaccccuaaaauuuacuguc

SEQ ID NO: 383377 - RNA, 22 nt, Human
acacaguaugaaaagucuaguu

SEQ ID NO: 383378 - RNA, 22 nt, Human
aggcaagggggcgccaccuucc

SEQ ID NO: 383379 - RNA, 19 nt, Human
gggcagaauggcaucucag

SEQ ID NO: 383380 - RNA, 22 nt, Human
ggauggcauguugggcucuguu

SEQ ID NO: 383381 - RNA, 22 nt, Human
ugaaguccuagaacuccuggua

SEQ ID NO: 383382 - RNA, 17 nt, Human
ggcagcugccacuuuuu

SEQ ID NO: 383383 - RNA, 22 nt, Human
uuguugucauuguagaggauuu

SEQ ID NO: 383384 - RNA, 22 nt, Human
acauagcuuaaaugagaagaua

SEQ ID NO: 383385 - RNA, 21 nt, Human
ggucagggggugccuccaggu

SEQ ID NO: 383386 - RNA, 22 nt, Human
cuuaagauuugagauaccuaau

SEQ ID NO: 383387 - RNA, 22 nt, Human
acaguggaagaagcacugaacu

SEQ ID NO: 383388 - RNA, 22 nt, Human
gggucaggcucagcagggcagc

SEQ ID NO: 383389 - RNA, 22 nt, Human
ucucagagccuaacuaaccuaa

SEQ ID NO: 383390 - RNA, 22 nt, Human
cacagcuggugcacuagcucug

SEQ ID NO: 383391 - RNA, 22 nt, Human
ccagggaggguccuguggcuuc

SEQ ID NO: 383392 - RNA, 22 nt, Human
gcaaauacauguugagcaccua

SEQ ID NO: 383393 - RNA, 18 nt, Human
aagaggaggaaacccagg

SEQ ID NO: 383394 - RNA, 22 nt, Human
ugcagcagcagggaggaggcuc

SEQ ID NO: 383395 - RNA, 17 nt, Human
aggcugcugggccaggg

SEQ ID NO: 383396 - RNA, 22 nt, Human
aggcacugugcuucuuauaugu

SEQ ID NO: 383397 - RNA, 22 nt, Human
aggaaaaaccuguuaaugguag

SEQ ID NO: 383398 - RNA, 19 nt, Human
cacagggcaggucucaugu

SEQ ID NO: 383399 - RNA, 23 nt, Human
caugggagugagaaugccagcuc

SEQ ID NO: 383400 - RNA, 22 nt, Human
agcaggcagccauuuggaaggc

SEQ ID NO: 383401 - RNA, 22 nt, Human
ccucugggagacugcuacugag

SEQ ID NO: 383402 - RNA, 22 nt, Human
ucaggcuggagugcaguggcgc

SEQ ID NO: 383403 - RNA, 22 nt, Human
agggcagccaugagccuucagg

SEQ ID NO: 383404 - RNA, 22 nt, Human
aauuccagaggaggacaguccu

SEQ ID NO: 383405 - RNA, 22 nt, Human
agggagaacaguugcagcagac

SEQ ID NO: 383406 - RNA, 22 nt, Human
aaaugugucaguuucauucucu

SEQ ID NO: 383407 - RNA, 22 nt, Human
uccaggcacagaguuggucagu

SEQ ID NO: 383408 - RNA, 22 nt, Human
ggcagccagagggcagcuggau

SEQ ID NO: 383409 - RNA, 22 nt, Human
ucagcaauaugauaggcuuugu

SEQ ID NO: 383410 - RNA, 22 nt, Human
agccccugggaguagcugcugc

SEQ ID NO: 383411 - RNA, 22 nt, Human
ugaaugaaugaauuaauagagu

SEQ ID NO: 383412 - RNA, 22 nt, Human
uuauuuuguagcucugaucuuu

SEQ ID NO: 383413 - RNA, 22 nt, Human
gguggguuuggaagagcaggcu

SEQ ID NO: 383414 - RNA, 21 nt, Human
ccagagagagggaaguggguu

SEQ ID NO: 383415 - RNA, 21 nt, Human
auggagggaccagggaagcag

SEQ ID NO: 383416 - RNA, 22 nt, Human
uagcagcucugauucugggccc

SEQ ID NO: 383417 - RNA, 22 nt, Human
uccagaguacggaagagucauc

SEQ ID NO: 383418 - RNA, 22 nt, Human
aagggcucgguagcaguccuga

SEQ ID NO: 383419 - RNA, 22 nt, Human
agcagggcugcagugugucuuu

SEQ ID NO: 383420 - RNA, 22 nt, Human
uucuucucggcugucagauagu

SEQ ID NO: 383421 - RNA, 22 nt, Human
gaggguggguuucuugcacguc

SEQ ID NO: 383422 - RNA, 22 nt, Human
uucacauugugcagauuauggu

SEQ ID NO: 383423 - RNA, 22 nt, Human
auccuuaguuaagaacaggagu

SEQ ID NO: 383424 - RNA, 18 nt, Human
ucauagaagugaaucaga

SEQ ID NO: 383425 - RNA, 22 nt, Human
gcugcccuaauaucacauguua

SEQ ID NO: 383426 - RNA, 22 nt, Human
aucagaauaauuagauuucaga

SEQ ID NO: 383427 - RNA, 22 nt, Human
uugcauaaaugcuuaaaauuug

SEQ ID NO: 383428 - RNA, 22 nt, Human
gaggcucauugcauugugcauu

SEQ ID NO: 383429 - RNA, 20 nt, Human
cucaguguggccugaguguu

SEQ ID NO: 383430 - RNA, 22 nt, Human
cugaagcacagcauauaaauaa

SEQ ID NO: 383431 - RNA, 22 nt, Human
agucccagaugacccagcuacu

SEQ ID NO: 383432 - RNA, 22 nt, Human
ucauggagacuuugagccuguu

SEQ ID NO: 383433 - RNA, 22 nt, Human
ccaggcucaggugcgagagaca

SEQ ID NO: 383434 - RNA, 22 nt, Human
gcccaggaguugguggcugcag

SEQ ID NO: 383435 - RNA, 22 nt, Human
accucugccacuuucuaacucu

SEQ ID NO: 383436 - RNA, 22 nt, Human
ugcaggccggcccuaggccuca

SEQ ID NO: 383437 - RNA, 22 nt, Human
ugugaaagucaaauuaauugaa

SEQ ID NO: 383438 - RNA, 22 nt, Human
aggccagcagcaugacggcauc

SEQ ID NO: 383439 - RNA, 22 nt, Human
ccagagaggccuuggcaagaca

SEQ ID NO: 383440 - RNA, 22 nt, Human
gcugggagcccuggucugcucc

SEQ ID NO: 383441 - RNA, 22 nt, Human
ccugggcagugcuggaguugaa

SEQ ID NO: 383442 - RNA, 22 nt, Human
cugaggcuuggaggggucuggu

SEQ ID NO: 383443 - RNA, 22 nt, Human
aaugaacaaaauaugcuuugca

SEQ ID NO: 383444 - RNA, 22 nt, Human
ugaggcaggaggauugcaggau

SEQ ID NO: 383445 - RNA, 22 nt, Human
agagcauccaucggccaggacc

SEQ ID NO: 383446 - RNA, 22 nt, Human
uuuuaucugcuucauuaguuga

SEQ ID NO: 383447 - RNA, 22 nt, Human
ucuaaacacuaagucuugaugc

SEQ ID NO: 383448 - RNA, 22 nt, Human
ucagagagaaauaguuuuugac

SEQ ID NO: 383449 - RNA, 22 nt, Human
uagcacaucuggcgcuuauagg

SEQ ID NO: 383450 - RNA, 22 nt, Human
ccagguguagcacugcucacag

SEQ ID NO: 383451 - RNA, 22 nt, Human
auaguuguguggggauucuggu

SEQ ID NO: 383452 - RNA, 22 nt, Human
acagacauuuucuguauugccu

SEQ ID NO: 383453 - RNA, 22 nt, Human
cccaggagauaacguucccaag

SEQ ID NO: 383454 - RNA, 22 nt, Human
ucccaggauuuuaggcucucag

SEQ ID NO: 383455 - RNA, 22 nt, Human
caggaccuggaaugcuugugaa

SEQ ID NO: 383456 - RNA, 22 nt, Human
guuucuuagguaaauucuuuga

SEQ ID NO: 383457 - RNA, 22 nt, Human
ugagaagcugcugacuuagccu

SEQ ID NO: 383458 - RNA, 22 nt, Human
aaaagcucuuucugcuguagau

SEQ ID NO: 383459 - RNA, 22 nt, Human
gaagccucaacaucucugcguc

SEQ ID NO: 383460 - RNA, 22 nt, Human
ucuuugcacugugcaagcagaa

SEQ ID NO: 383461 - RNA, 22 nt, Human
ucugaggcuaagagacagaggc

SEQ ID NO: 383462 - RNA, 22 nt, Human
agugcuuugguauagaacuauu

SEQ ID NO: 383463 - RNA, 22 nt, Human
cccaggacucuucacugcagcc

SEQ ID NO: 383464 - RNA, 22 nt, Human
ucauuucuguugugcaucacug

SEQ ID NO: 383465 - RNA, 22 nt, Human
gaggcagcaucuauggugggaa

SEQ ID NO: 383466 - RNA, 22 nt, Human
ggcugcugguagggguaggaag

SEQ ID NO: 383467 - RNA, 22 nt, Human
ugugaagguaaggaggggcaag

SEQ ID NO: 383468 - RNA, 22 nt, Human
ggaggccacgguuuagcaccga

SEQ ID NO: 383469 - RNA, 22 nt, Human
caggaggaggugagguagaacu

SEQ ID NO: 383470 - RNA, 22 nt, Human
cauuguuaccaucuuuuaccua

SEQ ID NO: 383471 - RNA, 22 nt, Human
gcagcuucaguaggugaagaca

SEQ ID NO: 383472 - RNA, 22 nt, Human
gccuggcccagggcuccgcagg

SEQ ID NO: 383473 - RNA, 22 nt, Human
agcagugagugggaggaccaug

SEQ ID NO: 383474 - RNA, 22 nt, Human
cugggcagcuguaucagggagu

SEQ ID NO: 383475 - RNA, 22 nt, Human
ucucucugccaacucacagcca

SEQ ID NO: 383476 - RNA, 22 nt, Human
aguacaaugucugacacaguag

SEQ ID NO: 383477 - RNA, 22 nt, Human
aaggcccuggcaggaagcagga

SEQ ID NO: 383478 - RNA, 22 nt, Human
uggccagcccuucagccaugcc

SEQ ID NO: 383479 - RNA, 22 nt, Human
acuuugaaggggaacauuuuaa

SEQ ID NO: 383480 - RNA, 22 nt, Human
agguguguauaaacauacauau

SEQ ID NO: 383481 - RNA, 21 nt, Human
aaauuucugcaagccucaacu

SEQ ID NO: 383482 - RNA, 22 nt, Human
ugucccagucaaggcugucauc

SEQ ID NO: 383483 - RNA, 22 nt, Human
agagugguacuucuuuuucuuc

SEQ ID NO: 383484 - RNA, 22 nt, Human
uaaagccacuucauucuagucu

SEQ ID NO: 383485 - RNA, 22 nt, Human
acaagagauuaucuacagauga

SEQ ID NO: 383486 - RNA, 22 nt, Human
ugaugaaauguugaggcaguga

SEQ ID NO: 383487 - RNA, 22 nt, Human
cuacagaauucaacaaaugguu

SEQ ID NO: 383488 - RNA, 23 nt, Human
auacauacagucuuacugacuuu

SEQ ID NO: 383489 - RNA, 22 nt, Human
agcugccagcaaguuucaaaca

SEQ ID NO: 383490 - RNA, 22 nt, Human
caggcaccccaggugagcacug

SEQ ID NO: 383491 - RNA, 21 nt, Human
acagcauguuuguguguuugc

SEQ ID NO: 383492 - RNA, 22 nt, Human
aaagucauuuguauauacccuu

SEQ ID NO: 383493 - RNA, 22 nt, Human
ggccucucuggcauggcugccc

SEQ ID NO: 383494 - RNA, 22 nt, Human
acugucugcuggccccugguua

SEQ ID NO: 383495 - RNA, 22 nt, Human
gugccuggcacacagaaggcaa

SEQ ID NO: 383496 - RNA, 22 nt, Human
ggcugccugaacuuuggggaaa

SEQ ID NO: 383497 - RNA, 21 nt, Human
cuguggaagggaacuagaggg

SEQ ID NO: 383498 - RNA, 22 nt, Human
aaagccuugagauccuauaguu

SEQ ID NO: 383499 - RNA, 22 nt, Human
ggcugccaggagaagcucagug

SEQ ID NO: 383500 - RNA, 22 nt, Human
gagagugaugaaugguuaaaca

SEQ ID NO: 383501 - RNA, 22 nt, Human
caugguuuauuagagcuuauuu

SEQ ID NO: 383502 - RNA, 22 nt, Human
ugccuguguugauuacuuuguc

SEQ ID NO: 383503 - RNA, 22 nt, Human
aggauuuaucaggaacucucuu

SEQ ID NO: 383504 - RNA, 22 nt, Human
cugcagagcauaaaucugaaua

SEQ ID NO: 383505 - RNA, 22 nt, Human
ggcauuuaauccaucugauuga

SEQ ID NO: 383506 - RNA, 23 nt, Human
gccaggaguggguagacuaaugc

SEQ ID NO: 383507 - RNA, 22 nt, Human
uccaggcaguuuuccagguugu

SEQ ID NO: 383508 - RNA, 22 nt, Human
uuaggaguccagaugucuuggg

SEQ ID NO: 383509 - RNA, 22 nt, Human
agagaugaacauaaaacaagga

SEQ ID NO: 383510 - RNA, 22 nt, Human
agagcugugaaaaugagguuug

SEQ ID NO: 383511 - RNA, 22 nt, Human
cccagacauaacagcagagagg

SEQ ID NO: 383512 - RNA, 22 nt, Human
aagaggucauaccagauaaggg

SEQ ID NO: 383513 - RNA, 22 nt, Human
gucacuguuuccuauuauauuu

SEQ ID NO: 383514 - RNA, 22 nt, Human
uuggcuucuucgcacagcagua

SEQ ID NO: 383515 - RNA, 22 nt, Human
auuguggcuagacagucacaau

SEQ ID NO: 383516 - RNA, 22 nt, Human
agugcuuuccuucuugugacau

SEQ ID NO: 383517 - RNA, 22 nt, Human
cauguacauucuguagauggag

SEQ ID NO: 383518 - RNA, 19 nt, Human
uugaaagauuagcuuucua

SEQ ID NO: 383519 - RNA, 22 nt, Human
cuuuacagaauaagaauacugg

SEQ ID NO: 383520 - RNA, 22 nt, Human
agucucagcuacuugggaggcu

SEQ ID NO: 383521 - RNA, 22 nt, Human
gaaggcuggcuuucugagagca

SEQ ID NO: 383522 - RNA, 22 nt, Human
cccuggguucuggcugggcugc

SEQ ID NO: 383523 - RNA, 22 nt, Human
aagcacaaugaacaucuuagau

SEQ ID NO: 383524 - RNA, 22 nt, Human
cugggcaguuuuacaucauugc

SEQ ID NO: 383525 - RNA, 22 nt, Human
cccaggagaccugugaaaggac

SEQ ID NO: 383526 - RNA, 20 nt, Human
gcauccagacacccagcugc

SEQ ID NO: 383527 - RNA, 22 nt, Human
uugaauaauauguucaggagga

SEQ ID NO: 383528 - RNA, 22 nt, Human
guggcaggagagacacagccau

SEQ ID NO: 383529 - RNA, 22 nt, Human
gcagcauuuguggaaugggccc

SEQ ID NO: 383530 - RNA, 22 nt, Human
gagagucacugucugcauuucc

SEQ ID NO: 383531 - RNA, 22 nt, Human
caucacagggggcuagaagucu

SEQ ID NO: 383532 - RNA, 22 nt, Human
caaugauucugcaacugugugc

SEQ ID NO: 383533 - RNA, 21 nt, Human
uucaaagacuugaugcugacc

SEQ ID NO: 383534 - RNA, 22 nt, Human
agccugagugcuuaggacuguu

SEQ ID NO: 383535 - RNA, 22 nt, Human
cuggagccacuuuuuauccuuu

SEQ ID NO: 383536 - RNA, 22 nt, Human
aaugaucuggcucaggauauca

SEQ ID NO: 383537 - RNA, 22 nt, Human
agguggggugagcugcagacua

SEQ ID NO: 383538 - RNA, 22 nt, Human
uuccucugaaauggcuuggaaa

SEQ ID NO: 383539 - RNA, 22 nt, Human
ugaagccauaggacagaggaua

SEQ ID NO: 383540 - RNA, 22 nt, Human
ugagcuucaaaauaugugaauc

SEQ ID NO: 383541 - RNA, 22 nt, Human
auacaacagaaaaugauuauuc

SEQ ID NO: 383542 - RNA, 22 nt, Human
ugcucuccggcuuccguggccu

SEQ ID NO: 383543 - RNA, 22 nt, Human
ccugccugucccucaguccaca

SEQ ID NO: 383544 - RNA, 22 nt, Human
ccacagggcucuaggcgcuucc

SEQ ID NO: 383545 - RNA, 17 nt, Human
uaaguccuaguuauuuu

SEQ ID NO: 383546 - RNA, 22 nt, Human
gcaguggcuaggagucuggcgu

SEQ ID NO: 383547 - RNA, 22 nt, Human
ggcacagagcccagcuuccuag

SEQ ID NO: 383548 - RNA, 22 nt, Human
augcugagacuggagcagcugg

SEQ ID NO: 383549 - RNA, 23 nt, Human
ugcauuauccucucugaagacca

SEQ ID NO: 383550 - RNA, 22 nt, Human
gcagaggggaagcugaggaauu

SEQ ID NO: 383551 - RNA, 22 nt, Human
ucccagaggacuguuggugcua

SEQ ID NO: 383552 - RNA, 22 nt, Human
ccagggccucguguucugagug

SEQ ID NO: 383553 - RNA, 22 nt, Human
aguauguauuuuauacuuacag

SEQ ID NO: 383554 - RNA, 22 nt, Human
aucacaaaggguuuucucugag

SEQ ID NO: 383555 - RNA, 22 nt, Human
gcuguauuuaacaacuggcuca

SEQ ID NO: 383556 - RNA, 22 nt, Human
ccugagcuggaagagcuugugc

SEQ ID NO: 383557 - RNA, 22 nt, Human
agggcagaccacgugcaaggau

SEQ ID NO: 383558 - RNA, 22 nt, Human
uccaggcaaaaggaacugcuug

SEQ ID NO: 383559 - RNA, 22 nt, Human
cacaauuuccaagucauguuau

SEQ ID NO: 383560 - RNA, 22 nt, Human
uaaguccuauuccaggucucuc

SEQ ID NO: 383561 - RNA, 22 nt, Human
uucagcaaauggacuguucagg

SEQ ID NO: 383562 - RNA, 22 nt, Human
acuugguuggucucacccuguu

SEQ ID NO: 383563 - RNA, 22 nt, Human
gagccugagugcugccuccccu

SEQ ID NO: 383564 - RNA, 22 nt, Human
aaagaaggggucuacauccaau

SEQ ID NO: 383565 - RNA, 22 nt, Human
uaaaacuuaacuauccagauua

SEQ ID NO: 383566 - RNA, 22 nt, Human
acagccagguaaaggcauggca

SEQ ID NO: 383567 - RNA, 22 nt, Human
gaaaguuuauagguuauauaau

SEQ ID NO: 383568 - RNA, 22 nt, Human
uuuauuguuguuagucauaagu

SEQ ID NO: 383569 - RNA, 22 nt, Human
ucaggauaaaauguaauggcaa

SEQ ID NO: 383570 - RNA, 18 nt, Human
cauuguacaaugcuuuau

SEQ ID NO: 383571 - RNA, 22 nt, Human
ucaggggaaaucucucagcgaa

SEQ ID NO: 383572 - RNA, 22 nt, Human
cuagccugggauuugaacuuau

SEQ ID NO: 383573 - RNA, 22 nt, Human
agacaaaggauuaaugaugaug

SEQ ID NO: 383574 - RNA, 22 nt, Human
ugcagccaauucauucauucuu

SEQ ID NO: 383575 - RNA, 22 nt, Human
gcagccucagggcacucagaug

SEQ ID NO: 383576 - RNA, 22 nt, Human
auuaaauuaaguggcuaauuua

SEQ ID NO: 383577 - RNA, 22 nt, Human
ccuugcugcgugcuagcacaga

SEQ ID NO: 383578 - RNA, 22 nt, Human
ugaaugaauccuaacaaagaca

SEQ ID NO: 383579 - RNA, 22 nt, Human
ugggccugaaggagcugcgccc

SEQ ID NO: 383580 - RNA, 22 nt, Human
agugccaggagcaaggagcucc

SEQ ID NO: 383581 - RNA, 22 nt, Human
ggcugccugcucaggugcggcg

SEQ ID NO: 383582 - RNA, 22 nt, Human
gggagcugagcuggaagagaau

SEQ ID NO: 383583 - RNA, 23 nt, Human
agaauuguaaauagaauauaccu

SEQ ID NO: 383584 - RNA, 22 nt, Human
ccagccagccuugaucugagua

SEQ ID NO: 383585 - RNA, 22 nt, Human
aaagaaaccuaucagccacaug

SEQ ID NO: 383586 - RNA, 22 nt, Human
cagagccuaaaacgacuccacu

SEQ ID NO: 383587 - RNA, 19 nt, Human
aagcagcccuggcaagagc

SEQ ID NO: 383588 - RNA, 22 nt, Human
ugcugccacaaauucagcugcc

SEQ ID NO: 383589 - RNA, 22 nt, Human
gcagagcucaagguguucagcu

SEQ ID NO: 383590 - RNA, 22 nt, Human
auaaacaguaaaugugagcagu

SEQ ID NO: 383591 - RNA, 22 nt, Human
uggcuuccaaaggaaugggccu

SEQ ID NO: 383592 - RNA, 22 nt, Human
ggugaggggagagugaaagaaa

SEQ ID NO: 383593 - RNA, 22 nt, Human
ugggaggcagguaggugaugau

SEQ ID NO: 383594 - RNA, 22 nt, Human
acauuuuuuagagucccacauu

SEQ ID NO: 383595 - RNA, 23 nt, Human
cagaccuggcagucauccucaac

SEQ ID NO: 383596 - RNA, 23 nt, Human
gggagccauggguggucauggag

SEQ ID NO: 383597 - RNA, 22 nt, Human
auguuucaaugcacuuuagccu

SEQ ID NO: 383598 - RNA, 22 nt, Human
ccacaaguuucagcacccagag

SEQ ID NO: 383599 - RNA, 22 nt, Human
uaucagaaaugccuuaaauugg

SEQ ID NO: 383600 - RNA, 22 nt, Human
uacugugacagaguacuuaaac

SEQ ID NO: 383601 - RNA, 22 nt, Human
cuuccaaagcacuuuauggacc

SEQ ID NO: 383602 - RNA, 18 nt, Human
cugccuguugcugagagg

SEQ ID NO: 383603 - RNA, 22 nt, Human
augguuuacaauguuuucaguu

SEQ ID NO: 383604 - RNA, 22 nt, Human
aggcagcugaggucuggcgccc

SEQ ID NO: 383605 - RNA, 22 nt, Human
uuccuuagggucagccagaucu

SEQ ID NO: 383606 - RNA, 22 nt, Human
cccccagccagcagugcucagc

SEQ ID NO: 383607 - RNA, 22 nt, Human
gccaggcugaggcucuggaaga

SEQ ID NO: 383608 - RNA, 22 nt, Human
uggcucagcuuuccccaucugg

SEQ ID NO: 383609 - RNA, 19 nt, Human
aucugccuguuaucacaua

SEQ ID NO: 383610 - RNA, 23 nt, Human
ugggaccuguuugcccacagaug

SEQ ID NO: 383611 - RNA, 22 nt, Human
acacaaacagucuauagcacca

SEQ ID NO: 383612 - RNA, 22 nt, Human
acaaaauuaugaagaggccuug

SEQ ID NO: 383613 - RNA, 22 nt, Human
aucuaacacuguaaacugucuu

SEQ ID NO: 383614 - RNA, 22 nt, Human
cuuagaaaucgaacucagguua

SEQ ID NO: 383615 - RNA, 22 nt, Human
gagcccagguucugcuuccagc

SEQ ID NO: 383616 - RNA, 22 nt, Human
caggaaugaggucguaaguguc

SEQ ID NO: 383617 - RNA, 22 nt, Human
gaggaaaauaacaacuaagggc

SEQ ID NO: 383618 - RNA, 22 nt, Human
aaugcuuuuugcgaaaugugca

SEQ ID NO: 383619 - RNA, 19 nt, Human
cacaucagcagggcugugg

SEQ ID NO: 383620 - RNA, 22 nt, Human
aagggaaaucauauggugcagu

SEQ ID NO: 383621 - RNA, 22 nt, Human
gaagcagcuagcccacuaguca

SEQ ID NO: 383622 - RNA, 22 nt, Human
ugcugguggagaaaguggaggu

SEQ ID NO: 383623 - RNA, 22 nt, Human
aaauaguucagcuuguaaaccc

SEQ ID NO: 383624 - RNA, 22 nt, Human
gaggugaguggaucacgagguc

SEQ ID NO: 383625 - RNA, 23 nt, Human
acuuuagauaaauuaugugcaca

SEQ ID NO: 383626 - RNA, 22 nt, Human
cauucauucuguaaguaacuau

SEQ ID NO: 383627 - RNA, 22 nt, Human
aagaguuuucuauaaucuuggc

SEQ ID NO: 383628 - RNA, 22 nt, Human
uaaguucauaagcuuauucuua

SEQ ID NO: 383629 - RNA, 22 nt, Human
gaggagguuccggguggagaag

SEQ ID NO: 383630 - RNA, 22 nt, Human
gcaggauggugcccuuucugcc

SEQ ID NO: 383631 - RNA, 20 nt, Human
gggcagcuccccucauucug

SEQ ID NO: 383632 - RNA, 22 nt, Human
gcucugugccacaugcaguguu

SEQ ID NO: 383633 - RNA, 20 nt, Human
uccugguggauacugcuuaa

SEQ ID NO: 383634 - RNA, 22 nt, Human
agcugucuccagauacaggauu

SEQ ID NO: 383635 - RNA, 22 nt, Human
uuucaaugacacaaaagagaaa

SEQ ID NO: 383636 - RNA, 22 nt, Human
auaaagucauuaugaagaucua

SEQ ID NO: 383637 - RNA, 22 nt, Human
aggccucagugaucaucaucag

SEQ ID NO: 383638 - RNA, 22 nt, Human
cagggaggaugggcuguuuugc

SEQ ID NO: 383639 - RNA, 22 nt, Human
uggcugccuuucaccucaucuc

SEQ ID NO: 383640 - RNA, 18 nt, Human
ucucagaggccauccuag

SEQ ID NO: 383641 - RNA, 22 nt, Human
caacaguguugcaaucugaaaa

SEQ ID NO: 383642 - RNA, 22 nt, Human
caguuucuucaucaguuaagca

SEQ ID NO: 383643 - RNA, 22 nt, Human
ucuggccugaaaguccaugcuu

SEQ ID NO: 383644 - RNA, 22 nt, Human
auggcccaggccuccuguggcu

SEQ ID NO: 383645 - RNA, 22 nt, Human
caugggaggucugcaaggugcu

SEQ ID NO: 383646 - RNA, 22 nt, Human
ggcuuuauuugcagccauuguu

SEQ ID NO: 383647 - RNA, 21 nt, Human
ggagucauuagucauuuccuu

SEQ ID NO: 383648 - RNA, 22 nt, Human
gucccuaguggaaagacaugau

SEQ ID NO: 383649 - RNA, 15 nt, Human
uggcagcuuguuaag

SEQ ID NO: 383650 - RNA, 22 nt, Human
aguggggaagagcaugggcccu

SEQ ID NO: 383651 - RNA, 22 nt, Human
aucaggaucugcaucauaagaa

SEQ ID NO: 383652 - RNA, 22 nt, Human
aggcugcugccuuggagagugu

SEQ ID NO: 383653 - RNA, 22 nt, Human
ccacuggcauccagcugccauc

SEQ ID NO: 383654 - RNA, 22 nt, Human
cugcccaggcugaaggaacauc

SEQ ID NO: 383655 - RNA, 22 nt, Human
cugccuggccugaucuccacgc

SEQ ID NO: 383656 - RNA, 22 nt, Human
ggcuccuggggaggugagcuug

SEQ ID NO: 383657 - RNA, 22 nt, Human
uuuauccagaaucaggauuuuu

SEQ ID NO: 383658 - RNA, 22 nt, Human
gcagauggacuguaugaccuga

SEQ ID NO: 383659 - RNA, 21 nt, Human
uccaggaguggcugggcaggg

SEQ ID NO: 383660 - RNA, 22 nt, Human
cuuggcagagggcugggcucag

SEQ ID NO: 383661 - RNA, 19 nt, Human
uuugaaaggauuguuauuu

SEQ ID NO: 383662 - RNA, 22 nt, Human
uuaaauuccagccucauaauag

SEQ ID NO: 383663 - RNA, 22 nt, Human
aggcccagcccguccucgugcu

SEQ ID NO: 383664 - RNA, 22 nt, Human
uccauaagcagguucuuccuga

SEQ ID NO: 383665 - RNA, 22 nt, Human
ccugaagggacuccagagagca

SEQ ID NO: 383666 - RNA, 22 nt, Human
agcagcucuguuuaccuggagg

SEQ ID NO: 383667 - RNA, 21 nt, Human
gcagccagacgggauucaguu

SEQ ID NO: 383668 - RNA, 22 nt, Human
gcaggguauaauacuuagguga

SEQ ID NO: 383669 - RNA, 22 nt, Human
gcagcugaagcugcaguuccag

SEQ ID NO: 383670 - RNA, 22 nt, Human
aauuugcaugaugagaacaaua

SEQ ID NO: 383671 - RNA, 22 nt, Human
uauuuaauuagugauuguagag

SEQ ID NO: 383672 - RNA, 22 nt, Human
ugcugccaaaugcgagcucugu

SEQ ID NO: 383673 - RNA, 22 nt, Human
auguuauuaaaguacagauucu

SEQ ID NO: 383674 - RNA, 22 nt, Human
cuggugggagcagcaggcagcu

SEQ ID NO: 383675 - RNA, 22 nt, Human
cuugaacucaaugugaggaaga

SEQ ID NO: 383676 - RNA, 22 nt, Human
uauggaaagggaguuuaauuug

SEQ ID NO: 383677 - RNA, 22 nt, Human
accuuuuuucagaacucuaaag

SEQ ID NO: 383678 - RNA, 22 nt, Human
uacaucauaauaauacuuagaa

SEQ ID NO: 383679 - RNA, 22 nt, Human
ucuuuccaaggacucuguagca

SEQ ID NO: 383680 - RNA, 22 nt, Human
ggucauugucagagccuguacu

SEQ ID NO: 383681 - RNA, 22 nt, Human
uccuucagugucccgcucaggu

SEQ ID NO: 383682 - RNA, 22 nt, Human
aagugacaaaaggguauccaaa

SEQ ID NO: 383683 - RNA, 22 nt, Human
gaaaucugaaucuucuguuggu

SEQ ID NO: 383684 - RNA, 22 nt, Human
auacuagacuguucuguuauca

SEQ ID NO: 383685 - RNA, 22 nt, Human
ucucccaguccucugugcuuac

SEQ ID NO: 383686 - RNA, 22 nt, Human
gaguucaguaguuauagucuag

SEQ ID NO: 383687 - RNA, 22 nt, Human
agcugagcugcagaugacugua

SEQ ID NO: 383688 - RNA, 22 nt, Human
acugcagccuuugggcucauaa

SEQ ID NO: 383689 - RNA, 22 nt, Human
aacuuucagcaaguaauucugg

SEQ ID NO: 383690 - RNA, 22 nt, Human
aggagaggguggcauuaaguuu

SEQ ID NO: 383691 - RNA, 22 nt, Human
ccuucagaccuagacaggaauc

SEQ ID NO: 383692 - RNA, 22 nt, Human
gaguggagcaaaagagguagau

SEQ ID NO: 383693 - RNA, 22 nt, Human
cagaggcuaagaugagugggug

SEQ ID NO: 383694 - RNA, 22 nt, Human
guguuuuaagaaagaagcucag

SEQ ID NO: 383695 - RNA, 22 nt, Human
cccaggaggcgcagguugcggu

SEQ ID NO: 383696 - RNA, 22 nt, Human
ccccggaggcggagguugcagu

SEQ ID NO: 383697 - RNA, 22 nt, Human
aaaacaguuuuugcuaacugcu

SEQ ID NO: 383698 - RNA, 22 nt, Human
uggcacugaccccaggccugug

SEQ ID NO: 383699 - RNA, 22 nt, Human
caacagucugguuuauauaaua

SEQ ID NO: 383700 - RNA, 19 nt, Human
agcaccugugagagccugg

SEQ ID NO: 383701 - RNA, 22 nt, Human
uagaauucaagauucaacaggc

SEQ ID NO: 383702 - RNA, 22 nt, Human
cugaaggagguagagugacaua

SEQ ID NO: 383703 - RNA, 23 nt, Human
uggcucugugucacauacaggau

SEQ ID NO: 383704 - RNA, 22 nt, Human
gcuccuggcuccaggcagccaa

SEQ ID NO: 383705 - RNA, 22 nt, Human
acaauguguuuuuauacauuug

SEQ ID NO: 383706 - RNA, 22 nt, Human
cggcugagacggccauagacac

SEQ ID NO: 383707 - RNA, 22 nt, Human
uagugauuaaaggcagaauguu

SEQ ID NO: 383708 - RNA, 22 nt, Human
acugcuuuuagaaaucuauaga

SEQ ID NO: 383709 - RNA, 22 nt, Human
ccguagcacaugcuccuggggc

SEQ ID NO: 383710 - RNA, 22 nt, Human
cagggcuccaugcagggacucc

SEQ ID NO: 383711 - RNA, 22 nt, Human
uugaaagucacaauggcauuaa

SEQ ID NO: 383712 - RNA, 22 nt, Human
gaugccuccaaaugagggcaga

SEQ ID NO: 383713 - RNA, 23 nt, Human
gacagagugagaccuugucuuac

SEQ ID NO: 383714 - RNA, 21 nt, Human
uggcucugagccucauggcug

SEQ ID NO: 383715 - RNA, 21 nt, Human
ucacuuauaauguauuugcug

SEQ ID NO: 383716 - RNA, 21 nt, Human
gucagcagauccagcacuugu

SEQ ID NO: 383717 - RNA, 19 nt, Human
ucccuuccugucgggcucc

SEQ ID NO: 383718 - RNA, 22 nt, Human
uauuuagaugcauuuggauugc

SEQ ID NO: 383719 - RNA, 22 nt, Human
uacugcauaacuggcauguggg

SEQ ID NO: 383720 - RNA, 22 nt, Human
cagaguguaucuguguaagcau

SEQ ID NO: 383721 - RNA, 22 nt, Human
cagcugccaugacauguccugc

SEQ ID NO: 383722 - RNA, 22 nt, Human
agacgagggccuggcacacagu

SEQ ID NO: 383723 - RNA, 22 nt, Human
uguggccucaaggcugcccuca

SEQ ID NO: 383724 - RNA, 22 nt, Human
cccugccuacaggguuuucuuu

SEQ ID NO: 383725 - RNA, 22 nt, Human
aggaagugaaagggaaggaguu

SEQ ID NO: 383726 - RNA, 22 nt, Human
augugaggcagcacggagauua

SEQ ID NO: 383727 - RNA, 22 nt, Human
aggggccauuguucugcccgcu

SEQ ID NO: 383728 - RNA, 22 nt, Human
aguggagaauaugcagaaagcc

SEQ ID NO: 383729 - RNA, 22 nt, Human
cugggugaguugaugaaggaga

SEQ ID NO: 383730 - RNA, 22 nt, Human
aggugucugugaugggagcgau

SEQ ID NO: 383731 - RNA, 22 nt, Human
cuacauggagaagaaaauucuu

SEQ ID NO: 383732 - RNA, 22 nt, Human
cugucaggggcggguggagcgg

SEQ ID NO: 383733 - RNA, 22 nt, Human
uugaaauacugcauuguucagu

SEQ ID NO: 383734 - RNA, 22 nt, Human
gcuguucacagacucugcucug

SEQ ID NO: 383735 - RNA, 22 nt, Human
uguggccuugcagccuggaggu

SEQ ID NO: 383736 - RNA, 22 nt, Human
cauuuguagcuauuuacuguau

SEQ ID NO: 383737 - RNA, 22 nt, Human
ccuggggcucaagauggcgccg

SEQ ID NO: 383738 - RNA, 23 nt, Human
gugauuucagggaacagaaucag

SEQ ID NO: 383739 - RNA, 22 nt, Human
ugucccaguucccaggguugcu

SEQ ID NO: 383740 - RNA, 22 nt, Human
uugauuucuauucagauguaga

SEQ ID NO: 383741 - RNA, 22 nt, Human
cagcugagucugagguucuuug

SEQ ID NO: 383742 - RNA, 19 nt, Human
uccugcagguggcuugcag

SEQ ID NO: 383743 - RNA, 23 nt, Human
ugagcccaggaggucaaggcugc

SEQ ID NO: 383744 - RNA, 22 nt, Human
acaggcugccuaccaaguauca

SEQ ID NO: 383745 - RNA, 22 nt, Human
cuuaagaauauugaaguugugg

SEQ ID NO: 383746 - RNA, 22 nt, Human
ggcaggucagguccaugaccaa

SEQ ID NO: 383747 - RNA, 22 nt, Human
uuuacagaugaggauacugagg

SEQ ID NO: 383748 - RNA, 22 nt, Human
ugcuuaaacauacuauuuauau

SEQ ID NO: 383749 - RNA, 22 nt, Human
caucagaagauggcucuggaaa

SEQ ID NO: 383750 - RNA, 22 nt, Human
aacuuuaaggcuauaaauuaug

SEQ ID NO: 383751 - RNA, 22 nt, Human
caggggaguuuuaugcaacaga

SEQ ID NO: 383752 - RNA, 22 nt, Human
aggaccugccaggugcaaagca

SEQ ID NO: 383753 - RNA, 18 nt, Human
ugaggcagucagugaugg

SEQ ID NO: 383754 - RNA, 22 nt, Human
ccaggcugggcggggaaccugg

SEQ ID NO: 383755 - RNA, 22 nt, Human
gacagcagggacauguaggaag

SEQ ID NO: 383756 - RNA, 22 nt, Human
cugggccuagaggaagcugaca

SEQ ID NO: 383757 - RNA, 22 nt, Human
caaguccuccaugugacuaggu

SEQ ID NO: 383758 - RNA, 22 nt, Human
gagagcuggguucaaguagcug

SEQ ID NO: 383759 - RNA, 22 nt, Human
acacuaaugagaaaggaauuaa

SEQ ID NO: 383760 - RNA, 22 nt, Human
ugaagcagauggucuggucauu

SEQ ID NO: 383761 - RNA, 20 nt, Human
agcaggaaugaugcuuucau

SEQ ID NO: 383762 - RNA, 22 nt, Human
auuuauuaugggauuuggcuca

SEQ ID NO: 383763 - RNA, 22 nt, Human
acaguaaaaagccuuagaauuu

SEQ ID NO: 383764 - RNA, 22 nt, Human
agauuuagacugccuuaaucau

SEQ ID NO: 383765 - RNA, 22 nt, Human
gauuuccucacuaacauccauc

SEQ ID NO: 383766 - RNA, 22 nt, Human
cuguggugagcaacugacugaa

SEQ ID NO: 383767 - RNA, 22 nt, Human
gccugucucuuggaacuuggua

SEQ ID NO: 383768 - RNA, 22 nt, Human
aauguuaaaaccuucagugcuu

SEQ ID NO: 383769 - RNA, 22 nt, Human
aguauuuccuggcuuaucugcu

SEQ ID NO: 383770 - RNA, 22 nt, Human
gagcugaaauaugaagccaauu

SEQ ID NO: 383771 - RNA, 22 nt, Human
caugaauauuuaguauuuacuu

SEQ ID NO: 383772 - RNA, 22 nt, Human
ucucagagauuuuguuucccuu

SEQ ID NO: 383773 - RNA, 22 nt, Human
ggauuuccucuugacucuaaag

SEQ ID NO: 383774 - RNA, 22 nt, Human
cugucaguaggcucccaucauu

SEQ ID NO: 383775 - RNA, 20 nt, Human
ucauugcacauaauggaagc

SEQ ID NO: 383776 - RNA, 22 nt, Human
uguagaaagcucuucugaaauc

SEQ ID NO: 383777 - RNA, 17 nt, Human
gacaggcucagugacga

SEQ ID NO: 383778 - RNA, 22 nt, Human
acagaguacauucagagacuau

SEQ ID NO: 383779 - RNA, 22 nt, Human
gaggagcugggucagggagaca

SEQ ID NO: 383780 - RNA, 22 nt, Human
caggaggaagaacucugcaaca

SEQ ID NO: 383781 - RNA, 20 nt, Human
aguuuauuccaggagaacug

SEQ ID NO: 383782 - RNA, 22 nt, Human
ugaagcuuuccuguggucagga

SEQ ID NO: 383783 - RNA, 22 nt, Human
cuggaagggucuacuuagcaga

SEQ ID NO: 383784 - RNA, 22 nt, Human
acaaaggcagccaaucaucugc

SEQ ID NO: 383785 - RNA, 22 nt, Human
ggggagaguccuuuccaguucc

SEQ ID NO: 383786 - RNA, 22 nt, Human
gagaggaguaggcugauggugc

SEQ ID NO: 383787 - RNA, 22 nt, Human
gugcagauccugauugcaguuc

SEQ ID NO: 383788 - RNA, 22 nt, Human
cuacagaagaaacuaucacuau

SEQ ID NO: 383789 - RNA, 22 nt, Human
ggugaaggucuacugugugcca

SEQ ID NO: 383790 - RNA, 22 nt, Human
acacauaugguugcugcaguga

SEQ ID NO: 383791 - RNA, 22 nt, Human
uucagagccacuucaagucuaa

SEQ ID NO: 383792 - RNA, 22 nt, Human
ugcaggcugggaagagggacaa

SEQ ID NO: 383793 - RNA, 22 nt, Human
aaagccauuacaaaauuucaua

SEQ ID NO: 383794 - RNA, 22 nt, Human
agagugaaaagcuagagcagua

SEQ ID NO: 383795 - RNA, 22 nt, Human
uacaguagacaauguuaguaug

SEQ ID NO: 383796 - RNA, 22 nt, Human
gccuggcaggggccugggagug

SEQ ID NO: 383797 - RNA, 22 nt, Human
ugccagcccaccuuggggccuc

SEQ ID NO: 383798 - RNA, 22 nt, Human
cucuguagaaacagggcagaag

SEQ ID NO: 383799 - RNA, 22 nt, Human
agucaauucuuuucaacucaag

SEQ ID NO: 383800 - RNA, 22 nt, Human
uuuugagauggagucuugcucu

SEQ ID NO: 383801 - RNA, 19 nt, Human
ugcugcuguccuugcaggg

SEQ ID NO: 383802 - RNA, 22 nt, Human
uccagacccaugacccugggga

SEQ ID NO: 383803 - RNA, 22 nt, Human
agaagccauagucugggaggca

SEQ ID NO: 383804 - RNA, 22 nt, Human
gaauccaggguuguuugagcua

SEQ ID NO: 383805 - RNA, 22 nt, Human
gggcugcacagaucuucaaggg

SEQ ID NO: 383806 - RNA, 22 nt, Human
agaaauaugcugauuagaugaa

SEQ ID NO: 383807 - RNA, 22 nt, Human
agagccagcauuugggcccugc

SEQ ID NO: 383808 - RNA, 22 nt, Human
agaaaugacaagacugaucagg

SEQ ID NO: 383809 - RNA, 22 nt, Human
cuguccagaaagggggcaacaa

SEQ ID NO: 383810 - RNA, 22 nt, Human
ugaggcaggaguuaaugugcuc

SEQ ID NO: 383811 - RNA, 21 nt, Human
aggggacagaguagcuccagg

SEQ ID NO: 383812 - RNA, 23 nt, Human
cauaaaauauuaguaugguagca

SEQ ID NO: 383813 - RNA, 22 nt, Human
caucagaagaaagacaaaugau

SEQ ID NO: 383814 - RNA, 22 nt, Human
uuccaggagacuuccagaaaua

SEQ ID NO: 383815 - RNA, 22 nt, Human
aggguccaucaaggacugcaca

SEQ ID NO: 383816 - RNA, 22 nt, Human
aguccuuacucgggggcccaga

SEQ ID NO: 383817 - RNA, 22 nt, Human
ggaccugcucucccaguucucu

SEQ ID NO: 383818 - RNA, 22 nt, Human
gagcugccugaacaagcagcag

SEQ ID NO: 383819 - RNA, 22 nt, Human
ucagcuuucuauguugcuaaac

SEQ ID NO: 383820 - RNA, 22 nt, Human
agggcucugagcuggaccaccu

SEQ ID NO: 383821 - RNA, 22 nt, Human
caggccugucugcacaugaggc

SEQ ID NO: 383822 - RNA, 20 nt, Human
agcauuugaaauaugacuau

SEQ ID NO: 383823 - RNA, 23 nt, Human
uccaugagaugugggcuucuagu

SEQ ID NO: 383824 - RNA, 22 nt, Human
uggaagggagugacagucagag

SEQ ID NO: 383825 - RNA, 22 nt, Human
uguguacucaauugagccauuu

SEQ ID NO: 383826 - RNA, 22 nt, Human
uggacaggaucugagacugaga

SEQ ID NO: 383827 - RNA, 22 nt, Human
aucaguuucacuugcuugcaaa

SEQ ID NO: 383828 - RNA, 22 nt, Human
agaagugagugugacucagcag

SEQ ID NO: 383829 - RNA, 22 nt, Human
agguacaaaagaguauaugaga

SEQ ID NO: 383830 - RNA, 22 nt, Human
cccagcuucugagggggccuug

SEQ ID NO: 383831 - RNA, 22 nt, Human
ggauuucuuccuuccucagaag

SEQ ID NO: 383832 - RNA, 22 nt, Human
ucuucccuaaucaccaucuuca

SEQ ID NO: 383833 - RNA, 22 nt, Human
agacaguguguguauauauggu

SEQ ID NO: 383834 - RNA, 22 nt, Human
uccugggcccaggcugccaggg

SEQ ID NO: 383835 - RNA, 22 nt, Human
uuaaauuauuucuagugaggug

SEQ ID NO: 383836 - RNA, 18 nt, Human
ugcuuuaugcuuauauaa

SEQ ID NO: 383837 - RNA, 22 nt, Human
uuagaaagaacuuuagauauca

SEQ ID NO: 383838 - RNA, 22 nt, Human
gcucagagggaacaaggggcug

SEQ ID NO: 383839 - RNA, 23 nt, Human
uguagcaucucuuauuucucagc

SEQ ID NO: 383840 - RNA, 22 nt, Human
ccaggagucuggaugagguguc

SEQ ID NO: 383841 - RNA, 22 nt, Human
acagagcuucccagccugagca

SEQ ID NO: 383842 - RNA, 22 nt, Human
aauuuuaaucaguggugcugag

SEQ ID NO: 383843 - RNA, 21 nt, Human
cauugucgacauuuuccccuc

SEQ ID NO: 383844 - RNA, 22 nt, Human
ggagccuugggcgcucucccau

SEQ ID NO: 383845 - RNA, 22 nt, Human
ugcaaacaggagaguaaguaua

SEQ ID NO: 383846 - RNA, 22 nt, Human
auuuggaaaugcaucucuugag

SEQ ID NO: 383847 - RNA, 22 nt, Human
ugggaggagcccucugggaagg

SEQ ID NO: 383848 - RNA, 22 nt, Human
aaaguggucaccuucucauuuc

SEQ ID NO: 383849 - RNA, 22 nt, Human
cucuuaaauaacaucauugcuu

SEQ ID NO: 383850 - RNA, 22 nt, Human
uggcagcagggaggccaguguu

SEQ ID NO: 383851 - RNA, 22 nt, Human
uauuucagcacaugggauaggu

SEQ ID NO: 383852 - RNA, 22 nt, Human
ugcuugggaauguggagucaga

SEQ ID NO: 383853 - RNA, 22 nt, Human
cagguggggcgcccucaggcag

SEQ ID NO: 383854 - RNA, 22 nt, Human
caggacccaaccucccugcucu

SEQ ID NO: 383855 - RNA, 22 nt, Human
acagucucuccacacugcaggg

SEQ ID NO: 383856 - RNA, 22 nt, Human
cugcagaggucuugcugauggu

SEQ ID NO: 383857 - RNA, 19 nt, Human
aggcagucauuggaauaua

SEQ ID NO: 383858 - RNA, 22 nt, Human
uuacagauggaucuagcaaaau

SEQ ID NO: 383859 - RNA, 22 nt, Human
aguccuuugggaaaaaugacua

SEQ ID NO: 383860 - RNA, 22 nt, Human
uuucagauggagguuuaggaca

SEQ ID NO: 383861 - RNA, 22 nt, Human
ggcuuggaccagucacaguggu

SEQ ID NO: 383862 - RNA, 22 nt, Human
agugcuuuauguuguugugcaa

SEQ ID NO: 383863 - RNA, 22 nt, Human
cuggagcccaggccuggugucu

SEQ ID NO: 383864 - RNA, 22 nt, Human
ugggcagauguggcucuccuug

SEQ ID NO: 383865 - RNA, 22 nt, Human
agccagcuggagaccacuguuu

SEQ ID NO: 383866 - RNA, 22 nt, Human
agggcacccucucugcaguacc

SEQ ID NO: 383867 - RNA, 22 nt, Human
ccuuccaggugcaggcaagccu

SEQ ID NO: 383868 - RNA, 22 nt, Human
ugaauccagagcuauuucgucc

SEQ ID NO: 383869 - RNA, 22 nt, Human
accaggagccacaggaggagcc

SEQ ID NO: 383870 - RNA, 21 nt, Human
ccagagccugcugagcccccu

SEQ ID NO: 383871 - RNA, 22 nt, Human
cugucucucuaggacacugggg

SEQ ID NO: 383872 - RNA, 22 nt, Human
gcuucuaucccuccacugcacu

SEQ ID NO: 383873 - RNA, 22 nt, Human
uauaauuuuaagugguaaauua

SEQ ID NO: 383874 - RNA, 22 nt, Human
cagugccucuuaagugucaccc

SEQ ID NO: 383875 - RNA, 22 nt, Human
ggggcacacuuuugguagauau

SEQ ID NO: 383876 - RNA, 22 nt, Human
gaggggcugcccuggugucagg

SEQ ID NO: 383877 - RNA, 22 nt, Human
cuggcucacaggugagaugcau

SEQ ID NO: 383878 - RNA, 22 nt, Human
gcucccagacugaccagaggug

SEQ ID NO: 383879 - RNA, 22 nt, Human
auucuaggcuugaaacaugaag

SEQ ID NO: 383880 - RNA, 22 nt, Human
ucuuccagcaaugugaaaucac

SEQ ID NO: 383881 - RNA, 22 nt, Human
acugcagccuugaacucugggc

SEQ ID NO: 383882 - RNA, 22 nt, Human
ucucagaggcccgacguucucc

SEQ ID NO: 383883 - RNA, 22 nt, Human
uauaacaguuuaggugguguca

SEQ ID NO: 383884 - RNA, 18 nt, Human
ccucaggggaccuggcag

SEQ ID NO: 383885 - RNA, 22 nt, Human
cuggagccugcaguuuucacuu

SEQ ID NO: 383886 - RNA, 22 nt, Human
auuuccuuugcaaagacugugc

SEQ ID NO: 383887 - RNA, 22 nt, Human
ucccagagacaucauuucuccg

SEQ ID NO: 383888 - RNA, 22 nt, Human
uucuuuucuuuaggcauugugu

SEQ ID NO: 383889 - RNA, 23 nt, Human
auguuauuauuagcagucuugcc

SEQ ID NO: 383890 - RNA, 22 nt, Human
uccaggaggcagggcugugccc

SEQ ID NO: 383891 - RNA, 22 nt, Human
gaagcagcuaggaucuucauuu

SEQ ID NO: 383892 - RNA, 22 nt, Human
uaacagaaauaguaggugaggg

SEQ ID NO: 383893 - RNA, 22 nt, Human
uagauuucaggcuggcuugcgg

SEQ ID NO: 383894 - RNA, 22 nt, Human
uagauuucucauucauagauug

SEQ ID NO: 383895 - RNA, 22 nt, Human
cucccaagauaaauaaggcagu

SEQ ID NO: 383896 - RNA, 22 nt, Human
gugccugcagcaauccauggca

SEQ ID NO: 383897 - RNA, 22 nt, Human
uguuugaacugaauaacauagu

SEQ ID NO: 383898 - RNA, 22 nt, Human
gcuggccaggugcuuugguucu

SEQ ID NO: 383899 - RNA, 22 nt, Human
aguuauccgaaggcacugagau

SEQ ID NO: 383900 - RNA, 22 nt, Human
acaugauuuuuaaagagauaau

SEQ ID NO: 383901 - RNA, 20 nt, Human
gggugggagagucugagggu

SEQ ID NO: 383902 - RNA, 22 nt, Human
agcacccucagccuuauccaga

SEQ ID NO: 383903 - RNA, 22 nt, Human
acauugaugaaaagguaucauu

SEQ ID NO: 383904 - RNA, 22 nt, Human
gcaaggcagcgcggaguagcua

SEQ ID NO: 383905 - RNA, 22 nt, Human
agccaucauuucugucacuggc

SEQ ID NO: 383906 - RNA, 22 nt, Human
ugaaugauacagaauuauguag

SEQ ID NO: 383907 - RNA, 22 nt, Human
uccaggcaucccccaggacaga

SEQ ID NO: 383908 - RNA, 22 nt, Human
uuugcauaggauggacauuuua

SEQ ID NO: 383909 - RNA, 22 nt, Human
aguuugaaauguuggcaauauu

SEQ ID NO: 383910 - RNA, 22 nt, Human
cagagcagcagagcuuccaugg

SEQ ID NO: 383911 - RNA, 22 nt, Human
uuggccuucccuaccugggcca

SEQ ID NO: 383912 - RNA, 22 nt, Human
augcacgccccacacuggugug

SEQ ID NO: 383913 - RNA, 22 nt, Human
aaucuucuuucuuaacaguaca

SEQ ID NO: 383914 - RNA, 22 nt, Human
guguuuccucacuucucugacu

SEQ ID NO: 383915 - RNA, 22 nt, Human
ugaaagcucugucaucauuccu

SEQ ID NO: 383916 - RNA, 22 nt, Human
ucuuccaagguugcacacuauc

SEQ ID NO: 383917 - RNA, 22 nt, Human
gcaccugcaggaugagccaggg

SEQ ID NO: 383918 - RNA, 22 nt, Human
cuguucucuggcgguggcuguu

SEQ ID NO: 383919 - RNA, 22 nt, Human
cuucagaauccagaaucagaau

SEQ ID NO: 383920 - RNA, 21 nt, Human
uuucacaaaaguaugugacaa

SEQ ID NO: 383921 - RNA, 22 nt, Human
gcccagcacauugcugaggacc

SEQ ID NO: 383922 - RNA, 22 nt, Human
gugauuuaguguuaaguauguu

SEQ ID NO: 383923 - RNA, 22 nt, Human
ucuguucagaaauggaagugcc

SEQ ID NO: 383924 - RNA, 23 nt, Human
ggccuguguuuugucugaaguac

SEQ ID NO: 383925 - RNA, 22 nt, Human
agagacaccgcgcaucauggcu

SEQ ID NO: 383926 - RNA, 22 nt, Human
uaaaugcaguuaguacuugcca

SEQ ID NO: 383927 - RNA, 19 nt, Human
ggacacagaaagcugcauu

SEQ ID NO: 383928 - RNA, 22 nt, Human
cauugcuguuaauugucucuag

SEQ ID NO: 383929 - RNA, 21 nt, Human
aacugcuggucuuuucugucu

SEQ ID NO: 383930 - RNA, 22 nt, Human
gaaucacgguauucugcacggg

SEQ ID NO: 383931 - RNA, 22 nt, Human
aguggcagagccaaguagagcc

SEQ ID NO: 383932 - RNA, 22 nt, Human
caaagugcugagauuacaggua

SEQ ID NO: 383933 - RNA, 22 nt, Human
aagcccagcaucccugcaccag

SEQ ID NO: 383934 - RNA, 22 nt, Human
ugcucugucaagaaaagaugcc

SEQ ID NO: 383935 - RNA, 20 nt, Human
cccaggagcugugccccauc

SEQ ID NO: 383936 - RNA, 22 nt, Human
caguggagagacuuuuacucuu

SEQ ID NO: 383937 - RNA, 22 nt, Human
uggcucugucacugugagcuau

SEQ ID NO: 383938 - RNA, 22 nt, Human
aauacaguagguaauaguucau

SEQ ID NO: 383939 - RNA, 22 nt, Human
cagugauggauauggagaaguc

SEQ ID NO: 383940 - RNA, 22 nt, Human
uugcaagacacuuggaagcaca

SEQ ID NO: 383941 - RNA, 22 nt, Human
acagaguuaauggauaggcagg

SEQ ID NO: 383942 - RNA, 22 nt, Human
gaggaggaggaaguggaaccca

SEQ ID NO: 383943 - RNA, 22 nt, Human
uuuucauuguaaaucaggaaac

SEQ ID NO: 383944 - RNA, 22 nt, Human
cacuguuuuauuccaacauagg

SEQ ID NO: 383945 - RNA, 22 nt, Human
cuccucacuuuccagacugggc

SEQ ID NO: 383946 - RNA, 22 nt, Human
cuggagugaggucugggagccu

SEQ ID NO: 383947 - RNA, 22 nt, Human
gcucugugcaguucagggacac

SEQ ID NO: 383948 - RNA, 22 nt, Human
gagcugccagacaugggaauga

SEQ ID NO: 383949 - RNA, 22 nt, Human
ucucagaguuuagagcugagcc

SEQ ID NO: 383950 - RNA, 22 nt, Human
agcaggugacagggcuguggug

SEQ ID NO: 383951 - RNA, 18 nt, Human
agcagcugugccacacug

SEQ ID NO: 383952 - RNA, 20 nt, Human
uugauucccucuaaacucgc

SEQ ID NO: 383953 - RNA, 22 nt, Human
aaacauuguaauuuuagcaugg

SEQ ID NO: 383954 - RNA, 22 nt, Human
caggguggaaaagcuaguugga

SEQ ID NO: 383955 - RNA, 22 nt, Human
gcuauacaaguguagaauagag

SEQ ID NO: 383956 - RNA, 22 nt, Human
aaguguuuggggaucauuuuaa

SEQ ID NO: 383957 - RNA, 22 nt, Human
gguacaauucugggguaugcuc

SEQ ID NO: 383958 - RNA, 20 nt, Human
cugagcgucuaagaggugag

SEQ ID NO: 383959 - RNA, 22 nt, Human
uuccuuaggggacagggggaua

SEQ ID NO: 383960 - RNA, 22 nt, Human
aaugcaaagcaagcagagauuu

SEQ ID NO: 383961 - RNA, 22 nt, Human
ucaggagacuuaugucacagug

SEQ ID NO: 383962 - RNA, 22 nt, Human
uuugaaaggaauuaggaugaca

SEQ ID NO: 383963 - RNA, 22 nt, Human
ugucucugcuuuccuugcaggg

SEQ ID NO: 383964 - RNA, 22 nt, Human
ggggacaguuaaagaccaagac

SEQ ID NO: 383965 - RNA, 22 nt, Human
cuguccuaugaguacucacuag

SEQ ID NO: 383966 - RNA, 22 nt, Human
ggagauuuauagcacacuucag

SEQ ID NO: 383967 - RNA, 22 nt, Human
cuacauuuguucuauagcuuuu

SEQ ID NO: 383968 - RNA, 22 nt, Human
agugggaccggugcuauuccag

SEQ ID NO: 383969 - RNA, 22 nt, Human
gggggcuggacuuucccacaca

SEQ ID NO: 383970 - RNA, 22 nt, Human
cccuggagcugcuugcauguug

SEQ ID NO: 383971 - RNA, 22 nt, Human
aaguggaggccgaguucacgca

SEQ ID NO: 383972 - RNA, 22 nt, Human
uuaaacauuuauggaggcagca

SEQ ID NO: 383973 - RNA, 23 nt, Human
gcugggcuuacucuuucagugag

SEQ ID NO: 383974 - RNA, 19 nt, Human
gcugugccucucuccugcu

SEQ ID NO: 383975 - RNA, 22 nt, Human
guggaaugaauagauuugcauu

SEQ ID NO: 383976 - RNA, 22 nt, Human
ugucacaguuuguacuuuauag

SEQ ID NO: 383977 - RNA, 22 nt, Human
auagaauuugcacuaaaucugc

SEQ ID NO: 383978 - RNA, 22 nt, Human
uggguggaauaaaucaguucug

SEQ ID NO: 383979 - RNA, 22 nt, Human
uggagcaggugcucaggguaau

SEQ ID NO: 383980 - RNA, 22 nt, Human
gcaggagcaaacugcagugugg

SEQ ID NO: 383981 - RNA, 22 nt, Human
gcugagcuagaaaaggaccaca

SEQ ID NO: 383982 - RNA, 22 nt, Human
cuggcagcugugugaagaacug

SEQ ID NO: 383983 - RNA, 22 nt, Human
gagaagcaauuuccaacugugc

SEQ ID NO: 383984 - RNA, 22 nt, Human
agggcucugggguggcagagau

SEQ ID NO: 383985 - RNA, 22 nt, Human
gggacgggcaguccaagggguc

SEQ ID NO: 383986 - RNA, 22 nt, Human
auauaggcuaacaacuauugag

SEQ ID NO: 383987 - RNA, 22 nt, Human
cccagcaggaggagguugcagu

SEQ ID NO: 383988 - RNA, 22 nt, Human
ucauacauaacuuguacaguga

SEQ ID NO: 383989 - RNA, 22 nt, Human
uuugcauuguuucaaaagugaa

SEQ ID NO: 383990 - RNA, 19 nt, Human
ugaagcagcaaacucucag

SEQ ID NO: 383991 - RNA, 22 nt, Human
agcccaggaaguugaggcuugc

SEQ ID NO: 383992 - RNA, 18 nt, Human
ggcaugugagugcugagg

SEQ ID NO: 383993 - RNA, 22 nt, Human
gggcugcuguagagaacauguu

SEQ ID NO: 383994 - RNA, 22 nt, Human
agaagccacaggccucgucugg

SEQ ID NO: 383995 - RNA, 20 nt, Human
aagggcagagggaacagacu

SEQ ID NO: 383996 - RNA, 22 nt, Human
gcaggaugggagcuucacucug

SEQ ID NO: 383997 - RNA, 22 nt, Human
gccuugcuuugcuucuggacag

SEQ ID NO: 383998 - RNA, 22 nt, Human
gaggcgagaagcuggagauggu

SEQ ID NO: 383999 - RNA, 22 nt, Human
uagcccagcaugagcagagcug

SEQ ID NO: 384000 - RNA, 19 nt, Human
gcgaggaagucacuguggu

SEQ ID NO: 384001 - RNA, 22 nt, Human
auauaaaguguuuagaaagcug

SEQ ID NO: 384002 - RNA, 22 nt, Human
ggaagccagagugcugggcagg

SEQ ID NO: 384003 - RNA, 22 nt, Human
cagucccacuagugccaauacc

SEQ ID NO: 384004 - RNA, 22 nt, Human
acauuuaaauaugccuuauauu

SEQ ID NO: 384005 - RNA, 20 nt, Human
cuucuucagccuaugcuuca

SEQ ID NO: 384006 - RNA, 22 nt, Human
cagaccugagguugaguaccag

SEQ ID NO: 384007 - RNA, 22 nt, Human
cagccagguucaaguccuuaua

SEQ ID NO: 384008 - RNA, 22 nt, Human
guguccagagaaacucacagcu

SEQ ID NO: 384009 - RNA, 22 nt, Human
gacauucacagguaaacauucc

SEQ ID NO: 384010 - RNA, 22 nt, Human
aaaugauugucaaaguucuguu

SEQ ID NO: 384011 - RNA, 22 nt, Human
gugcagcugugguggagccagg

SEQ ID NO: 384012 - RNA, 22 nt, Human
gugugcagggcugccugugccg

SEQ ID NO: 384013 - RNA, 22 nt, Human
gagcagcuccagccgcaugacu

SEQ ID NO: 384014 - RNA, 22 nt, Human
uaaauguguguagccaucugug

SEQ ID NO: 384015 - RNA, 19 nt, Human
ucaggcaguuauucacaaa

SEQ ID NO: 384016 - RNA, 22 nt, Human
agccucugacugucagcaaggu

SEQ ID NO: 384017 - RNA, 19 nt, Human
gaggaggcuucagcuuucu

SEQ ID NO: 384018 - RNA, 22 nt, Human
ugugaaggagaugaagggagug

SEQ ID NO: 384019 - RNA, 22 nt, Human
uacaaaguuugagaaugcuuuc

SEQ ID NO: 384020 - RNA, 22 nt, Human
gaaauguguuguucauuucuaa

SEQ ID NO: 384021 - RNA, 22 nt, Human
ccucccagugccuccagagcag

SEQ ID NO: 384022 - RNA, 22 nt, Human
gaaaauagcagauagaccaaug

SEQ ID NO: 384023 - RNA, 18 nt, Human
aagcugcccucaggcagg

SEQ ID NO: 384024 - RNA, 22 nt, Human
gcugagggcauguguggcgacu

SEQ ID NO: 384025 - RNA, 19 nt, Human
gcugugggacagcagggug

SEQ ID NO: 384026 - RNA, 20 nt, Human
aaucagaaagugugagcucu

SEQ ID NO: 384027 - RNA, 22 nt, Human
acacagggaggaggugcugugc

SEQ ID NO: 384028 - RNA, 22 nt, Human
uuuaugaacuacagauauaacu

SEQ ID NO: 384029 - RNA, 22 nt, Human
aagagcugcaucuaagccauga

SEQ ID NO: 384030 - RNA, 22 nt, Human
augaaacaugcuuuguggauga

SEQ ID NO: 384031 - RNA, 22 nt, Human
ccaggcuggauuuugcaguuca

SEQ ID NO: 384032 - RNA, 22 nt, Human
gggaagcaggugcagcucgccu

SEQ ID NO: 384033 - RNA, 22 nt, Human
aagcagcacgcuuugccaacaa

SEQ ID NO: 384034 - RNA, 22 nt, Human
gaggccuggaauuccagccugg

SEQ ID NO: 384035 - RNA, 22 nt, Human
gugggcagugguuugcgcgguc

SEQ ID NO: 384036 - RNA, 22 nt, Human
gcuugggauaugcugauguaaa

SEQ ID NO: 384037 - RNA, 22 nt, Human
uauuucuucgggauucaagcua

SEQ ID NO: 384038 - RNA, 22 nt, Human
uuucaacguguaaucuuauuua

SEQ ID NO: 384039 - RNA, 22 nt, Human
aauuucagaccauuugcaauua

SEQ ID NO: 384040 - RNA, 22 nt, Human
aacaucuuuuuguuugcugaaa

SEQ ID NO: 384041 - RNA, 22 nt, Human
auaacagaguugggaagugaaa

SEQ ID NO: 384042 - RNA, 22 nt, Human
cagggagcuuucccaggacccu

SEQ ID NO: 384043 - RNA, 22 nt, Human
uauuuauaccaggugaucggag

SEQ ID NO: 384044 - RNA, 22 nt, Human
ucaggggcuugaggugcauguc

SEQ ID NO: 384045 - RNA, 22 nt, Human
caggagcucuuaaggaugugau

SEQ ID NO: 384046 - RNA, 22 nt, Human
ccagcuccaaguuugggcauca

SEQ ID NO: 384047 - RNA, 22 nt, Human
caggauggugugagugugagga

SEQ ID NO: 384048 - RNA, 22 nt, Human
uuuaauuuuccugguaggccug

SEQ ID NO: 384049 - RNA, 22 nt, Human
gcaaacaaggacauacauccug

SEQ ID NO: 384050 - RNA, 22 nt, Human
uguauacaggcauaagagauac

SEQ ID NO: 384051 - RNA, 22 nt, Human
auauaaagaaguggaaaaugag

SEQ ID NO: 384052 - RNA, 22 nt, Human
aauaacagauuuucaagcugug

SEQ ID NO: 384053 - RNA, 21 nt, Human
ugccagcauguaggcuaguug

SEQ ID NO: 384054 - RNA, 22 nt, Human
aggucagcaggccaggggcgaa

SEQ ID NO: 384055 - RNA, 22 nt, Human
ccaggugguucaggucaccaua

SEQ ID NO: 384056 - RNA, 22 nt, Human
auucuucacuguuucagaauga

SEQ ID NO: 384057 - RNA, 22 nt, Human
ccagagcagauguggccuuggu

SEQ ID NO: 384058 - RNA, 22 nt, Human
gagugagggcagcaggggcugc

SEQ ID NO: 384059 - RNA, 22 nt, Human
ucaggccacuucacaggugauu

SEQ ID NO: 384060 - RNA, 20 nt, Human
gaggcugcggacugcuggac

SEQ ID NO: 384061 - RNA, 22 nt, Human
uccagcucuaacaugcugggcc

SEQ ID NO: 384062 - RNA, 22 nt, Human
caaaugcuaacuucuuuccaaa

SEQ ID NO: 384063 - RNA, 23 nt, Human
agcagccauagggaagcaauaca

SEQ ID NO: 384064 - RNA, 22 nt, Human
agcugcucccuauccuuuccuu

SEQ ID NO: 384065 - RNA, 22 nt, Human
gaguggggcguggauccagcgu

SEQ ID NO: 384066 - RNA, 20 nt, Human
uuucugugcccaggucuguu

SEQ ID NO: 384067 - RNA, 22 nt, Human
uugaacauuaacuucagucuau

SEQ ID NO: 384068 - RNA, 22 nt, Human
agccaacuaauuaaacaacuuu

SEQ ID NO: 384069 - RNA, 22 nt, Human
uucaauucugcucugaucuuag

SEQ ID NO: 384070 - RNA, 22 nt, Human
gggccuggcaugcagccccguu

SEQ ID NO: 384071 - RNA, 22 nt, Human
aggcugggaaauguagucuucc

SEQ ID NO: 384072 - RNA, 22 nt, Human
aaaacuguaucuucuugggacu

SEQ ID NO: 384073 - RNA, 22 nt, Human
aggcugggaaauguauuccagc

SEQ ID NO: 384074 - RNA, 22 nt, Human
ugccugugguuccaguuuuuuc

SEQ ID NO: 384075 - RNA, 22 nt, Human
gagugcaguaucuucugugucc

SEQ ID NO: 384076 - RNA, 21 nt, Human
agccugggaggcggagguugc

SEQ ID NO: 384077 - RNA, 22 nt, Human
cagcuggcgggcagagccgcca

SEQ ID NO: 384078 - RNA, 22 nt, Human
ucaggcagagggagaagccaag

SEQ ID NO: 384079 - RNA, 22 nt, Human
auuugcuuaucuccacaguugu

SEQ ID NO: 384080 - RNA, 22 nt, Human
gcacaggcacagagggccacug

SEQ ID NO: 384081 - RNA, 22 nt, Human
uacccagcuucaagucaggacu

SEQ ID NO: 384082 - RNA, 22 nt, Human
ucagacaguuugcagugugccu

SEQ ID NO: 384083 - RNA, 15 nt, Human
ugauuuccuacuaac

SEQ ID NO: 384084 - RNA, 22 nt, Human
uggcugaacuaaugugcuguuu

SEQ ID NO: 384085 - RNA, 22 nt, Human
gcagacagccagacugcacugg

SEQ ID NO: 384086 - RNA, 22 nt, Human
gccaggcuggaaagaacagaca

SEQ ID NO: 384087 - RNA, 19 nt, Human
uaaaaugucuguggucagu

SEQ ID NO: 384088 - RNA, 22 nt, Human
aggcggcuccgggagugugggc

SEQ ID NO: 384089 - RNA, 22 nt, Human
augaggcucucaggggagcugu

SEQ ID NO: 384090 - RNA, 22 nt, Human
cucuucuugaaagaggaauuca

SEQ ID NO: 384091 - RNA, 22 nt, Human
augcugugucuagcaggaacac

SEQ ID NO: 384092 - RNA, 22 nt, Human
acaaaaauuagcugggcauggu

SEQ ID NO: 384093 - RNA, 22 nt, Human
caggcagcccugcaccaagugu

SEQ ID NO: 384094 - RNA, 22 nt, Human
ucagaggucccuagcaggagug

SEQ ID NO: 384095 - RNA, 22 nt, Human
auuaggcagggcaugguggcuc

SEQ ID NO: 384096 - RNA, 22 nt, Human
uguagcauguaaauugguuauu

SEQ ID NO: 384097 - RNA, 18 nt, Human
acagcagguuucauucuu

SEQ ID NO: 384098 - RNA, 22 nt, Human
uucaagauccagcacaacagug

SEQ ID NO: 384099 - RNA, 22 nt, Human
cuguggcauugccgaggcuggc

SEQ ID NO: 384100 - RNA, 22 nt, Human
accaaggaguuugguauuuuag

SEQ ID NO: 384101 - RNA, 22 nt, Human
aaguccuucuuuauaugagagu

SEQ ID NO: 384102 - RNA, 22 nt, Human
cauuuacacuucuaaccacaag

SEQ ID NO: 384103 - RNA, 22 nt, Human
ugcugccucagcuuccugggcu

SEQ ID NO: 384104 - RNA, 22 nt, Human
gacggcagaaacucaugagguc

SEQ ID NO: 384105 - RNA, 22 nt, Human
acaugggaucaaugaggcaggc

SEQ ID NO: 384106 - RNA, 22 nt, Human
acccagccacagcauugaggga

SEQ ID NO: 384107 - RNA, 21 nt, Human
agggagcuggccacacagccu

SEQ ID NO: 384108 - RNA, 19 nt, Human
agcauuuggaauucuacac

SEQ ID NO: 384109 - RNA, 22 nt, Human
ggugggcagcucuuggcaggca

SEQ ID NO: 384110 - RNA, 22 nt, Human
uuguuacacauaauaacauuuu

SEQ ID NO: 384111 - RNA, 22 nt, Human
uucuuaauaccuauuuucuacc

SEQ ID NO: 384112 - RNA, 22 nt, Human
ucccagggacaccaagcuguuu

SEQ ID NO: 384113 - RNA, 22 nt, Human
uccagcuuugagauuuuaugga

SEQ ID NO: 384114 - RNA, 22 nt, Human
ggagaggauguuuuaguaacuu

SEQ ID NO: 384115 - RNA, 22 nt, Human
gaggcagcgggucaggaccgug

SEQ ID NO: 384116 - RNA, 18 nt, Human
ugaacagaugaguugaag

SEQ ID NO: 384117 - RNA, 22 nt, Human
ggaaagaggauaguggguaggu

SEQ ID NO: 384118 - RNA, 21 nt, Human
ucccagggccaggugccauca

SEQ ID NO: 384119 - RNA, 22 nt, Human
cagaagaauggugucugagcuc

SEQ ID NO: 384120 - RNA, 17 nt, Human
gccugcaggcccgcaga

SEQ ID NO: 384121 - RNA, 22 nt, Human
gggcugcugccaaucacagccu

SEQ ID NO: 384122 - RNA, 22 nt, Human
acguguucaauuuccaucugac

SEQ ID NO: 384123 - RNA, 22 nt, Human
agguggccggugccagccgggc

SEQ ID NO: 384124 - RNA, 22 nt, Human
guauuuucaagagcaguaguau

SEQ ID NO: 384125 - RNA, 22 nt, Human
caggaugagguagaggcagaua

SEQ ID NO: 384126 - RNA, 22 nt, Human
ucagggcauggcugcacuuggc

SEQ ID NO: 384127 - RNA, 22 nt, Human
agcccagguucuaaagccaaac

SEQ ID NO: 384128 - RNA, 22 nt, Human
cuccauugaacauccucucaga

SEQ ID NO: 384129 - RNA, 22 nt, Human
agauuucacaugcugcucuauu

SEQ ID NO: 384130 - RNA, 22 nt, Human
uggggcuggggaucuugagccu

SEQ ID NO: 384131 - RNA, 22 nt, Human
gaauuugaaaagugaugggaau

SEQ ID NO: 384132 - RNA, 22 nt, Human
aucagaaaggugggcaagcaga

SEQ ID NO: 384133 - RNA, 19 nt, Human
ggcagcuugggaagguagc

SEQ ID NO: 384134 - RNA, 22 nt, Human
cccagcucaucaggagccgccc

SEQ ID NO: 384135 - RNA, 22 nt, Human
uggccugcagcucucagggaag

SEQ ID NO: 384136 - RNA, 22 nt, Human
cacuacuugaaagaauuacaga

SEQ ID NO: 384137 - RNA, 22 nt, Human
ggucccagaauugguuagcaca

SEQ ID NO: 384138 - RNA, 22 nt, Human
uuggaaggcccugccuagcagg

SEQ ID NO: 384139 - RNA, 22 nt, Human
cuccaggccauggcugcggagg

SEQ ID NO: 384140 - RNA, 20 nt, Human
ucucuucuggggagauaaaa

SEQ ID NO: 384141 - RNA, 22 nt, Human
aagcuuuaagugucagucagcc

SEQ ID NO: 384142 - RNA, 22 nt, Human
ccugcacuaccuggggcugcug

SEQ ID NO: 384143 - RNA, 22 nt, Human
guguaauuauauaaagaucuac

SEQ ID NO: 384144 - RNA, 22 nt, Human
cuggauuuuagaaggcuuccua

SEQ ID NO: 384145 - RNA, 20 nt, Human
aauuuacucacagaaugaau

SEQ ID NO: 384146 - RNA, 22 nt, Human
ugagcagggacuuugaguguag

SEQ ID NO: 384147 - RNA, 21 nt, Human
ggcagcacuaccugaagcaua

SEQ ID NO: 384148 - RNA, 22 nt, Human
gcugaaugaauguauuuuaaaa

SEQ ID NO: 384149 - RNA, 21 nt, Human
uugaaggaucacuucuguacc

SEQ ID NO: 384150 - RNA, 21 nt, Human
auuuucauuuccaggggagga

SEQ ID NO: 384151 - RNA, 22 nt, Human
ugacaccacaacuagccauuga

SEQ ID NO: 384152 - RNA, 22 nt, Human
uggagcccagacacuggcauug

SEQ ID NO: 384153 - RNA, 22 nt, Human
gaggcugggaaguccaagauca

SEQ ID NO: 384154 - RNA, 22 nt, Human
agauaaaaugguucaaaggcua

SEQ ID NO: 384155 - RNA, 22 nt, Human
uuucaugagauuccuccacauc

SEQ ID NO: 384156 - RNA, 22 nt, Human
ccagagccuaagaucugauccu

SEQ ID NO: 384157 - RNA, 22 nt, Human
agaagccagcuucagcugcccg

SEQ ID NO: 384158 - RNA, 22 nt, Human
ggguguccugugccaagcuggg

SEQ ID NO: 384159 - RNA, 22 nt, Human
acagguggaggcuuuaggaggu

SEQ ID NO: 384160 - RNA, 20 nt, Human
cccagugaagcauggaagag

SEQ ID NO: 384161 - RNA, 22 nt, Human
agaaagaacguugguuaucuua

SEQ ID NO: 384162 - RNA, 20 nt, Human
caccaggcgcucugagaaca

SEQ ID NO: 384163 - RNA, 22 nt, Human
agggcugguauguccaugaaag

SEQ ID NO: 384164 - RNA, 22 nt, Human
auggaaagcuaagccauuuacc

SEQ ID NO: 384165 - RNA, 22 nt, Human
gaggaaggcuaaggggcuuaga

SEQ ID NO: 384166 - RNA, 22 nt, Human
uuaagcaacacacauuaauuau

SEQ ID NO: 384167 - RNA, 22 nt, Human
uaacaucuuuagcagcucgaac

SEQ ID NO: 384168 - RNA, 22 nt, Human
gcaaaugaguuguaacauaaaa

SEQ ID NO: 384169 - RNA, 22 nt, Human
ggcugagccaugggcacugcag

SEQ ID NO: 384170 - RNA, 22 nt, Human
gcagggacaaggcagguguucu

SEQ ID NO: 384171 - RNA, 18 nt, Human
uuucacagauucaugacu

SEQ ID NO: 384172 - RNA, 22 nt, Human
uaugaguacaaggacucugucu

SEQ ID NO: 384173 - RNA, 20 nt, Human
ucugcucagcccucaguggc

SEQ ID NO: 384174 - RNA, 22 nt, Human
gauuuuaauuauaggagguccu

SEQ ID NO: 384175 - RNA, 22 nt, Human
gccagcagguugucaaggagcu

SEQ ID NO: 384176 - RNA, 22 nt, Human
uuaaaacagcgugaaucuggca

SEQ ID NO: 384177 - RNA, 22 nt, Human
cggcuggggcuguccccaugac

SEQ ID NO: 384178 - RNA, 22 nt, Human
cccagcaucuccaggcauggcc

SEQ ID NO: 384179 - RNA, 22 nt, Human
uauuucuuucagguauguguug

SEQ ID NO: 384180 - RNA, 22 nt, Human
ugucacauaauuuaucuguagg

SEQ ID NO: 384181 - RNA, 22 nt, Human
acuggagcccguggaggcgcag

SEQ ID NO: 384182 - RNA, 22 nt, Human
auuucacaaagaacagaugcag

SEQ ID NO: 384183 - RNA, 22 nt, Human
gcagggaccagggccagaucca

SEQ ID NO: 384184 - RNA, 22 nt, Human
guggccaggacauugccaggca

SEQ ID NO: 384185 - RNA, 22 nt, Human
agccaggaaugcaugcucugcu

SEQ ID NO: 384186 - RNA, 22 nt, Human
ggcuucuguccucuggaucugu

SEQ ID NO: 384187 - RNA, 22 nt, Human
cugaaugaggaaaagagugagg

SEQ ID NO: 384188 - RNA, 22 nt, Human
aaugggauaggucuucaggaau

SEQ ID NO: 384189 - RNA, 22 nt, Human
caagugucuauaucagugcuug

SEQ ID NO: 384190 - RNA, 22 nt, Human
cagccaggacagggaaacuagu

SEQ ID NO: 384191 - RNA, 22 nt, Human
ggcuggcaagugucugcucaug

SEQ ID NO: 384192 - RNA, 22 nt, Human
aagggcucuguugccauuucag

SEQ ID NO: 384193 - RNA, 22 nt, Human
gaggaggccaguggaaggaagc

SEQ ID NO: 384194 - RNA, 22 nt, Human
ggggaugguagaccggugacgu

SEQ ID NO: 384195 - RNA, 22 nt, Human
cauguuauuuauccauuaaaca

SEQ ID NO: 384196 - RNA, 22 nt, Human
guacagaaaguacccauagaag

SEQ ID NO: 384197 - RNA, 22 nt, Human
aggaaaaucgagucuggaggca

SEQ ID NO: 384198 - RNA, 22 nt, Human
gcugugcagguccccacugccu

SEQ ID NO: 384199 - RNA, 22 nt, Human
ccaggagccacucaggcccaca

SEQ ID NO: 384200 - RNA, 22 nt, Human
ccaaaugugccuguuucaacaa

SEQ ID NO: 384201 - RNA, 22 nt, Human
agcuucccaagguuggaagguu

SEQ ID NO: 384202 - RNA, 22 nt, Human
ucugccuugagguccucagcuc

SEQ ID NO: 384203 - RNA, 22 nt, Human
gcugggaagugcaagaucaagg

SEQ ID NO: 384204 - RNA, 22 nt, Human
agaaauguuguggguuuuguua

SEQ ID NO: 384205 - RNA, 23 nt, Human
cccagggacacgaugacaccucc

SEQ ID NO: 384206 - RNA, 22 nt, Human
uucuccagaccuugugacuaug

SEQ ID NO: 384207 - RNA, 20 nt, Human
uccaagggcagcagaaucag

SEQ ID NO: 384208 - RNA, 22 nt, Human
guaaucucagcuacuugggagg

SEQ ID NO: 384209 - RNA, 22 nt, Human
uucaggauucucucccauuuac

SEQ ID NO: 384210 - RNA, 22 nt, Human
aaguccagcucuaaauaucuga

SEQ ID NO: 384211 - RNA, 22 nt, Human
uguggcuguguccaccugcugc

SEQ ID NO: 384212 - RNA, 22 nt, Human
acuuuuaaaugaguuucaguug

SEQ ID NO: 384213 - RNA, 22 nt, Human
uaaagguagugugacauauugu

SEQ ID NO: 384214 - RNA, 22 nt, Human
cgcugggcgccgaccugcuggc

SEQ ID NO: 384215 - RNA, 22 nt, Human
cugcagggcagggccuccuggc

SEQ ID NO: 384216 - RNA, 22 nt, Human
uugaggagcacuagucagguau

SEQ ID NO: 384217 - RNA, 22 nt, Human
aggcaggcccucuggaaaggua

SEQ ID NO: 384218 - RNA, 22 nt, Human
agcagggccucuggcacugguc

SEQ ID NO: 384219 - RNA, 22 nt, Human
agugcuguuagguuaauauagu

SEQ ID NO: 384220 - RNA, 23 nt, Human
aggcccaacucugugagggcugc

SEQ ID NO: 384221 - RNA, 22 nt, Human
uaguuaggaaaguccagggagc

SEQ ID NO: 384222 - RNA, 22 nt, Human
gacagggcaagacucugucuaa

SEQ ID NO: 384223 - RNA, 22 nt, Human
cauguuuucuaggcuuucacaa

SEQ ID NO: 384224 - RNA, 22 nt, Human
gccagggaaacugcagaccagc

SEQ ID NO: 384225 - RNA, 22 nt, Human
uacagacaguuuuucagauauu

SEQ ID NO: 384226 - RNA, 22 nt, Human
gcucugcugcuuacuagauggu

SEQ ID NO: 384227 - RNA, 22 nt, Human
uccagcagguccgagacaaguu

SEQ ID NO: 384228 - RNA, 22 nt, Human
aaggcugagagucacaguccua

SEQ ID NO: 384229 - RNA, 22 nt, Human
acaagauaaggugucagugugu

SEQ ID NO: 384230 - RNA, 22 nt, Human
agcagagccugggcuaggggug

SEQ ID NO: 384231 - RNA, 22 nt, Human
uccauuuucuugcucuagguaa

SEQ ID NO: 384232 - RNA, 22 nt, Human
aggucauuaaaguuaaaugagg

SEQ ID NO: 384233 - RNA, 18 nt, Human
ggcagcuugacuagcaac

SEQ ID NO: 384234 - RNA, 23 nt, Human
ugucauugugacuacagaaccag

SEQ ID NO: 384235 - RNA, 22 nt, Human
ggcugccugaggcagugagaga

SEQ ID NO: 384236 - RNA, 22 nt, Human
agagcccugaagcagagcuaaa

SEQ ID NO: 384237 - RNA, 19 nt, Human
ucgagucaagacacuaggc

SEQ ID NO: 384238 - RNA, 22 nt, Human
ucagcccugggacccagggaug

SEQ ID NO: 384239 - RNA, 21 nt, Human
ucaggagagcccaucuacaaa

SEQ ID NO: 384240 - RNA, 22 nt, Human
aaggaguuuggguagucauaca

SEQ ID NO: 384241 - RNA, 22 nt, Human
ggcuggagauaugucuggaaca

SEQ ID NO: 384242 - RNA, 22 nt, Human
uuuuaagaugcuaguauuucag

SEQ ID NO: 384243 - RNA, 22 nt, Human
ccuccugggccuugcucuguga

SEQ ID NO: 384244 - RNA, 22 nt, Human
aaggugucggguuagcucagcc

SEQ ID NO: 384245 - RNA, 22 nt, Human
cacauugaaaugacccaauaau

SEQ ID NO: 384246 - RNA, 22 nt, Human
augaggcaaucaugguccaguu

SEQ ID NO: 384247 - RNA, 22 nt, Human
caaagcaccacaaaccagguga

SEQ ID NO: 384248 - RNA, 22 nt, Human
augagcugugggauuccagagg

SEQ ID NO: 384249 - RNA, 22 nt, Human
acaggcaggcgggacagcccga

SEQ ID NO: 384250 - RNA, 22 nt, Human
acaucugaccauuacaagacau

SEQ ID NO: 384251 - RNA, 22 nt, Human
uugaagaaagucauauauaaug

SEQ ID NO: 384252 - RNA, 22 nt, Human
ggcagucagugugguucauaaa

SEQ ID NO: 384253 - RNA, 22 nt, Human
cuggugugauugagcccaggug

SEQ ID NO: 384254 - RNA, 20 nt, Human
aggcugaguucuaugcacuu

SEQ ID NO: 384255 - RNA, 22 nt, Human
agcagggcugcggccccaccac

SEQ ID NO: 384256 - RNA, 22 nt, Human
cugggcagaauuuuaggauggc

SEQ ID NO: 384257 - RNA, 22 nt, Human
cagggcaguuugugccuaugag

SEQ ID NO: 384258 - RNA, 22 nt, Human
gacuuuggcaucuagacauugu

SEQ ID NO: 384259 - RNA, 22 nt, Human
ucagcugcucuguugagcugaa

SEQ ID NO: 384260 - RNA, 22 nt, Human
cagcucuggcgucagggagcga

SEQ ID NO: 384261 - RNA, 22 nt, Human
cagagcagacguugagauuaag

SEQ ID NO: 384262 - RNA, 22 nt, Human
uuacaucuaaacugugaacaau

SEQ ID NO: 384263 - RNA, 22 nt, Human
aaucagaaauugagggucuggu

SEQ ID NO: 384264 - RNA, 22 nt, Human
gcagcauugcacuuuuguucuu

SEQ ID NO: 384265 - RNA, 22 nt, Human
ucucacugggucacagcagagg

SEQ ID NO: 384266 - RNA, 22 nt, Human
auuaggcacuagaaugucaauu

SEQ ID NO: 384267 - RNA, 22 nt, Human
auguuuccgugagcauccuuga

SEQ ID NO: 384268 - RNA, 22 nt, Human
ggcugcugugaccucaggugau

SEQ ID NO: 384269 - RNA, 22 nt, Human
ccaggaugacccccacuuuccu

SEQ ID NO: 384270 - RNA, 22 nt, Human
uugacagcaaagauugugccua

SEQ ID NO: 384271 - RNA, 22 nt, Human
ugcucccaaacgaccuacugug

SEQ ID NO: 384272 - RNA, 22 nt, Human
uucacauuggugauauguuucu

SEQ ID NO: 384273 - RNA, 22 nt, Human
agaauccugaugaaaaggagag

SEQ ID NO: 384274 - RNA, 22 nt, Human
agauggggcucaguguggaggc

SEQ ID NO: 384275 - RNA, 23 nt, Human
aaguucaagucacagccugucuu

SEQ ID NO: 384276 - RNA, 22 nt, Human
aagucaccccacacucuuggga

SEQ ID NO: 384277 - RNA, 22 nt, Human
ucuccccaaaggacucacucuc

SEQ ID NO: 384278 - RNA, 18 nt, Human
ugggauggagaguaacug

SEQ ID NO: 384279 - RNA, 22 nt, Human
agagcugaaaaagcugacccgg

SEQ ID NO: 384280 - RNA, 22 nt, Human
uucuuacagcccuauuacuaaa

SEQ ID NO: 384281 - RNA, 22 nt, Human
aggauuuacuagcaaggauucu

SEQ ID NO: 384282 - RNA, 22 nt, Human
agcagugaaacagcugcauaug

SEQ ID NO: 384283 - RNA, 20 nt, Human
uccuugaaagugggguauau

SEQ ID NO: 384284 - RNA, 22 nt, Human
gggaguggguuuggccuaggcc

SEQ ID NO: 384285 - RNA, 19 nt, Human
ucagggcaguccggucccc

SEQ ID NO: 384286 - RNA, 22 nt, Human
cugacucagcagcugaugaucc

SEQ ID NO: 384287 - RNA, 20 nt, Human
aggaggggauagaaucaaag

SEQ ID NO: 384288 - RNA, 22 nt, Human
cauaauuuuuuuaagucagaac

SEQ ID NO: 384289 - RNA, 22 nt, Human
ucagaggaauaaugcugcauuu

SEQ ID NO: 384290 - RNA, 22 nt, Human
ugcagggacaggcucuggggau

SEQ ID NO: 384291 - RNA, 22 nt, Human
agauucuacucuagauccaugg

SEQ ID NO: 384292 - RNA, 22 nt, Human
gcuggccuugugucugaggaag

SEQ ID NO: 384293 - RNA, 22 nt, Human
caccaggugcuggaggacauca

SEQ ID NO: 384294 - RNA, 22 nt, Human
ccaaggaggccccaggucagcu

SEQ ID NO: 384295 - RNA, 22 nt, Human
uagaaaugcaguguacuguguc

SEQ ID NO: 384296 - RNA, 22 nt, Human
auuucucagcacuuccuaucuc

SEQ ID NO: 384297 - RNA, 17 nt, Human
gcagugaaaagagauca

SEQ ID NO: 384298 - RNA, 22 nt, Human
uccuugaaaaucuugguuuaga

SEQ ID NO: 384299 - RNA, 22 nt, Human
aaugagcugcugcuguuccacc

SEQ ID NO: 384300 - RNA, 22 nt, Human
gugccugguuuggggaguguuc

SEQ ID NO: 384301 - RNA, 22 nt, Human
agggugccugcugcagguucag

SEQ ID NO: 384302 - RNA, 20 nt, Human
uguuaaaggacacuugcuuu

SEQ ID NO: 384303 - RNA, 22 nt, Human
auguaucaauuaucugucugca

SEQ ID NO: 384304 - RNA, 20 nt, Human
aaggcacuaugucugcuagc

SEQ ID NO: 384305 - RNA, 22 nt, Human
ucuuucucucuaaucaagcaca

SEQ ID NO: 384306 - RNA, 22 nt, Human
cugggcugcgggcgccccucca

SEQ ID NO: 384307 - RNA, 22 nt, Human
ggcaggcaggucuucauggccc

SEQ ID NO: 384308 - RNA, 22 nt, Human
acccaggagagagcuauaaaau

SEQ ID NO: 384309 - RNA, 22 nt, Human
agaagcuugaaggagcagugac

SEQ ID NO: 384310 - RNA, 22 nt, Human
gaccauuucuaggaaucagacu

SEQ ID NO: 384311 - RNA, 22 nt, Human
ccagagcaauucucacagaacu

SEQ ID NO: 384312 - RNA, 22 nt, Human
aauguacaaggguuccaguuuu

SEQ ID NO: 384313 - RNA, 22 nt, Human
ugcagggaaucuguggcuggac

SEQ ID NO: 384314 - RNA, 22 nt, Human
agauacauauagaaaacaucaa

SEQ ID NO: 384315 - RNA, 22 nt, Human
aaguuaugaaauuuggacagcu

SEQ ID NO: 384316 - RNA, 22 nt, Human
aaugucugccagaacugaucau

SEQ ID NO: 384317 - RNA, 22 nt, Human
caugucuggguauaugcauaug

SEQ ID NO: 384318 - RNA, 22 nt, Human
gaagcccuauccucuccuggga

SEQ ID NO: 384319 - RNA, 22 nt, Human
uucuucucagggucccacaugg

SEQ ID NO: 384320 - RNA, 22 nt, Human
ccugccugguguaagucuaagg

SEQ ID NO: 384321 - RNA, 22 nt, Human
aucauucuaguccuuauggucu

SEQ ID NO: 384322 - RNA, 22 nt, Human
uuuacagaucuguugauuuguu

SEQ ID NO: 384323 - RNA, 22 nt, Human
gagccuccuccuggugugccga

SEQ ID NO: 384324 - RNA, 22 nt, Human
agcaggguuccaggaguugcag

SEQ ID NO: 384325 - RNA, 22 nt, Human
acugaaggcuuaacucuuucau

SEQ ID NO: 384326 - RNA, 22 nt, Human
cagagaaagggugaauuccuuc

SEQ ID NO: 384327 - RNA, 22 nt, Human
uuccacaauguaugaauaagau

SEQ ID NO: 384328 - RNA, 22 nt, Human
cccugcagacgucuugaugccu

SEQ ID NO: 384329 - RNA, 21 nt, Human
uggcucaguugcugggcacag

SEQ ID NO: 384330 - RNA, 20 nt, Human
ccuggaagagcuccccaggc

SEQ ID NO: 384331 - RNA, 22 nt, Human
ggaaaguggugguggaaagagg

SEQ ID NO: 384332 - RNA, 19 nt, Human
acucaagucuaaugaaauc

SEQ ID NO: 384333 - RNA, 22 nt, Human
cagggcucccugcagccucugu

SEQ ID NO: 384334 - RNA, 22 nt, Human
agcaucuggcagaaagucagaa

SEQ ID NO: 384335 - RNA, 22 nt, Human
ugcagaagauggucugagcacc

SEQ ID NO: 384336 - RNA, 22 nt, Human
aucugcagaggacaggcgagga

SEQ ID NO: 384337 - RNA, 22 nt, Human
uggcagcugaauggcuggaugg

SEQ ID NO: 384338 - RNA, 22 nt, Human
augcaguaaauguucuaguuug

SEQ ID NO: 384339 - RNA, 22 nt, Human
caggacugauguuccuccagcc

SEQ ID NO: 384340 - RNA, 22 nt, Human
ccugucuguccucucaugagcc

SEQ ID NO: 384341 - RNA, 20 nt, Human
uccuuuggccuuagagcugu

SEQ ID NO: 384342 - RNA, 20 nt, Human
accuuucaaaugauucagca

SEQ ID NO: 384343 - RNA, 22 nt, Human
uaaaugcaguacaaauuguucu

SEQ ID NO: 384344 - RNA, 22 nt, Human
acucccagguugccuggcaggc

SEQ ID NO: 384345 - RNA, 22 nt, Human
gcaagauguuaacauagggaga

SEQ ID NO: 384346 - RNA, 21 nt, Human
uaaagaagaugaaugugauca

SEQ ID NO: 384347 - RNA, 22 nt, Human
aagaugcuuauugcuccugcag

SEQ ID NO: 384348 - RNA, 22 nt, Human
uugaauucauuucucauugagu

SEQ ID NO: 384349 - RNA, 22 nt, Human
aauaucaguauauuguaucagu

SEQ ID NO: 384350 - RNA, 22 nt, Human
aaugccaguguguugauuccag

SEQ ID NO: 384351 - RNA, 22 nt, Human
gggcucugggaugcucuuagag

SEQ ID NO: 384352 - RNA, 22 nt, Human
uguauuuuuagaccuuuagacc

SEQ ID NO: 384353 - RNA, 22 nt, Human
accagggcugacaaucugaugg

SEQ ID NO: 384354 - RNA, 22 nt, Human
ucucaccaaagccuugaccaua

SEQ ID NO: 384355 - RNA, 22 nt, Human
ugaguucuaguggcugcagauu

SEQ ID NO: 384356 - RNA, 22 nt, Human
auaaggaaugauguaucaguuu

SEQ ID NO: 384357 - RNA, 22 nt, Human
aaauguguguauguacauauau

SEQ ID NO: 384358 - RNA, 22 nt, Human
gaggagagccugcacuuugacc

SEQ ID NO: 384359 - RNA, 22 nt, Human
agcuagccuaggcagagugcau

SEQ ID NO: 384360 - RNA, 22 nt, Human
cgggcuggcugcagcugcugga

SEQ ID NO: 384361 - RNA, 22 nt, Human
gggcugaggaacauauuuuguu

SEQ ID NO: 384362 - RNA, 22 nt, Human
augccuguaaucccagugcuuu

SEQ ID NO: 384363 - RNA, 22 nt, Human
aauguauaaaguguuaauaacu

SEQ ID NO: 384364 - RNA, 22 nt, Human
cccagaggugcuucagaggugc

SEQ ID NO: 384365 - RNA, 22 nt, Human
auccaugauuaguaggauaaag

SEQ ID NO: 384366 - RNA, 22 nt, Human
gacaggcuuccuaagugccaga

SEQ ID NO: 384367 - RNA, 22 nt, Human
cagacagaaggcuccuugaggu

SEQ ID NO: 384368 - RNA, 22 nt, Human
uggcuggggccacaguuuuccu

SEQ ID NO: 384369 - RNA, 22 nt, Human
acuuuauuuccuauugcaucca

SEQ ID NO: 384370 - RNA, 22 nt, Human
uuuaggcagucauugaacaagu

SEQ ID NO: 384371 - RNA, 22 nt, Human
gucaaauauacuaagagguaaa

SEQ ID NO: 384372 - RNA, 22 nt, Human
agaagugccauacuguggucca

SEQ ID NO: 384373 - RNA, 22 nt, Human
ggucuuccgagaggccugugcu

SEQ ID NO: 384374 - RNA, 20 nt, Human
gugggcagcaggcauacugg

SEQ ID NO: 384375 - RNA, 22 nt, Human
ugcuuuggccacuagaauucag

SEQ ID NO: 384376 - RNA, 23 nt, Human
aggcuuccuaucuuagagcuggg

SEQ ID NO: 384377 - RNA, 22 nt, Human
ugagccagaguggagugugccu

SEQ ID NO: 384378 - RNA, 22 nt, Human
aggggcucaaagugugcaggga

SEQ ID NO: 384379 - RNA, 22 nt, Human
ggcagcaugagccuggugaauu

SEQ ID NO: 384380 - RNA, 23 nt, Human
cuuugccacccagagccugacag

SEQ ID NO: 384381 - RNA, 22 nt, Human
uugcucagcacuggagccagcu

SEQ ID NO: 384382 - RNA, 22 nt, Human
gaauacaaauaauaccaaggug

SEQ ID NO: 384383 - RNA, 23 nt, Human
uggcucagcuaguuuuccauuuc

SEQ ID NO: 384384 - RNA, 22 nt, Human
cagggcccauggcucagguagg

SEQ ID NO: 384385 - RNA, 22 nt, Human
gcucucagguacaaagcugugu

SEQ ID NO: 384386 - RNA, 22 nt, Human
acauacuuuuuaaaagauugcu

SEQ ID NO: 384387 - RNA, 22 nt, Human
ugcaauaacccaguaucuguga

SEQ ID NO: 384388 - RNA, 22 nt, Human
gaggggcuggguagggcaaccc

SEQ ID NO: 384389 - RNA, 22 nt, Human
uuguuuuggaagaacuuacucu

SEQ ID NO: 384390 - RNA, 22 nt, Human
agggacacugaugagaaauucu

SEQ ID NO: 384391 - RNA, 22 nt, Human
gguucacauauugagaguauuc

SEQ ID NO: 384392 - RNA, 22 nt, Human
aggccagcuuccagaggggcag

SEQ ID NO: 384393 - RNA, 22 nt, Human
ccuuuccuuuuuagugugggag

SEQ ID NO: 384394 - RNA, 22 nt, Human
aggaagcuuagugaaaggacca

SEQ ID NO: 384395 - RNA, 22 nt, Human
ccucuucugagugagacucccu

SEQ ID NO: 384396 - RNA, 22 nt, Human
guacauuucauuuaaaugaugu

SEQ ID NO: 384397 - RNA, 22 nt, Human
uccuucagccaugggcucucca

SEQ ID NO: 384398 - RNA, 22 nt, Human
cugaggcauguuacaggacaua

SEQ ID NO: 384399 - RNA, 22 nt, Human
aaaucuguaagcaauugcucag

SEQ ID NO: 384400 - RNA, 22 nt, Human
aaggcaguuugggccaccaucu

SEQ ID NO: 384401 - RNA, 22 nt, Human
cuacauuuggagaguauaggaa

SEQ ID NO: 384402 - RNA, 22 nt, Human
agggccagccaggcccuacaaa

SEQ ID NO: 384403 - RNA, 22 nt, Human
cucagagaggcaguggaaguca

SEQ ID NO: 384404 - RNA, 22 nt, Human
ccaaggaguagagcaggaagcu

SEQ ID NO: 384405 - RNA, 22 nt, Human
aggcaguuguugcugagcagcu

SEQ ID NO: 384406 - RNA, 22 nt, Human
gguggccuccagggcauaggug

SEQ ID NO: 384407 - RNA, 22 nt, Human
ggcagcugucucugaguuagca

SEQ ID NO: 384408 - RNA, 22 nt, Human
ugauuuccacagucaggggugc

SEQ ID NO: 384409 - RNA, 22 nt, Human
uguaugcuuuccaaaaaugcug

SEQ ID NO: 384410 - RNA, 21 nt, Human
uuucagaccuaucuuugaagg

SEQ ID NO: 384411 - RNA, 23 nt, Human
ucuccagugucucuucauugagu

SEQ ID NO: 384412 - RNA, 19 nt, Human
guuaggcaggguggggagu

SEQ ID NO: 384413 - RNA, 22 nt, Human
ugacccugcuucuuggugcagg

SEQ ID NO: 384414 - RNA, 22 nt, Human
uccagccaugcaugacaaucac

SEQ ID NO: 384415 - RNA, 22 nt, Human
auucaguuaaaaacuguacuuc

SEQ ID NO: 384416 - RNA, 22 nt, Human
gugcagcugugugagagcucca

SEQ ID NO: 384417 - RNA, 22 nt, Human
ucaggcugcuggccagcaggcu

SEQ ID NO: 384418 - RNA, 22 nt, Human
caggccaggcugcauuugcccc

SEQ ID NO: 384419 - RNA, 22 nt, Human
ugcugucccccgugucugggcu

SEQ ID NO: 384420 - RNA, 22 nt, Human
auguguagaacuguaaugccca

SEQ ID NO: 384421 - RNA, 22 nt, Human
ucuggaucccaccgccacacac

SEQ ID NO: 384422 - RNA, 18 nt, Human
agcagggcauuuugccau

SEQ ID NO: 384423 - RNA, 19 nt, Human
ugagaggcuuaaggcagcu

SEQ ID NO: 384424 - RNA, 22 nt, Human
ggagccuguuaguugagugcuc

SEQ ID NO: 384425 - RNA, 22 nt, Human
ucaguuuucaauuucaucagag

SEQ ID NO: 384426 - RNA, 22 nt, Human
guaaugaaugaaagaaacuggg

SEQ ID NO: 384427 - RNA, 22 nt, Human
auccuuagguggugcaucaggg

SEQ ID NO: 384428 - RNA, 22 nt, Human
cgcagagggcaggcagugcugg

SEQ ID NO: 384429 - RNA, 22 nt, Human
agucucaggcagaggaaggcua

SEQ ID NO: 384430 - RNA, 22 nt, Human
uacaaaguuuucuuggauugag

SEQ ID NO: 384431 - RNA, 21 nt, Human
ggacaccagucacacuggauu

SEQ ID NO: 384432 - RNA, 22 nt, Human
uuugggcaauucagugggaccu

SEQ ID NO: 384433 - RNA, 22 nt, Human
cugagccuguguuucucuggca

SEQ ID NO: 384434 - RNA, 22 nt, Human
gacccaggguggucaccugaaa

SEQ ID NO: 384435 - RNA, 22 nt, Human
gaacuuuaccauuuagguaacu

SEQ ID NO: 384436 - RNA, 22 nt, Human
acaggagacccugcugguucug

SEQ ID NO: 384437 - RNA, 22 nt, Human
cauucauuagaauagauaugua

SEQ ID NO: 384438 - RNA, 22 nt, Human
ucucuuaauaaguaaauacuga

SEQ ID NO: 384439 - RNA, 22 nt, Human
gggcaguugauggaggucugga

SEQ ID NO: 384440 - RNA, 22 nt, Human
cagcacugcugcuguacacaca

SEQ ID NO: 384441 - RNA, 22 nt, Human
aaucagaaagaggucauguugc

SEQ ID NO: 384442 - RNA, 22 nt, Human
ugagauuuguuuuauaaaauag

SEQ ID NO: 384443 - RNA, 22 nt, Human
ugggcagaguugugaugaacug

SEQ ID NO: 384444 - RNA, 22 nt, Human
uuugaaaauuagacacaggcua

SEQ ID NO: 384445 - RNA, 20 nt, Human
aggcucagcugagcucuugg

SEQ ID NO: 384446 - RNA, 22 nt, Human
cugcccagaagccagaugggca

SEQ ID NO: 384447 - RNA, 23 nt, Human
gccucagagaaacagcugcacac

SEQ ID NO: 384448 - RNA, 22 nt, Human
ucaggcacugcuuucugauaug

SEQ ID NO: 384449 - RNA, 22 nt, Human
cuucagaagccugcagccuuug

SEQ ID NO: 384450 - RNA, 22 nt, Human
uggagcagagaugggagcccaa

SEQ ID NO: 384451 - RNA, 22 nt, Human
aaaugcacucugcuucugugac

SEQ ID NO: 384452 - RNA, 22 nt, Human
ccugggugacccgugagcgucc

SEQ ID NO: 384453 - RNA, 22 nt, Human
gaggggcucuugggcaugaagg

SEQ ID NO: 384454 - RNA, 22 nt, Human
acagucauuagauacaaugucu

SEQ ID NO: 384455 - RNA, 22 nt, Human
agcgugaaggcgggcagucggc

SEQ ID NO: 384456 - RNA, 22 nt, Human
aguccccucuaacccaacuuua

SEQ ID NO: 384457 - RNA, 18 nt, Human
caauuucauccuuaagcc

SEQ ID NO: 384458 - RNA, 22 nt, Human
auuauuauauagggaaaguccc

SEQ ID NO: 384459 - RNA, 22 nt, Human
aucagaaaucuaggauucagaa

SEQ ID NO: 384460 - RNA, 22 nt, Human
uuccugggacuggagcagccca

SEQ ID NO: 384461 - RNA, 18 nt, Human
gcagcugacacuggaguu

SEQ ID NO: 384462 - RNA, 22 nt, Human
ccagccugaaaugccucauccu

SEQ ID NO: 384463 - RNA, 22 nt, Human
uuuacagaauguugaauuuggg

SEQ ID NO: 384464 - RNA, 22 nt, Human
acaggagaaaucuggucaaaag

SEQ ID NO: 384465 - RNA, 22 nt, Human
ggcggggguccaggagccugca

SEQ ID NO: 384466 - RNA, 23 nt, Human
ugggccuggaaagccuuagagag

SEQ ID NO: 384467 - RNA, 22 nt, Human
aaaaucugguaauuugaaugug

SEQ ID NO: 384468 - RNA, 22 nt, Human
gcugccacucugagcuugcuuc

SEQ ID NO: 384469 - RNA, 22 nt, Human
uacaaaaaauugauacugacga

SEQ ID NO: 384470 - RNA, 22 nt, Human
ucuucagacuccaaauguuuua

SEQ ID NO: 384471 - RNA, 22 nt, Human
cugugaauuaaguauuguuauc

SEQ ID NO: 384472 - RNA, 22 nt, Human
uacauggugguggcacuugacu

SEQ ID NO: 384473 - RNA, 22 nt, Human
gcugggagcaaguacucaucuu

SEQ ID NO: 384474 - RNA, 22 nt, Human
agcaggagcccuuaucaccagg

SEQ ID NO: 384475 - RNA, 22 nt, Human
ggacacagcugcagccacaccc

SEQ ID NO: 384476 - RNA, 22 nt, Human
gggccugacugagagcuccuca

SEQ ID NO: 384477 - RNA, 22 nt, Human
ggcccacuugaaauggagcuca

SEQ ID NO: 384478 - RNA, 22 nt, Human
ucaggaugguccuuuaugagaa

SEQ ID NO: 384479 - RNA, 22 nt, Human
agccucugcuggcccuggcacu

SEQ ID NO: 384480 - RNA, 22 nt, Human
agaggggacagccaccugcccg

SEQ ID NO: 384481 - RNA, 22 nt, Human
guggccucaugucuauaaagag

SEQ ID NO: 384482 - RNA, 23 nt, Human
ggggaaguggcagugagugaggc

SEQ ID NO: 384483 - RNA, 22 nt, Human
uaauaucuacuucauagaguuu

SEQ ID NO: 384484 - RNA, 22 nt, Human
uuucagaaagcaucaucaaagu

SEQ ID NO: 384485 - RNA, 22 nt, Human
ugccugggggacuaaggccaaa

SEQ ID NO: 384486 - RNA, 23 nt, Human
uuacagaaaguaugcuuuuguuu

SEQ ID NO: 384487 - RNA, 22 nt, Human
uaugacaagguggaguaugagu

SEQ ID NO: 384488 - RNA, 22 nt, Human
cucagugugaaugcucaguaaa

SEQ ID NO: 384489 - RNA, 22 nt, Human
agcagcugucccuuaacaucag

SEQ ID NO: 384490 - RNA, 20 nt, Human
caggagggacauuucagcau

SEQ ID NO: 384491 - RNA, 22 nt, Human
aauaauuuuagcucagaguugu

SEQ ID NO: 384492 - RNA, 22 nt, Human
uaacaauaguguuugcuaguca

SEQ ID NO: 384493 - RNA, 22 nt, Human
ggcugccugaggcugaggcccg

SEQ ID NO: 384494 - RNA, 22 nt, Human
gauggcaggcaggugaguagag

SEQ ID NO: 384495 - RNA, 22 nt, Human
uuucacaugguacugccuguuu

SEQ ID NO: 384496 - RNA, 22 nt, Human
acagguggggaggcugagguuc

SEQ ID NO: 384497 - RNA, 22 nt, Human
uccucagggggccaacccagcc

SEQ ID NO: 384498 - RNA, 22 nt, Human
ccaggaguuugaggcugcagug

SEQ ID NO: 384499 - RNA, 22 nt, Human
cuugaaagauuuggccucugug

SEQ ID NO: 384500 - RNA, 19 nt, Human
ccagagacauuggcaucuu

SEQ ID NO: 384501 - RNA, 22 nt, Human
gccuggaguagcauggcaagcc

SEQ ID NO: 384502 - RNA, 22 nt, Human
uuccagauuucuacacaagacc

SEQ ID NO: 384503 - RNA, 22 nt, Human
cauagcuuagggguuaaacuca

SEQ ID NO: 384504 - RNA, 22 nt, Human
agaaauguggaucguuuuaaaa

SEQ ID NO: 384505 - RNA, 22 nt, Human
gcucccagcuggagccucaaca

SEQ ID NO: 384506 - RNA, 22 nt, Human
ugcuggaggggccugaccagga

SEQ ID NO: 384507 - RNA, 22 nt, Human
ccagacuguggaguuccuggug

SEQ ID NO: 384508 - RNA, 22 nt, Human
auuccaguuggguucuaauaca

SEQ ID NO: 384509 - RNA, 21 nt, Human
uaaauaauaaguugcugagau

SEQ ID NO: 384510 - RNA, 22 nt, Human
gccacacugcuucuuugagccu

SEQ ID NO: 384511 - RNA, 22 nt, Human
cacucaggguacaauggagggc

SEQ ID NO: 384512 - RNA, 22 nt, Human
ccaggcagagggaauagcaagu

SEQ ID NO: 384513 - RNA, 22 nt, Human
ugaaggcacuugccuaggggca

SEQ ID NO: 384514 - RNA, 22 nt, Human
ucucagaguuugaaucuggagu

SEQ ID NO: 384515 - RNA, 22 nt, Human
ucuuuacaucacaauuguaugg

SEQ ID NO: 384516 - RNA, 22 nt, Human
cauuuauucauuugcuagggcu

SEQ ID NO: 384517 - RNA, 20 nt, Human
agcccuguuuccuggagaga

SEQ ID NO: 384518 - RNA, 22 nt, Human
gcugggcuugguuucccugcuu

SEQ ID NO: 384519 - RNA, 22 nt, Human
cugagccaaaaagcagagcuug

SEQ ID NO: 384520 - RNA, 18 nt, Human
cucagggcaucagucugg

SEQ ID NO: 384521 - RNA, 22 nt, Human
auucagcauaaucaguagcuug

SEQ ID NO: 384522 - RNA, 18 nt, Human
acacacacaccuguguau

SEQ ID NO: 384523 - RNA, 22 nt, Human
uuuauuauucucuggagaaugu

SEQ ID NO: 384524 - RNA, 22 nt, Human
auucuaacacaugcucuaagaa

SEQ ID NO: 384525 - RNA, 22 nt, Human
cagggacagccuugggguggcg

SEQ ID NO: 384526 - RNA, 23 nt, Human
acugucugauauguuuuccauca

SEQ ID NO: 384527 - RNA, 19 nt, Human
uacauacuuauucuaaaag

SEQ ID NO: 384528 - RNA, 22 nt, Human
ugaggggagcccgcccuggacg

SEQ ID NO: 384529 - RNA, 22 nt, Human
ccugucucccuggcauggcuca

SEQ ID NO: 384530 - RNA, 22 nt, Human
guacauuucucuuguucuuauu

SEQ ID NO: 384531 - RNA, 22 nt, Human
ucaaagucacaacucucuaauu

SEQ ID NO: 384532 - RNA, 22 nt, Human
ccuccagcugccucagucucuu

SEQ ID NO: 384533 - RNA, 22 nt, Human
agugucugccagcugccaggug

SEQ ID NO: 384534 - RNA, 22 nt, Human
gaggccugucgcuaggccucug

SEQ ID NO: 384535 - RNA, 22 nt, Human
agcagcauauugugucuucaua

SEQ ID NO: 384536 - RNA, 22 nt, Human
uccucuucugcccaucagaggc

SEQ ID NO: 384537 - RNA, 22 nt, Human
uggagcuggaauuucugggccu

SEQ ID NO: 384538 - RNA, 22 nt, Human
uccuuaauauggaagaguucuc

SEQ ID NO: 384539 - RNA, 18 nt, Human
uggagcugagugcugugc

SEQ ID NO: 384540 - RNA, 20 nt, Human
gggguuggcuggcacaggga

SEQ ID NO: 384541 - RNA, 22 nt, Human
uaagauguuuugguuugauaag

SEQ ID NO: 384542 - RNA, 22 nt, Human
ccaggagccugggccaggcugg

SEQ ID NO: 384543 - RNA, 22 nt, Human
guuaauaaagguauagaaucag

SEQ ID NO: 384544 - RNA, 20 nt, Human
cugcuguguuauuguagaac

SEQ ID NO: 384545 - RNA, 22 nt, Human
ucagggcaagucucagaagguu

SEQ ID NO: 384546 - RNA, 22 nt, Human
ccaucccuucaccacagcagua

SEQ ID NO: 384547 - RNA, 22 nt, Human
ggcaugcugcguacagaugaac

SEQ ID NO: 384548 - RNA, 22 nt, Human
aaaugcacagagccuuagagau

SEQ ID NO: 384549 - RNA, 22 nt, Human
cugcccugucugcagccuggcu

SEQ ID NO: 384550 - RNA, 22 nt, Human
uauauguaagcuauguaagagu

SEQ ID NO: 384551 - RNA, 22 nt, Human
uuuccuuugcccaauacauguc

SEQ ID NO: 384552 - RNA, 22 nt, Human
caucagaauagcucuguggaua

SEQ ID NO: 384553 - RNA, 22 nt, Human
ucccagagcugauaagccuuua

SEQ ID NO: 384554 - RNA, 22 nt, Human
aggcugccucgugagcucgcug

SEQ ID NO: 384555 - RNA, 22 nt, Human
ggcagcugugaagugccucaca

SEQ ID NO: 384556 - RNA, 22 nt, Human
gcucaggacccaggugugaccu

SEQ ID NO: 384557 - RNA, 22 nt, Human
gccaggcuggucuugaacuccu

SEQ ID NO: 384558 - RNA, 22 nt, Human
cugucuguuuuaccuucuccag

SEQ ID NO: 384559 - RNA, 22 nt, Human
uuccuguccgcaauggccuggg

SEQ ID NO: 384560 - RNA, 18 nt, Human
acugugguuuauguguag

SEQ ID NO: 384561 - RNA, 22 nt, Human
ugacagaaugugacucucagau

SEQ ID NO: 384562 - RNA, 22 nt, Human
ccaucuccaguuuauucuuccu

SEQ ID NO: 384563 - RNA, 22 nt, Human
agaguucugcucuucucaguga

SEQ ID NO: 384564 - RNA, 22 nt, Human
cucucaggcuugggucguggca

SEQ ID NO: 384565 - RNA, 22 nt, Human
cuaaaugacuuccagugguuau

SEQ ID NO: 384566 - RNA, 22 nt, Human
ugaggcagaguaagauacauga

SEQ ID NO: 384567 - RNA, 18 nt, Human
aagaggaggagcagguug

SEQ ID NO: 384568 - RNA, 22 nt, Human
cuggagcugcuguccuugggug

SEQ ID NO: 384569 - RNA, 22 nt, Human
gcccaggaguuggaggcugcag

SEQ ID NO: 384570 - RNA, 22 nt, Human
ccuccaguacuccaguccagcg

SEQ ID NO: 384571 - RNA, 22 nt, Human
cuguuuaucuaggaguugcagg

SEQ ID NO: 384572 - RNA, 21 nt, Human
cucaaagaccaaaaguguaga

SEQ ID NO: 384573 - RNA, 22 nt, Human
cagugcccaagaugugccaugc

SEQ ID NO: 384574 - RNA, 22 nt, Human
cagccugcccuggaagcccagc

SEQ ID NO: 384575 - RNA, 22 nt, Human
uggugcaagucucugaggaggg

SEQ ID NO: 384576 - RNA, 21 nt, Human
aucagcaaaugccugucuccc

SEQ ID NO: 384577 - RNA, 21 nt, Human
auacacauacacauaaaugug

SEQ ID NO: 384578 - RNA, 22 nt, Human
agguuuaugccuuggagcuggg

SEQ ID NO: 384579 - RNA, 22 nt, Human
auuagggaaacugacuugucuc

SEQ ID NO: 384580 - RNA, 22 nt, Human
aaaagggacuacucucagcucc

SEQ ID NO: 384581 - RNA, 22 nt, Human
caauuucagucucagagaguuc

SEQ ID NO: 384582 - RNA, 22 nt, Human
gcagggagguuugcugaccugg

SEQ ID NO: 384583 - RNA, 22 nt, Human
agaaugcuccagagcugaaaga

SEQ ID NO: 384584 - RNA, 22 nt, Human
aaguguguugacugaauugggg

SEQ ID NO: 384585 - RNA, 22 nt, Human
ucugucugcaccuaagcacagu

SEQ ID NO: 384586 - RNA, 22 nt, Human
agggaccucuucuugcagcuga

SEQ ID NO: 384587 - RNA, 22 nt, Human
uacuaaauaguuuaauuccuca

SEQ ID NO: 384588 - RNA, 22 nt, Human
cacugcuuauaaauucuaggca

SEQ ID NO: 384589 - RNA, 22 nt, Human
augcugugccuucucugugcca

SEQ ID NO: 384590 - RNA, 22 nt, Human
ucagaggaaagggaacauaguc

SEQ ID NO: 384591 - RNA, 20 nt, Human
caggccucugggggcccugg

SEQ ID NO: 384592 - RNA, 22 nt, Human
gcccaggcuggagugcaguagc

SEQ ID NO: 384593 - RNA, 22 nt, Human
acauuuacagugcuagacaauc

SEQ ID NO: 384594 - RNA, 22 nt, Human
caugggcucuucuggacugcac

SEQ ID NO: 384595 - RNA, 22 nt, Human
cugcccugcuugaugacagcga

SEQ ID NO: 384596 - RNA, 22 nt, Human
aagcagggugucuugacccaug

SEQ ID NO: 384597 - RNA, 22 nt, Human
uuucuuucaauucuccuaaugc

SEQ ID NO: 384598 - RNA, 22 nt, Human
auguacauuuuccuaauguuuu

SEQ ID NO: 384599 - RNA, 22 nt, Human
aacagcagggggaccugcuggu

SEQ ID NO: 384600 - RNA, 22 nt, Human
uuacaaaguguuaugauaaaca

SEQ ID NO: 384601 - RNA, 22 nt, Human
uaugcacauuaucuaauccauu

SEQ ID NO: 384602 - RNA, 22 nt, Human
caucucaugggcaugccaagcu

SEQ ID NO: 384603 - RNA, 22 nt, Human
cagcucccaguggcagcuccuu

SEQ ID NO: 384604 - RNA, 22 nt, Human
ccagccuggguguuagaagaca

SEQ ID NO: 384605 - RNA, 22 nt, Human
cagcuggcuccaccucugggcu

SEQ ID NO: 384606 - RNA, 22 nt, Human
auuaggcauucugaaugagguc

SEQ ID NO: 384607 - RNA, 22 nt, Human
uaaaguucagugcaugaaugug

SEQ ID NO: 384608 - RNA, 22 nt, Human
auucuggauuaucaguccacca

SEQ ID NO: 384609 - RNA, 22 nt, Human
acuggcaggcugcuggccggcg

SEQ ID NO: 384610 - RNA, 22 nt, Human
cucaagacugaucgcaguggaa

SEQ ID NO: 384611 - RNA, 22 nt, Human
ggcucugcgcgguaaagugacu

SEQ ID NO: 384612 - RNA, 22 nt, Human
aaggccaugaccacuugcugug

SEQ ID NO: 384613 - RNA, 22 nt, Human
guagcccaccuggggagggcga

SEQ ID NO: 384614 - RNA, 22 nt, Human
ccaggcaggcagcguucucagg

SEQ ID NO: 384615 - RNA, 21 nt, Human
ugcagaggcacaaacaagccc

SEQ ID NO: 384616 - RNA, 22 nt, Human
aucuguucuucaaaauauuaca

SEQ ID NO: 384617 - RNA, 15 nt, Human
uccaggcauucauuc

SEQ ID NO: 384618 - RNA, 23 nt, Human
gguggcaggaguggaugcugagc

SEQ ID NO: 384619 - RNA, 22 nt, Human
uugcugaauugaauccuuuggu

SEQ ID NO: 384620 - RNA, 22 nt, Human
ucagaggagccaaaguucugag

SEQ ID NO: 384621 - RNA, 22 nt, Human
agucucagcaagcauggcuagu

SEQ ID NO: 384622 - RNA, 22 nt, Human
gagucugagaacugggcucagu

SEQ ID NO: 384623 - RNA, 22 nt, Human
gaggagagaugguagauugggu

SEQ ID NO: 384624 - RNA, 22 nt, Human
uaacagaaaggcucaggugcuc

SEQ ID NO: 384625 - RNA, 22 nt, Human
cuccuuccccuacucagcaucc

SEQ ID NO: 384626 - RNA, 22 nt, Human
ccugccugggcucacuugccag

SEQ ID NO: 384627 - RNA, 22 nt, Human
ggccugagucccaccuggcugu

SEQ ID NO: 384628 - RNA, 22 nt, Human
uggccacccagcugacgccuuc

SEQ ID NO: 384629 - RNA, 22 nt, Human
ugccaggagucaggccaggcag

SEQ ID NO: 384630 - RNA, 22 nt, Human
uauuucagguauggugugaaau

SEQ ID NO: 384631 - RNA, 22 nt, Human
ggcaggugcaccugagccaucu

SEQ ID NO: 384632 - RNA, 22 nt, Human
ucagccugcgucauggugacac

SEQ ID NO: 384633 - RNA, 22 nt, Human
cagugcugggcagaggagagcg

SEQ ID NO: 384634 - RNA, 22 nt, Human
ccacaggaccagaggagaucac

SEQ ID NO: 384635 - RNA, 22 nt, Human
ggcagggaaacagcugauccca

SEQ ID NO: 384636 - RNA, 22 nt, Human
ggauuugaauuguugaaaugau

SEQ ID NO: 384637 - RNA, 22 nt, Human
ccagugccugugggcauggugc

SEQ ID NO: 384638 - RNA, 20 nt, Human
ucugcccaccccggcuccca

SEQ ID NO: 384639 - RNA, 22 nt, Human
cccaugccuucugacucacagg

SEQ ID NO: 384640 - RNA, 22 nt, Human
caaguaaacaauaugugauuca

SEQ ID NO: 384641 - RNA, 22 nt, Human
gccugccucaaaaucccaguuc

SEQ ID NO: 384642 - RNA, 22 nt, Human
cacccugggcugggccuguuaa

SEQ ID NO: 384643 - RNA, 22 nt, Human
ccagggcugguggcugcagagg

SEQ ID NO: 384644 - RNA, 22 nt, Human
cagcucucuaaggucuugcuuu

SEQ ID NO: 384645 - RNA, 22 nt, Human
aggcagcauuugaauccagguc

SEQ ID NO: 384646 - RNA, 22 nt, Human
uggcagucggacuucuaucuca

SEQ ID NO: 384647 - RNA, 22 nt, Human
agccagugaugaagacucugga

SEQ ID NO: 384648 - RNA, 19 nt, Human
cugggagguguucagagaa

SEQ ID NO: 384649 - RNA, 22 nt, Human
ugcugccuccaacuccugggcu

SEQ ID NO: 384650 - RNA, 22 nt, Human
aggcucaguucuguggugagcc

SEQ ID NO: 384651 - RNA, 22 nt, Human
ucuuccaguguagacaucugcc

SEQ ID NO: 384652 - RNA, 22 nt, Human
aggcugcuggcaggcguggacg

SEQ ID NO: 384653 - RNA, 22 nt, Human
agcagcauagaagcugggagga

SEQ ID NO: 384654 - RNA, 22 nt, Human
caggcagccuucucgucucaca

SEQ ID NO: 384655 - RNA, 22 nt, Human
uggagagcaagucgcagacaug

SEQ ID NO: 384656 - RNA, 22 nt, Human
aagccauuuguuguccuucagg

SEQ ID NO: 384657 - RNA, 22 nt, Human
aguucaggcauaaggcaugaac

SEQ ID NO: 384658 - RNA, 17 nt, Human
agcuccugcccauggcu

SEQ ID NO: 384659 - RNA, 22 nt, Human
ggagcugcacgcucugaagccu

SEQ ID NO: 384660 - RNA, 22 nt, Human
uacagagauacucuagaucaaa

SEQ ID NO: 384661 - RNA, 22 nt, Human
acagaguaggugcugucgacug

SEQ ID NO: 384662 - RNA, 22 nt, Human
acacaccaugauuuauuuaccc

SEQ ID NO: 384663 - RNA, 22 nt, Human
cuccuggacauggagcggagga

SEQ ID NO: 384664 - RNA, 22 nt, Human
uucucauggugucuuuauacau

SEQ ID NO: 384665 - RNA, 22 nt, Human
cccaggcagagagcuggugagc

SEQ ID NO: 384666 - RNA, 22 nt, Human
acaguguguuggaggagacugu

SEQ ID NO: 384667 - RNA, 22 nt, Human
cacuggugacuucugagcugga

SEQ ID NO: 384668 - RNA, 22 nt, Human
uugaauaauuaauuacacucag

SEQ ID NO: 384669 - RNA, 22 nt, Human
uuccucucucuugccagaaugu

SEQ ID NO: 384670 - RNA, 22 nt, Human
cuuuccuagauggccaucuuuc

SEQ ID NO: 384671 - RNA, 22 nt, Human
ggcagggcaggaaagucaggaa

SEQ ID NO: 384672 - RNA, 22 nt, Human
gagaagguggaccugaaggagc

SEQ ID NO: 384673 - RNA, 22 nt, Human
uugaacaguuuugucagguuca

SEQ ID NO: 384674 - RNA, 22 nt, Human
aguaccaugcuuccugacuggu

SEQ ID NO: 384675 - RNA, 22 nt, Human
gaaggcuaaaggggcagagguu

SEQ ID NO: 384676 - RNA, 22 nt, Human
acugcuuuucuaagauucugug

SEQ ID NO: 384677 - RNA, 22 nt, Human
uucugcaggagcccuaguguau

SEQ ID NO: 384678 - RNA, 22 nt, Human
uucacagaguuauuuuuaugcu

SEQ ID NO: 384679 - RNA, 22 nt, Human
cccaggcugaguuagagguguc

SEQ ID NO: 384680 - RNA, 22 nt, Human
auacaacuuuaucuguaaugag

SEQ ID NO: 384681 - RNA, 22 nt, Human
uagggaugacgaaaggacagag

SEQ ID NO: 384682 - RNA, 22 nt, Human
cuugcugucuugcauuuagagc

SEQ ID NO: 384683 - RNA, 22 nt, Human
gggcugacucugcacugagcca

SEQ ID NO: 384684 - RNA, 22 nt, Human
uccaggcaaagggacuagcagg

SEQ ID NO: 384685 - RNA, 22 nt, Human
uucuaucauacuugaauacauu

SEQ ID NO: 384686 - RNA, 22 nt, Human
gggacccugggaggcuggcgca

SEQ ID NO: 384687 - RNA, 22 nt, Human
ucacaaaagcuuuugaauuugg

SEQ ID NO: 384688 - RNA, 22 nt, Human
cccaggccagaacuugguugcu

SEQ ID NO: 384689 - RNA, 22 nt, Human
ucccagcagagccagcaagccg

SEQ ID NO: 384690 - RNA, 22 nt, Human
aggagcuggguuccuuuggugg

SEQ ID NO: 384691 - RNA, 22 nt, Human
acacauauucauauguacuuac

SEQ ID NO: 384692 - RNA, 22 nt, Human
ucagaggugguaaaggacagca

SEQ ID NO: 384693 - RNA, 22 nt, Human
caguccaggccuggaggagcca

SEQ ID NO: 384694 - RNA, 22 nt, Human
uaaagccauacugaaagccacu

SEQ ID NO: 384695 - RNA, 22 nt, Human
acucaggaaaaauguagugaua

SEQ ID NO: 384696 - RNA, 22 nt, Human
ccaggccuggaccaugccaggg

SEQ ID NO: 384697 - RNA, 22 nt, Human
gccuggaguggacuuggccccu

SEQ ID NO: 384698 - RNA, 22 nt, Human
ccucacugcuauguguuugcuc

SEQ ID NO: 384699 - RNA, 19 nt, Human
agauuuaccucauauaguu

SEQ ID NO: 384700 - RNA, 22 nt, Human
ugacaguuaagguauacauuca

SEQ ID NO: 384701 - RNA, 22 nt, Human
cacagaaguuucauagucucga

SEQ ID NO: 384702 - RNA, 22 nt, Human
agauacauugaguuuccuccug

SEQ ID NO: 384703 - RNA, 22 nt, Human
ccugggcagggcuggacucuca

SEQ ID NO: 384704 - RNA, 19 nt, Human
accaggaguaucagagcug

SEQ ID NO: 384705 - RNA, 22 nt, Human
ugggcagaaaucaguaucagau

SEQ ID NO: 384706 - RNA, 22 nt, Human
agcaagcuaccuagauagucua

SEQ ID NO: 384707 - RNA, 22 nt, Human
ucuggccaggauggcaagacca

SEQ ID NO: 384708 - RNA, 22 nt, Human
uguucuucuagauugccuuuua

SEQ ID NO: 384709 - RNA, 22 nt, Human
aaucaagaaaaugaggauucuu

SEQ ID NO: 384710 - RNA, 22 nt, Human
uugcaccaaaugaguuaaaauu

SEQ ID NO: 384711 - RNA, 22 nt, Human
agccucucuguuagucacuggg

SEQ ID NO: 384712 - RNA, 22 nt, Human
gucuucuuuucagucugcuugu

SEQ ID NO: 384713 - RNA, 22 nt, Human
acagcagcaauagcagugacau

SEQ ID NO: 384714 - RNA, 22 nt, Human
ccugagguggcugcagcacugc

SEQ ID NO: 384715 - RNA, 22 nt, Human
gaggcucacugggcaaagacuc

SEQ ID NO: 384716 - RNA, 21 nt, Human
uuucugucucugccacuaguu

SEQ ID NO: 384717 - RNA, 22 nt, Human
gcucccacugcagcccugagcc

SEQ ID NO: 384718 - RNA, 20 nt, Human
cucucccagcacagcuuccu

SEQ ID NO: 384719 - RNA, 22 nt, Human
gauuucaaaaguagauccauca

SEQ ID NO: 384720 - RNA, 22 nt, Human
uggcaggaggaugaggcggcua

SEQ ID NO: 384721 - RNA, 22 nt, Human
cuggccucauagccaagcugug

SEQ ID NO: 384722 - RNA, 22 nt, Human
cuguaaaacacuguaguaucug

SEQ ID NO: 384723 - RNA, 22 nt, Human
aacuggauuuaggaacagagaa

SEQ ID NO: 384724 - RNA, 22 nt, Human
ccuggcugaaccaaugaagugg

SEQ ID NO: 384725 - RNA, 22 nt, Human
cuuaauuuuuguaguagaugga

SEQ ID NO: 384726 - RNA, 22 nt, Human
ucugggaaaugcuguuccuugu

SEQ ID NO: 384727 - RNA, 22 nt, Human
gcaccugguuuauauaaucaua

SEQ ID NO: 384728 - RNA, 18 nt, Human
aggcuucuuggcucaguc

SEQ ID NO: 384729 - RNA, 22 nt, Human
agcagccagagaaugaugcagu

SEQ ID NO: 384730 - RNA, 21 nt, Human
aggcucagagaucaaacagua

SEQ ID NO: 384731 - RNA, 22 nt, Human
auacacauguguaugugcaugc

SEQ ID NO: 384732 - RNA, 22 nt, Human
cucacaggcaucucaucaggcu

SEQ ID NO: 384733 - RNA, 19 nt, Human
cuggcucuuggguggagga

SEQ ID NO: 384734 - RNA, 22 nt, Human
ucuauaaagggccagauaguag

SEQ ID NO: 384735 - RNA, 22 nt, Human
gggcugagucugcugccuguca

SEQ ID NO: 384736 - RNA, 22 nt, Human
gccagccuucuguggccugcaa

SEQ ID NO: 384737 - RNA, 22 nt, Human
ugggaauggaugcuaagugcua

SEQ ID NO: 384738 - RNA, 22 nt, Human
guccaugacugugacucacaug

SEQ ID NO: 384739 - RNA, 22 nt, Human
uccauucuaugcuuacauuuau

SEQ ID NO: 384740 - RNA, 23 nt, Human
uccaggcaugagcucuggaugga

SEQ ID NO: 384741 - RNA, 22 nt, Human
auguacacaugcaugcaugugc

SEQ ID NO: 384742 - RNA, 22 nt, Human
agcauuuaauuacaguuuaauu

SEQ ID NO: 384743 - RNA, 22 nt, Human
ugaaaaaccucaguccgcuuua

SEQ ID NO: 384744 - RNA, 22 nt, Human
cucagaauuuagggcucugagg

SEQ ID NO: 384745 - RNA, 22 nt, Human
agaauucuuggugguuagaaua

SEQ ID NO: 384746 - RNA, 22 nt, Human
agaugggcgcccuggacugagg

SEQ ID NO: 384747 - RNA, 22 nt, Human
ccuguucaauauucuuccuugu

SEQ ID NO: 384748 - RNA, 22 nt, Human
acuggcagcagcagcccuuggg

SEQ ID NO: 384749 - RNA, 22 nt, Human
cccagggcccuggacagcuaca

SEQ ID NO: 384750 - RNA, 22 nt, Human
ggccucugggguccugagccca

SEQ ID NO: 384751 - RNA, 22 nt, Human
uggcagagagacucuccuugau

SEQ ID NO: 384752 - RNA, 22 nt, Human
aaguuacacauuuucauuguaa

SEQ ID NO: 384753 - RNA, 22 nt, Human
ucucugagcccagugucccccu

SEQ ID NO: 384754 - RNA, 17 nt, Human
gcuuuggaaggguagac

SEQ ID NO: 384755 - RNA, 22 nt, Human
gcucacuggccugaagaggacg

SEQ ID NO: 384756 - RNA, 22 nt, Human
ugcuuuauuuuaaauaugccau

SEQ ID NO: 384757 - RNA, 22 nt, Human
uagcagggaaggugugcugagc

SEQ ID NO: 384758 - RNA, 22 nt, Human
ccccagcucagugcagggacau

SEQ ID NO: 384759 - RNA, 22 nt, Human
uacaaagucaccagcuucuugc

SEQ ID NO: 384760 - RNA, 22 nt, Human
cagcagaggugguucacauugu

SEQ ID NO: 384761 - RNA, 22 nt, Human
acagcuuuguuuucccugcuga

SEQ ID NO: 384762 - RNA, 22 nt, Human
gucaaacaaauuaacauaucca

SEQ ID NO: 384763 - RNA, 22 nt, Human
gguggcagcgucuaucugacau

SEQ ID NO: 384764 - RNA, 22 nt, Human
gaaaucugcggugaggccugag

SEQ ID NO: 384765 - RNA, 22 nt, Human
cacaucagguagaccuacagag

SEQ ID NO: 384766 - RNA, 22 nt, Human
gucaugccagcggagcucggga

SEQ ID NO: 384767 - RNA, 23 nt, Human
caauuucauaugauucuaccuaa

SEQ ID NO: 384768 - RNA, 22 nt, Human
acugucuccucaucaugccugg

SEQ ID NO: 384769 - RNA, 22 nt, Human
uuuaagauucaguaaggcaaac

SEQ ID NO: 384770 - RNA, 22 nt, Human
gcuggcuguguuucaucucuga

SEQ ID NO: 384771 - RNA, 22 nt, Human
caaagauuuuagaauuugcaau

SEQ ID NO: 384772 - RNA, 22 nt, Human
acugccuugaaagauuguugag

SEQ ID NO: 384773 - RNA, 22 nt, Human
agagccuugaagaucuggaaaa

SEQ ID NO: 384774 - RNA, 22 nt, Human
ugagccaguggaagauggcagu

SEQ ID NO: 384775 - RNA, 22 nt, Human
cccuggaggcaaagguugcagu

SEQ ID NO: 384776 - RNA, 22 nt, Human
ccugccugacagagaagguuca

SEQ ID NO: 384777 - RNA, 22 nt, Human
uucccaauauucugcuuuuaug

SEQ ID NO: 384778 - RNA, 22 nt, Human
aaaauuauggaguaucccaaag

SEQ ID NO: 384779 - RNA, 22 nt, Human
gcuggcaggguucucacugaaa

SEQ ID NO: 384780 - RNA, 22 nt, Human
ugggcugcuuccucagcugaga

SEQ ID NO: 384781 - RNA, 21 nt, Human
uuacuuuugcaccaaccuaau

SEQ ID NO: 384782 - RNA, 22 nt, Human
ggcucaggacacagugguuuag

SEQ ID NO: 384783 - RNA, 22 nt, Human
caggugggcguggcgagaaggc

SEQ ID NO: 384784 - RNA, 22 nt, Human
gcuucuauuauuuggagcugag

SEQ ID NO: 384785 - RNA, 22 nt, Human
aggaagcuggugugaggaugaa

SEQ ID NO: 384786 - RNA, 21 nt, Human
ugaaaguuggagucaaaugua

SEQ ID NO: 384787 - RNA, 22 nt, Human
cuuaauuacuguccaauaugca

SEQ ID NO: 384788 - RNA, 22 nt, Human
uacaugaacaaaauagcagaaa

SEQ ID NO: 384789 - RNA, 22 nt, Human
accuggccauccagcuggcauc

SEQ ID NO: 384790 - RNA, 22 nt, Human
gcugccuuuuaaagccucgcuu

SEQ ID NO: 384791 - RNA, 22 nt, Human
agagguagagguugcagugagc

SEQ ID NO: 384792 - RNA, 22 nt, Human
aggaagcuagagccaccggacu

SEQ ID NO: 384793 - RNA, 22 nt, Human
ccacacagggggaugaguuauu

SEQ ID NO: 384794 - RNA, 22 nt, Human
auacuguuucucuucuacauga

SEQ ID NO: 384795 - RNA, 22 nt, Human
gacaugcaugaaugcaggucuc

SEQ ID NO: 384796 - RNA, 22 nt, Human
gcagagaggaaugaagccaucc

SEQ ID NO: 384797 - RNA, 22 nt, Human
agcugggucuugggccaggaga

SEQ ID NO: 384798 - RNA, 22 nt, Human
cugcugagguccuugcucagac

SEQ ID NO: 384799 - RNA, 22 nt, Human
cccugccuuguuggagccuaug

SEQ ID NO: 384800 - RNA, 22 nt, Human
gcagccacccucaaggcugaau

SEQ ID NO: 384801 - RNA, 22 nt, Human
aaguucuacuguggguaaaaug

SEQ ID NO: 384802 - RNA, 22 nt, Human
aagaagagaacuggcauccuaa

SEQ ID NO: 384803 - RNA, 22 nt, Human
cauauuugguauaacuuaagca

SEQ ID NO: 384804 - RNA, 22 nt, Human
augugaaagagguguucagugg

SEQ ID NO: 384805 - RNA, 22 nt, Human
ugcugcucuguaaagugaugag

SEQ ID NO: 384806 - RNA, 22 nt, Human
cccucugcaggcuggaccugcc

SEQ ID NO: 384807 - RNA, 22 nt, Human
cacugcauggaugauggcugua

SEQ ID NO: 384808 - RNA, 19 nt, Human
ucucacaucagcuccuagc

SEQ ID NO: 384809 - RNA, 22 nt, Human
gcuugaaaauucauagguauuu

SEQ ID NO: 384810 - RNA, 18 nt, Human
uacaugcauaaaugaagc

SEQ ID NO: 384811 - RNA, 22 nt, Human
uucucagauauuuacugagcau

SEQ ID NO: 384812 - RNA, 22 nt, Human
cagaggaagcuggguguggagu

SEQ ID NO: 384813 - RNA, 22 nt, Human
uguuuauaccuugguauaacca

SEQ ID NO: 384814 - RNA, 22 nt, Human
augccagucaaagaagaugaca

SEQ ID NO: 384815 - RNA, 22 nt, Human
cugacccauauaagaguggagg

SEQ ID NO: 384816 - RNA, 20 nt, Human
gccuggcacccggggcuggc

SEQ ID NO: 384817 - RNA, 22 nt, Human
acccagcaaagauaaacuuaug

SEQ ID NO: 384818 - RNA, 22 nt, Human
ggagggaaugucuagcauucuu

SEQ ID NO: 384819 - RNA, 20 nt, Human
ccagaagagaugaucaucca

SEQ ID NO: 384820 - RNA, 21 nt, Human
cccagggaagccgcagucacc

SEQ ID NO: 384821 - RNA, 22 nt, Human
uucaggauccccuugaugggcu

SEQ ID NO: 384822 - RNA, 22 nt, Human
uucagaaagugaaucuuguuau

SEQ ID NO: 384823 - RNA, 22 nt, Human
aggcagccaaucagaggcugac

SEQ ID NO: 384824 - RNA, 22 nt, Human
ucaggcagaccaccgugggcag

SEQ ID NO: 384825 - RNA, 22 nt, Human
cugucccuucauuauucacuac

SEQ ID NO: 384826 - RNA, 22 nt, Human
uggauaaacucacuguaaguug

SEQ ID NO: 384827 - RNA, 22 nt, Human
gccaggcagagccccgugcagc

SEQ ID NO: 384828 - RNA, 22 nt, Human
aaugcuagugugauauguaagg

SEQ ID NO: 384829 - RNA, 22 nt, Human
cugcuuuggacaacuauucuug

SEQ ID NO: 384830 - RNA, 22 nt, Human
aggaggccgauuucagaggucg

SEQ ID NO: 384831 - RNA, 22 nt, Human
acacagggcaaugcuuugaccu

SEQ ID NO: 384832 - RNA, 22 nt, Human
aaguucaaguaguguuacaugg

SEQ ID NO: 384833 - RNA, 22 nt, Human
cacagcugugagaagggagccu

SEQ ID NO: 384834 - RNA, 22 nt, Human
ugaaucaguauaaauucucaaa

SEQ ID NO: 384835 - RNA, 22 nt, Human
guggccucuguuggcuccuagg

SEQ ID NO: 384836 - RNA, 22 nt, Human
gacaggguacgggcuaggcaca

SEQ ID NO: 384837 - RNA, 22 nt, Human
cucagaaguucagccuagagua

SEQ ID NO: 384838 - RNA, 22 nt, Human
ggccugagaaccauggggccaa

SEQ ID NO: 384839 - RNA, 19 nt, Human
agggcuaggcacauagggc

SEQ ID NO: 384840 - RNA, 22 nt, Human
ugggcugcccugaugguccuca

SEQ ID NO: 384841 - RNA, 22 nt, Human
cagaggugcauacaggucauua

SEQ ID NO: 384842 - RNA, 22 nt, Human
auuuucagagacaucuggacuu

SEQ ID NO: 384843 - RNA, 22 nt, Human
agaucauaugaaaaauuucaag

SEQ ID NO: 384844 - RNA, 22 nt, Human
gcagagccgugaauggauuuca

SEQ ID NO: 384845 - RNA, 22 nt, Human
ucucccagaaguccucaguaca

SEQ ID NO: 384846 - RNA, 22 nt, Human
uacauaauugucuuuguccuca

SEQ ID NO: 384847 - RNA, 22 nt, Human
cugcagcugucucuacugggca

SEQ ID NO: 384848 - RNA, 22 nt, Human
gcugccuggcuuuaguccacuu

SEQ ID NO: 384849 - RNA, 22 nt, Human
uggggccuggucagagcugcac

SEQ ID NO: 384850 - RNA, 22 nt, Human
auaaagcaucuagucugucacu

SEQ ID NO: 384851 - RNA, 22 nt, Human
aauuccaggaugcaggaggugc

SEQ ID NO: 384852 - RNA, 22 nt, Human
auacuuaacuguggagucauug

SEQ ID NO: 384853 - RNA, 22 nt, Human
ucaagagagugcugcuuggggu

SEQ ID NO: 384854 - RNA, 22 nt, Human
aguccaugguucugacucaucu

SEQ ID NO: 384855 - RNA, 22 nt, Human
uuugaaauuaagauauugucca

SEQ ID NO: 384856 - RNA, 22 nt, Human
auauaguuggguuucauucuac

SEQ ID NO: 384857 - RNA, 22 nt, Human
acuguucacagauuagucgaug

SEQ ID NO: 384858 - RNA, 22 nt, Human
uuagaaaggaaucuucauuuca

SEQ ID NO: 384859 - RNA, 22 nt, Human
ggcaaaaaccauaauuacuuuu

SEQ ID NO: 384860 - RNA, 22 nt, Human
uauucacaaaaugagguccuca

SEQ ID NO: 384861 - RNA, 19 nt, Human
cagcaauaaugccagaugg

SEQ ID NO: 384862 - RNA, 22 nt, Human
ugcuuuauggauuuguguccug

SEQ ID NO: 384863 - RNA, 22 nt, Human
ccagcacugcucucagacugag

SEQ ID NO: 384864 - RNA, 22 nt, Human
guuguuuuuguucucuauagcu

SEQ ID NO: 384865 - RNA, 20 nt, Human
gucugaggagcagugggaaa

SEQ ID NO: 384866 - RNA, 22 nt, Human
uuauuacacugaaagaauugcg

SEQ ID NO: 384867 - RNA, 22 nt, Human
aaguuauaucaucucauugacg

SEQ ID NO: 384868 - RNA, 22 nt, Human
ucccagccauuccuuuaggugu

SEQ ID NO: 384869 - RNA, 22 nt, Human
cuugggaaugcuaacagaugac

SEQ ID NO: 384870 - RNA, 18 nt, Human
uggcagagugucuguucu

SEQ ID NO: 384871 - RNA, 22 nt, Human
gcaggcaguuugcuuuucccuc

SEQ ID NO: 384872 - RNA, 22 nt, Human
caggcugggcuccggagauaaa

SEQ ID NO: 384873 - RNA, 22 nt, Human
cagccaucaguaaagacagcuu

SEQ ID NO: 384874 - RNA, 22 nt, Human
gagagaagaaagccaugguccu

SEQ ID NO: 384875 - RNA, 22 nt, Human
acaguggaaagaacauggauuu

SEQ ID NO: 384876 - RNA, 22 nt, Human
uugauggcugugauuuacucag

SEQ ID NO: 384877 - RNA, 22 nt, Human
gaaagccauagcccagcuuuac

SEQ ID NO: 384878 - RNA, 22 nt, Human
ugaaggcagcaugcacacuagu

SEQ ID NO: 384879 - RNA, 22 nt, Human
cccaggagagaggccaguuggc

SEQ ID NO: 384880 - RNA, 22 nt, Human
uggcuggcuagugggcaggauu

SEQ ID NO: 384881 - RNA, 22 nt, Human
cuguccuccggccaccuacagu

SEQ ID NO: 384882 - RNA, 22 nt, Human
cagucacauggaugauggauag

SEQ ID NO: 384883 - RNA, 22 nt, Human
uuccaguugguagaauguaagg

SEQ ID NO: 384884 - RNA, 22 nt, Human
uccaggaguggggcagaggucu

SEQ ID NO: 384885 - RNA, 22 nt, Human
ggcgcacaaugugcagguuugu

SEQ ID NO: 384886 - RNA, 22 nt, Human
caugcuuucuguccaaauguua

SEQ ID NO: 384887 - RNA, 22 nt, Human
uaauuucagugggcucugggcu

SEQ ID NO: 384888 - RNA, 22 nt, Human
uuccaaacugccaauucagaag

SEQ ID NO: 384889 - RNA, 22 nt, Human
aggcagcagagguugaggaaag

SEQ ID NO: 384890 - RNA, 22 nt, Human
ucccagagugagccaggggcag

SEQ ID NO: 384891 - RNA, 22 nt, Human
ucauacaucuuguauaucuauc

SEQ ID NO: 384892 - RNA, 22 nt, Human
ccauggccgccgcugcucagga

SEQ ID NO: 384893 - RNA, 22 nt, Human
ugaguccauugauggauaguga

SEQ ID NO: 384894 - RNA, 22 nt, Human
gaaaauguuuccuguuauuugc

SEQ ID NO: 384895 - RNA, 22 nt, Human
gcugucaguuuuacccacagac

SEQ ID NO: 384896 - RNA, 22 nt, Human
aggcaagcauugggaacagggc

SEQ ID NO: 384897 - RNA, 22 nt, Human
uuuaggcagaacauggacuuug

SEQ ID NO: 384898 - RNA, 22 nt, Human
cucccacuccuggcucaccaca

SEQ ID NO: 384899 - RNA, 22 nt, Human
agcagacaacccagaugaccca

SEQ ID NO: 384900 - RNA, 22 nt, Human
agcuaggacagguagagauggg

SEQ ID NO: 384901 - RNA, 22 nt, Human
agugagaguauuaaugugaacu

SEQ ID NO: 384902 - RNA, 22 nt, Human
ugggcagagaguagaggcaacg

SEQ ID NO: 384903 - RNA, 22 nt, Human
aucaggauggguuuggcuuagg

SEQ ID NO: 384904 - RNA, 22 nt, Human
cagggcucccuugcaaggaggg

SEQ ID NO: 384905 - RNA, 22 nt, Human
agggaguuagaaauccaggaua

SEQ ID NO: 384906 - RNA, 22 nt, Human
aaaggucaaaaucgugacauug

SEQ ID NO: 384907 - RNA, 22 nt, Human
caugcuuuuuucuaguauaaau

SEQ ID NO: 384908 - RNA, 22 nt, Human
ucucauguauugcccuggugug

SEQ ID NO: 384909 - RNA, 22 nt, Human
gcagugcuaaguagcuggccca

SEQ ID NO: 384910 - RNA, 17 nt, Human
gcugagaggcagcacag

SEQ ID NO: 384911 - RNA, 22 nt, Human
uccuucagaaaaccucagucuu

SEQ ID NO: 384912 - RNA, 17 nt, Human
gaggacagggaaguagg

SEQ ID NO: 384913 - RNA, 22 nt, Human
guuucauacagauuauucaugg

SEQ ID NO: 384914 - RNA, 22 nt, Human
ucacaguuauagucuguagaau

SEQ ID NO: 384915 - RNA, 22 nt, Human
aucauaaaccacuuuguaaucu

SEQ ID NO: 384916 - RNA, 22 nt, Human
ucaagagauugaauaauaacug

SEQ ID NO: 384917 - RNA, 22 nt, Human
auuucacaucuaucucagauuu

SEQ ID NO: 384918 - RNA, 22 nt, Human
ugaaaucugcaugcaaaguccu

SEQ ID NO: 384919 - RNA, 22 nt, Human
ugaaggccucugguacaugcca

SEQ ID NO: 384920 - RNA, 22 nt, Human
gagggcugauguugccaccuca

SEQ ID NO: 384921 - RNA, 22 nt, Human
uauuauguagaguaaggguuaa

SEQ ID NO: 384922 - RNA, 22 nt, Human
aaggccagaguacuagaggcug

SEQ ID NO: 384923 - RNA, 22 nt, Human
ugugcauguauugauuuguacc

SEQ ID NO: 384924 - RNA, 22 nt, Human
auuuagaagcuaauuuuucaga

SEQ ID NO: 384925 - RNA, 22 nt, Human
gggcuggagccagcuguggcug

SEQ ID NO: 384926 - RNA, 22 nt, Human
uccugcaguuacaucccagcca

SEQ ID NO: 384927 - RNA, 22 nt, Human
ccuggcugugcauugccggccc

SEQ ID NO: 384928 - RNA, 21 nt, Human
uuugagaauuggucagagugc

SEQ ID NO: 384929 - RNA, 22 nt, Human
ugaaacaagauccacagacuug

SEQ ID NO: 384930 - RNA, 22 nt, Human
uccauuuuucaugacuccucaa

SEQ ID NO: 384931 - RNA, 22 nt, Human
ugcagggcagcuagggagcuuu

SEQ ID NO: 384932 - RNA, 22 nt, Human
cuuauguacacacauauauugu

SEQ ID NO: 384933 - RNA, 22 nt, Human
cugccuguuuucugauagauuu

SEQ ID NO: 384934 - RNA, 20 nt, Human
aggaggcauagucuggaaag

SEQ ID NO: 384935 - RNA, 22 nt, Human
uaaccauauuuuccauuaaguu

SEQ ID NO: 384936 - RNA, 22 nt, Human
aauucuaaauguaauuuagaau

SEQ ID NO: 384937 - RNA, 22 nt, Human
agcauuuagucuuuauugcagc

SEQ ID NO: 384938 - RNA, 22 nt, Human
uggcuuccuccagagcaggagg

SEQ ID NO: 384939 - RNA, 22 nt, Human
agagccaggcaggcaauguuga

SEQ ID NO: 384940 - RNA, 22 nt, Human
uccaucaccauuucugcgagcu

SEQ ID NO: 384941 - RNA, 22 nt, Human
caaagcaaggcucaguuugaac

SEQ ID NO: 384942 - RNA, 22 nt, Human
gcacugaacuuuaaucauuucu

SEQ ID NO: 384943 - RNA, 22 nt, Human
gcagggcucaacaggacacccc

SEQ ID NO: 384944 - RNA, 22 nt, Human
ugggacaguuguccuccacucu

SEQ ID NO: 384945 - RNA, 22 nt, Human
aauguuaauguguuugcuuaug

SEQ ID NO: 384946 - RNA, 22 nt, Human
aguuuuucuccccuggcuucau

SEQ ID NO: 384947 - RNA, 22 nt, Human
caguuucucucaauaagcaucg

SEQ ID NO: 384948 - RNA, 22 nt, Human
aacuggauuaacuggcucaaau

SEQ ID NO: 384949 - RNA, 22 nt, Human
uucucagaggagucgggagcug

SEQ ID NO: 384950 - RNA, 22 nt, Human
gaucagaauucuuguguguuuc

SEQ ID NO: 384951 - RNA, 22 nt, Human
uagaaacaucagcuaaccaaaa

SEQ ID NO: 384952 - RNA, 22 nt, Human
gcuggcucuucaguggagauag

SEQ ID NO: 384953 - RNA, 22 nt, Human
acuuucucaggaauucacagac

SEQ ID NO: 384954 - RNA, 22 nt, Human
uggcagggccugcucaucaucc

SEQ ID NO: 384955 - RNA, 22 nt, Human
gcagcugcuggaaguuccugcc

SEQ ID NO: 384956 - RNA, 22 nt, Human
ccugcagguugcagaggcggaa

SEQ ID NO: 384957 - RNA, 22 nt, Human
aucuggcugagcgaggcccaca

SEQ ID NO: 384958 - RNA, 22 nt, Human
uuagcuaaacuguaacuagaau

SEQ ID NO: 384959 - RNA, 22 nt, Human
caguccuuagauuuuacugcca

SEQ ID NO: 384960 - RNA, 22 nt, Human
cuggcaggaagaggaaagguca

SEQ ID NO: 384961 - RNA, 22 nt, Human
caguacuuuucuggcuuucuac

SEQ ID NO: 384962 - RNA, 22 nt, Human
uguccuuuaugaaaugguguuu

SEQ ID NO: 384963 - RNA, 22 nt, Human
uagcugugagcacccaggcugu

SEQ ID NO: 384964 - RNA, 22 nt, Human
ucucugagcccaauguagcaau

SEQ ID NO: 384965 - RNA, 22 nt, Human
caguuuuugccauuaagaguaa

SEQ ID NO: 384966 - RNA, 22 nt, Human
auauccaagaaacaauuaauuc

SEQ ID NO: 384967 - RNA, 23 nt, Human
ucuauacauacugcagccucugg

SEQ ID NO: 384968 - RNA, 22 nt, Human
uccugcagcauccgucgucugu

SEQ ID NO: 384969 - RNA, 22 nt, Human
gcuuggaaguaggauugggaga

SEQ ID NO: 384970 - RNA, 22 nt, Human
aaguucuaauuuugcauucagg

SEQ ID NO: 384971 - RNA, 22 nt, Human
ucaaggcuaaacuuucagagua

SEQ ID NO: 384972 - RNA, 21 nt, Human
ucacuagugccuucugucauu

SEQ ID NO: 384973 - RNA, 22 nt, Human
uguggcaggcaagauguacaga

SEQ ID NO: 384974 - RNA, 20 nt, Human
aagcaauauagugcaaaugu

SEQ ID NO: 384975 - RNA, 22 nt, Human
gccagagccacuuuugggugau

SEQ ID NO: 384976 - RNA, 22 nt, Human
ucacaauuuggauacagcuaug

SEQ ID NO: 384977 - RNA, 22 nt, Human
uaauuucacaguucaacgcaca

SEQ ID NO: 384978 - RNA, 22 nt, Human
uuuagggacaagggucuggggu

SEQ ID NO: 384979 - RNA, 22 nt, Human
cugaggccagcugcagagcucu

SEQ ID NO: 384980 - RNA, 22 nt, Human
uucauucugcaguucucagcuc

SEQ ID NO: 384981 - RNA, 22 nt, Human
cuguguccugcgucaagccaau

SEQ ID NO: 384982 - RNA, 22 nt, Human
uucaggagcuggcugcgaagga

SEQ ID NO: 384983 - RNA, 22 nt, Human
agaggaggccaggcccacaccu

SEQ ID NO: 384984 - RNA, 22 nt, Human
gaggcaguguugaaaaggagag

SEQ ID NO: 384985 - RNA, 22 nt, Human
gggcugggauggcuugaagauu

SEQ ID NO: 384986 - RNA, 22 nt, Human
auucauaacggcaaaugucacc

SEQ ID NO: 384987 - RNA, 22 nt, Human
cagcaauaaugucuacaaaucu

SEQ ID NO: 384988 - RNA, 22 nt, Human
ugcuuuaaauaugaauuagcau

SEQ ID NO: 384989 - RNA, 22 nt, Human
uacauucuacuuuuucacuccc

SEQ ID NO: 384990 - RNA, 22 nt, Human
ugagaaaagguugagaugauaa

SEQ ID NO: 384991 - RNA, 22 nt, Human
ggcugccauaacagaguaccac

SEQ ID NO: 384992 - RNA, 22 nt, Human
cuggacagaaaaggccacugga

SEQ ID NO: 384993 - RNA, 22 nt, Human
ggggauggauuccgggucccug

SEQ ID NO: 384994 - RNA, 22 nt, Human
cggggcugcucguccuccugug

SEQ ID NO: 384995 - RNA, 22 nt, Human
gagcugggacauggguccucuc

SEQ ID NO: 384996 - RNA, 22 nt, Human
uccagcuuauagguagauuuaa

SEQ ID NO: 384997 - RNA, 22 nt, Human
ucagugugaguaccaugcucag

SEQ ID NO: 384998 - RNA, 22 nt, Human
agagcagguggcaacucuggga

SEQ ID NO: 384999 - RNA, 22 nt, Human
gcgagggcacgcgguugaaggc

SEQ ID NO: 385000 - RNA, 22 nt, Human
cugccaggcacgugcagcauca

SEQ ID NO: 385001 - RNA, 22 nt, Human
ccagagaggcaaaacuccuucc

SEQ ID NO: 385002 - RNA, 18 nt, Human
ugucucaggcugaaacag

SEQ ID NO: 385003 - RNA, 22 nt, Human
gccagccugugggggcucugug

SEQ ID NO: 385004 - RNA, 21 nt, Human
ggcuccugcuuugugaggggc

SEQ ID NO: 385005 - RNA, 22 nt, Human
caggcccagcccagcccuucga

SEQ ID NO: 385006 - RNA, 22 nt, Human
agggugucagccacggaauggg

SEQ ID NO: 385007 - RNA, 22 nt, Human
cccauuuagauaacaguucaaa

SEQ ID NO: 385008 - RNA, 22 nt, Human
guccucuggccuuucccaggac

SEQ ID NO: 385009 - RNA, 22 nt, Human
ucuggcuccacucugugcaugc

SEQ ID NO: 385010 - RNA, 22 nt, Human
gugagggguggcugagcaguuu

SEQ ID NO: 385011 - RNA, 22 nt, Human
uggcugagggcacuaugaagcc

SEQ ID NO: 385012 - RNA, 22 nt, Human
uaagaaguacaaaaauuuucug

SEQ ID NO: 385013 - RNA, 19 nt, Human
gaggcgaggcgugcaggag

SEQ ID NO: 385014 - RNA, 22 nt, Human
ccacugucagaggggcugugcc

SEQ ID NO: 385015 - RNA, 22 nt, Human
gcagaggagcaagcuggacacc

SEQ ID NO: 385016 - RNA, 22 nt, Human
ucaagaaagggcuucaccagga

SEQ ID NO: 385017 - RNA, 22 nt, Human
caguggcagagaacagagaccu

SEQ ID NO: 385018 - RNA, 22 nt, Human
uauuacaauuuacauugcacuu

SEQ ID NO: 385019 - RNA, 22 nt, Human
gccucugcucucagguagccuc

SEQ ID NO: 385020 - RNA, 22 nt, Human
ggcagcuuuuaucccugacaga

SEQ ID NO: 385021 - RNA, 22 nt, Human
ccucucaucauuaucgcuuugu

SEQ ID NO: 385022 - RNA, 22 nt, Human
uuccuguauuuugcgaauuuuc

SEQ ID NO: 385023 - RNA, 22 nt, Human
uacucagagucauugcccuucu

SEQ ID NO: 385024 - RNA, 22 nt, Human
ugauugacuuuagaauagcacu

SEQ ID NO: 385025 - RNA, 19 nt, Human
aggucauugauagugcagg

SEQ ID NO: 385026 - RNA, 22 nt, Human
caguguggcugagacagaggcu

SEQ ID NO: 385027 - RNA, 22 nt, Human
uugcauugaucccagcuugggc

SEQ ID NO: 385028 - RNA, 22 nt, Human
uccaggcauguggccaguacuc

SEQ ID NO: 385029 - RNA, 22 nt, Human
ccagcugucugguuccagagcc

SEQ ID NO: 385030 - RNA, 19 nt, Human
ugucucugaaagaugagcu

SEQ ID NO: 385031 - RNA, 22 nt, Human
ccugggaggcggagguugcagg

SEQ ID NO: 385032 - RNA, 22 nt, Human
caaauacuaaacauaagauuuu

SEQ ID NO: 385033 - RNA, 22 nt, Human
auggcagggaccaagcugucau

SEQ ID NO: 385034 - RNA, 22 nt, Human
uccugaggcucacuuugaaugu

SEQ ID NO: 385035 - RNA, 22 nt, Human
caaaagcaguucuaucugaguu

SEQ ID NO: 385036 - RNA, 20 nt, Human
ccugucuggagacaaagaga

SEQ ID NO: 385037 - RNA, 22 nt, Human
uucauacuguguuuccaaguuu

SEQ ID NO: 385038 - RNA, 22 nt, Human
ucccuuaaaacucauguguugu

SEQ ID NO: 385039 - RNA, 22 nt, Human
cagagcugcacauucuaugaug

SEQ ID NO: 385040 - RNA, 22 nt, Human
aaucuguuuaguucugcguaug

SEQ ID NO: 385041 - RNA, 23 nt, Human
aggcgagcucuucuccagcacgu

SEQ ID NO: 385042 - RNA, 22 nt, Human
ugcccagggauaagccuagaga

SEQ ID NO: 385043 - RNA, 22 nt, Human
acauuaccuggcauuugaucuu

SEQ ID NO: 385044 - RNA, 22 nt, Human
cugucucagcaggaagucauca

SEQ ID NO: 385045 - RNA, 22 nt, Human
ugaaauagacacagugcuauac

SEQ ID NO: 385046 - RNA, 23 nt, Human
auauuagggagauuagcccucua

SEQ ID NO: 385047 - RNA, 22 nt, Human
agugcuccuauggaucaguugu

SEQ ID NO: 385048 - RNA, 22 nt, Human
agcugggagcagagccacagcc

SEQ ID NO: 385049 - RNA, 22 nt, Human
uuugaagauuaugccagaguga

SEQ ID NO: 385050 - RNA, 20 nt, Human
gccugagcuauugccaggau

SEQ ID NO: 385051 - RNA, 22 nt, Human
acucagaguuugcguuccauac

SEQ ID NO: 385052 - RNA, 22 nt, Human
auuugaagucuucaugauuucu

SEQ ID NO: 385053 - RNA, 19 nt, Human
uggcugagcuggacugagg

SEQ ID NO: 385054 - RNA, 22 nt, Human
cuggggcugcagcgaucuucau

SEQ ID NO: 385055 - RNA, 21 nt, Human
acaggcucuggggaugcuggg

SEQ ID NO: 385056 - RNA, 22 nt, Human
acaauuccacauggcaugcagg

SEQ ID NO: 385057 - RNA, 22 nt, Human
aagccaggcaugcuuggacagu

SEQ ID NO: 385058 - RNA, 19 nt, Human
gacagugcaguuguaguac

SEQ ID NO: 385059 - RNA, 22 nt, Human
acccaggauagagugcugcagu

SEQ ID NO: 385060 - RNA, 22 nt, Human
uacugcaugguggaguggagcu

SEQ ID NO: 385061 - RNA, 22 nt, Human
uacauguauugauuucucuucu

SEQ ID NO: 385062 - RNA, 22 nt, Human
cagucacacaaguggacuuggg

SEQ ID NO: 385063 - RNA, 22 nt, Human
aucauuucccuuuagaucacaa

SEQ ID NO: 385064 - RNA, 22 nt, Human
aagagcuggauugugcugcaga

SEQ ID NO: 385065 - RNA, 19 nt, Human
agccuggcuuugcucugcu

SEQ ID NO: 385066 - RNA, 22 nt, Human
ucagcaauccucccacaggugg

SEQ ID NO: 385067 - RNA, 21 nt, Human
gcagaggaaugguauacauaa

SEQ ID NO: 385068 - RNA, 22 nt, Human
aagccaguguuuuugagaguug

SEQ ID NO: 385069 - RNA, 22 nt, Human
agggauguaaauucuucuucuu

SEQ ID NO: 385070 - RNA, 22 nt, Human
cagggcagaacauauagauagu

SEQ ID NO: 385071 - RNA, 22 nt, Human
uccagccuaggggaacagcugc

SEQ ID NO: 385072 - RNA, 22 nt, Human
cugggcuacguguugacagcau

SEQ ID NO: 385073 - RNA, 23 nt, Human
cucccuggaguuucuggaagaug

SEQ ID NO: 385074 - RNA, 22 nt, Human
ggcgcaggccuuggauccuggu

SEQ ID NO: 385075 - RNA, 22 nt, Human
gcuggggaggcagcagagaaca

SEQ ID NO: 385076 - RNA, 22 nt, Human
cacauaauugaacgugaugagu

SEQ ID NO: 385077 - RNA, 22 nt, Human
ccugcagaaaggguccccagga

SEQ ID NO: 385078 - RNA, 22 nt, Human
cugcagugaaaucaggaagcaa

SEQ ID NO: 385079 - RNA, 22 nt, Human
aagccuuccugagugcaaggcc

SEQ ID NO: 385080 - RNA, 22 nt, Human
agccagccgggggaccacagug

SEQ ID NO: 385081 - RNA, 20 nt, Human
aagagcugacucacaguggu

SEQ ID NO: 385082 - RNA, 22 nt, Human
aagagcaucuauuucacagugg

SEQ ID NO: 385083 - RNA, 22 nt, Human
aaagcaguauauugguaguugu

SEQ ID NO: 385084 - RNA, 22 nt, Human
uuugcaaagugacuauuauaug

SEQ ID NO: 385085 - RNA, 22 nt, Human
ucaaaggcgguccaggaauaaa

SEQ ID NO: 385086 - RNA, 22 nt, Human
agauacauagcugugagcacac

SEQ ID NO: 385087 - RNA, 22 nt, Human
acuggcaguggcagcagaaaga

SEQ ID NO: 385088 - RNA, 22 nt, Human
ugccaggcuuuggucaaaggcu

SEQ ID NO: 385089 - RNA, 22 nt, Human
cagcacacagugacucgcaccu

SEQ ID NO: 385090 - RNA, 22 nt, Human
aagaacaacugcuuuaaaagca

SEQ ID NO: 385091 - RNA, 22 nt, Human
gauaaugaugacaaugacaacc

SEQ ID NO: 385092 - RNA, 22 nt, Human
ccccaggagaaaucuuaaacua

SEQ ID NO: 385093 - RNA, 22 nt, Human
caggcuugauuauucagacaau

SEQ ID NO: 385094 - RNA, 22 nt, Human
agucccagaucuccauucgguc

SEQ ID NO: 385095 - RNA, 23 nt, Human
cugcugugaaacaugguuuuggu

SEQ ID NO: 385096 - RNA, 22 nt, Human
cucaggcuugggaggaggccca

SEQ ID NO: 385097 - RNA, 22 nt, Human
uagcuguguagacacucagagc

SEQ ID NO: 385098 - RNA, 22 nt, Human
gacuguguccaugugcuggauu

SEQ ID NO: 385099 - RNA, 22 nt, Human
gaggccugguuuccagcauccu

SEQ ID NO: 385100 - RNA, 22 nt, Human
ugcaguggaaagacucagacuu

SEQ ID NO: 385101 - RNA, 18 nt, Human
ucugucuguacaaguauc

SEQ ID NO: 385102 - RNA, 22 nt, Human
ucagggcauccauugccuguug

SEQ ID NO: 385103 - RNA, 22 nt, Human
auaguaacuggcauguuuauga

SEQ ID NO: 385104 - RNA, 22 nt, Human
caaggccaugagcagcgagugu

SEQ ID NO: 385105 - RNA, 17 nt, Human
ccucacagggaccagac

SEQ ID NO: 385106 - RNA, 20 nt, Human
aggauuuacuacuaccugcu

SEQ ID NO: 385107 - RNA, 22 nt, Human
uuucauaugggcauuggcaaua

SEQ ID NO: 385108 - RNA, 22 nt, Human
ggcugagcucaggggcagcagg

SEQ ID NO: 385109 - RNA, 22 nt, Human
ucucccaggucauacacagaga

SEQ ID NO: 385110 - RNA, 22 nt, Human
aggccagacagcuagaaacagg

SEQ ID NO: 385111 - RNA, 21 nt, Human
uuugcauuuuacaugugggga

SEQ ID NO: 385112 - RNA, 22 nt, Human
cccuggagguggagguugcagg

SEQ ID NO: 385113 - RNA, 22 nt, Human
ggcugccuccugcugggcugga

SEQ ID NO: 385114 - RNA, 22 nt, Human
aggccuccuggcuccaggccuu

SEQ ID NO: 385115 - RNA, 22 nt, Human
uccagggacacagaguccuucu

SEQ ID NO: 385116 - RNA, 22 nt, Human
ucauacacaagagcauguaaca

SEQ ID NO: 385117 - RNA, 22 nt, Human
guaggcagugguuggaagagaa

SEQ ID NO: 385118 - RNA, 22 nt, Human
gcuuccuggagggagagagcug

SEQ ID NO: 385119 - RNA, 22 nt, Human
ggaaaaggccacagggacacau

SEQ ID NO: 385120 - RNA, 22 nt, Human
caaaguccuagaacagugcuug

SEQ ID NO: 385121 - RNA, 22 nt, Human
uggacucaaguccaaguucacg

SEQ ID NO: 385122 - RNA, 22 nt, Human
gcuggucacucugggagcugcu

SEQ ID NO: 385123 - RNA, 22 nt, Human
uauucacauguacauaugcuca

SEQ ID NO: 385124 - RNA, 22 nt, Human
uggcugaggcuggagugcagug

SEQ ID NO: 385125 - RNA, 22 nt, Human
ucccagggucaguggugaggcc

SEQ ID NO: 385126 - RNA, 22 nt, Human
gucucuuuuauggugaguugau

SEQ ID NO: 385127 - RNA, 22 nt, Human
gccaccucggcuuucucugcuc

SEQ ID NO: 385128 - RNA, 22 nt, Human
uuccuuagcugucccuggaaau

SEQ ID NO: 385129 - RNA, 22 nt, Human
accugaggccuccccagcagac

SEQ ID NO: 385130 - RNA, 22 nt, Human
gggcugcuuuuuucuuagcaga

SEQ ID NO: 385131 - RNA, 22 nt, Human
agaaaugugagccccuuaucaa

SEQ ID NO: 385132 - RNA, 19 nt, Human
uggggcuguguuuugaccc

SEQ ID NO: 385133 - RNA, 22 nt, Human
acaugcauaggagaagucuuua

SEQ ID NO: 385134 - RNA, 22 nt, Human
cagcuccagcccaggcagcucc

SEQ ID NO: 385135 - RNA, 17 nt, Human
aagacagaagccaugag

SEQ ID NO: 385136 - RNA, 22 nt, Human
guuauguaucuugauugggugg

SEQ ID NO: 385137 - RNA, 22 nt, Human
gagguggguguaucacagguca

SEQ ID NO: 385138 - RNA, 22 nt, Human
uuucauaauagugcaguuuguu

SEQ ID NO: 385139 - RNA, 22 nt, Human
gccaggcucagcagucaaccug

SEQ ID NO: 385140 - RNA, 22 nt, Human
gcccucugcacagcucugagca

SEQ ID NO: 385141 - RNA, 18 nt, Human
cagagcagagguggagcg

SEQ ID NO: 385142 - RNA, 22 nt, Human
agcuggugcucaggggcaugga

SEQ ID NO: 385143 - RNA, 22 nt, Human
agcugcagcguucauuuuucca

SEQ ID NO: 385144 - RNA, 22 nt, Human
ccagugcuucuuugcuagcugg

SEQ ID NO: 385145 - RNA, 22 nt, Human
auucacaaagaagggaaguaca

SEQ ID NO: 385146 - RNA, 22 nt, Human
gccagguggcugagugacugag

SEQ ID NO: 385147 - RNA, 22 nt, Human
uuugcauaagucauguccagug

SEQ ID NO: 385148 - RNA, 22 nt, Human
gcugccaauccagcugugggag

SEQ ID NO: 385149 - RNA, 22 nt, Human
uucugaaaauugggucauacuu

SEQ ID NO: 385150 - RNA, 19 nt, Human
cuguggcugaccucuggcc

SEQ ID NO: 385151 - RNA, 22 nt, Human
accuggcacuacaggcaccugu

SEQ ID NO: 385152 - RNA, 23 nt, Human
ggcacugaagcuacaauggugag

SEQ ID NO: 385153 - RNA, 22 nt, Human
gagccaggcaccuucuguguug

SEQ ID NO: 385154 - RNA, 22 nt, Human
acagguggcuuauuggcugauu

SEQ ID NO: 385155 - RNA, 22 nt, Human
acaaagucacaauaauuaaccu

SEQ ID NO: 385156 - RNA, 22 nt, Human
cagccagugugaccgaggagga

SEQ ID NO: 385157 - RNA, 22 nt, Human
cucugggcacauuuuccaggac

SEQ ID NO: 385158 - RNA, 22 nt, Human
uguguuccugccuggcucuggu

SEQ ID NO: 385159 - RNA, 22 nt, Human
augccaggccccacgcugggca

SEQ ID NO: 385160 - RNA, 22 nt, Human
gugccugugcggacucagggaa

SEQ ID NO: 385161 - RNA, 22 nt, Human
ugaggcucagaaauguaaguuu

SEQ ID NO: 385162 - RNA, 22 nt, Human
agcagcaggagccgugggguga

SEQ ID NO: 385163 - RNA, 22 nt, Human
guccucaggaaagcagauaaca

SEQ ID NO: 385164 - RNA, 22 nt, Human
aggccagcuguuacuagagcca

SEQ ID NO: 385165 - RNA, 22 nt, Human
aagacuuucaaaccuauguuug

SEQ ID NO: 385166 - RNA, 18 nt, Human
ugucucugaauuccagug

SEQ ID NO: 385167 - RNA, 19 nt, Human
cuugguuaugguaugaugc

SEQ ID NO: 385168 - RNA, 22 nt, Human
cucaaggacuuauucaugccug

SEQ ID NO: 385169 - RNA, 22 nt, Human
caguuucuauggcugggcucug

SEQ ID NO: 385170 - RNA, 22 nt, Human
aucaggaucacagaaacuuuua

SEQ ID NO: 385171 - RNA, 15 nt, Human
aaucuggcggcaagu

SEQ ID NO: 385172 - RNA, 22 nt, Human
cucagggcuggaaagccaggaa

SEQ ID NO: 385173 - RNA, 21 nt, Human
auucagaguaauucaucuuua

SEQ ID NO: 385174 - RNA, 22 nt, Human
uuagaaaucugcugccaugcaa

SEQ ID NO: 385175 - RNA, 22 nt, Human
uuucuauaugaggagcuaaagu

SEQ ID NO: 385176 - RNA, 22 nt, Human
auugaaagguuuugagcagaua

SEQ ID NO: 385177 - RNA, 22 nt, Human
uucccaguauuaccuucaggaa

SEQ ID NO: 385178 - RNA, 22 nt, Human
ggcuguggacacugagcucaga

SEQ ID NO: 385179 - RNA, 22 nt, Human
agugugaguaauucagggaggg

SEQ ID NO: 385180 - RNA, 22 nt, Human
cuguccuugcuggccagguaug

SEQ ID NO: 385181 - RNA, 22 nt, Human
cugcagaguggagccucggcug

SEQ ID NO: 385182 - RNA, 16 nt, Human
ggcaccagugaacaca

SEQ ID NO: 385183 - RNA, 22 nt, Human
cuuucucaaugccggaaggcac

SEQ ID NO: 385184 - RNA, 17 nt, Human
cuggagccaagagggcc

SEQ ID NO: 385185 - RNA, 22 nt, Human
aucaggauucaccccagagcug

SEQ ID NO: 385186 - RNA, 22 nt, Human
gcguaaggccucuggucucgga

SEQ ID NO: 385187 - RNA, 20 nt, Human
cccaggaguuugcucuuacu

SEQ ID NO: 385188 - RNA, 22 nt, Human
cagugucuccagaugcuccaau

SEQ ID NO: 385189 - RNA, 22 nt, Human
cuggcuggcaaguagaacacaa

SEQ ID NO: 385190 - RNA, 22 nt, Human
gcccugcugucuucagaguaua

SEQ ID NO: 385191 - RNA, 22 nt, Human
uucaauacaaagaaaggaauuu

SEQ ID NO: 385192 - RNA, 22 nt, Human
cugccaggcagcagagggagaa

SEQ ID NO: 385193 - RNA, 22 nt, Human
gcaggcuccaggccggccccuu

SEQ ID NO: 385194 - RNA, 22 nt, Human
gcccaggagguggaggugcagu

SEQ ID NO: 385195 - RNA, 22 nt, Human
gggcucugggauucagagcaag

SEQ ID NO: 385196 - RNA, 22 nt, Human
cagagcauuaaaaccagcucug

SEQ ID NO: 385197 - RNA, 22 nt, Human
agcuguggggcaggcagcgagg

SEQ ID NO: 385198 - RNA, 22 nt, Human
ccagucugugugccagccugcg

SEQ ID NO: 385199 - RNA, 22 nt, Human
ugcauuguuuagaacucuuugg

SEQ ID NO: 385200 - RNA, 22 nt, Human
agcagggcacuggaaggcacug

SEQ ID NO: 385201 - RNA, 22 nt, Human
uggagcaggccggaaguggcuu

SEQ ID NO: 385202 - RNA, 22 nt, Human
agccucucuuucugguggcuaa

SEQ ID NO: 385203 - RNA, 22 nt, Human
auuugauuagcuguguaauuuu

SEQ ID NO: 385204 - RNA, 22 nt, Human
ucucugaguucuccuccagccc

SEQ ID NO: 385205 - RNA, 22 nt, Human
uucagagauggaaggcagaaug

SEQ ID NO: 385206 - RNA, 22 nt, Human
uaaaaugcacagcaguugaaag

SEQ ID NO: 385207 - RNA, 22 nt, Human
guggagccaggggcuguaggua

SEQ ID NO: 385208 - RNA, 22 nt, Human
ugcaguggaagagguggagauc

SEQ ID NO: 385209 - RNA, 22 nt, Human
cugaaggauguguggugggagu

SEQ ID NO: 385210 - RNA, 22 nt, Human
ugcauuugucuugucucaugaa

SEQ ID NO: 385211 - RNA, 22 nt, Human
gcuuuguguagaaggaggaugg

SEQ ID NO: 385212 - RNA, 22 nt, Human
acaacuuuguagcaauuccacg

SEQ ID NO: 385213 - RNA, 22 nt, Human
acagaguauuggaaaggcagug

SEQ ID NO: 385214 - RNA, 22 nt, Human
ucacauuuuaucuauuuuaagu

SEQ ID NO: 385215 - RNA, 22 nt, Human
uccugucagugaggcagaugaa

SEQ ID NO: 385216 - RNA, 22 nt, Human
acagccaggaauucuggagaag

SEQ ID NO: 385217 - RNA, 22 nt, Human
agcugcccugguaagauugaug

SEQ ID NO: 385218 - RNA, 22 nt, Human
acucugagcaucccaagucuua

SEQ ID NO: 385219 - RNA, 22 nt, Human
uuagaaagcuuuccauagucaa

SEQ ID NO: 385220 - RNA, 22 nt, Human
aaggguugaagauaaauaaggu

SEQ ID NO: 385221 - RNA, 19 nt, Human
uccauaaugaagauagagg

SEQ ID NO: 385222 - RNA, 22 nt, Human
cacacaggaugaagcagcagaa

SEQ ID NO: 385223 - RNA, 22 nt, Human
acaugaaaaauguuugcaguuu

SEQ ID NO: 385224 - RNA, 22 nt, Human
aguggcaggcagaagcuucuca

SEQ ID NO: 385225 - RNA, 22 nt, Human
aagguacaguuuuaagaauaag

SEQ ID NO: 385226 - RNA, 22 nt, Human
ucugucaccgagggcauccaaa

SEQ ID NO: 385227 - RNA, 18 nt, Human
gcagagugcgucucugug

SEQ ID NO: 385228 - RNA, 22 nt, Human
caguuuuucaaaauuacaugau

SEQ ID NO: 385229 - RNA, 22 nt, Human
aacucaguucuuuccacaaugc

SEQ ID NO: 385230 - RNA, 22 nt, Human
cuuaggcaguuuaggaaagaga

SEQ ID NO: 385231 - RNA, 22 nt, Human
aggcagccugguuugaauggaa

SEQ ID NO: 385232 - RNA, 22 nt, Human
uuuccucuaaacgcauuugcuu

SEQ ID NO: 385233 - RNA, 21 nt, Human
uucuucaguuuaauauaaaau

SEQ ID NO: 385234 - RNA, 22 nt, Human
cugagccagcgggcucacuuuu

SEQ ID NO: 385235 - RNA, 22 nt, Human
cuuguucaguugccucuccugc

SEQ ID NO: 385236 - RNA, 22 nt, Human
ucagagccaaucauggugcauu

SEQ ID NO: 385237 - RNA, 22 nt, Human
ccaggagagcucucguucagug

SEQ ID NO: 385238 - RNA, 22 nt, Human
auuauguaacugugguucagca

SEQ ID NO: 385239 - RNA, 22 nt, Human
agggacuauuuacccaucucac

SEQ ID NO: 385240 - RNA, 22 nt, Human
aaaggccacugcaagggaaggu

SEQ ID NO: 385241 - RNA, 20 nt, Human
aggcucaggguguuuaggaa

SEQ ID NO: 385242 - RNA, 22 nt, Human
aaggcccuggccccagcuucuu

SEQ ID NO: 385243 - RNA, 22 nt, Human
ucucuuauuuugccuuugacaa

SEQ ID NO: 385244 - RNA, 22 nt, Human
uagagcugauaaugaggccaag

SEQ ID NO: 385245 - RNA, 22 nt, Human
cugcagugcaagcccagaugga

SEQ ID NO: 385246 - RNA, 22 nt, Human
agccacagggggugagggacaa

SEQ ID NO: 385247 - RNA, 22 nt, Human
gauggcagguaguggucucauc

SEQ ID NO: 385248 - RNA, 20 nt, Human
ccagcauguacacaugugga

SEQ ID NO: 385249 - RNA, 22 nt, Human
ggugguggagccagcugggagu

SEQ ID NO: 385250 - RNA, 22 nt, Human
aaacuguaagagaauaaacuac

SEQ ID NO: 385251 - RNA, 22 nt, Human
gccuggcugagguggggaggca

SEQ ID NO: 385252 - RNA, 22 nt, Human
aggcaguggaaggagaaagcaa

SEQ ID NO: 385253 - RNA, 22 nt, Human
uggucuuuaagguagcugucau

SEQ ID NO: 385254 - RNA, 22 nt, Human
agggaagaaaauccaucgcugc

SEQ ID NO: 385255 - RNA, 23 nt, Human
ugaagugaaauuucacaagggac

SEQ ID NO: 385256 - RNA, 22 nt, Human
aaacuguaaacacagcaguaca

SEQ ID NO: 385257 - RNA, 22 nt, Human
aaagcucacaguaauacaaggc

SEQ ID NO: 385258 - RNA, 22 nt, Human
cccuggggcugagggauggccg

SEQ ID NO: 385259 - RNA, 22 nt, Human
agagggagugaaauggaauaga

SEQ ID NO: 385260 - RNA, 22 nt, Human
accaugaugggaagcucagggc

SEQ ID NO: 385261 - RNA, 22 nt, Human
aaggcagccucugccagccggg

SEQ ID NO: 385262 - RNA, 22 nt, Human
ccacugucugcaggccucagca

SEQ ID NO: 385263 - RNA, 22 nt, Human
uugguuuaggaacuggcuugga

SEQ ID NO: 385264 - RNA, 22 nt, Human
aggcagcuagagagugaaacug

SEQ ID NO: 385265 - RNA, 22 nt, Human
auuauguauuugguauaguuug

SEQ ID NO: 385266 - RNA, 22 nt, Human
uucuucaguguagcaacuguau

SEQ ID NO: 385267 - RNA, 22 nt, Human
auuaaacugagcaaauuaacau

SEQ ID NO: 385268 - RNA, 22 nt, Human
aagggcucccaacucaucuuuu

SEQ ID NO: 385269 - RNA, 22 nt, Human
cuucuccucugaguccugggag

SEQ ID NO: 385270 - RNA, 19 nt, Human
cagcugcaccgugaccauc

SEQ ID NO: 385271 - RNA, 22 nt, Human
gcugaagagagaugcguccagc

SEQ ID NO: 385272 - RNA, 22 nt, Human
auaaggcagaaaugauucuagu

SEQ ID NO: 385273 - RNA, 22 nt, Human
gcuggccucaucacugacuucu

SEQ ID NO: 385274 - RNA, 22 nt, Human
ucacaggguuuggaagccuccu

SEQ ID NO: 385275 - RNA, 22 nt, Human
ccuggccaggcauggagucaca

SEQ ID NO: 385276 - RNA, 22 nt, Human
gcaugggcaagaggacuggggg

SEQ ID NO: 385277 - RNA, 22 nt, Human
cauuuacagugagaguuuuuac

SEQ ID NO: 385278 - RNA, 22 nt, Human
aaagacugguguguuacauaua

SEQ ID NO: 385279 - RNA, 20 nt, Human
uacagaaacaggacuuuugg

SEQ ID NO: 385280 - RNA, 21 nt, Human
cagcaaaucauugggcagacu

SEQ ID NO: 385281 - RNA, 22 nt, Human
agagugggccucugagucccag

SEQ ID NO: 385282 - RNA, 22 nt, Human
uggagacucugcaucugugaca

SEQ ID NO: 385283 - RNA, 22 nt, Human
gaaagcaguaaaugggucccau

SEQ ID NO: 385284 - RNA, 23 nt, Human
ucagggacaugaugugucauauc

SEQ ID NO: 385285 - RNA, 22 nt, Human
ccagaagucaggaaugagucuu

SEQ ID NO: 385286 - RNA, 22 nt, Human
agaggaggaagagcuuuaaaau

SEQ ID NO: 385287 - RNA, 22 nt, Human
cucuggaguucuucaagcuacu

SEQ ID NO: 385288 - RNA, 22 nt, Human
agggcagagagaugaaugggau

SEQ ID NO: 385289 - RNA, 22 nt, Human
caaaugaagaaccuucucaccu

SEQ ID NO: 385290 - RNA, 22 nt, Human
cagagcuguccaaacccugaca

SEQ ID NO: 385291 - RNA, 22 nt, Human
gcugcucuggcucugcaguguc

SEQ ID NO: 385292 - RNA, 22 nt, Human
ucuuugaauucaaacuguucaa

SEQ ID NO: 385293 - RNA, 22 nt, Human
aaagcagaggugauaugacuua

SEQ ID NO: 385294 - RNA, 20 nt, Human
uccugcaguuccuaggaggg

SEQ ID NO: 385295 - RNA, 22 nt, Human
caggggcucuaaugcaugauca

SEQ ID NO: 385296 - RNA, 22 nt, Human
uggcucagaacuacuucuaguu

SEQ ID NO: 385297 - RNA, 22 nt, Human
gcccagccuccaagcuccaagg

SEQ ID NO: 385298 - RNA, 22 nt, Human
gauucugagcugguguuuuacg

SEQ ID NO: 385299 - RNA, 22 nt, Human
aagucacacuagacaacugagg

SEQ ID NO: 385300 - RNA, 22 nt, Human
uagcaggguccaaugugaggca

SEQ ID NO: 385301 - RNA, 22 nt, Human
auuucucaucaagugccaacuc

SEQ ID NO: 385302 - RNA, 22 nt, Human
agcagagccaggucucucugua

SEQ ID NO: 385303 - RNA, 22 nt, Human
augccaaagcccaaguucauca

SEQ ID NO: 385304 - RNA, 22 nt, Human
gcagagcccuggggguauggug

SEQ ID NO: 385305 - RNA, 22 nt, Human
guguggcugauugacaugguca

SEQ ID NO: 385306 - RNA, 22 nt, Human
uugcauuguugcaaugaaguau

SEQ ID NO: 385307 - RNA, 22 nt, Human
uggcucaggaucuaagcagaau

SEQ ID NO: 385308 - RNA, 22 nt, Human
cagacagcugcuuucuugcugu

SEQ ID NO: 385309 - RNA, 22 nt, Human
ccugggagugucagacuugcuu

SEQ ID NO: 385310 - RNA, 22 nt, Human
ugugaaaggggucacagggaaa

SEQ ID NO: 385311 - RNA, 22 nt, Human
agaggcuccaccuucucugucc

SEQ ID NO: 385312 - RNA, 22 nt, Human
gcucucugguuccagucaggaa

SEQ ID NO: 385313 - RNA, 22 nt, Human
gcugccuguguggccacucacu

SEQ ID NO: 385314 - RNA, 22 nt, Human
gccucaggacuggcauacucau

SEQ ID NO: 385315 - RNA, 20 nt, Human
aggcacuggggauagguaag

SEQ ID NO: 385316 - RNA, 22 nt, Human
ucagaauucagagggagugggg

SEQ ID NO: 385317 - RNA, 22 nt, Human
acacaguaccccaaggcugggc

SEQ ID NO: 385318 - RNA, 22 nt, Human
ucccuggcagcuaagggugguc

SEQ ID NO: 385319 - RNA, 21 nt, Human
gcugcugccccuagugaggcc

SEQ ID NO: 385320 - RNA, 22 nt, Human
ggcagcugagcauggcuaccuu

SEQ ID NO: 385321 - RNA, 18 nt, Human
cagaaguccuucaaggcc

SEQ ID NO: 385322 - RNA, 22 nt, Human
ccugccuguaagauggguacaa

SEQ ID NO: 385323 - RNA, 22 nt, Human
ucauaaagcauuucagcuuuug

SEQ ID NO: 385324 - RNA, 22 nt, Human
uugaagcaaggcgaaucuugug

SEQ ID NO: 385325 - RNA, 22 nt, Human
augcugcacaagccacauguag

SEQ ID NO: 385326 - RNA, 23 nt, Human
acaugggagggacauggaggcug

SEQ ID NO: 385327 - RNA, 22 nt, Human
ucagaagcauguggggagccug

SEQ ID NO: 385328 - RNA, 19 nt, Human
cuugcugggugguuucugc

SEQ ID NO: 385329 - RNA, 22 nt, Human
gaagcccauuuguacagcacau

SEQ ID NO: 385330 - RNA, 22 nt, Human
uucagcagugcagacacccagu

SEQ ID NO: 385331 - RNA, 22 nt, Human
ucaguguauggagugcuggauu

SEQ ID NO: 385332 - RNA, 22 nt, Human
ucagccagcaucagcuaagugc

SEQ ID NO: 385333 - RNA, 20 nt, Human
cucucuggaaggugggagcc

SEQ ID NO: 385334 - RNA, 22 nt, Human
gaggcccaguccugcaagcacg

SEQ ID NO: 385335 - RNA, 22 nt, Human
ucuguucaucaucuggacacau

SEQ ID NO: 385336 - RNA, 23 nt, Human
ccucccaccuauuucacuuucuu

SEQ ID NO: 385337 - RNA, 22 nt, Human
ccagggucucugcugccugaga

SEQ ID NO: 385338 - RNA, 23 nt, Human
cuucucagaagucugugccagga

SEQ ID NO: 385339 - RNA, 22 nt, Human
uuucaguuuaugucuugaauua

SEQ ID NO: 385340 - RNA, 22 nt, Human
caggaaauaucuccuggcagag

SEQ ID NO: 385341 - RNA, 22 nt, Human
cuuauguaaacuacagauaaua

SEQ ID NO: 385342 - RNA, 22 nt, Human
ugaaaggugacauuucuuggau

SEQ ID NO: 385343 - RNA, 22 nt, Human
ugucaccaugccagcuucugcc

SEQ ID NO: 385344 - RNA, 22 nt, Human
agaggccagggacacugcucaa

SEQ ID NO: 385345 - RNA, 22 nt, Human
gauuucuugauaaguaguguga

SEQ ID NO: 385346 - RNA, 22 nt, Human
gcucugagaggugcagcaguaa

SEQ ID NO: 385347 - RNA, 22 nt, Human
aguucacagaauggccagaacu

SEQ ID NO: 385348 - RNA, 22 nt, Human
uggaggagaauuuauggucgaa

SEQ ID NO: 385349 - RNA, 22 nt, Human
cccaggaggcagagguugcagu

SEQ ID NO: 385350 - RNA, 17 nt, Human
caauuucauagguuuug

SEQ ID NO: 385351 - RNA, 22 nt, Human
ugucacuucaggaaugcaggga

SEQ ID NO: 385352 - RNA, 18 nt, Human
uccagagguguuggagcc

SEQ ID NO: 385353 - RNA, 22 nt, Human
ugggcaggcaagugaauaccuu

SEQ ID NO: 385354 - RNA, 22 nt, Human
ucaguuucuccaucgcuccagu

SEQ ID NO: 385355 - RNA, 22 nt, Human
gaggcugcugagagcccuguuu

SEQ ID NO: 385356 - RNA, 19 nt, Human
agacagagacugaaauaga

SEQ ID NO: 385357 - RNA, 22 nt, Human
uuagauauguuuuugcuaaugc

SEQ ID NO: 385358 - RNA, 21 nt, Human
acaguucaugauaacuccauc

SEQ ID NO: 385359 - RNA, 22 nt, Human
augcuguagaucuuagccucua

SEQ ID NO: 385360 - RNA, 22 nt, Human
gcagcugccuucagcuggaugg

SEQ ID NO: 385361 - RNA, 22 nt, Human
cuagcaucagaugagaagcugu

SEQ ID NO: 385362 - RNA, 22 nt, Human
acagguggccccgagggagugg

SEQ ID NO: 385363 - RNA, 22 nt, Human
acuuccuggcugggugaccugg

SEQ ID NO: 385364 - RNA, 20 nt, Human
aggcagcuggccaggcaggu

SEQ ID NO: 385365 - RNA, 19 nt, Human
uguuggugcggauguggag

SEQ ID NO: 385366 - RNA, 22 nt, Human
cccaggaggguggccucugccc

SEQ ID NO: 385367 - RNA, 20 nt, Human
ucugucucugagcuagacuu

SEQ ID NO: 385368 - RNA, 22 nt, Human
ucacagcuaagcuuggucacug

SEQ ID NO: 385369 - RNA, 22 nt, Human
gaaguccugguccucucauuca

SEQ ID NO: 385370 - RNA, 22 nt, Human
ucuucacaccgggcagcaggaa

SEQ ID NO: 385371 - RNA, 22 nt, Human
uguguacaggccuugcuagacu

SEQ ID NO: 385372 - RNA, 22 nt, Human
cuggacagaaagggcugcugug

SEQ ID NO: 385373 - RNA, 22 nt, Human
agggucugacaaugugacuuag

SEQ ID NO: 385374 - RNA, 21 nt, Human
aggugcagagccagggaccag

SEQ ID NO: 385375 - RNA, 22 nt, Human
auacagaaaaguggauagccag

SEQ ID NO: 385376 - RNA, 22 nt, Human
aucagaaauagucauguuacuu

SEQ ID NO: 385377 - RNA, 22 nt, Human
uaauuauaacaguuacaucuua

SEQ ID NO: 385378 - RNA, 22 nt, Human
aagucacccacaggcagcagaa

SEQ ID NO: 385379 - RNA, 22 nt, Human
ccaaaguccauaguuuacuuua

SEQ ID NO: 385380 - RNA, 22 nt, Human
gcaaaaaaugcuuguugcuuag

SEQ ID NO: 385381 - RNA, 22 nt, Human
ccuuccuggcuguccgccugau

SEQ ID NO: 385382 - RNA, 22 nt, Human
guuuuuccuugcugaggacccg

SEQ ID NO: 385383 - RNA, 22 nt, Human
ucccagaagugaaauuucuaga

SEQ ID NO: 385384 - RNA, 22 nt, Human
cacagggccuggggcagcugcu

SEQ ID NO: 385385 - RNA, 22 nt, Human
agucccagccuguaggauuggg

SEQ ID NO: 385386 - RNA, 22 nt, Human
uguccugggaaugggaugcagu

SEQ ID NO: 385387 - RNA, 23 nt, Human
accaggagaaaagcuuugcggga

SEQ ID NO: 385388 - RNA, 20 nt, Human
gcucccugguagaaauguuu

SEQ ID NO: 385389 - RNA, 22 nt, Human
gaaggccaguuuugagauaggu

SEQ ID NO: 385390 - RNA, 23 nt, Human
aaaugacauaugguuucugaagg

SEQ ID NO: 385391 - RNA, 22 nt, Human
ucugguuagccaauaaugccaa

SEQ ID NO: 385392 - RNA, 22 nt, Human
ucaguguagcagacuuguagcc

SEQ ID NO: 385393 - RNA, 18 nt, Human
cuguccaguagacucugc

SEQ ID NO: 385394 - RNA, 22 nt, Human
guggccugucagaagccguggg

SEQ ID NO: 385395 - RNA, 22 nt, Human
ccucucuguaagggucccuccc

SEQ ID NO: 385396 - RNA, 22 nt, Human
gcaagcaagcagguagagcuga

SEQ ID NO: 385397 - RNA, 22 nt, Human
ggagaugcuauguaguuugguu

SEQ ID NO: 385398 - RNA, 19 nt, Human
ggagaagcccaggaauccu

SEQ ID NO: 385399 - RNA, 22 nt, Human
ugcacaaacuugugucccaggg

SEQ ID NO: 385400 - RNA, 22 nt, Human
aguggcagcugucaugcccuag

SEQ ID NO: 385401 - RNA, 22 nt, Human
cugaggucuagacaccccaggg

SEQ ID NO: 385402 - RNA, 22 nt, Human
ugaaagcacucacuucugcucu

SEQ ID NO: 385403 - RNA, 23 nt, Human
cugcuguguuggucucgauggga

SEQ ID NO: 385404 - RNA, 22 nt, Human
aggcacugacagauucuguguc

SEQ ID NO: 385405 - RNA, 22 nt, Human
gcacccaggccggcgacugcag

SEQ ID NO: 385406 - RNA, 22 nt, Human
auugacaagugagcugggcugc

SEQ ID NO: 385407 - RNA, 22 nt, Human
agaauuagguaaguucaucuga

SEQ ID NO: 385408 - RNA, 22 nt, Human
cugccagucuaugcugcucggc

SEQ ID NO: 385409 - RNA, 22 nt, Human
ggccaugguuggggaagacaug

SEQ ID NO: 385410 - RNA, 22 nt, Human
uauuuccagcaguaagaagaca

SEQ ID NO: 385411 - RNA, 22 nt, Human
ugucaugcuuauguuacauacu

SEQ ID NO: 385412 - RNA, 22 nt, Human
cuguauuuucaugccuacguac

SEQ ID NO: 385413 - RNA, 22 nt, Human
guggugaagccccaucucugcu

SEQ ID NO: 385414 - RNA, 22 nt, Human
acagaggaagcauauagcacaa

SEQ ID NO: 385415 - RNA, 22 nt, Human
auacagaauuugcccuuuucau

SEQ ID NO: 385416 - RNA, 22 nt, Human
uccugggcuguggccccgggca

SEQ ID NO: 385417 - RNA, 22 nt, Human
ucagagaugcagugccaccuac

SEQ ID NO: 385418 - RNA, 22 nt, Human
gcugugcacuaccuauacaucc

SEQ ID NO: 385419 - RNA, 22 nt, Human
cacaggaggaggccagagcgua

SEQ ID NO: 385420 - RNA, 22 nt, Human
cuagaaauucugauucaguagg

SEQ ID NO: 385421 - RNA, 22 nt, Human
guacaguuuucaguguucacug

SEQ ID NO: 385422 - RNA, 22 nt, Human
ucugggagcacacgcagugauc

SEQ ID NO: 385423 - RNA, 22 nt, Human
gccaccagggggugcaaggucc

SEQ ID NO: 385424 - RNA, 22 nt, Human
ccuggagccccucuggccagcc

SEQ ID NO: 385425 - RNA, 22 nt, Human
gaauacaagccugccaccugga

SEQ ID NO: 385426 - RNA, 17 nt, Human
aaggccauuuccaccca

SEQ ID NO: 385427 - RNA, 22 nt, Human
ucagccaguuugauucuauuug

SEQ ID NO: 385428 - RNA, 22 nt, Human
ugaauaaucuuggguauuaaua

SEQ ID NO: 385429 - RNA, 22 nt, Human
acuguacacgugucauuuacag

SEQ ID NO: 385430 - RNA, 22 nt, Human
uacaaagucagaauaacaggug

SEQ ID NO: 385431 - RNA, 22 nt, Human
gccacaugcaauugcagcacgu

SEQ ID NO: 385432 - RNA, 22 nt, Human
auuuaugauuagccuauuguug

SEQ ID NO: 385433 - RNA, 22 nt, Human
ccugucugaaggcagggggaug

SEQ ID NO: 385434 - RNA, 22 nt, Human
auuugcuuucagguauaaaagg

SEQ ID NO: 385435 - RNA, 22 nt, Human
gaagcagcaaguauaggacagg

SEQ ID NO: 385436 - RNA, 22 nt, Human
gaacagcugcuagagaucugug

SEQ ID NO: 385437 - RNA, 22 nt, Human
gcugagcuagcuaucucagucu

SEQ ID NO: 385438 - RNA, 22 nt, Human
ggagaggggcaaguuuaucuag

SEQ ID NO: 385439 - RNA, 22 nt, Human
agguaggguuaauggagauaua

SEQ ID NO: 385440 - RNA, 22 nt, Human
gauuuccuaauguggaucucug

SEQ ID NO: 385441 - RNA, 21 nt, Human
ugcaggagucugugagucagg

SEQ ID NO: 385442 - RNA, 22 nt, Human
cagauuuagaguggggcuugga

SEQ ID NO: 385443 - RNA, 22 nt, Human
ucuucacaugaccuucaugucu

SEQ ID NO: 385444 - RNA, 22 nt, Human
gcaaggacucccugggucauuc

SEQ ID NO: 385445 - RNA, 19 nt, Human
acacugaauguagaauugg

SEQ ID NO: 385446 - RNA, 22 nt, Human
acuguggcucaucaggcuggug

SEQ ID NO: 385447 - RNA, 22 nt, Human
ucuauacaugugcacacacauc

SEQ ID NO: 385448 - RNA, 20 nt, Human
agaagucagcucagaaguga

SEQ ID NO: 385449 - RNA, 22 nt, Human
caggcaggugcagauuccucuu

SEQ ID NO: 385450 - RNA, 22 nt, Human
aucuaagauguauugagcacuu

SEQ ID NO: 385451 - RNA, 22 nt, Human
agagcucaagacgcucacagua

SEQ ID NO: 385452 - RNA, 22 nt, Human
aagggcucacccaacucacuuc

SEQ ID NO: 385453 - RNA, 22 nt, Human
uagaaaucuacuuagacuuucu

SEQ ID NO: 385454 - RNA, 22 nt, Human
ggagcaggagucucuugaauuu

SEQ ID NO: 385455 - RNA, 22 nt, Human
aggaaaaagaguugcugccuuc

SEQ ID NO: 385456 - RNA, 22 nt, Human
ucccagggcagcuguccagaag

SEQ ID NO: 385457 - RNA, 22 nt, Human
cugccagcagaggccagcgcug

SEQ ID NO: 385458 - RNA, 22 nt, Human
cugucaucacaguugagcagcc

SEQ ID NO: 385459 - RNA, 22 nt, Human
gaggcucaacccacagggguug

SEQ ID NO: 385460 - RNA, 22 nt, Human
guuucacagaugguguucauau

SEQ ID NO: 385461 - RNA, 22 nt, Human
caaauucaaauuucaucagugu

SEQ ID NO: 385462 - RNA, 22 nt, Human
ugggcugcugcggugcucuugg

SEQ ID NO: 385463 - RNA, 22 nt, Human
ugucaccaguuccaggaaauaa

SEQ ID NO: 385464 - RNA, 22 nt, Human
auaaaaucagaguuggauugga

SEQ ID NO: 385465 - RNA, 22 nt, Human
uggcucucaggccugcugcguu

SEQ ID NO: 385466 - RNA, 22 nt, Human
ucaaagucauggcaggcucaga

SEQ ID NO: 385467 - RNA, 22 nt, Human
aaaugcacaaaguaaguguaau

SEQ ID NO: 385468 - RNA, 22 nt, Human
aaaguccuugcaguuuccucuu

SEQ ID NO: 385469 - RNA, 22 nt, Human
auuguauaacagcauguauuuu

SEQ ID NO: 385470 - RNA, 23 nt, Human
aaauucaguccuucaacucugag

SEQ ID NO: 385471 - RNA, 23 nt, Human
auaauaacgucugucuugucucu

SEQ ID NO: 385472 - RNA, 22 nt, Human
aaggccagacaggaccacaucu

SEQ ID NO: 385473 - RNA, 22 nt, Human
ucagucuuugcuuaugacaaua

SEQ ID NO: 385474 - RNA, 20 nt, Human
aggaagcugagauguagagg

SEQ ID NO: 385475 - RNA, 22 nt, Human
cuuugaaagcucccaggacuua

SEQ ID NO: 385476 - RNA, 22 nt, Human
uggcagaggagaauuaagauua

SEQ ID NO: 385477 - RNA, 22 nt, Human
aaaccgcaauuacuuuugcguc

SEQ ID NO: 385478 - RNA, 18 nt, Human
gcagcuuuugauucaccc

SEQ ID NO: 385479 - RNA, 22 nt, Human
guuuuauaugucucugcugaca

SEQ ID NO: 385480 - RNA, 19 nt, Human
uccuuugaauaucaguuga

SEQ ID NO: 385481 - RNA, 22 nt, Human
gauaaaauaacuauggaauacu

SEQ ID NO: 385482 - RNA, 22 nt, Human
ucccagcgcggggggaggaucc

SEQ ID NO: 385483 - RNA, 22 nt, Human
acagacagggcaccugccuccu

SEQ ID NO: 385484 - RNA, 22 nt, Human
ugcaguggcgccaucucagcuc

SEQ ID NO: 385485 - RNA, 22 nt, Human
acugcaucugaaacauggguca

SEQ ID NO: 385486 - RNA, 20 nt, Human
gcagagccucacugcaaggg

SEQ ID NO: 385487 - RNA, 22 nt, Human
ugcccacauucaaaaggugaug

SEQ ID NO: 385488 - RNA, 22 nt, Human
ccuccacaggagcugcagugcu

SEQ ID NO: 385489 - RNA, 22 nt, Human
cacugcaguuccccagugcgca

SEQ ID NO: 385490 - RNA, 22 nt, Human
uuucaucuucccagagaccuug

SEQ ID NO: 385491 - RNA, 22 nt, Human
gcagaggacacaggagggcaag

SEQ ID NO: 385492 - RNA, 22 nt, Human
acaaaugcagcauaaagugaac

SEQ ID NO: 385493 - RNA, 22 nt, Human
auuaggcaauucugggcaucuc

SEQ ID NO: 385494 - RNA, 21 nt, Human
aggaggaacccguggcugggc

SEQ ID NO: 385495 - RNA, 22 nt, Human
cccagcccugaccuauuggaaa

SEQ ID NO: 385496 - RNA, 22 nt, Human
gacagcauggugucuguucagg

SEQ ID NO: 385497 - RNA, 22 nt, Human
gcccucagaguuccccacagug

SEQ ID NO: 385498 - RNA, 19 nt, Human
ggcauccacgaaugcagag

SEQ ID NO: 385499 - RNA, 22 nt, Human
acagagagcugugauugaguua

SEQ ID NO: 385500 - RNA, 22 nt, Human
uuuuccucuguauuugaaaugc

SEQ ID NO: 385501 - RNA, 16 nt, Human
agcagccagcacugga

SEQ ID NO: 385502 - RNA, 22 nt, Human
uccaauauggauaaaaggggcc

SEQ ID NO: 385503 - RNA, 22 nt, Human
uuuauacuccacucugcaagcg

SEQ ID NO: 385504 - RNA, 22 nt, Human
ugaugggacugccagcugcuga

SEQ ID NO: 385505 - RNA, 20 nt, Human
ugcugcaguuucaugggacu

SEQ ID NO: 385506 - RNA, 22 nt, Human
gugggaugguagguagguaaua

SEQ ID NO: 385507 - RNA, 22 nt, Human
ugggcucugcugcguaccaguu

SEQ ID NO: 385508 - RNA, 22 nt, Human
cagucacuggaauagcugagga

SEQ ID NO: 385509 - RNA, 22 nt, Human
aaggaccuauauugucagagga

SEQ ID NO: 385510 - RNA, 22 nt, Human
acuguagcugccacuggaugca

SEQ ID NO: 385511 - RNA, 23 nt, Human
uaucagugugaugaggcugcugc

SEQ ID NO: 385512 - RNA, 22 nt, Human
uggguagagacacagucugggg

SEQ ID NO: 385513 - RNA, 22 nt, Human
ccaggcccugcuccucacacca

SEQ ID NO: 385514 - RNA, 23 nt, Human
uuuauauuccuaaugucuugagc

SEQ ID NO: 385515 - RNA, 22 nt, Human
ccuggagauuucuucaagcuuu

SEQ ID NO: 385516 - RNA, 22 nt, Human
agggcagacuaggauggaagug

SEQ ID NO: 385517 - RNA, 22 nt, Human
gggcaggugcccagggccagag

SEQ ID NO: 385518 - RNA, 22 nt, Human
ggacagagcccugguggccuaa

SEQ ID NO: 385519 - RNA, 22 nt, Human
uucauacuaaaguguaagaugu

SEQ ID NO: 385520 - RNA, 19 nt, Human
uuuacucuccaaggugagu

SEQ ID NO: 385521 - RNA, 22 nt, Human
cacacuuugugcuaaucuauuu

SEQ ID NO: 385522 - RNA, 22 nt, Human
ccucagaguaggucucagcugu

SEQ ID NO: 385523 - RNA, 22 nt, Human
aaaaucugcuuccuuuuacaga

SEQ ID NO: 385524 - RNA, 22 nt, Human
guuuaaucagaggaauuauaga

SEQ ID NO: 385525 - RNA, 22 nt, Human
gaaagagaaccugggccuagau

SEQ ID NO: 385526 - RNA, 22 nt, Human
gaggacagagccgccuggcaag

SEQ ID NO: 385527 - RNA, 22 nt, Human
ucuuuacacaagacaagaauaa

SEQ ID NO: 385528 - RNA, 20 nt, Human
cccagguaggugccaugagu

SEQ ID NO: 385529 - RNA, 22 nt, Human
gugcugugucuaucaggaauaa

SEQ ID NO: 385530 - RNA, 22 nt, Human
ucacauuuauuucaaaguuacu

SEQ ID NO: 385531 - RNA, 22 nt, Human
uaaguucagaguucucauuugu

SEQ ID NO: 385532 - RNA, 20 nt, Human
cagcucugggaaagaggcca

SEQ ID NO: 385533 - RNA, 22 nt, Human
ugggaccuguuacauugaguua

SEQ ID NO: 385534 - RNA, 22 nt, Human
agggucugacugaauggaaaag

SEQ ID NO: 385535 - RNA, 22 nt, Human
cuggcagcugcccgagaugccc

SEQ ID NO: 385536 - RNA, 22 nt, Human
guuuucauuacugcugugauuu

SEQ ID NO: 385537 - RNA, 22 nt, Human
aggaaaacacaguauugaugga

SEQ ID NO: 385538 - RNA, 22 nt, Human
cugggaggugcagcaaaaauca

SEQ ID NO: 385539 - RNA, 22 nt, Human
agaauaaaucaaauguccugag

SEQ ID NO: 385540 - RNA, 22 nt, Human
aggcagcugugaggacuggauu

SEQ ID NO: 385541 - RNA, 22 nt, Human
ucuguucagcugccucagggua

SEQ ID NO: 385542 - RNA, 22 nt, Human
guaaacauuuucaucugugccc

SEQ ID NO: 385543 - RNA, 22 nt, Human
cugcugugcaggugccuaugau

SEQ ID NO: 385544 - RNA, 22 nt, Human
ccaggguguagggauuccagau

SEQ ID NO: 385545 - RNA, 22 nt, Human
ccaggccugcaucugcugcgca

SEQ ID NO: 385546 - RNA, 19 nt, Human
cagcucaguuugauucucu

SEQ ID NO: 385547 - RNA, 22 nt, Human
gucugaggaagaugcaggggga

SEQ ID NO: 385548 - RNA, 22 nt, Human
gcagcaggcacggucucgacau

SEQ ID NO: 385549 - RNA, 22 nt, Human
cugggaggcacuauucaggagg

SEQ ID NO: 385550 - RNA, 22 nt, Human
gagugggcaccgugggcacacu

SEQ ID NO: 385551 - RNA, 22 nt, Human
gggcagcagagcccugccgagu

SEQ ID NO: 385552 - RNA, 22 nt, Human
uugcugugaaaccaugggaagu

SEQ ID NO: 385553 - RNA, 22 nt, Human
ucauacaucuguccuggagcuc

SEQ ID NO: 385554 - RNA, 22 nt, Human
aaguuauugcagcaauccaagu

SEQ ID NO: 385555 - RNA, 22 nt, Human
aggguauguuuuuaucuacugu

SEQ ID NO: 385556 - RNA, 22 nt, Human
cucagaagccuucagucuuggc

SEQ ID NO: 385557 - RNA, 22 nt, Human
uucacuuaacaucauaucauga

SEQ ID NO: 385558 - RNA, 22 nt, Human
agucuuaacuaugcaaguacua

SEQ ID NO: 385559 - RNA, 22 nt, Human
cagccuccugggacacucaccg

SEQ ID NO: 385560 - RNA, 22 nt, Human
cugagccaaggggacagugaca

SEQ ID NO: 385561 - RNA, 22 nt, Human
aaggagugcaugacucagagua

SEQ ID NO: 385562 - RNA, 22 nt, Human
uaacagaagaugaaacuucuuu

SEQ ID NO: 385563 - RNA, 22 nt, Human
cugagaauuacucugaugagua

SEQ ID NO: 385564 - RNA, 22 nt, Human
aaaugcuguguuuuaacauaga

SEQ ID NO: 385565 - RNA, 22 nt, Human
ugccagcuccgaggagcugcag

SEQ ID NO: 385566 - RNA, 22 nt, Human
agcuuuaucuucaccugggaau

SEQ ID NO: 385567 - RNA, 22 nt, Human
ggaggcacuucccgucucagcc

SEQ ID NO: 385568 - RNA, 22 nt, Human
gcuggccauggccugcgccauc

SEQ ID NO: 385569 - RNA, 22 nt, Human
aaagucauacauggugcuuacu

SEQ ID NO: 385570 - RNA, 22 nt, Human
ccuuucucuuugcugaucaugu

SEQ ID NO: 385571 - RNA, 22 nt, Human
ugacacagauuagagacauacc

SEQ ID NO: 385572 - RNA, 22 nt, Human
aaggcacuuuucuaaagaccuu

SEQ ID NO: 385573 - RNA, 22 nt, Human
cucccaggcacagggaggagcc

SEQ ID NO: 385574 - RNA, 22 nt, Human
ucuguucauguugggcuuuucc

SEQ ID NO: 385575 - RNA, 22 nt, Human
cuggcuucugggccagggcaga

SEQ ID NO: 385576 - RNA, 20 nt, Human
uccagggcuagggagcucau

SEQ ID NO: 385577 - RNA, 22 nt, Human
acagauuuuaaaugacacuccc

SEQ ID NO: 385578 - RNA, 22 nt, Human
ucuggcuccacuuucuucauuu

SEQ ID NO: 385579 - RNA, 22 nt, Human
cauugcacuccagcuugggcaa

SEQ ID NO: 385580 - RNA, 22 nt, Human
ccagcaggacuuuggaaauaug

SEQ ID NO: 385581 - RNA, 22 nt, Human
ugccuggguccaggccaagccu

SEQ ID NO: 385582 - RNA, 21 nt, Human
agccuggcccagggggaggcu

SEQ ID NO: 385583 - RNA, 22 nt, Human
uggaggcauaggccugggcccu

SEQ ID NO: 385584 - RNA, 22 nt, Human
ggccuugggaggagggucagaa

SEQ ID NO: 385585 - RNA, 22 nt, Human
ugggccagcaauugcugcucag

SEQ ID NO: 385586 - RNA, 22 nt, Human
gcacagagggcagugagccucu

SEQ ID NO: 385587 - RNA, 22 nt, Human
uuuaacacuaguuucuuuaacu

SEQ ID NO: 385588 - RNA, 22 nt, Human
ucaauacauacaauguauagug

SEQ ID NO: 385589 - RNA, 22 nt, Human
cagggcucuucaucacacagua

SEQ ID NO: 385590 - RNA, 23 nt, Human
ggagccuggcauaugagacgcau

SEQ ID NO: 385591 - RNA, 22 nt, Human
aguuacuugagacguuuaugaa

SEQ ID NO: 385592 - RNA, 22 nt, Human
aguauguagugcaaucagucag

SEQ ID NO: 385593 - RNA, 22 nt, Human
ucuuuaauguacuuucuuucac

SEQ ID NO: 385594 - RNA, 22 nt, Human
ggcagcagggucuagauugaug

SEQ ID NO: 385595 - RNA, 22 nt, Human
uuucuacagcuggugcaacuuu

SEQ ID NO: 385596 - RNA, 22 nt, Human
gaguccuuccagcaggcauuua

SEQ ID NO: 385597 - RNA, 22 nt, Human
auagaauucguguuuguaauuc

SEQ ID NO: 385598 - RNA, 22 nt, Human
agagaagagcaaugauaaauuu

SEQ ID NO: 385599 - RNA, 22 nt, Human
gagcaggccagcaauggaaggg

SEQ ID NO: 385600 - RNA, 19 nt, Human
gccugccuggguuucugag

SEQ ID NO: 385601 - RNA, 18 nt, Human
uccugccugcgggcuccc

SEQ ID NO: 385602 - RNA, 22 nt, Human
gagguacaugaggauacacagg

SEQ ID NO: 385603 - RNA, 22 nt, Human
uuccuguaguugugcaauguac

SEQ ID NO: 385604 - RNA, 17 nt, Human
agccaggcauaugaagu

SEQ ID NO: 385605 - RNA, 22 nt, Human
gcagagcagcaaauggaaagga

SEQ ID NO: 385606 - RNA, 22 nt, Human
auugaaaaaugacuauugcuua

SEQ ID NO: 385607 - RNA, 22 nt, Human
cacaguggcagguguggguugu

SEQ ID NO: 385608 - RNA, 22 nt, Human
aggcugagauagguggaucauu

SEQ ID NO: 385609 - RNA, 22 nt, Human
uucacauuaucaggauuguuuc

SEQ ID NO: 385610 - RNA, 22 nt, Human
uugcuuuguuacugcaguuucc

SEQ ID NO: 385611 - RNA, 22 nt, Human
gcucagagcuugaaguuccacu

SEQ ID NO: 385612 - RNA, 22 nt, Human
auucagcaguuccugcuucagu

SEQ ID NO: 385613 - RNA, 22 nt, Human
ugaucugagagcagaucaccau

SEQ ID NO: 385614 - RNA, 22 nt, Human
aggauccuccuuagaaaagacc

SEQ ID NO: 385615 - RNA, 22 nt, Human
aggcugcuuccuuacguggcug

SEQ ID NO: 385616 - RNA, 22 nt, Human
gugcgccagcucaaggggaggc

SEQ ID NO: 385617 - RNA, 22 nt, Human
ucaggagaguguucaguggagg

SEQ ID NO: 385618 - RNA, 22 nt, Human
uacaguauguucuugaauuugg

SEQ ID NO: 385619 - RNA, 22 nt, Human
caugcuuuaccaaagcagugau

SEQ ID NO: 385620 - RNA, 22 nt, Human
uucccaguuagucauuuuuaca

SEQ ID NO: 385621 - RNA, 22 nt, Human
caggcauggugagaacucagcc

SEQ ID NO: 385622 - RNA, 22 nt, Human
ucugccugagggagcugaggaa

SEQ ID NO: 385623 - RNA, 22 nt, Human
ucugagagucucugaggcagau

SEQ ID NO: 385624 - RNA, 22 nt, Human
ggcucaggccuguaauccuagc

SEQ ID NO: 385625 - RNA, 22 nt, Human
uuuagaaauugcagagugggug

SEQ ID NO: 385626 - RNA, 22 nt, Human
ccucuggcuguaccacuggcac

SEQ ID NO: 385627 - RNA, 22 nt, Human
ugaaugauuugggugcauucag

SEQ ID NO: 385628 - RNA, 21 nt, Human
augacagaugcugcagaucgu

SEQ ID NO: 385629 - RNA, 22 nt, Human
cccugagcccauaguugacauu

SEQ ID NO: 385630 - RNA, 22 nt, Human
augcacaagaggcuagaaaaga

SEQ ID NO: 385631 - RNA, 22 nt, Human
cauuuguauguuccuccuuagg

SEQ ID NO: 385632 - RNA, 19 nt, Human
cuggcagccugucuguguc

SEQ ID NO: 385633 - RNA, 22 nt, Human
accaggcagcugggggugaugu

SEQ ID NO: 385634 - RNA, 22 nt, Human
uuugcagugucagcuucugugu

SEQ ID NO: 385635 - RNA, 22 nt, Human
ugaggugaccgcagaugggaag

SEQ ID NO: 385636 - RNA, 22 nt, Human
ggagcagggcagugaauucugg

SEQ ID NO: 385637 - RNA, 22 nt, Human
gcagcucccagcuugaaagguc

SEQ ID NO: 385638 - RNA, 22 nt, Human
aagauucagccaaauuguucau

SEQ ID NO: 385639 - RNA, 22 nt, Human
guggcagagggugagcuggacu

SEQ ID NO: 385640 - RNA, 22 nt, Human
uugcauuccaguccccacugug

SEQ ID NO: 385641 - RNA, 22 nt, Human
aaaagacaucuauuucaggcag

SEQ ID NO: 385642 - RNA, 22 nt, Human
uagccucucuccuccacaaccu

SEQ ID NO: 385643 - RNA, 22 nt, Human
acacaggggcucggcugggugc

SEQ ID NO: 385644 - RNA, 17 nt, Human
ggccuugggcugcucuu

SEQ ID NO: 385645 - RNA, 20 nt, Human
cugcagggugagugggcgau

SEQ ID NO: 385646 - RNA, 22 nt, Human
aggcacugaccugcuuccuuga

SEQ ID NO: 385647 - RNA, 22 nt, Human
cagggguguuuuuggccaggag

SEQ ID NO: 385648 - RNA, 22 nt, Human
uagggcuguuuaaaagugaggu

SEQ ID NO: 385649 - RNA, 22 nt, Human
ucugggaacugagcuccccuag

SEQ ID NO: 385650 - RNA, 22 nt, Human
ucugccuggguguggagcagag

SEQ ID NO: 385651 - RNA, 20 nt, Human
acaaaugcauucugugacau

SEQ ID NO: 385652 - RNA, 22 nt, Human
cccuucccuucugggagaucca

SEQ ID NO: 385653 - RNA, 19 nt, Human
ggucacagggguuacaagg

SEQ ID NO: 385654 - RNA, 20 nt, Human
agcugccccugggcacugcc

SEQ ID NO: 385655 - RNA, 22 nt, Human
uuccucagagggcgcuggggaa

SEQ ID NO: 385656 - RNA, 22 nt, Human
ccauggcuuucuuucauuguaa

SEQ ID NO: 385657 - RNA, 22 nt, Human
gccugggaacucugaucuccug

SEQ ID NO: 385658 - RNA, 22 nt, Human
agccagaguugaaugugagucu

SEQ ID NO: 385659 - RNA, 22 nt, Human
uccagggaugccagccauguug

SEQ ID NO: 385660 - RNA, 22 nt, Human
cgggcagcggcguggccauggu

SEQ ID NO: 385661 - RNA, 22 nt, Human
uaacagaauagcagaaacagaa

SEQ ID NO: 385662 - RNA, 22 nt, Human
augggaggcaggcucagaaccg

SEQ ID NO: 385663 - RNA, 22 nt, Human
uuccuuagauccuucaaucacg

SEQ ID NO: 385664 - RNA, 22 nt, Human
gcugugcagauguagggagugg

SEQ ID NO: 385665 - RNA, 22 nt, Human
gcccucagaggacagcugacuu

SEQ ID NO: 385666 - RNA, 23 nt, Human
acuuuauugaccccaggucaguu

SEQ ID NO: 385667 - RNA, 22 nt, Human
ggacuggacucucaggcucaca

SEQ ID NO: 385668 - RNA, 22 nt, Human
agaugaagauaucugcaggggc

SEQ ID NO: 385669 - RNA, 22 nt, Human
ggccccacgggggaguccuagu

SEQ ID NO: 385670 - RNA, 22 nt, Human
ugauuuccacgugcacccaggu

SEQ ID NO: 385671 - RNA, 22 nt, Human
gaguuguucaacgugugugaaa

SEQ ID NO: 385672 - RNA, 22 nt, Human
uggcucagagccuugagagcug

SEQ ID NO: 385673 - RNA, 22 nt, Human
aggauuuagcaugaaaugugaa

SEQ ID NO: 385674 - RNA, 22 nt, Human
ugcagagaagaggacaguucua

SEQ ID NO: 385675 - RNA, 22 nt, Human
accuggcaugaagcaugccuua

SEQ ID NO: 385676 - RNA, 22 nt, Human
cugccuugaggagguuguggga

SEQ ID NO: 385677 - RNA, 22 nt, Human
aacaaacaaacauuuugucauc

SEQ ID NO: 385678 - RNA, 22 nt, Human
uuugcauuuguuuagaaccuga

SEQ ID NO: 385679 - RNA, 22 nt, Human
gccacccugagcugggccaggg

SEQ ID NO: 385680 - RNA, 22 nt, Human
ucugccuggauuccauucucca

SEQ ID NO: 385681 - RNA, 22 nt, Human
auuguacuuuuauuacauguag

SEQ ID NO: 385682 - RNA, 21 nt, Human
agccagcuaucacacagcauu

SEQ ID NO: 385683 - RNA, 22 nt, Human
ugggcugcugucugcacaugcu

SEQ ID NO: 385684 - RNA, 22 nt, Human
cuagccaugggcauuaaaggua

SEQ ID NO: 385685 - RNA, 22 nt, Human
ggcacugacugugcagcgcacc

SEQ ID NO: 385686 - RNA, 22 nt, Human
aagaggagacuucagcaacuug

SEQ ID NO: 385687 - RNA, 22 nt, Human
ucuuuccauggccacacagucu

SEQ ID NO: 385688 - RNA, 22 nt, Human
ccaggccugugcaaggagggag

SEQ ID NO: 385689 - RNA, 22 nt, Human
ucugccugagcagagggaggcc

SEQ ID NO: 385690 - RNA, 22 nt, Human
gggccccuuguaucucuggcuc

SEQ ID NO: 385691 - RNA, 22 nt, Human
ugggcuggcugaacuucaaccu

SEQ ID NO: 385692 - RNA, 22 nt, Human
aggauuuauuauaugcccucau

SEQ ID NO: 385693 - RNA, 22 nt, Human
acccaggccugagagacaggag

SEQ ID NO: 385694 - RNA, 22 nt, Human
ucugucugcucauuuaccucag

SEQ ID NO: 385695 - RNA, 22 nt, Human
cacagaggacuguagcggggag

SEQ ID NO: 385696 - RNA, 22 nt, Human
ggcucagggaaugaggaagaau

SEQ ID NO: 385697 - RNA, 22 nt, Human
cagcuggcagcccuggcccugc

SEQ ID NO: 385698 - RNA, 22 nt, Human
cccaggcaucccauuaaggagc

SEQ ID NO: 385699 - RNA, 22 nt, Human
ugcugugggcaguacauaagcu

SEQ ID NO: 385700 - RNA, 19 nt, Human
gagcugagaguagcacugg

SEQ ID NO: 385701 - RNA, 22 nt, Human
cucugagaaagcugugagcuaa

SEQ ID NO: 385702 - RNA, 23 nt, Human
cagaaaacccagagcucaguccc

SEQ ID NO: 385703 - RNA, 22 nt, Human
uggcagcuauggucuaagggcc

SEQ ID NO: 385704 - RNA, 22 nt, Human
ggcacugaaccaggacacaagc

SEQ ID NO: 385705 - RNA, 22 nt, Human
agagagcauggcacagaggggu

SEQ ID NO: 385706 - RNA, 22 nt, Human
ggcauuuagauugaauuucugu

SEQ ID NO: 385707 - RNA, 22 nt, Human
cagcaucuaaucuucaugccgg

SEQ ID NO: 385708 - RNA, 18 nt, Human
cugaggcuuagagagguu

SEQ ID NO: 385709 - RNA, 22 nt, Human
gagagggcugccuggugugagg

SEQ ID NO: 385710 - RNA, 19 nt, Human
ggugaccaccuggucagug

SEQ ID NO: 385711 - RNA, 22 nt, Human
aauugagugcagccagcccagu

SEQ ID NO: 385712 - RNA, 22 nt, Human
ucaggugguccuaagugccauc

SEQ ID NO: 385713 - RNA, 22 nt, Human
ugcaggagcagagauggcugga

SEQ ID NO: 385714 - RNA, 22 nt, Human
ccugcugugaaacuggcauaug

SEQ ID NO: 385715 - RNA, 22 nt, Human
ccuggaucuaaggaagcuggga

SEQ ID NO: 385716 - RNA, 17 nt, Human
uguuuucauucauugcu

SEQ ID NO: 385717 - RNA, 22 nt, Human
gggcaggagagaacagucaugg

SEQ ID NO: 385718 - RNA, 22 nt, Human
aaaaaugaauucuucaguggca

SEQ ID NO: 385719 - RNA, 19 nt, Human
ugagagugaggaaggcuuc

SEQ ID NO: 385720 - RNA, 22 nt, Human
cuuuacauaaggauaaaccugg

SEQ ID NO: 385721 - RNA, 22 nt, Human
gucucuggguuaagcagugcau

SEQ ID NO: 385722 - RNA, 22 nt, Human
ugccugucuuuccucccucgua

SEQ ID NO: 385723 - RNA, 22 nt, Human
gccacaugucaugugcucagua

SEQ ID NO: 385724 - RNA, 22 nt, Human
agucccuguacuuuccacugcc

SEQ ID NO: 385725 - RNA, 22 nt, Human
gaggcaguggucugaugcaagg

SEQ ID NO: 385726 - RNA, 21 nt, Human
agaauucuuaaguauucuaau

SEQ ID NO: 385727 - RNA, 22 nt, Human
ucugggagggagccucagaauc

SEQ ID NO: 385728 - RNA, 22 nt, Human
aggcagugugggccaagcuucc

SEQ ID NO: 385729 - RNA, 22 nt, Human
ucacugucugaaagaaauggcc

SEQ ID NO: 385730 - RNA, 22 nt, Human
aagugauuucugccugcauguu

SEQ ID NO: 385731 - RNA, 22 nt, Human
agcagggcaguuaaaggguccu

SEQ ID NO: 385732 - RNA, 22 nt, Human
uacaggcacugaaaugcuuauu

SEQ ID NO: 385733 - RNA, 22 nt, Human
cagucuggaggucagcuggcuu

SEQ ID NO: 385734 - RNA, 22 nt, Human
aagaagguguggaaagaugcuc

SEQ ID NO: 385735 - RNA, 22 nt, Human
auuccaaagacagaagcagcug

SEQ ID NO: 385736 - RNA, 22 nt, Human
uuacucagucucccauacauug

SEQ ID NO: 385737 - RNA, 20 nt, Human
uacaauacacaugcauauga

SEQ ID NO: 385738 - RNA, 22 nt, Human
cugcugcucgaccagucccagg

SEQ ID NO: 385739 - RNA, 23 nt, Human
ugagaagccauuagagcaggugg

SEQ ID NO: 385740 - RNA, 22 nt, Human
uuacuuuggguccugcuuauaa

SEQ ID NO: 385741 - RNA, 22 nt, Human
ucuggcucucauacucgccagu

SEQ ID NO: 385742 - RNA, 20 nt, Human
uucuauacauaucacugaaa

SEQ ID NO: 385743 - RNA, 18 nt, Human
aacaguuuccagauucuc

SEQ ID NO: 385744 - RNA, 22 nt, Human
caggugcuguccugcacauguc

SEQ ID NO: 385745 - RNA, 22 nt, Human
auuccaaacagugcugcagacu

SEQ ID NO: 385746 - RNA, 22 nt, Human
uauguacaguccuuaacuuaaa

SEQ ID NO: 385747 - RNA, 22 nt, Human
ggugccagccuagugcaguggu

SEQ ID NO: 385748 - RNA, 18 nt, Human
agacccucuaagggcagu

SEQ ID NO: 385749 - RNA, 22 nt, Human
uaaugucagcauaguuuauuuu

SEQ ID NO: 385750 - RNA, 22 nt, Human
gcucuuccauuucucuugaacu

SEQ ID NO: 385751 - RNA, 22 nt, Human
guaucacuuuugagagugagaa

SEQ ID NO: 385752 - RNA, 22 nt, Human
agcagcagauccaaaaaaugug

SEQ ID NO: 385753 - RNA, 22 nt, Human
guggagccaggaucuccgcaca

SEQ ID NO: 385754 - RNA, 22 nt, Human
ggcucuggagacauguggagag

SEQ ID NO: 385755 - RNA, 22 nt, Human
gugauuucuaaucaucugaaug

SEQ ID NO: 385756 - RNA, 22 nt, Human
accaugccaguggcagccagac

SEQ ID NO: 385757 - RNA, 21 nt, Human
agcaggaggcagucacagcuc

SEQ ID NO: 385758 - RNA, 22 nt, Human
cugcuucuaagaaccugcagcu

SEQ ID NO: 385759 - RNA, 22 nt, Human
uuucuacauucaaaaacuacca

SEQ ID NO: 385760 - RNA, 22 nt, Human
cucaaggaaagucuggagaaga

SEQ ID NO: 385761 - RNA, 22 nt, Human
gugaauaaccuacuccaggccu

SEQ ID NO: 385762 - RNA, 22 nt, Human
uuuauccauaucauuaaaaucu

SEQ ID NO: 385763 - RNA, 22 nt, Human
aguuaucagguguuuucaugga

SEQ ID NO: 385764 - RNA, 20 nt, Human
ugaaggccauuuguuccaga

SEQ ID NO: 385765 - RNA, 22 nt, Human
agauuuccaucuuuuucaugug

SEQ ID NO: 385766 - RNA, 22 nt, Human
acuuuagaccaucuuccacagu

SEQ ID NO: 385767 - RNA, 18 nt, Human
ggcugugcguggaggcug

SEQ ID NO: 385768 - RNA, 22 nt, Human
caaaguuaucaacugcaacauu

SEQ ID NO: 385769 - RNA, 22 nt, Human
ccugcucugguuuagucagucu

SEQ ID NO: 385770 - RNA, 22 nt, Human
cugaugcuauaagccacagugg

SEQ ID NO: 385771 - RNA, 22 nt, Human
acuggcagccacaacuggcagg

SEQ ID NO: 385772 - RNA, 22 nt, Human
uuucaaaguugggaauuguaau

SEQ ID NO: 385773 - RNA, 22 nt, Human
agucuuuccugcuugacuguuc

SEQ ID NO: 385774 - RNA, 19 nt, Human
aggagaaguagcagaaauu

SEQ ID NO: 385775 - RNA, 22 nt, Human
aauggacaggagagcauaguca

SEQ ID NO: 385776 - RNA, 22 nt, Human
cugcuuuguggaaucacacugg

SEQ ID NO: 385777 - RNA, 22 nt, Human
uucuggagcuaaaguccacucu

SEQ ID NO: 385778 - RNA, 22 nt, Human
ugucccauggauaccaggcuau

SEQ ID NO: 385779 - RNA, 22 nt, Human
augaggcuaugaauggggagau

SEQ ID NO: 385780 - RNA, 22 nt, Human
gagagggauacugaguuuuggu

SEQ ID NO: 385781 - RNA, 22 nt, Human
gcagcuuuagaaacaagggcug

SEQ ID NO: 385782 - RNA, 22 nt, Human
ggucucagaucuuuauuaaggc

SEQ ID NO: 385783 - RNA, 22 nt, Human
guauuaggugguggaauuguag

SEQ ID NO: 385784 - RNA, 22 nt, Human
guucuucaggccauccucccag

SEQ ID NO: 385785 - RNA, 22 nt, Human
caggagagcccggguccgggcu

SEQ ID NO: 385786 - RNA, 22 nt, Human
gcaggggaguccacucuaugca

SEQ ID NO: 385787 - RNA, 22 nt, Human
aggagcagaccguaguccugca

SEQ ID NO: 385788 - RNA, 22 nt, Human
agauggggcagaauggagccau

SEQ ID NO: 385789 - RNA, 22 nt, Human
ucauucuuuaccaaguugucac

SEQ ID NO: 385790 - RNA, 22 nt, Human
ugaaaucugucccacuuuagcu

SEQ ID NO: 385791 - RNA, 22 nt, Human
cggggcuguagcacagcugagc

SEQ ID NO: 385792 - RNA, 22 nt, Human
guuauaaaugacugcaaaaguu

SEQ ID NO: 385793 - RNA, 22 nt, Human
ucagaacagaagaaggaacacg

SEQ ID NO: 385794 - RNA, 22 nt, Human
agcuucuggaaggcaaggcuug

SEQ ID NO: 385795 - RNA, 22 nt, Human
gccagagguucaacaacugucu

SEQ ID NO: 385796 - RNA, 18 nt, Human
gcucugcccaggcugccc

SEQ ID NO: 385797 - RNA, 22 nt, Human
cagcugcuguuacugcuuauua

SEQ ID NO: 385798 - RNA, 22 nt, Human
cagggacugagauccagacugu

SEQ ID NO: 385799 - RNA, 22 nt, Human
agagccagguguagucucggag

SEQ ID NO: 385800 - RNA, 22 nt, Human
gggcuugcugauuugggcagga

SEQ ID NO: 385801 - RNA, 22 nt, Human
ccagguggaggugugagguccu

SEQ ID NO: 385802 - RNA, 19 nt, Human
agggagaauuccaagagga

SEQ ID NO: 385803 - RNA, 22 nt, Human
caguauuuguucccuaucaaug

SEQ ID NO: 385804 - RNA, 22 nt, Human
acuuccugggcaugcagagucc

SEQ ID NO: 385805 - RNA, 22 nt, Human
gaggggagacagggaaaucagu

SEQ ID NO: 385806 - RNA, 22 nt, Human
acaggcagguugagaaacauuu

SEQ ID NO: 385807 - RNA, 22 nt, Human
cuauaauuaugcucaaaaugua

SEQ ID NO: 385808 - RNA, 19 nt, Human
aggcagcauucuggggcuu

SEQ ID NO: 385809 - RNA, 22 nt, Human
ccugggagcuguggaaaggcug

SEQ ID NO: 385810 - RNA, 20 nt, Human
caucagugccugacaggucc

SEQ ID NO: 385811 - RNA, 22 nt, Human
ggagaaggugcuggucacugug

SEQ ID NO: 385812 - RNA, 22 nt, Human
uuucauaaccucaagcuacagu

SEQ ID NO: 385813 - RNA, 22 nt, Human
agugaaauuuguuuagauaggu

SEQ ID NO: 385814 - RNA, 22 nt, Human
gcuguauuuauuuucuaggguu

SEQ ID NO: 385815 - RNA, 22 nt, Human
aacagaacccgagugugaaucu

SEQ ID NO: 385816 - RNA, 22 nt, Human
cauccagggcagccauggccug

SEQ ID NO: 385817 - RNA, 22 nt, Human
caguccuuauuccuauauuccu

SEQ ID NO: 385818 - RNA, 22 nt, Human
cucugagagcggucuguggcuu

SEQ ID NO: 385819 - RNA, 22 nt, Human
ugaagcaggaaacuucuuguuu

SEQ ID NO: 385820 - RNA, 22 nt, Human
uucucagagugaccaagucuuu

SEQ ID NO: 385821 - RNA, 22 nt, Human
uuuucaagggcagggaaaucau

SEQ ID NO: 385822 - RNA, 22 nt, Human
agcuggcagagcauuuguggcc

SEQ ID NO: 385823 - RNA, 22 nt, Human
aucuggcuuuuacugaauugcu

SEQ ID NO: 385824 - RNA, 22 nt, Human
uauuuguugaguuguuaugucu

SEQ ID NO: 385825 - RNA, 22 nt, Human
cucuggagcaccgggcuaucca

SEQ ID NO: 385826 - RNA, 22 nt, Human
cagagcugcagauugaaggcau

SEQ ID NO: 385827 - RNA, 22 nt, Human
accaaggagacaaagguguauu

SEQ ID NO: 385828 - RNA, 22 nt, Human
gcagcuguggguuccaagucua

SEQ ID NO: 385829 - RNA, 20 nt, Human
ucucaggccccaguuuucuu

SEQ ID NO: 385830 - RNA, 22 nt, Human
cacugcccagcgucuuaggcac

SEQ ID NO: 385831 - RNA, 21 nt, Human
aaaguucaugcuuuaauauuc

SEQ ID NO: 385832 - RNA, 22 nt, Human
uuagggacaaauuugcagaacc

SEQ ID NO: 385833 - RNA, 22 nt, Human
acaugaaacuguugcauuagaa

SEQ ID NO: 385834 - RNA, 22 nt, Human
aauauuaucaaaagcuuuuuca

SEQ ID NO: 385835 - RNA, 22 nt, Human
uacauaaugagcuaguuaaguu

SEQ ID NO: 385836 - RNA, 20 nt, Human
gcugucuggauuagaagccu

SEQ ID NO: 385837 - RNA, 23 nt, Human
ugcugguguuuuugggaccaggg

SEQ ID NO: 385838 - RNA, 22 nt, Human
cugucucugucuuaacucccag

SEQ ID NO: 385839 - RNA, 22 nt, Human
acauugcugcauucuccuuccc

SEQ ID NO: 385840 - RNA, 22 nt, Human
auacuguaauaccuaaaugaac

SEQ ID NO: 385841 - RNA, 22 nt, Human
auaaggcagucacuggaauguu

SEQ ID NO: 385842 - RNA, 20 nt, Human
agcuggccuguccuaggccu

SEQ ID NO: 385843 - RNA, 22 nt, Human
agccugagccccauccagcuga

SEQ ID NO: 385844 - RNA, 21 nt, Human
uccauuguuuucccaggguuu

SEQ ID NO: 385845 - RNA, 22 nt, Human
uuccucuccucccaccagguga

SEQ ID NO: 385846 - RNA, 22 nt, Human
auucuucauaccuacugagguu

SEQ ID NO: 385847 - RNA, 22 nt, Human
ucagccugcuccaagugcugcc

SEQ ID NO: 385848 - RNA, 22 nt, Human
caccagcuuugcccacugccca

SEQ ID NO: 385849 - RNA, 22 nt, Human
gcagggacaucuuugucuagua

SEQ ID NO: 385850 - RNA, 22 nt, Human
agccaggccuuagggagaggca

SEQ ID NO: 385851 - RNA, 22 nt, Human
ccagcuggaagagugcagaacu

SEQ ID NO: 385852 - RNA, 21 nt, Human
aguugcauaggccagccaucc

SEQ ID NO: 385853 - RNA, 22 nt, Human
agaggccggccgagcccauggg

SEQ ID NO: 385854 - RNA, 18 nt, Human
ccgggcuuuggugacaca

SEQ ID NO: 385855 - RNA, 19 nt, Human
gagcacagcggcauuuggu

SEQ ID NO: 385856 - RNA, 22 nt, Human
agcagaaccacagcacuguuga

SEQ ID NO: 385857 - RNA, 22 nt, Human
caggcuugcugcuagagcacuu

SEQ ID NO: 385858 - RNA, 22 nt, Human
ucuggcuccaccuccuuuacua

SEQ ID NO: 385859 - RNA, 22 nt, Human
gcagggcagccacaggcccccu

SEQ ID NO: 385860 - RNA, 22 nt, Human
ggccucucuccuuggcuugcag

SEQ ID NO: 385861 - RNA, 22 nt, Human
ggucccaguugcccaggucagg

SEQ ID NO: 385862 - RNA, 20 nt, Human
acaggggcagcacaauaaug

SEQ ID NO: 385863 - RNA, 22 nt, Human
ugccagucucacccuggguccu

SEQ ID NO: 385864 - RNA, 23 nt, Human
cauggcagcaagagcucauggcc

SEQ ID NO: 385865 - RNA, 22 nt, Human
uuuucauuguuccucgagcauu

SEQ ID NO: 385866 - RNA, 22 nt, Human
acacagccgugaaucugcuucu

SEQ ID NO: 385867 - RNA, 22 nt, Human
aggccagcaagaaagagagucu

SEQ ID NO: 385868 - RNA, 22 nt, Human
agaccacagucaggcuccuggu

SEQ ID NO: 385869 - RNA, 22 nt, Human
ggagccaggcaaucuguacuuu

SEQ ID NO: 385870 - RNA, 22 nt, Human
uuuggaauuggcauucuauucu

SEQ ID NO: 385871 - RNA, 22 nt, Human
auggagacgcaagggaccuagg

SEQ ID NO: 385872 - RNA, 22 nt, Human
ucaagagacaggacguguuuca

SEQ ID NO: 385873 - RNA, 22 nt, Human
aggcagcagucaugaggaaaga

SEQ ID NO: 385874 - RNA, 22 nt, Human
ucaguuuuucuauacuuuguag

SEQ ID NO: 385875 - RNA, 23 nt, Human
acaaaugcccauacaucuaguuc

SEQ ID NO: 385876 - RNA, 22 nt, Human
uggcaucucaaacaggcagauu

SEQ ID NO: 385877 - RNA, 22 nt, Human
ccagagaguaaacauuuuccgg

SEQ ID NO: 385878 - RNA, 22 nt, Human
uugauuccuugaaauauccuug

SEQ ID NO: 385879 - RNA, 22 nt, Human
ggggcugggauuugaacccagg

SEQ ID NO: 385880 - RNA, 22 nt, Human
uggcauuucuguuagacucuca

SEQ ID NO: 385881 - RNA, 22 nt, Human
uaugaaauuuaaacacagauca

SEQ ID NO: 385882 - RNA, 18 nt, Human
gugagcagagagcaucac

SEQ ID NO: 385883 - RNA, 22 nt, Human
ugaggcaggagaauggcgggaa

SEQ ID NO: 385884 - RNA, 22 nt, Human
caguggaggcucaagugugcuu

SEQ ID NO: 385885 - RNA, 19 nt, Human
ggcugccuuuccuuaccag

SEQ ID NO: 385886 - RNA, 22 nt, Human
cagagaaaaaauccugcucuca

SEQ ID NO: 385887 - RNA, 22 nt, Human
ccuguucaccauggucacgugc

SEQ ID NO: 385888 - RNA, 22 nt, Human
cagcccagagauguuaucuagu

SEQ ID NO: 385889 - RNA, 22 nt, Human
uauguacaccggggaagguggg

SEQ ID NO: 385890 - RNA, 22 nt, Human
ggccaggagauggacaccacau

SEQ ID NO: 385891 - RNA, 22 nt, Human
gcagagccagaauggccaggac

SEQ ID NO: 385892 - RNA, 22 nt, Human
ccaggcucugagccucacucuu

SEQ ID NO: 385893 - RNA, 22 nt, Human
aucagcaaguccuguuaauucu

SEQ ID NO: 385894 - RNA, 20 nt, Human
aaguuacauuguauuguacc

SEQ ID NO: 385895 - RNA, 22 nt, Human
cugagccagggccacacaugga

SEQ ID NO: 385896 - RNA, 22 nt, Human
uggcucaguuccaucaucugga

SEQ ID NO: 385897 - RNA, 22 nt, Human
cauuauguucaguagcuuaaaa

SEQ ID NO: 385898 - RNA, 22 nt, Human
ugaaauuccaggagaguuaaaa

SEQ ID NO: 385899 - RNA, 19 nt, Human
aacuggauaauggccacau

SEQ ID NO: 385900 - RNA, 21 nt, Human
cucagagaaaugucugggagc

SEQ ID NO: 385901 - RNA, 22 nt, Human
cuggccugaucucaugcugucc

SEQ ID NO: 385902 - RNA, 22 nt, Human
auugaaagauuuugggcucaug

SEQ ID NO: 385903 - RNA, 22 nt, Human
agcugagccagcagcaacagga

SEQ ID NO: 385904 - RNA, 22 nt, Human
caggcacuguguuaggcacugu

SEQ ID NO: 385905 - RNA, 22 nt, Human
ggaaaaggccauuguuucucug

SEQ ID NO: 385906 - RNA, 22 nt, Human
uaguccuugguaaaauucuaug

SEQ ID NO: 385907 - RNA, 21 nt, Human
gcucagaguauugcacuguuu

SEQ ID NO: 385908 - RNA, 22 nt, Human
ggcaggagcucuccaguuugcc

SEQ ID NO: 385909 - RNA, 22 nt, Human
ccuggagcaggagcugcagagg

SEQ ID NO: 385910 - RNA, 22 nt, Human
guguguccucaguaguggcaug

SEQ ID NO: 385911 - RNA, 22 nt, Human
ccagggcaggagaaagacucac

SEQ ID NO: 385912 - RNA, 22 nt, Human
uuuccaaacccagcgagcuaca

SEQ ID NO: 385913 - RNA, 22 nt, Human
uaagaacagugucugucucaca

SEQ ID NO: 385914 - RNA, 22 nt, Human
augcaaaauaaggcagaaacau

SEQ ID NO: 385915 - RNA, 22 nt, Human
ugaggcaggacugagcgggaug

SEQ ID NO: 385916 - RNA, 22 nt, Human
acuuuuuacaggguguauacca

SEQ ID NO: 385917 - RNA, 20 nt, Human
uagaaaucuuauaaaagacu

SEQ ID NO: 385918 - RNA, 22 nt, Human
cagaggcagccgggggagaacg

SEQ ID NO: 385919 - RNA, 22 nt, Human
uggagcaggugccaggugugug

SEQ ID NO: 385920 - RNA, 22 nt, Human
gcaguggauggccagcaggggc

SEQ ID NO: 385921 - RNA, 22 nt, Human
uuccuguaugucagugaagagc

SEQ ID NO: 385922 - RNA, 22 nt, Human
ccagccaggcuggcuguggagg

SEQ ID NO: 385923 - RNA, 22 nt, Human
aaacugcugguugcuggccagc

SEQ ID NO: 385924 - RNA, 22 nt, Human
ucaguggauauuucuguggcug

SEQ ID NO: 385925 - RNA, 22 nt, Human
uaguuacagcaggcaggauaua

SEQ ID NO: 385926 - RNA, 22 nt, Human
aucaguuugauaauaaggcuug

SEQ ID NO: 385927 - RNA, 19 nt, Human
agggccugcagcucaagcu

SEQ ID NO: 385928 - RNA, 22 nt, Human
uguaugcagggcuuguaugcag

SEQ ID NO: 385929 - RNA, 21 nt, Human
aggcagaaagagcccaggcug

SEQ ID NO: 385930 - RNA, 22 nt, Human
ucuucagagugaaagucuguga

SEQ ID NO: 385931 - RNA, 22 nt, Human
agcugcucucacuggacgccug

SEQ ID NO: 385932 - RNA, 22 nt, Human
acuuuuaugauaaucaauguuc

SEQ ID NO: 385933 - RNA, 22 nt, Human
cuuauuauaaaauccuguuuga

SEQ ID NO: 385934 - RNA, 22 nt, Human
aggaagccugcaggugacugcu

SEQ ID NO: 385935 - RNA, 21 nt, Human
gcaggcuggucaaaccucagu

SEQ ID NO: 385936 - RNA, 22 nt, Human
uccucaggagagcuccuaugcc

SEQ ID NO: 385937 - RNA, 20 nt, Human
gccagcacagggagcaguuc

SEQ ID NO: 385938 - RNA, 19 nt, Human
uggaagaggaagggaaaua

SEQ ID NO: 385939 - RNA, 22 nt, Human
aaauagcacagcagcugaggcu

SEQ ID NO: 385940 - RNA, 21 nt, Human
ggcagcccgcccucuccuggc

SEQ ID NO: 385941 - RNA, 22 nt, Human
uuaacacuugaacucuacaugu

SEQ ID NO: 385942 - RNA, 22 nt, Human
cagggcucaggaaaucagacgu

SEQ ID NO: 385943 - RNA, 22 nt, Human
ugcuggggagugauugaccauc

SEQ ID NO: 385944 - RNA, 22 nt, Human
uauguuauuuucauacaacaga

SEQ ID NO: 385945 - RNA, 22 nt, Human
uggcuguguuaccacuucaugu

SEQ ID NO: 385946 - RNA, 22 nt, Human
aggcagucuaguccccaggcaa

SEQ ID NO: 385947 - RNA, 22 nt, Human
cugcugugucagaguccagggg

SEQ ID NO: 385948 - RNA, 22 nt, Human
aggcagacaaggucccuggucu

SEQ ID NO: 385949 - RNA, 22 nt, Human
uauauaacuacuauuuugcuca

SEQ ID NO: 385950 - RNA, 22 nt, Human
uucucagauccaucagaagucc

SEQ ID NO: 385951 - RNA, 22 nt, Human
gugggugauguacuggaggcca

SEQ ID NO: 385952 - RNA, 22 nt, Human
uggaagagggagcuggguggcc

SEQ ID NO: 385953 - RNA, 22 nt, Human
gagcugggcacacgccacuuga

SEQ ID NO: 385954 - RNA, 22 nt, Human
ucaggcugaaucauccuagcuu

SEQ ID NO: 385955 - RNA, 20 nt, Human
cugugcuuuggaaccuggaa

SEQ ID NO: 385956 - RNA, 22 nt, Human
gcuguauuccugcacuguauag

SEQ ID NO: 385957 - RNA, 22 nt, Human
uggcauuuucuccuuugaguuu

SEQ ID NO: 385958 - RNA, 22 nt, Human
aggagagagcugagcuuugcug

SEQ ID NO: 385959 - RNA, 22 nt, Human
acagaggccccgugggagagcc

SEQ ID NO: 385960 - RNA, 22 nt, Human
cauuuguaucauauguaucuua

SEQ ID NO: 385961 - RNA, 22 nt, Human
agauaugacuagaagcucauuu

SEQ ID NO: 385962 - RNA, 22 nt, Human
uuacagaaaagggguuguccuu

SEQ ID NO: 385963 - RNA, 22 nt, Human
caguggagaggcaugcuuggca

SEQ ID NO: 385964 - RNA, 22 nt, Human
aaagauucgagcgauguauaaa

SEQ ID NO: 385965 - RNA, 22 nt, Human
uccuucaggguugaggccgacu

SEQ ID NO: 385966 - RNA, 22 nt, Human
uauccaaaguuucucagaaacu

SEQ ID NO: 385967 - RNA, 22 nt, Human
uuucaguuuuugcucgauguau

SEQ ID NO: 385968 - RNA, 21 nt, Human
uucuccccagcgaauccucgg

SEQ ID NO: 385969 - RNA, 22 nt, Human
gagggcugugaaggagcggguu

SEQ ID NO: 385970 - RNA, 22 nt, Human
uucaguuucagucuugcaaaaa

SEQ ID NO: 385971 - RNA, 22 nt, Human
uuuacucuugcuacacaacugu

SEQ ID NO: 385972 - RNA, 22 nt, Human
cugggcuccuaaccauccaggu

SEQ ID NO: 385973 - RNA, 22 nt, Human
aggauuuauuccagaaaugcaa

SEQ ID NO: 385974 - RNA, 22 nt, Human
cugugcaguggcagcguguggg

SEQ ID NO: 385975 - RNA, 22 nt, Human
ggagcugugcugggugaucagg

SEQ ID NO: 385976 - RNA, 22 nt, Human
cagacaggcuagccagacucac

SEQ ID NO: 385977 - RNA, 22 nt, Human
auuucacucauucauguuacuu

SEQ ID NO: 385978 - RNA, 22 nt, Human
agcugagcucaggcugauguaa

SEQ ID NO: 385979 - RNA, 22 nt, Human
ugaggcagguggauuacaaggu

SEQ ID NO: 385980 - RNA, 22 nt, Human
uucaucaauguguuuaauaaug

SEQ ID NO: 385981 - RNA, 22 nt, Human
uguccucaaggagcuucagucu

SEQ ID NO: 385982 - RNA, 22 nt, Human
auacaaugauaauaguacuuua

SEQ ID NO: 385983 - RNA, 22 nt, Human
aggagugaguguccucagcaga

SEQ ID NO: 385984 - RNA, 22 nt, Human
uucucuucuguucagugcccaa

SEQ ID NO: 385985 - RNA, 22 nt, Human
uugcuagcugguguaugcauug

SEQ ID NO: 385986 - RNA, 22 nt, Human
cauaccuuucucaagcacaugu

SEQ ID NO: 385987 - RNA, 22 nt, Human
cuaugaaaggauuuggaguugu

SEQ ID NO: 385988 - RNA, 22 nt, Human
ccaggcuuucccagccucucca

SEQ ID NO: 385989 - RNA, 22 nt, Human
gugggccucuugaggguggcua

SEQ ID NO: 385990 - RNA, 22 nt, Human
auugaaucugcacuaguauuuu

SEQ ID NO: 385991 - RNA, 22 nt, Human
gcugagagcaaagcaugucuag

SEQ ID NO: 385992 - RNA, 20 nt, Human
cagcccuccaguggaggcag

SEQ ID NO: 385993 - RNA, 22 nt, Human
uguggucucguuauguugccca

SEQ ID NO: 385994 - RNA, 22 nt, Human
gaggcucaguuauuuuagccug

SEQ ID NO: 385995 - RNA, 22 nt, Human
gcugucacucaccaggccugca

SEQ ID NO: 385996 - RNA, 22 nt, Human
ucuugcacuucaugaauauguu

SEQ ID NO: 385997 - RNA, 22 nt, Human
cauggcuuuguucauauaauuu

SEQ ID NO: 385998 - RNA, 22 nt, Human
uuaacagagaacauagaaguag

SEQ ID NO: 385999 - RNA, 22 nt, Human
uugaaggaggcuccuuuuuaaa

SEQ ID NO: 386000 - RNA, 22 nt, Human
gaaaucugaacaacagcuguca

SEQ ID NO: 386001 - RNA, 22 nt, Human
aagcagagccaccagcuuugga

SEQ ID NO: 386002 - RNA, 22 nt, Human
cuggugagacgguugacaggag

SEQ ID NO: 386003 - RNA, 22 nt, Human
ucuucauuuuacaggcagaccu

SEQ ID NO: 386004 - RNA, 22 nt, Human
uuucaaauagaaucuuuccaaa

SEQ ID NO: 386005 - RNA, 22 nt, Human
auuuccaaaaccacuuauugcc

SEQ ID NO: 386006 - RNA, 22 nt, Human
uccaugugccaaggggcagagg

SEQ ID NO: 386007 - RNA, 22 nt, Human
agugcagccgagaucaggugcu

SEQ ID NO: 386008 - RNA, 22 nt, Human
ucacgagaggcacagaauagag

SEQ ID NO: 386009 - RNA, 22 nt, Human
cacagcuuaugccacugauugg

SEQ ID NO: 386010 - RNA, 22 nt, Human
uggggcugaggagccucacucu

SEQ ID NO: 386011 - RNA, 22 nt, Human
uacacuuuuuacuacagauucu

SEQ ID NO: 386012 - RNA, 21 nt, Human
aucagaaguuuuggucaguag

SEQ ID NO: 386013 - RNA, 22 nt, Human
cuggauuuaggacuaguccaag

SEQ ID NO: 386014 - RNA, 22 nt, Human
gugguuuugccauuacaaguaa

SEQ ID NO: 386015 - RNA, 22 nt, Human
uugacacaguuuucucauuaag

SEQ ID NO: 386016 - RNA, 19 nt, Human
ccauggagagagaugcauu

SEQ ID NO: 386017 - RNA, 22 nt, Human
augggaggaugcucgggugcuc

SEQ ID NO: 386018 - RNA, 22 nt, Human
uccagccuuucuacucacugag

SEQ ID NO: 386019 - RNA, 22 nt, Human
gcagaggagaugaagauacuuu

SEQ ID NO: 386020 - RNA, 22 nt, Human
gcuggcuugauaguuucugcuu

SEQ ID NO: 386021 - RNA, 22 nt, Human
auauuuaaacaggguaccaaua

SEQ ID NO: 386022 - RNA, 22 nt, Human
uuuuaaguuaauauaauugagg

SEQ ID NO: 386023 - RNA, 22 nt, Human
accagagcuggcagaguaucaa

SEQ ID NO: 386024 - RNA, 22 nt, Human
agcagccacagcagaucugagu

SEQ ID NO: 386025 - RNA, 22 nt, Human
ccuuucucuggcagcaggacag

SEQ ID NO: 386026 - RNA, 22 nt, Human
aggaguggugcaggaccugcca

SEQ ID NO: 386027 - RNA, 22 nt, Human
cugugcuuccaggauggcagcu

SEQ ID NO: 386028 - RNA, 22 nt, Human
cuggccugugggcugucuccgg

SEQ ID NO: 386029 - RNA, 22 nt, Human
cuuggccucuucucaggguggg

SEQ ID NO: 386030 - RNA, 22 nt, Human
uaaauucagugaguaauuucug

SEQ ID NO: 386031 - RNA, 22 nt, Human
aaagcaauggaugagaaucugu

SEQ ID NO: 386032 - RNA, 22 nt, Human
ugcagggcacggugcgcguggg

SEQ ID NO: 386033 - RNA, 22 nt, Human
ucgggcucgcucuccuagcgga

SEQ ID NO: 386034 - RNA, 22 nt, Human
uuuaacagaugcuaugucuacc

SEQ ID NO: 386035 - RNA, 19 nt, Human
acaaagcugugagcagcuu

SEQ ID NO: 386036 - RNA, 22 nt, Human
uuaacauuguccuuagcagauu

SEQ ID NO: 386037 - RNA, 22 nt, Human
ccagaagggcuauugcagugac

SEQ ID NO: 386038 - RNA, 17 nt, Human
aaaauucuguaaagagg

SEQ ID NO: 386039 - RNA, 18 nt, Human
acauuucucucugcguga

SEQ ID NO: 386040 - RNA, 22 nt, Human
aggcugagcugguagugaguac

SEQ ID NO: 386041 - RNA, 22 nt, Human
ugucucaggcccaagccaguaa

SEQ ID NO: 386042 - RNA, 22 nt, Human
aggcagugcucaagacagcagc

SEQ ID NO: 386043 - RNA, 20 nt, Human
ugugcaggagagugaggcug

SEQ ID NO: 386044 - RNA, 22 nt, Human
cagcacuggggggauucggagc

SEQ ID NO: 386045 - RNA, 22 nt, Human
ugcaggcucacccuggagcuga

SEQ ID NO: 386046 - RNA, 22 nt, Human
gcacaauaacagccaagguuau

SEQ ID NO: 386047 - RNA, 22 nt, Human
agccucugcacgggcacgggug

SEQ ID NO: 386048 - RNA, 21 nt, Human
ccacauucucauucugacugc

SEQ ID NO: 386049 - RNA, 22 nt, Human
augcuauacauaugacaucaca

SEQ ID NO: 386050 - RNA, 18 nt, Human
gguggccuugacuucucu

SEQ ID NO: 386051 - RNA, 21 nt, Human
aggugcaggccucaagcccca

SEQ ID NO: 386052 - RNA, 22 nt, Human
auacaacuuuacaugcaauucc

SEQ ID NO: 386053 - RNA, 22 nt, Human
cagugaaaucacaacuuuaguu

SEQ ID NO: 386054 - RNA, 22 nt, Human
uugaaauggaagugaaaauucu

SEQ ID NO: 386055 - RNA, 22 nt, Human
uucugaaagccaauucauugaa

SEQ ID NO: 386056 - RNA, 22 nt, Human
cacugcuucuggaggaauuugg

SEQ ID NO: 386057 - RNA, 22 nt, Human
cugcugugagcacuccagccug

SEQ ID NO: 386058 - RNA, 17 nt, Human
aggcagcucagaacauc

SEQ ID NO: 386059 - RNA, 22 nt, Human
gggugacauuucccaaugagcc

SEQ ID NO: 386060 - RNA, 22 nt, Human
gcaugggcuuucucagaguucu

SEQ ID NO: 386061 - RNA, 22 nt, Human
cagggcuggcuguggcaaucuc

SEQ ID NO: 386062 - RNA, 22 nt, Human
auuauguagguuaggugguugu

SEQ ID NO: 386063 - RNA, 22 nt, Human
ugacucuguaccugucugccuu

SEQ ID NO: 386064 - RNA, 22 nt, Human
gaaauaagaguccaugccaggu

SEQ ID NO: 386065 - RNA, 22 nt, Human
ugcuugaaagggguuucccagu

SEQ ID NO: 386066 - RNA, 22 nt, Human
uucuucaaaauccagcaugauu

SEQ ID NO: 386067 - RNA, 19 nt, Human
uuagggacaugaauucuag

SEQ ID NO: 386068 - RNA, 22 nt, Human
ugugaaaggagccauagacagu

SEQ ID NO: 386069 - RNA, 22 nt, Human
aguuucauauuaccaugucacc

SEQ ID NO: 386070 - RNA, 20 nt, Human
uggagccacagucagguucc

SEQ ID NO: 386071 - RNA, 22 nt, Human
auagacauuuugcauucaagca

SEQ ID NO: 386072 - RNA, 22 nt, Human
auggcagagggauugaacagcu

SEQ ID NO: 386073 - RNA, 22 nt, Human
aggaccugagaguuggaaaucc

SEQ ID NO: 386074 - RNA, 22 nt, Human
acauuucuugaugccucuguga

SEQ ID NO: 386075 - RNA, 22 nt, Human
cagagcuguugcggggcuuggc

SEQ ID NO: 386076 - RNA, 22 nt, Human
agaggcaacauggggaacagau

SEQ ID NO: 386077 - RNA, 22 nt, Human
acuuugcagagccagaagagaa

SEQ ID NO: 386078 - RNA, 22 nt, Human
guacagaaggauuucuaguagu

SEQ ID NO: 386079 - RNA, 22 nt, Human
aaauugugagcuauagaucuag

SEQ ID NO: 386080 - RNA, 22 nt, Human
ugcuuauugcuuucaagacugu

SEQ ID NO: 386081 - RNA, 22 nt, Human
gauuucuuugcaagcuguguuc

SEQ ID NO: 386082 - RNA, 22 nt, Human
gguccuggaaauugacggaaag

SEQ ID NO: 386083 - RNA, 22 nt, Human
caugggcuuuggaggcuggagg

SEQ ID NO: 386084 - RNA, 22 nt, Human
caagggcuucaaguggccaaga

SEQ ID NO: 386085 - RNA, 22 nt, Human
cagaagccugccucagaugcac

SEQ ID NO: 386086 - RNA, 22 nt, Human
ugguuugcccacucgagugauu

SEQ ID NO: 386087 - RNA, 22 nt, Human
uggcagagacaaggccgggccu

SEQ ID NO: 386088 - RNA, 22 nt, Human
gaagggagaagguugggugacg

SEQ ID NO: 386089 - RNA, 22 nt, Human
agacugaauaacaagcaaauaa

SEQ ID NO: 386090 - RNA, 22 nt, Human
ggccucacccaucggugccuuu

SEQ ID NO: 386091 - RNA, 22 nt, Human
uucuucaaacaaaaguggcaug

SEQ ID NO: 386092 - RNA, 22 nt, Human
gcagagcucaugccugcaccuc

SEQ ID NO: 386093 - RNA, 22 nt, Human
ugggcaggaugcguugauucuu

SEQ ID NO: 386094 - RNA, 22 nt, Human
uugaacaguccuaagagacccu

SEQ ID NO: 386095 - RNA, 22 nt, Human
ugggccugccccaggcuucagc

SEQ ID NO: 386096 - RNA, 22 nt, Human
uggcugcugcuuggucuucuuc

SEQ ID NO: 386097 - RNA, 22 nt, Human
ucagcuuucucucgccaucagg

SEQ ID NO: 386098 - RNA, 23 nt, Human
ucugggcaccuuguugacaugau

SEQ ID NO: 386099 - RNA, 22 nt, Human
acuuugcacuaaguuacucauu

SEQ ID NO: 386100 - RNA, 22 nt, Human
uuugcagcaaggagagagcauu

SEQ ID NO: 386101 - RNA, 20 nt, Human
cagcaggaaaagugccucag

SEQ ID NO: 386102 - RNA, 22 nt, Human
ucccagcagucagagcuaugug

SEQ ID NO: 386103 - RNA, 22 nt, Human
gcacggcuaauuuuuguauuuu

SEQ ID NO: 386104 - RNA, 22 nt, Human
agcagcucugagaggccagcac

SEQ ID NO: 386105 - RNA, 22 nt, Human
cuggagcuccagggucuccucu

SEQ ID NO: 386106 - RNA, 22 nt, Human
ucaggcuggaaugcaguggggc

SEQ ID NO: 386107 - RNA, 22 nt, Human
aaugauuggcacuagauacaca

SEQ ID NO: 386108 - RNA, 22 nt, Human
caaaaugugagucccaccucaa

SEQ ID NO: 386109 - RNA, 23 nt, Human
gggggcugguugacucucugcag

SEQ ID NO: 386110 - RNA, 22 nt, Human
uccugagaaggcacagcuugca

SEQ ID NO: 386111 - RNA, 22 nt, Human
aucuggcuccuacacuugaaga

SEQ ID NO: 386112 - RNA, 22 nt, Human
gcagcuuucuaagcuuuauugc

SEQ ID NO: 386113 - RNA, 22 nt, Human
caaguccuaggucugauugaac

SEQ ID NO: 386114 - RNA, 22 nt, Human
ucacugcagagaccucuaguca

SEQ ID NO: 386115 - RNA, 22 nt, Human
guuaauuuaguagaguccagau

SEQ ID NO: 386116 - RNA, 22 nt, Human
ucauuuaauugguuuugcucgu

SEQ ID NO: 386117 - RNA, 22 nt, Human
uggcucagauaauucaaggggc

SEQ ID NO: 386118 - RNA, 23 nt, Human
gagugcagaauagacaugcagug

SEQ ID NO: 386119 - RNA, 23 nt, Human
gaggcagcuccugcagugcccug

SEQ ID NO: 386120 - RNA, 22 nt, Human
ggcuucugguaaagaccacacc

SEQ ID NO: 386121 - RNA, 22 nt, Human
gaaaauguuuguccggagcuga

SEQ ID NO: 386122 - RNA, 22 nt, Human
cuccucuggaaauuccucugcc

SEQ ID NO: 386123 - RNA, 22 nt, Human
uaggcagaaaggaaggcaaguu

SEQ ID NO: 386124 - RNA, 22 nt, Human
uuucaaagucaauaucauuacc

SEQ ID NO: 386125 - RNA, 22 nt, Human
auacauguucguguacauguuc

SEQ ID NO: 386126 - RNA, 22 nt, Human
gagauuuagagagacuuaaaca

SEQ ID NO: 386127 - RNA, 22 nt, Human
agcagagccagaauuggaccag

SEQ ID NO: 386128 - RNA, 22 nt, Human
gcagagcugucuaagucacuuc

SEQ ID NO: 386129 - RNA, 22 nt, Human
cuggcucaugugaugagggcaa

SEQ ID NO: 386130 - RNA, 22 nt, Human
ccuccaggcugaauaucuagaa

SEQ ID NO: 386131 - RNA, 22 nt, Human
auccaaagcccuaaguuaacug

SEQ ID NO: 386132 - RNA, 22 nt, Human
agggucagugaugagggagccc

SEQ ID NO: 386133 - RNA, 22 nt, Human
cacaagucuguggucuccaaca

SEQ ID NO: 386134 - RNA, 22 nt, Human
gggugaggagcugccagucaug

SEQ ID NO: 386135 - RNA, 22 nt, Human
uggccagguguggguucucaga

SEQ ID NO: 386136 - RNA, 22 nt, Human
agcagcuggugagcaagcucag

SEQ ID NO: 386137 - RNA, 22 nt, Human
uaauucagggccagaaucccca

SEQ ID NO: 386138 - RNA, 22 nt, Human
ugcccaaguguuuggcugaguc

SEQ ID NO: 386139 - RNA, 22 nt, Human
gugucaugcacacucaguguug

SEQ ID NO: 386140 - RNA, 17 nt, Human
cacaggugugguuugag

SEQ ID NO: 386141 - RNA, 22 nt, Human
uauuucagggagaauaaauuug

SEQ ID NO: 386142 - RNA, 22 nt, Human
uugaagaaauuauuuuauauag

SEQ ID NO: 386143 - RNA, 22 nt, Human
aagggcugaaagaccuugggca

SEQ ID NO: 386144 - RNA, 22 nt, Human
cauuuguaguuaaaaaugucuc

SEQ ID NO: 386145 - RNA, 22 nt, Human
gcuuggcauugaccauuaucau

SEQ ID NO: 386146 - RNA, 22 nt, Human
cugugcaagcccaagauaaaac

SEQ ID NO: 386147 - RNA, 22 nt, Human
cugacagucucauugauuugcu

SEQ ID NO: 386148 - RNA, 22 nt, Human
ccuguguggaaaccgcaugacg

SEQ ID NO: 386149 - RNA, 22 nt, Human
agugcccuggcccagcuggacc

SEQ ID NO: 386150 - RNA, 19 nt, Human
ugagcuggcugagccucuc

SEQ ID NO: 386151 - RNA, 22 nt, Human
uuuccuuccaaaugcccgggag

SEQ ID NO: 386152 - RNA, 20 nt, Human
ggcucugcuugugagcagcc

SEQ ID NO: 386153 - RNA, 18 nt, Human
acagaacucaggggcacc

SEQ ID NO: 386154 - RNA, 22 nt, Human
gaucugaagagcaaugaaauau

SEQ ID NO: 386155 - RNA, 22 nt, Human
auuucacucucccugccacuua

SEQ ID NO: 386156 - RNA, 18 nt, Human
uaaaugcauguuaauaac

SEQ ID NO: 386157 - RNA, 22 nt, Human
gcugucuccauagcuguguguc

SEQ ID NO: 386158 - RNA, 22 nt, Human
gcugguuagaaaacagagcuca

SEQ ID NO: 386159 - RNA, 22 nt, Human
uuauuuaaaauguagguuggga

SEQ ID NO: 386160 - RNA, 22 nt, Human
cuguuuucaaagagagagaaug

SEQ ID NO: 386161 - RNA, 22 nt, Human
aaugcacauaaauauggucuua

SEQ ID NO: 386162 - RNA, 22 nt, Human
aagaaauauugggccuuauaaa

SEQ ID NO: 386163 - RNA, 22 nt, Human
gcugcagcccggcgcgccugag

SEQ ID NO: 386164 - RNA, 22 nt, Human
aaacuguauauuuauggcaugu

SEQ ID NO: 386165 - RNA, 22 nt, Human
ucccaggacaggccacauggaa

SEQ ID NO: 386166 - RNA, 22 nt, Human
uuauuccauuauuucacuuagg

SEQ ID NO: 386167 - RNA, 22 nt, Human
uuguuuucacagcuuugcccgg

SEQ ID NO: 386168 - RNA, 22 nt, Human
agagcugagaauguggcuuccu

SEQ ID NO: 386169 - RNA, 22 nt, Human
auugaaagauauacuguucuca

SEQ ID NO: 386170 - RNA, 22 nt, Human
cagcauggugccagugagucca

SEQ ID NO: 386171 - RNA, 22 nt, Human
aaugaacaucaaaugccuacca

SEQ ID NO: 386172 - RNA, 22 nt, Human
uggcagccacaucucguggauu

SEQ ID NO: 386173 - RNA, 17 nt, Human
acacagggagagggagc

SEQ ID NO: 386174 - RNA, 22 nt, Human
aucuagaacuuaaagucaguca

SEQ ID NO: 386175 - RNA, 22 nt, Human
ucaaaggcugcuugucuucugg

SEQ ID NO: 386176 - RNA, 22 nt, Human
cucugaagggagggccaagccc

SEQ ID NO: 386177 - RNA, 22 nt, Human
uggcagcuacagacagagguga

SEQ ID NO: 386178 - RNA, 22 nt, Human
ggcugccauaacugauaccaua

SEQ ID NO: 386179 - RNA, 22 nt, Human
ugaggggaacugaugcccauug

SEQ ID NO: 386180 - RNA, 22 nt, Human
gugcagugacccuggagagcug

SEQ ID NO: 386181 - RNA, 22 nt, Human
gggggacuaacuggauccugga

SEQ ID NO: 386182 - RNA, 22 nt, Human
uucacauuauaaucaguucugc

SEQ ID NO: 386183 - RNA, 20 nt, Human
aggcucagauacccagggaa

SEQ ID NO: 386184 - RNA, 19 nt, Human
gcucugagaggggcauggg

SEQ ID NO: 386185 - RNA, 22 nt, Human
ggcaggguggcagaggcucaga

SEQ ID NO: 386186 - RNA, 21 nt, Human
agccuguugguuuacugcuca

SEQ ID NO: 386187 - RNA, 22 nt, Human
uauuuuaucugccagaguggag

SEQ ID NO: 386188 - RNA, 22 nt, Human
aauaacuggcacauaucacaua

SEQ ID NO: 386189 - RNA, 22 nt, Human
ucuuuugugauucuucaguuac

SEQ ID NO: 386190 - RNA, 22 nt, Human
ugcuuauucuuuccacaauuca

SEQ ID NO: 386191 - RNA, 22 nt, Human
ucucuucuaacacuagaaauuc

SEQ ID NO: 386192 - RNA, 22 nt, Human
gggcuucucccuaaggacucug

SEQ ID NO: 386193 - RNA, 22 nt, Human
gccuugccucagccauggaaac

SEQ ID NO: 386194 - RNA, 20 nt, Human
uccaggagaacugggagccg

SEQ ID NO: 386195 - RNA, 22 nt, Human
ucagagugugagacauauugga

SEQ ID NO: 386196 - RNA, 22 nt, Human
uaggcuggaggaagcagugccu

SEQ ID NO: 386197 - RNA, 22 nt, Human
aggcagcccacaggacacagga

SEQ ID NO: 386198 - RNA, 22 nt, Human
ucaguguaaguuauguagaugu

SEQ ID NO: 386199 - RNA, 22 nt, Human
uccaggagguuuggaggaagca

SEQ ID NO: 386200 - RNA, 22 nt, Human
uugauagguuuuauguauaguu

SEQ ID NO: 386201 - RNA, 19 nt, Human
gccugggaugggcagaacu

SEQ ID NO: 386202 - RNA, 22 nt, Human
gccaggagcccugggcaaguuc

SEQ ID NO: 386203 - RNA, 22 nt, Human
cagggcugaagaaauucaaaag

SEQ ID NO: 386204 - RNA, 22 nt, Human
aucuggcucaccuggguaaaua

SEQ ID NO: 386205 - RNA, 22 nt, Human
gcucaggacuggaggagcgggg

SEQ ID NO: 386206 - RNA, 22 nt, Human
aaggcacuguacuaguuaguua

SEQ ID NO: 386207 - RNA, 22 nt, Human
cuucagagugcagaagauuggg

SEQ ID NO: 386208 - RNA, 22 nt, Human
ucugcugcacaaauucaucucu

SEQ ID NO: 386209 - RNA, 22 nt, Human
auauucuugugauuauaaagua

SEQ ID NO: 386210 - RNA, 22 nt, Human
ggccucugaggacagccuuggc

SEQ ID NO: 386211 - RNA, 22 nt, Human
gucucagggacugcuucugggg

SEQ ID NO: 386212 - RNA, 22 nt, Human
acaccaccgucccagccuccug

SEQ ID NO: 386213 - RNA, 22 nt, Human
uuucccagagguaugaauaagu

SEQ ID NO: 386214 - RNA, 22 nt, Human
acaaaugugucuaauugugccu

SEQ ID NO: 386215 - RNA, 22 nt, Human
acaauucucucauaucuuauua

SEQ ID NO: 386216 - RNA, 22 nt, Human
aagggaggccagagguuuugca

SEQ ID NO: 386217 - RNA, 23 nt, Human
gaggcacucaggaaaugugagug

SEQ ID NO: 386218 - RNA, 22 nt, Human
cugucccucaucaccucugggu

SEQ ID NO: 386219 - RNA, 22 nt, Human
uccauuuacuauucucauaucg

SEQ ID NO: 386220 - RNA, 22 nt, Human
agaccgagaaguucuccaggcc

SEQ ID NO: 386221 - RNA, 22 nt, Human
uuccauaaaggugauaguauac

SEQ ID NO: 386222 - RNA, 22 nt, Human
uuucaaaccuacuuguauguuu

SEQ ID NO: 386223 - RNA, 22 nt, Human
agaaaugaaaccaaagccuaga

SEQ ID NO: 386224 - RNA, 19 nt, Human
ccuggcccugcugcgcggg

SEQ ID NO: 386225 - RNA, 22 nt, Human
caaugugucaggaaaagggcca

SEQ ID NO: 386226 - RNA, 22 nt, Human
uuucagaugcaauuaauuuuca

SEQ ID NO: 386227 - RNA, 22 nt, Human
ggcugggcaggucugcacaggg

SEQ ID NO: 386228 - RNA, 20 nt, Human
gagggcucguggauggauaa

SEQ ID NO: 386229 - RNA, 22 nt, Human
gcucuugucaaaaauuaguuga

SEQ ID NO: 386230 - RNA, 22 nt, Human
cauagagugauguaagguaugu

SEQ ID NO: 386231 - RNA, 22 nt, Human
caggguuucaccauguuagcag

SEQ ID NO: 386232 - RNA, 22 nt, Human
ggagaggugaauggcugcucua

SEQ ID NO: 386233 - RNA, 22 nt, Human
acucugccccgaguucugggaa

SEQ ID NO: 386234 - RNA, 19 nt, Human
agggaguuuauauuugcac

SEQ ID NO: 386235 - RNA, 22 nt, Human
aggagagcuggugucuggaauc

SEQ ID NO: 386236 - RNA, 23 nt, Human
agguucaggagauggaggaacaa

SEQ ID NO: 386237 - RNA, 22 nt, Human
ucugggugaugaaaugcacugu

SEQ ID NO: 386238 - RNA, 22 nt, Human
acauuucuaauuuaauguaaca

SEQ ID NO: 386239 - RNA, 22 nt, Human
cucaggaaaggccaugcaaggg

SEQ ID NO: 386240 - RNA, 22 nt, Human
uucuuucccaguagaugugaaa

SEQ ID NO: 386241 - RNA, 22 nt, Human
aggucaaguuuagauagaguua

SEQ ID NO: 386242 - RNA, 22 nt, Human
aaaugcacagaggccagagagg

SEQ ID NO: 386243 - RNA, 22 nt, Human
uugcagagugguugugaggauu

SEQ ID NO: 386244 - RNA, 21 nt, Human
ugagccaggcugacggcugug

SEQ ID NO: 386245 - RNA, 22 nt, Human
gggaaccagccgcuuccgccuc

SEQ ID NO: 386246 - RNA, 22 nt, Human
uuugaaagagcugauacaugaa

SEQ ID NO: 386247 - RNA, 22 nt, Human
cauggagauaaacugaaauauu

SEQ ID NO: 386248 - RNA, 22 nt, Human
gaagaacaccugcugcccagug

SEQ ID NO: 386249 - RNA, 22 nt, Human
cugccuggcauggagaagagaa

SEQ ID NO: 386250 - RNA, 22 nt, Human
caugaguucaucugcuucucuu

SEQ ID NO: 386251 - RNA, 22 nt, Human
acuggaagccaguugacaauca

SEQ ID NO: 386252 - RNA, 22 nt, Human
agggucccgaaggagacagcaa

SEQ ID NO: 386253 - RNA, 22 nt, Human
guggcagguuauaagcaucuca

SEQ ID NO: 386254 - RNA, 22 nt, Human
aaaugcauggcuguuuuaaagc

SEQ ID NO: 386255 - RNA, 22 nt, Human
uuaauuacaaaacacauagguu

SEQ ID NO: 386256 - RNA, 22 nt, Human
cgccucagccguggucaucuuc

SEQ ID NO: 386257 - RNA, 22 nt, Human
uuccaggaagcaguuagcagcc

SEQ ID NO: 386258 - RNA, 22 nt, Human
auuauccucagaaaacauguga

SEQ ID NO: 386259 - RNA, 22 nt, Human
cuuuggcaaugaaacacaagaa

SEQ ID NO: 386260 - RNA, 22 nt, Human
cuuagggaauugggaggaugcc

SEQ ID NO: 386261 - RNA, 22 nt, Human
uuugaaaggugucgagaugugu

SEQ ID NO: 386262 - RNA, 22 nt, Human
ugcagagaaaguguagacaggc

SEQ ID NO: 386263 - RNA, 22 nt, Human
ugaaauauuuagagaguaaguu

SEQ ID NO: 386264 - RNA, 22 nt, Human
cuguguggacugguugaggccc

SEQ ID NO: 386265 - RNA, 22 nt, Human
cugagcacugggcacauagcug

SEQ ID NO: 386266 - RNA, 22 nt, Human
ugcugcuccugccuggcuccca

SEQ ID NO: 386267 - RNA, 17 nt, Human
agcugccagggagugug

SEQ ID NO: 386268 - RNA, 22 nt, Human
gcugaagcugcagcaggaggaa

SEQ ID NO: 386269 - RNA, 22 nt, Human
ggaagggcaauaaaaucucagg

SEQ ID NO: 386270 - RNA, 22 nt, Human
ugcuuuaacauaagauaucuuu

SEQ ID NO: 386271 - RNA, 22 nt, Human
agggcugacaguaaaaguauga

SEQ ID NO: 386272 - RNA, 22 nt, Human
auaaagaggauguauuuacagc

SEQ ID NO: 386273 - RNA, 22 nt, Human
agagcuguucaacguagcaaug

SEQ ID NO: 386274 - RNA, 22 nt, Human
caaggagaaaacggcuucugaa

SEQ ID NO: 386275 - RNA, 22 nt, Human
ggagcagccacgucucagggca

SEQ ID NO: 386276 - RNA, 22 nt, Human
cccaaaguacaaguaaacaugu

SEQ ID NO: 386277 - RNA, 22 nt, Human
cucuucucugcagccuuugaag

SEQ ID NO: 386278 - RNA, 22 nt, Human
ugccaggccucaggagucucca

SEQ ID NO: 386279 - RNA, 22 nt, Human
uguucacaagaugucuguggcu

SEQ ID NO: 386280 - RNA, 22 nt, Human
gaaggagaggauugugaggcug

SEQ ID NO: 386281 - RNA, 22 nt, Human
aaggcugaauucaaggguaggc

SEQ ID NO: 386282 - RNA, 22 nt, Human
cagaggcagaggucaucucugg

SEQ ID NO: 386283 - RNA, 22 nt, Human
uggauuuaauggaugaggggca

SEQ ID NO: 386284 - RNA, 22 nt, Human
uucaagauggcugcaaauacuu

SEQ ID NO: 386285 - RNA, 22 nt, Human
ugauuuuuagcuauucugaaga

SEQ ID NO: 386286 - RNA, 22 nt, Human
ucuggcucuaacuaggcaucag

SEQ ID NO: 386287 - RNA, 22 nt, Human
uguccucagauaugucuacucu

SEQ ID NO: 386288 - RNA, 21 nt, Human
ucucacaauaugaugccagau

SEQ ID NO: 386289 - RNA, 22 nt, Human
cagggcucccucuggcucccag

SEQ ID NO: 386290 - RNA, 22 nt, Human
aaaugucuaucuggcauauucc

SEQ ID NO: 386291 - RNA, 22 nt, Human
ucuaaacaguuucacucuuaau

SEQ ID NO: 386292 - RNA, 19 nt, Human
uggcagggagaguuugaag

SEQ ID NO: 386293 - RNA, 22 nt, Human
acaauguaggauauguacuugu

SEQ ID NO: 386294 - RNA, 22 nt, Human
uaucaagugacuaucacagaac

SEQ ID NO: 386295 - RNA, 22 nt, Human
ucaaggugcugugcugugcuag

SEQ ID NO: 386296 - RNA, 22 nt, Human
uugaagcaaauucugugcagua

SEQ ID NO: 386297 - RNA, 22 nt, Human
uuccucaucugugcaccucacu

SEQ ID NO: 386298 - RNA, 22 nt, Human
gccaggaguguguggcuauguu

SEQ ID NO: 386299 - RNA, 22 nt, Human
ugggcagacgggagcuugccuu

SEQ ID NO: 386300 - RNA, 22 nt, Human
uuucuucucgacaccuuauccc

SEQ ID NO: 386301 - RNA, 22 nt, Human
agcacauaccagaaccacaggu

SEQ ID NO: 386302 - RNA, 22 nt, Human
caggaaugacugcagauggggc

SEQ ID NO: 386303 - RNA, 22 nt, Human
uguuaggguccugugcaggggc

SEQ ID NO: 386304 - RNA, 22 nt, Human
agagcugaauuuggguggugga

SEQ ID NO: 386305 - RNA, 22 nt, Human
gcuggaccaggugugcacaggc

SEQ ID NO: 386306 - RNA, 22 nt, Human
acaguggagcucagaugaaaau

SEQ ID NO: 386307 - RNA, 22 nt, Human
cguccuuacagagggucacagc

SEQ ID NO: 386308 - RNA, 23 nt, Human
agcacagacuagaaaggucuuuc

SEQ ID NO: 386309 - RNA, 22 nt, Human
ccagugcauaaucaauacagcc

SEQ ID NO: 386310 - RNA, 22 nt, Human
agcaguggcugaagauguuccu

SEQ ID NO: 386311 - RNA, 22 nt, Human
aagggcucuucuauuuauggcc

SEQ ID NO: 386312 - RNA, 22 nt, Human
cagggcagugaagaacacacgu

SEQ ID NO: 386313 - RNA, 18 nt, Human
gcagugaagaaagagcuu

SEQ ID NO: 386314 - RNA, 22 nt, Human
gagauuggccuggcuugccaac

SEQ ID NO: 386315 - RNA, 22 nt, Human
ucaaaugcuguauuguaguaau

SEQ ID NO: 386316 - RNA, 22 nt, Human
cagcugaguuuccaagucugcc

SEQ ID NO: 386317 - RNA, 22 nt, Human
cuccucuuuacccgcauggucu

SEQ ID NO: 386318 - RNA, 22 nt, Human
auuuuacuacuccaauuaauga

SEQ ID NO: 386319 - RNA, 22 nt, Human
agcagaggaggauuuaguuagg

SEQ ID NO: 386320 - RNA, 22 nt, Human
gaauucugucgcuuacuagaug

SEQ ID NO: 386321 - RNA, 22 nt, Human
ucucuuaaaagauuuuaaugac

SEQ ID NO: 386322 - RNA, 19 nt, Human
acagggcagcaauaggaua

SEQ ID NO: 386323 - RNA, 22 nt, Human
uugaaaguccuucuugaguuac

SEQ ID NO: 386324 - RNA, 22 nt, Human
gagcagaacuacucacauaucg

SEQ ID NO: 386325 - RNA, 22 nt, Human
aacagugaguugaugacugaau

SEQ ID NO: 386326 - RNA, 22 nt, Human
cuggcccauggugagcucuggg

SEQ ID NO: 386327 - RNA, 22 nt, Human
uugcauguuauuuaaucuguau

SEQ ID NO: 386328 - RNA, 22 nt, Human
auuucagaugaccaaauggaaa

SEQ ID NO: 386329 - RNA, 19 nt, Human
uuugcagugguuccuuugu

SEQ ID NO: 386330 - RNA, 22 nt, Human
caaaguauauuggauugaaugg

SEQ ID NO: 386331 - RNA, 22 nt, Human
auuucuuuucaagagggugcuu

SEQ ID NO: 386332 - RNA, 22 nt, Human
auaauaaaccaggaugggucug

SEQ ID NO: 386333 - RNA, 22 nt, Human
acagagguguuccagaccuagg

SEQ ID NO: 386334 - RNA, 22 nt, Human
aagauuuacuagcauaauagcu

SEQ ID NO: 386335 - RNA, 22 nt, Human
gcugcagccaaauucauuguca

SEQ ID NO: 386336 - RNA, 22 nt, Human
aggaggugacagccugcaucug

SEQ ID NO: 386337 - RNA, 22 nt, Human
guggaggacaaaagaagccuuu

SEQ ID NO: 386338 - RNA, 22 nt, Human
cugggguggauggguccaaguu

SEQ ID NO: 386339 - RNA, 22 nt, Human
aggcucagcugguggugaucgc

SEQ ID NO: 386340 - RNA, 22 nt, Human
gagcugaguuaccuccagauca

SEQ ID NO: 386341 - RNA, 22 nt, Human
uggcuuaauauuucauauuuaa

SEQ ID NO: 386342 - RNA, 22 nt, Human
ugaggcucagaagugccaagug

SEQ ID NO: 386343 - RNA, 17 nt, Human
agaacuguaguagcucc

SEQ ID NO: 386344 - RNA, 18 nt, Human
ucugagggugcgggagcu

SEQ ID NO: 386345 - RNA, 22 nt, Human
uuuuccucugcagagcaguuag

SEQ ID NO: 386346 - RNA, 22 nt, Human
uggucaggcugcucugcggcgu

SEQ ID NO: 386347 - RNA, 22 nt, Human
aaagguuaagguguucaagaaa

SEQ ID NO: 386348 - RNA, 22 nt, Human
ucaggggacuuaggagagaagu

SEQ ID NO: 386349 - RNA, 22 nt, Human
cuuccuggccauugccauggca

SEQ ID NO: 386350 - RNA, 22 nt, Human
aaggaagguucauagucaaaga

SEQ ID NO: 386351 - RNA, 22 nt, Human
gcuggagguuucaccugaguuu

SEQ ID NO: 386352 - RNA, 22 nt, Human
ugcugaaggcaggggagguggc

SEQ ID NO: 386353 - RNA, 22 nt, Human
uguucuuucaguuagacacagu

SEQ ID NO: 386354 - RNA, 18 nt, Human
gugugcaguugcaggggu

SEQ ID NO: 386355 - RNA, 22 nt, Human
accauuuaauaaguauuuccau

SEQ ID NO: 386356 - RNA, 22 nt, Human
gagcugagaucgugccauugca

SEQ ID NO: 386357 - RNA, 22 nt, Human
ccaggagagcauugcacagagg

SEQ ID NO: 386358 - RNA, 23 nt, Human
ugcagggcaaguuagagacccca

SEQ ID NO: 386359 - RNA, 17 nt, Human
uagcuguguuucagcua

SEQ ID NO: 386360 - RNA, 22 nt, Human
uugcaacaucugaacauuuauc

SEQ ID NO: 386361 - RNA, 22 nt, Human
agugucauaugccacugcaucc

SEQ ID NO: 386362 - RNA, 22 nt, Human
ucagcuuugccaccagcuguaa

SEQ ID NO: 386363 - RNA, 22 nt, Human
gaggcacauauauacagagccc

SEQ ID NO: 386364 - RNA, 22 nt, Human
aggcucagauucacauuugguu

SEQ ID NO: 386365 - RNA, 22 nt, Human
gauuuauaguaugugcuuucag

SEQ ID NO: 386366 - RNA, 22 nt, Human
ugacaugcuuguuuuccuugaa

SEQ ID NO: 386367 - RNA, 22 nt, Human
uuuuucauauuccccucucugg

SEQ ID NO: 386368 - RNA, 16 nt, Human
aggaggggaauuagga

SEQ ID NO: 386369 - RNA, 22 nt, Human
uaauguguugaauauuuguaca

SEQ ID NO: 386370 - RNA, 22 nt, Human
cuggacucugcagagaaaagua

SEQ ID NO: 386371 - RNA, 22 nt, Human
uuagccauauagaaaaagagcu

SEQ ID NO: 386372 - RNA, 22 nt, Human
gugauuccuauuaguacaugca

SEQ ID NO: 386373 - RNA, 20 nt, Human
agcuucuucugucuaauuuu

SEQ ID NO: 386374 - RNA, 22 nt, Human
aaagaacaauguggaaucuccu

SEQ ID NO: 386375 - RNA, 22 nt, Human
aucuucaacuugaucauuugaa

SEQ ID NO: 386376 - RNA, 22 nt, Human
cccaagagguggagguugcagu

SEQ ID NO: 386377 - RNA, 22 nt, Human
acaaaauuguguuaaacuuuau

SEQ ID NO: 386378 - RNA, 22 nt, Human
auuaaauuggaucugcauaguu

SEQ ID NO: 386379 - RNA, 19 nt, Human
cuuugucagaacaugcuuc

SEQ ID NO: 386380 - RNA, 22 nt, Human
uuauuccagcuaagaguccugg

SEQ ID NO: 386381 - RNA, 22 nt, Human
uuaugaaagacauuucuguugg

SEQ ID NO: 386382 - RNA, 22 nt, Human
ucccuggacaacagacuucacu

SEQ ID NO: 386383 - RNA, 22 nt, Human
agaggccacuuugccugugaug

SEQ ID NO: 386384 - RNA, 22 nt, Human
caucuggcuagcuaucauugug

SEQ ID NO: 386385 - RNA, 22 nt, Human
ggcucuggugugaagcagccuc

SEQ ID NO: 386386 - RNA, 22 nt, Human
acaaaugucuccucuuuuguua

SEQ ID NO: 386387 - RNA, 20 nt, Human
ccagacagcaccugccuggu

SEQ ID NO: 386388 - RNA, 22 nt, Human
cuccagggggcauccacacagc

SEQ ID NO: 386389 - RNA, 22 nt, Human
gugccugggguugagcuaugaa

SEQ ID NO: 386390 - RNA, 22 nt, Human
ugugggaggaauuagaauggga

SEQ ID NO: 386391 - RNA, 22 nt, Human
uaaauuguuuucuagaaguugu

SEQ ID NO: 386392 - RNA, 22 nt, Human
ucaggcaggcucagaggaaaac

SEQ ID NO: 386393 - RNA, 23 nt, Human
uggggccaagugaggaagggucu

SEQ ID NO: 386394 - RNA, 22 nt, Human
cagcccucagguccucagcagc

SEQ ID NO: 386395 - RNA, 22 nt, Human
cagagcaggcccacugcccucc

SEQ ID NO: 386396 - RNA, 22 nt, Human
cugggccucaaucucagaguuu

SEQ ID NO: 386397 - RNA, 22 nt, Human
caggcagcucgaugccuuguug

SEQ ID NO: 386398 - RNA, 22 nt, Human
uguuccaagcugcuggauaagc

SEQ ID NO: 386399 - RNA, 22 nt, Human
caguaaauacauaucagagaag

SEQ ID NO: 386400 - RNA, 22 nt, Human
cagaugagaguggccaggguuc

SEQ ID NO: 386401 - RNA, 22 nt, Human
uccuugaaugaagagaggugac

SEQ ID NO: 386402 - RNA, 22 nt, Human
gcugucaccaaagcaggcacug

SEQ ID NO: 386403 - RNA, 20 nt, Human
cccugagacaaaggaggggc

SEQ ID NO: 386404 - RNA, 22 nt, Human
ucucaaacuaacaaugauuaua

SEQ ID NO: 386405 - RNA, 22 nt, Human
gcaguggggcgcugggaguugg

SEQ ID NO: 386406 - RNA, 22 nt, Human
ccucaggggcuuuucguuguug

SEQ ID NO: 386407 - RNA, 22 nt, Human
agggccugggucuguacuccuc

SEQ ID NO: 386408 - RNA, 22 nt, Human
cuggcagguccagcuggacuca

SEQ ID NO: 386409 - RNA, 22 nt, Human
gauuucuguaacacuucagaua

SEQ ID NO: 386410 - RNA, 22 nt, Human
caaauguguuuuuucuucuaca

SEQ ID NO: 386411 - RNA, 22 nt, Human
ggaugcuggggaccaaucucug

SEQ ID NO: 386412 - RNA, 22 nt, Human
aagccagcauuuucccauuccu

SEQ ID NO: 386413 - RNA, 18 nt, Human
aguggucuguuauaucau

SEQ ID NO: 386414 - RNA, 22 nt, Human
ugccugggccuucccaccucug

SEQ ID NO: 386415 - RNA, 22 nt, Human
uacagagauuuauugcuaaggc

SEQ ID NO: 386416 - RNA, 22 nt, Human
ugucacaaacauacauuauaga

SEQ ID NO: 386417 - RNA, 22 nt, Human
uguggcuuaagaaugccuuuaa

SEQ ID NO: 386418 - RNA, 22 nt, Human
ucaguuucuucaucucccuaac

SEQ ID NO: 386419 - RNA, 22 nt, Human
ugguuuaaccugucucuuauua

SEQ ID NO: 386420 - RNA, 22 nt, Human
ucagcugcucaaauuuauguca

SEQ ID NO: 386421 - RNA, 22 nt, Human
cacagcuucccaaaguggaccu

SEQ ID NO: 386422 - RNA, 23 nt, Human
uggcaaggaaugggauggagacu

SEQ ID NO: 386423 - RNA, 22 nt, Human
ccugucuggccaccagggcgau

SEQ ID NO: 386424 - RNA, 22 nt, Human
ugucugguggguugacaggcag

SEQ ID NO: 386425 - RNA, 22 nt, Human
uacauugugauguuucaauaca

SEQ ID NO: 386426 - RNA, 22 nt, Human
gugaggggaguaaagccauguu

SEQ ID NO: 386427 - RNA, 22 nt, Human
uggaauggaaacaaacugagga

SEQ ID NO: 386428 - RNA, 22 nt, Human
auguagcagauauuugugcaca

SEQ ID NO: 386429 - RNA, 22 nt, Human
ggcagggugccuggcuccuguu

SEQ ID NO: 386430 - RNA, 20 nt, Human
uggcaggaggcagcagugga

SEQ ID NO: 386431 - RNA, 22 nt, Human
ggggauggugggaaggcaaucu

SEQ ID NO: 386432 - RNA, 22 nt, Human
cccaggagaauauaauguucuu

SEQ ID NO: 386433 - RNA, 22 nt, Human
agaauaauacugaaaugcugaa

SEQ ID NO: 386434 - RNA, 22 nt, Human
auaaguaggaaaauuugaauau

SEQ ID NO: 386435 - RNA, 22 nt, Human
ccaggcagagugcuccagaaag

SEQ ID NO: 386436 - RNA, 22 nt, Human
caggacauugauccauuggcac

SEQ ID NO: 386437 - RNA, 22 nt, Human
gaguccuuaauacacuggugga

SEQ ID NO: 386438 - RNA, 22 nt, Human
auguuacauaguccuuauuugu

SEQ ID NO: 386439 - RNA, 22 nt, Human
caguuaaaggcccaauaucugg

SEQ ID NO: 386440 - RNA, 22 nt, Human
uacacacaugcauuugccuuau

SEQ ID NO: 386441 - RNA, 22 nt, Human
ucaaaugcugccuuugugugcc

SEQ ID NO: 386442 - RNA, 20 nt, Human
gggugagauguaggagaggg

SEQ ID NO: 386443 - RNA, 22 nt, Human
aggcaguuucugggacagcaua

SEQ ID NO: 386444 - RNA, 22 nt, Human
ucucuuuuauguacacccugac

SEQ ID NO: 386445 - RNA, 22 nt, Human
agcaugaaagcauaggacaguc

SEQ ID NO: 386446 - RNA, 22 nt, Human
ucaaagcaucagucaauuuagg

SEQ ID NO: 386447 - RNA, 22 nt, Human
ccugccugcaccuucucugggg

SEQ ID NO: 386448 - RNA, 22 nt, Human
gcucaaagaauauucagaauga

SEQ ID NO: 386449 - RNA, 22 nt, Human
cugccaggacugacgucuucag

SEQ ID NO: 386450 - RNA, 22 nt, Human
gcaugagggggguuaggaaguu

SEQ ID NO: 386451 - RNA, 22 nt, Human
auauuucuccaaauguuuucaa

SEQ ID NO: 386452 - RNA, 22 nt, Human
gugagggcagcuuggucagugu

SEQ ID NO: 386453 - RNA, 22 nt, Human
gugucccagccccacaggccug

SEQ ID NO: 386454 - RNA, 22 nt, Human
uggagcagccaugaugacagag

SEQ ID NO: 386455 - RNA, 22 nt, Human
cauuaucugccauugacaccau

SEQ ID NO: 386456 - RNA, 22 nt, Human
uggagaagucaaagugaacagg

SEQ ID NO: 386457 - RNA, 22 nt, Human
ggagaaggaauauuggaguagg

SEQ ID NO: 386458 - RNA, 22 nt, Human
ggagccuggccuggcucugugu

SEQ ID NO: 386459 - RNA, 18 nt, Human
gggaucaggcugccuagg

SEQ ID NO: 386460 - RNA, 22 nt, Human
cacagaguggaggcuuggccug

SEQ ID NO: 386461 - RNA, 22 nt, Human
gcagagccaggagagacccuug

SEQ ID NO: 386462 - RNA, 22 nt, Human
gugggcuucuguuagggaggcu

SEQ ID NO: 386463 - RNA, 22 nt, Human
gccucugccaagggggcugcgg

SEQ ID NO: 386464 - RNA, 22 nt, Human
cacagugcaugaugggcagaag

SEQ ID NO: 386465 - RNA, 17 nt, Human
uccaggagaggcaaugg

SEQ ID NO: 386466 - RNA, 22 nt, Human
gcugagagugggugcagugcuu

SEQ ID NO: 386467 - RNA, 19 nt, Human
uccaggagcaaagccaguu

SEQ ID NO: 386468 - RNA, 19 nt, Human
cagaguacaccagauagga

SEQ ID NO: 386469 - RNA, 22 nt, Human
gguugccggggcaggacuggaa

SEQ ID NO: 386470 - RNA, 22 nt, Human
gccuggaguuguggugaagcca

SEQ ID NO: 386471 - RNA, 22 nt, Human
caugcacuuaccugaaauucaa

SEQ ID NO: 386472 - RNA, 22 nt, Human
agggcugagacuaaggccagau

SEQ ID NO: 386473 - RNA, 18 nt, Human
uguacaguuaugagcauu

SEQ ID NO: 386474 - RNA, 20 nt, Human
ucuggcucuuugcuccuccc

SEQ ID NO: 386475 - RNA, 22 nt, Human
ucacacacauggauaguauuuu

SEQ ID NO: 386476 - RNA, 23 nt, Human
gcauugucuccccacuucugggc

SEQ ID NO: 386477 - RNA, 22 nt, Human
uaaugcuuuuccuucaaauaag

SEQ ID NO: 386478 - RNA, 22 nt, Human
uccaguggugguuugaagggca

SEQ ID NO: 386479 - RNA, 18 nt, Human
agucuucugauccauuuu

SEQ ID NO: 386480 - RNA, 22 nt, Human
acagggcaaccucugggagacu

SEQ ID NO: 386481 - RNA, 22 nt, Human
augcuuuuccuaaaaugaugcc

SEQ ID NO: 386482 - RNA, 22 nt, Human
ccagagagaguacugggcucug

SEQ ID NO: 386483 - RNA, 22 nt, Human
aggaugagccgcgcaagcugac

SEQ ID NO: 386484 - RNA, 22 nt, Human
aagcacagaaaaggagcaugga

SEQ ID NO: 386485 - RNA, 22 nt, Human
uggagcccagggugagaaggag

SEQ ID NO: 386486 - RNA, 22 nt, Human
agccagagagccccagguucua

SEQ ID NO: 386487 - RNA, 22 nt, Human
gcucagagaugucugcugccuu

SEQ ID NO: 386488 - RNA, 20 nt, Human
uggcaggaauagggccagag

SEQ ID NO: 386489 - RNA, 22 nt, Human
ucagcuccucaugcaggggaua

SEQ ID NO: 386490 - RNA, 22 nt, Human
caccagguggaaaugucacagc

SEQ ID NO: 386491 - RNA, 22 nt, Human
aaucuuuaaggacucagucucu

SEQ ID NO: 386492 - RNA, 22 nt, Human
agccauccucccaccucagccu

SEQ ID NO: 386493 - RNA, 22 nt, Human
caaaagucuuccuauucucuua

SEQ ID NO: 386494 - RNA, 22 nt, Human
agcuugccucuuaaucaccuca

SEQ ID NO: 386495 - RNA, 22 nt, Human
gcuccagguauuugcccuuuua

SEQ ID NO: 386496 - RNA, 22 nt, Human
ucaggagucugugcaguuccac

SEQ ID NO: 386497 - RNA, 22 nt, Human
gggaggaaaugugcagcgaauu

SEQ ID NO: 386498 - RNA, 22 nt, Human
ugcacauuaguguuugagaugc

SEQ ID NO: 386499 - RNA, 22 nt, Human
cagagcugacccaaggauugaa

SEQ ID NO: 386500 - RNA, 22 nt, Human
ugcaggaagcaaccagguccaa

SEQ ID NO: 386501 - RNA, 22 nt, Human
acucagaaugacugaugcugug

SEQ ID NO: 386502 - RNA, 18 nt, Human
uggcagggaggaaauaua

SEQ ID NO: 386503 - RNA, 22 nt, Human
caucagaaucugagucucugcc

SEQ ID NO: 386504 - RNA, 22 nt, Human
gaggccugaggcugccuggagc

SEQ ID NO: 386505 - RNA, 22 nt, Human
ccagagaguaggaggcauuauu

SEQ ID NO: 386506 - RNA, 22 nt, Human
ccagguggugaaagugggcccu

SEQ ID NO: 386507 - RNA, 19 nt, Human
ggagaagcaucuagaaaua

SEQ ID NO: 386508 - RNA, 22 nt, Human
cugauacauaguagcaugucau

SEQ ID NO: 386509 - RNA, 20 nt, Human
ccuaggcaugcugagucucc

SEQ ID NO: 386510 - RNA, 22 nt, Human
ucccuccuggugagcaggggcu

SEQ ID NO: 386511 - RNA, 22 nt, Human
agggagcuaggauccugaaggu

SEQ ID NO: 386512 - RNA, 22 nt, Human
ccagcucugcagggccuggggu

SEQ ID NO: 386513 - RNA, 22 nt, Human
gcucucuggguggugggcaaca

SEQ ID NO: 386514 - RNA, 20 nt, Human
ucacuaguaaccaucugcuu

SEQ ID NO: 386515 - RNA, 23 nt, Human
gacacaggagcacccagcugagc

SEQ ID NO: 386516 - RNA, 22 nt, Human
uggagaagcuguagguggacuc

SEQ ID NO: 386517 - RNA, 22 nt, Human
uaggccaggacagagcuuccag

SEQ ID NO: 386518 - RNA, 22 nt, Human
aaaugcauugguuucuacuugu

SEQ ID NO: 386519 - RNA, 22 nt, Human
ucuagaaacaugacauugaucu

SEQ ID NO: 386520 - RNA, 22 nt, Human
uuugaaagcaccauuugaguag

SEQ ID NO: 386521 - RNA, 22 nt, Human
gaggaagccccauugaagccag

SEQ ID NO: 386522 - RNA, 22 nt, Human
ucauuuauaaggaugcaauuaa

SEQ ID NO: 386523 - RNA, 21 nt, Human
ggagcugcaggagccgaaggc

SEQ ID NO: 386524 - RNA, 22 nt, Human
uggcuggggagccccgacuccc

SEQ ID NO: 386525 - RNA, 22 nt, Human
gucauuccuauccauuugauac

SEQ ID NO: 386526 - RNA, 22 nt, Human
aaagucaucauuucuuuucaaa

SEQ ID NO: 386527 - RNA, 22 nt, Human
cccaggaagaggggucaggugu

SEQ ID NO: 386528 - RNA, 22 nt, Human
ugcacuggggucccagcgcacg

SEQ ID NO: 386529 - RNA, 22 nt, Human
gagcaggcauucuaguggcuga

SEQ ID NO: 386530 - RNA, 22 nt, Human
agagcuguuuggacaucugagu

SEQ ID NO: 386531 - RNA, 22 nt, Human
cagcuggccugaucccuguggc

SEQ ID NO: 386532 - RNA, 22 nt, Human
aagggcucugggcuacgcacug

SEQ ID NO: 386533 - RNA, 22 nt, Human
agugaaauaaagcugccuaugg

SEQ ID NO: 386534 - RNA, 22 nt, Human
uuuccucuuccgagggggaggc

SEQ ID NO: 386535 - RNA, 22 nt, Human
ggaguaggaguagaacucauca

SEQ ID NO: 386536 - RNA, 22 nt, Human
agccugcaggaugggcagcacc

SEQ ID NO: 386537 - RNA, 22 nt, Human
ugcauuaucuuuaauguucuca

SEQ ID NO: 386538 - RNA, 22 nt, Human
cuuaacagauacaucugugguu

SEQ ID NO: 386539 - RNA, 22 nt, Human
uccaggcaucuguauuuuuuaa

SEQ ID NO: 386540 - RNA, 22 nt, Human
gccagaagggguggauccaggc

SEQ ID NO: 386541 - RNA, 22 nt, Human
aguaaacauaauuuaccuguag

SEQ ID NO: 386542 - RNA, 22 nt, Human
agugacugggcagggcagggcc

SEQ ID NO: 386543 - RNA, 22 nt, Human
aguaaacaguaucuuuaguguc

SEQ ID NO: 386544 - RNA, 22 nt, Human
cagagugaacagugggaugugc

SEQ ID NO: 386545 - RNA, 22 nt, Human
gccugguguccagaggcgagug

SEQ ID NO: 386546 - RNA, 22 nt, Human
uuaaacagagucugaaauguaa

SEQ ID NO: 386547 - RNA, 23 nt, Human
ugggucagcugccuccaggacaa

SEQ ID NO: 386548 - RNA, 22 nt, Human
uaucuauuccaaauaucagcgu

SEQ ID NO: 386549 - RNA, 22 nt, Human
agaggggaaguaaugaaugaua

SEQ ID NO: 386550 - RNA, 22 nt, Human
agugaaauuccuggucuuuguu

SEQ ID NO: 386551 - RNA, 22 nt, Human
cagcuuuagagaaaacauauuu

SEQ ID NO: 386552 - RNA, 22 nt, Human
aggcacuggguaauuaguagcu

SEQ ID NO: 386553 - RNA, 22 nt, Human
uggccuuguguuuuagagaaag

SEQ ID NO: 386554 - RNA, 22 nt, Human
cugagauggaguuucgcucuuc

SEQ ID NO: 386555 - RNA, 22 nt, Human
uggccugccccgagauccuggc

SEQ ID NO: 386556 - RNA, 22 nt, Human
ccagggugggguccaggaacca

SEQ ID NO: 386557 - RNA, 22 nt, Human
auuuuacuuugugaauauugac

SEQ ID NO: 386558 - RNA, 19 nt, Human
ccagagagcuagguacaga

SEQ ID NO: 386559 - RNA, 22 nt, Human
agaggccuuucuguugagugaa

SEQ ID NO: 386560 - RNA, 22 nt, Human
uuguuugaggucacugauauuu

SEQ ID NO: 386561 - RNA, 19 nt, Human
ucuaacagaagugucgucc

SEQ ID NO: 386562 - RNA, 22 nt, Human
gcccuggaaucucuccauggga

SEQ ID NO: 386563 - RNA, 22 nt, Human
cagagugaaaacugagcucaaa

SEQ ID NO: 386564 - RNA, 22 nt, Human
ugucucuggcccaugagcagag

SEQ ID NO: 386565 - RNA, 22 nt, Human
cuuauguauauuuggaacguac

SEQ ID NO: 386566 - RNA, 22 nt, Human
aagggcucucugcauugaaauu

SEQ ID NO: 386567 - RNA, 22 nt, Human
aagucagcacuccaggaagcca

SEQ ID NO: 386568 - RNA, 22 nt, Human
aggcacuguggguguggccgga

SEQ ID NO: 386569 - RNA, 22 nt, Human
ccugucauacuaacguaguggg

SEQ ID NO: 386570 - RNA, 22 nt, Human
uccuucagcuuauuucuuagga

SEQ ID NO: 386571 - RNA, 22 nt, Human
ugggcagaaugugggauccaga

SEQ ID NO: 386572 - RNA, 22 nt, Human
agaggcagccguauuucaaagg

SEQ ID NO: 386573 - RNA, 22 nt, Human
ucaccaggauugggcuguaggc

SEQ ID NO: 386574 - RNA, 21 nt, Human
ucauucacaggguauuguaua

SEQ ID NO: 386575 - RNA, 22 nt, Human
ucugggcugggagcguguggac

SEQ ID NO: 386576 - RNA, 22 nt, Human
aggcccugcccagagcuccucg

SEQ ID NO: 386577 - RNA, 22 nt, Human
agggaggucuuugaggggcuua

SEQ ID NO: 386578 - RNA, 22 nt, Human
ugaaugaguuuggcugcuguuc

SEQ ID NO: 386579 - RNA, 22 nt, Human
ucagcuuuugucagaaauugua

SEQ ID NO: 386580 - RNA, 22 nt, Human
aaauguguuuagaugguuuauu

SEQ ID NO: 386581 - RNA, 22 nt, Human
gcagagcaccaaagugaaagau

SEQ ID NO: 386582 - RNA, 22 nt, Human
uucagaaacccauugggucucu

SEQ ID NO: 386583 - RNA, 22 nt, Human
acagaauugaaaguauaaucug

SEQ ID NO: 386584 - RNA, 22 nt, Human
ccugggugaugugcugcccucg

SEQ ID NO: 386585 - RNA, 22 nt, Human
uuugacaaaggaaaaaugcaca

SEQ ID NO: 386586 - RNA, 22 nt, Human
cauugcacuucugcuuuuccuc

SEQ ID NO: 386587 - RNA, 22 nt, Human
cauaugaaauaugaguugaaca

SEQ ID NO: 386588 - RNA, 22 nt, Human
cagcugacccagugaggaggca

SEQ ID NO: 386589 - RNA, 22 nt, Human
uuuaucuuuaggacuuugcaga

SEQ ID NO: 386590 - RNA, 21 nt, Human
aaaggccauaaucacggagca

SEQ ID NO: 386591 - RNA, 22 nt, Human
cugccagguuggcgcucgcucu

SEQ ID NO: 386592 - RNA, 22 nt, Human
aaucccagcuacucaggaaguu

SEQ ID NO: 386593 - RNA, 22 nt, Human
uuccaaagugcuggaauuacau

SEQ ID NO: 386594 - RNA, 22 nt, Human
uggcaggaaaaacauuggagau

SEQ ID NO: 386595 - RNA, 22 nt, Human
agcucccugagaugccacagca

SEQ ID NO: 386596 - RNA, 17 nt, Human
gcgcagcuccuggcgcg

SEQ ID NO: 386597 - RNA, 22 nt, Human
agcagcauguaugagggugaac

SEQ ID NO: 386598 - RNA, 19 nt, Human
gcugucugaugcugagguc

SEQ ID NO: 386599 - RNA, 22 nt, Human
cacaucuucuuaacuccaaagu

SEQ ID NO: 386600 - RNA, 19 nt, Human
acagcagggauuuuuggag

SEQ ID NO: 386601 - RNA, 22 nt, Human
uggggugggcaugcgcuguccu

SEQ ID NO: 386602 - RNA, 22 nt, Human
ucuuugcagaauuuaacuuugc

SEQ ID NO: 386603 - RNA, 22 nt, Human
gaggaaccaaaucagcuugcac

SEQ ID NO: 386604 - RNA, 22 nt, Human
cauuuguaguaucuguuuauau

SEQ ID NO: 386605 - RNA, 22 nt, Human
aagcagccuggacuugggcugg

SEQ ID NO: 386606 - RNA, 22 nt, Human
gccuuggccaacaccuugcaaa

SEQ ID NO: 386607 - RNA, 22 nt, Human
uucauuccuucuguaccuugcc

SEQ ID NO: 386608 - RNA, 23 nt, Human
ccacagagcugccaauuccugug

SEQ ID NO: 386609 - RNA, 22 nt, Human
uuucacaaucaaauggugaaau

SEQ ID NO: 386610 - RNA, 22 nt, Human
agagaacaaauuaaaggugguu

SEQ ID NO: 386611 - RNA, 22 nt, Human
gcagcuuuggagguggaacucu

SEQ ID NO: 386612 - RNA, 21 nt, Human
aauuacagauggaauuacaga

SEQ ID NO: 386613 - RNA, 22 nt, Human
ucucagagagaugaaacuucca

SEQ ID NO: 386614 - RNA, 22 nt, Human
ucucccacgguacaggauaaac

SEQ ID NO: 386615 - RNA, 22 nt, Human
cuguguuggcuuuucucuugua

SEQ ID NO: 386616 - RNA, 18 nt, Human
gaaagccaugcagcagug

SEQ ID NO: 386617 - RNA, 22 nt, Human
gcaggagcucguuuccaggcug

SEQ ID NO: 386618 - RNA, 22 nt, Human
aaggacuccaauucuuucaucu

SEQ ID NO: 386619 - RNA, 22 nt, Human
gauggcuucacuuacauggcug

SEQ ID NO: 386620 - RNA, 22 nt, Human
cacagcauaaugaaauauacuu

SEQ ID NO: 386621 - RNA, 22 nt, Human
agagcuuauaucuuggccaucc

SEQ ID NO: 386622 - RNA, 21 nt, Human
agguggggcugcaccucugcu

SEQ ID NO: 386623 - RNA, 22 nt, Human
gaggccagcgcgcagcacuuuu

SEQ ID NO: 386624 - RNA, 19 nt, Human
uggagacugagagugagca

SEQ ID NO: 386625 - RNA, 22 nt, Human
gggggcaguaaccucaaagugu

SEQ ID NO: 386626 - RNA, 23 nt, Human
aaucuauacuuaggcugguaaua

SEQ ID NO: 386627 - RNA, 21 nt, Human
aggcagcuggaaggccuggcu

SEQ ID NO: 386628 - RNA, 18 nt, Human
uuccaugauuccuuucac

SEQ ID NO: 386629 - RNA, 21 nt, Human
uccagaaaagaggucauuagc

SEQ ID NO: 386630 - RNA, 22 nt, Human
gaaggccaagaggcuccaagau

SEQ ID NO: 386631 - RNA, 22 nt, Human
gaggcagagucacaaagagucu

SEQ ID NO: 386632 - RNA, 22 nt, Human
guucucucugcuuccaagaugg

SEQ ID NO: 386633 - RNA, 20 nt, Human
guggcaggcagugaaggagc

SEQ ID NO: 386634 - RNA, 22 nt, Human
uagccgcuuaauuauuugguga

SEQ ID NO: 386635 - RNA, 22 nt, Human
gccuuucaguuccaucaaagga

SEQ ID NO: 386636 - RNA, 22 nt, Human
gggaagcagcauugugcuggcu

SEQ ID NO: 386637 - RNA, 21 nt, Human
ucucugggcccuccugugggg

SEQ ID NO: 386638 - RNA, 22 nt, Human
gguagcacauugcauuaggaga

SEQ ID NO: 386639 - RNA, 22 nt, Human
acuuucugcaguguuggaaaug

SEQ ID NO: 386640 - RNA, 22 nt, Human
cuggagagggagcccuggcagu

SEQ ID NO: 386641 - RNA, 22 nt, Human
cauucacagagggggaagcauc

SEQ ID NO: 386642 - RNA, 22 nt, Human
gggagagagaaaacguggcgca

SEQ ID NO: 386643 - RNA, 20 nt, Human
uguuccaugacuauuuggau

SEQ ID NO: 386644 - RNA, 22 nt, Human
uccuauugguagacauuucugu

SEQ ID NO: 386645 - RNA, 22 nt, Human
gggcugcuuuuaagggucucag

SEQ ID NO: 386646 - RNA, 22 nt, Human
cugcuggggucagagcacuggg

SEQ ID NO: 386647 - RNA, 22 nt, Human
cacaggagcuguggggcagugu

SEQ ID NO: 386648 - RNA, 22 nt, Human
guggcagggugcucaucaugca

SEQ ID NO: 386649 - RNA, 22 nt, Human
gccaugcuugguaugcugugag

SEQ ID NO: 386650 - RNA, 22 nt, Human
gagcugccuacauugccaagag

SEQ ID NO: 386651 - RNA, 22 nt, Human
ggcccugggcagaggagugggc

SEQ ID NO: 386652 - RNA, 22 nt, Human
aggcugaaaacgagauggcaau

SEQ ID NO: 386653 - RNA, 22 nt, Human
auguggaggaaaugaguguaca

SEQ ID NO: 386654 - RNA, 22 nt, Human
ucaggcugcccguucagggcuc

SEQ ID NO: 386655 - RNA, 22 nt, Human
ugcacagugaccccuggugacu

SEQ ID NO: 386656 - RNA, 22 nt, Human
ugggccaggauuucaagacccu

SEQ ID NO: 386657 - RNA, 22 nt, Human
uggcugcucaagggaggaggcu

SEQ ID NO: 386658 - RNA, 22 nt, Human
ucccagacaaucauuggccacc

SEQ ID NO: 386659 - RNA, 22 nt, Human
cagcuggcaaguggagcagggu

SEQ ID NO: 386660 - RNA, 22 nt, Human
cugccuuggaaaaugugguaau

SEQ ID NO: 386661 - RNA, 17 nt, Human
gcuguaguuugauaaga

SEQ ID NO: 386662 - RNA, 22 nt, Human
aucaggaugcugucaguuacca

SEQ ID NO: 386663 - RNA, 22 nt, Human
ggaccuggcaauuugcaucucu

SEQ ID NO: 386664 - RNA, 22 nt, Human
gcagaggcaaucagguaugugg

SEQ ID NO: 386665 - RNA, 20 nt, Human
agacccuguguccuguggcc

SEQ ID NO: 386666 - RNA, 22 nt, Human
acagcagggggagcuguuggac

SEQ ID NO: 386667 - RNA, 22 nt, Human
guguaauugaaauugagaacca

SEQ ID NO: 386668 - RNA, 22 nt, Human
gcuguggcuguacagagaccau

SEQ ID NO: 386669 - RNA, 22 nt, Human
auuggcaggaaccgaggagggg

SEQ ID NO: 386670 - RNA, 22 nt, Human
gcuguggucugugagcuccaaa

SEQ ID NO: 386671 - RNA, 22 nt, Human
aggucaggguauucacgucugu

SEQ ID NO: 386672 - RNA, 22 nt, Human
uccugcaggccuguucccagua

SEQ ID NO: 386673 - RNA, 22 nt, Human
cccuggagugugacgaggcauu

SEQ ID NO: 386674 - RNA, 22 nt, Human
gcucuggaagcaucugagagga

SEQ ID NO: 386675 - RNA, 22 nt, Human
ggccccaggaccuccacggucc

SEQ ID NO: 386676 - RNA, 22 nt, Human
ucagaggucacacagcaaguuu

SEQ ID NO: 386677 - RNA, 22 nt, Human
guuauguaugagggaaugauua

SEQ ID NO: 386678 - RNA, 19 nt, Human
acaaaugauguugcacuga

SEQ ID NO: 386679 - RNA, 22 nt, Human
cugaggucaauuaaucaacaac

SEQ ID NO: 386680 - RNA, 22 nt, Human
aucagcaucuuuaacaauuacc

SEQ ID NO: 386681 - RNA, 22 nt, Human
aggcucagcccaagguggagag

SEQ ID NO: 386682 - RNA, 22 nt, Human
auggacaggaacucccuuggca

SEQ ID NO: 386683 - RNA, 22 nt, Human
aaacuuuguucgucugaugugg

SEQ ID NO: 386684 - RNA, 23 nt, Human
ucaggauauugugugccaaggug

SEQ ID NO: 386685 - RNA, 23 nt, Human
aaaguugauuugcaguuuaagag

SEQ ID NO: 386686 - RNA, 22 nt, Human
aggaagcugcuggaguagugug

SEQ ID NO: 386687 - RNA, 22 nt, Human
agggcugcccagugugagagcu

SEQ ID NO: 386688 - RNA, 18 nt, Human
ucuggcucaggacugaac

SEQ ID NO: 386689 - RNA, 19 nt, Human
cucugccucuggcuguggc

SEQ ID NO: 386690 - RNA, 22 nt, Human
cagaauaugacaagauuuuccu

SEQ ID NO: 386691 - RNA, 22 nt, Human
acagagagguaaaauauauagu

SEQ ID NO: 386692 - RNA, 22 nt, Human
cccucccagaugggcuugaggu

SEQ ID NO: 386693 - RNA, 22 nt, Human
gcuggccagggcugcucgcgga

SEQ ID NO: 386694 - RNA, 22 nt, Human
uaaugugugucaucaguagagu

SEQ ID NO: 386695 - RNA, 22 nt, Human
cuaaagaagcuagcaaucuaua

SEQ ID NO: 386696 - RNA, 22 nt, Human
augguuuuccucugcugcuuaa

SEQ ID NO: 386697 - RNA, 22 nt, Human
ucuggcucccagccugcucuca

SEQ ID NO: 386698 - RNA, 22 nt, Human
ugcugugguucccagaguggau

SEQ ID NO: 386699 - RNA, 22 nt, Human
acugggccuggauuggcguguc

SEQ ID NO: 386700 - RNA, 22 nt, Human
augaggcaucugcagucacuag

SEQ ID NO: 386701 - RNA, 18 nt, Human
caggaugagugaugggga

SEQ ID NO: 386702 - RNA, 22 nt, Human
auggaucagaaucccgggaggg

SEQ ID NO: 386703 - RNA, 22 nt, Human
agcaggagaacacuguggcucu

SEQ ID NO: 386704 - RNA, 22 nt, Human
uuucucugaggcuggccucccu

SEQ ID NO: 386705 - RNA, 22 nt, Human
uuagaaaggagcuuauuucuuu

SEQ ID NO: 386706 - RNA, 22 nt, Human
agaggaggcuggguccagauaa

SEQ ID NO: 386707 - RNA, 22 nt, Human
ugucuuccucuuggcuugagcu

SEQ ID NO: 386708 - RNA, 22 nt, Human
aucacauuguuagcauagacug

SEQ ID NO: 386709 - RNA, 22 nt, Human
caggcagaaggaaguaccaggc

SEQ ID NO: 386710 - RNA, 22 nt, Human
cugaauaaagcccucgcgcgcu

SEQ ID NO: 386711 - RNA, 18 nt, Human
ugugaacacauuuuucug

SEQ ID NO: 386712 - RNA, 22 nt, Human
cucagcccagcccaggaccagg

SEQ ID NO: 386713 - RNA, 22 nt, Human
ucacagaacaauguuuaguucu

SEQ ID NO: 386714 - RNA, 22 nt, Human
gucuuguuugggauguggaugg

SEQ ID NO: 386715 - RNA, 22 nt, Human
ugaaagguagcuggccucauag

SEQ ID NO: 386716 - RNA, 22 nt, Human
aaaugcuagggagaaacucucc

SEQ ID NO: 386717 - RNA, 22 nt, Human
ucucugagguuguuuccagcac

SEQ ID NO: 386718 - RNA, 22 nt, Human
caaagucagccagcuaguaggu

SEQ ID NO: 386719 - RNA, 22 nt, Human
gggcacugcuuugcucugucac

SEQ ID NO: 386720 - RNA, 22 nt, Human
cacauaauaaauguuccugaug

SEQ ID NO: 386721 - RNA, 22 nt, Human
uagacagauuucuuguuagaca

SEQ ID NO: 386722 - RNA, 22 nt, Human
uggagauggguuaauggagaga

SEQ ID NO: 386723 - RNA, 22 nt, Human
ugcaggaauagcuacagagcug

SEQ ID NO: 386724 - RNA, 22 nt, Human
aaugauguauuaguacaacaca

SEQ ID NO: 386725 - RNA, 22 nt, Human
cagcaggauaugguggagagag

SEQ ID NO: 386726 - RNA, 22 nt, Human
ugucucugugacuccuuccgcc

SEQ ID NO: 386727 - RNA, 22 nt, Human
gcugcagcagcugcaggguugu

SEQ ID NO: 386728 - RNA, 22 nt, Human
cugcccugcccaggccuugggc

SEQ ID NO: 386729 - RNA, 22 nt, Human
gauuucaagcccccagagauuc

SEQ ID NO: 386730 - RNA, 22 nt, Human
ccagcugaggcagccacacagg

SEQ ID NO: 386731 - RNA, 22 nt, Human
cagcaggaccauugaggcauca

SEQ ID NO: 386732 - RNA, 17 nt, Human
cugaagauaauggcaac

SEQ ID NO: 386733 - RNA, 22 nt, Human
aaggggaaguagcaccagaggu

SEQ ID NO: 386734 - RNA, 22 nt, Human
cauuaucucuucuauaugcuag

SEQ ID NO: 386735 - RNA, 22 nt, Human
aaauuguugaucuacaguaagg

SEQ ID NO: 386736 - RNA, 22 nt, Human
ugcucugguaacucacuuccau

SEQ ID NO: 386737 - RNA, 22 nt, Human
uuugaaagggacaaagucacug

SEQ ID NO: 386738 - RNA, 22 nt, Human
uucaugaaaguguaucuugugg

SEQ ID NO: 386739 - RNA, 22 nt, Human
aaagauuucacaucccaagccu

SEQ ID NO: 386740 - RNA, 22 nt, Human
acacugugucuagcauuuuaca

SEQ ID NO: 386741 - RNA, 22 nt, Human
augacagaggagugcaggugau

SEQ ID NO: 386742 - RNA, 22 nt, Human
ccaggccaaauucagucagcag

SEQ ID NO: 386743 - RNA, 22 nt, Human
cauuugcaagagauaaauguuu

SEQ ID NO: 386744 - RNA, 22 nt, Human
gccacugcacuccagcccaggc

SEQ ID NO: 386745 - RNA, 22 nt, Human
aagccaggccauucucugguuc

SEQ ID NO: 386746 - RNA, 22 nt, Human
auaauuuaauuuucacaguggu

SEQ ID NO: 386747 - RNA, 22 nt, Human
gcugccuguugaagggucugug

SEQ ID NO: 386748 - RNA, 22 nt, Human
uccugccucacaguugaaguuu

SEQ ID NO: 386749 - RNA, 22 nt, Human
agcugccgaugcccagcugcau

SEQ ID NO: 386750 - RNA, 22 nt, Human
aauaaugucuuuggcuugacca

SEQ ID NO: 386751 - RNA, 22 nt, Human
agcuguggcaaccuugucagac

SEQ ID NO: 386752 - RNA, 22 nt, Human
aggucaaggccaaaagaguggu

SEQ ID NO: 386753 - RNA, 21 nt, Human
aggcaucuaaagagaguagac

SEQ ID NO: 386754 - RNA, 22 nt, Human
uuagaaacccagacucuuaggu

SEQ ID NO: 386755 - RNA, 22 nt, Human
aaaguguaaaagcauguuaggg

SEQ ID NO: 386756 - RNA, 18 nt, Human
uggcaggaaaugcacuuu

SEQ ID NO: 386757 - RNA, 22 nt, Human
agagggcuggacgcagguugga

SEQ ID NO: 386758 - RNA, 22 nt, Human
gugugcagaagacacaagacau

SEQ ID NO: 386759 - RNA, 22 nt, Human
aggcacugaaggaagcuugcgc

SEQ ID NO: 386760 - RNA, 22 nt, Human
gggaccugaggcccugcuccac

SEQ ID NO: 386761 - RNA, 22 nt, Human
acaaagucugaaaccugaggca

SEQ ID NO: 386762 - RNA, 22 nt, Human
uggcagaguucgcugugccuuu

SEQ ID NO: 386763 - RNA, 22 nt, Human
auauaugcauguguacuuaugu

SEQ ID NO: 386764 - RNA, 22 nt, Human
cuuagaaaugcagauucucagg

SEQ ID NO: 386765 - RNA, 20 nt, Human
ucucugagcuucucuugggg

SEQ ID NO: 386766 - RNA, 22 nt, Human
cugcugcugcuaucuacccagg

SEQ ID NO: 386767 - RNA, 22 nt, Human
ugccucuguggaaauggugguc

SEQ ID NO: 386768 - RNA, 22 nt, Human
ccugugaggucaucugugguaa

SEQ ID NO: 386769 - RNA, 22 nt, Human
ucaaaggcccauugucccguug

SEQ ID NO: 386770 - RNA, 22 nt, Human
cacugaaggacaguaggaaggg

SEQ ID NO: 386771 - RNA, 22 nt, Human
gaguccuuuguuccuugccaca

SEQ ID NO: 386772 - RNA, 22 nt, Human
aggcagaccaugaaucaugacc

SEQ ID NO: 386773 - RNA, 22 nt, Human
cugggcacuuuggggagccuac

SEQ ID NO: 386774 - RNA, 22 nt, Human
ucccagagccaagcuauggaug

SEQ ID NO: 386775 - RNA, 22 nt, Human
uagggcagagcuuguacacgau

SEQ ID NO: 386776 - RNA, 22 nt, Human
ugaggcucaaggucugguggag

SEQ ID NO: 386777 - RNA, 22 nt, Human
caguggccaugguggcaggggu

SEQ ID NO: 386778 - RNA, 22 nt, Human
ucugaaggucugagaaccagga

SEQ ID NO: 386779 - RNA, 22 nt, Human
uccaggagggguaggcaguaug

SEQ ID NO: 386780 - RNA, 22 nt, Human
uggcccugccacucacugcuga

SEQ ID NO: 386781 - RNA, 22 nt, Human
gccuuuuuuguugcucugucac

SEQ ID NO: 386782 - RNA, 22 nt, Human
aaggcagaaagggaugugagug

SEQ ID NO: 386783 - RNA, 18 nt, Human
gaaaugugauucuagggc

SEQ ID NO: 386784 - RNA, 22 nt, Human
agcagaacugaugagacuugag

SEQ ID NO: 386785 - RNA, 22 nt, Human
gcugccaguguggcaugaugca

SEQ ID NO: 386786 - RNA, 22 nt, Human
ugaccaaagaguugcuuguauu

SEQ ID NO: 386787 - RNA, 22 nt, Human
ugguuuauuucucugaaagguu

SEQ ID NO: 386788 - RNA, 22 nt, Human
uccuggaggcaaaugagcacau

SEQ ID NO: 386789 - RNA, 22 nt, Human
ggaggggucucuagcgaggaga

SEQ ID NO: 386790 - RNA, 22 nt, Human
gaaugaaagauuugcauucuau

SEQ ID NO: 386791 - RNA, 22 nt, Human
ucagggcaagauugguuaauaa

SEQ ID NO: 386792 - RNA, 22 nt, Human
uguggcugcucaggugcagacc

SEQ ID NO: 386793 - RNA, 22 nt, Human
acaggauuagcaaguaaucagg

SEQ ID NO: 386794 - RNA, 22 nt, Human
gcagugggaagguuggcacaug

SEQ ID NO: 386795 - RNA, 22 nt, Human
cugccucuauaggaguccacca

SEQ ID NO: 386796 - RNA, 22 nt, Human
cagcaggaaguacuagcuuuga

SEQ ID NO: 386797 - RNA, 22 nt, Human
aggcgugggaggaucugaggcc

SEQ ID NO: 386798 - RNA, 20 nt, Human
gcccaagguccagaaggggg

SEQ ID NO: 386799 - RNA, 22 nt, Human
ucuggcucuuugggugauugua

SEQ ID NO: 386800 - RNA, 22 nt, Human
uuagccauuaaauuacaaggug

SEQ ID NO: 386801 - RNA, 22 nt, Human
cuguuuauuacacuggauagca

SEQ ID NO: 386802 - RNA, 22 nt, Human
gcugucugggaugucacugcug

SEQ ID NO: 386803 - RNA, 22 nt, Human
uuauaugaguaucauaucacuu

SEQ ID NO: 386804 - RNA, 22 nt, Human
caggcagcugcgacaagagagc

SEQ ID NO: 386805 - RNA, 22 nt, Human
uugcagcugcaguaaauguuca

SEQ ID NO: 386806 - RNA, 22 nt, Human
ccagggccaguaagauuggcau

SEQ ID NO: 386807 - RNA, 22 nt, Human
acaggcuguugggguccagggu

SEQ ID NO: 386808 - RNA, 22 nt, Human
uaauuuaauuucaugccagccu

SEQ ID NO: 386809 - RNA, 22 nt, Human
gaggaaaauauucagggagguu

SEQ ID NO: 386810 - RNA, 22 nt, Human
cugggccagcaacugcaaugga

SEQ ID NO: 386811 - RNA, 22 nt, Human
ccacagcugaccgcaggugagc

SEQ ID NO: 386812 - RNA, 22 nt, Human
ucagaggacaagcucccuggug

SEQ ID NO: 386813 - RNA, 22 nt, Human
aagaaucauccugcaagagucu

SEQ ID NO: 386814 - RNA, 22 nt, Human
cugugcaagacuuacuuuaaua

SEQ ID NO: 386815 - RNA, 22 nt, Human
uggagcaggcaucuuucucucu

SEQ ID NO: 386816 - RNA, 22 nt, Human
gcgucugaguugcgggggcuca

SEQ ID NO: 386817 - RNA, 22 nt, Human
agccuccaaaugucaggucccg

SEQ ID NO: 386818 - RNA, 22 nt, Human
augguuuuguccucuuugguuc

SEQ ID NO: 386819 - RNA, 22 nt, Human
aaggcacugaaaaauugugugu

SEQ ID NO: 386820 - RNA, 22 nt, Human
ccuaggcccuaggcuuccauca

SEQ ID NO: 386821 - RNA, 22 nt, Human
agcagggccuggcacuccuggg

SEQ ID NO: 386822 - RNA, 22 nt, Human
uccaggcuggacaugaggcggg

SEQ ID NO: 386823 - RNA, 22 nt, Human
acagccuguguaccagcuggga

SEQ ID NO: 386824 - RNA, 22 nt, Human
guuugcauauuugcacaggaau

SEQ ID NO: 386825 - RNA, 22 nt, Human
aaaugcacagaaaggaugugga

SEQ ID NO: 386826 - RNA, 22 nt, Human
uuuguucaugccuauauucuca

SEQ ID NO: 386827 - RNA, 22 nt, Human
guggguggaggcgucgagggca

SEQ ID NO: 386828 - RNA, 22 nt, Human
cacaggaaugaacagggaaaga

SEQ ID NO: 386829 - RNA, 22 nt, Human
agagccugugauugucaucacc

SEQ ID NO: 386830 - RNA, 22 nt, Human
gccugccuggagcuugagguga

SEQ ID NO: 386831 - RNA, 22 nt, Human
cuucucuucccagggacacagg

SEQ ID NO: 386832 - RNA, 22 nt, Human
aaggcuaugaucuuuuucauga

SEQ ID NO: 386833 - RNA, 22 nt, Human
auaucacaguaguuguuuaguu

SEQ ID NO: 386834 - RNA, 22 nt, Human
gaguguucccacaccccaguug

SEQ ID NO: 386835 - RNA, 21 nt, Human
gcugcccaacccugcaucucc

SEQ ID NO: 386836 - RNA, 22 nt, Human
gaucagaaugggacauauccug

SEQ ID NO: 386837 - RNA, 22 nt, Human
uuggaaggugagucccuggguu

SEQ ID NO: 386838 - RNA, 22 nt, Human
aagagguaaccauagcaaccac

SEQ ID NO: 386839 - RNA, 22 nt, Human
aaggccauuauucugauauauu

SEQ ID NO: 386840 - RNA, 22 nt, Human
ucuggcucugacacuacuguua

SEQ ID NO: 386841 - RNA, 22 nt, Human
gucuggaggaggaagaaggcac

SEQ ID NO: 386842 - RNA, 22 nt, Human
gacuuucucuccucccaggugu

SEQ ID NO: 386843 - RNA, 22 nt, Human
gggccuggggacaccaccauga

SEQ ID NO: 386844 - RNA, 22 nt, Human
uccaugaggcagggaggcuggc

SEQ ID NO: 386845 - RNA, 22 nt, Human
gccuggagcuacuggacacuga

SEQ ID NO: 386846 - RNA, 20 nt, Human
ugcagggccuaaaaagggaa

SEQ ID NO: 386847 - RNA, 22 nt, Human
gguggccucugcaggccucgac

SEQ ID NO: 386848 - RNA, 22 nt, Human
ccagcuccuucugucuguggag

SEQ ID NO: 386849 - RNA, 22 nt, Human
cagcaggguagguuguaucagu

SEQ ID NO: 386850 - RNA, 22 nt, Human
acaaaugccauauauaaauucu

SEQ ID NO: 386851 - RNA, 22 nt, Human
cagcugugcuguauuaagcucu

SEQ ID NO: 386852 - RNA, 22 nt, Human
aaucuucuacuugacaguucuc

SEQ ID NO: 386853 - RNA, 17 nt, Human
ccuuucucuuucaucuc

SEQ ID NO: 386854 - RNA, 22 nt, Human
agaugcugggaggcugagugca

SEQ ID NO: 386855 - RNA, 22 nt, Human
cccucuggcucuucucaggccg

SEQ ID NO: 386856 - RNA, 22 nt, Human
caaucaguaaccggaucauggu

SEQ ID NO: 386857 - RNA, 22 nt, Human
ggaugcugggagacagcaggca

SEQ ID NO: 386858 - RNA, 22 nt, Human
ggcucugcagugacuugagggg

SEQ ID NO: 386859 - RNA, 22 nt, Human
ucacugcugcugccaugaugga

SEQ ID NO: 386860 - RNA, 22 nt, Human
agacaucauguuacagauuaag

SEQ ID NO: 386861 - RNA, 22 nt, Human
acugaaggguaaugugggagcc

SEQ ID NO: 386862 - RNA, 22 nt, Human
gaauuucaagcagugcaauguu

SEQ ID NO: 386863 - RNA, 22 nt, Human
ucuuuucaucauuuaauaggua

SEQ ID NO: 386864 - RNA, 22 nt, Human
cauuuguuuagaagucuuuaua

SEQ ID NO: 386865 - RNA, 23 nt, Human
uggaauaauaagguacauuaaca

SEQ ID NO: 386866 - RNA, 23 nt, Human
uccaagggcuacaaacacagacc

SEQ ID NO: 386867 - RNA, 22 nt, Human
gauauuuugagaaauccuauga

SEQ ID NO: 386868 - RNA, 22 nt, Human
ggugcagaaggaagggagcugg

SEQ ID NO: 386869 - RNA, 20 nt, Human
accauaauguuaauuacaaa

SEQ ID NO: 386870 - RNA, 22 nt, Human
ccagcuuuccugcgaguugauu

SEQ ID NO: 386871 - RNA, 22 nt, Human
uuugaauagaggccccucagaa

SEQ ID NO: 386872 - RNA, 22 nt, Human
caucauaaaauugagauaacug

SEQ ID NO: 386873 - RNA, 22 nt, Human
ucaccaggcuccuguuaagaug

SEQ ID NO: 386874 - RNA, 22 nt, Human
gaggaagaagggauuagaacuc

SEQ ID NO: 386875 - RNA, 22 nt, Human
aaguccuuggagaauagaaagg

SEQ ID NO: 386876 - RNA, 23 nt, Human
ucucagaggauuccugggccuug

SEQ ID NO: 386877 - RNA, 22 nt, Human
ugugggcucccccucacucugu

SEQ ID NO: 386878 - RNA, 22 nt, Human
acacuguguggucucucucgga

SEQ ID NO: 386879 - RNA, 17 nt, Human
agccgggcauggaccag

SEQ ID NO: 386880 - RNA, 22 nt, Human
ccagcaccuugaucuuggaguu

SEQ ID NO: 386881 - RNA, 22 nt, Human
aauauccacacugugucccugc

SEQ ID NO: 386882 - RNA, 22 nt, Human
gagaagccgagucagcugagcc

SEQ ID NO: 386883 - RNA, 22 nt, Human
uaggcagcgcuuggcugugcuu

SEQ ID NO: 386884 - RNA, 17 nt, Human
uggcacagaggugcuau

SEQ ID NO: 386885 - RNA, 22 nt, Human
gcccaugcacuuucugugaugg

SEQ ID NO: 386886 - RNA, 22 nt, Human
cagaaucagcccuugcuauuaa

SEQ ID NO: 386887 - RNA, 22 nt, Human
uaaagccaauauaccuagcaua

SEQ ID NO: 386888 - RNA, 22 nt, Human
auaauguagguauguguauuua

SEQ ID NO: 386889 - RNA, 22 nt, Human
cugccuggggaaugugaggauu

SEQ ID NO: 386890 - RNA, 22 nt, Human
cugaaggauuuaguucuuugcu

SEQ ID NO: 386891 - RNA, 22 nt, Human
uucaggaugcucagaguagucu

SEQ ID NO: 386892 - RNA, 22 nt, Human
gcucagccgaacuucagagcag

SEQ ID NO: 386893 - RNA, 22 nt, Human
aggguggggugcuacaucuuua

SEQ ID NO: 386894 - RNA, 22 nt, Human
caaggccauauugccuguaugu

SEQ ID NO: 386895 - RNA, 22 nt, Human
gacuaugugaagugugaauagg

SEQ ID NO: 386896 - RNA, 22 nt, Human
ggggcagaguagcuggggugug

SEQ ID NO: 386897 - RNA, 22 nt, Human
ggugaggaaagauggugacagu

SEQ ID NO: 386898 - RNA, 22 nt, Human
accagagauggggcuucucugu

SEQ ID NO: 386899 - RNA, 22 nt, Human
gugugccaacaaaagacagugc

SEQ ID NO: 386900 - RNA, 22 nt, Human
gaggggaagacuucuggacagu

SEQ ID NO: 386901 - RNA, 22 nt, Human
gccagaagacuggagucagcug

SEQ ID NO: 386902 - RNA, 16 nt, Human
aaggagggaagagaau

SEQ ID NO: 386903 - RNA, 20 nt, Human
gcuuccuucccagcccccac

SEQ ID NO: 386904 - RNA, 22 nt, Human
uugaauaguguuuucaguauac

SEQ ID NO: 386905 - RNA, 22 nt, Human
uacauauuugucuuuguacugu

SEQ ID NO: 386906 - RNA, 20 nt, Human
agaguaacuggcacauaggg

SEQ ID NO: 386907 - RNA, 22 nt, Human
uuugaauaaucacugggcauua

SEQ ID NO: 386908 - RNA, 22 nt, Human
cugggcuguaauguggcacuga

SEQ ID NO: 386909 - RNA, 22 nt, Human
uggcagagucugggcuugggca

SEQ ID NO: 386910 - RNA, 22 nt, Human
aguguguccagaaaucuguauu

SEQ ID NO: 386911 - RNA, 22 nt, Human
uccugccuagcaggugaccuau

SEQ ID NO: 386912 - RNA, 20 nt, Human
acauugauuauguuuguaga

SEQ ID NO: 386913 - RNA, 22 nt, Human
aauucuugguccuaguguauaa

SEQ ID NO: 386914 - RNA, 22 nt, Human
aggcccagagcaggaaaggguu

SEQ ID NO: 386915 - RNA, 22 nt, Human
uuugagauggagucuugcucug

SEQ ID NO: 386916 - RNA, 20 nt, Human
uucugcuugcaaauaucaag

SEQ ID NO: 386917 - RNA, 22 nt, Human
gcagccugaggcccuuucuggc

SEQ ID NO: 386918 - RNA, 22 nt, Human
uggcaaggccacaggugcaguu

SEQ ID NO: 386919 - RNA, 22 nt, Human
aagucuggaagucucaguuuuc

SEQ ID NO: 386920 - RNA, 22 nt, Human
ugcagggccaugguggcggcug

SEQ ID NO: 386921 - RNA, 22 nt, Human
gaggcccaggucaagcagccac

SEQ ID NO: 386922 - RNA, 18 nt, Human
ugcccagaaaagcaggga

SEQ ID NO: 386923 - RNA, 22 nt, Human
aaaucucaguguucuaagcauu

SEQ ID NO: 386924 - RNA, 22 nt, Human
gcuguucccauguggggcucag

SEQ ID NO: 386925 - RNA, 22 nt, Human
cagucccaaggaggaagcaguc

SEQ ID NO: 386926 - RNA, 22 nt, Human
acaguaaaucaacagaauaucu

SEQ ID NO: 386927 - RNA, 22 nt, Human
ucucugggauaaacugggccag

SEQ ID NO: 386928 - RNA, 22 nt, Human
cccagcccccgagugucuggaa

SEQ ID NO: 386929 - RNA, 22 nt, Human
gacauguugaagaauauuugga

SEQ ID NO: 386930 - RNA, 22 nt, Human
ccugguguugugaaguagccgu

SEQ ID NO: 386931 - RNA, 22 nt, Human
acaaggcugaacagugaagccg

SEQ ID NO: 386932 - RNA, 22 nt, Human
aagauauacuauuaaguaccau

SEQ ID NO: 386933 - RNA, 22 nt, Human
ggagcugugcagugacuacaga

SEQ ID NO: 386934 - RNA, 22 nt, Human
ugucauaaucaguuuugcaugu

SEQ ID NO: 386935 - RNA, 22 nt, Human
cagagcugguguuacaagucca

SEQ ID NO: 386936 - RNA, 22 nt, Human
aacuagaaaacaagaugcugau

SEQ ID NO: 386937 - RNA, 22 nt, Human
uuuucauuuacauuagggaaga

SEQ ID NO: 386938 - RNA, 22 nt, Human
ucauccuuuugcaugggaaggc

SEQ ID NO: 386939 - RNA, 22 nt, Human
gggcaguggguggcugcagccu

SEQ ID NO: 386940 - RNA, 22 nt, Human
ucaaugauagacaagaucuaag

SEQ ID NO: 386941 - RNA, 22 nt, Human
cuggccagggugcgaucguggu

SEQ ID NO: 386942 - RNA, 22 nt, Human
ugaggaaguugaucucaucagu

SEQ ID NO: 386943 - RNA, 22 nt, Human
gcucugagucucagcuaccaca

SEQ ID NO: 386944 - RNA, 22 nt, Human
uaauuucuucaucucugcagcu

SEQ ID NO: 386945 - RNA, 23 nt, Human
uccagggauuaaugaagucaguc

SEQ ID NO: 386946 - RNA, 22 nt, Human
ugcuggggcucugaccacucca

SEQ ID NO: 386947 - RNA, 22 nt, Human
aggagcugcauggauaccuggu

SEQ ID NO: 386948 - RNA, 22 nt, Human
aagaauguucauuaaacuguug

SEQ ID NO: 386949 - RNA, 22 nt, Human
uccagggaaggugugaggcugg

SEQ ID NO: 386950 - RNA, 22 nt, Human
cccaggcagucuggcucuaaag

SEQ ID NO: 386951 - RNA, 22 nt, Human
cacugcucgcugcagcauggcc

SEQ ID NO: 386952 - RNA, 22 nt, Human
ggguaauuggggccuugcagug

SEQ ID NO: 386953 - RNA, 22 nt, Human
aguguuagauucuuacucaguu

SEQ ID NO: 386954 - RNA, 23 nt, Human
ugcuguccaacagacuggccaug

SEQ ID NO: 386955 - RNA, 22 nt, Human
uaaggcagaaauaugagcaggg

SEQ ID NO: 386956 - RNA, 22 nt, Human
ccuggcaguuuugcccaggauu

SEQ ID NO: 386957 - RNA, 22 nt, Human
auuugaagaaaguuuucuagau

SEQ ID NO: 386958 - RNA, 22 nt, Human
augucccaagauacagcuagag

SEQ ID NO: 386959 - RNA, 20 nt, Human
acuggaucuggcuggagcug

SEQ ID NO: 386960 - RNA, 18 nt, Human
uaaauauauuucccccuu

SEQ ID NO: 386961 - RNA, 22 nt, Human
ggcuugcuucuuguccaggaau

SEQ ID NO: 386962 - RNA, 22 nt, Human
cagaaagaccugggcucaagag

SEQ ID NO: 386963 - RNA, 22 nt, Human
gccuucugugcuccuggccuuu

SEQ ID NO: 386964 - RNA, 22 nt, Human
caguacuuuucaaccaguauga

SEQ ID NO: 386965 - RNA, 22 nt, Human
caaaguuuaaaguagauuucag

SEQ ID NO: 386966 - RNA, 22 nt, Human
acaguaauaaguguuggugagg

SEQ ID NO: 386967 - RNA, 22 nt, Human
gggaccuggcgagggucacaca

SEQ ID NO: 386968 - RNA, 22 nt, Human
agcagcucuuaacaaagcaugg

SEQ ID NO: 386969 - RNA, 22 nt, Human
gagcuuccacucuagaaggagu

SEQ ID NO: 386970 - RNA, 22 nt, Human
uuuccucacuucaugagaguuu

SEQ ID NO: 386971 - RNA, 21 nt, Human
uccuguaagcuuggguggcuc

SEQ ID NO: 386972 - RNA, 22 nt, Human
gcugcucucagagcucaugcug

SEQ ID NO: 386973 - RNA, 22 nt, Human
uuuccucuuauacaguguuuau

SEQ ID NO: 386974 - RNA, 22 nt, Human
gcucugugggugaguagaaucu

SEQ ID NO: 386975 - RNA, 22 nt, Human
agcagagguuuguuggaaaccu

SEQ ID NO: 386976 - RNA, 22 nt, Human
auuugucuuuggaccugugaga

SEQ ID NO: 386977 - RNA, 22 nt, Human
gaaaccagcuagaggcagaggg

SEQ ID NO: 386978 - RNA, 22 nt, Human
agggagcaugggugaagcaggc

SEQ ID NO: 386979 - RNA, 22 nt, Human
agagcugaggauccagcugagc

SEQ ID NO: 386980 - RNA, 22 nt, Human
guaaauuauuucaagaucaucu

SEQ ID NO: 386981 - RNA, 22 nt, Human
cugagcagcaacccagagccuc

SEQ ID NO: 386982 - RNA, 19 nt, Human
cucucacucgccacauccu

SEQ ID NO: 386983 - RNA, 22 nt, Human
gagccuggauagccuuguucca

SEQ ID NO: 386984 - RNA, 22 nt, Human
augaggcauuccacucaaacuc

SEQ ID NO: 386985 - RNA, 22 nt, Human
acaggcugcccgcuccccaccu

SEQ ID NO: 386986 - RNA, 22 nt, Human
ugcuggggucauggggcgcccg

SEQ ID NO: 386987 - RNA, 22 nt, Human
uuauccaagcagaagcugcaca

SEQ ID NO: 386988 - RNA, 20 nt, Human
uaugaguauuacuuucagga

SEQ ID NO: 386989 - RNA, 22 nt, Human
cugaggagagaucacguggugu

SEQ ID NO: 386990 - RNA, 22 nt, Human
ggccuggcucuugcccagccug

SEQ ID NO: 386991 - RNA, 22 nt, Human
uagcagaaacuguuacagaagg

SEQ ID NO: 386992 - RNA, 22 nt, Human
gcugaaggcccggaggacaggg

SEQ ID NO: 386993 - RNA, 23 nt, Human
ucuggcucuaugugacagcucuc

SEQ ID NO: 386994 - RNA, 22 nt, Human
cuauuagguaugcagccuauuu

SEQ ID NO: 386995 - RNA, 22 nt, Human
uagagcaguuggcagcuguauu

SEQ ID NO: 386996 - RNA, 22 nt, Human
uaccaggcagcugcacagaggc

SEQ ID NO: 386997 - RNA, 22 nt, Human
cuguguccucccgcugcaccca

SEQ ID NO: 386998 - RNA, 22 nt, Human
acagaaagaagguguauuugag

SEQ ID NO: 386999 - RNA, 20 nt, Human
guauuaggagguaaauguaa

SEQ ID NO: 387000 - RNA, 22 nt, Human
uucauucuuauuugugaucugg

SEQ ID NO: 387001 - RNA, 22 nt, Human
ucacccuugauaauguucuucu

SEQ ID NO: 387002 - RNA, 22 nt, Human
cuuuccaaugucacuaugaauc

SEQ ID NO: 387003 - RNA, 22 nt, Human
ggcgcucaguguugccccagag

SEQ ID NO: 387004 - RNA, 22 nt, Human
aaaugcacaauaaaguaaaggc

SEQ ID NO: 387005 - RNA, 22 nt, Human
ugaagccuuguguggccucucu

SEQ ID NO: 387006 - RNA, 22 nt, Human
uugaauaauguguauguuguua

SEQ ID NO: 387007 - RNA, 22 nt, Human
ugcugccagggcucugcccaca

SEQ ID NO: 387008 - RNA, 20 nt, Human
aguggggagucaggagugcc

SEQ ID NO: 387009 - RNA, 22 nt, Human
agccuggagcuugaguuaugag

SEQ ID NO: 387010 - RNA, 18 nt, Human
acugugugaauuagcucc

SEQ ID NO: 387011 - RNA, 22 nt, Human
guucuucacauuucauugagga

SEQ ID NO: 387012 - RNA, 20 nt, Human
aggcaguuagaaggagauga

SEQ ID NO: 387013 - RNA, 22 nt, Human
augaaggcuguguagauggaug

SEQ ID NO: 387014 - RNA, 22 nt, Human
auacagaagccuguauuucugg

SEQ ID NO: 387015 - RNA, 22 nt, Human
gaggccuggcugggaggaggug

SEQ ID NO: 387016 - RNA, 22 nt, Human
cuggagugaagucuggcagcuu

SEQ ID NO: 387017 - RNA, 22 nt, Human
ggugaggaauuggggacugacc

SEQ ID NO: 387018 - RNA, 22 nt, Human
ugcagccauuuucugccaaugc

SEQ ID NO: 387019 - RNA, 22 nt, Human
gggaagggacuuguuuaagguc

SEQ ID NO: 387020 - RNA, 22 nt, Human
augcagcuucaggauuaugaug

SEQ ID NO: 387021 - RNA, 22 nt, Human
uguaacaaaauaccuuggauug

SEQ ID NO: 387022 - RNA, 22 nt, Human
cgcuggggcuuuuugcuugaga

SEQ ID NO: 387023 - RNA, 22 nt, Human
cugggacuuuacccuguggccc

SEQ ID NO: 387024 - RNA, 22 nt, Human
agggaguuccgaucugugcacc

SEQ ID NO: 387025 - RNA, 22 nt, Human
cauuuguauagugcuuagacca

SEQ ID NO: 387026 - RNA, 22 nt, Human
ugucagagcaaggccaggccag

SEQ ID NO: 387027 - RNA, 19 nt, Human
ugaggggaggagaggccug

SEQ ID NO: 387028 - RNA, 22 nt, Human
gaaaugcauaaucuuaguagau

SEQ ID NO: 387029 - RNA, 22 nt, Human
ggcuuuaucaaaugagacccug

SEQ ID NO: 387030 - RNA, 22 nt, Human
cccagcagcuugcacagugcug

SEQ ID NO: 387031 - RNA, 22 nt, Human
ucccugcucagcucaccuggca

SEQ ID NO: 387032 - RNA, 22 nt, Human
cuuacaaaggagaggagauagg

SEQ ID NO: 387033 - RNA, 22 nt, Human
ucauguuauugacucauaauau

SEQ ID NO: 387034 - RNA, 17 nt, Human
cugucugcgcaugaggu

SEQ ID NO: 387035 - RNA, 22 nt, Human
cagggcagccaggccccguggg

SEQ ID NO: 387036 - RNA, 22 nt, Human
ggaggcucccacgcagcucaca

SEQ ID NO: 387037 - RNA, 22 nt, Human
gagggcugcugccagauaugcc

SEQ ID NO: 387038 - RNA, 22 nt, Human
uuuuaucuaccuaugcucauuu

SEQ ID NO: 387039 - RNA, 22 nt, Human
ggcucacgcaauuaucccggcc

SEQ ID NO: 387040 - RNA, 22 nt, Human
agggcagagacaugcuuccuga

SEQ ID NO: 387041 - RNA, 20 nt, Human
cagagaccaggccagguguc

SEQ ID NO: 387042 - RNA, 22 nt, Human
uguguacacaaugauugcagag

SEQ ID NO: 387043 - RNA, 22 nt, Human
acaacaaaaucacuagucuucc

SEQ ID NO: 387044 - RNA, 22 nt, Human
aaucuggcauguaagcuuagag

SEQ ID NO: 387045 - RNA, 22 nt, Human
uucuuaaaacuuauggacaggu

SEQ ID NO: 387046 - RNA, 22 nt, Human
gcagccacucucauuccacgug

SEQ ID NO: 387047 - RNA, 23 nt, Human
gcagacagagcagacuaagacaa

SEQ ID NO: 387048 - RNA, 19 nt, Human
agagaaggauccuaugguu

SEQ ID NO: 387049 - RNA, 21 nt, Human
aaaguguucagaccaguucug

SEQ ID NO: 387050 - RNA, 22 nt, Human
uuuccaaaggaggaaccaguuu

SEQ ID NO: 387051 - RNA, 22 nt, Human
auuccauuguguaaggauaucg

SEQ ID NO: 387052 - RNA, 22 nt, Human
gggcugagcuaagcuggguuga

SEQ ID NO: 387053 - RNA, 22 nt, Human
guguccagggccguguugucuu

SEQ ID NO: 387054 - RNA, 18 nt, Human
uacagauuauagauacau

SEQ ID NO: 387055 - RNA, 20 nt, Human
ugcuuuaugcuauacuuugu

SEQ ID NO: 387056 - RNA, 22 nt, Human
caaaacugucuagagagagaag

SEQ ID NO: 387057 - RNA, 22 nt, Human
ccagguggaaggucugugcucu

SEQ ID NO: 387058 - RNA, 22 nt, Human
ggucucagcuggaguccuuggu

SEQ ID NO: 387059 - RNA, 21 nt, Human
aggcccagagucuugggggga

SEQ ID NO: 387060 - RNA, 22 nt, Human
uggaagcuguggcauaacugag

SEQ ID NO: 387061 - RNA, 20 nt, Human
ucagccagcuaacaugggga

SEQ ID NO: 387062 - RNA, 22 nt, Human
ucacuugccuagcccaguucag

SEQ ID NO: 387063 - RNA, 19 nt, Human
agcuccugggcucugggcc

SEQ ID NO: 387064 - RNA, 22 nt, Human
ggcagcugaccuagcaccaucc

SEQ ID NO: 387065 - RNA, 22 nt, Human
acaggagugaaucuggcacuua

SEQ ID NO: 387066 - RNA, 22 nt, Human
gggcagcugccagaggccaugg

SEQ ID NO: 387067 - RNA, 20 nt, Human
ggcagccaaucagcgugccg

SEQ ID NO: 387068 - RNA, 22 nt, Human
uaauacagaaguguauuaaaau

SEQ ID NO: 387069 - RNA, 22 nt, Human
cauuucaauacaguuuguaaau

SEQ ID NO: 387070 - RNA, 22 nt, Human
uuuauccaccuuacccuguucc

SEQ ID NO: 387071 - RNA, 22 nt, Human
gcucugcugucuucuugcaggc

SEQ ID NO: 387072 - RNA, 22 nt, Human
ccauaauauuaaaugcuuuugu

SEQ ID NO: 387073 - RNA, 22 nt, Human
uuuaugagcaaugcugagggga

SEQ ID NO: 387074 - RNA, 22 nt, Human
aaggcacuuuuccugagaugau

SEQ ID NO: 387075 - RNA, 22 nt, Human
cucuugaagcaggggccaguuc

SEQ ID NO: 387076 - RNA, 22 nt, Human
ugucaguguauacauacaguau

SEQ ID NO: 387077 - RNA, 22 nt, Human
uaauuccaaguugagacaugca

SEQ ID NO: 387078 - RNA, 22 nt, Human
ccacaucucgguccccucuuug

SEQ ID NO: 387079 - RNA, 21 nt, Human
gccaaggggguagcuauuccu

SEQ ID NO: 387080 - RNA, 22 nt, Human
uuguuauaaagacuaaauaugu

SEQ ID NO: 387081 - RNA, 22 nt, Human
aaaugcaugagaaaguauucug

SEQ ID NO: 387082 - RNA, 18 nt, Human
aaagaaggauuggagagc

SEQ ID NO: 387083 - RNA, 22 nt, Human
gcugcugugaauuuuuuaaaug

SEQ ID NO: 387084 - RNA, 22 nt, Human
aagacaagcaucaaaucaggca

SEQ ID NO: 387085 - RNA, 22 nt, Human
agaaugcauuuuguguagcuau

SEQ ID NO: 387086 - RNA, 20 nt, Human
aacauugcuucaauguaacc

SEQ ID NO: 387087 - RNA, 22 nt, Human
uacauguuugguaaaugauggc

SEQ ID NO: 387088 - RNA, 22 nt, Human
cagcuuuccagagaccugcccc

SEQ ID NO: 387089 - RNA, 22 nt, Human
gccaggcagcaggaagccagug

SEQ ID NO: 387090 - RNA, 22 nt, Human
uuuuucaagacaaccugcaugu

SEQ ID NO: 387091 - RNA, 20 nt, Human
cacugaagacuucuugcuca

SEQ ID NO: 387092 - RNA, 22 nt, Human
uggcaggagacacauggcauag

SEQ ID NO: 387093 - RNA, 22 nt, Human
gcacugcagguggguggagagg

SEQ ID NO: 387094 - RNA, 22 nt, Human
uuuccaaaggaguaccacgcau

SEQ ID NO: 387095 - RNA, 22 nt, Human
caguccuuucugaaauccuaua

SEQ ID NO: 387096 - RNA, 22 nt, Human
cuuuuaaugggagcaguauuug

SEQ ID NO: 387097 - RNA, 22 nt, Human
uucaggauaguggugaguggca

SEQ ID NO: 387098 - RNA, 22 nt, Human
uaauuuuaugacaguguauuuu

SEQ ID NO: 387099 - RNA, 22 nt, Human
cucagaguccccaguggguuug

SEQ ID NO: 387100 - RNA, 21 nt, Human
ccaggcuccugaggcugguca

SEQ ID NO: 387101 - RNA, 22 nt, Human
ccugucagaugaaguaauugug

SEQ ID NO: 387102 - RNA, 23 nt, Human
agucagagagugugagacaacug

SEQ ID NO: 387103 - RNA, 22 nt, Human
acagugaaugcccaagaaaagu

SEQ ID NO: 387104 - RNA, 22 nt, Human
cuucuucauaggcaguccuguu

SEQ ID NO: 387105 - RNA, 18 nt, Human
cccucuccugcuaguggg

SEQ ID NO: 387106 - RNA, 22 nt, Human
ugcagggccuugggucuuucuu

SEQ ID NO: 387107 - RNA, 22 nt, Human
ucuggagccuuggaugggaaag

SEQ ID NO: 387108 - RNA, 22 nt, Human
aggccagcucacccuggcuccu

SEQ ID NO: 387109 - RNA, 22 nt, Human
ucagaauuuugguuugguuggu

SEQ ID NO: 387110 - RNA, 22 nt, Human
caaugauggcuaggcagcugcu

SEQ ID NO: 387111 - RNA, 22 nt, Human
cauaaguuggguaauauaauga

SEQ ID NO: 387112 - RNA, 22 nt, Human
uauucaaaguaccuucauugcc

SEQ ID NO: 387113 - RNA, 22 nt, Human
uuugcacuagcauuuguccaug

SEQ ID NO: 387114 - RNA, 22 nt, Human
auggagggugguaagacagaga

SEQ ID NO: 387115 - RNA, 22 nt, Human
cuggcugguuacuauuucuggu

SEQ ID NO: 387116 - RNA, 22 nt, Human
ugacuccaaacagaaaacgaau

SEQ ID NO: 387117 - RNA, 22 nt, Human
gccaggccugcaagugcuggug

SEQ ID NO: 387118 - RNA, 22 nt, Human
agccaggccagacucacacccu

SEQ ID NO: 387119 - RNA, 22 nt, Human
ucucagucuuugcaaggaugcu

SEQ ID NO: 387120 - RNA, 22 nt, Human
auauguguauuugguuagccua

SEQ ID NO: 387121 - RNA, 22 nt, Human
guuuacaaauauuuuaaauggu

SEQ ID NO: 387122 - RNA, 22 nt, Human
cagugggaagggcagaggcuuu

SEQ ID NO: 387123 - RNA, 22 nt, Human
aagugacaccucuucccuuucc

SEQ ID NO: 387124 - RNA, 22 nt, Human
gaagagcugcaguuuccugggc

SEQ ID NO: 387125 - RNA, 22 nt, Human
gcagcuuuuuggaugucaguua

SEQ ID NO: 387126 - RNA, 21 nt, Human
gcaaguacuaucaucauuauc

SEQ ID NO: 387127 - RNA, 22 nt, Human
agggaggagaauggacuccuuc

SEQ ID NO: 387128 - RNA, 22 nt, Human
ugucaccacauuugucaauauc

SEQ ID NO: 387129 - RNA, 22 nt, Human
ucacaugcuacugagccagacc

SEQ ID NO: 387130 - RNA, 22 nt, Human
auaacagaugugaagugcuaau

SEQ ID NO: 387131 - RNA, 21 nt, Human
aaauggauagggcaauggaag

SEQ ID NO: 387132 - RNA, 22 nt, Human
aaaggccacacugcucuuucuc

SEQ ID NO: 387133 - RNA, 22 nt, Human
uggcuggacagugggcagugga

SEQ ID NO: 387134 - RNA, 22 nt, Human
gggcugacaccacccaggcgca

SEQ ID NO: 387135 - RNA, 22 nt, Human
uugauguacagaauuguucaca

SEQ ID NO: 387136 - RNA, 23 nt, Human
cagggcugguagggaagagcgug

SEQ ID NO: 387137 - RNA, 22 nt, Human
ccaggcauccauugcuuccucu

SEQ ID NO: 387138 - RNA, 22 nt, Human
uauggaaauaauuagacaagug

SEQ ID NO: 387139 - RNA, 22 nt, Human
gcccagcacagcuggaagaguc

SEQ ID NO: 387140 - RNA, 22 nt, Human
gucaggaugagggaugaggagu

SEQ ID NO: 387141 - RNA, 22 nt, Human
gucuccugagccuugacugcaa

SEQ ID NO: 387142 - RNA, 21 nt, Human
ucagaguggaagacaguuuga

SEQ ID NO: 387143 - RNA, 22 nt, Human
ggauggcaggacaaggacccag

SEQ ID NO: 387144 - RNA, 22 nt, Human
ucuucucuccugcuuggcagaa

SEQ ID NO: 387145 - RNA, 18 nt, Human
agcuucccucugagaggg

SEQ ID NO: 387146 - RNA, 22 nt, Human
gagaggucaucucccaucagca

SEQ ID NO: 387147 - RNA, 22 nt, Human
ucaugcaaggcugaaacauggu

SEQ ID NO: 387148 - RNA, 22 nt, Human
aggcugaggcagguggaucacc

SEQ ID NO: 387149 - RNA, 22 nt, Human
uccuuucaccaaaaaguguugu

SEQ ID NO: 387150 - RNA, 22 nt, Human
gcuggauccugauucgucuuug

SEQ ID NO: 387151 - RNA, 20 nt, Human
uauuccaaggguagagaaaa

SEQ ID NO: 387152 - RNA, 22 nt, Human
uucucuuuugugaugugagaug

SEQ ID NO: 387153 - RNA, 22 nt, Human
acuguucaucucuuagaaagua

SEQ ID NO: 387154 - RNA, 22 nt, Human
aaggcugugucagaagcucccu

SEQ ID NO: 387155 - RNA, 22 nt, Human
cugcugcaggaugggcacucug

SEQ ID NO: 387156 - RNA, 22 nt, Human
uuuaggcagaagcccugcugau

SEQ ID NO: 387157 - RNA, 22 nt, Human
cauuaugugggaaaauguucuu

SEQ ID NO: 387158 - RNA, 22 nt, Human
guggagacuucuacuagagacc

SEQ ID NO: 387159 - RNA, 22 nt, Human
uguaugcagcaaaacaauuagu

SEQ ID NO: 387160 - RNA, 22 nt, Human
ggcucuggagcacagacgucug

SEQ ID NO: 387161 - RNA, 22 nt, Human
agauuguagaaacuguagcauu

SEQ ID NO: 387162 - RNA, 22 nt, Human
ugggcagagaucuggaucaaac

SEQ ID NO: 387163 - RNA, 23 nt, Human
acagggcauugcuggccucgagg

SEQ ID NO: 387164 - RNA, 22 nt, Human
aggcucagggacggggccccuu

SEQ ID NO: 387165 - RNA, 22 nt, Human
gugcaugucggggugcauguca

SEQ ID NO: 387166 - RNA, 22 nt, Human
cucuacucuuaacacagcuagg

SEQ ID NO: 387167 - RNA, 22 nt, Human
uacauuccauguguguguauuc

SEQ ID NO: 387168 - RNA, 22 nt, Human
cagagcagaagcgguccucaca

SEQ ID NO: 387169 - RNA, 22 nt, Human
gccugucugcagggcugucauu

SEQ ID NO: 387170 - RNA, 23 nt, Human
ggagugcaauggcgccaucucgg

SEQ ID NO: 387171 - RNA, 22 nt, Human
ucaguuaagaggccacggcagu

SEQ ID NO: 387172 - RNA, 22 nt, Human
ucucagagaugucaagagucua

SEQ ID NO: 387173 - RNA, 22 nt, Human
ucagcuuugaucucaggcaauc

SEQ ID NO: 387174 - RNA, 22 nt, Human
gcaggccuuggcaaugagccug

SEQ ID NO: 387175 - RNA, 20 nt, Human
cuguggcucaugcaucugcc

SEQ ID NO: 387176 - RNA, 22 nt, Human
ccuuuauucaauuaguccuaau

SEQ ID NO: 387177 - RNA, 22 nt, Human
aauggcugccagggcaggaggu

SEQ ID NO: 387178 - RNA, 22 nt, Human
agggcugacaguggcguggcgu

SEQ ID NO: 387179 - RNA, 22 nt, Human
uaucagaaggcacauggagucu

SEQ ID NO: 387180 - RNA, 22 nt, Human
gagggguguggagccaucaguu

SEQ ID NO: 387181 - RNA, 22 nt, Human
auuucucaguuccuacuguuua

SEQ ID NO: 387182 - RNA, 22 nt, Human
cuuucucuguguuucacaugcu

SEQ ID NO: 387183 - RNA, 22 nt, Human
agagcccucucauuggcuuauu

SEQ ID NO: 387184 - RNA, 22 nt, Human
cagcaaaagccagcauaagcuc

SEQ ID NO: 387185 - RNA, 22 nt, Human
cagcuuuguggccuugaccucg

SEQ ID NO: 387186 - RNA, 22 nt, Human
cagagccauccaggugccuguu

SEQ ID NO: 387187 - RNA, 21 nt, Human
ggcaggauggcaguggacccc

SEQ ID NO: 387188 - RNA, 22 nt, Human
gaggaggcacuaguuagugaca

SEQ ID NO: 387189 - RNA, 22 nt, Human
ugggccuguugccugaguccau

SEQ ID NO: 387190 - RNA, 22 nt, Human
ggggaaggauugaguugaccca

SEQ ID NO: 387191 - RNA, 22 nt, Human
aaggcuuucagcuaacuugauu

SEQ ID NO: 387192 - RNA, 22 nt, Human
agccuucaaccuagcuagagca

SEQ ID NO: 387193 - RNA, 18 nt, Human
accugccuguucuucucu

SEQ ID NO: 387194 - RNA, 22 nt, Human
acagaauugauggaaaucucag

SEQ ID NO: 387195 - RNA, 22 nt, Human
gggcugacgaaggccaugugug

SEQ ID NO: 387196 - RNA, 22 nt, Human
ggaggcaggaaagacagguuca

SEQ ID NO: 387197 - RNA, 22 nt, Human
ggagcuggucagccuugagcau

SEQ ID NO: 387198 - RNA, 21 nt, Human
gggugggaggacacagcaggc

SEQ ID NO: 387199 - RNA, 22 nt, Human
ggcaucuccaaaacaugaacuc

SEQ ID NO: 387200 - RNA, 22 nt, Human
agcgagggaggucugaggacag

SEQ ID NO: 387201 - RNA, 22 nt, Human
ucuguccuguuuccuccugaca

SEQ ID NO: 387202 - RNA, 22 nt, Human
acugcuuuagaccuagagcucu

SEQ ID NO: 387203 - RNA, 22 nt, Human
augcuguguuuuaaauggaaau

SEQ ID NO: 387204 - RNA, 23 nt, Human
ugcugggcagagcuggugcugag

SEQ ID NO: 387205 - RNA, 22 nt, Human
uuuuuccuuagggguuacucac

SEQ ID NO: 387206 - RNA, 21 nt, Human
cagaggcaggcucugugugug

SEQ ID NO: 387207 - RNA, 22 nt, Human
acauuucugcuagaauagguga

SEQ ID NO: 387208 - RNA, 22 nt, Human
uguccuuauauuguggaagggg

SEQ ID NO: 387209 - RNA, 22 nt, Human
agggugcauguuugcaagagug

SEQ ID NO: 387210 - RNA, 22 nt, Human
cgccugggaguccacaccugcu

SEQ ID NO: 387211 - RNA, 22 nt, Human
cauauaaauacaacauguguua

SEQ ID NO: 387212 - RNA, 22 nt, Human
uccaggcaaggauaauaaacau

SEQ ID NO: 387213 - RNA, 22 nt, Human
ugggcagaggacagggaagauc

SEQ ID NO: 387214 - RNA, 20 nt, Human
gacaggagaguuagguaggu

SEQ ID NO: 387215 - RNA, 22 nt, Human
agcugcccuguggggaggguug

SEQ ID NO: 387216 - RNA, 22 nt, Human
ucuggagauaagacagacagau

SEQ ID NO: 387217 - RNA, 22 nt, Human
ccugucugcaugaucccugcca

SEQ ID NO: 387218 - RNA, 22 nt, Human
ugagaagcaguuucaguaagaa

SEQ ID NO: 387219 - RNA, 22 nt, Human
cugaaaggguuacauaguaagu

SEQ ID NO: 387220 - RNA, 18 nt, Human
agggagagaccgcggguc

SEQ ID NO: 387221 - RNA, 22 nt, Human
uguccuuaucuccaaacaauca

SEQ ID NO: 387222 - RNA, 22 nt, Human
ggagauagacuuggugagccac

SEQ ID NO: 387223 - RNA, 22 nt, Human
acagaauucucucugcagaggc

SEQ ID NO: 387224 - RNA, 22 nt, Human
agcagcuguacuuucaucuguu

SEQ ID NO: 387225 - RNA, 22 nt, Human
gaggaaacauuguagaagcagu

SEQ ID NO: 387226 - RNA, 22 nt, Human
cagugcauagauccugaggccu

SEQ ID NO: 387227 - RNA, 22 nt, Human
ccaagggcucugacuugccugc

SEQ ID NO: 387228 - RNA, 22 nt, Human
aaauucaguuuuaauaaucacu

SEQ ID NO: 387229 - RNA, 22 nt, Human
ugagccugcugucgcuggaccc

SEQ ID NO: 387230 - RNA, 19 nt, Human
acacagggcuagaguuaca

SEQ ID NO: 387231 - RNA, 22 nt, Human
ugcaccauuuugucaggcuacu

SEQ ID NO: 387232 - RNA, 22 nt, Human
caucagaacgugagcuccuugu

SEQ ID NO: 387233 - RNA, 22 nt, Human
ucuucaaacugaaaauuuagaa

SEQ ID NO: 387234 - RNA, 22 nt, Human
gcucugaggcugggagcacucu

SEQ ID NO: 387235 - RNA, 22 nt, Human
uuacauuuugggguaaggauaa

SEQ ID NO: 387236 - RNA, 22 nt, Human
gggucucucucggcuccacgcg

SEQ ID NO: 387237 - RNA, 20 nt, Human
cccucugcacauggcugugg

SEQ ID NO: 387238 - RNA, 22 nt, Human
uaucuguugucuuuuacaugua

SEQ ID NO: 387239 - RNA, 22 nt, Human
acucacauuucaucaggccaag

SEQ ID NO: 387240 - RNA, 17 nt, Human
ucuggccuuccugaacu

SEQ ID NO: 387241 - RNA, 22 nt, Human
ccagcuuuagguugccugccag

SEQ ID NO: 387242 - RNA, 22 nt, Human
uaguggaggggaugcaaagcuu

SEQ ID NO: 387243 - RNA, 22 nt, Human
guccucugcuucaugcccugau

SEQ ID NO: 387244 - RNA, 22 nt, Human
agauacaaaagauaagauuuag

SEQ ID NO: 387245 - RNA, 22 nt, Human
gcuguccucugaucucuggagg

SEQ ID NO: 387246 - RNA, 22 nt, Human
guggcugcuguccucucugguu

SEQ ID NO: 387247 - RNA, 22 nt, Human
cauggcagagaaggggaacugg

SEQ ID NO: 387248 - RNA, 22 nt, Human
caggccuggggcuggcuuccag

SEQ ID NO: 387249 - RNA, 22 nt, Human
ucaggcugaggucaucugcauc

SEQ ID NO: 387250 - RNA, 22 nt, Human
aggcuagcuuuggcucaguaaa

SEQ ID NO: 387251 - RNA, 22 nt, Human
ugcacagagagaugagacacgu

SEQ ID NO: 387252 - RNA, 22 nt, Human
ucucagagaacaguuggugcuu

SEQ ID NO: 387253 - RNA, 22 nt, Human
ucugcaggcuuauaggaugggu

SEQ ID NO: 387254 - RNA, 22 nt, Human
caguggcaugguugacugcagu

SEQ ID NO: 387255 - RNA, 22 nt, Human
uuuuugcaccaaccuaauagaa

SEQ ID NO: 387256 - RNA, 17 nt, Human
aggcaggagauuggaga

SEQ ID NO: 387257 - RNA, 22 nt, Human
uucagagcaucucuaaagccag

SEQ ID NO: 387258 - RNA, 22 nt, Human
auaaagcauacuuuguaugacu

SEQ ID NO: 387259 - RNA, 22 nt, Human
ucauccaguucacauggugagu

SEQ ID NO: 387260 - RNA, 22 nt, Human
uccaguggguugcugagggagg

SEQ ID NO: 387261 - RNA, 22 nt, Human
ggugcagcugcagccugggagc

SEQ ID NO: 387262 - RNA, 22 nt, Human
aggcucaggaggagcugccgga

SEQ ID NO: 387263 - RNA, 22 nt, Human
guguacauauugagucugcuga

SEQ ID NO: 387264 - RNA, 22 nt, Human
uaggcagauguuaacaggaaaa

SEQ ID NO: 387265 - RNA, 22 nt, Human
guggggggacguuggucacuuu

SEQ ID NO: 387266 - RNA, 22 nt, Human
agcacaggaccaaggaagcugu

SEQ ID NO: 387267 - RNA, 22 nt, Human
ugcaggaaaaccaacacgccuu

SEQ ID NO: 387268 - RNA, 22 nt, Human
ugcuuaaaaugaugauuauuuu

SEQ ID NO: 387269 - RNA, 19 nt, Human
gguguccuagagauaagag

SEQ ID NO: 387270 - RNA, 22 nt, Human
ggcauccaaauaccaagaugua

SEQ ID NO: 387271 - RNA, 22 nt, Human
ccugauggagcccugcugcaug

SEQ ID NO: 387272 - RNA, 22 nt, Human
auacauacauguaugcacauac

SEQ ID NO: 387273 - RNA, 22 nt, Human
cagucccaucucccagguggcu

SEQ ID NO: 387274 - RNA, 22 nt, Human
uuaggaaaaucaugagagauga

SEQ ID NO: 387275 - RNA, 22 nt, Human
cuucuuaaugcauaaacugugu

SEQ ID NO: 387276 - RNA, 22 nt, Human
ugaaggagcugauguaaggggu

SEQ ID NO: 387277 - RNA, 22 nt, Human
auguuuccauuuucuuguauca

SEQ ID NO: 387278 - RNA, 22 nt, Human
acaguaauuaaaauggaucugc

SEQ ID NO: 387279 - RNA, 22 nt, Human
ccagcccuucccaacuggccag

SEQ ID NO: 387280 - RNA, 20 nt, Human
ugggccuguggcagaagucu

SEQ ID NO: 387281 - RNA, 22 nt, Human
acaaugcaccagcaucuucacc

SEQ ID NO: 387282 - RNA, 22 nt, Human
uugaacugguaguuggaaaucu

SEQ ID NO: 387283 - RNA, 17 nt, Human
cugcuuugugcaacgcu

SEQ ID NO: 387284 - RNA, 22 nt, Human
cccaggcuggagugcaauggca

SEQ ID NO: 387285 - RNA, 22 nt, Human
auccugggcagugugucacucu

SEQ ID NO: 387286 - RNA, 22 nt, Human
uuuaccaagcuuuaauuacaua

SEQ ID NO: 387287 - RNA, 17 nt, Human
gcaguggagggguaguu

SEQ ID NO: 387288 - RNA, 22 nt, Human
ggcccagcacagugcuuggggg

SEQ ID NO: 387289 - RNA, 22 nt, Human
gccaaaucuugcacacucuugu

SEQ ID NO: 387290 - RNA, 22 nt, Human
uuugaaagcuacuuucggguca

SEQ ID NO: 387291 - RNA, 22 nt, Human
uuaauuacuaagcacaaugcaa

SEQ ID NO: 387292 - RNA, 22 nt, Human
ggcuucccuuuccgagaggaga

SEQ ID NO: 387293 - RNA, 19 nt, Human
ucugaggguccagaugcau

SEQ ID NO: 387294 - RNA, 22 nt, Human
uaaguggaagguuauaugcuaa

SEQ ID NO: 387295 - RNA, 22 nt, Human
cagaggacaauagaauggaaag

SEQ ID NO: 387296 - RNA, 22 nt, Human
cccagcacaggcaauuccauac

SEQ ID NO: 387297 - RNA, 22 nt, Human
agccuggaccaggggccucaga

SEQ ID NO: 387298 - RNA, 22 nt, Human
uaucuacaggugucagguaaga

SEQ ID NO: 387299 - RNA, 22 nt, Human
caggggcaagaaugcugucagc

SEQ ID NO: 387300 - RNA, 23 nt, Human
cacaccaggagccgucugggcca

SEQ ID NO: 387301 - RNA, 22 nt, Human
gugcaggguagcgacggcagga

SEQ ID NO: 387302 - RNA, 22 nt, Human
aagcugccugggaggaagggcu

SEQ ID NO: 387303 - RNA, 22 nt, Human
aucuagaaguggcaugaauuac

SEQ ID NO: 387304 - RNA, 22 nt, Human
accagagcuuacaugcuagaaa

SEQ ID NO: 387305 - RNA, 22 nt, Human
agcaggaaggggaugaugggca

SEQ ID NO: 387306 - RNA, 22 nt, Human
ccaggagcagauauggacauaa

SEQ ID NO: 387307 - RNA, 22 nt, Human
uguaugcuuguguauaauauaa

SEQ ID NO: 387308 - RNA, 22 nt, Human
agggccugcucuaucacucuca

SEQ ID NO: 387309 - RNA, 22 nt, Human
ggcagggaggaggugaaaguga

SEQ ID NO: 387310 - RNA, 22 nt, Human
augcaucauggaaaacucaguu

SEQ ID NO: 387311 - RNA, 22 nt, Human
aaaguguugauaugugacaucc

SEQ ID NO: 387312 - RNA, 17 nt, Human
aggugcuggagcaucag

SEQ ID NO: 387313 - RNA, 22 nt, Human
caguacuucuuggaaacuggau

SEQ ID NO: 387314 - RNA, 22 nt, Human
gaagagcuguagccugcucuuu

SEQ ID NO: 387315 - RNA, 22 nt, Human
uuaaauauuauguugucugcaa

SEQ ID NO: 387316 - RNA, 22 nt, Human
gugggcuggacccuccugcucc

SEQ ID NO: 387317 - RNA, 22 nt, Human
gcagggaccucacuacccccag

SEQ ID NO: 387318 - RNA, 22 nt, Human
cacaccagagguuaccugcaaa

SEQ ID NO: 387319 - RNA, 21 nt, Human
agacagaacaacugcucucca

SEQ ID NO: 387320 - RNA, 20 nt, Human
auguagaugaaagcaaaggc

SEQ ID NO: 387321 - RNA, 18 nt, Human
ucuuggaguaaugaucaa

SEQ ID NO: 387322 - RNA, 22 nt, Human
ucugggagagcugcugucagag

SEQ ID NO: 387323 - RNA, 22 nt, Human
ucugucuccugccagugccucu

SEQ ID NO: 387324 - RNA, 22 nt, Human
ugcucuucggggccacugcuug

SEQ ID NO: 387325 - RNA, 22 nt, Human
cagaggccauauuucuucacuc

SEQ ID NO: 387326 - RNA, 22 nt, Human
uuugcaaagaaauuauugcugu

SEQ ID NO: 387327 - RNA, 22 nt, Human
cccaggaguaagugacauuguu

SEQ ID NO: 387328 - RNA, 22 nt, Human
gagcugcccugagcuuugcaug

SEQ ID NO: 387329 - RNA, 22 nt, Human
caagaaauuucuuaagaacuaa

SEQ ID NO: 387330 - RNA, 22 nt, Human
guguaaggugaaaucaacaaau

SEQ ID NO: 387331 - RNA, 22 nt, Human
gaggaaccacucugagaagcca

SEQ ID NO: 387332 - RNA, 22 nt, Human
gaacagcccuguuaagucuguu

SEQ ID NO: 387333 - RNA, 22 nt, Human
uggcagaggcucugugauguug

SEQ ID NO: 387334 - RNA, 22 nt, Human
auaguguuacccuucuuaaagu

SEQ ID NO: 387335 - RNA, 22 nt, Human
gccaggcaauguguuagaagcg

SEQ ID NO: 387336 - RNA, 21 nt, Human
caugaagccgguucccuguuu

SEQ ID NO: 387337 - RNA, 22 nt, Human
uugaauaggacucagcagugau

SEQ ID NO: 387338 - RNA, 22 nt, Human
ucaggaugagcucauaacuaug

SEQ ID NO: 387339 - RNA, 22 nt, Human
caggccagggagaauaugaagc

SEQ ID NO: 387340 - RNA, 19 nt, Human
ggucucagugcagcugcag

SEQ ID NO: 387341 - RNA, 22 nt, Human
cugaaagguauaaauaagacuu

SEQ ID NO: 387342 - RNA, 22 nt, Human
agcuggcauacuuugcuaggaa

SEQ ID NO: 387343 - RNA, 22 nt, Human
ucucuucucuagugagcaacug

SEQ ID NO: 387344 - RNA, 22 nt, Human
cccaagcagggugcagaggcau

SEQ ID NO: 387345 - RNA, 22 nt, Human
uguuuucuauuaccugagauug

SEQ ID NO: 387346 - RNA, 22 nt, Human
cucaguuucugacauuaaaauc

SEQ ID NO: 387347 - RNA, 22 nt, Human
gcaaggcugcugccacccaucu

SEQ ID NO: 387348 - RNA, 22 nt, Human
aggcagguccccuggaaggcac

SEQ ID NO: 387349 - RNA, 22 nt, Human
cagcuacuccucccaugacuuc

SEQ ID NO: 387350 - RNA, 22 nt, Human
cagggccagagagggcuggcug

SEQ ID NO: 387351 - RNA, 22 nt, Human
cuggggcugcgguggaggagcc

SEQ ID NO: 387352 - RNA, 22 nt, Human
caugcacaacauacucaagagg

SEQ ID NO: 387353 - RNA, 22 nt, Human
auugaaaauauaauucuaggag

SEQ ID NO: 387354 - RNA, 22 nt, Human
augguuuuagaaucaggaaaaa

SEQ ID NO: 387355 - RNA, 22 nt, Human
ugaaaugauguacaagaaggca

SEQ ID NO: 387356 - RNA, 22 nt, Human
cugccucuggccucaggcccag

SEQ ID NO: 387357 - RNA, 22 nt, Human
ugggcuggcugaggcauucacu

SEQ ID NO: 387358 - RNA, 22 nt, Human
agaggcuccuucacucuggcac

SEQ ID NO: 387359 - RNA, 22 nt, Human
guccuggcccacuggcaggcug

SEQ ID NO: 387360 - RNA, 22 nt, Human
caauuucaagauucuguucuuu

SEQ ID NO: 387361 - RNA, 22 nt, Human
uugguccacugugaaauuggga

SEQ ID NO: 387362 - RNA, 22 nt, Human
ccuggagcgcgggucaagcugg

SEQ ID NO: 387363 - RNA, 22 nt, Human
cauguacacucauguaacuaua

SEQ ID NO: 387364 - RNA, 22 nt, Human
caaggaaacaugaaaugcauug

SEQ ID NO: 387365 - RNA, 22 nt, Human
uaaugaauaaacuugagaguca

SEQ ID NO: 387366 - RNA, 22 nt, Human
uuuuccaaaguaccaugucccu

SEQ ID NO: 387367 - RNA, 22 nt, Human
ugauuuccugugcgcccuuagg

SEQ ID NO: 387368 - RNA, 22 nt, Human
ugaaggugaaugucuaugggga

SEQ ID NO: 387369 - RNA, 22 nt, Human
uuauucagucugucuagggagu

SEQ ID NO: 387370 - RNA, 22 nt, Human
aaaucacuaaguuauagugugg

SEQ ID NO: 387371 - RNA, 22 nt, Human
caggcacucauucagagaggug

SEQ ID NO: 387372 - RNA, 22 nt, Human
caaaguccauaguuuacaauag

SEQ ID NO: 387373 - RNA, 22 nt, Human
cuugcuucauuagugucuuagu

SEQ ID NO: 387374 - RNA, 22 nt, Human
uugcugugucauuuguuuaauc

SEQ ID NO: 387375 - RNA, 22 nt, Human
agaauaguggcaaugacugcac

SEQ ID NO: 387376 - RNA, 22 nt, Human
agguggcuccucccauggcugg

SEQ ID NO: 387377 - RNA, 22 nt, Human
cagcaguggaacuacccaggga

SEQ ID NO: 387378 - RNA, 22 nt, Human
uuuagggaagaagcccauggcc

SEQ ID NO: 387379 - RNA, 22 nt, Human
caggccucaggggcucaggcug

SEQ ID NO: 387380 - RNA, 22 nt, Human
auaugcauaugucaaaacuuau

SEQ ID NO: 387381 - RNA, 22 nt, Human
uggcugagggggcucugcucag

SEQ ID NO: 387382 - RNA, 22 nt, Human
aggaugaggcuggcaggucuug

SEQ ID NO: 387383 - RNA, 22 nt, Human
gccauuuucugucuuguuuauu

SEQ ID NO: 387384 - RNA, 22 nt, Human
ggggcccagcaccccuccucgc

SEQ ID NO: 387385 - RNA, 23 nt, Human
aguacaauaaguauaauucuuuc

SEQ ID NO: 387386 - RNA, 22 nt, Human
cacaaauggccguguucaaaga

SEQ ID NO: 387387 - RNA, 22 nt, Human
cauggcuuguaauaaauuuaua

SEQ ID NO: 387388 - RNA, 22 nt, Human
gcagccagguuugaggaccacu

SEQ ID NO: 387389 - RNA, 22 nt, Human
ucuucauuuuauagcaucugug

SEQ ID NO: 387390 - RNA, 22 nt, Human
ugcuuagacgucaaguacagcc

SEQ ID NO: 387391 - RNA, 22 nt, Human
gcucccugccuacacggaccuu

SEQ ID NO: 387392 - RNA, 22 nt, Human
ugaacaguuucaagaaaacuuu

SEQ ID NO: 387393 - RNA, 22 nt, Human
cuguuuauacgacagguggagg

SEQ ID NO: 387394 - RNA, 22 nt, Human
uagauuuuacuucugucauuac

SEQ ID NO: 387395 - RNA, 17 nt, Human
ucagcaaagacaaagga

SEQ ID NO: 387396 - RNA, 22 nt, Human
gcacagaacuucucuuaguagg

SEQ ID NO: 387397 - RNA, 22 nt, Human
agauguuccagccaaugggaau

SEQ ID NO: 387398 - RNA, 22 nt, Human
ugaaaucuccucuuuauauauc

SEQ ID NO: 387399 - RNA, 22 nt, Human
ugggcugccagcucuccagaug

SEQ ID NO: 387400 - RNA, 22 nt, Human
caagaauuguacaaacugggug

SEQ ID NO: 387401 - RNA, 22 nt, Human
cuggccuggcagggagggcaug

SEQ ID NO: 387402 - RNA, 22 nt, Human
ugccagggcugcuacuggcuga

SEQ ID NO: 387403 - RNA, 22 nt, Human
ggguggaggagaacaggcccca

SEQ ID NO: 387404 - RNA, 22 nt, Human
gaaugcuaagcaugugggaguu

SEQ ID NO: 387405 - RNA, 22 nt, Human
ggcugcagcagagggacucacg

SEQ ID NO: 387406 - RNA, 22 nt, Human
uugauuucuuacucuuccaagg

SEQ ID NO: 387407 - RNA, 22 nt, Human
uaugaagacaaugauagcauga

SEQ ID NO: 387408 - RNA, 22 nt, Human
cccuggaggucagaggccuggg

SEQ ID NO: 387409 - RNA, 22 nt, Human
cagccagagaaagggcacugcc

SEQ ID NO: 387410 - RNA, 22 nt, Human
agugcugucccgacaacugagg

SEQ ID NO: 387411 - RNA, 22 nt, Human
gcagcuggucuggccuagagua

SEQ ID NO: 387412 - RNA, 22 nt, Human
ccucaggggucacugugaggag

SEQ ID NO: 387413 - RNA, 22 nt, Human
gcccuuccuuagacagcaggau

SEQ ID NO: 387414 - RNA, 22 nt, Human
agagcagcugugacauggacag

SEQ ID NO: 387415 - RNA, 22 nt, Human
ugcaggaaaacaccuaucaccc

SEQ ID NO: 387416 - RNA, 22 nt, Human
augauucagcaauuuuauaucu

SEQ ID NO: 387417 - RNA, 22 nt, Human
caggguggcacucagcgcaucu

SEQ ID NO: 387418 - RNA, 22 nt, Human
acuguugucaggcugcuuugga

SEQ ID NO: 387419 - RNA, 22 nt, Human
uaaguuuuaagcaaucugauaa

SEQ ID NO: 387420 - RNA, 19 nt, Human
ggcagucucaagcagcaca

SEQ ID NO: 387421 - RNA, 22 nt, Human
gaaacccaaacuaagacaguag

SEQ ID NO: 387422 - RNA, 22 nt, Human
gcuggcugcgucaucacagggc

SEQ ID NO: 387423 - RNA, 23 nt, Human
acauacauggagauaaagugaug

SEQ ID NO: 387424 - RNA, 22 nt, Human
gagagugucgggggccccagga

SEQ ID NO: 387425 - RNA, 22 nt, Human
cuggggcuucaaugcuucggug

SEQ ID NO: 387426 - RNA, 22 nt, Human
ggcucaguguuuguggaacaua

SEQ ID NO: 387427 - RNA, 22 nt, Human
cugugugcugaaaugcagugag

SEQ ID NO: 387428 - RNA, 22 nt, Human
caguggcgugaucucugcucac

SEQ ID NO: 387429 - RNA, 22 nt, Human
gaaguggaagccaucggcaguc

SEQ ID NO: 387430 - RNA, 22 nt, Human
cagcccuggccccagguggucu

SEQ ID NO: 387431 - RNA, 22 nt, Human
cugaggucucuuuccauaguga

SEQ ID NO: 387432 - RNA, 22 nt, Human
cuuuccaaugcauuuccaaugu

SEQ ID NO: 387433 - RNA, 22 nt, Human
ugaauaaacuaugaggaggaau

SEQ ID NO: 387434 - RNA, 21 nt, Human
uuuaguucaaguacagaacca

SEQ ID NO: 387435 - RNA, 22 nt, Human
gacagcugugcaggagaagggg

SEQ ID NO: 387436 - RNA, 22 nt, Human
cccagcuugcgggcggcaggag

SEQ ID NO: 387437 - RNA, 22 nt, Human
uuaguaaauaaagucuacuuuc

SEQ ID NO: 387438 - RNA, 22 nt, Human
cagaaggcuggcagauugagau

SEQ ID NO: 387439 - RNA, 22 nt, Human
uagggcucagcucuagcuccug

SEQ ID NO: 387440 - RNA, 22 nt, Human
ucagcuuuuaaaaacaagaagu

SEQ ID NO: 387441 - RNA, 22 nt, Human
aaagccuugcccgucacuggga

SEQ ID NO: 387442 - RNA, 22 nt, Human
ggaggacacuggcucugccuuc

SEQ ID NO: 387443 - RNA, 19 nt, Human
ucccuggcgccucucgggc

SEQ ID NO: 387444 - RNA, 22 nt, Human
gaggcuggcagaaaagcacagg

SEQ ID NO: 387445 - RNA, 22 nt, Human
ggccagcucugcacagcagcug

SEQ ID NO: 387446 - RNA, 22 nt, Human
ucaaaugcuucuacuccuaaga

SEQ ID NO: 387447 - RNA, 22 nt, Human
gcagguggcagaggugggaucu

SEQ ID NO: 387448 - RNA, 22 nt, Human
aguggcagaucucuggucugga

SEQ ID NO: 387449 - RNA, 22 nt, Human
ucauucuccucuggaaaaggca

SEQ ID NO: 387450 - RNA, 22 nt, Human
aggcaagcccccagugaggcuc

SEQ ID NO: 387451 - RNA, 22 nt, Human
cuuuggcaaggguuuuaauugu

SEQ ID NO: 387452 - RNA, 22 nt, Human
ugggcucugaagucagucugcu

SEQ ID NO: 387453 - RNA, 22 nt, Human
caggagaagguuuggagugcag

SEQ ID NO: 387454 - RNA, 22 nt, Human
uccugccugcaaucccagcacu

SEQ ID NO: 387455 - RNA, 22 nt, Human
aaugaacagauacacauaggca

SEQ ID NO: 387456 - RNA, 22 nt, Human
gcuuaauucuggcucaguuucc

SEQ ID NO: 387457 - RNA, 22 nt, Human
aaggcacugagccagccgucuc

SEQ ID NO: 387458 - RNA, 22 nt, Human
ggauucagugucuguuaauagu

SEQ ID NO: 387459 - RNA, 21 nt, Human
acaggcuuuagaaaaugacuc

SEQ ID NO: 387460 - RNA, 22 nt, Human
caaggcaguuccccagagggcu

SEQ ID NO: 387461 - RNA, 22 nt, Human
accaggagguguuugcucaagu

SEQ ID NO: 387462 - RNA, 23 nt, Human
agccuucaggcaaugucaguaga

SEQ ID NO: 387463 - RNA, 16 nt, Human
uggcagagguucagcc

SEQ ID NO: 387464 - RNA, 22 nt, Human
ccagcuuuucuuaucauuauaa

SEQ ID NO: 387465 - RNA, 22 nt, Human
aguccuuagaacacuguaucug

SEQ ID NO: 387466 - RNA, 22 nt, Human
uccagucaggcugaauucaagg

SEQ ID NO: 387467 - RNA, 22 nt, Human
cggcagcuccgcgccguaggac

SEQ ID NO: 387468 - RNA, 22 nt, Human
aaguucaauggaaaagcuuuag

SEQ ID NO: 387469 - RNA, 22 nt, Human
gaaaugcaggcuuggauucagc

SEQ ID NO: 387470 - RNA, 22 nt, Human
uccugcagccacugcaggcaga

SEQ ID NO: 387471 - RNA, 22 nt, Human
aagguacagaaauuaacaagga

SEQ ID NO: 387472 - RNA, 22 nt, Human
agagcagcacguuguccccaca

SEQ ID NO: 387473 - RNA, 22 nt, Human
ucucugucccuaggagccuugc

SEQ ID NO: 387474 - RNA, 22 nt, Human
guuuuauaggcuguugcuauau

SEQ ID NO: 387475 - RNA, 22 nt, Human
cucaggcccacagcagacccac

SEQ ID NO: 387476 - RNA, 22 nt, Human
gcagcuggagcaucuucucauc

SEQ ID NO: 387477 - RNA, 22 nt, Human
ggaccagagcucgggcuucuca

SEQ ID NO: 387478 - RNA, 22 nt, Human
caagagcugugaccucauucac

SEQ ID NO: 387479 - RNA, 22 nt, Human
gcugcccacaaugauuacaugg

SEQ ID NO: 387480 - RNA, 22 nt, Human
uggccuuggacagagcgcuccu

SEQ ID NO: 387481 - RNA, 22 nt, Human
uggaaagaugaagauguuuaag

SEQ ID NO: 387482 - RNA, 22 nt, Human
guccaggucuggacccugagcc

SEQ ID NO: 387483 - RNA, 22 nt, Human
gacucagugauuugacaugccu

SEQ ID NO: 387484 - RNA, 22 nt, Human
gggagagagagcucauguugaa

SEQ ID NO: 387485 - RNA, 22 nt, Human
uggcucaggcuugaaaauagau

SEQ ID NO: 387486 - RNA, 23 nt, Human
ugcaggggaggcuuaaagcaggu

SEQ ID NO: 387487 - RNA, 22 nt, Human
agucauaugacccuucacaaac

SEQ ID NO: 387488 - RNA, 22 nt, Human
caggaagauuagaccaagagcu

SEQ ID NO: 387489 - RNA, 22 nt, Human
gcuccucuucucccacugaaug

SEQ ID NO: 387490 - RNA, 22 nt, Human
uccauugucuuugguccuagcc

SEQ ID NO: 387491 - RNA, 22 nt, Human
uuguuuucuccacugcaucuua

SEQ ID NO: 387492 - RNA, 22 nt, Human
ccagaggagggcucugaugagg

SEQ ID NO: 387493 - RNA, 22 nt, Human
gaagagcuauguccagggagca

SEQ ID NO: 387494 - RNA, 22 nt, Human
uagaauucauguuacuguuagc

SEQ ID NO: 387495 - RNA, 22 nt, Human
uggcugagaaugggaugaugcc

SEQ ID NO: 387496 - RNA, 18 nt, Human
ccuggcagccaugcgcgc

SEQ ID NO: 387497 - RNA, 22 nt, Human
ugggccuggagcccuggagagu

SEQ ID NO: 387498 - RNA, 22 nt, Human
ggucagguuuuuaggagugacc

SEQ ID NO: 387499 - RNA, 22 nt, Human
cuggcucagacagcugugcagu

SEQ ID NO: 387500 - RNA, 23 nt, Human
ucccaggaaucugcauuuuuaac

SEQ ID NO: 387501 - RNA, 22 nt, Human
ugugugacccccagugaagccu

SEQ ID NO: 387502 - RNA, 22 nt, Human
cagugaggaagcugucuggacc

SEQ ID NO: 387503 - RNA, 22 nt, Human
gacacagcacuguacaaggaau

SEQ ID NO: 387504 - RNA, 22 nt, Human
ugaagcccugugucagcuucca

SEQ ID NO: 387505 - RNA, 22 nt, Human
aggggccucgcaggaccgcucc

SEQ ID NO: 387506 - RNA, 22 nt, Human
aggccuggcaugagaccugaga

SEQ ID NO: 387507 - RNA, 22 nt, Human
uccagaauauuugggaaagaug

SEQ ID NO: 387508 - RNA, 22 nt, Human
guuuuucuaggaccaugugauu

SEQ ID NO: 387509 - RNA, 22 nt, Human
cuucagaagaaaagcagugugu

SEQ ID NO: 387510 - RNA, 21 nt, Human
agagaauugccuuagauguuc

SEQ ID NO: 387511 - RNA, 22 nt, Human
ugguggcaauguccuggagaag

SEQ ID NO: 387512 - RNA, 22 nt, Human
gccagcugguaggcaccuagcc

SEQ ID NO: 387513 - RNA, 22 nt, Human
aggcacaggccucagcacccag

SEQ ID NO: 387514 - RNA, 22 nt, Human
ugcagcuguaacagaggccuca

SEQ ID NO: 387515 - RNA, 22 nt, Human
cccagcccaucucaaaggucua

SEQ ID NO: 387516 - RNA, 22 nt, Human
auugucuguacuuuaaaaaugu

SEQ ID NO: 387517 - RNA, 22 nt, Human
cuuccugcauugugccagaguu

SEQ ID NO: 387518 - RNA, 22 nt, Human
cccugcaggggaccugcagccu

SEQ ID NO: 387519 - RNA, 22 nt, Human
aagcagagcaagcguauuuauu

SEQ ID NO: 387520 - RNA, 22 nt, Human
cagggcugaacugagcuuguga

SEQ ID NO: 387521 - RNA, 20 nt, Human
ucacaucuggcagcugauga

SEQ ID NO: 387522 - RNA, 22 nt, Human
auuauuagauucuuaauuguaa

SEQ ID NO: 387523 - RNA, 22 nt, Human
uccuggauaucaaacaaacauu

SEQ ID NO: 387524 - RNA, 22 nt, Human
auguucuuucagccagugcauc

SEQ ID NO: 387525 - RNA, 22 nt, Human
uccaaaguguugggauuauagg

SEQ ID NO: 387526 - RNA, 22 nt, Human
aucaggaucacugggagucuug

SEQ ID NO: 387527 - RNA, 22 nt, Human
cuuccaaacccaggguaugggc

SEQ ID NO: 387528 - RNA, 22 nt, Human
ucauuucccuccuacaaagagg

SEQ ID NO: 387529 - RNA, 22 nt, Human
aauaauuuccagccaacuggaa

SEQ ID NO: 387530 - RNA, 22 nt, Human
auggcauuugaaucugucuuuu

SEQ ID NO: 387531 - RNA, 22 nt, Human
uauuucuggcuuugagggugau

SEQ ID NO: 387532 - RNA, 22 nt, Human
agggaaaggcugaugcuguggg

SEQ ID NO: 387533 - RNA, 22 nt, Human
aaguuuuccuguguccaagaug

SEQ ID NO: 387534 - RNA, 22 nt, Human
gaagucugcugcucaggaguuu

SEQ ID NO: 387535 - RNA, 22 nt, Human
cucuucuuggcccccaugaggg

SEQ ID NO: 387536 - RNA, 22 nt, Human
gucaggauuuuaaaaucccagu

SEQ ID NO: 387537 - RNA, 22 nt, Human
ugguacuuggaggcagaaaaau

SEQ ID NO: 387538 - RNA, 22 nt, Human
uuuugaaagggugauuuggcuu

SEQ ID NO: 387539 - RNA, 22 nt, Human
auaguacacauccuacaauguu

SEQ ID NO: 387540 - RNA, 22 nt, Human
cacacauugaauucauucuugu

SEQ ID NO: 387541 - RNA, 22 nt, Human
gagcuuggugaugccuccuggu

SEQ ID NO: 387542 - RNA, 22 nt, Human
gccuuccuuuuaccaccagcca

SEQ ID NO: 387543 - RNA, 22 nt, Human
uuucaagcauaacugggaagag

SEQ ID NO: 387544 - RNA, 22 nt, Human
ggcuuuauaggguagaggauca

SEQ ID NO: 387545 - RNA, 22 nt, Human
aucagcaaucaaauugcagagu

SEQ ID NO: 387546 - RNA, 22 nt, Human
agggcagagggugccucaccug

SEQ ID NO: 387547 - RNA, 22 nt, Human
uggugugggcguggcaggcaag

SEQ ID NO: 387548 - RNA, 22 nt, Human
guuuucaauuauaagauggcuu

SEQ ID NO: 387549 - RNA, 22 nt, Human
auucaagagcccauguuuccug

SEQ ID NO: 387550 - RNA, 22 nt, Human
cugugaggcccugggugcugga

SEQ ID NO: 387551 - RNA, 22 nt, Human
caggagugaguuggggucuaca

SEQ ID NO: 387552 - RNA, 22 nt, Human
caguaugucuacuggacaaagu

SEQ ID NO: 387553 - RNA, 22 nt, Human
ccugagccugaguggugcaggg

SEQ ID NO: 387554 - RNA, 22 nt, Human
gcaagcugcucuuauguggagg

SEQ ID NO: 387555 - RNA, 22 nt, Human
cacuuaagcaguuaauuuaucu

SEQ ID NO: 387556 - RNA, 22 nt, Human
aagaaacaaccacugcucuccu

SEQ ID NO: 387557 - RNA, 17 nt, Human
uccauacaauucucucu

SEQ ID NO: 387558 - RNA, 22 nt, Human
gcugucugggaggccuccacuu

SEQ ID NO: 387559 - RNA, 22 nt, Human
aguuauaugugaaaacacguau

SEQ ID NO: 387560 - RNA, 20 nt, Human
gaaaugugaccucuucugug

SEQ ID NO: 387561 - RNA, 22 nt, Human
guggccugggguuuguucugag

SEQ ID NO: 387562 - RNA, 22 nt, Human
uggcuuuagguugcauguuucu

SEQ ID NO: 387563 - RNA, 22 nt, Human
cccuccccacaaagcuucacac

SEQ ID NO: 387564 - RNA, 22 nt, Human
uucuuaaucccacaaaucuuca

SEQ ID NO: 387565 - RNA, 19 nt, Human
augauacaggugaaaauug

SEQ ID NO: 387566 - RNA, 22 nt, Human
agaagucauuuauguuagauga

SEQ ID NO: 387567 - RNA, 17 nt, Human
gagacagcaggagcccc

SEQ ID NO: 387568 - RNA, 22 nt, Human
aucacaaaggucucagagcaca

SEQ ID NO: 387569 - RNA, 22 nt, Human
uaucuguuccaggcacucagcu

SEQ ID NO: 387570 - RNA, 22 nt, Human
ucccagcccagauuugugugac

SEQ ID NO: 387571 - RNA, 22 nt, Human
cuuauacacccucuucccaggc

SEQ ID NO: 387572 - RNA, 22 nt, Human
cugucuccagggcaggugcagg

SEQ ID NO: 387573 - RNA, 22 nt, Human
aaggcacucagccuugggacag

SEQ ID NO: 387574 - RNA, 22 nt, Human
aaagccauaagccuaauacuaa

SEQ ID NO: 387575 - RNA, 22 nt, Human
aagacauuuauuugaaucaauu

SEQ ID NO: 387576 - RNA, 22 nt, Human
ucugagcuacgaugccugucac

SEQ ID NO: 387577 - RNA, 22 nt, Human
cagcugcuuuaguuuuccaucc

SEQ ID NO: 387578 - RNA, 22 nt, Human
gugcaguggcagauccuagcuc

SEQ ID NO: 387579 - RNA, 22 nt, Human
acuggacagaggaaauauggag

SEQ ID NO: 387580 - RNA, 22 nt, Human
ccagcuuuuggggugacaauuu

SEQ ID NO: 387581 - RNA, 22 nt, Human
agcuuuaccugccuuggggcac

SEQ ID NO: 387582 - RNA, 22 nt, Human
ccuggagcacucucccuggcug

SEQ ID NO: 387583 - RNA, 22 nt, Human
ugcauuuccagauuucuggagu

SEQ ID NO: 387584 - RNA, 22 nt, Human
gcucccagaaccaaggcugggg

SEQ ID NO: 387585 - RNA, 22 nt, Human
agccacagucugaugccugaga

SEQ ID NO: 387586 - RNA, 22 nt, Human
uggcuucuugggaugggucauu

SEQ ID NO: 387587 - RNA, 17 nt, Human
ucuguucaagugagagg

SEQ ID NO: 387588 - RNA, 22 nt, Human
ucacaguaucacacaaggauua

SEQ ID NO: 387589 - RNA, 22 nt, Human
aggcaggugggucacuugaguc

SEQ ID NO: 387590 - RNA, 21 nt, Human
uccuuccuugagguccuuucc

SEQ ID NO: 387591 - RNA, 22 nt, Human
agcuuuaucagaggagucucua

SEQ ID NO: 387592 - RNA, 22 nt, Human
cacauaauacauguuccacuua

SEQ ID NO: 387593 - RNA, 22 nt, Human
aggcugcagugcagguaggauu

SEQ ID NO: 387594 - RNA, 22 nt, Human
uguuuuuaaauaaugauagaaa

SEQ ID NO: 387595 - RNA, 22 nt, Human
ugcuuugggucucucuaguuuc

SEQ ID NO: 387596 - RNA, 22 nt, Human
cuuguauuccccuaucucuaaa

SEQ ID NO: 387597 - RNA, 22 nt, Human
uaauuguagcuuuguaaucagc

SEQ ID NO: 387598 - RNA, 22 nt, Human
cuguuuauaaauagaggggagu

SEQ ID NO: 387599 - RNA, 22 nt, Human
uacaaagccugguagauaucug

SEQ ID NO: 387600 - RNA, 22 nt, Human
ugaucagucccaugaucuucca

SEQ ID NO: 387601 - RNA, 22 nt, Human
gggagggaaggaccuuaugaau

SEQ ID NO: 387602 - RNA, 22 nt, Human
ucagucuucccuccagugcaac

SEQ ID NO: 387603 - RNA, 22 nt, Human
cuccucugucuaccacgagggu

SEQ ID NO: 387604 - RNA, 19 nt, Human
gcugcucugggucucaucu

SEQ ID NO: 387605 - RNA, 22 nt, Human
aauuaauggaaaguaaggaagg

SEQ ID NO: 387606 - RNA, 22 nt, Human
acaguggaauggugggccugca

SEQ ID NO: 387607 - RNA, 22 nt, Human
gcugggagccccgagccagcgc

SEQ ID NO: 387608 - RNA, 22 nt, Human
ggcagggcccugauuccugggg

SEQ ID NO: 387609 - RNA, 22 nt, Human
cagaggcagacccuccagggcg

SEQ ID NO: 387610 - RNA, 22 nt, Human
uuucucaguuacuagcuguggu

SEQ ID NO: 387611 - RNA, 22 nt, Human
uugcaaaggggaauaaagcaau

SEQ ID NO: 387612 - RNA, 22 nt, Human
aggcagcaaagaaaugaugcug

SEQ ID NO: 387613 - RNA, 22 nt, Human
uggagcaggacggggaguggua

SEQ ID NO: 387614 - RNA, 22 nt, Human
aggcuuccucgugccuuagaua

SEQ ID NO: 387615 - RNA, 22 nt, Human
gcugccaccguggagaugagug

SEQ ID NO: 387616 - RNA, 22 nt, Human
acaucagauuaugcuuugcuua

SEQ ID NO: 387617 - RNA, 22 nt, Human
agcagcauuaagggaacugcag

SEQ ID NO: 387618 - RNA, 22 nt, Human
cccaggcagaauuaguguuuca

SEQ ID NO: 387619 - RNA, 22 nt, Human
ccugucugcagauaucucaggu

SEQ ID NO: 387620 - RNA, 22 nt, Human
aaaugcuuagagguguucaaau

SEQ ID NO: 387621 - RNA, 22 nt, Human
uuguuuugcuaaagggucauca

SEQ ID NO: 387622 - RNA, 22 nt, Human
uggagaaggacagccugagaaa

SEQ ID NO: 387623 - RNA, 22 nt, Human
ugccuugcacauaauauacauu

SEQ ID NO: 387624 - RNA, 22 nt, Human
gcagccccaggagacgcccagg

SEQ ID NO: 387625 - RNA, 22 nt, Human
uggagccauaacccuuucguac

SEQ ID NO: 387626 - RNA, 22 nt, Human
aagacaugcaauuagcaaggaa

SEQ ID NO: 387627 - RNA, 22 nt, Human
uuuguacauauauaaaaucugu

SEQ ID NO: 387628 - RNA, 22 nt, Human
uucaaaauuguucuaagcucug

SEQ ID NO: 387629 - RNA, 22 nt, Human
aaaugcaauuguauguacucca

SEQ ID NO: 387630 - RNA, 22 nt, Human
agguagaggccuccaggcagca

SEQ ID NO: 387631 - RNA, 22 nt, Human
acuguguccuauuuccuugaca

SEQ ID NO: 387632 - RNA, 22 nt, Human
gggcagcugccaagugcaucgc

SEQ ID NO: 387633 - RNA, 22 nt, Human
agcugggaggugggcagugaga

SEQ ID NO: 387634 - RNA, 18 nt, Human
cugcuugggagacgucag

SEQ ID NO: 387635 - RNA, 22 nt, Human
cagggcucaccacugggauccu

SEQ ID NO: 387636 - RNA, 22 nt, Human
uccuggagagugggcgagcaca

SEQ ID NO: 387637 - RNA, 22 nt, Human
agcccaggaaucugcaucuuga

SEQ ID NO: 387638 - RNA, 22 nt, Human
ccacuugugaaauaaucaaaua

SEQ ID NO: 387639 - RNA, 22 nt, Human
acauuuaaauaccuauguuucu

SEQ ID NO: 387640 - RNA, 22 nt, Human
ggcucaggcuggagugcagugg

SEQ ID NO: 387641 - RNA, 22 nt, Human
ucaccacugaacagaccuuugg

SEQ ID NO: 387642 - RNA, 22 nt, Human
gggaccuggggacuccuuguuc

SEQ ID NO: 387643 - RNA, 22 nt, Human
caagggcucuuuugaggaaugu

SEQ ID NO: 387644 - RNA, 22 nt, Human
gaggagcugggcugagaggguc

SEQ ID NO: 387645 - RNA, 22 nt, Human
ugcagcauuauucacaguagcc

SEQ ID NO: 387646 - RNA, 22 nt, Human
agaugcugcuccacaggccagg

SEQ ID NO: 387647 - RNA, 22 nt, Human
ccagucccgcaugguccagaau

SEQ ID NO: 387648 - RNA, 22 nt, Human
aggcugagcuggcccuugaaau

SEQ ID NO: 387649 - RNA, 22 nt, Human
aaggcaggaugggaaaagauuu

SEQ ID NO: 387650 - RNA, 22 nt, Human
gagcugccuguugcauagcaac

SEQ ID NO: 387651 - RNA, 22 nt, Human
uccugcagaucaaagccuuuga

SEQ ID NO: 387652 - RNA, 22 nt, Human
ccucauggaccucagacugucc

SEQ ID NO: 387653 - RNA, 22 nt, Human
uccaggagucuagccucaggcc

SEQ ID NO: 387654 - RNA, 18 nt, Human
cuuucagauggauaugcu

SEQ ID NO: 387655 - RNA, 22 nt, Human
agugaaauaugcccauugcugu

SEQ ID NO: 387656 - RNA, 22 nt, Human
gggcuggaggugagcaggacag

SEQ ID NO: 387657 - RNA, 22 nt, Human
cccauuuaaacacaagcuuuca

SEQ ID NO: 387658 - RNA, 22 nt, Human
augcuguggaaguuccugaagc

SEQ ID NO: 387659 - RNA, 22 nt, Human
agcugggcagacugcagugguu

SEQ ID NO: 387660 - RNA, 19 nt, Human
cauuuuaagcauccccagu

SEQ ID NO: 387661 - RNA, 22 nt, Human
guauuugauacaugaaauggug

SEQ ID NO: 387662 - RNA, 22 nt, Human
aagcacuuagaagagugccugc

SEQ ID NO: 387663 - RNA, 23 nt, Human
ucuuuccucagcacacaccaaga

SEQ ID NO: 387664 - RNA, 22 nt, Human
cagagugaaauaggggaucaag

SEQ ID NO: 387665 - RNA, 22 nt, Human
guaucuuuuacaccaggaaauu

SEQ ID NO: 387666 - RNA, 22 nt, Human
uccuucaguuaucacaguacug

SEQ ID NO: 387667 - RNA, 22 nt, Human
cagaggaaggcucugggaaugu

SEQ ID NO: 387668 - RNA, 22 nt, Human
cagaggcugggaccucaggcau

SEQ ID NO: 387669 - RNA, 22 nt, Human
acagggccauuaucuguucuag

SEQ ID NO: 387670 - RNA, 22 nt, Human
cuuuggcaugguccucacuaua

SEQ ID NO: 387671 - RNA, 22 nt, Human
ggaggggaggauuaaugacaaa

SEQ ID NO: 387672 - RNA, 23 nt, Human
agcagcaaaaauuuaucuuucug

SEQ ID NO: 387673 - RNA, 20 nt, Human
aagcagaagcugcucucagc

SEQ ID NO: 387674 - RNA, 22 nt, Human
gaacaauagugguaacaaagcc

SEQ ID NO: 387675 - RNA, 22 nt, Human
ugaagccagucaauguuaaguu

SEQ ID NO: 387676 - RNA, 22 nt, Human
gcuucccacagcuggacugggg

SEQ ID NO: 387677 - RNA, 22 nt, Human
aaaauugaagugaucaggaacu

SEQ ID NO: 387678 - RNA, 22 nt, Human
ggcucaggccagaccacgacuc

SEQ ID NO: 387679 - RNA, 22 nt, Human
gccgugcgugcgcaggugcugu

SEQ ID NO: 387680 - RNA, 22 nt, Human
uaagaacaucuguccccagauu

SEQ ID NO: 387681 - RNA, 22 nt, Human
aggacuucaucaccuguauaaa

SEQ ID NO: 387682 - RNA, 22 nt, Human
gagagcugcaagguagggcggg

SEQ ID NO: 387683 - RNA, 22 nt, Human
cuacuucuaaguacauggugau

SEQ ID NO: 387684 - RNA, 22 nt, Human
uacaguuuguuacauuguuagu

SEQ ID NO: 387685 - RNA, 17 nt, Human
ggcaccagacggagagu

SEQ ID NO: 387686 - RNA, 22 nt, Human
caggccucuauggucagcugag

SEQ ID NO: 387687 - RNA, 22 nt, Human
gaaggcuugcagcucuguggca

SEQ ID NO: 387688 - RNA, 17 nt, Human
gagugcugguggagcuc

SEQ ID NO: 387689 - RNA, 22 nt, Human
aggggccugguuggccucuguu

SEQ ID NO: 387690 - RNA, 22 nt, Human
gagcuggugugugcccgagcac

SEQ ID NO: 387691 - RNA, 22 nt, Human
cucaucugauaaaucacucuua

SEQ ID NO: 387692 - RNA, 22 nt, Human
aacaugucuggguauucacaag

SEQ ID NO: 387693 - RNA, 22 nt, Human
uuccucagccaaggcugggauc

SEQ ID NO: 387694 - RNA, 22 nt, Human
gagacaaaaguuggagugcaag

SEQ ID NO: 387695 - RNA, 22 nt, Human
gaguccaguaguuaggacagag

SEQ ID NO: 387696 - RNA, 22 nt, Human
acuccuggggauccauuccuuu

SEQ ID NO: 387697 - RNA, 22 nt, Human
uaaauucuacaacuucaaagau

SEQ ID NO: 387698 - RNA, 22 nt, Human
ccuggccagaggcgugccugug

SEQ ID NO: 387699 - RNA, 22 nt, Human
uaguccagccuuggguguagcc

SEQ ID NO: 387700 - RNA, 22 nt, Human
aguuggagugaacaugagauug

SEQ ID NO: 387701 - RNA, 22 nt, Human
cagccacguagcccuuggccgu

SEQ ID NO: 387702 - RNA, 22 nt, Human
uguauguaaaguuuguaauaga

SEQ ID NO: 387703 - RNA, 22 nt, Human
ugguaucagagccaucuguauu

SEQ ID NO: 387704 - RNA, 22 nt, Human
ucaguuuuaagguuugagaauu

SEQ ID NO: 387705 - RNA, 22 nt, Human
guuaaagaguuuggcuuucuuc

SEQ ID NO: 387706 - RNA, 22 nt, Human
ugccacaccaacaucuuucagc

SEQ ID NO: 387707 - RNA, 22 nt, Human
cucacagaugcugugggucagg

SEQ ID NO: 387708 - RNA, 22 nt, Human
cuccucugucuggcccugagcc

SEQ ID NO: 387709 - RNA, 22 nt, Human
ugggaccugcccuggccccauc

SEQ ID NO: 387710 - RNA, 22 nt, Human
ggccaggaagggaagaucagca

SEQ ID NO: 387711 - RNA, 22 nt, Human
aacagaaaucauuuagggcucu

SEQ ID NO: 387712 - RNA, 22 nt, Human
gccgaagcugccgucugguccu

SEQ ID NO: 387713 - RNA, 22 nt, Human
ggcagacuguaauaggagaauu

SEQ ID NO: 387714 - RNA, 22 nt, Human
cacugagaggucucauuuccaa

SEQ ID NO: 387715 - RNA, 22 nt, Human
gacccagccugguuuuuauagg

SEQ ID NO: 387716 - RNA, 22 nt, Human
ucaaugauaucagcaggaugug

SEQ ID NO: 387717 - RNA, 23 nt, Human
agaaaagcuuggacacauggccu

SEQ ID NO: 387718 - RNA, 22 nt, Human
aaaugaacaguugcauucucug

SEQ ID NO: 387719 - RNA, 21 nt, Human
uucucagaucgaguagugaga

SEQ ID NO: 387720 - RNA, 22 nt, Human
acaccauacucauguugguucc

SEQ ID NO: 387721 - RNA, 22 nt, Human
gcagcccagagcgcaggacccc

SEQ ID NO: 387722 - RNA, 22 nt, Human
ugcuuuauagacaaggaaguag

SEQ ID NO: 387723 - RNA, 19 nt, Human
guagggacagugguucuga

SEQ ID NO: 387724 - RNA, 22 nt, Human
ugggcagaguagcucagaagaa

SEQ ID NO: 387725 - RNA, 22 nt, Human
agaaaucugacugcugugcaca

SEQ ID NO: 387726 - RNA, 22 nt, Human
uagggcugugucuccaggacca

SEQ ID NO: 387727 - RNA, 22 nt, Human
gggccuguguguucaggagccu

SEQ ID NO: 387728 - RNA, 22 nt, Human
gcuccacuugcagcuaggcuug

SEQ ID NO: 387729 - RNA, 19 nt, Human
uccauaagcuuguguucau

SEQ ID NO: 387730 - RNA, 22 nt, Human
acauuucucuugaugucucuau

SEQ ID NO: 387731 - RNA, 22 nt, Human
aggaccugacauuguguuuucu

SEQ ID NO: 387732 - RNA, 22 nt, Human
agcugaggaggaaugaugggua

SEQ ID NO: 387733 - RNA, 22 nt, Human
gcaggugaaugauggacuagga

SEQ ID NO: 387734 - RNA, 22 nt, Human
uccaggcaugucugaguccuuc

SEQ ID NO: 387735 - RNA, 22 nt, Human
agucucagaaaagaagcaugga

SEQ ID NO: 387736 - RNA, 22 nt, Human
ccacagggcacaagggagguug

SEQ ID NO: 387737 - RNA, 22 nt, Human
cagagccagaacuagaccuugu

SEQ ID NO: 387738 - RNA, 20 nt, Human
aguaccuuuuguauguuacc

SEQ ID NO: 387739 - RNA, 22 nt, Human
gccugugcauagcagcggacuc

SEQ ID NO: 387740 - RNA, 22 nt, Human
cugcugggcuccucaugugacu

SEQ ID NO: 387741 - RNA, 22 nt, Human
agaucugaggguccaagggagg

SEQ ID NO: 387742 - RNA, 22 nt, Human
ggccugcuucucagugagcuug

SEQ ID NO: 387743 - RNA, 22 nt, Human
ucacaggguaucugggauggau

SEQ ID NO: 387744 - RNA, 22 nt, Human
gccaggagaaugcuagcagagg

SEQ ID NO: 387745 - RNA, 22 nt, Human
ugaggcuugucucagauggggg

SEQ ID NO: 387746 - RNA, 22 nt, Human
uuauuauugugaccugagaaug

SEQ ID NO: 387747 - RNA, 22 nt, Human
gcagugaaaaagugcacccugu

SEQ ID NO: 387748 - RNA, 22 nt, Human
uuccaaaggaauggggagcuau

SEQ ID NO: 387749 - RNA, 22 nt, Human
uagucuuuuuaauaaauaaugc

SEQ ID NO: 387750 - RNA, 22 nt, Human
uggacagcgaaagugccuggga

SEQ ID NO: 387751 - RNA, 22 nt, Human
cugccagcacugccuccugagg

SEQ ID NO: 387752 - RNA, 22 nt, Human
ggaugcaggaguugaagaagga

SEQ ID NO: 387753 - RNA, 22 nt, Human
aggccagcccugggcugagaga

SEQ ID NO: 387754 - RNA, 22 nt, Human
cccagccucagcuuuacuucca

SEQ ID NO: 387755 - RNA, 22 nt, Human
agcagggcuccugaaagccgcg

SEQ ID NO: 387756 - RNA, 22 nt, Human
gcuguccaugucuggccucagu

SEQ ID NO: 387757 - RNA, 22 nt, Human
uggccugaauuauggcagaucu

SEQ ID NO: 387758 - RNA, 22 nt, Human
gucucccaaccccugugcccag

SEQ ID NO: 387759 - RNA, 22 nt, Human
gacaugcaacaauuuggcauuu

SEQ ID NO: 387760 - RNA, 22 nt, Human
aagauuuccuucaguagagcua

SEQ ID NO: 387761 - RNA, 22 nt, Human
uggcaggauuugcccggaagga

SEQ ID NO: 387762 - RNA, 22 nt, Human
gagcagcucugugccuggagac

SEQ ID NO: 387763 - RNA, 22 nt, Human
ugcagggaagcaaggguggcuc

SEQ ID NO: 387764 - RNA, 22 nt, Human
agccagagcugaugucauucuc

SEQ ID NO: 387765 - RNA, 22 nt, Human
ugagagucucagaccuccuggu

SEQ ID NO: 387766 - RNA, 22 nt, Human
caguccugugucccuugguggg

SEQ ID NO: 387767 - RNA, 22 nt, Human
uaaguucaagucuuggauauaa

SEQ ID NO: 387768 - RNA, 22 nt, Human
aaagacauggaacuagagaugg

SEQ ID NO: 387769 - RNA, 22 nt, Human
ccaggaaugaaauguagauaaa

SEQ ID NO: 387770 - RNA, 21 nt, Human
agcugggccucagccugcagu

SEQ ID NO: 387771 - RNA, 22 nt, Human
augggcagacagggagcucacg

SEQ ID NO: 387772 - RNA, 22 nt, Human
agcuguguagggaaucagagaa

SEQ ID NO: 387773 - RNA, 22 nt, Human
uauaucuuauaugugcagguac

SEQ ID NO: 387774 - RNA, 22 nt, Human
aggcugcucaguagauggagcu

SEQ ID NO: 387775 - RNA, 22 nt, Human
cccaggaaugagcaggcagggg

SEQ ID NO: 387776 - RNA, 22 nt, Human
uaucuuugcaaauaucucuaag

SEQ ID NO: 387777 - RNA, 22 nt, Human
uggcuuccgccgcgggccucgg

SEQ ID NO: 387778 - RNA, 22 nt, Human
aaagucuuuauuuuguaucuuu

SEQ ID NO: 387779 - RNA, 22 nt, Human
caguaaauuaucucaucucugu

SEQ ID NO: 387780 - RNA, 22 nt, Human
ucuggagagucacagugccaga

SEQ ID NO: 387781 - RNA, 22 nt, Human
agugcaugccuuccuguggaug

SEQ ID NO: 387782 - RNA, 22 nt, Human
ugugcagcucuagagccaagcc

SEQ ID NO: 387783 - RNA, 22 nt, Human
cugcccaggaaccagaggggca

SEQ ID NO: 387784 - RNA, 22 nt, Human
agggacaguuacaucaucagac

SEQ ID NO: 387785 - RNA, 22 nt, Human
ugcucauuggcgaucugaggga

SEQ ID NO: 387786 - RNA, 22 nt, Human
gugcccugguccccagcauaua

SEQ ID NO: 387787 - RNA, 22 nt, Human
ggcagcagaacuggcccuguau

SEQ ID NO: 387788 - RNA, 22 nt, Human
uggcucaggauaauuuucccaa

SEQ ID NO: 387789 - RNA, 22 nt, Human
gccugugguuugauuaagcauu

SEQ ID NO: 387790 - RNA, 22 nt, Human
gaagucugacucuuuguaagcu

SEQ ID NO: 387791 - RNA, 22 nt, Human
ccaggaaauggcuugcuucuuu

SEQ ID NO: 387792 - RNA, 22 nt, Human
gccagagcugagugagguucuu

SEQ ID NO: 387793 - RNA, 22 nt, Human
ugggccuggaguuuguccagag

SEQ ID NO: 387794 - RNA, 22 nt, Human
cagggagcuggugccagccgac

SEQ ID NO: 387795 - RNA, 22 nt, Human
aaauaauugaguuggucaauau

SEQ ID NO: 387796 - RNA, 22 nt, Human
cagucccagacccagaaggugg

SEQ ID NO: 387797 - RNA, 22 nt, Human
gagcucugacugcugggugaca

SEQ ID NO: 387798 - RNA, 22 nt, Human
auuccaaacucuuucccugucg

SEQ ID NO: 387799 - RNA, 22 nt, Human
uaugcugugcuagauacaauau

SEQ ID NO: 387800 - RNA, 22 nt, Human
gcaaguuauuuccauuuaaagc

SEQ ID NO: 387801 - RNA, 22 nt, Human
cagagcugcuucccaguuugug

SEQ ID NO: 387802 - RNA, 22 nt, Human
uuaauuuauguccaaaccagau

SEQ ID NO: 387803 - RNA, 22 nt, Human
aaagucauguaaugauaugauu

SEQ ID NO: 387804 - RNA, 22 nt, Human
aauuucaauuacuuuugcacca

SEQ ID NO: 387805 - RNA, 22 nt, Human
cuuuucaugagucuguuauggg

SEQ ID NO: 387806 - RNA, 22 nt, Human
gcaugucaugucauguaggaau

SEQ ID NO: 387807 - RNA, 23 nt, Human
aggaacugaggccuagggaggua

SEQ ID NO: 387808 - RNA, 22 nt, Human
uguggcucucaugcacucccag

SEQ ID NO: 387809 - RNA, 17 nt, Human
ucaggcugggugcagug

SEQ ID NO: 387810 - RNA, 22 nt, Human
agcagagcggggccuccggaag

SEQ ID NO: 387811 - RNA, 22 nt, Human
ucuguucauacagaguauagua

SEQ ID NO: 387812 - RNA, 22 nt, Human
auucauuccaggucagucagac

SEQ ID NO: 387813 - RNA, 22 nt, Human
uggcagugccccuugaccagug

SEQ ID NO: 387814 - RNA, 21 nt, Human
ccuucuccacagggucuccgg

SEQ ID NO: 387815 - RNA, 22 nt, Human
uguuaaauguuccuuuacugga

SEQ ID NO: 387816 - RNA, 22 nt, Human
aauuuuaagcauaugacugguu

SEQ ID NO: 387817 - RNA, 21 nt, Human
ucuggagcccuaagcugagaa

SEQ ID NO: 387818 - RNA, 22 nt, Human
ugggguggauagaaagugaugu

SEQ ID NO: 387819 - RNA, 22 nt, Human
ugcugcuguauccuuaguguca

SEQ ID NO: 387820 - RNA, 22 nt, Human
ggcccagcccgagucagccuuc

SEQ ID NO: 387821 - RNA, 23 nt, Human
ccugcucaggcgugugcccugcu

SEQ ID NO: 387822 - RNA, 21 nt, Human
gcaugccugcaucuuaguguu

SEQ ID NO: 387823 - RNA, 22 nt, Human
aagcagaauuucccacuaguug

SEQ ID NO: 387824 - RNA, 22 nt, Human
acauuucugcaucucagagcua

SEQ ID NO: 387825 - RNA, 22 nt, Human
uggcucagagcagggacucugg

SEQ ID NO: 387826 - RNA, 22 nt, Human
gagauggggucagcugggacau

SEQ ID NO: 387827 - RNA, 22 nt, Human
uuuccaaaaugaaucuaaugca

SEQ ID NO: 387828 - RNA, 22 nt, Human
uuuccucuucuggcaggcaggg

SEQ ID NO: 387829 - RNA, 22 nt, Human
cacagcugaaguagccaugugg

SEQ ID NO: 387830 - RNA, 22 nt, Human
caaggccauaagagauacaaaa

SEQ ID NO: 387831 - RNA, 22 nt, Human
guuaggcaugaguguguauuaa

SEQ ID NO: 387832 - RNA, 22 nt, Human
ucuucagauaaagggagaguau

SEQ ID NO: 387833 - RNA, 22 nt, Human
uucauagugauuguucagauag

SEQ ID NO: 387834 - RNA, 22 nt, Human
aguuucuaccgguacauucagg

SEQ ID NO: 387835 - RNA, 22 nt, Human
ggaggggagauguuugggcuca

SEQ ID NO: 387836 - RNA, 22 nt, Human
aggcagaggagaaugaucuucc

SEQ ID NO: 387837 - RNA, 22 nt, Human
aaagggcugucaaauaagcaac

SEQ ID NO: 387838 - RNA, 22 nt, Human
uaacacaaaagaauaugugugu

SEQ ID NO: 387839 - RNA, 22 nt, Human
cagaggcugcucuggguggcau

SEQ ID NO: 387840 - RNA, 22 nt, Human
gcaggaugggagcuucacuuug

SEQ ID NO: 387841 - RNA, 22 nt, Human
gaaauuauugcuagagacugca

SEQ ID NO: 387842 - RNA, 22 nt, Human
caaauagugucacauugugagg

SEQ ID NO: 387843 - RNA, 22 nt, Human
cuccagugggggugagccuaga

SEQ ID NO: 387844 - RNA, 18 nt, Human
ccugccagucuggagcag

SEQ ID NO: 387845 - RNA, 22 nt, Human
cacuggaauauggcguugaacc

SEQ ID NO: 387846 - RNA, 22 nt, Human
cagacccugggccacagaggag

SEQ ID NO: 387847 - RNA, 20 nt, Human
gccaggagggugugaugagc

SEQ ID NO: 387848 - RNA, 22 nt, Human
cccugccucugaagcugcucag

SEQ ID NO: 387849 - RNA, 22 nt, Human
auuaaauuggacgcugggggaa

SEQ ID NO: 387850 - RNA, 22 nt, Human
gagagcugauagaugagcuacu

SEQ ID NO: 387851 - RNA, 22 nt, Human
agcugccaucugaagaacugca

SEQ ID NO: 387852 - RNA, 22 nt, Human
acaaacuaccuacagauguuca

SEQ ID NO: 387853 - RNA, 22 nt, Human
aauguacaaaagucagccaacu

SEQ ID NO: 387854 - RNA, 22 nt, Human
gaggccaggaagcccaagauca

SEQ ID NO: 387855 - RNA, 22 nt, Human
cucucugagugagggacaagcu

SEQ ID NO: 387856 - RNA, 22 nt, Human
cugcagcuauauuuucccacag

SEQ ID NO: 387857 - RNA, 22 nt, Human
aaguucaaguguaaucuuuauu

SEQ ID NO: 387858 - RNA, 22 nt, Human
auccuucagcugcccuguuacc

SEQ ID NO: 387859 - RNA, 22 nt, Human
ucagagaguccuggucauuugc

SEQ ID NO: 387860 - RNA, 22 nt, Human
gcugcucugcuguguaagcagg

SEQ ID NO: 387861 - RNA, 23 nt, Human
aggauuuaaaggcaaugcauuuu

SEQ ID NO: 387862 - RNA, 22 nt, Human
agcagggggccacagucacagc

SEQ ID NO: 387863 - RNA, 22 nt, Human
cauuuauuggcauguaguaggu

SEQ ID NO: 387864 - RNA, 19 nt, Human
uacuuuuucaggacagagu

SEQ ID NO: 387865 - RNA, 22 nt, Human
ucuccugugcacccucccugug

SEQ ID NO: 387866 - RNA, 18 nt, Human
ugcuggguaacuguaugg

SEQ ID NO: 387867 - RNA, 22 nt, Human
auaugagaauuggaaaauauca

SEQ ID NO: 387868 - RNA, 22 nt, Human
auugacaagacaauggcucuua

SEQ ID NO: 387869 - RNA, 22 nt, Human
ugcccaaguccuccaccgaggu

SEQ ID NO: 387870 - RNA, 22 nt, Human
ggugcuggacacguggcacucc

SEQ ID NO: 387871 - RNA, 22 nt, Human
gcagagguggcaucugggcucu

SEQ ID NO: 387872 - RNA, 22 nt, Human
ggaagccaguugcuuggugugg

SEQ ID NO: 387873 - RNA, 20 nt, Human
ccucucugaagaggucaucu

SEQ ID NO: 387874 - RNA, 22 nt, Human
uagucaccagcuacaggacagc

SEQ ID NO: 387875 - RNA, 22 nt, Human
cagggugccaaagaacaaauau

SEQ ID NO: 387876 - RNA, 19 nt, Human
augucuggguaacagcugc

SEQ ID NO: 387877 - RNA, 22 nt, Human
gccagcaguccugcugugugcc

SEQ ID NO: 387878 - RNA, 22 nt, Human
agcuuccucaccucagaggucu

SEQ ID NO: 387879 - RNA, 22 nt, Human
uauuuugacgauuuuaugcaaa

SEQ ID NO: 387880 - RNA, 22 nt, Human
agaaagaacgcacuugugcugc

SEQ ID NO: 387881 - RNA, 22 nt, Human
uuacuucuuacaaaagaaauau

SEQ ID NO: 387882 - RNA, 22 nt, Human
caggggaaggagccuugaaacu

SEQ ID NO: 387883 - RNA, 22 nt, Human
cuggaagaggaagccagcugga

SEQ ID NO: 387884 - RNA, 22 nt, Human
cagggccacuguagaugaggag

SEQ ID NO: 387885 - RNA, 22 nt, Human
ccagaaaaugcagaacauagaa

SEQ ID NO: 387886 - RNA, 22 nt, Human
gggagcugguuccugcccucca

SEQ ID NO: 387887 - RNA, 22 nt, Human
uagucaccuguugugugaugcc

SEQ ID NO: 387888 - RNA, 21 nt, Human
uuucugaaggcaacaucuauc

SEQ ID NO: 387889 - RNA, 22 nt, Human
gagagucuagugcaccuaguuu

SEQ ID NO: 387890 - RNA, 22 nt, Human
caaaugugguuucucagcauuc

SEQ ID NO: 387891 - RNA, 22 nt, Human
agcagcugccagagagaguucc

SEQ ID NO: 387892 - RNA, 22 nt, Human
cugaggcugggcugaggguaua

SEQ ID NO: 387893 - RNA, 22 nt, Human
ggcucuggguucugcaaugcgu

SEQ ID NO: 387894 - RNA, 22 nt, Human
agccagcuguucuggggcagca

SEQ ID NO: 387895 - RNA, 22 nt, Human
gccuucaggaggguuccagaca

SEQ ID NO: 387896 - RNA, 22 nt, Human
aaauuauuacaagcuaguuggc

SEQ ID NO: 387897 - RNA, 22 nt, Human
acuuucucaaaucagacuuuaa

SEQ ID NO: 387898 - RNA, 22 nt, Human
gcucccagauuucagccuugug

SEQ ID NO: 387899 - RNA, 21 nt, Human
acagggcaugcagcuggcugu

SEQ ID NO: 387900 - RNA, 22 nt, Human
ugugccagccucuggcuguguc

SEQ ID NO: 387901 - RNA, 22 nt, Human
acaugcuuuaacuuauuuugau

SEQ ID NO: 387902 - RNA, 22 nt, Human
ugucaaaaauaagagagauugu

SEQ ID NO: 387903 - RNA, 22 nt, Human
uaugugaauacagcaguggaug

SEQ ID NO: 387904 - RNA, 22 nt, Human
gauccuugcacuugacuuggca

SEQ ID NO: 387905 - RNA, 22 nt, Human
guauuagguuggugcaaaauug

SEQ ID NO: 387906 - RNA, 23 nt, Human
gcagauggccccagagugcugcc

SEQ ID NO: 387907 - RNA, 17 nt, Human
uauacacagacagacug

SEQ ID NO: 387908 - RNA, 22 nt, Human
uuugucaucccuuuugaaacug

SEQ ID NO: 387909 - RNA, 22 nt, Human
cagaucuagagcuuuuccaucu

SEQ ID NO: 387910 - RNA, 22 nt, Human
ucuucagauugcacugagcaag

SEQ ID NO: 387911 - RNA, 22 nt, Human
agcuggcagucauccuagugag

SEQ ID NO: 387912 - RNA, 22 nt, Human
uuauuuauuguguaccuacugu

SEQ ID NO: 387913 - RNA, 20 nt, Human
gaguuccccauuucuccugg

SEQ ID NO: 387914 - RNA, 22 nt, Human
cagcauggggaucacuguaggc

SEQ ID NO: 387915 - RNA, 22 nt, Human
uaccucaugcuguacagcacgu

SEQ ID NO: 387916 - RNA, 22 nt, Human
cugaggccucuguucaccagaa

SEQ ID NO: 387917 - RNA, 23 nt, Human
augaaugaauaaggcaggaaagc

SEQ ID NO: 387918 - RNA, 22 nt, Human
gcugggaggaucucucccuguc

SEQ ID NO: 387919 - RNA, 22 nt, Human
ccuggcugguggcagcgacaag

SEQ ID NO: 387920 - RNA, 22 nt, Human
uggcccugcuguaucaucugcu

SEQ ID NO: 387921 - RNA, 22 nt, Human
agggcugcaucugccuggugaa

SEQ ID NO: 387922 - RNA, 22 nt, Human
cuuucauuugauaagaaugcca

SEQ ID NO: 387923 - RNA, 23 nt, Human
ggauuuaguggaugagcugagug

SEQ ID NO: 387924 - RNA, 22 nt, Human
ugagccugcaauaagcacagcc

SEQ ID NO: 387925 - RNA, 22 nt, Human
uggagcagcuaagccucugaga

SEQ ID NO: 387926 - RNA, 22 nt, Human
gaggaggaaguucucuguaggc

SEQ ID NO: 387927 - RNA, 22 nt, Human
acccagagccagggucaggagc

SEQ ID NO: 387928 - RNA, 22 nt, Human
acguuuucuagagaauaugcag

SEQ ID NO: 387929 - RNA, 22 nt, Human
ugauuucauaguauauacauga

SEQ ID NO: 387930 - RNA, 22 nt, Human
gagcccagcuugcacauggagc

SEQ ID NO: 387931 - RNA, 22 nt, Human
aguaaacauagaauguucuucc

SEQ ID NO: 387932 - RNA, 22 nt, Human
cucugucccagacccaccucuc

SEQ ID NO: 387933 - RNA, 22 nt, Human
cgucccaguuccagccgcgcug

SEQ ID NO: 387934 - RNA, 22 nt, Human
gaggggcuggcuguggucccau

SEQ ID NO: 387935 - RNA, 22 nt, Human
auaacagagagcuacugaacug

SEQ ID NO: 387936 - RNA, 22 nt, Human
acacaaugcauauuuuuccaga

SEQ ID NO: 387937 - RNA, 22 nt, Human
uauugaaaugaaugacagugau

SEQ ID NO: 387938 - RNA, 22 nt, Human
gugugcaggugucagugcagcu

SEQ ID NO: 387939 - RNA, 22 nt, Human
gcucagaggcacgaccucuugg

SEQ ID NO: 387940 - RNA, 22 nt, Human
acugugcaaugaguaauaaacu

SEQ ID NO: 387941 - RNA, 22 nt, Human
gugccaggcccagggagcgggg

SEQ ID NO: 387942 - RNA, 22 nt, Human
cagaaggcaaacaaaaggauuu

SEQ ID NO: 387943 - RNA, 21 nt, Human
uagggcaggcauuggaagaga

SEQ ID NO: 387944 - RNA, 22 nt, Human
ucagcagugcagggugaggcag

SEQ ID NO: 387945 - RNA, 19 nt, Human
agauggggaagagugugag

SEQ ID NO: 387946 - RNA, 22 nt, Human
ggcccuguccuggcugucuccg

SEQ ID NO: 387947 - RNA, 22 nt, Human
cgagaguggacagggcgcagcu

SEQ ID NO: 387948 - RNA, 22 nt, Human
gagcugccugugugccaugaug

SEQ ID NO: 387949 - RNA, 20 nt, Human
aaaguguaagcauauaauua

SEQ ID NO: 387950 - RNA, 22 nt, Human
aggggugauuugggacaggaca

SEQ ID NO: 387951 - RNA, 22 nt, Human
aguuacagugaccauuuauuua

SEQ ID NO: 387952 - RNA, 22 nt, Human
aaaagcaguuaucugggaggaa

SEQ ID NO: 387953 - RNA, 22 nt, Human
agggaaggagguuagaacccac

SEQ ID NO: 387954 - RNA, 22 nt, Human
uauuaggguaaauuugacaugc

SEQ ID NO: 387955 - RNA, 22 nt, Human
uuucaguuagcugagacccagg

SEQ ID NO: 387956 - RNA, 22 nt, Human
cugcaguguucuggaaugcauu

SEQ ID NO: 387957 - RNA, 22 nt, Human
accagcucagaagccagaaaga

SEQ ID NO: 387958 - RNA, 22 nt, Human
uuagcucagaaaauuuaaacuu

SEQ ID NO: 387959 - RNA, 22 nt, Human
uuccucagcuggccugauuggg

SEQ ID NO: 387960 - RNA, 22 nt, Human
ucucugagcaugccauauugcu

SEQ ID NO: 387961 - RNA, 22 nt, Human
gaggguccccaugcagagcuca

SEQ ID NO: 387962 - RNA, 22 nt, Human
gaggcagcagggcugguuccuu

SEQ ID NO: 387963 - RNA, 20 nt, Human
uccaagcccuccuuccauuc

SEQ ID NO: 387964 - RNA, 22 nt, Human
cagauccacccuuguagugaca

SEQ ID NO: 387965 - RNA, 22 nt, Human
auucaguaggucuagaauaaga

SEQ ID NO: 387966 - RNA, 22 nt, Human
ucucaggaucuaauacauggua

SEQ ID NO: 387967 - RNA, 22 nt, Human
uccugggcugcagggaagagca

SEQ ID NO: 387968 - RNA, 22 nt, Human
ccuccucugggaagauucagag

SEQ ID NO: 387969 - RNA, 22 nt, Human
uuucccaagaaaaauaauugga

SEQ ID NO: 387970 - RNA, 22 nt, Human
cugccucuugacagaucguggc

SEQ ID NO: 387971 - RNA, 22 nt, Human
cuucuuaaucccuuauauauuu

SEQ ID NO: 387972 - RNA, 22 nt, Human
ggugccaggcucccagcucagg

SEQ ID NO: 387973 - RNA, 22 nt, Human
uaugccugauaacugugucucu

SEQ ID NO: 387974 - RNA, 22 nt, Human
cgaggcagggaagcugcaaaag

SEQ ID NO: 387975 - RNA, 22 nt, Human
ccaggccauucccagaguugcu

SEQ ID NO: 387976 - RNA, 22 nt, Human
gcucccagggaccgcagggcag

SEQ ID NO: 387977 - RNA, 22 nt, Human
uuuaggcaagaacucacugaga

SEQ ID NO: 387978 - RNA, 22 nt, Human
ggcugcugggaauaugccagcu

SEQ ID NO: 387979 - RNA, 22 nt, Human
uggagaggaaagugcaguuuug

SEQ ID NO: 387980 - RNA, 22 nt, Human
gccuggcuccuaaggacuggcu

SEQ ID NO: 387981 - RNA, 22 nt, Human
aggcacugagaggcuguguugc

SEQ ID NO: 387982 - RNA, 22 nt, Human
acuguguggaccacucugaggc

SEQ ID NO: 387983 - RNA, 22 nt, Human
gcuggcuccucuguccucacgg

SEQ ID NO: 387984 - RNA, 22 nt, Human
aaucucuugggaggaaugaauu

SEQ ID NO: 387985 - RNA, 22 nt, Human
aggcucugcagaccccagcugu

SEQ ID NO: 387986 - RNA, 22 nt, Human
cugggccuuggauugacacugu

SEQ ID NO: 387987 - RNA, 22 nt, Human
agggcuagaguugagaugggga

SEQ ID NO: 387988 - RNA, 22 nt, Human
agucucugagguucagaugccu

SEQ ID NO: 387989 - RNA, 22 nt, Human
accagagcucuucagcacagga

SEQ ID NO: 387990 - RNA, 22 nt, Human
cuacauuaaauuggcuuacuua

SEQ ID NO: 387991 - RNA, 22 nt, Human
agugaccaaucaugguuagauu

SEQ ID NO: 387992 - RNA, 22 nt, Human
caggggcugagaaggaacgucc

SEQ ID NO: 387993 - RNA, 22 nt, Human
gugcugugugauccaugcuggc

SEQ ID NO: 387994 - RNA, 22 nt, Human
gccuuaauuuaugucuaacaua

SEQ ID NO: 387995 - RNA, 21 nt, Human
agccagucuguuuucuagugc

SEQ ID NO: 387996 - RNA, 22 nt, Human
uuauuuugagagaaugugugcu

SEQ ID NO: 387997 - RNA, 22 nt, Human
cacccagcauuggcuaagagag

SEQ ID NO: 387998 - RNA, 23 nt, Human
aaggccagaauuucaauggugcc

SEQ ID NO: 387999 - RNA, 22 nt, Human
aguuuguaucaauuugcuuuau

SEQ ID NO: 388000 - RNA, 23 nt, Human
cugaggccugcugcguucagguu

SEQ ID NO: 388001 - RNA, 22 nt, Human
uuuauuauagugguggggacug

SEQ ID NO: 388002 - RNA, 22 nt, Human
gcucaggaaggcucaaccagga

SEQ ID NO: 388003 - RNA, 22 nt, Human
uaugcacaauaugaucuauuug

SEQ ID NO: 388004 - RNA, 22 nt, Human
uuugcagucaaauuugcuaaau

SEQ ID NO: 388005 - RNA, 22 nt, Human
aaaguccuguuugaaggaccug

SEQ ID NO: 388006 - RNA, 22 nt, Human
cuacauuuuucaccgagccucu

SEQ ID NO: 388007 - RNA, 23 nt, Human
guggagccacaucacaggcuccu

SEQ ID NO: 388008 - RNA, 22 nt, Human
ugagagggcccagagcacacca

SEQ ID NO: 388009 - RNA, 22 nt, Human
uuagggaaggcugcugucagcu

SEQ ID NO: 388010 - RNA, 23 nt, Human
aggcugcagaagaauagggucau

SEQ ID NO: 388011 - RNA, 22 nt, Human
gcugucccaugguugcaagaug

SEQ ID NO: 388012 - RNA, 22 nt, Human
aagaacugugcuccaggcucca

SEQ ID NO: 388013 - RNA, 21 nt, Human
cccaggaggcugagaagagca

SEQ ID NO: 388014 - RNA, 22 nt, Human
agaggggcucaagcaguggucu

SEQ ID NO: 388015 - RNA, 22 nt, Human
cagggcucacucggcuggcguc

SEQ ID NO: 388016 - RNA, 22 nt, Human
cucaggaugaaagucaugguga

SEQ ID NO: 388017 - RNA, 21 nt, Human
cagcuuugucugucuucgggg

SEQ ID NO: 388018 - RNA, 22 nt, Human
uuguguccugauuugacacaau

SEQ ID NO: 388019 - RNA, 22 nt, Human
aggggagcuaacaccagagccc

SEQ ID NO: 388020 - RNA, 22 nt, Human
gggacagacccaugggccaggu

SEQ ID NO: 388021 - RNA, 22 nt, Human
gucaccagugcuaagaggugga

SEQ ID NO: 388022 - RNA, 21 nt, Human
ugacugaggcuucuucacaca

SEQ ID NO: 388023 - RNA, 22 nt, Human
ugcagcugauuaaagggcagac

SEQ ID NO: 388024 - RNA, 19 nt, Human
acuuugcaugugugucuaa

SEQ ID NO: 388025 - RNA, 22 nt, Human
cccuccagagcuugaccugcug

SEQ ID NO: 388026 - RNA, 22 nt, Human
gcugccuugaacuuggccuggg

SEQ ID NO: 388027 - RNA, 22 nt, Human
auggagugggccaauuuuagug

SEQ ID NO: 388028 - RNA, 22 nt, Human
ggccugugagcccuugcaugua

SEQ ID NO: 388029 - RNA, 22 nt, Human
aacauuuaugauugagguaaau

SEQ ID NO: 388030 - RNA, 22 nt, Human
gagggcucuaccaaguaacucu

SEQ ID NO: 388031 - RNA, 22 nt, Human
aaguaacaaugcuguugaauug

SEQ ID NO: 388032 - RNA, 21 nt, Human
uugaaaguaaauucagcagcu

SEQ ID NO: 388033 - RNA, 22 nt, Human
cacaugaguccugccagguaug

SEQ ID NO: 388034 - RNA, 22 nt, Human
uuacaagauaaccugaugcugu

SEQ ID NO: 388035 - RNA, 22 nt, Human
guaaaauagaauaacguggcua

SEQ ID NO: 388036 - RNA, 22 nt, Human
ggaggaagagguuguucucuca

SEQ ID NO: 388037 - RNA, 22 nt, Human
agacaacaccaaaugcuagugu

SEQ ID NO: 388038 - RNA, 22 nt, Human
cauaauaucuccgauuacuugc

SEQ ID NO: 388039 - RNA, 22 nt, Human
ucacugcaaccucugccuuccg

SEQ ID NO: 388040 - RNA, 22 nt, Human
aagggaggaggauuuauuguac

SEQ ID NO: 388041 - RNA, 21 nt, Human
cacuauuuauauaugccagcu

SEQ ID NO: 388042 - RNA, 22 nt, Human
uucaaauuaccacauuugcuua

SEQ ID NO: 388043 - RNA, 22 nt, Human
aggcugggaagguaaaguugua

SEQ ID NO: 388044 - RNA, 22 nt, Human
ugaaaucuuuaguuucuguccc

SEQ ID NO: 388045 - RNA, 22 nt, Human
uccagcaguccaugugagacac

SEQ ID NO: 388046 - RNA, 19 nt, Human
ugcagcucagggcaggggc

SEQ ID NO: 388047 - RNA, 22 nt, Human
cauggucuacaauuucauuuua

SEQ ID NO: 388048 - RNA, 17 nt, Human
agcagcugaagcagcca

SEQ ID NO: 388049 - RNA, 22 nt, Human
uccagcuugccuggucuuuugg

SEQ ID NO: 388050 - RNA, 22 nt, Human
uccucaggucaaagcaggagaa

SEQ ID NO: 388051 - RNA, 22 nt, Human
uugugcaauuuaaaaucuuccu

SEQ ID NO: 388052 - RNA, 22 nt, Human
uaaguucauuagacuacagaua

SEQ ID NO: 388053 - RNA, 22 nt, Human
ggggcaggagcccuucuucagc

SEQ ID NO: 388054 - RNA, 22 nt, Human
ugggccugugaugcugggcuau

SEQ ID NO: 388055 - RNA, 23 nt, Human
agggcugaaugcagagaagcaga

SEQ ID NO: 388056 - RNA, 22 nt, Human
ggcagggaagcuggcaucacgg

SEQ ID NO: 388057 - RNA, 16 nt, Human
agcagggcgggaagga

SEQ ID NO: 388058 - RNA, 22 nt, Human
cacugcuuuaaggcugaguaac

SEQ ID NO: 388059 - RNA, 22 nt, Human
aaugcuuaauucaauacugugu

SEQ ID NO: 388060 - RNA, 19 nt, Human
ucagaggauuuggcuauga

SEQ ID NO: 388061 - RNA, 22 nt, Human
cucaaguaagaaacagaauugg

SEQ ID NO: 388062 - RNA, 22 nt, Human
aacacaaagaagcugcaggauc

SEQ ID NO: 388063 - RNA, 22 nt, Human
cagaggcucuuccucacugccc

SEQ ID NO: 388064 - RNA, 22 nt, Human
aaaggcuccuucucccaugacc

SEQ ID NO: 388065 - RNA, 22 nt, Human
agccuucacugggaccuuggau

SEQ ID NO: 388066 - RNA, 22 nt, Human
ugcuucucccaaccagggccug

SEQ ID NO: 388067 - RNA, 19 nt, Human
aagggcugggcaccucacu

SEQ ID NO: 388068 - RNA, 22 nt, Human
ccagcugacgaugccuggucuc

SEQ ID NO: 388069 - RNA, 22 nt, Human
uauuuccauguuagaacuaagu

SEQ ID NO: 388070 - RNA, 22 nt, Human
ccagcaggagaugccugugucu

SEQ ID NO: 388071 - RNA, 22 nt, Human
ucucugcugagaagggcuggca

SEQ ID NO: 388072 - RNA, 22 nt, Human
cagugcagccaaggacaggcac

SEQ ID NO: 388073 - RNA, 21 nt, Human
acagccugucaucucaugguc

SEQ ID NO: 388074 - RNA, 22 nt, Human
auuucuguaacuuaugaaaguu

SEQ ID NO: 388075 - RNA, 22 nt, Human
guggccuuuccugaagaaauga

SEQ ID NO: 388076 - RNA, 22 nt, Human
cuuucacaguccugacugagcg

SEQ ID NO: 388077 - RNA, 22 nt, Human
cugagauggaguuuugcucuug

SEQ ID NO: 388078 - RNA, 22 nt, Human
gaggagaagcuauuggaaggac

SEQ ID NO: 388079 - RNA, 22 nt, Human
ugggcagauguccucugaagug

SEQ ID NO: 388080 - RNA, 22 nt, Human
ucucagucagccuugauguccc

SEQ ID NO: 388081 - RNA, 22 nt, Human
cugcccucuagaggaggacuga

SEQ ID NO: 388082 - RNA, 20 nt, Human
cauuuguuagcuuucuacug

SEQ ID NO: 388083 - RNA, 22 nt, Human
uuccaggauagcuuucaggaau

SEQ ID NO: 388084 - RNA, 22 nt, Human
uggcagcuggagggcaauggcc

SEQ ID NO: 388085 - RNA, 22 nt, Human
ugaagcaggaaccagcagcauu

SEQ ID NO: 388086 - RNA, 22 nt, Human
ugcagagaaaccaguggaggac

SEQ ID NO: 388087 - RNA, 22 nt, Human
acagccuguuugaucuggugcu

SEQ ID NO: 388088 - RNA, 21 nt, Human
ucugucugguuuuagaguggc

SEQ ID NO: 388089 - RNA, 22 nt, Human
gaggagcuggcugucgggaggc

SEQ ID NO: 388090 - RNA, 22 nt, Human
uggccucuggcugaggacuaac

SEQ ID NO: 388091 - RNA, 22 nt, Human
uucuuacuaguauguuucagca

SEQ ID NO: 388092 - RNA, 23 nt, Human
ccugaagggucaggguccucagc

SEQ ID NO: 388093 - RNA, 22 nt, Human
uugaaaggugacauuguuagag

SEQ ID NO: 388094 - RNA, 19 nt, Human
gugcuuuuuaagagcucag

SEQ ID NO: 388095 - RNA, 22 nt, Human
ccaaagagcuagaauuauaggc

SEQ ID NO: 388096 - RNA, 22 nt, Human
uuccauaaugagauucccagcc

SEQ ID NO: 388097 - RNA, 21 nt, Human
gcccagcaaggugagaaggcc

SEQ ID NO: 388098 - RNA, 22 nt, Human
uccaggagacacaagguacaua

SEQ ID NO: 388099 - RNA, 22 nt, Human
cagcuccugccugggcagcugu

SEQ ID NO: 388100 - RNA, 22 nt, Human
uccaugaggaccaaauucguag

SEQ ID NO: 388101 - RNA, 22 nt, Human
agaggcuggauugagcauagac

SEQ ID NO: 388102 - RNA, 22 nt, Human
cuccuguauguugggcuucaca

SEQ ID NO: 388103 - RNA, 22 nt, Human
aaaugugucauauucaaaguca

SEQ ID NO: 388104 - RNA, 22 nt, Human
agcucccauuaucuucugaaac

SEQ ID NO: 388105 - RNA, 22 nt, Human
aauaauuagugggacagagaac

SEQ ID NO: 388106 - RNA, 22 nt, Human
augcagaaggagccaugcuugc

SEQ ID NO: 388107 - RNA, 22 nt, Human
gcuggccugcaaagcccggcug

SEQ ID NO: 388108 - RNA, 22 nt, Human
gcugagcugcuguucauccugc

SEQ ID NO: 388109 - RNA, 22 nt, Human
uccucccugaguggggacagcu

SEQ ID NO: 388110 - RNA, 17 nt, Human
cgagggcuugcuggcuc

SEQ ID NO: 388111 - RNA, 22 nt, Human
gagugcaguuggggugagggga

SEQ ID NO: 388112 - RNA, 22 nt, Human
uggagccaaggccaguucucag

SEQ ID NO: 388113 - RNA, 22 nt, Human
acccugagggguauagcagaag

SEQ ID NO: 388114 - RNA, 21 nt, Human
agaaaaacacgauauaagccc

SEQ ID NO: 388115 - RNA, 22 nt, Human
cuucugugcuucacaguugcca

SEQ ID NO: 388116 - RNA, 22 nt, Human
ccuuggcccuagccucaggcaa

SEQ ID NO: 388117 - RNA, 22 nt, Human
cugcuucugggaugauggagua

SEQ ID NO: 388118 - RNA, 22 nt, Human
aaggcagcuuuaaaaaagaugc

SEQ ID NO: 388119 - RNA, 22 nt, Human
gcuggccugaccugaggcuggg

SEQ ID NO: 388120 - RNA, 22 nt, Human
gggccugggaacuugcauuuag

SEQ ID NO: 388121 - RNA, 22 nt, Human
cugggcagcugugcaaacaaua

SEQ ID NO: 388122 - RNA, 22 nt, Human
aagaugcagcuuccacuuuugc

SEQ ID NO: 388123 - RNA, 22 nt, Human
acaggcagguaauuuacauauu

SEQ ID NO: 388124 - RNA, 22 nt, Human
gucaggauuauaauccccaugg

SEQ ID NO: 388125 - RNA, 22 nt, Human
cucagagaaaugucacaacaau

SEQ ID NO: 388126 - RNA, 22 nt, Human
uguguacauaucuauccuagau

SEQ ID NO: 388127 - RNA, 22 nt, Human
gccuggaggggccaggguggua

SEQ ID NO: 388128 - RNA, 22 nt, Human
uggagcugggguuugaaucugg

SEQ ID NO: 388129 - RNA, 22 nt, Human
gagcccucucuguaggcaagua

SEQ ID NO: 388130 - RNA, 22 nt, Human
caaggccaguucaccaagggca

SEQ ID NO: 388131 - RNA, 20 nt, Human
cuguggaauuuuaccaugcg

SEQ ID NO: 388132 - RNA, 22 nt, Human
cugaauaauacagacuagcuuc

SEQ ID NO: 388133 - RNA, 22 nt, Human
agggcugcuccuccuucaggcc

SEQ ID NO: 388134 - RNA, 18 nt, Human
uaagucauuuugccagca

SEQ ID NO: 388135 - RNA, 22 nt, Human
gcuuuauguaaguccaaaggca

SEQ ID NO: 388136 - RNA, 22 nt, Human
accucugccaagaugugcuccc

SEQ ID NO: 388137 - RNA, 22 nt, Human
cuagggaccucagcuccuggag

SEQ ID NO: 388138 - RNA, 22 nt, Human
acuguggcgucaggaagaaauu

SEQ ID NO: 388139 - RNA, 19 nt, Human
cuucuggcccugagccacc

SEQ ID NO: 388140 - RNA, 22 nt, Human
uagcugucagcaaucaaguggu

SEQ ID NO: 388141 - RNA, 22 nt, Human
auccaaacauguaccacacuaa

SEQ ID NO: 388142 - RNA, 22 nt, Human
uaauguguccugaaagcuucug

SEQ ID NO: 388143 - RNA, 22 nt, Human
uagaaaguaaaucaguuuuauu

SEQ ID NO: 388144 - RNA, 22 nt, Human
cuuaggcauccaggguucuucc

SEQ ID NO: 388145 - RNA, 22 nt, Human
cccuggagugccggaaucaaga

SEQ ID NO: 388146 - RNA, 20 nt, Human
acugugaaugcugaauuagc

SEQ ID NO: 388147 - RNA, 22 nt, Human
cuugacauuaguuaugcagaua

SEQ ID NO: 388148 - RNA, 22 nt, Human
ucucagagauguuagggaagag

SEQ ID NO: 388149 - RNA, 21 nt, Human
auccuuagcacuuagaagagu

SEQ ID NO: 388150 - RNA, 22 nt, Human
ccaggagacccagggaaggagc

SEQ ID NO: 388151 - RNA, 19 nt, Human
ggcagcuggacgcuguuca

SEQ ID NO: 388152 - RNA, 22 nt, Human
uggcagaguuggagguggaaga

SEQ ID NO: 388153 - RNA, 22 nt, Human
cccaggaacagggcucagaccc

SEQ ID NO: 388154 - RNA, 22 nt, Human
ccaggagagcucuaaauggcug

SEQ ID NO: 388155 - RNA, 22 nt, Human
aucaguuucuaccauguggaau

SEQ ID NO: 388156 - RNA, 22 nt, Human
gcagugaaucuggcaagaauuu

SEQ ID NO: 388157 - RNA, 22 nt, Human
uggcucaguuuagcagcucagu

SEQ ID NO: 388158 - RNA, 22 nt, Human
ugcuuuauucccuucugaugug

SEQ ID NO: 388159 - RNA, 22 nt, Human
uggaaagaaaguaaaggcguau

SEQ ID NO: 388160 - RNA, 22 nt, Human
aauagcucacugauuucucuuu

SEQ ID NO: 388161 - RNA, 22 nt, Human
agaagccaugguaugcaacuac

SEQ ID NO: 388162 - RNA, 22 nt, Human
ucaagagaagugcuccacagua

SEQ ID NO: 388163 - RNA, 22 nt, Human
cuggcagcuuccuuugcaucug

SEQ ID NO: 388164 - RNA, 22 nt, Human
aaacuucagugaaugacuuaug

SEQ ID NO: 388165 - RNA, 22 nt, Human
ucaucaguguccuuaucacuua

SEQ ID NO: 388166 - RNA, 22 nt, Human
augaagcuaaacccugcagcca

SEQ ID NO: 388167 - RNA, 22 nt, Human
acagaaugcguagugcauguug

SEQ ID NO: 388168 - RNA, 22 nt, Human
aaggcgacacaggcagcaggcc

SEQ ID NO: 388169 - RNA, 22 nt, Human
agcauugccugccuauugcuaa

SEQ ID NO: 388170 - RNA, 22 nt, Human
uugaucagguugcuguggugua

SEQ ID NO: 388171 - RNA, 22 nt, Human
gaagaauccaugcuaauuuacc

SEQ ID NO: 388172 - RNA, 22 nt, Human
aagcagggcuuuaagcgguuuu

SEQ ID NO: 388173 - RNA, 22 nt, Human
ccugcucagagcgucuugugug

SEQ ID NO: 388174 - RNA, 22 nt, Human
caggggcuguggcacauggugu

SEQ ID NO: 388175 - RNA, 22 nt, Human
uaaguuuaaauguacaugaagc

SEQ ID NO: 388176 - RNA, 22 nt, Human
agagccugggaauuugcauguu

SEQ ID NO: 388177 - RNA, 22 nt, Human
agccacgucccugucaggguca

SEQ ID NO: 388178 - RNA, 22 nt, Human
augcuguguggucaaguuaauu

SEQ ID NO: 388179 - RNA, 22 nt, Human
aaacacaccuuuggaacuguga

SEQ ID NO: 388180 - RNA, 19 nt, Human
gaggucagcaagaaguauu

SEQ ID NO: 388181 - RNA, 20 nt, Human
acaaaauagguacuggguag

SEQ ID NO: 388182 - RNA, 22 nt, Human
ccaggagagcgcccucccggcc

SEQ ID NO: 388183 - RNA, 22 nt, Human
ucugcagggaugugagggguga

SEQ ID NO: 388184 - RNA, 22 nt, Human
caaaugcaggucagcagguguc

SEQ ID NO: 388185 - RNA, 22 nt, Human
ggcaggagcucagguugguucc

SEQ ID NO: 388186 - RNA, 22 nt, Human
cagggcuguggcuuugugcugu

SEQ ID NO: 388187 - RNA, 22 nt, Human
uggguggcggccugguucugag

SEQ ID NO: 388188 - RNA, 22 nt, Human
aaaggaagaugccaggacucug

SEQ ID NO: 388189 - RNA, 22 nt, Human
auucacagggacaaugggagag

SEQ ID NO: 388190 - RNA, 22 nt, Human
ugccucugugugcaggugagca

SEQ ID NO: 388191 - RNA, 21 nt, Human
accaggcuugugggagggagc

SEQ ID NO: 388192 - RNA, 22 nt, Human
uuugaagucagacacugcuuug

SEQ ID NO: 388193 - RNA, 22 nt, Human
aaauacagauuccagggucuua

SEQ ID NO: 388194 - RNA, 22 nt, Human
gagcuuuaagggauaaaaugau

SEQ ID NO: 388195 - RNA, 22 nt, Human
ugcaggaaucagaggggaagcg

SEQ ID NO: 388196 - RNA, 22 nt, Human
augugcaaauccaaugugaaug

SEQ ID NO: 388197 - RNA, 22 nt, Human
uccuucaaagcuccuagugagc

SEQ ID NO: 388198 - RNA, 22 nt, Human
gcaucuaauccaguccagcauc

SEQ ID NO: 388199 - RNA, 22 nt, Human
ucuucaaauccuacagugucug

SEQ ID NO: 388200 - RNA, 22 nt, Human
gcagcguggggacaggagcuca

SEQ ID NO: 388201 - RNA, 22 nt, Human
guaacugaggcagcuuuuaaga

SEQ ID NO: 388202 - RNA, 22 nt, Human
cuugucugugucggauaaaacu

SEQ ID NO: 388203 - RNA, 22 nt, Human
cagcagagcugggcuuugaauu

SEQ ID NO: 388204 - RNA, 19 nt, Human
cugagagaugcuucacaca

SEQ ID NO: 388205 - RNA, 21 nt, Human
gagugcagcaagguagagucu

SEQ ID NO: 388206 - RNA, 22 nt, Human
ugucuucagcaaaugccuuucu

SEQ ID NO: 388207 - RNA, 22 nt, Human
ugggcugcagggguugagagcu

SEQ ID NO: 388208 - RNA, 22 nt, Human
ugugaaaagcguguguucuagg

SEQ ID NO: 388209 - RNA, 22 nt, Human
ucuauuuuauacucaaaucuuc

SEQ ID NO: 388210 - RNA, 22 nt, Human
aaaagucagucucuccuagcuc

SEQ ID NO: 388211 - RNA, 22 nt, Human
gcagggccagguacaagaagca

SEQ ID NO: 388212 - RNA, 22 nt, Human
uuauuaggaacucaggauuuuu

SEQ ID NO: 388213 - RNA, 22 nt, Human
ucagggugaaccaggcaggaau

SEQ ID NO: 388214 - RNA, 22 nt, Human
gaggcucacgacgggacgaacu

SEQ ID NO: 388215 - RNA, 22 nt, Human
agcugccacugagggugcacag

SEQ ID NO: 388216 - RNA, 22 nt, Human
auucuccaucaccacuggcacu

SEQ ID NO: 388217 - RNA, 22 nt, Human
caggcugcagugcaguggcuau

SEQ ID NO: 388218 - RNA, 22 nt, Human
agugggcaugaucuggugucug

SEQ ID NO: 388219 - RNA, 22 nt, Human
ucaggcaggacaauuauuuagg

SEQ ID NO: 388220 - RNA, 22 nt, Human
gcacagggaggcuggccuggcc

SEQ ID NO: 388221 - RNA, 22 nt, Human
ugccaggccaauucuauuugac

SEQ ID NO: 388222 - RNA, 22 nt, Human
uggcagagguauauugggagga

SEQ ID NO: 388223 - RNA, 22 nt, Human
agggccaggaacaccugaaggg

SEQ ID NO: 388224 - RNA, 22 nt, Human
ggggcagccuccaggaaagcug

SEQ ID NO: 388225 - RNA, 22 nt, Human
uggcccugcagaacuagccugg

SEQ ID NO: 388226 - RNA, 22 nt, Human
gucaggaucaaauugaaguuau

SEQ ID NO: 388227 - RNA, 17 nt, Human
aaugaaugaauucuuug

SEQ ID NO: 388228 - RNA, 22 nt, Human
auuuaguguauucuaauaugug

SEQ ID NO: 388229 - RNA, 22 nt, Human
uugaagcauuucuuugagcuuc

SEQ ID NO: 388230 - RNA, 22 nt, Human
acguggagagaauagggcacca

SEQ ID NO: 388231 - RNA, 22 nt, Human
guuuacauguacucauuauacu

SEQ ID NO: 388232 - RNA, 22 nt, Human
ugcccaggaucuggcgaugcuc

SEQ ID NO: 388233 - RNA, 22 nt, Human
cacagacccagaagggaugaag

SEQ ID NO: 388234 - RNA, 22 nt, Human
agaccaagacuauaaugagagg

SEQ ID NO: 388235 - RNA, 22 nt, Human
ugccagugggugugcagagacu

SEQ ID NO: 388236 - RNA, 22 nt, Human
ucccaggcugggggccugaagu

SEQ ID NO: 388237 - RNA, 22 nt, Human
ggcaguggugggaggcucgcuc

SEQ ID NO: 388238 - RNA, 18 nt, Human
cagcugccagcucaugga

SEQ ID NO: 388239 - RNA, 22 nt, Human
cagagcucuauguucauggagg

SEQ ID NO: 388240 - RNA, 22 nt, Human
uugcucugacuggagugcagug

SEQ ID NO: 388241 - RNA, 22 nt, Human
cucauacauaugccauuccugc

SEQ ID NO: 388242 - RNA, 22 nt, Human
gaggcugguaggaaaggaaaca

SEQ ID NO: 388243 - RNA, 18 nt, Human
gaugggagcaagagaaga

SEQ ID NO: 388244 - RNA, 23 nt, Human
ugcagagggacugaagccagcuu

SEQ ID NO: 388245 - RNA, 22 nt, Human
ucucucagaggaagaggcagug

SEQ ID NO: 388246 - RNA, 22 nt, Human
uuuuauguaauccuuacugucg

SEQ ID NO: 388247 - RNA, 22 nt, Human
ggagauggcucugcaaggucua

SEQ ID NO: 388248 - RNA, 22 nt, Human
cagccugcagggcugccuguug

SEQ ID NO: 388249 - RNA, 22 nt, Human
cucuccuccaacagcccugccg

SEQ ID NO: 388250 - RNA, 22 nt, Human
uuccaaaccucaaauaauuaau

SEQ ID NO: 388251 - RNA, 22 nt, Human
uuacagaaguuucagcguuuua

SEQ ID NO: 388252 - RNA, 22 nt, Human
ccugcagcuguaggagaaggcg

SEQ ID NO: 388253 - RNA, 22 nt, Human
uccaggagaaggccauccagcg

SEQ ID NO: 388254 - RNA, 22 nt, Human
cugacucccaaagaggacgcgu

SEQ ID NO: 388255 - RNA, 22 nt, Human
gcugaaggucucuggagagguc

SEQ ID NO: 388256 - RNA, 21 nt, Human
gcucuuggaaggggcucagcu

SEQ ID NO: 388257 - RNA, 22 nt, Human
acaugauuuuaguaucauaaua

SEQ ID NO: 388258 - RNA, 22 nt, Human
agccccaggcccggacgccucu

SEQ ID NO: 388259 - RNA, 22 nt, Human
agcagcugaccagugaguccug

SEQ ID NO: 388260 - RNA, 21 nt, Human
cugguguagcacucaggugcu

SEQ ID NO: 388261 - RNA, 22 nt, Human
caggaacacaaguucagggaug

SEQ ID NO: 388262 - RNA, 22 nt, Human
guuuucaaggggauuuaacuga

SEQ ID NO: 388263 - RNA, 22 nt, Human
aaaguauuugugauuuuuacca

SEQ ID NO: 388264 - RNA, 19 nt, Human
ugaggggcucacagucuca

SEQ ID NO: 388265 - RNA, 22 nt, Human
cccugcagaccaaugccauaga

SEQ ID NO: 388266 - RNA, 22 nt, Human
ccagcuuucugggugguuucug

SEQ ID NO: 388267 - RNA, 22 nt, Human
ggguacaaagauuucauaagau

SEQ ID NO: 388268 - RNA, 22 nt, Human
auuugucucugcacuuuacuca

SEQ ID NO: 388269 - RNA, 22 nt, Human
guauagaaacccagaaagauag

SEQ ID NO: 388270 - RNA, 22 nt, Human
ugcagccaucgcagagucugua

SEQ ID NO: 388271 - RNA, 22 nt, Human
aggccugucuggggcucagcca

SEQ ID NO: 388272 - RNA, 22 nt, Human
gaauuucagggucugguaggaa

SEQ ID NO: 388273 - RNA, 23 nt, Human
ucuguucaaggcuuucuccuuga

SEQ ID NO: 388274 - RNA, 22 nt, Human
gagugaaaaaggaagggccaua

SEQ ID NO: 388275 - RNA, 22 nt, Human
uggccuggaaccuggcagggac

SEQ ID NO: 388276 - RNA, 22 nt, Human
ucagagaacacagaggugaugu

SEQ ID NO: 388277 - RNA, 22 nt, Human
uccucaggaucuaggagugcuu

SEQ ID NO: 388278 - RNA, 22 nt, Human
guagccauuggcaaugaagccu

SEQ ID NO: 388279 - RNA, 22 nt, Human
caacuuucuguuaaauguuagu

SEQ ID NO: 388280 - RNA, 22 nt, Human
caggaugagaagggcucuuacg

SEQ ID NO: 388281 - RNA, 21 nt, Human
gcaggguccuuuccauuccua

SEQ ID NO: 388282 - RNA, 22 nt, Human
gaacagaauuaccgaagaucug

SEQ ID NO: 388283 - RNA, 22 nt, Human
agggcugggcugcuuguuguca

SEQ ID NO: 388284 - RNA, 22 nt, Human
agaugaaaauacgugacuuuaa

SEQ ID NO: 388285 - RNA, 22 nt, Human
gagaggccauggcugugcagug

SEQ ID NO: 388286 - RNA, 22 nt, Human
cacugaagguaggaccaaggcu

SEQ ID NO: 388287 - RNA, 22 nt, Human
ccagggcuggguuugucggugu

SEQ ID NO: 388288 - RNA, 22 nt, Human
gagugcaggccugagcaccauc

SEQ ID NO: 388289 - RNA, 22 nt, Human
uggauuagguacuaugaauaua

SEQ ID NO: 388290 - RNA, 22 nt, Human
gaagucuggcugacgagaguua

SEQ ID NO: 388291 - RNA, 22 nt, Human
uauuucuugaguggucaguuuc

SEQ ID NO: 388292 - RNA, 22 nt, Human
ucagaagcaaacaucacucuag

SEQ ID NO: 388293 - RNA, 22 nt, Human
ucccaggaauugaagccagugu

SEQ ID NO: 388294 - RNA, 22 nt, Human
acucagaggcagcugcucaccc

SEQ ID NO: 388295 - RNA, 18 nt, Human
ucauuuguuuugcaugaa

SEQ ID NO: 388296 - RNA, 22 nt, Human
agcuguguguuuccacugagcu

SEQ ID NO: 388297 - RNA, 22 nt, Human
uuaaagaguaaucauaggucaa

SEQ ID NO: 388298 - RNA, 21 nt, Human
gcagcuggucucagagcuugc

SEQ ID NO: 388299 - RNA, 22 nt, Human
agcagccaggaaucugcagagc

SEQ ID NO: 388300 - RNA, 22 nt, Human
ccagagccucgcccggagccuc

SEQ ID NO: 388301 - RNA, 22 nt, Human
gaugcagaaaguagacaccauc

SEQ ID NO: 388302 - RNA, 22 nt, Human
ugugugaaucuauugaauauau

SEQ ID NO: 388303 - RNA, 22 nt, Human
agaaauguauagugaauuuuuc

SEQ ID NO: 388304 - RNA, 20 nt, Human
uuccagagaucugcauuuua

SEQ ID NO: 388305 - RNA, 22 nt, Human
cccaggagauggugcguggucu

SEQ ID NO: 388306 - RNA, 22 nt, Human
auacuuuggggguuaguguaga

SEQ ID NO: 388307 - RNA, 22 nt, Human
ucaggagaaagccaauuagagu

SEQ ID NO: 388308 - RNA, 23 nt, Human
ugcucccaggugacgcugcuguu

SEQ ID NO: 388309 - RNA, 22 nt, Human
uuguaacaaucugucauaaaug

SEQ ID NO: 388310 - RNA, 22 nt, Human
caggcccagugaucagggcucu

SEQ ID NO: 388311 - RNA, 22 nt, Human
guauuuaauuccauuaaguuag

SEQ ID NO: 388312 - RNA, 22 nt, Human
gggucuggcaugcugagaugga

SEQ ID NO: 388313 - RNA, 22 nt, Human
uuagccauuaauguccugugca

SEQ ID NO: 388314 - RNA, 22 nt, Human
ccagaagacaagaauguucuua

SEQ ID NO: 388315 - RNA, 22 nt, Human
aaaugucuuucuucugcuacgu

SEQ ID NO: 388316 - RNA, 22 nt, Human
aggcccuggcacugccugggag

SEQ ID NO: 388317 - RNA, 22 nt, Human
aagcuuccugaaugcucauuua

SEQ ID NO: 388318 - RNA, 22 nt, Human
ccaguggacaauuucugaggaa

SEQ ID NO: 388319 - RNA, 22 nt, Human
ggcuucagugagcugagcucac

SEQ ID NO: 388320 - RNA, 22 nt, Human
acacacuguugcucauccaggc

SEQ ID NO: 388321 - RNA, 22 nt, Human
gaagccaggggccugacaggca

SEQ ID NO: 388322 - RNA, 22 nt, Human
acugagcugugacaaugcuuaa

SEQ ID NO: 388323 - RNA, 22 nt, Human
acagcacaaucugagucccaga

SEQ ID NO: 388324 - RNA, 22 nt, Human
gugacucacacaggccugggcu

SEQ ID NO: 388325 - RNA, 22 nt, Human
uacagaaaaacuggcauugaag

SEQ ID NO: 388326 - RNA, 22 nt, Human
aauguugaggauaucagaaaau

SEQ ID NO: 388327 - RNA, 22 nt, Human
cugcccuggcagccuaccaugg

SEQ ID NO: 388328 - RNA, 22 nt, Human
agcugaggcauggacaggcugc

SEQ ID NO: 388329 - RNA, 22 nt, Human
cagaauguagaucaucaucaag

SEQ ID NO: 388330 - RNA, 22 nt, Human
guuucaaagcacagcucacauu

SEQ ID NO: 388331 - RNA, 22 nt, Human
uucacaggcuuggagguggggg

SEQ ID NO: 388332 - RNA, 23 nt, Human
uggagcugggcucagacccuggg

SEQ ID NO: 388333 - RNA, 22 nt, Human
aagaacaguugggaggugagcc

SEQ ID NO: 388334 - RNA, 19 nt, Human
gagcccucuccauggccac

SEQ ID NO: 388335 - RNA, 22 nt, Human
ugggacacccucacgccugcac

SEQ ID NO: 388336 - RNA, 22 nt, Human
uuucugcugugcuuucuugcgu

SEQ ID NO: 388337 - RNA, 22 nt, Human
gaagccccaaacccucgccauc

SEQ ID NO: 388338 - RNA, 22 nt, Human
uguauuagagcaguagaauuau

SEQ ID NO: 388339 - RNA, 22 nt, Human
ccaggagagcagaagcccaggc

SEQ ID NO: 388340 - RNA, 22 nt, Human
ccucauggccuugagcugaggg

SEQ ID NO: 388341 - RNA, 22 nt, Human
uuucacauaaauauuaugccua

SEQ ID NO: 388342 - RNA, 22 nt, Human
gccaggagggaaaggacaauuu

SEQ ID NO: 388343 - RNA, 22 nt, Human
ugaaggccuaacuuccagugcu

SEQ ID NO: 388344 - RNA, 22 nt, Human
cauuuuauccucugggaagcua

SEQ ID NO: 388345 - RNA, 19 nt, Human
guggccagggcaggggcug

SEQ ID NO: 388346 - RNA, 22 nt, Human
gagucuuugguaaagucugcug

SEQ ID NO: 388347 - RNA, 22 nt, Human
uauuugaaaguguacaaaaacu

SEQ ID NO: 388348 - RNA, 22 nt, Human
uuuuuccuagcgauuugucagc

SEQ ID NO: 388349 - RNA, 22 nt, Human
ugaugcuucacgcugaauaugc

SEQ ID NO: 388350 - RNA, 22 nt, Human
ucuuuauugcuacugguuuguc

SEQ ID NO: 388351 - RNA, 22 nt, Human
ucugggagauccaagcagaacu

SEQ ID NO: 388352 - RNA, 22 nt, Human
ccaaaugcuccacugacuuugg

SEQ ID NO: 388353 - RNA, 22 nt, Human
ccagcagggaaaaacccaccaa

SEQ ID NO: 388354 - RNA, 23 nt, Human
gggauauggaccuuggaggaguc

SEQ ID NO: 388355 - RNA, 21 nt, Human
ugauuuccaucuuaaaauaaa

SEQ ID NO: 388356 - RNA, 22 nt, Human
cuaauacucauuucuguaacuc

SEQ ID NO: 388357 - RNA, 22 nt, Human
ggcucaggagaggggcuaaaag

SEQ ID NO: 388358 - RNA, 22 nt, Human
aguucccaggugaugcugaugu

SEQ ID NO: 388359 - RNA, 21 nt, Human
aaggcagaagcauggaaugag

SEQ ID NO: 388360 - RNA, 22 nt, Human
gggaccugccauugcucacagg

SEQ ID NO: 388361 - RNA, 22 nt, Human
aggggcugggacagagccaagc

SEQ ID NO: 388362 - RNA, 22 nt, Human
ucagaagcaggagugugcacaa

SEQ ID NO: 388363 - RNA, 22 nt, Human
agccucucuccagcuuggcaga

SEQ ID NO: 388364 - RNA, 22 nt, Human
gcaucuucacacaaagccagug

SEQ ID NO: 388365 - RNA, 22 nt, Human
gacccaggcccaaggcugccag

SEQ ID NO: 388366 - RNA, 22 nt, Human
auuucacaaaccauccugauuu

SEQ ID NO: 388367 - RNA, 22 nt, Human
gugcucacugugagacguccug

SEQ ID NO: 388368 - RNA, 22 nt, Human
agcucccagggcugggcaaguu

SEQ ID NO: 388369 - RNA, 22 nt, Human
cccuguccuggaugggagcacu

SEQ ID NO: 388370 - RNA, 22 nt, Human
acucaggagggaucagcuauca

SEQ ID NO: 388371 - RNA, 22 nt, Human
cugggcugugguguggcccaaa

SEQ ID NO: 388372 - RNA, 22 nt, Human
uuaucguacgcuucagaaauuu

SEQ ID NO: 388373 - RNA, 22 nt, Human
auccuugacacacuccaguacu

SEQ ID NO: 388374 - RNA, 22 nt, Human
ggagaaugauauauagcucagu

SEQ ID NO: 388375 - RNA, 22 nt, Human
aggcacugacucaagggagcca

SEQ ID NO: 388376 - RNA, 22 nt, Human
gcauggcugguguccugaggga

SEQ ID NO: 388377 - RNA, 22 nt, Human
gucucagauaacauguauucua

SEQ ID NO: 388378 - RNA, 22 nt, Human
auaaaacuuggguaugaucccu

SEQ ID NO: 388379 - RNA, 22 nt, Human
uugaaagaagaagcugcgaugu

SEQ ID NO: 388380 - RNA, 22 nt, Human
cagcuugggaguuugguuuuau

SEQ ID NO: 388381 - RNA, 22 nt, Human
ugggagagugcucaaugugcaa

SEQ ID NO: 388382 - RNA, 22 nt, Human
gaagaggaugacaggagccggu

SEQ ID NO: 388383 - RNA, 21 nt, Human
uucagcaguccucuagagaua

SEQ ID NO: 388384 - RNA, 22 nt, Human
acagaaauaacuuuuuauguuu

SEQ ID NO: 388385 - RNA, 22 nt, Human
gccaccuggacagcugugcccu

SEQ ID NO: 388386 - RNA, 22 nt, Human
aucaaaguucguaacugauaac

SEQ ID NO: 388387 - RNA, 22 nt, Human
ccagggcacguugggacaguac

SEQ ID NO: 388388 - RNA, 23 nt, Human
uuucauaugguguggaugaagaa

SEQ ID NO: 388389 - RNA, 22 nt, Human
ggagcugaugacgucaccaugg

SEQ ID NO: 388390 - RNA, 20 nt, Human
ccuguucacugcgcaguuuc

SEQ ID NO: 388391 - RNA, 23 nt, Human
augcucugggcugugggaccugc

SEQ ID NO: 388392 - RNA, 20 nt, Human
ugcguguguauuuauuuucu

SEQ ID NO: 388393 - RNA, 22 nt, Human
cuacccagauccaggauggcua

SEQ ID NO: 388394 - RNA, 22 nt, Human
gagcuggugaucagcuggagga

SEQ ID NO: 388395 - RNA, 22 nt, Human
augaacaagagagggaagauuc

SEQ ID NO: 388396 - RNA, 19 nt, Human
cucuggagcagacacugga

SEQ ID NO: 388397 - RNA, 22 nt, Human
aaggugucggcagagccgcuuc

SEQ ID NO: 388398 - RNA, 22 nt, Human
agccagagcagggaauuggaca

SEQ ID NO: 388399 - RNA, 22 nt, Human
cagcugccuucugcgggaaguc

SEQ ID NO: 388400 - RNA, 22 nt, Human
gcagacaggcccaguggaggga

SEQ ID NO: 388401 - RNA, 22 nt, Human
cucuucagauaaaagggauauu

SEQ ID NO: 388402 - RNA, 22 nt, Human
cccagacugcagagcgggcaga

SEQ ID NO: 388403 - RNA, 22 nt, Human
uuccgcuggggccgccuggcgg

SEQ ID NO: 388404 - RNA, 22 nt, Human
cagcaggaggugagaugugacc

SEQ ID NO: 388405 - RNA, 22 nt, Human
ugcugcucaaugagaugccauc

SEQ ID NO: 388406 - RNA, 22 nt, Human
ggcaggugugagaucgaggcca

SEQ ID NO: 388407 - RNA, 22 nt, Human
uguuuuaagagcgcacuuuaua

SEQ ID NO: 388408 - RNA, 22 nt, Human
cuccaguaucuguaggaaaagg

SEQ ID NO: 388409 - RNA, 22 nt, Human
ucacagaauagcacuguaagcg

SEQ ID NO: 388410 - RNA, 22 nt, Human
aggugcugccccgagaaggaug

SEQ ID NO: 388411 - RNA, 22 nt, Human
cagaucuguaguaaaagaucuc

SEQ ID NO: 388412 - RNA, 22 nt, Human
agaaagcaucuccauuguaggu

SEQ ID NO: 388413 - RNA, 22 nt, Human
uggccuggaaaaaugcagaugg

SEQ ID NO: 388414 - RNA, 22 nt, Human
ugccugaugcaggaguaucaga

SEQ ID NO: 388415 - RNA, 22 nt, Human
agggccagaaucccucagucua

SEQ ID NO: 388416 - RNA, 23 nt, Human
ugaaggccuggaggacgcguugu

SEQ ID NO: 388417 - RNA, 22 nt, Human
uucuucaacaaggacacuguua

SEQ ID NO: 388418 - RNA, 22 nt, Human
cacuggggugggccugguagag

SEQ ID NO: 388419 - RNA, 22 nt, Human
ggcugccucuggaagcuggaga

SEQ ID NO: 388420 - RNA, 22 nt, Human
ucucuuaacugguucagcaauu

SEQ ID NO: 388421 - RNA, 22 nt, Human
aaucagaacuucucaggguggg

SEQ ID NO: 388422 - RNA, 22 nt, Human
cagcccagcacuaaguagauuu

SEQ ID NO: 388423 - RNA, 22 nt, Human
ggcuguggucauuaggagguug

SEQ ID NO: 388424 - RNA, 22 nt, Human
acagcuuugggcaaugcuauga

SEQ ID NO: 388425 - RNA, 22 nt, Human
gggagccagcagggcauggagc

SEQ ID NO: 388426 - RNA, 18 nt, Human
acauuucuaggugaaagc

SEQ ID NO: 388427 - RNA, 22 nt, Human
acauuucuuuucaucucuauau

SEQ ID NO: 388428 - RNA, 22 nt, Human
acuugguugaugucauaagguu

SEQ ID NO: 388429 - RNA, 23 nt, Human
acagcaagaggaccagaugugag

SEQ ID NO: 388430 - RNA, 22 nt, Human
cagcugccagcuucucuccauc

SEQ ID NO: 388431 - RNA, 22 nt, Human
gagaaggggugauguggguaau

SEQ ID NO: 388432 - RNA, 22 nt, Human
ugggaccucucuugagagagca

SEQ ID NO: 388433 - RNA, 22 nt, Human
gcaggcagagguggaggagaca

SEQ ID NO: 388434 - RNA, 22 nt, Human
aguaaugucccuuaaauguggu

SEQ ID NO: 388435 - RNA, 22 nt, Human
ugcugcuccccagcacacagca

SEQ ID NO: 388436 - RNA, 22 nt, Human
agguaguguagcugagugggau

SEQ ID NO: 388437 - RNA, 22 nt, Human
ggccugcuauuggugggcagac

SEQ ID NO: 388438 - RNA, 22 nt, Human
agcuggcuccagaaggagucgu

SEQ ID NO: 388439 - RNA, 22 nt, Human
auaauucaugggccuuucaccu

SEQ ID NO: 388440 - RNA, 22 nt, Human
gcagcuuggugaaaggugaugg

SEQ ID NO: 388441 - RNA, 19 nt, Human
guccaguguuuuccaguca

SEQ ID NO: 388442 - RNA, 22 nt, Human
auggcuuucagauggugaaaga

SEQ ID NO: 388443 - RNA, 22 nt, Human
uguguaaauuuauuuacauaaa

SEQ ID NO: 388444 - RNA, 22 nt, Human
ugcagaagaaaacagcugugug

SEQ ID NO: 388445 - RNA, 22 nt, Human
uagcugccuagacagcuauagc

SEQ ID NO: 388446 - RNA, 19 nt, Human
uucauucucuuauuguugu

SEQ ID NO: 388447 - RNA, 22 nt, Human
ggcagaagaaaggcuaagucuc

SEQ ID NO: 388448 - RNA, 22 nt, Human
aaauucuucagguaauuuugau

SEQ ID NO: 388449 - RNA, 22 nt, Human
uuugaagugcaaugaggauucu

SEQ ID NO: 388450 - RNA, 22 nt, Human
aggcuucuaggguuggcagcgg

SEQ ID NO: 388451 - RNA, 18 nt, Human
ggcugagguugacuagaa

SEQ ID NO: 388452 - RNA, 22 nt, Human
aaggcagccaugugcuuugggu

SEQ ID NO: 388453 - RNA, 22 nt, Human
ugaggaagcaaaggcuugugug

SEQ ID NO: 388454 - RNA, 22 nt, Human
gugccagggggcacugaacaga

SEQ ID NO: 388455 - RNA, 22 nt, Human
uuaugacauaugaguacaagua

SEQ ID NO: 388456 - RNA, 22 nt, Human
cggagccugcuuguugcagcug

SEQ ID NO: 388457 - RNA, 22 nt, Human
uauuccuaagucccaacuacau

SEQ ID NO: 388458 - RNA, 22 nt, Human
ccagagcuucggggcggcugua

SEQ ID NO: 388459 - RNA, 22 nt, Human
cucaggaggugguagaggcccu

SEQ ID NO: 388460 - RNA, 21 nt, Human
acagucuccccagaucucucc

SEQ ID NO: 388461 - RNA, 22 nt, Human
gcuggugccuuguuguuguuac

SEQ ID NO: 388462 - RNA, 23 nt, Human
uggacgccgacuuuggaggcgcu

SEQ ID NO: 388463 - RNA, 22 nt, Human
guccaugauucugugacacccu

SEQ ID NO: 388464 - RNA, 22 nt, Human
auguuucaccagcaaauuaccu

SEQ ID NO: 388465 - RNA, 22 nt, Human
agugcagagaccuggucaggca

SEQ ID NO: 388466 - RNA, 22 nt, Human
aggaaggagggcagauauuaag

SEQ ID NO: 388467 - RNA, 22 nt, Human
uuauacuuuauacuacaucauu

SEQ ID NO: 388468 - RNA, 22 nt, Human
ccucuucuaggacguccuugug

SEQ ID NO: 388469 - RNA, 22 nt, Human
caaggccaagucucugugaaga

SEQ ID NO: 388470 - RNA, 21 nt, Human
gaaaggucuuaacuuacagag

SEQ ID NO: 388471 - RNA, 22 nt, Human
uaacauuagguagacauaagcc

SEQ ID NO: 388472 - RNA, 21 nt, Human
ucucuacacuuucacuaggcu

SEQ ID NO: 388473 - RNA, 22 nt, Human
uucaccgugaaccgauuccuca

SEQ ID NO: 388474 - RNA, 22 nt, Human
ucugagcuuuuauuaucaaccu

SEQ ID NO: 388475 - RNA, 22 nt, Human
cagggcuguuagcugcugcucu

SEQ ID NO: 388476 - RNA, 22 nt, Human
cuacacaguucugccuaauggc

SEQ ID NO: 388477 - RNA, 22 nt, Human
gaggcaggcagauugcuugagg

SEQ ID NO: 388478 - RNA, 22 nt, Human
uccugaaaaauuacauguucag

SEQ ID NO: 388479 - RNA, 18 nt, Human
uuaagagcugaaagggga

SEQ ID NO: 388480 - RNA, 22 nt, Human
aaguguuuauuuauaacgaucu

SEQ ID NO: 388481 - RNA, 23 nt, Human
ggacagggcccugcccuauggcc

SEQ ID NO: 388482 - RNA, 22 nt, Human
agucccagacuccaguuuucug

SEQ ID NO: 388483 - RNA, 21 nt, Human
augggcagaggcagagaggcu

SEQ ID NO: 388484 - RNA, 22 nt, Human
ucugccuggauuuuggaaagcu

SEQ ID NO: 388485 - RNA, 22 nt, Human
gauuucuuuaugaaguacagaa

SEQ ID NO: 388486 - RNA, 22 nt, Human
gaaggccacaaaaaaugucaua

SEQ ID NO: 388487 - RNA, 22 nt, Human
cccaggaaacccgaaggcgacc

SEQ ID NO: 388488 - RNA, 22 nt, Human
ccagggcauguaacuaauggug

SEQ ID NO: 388489 - RNA, 22 nt, Human
agugcugucuccuucccccggg

SEQ ID NO: 388490 - RNA, 21 nt, Human
ccauaauuuuguuucagaagu

SEQ ID NO: 388491 - RNA, 22 nt, Human
ggagccugacagugcccagcau

SEQ ID NO: 388492 - RNA, 22 nt, Human
uccaggagugauaaggccacug

SEQ ID NO: 388493 - RNA, 22 nt, Human
caaaggagguaaugggugugag

SEQ ID NO: 388494 - RNA, 22 nt, Human
agaggcggagcuugcagugagc

SEQ ID NO: 388495 - RNA, 22 nt, Human
gaaggcugaugacagauucugc

SEQ ID NO: 388496 - RNA, 22 nt, Human
ugggccacggggguggagagcu

SEQ ID NO: 388497 - RNA, 19 nt, Human
agaggcagucuccaacagg

SEQ ID NO: 388498 - RNA, 22 nt, Human
cacauuucugugagucaauauu

SEQ ID NO: 388499 - RNA, 22 nt, Human
uguggaaagucaaguuccagga

SEQ ID NO: 388500 - RNA, 22 nt, Human
ggggugggcgugcagggacacc

SEQ ID NO: 388501 - RNA, 22 nt, Human
uggcagcacaagguggcccaug

SEQ ID NO: 388502 - RNA, 22 nt, Human
agccaggauuggcugagccuua

SEQ ID NO: 388503 - RNA, 22 nt, Human
cugcagagcuaggcugagugaa

SEQ ID NO: 388504 - RNA, 22 nt, Human
agaggacagacggaaagugcca

SEQ ID NO: 388505 - RNA, 22 nt, Human
uacuuugucauucuaaccuucc

SEQ ID NO: 388506 - RNA, 22 nt, Human
guucuucaggcugugcucuaga

SEQ ID NO: 388507 - RNA, 22 nt, Human
cuggcagcucuacucagagccu

SEQ ID NO: 388508 - RNA, 22 nt, Human
ccuggcagguggcgcccucggc

SEQ ID NO: 388509 - RNA, 22 nt, Human
gauccuugcaacucugugaggu

SEQ ID NO: 388510 - RNA, 22 nt, Human
caagaacauugugaucacuuca

SEQ ID NO: 388511 - RNA, 22 nt, Human
ucagcagggcugugguguggcu

SEQ ID NO: 388512 - RNA, 22 nt, Human
cagcugacagugaggugggggc

SEQ ID NO: 388513 - RNA, 22 nt, Human
ccagccagucccgcaugaccgc

SEQ ID NO: 388514 - RNA, 20 nt, Human
agucucuguagugccugaga

SEQ ID NO: 388515 - RNA, 22 nt, Human
gaaaguuucuucauuaagaugu

SEQ ID NO: 388516 - RNA, 22 nt, Human
uggcaaggcugugggggcagag

SEQ ID NO: 388517 - RNA, 22 nt, Human
gaccucagugaauggucaugua

SEQ ID NO: 388518 - RNA, 22 nt, Human
uuggagagauuaucagaccagc

SEQ ID NO: 388519 - RNA, 22 nt, Human
aaucaugugggauagucugcuc

SEQ ID NO: 388520 - RNA, 22 nt, Human
gaauacaugauacaugaacugc

SEQ ID NO: 388521 - RNA, 22 nt, Human
cccaagggagugccuggucaac

SEQ ID NO: 388522 - RNA, 22 nt, Human
aggaccaacauagcagcagugg

SEQ ID NO: 388523 - RNA, 22 nt, Human
acuggaucuaauugguuauagu

SEQ ID NO: 388524 - RNA, 22 nt, Human
uucugcagcccaacaguaguuu

SEQ ID NO: 388525 - RNA, 22 nt, Human
accugcaggggugcucucuggg

SEQ ID NO: 388526 - RNA, 22 nt, Human
caugucuguguacacaugcaca

SEQ ID NO: 388527 - RNA, 22 nt, Human
ucugucuucaucagcaugugau

SEQ ID NO: 388528 - RNA, 22 nt, Human
cucagagucugcauuucuguca

SEQ ID NO: 388529 - RNA, 22 nt, Human
agcagggcuuugucucugugaa

SEQ ID NO: 388530 - RNA, 21 nt, Human
cuugaaagguagagucuacag

SEQ ID NO: 388531 - RNA, 22 nt, Human
ccagggugugggcgucggcacg

SEQ ID NO: 388532 - RNA, 22 nt, Human
auuuagaaauuccaaaaguauu

SEQ ID NO: 388533 - RNA, 22 nt, Human
caugcuuauucauucugcuaac

SEQ ID NO: 388534 - RNA, 22 nt, Human
uaggugucugcucuuauuuaac

SEQ ID NO: 388535 - RNA, 22 nt, Human
ucugcugcugagcacacuccua

SEQ ID NO: 388536 - RNA, 22 nt, Human
gcugccucccccauggcuggaa

SEQ ID NO: 388537 - RNA, 22 nt, Human
uagcuuuaaugaguugguaaga

SEQ ID NO: 388538 - RNA, 22 nt, Human
uuuccucugucaugacagcuga

SEQ ID NO: 388539 - RNA, 22 nt, Human
aaucuguucuacucuauucaga

SEQ ID NO: 388540 - RNA, 22 nt, Human
ucuuaauugagaacaguguagg

SEQ ID NO: 388541 - RNA, 22 nt, Human
guucacauccuugugaggauuu

SEQ ID NO: 388542 - RNA, 22 nt, Human
agaauucuggaguugggaggaa

SEQ ID NO: 388543 - RNA, 22 nt, Human
auuucaacauucucaguuguag

SEQ ID NO: 388544 - RNA, 22 nt, Human
ccuggaugauccaugucaugga

SEQ ID NO: 388545 - RNA, 22 nt, Human
ggcagaguggagugcggccucc

SEQ ID NO: 388546 - RNA, 22 nt, Human
caggcagauuugcugcccucca

SEQ ID NO: 388547 - RNA, 22 nt, Human
uacauauacugagugauuugcu

SEQ ID NO: 388548 - RNA, 22 nt, Human
gggacuguaaauucauauggcc

SEQ ID NO: 388549 - RNA, 22 nt, Human
gacaggaggcagagcucaggug

SEQ ID NO: 388550 - RNA, 22 nt, Human
agccuguggaucccugcacugg

SEQ ID NO: 388551 - RNA, 22 nt, Human
ucaauuaugccauugcaauauu

SEQ ID NO: 388552 - RNA, 22 nt, Human
caaaugcauaguuuauaagaag

SEQ ID NO: 388553 - RNA, 22 nt, Human
gucccagaaacauauugcuggu

SEQ ID NO: 388554 - RNA, 22 nt, Human
gguuggaggugggaauagcuag

SEQ ID NO: 388555 - RNA, 22 nt, Human
agcagcauuuaaggauccaagu

SEQ ID NO: 388556 - RNA, 22 nt, Human
gcuccuucaggugguagcuguu

SEQ ID NO: 388557 - RNA, 22 nt, Human
aggcagcuggacauaacuaacc

SEQ ID NO: 388558 - RNA, 22 nt, Human
ucuccuccuuuuuucaacauag

SEQ ID NO: 388559 - RNA, 22 nt, Human
gcagcugcaggcaggcuugcug

SEQ ID NO: 388560 - RNA, 22 nt, Human
agcauuuaguuaguaaauguuu

SEQ ID NO: 388561 - RNA, 22 nt, Human
aucaguuuuuauuaauguagcu

SEQ ID NO: 388562 - RNA, 22 nt, Human
cucuguccacagguuugucccu

SEQ ID NO: 388563 - RNA, 22 nt, Human
acuaagugauucuaagcaucuu

SEQ ID NO: 388564 - RNA, 22 nt, Human
ugagaagcugcuugugcuguau

SEQ ID NO: 388565 - RNA, 22 nt, Human
cagucaccuagacagaacuuac

SEQ ID NO: 388566 - RNA, 22 nt, Human
ggccauggaccccgagcugacc

SEQ ID NO: 388567 - RNA, 22 nt, Human
uaagaaucggucgcaacagagg

SEQ ID NO: 388568 - RNA, 22 nt, Human
uaggcuggaacuuaggcagagg

SEQ ID NO: 388569 - RNA, 22 nt, Human
cagggacaugacuggucucugu

SEQ ID NO: 388570 - RNA, 20 nt, Human
uguauauuuucugguguaaa

SEQ ID NO: 388571 - RNA, 22 nt, Human
agugcauuauauguuucaaugg

SEQ ID NO: 388572 - RNA, 22 nt, Human
cucuggccagagccugcgggaa

SEQ ID NO: 388573 - RNA, 22 nt, Human
gcauuccugagaaugcagagug

SEQ ID NO: 388574 - RNA, 22 nt, Human
cggcugaggaucuccaggccug

SEQ ID NO: 388575 - RNA, 22 nt, Human
aguauucuggaauucuauguga

SEQ ID NO: 388576 - RNA, 22 nt, Human
gccaggagcaugucauuguuga

SEQ ID NO: 388577 - RNA, 22 nt, Human
ucaacuuugaaaccauagugaa

SEQ ID NO: 388578 - RNA, 22 nt, Human
ccugccaggacauugcuugaag

SEQ ID NO: 388579 - RNA, 22 nt, Human
aguggcaguggcugggcagagc

SEQ ID NO: 388580 - RNA, 22 nt, Human
uauaagaaauugccaaccuguu

SEQ ID NO: 388581 - RNA, 22 nt, Human
ugccucagcugaggccgcucca

SEQ ID NO: 388582 - RNA, 22 nt, Human
ugaaggagcucaaugaugaugc

SEQ ID NO: 388583 - RNA, 22 nt, Human
auugacaauuagcccuuaggug

SEQ ID NO: 388584 - RNA, 22 nt, Human
cagggcaggaauuugacauugc

SEQ ID NO: 388585 - RNA, 22 nt, Human
ggucccaggauugguugcgcag

SEQ ID NO: 388586 - RNA, 22 nt, Human
guguccuuauaagaagagaugc

SEQ ID NO: 388587 - RNA, 22 nt, Human
uacaaagcuguauagccugguc

SEQ ID NO: 388588 - RNA, 22 nt, Human
ggcuccugauaggagaaugcgg

SEQ ID NO: 388589 - RNA, 22 nt, Human
agacagcugggaaauggagugu

SEQ ID NO: 388590 - RNA, 22 nt, Human
gcugcccaggagagguggggcu

SEQ ID NO: 388591 - RNA, 22 nt, Human
cccacagguccccaugaacucg

SEQ ID NO: 388592 - RNA, 22 nt, Human
agcccagggacagggcggaugu

SEQ ID NO: 388593 - RNA, 22 nt, Human
aaaucuaggcucauccuggucc

SEQ ID NO: 388594 - RNA, 23 nt, Human
aggcagugucucuuauccugucc

SEQ ID NO: 388595 - RNA, 22 nt, Human
aaacaucaccauuuuaccuaau

SEQ ID NO: 388596 - RNA, 22 nt, Human
aaagauuauggcauugaaauac

SEQ ID NO: 388597 - RNA, 22 nt, Human
uucagaaaaagaccauugcaau

SEQ ID NO: 388598 - RNA, 22 nt, Human
uuuauuugucuugccauuuagu

SEQ ID NO: 388599 - RNA, 22 nt, Human
ugcccuguuaucuuggaagagu

SEQ ID NO: 388600 - RNA, 22 nt, Human
ugaggcucaagaaucugcauuu

SEQ ID NO: 388601 - RNA, 22 nt, Human
uggcaguggcucagagugcaga

SEQ ID NO: 388602 - RNA, 22 nt, Human
ucaaaggcaccaaggucacugc

SEQ ID NO: 388603 - RNA, 22 nt, Human
gucuuuaugguaugaaaacuga

SEQ ID NO: 388604 - RNA, 22 nt, Human
ugcugggcuagaagcugaggcc

SEQ ID NO: 388605 - RNA, 22 nt, Human
uuuaaugauagcuguuucacau

SEQ ID NO: 388606 - RNA, 22 nt, Human
acaugauuggacuccuuccccu

SEQ ID NO: 388607 - RNA, 22 nt, Human
ggcuucuccccuuugagucuuc

SEQ ID NO: 388608 - RNA, 19 nt, Human
cugcagggaugugcagagu

SEQ ID NO: 388609 - RNA, 22 nt, Human
cuguagccaguuuggccucacc

SEQ ID NO: 388610 - RNA, 22 nt, Human
uuauucagauuggcuacaggau

SEQ ID NO: 388611 - RNA, 22 nt, Human
ucuggcuccacaccucacugca

SEQ ID NO: 388612 - RNA, 22 nt, Human
auuuuucucuuuccacugagau

SEQ ID NO: 388613 - RNA, 22 nt, Human
ggaccugccagaacucaggcua

SEQ ID NO: 388614 - RNA, 22 nt, Human
guauuagguuggugcaaaagua

SEQ ID NO: 388615 - RNA, 22 nt, Human
uaggcagccagcaucaguuggg

SEQ ID NO: 388616 - RNA, 22 nt, Human
auauuccauugguuucccuucu

SEQ ID NO: 388617 - RNA, 20 nt, Human
uccaguuuuggagacauucu

SEQ ID NO: 388618 - RNA, 22 nt, Human
cccagggcuuuucucacuagac

SEQ ID NO: 388619 - RNA, 22 nt, Human
gccuggcaaggcccuguugacu

SEQ ID NO: 388620 - RNA, 22 nt, Human
ugcuucaaguugaaauauucuu

SEQ ID NO: 388621 - RNA, 22 nt, Human
gccaagagaaugugagagaaau

SEQ ID NO: 388622 - RNA, 19 nt, Human
cagauguuuucaguucauu

SEQ ID NO: 388623 - RNA, 22 nt, Human
ucacugcaaggaggcuucucaa

SEQ ID NO: 388624 - RNA, 22 nt, Human
auucuucaguauguguggauug

SEQ ID NO: 388625 - RNA, 22 nt, Human
ugagccaggcucaagugauccu

SEQ ID NO: 388626 - RNA, 22 nt, Human
aacuagucagugauucucagaa

SEQ ID NO: 388627 - RNA, 22 nt, Human
ggccucuguuuggagccaggau

SEQ ID NO: 388628 - RNA, 22 nt, Human
agcucccagagcucgagaguaa

SEQ ID NO: 388629 - RNA, 22 nt, Human
auaauuuaaauuaguaugugau

SEQ ID NO: 388630 - RNA, 21 nt, Human
ccugggagaucagcugccuuc

SEQ ID NO: 388631 - RNA, 21 nt, Human
uugcaccaugauaaauucaga

SEQ ID NO: 388632 - RNA, 22 nt, Human
uuuaggcagcagugaggaugaa

SEQ ID NO: 388633 - RNA, 22 nt, Human
ucaaugaugcugaagguagcgu

SEQ ID NO: 388634 - RNA, 22 nt, Human
uugaaagugccaaguccuagug

SEQ ID NO: 388635 - RNA, 22 nt, Human
gcagagcucuguucuuaucucc

SEQ ID NO: 388636 - RNA, 20 nt, Human
ugaaaggugggaauuguggg

SEQ ID NO: 388637 - RNA, 22 nt, Human
gcccaggauaaugcugucccug

SEQ ID NO: 388638 - RNA, 22 nt, Human
ggcugccugcuccuccugcacg

SEQ ID NO: 388639 - RNA, 22 nt, Human
aauugugcuaugauuaugaaag

SEQ ID NO: 388640 - RNA, 22 nt, Human
aaacagcugucauuguuuuaaa

SEQ ID NO: 388641 - RNA, 22 nt, Human
ucacaggagggagagacaccca

SEQ ID NO: 388642 - RNA, 21 nt, Human
gcacagugccaggcacacagu

SEQ ID NO: 388643 - RNA, 22 nt, Human
ucagagaagcugccaggcgagc

SEQ ID NO: 388644 - RNA, 22 nt, Human
uggcucagaggggaagugguuu

SEQ ID NO: 388645 - RNA, 22 nt, Human
agagcccucuucacugccccuu

SEQ ID NO: 388646 - RNA, 22 nt, Human
cacccagcagcacuuaagacua

SEQ ID NO: 388647 - RNA, 22 nt, Human
cagcuguguagaugcaggguca

SEQ ID NO: 388648 - RNA, 22 nt, Human
cuacuuuaauuuucugcagaga

SEQ ID NO: 388649 - RNA, 22 nt, Human
cacagcuuguuuagugacucac

SEQ ID NO: 388650 - RNA, 22 nt, Human
cauugaaauauggaaacugaug

SEQ ID NO: 388651 - RNA, 22 nt, Human
ucccaggacaugggcucugcuc

SEQ ID NO: 388652 - RNA, 22 nt, Human
gcagaauuggauaguugugaua

SEQ ID NO: 388653 - RNA, 19 nt, Human
ucuggcuccugccaggcug

SEQ ID NO: 388654 - RNA, 22 nt, Human
aucuuucagggccauuuguauu

SEQ ID NO: 388655 - RNA, 22 nt, Human
uuuuccagagcugucucuugca

SEQ ID NO: 388656 - RNA, 22 nt, Human
ucugagcuggagcccaucaccu

SEQ ID NO: 388657 - RNA, 22 nt, Human
ugggggucaggaugaggccuug

SEQ ID NO: 388658 - RNA, 22 nt, Human
accaggcaaaaccacaggagca

SEQ ID NO: 388659 - RNA, 22 nt, Human
agcuugauuucucugcagugug

SEQ ID NO: 388660 - RNA, 22 nt, Human
aguaaaauuaauggaucagaag

SEQ ID NO: 388661 - RNA, 22 nt, Human
cucagcuggcaauucuggcucc

SEQ ID NO: 388662 - RNA, 22 nt, Human
gucccagggaagaaggcagcac

SEQ ID NO: 388663 - RNA, 22 nt, Human
ggaagagagggcugggccucaa

SEQ ID NO: 388664 - RNA, 22 nt, Human
cuggcuuucuguuauaaagaca

SEQ ID NO: 388665 - RNA, 17 nt, Human
ucugggcuucagugguc

SEQ ID NO: 388666 - RNA, 22 nt, Human
uaaaucaguuucucuuauuggu

SEQ ID NO: 388667 - RNA, 19 nt, Human
gcgaggaagucacuguggc

SEQ ID NO: 388668 - RNA, 21 nt, Human
cuguuucuugugaagugacac

SEQ ID NO: 388669 - RNA, 22 nt, Human
ucccucuguguugggcaugccu

SEQ ID NO: 388670 - RNA, 22 nt, Human
cuuccucccccacacacucacu

SEQ ID NO: 388671 - RNA, 21 nt, Human
ugggaccuagcuuugcacagg

SEQ ID NO: 388672 - RNA, 22 nt, Human
cuuggggcugucacucuggcau

SEQ ID NO: 388673 - RNA, 22 nt, Human
aagcagccucauuugugguaag

SEQ ID NO: 388674 - RNA, 22 nt, Human
uggagcagcaucacuuugagcu

SEQ ID NO: 388675 - RNA, 22 nt, Human
uauuucugucagccagauaugg

SEQ ID NO: 388676 - RNA, 22 nt, Human
auaacaugaccugugcuucaca

SEQ ID NO: 388677 - RNA, 22 nt, Human
ggagggcaucaaucaggccugg

SEQ ID NO: 388678 - RNA, 22 nt, Human
cuguagcagugugcucuuuuuc

SEQ ID NO: 388679 - RNA, 22 nt, Human
ugacagaaagaauaugucaauc

SEQ ID NO: 388680 - RNA, 22 nt, Human
ucaggaguccugccugcagccu

SEQ ID NO: 388681 - RNA, 22 nt, Human
ccugccuggcugucagcagagc

SEQ ID NO: 388682 - RNA, 22 nt, Human
gagcuuuagcugagaccugcuu

SEQ ID NO: 388683 - RNA, 22 nt, Human
gauuucuuuagguguaauagug

SEQ ID NO: 388684 - RNA, 22 nt, Human
uuacacaacaucuguauuauua

SEQ ID NO: 388685 - RNA, 22 nt, Human
cuggagccccaggcugugcaga

SEQ ID NO: 388686 - RNA, 22 nt, Human
ggcaaaguuuucaucucauaac

SEQ ID NO: 388687 - RNA, 22 nt, Human
ugcuguagcccugcacagugca

SEQ ID NO: 388688 - RNA, 22 nt, Human
ugcuggaggaguuuacuguggc

SEQ ID NO: 388689 - RNA, 22 nt, Human
aagaguuaagcaacagauacca

SEQ ID NO: 388690 - RNA, 22 nt, Human
uaggcagaauuguugaaugaag

SEQ ID NO: 388691 - RNA, 22 nt, Human
ucugagaguagagcugccucuu

SEQ ID NO: 388692 - RNA, 22 nt, Human
agaagccauguuuaguaggaug

SEQ ID NO: 388693 - RNA, 22 nt, Human
agugaagaggaaguggggcaca

SEQ ID NO: 388694 - RNA, 22 nt, Human
uccagcuugacaaaugauuuua

SEQ ID NO: 388695 - RNA, 22 nt, Human
cgucuuccucuuacgaugcgcu

SEQ ID NO: 388696 - RNA, 22 nt, Human
ugcagcaggagccaggccuggu

SEQ ID NO: 388697 - RNA, 16 nt, Human
ugggcagaugagaaga

SEQ ID NO: 388698 - RNA, 22 nt, Human
caaggccagggaauuuuucugg

SEQ ID NO: 388699 - RNA, 22 nt, Human
ugcuugagacacauaugaauuu

SEQ ID NO: 388700 - RNA, 22 nt, Human
ugcagcagacugaguaugagaa

SEQ ID NO: 388701 - RNA, 20 nt, Human
acagaauaugcugguugugg

SEQ ID NO: 388702 - RNA, 22 nt, Human
uccauguggccagacacuggca

SEQ ID NO: 388703 - RNA, 22 nt, Human
ugcaggaacagaacucacuccc

SEQ ID NO: 388704 - RNA, 22 nt, Human
cagugaggaguccagggcagag

SEQ ID NO: 388705 - RNA, 22 nt, Human
ugcuuuauaggggauugcaggc

SEQ ID NO: 388706 - RNA, 22 nt, Human
gaggagaggccaucguuguuau

SEQ ID NO: 388707 - RNA, 22 nt, Human
ucagcuuuggucacauugaguu

SEQ ID NO: 388708 - RNA, 22 nt, Human
cagcugagaaauggggaaaggg

SEQ ID NO: 388709 - RNA, 22 nt, Human
cuuauguaaaacggaaagggaa

SEQ ID NO: 388710 - RNA, 22 nt, Human
uuucaagaacaacauucauuca

SEQ ID NO: 388711 - RNA, 22 nt, Human
uggcugucagcugccuggugcg

SEQ ID NO: 388712 - RNA, 22 nt, Human
gcauguguugguuuaugcaugu

SEQ ID NO: 388713 - RNA, 22 nt, Human
ccacccagcagaggaggcaaga

SEQ ID NO: 388714 - RNA, 22 nt, Human
uucaagaugucuucacaauagu

SEQ ID NO: 388715 - RNA, 22 nt, Human
ucucagggccucccucuguuuc

SEQ ID NO: 388716 - RNA, 22 nt, Human
ucuauaaauuaugcagucucag

SEQ ID NO: 388717 - RNA, 23 nt, Human
aaauuauugcucuucaauugccu

SEQ ID NO: 388718 - RNA, 22 nt, Human
gcccagcuggcuuccagcacau

SEQ ID NO: 388719 - RNA, 22 nt, Human
uaguuaggguucugcagagaca

SEQ ID NO: 388720 - RNA, 22 nt, Human
uaagaagcuucugcuaaugccu

SEQ ID NO: 388721 - RNA, 22 nt, Human
agcuuuauucaugauuucaggg

SEQ ID NO: 388722 - RNA, 22 nt, Human
agggcccauagaucgucagcuu

SEQ ID NO: 388723 - RNA, 23 nt, Human
agggaaaguaguaauggccuuug

SEQ ID NO: 388724 - RNA, 22 nt, Human
aguccuuaugagaugcugccuu

SEQ ID NO: 388725 - RNA, 22 nt, Human
uacagucuuuggaaagagauag

SEQ ID NO: 388726 - RNA, 22 nt, Human
uaggcucagggcugggugacgg

SEQ ID NO: 388727 - RNA, 22 nt, Human
ggccucugguucguggugaccu

SEQ ID NO: 388728 - RNA, 22 nt, Human
cuggccuggggccucagcugcu

SEQ ID NO: 388729 - RNA, 22 nt, Human
ccugccaggagcuggugcugca

SEQ ID NO: 388730 - RNA, 22 nt, Human
gcucuguacgcaggaugagggg

SEQ ID NO: 388731 - RNA, 22 nt, Human
agugagggaugaagaacugcgg

SEQ ID NO: 388732 - RNA, 19 nt, Human
acauuuagaauguacuugc

SEQ ID NO: 388733 - RNA, 22 nt, Human
uuuauucuauaggcauuaagca

SEQ ID NO: 388734 - RNA, 22 nt, Human
cagcaggaaagacaucugagca

SEQ ID NO: 388735 - RNA, 22 nt, Human
ucauugcaguagggagagaccc

SEQ ID NO: 388736 - RNA, 22 nt, Human
uauccuuguacuauaguauuua

SEQ ID NO: 388737 - RNA, 22 nt, Human
agauuaugcuggcugcuacaag

SEQ ID NO: 388738 - RNA, 20 nt, Human
uugcauuggaugugcaggug

SEQ ID NO: 388739 - RNA, 22 nt, Human
ggaugcugcuaucaggcuucga

SEQ ID NO: 388740 - RNA, 20 nt, Human
ugcuugucaugcacucaggc

SEQ ID NO: 388741 - RNA, 22 nt, Human
cugccaggccucaucccagcca

SEQ ID NO: 388742 - RNA, 22 nt, Human
auggcagccuguggacagucaa

SEQ ID NO: 388743 - RNA, 22 nt, Human
cagaccagcucuaugaacccaa

SEQ ID NO: 388744 - RNA, 22 nt, Human
ucuuagaaauuccccaguggcu

SEQ ID NO: 388745 - RNA, 22 nt, Human
gagugcagaugaacagaagauu

SEQ ID NO: 388746 - RNA, 22 nt, Human
gcaggagaacaaagcaagcugc

SEQ ID NO: 388747 - RNA, 22 nt, Human
cauaagaaauaaugaugaugac

SEQ ID NO: 388748 - RNA, 22 nt, Human
gcaggagcugcucuccugacga

SEQ ID NO: 388749 - RNA, 23 nt, Human
uccaggagaaccccugucugucc

SEQ ID NO: 388750 - RNA, 19 nt, Human
aacuguaauuaauacccua

SEQ ID NO: 388751 - RNA, 22 nt, Human
uuggcugaagguuaagugcugg

SEQ ID NO: 388752 - RNA, 22 nt, Human
caguccuugcucaaagucuaca

SEQ ID NO: 388753 - RNA, 22 nt, Human
ucucagagcucacaccuccugg

SEQ ID NO: 388754 - RNA, 22 nt, Human
aaaggccaugguuggaguguuu

SEQ ID NO: 388755 - RNA, 22 nt, Human
uaucuaaaggauuuaauuuagu

SEQ ID NO: 388756 - RNA, 22 nt, Human
uccuuggcaugccgucuucucc

SEQ ID NO: 388757 - RNA, 22 nt, Human
acagggcagagggcaguuggua

SEQ ID NO: 388758 - RNA, 21 nt, Human
cagaggccucaugcucugugc

SEQ ID NO: 388759 - RNA, 22 nt, Human
ucaucaaagcgcuuggaguagg

SEQ ID NO: 388760 - RNA, 17 nt, Human
cagugaggccuuuccuc

SEQ ID NO: 388761 - RNA, 21 nt, Human
gaguggaacgcucuucacacc

SEQ ID NO: 388762 - RNA, 22 nt, Human
ggccaggcgaugaccccuccac

SEQ ID NO: 388763 - RNA, 19 nt, Human
aggagaagacucucucccc

SEQ ID NO: 388764 - RNA, 22 nt, Human
ucuucaaaugcuaguaauauca

SEQ ID NO: 388765 - RNA, 22 nt, Human
guguuuccaguucagaaagcaa

SEQ ID NO: 388766 - RNA, 22 nt, Human
acaguuugcccugacauucucc

SEQ ID NO: 388767 - RNA, 22 nt, Human
ggcagccauggacacuggcuag

SEQ ID NO: 388768 - RNA, 16 nt, Human
uggaaggggucuccgg

SEQ ID NO: 388769 - RNA, 22 nt, Human
cugcccagaaucacucacucga

SEQ ID NO: 388770 - RNA, 22 nt, Human
cucugagaggugagaagcagca

SEQ ID NO: 388771 - RNA, 22 nt, Human
ccugggagugugccaucucugu

SEQ ID NO: 388772 - RNA, 22 nt, Human
aauuucaaacuaauaggaacca

SEQ ID NO: 388773 - RNA, 22 nt, Human
ucuuagaaugucaacugauguu

SEQ ID NO: 388774 - RNA, 22 nt, Human
agcauuuauuucuuagaaauug

SEQ ID NO: 388775 - RNA, 22 nt, Human
aagagcuggaguuugcagcccu

SEQ ID NO: 388776 - RNA, 22 nt, Human
gaggccagaaugagcugaaugc

SEQ ID NO: 388777 - RNA, 22 nt, Human
aggcaaaauuacaaaguuauua

SEQ ID NO: 388778 - RNA, 22 nt, Human
ggcuggcacugaggagagcucu

SEQ ID NO: 388779 - RNA, 22 nt, Human
gagaaagggaacuuacagagug

SEQ ID NO: 388780 - RNA, 21 nt, Human
gcccucaggggaggauggccu

SEQ ID NO: 388781 - RNA, 22 nt, Human
uagugcuuuaggccugaguguc

SEQ ID NO: 388782 - RNA, 22 nt, Human
ccuggauccaugaaaaggcuac

SEQ ID NO: 388783 - RNA, 21 nt, Human
ucugggcccaugcugccucac

SEQ ID NO: 388784 - RNA, 22 nt, Human
ugaugguuuuauuaauaggacc

SEQ ID NO: 388785 - RNA, 22 nt, Human
aggagggagcuuaagccaggca

SEQ ID NO: 388786 - RNA, 22 nt, Human
cagaggcauacucccagucuug

SEQ ID NO: 388787 - RNA, 22 nt, Human
gccuggagggauagaaugcaag

SEQ ID NO: 388788 - RNA, 22 nt, Human
ccagcuccugggucuuagucag

SEQ ID NO: 388789 - RNA, 22 nt, Human
guccucugggcuuugagcaguc

SEQ ID NO: 388790 - RNA, 22 nt, Human
uggcagagaacacacaugauuc

SEQ ID NO: 388791 - RNA, 22 nt, Human
aggcacugacaauucuggacug

SEQ ID NO: 388792 - RNA, 22 nt, Human
uuaaaaucuaaagcaguugucu

SEQ ID NO: 388793 - RNA, 22 nt, Human
uccugccuugccugggacauca

SEQ ID NO: 388794 - RNA, 22 nt, Human
ugucccucugaggcuucccugg

SEQ ID NO: 388795 - RNA, 22 nt, Human
gcuggagcugaguucccugggc

SEQ ID NO: 388796 - RNA, 22 nt, Human
ccagggcagccaacccagaugc

SEQ ID NO: 388797 - RNA, 22 nt, Human
gcucagaggaugcuccuuuaug

SEQ ID NO: 388798 - RNA, 22 nt, Human
agggaccucauguaaguggauu

SEQ ID NO: 388799 - RNA, 22 nt, Human
agaauaucguagcauauuaucu

SEQ ID NO: 388800 - RNA, 22 nt, Human
aagugggaauagaaaugaaggu

SEQ ID NO: 388801 - RNA, 22 nt, Human
ggcagcaaauauugucagcugu

SEQ ID NO: 388802 - RNA, 22 nt, Human
uggccagaaccugcaguaggcc

SEQ ID NO: 388803 - RNA, 22 nt, Human
auuugugcauaucccauccacc

SEQ ID NO: 388804 - RNA, 22 nt, Human
uuugcauugcagugguuuacag

SEQ ID NO: 388805 - RNA, 22 nt, Human
ggcagggagagcaugcugauaa

SEQ ID NO: 388806 - RNA, 22 nt, Human
caggcuggagugaguguagugg

SEQ ID NO: 388807 - RNA, 22 nt, Human
gcaggcaguuauuuaguagaau

SEQ ID NO: 388808 - RNA, 22 nt, Human
cuggagcuaggaaguccaagau

SEQ ID NO: 388809 - RNA, 22 nt, Human
guccucagagugggcagguccu

SEQ ID NO: 388810 - RNA, 22 nt, Human
aaaugucagaggaacauauuga

SEQ ID NO: 388811 - RNA, 22 nt, Human
uuccaugagcucugaguucaca

SEQ ID NO: 388812 - RNA, 22 nt, Human
cagaguguggcaucuuccaacu

SEQ ID NO: 388813 - RNA, 22 nt, Human
cugaaggauucaaaauggcagg

SEQ ID NO: 388814 - RNA, 22 nt, Human
ccaggccuuccaguacgcagaa

SEQ ID NO: 388815 - RNA, 22 nt, Human
ugccuguccugaggaugagggu

SEQ ID NO: 388816 - RNA, 22 nt, Human
auguagcagaagauguuuuccu

SEQ ID NO: 388817 - RNA, 22 nt, Human
agcagggcaaagucaggcuaac

SEQ ID NO: 388818 - RNA, 22 nt, Human
gcccagcacuaaaagcuuugcu

SEQ ID NO: 388819 - RNA, 22 nt, Human
gcugauuauuacaugucugugg

SEQ ID NO: 388820 - RNA, 22 nt, Human
auucuguauggaaaagcacuau

SEQ ID NO: 388821 - RNA, 22 nt, Human
ccauggcucuagagauugaaaa

SEQ ID NO: 388822 - RNA, 22 nt, Human
ucucuguaguugggcagcugcu

SEQ ID NO: 388823 - RNA, 22 nt, Human
uaaagaacacagggaauagcac

SEQ ID NO: 388824 - RNA, 22 nt, Human
ucugcagcuucuugccagagag

SEQ ID NO: 388825 - RNA, 22 nt, Human
agauguaguagugggucuuuua

SEQ ID NO: 388826 - RNA, 22 nt, Human
uuucucaucuggaaacagugcu

SEQ ID NO: 388827 - RNA, 18 nt, Human
cguuuuuccgggauugca

SEQ ID NO: 388828 - RNA, 22 nt, Human
cuuccaaaauuuauauguugaa

SEQ ID NO: 388829 - RNA, 22 nt, Human
aauacaaucaaauucacuagca

SEQ ID NO: 388830 - RNA, 22 nt, Human
accagagaaaacacagcaggcu

SEQ ID NO: 388831 - RNA, 22 nt, Human
ucagagaguuuucacuagggug

SEQ ID NO: 388832 - RNA, 22 nt, Human
uuguauuagcuguaaauuuucu

SEQ ID NO: 388833 - RNA, 22 nt, Human
agcugcuccuuuccugcaggcg

SEQ ID NO: 388834 - RNA, 22 nt, Human
ggggcuggcucacuaagagacu

SEQ ID NO: 388835 - RNA, 22 nt, Human
uuuuugcugauaagcagaauuc

SEQ ID NO: 388836 - RNA, 22 nt, Human
gggcacagcugcuacccagugc

SEQ ID NO: 388837 - RNA, 22 nt, Human
uucaggauucuuucagacuggg

SEQ ID NO: 388838 - RNA, 22 nt, Human
augcaucuauucccaagggcag

SEQ ID NO: 388839 - RNA, 22 nt, Human
ucaugucaguuucuucuauaaa

SEQ ID NO: 388840 - RNA, 22 nt, Human
ugggggacugcacuggcgucag

SEQ ID NO: 388841 - RNA, 22 nt, Human
acagagaaagugggcugaagau

SEQ ID NO: 388842 - RNA, 22 nt, Human
agcagccauagauagcaugcaa

SEQ ID NO: 388843 - RNA, 22 nt, Human
uggagccagcccaggccccucu

SEQ ID NO: 388844 - RNA, 22 nt, Human
ucauugcagcuucagguguuca

SEQ ID NO: 388845 - RNA, 22 nt, Human
aaauguagaccuauagggaccu

SEQ ID NO: 388846 - RNA, 22 nt, Human
uugaagauggaucgccacucuc

SEQ ID NO: 388847 - RNA, 18 nt, Human
cccagcuuagcgccccuc

SEQ ID NO: 388848 - RNA, 22 nt, Human
gcacacacuguuuuccucacau

SEQ ID NO: 388849 - RNA, 22 nt, Human
gugccaggugcuaagcugugcu

SEQ ID NO: 388850 - RNA, 22 nt, Human
uguucccaagauaagauuauga

SEQ ID NO: 388851 - RNA, 22 nt, Human
gcuggccugaccagccacaggc

SEQ ID NO: 388852 - RNA, 22 nt, Human
acaauauuguacccagaaguuu

SEQ ID NO: 388853 - RNA, 17 nt, Human
aaguccagaguugagca

SEQ ID NO: 388854 - RNA, 22 nt, Human
ucugcaggcuguacaggaagca

SEQ ID NO: 388855 - RNA, 21 nt, Human
ucucugugucuuuaagcugga

SEQ ID NO: 388856 - RNA, 20 nt, Human
ugccaugguaacagagugug

SEQ ID NO: 388857 - RNA, 22 nt, Human
acugucuuguguuaaagaacca

SEQ ID NO: 388858 - RNA, 22 nt, Human
uggugcugacaguucugagugc

SEQ ID NO: 388859 - RNA, 22 nt, Human
guuguacagcauccagugcaga

SEQ ID NO: 388860 - RNA, 22 nt, Human
ugcucuguaaggucagaaaagg

SEQ ID NO: 388861 - RNA, 22 nt, Human
ggagccagaggcugcugcugug

SEQ ID NO: 388862 - RNA, 22 nt, Human
agggcugagugggagagaguug

SEQ ID NO: 388863 - RNA, 22 nt, Human
ccucuugccaaucagcuacaga

SEQ ID NO: 388864 - RNA, 22 nt, Human
ugagggagagggcgaaaaugaa

SEQ ID NO: 388865 - RNA, 22 nt, Human
ucagaggagaccaaggggaaua

SEQ ID NO: 388866 - RNA, 22 nt, Human
cagcagcugggaaggaggcuga

SEQ ID NO: 388867 - RNA, 21 nt, Human
uuugaaagcuacaucuauagc

SEQ ID NO: 388868 - RNA, 22 nt, Human
ucagggcauguauguuucuuua

SEQ ID NO: 388869 - RNA, 19 nt, Human
aguguguacugaaagcacu

SEQ ID NO: 388870 - RNA, 20 nt, Human
gcugccagugccugaugcuu

SEQ ID NO: 388871 - RNA, 22 nt, Human
uaacauguuaagaaauuagaua

SEQ ID NO: 388872 - RNA, 22 nt, Human
ucugucaccauucagcuugaau

SEQ ID NO: 388873 - RNA, 22 nt, Human
agaaauguuacaguuguuauuu

SEQ ID NO: 388874 - RNA, 22 nt, Human
acccagaggugucuagcaagcu

SEQ ID NO: 388875 - RNA, 22 nt, Human
gugcauugcgaugcagacgacc

SEQ ID NO: 388876 - RNA, 22 nt, Human
uccagggacagcgcuggagcua

SEQ ID NO: 388877 - RNA, 22 nt, Human
uaaaugcaaugugcuuuaccag

SEQ ID NO: 388878 - RNA, 22 nt, Human
uggcucuguugugcugagccag

SEQ ID NO: 388879 - RNA, 22 nt, Human
ugacagaacagguugggagcaa

SEQ ID NO: 388880 - RNA, 22 nt, Human
ugaggcaguauuuuagugacuu

SEQ ID NO: 388881 - RNA, 22 nt, Human
uccagggagauggcagaggcug

SEQ ID NO: 388882 - RNA, 22 nt, Human
ccaaggcuccucagcuggucuu

SEQ ID NO: 388883 - RNA, 22 nt, Human
acugggaggcaucuggagcuga

SEQ ID NO: 388884 - RNA, 22 nt, Human
cagagccuuccuagcagacucu

SEQ ID NO: 388885 - RNA, 22 nt, Human
cuggugcuggagccuagucccu

SEQ ID NO: 388886 - RNA, 22 nt, Human
gccugagagacccauggggcaa

SEQ ID NO: 388887 - RNA, 22 nt, Human
acacacaauuaguuuuaugcuu

SEQ ID NO: 388888 - RNA, 22 nt, Human
gccuggagcucaugugggcauu

SEQ ID NO: 388889 - RNA, 21 nt, Human
gccacugcacuccagccuggg

SEQ ID NO: 388890 - RNA, 22 nt, Human
gaggacagugugaucugccagc

SEQ ID NO: 388891 - RNA, 22 nt, Human
caggcagcguccugcuuccugu

SEQ ID NO: 388892 - RNA, 22 nt, Human
uugcagaggcaaaaaugaacuc

SEQ ID NO: 388893 - RNA, 20 nt, Human
caggcaguuugugguuaggg

SEQ ID NO: 388894 - RNA, 22 nt, Human
agugcuuuagagaaauggugcu

SEQ ID NO: 388895 - RNA, 21 nt, Human
aagcaggacauaugaugcccu

SEQ ID NO: 388896 - RNA, 22 nt, Human
cccagcaggucggugcugccug

SEQ ID NO: 388897 - RNA, 19 nt, Human
agccagggugagaaggagc

SEQ ID NO: 388898 - RNA, 22 nt, Human
gggaguggauuauguggaccca

SEQ ID NO: 388899 - RNA, 22 nt, Human
uagcagggucucaggagucagg

SEQ ID NO: 388900 - RNA, 22 nt, Human
uggccugcccagagcagcucug

SEQ ID NO: 388901 - RNA, 22 nt, Human
cccagcacuuugaauaugucac

SEQ ID NO: 388902 - RNA, 22 nt, Human
agcagggcuuugcagacuuggg

SEQ ID NO: 388903 - RNA, 22 nt, Human
auaauauaauccuacuucccau

SEQ ID NO: 388904 - RNA, 22 nt, Human
uagaggugucacuuugggaagu

SEQ ID NO: 388905 - RNA, 22 nt, Human
cugcuguguuccuccugcaucu

SEQ ID NO: 388906 - RNA, 22 nt, Human
cucagccccaauucuccccauu

SEQ ID NO: 388907 - RNA, 22 nt, Human
cccuguccuuggcugugaggcu

SEQ ID NO: 388908 - RNA, 22 nt, Human
gucuucaauagagccucaauuu

SEQ ID NO: 388909 - RNA, 19 nt, Human
uauggcaggccgaggcacu

SEQ ID NO: 388910 - RNA, 22 nt, Human
ggcaggcaaugaggaugggaag

SEQ ID NO: 388911 - RNA, 22 nt, Human
aauguaaacagcaagagaaggg

SEQ ID NO: 388912 - RNA, 22 nt, Human
agggcucccgugaggugacugc

SEQ ID NO: 388913 - RNA, 22 nt, Human
auugaauagaugcauuauacua

SEQ ID NO: 388914 - RNA, 22 nt, Human
agcugaagaaaugggaagcauu

SEQ ID NO: 388915 - RNA, 22 nt, Human
agucucugggcaugguugugac

SEQ ID NO: 388916 - RNA, 22 nt, Human
agaguccagaaaacagugugcu

SEQ ID NO: 388917 - RNA, 22 nt, Human
gguacaaugucuuacagaccca

SEQ ID NO: 388918 - RNA, 22 nt, Human
gaagaaggugccagaggcuuac

SEQ ID NO: 388919 - RNA, 22 nt, Human
aauugcaauuuucuuaaggucu

SEQ ID NO: 388920 - RNA, 22 nt, Human
guuuauuagaguuuucugucug

SEQ ID NO: 388921 - RNA, 22 nt, Human
gcuggccugucuagagccuuac

SEQ ID NO: 388922 - RNA, 22 nt, Human
auacaucuugucagauucaugu

SEQ ID NO: 388923 - RNA, 22 nt, Human
cauuuguuaaccaguguggauu

SEQ ID NO: 388924 - RNA, 22 nt, Human
aggcugucaucuuugcaggcag

SEQ ID NO: 388925 - RNA, 19 nt, Human
cagagcagugguuccugaa

SEQ ID NO: 388926 - RNA, 22 nt, Human
ugccaggcccagcuccagagcu

SEQ ID NO: 388927 - RNA, 22 nt, Human
cugaagccacgauagcuuccua

SEQ ID NO: 388928 - RNA, 20 nt, Human
cugcugugugugccucagcc

SEQ ID NO: 388929 - RNA, 22 nt, Human
uuucaaacauaucuucauuacu

SEQ ID NO: 388930 - RNA, 22 nt, Human
uagauuucgcugcaucucaauc

SEQ ID NO: 388931 - RNA, 22 nt, Human
acacaggaagucagcacugaug

SEQ ID NO: 388932 - RNA, 22 nt, Human
ucaaucacguguuccauguucu

SEQ ID NO: 388933 - RNA, 22 nt, Human
aaguuuuaacaaguacuuacua

SEQ ID NO: 388934 - RNA, 22 nt, Human
ucucuucugaaaccugucuuua

SEQ ID NO: 388935 - RNA, 22 nt, Human
uucucugaucuugcuagacuga

SEQ ID NO: 388936 - RNA, 22 nt, Human
gcugucugcugggucgcucagg

SEQ ID NO: 388937 - RNA, 22 nt, Human
ggggcuguuuuuggaauggcug

SEQ ID NO: 388938 - RNA, 22 nt, Human
aggagcagaacuguuguggagg

SEQ ID NO: 388939 - RNA, 22 nt, Human
guagaagugaugucauguuaua

SEQ ID NO: 388940 - RNA, 22 nt, Human
cuggcagcaguuaugaaacaau

SEQ ID NO: 388941 - RNA, 22 nt, Human
aguguacauguuuacagcaucu

SEQ ID NO: 388942 - RNA, 22 nt, Human
ugccagaagugcuuuauaagug

SEQ ID NO: 388943 - RNA, 22 nt, Human
agagugaaguaauuguuaggau

SEQ ID NO: 388944 - RNA, 22 nt, Human
cuccagggagcugcgggagcca

SEQ ID NO: 388945 - RNA, 22 nt, Human
ucucuggaagcgcagaucuguu

SEQ ID NO: 388946 - RNA, 22 nt, Human
ucugcuguaaagaauuucugcc

SEQ ID NO: 388947 - RNA, 22 nt, Human
acauuugacauuuaguaucagc

SEQ ID NO: 388948 - RNA, 22 nt, Human
agauaauuugaguaaauuaauu

SEQ ID NO: 388949 - RNA, 20 nt, Human
cagagaccugucuucacaga

SEQ ID NO: 388950 - RNA, 22 nt, Human
cugaggcugggcauggggucca

SEQ ID NO: 388951 - RNA, 22 nt, Human
aauggcuucugaagcacacuuu

SEQ ID NO: 388952 - RNA, 22 nt, Human
cguagguggcucagcaccuggg

SEQ ID NO: 388953 - RNA, 22 nt, Human
uugacaagaaucguugccuugg

SEQ ID NO: 388954 - RNA, 22 nt, Human
agggccucugacgcccccagcc

SEQ ID NO: 388955 - RNA, 22 nt, Human
cucuucaaaagucuaauccuua

SEQ ID NO: 388956 - RNA, 22 nt, Human
ugcaauaacuacuuuaauguug

SEQ ID NO: 388957 - RNA, 22 nt, Human
ugggugggagcacccugucugg

SEQ ID NO: 388958 - RNA, 22 nt, Human
cagagguauugcaaaagccuag

SEQ ID NO: 388959 - RNA, 21 nt, Human
cugcuuuacuucagaggaucu

SEQ ID NO: 388960 - RNA, 18 nt, Human
cuccagggaacucaguca

SEQ ID NO: 388961 - RNA, 22 nt, Human
cccugccugugggcaucaacau

SEQ ID NO: 388962 - RNA, 22 nt, Human
aguuaaagucugaaauagagaa

SEQ ID NO: 388963 - RNA, 22 nt, Human
ucaggggcccuucccucagcag

SEQ ID NO: 388964 - RNA, 22 nt, Human
cuacagaauggagggucagaga

SEQ ID NO: 388965 - RNA, 22 nt, Human
uaucauaaguuaauuaaacagu

SEQ ID NO: 388966 - RNA, 22 nt, Human
gccagggaacccaagggccuca

SEQ ID NO: 388967 - RNA, 22 nt, Human
cagaggauucccuagugaccug

SEQ ID NO: 388968 - RNA, 22 nt, Human
acagucuacuugagcuuguaua

SEQ ID NO: 388969 - RNA, 20 nt, Human
aaaggaauauaugaaguaua

SEQ ID NO: 388970 - RNA, 22 nt, Human
cacagaaaaaggcuugaaaauc

SEQ ID NO: 388971 - RNA, 22 nt, Human
caggccugagacaucugagaua

SEQ ID NO: 388972 - RNA, 22 nt, Human
caggcccugggcaggaucagcc

SEQ ID NO: 388973 - RNA, 22 nt, Human
ggcugccucugaugugcagacg

SEQ ID NO: 388974 - RNA, 22 nt, Human
aagcaaagaguuuaguggguga

SEQ ID NO: 388975 - RNA, 22 nt, Human
ucuguucaugaaauaucuuuuu

SEQ ID NO: 388976 - RNA, 21 nt, Human
gccaggaguagauuacauuua

SEQ ID NO: 388977 - RNA, 22 nt, Human
auccaugaagguacuucucagg

SEQ ID NO: 388978 - RNA, 22 nt, Human
ucauaaagcucuuccaaaugua

SEQ ID NO: 388979 - RNA, 22 nt, Human
ugcuggagaggaaggugggguc

SEQ ID NO: 388980 - RNA, 22 nt, Human
gaggcagccucaguggaccucg

SEQ ID NO: 388981 - RNA, 23 nt, Human
uggugccucagaagcagugggcu

SEQ ID NO: 388982 - RNA, 17 nt, Human
uccaugagacaugaaga

SEQ ID NO: 388983 - RNA, 22 nt, Human
gugaauaaagggaguuuucaaa

SEQ ID NO: 388984 - RNA, 23 nt, Human
aggucagcaggcaaggaaauggc

SEQ ID NO: 388985 - RNA, 22 nt, Human
uccaguggcacuggagacuaga

SEQ ID NO: 388986 - RNA, 20 nt, Human
gccugcagguuggaugggau

SEQ ID NO: 388987 - RNA, 22 nt, Human
uagagcuagcuucaaaaugcga

SEQ ID NO: 388988 - RNA, 22 nt, Human
aacaaucaaguuucuaaaugac

SEQ ID NO: 388989 - RNA, 22 nt, Human
ggcucaggacugcagcguagag

SEQ ID NO: 388990 - RNA, 22 nt, Human
uagggcagcugcaucaggcacu

SEQ ID NO: 388991 - RNA, 22 nt, Human
cauugaaaaacguugacugagu

SEQ ID NO: 388992 - RNA, 22 nt, Human
ggcuuccuggagaaggucugag

SEQ ID NO: 388993 - RNA, 22 nt, Human
gcagguggauuaucagaagugc

SEQ ID NO: 388994 - RNA, 22 nt, Human
ucucagagggaaacaugaguga

SEQ ID NO: 388995 - RNA, 22 nt, Human
gcugccugucccaggaugagga

SEQ ID NO: 388996 - RNA, 22 nt, Human
caggcagccaggggaccugucc

SEQ ID NO: 388997 - RNA, 22 nt, Human
cugcugccggcgagccucccuu

SEQ ID NO: 388998 - RNA, 18 nt, Human
aguccuuacgaggcuaua

SEQ ID NO: 388999 - RNA, 22 nt, Human
caggcacugugcuagauccuug

SEQ ID NO: 389000 - RNA, 22 nt, Human
ucauuuguugaacuuuagugcg

SEQ ID NO: 389001 - RNA, 22 nt, Human
gaagccagccuugucugccucu

SEQ ID NO: 389002 - RNA, 22 nt, Human
uucuccagagggcucugcagga

SEQ ID NO: 389003 - RNA, 22 nt, Human
ucaguagcagaaagcaaugagu

SEQ ID NO: 389004 - RNA, 22 nt, Human
aaagcagauucugaugcaguag

SEQ ID NO: 389005 - RNA, 22 nt, Human
augugaaauagcuggauaugaa

SEQ ID NO: 389006 - RNA, 22 nt, Human
gcauccagucuuggcuccugga

SEQ ID NO: 389007 - RNA, 22 nt, Human
ggcucccacccauagggcgagu

SEQ ID NO: 389008 - RNA, 22 nt, Human
agggccagaguacaucagggcu

SEQ ID NO: 389009 - RNA, 22 nt, Human
ucaguaaacagguuuaaguccu

SEQ ID NO: 389010 - RNA, 22 nt, Human
ugaggcuggcaaggcugguauu

SEQ ID NO: 389011 - RNA, 22 nt, Human
ggcucuggugggaagguuagau

SEQ ID NO: 389012 - RNA, 22 nt, Human
accagcagaguugaggaggaca

SEQ ID NO: 389013 - RNA, 22 nt, Human
aaaaguauuggccaccauuucu

SEQ ID NO: 389014 - RNA, 22 nt, Human
ccucaggcuuacgggcaaugga

SEQ ID NO: 389015 - RNA, 22 nt, Human
cauuauggcagccaggauauug

SEQ ID NO: 389016 - RNA, 22 nt, Human
aucuggcugacuuugugggaca

SEQ ID NO: 389017 - RNA, 22 nt, Human
auuauuagugauguuguuacug

SEQ ID NO: 389018 - RNA, 22 nt, Human
uuucacauacaguguauaguag

SEQ ID NO: 389019 - RNA, 22 nt, Human
aggcucagagagcuguguccau

SEQ ID NO: 389020 - RNA, 22 nt, Human
ccauggaguuccucuggucuau

SEQ ID NO: 389021 - RNA, 22 nt, Human
caggagcccagaguccucagcu

SEQ ID NO: 389022 - RNA, 22 nt, Human
ggucauuguucuuuucugugau

SEQ ID NO: 389023 - RNA, 22 nt, Human
uccugcagcucugagaagcauc

SEQ ID NO: 389024 - RNA, 22 nt, Human
guuagggaucaggaacaagagc

SEQ ID NO: 389025 - RNA, 18 nt, Human
aguaaagcuuauuacaug

SEQ ID NO: 389026 - RNA, 23 nt, Human
cccaggagccugaguccucucug

SEQ ID NO: 389027 - RNA, 22 nt, Human
auuuuucucucacacuuaccag

SEQ ID NO: 389028 - RNA, 22 nt, Human
cuucucucugcauaggcauggg

SEQ ID NO: 389029 - RNA, 22 nt, Human
agccaagcaccacuggcacucg

SEQ ID NO: 389030 - RNA, 22 nt, Human
ucuuagcauuucauaacaacug

SEQ ID NO: 389031 - RNA, 22 nt, Human
cccagcuccuuacagggccgaa

SEQ ID NO: 389032 - RNA, 22 nt, Human
ccucacagggccaggccccuca

SEQ ID NO: 389033 - RNA, 22 nt, Human
agcagcaucugguucugaugug

SEQ ID NO: 389034 - RNA, 22 nt, Human
auaaaugccucagaaucauccc

SEQ ID NO: 389035 - RNA, 22 nt, Human
uccaggagugcugguuagagua

SEQ ID NO: 389036 - RNA, 22 nt, Human
gucaacuuuaagaugaucuuuu

SEQ ID NO: 389037 - RNA, 22 nt, Human
caggaacauuuaaccacagggu

SEQ ID NO: 389038 - RNA, 22 nt, Human
guggccuggcgagcuggcgcgg

SEQ ID NO: 389039 - RNA, 22 nt, Human
aguuauucauuuauucuguaca

SEQ ID NO: 389040 - RNA, 22 nt, Human
gccauccucugagcacuaggca

SEQ ID NO: 389041 - RNA, 22 nt, Human
ggaggagggguuuacauuggaa

SEQ ID NO: 389042 - RNA, 22 nt, Human
ucagccucucugaguccagacc

SEQ ID NO: 389043 - RNA, 22 nt, Human
ggugagggaguggaacgaggug

SEQ ID NO: 389044 - RNA, 22 nt, Human
agugacagcugggaaggugaaa

SEQ ID NO: 389045 - RNA, 22 nt, Human
gacagccucaugaggagcaaaa

SEQ ID NO: 389046 - RNA, 22 nt, Human
cugccuuggcccuaguucaugg

SEQ ID NO: 389047 - RNA, 22 nt, Human
uauguguaggaggaggacaggg

SEQ ID NO: 389048 - RNA, 22 nt, Human
gcugagacuggcagcaggaagu

SEQ ID NO: 389049 - RNA, 17 nt, Human
cccagagaugcugccuu

SEQ ID NO: 389050 - RNA, 22 nt, Human
aggcagugccuggaccccagcu

SEQ ID NO: 389051 - RNA, 22 nt, Human
gaaaaaggauaaauacaguguu

SEQ ID NO: 389052 - RNA, 19 nt, Human
uggcagaggacaaggacuu

SEQ ID NO: 389053 - RNA, 22 nt, Human
cugggcacacagugacucugca

SEQ ID NO: 389054 - RNA, 22 nt, Human
ugcucuguugugcaugugggau

SEQ ID NO: 389055 - RNA, 22 nt, Human
aguguuccacacaucuggggaa

SEQ ID NO: 389056 - RNA, 19 nt, Human
ccuggguccacucagacua

SEQ ID NO: 389057 - RNA, 22 nt, Human
cugagcugcggcaggcaccugg

SEQ ID NO: 389058 - RNA, 22 nt, Human
ggaggccaaggcaggcggauca

SEQ ID NO: 389059 - RNA, 22 nt, Human
cacugaaggcuaggauuagaug

SEQ ID NO: 389060 - RNA, 22 nt, Human
gagagguccauuccccugucag

SEQ ID NO: 389061 - RNA, 22 nt, Human
cagaggcauauaauugcugggg

SEQ ID NO: 389062 - RNA, 22 nt, Human
ucuuuccuacuuuauugugaac

SEQ ID NO: 389063 - RNA, 22 nt, Human
gugcaugugucuuuauaguagc

SEQ ID NO: 389064 - RNA, 22 nt, Human
gcucagagauggggaaugaaaa

SEQ ID NO: 389065 - RNA, 22 nt, Human
guucauuuuacuguaaauagca

SEQ ID NO: 389066 - RNA, 22 nt, Human
gagccaggucgggccgcggcga

SEQ ID NO: 389067 - RNA, 22 nt, Human
caggugucuaauucucaccccc

SEQ ID NO: 389068 - RNA, 22 nt, Human
cagaguggcgacccccucagcu

SEQ ID NO: 389069 - RNA, 22 nt, Human
ucaaaguaaaaguauagaguuu

SEQ ID NO: 389070 - RNA, 22 nt, Human
ucacacacauuugcugucugau

SEQ ID NO: 389071 - RNA, 18 nt, Human
uggcagccagcugcuccu

SEQ ID NO: 389072 - RNA, 22 nt, Human
gggcucuggaaggugcaccaug

SEQ ID NO: 389073 - RNA, 22 nt, Human
ugcauauuuuauaaagauggaa

SEQ ID NO: 389074 - RNA, 22 nt, Human
aggaugggccugggauaugcuu

SEQ ID NO: 389075 - RNA, 22 nt, Human
acaguggaggccauaugguccu

SEQ ID NO: 389076 - RNA, 22 nt, Human
cagagggcucaguccugcugga

SEQ ID NO: 389077 - RNA, 22 nt, Human
aguuuauguaaaauuaguaaug

SEQ ID NO: 389078 - RNA, 22 nt, Human
cagagagagugggguguggauu

SEQ ID NO: 389079 - RNA, 22 nt, Human
aguuuuuccugauuuuacagaa

SEQ ID NO: 389080 - RNA, 22 nt, Human
aggcagcuuucagugucucuca

SEQ ID NO: 389081 - RNA, 22 nt, Human
cagaccuggaaaacaggcuugc

SEQ ID NO: 389082 - RNA, 22 nt, Human
ugcugcacucaccaacagauaa

SEQ ID NO: 389083 - RNA, 20 nt, Human
ugcagagcuggcuggcuccu

SEQ ID NO: 389084 - RNA, 22 nt, Human
ucuuuauuucugaaucccccau

SEQ ID NO: 389085 - RNA, 22 nt, Human
cacacaugaaucccuaguaccu

SEQ ID NO: 389086 - RNA, 20 nt, Human
uguucacaguaguugcugcu

SEQ ID NO: 389087 - RNA, 18 nt, Human
agugugugcccuuucagg

SEQ ID NO: 389088 - RNA, 22 nt, Human
gcuuuaaugaagucacgcaaag

SEQ ID NO: 389089 - RNA, 22 nt, Human
agacccugcaccucucgugggc

SEQ ID NO: 389090 - RNA, 23 nt, Human
cccaggaguuucacugcaaaggu

SEQ ID NO: 389091 - RNA, 22 nt, Human
acccuggggguggccagugcca

SEQ ID NO: 389092 - RNA, 22 nt, Human
cuccaggaaaauagggaaugag

SEQ ID NO: 389093 - RNA, 22 nt, Human
ggcagcuauuccaagcagcacu

SEQ ID NO: 389094 - RNA, 22 nt, Human
cuccccagguucaggagguggg

SEQ ID NO: 389095 - RNA, 22 nt, Human
uacagaguggugagaucuuuug

SEQ ID NO: 389096 - RNA, 22 nt, Human
cccaaggcugcagugagcauga

SEQ ID NO: 389097 - RNA, 22 nt, Human
caaaggcaacauauacuuguuu

SEQ ID NO: 389098 - RNA, 22 nt, Human
gacccagaaggagugcccuaga

SEQ ID NO: 389099 - RNA, 21 nt, Human
uccagaccucccucuccuagc

SEQ ID NO: 389100 - RNA, 22 nt, Human
gcucccaguucccaaagugacc

SEQ ID NO: 389101 - RNA, 22 nt, Human
acagaaauauagaagguaggaa

SEQ ID NO: 389102 - RNA, 22 nt, Human
aggucauuggggacuaucuccg

SEQ ID NO: 389103 - RNA, 22 nt, Human
uuugaaaguucuucugacacua

SEQ ID NO: 389104 - RNA, 22 nt, Human
cugccuuccaaccccagacucc

SEQ ID NO: 389105 - RNA, 22 nt, Human
ggcaggcaggagcgugcuuggg

SEQ ID NO: 389106 - RNA, 22 nt, Human
agaguggagagaaacaacucug

SEQ ID NO: 389107 - RNA, 22 nt, Human
uuuucauugagcaccugaguaa

SEQ ID NO: 389108 - RNA, 22 nt, Human
agccaggcggggcagguuuccu

SEQ ID NO: 389109 - RNA, 22 nt, Human
uccagagcagguggucagaagg

SEQ ID NO: 389110 - RNA, 22 nt, Human
cugcccugucuuuuucugauga

SEQ ID NO: 389111 - RNA, 22 nt, Human
aucuggcucacuuagucuagga

SEQ ID NO: 389112 - RNA, 22 nt, Human
ugcagccaggaaauauuugcug

SEQ ID NO: 389113 - RNA, 22 nt, Human
acagccaggaggaacucaguga

SEQ ID NO: 389114 - RNA, 20 nt, Human
uacuggauuagggcucaccc

SEQ ID NO: 389115 - RNA, 22 nt, Human
gagagcugggaaagccguggag

SEQ ID NO: 389116 - RNA, 22 nt, Human
ggggccuguagagcuucaggga

SEQ ID NO: 389117 - RNA, 22 nt, Human
gggcacuggaaggcucucaggc

SEQ ID NO: 389118 - RNA, 22 nt, Human
augcugugaaaaagaaggcuga

SEQ ID NO: 389119 - RNA, 22 nt, Human
acucaggaaauugagauaaugg

SEQ ID NO: 389120 - RNA, 22 nt, Human
aucaaaguggaaguuuacuagg

SEQ ID NO: 389121 - RNA, 22 nt, Human
uggaaagagguagaggaucugg

SEQ ID NO: 389122 - RNA, 22 nt, Human
gacagggcgagacucagucuca

SEQ ID NO: 389123 - RNA, 21 nt, Human
uuagaagcuaaugcagcuggu

SEQ ID NO: 389124 - RNA, 19 nt, Human
cauguuaugcuguaguauc

SEQ ID NO: 389125 - RNA, 22 nt, Human
ccagccacagcuuccagcuccu

SEQ ID NO: 389126 - RNA, 20 nt, Human
cagcugccuggcucugggau

SEQ ID NO: 389127 - RNA, 22 nt, Human
ggcagaagauaggacagggaau

SEQ ID NO: 389128 - RNA, 22 nt, Human
ccagggcuccauugcucauccu

SEQ ID NO: 389129 - RNA, 22 nt, Human
ccagguggcuucugcccgaugu

SEQ ID NO: 389130 - RNA, 21 nt, Human
agagagggagaugaaacaucc

SEQ ID NO: 389131 - RNA, 22 nt, Human
acaaaauuuuuagacaaggcuu

SEQ ID NO: 389132 - RNA, 22 nt, Human
ugccaggcucagccccuaucuu

SEQ ID NO: 389133 - RNA, 18 nt, Human
uugcuuuguaagcuugca

SEQ ID NO: 389134 - RNA, 19 nt, Human
cuuauuagagugagagcuu

SEQ ID NO: 389135 - RNA, 22 nt, Human
uauuccaguccuauccucuuuu

SEQ ID NO: 389136 - RNA, 22 nt, Human
uggguaggccaggaagcagugu

SEQ ID NO: 389137 - RNA, 22 nt, Human
gugcuucaaguucuuaauguuu

SEQ ID NO: 389138 - RNA, 20 nt, Human
ccagucccugagcaccaggg

SEQ ID NO: 389139 - RNA, 18 nt, Human
uccugcagcuucuaugua

SEQ ID NO: 389140 - RNA, 21 nt, Human
auacuuugaauuacagccuug

SEQ ID NO: 389141 - RNA, 22 nt, Human
caaauucucuuacuguuugaca

SEQ ID NO: 389142 - RNA, 20 nt, Human
uuacucaguuccugccaugc

SEQ ID NO: 389143 - RNA, 22 nt, Human
cgcagggauuucaaggggccuu

SEQ ID NO: 389144 - RNA, 22 nt, Human
uccuuagagauacugucuugaa

SEQ ID NO: 389145 - RNA, 22 nt, Human
cacugagcugauagaauuccag

SEQ ID NO: 389146 - RNA, 22 nt, Human
cugggccaucagaggggcugga

SEQ ID NO: 389147 - RNA, 22 nt, Human
cuacagaagccguggucaggaa

SEQ ID NO: 389148 - RNA, 22 nt, Human
ucuagaaaaaaacugcugugga

SEQ ID NO: 389149 - RNA, 22 nt, Human
guuauacauauguguuaacaaa

SEQ ID NO: 389150 - RNA, 22 nt, Human
agccacagagagggagcugcaa

SEQ ID NO: 389151 - RNA, 20 nt, Human
ugucagugccugaggcacag

SEQ ID NO: 389152 - RNA, 22 nt, Human
uuugaagucaggcuuucuaccc

SEQ ID NO: 389153 - RNA, 19 nt, Human
uggcaucuguaaaauggug

SEQ ID NO: 389154 - RNA, 20 nt, Human
uacuugaauguugcagcagu

SEQ ID NO: 389155 - RNA, 22 nt, Human
gauggguggucucagacuugcc

SEQ ID NO: 389156 - RNA, 22 nt, Human
cucagggucugguccuuagauu

SEQ ID NO: 389157 - RNA, 22 nt, Human
ugaaggaaaugacggcagaaga

SEQ ID NO: 389158 - RNA, 22 nt, Human
cuggaagugggguuggcuugaa

SEQ ID NO: 389159 - RNA, 22 nt, Human
gcuggcuguaucaccuggccag

SEQ ID NO: 389160 - RNA, 22 nt, Human
uugaagcaggaaaauuucuauu

SEQ ID NO: 389161 - RNA, 22 nt, Human
caggauggccccggggcugugc

SEQ ID NO: 389162 - RNA, 22 nt, Human
cagccugacaccagcuuugggc

SEQ ID NO: 389163 - RNA, 22 nt, Human
agagcagauggagcuggaagag

SEQ ID NO: 389164 - RNA, 22 nt, Human
aggcugaggcaagaggaucacu

SEQ ID NO: 389165 - RNA, 22 nt, Human
cccaggagguggagcuugcagu

SEQ ID NO: 389166 - RNA, 22 nt, Human
cccaggucugugccagcucuga

SEQ ID NO: 389167 - RNA, 22 nt, Human
uuccaggggcagcagugauggu

SEQ ID NO: 389168 - RNA, 21 nt, Human
cccaggagaagaaaagaugca

SEQ ID NO: 389169 - RNA, 22 nt, Human
acugcagggcauccuggccaag

SEQ ID NO: 389170 - RNA, 22 nt, Human
cagccagaaccuaggaugagcu

SEQ ID NO: 389171 - RNA, 22 nt, Human
aauuagggagagguagcuaggu

SEQ ID NO: 389172 - RNA, 22 nt, Human
gcuccagaugaaaggccagagg

SEQ ID NO: 389173 - RNA, 22 nt, Human
cagcuggcagaaccugcaucca

SEQ ID NO: 389174 - RNA, 22 nt, Human
ugcagaggagcuggaaggcugg

SEQ ID NO: 389175 - RNA, 22 nt, Human
acaggggcuccgaaggugaggg

SEQ ID NO: 389176 - RNA, 22 nt, Human
uggcagaggaggcucagauuga

SEQ ID NO: 389177 - RNA, 22 nt, Human
ggcugugagcaggcagaaugcu

SEQ ID NO: 389178 - RNA, 22 nt, Human
cagccuguagaauacaguaaau

SEQ ID NO: 389179 - RNA, 22 nt, Human
ccagcuggucugugcucauguu

SEQ ID NO: 389180 - RNA, 23 nt, Human
cauguacagaguuugauaaagug

SEQ ID NO: 389181 - RNA, 22 nt, Human
ugcccaggguuucuaagagcag

SEQ ID NO: 389182 - RNA, 20 nt, Human
gccagcccugacacaggagc

SEQ ID NO: 389183 - RNA, 22 nt, Human
gcagcugccuauucagggcuug

SEQ ID NO: 389184 - RNA, 22 nt, Human
aaguguuuacuuaaagucaugg

SEQ ID NO: 389185 - RNA, 22 nt, Human
uauugacaauuugugaaacuau

SEQ ID NO: 389186 - RNA, 22 nt, Human
acugcuuacaaaaggaaagaau

SEQ ID NO: 389187 - RNA, 22 nt, Human
gggcaggugccagcucccuguc

SEQ ID NO: 389188 - RNA, 23 nt, Human
aacaauagguuuuggcagaauag

SEQ ID NO: 389189 - RNA, 22 nt, Human
gugcuuccccaagccacagccu

SEQ ID NO: 389190 - RNA, 22 nt, Human
auguuaaaugguuuauuauuaa

SEQ ID NO: 389191 - RNA, 22 nt, Human
ucucagggccccaaaggcuagu

SEQ ID NO: 389192 - RNA, 17 nt, Human
ucauuuguugugacuag

SEQ ID NO: 389193 - RNA, 22 nt, Human
uaggcaggugugcacugcccac

SEQ ID NO: 389194 - RNA, 22 nt, Human
ugggcucuccuggaggacaaca

SEQ ID NO: 389195 - RNA, 22 nt, Human
uuugacagcuuguuacaaaguu

SEQ ID NO: 389196 - RNA, 22 nt, Human
uucuucuugaaacuuuagguug

SEQ ID NO: 389197 - RNA, 22 nt, Human
agcuuaggaggaugaugaacau

SEQ ID NO: 389198 - RNA, 22 nt, Human
cuggucugagggcucuugaggc

SEQ ID NO: 389199 - RNA, 22 nt, Human
aggcagcugaccacaguaugau

SEQ ID NO: 389200 - RNA, 22 nt, Human
uuuuuaagagauucuccagucu

SEQ ID NO: 389201 - RNA, 22 nt, Human
agcacauucugccuugcuuugc

SEQ ID NO: 389202 - RNA, 22 nt, Human
gagauuuaauuggauuaacuua

SEQ ID NO: 389203 - RNA, 22 nt, Human
ugguuuaauuuccauuuccuug

SEQ ID NO: 389204 - RNA, 21 nt, Human
uaaggccaagucuauuucugu

SEQ ID NO: 389205 - RNA, 22 nt, Human
cuacccaggcuuagagggcugg

SEQ ID NO: 389206 - RNA, 22 nt, Human
ucuguucaguuguaccuucccc

SEQ ID NO: 389207 - RNA, 22 nt, Human
ucagagugaccuuacauggucu

SEQ ID NO: 389208 - RNA, 22 nt, Human
uccagcagggaauuaguagucu

SEQ ID NO: 389209 - RNA, 22 nt, Human
caggggcuuuuccucuauaagg

SEQ ID NO: 389210 - RNA, 22 nt, Human
aauuuuaucucuaagcaggcuu

SEQ ID NO: 389211 - RNA, 19 nt, Human
auaaggcagugacuuuuuu

SEQ ID NO: 389212 - RNA, 22 nt, Human
cuucuucagcacaauauugaug

SEQ ID NO: 389213 - RNA, 22 nt, Human
cuggcagggugggcuuugcuuu

SEQ ID NO: 389214 - RNA, 22 nt, Human
ugauuucuuccuugucauuaga

SEQ ID NO: 389215 - RNA, 22 nt, Human
gagauucuguagucaggcaucu

SEQ ID NO: 389216 - RNA, 22 nt, Human
agcaauauuucagcuagcaggu

SEQ ID NO: 389217 - RNA, 20 nt, Human
gcccaggaucucugaggcau

SEQ ID NO: 389218 - RNA, 22 nt, Human
ggguccagcgacagcaggcuca

SEQ ID NO: 389219 - RNA, 22 nt, Human
ugcauguguguguauuuauaaa

SEQ ID NO: 389220 - RNA, 22 nt, Human
gagcagcugcagugcagacccu

SEQ ID NO: 389221 - RNA, 22 nt, Human
uguaggccuauguccagcaauu

SEQ ID NO: 389222 - RNA, 22 nt, Human
gcccaggaguucaaggcugcag

SEQ ID NO: 389223 - RNA, 22 nt, Human
uucuucagucccacuagccaca

SEQ ID NO: 389224 - RNA, 22 nt, Human
ggucccagcugcucaagaggcu

SEQ ID NO: 389225 - RNA, 19 nt, Human
auacacauacguaaacuga

SEQ ID NO: 389226 - RNA, 22 nt, Human
uauggcuuuaaacaacuuaggu

SEQ ID NO: 389227 - RNA, 22 nt, Human
caggggcagucugugugcgugg

SEQ ID NO: 389228 - RNA, 22 nt, Human
uccaggcauguugggaagauga

SEQ ID NO: 389229 - RNA, 22 nt, Human
uauaacacucagaaagaaucau

SEQ ID NO: 389230 - RNA, 22 nt, Human
gaaggcaacaccaggaugcacu

SEQ ID NO: 389231 - RNA, 22 nt, Human
cuagaaauauuuuacagucaag

SEQ ID NO: 389232 - RNA, 22 nt, Human
ccagcaggagacuagcaacaua

SEQ ID NO: 389233 - RNA, 22 nt, Human
gcuggcagagagcuggugagga

SEQ ID NO: 389234 - RNA, 20 nt, Human
uuuuuccuucucuacaggca

SEQ ID NO: 389235 - RNA, 22 nt, Human
caugauaauuguuaacaaagua

SEQ ID NO: 389236 - RNA, 22 nt, Human
uuucaacaccagagaccaugcg

SEQ ID NO: 389237 - RNA, 22 nt, Human
uaguggagguggucugugaacu

SEQ ID NO: 389238 - RNA, 22 nt, Human
gcaggcagucaucuuucauauu

SEQ ID NO: 389239 - RNA, 22 nt, Human
aggcugcuucagcugcagggag

SEQ ID NO: 389240 - RNA, 22 nt, Human
gcugccucaggcaccuccuggc

SEQ ID NO: 389241 - RNA, 22 nt, Human
gaaaacuaacggaaaaguuagg

SEQ ID NO: 389242 - RNA, 22 nt, Human
ggagaguggauuccagcuguau

SEQ ID NO: 389243 - RNA, 16 nt, Human
gggagggaguuggugg

SEQ ID NO: 389244 - RNA, 22 nt, Human
uggagcugagagccaggcuggc

SEQ ID NO: 389245 - RNA, 22 nt, Human
uuuuccuuucaucaggacaaag

SEQ ID NO: 389246 - RNA, 22 nt, Human
cugccaggggccucacaggcca

SEQ ID NO: 389247 - RNA, 22 nt, Human
uauuccuauuucuaaacauaug

SEQ ID NO: 389248 - RNA, 22 nt, Human
ugcagggcccuugggguugaac

SEQ ID NO: 389249 - RNA, 18 nt, Human
cagauccaggcagcuauu

SEQ ID NO: 389250 - RNA, 22 nt, Human
ccuggcacgaagggcugagguu

SEQ ID NO: 389251 - RNA, 22 nt, Human
auaaaaguuuccaaucaugccu

SEQ ID NO: 389252 - RNA, 22 nt, Human
uagaacagaguuccagugauca

SEQ ID NO: 389253 - RNA, 22 nt, Human
ucaaauaugugauagaagcuaa

SEQ ID NO: 389254 - RNA, 22 nt, Human
gcacacccucucaccagcacug

SEQ ID NO: 389255 - RNA, 22 nt, Human
cagaaaaggaagagcuauguaa

SEQ ID NO: 389256 - RNA, 21 nt, Human
ugcaggaaagugcugcgaccc

SEQ ID NO: 389257 - RNA, 22 nt, Human
ugauucuauggaaggcauaagg

SEQ ID NO: 389258 - RNA, 22 nt, Human
gagcccuggcagucugggaugg

SEQ ID NO: 389259 - RNA, 20 nt, Human
ugaggcucagagagguugag

SEQ ID NO: 389260 - RNA, 17 nt, Human
ugcugccaagucccaac

SEQ ID NO: 389261 - RNA, 22 nt, Human
ugagggcugcuuccagagcuag

SEQ ID NO: 389262 - RNA, 22 nt, Human
uacaguaaccagucuacuuaga

SEQ ID NO: 389263 - RNA, 17 nt, Human
ugguggcuggagucagg

SEQ ID NO: 389264 - RNA, 22 nt, Human
uaaucuaccacuauugcaauau

SEQ ID NO: 389265 - RNA, 20 nt, Human
gggagucuggaugaaagaug

SEQ ID NO: 389266 - RNA, 22 nt, Human
aaggcacuugcccagagcugca

SEQ ID NO: 389267 - RNA, 22 nt, Human
ucuugauuacaaauaacaucau

SEQ ID NO: 389268 - RNA, 22 nt, Human
uuuuuugucuugaagaaauggu

SEQ ID NO: 389269 - RNA, 21 nt, Human
gccagggaagagaguuggcug

SEQ ID NO: 389270 - RNA, 22 nt, Human
caaagaagagauuuacagagcu

SEQ ID NO: 389271 - RNA, 22 nt, Human
auuauucaacacuugagaaauu

SEQ ID NO: 389272 - RNA, 19 nt, Human
gcuccugggccucacucau

SEQ ID NO: 389273 - RNA, 22 nt, Human
cucugugagggucuguacagaa

SEQ ID NO: 389274 - RNA, 22 nt, Human
gaagugaagagauuagaaauca

SEQ ID NO: 389275 - RNA, 22 nt, Human
cuggcaggaaguuagaugguaa

SEQ ID NO: 389276 - RNA, 22 nt, Human
ggccugagcuugggcagcguau

SEQ ID NO: 389277 - RNA, 22 nt, Human
aagccagguuccauggaggagc

SEQ ID NO: 389278 - RNA, 22 nt, Human
aaaugucuuucaauagagaaau

SEQ ID NO: 389279 - RNA, 22 nt, Human
ucaugacaacuauauuauucca

SEQ ID NO: 389280 - RNA, 22 nt, Human
uuccagcaggcagacaggagau

SEQ ID NO: 389281 - RNA, 22 nt, Human
ccagccuggacugggucuugug

SEQ ID NO: 389282 - RNA, 19 nt, Human
ugaagcaggcagagaagau

SEQ ID NO: 389283 - RNA, 22 nt, Human
ccaaggagaaugacaccaugga

SEQ ID NO: 389284 - RNA, 21 nt, Human
accucaagcaacaaccaaggu

SEQ ID NO: 389285 - RNA, 22 nt, Human
gugguuuucuccaacccagaac

SEQ ID NO: 389286 - RNA, 22 nt, Human
aauucaugaguagaaucuauau

SEQ ID NO: 389287 - RNA, 22 nt, Human
uccagccaagccuugguagcug

SEQ ID NO: 389288 - RNA, 22 nt, Human
ucagaauuagagcucuucuuga

SEQ ID NO: 389289 - RNA, 22 nt, Human
gcucuaauugaaaaauacugca

SEQ ID NO: 389290 - RNA, 22 nt, Human
uccuugaagaaugauucuugga

SEQ ID NO: 389291 - RNA, 22 nt, Human
ucaacagaagugauagcuauua

SEQ ID NO: 389292 - RNA, 20 nt, Human
ccuggagccuggaaggaguc

SEQ ID NO: 389293 - RNA, 22 nt, Human
ucaccaggcuggaaugcagugg

SEQ ID NO: 389294 - RNA, 22 nt, Human
uaaggcacuucaauguuuagaa

SEQ ID NO: 389295 - RNA, 22 nt, Human
uggcugcagacaccuauggcag

SEQ ID NO: 389296 - RNA, 22 nt, Human
aagggcugccagggggugccag

SEQ ID NO: 389297 - RNA, 22 nt, Human
uagcagagcagggaucagagcc

SEQ ID NO: 389298 - RNA, 22 nt, Human
cacacaugucucuccaugcucu

SEQ ID NO: 389299 - RNA, 22 nt, Human
ugucaugccaccguuucccaga

SEQ ID NO: 389300 - RNA, 22 nt, Human
auuuaaaugcuuaagaggguuu

SEQ ID NO: 389301 - RNA, 22 nt, Human
aauuagggaaaauuuacuugua

SEQ ID NO: 389302 - RNA, 20 nt, Human
agaagcugauacugauggaa

SEQ ID NO: 389303 - RNA, 22 nt, Human
gcugugcuugggaagaaucucu

SEQ ID NO: 389304 - RNA, 22 nt, Human
caucagaaggaaggacgauuau

SEQ ID NO: 389305 - RNA, 22 nt, Human
ccaggcugagcaugauuggagc

SEQ ID NO: 389306 - RNA, 22 nt, Human
uccugagagcagaguccaggug

SEQ ID NO: 389307 - RNA, 22 nt, Human
gugugcaguagagaaagagcag

SEQ ID NO: 389308 - RNA, 17 nt, Human
cauuuguugaucaguug

SEQ ID NO: 389309 - RNA, 22 nt, Human
gcugugcuggaaggggaccugc

SEQ ID NO: 389310 - RNA, 22 nt, Human
agguuauaugucauacugaagu

SEQ ID NO: 389311 - RNA, 17 nt, Human
uuucuccuuccaucuca

SEQ ID NO: 389312 - RNA, 22 nt, Human
uggaagggggaagacagcucug

SEQ ID NO: 389313 - RNA, 22 nt, Human
ggcaagaaggcuucagguagcu

SEQ ID NO: 389314 - RNA, 22 nt, Human
augggaggcagcagagcccagc

SEQ ID NO: 389315 - RNA, 22 nt, Human
cucuccucagaacaggcccucu

SEQ ID NO: 389316 - RNA, 22 nt, Human
ggaggagguggguuaaguugua

SEQ ID NO: 389317 - RNA, 22 nt, Human
acauuucuaucauccuguaaug

SEQ ID NO: 389318 - RNA, 22 nt, Human
gcugccuguccugaggaguccg

SEQ ID NO: 389319 - RNA, 22 nt, Human
uuuauuccaugugucuaugacc

SEQ ID NO: 389320 - RNA, 22 nt, Human
aggacaguguggaagagggugc

SEQ ID NO: 389321 - RNA, 22 nt, Human
acaggcucucagccaguuggca

SEQ ID NO: 389322 - RNA, 22 nt, Human
ccccaggagcuuguuuuagaga

SEQ ID NO: 389323 - RNA, 22 nt, Human
aauuucaaugcacucaugguug

SEQ ID NO: 389324 - RNA, 21 nt, Human
uggcugccuacaugcugcagg

SEQ ID NO: 389325 - RNA, 22 nt, Human
accugagaccuaaucugacugu

SEQ ID NO: 389326 - RNA, 22 nt, Human
aggucaccauggcaugcuccac

SEQ ID NO: 389327 - RNA, 22 nt, Human
ucucuggagggcuccaggcggg

SEQ ID NO: 389328 - RNA, 22 nt, Human
ccagagcugcauccagcagguu

SEQ ID NO: 389329 - RNA, 22 nt, Human
agcacuuuccuggcaaaugugg

SEQ ID NO: 389330 - RNA, 22 nt, Human
agucaauuaucucuaggucauc

SEQ ID NO: 389331 - RNA, 22 nt, Human
cccaggcagccccagaagcuug

SEQ ID NO: 389332 - RNA, 22 nt, Human
ggcuggaaaagacaaagcuauu

SEQ ID NO: 389333 - RNA, 22 nt, Human
aagauguaucaguuaagucuuc

SEQ ID NO: 389334 - RNA, 17 nt, Human
uuccuggaagucauucc

SEQ ID NO: 389335 - RNA, 20 nt, Human
uuucugugagaaacacuguu

SEQ ID NO: 389336 - RNA, 22 nt, Human
cauuccuuaacguggggagucu

SEQ ID NO: 389337 - RNA, 22 nt, Human
gggaaauugugugagaucuuug

SEQ ID NO: 389338 - RNA, 22 nt, Human
gagaggcagaggccugaaaccg

SEQ ID NO: 389339 - RNA, 22 nt, Human
ggcuguccuuggccaaggcacu

SEQ ID NO: 389340 - RNA, 22 nt, Human
cuuccucaugugcaaugcaagc

SEQ ID NO: 389341 - RNA, 22 nt, Human
cccagccuuugcuuccugguuc

SEQ ID NO: 389342 - RNA, 19 nt, Human
guugaaaguaggugagggu

SEQ ID NO: 389343 - RNA, 22 nt, Human
gagaggggcccaagccacauag

SEQ ID NO: 389344 - RNA, 22 nt, Human
cagcuuguuuuauuuggggacc

SEQ ID NO: 389345 - RNA, 22 nt, Human
gcugcucugugacagccuccgg

SEQ ID NO: 389346 - RNA, 21 nt, Human
uucaagauauuuaaaaggugg

SEQ ID NO: 389347 - RNA, 22 nt, Human
gagccagcgccuugccucuggg

SEQ ID NO: 389348 - RNA, 23 nt, Human
ccagccucugggucuucauccag

SEQ ID NO: 389349 - RNA, 22 nt, Human
uuguuucauggggauguuuauu

SEQ ID NO: 389350 - RNA, 22 nt, Human
aaagccaguucuuagagaaagc

SEQ ID NO: 389351 - RNA, 22 nt, Human
uuucucuaaauagggaggcuua

SEQ ID NO: 389352 - RNA, 22 nt, Human
uacugccuggagcauuggugcu

SEQ ID NO: 389353 - RNA, 18 nt, Human
acucaggaaaugaugaca

SEQ ID NO: 389354 - RNA, 22 nt, Human
gaggagaaagcagugauuugug

SEQ ID NO: 389355 - RNA, 22 nt, Human
agcugccacagagccuggccag

SEQ ID NO: 389356 - RNA, 22 nt, Human
aggcuucuucuuccuauuuagu

SEQ ID NO: 389357 - RNA, 22 nt, Human
cacaggccugucucuuucuaac

SEQ ID NO: 389358 - RNA, 22 nt, Human
aaaguuugagugauuugacaca

SEQ ID NO: 389359 - RNA, 22 nt, Human
ugcauacacaugugcacauacg

SEQ ID NO: 389360 - RNA, 22 nt, Human
ucuggccauggcaagccgagug

SEQ ID NO: 389361 - RNA, 22 nt, Human
gcucccaccuuugcuaucagua

SEQ ID NO: 389362 - RNA, 22 nt, Human
ugcauggacucaucagacaaga

SEQ ID NO: 389363 - RNA, 22 nt, Human
cauugcacagcccuguggugau

SEQ ID NO: 389364 - RNA, 22 nt, Human
acuuugaaagccuuggccccgg

SEQ ID NO: 389365 - RNA, 22 nt, Human
cauggcugcgagaagagugggu

SEQ ID NO: 389366 - RNA, 22 nt, Human
acugucuuccaggucuggaggu

SEQ ID NO: 389367 - RNA, 22 nt, Human
cugggaggugaacagaaaaacu

SEQ ID NO: 389368 - RNA, 21 nt, Human
aagcuucccugcucuccaggg

SEQ ID NO: 389369 - RNA, 22 nt, Human
gagaggcugacuggcuguccug

SEQ ID NO: 389370 - RNA, 22 nt, Human
cagccagcugaauguaccauga

SEQ ID NO: 389371 - RNA, 22 nt, Human
uuuccauguuggugaaaugagg

SEQ ID NO: 389372 - RNA, 22 nt, Human
guccugggcccaggggcugccu

SEQ ID NO: 389373 - RNA, 22 nt, Human
gugccagcucuccccacaucug

SEQ ID NO: 389374 - RNA, 22 nt, Human
ggcaggguggcccuccagugag

SEQ ID NO: 389375 - RNA, 22 nt, Human
ggaggugggcuaaggacucucu

SEQ ID NO: 389376 - RNA, 22 nt, Human
cuggcuggucaucagcaguacg

SEQ ID NO: 389377 - RNA, 21 nt, Human
aggauuuacuauuaacugugu

SEQ ID NO: 389378 - RNA, 22 nt, Human
uuugaaaggagcuuuauccaga

SEQ ID NO: 389379 - RNA, 22 nt, Human
cugcagggcagaagggcauaga

SEQ ID NO: 389380 - RNA, 22 nt, Human
augaaacagugaauuagucaag

SEQ ID NO: 389381 - RNA, 22 nt, Human
cagcugagcaucacuagucugg

SEQ ID NO: 389382 - RNA, 22 nt, Human
cugggaggcagucucucuagaa

SEQ ID NO: 389383 - RNA, 22 nt, Human
cugagcagccccaccagccauu

SEQ ID NO: 389384 - RNA, 22 nt, Human
ggguacuuaauauuuacggggu

SEQ ID NO: 389385 - RNA, 22 nt, Human
agagggcaaguguaguccagua

SEQ ID NO: 389386 - RNA, 22 nt, Human
gccagcuggagugagagugggc

SEQ ID NO: 389387 - RNA, 22 nt, Human
accaguccgcggagcuccgggg

SEQ ID NO: 389388 - RNA, 22 nt, Human
caaaggcuucaucucagagcag

SEQ ID NO: 389389 - RNA, 22 nt, Human
cugggccauggaagucucugcc

SEQ ID NO: 389390 - RNA, 22 nt, Human
aaaagacauaugugggcauucu

SEQ ID NO: 389391 - RNA, 22 nt, Human
uggagcaggugggaugucguga

SEQ ID NO: 389392 - RNA, 22 nt, Human
ucaggaucggccuuuuuuuaag

SEQ ID NO: 389393 - RNA, 22 nt, Human
acagaauuaaugaaaauuacaa

SEQ ID NO: 389394 - RNA, 22 nt, Human
uucauucuugucuuuguauagu

SEQ ID NO: 389395 - RNA, 22 nt, Human
agcugcccccagggcugugcuu

SEQ ID NO: 389396 - RNA, 22 nt, Human
augguuuguaacccaauacucc

SEQ ID NO: 389397 - RNA, 22 nt, Human
ccaggacuucgaggcuacagug

SEQ ID NO: 389398 - RNA, 22 nt, Human
uaugagcuuccaguguugcaug

SEQ ID NO: 389399 - RNA, 22 nt, Human
agggcuguuuuuggcaccuggg

SEQ ID NO: 389400 - RNA, 22 nt, Human
gagccagccuucuucugagguc

SEQ ID NO: 389401 - RNA, 22 nt, Human
ggagaagggacagacucagcuu

SEQ ID NO: 389402 - RNA, 22 nt, Human
ugagcuuacuucuguacacaga

SEQ ID NO: 389403 - RNA, 22 nt, Human
gccagcagcccagaaggacuuu

SEQ ID NO: 389404 - RNA, 22 nt, Human
ggcuccuggcaucuggugggua

SEQ ID NO: 389405 - RNA, 22 nt, Human
ucagaaauagucuuuaaaauga

SEQ ID NO: 389406 - RNA, 22 nt, Human
uuccuuagacagagguggucau

SEQ ID NO: 389407 - RNA, 22 nt, Human
ccaggcugugguuuagauagag

SEQ ID NO: 389408 - RNA, 22 nt, Human
gagggaaagguuaauacaugau

SEQ ID NO: 389409 - RNA, 22 nt, Human
gggagacacgcugcaggcauaa

SEQ ID NO: 389410 - RNA, 22 nt, Human
cacauggaagagauacagugag

SEQ ID NO: 389411 - RNA, 22 nt, Human
uaauuuuacuuccugagcaccu

SEQ ID NO: 389412 - RNA, 20 nt, Human
ugggcugaggaucaggugcc

SEQ ID NO: 389413 - RNA, 22 nt, Human
uggcccugcuggccaaaggcua

SEQ ID NO: 389414 - RNA, 22 nt, Human
agagugauucuaguuagggaau

SEQ ID NO: 389415 - RNA, 20 nt, Human
gucucagaauggauuugcau

SEQ ID NO: 389416 - RNA, 22 nt, Human
gaggcagagugcaccccaggag

SEQ ID NO: 389417 - RNA, 22 nt, Human
ggguccagcuacaucagggugg

SEQ ID NO: 389418 - RNA, 22 nt, Human
uucuggagagaaaccuuacaaa

SEQ ID NO: 389419 - RNA, 22 nt, Human
agcaguccaacugagguggcau

SEQ ID NO: 389420 - RNA, 22 nt, Human
ucagagguaguagcagaguuga

SEQ ID NO: 389421 - RNA, 22 nt, Human
aggaccugacuggcuccugcuu

SEQ ID NO: 389422 - RNA, 22 nt, Human
agaggggaggcgaaccagaguc

SEQ ID NO: 389423 - RNA, 22 nt, Human
ccagggugugagaaggaaguag

SEQ ID NO: 389424 - RNA, 22 nt, Human
ugcucuggaguggcuugugcac

SEQ ID NO: 389425 - RNA, 22 nt, Human
acugcuuuaucugagaaguccu

SEQ ID NO: 389426 - RNA, 22 nt, Human
ugcagccaucuuucuuggagga

SEQ ID NO: 389427 - RNA, 20 nt, Human
uugauucaagggcugaugga

SEQ ID NO: 389428 - RNA, 15 nt, Human
cccaggaguucgaga

SEQ ID NO: 389429 - RNA, 22 nt, Human
auuuacugagguaaauaaacug

SEQ ID NO: 389430 - RNA, 22 nt, Human
agguauauauucugguccuuau

SEQ ID NO: 389431 - RNA, 22 nt, Human
gauagaaagguguugaaaucca

SEQ ID NO: 389432 - RNA, 22 nt, Human
cuguaguugaugauuucugaua

SEQ ID NO: 389433 - RNA, 22 nt, Human
cacguuuuaugacagaagaagc

SEQ ID NO: 389434 - RNA, 22 nt, Human
cuggagugaagcuuauuuuuca

SEQ ID NO: 389435 - RNA, 22 nt, Human
gcugcucugaaaaugacuguug

SEQ ID NO: 389436 - RNA, 22 nt, Human
ggagaugccagaauugcaaauu

SEQ ID NO: 389437 - RNA, 22 nt, Human
accaggcacuccugaggucuga

SEQ ID NO: 389438 - RNA, 22 nt, Human
gagcacagcuggagguagcauu

SEQ ID NO: 389439 - RNA, 20 nt, Human
cuucuucauuaacccuacug

SEQ ID NO: 389440 - RNA, 22 nt, Human
ccagcuuuaucaagucugagcu

SEQ ID NO: 389441 - RNA, 20 nt, Human
guauuagguguuccucuuuc

SEQ ID NO: 389442 - RNA, 22 nt, Human
aucagaaaaacauaauguuauu

SEQ ID NO: 389443 - RNA, 22 nt, Human
cugggaggcaccgcgucgugcu

SEQ ID NO: 389444 - RNA, 22 nt, Human
uauacaauggcugaaucaucca

SEQ ID NO: 389445 - RNA, 22 nt, Human
cggcagcucgagggccacccgu

SEQ ID NO: 389446 - RNA, 22 nt, Human
ccuucugcuggucaucccagug

SEQ ID NO: 389447 - RNA, 22 nt, Human
uacaguagaauuuuuaguaacu

SEQ ID NO: 389448 - RNA, 22 nt, Human
uaagaacuucggacauguuauc

SEQ ID NO: 389449 - RNA, 22 nt, Human
ugaagaaucagauuggccugcg

SEQ ID NO: 389450 - RNA, 22 nt, Human
gcugagccccccugcguggguc

SEQ ID NO: 389451 - RNA, 22 nt, Human
ccagggcaacgcugucucagag

SEQ ID NO: 389452 - RNA, 22 nt, Human
gcuggccugcgagggcaggcug

SEQ ID NO: 389453 - RNA, 20 nt, Human
aaaauauguauaacucuucu

SEQ ID NO: 389454 - RNA, 22 nt, Human
cuggguggaucgcagccccagg

SEQ ID NO: 389455 - RNA, 20 nt, Human
uauaacaguguugggugugu

SEQ ID NO: 389456 - RNA, 22 nt, Human
auacuaaaguauagaacuuagu

SEQ ID NO: 389457 - RNA, 22 nt, Human
gcaggaugccagggcagcagcg

SEQ ID NO: 389458 - RNA, 19 nt, Human
ccuguucaugacucugucc

SEQ ID NO: 389459 - RNA, 22 nt, Human
acuucauuguaauauuauagca

SEQ ID NO: 389460 - RNA, 19 nt, Human
uuuggcacucugaaguguu

SEQ ID NO: 389461 - RNA, 22 nt, Human
uuaggaaacgcugcuauugacu

SEQ ID NO: 389462 - RNA, 22 nt, Human
gucaggauguuuauucuccagu

SEQ ID NO: 389463 - RNA, 22 nt, Human
aaguccagaacuccugugauag

SEQ ID NO: 389464 - RNA, 22 nt, Human
acaggcagggaccuuggcuaag

SEQ ID NO: 389465 - RNA, 22 nt, Human
cccuuccuccucgccugucaga

SEQ ID NO: 389466 - RNA, 22 nt, Human
cugagcugggaguggauagugg

SEQ ID NO: 389467 - RNA, 22 nt, Human
ggucccaggaaucuguguucua

SEQ ID NO: 389468 - RNA, 22 nt, Human
cagugaaguuuaaaguguagau

SEQ ID NO: 389469 - RNA, 22 nt, Human
agcugccaucagccuuuggaug

SEQ ID NO: 389470 - RNA, 22 nt, Human
uaaugcuuaauuuucacaagcc

SEQ ID NO: 389471 - RNA, 22 nt, Human
acagaauuaucaggaaauguua

SEQ ID NO: 389472 - RNA, 22 nt, Human
ugaacuccaaauacugcugauu

SEQ ID NO: 389473 - RNA, 22 nt, Human
gcggcaggaagagcgcagcccc

SEQ ID NO: 389474 - RNA, 22 nt, Human
uggcagguuuccuccucauagu

SEQ ID NO: 389475 - RNA, 22 nt, Human
uccauggggcccaggaugagag

SEQ ID NO: 389476 - RNA, 23 nt, Human
ccagcugugccuggcccaggagc

SEQ ID NO: 389477 - RNA, 22 nt, Human
uaacagaaauuuuaguuagggg

SEQ ID NO: 389478 - RNA, 22 nt, Human
ccucucauagucuguauccuuu

SEQ ID NO: 389479 - RNA, 22 nt, Human
aggugcaggagcugugcaggga

SEQ ID NO: 389480 - RNA, 22 nt, Human
gaauuucaggacaacuggaagg

SEQ ID NO: 389481 - RNA, 22 nt, Human
aaaugcacacaccaggaaacua

SEQ ID NO: 389482 - RNA, 22 nt, Human
uggcacugccuggcagggcccc

SEQ ID NO: 389483 - RNA, 22 nt, Human
gcuucucuggccugcagggcau

SEQ ID NO: 389484 - RNA, 22 nt, Human
gcccaggauggcuggaggugcu

SEQ ID NO: 389485 - RNA, 22 nt, Human
auucaaauuaaguuaauucagc

SEQ ID NO: 389486 - RNA, 19 nt, Human
ugggcagcucccucugucc

SEQ ID NO: 389487 - RNA, 19 nt, Human
caguggccuggaggucucu

SEQ ID NO: 389488 - RNA, 22 nt, Human
uaucuguuugcucacagguguu

SEQ ID NO: 389489 - RNA, 20 nt, Human
agaggaggauuauuuuauuc

SEQ ID NO: 389490 - RNA, 21 nt, Human
ugggaugggucugggaccagc

SEQ ID NO: 389491 - RNA, 22 nt, Human
caucagaauguuauggggggcu

SEQ ID NO: 389492 - RNA, 22 nt, Human
cccaggaacuccagagcuccuc

SEQ ID NO: 389493 - RNA, 22 nt, Human
gaagaaucugaggacagucauu

SEQ ID NO: 389494 - RNA, 22 nt, Human
cauacauuuugcauauuuacca

SEQ ID NO: 389495 - RNA, 22 nt, Human
ugcaggaaauuccaggguggcc

SEQ ID NO: 389496 - RNA, 22 nt, Human
agccugagagccaagcugugca

SEQ ID NO: 389497 - RNA, 22 nt, Human
agaucuauuagcaaacugccau

SEQ ID NO: 389498 - RNA, 22 nt, Human
ugaagaauaaaugguugagacu

SEQ ID NO: 389499 - RNA, 22 nt, Human
ugcuggaggccugacuguguuu

SEQ ID NO: 389500 - RNA, 22 nt, Human
aggcuucuuagauuggcuggag

SEQ ID NO: 389501 - RNA, 22 nt, Human
caggaggcaguuucagaaguca

SEQ ID NO: 389502 - RNA, 22 nt, Human
aagagccagugggaaagucuug

SEQ ID NO: 389503 - RNA, 22 nt, Human
uggagcucaaaggccuguggga

SEQ ID NO: 389504 - RNA, 22 nt, Human
agccacagcccacaggacucuu

SEQ ID NO: 389505 - RNA, 16 nt, Human
ucccaggaggcggaac

SEQ ID NO: 389506 - RNA, 22 nt, Human
aggggaaggccagccuguagag

SEQ ID NO: 389507 - RNA, 22 nt, Human
auguagcaugaggcacugugcc

SEQ ID NO: 389508 - RNA, 23 nt, Human
uuagagaugauuaaaaaaucuug

SEQ ID NO: 389509 - RNA, 22 nt, Human
uagaaacagauguuuuugaaga

SEQ ID NO: 389510 - RNA, 22 nt, Human
ggggugggguuacucauugugc

SEQ ID NO: 389511 - RNA, 22 nt, Human
agcugcuacugcucugccagag

SEQ ID NO: 389512 - RNA, 22 nt, Human
agaggccaucugcucugugggg

SEQ ID NO: 389513 - RNA, 22 nt, Human
agccaagcacucaacuccugga

SEQ ID NO: 389514 - RNA, 22 nt, Human
ucugguaaccuuuaucccuccu

SEQ ID NO: 389515 - RNA, 22 nt, Human
ugggaccugcucuuggaaugag

SEQ ID NO: 389516 - RNA, 22 nt, Human
gaacaguaaauuuaugcagcac

SEQ ID NO: 389517 - RNA, 22 nt, Human
ggggcagagucuggacuguugu

SEQ ID NO: 389518 - RNA, 22 nt, Human
caucagcacuaugauuaaagua

SEQ ID NO: 389519 - RNA, 22 nt, Human
ccagcccugccagagagagcug

SEQ ID NO: 389520 - RNA, 22 nt, Human
uuccucucgcucuccggggccc

SEQ ID NO: 389521 - RNA, 22 nt, Human
gagcagcugguaggugaaccca

SEQ ID NO: 389522 - RNA, 17 nt, Human
gcucccugaggacagcu

SEQ ID NO: 389523 - RNA, 22 nt, Human
gcccugggauuggguggaggcu

SEQ ID NO: 389524 - RNA, 22 nt, Human
ucccagggacugggcuaggcuu

SEQ ID NO: 389525 - RNA, 22 nt, Human
aagauuuagggccaguuuacau

SEQ ID NO: 389526 - RNA, 22 nt, Human
aaggcaggagcuguaucuuauu

SEQ ID NO: 389527 - RNA, 22 nt, Human
aaaugcagguucuugagccaag

SEQ ID NO: 389528 - RNA, 22 nt, Human
cccuuagcuccaagggguuugg

SEQ ID NO: 389529 - RNA, 22 nt, Human
cccuggaguccggagcucaccu

SEQ ID NO: 389530 - RNA, 22 nt, Human
uucagaaguagcuaagcaguca

SEQ ID NO: 389531 - RNA, 22 nt, Human
ugggaguguucuuggcuugcuu

SEQ ID NO: 389532 - RNA, 22 nt, Human
gacagaggcuggagcaccuccu

SEQ ID NO: 389533 - RNA, 22 nt, Human
agcugcagauucuaucuagaag

SEQ ID NO: 389534 - RNA, 21 nt, Human
ugccaggccugagcugggguc

SEQ ID NO: 389535 - RNA, 22 nt, Human
gccugaagaacagcugugagga

SEQ ID NO: 389536 - RNA, 22 nt, Human
auagucuuagaucagauaaagu

SEQ ID NO: 389537 - RNA, 21 nt, Human
ugcaggcaggcagagaugcug

SEQ ID NO: 389538 - RNA, 22 nt, Human
agauguggauccuaggguagaa

SEQ ID NO: 389539 - RNA, 22 nt, Human
gccuggagggcucuagagaggc

SEQ ID NO: 389540 - RNA, 22 nt, Human
cagugcagaggccagggaggau

SEQ ID NO: 389541 - RNA, 22 nt, Human
gccaggcauuuauugauugaau

SEQ ID NO: 389542 - RNA, 22 nt, Human
ucauguaaguauagaaagcagu

SEQ ID NO: 389543 - RNA, 19 nt, Human
gggaaauucacuugcuucc

SEQ ID NO: 389544 - RNA, 22 nt, Human
gcucccaccuccagccugaguu

SEQ ID NO: 389545 - RNA, 22 nt, Human
accaaggagaaggugcaagcuu

SEQ ID NO: 389546 - RNA, 22 nt, Human
agcugugguucugggcagcgac

SEQ ID NO: 389547 - RNA, 22 nt, Human
acagugucaugucguguucccc

SEQ ID NO: 389548 - RNA, 22 nt, Human
ucagcaguuuuauaugcagcuu

SEQ ID NO: 389549 - RNA, 22 nt, Human
agccucucugaugugacagcua

SEQ ID NO: 389550 - RNA, 21 nt, Human
ccaggaaggacugagcucccu

SEQ ID NO: 389551 - RNA, 22 nt, Human
uaaagucaucuuuacaucuuug

SEQ ID NO: 389552 - RNA, 22 nt, Human
uuggaaagcaagcuggacauac

SEQ ID NO: 389553 - RNA, 22 nt, Human
ugucucagaauggcucauaaua

SEQ ID NO: 389554 - RNA, 20 nt, Human
gugaccagaagacagugggu

SEQ ID NO: 389555 - RNA, 22 nt, Human
gggagggaggugaugcuuggcu

SEQ ID NO: 389556 - RNA, 22 nt, Human
gugggcaaggucccugccagcu

SEQ ID NO: 389557 - RNA, 22 nt, Human
gcagccucaaacuccccagcuc

SEQ ID NO: 389558 - RNA, 20 nt, Human
agcugguuaucuuaauucuu

SEQ ID NO: 389559 - RNA, 22 nt, Human
uggcucaggggucuggcucugu

SEQ ID NO: 389560 - RNA, 22 nt, Human
cauugcaccacauugcaucccu

SEQ ID NO: 389561 - RNA, 22 nt, Human
gcuggguggaucggaggcucug

SEQ ID NO: 389562 - RNA, 22 nt, Human
aagugccugaccuagccuggag

SEQ ID NO: 389563 - RNA, 22 nt, Human
cuguacaucccgagagccagua

SEQ ID NO: 389564 - RNA, 22 nt, Human
uucacaguggcugugccauuug

SEQ ID NO: 389565 - RNA, 22 nt, Human
uaguccuuuccggcugcuauaa

SEQ ID NO: 389566 - RNA, 22 nt, Human
cagcuuuauugagguauaauug

SEQ ID NO: 389567 - RNA, 22 nt, Human
uggcucagccuggcccuuucau

SEQ ID NO: 389568 - RNA, 22 nt, Human
gcugcucugggucugcccagcu

SEQ ID NO: 389569 - RNA, 19 nt, Human
gaaggcugaaaugaagcac

SEQ ID NO: 389570 - RNA, 22 nt, Human
agucucagaaaauaugcuuuuu

SEQ ID NO: 389571 - RNA, 22 nt, Human
gucccacaccuugaggggucuu

SEQ ID NO: 389572 - RNA, 22 nt, Human
uucaauucuaaacuaauauucu

SEQ ID NO: 389573 - RNA, 22 nt, Human
gcuggagcuugagaggacaggg

SEQ ID NO: 389574 - RNA, 22 nt, Human
agagcaggcauaaagcuuugaa

SEQ ID NO: 389575 - RNA, 22 nt, Human
ugcuuaauguacgugaguguac

SEQ ID NO: 389576 - RNA, 22 nt, Human
gcuguguuugacaguagcagac

SEQ ID NO: 389577 - RNA, 22 nt, Human
cccaggagguggaguucacagu

SEQ ID NO: 389578 - RNA, 22 nt, Human
cgacccuacagacagugcugag

SEQ ID NO: 389579 - RNA, 22 nt, Human
aauuauccuuaaugcaguaagc

SEQ ID NO: 389580 - RNA, 22 nt, Human
uuucuaaaugguggcugcauug

SEQ ID NO: 389581 - RNA, 22 nt, Human
gcagccacuuugcaaccaagag

SEQ ID NO: 389582 - RNA, 22 nt, Human
ucagccaguugccccaguuagu

SEQ ID NO: 389583 - RNA, 22 nt, Human
acccugccgugggcugcuugug

SEQ ID NO: 389584 - RNA, 22 nt, Human
uggcagcagccauggaaggccc

SEQ ID NO: 389585 - RNA, 22 nt, Human
gggcaggaugcaguuucagaga

SEQ ID NO: 389586 - RNA, 22 nt, Human
aucuuguuauaagagauaaugg

SEQ ID NO: 389587 - RNA, 22 nt, Human
augaguaaaaccacuauuuaca

SEQ ID NO: 389588 - RNA, 22 nt, Human
uuacaguuuaguccaagccaga

SEQ ID NO: 389589 - RNA, 22 nt, Human
ggcaggguccacaccugggaaa

SEQ ID NO: 389590 - RNA, 22 nt, Human
ggagugucagaaacaguguccu

SEQ ID NO: 389591 - RNA, 22 nt, Human
ccugccagcauggcuuaucucc

SEQ ID NO: 389592 - RNA, 22 nt, Human
cggaggggauacauuuucugaa

SEQ ID NO: 389593 - RNA, 22 nt, Human
guggcagcugguaugcagacag

SEQ ID NO: 389594 - RNA, 22 nt, Human
gcugcugucacggugcuaaggg

SEQ ID NO: 389595 - RNA, 22 nt, Human
ucagaaaagagaaaaucuuaua

SEQ ID NO: 389596 - RNA, 22 nt, Human
gagcaugguuccauagguuggu

SEQ ID NO: 389597 - RNA, 22 nt, Human
ggaaggagggcggcaaugauga

SEQ ID NO: 389598 - RNA, 22 nt, Human
gggccucucccuucucacgcau

SEQ ID NO: 389599 - RNA, 22 nt, Human
ggcaggcaguguggugugaaac

SEQ ID NO: 389600 - RNA, 22 nt, Human
guuucgucaggcuuauucuauc

SEQ ID NO: 389601 - RNA, 22 nt, Human
gcucaaggcaggcagacaugag

SEQ ID NO: 389602 - RNA, 22 nt, Human
ugggcuguccagcaccugggcu

SEQ ID NO: 389603 - RNA, 21 nt, Human
ucuauucauuacaguuauuug

SEQ ID NO: 389604 - RNA, 22 nt, Human
uuuaguagaaugauacagggca

SEQ ID NO: 389605 - RNA, 22 nt, Human
ccugagggcgccgagcucccag

SEQ ID NO: 389606 - RNA, 22 nt, Human
ggcaauuucaugugguuuaaac

SEQ ID NO: 389607 - RNA, 22 nt, Human
agugcacaccuuaguacaaagu

SEQ ID NO: 389608 - RNA, 22 nt, Human
accucugcaacccuggaauggg

SEQ ID NO: 389609 - RNA, 23 nt, Human
gccugggacugguagugugaccu

SEQ ID NO: 389610 - RNA, 22 nt, Human
cagccaggagccucugcaacua

SEQ ID NO: 389611 - RNA, 22 nt, Human
uagaaagcuugggguguuuaaa

SEQ ID NO: 389612 - RNA, 22 nt, Human
gcaggagucacugacuuggucc

SEQ ID NO: 389613 - RNA, 22 nt, Human
gaaaagggcaagagagagggca

SEQ ID NO: 389614 - RNA, 22 nt, Human
agaccaugggcucugaagagca

SEQ ID NO: 389615 - RNA, 17 nt, Human
uaucagaauguguuuac

SEQ ID NO: 389616 - RNA, 22 nt, Human
ugcuuuaagagauuguuaguac

SEQ ID NO: 389617 - RNA, 22 nt, Human
agaaaucucaguaucucaggga

SEQ ID NO: 389618 - RNA, 22 nt, Human
agacuuugagcucuuagagaag

SEQ ID NO: 389619 - RNA, 22 nt, Human
uacaauacuuaaccuauuuugc

SEQ ID NO: 389620 - RNA, 22 nt, Human
ucacagggauggaauagaaaua

SEQ ID NO: 389621 - RNA, 22 nt, Human
ccagagccagagaggugccugc

SEQ ID NO: 389622 - RNA, 22 nt, Human
aaggagucugggccauucagag

SEQ ID NO: 389623 - RNA, 22 nt, Human
accaggcugugaagugagacua

SEQ ID NO: 389624 - RNA, 22 nt, Human
uacaaacuuguuuuaaguaagu

SEQ ID NO: 389625 - RNA, 22 nt, Human
ugcacacaguucucaggaaaga

SEQ ID NO: 389626 - RNA, 21 nt, Human
cauuuacaugacagauugguu

SEQ ID NO: 389627 - RNA, 22 nt, Human
uagaggugacacugagaccaua

SEQ ID NO: 389628 - RNA, 22 nt, Human
ucaagacaucacugugcauuuu

SEQ ID NO: 389629 - RNA, 22 nt, Human
cagucucucagcuuucagcugu

SEQ ID NO: 389630 - RNA, 21 nt, Human
gauuuuaaagagacugccaca

SEQ ID NO: 389631 - RNA, 22 nt, Human
cgggcagugcccagcggggcag

SEQ ID NO: 389632 - RNA, 22 nt, Human
uaauacuuaccuugcagagucu

SEQ ID NO: 389633 - RNA, 22 nt, Human
agcacccuccaacuucccugua

SEQ ID NO: 389634 - RNA, 22 nt, Human
aucugacaaccuauugacuuga

SEQ ID NO: 389635 - RNA, 22 nt, Human
gcugcaggagcuggagcugugg

SEQ ID NO: 389636 - RNA, 22 nt, Human
agggccuggcgcguggccgccg

SEQ ID NO: 389637 - RNA, 22 nt, Human
cugcugcauuacucuucucaag

SEQ ID NO: 389638 - RNA, 22 nt, Human
cugcuuccauaaauaaugugcu

SEQ ID NO: 389639 - RNA, 22 nt, Human
acagagagggagugauaaaucc

SEQ ID NO: 389640 - RNA, 23 nt, Human
ugacacauuuccuuuccacugca

SEQ ID NO: 389641 - RNA, 22 nt, Human
acagagccaaaaggacauagua

SEQ ID NO: 389642 - RNA, 22 nt, Human
ccauuugucaccucugcacucc

SEQ ID NO: 389643 - RNA, 22 nt, Human
cagggacauugguggccagguu

SEQ ID NO: 389644 - RNA, 22 nt, Human
agggcagcagcuccuccuagcu

SEQ ID NO: 389645 - RNA, 22 nt, Human
auguccuuccauuuugaucugu

SEQ ID NO: 389646 - RNA, 22 nt, Human
ugaggcagauauuuauuggguu

SEQ ID NO: 389647 - RNA, 22 nt, Human
uucuuuuccuacacagcgauuu

SEQ ID NO: 389648 - RNA, 22 nt, Human
gccuggagagcacugugcgcuu

SEQ ID NO: 389649 - RNA, 17 nt, Human
uccuucagggccucaca

SEQ ID NO: 389650 - RNA, 22 nt, Human
gaggccacgguuuuccuugggg

SEQ ID NO: 389651 - RNA, 22 nt, Human
cuggaagguuccucccagcucc

SEQ ID NO: 389652 - RNA, 22 nt, Human
ccaggcaggcgauggugcagug

SEQ ID NO: 389653 - RNA, 22 nt, Human
gucugcccucacgccagcuggg

SEQ ID NO: 389654 - RNA, 22 nt, Human
ucuggagcuggagggcaaggca

SEQ ID NO: 389655 - RNA, 22 nt, Human
ccuggaucagucacuguugcug

SEQ ID NO: 389656 - RNA, 19 nt, Human
caggagagcaugcacuuug

SEQ ID NO: 389657 - RNA, 22 nt, Human
uauaauuaguaaauggcagauu

SEQ ID NO: 389658 - RNA, 21 nt, Human
agcugcuccagggagcucagg

SEQ ID NO: 389659 - RNA, 22 nt, Human
agcaggugcauggcgagcgcgg

SEQ ID NO: 389660 - RNA, 22 nt, Human
uguauacauuuaacuagauaga

SEQ ID NO: 389661 - RNA, 22 nt, Human
caggcacugugcugagcucugc

SEQ ID NO: 389662 - RNA, 22 nt, Human
ggcagggaguggagacucccua

SEQ ID NO: 389663 - RNA, 22 nt, Human
aaauauagcaauuaugccuacu

SEQ ID NO: 389664 - RNA, 22 nt, Human
agugugcugcuuaaacaguugu

SEQ ID NO: 389665 - RNA, 22 nt, Human
caagaugggcaccccagcaccu

SEQ ID NO: 389666 - RNA, 22 nt, Human
uugguuuagagagugugguuac

SEQ ID NO: 389667 - RNA, 22 nt, Human
cuucucagaucucagcuuugag

SEQ ID NO: 389668 - RNA, 20 nt, Human
cccugagaccagagagcagc

SEQ ID NO: 389669 - RNA, 22 nt, Human
gaagccaguacugugcucugca

SEQ ID NO: 389670 - RNA, 20 nt, Human
ucccaggcugggcuccagcu

SEQ ID NO: 389671 - RNA, 22 nt, Human
uaaagguaguuuuaaaggugcu

SEQ ID NO: 389672 - RNA, 22 nt, Human
uagauuuaagacccugaauuug

SEQ ID NO: 389673 - RNA, 22 nt, Human
aauuuggcagugucuugaagua

SEQ ID NO: 389674 - RNA, 22 nt, Human
aucuuugaagaggacuugaagu

SEQ ID NO: 389675 - RNA, 22 nt, Human
gaggcagugucgguggcaggau

SEQ ID NO: 389676 - RNA, 22 nt, Human
aagggaggggauguaagccugg

SEQ ID NO: 389677 - RNA, 22 nt, Human
gcccagcaggacagagugguuu

SEQ ID NO: 389678 - RNA, 22 nt, Human
aaguggagagcccuggaggucu

SEQ ID NO: 389679 - RNA, 22 nt, Human
cucccuggcuuuguccugaggc

SEQ ID NO: 389680 - RNA, 22 nt, Human
ucagauggcacacagagccugc

SEQ ID NO: 389681 - RNA, 18 nt, Human
cgaggcaggcggaucacg

SEQ ID NO: 389682 - RNA, 22 nt, Human
cauuugaugacucaacucauaa

SEQ ID NO: 389683 - RNA, 22 nt, Human
uauuugagcgaagcaguguuuu

SEQ ID NO: 389684 - RNA, 22 nt, Human
uaagaaauuuaguuauagaaug

SEQ ID NO: 389685 - RNA, 22 nt, Human
aaucagaaaggcuaaggaagca

SEQ ID NO: 389686 - RNA, 23 nt, Human
aguuuguaaagaaauauuugcac

SEQ ID NO: 389687 - RNA, 19 nt, Human
agccuggagggcuggucac

SEQ ID NO: 389688 - RNA, 22 nt, Human
cagcuuuaccuuuaggaguaac

SEQ ID NO: 389689 - RNA, 22 nt, Human
ucuucaaagaauuuuaguaauu

SEQ ID NO: 389690 - RNA, 22 nt, Human
cacugaagccacuggaagagga

SEQ ID NO: 389691 - RNA, 23 nt, Human
cagggaggagauacuguguaucu

SEQ ID NO: 389692 - RNA, 22 nt, Human
gcugcagcaagcccuccagggg

SEQ ID NO: 389693 - RNA, 22 nt, Human
aggaccuguguuuuccuugaau

SEQ ID NO: 389694 - RNA, 22 nt, Human
guggauggacaugggcaagagg

SEQ ID NO: 389695 - RNA, 22 nt, Human
agcagcugggcucagagcuggg

SEQ ID NO: 389696 - RNA, 22 nt, Human
aacaaauggaacacaaaucuuu

SEQ ID NO: 389697 - RNA, 22 nt, Human
guaaacaugcuguguacucagc

SEQ ID NO: 389698 - RNA, 22 nt, Human
aggcagcuuucuguaggggugu

SEQ ID NO: 389699 - RNA, 22 nt, Human
agcuuuauagaaaggaucagug

SEQ ID NO: 389700 - RNA, 22 nt, Human
cagggccacccucugcugggug

SEQ ID NO: 389701 - RNA, 22 nt, Human
acacaagauuguguauugaauu

SEQ ID NO: 389702 - RNA, 22 nt, Human
gagcagugaagacagaaguaca

SEQ ID NO: 389703 - RNA, 22 nt, Human
gaaagaggaaggagauguauua

SEQ ID NO: 389704 - RNA, 22 nt, Human
cauuuacauuuaagguuaauau

SEQ ID NO: 389705 - RNA, 20 nt, Human
cugcccagccacugagggau

SEQ ID NO: 389706 - RNA, 22 nt, Human
uaucaacauuaauauuuucugg

SEQ ID NO: 389707 - RNA, 22 nt, Human
augaggcacaucacagccaaug

SEQ ID NO: 389708 - RNA, 22 nt, Human
ucagcuggauguggaagugcua

SEQ ID NO: 389709 - RNA, 22 nt, Human
aucuauacuacaaauggcuggu

SEQ ID NO: 389710 - RNA, 22 nt, Human
aaggacagggaugguugauugu

SEQ ID NO: 389711 - RNA, 22 nt, Human
guuggccugaauggucaagagg

SEQ ID NO: 389712 - RNA, 22 nt, Human
uguccuuauaagaaaaggaaau

SEQ ID NO: 389713 - RNA, 22 nt, Human
caguguguggauccucccagga

SEQ ID NO: 389714 - RNA, 22 nt, Human
ugccuggcaaugccagaagcca

SEQ ID NO: 389715 - RNA, 23 nt, Human
gccuggagaaaagcugcaguuca

SEQ ID NO: 389716 - RNA, 19 nt, Human
uugaggggccaggggagau

SEQ ID NO: 389717 - RNA, 22 nt, Human
cuucugcaauaaguuuuggucc

SEQ ID NO: 389718 - RNA, 22 nt, Human
ucagcugaguucuagagcacuc

SEQ ID NO: 389719 - RNA, 22 nt, Human
augacacaauuuuagagcugaa

SEQ ID NO: 389720 - RNA, 22 nt, Human
gccugccacgcaugcagaguca

SEQ ID NO: 389721 - RNA, 22 nt, Human
gccagagcagaauagaguggcc

SEQ ID NO: 389722 - RNA, 22 nt, Human
gggccaggucggugaaugguca

SEQ ID NO: 389723 - RNA, 22 nt, Human
agcagcaucucuuauugcagug

SEQ ID NO: 389724 - RNA, 22 nt, Human
ccuucauugcaucuuuaagaga

SEQ ID NO: 389725 - RNA, 22 nt, Human
uuuguaaaaggaggaagcaugg

SEQ ID NO: 389726 - RNA, 19 nt, Human
cuguccuuggcugcacugu

SEQ ID NO: 389727 - RNA, 22 nt, Human
gaauuuuucuggaagcaauuau

SEQ ID NO: 389728 - RNA, 22 nt, Human
uuucauguuuucuuaaauggca

SEQ ID NO: 389729 - RNA, 22 nt, Human
ggcuagaacuuuacacuuugca

SEQ ID NO: 389730 - RNA, 21 nt, Human
ggugucaguuuuggucauuag

SEQ ID NO: 389731 - RNA, 22 nt, Human
ccacugaggcaggcaguaucua

SEQ ID NO: 389732 - RNA, 20 nt, Human
ugccaggcugcacgccugcc

SEQ ID NO: 389733 - RNA, 22 nt, Human
uccuccagugucuggggccuug

SEQ ID NO: 389734 - RNA, 22 nt, Human
ucccagagcucuggagguugga

SEQ ID NO: 389735 - RNA, 21 nt, Human
gagugcaggucugaugccauc

SEQ ID NO: 389736 - RNA, 22 nt, Human
gcuuuaaugcaauuucaccuca

SEQ ID NO: 389737 - RNA, 22 nt, Human
ucauaacagcuaagucccuuuc

SEQ ID NO: 389738 - RNA, 22 nt, Human
cagagagaggccacugcuauua

SEQ ID NO: 389739 - RNA, 23 nt, Human
uugcauagacauccucauagauu

SEQ ID NO: 389740 - RNA, 22 nt, Human
uagaauaugugguaggaucugg

SEQ ID NO: 389741 - RNA, 22 nt, Human
aucacgucaugguuugaucugg

SEQ ID NO: 389742 - RNA, 22 nt, Human
agggacccauagagagaccagu

SEQ ID NO: 389743 - RNA, 22 nt, Human
cgcugggggaacagcgagggug

SEQ ID NO: 389744 - RNA, 22 nt, Human
uuugaagaccuuaucucuaaau

SEQ ID NO: 389745 - RNA, 22 nt, Human
guggcagcaaaugccuggacua

SEQ ID NO: 389746 - RNA, 23 nt, Human
uggcucuguggaucccucaggag

SEQ ID NO: 389747 - RNA, 22 nt, Human
ugcuagugcaggguuuucaguu

SEQ ID NO: 389748 - RNA, 22 nt, Human
uggagaggagcaccauggccau

SEQ ID NO: 389749 - RNA, 22 nt, Human
augaguucaauuguuucaguca

SEQ ID NO: 389750 - RNA, 22 nt, Human
auuucaaggcuauuaauauaaa

SEQ ID NO: 389751 - RNA, 22 nt, Human
cucucugguuucagcgaagggg

SEQ ID NO: 389752 - RNA, 22 nt, Human
uccugcaggccagaggggugag

SEQ ID NO: 389753 - RNA, 22 nt, Human
uacuauaccauguaagauauga

SEQ ID NO: 389754 - RNA, 22 nt, Human
caaaagauacuugcaucuaacu

SEQ ID NO: 389755 - RNA, 22 nt, Human
acagccagaggugguccugggu

SEQ ID NO: 389756 - RNA, 22 nt, Human
ucucucagaggccaggguccug

SEQ ID NO: 389757 - RNA, 23 nt, Human
ccaaagucgaagucuaguccaga

SEQ ID NO: 389758 - RNA, 22 nt, Human
ugcccaggcuggaaugcagugg

SEQ ID NO: 389759 - RNA, 22 nt, Human
cagagagagucaaaucuuugcu

SEQ ID NO: 389760 - RNA, 23 nt, Human
acagccaguucaccucuccuugg

SEQ ID NO: 389761 - RNA, 22 nt, Human
uugcaaaagccgaggcacucca

SEQ ID NO: 389762 - RNA, 22 nt, Human
ugcuggggauccguaccaaccc

SEQ ID NO: 389763 - RNA, 22 nt, Human
uucuuucucaacaugaauguuu

SEQ ID NO: 389764 - RNA, 22 nt, Human
uaggacaggugaggggcugugg

SEQ ID NO: 389765 - RNA, 22 nt, Human
cucucuggaagggggagcugau

SEQ ID NO: 389766 - RNA, 22 nt, Human
ggagcugcucagagccaguccc

SEQ ID NO: 389767 - RNA, 22 nt, Human
uagcuuuacaaagugcugcacc

SEQ ID NO: 389768 - RNA, 22 nt, Human
agauggggcugaaaguuccaau

SEQ ID NO: 389769 - RNA, 22 nt, Human
cagaauuugaaguaauauucca

SEQ ID NO: 389770 - RNA, 22 nt, Human
guuauguaaucuaacacucagu

SEQ ID NO: 389771 - RNA, 22 nt, Human
ggagcagacauaaccuuacaga

SEQ ID NO: 389772 - RNA, 22 nt, Human
ucugcuguucauucuuuuagcu

SEQ ID NO: 389773 - RNA, 22 nt, Human
ucaccgccuugcccggccgggc

SEQ ID NO: 389774 - RNA, 22 nt, Human
ugaagccacuuuccagaaucac

SEQ ID NO: 389775 - RNA, 22 nt, Human
gucaacuugcaagaugcugggc

SEQ ID NO: 389776 - RNA, 22 nt, Human
uggccuguggcuuaaggucugu

SEQ ID NO: 389777 - RNA, 22 nt, Human
uuaaagauucugaggcugauua

SEQ ID NO: 389778 - RNA, 22 nt, Human
auugacaaggaaacuauaccag

SEQ ID NO: 389779 - RNA, 22 nt, Human
ggccucuggucaagacaagcau

SEQ ID NO: 389780 - RNA, 22 nt, Human
ggcagccaugcacgcugccugg

SEQ ID NO: 389781 - RNA, 22 nt, Human
acacacagguaaaggagccugg

SEQ ID NO: 389782 - RNA, 22 nt, Human
uuacauuuggcuauguccucua

SEQ ID NO: 389783 - RNA, 22 nt, Human
ugccagcacuucuggcugucug

SEQ ID NO: 389784 - RNA, 22 nt, Human
cagggccaggcugauggccugg

SEQ ID NO: 389785 - RNA, 22 nt, Human
ggggcagaaagcccacagagug

SEQ ID NO: 389786 - RNA, 22 nt, Human
aagggcaggcacccacccucac

SEQ ID NO: 389787 - RNA, 22 nt, Human
aaauuucuugaggcucucuagc

SEQ ID NO: 389788 - RNA, 22 nt, Human
uacuuacagagcuuauaaguua

SEQ ID NO: 389789 - RNA, 22 nt, Human
gcucccaccaggcagaccuacc

SEQ ID NO: 389790 - RNA, 22 nt, Human
cagagcagggugcaccuugggc

SEQ ID NO: 389791 - RNA, 22 nt, Human
agcucccagaguccucugccca

SEQ ID NO: 389792 - RNA, 22 nt, Human
aaaggcaggcuuucacaucuca

SEQ ID NO: 389793 - RNA, 17 nt, Human
ugaggccugcaucagug

SEQ ID NO: 389794 - RNA, 19 nt, Human
gagcugccuuuugaagacc

SEQ ID NO: 389795 - RNA, 22 nt, Human
ccugucugagccagggugggca

SEQ ID NO: 389796 - RNA, 22 nt, Human
acaggggaauuuacugucauua

SEQ ID NO: 389797 - RNA, 22 nt, Human
acucugccuuucagcagaugaa

SEQ ID NO: 389798 - RNA, 21 nt, Human
aaagugguaaggauuauuuug

SEQ ID NO: 389799 - RNA, 21 nt, Human
aaagaaucauggguaauuuca

SEQ ID NO: 389800 - RNA, 22 nt, Human
ucagaagaagagacuccacagc

SEQ ID NO: 389801 - RNA, 22 nt, Human
uucauucccuuauauuagcauu

SEQ ID NO: 389802 - RNA, 22 nt, Human
gacucguucauaguuccaauuu

SEQ ID NO: 389803 - RNA, 22 nt, Human
gugugccaggaacuggcugcug

SEQ ID NO: 389804 - RNA, 22 nt, Human
cuggcaggagcauucacagagg

SEQ ID NO: 389805 - RNA, 22 nt, Human
accuuuuuguucuguucucagc

SEQ ID NO: 389806 - RNA, 22 nt, Human
aaauagcagccuuuaguuaaca

SEQ ID NO: 389807 - RNA, 22 nt, Human
cagagccacuuggagaugagaa

SEQ ID NO: 389808 - RNA, 22 nt, Human
gaggcaguuccugagugacaag

SEQ ID NO: 389809 - RNA, 22 nt, Human
ggugggcaggucacucugccuc

SEQ ID NO: 389810 - RNA, 22 nt, Human
uuugacaucaauacccuagaau

SEQ ID NO: 389811 - RNA, 22 nt, Human
ucugggcacugcugagccugua

SEQ ID NO: 389812 - RNA, 22 nt, Human
cugucccagauguucucagcac

SEQ ID NO: 389813 - RNA, 22 nt, Human
agggcagcuggaagguggcuuc

SEQ ID NO: 389814 - RNA, 22 nt, Human
agcugggccugagcuggaagcu

SEQ ID NO: 389815 - RNA, 22 nt, Human
aggcuccuuguucaucauccau

SEQ ID NO: 389816 - RNA, 22 nt, Human
ucaaaguccuugcuuuuucugu

SEQ ID NO: 389817 - RNA, 22 nt, Human
agcaggagagcagugcgugguc

SEQ ID NO: 389818 - RNA, 22 nt, Human
gggcugagcacauacugacagc

SEQ ID NO: 389819 - RNA, 22 nt, Human
guggcugcagagccagcaagcu

SEQ ID NO: 389820 - RNA, 22 nt, Human
auaucuuuguaugguucagcag

SEQ ID NO: 389821 - RNA, 22 nt, Human
cuggcugggagcgagcugcuca

SEQ ID NO: 389822 - RNA, 22 nt, Human
agagcugcaccuaugcagaccu

SEQ ID NO: 389823 - RNA, 22 nt, Human
aagaugcagcuuuacaauaagg

SEQ ID NO: 389824 - RNA, 22 nt, Human
guggcagcggcccaggccgucu

SEQ ID NO: 389825 - RNA, 22 nt, Human
ucagcuuggacagcuugguuga

SEQ ID NO: 389826 - RNA, 22 nt, Human
aagagaggacauggugaaccug

SEQ ID NO: 389827 - RNA, 22 nt, Human
caggggcucugagauugucuaa

SEQ ID NO: 389828 - RNA, 22 nt, Human
uggcucagagagggagugugga

SEQ ID NO: 389829 - RNA, 22 nt, Human
agaauguagucuuggagauuua

SEQ ID NO: 389830 - RNA, 22 nt, Human
cuggggcccaucgagggcugag

SEQ ID NO: 389831 - RNA, 20 nt, Human
agagccuugaggaagaugau

SEQ ID NO: 389832 - RNA, 22 nt, Human
gagagcugggggacuguggaug

SEQ ID NO: 389833 - RNA, 22 nt, Human
aaugggaaagagacuagaugcu

SEQ ID NO: 389834 - RNA, 22 nt, Human
cuugaaagaagggucuuuuaau

SEQ ID NO: 389835 - RNA, 22 nt, Human
auuaauuuuucugacagccaca

SEQ ID NO: 389836 - RNA, 22 nt, Human
uggccgggccgggcgccuccac

SEQ ID NO: 389837 - RNA, 22 nt, Human
ggaugcaggacggcauggaugu

SEQ ID NO: 389838 - RNA, 22 nt, Human
ggaagagccuggggugucaggc

SEQ ID NO: 389839 - RNA, 22 nt, Human
cauugcccaguaggaucaccag

SEQ ID NO: 389840 - RNA, 22 nt, Human
uccucaggaugugggguagaau

SEQ ID NO: 389841 - RNA, 22 nt, Human
ucaguucaguauacacuauucu

SEQ ID NO: 389842 - RNA, 22 nt, Human
acugguuuuccagguuacuucu

SEQ ID NO: 389843 - RNA, 22 nt, Human
gcucccugaaaagaacaaaguc

SEQ ID NO: 389844 - RNA, 18 nt, Human
caugggugacagguggau

SEQ ID NO: 389845 - RNA, 22 nt, Human
cugcagaggccucgccuccucu

SEQ ID NO: 389846 - RNA, 22 nt, Human
ccauggcaauggucagucuauu

SEQ ID NO: 389847 - RNA, 22 nt, Human
acaguguucacuuaacaaugga

SEQ ID NO: 389848 - RNA, 22 nt, Human
ucuggcucagggcucugaggga

SEQ ID NO: 389849 - RNA, 22 nt, Human
aucauucuauuguugagcugcc

SEQ ID NO: 389850 - RNA, 22 nt, Human
aucuuucagagcuccaucaggg

SEQ ID NO: 389851 - RNA, 22 nt, Human
caggaugggauguagugggccc

SEQ ID NO: 389852 - RNA, 22 nt, Human
ugcagcugcuugauucaucuug

SEQ ID NO: 389853 - RNA, 22 nt, Human
agugaaaugacugaaucagaua

SEQ ID NO: 389854 - RNA, 22 nt, Human
agggcagcccuucugggagggc

SEQ ID NO: 389855 - RNA, 22 nt, Human
agggcuccuaugccccauggac

SEQ ID NO: 389856 - RNA, 23 nt, Human
ccagcccuccaccagcucuaggc

SEQ ID NO: 389857 - RNA, 22 nt, Human
aagcaauaagccagauuuggau

SEQ ID NO: 389858 - RNA, 22 nt, Human
cugccuggucucaggcaugggg

SEQ ID NO: 389859 - RNA, 22 nt, Human
ggcuccacugcugaccacucca

SEQ ID NO: 389860 - RNA, 22 nt, Human
cugugacuagaccugcaggaga

SEQ ID NO: 389861 - RNA, 22 nt, Human
acuuuugguucuguaacuguga

SEQ ID NO: 389862 - RNA, 22 nt, Human
gcugaguguaaugauggcagag

SEQ ID NO: 389863 - RNA, 22 nt, Human
ugcuauugugaacagugccaca

SEQ ID NO: 389864 - RNA, 22 nt, Human
uuccauaauaggcuuaagugaa

SEQ ID NO: 389865 - RNA, 22 nt, Human
acauguuagaaaugcagaaucu

SEQ ID NO: 389866 - RNA, 22 nt, Human
aaagcagagcagggcacuuaug

SEQ ID NO: 389867 - RNA, 22 nt, Human
cauuucuguacauguuuuggug

SEQ ID NO: 389868 - RNA, 22 nt, Human
gaaagguugggugaauggugga

SEQ ID NO: 389869 - RNA, 22 nt, Human
gcuguccagagcaugggagcaa

SEQ ID NO: 389870 - RNA, 19 nt, Human
uuugaauccagcugguaac

SEQ ID NO: 389871 - RNA, 22 nt, Human
agucaccagguuuuagagaccu

SEQ ID NO: 389872 - RNA, 22 nt, Human
acagcagcuaaaggugucuccu

SEQ ID NO: 389873 - RNA, 22 nt, Human
cucugguucagggcucccuggc

SEQ ID NO: 389874 - RNA, 22 nt, Human
auacaaguugugauaauguaaa

SEQ ID NO: 389875 - RNA, 22 nt, Human
auguccagaguguccuggaaag

SEQ ID NO: 389876 - RNA, 22 nt, Human
uguguugugacauucuuggaug

SEQ ID NO: 389877 - RNA, 22 nt, Human
aggauuuacaaugauucuaggu

SEQ ID NO: 389878 - RNA, 22 nt, Human
uauguaaaguagauggcaggua

SEQ ID NO: 389879 - RNA, 22 nt, Human
ggcaugggagugagcaaccuua

SEQ ID NO: 389880 - RNA, 22 nt, Human
cagauacuguaaaauuucagua

SEQ ID NO: 389881 - RNA, 22 nt, Human
gagggcuccucacauucucuau

SEQ ID NO: 389882 - RNA, 18 nt, Human
gugcugugggcaguggcc

SEQ ID NO: 389883 - RNA, 22 nt, Human
cauagaaaagaguagguaaugu

SEQ ID NO: 389884 - RNA, 22 nt, Human
aagccagguguugugguaagag

SEQ ID NO: 389885 - RNA, 22 nt, Human
cugugcuucgcaacuccaaggu

SEQ ID NO: 389886 - RNA, 22 nt, Human
cagagccugcucacgucucugu

SEQ ID NO: 389887 - RNA, 22 nt, Human
ugcagggcacacgcacgggugu

SEQ ID NO: 389888 - RNA, 22 nt, Human
cagcaggacguccaagugcuau

SEQ ID NO: 389889 - RNA, 22 nt, Human
uucaggaucauuuguuuuaucu

SEQ ID NO: 389890 - RNA, 22 nt, Human
cuggccucaccucagacuuacu

SEQ ID NO: 389891 - RNA, 22 nt, Human
acauuucuuccacaugcugcug

SEQ ID NO: 389892 - RNA, 22 nt, Human
ggcugcagguugguuggcagcu

SEQ ID NO: 389893 - RNA, 22 nt, Human
acagaggccgccucucucacgg

SEQ ID NO: 389894 - RNA, 22 nt, Human
ugagccagaggaggcugugugg

SEQ ID NO: 389895 - RNA, 16 nt, Human
gcaggcagaucacaug

SEQ ID NO: 389896 - RNA, 22 nt, Human
uuuaagacuuagauuuauuggg

SEQ ID NO: 389897 - RNA, 22 nt, Human
uaagagaauguuguggcuaggu

SEQ ID NO: 389898 - RNA, 22 nt, Human
aagagaaggauucugagccugg

SEQ ID NO: 389899 - RNA, 22 nt, Human
cggagaggugggggcagcaucu

SEQ ID NO: 389900 - RNA, 22 nt, Human
gggcugagagugacuguucugu

SEQ ID NO: 389901 - RNA, 22 nt, Human
caggcagggagcuggaaaggau

SEQ ID NO: 389902 - RNA, 22 nt, Human
cacagcuggggaagcugaggcc

SEQ ID NO: 389903 - RNA, 22 nt, Human
gauuucaauccagcuuucuucu

SEQ ID NO: 389904 - RNA, 22 nt, Human
gagggucccgagcccugucaga

SEQ ID NO: 389905 - RNA, 22 nt, Human
ucugagaguacgggcugcgcgc

SEQ ID NO: 389906 - RNA, 22 nt, Human
augggcaguguauuggaaggaa

SEQ ID NO: 389907 - RNA, 22 nt, Human
cuccucccugcgauugcucugc

SEQ ID NO: 389908 - RNA, 22 nt, Human
gaaggcugcugggaaguguggu

SEQ ID NO: 389909 - RNA, 22 nt, Human
agcaccugccugcauuggcuau

SEQ ID NO: 389910 - RNA, 22 nt, Human
cauuuugugcuagacacuaugg

SEQ ID NO: 389911 - RNA, 22 nt, Human
uagaaaugaauguuuaaaaguc

SEQ ID NO: 389912 - RNA, 22 nt, Human
uccuugaauugugccacuuacc

SEQ ID NO: 389913 - RNA, 21 nt, Human
cuacuuaaguaggggauuagg

SEQ ID NO: 389914 - RNA, 22 nt, Human
cauuucaaacaguuacagcugc

SEQ ID NO: 389915 - RNA, 22 nt, Human
gauuucaaccuaacaguaugac

SEQ ID NO: 389916 - RNA, 22 nt, Human
ucacaggcuccagggccuggau

SEQ ID NO: 389917 - RNA, 22 nt, Human
gcugcucuuuucagagaugaga

SEQ ID NO: 389918 - RNA, 22 nt, Human
cauuuguuaauuacuauuaucu

SEQ ID NO: 389919 - RNA, 22 nt, Human
ucuaaagaagaggguucugcgg

SEQ ID NO: 389920 - RNA, 22 nt, Human
uauuuuaaagugaagggucuug

SEQ ID NO: 389921 - RNA, 22 nt, Human
ggccucucucccuggcuugcag

SEQ ID NO: 389922 - RNA, 22 nt, Human
gcuccucuauuccccacauuuu

SEQ ID NO: 389923 - RNA, 22 nt, Human
cuguggaguggggaguacuggu

SEQ ID NO: 389924 - RNA, 22 nt, Human
ucaaaguagggguaagccaggc

SEQ ID NO: 389925 - RNA, 22 nt, Human
cauacuuugggauaagagugga

SEQ ID NO: 389926 - RNA, 22 nt, Human
cuucaagagaaugcagggaugu

SEQ ID NO: 389927 - RNA, 22 nt, Human
uccaggagcauccaggugaagc

SEQ ID NO: 389928 - RNA, 22 nt, Human
ccuucucuacuccugaugcaug

SEQ ID NO: 389929 - RNA, 22 nt, Human
aagaacagauucagccugaacu

SEQ ID NO: 389930 - RNA, 22 nt, Human
uccagucaucucccuucacauu

SEQ ID NO: 389931 - RNA, 22 nt, Human
uaaguuuucuggaauaacuugg

SEQ ID NO: 389932 - RNA, 22 nt, Human
uuucuuuguuguuaucacauca

SEQ ID NO: 389933 - RNA, 22 nt, Human
cuucucagcaugguuacuguga

SEQ ID NO: 389934 - RNA, 22 nt, Human
cauaucauaggucuuggauaau

SEQ ID NO: 389935 - RNA, 22 nt, Human
gccugugacucgucuugggcca

SEQ ID NO: 389936 - RNA, 22 nt, Human
cagugaggcucugcugagcggu

SEQ ID NO: 389937 - RNA, 22 nt, Human
uugauacagcagccugugaucc

SEQ ID NO: 389938 - RNA, 22 nt, Human
cagcuugcaguacuuguuuuug

SEQ ID NO: 389939 - RNA, 22 nt, Human
agaaaugcauuagcacauauag

SEQ ID NO: 389940 - RNA, 22 nt, Human
ccagcagcucccucaggguccg

SEQ ID NO: 389941 - RNA, 22 nt, Human
ugcaggccucacaccuggcacc

SEQ ID NO: 389942 - RNA, 22 nt, Human
uucucuucaucucaguaaaugu

SEQ ID NO: 389943 - RNA, 22 nt, Human
uggcugagcucccuguguguug

SEQ ID NO: 389944 - RNA, 22 nt, Human
ggagaggcgaugagucacagcc

SEQ ID NO: 389945 - RNA, 22 nt, Human
ugaguaauaaacugucuugcuc

SEQ ID NO: 389946 - RNA, 22 nt, Human
ugaagaugucagcagggguggu

SEQ ID NO: 389947 - RNA, 22 nt, Human
cuuggcagauccaaaaaugaca

SEQ ID NO: 389948 - RNA, 22 nt, Human
gagggcucugaaaggaggucac

SEQ ID NO: 389949 - RNA, 16 nt, Human
ccuuucucugccuucc

SEQ ID NO: 389950 - RNA, 17 nt, Human
aggagucucagaugagc

SEQ ID NO: 389951 - RNA, 22 nt, Human
gcccaggauucuuucuuccuua

SEQ ID NO: 389952 - RNA, 22 nt, Human
uggaugcuguaggacacgcucu

SEQ ID NO: 389953 - RNA, 22 nt, Human
cagcaaucgggugauaugcaau

SEQ ID NO: 389954 - RNA, 22 nt, Human
uagcagggccaggcugggaacc

SEQ ID NO: 389955 - RNA, 22 nt, Human
aauuagggagccaucauaaggu

SEQ ID NO: 389956 - RNA, 22 nt, Human
aggagucagauaugggaaaguu

SEQ ID NO: 389957 - RNA, 22 nt, Human
uggagcugagaaguggagcucu

SEQ ID NO: 389958 - RNA, 21 nt, Human
aucacauuggcuguuauuauu

SEQ ID NO: 389959 - RNA, 22 nt, Human
aaaauaucagcaaagggugaca

SEQ ID NO: 389960 - RNA, 22 nt, Human
gggcuggcucccagguguugaa

SEQ ID NO: 389961 - RNA, 22 nt, Human
acagagcaugcucaguguguga

SEQ ID NO: 389962 - RNA, 22 nt, Human
cagcaggcagccauuucacugu

SEQ ID NO: 389963 - RNA, 22 nt, Human
uugcaccauuucacuuccauua

SEQ ID NO: 389964 - RNA, 22 nt, Human
uggggcagcagaccuuucuugg

SEQ ID NO: 389965 - RNA, 22 nt, Human
gugccugcugcagagucgcugu

SEQ ID NO: 389966 - RNA, 22 nt, Human
gggcuacauugugagagaaguu

SEQ ID NO: 389967 - RNA, 22 nt, Human
ugaaaugagagcacagaauaaa

SEQ ID NO: 389968 - RNA, 21 nt, Human
caggaaaagcggaagucuagc

SEQ ID NO: 389969 - RNA, 17 nt, Human
guuugcaugguguuaac

SEQ ID NO: 389970 - RNA, 22 nt, Human
caggcagcauuuacucugauga

SEQ ID NO: 389971 - RNA, 19 nt, Human
gcugcuggcucuggcugga

SEQ ID NO: 389972 - RNA, 22 nt, Human
agaagccaauccuugucucucu

SEQ ID NO: 389973 - RNA, 22 nt, Human
cagcugugcuagaagccacgaa

SEQ ID NO: 389974 - RNA, 22 nt, Human
gggcugacaguuuccccugaaa

SEQ ID NO: 389975 - RNA, 22 nt, Human
uguauuuugugaggaucacucu

SEQ ID NO: 389976 - RNA, 22 nt, Human
caaagggcucuagacucagcag

SEQ ID NO: 389977 - RNA, 22 nt, Human
uuugcauuacuugacuuuaguu

SEQ ID NO: 389978 - RNA, 22 nt, Human
gcacagccacugagugagaacc

SEQ ID NO: 389979 - RNA, 22 nt, Human
ccugaggcccuggcugugcuga

SEQ ID NO: 389980 - RNA, 22 nt, Human
aucuccaggcauuucaagagac

SEQ ID NO: 389981 - RNA, 22 nt, Human
gccuggugaaaggcagagagcg

SEQ ID NO: 389982 - RNA, 22 nt, Human
ggccucucuccagucagugcag

SEQ ID NO: 389983 - RNA, 22 nt, Human
aucaagaacuuauuuuggaaau

SEQ ID NO: 389984 - RNA, 22 nt, Human
uuucaguuacugcuauaucauu

SEQ ID NO: 389985 - RNA, 22 nt, Human
uguccucuuccagugcuccuuc

SEQ ID NO: 389986 - RNA, 22 nt, Human
cagcagugucuccagcaucaca

SEQ ID NO: 389987 - RNA, 22 nt, Human
gcugaggccucagaaggcugag

SEQ ID NO: 389988 - RNA, 22 nt, Human
aggcugagugcuccccuagaug

SEQ ID NO: 389989 - RNA, 22 nt, Human
aagcagcuuuugaagagugagg

SEQ ID NO: 389990 - RNA, 22 nt, Human
aagaaugauuacaaagcaacga

SEQ ID NO: 389991 - RNA, 22 nt, Human
ccaucuccacugucccugucaa

SEQ ID NO: 389992 - RNA, 22 nt, Human
accucuggccuucaggcaucau

SEQ ID NO: 389993 - RNA, 22 nt, Human
aggaaacuccccuacaucucaa

SEQ ID NO: 389994 - RNA, 21 nt, Human
cagaggggcuagccuggcugc

SEQ ID NO: 389995 - RNA, 22 nt, Human
gagguagccacagauagagacu

SEQ ID NO: 389996 - RNA, 22 nt, Human
uuggaggcaaugggaaggaggc

SEQ ID NO: 389997 - RNA, 22 nt, Human
aaagcaaugcuuguggaaugua

SEQ ID NO: 389998 - RNA, 22 nt, Human
gaugugagugguagcugggauu

SEQ ID NO: 389999 - RNA, 22 nt, Human
cuaaaauuaccuaccaguuuag

SEQ ID NO: 390000 - RNA, 22 nt, Human
aaggccuggauuuagguuguga

SEQ ID NO: 390001 - RNA, 22 nt, Human
ggcaaggccuugcccagcauuc

SEQ ID NO: 390002 - RNA, 20 nt, Human
gggcagccucgggagugggu

SEQ ID NO: 390003 - RNA, 22 nt, Human
uggccagguugggcuuugcagc

SEQ ID NO: 390004 - RNA, 22 nt, Human
uagcagagaggggacaguggca

SEQ ID NO: 390005 - RNA, 22 nt, Human
augagcugggccauccagugau

SEQ ID NO: 390006 - RNA, 22 nt, Human
cuggcagcgcagcaugaagucg

SEQ ID NO: 390007 - RNA, 18 nt, Human
gagcagaggcucaacugg

SEQ ID NO: 390008 - RNA, 22 nt, Human
ggcucugcugguaagaugccuc

SEQ ID NO: 390009 - RNA, 22 nt, Human
uuuucacacaaggugauaaguu

SEQ ID NO: 390010 - RNA, 22 nt, Human
uccucacagucaacacuuugag

SEQ ID NO: 390011 - RNA, 22 nt, Human
uucaagacugcgacuaaugccc

SEQ ID NO: 390012 - RNA, 22 nt, Human
uaugcuguggaaaauacaaaga

SEQ ID NO: 390013 - RNA, 22 nt, Human
uguauguguauguacauaugca

SEQ ID NO: 390014 - RNA, 22 nt, Human
ucaggcugagaaaaucuggacc

SEQ ID NO: 390015 - RNA, 22 nt, Human
cuagggacagaaagaggguaga

SEQ ID NO: 390016 - RNA, 22 nt, Human
ggcagggcagcgcugauuaggg

SEQ ID NO: 390017 - RNA, 22 nt, Human
ccugccugcaaaaugggacaag

SEQ ID NO: 390018 - RNA, 22 nt, Human
uauugaaauucuucauguccuc

SEQ ID NO: 390019 - RNA, 22 nt, Human
uuuuagaaauacugauuuagug

SEQ ID NO: 390020 - RNA, 17 nt, Human
aucuggcugcuucuaga

SEQ ID NO: 390021 - RNA, 22 nt, Human
auuuagaaguuggagggcaaga

SEQ ID NO: 390022 - RNA, 22 nt, Human
ugcuuuauuuauaaaauagcaa

SEQ ID NO: 390023 - RNA, 22 nt, Human
gaggcucagagggagcaugguc

SEQ ID NO: 390024 - RNA, 22 nt, Human
aucuucucaagcagcauccugu

SEQ ID NO: 390025 - RNA, 18 nt, Human
cccagcccaccauuucuc

SEQ ID NO: 390026 - RNA, 22 nt, Human
ggcuucccaaggagccaggaug

SEQ ID NO: 390027 - RNA, 20 nt, Human
uuucuguaaggcauuaaucu

SEQ ID NO: 390028 - RNA, 22 nt, Human
uuccaggaagauucaacaaaag

SEQ ID NO: 390029 - RNA, 22 nt, Human
ugccuggaugugcuggccucac

SEQ ID NO: 390030 - RNA, 22 nt, Human
gccuuugcaccaucagugcaau

SEQ ID NO: 390031 - RNA, 22 nt, Human
gugucauguagaaauugaugaa

SEQ ID NO: 390032 - RNA, 22 nt, Human
cauuucaagcauugacuucuau

SEQ ID NO: 390033 - RNA, 22 nt, Human
aaguccuuuauccuaaaagguc

SEQ ID NO: 390034 - RNA, 22 nt, Human
gggccagguggaccccagccuc

SEQ ID NO: 390035 - RNA, 22 nt, Human
gcuuccugauauucauacuguu

SEQ ID NO: 390036 - RNA, 22 nt, Human
auucaaguccagcuucucuaca

SEQ ID NO: 390037 - RNA, 22 nt, Human
uuuauguaaguggaaugaugcc

SEQ ID NO: 390038 - RNA, 22 nt, Human
gcuggcagaagagcugguucaa

SEQ ID NO: 390039 - RNA, 22 nt, Human
ucacauaaauuauacaauuuca

SEQ ID NO: 390040 - RNA, 22 nt, Human
ugaaaguuacaggaaaacagau

SEQ ID NO: 390041 - RNA, 22 nt, Human
uuaauuuuuauguauagugugu

SEQ ID NO: 390042 - RNA, 22 nt, Human
gcucugcucuugacuuaccagg

SEQ ID NO: 390043 - RNA, 22 nt, Human
gcugggagccguaccugucacg

SEQ ID NO: 390044 - RNA, 22 nt, Human
uggccuggugcucaggcaguag

SEQ ID NO: 390045 - RNA, 22 nt, Human
gcagccacagaggagggaugca

SEQ ID NO: 390046 - RNA, 22 nt, Human
gggggcuguccugugcauugua

SEQ ID NO: 390047 - RNA, 22 nt, Human
gaaccaaguaggauacaaggag

SEQ ID NO: 390048 - RNA, 22 nt, Human
gcuguggaaaugccuaacauga

SEQ ID NO: 390049 - RNA, 22 nt, Human
ugcagaggaccauuguccugga

SEQ ID NO: 390050 - RNA, 22 nt, Human
caaaugcagucccuuuguugcu

SEQ ID NO: 390051 - RNA, 22 nt, Human
ugggccuggguuccuccugggc

SEQ ID NO: 390052 - RNA, 21 nt, Human
ucagcagcuuuugcagucccu

SEQ ID NO: 390053 - RNA, 19 nt, Human
ugcagccacgugagagacu

SEQ ID NO: 390054 - RNA, 22 nt, Human
uuuccaaaaguuuguucugugc

SEQ ID NO: 390055 - RNA, 22 nt, Human
uccagggcuuggcugggacggu

SEQ ID NO: 390056 - RNA, 22 nt, Human
cagguggguacaucacagagac

SEQ ID NO: 390057 - RNA, 22 nt, Human
cuucccugauaagagccucaga

SEQ ID NO: 390058 - RNA, 22 nt, Human
guuugcauuucuugaacuauau

SEQ ID NO: 390059 - RNA, 23 nt, Human
cuggcucauccugguugcagugg

SEQ ID NO: 390060 - RNA, 22 nt, Human
gggggaagaaagaacauggcau

SEQ ID NO: 390061 - RNA, 22 nt, Human
augcuguguccuagugaaagaa

SEQ ID NO: 390062 - RNA, 22 nt, Human
cauuucugggagacaugcuaga

SEQ ID NO: 390063 - RNA, 22 nt, Human
gaggaccacagaugagccugca

SEQ ID NO: 390064 - RNA, 22 nt, Human
cacauuucuaggaaauuaaaug

SEQ ID NO: 390065 - RNA, 22 nt, Human
ugaaaugaaugugauucgauag

SEQ ID NO: 390066 - RNA, 22 nt, Human
cuuacauuuaaucaugugucau

SEQ ID NO: 390067 - RNA, 22 nt, Human
agcugcccuuaauaggcauuca

SEQ ID NO: 390068 - RNA, 19 nt, Human
cagaguccuugaccagucc

SEQ ID NO: 390069 - RNA, 22 nt, Human
aggcuccuugcucacaggcuca

SEQ ID NO: 390070 - RNA, 18 nt, Human
cagcagagacauucaaaa

SEQ ID NO: 390071 - RNA, 22 nt, Human
cugagaguguggcuuccaggcc

SEQ ID NO: 390072 - RNA, 22 nt, Human
uccagagggcgauggcuggggg

SEQ ID NO: 390073 - RNA, 22 nt, Human
uggcucagucauggaugaguaa

SEQ ID NO: 390074 - RNA, 22 nt, Human
cgcugccaggucaccaggggua

SEQ ID NO: 390075 - RNA, 22 nt, Human
uggcugaggcacagcugccgcc

SEQ ID NO: 390076 - RNA, 22 nt, Human
gagggaugguaguugacacuga

SEQ ID NO: 390077 - RNA, 22 nt, Human
gcucacagccggcuggcagggg

SEQ ID NO: 390078 - RNA, 22 nt, Human
gcaggcugauagaggauuccau

SEQ ID NO: 390079 - RNA, 22 nt, Human
cacuggcaugugaggcgguggc

SEQ ID NO: 390080 - RNA, 22 nt, Human
agccuggccugggcaggcacau

SEQ ID NO: 390081 - RNA, 22 nt, Human
acaggcugcugggcuccgugcu

SEQ ID NO: 390082 - RNA, 22 nt, Human
uccuggaguugugcagugcaca

SEQ ID NO: 390083 - RNA, 21 nt, Human
ccugcugugaucuuagugagu

SEQ ID NO: 390084 - RNA, 22 nt, Human
ucagcuuucucuucuaucgaua

SEQ ID NO: 390085 - RNA, 22 nt, Human
cuggccaguuguccuggcuugg

SEQ ID NO: 390086 - RNA, 22 nt, Human
ugcaaaauaaugaacgauuuuu

SEQ ID NO: 390087 - RNA, 22 nt, Human
cagaacugggcagggagcagag

SEQ ID NO: 390088 - RNA, 22 nt, Human
uauguacagggauagaacuuga

SEQ ID NO: 390089 - RNA, 22 nt, Human
ucugcucuccauacuuccgcac

SEQ ID NO: 390090 - RNA, 22 nt, Human
cccaaggacacgggcagggaca

SEQ ID NO: 390091 - RNA, 20 nt, Human
auacacauauucuugcaacu

SEQ ID NO: 390092 - RNA, 22 nt, Human
uuugaaugcaggacauacagaa

SEQ ID NO: 390093 - RNA, 22 nt, Human
ugccucugcugcuguggcauca

SEQ ID NO: 390094 - RNA, 22 nt, Human
ugauugaagaggugaggaaguu

SEQ ID NO: 390095 - RNA, 22 nt, Human
cagcagcuucuguugaucagaa

SEQ ID NO: 390096 - RNA, 22 nt, Human
caggaggcccaaagggcgcaga

SEQ ID NO: 390097 - RNA, 18 nt, Human
aagucaccccugcucccu

SEQ ID NO: 390098 - RNA, 22 nt, Human
agaauaaacugcuuuagggcag

SEQ ID NO: 390099 - RNA, 22 nt, Human
ugccuggguguaaagggccaac

SEQ ID NO: 390100 - RNA, 22 nt, Human
gccugagcccaggugugcagag

SEQ ID NO: 390101 - RNA, 22 nt, Human
cucccagagagcaggugggccg

SEQ ID NO: 390102 - RNA, 22 nt, Human
uaggagggcccugaaaauggca

SEQ ID NO: 390103 - RNA, 22 nt, Human
gaucagaaucuucauuuucagu

SEQ ID NO: 390104 - RNA, 21 nt, Human
ugguggagugugcugagcaug

SEQ ID NO: 390105 - RNA, 22 nt, Human
gcauaauauacaugcuugaucc

SEQ ID NO: 390106 - RNA, 22 nt, Human
cauuugcagagggugacacucu

SEQ ID NO: 390107 - RNA, 22 nt, Human
aaacagcuggucucaaauguuc

SEQ ID NO: 390108 - RNA, 17 nt, Human
ccaggugggaggugggg

SEQ ID NO: 390109 - RNA, 22 nt, Human
uccugcaggcuugaguccucag

SEQ ID NO: 390110 - RNA, 22 nt, Human
ugcugcauuuaucuucucaaac

SEQ ID NO: 390111 - RNA, 22 nt, Human
ggaggguuagcaaaggcacaga

SEQ ID NO: 390112 - RNA, 22 nt, Human
uuauuucauugauuucuaagac

SEQ ID NO: 390113 - RNA, 22 nt, Human
uuagccauuuuauacaagugua

SEQ ID NO: 390114 - RNA, 22 nt, Human
agaaaagaggcuuucuaagcau

SEQ ID NO: 390115 - RNA, 22 nt, Human
agagcagugcugaagaguaggg

SEQ ID NO: 390116 - RNA, 22 nt, Human
uuagagaaauucugguaaugua

SEQ ID NO: 390117 - RNA, 22 nt, Human
caggggcaggugugagaucauc

SEQ ID NO: 390118 - RNA, 22 nt, Human
auacagaaguuuuccacuuauu

SEQ ID NO: 390119 - RNA, 22 nt, Human
uagaaauaaaucugcagcuggg

SEQ ID NO: 390120 - RNA, 22 nt, Human
caggcagcugcuggguucagcc

SEQ ID NO: 390121 - RNA, 22 nt, Human
auaugaagaauuccaauuugga

SEQ ID NO: 390122 - RNA, 22 nt, Human
gugucccaauguucaggacggc

SEQ ID NO: 390123 - RNA, 22 nt, Human
cuccagugagugagcaggcgac

SEQ ID NO: 390124 - RNA, 22 nt, Human
auuaguaaaacauuguauaugu

SEQ ID NO: 390125 - RNA, 22 nt, Human
ugagccagucugucugggugaa

SEQ ID NO: 390126 - RNA, 22 nt, Human
agaaaucaauaucuauauguug

SEQ ID NO: 390127 - RNA, 22 nt, Human
gcuguggccaacaaaccacuuu

SEQ ID NO: 390128 - RNA, 22 nt, Human
gcuccucuccucggagucgggg

SEQ ID NO: 390129 - RNA, 22 nt, Human
acugccaggauggcacuagagg

SEQ ID NO: 390130 - RNA, 22 nt, Human
cauggcuucuaagugauaacgu

SEQ ID NO: 390131 - RNA, 22 nt, Human
accaggcaugauguggagcaca

SEQ ID NO: 390132 - RNA, 22 nt, Human
cagcuuuaccaauauuuggaaa

SEQ ID NO: 390133 - RNA, 21 nt, Human
ggcuuuaugcucacccagccu

SEQ ID NO: 390134 - RNA, 22 nt, Human
gccagcagguggagagaucaag

SEQ ID NO: 390135 - RNA, 22 nt, Human
cccuccagcucaaagcaaccgg

SEQ ID NO: 390136 - RNA, 22 nt, Human
gccagagcugagacacgagucc

SEQ ID NO: 390137 - RNA, 22 nt, Human
ucagccaggccaggcauucaca

SEQ ID NO: 390138 - RNA, 22 nt, Human
uggcagcagggccccuggagga

SEQ ID NO: 390139 - RNA, 22 nt, Human
ucugucucaaguucuugcacuc

SEQ ID NO: 390140 - RNA, 22 nt, Human
ucagucucaucaacucuauucc

SEQ ID NO: 390141 - RNA, 20 nt, Human
uccuucaggcagggccuagu

SEQ ID NO: 390142 - RNA, 22 nt, Human
ucucaagcuuguugguauguuu

SEQ ID NO: 390143 - RNA, 22 nt, Human
aggcucagacaggaaaaguaac

SEQ ID NO: 390144 - RNA, 22 nt, Human
caguacuuaacuuauaggagag

SEQ ID NO: 390145 - RNA, 22 nt, Human
cagcaggcccaggugcugguga

SEQ ID NO: 390146 - RNA, 22 nt, Human
guggcugcucgggcuccggccc

SEQ ID NO: 390147 - RNA, 22 nt, Human
uuagccaugcccuagaagagga

SEQ ID NO: 390148 - RNA, 19 nt, Human
cuucuucuuggcagccaag

SEQ ID NO: 390149 - RNA, 22 nt, Human
acauuucuggaguuucucaaca

SEQ ID NO: 390150 - RNA, 22 nt, Human
gccugagccgccugagcggcgg

SEQ ID NO: 390151 - RNA, 22 nt, Human
guguaucaaagcacagacuuca

SEQ ID NO: 390152 - RNA, 22 nt, Human
ugggcagggagcuggaaccaca

SEQ ID NO: 390153 - RNA, 22 nt, Human
cagccugcucucagauguugag

SEQ ID NO: 390154 - RNA, 22 nt, Human
ucaugccacuuacaaaauaaug

SEQ ID NO: 390155 - RNA, 22 nt, Human
uggcugaggcuuuucuuaaaga

SEQ ID NO: 390156 - RNA, 22 nt, Human
uaaaauguguuucuguaugguu

SEQ ID NO: 390157 - RNA, 22 nt, Human
augcuuuacaguuuuccaaaca

SEQ ID NO: 390158 - RNA, 22 nt, Human
acaaauauuuacugaauccacu

SEQ ID NO: 390159 - RNA, 22 nt, Human
ggcugccuacuuucccagaguu

SEQ ID NO: 390160 - RNA, 22 nt, Human
cccagcugcaccucuauggccu

SEQ ID NO: 390161 - RNA, 22 nt, Human
agucccagcccaguccuguaag

SEQ ID NO: 390162 - RNA, 22 nt, Human
agagacuggagaugggcagugu

SEQ ID NO: 390163 - RNA, 22 nt, Human
agagaaggucacuaaggaccca

SEQ ID NO: 390164 - RNA, 22 nt, Human
agaagucaauaguuguuugaug

SEQ ID NO: 390165 - RNA, 22 nt, Human
aauaaaaugaacugguagaguu

SEQ ID NO: 390166 - RNA, 22 nt, Human
gaucugaaucaauagaauaacu

SEQ ID NO: 390167 - RNA, 22 nt, Human
auugucgcuuauuuaggugcuu

SEQ ID NO: 390168 - RNA, 22 nt, Human
gugcauuuggugacucucaccc

SEQ ID NO: 390169 - RNA, 23 nt, Human
caguacuuaguguagcguuaauu

SEQ ID NO: 390170 - RNA, 22 nt, Human
uguauuuaagcuuuaccuaaaa

SEQ ID NO: 390171 - RNA, 22 nt, Human
augcccgauaccuaguuaacuc

SEQ ID NO: 390172 - RNA, 22 nt, Human
ggaggaggggcgcuuugucuau

SEQ ID NO: 390173 - RNA, 22 nt, Human
gcaggaguguauuugcauguaa

SEQ ID NO: 390174 - RNA, 22 nt, Human
caguacuuugaagauauuuuag

SEQ ID NO: 390175 - RNA, 22 nt, Human
uugccucccagcaugggcagcu

SEQ ID NO: 390176 - RNA, 22 nt, Human
aggccagaaauuuggaguaugu

SEQ ID NO: 390177 - RNA, 22 nt, Human
gggccuccggggugagcugugg

SEQ ID NO: 390178 - RNA, 22 nt, Human
acuuggcaaguaucuauaaagu

SEQ ID NO: 390179 - RNA, 22 nt, Human
auuggcaguuagugacgaggcu

SEQ ID NO: 390180 - RNA, 22 nt, Human
acaggagaauuaucuggaacaa

SEQ ID NO: 390181 - RNA, 22 nt, Human
ucaaauguucccuguacuggcc

SEQ ID NO: 390182 - RNA, 22 nt, Human
uuuuuuaguuaggucagaaugu

SEQ ID NO: 390183 - RNA, 22 nt, Human
uuacuuugcuuucucauuacag

SEQ ID NO: 390184 - RNA, 22 nt, Human
uguacaguauauuucaaagcca

SEQ ID NO: 390185 - RNA, 22 nt, Human
auuguaauuuuagagaaagugg

SEQ ID NO: 390186 - RNA, 22 nt, Human
auguuucaucaguaagguuuug

SEQ ID NO: 390187 - RNA, 22 nt, Human
ugcucuggggagcuccucugcg

SEQ ID NO: 390188 - RNA, 22 nt, Human
acaggacauguaccaggugguc

SEQ ID NO: 390189 - RNA, 20 nt, Human
uaucaaucagaaagaagacu

SEQ ID NO: 390190 - RNA, 22 nt, Human
agagccaggaugucuucugggg

SEQ ID NO: 390191 - RNA, 22 nt, Human
gggcaugagaggcaggcaagug

SEQ ID NO: 390192 - RNA, 22 nt, Human
ggcugugaacccuggcagugug

SEQ ID NO: 390193 - RNA, 22 nt, Human
gaaguucaggugggaauugagc

SEQ ID NO: 390194 - RNA, 22 nt, Human
gccuucccacccugcgaggcug

SEQ ID NO: 390195 - RNA, 22 nt, Human
ccaaaguccauaguuuacauaa

SEQ ID NO: 390196 - RNA, 22 nt, Human
ugaaguaacuguccaggaucca

SEQ ID NO: 390197 - RNA, 22 nt, Human
uuuccucuucgauuaaguuugg

SEQ ID NO: 390198 - RNA, 22 nt, Human
ucaaaaguuucacauagagaua

SEQ ID NO: 390199 - RNA, 22 nt, Human
uacugaaaagccacaaggacca

SEQ ID NO: 390200 - RNA, 22 nt, Human
uuuauuuauccuucuggauugc

SEQ ID NO: 390201 - RNA, 22 nt, Human
ccugggaguggcacucacagca

SEQ ID NO: 390202 - RNA, 22 nt, Human
gcagccuguuguaccagccugu

SEQ ID NO: 390203 - RNA, 22 nt, Human
ccauccuaucugaccuacuugu

SEQ ID NO: 390204 - RNA, 22 nt, Human
gucccagggagguucagggcuu

SEQ ID NO: 390205 - RNA, 22 nt, Human
ccagccucacuggcaucaccua

SEQ ID NO: 390206 - RNA, 22 nt, Human
gggcugggauugcuugcuguga

SEQ ID NO: 390207 - RNA, 22 nt, Human
ggcuggcauccagggaaaucca

SEQ ID NO: 390208 - RNA, 22 nt, Human
ccuggaucuuuguuguaaauau

SEQ ID NO: 390209 - RNA, 22 nt, Human
gauuuuauuagcccaaacuuug

SEQ ID NO: 390210 - RNA, 22 nt, Human
aaaguucagauuagacucaaga

SEQ ID NO: 390211 - RNA, 20 nt, Human
uggcccuguuuucuccaggc

SEQ ID NO: 390212 - RNA, 22 nt, Human
ugccagaagauucucuaucaga

SEQ ID NO: 390213 - RNA, 22 nt, Human
uacauaguuccauuuacaggaa

SEQ ID NO: 390214 - RNA, 22 nt, Human
auuucagcccaguaugagcccc

SEQ ID NO: 390215 - RNA, 22 nt, Human
uagcugccauugcuccaggaag

SEQ ID NO: 390216 - RNA, 22 nt, Human
uauuccagguuucuuguuguau

SEQ ID NO: 390217 - RNA, 22 nt, Human
agcaggagcugugggaagaugg

SEQ ID NO: 390218 - RNA, 22 nt, Human
gggcccuggggccugauuugca

SEQ ID NO: 390219 - RNA, 22 nt, Human
gccaggcagcuagcaaccccug

SEQ ID NO: 390220 - RNA, 22 nt, Human
cucugggcaaagaugccucauc

SEQ ID NO: 390221 - RNA, 19 nt, Human
aauacaguguuauagaauu

SEQ ID NO: 390222 - RNA, 22 nt, Human
agaaaguuuugugcuauauaug

SEQ ID NO: 390223 - RNA, 22 nt, Human
gagggcauaguuaaauaggagg

SEQ ID NO: 390224 - RNA, 22 nt, Human
cagaaauguuuauauguggugu

SEQ ID NO: 390225 - RNA, 22 nt, Human
gaaaaugugccuuuggguauug

SEQ ID NO: 390226 - RNA, 22 nt, Human
uaggaggguuagagggaaauau

SEQ ID NO: 390227 - RNA, 22 nt, Human
ucagagcuuuggagaccaggaa

SEQ ID NO: 390228 - RNA, 22 nt, Human
gagccuguguuuccuguagcca

SEQ ID NO: 390229 - RNA, 22 nt, Human
aguccagucucacucuuggcag

SEQ ID NO: 390230 - RNA, 22 nt, Human
uggcuuaagcgcaacucugucu

SEQ ID NO: 390231 - RNA, 22 nt, Human
aggucagcugcugauaggcagc

SEQ ID NO: 390232 - RNA, 22 nt, Human
auccuugagccaaugacugauu

SEQ ID NO: 390233 - RNA, 22 nt, Human
agcauauaaauggacauauuug

SEQ ID NO: 390234 - RNA, 22 nt, Human
gccagguguaguggccacaccu

SEQ ID NO: 390235 - RNA, 22 nt, Human
uguuccaugucuuuguaggacu

SEQ ID NO: 390236 - RNA, 22 nt, Human
uuccuuagccugccuuccaggg

SEQ ID NO: 390237 - RNA, 22 nt, Human
uccuaguucucugccagucgcu

SEQ ID NO: 390238 - RNA, 22 nt, Human
agggaccuugauggguuuggga

SEQ ID NO: 390239 - RNA, 22 nt, Human
gaguguuccagaaacuggcccu

SEQ ID NO: 390240 - RNA, 22 nt, Human
agggauggaagacuugaagacc

SEQ ID NO: 390241 - RNA, 22 nt, Human
aauguguguucggggcccagag

SEQ ID NO: 390242 - RNA, 22 nt, Human
acauuucuccuugcaggaguca

SEQ ID NO: 390243 - RNA, 22 nt, Human
uucuuuccaaccagauauuggu

SEQ ID NO: 390244 - RNA, 22 nt, Human
ccuggcugcuuucacuauggag

SEQ ID NO: 390245 - RNA, 22 nt, Human
ucuaguucuagaucccugagga

SEQ ID NO: 390246 - RNA, 22 nt, Human
agugaaaucagguuuugacugc

SEQ ID NO: 390247 - RNA, 22 nt, Human
ugaagaauguugcagugagcau

SEQ ID NO: 390248 - RNA, 22 nt, Human
cagugguggaaugaggaauugu

SEQ ID NO: 390249 - RNA, 22 nt, Human
uucaccacagucucaucuacgc

SEQ ID NO: 390250 - RNA, 22 nt, Human
gcucuggacuggggccugagaa

SEQ ID NO: 390251 - RNA, 22 nt, Human
accucccagcucugagcuuggg

SEQ ID NO: 390252 - RNA, 22 nt, Human
aaggcagcuucaccacagcauu

SEQ ID NO: 390253 - RNA, 18 nt, Human
ccagcaugccagaggcug

SEQ ID NO: 390254 - RNA, 22 nt, Human
guucuccauucagcuuccugug

SEQ ID NO: 390255 - RNA, 22 nt, Human
cuugcugugugguguucucaga

SEQ ID NO: 390256 - RNA, 22 nt, Human
gggaguguugagcgcccugcca

SEQ ID NO: 390257 - RNA, 22 nt, Human
cugggccucauccucagaguuu

SEQ ID NO: 390258 - RNA, 17 nt, Human
gcaaucucagucuccuu

SEQ ID NO: 390259 - RNA, 22 nt, Human
ucaguaaaugagcaaaaauuuc

SEQ ID NO: 390260 - RNA, 22 nt, Human
agccaggggauucaucagggac

SEQ ID NO: 390261 - RNA, 22 nt, Human
gugcugagcugcagaugcgcuc

SEQ ID NO: 390262 - RNA, 22 nt, Human
gaaggccuagggaugcucugcg

SEQ ID NO: 390263 - RNA, 22 nt, Human
ggcagccagcaaugagaaguuu

SEQ ID NO: 390264 - RNA, 22 nt, Human
gaagagcuaaaggcacaggcuu

SEQ ID NO: 390265 - RNA, 23 nt, Human
aggugccaacugagagcugagag

SEQ ID NO: 390266 - RNA, 22 nt, Human
uugugaaauguuucaaaauagu

SEQ ID NO: 390267 - RNA, 22 nt, Human
agcaccaugaccuugccauuga

SEQ ID NO: 390268 - RNA, 22 nt, Human
cccaagagcuucuaggacgcug

SEQ ID NO: 390269 - RNA, 22 nt, Human
acuugaauuauauuucuagaga

SEQ ID NO: 390270 - RNA, 22 nt, Human
auuuguaauuucuuaucugugu

SEQ ID NO: 390271 - RNA, 22 nt, Human
agcaccuggucuccuggcgcug

SEQ ID NO: 390272 - RNA, 22 nt, Human
ugagagugauugguucgaaugu

SEQ ID NO: 390273 - RNA, 22 nt, Human
agcuguggcagcacuuuggagu

SEQ ID NO: 390274 - RNA, 23 nt, Human
gggugggccaaauuagguagccu

SEQ ID NO: 390275 - RNA, 22 nt, Human
cagcaggagcagucagacuccu

SEQ ID NO: 390276 - RNA, 22 nt, Human
agcagcucuggcacuguagcau

SEQ ID NO: 390277 - RNA, 19 nt, Human
agcuguggggccuagcacc

SEQ ID NO: 390278 - RNA, 22 nt, Human
gccccagcucugccacaacuag

SEQ ID NO: 390279 - RNA, 22 nt, Human
agguaaggcuguaagcuaagcc

SEQ ID NO: 390280 - RNA, 22 nt, Human
aggagucacucagggcuucauc

SEQ ID NO: 390281 - RNA, 22 nt, Human
caguaaagcauguaugucuuca

SEQ ID NO: 390282 - RNA, 22 nt, Human
cucagcagagaccagggaggaa

SEQ ID NO: 390283 - RNA, 23 nt, Human
cagaaauaaacugguuuguagau

SEQ ID NO: 390284 - RNA, 20 nt, Human
acuugcugggcuuuguuacc

SEQ ID NO: 390285 - RNA, 22 nt, Human
uauuuauaaucugccaaagaga

SEQ ID NO: 390286 - RNA, 22 nt, Human
cugagagugcucuuugauguca

SEQ ID NO: 390287 - RNA, 22 nt, Human
aggcccugaagucggccccuca

SEQ ID NO: 390288 - RNA, 22 nt, Human
agccaggcucaaggccugcucc

SEQ ID NO: 390289 - RNA, 19 nt, Human
agaggcugucaccuguagc

SEQ ID NO: 390290 - RNA, 18 nt, Human
uccgaggcaccauaaaaa

SEQ ID NO: 390291 - RNA, 22 nt, Human
ugggacagggaaucugaucccc

SEQ ID NO: 390292 - RNA, 23 nt, Human
cacugcagcguggucuggcagga

SEQ ID NO: 390293 - RNA, 22 nt, Human
uccugccucuugccuucuucac

SEQ ID NO: 390294 - RNA, 22 nt, Human
auguacaaaauguuuugaaaug

SEQ ID NO: 390295 - RNA, 22 nt, Human
ggcuucagugacuggugcccuc

SEQ ID NO: 390296 - RNA, 22 nt, Human
ucuguggccuguguccaagugc

SEQ ID NO: 390297 - RNA, 22 nt, Human
cagggcugguuugucgaagaaa

SEQ ID NO: 390298 - RNA, 22 nt, Human
ccagcccuccuccaucagagga

SEQ ID NO: 390299 - RNA, 22 nt, Human
auuugcagagcucugaauuuug

SEQ ID NO: 390300 - RNA, 22 nt, Human
cccaggagaauauuuuuggguc

SEQ ID NO: 390301 - RNA, 22 nt, Human
agaagcugacagaugcagcagg

SEQ ID NO: 390302 - RNA, 22 nt, Human
guacaugucaaaaaaugcauaa

SEQ ID NO: 390303 - RNA, 22 nt, Human
uuaauuaaauucaugagcauug

SEQ ID NO: 390304 - RNA, 22 nt, Human
gccugaugagcuuccagcugag

SEQ ID NO: 390305 - RNA, 22 nt, Human
aucacauucuuucaaagcaguc

SEQ ID NO: 390306 - RNA, 22 nt, Human
cauuucugcagaauugcucuuc

SEQ ID NO: 390307 - RNA, 22 nt, Human
auacaucaugcuccauauauuu

SEQ ID NO: 390308 - RNA, 22 nt, Human
uaaucuacuguuuauaugaaau

SEQ ID NO: 390309 - RNA, 22 nt, Human
gaaauucugugucccagagugc

SEQ ID NO: 390310 - RNA, 22 nt, Human
aagcagaggaccgacggaggga

SEQ ID NO: 390311 - RNA, 19 nt, Human
caggaaggggcgaaucugg

SEQ ID NO: 390312 - RNA, 22 nt, Human
cacugcuuuuuuggcuauguac

SEQ ID NO: 390313 - RNA, 22 nt, Human
aucagcaaaaaugccuucagaa

SEQ ID NO: 390314 - RNA, 21 nt, Human
agcagccauggaugguaugua

SEQ ID NO: 390315 - RNA, 22 nt, Human
aaaacuaaauacgcuuugccuc

SEQ ID NO: 390316 - RNA, 22 nt, Human
aaaucaguuggaacacaagcag

SEQ ID NO: 390317 - RNA, 22 nt, Human
ucacugcagacaaccucaguca

SEQ ID NO: 390318 - RNA, 22 nt, Human
gagacauggcaaaagcacuggu

SEQ ID NO: 390319 - RNA, 19 nt, Human
gaucagagugucagcuugu

SEQ ID NO: 390320 - RNA, 22 nt, Human
uuucuuguaagauguuuauuaa

SEQ ID NO: 390321 - RNA, 20 nt, Human
uggcagaguugucccaccca

SEQ ID NO: 390322 - RNA, 22 nt, Human
aaaaugcaugagaaugugcucg

SEQ ID NO: 390323 - RNA, 22 nt, Human
agugacugacaccuguaauccc

SEQ ID NO: 390324 - RNA, 22 nt, Human
uuuuuauaugaaggauagugcg

SEQ ID NO: 390325 - RNA, 22 nt, Human
uuuccucuuuguaccuugacua

SEQ ID NO: 390326 - RNA, 22 nt, Human
acaacauucuuaaauacacuga

SEQ ID NO: 390327 - RNA, 22 nt, Human
aggagccaugagugacaucaca

SEQ ID NO: 390328 - RNA, 22 nt, Human
ccaggaggcggaagguacagug

SEQ ID NO: 390329 - RNA, 22 nt, Human
ccugugugcugaugacgacaga

SEQ ID NO: 390330 - RNA, 22 nt, Human
aggaagccuggggcugcccucg

SEQ ID NO: 390331 - RNA, 22 nt, Human
accagguggccccagcgugguu

SEQ ID NO: 390332 - RNA, 21 nt, Human
uccugcagggcagcagagugg

SEQ ID NO: 390333 - RNA, 22 nt, Human
uucucugagauagacuaagugg

SEQ ID NO: 390334 - RNA, 22 nt, Human
acacacacaagcagguugugga

SEQ ID NO: 390335 - RNA, 22 nt, Human
uagaauaugauuaauuuucuua

SEQ ID NO: 390336 - RNA, 22 nt, Human
ucuuacauauagcaugaguaca

SEQ ID NO: 390337 - RNA, 22 nt, Human
gguacaauggaccauaaaagcu

SEQ ID NO: 390338 - RNA, 22 nt, Human
uguaggacauguacuuguaaca

SEQ ID NO: 390339 - RNA, 22 nt, Human
caaaugaagggagcugaagucu

SEQ ID NO: 390340 - RNA, 22 nt, Human
gcccucagaugggaaaggaggg

SEQ ID NO: 390341 - RNA, 22 nt, Human
cccaucacagacacuggguuau

SEQ ID NO: 390342 - RNA, 22 nt, Human
aaggaagacuugagaagguucc

SEQ ID NO: 390343 - RNA, 22 nt, Human
ucccagagugugggcaucaagg

SEQ ID NO: 390344 - RNA, 22 nt, Human
auucucaaaacauaacuucacu

SEQ ID NO: 390345 - RNA, 22 nt, Human
cuggccugagcacagcggcugc

SEQ ID NO: 390346 - RNA, 22 nt, Human
gcuguucagaugcgauucagga

SEQ ID NO: 390347 - RNA, 22 nt, Human
gaggcaggcccugaaugaguca

SEQ ID NO: 390348 - RNA, 22 nt, Human
agcucccaggcagucaugagga

SEQ ID NO: 390349 - RNA, 22 nt, Human
ggggaccuggccacccauccuu

SEQ ID NO: 390350 - RNA, 22 nt, Human
auacagaauacuaauuccugag

SEQ ID NO: 390351 - RNA, 22 nt, Human
caggaaaggugugucaugaugg

SEQ ID NO: 390352 - RNA, 22 nt, Human
uaaagaucuuaggaagauuuuc

SEQ ID NO: 390353 - RNA, 22 nt, Human
gcacagcaauuucuauaagcuc

SEQ ID NO: 390354 - RNA, 22 nt, Human
uggacaggugagugacucaggg

SEQ ID NO: 390355 - RNA, 22 nt, Human
ugguacacauguccaaggucag

SEQ ID NO: 390356 - RNA, 22 nt, Human
gagaagcaaucaguggccaccc

SEQ ID NO: 390357 - RNA, 22 nt, Human
aauuccaaauguuuucaaucca

SEQ ID NO: 390358 - RNA, 22 nt, Human
uggcaauuuuaggugguuuagu

SEQ ID NO: 390359 - RNA, 22 nt, Human
accaggaggaaguguuaaugau

SEQ ID NO: 390360 - RNA, 22 nt, Human
aaauuauaggugccaccuugga

SEQ ID NO: 390361 - RNA, 22 nt, Human
uagggcugcugcagaugacagg

SEQ ID NO: 390362 - RNA, 22 nt, Human
guuuuuccugcugacuuggguc

SEQ ID NO: 390363 - RNA, 22 nt, Human
uaaauguguaaaccuccauuac

SEQ ID NO: 390364 - RNA, 19 nt, Human
gggcucuggccucaguggg

SEQ ID NO: 390365 - RNA, 22 nt, Human
aggacuucuccgauaagucaga

SEQ ID NO: 390366 - RNA, 22 nt, Human
aggaccagccuccaggucucuu

SEQ ID NO: 390367 - RNA, 22 nt, Human
ggaggugggauuaggaccuaaa

SEQ ID NO: 390368 - RNA, 22 nt, Human
ucaugcuuaaaagacacuugag

SEQ ID NO: 390369 - RNA, 22 nt, Human
ucucagggcagcaaggaagcau

SEQ ID NO: 390370 - RNA, 22 nt, Human
uguagcacagagcuuugacacu

SEQ ID NO: 390371 - RNA, 22 nt, Human
gugcagggagcccagaaggucc

SEQ ID NO: 390372 - RNA, 22 nt, Human
uuccauuuauucuuguccagau

SEQ ID NO: 390373 - RNA, 22 nt, Human
uuucauugcagagucugugugc

SEQ ID NO: 390374 - RNA, 22 nt, Human
accuggagucauuugaggagua

SEQ ID NO: 390375 - RNA, 22 nt, Human
aagccacugagauuucacugca

SEQ ID NO: 390376 - RNA, 19 nt, Human
gagaggccugugcuugaag

SEQ ID NO: 390377 - RNA, 22 nt, Human
gcuggugagcaaaggagaagga

SEQ ID NO: 390378 - RNA, 22 nt, Human
cagagcagaaaccugggugauu

SEQ ID NO: 390379 - RNA, 22 nt, Human
gcucuguguccacagcuggaaa

SEQ ID NO: 390380 - RNA, 22 nt, Human
cugcagggaacugaggcccaga

SEQ ID NO: 390381 - RNA, 22 nt, Human
gcagugccuugcuucucugucu

SEQ ID NO: 390382 - RNA, 20 nt, Human
gccugagcuccgccuccugu

SEQ ID NO: 390383 - RNA, 22 nt, Human
uggcugggugcuauccaguacu

SEQ ID NO: 390384 - RNA, 22 nt, Human
aguguggcugcguagggcucuc

SEQ ID NO: 390385 - RNA, 22 nt, Human
acaguggagaagcaaaugcagu

SEQ ID NO: 390386 - RNA, 22 nt, Human
caggaacacaaugagucucaaa

SEQ ID NO: 390387 - RNA, 22 nt, Human
cagagcugucauuugccaguga

SEQ ID NO: 390388 - RNA, 22 nt, Human
aagcccaguuucacacugagac

SEQ ID NO: 390389 - RNA, 22 nt, Human
acauuugaggauguuaagaaug

SEQ ID NO: 390390 - RNA, 22 nt, Human
augccuggacugacaugcacug

SEQ ID NO: 390391 - RNA, 22 nt, Human
agcaggaguuugaugcuuuuau

SEQ ID NO: 390392 - RNA, 22 nt, Human
agacaugucaccaauucuuacu

SEQ ID NO: 390393 - RNA, 22 nt, Human
uaugcauagguaucuauacuca

SEQ ID NO: 390394 - RNA, 22 nt, Human
gcuggccuuugaggaagcugcg

SEQ ID NO: 390395 - RNA, 21 nt, Human
uggagacucugguucuuugug

SEQ ID NO: 390396 - RNA, 22 nt, Human
caaaggcugccacuguggcugu

SEQ ID NO: 390397 - RNA, 16 nt, Human
gaggcuggcagauguc

SEQ ID NO: 390398 - RNA, 22 nt, Human
gccaggcucucagugacugccc

SEQ ID NO: 390399 - RNA, 22 nt, Human
ucccagccuuucuuuucugcug

SEQ ID NO: 390400 - RNA, 22 nt, Human
gcucccugacucaguuccugag

SEQ ID NO: 390401 - RNA, 22 nt, Human
augaacaauaaaauagaucaca

SEQ ID NO: 390402 - RNA, 22 nt, Human
cagaggcugccagccaugugca

SEQ ID NO: 390403 - RNA, 22 nt, Human
aggcuucagguuugcuuugcag

SEQ ID NO: 390404 - RNA, 22 nt, Human
uuugcauuauauuuauagaaga

SEQ ID NO: 390405 - RNA, 19 nt, Human
cucuuaaauugucucuugc

SEQ ID NO: 390406 - RNA, 22 nt, Human
uccuugaagcuuguaucuaaua

SEQ ID NO: 390407 - RNA, 18 nt, Human
cagaagcaggcagugcag

SEQ ID NO: 390408 - RNA, 22 nt, Human
agccaaggcagcuagagcucug

SEQ ID NO: 390409 - RNA, 22 nt, Human
caaaggcaggcccccugugcag

SEQ ID NO: 390410 - RNA, 22 nt, Human
cccaggaggugugcccaacucg

SEQ ID NO: 390411 - RNA, 22 nt, Human
gggucuccauguuaacaucacu

SEQ ID NO: 390412 - RNA, 22 nt, Human
cagucccagaagagccugggag

SEQ ID NO: 390413 - RNA, 22 nt, Human
gagagcaggaggcagcgggacg

SEQ ID NO: 390414 - RNA, 22 nt, Human
uuuauguaauuucauaggugug

SEQ ID NO: 390415 - RNA, 22 nt, Human
gugauuuucuccuccuagaagu

SEQ ID NO: 390416 - RNA, 22 nt, Human
gugaggcagagaugccaaaacu

SEQ ID NO: 390417 - RNA, 22 nt, Human
uccuucagucuucugagccaua

SEQ ID NO: 390418 - RNA, 22 nt, Human
uucacuuauagggauguuauug

SEQ ID NO: 390419 - RNA, 22 nt, Human
uguuucaggaccuaucuuuuag

SEQ ID NO: 390420 - RNA, 22 nt, Human
agaacagcagcacgucaagcug

SEQ ID NO: 390421 - RNA, 22 nt, Human
cccagugccaggcacaggcagc

SEQ ID NO: 390422 - RNA, 22 nt, Human
cucagggacguuagaggacagg

SEQ ID NO: 390423 - RNA, 22 nt, Human
ucucuggagcugcagauccagg

SEQ ID NO: 390424 - RNA, 22 nt, Human
acauugaucagccucccaugca

SEQ ID NO: 390425 - RNA, 22 nt, Human
ggagcugaaggggugggcucag

SEQ ID NO: 390426 - RNA, 22 nt, Human
ugccugucucugacugccauua

SEQ ID NO: 390427 - RNA, 22 nt, Human
agggccaccucucuggguuccc

SEQ ID NO: 390428 - RNA, 22 nt, Human
uuugaacuucuccauucugaug

SEQ ID NO: 390429 - RNA, 22 nt, Human
agggcuccaaggaaguguagcu

SEQ ID NO: 390430 - RNA, 22 nt, Human
aucaggaugacaacugcugggu

SEQ ID NO: 390431 - RNA, 17 nt, Human
uuucaucugggaccacc

SEQ ID NO: 390432 - RNA, 22 nt, Human
aaguggagcuauaggcucagau

SEQ ID NO: 390433 - RNA, 23 nt, Human
accaggagccaagaucucccugg

SEQ ID NO: 390434 - RNA, 22 nt, Human
uucuuuaaaauagugagaaaga

SEQ ID NO: 390435 - RNA, 22 nt, Human
uaaaggcuuuuacaggagugca

SEQ ID NO: 390436 - RNA, 22 nt, Human
gacagggcauggugcagaguuc

SEQ ID NO: 390437 - RNA, 22 nt, Human
auggcuuuguuccaauaaaacu

SEQ ID NO: 390438 - RNA, 22 nt, Human
cagagacaguuucacagggucu

SEQ ID NO: 390439 - RNA, 22 nt, Human
ugcauuaugcuugugcuguaua

SEQ ID NO: 390440 - RNA, 22 nt, Human
acacagggcagagagcuggcuc

SEQ ID NO: 390441 - RNA, 20 nt, Human
caguccacuggaguuccuac

SEQ ID NO: 390442 - RNA, 22 nt, Human
acacagggcugcgccugacccc

SEQ ID NO: 390443 - RNA, 22 nt, Human
aaucagaauuuauugaaucuuu

SEQ ID NO: 390444 - RNA, 22 nt, Human
aggcuagcaaugggagaugagu

SEQ ID NO: 390445 - RNA, 22 nt, Human
auuguauuagcacaauacaauu

SEQ ID NO: 390446 - RNA, 23 nt, Human
aaugauuucaugaugauagcagc

SEQ ID NO: 390447 - RNA, 23 nt, Human
agaggggagcaucugcuggcuga

SEQ ID NO: 390448 - RNA, 22 nt, Human
agaggaggcagcuuaacucagu

SEQ ID NO: 390449 - RNA, 22 nt, Human
gagagaagggggauaugagccu

SEQ ID NO: 390450 - RNA, 22 nt, Human
uaauccacaauagagauuaucu

SEQ ID NO: 390451 - RNA, 22 nt, Human
gggaagggagggaccucagucu

SEQ ID NO: 390452 - RNA, 22 nt, Human
ggcagagcuuguuccuucuguu

SEQ ID NO: 390453 - RNA, 22 nt, Human
aaguccuuguauacagaaucaa

SEQ ID NO: 390454 - RNA, 22 nt, Human
gccuccugagaagccacaggcu

SEQ ID NO: 390455 - RNA, 22 nt, Human
aagcugccuugcugaggagaaa

SEQ ID NO: 390456 - RNA, 22 nt, Human
ugagcagagucgcuccagagug

SEQ ID NO: 390457 - RNA, 22 nt, Human
uggcagcaguggagguagaaag

SEQ ID NO: 390458 - RNA, 18 nt, Human
gcuuuauuucuuggggaa

SEQ ID NO: 390459 - RNA, 22 nt, Human
agggaggaguccucaaagucau

SEQ ID NO: 390460 - RNA, 22 nt, Human
gcagggcaucccugagcgggug

SEQ ID NO: 390461 - RNA, 22 nt, Human
cagggcaguaacgggaacaucu

SEQ ID NO: 390462 - RNA, 22 nt, Human
gcagagacuaguagugcagacu

SEQ ID NO: 390463 - RNA, 22 nt, Human
agaacaucuaaauaucugagac

SEQ ID NO: 390464 - RNA, 23 nt, Human
auuugagaaaguauuuuuaagac

SEQ ID NO: 390465 - RNA, 22 nt, Human
ccaggagaauaauggcagauua

SEQ ID NO: 390466 - RNA, 23 nt, Human
agaugagccaacaccuccaugcc

SEQ ID NO: 390467 - RNA, 22 nt, Human
uuauacuaaaacgcauugaauu

SEQ ID NO: 390468 - RNA, 17 nt, Human
uuuucucucuuggauuc

SEQ ID NO: 390469 - RNA, 22 nt, Human
ugggcagcagcaaagccagacu

SEQ ID NO: 390470 - RNA, 22 nt, Human
aauuaaaugacaggggaagaug

SEQ ID NO: 390471 - RNA, 22 nt, Human
aucagaaaauacccaguguuua

SEQ ID NO: 390472 - RNA, 22 nt, Human
gccuggugcuaugagggccagc

SEQ ID NO: 390473 - RNA, 20 nt, Human
caaugcacacagcugcuucu

SEQ ID NO: 390474 - RNA, 22 nt, Human
ugagcaguaggucugaauagug

SEQ ID NO: 390475 - RNA, 22 nt, Human
aggucacacaacugucagaggc

SEQ ID NO: 390476 - RNA, 22 nt, Human
aaauguguuucuuugugaaugg

SEQ ID NO: 390477 - RNA, 22 nt, Human
auauaacauacauacagaaaag

SEQ ID NO: 390478 - RNA, 22 nt, Human
uccaggagauacacugcaccag

SEQ ID NO: 390479 - RNA, 22 nt, Human
cucuguccuccaccugcuuuca

SEQ ID NO: 390480 - RNA, 22 nt, Human
cagcccuggcuagggcgagggc

SEQ ID NO: 390481 - RNA, 22 nt, Human
gaaggccuaggaaggaagccuu

SEQ ID NO: 390482 - RNA, 22 nt, Human
caugcugugcaucuugaugacc

SEQ ID NO: 390483 - RNA, 22 nt, Human
aacaaauguaaaaugcagaugc

SEQ ID NO: 390484 - RNA, 22 nt, Human
acucucagaggguggcagcaau

SEQ ID NO: 390485 - RNA, 22 nt, Human
gcuggcaggagccuuucccuuu

SEQ ID NO: 390486 - RNA, 22 nt, Human
gccagccugugcuuggccaggc

SEQ ID NO: 390487 - RNA, 22 nt, Human
gcugucagugaggugagacaug

SEQ ID NO: 390488 - RNA, 22 nt, Human
gagcugccaagauuacaaucag

SEQ ID NO: 390489 - RNA, 22 nt, Human
guccucugcccaggucaagguu

SEQ ID NO: 390490 - RNA, 22 nt, Human
cagggcuggguuaaaagcaggg

SEQ ID NO: 390491 - RNA, 22 nt, Human
aagcagccagccaucaugcccg

SEQ ID NO: 390492 - RNA, 22 nt, Human
auagucuuagucuauaguuuug

SEQ ID NO: 390493 - RNA, 18 nt, Human
acagaaauagcugugccu

SEQ ID NO: 390494 - RNA, 21 nt, Human
auucagaaagggaauaaacuc

SEQ ID NO: 390495 - RNA, 22 nt, Human
ggagggagucagcugauuagaa

SEQ ID NO: 390496 - RNA, 22 nt, Human
ccagggcuggugggagaugcug

SEQ ID NO: 390497 - RNA, 22 nt, Human
auauucacugagcauaaagcca

SEQ ID NO: 390498 - RNA, 20 nt, Human
cacaggcuauaugagagcca

SEQ ID NO: 390499 - RNA, 20 nt, Human
acauccuggugacuagaacu

SEQ ID NO: 390500 - RNA, 22 nt, Human
agucuuaauagagaaaaacugu

SEQ ID NO: 390501 - RNA, 22 nt, Human
ccucugcucccuggugucugag

SEQ ID NO: 390502 - RNA, 22 nt, Human
aggccucacauugggcuucaag

SEQ ID NO: 390503 - RNA, 22 nt, Human
cugagcuggucuauggacuugg

SEQ ID NO: 390504 - RNA, 22 nt, Human
cagcaauauacacagucuaugg

SEQ ID NO: 390505 - RNA, 22 nt, Human
gccaggugggagacagacagca

SEQ ID NO: 390506 - RNA, 22 nt, Human
agggucagggagugaguauuua

SEQ ID NO: 390507 - RNA, 23 nt, Human
gggcagguuuuuauaggcuucag

SEQ ID NO: 390508 - RNA, 22 nt, Human
cagaguguauucugcaguugca

SEQ ID NO: 390509 - RNA, 22 nt, Human
gccaggcuggcaaaaggaaacc

SEQ ID NO: 390510 - RNA, 22 nt, Human
uuugucauaucacacaauuuug

SEQ ID NO: 390511 - RNA, 22 nt, Human
cugcuguguggugaaacucagu

SEQ ID NO: 390512 - RNA, 22 nt, Human
ucuccuucgaggcccagcuccc

SEQ ID NO: 390513 - RNA, 22 nt, Human
acaaaguccugguguauggcca

SEQ ID NO: 390514 - RNA, 22 nt, Human
uucagaauauuuguuuuacaug

SEQ ID NO: 390515 - RNA, 22 nt, Human
gcagugacagggcugcugccuu

SEQ ID NO: 390516 - RNA, 22 nt, Human
uucacauaaugauacaaagcuu

SEQ ID NO: 390517 - RNA, 22 nt, Human
aggcucaguauagcuggcaagu

SEQ ID NO: 390518 - RNA, 22 nt, Human
uagcagggguagauagagugug

SEQ ID NO: 390519 - RNA, 22 nt, Human
ggcagaccucuccagccccaca

SEQ ID NO: 390520 - RNA, 22 nt, Human
agccugucugucuccaaagcug

SEQ ID NO: 390521 - RNA, 22 nt, Human
cagcccagcagucuuagccugc

SEQ ID NO: 390522 - RNA, 22 nt, Human
gggcagugacaaaggggaugaa

SEQ ID NO: 390523 - RNA, 22 nt, Human
agauuugcggcuuuacuuugca

SEQ ID NO: 390524 - RNA, 22 nt, Human
ccuggcuccugccucugcaggg

SEQ ID NO: 390525 - RNA, 22 nt, Human
agaagccagauuguagugggac

SEQ ID NO: 390526 - RNA, 22 nt, Human
uaccuugggguuuuguugcucu

SEQ ID NO: 390527 - RNA, 23 nt, Human
gugcaugugucuuuacaguagca

SEQ ID NO: 390528 - RNA, 22 nt, Human
ccuggccuuaagggcagggagc

SEQ ID NO: 390529 - RNA, 22 nt, Human
ucucugcucugugccucaguuu

SEQ ID NO: 390530 - RNA, 22 nt, Human
uagggcaguuucauguuaucuu

SEQ ID NO: 390531 - RNA, 22 nt, Human
acagcuuuaguguggguggugc

SEQ ID NO: 390532 - RNA, 22 nt, Human
cucaggauccaucuccugcccu

SEQ ID NO: 390533 - RNA, 21 nt, Human
ucacagacuggucagugaggc

SEQ ID NO: 390534 - RNA, 22 nt, Human
ccuccagcgcgauccacuccgg

SEQ ID NO: 390535 - RNA, 22 nt, Human
cagagcugcaaaugccccuccg

SEQ ID NO: 390536 - RNA, 22 nt, Human
cagaucuguuugccagaucagc

SEQ ID NO: 390537 - RNA, 22 nt, Human
cuucagaaugggacuguguuug

SEQ ID NO: 390538 - RNA, 22 nt, Human
ugcagggagcucuggggugcag

SEQ ID NO: 390539 - RNA, 22 nt, Human
cauauaauguuugaagaugugg

SEQ ID NO: 390540 - RNA, 22 nt, Human
uggcucuggugcgggcuccugc

SEQ ID NO: 390541 - RNA, 22 nt, Human
caaagagcuguucagugucgcu

SEQ ID NO: 390542 - RNA, 22 nt, Human
cugcugucuuuauuucacugcu

SEQ ID NO: 390543 - RNA, 22 nt, Human
ugcuggcccuggcucagggaac

SEQ ID NO: 390544 - RNA, 22 nt, Human
gcagagugagccgaggcugcuc

SEQ ID NO: 390545 - RNA, 19 nt, Human
uggcuucuguuuucauguu

SEQ ID NO: 390546 - RNA, 22 nt, Human
ugagccugggagauggaggcug

SEQ ID NO: 390547 - RNA, 22 nt, Human
ugcaauaaguuguguuaucacu

SEQ ID NO: 390548 - RNA, 22 nt, Human
agaagaaaugugaaggccacug

SEQ ID NO: 390549 - RNA, 22 nt, Human
cugccucugcgucccacagagu

SEQ ID NO: 390550 - RNA, 22 nt, Human
accucugcucaagaccccuccg

SEQ ID NO: 390551 - RNA, 22 nt, Human
cauuaauauuguucuucuuuag

SEQ ID NO: 390552 - RNA, 22 nt, Human
uggcacugccaaccugcuaggu

SEQ ID NO: 390553 - RNA, 22 nt, Human
gugcaugugcauccauguguac

SEQ ID NO: 390554 - RNA, 22 nt, Human
caggaugugaggaggccauuug

SEQ ID NO: 390555 - RNA, 22 nt, Human
ucccaggaggugcuuccuagga

SEQ ID NO: 390556 - RNA, 22 nt, Human
guguacaugagaaaucaacuuu

SEQ ID NO: 390557 - RNA, 22 nt, Human
gcuguucugcgucccaggcugg

SEQ ID NO: 390558 - RNA, 22 nt, Human
ugggcaggauaauaucucaugu

SEQ ID NO: 390559 - RNA, 22 nt, Human
aagcugccacacggugaguacu

SEQ ID NO: 390560 - RNA, 22 nt, Human
uuugaacugauaaucuucuguu

SEQ ID NO: 390561 - RNA, 22 nt, Human
gccuucagcggccgcucgcugc

SEQ ID NO: 390562 - RNA, 22 nt, Human
gcuggccauggggagugaggag

SEQ ID NO: 390563 - RNA, 22 nt, Human
ucuggccugggccugccggugc

SEQ ID NO: 390564 - RNA, 22 nt, Human
cuagggacugggaccuuaguua

SEQ ID NO: 390565 - RNA, 22 nt, Human
cagguggcuucucccuaggcca

SEQ ID NO: 390566 - RNA, 22 nt, Human
acauuccaaaaacuagcagaua

SEQ ID NO: 390567 - RNA, 22 nt, Human
ccuggcagucaggggaguccuu

SEQ ID NO: 390568 - RNA, 22 nt, Human
cuugcugucccuugguaugaac

SEQ ID NO: 390569 - RNA, 22 nt, Human
cuauuaggcuuccauuucaugc

SEQ ID NO: 390570 - RNA, 22 nt, Human
agagugaaguuuuugaaaguga

SEQ ID NO: 390571 - RNA, 22 nt, Human
uccaggagugugugcuaauggg

SEQ ID NO: 390572 - RNA, 22 nt, Human
uuugcaguagacaucuuauuuu

SEQ ID NO: 390573 - RNA, 22 nt, Human
auuggcagaaacagcagggcca

SEQ ID NO: 390574 - RNA, 18 nt, Human
gggcucugauccuucacc

SEQ ID NO: 390575 - RNA, 22 nt, Human
uccaggcagucauuaaucucua

SEQ ID NO: 390576 - RNA, 22 nt, Human
gaagucuucauucucucugaga

SEQ ID NO: 390577 - RNA, 22 nt, Human
ugcagggcauaggguccaguuu

SEQ ID NO: 390578 - RNA, 22 nt, Human
uugcuuugccaccagaagucua

SEQ ID NO: 390579 - RNA, 22 nt, Human
ucauauaaguuuaaaacuaucu

SEQ ID NO: 390580 - RNA, 22 nt, Human
uuugaaguucccccauaucaga

SEQ ID NO: 390581 - RNA, 22 nt, Human
cucccagggccaucgagucacu

SEQ ID NO: 390582 - RNA, 22 nt, Human
acaguaaugauucugagucucu

SEQ ID NO: 390583 - RNA, 22 nt, Human
aagauacauaaagguagagucu

SEQ ID NO: 390584 - RNA, 22 nt, Human
cauucacagcaggucagcugaa

SEQ ID NO: 390585 - RNA, 22 nt, Human
gcaggccagcugugcagauggg

SEQ ID NO: 390586 - RNA, 20 nt, Human
ugucaugcauuagaugaaga

SEQ ID NO: 390587 - RNA, 22 nt, Human
ccugggaggcugugggucugcu

SEQ ID NO: 390588 - RNA, 22 nt, Human
agcagcucaaagccugcaagga

SEQ ID NO: 390589 - RNA, 21 nt, Human
gccugcaguuuugaagcccuu

SEQ ID NO: 390590 - RNA, 22 nt, Human
agaaagcuuaugaaugggcaag

SEQ ID NO: 390591 - RNA, 22 nt, Human
ggagcugucuguagggcacagg

SEQ ID NO: 390592 - RNA, 22 nt, Human
aucugaagggaaguggaaggca

SEQ ID NO: 390593 - RNA, 18 nt, Human
cuuuaugugcagagcuuu

SEQ ID NO: 390594 - RNA, 22 nt, Human
cuguuaaucugcuugcaugaug

SEQ ID NO: 390595 - RNA, 22 nt, Human
ugccaggccaaugaaggcaggg

SEQ ID NO: 390596 - RNA, 22 nt, Human
guccaaauuuuucacauguaga

SEQ ID NO: 390597 - RNA, 23 nt, Human
caggcaggaugaggacuacacuc

SEQ ID NO: 390598 - RNA, 22 nt, Human
acaaaggcagagaauucaacau

SEQ ID NO: 390599 - RNA, 22 nt, Human
gccaggcuguuuuuauuacugu

SEQ ID NO: 390600 - RNA, 22 nt, Human
ucucagagaccugaacucccug

SEQ ID NO: 390601 - RNA, 22 nt, Human
gagccugaaauacaggucacug

SEQ ID NO: 390602 - RNA, 23 nt, Human
cccagaccuugugcugcccuugg

SEQ ID NO: 390603 - RNA, 22 nt, Human
uagcuuuaagacauggugaaug

SEQ ID NO: 390604 - RNA, 22 nt, Human
ggaugcacgaaggcgccucgga

SEQ ID NO: 390605 - RNA, 22 nt, Human
acacaaguucuaaagauugcgc

SEQ ID NO: 390606 - RNA, 22 nt, Human
gcccagcuuuuugaggcaggca

SEQ ID NO: 390607 - RNA, 22 nt, Human
ggcagugaaucugagagccugg

SEQ ID NO: 390608 - RNA, 22 nt, Human
uguacuugaacuugacuguaga

SEQ ID NO: 390609 - RNA, 22 nt, Human
cagcuggcguggagugauugca

SEQ ID NO: 390610 - RNA, 22 nt, Human
cuggccuuggugcuugcagaca

SEQ ID NO: 390611 - RNA, 22 nt, Human
acacagggauauuucagguggu

SEQ ID NO: 390612 - RNA, 22 nt, Human
gccucugcccuccugggacugc

SEQ ID NO: 390613 - RNA, 22 nt, Human
uccucaggcggugaggaggggc

SEQ ID NO: 390614 - RNA, 22 nt, Human
aaagaacaucggagugggcggg

SEQ ID NO: 390615 - RNA, 22 nt, Human
gauuucaaggaguuuucacagu

SEQ ID NO: 390616 - RNA, 22 nt, Human
uaucagaaagauauuacugggg

SEQ ID NO: 390617 - RNA, 22 nt, Human
ccuggcugggguagaagugagg

SEQ ID NO: 390618 - RNA, 22 nt, Human
ccugucuguaucgguucagagu

SEQ ID NO: 390619 - RNA, 22 nt, Human
gcucuccaaacccuguggcuuu

SEQ ID NO: 390620 - RNA, 22 nt, Human
uuguuuguaugcugagaagaau

SEQ ID NO: 390621 - RNA, 22 nt, Human
gguacaaggagugaagguuugg

SEQ ID NO: 390622 - RNA, 22 nt, Human
uguguacuugaaagggcagguc

SEQ ID NO: 390623 - RNA, 22 nt, Human
cccacucuggcucccuucuagu

SEQ ID NO: 390624 - RNA, 22 nt, Human
guguauaacuaucuaucuagua

SEQ ID NO: 390625 - RNA, 22 nt, Human
cuggagcucuccagagccccgu

SEQ ID NO: 390626 - RNA, 22 nt, Human
cauggcccucuucuggagcaau

SEQ ID NO: 390627 - RNA, 22 nt, Human
ucccaggaaugucugaaaguga

SEQ ID NO: 390628 - RNA, 22 nt, Human
agaguccauaugugggaggagu

SEQ ID NO: 390629 - RNA, 18 nt, Human
gggaagccgggaagccgg

SEQ ID NO: 390630 - RNA, 22 nt, Human
ugcucuguaacaaauugacaug

SEQ ID NO: 390631 - RNA, 22 nt, Human
ugcagggauuagaggccgggga

SEQ ID NO: 390632 - RNA, 22 nt, Human
augaacacauguacacauuucu

SEQ ID NO: 390633 - RNA, 22 nt, Human
cagcugaguuacucugaggucu

SEQ ID NO: 390634 - RNA, 22 nt, Human
gcagaggagcaaguugcuacag

SEQ ID NO: 390635 - RNA, 22 nt, Human
gcauuccuacaggcugcuauga

SEQ ID NO: 390636 - RNA, 22 nt, Human
uccuguggagaggacuggaggu

SEQ ID NO: 390637 - RNA, 22 nt, Human
ucaggagcuugguagugugauu

SEQ ID NO: 390638 - RNA, 23 nt, Human
ggcaccaggccauggagcgggag

SEQ ID NO: 390639 - RNA, 22 nt, Human
cauuuauucaugaucuguagcu

SEQ ID NO: 390640 - RNA, 22 nt, Human
uaugcacaccuggguccuuguc

SEQ ID NO: 390641 - RNA, 22 nt, Human
cucaggaugcaggucacaggac

SEQ ID NO: 390642 - RNA, 22 nt, Human
uugaagcaugguacuuguucaa

SEQ ID NO: 390643 - RNA, 22 nt, Human
ugccugcugcuaagcucuuugu

SEQ ID NO: 390644 - RNA, 22 nt, Human
auuucccaugugaaucaauugg

SEQ ID NO: 390645 - RNA, 22 nt, Human
ugcucuggagggugaagcuuuu

SEQ ID NO: 390646 - RNA, 22 nt, Human
guuuuguugcugcagagcucaa

SEQ ID NO: 390647 - RNA, 22 nt, Human
gccaggaggcugcuguguaggc

SEQ ID NO: 390648 - RNA, 22 nt, Human
cagcucaaguuucccaggucag

SEQ ID NO: 390649 - RNA, 21 nt, Human
acuguucauuugaugaacugg

SEQ ID NO: 390650 - RNA, 22 nt, Human
gacccggcuccaggcccagcag

SEQ ID NO: 390651 - RNA, 22 nt, Human
aggcagcuuaagcccuggccca

SEQ ID NO: 390652 - RNA, 22 nt, Human
ccucagcucuucccugugcaca

SEQ ID NO: 390653 - RNA, 22 nt, Human
ugaggcaguugagcuuccugag

SEQ ID NO: 390654 - RNA, 22 nt, Human
uucuugcaggucacucacugag

SEQ ID NO: 390655 - RNA, 22 nt, Human
ugggcuacucugggagccuaac

SEQ ID NO: 390656 - RNA, 22 nt, Human
aucaaaguaggcauauguuuuu

SEQ ID NO: 390657 - RNA, 22 nt, Human
uauuucagcaagaagaaugugg

SEQ ID NO: 390658 - RNA, 22 nt, Human
uucuuccucagcagggcugccu

SEQ ID NO: 390659 - RNA, 22 nt, Human
aaggcccuaauagagcacauau

SEQ ID NO: 390660 - RNA, 22 nt, Human
gcagcuuucugggacagaaagg

SEQ ID NO: 390661 - RNA, 22 nt, Human
ccauuguaaagaguauacuuug

SEQ ID NO: 390662 - RNA, 22 nt, Human
aagcccagaugggagcauuuca

SEQ ID NO: 390663 - RNA, 22 nt, Human
agaugcugaauuauugugcuuu

SEQ ID NO: 390664 - RNA, 22 nt, Human
uggguacuccuauuaguucagu

SEQ ID NO: 390665 - RNA, 22 nt, Human
gugcuaggauuacaggcauggg

SEQ ID NO: 390666 - RNA, 22 nt, Human
aguaaaaucaccaucucuuugu

SEQ ID NO: 390667 - RNA, 22 nt, Human
ucugccugcggcugcagguggc

SEQ ID NO: 390668 - RNA, 22 nt, Human
aggcagcuggcagcacccaggg

SEQ ID NO: 390669 - RNA, 22 nt, Human
cccagcauuucugggcugcacu

SEQ ID NO: 390670 - RNA, 22 nt, Human
cuggaggcugaguugggucucc

SEQ ID NO: 390671 - RNA, 22 nt, Human
auucaaguggcugcuauguuaa

SEQ ID NO: 390672 - RNA, 22 nt, Human
gaugguuuaugauagaugggaa

SEQ ID NO: 390673 - RNA, 22 nt, Human
gaggcacaauacaugucucaag

SEQ ID NO: 390674 - RNA, 22 nt, Human
cugggcacaggggagcagaguc

SEQ ID NO: 390675 - RNA, 22 nt, Human
auuugagaugguaaauaacuuu

SEQ ID NO: 390676 - RNA, 22 nt, Human
cacccagugaaggagcaagagg

SEQ ID NO: 390677 - RNA, 22 nt, Human
aaucagucauuagcucugaccu

SEQ ID NO: 390678 - RNA, 22 nt, Human
uggugaagucagcggagcccgg

SEQ ID NO: 390679 - RNA, 22 nt, Human
cucccagagaccaagcugagaa

SEQ ID NO: 390680 - RNA, 22 nt, Human
augucuuuggcuuugacauggc

SEQ ID NO: 390681 - RNA, 20 nt, Human
cccaggagugagcagcuuua

SEQ ID NO: 390682 - RNA, 23 nt, Human
ccucagggucuagcagagagaag

SEQ ID NO: 390683 - RNA, 22 nt, Human
gcagccagggagagaaccaggg

SEQ ID NO: 390684 - RNA, 22 nt, Human
aaugcuuauaccuaaugaucuu

SEQ ID NO: 390685 - RNA, 20 nt, Human
cagagccaagagcagcaucu

SEQ ID NO: 390686 - RNA, 22 nt, Human
ugguuuugcuccaguauaaaua

SEQ ID NO: 390687 - RNA, 22 nt, Human
ugaggcagcaauugauuauuca

SEQ ID NO: 390688 - RNA, 22 nt, Human
uuccuuagugccucuuccgcug

SEQ ID NO: 390689 - RNA, 22 nt, Human
ugugaaagauacuaggcagagg

SEQ ID NO: 390690 - RNA, 22 nt, Human
aagagcaucgguggagccccca

SEQ ID NO: 390691 - RNA, 20 nt, Human
aggaacuggaagggaggaaa

SEQ ID NO: 390692 - RNA, 22 nt, Human
caucacuguccaaaguucaguu

SEQ ID NO: 390693 - RNA, 22 nt, Human
augggcaguaacaguggcaguc

SEQ ID NO: 390694 - RNA, 22 nt, Human
ccugggcaaaugccagagacaa

SEQ ID NO: 390695 - RNA, 19 nt, Human
ggccccucucacaggaguu

SEQ ID NO: 390696 - RNA, 22 nt, Human
uaguggaguagaaaccaaagaa

SEQ ID NO: 390697 - RNA, 22 nt, Human
auuuccaggagaaaggauuuua

SEQ ID NO: 390698 - RNA, 21 nt, Human
agaguaauuccugcuggaaag

SEQ ID NO: 390699 - RNA, 22 nt, Human
gaugagcauuguuucauguguu

SEQ ID NO: 390700 - RNA, 22 nt, Human
gagggcugccacguugggcgag

SEQ ID NO: 390701 - RNA, 22 nt, Human
uggcuccuaucaaggagugggu

SEQ ID NO: 390702 - RNA, 22 nt, Human
gccggggcuggggagagacaug

SEQ ID NO: 390703 - RNA, 22 nt, Human
uauaacaggaaguauucaaaca

SEQ ID NO: 390704 - RNA, 16 nt, Human
gagggcagaggcggaa

SEQ ID NO: 390705 - RNA, 22 nt, Human
ugaagccaccgaaccagaagag

SEQ ID NO: 390706 - RNA, 17 nt, Human
ugagacagggcaggccc

SEQ ID NO: 390707 - RNA, 22 nt, Human
gaggccuguagucauggaugua

SEQ ID NO: 390708 - RNA, 22 nt, Human
auaugauuccacuauuguaugg

SEQ ID NO: 390709 - RNA, 22 nt, Human
gauguagagggaagauuuuaaa

SEQ ID NO: 390710 - RNA, 22 nt, Human
uagggauguccugagacuuggc

SEQ ID NO: 390711 - RNA, 22 nt, Human
uuucuaguaaucaauauaaagu

SEQ ID NO: 390712 - RNA, 22 nt, Human
gcagcuccuccugggcuggaga

SEQ ID NO: 390713 - RNA, 22 nt, Human
ugacagcauaacacuggucuug

SEQ ID NO: 390714 - RNA, 22 nt, Human
gucccaggugggcuccaccucu

SEQ ID NO: 390715 - RNA, 22 nt, Human
ggcaggaggugaguggcgggug

SEQ ID NO: 390716 - RNA, 22 nt, Human
caaaauugaugaauguaugauu

SEQ ID NO: 390717 - RNA, 22 nt, Human
uucagaaaggauaauuggaagg

SEQ ID NO: 390718 - RNA, 22 nt, Human
ccagagaccagaacauggggau

SEQ ID NO: 390719 - RNA, 21 nt, Human
uggcagaguugaguaguuaug

SEQ ID NO: 390720 - RNA, 22 nt, Human
cacagggcaccaguuggccauc

SEQ ID NO: 390721 - RNA, 19 nt, Human
ugaaggagggggauggcca

SEQ ID NO: 390722 - RNA, 22 nt, Human
gcuaccugagcaagagcuucaa

SEQ ID NO: 390723 - RNA, 22 nt, Human
uccucugccccagaugaaauuu

SEQ ID NO: 390724 - RNA, 22 nt, Human
ccucugagagaaggccuucagc

SEQ ID NO: 390725 - RNA, 22 nt, Human
cccaggcugaugggaugggcca

SEQ ID NO: 390726 - RNA, 22 nt, Human
ggccuugggcagacacgucaca

SEQ ID NO: 390727 - RNA, 22 nt, Human
ggaggaggcggcagaaguuccu

SEQ ID NO: 390728 - RNA, 23 nt, Human
uggaggaaacacaucagaagacc

SEQ ID NO: 390729 - RNA, 22 nt, Human
uggcagcugucuguggggucuc

SEQ ID NO: 390730 - RNA, 22 nt, Human
aauuagggaaguauuuaguagu

SEQ ID NO: 390731 - RNA, 22 nt, Human
gccagguguccucacagugagg

SEQ ID NO: 390732 - RNA, 22 nt, Human
guuguuuugcaggauccuuaca

SEQ ID NO: 390733 - RNA, 22 nt, Human
acauuucuuucuauucaguagc

SEQ ID NO: 390734 - RNA, 22 nt, Human
accuuaaaacugacacauggag

SEQ ID NO: 390735 - RNA, 22 nt, Human
ccagcagagggucuuggccauu

SEQ ID NO: 390736 - RNA, 22 nt, Human
agggccugagcuggcugaccuc

SEQ ID NO: 390737 - RNA, 22 nt, Human
ucuggaucggguuccucagguc

SEQ ID NO: 390738 - RNA, 22 nt, Human
cagaauuuagcacaauguaugg

SEQ ID NO: 390739 - RNA, 22 nt, Human
uccugaggaaaguucaugaaug

SEQ ID NO: 390740 - RNA, 22 nt, Human
gagccauacaaccuauaaagug

SEQ ID NO: 390741 - RNA, 22 nt, Human
gcagggcucugcuguaguccua

SEQ ID NO: 390742 - RNA, 22 nt, Human
uuucucaaggugucauguauuu

SEQ ID NO: 390743 - RNA, 22 nt, Human
uggugcuguggaggggcagaag

SEQ ID NO: 390744 - RNA, 22 nt, Human
uugggugcugucauggggcacg

SEQ ID NO: 390745 - RNA, 22 nt, Human
caauguguuugcauauuaaaau

SEQ ID NO: 390746 - RNA, 23 nt, Human
aggcacugaaugugucagugagu

SEQ ID NO: 390747 - RNA, 22 nt, Human
uucaguaaaacacugcaauguc

SEQ ID NO: 390748 - RNA, 22 nt, Human
aaaauaacuucuacuauuugca

SEQ ID NO: 390749 - RNA, 22 nt, Human
acacugugacaaaggcuguucu

SEQ ID NO: 390750 - RNA, 22 nt, Human
gguggggccugcuccagcggcc

SEQ ID NO: 390751 - RNA, 22 nt, Human
uuccuggugguggugacagcac

SEQ ID NO: 390752 - RNA, 22 nt, Human
ugggauggagccugaguauagu

SEQ ID NO: 390753 - RNA, 22 nt, Human
acauuucucccugcaugccugc

SEQ ID NO: 390754 - RNA, 21 nt, Human
uccucagggccccagagcacu

SEQ ID NO: 390755 - RNA, 20 nt, Human
cucaggauugucuagccccu

SEQ ID NO: 390756 - RNA, 22 nt, Human
auuuucaugacuaccuuaaaua

SEQ ID NO: 390757 - RNA, 23 nt, Human
uugcuucugugcaauucaguacu

SEQ ID NO: 390758 - RNA, 22 nt, Human
aauuuacaguugcugaugguac

SEQ ID NO: 390759 - RNA, 20 nt, Human
uuucacaucugucccuuuaa

SEQ ID NO: 390760 - RNA, 22 nt, Human
cccagcuccagagccagaaaca

SEQ ID NO: 390761 - RNA, 20 nt, Human
uccugcagucgcuagcgccc

SEQ ID NO: 390762 - RNA, 22 nt, Human
ggcagcuguggacgucgucauu

SEQ ID NO: 390763 - RNA, 22 nt, Human
gucaggaugggcagccaaacua

SEQ ID NO: 390764 - RNA, 22 nt, Human
auacaaugagugagugaauggg

SEQ ID NO: 390765 - RNA, 22 nt, Human
gaugcagggcuggcaggagcuu

SEQ ID NO: 390766 - RNA, 22 nt, Human
ccuggagguggagguugcagug

SEQ ID NO: 390767 - RNA, 22 nt, Human
gcaggaugagugaguacauuua

SEQ ID NO: 390768 - RNA, 22 nt, Human
uuaucacuuaugagcuuuuugc

SEQ ID NO: 390769 - RNA, 22 nt, Human
uauaaagcugacucaugaaacu

SEQ ID NO: 390770 - RNA, 21 nt, Human
ggccugaguauaggacaggcc

SEQ ID NO: 390771 - RNA, 22 nt, Human
uuccauaauuaaguggagagaa

SEQ ID NO: 390772 - RNA, 22 nt, Human
uucucauucugacucaguguag

SEQ ID NO: 390773 - RNA, 22 nt, Human
ugcuuccuugagcucuccaauc

SEQ ID NO: 390774 - RNA, 22 nt, Human
uggaagcacuuggguuuuguug

SEQ ID NO: 390775 - RNA, 22 nt, Human
ggcugaaggaugaaagcugcag

SEQ ID NO: 390776 - RNA, 22 nt, Human
cacagggccuugugugacugca

SEQ ID NO: 390777 - RNA, 22 nt, Human
agggcugaugcaccauguagcc

SEQ ID NO: 390778 - RNA, 17 nt, Human
ugccagccugucccagg

SEQ ID NO: 390779 - RNA, 22 nt, Human
gcagggacagggcagggccuuu

SEQ ID NO: 390780 - RNA, 22 nt, Human
cugcucacgccaccguucauca

SEQ ID NO: 390781 - RNA, 22 nt, Human
acaguguguucugggaccucca

SEQ ID NO: 390782 - RNA, 22 nt, Human
cagagcagagugauuguucugg

SEQ ID NO: 390783 - RNA, 22 nt, Human
aggagcugcaaauauuaguaau

SEQ ID NO: 390784 - RNA, 22 nt, Human
auuugucuucaguagguucuuc

SEQ ID NO: 390785 - RNA, 22 nt, Human
ccuuuuucccuggagggacagc

SEQ ID NO: 390786 - RNA, 22 nt, Human
uuugggaagaggaaucucugga

SEQ ID NO: 390787 - RNA, 22 nt, Human
ucuggcuccguguccgcuccca

SEQ ID NO: 390788 - RNA, 22 nt, Human
acuuucauuuguaauaaacuuc

SEQ ID NO: 390789 - RNA, 22 nt, Human
cugcuuuguaaaauagacauaa

SEQ ID NO: 390790 - RNA, 22 nt, Human
cuacauaaucuggauuugucug

SEQ ID NO: 390791 - RNA, 22 nt, Human
gcaggagccacuucagggaugc

SEQ ID NO: 390792 - RNA, 22 nt, Human
gagccugaugaaacaggcagac

SEQ ID NO: 390793 - RNA, 22 nt, Human
caguguacuuggaauguaacag

SEQ ID NO: 390794 - RNA, 23 nt, Human
uugcuuucaucaugagaugcucc

SEQ ID NO: 390795 - RNA, 22 nt, Human
agaugcugauugaauagauuuc

SEQ ID NO: 390796 - RNA, 22 nt, Human
gacccugccaugagugacaggg

SEQ ID NO: 390797 - RNA, 22 nt, Human
gugauuuugagaccuauauagu

SEQ ID NO: 390798 - RNA, 22 nt, Human
ccagagggcaaaaugaagcuua

SEQ ID NO: 390799 - RNA, 21 nt, Human
ugcuccuuagcugccccugcc

SEQ ID NO: 390800 - RNA, 22 nt, Human
gauaaaauucuuauuuuacccg

SEQ ID NO: 390801 - RNA, 19 nt, Human
gcaggguguugacuguccc

SEQ ID NO: 390802 - RNA, 22 nt, Human
cauguauaguuggaacuacauc

SEQ ID NO: 390803 - RNA, 22 nt, Human
aauagguagccagauauauaaa

SEQ ID NO: 390804 - RNA, 22 nt, Human
uaacagaauccuguuauugcca

SEQ ID NO: 390805 - RNA, 22 nt, Human
uggcagcuuuuuguuucaggcu

SEQ ID NO: 390806 - RNA, 22 nt, Human
uggcauuugcucccuuguguuc

SEQ ID NO: 390807 - RNA, 18 nt, Human
uagggcucuagggaguga

SEQ ID NO: 390808 - RNA, 23 nt, Human
agggcaugaagcagaggacgugg

SEQ ID NO: 390809 - RNA, 20 nt, Human
augcuuucuugugugcugcu

SEQ ID NO: 390810 - RNA, 22 nt, Human
agugcugucaguuuuauagaua

SEQ ID NO: 390811 - RNA, 22 nt, Human
ucccaaagcuacucuucugacu

SEQ ID NO: 390812 - RNA, 21 nt, Human
ggacuuacauagguaaggggu

SEQ ID NO: 390813 - RNA, 22 nt, Human
ucuccaagcagggcugcaaggc

SEQ ID NO: 390814 - RNA, 22 nt, Human
gccuggaggggacagucucugg

SEQ ID NO: 390815 - RNA, 22 nt, Human
ugccucagagugggcuugcuau

SEQ ID NO: 390816 - RNA, 22 nt, Human
gcaagcugcuuaagcucauugu

SEQ ID NO: 390817 - RNA, 22 nt, Human
uggaggaaucagggcuuaggcu

SEQ ID NO: 390818 - RNA, 22 nt, Human
gccugagauucugcauuucuaa

SEQ ID NO: 390819 - RNA, 15 nt, Human
uucaggauaugacuc

SEQ ID NO: 390820 - RNA, 22 nt, Human
caaguccaggucaauuuaaagc

SEQ ID NO: 390821 - RNA, 22 nt, Human
auuaggcauauaugcuuuuaau

SEQ ID NO: 390822 - RNA, 22 nt, Human
accaggaggccuugguucugag

SEQ ID NO: 390823 - RNA, 22 nt, Human
cagcuugggucaggugccugcu

SEQ ID NO: 390824 - RNA, 22 nt, Human
gaaggccacaagagaaguuaag

SEQ ID NO: 390825 - RNA, 22 nt, Human
gcacugcagccucagauggugg

SEQ ID NO: 390826 - RNA, 22 nt, Human
gcuaggagauugagcucugaag

SEQ ID NO: 390827 - RNA, 22 nt, Human
cauugcacugcagcccgggcaa

SEQ ID NO: 390828 - RNA, 22 nt, Human
gcucccaggaagagaagggcca

SEQ ID NO: 390829 - RNA, 22 nt, Human
ggccagcugggccaccaggugc

SEQ ID NO: 390830 - RNA, 22 nt, Human
aggaggggcauagaaauguaau

SEQ ID NO: 390831 - RNA, 22 nt, Human
guuauugcaguauagaggucua

SEQ ID NO: 390832 - RNA, 20 nt, Human
uccaugaguuagagacuaua

SEQ ID NO: 390833 - RNA, 22 nt, Human
uucccucuccuacucaggaaag

SEQ ID NO: 390834 - RNA, 22 nt, Human
uuacauuagacccacuuucaug

SEQ ID NO: 390835 - RNA, 22 nt, Human
ccagcagcagcguccaaggaga

SEQ ID NO: 390836 - RNA, 22 nt, Human
ccacuucaucagugcuccauuu

SEQ ID NO: 390837 - RNA, 22 nt, Human
agcuggaggggccagcaggugu

SEQ ID NO: 390838 - RNA, 22 nt, Human
ccaggccagcaggcacaccugc

SEQ ID NO: 390839 - RNA, 22 nt, Human
uguggccuggaaggggcugcuc

SEQ ID NO: 390840 - RNA, 22 nt, Human
agagccuggucugagauaggac

SEQ ID NO: 390841 - RNA, 22 nt, Human
cugagagaugauauagcuuaau

SEQ ID NO: 390842 - RNA, 22 nt, Human
ucaaacuagccugacugguauu

SEQ ID NO: 390843 - RNA, 20 nt, Human
ucuguucaaaucuuaguucc

SEQ ID NO: 390844 - RNA, 22 nt, Human
ccuggcagcgugccgagcugcg

SEQ ID NO: 390845 - RNA, 20 nt, Human
ucacaggggaccaggagcag

SEQ ID NO: 390846 - RNA, 22 nt, Human
agaugugguaguugaagggaag

SEQ ID NO: 390847 - RNA, 22 nt, Human
gauagucaccucccuuaacuuu

SEQ ID NO: 390848 - RNA, 22 nt, Human
uuaggaaauuccaccuguauuc

SEQ ID NO: 390849 - RNA, 22 nt, Human
cagggccuuauccugccauuga

SEQ ID NO: 390850 - RNA, 22 nt, Human
aauuaugauuggucuaaaccag

SEQ ID NO: 390851 - RNA, 23 nt, Human
ucguugaauagcaauagcacaac

SEQ ID NO: 390852 - RNA, 22 nt, Human
gcugccagcuuuccuuggcuga

SEQ ID NO: 390853 - RNA, 22 nt, Human
cagcagcaugaauucgagccac

SEQ ID NO: 390854 - RNA, 22 nt, Human
auggagggugucagagagcgaa

SEQ ID NO: 390855 - RNA, 22 nt, Human
acagaccaaaaaaggauauugg

SEQ ID NO: 390856 - RNA, 22 nt, Human
cccaggaaugggaaggaggaau

SEQ ID NO: 390857 - RNA, 19 nt, Human
gagcagcugcacccauuga

SEQ ID NO: 390858 - RNA, 22 nt, Human
caccugggcuaaacuaugcagg

SEQ ID NO: 390859 - RNA, 22 nt, Human
uagcaguggaaucuuuugucca

SEQ ID NO: 390860 - RNA, 22 nt, Human
agcuuccuacaaccaucucaga

SEQ ID NO: 390861 - RNA, 22 nt, Human
ggccuggccuccagaugugggc

SEQ ID NO: 390862 - RNA, 22 nt, Human
uuuaucuuuggaucuucagaaa

SEQ ID NO: 390863 - RNA, 22 nt, Human
gggaagccaugcucagagguac

SEQ ID NO: 390864 - RNA, 22 nt, Human
gcagagcuccccaagacaccaa

SEQ ID NO: 390865 - RNA, 22 nt, Human
gugcauauaugcacauaugugu

SEQ ID NO: 390866 - RNA, 22 nt, Human
ccaggaggcagaaguugcagug

SEQ ID NO: 390867 - RNA, 22 nt, Human
acugugcaugaaccgaaacaaa

SEQ ID NO: 390868 - RNA, 23 nt, Human
ucagcugcuuccuccugccugcc

SEQ ID NO: 390869 - RNA, 22 nt, Human
ucagggacagggugcugcugcg

SEQ ID NO: 390870 - RNA, 22 nt, Human
ucucauugguauauacaugugu

SEQ ID NO: 390871 - RNA, 22 nt, Human
ccagcuggagccaagguggacu

SEQ ID NO: 390872 - RNA, 23 nt, Human
ucuguacaauugagaagagaaca

SEQ ID NO: 390873 - RNA, 22 nt, Human
ccgggccucgggacaccgggua

SEQ ID NO: 390874 - RNA, 22 nt, Human
gcauuuagcuuuaaaauauuuc

SEQ ID NO: 390875 - RNA, 22 nt, Human
auaauuuacaacugcuuuuaau

SEQ ID NO: 390876 - RNA, 22 nt, Human
aacagaaugcaggggaugcugc

SEQ ID NO: 390877 - RNA, 22 nt, Human
uaugcacagaaguuugcugaau

SEQ ID NO: 390878 - RNA, 22 nt, Human
aggaagcccaagucucaucuuc

SEQ ID NO: 390879 - RNA, 22 nt, Human
aguguuugagacacauuucacu

SEQ ID NO: 390880 - RNA, 22 nt, Human
aguuauauuccauagauucaga

SEQ ID NO: 390881 - RNA, 22 nt, Human
ugcaggcuguaaucugaggcua

SEQ ID NO: 390882 - RNA, 18 nt, Human
ugagagugugugcucuug

SEQ ID NO: 390883 - RNA, 22 nt, Human
ugguccaggguguaguacagag

SEQ ID NO: 390884 - RNA, 22 nt, Human
augggaggcagacacuaaguuc

SEQ ID NO: 390885 - RNA, 22 nt, Human
gcuguucaaaagccacaguuac

SEQ ID NO: 390886 - RNA, 18 nt, Human
aggaaagaaaggcaggug

SEQ ID NO: 390887 - RNA, 22 nt, Human
aaauuauuaugccccucuauaa

SEQ ID NO: 390888 - RNA, 22 nt, Human
ccugucaggguuugccucagaa

SEQ ID NO: 390889 - RNA, 22 nt, Human
guccucuguagggcugggccac

SEQ ID NO: 390890 - RNA, 22 nt, Human
uuccuuagggaaagggauaagg

SEQ ID NO: 390891 - RNA, 22 nt, Human
cagccucuuuccacaucaggca

SEQ ID NO: 390892 - RNA, 22 nt, Human
auacauaauuacuuccgauguu

SEQ ID NO: 390893 - RNA, 22 nt, Human
uaagucaucacauugcagagau

SEQ ID NO: 390894 - RNA, 22 nt, Human
uugggggaagaggauagacagu

SEQ ID NO: 390895 - RNA, 22 nt, Human
uaaggccaaguucauauacaac

SEQ ID NO: 390896 - RNA, 19 nt, Human
ggagccuggagcacgugcc

SEQ ID NO: 390897 - RNA, 22 nt, Human
gucuauauauugcuugaauaau

SEQ ID NO: 390898 - RNA, 22 nt, Human
cuggcuggccggaggcaucccu

SEQ ID NO: 390899 - RNA, 20 nt, Human
uccaggagguuaguguggcu

SEQ ID NO: 390900 - RNA, 22 nt, Human
gugaggugggcuggccagagac

SEQ ID NO: 390901 - RNA, 22 nt, Human
ugugccuggcauucugggcuuc

SEQ ID NO: 390902 - RNA, 22 nt, Human
ucuguucaugucuuuuuaagug

SEQ ID NO: 390903 - RNA, 22 nt, Human
ugggcaaguaucggacucugag

SEQ ID NO: 390904 - RNA, 22 nt, Human
agaauaaucacugaaguucaaa

SEQ ID NO: 390905 - RNA, 22 nt, Human
ucucccaguggugcagaaagca

SEQ ID NO: 390906 - RNA, 22 nt, Human
cagcaauaguguguuuguuuca

SEQ ID NO: 390907 - RNA, 17 nt, Human
agaugcuggccacaugu

SEQ ID NO: 390908 - RNA, 22 nt, Human
gagacguggccuuugccugagc

SEQ ID NO: 390909 - RNA, 22 nt, Human
gccugcaguucugugcuaggca

SEQ ID NO: 390910 - RNA, 22 nt, Human
ccuggcagguggagguugcagu

SEQ ID NO: 390911 - RNA, 18 nt, Human
uggcucuggacuugcucc

SEQ ID NO: 390912 - RNA, 22 nt, Human
cugaaggacuuggugauaguug

SEQ ID NO: 390913 - RNA, 22 nt, Human
caauuucaaugaggccacaggg

SEQ ID NO: 390914 - RNA, 22 nt, Human
aggaagcaaaaggcagggucua

SEQ ID NO: 390915 - RNA, 22 nt, Human
ucuguaguagguuguaguucuu

SEQ ID NO: 390916 - RNA, 22 nt, Human
augaugguuguccuaggugcau

SEQ ID NO: 390917 - RNA, 22 nt, Human
cuggcugcuggccugaggaugc

SEQ ID NO: 390918 - RNA, 22 nt, Human
gaaggggacuggcagcugcaga

SEQ ID NO: 390919 - RNA, 21 nt, Human
ggagucagggucuggcugggg

SEQ ID NO: 390920 - RNA, 22 nt, Human
cucaggagacaguguccacaug

SEQ ID NO: 390921 - RNA, 19 nt, Human
aguggcagaucuggaagua

SEQ ID NO: 390922 - RNA, 22 nt, Human
gcagggcagaccuccagccuau

SEQ ID NO: 390923 - RNA, 22 nt, Human
ggggacugccuuccacagacac

SEQ ID NO: 390924 - RNA, 22 nt, Human
gccuguguggaugcgccggugc

SEQ ID NO: 390925 - RNA, 22 nt, Human
auccucaguguuucugacaucu

SEQ ID NO: 390926 - RNA, 22 nt, Human
auuuucaaaacaucugcugugu

SEQ ID NO: 390927 - RNA, 22 nt, Human
gccaggaggcuuaacuggacag

SEQ ID NO: 390928 - RNA, 22 nt, Human
uucuaguguccuuggacuugcu

SEQ ID NO: 390929 - RNA, 22 nt, Human
aauaucaacaguguccuucuaa

SEQ ID NO: 390930 - RNA, 22 nt, Human
uuuggacaaguuacugguuucc

SEQ ID NO: 390931 - RNA, 22 nt, Human
acaugcuuccaaauuauguugg

SEQ ID NO: 390932 - RNA, 18 nt, Human
aucuuuccauagcauguu

SEQ ID NO: 390933 - RNA, 22 nt, Human
auccuugaacuuagacacuagg

SEQ ID NO: 390934 - RNA, 23 nt, Human
uugauacagaagaaucaguuugu

SEQ ID NO: 390935 - RNA, 18 nt, Human
ccuggaccugucuccuuu

SEQ ID NO: 390936 - RNA, 22 nt, Human
aagauauagauggugguauaaa

SEQ ID NO: 390937 - RNA, 22 nt, Human
gagaggcugaaaucacaggagc

SEQ ID NO: 390938 - RNA, 22 nt, Human
aguggcagaagucacuggguag

SEQ ID NO: 390939 - RNA, 22 nt, Human
agcauccaacaggagggaaggg

SEQ ID NO: 390940 - RNA, 22 nt, Human
gauuuuucaguauaaaauauau

SEQ ID NO: 390941 - RNA, 21 nt, Human
aggaggggucuuucccacuga

SEQ ID NO: 390942 - RNA, 22 nt, Human
agaaaaacuaagaguggguggu

SEQ ID NO: 390943 - RNA, 22 nt, Human
ggcacagggagccgcaguugca

SEQ ID NO: 390944 - RNA, 22 nt, Human
ggcagugaugucaaacagugaa

SEQ ID NO: 390945 - RNA, 22 nt, Human
caguaggaaggaugcagaaaaa

SEQ ID NO: 390946 - RNA, 22 nt, Human
caggaggggguggaguuucgcc

SEQ ID NO: 390947 - RNA, 22 nt, Human
uuagagucaagcugcauguucu

SEQ ID NO: 390948 - RNA, 22 nt, Human
cuccagugcacccagaggauuu

SEQ ID NO: 390949 - RNA, 22 nt, Human
auuaaauguuggacguauacau

SEQ ID NO: 390950 - RNA, 22 nt, Human
gcuggccaguguggugaccacc

SEQ ID NO: 390951 - RNA, 22 nt, Human
uuucuuauauucugucauuguu

SEQ ID NO: 390952 - RNA, 22 nt, Human
acaacaggguaaggcaggccau

SEQ ID NO: 390953 - RNA, 22 nt, Human
cugaagagcucuccuguccccu

SEQ ID NO: 390954 - RNA, 22 nt, Human
ggcuuucuaugaacucaaaggc

SEQ ID NO: 390955 - RNA, 22 nt, Human
uuaaacagucccagaggcugac

SEQ ID NO: 390956 - RNA, 22 nt, Human
uccugccuguuuaccuguacuu

SEQ ID NO: 390957 - RNA, 22 nt, Human
ugcuggccaauggcagaggcgg

SEQ ID NO: 390958 - RNA, 18 nt, Human
gucacuguguuucugagc

SEQ ID NO: 390959 - RNA, 22 nt, Human
ucaguuuuguauguuguaaguc

SEQ ID NO: 390960 - RNA, 22 nt, Human
uucugaggcacuggcucuccca

SEQ ID NO: 390961 - RNA, 22 nt, Human
ggcagugaaugaaacagaggcu

SEQ ID NO: 390962 - RNA, 21 nt, Human
cucuggagucaagagcuucca

SEQ ID NO: 390963 - RNA, 22 nt, Human
uccaggaggaggaaggcugcca

SEQ ID NO: 390964 - RNA, 22 nt, Human
ucacacagauugguagagcuga

SEQ ID NO: 390965 - RNA, 22 nt, Human
aaugugauuagccucuacugga

SEQ ID NO: 390966 - RNA, 22 nt, Human
agccuggccacucagggccuga

SEQ ID NO: 390967 - RNA, 22 nt, Human
gcugccugguuucucagcugca

SEQ ID NO: 390968 - RNA, 19 nt, Human
ccagcccugucacuucuug

SEQ ID NO: 390969 - RNA, 22 nt, Human
ugcaccauguaaguggccacgu

SEQ ID NO: 390970 - RNA, 22 nt, Human
aggcagcucuguggccucccag

SEQ ID NO: 390971 - RNA, 20 nt, Human
gcagcuacucugucucgcuc

SEQ ID NO: 390972 - RNA, 22 nt, Human
gugggccuugcagggugcaggg

SEQ ID NO: 390973 - RNA, 22 nt, Human
cugcagccucaaccuccugagc

SEQ ID NO: 390974 - RNA, 20 nt, Human
acaguggaaauugaugucug

SEQ ID NO: 390975 - RNA, 22 nt, Human
auacuuacuuuucuucagacua

SEQ ID NO: 390976 - RNA, 22 nt, Human
acaaugaacacacaaggaauuc

SEQ ID NO: 390977 - RNA, 22 nt, Human
agauguggccggcuagggagag

SEQ ID NO: 390978 - RNA, 22 nt, Human
uggcucagaguucaucuuuuag

SEQ ID NO: 390979 - RNA, 22 nt, Human
augcuguggccagaguucaacu

SEQ ID NO: 390980 - RNA, 22 nt, Human
uuuccaaauaaggucacauucu

SEQ ID NO: 390981 - RNA, 22 nt, Human
gcagggcaggauuugaacccag

SEQ ID NO: 390982 - RNA, 22 nt, Human
uccaggagaggccugaccaggu

SEQ ID NO: 390983 - RNA, 22 nt, Human
gcugccucuguagcuuuggacc

SEQ ID NO: 390984 - RNA, 18 nt, Human
acaggccucaguccugca

SEQ ID NO: 390985 - RNA, 22 nt, Human
aggggugaaagagggcccucaa

SEQ ID NO: 390986 - RNA, 22 nt, Human
ucucgacagccuggcacagugg

SEQ ID NO: 390987 - RNA, 22 nt, Human
uuugaaaguccuaggagagucc

SEQ ID NO: 390988 - RNA, 22 nt, Human
uggucucuucuuccaagauggc

SEQ ID NO: 390989 - RNA, 22 nt, Human
gggauggggagcuggaaagggg

SEQ ID NO: 390990 - RNA, 22 nt, Human
cagcaggacauggaggaguaaa

SEQ ID NO: 390991 - RNA, 22 nt, Human
ugcuguggcaguuuauguauag

SEQ ID NO: 390992 - RNA, 22 nt, Human
ggugaagguggaacgcagagca

SEQ ID NO: 390993 - RNA, 22 nt, Human
gaggugggagggcagucccuaa

SEQ ID NO: 390994 - RNA, 22 nt, Human
cacucugagaaguacaagcucc

SEQ ID NO: 390995 - RNA, 22 nt, Human
ucagcagggccuccuugugcag

SEQ ID NO: 390996 - RNA, 21 nt, Human
acuuuaauauacaugaggagg

SEQ ID NO: 390997 - RNA, 22 nt, Human
gcccaucaucacuguggaggcu

SEQ ID NO: 390998 - RNA, 22 nt, Human
gucuggaguggggccugagaau

SEQ ID NO: 390999 - RNA, 22 nt, Human
aaguaaaauguuuccuuuauua

SEQ ID NO: 391000 - RNA, 22 nt, Human
aaaacauguccauacagaaacu

SEQ ID NO: 391001 - RNA, 22 nt, Human
aacccuggggcagcugcuaggg

SEQ ID NO: 391002 - RNA, 22 nt, Human
aagacauugucauuuuauaauu

SEQ ID NO: 391003 - RNA, 22 nt, Human
gcuucucucucagacugcaagc

SEQ ID NO: 391004 - RNA, 22 nt, Human
uuggagguuugaaaauaugugu

SEQ ID NO: 391005 - RNA, 22 nt, Human
uaauuccaccuuuuuccaacuu

SEQ ID NO: 391006 - RNA, 22 nt, Human
uuucauuacguguuugacuugu

SEQ ID NO: 391007 - RNA, 22 nt, Human
cucacugcaaguuccaccuacc

SEQ ID NO: 391008 - RNA, 22 nt, Human
acagagagaauuggguuuacag

SEQ ID NO: 391009 - RNA, 22 nt, Human
acaaaggugcgucccuucagcu

SEQ ID NO: 391010 - RNA, 22 nt, Human
agcugucugucuccugaggaga

SEQ ID NO: 391011 - RNA, 22 nt, Human
uucagagagaccaaguggcgug

SEQ ID NO: 391012 - RNA, 22 nt, Human
aggcagcuuuaacugguaguag

SEQ ID NO: 391013 - RNA, 22 nt, Human
uagaacacuugaccacugcucc

SEQ ID NO: 391014 - RNA, 22 nt, Human
uuugugaagggaacagaagugu

SEQ ID NO: 391015 - RNA, 22 nt, Human
ccucccacuucuugcugagguc

SEQ ID NO: 391016 - RNA, 22 nt, Human
accugcagcugagaaaaugacu

SEQ ID NO: 391017 - RNA, 22 nt, Human
ugaggccaggaucccaggcucu

SEQ ID NO: 391018 - RNA, 22 nt, Human
ggagagaaauugagguagcaag

SEQ ID NO: 391019 - RNA, 22 nt, Human
acuucaugcagaagagagcugu

SEQ ID NO: 391020 - RNA, 22 nt, Human
uggcugaguaaguugugauaug

SEQ ID NO: 391021 - RNA, 22 nt, Human
uuuauuugaaucaggggagaau

SEQ ID NO: 391022 - RNA, 22 nt, Human
gcugcuccgucugagcucuggu

SEQ ID NO: 391023 - RNA, 22 nt, Human
aucucccagccacagcauucuu

SEQ ID NO: 391024 - RNA, 21 nt, Human
ucuuugcaucaguuguuuucu

SEQ ID NO: 391025 - RNA, 22 nt, Human
cucugagcugaaacaugagcau

SEQ ID NO: 391026 - RNA, 22 nt, Human
uaagaaucugcauuuuaacaag

SEQ ID NO: 391027 - RNA, 22 nt, Human
aacaaaugaccugauuucuucc

SEQ ID NO: 391028 - RNA, 22 nt, Human
cugggcugucccaaccccaucc

SEQ ID NO: 391029 - RNA, 22 nt, Human
ucuguucaguugauuagacaga

SEQ ID NO: 391030 - RNA, 22 nt, Human
gucaaacagccuccuguucuaa

SEQ ID NO: 391031 - RNA, 22 nt, Human
aaaaauagcuucucuugucccu

SEQ ID NO: 391032 - RNA, 22 nt, Human
uuaugaaggaucagguacuugg

SEQ ID NO: 391033 - RNA, 22 nt, Human
ugaggcagaaauuccuguuuuc

SEQ ID NO: 391034 - RNA, 22 nt, Human
gcagagcuaucuucuggauuug

SEQ ID NO: 391035 - RNA, 22 nt, Human
gaaggaaaucugugauuuaugc

SEQ ID NO: 391036 - RNA, 22 nt, Human
gcugagaguccaggaaaacauc

SEQ ID NO: 391037 - RNA, 22 nt, Human
uggcugggccgggccuugugcc

SEQ ID NO: 391038 - RNA, 22 nt, Human
acaaaaagggagaugagguaga

SEQ ID NO: 391039 - RNA, 22 nt, Human
agaccagcugccucccagggcc

SEQ ID NO: 391040 - RNA, 22 nt, Human
cuggcagcauuaacagagagca

SEQ ID NO: 391041 - RNA, 22 nt, Human
cagcugagcucccaggccauca

SEQ ID NO: 391042 - RNA, 22 nt, Human
ggccagagucuauaugcagaca

SEQ ID NO: 391043 - RNA, 22 nt, Human
uuucuucauagaccuugucuug

SEQ ID NO: 391044 - RNA, 23 nt, Human
uuuaacuuuccaauaauucauug

SEQ ID NO: 391045 - RNA, 22 nt, Human
ccugggcaacauagugagaccc

SEQ ID NO: 391046 - RNA, 18 nt, Human
uggugaaggguggaggag

SEQ ID NO: 391047 - RNA, 22 nt, Human
aggcacagcacaccuggccccc

SEQ ID NO: 391048 - RNA, 22 nt, Human
gguuugaacagcuuuggagaag

SEQ ID NO: 391049 - RNA, 22 nt, Human
gaggagcacaugaggcugaggg

SEQ ID NO: 391050 - RNA, 22 nt, Human
ggcacugacacuagcauggcac

SEQ ID NO: 391051 - RNA, 22 nt, Human
cugucuguuucugauucaaccu

SEQ ID NO: 391052 - RNA, 22 nt, Human
ccuccaaguuugacucaggaca

SEQ ID NO: 391053 - RNA, 22 nt, Human
gccaccucuuugucucugccgc

SEQ ID NO: 391054 - RNA, 22 nt, Human
aagaggaaaugauugacuauau

SEQ ID NO: 391055 - RNA, 22 nt, Human
agaauuucaaauggaaguuuua

SEQ ID NO: 391056 - RNA, 22 nt, Human
aaggccaugcacauccuaggca

SEQ ID NO: 391057 - RNA, 22 nt, Human
uuuucuaacaucuaguaauuug

SEQ ID NO: 391058 - RNA, 22 nt, Human
uccagagguauguagagaguau

SEQ ID NO: 391059 - RNA, 22 nt, Human
cugccaucugagccaaaagugc

SEQ ID NO: 391060 - RNA, 23 nt, Human
ugccagaggcagucacaguggug

SEQ ID NO: 391061 - RNA, 22 nt, Human
uuaaaaugaauauugauuagca

SEQ ID NO: 391062 - RNA, 20 nt, Human
aggaaaaauggaaacuggag

SEQ ID NO: 391063 - RNA, 20 nt, Human
gagauggcuaagugcugaac

SEQ ID NO: 391064 - RNA, 22 nt, Human
uccagucaagcuugagaauuuc

SEQ ID NO: 391065 - RNA, 22 nt, Human
aguucacagccauguucaugug

SEQ ID NO: 391066 - RNA, 22 nt, Human
auaaaaguaggaccaacuuaca

SEQ ID NO: 391067 - RNA, 22 nt, Human
aucaggauuacacggggaugcu

SEQ ID NO: 391068 - RNA, 22 nt, Human
uccaucaccacagaggacagag

SEQ ID NO: 391069 - RNA, 22 nt, Human
aaauucuaugucaauguuuauu

SEQ ID NO: 391070 - RNA, 22 nt, Human
gauuucaaagguucugcaugcc

SEQ ID NO: 391071 - RNA, 22 nt, Human
auuuguuccacacauauuuacu

SEQ ID NO: 391072 - RNA, 22 nt, Human
cagugaggugcccagccugccc

SEQ ID NO: 391073 - RNA, 22 nt, Human
ccaggaguggcuggugaccuuc

SEQ ID NO: 391074 - RNA, 22 nt, Human
aaggcagccgugugacugcaug

SEQ ID NO: 391075 - RNA, 22 nt, Human
caaauacuggguaaguuaauuu

SEQ ID NO: 391076 - RNA, 20 nt, Human
caguccaaucagaggccacc

SEQ ID NO: 391077 - RNA, 22 nt, Human
aucuggcucuuccuggaguucc

SEQ ID NO: 391078 - RNA, 22 nt, Human
gauuucuugaccccugucucag

SEQ ID NO: 391079 - RNA, 22 nt, Human
uccauuuuguagguaugcuaca

SEQ ID NO: 391080 - RNA, 20 nt, Human
agagaauucccuuuggagau

SEQ ID NO: 391081 - RNA, 22 nt, Human
gucauauacacugcauguaauc

SEQ ID NO: 391082 - RNA, 22 nt, Human
cccugcugucaggugcugggag

SEQ ID NO: 391083 - RNA, 22 nt, Human
aaaugucuuugaguauuucugc

SEQ ID NO: 391084 - RNA, 22 nt, Human
gcuggggagcaagaguagugag

SEQ ID NO: 391085 - RNA, 21 nt, Human
ucagagaacccggcaggcaag

SEQ ID NO: 391086 - RNA, 22 nt, Human
cuuccccaaccccgacugugug

SEQ ID NO: 391087 - RNA, 22 nt, Human
gaggucaggcuugcagcagggu

SEQ ID NO: 391088 - RNA, 22 nt, Human
aucuugcauuugcuaaaaugca

SEQ ID NO: 391089 - RNA, 22 nt, Human
ucagcugagcuccagcucauag

SEQ ID NO: 391090 - RNA, 22 nt, Human
guuugucuuaauuaggcaucga

SEQ ID NO: 391091 - RNA, 20 nt, Human
aacacacugguggcaucagg

SEQ ID NO: 391092 - RNA, 21 nt, Human
aauccuuaaugaggaguuggu

SEQ ID NO: 391093 - RNA, 22 nt, Human
aaauugcagaugcuaaaugacu

SEQ ID NO: 391094 - RNA, 19 nt, Human
caucuggaugauucuccug

SEQ ID NO: 391095 - RNA, 23 nt, Human
ucuguacacaucagcaucuccca

SEQ ID NO: 391096 - RNA, 22 nt, Human
ugcagcuccucuggcugccuga

SEQ ID NO: 391097 - RNA, 22 nt, Human
accaggggaugguuggcacugu

SEQ ID NO: 391098 - RNA, 22 nt, Human
cccaggaggcagaaguugcagu

SEQ ID NO: 391099 - RNA, 22 nt, Human
uuuaucacagaauaagaaguca

SEQ ID NO: 391100 - RNA, 22 nt, Human
aagcagcacaguaauauuggug

SEQ ID NO: 391101 - RNA, 22 nt, Human
gacuacucaaacuuucucuaua

SEQ ID NO: 391102 - RNA, 22 nt, Human
guggauggauuuugaggaaugg

SEQ ID NO: 391103 - RNA, 22 nt, Human
gcagggcagcuuagucccuguc

SEQ ID NO: 391104 - RNA, 22 nt, Human
ucauggauggccgggaggugau

SEQ ID NO: 391105 - RNA, 21 nt, Human
gaaggagaaagcaagugcugc

SEQ ID NO: 391106 - RNA, 22 nt, Human
auauuaaauggauuuugggagc

SEQ ID NO: 391107 - RNA, 22 nt, Human
ucaggagaacuuccuucuaccc

SEQ ID NO: 391108 - RNA, 22 nt, Human
aggaagcuccaugaaggcagag

SEQ ID NO: 391109 - RNA, 22 nt, Human
cauucacauucuucuuacuguu

SEQ ID NO: 391110 - RNA, 22 nt, Human
uccauuuucuaaguaucacuua

SEQ ID NO: 391111 - RNA, 22 nt, Human
cagggagggacaauugucaccu

SEQ ID NO: 391112 - RNA, 22 nt, Human
aaaggccacacagagcagggag

SEQ ID NO: 391113 - RNA, 22 nt, Human
cagcugaagaaagagugguuag

SEQ ID NO: 391114 - RNA, 22 nt, Human
aagcugccauagaacgagaggu

SEQ ID NO: 391115 - RNA, 22 nt, Human
cuacugaguccuucagcugcca

SEQ ID NO: 391116 - RNA, 22 nt, Human
uucuacaauaugaauaaugaag

SEQ ID NO: 391117 - RNA, 22 nt, Human
uggcuagcccuuguggggagag

SEQ ID NO: 391118 - RNA, 22 nt, Human
uggcagcugguacagugggucu

SEQ ID NO: 391119 - RNA, 22 nt, Human
gcccaggaagccaccgggaagu

SEQ ID NO: 391120 - RNA, 22 nt, Human
cuggcuccuccaaggccuggag

SEQ ID NO: 391121 - RNA, 22 nt, Human
agucccagugagaugaaccagg

SEQ ID NO: 391122 - RNA, 22 nt, Human
cuggggcuggugaggcaggcuc

SEQ ID NO: 391123 - RNA, 22 nt, Human
ggugggcacauucagucucugu

SEQ ID NO: 391124 - RNA, 19 nt, Human
cugaagucuuuucagcugg

SEQ ID NO: 391125 - RNA, 22 nt, Human
ggccaggcugguuccuugaccu

SEQ ID NO: 391126 - RNA, 21 nt, Human
gauuucacuuaccuucauuua

SEQ ID NO: 391127 - RNA, 22 nt, Human
uggagcaagcuggagagaacau

SEQ ID NO: 391128 - RNA, 20 nt, Human
auguaaaauuauaaggcuga

SEQ ID NO: 391129 - RNA, 22 nt, Human
uccaggcaugucccaagccgga

SEQ ID NO: 391130 - RNA, 22 nt, Human
cccaugagguggagguugcagu

SEQ ID NO: 391131 - RNA, 23 nt, Human
aaguacauauauuuagauaguga

SEQ ID NO: 391132 - RNA, 22 nt, Human
aaagguuaguucuuagaagugc

SEQ ID NO: 391133 - RNA, 19 nt, Human
ccaggccucuggggccugu

SEQ ID NO: 391134 - RNA, 20 nt, Human
aagagcauaguacaggaaga

SEQ ID NO: 391135 - RNA, 22 nt, Human
ucauuucaaugauacuacuaag

SEQ ID NO: 391136 - RNA, 22 nt, Human
uuucuucaauugcuaacaagga

SEQ ID NO: 391137 - RNA, 22 nt, Human
ucucagagagcuguguuuuccu

SEQ ID NO: 391138 - RNA, 22 nt, Human
aaaucaguaaauguucauuaac

SEQ ID NO: 391139 - RNA, 22 nt, Human
aagccacuauggugauucucaa

SEQ ID NO: 391140 - RNA, 22 nt, Human
ccaggagaugggagcaucuaaa

SEQ ID NO: 391141 - RNA, 22 nt, Human
agggugggcuagacucuucccc

SEQ ID NO: 391142 - RNA, 22 nt, Human
auauucuuccaaaacaucauuu

SEQ ID NO: 391143 - RNA, 22 nt, Human
ggagcacuauaauagagauuuu

SEQ ID NO: 391144 - RNA, 22 nt, Human
ggcuggcucagggcuugagaga

SEQ ID NO: 391145 - RNA, 19 nt, Human
acagaaauguaagugagac

SEQ ID NO: 391146 - RNA, 22 nt, Human
ugauuuccuggcuuuggaguuc

SEQ ID NO: 391147 - RNA, 22 nt, Human
ucagaaauuuucucaguaguuc

SEQ ID NO: 391148 - RNA, 22 nt, Human
ccaggguggggcaggcccacug

SEQ ID NO: 391149 - RNA, 22 nt, Human
gccuggagaccugcuccucuac

SEQ ID NO: 391150 - RNA, 22 nt, Human
ccccuuccuuccucagacagcc

SEQ ID NO: 391151 - RNA, 22 nt, Human
aggcugaggcgggaggaucacu

SEQ ID NO: 391152 - RNA, 22 nt, Human
gggcaguuuauucuagaugguu

SEQ ID NO: 391153 - RNA, 22 nt, Human
ucaggugggaccugcuaggaca

SEQ ID NO: 391154 - RNA, 22 nt, Human
gcuguccugggaacaggcacua

SEQ ID NO: 391155 - RNA, 23 nt, Human
gcccaugcuguugggcccgagca

SEQ ID NO: 391156 - RNA, 22 nt, Human
ccccaggacguggcccucauag

SEQ ID NO: 391157 - RNA, 22 nt, Human
gccaggcugcuggcugcugucc

SEQ ID NO: 391158 - RNA, 22 nt, Human
aggcacagagaaugcccuccau

SEQ ID NO: 391159 - RNA, 22 nt, Human
ucuuuccuaggugauaugcaau

SEQ ID NO: 391160 - RNA, 22 nt, Human
uuccuuguuuguagcucuggga

SEQ ID NO: 391161 - RNA, 22 nt, Human
caggcuggagugcaguugugca

SEQ ID NO: 391162 - RNA, 22 nt, Human
ugcugagaucugccaguagaug

SEQ ID NO: 391163 - RNA, 22 nt, Human
agccuucagcaguucaggugcc

SEQ ID NO: 391164 - RNA, 22 nt, Human
uggacagguugaguaggaggag

SEQ ID NO: 391165 - RNA, 22 nt, Human
cuucucaguugcaagugucaga

SEQ ID NO: 391166 - RNA, 22 nt, Human
agcagggcucugccaugggccc

SEQ ID NO: 391167 - RNA, 22 nt, Human
aggggagccccugguccuggug

SEQ ID NO: 391168 - RNA, 22 nt, Human
cugacuguaauucuguucuuaa

SEQ ID NO: 391169 - RNA, 22 nt, Human
gcagcuuuaaucugaauaagua

SEQ ID NO: 391170 - RNA, 22 nt, Human
uagcaggguaaauguagaugga

SEQ ID NO: 391171 - RNA, 19 nt, Human
cuggugcuugagugaguca

SEQ ID NO: 391172 - RNA, 22 nt, Human
gccugcagggccugggccuacc

SEQ ID NO: 391173 - RNA, 22 nt, Human
uuucauggcuaggacuagagug

SEQ ID NO: 391174 - RNA, 22 nt, Human
aggucaaaccacagcucuaggc

SEQ ID NO: 391175 - RNA, 22 nt, Human
cagggcagagggaaacuccuuu

SEQ ID NO: 391176 - RNA, 22 nt, Human
accugagggcccaaacuuggua

SEQ ID NO: 391177 - RNA, 22 nt, Human
acaggcucuggggcaggauggc

SEQ ID NO: 391178 - RNA, 23 nt, Human
ucucaggacacacaugucuauca

SEQ ID NO: 391179 - RNA, 22 nt, Human
guccucuuagccacuuaauuau

SEQ ID NO: 391180 - RNA, 19 nt, Human
ugcugaaguugucagucug

SEQ ID NO: 391181 - RNA, 19 nt, Human
ccaggccuccugggagguc

SEQ ID NO: 391182 - RNA, 20 nt, Human
ugaagcagccuugauucugu

SEQ ID NO: 391183 - RNA, 22 nt, Human
cagcucugaggaacacuccuuu

SEQ ID NO: 391184 - RNA, 22 nt, Human
guccuggggauuauagaguguu

SEQ ID NO: 391185 - RNA, 18 nt, Human
ggacaucaucaggugcuu

SEQ ID NO: 391186 - RNA, 22 nt, Human
ccagggcacuuaggcccagccc

SEQ ID NO: 391187 - RNA, 17 nt, Human
cuguuaauucauuuccc

SEQ ID NO: 391188 - RNA, 18 nt, Human
gagaggagccagaauuuu

SEQ ID NO: 391189 - RNA, 22 nt, Human
auuucucuuagcaagacauuac

SEQ ID NO: 391190 - RNA, 22 nt, Human
gaugccucuuuuggcugaauua

SEQ ID NO: 391191 - RNA, 22 nt, Human
uuuaauuuuccucuuccuggag

SEQ ID NO: 391192 - RNA, 22 nt, Human
cucgcaggacagugcuaggacu

SEQ ID NO: 391193 - RNA, 22 nt, Human
gagacugcauuguccaaggguu

SEQ ID NO: 391194 - RNA, 23 nt, Human
uuacaguaggaguuggaaaacca

SEQ ID NO: 391195 - RNA, 22 nt, Human
ccaggagcaccaggccugugcc

SEQ ID NO: 391196 - RNA, 21 nt, Human
gccaccccuggcacaggugcu

SEQ ID NO: 391197 - RNA, 22 nt, Human
ccaggugucuguggccagcccu

SEQ ID NO: 391198 - RNA, 22 nt, Human
uucacaauaggagcaugcaaau

SEQ ID NO: 391199 - RNA, 22 nt, Human
ccagcuuuuccucucauugcuu

SEQ ID NO: 391200 - RNA, 22 nt, Human
uccaugggaagauuuugagugg

SEQ ID NO: 391201 - RNA, 22 nt, Human
gaggcagagaccuucaggaccu

SEQ ID NO: 391202 - RNA, 22 nt, Human
acaaaggcaggauugacuuagu

SEQ ID NO: 391203 - RNA, 22 nt, Human
uuugcauuugcaaauaaugaaa

SEQ ID NO: 391204 - RNA, 18 nt, Human
caggucagccuggccuca

SEQ ID NO: 391205 - RNA, 21 nt, Human
guggcccugguguggcugcac

SEQ ID NO: 391206 - RNA, 22 nt, Human
gccaggagagcuccuucagguu

SEQ ID NO: 391207 - RNA, 22 nt, Human
cccagcauggagugaggacuca

SEQ ID NO: 391208 - RNA, 22 nt, Human
gaaggagagggucaaggauaau

SEQ ID NO: 391209 - RNA, 22 nt, Human
aaggcugccucugccagaggag

SEQ ID NO: 391210 - RNA, 22 nt, Human
ugaaaugagauaauuuaagugc

SEQ ID NO: 391211 - RNA, 22 nt, Human
caauuucagguggauagguuuu

SEQ ID NO: 391212 - RNA, 22 nt, Human
uucauucauuacgugccaggca

SEQ ID NO: 391213 - RNA, 22 nt, Human
ugcagggacacgaagacaaaua

SEQ ID NO: 391214 - RNA, 22 nt, Human
gcugucuggaggcucugaggga

SEQ ID NO: 391215 - RNA, 22 nt, Human
uggcucagugcauucacaguaa

SEQ ID NO: 391216 - RNA, 18 nt, Human
uggcagcuagguaaagaa

SEQ ID NO: 391217 - RNA, 21 nt, Human
cauuagggcagaagcaggaag

SEQ ID NO: 391218 - RNA, 22 nt, Human
gcaccugauugauuucacugcu

SEQ ID NO: 391219 - RNA, 22 nt, Human
ugggaaauguguuucuggacca

SEQ ID NO: 391220 - RNA, 22 nt, Human
cuggccacaugugugcugagca

SEQ ID NO: 391221 - RNA, 22 nt, Human
agccucugucaagcuuuucaaa

SEQ ID NO: 391222 - RNA, 22 nt, Human
uuuccauauuuggucuuuggga

SEQ ID NO: 391223 - RNA, 23 nt, Human
uuucuguuggguauauauccaag

SEQ ID NO: 391224 - RNA, 22 nt, Human
uggcauuucuggccauuugugu

SEQ ID NO: 391225 - RNA, 22 nt, Human
ucuuaaaccacaaaauucagag

SEQ ID NO: 391226 - RNA, 22 nt, Human
ugucuguaagguguuuauguua

SEQ ID NO: 391227 - RNA, 22 nt, Human
uccagaauacucugaaaucauu

SEQ ID NO: 391228 - RNA, 22 nt, Human
gaggaagaauugguuauuggag

SEQ ID NO: 391229 - RNA, 22 nt, Human
ugcuauacauguacauauuagu

SEQ ID NO: 391230 - RNA, 23 nt, Human
agaggcaggaguggcuugcccgg

SEQ ID NO: 391231 - RNA, 22 nt, Human
gaugggggccagggccugcuuu

SEQ ID NO: 391232 - RNA, 22 nt, Human
aaucaguuucuuggcaaguuua

SEQ ID NO: 391233 - RNA, 22 nt, Human
cagugcaugaaacaauaugcag

SEQ ID NO: 391234 - RNA, 22 nt, Human
ggccugaggcaauagucagaca

SEQ ID NO: 391235 - RNA, 22 nt, Human
uugcacaugauagaugauuucu

SEQ ID NO: 391236 - RNA, 22 nt, Human
uauacagaacugcacgugcacg

SEQ ID NO: 391237 - RNA, 22 nt, Human
cauguuuacuaccaggagaaug

SEQ ID NO: 391238 - RNA, 22 nt, Human
gucauuguguggacauggagaa

SEQ ID NO: 391239 - RNA, 22 nt, Human
agccaggauggucucgaucggc

SEQ ID NO: 391240 - RNA, 22 nt, Human
ggcucugguugaccaugauggc

SEQ ID NO: 391241 - RNA, 22 nt, Human
uccuggaggggacagcaugggc

SEQ ID NO: 391242 - RNA, 22 nt, Human
uuauguaccugaauuaguaaag

SEQ ID NO: 391243 - RNA, 19 nt, Human
ugcauaaauuauauacuuu

SEQ ID NO: 391244 - RNA, 22 nt, Human
ugggcugagcacugaggaagga

SEQ ID NO: 391245 - RNA, 22 nt, Human
caccagacagguguaugcauau

SEQ ID NO: 391246 - RNA, 22 nt, Human
uggccugaggcucggcaugggu

SEQ ID NO: 391247 - RNA, 22 nt, Human
ggcuucaccgcgggguugcagg

SEQ ID NO: 391248 - RNA, 23 nt, Human
ggcagcucucaucugaugacuga

SEQ ID NO: 391249 - RNA, 22 nt, Human
gcugggcuucucaaugcugccu

SEQ ID NO: 391250 - RNA, 22 nt, Human
agccuggacagcuacggagaac

SEQ ID NO: 391251 - RNA, 22 nt, Human
uccagggaucuuuagagucuuu

SEQ ID NO: 391252 - RNA, 22 nt, Human
uucuugcucaaugucuguuuaa

SEQ ID NO: 391253 - RNA, 22 nt, Human
acaaaguuauucuuucagagga

SEQ ID NO: 391254 - RNA, 22 nt, Human
ugaaggaaagagggaacauccc

SEQ ID NO: 391255 - RNA, 18 nt, Human
gccugggaggaggaaaug

SEQ ID NO: 391256 - RNA, 22 nt, Human
ccagagccggauugugaagugc

SEQ ID NO: 391257 - RNA, 22 nt, Human
aaaaacugcaauuacuuuuguc

SEQ ID NO: 391258 - RNA, 22 nt, Human
gcucugcugaagccccuugcau

SEQ ID NO: 391259 - RNA, 22 nt, Human
gcuguggccgucagggaaaugg

SEQ ID NO: 391260 - RNA, 22 nt, Human
auuucuguauccugcugucaga

SEQ ID NO: 391261 - RNA, 22 nt, Human
cccagccucuggauucugcccu

SEQ ID NO: 391262 - RNA, 22 nt, Human
ucugcaggacugaggccuguuu

SEQ ID NO: 391263 - RNA, 22 nt, Human
auaugcaagcacauagaauacu

SEQ ID NO: 391264 - RNA, 19 nt, Human
ugugaaagcuaguguucuu

SEQ ID NO: 391265 - RNA, 22 nt, Human
agcccagccggauucccaguuc

SEQ ID NO: 391266 - RNA, 22 nt, Human
cucaggccauucuuccagcugc

SEQ ID NO: 391267 - RNA, 23 nt, Human
cccuguagcccaggacaggcuuu

SEQ ID NO: 391268 - RNA, 22 nt, Human
agagccaggacugugucucacu

SEQ ID NO: 391269 - RNA, 22 nt, Human
augcaccugaacuccaucagcu

SEQ ID NO: 391270 - RNA, 22 nt, Human
ugggcagggucucuguuaucag

SEQ ID NO: 391271 - RNA, 22 nt, Human
gugcagagaaaugagaagucga

SEQ ID NO: 391272 - RNA, 22 nt, Human
uccugcagguggaugauucucu

SEQ ID NO: 391273 - RNA, 22 nt, Human
uuucacauaugguuguugauug

SEQ ID NO: 391274 - RNA, 22 nt, Human
uggcucagucuggguugacuga

SEQ ID NO: 391275 - RNA, 20 nt, Human
ugcucugucuaaaacuuccc

SEQ ID NO: 391276 - RNA, 22 nt, Human
gccuucagcccugacuggccag

SEQ ID NO: 391277 - RNA, 22 nt, Human
agagggauaauauguauuguaa

SEQ ID NO: 391278 - RNA, 22 nt, Human
ccucugcucugguccaugugcu

SEQ ID NO: 391279 - RNA, 22 nt, Human
aacccagccguguagcugccgc

SEQ ID NO: 391280 - RNA, 22 nt, Human
uaagagaacuggauagauagga

SEQ ID NO: 391281 - RNA, 22 nt, Human
caggguggggaaauagcgcccu

SEQ ID NO: 391282 - RNA, 22 nt, Human
ggcugccuccucgagacaggau

SEQ ID NO: 391283 - RNA, 22 nt, Human
uggcauuugggcuggcuuuucu

SEQ ID NO: 391284 - RNA, 22 nt, Human
gcaugugucuccccaguggagg

SEQ ID NO: 391285 - RNA, 22 nt, Human
gcccaggaagugacucagaugu

SEQ ID NO: 391286 - RNA, 22 nt, Human
accaaggagccacauacaaccu

SEQ ID NO: 391287 - RNA, 22 nt, Human
aggcagaggaaggguggauuug

SEQ ID NO: 391288 - RNA, 22 nt, Human
uguauguugggucaaaguacau

SEQ ID NO: 391289 - RNA, 22 nt, Human
aagccaaugagagaggccucag

SEQ ID NO: 391290 - RNA, 22 nt, Human
ucuguaucuaauuuuacaguag

SEQ ID NO: 391291 - RNA, 22 nt, Human
uccaggcaaagccuuguagacg

SEQ ID NO: 391292 - RNA, 20 nt, Human
ucccaagggcugagaggauc

SEQ ID NO: 391293 - RNA, 21 nt, Human
ccagccucagaucagggagcu

SEQ ID NO: 391294 - RNA, 22 nt, Human
ugauguucuguauaucauauag

SEQ ID NO: 391295 - RNA, 22 nt, Human
gagcuuccugaugccgaccagu

SEQ ID NO: 391296 - RNA, 22 nt, Human
uguguuuuacaaauucucuuaa

SEQ ID NO: 391297 - RNA, 22 nt, Human
agagccugcuguguaagucaca

SEQ ID NO: 391298 - RNA, 22 nt, Human
acccagagcugggcuuggcaaa

SEQ ID NO: 391299 - RNA, 22 nt, Human
ugaaacuaggccaaucaaauua

SEQ ID NO: 391300 - RNA, 22 nt, Human
cuuauuagugucugucugaguu

SEQ ID NO: 391301 - RNA, 22 nt, Human
aaggaggaauuucagggugaau

SEQ ID NO: 391302 - RNA, 22 nt, Human
guucaaggaagggaggaaagcc

SEQ ID NO: 391303 - RNA, 22 nt, Human
ugugcagcuaguccuggacuug

SEQ ID NO: 391304 - RNA, 22 nt, Human
aaguucaaggcucuagaguucc

SEQ ID NO: 391305 - RNA, 22 nt, Human
ugucucugauaaguaguucagu

SEQ ID NO: 391306 - RNA, 23 nt, Human
agcauggaauaggaaagaggcag

SEQ ID NO: 391307 - RNA, 22 nt, Human
aacaggcaggagaauucugccu

SEQ ID NO: 391308 - RNA, 22 nt, Human
uguacaauguguuuguuggcuu

SEQ ID NO: 391309 - RNA, 20 nt, Human
ggcugccuccuuccuuuccu

SEQ ID NO: 391310 - RNA, 22 nt, Human
auuccaaaggcuggccuggagg

SEQ ID NO: 391311 - RNA, 22 nt, Human
uaguuucagcuccuucauccug

SEQ ID NO: 391312 - RNA, 22 nt, Human
uuucacaacugcuuauuugaga

SEQ ID NO: 391313 - RNA, 22 nt, Human
ucuucuuccuccacagggccca

SEQ ID NO: 391314 - RNA, 22 nt, Human
caggagccccaggcugacaaua

SEQ ID NO: 391315 - RNA, 22 nt, Human
uggccaccccuuucucugcacu

SEQ ID NO: 391316 - RNA, 22 nt, Human
aagggacuuugucagcuuucca

SEQ ID NO: 391317 - RNA, 22 nt, Human
gaauuucagagguaacaucauc

SEQ ID NO: 391318 - RNA, 22 nt, Human
ucagaggagaugguuaccaggg

SEQ ID NO: 391319 - RNA, 22 nt, Human
uuuaaauaggacuccugggggu

SEQ ID NO: 391320 - RNA, 22 nt, Human
cagcucccgccaucgggaggca

SEQ ID NO: 391321 - RNA, 21 nt, Human
gcagccacugccuucaacaau

SEQ ID NO: 391322 - RNA, 22 nt, Human
gggaaggagccugcuugcuaga

SEQ ID NO: 391323 - RNA, 22 nt, Human
uuguaacaggcacucugugcca

SEQ ID NO: 391324 - RNA, 22 nt, Human
auuuccagugcacugaauagaa

SEQ ID NO: 391325 - RNA, 17 nt, Human
gcugccaccuuuggagc

SEQ ID NO: 391326 - RNA, 22 nt, Human
ugcagggccuucuagaccaugg

SEQ ID NO: 391327 - RNA, 22 nt, Human
ucuucuucccaucccucaaaug

SEQ ID NO: 391328 - RNA, 22 nt, Human
gcacccagagggcagggucucc

SEQ ID NO: 391329 - RNA, 22 nt, Human
cugcucugagaggcucuuccua

SEQ ID NO: 391330 - RNA, 19 nt, Human
aaucagaaauaucgaggcc

SEQ ID NO: 391331 - RNA, 22 nt, Human
ucauuuucacacauaaauagca

SEQ ID NO: 391332 - RNA, 19 nt, Human
ggaagagaggaaaggugga

SEQ ID NO: 391333 - RNA, 22 nt, Human
uggccucuuacgacauagccuu

SEQ ID NO: 391334 - RNA, 22 nt, Human
cauggccuugagugacugcacu

SEQ ID NO: 391335 - RNA, 22 nt, Human
aagauuauuuaagacaggaacc

SEQ ID NO: 391336 - RNA, 17 nt, Human
ggcugcugugcuggugc

SEQ ID NO: 391337 - RNA, 22 nt, Human
agcagccagaaagggcagucga

SEQ ID NO: 391338 - RNA, 16 nt, Human
ccaccugcagcucuca

SEQ ID NO: 391339 - RNA, 22 nt, Human
augugcaugcacuuacaugugu

SEQ ID NO: 391340 - RNA, 22 nt, Human
ugcagagggacagccacagcuc

SEQ ID NO: 391341 - RNA, 22 nt, Human
aaaaugugaucuacaaaugcaa

SEQ ID NO: 391342 - RNA, 22 nt, Human
gcaucuaaacuugcaucauugu

SEQ ID NO: 391343 - RNA, 22 nt, Human
aagucacaagcauauaugcauu

SEQ ID NO: 391344 - RNA, 22 nt, Human
uugcauuuccuguacuguuuga

SEQ ID NO: 391345 - RNA, 22 nt, Human
agcuggccuccgggugccuggg

SEQ ID NO: 391346 - RNA, 22 nt, Human
caguccuugcucugggaugaug

SEQ ID NO: 391347 - RNA, 22 nt, Human
gaguuauuucagaaggaaagau

SEQ ID NO: 391348 - RNA, 22 nt, Human
ggggauggaauguaguagugau

SEQ ID NO: 391349 - RNA, 22 nt, Human
ccaggcugcuuagccuuaucuu

SEQ ID NO: 391350 - RNA, 22 nt, Human
ugaaagguguccaauauuucuc

SEQ ID NO: 391351 - RNA, 22 nt, Human
uuagugucuucuucauccucug

SEQ ID NO: 391352 - RNA, 22 nt, Human
uuaggaaaggguuuucuaacag

SEQ ID NO: 391353 - RNA, 22 nt, Human
gggugggaacaggaugccagga

SEQ ID NO: 391354 - RNA, 22 nt, Human
aggagucagauuguuugaaugu

SEQ ID NO: 391355 - RNA, 22 nt, Human
gacagguggggaaacuaaggua

SEQ ID NO: 391356 - RNA, 22 nt, Human
guggugcauccuugaguaagcu

SEQ ID NO: 391357 - RNA, 22 nt, Human
uugauacauagcacaguuuagg

SEQ ID NO: 391358 - RNA, 22 nt, Human
uuuggaaugguaccuucaguug

SEQ ID NO: 391359 - RNA, 22 nt, Human
augguacaaaauguauaaaguc

SEQ ID NO: 391360 - RNA, 22 nt, Human
agaugcugugucuguucccuug

SEQ ID NO: 391361 - RNA, 22 nt, Human
uuucuguaaguggcaaauaaug

SEQ ID NO: 391362 - RNA, 22 nt, Human
uagcuuuaagaugagaugugga

SEQ ID NO: 391363 - RNA, 22 nt, Human
aauuaugagguagauaucacau

SEQ ID NO: 391364 - RNA, 22 nt, Human
aggagcuggaguccaggcaagu

SEQ ID NO: 391365 - RNA, 22 nt, Human
uuugaaaggguuaugagacuga

SEQ ID NO: 391366 - RNA, 20 nt, Human
agaggcuuccuugggaggag

SEQ ID NO: 391367 - RNA, 22 nt, Human
agaggugacauaggagaggcuc

SEQ ID NO: 391368 - RNA, 22 nt, Human
gcugccacauuuucaggacuaa

SEQ ID NO: 391369 - RNA, 22 nt, Human
ggccucugguucacagggagga

SEQ ID NO: 391370 - RNA, 22 nt, Human
caaauucaaugaacauguuuaa

SEQ ID NO: 391371 - RNA, 22 nt, Human
cagugcuccugauguacccuug

SEQ ID NO: 391372 - RNA, 22 nt, Human
gagacagaguuucacucuuguu

SEQ ID NO: 391373 - RNA, 22 nt, Human
cagggccugccugguuccugga

SEQ ID NO: 391374 - RNA, 22 nt, Human
guggcugcuaagucuccuuccu

SEQ ID NO: 391375 - RNA, 22 nt, Human
cucuuaguuuaucuuugacaaa

SEQ ID NO: 391376 - RNA, 22 nt, Human
aauuucaagucuugaagaagua

SEQ ID NO: 391377 - RNA, 22 nt, Human
gcccucuggcagccuuggcugg

SEQ ID NO: 391378 - RNA, 22 nt, Human
cggggcaggagucccuguagag

SEQ ID NO: 391379 - RNA, 18 nt, Human
gcccagaggucugggccc

SEQ ID NO: 391380 - RNA, 22 nt, Human
ggcugcugaguuggccaggaga

SEQ ID NO: 391381 - RNA, 22 nt, Human
gcagcagagcuuuguccuggcu

SEQ ID NO: 391382 - RNA, 22 nt, Human
agccuccuggaguuucugggau

SEQ ID NO: 391383 - RNA, 22 nt, Human
ucuucaauuuagaauggauuua

SEQ ID NO: 391384 - RNA, 22 nt, Human
uggagggcaucuguggucaggc

SEQ ID NO: 391385 - RNA, 22 nt, Human
agggcuggcuaggugcguuccc

SEQ ID NO: 391386 - RNA, 22 nt, Human
agcucccagcuccuuugagaga

SEQ ID NO: 391387 - RNA, 22 nt, Human
ucagcaaugagaacuggcauuu

SEQ ID NO: 391388 - RNA, 22 nt, Human
gaccugccugagcugccucugc

SEQ ID NO: 391389 - RNA, 22 nt, Human
ucacuguugaccuggaaguggg

SEQ ID NO: 391390 - RNA, 22 nt, Human
gggugaagcuccugcaggggcc

SEQ ID NO: 391391 - RNA, 22 nt, Human
acagagcaauucuuggguguuu

SEQ ID NO: 391392 - RNA, 20 nt, Human
gcacugaaauucaauguuug

SEQ ID NO: 391393 - RNA, 22 nt, Human
uuggcagugaugcagcuuguuc

SEQ ID NO: 391394 - RNA, 17 nt, Human
ugcauguccuuuguucc

SEQ ID NO: 391395 - RNA, 22 nt, Human
uacaacauuguguugcuucaua

SEQ ID NO: 391396 - RNA, 22 nt, Human
auugaaagagaauguagcucuu

SEQ ID NO: 391397 - RNA, 22 nt, Human
gggccacauugaagggugggua

SEQ ID NO: 391398 - RNA, 22 nt, Human
cuucauuaaugucuauaaguuu

SEQ ID NO: 391399 - RNA, 22 nt, Human
uguuccaucaguuuuugguuga

SEQ ID NO: 391400 - RNA, 22 nt, Human
gcagagaagaugcccaggcuuc

SEQ ID NO: 391401 - RNA, 22 nt, Human
uccagggcugacuugggagagg

SEQ ID NO: 391402 - RNA, 22 nt, Human
ucaugcccagagcaguaaauua

SEQ ID NO: 391403 - RNA, 20 nt, Human
ggcagcucacuacuuucugu

SEQ ID NO: 391404 - RNA, 22 nt, Human
caagcagacaguaggccuagaa

SEQ ID NO: 391405 - RNA, 22 nt, Human
caaguccucugguuucaaauag

SEQ ID NO: 391406 - RNA, 22 nt, Human
cgugucaucugagccuugggcg

SEQ ID NO: 391407 - RNA, 22 nt, Human
ccugggcucuauccugacccag

SEQ ID NO: 391408 - RNA, 22 nt, Human
cacagcugcccuacuccaugug

SEQ ID NO: 391409 - RNA, 22 nt, Human
gcugucugcugugcacugagca

SEQ ID NO: 391410 - RNA, 22 nt, Human
ggucccugaagaggccuggggu

SEQ ID NO: 391411 - RNA, 22 nt, Human
uagaaaugcccagauucugcua

SEQ ID NO: 391412 - RNA, 22 nt, Human
ugaaggcuguuggauggggaag

SEQ ID NO: 391413 - RNA, 23 nt, Human
aggcagcuggguagcaucuuucu

SEQ ID NO: 391414 - RNA, 22 nt, Human
gggucagcugcugggggcugac

SEQ ID NO: 391415 - RNA, 22 nt, Human
agccucucuuuauucccagcua

SEQ ID NO: 391416 - RNA, 17 nt, Human
acagagguuauacagac

SEQ ID NO: 391417 - RNA, 22 nt, Human
ggcugggccagggccuguggac

SEQ ID NO: 391418 - RNA, 22 nt, Human
aaaagccaugcauaccuaagag

SEQ ID NO: 391419 - RNA, 22 nt, Human
aaaagaggagugguuuaugaca

SEQ ID NO: 391420 - RNA, 22 nt, Human
uaugcacauucacacaaaaaug

SEQ ID NO: 391421 - RNA, 22 nt, Human
ccucacuuuccuuucuccuggg

SEQ ID NO: 391422 - RNA, 22 nt, Human
augggaggaagagaagaugucu

SEQ ID NO: 391423 - RNA, 22 nt, Human
aaguuucauuguucauguaaca

SEQ ID NO: 391424 - RNA, 22 nt, Human
agacagcugcucgcagagcuau

SEQ ID NO: 391425 - RNA, 21 nt, Human
uuuucccacugaaagcuccca

SEQ ID NO: 391426 - RNA, 22 nt, Human
ccuggagcucacugggagccgg

SEQ ID NO: 391427 - RNA, 22 nt, Human
aaggaaccuggaguagagggag

SEQ ID NO: 391428 - RNA, 21 nt, Human
agccaggcaagcacccccacu

SEQ ID NO: 391429 - RNA, 22 nt, Human
gaggggcugggguugacuccaa

SEQ ID NO: 391430 - RNA, 22 nt, Human
uuguaacagguacuaaauaacu

SEQ ID NO: 391431 - RNA, 22 nt, Human
ucuuagaaguuuauggcacgga

SEQ ID NO: 391432 - RNA, 22 nt, Human
uagcucuucauuucaucugauu

SEQ ID NO: 391433 - RNA, 22 nt, Human
uaaagacaauuucgagcuguag

SEQ ID NO: 391434 - RNA, 22 nt, Human
caguccuuggcaaguucucagu

SEQ ID NO: 391435 - RNA, 22 nt, Human
auaaguucagguaaagaaauca

SEQ ID NO: 391436 - RNA, 22 nt, Human
agucaggagcugcugcauugua

SEQ ID NO: 391437 - RNA, 22 nt, Human
ccugggcaacauagugagaccu

SEQ ID NO: 391438 - RNA, 17 nt, Human
gcagccagugcagcagg

SEQ ID NO: 391439 - RNA, 22 nt, Human
ugcccuuggguaacuugcugau

SEQ ID NO: 391440 - RNA, 20 nt, Human
acugagcugcauggagagga

SEQ ID NO: 391441 - RNA, 22 nt, Human
gguuucaaugagaagugcuugu

SEQ ID NO: 391442 - RNA, 22 nt, Human
acccagcuaacccuacccugga

SEQ ID NO: 391443 - RNA, 22 nt, Human
uuuuuauaacucuuuugugaca

SEQ ID NO: 391444 - RNA, 18 nt, Human
ggcagggaaaagauaggg

SEQ ID NO: 391445 - RNA, 22 nt, Human
cccuugcaucccauguguggcc

SEQ ID NO: 391446 - RNA, 22 nt, Human
auguaucaacaaauuguacagu

SEQ ID NO: 391447 - RNA, 20 nt, Human
uccugagauuuaagggguuc

SEQ ID NO: 391448 - RNA, 22 nt, Human
gguggcagucuuaagagaucuu

SEQ ID NO: 391449 - RNA, 20 nt, Human
gaaguccuguuauauccuuu

SEQ ID NO: 391450 - RNA, 22 nt, Human
ugccagccagguucugaggcua

SEQ ID NO: 391451 - RNA, 22 nt, Human
cauuuagacauuugauuugggg

SEQ ID NO: 391452 - RNA, 22 nt, Human
ugagcagaacacgggauccaug

SEQ ID NO: 391453 - RNA, 22 nt, Human
cugagagucagcuucuccuccu

SEQ ID NO: 391454 - RNA, 22 nt, Human
gaguccuuuucucuguccacug

SEQ ID NO: 391455 - RNA, 22 nt, Human
aaaaugaacagaacaaugggga

SEQ ID NO: 391456 - RNA, 22 nt, Human
aaguggacuaauacaaggacua

SEQ ID NO: 391457 - RNA, 22 nt, Human
aggcugaggcagguggaucauu

SEQ ID NO: 391458 - RNA, 22 nt, Human
ucaaguauaucuagucauuagg

SEQ ID NO: 391459 - RNA, 22 nt, Human
ccugugucagccccugccucca

SEQ ID NO: 391460 - RNA, 22 nt, Human
ugaggcagcccacuuuccuuag

SEQ ID NO: 391461 - RNA, 22 nt, Human
cucuaauccuuugucccugggu

SEQ ID NO: 391462 - RNA, 22 nt, Human
aaggcaguuaauuuggcuagaa

SEQ ID NO: 391463 - RNA, 22 nt, Human
cugggagcggcugucacugguu

SEQ ID NO: 391464 - RNA, 22 nt, Human
ggacuucuaagugccagacacu

SEQ ID NO: 391465 - RNA, 22 nt, Human
cugucugucaaguucaucucca

SEQ ID NO: 391466 - RNA, 22 nt, Human
cagccaggccuggugaccaaag

SEQ ID NO: 391467 - RNA, 22 nt, Human
auucacuggcagacagaacuca

SEQ ID NO: 391468 - RNA, 22 nt, Human
ugggccugggucuuugcugcca

SEQ ID NO: 391469 - RNA, 22 nt, Human
ucacaucucccuggaggacaca

SEQ ID NO: 391470 - RNA, 22 nt, Human
cugagguguugaugaccuaugc

SEQ ID NO: 391471 - RNA, 22 nt, Human
uucuucuuaauguccugggaac

SEQ ID NO: 391472 - RNA, 22 nt, Human
agauggguaacuggagucugcu

SEQ ID NO: 391473 - RNA, 23 nt, Human
aaucuggcugauguuuuuucucu

SEQ ID NO: 391474 - RNA, 22 nt, Human
aguccagugaacuguaaauagg

SEQ ID NO: 391475 - RNA, 21 nt, Human
gcugcaucaaucuacccaggg

SEQ ID NO: 391476 - RNA, 22 nt, Human
cccagggaaugacucuggccuu

SEQ ID NO: 391477 - RNA, 22 nt, Human
ccugugcccucagccuggcucu

SEQ ID NO: 391478 - RNA, 22 nt, Human
cauuggaaugcauuugaagaga

SEQ ID NO: 391479 - RNA, 22 nt, Human
ccucacugaagaggugacauuu

SEQ ID NO: 391480 - RNA, 22 nt, Human
aaggcaguaggaucuuccacag

SEQ ID NO: 391481 - RNA, 22 nt, Human
ccagggagccuggugugucagc

SEQ ID NO: 391482 - RNA, 21 nt, Human
gaugaagcaaucuuucuguug

SEQ ID NO: 391483 - RNA, 22 nt, Human
agggcucccgcgguguccggga

SEQ ID NO: 391484 - RNA, 22 nt, Human
aaauguuuugcucccauguggu

SEQ ID NO: 391485 - RNA, 22 nt, Human
gccuggcaggccugggccagca

SEQ ID NO: 391486 - RNA, 22 nt, Human
uagccggguguugugucaugca

SEQ ID NO: 391487 - RNA, 22 nt, Human
ggcaguagccagggacuggcag

SEQ ID NO: 391488 - RNA, 22 nt, Human
gggagccuugggagugccagcc

SEQ ID NO: 391489 - RNA, 22 nt, Human
uaugcacacaucgcagcaggaa

SEQ ID NO: 391490 - RNA, 22 nt, Human
cauaaaauggcuuguucuuuaa

SEQ ID NO: 391491 - RNA, 22 nt, Human
agcugaguuaauucaucacuua

SEQ ID NO: 391492 - RNA, 22 nt, Human
uguucagcccucuauuaaucag

SEQ ID NO: 391493 - RNA, 22 nt, Human
cuggcaggcggcagagcccagg

SEQ ID NO: 391494 - RNA, 22 nt, Human
gcagcugguuaaugggagaauu

SEQ ID NO: 391495 - RNA, 22 nt, Human
aggcuguccucucuugcucagu

SEQ ID NO: 391496 - RNA, 22 nt, Human
ugcugaugcuguucuguuagga

SEQ ID NO: 391497 - RNA, 22 nt, Human
aagaaauguagagccuaguaaa

SEQ ID NO: 391498 - RNA, 18 nt, Human
ugacucacccugucagug

SEQ ID NO: 391499 - RNA, 22 nt, Human
agugaaauacugucguuuuuag

SEQ ID NO: 391500 - RNA, 22 nt, Human
uccuucagcucucuauuuagau

SEQ ID NO: 391501 - RNA, 22 nt, Human
gucaggauuugaacucaggucu

SEQ ID NO: 391502 - RNA, 22 nt, Human
ccagcuuucauaucaugaggua

SEQ ID NO: 391503 - RNA, 22 nt, Human
ggaggccaaggugggcggauca

SEQ ID NO: 391504 - RNA, 22 nt, Human
acuuucuccagaaaaccaagga

SEQ ID NO: 391505 - RNA, 22 nt, Human
gcucaggaaauaguuuaguguu

SEQ ID NO: 391506 - RNA, 22 nt, Human
agugcaaaauucagaagcaauu

SEQ ID NO: 391507 - RNA, 22 nt, Human
aggcuggguaccugucauaugc

SEQ ID NO: 391508 - RNA, 22 nt, Human
guagggacuuguuuuacuagua

SEQ ID NO: 391509 - RNA, 19 nt, Human
ugaguucugugguucucaa

SEQ ID NO: 391510 - RNA, 22 nt, Human
cacauggggcgcugcauuggcc

SEQ ID NO: 391511 - RNA, 22 nt, Human
guagggacaugccauuaucuca

SEQ ID NO: 391512 - RNA, 22 nt, Human
accauguguuuuacacauggua

SEQ ID NO: 391513 - RNA, 22 nt, Human
aaucagaauuuguccccugagu

SEQ ID NO: 391514 - RNA, 17 nt, Human
aauagcugcucagagag

SEQ ID NO: 391515 - RNA, 22 nt, Human
ggcucagaccucccagcuccag

SEQ ID NO: 391516 - RNA, 22 nt, Human
cccucccaggaguggccagaga

SEQ ID NO: 391517 - RNA, 22 nt, Human
ucaaugauuagaguuuagugug

SEQ ID NO: 391518 - RNA, 19 nt, Human
ucaaagucugagucacuuu

SEQ ID NO: 391519 - RNA, 22 nt, Human
ugccaggcccugugcuggaugc

SEQ ID NO: 391520 - RNA, 22 nt, Human
ugccucugguuaucugguaccu

SEQ ID NO: 391521 - RNA, 22 nt, Human
augggaugaacuugaucugcuu

SEQ ID NO: 391522 - RNA, 22 nt, Human
cuuuggaagugaccacaauccu

SEQ ID NO: 391523 - RNA, 22 nt, Human
aaguccauucuuccagccagcu

SEQ ID NO: 391524 - RNA, 22 nt, Human
ccagugcaggugagcaccaggu

SEQ ID NO: 391525 - RNA, 21 nt, Human
ugcccacagcaaaugcagagg

SEQ ID NO: 391526 - RNA, 22 nt, Human
caaggagaguaauugaaugaga

SEQ ID NO: 391527 - RNA, 22 nt, Human
aagaugauagaucugucaaugu

SEQ ID NO: 391528 - RNA, 22 nt, Human
gcuggcuguguuccuucugcca

SEQ ID NO: 391529 - RNA, 22 nt, Human
aaagguuugcauggaauuuacc

SEQ ID NO: 391530 - RNA, 22 nt, Human
gcccaugcucucaggcgggccu

SEQ ID NO: 391531 - RNA, 22 nt, Human
uggccuggaagagaggucgagg

SEQ ID NO: 391532 - RNA, 22 nt, Human
cacuucaauuaacuucagcauu

SEQ ID NO: 391533 - RNA, 22 nt, Human
aguggcagggcuggcugcugca

SEQ ID NO: 391534 - RNA, 22 nt, Human
cauuaagauuuuuuucuacugg

SEQ ID NO: 391535 - RNA, 22 nt, Human
gccacacuuauucucaugcaca

SEQ ID NO: 391536 - RNA, 22 nt, Human
uugcauugggagugaggagacc

SEQ ID NO: 391537 - RNA, 22 nt, Human
cauuuccagcuccugcaucaug

SEQ ID NO: 391538 - RNA, 22 nt, Human
uugcacauguugguucuugaaa

SEQ ID NO: 391539 - RNA, 22 nt, Human
cugcuguggguuaagacacugu

SEQ ID NO: 391540 - RNA, 22 nt, Human
aaaguuagaaugauaucaacga

SEQ ID NO: 391541 - RNA, 22 nt, Human
uaaagucaucuuuaaacaugcc

SEQ ID NO: 391542 - RNA, 22 nt, Human
uacuaaacccucgauggaucuu

SEQ ID NO: 391543 - RNA, 22 nt, Human
uagagaaauaagcuuugccuug

SEQ ID NO: 391544 - RNA, 22 nt, Human
uauuaucauugguaauaugguc

SEQ ID NO: 391545 - RNA, 18 nt, Human
gugacagcugcuagcuca

SEQ ID NO: 391546 - RNA, 22 nt, Human
ggagcauguggggugagcaggg

SEQ ID NO: 391547 - RNA, 22 nt, Human
aggcuccuaucgcuuucagcaa

SEQ ID NO: 391548 - RNA, 22 nt, Human
acagcuuuugaaaaauuacugg

SEQ ID NO: 391549 - RNA, 22 nt, Human
uucuucuucauuucugacgaug

SEQ ID NO: 391550 - RNA, 22 nt, Human
ucugagcauugaauuuucuucc

SEQ ID NO: 391551 - RNA, 22 nt, Human
gugccugugccaggggugugcu

SEQ ID NO: 391552 - RNA, 22 nt, Human
cagcugaagagaggugcugagu

SEQ ID NO: 391553 - RNA, 22 nt, Human
uagaaaagauaacauucugugc

SEQ ID NO: 391554 - RNA, 22 nt, Human
gccucccuguucuuccacaaua

SEQ ID NO: 391555 - RNA, 22 nt, Human
gagcagcuuaugucaagccaga

SEQ ID NO: 391556 - RNA, 22 nt, Human
acacugaauaauugagaguuga

SEQ ID NO: 391557 - RNA, 22 nt, Human
cagcugggcuaagaguagaggc

SEQ ID NO: 391558 - RNA, 22 nt, Human
aagagcuguaugccauaugauu

SEQ ID NO: 391559 - RNA, 22 nt, Human
gggcugagaaguugaucccaag

SEQ ID NO: 391560 - RNA, 22 nt, Human
ggaggugaggccguagggugug

SEQ ID NO: 391561 - RNA, 22 nt, Human
caggugggaccaugauagggca

SEQ ID NO: 391562 - RNA, 22 nt, Human
caggagaagucucuagggggug

SEQ ID NO: 391563 - RNA, 22 nt, Human
cagggacccuacuagcucacac

SEQ ID NO: 391564 - RNA, 22 nt, Human
cucuucuuuaguccagaccauc

SEQ ID NO: 391565 - RNA, 22 nt, Human
cuggaguuagaguagacacuga

SEQ ID NO: 391566 - RNA, 22 nt, Human
ccauggcuuuugagucucaaga

SEQ ID NO: 391567 - RNA, 22 nt, Human
ugaaauaggaaacagauguuuc

SEQ ID NO: 391568 - RNA, 22 nt, Human
uaguggagaguuguuuugugca

SEQ ID NO: 391569 - RNA, 22 nt, Human
ugugcuucugcagagacuauuu

SEQ ID NO: 391570 - RNA, 22 nt, Human
agggaaggaaaagcugucgcuu

SEQ ID NO: 391571 - RNA, 22 nt, Human
cagcaggacccaggaauccugc

SEQ ID NO: 391572 - RNA, 22 nt, Human
uaaagcaggccacauaugugau

SEQ ID NO: 391573 - RNA, 22 nt, Human
agcugccauccuguucagcacc

SEQ ID NO: 391574 - RNA, 22 nt, Human
ggccuggcauggggacuaaggg

SEQ ID NO: 391575 - RNA, 22 nt, Human
ccacacagucaguuuccaagaa

SEQ ID NO: 391576 - RNA, 22 nt, Human
ucucaggaguagugggauccau

SEQ ID NO: 391577 - RNA, 22 nt, Human
caggggcuuaagugacagaagg

SEQ ID NO: 391578 - RNA, 23 nt, Human
cccagagcacagccuccagaugc

SEQ ID NO: 391579 - RNA, 22 nt, Human
uucaaucauuagaaucucaggc

SEQ ID NO: 391580 - RNA, 22 nt, Human
acagagauguggaugagggauu

SEQ ID NO: 391581 - RNA, 22 nt, Human
ucagaaauguaagcugaugacu

SEQ ID NO: 391582 - RNA, 22 nt, Human
caguuucuacgaaggucaaccc

SEQ ID NO: 391583 - RNA, 17 nt, Human
cccagcuggcagugccg

SEQ ID NO: 391584 - RNA, 22 nt, Human
cuucuuaaauuggauugcuauu

SEQ ID NO: 391585 - RNA, 22 nt, Human
acugugcuuucucuggaggcau

SEQ ID NO: 391586 - RNA, 22 nt, Human
acccugagucagacagccugac

SEQ ID NO: 391587 - RNA, 22 nt, Human
aggcugagccugggcguggugg

SEQ ID NO: 391588 - RNA, 22 nt, Human
aaaaguuuaagacucauucuag

SEQ ID NO: 391589 - RNA, 22 nt, Human
aagcuuuaugaucucucagcua

SEQ ID NO: 391590 - RNA, 22 nt, Human
guuccuauauagccuuaaggau

SEQ ID NO: 391591 - RNA, 22 nt, Human
ugacauuuaucuucuacaauga

SEQ ID NO: 391592 - RNA, 22 nt, Human
agggcuccugaggcccuucugg

SEQ ID NO: 391593 - RNA, 22 nt, Human
ucugcaggaggcuggcugcagg

SEQ ID NO: 391594 - RNA, 22 nt, Human
aggugucuggauggguguccuu

SEQ ID NO: 391595 - RNA, 22 nt, Human
ucagagaaaugaaguagggauu

SEQ ID NO: 391596 - RNA, 22 nt, Human
gaauuguagagggaacagaagc

SEQ ID NO: 391597 - RNA, 22 nt, Human
guagaaauuccauuuacuuuga

SEQ ID NO: 391598 - RNA, 22 nt, Human
aaagccauugaacuguacuuua

SEQ ID NO: 391599 - RNA, 22 nt, Human
gugucaugggguuuguuauaca

SEQ ID NO: 391600 - RNA, 23 nt, Human
ucaucaaacagcugcucaagaaa

SEQ ID NO: 391601 - RNA, 22 nt, Human
uugcauugaaaauauauuuuaa

SEQ ID NO: 391602 - RNA, 22 nt, Human
ucucagagaagugaugagcaau

SEQ ID NO: 391603 - RNA, 22 nt, Human
aaagccuucaaguagauguaag

SEQ ID NO: 391604 - RNA, 22 nt, Human
aguccaaggagagacagcauuu

SEQ ID NO: 391605 - RNA, 22 nt, Human
uucuuugaguuaguacagucca

SEQ ID NO: 391606 - RNA, 22 nt, Human
aagccgggccugagaaaugaca

SEQ ID NO: 391607 - RNA, 22 nt, Human
acguuuucagccuuaauguaga

SEQ ID NO: 391608 - RNA, 22 nt, Human
caagaucagggugccagaaugg

SEQ ID NO: 391609 - RNA, 18 nt, Human
gaaaggagagacaguagg

SEQ ID NO: 391610 - RNA, 23 nt, Human
acagacaacacugaugagagaaa

SEQ ID NO: 391611 - RNA, 22 nt, Human
cagcuggcuggucagugcacaa

SEQ ID NO: 391612 - RNA, 20 nt, Human
ccaggcacugucccaugcag

SEQ ID NO: 391613 - RNA, 22 nt, Human
aaugccucuuggaagaagacuu

SEQ ID NO: 391614 - RNA, 22 nt, Human
acacuuuacagcuuccuuugca

SEQ ID NO: 391615 - RNA, 21 nt, Human
uggagcugaauuuuuggcauc

SEQ ID NO: 391616 - RNA, 22 nt, Human
ccuggagcuuuuccauccugga

SEQ ID NO: 391617 - RNA, 20 nt, Human
caggcagaggaugcugacca

SEQ ID NO: 391618 - RNA, 22 nt, Human
uggccuggcagagcaaggccug

SEQ ID NO: 391619 - RNA, 22 nt, Human
uaaagguaacaugaacugcuuu

SEQ ID NO: 391620 - RNA, 22 nt, Human
ccacuguuuuucaguuaacuuu

SEQ ID NO: 391621 - RNA, 22 nt, Human
uguuccauaaguggugcuuugu

SEQ ID NO: 391622 - RNA, 22 nt, Human
uugcaucuaccauaucaaagau

SEQ ID NO: 391623 - RNA, 19 nt, Human
cccaggagcaguauugaug

SEQ ID NO: 391624 - RNA, 22 nt, Human
uccugagggcgauucagcaggu

SEQ ID NO: 391625 - RNA, 22 nt, Human
agcacagaguugcagagagcgu

SEQ ID NO: 391626 - RNA, 22 nt, Human
cuacauuuuaauaagcugcuua

SEQ ID NO: 391627 - RNA, 22 nt, Human
ccagcucuuggugcacuuacau

SEQ ID NO: 391628 - RNA, 22 nt, Human
cagaggccucacuuccagccag

SEQ ID NO: 391629 - RNA, 22 nt, Human
uagauauaucugucauacuggu

SEQ ID NO: 391630 - RNA, 22 nt, Human
acaguacauaauccugagucug

SEQ ID NO: 391631 - RNA, 22 nt, Human
ucuauaaaugcagauaugugug

SEQ ID NO: 391632 - RNA, 22 nt, Human
guacauuuuacuuuguuugaau

SEQ ID NO: 391633 - RNA, 22 nt, Human
cugcuuuggcucagugacauca

SEQ ID NO: 391634 - RNA, 22 nt, Human
ugcaugcagcuggugauaagaa

SEQ ID NO: 391635 - RNA, 22 nt, Human
gccaggcagcagcgaggauggu

SEQ ID NO: 391636 - RNA, 22 nt, Human
uguuacuuaucucacgugaugc

SEQ ID NO: 391637 - RNA, 22 nt, Human
ccagguaggagagagggauccu

SEQ ID NO: 391638 - RNA, 22 nt, Human
ucagauggguuuugaaggaugu

SEQ ID NO: 391639 - RNA, 22 nt, Human
caaagguaaagaucugcugugg

SEQ ID NO: 391640 - RNA, 22 nt, Human
gccaguggcuugccaggcagga

SEQ ID NO: 391641 - RNA, 22 nt, Human
uucagagacagcaaccaggaca

SEQ ID NO: 391642 - RNA, 22 nt, Human
ggcagcagcaagguuggagcug

SEQ ID NO: 391643 - RNA, 19 nt, Human
ggcuccuguggcugcagcc

SEQ ID NO: 391644 - RNA, 22 nt, Human
ugucucugccagcuagcagaau

SEQ ID NO: 391645 - RNA, 21 nt, Human
gggugcuguggucaugcagga

SEQ ID NO: 391646 - RNA, 22 nt, Human
ugcuuuauaacuuaguuuaugg

SEQ ID NO: 391647 - RNA, 22 nt, Human
gaggcugguucugaaguacugu

SEQ ID NO: 391648 - RNA, 22 nt, Human
cuguucacacacuuguacucuc

SEQ ID NO: 391649 - RNA, 19 nt, Human
ccauggcaaugaucugaug

SEQ ID NO: 391650 - RNA, 22 nt, Human
ucaagcaucuuggucuacgauc

SEQ ID NO: 391651 - RNA, 22 nt, Human
cuggccugaggccgccuucaga

SEQ ID NO: 391652 - RNA, 22 nt, Human
ugaaacaaugugaaguugcuga

SEQ ID NO: 391653 - RNA, 22 nt, Human
cccugggcaagcccuauuuucc

SEQ ID NO: 391654 - RNA, 22 nt, Human
agggaggaccaaugugugguua

SEQ ID NO: 391655 - RNA, 22 nt, Human
acagcagcuugcgugucugguc

SEQ ID NO: 391656 - RNA, 23 nt, Human
cccugcagucagggugagauggu

SEQ ID NO: 391657 - RNA, 22 nt, Human
cagcucugugcaggccugggga

SEQ ID NO: 391658 - RNA, 21 nt, Human
ugugucacuaacuagaggcua

SEQ ID NO: 391659 - RNA, 22 nt, Human
aggcagcuucugauuagcagcg

SEQ ID NO: 391660 - RNA, 18 nt, Human
uggagcagguaggcauga

SEQ ID NO: 391661 - RNA, 22 nt, Human
caucagaaagaguccuggacuu

SEQ ID NO: 391662 - RNA, 21 nt, Human
aggcagccagucaugcucccu

SEQ ID NO: 391663 - RNA, 22 nt, Human
uagcagaagaacaacaugaucu

SEQ ID NO: 391664 - RNA, 22 nt, Human
cacccaguugacuacaaagggg

SEQ ID NO: 391665 - RNA, 22 nt, Human
cuggcccagucucagaguguca

SEQ ID NO: 391666 - RNA, 22 nt, Human
gcaccaggaggcccuucucauc

SEQ ID NO: 391667 - RNA, 22 nt, Human
ggugcagugguguggcaaaggg

SEQ ID NO: 391668 - RNA, 22 nt, Human
acauuuuuauucaucaaagcag

SEQ ID NO: 391669 - RNA, 17 nt, Human
acaggcagaucaccuga

SEQ ID NO: 391670 - RNA, 22 nt, Human
aaggcagcaccgccuccugaaa

SEQ ID NO: 391671 - RNA, 22 nt, Human
uggauuaguuaagaaauguuag

SEQ ID NO: 391672 - RNA, 22 nt, Human
gaaaaugugucaucccuacugu

SEQ ID NO: 391673 - RNA, 22 nt, Human
auuuauguaucuguguagauca

SEQ ID NO: 391674 - RNA, 22 nt, Human
ucugaggcauacccaggccccc

SEQ ID NO: 391675 - RNA, 22 nt, Human
auggcagagaaagcgagccaca

SEQ ID NO: 391676 - RNA, 22 nt, Human
uggcugagagucauccugugug

SEQ ID NO: 391677 - RNA, 22 nt, Human
cuggcuuuaacccuacaaaccu

SEQ ID NO: 391678 - RNA, 22 nt, Human
uccauuuucaucucauguauaa

SEQ ID NO: 391679 - RNA, 22 nt, Human
cggcuggguagaggugccgggu

SEQ ID NO: 391680 - RNA, 22 nt, Human
uucuucuucuggcugcaccugg

SEQ ID NO: 391681 - RNA, 22 nt, Human
uguccucacaggaaugaacuuu

SEQ ID NO: 391682 - RNA, 22 nt, Human
ccagcagaggggcggagugcag

SEQ ID NO: 391683 - RNA, 22 nt, Human
ggcuucucucccccagcuccac

SEQ ID NO: 391684 - RNA, 22 nt, Human
cagccugcuagggcaaugccuu

SEQ ID NO: 391685 - RNA, 22 nt, Human
uuuguuuucaaugugucauuca

SEQ ID NO: 391686 - RNA, 22 nt, Human
ugguaaaguguacugaauauga

SEQ ID NO: 391687 - RNA, 22 nt, Human
ucugcugugggucuauauuuua

SEQ ID NO: 391688 - RNA, 22 nt, Human
aagggcugcuguagaagcagag

SEQ ID NO: 391689 - RNA, 22 nt, Human
acugugugaaacaucaaugugu

SEQ ID NO: 391690 - RNA, 22 nt, Human
gcugucugucucugucccacca

SEQ ID NO: 391691 - RNA, 22 nt, Human
cccagcaucccagugggcagca

SEQ ID NO: 391692 - RNA, 22 nt, Human
gcagcuuuaaaggaggcucuga

SEQ ID NO: 391693 - RNA, 22 nt, Human
gcuugcuggugccugcaggcuc

SEQ ID NO: 391694 - RNA, 22 nt, Human
guuuauaaggcccaauauuucu

SEQ ID NO: 391695 - RNA, 22 nt, Human
ccugccugucaucgccugcgcc

SEQ ID NO: 391696 - RNA, 22 nt, Human
ucccacacagcccgcucaccgg

SEQ ID NO: 391697 - RNA, 22 nt, Human
uuuggaaaguugucacuuuaga

SEQ ID NO: 391698 - RNA, 22 nt, Human
cucuggaggccuaaggaagugg

SEQ ID NO: 391699 - RNA, 22 nt, Human
gcugaaggaggcucugguacua

SEQ ID NO: 391700 - RNA, 22 nt, Human
ucccagaggaaauggcagcuga

SEQ ID NO: 391701 - RNA, 22 nt, Human
agccaggcgcaguggcuuaugc

SEQ ID NO: 391702 - RNA, 22 nt, Human
caggacagguguucuagaucag

SEQ ID NO: 391703 - RNA, 22 nt, Human
ugcuaaauaaguggaauagaca

SEQ ID NO: 391704 - RNA, 22 nt, Human
uagaaacauauaggauggcagg

SEQ ID NO: 391705 - RNA, 22 nt, Human
cagcucucacacccuccuccca

SEQ ID NO: 391706 - RNA, 22 nt, Human
agcaccugcacaguggaggaaa

SEQ ID NO: 391707 - RNA, 22 nt, Human
uugccaggagcucaucugaggg

SEQ ID NO: 391708 - RNA, 22 nt, Human
auguaacuucugugaaucugac

SEQ ID NO: 391709 - RNA, 22 nt, Human
cucccagggucuaggcugcugg

SEQ ID NO: 391710 - RNA, 22 nt, Human
ggggcagauggaacagagcaca

SEQ ID NO: 391711 - RNA, 22 nt, Human
cagggcucuuccggagcaggga

SEQ ID NO: 391712 - RNA, 22 nt, Human
ugccagcaguagcaguaggcca

SEQ ID NO: 391713 - RNA, 19 nt, Human
aggccugggguuuugcacu

SEQ ID NO: 391714 - RNA, 22 nt, Human
cagggccucauccucagagauu

SEQ ID NO: 391715 - RNA, 22 nt, Human
uuucacaauuuuaaggagcaaa

SEQ ID NO: 391716 - RNA, 22 nt, Human
gagucaccacugugauagucga

SEQ ID NO: 391717 - RNA, 22 nt, Human
gcaggcugggguagccccacuu

SEQ ID NO: 391718 - RNA, 22 nt, Human
aaacugugcuucccaaaugccc

SEQ ID NO: 391719 - RNA, 22 nt, Human
ugcagaagaauguaggcauaag

SEQ ID NO: 391720 - RNA, 22 nt, Human
ugauuucccuguagccucugaa

SEQ ID NO: 391721 - RNA, 19 nt, Human
ggcugcugguuacagaggc

SEQ ID NO: 391722 - RNA, 22 nt, Human
uucucagagcucacuguaguaa

SEQ ID NO: 391723 - RNA, 22 nt, Human
aggcacugaagaacucuuuuug

SEQ ID NO: 391724 - RNA, 22 nt, Human
agucucuuuaaucacagugucu

SEQ ID NO: 391725 - RNA, 22 nt, Human
gcagagugggagcccagggcug

SEQ ID NO: 391726 - RNA, 22 nt, Human
agcugccugcuuaugagcucca

SEQ ID NO: 391727 - RNA, 22 nt, Human
ucucuucuugauuuucacugga

SEQ ID NO: 391728 - RNA, 22 nt, Human
augcacagacccaaaggccauc

SEQ ID NO: 391729 - RNA, 20 nt, Human
aucagcaacugccacucagu

SEQ ID NO: 391730 - RNA, 22 nt, Human
uggagccagagcgcagccuggg

SEQ ID NO: 391731 - RNA, 22 nt, Human
gggcuggcucugucuagaaagg

SEQ ID NO: 391732 - RNA, 22 nt, Human
ucccugcagacguccugcgggu

SEQ ID NO: 391733 - RNA, 22 nt, Human
cagagcaguccuugucaaucag

SEQ ID NO: 391734 - RNA, 22 nt, Human
agucucagggccacccggggaa

SEQ ID NO: 391735 - RNA, 22 nt, Human
ucugagccaauuucugugucca

SEQ ID NO: 391736 - RNA, 22 nt, Human
cccugcagcauucucuaacugg

SEQ ID NO: 391737 - RNA, 22 nt, Human
acccuggguucccgcagcacca

SEQ ID NO: 391738 - RNA, 22 nt, Human
uguguaaauggcaucucucagc

SEQ ID NO: 391739 - RNA, 22 nt, Human
gagugucugaauuagagcacaa

SEQ ID NO: 391740 - RNA, 22 nt, Human
uuagauaacaguagaauaucaa

SEQ ID NO: 391741 - RNA, 22 nt, Human
cuucuuuccuuccuccaguggc

SEQ ID NO: 391742 - RNA, 22 nt, Human
cuguucaugcugauucuguaug

SEQ ID NO: 391743 - RNA, 22 nt, Human
acaacauuauacauagaaagcu

SEQ ID NO: 391744 - RNA, 22 nt, Human
ucaaauaccagcaauuucaugu

SEQ ID NO: 391745 - RNA, 22 nt, Human
aggaggccccuccuggguugcu

SEQ ID NO: 391746 - RNA, 22 nt, Human
ggagcugggguuggcaucuucc

SEQ ID NO: 391747 - RNA, 21 nt, Human
uggcucugaaagagugcugca

SEQ ID NO: 391748 - RNA, 22 nt, Human
ucugcagguguuggaaggguca

SEQ ID NO: 391749 - RNA, 22 nt, Human
gaucuguuauaaucucuuuuau

SEQ ID NO: 391750 - RNA, 22 nt, Human
aaauggauggaauugacauuua

SEQ ID NO: 391751 - RNA, 22 nt, Human
ggagccugugggaugagaugug

SEQ ID NO: 391752 - RNA, 22 nt, Human
agauacaucauuuauaccuuca

SEQ ID NO: 391753 - RNA, 22 nt, Human
ggcacagggaggcccuggugug

SEQ ID NO: 391754 - RNA, 22 nt, Human
cugucugcuagaacaucuauac

SEQ ID NO: 391755 - RNA, 22 nt, Human
gagucgagcagaaagccgucgg

SEQ ID NO: 391756 - RNA, 22 nt, Human
gaggcucacuuucauccucuuc

SEQ ID NO: 391757 - RNA, 22 nt, Human
aggcagcuggaaaacuccaggc

SEQ ID NO: 391758 - RNA, 22 nt, Human
caguuucuguuuuaaauagcag

SEQ ID NO: 391759 - RNA, 21 nt, Human
uuugaaagcccuauguuuuca

SEQ ID NO: 391760 - RNA, 22 nt, Human
cccagccagccucuucccauau

SEQ ID NO: 391761 - RNA, 22 nt, Human
uugcagagcaguaggaauauag

SEQ ID NO: 391762 - RNA, 22 nt, Human
gaggggcagagguagagaacaa

SEQ ID NO: 391763 - RNA, 22 nt, Human
cauacuuuugcccugacauucu

SEQ ID NO: 391764 - RNA, 20 nt, Human
gagccugggaagucuaaggu

SEQ ID NO: 391765 - RNA, 22 nt, Human
cagcuuccauaagagauggaga

SEQ ID NO: 391766 - RNA, 20 nt, Human
gagggcaggcacccauuuca

SEQ ID NO: 391767 - RNA, 19 nt, Human
ugcaagugucuuggacaag

SEQ ID NO: 391768 - RNA, 22 nt, Human
cauaauuacugauaugcugauu

SEQ ID NO: 391769 - RNA, 22 nt, Human
auugcaccuuggguuuugaaag

SEQ ID NO: 391770 - RNA, 18 nt, Human
aauuuccauaugaauugc

SEQ ID NO: 391771 - RNA, 22 nt, Human
agguggaacguucaggugcuag

SEQ ID NO: 391772 - RNA, 22 nt, Human
gccuucaguagugucagcugua

SEQ ID NO: 391773 - RNA, 22 nt, Human
gagucaccuuggccgcuguccc

SEQ ID NO: 391774 - RNA, 22 nt, Human
cugucuguucagauucauuacu

SEQ ID NO: 391775 - RNA, 22 nt, Human
auuuuccaaaauaauuguuacu

SEQ ID NO: 391776 - RNA, 22 nt, Human
agccuggaagaaccugaagucu

SEQ ID NO: 391777 - RNA, 22 nt, Human
ccaggcaucacgggcauguggc

SEQ ID NO: 391778 - RNA, 22 nt, Human
ggcuuuauuucacuguaccaua

SEQ ID NO: 391779 - RNA, 22 nt, Human
uccaggagacacccuugugugu

SEQ ID NO: 391780 - RNA, 22 nt, Human
cuguacaggugaggagggggcu

SEQ ID NO: 391781 - RNA, 22 nt, Human
ucacaggguguacaucaccuau

SEQ ID NO: 391782 - RNA, 22 nt, Human
uagcaucuguucuuucauuaaa

SEQ ID NO: 391783 - RNA, 22 nt, Human
agggagaaaauuggaugcacaa

SEQ ID NO: 391784 - RNA, 22 nt, Human
ggcugcagaaguacuuccggau

SEQ ID NO: 391785 - RNA, 22 nt, Human
uuucacaaaugucuuuaacuug

SEQ ID NO: 391786 - RNA, 22 nt, Human
ccagcugguguuccuuaggacc

SEQ ID NO: 391787 - RNA, 22 nt, Human
uuuaaagagaaugugaaggagu

SEQ ID NO: 391788 - RNA, 22 nt, Human
uccagggccaagucauggaacc

SEQ ID NO: 391789 - RNA, 22 nt, Human
ugaggcucagagcaccugcucc

SEQ ID NO: 391790 - RNA, 22 nt, Human
agugaaauggaugcugcuacug

SEQ ID NO: 391791 - RNA, 22 nt, Human
uagggacaaagagcugaggccu

SEQ ID NO: 391792 - RNA, 22 nt, Human
caguggcacccacgggcugggc

SEQ ID NO: 391793 - RNA, 22 nt, Human
ucucuucuaauuuucccgagua

SEQ ID NO: 391794 - RNA, 22 nt, Human
ugggaccaagucauuucuuuag

SEQ ID NO: 391795 - RNA, 22 nt, Human
ggaggggcagccauggaacucc

SEQ ID NO: 391796 - RNA, 22 nt, Human
uucagagagaaaccagugggaa

SEQ ID NO: 391797 - RNA, 22 nt, Human
gagauauguuagaaagcuauug

SEQ ID NO: 391798 - RNA, 22 nt, Human
acaugcuuugauguauuuugca

SEQ ID NO: 391799 - RNA, 22 nt, Human
uggaaagcgaggaguuggcauu

SEQ ID NO: 391800 - RNA, 22 nt, Human
uucauuaauucauucagugacu

SEQ ID NO: 391801 - RNA, 20 nt, Human
agcagcauuguucuagagca

SEQ ID NO: 391802 - RNA, 23 nt, Human
cagggcccugcucaauuucucca

SEQ ID NO: 391803 - RNA, 22 nt, Human
agagagcauugaggaaaucuuc

SEQ ID NO: 391804 - RNA, 22 nt, Human
cugugucccuugucccagagcc

SEQ ID NO: 391805 - RNA, 22 nt, Human
aagggagacaguugugugagga

SEQ ID NO: 391806 - RNA, 22 nt, Human
cucucugcuguauccuuaggcu

SEQ ID NO: 391807 - RNA, 22 nt, Human
agagcaauggcauccagcugau

SEQ ID NO: 391808 - RNA, 22 nt, Human
uggcagaaguacacaagcaugc

SEQ ID NO: 391809 - RNA, 22 nt, Human
cagaaacauguauaaaguugua

SEQ ID NO: 391810 - RNA, 22 nt, Human
uuugcagugauucuugcaguga

SEQ ID NO: 391811 - RNA, 22 nt, Human
ucugggcuugguuagggcuguu

SEQ ID NO: 391812 - RNA, 22 nt, Human
aagggcuccauccuuauaaaug

SEQ ID NO: 391813 - RNA, 22 nt, Human
cagggcuggauuucauuucuag

SEQ ID NO: 391814 - RNA, 22 nt, Human
aguucuucauaaccuuacugug

SEQ ID NO: 391815 - RNA, 22 nt, Human
aggugcagcugguggagucugg

SEQ ID NO: 391816 - RNA, 21 nt, Human
ccuggcuucagggugcacugg

SEQ ID NO: 391817 - RNA, 22 nt, Human
agcuuuauggugccucacuuga

SEQ ID NO: 391818 - RNA, 22 nt, Human
uugugucugggggagugacauc

SEQ ID NO: 391819 - RNA, 22 nt, Human
ugggcagacuaaggucaaagcu

SEQ ID NO: 391820 - RNA, 22 nt, Human
augcuguguggccaccuccaug

SEQ ID NO: 391821 - RNA, 22 nt, Human
aguuuccaaagcauguucacac

SEQ ID NO: 391822 - RNA, 22 nt, Human
agugauggugagugagaagcuc

SEQ ID NO: 391823 - RNA, 22 nt, Human
uauucacagcugccgcacucag

SEQ ID NO: 391824 - RNA, 22 nt, Human
auuuaugacuggugaauagaac

SEQ ID NO: 391825 - RNA, 22 nt, Human
cucugcagaggcccaaggcuga

SEQ ID NO: 391826 - RNA, 22 nt, Human
gcugagcugaggcagggcuggg

SEQ ID NO: 391827 - RNA, 22 nt, Human
gcucuguguugucagaggcacc

SEQ ID NO: 391828 - RNA, 19 nt, Human
cagaacagaggucauggcc

SEQ ID NO: 391829 - RNA, 22 nt, Human
ucaucacauguguagucauccc

SEQ ID NO: 391830 - RNA, 22 nt, Human
agagccccugguggagugagaa

SEQ ID NO: 391831 - RNA, 22 nt, Human
ccuggaaggcaggcauggauug

SEQ ID NO: 391832 - RNA, 22 nt, Human
ucugagagcuguagaagccuau

SEQ ID NO: 391833 - RNA, 23 nt, Human
guggccuccccggaaugccucgc

SEQ ID NO: 391834 - RNA, 20 nt, Human
caggccagagguuugauggc

SEQ ID NO: 391835 - RNA, 22 nt, Human
agggcugcugaggaagccuugc

SEQ ID NO: 391836 - RNA, 22 nt, Human
ggcgugggaaguggggcuucug

SEQ ID NO: 391837 - RNA, 23 nt, Human
cccagcuuucccacugccgagag

SEQ ID NO: 391838 - RNA, 22 nt, Human
ccacagccauuccagggaggcu

SEQ ID NO: 391839 - RNA, 22 nt, Human
ccuggcucucugcagauccugg

SEQ ID NO: 391840 - RNA, 22 nt, Human
uggaagcaucacuucuugccug

SEQ ID NO: 391841 - RNA, 22 nt, Human
auuuucucucaaaccuuaaaau

SEQ ID NO: 391842 - RNA, 22 nt, Human
auugucuuuccacugagaaguu

SEQ ID NO: 391843 - RNA, 22 nt, Human
ucuuuggaucccaacuggcugg

SEQ ID NO: 391844 - RNA, 22 nt, Human
agggcuggagccacagcuggga

SEQ ID NO: 391845 - RNA, 22 nt, Human
ucccagaggcaguugguaacuu

SEQ ID NO: 391846 - RNA, 22 nt, Human
aggcugagucgggaggaucacu

SEQ ID NO: 391847 - RNA, 22 nt, Human
gaagaacaagcagugcuuuccu

SEQ ID NO: 391848 - RNA, 22 nt, Human
agccuccaguagcugaagagac

SEQ ID NO: 391849 - RNA, 22 nt, Human
ucucaggagccacagcgggagu

SEQ ID NO: 391850 - RNA, 22 nt, Human
uaauccaggguauucuaguuuc

SEQ ID NO: 391851 - RNA, 22 nt, Human
guagggacuguucucaccugag

SEQ ID NO: 391852 - RNA, 16 nt, Human
ccacagggcaaggggc

SEQ ID NO: 391853 - RNA, 22 nt, Human
ucagccuuguggcccugcucca

SEQ ID NO: 391854 - RNA, 22 nt, Human
aaagggagcauggcugcaggga

SEQ ID NO: 391855 - RNA, 23 nt, Human
uugcauguagcccaugaguaacu

SEQ ID NO: 391856 - RNA, 22 nt, Human
aggcagcaugcucugcuucuac

SEQ ID NO: 391857 - RNA, 22 nt, Human
uuuauuuauaagccacuugcug

SEQ ID NO: 391858 - RNA, 22 nt, Human
uucagggagagcgggacgggug

SEQ ID NO: 391859 - RNA, 22 nt, Human
cccaggcacauccacucuguga

SEQ ID NO: 391860 - RNA, 22 nt, Human
gaacuuuaaaacaaaguacagu

SEQ ID NO: 391861 - RNA, 22 nt, Human
aucaguuuaacugucaagagcc

SEQ ID NO: 391862 - RNA, 22 nt, Human
guccucagggaauguggcgggu

SEQ ID NO: 391863 - RNA, 22 nt, Human
caguggguccuaaguacaguuc

SEQ ID NO: 391864 - RNA, 21 nt, Human
cagugcucaaucugacagugg

SEQ ID NO: 391865 - RNA, 22 nt, Human
ccuguucaagguauuaauuauc

SEQ ID NO: 391866 - RNA, 22 nt, Human
agcugcugagccaggcugaugu

SEQ ID NO: 391867 - RNA, 22 nt, Human
caucagcaggcaacacucuugg

SEQ ID NO: 391868 - RNA, 22 nt, Human
augguuuguguggcccagauga

SEQ ID NO: 391869 - RNA, 22 nt, Human
gaugauuuuaugucuugucauu

SEQ ID NO: 391870 - RNA, 22 nt, Human
uagaaacagaaaacuguaauag

SEQ ID NO: 391871 - RNA, 22 nt, Human
caccuagggcaucccugcccca

SEQ ID NO: 391872 - RNA, 22 nt, Human
ugggugaggaugaugaggcagc

SEQ ID NO: 391873 - RNA, 22 nt, Human
uggggacacagagccaaacuau

SEQ ID NO: 391874 - RNA, 22 nt, Human
ucugauaacucuggccccaggc

SEQ ID NO: 391875 - RNA, 22 nt, Human
ccccuuccgucucuugaguguc

SEQ ID NO: 391876 - RNA, 22 nt, Human
cagugguuauacuuacuguuuc

SEQ ID NO: 391877 - RNA, 22 nt, Human
auuuuccagccuuucuagaacu

SEQ ID NO: 391878 - RNA, 22 nt, Human
aagcagcuuaaauuagagccug

SEQ ID NO: 391879 - RNA, 22 nt, Human
caggguggcacaucacagcauu

SEQ ID NO: 391880 - RNA, 22 nt, Human
acagcuuuguguuaaugggaag

SEQ ID NO: 391881 - RNA, 22 nt, Human
ggugaagggugucauggcauuu

SEQ ID NO: 391882 - RNA, 22 nt, Human
uggagaauucuauguugagggg

SEQ ID NO: 391883 - RNA, 22 nt, Human
uaaacauggcuguuucaguuau

SEQ ID NO: 391884 - RNA, 22 nt, Human
uugggcucaggaguuugagacc

SEQ ID NO: 391885 - RNA, 22 nt, Human
ccugcuguucuguuuagugaac

SEQ ID NO: 391886 - RNA, 17 nt, Human
gcccaggaaggacggcc

SEQ ID NO: 391887 - RNA, 22 nt, Human
acacauauauacauauuugugc

SEQ ID NO: 391888 - RNA, 22 nt, Human
gauuuauugucccuguccugcu

SEQ ID NO: 391889 - RNA, 23 nt, Human
acacaaggguaacugccagccau

SEQ ID NO: 391890 - RNA, 22 nt, Human
aagagcaucaaugacucgcagu

SEQ ID NO: 391891 - RNA, 22 nt, Human
cugagcucuaaugucagccuug

SEQ ID NO: 391892 - RNA, 22 nt, Human
ucucaggccccugaguuucucu

SEQ ID NO: 391893 - RNA, 22 nt, Human
ccugggcagguguggcuucccc

SEQ ID NO: 391894 - RNA, 22 nt, Human
gugcccugaguggguaggagag

SEQ ID NO: 391895 - RNA, 23 nt, Human
aaagacugcugagaauuuuagga

SEQ ID NO: 391896 - RNA, 22 nt, Human
ugcugucuguuuacuggcuaua

SEQ ID NO: 391897 - RNA, 22 nt, Human
aggagguggccugagcgugccc

SEQ ID NO: 391898 - RNA, 22 nt, Human
agaaguuaccacauacuucucu

SEQ ID NO: 391899 - RNA, 22 nt, Human
ucacaagacagaaaacauuuag

SEQ ID NO: 391900 - RNA, 22 nt, Human
gcugcugugugggagacaggcg

SEQ ID NO: 391901 - RNA, 19 nt, Human
uccuucagucagaucuggg

SEQ ID NO: 391902 - RNA, 22 nt, Human
cuuucagagguuacucaggaaa

SEQ ID NO: 391903 - RNA, 22 nt, Human
cuuuccaagaaugcagauaccu

SEQ ID NO: 391904 - RNA, 22 nt, Human
auagaauagcauagaaaauuga

SEQ ID NO: 391905 - RNA, 23 nt, Human
acaacuuuacagauacauuuugu

SEQ ID NO: 391906 - RNA, 22 nt, Human
aaucaguucuacaucuuaucca

SEQ ID NO: 391907 - RNA, 22 nt, Human
caggucccgccccgggcugacc

SEQ ID NO: 391908 - RNA, 22 nt, Human
caguccuugauccaauaguggg

SEQ ID NO: 391909 - RNA, 19 nt, Human
agugcagggagcacccuca

SEQ ID NO: 391910 - RNA, 22 nt, Human
cucuccucugaaguggugaccc

SEQ ID NO: 391911 - RNA, 23 nt, Human
ucugcucugaaguucggcugagc

SEQ ID NO: 391912 - RNA, 22 nt, Human
ugugaagcuggauccuggagcu

SEQ ID NO: 391913 - RNA, 19 nt, Human
ugucuuaauuaacucagag

SEQ ID NO: 391914 - RNA, 18 nt, Human
aaguccuuccuuugcuuu

SEQ ID NO: 391915 - RNA, 22 nt, Human
ucuccucugcgcggcagugccc

SEQ ID NO: 391916 - RNA, 22 nt, Human
cggcagggcuccaugcauuucu

SEQ ID NO: 391917 - RNA, 22 nt, Human
gaaaggcaguacagcugagccu

SEQ ID NO: 391918 - RNA, 22 nt, Human
uacauucaacaugucacuaugu

SEQ ID NO: 391919 - RNA, 20 nt, Human
cuuccacacaagaagcacag

SEQ ID NO: 391920 - RNA, 22 nt, Human
aguguguguuugggcgguuuau

SEQ ID NO: 391921 - RNA, 22 nt, Human
gcagaggccuagguggaaggcc

SEQ ID NO: 391922 - RNA, 22 nt, Human
gucucccacuuucuggccucuu

SEQ ID NO: 391923 - RNA, 22 nt, Human
uguguacagcaggauuucucaa

SEQ ID NO: 391924 - RNA, 22 nt, Human
agguuuauguuuggugcaggag

SEQ ID NO: 391925 - RNA, 22 nt, Human
auguaguauuuggaaauguaaa

SEQ ID NO: 391926 - RNA, 22 nt, Human
uggcucuguucgccaucaggag

SEQ ID NO: 391927 - RNA, 22 nt, Human
caguccuuccuugccccuuggg

SEQ ID NO: 391928 - RNA, 23 nt, Human
gccugggacucaggaggagcuca

SEQ ID NO: 391929 - RNA, 22 nt, Human
cagugguauuugagagaaugga

SEQ ID NO: 391930 - RNA, 22 nt, Human
agaggagcugggaggcccucgu

SEQ ID NO: 391931 - RNA, 22 nt, Human
ccugccaggccagugagcuucc

SEQ ID NO: 391932 - RNA, 21 nt, Human
acagaguaguugaaacagaga

SEQ ID NO: 391933 - RNA, 22 nt, Human
cuugaaucuggcuuugccacuu

SEQ ID NO: 391934 - RNA, 22 nt, Human
ggaggccaaggcgggcggauca

SEQ ID NO: 391935 - RNA, 23 nt, Human
ccagcuccgugagccucgggcuc

SEQ ID NO: 391936 - RNA, 22 nt, Human
gucugcugcagagcauggcuuu

SEQ ID NO: 391937 - RNA, 22 nt, Human
cagagcccagggccuacguccc

SEQ ID NO: 391938 - RNA, 22 nt, Human
gacaguuuuuaauccuuucaug

SEQ ID NO: 391939 - RNA, 19 nt, Human
caguccuuuccgcuuucuc

SEQ ID NO: 391940 - RNA, 22 nt, Human
cugguucauccccuuccaggaa

SEQ ID NO: 391941 - RNA, 22 nt, Human
aucuagauuagguauaagagcu

SEQ ID NO: 391942 - RNA, 22 nt, Human
uaaaugcaagugcuccugggag

SEQ ID NO: 391943 - RNA, 22 nt, Human
ccaaaauguuugaaugcaugug

SEQ ID NO: 391944 - RNA, 22 nt, Human
agucucugcacaguaagaagca

SEQ ID NO: 391945 - RNA, 22 nt, Human
uucuuucagaacacaagugauu

SEQ ID NO: 391946 - RNA, 19 nt, Human
augauggucccauucaccu

SEQ ID NO: 391947 - RNA, 22 nt, Human
uuugaaguccaucuggcccagu

SEQ ID NO: 391948 - RNA, 22 nt, Human
uuccuuaggcuguuugcagugc

SEQ ID NO: 391949 - RNA, 22 nt, Human
uucaauucaauucuaaauauau

SEQ ID NO: 391950 - RNA, 21 nt, Human
ucagcagcaucugccuagagu

SEQ ID NO: 391951 - RNA, 22 nt, Human
uccaguucuaggucacucucug

SEQ ID NO: 391952 - RNA, 22 nt, Human
cagucaccuugaggacucagac

SEQ ID NO: 391953 - RNA, 22 nt, Human
acaguuaucuuugaaauagaga

SEQ ID NO: 391954 - RNA, 22 nt, Human
ccaggccuuucuucuuggucug

SEQ ID NO: 391955 - RNA, 22 nt, Human
ugaaauaauaucuggaucaauc

SEQ ID NO: 391956 - RNA, 22 nt, Human
guuaggcagugugguauagcag

SEQ ID NO: 391957 - RNA, 19 nt, Human
cccuggcaggcaagccugg

SEQ ID NO: 391958 - RNA, 22 nt, Human
gcaccuggcugcccagguggag

SEQ ID NO: 391959 - RNA, 22 nt, Human
aauuucagaacccaaauuagcg

SEQ ID NO: 391960 - RNA, 22 nt, Human
cuggcucaguucuugguuuuca

SEQ ID NO: 391961 - RNA, 22 nt, Human
uccucugccaaagggaguugcc

SEQ ID NO: 391962 - RNA, 22 nt, Human
uauggcuuuuaacugucguaug

SEQ ID NO: 391963 - RNA, 22 nt, Human
cugccuguuagucuagcaguua

SEQ ID NO: 391964 - RNA, 22 nt, Human
ucacugaagacugggcucuaaa

SEQ ID NO: 391965 - RNA, 22 nt, Human
gccugcaggcuguaguuuguga

SEQ ID NO: 391966 - RNA, 22 nt, Human
aguauuucugcucaugaaagag

SEQ ID NO: 391967 - RNA, 22 nt, Human
ucaucaaagucaaagaaugacu

SEQ ID NO: 391968 - RNA, 22 nt, Human
auucuucaccugagucagucua

SEQ ID NO: 391969 - RNA, 22 nt, Human
ggagagagaugccgccuugcuc

SEQ ID NO: 391970 - RNA, 22 nt, Human
agaggccaugcuagaggccugg

SEQ ID NO: 391971 - RNA, 22 nt, Human
uucacagagagaacucaaacca

SEQ ID NO: 391972 - RNA, 22 nt, Human
ugaucugaaggacaugggaccc

SEQ ID NO: 391973 - RNA, 22 nt, Human
gcuuuuucaaaugaaagcuggu

SEQ ID NO: 391974 - RNA, 22 nt, Human
aaauccuaagcagaggaauuua

SEQ ID NO: 391975 - RNA, 22 nt, Human
cagugagggaagaucucagcac

SEQ ID NO: 391976 - RNA, 21 nt, Human
gcaaggcuuuuguguuuccca

SEQ ID NO: 391977 - RNA, 22 nt, Human
gaguggagaucgugccacugca

SEQ ID NO: 391978 - RNA, 20 nt, Human
auugucagccuucagaggag

SEQ ID NO: 391979 - RNA, 20 nt, Human
cucugcagcaaggccugggu

SEQ ID NO: 391980 - RNA, 22 nt, Human
aagggcagcuauuaucgucauc

SEQ ID NO: 391981 - RNA, 22 nt, Human
gaggccagggaugcaaugagag

SEQ ID NO: 391982 - RNA, 23 nt, Human
gagggcucugagugcuugggcca

SEQ ID NO: 391983 - RNA, 22 nt, Human
ucucuggaguauaaccagggau

SEQ ID NO: 391984 - RNA, 22 nt, Human
ccucagaugucuuaaggcacug

SEQ ID NO: 391985 - RNA, 22 nt, Human
uggcauuuuguucaguauaugg

SEQ ID NO: 391986 - RNA, 22 nt, Human
uccucuggcccagcugccucug

SEQ ID NO: 391987 - RNA, 22 nt, Human
auuguaaguagaaauguuaugg

SEQ ID NO: 391988 - RNA, 22 nt, Human
acccaggacucucuuccaguag

SEQ ID NO: 391989 - RNA, 22 nt, Human
aggcacugaaagguggccagag

SEQ ID NO: 391990 - RNA, 22 nt, Human
agaggcaggagguugacuugag

SEQ ID NO: 391991 - RNA, 18 nt, Human
ccauuucaugauuauuac

SEQ ID NO: 391992 - RNA, 22 nt, Human
cugcuucuccaaaguaggacuu

SEQ ID NO: 391993 - RNA, 22 nt, Human
cccaagaucuuucgugcacuaa

SEQ ID NO: 391994 - RNA, 22 nt, Human
caguagcaggcacucagcacgu

SEQ ID NO: 391995 - RNA, 22 nt, Human
cagcagggaagcugugcuguuu

SEQ ID NO: 391996 - RNA, 22 nt, Human
gagugugggcacgggggccuug

SEQ ID NO: 391997 - RNA, 22 nt, Human
uggcccugcuaugauccugcaa

SEQ ID NO: 391998 - RNA, 22 nt, Human
gcucugucaacagcuagcugug

SEQ ID NO: 391999 - RNA, 22 nt, Human
ccuggcugucguuuugugaaau

SEQ ID NO: 392000 - RNA, 22 nt, Human
gccugccugaaggcuguaccag

SEQ ID NO: 392001 - RNA, 22 nt, Human
guugcacaguuccucaagcagg

SEQ ID NO: 392002 - RNA, 22 nt, Human
ucugaaagaagggcagucuuuu

SEQ ID NO: 392003 - RNA, 22 nt, Human
auggaaagggaagcaaggaaca

SEQ ID NO: 392004 - RNA, 22 nt, Human
cugucuccuccacugcauggga

SEQ ID NO: 392005 - RNA, 22 nt, Human
cugugccaggcccagcugacuu

SEQ ID NO: 392006 - RNA, 22 nt, Human
aaguaaaacacacaguccaccg

SEQ ID NO: 392007 - RNA, 23 nt, Human
gagagcugacugucaagacuguu

SEQ ID NO: 392008 - RNA, 22 nt, Human
uuguacuugccauagaacaaca

SEQ ID NO: 392009 - RNA, 22 nt, Human
aggccagcacgacagccgcagg

SEQ ID NO: 392010 - RNA, 22 nt, Human
ccagaucuaaguccaaaguacu

SEQ ID NO: 392011 - RNA, 22 nt, Human
ggcccagaauacuuuguaaaau

SEQ ID NO: 392012 - RNA, 22 nt, Human
ugaugggaggugcugcaggacc

SEQ ID NO: 392013 - RNA, 22 nt, Human
agugcauauaugaagaguauga

SEQ ID NO: 392014 - RNA, 22 nt, Human
cugaguccagggacagaggcgu

SEQ ID NO: 392015 - RNA, 22 nt, Human
ucuuuaauaucugccccagagc

SEQ ID NO: 392016 - RNA, 22 nt, Human
gcacagggcccugugcguaggu

SEQ ID NO: 392017 - RNA, 20 nt, Human
cugugccuaaaccuccgggu

SEQ ID NO: 392018 - RNA, 22 nt, Human
cgcuggccauagccuccugugu

SEQ ID NO: 392019 - RNA, 22 nt, Human
uugcuuccucgaggccagcgug

SEQ ID NO: 392020 - RNA, 22 nt, Human
ucucuggggauggaccugggag

SEQ ID NO: 392021 - RNA, 22 nt, Human
ccuguucaagggaugauugacc

SEQ ID NO: 392022 - RNA, 22 nt, Human
ugaguccaagagccagugggaa

SEQ ID NO: 392023 - RNA, 22 nt, Human
gcucagagcaucccagugaaug

SEQ ID NO: 392024 - RNA, 22 nt, Human
cacacuagucuauccauuagcu

SEQ ID NO: 392025 - RNA, 22 nt, Human
caaaguuuggcucucaugacau

SEQ ID NO: 392026 - RNA, 22 nt, Human
ugggagcaccuugagggcagaa

SEQ ID NO: 392027 - RNA, 22 nt, Human
aggccugaaggaagaugagcug

SEQ ID NO: 392028 - RNA, 22 nt, Human
uuaguuuucccaucuuuauggu

SEQ ID NO: 392029 - RNA, 22 nt, Human
uggaagcagugauucuugucug

SEQ ID NO: 392030 - RNA, 22 nt, Human
ucugccuuggcaaccacagcuu

SEQ ID NO: 392031 - RNA, 22 nt, Human
aguaaacacugucuuuauauau

SEQ ID NO: 392032 - RNA, 22 nt, Human
acagggcagcaacuuugugccu

SEQ ID NO: 392033 - RNA, 22 nt, Human
ccuccaggaacuugagagacac

SEQ ID NO: 392034 - RNA, 22 nt, Human
ucauucagguugggcaaguguc

SEQ ID NO: 392035 - RNA, 22 nt, Human
auuugcauaauagugauuugua

SEQ ID NO: 392036 - RNA, 22 nt, Human
uugcucuguaauaaucuggggu

SEQ ID NO: 392037 - RNA, 22 nt, Human
uuaaacagacaguaaaugaaac

SEQ ID NO: 392038 - RNA, 22 nt, Human
cagcuggguuuaguggggugug

SEQ ID NO: 392039 - RNA, 22 nt, Human
gggggacuggaccguccugggu

SEQ ID NO: 392040 - RNA, 22 nt, Human
gcccaggaaauaaaagugggcu

SEQ ID NO: 392041 - RNA, 23 nt, Human
cuguggcugaguccuguuggagu

SEQ ID NO: 392042 - RNA, 22 nt, Human
uccaggaggacugagggggcug

SEQ ID NO: 392043 - RNA, 22 nt, Human
aggaggcccuagagcucuagag

SEQ ID NO: 392044 - RNA, 22 nt, Human
aaaguucugggggagaagaacg

SEQ ID NO: 392045 - RNA, 19 nt, Human
ucugucacuggggguauuc

SEQ ID NO: 392046 - RNA, 22 nt, Human
ucaacacucuuuggcacaguua

SEQ ID NO: 392047 - RNA, 22 nt, Human
uuucuuauacuauauugucauc

SEQ ID NO: 392048 - RNA, 22 nt, Human
cuggagcuaauaauccaucuga

SEQ ID NO: 392049 - RNA, 22 nt, Human
caguagcacuagauaugugugg

SEQ ID NO: 392050 - RNA, 22 nt, Human
auaacaugagccagauugaaag

SEQ ID NO: 392051 - RNA, 20 nt, Human
acaggagaucugaggaaagg

SEQ ID NO: 392052 - RNA, 18 nt, Human
acauuucuccuucugacc

SEQ ID NO: 392053 - RNA, 22 nt, Human
ggauaagaaaauuguaauaacu

SEQ ID NO: 392054 - RNA, 22 nt, Human
aaauccuaauaaugcacuagug

SEQ ID NO: 392055 - RNA, 22 nt, Human
ugcaagcacucaaugcaaacag

SEQ ID NO: 392056 - RNA, 17 nt, Human
cucuccuuccucugagg

SEQ ID NO: 392057 - RNA, 22 nt, Human
acaauucugaugguuucccagu

SEQ ID NO: 392058 - RNA, 22 nt, Human
caggagacuauggcccaaggcc

SEQ ID NO: 392059 - RNA, 22 nt, Human
ugaaaucuuauacuuugguagu

SEQ ID NO: 392060 - RNA, 22 nt, Human
uggccuugggcagguggccugc

SEQ ID NO: 392061 - RNA, 19 nt, Human
ugucccagacuccgugucu

SEQ ID NO: 392062 - RNA, 22 nt, Human
ucccaggauguuggcggcaggu

SEQ ID NO: 392063 - RNA, 22 nt, Human
uuaaugauaccuauguuaauuu

SEQ ID NO: 392064 - RNA, 22 nt, Human
agggggugucucugauuggguu

SEQ ID NO: 392065 - RNA, 22 nt, Human
aucccaugagaccacguuggcu

SEQ ID NO: 392066 - RNA, 22 nt, Human
agucucugucguagaucagcgu

SEQ ID NO: 392067 - RNA, 22 nt, Human
aauaauuauuugagagcagacc

SEQ ID NO: 392068 - RNA, 22 nt, Human
acauuguauaaugauuaucaca

SEQ ID NO: 392069 - RNA, 22 nt, Human
ucaguuuucucauuuaugagau

SEQ ID NO: 392070 - RNA, 22 nt, Human
uuagggcaggcaugagagaacu

SEQ ID NO: 392071 - RNA, 22 nt, Human
uuggcuucucuuaacccuaaag

SEQ ID NO: 392072 - RNA, 22 nt, Human
ccaagggcugcugaggugucca

SEQ ID NO: 392073 - RNA, 21 nt, Human
auggagucaggggaaugggcc

SEQ ID NO: 392074 - RNA, 22 nt, Human
cucuggacacuggcaugggguc

SEQ ID NO: 392075 - RNA, 22 nt, Human
caaagaugcugauguuggauca

SEQ ID NO: 392076 - RNA, 22 nt, Human
acaaagcuagagaagagaauug

SEQ ID NO: 392077 - RNA, 22 nt, Human
aggcuucagaugaccuuagcau

SEQ ID NO: 392078 - RNA, 22 nt, Human
gggcagagaaauggacaguugg

SEQ ID NO: 392079 - RNA, 22 nt, Human
gccaggcauucuagaaguagug

SEQ ID NO: 392080 - RNA, 22 nt, Human
caguggcuguuucuggaaggca

SEQ ID NO: 392081 - RNA, 22 nt, Human
cauuucaaugccuucaacauag

SEQ ID NO: 392082 - RNA, 22 nt, Human
uuuuccucugcaauaaaagcag

SEQ ID NO: 392083 - RNA, 22 nt, Human
uagggacacugcucaugaguuc

SEQ ID NO: 392084 - RNA, 22 nt, Human
uaguaugggaagaacuuuguag

SEQ ID NO: 392085 - RNA, 22 nt, Human
ccaggugugcucugcaguggau

SEQ ID NO: 392086 - RNA, 22 nt, Human
cccaggcaggagugugguggcu

SEQ ID NO: 392087 - RNA, 22 nt, Human
uccaaacacccuccaugcugca

SEQ ID NO: 392088 - RNA, 22 nt, Human
ggccagagaauaugccuuacgu

SEQ ID NO: 392089 - RNA, 22 nt, Human
ccugaagcaaggguaggcaggu

SEQ ID NO: 392090 - RNA, 22 nt, Human
cccaggaggcagagguuggagc

SEQ ID NO: 392091 - RNA, 22 nt, Human
uugcauuugacaaauuauuuaa

SEQ ID NO: 392092 - RNA, 22 nt, Human
ccugggcuucugucuagauguu

SEQ ID NO: 392093 - RNA, 22 nt, Human
gcucugcuguguuuguucagca

SEQ ID NO: 392094 - RNA, 22 nt, Human
gcagcugaauguccauugcugc

SEQ ID NO: 392095 - RNA, 22 nt, Human
cauaucccauuggccaggacau

SEQ ID NO: 392096 - RNA, 21 nt, Human
ucucugggaggacuugugaga

SEQ ID NO: 392097 - RNA, 17 nt, Human
ccaggagagaugcuugu

SEQ ID NO: 392098 - RNA, 22 nt, Human
caggcacugugcaagggucucg

SEQ ID NO: 392099 - RNA, 22 nt, Human
ugggcacuguagcuggugcugg

SEQ ID NO: 392100 - RNA, 22 nt, Human
aggcugggaaaccugaaguugu

SEQ ID NO: 392101 - RNA, 22 nt, Human
agaauucucuuccauugaaaca

SEQ ID NO: 392102 - RNA, 22 nt, Human
uccaggcaaagugcugggcugc

SEQ ID NO: 392103 - RNA, 22 nt, Human
uccagccaugacucggacagug

SEQ ID NO: 392104 - RNA, 22 nt, Human
ccuguucacugcacaguuuccg

SEQ ID NO: 392105 - RNA, 22 nt, Human
gcugucacucuccggccuuccc

SEQ ID NO: 392106 - RNA, 22 nt, Human
uuuacagagaauguacauaaag

SEQ ID NO: 392107 - RNA, 22 nt, Human
aucuuucuccauauacaucuuu

SEQ ID NO: 392108 - RNA, 19 nt, Human
cagcugccuuuucuuugca

SEQ ID NO: 392109 - RNA, 22 nt, Human
gcucaggagcugacagccucaa

SEQ ID NO: 392110 - RNA, 22 nt, Human
auuucagguaccugugggaucc

SEQ ID NO: 392111 - RNA, 22 nt, Human
augcucugggcaggagcccugg

SEQ ID NO: 392112 - RNA, 22 nt, Human
ccugcuucagggaugauggcac

SEQ ID NO: 392113 - RNA, 22 nt, Human
ucagagaaguaagguggggugc

SEQ ID NO: 392114 - RNA, 22 nt, Human
ggaggccaaggcagguggaucg

SEQ ID NO: 392115 - RNA, 22 nt, Human
ugggcuccucgucacucgcugu

SEQ ID NO: 392116 - RNA, 22 nt, Human
ucaaaauucuagggagaauggu

SEQ ID NO: 392117 - RNA, 22 nt, Human
gggccagagcuuggcagcuggg

SEQ ID NO: 392118 - RNA, 17 nt, Human
agcugagcuggccaggg

SEQ ID NO: 392119 - RNA, 22 nt, Human
uccucugcuggaagggcaagag

SEQ ID NO: 392120 - RNA, 22 nt, Human
uagccgggugugguggaacucc

SEQ ID NO: 392121 - RNA, 22 nt, Human
agucuugcauuuucugaagaug

SEQ ID NO: 392122 - RNA, 22 nt, Human
uuucagacaggacuucauaugu

SEQ ID NO: 392123 - RNA, 23 nt, Human
gcucagagguuuuucucuggaug

SEQ ID NO: 392124 - RNA, 22 nt, Human
uugaagagugccuuccagacau

SEQ ID NO: 392125 - RNA, 22 nt, Human
acugaaggucucagcaaggaug

SEQ ID NO: 392126 - RNA, 22 nt, Human
guggcugcuacagagcuggagg

SEQ ID NO: 392127 - RNA, 22 nt, Human
agaagccacuggagguugagau

SEQ ID NO: 392128 - RNA, 22 nt, Human
gauaaaauauguggccuuuagu

SEQ ID NO: 392129 - RNA, 22 nt, Human
uuucucauagucaugccucuua

SEQ ID NO: 392130 - RNA, 22 nt, Human
cagcugcaugucuguggugguc

SEQ ID NO: 392131 - RNA, 22 nt, Human
gaggcaguuugccaugccagga

SEQ ID NO: 392132 - RNA, 22 nt, Human
aagaaaucagaaaagcauucgu

SEQ ID NO: 392133 - RNA, 20 nt, Human
ccucaggaugagggugagca

SEQ ID NO: 392134 - RNA, 22 nt, Human
gcagcuggugcaaaugucacuc

SEQ ID NO: 392135 - RNA, 22 nt, Human
gagagugauucccucccauaga

SEQ ID NO: 392136 - RNA, 22 nt, Human
ggcaccuggagguuuacuggau

SEQ ID NO: 392137 - RNA, 21 nt, Human
gccauuguuuucuaccuggag

SEQ ID NO: 392138 - RNA, 22 nt, Human
agucauaauuauaaacaucagu

SEQ ID NO: 392139 - RNA, 21 nt, Human
ugaggcuguuguaccagggag

SEQ ID NO: 392140 - RNA, 18 nt, Human
ugcucuggucucacuugg

SEQ ID NO: 392141 - RNA, 22 nt, Human
ugugugucagagucuccauggu

SEQ ID NO: 392142 - RNA, 22 nt, Human
guagaaaugguguguuucuucu

SEQ ID NO: 392143 - RNA, 22 nt, Human
cauuuacaauguacagguugug

SEQ ID NO: 392144 - RNA, 22 nt, Human
guuagaaacacauucuuauuga

SEQ ID NO: 392145 - RNA, 22 nt, Human
auauucguggucaaguaaggcc

SEQ ID NO: 392146 - RNA, 22 nt, Human
ugaggcagcauucuucaagaca

SEQ ID NO: 392147 - RNA, 22 nt, Human
gagucugaugucccccaggcca

SEQ ID NO: 392148 - RNA, 22 nt, Human
uuuaggcaagggcaagauuauc

SEQ ID NO: 392149 - RNA, 22 nt, Human
cucucagacugaagggccugug

SEQ ID NO: 392150 - RNA, 22 nt, Human
ggccaccucugcccuacugagu

SEQ ID NO: 392151 - RNA, 20 nt, Human
gccugcagagaaggucagag

SEQ ID NO: 392152 - RNA, 22 nt, Human
cuccaggcucguccaagaucga

SEQ ID NO: 392153 - RNA, 20 nt, Human
ggcagcaggaguuuccucuu

SEQ ID NO: 392154 - RNA, 19 nt, Human
ucaaugcaugaaaucagcc

SEQ ID NO: 392155 - RNA, 23 nt, Human
aggagacagggaagugccuggcu

SEQ ID NO: 392156 - RNA, 22 nt, Human
agaaccucuggauacaguuuaa

SEQ ID NO: 392157 - RNA, 22 nt, Human
ggccucugccucaucugggcac

SEQ ID NO: 392158 - RNA, 22 nt, Human
agggcuggcuccguuaccuuga

SEQ ID NO: 392159 - RNA, 22 nt, Human
aacauguaucgcuuuuuaauau

SEQ ID NO: 392160 - RNA, 21 nt, Human
cugagggccgcagcugggcuc

SEQ ID NO: 392161 - RNA, 22 nt, Human
cacaugcaucugucauguuugg

SEQ ID NO: 392162 - RNA, 22 nt, Human
aaaaucaguacacuuuauuuug

SEQ ID NO: 392163 - RNA, 22 nt, Human
aaguccagugcuuuagauucca

SEQ ID NO: 392164 - RNA, 22 nt, Human
ccagcccuugcugaaggguggc

SEQ ID NO: 392165 - RNA, 22 nt, Human
aggcacugggggaugagcaagg

SEQ ID NO: 392166 - RNA, 22 nt, Human
cugcugugcauauuuaucuagg

SEQ ID NO: 392167 - RNA, 22 nt, Human
augugcuuguaauguuaaaugu

SEQ ID NO: 392168 - RNA, 22 nt, Human
uuguuucugaguuuucauguau

SEQ ID NO: 392169 - RNA, 22 nt, Human
caggcagcgcucguggccuggc

SEQ ID NO: 392170 - RNA, 22 nt, Human
ugaaggccacuuccugugagcu

SEQ ID NO: 392171 - RNA, 22 nt, Human
ugaggcucugcuucuguggcuc

SEQ ID NO: 392172 - RNA, 22 nt, Human
auucaagauuaauucuauguca

SEQ ID NO: 392173 - RNA, 22 nt, Human
cacugcagaucagaggcugaga

SEQ ID NO: 392174 - RNA, 22 nt, Human
cacagggcagagaccugggugc

SEQ ID NO: 392175 - RNA, 22 nt, Human
ugcauuguuugauaggugaauu

SEQ ID NO: 392176 - RNA, 22 nt, Human
cagagcugcucaugguggccag

SEQ ID NO: 392177 - RNA, 19 nt, Human
ucucaauguucagaaagcu

SEQ ID NO: 392178 - RNA, 20 nt, Human
auaggaaagggaggggcuuu

SEQ ID NO: 392179 - RNA, 22 nt, Human
ucaucuucuauuaauagggaga

SEQ ID NO: 392180 - RNA, 22 nt, Human
auugcuguggaaauauaagaug

SEQ ID NO: 392181 - RNA, 22 nt, Human
ccucuggucccagcucugcugc

SEQ ID NO: 392182 - RNA, 22 nt, Human
aggcagagcuggguuuugaaau

SEQ ID NO: 392183 - RNA, 22 nt, Human
uccugcagagccgcccucaggu

SEQ ID NO: 392184 - RNA, 22 nt, Human
caggagcucucaucgucagggc

SEQ ID NO: 392185 - RNA, 22 nt, Human
gccugcuggauguggccaggcc

SEQ ID NO: 392186 - RNA, 22 nt, Human
aaugucuugagaagagaaaucu

SEQ ID NO: 392187 - RNA, 22 nt, Human
ugguggccaauucacagggcuc

SEQ ID NO: 392188 - RNA, 22 nt, Human
cugcccugggauggucugugcg

SEQ ID NO: 392189 - RNA, 23 nt, Human
uugaaagguagcuggcagcuaga

SEQ ID NO: 392190 - RNA, 22 nt, Human
uuugaagacagaucaauauaag

SEQ ID NO: 392191 - RNA, 22 nt, Human
uuugcauuuugauaagaucacu

SEQ ID NO: 392192 - RNA, 21 nt, Human
auuuucauuaauucagugugg

SEQ ID NO: 392193 - RNA, 22 nt, Human
agauuucccacuccauguauug

SEQ ID NO: 392194 - RNA, 22 nt, Human
uaccugcaaaguuccuuuugcc

SEQ ID NO: 392195 - RNA, 23 nt, Human
uuucacaaugagcauuacagaau

SEQ ID NO: 392196 - RNA, 21 nt, Human
gugguuauuuucauuagcauc

SEQ ID NO: 392197 - RNA, 22 nt, Human
gaaaauuauugaaaauggcucu

SEQ ID NO: 392198 - RNA, 22 nt, Human
gguggguauaguuagggccucu

SEQ ID NO: 392199 - RNA, 22 nt, Human
guuuaagaggguuucauuccca

SEQ ID NO: 392200 - RNA, 22 nt, Human
agugggcagcccaggaggucuu

SEQ ID NO: 392201 - RNA, 22 nt, Human
ugucccagauacuggacauaga

SEQ ID NO: 392202 - RNA, 20 nt, Human
gaugggaaucggagcuggua

SEQ ID NO: 392203 - RNA, 22 nt, Human
ggucucuguugccuccaucaag

SEQ ID NO: 392204 - RNA, 22 nt, Human
ugcaagagguaaaaugaaagga

SEQ ID NO: 392205 - RNA, 22 nt, Human
gcagcuuugucacggagugucg

SEQ ID NO: 392206 - RNA, 22 nt, Human
ccagcccucacugaggccucuc

SEQ ID NO: 392207 - RNA, 22 nt, Human
gaagcagccacggggagacaga

SEQ ID NO: 392208 - RNA, 22 nt, Human
gccucccugagucacccaagca

SEQ ID NO: 392209 - RNA, 22 nt, Human
cuucuuaaugacagauuaaaau

SEQ ID NO: 392210 - RNA, 22 nt, Human
cagcaggcguugggagaaagac

SEQ ID NO: 392211 - RNA, 22 nt, Human
ccuuccagaguucagucugccc

SEQ ID NO: 392212 - RNA, 15 nt, Human
cuccaugauuuugca

SEQ ID NO: 392213 - RNA, 22 nt, Human
uuuaacagguaaaguaaaugug

SEQ ID NO: 392214 - RNA, 22 nt, Human
caauuucaauacaaaauacauu

SEQ ID NO: 392215 - RNA, 22 nt, Human
accccaagacaguagaagagaa

SEQ ID NO: 392216 - RNA, 22 nt, Human
acagcagcacuauugacauuuu

SEQ ID NO: 392217 - RNA, 22 nt, Human
caauaugcaagcuauuaaguau

SEQ ID NO: 392218 - RNA, 22 nt, Human
uuugaaagaauuuauguacuuu

SEQ ID NO: 392219 - RNA, 21 nt, Human
aucucacagcccagagaagcc

SEQ ID NO: 392220 - RNA, 22 nt, Human
ugcaggaauuuuuugcagaaag

SEQ ID NO: 392221 - RNA, 22 nt, Human
ccaaagucagugcucagucguc

SEQ ID NO: 392222 - RNA, 22 nt, Human
cugcucuggggaagccagaugu

SEQ ID NO: 392223 - RNA, 22 nt, Human
uugaaucuauguauucagugua

SEQ ID NO: 392224 - RNA, 22 nt, Human
cuuaauuuaaaauaguucaggc

SEQ ID NO: 392225 - RNA, 22 nt, Human
ucagaggauuggacuuuuaugu

SEQ ID NO: 392226 - RNA, 22 nt, Human
uaaugcacauagaaguacuuag

SEQ ID NO: 392227 - RNA, 22 nt, Human
gaggcucagagaagucauggua

SEQ ID NO: 392228 - RNA, 22 nt, Human
uacacacagaggccaugggauu

SEQ ID NO: 392229 - RNA, 22 nt, Human
gcagggaggaagagaugcuucc

SEQ ID NO: 392230 - RNA, 21 nt, Human
uaaaucucuguauucuucagu

SEQ ID NO: 392231 - RNA, 22 nt, Human
acacaugagaaacaucaguugu

SEQ ID NO: 392232 - RNA, 22 nt, Human
cagcuugcuaauuuugacuuca

SEQ ID NO: 392233 - RNA, 22 nt, Human
auauacaguuuuacaggguuuc

SEQ ID NO: 392234 - RNA, 22 nt, Human
aaaggucauugaaaaggaggaa

SEQ ID NO: 392235 - RNA, 22 nt, Human
cuggcuccacucccugccugac

SEQ ID NO: 392236 - RNA, 22 nt, Human
ccaaggcuggagugcaguggcg

SEQ ID NO: 392237 - RNA, 22 nt, Human
ucuuaaaaguaugccaauugga

SEQ ID NO: 392238 - RNA, 22 nt, Human
aggcucaggcaggaauggcgga

SEQ ID NO: 392239 - RNA, 22 nt, Human
agcagggcugugcuccuuccga

SEQ ID NO: 392240 - RNA, 22 nt, Human
aguugaauaauuagacauaucu

SEQ ID NO: 392241 - RNA, 22 nt, Human
gcagggcaaugaucccgagagg

SEQ ID NO: 392242 - RNA, 22 nt, Human
gaaggagacccugaagaugcug

SEQ ID NO: 392243 - RNA, 22 nt, Human
gggcuccaacggugagcaugga

SEQ ID NO: 392244 - RNA, 22 nt, Human
cccccuggcaggcuggccucuc

SEQ ID NO: 392245 - RNA, 22 nt, Human
agaugcugccucuccucacaag

SEQ ID NO: 392246 - RNA, 22 nt, Human
aaaaaguuucaacugccaacuc

SEQ ID NO: 392247 - RNA, 22 nt, Human
aggccugagccccagguuuguu

SEQ ID NO: 392248 - RNA, 22 nt, Human
gaaggaagucauuagugcagac

SEQ ID NO: 392249 - RNA, 22 nt, Human
uuguuacaucuuauguaagugg

SEQ ID NO: 392250 - RNA, 22 nt, Human
cauuguuauagcauuacacacc

SEQ ID NO: 392251 - RNA, 22 nt, Human
gguuugcaugugauguugggca

SEQ ID NO: 392252 - RNA, 22 nt, Human
cugccuccugccgugcagcuuc

SEQ ID NO: 392253 - RNA, 22 nt, Human
agccagugcaacagcagugaag

SEQ ID NO: 392254 - RNA, 22 nt, Human
cucugggcaccaaagagcagcu

SEQ ID NO: 392255 - RNA, 22 nt, Human
ucccaggcuaggccucugcguu

SEQ ID NO: 392256 - RNA, 22 nt, Human
cccaguggagauaggagugugg

SEQ ID NO: 392257 - RNA, 22 nt, Human
ucuggcuuucauuuguuuaaag

SEQ ID NO: 392258 - RNA, 22 nt, Human
acauaucuuucccucuccugaa

SEQ ID NO: 392259 - RNA, 22 nt, Human
cagaaauguucuaaugauucag

SEQ ID NO: 392260 - RNA, 22 nt, Human
uauuuucuguggaggaccagau

SEQ ID NO: 392261 - RNA, 23 nt, Human
ucccuggaggcagguccagggcc

SEQ ID NO: 392262 - RNA, 22 nt, Human
acauuucuccuacuuguuauuu

SEQ ID NO: 392263 - RNA, 22 nt, Human
gccugagcaggcguggaccaug

SEQ ID NO: 392264 - RNA, 18 nt, Human
ggagagugagaucaaaca

SEQ ID NO: 392265 - RNA, 22 nt, Human
ucccuggggauguuggccugcc

SEQ ID NO: 392266 - RNA, 22 nt, Human
ccagggcaaaugagaucauagc

SEQ ID NO: 392267 - RNA, 22 nt, Human
ucagaggagaaguugggaaaau

SEQ ID NO: 392268 - RNA, 22 nt, Human
gcugaggccccagggugauggg

SEQ ID NO: 392269 - RNA, 21 nt, Human
gauugaaaccauggcagugag

SEQ ID NO: 392270 - RNA, 22 nt, Human
ggcagaggaaggaugaauucac

SEQ ID NO: 392271 - RNA, 22 nt, Human
acagccaggagccaugggcagg

SEQ ID NO: 392272 - RNA, 22 nt, Human
cuggcagguuuggugucuggug

SEQ ID NO: 392273 - RNA, 22 nt, Human
uguucacaaggugaugcuuuga

SEQ ID NO: 392274 - RNA, 22 nt, Human
ugagccuggggccugggcagcg

SEQ ID NO: 392275 - RNA, 22 nt, Human
ccuggcuguggcggugcucuca

SEQ ID NO: 392276 - RNA, 22 nt, Human
gcugugugacugagagccuggc

SEQ ID NO: 392277 - RNA, 22 nt, Human
ggagugaguacuggaguagcug

SEQ ID NO: 392278 - RNA, 22 nt, Human
gaggccaggagugcuguaaguu

SEQ ID NO: 392279 - RNA, 22 nt, Human
aaugucuuuaaagugcaauaga

SEQ ID NO: 392280 - RNA, 22 nt, Human
gucccagggaugcagacaugag

SEQ ID NO: 392281 - RNA, 21 nt, Human
uggaaagauucaaagaccagg

SEQ ID NO: 392282 - RNA, 22 nt, Human
acauuucucauucuccccuaac

SEQ ID NO: 392283 - RNA, 22 nt, Human
uaacagaaaagaacugaguuug

SEQ ID NO: 392284 - RNA, 22 nt, Human
acugccuuauaugcugugugug

SEQ ID NO: 392285 - RNA, 22 nt, Human
cugccucuauucacugaggcag

SEQ ID NO: 392286 - RNA, 22 nt, Human
gcccugagacugagcauggguu

SEQ ID NO: 392287 - RNA, 23 nt, Human
ucucaagaggaagcagggcucau

SEQ ID NO: 392288 - RNA, 22 nt, Human
gccuccuggauuuuagugccau

SEQ ID NO: 392289 - RNA, 22 nt, Human
uucagcagucguccaggaaaag

SEQ ID NO: 392290 - RNA, 22 nt, Human
cugugcuugacagugggaagca

SEQ ID NO: 392291 - RNA, 22 nt, Human
caguuucuuggaugccaauuuc

SEQ ID NO: 392292 - RNA, 22 nt, Human
aggcacaguggcucacaccugu

SEQ ID NO: 392293 - RNA, 22 nt, Human
caauuucacuaauaauauuuac

SEQ ID NO: 392294 - RNA, 22 nt, Human
uucucuuauucuggauaugcag

SEQ ID NO: 392295 - RNA, 22 nt, Human
auucuacaacccaauaauaauu

SEQ ID NO: 392296 - RNA, 22 nt, Human
gcauggcaagaucaggagacca

SEQ ID NO: 392297 - RNA, 22 nt, Human
ucccacugugaauccaaggccu

SEQ ID NO: 392298 - RNA, 22 nt, Human
gcagagcagugcuugcccagcg

SEQ ID NO: 392299 - RNA, 22 nt, Human
ccuuucucuaucgacccaucgc

SEQ ID NO: 392300 - RNA, 22 nt, Human
guacagaaugcuugguaaggca

SEQ ID NO: 392301 - RNA, 22 nt, Human
aaauucagcagugaaaugcccc

SEQ ID NO: 392302 - RNA, 22 nt, Human
aaguggagucccuacaaccagc

SEQ ID NO: 392303 - RNA, 22 nt, Human
ggcgaggccgggacaggcugga

SEQ ID NO: 392304 - RNA, 22 nt, Human
guagggagcccagagcccagug

SEQ ID NO: 392305 - RNA, 22 nt, Human
cugggaguugacgaggcuugua

SEQ ID NO: 392306 - RNA, 22 nt, Human
aucaggauguuuggcugucaua

SEQ ID NO: 392307 - RNA, 22 nt, Human
aaguccaugaucaagauguggc

SEQ ID NO: 392308 - RNA, 22 nt, Human
cacauccuucagcugagcccag

SEQ ID NO: 392309 - RNA, 22 nt, Human
caaugauugcuauuuacauaaa

SEQ ID NO: 392310 - RNA, 22 nt, Human
ucagaagcugguguccuuugaa

SEQ ID NO: 392311 - RNA, 22 nt, Human
aaaauacuguggaguguugaaa

SEQ ID NO: 392312 - RNA, 22 nt, Human
ucuggcucauacaagccugcaa

SEQ ID NO: 392313 - RNA, 22 nt, Human
uuucacaaguuucaggauucug

SEQ ID NO: 392314 - RNA, 22 nt, Human
cagaagucacccucagaauaac

SEQ ID NO: 392315 - RNA, 22 nt, Human
uaacagaaaggggacagaaaua

SEQ ID NO: 392316 - RNA, 22 nt, Human
ccccaggcagggccuaacagag

SEQ ID NO: 392317 - RNA, 22 nt, Human
ugugacagaucuuuaaauaaug

SEQ ID NO: 392318 - RNA, 22 nt, Human
ucagaguggugguuuugccuuc

SEQ ID NO: 392319 - RNA, 20 nt, Human
ggaccagguggggcgguggc

SEQ ID NO: 392320 - RNA, 22 nt, Human
ccuuuuucaauauagaauugca

SEQ ID NO: 392321 - RNA, 22 nt, Human
gagcagugggaaggaacagggu

SEQ ID NO: 392322 - RNA, 22 nt, Human
uaaguccuaacagacugggggc

SEQ ID NO: 392323 - RNA, 22 nt, Human
uuuuuguagucauuagaagagg

SEQ ID NO: 392324 - RNA, 22 nt, Human
agcuuccugaugcaagagggcu

SEQ ID NO: 392325 - RNA, 22 nt, Human
caguacuuugcaucauuccacu

SEQ ID NO: 392326 - RNA, 22 nt, Human
gggaugucacugugccuggcac

SEQ ID NO: 392327 - RNA, 22 nt, Human
ugcagggaaugcuugcagcaug

SEQ ID NO: 392328 - RNA, 22 nt, Human
gaaauauuguacuggagauguu

SEQ ID NO: 392329 - RNA, 22 nt, Human
acuuccugcuaugagcuucugu

SEQ ID NO: 392330 - RNA, 22 nt, Human
ggcuagaguggaacuggagcgg

SEQ ID NO: 392331 - RNA, 19 nt, Human
guuccaaaggccagaccuu

SEQ ID NO: 392332 - RNA, 22 nt, Human
agccagcucccuccccugcagg

SEQ ID NO: 392333 - RNA, 22 nt, Human
caacuuuaugauugguuuguca

SEQ ID NO: 392334 - RNA, 22 nt, Human
gugucccagcagcacauuggcu

SEQ ID NO: 392335 - RNA, 22 nt, Human
ucuccuuugaaaguuaggacug

SEQ ID NO: 392336 - RNA, 22 nt, Human
aaauguguauaugaaacaugau

SEQ ID NO: 392337 - RNA, 17 nt, Human
acaagcaguggccaugg

SEQ ID NO: 392338 - RNA, 22 nt, Human
caggcagcugacugucagauau

SEQ ID NO: 392339 - RNA, 18 nt, Human
gcugucugaggucugagg

SEQ ID NO: 392340 - RNA, 22 nt, Human
agccccucuguggcucugccuc

SEQ ID NO: 392341 - RNA, 22 nt, Human
uuacaagcagcuacauaucaca

SEQ ID NO: 392342 - RNA, 22 nt, Human
aggcucagccugggccuagagc

SEQ ID NO: 392343 - RNA, 22 nt, Human
cugcugugggcaggguagcugg

SEQ ID NO: 392344 - RNA, 22 nt, Human
uagcuguguaagcuugguaaga

SEQ ID NO: 392345 - RNA, 22 nt, Human
ccagcuucucucugaugcagcu

SEQ ID NO: 392346 - RNA, 20 nt, Human
auuccauaguuggcacuuuu

SEQ ID NO: 392347 - RNA, 22 nt, Human
cacagcagagggagccauugaa

SEQ ID NO: 392348 - RNA, 22 nt, Human
ugcuggcccaugaagacgcagu

SEQ ID NO: 392349 - RNA, 21 nt, Human
cugcaucucauagaacauguc

SEQ ID NO: 392350 - RNA, 22 nt, Human
ugagcccagucugucugacaug

SEQ ID NO: 392351 - RNA, 20 nt, Human
uauuugaaauggccaagugu

SEQ ID NO: 392352 - RNA, 22 nt, Human
uucagaaaugaauauugguauu

SEQ ID NO: 392353 - RNA, 22 nt, Human
augcuuaacucuguacauaguu

SEQ ID NO: 392354 - RNA, 22 nt, Human
cgcccagggcaggaggccgcuc

SEQ ID NO: 392355 - RNA, 22 nt, Human
ugcccuguuccugccuccagcu

SEQ ID NO: 392356 - RNA, 18 nt, Human
uggguggcuagggaguuu

SEQ ID NO: 392357 - RNA, 22 nt, Human
agauggcagggguaccuggaag

SEQ ID NO: 392358 - RNA, 23 nt, Human
cugcuguuuucuguaccugaagc

SEQ ID NO: 392359 - RNA, 22 nt, Human
agcagagcugcaguggccugcu

SEQ ID NO: 392360 - RNA, 22 nt, Human
gguggcuggaggagcugaugga

SEQ ID NO: 392361 - RNA, 22 nt, Human
caugucuugcccugauuaguag

SEQ ID NO: 392362 - RNA, 22 nt, Human
cuugugcaauugacauugaauc

SEQ ID NO: 392363 - RNA, 22 nt, Human
uuauucuuuaaacauauauguu

SEQ ID NO: 392364 - RNA, 20 nt, Human
aacuuguucuaccuguuuca

SEQ ID NO: 392365 - RNA, 22 nt, Human
uaacagaagaaaacauauugga

SEQ ID NO: 392366 - RNA, 22 nt, Human
auggcuuuucacagaggguucu

SEQ ID NO: 392367 - RNA, 22 nt, Human
acaguggaaaugugggagggga

SEQ ID NO: 392368 - RNA, 21 nt, Human
auuauuauuucuguguccagc

SEQ ID NO: 392369 - RNA, 18 nt, Human
ggucuuuaggucaguguc

SEQ ID NO: 392370 - RNA, 22 nt, Human
acugcuuuucagagucugccug

SEQ ID NO: 392371 - RNA, 22 nt, Human
ugauugaacugagcuucaagau

SEQ ID NO: 392372 - RNA, 22 nt, Human
gcagggcaaauguggaaaggag

SEQ ID NO: 392373 - RNA, 19 nt, Human
gcaggcacagcccugggug

SEQ ID NO: 392374 - RNA, 22 nt, Human
uggauuuauggagaccgaaagu

SEQ ID NO: 392375 - RNA, 22 nt, Human
caggugggcuugggagaacacu

SEQ ID NO: 392376 - RNA, 22 nt, Human
agcagccuuugaucaucuggga

SEQ ID NO: 392377 - RNA, 22 nt, Human
cugggcagagcuaacaccugag

SEQ ID NO: 392378 - RNA, 22 nt, Human
cuggccgguauuugccucuggg

SEQ ID NO: 392379 - RNA, 22 nt, Human
cucaggguaaugaaagacgaau

SEQ ID NO: 392380 - RNA, 22 nt, Human
auguacauuuguaguaauauca

SEQ ID NO: 392381 - RNA, 22 nt, Human
uuguccaaaguaacacaucuag

SEQ ID NO: 392382 - RNA, 22 nt, Human
uuuugcuuuuguaacacagugu

SEQ ID NO: 392383 - RNA, 22 nt, Human
guacuuccguggacuaauuguu

SEQ ID NO: 392384 - RNA, 22 nt, Human
uucaaugagcccaagaacguga

SEQ ID NO: 392385 - RNA, 22 nt, Human
gaaaugugugacaaguuucaau

SEQ ID NO: 392386 - RNA, 22 nt, Human
guggcugggcuccgagcggcuu

SEQ ID NO: 392387 - RNA, 22 nt, Human
augggcagaguggggacaggaa

SEQ ID NO: 392388 - RNA, 22 nt, Human
acauguguauagccuguauaga

SEQ ID NO: 392389 - RNA, 22 nt, Human
ccccagccuuccaugggaauug

SEQ ID NO: 392390 - RNA, 22 nt, Human
auguuuccagguucuuccuaug

SEQ ID NO: 392391 - RNA, 22 nt, Human
agaggacagguuuuccaugggc

SEQ ID NO: 392392 - RNA, 22 nt, Human
gaggacaggagacucacuguuu

SEQ ID NO: 392393 - RNA, 22 nt, Human
uagcagcuuaaguaauuagaau

SEQ ID NO: 392394 - RNA, 17 nt, Human
acucaggaucugggagu

SEQ ID NO: 392395 - RNA, 22 nt, Human
uagugcuugagucucuccguac

SEQ ID NO: 392396 - RNA, 22 nt, Human
aaugcagugagccauuaaaugg

SEQ ID NO: 392397 - RNA, 23 nt, Human
gggcugcuccaggccaaggcugg

SEQ ID NO: 392398 - RNA, 22 nt, Human
aaggcaggaugcggacccaucu

SEQ ID NO: 392399 - RNA, 22 nt, Human
ucagggcaggcgagcagcugcu

SEQ ID NO: 392400 - RNA, 22 nt, Human
caagcuggcugggagaggcacg

SEQ ID NO: 392401 - RNA, 22 nt, Human
agaaaauauucauugagaggcu

SEQ ID NO: 392402 - RNA, 22 nt, Human
ucaggcugugggcacuggccau

SEQ ID NO: 392403 - RNA, 17 nt, Human
ggccuuggggccucagu

SEQ ID NO: 392404 - RNA, 22 nt, Human
ucaggaugaccacgagccucua

SEQ ID NO: 392405 - RNA, 22 nt, Human
gccaggcuggccagcaccuucu

SEQ ID NO: 392406 - RNA, 22 nt, Human
aaaaugcuauuucauggaggag

SEQ ID NO: 392407 - RNA, 22 nt, Human
cauauuuauagaucuggcauuu

SEQ ID NO: 392408 - RNA, 22 nt, Human
cagucccuaguggagcucacag

SEQ ID NO: 392409 - RNA, 22 nt, Human
uguguaaaaucugauuaauacu

SEQ ID NO: 392410 - RNA, 22 nt, Human
aguaaagcagaguugcaguaca

SEQ ID NO: 392411 - RNA, 21 nt, Human
ugcugccauagaccugaggga

SEQ ID NO: 392412 - RNA, 22 nt, Human
uuaaauuuuagaaacagacucu

SEQ ID NO: 392413 - RNA, 22 nt, Human
gaaggccucacucugcagcaua

SEQ ID NO: 392414 - RNA, 21 nt, Human
gaguccuuccaauguccucag

SEQ ID NO: 392415 - RNA, 22 nt, Human
auggauuugcuuauacacaugu

SEQ ID NO: 392416 - RNA, 22 nt, Human
ccugggucacucaggcaggcgg

SEQ ID NO: 392417 - RNA, 22 nt, Human
agauguaaacucucaugucauu

SEQ ID NO: 392418 - RNA, 22 nt, Human
ccugcaguuuguugugaccccg

SEQ ID NO: 392419 - RNA, 22 nt, Human
cucagaauuacaucccauuuua

SEQ ID NO: 392420 - RNA, 22 nt, Human
uuugaaagucaaccuuccaguu

SEQ ID NO: 392421 - RNA, 22 nt, Human
gcagcuaccacccaggaaggac

SEQ ID NO: 392422 - RNA, 22 nt, Human
uauuuuguuaauaauccagucc

SEQ ID NO: 392423 - RNA, 22 nt, Human
ugcuggagaucauuaauguuca

SEQ ID NO: 392424 - RNA, 19 nt, Human
uggaggagaggaaaaguca

SEQ ID NO: 392425 - RNA, 18 nt, Human
gagaggcccggcugugcc

SEQ ID NO: 392426 - RNA, 22 nt, Human
agguggcaggaggucagagaaa

SEQ ID NO: 392427 - RNA, 22 nt, Human
gagacugauggggcucccagaa

SEQ ID NO: 392428 - RNA, 22 nt, Human
gcugccugccuugccuggagga

SEQ ID NO: 392429 - RNA, 22 nt, Human
uuccagugaugggcaauuuggu

SEQ ID NO: 392430 - RNA, 22 nt, Human
aacauguaaccagcauucaucu

SEQ ID NO: 392431 - RNA, 20 nt, Human
accucugcaucaauccuuug

SEQ ID NO: 392432 - RNA, 22 nt, Human
gaggcagcauucgcauagacag

SEQ ID NO: 392433 - RNA, 22 nt, Human
gccaggugcauggcugagucuc

SEQ ID NO: 392434 - RNA, 16 nt, Human
uggcugagagaggguu

SEQ ID NO: 392435 - RNA, 19 nt, Human
ccuuccuccccagggccau

SEQ ID NO: 392436 - RNA, 22 nt, Human
agagucugaaugcucagaguug

SEQ ID NO: 392437 - RNA, 22 nt, Human
ccugucuggccuuccacggggg

SEQ ID NO: 392438 - RNA, 22 nt, Human
ggagucaggagcaggcugggcu

SEQ ID NO: 392439 - RNA, 22 nt, Human
agaaaugcucuuccugaccaga

SEQ ID NO: 392440 - RNA, 22 nt, Human
ggcagcuuguccuucaggagag

SEQ ID NO: 392441 - RNA, 22 nt, Human
ucauuauccuaguaucuugaau

SEQ ID NO: 392442 - RNA, 21 nt, Human
uugaagcaaggguggcucuga

SEQ ID NO: 392443 - RNA, 22 nt, Human
gcugugugcucacguaguggaa

SEQ ID NO: 392444 - RNA, 22 nt, Human
uagggcucugcucaucaguugu

SEQ ID NO: 392445 - RNA, 22 nt, Human
aacucaguuacauauuagaaua

SEQ ID NO: 392446 - RNA, 22 nt, Human
gcauuuccugugcuuggcauau

SEQ ID NO: 392447 - RNA, 22 nt, Human
ucuuucaaugagcauucuuucc

SEQ ID NO: 392448 - RNA, 22 nt, Human
ucugcaggcuuggaguggcagc

SEQ ID NO: 392449 - RNA, 22 nt, Human
ucuuuaauuguggaagagcagc

SEQ ID NO: 392450 - RNA, 22 nt, Human
cccaggagaucuggaucucguc

SEQ ID NO: 392451 - RNA, 22 nt, Human
aucuggcucauucagggaacgg

SEQ ID NO: 392452 - RNA, 22 nt, Human
aguucucaagacaauuaccugu

SEQ ID NO: 392453 - RNA, 22 nt, Human
aggcagagcuaggaagaauugu

SEQ ID NO: 392454 - RNA, 22 nt, Human
uguacaaugccgagacuaacuc

SEQ ID NO: 392455 - RNA, 22 nt, Human
aggaggaggugggacacaguga

SEQ ID NO: 392456 - RNA, 20 nt, Human
ccugucugcaauggagguca

SEQ ID NO: 392457 - RNA, 22 nt, Human
ugggggugacuaucucgggaau

SEQ ID NO: 392458 - RNA, 22 nt, Human
uagggcucuggugggcucuguu

SEQ ID NO: 392459 - RNA, 22 nt, Human
uuucccaguucccugcucuaua

SEQ ID NO: 392460 - RNA, 22 nt, Human
cugugcauugucuugucuguag

SEQ ID NO: 392461 - RNA, 22 nt, Human
aguggcagagcugugucuugaa

SEQ ID NO: 392462 - RNA, 22 nt, Human
gcucucugucguuaugcuucau

SEQ ID NO: 392463 - RNA, 22 nt, Human
agguggggaggagugucucuuu

SEQ ID NO: 392464 - RNA, 22 nt, Human
auuagcugaccucuaaggagcc

SEQ ID NO: 392465 - RNA, 22 nt, Human
ugacauaauaauccaaacauac

SEQ ID NO: 392466 - RNA, 22 nt, Human
gccugagaguugaaguucagug

SEQ ID NO: 392467 - RNA, 22 nt, Human
aaguguuaaaagauuaaaugcu

SEQ ID NO: 392468 - RNA, 22 nt, Human
gaaggagcuaaagggagcccug

SEQ ID NO: 392469 - RNA, 22 nt, Human
cacauuucucuaccucacacaa

SEQ ID NO: 392470 - RNA, 22 nt, Human
ugcuauaagaauuauauuacuc

SEQ ID NO: 392471 - RNA, 22 nt, Human
acagcagccugcagcccugugu

SEQ ID NO: 392472 - RNA, 22 nt, Human
ucauuuguugcuguuaccugag

SEQ ID NO: 392473 - RNA, 22 nt, Human
caggccagcuuccugacauccu

SEQ ID NO: 392474 - RNA, 22 nt, Human
gcagcuuuguaaaguaugaagc

SEQ ID NO: 392475 - RNA, 23 nt, Human
agccagggcacugguggagauug

SEQ ID NO: 392476 - RNA, 22 nt, Human
aaaccaucagauaauucauacu

SEQ ID NO: 392477 - RNA, 22 nt, Human
uuucacauuuguuuuaagaagu

SEQ ID NO: 392478 - RNA, 22 nt, Human
aguagaauagauggauacuauu

SEQ ID NO: 392479 - RNA, 22 nt, Human
auaaaugauucagcaggaaaua

SEQ ID NO: 392480 - RNA, 22 nt, Human
ggccucagaccggagcuggcca

SEQ ID NO: 392481 - RNA, 22 nt, Human
gccucugcaucaucacuccagc

SEQ ID NO: 392482 - RNA, 22 nt, Human
ugaguuuuuucaacauaugaag

SEQ ID NO: 392483 - RNA, 22 nt, Human
agugggcaggcagggugcgcag

SEQ ID NO: 392484 - RNA, 22 nt, Human
agaaggccuaacuugggggcaa

SEQ ID NO: 392485 - RNA, 20 nt, Human
caccagucaugagucaauac

SEQ ID NO: 392486 - RNA, 22 nt, Human
ccacauuuuugauacucucacu

SEQ ID NO: 392487 - RNA, 22 nt, Human
ccuguguguaggccaggggagu

SEQ ID NO: 392488 - RNA, 22 nt, Human
ucagggcaucucuuaaguggug

SEQ ID NO: 392489 - RNA, 22 nt, Human
auccaaaucaugucagaagaac

SEQ ID NO: 392490 - RNA, 22 nt, Human
uucuugauuucaugcaguuaag

SEQ ID NO: 392491 - RNA, 22 nt, Human
cccuggaggcggagcuugcagu

SEQ ID NO: 392492 - RNA, 22 nt, Human
aaauugaaugauuaagugguga

SEQ ID NO: 392493 - RNA, 22 nt, Human
ccuggagcacagcccaguccca

SEQ ID NO: 392494 - RNA, 22 nt, Human
caaagccauagaguagauaaga

SEQ ID NO: 392495 - RNA, 22 nt, Human
uggcugagguuaugcugguugu

SEQ ID NO: 392496 - RNA, 22 nt, Human
agggagcucaguuggaagcggu

SEQ ID NO: 392497 - RNA, 22 nt, Human
aagagcuggcccaaucugagca

SEQ ID NO: 392498 - RNA, 22 nt, Human
aaaugccuguguaaauucuagc

SEQ ID NO: 392499 - RNA, 22 nt, Human
cugugccuggggggcagagcug

SEQ ID NO: 392500 - RNA, 22 nt, Human
aaauacuagaauucagaguuga

SEQ ID NO: 392501 - RNA, 22 nt, Human
gcagaacauuucacaguaucuu

SEQ ID NO: 392502 - RNA, 22 nt, Human
gguuucaaauuaaagucuuaag

SEQ ID NO: 392503 - RNA, 22 nt, Human
aaaauauuuuagggccaggaga

SEQ ID NO: 392504 - RNA, 22 nt, Human
gcucagagcacucagacucagc

SEQ ID NO: 392505 - RNA, 22 nt, Human
acucuucuugcugcucauuaau

SEQ ID NO: 392506 - RNA, 22 nt, Human
ugucucaguauacgaaacacuu

SEQ ID NO: 392507 - RNA, 22 nt, Human
ugcuuauuuauagucaauagag

SEQ ID NO: 392508 - RNA, 21 nt, Human
ucagagagucacagugaacug

SEQ ID NO: 392509 - RNA, 22 nt, Human
gaugcacugcaguauauacugu

SEQ ID NO: 392510 - RNA, 22 nt, Human
uuuuuccuagugcuuucuggua

SEQ ID NO: 392511 - RNA, 22 nt, Human
aggucauuccuugucuucuugc

SEQ ID NO: 392512 - RNA, 22 nt, Human
auaaagauuuuuaggcauuucu

SEQ ID NO: 392513 - RNA, 22 nt, Human
gccucugcacuguggcacacca

SEQ ID NO: 392514 - RNA, 20 nt, Human
ucuaauuaaaauugucuagu

SEQ ID NO: 392515 - RNA, 22 nt, Human
ugcugcucucagccaccaggaa

SEQ ID NO: 392516 - RNA, 22 nt, Human
agccagcugugggcucaggcgg

SEQ ID NO: 392517 - RNA, 22 nt, Human
aggugcuuggcucgugcacaca

SEQ ID NO: 392518 - RNA, 22 nt, Human
uccaaaaaacguuugaauaguu

SEQ ID NO: 392519 - RNA, 22 nt, Human
agggggugcuacuuccagaguu

SEQ ID NO: 392520 - RNA, 22 nt, Human
cuggugucugcucccucacagc

SEQ ID NO: 392521 - RNA, 22 nt, Human
gaugaaaaucuugagaugucga

SEQ ID NO: 392522 - RNA, 22 nt, Human
uggccugguuguugcugccguu

SEQ ID NO: 392523 - RNA, 22 nt, Human
gaaacugugaucguguucuggg

SEQ ID NO: 392524 - RNA, 21 nt, Human
uuccagagauuguuucaccug

SEQ ID NO: 392525 - RNA, 22 nt, Human
ccaggcagccaagugugugugu

SEQ ID NO: 392526 - RNA, 22 nt, Human
uucacagauguauuggaacucc

SEQ ID NO: 392527 - RNA, 22 nt, Human
caggagugaaaugaggcccagg

SEQ ID NO: 392528 - RNA, 20 nt, Human
aaaaacaguaaugcugaaga

SEQ ID NO: 392529 - RNA, 22 nt, Human
cccugcaggcucagacuggagu

SEQ ID NO: 392530 - RNA, 22 nt, Human
ccuggaaguuggagguugcagu

SEQ ID NO: 392531 - RNA, 22 nt, Human
uccaggagcucauccacgucaa

SEQ ID NO: 392532 - RNA, 22 nt, Human
agcugccaaguuggaguagcaa

SEQ ID NO: 392533 - RNA, 22 nt, Human
cucuuaaagcuuccaguuucaa

SEQ ID NO: 392534 - RNA, 22 nt, Human
aucaggaaauacuuauuuauaa

SEQ ID NO: 392535 - RNA, 22 nt, Human
uuugaaaauuuaagugcuacac

SEQ ID NO: 392536 - RNA, 22 nt, Human
uguacauagaucuugaaaauua

SEQ ID NO: 392537 - RNA, 23 nt, Human
aggagccaggaaccagcuucccc

SEQ ID NO: 392538 - RNA, 22 nt, Human
uuuacuuuugguaaggucauuu

SEQ ID NO: 392539 - RNA, 22 nt, Human
auggcuuucagauuucuauguu

SEQ ID NO: 392540 - RNA, 22 nt, Human
uuuuagauaguuuaacugcacu

SEQ ID NO: 392541 - RNA, 22 nt, Human
guggauggauugaggcaguggg

SEQ ID NO: 392542 - RNA, 19 nt, Human
ucauucaggaccaguggau

SEQ ID NO: 392543 - RNA, 22 nt, Human
uucauagaucucaauuuugagg

SEQ ID NO: 392544 - RNA, 22 nt, Human
gggcacuggaggccaaggagcu

SEQ ID NO: 392545 - RNA, 22 nt, Human
ccacucugauuuuggcuccacu

SEQ ID NO: 392546 - RNA, 22 nt, Human
augugucuuugagacucugcua

SEQ ID NO: 392547 - RNA, 22 nt, Human
uccugagauaaaucucauguga

SEQ ID NO: 392548 - RNA, 23 nt, Human
agaugaggcuucuccauguuggu

SEQ ID NO: 392549 - RNA, 22 nt, Human
ccagagagguagcuuacccucu

SEQ ID NO: 392550 - RNA, 22 nt, Human
acagcugggugcugcucagagc

SEQ ID NO: 392551 - RNA, 22 nt, Human
gaaggaggugucaguuggacug

SEQ ID NO: 392552 - RNA, 22 nt, Human
uuucaguuuccagcuuugucau

SEQ ID NO: 392553 - RNA, 22 nt, Human
gcaggggaguggcaggcccgga

SEQ ID NO: 392554 - RNA, 22 nt, Human
uuccauuguuucugucuucacu

SEQ ID NO: 392555 - RNA, 22 nt, Human
gacugucauucuagugcccaug

SEQ ID NO: 392556 - RNA, 22 nt, Human
uagaacuacaagcauuaaaagu

SEQ ID NO: 392557 - RNA, 22 nt, Human
uccaggagggauugggcugugg

SEQ ID NO: 392558 - RNA, 22 nt, Human
gggugcaggcagcccaggcagg

SEQ ID NO: 392559 - RNA, 22 nt, Human
acagccagaggagccaggcugg

SEQ ID NO: 392560 - RNA, 22 nt, Human
uacaguauuaugagugauugaa

SEQ ID NO: 392561 - RNA, 22 nt, Human
ucuacugugguccuuguaacca

SEQ ID NO: 392562 - RNA, 22 nt, Human
uuuagaaauucaucuauggccu

SEQ ID NO: 392563 - RNA, 22 nt, Human
caagaugugccuaaucagaccu

SEQ ID NO: 392564 - RNA, 22 nt, Human
cuuagaaauuguuacucauuca

SEQ ID NO: 392565 - RNA, 22 nt, Human
augaaauaucuugaagaaauuc

SEQ ID NO: 392566 - RNA, 22 nt, Human
acaggggauugauuggaagucu

SEQ ID NO: 392567 - RNA, 22 nt, Human
ggcucagguuaccagucccucc

SEQ ID NO: 392568 - RNA, 22 nt, Human
ccugccagggccuuggaagaaa

SEQ ID NO: 392569 - RNA, 22 nt, Human
aaggcugcuuuuaacaugcaua

SEQ ID NO: 392570 - RNA, 22 nt, Human
acucugccaucccaggugcugu

SEQ ID NO: 392571 - RNA, 22 nt, Human
gggcugagauuggugcccuguc

SEQ ID NO: 392572 - RNA, 22 nt, Human
agcugucuaccugcagaguccu

SEQ ID NO: 392573 - RNA, 22 nt, Human
aucaguuaguuacugcuaagau

SEQ ID NO: 392574 - RNA, 22 nt, Human
cuggggugugcucagagcaggg

SEQ ID NO: 392575 - RNA, 22 nt, Human
aagggcuggccacauucugggu

SEQ ID NO: 392576 - RNA, 22 nt, Human
augugaaaaauuucuuauuaca

SEQ ID NO: 392577 - RNA, 22 nt, Human
ccugccagcccgcguucaugcc

SEQ ID NO: 392578 - RNA, 20 nt, Human
cuguagggugcagcaggcuc

SEQ ID NO: 392579 - RNA, 22 nt, Human
uuaauauguugaaauuuauuag

SEQ ID NO: 392580 - RNA, 22 nt, Human
ugggugggagcgcccugucugg

SEQ ID NO: 392581 - RNA, 22 nt, Human
gcuggaaggcuaggcucaguug

SEQ ID NO: 392582 - RNA, 22 nt, Human
caggguggaauggaaugcuggc

SEQ ID NO: 392583 - RNA, 22 nt, Human
auugaggcagcauaguucaggg

SEQ ID NO: 392584 - RNA, 22 nt, Human
agggcaugugggagaggagccu

SEQ ID NO: 392585 - RNA, 22 nt, Human
gcccaggaguucaagucuagug

SEQ ID NO: 392586 - RNA, 22 nt, Human
ugaacaaacugcauucuucacu

SEQ ID NO: 392587 - RNA, 22 nt, Human
uaugaaacauucauacaaauaa

SEQ ID NO: 392588 - RNA, 22 nt, Human
cugcagagcagccaguccccca

SEQ ID NO: 392589 - RNA, 19 nt, Human
ugaagcaauaccauuuuug

SEQ ID NO: 392590 - RNA, 22 nt, Human
uggguuuaaacucaacucuaaa

SEQ ID NO: 392591 - RNA, 22 nt, Human
guguuccauguuugagguaguu

SEQ ID NO: 392592 - RNA, 22 nt, Human
aagcauuuuagauaaagcauca

SEQ ID NO: 392593 - RNA, 22 nt, Human
acagagcucccagccaucuccu

SEQ ID NO: 392594 - RNA, 22 nt, Human
aggcacugugcagucccaagca

SEQ ID NO: 392595 - RNA, 22 nt, Human
gcguggugcugcccugcacaca

SEQ ID NO: 392596 - RNA, 22 nt, Human
acugucaccaucagagcgggaa

SEQ ID NO: 392597 - RNA, 22 nt, Human
uucuuaacucaaauauauaucc

SEQ ID NO: 392598 - RNA, 22 nt, Human
uuugauuuacuggauauucuca

SEQ ID NO: 392599 - RNA, 22 nt, Human
caaggaaaaagcgagcucgggg

SEQ ID NO: 392600 - RNA, 22 nt, Human
aaaucucacuguagucaaagug

SEQ ID NO: 392601 - RNA, 22 nt, Human
agccacagagguugaugugguu

SEQ ID NO: 392602 - RNA, 22 nt, Human
uaagacaugguugaucuagugu

SEQ ID NO: 392603 - RNA, 22 nt, Human
aaguccuugaagaaacaguucu

SEQ ID NO: 392604 - RNA, 22 nt, Human
cagcauggggcuuggagucagc

SEQ ID NO: 392605 - RNA, 22 nt, Human
auguguaugcaugcacuaagau

SEQ ID NO: 392606 - RNA, 22 nt, Human
uaggaagaugaguaucaacuug

SEQ ID NO: 392607 - RNA, 22 nt, Human
uggccugccucccggcuucuuu

SEQ ID NO: 392608 - RNA, 22 nt, Human
uggucagacaaaggagaauguu

SEQ ID NO: 392609 - RNA, 22 nt, Human
ccagagccccugagcuucccug

SEQ ID NO: 392610 - RNA, 22 nt, Human
cagacuggccacaucugcacug

SEQ ID NO: 392611 - RNA, 22 nt, Human
ggcagcuggggcagugcccugu

SEQ ID NO: 392612 - RNA, 22 nt, Human
caguggaaaucagagugagagu

SEQ ID NO: 392613 - RNA, 22 nt, Human
cccaggaggaggaaaaagcucg

SEQ ID NO: 392614 - RNA, 22 nt, Human
cagguaagagacggauuggccc

SEQ ID NO: 392615 - RNA, 22 nt, Human
cuggugccuccucccugugcuu

SEQ ID NO: 392616 - RNA, 20 nt, Human
aagcacauuucuacaauaau

SEQ ID NO: 392617 - RNA, 22 nt, Human
ugcagcugaggccagcuaugcc

SEQ ID NO: 392618 - RNA, 22 nt, Human
uuacaaguauuuaagaugcugu

SEQ ID NO: 392619 - RNA, 22 nt, Human
uauuccaacugucauagucaua

SEQ ID NO: 392620 - RNA, 22 nt, Human
uggggacaggagacuuacagcu

SEQ ID NO: 392621 - RNA, 22 nt, Human
agaauucuguucuucgggugug

SEQ ID NO: 392622 - RNA, 22 nt, Human
acauaauaggugccugaauauu

SEQ ID NO: 392623 - RNA, 22 nt, Human
ugacuucaagguucagcaccuu

SEQ ID NO: 392624 - RNA, 22 nt, Human
cagaggaagcagacacaucuug

SEQ ID NO: 392625 - RNA, 22 nt, Human
aaggcagucugguuucaaagca

SEQ ID NO: 392626 - RNA, 22 nt, Human
aggcagcuuuguaguaaagcua

SEQ ID NO: 392627 - RNA, 22 nt, Human
uuuagaguugaguauucauugg

SEQ ID NO: 392628 - RNA, 22 nt, Human
gaugauaacagcauuucaacug

SEQ ID NO: 392629 - RNA, 22 nt, Human
aaauacugucucugagagagcc

SEQ ID NO: 392630 - RNA, 22 nt, Human
cucuguccuaugcuugauagaa

SEQ ID NO: 392631 - RNA, 22 nt, Human
uggagaaggccggccaggagug

SEQ ID NO: 392632 - RNA, 22 nt, Human
aggcagggucuugcuauguugc

SEQ ID NO: 392633 - RNA, 22 nt, Human
gcaaggcugagcacauuugcau

SEQ ID NO: 392634 - RNA, 22 nt, Human
aagagcuggauggaaucuggga

SEQ ID NO: 392635 - RNA, 22 nt, Human
aaaggccaccaacaugaagcau

SEQ ID NO: 392636 - RNA, 22 nt, Human
aaacauguuuucugaauauuuu

SEQ ID NO: 392637 - RNA, 18 nt, Human
cauaauuuucuuucuuua

SEQ ID NO: 392638 - RNA, 23 nt, Human
ugagcaucacaggagaaccaggc

SEQ ID NO: 392639 - RNA, 22 nt, Human
aagcuuucagagcagaauguga

SEQ ID NO: 392640 - RNA, 22 nt, Human
uucucacuauguauguagauug

SEQ ID NO: 392641 - RNA, 22 nt, Human
agccaugcaccuuacucuugcu

SEQ ID NO: 392642 - RNA, 22 nt, Human
gaucaaaagcuggguucuaaaa

SEQ ID NO: 392643 - RNA, 22 nt, Human
cugcuuugacuguuaagaacca

SEQ ID NO: 392644 - RNA, 22 nt, Human
aaagauuuaagaauaauuugug

SEQ ID NO: 392645 - RNA, 22 nt, Human
ccaugagccaggcugaggaagc

SEQ ID NO: 392646 - RNA, 20 nt, Human
ccugggcuccaggagccccg

SEQ ID NO: 392647 - RNA, 22 nt, Human
acccuggacuggggcugaggcu

SEQ ID NO: 392648 - RNA, 20 nt, Human
gaagcagcuucauguagaca

SEQ ID NO: 392649 - RNA, 22 nt, Human
gcaguccaaaguggcucucacc

SEQ ID NO: 392650 - RNA, 22 nt, Human
ccaaguacagauuccuccacug

SEQ ID NO: 392651 - RNA, 18 nt, Human
gggcacuggggacuggag

SEQ ID NO: 392652 - RNA, 22 nt, Human
ccugggucuugguucaugcucu

SEQ ID NO: 392653 - RNA, 22 nt, Human
cacaugcauaaggauaauuacu

SEQ ID NO: 392654 - RNA, 22 nt, Human
agcaggguuuggggauuggcac

SEQ ID NO: 392655 - RNA, 22 nt, Human
uagucaccuuuggcaccugcaa

SEQ ID NO: 392656 - RNA, 22 nt, Human
caagaauccuguucuugaagau

SEQ ID NO: 392657 - RNA, 18 nt, Human
ugagacagcuaccacuug

SEQ ID NO: 392658 - RNA, 22 nt, Human
augcuuuuccaggagaaauaua

SEQ ID NO: 392659 - RNA, 22 nt, Human
aagggcuggagacugggucuuc

SEQ ID NO: 392660 - RNA, 22 nt, Human
cccagacucaucccugggagcu

SEQ ID NO: 392661 - RNA, 22 nt, Human
ggacucuguuuuccugaucacu

SEQ ID NO: 392662 - RNA, 22 nt, Human
uauuuccaaaagccuauuauga

SEQ ID NO: 392663 - RNA, 22 nt, Human
cuggggugagcagaaacagggg

SEQ ID NO: 392664 - RNA, 22 nt, Human
cagcugugagcagccaguugcc

SEQ ID NO: 392665 - RNA, 19 nt, Human
cacacccaugcuugccaag

SEQ ID NO: 392666 - RNA, 22 nt, Human
aggcaggcugcuauggaguaga

SEQ ID NO: 392667 - RNA, 20 nt, Human
ucuggcaggugaacgagcug

SEQ ID NO: 392668 - RNA, 22 nt, Human
uggcuccuaggauggugccugg

SEQ ID NO: 392669 - RNA, 23 nt, Human
gaggccacauuccccugcuugag

SEQ ID NO: 392670 - RNA, 22 nt, Human
uggcacagacagaucaggaguc

SEQ ID NO: 392671 - RNA, 22 nt, Human
agaugaaaagauaagcagcaau

SEQ ID NO: 392672 - RNA, 22 nt, Human
cagggccucuccuccaggaacu

SEQ ID NO: 392673 - RNA, 22 nt, Human
uuucagcugguaaaggaguagc

SEQ ID NO: 392674 - RNA, 19 nt, Human
aaaaacuuaguccagaaag

SEQ ID NO: 392675 - RNA, 22 nt, Human
cagagcugugauaaauagauau

SEQ ID NO: 392676 - RNA, 22 nt, Human
gagccuggauugucaccgacuu

SEQ ID NO: 392677 - RNA, 22 nt, Human
aagggugggcccuggcagccau

SEQ ID NO: 392678 - RNA, 22 nt, Human
cagggcagggccacacccccug

SEQ ID NO: 392679 - RNA, 22 nt, Human
agcugggaugauaaccucaguc

SEQ ID NO: 392680 - RNA, 22 nt, Human
aagcccagcugaaagcauuuuu

SEQ ID NO: 392681 - RNA, 22 nt, Human
uacaguaacauguuguacaagc

SEQ ID NO: 392682 - RNA, 22 nt, Human
uuauuauugugguugcauuauc

SEQ ID NO: 392683 - RNA, 23 nt, Human
uccaggagaauuccagggcccgg

SEQ ID NO: 392684 - RNA, 22 nt, Human
cagaguucaaagccugcuggga

SEQ ID NO: 392685 - RNA, 22 nt, Human
ugaggcagugauguuuaagcac

SEQ ID NO: 392686 - RNA, 22 nt, Human
cucccaagggguaagggagcug

SEQ ID NO: 392687 - RNA, 22 nt, Human
cagggcuggauccuccagacuc

SEQ ID NO: 392688 - RNA, 22 nt, Human
gugcauuucucauacacuaaau

SEQ ID NO: 392689 - RNA, 22 nt, Human
cagagccucagaauccugugga

SEQ ID NO: 392690 - RNA, 22 nt, Human
uccuugaaaggggcugcagggc

SEQ ID NO: 392691 - RNA, 22 nt, Human
aggcacugauucuguuuuccau

SEQ ID NO: 392692 - RNA, 22 nt, Human
uucugcaucugaauuuaaguac

SEQ ID NO: 392693 - RNA, 19 nt, Human
ugagugggccccugcagac

SEQ ID NO: 392694 - RNA, 22 nt, Human
uuagucaauagugaauauagag

SEQ ID NO: 392695 - RNA, 22 nt, Human
cucuuccuacagucugcuaugc

SEQ ID NO: 392696 - RNA, 22 nt, Human
auucuucaccauggauaauuug

SEQ ID NO: 392697 - RNA, 22 nt, Human
auuucaguagaaaaucuugauu

SEQ ID NO: 392698 - RNA, 22 nt, Human
augcuuuaaacuauaaauccac

SEQ ID NO: 392699 - RNA, 22 nt, Human
ucuggcucaaaauacguacucu

SEQ ID NO: 392700 - RNA, 22 nt, Human
acaaaugcuuaguucaccaaaa

SEQ ID NO: 392701 - RNA, 21 nt, Human
guguuuccuguuuauggcuug

SEQ ID NO: 392702 - RNA, 22 nt, Human
gcuguggaugcuauggaucauc

SEQ ID NO: 392703 - RNA, 22 nt, Human
uggcugaguucuccaggaguag

SEQ ID NO: 392704 - RNA, 22 nt, Human
uaaacagaaagcagauguacuu

SEQ ID NO: 392705 - RNA, 22 nt, Human
gaagagcuccaaaaacagugag

SEQ ID NO: 392706 - RNA, 22 nt, Human
ucauaaaaauagacucuaaagu

SEQ ID NO: 392707 - RNA, 22 nt, Human
aaguauauuuuuugaagcauau

SEQ ID NO: 392708 - RNA, 23 nt, Human
aucaaaguggaaaucaauuaucu

SEQ ID NO: 392709 - RNA, 22 nt, Human
augcaagauguauagaagacuu

SEQ ID NO: 392710 - RNA, 22 nt, Human
ccuguggcugccacuuggguga

SEQ ID NO: 392711 - RNA, 22 nt, Human
gagggcucacugagaaagcagu

SEQ ID NO: 392712 - RNA, 22 nt, Human
agaggccaggcugcagagggau

SEQ ID NO: 392713 - RNA, 22 nt, Human
guaaacaucagccacucuauuu

SEQ ID NO: 392714 - RNA, 22 nt, Human
aagggcucugugcuugucccau

SEQ ID NO: 392715 - RNA, 22 nt, Human
ccuggcagcagcacaugccuuc

SEQ ID NO: 392716 - RNA, 22 nt, Human
agugcacuggcaccaucucagc

SEQ ID NO: 392717 - RNA, 20 nt, Human
aaaaucucccagaaacuuau

SEQ ID NO: 392718 - RNA, 22 nt, Human
cagaggaagagauacaagcccu

SEQ ID NO: 392719 - RNA, 18 nt, Human
agggaguuuuagggaagg

SEQ ID NO: 392720 - RNA, 22 nt, Human
cccaggaagagugaguggcauu

SEQ ID NO: 392721 - RNA, 22 nt, Human
gccaggaggggagaguguguca

SEQ ID NO: 392722 - RNA, 22 nt, Human
auuaaaagcuucccaagaguua

SEQ ID NO: 392723 - RNA, 22 nt, Human
cagagaccccgcugcccuucug

SEQ ID NO: 392724 - RNA, 22 nt, Human
uaaagacacugguuuuaaucau

SEQ ID NO: 392725 - RNA, 22 nt, Human
agggccagaugaagccacaagc

SEQ ID NO: 392726 - RNA, 22 nt, Human
caauuucacuaaugaugugggg

SEQ ID NO: 392727 - RNA, 22 nt, Human
cuguccagcuuggcuccugggg

SEQ ID NO: 392728 - RNA, 22 nt, Human
ucuguucauaguaguguauaug

SEQ ID NO: 392729 - RNA, 22 nt, Human
caggccucccggugcacacuga

SEQ ID NO: 392730 - RNA, 20 nt, Human
gccuggaggcagagauaaag

SEQ ID NO: 392731 - RNA, 22 nt, Human
cugcucuguuaauuaaacuuug

SEQ ID NO: 392732 - RNA, 22 nt, Human
cuaagacaugcccugcaugaua

SEQ ID NO: 392733 - RNA, 22 nt, Human
agguggggaaaccagcgauccc

SEQ ID NO: 392734 - RNA, 22 nt, Human
ggccuugggauguggcugcagc

SEQ ID NO: 392735 - RNA, 22 nt, Human
uuugcauuucuaaugagcuccg

SEQ ID NO: 392736 - RNA, 20 nt, Human
uaagaacaagacuaggaagc

SEQ ID NO: 392737 - RNA, 19 nt, Human
ucugaaguccagggcauac

SEQ ID NO: 392738 - RNA, 19 nt, Human
gguagaagggaaguguuuu

SEQ ID NO: 392739 - RNA, 23 nt, Human
agaucugauguuaccaagaauug

SEQ ID NO: 392740 - RNA, 22 nt, Human
uauacagauuaacagauuuaaa

SEQ ID NO: 392741 - RNA, 22 nt, Human
cagcuggaggagcagcuuccag

SEQ ID NO: 392742 - RNA, 22 nt, Human
aggggugaaggcccgauaggag

SEQ ID NO: 392743 - RNA, 22 nt, Human
gccugagaaggauaggaagcga

SEQ ID NO: 392744 - RNA, 22 nt, Human
cgaugguucuggcugcuuguau

SEQ ID NO: 392745 - RNA, 22 nt, Human
uauuuccaagcugaauccaaug

SEQ ID NO: 392746 - RNA, 22 nt, Human
ucaggagaaucagggcuguccu

SEQ ID NO: 392747 - RNA, 22 nt, Human
aagagcuggaagugaagauaac

SEQ ID NO: 392748 - RNA, 22 nt, Human
uauugacagagggucagaagag

SEQ ID NO: 392749 - RNA, 22 nt, Human
cugggguggaggagcuccccug

SEQ ID NO: 392750 - RNA, 22 nt, Human
aggagaggcaucaagaaaaucg

SEQ ID NO: 392751 - RNA, 22 nt, Human
agcaaagucaguggaaccaucc

SEQ ID NO: 392752 - RNA, 22 nt, Human
ucauccaguaugacuggugucu

SEQ ID NO: 392753 - RNA, 22 nt, Human
aaggcaguaaaaucuaccuugc

SEQ ID NO: 392754 - RNA, 22 nt, Human
uuucuucagagagagcuuuccc

SEQ ID NO: 392755 - RNA, 22 nt, Human
cugggcuggcgcauccgacacg

SEQ ID NO: 392756 - RNA, 22 nt, Human
acccagcucuuugauggucuug

SEQ ID NO: 392757 - RNA, 19 nt, Human
ccagucccauacaggagau

SEQ ID NO: 392758 - RNA, 22 nt, Human
gcucucugggugugucuagaua

SEQ ID NO: 392759 - RNA, 20 nt, Human
ggcugcugugggcagagagg

SEQ ID NO: 392760 - RNA, 19 nt, Human
aucagcaagguaggaugug

SEQ ID NO: 392761 - RNA, 22 nt, Human
cacugggcaauucugagccuaa

SEQ ID NO: 392762 - RNA, 18 nt, Human
cucagagaugcccuuauu

SEQ ID NO: 392763 - RNA, 22 nt, Human
uaaucugaagaaacaggacuug

SEQ ID NO: 392764 - RNA, 22 nt, Human
ugcagugguugagagcccagac

SEQ ID NO: 392765 - RNA, 22 nt, Human
agcuucuugaccaagccuguaa

SEQ ID NO: 392766 - RNA, 22 nt, Human
caaggcaggaagccugucuuau

SEQ ID NO: 392767 - RNA, 22 nt, Human
uggagcugacucacaccagcua

SEQ ID NO: 392768 - RNA, 22 nt, Human
cuacuucugugaugaaacuaca

SEQ ID NO: 392769 - RNA, 22 nt, Human
auguguuuguaccuuuaaauau

SEQ ID NO: 392770 - RNA, 22 nt, Human
ucagagugaggcccagcaaucu

SEQ ID NO: 392771 - RNA, 22 nt, Human
aguaaugugccugaaauacuug

SEQ ID NO: 392772 - RNA, 22 nt, Human
cucugcaugccuugcucagaca

SEQ ID NO: 392773 - RNA, 22 nt, Human
uacauuugcuuugauuuucagc

SEQ ID NO: 392774 - RNA, 22 nt, Human
aacugcauucagaaagcucacu

SEQ ID NO: 392775 - RNA, 22 nt, Human
cagcccagcagggucuggcccu

SEQ ID NO: 392776 - RNA, 22 nt, Human
aggcugugagcaagaacaccua

SEQ ID NO: 392777 - RNA, 19 nt, Human
agucucaguguacagaggc

SEQ ID NO: 392778 - RNA, 22 nt, Human
uacccaggaggaaacugaggcu

SEQ ID NO: 392779 - RNA, 22 nt, Human
uggcccugaggggcugugcccc

SEQ ID NO: 392780 - RNA, 22 nt, Human
ccugcccagcuucccgagugca

SEQ ID NO: 392781 - RNA, 21 nt, Human
uuucuuaggcucuaaaaugac

SEQ ID NO: 392782 - RNA, 22 nt, Human
cuggcuuucccuggacaacagc

SEQ ID NO: 392783 - RNA, 22 nt, Human
cacugccugugagcugugugcc

SEQ ID NO: 392784 - RNA, 22 nt, Human
aucaguuuguauaugaaacacu

SEQ ID NO: 392785 - RNA, 22 nt, Human
ggcugcaguuugucuuuugcuu

SEQ ID NO: 392786 - RNA, 19 nt, Human
gcaggcaguggcauucgga

SEQ ID NO: 392787 - RNA, 22 nt, Human
gucaccagucccagcuccugaa

SEQ ID NO: 392788 - RNA, 22 nt, Human
gaggaugugucuggucugggca

SEQ ID NO: 392789 - RNA, 22 nt, Human
cuuagaaauaaugguuucaguu

SEQ ID NO: 392790 - RNA, 22 nt, Human
caagaugaaacuacagggagga

SEQ ID NO: 392791 - RNA, 18 nt, Human
agggucagugucacuggc

SEQ ID NO: 392792 - RNA, 17 nt, Human
aaguccagccugcagcu

SEQ ID NO: 392793 - RNA, 22 nt, Human
ggcuggguuauuuauggccaag

SEQ ID NO: 392794 - RNA, 22 nt, Human
cccagggacagaugggcagcua

SEQ ID NO: 392795 - RNA, 20 nt, Human
gaaauucucguauuaguuua

SEQ ID NO: 392796 - RNA, 19 nt, Human
uuacaucugcaacacuggu

SEQ ID NO: 392797 - RNA, 22 nt, Human
cugcugggcagaggcugcauga

SEQ ID NO: 392798 - RNA, 22 nt, Human
uuugagaagcaucugguccacu

SEQ ID NO: 392799 - RNA, 22 nt, Human
cucaggauuuaaaggggcacuc

SEQ ID NO: 392800 - RNA, 17 nt, Human
ucaugcccaacuauuac

SEQ ID NO: 392801 - RNA, 22 nt, Human
cugccucuguugggcauggucu

SEQ ID NO: 392802 - RNA, 22 nt, Human
ugauuaacugucuauuaaucau

SEQ ID NO: 392803 - RNA, 22 nt, Human
caugaaugcuggguucauguaa

SEQ ID NO: 392804 - RNA, 22 nt, Human
ucacugggagaugugggaaggg

SEQ ID NO: 392805 - RNA, 22 nt, Human
uacaaaguagaaauucaguaaa

SEQ ID NO: 392806 - RNA, 22 nt, Human
auuuguacaaauuuauguuagu

SEQ ID NO: 392807 - RNA, 22 nt, Human
gggcagcugccacuccgcuugc

SEQ ID NO: 392808 - RNA, 22 nt, Human
ggagcugcuccuucagccaagu

SEQ ID NO: 392809 - RNA, 17 nt, Human
gagauggguggaucacc

SEQ ID NO: 392810 - RNA, 22 nt, Human
uaugaacauguucauugacuua

SEQ ID NO: 392811 - RNA, 22 nt, Human
cuggccacaacuagcccaggac

SEQ ID NO: 392812 - RNA, 23 nt, Human
ucuccuccuagauacagucaugg

SEQ ID NO: 392813 - RNA, 22 nt, Human
augcugugccuggaaagcggcu

SEQ ID NO: 392814 - RNA, 22 nt, Human
uaggcaggcugaauguagauuu

SEQ ID NO: 392815 - RNA, 22 nt, Human
cacugggcguguccugggugag

SEQ ID NO: 392816 - RNA, 22 nt, Human
ugcuguuauacuuagcugguua

SEQ ID NO: 392817 - RNA, 21 nt, Human
ugcugaugucagagaagcaag

SEQ ID NO: 392818 - RNA, 19 nt, Human
aggguccagggagcggcuc

SEQ ID NO: 392819 - RNA, 22 nt, Human
aguggaccagaagacugaagcu

SEQ ID NO: 392820 - RNA, 22 nt, Human
aaaaaaucagaucuuugguuaa

SEQ ID NO: 392821 - RNA, 22 nt, Human
uuuaauacuauggggaugaaca

SEQ ID NO: 392822 - RNA, 22 nt, Human
uugcauugauguuccuucuugc

SEQ ID NO: 392823 - RNA, 22 nt, Human
uguuccaauaaggaguugaaau

SEQ ID NO: 392824 - RNA, 22 nt, Human
uuauaacaucaaucagaguuaa

SEQ ID NO: 392825 - RNA, 22 nt, Human
gaaaggucaguuccacuuccau

SEQ ID NO: 392826 - RNA, 22 nt, Human
ccagggugagugucauggguua

SEQ ID NO: 392827 - RNA, 22 nt, Human
aggaaaaaagucugugauuaua

SEQ ID NO: 392828 - RNA, 22 nt, Human
ccuccugguccagcaucucuuu

SEQ ID NO: 392829 - RNA, 22 nt, Human
gagccagguuugaaucucaguc

SEQ ID NO: 392830 - RNA, 22 nt, Human
ggcucagagaccugcgaucuga

SEQ ID NO: 392831 - RNA, 19 nt, Human
aggcaggugcagagguccc

SEQ ID NO: 392832 - RNA, 22 nt, Human
aaagccuugggauuugugauca

SEQ ID NO: 392833 - RNA, 22 nt, Human
ccugggagagucuguggucucc

SEQ ID NO: 392834 - RNA, 22 nt, Human
aucuggcuuucuuaaugacuua

SEQ ID NO: 392835 - RNA, 22 nt, Human
aguuucaguucugucauuuaua

SEQ ID NO: 392836 - RNA, 22 nt, Human
cuguuuucccuggaguucagca

SEQ ID NO: 392837 - RNA, 22 nt, Human
gguggaaggccuggaaggaggc

SEQ ID NO: 392838 - RNA, 19 nt, Human
aaaguuuuauucucauuug

SEQ ID NO: 392839 - RNA, 20 nt, Human
gucagaggacccuagagcga

SEQ ID NO: 392840 - RNA, 22 nt, Human
agccagccaguucacuaggaaa

SEQ ID NO: 392841 - RNA, 22 nt, Human
cuagaaaaauacuuuauuguga

SEQ ID NO: 392842 - RNA, 20 nt, Human
ggucccugcccucugucauc

SEQ ID NO: 392843 - RNA, 22 nt, Human
accucugcaguagggcugugcc

SEQ ID NO: 392844 - RNA, 22 nt, Human
uguccugcaacugaaggagaag

SEQ ID NO: 392845 - RNA, 22 nt, Human
uccuuaauucugugcaauaugu

SEQ ID NO: 392846 - RNA, 22 nt, Human
acacugugcagauucccuguga

SEQ ID NO: 392847 - RNA, 22 nt, Human
caaaugcaaaauauaacccugu

SEQ ID NO: 392848 - RNA, 22 nt, Human
aauggccagcaacaggagugaa

SEQ ID NO: 392849 - RNA, 20 nt, Human
cacaggccuugugagcagac

SEQ ID NO: 392850 - RNA, 22 nt, Human
aguggcagagaccccagccagc

SEQ ID NO: 392851 - RNA, 22 nt, Human
uaauuucuaauucauuuucagu

SEQ ID NO: 392852 - RNA, 22 nt, Human
uguugaagauaaaguucucauu

SEQ ID NO: 392853 - RNA, 22 nt, Human
gccuuugccugcgacguggcug

SEQ ID NO: 392854 - RNA, 22 nt, Human
uauguacaaucagcaguucaua

SEQ ID NO: 392855 - RNA, 21 nt, Human
uggcugaguggaugcaugaau

SEQ ID NO: 392856 - RNA, 22 nt, Human
cugcugcugagagcucagccug

SEQ ID NO: 392857 - RNA, 19 nt, Human
gggcuucugggaucaagag

SEQ ID NO: 392858 - RNA, 22 nt, Human
cuggcucauccagguguugcuc

SEQ ID NO: 392859 - RNA, 22 nt, Human
ggaggggccggcugccugccac

SEQ ID NO: 392860 - RNA, 17 nt, Human
cucugcagugcauggcu

SEQ ID NO: 392861 - RNA, 22 nt, Human
acagugugguuugagcacuggg

SEQ ID NO: 392862 - RNA, 22 nt, Human
caaaugauagagccgauuauca

SEQ ID NO: 392863 - RNA, 22 nt, Human
gcagggcacagacagugccaag

SEQ ID NO: 392864 - RNA, 22 nt, Human
ucuguucagaauuguaacacuc

SEQ ID NO: 392865 - RNA, 21 nt, Human
uggcccuggccacggcugcca

SEQ ID NO: 392866 - RNA, 22 nt, Human
gcccaguaguucaagguugcag

SEQ ID NO: 392867 - RNA, 22 nt, Human
guuuuaguggguggccacugau

SEQ ID NO: 392868 - RNA, 20 nt, Human
guucucacugaucugcaggg

SEQ ID NO: 392869 - RNA, 20 nt, Human
acuguucaagggccuggugg

SEQ ID NO: 392870 - RNA, 22 nt, Human
cugagggccuuggcuccugccc

SEQ ID NO: 392871 - RNA, 22 nt, Human
acagaauuuacacaucucuaaa

SEQ ID NO: 392872 - RNA, 22 nt, Human
cugccucuccccagaguggccc

SEQ ID NO: 392873 - RNA, 22 nt, Human
ucagaccauccugcuguuagug

SEQ ID NO: 392874 - RNA, 22 nt, Human
ccuguguggccaggcuggaguc

SEQ ID NO: 392875 - RNA, 22 nt, Human
gguggagcuguggacaggaagg

SEQ ID NO: 392876 - RNA, 22 nt, Human
agagggcugccucagucagcua

SEQ ID NO: 392877 - RNA, 22 nt, Human
cagucaccugaagacuugacca

SEQ ID NO: 392878 - RNA, 22 nt, Human
guguccuuuuaugugacugguu

SEQ ID NO: 392879 - RNA, 22 nt, Human
ugcucccaggcauucucuguug

SEQ ID NO: 392880 - RNA, 18 nt, Human
uguagagccagguuugcc

SEQ ID NO: 392881 - RNA, 22 nt, Human
uagccuucucaagacaaaguug

SEQ ID NO: 392882 - RNA, 22 nt, Human
cauuugaaugagauugcuguaa

SEQ ID NO: 392883 - RNA, 19 nt, Human
gcucagagggcccugugcu

SEQ ID NO: 392884 - RNA, 22 nt, Human
aguguuucuggcaaaugaaagu

SEQ ID NO: 392885 - RNA, 22 nt, Human
cuagucacucagcacugacaaa

SEQ ID NO: 392886 - RNA, 22 nt, Human
uugcugaagugaagguauguuu

SEQ ID NO: 392887 - RNA, 22 nt, Human
uggaaagaauuccuaugguuca

SEQ ID NO: 392888 - RNA, 22 nt, Human
uugagaagaaauaguuugcaau

SEQ ID NO: 392889 - RNA, 19 nt, Human
gccucugcuggggacaggc

SEQ ID NO: 392890 - RNA, 22 nt, Human
ucuaaaaaagucuguucacuug

SEQ ID NO: 392891 - RNA, 22 nt, Human
acugaaauacugcucuuggauu

SEQ ID NO: 392892 - RNA, 22 nt, Human
gccugagaaggacacagcaggu

SEQ ID NO: 392893 - RNA, 21 nt, Human
ugggaccuauuucaacuggau

SEQ ID NO: 392894 - RNA, 22 nt, Human
aaugccuucaaguaucugagga

SEQ ID NO: 392895 - RNA, 21 nt, Human
ugaucauuuguguaaaggaga

SEQ ID NO: 392896 - RNA, 22 nt, Human
gcuuuauuuugugagggauuac

SEQ ID NO: 392897 - RNA, 22 nt, Human
cauuuauauaaaauguccagaa

SEQ ID NO: 392898 - RNA, 22 nt, Human
uuccaugaagggcagccucuca

SEQ ID NO: 392899 - RNA, 22 nt, Human
caguccuuaaggaaacauuugu

SEQ ID NO: 392900 - RNA, 22 nt, Human
uuuuugaaggcugaugugauua

SEQ ID NO: 392901 - RNA, 22 nt, Human
gguggccucgguggugcacagg

SEQ ID NO: 392902 - RNA, 22 nt, Human
uuuauccauucaccaguugaac

SEQ ID NO: 392903 - RNA, 22 nt, Human
ugccugugucacagugauguuu

SEQ ID NO: 392904 - RNA, 22 nt, Human
uaaacagaaugcguaagaagug

SEQ ID NO: 392905 - RNA, 22 nt, Human
guaaaauucuagcaucugaaag

SEQ ID NO: 392906 - RNA, 22 nt, Human
uaauaaaugaaagugcuggcau

SEQ ID NO: 392907 - RNA, 22 nt, Human
gugccugggcaugagcuuguug

SEQ ID NO: 392908 - RNA, 22 nt, Human
cccaggaggcagagauagcagu

SEQ ID NO: 392909 - RNA, 22 nt, Human
uuucugcucgcucucaaucagg

SEQ ID NO: 392910 - RNA, 23 nt, Human
acuauaaaguuguucugauuuac

SEQ ID NO: 392911 - RNA, 22 nt, Human
aaacaugagcauuucuguuuaa

SEQ ID NO: 392912 - RNA, 22 nt, Human
agggcuccuaugaugcucugcc

SEQ ID NO: 392913 - RNA, 22 nt, Human
gugccuggcaugcgccggugcu

SEQ ID NO: 392914 - RNA, 22 nt, Human
uuuccucugaugcugacuugga

SEQ ID NO: 392915 - RNA, 22 nt, Human
guaaaauugcaauuacuuuugc

SEQ ID NO: 392916 - RNA, 22 nt, Human
ugccuggaaggcccaugggaag

SEQ ID NO: 392917 - RNA, 22 nt, Human
uggcuucuuagaccaguggccu

SEQ ID NO: 392918 - RNA, 22 nt, Human
gugcugugcgcuuuuucuguau

SEQ ID NO: 392919 - RNA, 22 nt, Human
ggagcagggaauuacagcgcag

SEQ ID NO: 392920 - RNA, 20 nt, Human
cuucuucaguaguuuguucu

SEQ ID NO: 392921 - RNA, 22 nt, Human
aggagcccugcgggaggcagag

SEQ ID NO: 392922 - RNA, 22 nt, Human
uuaccuaaaauagcucaauuua

SEQ ID NO: 392923 - RNA, 22 nt, Human
agcccaggugagggguucgaaa

SEQ ID NO: 392924 - RNA, 22 nt, Human
ucuuuccucugagcuccuguag

SEQ ID NO: 392925 - RNA, 22 nt, Human
ucagagugugacuuggucauga

SEQ ID NO: 392926 - RNA, 22 nt, Human
aggggagguggcagaaaugugc

SEQ ID NO: 392927 - RNA, 22 nt, Human
ccaggauggggagcagauagaa

SEQ ID NO: 392928 - RNA, 20 nt, Human
cugagcccccagccugcagg

SEQ ID NO: 392929 - RNA, 22 nt, Human
gaggcucagagagguccacaua

SEQ ID NO: 392930 - RNA, 22 nt, Human
cggcugagcagugcugauggaa

SEQ ID NO: 392931 - RNA, 22 nt, Human
gauuucaaguaucuugggcgag

SEQ ID NO: 392932 - RNA, 23 nt, Human
agggugagcaagcuauggagacc

SEQ ID NO: 392933 - RNA, 22 nt, Human
gcuuucuugguucugcaggggc

SEQ ID NO: 392934 - RNA, 22 nt, Human
uauuucagcccuacuacuuggc

SEQ ID NO: 392935 - RNA, 22 nt, Human
acuggcaguagagggagcgcau

SEQ ID NO: 392936 - RNA, 22 nt, Human
cugucauugagccugucagggc

SEQ ID NO: 392937 - RNA, 22 nt, Human
ggccuugguaaagggaugcaug

SEQ ID NO: 392938 - RNA, 22 nt, Human
uggaaauguauuugggcaugcc

SEQ ID NO: 392939 - RNA, 22 nt, Human
ccuaggccuuacuuuccugugc

SEQ ID NO: 392940 - RNA, 22 nt, Human
uucacauuucauaccacagcuu

SEQ ID NO: 392941 - RNA, 22 nt, Human
uucuucuuuccuauaauuaauu

SEQ ID NO: 392942 - RNA, 22 nt, Human
ggcucaggaugagccuucucau

SEQ ID NO: 392943 - RNA, 23 nt, Human
gccucugcucugcguuggggacu

SEQ ID NO: 392944 - RNA, 22 nt, Human
aggacagcagugcuggcacuug

SEQ ID NO: 392945 - RNA, 22 nt, Human
acagcagcuaaccccugggcca

SEQ ID NO: 392946 - RNA, 22 nt, Human
ucagaauuugauuccugggaua

SEQ ID NO: 392947 - RNA, 22 nt, Human
aaugccuuuccacuggguauca

SEQ ID NO: 392948 - RNA, 22 nt, Human
aaggcugagacagcacaggucc

SEQ ID NO: 392949 - RNA, 22 nt, Human
guacauuggcaacucucuuaga

SEQ ID NO: 392950 - RNA, 22 nt, Human
ccucuccaguuuuaacgugacc

SEQ ID NO: 392951 - RNA, 22 nt, Human
agucucugcaugccugcugugc

SEQ ID NO: 392952 - RNA, 22 nt, Human
cuuugcauacaauuuuuagaaa

SEQ ID NO: 392953 - RNA, 22 nt, Human
gagggagggacuagcauucucu

SEQ ID NO: 392954 - RNA, 22 nt, Human
ugggccuggacaaggccacuag

SEQ ID NO: 392955 - RNA, 22 nt, Human
aggccagguggucaugcuugcu

SEQ ID NO: 392956 - RNA, 22 nt, Human
ccaguggacuucucccuguggu

SEQ ID NO: 392957 - RNA, 22 nt, Human
cccagggacagcuagguggggc

SEQ ID NO: 392958 - RNA, 22 nt, Human
gccugcagccagggaguucucu

SEQ ID NO: 392959 - RNA, 22 nt, Human
uccagggaccucccugagagcu

SEQ ID NO: 392960 - RNA, 22 nt, Human
ucagaggacagcagcuaaauaa

SEQ ID NO: 392961 - RNA, 22 nt, Human
uuucuguauuuaaaagaucugg

SEQ ID NO: 392962 - RNA, 22 nt, Human
acuggauuccauugugcaaaga

SEQ ID NO: 392963 - RNA, 22 nt, Human
gagacugcauagauggccacaa

SEQ ID NO: 392964 - RNA, 22 nt, Human
ggaagccaugagggacaguucu

SEQ ID NO: 392965 - RNA, 20 nt, Human
uguuccaagcuaaugaauga

SEQ ID NO: 392966 - RNA, 22 nt, Human
gaguccaguucuuuccagcagu

SEQ ID NO: 392967 - RNA, 22 nt, Human
aaacaugagcaucucuucaagc

SEQ ID NO: 392968 - RNA, 22 nt, Human
ggcucaccauuuucacucucug

SEQ ID NO: 392969 - RNA, 22 nt, Human
cagcaguguggaagcugagggg

SEQ ID NO: 392970 - RNA, 22 nt, Human
aguaaaaucuuaagcacagugg

SEQ ID NO: 392971 - RNA, 22 nt, Human
caacugcugacaccaucacucc

SEQ ID NO: 392972 - RNA, 22 nt, Human
gaugaggcucaugcacccugcg

SEQ ID NO: 392973 - RNA, 21 nt, Human
cccaggucguggucuucccag

SEQ ID NO: 392974 - RNA, 22 nt, Human
agugccuggaccccaugacaua

SEQ ID NO: 392975 - RNA, 22 nt, Human
guuuauuauucaacuucauguu

SEQ ID NO: 392976 - RNA, 22 nt, Human
agcugguaugaacaggauagga

SEQ ID NO: 392977 - RNA, 22 nt, Human
uaguccuugcugggcacagagu

SEQ ID NO: 392978 - RNA, 22 nt, Human
cugaggugcuauggaggauacg

SEQ ID NO: 392979 - RNA, 22 nt, Human
ggcucagaaacuaaaggcgcug

SEQ ID NO: 392980 - RNA, 22 nt, Human
auucuggccuuggcucugucac

SEQ ID NO: 392981 - RNA, 22 nt, Human
ucaaaagucugcauucuucaca

SEQ ID NO: 392982 - RNA, 20 nt, Human
aggcucagagcaguaguaca

SEQ ID NO: 392983 - RNA, 22 nt, Human
cacagcuucuccuugauaucgc

SEQ ID NO: 392984 - RNA, 22 nt, Human
ggccugcuuuccgagccugcag

SEQ ID NO: 392985 - RNA, 22 nt, Human
ucaaaauuaaaccaacguccag

SEQ ID NO: 392986 - RNA, 22 nt, Human
cagaggcucagauggcccuggc

SEQ ID NO: 392987 - RNA, 22 nt, Human
gcagcugcagacccucagugcu

SEQ ID NO: 392988 - RNA, 22 nt, Human
uaccuuggguugaguucauucu

SEQ ID NO: 392989 - RNA, 22 nt, Human
uacuuccagcaaucugcauauu

SEQ ID NO: 392990 - RNA, 22 nt, Human
uggcaguguauagguggcuccu

SEQ ID NO: 392991 - RNA, 22 nt, Human
gcacaugagcugcugggauggg

SEQ ID NO: 392992 - RNA, 22 nt, Human
uucuguauauuguaaagacuca

SEQ ID NO: 392993 - RNA, 22 nt, Human
agggcagaggcggacacggaag

SEQ ID NO: 392994 - RNA, 22 nt, Human
gagcuguccuaccaggaguccu

SEQ ID NO: 392995 - RNA, 22 nt, Human
gaaggcuguuucugguagugau

SEQ ID NO: 392996 - RNA, 22 nt, Human
uaggaaaagucuagauugauga

SEQ ID NO: 392997 - RNA, 22 nt, Human
ugaugguugauuauaaaucagu

SEQ ID NO: 392998 - RNA, 22 nt, Human
agaagccaccagcugaggaaga

SEQ ID NO: 392999 - RNA, 22 nt, Human
ugcaguggaggccgugagacag

SEQ ID NO: 393000 - RNA, 22 nt, Human
uugauacauuuuuaggauaaac

SEQ ID NO: 393001 - RNA, 22 nt, Human
caggguacagaguuuucuaaac

SEQ ID NO: 393002 - RNA, 22 nt, Human
ugcagggaggccccgcagcccu

SEQ ID NO: 393003 - RNA, 22 nt, Human
uuuguguuuguacaaugcacua

SEQ ID NO: 393004 - RNA, 22 nt, Human
cuugcaggauuuugcugcugua

SEQ ID NO: 393005 - RNA, 22 nt, Human
gugucacaagagcccaggaaac

SEQ ID NO: 393006 - RNA, 23 nt, Human
ggaaagagaggaguugugcauag

SEQ ID NO: 393007 - RNA, 22 nt, Human
aagucauuaucucuucuaaucu

SEQ ID NO: 393008 - RNA, 22 nt, Human
cuggcuuuggucaugugaucau

SEQ ID NO: 393009 - RNA, 22 nt, Human
cccuggagggcagacagaugcc

SEQ ID NO: 393010 - RNA, 22 nt, Human
cacugcaguaacucuaggacug

SEQ ID NO: 393011 - RNA, 22 nt, Human
agagagggcauagaaaaaggga

SEQ ID NO: 393012 - RNA, 22 nt, Human
gcagcuggcucagagagguggg

SEQ ID NO: 393013 - RNA, 22 nt, Human
uugaccauaccuccaggcaguu

SEQ ID NO: 393014 - RNA, 22 nt, Human
cacaauuuccuugcuucacuuu

SEQ ID NO: 393015 - RNA, 22 nt, Human
cagaggcaaaagagguggaggu

SEQ ID NO: 393016 - RNA, 22 nt, Human
aauuaguaaccuaauuccaucu

SEQ ID NO: 393017 - RNA, 22 nt, Human
cugcaggcaucuaacugugggc

SEQ ID NO: 393018 - RNA, 22 nt, Human
caggauggucuucauuuggcuc

SEQ ID NO: 393019 - RNA, 22 nt, Human
guggcacagugggagagcccca

SEQ ID NO: 393020 - RNA, 22 nt, Human
aggcuggaguacaguggcuauu

SEQ ID NO: 393021 - RNA, 22 nt, Human
caagaaucagaccugucagggu

SEQ ID NO: 393022 - RNA, 22 nt, Human
cgcaccacugaauuccagccug

SEQ ID NO: 393023 - RNA, 22 nt, Human
cagagcugguaagugguagagg

SEQ ID NO: 393024 - RNA, 22 nt, Human
ccugccuggaucagccauccug

SEQ ID NO: 393025 - RNA, 22 nt, Human
ugccugaguuuaacccucagag

SEQ ID NO: 393026 - RNA, 22 nt, Human
cuugcaggcagggccuccugga

SEQ ID NO: 393027 - RNA, 22 nt, Human
uggguggcacuucuggggucca

SEQ ID NO: 393028 - RNA, 22 nt, Human
ucuggagcgaggucccugucug

SEQ ID NO: 393029 - RNA, 21 nt, Human
ugcuucucuagaucaacuacu

SEQ ID NO: 393030 - RNA, 22 nt, Human
auugaaaauaaggccagaaaca

SEQ ID NO: 393031 - RNA, 22 nt, Human
aacagaaaagguagguggcuuu

SEQ ID NO: 393032 - RNA, 22 nt, Human
ucuggcucggauuugucuagca

SEQ ID NO: 393033 - RNA, 22 nt, Human
aaggcagauauaaagacuagag

SEQ ID NO: 393034 - RNA, 22 nt, Human
uucuggagaucugccuauggga

SEQ ID NO: 393035 - RNA, 22 nt, Human
caggagccgccaggcacguugg

SEQ ID NO: 393036 - RNA, 22 nt, Human
gcuguucauagaaauggucuca

SEQ ID NO: 393037 - RNA, 22 nt, Human
cagaaccaggaacugauggaga

SEQ ID NO: 393038 - RNA, 22 nt, Human
cuuuguagcugcuucugauuua

SEQ ID NO: 393039 - RNA, 22 nt, Human
acauaauagguaccugaauaau

SEQ ID NO: 393040 - RNA, 22 nt, Human
uugggcugaacccugcagcuga

SEQ ID NO: 393041 - RNA, 22 nt, Human
accaucagagcacaguccgugc

SEQ ID NO: 393042 - RNA, 19 nt, Human
uuugugaagaaaaugaugc

SEQ ID NO: 393043 - RNA, 22 nt, Human
ccagagugacgugaagugugaa

SEQ ID NO: 393044 - RNA, 22 nt, Human
gcucacugccauucucuagaug

SEQ ID NO: 393045 - RNA, 20 nt, Human
caagcccucuuuagccugcc

SEQ ID NO: 393046 - RNA, 22 nt, Human
gcaggugguccccguggagugg

SEQ ID NO: 393047 - RNA, 22 nt, Human
ucucaggggauucacuggcacc

SEQ ID NO: 393048 - RNA, 22 nt, Human
uaguuauuauuguuacuaucag

SEQ ID NO: 393049 - RNA, 22 nt, Human
ucucagagcaucauuuucuuag

SEQ ID NO: 393050 - RNA, 21 nt, Human
ccugagccuguuuauccagaa

SEQ ID NO: 393051 - RNA, 22 nt, Human
accccagaggcggaggcugcag

SEQ ID NO: 393052 - RNA, 22 nt, Human
gcugauccuuuuaugucuagcu

SEQ ID NO: 393053 - RNA, 22 nt, Human
caggccugugaguugaggcccc

SEQ ID NO: 393054 - RNA, 16 nt, Human
cagcuuuaugucagug

SEQ ID NO: 393055 - RNA, 21 nt, Human
accagcaggagaucagaagga

SEQ ID NO: 393056 - RNA, 22 nt, Human
aacuuugaggucacugaauucc

SEQ ID NO: 393057 - RNA, 22 nt, Human
gggcuggggcucaauaauuugu

SEQ ID NO: 393058 - RNA, 22 nt, Human
aaauauguaagauuagcacuag

SEQ ID NO: 393059 - RNA, 22 nt, Human
gaaaucugcccagugcacuggu

SEQ ID NO: 393060 - RNA, 22 nt, Human
ucugucaggagauuggcagcug

SEQ ID NO: 393061 - RNA, 22 nt, Human
agccuucaguaaauccacugug

SEQ ID NO: 393062 - RNA, 22 nt, Human
acccaggaggugacacagggcu

SEQ ID NO: 393063 - RNA, 22 nt, Human
agcauggggcaaugcaugugcu

SEQ ID NO: 393064 - RNA, 22 nt, Human
uaggagcuaaaauauuuuauau

SEQ ID NO: 393065 - RNA, 22 nt, Human
gucaggaugacaagugcuuuca

SEQ ID NO: 393066 - RNA, 19 nt, Human
gacucacaccuuccgcugu

SEQ ID NO: 393067 - RNA, 22 nt, Human
gcagaagggaauaaggagcuuu

SEQ ID NO: 393068 - RNA, 22 nt, Human
uuauguacucugcaauguuuga

SEQ ID NO: 393069 - RNA, 22 nt, Human
uggcaggggaggugcuugcuua

SEQ ID NO: 393070 - RNA, 21 nt, Human
gggccuggcugcgcaggacgg

SEQ ID NO: 393071 - RNA, 22 nt, Human
ugugccuggaucucugugacaa

SEQ ID NO: 393072 - RNA, 22 nt, Human
ggccucaguuucuccauggguu

SEQ ID NO: 393073 - RNA, 22 nt, Human
gguuucaaaguggacaguuagu

SEQ ID NO: 393074 - RNA, 23 nt, Human
uggcucagggucucuuaugaagu

SEQ ID NO: 393075 - RNA, 22 nt, Human
caggugcucccagagaagugcu

SEQ ID NO: 393076 - RNA, 22 nt, Human
acucacuuuccauucaagcacc

SEQ ID NO: 393077 - RNA, 22 nt, Human
aagggcaggagaagacggauau

SEQ ID NO: 393078 - RNA, 22 nt, Human
cccaggagccaucugucuuggc

SEQ ID NO: 393079 - RNA, 22 nt, Human
gggagguucuguucgcacuuga

SEQ ID NO: 393080 - RNA, 22 nt, Human
aaggccagcuuguagggcuggu

SEQ ID NO: 393081 - RNA, 21 nt, Human
agaaaaguagaguuuucagag

SEQ ID NO: 393082 - RNA, 22 nt, Human
cuggccuuuagccccagugucu

SEQ ID NO: 393083 - RNA, 22 nt, Human
aggcugaggggcgagggacccu

SEQ ID NO: 393084 - RNA, 22 nt, Human
uaggccagaggagcagcuuugg

SEQ ID NO: 393085 - RNA, 23 nt, Human
gccugccugaccugugcaaaguc

SEQ ID NO: 393086 - RNA, 22 nt, Human
uucaaugaggauagaacuggau

SEQ ID NO: 393087 - RNA, 22 nt, Human
auuuaaugucgagcuauuguag

SEQ ID NO: 393088 - RNA, 18 nt, Human
agagaugguguagaguuu

SEQ ID NO: 393089 - RNA, 22 nt, Human
ggcacugaaguggguguugggu

SEQ ID NO: 393090 - RNA, 22 nt, Human
uaugcacacaggcuuaauucau

SEQ ID NO: 393091 - RNA, 22 nt, Human
aaguaaauaucuguuuauagca

SEQ ID NO: 393092 - RNA, 18 nt, Human
gguggcucagucaugggg

SEQ ID NO: 393093 - RNA, 22 nt, Human
gcugccaugccacagcacucac

SEQ ID NO: 393094 - RNA, 19 nt, Human
uagcagcugccaaaggaga

SEQ ID NO: 393095 - RNA, 22 nt, Human
aggaaacuguccccucauccua

SEQ ID NO: 393096 - RNA, 22 nt, Human
ggcugcuguuucagagacuguu

SEQ ID NO: 393097 - RNA, 22 nt, Human
cugaauaauguucucuuguaug

SEQ ID NO: 393098 - RNA, 22 nt, Human
ucacuuauaaaaugcaagaucu

SEQ ID NO: 393099 - RNA, 22 nt, Human
ccaggugugccagcagggacug

SEQ ID NO: 393100 - RNA, 22 nt, Human
gcugcccucccagggcaagcuu

SEQ ID NO: 393101 - RNA, 19 nt, Human
uaaggccaaaaguaagugu

SEQ ID NO: 393102 - RNA, 22 nt, Human
cugagggcaugaacauuccaua

SEQ ID NO: 393103 - RNA, 23 nt, Human
aucaagauaauccagaugaccua

SEQ ID NO: 393104 - RNA, 22 nt, Human
ugcuuccugaggccgucuucuc

SEQ ID NO: 393105 - RNA, 22 nt, Human
gagcaggcucugccuguguguc

SEQ ID NO: 393106 - RNA, 22 nt, Human
cagaauaaagguacaauugagu

SEQ ID NO: 393107 - RNA, 22 nt, Human
cugugcuggagaugggccagag

SEQ ID NO: 393108 - RNA, 20 nt, Human
gaagccagaggggaaaggag

SEQ ID NO: 393109 - RNA, 22 nt, Human
aagcagcugauuucacagcuca

SEQ ID NO: 393110 - RNA, 22 nt, Human
ugggacuuguguggcaguauuu

SEQ ID NO: 393111 - RNA, 22 nt, Human
aauacugagaucccacaaagca

SEQ ID NO: 393112 - RNA, 22 nt, Human
gccaggcaggccacgcuguguu

SEQ ID NO: 393113 - RNA, 22 nt, Human
gucagaggggcagcugccaggc

SEQ ID NO: 393114 - RNA, 22 nt, Human
gagucaccacacggugcugacu

SEQ ID NO: 393115 - RNA, 22 nt, Human
agcagggcaugaauaaggguuu

SEQ ID NO: 393116 - RNA, 22 nt, Human
ggagguggcagagggacauucu

SEQ ID NO: 393117 - RNA, 22 nt, Human
caguggcaaugggacagagcac

SEQ ID NO: 393118 - RNA, 22 nt, Human
aagacugucuuuucugagugac

SEQ ID NO: 393119 - RNA, 22 nt, Human
gcugucccgaaccccugguaau

SEQ ID NO: 393120 - RNA, 22 nt, Human
ucaguuuuuaagaguuaugcga

SEQ ID NO: 393121 - RNA, 20 nt, Human
auucuaaagcucugcucuuu

SEQ ID NO: 393122 - RNA, 20 nt, Human
uggagcuccagcguccaugu

SEQ ID NO: 393123 - RNA, 22 nt, Human
uuccuuagcuccucauggccug

SEQ ID NO: 393124 - RNA, 22 nt, Human
cugggcagccucacacaauguu

SEQ ID NO: 393125 - RNA, 22 nt, Human
aaauaauguuaggccuuugcuc

SEQ ID NO: 393126 - RNA, 20 nt, Human
agaaaaaguguggaaauuuc

SEQ ID NO: 393127 - RNA, 18 nt, Human
gggcccuggcguccgccc

SEQ ID NO: 393128 - RNA, 22 nt, Human
uaauuucagugcaagcucacgg

SEQ ID NO: 393129 - RNA, 22 nt, Human
cugucucuguugccuguaggug

SEQ ID NO: 393130 - RNA, 22 nt, Human
aggcagccuuuagacagucugc

SEQ ID NO: 393131 - RNA, 22 nt, Human
gcagagccugggggucugcgga

SEQ ID NO: 393132 - RNA, 22 nt, Human
ugcuggccgugagcucucggga

SEQ ID NO: 393133 - RNA, 22 nt, Human
aucuauuaugcugagaaacugu

SEQ ID NO: 393134 - RNA, 22 nt, Human
acauuucuucccuuuagcagaa

SEQ ID NO: 393135 - RNA, 22 nt, Human
cauaauauacuacauugaugaa

SEQ ID NO: 393136 - RNA, 22 nt, Human
cagaagaguagcugaacaaguu

SEQ ID NO: 393137 - RNA, 22 nt, Human
auacaucucauguaagagauaa

SEQ ID NO: 393138 - RNA, 22 nt, Human
gggcugaccccaccccucacuc

SEQ ID NO: 393139 - RNA, 22 nt, Human
caaggaaaacagaugaucaaca

SEQ ID NO: 393140 - RNA, 22 nt, Human
gcugggcagccccuacagagag

SEQ ID NO: 393141 - RNA, 22 nt, Human
cauguuuuguguacagaauauu

SEQ ID NO: 393142 - RNA, 22 nt, Human
ugaaguuauauauguugaaaau

SEQ ID NO: 393143 - RNA, 22 nt, Human
uggcagcuaucuuuaaugagau

SEQ ID NO: 393144 - RNA, 22 nt, Human
uuucauaaugucacagucaaaa

SEQ ID NO: 393145 - RNA, 22 nt, Human
cugcucuggcguacucggcauc

SEQ ID NO: 393146 - RNA, 20 nt, Human
ccuggcugcauucaggacgg

SEQ ID NO: 393147 - RNA, 22 nt, Human
ucuuugcuccacacucuagaga

SEQ ID NO: 393148 - RNA, 22 nt, Human
gcuuuccuggcccugucccugc

SEQ ID NO: 393149 - RNA, 22 nt, Human
aagcugcccuguguuagaguuc

SEQ ID NO: 393150 - RNA, 22 nt, Human
ugcauugcauuugucaugaaga

SEQ ID NO: 393151 - RNA, 22 nt, Human
gggaggcuggcucuggccacag

SEQ ID NO: 393152 - RNA, 22 nt, Human
cuuuauguucaguacaaugcuu

SEQ ID NO: 393153 - RNA, 22 nt, Human
agaacagcaguuaugguucauu

SEQ ID NO: 393154 - RNA, 22 nt, Human
cagcugucuaaguugagcagga

SEQ ID NO: 393155 - RNA, 22 nt, Human
cccuggaggaccccaauguggc

SEQ ID NO: 393156 - RNA, 22 nt, Human
gugcuuucugcugcauuccucu

SEQ ID NO: 393157 - RNA, 22 nt, Human
ccuauacaggcuucuuuacaug

SEQ ID NO: 393158 - RNA, 22 nt, Human
ugaagccauuacuguguuaggg

SEQ ID NO: 393159 - RNA, 22 nt, Human
cagccagguaugggcgugcggg

SEQ ID NO: 393160 - RNA, 22 nt, Human
agccacagcuccuugguggaga

SEQ ID NO: 393161 - RNA, 22 nt, Human
agcuuuauauaaaagaguacau

SEQ ID NO: 393162 - RNA, 17 nt, Human
accagccucuccugggg

SEQ ID NO: 393163 - RNA, 22 nt, Human
ugaggcaggaguucaggcugcg

SEQ ID NO: 393164 - RNA, 22 nt, Human
uauuucugggaguucagaaauu

SEQ ID NO: 393165 - RNA, 22 nt, Human
aagcagaaaaacugagcuccaa

SEQ ID NO: 393166 - RNA, 22 nt, Human
augcuuaagcucaguuauauau

SEQ ID NO: 393167 - RNA, 22 nt, Human
acuuugugcccaacagaaagaa

SEQ ID NO: 393168 - RNA, 22 nt, Human
uagugaaauuuaugcacagcua

SEQ ID NO: 393169 - RNA, 22 nt, Human
ugggcacaaacaucugccuguu

SEQ ID NO: 393170 - RNA, 22 nt, Human
cagucucuugcuucauuaguug

SEQ ID NO: 393171 - RNA, 22 nt, Human
gggcugagacgauggggucuuc

SEQ ID NO: 393172 - RNA, 19 nt, Human
aggguggcaaaggagggug

SEQ ID NO: 393173 - RNA, 22 nt, Human
ggccgggcaggucucagccagc

SEQ ID NO: 393174 - RNA, 22 nt, Human
gcagaggaucaggcucuggaaa

SEQ ID NO: 393175 - RNA, 22 nt, Human
ugcauuccuccaccuccugcac

SEQ ID NO: 393176 - RNA, 22 nt, Human
uuccaugaaauguguuaugcuu

SEQ ID NO: 393177 - RNA, 18 nt, Human
gaggccugagaaccaggu

SEQ ID NO: 393178 - RNA, 18 nt, Human
gggcucacacaggucauc

SEQ ID NO: 393179 - RNA, 22 nt, Human
aagggcugagcacagugagcca

SEQ ID NO: 393180 - RNA, 22 nt, Human
auguuauuuuggaaaauacaaa

SEQ ID NO: 393181 - RNA, 22 nt, Human
uagaauaaguugaugauauaug

SEQ ID NO: 393182 - RNA, 22 nt, Human
caugagcugcugggagccuguc

SEQ ID NO: 393183 - RNA, 22 nt, Human
ggagccugggcauuaguaauuu

SEQ ID NO: 393184 - RNA, 20 nt, Human
agggcagagggauuacaggc

SEQ ID NO: 393185 - RNA, 22 nt, Human
uauuagggaacugcaagacuaa

SEQ ID NO: 393186 - RNA, 22 nt, Human
ucugugacuugcgggaggagaa

SEQ ID NO: 393187 - RNA, 22 nt, Human
cgcagcagccccgugguaggug

SEQ ID NO: 393188 - RNA, 23 nt, Human
ccagggccccuacaccacugucc

SEQ ID NO: 393189 - RNA, 22 nt, Human
uuacagaaagguugugggauag

SEQ ID NO: 393190 - RNA, 22 nt, Human
guuccaggcaagugggauagga

SEQ ID NO: 393191 - RNA, 22 nt, Human
ugcaggcaggggaugagcagcc

SEQ ID NO: 393192 - RNA, 22 nt, Human
uuacuuuguucucaagauaugu

SEQ ID NO: 393193 - RNA, 22 nt, Human
gcagugaacauaacacagaagg

SEQ ID NO: 393194 - RNA, 22 nt, Human
aagaaauuaaugugccauuacu

SEQ ID NO: 393195 - RNA, 22 nt, Human
gggcuccagcccgggaccaggu

SEQ ID NO: 393196 - RNA, 23 nt, Human
uggcucugagagguucagaugcu

SEQ ID NO: 393197 - RNA, 22 nt, Human
aaacagaaauuuccucaugcuc

SEQ ID NO: 393198 - RNA, 18 nt, Human
aggcacagagcauacaua

SEQ ID NO: 393199 - RNA, 18 nt, Human
aggcagacacuagagguc

SEQ ID NO: 393200 - RNA, 22 nt, Human
uugcuauuuugagagucauagu

SEQ ID NO: 393201 - RNA, 22 nt, Human
uacuuuaaaaacugauaauuca

SEQ ID NO: 393202 - RNA, 22 nt, Human
aucagcaagcauuuauugagug

SEQ ID NO: 393203 - RNA, 22 nt, Human
cuggagccaugucuugacugcu

SEQ ID NO: 393204 - RNA, 22 nt, Human
aacaggcaaacugugggauccc

SEQ ID NO: 393205 - RNA, 22 nt, Human
uccuucaagaugccacagcuuu

SEQ ID NO: 393206 - RNA, 18 nt, Human
cugugcagcaaacugagc

SEQ ID NO: 393207 - RNA, 22 nt, Human
uucuuagaugauuaaugauggg

SEQ ID NO: 393208 - RNA, 22 nt, Human
cacaauuuguuuuaucaguauu

SEQ ID NO: 393209 - RNA, 23 nt, Human
acuuaaaugguucuuuaucucag

SEQ ID NO: 393210 - RNA, 22 nt, Human
gaguccuugucauaauucagug

SEQ ID NO: 393211 - RNA, 22 nt, Human
aauaauguugacgauagucuua

SEQ ID NO: 393212 - RNA, 22 nt, Human
gaugaggggucauuggcuggga

SEQ ID NO: 393213 - RNA, 22 nt, Human
uuuucaguaaugucuacauaau

SEQ ID NO: 393214 - RNA, 22 nt, Human
gcuagaucucucauaaauucca

SEQ ID NO: 393215 - RNA, 22 nt, Human
caggggcuagcacuuaauguuu

SEQ ID NO: 393216 - RNA, 22 nt, Human
cucugaacucuugggcagcaug

SEQ ID NO: 393217 - RNA, 22 nt, Human
aaaugcaucagcucauaagaga

SEQ ID NO: 393218 - RNA, 22 nt, Human
ucccaggacuuccaguuggagg

SEQ ID NO: 393219 - RNA, 22 nt, Human
uccuggauucugcccugaaggc

SEQ ID NO: 393220 - RNA, 22 nt, Human
uccuucagggggccgccugcac

SEQ ID NO: 393221 - RNA, 22 nt, Human
uaagccacuagucuguuaugaa

SEQ ID NO: 393222 - RNA, 22 nt, Human
ggagccugugcccaagcccaga

SEQ ID NO: 393223 - RNA, 22 nt, Human
uccugcagccuugggcuggagc

SEQ ID NO: 393224 - RNA, 22 nt, Human
cccaggagauggagguugcagu

SEQ ID NO: 393225 - RNA, 16 nt, Human
agccaggcugccucgg

SEQ ID NO: 393226 - RNA, 22 nt, Human
cuggagcagcagguggccaggg

SEQ ID NO: 393227 - RNA, 22 nt, Human
aaggcagaaauucaacuacugg

SEQ ID NO: 393228 - RNA, 22 nt, Human
ugggaggcuuccagaccuugcu

SEQ ID NO: 393229 - RNA, 22 nt, Human
cucuuucaguucugauagucuc

SEQ ID NO: 393230 - RNA, 22 nt, Human
uauccaaacauauagucucucu

SEQ ID NO: 393231 - RNA, 22 nt, Human
aaaauacacauacuaggggaaa

SEQ ID NO: 393232 - RNA, 22 nt, Human
agcuccugaaaagcgcuugcuu

SEQ ID NO: 393233 - RNA, 22 nt, Human
cuccaggccagggaaguggaca

SEQ ID NO: 393234 - RNA, 22 nt, Human
ucauuuucaaguuugaacagga

SEQ ID NO: 393235 - RNA, 22 nt, Human
cagggccugagggcugcucugc

SEQ ID NO: 393236 - RNA, 22 nt, Human
agcagccauccuuagagaaaga

SEQ ID NO: 393237 - RNA, 18 nt, Human
ccugagcccugcuuacuu

SEQ ID NO: 393238 - RNA, 22 nt, Human
gccagcucagaugcaggaagga

SEQ ID NO: 393239 - RNA, 22 nt, Human
uggaggaaaauuacuggggucu

SEQ ID NO: 393240 - RNA, 22 nt, Human
aggcaggcacacuuccuccagg

SEQ ID NO: 393241 - RNA, 22 nt, Human
agggccugcaucaggagcuugg

SEQ ID NO: 393242 - RNA, 22 nt, Human
gagcaacaguuuaugguuuuuc

SEQ ID NO: 393243 - RNA, 22 nt, Human
acacugaauguuuaagaacuug

SEQ ID NO: 393244 - RNA, 22 nt, Human
uggcuuuacacauccacugccu

SEQ ID NO: 393245 - RNA, 22 nt, Human
gggagcaggagccugccugcca

SEQ ID NO: 393246 - RNA, 22 nt, Human
cacaggcagccuuguagaagaa

SEQ ID NO: 393247 - RNA, 22 nt, Human
gcagagcuguuaauggagcuga

SEQ ID NO: 393248 - RNA, 22 nt, Human
gcucugucauuuugcagacacu

SEQ ID NO: 393249 - RNA, 22 nt, Human
agaagugccgaaaggaagacag

SEQ ID NO: 393250 - RNA, 22 nt, Human
ggggaggcugaugugggcaaag

SEQ ID NO: 393251 - RNA, 22 nt, Human
ugaagccaucccucagauggcc

SEQ ID NO: 393252 - RNA, 19 nt, Human
ccucugcgcuguccugcuc

SEQ ID NO: 393253 - RNA, 22 nt, Human
ggaggcgauccugggaaacacc

SEQ ID NO: 393254 - RNA, 22 nt, Human
cccaggagaccuagaucuguuu

SEQ ID NO: 393255 - RNA, 22 nt, Human
gacagcuggcaguggaaaggug

SEQ ID NO: 393256 - RNA, 22 nt, Human
agggcagauggaacuuccccga

SEQ ID NO: 393257 - RNA, 22 nt, Human
cugggcacauuuugacuagugu

SEQ ID NO: 393258 - RNA, 22 nt, Human
caggguccggcugccuggcugu

SEQ ID NO: 393259 - RNA, 22 nt, Human
acuguucaagcaaaugacauug

SEQ ID NO: 393260 - RNA, 22 nt, Human
aacacuuugggcauggccuucc

SEQ ID NO: 393261 - RNA, 22 nt, Human
uccaggaggugaggggaccaaa

SEQ ID NO: 393262 - RNA, 22 nt, Human
ugcauaaacuucucugguguga

SEQ ID NO: 393263 - RNA, 22 nt, Human
cagccagggagcaaagaguuga

SEQ ID NO: 393264 - RNA, 22 nt, Human
agaccauagggaccucagguug

SEQ ID NO: 393265 - RNA, 20 nt, Human
cccaggcagagcuagcggca

SEQ ID NO: 393266 - RNA, 22 nt, Human
cccugggcagucugcacuucag

SEQ ID NO: 393267 - RNA, 22 nt, Human
cugugucccaguaccuugggua

SEQ ID NO: 393268 - RNA, 22 nt, Human
cauuuauugguuaggccagcag

SEQ ID NO: 393269 - RNA, 22 nt, Human
aacaugaagguaggaugguuuu

SEQ ID NO: 393270 - RNA, 22 nt, Human
cuggccuggagccucugggugg

SEQ ID NO: 393271 - RNA, 22 nt, Human
cugggcugcagcgggagcgacg

SEQ ID NO: 393272 - RNA, 22 nt, Human
agguggggccaaaugcuacagu

SEQ ID NO: 393273 - RNA, 22 nt, Human
ugaggcagugugagauaauaaa

SEQ ID NO: 393274 - RNA, 22 nt, Human
gaugccugcauuucaggagagu

SEQ ID NO: 393275 - RNA, 22 nt, Human
auacugaauuagguaaagcaua

SEQ ID NO: 393276 - RNA, 22 nt, Human
ccagcaggagagaacauuuccc

SEQ ID NO: 393277 - RNA, 22 nt, Human
gugggaugcaguggugaguggc

SEQ ID NO: 393278 - RNA, 22 nt, Human
guggagcccugccuugcucaug

SEQ ID NO: 393279 - RNA, 22 nt, Human
acagauauaaacuauaguagug

SEQ ID NO: 393280 - RNA, 22 nt, Human
ccagaaggcggagauugcagug

SEQ ID NO: 393281 - RNA, 22 nt, Human
cuuguagaauugaaauggucuc

SEQ ID NO: 393282 - RNA, 22 nt, Human
agcuggguguguaucagauaaa

SEQ ID NO: 393283 - RNA, 22 nt, Human
cuggccugagaaugcuacccuu

SEQ ID NO: 393284 - RNA, 22 nt, Human
acagagcuuaauucaggagcuu

SEQ ID NO: 393285 - RNA, 18 nt, Human
cugcccagagcacuugug

SEQ ID NO: 393286 - RNA, 22 nt, Human
ugcuggccaacaaggcuccaag

SEQ ID NO: 393287 - RNA, 22 nt, Human
uucucugaaggccaugcucacu

SEQ ID NO: 393288 - RNA, 22 nt, Human
gcccaggauggagaauaguggu

SEQ ID NO: 393289 - RNA, 22 nt, Human
aagaggaggacgguucccagaa

SEQ ID NO: 393290 - RNA, 22 nt, Human
ugagaaagugggugccuagcaa

SEQ ID NO: 393291 - RNA, 22 nt, Human
ugcugcucuucaccauggccuc

SEQ ID NO: 393292 - RNA, 22 nt, Human
aauaacagagaaggguggcuuc

SEQ ID NO: 393293 - RNA, 22 nt, Human
uuauaagaguauauaguguacu

SEQ ID NO: 393294 - RNA, 22 nt, Human
ggcacugagcgggcucugagcg

SEQ ID NO: 393295 - RNA, 22 nt, Human
acaacuuucuggguuaucugau

SEQ ID NO: 393296 - RNA, 22 nt, Human
agaagccaauucugugugaguc

SEQ ID NO: 393297 - RNA, 22 nt, Human
cuucuucaagagaaugggagac

SEQ ID NO: 393298 - RNA, 22 nt, Human
acagggcaccugagguaggaag

SEQ ID NO: 393299 - RNA, 22 nt, Human
aaguugagaugucauaggagac

SEQ ID NO: 393300 - RNA, 22 nt, Human
gaggcagagacuccaccuucag

SEQ ID NO: 393301 - RNA, 22 nt, Human
uuuuccuacugauaaacaguua

SEQ ID NO: 393302 - RNA, 22 nt, Human
gagcgauguggguauguagaag

SEQ ID NO: 393303 - RNA, 22 nt, Human
gggcaugagagggcagcuggca

SEQ ID NO: 393304 - RNA, 23 nt, Human
cccuggccuuggggcacaggcug

SEQ ID NO: 393305 - RNA, 22 nt, Human
gcagggcaaacccagguguuca

SEQ ID NO: 393306 - RNA, 22 nt, Human
ugcuuaauaggaguugaacauu

SEQ ID NO: 393307 - RNA, 22 nt, Human
aacaaccaaaaagaugaaugua

SEQ ID NO: 393308 - RNA, 22 nt, Human
caggaaccuaaagagacauuac

SEQ ID NO: 393309 - RNA, 22 nt, Human
caguuucuacgacuuaagcaca

SEQ ID NO: 393310 - RNA, 22 nt, Human
ugucccucauugacgcugugcc

SEQ ID NO: 393311 - RNA, 22 nt, Human
gaggcugaauggccagaagcca

SEQ ID NO: 393312 - RNA, 22 nt, Human
agcugccccaugagaggcaggu

SEQ ID NO: 393313 - RNA, 22 nt, Human
uguguucuggaaagcucacuga

SEQ ID NO: 393314 - RNA, 19 nt, Human
ccagaggacuguuaaugaa

SEQ ID NO: 393315 - RNA, 22 nt, Human
aaauuucaguuaccuuuacguu

SEQ ID NO: 393316 - RNA, 22 nt, Human
cagggccagcgcccaggcccag

SEQ ID NO: 393317 - RNA, 22 nt, Human
cugcuguguuucacaccucugg

SEQ ID NO: 393318 - RNA, 22 nt, Human
aaguccuuuccaguccugugau

SEQ ID NO: 393319 - RNA, 22 nt, Human
gggcagugucggggcccaggga

SEQ ID NO: 393320 - RNA, 17 nt, Human
gaggagcuccaguaggu

SEQ ID NO: 393321 - RNA, 22 nt, Human
aacaguaaugugguguuggguu

SEQ ID NO: 393322 - RNA, 22 nt, Human
augcuuuauuauuuugcaggga

SEQ ID NO: 393323 - RNA, 22 nt, Human
ccuagagcucugcuuuaucuaa

SEQ ID NO: 393324 - RNA, 22 nt, Human
acaugucuguaauuauuuuagg

SEQ ID NO: 393325 - RNA, 22 nt, Human
cccaggaggcagagcuugcagu

SEQ ID NO: 393326 - RNA, 22 nt, Human
caauuucagugcuguggagagg

SEQ ID NO: 393327 - RNA, 23 nt, Human
ucagaaugcacugaauuuacccu

SEQ ID NO: 393328 - RNA, 22 nt, Human
aaaugcaaggccaugugaagga

SEQ ID NO: 393329 - RNA, 22 nt, Human
cugcccugagggccuguguguu

SEQ ID NO: 393330 - RNA, 22 nt, Human
ggcauuuauuugucucauucuu

SEQ ID NO: 393331 - RNA, 22 nt, Human
ugcuuuaaccaucuuguuugga

SEQ ID NO: 393332 - RNA, 22 nt, Human
ucagcaguguaguuuaucauuc

SEQ ID NO: 393333 - RNA, 17 nt, Human
ggccuguguggcugcag

SEQ ID NO: 393334 - RNA, 22 nt, Human
cagagggcacaugguuuccuca

SEQ ID NO: 393335 - RNA, 22 nt, Human
gcaaagucugcaucuggaucag

SEQ ID NO: 393336 - RNA, 19 nt, Human
gcaucagagcagaaggggu

SEQ ID NO: 393337 - RNA, 22 nt, Human
uaaacaugugagugugcauaua

SEQ ID NO: 393338 - RNA, 22 nt, Human
gcugagcugggacaguccuggg

SEQ ID NO: 393339 - RNA, 23 nt, Human
cauuucugggagauuuauaaaau

SEQ ID NO: 393340 - RNA, 22 nt, Human
cagcaugcaaguccagaugugg

SEQ ID NO: 393341 - RNA, 22 nt, Human
gagaaggcugauccuuggaguu

SEQ ID NO: 393342 - RNA, 22 nt, Human
ugccaggcuccggaacgacagu

SEQ ID NO: 393343 - RNA, 22 nt, Human
cagggcugugcccaucuucccc

SEQ ID NO: 393344 - RNA, 22 nt, Human
ugagaacugaggauuugaauuc

SEQ ID NO: 393345 - RNA, 22 nt, Human
gcaguggauccaaugguaucuu

SEQ ID NO: 393346 - RNA, 22 nt, Human
caaggccacuccagagacuggu

SEQ ID NO: 393347 - RNA, 22 nt, Human
aggacucaucccugcuugucag

SEQ ID NO: 393348 - RNA, 22 nt, Human
gcagauggugccaugucuugug

SEQ ID NO: 393349 - RNA, 22 nt, Human
ucaguuuugaaaacauugaaug

SEQ ID NO: 393350 - RNA, 22 nt, Human
agccuggagaagauguguauug

SEQ ID NO: 393351 - RNA, 22 nt, Human
caugggcaccuuaaaaugaggc

SEQ ID NO: 393352 - RNA, 22 nt, Human
ggcagugagucccggagaggcc

SEQ ID NO: 393353 - RNA, 22 nt, Human
cacauacuuguguguacauaug

SEQ ID NO: 393354 - RNA, 22 nt, Human
ugagccuggcggaagcagcgug

SEQ ID NO: 393355 - RNA, 22 nt, Human
aauguguacaugacagauagaa

SEQ ID NO: 393356 - RNA, 20 nt, Human
uagggcucauuaugaucucc

SEQ ID NO: 393357 - RNA, 22 nt, Human
agcucugggccaggaacccuaa

SEQ ID NO: 393358 - RNA, 22 nt, Human
agagccugcagcugugaagaaa

SEQ ID NO: 393359 - RNA, 22 nt, Human
uucuuacagaguuuacagagcc

SEQ ID NO: 393360 - RNA, 22 nt, Human
aagguacaccaaaguucaaguu

SEQ ID NO: 393361 - RNA, 22 nt, Human
gcucucugccuuucucaaugac

SEQ ID NO: 393362 - RNA, 22 nt, Human
acucugggccccagguggagcu

SEQ ID NO: 393363 - RNA, 22 nt, Human
aagcaauagcaacaacuuuaca

SEQ ID NO: 393364 - RNA, 22 nt, Human
aucagcaagauugugucuugua

SEQ ID NO: 393365 - RNA, 22 nt, Human
acccaggaggcaagguugcagu

SEQ ID NO: 393366 - RNA, 22 nt, Human
gaccaaggaagaggggagccag

SEQ ID NO: 393367 - RNA, 22 nt, Human
aaagccuuggucaucugguucc

SEQ ID NO: 393368 - RNA, 22 nt, Human
caguagcacucugucagugaag

SEQ ID NO: 393369 - RNA, 22 nt, Human
aaucagaaauucuacaucacaa

SEQ ID NO: 393370 - RNA, 22 nt, Human
guucaagguuuuacagagugua

SEQ ID NO: 393371 - RNA, 22 nt, Human
aaaucagucccucuuggaauuu

SEQ ID NO: 393372 - RNA, 22 nt, Human
agcugccaggccccugagaacc

SEQ ID NO: 393373 - RNA, 22 nt, Human
uggcuuuacugucauucuuaug

SEQ ID NO: 393374 - RNA, 22 nt, Human
uucauucaucucuaaaaugccu

SEQ ID NO: 393375 - RNA, 22 nt, Human
gucaggaugcuauuguuauuaa

SEQ ID NO: 393376 - RNA, 22 nt, Human
caaagguauaaguuaauauaca

SEQ ID NO: 393377 - RNA, 16 nt, Human
ccccaggacuuggcac

SEQ ID NO: 393378 - RNA, 22 nt, Human
guguggcuaccucagaggagca

SEQ ID NO: 393379 - RNA, 22 nt, Human
cagcuccccucuguggggcagu

SEQ ID NO: 393380 - RNA, 22 nt, Human
ccacugucuuuuccaggcugaa

SEQ ID NO: 393381 - RNA, 22 nt, Human
ugagugaggaagcgguggagga

SEQ ID NO: 393382 - RNA, 22 nt, Human
uggcagagaacacggcugaucu

SEQ ID NO: 393383 - RNA, 22 nt, Human
caguucuuuguggggaguucuc

SEQ ID NO: 393384 - RNA, 17 nt, Human
ccucccacaccgcccug

SEQ ID NO: 393385 - RNA, 22 nt, Human
cccaggcauuuucaacuuuagu

SEQ ID NO: 393386 - RNA, 22 nt, Human
uggcagcuggcucugcgcaggc

SEQ ID NO: 393387 - RNA, 22 nt, Human
cugagagguaagcagcgcagug

SEQ ID NO: 393388 - RNA, 22 nt, Human
cagggcucaggcucugggauuc

SEQ ID NO: 393389 - RNA, 22 nt, Human
uuucacuagaacguucuuguuu

SEQ ID NO: 393390 - RNA, 22 nt, Human
uuucaaauaccauaaaccuaau

SEQ ID NO: 393391 - RNA, 22 nt, Human
uggagcugaacuuugaggccag

SEQ ID NO: 393392 - RNA, 22 nt, Human
aggcagcauccagaggagaaug

SEQ ID NO: 393393 - RNA, 22 nt, Human
aaauaauuauagcgagucuauc

SEQ ID NO: 393394 - RNA, 22 nt, Human
aucagaaauugcccagcuguuu

SEQ ID NO: 393395 - RNA, 22 nt, Human
agaggcaggaagagcugauuuu

SEQ ID NO: 393396 - RNA, 22 nt, Human
ugcauuguugaugaguugaaua

SEQ ID NO: 393397 - RNA, 22 nt, Human
uucaggaugaaagugugcaaca

SEQ ID NO: 393398 - RNA, 22 nt, Human
uucaagucaaggaaagaggucu

SEQ ID NO: 393399 - RNA, 22 nt, Human
ucauugcagaaauaaaggugaa

SEQ ID NO: 393400 - RNA, 22 nt, Human
uucaacuagauuuauacaauuc

SEQ ID NO: 393401 - RNA, 22 nt, Human
ccuguucacuuugacuucucca

SEQ ID NO: 393402 - RNA, 22 nt, Human
uggcucuguugagguauggauu

SEQ ID NO: 393403 - RNA, 17 nt, Human
ucugccgacugccagcu

SEQ ID NO: 393404 - RNA, 22 nt, Human
aaggagucucagcugggccuga

SEQ ID NO: 393405 - RNA, 22 nt, Human
aggcaguggagcuggaauaggc

SEQ ID NO: 393406 - RNA, 22 nt, Human
gcuggcagggacagcugcgugu

SEQ ID NO: 393407 - RNA, 22 nt, Human
cagcaauaagccagguuagaca

SEQ ID NO: 393408 - RNA, 22 nt, Human
acagcaggauuuggcgauguug

SEQ ID NO: 393409 - RNA, 22 nt, Human
acuguucacuagugaggguuga

SEQ ID NO: 393410 - RNA, 22 nt, Human
uaaggcacccgugagcugccag

SEQ ID NO: 393411 - RNA, 17 nt, Human
uguuccauuugaccacc

SEQ ID NO: 393412 - RNA, 22 nt, Human
cuucuucaguugcauguauugg

SEQ ID NO: 393413 - RNA, 22 nt, Human
uuuuuccaccguacuuccugag

SEQ ID NO: 393414 - RNA, 22 nt, Human
gaggcucacuaggcauccuggg

SEQ ID NO: 393415 - RNA, 22 nt, Human
aggagcagcuucugaaccaugu

SEQ ID NO: 393416 - RNA, 22 nt, Human
cagcugccacuugcucucggcu

SEQ ID NO: 393417 - RNA, 22 nt, Human
uggcugagaaaaaagagcuaua

SEQ ID NO: 393418 - RNA, 22 nt, Human
cagcuccccaugguuccugaag

SEQ ID NO: 393419 - RNA, 22 nt, Human
acccaggagacggaggugcagu

SEQ ID NO: 393420 - RNA, 22 nt, Human
uuaacauacaucaugaacaaug

SEQ ID NO: 393421 - RNA, 23 nt, Human
gccucugcagccuaguuaguguc

SEQ ID NO: 393422 - RNA, 22 nt, Human
auucauuagccacuaacuagca

SEQ ID NO: 393423 - RNA, 20 nt, Human
uggagcuguaaucuugucug

SEQ ID NO: 393424 - RNA, 22 nt, Human
cuguggcauugugaggacugca

SEQ ID NO: 393425 - RNA, 22 nt, Human
ggaggccagggacccagucagc

SEQ ID NO: 393426 - RNA, 22 nt, Human
gcacagggccuggcacauaaga

SEQ ID NO: 393427 - RNA, 22 nt, Human
gacagaguuguugauguaugcu

SEQ ID NO: 393428 - RNA, 22 nt, Human
acugucucucuagcaguucagg

SEQ ID NO: 393429 - RNA, 22 nt, Human
agcagcauuccuggcuucuauc

SEQ ID NO: 393430 - RNA, 22 nt, Human
ggaguuggugagcaccaggcuu

SEQ ID NO: 393431 - RNA, 22 nt, Human
uuuuucaucugauugauaacuc

SEQ ID NO: 393432 - RNA, 21 nt, Human
cagagcuguccaaacccugac

SEQ ID NO: 393433 - RNA, 22 nt, Human
ggugaaggcacaagagggcaag

SEQ ID NO: 393434 - RNA, 22 nt, Human
gaggcucaccuagggagcacug

SEQ ID NO: 393435 - RNA, 22 nt, Human
uaaggccaccguuauagaacca

SEQ ID NO: 393436 - RNA, 22 nt, Human
aaaugucagaagcuuuacuucu

SEQ ID NO: 393437 - RNA, 22 nt, Human
ucuguccucuuugaagcugcuc

SEQ ID NO: 393438 - RNA, 22 nt, Human
guaagagcacugucuccugcug

SEQ ID NO: 393439 - RNA, 22 nt, Human
gaauucugguuuugaaaugaau

SEQ ID NO: 393440 - RNA, 22 nt, Human
agguacagggugaaaguuuaug

SEQ ID NO: 393441 - RNA, 22 nt, Human
gcuggccucuacaggccggcca

SEQ ID NO: 393442 - RNA, 22 nt, Human
aagaaaucauaucauuucuugg

SEQ ID NO: 393443 - RNA, 22 nt, Human
ccuggagagagaggccaacugc

SEQ ID NO: 393444 - RNA, 22 nt, Human
uggcagcugugcuucauucuuu

SEQ ID NO: 393445 - RNA, 22 nt, Human
ggcuggccucaggguccucgcu

SEQ ID NO: 393446 - RNA, 22 nt, Human
acccuuucuuacucacacgcuc

SEQ ID NO: 393447 - RNA, 22 nt, Human
ccaggacuuuaaguccagcacu

SEQ ID NO: 393448 - RNA, 22 nt, Human
agcaggaaagaaaaaucugugu

SEQ ID NO: 393449 - RNA, 22 nt, Human
agcugcagugaacuguuuuguc

SEQ ID NO: 393450 - RNA, 22 nt, Human
uuagaaaacauaagugguaaag

SEQ ID NO: 393451 - RNA, 20 nt, Human
gcuguucacauuauuaguag

SEQ ID NO: 393452 - RNA, 21 nt, Human
agcaccuuacagcuauaaugg

SEQ ID NO: 393453 - RNA, 22 nt, Human
agccacagucaaccuguccaua

SEQ ID NO: 393454 - RNA, 19 nt, Human
acuuucuccaggaccuguu

SEQ ID NO: 393455 - RNA, 22 nt, Human
auuuauuaagcaucugcuaugu

SEQ ID NO: 393456 - RNA, 22 nt, Human
agucccaguucgguucuuccuc

SEQ ID NO: 393457 - RNA, 22 nt, Human
uugaaucuggguacuuguaaua

SEQ ID NO: 393458 - RNA, 22 nt, Human
cugccugcugccuguggagggu

SEQ ID NO: 393459 - RNA, 22 nt, Human
ggcuggcuuucucuccgcaccu

SEQ ID NO: 393460 - RNA, 22 nt, Human
acagagguguguguaggacagu

SEQ ID NO: 393461 - RNA, 22 nt, Human
agcugccuguccuaggccauca

SEQ ID NO: 393462 - RNA, 22 nt, Human
aaauuucaguuggaaugagcuc

SEQ ID NO: 393463 - RNA, 22 nt, Human
cagggcaggaugcugugauuau

SEQ ID NO: 393464 - RNA, 22 nt, Human
uacagggguaacaguggggaau

SEQ ID NO: 393465 - RNA, 20 nt, Human
gaguccuuaugggcugaggu

SEQ ID NO: 393466 - RNA, 22 nt, Human
acacauuucucuuuuuguaagu

SEQ ID NO: 393467 - RNA, 23 nt, Human
ccaggcaguagcuauugaaguga

SEQ ID NO: 393468 - RNA, 23 nt, Human
agaauuccaguuucuuaugucac

SEQ ID NO: 393469 - RNA, 22 nt, Human
uaauuuaauuccauggauucua

SEQ ID NO: 393470 - RNA, 22 nt, Human
agcuugaguuuuggaugaagug

SEQ ID NO: 393471 - RNA, 22 nt, Human
cuggagguaauguuauuuuugu

SEQ ID NO: 393472 - RNA, 22 nt, Human
uggcucagaugcucuuccagug

SEQ ID NO: 393473 - RNA, 22 nt, Human
agggcagaaguacagacacuua

SEQ ID NO: 393474 - RNA, 19 nt, Human
ugcagaagacacaguggug

SEQ ID NO: 393475 - RNA, 22 nt, Human
aagcaaaggcaggagcuuguga

SEQ ID NO: 393476 - RNA, 22 nt, Human
ggaagggcaaaagagaugaacu

SEQ ID NO: 393477 - RNA, 19 nt, Human
uuucccagcccuugcugug

SEQ ID NO: 393478 - RNA, 22 nt, Human
guuucacagucugcagaauuuu

SEQ ID NO: 393479 - RNA, 22 nt, Human
cuuccagguccuucuugagaag

SEQ ID NO: 393480 - RNA, 22 nt, Human
ucugcucuaguugcuuccugcc

SEQ ID NO: 393481 - RNA, 22 nt, Human
uguuuuaugagccauauaaccu

SEQ ID NO: 393482 - RNA, 22 nt, Human
gcagcuuggauuucuguaguuu

SEQ ID NO: 393483 - RNA, 22 nt, Human
cucacuggcaagacuacaggug

SEQ ID NO: 393484 - RNA, 22 nt, Human
agagacaggguuuugucguguu

SEQ ID NO: 393485 - RNA, 22 nt, Human
gucauuucuguuucuucagugc

SEQ ID NO: 393486 - RNA, 22 nt, Human
aagauuucugcuccugagagaa

SEQ ID NO: 393487 - RNA, 22 nt, Human
gaaugugugacucuauugagca

SEQ ID NO: 393488 - RNA, 22 nt, Human
gcagggaccuugcccacccucc

SEQ ID NO: 393489 - RNA, 22 nt, Human
uccugcagcugauaaauacagu

SEQ ID NO: 393490 - RNA, 22 nt, Human
auaucaaacgaaguuauuuuaa

SEQ ID NO: 393491 - RNA, 19 nt, Human
gaaaggcugcugcuaccug

SEQ ID NO: 393492 - RNA, 22 nt, Human
uaaugcaguacugauauaaaca

SEQ ID NO: 393493 - RNA, 18 nt, Human
gggcaagcggcugucacc

SEQ ID NO: 393494 - RNA, 18 nt, Human
aaguaacagaagagcaca

SEQ ID NO: 393495 - RNA, 22 nt, Human
cucagagaaaaggagcaagggu

SEQ ID NO: 393496 - RNA, 19 nt, Human
gcagcugugggaagagcca

SEQ ID NO: 393497 - RNA, 20 nt, Human
gcugaccccugcugucaugc

SEQ ID NO: 393498 - RNA, 22 nt, Human
caggcugccgugaagcaggccu

SEQ ID NO: 393499 - RNA, 22 nt, Human
uuauauuaguuagacuugcugu

SEQ ID NO: 393500 - RNA, 22 nt, Human
caagcccaggauuccccaguua

SEQ ID NO: 393501 - RNA, 22 nt, Human
cuauuucaaggcccagauauga

SEQ ID NO: 393502 - RNA, 22 nt, Human
auuauaaauauuuucuaggggu

SEQ ID NO: 393503 - RNA, 22 nt, Human
uuugggaacucuaucauggaaa

SEQ ID NO: 393504 - RNA, 22 nt, Human
aaaugcuuguaaauuuuccaug

SEQ ID NO: 393505 - RNA, 22 nt, Human
gagccagcuauguagcaagagg

SEQ ID NO: 393506 - RNA, 16 nt, Human
gcaacuuugggguuga

SEQ ID NO: 393507 - RNA, 21 nt, Human
acagugugcuucucucccucc

SEQ ID NO: 393508 - RNA, 23 nt, Human
gucagggcuggggucagagugac

SEQ ID NO: 393509 - RNA, 22 nt, Human
cccuggaguccuggcaguugau

SEQ ID NO: 393510 - RNA, 22 nt, Human
agaagcagacucugaggcaagg

SEQ ID NO: 393511 - RNA, 21 nt, Human
agaaaauggcguuuuagauuu

SEQ ID NO: 393512 - RNA, 22 nt, Human
ugcugccuuagcagccaggcaa

SEQ ID NO: 393513 - RNA, 22 nt, Human
uugaacagcuguuacauuguua

SEQ ID NO: 393514 - RNA, 22 nt, Human
acaaaggugagcagaagacaca

SEQ ID NO: 393515 - RNA, 22 nt, Human
acucaagauagggaaaguacaa

SEQ ID NO: 393516 - RNA, 22 nt, Human
ucauuuguucucauucucuacu

SEQ ID NO: 393517 - RNA, 22 nt, Human
aucagcuuuucucaucagaaau

SEQ ID NO: 393518 - RNA, 22 nt, Human
ggggacccucaggacugcgucu

SEQ ID NO: 393519 - RNA, 21 nt, Human
uuucccagcugaaaauaaaug

SEQ ID NO: 393520 - RNA, 22 nt, Human
uaaaaugacuuccuccaacauc

SEQ ID NO: 393521 - RNA, 20 nt, Human
cugagagucugugcuuaguc

SEQ ID NO: 393522 - RNA, 22 nt, Human
guguacauagaauugugcuuug

SEQ ID NO: 393523 - RNA, 22 nt, Human
aggcaguuguagagagggcucu

SEQ ID NO: 393524 - RNA, 22 nt, Human
cguauacaugaagacauugcug

SEQ ID NO: 393525 - RNA, 22 nt, Human
ugucaugccaggaaauaguccc

SEQ ID NO: 393526 - RNA, 22 nt, Human
uguggcugucuguucuccuagg

SEQ ID NO: 393527 - RNA, 22 nt, Human
aagcuggaacaucuugaggaag

SEQ ID NO: 393528 - RNA, 23 nt, Human
uucaaagcuuaagcucuuuccac

SEQ ID NO: 393529 - RNA, 22 nt, Human
gacaggggucccucugggcugu

SEQ ID NO: 393530 - RNA, 22 nt, Human
ggugaguugggguucacagguc

SEQ ID NO: 393531 - RNA, 22 nt, Human
uccagcagaccaucaaggcuca

SEQ ID NO: 393532 - RNA, 22 nt, Human
uuuauuagugcuuguaucacug

SEQ ID NO: 393533 - RNA, 22 nt, Human
gucccagaugucuggaacuccc

SEQ ID NO: 393534 - RNA, 22 nt, Human
aaugaacacagcccucuacuuu

SEQ ID NO: 393535 - RNA, 22 nt, Human
auacaaagacaaaucucaaucu

SEQ ID NO: 393536 - RNA, 22 nt, Human
uccucuggggucagggcacuac

SEQ ID NO: 393537 - RNA, 21 nt, Human
aggcucccagaaaugggcauc

SEQ ID NO: 393538 - RNA, 22 nt, Human
gcagggugugucucauacaguu

SEQ ID NO: 393539 - RNA, 22 nt, Human
auuuacagaagcauguaauagc

SEQ ID NO: 393540 - RNA, 22 nt, Human
gacccaggguauccagagcugc

SEQ ID NO: 393541 - RNA, 22 nt, Human
gcugggcugagcuagacuuggc

SEQ ID NO: 393542 - RNA, 22 nt, Human
gugcuuuccauccucccugcug

SEQ ID NO: 393543 - RNA, 22 nt, Human
gacccagcuaaccaggugggga

SEQ ID NO: 393544 - RNA, 18 nt, Human
ucucugaauauuuuaugu

SEQ ID NO: 393545 - RNA, 22 nt, Human
ugcucugguccucccucggcgc

SEQ ID NO: 393546 - RNA, 22 nt, Human
aacauaauguggccaaagucac

SEQ ID NO: 393547 - RNA, 23 nt, Human
uaauucacauauacauugcuuca

SEQ ID NO: 393548 - RNA, 22 nt, Human
ucuggcucccuggagcuccaca

SEQ ID NO: 393549 - RNA, 22 nt, Human
ucaccaggauuccuaucaguag

SEQ ID NO: 393550 - RNA, 22 nt, Human
cuuuucauuguuuguacaugca

SEQ ID NO: 393551 - RNA, 22 nt, Human
aauuccugucuuaacaguucug

SEQ ID NO: 393552 - RNA, 22 nt, Human
agccucaguuucaggccuccuc

SEQ ID NO: 393553 - RNA, 22 nt, Human
gaagggugugugugagggacac

SEQ ID NO: 393554 - RNA, 22 nt, Human
aggcuggggaauugaauuugcu

SEQ ID NO: 393555 - RNA, 22 nt, Human
aacaugcucuguuucuuggaug

SEQ ID NO: 393556 - RNA, 22 nt, Human
ggcuggcacucuguccaguguc

SEQ ID NO: 393557 - RNA, 22 nt, Human
caggcugucugaauggaggccc

SEQ ID NO: 393558 - RNA, 22 nt, Human
ggcucuggaaaguguccuugau

SEQ ID NO: 393559 - RNA, 22 nt, Human
gcucaggaucccaggggugugc

SEQ ID NO: 393560 - RNA, 22 nt, Human
ccucccugcgcuccugcggcgg

SEQ ID NO: 393561 - RNA, 22 nt, Human
uacuuuuuagcacagugugugc

SEQ ID NO: 393562 - RNA, 19 nt, Human
agaaaucucgagauuuguu

SEQ ID NO: 393563 - RNA, 22 nt, Human
ccagauaaggcuuuuuaaaagc

SEQ ID NO: 393564 - RNA, 22 nt, Human
uggcucugggcaccguguccac

SEQ ID NO: 393565 - RNA, 22 nt, Human
ugcccaagcagaggagugauuc

SEQ ID NO: 393566 - RNA, 22 nt, Human
uacaugcaugucacagaaugaa

SEQ ID NO: 393567 - RNA, 23 nt, Human
ugggaguguugggaucucugcuc

SEQ ID NO: 393568 - RNA, 22 nt, Human
agaagccauaguaucucagggu

SEQ ID NO: 393569 - RNA, 22 nt, Human
cugcgcagggguggcgccagaa

SEQ ID NO: 393570 - RNA, 22 nt, Human
ucacaggaaccaucagagaaau

SEQ ID NO: 393571 - RNA, 22 nt, Human
ucugucugcgcuugcccuggug

SEQ ID NO: 393572 - RNA, 22 nt, Human
ugggcugcggauaggccucgga

SEQ ID NO: 393573 - RNA, 22 nt, Human
gugcaggggccuccccuugcug

SEQ ID NO: 393574 - RNA, 22 nt, Human
gccuuccugcagcucugagcgu

SEQ ID NO: 393575 - RNA, 22 nt, Human
acucagaaccauuuacucugag

SEQ ID NO: 393576 - RNA, 22 nt, Human
uauacuuuccugcaacuuugau

SEQ ID NO: 393577 - RNA, 22 nt, Human
ccaggagaugauguuggggauu

SEQ ID NO: 393578 - RNA, 21 nt, Human
agagaagaggacuuucucaca

SEQ ID NO: 393579 - RNA, 22 nt, Human
cucuuaaugaccuuaauucaag

SEQ ID NO: 393580 - RNA, 22 nt, Human
auggggagagaagggcugagcu

SEQ ID NO: 393581 - RNA, 22 nt, Human
aaauuuucagagcacuagagaa

SEQ ID NO: 393582 - RNA, 22 nt, Human
gugauuuagauguugaaaguga

SEQ ID NO: 393583 - RNA, 22 nt, Human
caccagggacaaugcuaggggu

SEQ ID NO: 393584 - RNA, 22 nt, Human
acaaaguuugugguauuccaag

SEQ ID NO: 393585 - RNA, 22 nt, Human
cugagaggugacagcgugcugg

SEQ ID NO: 393586 - RNA, 22 nt, Human
aaguaaaagcuuuaccaugcgc

SEQ ID NO: 393587 - RNA, 22 nt, Human
aaaguccuagcgauccacagaa

SEQ ID NO: 393588 - RNA, 18 nt, Human
cagggcuguggggucacu

SEQ ID NO: 393589 - RNA, 22 nt, Human
ugucuguacaaauuuucugugu

SEQ ID NO: 393590 - RNA, 22 nt, Human
ucauuuguucaucugcucuucu

SEQ ID NO: 393591 - RNA, 20 nt, Human
ggggcccaagcccucuugcc

SEQ ID NO: 393592 - RNA, 22 nt, Human
ugcacuccaggcugggugacag

SEQ ID NO: 393593 - RNA, 22 nt, Human
uccaggaggcucugguugacgu

SEQ ID NO: 393594 - RNA, 22 nt, Human
agggucagguuaagggagucau

SEQ ID NO: 393595 - RNA, 22 nt, Human
aacaaauguguggcaguguggg

SEQ ID NO: 393596 - RNA, 21 nt, Human
uggcucugcucagagcagucc

SEQ ID NO: 393597 - RNA, 22 nt, Human
aagcagaggguauggccagguu

SEQ ID NO: 393598 - RNA, 22 nt, Human
gcaacuuucaagcaccaugggg

SEQ ID NO: 393599 - RNA, 22 nt, Human
aggccagaaaugucagggagug

SEQ ID NO: 393600 - RNA, 22 nt, Human
acugcaggagacacagcugcug

SEQ ID NO: 393601 - RNA, 22 nt, Human
aaacaucauaggcaugcaugau

SEQ ID NO: 393602 - RNA, 18 nt, Human
aggggcagcuugugugga

SEQ ID NO: 393603 - RNA, 22 nt, Human
ucccaggaaaacacucgaggac

SEQ ID NO: 393604 - RNA, 22 nt, Human
ucucccaggcuggagugcagug

SEQ ID NO: 393605 - RNA, 22 nt, Human
auuuugaugcuaucuaaugaau

SEQ ID NO: 393606 - RNA, 22 nt, Human
ucugucacaauuugcuuacucu

SEQ ID NO: 393607 - RNA, 22 nt, Human
guccucaguaagagggccucug

SEQ ID NO: 393608 - RNA, 22 nt, Human
auaugugugccauuucagcagu

SEQ ID NO: 393609 - RNA, 22 nt, Human
augacaaaagaagacaugaggu

SEQ ID NO: 393610 - RNA, 22 nt, Human
auggaaagugcauggaagucau

SEQ ID NO: 393611 - RNA, 22 nt, Human
auauacaggugguauguguaaa

SEQ ID NO: 393612 - RNA, 22 nt, Human
ugaggcuguucuaccagggcca

SEQ ID NO: 393613 - RNA, 22 nt, Human
cuugggagacacaagaagacau

SEQ ID NO: 393614 - RNA, 22 nt, Human
aggucacccguuugacuaucca

SEQ ID NO: 393615 - RNA, 22 nt, Human
gagcugucuggggacucugggu

SEQ ID NO: 393616 - RNA, 22 nt, Human
uucauuuguugacagagacaug

SEQ ID NO: 393617 - RNA, 22 nt, Human
gaauuucaaaagccagaacggg

SEQ ID NO: 393618 - RNA, 22 nt, Human
ucuucucucauguaggagggaa

SEQ ID NO: 393619 - RNA, 22 nt, Human
ccaauacacuuuauagaagaaa

SEQ ID NO: 393620 - RNA, 22 nt, Human
ugucaacacaccuaucucaauu

SEQ ID NO: 393621 - RNA, 22 nt, Human
ucuaugaaaagucuauucauuc

SEQ ID NO: 393622 - RNA, 22 nt, Human
gccugccuuugugaggaagcgg

SEQ ID NO: 393623 - RNA, 22 nt, Human
cuggagggugagccucaucucu

SEQ ID NO: 393624 - RNA, 22 nt, Human
cagcaggguuaagugacucacc

SEQ ID NO: 393625 - RNA, 22 nt, Human
ucucugguuauuaacuaacucc

SEQ ID NO: 393626 - RNA, 22 nt, Human
uccaggaggcaccuuuggacca

SEQ ID NO: 393627 - RNA, 22 nt, Human
uagcugccuuugggcuccugcu

SEQ ID NO: 393628 - RNA, 22 nt, Human
cauugcacaucugagaagagau

SEQ ID NO: 393629 - RNA, 22 nt, Human
gaugauggacaaagcauuggug

SEQ ID NO: 393630 - RNA, 22 nt, Human
gagcugccaguguaugaauucu

SEQ ID NO: 393631 - RNA, 22 nt, Human
cacagaagaaucaugcuguguu

SEQ ID NO: 393632 - RNA, 22 nt, Human
ucccugggccacagcugugagc

SEQ ID NO: 393633 - RNA, 22 nt, Human
cucuggagggaggcugagcugg

SEQ ID NO: 393634 - RNA, 22 nt, Human
agucucugccagcuuguccucu

SEQ ID NO: 393635 - RNA, 21 nt, Human
gcagccagccgagaccaugcc

SEQ ID NO: 393636 - RNA, 22 nt, Human
auuaauuuuaccuuuguaaaca

SEQ ID NO: 393637 - RNA, 22 nt, Human
aaucuggcauuugagaguagga

SEQ ID NO: 393638 - RNA, 22 nt, Human
ggcauguuucaucacaucaaga

SEQ ID NO: 393639 - RNA, 22 nt, Human
gugcucuggcuggucucccggu

SEQ ID NO: 393640 - RNA, 22 nt, Human
agugcacagcgugauguauugg

SEQ ID NO: 393641 - RNA, 20 nt, Human
uccucagaagacauuugggg

SEQ ID NO: 393642 - RNA, 22 nt, Human
gcagcuggacccacacggcuua

SEQ ID NO: 393643 - RNA, 22 nt, Human
caguagacacauuaauauggaa

SEQ ID NO: 393644 - RNA, 22 nt, Human
uucacaaagcuggagcauuucc

SEQ ID NO: 393645 - RNA, 22 nt, Human
gggcuuggcacaugggcucagc

SEQ ID NO: 393646 - RNA, 22 nt, Human
agaaaaggcuugaagagguuuu

SEQ ID NO: 393647 - RNA, 22 nt, Human
ggagcuguucaggacugcuuca

SEQ ID NO: 393648 - RNA, 22 nt, Human
gccucugcggagcuguacauca

SEQ ID NO: 393649 - RNA, 22 nt, Human
caaauaucuuuggcaaagagaa

SEQ ID NO: 393650 - RNA, 22 nt, Human
ccagcuuuggaguguuguugcu

SEQ ID NO: 393651 - RNA, 22 nt, Human
ccugagagcagcuuccugcuua

SEQ ID NO: 393652 - RNA, 22 nt, Human
uggcucaggugugagcugaaga

SEQ ID NO: 393653 - RNA, 22 nt, Human
cacuguaucuuuuccaaagucu

SEQ ID NO: 393654 - RNA, 22 nt, Human
ucagaggaauuugcuuuucaug

SEQ ID NO: 393655 - RNA, 19 nt, Human
gccagcagaaugaugaggc

SEQ ID NO: 393656 - RNA, 22 nt, Human
guaaaguucuauuugaauuuag

SEQ ID NO: 393657 - RNA, 22 nt, Human
ucccaggccauaaaacucagag

SEQ ID NO: 393658 - RNA, 18 nt, Human
ugggcugccuggccucug

SEQ ID NO: 393659 - RNA, 19 nt, Human
cagugcccgacgcaggucu

SEQ ID NO: 393660 - RNA, 23 nt, Human
agugagcagcuguagggcaagga

SEQ ID NO: 393661 - RNA, 23 nt, Human
uuaaaggcagauguugaguauua

SEQ ID NO: 393662 - RNA, 22 nt, Human
ugggccuguugggguugaguua

SEQ ID NO: 393663 - RNA, 22 nt, Human
uugaaaguagcagcugcauaug

SEQ ID NO: 393664 - RNA, 23 nt, Human
aguucacugagguugaccacugg

SEQ ID NO: 393665 - RNA, 20 nt, Human
ucauuguguugccaauuccc

SEQ ID NO: 393666 - RNA, 22 nt, Human
uggcucaggguccccaaauggu

SEQ ID NO: 393667 - RNA, 22 nt, Human
auuucauagauuguaaaucccu

SEQ ID NO: 393668 - RNA, 22 nt, Human
aaucacaauuacuuuugcacca

SEQ ID NO: 393669 - RNA, 22 nt, Human
gugcugaguagaaugaaugccu

SEQ ID NO: 393670 - RNA, 21 nt, Human
gauaaaaugggccuugguccu

SEQ ID NO: 393671 - RNA, 22 nt, Human
cuccaugaauuugagcuuugug

SEQ ID NO: 393672 - RNA, 19 nt, Human
gaaagucauagagcuuguc

SEQ ID NO: 393673 - RNA, 22 nt, Human
uugcauuucccauugaguaaug

SEQ ID NO: 393674 - RNA, 22 nt, Human
cuccagugcgcaggacagcccc

SEQ ID NO: 393675 - RNA, 19 nt, Human
uguggccaugguucagcug

SEQ ID NO: 393676 - RNA, 22 nt, Human
augauugcagcccuacagcugu

SEQ ID NO: 393677 - RNA, 22 nt, Human
agcaggugaauuccuggaugug

SEQ ID NO: 393678 - RNA, 22 nt, Human
uuugguccugagcaaaacuaug

SEQ ID NO: 393679 - RNA, 18 nt, Human
uaggagagaauuuauuua

SEQ ID NO: 393680 - RNA, 22 nt, Human
ggcugucugugguggagcguug

SEQ ID NO: 393681 - RNA, 22 nt, Human
accaucagucacauguagagaa

SEQ ID NO: 393682 - RNA, 22 nt, Human
ucaguuuugauuccugguucuc

SEQ ID NO: 393683 - RNA, 22 nt, Human
gucagcaggguccccuugagug

SEQ ID NO: 393684 - RNA, 22 nt, Human
uccagugguaguaaagaggucu

SEQ ID NO: 393685 - RNA, 22 nt, Human
ccucuuugugccugcaggcugc

SEQ ID NO: 393686 - RNA, 23 nt, Human
agacccagagacuggcucugcuc

SEQ ID NO: 393687 - RNA, 19 nt, Human
uggcucugucgaaggcaca

SEQ ID NO: 393688 - RNA, 22 nt, Human
gaggcagcuggguccggucggg

SEQ ID NO: 393689 - RNA, 22 nt, Human
gggcagguguugucaaucuaau

SEQ ID NO: 393690 - RNA, 20 nt, Human
ggaagccagcauccuugagg

SEQ ID NO: 393691 - RNA, 22 nt, Human
cuugccuguggcuaguuggcuc

SEQ ID NO: 393692 - RNA, 22 nt, Human
cuggccugggagcugcuagcgu

SEQ ID NO: 393693 - RNA, 22 nt, Human
cauguacaguuuuucuguccug

SEQ ID NO: 393694 - RNA, 22 nt, Human
auguacaaaaugccacugaauu

SEQ ID NO: 393695 - RNA, 22 nt, Human
cugggcacuugcucacagcucu

SEQ ID NO: 393696 - RNA, 22 nt, Human
uauuuaguuaucuuucauaaaa

SEQ ID NO: 393697 - RNA, 22 nt, Human
ucuuugaaagcuguucuagagu

SEQ ID NO: 393698 - RNA, 19 nt, Human
auaaggcaauuggauuugg

SEQ ID NO: 393699 - RNA, 20 nt, Human
cuguaucagguuacaaagua

SEQ ID NO: 393700 - RNA, 22 nt, Human
uggcaggaaaguaacagagcac

SEQ ID NO: 393701 - RNA, 22 nt, Human
ccagccagcugcccuuggggcc

SEQ ID NO: 393702 - RNA, 22 nt, Human
ucagaggaccuuacugagaacc

SEQ ID NO: 393703 - RNA, 22 nt, Human
caaguccucgcuucuagcugug

SEQ ID NO: 393704 - RNA, 22 nt, Human
cagggaggcugucuuaugccug

SEQ ID NO: 393705 - RNA, 22 nt, Human
cuguccccgcgaguccagagcu

SEQ ID NO: 393706 - RNA, 22 nt, Human
ugaggcucuccaagcagaugag

SEQ ID NO: 393707 - RNA, 22 nt, Human
acagaaauuagcagugaguuua

SEQ ID NO: 393708 - RNA, 22 nt, Human
guucagcccacagagggggccg

SEQ ID NO: 393709 - RNA, 22 nt, Human
uuaacagacauauauauuugua

SEQ ID NO: 393710 - RNA, 22 nt, Human
uggucaguugcaucagagaagu

SEQ ID NO: 393711 - RNA, 22 nt, Human
agaguguuucagucuuccuaga

SEQ ID NO: 393712 - RNA, 22 nt, Human
guauuaggagguggagccuuug

SEQ ID NO: 393713 - RNA, 19 nt, Human
gagguggguccccgcagcc

SEQ ID NO: 393714 - RNA, 22 nt, Human
uggccugauuuugcuaagagaa

SEQ ID NO: 393715 - RNA, 21 nt, Human
caaucaguuggcauuugagca

SEQ ID NO: 393716 - RNA, 22 nt, Human
ccaaggagcugcaggcacuugu

SEQ ID NO: 393717 - RNA, 22 nt, Human
cagaaagcuuaggcaaguugga

SEQ ID NO: 393718 - RNA, 22 nt, Human
cuggcagcucugagucccuucu

SEQ ID NO: 393719 - RNA, 22 nt, Human
ggcagcaguaggagcuaaucuu

SEQ ID NO: 393720 - RNA, 22 nt, Human
ccagcaggaaagugacguuuga

SEQ ID NO: 393721 - RNA, 19 nt, Human
augcuuuauguuauuucuu

SEQ ID NO: 393722 - RNA, 22 nt, Human
aaggcacuacgcugcuggggcg

SEQ ID NO: 393723 - RNA, 22 nt, Human
agcaauauaaauguuggguaga

SEQ ID NO: 393724 - RNA, 22 nt, Human
caggcagcaucagucugcugua

SEQ ID NO: 393725 - RNA, 22 nt, Human
uacauuuauaaggcuucucugu

SEQ ID NO: 393726 - RNA, 22 nt, Human
gggcacugugcuaggugcugag

SEQ ID NO: 393727 - RNA, 22 nt, Human
agggaugguggagguugcaagu

SEQ ID NO: 393728 - RNA, 22 nt, Human
aagacagugaucucugagagau

SEQ ID NO: 393729 - RNA, 22 nt, Human
aaaauccuuagccgagugaggu

SEQ ID NO: 393730 - RNA, 22 nt, Human
uuugcauuguaauauuuaguuc

SEQ ID NO: 393731 - RNA, 22 nt, Human
gugucacaugguuuacugcagc

SEQ ID NO: 393732 - RNA, 22 nt, Human
cagggcuccccagagagccucu

SEQ ID NO: 393733 - RNA, 22 nt, Human
ugaaaugacaaagguuuuucuu

SEQ ID NO: 393734 - RNA, 22 nt, Human
aaugagacacgugaagcagaug

SEQ ID NO: 393735 - RNA, 22 nt, Human
agcugcucuuugaaggacacuu

SEQ ID NO: 393736 - RNA, 22 nt, Human
agccaggcgggucuuugcuccu

SEQ ID NO: 393737 - RNA, 22 nt, Human
caauuuuuaaacuaugaaguug

SEQ ID NO: 393738 - RNA, 22 nt, Human
ccucagggaaugggaggcuggg

SEQ ID NO: 393739 - RNA, 22 nt, Human
aaucagaaagaucuugaugaga

SEQ ID NO: 393740 - RNA, 22 nt, Human
caguuuuuagauuaguuggugg

SEQ ID NO: 393741 - RNA, 20 nt, Human
cagccuccacucacucagcu

SEQ ID NO: 393742 - RNA, 21 nt, Human
ucaaagcacauauuugcacau

SEQ ID NO: 393743 - RNA, 22 nt, Human
gagggcugauaacaggaauaca

SEQ ID NO: 393744 - RNA, 22 nt, Human
uauacagucuuuugcuauauuc

SEQ ID NO: 393745 - RNA, 22 nt, Human
gggaaggacauucugggcucag

SEQ ID NO: 393746 - RNA, 21 nt, Human
uuuagggaccaggucauaggc

SEQ ID NO: 393747 - RNA, 22 nt, Human
aggcagauauuggggugaugug

SEQ ID NO: 393748 - RNA, 22 nt, Human
aaaaauguuaucuacuguccga

SEQ ID NO: 393749 - RNA, 22 nt, Human
aaugguuuucuagaacaugaaa

SEQ ID NO: 393750 - RNA, 22 nt, Human
gcagagccaugggagguuuuug

SEQ ID NO: 393751 - RNA, 22 nt, Human
aguggcagagguugacugcagu

SEQ ID NO: 393752 - RNA, 20 nt, Human
guggccuguccuguuguggg

SEQ ID NO: 393753 - RNA, 20 nt, Human
augauuuugcacuaacuuca

SEQ ID NO: 393754 - RNA, 22 nt, Human
gugcagugaaaaaagaaugucc

SEQ ID NO: 393755 - RNA, 22 nt, Human
uacagaagcugagacacugaga

SEQ ID NO: 393756 - RNA, 22 nt, Human
agguggagaagagaugggcagu

SEQ ID NO: 393757 - RNA, 22 nt, Human
caggugccucaggaugagacaa

SEQ ID NO: 393758 - RNA, 22 nt, Human
ggaagccaggccaaugagaaca

SEQ ID NO: 393759 - RNA, 22 nt, Human
cucuggaaaaccacuagcagga

SEQ ID NO: 393760 - RNA, 17 nt, Human
gccuggcccagccuggc

SEQ ID NO: 393761 - RNA, 22 nt, Human
cauucauuuaugaaauaucuau

SEQ ID NO: 393762 - RNA, 22 nt, Human
ucaggcugcagcugucagcagc

SEQ ID NO: 393763 - RNA, 22 nt, Human
ugggccugggagggcagacgcu

SEQ ID NO: 393764 - RNA, 22 nt, Human
ugugccagaaaauaugcugagg

SEQ ID NO: 393765 - RNA, 20 nt, Human
gcaaauggaucccacaagcc

SEQ ID NO: 393766 - RNA, 23 nt, Human
uuuuaauuuggacauaagaagau

SEQ ID NO: 393767 - RNA, 22 nt, Human
aaugucugcucuacucaggagg

SEQ ID NO: 393768 - RNA, 22 nt, Human
ggugugccuggggcuuagcugc

SEQ ID NO: 393769 - RNA, 22 nt, Human
cuggccuggcaggggaccucua

SEQ ID NO: 393770 - RNA, 22 nt, Human
gcaggccugacuguagggggca

SEQ ID NO: 393771 - RNA, 22 nt, Human
uuaauucuaguuuaacacuuag

SEQ ID NO: 393772 - RNA, 22 nt, Human
caggugggagcgaggagcuacu

SEQ ID NO: 393773 - RNA, 22 nt, Human
acuguucacccagcacuagcag

SEQ ID NO: 393774 - RNA, 22 nt, Human
uguaaucauuacaguacaugga

SEQ ID NO: 393775 - RNA, 22 nt, Human
cuggcaggcagacuucugcaag

SEQ ID NO: 393776 - RNA, 19 nt, Human
uggccagguacugucugcu

SEQ ID NO: 393777 - RNA, 22 nt, Human
uuauuccaguaaucucuguaau

SEQ ID NO: 393778 - RNA, 22 nt, Human
ggccaggcuggucucagacuuc

SEQ ID NO: 393779 - RNA, 22 nt, Human
aaguccuuaggaagcagucguu

SEQ ID NO: 393780 - RNA, 20 nt, Human
cccucugcuacacugggagc

SEQ ID NO: 393781 - RNA, 22 nt, Human
cagcaggcucugaguggcugcc

SEQ ID NO: 393782 - RNA, 22 nt, Human
gggugggguucaggaaucuuca

SEQ ID NO: 393783 - RNA, 22 nt, Human
uucacagaugccugaugugugg

SEQ ID NO: 393784 - RNA, 22 nt, Human
gcugccagucuaaugggaaaca

SEQ ID NO: 393785 - RNA, 22 nt, Human
acauacuaugaauacauguguc

SEQ ID NO: 393786 - RNA, 22 nt, Human
gaguaagagcuggcuuuggugu

SEQ ID NO: 393787 - RNA, 22 nt, Human
ugaacauauucaccucuaaaua

SEQ ID NO: 393788 - RNA, 21 nt, Human
agcagcugcaguuucuaucug

SEQ ID NO: 393789 - RNA, 23 nt, Human
accaggaguugucucaggaaaca

SEQ ID NO: 393790 - RNA, 22 nt, Human
ccagagggccuuuggaguuauc

SEQ ID NO: 393791 - RNA, 22 nt, Human
cuuucaaugugccugccuuggg

SEQ ID NO: 393792 - RNA, 21 nt, Human
aauaaaacaguuggugucaau

SEQ ID NO: 393793 - RNA, 22 nt, Human
gcucagaggagcaucauaagga

SEQ ID NO: 393794 - RNA, 22 nt, Human
cuuaacauccugcauuuuucuu

SEQ ID NO: 393795 - RNA, 22 nt, Human
ucaguggaguauggaugaaguc

SEQ ID NO: 393796 - RNA, 22 nt, Human
uucaagauggcaccagugagug

SEQ ID NO: 393797 - RNA, 22 nt, Human
ccucuucuagguuucagccugc

SEQ ID NO: 393798 - RNA, 22 nt, Human
uucaugugauaaaugugugacu

SEQ ID NO: 393799 - RNA, 20 nt, Human
uuccuuaggcauuggaagaa

SEQ ID NO: 393800 - RNA, 22 nt, Human
cuaauuauguuguuauaaucaa

SEQ ID NO: 393801 - RNA, 22 nt, Human
aggcagcaauugaaaucauugu

SEQ ID NO: 393802 - RNA, 22 nt, Human
uuaaugcuugucuagaucuucu

SEQ ID NO: 393803 - RNA, 17 nt, Human
acacagccagguucucc

SEQ ID NO: 393804 - RNA, 22 nt, Human
cagcagcccacgcgugcugucc

SEQ ID NO: 393805 - RNA, 22 nt, Human
ccugggcaggaugggcccggug

SEQ ID NO: 393806 - RNA, 17 nt, Human
uuaaaggaugcucucuc

SEQ ID NO: 393807 - RNA, 22 nt, Human
aaguccuucccaagcauguacc

SEQ ID NO: 393808 - RNA, 22 nt, Human
cugagccagagggagucggguc

SEQ ID NO: 393809 - RNA, 22 nt, Human
ccagagaggccaaggucguggu

SEQ ID NO: 393810 - RNA, 22 nt, Human
gcacugcaucuacuggcaagua

SEQ ID NO: 393811 - RNA, 22 nt, Human
ggagacagugguagggccuaag

SEQ ID NO: 393812 - RNA, 22 nt, Human
uggcccugacacgugguacugg

SEQ ID NO: 393813 - RNA, 19 nt, Human
aggcagaggcuuggcuagc

SEQ ID NO: 393814 - RNA, 20 nt, Human
uggcuccugcgguggaacca

SEQ ID NO: 393815 - RNA, 21 nt, Human
uuucuucacuuugccccaugu

SEQ ID NO: 393816 - RNA, 22 nt, Human
ggauccuucuuugaccucacag

SEQ ID NO: 393817 - RNA, 22 nt, Human
ucacuggggccuuuggucagga

SEQ ID NO: 393818 - RNA, 22 nt, Human
ggagggagcauccccuugcuga

SEQ ID NO: 393819 - RNA, 22 nt, Human
guccucuggaagaugaguucuu

SEQ ID NO: 393820 - RNA, 22 nt, Human
aggacccugaggucuccuguga

SEQ ID NO: 393821 - RNA, 22 nt, Human
agggcccuagggaaugagacau

SEQ ID NO: 393822 - RNA, 18 nt, Human
cccagcuccacuucccuc

SEQ ID NO: 393823 - RNA, 22 nt, Human
ccaggaagcugucugauaugaa

SEQ ID NO: 393824 - RNA, 22 nt, Human
aguucuuuugugaacauaugcu

SEQ ID NO: 393825 - RNA, 22 nt, Human
uacaaaugaaccaacuuugaug

SEQ ID NO: 393826 - RNA, 22 nt, Human
cugcugugacagcugccguguu

SEQ ID NO: 393827 - RNA, 22 nt, Human
aaggcagcaggauuuggugacu

SEQ ID NO: 393828 - RNA, 22 nt, Human
caaaggcuuugcuaugaugcau

SEQ ID NO: 393829 - RNA, 22 nt, Human
ccuggcugcauuuugcuggaug

SEQ ID NO: 393830 - RNA, 22 nt, Human
augggaggguggaaaggcucug

SEQ ID NO: 393831 - RNA, 22 nt, Human
aaaaguuaccucuguaauauaa

SEQ ID NO: 393832 - RNA, 21 nt, Human
agcugcuuucagcuccuagag

SEQ ID NO: 393833 - RNA, 22 nt, Human
uacuaaacaucuggcauuaaau

SEQ ID NO: 393834 - RNA, 22 nt, Human
agugacucacuagcucucagug

SEQ ID NO: 393835 - RNA, 22 nt, Human
ugcccauguuucucuguauccc

SEQ ID NO: 393836 - RNA, 22 nt, Human
ugucacagggauaccauggggc

SEQ ID NO: 393837 - RNA, 22 nt, Human
guggcuucuggcugggccucag

SEQ ID NO: 393838 - RNA, 22 nt, Human
agacacaggauucugcauuucu

SEQ ID NO: 393839 - RNA, 22 nt, Human
aucuggcuauugacauguuaua

SEQ ID NO: 393840 - RNA, 22 nt, Human
gauuuucugagccuucaaauuu

SEQ ID NO: 393841 - RNA, 22 nt, Human
gccaggcagacaggucaucagg

SEQ ID NO: 393842 - RNA, 22 nt, Human
uccugccugagcguggaggagg

SEQ ID NO: 393843 - RNA, 22 nt, Human
gccagagcacaggcugguagua

SEQ ID NO: 393844 - RNA, 22 nt, Human
uauggaaacuaauucauuuuuc

SEQ ID NO: 393845 - RNA, 22 nt, Human
cugcccuguggcucugagucau

SEQ ID NO: 393846 - RNA, 22 nt, Human
ucugccagaaguucugagagua

SEQ ID NO: 393847 - RNA, 22 nt, Human
uguauacaggauuacucauagc

SEQ ID NO: 393848 - RNA, 22 nt, Human
auguucuuccaaaucuguaaca

SEQ ID NO: 393849 - RNA, 22 nt, Human
ggagaggaaaugccagcacuuc

SEQ ID NO: 393850 - RNA, 21 nt, Human
gugcuuuuccuuaauguucuu

SEQ ID NO: 393851 - RNA, 22 nt, Human
uuccaaagucauguugcugaua

SEQ ID NO: 393852 - RNA, 22 nt, Human
cugccugugcaugcagucagaa

SEQ ID NO: 393853 - RNA, 22 nt, Human
gaaugaaaaccuuggcucaaau

SEQ ID NO: 393854 - RNA, 19 nt, Human
ucucccagcugagaagggc

SEQ ID NO: 393855 - RNA, 22 nt, Human
uuuacagauguggaaagugagc

SEQ ID NO: 393856 - RNA, 22 nt, Human
uggguagagcaggcuggggcuu

SEQ ID NO: 393857 - RNA, 22 nt, Human
caguguuuguauagaauaugca

SEQ ID NO: 393858 - RNA, 22 nt, Human
auaaggcagaaauagggaaagu

SEQ ID NO: 393859 - RNA, 22 nt, Human
gcagcugccccgacugugaguc

SEQ ID NO: 393860 - RNA, 22 nt, Human
gcucccagcauugcuucccagg

SEQ ID NO: 393861 - RNA, 22 nt, Human
caacugugaauuuuaugauacc

SEQ ID NO: 393862 - RNA, 18 nt, Human
cugcccagagcauuucau

SEQ ID NO: 393863 - RNA, 20 nt, Human
cccuggccuguuucaugccc

SEQ ID NO: 393864 - RNA, 22 nt, Human
aagggcaggcagagaucauaua

SEQ ID NO: 393865 - RNA, 22 nt, Human
ugcauaguucuccuuccuccuc

SEQ ID NO: 393866 - RNA, 22 nt, Human
uaucuguuaugggcugaauugc

SEQ ID NO: 393867 - RNA, 22 nt, Human
ucuggccuauuucugucagauc

SEQ ID NO: 393868 - RNA, 22 nt, Human
gccaccagguuagauccagccu

SEQ ID NO: 393869 - RNA, 22 nt, Human
ggcugagcacuuuaggcaggag

SEQ ID NO: 393870 - RNA, 22 nt, Human
gaaaggucuuccggucuuccag

SEQ ID NO: 393871 - RNA, 22 nt, Human
ugugaacuggcagguggacggg

SEQ ID NO: 393872 - RNA, 22 nt, Human
agaagccaacagggcaggagag

SEQ ID NO: 393873 - RNA, 22 nt, Human
caggggccaggcugucugcugu

SEQ ID NO: 393874 - RNA, 22 nt, Human
aggauuuaccuccagcuaggcu

SEQ ID NO: 393875 - RNA, 19 nt, Human
auucauuuuugccuucuaa

SEQ ID NO: 393876 - RNA, 22 nt, Human
gccuggagccucagcaaggagg

SEQ ID NO: 393877 - RNA, 21 nt, Human
gcuauacagaauggccagagg

SEQ ID NO: 393878 - RNA, 22 nt, Human
cuggcugcgucugcucugacag

SEQ ID NO: 393879 - RNA, 23 nt, Human
gggagccaggaccucgcgcccca

SEQ ID NO: 393880 - RNA, 22 nt, Human
aggccucacucucagagcuucu

SEQ ID NO: 393881 - RNA, 22 nt, Human
cauuguauugaggauacuuaag

SEQ ID NO: 393882 - RNA, 22 nt, Human
agguccagcuguugcagccucc

SEQ ID NO: 393883 - RNA, 19 nt, Human
agcauccagucaugggauc

SEQ ID NO: 393884 - RNA, 22 nt, Human
ucucagagcuucaguuauuuuc

SEQ ID NO: 393885 - RNA, 22 nt, Human
aagggcuccacuugaaucacac

SEQ ID NO: 393886 - RNA, 18 nt, Human
gagagggaucccucagga

SEQ ID NO: 393887 - RNA, 22 nt, Human
acugagcugcuugaagugaacu

SEQ ID NO: 393888 - RNA, 22 nt, Human
gucagcacuuuuccgaggcaga

SEQ ID NO: 393889 - RNA, 22 nt, Human
agggcugaccuaagcuccacuu

SEQ ID NO: 393890 - RNA, 22 nt, Human
uaauuucuggagggagaaagag

SEQ ID NO: 393891 - RNA, 22 nt, Human
ccagcuuuuagugggcuuauua

SEQ ID NO: 393892 - RNA, 22 nt, Human
augcacaagcaagagauaaugg

SEQ ID NO: 393893 - RNA, 22 nt, Human
uuccaagaguaaauucaaauug

SEQ ID NO: 393894 - RNA, 22 nt, Human
accccagcccugcuucugggag

SEQ ID NO: 393895 - RNA, 23 nt, Human
agcuuugugaaagcagacauggg

SEQ ID NO: 393896 - RNA, 16 nt, Human
agaggccuugaggaag

SEQ ID NO: 393897 - RNA, 20 nt, Human
ggcagggcaucaacagcucu

SEQ ID NO: 393898 - RNA, 22 nt, Human
gggcugagcuguucugaguuua

SEQ ID NO: 393899 - RNA, 22 nt, Human
ugccagagaagacccagucacu

SEQ ID NO: 393900 - RNA, 22 nt, Human
acaguggaaagaaacgaauuag

SEQ ID NO: 393901 - RNA, 22 nt, Human
cccuggagcuagucugagcaga

SEQ ID NO: 393902 - RNA, 22 nt, Human
gcccaggaucugcucagaucau

SEQ ID NO: 393903 - RNA, 22 nt, Human
uguggccuccuguuccugggua

SEQ ID NO: 393904 - RNA, 22 nt, Human
gagcuggcuaauacugacuuau

SEQ ID NO: 393905 - RNA, 22 nt, Human
gcugcccauuccacuggauggu

SEQ ID NO: 393906 - RNA, 22 nt, Human
gcucccagucugauggaggaga

SEQ ID NO: 393907 - RNA, 22 nt, Human
agcagggcuggauuuggcaaga

SEQ ID NO: 393908 - RNA, 18 nt, Human
gcacuucacccagcuagu

SEQ ID NO: 393909 - RNA, 22 nt, Human
ccucccucuguuagagcugucu

SEQ ID NO: 393910 - RNA, 22 nt, Human
ugcagggcuacaggacuacaac

SEQ ID NO: 393911 - RNA, 19 nt, Human
agcaaauacaucaaaauug

SEQ ID NO: 393912 - RNA, 22 nt, Human
ggagauggaauagauucugacu

SEQ ID NO: 393913 - RNA, 22 nt, Human
aucaggaucagggcuagcagag

SEQ ID NO: 393914 - RNA, 22 nt, Human
gugccugguuuggggaauguuc

SEQ ID NO: 393915 - RNA, 22 nt, Human
uugugaguagugccgcaauaaa

SEQ ID NO: 393916 - RNA, 22 nt, Human
ccaguggaguuuuuauacccag

SEQ ID NO: 393917 - RNA, 22 nt, Human
uaaaguuuggcagacaauaaca

SEQ ID NO: 393918 - RNA, 22 nt, Human
cugcucugugguccaugagaca

SEQ ID NO: 393919 - RNA, 22 nt, Human
aggauccuguauggagaagcug

SEQ ID NO: 393920 - RNA, 22 nt, Human
uuggaucauggaaugucugcuu

SEQ ID NO: 393921 - RNA, 20 nt, Human
gcuuuuucuaauagcagucc

SEQ ID NO: 393922 - RNA, 22 nt, Human
gguggccugcccugaucccugg

SEQ ID NO: 393923 - RNA, 22 nt, Human
gagccuggauugaagugggugg

SEQ ID NO: 393924 - RNA, 18 nt, Human
cucaccauucugcccaau

SEQ ID NO: 393925 - RNA, 22 nt, Human
gaaucucaguggaagcaggaag

SEQ ID NO: 393926 - RNA, 22 nt, Human
cacaaaugguuguagacauuaa

SEQ ID NO: 393927 - RNA, 22 nt, Human
ucagcagcagcucagcauguuu

SEQ ID NO: 393928 - RNA, 22 nt, Human
auaaagcaagcauaccauuaag

SEQ ID NO: 393929 - RNA, 22 nt, Human
aaggagaaaugguagaugugca

SEQ ID NO: 393930 - RNA, 22 nt, Human
gugcauguuaaugguguacaaa

SEQ ID NO: 393931 - RNA, 22 nt, Human
ccucuuccacugggccccaucc

SEQ ID NO: 393932 - RNA, 22 nt, Human
auguaguguagagauuagucuc

SEQ ID NO: 393933 - RNA, 22 nt, Human
uaguaucuauuaguaacaagag

SEQ ID NO: 393934 - RNA, 22 nt, Human
cuggagccggcgagccccagcc

SEQ ID NO: 393935 - RNA, 22 nt, Human
agaguguuauuugcucuguauu

SEQ ID NO: 393936 - RNA, 22 nt, Human
gcagcugcuguggcaucaagcu

SEQ ID NO: 393937 - RNA, 22 nt, Human
uuagaaauauggugcugccgcc

SEQ ID NO: 393938 - RNA, 22 nt, Human
gggcacuguggggcccaugcug

SEQ ID NO: 393939 - RNA, 20 nt, Human
gcucccagccugcagucccc

SEQ ID NO: 393940 - RNA, 22 nt, Human
gcaggaagccuuaccaagccca

SEQ ID NO: 393941 - RNA, 22 nt, Human
gaggcagccagagguucucauu

SEQ ID NO: 393942 - RNA, 22 nt, Human
gauacaaauucaugucugaauu

SEQ ID NO: 393943 - RNA, 22 nt, Human
auggcuuaugguaaauauuucu

SEQ ID NO: 393944 - RNA, 22 nt, Human
gggguugguuuaaaugcuugag

SEQ ID NO: 393945 - RNA, 22 nt, Human
gcucagggaacuuuuugcaggc

SEQ ID NO: 393946 - RNA, 22 nt, Human
uuauuuaggagaaggaacccug

SEQ ID NO: 393947 - RNA, 22 nt, Human
ugugauauuugaguauugucaa

SEQ ID NO: 393948 - RNA, 22 nt, Human
cugagccaguagucagggacaa

SEQ ID NO: 393949 - RNA, 23 nt, Human
cacacccaucacuaagagcuccu

SEQ ID NO: 393950 - RNA, 20 nt, Human
ucaaaggcaaaggugggugu

SEQ ID NO: 393951 - RNA, 22 nt, Human
uuccaggaggcacugacagagg

SEQ ID NO: 393952 - RNA, 22 nt, Human
ccagucugaggccuggugaggg

SEQ ID NO: 393953 - RNA, 22 nt, Human
ggcucaggggccaggccugucc

SEQ ID NO: 393954 - RNA, 22 nt, Human
gaaagccagagagaaagggcuc

SEQ ID NO: 393955 - RNA, 22 nt, Human
ggcuagaauaauugacuucauu

SEQ ID NO: 393956 - RNA, 22 nt, Human
cugcccugaccugccucagagu

SEQ ID NO: 393957 - RNA, 22 nt, Human
ccauccugcauugcuauucaga

SEQ ID NO: 393958 - RNA, 22 nt, Human
cccucugaccuccugccacagu

SEQ ID NO: 393959 - RNA, 22 nt, Human
cucccaggggaacuaucaagua

SEQ ID NO: 393960 - RNA, 22 nt, Human
uuguacaaauaggaaccucuga

SEQ ID NO: 393961 - RNA, 22 nt, Human
caggggacaguaugguggauga

SEQ ID NO: 393962 - RNA, 22 nt, Human
gccuuaauuuuuuauaaucucu

SEQ ID NO: 393963 - RNA, 22 nt, Human
guccuuaguuacuuuucauguc

SEQ ID NO: 393964 - RNA, 22 nt, Human
cagugagggcauucagugcugg

SEQ ID NO: 393965 - RNA, 22 nt, Human
uagccucuggaauccuuucucu

SEQ ID NO: 393966 - RNA, 20 nt, Human
ugcagggcucugcuucucuc

SEQ ID NO: 393967 - RNA, 22 nt, Human
agagccacggcaggccuaggaa

SEQ ID NO: 393968 - RNA, 22 nt, Human
ccuguucaaugcccuggcuuca

SEQ ID NO: 393969 - RNA, 22 nt, Human
uggagagcgugcuuagcacucu

SEQ ID NO: 393970 - RNA, 22 nt, Human
aguccuucaagaaaucuggaaa

SEQ ID NO: 393971 - RNA, 22 nt, Human
acaacuuuaauggguuucagcu

SEQ ID NO: 393972 - RNA, 22 nt, Human
uaguacuuaucucugucauugu

SEQ ID NO: 393973 - RNA, 22 nt, Human
aaguucaaucagaugaaaaagc

SEQ ID NO: 393974 - RNA, 22 nt, Human
uccuuccucggggacccagauc

SEQ ID NO: 393975 - RNA, 20 nt, Human
cagagacccaggcuucagcu

SEQ ID NO: 393976 - RNA, 22 nt, Human
aggcagaucacuugaggccagg

SEQ ID NO: 393977 - RNA, 22 nt, Human
auacagaagaccccuccgucau

SEQ ID NO: 393978 - RNA, 22 nt, Human
cgccaggcuugguagcucaugc

SEQ ID NO: 393979 - RNA, 22 nt, Human
aggucacacuuggaucauagaa

SEQ ID NO: 393980 - RNA, 22 nt, Human
gguaugaauucacuacuuccaa

SEQ ID NO: 393981 - RNA, 22 nt, Human
gaggcagcuuggggcugugggu

SEQ ID NO: 393982 - RNA, 22 nt, Human
uuagaaaaaggcuguggucuua

SEQ ID NO: 393983 - RNA, 22 nt, Human
agucaccauuuucaccugccuc

SEQ ID NO: 393984 - RNA, 22 nt, Human
uuuggaauguaguuuaaucauc

SEQ ID NO: 393985 - RNA, 22 nt, Human
gaaggccacuuuguguugagaa

SEQ ID NO: 393986 - RNA, 22 nt, Human
aaaugucuguuagucauaucau

SEQ ID NO: 393987 - RNA, 22 nt, Human
agggagacacaugaggaaguca

SEQ ID NO: 393988 - RNA, 22 nt, Human
agagugaaggccagguuacagu

SEQ ID NO: 393989 - RNA, 19 nt, Human
ccuuugaaucaggacacuu

SEQ ID NO: 393990 - RNA, 22 nt, Human
ucaguggagagcuuccaggauu

SEQ ID NO: 393991 - RNA, 22 nt, Human
uuuguuuagaaagagauuggug

SEQ ID NO: 393992 - RNA, 22 nt, Human
ccugcugugaccggggagcagg

SEQ ID NO: 393993 - RNA, 22 nt, Human
gaggccacagcuaucagggaca

SEQ ID NO: 393994 - RNA, 22 nt, Human
ucauccaguuguggagagggaa

SEQ ID NO: 393995 - RNA, 22 nt, Human
ucuuuccuguaacugcuguuca

SEQ ID NO: 393996 - RNA, 22 nt, Human
gagggagugccagagggccagc

SEQ ID NO: 393997 - RNA, 22 nt, Human
cugcucugcaaggcacagugau

SEQ ID NO: 393998 - RNA, 22 nt, Human
aucuuguuaaaaugcagaaacu

SEQ ID NO: 393999 - RNA, 22 nt, Human
cagucccacaagaucuccacaa

SEQ ID NO: 394000 - RNA, 22 nt, Human
ucugccuuccccauaaucugau

SEQ ID NO: 394001 - RNA, 22 nt, Human
ggcccaaggcccaggucgagcu

SEQ ID NO: 394002 - RNA, 20 nt, Human
ccucaguguccuggacuggg

SEQ ID NO: 394003 - RNA, 22 nt, Human
acagagccuccaggagugcugg

SEQ ID NO: 394004 - RNA, 22 nt, Human
gagggagggaaaguuuaacacu

SEQ ID NO: 394005 - RNA, 22 nt, Human
ucgccagggaugcuguaaggaa

SEQ ID NO: 394006 - RNA, 22 nt, Human
cagggccauuggcguggcuguc

SEQ ID NO: 394007 - RNA, 22 nt, Human
gagggaauggugugcaagaggu

SEQ ID NO: 394008 - RNA, 22 nt, Human
gguaaaaugcagauucuuagcc

SEQ ID NO: 394009 - RNA, 22 nt, Human
uaaaagcucuucuguugaguua

SEQ ID NO: 394010 - RNA, 22 nt, Human
ucaggagcagcaugggugagag

SEQ ID NO: 394011 - RNA, 22 nt, Human
ccaaagucuggagcagcagagc

SEQ ID NO: 394012 - RNA, 22 nt, Human
cccaggaaaugaacuucugauu

SEQ ID NO: 394013 - RNA, 22 nt, Human
aaguguuaaagacuugaacacu

SEQ ID NO: 394014 - RNA, 22 nt, Human
guggagcaaucagagggucagu

SEQ ID NO: 394015 - RNA, 22 nt, Human
cacagccuugagcgaggacaag

SEQ ID NO: 394016 - RNA, 22 nt, Human
uagcagugccaggauuuugcug

SEQ ID NO: 394017 - RNA, 22 nt, Human
uggcucugucaaacugcacaca

SEQ ID NO: 394018 - RNA, 22 nt, Human
auaugcacacucugcccacaga

SEQ ID NO: 394019 - RNA, 22 nt, Human
uguggcucucagauccuccaau

SEQ ID NO: 394020 - RNA, 22 nt, Human
agaggccagcagugccuaucug

SEQ ID NO: 394021 - RNA, 22 nt, Human
ucaggcugccuaucagacugug

SEQ ID NO: 394022 - RNA, 22 nt, Human
gauugaaacauaggcagucgag

SEQ ID NO: 394023 - RNA, 22 nt, Human
uauaucauggagauuaacauuc

SEQ ID NO: 394024 - RNA, 22 nt, Human
caugaagcauguuuugucauga

SEQ ID NO: 394025 - RNA, 20 nt, Human
gcaugaggaaucauugcagc

SEQ ID NO: 394026 - RNA, 22 nt, Human
ucucaggaauagaguggcagca

SEQ ID NO: 394027 - RNA, 22 nt, Human
ccuuaaauucuccauuugaaag

SEQ ID NO: 394028 - RNA, 22 nt, Human
accccagcucugagccacacca

SEQ ID NO: 394029 - RNA, 22 nt, Human
ugguuuugcuaaaauagaaaga

SEQ ID NO: 394030 - RNA, 22 nt, Human
cgaggcagacaaaaguuggaag

SEQ ID NO: 394031 - RNA, 22 nt, Human
cugucacacugauaucaggcuu

SEQ ID NO: 394032 - RNA, 22 nt, Human
agugugagccuacaggccaaag

SEQ ID NO: 394033 - RNA, 22 nt, Human
uggcagaaagaaccaugugcaa

SEQ ID NO: 394034 - RNA, 22 nt, Human
uaaacauggauucugaucacag

SEQ ID NO: 394035 - RNA, 22 nt, Human
auuuccauacacccauuucuga

SEQ ID NO: 394036 - RNA, 22 nt, Human
ucucuuucuauugcaccaugcu

SEQ ID NO: 394037 - RNA, 19 nt, Human
ccucccacggauuccuucc

SEQ ID NO: 394038 - RNA, 22 nt, Human
guaucuuuccacaucuucagua

SEQ ID NO: 394039 - RNA, 22 nt, Human
cuuauguauaauguuccacaua

SEQ ID NO: 394040 - RNA, 22 nt, Human
gggaaggagguggcuugaagug

SEQ ID NO: 394041 - RNA, 22 nt, Human
ugaaacaaauuuggaaaaucua

SEQ ID NO: 394042 - RNA, 20 nt, Human
ccaggccugggccugcucua

SEQ ID NO: 394043 - RNA, 22 nt, Human
cuggagccgcauggagcaggga

SEQ ID NO: 394044 - RNA, 22 nt, Human
uaaacaucugucauguguuuau

SEQ ID NO: 394045 - RNA, 22 nt, Human
cacucaggcugugucaggagga

SEQ ID NO: 394046 - RNA, 22 nt, Human
agggcugccauuucuggcccaa

SEQ ID NO: 394047 - RNA, 22 nt, Human
aggaccaguaugagagcaucug

SEQ ID NO: 394048 - RNA, 22 nt, Human
guuagggagucagguggcucuu

SEQ ID NO: 394049 - RNA, 22 nt, Human
gaagagcugugauucaggcuua

SEQ ID NO: 394050 - RNA, 22 nt, Human
uuuggaauuggaaagugcugug

SEQ ID NO: 394051 - RNA, 22 nt, Human
agggucagagucaggugcagua

SEQ ID NO: 394052 - RNA, 22 nt, Human
aggcugagcaaagggccuuacc

SEQ ID NO: 394053 - RNA, 22 nt, Human
guccucugggcagcugccccac

SEQ ID NO: 394054 - RNA, 22 nt, Human
aaucagaaucaguugacacagc

SEQ ID NO: 394055 - RNA, 22 nt, Human
ccucugcugcuguugagcaccg

SEQ ID NO: 394056 - RNA, 22 nt, Human
agaagaaaugaggccguucugc

SEQ ID NO: 394057 - RNA, 22 nt, Human
uuuaaaauuuagaccucuccac

SEQ ID NO: 394058 - RNA, 22 nt, Human
ugaagcagaggggucuugagcu

SEQ ID NO: 394059 - RNA, 22 nt, Human
aucugccuggcuccaggugagc

SEQ ID NO: 394060 - RNA, 22 nt, Human
gcucccugcacucugcagcccu

SEQ ID NO: 394061 - RNA, 19 nt, Human
ugcuuaauuccuaguaggu

SEQ ID NO: 394062 - RNA, 22 nt, Human
cauuucacaaauggccacauca

SEQ ID NO: 394063 - RNA, 22 nt, Human
gcuggauccacaaauaacuuug

SEQ ID NO: 394064 - RNA, 21 nt, Human
ucucuggaauuagaccauguu

SEQ ID NO: 394065 - RNA, 22 nt, Human
uguaugugcuugagaagguggg

SEQ ID NO: 394066 - RNA, 22 nt, Human
ugggccacuugaaaguggaugu

SEQ ID NO: 394067 - RNA, 22 nt, Human
ucuucucaguuucucuaggaug

SEQ ID NO: 394068 - RNA, 22 nt, Human
aggcagcuaagauggauaauga

SEQ ID NO: 394069 - RNA, 22 nt, Human
ugcagggccccucugcaugagu

SEQ ID NO: 394070 - RNA, 22 nt, Human
auauuaggcaaggagauuauuu

SEQ ID NO: 394071 - RNA, 20 nt, Human
cagucccaauccagggccag

SEQ ID NO: 394072 - RNA, 22 nt, Human
uggcuuaagauuuaugcuuuua

SEQ ID NO: 394073 - RNA, 22 nt, Human
acuguucauauucuuagaaauu

SEQ ID NO: 394074 - RNA, 22 nt, Human
ucugccuguugcuagaauguca

SEQ ID NO: 394075 - RNA, 22 nt, Human
cagugguugguagauacuugag

SEQ ID NO: 394076 - RNA, 21 nt, Human
cugcucugacagugaggccag

SEQ ID NO: 394077 - RNA, 22 nt, Human
ugaaaugcuguagagacuguau

SEQ ID NO: 394078 - RNA, 22 nt, Human
gggggaagacugggcuagugau

SEQ ID NO: 394079 - RNA, 22 nt, Human
uucuucaaauagcagggaguca

SEQ ID NO: 394080 - RNA, 22 nt, Human
agaucugaaucucauccgagga

SEQ ID NO: 394081 - RNA, 22 nt, Human
aggcagccaucugcaggaagga

SEQ ID NO: 394082 - RNA, 22 nt, Human
gcugagguaggagguugcagug

SEQ ID NO: 394083 - RNA, 22 nt, Human
uuuccaaagcugaguugagcaa

SEQ ID NO: 394084 - RNA, 22 nt, Human
gggcuacagacaugcucuaagc

SEQ ID NO: 394085 - RNA, 21 nt, Human
aggcagcucaggcccagagag

SEQ ID NO: 394086 - RNA, 22 nt, Human
ccuguucaaguugcagggcugg

SEQ ID NO: 394087 - RNA, 22 nt, Human
uugcauaaagauuuuauugcau

SEQ ID NO: 394088 - RNA, 22 nt, Human
guguguccaggcgggagucaag

SEQ ID NO: 394089 - RNA, 22 nt, Human
gaaauauugggacucagagcuu

SEQ ID NO: 394090 - RNA, 22 nt, Human
agggacacacuccaguguuauu

SEQ ID NO: 394091 - RNA, 22 nt, Human
ccagagccucuuaugaagaucg

SEQ ID NO: 394092 - RNA, 22 nt, Human
uuuaaucaggcaaagcauaaua

SEQ ID NO: 394093 - RNA, 20 nt, Human
uggagccaaggugugucugg

SEQ ID NO: 394094 - RNA, 22 nt, Human
gggauuuaguaggauaguauac

SEQ ID NO: 394095 - RNA, 22 nt, Human
uaugcacacauguaugcaugug

SEQ ID NO: 394096 - RNA, 22 nt, Human
cagaauggcuuuuauggcucag

SEQ ID NO: 394097 - RNA, 22 nt, Human
uuucaacauauaccauaaugcc

SEQ ID NO: 394098 - RNA, 22 nt, Human
cugaagaggacgcagcagcaag

SEQ ID NO: 394099 - RNA, 22 nt, Human
ugucagugaguuaguugcaagu

SEQ ID NO: 394100 - RNA, 22 nt, Human
ucucuucuuguguuuuccugcc

SEQ ID NO: 394101 - RNA, 23 nt, Human
ucuugaaaagccuacagcaguuc

SEQ ID NO: 394102 - RNA, 22 nt, Human
ugggccugacucaccugccucc

SEQ ID NO: 394103 - RNA, 22 nt, Human
uccuucuuucccccuagucauu

SEQ ID NO: 394104 - RNA, 22 nt, Human
aagagggaggugcgggugcaga

SEQ ID NO: 394105 - RNA, 22 nt, Human
aggcuucugcugauauuucauu

SEQ ID NO: 394106 - RNA, 22 nt, Human
agagaauuuuaaaagccuugaa

SEQ ID NO: 394107 - RNA, 22 nt, Human
cugcaggcucgaagacacggau

SEQ ID NO: 394108 - RNA, 22 nt, Human
caggcaggucagugaagaagga

SEQ ID NO: 394109 - RNA, 22 nt, Human
gagccugggacugggggucaug

SEQ ID NO: 394110 - RNA, 21 nt, Human
aacaaagggaugcucaucuuu

SEQ ID NO: 394111 - RNA, 22 nt, Human
cucaccaggaacagcugcggag

SEQ ID NO: 394112 - RNA, 23 nt, Human
agggagcuaaaaggcuggagcag

SEQ ID NO: 394113 - RNA, 22 nt, Human
ggagaaagcuguaguggaaugu

SEQ ID NO: 394114 - RNA, 22 nt, Human
gcucucugccauaugaggauac

SEQ ID NO: 394115 - RNA, 22 nt, Human
ccagaggcuggguucaccucag

SEQ ID NO: 394116 - RNA, 22 nt, Human
ccaggcucugcgcuggacaugg

SEQ ID NO: 394117 - RNA, 17 nt, Human
ggaaaaggaugauacag

SEQ ID NO: 394118 - RNA, 22 nt, Human
augaaaauguacauguguauaa

SEQ ID NO: 394119 - RNA, 22 nt, Human
acucaggaagaaagcagcuggu

SEQ ID NO: 394120 - RNA, 22 nt, Human
uaucuuuagaggaagagaaucu

SEQ ID NO: 394121 - RNA, 22 nt, Human
cugaauaauuuuauaguugcug

SEQ ID NO: 394122 - RNA, 22 nt, Human
uggcauuucaguauuuucauaa

SEQ ID NO: 394123 - RNA, 22 nt, Human
cagggcucagaagacagaccuc

SEQ ID NO: 394124 - RNA, 22 nt, Human
ugaggcagcaauuguauuguau

SEQ ID NO: 394125 - RNA, 22 nt, Human
cccuuagcucaauuucuugccc

SEQ ID NO: 394126 - RNA, 22 nt, Human
ucuuugcaucccuuccauaguu

SEQ ID NO: 394127 - RNA, 21 nt, Human
uauuugcugccaucuuugagg

SEQ ID NO: 394128 - RNA, 22 nt, Human
uuuuuccuuggaugugucucuc

SEQ ID NO: 394129 - RNA, 22 nt, Human
uaggccaguggcagguugugug

SEQ ID NO: 394130 - RNA, 22 nt, Human
cugcuguguuagcagguuuagu

SEQ ID NO: 394131 - RNA, 22 nt, Human
uaggcagggauuaggguugauu

SEQ ID NO: 394132 - RNA, 22 nt, Human
ucccagccuuccuuguggugaa

SEQ ID NO: 394133 - RNA, 21 nt, Human
agucuguuaggaugacucuga

SEQ ID NO: 394134 - RNA, 22 nt, Human
uccugaggcacaauccuagaau

SEQ ID NO: 394135 - RNA, 22 nt, Human
aagccagggauuccugagggag

SEQ ID NO: 394136 - RNA, 22 nt, Human
aauuucaaagcucacuggcaua

SEQ ID NO: 394137 - RNA, 22 nt, Human
ggcuguggcagcuggaaguggu

SEQ ID NO: 394138 - RNA, 22 nt, Human
aaaauuauucauggcuuuugga

SEQ ID NO: 394139 - RNA, 18 nt, Human
uggagccagcucuaggau

SEQ ID NO: 394140 - RNA, 23 nt, Human
ccugugugcccuuaauucacagc

SEQ ID NO: 394141 - RNA, 22 nt, Human
cuggagccacugggucuuguau

SEQ ID NO: 394142 - RNA, 22 nt, Human
uggccuggggaccugugagacc

SEQ ID NO: 394143 - RNA, 22 nt, Human
cuuccucccggcccaugcucug

SEQ ID NO: 394144 - RNA, 22 nt, Human
gucacuggggccacaugcagaa

SEQ ID NO: 394145 - RNA, 22 nt, Human
gugaacuauuggguaucauaaa

SEQ ID NO: 394146 - RNA, 22 nt, Human
agagccugucugccuuucuacc

SEQ ID NO: 394147 - RNA, 22 nt, Human
agccauggcgccacuagaggga

SEQ ID NO: 394148 - RNA, 22 nt, Human
guggcagagguuccucagugug

SEQ ID NO: 394149 - RNA, 22 nt, Human
agaggaugauuuuaaggacacu

SEQ ID NO: 394150 - RNA, 22 nt, Human
gcagcccaaaaaagagguagau

SEQ ID NO: 394151 - RNA, 22 nt, Human
ucucuucuaauuaggguccaug

SEQ ID NO: 394152 - RNA, 22 nt, Human
gaucuguuucauucacagucug

SEQ ID NO: 394153 - RNA, 22 nt, Human
uagaaauguuagauguauugag

SEQ ID NO: 394154 - RNA, 22 nt, Human
cacugcuuaguugguaaaugug

SEQ ID NO: 394155 - RNA, 22 nt, Human
uucauuacugcgguagucacac

SEQ ID NO: 394156 - RNA, 22 nt, Human
ccaggagagcaggcgugcagcu

SEQ ID NO: 394157 - RNA, 22 nt, Human
gccccagguugccugucccagg

SEQ ID NO: 394158 - RNA, 20 nt, Human
augugagggguugaaguggg

SEQ ID NO: 394159 - RNA, 22 nt, Human
uugacacagaucaauauucaac

SEQ ID NO: 394160 - RNA, 22 nt, Human
augcuuaacuuccuagucuaua

SEQ ID NO: 394161 - RNA, 22 nt, Human
auaaagauuucuuuuucucuac

SEQ ID NO: 394162 - RNA, 22 nt, Human
agaagccagucgcucucccgca

SEQ ID NO: 394163 - RNA, 22 nt, Human
cuuuucaugccagcccaucaca

SEQ ID NO: 394164 - RNA, 22 nt, Human
agggagugguuaagaaggugca

SEQ ID NO: 394165 - RNA, 22 nt, Human
gcagcuuugaagacuuauuugc

SEQ ID NO: 394166 - RNA, 22 nt, Human
ugccaggauauaagagugcgau

SEQ ID NO: 394167 - RNA, 22 nt, Human
auaugagagaggaaagauuuua

SEQ ID NO: 394168 - RNA, 20 nt, Human
ggcacuggaagcacacagga

SEQ ID NO: 394169 - RNA, 23 nt, Human
agcagugaguaaacagauaggau

SEQ ID NO: 394170 - RNA, 22 nt, Human
uccaggcuaauuuugcauuguu

SEQ ID NO: 394171 - RNA, 22 nt, Human
uguacacugcaggaugcauugc

SEQ ID NO: 394172 - RNA, 22 nt, Human
agggaggcaggaaaguugucug

SEQ ID NO: 394173 - RNA, 17 nt, Human
gcugacccuggagaagu

SEQ ID NO: 394174 - RNA, 23 nt, Human
gaaucaguggcuaacaaggaaac

SEQ ID NO: 394175 - RNA, 22 nt, Human
ucuucagaggaagucagucuuu

SEQ ID NO: 394176 - RNA, 22 nt, Human
caacauuucaaggucuuuagga

SEQ ID NO: 394177 - RNA, 22 nt, Human
ggcccaucucuugcucuggguu

SEQ ID NO: 394178 - RNA, 22 nt, Human
uccagaccaugugagaggcgca

SEQ ID NO: 394179 - RNA, 22 nt, Human
gcucugcugagauaucugggag

SEQ ID NO: 394180 - RNA, 22 nt, Human
gcccaggaaaugccccguggug

SEQ ID NO: 394181 - RNA, 22 nt, Human
cuuuuuccagcuucaggguggg

SEQ ID NO: 394182 - RNA, 22 nt, Human
gggggcucugacucccucagcu

SEQ ID NO: 394183 - RNA, 22 nt, Human
cagcccuguccagcagagggug

SEQ ID NO: 394184 - RNA, 22 nt, Human
agguagagcuccaguagaaaau

SEQ ID NO: 394185 - RNA, 22 nt, Human
auggacaggcugagcuuccuca

SEQ ID NO: 394186 - RNA, 22 nt, Human
ccagcugagaaguguaaaguga

SEQ ID NO: 394187 - RNA, 22 nt, Human
cuauuagguaugugguugcuau

SEQ ID NO: 394188 - RNA, 22 nt, Human
gugcaggagguaacauagcaaa

SEQ ID NO: 394189 - RNA, 22 nt, Human
cggcagcugauugcagagcacc

SEQ ID NO: 394190 - RNA, 22 nt, Human
ggcagggucuggacugaaagcu

SEQ ID NO: 394191 - RNA, 22 nt, Human
cucagaguggggcucccugagg

SEQ ID NO: 394192 - RNA, 22 nt, Human
auuuuuccaugauacuuaucug

SEQ ID NO: 394193 - RNA, 22 nt, Human
caggguggaagcuguagagugg

SEQ ID NO: 394194 - RNA, 22 nt, Human
aggcucagggacucccucccuc

SEQ ID NO: 394195 - RNA, 22 nt, Human
cugcccaguuugggagccuuuc

SEQ ID NO: 394196 - RNA, 22 nt, Human
uccugggccuguacuccauccg

SEQ ID NO: 394197 - RNA, 22 nt, Human
ccaggggaaacagggagcacuc

SEQ ID NO: 394198 - RNA, 22 nt, Human
uggcagggugccaguugcgagu

SEQ ID NO: 394199 - RNA, 23 nt, Human
cuggaagugcuuuuauagcuuug

SEQ ID NO: 394200 - RNA, 22 nt, Human
ggcaggugaccuggccucccag

SEQ ID NO: 394201 - RNA, 22 nt, Human
cagccaccauacagcagaagcu

SEQ ID NO: 394202 - RNA, 22 nt, Human
gugacagaguuuuagaucucau

SEQ ID NO: 394203 - RNA, 22 nt, Human
uugaagcauuugcuauagcauu

SEQ ID NO: 394204 - RNA, 22 nt, Human
gaaucauuuagcucugcaugga

SEQ ID NO: 394205 - RNA, 22 nt, Human
gugcauuugugcaugcacaugu

SEQ ID NO: 394206 - RNA, 17 nt, Human
uggcaagaauggaaaug

SEQ ID NO: 394207 - RNA, 22 nt, Human
aaggccaacuaggaugagcuag

SEQ ID NO: 394208 - RNA, 22 nt, Human
ucugaagggcugaguggaggag

SEQ ID NO: 394209 - RNA, 22 nt, Human
ugagacaaccuaauuaaacacc

SEQ ID NO: 394210 - RNA, 22 nt, Human
aggucccaggcauagcuggucu

SEQ ID NO: 394211 - RNA, 22 nt, Human
gccuuaggggucagacagagcu

SEQ ID NO: 394212 - RNA, 22 nt, Human
uucaggauucugugucugacaa

SEQ ID NO: 394213 - RNA, 22 nt, Human
gucccauaaguagugcaacuug

SEQ ID NO: 394214 - RNA, 22 nt, Human
cuuaaagaugucaaggcuguuu

SEQ ID NO: 394215 - RNA, 22 nt, Human
uggagcagagaugguggccuuc

SEQ ID NO: 394216 - RNA, 22 nt, Human
guugggaaggcaagaaguagaa

SEQ ID NO: 394217 - RNA, 22 nt, Human
guuugcauaaaguggaugcagg

SEQ ID NO: 394218 - RNA, 22 nt, Human
aggccaaguagcuagcauugaa

SEQ ID NO: 394219 - RNA, 22 nt, Human
agaaaguucugugaguuguuca

SEQ ID NO: 394220 - RNA, 22 nt, Human
uaaggccaaacuauuauaguuc

SEQ ID NO: 394221 - RNA, 22 nt, Human
cugcagaggguuugagcauccu

SEQ ID NO: 394222 - RNA, 19 nt, Human
uucuccaggcugcagaggg

SEQ ID NO: 394223 - RNA, 22 nt, Human
caagauuugccaguggccaacu

SEQ ID NO: 394224 - RNA, 22 nt, Human
gccuggagacaaggacaaaggg

SEQ ID NO: 394225 - RNA, 20 nt, Human
gucaucgccggcagcaaaga

SEQ ID NO: 394226 - RNA, 18 nt, Human
ucagagguacagaaaagu

SEQ ID NO: 394227 - RNA, 22 nt, Human
ggccagaggccauccuccugcu

SEQ ID NO: 394228 - RNA, 22 nt, Human
aggcacugcagauuacaggcgc

SEQ ID NO: 394229 - RNA, 22 nt, Human
uuaacagauguuuauggagcau

SEQ ID NO: 394230 - RNA, 21 nt, Human
gcuccuggugcugcguggcgc

SEQ ID NO: 394231 - RNA, 22 nt, Human
ugccugggaaccaauccuggcu

SEQ ID NO: 394232 - RNA, 22 nt, Human
ccaccagcuucagcagccgcgg

SEQ ID NO: 394233 - RNA, 22 nt, Human
auguccagaguaaagcacauuc

SEQ ID NO: 394234 - RNA, 22 nt, Human
uggcugcuuguuuuagugaggc

SEQ ID NO: 394235 - RNA, 22 nt, Human
uauugucuguccgggucaaagc

SEQ ID NO: 394236 - RNA, 22 nt, Human
guuaucaugcuucaucaucacu

SEQ ID NO: 394237 - RNA, 21 nt, Human
uggccucccacacuuccaugg

SEQ ID NO: 394238 - RNA, 22 nt, Human
ugcccaggguggagugcagcgg

SEQ ID NO: 394239 - RNA, 22 nt, Human
augggguggaguccgggcagcg

SEQ ID NO: 394240 - RNA, 23 nt, Human
ugagaagccaggggagcgugagg

SEQ ID NO: 394241 - RNA, 22 nt, Human
acacagggggcauucuaggagu

SEQ ID NO: 394242 - RNA, 22 nt, Human
uauuuccaccuauuauuuucug

SEQ ID NO: 394243 - RNA, 22 nt, Human
gguucacacuaagcuuaagugg

SEQ ID NO: 394244 - RNA, 22 nt, Human
aagaaaucugauauuuguuuca

SEQ ID NO: 394245 - RNA, 22 nt, Human
uuacaguauuguuaaacucuuu

SEQ ID NO: 394246 - RNA, 22 nt, Human
agagacaggaguucuguuucca

SEQ ID NO: 394247 - RNA, 22 nt, Human
uaacacugguauuucauuuagu

SEQ ID NO: 394248 - RNA, 22 nt, Human
cugggagggguagccaauccua

SEQ ID NO: 394249 - RNA, 22 nt, Human
acugcagccuagggaccacagu

SEQ ID NO: 394250 - RNA, 22 nt, Human
caggccaggguugagaagagaa

SEQ ID NO: 394251 - RNA, 22 nt, Human
gagggagagugauggaccauug

SEQ ID NO: 394252 - RNA, 22 nt, Human
ucaaagucauggcuaguaauga

SEQ ID NO: 394253 - RNA, 22 nt, Human
aucuuccuucacuuucucccac

SEQ ID NO: 394254 - RNA, 22 nt, Human
ucccagccugacagugcaucaa

SEQ ID NO: 394255 - RNA, 22 nt, Human
ucccuucacagaugcgauguuu

SEQ ID NO: 394256 - RNA, 22 nt, Human
cauggcagugauucagccuuug

SEQ ID NO: 394257 - RNA, 22 nt, Human
caggagauguaagacuucuguu

SEQ ID NO: 394258 - RNA, 22 nt, Human
gguggggcccuggcacugguau

SEQ ID NO: 394259 - RNA, 22 nt, Human
gaaggccugugguagugagacg

SEQ ID NO: 394260 - RNA, 22 nt, Human
aguggcagagcaggugcuggaa

SEQ ID NO: 394261 - RNA, 22 nt, Human
aacacuuucuauuauuaugguu

SEQ ID NO: 394262 - RNA, 22 nt, Human
cucugcagaauuugagcugcuc

SEQ ID NO: 394263 - RNA, 22 nt, Human
agcagggcccacuaggggagau

SEQ ID NO: 394264 - RNA, 22 nt, Human
gcuggccucuggagaagggcuu

SEQ ID NO: 394265 - RNA, 22 nt, Human
uugcacuaggaaaaggcagcca

SEQ ID NO: 394266 - RNA, 22 nt, Human
uccaggaggguuuucugccuuc

SEQ ID NO: 394267 - RNA, 22 nt, Human
uuuauccaaggguuuuaacugu

SEQ ID NO: 394268 - RNA, 22 nt, Human
cucacuguuuaauagcuggauc

SEQ ID NO: 394269 - RNA, 22 nt, Human
uggagggcaugcuguccauggg

SEQ ID NO: 394270 - RNA, 22 nt, Human
uggggugccgacagggagggca

SEQ ID NO: 394271 - RNA, 22 nt, Human
cugcucuggucucuucauguuu

SEQ ID NO: 394272 - RNA, 22 nt, Human
gaagaagcaggaguguguagca

SEQ ID NO: 394273 - RNA, 22 nt, Human
uggcagagaugaagaguuguuu

SEQ ID NO: 394274 - RNA, 22 nt, Human
ugauggcuaucccuggaagggc

SEQ ID NO: 394275 - RNA, 22 nt, Human
ggguggagcuuggacaccagua

SEQ ID NO: 394276 - RNA, 22 nt, Human
caggguugcaugcaucuguggg

SEQ ID NO: 394277 - RNA, 22 nt, Human
cagagggcucuuggcugccugc

SEQ ID NO: 394278 - RNA, 22 nt, Human
cagagggcucggcggccgcucc

SEQ ID NO: 394279 - RNA, 22 nt, Human
aaugggauaauuguucauggga

SEQ ID NO: 394280 - RNA, 22 nt, Human
aaaauggucucagcuggcacca

SEQ ID NO: 394281 - RNA, 22 nt, Human
aaaaucuaaguagcgaguaagg

SEQ ID NO: 394282 - RNA, 22 nt, Human
uucauaaugagguccuagaggc

SEQ ID NO: 394283 - RNA, 22 nt, Human
gcuccuggucuggagcuucaag

SEQ ID NO: 394284 - RNA, 22 nt, Human
ugacagggcuagaggcaaugca

SEQ ID NO: 394285 - RNA, 22 nt, Human
gggcucucaaggcagggcccca

SEQ ID NO: 394286 - RNA, 22 nt, Human
agggucaggagacacuggcaac

SEQ ID NO: 394287 - RNA, 22 nt, Human
auuacacuuguucaucaucacc

SEQ ID NO: 394288 - RNA, 22 nt, Human
ucccagagcccaaguuggagag

SEQ ID NO: 394289 - RNA, 22 nt, Human
auuguuaugaaaauaagauguu

SEQ ID NO: 394290 - RNA, 17 nt, Human
gagagcugcugcuuccg

SEQ ID NO: 394291 - RNA, 22 nt, Human
aggcagguuggugagaagacug

SEQ ID NO: 394292 - RNA, 22 nt, Human
acacacucaauugcauaagcac

SEQ ID NO: 394293 - RNA, 22 nt, Human
ggaggugggagacauaggcggc

SEQ ID NO: 394294 - RNA, 22 nt, Human
ggagauaguccaggugaaggga

SEQ ID NO: 394295 - RNA, 22 nt, Human
uggccucaagucugagggccuu

SEQ ID NO: 394296 - RNA, 22 nt, Human
ucccaagugucuuggaccaggg

SEQ ID NO: 394297 - RNA, 21 nt, Human
uccauaagagaccaucuccua

SEQ ID NO: 394298 - RNA, 22 nt, Human
uuauagaacagccuccucuaga

SEQ ID NO: 394299 - RNA, 22 nt, Human
uacuuguuaucaucuuuuccuu

SEQ ID NO: 394300 - RNA, 22 nt, Human
aagcucugcucagcagacuagg

SEQ ID NO: 394301 - RNA, 22 nt, Human
ccauaaucuggcuuugagagag

SEQ ID NO: 394302 - RNA, 22 nt, Human
ugacuuccugcacucaggugau

SEQ ID NO: 394303 - RNA, 22 nt, Human
ccugggcaucucaugcaccugc

SEQ ID NO: 394304 - RNA, 22 nt, Human
uccccagggcugcagagggugu

SEQ ID NO: 394305 - RNA, 22 nt, Human
cucugugcccuacugcucagcu

SEQ ID NO: 394306 - RNA, 22 nt, Human
aagcauuuauagauaagaauuu

SEQ ID NO: 394307 - RNA, 22 nt, Human
cuggcaggucucgcugacgugu

SEQ ID NO: 394308 - RNA, 22 nt, Human
cuggcagcuucaggacacucgg

SEQ ID NO: 394309 - RNA, 22 nt, Human
aauagaaaggaggggcucuugu

SEQ ID NO: 394310 - RNA, 22 nt, Human
ugcuggggguucagaugaguaa

SEQ ID NO: 394311 - RNA, 22 nt, Human
uggagcugguaaacagugacau

SEQ ID NO: 394312 - RNA, 22 nt, Human
cugggaggauucauugagguga

SEQ ID NO: 394313 - RNA, 22 nt, Human
auguauuucuauguagugaaga

SEQ ID NO: 394314 - RNA, 22 nt, Human
acccaggacuuggcaaccucau

SEQ ID NO: 394315 - RNA, 23 nt, Human
ugggcaucuccucugugccaggc

SEQ ID NO: 394316 - RNA, 22 nt, Human
ugaugauguuuaucuugguauu

SEQ ID NO: 394317 - RNA, 21 nt, Human
agggagcuuuagguagaaguu

SEQ ID NO: 394318 - RNA, 20 nt, Human
uugcagcagugaggugaagg

SEQ ID NO: 394319 - RNA, 22 nt, Human
cagaggguugaugugaggcuua

SEQ ID NO: 394320 - RNA, 22 nt, Human
uuugaacaggaguaucuauagu

SEQ ID NO: 394321 - RNA, 22 nt, Human
agccaaagaucagugugcaagu

SEQ ID NO: 394322 - RNA, 22 nt, Human
cacugaguucccugacauuuca

SEQ ID NO: 394323 - RNA, 22 nt, Human
aucaaaaccuugacuuuuaaug

SEQ ID NO: 394324 - RNA, 22 nt, Human
aaugcacauguuguaauaaaua

SEQ ID NO: 394325 - RNA, 22 nt, Human
gguaacaguauguagaguaaga

SEQ ID NO: 394326 - RNA, 18 nt, Human
gcagcuagccaggggggc

SEQ ID NO: 394327 - RNA, 22 nt, Human
acauuugagaugccuuuuaggu

SEQ ID NO: 394328 - RNA, 22 nt, Human
ccagcucugccaagcgucagcu

SEQ ID NO: 394329 - RNA, 22 nt, Human
gaaagccaucuggcugcuggga

SEQ ID NO: 394330 - RNA, 22 nt, Human
ucucacucauuuccuaggucuu

SEQ ID NO: 394331 - RNA, 22 nt, Human
cucuucuugccugaugaggcag

SEQ ID NO: 394332 - RNA, 22 nt, Human
agucccagugacuuggccagaa

SEQ ID NO: 394333 - RNA, 19 nt, Human
gcuguauuaaagauacaug

SEQ ID NO: 394334 - RNA, 22 nt, Human
aucuacagugcacaggacagcc

SEQ ID NO: 394335 - RNA, 23 nt, Human
ugucccagagggagggauaggcu

SEQ ID NO: 394336 - RNA, 22 nt, Human
aaagcagucacuccagugugau

SEQ ID NO: 394337 - RNA, 22 nt, Human
uggugguuaugcgcuuuguggg

SEQ ID NO: 394338 - RNA, 22 nt, Human
gggagcuguaagggacagguag

SEQ ID NO: 394339 - RNA, 22 nt, Human
gcucaggaccgaggggugggaa

SEQ ID NO: 394340 - RNA, 22 nt, Human
gagggagucugugcaaagaauu

SEQ ID NO: 394341 - RNA, 22 nt, Human
ggcagagacuggguuggcagag

SEQ ID NO: 394342 - RNA, 22 nt, Human
cuuaggcaaccaggucaaugcu

SEQ ID NO: 394343 - RNA, 22 nt, Human
gauuuauaaagguugcacugga

SEQ ID NO: 394344 - RNA, 20 nt, Human
acaauacagguugugucuga

SEQ ID NO: 394345 - RNA, 22 nt, Human
aagauucuacaguagguacauu

SEQ ID NO: 394346 - RNA, 22 nt, Human
gcugcucuacccaugcaucugu

SEQ ID NO: 394347 - RNA, 22 nt, Human
ggcugugccucaaggcuacuca

SEQ ID NO: 394348 - RNA, 22 nt, Human
gaggaagcugcguggcauuuca

SEQ ID NO: 394349 - RNA, 22 nt, Human
acccaggacacagagaugaccc

SEQ ID NO: 394350 - RNA, 22 nt, Human
gugcugucguggaacugggcug

SEQ ID NO: 394351 - RNA, 22 nt, Human
ugugggcaggcccgggucugag

SEQ ID NO: 394352 - RNA, 22 nt, Human
ggcccagcugugcuuccagccc

SEQ ID NO: 394353 - RNA, 22 nt, Human
ugggaugggaucucgcuguguc

SEQ ID NO: 394354 - RNA, 22 nt, Human
caggcagagugagguggucuaa

SEQ ID NO: 394355 - RNA, 22 nt, Human
guugaaaguagaugcuauuugg

SEQ ID NO: 394356 - RNA, 22 nt, Human
ccugagaccaaguugcagccau

SEQ ID NO: 394357 - RNA, 23 nt, Human
uggcuggcagaaacugaagcaug

SEQ ID NO: 394358 - RNA, 22 nt, Human
uccagucauuuccauuguuccc

SEQ ID NO: 394359 - RNA, 23 nt, Human
uccagcagagccuuccaggaggg

SEQ ID NO: 394360 - RNA, 22 nt, Human
gaaaugcauggaucuuggcaga

SEQ ID NO: 394361 - RNA, 22 nt, Human
uccucuggggcgugguccugga

SEQ ID NO: 394362 - RNA, 22 nt, Human
ugaaucugauuucccuggaggc

SEQ ID NO: 394363 - RNA, 22 nt, Human
ccagcuggcacuguggcugccc

SEQ ID NO: 394364 - RNA, 22 nt, Human
aacucaguguguuucuuaguau

SEQ ID NO: 394365 - RNA, 22 nt, Human
uguuaucugagcaacgucgacg

SEQ ID NO: 394366 - RNA, 22 nt, Human
cacaucagggcugcuugggggu

SEQ ID NO: 394367 - RNA, 22 nt, Human
ggagcugggaauuggaucaucu

SEQ ID NO: 394368 - RNA, 22 nt, Human
cugccucucaggucccugagau

SEQ ID NO: 394369 - RNA, 22 nt, Human
uaggggugaggccaggcaucag

SEQ ID NO: 394370 - RNA, 22 nt, Human
gagcugucucuauaugaaugcu

SEQ ID NO: 394371 - RNA, 22 nt, Human
uuauguaauuuguuugcucuuc

SEQ ID NO: 394372 - RNA, 22 nt, Human
auccuugagaaaauaaaugacc

SEQ ID NO: 394373 - RNA, 22 nt, Human
aauguugagcuugaaaguaggu

SEQ ID NO: 394374 - RNA, 22 nt, Human
ccagagaggggaagggcuugcc

SEQ ID NO: 394375 - RNA, 17 nt, Human
cagacagauauccuggg

SEQ ID NO: 394376 - RNA, 22 nt, Human
ugcucccagggacucuggcugg

SEQ ID NO: 394377 - RNA, 22 nt, Human
cuucacauguuggaguccuuug

SEQ ID NO: 394378 - RNA, 18 nt, Human
gcugccugcauuccucac

SEQ ID NO: 394379 - RNA, 22 nt, Human
gcugucaggaacaugccuuggu

SEQ ID NO: 394380 - RNA, 22 nt, Human
augcugugagugugccgcagag

SEQ ID NO: 394381 - RNA, 22 nt, Human
ugaacagauggcccagcagagg

SEQ ID NO: 394382 - RNA, 22 nt, Human
aggaguggaauuacuggguucu

SEQ ID NO: 394383 - RNA, 22 nt, Human
agugauuugggugucagaaagu

SEQ ID NO: 394384 - RNA, 22 nt, Human
ccuggcagcauugguagagauu

SEQ ID NO: 394385 - RNA, 22 nt, Human
ucugagagagggucagaugcua

SEQ ID NO: 394386 - RNA, 22 nt, Human
aaugaugguuucaucacuugaa

SEQ ID NO: 394387 - RNA, 22 nt, Human
uagcuuuaccauagaagaguau

SEQ ID NO: 394388 - RNA, 22 nt, Human
aaaaccugauugaauucuauuu

SEQ ID NO: 394389 - RNA, 22 nt, Human
auguucuuguucaaaugucagu

SEQ ID NO: 394390 - RNA, 19 nt, Human
acagaaauuaguuauuuuc

SEQ ID NO: 394391 - RNA, 22 nt, Human
gacagugcauuuccuggcaugg

SEQ ID NO: 394392 - RNA, 22 nt, Human
cccagcucugcagaccugcccu

SEQ ID NO: 394393 - RNA, 22 nt, Human
gccuggcacauugcaguggauu

SEQ ID NO: 394394 - RNA, 22 nt, Human
ugucagagagcaggcaguagaa

SEQ ID NO: 394395 - RNA, 22 nt, Human
aagcaauauacugauaugauua

SEQ ID NO: 394396 - RNA, 22 nt, Human
aaaaguaauugcaauuuuguag

SEQ ID NO: 394397 - RNA, 18 nt, Human
ggaaaccacaggguucug

SEQ ID NO: 394398 - RNA, 22 nt, Human
gcaggggcaggagaucucaggc

SEQ ID NO: 394399 - RNA, 22 nt, Human
ugcagggcaucuuugaagugug

SEQ ID NO: 394400 - RNA, 22 nt, Human
uguuucauuaguacugacaaua

SEQ ID NO: 394401 - RNA, 22 nt, Human
ucugugaacaucacauugacag

SEQ ID NO: 394402 - RNA, 20 nt, Human
agugucuggugcagggccuc

SEQ ID NO: 394403 - RNA, 22 nt, Human
cuggagccccagacagggagag

SEQ ID NO: 394404 - RNA, 22 nt, Human
uaauuacagguccaaaacaauc

SEQ ID NO: 394405 - RNA, 22 nt, Human
auaaaacuuauuagaauugugu

SEQ ID NO: 394406 - RNA, 23 nt, Human
cagugugacgaggugaggcaggc

SEQ ID NO: 394407 - RNA, 22 nt, Human
aggcagagcugauguucuguga

SEQ ID NO: 394408 - RNA, 22 nt, Human
caggagcaguuagaagcccacu

SEQ ID NO: 394409 - RNA, 22 nt, Human
ggccagaggugguacauagcuu

SEQ ID NO: 394410 - RNA, 22 nt, Human
ccagcaggcagucauauccuuu

SEQ ID NO: 394411 - RNA, 22 nt, Human
acaggcagagaacucagccaga

SEQ ID NO: 394412 - RNA, 22 nt, Human
ggucacugcucuaaacaaaagu

SEQ ID NO: 394413 - RNA, 22 nt, Human
cugaggaugguguggucuucuc

SEQ ID NO: 394414 - RNA, 22 nt, Human
cauagaaacuugcagcaagcac

SEQ ID NO: 394415 - RNA, 22 nt, Human
uccaggcaugguguaauuuugc

SEQ ID NO: 394416 - RNA, 22 nt, Human
agucccagugagaugagccacg

SEQ ID NO: 394417 - RNA, 23 nt, Human
agagcuuagggaauucacaugag

SEQ ID NO: 394418 - RNA, 22 nt, Human
cagagcggccacuagagggcgc

SEQ ID NO: 394419 - RNA, 22 nt, Human
ggccucaguuucuucaacugua

SEQ ID NO: 394420 - RNA, 22 nt, Human
gcuguucacggaggaggauggg

SEQ ID NO: 394421 - RNA, 22 nt, Human
gcagcagaugcuuucauggaca

SEQ ID NO: 394422 - RNA, 22 nt, Human
gccuggugugcgccgcgcagcu

SEQ ID NO: 394423 - RNA, 22 nt, Human
acagguggcauaggcaguuuga

SEQ ID NO: 394424 - RNA, 22 nt, Human
cugggcugcaggaguggggcaa

SEQ ID NO: 394425 - RNA, 22 nt, Human
gcaaaggcuucuuuuauucucc

SEQ ID NO: 394426 - RNA, 22 nt, Human
acaggccugacacacagagggc

SEQ ID NO: 394427 - RNA, 22 nt, Human
caggggcucugggugaugugag

SEQ ID NO: 394428 - RNA, 22 nt, Human
uaguuuuacuugcgaugauaau

SEQ ID NO: 394429 - RNA, 22 nt, Human
ucagaaaagguagcugugacaa

SEQ ID NO: 394430 - RNA, 22 nt, Human
ucauggcacuuagcacaguccu

SEQ ID NO: 394431 - RNA, 22 nt, Human
ggaggccaugaggcucuaggug

SEQ ID NO: 394432 - RNA, 22 nt, Human
aaugugaaaccgcacagaauaa

SEQ ID NO: 394433 - RNA, 22 nt, Human
gcauuucugugcauacacauga

SEQ ID NO: 394434 - RNA, 22 nt, Human
guaucuuucccaccaaucacaa

SEQ ID NO: 394435 - RNA, 22 nt, Human
ugcugggcuugaaagcugcuaa

SEQ ID NO: 394436 - RNA, 22 nt, Human
cuaaaauuaucaagauaauucc

SEQ ID NO: 394437 - RNA, 22 nt, Human
cagugcaguugguggcaggggu

SEQ ID NO: 394438 - RNA, 22 nt, Human
ugaagaagccaauugguaggcu

SEQ ID NO: 394439 - RNA, 22 nt, Human
gccuuggccuuccuaggccuga

SEQ ID NO: 394440 - RNA, 22 nt, Human
gugcauuggugcgccacuucac

SEQ ID NO: 394441 - RNA, 22 nt, Human
agucucuuuguggacucugccu

SEQ ID NO: 394442 - RNA, 22 nt, Human
aauucugugcaggcagagcuau

SEQ ID NO: 394443 - RNA, 20 nt, Human
cucugcuuuaggagagucag

SEQ ID NO: 394444 - RNA, 22 nt, Human
uuccuugguagagagaauauuu

SEQ ID NO: 394445 - RNA, 20 nt, Human
ugaugguucuuuccggguug

SEQ ID NO: 394446 - RNA, 22 nt, Human
ggcucagacucccaggcccucu

SEQ ID NO: 394447 - RNA, 21 nt, Human
agagaagggacucuuccaguc

SEQ ID NO: 394448 - RNA, 22 nt, Human
uuugaaaucuaaucaaggaaca

SEQ ID NO: 394449 - RNA, 22 nt, Human
cucauggauauaagaacuguuu

SEQ ID NO: 394450 - RNA, 22 nt, Human
cuuguggcccauggcuuccugc

SEQ ID NO: 394451 - RNA, 22 nt, Human
ccugcaggcugcaggccaguuc

SEQ ID NO: 394452 - RNA, 22 nt, Human
uaggcaacaugucgaauacugu

SEQ ID NO: 394453 - RNA, 22 nt, Human
caguguuugcuuaaguuauaug

SEQ ID NO: 394454 - RNA, 22 nt, Human
aguguuuagcaugaaguucauu

SEQ ID NO: 394455 - RNA, 22 nt, Human
aggcugagcggggucccagagc

SEQ ID NO: 394456 - RNA, 22 nt, Human
uccuggccugucuggaguagcu

SEQ ID NO: 394457 - RNA, 22 nt, Human
augguauugcaacaacugucau

SEQ ID NO: 394458 - RNA, 20 nt, Human
cccuggagagaagcuccacg

SEQ ID NO: 394459 - RNA, 22 nt, Human
ugacuucaaaggcucuacuccu

SEQ ID NO: 394460 - RNA, 22 nt, Human
auaugcacauacauacauaggu

SEQ ID NO: 394461 - RNA, 22 nt, Human
caaaugcaugagaaauaagagg

SEQ ID NO: 394462 - RNA, 22 nt, Human
agcagcugcagggagggucugc

SEQ ID NO: 394463 - RNA, 22 nt, Human
ugaggcaggaaguuauauaaug

SEQ ID NO: 394464 - RNA, 22 nt, Human
ugaacagaucaauagaacugac

SEQ ID NO: 394465 - RNA, 17 nt, Human
aguggcaggcagauggg

SEQ ID NO: 394466 - RNA, 22 nt, Human
aguuugaaaguauugacagaag

SEQ ID NO: 394467 - RNA, 22 nt, Human
auucuucauuguugauucaugu

SEQ ID NO: 394468 - RNA, 21 nt, Human
cauuucuauugaugagaaaag

SEQ ID NO: 394469 - RNA, 22 nt, Human
acuguucaaguuuuaugcugga

SEQ ID NO: 394470 - RNA, 22 nt, Human
gcacacaguauaugcucauuaa

SEQ ID NO: 394471 - RNA, 22 nt, Human
ugcuuucaaaggcuuucuagau

SEQ ID NO: 394472 - RNA, 22 nt, Human
ugccugggguuggcaaacugcu

SEQ ID NO: 394473 - RNA, 22 nt, Human
gaaauauuucucuugagccccu

SEQ ID NO: 394474 - RNA, 22 nt, Human
uucaagguaugguagcugguca

SEQ ID NO: 394475 - RNA, 22 nt, Human
gucugucucucuccagagugca

SEQ ID NO: 394476 - RNA, 19 nt, Human
ccugggagucagcugaagg

SEQ ID NO: 394477 - RNA, 22 nt, Human
agggcagcagcggcccaggccu

SEQ ID NO: 394478 - RNA, 22 nt, Human
agggcucugagugggaaagagg

SEQ ID NO: 394479 - RNA, 22 nt, Human
gcagugggcaacaagagcugga

SEQ ID NO: 394480 - RNA, 22 nt, Human
ugaaucauggauaaauagcuua

SEQ ID NO: 394481 - RNA, 22 nt, Human
ccuccaggauaagucagggccu

SEQ ID NO: 394482 - RNA, 19 nt, Human
ugcaagcuuuuucuuguua

SEQ ID NO: 394483 - RNA, 22 nt, Human
uaggccauucuuggagcuuacu

SEQ ID NO: 394484 - RNA, 22 nt, Human
guguaaggccccagguucuuua

SEQ ID NO: 394485 - RNA, 22 nt, Human
ccugccucaucaacuugucgug

SEQ ID NO: 394486 - RNA, 22 nt, Human
uuuccuaguucuaagaaaugua

SEQ ID NO: 394487 - RNA, 22 nt, Human
ggagccagggaagcugcuuccu

SEQ ID NO: 394488 - RNA, 21 nt, Human
ccccugggagcccugucagua

SEQ ID NO: 394489 - RNA, 22 nt, Human
ucuuugcaacucccauuuccau

SEQ ID NO: 394490 - RNA, 22 nt, Human
uccaugagagguaacuuuacaa

SEQ ID NO: 394491 - RNA, 17 nt, Human
ucuguccagggagugug

SEQ ID NO: 394492 - RNA, 22 nt, Human
cagagcagggguuucccagguu

SEQ ID NO: 394493 - RNA, 23 nt, Human
uccugagaugagacagugcugcc

SEQ ID NO: 394494 - RNA, 22 nt, Human
cagaaguaagauuacugugaga

SEQ ID NO: 394495 - RNA, 22 nt, Human
uuugcauuuccagaguagcaga

SEQ ID NO: 394496 - RNA, 22 nt, Human
cuggcuccauccuugagcucug

SEQ ID NO: 394497 - RNA, 22 nt, Human
ggaggccaucuggcuggaggcu

SEQ ID NO: 394498 - RNA, 19 nt, Human
gaucuuugccaauuuaagc

SEQ ID NO: 394499 - RNA, 22 nt, Human
caggcagagcaacugguccaga

SEQ ID NO: 394500 - RNA, 22 nt, Human
cagcagaggaaagcaaaucuaa

SEQ ID NO: 394501 - RNA, 22 nt, Human
ugcucucucaggccuggcccac

SEQ ID NO: 394502 - RNA, 21 nt, Human
caguguggugaccagggucuc

SEQ ID NO: 394503 - RNA, 22 nt, Human
aggcugcuuucauggccgcccc

SEQ ID NO: 394504 - RNA, 22 nt, Human
ucauuuguggaagugauugugg

SEQ ID NO: 394505 - RNA, 22 nt, Human
aacuagaacgucuaguugcugg

SEQ ID NO: 394506 - RNA, 19 nt, Human
aggcagcacccaguccuug

SEQ ID NO: 394507 - RNA, 22 nt, Human
uggaggaugccuggggaggccu

SEQ ID NO: 394508 - RNA, 22 nt, Human
augaggcagguggaggcugcca

SEQ ID NO: 394509 - RNA, 22 nt, Human
caggcugaucagggcugggaug

SEQ ID NO: 394510 - RNA, 22 nt, Human
caggggcugugggcggagccuc

SEQ ID NO: 394511 - RNA, 22 nt, Human
gcaugguggccuuaggguagcc

SEQ ID NO: 394512 - RNA, 22 nt, Human
ggaagccagaaagugagaauau

SEQ ID NO: 394513 - RNA, 22 nt, Human
acugaaggaaagccuuugcaug

SEQ ID NO: 394514 - RNA, 22 nt, Human
uaaggucauggugaauaauaag

SEQ ID NO: 394515 - RNA, 23 nt, Human
accaugaugggagugcaaauaag

SEQ ID NO: 394516 - RNA, 18 nt, Human
cagaggagagacauucag

SEQ ID NO: 394517 - RNA, 22 nt, Human
cugccaaggcuggggaggacaa

SEQ ID NO: 394518 - RNA, 22 nt, Human
guuuuuaucuaauagcaguuau

SEQ ID NO: 394519 - RNA, 22 nt, Human
uccuggaguauuucuguggugu

SEQ ID NO: 394520 - RNA, 22 nt, Human
caacagaaggaagcagggucag

SEQ ID NO: 394521 - RNA, 17 nt, Human
uccaggcagcaacugag

SEQ ID NO: 394522 - RNA, 22 nt, Human
uggccuggcugcccugucugga

SEQ ID NO: 394523 - RNA, 22 nt, Human
ggcucaggaccugggauugcca

SEQ ID NO: 394524 - RNA, 22 nt, Human
cacaagaaauaagcugccuuuc

SEQ ID NO: 394525 - RNA, 22 nt, Human
uuacaaaguucugaguucaaac

SEQ ID NO: 394526 - RNA, 22 nt, Human
uaucuguucaauggaagaugac

SEQ ID NO: 394527 - RNA, 22 nt, Human
aacuagaaccacuuguauuucc

SEQ ID NO: 394528 - RNA, 22 nt, Human
ucccaggaucugagggcagaga

SEQ ID NO: 394529 - RNA, 22 nt, Human
agaaaagggcaggagggauaca

SEQ ID NO: 394530 - RNA, 22 nt, Human
cagcagcaacaacggaagccuu

SEQ ID NO: 394531 - RNA, 22 nt, Human
ggcuucucucuucacauggcuu

SEQ ID NO: 394532 - RNA, 22 nt, Human
uuucuagugguuaagauuuaca

SEQ ID NO: 394533 - RNA, 22 nt, Human
ugcugaggucaccuugcugcua

SEQ ID NO: 394534 - RNA, 22 nt, Human
caggaacagcaccaggagcuag

SEQ ID NO: 394535 - RNA, 22 nt, Human
ggagaagcagcuucuugaugaa

SEQ ID NO: 394536 - RNA, 22 nt, Human
ggaagaggcugagccagguccc

SEQ ID NO: 394537 - RNA, 22 nt, Human
uaaggccaggcuguggucggca

SEQ ID NO: 394538 - RNA, 22 nt, Human
agggcugcaccggggcuucgcg

SEQ ID NO: 394539 - RNA, 22 nt, Human
aggcacuguggaagacaugguu

SEQ ID NO: 394540 - RNA, 22 nt, Human
ucacuguaucauguugcacuua

SEQ ID NO: 394541 - RNA, 22 nt, Human
gccaaaucuggauuuagcaaga

SEQ ID NO: 394542 - RNA, 22 nt, Human
uacaguaaccuuauuugucauu

SEQ ID NO: 394543 - RNA, 22 nt, Human
cuguacucaagguaaaccagga

SEQ ID NO: 394544 - RNA, 22 nt, Human
augucuuuuaugauuacgggau

SEQ ID NO: 394545 - RNA, 22 nt, Human
ucacauuuuuuacuggacuuaa

SEQ ID NO: 394546 - RNA, 19 nt, Human
uucccaggaaaggggugca

SEQ ID NO: 394547 - RNA, 21 nt, Human
aacugguucaauucaacuaga

SEQ ID NO: 394548 - RNA, 21 nt, Human
guauugcagaguuaugugcuc

SEQ ID NO: 394549 - RNA, 22 nt, Human
aauaucagcacuuuugugguau

SEQ ID NO: 394550 - RNA, 22 nt, Human
acacaaacugcuagaaaauugg

SEQ ID NO: 394551 - RNA, 22 nt, Human
aucauuccacauguaccacuag

SEQ ID NO: 394552 - RNA, 22 nt, Human
aucaguuuaaaugggcuguugg

SEQ ID NO: 394553 - RNA, 22 nt, Human
uagucaaaccucagaauacccc

SEQ ID NO: 394554 - RNA, 22 nt, Human
cuuuggcacagucucauuugau

SEQ ID NO: 394555 - RNA, 22 nt, Human
cugggcagugguggcaucuuug

SEQ ID NO: 394556 - RNA, 22 nt, Human
gcugucugucuucacaucucgc

SEQ ID NO: 394557 - RNA, 22 nt, Human
ucacauucucagcaucuauaca

SEQ ID NO: 394558 - RNA, 22 nt, Human
caggaacaauguaagucucauu

SEQ ID NO: 394559 - RNA, 22 nt, Human
cccuuucccuucuggcucaggg

SEQ ID NO: 394560 - RNA, 22 nt, Human
cagggcucagggacugcagaaa

SEQ ID NO: 394561 - RNA, 22 nt, Human
auggcuuuuuagacuuugguac

SEQ ID NO: 394562 - RNA, 22 nt, Human
uaaggccaaggggccauagucu

SEQ ID NO: 394563 - RNA, 20 nt, Human
gugccuggagaagaggcugu

SEQ ID NO: 394564 - RNA, 22 nt, Human
cugugucggacgugggcagcag

SEQ ID NO: 394565 - RNA, 22 nt, Human
cuuaaauuggaugaguuaaguu

SEQ ID NO: 394566 - RNA, 22 nt, Human
cacauguacagaagcaggcugg

SEQ ID NO: 394567 - RNA, 22 nt, Human
uucauucugggcucuaaggaac

SEQ ID NO: 394568 - RNA, 22 nt, Human
gaaugugucacccugucccaug

SEQ ID NO: 394569 - RNA, 22 nt, Human
cagguggagcugacugagggca

SEQ ID NO: 394570 - RNA, 22 nt, Human
ugaggcagguaagcaaguuuug

SEQ ID NO: 394571 - RNA, 22 nt, Human
gcaccaggcuuagagccccagg

SEQ ID NO: 394572 - RNA, 22 nt, Human
gcauucuuuuuaggagguuccu

SEQ ID NO: 394573 - RNA, 22 nt, Human
ugcugcacgauaaauaauuucu

SEQ ID NO: 394574 - RNA, 22 nt, Human
uggcagcauuuuuuccagaaca

SEQ ID NO: 394575 - RNA, 22 nt, Human
uggccucugcaauggauucacc

SEQ ID NO: 394576 - RNA, 22 nt, Human
agaaucugguagaaccaaggau

SEQ ID NO: 394577 - RNA, 22 nt, Human
aagcagugcgcucaucuaaggg

SEQ ID NO: 394578 - RNA, 22 nt, Human
aauucuauaggcaagcuauuuu

SEQ ID NO: 394579 - RNA, 22 nt, Human
cuccuuccugguuagcaccuua

SEQ ID NO: 394580 - RNA, 18 nt, Human
caaagcucacguuccauc

SEQ ID NO: 394581 - RNA, 22 nt, Human
ccaggccuagccccugagggua

SEQ ID NO: 394582 - RNA, 22 nt, Human
acagaaauugggcaaauggaag

SEQ ID NO: 394583 - RNA, 22 nt, Human
ccugcugggccugagcaaugag

SEQ ID NO: 394584 - RNA, 22 nt, Human
cugugggcugaaagugcucccg

SEQ ID NO: 394585 - RNA, 22 nt, Human
cuggugcaggaaggagcuggca

SEQ ID NO: 394586 - RNA, 22 nt, Human
gacccaggcucgugggacggcu

SEQ ID NO: 394587 - RNA, 22 nt, Human
cagagcaguaaaucuggggcac

SEQ ID NO: 394588 - RNA, 22 nt, Human
ggcugcucugccuuccagcugg

SEQ ID NO: 394589 - RNA, 22 nt, Human
uccaggcauuggagagauaaug

SEQ ID NO: 394590 - RNA, 22 nt, Human
aucccugcccucauggagcuua

SEQ ID NO: 394591 - RNA, 18 nt, Human
auccuugaugagaggucu

SEQ ID NO: 394592 - RNA, 22 nt, Human
agaguguuuuucugucaaggac

SEQ ID NO: 394593 - RNA, 22 nt, Human
ggcuggcuugccaagcucaggg

SEQ ID NO: 394594 - RNA, 22 nt, Human
accugccucagugcagcuggau

SEQ ID NO: 394595 - RNA, 22 nt, Human
cagggugcagugucgcugcuag

SEQ ID NO: 394596 - RNA, 22 nt, Human
uguggaaaauuggaacguuccu

SEQ ID NO: 394597 - RNA, 22 nt, Human
ucucagggcgcagugaggcagu

SEQ ID NO: 394598 - RNA, 22 nt, Human
caggcagaguuagagcaacugg

SEQ ID NO: 394599 - RNA, 22 nt, Human
uggccuggccacauccagcagg

SEQ ID NO: 394600 - RNA, 22 nt, Human
ucugcaggcucuagaugagguu

SEQ ID NO: 394601 - RNA, 22 nt, Human
auuuuuccaauuaggauaaaga

SEQ ID NO: 394602 - RNA, 22 nt, Human
uuuauugcauacacaaauguca

SEQ ID NO: 394603 - RNA, 22 nt, Human
agaagcugccuacaugaccagc

SEQ ID NO: 394604 - RNA, 19 nt, Human
cccaggagucuggcugguu

SEQ ID NO: 394605 - RNA, 22 nt, Human
aagccaggaagagagccuucac

SEQ ID NO: 394606 - RNA, 22 nt, Human
ggcaggagaauggcgugaacuc

SEQ ID NO: 394607 - RNA, 22 nt, Human
agcagggccaacaguaaacacc

SEQ ID NO: 394608 - RNA, 20 nt, Human
uguggcaggaugagggcgga

SEQ ID NO: 394609 - RNA, 22 nt, Human
cagguggguguaugaaugcaaa

SEQ ID NO: 394610 - RNA, 22 nt, Human
cacucugcagcugaagggcugg

SEQ ID NO: 394611 - RNA, 22 nt, Human
gcagggcuguggacacuuuggu

SEQ ID NO: 394612 - RNA, 22 nt, Human
uucaagaucgaguuuaaaguga

SEQ ID NO: 394613 - RNA, 22 nt, Human
gauuucaccugaucuugucauc

SEQ ID NO: 394614 - RNA, 22 nt, Human
agggccugacacccuugccagc

SEQ ID NO: 394615 - RNA, 22 nt, Human
aacauuucagcaaauaagaaca

SEQ ID NO: 394616 - RNA, 22 nt, Human
auauuagggucucuaaauucua

SEQ ID NO: 394617 - RNA, 17 nt, Human
ugagaaguaggcaucau

SEQ ID NO: 394618 - RNA, 22 nt, Human
uaaaauguagcuucuaggcugg

SEQ ID NO: 394619 - RNA, 22 nt, Human
guggcagcaaaauccugcauuc

SEQ ID NO: 394620 - RNA, 22 nt, Human
auuccaaacuuaccccagagga

SEQ ID NO: 394621 - RNA, 22 nt, Human
gagcuuuaccuuagguucuguu

SEQ ID NO: 394622 - RNA, 22 nt, Human
gauggggaugagaagugagcag

SEQ ID NO: 394623 - RNA, 22 nt, Human
agcaguggaccucagugcuauu

SEQ ID NO: 394624 - RNA, 22 nt, Human
cugccucaugcugccugcagcc

SEQ ID NO: 394625 - RNA, 22 nt, Human
gggagagaugcugauugccaau

SEQ ID NO: 394626 - RNA, 22 nt, Human
uagaaacugauagucuugugcu

SEQ ID NO: 394627 - RNA, 22 nt, Human
cagcuucuucaguccuggagcu

SEQ ID NO: 394628 - RNA, 22 nt, Human
uaguuuuuucaacaaauggugc

SEQ ID NO: 394629 - RNA, 22 nt, Human
cagguggggagaguguggagca

SEQ ID NO: 394630 - RNA, 22 nt, Human
caagagcuggagaggcagucua

SEQ ID NO: 394631 - RNA, 23 nt, Human
cccagcgcugagcccugcaggca

SEQ ID NO: 394632 - RNA, 22 nt, Human
uaugcauaauuggauaaguaga

SEQ ID NO: 394633 - RNA, 22 nt, Human
uccuuuuugguccaaggugacc

SEQ ID NO: 394634 - RNA, 22 nt, Human
ugaaggcccuaucuccauauac

SEQ ID NO: 394635 - RNA, 17 nt, Human
uuugaaaggaugucagu

SEQ ID NO: 394636 - RNA, 22 nt, Human
acagagcaguucuggagcuggc

SEQ ID NO: 394637 - RNA, 22 nt, Human
ccaaggagcaaggcucaacaag

SEQ ID NO: 394638 - RNA, 22 nt, Human
cagcuauuuucucauuaaggau

SEQ ID NO: 394639 - RNA, 22 nt, Human
uuacagaaaggaaggacugacu

SEQ ID NO: 394640 - RNA, 22 nt, Human
agugugagcccuggaguggugc

SEQ ID NO: 394641 - RNA, 20 nt, Human
agcagcuguguuuucauccu

SEQ ID NO: 394642 - RNA, 22 nt, Human
uucagaaaggauaauuggaagg

SEQ ID NO: 394643 - RNA, 22 nt, Human
gaaguucaaaagacagauuuga

SEQ ID NO: 394644 - RNA, 22 nt, Human
guucuaauauuuuaaaagccaa

SEQ ID NO: 394645 - RNA, 22 nt, Human
agcacauaccagaaccacaggu

SEQ ID NO: 394646 - RNA, 23 nt, Human
aaucuauacuuaggcugguaaua

SEQ ID NO: 394647 - RNA, 22 nt, Human
cauuuacauuuaagguuaauau

SEQ ID NO: 394648 - RNA, 23 nt, Human
guaaaauacgcagugcaguguga

SEQ ID NO: 394649 - RNA, 22 nt, Human
uauaaaauucucaguuuggggu

SEQ ID NO: 394650 - RNA, 22 nt, Human
uauuccaaaauaguuaagcacu

SEQ ID NO: 394651 - RNA, 22 nt, Human
uguccuuagaagaagugaaaga

SEQ ID NO: 394652 - RNA, 22 nt, Human
uuuacagauguggaaagugagc

SEQ ID NO: 394653 - RNA, 22 nt, Human
uuuucuuaggugcuccaaguag

SEQ ID NO: 394654 - RNA, 22 nt, Human
aagaaugauuacaaagcaacga

SEQ ID NO: 394655 - RNA, 22 nt, Human
uauuuaucgagugucuacuaug

SEQ ID NO: 394656 - RNA, 22 nt, Human
aucugacuucacgcccaugcca

SEQ ID NO: 394657 - RNA, 22 nt, Human
uuuccaaaggaguaccacgcau

SEQ ID NO: 394658 - RNA, 22 nt, Human
ucuuuaauucagcaugaugcgg

SEQ ID NO: 394659 - RNA, 22 nt, Human
auuuagccucauuuuugacaua

SEQ ID NO: 394660 - RNA, 22 nt, Human
caguccuugcucugggaugaug

SEQ ID NO: 394661 - RNA, 22 nt, Human
uguguaaaaucugauuaauacu

SEQ ID NO: 394662 - RNA, 22 nt, Human
acauucacgcucucaaagcuga

SEQ ID NO: 394663 - RNA, 22 nt, Human
uuuacagagaauguacauaaag

SEQ ID NO: 394664 - RNA, 22 nt, Human
uaaagccaauauaccuagcaua

SEQ ID NO: 394665 - RNA, 22 nt, Human
uagucaccucuuuaaauguccu

SEQ ID NO: 394666 - RNA, 22 nt, Human
cuggcuuuggucaugugaucau

SEQ ID NO: 394667 - RNA, 22 nt, Human
aggauuuauuccagaaaugcaa

SEQ ID NO: 394668 - RNA, 22 nt, Human
auuuaguguauucuaauaugug

SEQ ID NO: 394669 - RNA, 22 nt, Human
ugugugaaucuauugaauauau

SEQ ID NO: 394670 - RNA, 22 nt, Human
uuuaacuuaaucugcuugauga

SEQ ID NO: 394671 - RNA, 21 nt, Human
cucagagaaaugucugggagc

SEQ ID NO: 394672 - RNA, 22 nt, Human
uuucaguuagcugagacccagg

SEQ ID NO: 394673 - RNA, 22 nt, Human
auauuuaaacaggguaccaaua

SEQ ID NO: 394674 - RNA, 22 nt, Human
cucuuaaugaccuuaauucaag

SEQ ID NO: 394675 - RNA, 22 nt, Human
cauggcuuuuuagcauauucaa

SEQ ID NO: 394676 - RNA, 22 nt, Human
gcuuaauucuggcucaguuucc

SEQ ID NO: 394677 - RNA, 22 nt, Human
aauuuauauguaauuaggcaca

SEQ ID NO: 394678 - RNA, 22 nt, Human
aauuuacacuucauuuggaggg

SEQ ID NO: 394679 - RNA, 22 nt, Human
gagacaggauuuaaccaaagcu

SEQ ID NO: 394680 - RNA, 22 nt, Human
auucucaaaacauaacuucacu

SEQ ID NO: 394681 - RNA, 22 nt, Human
uuacagaaaggaaggacugacu

SEQ ID NO: 394682 - RNA, 20 nt, Human
uguaacaaucuggauguugc

SEQ ID NO: 394683 - RNA, 22 nt, Human
auggauuuggaugagauuacuu

SEQ ID NO: 394684 - RNA, 22 nt, Human
uauauuaaaugaccaguuuuaa

SEQ ID NO: 394685 - RNA, 22 nt, Human
caguccuuucaauggugaccuu

SEQ ID NO: 394686 - RNA, 22 nt, Human
cauggucuacaauuucauuuua

SEQ ID NO: 394687 - RNA, 22 nt, Human
gaguccuuuguuccuugccaca

SEQ ID NO: 394688 - RNA, 22 nt, Human
acacagauuuuacauguuaugc

SEQ ID NO: 394689 - RNA, 22 nt, Human
aacaugcuuugauaaauaaaag

SEQ ID NO: 394690 - RNA, 22 nt, Human
caauuucaugccauguauugcu

SEQ ID NO: 394691 - RNA, 22 nt, Human
gcuuuaaugaagucacgcaaag

SEQ ID NO: 394692 - RNA, 22 nt, Human
aggcuucugcugauauuucauu

SEQ ID NO: 394693 - RNA, 22 nt, Human
auacaugugggucuaaacauau

SEQ ID NO: 394694 - RNA, 22 nt, Human
aucuaaaguguuucaugaaaga

SEQ ID NO: 394695 - RNA, 22 nt, Human
aaaaucugcuuccuuuuacaga

SEQ ID NO: 394696 - RNA, 22 nt, Human
caguucacacugugcuaucugc

SEQ ID NO: 394697 - RNA, 19 nt, Human
aggauuuauuaugugcuca

SEQ ID NO: 394698 - RNA, 22 nt, Human
cuuucaacuacauacaggcgau

SEQ ID NO: 394699 - RNA, 22 nt, Human
caauuucauggauaaaagaugu

SEQ ID NO: 394700 - RNA, 22 nt, Human
uggauuuauuagguuggugaaa

SEQ ID NO: 394701 - RNA, 22 nt, Human
agucaccauuuucaccugccuc

SEQ ID NO: 394702 - RNA, 22 nt, Human
ucagaaaauaacuguuaguuug

SEQ ID NO: 394703 - RNA, 22 nt, Human
uaaacauggcuguuucaguuau

SEQ ID NO: 394704 - RNA, 22 nt, Human
guacagaaggauuucuaguagu

SEQ ID NO: 394705 - RNA, 22 nt, Human
auggcuuucucuaaugugguau

SEQ ID NO: 394706 - RNA, 22 nt, Human
uagaaacagaaaacuguaauag

SEQ ID NO: 394707 - RNA, 22 nt, Human
uuagaaauauggugcugccgcc

SEQ ID NO: 394708 - RNA, 22 nt, Human
uauguuaagugggauaaucaaa

SEQ ID NO: 394709 - RNA, 22 nt, Human
uacuaaacaucuggcauuaaau

SEQ ID NO: 394710 - RNA, 22 nt, Human
augaaaauugacagcggaagua

SEQ ID NO: 394711 - RNA, 22 nt, Human
ugcuuaauguacgugaguguac

SEQ ID NO: 394712 - RNA, 22 nt, Human
uucagaaacaucaguggaugga

SEQ ID NO: 394713 - RNA, 22 nt, Human
uugauccaguugaaagugauga

SEQ ID NO: 394714 - RNA, 22 nt, Human
acuuugaaagccuuggccccgg

SEQ ID NO: 394715 - RNA, 22 nt, Human
uguccuuaucuccaaacaauca

SEQ ID NO: 394716 - RNA, 22 nt, Human
acagaauuugcuugggcaaugg

SEQ ID NO: 394717 - RNA, 22 nt, Human
aguauuuagcauagugguuagu

SEQ ID NO: 394718 - RNA, 22 nt, Human
ugagacaaaauugacagacaaa

SEQ ID NO: 394719 - RNA, 21 nt, Human
ucuauucauuacaguuauuug

SEQ ID NO: 394720 - RNA, 22 nt, Human
aaaguccuugcaguuuccucuu

SEQ ID NO: 394721 - RNA, 22 nt, Human
ccuucaaucagcagucuagcuu

SEQ ID NO: 394722 - RNA, 22 nt, Human
cuuuaacaaaugacucuugucu

SEQ ID NO: 394723 - RNA, 22 nt, Human
aauaauuagugggacagagaac

SEQ ID NO: 394724 - RNA, 22 nt, Human
agauauaauaauuuacaagugu

SEQ ID NO: 394725 - RNA, 22 nt, Human
agcauuuaagcuucugcaaagc

SEQ ID NO: 394726 - RNA, 22 nt, Human
ucaguuucuaaaucuuaccaau

SEQ ID NO: 394727 - RNA, 22 nt, Human
auauaggcuaacaacuauugag

SEQ ID NO: 394728 - RNA, 22 nt, Human
uaaagacacugguuuuaaucau

SEQ ID NO: 394729 - RNA, 22 nt, Human
aagcccagcugaaagcauuuuu

SEQ ID NO: 394730 - RNA, 22 nt, Human
uggcuuuaggagcuauauaccu

SEQ ID NO: 394731 - RNA, 22 nt, Human
cagaauuuagcacaauguaugg

SEQ ID NO: 394732 - RNA, 22 nt, Human
gcauggcugguguccugaggga

SEQ ID NO: 394733 - RNA, 22 nt, Human
aacuggauuaacuggcucaaau

SEQ ID NO: 394734 - RNA, 22 nt, Human
caaguccaucagauaagcaaga

SEQ ID NO: 394735 - RNA, 22 nt, Human
auaaagucauuaugaagaucua

SEQ ID NO: 394736 - RNA, 22 nt, Human
aaguccuucuuuauaugagagu

SEQ ID NO: 394737 - RNA, 21 nt, Human
auacagaaggcagacucucuc

SEQ ID NO: 394738 - RNA, 22 nt, Human
aagucacccacaggcagcagaa

SEQ ID NO: 394739 - RNA, 22 nt, Human
gaauuucaacaguccucaaaug

SEQ ID NO: 394740 - RNA, 22 nt, Human
uucugaaaauugggucauacuu

SEQ ID NO: 394741 - RNA, 21 nt, Human
gauaaaaugggccuugguccu

SEQ ID NO: 394742 - RNA, 22 nt, Human
aaagucaucuaggagcagauuu

SEQ ID NO: 394743 - RNA, 22 nt, Human
ugaauaauccacagucauucau

SEQ ID NO: 394744 - RNA, 22 nt, Human
acaaaaagggagaugagguaga

SEQ ID NO: 394745 - RNA, 22 nt, Human
aggauuuagcaugaaaugugaa

SEQ ID NO: 394746 - RNA, 20 nt, Human
uacuggauuagggcucaccc

SEQ ID NO: 394747 - RNA, 22 nt, Human
auggcauuccaagucuucuuuu

SEQ ID NO: 394748 - RNA, 22 nt, Human
ucaaguuuaauugagauguuua

SEQ ID NO: 394749 - RNA, 22 nt, Human
cuauuacauuucuggacauuca

SEQ ID NO: 394750 - RNA, 22 nt, Human
ucagccaguugccccaguuagu

SEQ ID NO: 394751 - RNA, 22 nt, Human
uauauacuuucuuccuggguag

SEQ ID NO: 394752 - RNA, 22 nt, Human
aaagccauuacaaaauuucaua

SEQ ID NO: 394753 - RNA, 22 nt, Human
uuuaggcaaacucauugucaga

SEQ ID NO: 394754 - RNA, 22 nt, Human
agucaccaggguuugcuggguu

SEQ ID NO: 394755 - RNA, 22 nt, Human
cugaauaauacagacuagcuuc

SEQ ID NO: 394756 - RNA, 22 nt, Human
cuucuuaaaguugucacagcug

SEQ ID NO: 394757 - RNA, 22 nt, Human
aaguuucaugauguaauuauug

SEQ ID NO: 394758 - RNA, 22 nt, Human
uuuaggcagcuacauacuaacu

SEQ ID NO: 394759 - RNA, 22 nt, Human
auaaagcaucuagucugucacu

SEQ ID NO: 394760 - RNA, 20 nt, Human
agaagucagcucagaaguga

SEQ ID NO: 394761 - RNA, 22 nt, Human
gauuucaaggaguuuucacagu

SEQ ID NO: 394762 - RNA, 22 nt, Human
gaugggauuuuuuauguguuca

SEQ ID NO: 394763 - RNA, 22 nt, Human
acuauacagaagaggauaggaa

SEQ ID NO: 394764 - RNA, 22 nt, Human
auaaacucaugccaagaaauga

SEQ ID NO: 394765 - RNA, 22 nt, Human
ugugaaagagucuuauaguuuc

SEQ ID NO: 394766 - RNA, 22 nt, Human
gcaacuuuagggccagcaagua

SEQ ID NO: 394767 - RNA, 22 nt, Human
uagaacuacaagcauuaaaagu

SEQ ID NO: 394768 - RNA, 22 nt, Human
uucaacccaaguucuccauuuu

SEQ ID NO: 394769 - RNA, 22 nt, Human
uuaaagaauagugccccuauug

SEQ ID NO: 394770 - RNA, 22 nt, Human
uagcaucuggagaaacaagucc

SEQ ID NO: 394771 - RNA, 22 nt, Human
uaauuuaugaugcaaagaaaag

SEQ ID NO: 394772 - RNA, 22 nt, Human
aucagaaauugcccagcuguuu

SEQ ID NO: 394773 - RNA, 22 nt, Human
cagaaauaaacuucucacaucg

SEQ ID NO: 394774 - RNA, 22 nt, Human
ucagaauucuacaauagaucag

SEQ ID NO: 394775 - RNA, 22 nt, Human
ccaaacaaauccccauucuuag

SEQ ID NO: 394776 - RNA, 22 nt, Human
gaaaauagcagauagaccaaug

SEQ ID NO: 394777 - RNA, 22 nt, Human
guuauaaaaugcacaguuguuu

SEQ ID NO: 394778 - RNA, 22 nt, Human
cagauauuaggagcucaauaau

SEQ ID NO: 394779 - RNA, 21 nt, Human
ucauucacaggguauuguaua

SEQ ID NO: 394780 - RNA, 20 nt, Human
caucagaaauccugacccac

SEQ ID NO: 394781 - RNA, 22 nt, Human
uucauuugccaucaguguaaug

SEQ ID NO: 394782 - RNA, 22 nt, Human
augugaaagagguguucagugg

SEQ ID NO: 394783 - RNA, 22 nt, Human
cugugcagcuggcuuccuggaa

SEQ ID NO: 394784 - RNA, 22 nt, Human
ugaaacuaggccaaucaaauua

SEQ ID NO: 394785 - RNA, 22 nt, Human
aaugaaacuguauauagacugu

SEQ ID NO: 394786 - RNA, 22 nt, Human
aggauuuauuauaugcccucau

SEQ ID NO: 394787 - RNA, 22 nt, Human
caagauuugccaguggccaacu

SEQ ID NO: 394788 - RNA, 22 nt, Human
augaauaaaacauuuuaaucag

SEQ ID NO: 394789 - RNA, 22 nt, Human
guacagaaaugugaugacgcaa

SEQ ID NO: 394790 - RNA, 22 nt, Human
aauuucaaugcacucaugguug

SEQ ID NO: 394791 - RNA, 22 nt, Human
acuggaugaggggaaagagaca

SEQ ID NO: 394792 - RNA, 22 nt, Human
gugcauuugacgaauacucacu

SEQ ID NO: 394793 - RNA, 21 nt, Human
uguccuuaaugcaauguccuu

SEQ ID NO: 394794 - RNA, 22 nt, Human
auuucaacauucucaguuguag

SEQ ID NO: 394795 - RNA, 22 nt, Human
caaaauuguugaugcugcuuug

SEQ ID NO: 394796 - RNA, 22 nt, Human
aacauguaaauaucauuguacu

SEQ ID NO: 394797 - RNA, 22 nt, Human
auguuucaccagcaaauuaccu

SEQ ID NO: 394798 - RNA, 22 nt, Human
auucaacggguagaagggucuu

SEQ ID NO: 394799 - RNA, 22 nt, Human
aauaaaauggucaguuuucuca

SEQ ID NO: 394800 - RNA, 22 nt, Human
aaaugcuuauuagugucacaaa

SEQ ID NO: 394801 - RNA, 22 nt, Human
ucaauacuuaagcuuaauucua

SEQ ID NO: 394802 - RNA, 22 nt, Human
caugcuuaugauuugcuaagcc

SEQ ID NO: 394803 - RNA, 22 nt, Human
aaguccuuggagaauagaaagg

SEQ ID NO: 394804 - RNA, 22 nt, Human
ucauauaaguuuaaaacuaucu

SEQ ID NO: 394805 - RNA, 22 nt, Human
uguccuuaaggagcuuaauguc

SEQ ID NO: 394806 - RNA, 22 nt, Human
aaaugucagaagcuuuacuucu

SEQ ID NO: 394807 - RNA, 22 nt, Human
auacaaauuuauagaugcauuu

SEQ ID NO: 394808 - RNA, 22 nt, Human
uaugaaagaaucucagagcaca

SEQ ID NO: 394809 - RNA, 22 nt, Human
auuguuaauguugcacuaaggu

SEQ ID NO: 394810 - RNA, 22 nt, Human
cauuucaaugccuucaacauag

SEQ ID NO: 394811 - RNA, 22 nt, Human
ugcaggaauagcuacagagcug

SEQ ID NO: 394812 - RNA, 22 nt, Human
aaacaaacauagguuugaaagu

SEQ ID NO: 394813 - RNA, 22 nt, Human
uuuauuaugauggacaccuucg

SEQ ID NO: 394814 - RNA, 22 nt, Human
guagaaauuccauuuacuuuga

SEQ ID NO: 394815 - RNA, 22 nt, Human
ucauaaaaguacucauguucau

SEQ ID NO: 394816 - RNA, 22 nt, Human
acaggauuagcaaguaaucagg

SEQ ID NO: 394817 - RNA, 22 nt, Human
uguacaauggcuauaauacccu

SEQ ID NO: 394818 - RNA, 22 nt, Human
aagcauuuuguuuuaagaauga

SEQ ID NO: 394819 - RNA, 22 nt, Human
uuuagaaugugacuguauuuga

SEQ ID NO: 394820 - RNA, 22 nt, Human
caauuucaaugaggccacaggg

SEQ ID NO: 394821 - RNA, 19 nt, Human
ucucuacacuacauuucua

SEQ ID NO: 394822 - RNA, 22 nt, Human
uagaugcuguagaaauacuuau

SEQ ID NO: 394823 - RNA, 22 nt, Human
uauuacaauuuacauugcacuu

SEQ ID NO: 394824 - RNA, 22 nt, Human
uccuggauaucaaacaaacauu

SEQ ID NO: 394825 - RNA, 22 nt, Human
auucauuagccacuaacuagca

SEQ ID NO: 394826 - RNA, 22 nt, Human
aaagccaucaguaaaaugauuu

SEQ ID NO: 394827 - RNA, 22 nt, Human
gauggcuucacuuacauggcug

SEQ ID NO: 394828 - RNA, 22 nt, Human
cuuaggcauccaggguucuucc

SEQ ID NO: 394829 - RNA, 22 nt, Human
acaugcuuuaacuuauuuugau

SEQ ID NO: 394830 - RNA, 22 nt, Human
cagaauuuuucgaauguacugu

SEQ ID NO: 394831 - RNA, 22 nt, Human
uauuaaagagagaaucaucauc

SEQ ID NO: 394832 - RNA, 22 nt, Human
uaaagucagauaucuggguuga

SEQ ID NO: 394833 - RNA, 19 nt, Human
augcuuuauguuauuucuu

SEQ ID NO: 394834 - RNA, 22 nt, Human
uaaucauggccucaaauuuuau

SEQ ID NO: 394835 - RNA, 22 nt, Human
uucacagagaguaugcagagaa

SEQ ID NO: 394836 - RNA, 22 nt, Human
ccagcugucagugugaaaauaa

SEQ ID NO: 394837 - RNA, 22 nt, Human
uugaagaaauuauuuuauauag

SEQ ID NO: 394838 - RNA, 22 nt, Human
aaacagacugcacugccaguca

SEQ ID NO: 394839 - RNA, 22 nt, Human
ucacaucaacauuauagcauga

SEQ ID NO: 394840 - RNA, 22 nt, Human
acaaaauuguguuaaacuuuau

SEQ ID NO: 394841 - RNA, 22 nt, Human
uguagaaagaauauguuucaua

SEQ ID NO: 394842 - RNA, 22 nt, Human
uuauaacaacaguuuacuuuaa

SEQ ID NO: 394843 - RNA, 22 nt, Human
agaucauaugaaaaauuucaag

SEQ ID NO: 394844 - RNA, 22 nt, Human
uuaaaauuauggcccauuugga

SEQ ID NO: 394845 - RNA, 22 nt, Human
gaauuucauugcucugcugugu

SEQ ID NO: 394846 - RNA, 22 nt, Human
auuauaaauauuuucuaggggu

SEQ ID NO: 394847 - RNA, 22 nt, Human
ggcauuuacauaaucuuauuua

SEQ ID NO: 394848 - RNA, 22 nt, Human
ccagaucuaguguuguaaagcu

SEQ ID NO: 394849 - RNA, 22 nt, Human
ugugaauaaugccgcaauaaac

SEQ ID NO: 394850 - RNA, 22 nt, Human
aggcuucugugagcucauacaa

SEQ ID NO: 394851 - RNA, 22 nt, Human
aaucagaacuucucaggguggg

SEQ ID NO: 394852 - RNA, 23 nt, Human
cagaaauaaacugguuuguagau

SEQ ID NO: 394853 - RNA, 22 nt, Human
ugcuuauugcuuucaagacugu

SEQ ID NO: 394854 - RNA, 22 nt, Human
ccuggaucuuuguuguaaauau

SEQ ID NO: 394855 - RNA, 22 nt, Human
ggcauuuauuugucucauucuu

SEQ ID NO: 394856 - RNA, 22 nt, Human
uucaaacauucaaauaaaccgg

SEQ ID NO: 394857 - RNA, 22 nt, Human
uguaaauaaugcauguaaauca

SEQ ID NO: 394858 - RNA, 20 nt, Human
aucaaaggcugauucagucc

SEQ ID NO: 394859 - RNA, 22 nt, Human
aaguccuucccaagcauguacc

SEQ ID NO: 394860 - RNA, 22 nt, Human
uacagaauuagauuauuagaga

SEQ ID NO: 394861 - RNA, 22 nt, Human
auggcuuucagauuucuauguu

SEQ ID NO: 394862 - RNA, 22 nt, Human
auuaggcagacaacguagccgg

SEQ ID NO: 394863 - RNA, 22 nt, Human
auuauaaagaacaugugugugg

SEQ ID NO: 394864 - RNA, 22 nt, Human
uuacagaaaagggguuguccuu

SEQ ID NO: 394865 - RNA, 22 nt, Human
uaaagucaucuuuacaucuuug

SEQ ID NO: 394866 - RNA, 22 nt, Human
uaugaaaauuuagcugaagcau

SEQ ID NO: 394867 - RNA, 22 nt, Human
acaacuuuaauggguuucagcu

SEQ ID NO: 394868 - RNA, 22 nt, Human
uguagaaauuaguaagaucaac

SEQ ID NO: 394869 - RNA, 22 nt, Human
uuuaggcacagggaguugguuu

SEQ ID NO: 394870 - RNA, 22 nt, Human
aaucagaaauugagggucuggu

SEQ ID NO: 394871 - RNA, 19 nt, Human
ugcuuaauuccuaguaggu

SEQ ID NO: 394872 - RNA, 22 nt, Human
cugaauaauuuuauaguugcug

SEQ ID NO: 394873 - RNA, 22 nt, Human
cuagaaaucucuguuuacauca

SEQ ID NO: 394874 - RNA, 22 nt, Human
augugaaaccugugaguagagu

SEQ ID NO: 394875 - RNA, 22 nt, Human
auuaggcagugccauuguacgg

SEQ ID NO: 394876 - RNA, 22 nt, Human
uccagaauauuugggaaagaug

SEQ ID NO: 394877 - RNA, 22 nt, Human
auucuuaauugccaugcuguau

SEQ ID NO: 394878 - RNA, 22 nt, Human
gauuucaauccagcuuucuucu

SEQ ID NO: 394879 - RNA, 22 nt, Human
ucauagaaugaguuaaugaacu

SEQ ID NO: 394880 - RNA, 22 nt, Human
gugauuuagauguugaaaguga

SEQ ID NO: 394881 - RNA, 22 nt, Human
acaucugaccauuacaagacau

SEQ ID NO: 394882 - RNA, 22 nt, Human
aguccuuagaacacuguaucug

SEQ ID NO: 394883 - RNA, 22 nt, Human
acacaauacagggcucaaaaua

SEQ ID NO: 394884 - RNA, 22 nt, Human
aacaugucuggguauucacaag

SEQ ID NO: 394885 - RNA, 22 nt, Human
aaguguuaaagacuugaacacu

SEQ ID NO: 394886 - RNA, 22 nt, Human
uucaaacaguguagaauauaug

SEQ ID NO: 394887 - RNA, 22 nt, Human
uuauccaaacuggugaaucauu

SEQ ID NO: 394888 - RNA, 22 nt, Human
aucaaaaccuugacuuuuaaug

SEQ ID NO: 394889 - RNA, 22 nt, Human
guuaggcaauaccucuuacacc

SEQ ID NO: 394890 - RNA, 17 nt, Human
uaaguccuaguuauuuu

SEQ ID NO: 394891 - RNA, 22 nt, Human
ggccuuuaagcaauugaaaaga

SEQ ID NO: 394892 - RNA, 22 nt, Human
ggauucagugucuguuaauagu

SEQ ID NO: 394893 - RNA, 22 nt, Human
gucauaaagcuuguugcauuua

SEQ ID NO: 394894 - RNA, 22 nt, Human
auggcuuuucacagaggguucu

SEQ ID NO: 394895 - RNA, 22 nt, Human
gucaaacauagggacuuugugg

SEQ ID NO: 394896 - RNA, 22 nt, Human
agaauaucguagcauauuaucu

SEQ ID NO: 394897 - RNA, 22 nt, Human
gaguccuuuucucuguccacug

SEQ ID NO: 394898 - RNA, 22 nt, Human
gaauuucagagguaacaucauc

SEQ ID NO: 394899 - RNA, 23 nt, Human
uguaacaauucccagccuuugcc

SEQ ID NO: 394900 - RNA, 22 nt, Human
gauuuccauuuucaacuccugc

SEQ ID NO: 394901 - RNA, 22 nt, Human
acuuuaauuaaugaacuguggc

SEQ ID NO: 394902 - RNA, 22 nt, Human
acuauacaagauuagggauuug

SEQ ID NO: 394903 - RNA, 22 nt, Human
gaaagccagagagaaagggcuc

SEQ ID NO: 394904 - RNA, 22 nt, Human
ucaaaauucuagggagaauggu

SEQ ID NO: 394905 - RNA, 22 nt, Human
ugcagucuccaccuccugggug

SEQ ID NO: 394906 - RNA, 22 nt, Human
aaguccuuauguggaggggcua

SEQ ID NO: 394907 - RNA, 22 nt, Human
uaaaaguauacuuucaaaggag

SEQ ID NO: 394908 - RNA, 20 nt, Human
uuacagaaaugauguuauuu

SEQ ID NO: 394909 - RNA, 22 nt, Human
auuucaacagaguuugaaggca

SEQ ID NO: 394910 - RNA, 23 nt, Human
cauuucaacgaauuuuccuucug

SEQ ID NO: 394911 - RNA, 22 nt, Human
ucaauacauacaauguauagug

SEQ ID NO: 394912 - RNA, 22 nt, Human
caggccaggguugagaagagaa

SEQ ID NO: 394913 - RNA, 22 nt, Human
aaagccauugaacuguacuuua

SEQ ID NO: 394914 - RNA, 22 nt, Human
auaaaugccucagaaucauccc

SEQ ID NO: 394915 - RNA, 22 nt, Human
uuccauaauaggcuuaagugaa

SEQ ID NO: 394916 - RNA, 22 nt, Human
uaagacuucauuaguaauaugg

SEQ ID NO: 394917 - RNA, 22 nt, Human
uaaaguuuguagcaauugauau

SEQ ID NO: 394918 - RNA, 22 nt, Human
aguccuuacucgggggcccaga

SEQ ID NO: 394919 - RNA, 22 nt, Human
uuggaucacucugaagccuuac

SEQ ID NO: 394920 - RNA, 22 nt, Human
ucuauaaagggccagauaguag

SEQ ID NO: 394921 - RNA, 22 nt, Human
ccuggaucuaaggaagcuggga

SEQ ID NO: 394922 - RNA, 22 nt, Human
caaaauugaugaauguaugauu

SEQ ID NO: 394923 - RNA, 22 nt, Human
caguaaauuaucucaucucugu

SEQ ID NO: 394924 - RNA, 22 nt, Human
ucaguaaaguucuuucuugcug

SEQ ID NO: 394925 - RNA, 22 nt, Human
aagaaaucugauauuuguuuca

SEQ ID NO: 394926 - RNA, 22 nt, Human
uaguccuugcugggcacagagu

SEQ ID NO: 394927 - RNA, 22 nt, Human
aagauauacuauuaaguaccau

SEQ ID NO: 394928 - RNA, 22 nt, Human
aaaacaguuuuugcuaacugcu

SEQ ID NO: 394929 - RNA, 22 nt, Human
auuccaaacagugcugcagacu

SEQ ID NO: 394930 - RNA, 22 nt, Human
uuuauacauggagaauuuuugc

SEQ ID NO: 394931 - RNA, 22 nt, Human
ucuuaauucugugucuucacua

SEQ ID NO: 394932 - RNA, 22 nt, Human
uuccuuaguguuagauucugug

SEQ ID NO: 394933 - RNA, 22 nt, Human
cugaaagaauaagauguuuaca

SEQ ID NO: 394934 - RNA, 22 nt, Human
uaucagaaugcagccaugugca

SEQ ID NO: 394935 - RNA, 22 nt, Human
gugaacuauuggguaucauaaa

SEQ ID NO: 394936 - RNA, 22 nt, Human
agucauuuugccagucuucagg

SEQ ID NO: 394937 - RNA, 22 nt, Human
aggauuuauuggugggaaguua

SEQ ID NO: 394938 - RNA, 22 nt, Human
ugcaggaaaaccaacacgccuu

SEQ ID NO: 394939 - RNA, 22 nt, Human
uuacaagauuaauuauuggagu

SEQ ID NO: 394940 - RNA, 23 nt, Human
aagaaugcuucugaagagcugcc

SEQ ID NO: 394941 - RNA, 22 nt, Human
guuaaagaguuuggcuuucuuc

SEQ ID NO: 394942 - RNA, 20 nt, Human
aguacaauguaugauucaga

SEQ ID NO: 394943 - RNA, 22 nt, Human
augacaaaagaagacaugaggu

SEQ ID NO: 394944 - RNA, 22 nt, Human
gagauuuaauuggauuaacuua

SEQ ID NO: 394945 - RNA, 22 nt, Human
aaauaucauuuauaacuuuuaa

SEQ ID NO: 394946 - RNA, 22 nt, Human
guacagaaaguacccauagaag

SEQ ID NO: 394947 - RNA, 22 nt, Human
aucaguuaguuacugcuaagau

SEQ ID NO: 394948 - RNA, 22 nt, Human
aaagccaucuguauuaagugaa

SEQ ID NO: 394949 - RNA, 22 nt, Human
ccaugcacaccagcaggcagac

SEQ ID NO: 394950 - RNA, 22 nt, Human
uauggcuuuucauuccuaugug

SEQ ID NO: 394951 - RNA, 22 nt, Human
uuaggaaauuccaccuguauuc

SEQ ID NO: 394952 - RNA, 22 nt, Human
uuccuuagggaaagggauaagg

SEQ ID NO: 394953 - RNA, 22 nt, Human
uagaauucaagauucaacaggc

SEQ ID NO: 394954 - RNA, 22 nt, Human
ucauaauacaaagaguucugca

SEQ ID NO: 394955 - RNA, 22 nt, Human
aauuucaagucuugaagaagua

SEQ ID NO: 394956 - RNA, 22 nt, Human
uguccuuauaagaaaaggaaau

SEQ ID NO: 394957 - RNA, 22 nt, Human
cuuaggcaagcagagcccaucc

SEQ ID NO: 394958 - RNA, 22 nt, Human
uuaauauguugaaauuuauuag

SEQ ID NO: 394959 - RNA, 21 nt, Human
acaugucuggucauuuuuagc

SEQ ID NO: 394960 - RNA, 22 nt, Human
uaccaaaaccaagccauuaucu

SEQ ID NO: 394961 - RNA, 22 nt, Human
caaaacugucuagagagagaag

SEQ ID NO: 394962 - RNA, 22 nt, Human
ucacaucauuaagacuucuccu

SEQ ID NO: 394963 - RNA, 22 nt, Human
uuucaacuagccccuaaguccu

SEQ ID NO: 394964 - RNA, 22 nt, Human
caacagucugguuuauauaaua

SEQ ID NO: 394965 - RNA, 22 nt, Human
uacagagauuuauugcuaaggc

SEQ ID NO: 394966 - RNA, 22 nt, Human
gaaagccauagcccagcuuuac

SEQ ID NO: 394967 - RNA, 22 nt, Human
uugguacaaugugcuagguagg

SEQ ID NO: 394968 - RNA, 22 nt, Human
gaucagaauucuuguguguuuc

SEQ ID NO: 394969 - RNA, 22 nt, Human
aauaaccuuacuuauuacaugg

SEQ ID NO: 394970 - RNA, 22 nt, Human
uagaugcuacaauuuuguacuc

SEQ ID NO: 394971 - RNA, 22 nt, Human
guagaaauagugguugacagga

SEQ ID NO: 394972 - RNA, 23 nt, Human
gaaucaguggcuaacaaggaaac

SEQ ID NO: 394973 - RNA, 22 nt, Human
auacagaagaccccuccgucau

SEQ ID NO: 394974 - RNA, 19 nt, Human
gaaguccucuaguaaauuu

SEQ ID NO: 394975 - RNA, 22 nt, Human
acaacuuuguagcaauuccacg

SEQ ID NO: 394976 - RNA, 22 nt, Human
agguauuauuagcaucucuauu

SEQ ID NO: 394977 - RNA, 22 nt, Human
ucaccagucuuucuuaccauug

SEQ ID NO: 394978 - RNA, 22 nt, Human
aaauggauggaaagcaauuuuu

SEQ ID NO: 394979 - RNA, 22 nt, Human
gccuuaauuuuuuauaaucucu

SEQ ID NO: 394980 - RNA, 22 nt, Human
uuagaaaugucacagaucugau

SEQ ID NO: 394981 - RNA, 22 nt, Human
uuacagaaucuacucgugguga

SEQ ID NO: 394982 - RNA, 22 nt, Human
caauuucagucucagagaguuc

SEQ ID NO: 394983 - RNA, 22 nt, Human
aaauagcauaaaauaggaagcu

SEQ ID NO: 394984 - RNA, 22 nt, Human
ugcuuauuuauagucaauagag

SEQ ID NO: 394985 - RNA, 22 nt, Human
uaaagucaucuuuaaacaugcc

SEQ ID NO: 394986 - RNA, 19 nt, Human
aacuguaauuaauacccua

SEQ ID NO: 394987 - RNA, 22 nt, Human
ucuauaaaugcagauaugugug

SEQ ID NO: 394988 - RNA, 22 nt, Human
ucauaaaguucuaagaauugua

SEQ ID NO: 394989 - RNA, 22 nt, Human
cuacagaagccguggucaggaa

SEQ ID NO: 394990 - RNA, 22 nt, Human
caauuucacugacacccuggaa

SEQ ID NO: 394991 - RNA, 21 nt, Human
aauccuuaaugaggaguuggu

SEQ ID NO: 394992 - RNA, 22 nt, Human
uaaguaaauuuauaaugugauu

SEQ ID NO: 394993 - RNA, 22 nt, Human
gugaauaaccuacuccaggccu

SEQ ID NO: 394994 - RNA, 17 nt, Human
caauuucauagguuuug

SEQ ID NO: 394995 - RNA, 22 nt, Human
aaacggauauaacagcaaacgc

SEQ ID NO: 394996 - RNA, 22 nt, Human
aagacuuucaaguaugcaugca

SEQ ID NO: 394997 - RNA, 22 nt, Human
uguucacaaggugaugcuuuga

SEQ ID NO: 394998 - RNA, 22 nt, Human
uuuaaagaaauuccucaucuuu

SEQ ID NO: 394999 - RNA, 22 nt, Human
gaguccuugucauaauucagug

SEQ ID NO: 395000 - RNA, 22 nt, Human
aaauugaaugauuaagugguga

SEQ ID NO: 395001 - RNA, 22 nt, Human
cagaauaaaagucccaaggcau

SEQ ID NO: 395002 - RNA, 22 nt, Human
cuuaaccagaaaaugcacuugu

SEQ ID NO: 395003 - RNA, 23 nt, Human
cagaaaucugaaaucuagaaaug

SEQ ID NO: 395004 - RNA, 21 nt, Human
uguguaaaguugaaauccugu

SEQ ID NO: 395005 - RNA, 22 nt, Human
uugauggcugugauuuacucag

SEQ ID NO: 395006 - RNA, 22 nt, Human
uuugaagacauauuguuacaua

SEQ ID NO: 395007 - RNA, 22 nt, Human
gauuucaaaaguagauccauca

SEQ ID NO: 395008 - RNA, 22 nt, Human
ugcaggaaugagguucucaguu

SEQ ID NO: 395009 - RNA, 22 nt, Human
aaaagccaagguccucuucaga

SEQ ID NO: 395010 - RNA, 22 nt, Human
aucagaaacucuuagagcaggg

SEQ ID NO: 395011 - RNA, 22 nt, Human
caugguuuugagccuauuaugc

SEQ ID NO: 395012 - RNA, 22 nt, Human
aguucacagccauguucaugug

SEQ ID NO: 395013 - RNA, 20 nt, Human
gauuucaaagcagaguggcc

SEQ ID NO: 395014 - RNA, 22 nt, Human
uuacagaaaguuucccaugccg

SEQ ID NO: 395015 - RNA, 22 nt, Human
gauaaaauaacuauggaauacu

SEQ ID NO: 395016 - RNA, 22 nt, Human
uacugaaaguggucaacagugg

SEQ ID NO: 395017 - RNA, 22 nt, Human
auuucaggagcaguuucagugg

SEQ ID NO: 395018 - RNA, 22 nt, Human
ucaaacagaggaacaauuguuu

SEQ ID NO: 395019 - RNA, 22 nt, Human
aaaucaguuggaacacaagcag

SEQ ID NO: 395020 - RNA, 23 nt, Human
aucaaaggauguagagaagaagc

SEQ ID NO: 395021 - RNA, 22 nt, Human
cuuaggcaguuuaggaaagaga

SEQ ID NO: 395022 - RNA, 22 nt, Human
uagaauucauguuacuguuagc

SEQ ID NO: 395023 - RNA, 22 nt, Human
uuuauccauaucauuaaaaucu

SEQ ID NO: 395024 - RNA, 23 nt, Human
uacuuaggguuuagaucugacug

SEQ ID NO: 395025 - RNA, 23 nt, Human
uagaauucaaucuguuccacauc

SEQ ID NO: 395026 - RNA, 22 nt, Human
auaugcuugggacugauacagu

SEQ ID NO: 395027 - RNA, 22 nt, Human
aagaauucacugguagagucaa

SEQ ID NO: 395028 - RNA, 22 nt, Human
aaaucaguucacguucugaggu

SEQ ID NO: 395029 - RNA, 22 nt, Human
guaaacaacacaaaucauuuga

SEQ ID NO: 395030 - RNA, 22 nt, Human
guaaugaaugaaagaaacuggg

SEQ ID NO: 395031 - RNA, 22 nt, Human
ucagaauuuuuguuacccuuga

SEQ ID NO: 395032 - RNA, 22 nt, Human
cugaauaauauuccauuaugag

SEQ ID NO: 395033 - RNA, 22 nt, Human
guuaggcagcccaagaugucag

SEQ ID NO: 395034 - RNA, 22 nt, Human
auuccaaacuuaccccagagga

SEQ ID NO: 395035 - RNA, 22 nt, Human
ucccugggcuucuccagacuug

SEQ ID NO: 395036 - RNA, 22 nt, Human
auccaaagauggaaagaacuuu

SEQ ID NO: 395037 - RNA, 22 nt, Human
gagucaccuugggucagcgaua

SEQ ID NO: 395038 - RNA, 22 nt, Human
aaucagaaaauucaguggaauu

SEQ ID NO: 395039 - RNA, 22 nt, Human
agucaaaugaguaaauauauaa

SEQ ID NO: 395040 - RNA, 22 nt, Human
caacuuuaugauugguuuguca

SEQ ID NO: 395041 - RNA, 22 nt, Human
auagaaauguauuuuggacuag

SEQ ID NO: 395042 - RNA, 22 nt, Human
ucaauaaauagcuuggcucagc

SEQ ID NO: 395043 - RNA, 22 nt, Human
agaauuccucuaggaucugccc

SEQ ID NO: 395044 - RNA, 22 nt, Human
acuauaaccuguuagaauagau

SEQ ID NO: 395045 - RNA, 22 nt, Human
ugaucugaaggacaugggaccc

SEQ ID NO: 395046 - RNA, 22 nt, Human
uggauuuaauggaugaggggca

SEQ ID NO: 395047 - RNA, 22 nt, Human
augaaacaugcuuuguggauga

SEQ ID NO: 395048 - RNA, 22 nt, Human
gaaugaaaaccuuggcucaaau

SEQ ID NO: 395049 - RNA, 22 nt, Human
ugguuuaauuuccauuuccuug

SEQ ID NO: 395050 - RNA, 22 nt, Human
ucagccaggccaggcauucaca

SEQ ID NO: 395051 - RNA, 22 nt, Human
uuaagcaacacacauuaauuau

SEQ ID NO: 395052 - RNA, 15 nt, Human
aaucagaaguguggc

SEQ ID NO: 395053 - RNA, 22 nt, Human
caguaaaugcagauauagauac

SEQ ID NO: 395054 - RNA, 22 nt, Human
guacagaaugcuugguaaggca

SEQ ID NO: 395055 - RNA, 22 nt, Human
gaguguucccacaccccaguug

SEQ ID NO: 395056 - RNA, 21 nt, Human
cauuuacaugacagauugguu

SEQ ID NO: 395057 - RNA, 22 nt, Human
cuggauuuaggacuaguccaag

SEQ ID NO: 395058 - RNA, 22 nt, Human
cuacagaagaaacuaucacuau

SEQ ID NO: 395059 - RNA, 22 nt, Human
ucaguuucuucaucucccuaac

SEQ ID NO: 395060 - RNA, 22 nt, Human
ugaauaaucauguccauagugu

SEQ ID NO: 395061 - RNA, 22 nt, Human
cacaauuuccaagucauguuau

SEQ ID NO: 395062 - RNA, 22 nt, Human
aauuucaaguggcaucuuugau

SEQ ID NO: 395063 - RNA, 22 nt, Human
acaacuuuagucuggagggaaa

SEQ ID NO: 395064 - RNA, 22 nt, Human
caaaggcaggcccccugugcag

SEQ ID NO: 395065 - RNA, 22 nt, Human
gaugaaaaaagacgagcauaua

SEQ ID NO: 395066 - RNA, 22 nt, Human
uauuuauaccaggugaucggag

SEQ ID NO: 395067 - RNA, 19 nt, Human
guuccaaaggccagaccuu

SEQ ID NO: 395068 - RNA, 22 nt, Human
uguguaaauuuauuuacauaaa

SEQ ID NO: 395069 - RNA, 22 nt, Human
uaaagccaacacuuuacugcuc

SEQ ID NO: 395070 - RNA, 22 nt, Human
uuggaucaaauuucaugcuguc

SEQ ID NO: 395071 - RNA, 22 nt, Human
acauaauaccuaggacaguuug

SEQ ID NO: 395072 - RNA, 22 nt, Human
uaaauaugcauguauccuuauc

SEQ ID NO: 395073 - RNA, 22 nt, Human
acaugucuuuuaaagucuaaua

SEQ ID NO: 395074 - RNA, 22 nt, Human
guuccaaagcaaaggaggugag

SEQ ID NO: 395075 - RNA, 22 nt, Human
uucaauaggaugcaugauauaa

SEQ ID NO: 395076 - RNA, 22 nt, Human
gcagaauuuggggguaaccuuu

SEQ ID NO: 395077 - RNA, 23 nt, Human
uauggcuuacagugcuuuaggua

SEQ ID NO: 395078 - RNA, 22 nt, Human
uuuaggcagucauugaacaagu

SEQ ID NO: 395079 - RNA, 20 nt, Human
agaaucugacccagagagac

SEQ ID NO: 395080 - RNA, 22 nt, Human
caauuuuuaaacuaugaaguug

SEQ ID NO: 395081 - RNA, 22 nt, Human
uggguuuaaacucaacucuaaa

SEQ ID NO: 395082 - RNA, 22 nt, Human
agcacaauagagcaguuaaaaa

SEQ ID NO: 395083 - RNA, 22 nt, Human
auagacauagccguaauuuauu

SEQ ID NO: 395084 - RNA, 22 nt, Human
aggauuuaggagcuggcuaacg

SEQ ID NO: 395085 - RNA, 22 nt, Human
guauacagauacuuagacgugc

SEQ ID NO: 395086 - RNA, 22 nt, Human
aaaucauguuggcacaauaaaa

SEQ ID NO: 395087 - RNA, 22 nt, Human
gcuuuaaugcaauuucaccuca

SEQ ID NO: 395088 - RNA, 22 nt, Human
cauuuauauaaaauguccagaa

SEQ ID NO: 395089 - RNA, 22 nt, Human
uguguaaauggcaucucucagc

SEQ ID NO: 395090 - RNA, 22 nt, Human
caguccagcccccugcuaaaag

SEQ ID NO: 395091 - RNA, 22 nt, Human
caucagaauguuagagaaggga

SEQ ID NO: 395092 - RNA, 22 nt, Human
caucagaagauggcucuggaaa

SEQ ID NO: 395093 - RNA, 22 nt, Human
aauuccaaauguuuucaaucca

SEQ ID NO: 395094 - RNA, 22 nt, Human
ucaaaaguuucacauagagaua

SEQ ID NO: 395095 - RNA, 22 nt, Human
aguaaacacugucuuuauauau

SEQ ID NO: 395096 - RNA, 22 nt, Human
aucuauacucagaguuaauauc

SEQ ID NO: 395097 - RNA, 22 nt, Human
uuuaggcaagggcaagauuauc

SEQ ID NO: 395098 - RNA, 22 nt, Human
aaaauugaggcucauguuaaau

SEQ ID NO: 395099 - RNA, 22 nt, Human
uaguccuuuccggcugcuauaa

SEQ ID NO: 395100 - RNA, 22 nt, Human
ucugauaacucuggccccaggc

SEQ ID NO: 395101 - RNA, 22 nt, Human
cagagauuauuauaacuaauua

SEQ ID NO: 395102 - RNA, 22 nt, Human
ggcaauuucaugugguuuaaac

SEQ ID NO: 395103 - RNA, 22 nt, Human
aaaguccuagcgauccacagaa

SEQ ID NO: 395104 - RNA, 22 nt, Human
uggcuuaauauuucauauuuaa

SEQ ID NO: 395105 - RNA, 22 nt, Human
caucagaacaaaucgguuaaga

SEQ ID NO: 395106 - RNA, 22 nt, Human
gugcauuuaggucacaugaugu

SEQ ID NO: 395107 - RNA, 22 nt, Human
acuagaaauuacucagaauaaa

SEQ ID NO: 395108 - RNA, 22 nt, Human
uaguccuuuaauaguuaaugug

SEQ ID NO: 395109 - RNA, 22 nt, Human
uuuauaaaauagacugggucua

SEQ ID NO: 395110 - RNA, 22 nt, Human
ccagucacucugugagagcuac

SEQ ID NO: 395111 - RNA, 22 nt, Human
aauguucauugauuaaaugaau

SEQ ID NO: 395112 - RNA, 22 nt, Human
gaauuucaaaagccagaacggg

SEQ ID NO: 395113 - RNA, 22 nt, Human
uucuuuuacauuaagauuucag

SEQ ID NO: 395114 - RNA, 22 nt, Human
augaaaauacugugguugauag

SEQ ID NO: 395115 - RNA, 19 nt, Human
auucauuuuugccuucuaa

SEQ ID NO: 395116 - RNA, 22 nt, Human
ucaguaaacagguuuaaguccu

SEQ ID NO: 395117 - RNA, 22 nt, Human
gaagaaucugaggacagucauu

SEQ ID NO: 395118 - RNA, 22 nt, Human
uuuccaaagcugaguugagcaa

SEQ ID NO: 395119 - RNA, 22 nt, Human
caguccuucauuccuccuuuga

SEQ ID NO: 395120 - RNA, 20 nt, Human
aauaaacuacugagagaugu

SEQ ID NO: 395121 - RNA, 22 nt, Human
uuuacagagagagaacuggacu

SEQ ID NO: 395122 - RNA, 22 nt, Human
uguauguugggucaaaguacau

SEQ ID NO: 395123 - RNA, 22 nt, Human
uaauuguagcuuuguaaucagc

SEQ ID NO: 395124 - RNA, 22 nt, Human
uuccuuagauccuucaaucacg

SEQ ID NO: 395125 - RNA, 23 nt, Human
aggauuuaaaggcaaugcauuuu

SEQ ID NO: 395126 - RNA, 21 nt, Human
agaauaaugguaucauuugcu

SEQ ID NO: 395127 - RNA, 22 nt, Human
acugguuuuccagguuacuucu

SEQ ID NO: 395128 - RNA, 22 nt, Human
ucuuuaaugugauuguaauuau

SEQ ID NO: 395129 - RNA, 22 nt, Human
uuagaaaugcacccaagaccua

SEQ ID NO: 395130 - RNA, 22 nt, Human
ucaguaaaugagcaaaaauuuc

SEQ ID NO: 395131 - RNA, 22 nt, Human
gagucaccacugugauagucga

SEQ ID NO: 395132 - RNA, 22 nt, Human
uaauuacagguccaaaacaauc

SEQ ID NO: 395133 - RNA, 22 nt, Human
aacagugaguugaugacugaau

SEQ ID NO: 395134 - RNA, 22 nt, Human
ucagaaauacaaaacacuuacu

SEQ ID NO: 395135 - RNA, 22 nt, Human
caaugaaagcaacugccuauaa

SEQ ID NO: 395136 - RNA, 22 nt, Human
aaugucuugagaagagaaaucu

SEQ ID NO: 395137 - RNA, 22 nt, Human
aauguuaauuuacugucuucau

SEQ ID NO: 395138 - RNA, 22 nt, Human
uuggaucauggaaugucugcuu

SEQ ID NO: 395139 - RNA, 23 nt, Human
augguuuaugucacacuuuugau

SEQ ID NO: 395140 - RNA, 21 nt, Human
agaauucuuaaguauucuaau

SEQ ID NO: 395141 - RNA, 22 nt, Human
agucaccaucuguggcagccug

SEQ ID NO: 395142 - RNA, 22 nt, Human
uaucauaaguuaauuaaacagu

SEQ ID NO: 395143 - RNA, 22 nt, Human
uucuuaaucccacaaaucuuca

SEQ ID NO: 395144 - RNA, 19 nt, Human
cuauacagccucugaggaa

SEQ ID NO: 395145 - RNA, 22 nt, Human
ugcagagaagaggacaguucua

SEQ ID NO: 395146 - RNA, 22 nt, Human
auguuucauuuagauaucaggc

SEQ ID NO: 395147 - RNA, 22 nt, Human
auuaaacugagcaaauuaacau

SEQ ID NO: 395148 - RNA, 22 nt, Human
cacacuuugugcuaaucuauuu

SEQ ID NO: 395149 - RNA, 22 nt, Human
caguaaauacauaucagagaag

SEQ ID NO: 395150 - RNA, 19 nt, Human
agcaaauacaucaaaauug

SEQ ID NO: 395151 - RNA, 22 nt, Human
guuccaaacaagucauaaagua

SEQ ID NO: 395152 - RNA, 18 nt, Human
gcacuucacccagcuagu

SEQ ID NO: 395153 - RNA, 22 nt, Human
acuggaucuaauugguuauagu

SEQ ID NO: 395154 - RNA, 22 nt, Human
acuauacauugaauguuaaggu

SEQ ID NO: 395155 - RNA, 22 nt, Human
uacagaaaaacuggcauugaag

SEQ ID NO: 395156 - RNA, 22 nt, Human
ugcaggaacuugguuuuacuca

SEQ ID NO: 395157 - RNA, 22 nt, Human
caagaaucaacauuauuuagug

SEQ ID NO: 395158 - RNA, 22 nt, Human
ucagccaguuugauucuauuug

SEQ ID NO: 395159 - RNA, 22 nt, Human
agaaaucaugucuuauuucuau

SEQ ID NO: 395160 - RNA, 22 nt, Human
gcguuaauaacauuaauaaugc

SEQ ID NO: 395161 - RNA, 22 nt, Human
aaagccauaagccuaauacuaa

SEQ ID NO: 395162 - RNA, 22 nt, Human
gguacaauccacuguggguuag

SEQ ID NO: 395163 - RNA, 23 nt, Human
uaaagucacauauuagagugagc

SEQ ID NO: 395164 - RNA, 22 nt, Human
auguuucaaauauauagaguug

SEQ ID NO: 395165 - RNA, 22 nt, Human
gcaaacaaggacauacauccug

SEQ ID NO: 395166 - RNA, 22 nt, Human
aaaauugagagucuugugcaag

SEQ ID NO: 395167 - RNA, 21 nt, Human
cuacagaagcucuccuaucca

SEQ ID NO: 395168 - RNA, 22 nt, Human
uaacagaaauuuuaguuagggg

SEQ ID NO: 395169 - RNA, 22 nt, Human
aaaacuguaucuucuugggacu

SEQ ID NO: 395170 - RNA, 22 nt, Human
aaagucauugcuguuaucaaug

SEQ ID NO: 395171 - RNA, 22 nt, Human
gaauuucagggucugguaggaa

SEQ ID NO: 395172 - RNA, 20 nt, Human
guaaugaauguaaacaguaa

SEQ ID NO: 395173 - RNA, 22 nt, Human
caucagaaucugagucucugcc

SEQ ID NO: 395174 - RNA, 22 nt, Human
uaugcugugcuagauacaauau

SEQ ID NO: 395175 - RNA, 20 nt, Human
aaucagaaagugugagcucu

SEQ ID NO: 395176 - RNA, 22 nt, Human
ucaaauaccagcaauuucaugu

SEQ ID NO: 395177 - RNA, 22 nt, Human
gaauuacaugacccugaguaga

SEQ ID NO: 395178 - RNA, 18 nt, Human
aagucaccccugcucccu

SEQ ID NO: 395179 - RNA, 22 nt, Human
aaacuuuggauugugauugugc

SEQ ID NO: 395180 - RNA, 22 nt, Human
cuggcuuucauuucaagcacgu

SEQ ID NO: 395181 - RNA, 22 nt, Human
auacagaauucacuacaguuuc

SEQ ID NO: 395182 - RNA, 22 nt, Human
aaagacauggaacuagagaugg

SEQ ID NO: 395183 - RNA, 22 nt, Human
auggcauuugaccgcuuugugg

SEQ ID NO: 395184 - RNA, 22 nt, Human
guagaaauguaaccaggagaua

SEQ ID NO: 395185 - RNA, 22 nt, Human
uauggaaaaauguaucuuguca

SEQ ID NO: 395186 - RNA, 22 nt, Human
uuagaaaucugcugccaugcaa

SEQ ID NO: 395187 - RNA, 22 nt, Human
ugcaggaaaacaccuaucaccc

SEQ ID NO: 395188 - RNA, 22 nt, Human
guauuuaauuccauuaaguuag

SEQ ID NO: 395189 - RNA, 22 nt, Human
cuuccaaacccaggguaugggc

SEQ ID NO: 395190 - RNA, 22 nt, Human
auggcuuuccugggacaugggc

SEQ ID NO: 395191 - RNA, 22 nt, Human
uaauuucagugcaagcucacgg

SEQ ID NO: 395192 - RNA, 22 nt, Human
cuacagaaaaucagccacaggc

SEQ ID NO: 395193 - RNA, 22 nt, Human
guccuuaguuacuuuucauguc

SEQ ID NO: 395194 - RNA, 22 nt, Human
aauugcaauuuucuuaaggucu

SEQ ID NO: 395195 - RNA, 22 nt, Human
ucauaaagcucuuccaaaugua

SEQ ID NO: 395196 - RNA, 22 nt, Human
ugaaauagacacagugcuauac

SEQ ID NO: 395197 - RNA, 22 nt, Human
agauucuacucuagauccaugg

SEQ ID NO: 395198 - RNA, 20 nt, Human
uacagaaacaggacuuuugg

SEQ ID NO: 395199 - RNA, 22 nt, Human
ucauaaaaugcuccugauauug

SEQ ID NO: 395200 - RNA, 21 nt, Human
uucaauacuauuucaauaguc

SEQ ID NO: 395201 - RNA, 18 nt, Human
auauguuaauuagguagg

SEQ ID NO: 395202 - RNA, 22 nt, Human
aagcauuuuagauaaagcauca

SEQ ID NO: 395203 - RNA, 22 nt, Human
cauggauugaauauaaauuaga

SEQ ID NO: 395204 - RNA, 22 nt, Human
uuucauugaacuaaagaaucug

SEQ ID NO: 395205 - RNA, 22 nt, Human
uuuuauguuccucuuuaugcga

SEQ ID NO: 395206 - RNA, 22 nt, Human
ccuauacagccucagcugagau

SEQ ID NO: 395207 - RNA, 23 nt, Human
uuccuuaacuguuaagauugucu

SEQ ID NO: 395208 - RNA, 22 nt, Human
acuggauuccauugugcaaaga

SEQ ID NO: 395209 - RNA, 22 nt, Human
acuauacaguauguacgugcac

SEQ ID NO: 395210 - RNA, 22 nt, Human
agagaugaacauaaaacaagga

SEQ ID NO: 395211 - RNA, 22 nt, Human
ucaguguauggagugcuggauu

SEQ ID NO: 395212 - RNA, 22 nt, Human
aagccagauuucacucuuaauu

SEQ ID NO: 395213 - RNA, 22 nt, Human
guuuacauguacucauuauacu

SEQ ID NO: 395214 - RNA, 21 nt, Human
caaguccuuugccaaagugcu

SEQ ID NO: 395215 - RNA, 22 nt, Human
ucagagaaaugaaguagggauu

SEQ ID NO: 395216 - RNA, 22 nt, Human
aaagcuaugaggcaugcauuuc

SEQ ID NO: 395217 - RNA, 22 nt, Human
guuaggcaaauaacuguggagc

SEQ ID NO: 395218 - RNA, 22 nt, Human
aaagccuuugucucaggcucug

SEQ ID NO: 395219 - RNA, 22 nt, Human
aauaauauuugaagcuucaaag

SEQ ID NO: 395220 - RNA, 22 nt, Human
aaauugcaaaaguacuuuuagg

SEQ ID NO: 395221 - RNA, 22 nt, Human
aaauucaauuaacuuucaugcu

SEQ ID NO: 395222 - RNA, 22 nt, Human
acaaagucacaauaauuaaccu

SEQ ID NO: 395223 - RNA, 22 nt, Human
caucagaaccagcugggugagg

SEQ ID NO: 395224 - RNA, 22 nt, Human
uaccaaaagcuuguuucauaca

SEQ ID NO: 395225 - RNA, 22 nt, Human
uucuuaaucuguguggguucga

SEQ ID NO: 395226 - RNA, 22 nt, Human
uaagaaucggucgcaacagagg

SEQ ID NO: 395227 - RNA, 22 nt, Human
caauuucacuaaugaugugggg

SEQ ID NO: 395228 - RNA, 22 nt, Human
augguuuaguuagggcuuuuca

SEQ ID NO: 395229 - RNA, 22 nt, Human
uauacagaacugcacgugcacg

SEQ ID NO: 395230 - RNA, 22 nt, Human
guaaacaucagccacucuauuu

SEQ ID NO: 395231 - RNA, 22 nt, Human
auggcuuugcucaaguuuagcc

SEQ ID NO: 395232 - RNA, 22 nt, Human
uucuaacaaguggcuuguuagu

SEQ ID NO: 395233 - RNA, 22 nt, Human
ccuggauccaugaaaaggcuac

SEQ ID NO: 395234 - RNA, 22 nt, Human
cauacuuucuuuuucacgcaua

SEQ ID NO: 395235 - RNA, 22 nt, Human
uguaacaaaauaccuuggauug

SEQ ID NO: 395236 - RNA, 22 nt, Human
ucuaaacaguuucacucuuaau

SEQ ID NO: 395237 - RNA, 22 nt, Human
aauucucagguaaaaguuaagu

SEQ ID NO: 395238 - RNA, 22 nt, Human
augccaaagcccaaguucauca

SEQ ID NO: 395239 - RNA, 22 nt, Human
gauuucaaagguucugcaugcc

SEQ ID NO: 395240 - RNA, 23 nt, Human
uaagaacagacaagcauuuacau

SEQ ID NO: 395241 - RNA, 22 nt, Human
uuauaagaguauauaguguacu

SEQ ID NO: 395242 - RNA, 22 nt, Human
aaaugcuuguaaauuuuccaug

SEQ ID NO: 395243 - RNA, 22 nt, Human
agucuuaauagagaaaaacugu

SEQ ID NO: 395244 - RNA, 22 nt, Human
auuucaacacuuuuggaauuag

SEQ ID NO: 395245 - RNA, 22 nt, Human
ggcauuuaguuuucauauucug

SEQ ID NO: 395246 - RNA, 22 nt, Human
gauaaaauucuuauuuuacccg

SEQ ID NO: 395247 - RNA, 22 nt, Human
cauguauaguuggaacuacauc

SEQ ID NO: 395248 - RNA, 22 nt, Human
cacauuuagagguuagcauggu

SEQ ID NO: 395249 - RNA, 22 nt, Human
acuauacauaaaacauuugggu

SEQ ID NO: 395250 - RNA, 22 nt, Human
auauccaagaaacaauuaauuc

SEQ ID NO: 395251 - RNA, 22 nt, Human
uaaagacaaacccacuaggguu

SEQ ID NO: 395252 - RNA, 22 nt, Human
guaaacauuacugugcuguaua

SEQ ID NO: 395253 - RNA, 22 nt, Human
uuuauccaccuuacccuguucc

SEQ ID NO: 395254 - RNA, 22 nt, Human
aacuggauuuaggaacagagaa

SEQ ID NO: 395255 - RNA, 22 nt, Human
uacagaaguaaauaccaaaagc

SEQ ID NO: 395256 - RNA, 22 nt, Human
uaauuucacaguucaacgcaca

SEQ ID NO: 395257 - RNA, 22 nt, Human
cagaucuguaguaaaagaucuc

SEQ ID NO: 395258 - RNA, 20 nt, Human
uguuccaagcuaaugaauga

SEQ ID NO: 395259 - RNA, 17 nt, Human
aaucagauuucugagga

SEQ ID NO: 395260 - RNA, 22 nt, Human
ugcuauacggagcaucuucagg

SEQ ID NO: 395261 - RNA, 22 nt, Human
aauauuaucaaaagcuuuuuca

SEQ ID NO: 395262 - RNA, 22 nt, Human
cuggcuuucccuggacaacagc

SEQ ID NO: 395263 - RNA, 22 nt, Human
acauaauagcauuucuaauuug

SEQ ID NO: 395264 - RNA, 22 nt, Human
auggcuuucagauggugaaaga

SEQ ID NO: 395265 - RNA, 22 nt, Human
caugcuuuucaaucuaucuuaa

SEQ ID NO: 395266 - RNA, 22 nt, Human
aaaguccagagggcacacugaa

SEQ ID NO: 395267 - RNA, 22 nt, Human
uguacaaugcugagguuugggg

SEQ ID NO: 395268 - RNA, 22 nt, Human
guuaggcaguuuucuucauucu

SEQ ID NO: 395269 - RNA, 22 nt, Human
auuuccaagaaagcuuuaggau

SEQ ID NO: 395270 - RNA, 21 nt, Human
gaguccuuccaauguccucag

SEQ ID NO: 395271 - RNA, 17 nt, Human
ugcuuaauuuugacugg

SEQ ID NO: 395272 - RNA, 22 nt, Human
aaaaccugauugaauucuauuu

SEQ ID NO: 395273 - RNA, 22 nt, Human
agauuuacugagaacugauuac

SEQ ID NO: 395274 - RNA, 22 nt, Human
ucaguuucacagucugugcaga

SEQ ID NO: 395275 - RNA, 22 nt, Human
aauuucaaacucuugcccucag

SEQ ID NO: 395276 - RNA, 22 nt, Human
cuuccaaaauuuauauguugaa

SEQ ID NO: 395277 - RNA, 22 nt, Human
uacacaugaucauuuaguagca

SEQ ID NO: 395278 - RNA, 22 nt, Human
uagaauaaguugaugauauaug

SEQ ID NO: 395279 - RNA, 22 nt, Human
aagucacaagcauauaugcauu

SEQ ID NO: 395280 - RNA, 22 nt, Human
ccauggcuuucuuucauuguaa

SEQ ID NO: 395281 - RNA, 22 nt, Human
uauacagaaagaauucaagucu

SEQ ID NO: 395282 - RNA, 22 nt, Human
gaucugaagagcaaugaaauau

SEQ ID NO: 395283 - RNA, 22 nt, Human
aaucaugugggauagucugcuc

SEQ ID NO: 395284 - RNA, 22 nt, Human
aaucaagucaaccaucaugugc

SEQ ID NO: 395285 - RNA, 22 nt, Human
uagaaacagcauauauuagccc

SEQ ID NO: 395286 - RNA, 22 nt, Human
uuaaaaucuaaagcaguugucu

SEQ ID NO: 395287 - RNA, 22 nt, Human
aauaauaagauacuaagggagu

SEQ ID NO: 395288 - RNA, 22 nt, Human
auggcuuuuuagacuuugguac

SEQ ID NO: 395289 - RNA, 22 nt, Human
cugcagagaccuaggucagguu

SEQ ID NO: 395290 - RNA, 22 nt, Human
caggccagggagaauaugaagc

SEQ ID NO: 395291 - RNA, 22 nt, Human
agccaacuaggagauuaaggua

SEQ ID NO: 395292 - RNA, 22 nt, Human
caaauacuggguaaguuaauuu

SEQ ID NO: 395293 - RNA, 22 nt, Human
aguagaauagauggauacuauu

SEQ ID NO: 395294 - RNA, 22 nt, Human
aauacuaguuauuaaagcuuuu

SEQ ID NO: 395295 - RNA, 22 nt, Human
aaauauaguaaaugcauaguuc

SEQ ID NO: 395296 - RNA, 21 nt, Human
cauuucaaagagcuggaaauc

SEQ ID NO: 395297 - RNA, 22 nt, Human
augguuuauugcuuuaaugaaa

SEQ ID NO: 395298 - RNA, 22 nt, Human
uaaacauguugacaucuuaccu

SEQ ID NO: 395299 - RNA, 22 nt, Human
ucuuuaauguacuuucuuucac

SEQ ID NO: 395300 - RNA, 22 nt, Human
cguccuuacagagggucacagc

SEQ ID NO: 395301 - RNA, 22 nt, Human
auuaaagacagcagauggaugg

SEQ ID NO: 395302 - RNA, 22 nt, Human
auaaagucuaccguauuaaaga

SEQ ID NO: 395303 - RNA, 22 nt, Human
ugaaagguuaaaaguaguauug

SEQ ID NO: 395304 - RNA, 22 nt, Human
gaaacaacuacuauugauuucu

SEQ ID NO: 395305 - RNA, 22 nt, Human
ggauuuccucuugacucuaaag

SEQ ID NO: 395306 - RNA, 19 nt, Human
uccuucagucagaucuggg

SEQ ID NO: 395307 - RNA, 22 nt, Human
uggcauuuucuccuuugaguuu

SEQ ID NO: 395308 - RNA, 22 nt, Human
uacuucauuccuuuguaaaaug

SEQ ID NO: 395309 - RNA, 22 nt, Human
ucacagcaaaugcugcuucuca

SEQ ID NO: 395310 - RNA, 22 nt, Human
auguacaaaauguuuugaaaug

SEQ ID NO: 395311 - RNA, 22 nt, Human
acagaauucuaguauguggcuu

SEQ ID NO: 395312 - RNA, 22 nt, Human
uugauacuauuaagcacugggc

SEQ ID NO: 395313 - RNA, 22 nt, Human
uaacauguuaagaaauuagaua

SEQ ID NO: 395314 - RNA, 22 nt, Human
uuaaagucccugccuuaauucc

SEQ ID NO: 395315 - RNA, 22 nt, Human
gauuuagagcaggaaugcaugg

SEQ ID NO: 395316 - RNA, 22 nt, Human
ugaaauaauaucuggaucaauc

SEQ ID NO: 395317 - RNA, 22 nt, Human
aacauguaucgcuuuuuaauau

SEQ ID NO: 395318 - RNA, 22 nt, Human
uaaagucauaagaguggauccg

SEQ ID NO: 395319 - RNA, 22 nt, Human
ccagaucuaaguccaaaguacu

SEQ ID NO: 395320 - RNA, 22 nt, Human
uuaacacuccuaacuacagucu

SEQ ID NO: 395321 - RNA, 23 nt, Human
augaaugaauaaggcaggaaagc

SEQ ID NO: 395322 - RNA, 22 nt, Human
caucagaaggccagaggguagc

SEQ ID NO: 395323 - RNA, 22 nt, Human
aucuaaacagguguucuuuaga

SEQ ID NO: 395324 - RNA, 22 nt, Human
aaaucaguucucccuuucuuca

SEQ ID NO: 395325 - RNA, 22 nt, Human
cauaagaagguaacauccuuaa

SEQ ID NO: 395326 - RNA, 22 nt, Human
auuaggcacuagaaugucaauu

SEQ ID NO: 395327 - RNA, 22 nt, Human
uguucacaucgauggauuuugc

SEQ ID NO: 395328 - RNA, 22 nt, Human
uaauuucaauagcuugcauaau

SEQ ID NO: 395329 - RNA, 22 nt, Human
aaagaaucguguguaguuugaa

SEQ ID NO: 395330 - RNA, 19 nt, Human
gcaggaaaugagugauugc

SEQ ID NO: 395331 - RNA, 22 nt, Human
gaugaaaaauugcugugucaua

SEQ ID NO: 395332 - RNA, 22 nt, Human
aacauuggauauuuauuaaaag

SEQ ID NO: 395333 - RNA, 22 nt, Human
acaaugaacacacaaggaauuc

SEQ ID NO: 395334 - RNA, 22 nt, Human
caaagccaggcuuucuaaugua

SEQ ID NO: 395335 - RNA, 22 nt, Human
aaaaugcuauuucauggaggag

SEQ ID NO: 395336 - RNA, 22 nt, Human
gugaauaaagggaguuuucaaa

SEQ ID NO: 395337 - RNA, 22 nt, Human
cuaacuuuagcuuagauuauca

SEQ ID NO: 395338 - RNA, 22 nt, Human
uaauuucaccguugcuagaaau

SEQ ID NO: 395339 - RNA, 22 nt, Human
uuuauaaacaguaccacggugc

SEQ ID NO: 395340 - RNA, 22 nt, Human
gaauuucaaagagguuaagagg

SEQ ID NO: 395341 - RNA, 22 nt, Human
cauuucaaaagaauugccagaa

SEQ ID NO: 395342 - RNA, 22 nt, Human
uacagacaguuuuucagauauu

SEQ ID NO: 395343 - RNA, 19 nt, Human
uggauuuauauucuuuauc

SEQ ID NO: 395344 - RNA, 22 nt, Human
caucagaaggaaggacgauuau

SEQ ID NO: 395345 - RNA, 22 nt, Human
ugaaacaaauuuggaaaaucua

SEQ ID NO: 395346 - RNA, 22 nt, Human
agaucaguuagauagcuugaug

SEQ ID NO: 395347 - RNA, 22 nt, Human
caaacuggcuaugggaaucuug

SEQ ID NO: 395348 - RNA, 22 nt, Human
uucacagauuucccugcacaug

SEQ ID NO: 395349 - RNA, 22 nt, Human
augcuuaauacacuguuaaagg

SEQ ID NO: 395350 - RNA, 22 nt, Human
acaaaauuaccuaguuauuuuc

SEQ ID NO: 395351 - RNA, 22 nt, Human
ggauucuaacugaacagaauau

SEQ ID NO: 395352 - RNA, 22 nt, Human
agucaccaacaugguucccagg

SEQ ID NO: 395353 - RNA, 22 nt, Human
uggaauaaagugcuuugaucag

SEQ ID NO: 395354 - RNA, 22 nt, Human
uauaagaaacaaggcaaauuuu

SEQ ID NO: 395355 - RNA, 22 nt, Human
uuucacacaacgugaauauacu

SEQ ID NO: 395356 - RNA, 23 nt, Human
aguucacugagguugaccacugg

SEQ ID NO: 395357 - RNA, 22 nt, Human
gucaacuuuaagaugaucuuuu

SEQ ID NO: 395358 - RNA, 22 nt, Human
aaagucauuuguauauacccuu

SEQ ID NO: 395359 - RNA, 22 nt, Human
uuaaugauaccuauguuaauuu

SEQ ID NO: 395360 - RNA, 22 nt, Human
uaaagacaauuucgagcuguag

SEQ ID NO: 395361 - RNA, 22 nt, Human
agccauucauugugcucucaga

SEQ ID NO: 395362 - RNA, 22 nt, Human
ucuggaucuccagcacuuauca

SEQ ID NO: 395363 - RNA, 22 nt, Human
ugucaccaugcgaggcuaauuu

SEQ ID NO: 395364 - RNA, 22 nt, Human
aaucagucucauuuagcaggga

SEQ ID NO: 395365 - RNA, 22 nt, Human
agaaaucauugaauuauuugcu

SEQ ID NO: 395366 - RNA, 22 nt, Human
cuauagaaaauuguaucacacg

SEQ ID NO: 395367 - RNA, 22 nt, Human
uucauaaucaccaaaaacugga

SEQ ID NO: 395368 - RNA, 22 nt, Human
uaauauauuucugcuaagcuca

SEQ ID NO: 395369 - RNA, 22 nt, Human
auuucacaaaccauccugauuu

SEQ ID NO: 395370 - RNA, 22 nt, Human
cauuuacacacagaggugugcu

SEQ ID NO: 395371 - RNA, 17 nt, Human
uaucagaauguguuuac

SEQ ID NO: 395372 - RNA, 22 nt, Human
ugcuuuaaaauggacuguuuug

SEQ ID NO: 395373 - RNA, 22 nt, Human
ugaaugaauccuaacaaagaca

SEQ ID NO: 395374 - RNA, 22 nt, Human
caagaucagggugccagaaugg

SEQ ID NO: 395375 - RNA, 22 nt, Human
auauacugauagcugcacuucu

SEQ ID NO: 395376 - RNA, 22 nt, Human
uuccuuagcugucccuggaaau

SEQ ID NO: 395377 - RNA, 22 nt, Human
aggauuuauuacaagccauggu

SEQ ID NO: 395378 - RNA, 22 nt, Human
gauagaaagaauauagauucca

SEQ ID NO: 395379 - RNA, 23 nt, Human
uucaaaacuggaaaaucagaugc

SEQ ID NO: 395380 - RNA, 22 nt, Human
aaagaaggggucuacauccaau

SEQ ID NO: 395381 - RNA, 22 nt, Human
gagauuuagagagacuuaaaca

SEQ ID NO: 395382 - RNA, 22 nt, Human
auggaucagaaucccgggaggg

SEQ ID NO: 395383 - RNA, 22 nt, Human
aucagaaauagucauguuacuu

SEQ ID NO: 395384 - RNA, 22 nt, Human
auggguuucccucugaaauuau

SEQ ID NO: 395385 - RNA, 22 nt, Human
aauaauuuuagcucagaguugu

SEQ ID NO: 395386 - RNA, 22 nt, Human
augcuuuaaacuauaaauccac

SEQ ID NO: 395387 - RNA, 22 nt, Human
uacaagaaugucuuaaaagcuc

SEQ ID NO: 395388 - RNA, 22 nt, Human
agaugaaaagauaagcagcaau

SEQ ID NO: 395389 - RNA, 22 nt, Human
uuccuuaggcuguuugcagugc

SEQ ID NO: 395390 - RNA, 22 nt, Human
cagagacauucaguaaauuauc

SEQ ID NO: 395391 - RNA, 22 nt, Human
caaauacuaaacauaagauuuu

SEQ ID NO: 395392 - RNA, 22 nt, Human
agauaucaccaguuuuacauac

SEQ ID NO: 395393 - RNA, 22 nt, Human
gguuuaauggagauauuucaga

SEQ ID NO: 395394 - RNA, 22 nt, Human
aaacugugcuucccaaaugccc

SEQ ID NO: 395395 - RNA, 22 nt, Human
aaucuuuaaggacucagucucu

SEQ ID NO: 395396 - RNA, 22 nt, Human
caguccuugcucaaagucuaca

SEQ ID NO: 395397 - RNA, 22 nt, Human
uauaaagcugacucaugaaacu

SEQ ID NO: 395398 - RNA, 22 nt, Human
uuucaacuugaagaauugauac

SEQ ID NO: 395399 - RNA, 22 nt, Human
gcagggcaaacccagguguuca

SEQ ID NO: 395400 - RNA, 20 nt, Human
uacagaaugcaauaaaaugg

SEQ ID NO: 395401 - RNA, 22 nt, Human
aaguaaauaucuguuuauagca

SEQ ID NO: 395402 - RNA, 22 nt, Human
aggauuuagauuuggaggaacu

SEQ ID NO: 395403 - RNA, 22 nt, Human
acacaaacugcuagaaaauugg

SEQ ID NO: 395404 - RNA, 22 nt, Human
guuucacagaugguguucauau

SEQ ID NO: 395405 - RNA, 22 nt, Human
uaaaaugacuuccuccaacauc

SEQ ID NO: 395406 - RNA, 22 nt, Human
caucauaaaauugagauaacug

SEQ ID NO: 395407 - RNA, 22 nt, Human
gaacuuuaaaacaaaguacagu

SEQ ID NO: 395408 - RNA, 22 nt, Human
augguuuaaagaguaugacuuu

SEQ ID NO: 395409 - RNA, 22 nt, Human
auaauaaaccaggaugggucug

SEQ ID NO: 395410 - RNA, 22 nt, Human
uauggaaauaauuagacaagug

SEQ ID NO: 395411 - RNA, 22 nt, Human
ucuauaaauuaugcagucucag

SEQ ID NO: 395412 - RNA, 22 nt, Human
cagauuuaagagauaaacagug

SEQ ID NO: 395413 - RNA, 22 nt, Human
uacuuaaugccacugaauugua

SEQ ID NO: 395414 - RNA, 22 nt, Human
aucuagaacuuaaagucaguca

SEQ ID NO: 395415 - RNA, 22 nt, Human
uuacagaacugucuugaaauuu

SEQ ID NO: 395416 - RNA, 22 nt, Human
augguuuuucaaguauucagaa

SEQ ID NO: 395417 - RNA, 22 nt, Human
cauagaaaguauuauggaauuu

SEQ ID NO: 395418 - RNA, 22 nt, Human
acaauauuguacccagaaguuu

SEQ ID NO: 395419 - RNA, 22 nt, Human
aauuaauggaaaguaaggaagg

SEQ ID NO: 395420 - RNA, 22 nt, Human
augugaaauauuaagccgagga

SEQ ID NO: 395421 - RNA, 22 nt, Human
uucacagaauggcaaguuaugg

SEQ ID NO: 395422 - RNA, 22 nt, Human
aaauacugucucugagagagcc

SEQ ID NO: 395423 - RNA, 22 nt, Human
aauuccaaguagcaucccauca

SEQ ID NO: 395424 - RNA, 22 nt, Human
auuuacugagguaaauaaacug

SEQ ID NO: 395425 - RNA, 22 nt, Human
aaacugugaagcaaguacaagg

SEQ ID NO: 395426 - RNA, 22 nt, Human
caguccuuucugaaauccuaua

SEQ ID NO: 395427 - RNA, 22 nt, Human
augguuuugaagggaggucaaa

SEQ ID NO: 395428 - RNA, 22 nt, Human
cagaaucagcccuugcuauuaa

SEQ ID NO: 395429 - RNA, 22 nt, Human
ugugugaaggaauauauacuca

SEQ ID NO: 395430 - RNA, 22 nt, Human
aacauguaaccagcauucaucu

SEQ ID NO: 395431 - RNA, 22 nt, Human
gugaauaacuuucuauguuaau

SEQ ID NO: 395432 - RNA, 22 nt, Human
ucagaauucugaccuuggguca

SEQ ID NO: 395433 - RNA, 22 nt, Human
aagcauuuugccacuugaaguu

SEQ ID NO: 395434 - RNA, 22 nt, Human
uuauccaagcagaagcugcaca

SEQ ID NO: 395435 - RNA, 22 nt, Human
uggcuauugagugaucucuaga

SEQ ID NO: 395436 - RNA, 22 nt, Human
uuugaacaggaguaucuauagu

SEQ ID NO: 395437 - RNA, 22 nt, Human
cugauacauaguagcaugucau

SEQ ID NO: 395438 - RNA, 22 nt, Human
auggcauuauagcaaugguuug

SEQ ID NO: 395439 - RNA, 21 nt, Human
uuuaaagaauaggaagggagg

SEQ ID NO: 395440 - RNA, 22 nt, Human
aguaaaauuucugcugaggaga

SEQ ID NO: 395441 - RNA, 22 nt, Human
guacagaauuaugccaugaggg

SEQ ID NO: 395442 - RNA, 22 nt, Human
uacugaaauacuaagaaguuaa

SEQ ID NO: 395443 - RNA, 22 nt, Human
uuaacacuaucugucauaauua

SEQ ID NO: 395444 - RNA, 22 nt, Human
uaucaaaggcuaugugauuuuu

SEQ ID NO: 395445 - RNA, 22 nt, Human
auacaaugaaguauagaugaaa

SEQ ID NO: 395446 - RNA, 22 nt, Human
guaugaaaauuguaaaguucuu

SEQ ID NO: 395447 - RNA, 22 nt, Human
gucauuucuguuucuucagugc

SEQ ID NO: 395448 - RNA, 22 nt, Human
aaagucaucauuucuuuucaaa

SEQ ID NO: 395449 - RNA, 22 nt, Human
aagcccagaugggagcauuuca

SEQ ID NO: 395450 - RNA, 22 nt, Human
aaugaaaauuggacccuagaac

SEQ ID NO: 395451 - RNA, 22 nt, Human
caguccuuggcuucauccgagu

SEQ ID NO: 395452 - RNA, 22 nt, Human
gugcuucaaguucuuaauguuu

SEQ ID NO: 395453 - RNA, 22 nt, Human
cagaauuuaaguggauuauucu

SEQ ID NO: 395454 - RNA, 22 nt, Human
uuuaucuguuguacauuuaugc

SEQ ID NO: 395455 - RNA, 22 nt, Human
uagauauaagguccuuagaaca

SEQ ID NO: 395456 - RNA, 22 nt, Human
caaucaguaaccggaucauggu

SEQ ID NO: 395457 - RNA, 22 nt, Human
uucaacuuuaugcauauguauu

SEQ ID NO: 395458 - RNA, 22 nt, Human
ccagaauuuggaucaugauuuu

SEQ ID NO: 395459 - RNA, 22 nt, Human
caagucauuacugaaaugucac

SEQ ID NO: 395460 - RNA, 20 nt, Human
acuggaucuggcuggagcug

SEQ ID NO: 395461 - RNA, 22 nt, Human
aaggacagggaugguugauugu

SEQ ID NO: 395462 - RNA, 22 nt, Human
ugcuuaauacguauuugcugga

SEQ ID NO: 395463 - RNA, 22 nt, Human
uacaagaaauuucugcauauau

SEQ ID NO: 395464 - RNA, 22 nt, Human
uuuaggcagcagugaggaugaa

SEQ ID NO: 395465 - RNA, 22 nt, Human
aguuauccgaaggcacugagau

SEQ ID NO: 395466 - RNA, 22 nt, Human
uuuccaaaggcuaaacucaguu

SEQ ID NO: 395467 - RNA, 22 nt, Human
uuccaaaccucaaauaauuaau

SEQ ID NO: 395468 - RNA, 22 nt, Human
uaaguccuagcuuugguaggaa

SEQ ID NO: 395469 - RNA, 22 nt, Human
uagaacauaagucauucauuug

SEQ ID NO: 395470 - RNA, 22 nt, Human
aagccaaugagagaggccucag

SEQ ID NO: 395471 - RNA, 23 nt, Human
ugguucuaggccuauaauuauau

SEQ ID NO: 395472 - RNA, 22 nt, Human
aaugggauaggucuucaggaau

SEQ ID NO: 395473 - RNA, 22 nt, Human
caguaaauuugagggaucuaau

SEQ ID NO: 395474 - RNA, 22 nt, Human
gauuuucauuugcacucuagaa

SEQ ID NO: 395475 - RNA, 22 nt, Human
uucagaaaaaacuucaauaagu

SEQ ID NO: 395476 - RNA, 22 nt, Human
ucuagacacuacuaguaaccgg

SEQ ID NO: 395477 - RNA, 22 nt, Human
ccagcuauugcuguguaacagu

SEQ ID NO: 395478 - RNA, 22 nt, Human
aaguccuugaagaaacaguucu

SEQ ID NO: 395479 - RNA, 22 nt, Human
gagucaccacacggugcugacu

SEQ ID NO: 395480 - RNA, 22 nt, Human
uaagagaacuggauagauagga

SEQ ID NO: 395481 - RNA, 21 nt, Human
aaagaaucauggguaauuuca

SEQ ID NO: 395482 - RNA, 22 nt, Human
auaaagcauacuuuguaugacu

SEQ ID NO: 395483 - RNA, 18 nt, Human
uaaauauauuucccccuu

SEQ ID NO: 395484 - RNA, 22 nt, Human
uaaacauggauucugaucacag

SEQ ID NO: 395485 - RNA, 19 nt, Human
acaagucacuuacuuagua

SEQ ID NO: 395486 - RNA, 22 nt, Human
cagaagucacccucagaauaac

SEQ ID NO: 395487 - RNA, 22 nt, Human
aguaugaacggaaggccuggga

SEQ ID NO: 395488 - RNA, 22 nt, Human
gaucagaauuuacuuauaauug

SEQ ID NO: 395489 - RNA, 21 nt, Human
uuuaguucaaguacagaacca

SEQ ID NO: 395490 - RNA, 22 nt, Human
uuauauuaguuagacuugcugu

SEQ ID NO: 395491 - RNA, 22 nt, Human
auacagaacaagccucaccucc

SEQ ID NO: 395492 - RNA, 22 nt, Human
uugguccacugugaaauuggga

SEQ ID NO: 395493 - RNA, 22 nt, Human
agcauaaaggcacuagaaagag

SEQ ID NO: 395494 - RNA, 22 nt, Human
ugugaauaccuugaauucauca

SEQ ID NO: 395495 - RNA, 22 nt, Human
uuagaaauacaagugagguuga

SEQ ID NO: 395496 - RNA, 22 nt, Human
ugcagguaggccugacuuccag

SEQ ID NO: 395497 - RNA, 22 nt, Human
ugugaauacagcaugugcuucu

SEQ ID NO: 395498 - RNA, 22 nt, Human
uaauagaauaguggaaacauug

SEQ ID NO: 395499 - RNA, 22 nt, Human
cuuaauuacccaaugugguagg

SEQ ID NO: 395500 - RNA, 22 nt, Human
caguccuuagucuggauggcuu

SEQ ID NO: 395501 - RNA, 22 nt, Human
caaguccucugguuucaaauag

SEQ ID NO: 395502 - RNA, 23 nt, Human
uaucagugugaugaggcugcugc

SEQ ID NO: 395503 - RNA, 22 nt, Human
aaauuucaguuggaaugagcuc

SEQ ID NO: 395504 - RNA, 22 nt, Human
cugaaagguauaaauaagacuu

SEQ ID NO: 395505 - RNA, 22 nt, Human
agaaccucuggauacaguuuaa

SEQ ID NO: 395506 - RNA, 22 nt, Human
cacaaagucugcagcugcugua

SEQ ID NO: 395507 - RNA, 22 nt, Human
caggccagguggcaggcaaaac

SEQ ID NO: 395508 - RNA, 22 nt, Human
guacagaaggagcuuuggauuc

SEQ ID NO: 395509 - RNA, 22 nt, Human
ucacagaagagauauugacaga

SEQ ID NO: 395510 - RNA, 22 nt, Human
uacagauauagagauuuauaga

SEQ ID NO: 395511 - RNA, 22 nt, Human
uucagaaaucgaguuucauguc

SEQ ID NO: 395512 - RNA, 22 nt, Human
uucacagagagaacucaaacca

SEQ ID NO: 395513 - RNA, 22 nt, Human
uuaugaaggaucagguacuugg

SEQ ID NO: 395514 - RNA, 22 nt, Human
ucucacuuuguugcccagacuu

SEQ ID NO: 395515 - RNA, 22 nt, Human
uuccaaacugccaauucagaag

SEQ ID NO: 395516 - RNA, 22 nt, Human
uguacaaucugaugauguaugg

SEQ ID NO: 395517 - RNA, 22 nt, Human
auuacacuuguucaucaucacc

SEQ ID NO: 395518 - RNA, 22 nt, Human
aaucagaacgcucgaucuucgg

SEQ ID NO: 395519 - RNA, 22 nt, Human
uuauagaacagccuccucuaga

SEQ ID NO: 395520 - RNA, 22 nt, Human
cauggcuuguaauaaauuuaua

SEQ ID NO: 395521 - RNA, 18 nt, Human
auacaagaucaaguguuc

SEQ ID NO: 395522 - RNA, 22 nt, Human
caguuucagaaucaaaacauca

SEQ ID NO: 395523 - RNA, 22 nt, Human
auccauuugaaagaacagucca

SEQ ID NO: 395524 - RNA, 22 nt, Human
acagaauuuaaagcucuagacu

SEQ ID NO: 395525 - RNA, 22 nt, Human
uggagaauuuugucaccagaca

SEQ ID NO: 395526 - RNA, 22 nt, Human
acuuuaucaggaaucacacagc

SEQ ID NO: 395527 - RNA, 22 nt, Human
ugucaccaccggaagaaacugc

SEQ ID NO: 395528 - RNA, 22 nt, Human
cauuucaaguaacagauugcuu

SEQ ID NO: 395529 - RNA, 22 nt, Human
auaugaaaguaagcaugugugu

SEQ ID NO: 395530 - RNA, 22 nt, Human
aucacaaaggguuuucucugag

SEQ ID NO: 395531 - RNA, 23 nt, Human
augcaagaguuucucaaacugga

SEQ ID NO: 395532 - RNA, 22 nt, Human
uucuucaaaauccagcaugauu

SEQ ID NO: 395533 - RNA, 22 nt, Human
uucauacuguguuuccaaguuu

SEQ ID NO: 395534 - RNA, 22 nt, Human
ugcaggaacagaacucacuccc

SEQ ID NO: 395535 - RNA, 22 nt, Human
auucaagauuaauucuauguca

SEQ ID NO: 395536 - RNA, 22 nt, Human
uucaacucuucaagaucacauc

SEQ ID NO: 395537 - RNA, 22 nt, Human
ugagacaaccuaauuaaacacc

SEQ ID NO: 395538 - RNA, 22 nt, Human
aguguuuagcaugaaguucauu

SEQ ID NO: 395539 - RNA, 20 nt, Human
uggccuuuaaauaguauucc

SEQ ID NO: 395540 - RNA, 22 nt, Human
uaucuaaauggaauauuccaga

SEQ ID NO: 395541 - RNA, 22 nt, Human
auacuuaacuguggagucauug

SEQ ID NO: 395542 - RNA, 22 nt, Human
guagaaaugguguguuucuucu

SEQ ID NO: 395543 - RNA, 21 nt, Human
caauuucaugggaagauggga

SEQ ID NO: 395544 - RNA, 22 nt, Human
augugcuuguaauguuaaaugu

SEQ ID NO: 395545 - RNA, 22 nt, Human
aaaguguacuaugucaugaaca

SEQ ID NO: 395546 - RNA, 22 nt, Human
uaaaauugcggugaauauuucc

SEQ ID NO: 395547 - RNA, 20 nt, Human
acaauacagguugugucuga

SEQ ID NO: 395548 - RNA, 22 nt, Human
gucaacuugcaagaugcugggc

SEQ ID NO: 395549 - RNA, 22 nt, Human
gcaggcuccaaggccugggaga

SEQ ID NO: 395550 - RNA, 21 nt, Human
gcuauacagaauggccagagg

SEQ ID NO: 395551 - RNA, 23 nt, Human
uuaagacuggcugaacuuaguag

SEQ ID NO: 395552 - RNA, 22 nt, Human
uuuaggcauugggugcucaagu

SEQ ID NO: 395553 - RNA, 22 nt, Human
ggcuuaaugguucuuuuucuca

SEQ ID NO: 395554 - RNA, 22 nt, Human
aacuuugaggucacugaauucc

SEQ ID NO: 395555 - RNA, 22 nt, Human
uuuaggcagaacauggacuuug

SEQ ID NO: 395556 - RNA, 21 nt, Human
uucaaagacuugaugcugacc

SEQ ID NO: 395557 - RNA, 22 nt, Human
uccagaauacucugaaaucauu

SEQ ID NO: 395558 - RNA, 22 nt, Human
uaaguccuucaccuaauccuca

SEQ ID NO: 395559 - RNA, 19 nt, Human
gaaagucauagagcuuguc

SEQ ID NO: 395560 - RNA, 22 nt, Human
ucaaaauuagugaccaaaggca

SEQ ID NO: 395561 - RNA, 22 nt, Human
uucaauucaauucuaaauauau

SEQ ID NO: 395562 - RNA, 22 nt, Human
ggauuugaauuguugaaaugau

SEQ ID NO: 395563 - RNA, 22 nt, Human
auuaggcauauaugcuuuuaau

SEQ ID NO: 395564 - RNA, 17 nt, Human
uaaagccagucaaguca

SEQ ID NO: 395565 - RNA, 22 nt, Human
ugcuuaaacacauacauacaua

SEQ ID NO: 395566 - RNA, 22 nt, Human
agccagucggggccaugcuggg

SEQ ID NO: 395567 - RNA, 22 nt, Human
aggaucugugagugcugcagac

SEQ ID NO: 395568 - RNA, 22 nt, Human
auauuaaauggauuuugggagc

SEQ ID NO: 395569 - RNA, 22 nt, Human
uuauagugggcccaacauggcg

SEQ ID NO: 395570 - RNA, 22 nt, Human
acuuugaaggggaacauuuuaa

SEQ ID NO: 395571 - RNA, 22 nt, Human
uucauuuguugacagagacaug

SEQ ID NO: 395572 - RNA, 22 nt, Human
uuaguacugauagggucaauca

SEQ ID NO: 395573 - RNA, 22 nt, Human
ucaaaauuucagcacuagcccu

SEQ ID NO: 395574 - RNA, 21 nt, Human
uccagaaaagaggucauuagc

SEQ ID NO: 395575 - RNA, 22 nt, Human
ucuggaucucccucauccuggg

SEQ ID NO: 395576 - RNA, 22 nt, Human
gaguccuugacacauaguaggu

SEQ ID NO: 395577 - RNA, 22 nt, Human
uuauuauuccccaagucauuau

SEQ ID NO: 395578 - RNA, 22 nt, Human
uauuucaagaacuucuauccau

SEQ ID NO: 395579 - RNA, 22 nt, Human
uuucaaguguccugauuaaugg

SEQ ID NO: 395580 - RNA, 22 nt, Human
cagucaccuugaggacucagac

SEQ ID NO: 395581 - RNA, 22 nt, Human
uaauuauagccgcuauuuugcu

SEQ ID NO: 395582 - RNA, 20 nt, Human
auucuacaagaauaagcaug

SEQ ID NO: 395583 - RNA, 22 nt, Human
agccauuuuccugaaauauaac

SEQ ID NO: 395584 - RNA, 22 nt, Human
gauucaauguugcagauggaau

SEQ ID NO: 395585 - RNA, 22 nt, Human
uguucuagcaacacaguuuugg

SEQ ID NO: 395586 - RNA, 22 nt, Human
cccaaaguacaaguaaacaugu

SEQ ID NO: 395587 - RNA, 22 nt, Human
gcuuuaaugcuucguggggcca

SEQ ID NO: 395588 - RNA, 22 nt, Human
cuuacagagaagaaaauguagu

SEQ ID NO: 395589 - RNA, 23 nt, Human
acaacuuuacagauacauuuugu

SEQ ID NO: 395590 - RNA, 22 nt, Human
gauuuauaguaugugcuuucag

SEQ ID NO: 395591 - RNA, 22 nt, Human
uagcagaagaacaacaugaucu

SEQ ID NO: 395592 - RNA, 18 nt, Human
aaguccuuccuuugcuuu

SEQ ID NO: 395593 - RNA, 22 nt, Human
auacagaauacuaauuccugag

SEQ ID NO: 395594 - RNA, 22 nt, Human
uuucuagugguuaagauuuaca

SEQ ID NO: 395595 - RNA, 22 nt, Human
agucuuaacuaugcaaguacua

SEQ ID NO: 395596 - RNA, 22 nt, Human
agagaauuggagcagugacagg

SEQ ID NO: 395597 - RNA, 22 nt, Human
aagucauagucgggaaagacau

SEQ ID NO: 395598 - RNA, 22 nt, Human
auuuagcaaaaaaugaugaagc

SEQ ID NO: 395599 - RNA, 21 nt, Human
agagacugucacugcaguacc

SEQ ID NO: 395600 - RNA, 22 nt, Human
uuaauuaugcaaaaggccccau

SEQ ID NO: 395601 - RNA, 22 nt, Human
auuucauagauuguaaaucccu

SEQ ID NO: 395602 - RNA, 22 nt, Human
auuauucaacacuugagaaauu

SEQ ID NO: 395603 - RNA, 22 nt, Human
uaucugagaaagaagcaccaga

SEQ ID NO: 395604 - RNA, 22 nt, Human
aguauaauuagauaucaaaagu

SEQ ID NO: 395605 - RNA, 19 nt, Human
uacauacuuauucuaaaag

SEQ ID NO: 395606 - RNA, 22 nt, Human
cacccagugaaggagcaagagg

SEQ ID NO: 395607 - RNA, 22 nt, Human
gcagagaacccagcagauuggc

SEQ ID NO: 395608 - RNA, 22 nt, Human
acauaauaaaaauaacagcuca

SEQ ID NO: 395609 - RNA, 22 nt, Human
acuggaucagaaucugauuuuu

SEQ ID NO: 395610 - RNA, 22 nt, Human
cuuaggcagacugcugaugcag

SEQ ID NO: 395611 - RNA, 22 nt, Human
augguuuuagaaucaggaaaaa

SEQ ID NO: 395612 - RNA, 22 nt, Human
acagcauugagagcuaaauuua

SEQ ID NO: 395613 - RNA, 22 nt, Human
uauaacaggaaguauucaaaca

SEQ ID NO: 395614 - RNA, 22 nt, Human
acaacaaagacacuugaaauga

SEQ ID NO: 395615 - RNA, 22 nt, Human
aauuuacaggugcacucgccau

SEQ ID NO: 395616 - RNA, 22 nt, Human
cuuaaagaguauuuaauauaau

SEQ ID NO: 395617 - RNA, 22 nt, Human
ucaaaucagcaagcagcuuccc

SEQ ID NO: 395618 - RNA, 22 nt, Human
uaaauaucaccuggaauuguua

SEQ ID NO: 395619 - RNA, 22 nt, Human
uucacauaaugauacaaagcuu

SEQ ID NO: 395620 - RNA, 22 nt, Human
cuggcuuucuguuauaaagaca

SEQ ID NO: 395621 - RNA, 22 nt, Human
uuccugggacuggagcagccca

SEQ ID NO: 395622 - RNA, 22 nt, Human
acaaaguccugguguauggcca

SEQ ID NO: 395623 - RNA, 21 nt, Human
agucccauccgguaagcaagc

SEQ ID NO: 395624 - RNA, 22 nt, Human
agaaaugcucaggucaacuuaa

SEQ ID NO: 395625 - RNA, 22 nt, Human
gaacuuuaccauuuagguaacu

SEQ ID NO: 395626 - RNA, 22 nt, Human
ugauaauauuuugaaucauaag

SEQ ID NO: 395627 - RNA, 22 nt, Human
uacuaaacccucgauggaucuu

SEQ ID NO: 395628 - RNA, 22 nt, Human
auaaaaguaggaccaacuuaca

SEQ ID NO: 395629 - RNA, 22 nt, Human
aaaacugaaauacgauccaaug

SEQ ID NO: 395630 - RNA, 22 nt, Human
cuuugaauugccguuucaucug

SEQ ID NO: 395631 - RNA, 22 nt, Human
aucagaaaauacccaguguuua

SEQ ID NO: 395632 - RNA, 22 nt, Human
augguuuuccucugcugcuuaa

SEQ ID NO: 395633 - RNA, 22 nt, Human
cauuucaauuauuugcucuucu

SEQ ID NO: 395634 - RNA, 22 nt, Human
aaacuuuguucgucugaugugg

SEQ ID NO: 395635 - RNA, 22 nt, Human
uauaaaauggcaucagcuccaa

SEQ ID NO: 395636 - RNA, 22 nt, Human
uuuuccaaaguaccaugucccu

SEQ ID NO: 395637 - RNA, 22 nt, Human
gauaaugaugacaaugacaacc

SEQ ID NO: 395638 - RNA, 22 nt, Human
ucuaaacagccucuuaccaacu

SEQ ID NO: 395639 - RNA, 22 nt, Human
aguaaaauuaauggaucagaag

SEQ ID NO: 395640 - RNA, 22 nt, Human
aguguucauuuauucauucacu

SEQ ID NO: 395641 - RNA, 22 nt, Human
ugcacaaacuugugucccaggg

SEQ ID NO: 395642 - RNA, 22 nt, Human
augaaaacggaccagagcuauu

SEQ ID NO: 395643 - RNA, 22 nt, Human
uaauuauaacaguuacaucuua

SEQ ID NO: 395644 - RNA, 22 nt, Human
caauuucagugcuguggagagg

SEQ ID NO: 395645 - RNA, 22 nt, Human
auggcuuugaaguaauguaauu

SEQ ID NO: 395646 - RNA, 22 nt, Human
uuccuuagugacuucuagcuac

SEQ ID NO: 395647 - RNA, 22 nt, Human
aaguccuuucucauggaggaau

SEQ ID NO: 395648 - RNA, 22 nt, Human
aauuucaaagcucacuggcaua

SEQ ID NO: 395649 - RNA, 22 nt, Human
uuccaaagugcuggaauuacau

SEQ ID NO: 395650 - RNA, 22 nt, Human
uaacaagucauuuuaaauuaug

SEQ ID NO: 395651 - RNA, 22 nt, Human
uacuuugaagacaauaucugga

SEQ ID NO: 395652 - RNA, 22 nt, Human
agauuucacaugcugcucuauu

SEQ ID NO: 395653 - RNA, 23 nt, Human
ucuauacauacugcagccucugg

SEQ ID NO: 395654 - RNA, 22 nt, Human
gugaauaaucacccuucuggau

SEQ ID NO: 395655 - RNA, 22 nt, Human
uagauauaucugucauacuggu

SEQ ID NO: 395656 - RNA, 22 nt, Human
ucaguaaaugaaugaauauaug

SEQ ID NO: 395657 - RNA, 22 nt, Human
uucacagaguuauuuuuaugcu

SEQ ID NO: 395658 - RNA, 22 nt, Human
caguccuucuccauuaaggcuc

SEQ ID NO: 395659 - RNA, 22 nt, Human
uggcuuuacacauccacugccu

SEQ ID NO: 395660 - RNA, 22 nt, Human
gaauuucacaaggugaggauaa

SEQ ID NO: 395661 - RNA, 22 nt, Human
ucagaauuuugguuugguuggu

SEQ ID NO: 395662 - RNA, 22 nt, Human
uugaauaauuaauuacacucag

SEQ ID NO: 395663 - RNA, 22 nt, Human
ugaucugagagcagaucaccau

SEQ ID NO: 395664 - RNA, 22 nt, Human
auggcuuaagaaugcuuuugug

SEQ ID NO: 395665 - RNA, 22 nt, Human
uuuacagaauguugaauuuggg

SEQ ID NO: 395666 - RNA, 22 nt, Human
aaucagaauuuguccccugagu

SEQ ID NO: 395667 - RNA, 22 nt, Human
auuacaagaugcauccauauuu

SEQ ID NO: 395668 - RNA, 23 nt, Human
uuacagaaaguaugcuuuuguuu

SEQ ID NO: 395669 - RNA, 22 nt, Human
aauuccagcuaggaaaagcuuc

SEQ ID NO: 395670 - RNA, 22 nt, Human
cuggaucaugggaaagggauca

SEQ ID NO: 395671 - RNA, 22 nt, Human
uuauaacaucaaucagaguuaa

SEQ ID NO: 395672 - RNA, 22 nt, Human
aucagaaaguucaucauguuug

SEQ ID NO: 395673 - RNA, 22 nt, Human
agauuuccuaugguaauuauag

SEQ ID NO: 395674 - RNA, 22 nt, Human
gauggcuuugugcaccaugauu

SEQ ID NO: 395675 - RNA, 18 nt, Human
caauuucauccuuaagcc

SEQ ID NO: 395676 - RNA, 22 nt, Human
uccuuaauauggaagaguucuc

SEQ ID NO: 395677 - RNA, 22 nt, Human
gaauacaaacuuaaggcuuuac

SEQ ID NO: 395678 - RNA, 22 nt, Human
aagucauugguagcuugauagg

SEQ ID NO: 395679 - RNA, 22 nt, Human
aaucagcuaaauaaacuaguca

SEQ ID NO: 395680 - RNA, 22 nt, Human
augguauugcaacaacugucau

SEQ ID NO: 395681 - RNA, 22 nt, Human
uucauacucacuccaauaacug

SEQ ID NO: 395682 - RNA, 22 nt, Human
uaaagccacgcuggaaaucagg

SEQ ID NO: 395683 - RNA, 22 nt, Human
gcaaaauuuacacuccuucuuc

SEQ ID NO: 395684 - RNA, 22 nt, Human
ugaauaauuccuuuuugucaag

SEQ ID NO: 395685 - RNA, 22 nt, Human
uguauacaggcauaagagauac

SEQ ID NO: 395686 - RNA, 22 nt, Human
ucacauaaauuauacaauuuca

SEQ ID NO: 395687 - RNA, 22 nt, Human
uuccuuaggggacagggggaua

SEQ ID NO: 395688 - RNA, 22 nt, Human
uguuuauaccugcaaccuguca

SEQ ID NO: 395689 - RNA, 22 nt, Human
aaguccaugaucaagauguggc

SEQ ID NO: 395690 - RNA, 22 nt, Human
gaaugaaagauuugcauucuau

SEQ ID NO: 395691 - RNA, 22 nt, Human
ucagaaaugaucguuauucauu

SEQ ID NO: 395692 - RNA, 22 nt, Human
gcacaauaacagccaagguuau

SEQ ID NO: 395693 - RNA, 22 nt, Human
aaaguucaugguguuauagaaa

SEQ ID NO: 395694 - RNA, 22 nt, Human
uaucagaacacauguuuugcag

SEQ ID NO: 395695 - RNA, 22 nt, Human
ugcaacuuguuuggagagaaag

SEQ ID NO: 395696 - RNA, 22 nt, Human
uaacagaaauaguaggugaggg

SEQ ID NO: 395697 - RNA, 22 nt, Human
ugaaugaacuaaaucauaguuc

SEQ ID NO: 395698 - RNA, 22 nt, Human
gaaguccucaaugcauugucuu

SEQ ID NO: 395699 - RNA, 22 nt, Human
gugauuuaguguuaaguauguu

SEQ ID NO: 395700 - RNA, 22 nt, Human
auucauaacggcaaaugucacc

SEQ ID NO: 395701 - RNA, 22 nt, Human
cagaaagcuuaggcaaguugga

SEQ ID NO: 395702 - RNA, 22 nt, Human
agucauaaagccagugggaggc

SEQ ID NO: 395703 - RNA, 22 nt, Human
auuauucaaucauauuaaaagu

SEQ ID NO: 395704 - RNA, 22 nt, Human
gauaauaagcacagcaggaugu

SEQ ID NO: 395705 - RNA, 22 nt, Human
uuacagaagagaaagaauucag

SEQ ID NO: 395706 - RNA, 22 nt, Human
ugauuuaaaagaaacauugucu

SEQ ID NO: 395707 - RNA, 22 nt, Human
cagaaaaggaagagcuauguaa

SEQ ID NO: 395708 - RNA, 22 nt, Human
gaagaauccaugcuaauuuacc

SEQ ID NO: 395709 - RNA, 22 nt, Human
caucagaaugaauguucuggag

SEQ ID NO: 395710 - RNA, 22 nt, Human
gugaauaaaacaccugccaaga

SEQ ID NO: 395711 - RNA, 22 nt, Human
uuauacuuuauacuacaucauu

SEQ ID NO: 395712 - RNA, 22 nt, Human
agauaaaaugguucaaaggcua

SEQ ID NO: 395713 - RNA, 22 nt, Human
ccacuucaucagugcuccauuu

SEQ ID NO: 395714 - RNA, 22 nt, Human
aauacugucuuucacagauauu

SEQ ID NO: 395715 - RNA, 22 nt, Human
uuccuuaguugacugucuuagu

SEQ ID NO: 395716 - RNA, 22 nt, Human
auacaaugagugagugaauggg

SEQ ID NO: 395717 - RNA, 22 nt, Human
cacaagaaauaagcugccuuuc

SEQ ID NO: 395718 - RNA, 22 nt, Human
uaaauacagucauuugagccau

SEQ ID NO: 395719 - RNA, 22 nt, Human
gauggcuucagucuccuugggu

SEQ ID NO: 395720 - RNA, 22 nt, Human
gcaaacaagcugccugaagauu

SEQ ID NO: 395721 - RNA, 21 nt, Human
uuacagaauccaugggaaguc

SEQ ID NO: 395722 - RNA, 22 nt, Human
aggauuuaccgucauuuagucu

SEQ ID NO: 395723 - RNA, 22 nt, Human
uucagaaacagagugagugagu

SEQ ID NO: 395724 - RNA, 22 nt, Human
aagauauagauggugguauaaa

SEQ ID NO: 395725 - RNA, 19 nt, Human
aaucagaaauaucgaggcc

SEQ ID NO: 395726 - RNA, 22 nt, Human
auagcuuuacagaagaguuuag

SEQ ID NO: 395727 - RNA, 22 nt, Human
gaaauauacaugaagucggcug

SEQ ID NO: 395728 - RNA, 22 nt, Human
aaauuauaggugccaccuugga

SEQ ID NO: 395729 - RNA, 22 nt, Human
uuaggaaaggguuuucuaacag

SEQ ID NO: 395730 - RNA, 22 nt, Human
uuugaauagcauaggauuacau

SEQ ID NO: 395731 - RNA, 22 nt, Human
uuuauuauguacaggcacuaua

SEQ ID NO: 395732 - RNA, 22 nt, Human
uguauaaauuuaaauuccugcu

SEQ ID NO: 395733 - RNA, 22 nt, Human
uucauagaucucaauuuugagg

SEQ ID NO: 395734 - RNA, 20 nt, Human
caccagucaugagucaauac

SEQ ID NO: 395735 - RNA, 22 nt, Human
acaugcuuugauguauuuugca

SEQ ID NO: 395736 - RNA, 20 nt, Human
aacaguaccauuuaucucag

SEQ ID NO: 395737 - RNA, 22 nt, Human
uaaguccuagaugauucacaga

SEQ ID NO: 395738 - RNA, 22 nt, Human
gguacaauggaccauaaaagcu

SEQ ID NO: 395739 - RNA, 22 nt, Human
auuaggcagggcaugguggcuc

SEQ ID NO: 395740 - RNA, 22 nt, Human
cuuuacauccuguuucccguuu

SEQ ID NO: 395741 - RNA, 22 nt, Human
uuccuuagcagaccugguaucc

SEQ ID NO: 395742 - RNA, 22 nt, Human
caguccuugcuaugacccugag

SEQ ID NO: 395743 - RNA, 18 nt, Human
auuguuaauagaguacuu

SEQ ID NO: 395744 - RNA, 22 nt, Human
uuacagaaaagggcuuuaagag

SEQ ID NO: 395745 - RNA, 22 nt, Human
uuucaacauauaccauaaugcc

SEQ ID NO: 395746 - RNA, 20 nt, Human
ugcaggaauuugcauuccuu

SEQ ID NO: 395747 - RNA, 22 nt, Human
ucaacuuuaguguagcuauuua

SEQ ID NO: 395748 - RNA, 22 nt, Human
agucaccagguuuuagagaccu

SEQ ID NO: 395749 - RNA, 22 nt, Human
uuucagacaggacuucauaugu

SEQ ID NO: 395750 - RNA, 22 nt, Human
aagugauuuguacaaaaugucg

SEQ ID NO: 395751 - RNA, 22 nt, Human
ucuggauccuaugcacuggacu

SEQ ID NO: 395752 - RNA, 22 nt, Human
uaucagaagacuuacaguaucg

SEQ ID NO: 395753 - RNA, 22 nt, Human
auacaaguugugauaauguaaa

SEQ ID NO: 395754 - RNA, 22 nt, Human
uauggaaacuaauucauuuuuc

SEQ ID NO: 395755 - RNA, 22 nt, Human
cuagaaauauuuuacagucaag

SEQ ID NO: 395756 - RNA, 22 nt, Human
uuaaggauguugugauuuauua

SEQ ID NO: 395757 - RNA, 22 nt, Human
aaacaggcaucacucagcaaag

SEQ ID NO: 395758 - RNA, 22 nt, Human
cagcccagagauguuaucuagu

SEQ ID NO: 395759 - RNA, 22 nt, Human
cauuuacaauguacagguugug

SEQ ID NO: 395760 - RNA, 22 nt, Human
ugugaauagugccgcaauaaac

SEQ ID NO: 395761 - RNA, 22 nt, Human
auauuauucuaguaacagugau

SEQ ID NO: 395762 - RNA, 22 nt, Human
aaauagauugcugaggcauuac

SEQ ID NO: 395763 - RNA, 20 nt, Human
uuccuuaggcauuggaagaa

SEQ ID NO: 395764 - RNA, 22 nt, Human
aaagucaugcaguugaacuuuu

SEQ ID NO: 395765 - RNA, 22 nt, Human
uuugaauaucacaaacuuucaa

SEQ ID NO: 395766 - RNA, 22 nt, Human
ccuggaucgaugccgagggaaa

SEQ ID NO: 395767 - RNA, 21 nt, Human
caaagccaggcaacucucucc

SEQ ID NO: 395768 - RNA, 22 nt, Human
caucagaagaaagacaaaugau

SEQ ID NO: 395769 - RNA, 22 nt, Human
uaagucauaagucaugauguua

SEQ ID NO: 395770 - RNA, 22 nt, Human
acuaaacugaagcaugaaaagg

SEQ ID NO: 395771 - RNA, 22 nt, Human
auauacaaagggcaaccucgcu

SEQ ID NO: 395772 - RNA, 22 nt, Human
cuuaggcaaccaggucaaugcu

SEQ ID NO: 395773 - RNA, 22 nt, Human
aaaucaguuguuauauuaaaga

SEQ ID NO: 395774 - RNA, 22 nt, Human
uuucaucucucuaaaagacagu

SEQ ID NO: 395775 - RNA, 22 nt, Human
auaucaaagcuaguggaaauuu

SEQ ID NO: 395776 - RNA, 22 nt, Human
uuaaagauucugaggcugauua

SEQ ID NO: 395777 - RNA, 22 nt, Human
ccuggaucuuucugacugacaa

SEQ ID NO: 395778 - RNA, 22 nt, Human
cuagaaauucugauucaguagg

SEQ ID NO: 395779 - RNA, 22 nt, Human
gacaguccuugcccaguaucua

SEQ ID NO: 395780 - RNA, 22 nt, Human
acaugcuucauauuauaaccaa

SEQ ID NO: 395781 - RNA, 22 nt, Human
caauuucaucuugugcuucaau

SEQ ID NO: 395782 - RNA, 22 nt, Human
acuagaaacuaauggauuauua

SEQ ID NO: 395783 - RNA, 22 nt, Human
gaaagaggaaggagauguauua

SEQ ID NO: 395784 - RNA, 22 nt, Human
ucagaacauugacauucuuauu

SEQ ID NO: 395785 - RNA, 22 nt, Human
uuuauccaguguuggaauuuuu

SEQ ID NO: 395786 - RNA, 22 nt, Human
uacaguauguucuugaauuugg

SEQ ID NO: 395787 - RNA, 22 nt, Human
gaauuucauuuguuuccuacca

SEQ ID NO: 395788 - RNA, 22 nt, Human
aaguuucauuguucauguaaca

SEQ ID NO: 395789 - RNA, 22 nt, Human
aaucagaaaggcuaaggaagca

SEQ ID NO: 395790 - RNA, 22 nt, Human
auuaaauguuggacguauacau

SEQ ID NO: 395791 - RNA, 22 nt, Human
cuuuacagaauaagaauacugg

SEQ ID NO: 395792 - RNA, 22 nt, Human
guauagaaacccagaaagauag

SEQ ID NO: 395793 - RNA, 22 nt, Human
ccuggaucagucacuguugcug

SEQ ID NO: 395794 - RNA, 21 nt, Human
aggauuuacuauuaacugugu

SEQ ID NO: 395795 - RNA, 22 nt, Human
gcuauacaaguguagaauagag

SEQ ID NO: 395796 - RNA, 22 nt, Human
aaugcuuaauucaauacugugu

SEQ ID NO: 395797 - RNA, 22 nt, Human
auuccaaaaggauguuagaaug

SEQ ID NO: 395798 - RNA, 22 nt, Human
acagaauuaaugaaaauuacaa

SEQ ID NO: 395799 - RNA, 22 nt, Human
acauaauagguaccugaauaau

SEQ ID NO: 395800 - RNA, 18 nt, Human
uacagauuauagauacau

SEQ ID NO: 395801 - RNA, 22 nt, Human
ggaucugagagcaagcaggacc

SEQ ID NO: 395802 - RNA, 22 nt, Human
auagaaauggcagcuggugcua

SEQ ID NO: 395803 - RNA, 22 nt, Human
augaaauauuucagagcagagu

SEQ ID NO: 395804 - RNA, 21 nt, Human
auacagaacauugauccaaga

SEQ ID NO: 395805 - RNA, 22 nt, Human
ugauauuuaagcaaaaauaugg

SEQ ID NO: 395806 - RNA, 22 nt, Human
aaggcauaggacaaaucaguga

SEQ ID NO: 395807 - RNA, 22 nt, Human
uggauuuauggagaccgaaagu

SEQ ID NO: 395808 - RNA, 22 nt, Human
auuauagaggguuacaguuaau

SEQ ID NO: 395809 - RNA, 22 nt, Human
uagaaaucagcaggcauaugua

SEQ ID NO: 395810 - RNA, 22 nt, Human
augcaaaauaaggcagaaacau

SEQ ID NO: 395811 - RNA, 22 nt, Human
ugcuuuaacauaagauaucuuu

SEQ ID NO: 395812 - RNA, 22 nt, Human
ggcauuuagagggcuuuucuga

SEQ ID NO: 395813 - RNA, 22 nt, Human
ugugaaagcaagucuaguucuc

SEQ ID NO: 395814 - RNA, 22 nt, Human
augcuuaacucuguacauaguu

SEQ ID NO: 395815 - RNA, 22 nt, Human
ucaaacauguuagcagucugug

SEQ ID NO: 395816 - RNA, 21 nt, Human
ugaaagaaggugcagucugaa

SEQ ID NO: 395817 - RNA, 22 nt, Human
ucacagaagaugcuggauguug

SEQ ID NO: 395818 - RNA, 22 nt, Human
uaauuucaaauuucuuagcgug

SEQ ID NO: 395819 - RNA, 22 nt, Human
gcucuaauugaaaaauacugca

SEQ ID NO: 395820 - RNA, 22 nt, Human
cauaauuacugauaugcugauu

SEQ ID NO: 395821 - RNA, 16 nt, Human
ccuggauccccugugg

SEQ ID NO: 395822 - RNA, 22 nt, Human
uucuauacaaagauuucucaca

SEQ ID NO: 395823 - RNA, 22 nt, Human
uggcaauuuuaggugguuuagu

SEQ ID NO: 395824 - RNA, 23 nt, Human
ucuguacacaucagcaucuccca

SEQ ID NO: 395825 - RNA, 22 nt, Human
acagccaggaggaacucaguga

SEQ ID NO: 395826 - RNA, 22 nt, Human
caaugaaaauuuaaguugcagc

SEQ ID NO: 395827 - RNA, 22 nt, Human
cuauuauuuccucaucuauaaa

SEQ ID NO: 395828 - RNA, 22 nt, Human
uaugucaaaguuaagaaauagg

SEQ ID NO: 395829 - RNA, 22 nt, Human
aguacaacauuagaguaucuua

SEQ ID NO: 395830 - RNA, 22 nt, Human
caguccuuccuugccccuuggg

SEQ ID NO: 395831 - RNA, 22 nt, Human
uuuccaaagguggcaggaacaa

SEQ ID NO: 395832 - RNA, 22 nt, Human
uaauuuacuugcaaauaacaau

SEQ ID NO: 395833 - RNA, 18 nt, Human
ucauagaagugaaucaga

SEQ ID NO: 395834 - RNA, 22 nt, Human
aguaaaauuguauuggaaaaca

SEQ ID NO: 395835 - RNA, 22 nt, Human
uucaauacaaagaaaggaauuu

SEQ ID NO: 395836 - RNA, 20 nt, Human
gaaguccuuucacucuuccc

SEQ ID NO: 395837 - RNA, 22 nt, Human
uccauacauugaaauaccauuc

SEQ ID NO: 395838 - RNA, 22 nt, Human
cagauaaaggcuuacuaguagu

SEQ ID NO: 395839 - RNA, 22 nt, Human
aguguuuauauuauggaaauau

SEQ ID NO: 395840 - RNA, 22 nt, Human
uuugaagucaaagauugauucc

SEQ ID NO: 395841 - RNA, 22 nt, Human
uugguacaaaaguaacuguggu

SEQ ID NO: 395842 - RNA, 21 nt, Human
auuuccaaauaaggucacauu

SEQ ID NO: 395843 - RNA, 22 nt, Human
auggcuuaugaauaacaguagg

SEQ ID NO: 395844 - RNA, 22 nt, Human
uuagaaaaaacgucuucuagug

SEQ ID NO: 395845 - RNA, 22 nt, Human
aggaaaaauaaggcagcagggc

SEQ ID NO: 395846 - RNA, 22 nt, Human
uguucagcccucuauuaaucag

SEQ ID NO: 395847 - RNA, 22 nt, Human
caugauaauuguuaacaaagua

SEQ ID NO: 395848 - RNA, 22 nt, Human
cauuuacagugagaguuuuuac

SEQ ID NO: 395849 - RNA, 22 nt, Human
uaacagaagaaaacauauugga

SEQ ID NO: 395850 - RNA, 22 nt, Human
augaaauaucuugaagaaauuc

SEQ ID NO: 395851 - RNA, 22 nt, Human
aauuccaggaugcaggaggugc

SEQ ID NO: 395852 - RNA, 22 nt, Human
aaugccaacuuggauauacauu

SEQ ID NO: 395853 - RNA, 22 nt, Human
aaaacagacagccaguguagag

SEQ ID NO: 395854 - RNA, 22 nt, Human
cuuugaagauggcaaauuuaga

SEQ ID NO: 395855 - RNA, 23 nt, Human
ucagagaacucgggcagaugacc

SEQ ID NO: 395856 - RNA, 22 nt, Human
auauaauuguucugaaguguuu

SEQ ID NO: 395857 - RNA, 22 nt, Human
aaaucaguaaauguucauuaac

SEQ ID NO: 395858 - RNA, 22 nt, Human
ucugaagaacugaguaaacaug

SEQ ID NO: 395859 - RNA, 22 nt, Human
aggcuucuucuuccuauuuagu

SEQ ID NO: 395860 - RNA, 22 nt, Human
auuaaagaaacccagcauguga

SEQ ID NO: 395861 - RNA, 22 nt, Human
uagucaccuguugugugaugcc

SEQ ID NO: 395862 - RNA, 22 nt, Human
auaacaugagccagauugaaag

SEQ ID NO: 395863 - RNA, 18 nt, Human
gaaagccaugcagcagug

SEQ ID NO: 395864 - RNA, 22 nt, Human
augugcuuuauuaaguaaaaau

SEQ ID NO: 395865 - RNA, 22 nt, Human
aaagccagguugugugcaggaa

SEQ ID NO: 395866 - RNA, 22 nt, Human
guuaggcaugaguguguauuaa

SEQ ID NO: 395867 - RNA, 23 nt, Human
ggauuuaguggaugagcugagug

SEQ ID NO: 395868 - RNA, 22 nt, Human
auaaaaguucaagagaguacag

SEQ ID NO: 395869 - RNA, 22 nt, Human
gcacaauaauuuuuuuaagagg

SEQ ID NO: 395870 - RNA, 22 nt, Human
uagcagaaacuguuacagaagg

SEQ ID NO: 395871 - RNA, 22 nt, Human
aaaguccuguuaacuguuaaca

SEQ ID NO: 395872 - RNA, 22 nt, Human
aaagucauuggaauauuaauga

SEQ ID NO: 395873 - RNA, 22 nt, Human
aaaaauugcugagaacggaauu

SEQ ID NO: 395874 - RNA, 22 nt, Human
auuuccaggagaaaggauuuua

SEQ ID NO: 395875 - RNA, 22 nt, Human
auuccaaacgccucgcggacuu

SEQ ID NO: 395876 - RNA, 22 nt, Human
aaucaguguguaaaguggcugc

SEQ ID NO: 395877 - RNA, 22 nt, Human
uuuaaugauagcuguuucacau

SEQ ID NO: 395878 - RNA, 22 nt, Human
aauauuucugcagaaugguuuu

SEQ ID NO: 395879 - RNA, 22 nt, Human
uuugguccugagcaaaacuaug

SEQ ID NO: 395880 - RNA, 22 nt, Human
acaugucuguaauuauuuuagg

SEQ ID NO: 395881 - RNA, 22 nt, Human
ugaaacaagauccacagacuug

SEQ ID NO: 395882 - RNA, 22 nt, Human
gaaguccuccuaucuugcucuu

SEQ ID NO: 395883 - RNA, 22 nt, Human
gcuggauccugauucgucuuug

SEQ ID NO: 395884 - RNA, 22 nt, Human
auccaaacauguaccacacuaa

SEQ ID NO: 395885 - RNA, 22 nt, Human
caucagaaagaguccuggacuu

SEQ ID NO: 395886 - RNA, 22 nt, Human
gaguccuuuugugccacaggga

SEQ ID NO: 395887 - RNA, 22 nt, Human
cagaaacauguauaaaguugua

SEQ ID NO: 395888 - RNA, 22 nt, Human
uaaagcaguguugggucggacg

SEQ ID NO: 395889 - RNA, 22 nt, Human
auccuuaguuaagaacaggagu

SEQ ID NO: 395890 - RNA, 22 nt, Human
uuucaacguguaaucuuauuua

SEQ ID NO: 395891 - RNA, 22 nt, Human
cuucuuaaauuggauugcuauu

SEQ ID NO: 395892 - RNA, 22 nt, Human
uuaacacuugaacucuacaugu

SEQ ID NO: 395893 - RNA, 22 nt, Human
gaguccuucuggcuggcaggau

SEQ ID NO: 395894 - RNA, 22 nt, Human
aacagaauaguugauguacagu

SEQ ID NO: 395895 - RNA, 22 nt, Human
uguacaaugccagggaacacca

SEQ ID NO: 395896 - RNA, 20 nt, Human
ucuaauuaaaauugucuagu

SEQ ID NO: 395897 - RNA, 22 nt, Human
uuuaggcacaacuacucagcua

SEQ ID NO: 395898 - RNA, 22 nt, Human
ucuaaacacuaagucuugaugc

SEQ ID NO: 395899 - RNA, 22 nt, Human
caguccuuauuccuauauuccu

SEQ ID NO: 395900 - RNA, 22 nt, Human
uacuauaccauguaagauauga

SEQ ID NO: 395901 - RNA, 22 nt, Human
uacuagaaccucacaacaaucc

SEQ ID NO: 395902 - RNA, 22 nt, Human
aaugaacauauaaagagaucuu

SEQ ID NO: 395903 - RNA, 22 nt, Human
uuugaagauaaauauggagaaa

SEQ ID NO: 395904 - RNA, 22 nt, Human
uauggaaagggaguuuaauuug

SEQ ID NO: 395905 - RNA, 18 nt, Human
aauuuccauaugaauugc

SEQ ID NO: 395906 - RNA, 22 nt, Human
uggauuuaccacagggccacag

SEQ ID NO: 395907 - RNA, 22 nt, Human
uauacagauggaaagauacaca

SEQ ID NO: 395908 - RNA, 22 nt, Human
agaauuuccuaugagagauucc

SEQ ID NO: 395909 - RNA, 22 nt, Human
aucacaaaggucucagagcaca

SEQ ID NO: 395910 - RNA, 22 nt, Human
cacaauacuauuuuuaggucuu

SEQ ID NO: 395911 - RNA, 21 nt, Human
ucaguaaaccuaaagauugua

SEQ ID NO: 395912 - RNA, 22 nt, Human
caguccuugauccaauaguggg

SEQ ID NO: 395913 - RNA, 22 nt, Human
ggcauuuaauccaucugauuga

SEQ ID NO: 395914 - RNA, 22 nt, Human
aauaacagauuuucaagcugug

SEQ ID NO: 395915 - RNA, 22 nt, Human
gaagaaucaagcaguaauuugu

SEQ ID NO: 395916 - RNA, 22 nt, Human
aguaaacaguaucuuuaguguc

SEQ ID NO: 395917 - RNA, 22 nt, Human
uguggaaagucaaguuccagga

SEQ ID NO: 395918 - RNA, 22 nt, Human
ucagaaauagucuuuaaaauga

SEQ ID NO: 395919 - RNA, 22 nt, Human
ucauaaaguuaucaccaaaucc

SEQ ID NO: 395920 - RNA, 22 nt, Human
aaugaacagauacacauaggca

SEQ ID NO: 395921 - RNA, 22 nt, Human
ugcagagagauauggcaagagg

SEQ ID NO: 395922 - RNA, 22 nt, Human
uucagagaagcaaaggcagauu

SEQ ID NO: 395923 - RNA, 22 nt, Human
aauaauuacccaucuuuuugua

SEQ ID NO: 395924 - RNA, 22 nt, Human
gggauuuaguaggauaguauac

SEQ ID NO: 395925 - RNA, 22 nt, Human
caucagaaaccuugaggaaacu

SEQ ID NO: 395926 - RNA, 22 nt, Human
aaagucauguaaugauaugauu

SEQ ID NO: 395927 - RNA, 22 nt, Human
cuggcuuuaacccuacaaaccu

SEQ ID NO: 395928 - RNA, 22 nt, Human
uugaauaauaugcuucguucuc

SEQ ID NO: 395929 - RNA, 22 nt, Human
gcacaauaauucuuguuuugcu

SEQ ID NO: 395930 - RNA, 22 nt, Human
caucagaauuacuuggggagcu

SEQ ID NO: 395931 - RNA, 22 nt, Human
uaaguccuggcugguuugaagc

SEQ ID NO: 395932 - RNA, 22 nt, Human
gaaugaauucagcacauggaau

SEQ ID NO: 395933 - RNA, 22 nt, Human
uuuaggcauacuuuugggagaa

SEQ ID NO: 395934 - RNA, 22 nt, Human
auccuuagaagggagugaggac

SEQ ID NO: 395935 - RNA, 22 nt, Human
uuacagaaugugccauuugguc

SEQ ID NO: 395936 - RNA, 22 nt, Human
guuaauauuuaccugucaagaa

SEQ ID NO: 395937 - RNA, 22 nt, Human
cugaaaggguuacauaguaagu

SEQ ID NO: 395938 - RNA, 22 nt, Human
uuagaaaugauuucaccucuuu

SEQ ID NO: 395939 - RNA, 22 nt, Human
ucagccagcaucagcuaagugc

SEQ ID NO: 395940 - RNA, 16 nt, Human
uuuccaaagggcagcu

SEQ ID NO: 395941 - RNA, 22 nt, Human
caauuucagguggauagguuuu

SEQ ID NO: 395942 - RNA, 22 nt, Human
ugaaacaaugugaaguugcuga

SEQ ID NO: 395943 - RNA, 22 nt, Human
auguucaaacaaguuaaugcca

SEQ ID NO: 395944 - RNA, 22 nt, Human
agcauuuauuucuuagaaauug

SEQ ID NO: 395945 - RNA, 21 nt, Human
auucagaguaauucaucuuua

SEQ ID NO: 395946 - RNA, 22 nt, Human
acagauuuuugguaaauaauuu

SEQ ID NO: 395947 - RNA, 22 nt, Human
aaaacuuucagggauacagaaa

SEQ ID NO: 395948 - RNA, 22 nt, Human
ugaaauaggaaacagauguuuc

SEQ ID NO: 395949 - RNA, 22 nt, Human
acuuauuagcugugugaccuug

SEQ ID NO: 395950 - RNA, 22 nt, Human
aacuuuguguguuuaauauggc

SEQ ID NO: 395951 - RNA, 22 nt, Human
aaucaaaaccuacagagguaau

SEQ ID NO: 395952 - RNA, 22 nt, Human
aaagaaggaugggagaaauccu

SEQ ID NO: 395953 - RNA, 22 nt, Human
ucuauacacacaaagaaugcuu

SEQ ID NO: 395954 - RNA, 18 nt, Human
uaagucauuuugccagca

SEQ ID NO: 395955 - RNA, 22 nt, Human
cucuacucuuaacacagcuagg

SEQ ID NO: 395956 - RNA, 22 nt, Human
gcuggauccacaaauaacuuug

SEQ ID NO: 395957 - RNA, 22 nt, Human
uuuucauuuuuguagaugcaag

SEQ ID NO: 395958 - RNA, 22 nt, Human
ugcuuaauaggaguugaacauu

SEQ ID NO: 395959 - RNA, 22 nt, Human
uauacaaugaguacauucuggg

SEQ ID NO: 395960 - RNA, 22 nt, Human
gauuucaagcccccagagauuc

SEQ ID NO: 395961 - RNA, 22 nt, Human
uagaaacaucagcuaaccaaaa

SEQ ID NO: 395962 - RNA, 20 nt, Human
aaguuacauuguauuguacc

SEQ ID NO: 395963 - RNA, 22 nt, Human
ucaaaaguggccuguaaaaucu

SEQ ID NO: 395964 - RNA, 22 nt, Human
gccagucugcucccacaaguuc

SEQ ID NO: 395965 - RNA, 22 nt, Human
cauaagaauauuccauccuuug

SEQ ID NO: 395966 - RNA, 22 nt, Human
ucaauaaaauuguuuuccuauc

SEQ ID NO: 395967 - RNA, 22 nt, Human
aaucagaacuccuaccacagag

SEQ ID NO: 395968 - RNA, 22 nt, Human
aaaguccugacugcaggggaug

SEQ ID NO: 395969 - RNA, 22 nt, Human
aaaggcaugauuaauucugugu

SEQ ID NO: 395970 - RNA, 22 nt, Human
gcaggaaagguugagacuuugc

SEQ ID NO: 395971 - RNA, 22 nt, Human
augcuuaagcucaguuauauau

SEQ ID NO: 395972 - RNA, 22 nt, Human
ucuauacaugugcacacacauc

SEQ ID NO: 395973 - RNA, 22 nt, Human
auacagaaaaugaugcagaguu

SEQ ID NO: 395974 - RNA, 22 nt, Human
gcuggaucauauggugguucua

SEQ ID NO: 395975 - RNA, 22 nt, Human
auaacaugaccugugcuucaca

SEQ ID NO: 395976 - RNA, 22 nt, Human
cauuuacauaacaguaacgcug

SEQ ID NO: 395977 - RNA, 22 nt, Human
auuucacaucuaucucagauuu

SEQ ID NO: 395978 - RNA, 22 nt, Human
uggcauuugcucccuuguguuc

SEQ ID NO: 395979 - RNA, 22 nt, Human
uucaacuuuggagauuuaauaa

SEQ ID NO: 395980 - RNA, 22 nt, Human
ucccaaagcuacucuucugacu

SEQ ID NO: 395981 - RNA, 22 nt, Human
aggcagaccaugaaucaugacc

SEQ ID NO: 395982 - RNA, 22 nt, Human
uucaaagcugcagacuccuggg

SEQ ID NO: 395983 - RNA, 22 nt, Human
auucuaacacaugcucuaagaa

SEQ ID NO: 395984 - RNA, 22 nt, Human
acaagccaauuacugugccagg

SEQ ID NO: 395985 - RNA, 22 nt, Human
uacagaaaucacaucgcuuuga

SEQ ID NO: 395986 - RNA, 22 nt, Human
uucagaaagguaaauggauuuc

SEQ ID NO: 395987 - RNA, 18 nt, Human
aguccuuacgaggcuaua

SEQ ID NO: 395988 - RNA, 22 nt, Human
uuuccaaaggaggaaccaguuu

SEQ ID NO: 395989 - RNA, 19 nt, Human
aaaauugcguauuuugagg

SEQ ID NO: 395990 - RNA, 22 nt, Human
caauuucacuaauaauauuuac

SEQ ID NO: 395991 - RNA, 22 nt, Human
agauuuacuggagucuuuggug

SEQ ID NO: 395992 - RNA, 22 nt, Human
auuucauacuaaggcucaaaaa

SEQ ID NO: 395993 - RNA, 22 nt, Human
cauuuacagcagacugaugaaa

SEQ ID NO: 395994 - RNA, 22 nt, Human
ugaauaauuaugggaguccuaa

SEQ ID NO: 395995 - RNA, 22 nt, Human
augugaaaaauuucuuauuaca

SEQ ID NO: 395996 - RNA, 22 nt, Human
auggcuuaugguaaauauuucu

SEQ ID NO: 395997 - RNA, 22 nt, Human
aucuaacacuguaaacugucuu

SEQ ID NO: 395998 - RNA, 22 nt, Human
cagaauaaagguacaauugagu

SEQ ID NO: 395999 - RNA, 22 nt, Human
guccaaauuuuucacauguaga

SEQ ID NO: 396000 - RNA, 22 nt, Human
uaucagaacacagccacagcca

SEQ ID NO: 396001 - RNA, 22 nt, Human
uacacauguuuggcaaguaugu

SEQ ID NO: 396002 - RNA, 22 nt, Human
uguaaauaauuccuaggcuuuu

SEQ ID NO: 396003 - RNA, 22 nt, Human
ccaguacugucuccaauauucc

SEQ ID NO: 396004 - RNA, 22 nt, Human
ggagaaugauauauagcucagu

SEQ ID NO: 396005 - RNA, 22 nt, Human
ggcauuuaucuaauauaguuua

SEQ ID NO: 396006 - RNA, 22 nt, Human
ugucauaacuuagugacaaauc

SEQ ID NO: 396007 - RNA, 22 nt, Human
cuuaauuacuguccaauaugca

SEQ ID NO: 396008 - RNA, 22 nt, Human
cauagcuuagggguuaaacuca

SEQ ID NO: 396009 - RNA, 22 nt, Human
aauggcuucugaagcacacuuu

SEQ ID NO: 396010 - RNA, 22 nt, Human
caaugaaauugagauccagaga

SEQ ID NO: 396011 - RNA, 22 nt, Human
uuuccaaaguugccauaagcuu

SEQ ID NO: 396012 - RNA, 22 nt, Human
uauaauuaguaaauggcagauu

SEQ ID NO: 396013 - RNA, 22 nt, Human
uaaacagaaugcguaagaagug

SEQ ID NO: 396014 - RNA, 22 nt, Human
aauucacaaaaguuagauccau

SEQ ID NO: 396015 - RNA, 22 nt, Human
aaagucaucagaaccuuccaga

SEQ ID NO: 396016 - RNA, 22 nt, Human
cuacagaaucuaccucaagcca

SEQ ID NO: 396017 - RNA, 22 nt, Human
acauaaguuauggauaaaaugu

SEQ ID NO: 396018 - RNA, 22 nt, Human
ugucaccaguuccaggaaauaa

SEQ ID NO: 396019 - RNA, 22 nt, Human
gugaauaauuuuuuaguauaag

SEQ ID NO: 396020 - RNA, 22 nt, Human
gguacaauucugggguaugcuc

SEQ ID NO: 396021 - RNA, 20 nt, Human
uuccaacucacaucucuaca

SEQ ID NO: 396022 - RNA, 22 nt, Human
uaugaacauguucauugacuua

SEQ ID NO: 396023 - RNA, 22 nt, Human
uguccuuauauuguggaagggg

SEQ ID NO: 396024 - RNA, 22 nt, Human
cucuaauccuuugucccugggu

SEQ ID NO: 396025 - RNA, 22 nt, Human
uguauacauuuaacuagauaga

SEQ ID NO: 396026 - RNA, 22 nt, Human
uauacagauuaacagauuuaaa

SEQ ID NO: 396027 - RNA, 22 nt, Human
cuacagaaaccuuuuucauaca

SEQ ID NO: 396028 - RNA, 22 nt, Human
ccuuuaauuuacaauguuaauu

SEQ ID NO: 396029 - RNA, 22 nt, Human
ccagaucuucuuuucagugucu

SEQ ID NO: 396030 - RNA, 22 nt, Human
cagaauguagaucaucaucaag

SEQ ID NO: 396031 - RNA, 22 nt, Human
auggcauuugaaucugucuuuu

SEQ ID NO: 396032 - RNA, 22 nt, Human
uguaaauaguuagcuugccucu

SEQ ID NO: 396033 - RNA, 22 nt, Human
aauacauguuuucuacuauucu

SEQ ID NO: 396034 - RNA, 22 nt, Human
uauauguaagcuauguaagagu

SEQ ID NO: 396035 - RNA, 22 nt, Human
uaacagaagaugaaacuucuuu

SEQ ID NO: 396036 - RNA, 22 nt, Human
uuacagaaguuucagcguuuua

SEQ ID NO: 396037 - RNA, 22 nt, Human
cugaauaaagcccucgcgcgcu

SEQ ID NO: 396038 - RNA, 22 nt, Human
auguuaaauaaucccuuaaagc

SEQ ID NO: 396039 - RNA, 22 nt, Human
caaaagucuguccuuuaacuuc

SEQ ID NO: 396040 - RNA, 22 nt, Human
uagucaccuuuggcaccugcaa

SEQ ID NO: 396041 - RNA, 22 nt, Human
cacauacuuguguguacauaug

SEQ ID NO: 396042 - RNA, 22 nt, Human
ucaguuuccucaucuacaaaag

SEQ ID NO: 396043 - RNA, 22 nt, Human
guauuugcaaaucuaaaagaga

SEQ ID NO: 396044 - RNA, 22 nt, Human
aaugccuuuccacuggguauca

SEQ ID NO: 396045 - RNA, 22 nt, Human
uauuucaacguaugaaaagcug

SEQ ID NO: 396046 - RNA, 22 nt, Human
ucagcauaucuugagcuucaug

SEQ ID NO: 396047 - RNA, 22 nt, Human
uuucagaaccgcuaaaauaaau

SEQ ID NO: 396048 - RNA, 22 nt, Human
uucccaauauucugcuuuuaug

SEQ ID NO: 396049 - RNA, 22 nt, Human
uuuaggcacagaguugagggac

SEQ ID NO: 396050 - RNA, 22 nt, Human
aaaaguguucaggaagaauaau

SEQ ID NO: 396051 - RNA, 22 nt, Human
uguuuauaccuugguauaacca

SEQ ID NO: 396052 - RNA, 22 nt, Human
augaaaauguacauguguauaa

SEQ ID NO: 396053 - RNA, 22 nt, Human
auauaaagaaguggaaaaugag

SEQ ID NO: 396054 - RNA, 22 nt, Human
auggccuuagugaugauuaaua

SEQ ID NO: 396055 - RNA, 22 nt, Human
auguuaaaugguuuauuauuaa

SEQ ID NO: 396056 - RNA, 22 nt, Human
auguauccuuauacacauuuau

SEQ ID NO: 396057 - RNA, 22 nt, Human
cugaauaauguucucuuguaug

SEQ ID NO: 396058 - RNA, 22 nt, Human
auauauaaccuggauaaggcuu

SEQ ID NO: 396059 - RNA, 22 nt, Human
uacaugaaguugucuaaacugg

SEQ ID NO: 396060 - RNA, 22 nt, Human
auuuccagacuuuuuccaggaa

SEQ ID NO: 396061 - RNA, 19 nt, Human
uuucagacucaucuccagc

SEQ ID NO: 396062 - RNA, 22 nt, Human
gccuaauaacuagcuguguaac

SEQ ID NO: 396063 - RNA, 21 nt, Human
auggauuuaaacaggccacaa

SEQ ID NO: 396064 - RNA, 22 nt, Human
uguacaauagcuauuaucucca

SEQ ID NO: 396065 - RNA, 22 nt, Human
gauuuacagguuagguccugua

SEQ ID NO: 396066 - RNA, 22 nt, Human
aucauaaaauugcaccauuucu

SEQ ID NO: 396067 - RNA, 22 nt, Human
ucagccaguuuguuuauuccgg

SEQ ID NO: 396068 - RNA, 22 nt, Human
uauccaaaggaacaaucacagc

SEQ ID NO: 396069 - RNA, 22 nt, Human
ucacacauucuagguauguuga

SEQ ID NO: 396070 - RNA, 22 nt, Human
uaugaagaaaccuauccucuag

SEQ ID NO: 396071 - RNA, 22 nt, Human
auucuucacaaauauauagaag

SEQ ID NO: 396072 - RNA, 23 nt, Human
aaaugacauaugguuucugaagg

SEQ ID NO: 396073 - RNA, 22 nt, Human
gguacaaugguucauuuuaugu

SEQ ID NO: 396074 - RNA, 21 nt, Human
cuacagaaucgagcauucugg

SEQ ID NO: 396075 - RNA, 22 nt, Human
acuuugaaucucagauaaccaa

SEQ ID NO: 396076 - RNA, 22 nt, Human
ucauagaagcaccagaagauau

SEQ ID NO: 396077 - RNA, 22 nt, Human
aagcaauagcaacaacuuuaca

SEQ ID NO: 396078 - RNA, 22 nt, Human
gaauuucagaucagagaccauu

SEQ ID NO: 396079 - RNA, 21 nt, Human
uuucagaccuaucuuugaagg

SEQ ID NO: 396080 - RNA, 19 nt, Human
agauuuaccucauauaguu

SEQ ID NO: 396081 - RNA, 22 nt, Human
augguuuuguccucuuugguuc

SEQ ID NO: 396082 - RNA, 22 nt, Human
aaaucagugcucauuugaaagg

SEQ ID NO: 396083 - RNA, 22 nt, Human
augaacaauaaaauagaucaca

SEQ ID NO: 396084 - RNA, 22 nt, Human
uuacauaacgguaugaaaaaug

SEQ ID NO: 396085 - RNA, 22 nt, Human
aaaaagguugauccagauuagg

SEQ ID NO: 396086 - RNA, 22 nt, Human
uuacagaagugaaggccuuuaa

SEQ ID NO: 396087 - RNA, 22 nt, Human
acuuuuaaggggccuugauuua

SEQ ID NO: 396088 - RNA, 22 nt, Human
guuccaaaguuagaguguauug

SEQ ID NO: 396089 - RNA, 22 nt, Human
cuggacucugcagagaaaagua

SEQ ID NO: 396090 - RNA, 22 nt, Human
auuaggcauuauggggauaagg

SEQ ID NO: 396091 - RNA, 22 nt, Human
caauuuuuguacuuauaguacu

SEQ ID NO: 396092 - RNA, 22 nt, Human
aaaucagucccucuuggaauuu

SEQ ID NO: 396093 - RNA, 22 nt, Human
aaucagaaucaguugacacagc

SEQ ID NO: 396094 - RNA, 22 nt, Human
auagaauucuuugaaauuuaug

SEQ ID NO: 396095 - RNA, 21 nt, Human
aaaguguucagaccaguucug

SEQ ID NO: 396096 - RNA, 22 nt, Human
caucagaaccaguggggacauu

SEQ ID NO: 396097 - RNA, 22 nt, Human
uugguacagaugagguauucuc

SEQ ID NO: 396098 - RNA, 22 nt, Human
gcagagacuaguagugcagacu

SEQ ID NO: 396099 - RNA, 22 nt, Human
auaaagauuuuuaggcauuucu

SEQ ID NO: 396100 - RNA, 22 nt, Human
aaacugauaaaauaaguacauu

SEQ ID NO: 396101 - RNA, 22 nt, Human
ccaguuuaagacuuaucucaau

SEQ ID NO: 396102 - RNA, 22 nt, Human
uuugaauaaucacugggcauua

SEQ ID NO: 396103 - RNA, 22 nt, Human
uuacagaacugcccuaguuggc

SEQ ID NO: 396104 - RNA, 22 nt, Human
acaacuuuucuaucauguggaa

SEQ ID NO: 396105 - RNA, 22 nt, Human
caauuucauuaauagauauaga

SEQ ID NO: 396106 - RNA, 21 nt, Human
ugaucauuuguguaaaggaga

SEQ ID NO: 396107 - RNA, 22 nt, Human
ugaagaauaagauagauggagc

SEQ ID NO: 396108 - RNA, 22 nt, Human
cauagaaaucaggugagaaucu

SEQ ID NO: 396109 - RNA, 22 nt, Human
ggauuuacaaguuuaacucuca

SEQ ID NO: 396110 - RNA, 22 nt, Human
ucuggaucaccacuucugccuc

SEQ ID NO: 396111 - RNA, 22 nt, Human
auacacagcgaugagaggaggc

SEQ ID NO: 396112 - RNA, 22 nt, Human
auaugaaaagaagucaccauug

SEQ ID NO: 396113 - RNA, 22 nt, Human
uuuauuauucucuggagaaugu

SEQ ID NO: 396114 - RNA, 22 nt, Human
aucagaaaucuaggauucagaa

SEQ ID NO: 396115 - RNA, 22 nt, Human
ugcuuuaaccaucuuguuugga

SEQ ID NO: 396116 - RNA, 18 nt, Human
uauaaacacacuuagguu

SEQ ID NO: 396117 - RNA, 23 nt, Human
auauggcuguuguguguuaacau

SEQ ID NO: 396118 - RNA, 22 nt, Human
ugagauuuguuuuauaaaauag

SEQ ID NO: 396119 - RNA, 22 nt, Human
ugucaccacauuugucaauauc

SEQ ID NO: 396120 - RNA, 22 nt, Human
caaacauucaaguacaagucuu

SEQ ID NO: 396121 - RNA, 22 nt, Human
ggcaccagccaccuauuucuag

SEQ ID NO: 396122 - RNA, 22 nt, Human
ucuggaucgccggcgccugggc

SEQ ID NO: 396123 - RNA, 22 nt, Human
uccaauauggauaaaaggggcc

SEQ ID NO: 396124 - RNA, 22 nt, Human
ucagaauugcagggagggcagg

SEQ ID NO: 396125 - RNA, 22 nt, Human
auggcuuuguuccaauaaaacu

SEQ ID NO: 396126 - RNA, 22 nt, Human
aauguuaauguguuugcuuaug

SEQ ID NO: 396127 - RNA, 22 nt, Human
acauuccaaaaacuagcagaua

SEQ ID NO: 396128 - RNA, 22 nt, Human
gauuucaaguaucuugggcgag

SEQ ID NO: 396129 - RNA, 19 nt, Human
uggcauuuggaggcaaccu

SEQ ID NO: 396130 - RNA, 22 nt, Human
caacauuugaguaaagaaaugg

SEQ ID NO: 396131 - RNA, 23 nt, Human
caauuucauaugauucuaccuaa

SEQ ID NO: 396132 - RNA, 22 nt, Human
aguccagugaacuguaaauagg

SEQ ID NO: 396133 - RNA, 22 nt, Human
uaaagaucuuaggaagauuuuc

SEQ ID NO: 396134 - RNA, 22 nt, Human
ucagagaaauaauugcugaguu

SEQ ID NO: 396135 - RNA, 22 nt, Human
ucuuuaauaucugccccagagc

SEQ ID NO: 396136 - RNA, 22 nt, Human
agauuucagaugcucggcaguu

SEQ ID NO: 396137 - RNA, 22 nt, Human
uuccuuagggucagccagaucu

SEQ ID NO: 396138 - RNA, 22 nt, Human
ugcuauacauguacauauuagu

SEQ ID NO: 396139 - RNA, 22 nt, Human
gagauuuagcugcuuaacuccu

SEQ ID NO: 396140 - RNA, 23 nt, Human
ucaucaaacagcugcucaagaaa

SEQ ID NO: 396141 - RNA, 22 nt, Human
auccuuagguggugcaucaggg

SEQ ID NO: 396142 - RNA, 22 nt, Human
acagguuugucugauguaauga

SEQ ID NO: 396143 - RNA, 22 nt, Human
auuccaaagccugaauaaugga

SEQ ID NO: 396144 - RNA, 22 nt, Human
ucaccgucgggggucgcugucu

SEQ ID NO: 396145 - RNA, 22 nt, Human
aaaauacuguggaguguugaaa

SEQ ID NO: 396146 - RNA, 22 nt, Human
ucagccagaggcuucuugguuu

SEQ ID NO: 396147 - RNA, 22 nt, Human
ucagccuacacuccaacagcau

SEQ ID NO: 396148 - RNA, 22 nt, Human
caugcuuauucauucugcuaac

SEQ ID NO: 396149 - RNA, 22 nt, Human
gauuuauaaagguugcacugga

SEQ ID NO: 396150 - RNA, 22 nt, Human
cuggaucaugcauugcuugucc

SEQ ID NO: 396151 - RNA, 22 nt, Human
ugaaauagucuaaaaaaccaga

SEQ ID NO: 396152 - RNA, 22 nt, Human
ucagaauugucuggggaauguu

SEQ ID NO: 396153 - RNA, 22 nt, Human
uaguacaguuuaaauauuaaua

SEQ ID NO: 396154 - RNA, 22 nt, Human
caggaaacauaugugcuugagg

SEQ ID NO: 396155 - RNA, 22 nt, Human
uguacaaucuuggucccuuuau

SEQ ID NO: 396156 - RNA, 22 nt, Human
uuuaggcagcacgggcagcccu

SEQ ID NO: 396157 - RNA, 22 nt, Human
aauaaaaugaacugguagaguu

SEQ ID NO: 396158 - RNA, 22 nt, Human
aaacaaacaauuaguugugugg

SEQ ID NO: 396159 - RNA, 22 nt, Human
auaauucaugggccuuucaccu

SEQ ID NO: 396160 - RNA, 22 nt, Human
uaauuucagugggcucugggcu

SEQ ID NO: 396161 - RNA, 22 nt, Human
ugcuuaauauugugauguaaua

SEQ ID NO: 396162 - RNA, 22 nt, Human
uggcuuuacaucaaauugagua

SEQ ID NO: 396163 - RNA, 22 nt, Human
aguacaauuauauuuagauggu

SEQ ID NO: 396164 - RNA, 22 nt, Human
uuuaggcagaagcccugcugau

SEQ ID NO: 396165 - RNA, 18 nt, Human
agaugaaagcaaaugaca

SEQ ID NO: 396166 - RNA, 22 nt, Human
agauuggaucaagcagcaguug

SEQ ID NO: 396167 - RNA, 22 nt, Human
acaugcuuccaaauuauguugg

SEQ ID NO: 396168 - RNA, 22 nt, Human
uguacaauguggccaguguuaa

SEQ ID NO: 396169 - RNA, 22 nt, Human
acaaaauuaugaagaggccuug

SEQ ID NO: 396170 - RNA, 22 nt, Human
ccagaauucagaaagggcauaa

SEQ ID NO: 396171 - RNA, 22 nt, Human
gaucugaaucaauagaauaacu

SEQ ID NO: 396172 - RNA, 22 nt, Human
ucauacacaagagcauguaaca

SEQ ID NO: 396173 - RNA, 22 nt, Human
aagaaacaaccacugcucuccu

SEQ ID NO: 396174 - RNA, 17 nt, Human
uccauacaauucucucu

SEQ ID NO: 396175 - RNA, 22 nt, Human
uauccaaaguuucucagaaacu

SEQ ID NO: 396176 - RNA, 22 nt, Human
agagacaaugccaaugcacacg

SEQ ID NO: 396177 - RNA, 22 nt, Human
cauggcuuuguucauauaauuu

SEQ ID NO: 396178 - RNA, 22 nt, Human
cuuccaaagcacuuuauggacc

SEQ ID NO: 396179 - RNA, 22 nt, Human
acuauacaccaaaauauuaagg

SEQ ID NO: 396180 - RNA, 22 nt, Human
uuuaggcaagaacucacugaga

SEQ ID NO: 396181 - RNA, 19 nt, Human
cagaaauagcgaaguguaa

SEQ ID NO: 396182 - RNA, 22 nt, Human
augcuaaauggccaguaccaaa

SEQ ID NO: 396183 - RNA, 22 nt, Human
aaucagaauuuauugaaucuuu

SEQ ID NO: 396184 - RNA, 22 nt, Human
caauuucaagauucuguucuuu

SEQ ID NO: 396185 - RNA, 22 nt, Human
ccuggaucuccucuauucauau

SEQ ID NO: 396186 - RNA, 22 nt, Human
caguccuuggcaaguucucagu

SEQ ID NO: 396187 - RNA, 22 nt, Human
aucagcuuuucucaucagaaau

SEQ ID NO: 396188 - RNA, 22 nt, Human
ugacuucaagguucagcaccuu

SEQ ID NO: 396189 - RNA, 22 nt, Human
agccaacuaauuaaacaacuuu

SEQ ID NO: 396190 - RNA, 22 nt, Human
gcauaauauacaugcuugaucc

SEQ ID NO: 396191 - RNA, 22 nt, Human
cuuaaagaugucaaggcuguuu

SEQ ID NO: 396192 - RNA, 22 nt, Human
gaguccuuccagcaggcauuua

SEQ ID NO: 396193 - RNA, 22 nt, Human
agaauaauacugaaaugcugaa

SEQ ID NO: 396194 - RNA, 22 nt, Human
gccccagcguggcuguguuagg

SEQ ID NO: 396195 - RNA, 22 nt, Human
ugaauaaucuuggguauuaaua

SEQ ID NO: 396196 - RNA, 22 nt, Human
uaggaagaugaguaucaacuug

SEQ ID NO: 396197 - RNA, 22 nt, Human
uuuuaagaugcuaguauuucag

SEQ ID NO: 396198 - RNA, 22 nt, Human
auacuguaauaccuaaaugaac

SEQ ID NO: 396199 - RNA, 22 nt, Human
aagacagugaucucugagagau

SEQ ID NO: 396200 - RNA, 22 nt, Human
ucauaaaguuacccaaauuuua

SEQ ID NO: 396201 - RNA, 20 nt, Human
uuuaggcauuacucuuuugu

SEQ ID NO: 396202 - RNA, 22 nt, Human
aaagacauuagcuuagauguca

SEQ ID NO: 396203 - RNA, 22 nt, Human
cucuaacacuguaaugcuuucu

SEQ ID NO: 396204 - RNA, 22 nt, Human
aauauaaugcuguuuuaugcca

SEQ ID NO: 396205 - RNA, 22 nt, Human
uggcuuuauaaauccacugguu

SEQ ID NO: 396206 - RNA, 20 nt, Human
cuguaucagguuacaaagua

SEQ ID NO: 396207 - RNA, 22 nt, Human
cuaauuauguuguuauaaucaa

SEQ ID NO: 396208 - RNA, 22 nt, Human
ccagauaaggcuuuuuaaaagc

SEQ ID NO: 396209 - RNA, 22 nt, Human
gcaaaauuaaacuuagcaucau

SEQ ID NO: 396210 - RNA, 22 nt, Human
uaaagcacgucuauuuaaugau

SEQ ID NO: 396211 - RNA, 22 nt, Human
aguccuuaugagaugcugccuu

SEQ ID NO: 396212 - RNA, 22 nt, Human
uuaauaaaguaugaauuggaaa

SEQ ID NO: 396213 - RNA, 22 nt, Human
uuauuccauucaguucaacaag

SEQ ID NO: 396214 - RNA, 22 nt, Human
cauggcuuuguucuguuagaug

SEQ ID NO: 396215 - RNA, 22 nt, Human
aaauuucaagcaaaguagcuau

SEQ ID NO: 396216 - RNA, 19 nt, Human
ugcugaaguugucagucug

SEQ ID NO: 396217 - RNA, 22 nt, Human
ucagccaggccaccuucagcuu

SEQ ID NO: 396218 - RNA, 22 nt, Human
cuuaauuuaaaauaguucaggc

SEQ ID NO: 396219 - RNA, 22 nt, Human
uauggcuugucuuuauaccagg

SEQ ID NO: 396220 - RNA, 22 nt, Human
agagauucauguuuacuguagg

SEQ ID NO: 396221 - RNA, 22 nt, Human
agaauuucuggaagauugcaag

SEQ ID NO: 396222 - RNA, 22 nt, Human
ugcuuauucuuuccacaauuca

SEQ ID NO: 396223 - RNA, 22 nt, Human
uccuuguugcugcagucaccug

SEQ ID NO: 396224 - RNA, 22 nt, Human
acuuuagaccaucuuccacagu

SEQ ID NO: 396225 - RNA, 22 nt, Human
aaauagcagccuuuaguuaaca

SEQ ID NO: 396226 - RNA, 22 nt, Human
uuucaacuuguuugcuuccaua

SEQ ID NO: 396227 - RNA, 22 nt, Human
uaagaaacccaggaauuucuua

SEQ ID NO: 396228 - RNA, 22 nt, Human
augaacaagagagggaagauuc

SEQ ID NO: 396229 - RNA, 17 nt, Human
ugaaaucagcacccagg

SEQ ID NO: 396230 - RNA, 22 nt, Human
aaaucucaguguucuaagcauu

SEQ ID NO: 396231 - RNA, 22 nt, Human
aagcauuugugaaauucagaug

SEQ ID NO: 396232 - RNA, 22 nt, Human
ugcaggaacauagguuccuugg

SEQ ID NO: 396233 - RNA, 22 nt, Human
ccaauacacuuuauagaagaaa

SEQ ID NO: 396234 - RNA, 22 nt, Human
uagauuuaagacccugaauuug

SEQ ID NO: 396235 - RNA, 22 nt, Human
uuuuaugugcuggacuggcagu

SEQ ID NO: 396236 - RNA, 22 nt, Human
uaaucuaccacuauugcaauau

SEQ ID NO: 396237 - RNA, 22 nt, Human
uacacauguauuuauguguaca

SEQ ID NO: 396238 - RNA, 21 nt, Human
aaauacagaugcaaaucuguu

SEQ ID NO: 396239 - RNA, 17 nt, Human
cuguuaauucauuuccc

SEQ ID NO: 396240 - RNA, 22 nt, Human
uaaaaugcacagcaguugaaag

SEQ ID NO: 396241 - RNA, 22 nt, Human
aauacaagauuuauaguuguuu

SEQ ID NO: 396242 - RNA, 22 nt, Human
gauaucauaucagacaaccucu

SEQ ID NO: 396243 - RNA, 22 nt, Human
uguucacaagaugucuguggcu

SEQ ID NO: 396244 - RNA, 19 nt, Human
uacuaaacaugcauauugg

SEQ ID NO: 396245 - RNA, 22 nt, Human
agauaaugaaugccaugacauu

SEQ ID NO: 396246 - RNA, 22 nt, Human
guuauaaaugacugcaaaaguu

SEQ ID NO: 396247 - RNA, 22 nt, Human
acacaagauuguguauugaauu

SEQ ID NO: 396248 - RNA, 22 nt, Human
aucuaacagcaacaccagaaua

SEQ ID NO: 396249 - RNA, 22 nt, Human
ugaagaaucagauuggccugcg

SEQ ID NO: 396250 - RNA, 22 nt, Human
aaguccuuaggaagcagucguu

SEQ ID NO: 396251 - RNA, 22 nt, Human
uaaagacaauaggaaaguuguu

SEQ ID NO: 396252 - RNA, 22 nt, Human
aucuaaaaggagcucuuuaucu

SEQ ID NO: 396253 - RNA, 22 nt, Human
aguaaacauagaauguucuucc

SEQ ID NO: 396254 - RNA, 22 nt, Human
gcagggcagaccuccagccuau

SEQ ID NO: 396255 - RNA, 22 nt, Human
aaugccuucaaguaucugagga

SEQ ID NO: 396256 - RNA, 22 nt, Human
uguaacaauuucuuacuauugu

SEQ ID NO: 396257 - RNA, 22 nt, Human
cauauaauguuugaagaugugg

SEQ ID NO: 396258 - RNA, 22 nt, Human
uugaucaucuaagaguaauagu

SEQ ID NO: 396259 - RNA, 22 nt, Human
cuaucaaacagccauuaauaua

SEQ ID NO: 396260 - RNA, 23 nt, Human
agaucugauguuaccaagaauug

SEQ ID NO: 396261 - RNA, 22 nt, Human
ugaagaaucccagggaauuugg

SEQ ID NO: 396262 - RNA, 22 nt, Human
ggcgcacaaugugcagguuugu

SEQ ID NO: 396263 - RNA, 22 nt, Human
aaugcuuauaccuaaugaucuu

SEQ ID NO: 396264 - RNA, 22 nt, Human
augaauaaacaggugccucuuc

SEQ ID NO: 396265 - RNA, 22 nt, Human
acuucacacagcaaauuuaucu

SEQ ID NO: 396266 - RNA, 22 nt, Human
agcauuuagucuuuauugcagc

SEQ ID NO: 396267 - RNA, 22 nt, Human
aauugagugcagccagcccagu

SEQ ID NO: 396268 - RNA, 22 nt, Human
ugguuuuagaugccuuuacugc

SEQ ID NO: 396269 - RNA, 22 nt, Human
gucaaacagccuccuguucuaa

SEQ ID NO: 396270 - RNA, 22 nt, Human
gcugcaggcauuuuccugggca

SEQ ID NO: 396271 - RNA, 22 nt, Human
ucaaaauuaaaccaacguccag

SEQ ID NO: 396272 - RNA, 22 nt, Human
gucuaacaagcauuaggaaccc

SEQ ID NO: 396273 - RNA, 22 nt, Human
aauuaaaugacaggggaagaug

SEQ ID NO: 396274 - RNA, 22 nt, Human
uaagaaguacaaaaauuuucug

SEQ ID NO: 396275 - RNA, 22 nt, Human
uuguuaaaaauagauuuccagg

SEQ ID NO: 396276 - RNA, 22 nt, Human
caaguccuaaauguauuuguug

SEQ ID NO: 396277 - RNA, 22 nt, Human
caugcuuuuuucuaguauaaau

SEQ ID NO: 396278 - RNA, 22 nt, Human
auuaugcugguuuacacauuuu

SEQ ID NO: 396279 - RNA, 22 nt, Human
uuccuuaguuauuugguccccu

SEQ ID NO: 396280 - RNA, 21 nt, Human
uaaauaauaaguugcugagau

SEQ ID NO: 396281 - RNA, 22 nt, Human
uggcauuuuguucaguauaugg

SEQ ID NO: 396282 - RNA, 22 nt, Human
uuaauaaacaggugcagcugaa

SEQ ID NO: 396283 - RNA, 22 nt, Human
uucagaaaugaauauugguauu

SEQ ID NO: 396284 - RNA, 22 nt, Human
augaaaauucuaugcaggccag

SEQ ID NO: 396285 - RNA, 22 nt, Human
augaaacacacacgcgcauacu

SEQ ID NO: 396286 - RNA, 22 nt, Human
uaauuuuaugacaguguauuuu

SEQ ID NO: 396287 - RNA, 22 nt, Human
aauauaugagggagcuauuuga

SEQ ID NO: 396288 - RNA, 22 nt, Human
uuacagaauguucuuccaacag

SEQ ID NO: 396289 - RNA, 22 nt, Human
aaguccuuguauacagaaucaa

SEQ ID NO: 396290 - RNA, 22 nt, Human
cauuucaauacaguuuguaaau

SEQ ID NO: 396291 - RNA, 22 nt, Human
auaaaauuugcuacuguuaaau

SEQ ID NO: 396292 - RNA, 22 nt, Human
agacugaauaacaagcaaauaa

SEQ ID NO: 396293 - RNA, 22 nt, Human
ugauuuaugcauuauacuguug

SEQ ID NO: 396294 - RNA, 22 nt, Human
ucaauucaauugaacaguuacu

SEQ ID NO: 396295 - RNA, 22 nt, Human
ugcuuuaagacacuaaguuuga

SEQ ID NO: 396296 - RNA, 22 nt, Human
ucucuuaauuuuggaauagugu

SEQ ID NO: 396297 - RNA, 22 nt, Human
gcagaauugauggagaacuuaa

SEQ ID NO: 396298 - RNA, 22 nt, Human
ucauuucucccggccaaaaacu

SEQ ID NO: 396299 - RNA, 22 nt, Human
aaucagaaccuugggucauaac

SEQ ID NO: 396300 - RNA, 21 nt, Human
agaagucaauugaacugaaau

SEQ ID NO: 396301 - RNA, 22 nt, Human
augcuuaaccuugguguacaau

SEQ ID NO: 396302 - RNA, 22 nt, Human
agaaagcaucuccauuguaggu

SEQ ID NO: 396303 - RNA, 22 nt, Human
aauagaaaggaggggcucuugu

SEQ ID NO: 396304 - RNA, 22 nt, Human
ugcuggcuacauuauugcuguc

SEQ ID NO: 396305 - RNA, 22 nt, Human
auaaacaguagagaaagguggu

SEQ ID NO: 396306 - RNA, 22 nt, Human
auaaagcaaauaggacuauugc

SEQ ID NO: 396307 - RNA, 22 nt, Human
aagucacccuagggccuggacu

SEQ ID NO: 396308 - RNA, 22 nt, Human
uuggagagauuaucagaccagc

SEQ ID NO: 396309 - RNA, 22 nt, Human
uguacaauguguuuguuggcuu

SEQ ID NO: 396310 - RNA, 22 nt, Human
aaaucaguuaagaugaggccau

SEQ ID NO: 396311 - RNA, 22 nt, Human
ggcauuaagaauaucauuaaaa

SEQ ID NO: 396312 - RNA, 22 nt, Human
augaaacagugaauuagucaag

SEQ ID NO: 396313 - RNA, 22 nt, Human
ccauaauauuaaaugcuuuugu

SEQ ID NO: 396314 - RNA, 22 nt, Human
gauucuuacuucuaagcaagcu

SEQ ID NO: 396315 - RNA, 20 nt, Human
ucauaaagaggaaauaaaua

SEQ ID NO: 396316 - RNA, 22 nt, Human
uuccuuagccugccuuccaggg

SEQ ID NO: 396317 - RNA, 22 nt, Human
gcagaauuggauaguugugaua

SEQ ID NO: 396318 - RNA, 22 nt, Human
cuaaagaagcuagcaaucuaua

SEQ ID NO: 396319 - RNA, 22 nt, Human
acugcagagguggggugcagag

SEQ ID NO: 396320 - RNA, 22 nt, Human
agaauuucaaauggaaguuuua

SEQ ID NO: 396321 - RNA, 22 nt, Human
auucuacaacccaauaauaauu

SEQ ID NO: 396322 - RNA, 22 nt, Human
caucagaauagcucuguggaua

SEQ ID NO: 396323 - RNA, 22 nt, Human
aacacuuugggcauggccuucc

SEQ ID NO: 396324 - RNA, 22 nt, Human
cuuaauuuuuguaguagaugga

SEQ ID NO: 396325 - RNA, 22 nt, Human
aaguuacacauuuucauuguaa

SEQ ID NO: 396326 - RNA, 22 nt, Human
auuuaguuuaggaaaaguaggu

SEQ ID NO: 396327 - RNA, 22 nt, Human
uuggaucagaugauaucuuugu

SEQ ID NO: 396328 - RNA, 22 nt, Human
guuauaaaggugauaaugguca

SEQ ID NO: 396329 - RNA, 22 nt, Human
gaucagaaucuucauuuucagu

SEQ ID NO: 396330 - RNA, 22 nt, Human
uuuaggcaauagauggcagugu

SEQ ID NO: 396331 - RNA, 22 nt, Human
cauuucaaacaguuacagcugc

SEQ ID NO: 396332 - RNA, 22 nt, Human
aguguuagauucuuacucaguu

SEQ ID NO: 396333 - RNA, 22 nt, Human
auacagaagccuguauuucugg

SEQ ID NO: 396334 - RNA, 22 nt, Human
aaauuccagaaacucaguauau

SEQ ID NO: 396335 - RNA, 22 nt, Human
uugauuaaucccaugugaguag

SEQ ID NO: 396336 - RNA, 22 nt, Human
ucuuaauugagaacaguguagg

SEQ ID NO: 396337 - RNA, 22 nt, Human
auagaauuugcacuaaaucugc

SEQ ID NO: 396338 - RNA, 22 nt, Human
ugucaccaugccagcuucugcc

SEQ ID NO: 396339 - RNA, 22 nt, Human
agaaaaacuaagaguggguggu

SEQ ID NO: 396340 - RNA, 22 nt, Human
ucaagacaucacugugcauuuu

SEQ ID NO: 396341 - RNA, 22 nt, Human
aucauaaagugcuaucugauug

SEQ ID NO: 396342 - RNA, 22 nt, Human
aaaugccuguguaaauucuagc

SEQ ID NO: 396343 - RNA, 22 nt, Human
aauuccaggcagaaaugugagu

SEQ ID NO: 396344 - RNA, 22 nt, Human
cauuaauauuguucuucuuuag

SEQ ID NO: 396345 - RNA, 22 nt, Human
gcuggaucaaguccuucaccca

SEQ ID NO: 396346 - RNA, 22 nt, Human
uagcaucuguucuuucauuaaa

SEQ ID NO: 396347 - RNA, 22 nt, Human
ucuggaucggguuccucagguc

SEQ ID NO: 396348 - RNA, 22 nt, Human
ucauaaagcauuucagcuuuug

SEQ ID NO: 396349 - RNA, 22 nt, Human
aagucaccccacacucuuggga

SEQ ID NO: 396350 - RNA, 22 nt, Human
uauacagucuuuugcuauauuc

SEQ ID NO: 396351 - RNA, 22 nt, Human
augcacaagcaagagauaaugg

SEQ ID NO: 396352 - RNA, 22 nt, Human
aaguccauucuuccagccagcu

SEQ ID NO: 396353 - RNA, 22 nt, Human
uagaauaugauuaauuuucuua

SEQ ID NO: 396354 - RNA, 22 nt, Human
ugcuuaauagugcacugguuuc

SEQ ID NO: 396355 - RNA, 22 nt, Human
cuagaaauguagauucuuagug

SEQ ID NO: 396356 - RNA, 20 nt, Human
gaguccuuaugggcugaggu

SEQ ID NO: 396357 - RNA, 22 nt, Human
auuccaaacucuuucccugucg

SEQ ID NO: 396358 - RNA, 22 nt, Human
uauacaauggcugaaucaucca

SEQ ID NO: 396359 - RNA, 22 nt, Human
caauuuuuuccaugcucuuaca

SEQ ID NO: 396360 - RNA, 22 nt, Human
gucaaacaaauuaacauaucca

SEQ ID NO: 396361 - RNA, 22 nt, Human
uggcauuucaguauuuucauaa

SEQ ID NO: 396362 - RNA, 22 nt, Human
uaguccuuuaucaaacauuuau

SEQ ID NO: 396363 - RNA, 22 nt, Human
cagucaccauagaauaaaacau

SEQ ID NO: 396364 - RNA, 19 nt, Human
aucugagauuauaaacaga

SEQ ID NO: 396365 - RNA, 22 nt, Human
aggauuuacuagcaaggauucu

SEQ ID NO: 396366 - RNA, 22 nt, Human
aauuauauuguggugugaaugu

SEQ ID NO: 396367 - RNA, 22 nt, Human
aaugguuuucuagaacaugaaa

SEQ ID NO: 396368 - RNA, 22 nt, Human
uucaacacaggaacaugauaua

SEQ ID NO: 396369 - RNA, 22 nt, Human
aguaaacauuucagauuuauuu

SEQ ID NO: 396370 - RNA, 22 nt, Human
uucaaguuuugccuccccaucc

SEQ ID NO: 396371 - RNA, 21 nt, Human
aaauggauagggcaauggaag

SEQ ID NO: 396372 - RNA, 22 nt, Human
uaagaaucgauguuuauuuaga

SEQ ID NO: 396373 - RNA, 21 nt, Human
auccuuagcacuuagaagagu

SEQ ID NO: 396374 - RNA, 22 nt, Human
aaaucucacuguagucaaagug

SEQ ID NO: 396375 - RNA, 22 nt, Human
uuaaaacagcgugaaucuggca

SEQ ID NO: 396376 - RNA, 22 nt, Human
ugauuauauucuaacuucauaa

SEQ ID NO: 396377 - RNA, 22 nt, Human
ccauggcucuagagauugaaaa

SEQ ID NO: 396378 - RNA, 22 nt, Human
aguccuuagaacagugccuggg

SEQ ID NO: 396379 - RNA, 22 nt, Human
auggauuugcuuauacacaugu

SEQ ID NO: 396380 - RNA, 22 nt, Human
auucucaauggcuacuuucaua

SEQ ID NO: 396381 - RNA, 22 nt, Human
auacagaaguuuuccacuuauu

SEQ ID NO: 396382 - RNA, 22 nt, Human
uacugaaaagccacaaggacca

SEQ ID NO: 396383 - RNA, 22 nt, Human
cuagaaauacaggcacgugcca

SEQ ID NO: 396384 - RNA, 22 nt, Human
aaauggaucuguggaauacauu

SEQ ID NO: 396385 - RNA, 22 nt, Human
acuucacagaaauuuuaugagg

SEQ ID NO: 396386 - RNA, 22 nt, Human
uaauuucacugauaugaaguca

SEQ ID NO: 396387 - RNA, 22 nt, Human
aagguucuaagggaagccaugc

SEQ ID NO: 396388 - RNA, 22 nt, Human
guuaaagaagaauaguuccuuu

SEQ ID NO: 396389 - RNA, 22 nt, Human
caaucaguuucuguuguauaau

SEQ ID NO: 396390 - RNA, 22 nt, Human
cuucuuaacuguauauacuaug

SEQ ID NO: 396391 - RNA, 22 nt, Human
aucagaaaaacauaauguuauu

SEQ ID NO: 396392 - RNA, 22 nt, Human
uauuaaagggaaguuaugcaug

SEQ ID NO: 396393 - RNA, 22 nt, Human
gcauguuauguaucugcccagc

SEQ ID NO: 396394 - RNA, 22 nt, Human
uacaugaaccuuuaugugugau

SEQ ID NO: 396395 - RNA, 22 nt, Human
ugucaccagcugcuccucagga

SEQ ID NO: 396396 - RNA, 22 nt, Human
aauuaaauugguuuagagagga

SEQ ID NO: 396397 - RNA, 20 nt, Human
agaaaaaguguggaaauuuc

SEQ ID NO: 396398 - RNA, 22 nt, Human
auaucagaaauaguaagcagag

SEQ ID NO: 396399 - RNA, 22 nt, Human
uauaagaaauugccaaccuguu

SEQ ID NO: 396400 - RNA, 22 nt, Human
uguccuuacaaggucccuuucg

SEQ ID NO: 396401 - RNA, 22 nt, Human
uuugaagacagaucaauauaag

SEQ ID NO: 396402 - RNA, 22 nt, Human
cuagaaaugcucaagagaaagu

SEQ ID NO: 396403 - RNA, 22 nt, Human
uggcuuuacugucauucuuaug

SEQ ID NO: 396404 - RNA, 19 nt, Human
uuccaaaaucaggauuuga

SEQ ID NO: 396405 - RNA, 22 nt, Human
gguaugaauucacuacuuccaa

SEQ ID NO: 396406 - RNA, 22 nt, Human
uuuccaaauaaggucacacuca

SEQ ID NO: 396407 - RNA, 23 nt, Human
uguaacaauuucauauacaugca

SEQ ID NO: 396408 - RNA, 22 nt, Human
ucuaaacacgucucuuugaaua

SEQ ID NO: 396409 - RNA, 22 nt, Human
uucagaaacccauugggucucu

SEQ ID NO: 396410 - RNA, 23 nt, Human
cuuucauugugguuucacagagc

SEQ ID NO: 396411 - RNA, 22 nt, Human
uagucaccagcuacaggacagc

SEQ ID NO: 396412 - RNA, 22 nt, Human
aacagacaacuccuguggcuca

SEQ ID NO: 396413 - RNA, 22 nt, Human
ucccaguuuuucuccacuaagg

SEQ ID NO: 396414 - RNA, 22 nt, Human
caguccuuaaggaaacauuugu

SEQ ID NO: 396415 - RNA, 22 nt, Human
gugaauaauauuguuuauaaaa

SEQ ID NO: 396416 - RNA, 23 nt, Human
aaauaggaguaucuggaucauga

SEQ ID NO: 396417 - RNA, 22 nt, Human
ucacaccaguuuccuuucaauu

SEQ ID NO: 396418 - RNA, 22 nt, Human
cuucuuaaucccuuauauauuu

SEQ ID NO: 396419 - RNA, 22 nt, Human
cguauacaugaagacauugcug

SEQ ID NO: 396420 - RNA, 22 nt, Human
cuacagaaguuucccuugcuua

SEQ ID NO: 396421 - RNA, 22 nt, Human
aaaaggcauggagguugauagu

SEQ ID NO: 396422 - RNA, 22 nt, Human
gauagaaagguguugaaaucca

SEQ ID NO: 396423 - RNA, 22 nt, Human
aacauaauguggccaaagucac

SEQ ID NO: 396424 - RNA, 22 nt, Human
auauacaggugguauguguaaa

SEQ ID NO: 396425 - RNA, 22 nt, Human
caauauauaggaacaacuuagg

SEQ ID NO: 396426 - RNA, 23 nt, Human
aguacaauaaguauaauucuuuc

SEQ ID NO: 396427 - RNA, 22 nt, Human
ggcauuuagauugaauuucugu

SEQ ID NO: 396428 - RNA, 22 nt, Human
cuuaaagaaauugaggagagga

SEQ ID NO: 396429 - RNA, 22 nt, Human
uaacacaaaagaauaugugugu

SEQ ID NO: 396430 - RNA, 22 nt, Human
gugugaaaguuccuaagacuau

SEQ ID NO: 396431 - RNA, 22 nt, Human
ugugaaaagcguguguucuagg

SEQ ID NO: 396432 - RNA, 22 nt, Human
agaucugaaucucauccgagga

SEQ ID NO: 396433 - RNA, 22 nt, Human
uuuccauauuuaaucaaaauaa

SEQ ID NO: 396434 - RNA, 22 nt, Human
gcuuuuauugucuuuacgacga

SEQ ID NO: 396435 - RNA, 22 nt, Human
aaaagccaugcauaccuaagag

SEQ ID NO: 396436 - RNA, 22 nt, Human
aucaagaacuuauuuuggaaau

SEQ ID NO: 396437 - RNA, 22 nt, Human
augcugaauugaugcgagggag

SEQ ID NO: 396438 - RNA, 22 nt, Human
augcuuaacuuccuagucuaua

SEQ ID NO: 396439 - RNA, 22 nt, Human
aauacagaggggucacaauuca

SEQ ID NO: 396440 - RNA, 20 nt, Human
uauuuacaacuuagagccuc

SEQ ID NO: 396441 - RNA, 22 nt, Human
caaagauuuuagaauuugcaau

SEQ ID NO: 396442 - RNA, 22 nt, Human
ucagaauuagagcucuucuuga

SEQ ID NO: 396443 - RNA, 22 nt, Human
uucuuagaugauuaaugauggg

SEQ ID NO: 396444 - RNA, 22 nt, Human
aauguuuuaaaagagauugaga

SEQ ID NO: 396445 - RNA, 22 nt, Human
auuccaaaggcuggccuggagg

SEQ ID NO: 396446 - RNA, 22 nt, Human
aauguucaaacagaucacuuag

SEQ ID NO: 396447 - RNA, 22 nt, Human
uaucagaaggcacauggagucu

SEQ ID NO: 396448 - RNA, 23 nt, Human
agaauuccaguuucuuaugucac

SEQ ID NO: 396449 - RNA, 22 nt, Human
ugaaaagacugcaagagagcau

SEQ ID NO: 396450 - RNA, 22 nt, Human
aaaggcauuuuaauucuaaaga

SEQ ID NO: 396451 - RNA, 22 nt, Human
gauuucaaggauguuagaggug

SEQ ID NO: 396452 - RNA, 22 nt, Human
auguauaaugcuaauuagcuag

SEQ ID NO: 396453 - RNA, 22 nt, Human
aucuauacccaucaugauuuaa

SEQ ID NO: 396454 - RNA, 22 nt, Human
aaauaauguuaggccuuugcuc

SEQ ID NO: 396455 - RNA, 22 nt, Human
aaucagaaagaggucauguugc

SEQ ID NO: 396456 - RNA, 22 nt, Human
uuaacagagugccuggcaugua

SEQ ID NO: 396457 - RNA, 22 nt, Human
aguucucauugcaugagacaga

SEQ ID NO: 396458 - RNA, 22 nt, Human
gugaauaagaccuaaggaugaa

SEQ ID NO: 396459 - RNA, 22 nt, Human
gaauaaucaugaaauucaguga

SEQ ID NO: 396460 - RNA, 22 nt, Human
acuuuuaaaugaguuucaguug

SEQ ID NO: 396461 - RNA, 22 nt, Human
aaagaaucagaagucucaaaca

SEQ ID NO: 396462 - RNA, 22 nt, Human
acagaauuaucaggaaauguua

SEQ ID NO: 396463 - RNA, 22 nt, Human
uucaagacugcgacuaaugccc

SEQ ID NO: 396464 - RNA, 22 nt, Human
cauacuuugggauaagagugga

SEQ ID NO: 396465 - RNA, 19 nt, Human
uuccuuagaggaggcggug

SEQ ID NO: 396466 - RNA, 20 nt, Human
uauaacaguguugggugugu

SEQ ID NO: 396467 - RNA, 22 nt, Human
gcaacuuucaagcaccaugggg

SEQ ID NO: 396468 - RNA, 22 nt, Human
cauucauucuguaaguaacuau

SEQ ID NO: 396469 - RNA, 22 nt, Human
uuccuuagcuccucauggccug

SEQ ID NO: 396470 - RNA, 22 nt, Human
aaagucauuuuccagaccagua

SEQ ID NO: 396471 - RNA, 21 nt, Human
uucauaaaccauucucaugca

SEQ ID NO: 396472 - RNA, 22 nt, Human
aauuauccuuaaugcaguaagc

SEQ ID NO: 396473 - RNA, 23 nt, Human
aauaucaaggugauguucccaga

SEQ ID NO: 396474 - RNA, 19 nt, Human
acagaaauuaguuauuuuc

SEQ ID NO: 396475 - RNA, 22 nt, Human
gagcccagcuugcacauggagc

SEQ ID NO: 396476 - RNA, 22 nt, Human
uaaaacuuaacuauccagauua

SEQ ID NO: 396477 - RNA, 22 nt, Human
uguguacacagauaguaauggc

SEQ ID NO: 396478 - RNA, 22 nt, Human
uucauacuaaaguguaagaugu

SEQ ID NO: 396479 - RNA, 22 nt, Human
aggauuuacaaugauucuaggu

SEQ ID NO: 396480 - RNA, 22 nt, Human
uuucauaauacuguacaugaaa

SEQ ID NO: 396481 - RNA, 22 nt, Human
uaucaaaguuguccugugaagu

SEQ ID NO: 396482 - RNA, 22 nt, Human
uauauaacuacuauuuugcuca

SEQ ID NO: 396483 - RNA, 22 nt, Human
uaguccuuacuuacuagaauaa

SEQ ID NO: 396484 - RNA, 22 nt, Human
uuauauaaagauaacuuuucuu

SEQ ID NO: 396485 - RNA, 22 nt, Human
caggccagcuuccugacauccu

SEQ ID NO: 396486 - RNA, 22 nt, Human
agaucacagcccccagaugcca

SEQ ID NO: 396487 - RNA, 22 nt, Human
agcucacaguguccuuccucaa

SEQ ID NO: 396488 - RNA, 22 nt, Human
auagcuuucuuaaauauauaaa

SEQ ID NO: 396489 - RNA, 22 nt, Human
augugcuucauucuacaugaca

SEQ ID NO: 396490 - RNA, 22 nt, Human
agaaacauccugcuuuccauuu

SEQ ID NO: 396491 - RNA, 22 nt, Human
uuuccaaaaugaaucuaaugca

SEQ ID NO: 396492 - RNA, 22 nt, Human
cagaucuagagcuuuuccaucu

SEQ ID NO: 396493 - RNA, 22 nt, Human
uuuaggcaugcaguucuauuua

SEQ ID NO: 396494 - RNA, 22 nt, Human
uaucaagugacuaucacagaac

SEQ ID NO: 396495 - RNA, 22 nt, Human
ucacagaaauaagauaguuauu

SEQ ID NO: 396496 - RNA, 22 nt, Human
uuauuaaugaguacaaguuauu

SEQ ID NO: 396497 - RNA, 22 nt, Human
ugaaugaaugaauuaauagagu

SEQ ID NO: 396498 - RNA, 22 nt, Human
cuacagaaggagaaauggguaa

SEQ ID NO: 396499 - RNA, 22 nt, Human
auuauauaggacuugcccuucc

SEQ ID NO: 396500 - RNA, 22 nt, Human
agaauaaucacugaaguucaaa

SEQ ID NO: 396501 - RNA, 22 nt, Human
acagaaguuggaauuagauacu

SEQ ID NO: 396502 - RNA, 22 nt, Human
uaaugcuuuuccuucaaauaag

SEQ ID NO: 396503 - RNA, 22 nt, Human
aaaucucaauuugaauuguagc

SEQ ID NO: 396504 - RNA, 22 nt, Human
cagucaccuagacagaacuuac

SEQ ID NO: 396505 - RNA, 22 nt, Human
gaaauagacacuuucuaugaau

SEQ ID NO: 396506 - RNA, 22 nt, Human
caauuucaauacaaaauacauu

SEQ ID NO: 396507 - RNA, 21 nt, Human
agccagucuguuuucuagugc

SEQ ID NO: 396508 - RNA, 22 nt, Human
caugguuuauuagagcuuauuu

SEQ ID NO: 396509 - RNA, 22 nt, Human
agcaucuggcagaaagucagaa

SEQ ID NO: 396510 - RNA, 22 nt, Human
uauggcuuuuuauucaucuuac

SEQ ID NO: 396511 - RNA, 22 nt, Human
acacacucaauugcauaagcac

SEQ ID NO: 396512 - RNA, 22 nt, Human
aaaacauguccauacagaaacu

SEQ ID NO: 396513 - RNA, 22 nt, Human
uucaaacacagacagcagcaug

SEQ ID NO: 396514 - RNA, 22 nt, Human
guaggaaaguaaaugaaauaca

SEQ ID NO: 396515 - RNA, 23 nt, Human
acuuuauccuauaucuuuguucu

SEQ ID NO: 396516 - RNA, 22 nt, Human
ucauaaaaauagacucuaaagu

SEQ ID NO: 396517 - RNA, 22 nt, Human
ugagaaaagguugagaugauaa

SEQ ID NO: 396518 - RNA, 22 nt, Human
aguguuuaaacugaagugauga

SEQ ID NO: 396519 - RNA, 22 nt, Human
caaguccuccaugugacuaggu

SEQ ID NO: 396520 - RNA, 21 nt, Human
uuuuauugaugaauggccacu

SEQ ID NO: 396521 - RNA, 21 nt, Human
caaucaguuggcauuugagca

SEQ ID NO: 396522 - RNA, 22 nt, Human
ugcagagaaaguguagacaggc

SEQ ID NO: 396523 - RNA, 22 nt, Human
agaucuauuagcaaacugccau

SEQ ID NO: 396524 - RNA, 22 nt, Human
agcauauaaauggacauauuug

SEQ ID NO: 396525 - RNA, 22 nt, Human
uuuacagaaugucaauuucuau

SEQ ID NO: 396526 - RNA, 22 nt, Human
gaguccuuaauacacuggugga

SEQ ID NO: 396527 - RNA, 22 nt, Human
cuaaaauuaucaagauaauucc

SEQ ID NO: 396528 - RNA, 22 nt, Human
auauaugcauguguacuuaugu

SEQ ID NO: 396529 - RNA, 22 nt, Human
caagaaucagaccugucagggu

SEQ ID NO: 396530 - RNA, 22 nt, Human
gcagaauucuacagaugauaaa

SEQ ID NO: 396531 - RNA, 21 nt, Human
gagauuuagaaggaucaauuu

SEQ ID NO: 396532 - RNA, 22 nt, Human
aaagucauggaaaaucuuggaa

SEQ ID NO: 396533 - RNA, 22 nt, Human
auaaagcaagcauaccauuaag

SEQ ID NO: 396534 - RNA, 22 nt, Human
cuuccaaauguaaauaaguuuc

SEQ ID NO: 396535 - RNA, 22 nt, Human
aaaaccuucagguuuggaguuu

SEQ ID NO: 396536 - RNA, 21 nt, Human
auacagaagguggcaaaguac

SEQ ID NO: 396537 - RNA, 22 nt, Human
accagcugcugauugcuaaaug

SEQ ID NO: 396538 - RNA, 22 nt, Human
aaguccuuuauccuaaaagguc

SEQ ID NO: 396539 - RNA, 22 nt, Human
uggcuuaagcgcaacucugucu

SEQ ID NO: 396540 - RNA, 22 nt, Human
cuacagaauggagggucagaga

SEQ ID NO: 396541 - RNA, 22 nt, Human
acaugcuuguuuuucacaaccu

SEQ ID NO: 396542 - RNA, 19 nt, Human
acuguaaggcauuuuuuuc

SEQ ID NO: 396543 - RNA, 22 nt, Human
gauagaaagagugguucuuuuu

SEQ ID NO: 396544 - RNA, 22 nt, Human
acauaauaggugccugaauauu

SEQ ID NO: 396545 - RNA, 22 nt, Human
uaugaaaagguggccaauguag

SEQ ID NO: 396546 - RNA, 22 nt, Human
caagaaucuugcagcuuagacu

SEQ ID NO: 396547 - RNA, 22 nt, Human
caccagacagguguaugcauau

SEQ ID NO: 396548 - RNA, 22 nt, Human
gaaaaaggauaaauacaguguu

SEQ ID NO: 396549 - RNA, 22 nt, Human
uaaguccuaauggcagaagucu

SEQ ID NO: 396550 - RNA, 22 nt, Human
cuuuacauaaggauaaaccugg

SEQ ID NO: 396551 - RNA, 21 nt, Human
auggcuuuuuuaaagcuugug

SEQ ID NO: 396552 - RNA, 22 nt, Human
caauuucagaccuuuccuugga

SEQ ID NO: 396553 - RNA, 22 nt, Human
aagacagugacagucacaauug

SEQ ID NO: 396554 - RNA, 21 nt, Human
auuauuauaaagaccacaggg

SEQ ID NO: 396555 - RNA, 22 nt, Human
ugcaggaagcaaccagguccaa

SEQ ID NO: 396556 - RNA, 22 nt, Human
auagucacugccuuccauuugu

SEQ ID NO: 396557 - RNA, 20 nt, Human
uacaauacacaugcauauga

SEQ ID NO: 396558 - RNA, 22 nt, Human
cuacagaauucaacaaaugguu

SEQ ID NO: 396559 - RNA, 22 nt, Human
uccaaaguguugggauuauagg

SEQ ID NO: 396560 - RNA, 22 nt, Human
auacaucaugcuccauauauuu

SEQ ID NO: 396561 - RNA, 22 nt, Human
cauuuacacuucuaaccacaag

SEQ ID NO: 396562 - RNA, 22 nt, Human
auagaauucguguuuguaauuc

SEQ ID NO: 396563 - RNA, 22 nt, Human
augcuuuaaaugucuuuugcuu

SEQ ID NO: 396564 - RNA, 22 nt, Human
uuuacagaugaggaaacugaga

SEQ ID NO: 396565 - RNA, 20 nt, Human
uauggcuuggcaaagcuuca

SEQ ID NO: 396566 - RNA, 22 nt, Human
aaagcauuucaugucuagaaag

SEQ ID NO: 396567 - RNA, 22 nt, Human
aggauuuaucaggaacucucuu

SEQ ID NO: 396568 - RNA, 22 nt, Human
acaacaaaaucacuagucuucc

SEQ ID NO: 396569 - RNA, 22 nt, Human
uuacagaaagguugugggauag

SEQ ID NO: 396570 - RNA, 22 nt, Human
uucuuaauaccuauuuucuacc

SEQ ID NO: 396571 - RNA, 22 nt, Human
gaagugaagagauuagaaauca

SEQ ID NO: 396572 - RNA, 22 nt, Human
auacagaagaacuauagccacu

SEQ ID NO: 396573 - RNA, 22 nt, Human
cauaaaauggcuuguucuuuaa

SEQ ID NO: 396574 - RNA, 22 nt, Human
uucagaaagguuaaucuggauu

SEQ ID NO: 396575 - RNA, 22 nt, Human
gaaguccugguccucucauuca

SEQ ID NO: 396576 - RNA, 22 nt, Human
aauuucaauuacuuuugcacca

SEQ ID NO: 396577 - RNA, 22 nt, Human
gguacaaugucuuacagaccca

SEQ ID NO: 396578 - RNA, 22 nt, Human
gaguucuaaaggcagaacauaa

SEQ ID NO: 396579 - RNA, 22 nt, Human
uuggcuucuucgcacagcagua

SEQ ID NO: 396580 - RNA, 22 nt, Human
uuccauaauaaccugagagaaa

SEQ ID NO: 396581 - RNA, 22 nt, Human
acaaaauuuuuagacaaggcuu

SEQ ID NO: 396582 - RNA, 22 nt, Human
aguucacugcuuaagccuuuga

SEQ ID NO: 396583 - RNA, 22 nt, Human
uaguaucuauuaguaacaagag

SEQ ID NO: 396584 - RNA, 22 nt, Human
auuucuuacauaacaaauuguu

SEQ ID NO: 396585 - RNA, 22 nt, Human
aauaacuggcacauaucacaua

SEQ ID NO: 396586 - RNA, 22 nt, Human
aauuccagaggaggacaguccu

SEQ ID NO: 396587 - RNA, 18 nt, Human
ugaaacaagaauggugca

SEQ ID NO: 396588 - RNA, 23 nt, Human
uaauacugcuucagaggcuuaga

SEQ ID NO: 396589 - RNA, 22 nt, Human
guuccaaauuuggaucuuuagg

SEQ ID NO: 396590 - RNA, 19 nt, Human
caguccuuuccgcuuucuc

SEQ ID NO: 396591 - RNA, 22 nt, Human
cuggaagagcauuugcauaggg

SEQ ID NO: 396592 - RNA, 22 nt, Human
auauacaguuuuacaggguuuc

SEQ ID NO: 396593 - RNA, 22 nt, Human
gauuuccaggucauuaauaaag

SEQ ID NO: 396594 - RNA, 22 nt, Human
uuacaaaguguuaugauaaaca

SEQ ID NO: 396595 - RNA, 22 nt, Human
uuccaaaguuaguuauuagaaa

SEQ ID NO: 396596 - RNA, 22 nt, Human
aguuucaguucugucauuuaua

SEQ ID NO: 396597 - RNA, 22 nt, Human
agaaucugguagaaccaaggau

SEQ ID NO: 396598 - RNA, 22 nt, Human
auguuacacauaggcauaaaug

SEQ ID NO: 396599 - RNA, 22 nt, Human
gacaauacagaaagggacaugc

SEQ ID NO: 396600 - RNA, 22 nt, Human
auuauaaaccuuugaggguggg

SEQ ID NO: 396601 - RNA, 22 nt, Human
acuuugaaacuaaaauucauua

SEQ ID NO: 396602 - RNA, 22 nt, Human
acaugaaaaauguuugcaguuu

SEQ ID NO: 396603 - RNA, 22 nt, Human
aaagaaucuauauaucaccacc

SEQ ID NO: 396604 - RNA, 22 nt, Human
ugcuggaggauuaaacaaguca

SEQ ID NO: 396605 - RNA, 22 nt, Human
ugccauuuugagauguuaauga

SEQ ID NO: 396606 - RNA, 22 nt, Human
cuuauauuuuaggaacagacaa

SEQ ID NO: 396607 - RNA, 22 nt, Human
uguuuaauaauucuaugauagu

SEQ ID NO: 396608 - RNA, 22 nt, Human
ucuuuaauuguggaagagcagc

SEQ ID NO: 396609 - RNA, 22 nt, Human
aaguucuaauuuugcauucagg

SEQ ID NO: 396610 - RNA, 22 nt, Human
ccaaaauuauuacauuuguagg

SEQ ID NO: 396611 - RNA, 22 nt, Human
aaagaaucacauccuucagcaa

SEQ ID NO: 396612 - RNA, 22 nt, Human
aauucuaaauguaauuuagaau

SEQ ID NO: 396613 - RNA, 22 nt, Human
cuauacaguaaccacagugauu

SEQ ID NO: 396614 - RNA, 22 nt, Human
ucagccagugccuugaucuugc

SEQ ID NO: 396615 - RNA, 20 nt, Human
agaaaucagaccacacacua

SEQ ID NO: 396616 - RNA, 22 nt, Human
gaguccuuuucauagcaguggg

SEQ ID NO: 396617 - RNA, 22 nt, Human
acagcauugcuccaucucaaga

SEQ ID NO: 396618 - RNA, 22 nt, Human
uuuggacaaguuacugguuucc

SEQ ID NO: 396619 - RNA, 22 nt, Human
aagacuuucaaaccuauguuug

SEQ ID NO: 396620 - RNA, 22 nt, Human
uuuuuugucuugaagaaauggu

SEQ ID NO: 396621 - RNA, 22 nt, Human
ugcuuuaaauaugaauuagcau

SEQ ID NO: 396622 - RNA, 22 nt, Human
ccuucaaucuuaagucagccca

SEQ ID NO: 396623 - RNA, 22 nt, Human
augcaaaauuaccauucuguuc

SEQ ID NO: 396624 - RNA, 22 nt, Human
uaagaaucugcauuuuaacaag

SEQ ID NO: 396625 - RNA, 22 nt, Human
uggcauuuggcuuacuuauguu

SEQ ID NO: 396626 - RNA, 22 nt, Human
aaugggauaauuguucauggga

SEQ ID NO: 396627 - RNA, 22 nt, Human
caucagaauguuauggggggcu

SEQ ID NO: 396628 - RNA, 22 nt, Human
uggcuucaaaaucuaguggucu

SEQ ID NO: 396629 - RNA, 22 nt, Human
gaugauaacagcauuucaacug

SEQ ID NO: 396630 - RNA, 22 nt, Human
auccaaaggugacacagaauac

SEQ ID NO: 396631 - RNA, 22 nt, Human
auaacagauacucucugugagg

SEQ ID NO: 396632 - RNA, 22 nt, Human
gaauuucaggacaacuggaagg

SEQ ID NO: 396633 - RNA, 22 nt, Human
uguauuaacauuaauaaaaugg

SEQ ID NO: 396634 - RNA, 22 nt, Human
aagccauuuguuguccuucagg

SEQ ID NO: 396635 - RNA, 22 nt, Human
uuuaggaaugugguuuuugagc

SEQ ID NO: 396636 - RNA, 22 nt, Human
uauggcuuuaaacaacuuaggu

SEQ ID NO: 396637 - RNA, 22 nt, Human
cauuucaagcauugacuucuau

SEQ ID NO: 396638 - RNA, 22 nt, Human
auggaucacagugccgugggug

SEQ ID NO: 396639 - RNA, 22 nt, Human
aucuaucccaguuuaacucauu

SEQ ID NO: 396640 - RNA, 22 nt, Human
aaauacuguugaaugaaguaag

SEQ ID NO: 396641 - RNA, 22 nt, Human
cuuuuaaugggagcaguauuug

SEQ ID NO: 396642 - RNA, 22 nt, Human
uuuaauauucugcauucuccuu

SEQ ID NO: 396643 - RNA, 22 nt, Human
ccauggcucuuaccuuguuaua

SEQ ID NO: 396644 - RNA, 22 nt, Human
auugauggcggccucuccauau

SEQ ID NO: 396645 - RNA, 22 nt, Human
uaucagaaaugccuuaaauugg

SEQ ID NO: 396646 - RNA, 22 nt, Human
uaucagaaggaagugccuuuaa

SEQ ID NO: 396647 - RNA, 22 nt, Human
aguccuuacaccuggaaccuau

SEQ ID NO: 396648 - RNA, 22 nt, Human
uuuuugcugauaagcagaauuc

SEQ ID NO: 396649 - RNA, 22 nt, Human
acagaauuuacacaucucuaaa

SEQ ID NO: 396650 - RNA, 22 nt, Human
aucagaaaggugggcaagcaga

SEQ ID NO: 396651 - RNA, 22 nt, Human
acagcauucaauaaauaauaac

SEQ ID NO: 396652 - RNA, 22 nt, Human
cugcagagcuuucugaaugaag

SEQ ID NO: 396653 - RNA, 22 nt, Human
uuaauucugccuuucauguaac

SEQ ID NO: 396654 - RNA, 22 nt, Human
cuauaauuaugcucaaaaugua

SEQ ID NO: 396655 - RNA, 22 nt, Human
ucugaagauuaccagcuaaaug

SEQ ID NO: 396656 - RNA, 22 nt, Human
uuugaagauuaugccagaguga

SEQ ID NO: 396657 - RNA, 22 nt, Human
augguuuacugaucuuuuuggu

SEQ ID NO: 396658 - RNA, 22 nt, Human
caagaauccuguucuugaagau

SEQ ID NO: 396659 - RNA, 22 nt, Human
acaugcuuugcacuuacaucau

SEQ ID NO: 396660 - RNA, 21 nt, Human
gauuuauaagccuuaagccua

SEQ ID NO: 396661 - RNA, 22 nt, Human
gaagaauccuguccucuuuagg

SEQ ID NO: 396662 - RNA, 22 nt, Human
acagguuuuuguggauauaugu

SEQ ID NO: 396663 - RNA, 22 nt, Human
cuguuaauugugaauuuuacau

SEQ ID NO: 396664 - RNA, 22 nt, Human
uguggaaaauuggaacguuccu

SEQ ID NO: 396665 - RNA, 22 nt, Human
uggcauuugggcuggcuuuucu

SEQ ID NO: 396666 - RNA, 22 nt, Human
uaauacuuuugccuuguauuca

SEQ ID NO: 396667 - RNA, 22 nt, Human
uauccaaacauauagucucucu

SEQ ID NO: 396668 - RNA, 23 nt, Human
uggaauaauaagguacauuaaca

SEQ ID NO: 396669 - RNA, 22 nt, Human
aguaaacauuuucauauuuucu

SEQ ID NO: 396670 - RNA, 22 nt, Human
uggcuuuaaaucuguauucaua

SEQ ID NO: 396671 - RNA, 22 nt, Human
uccuuaauucugugcaauaugu

SEQ ID NO: 396672 - RNA, 22 nt, Human
ccaaaauuaagccucuuauguu

SEQ ID NO: 396673 - RNA, 22 nt, Human
cuacagaaacacuggacaugug

SEQ ID NO: 396674 - RNA, 22 nt, Human
gcuauacagcaggagaauggaa

SEQ ID NO: 396675 - RNA, 22 nt, Human
uaaagccauacugaaagccacu

SEQ ID NO: 396676 - RNA, 22 nt, Human
auuuccaauuucauccaugucc

SEQ ID NO: 396677 - RNA, 22 nt, Human
ucaguaaaugguugcuguuauu

SEQ ID NO: 396678 - RNA, 22 nt, Human
uaaucugaagaaacaggacuug

SEQ ID NO: 396679 - RNA, 20 nt, Human
aaaaacaguaaugcugaaga

SEQ ID NO: 396680 - RNA, 22 nt, Human
uuauuuauggcccucaccugau

SEQ ID NO: 396681 - RNA, 22 nt, Human
uguauacaauucacacuuccca

SEQ ID NO: 396682 - RNA, 22 nt, Human
guagaaauauuuaucucugaga

SEQ ID NO: 396683 - RNA, 22 nt, Human
aucauaaaccacuuuguaaucu

SEQ ID NO: 396684 - RNA, 22 nt, Human
uaaaugauuuauguaugugaaa

SEQ ID NO: 396685 - RNA, 22 nt, Human
uuucauaaggguuucuagacuu

SEQ ID NO: 396686 - RNA, 22 nt, Human
gauagucaccucccuuaacuuu

SEQ ID NO: 396687 - RNA, 22 nt, Human
uuacagaaaauguguuuuaacu

SEQ ID NO: 396688 - RNA, 22 nt, Human
cagauuucagcucauauauuau

SEQ ID NO: 396689 - RNA, 22 nt, Human
aaagccaugaauguuauagagg

SEQ ID NO: 396690 - RNA, 22 nt, Human
guuaggcagugugguauagcag

SEQ ID NO: 396691 - RNA, 22 nt, Human
uuugaagugcaaugaggauucu

SEQ ID NO: 396692 - RNA, 22 nt, Human
gcuucacaggcaaguuaagccu

SEQ ID NO: 396693 - RNA, 22 nt, Human
uggcauuucuguuagacucuca

SEQ ID NO: 396694 - RNA, 22 nt, Human
uuuccaaaaguuuguucugugc

SEQ ID NO: 396695 - RNA, 20 nt, Human
uucuauacauaucacugaaa

SEQ ID NO: 396696 - RNA, 22 nt, Human
acaguccuuguguggaacauua

SEQ ID NO: 396697 - RNA, 22 nt, Human
gcuagaucucucauaaauucca

SEQ ID NO: 396698 - RNA, 22 nt, Human
guuauaaauaccuaauaggauu

SEQ ID NO: 396699 - RNA, 22 nt, Human
aaagcaauggaugagaaucugu

SEQ ID NO: 396700 - RNA, 22 nt, Human
agacaacaucacuaaagcugag

SEQ ID NO: 396701 - RNA, 22 nt, Human
uacaaaaaauugauacugacga

SEQ ID NO: 396702 - RNA, 22 nt, Human
augaaacaguguguauagcaaa

SEQ ID NO: 396703 - RNA, 22 nt, Human
ucaauaaaucccucugacccug

SEQ ID NO: 396704 - RNA, 22 nt, Human
uuuuauauggcacauugguugg

SEQ ID NO: 396705 - RNA, 22 nt, Human
ugcagggcccucauuccugucc

SEQ ID NO: 396706 - RNA, 22 nt, Human
ucuggaucccaccgccacacac

SEQ ID NO: 396707 - RNA, 22 nt, Human
auuauccagcaccaaugucaga

SEQ ID NO: 396708 - RNA, 18 nt, Human
gcaggcuuuuccuggguc

SEQ ID NO: 396709 - RNA, 22 nt, Human
cauuucaauacuaucugagaau

SEQ ID NO: 396710 - RNA, 16 nt, Human
gcaacuuugggguuga

SEQ ID NO: 396711 - RNA, 22 nt, Human
auuaggcauucugaaugagguc

SEQ ID NO: 396712 - RNA, 22 nt, Human
acaaagucaaauugcagccgcc

SEQ ID NO: 396713 - RNA, 22 nt, Human
caaguccuuagaugguucuuug

SEQ ID NO: 396714 - RNA, 20 nt, Human
auacuuguuuucaggcuuuu

SEQ ID NO: 396715 - RNA, 22 nt, Human
agagugaaguuuuugaaaguga

SEQ ID NO: 396716 - RNA, 20 nt, Human
caauuucaucauuuccugug

SEQ ID NO: 396717 - RNA, 20 nt, Human
uauuccaaggguagagaaaa

SEQ ID NO: 396718 - RNA, 22 nt, Human
ucaacuuugaaaccauagugaa

SEQ ID NO: 396719 - RNA, 22 nt, Human
ucaauaauggcaggauaaauuu

SEQ ID NO: 396720 - RNA, 22 nt, Human
uccaaauacauuuacuguauuu

SEQ ID NO: 396721 - RNA, 22 nt, Human
aaaacaguuuaggcaucacagu

SEQ ID NO: 396722 - RNA, 22 nt, Human
uaucagaaagauauuacugggg

SEQ ID NO: 396723 - RNA, 18 nt, Human
aacaguuuccagauucuc

SEQ ID NO: 396724 - RNA, 22 nt, Human
agaacaucuaaauaucugagac

SEQ ID NO: 396725 - RNA, 22 nt, Human
uuucaagaacaacauucauuca

SEQ ID NO: 396726 - RNA, 22 nt, Human
ucuucaauuuagaauggauuua

SEQ ID NO: 396727 - RNA, 22 nt, Human
ucuauacugaugggauacuauu

SEQ ID NO: 396728 - RNA, 22 nt, Human
auauaacauacauacagaaaag

SEQ ID NO: 396729 - RNA, 22 nt, Human
aaguccuuuaauaucacauagu

SEQ ID NO: 396730 - RNA, 22 nt, Human
caaugucaugauuuuccauuag

SEQ ID NO: 396731 - RNA, 22 nt, Human
uaauuucaaguuuagggcucua

SEQ ID NO: 396732 - RNA, 22 nt, Human
aucagcaucuuuaacaauuacc

SEQ ID NO: 396733 - RNA, 22 nt, Human
uacauauacugagugauuugcu

SEQ ID NO: 396734 - RNA, 22 nt, Human
acagaugauuuuuaugaaaaca

SEQ ID NO: 396735 - RNA, 22 nt, Human
cucauacauaugccauuccugc

SEQ ID NO: 396736 - RNA, 22 nt, Human
cacccaguugacuacaaagggg

SEQ ID NO: 396737 - RNA, 22 nt, Human
aaugguuugauggacaaaauga

SEQ ID NO: 396738 - RNA, 22 nt, Human
uggcauuuagaaaacaacaugu

SEQ ID NO: 396739 - RNA, 22 nt, Human
gagucaccuuggccgcuguccc

SEQ ID NO: 396740 - RNA, 22 nt, Human
uucagaaaaagaccauugcaau

SEQ ID NO: 396741 - RNA, 22 nt, Human
ccuauacaggcuucuuuacaug

SEQ ID NO: 396742 - RNA, 22 nt, Human
uuuaauauuucuuuccugaagc

SEQ ID NO: 396743 - RNA, 22 nt, Human
aaaucaguuagugguaggauug

SEQ ID NO: 396744 - RNA, 22 nt, Human
auuccaaagcacaucagaacua

SEQ ID NO: 396745 - RNA, 22 nt, Human
guacauaaaggaggcucuuugc

SEQ ID NO: 396746 - RNA, 22 nt, Human
guaaacauuuucaucugugccc

SEQ ID NO: 396747 - RNA, 22 nt, Human
ugucaccaaguugaugaaugca

SEQ ID NO: 396748 - RNA, 22 nt, Human
ugucaccacuggcugaaacacc

SEQ ID NO: 396749 - RNA, 22 nt, Human
cacaauuuggugcuaaagaaag

SEQ ID NO: 396750 - RNA, 22 nt, Human
agaauucauaggaaguuuccua

SEQ ID NO: 396751 - RNA, 22 nt, Human
uuauaugaguaucauaucacuu

SEQ ID NO: 396752 - RNA, 22 nt, Human
cuugccuuugucuucaaaggcu

SEQ ID NO: 396753 - RNA, 22 nt, Human
cuggauuugccuauggugcuuu

SEQ ID NO: 396754 - RNA, 22 nt, Human
ucuuuaaucauaaccaagaugg

SEQ ID NO: 396755 - RNA, 22 nt, Human
aaagcaaugcuuguggaaugua

SEQ ID NO: 396756 - RNA, 22 nt, Human
aaaugcauggcuguuuuaaagc

SEQ ID NO: 396757 - RNA, 22 nt, Human
aaaauccugcugacucgagaug

SEQ ID NO: 396758 - RNA, 22 nt, Human
uuuauucugugcuacaugaaga

SEQ ID NO: 396759 - RNA, 22 nt, Human
uaauccaaaacugaaucugugg

SEQ ID NO: 396760 - RNA, 22 nt, Human
aaagucauuguaauauaugcua

SEQ ID NO: 396761 - RNA, 23 nt, Human
cauaaaauauuaguaugguagca

SEQ ID NO: 396762 - RNA, 22 nt, Human
augaauaaguaaacuccuuugg

SEQ ID NO: 396763 - RNA, 22 nt, Human
aaugcaaagcaagcagagauuu

SEQ ID NO: 396764 - RNA, 22 nt, Human
cauggcuucuaagugauaacgu

SEQ ID NO: 396765 - RNA, 22 nt, Human
ucagagaagcugccaggcgagc

SEQ ID NO: 396766 - RNA, 22 nt, Human
ugcagagacuugugugcauuug

SEQ ID NO: 396767 - RNA, 22 nt, Human
aaguccuuuccaguccugugau

SEQ ID NO: 396768 - RNA, 22 nt, Human
augcuuuagugucaaguuuggg

SEQ ID NO: 396769 - RNA, 22 nt, Human
auucacuggcagacagaacuca

SEQ ID NO: 396770 - RNA, 21 nt, Human
aacugguucaauucaacuaga

SEQ ID NO: 396771 - RNA, 22 nt, Human
aaaugcuuagagguguucaaau

SEQ ID NO: 396772 - RNA, 22 nt, Human
gauuuacagaucuaagggucac

SEQ ID NO: 396773 - RNA, 22 nt, Human
aaacaggcuuccauuagagcaa

SEQ ID NO: 396774 - RNA, 22 nt, Human
aaugucuuuaaagugcaauaga

SEQ ID NO: 396775 - RNA, 22 nt, Human
auauaauacaaccugcuaagug

SEQ ID NO: 396776 - RNA, 22 nt, Human
ugcauaauacguuuccuauaac

SEQ ID NO: 396777 - RNA, 22 nt, Human
gaaagccaucuggcugcuggga

SEQ ID NO: 396778 - RNA, 22 nt, Human
uuucuaguaaucaauauaaagu

SEQ ID NO: 396779 - RNA, 22 nt, Human
uaucagaaaucaacacacagug

SEQ ID NO: 396780 - RNA, 22 nt, Human
caaguccucgcuucuagcugug

SEQ ID NO: 396781 - RNA, 22 nt, Human
ccuggaucccgauggcugugag

SEQ ID NO: 396782 - RNA, 22 nt, Human
acaucagauuaugcuuugcuua

SEQ ID NO: 396783 - RNA, 22 nt, Human
uaagagaauguuguggcuaggu

SEQ ID NO: 396784 - RNA, 22 nt, Human
ucuaaagccuuccauauaacgc

SEQ ID NO: 396785 - RNA, 22 nt, Human
uaauuccaccuuuuuccaacuu

SEQ ID NO: 396786 - RNA, 22 nt, Human
uaggaaaacgugauuuucucac

SEQ ID NO: 396787 - RNA, 22 nt, Human
uuccuuagacagagguggucau

SEQ ID NO: 396788 - RNA, 18 nt, Human
caauuucaauggucugaa

SEQ ID NO: 396789 - RNA, 22 nt, Human
uaaucuacuguuuauaugaaau

SEQ ID NO: 396790 - RNA, 22 nt, Human
uuugaaguggaaaaggauuuaa

SEQ ID NO: 396791 - RNA, 22 nt, Human
uuaauuacaaaacacauagguu

SEQ ID NO: 396792 - RNA, 22 nt, Human
aaacauguaauucugcuuaaga

SEQ ID NO: 396793 - RNA, 22 nt, Human
aaauucuucagguaauuuugau

SEQ ID NO: 396794 - RNA, 22 nt, Human
ccguagcacaugcuccuggggc

SEQ ID NO: 396795 - RNA, 22 nt, Human
uuuauccagaaucaggauuuuu

SEQ ID NO: 396796 - RNA, 22 nt, Human
augguuuacaauguuuucaguu

SEQ ID NO: 396797 - RNA, 22 nt, Human
aaucagaaagaucuugaugaga

SEQ ID NO: 396798 - RNA, 22 nt, Human
auaaaaucagaguuggauugga

SEQ ID NO: 396799 - RNA, 22 nt, Human
agguacaaaagaguauaugaga

SEQ ID NO: 396800 - RNA, 22 nt, Human
uuacagaagaguaacuuggcaa

SEQ ID NO: 396801 - RNA, 22 nt, Human
auuuaucucuggaaacuaagca

SEQ ID NO: 396802 - RNA, 22 nt, Human
uuuacagaugaggauacugagg

SEQ ID NO: 396803 - RNA, 22 nt, Human
uaaaauguuugcaagagaccag

SEQ ID NO: 396804 - RNA, 22 nt, Human
ucagaauaugcuaaugacauuu

SEQ ID NO: 396805 - RNA, 22 nt, Human
uugaauaaaugagcagugaauu

SEQ ID NO: 396806 - RNA, 22 nt, Human
acauucacuauguccaaacucu

SEQ ID NO: 396807 - RNA, 22 nt, Human
aaaguccuguuugaaggaccug

SEQ ID NO: 396808 - RNA, 22 nt, Human
uauacuuuccugcaacuuugau

SEQ ID NO: 396809 - RNA, 22 nt, Human
cauagaaacugagacaaggauu

SEQ ID NO: 396810 - RNA, 22 nt, Human
auacuagacuguucuguuauca

SEQ ID NO: 396811 - RNA, 22 nt, Human
aggaaaaaagucugugauuaua

SEQ ID NO: 396812 - RNA, 22 nt, Human
caguaucugucaguaaucaggu

SEQ ID NO: 396813 - RNA, 22 nt, Human
uugaagaaagucauauauaaug

SEQ ID NO: 396814 - RNA, 22 nt, Human
agaaaagaggcuuucuaagcau

SEQ ID NO: 396815 - RNA, 22 nt, Human
uauguaaaguagauggcaggua

SEQ ID NO: 396816 - RNA, 22 nt, Human
auuacagaaugcaguuccuuau

SEQ ID NO: 396817 - RNA, 22 nt, Human
aaauacugggcucaaaaggguu

SEQ ID NO: 396818 - RNA, 23 nt, Human
uauuacaauuggucuuauuaaga

SEQ ID NO: 396819 - RNA, 22 nt, Human
caaguccuaggucugauugaac

SEQ ID NO: 396820 - RNA, 22 nt, Human
guuaggcauuugccuuaauuuu

SEQ ID NO: 396821 - RNA, 22 nt, Human
uaaguccuauuccaggucucuc

SEQ ID NO: 396822 - RNA, 22 nt, Human
ucaguucaguauacacuauucu

SEQ ID NO: 396823 - RNA, 22 nt, Human
cagauacuguaaaauuucagua

SEQ ID NO: 396824 - RNA, 19 nt, Human
uauuucaaagugccgucua

SEQ ID NO: 396825 - RNA, 22 nt, Human
uuaauucuaguuuaacacuuag

SEQ ID NO: 396826 - RNA, 22 nt, Human
uaggcaacaugucgaauacugu

SEQ ID NO: 396827 - RNA, 22 nt, Human
caaguccuuuucuuggcucagg

SEQ ID NO: 396828 - RNA, 22 nt, Human
uacuuguagcagguggcauuua

SEQ ID NO: 396829 - RNA, 22 nt, Human
auuuagaagcuaauuuuucaga

SEQ ID NO: 396830 - RNA, 23 nt, Human
ccaaagucgaagucuaguccaga

SEQ ID NO: 396831 - RNA, 22 nt, Human
aguacaauuuaaugaagauagc

SEQ ID NO: 396832 - RNA, 23 nt, Human
uuuaacuuuccaauaauucauug

SEQ ID NO: 396833 - RNA, 22 nt, Human
gcuucacacuaaaaauguuaaa

SEQ ID NO: 396834 - RNA, 20 nt, Human
uacagacaugacaauaaugg

SEQ ID NO: 396835 - RNA, 22 nt, Human
uuuaggcauugaauuagaauag

SEQ ID NO: 396836 - RNA, 22 nt, Human
uucugugacuccucagagauuu

SEQ ID NO: 396837 - RNA, 22 nt, Human
agaucugaggguccaagggagg

SEQ ID NO: 396838 - RNA, 22 nt, Human
ucucuuaacugguucagcaauu

SEQ ID NO: 396839 - RNA, 22 nt, Human
aaauccuuuucuauacagcaua

SEQ ID NO: 396840 - RNA, 22 nt, Human
auagacauuuugcauucaagca

SEQ ID NO: 396841 - RNA, 22 nt, Human
cuggauuuuagaaggcuuccua

SEQ ID NO: 396842 - RNA, 22 nt, Human
uuacagauggaucuagcaaaau

SEQ ID NO: 396843 - RNA, 22 nt, Human
uuuaggcaaauuucagaugugc

SEQ ID NO: 396844 - RNA, 22 nt, Human
caucagucuagauucuaguacc

SEQ ID NO: 396845 - RNA, 22 nt, Human
cuccuuagugccucugcacgag

SEQ ID NO: 396846 - RNA, 22 nt, Human
uggcuuuagguugcauguuucu

SEQ ID NO: 396847 - RNA, 22 nt, Human
agaagugagugugacucagcag

SEQ ID NO: 396848 - RNA, 22 nt, Human
uguuccaagcugcuggauaagc

SEQ ID NO: 396849 - RNA, 20 nt, Human
aacacacugguggcaucagg

SEQ ID NO: 396850 - RNA, 22 nt, Human
caaagaagagauuuacagagcu

SEQ ID NO: 396851 - RNA, 22 nt, Human
auuucaacguuagauguaauag

SEQ ID NO: 396852 - RNA, 22 nt, Human
uuugaacaugcugcaugauaau

SEQ ID NO: 396853 - RNA, 22 nt, Human
gaugaucaucuguaaaguuaga

SEQ ID NO: 396854 - RNA, 22 nt, Human
uuuccaaacccagcgagcuaca

SEQ ID NO: 396855 - RNA, 19 nt, Human
aacuggauaauggccacau

SEQ ID NO: 396856 - RNA, 22 nt, Human
guuuauaaggcccaauauuucu

SEQ ID NO: 396857 - RNA, 22 nt, Human
auagaauagcauagaaaauuga

SEQ ID NO: 396858 - RNA, 22 nt, Human
ugcugagaucugccaguagaug

SEQ ID NO: 396859 - RNA, 22 nt, Human
aaacuuugguauguagcaaaac

SEQ ID NO: 396860 - RNA, 22 nt, Human
guuuaaucagaggaauuauaga

SEQ ID NO: 396861 - RNA, 22 nt, Human
cagucaccaccagguggcagua

SEQ ID NO: 396862 - RNA, 22 nt, Human
auauacugaggagacuuuauau

SEQ ID NO: 396863 - RNA, 23 nt, Human
uuccagaggaagaagucaugacu

SEQ ID NO: 396864 - RNA, 23 nt, Human
gagauuuagcagacaaagcucuu

SEQ ID NO: 396865 - RNA, 22 nt, Human
uaauaaacugcuacgcuuaguu

SEQ ID NO: 396866 - RNA, 22 nt, Human
aaucagugguucccagcccagg

SEQ ID NO: 396867 - RNA, 23 nt, Human
aaaguguagccagguuaagaacc

SEQ ID NO: 396868 - RNA, 22 nt, Human
ccaaagcaagucacaugaucaa

SEQ ID NO: 396869 - RNA, 22 nt, Human
cagaaaauaaaguuucuacgca

SEQ ID NO: 396870 - RNA, 22 nt, Human
auacagaaaaguggauagccag

SEQ ID NO: 396871 - RNA, 22 nt, Human
caaguccaggucaauuuaaagc

SEQ ID NO: 396872 - RNA, 22 nt, Human
auuaggcauucaugcagcuccu

SEQ ID NO: 396873 - RNA, 22 nt, Human
aaaguccuuuuugccaugcaag

SEQ ID NO: 396874 - RNA, 22 nt, Human
acaaagaucuugcuuuccuacu

SEQ ID NO: 396875 - RNA, 22 nt, Human
aacacuuucuauuauuaugguu

SEQ ID NO: 396876 - RNA, 22 nt, Human
caaauucaaauuucaucagugu

SEQ ID NO: 396877 - RNA, 22 nt, Human
uggcauuucuggccauuugugu

SEQ ID NO: 396878 - RNA, 22 nt, Human
aggauuuaccuccagcuaggcu

SEQ ID NO: 396879 - RNA, 22 nt, Human
caaauucaaugaacauguuuaa

SEQ ID NO: 396880 - RNA, 22 nt, Human
guuccaaagucucugagcugag

SEQ ID NO: 396881 - RNA, 22 nt, Human
aagaaaucagaaaagcauucgu

SEQ ID NO: 396882 - RNA, 21 nt, Human
ucauuuauugagaaaugacug

SEQ ID NO: 396883 - RNA, 22 nt, Human
uuuaaugaauaauucaaaucug

SEQ ID NO: 396884 - RNA, 22 nt, Human
uuccuuagugccucuuccgcug

SEQ ID NO: 396885 - RNA, 22 nt, Human
ucaaguuucucucagauuaugg

SEQ ID NO: 396886 - RNA, 22 nt, Human
ugucauaaucaguuuugcaugu

SEQ ID NO: 396887 - RNA, 22 nt, Human
caacuuugugugaccuagauag

SEQ ID NO: 396888 - RNA, 22 nt, Human
cagauuucuauuucaaauacau

SEQ ID NO: 396889 - RNA, 22 nt, Human
uuguccaaaguaacacaucuag

SEQ ID NO: 396890 - RNA, 22 nt, Human
cuuauaaaguccaucugaacaa

SEQ ID NO: 396891 - RNA, 22 nt, Human
ggaucugauuaauaagguggac

SEQ ID NO: 396892 - RNA, 22 nt, Human
uuuauccaaggguuuuaacugu

SEQ ID NO: 396893 - RNA, 22 nt, Human
uaagaaucuauuaggaauaugu

SEQ ID NO: 396894 - RNA, 22 nt, Human
ugcaggaagacuucccaagcca

SEQ ID NO: 396895 - RNA, 22 nt, Human
aaacuuuguagagaaugcuggc

SEQ ID NO: 396896 - RNA, 22 nt, Human
uuacuacugcuuuacuacuggg

SEQ ID NO: 396897 - RNA, 22 nt, Human
uaacagaaaggggacagaaaua

SEQ ID NO: 396898 - RNA, 22 nt, Human
ucagaauuugauuccugggaua

SEQ ID NO: 396899 - RNA, 22 nt, Human
acaugcuuuucccacaauuaua

SEQ ID NO: 396900 - RNA, 22 nt, Human
cauagaaacuugcagcaagcac

SEQ ID NO: 396901 - RNA, 22 nt, Human
ugugaaagauacuaggcagagg

SEQ ID NO: 396902 - RNA, 22 nt, Human
aguuacagugaccauuuauuua

SEQ ID NO: 396903 - RNA, 23 nt, Human
auagaagauuauugcaacagucc

SEQ ID NO: 396904 - RNA, 22 nt, Human
aaacauguuuucugaauauuuu

SEQ ID NO: 396905 - RNA, 22 nt, Human
uccauuuagcuggcaaacaaug

SEQ ID NO: 396906 - RNA, 22 nt, Human
gagaagguggaccugaaggagc

SEQ ID NO: 396907 - RNA, 22 nt, Human
gaauauauuggugaaaauaguu

SEQ ID NO: 396908 - RNA, 22 nt, Human
caaguccucaaagggcucugcu

SEQ ID NO: 396909 - RNA, 22 nt, Human
ccuggaucagagccagagaagc

SEQ ID NO: 396910 - RNA, 22 nt, Human
aaauugcagaugcuaaaugacu

SEQ ID NO: 396911 - RNA, 20 nt, Human
auaaaauaacugccacaaga

SEQ ID NO: 396912 - RNA, 22 nt, Human
aauaacagagaaggguggcuuc

SEQ ID NO: 396913 - RNA, 23 nt, Human
uuaaacuucagugcagaacacuc

SEQ ID NO: 396914 - RNA, 22 nt, Human
uggauuagguacuaugaauaua

SEQ ID NO: 396915 - RNA, 22 nt, Human
uaauuuuuccacguacacuggg

SEQ ID NO: 396916 - RNA, 22 nt, Human
aaagcagucacuccagugugau

SEQ ID NO: 396917 - RNA, 22 nt, Human
auaucagacagaaagcauugac

SEQ ID NO: 396918 - RNA, 22 nt, Human
uagcauaacagguaagagugag

SEQ ID NO: 396919 - RNA, 22 nt, Human
uaggcagaauuguugaaugaag

SEQ ID NO: 396920 - RNA, 22 nt, Human
ucagaauucagagggagugggg

SEQ ID NO: 396921 - RNA, 22 nt, Human
acagaauugauggaaaucucag

SEQ ID NO: 396922 - RNA, 22 nt, Human
auagaauuauggaaagcaucuu

SEQ ID NO: 396923 - RNA, 18 nt, Human
aaaaagugcucaggccua

SEQ ID NO: 396924 - RNA, 21 nt, Human
acuuuaauauacaugaggagg

SEQ ID NO: 396925 - RNA, 23 nt, Human
uuccacaaugaaaauaaagcagg

SEQ ID NO: 396926 - RNA, 23 nt, Human
ucuaauacaugaaaccuagaugu

SEQ ID NO: 396927 - RNA, 22 nt, Human
auguucaaacuuuuuacacacc

SEQ ID NO: 396928 - RNA, 22 nt, Human
aggauuuaaauccuuaaccacu

SEQ ID NO: 396929 - RNA, 22 nt, Human
cauuucaaggaccacccuggga

SEQ ID NO: 396930 - RNA, 22 nt, Human
uuuauucuauaggcauuaagca

SEQ ID NO: 396931 - RNA, 22 nt, Human
aaucaguguggugacuugucug

SEQ ID NO: 396932 - RNA, 22 nt, Human
uuagaaaucaccucugaagauc

SEQ ID NO: 396933 - RNA, 22 nt, Human
caacuuucuguuaaauguuagu

SEQ ID NO: 396934 - RNA, 18 nt, Human
auagaaaccuuuaaucag

SEQ ID NO: 396935 - RNA, 22 nt, Human
aacaugaaaagcccagagaggu

SEQ ID NO: 396936 - RNA, 22 nt, Human
uaagaaucaguagauauagauu

SEQ ID NO: 396937 - RNA, 22 nt, Human
aagcucauuaauuagaagcuaa

SEQ ID NO: 396938 - RNA, 22 nt, Human
auacugaauuagguaaagcaua

SEQ ID NO: 396939 - RNA, 22 nt, Human
uuagacaagggcuccuuaaaag

SEQ ID NO: 396940 - RNA, 22 nt, Human
augaacaaguauuugcaugagc

SEQ ID NO: 396941 - RNA, 22 nt, Human
auuccaaagacagaagcagcug

SEQ ID NO: 396942 - RNA, 22 nt, Human
uucucuuagcuguaaagucaau

SEQ ID NO: 396943 - RNA, 22 nt, Human
uugaauaauguguauguuguua

SEQ ID NO: 396944 - RNA, 22 nt, Human
auucauaaguaaaugauuaccu

SEQ ID NO: 396945 - RNA, 22 nt, Human
uacacagaggcugaugucuuag

SEQ ID NO: 396946 - RNA, 22 nt, Human
ucaaacaggacuacauucucau

SEQ ID NO: 396947 - RNA, 22 nt, Human
uuauccaacaugacuuaugucc

SEQ ID NO: 396948 - RNA, 22 nt, Human
acauguauugacauuauauucu

SEQ ID NO: 396949 - RNA, 22 nt, Human
uacugugacagaguacuuaaac

SEQ ID NO: 396950 - RNA, 22 nt, Human
aauaagauccugaagauauguu

SEQ ID NO: 396951 - RNA, 22 nt, Human
uacaauacuuaaccuauuuugc

SEQ ID NO: 396952 - RNA, 22 nt, Human
acagaaugggauuugaauauuu

SEQ ID NO: 396953 - RNA, 22 nt, Human
augcuuaaugaggguauauaug

SEQ ID NO: 396954 - RNA, 21 nt, Human
caagccagaccaauagcagcc

SEQ ID NO: 396955 - RNA, 20 nt, Human
auaggaaagggaggggcuuu

SEQ ID NO: 396956 - RNA, 22 nt, Human
uaauauguguuacugacuuuuu

SEQ ID NO: 396957 - RNA, 22 nt, Human
guaaauuauuucaagaucaucu

SEQ ID NO: 396958 - RNA, 22 nt, Human
cagaucuguuugccagaucagc

SEQ ID NO: 396959 - RNA, 22 nt, Human
uuaauucagucaaagaaaccau

SEQ ID NO: 396960 - RNA, 22 nt, Human
uauaaaacagaaagcacuaccu

SEQ ID NO: 396961 - RNA, 22 nt, Human
caucagaacgugagcuccuugu

SEQ ID NO: 396962 - RNA, 22 nt, Human
aaagucaugaugaaccaccgua

SEQ ID NO: 396963 - RNA, 22 nt, Human
aagcauuugguucugaagacuc

SEQ ID NO: 396964 - RNA, 22 nt, Human
acaacuuucuggguuaucugau

SEQ ID NO: 396965 - RNA, 22 nt, Human
acaacuuugacccuuguucuua

SEQ ID NO: 396966 - RNA, 22 nt, Human
acagaacugggggcacagauag

SEQ ID NO: 396967 - RNA, 22 nt, Human
guucuaauaggagaaaagacag

SEQ ID NO: 396968 - RNA, 22 nt, Human
gaguccuuggcaucaucaguac

SEQ ID NO: 396969 - RNA, 22 nt, Human
aaauuucaguuaccuuuacguu

SEQ ID NO: 396970 - RNA, 22 nt, Human
uggauuaguuaagaaauguuag

SEQ ID NO: 396971 - RNA, 22 nt, Human
auacagaauuugcccuuuucau

SEQ ID NO: 396972 - RNA, 22 nt, Human
uaugaaauuuaaacacagauca

SEQ ID NO: 396973 - RNA, 22 nt, Human
acagaguucccacuccagaagc

SEQ ID NO: 396974 - RNA, 21 nt, Human
uaucagaagagaaagaaugau

SEQ ID NO: 396975 - RNA, 22 nt, Human
agaagucaauaguuguuugaug

SEQ ID NO: 396976 - RNA, 22 nt, Human
caauacaauuaccaguuaauca

SEQ ID NO: 396977 - RNA, 22 nt, Human
cuauacagagcauccuuaacuu

SEQ ID NO: 396978 - RNA, 22 nt, Human
guacagaaauggggccccaggu

SEQ ID NO: 396979 - RNA, 22 nt, Human
uuuauccagcagcuauucaaaa

SEQ ID NO: 396980 - RNA, 18 nt, Human
caagaaucucuaaagaag

SEQ ID NO: 396981 - RNA, 22 nt, Human
gaucagaaugggacauauccug

SEQ ID NO: 396982 - RNA, 22 nt, Human
ccauuucacucuuccugaagga

SEQ ID NO: 396983 - RNA, 22 nt, Human
cauuuaguuauacuaaaacauu

SEQ ID NO: 396984 - RNA, 22 nt, Human
uuccuuagaguuuccagaaagc

SEQ ID NO: 396985 - RNA, 22 nt, Human
aagcauuuauagauaagaauuu

SEQ ID NO: 396986 - RNA, 22 nt, Human
caguccuuagauuuuacugcca

SEQ ID NO: 396987 - RNA, 22 nt, Human
aaagucauccaaauuuuuaugu

SEQ ID NO: 396988 - RNA, 22 nt, Human
gcuauacacauuucuugguagu

SEQ ID NO: 396989 - RNA, 17 nt, Human
cuuuuaauuuacuuccc

SEQ ID NO: 396990 - RNA, 22 nt, Human
uaaagacaugguguaggugaac

SEQ ID NO: 396991 - RNA, 22 nt, Human
uuucagacagauucuucucagu

SEQ ID NO: 396992 - RNA, 22 nt, Human
cauaacaguggcuucagcaagu

SEQ ID NO: 396993 - RNA, 22 nt, Human
uucacagaauugucuugacugg

SEQ ID NO: 396994 - RNA, 17 nt, Human
uaaauacacaaggguau

SEQ ID NO: 396995 - RNA, 22 nt, Human
uaaugcuuaauuuucacaagcc

SEQ ID NO: 396996 - RNA, 21 nt, Human
accaaaaccuauacuuucugu

SEQ ID NO: 396997 - RNA, 22 nt, Human
ugaaauagaaaaacaggcuucu

SEQ ID NO: 396998 - RNA, 22 nt, Human
gauaaaauauguggccuuuagu

SEQ ID NO: 396999 - RNA, 22 nt, Human
cuuauacacccucuucccaggc

SEQ ID NO: 397000 - RNA, 22 nt, Human
uucaccacagucucaucuacgc

SEQ ID NO: 397001 - RNA, 22 nt, Human
cagaaaucauugugaugacagg

SEQ ID NO: 397002 - RNA, 22 nt, Human
cuuugaauuccaguacaauaac

SEQ ID NO: 397003 - RNA, 22 nt, Human
acagaaauaacuuuuuauguuu

SEQ ID NO: 397004 - RNA, 22 nt, Human
ucuuuaauauaaaggaaugaau

SEQ ID NO: 397005 - RNA, 22 nt, Human
uacagagauacucuagaucaaa

SEQ ID NO: 397006 - RNA, 22 nt, Human
uccaaaaaacguuugaauaguu

SEQ ID NO: 397007 - RNA, 22 nt, Human
agcaauuuucccuuagucuuug

SEQ ID NO: 397008 - RNA, 22 nt, Human
aaauacuguagauaauagaguu

SEQ ID NO: 397009 - RNA, 22 nt, Human
uucaauucuaaacuaauauucu

SEQ ID NO: 397010 - RNA, 20 nt, Human
aggauuuacuacuaccugcu

SEQ ID NO: 397011 - RNA, 22 nt, Human
uuaauuacuaagcacaaugcaa

SEQ ID NO: 397012 - RNA, 22 nt, Human
gccuuaauuuaugucuaacaua

SEQ ID NO: 397013 - RNA, 22 nt, Human
aaaaugcugggaaaguuggaau

SEQ ID NO: 397014 - RNA, 22 nt, Human
gauuuacaaagcucucuagugu

SEQ ID NO: 397015 - RNA, 22 nt, Human
caaagcaccacaaaccagguga

SEQ ID NO: 397016 - RNA, 22 nt, Human
ucuauacaaguuucacuuugac

SEQ ID NO: 397017 - RNA, 22 nt, Human
gauuucaaccuaacaguaugac

SEQ ID NO: 397018 - RNA, 22 nt, Human
uggauuagugcugaaaugaugg

SEQ ID NO: 397019 - RNA, 22 nt, Human
uugaauaauauguucaggagga

SEQ ID NO: 397020 - RNA, 18 nt, Human
cuggcuuucuuauccauc

SEQ ID NO: 397021 - RNA, 22 nt, Human
aguccuuaugugguggagagag

SEQ ID NO: 397022 - RNA, 22 nt, Human
caaauuccucagaaucagaaaa

SEQ ID NO: 397023 - RNA, 22 nt, Human
aguacaaugucugacacaguag

SEQ ID NO: 397024 - RNA, 22 nt, Human
aucagaauaauuagauuucaga

SEQ ID NO: 397025 - RNA, 22 nt, Human
aagcagggcuuuaagcgguuuu

SEQ ID NO: 397026 - RNA, 22 nt, Human
uacaggaaguaaguaaugaaau

SEQ ID NO: 397027 - RNA, 22 nt, Human
cagcacagggacaauagcagau

SEQ ID NO: 397028 - RNA, 22 nt, Human
gucacagaguuauuaauugugu

SEQ ID NO: 397029 - RNA, 23 nt, Human
uacagaaggaguagucacuaaga

SEQ ID NO: 397030 - RNA, 22 nt, Human
ugaaaauggccugaagaagcaa

SEQ ID NO: 397031 - RNA, 21 nt, Human
ugaaacaaucagacagagucu

SEQ ID NO: 397032 - RNA, 22 nt, Human
aagauauagauaaaacuaugca

SEQ ID NO: 397033 - RNA, 22 nt, Human
gauuuacagcuauacccaaugg

SEQ ID NO: 397034 - RNA, 22 nt, Human
uguccuuagggauauaaaauau

SEQ ID NO: 397035 - RNA, 22 nt, Human
aauguaaacagcaagagaaggg

SEQ ID NO: 397036 - RNA, 22 nt, Human
uaaaacugaauacauacugagg

SEQ ID NO: 397037 - RNA, 22 nt, Human
ucaaaauuuuauuucucaagga

SEQ ID NO: 397038 - RNA, 22 nt, Human
uggcuuaagauuuaugcuuuua

SEQ ID NO: 397039 - RNA, 22 nt, Human
gaaauauacauugcaggaagag

SEQ ID NO: 397040 - RNA, 22 nt, Human
uuugaagaccuuaucucuaaau

SEQ ID NO: 397041 - RNA, 22 nt, Human
uaucagaaacucuggggcaggg

SEQ ID NO: 397042 - RNA, 22 nt, Human
acagaauugaaaguauaaucug

SEQ ID NO: 397043 - RNA, 22 nt, Human
aacauguugcuuuaauaauauu

SEQ ID NO: 397044 - RNA, 18 nt, Human
augaucuuagcaaauauu

SEQ ID NO: 397045 - RNA, 22 nt, Human
uuacagaaggaacacuacucag

SEQ ID NO: 397046 - RNA, 22 nt, Human
uuaggaaacgcugcuauugacu

SEQ ID NO: 397047 - RNA, 22 nt, Human
uauggcuuuuaacugucguaug

SEQ ID NO: 397048 - RNA, 22 nt, Human
auaaaacuuggguaugaucccu

SEQ ID NO: 397049 - RNA, 22 nt, Human
auucuuaaauuuaggucuguga

SEQ ID NO: 397050 - RNA, 22 nt, Human
ugcuuuaagagauuguuaguac

SEQ ID NO: 397051 - RNA, 22 nt, Human
ugaaagguguccaauauuucuc

SEQ ID NO: 397052 - RNA, 22 nt, Human
uacauacaagauguguuuaaaa

SEQ ID NO: 397053 - RNA, 22 nt, Human
guacaauagucccuguuuggau

SEQ ID NO: 397054 - RNA, 22 nt, Human
auacaaugauaauaguacuuua

SEQ ID NO: 397055 - RNA, 22 nt, Human
aaugugauuagccucuacugga

SEQ ID NO: 397056 - RNA, 22 nt, Human
uuuccaaauaaggucacauucu

SEQ ID NO: 397057 - RNA, 22 nt, Human
uaaguccuaacagacugggggc

SEQ ID NO: 397058 - RNA, 22 nt, Human
aucuauacuacaaauggcuggu

SEQ ID NO: 397059 - RNA, 22 nt, Human
aaacaugaauagauauuaaaca

SEQ ID NO: 397060 - RNA, 21 nt, Human
augugaaauaucaucagagca

SEQ ID NO: 397061 - RNA, 22 nt, Human
uaaagccacuucauucuagucu

SEQ ID NO: 397062 - RNA, 22 nt, Human
ugaagaauaaaugguugagacu

SEQ ID NO: 397063 - RNA, 23 nt, Human
aagucaccaagaggaaggcggag

SEQ ID NO: 397064 - RNA, 22 nt, Human
aaucauaauucaaauaagcuua

SEQ ID NO: 397065 - RNA, 22 nt, Human
ugcagagaaaccaguggaggac

SEQ ID NO: 397066 - RNA, 22 nt, Human
guucuaauuuggggcuccuuag

SEQ ID NO: 397067 - RNA, 22 nt, Human
uuauuauugugguugcauuauc

SEQ ID NO: 397068 - RNA, 22 nt, Human
ccagauuugagcgucuuaaacc

SEQ ID NO: 397069 - RNA, 22 nt, Human
gaauuucaagcagugcaauguu

SEQ ID NO: 397070 - RNA, 22 nt, Human
uuugaaguguuauuucuaucac

SEQ ID NO: 397071 - RNA, 22 nt, Human
uuuaauacuauggggaugaaca

SEQ ID NO: 397072 - RNA, 22 nt, Human
uaguccuugguaaaauucuaug

SEQ ID NO: 397073 - RNA, 19 nt, Human
guuaggcaggguggggagu

SEQ ID NO: 397074 - RNA, 22 nt, Human
ucacagaacaauguuuaguucu

SEQ ID NO: 397075 - RNA, 22 nt, Human
ccauggcuuuugagucucaaga

SEQ ID NO: 397076 - RNA, 22 nt, Human
caaagucagcugccagucccaa

SEQ ID NO: 397077 - RNA, 22 nt, Human
auaggcuuauauaaaaacaucu

SEQ ID NO: 397078 - RNA, 22 nt, Human
gacuaugugaagugugaauagg

SEQ ID NO: 397079 - RNA, 22 nt, Human
ugaauagauuuuuaacauauaa

SEQ ID NO: 397080 - RNA, 22 nt, Human
uucaccgugaaccgauuccuca

SEQ ID NO: 397081 - RNA, 22 nt, Human
acaugaaacuguugcauuagaa

SEQ ID NO: 397082 - RNA, 20 nt, Human
ucuuauacagaaaacauuuu

SEQ ID NO: 397083 - RNA, 22 nt, Human
caaagucauggggaugcagguc

SEQ ID NO: 397084 - RNA, 22 nt, Human
uuccacaauguaugaauaagau

SEQ ID NO: 397085 - RNA, 22 nt, Human
uauuccaacugucauagucaua

SEQ ID NO: 397086 - RNA, 22 nt, Human
auuccaaagguuaaugcccauu

SEQ ID NO: 397087 - RNA, 22 nt, Human
agaucugaccuaaccccaccac

SEQ ID NO: 397088 - RNA, 22 nt, Human
ugguuuaaccugucucuuauua

SEQ ID NO: 397089 - RNA, 22 nt, Human
uagucaccugugagcugcguag

SEQ ID NO: 397090 - RNA, 22 nt, Human
agaagucaaguggucuaugaaa

SEQ ID NO: 397091 - RNA, 22 nt, Human
auacauaauuacuuccgauguu

SEQ ID NO: 397092 - RNA, 22 nt, Human
agaauuccuccucugggacacu

SEQ ID NO: 397093 - RNA, 22 nt, Human
aauuuacaguugcugaugguac

SEQ ID NO: 397094 - RNA, 21 nt, Human
ucagagaacccggcaggcaag

SEQ ID NO: 397095 - RNA, 22 nt, Human
aagaaaucauaucauuucuugg

SEQ ID NO: 397096 - RNA, 22 nt, Human
aguguuuaccccaaucaguuua

SEQ ID NO: 397097 - RNA, 22 nt, Human
cuaugacacaggccauuauaua

SEQ ID NO: 397098 - RNA, 22 nt, Human
uaggauuuaggcuuuaacaucu

SEQ ID NO: 397099 - RNA, 22 nt, Human
uuggagagaggcugcucaggcu

SEQ ID NO: 397100 - RNA, 22 nt, Human
uaagucaucacauugcagagau

SEQ ID NO: 397101 - RNA, 22 nt, Human
uguaagaaucagucuuuaaugu

SEQ ID NO: 397102 - RNA, 20 nt, Human
gaaguccuguuauauccuuu

SEQ ID NO: 397103 - RNA, 22 nt, Human
uacaguaagaugaaauagcaau

SEQ ID NO: 397104 - RNA, 22 nt, Human
caauauauaaugaguacuuucc

SEQ ID NO: 397105 - RNA, 22 nt, Human
uagaaacagauguuuuugaaga

SEQ ID NO: 397106 - RNA, 22 nt, Human
cauagaaaagaguagguaaugu

SEQ ID NO: 397107 - RNA, 22 nt, Human
aguucacauaucuguuuuauuu

SEQ ID NO: 397108 - RNA, 22 nt, Human
aaagcaguauauugguaguugu

SEQ ID NO: 397109 - RNA, 20 nt, Human
guaaaauauggucuuugggu

SEQ ID NO: 397110 - RNA, 22 nt, Human
aggcaacuguuugauaauguug

SEQ ID NO: 397111 - RNA, 18 nt, Human
uacaggaaaaguguuaca

SEQ ID NO: 397112 - RNA, 21 nt, Human
ccaagacucccaucuaguggu

SEQ ID NO: 397113 - RNA, 22 nt, Human
gacauaauccuccucaccuacu

SEQ ID NO: 397114 - RNA, 22 nt, Human
ugugugaauggauuauucuauu

SEQ ID NO: 397115 - RNA, 22 nt, Human
uaugcccagcuuaaaguacaca

SEQ ID NO: 397116 - RNA, 22 nt, Human
gaauuuuucuggaagcaauuau

SEQ ID NO: 397117 - RNA, 22 nt, Human
aaucagaaauucuacaucacaa

SEQ ID NO: 397118 - RNA, 22 nt, Human
aaaugucagaggaacauauuga

SEQ ID NO: 397119 - RNA, 22 nt, Human
uuacagaaguauugagagaucc

SEQ ID NO: 397120 - RNA, 22 nt, Human
aaaugaaaugagugccuggagg

SEQ ID NO: 397121 - RNA, 22 nt, Human
acaagauaaggugucagugugu

SEQ ID NO: 397122 - RNA, 22 nt, Human
aaugguauuugucaagcauagu

SEQ ID NO: 397123 - RNA, 22 nt, Human
cuuaggcagggcuggaagaucu

SEQ ID NO: 397124 - RNA, 22 nt, Human
ugaaguaacuguccaggaucca

SEQ ID NO: 397125 - RNA, 22 nt, Human
acaauuccacauggcaugcagg

SEQ ID NO: 397126 - RNA, 22 nt, Human
aaugugaucgcuuuagaagcuu

SEQ ID NO: 397127 - RNA, 22 nt, Human
cagucaccugaagacuugacca

SEQ ID NO: 397128 - RNA, 22 nt, Human
auugaaaauaaggccagaaaca

SEQ ID NO: 397129 - RNA, 21 nt, Human
uccaaaaaggagcguccuucu

SEQ ID NO: 397130 - RNA, 22 nt, Human
uaugcuguggaaaauacaaaga

SEQ ID NO: 397131 - RNA, 22 nt, Human
aauaaugucuuuggcuugacca

SEQ ID NO: 397132 - RNA, 23 nt, Human
ggccauuucauuugguucaaacu

SEQ ID NO: 397133 - RNA, 22 nt, Human
gcagaauuuucuguuuucuaga

SEQ ID NO: 397134 - RNA, 22 nt, Human
cuuaaacugaaagcuacaagau

SEQ ID NO: 397135 - RNA, 22 nt, Human
aaucccagcuacucaggaaguu

SEQ ID NO: 397136 - RNA, 19 nt, Human
uccauaaugaagauagagg

SEQ ID NO: 397137 - RNA, 22 nt, Human
guuuaauaauguugaauuacua

SEQ ID NO: 397138 - RNA, 22 nt, Human
auuucaggauagccuaguuuug

SEQ ID NO: 397139 - RNA, 22 nt, Human
caacuuuucugugaauuuaagu

SEQ ID NO: 397140 - RNA, 22 nt, Human
gcuggaucccugugggaguggu

SEQ ID NO: 397141 - RNA, 23 nt, Human
aaguacauauauuuagauaguga

SEQ ID NO: 397142 - RNA, 22 nt, Human
uauuaucauuaacuguugaauu

SEQ ID NO: 397143 - RNA, 22 nt, Human
aagaaugagcucaaagaucuua

SEQ ID NO: 397144 - RNA, 22 nt, Human
uuauacaguuuauacuuagaau

SEQ ID NO: 397145 - RNA, 22 nt, Human
ucagaaaagagaaaaucuuaua

SEQ ID NO: 397146 - RNA, 22 nt, Human
auguguaugcaugcacuaagau

SEQ ID NO: 397147 - RNA, 22 nt, Human
aauuucaaacuaauaggaacca

SEQ ID NO: 397148 - RNA, 22 nt, Human
aaguuucaaauauaaaauuaca

SEQ ID NO: 397149 - RNA, 22 nt, Human
auguaaaucaagcagugcuggu

SEQ ID NO: 397150 - RNA, 22 nt, Human
agaaccucaauuauuuuugcac

SEQ ID NO: 397151 - RNA, 22 nt, Human
caaagccauagaguagauaaga

SEQ ID NO: 397152 - RNA, 22 nt, Human
cucuaacaccacagugugguuu

SEQ ID NO: 397153 - RNA, 23 nt, Human
uuaaaggcagauguugaguauua

SEQ ID NO: 397154 - RNA, 22 nt, Human
aucagaaauugcuaccagugga

SEQ ID NO: 397155 - RNA, 21 nt, Human
gauuugcagaaacuagacagg

SEQ ID NO: 397156 - RNA, 22 nt, Human
uuuaaagagaaugugaaggagu

SEQ ID NO: 397157 - RNA, 22 nt, Human
gaugaaaaucuugagaugucga

SEQ ID NO: 397158 - RNA, 22 nt, Human
uucauuaauucauucagugacu

SEQ ID NO: 397159 - RNA, 22 nt, Human
aguuaucagguguuuucaugga

SEQ ID NO: 397160 - RNA, 22 nt, Human
auccaaaccuggacaugagugg

SEQ ID NO: 397161 - RNA, 22 nt, Human
uucacacacagcuuccuauugu

SEQ ID NO: 397162 - RNA, 22 nt, Human
cuggcuuucuauuuggugcuau

SEQ ID NO: 397163 - RNA, 22 nt, Human
uuuauucuugagagugagaaga

SEQ ID NO: 397164 - RNA, 22 nt, Human
aguucacagaauggccagaacu

SEQ ID NO: 397165 - RNA, 22 nt, Human
aacaaacaaacauuuugucauc

SEQ ID NO: 397166 - RNA, 22 nt, Human
cugaauaauuuucuguuguaug

SEQ ID NO: 397167 - RNA, 22 nt, Human
augugaaauagcuggauaugaa

SEQ ID NO: 397168 - RNA, 22 nt, Human
gaagugaagguuacucuagauu

SEQ ID NO: 397169 - RNA, 22 nt, Human
aauaauuuccagccaacuggaa

SEQ ID NO: 397170 - RNA, 19 nt, Human
cauguuaugcuguaguauc

SEQ ID NO: 397171 - RNA, 22 nt, Human
aaagcagguugcaauuacagug

SEQ ID NO: 397172 - RNA, 22 nt, Human
aauacugagaucccacaaagca

SEQ ID NO: 397173 - RNA, 22 nt, Human
auacagaacucucaguuguaua

SEQ ID NO: 397174 - RNA, 21 nt, Human
auagaacaccaggcauauaua

SEQ ID NO: 397175 - RNA, 22 nt, Human
uguacaaugccgagacuaacuc

SEQ ID NO: 397176 - RNA, 22 nt, Human
uccaaaguaauuucacuucugu

SEQ ID NO: 397177 - RNA, 22 nt, Human
ucaguuucuccaucgcuccagu

SEQ ID NO: 397178 - RNA, 22 nt, Human
uggauuuaguucuucacaggcc

SEQ ID NO: 397179 - RNA, 22 nt, Human
aaauccuuuggaggacaugaug

SEQ ID NO: 397180 - RNA, 22 nt, Human
gcaacuuuagaaaaaucuauaa

SEQ ID NO: 397181 - RNA, 22 nt, Human
auuaggcaauucugggcaucuc

SEQ ID NO: 397182 - RNA, 22 nt, Human
auuauccucagaaaacauguga

SEQ ID NO: 397183 - RNA, 22 nt, Human
uuccucuagcuucucacuaaca

SEQ ID NO: 397184 - RNA, 22 nt, Human
uacauagaacauguuuaauguc

SEQ ID NO: 397185 - RNA, 22 nt, Human
aaucuagucuccuuaagucuuu

SEQ ID NO: 397186 - RNA, 22 nt, Human
agaaaucaauaucuauauguug

SEQ ID NO: 397187 - RNA, 22 nt, Human
augguuuaagggagaauauuga

SEQ ID NO: 397188 - RNA, 22 nt, Human
aaugucuucaguguauacaugg

SEQ ID NO: 397189 - RNA, 22 nt, Human
aaauauagcaauuaugccuacu

SEQ ID NO: 397190 - RNA, 22 nt, Human
aaagucauacauggugcuuacu

SEQ ID NO: 397191 - RNA, 22 nt, Human
augcuaaauggccaguaccaaa

SEQ ID NO: 397192 - RNA, 22 nt, Human
agaaccucuggauacaguuuaa

SEQ ID NO: 397193 - RNA, 22 nt, Human
cauuuacacuucuaaccacaag

SEQ ID NO: 397194 - RNA, 22 nt, Human
aaaacuguaucuucuugggacu

SEQ ID NO: 397195 - RNA, 22 nt, Human
uugauggcugugauuuacucag

SEQ ID NO: 397196 - RNA, 22 nt, Human
agcaauuuucccuuagucuuug

SEQ ID NO: 397197 - RNA, 22 nt, Human
aaucagaaucaguugacacagc

SEQ ID NO: 397198 - RNA, 18 nt, Human
gcaggcuuuuccuggguc

SEQ ID NO: 397199 - RNA, 22 nt, Human
uaaaacuuaacuauccagauua

SEQ ID NO: 397200 - RNA, 22 nt, Human
cugcagagcuuucugaaugaag

SEQ ID NO: 397201 - RNA, 20 nt, Human
auucuacaagaauaagcaug

SEQ ID NO: 397202 - RNA, 22 nt, Human
aaacuuugguauguagcaaaac

SEQ ID NO: 397203 - RNA, 22 nt, Human
cagagacauucaguaaauuauc

SEQ ID NO: 397204 - RNA, 22 nt, Human
uuugguccugagcaaaacuaug

SEQ ID NO: 397205 - RNA, 19 nt, Human
guuccaaaggccagaccuu

SEQ ID NO: 397206 - RNA, 22 nt, Human
caaucaguaaccggaucauggu

SEQ ID NO: 397207 - RNA, 22 nt, Human
uauaagaaacaaggcaaauuuu

SEQ ID NO: 397208 - RNA, 22 nt, Human
cauagaaaguauuauggaauuu

SEQ ID NO: 397209 - RNA, 22 nt, Human
cuuaaagaguauuuaauauaau

SEQ ID NO: 397210 - RNA, 22 nt, Human
uucaacccaaguucuccauuuu

SEQ ID NO: 397211 - RNA, 22 nt, Human
gaguccuuuucauagcaguggg

SEQ ID NO: 397212 - RNA, 22 nt, Human
uaauuuuaugacaguguauuuu

SEQ ID NO: 397213 - RNA, 22 nt, Human
augaaacaugcuuuguggauga

SEQ ID NO: 397214 - RNA, 22 nt, Human
ugcaggaagacuucccaagcca

SEQ ID NO: 397215 - RNA, 22 nt, Human
uuucagaaccgcuaaaauaaau

SEQ ID NO: 397216 - RNA, 22 nt, Human
uguaacaauuucuuacuauugu

SEQ ID NO: 397217 - RNA, 22 nt, Human
aguaaacauuuucauauuuucu

SEQ ID NO: 397218 - RNA, 22 nt, Human
uaggaaaacgugauuuucucac

SEQ ID NO: 397219 - RNA, 22 nt, Human
uaaaaugacuuccuccaacauc

SEQ ID NO: 397220 - RNA, 22 nt, Human
gagauuuagcugcuuaacuccu

SEQ ID NO: 397221 - RNA, 22 nt, Human
uaacagaagaaaacauauugga

SEQ ID NO: 397222 - RNA, 22 nt, Human
cauuucaaacaguuacagcugc

SEQ ID NO: 397223 - RNA, 22 nt, Human
agaaaucaauaucuauauguug

SEQ ID NO: 397224 - RNA, 22 nt, Human
aagacagugacagucacaauug

SEQ ID NO: 397225 - RNA, 22 nt, Human
uguggaaagucaaguuccagga

SEQ ID NO: 397226 - RNA, 22 nt, Human
gguuuaauggagauauuucaga

SEQ ID NO: 397227 - RNA, 22 nt, Human
caauuucagucucagagaguuc

SEQ ID NO: 397228 - RNA, 22 nt, Human
cuuauaaaguccaucugaacaa

SEQ ID NO: 397229 - RNA, 22 nt, Human
aaguccuugaagaaacaguucu

SEQ ID NO: 397230 - RNA, 22 nt, Human
uaauuucagugggcucugggcu

SEQ ID NO: 397231 - RNA, 22 nt, Human
uuauuccauucaguucaacaag

SEQ ID NO: 397232 - RNA, 22 nt, Human
acagaaauaacuuuuuauguuu

SEQ ID NO: 397233 - RNA, 22 nt, Human
agaucauaugaaaaauuucaag

SEQ ID NO: 397234 - RNA, 22 nt, Human
cauagaaacugagacaaggauu

SEQ ID NO: 397235 - RNA, 22 nt, Human
auauaauacaaccugcuaagug

SEQ ID NO: 397236 - RNA, 21 nt, Human
agagacugucacugcaguacc

SEQ ID NO: 397237 - RNA, 22 nt, Human
gagucaccacacggugcugacu

SEQ ID NO: 397238 - RNA, 22 nt, Human
caauuuuuaaacuaugaaguug

SEQ ID NO: 397239 - RNA, 17 nt, Human
cuuuuaauuuacuuccc

SEQ ID NO: 397240 - RNA, 21 nt, Human
uaaauaauaaguugcugagau

SEQ ID NO: 397241 - RNA, 21 nt, Human
acuuuaauauacaugaggagg

SEQ ID NO: 397242 - RNA, 22 nt, Human
auauaugcauguguacuuaugu

SEQ ID NO: 397243 - RNA, 22 nt, Human
aaacauguuuucugaauauuuu

SEQ ID NO: 397244 - RNA, 22 nt, Human
cagaucuguuugccagaucagc

SEQ ID NO: 397245 - RNA, 22 nt, Human
ugcaggaauagcuacagagcug

SEQ ID NO: 397246 - RNA, 22 nt, Human
augcuuaacucuguacauaguu

SEQ ID NO: 397247 - RNA, 22 nt, Human
aguacaauuauauuuagauggu

SEQ ID NO: 397248 - RNA, 23 nt, Human
aaucuauacuuaggcugguaaua

SEQ ID NO: 397249 - RNA, 22 nt, Human
uacaguauguucuugaauuugg

SEQ ID NO: 397250 - RNA, 22 nt, Human
ugcuuuaacauaagauaucuuu

SEQ ID NO: 397251 - RNA, 22 nt, Human
caaaggcaggcccccugugcag

SEQ ID NO: 397252 - RNA, 22 nt, Human
ugaaugaacuaaaucauaguuc

SEQ ID NO: 397253 - RNA, 22 nt, Human
ucuuuaauaucugccccagagc

SEQ ID NO: 397254 - RNA, 22 nt, Human
aauuaaaugacaggggaagaug

SEQ ID NO: 397255 - RNA, 22 nt, Human
uuuauaaaauagacugggucua

SEQ ID NO: 397256 - RNA, 22 nt, Human
uucaccacagucucaucuacgc

SEQ ID NO: 397257 - RNA, 22 nt, Human
cuauacagagcauccuuaacuu

SEQ ID NO: 397258 - RNA, 22 nt, Human
auagaauucuuugaaauuuaug

SEQ ID NO: 397259 - RNA, 22 nt, Human
acaacaaaaucacuagucuucc

SEQ ID NO: 397260 - RNA, 22 nt, Human
ugcuggcuacauuauugcuguc

SEQ ID NO: 397261 - RNA, 22 nt, Human
ucuagacacuacuaguaaccgg

SEQ ID NO: 397262 - RNA, 22 nt, Human
uaacaagucauuuuaaauuaug

SEQ ID NO: 397263 - RNA, 22 nt, Human
ucacagaagagauauugacaga

SEQ ID NO: 397264 - RNA, 22 nt, Human
uauguaaaguagauggcaggua

SEQ ID NO: 397265 - RNA, 22 nt, Human
acaacuuuaauggguuucagcu

SEQ ID NO: 397266 - RNA, 19 nt, Human
aucugagauuauaaacaga

SEQ ID NO: 397267 - RNA, 22 nt, Human
uguguaaaaucugauuaauacu

SEQ ID NO: 397268 - RNA, 22 nt, Human
gagucaccuuggccgcuguccc

SEQ ID NO: 397269 - RNA, 22 nt, Human
caucagaaccaguggggacauu

SEQ ID NO: 397270 - RNA, 22 nt, Human
caugcuuauucauucugcuaac

SEQ ID NO: 397271 - RNA, 22 nt, Human
ggcaauuucaugugguuuaaac

SEQ ID NO: 397272 - RNA, 22 nt, Human
auaaacaguagagaaagguggu

SEQ ID NO: 397273 - RNA, 22 nt, Human
uuuaggcaugcaguucuauuua

SEQ ID NO: 397274 - RNA, 22 nt, Human
ucuaaacacgucucuuugaaua

SEQ ID NO: 397275 - RNA, 22 nt, Human
uaucagaaacucuggggcaggg

SEQ ID NO: 397276 - RNA, 22 nt, Human
caaugaaauugagauccagaga

SEQ ID NO: 397277 - RNA, 22 nt, Human
uggcuuaagcgcaacucugucu

SEQ ID NO: 397278 - RNA, 22 nt, Human
auaaagucauuaugaagaucua

SEQ ID NO: 397279 - RNA, 22 nt, Human
uucuuaauaccuauuuucuacc

SEQ ID NO: 397280 - RNA, 22 nt, Human
aaauacugucucugagagagcc

SEQ ID NO: 397281 - RNA, 22 nt, Human
auggcauuugaccgcuuugugg

SEQ ID NO: 397282 - RNA, 22 nt, Human
uaugaaaagguggccaauguag

SEQ ID NO: 397283 - RNA, 22 nt, Human
uuuccaaagguggcaggaacaa

SEQ ID NO: 397284 - RNA, 22 nt, Human
auauccaagaaacaauuaauuc

SEQ ID NO: 397285 - RNA, 22 nt, Human
uuggcuucuucgcacagcagua

SEQ ID NO: 397286 - RNA, 22 nt, Human
guuaggcaauaccucuuacacc

SEQ ID NO: 397287 - RNA, 22 nt, Human
ucagccagcaucagcuaagugc

SEQ ID NO: 397288 - RNA, 22 nt, Human
cccaaaguacaaguaaacaugu

SEQ ID NO: 397289 - RNA, 22 nt, Human
caguccuuauuccuauauuccu

SEQ ID NO: 397290 - RNA, 22 nt, Human
caaagcaccacaaaccagguga

SEQ ID NO: 397291 - RNA, 22 nt, Human
aaucagaaauucuacaucacaa

SEQ ID NO: 397292 - RNA, 22 nt, Human
cauggauugaauauaaauuaga

SEQ ID NO: 397293 - RNA, 22 nt, Human
uuccuuagcagaccugguaucc

SEQ ID NO: 397294 - RNA, 18 nt, Human
ucauagaagugaaucaga

SEQ ID NO: 397295 - RNA, 22 nt, Human
uggcauuucuguuagacucuca

SEQ ID NO: 397296 - RNA, 22 nt, Human
uuggagagaggcugcucaggcu

SEQ ID NO: 397297 - RNA, 22 nt, Human
auccaaaggugacacagaauac

SEQ ID NO: 397298 - RNA, 22 nt, Human
acauaauaggugccugaauauu

SEQ ID NO: 397299 - RNA, 22 nt, Human
guaaacauuuucaucugugccc

SEQ ID NO: 397300 - RNA, 22 nt, Human
ucauaaaguuacccaaauuuua

SEQ ID NO: 397301 - RNA, 22 nt, Human
aucagaaaggugggcaagcaga

SEQ ID NO: 397302 - RNA, 22 nt, Human
auuucaacacuuuuggaauuag

SEQ ID NO: 397303 - RNA, 22 nt, Human
aagguucuaagggaagccaugc

SEQ ID NO: 397304 - RNA, 22 nt, Human
agucuuaauagagaaaaacugu

SEQ ID NO: 397305 - RNA, 22 nt, Human
uuuacagagagagaacuggacu

SEQ ID NO: 397306 - RNA, 22 nt, Human
cauggcuuuguucauauaauuu

SEQ ID NO: 397307 - RNA, 22 nt, Human
uuagaaauauggugcugccgcc

SEQ ID NO: 397308 - RNA, 22 nt, Human
aguaaacauagaauguucuucc

SEQ ID NO: 397309 - RNA, 22 nt, Human
uaucagaaggaagugccuuuaa

SEQ ID NO: 397310 - RNA, 22 nt, Human
uaucuaaauggaauauuccaga

SEQ ID NO: 397311 - RNA, 22 nt, Human
uggcauuuucuccuuugaguuu

SEQ ID NO: 397312 - RNA, 22 nt, Human
uagucaccagcuacaggacagc

SEQ ID NO: 397313 - RNA, 22 nt, Human
caaagccauagaguagauaaga

SEQ ID NO: 397314 - RNA, 21 nt, Human
uuucagaccuaucuuugaagg

SEQ ID NO: 397315 - RNA, 22 nt, Human
auacaaugaaguauagaugaaa

SEQ ID NO: 397316 - RNA, 22 nt, Human
aaagacauuagcuuagauguca

SEQ ID NO: 397317 - RNA, 21 nt, Human
caaagccaggcaacucucucc

SEQ ID NO: 397318 - RNA, 22 nt, Human
cagaucuagagcuuuuccaucu

SEQ ID NO: 397319 - RNA, 22 nt, Human
uucaaacaguguagaauauaug

SEQ ID NO: 397320 - RNA, 22 nt, Human
uaagucauaagucaugauguua

SEQ ID NO: 397321 - RNA, 22 nt, Human
cauggucuacaauuucauuuua

SEQ ID NO: 397322 - RNA, 22 nt, Human
cagcccagagauguuaucuagu

SEQ ID NO: 397323 - RNA, 22 nt, Human
ucuaaacaguuucacucuuaau

SEQ ID NO: 397324 - RNA, 22 nt, Human
agauuuacuggagucuuuggug

SEQ ID NO: 397325 - RNA, 22 nt, Human
caucagaaagaguccuggacuu

SEQ ID NO: 397326 - RNA, 22 nt, Human
uaaguccuaacagacugggggc

SEQ ID NO: 397327 - RNA, 22 nt, Human
uuguuaaaaauagauuuccagg

SEQ ID NO: 397328 - RNA, 22 nt, Human
agauuucacaugcugcucuauu

SEQ ID NO: 397329 - RNA, 22 nt, Human
cagagauuauuauaacuaauua

SEQ ID NO: 397330 - RNA, 22 nt, Human
ucagccaguugccccaguuagu

SEQ ID NO: 397331 - RNA, 22 nt, Human
ucuauaaaugcagauaugugug

SEQ ID NO: 397332 - RNA, 22 nt, Human
uggcuuuacacauccacugccu

SEQ ID NO: 397333 - RNA, 22 nt, Human
uuuacagauguggaaagugagc

SEQ ID NO: 397334 - RNA, 22 nt, Human
auguucaaacuuuuuacacacc

SEQ ID NO: 397335 - RNA, 22 nt, Human
cuauagaaaauuguaucacacg

SEQ ID NO: 397336 - RNA, 22 nt, Human
uacuuaaugccacugaauugua

SEQ ID NO: 397337 - RNA, 22 nt, Human
aaagucauuuuccagaccagua

SEQ ID NO: 397338 - RNA, 22 nt, Human
uuuaggcagcagugaggaugaa

SEQ ID NO: 397339 - RNA, 22 nt, Human
cuaaaauuaucaagauaauucc

SEQ ID NO: 397340 - RNA, 22 nt, Human
gacuaugugaagugugaauagg

SEQ ID NO: 397341 - RNA, 22 nt, Human
uacuagaaccucacaacaaucc

SEQ ID NO: 397342 - RNA, 22 nt, Human
auguuucaaauauauagaguug

SEQ ID NO: 397343 - RNA, 22 nt, Human
aucauaaagugcuaucugauug

SEQ ID NO: 397344 - RNA, 22 nt, Human
gagaagguggaccugaaggagc

SEQ ID NO: 397345 - RNA, 22 nt, Human
ccuggaucagagccagagaagc

SEQ ID NO: 397346 - RNA, 22 nt, Human
uuuagaaugugacuguauuuga

SEQ ID NO: 397347 - RNA, 22 nt, Human
guucuaauauuuuaaaagccaa

SEQ ID NO: 397348 - RNA, 22 nt, Human
cauuucaagcauugacuucuau

SEQ ID NO: 397349 - RNA, 22 nt, Human
uguccuuauaagaaaaggaaau

SEQ ID NO: 397350 - RNA, 22 nt, Human
acagguuuuuguggauauaugu

SEQ ID NO: 397351 - RNA, 22 nt, Human
caugcuuaugauuugcuaagcc

SEQ ID NO: 397352 - RNA, 22 nt, Human
ucuggaucucccucauccuggg

SEQ ID NO: 397353 - RNA, 22 nt, Human
agaauuuccuaugagagauucc

SEQ ID NO: 397354 - RNA, 22 nt, Human
caauuucaaugaggccacaggg

SEQ ID NO: 397355 - RNA, 20 nt, Human
uauuuacaacuuagagccuc

SEQ ID NO: 397356 - RNA, 22 nt, Human
uuuaggcagaagcccugcugau

SEQ ID NO: 397357 - RNA, 22 nt, Human
ugcagagacuugugugcauuug

SEQ ID NO: 397358 - RNA, 22 nt, Human
gauuucaaaaguagauccauca

SEQ ID NO: 397359 - RNA, 22 nt, Human
uucauacucacuccaauaacug

SEQ ID NO: 397360 - RNA, 22 nt, Human
auuccaaagccugaauaaugga

SEQ ID NO: 397361 - RNA, 22 nt, Human
uuccuuagcuccucauggccug

SEQ ID NO: 397362 - RNA, 20 nt, Human
ucuuauacagaaaacauuuu

SEQ ID NO: 397363 - RNA, 22 nt, Human
uggauuuauggagaccgaaagu

SEQ ID NO: 397364 - RNA, 19 nt, Human
aacuggauaauggccacau

SEQ ID NO: 397365 - RNA, 21 nt, Human
uccagaaaagaggucauuagc

SEQ ID NO: 397366 - RNA, 22 nt, Human
aagauauagauggugguauaaa

SEQ ID NO: 397367 - RNA, 22 nt, Human
uuacuacugcuuuacuacuggg

SEQ ID NO: 397368 - RNA, 22 nt, Human
cauuuacauuuaagguuaauau

SEQ ID NO: 397369 - RNA, 22 nt, Human
gaaaauagcagauagaccaaug

SEQ ID NO: 397370 - RNA, 22 nt, Human
gaauuucaaaagccagaacggg

SEQ ID NO: 397371 - RNA, 22 nt, Human
aaauaauguuaggccuuugcuc

SEQ ID NO: 397372 - RNA, 17 nt, Human
ugaaaucagcacccagg

SEQ ID NO: 397373 - RNA, 22 nt, Human
aaauaucauuuauaacuuuuaa

SEQ ID NO: 397374 - RNA, 22 nt, Human
caucagaaugaauguucuggag

SEQ ID NO: 397375 - RNA, 22 nt, Human
aauuucaaacucuugcccucag

SEQ ID NO: 397376 - RNA, 22 nt, Human
gauuuauaguaugugcuuucag

SEQ ID NO: 397377 - RNA, 22 nt, Human
uaagagaacuggauagauagga

SEQ ID NO: 397378 - RNA, 22 nt, Human
aagccaaugagagaggccucag

SEQ ID NO: 397379 - RNA, 22 nt, Human
uuacagaacugucuugaaauuu

SEQ ID NO: 397380 - RNA, 22 nt, Human
uggcauuuggcuuacuuauguu

SEQ ID NO: 397381 - RNA, 22 nt, Human
aauuauauuguggugugaaugu

SEQ ID NO: 397382 - RNA, 22 nt, Human
ucaaacauguuagcagucugug

SEQ ID NO: 397383 - RNA, 22 nt, Human
guauuuaauuccauuaaguuag

SEQ ID NO: 397384 - RNA, 22 nt, Human
uaacagaagaugaaacuucuuu

SEQ ID NO: 397385 - RNA, 21 nt, Human
auccuuagcacuuagaagagu

SEQ ID NO: 397386 - RNA, 22 nt, Human
augcacaagcaagagauaaugg

SEQ ID NO: 397387 - RNA, 22 nt, Human
ccuuuaauuuacaauguuaauu

SEQ ID NO: 397388 - RNA, 22 nt, Human
cacaaagucugcagcugcugua

SEQ ID NO: 397389 - RNA, 22 nt, Human
uuucuagugguuaagauuuaca

SEQ ID NO: 397390 - RNA, 22 nt, Human
aagcauuugugaaauucagaug

SEQ ID NO: 397391 - RNA, 21 nt, Human
agaagucaauugaacugaaau

SEQ ID NO: 397392 - RNA, 22 nt, Human
acuggauuccauugugcaaaga

SEQ ID NO: 397393 - RNA, 21 nt, Human
cucagagaaaugucugggagc

SEQ ID NO: 397394 - RNA, 22 nt, Human
guauagaaacccagaaagauag

SEQ ID NO: 397395 - RNA, 21 nt, Human
caauuucaugggaagauggga

SEQ ID NO: 397396 - RNA, 22 nt, Human
cagaaucagcccuugcuauuaa

SEQ ID NO: 397397 - RNA, 22 nt, Human
uuccauaauaggcuuaagugaa

SEQ ID NO: 397398 - RNA, 22 nt, Human
aaacugugaagcaaguacaagg

SEQ ID NO: 397399 - RNA, 22 nt, Human
acagaauuuacacaucucuaaa

SEQ ID NO: 397400 - RNA, 22 nt, Human
gauucuuacuucuaagcaagcu

SEQ ID NO: 397401 - RNA, 22 nt, Human
uuaaagucccugccuuaauucc

SEQ ID NO: 397402 - RNA, 22 nt, Human
ugcuuuaaccaucuuguuugga

SEQ ID NO: 397403 - RNA, 22 nt, Human
uuuauucuauaggcauuaagca

SEQ ID NO: 397404 - RNA, 22 nt, Human
caaucaguuucuguuguauaau

SEQ ID NO: 397405 - RNA, 22 nt, Human
uucagaaaaaacuucaauaagu

SEQ ID NO: 397406 - RNA, 22 nt, Human
uaauuauagccgcuauuuugcu

SEQ ID NO: 397407 - RNA, 22 nt, Human
gcuggauccacaaauaacuuug

SEQ ID NO: 397408 - RNA, 22 nt, Human
auaacaugagccagauugaaag

SEQ ID NO: 397409 - RNA, 22 nt, Human
ucucuuaacugguucagcaauu

SEQ ID NO: 397410 - RNA, 20 nt, Human
guaaugaauguaaacaguaa

SEQ ID NO: 397411 - RNA, 22 nt, Human
agaauuucuggaagauugcaag

SEQ ID NO: 397412 - RNA, 22 nt, Human
auuguuaauguugcacuaaggu

SEQ ID NO: 397413 - RNA, 22 nt, Human
ucaaacaggacuacauucucau

SEQ ID NO: 397414 - RNA, 20 nt, Human
cuguaucagguuacaaagua

SEQ ID NO: 397415 - RNA, 22 nt, Human
ugauauuuaagcaaaaauaugg

SEQ ID NO: 397416 - RNA, 22 nt, Human
gugaacuauuggguaucauaaa

SEQ ID NO: 397417 - RNA, 22 nt, Human
uaauuacagguccaaaacaauc

SEQ ID NO: 397418 - RNA, 22 nt, Human
auaugaaaagaagucaccauug

SEQ ID NO: 397419 - RNA, 22 nt, Human
aauguuaauguguuugcuuaug

SEQ ID NO: 397420 - RNA, 22 nt, Human
ucuggauccuaugcacuggacu

SEQ ID NO: 397421 - RNA, 22 nt, Human
uaaagcacgucuauuuaaugau

SEQ ID NO: 397422 - RNA, 22 nt, Human
ugaaacaaauuuggaaaaucua

SEQ ID NO: 397423 - RNA, 22 nt, Human
uuuaggcauugggugcucaagu

SEQ ID NO: 397424 - RNA, 22 nt, Human
ucacacauucuagguauguuga

SEQ ID NO: 397425 - RNA, 22 nt, Human
aaaacagacagccaguguagag

SEQ ID NO: 397426 - RNA, 19 nt, Human
gcaggaaaugagugauugc

SEQ ID NO: 397427 - RNA, 22 nt, Human
uacauacaagauguguuuaaaa

SEQ ID NO: 397428 - RNA, 22 nt, Human
uaucagaacacagccacagcca

SEQ ID NO: 397429 - RNA, 22 nt, Human
aucuauacucagaguuaauauc

SEQ ID NO: 397430 - RNA, 23 nt, Human
ggauuuaguggaugagcugagug

SEQ ID NO: 397431 - RNA, 22 nt, Human
auaucagaaauaguaagcagag

SEQ ID NO: 397432 - RNA, 22 nt, Human
ucagaaauacaaaacacuuacu

SEQ ID NO: 397433 - RNA, 19 nt, Human
uggcauuuggaggcaaccu

SEQ ID NO: 397434 - RNA, 22 nt, Human
agucaccaacaugguucccagg

SEQ ID NO: 397435 - RNA, 22 nt, Human
cuuccaaauguaaauaaguuuc

SEQ ID NO: 397436 - RNA, 22 nt, Human
caguccuuaaggaaacauuugu

SEQ ID NO: 397437 - RNA, 22 nt, Human
uggcuucaaaaucuaguggucu

SEQ ID NO: 397438 - RNA, 22 nt, Human
gcuggaucaaguccuucaccca

SEQ ID NO: 397439 - RNA, 22 nt, Human
uaugcuguggaaaauacaaaga

SEQ ID NO: 397440 - RNA, 22 nt, Human
cucuaacacuguaaugcuuucu

SEQ ID NO: 397441 - RNA, 22 nt, Human
ugaaauagucuaaaaaaccaga

SEQ ID NO: 397442 - RNA, 22 nt, Human
augguuuauugcuuuaaugaaa

SEQ ID NO: 397443 - RNA, 22 nt, Human
guuccaaacaagucauaaagua

SEQ ID NO: 397444 - RNA, 22 nt, Human
aacaugcuuugauaaauaaaag

SEQ ID NO: 397445 - RNA, 22 nt, Human
acaacuuucuggguuaucugau

SEQ ID NO: 397446 - RNA, 22 nt, Human
uuucacacaacgugaauauacu

SEQ ID NO: 397447 - RNA, 22 nt, Human
agaauucauaggaaguuuccua

SEQ ID NO: 397448 - RNA, 22 nt, Human
uccuuaauauggaagaguucuc

SEQ ID NO: 397449 - RNA, 22 nt, Human
cauaacaguggcuucagcaagu

SEQ ID NO: 397450 - RNA, 22 nt, Human
auuucuuacauaacaaauuguu

SEQ ID NO: 397451 - RNA, 22 nt, Human
uucagaaaaagaccauugcaau

SEQ ID NO: 397452 - RNA, 22 nt, Human
auuaggcacuagaaugucaauu

SEQ ID NO: 397453 - RNA, 22 nt, Human
uagaaacagaaaacuguaauag

SEQ ID NO: 397454 - RNA, 22 nt, Human
ucugauaacucuggccccaggc

SEQ ID NO: 397455 - RNA, 22 nt, Human
auacuguaauaccuaaaugaac

SEQ ID NO: 397456 - RNA, 22 nt, Human
ugugugaaucuauugaauauau

SEQ ID NO: 397457 - RNA, 22 nt, Human
augguuuacugaucuuuuuggu

SEQ ID NO: 397458 - RNA, 21 nt, Human
uuuaaagaauaggaagggagg

SEQ ID NO: 397459 - RNA, 17 nt, Human
cuguuaauucauuuccc

SEQ ID NO: 397460 - RNA, 22 nt, Human
gaacuuuaccauuuagguaacu

SEQ ID NO: 397461 - RNA, 23 nt, Human
acaacuuuacagauacauuuugu

SEQ ID NO: 397462 - RNA, 22 nt, Human
caucagaacgugagcuccuugu

SEQ ID NO: 397463 - RNA, 22 nt, Human
acaaaauuaccuaguuauuuuc

SEQ ID NO: 397464 - RNA, 22 nt, Human
cauuuacacacagaggugugcu

SEQ ID NO: 397465 - RNA, 22 nt, Human
aauaauuuuagcucagaguugu

SEQ ID NO: 397466 - RNA, 22 nt, Human
ugaucugagagcagaucaccau

SEQ ID NO: 397467 - RNA, 20 nt, Human
agaaaucagaccacacacua

SEQ ID NO: 397468 - RNA, 22 nt, Human
auacagaaaaguggauagccag

SEQ ID NO: 397469 - RNA, 22 nt, Human
caucagucuagauucuaguacc

SEQ ID NO: 397470 - RNA, 23 nt, Human
uacagaaggaguagucacuaaga

SEQ ID NO: 397471 - RNA, 22 nt, Human
ccuggauccaugaaaaggcuac

SEQ ID NO: 397472 - RNA, 22 nt, Human
uucugugacuccucagagauuu

SEQ ID NO: 397473 - RNA, 22 nt, Human
auauacugaggagacuuuauau

SEQ ID NO: 397474 - RNA, 22 nt, Human
cucuuaaugaccuuaauucaag

SEQ ID NO: 397475 - RNA, 22 nt, Human
aaaauugaggcucauguuaaau

SEQ ID NO: 397476 - RNA, 22 nt, Human
uaacacaaaagaauaugugugu

SEQ ID NO: 397477 - RNA, 22 nt, Human
agagacaaugccaaugcacacg

SEQ ID NO: 397478 - RNA, 22 nt, Human
gaauuucaaagagguuaagagg

SEQ ID NO: 397479 - RNA, 22 nt, Human
ugaaagguguccaauauuucuc

SEQ ID NO: 397480 - RNA, 22 nt, Human
aagccauuuguuguccuucagg

SEQ ID NO: 397481 - RNA, 22 nt, Human
ucaccagucuuucuuaccauug

SEQ ID NO: 397482 - RNA, 22 nt, Human
aacaaacaaacauuuugucauc

SEQ ID NO: 397483 - RNA, 22 nt, Human
caucagaauuacuuggggagcu

SEQ ID NO: 397484 - RNA, 22 nt, Human
auuuaucucuggaaacuaagca

SEQ ID NO: 397485 - RNA, 22 nt, Human
acaaaauuuuuagacaaggcuu

SEQ ID NO: 397486 - RNA, 22 nt, Human
aauaauuacccaucuuuuugua

SEQ ID NO: 397487 - RNA, 22 nt, Human
uacacauguuuggcaaguaugu

SEQ ID NO: 397488 - RNA, 19 nt, Human
uacuaaacaugcauauugg

SEQ ID NO: 397489 - RNA, 22 nt, Human
auggccuuagugaugauuaaua

SEQ ID NO: 397490 - RNA, 22 nt, Human
aggcuucuucuuccuauuuagu

SEQ ID NO: 397491 - RNA, 22 nt, Human
uaacagaaaggggacagaaaua

SEQ ID NO: 397492 - RNA, 22 nt, Human
ccagaucuaaguccaaaguacu

SEQ ID NO: 397493 - RNA, 20 nt, Human
uacagaaacaggacuuuugg

SEQ ID NO: 397494 - RNA, 22 nt, Human
auacaaugauaauaguacuuua

SEQ ID NO: 397495 - RNA, 22 nt, Human
caaguccucgcuucuagcugug

SEQ ID NO: 397496 - RNA, 22 nt, Human
aacuuugaggucacugaauucc

SEQ ID NO: 397497 - RNA, 22 nt, Human
cauuucaaugccuucaacauag

SEQ ID NO: 397498 - RNA, 21 nt, Human
augugaaauaucaucagagca

SEQ ID NO: 397499 - RNA, 22 nt, Human
ucagccuacacuccaacagcau

SEQ ID NO: 397500 - RNA, 22 nt, Human
gauuuauaaagguugcacugga

SEQ ID NO: 397501 - RNA, 22 nt, Human
auaauaaaccaggaugggucug

SEQ ID NO: 397502 - RNA, 22 nt, Human
uucauuugccaucaguguaaug

SEQ ID NO: 397503 - RNA, 22 nt, Human
ucagccaggccaggcauucaca

SEQ ID NO: 397504 - RNA, 22 nt, Human
agaaucugguagaaccaaggau

SEQ ID NO: 397505 - RNA, 23 nt, Human
uuaaacuucagugcagaacacuc

SEQ ID NO: 397506 - RNA, 22 nt, Human
ucagaaaugaucguuauucauu

SEQ ID NO: 397507 - RNA, 22 nt, Human
aauuucaaguggcaucuuugau

SEQ ID NO: 397508 - RNA, 22 nt, Human
uuccugggacuggagcagccca

SEQ ID NO: 397509 - RNA, 18 nt, Human
agaugaaagcaaaugaca

SEQ ID NO: 397510 - RNA, 22 nt, Human
guaaugaaugaaagaaacuggg

SEQ ID NO: 397511 - RNA, 22 nt, Human
uugaagaaauuauuuuauauag

SEQ ID NO: 397512 - RNA, 19 nt, Human
guuaggcaggguggggagu

SEQ ID NO: 397513 - RNA, 22 nt, Human
ugugaaagauacuaggcagagg

SEQ ID NO: 397514 - RNA, 23 nt, Human
uaagaacagacaagcauuuacau

SEQ ID NO: 397515 - RNA, 22 nt, Human
acuucacagaaauuuuaugagg

SEQ ID NO: 397516 - RNA, 22 nt, Human
caaugaaagcaacugccuauaa

SEQ ID NO: 397517 - RNA, 22 nt, Human
augugcuucauucuacaugaca

SEQ ID NO: 397518 - RNA, 22 nt, Human
aaaucaguucacguucugaggu

SEQ ID NO: 397519 - RNA, 22 nt, Human
caggccagcuuccugacauccu

SEQ ID NO: 397520 - RNA, 23 nt, Human
cuuucauugugguuucacagagc

SEQ ID NO: 397521 - RNA, 22 nt, Human
auggauuugcuuauacacaugu

SEQ ID NO: 397522 - RNA, 22 nt, Human
guaaauuauuucaagaucaucu

SEQ ID NO: 397523 - RNA, 22 nt, Human
uauuuaucgagugucuacuaug

SEQ ID NO: 397524 - RNA, 23 nt, Human
uguaacaauuucauauacaugca

SEQ ID NO: 397525 - RNA, 22 nt, Human
cuaaagaagcuagcaaucuaua

SEQ ID NO: 397526 - RNA, 22 nt, Human
gagauuuagagagacuuaaaca

SEQ ID NO: 397527 - RNA, 22 nt, Human
auuccaaacgccucgcggacuu

SEQ ID NO: 397528 - RNA, 22 nt, Human
uuccuuagccugccuuccaggg

SEQ ID NO: 397529 - RNA, 22 nt, Human
agaagucaaguggucuaugaaa

SEQ ID NO: 397530 - RNA, 22 nt, Human
cauaauuacugauaugcugauu

SEQ ID NO: 397531 - RNA, 22 nt, Human
aagucaccccacacucuuggga

SEQ ID NO: 397532 - RNA, 22 nt, Human
auaucagacagaaagcauugac

SEQ ID NO: 397533 - RNA, 22 nt, Human
ucacauaaauuauacaauuuca

SEQ ID NO: 397534 - RNA, 22 nt, Human
aaagaaucagaagucucaaaca

SEQ ID NO: 397535 - RNA, 22 nt, Human
ccaaaauuaagccucuuauguu

SEQ ID NO: 397536 - RNA, 22 nt, Human
aucacaaaggucucagagcaca

SEQ ID NO: 397537 - RNA, 22 nt, Human
uaauagaauaguggaaacauug

SEQ ID NO: 397538 - RNA, 22 nt, Human
augguuuuagaaucaggaaaaa

SEQ ID NO: 397539 - RNA, 22 nt, Human
auauaaagaaguggaaaaugag

SEQ ID NO: 397540 - RNA, 22 nt, Human
auuaugcugguuuacacauuuu

SEQ ID NO: 397541 - RNA, 22 nt, Human
aaugaaaauuggacccuagaac

SEQ ID NO: 397542 - RNA, 22 nt, Human
cauggcuuuuuagcauauucaa

SEQ ID NO: 397543 - RNA, 22 nt, Human
ucaauaaaauuguuuuccuauc

SEQ ID NO: 397544 - RNA, 22 nt, Human
acaggauuagcaaguaaucagg

SEQ ID NO: 397545 - RNA, 21 nt, Human
gauuuauaagccuuaagccua

SEQ ID NO: 397546 - RNA, 22 nt, Human
agcauuuauuucuuagaaauug

SEQ ID NO: 397547 - RNA, 22 nt, Human
acaaaauuaugaagaggccuug

SEQ ID NO: 397548 - RNA, 22 nt, Human
guuauaaaggugauaaugguca

SEQ ID NO: 397549 - RNA, 22 nt, Human
uuugaagugcaaugaggauucu

SEQ ID NO: 397550 - RNA, 22 nt, Human
aaaugccuguguaaauucuagc

SEQ ID NO: 397551 - RNA, 22 nt, Human
aaggacagggaugguugauugu

SEQ ID NO: 397552 - RNA, 22 nt, Human
gcauaauauacaugcuugaucc

SEQ ID NO: 397553 - RNA, 22 nt, Human
aggauuuauuggugggaaguua

SEQ ID NO: 397554 - RNA, 22 nt, Human
guauuugcaaaucuaaaagaga

SEQ ID NO: 397555 - RNA, 22 nt, Human
agccauuuuccugaaauauaac

SEQ ID NO: 397556 - RNA, 22 nt, Human
aauguucaaacagaucacuuag

SEQ ID NO: 397557 - RNA, 22 nt, Human
cuuuuaaugggagcaguauuug

SEQ ID NO: 397558 - RNA, 22 nt, Human
caguccuuucugaaauccuaua

SEQ ID NO: 397559 - RNA, 22 nt, Human
auucuacaacccaauaauaauu

SEQ ID NO: 397560 - RNA, 22 nt, Human
caucagaaaccuugaggaaacu

SEQ ID NO: 397561 - RNA, 22 nt, Human
uuaguacugauagggucaauca

SEQ ID NO: 397562 - RNA, 22 nt, Human
uuuccaaacccagcgagcuaca

SEQ ID NO: 397563 - RNA, 22 nt, Human
auacagaagaacuauagccacu

SEQ ID NO: 397564 - RNA, 22 nt, Human
ucuauacugaugggauacuauu

SEQ ID NO: 397565 - RNA, 22 nt, Human
cuggcuuucauuucaagcacgu

SEQ ID NO: 397566 - RNA, 22 nt, Human
uuuccaaaguugccauaagcuu

SEQ ID NO: 397567 - RNA, 22 nt, Human
augcuuaacuuccuagucuaua

SEQ ID NO: 397568 - RNA, 23 nt, Human
acuuuauccuauaucuuuguucu

SEQ ID NO: 397569 - RNA, 22 nt, Human
uucacacacagcuuccuauugu

SEQ ID NO: 397570 - RNA, 22 nt, Human
aagugauuuguacaaaaugucg

SEQ ID NO: 397571 - RNA, 22 nt, Human
auuacacuuguucaucaucacc

SEQ ID NO: 397572 - RNA, 22 nt, Human
aaagaaucuauauaucaccacc

SEQ ID NO: 397573 - RNA, 22 nt, Human
uccaauauggauaaaaggggcc

SEQ ID NO: 397574 - RNA, 23 nt, Human
cagaaaucugaaaucuagaaaug

SEQ ID NO: 397575 - RNA, 22 nt, Human
uagaugcuacaauuuuguacuc

SEQ ID NO: 397576 - RNA, 22 nt, Human
ucccugggcuucuccagacuug

SEQ ID NO: 397577 - RNA, 22 nt, Human
ugugaaaagcguguguucuagg

SEQ ID NO: 397578 - RNA, 22 nt, Human
aacauguaaccagcauucaucu

SEQ ID NO: 397579 - RNA, 22 nt, Human
aaacuuuggauugugauugugc

SEQ ID NO: 397580 - RNA, 22 nt, Human
uuaaaaucuaaagcaguugucu

SEQ ID NO: 397581 - RNA, 22 nt, Human
aaauagcagccuuuaguuaaca

SEQ ID NO: 397582 - RNA, 22 nt, Human
cuacagaaguuucccuugcuua

SEQ ID NO: 397583 - RNA, 23 nt, Human
caauuucauaugauucuaccuaa

SEQ ID NO: 397584 - RNA, 22 nt, Human
ucagccagugccuugaucuugc

SEQ ID NO: 397585 - RNA, 22 nt, Human
acuuuaucaggaaucacacagc

SEQ ID NO: 397586 - RNA, 22 nt, Human
aaagccauuacaaaauuucaua

SEQ ID NO: 397587 - RNA, 22 nt, Human
uguacaaucugaugauguaugg

SEQ ID NO: 397588 - RNA, 22 nt, Human
gcuauacagcaggagaauggaa

SEQ ID NO: 397589 - RNA, 22 nt, Human
auauacaaagggcaaccucgcu

SEQ ID NO: 397590 - RNA, 22 nt, Human
cuuaaacugaaagcuacaagau

SEQ ID NO: 397591 - RNA, 22 nt, Human
uggagaauuuugucaccagaca

SEQ ID NO: 397592 - RNA, 22 nt, Human
ucaauaauggcaggauaaauuu

SEQ ID NO: 397593 - RNA, 22 nt, Human
uuacagaaucuacucgugguga

SEQ ID NO: 397594 - RNA, 22 nt, Human
ugauaauauuuugaaucauaag

SEQ ID NO: 397595 - RNA, 22 nt, Human
uuagaaaaaacgucuucuagug

SEQ ID NO: 397596 - RNA, 22 nt, Human
aagacuuucaaaccuauguuug

SEQ ID NO: 397597 - RNA, 22 nt, Human
aaucaaaaccuacagagguaau

SEQ ID NO: 397598 - RNA, 22 nt, Human
uucagaaagguuaaucuggauu

SEQ ID NO: 397599 - RNA, 22 nt, Human
uaaagacaaacccacuaggguu

SEQ ID NO: 397600 - RNA, 19 nt, Human
uccauaaugaagauagagg

SEQ ID NO: 397601 - RNA, 22 nt, Human
uacacauguauuuauguguaca

SEQ ID NO: 397602 - RNA, 22 nt, Human
uuauuuauggcccucaccugau

SEQ ID NO: 397603 - RNA, 22 nt, Human
aaaaucugcuuccuuuuacaga

SEQ ID NO: 397604 - RNA, 22 nt, Human
uuaggaaacgcugcuauugacu

SEQ ID NO: 397605 - RNA, 22 nt, Human
uuuaggcauugaauuagaauag

SEQ ID NO: 397606 - RNA, 22 nt, Human
uaagacuucauuaguaauaugg

SEQ ID NO: 397607 - RNA, 22 nt, Human
uuccuuagggaaagggauaagg

SEQ ID NO: 397608 - RNA, 22 nt, Human
auucuuaaauuuaggucuguga

SEQ ID NO: 397609 - RNA, 22 nt, Human
aguauuuagcauagugguuagu

SEQ ID NO: 397610 - RNA, 22 nt, Human
uacagagauuuauugcuaaggc

SEQ ID NO: 397611 - RNA, 22 nt, Human
uuacagaaggaacacuacucag

SEQ ID NO: 397612 - RNA, 22 nt, Human
cucuacucuuaacacagcuagg

SEQ ID NO: 397613 - RNA, 22 nt, Human
auaaaugccucagaaucauccc

SEQ ID NO: 397614 - RNA, 22 nt, Human
auucauuagccacuaacuagca

SEQ ID NO: 397615 - RNA, 22 nt, Human
uguacaauguguuuguuggcuu

SEQ ID NO: 397616 - RNA, 22 nt, Human
uguauuaacauuaauaaaaugg

SEQ ID NO: 397617 - RNA, 22 nt, Human
uuucaacauauaccauaaugcc

SEQ ID NO: 397618 - RNA, 22 nt, Human
uguacaauggcuauaauacccu

SEQ ID NO: 397619 - RNA, 18 nt, Human
uacaggaaaaguguuaca

SEQ ID NO: 397620 - RNA, 22 nt, Human
aagacuuucaaguaugcaugca

SEQ ID NO: 397621 - RNA, 22 nt, Human
aaucagaaauugagggucuggu

SEQ ID NO: 397622 - RNA, 22 nt, Human
auuucaacguuagauguaauag

SEQ ID NO: 397623 - RNA, 19 nt, Human
aaucagaaauaucgaggcc

SEQ ID NO: 397624 - RNA, 22 nt, Human
uaguacaguuuaaauauuaaua

SEQ ID NO: 397625 - RNA, 22 nt, Human
uguauaaauuuaaauuccugcu

SEQ ID NO: 397626 - RNA, 22 nt, Human
aaucagaaaggcuaaggaagca

SEQ ID NO: 397627 - RNA, 22 nt, Human
uuaacacuugaacucuacaugu

SEQ ID NO: 397628 - RNA, 22 nt, Human
uuagaaaucugcugccaugcaa

SEQ ID NO: 397629 - RNA, 22 nt, Human
uccaaaguguugggauuauagg

SEQ ID NO: 397630 - RNA, 23 nt, Human
ucuguacacaucagcaucuccca

SEQ ID NO: 397631 - RNA, 22 nt, Human
uuuuaugugcuggacuggcagu

SEQ ID NO: 397632 - RNA, 20 nt, Human
gaaguccuuucacucuuccc

SEQ ID NO: 397633 - RNA, 22 nt, Human
gaauuuuucuggaagcaauuau

SEQ ID NO: 397634 - RNA, 22 nt, Human
augaaauauuucagagcagagu

SEQ ID NO: 397635 - RNA, 22 nt, Human
auagaaauggcagcuggugcua

SEQ ID NO: 397636 - RNA, 21 nt, Human
uuuuauugaugaauggccacu

SEQ ID NO: 397637 - RNA, 21 nt, Human
ugaaacaaucagacagagucu

SEQ ID NO: 397638 - RNA, 22 nt, Human
uggcuuaauauuucauauuuaa

SEQ ID NO: 397639 - RNA, 22 nt, Human
gaauuucaggacaacuggaagg

SEQ ID NO: 397640 - RNA, 20 nt, Human
agaaaaaguguggaaauuuc

SEQ ID NO: 397641 - RNA, 22 nt, Human
uaugaaaauuuagcugaagcau

SEQ ID NO: 397642 - RNA, 22 nt, Human
ggauucuaacugaacagaauau

SEQ ID NO: 397643 - RNA, 21 nt, Human
cauuuacaugacagauugguu

SEQ ID NO: 397644 - RNA, 22 nt, Human
uagaacuacaagcauuaaaagu

SEQ ID NO: 397645 - RNA, 18 nt, Human
ugaaacaagaauggugca

SEQ ID NO: 397646 - RNA, 22 nt, Human
cuacagaagccguggucaggaa

SEQ ID NO: 397647 - RNA, 22 nt, Human
auuauaaaccuuugaggguggg

SEQ ID NO: 397648 - RNA, 23 nt, Human
aguucacugagguugaccacugg

SEQ ID NO: 397649 - RNA, 22 nt, Human
uggcuauugagugaucucuaga

SEQ ID NO: 397650 - RNA, 22 nt, Human
cacaauacuauuuuuaggucuu

SEQ ID NO: 397651 - RNA, 22 nt, Human
uauggaaaaauguaucuuguca

SEQ ID NO: 397652 - RNA, 22 nt, Human
cuuccaaacccaggguaugggc

SEQ ID NO: 397653 - RNA, 22 nt, Human
aaagacauggaacuagagaugg

SEQ ID NO: 397654 - RNA, 22 nt, Human
ugucaccaugccagcuucugcc

SEQ ID NO: 397655 - RNA, 22 nt, Human
ucacaucauuaagacuucuccu

SEQ ID NO: 397656 - RNA, 19 nt, Human
gaaagucauagagcuuguc

SEQ ID NO: 397657 - RNA, 22 nt, Human
caggccaggguugagaagagaa

SEQ ID NO: 397658 - RNA, 22 nt, Human
agaucuauuagcaaacugccau

SEQ ID NO: 397659 - RNA, 22 nt, Human
auauaggcuaacaacuauugag

SEQ ID NO: 397660 - RNA, 22 nt, Human
caauuucagguggauagguuuu

SEQ ID NO: 397661 - RNA, 22 nt, Human
aaucagaaagaucuugaugaga

SEQ ID NO: 397662 - RNA, 22 nt, Human
acagaauugaaaguauaaucug

SEQ ID NO: 397663 - RNA, 22 nt, Human
ucaaaucagcaagcagcuuccc

SEQ ID NO: 397664 - RNA, 22 nt, Human
uacagaauuagauuauuagaga

SEQ ID NO: 397665 - RNA, 22 nt, Human
acaugaaaaauguuugcaguuu

SEQ ID NO: 397666 - RNA, 22 nt, Human
caguccagcccccugcuaaaag

SEQ ID NO: 397667 - RNA, 22 nt, Human
auacaaugagugagugaauggg

SEQ ID NO: 397668 - RNA, 22 nt, Human
uucaacucuucaagaucacauc

SEQ ID NO: 397669 - RNA, 22 nt, Human
cacccagugaaggagcaagagg

SEQ ID NO: 397670 - RNA, 22 nt, Human
aucagcuuuucucaucagaaau

SEQ ID NO: 397671 - RNA, 22 nt, Human
agguauuauuagcaucucuauu

SEQ ID NO: 397672 - RNA, 22 nt, Human
auguauccuuauacacauuuau

SEQ ID NO: 397673 - RNA, 22 nt, Human
aaugccaacuuggauauacauu

SEQ ID NO: 397674 - RNA, 18 nt, Human
aaguccuuccuuugcuuu

SEQ ID NO: 397675 - RNA, 22 nt, Human
agauucuacucuagauccaugg

SEQ ID NO: 397676 - RNA, 22 nt, Human
uaaaguuuguagcaauugauau

SEQ ID NO: 397677 - RNA, 22 nt, Human
uauggcuuuuaacugucguaug

SEQ ID NO: 397678 - RNA, 22 nt, Human
auguacaaaauguuuugaaaug

SEQ ID NO: 397679 - RNA, 22 nt, Human
aggauuuagcaugaaaugugaa

SEQ ID NO: 397680 - RNA, 22 nt, Human
uaauauauuucugcuaagcuca

SEQ ID NO: 397681 - RNA, 22 nt, Human
cuucuuaaaguugucacagcug

SEQ ID NO: 397682 - RNA, 22 nt, Human
aaguuucaugauguaauuauug

SEQ ID NO: 397683 - RNA, 22 nt, Human
aaacaaacauagguuugaaagu

SEQ ID NO: 397684 - RNA, 22 nt, Human
uuucaacuugaagaauugauac

SEQ ID NO: 397685 - RNA, 22 nt, Human
ugaaguaacuguccaggaucca

SEQ ID NO: 397686 - RNA, 22 nt, Human
auacuuaacuguggagucauug

SEQ ID NO: 397687 - RNA, 17 nt, Human
uccauacaauucucucu

SEQ ID NO: 397688 - RNA, 22 nt, Human
auguuacacauaggcauaaaug

SEQ ID NO: 397689 - RNA, 22 nt, Human
gaaugaaaaccuuggcucaaau

SEQ ID NO: 397690 - RNA, 22 nt, Human
acaaaauuguguuaaacuuuau

SEQ ID NO: 397691 - RNA, 22 nt, Human
aaauugcagaugcuaaaugacu

SEQ ID NO: 397692 - RNA, 22 nt, Human
uacugaaaguggucaacagugg

SEQ ID NO: 397693 - RNA, 22 nt, Human
uuccaaacugccaauucagaag

SEQ ID NO: 397694 - RNA, 22 nt, Human
acacaaacugcuagaaaauugg

SEQ ID NO: 397695 - RNA, 20 nt, Human
gauuucaaagcagaguggcc

SEQ ID NO: 397696 - RNA, 19 nt, Human
uuccaaaaucaggauuuga

SEQ ID NO: 397697 - RNA, 17 nt, Human
uaaguccuaguuauuuu

SEQ ID NO: 397698 - RNA, 22 nt, Human
ugugaaagagucuuauaguuuc

SEQ ID NO: 397699 - RNA, 20 nt, Human
aaguuacauuguauuguacc

SEQ ID NO: 397700 - RNA, 22 nt, Human
gucuaacaagcauuaggaaccc

SEQ ID NO: 397701 - RNA, 22 nt, Human
ucaaguuucucucagauuaugg

SEQ ID NO: 397702 - RNA, 22 nt, Human
uccaaaaaacguuugaauaguu

SEQ ID NO: 397703 - RNA, 22 nt, Human
uuauaacaucaaucagaguuaa

SEQ ID NO: 397704 - RNA, 22 nt, Human
ugucaccaccggaagaaacugc

SEQ ID NO: 397705 - RNA, 21 nt, Human
gauaaaaugggccuugguccu

SEQ ID NO: 397706 - RNA, 22 nt, Human
ugcuuaauguacgugaguguac

SEQ ID NO: 397707 - RNA, 22 nt, Human
uuagaaaugauuucaccucuuu

SEQ ID NO: 397708 - RNA, 22 nt, Human
caaguccuuagaugguucuuug

SEQ ID NO: 397709 - RNA, 22 nt, Human
acagaguucccacuccagaagc

SEQ ID NO: 397710 - RNA, 22 nt, Human
caggccagguggcaggcaaaac

SEQ ID NO: 397711 - RNA, 22 nt, Human
cuuccaaagcacuuuauggacc

SEQ ID NO: 397712 - RNA, 22 nt, Human
ucuuuaauauaaaggaaugaau

SEQ ID NO: 397713 - RNA, 22 nt, Human
uaaguccuggcugguuugaagc

SEQ ID NO: 397714 - RNA, 22 nt, Human
cagucaccuagacagaacuuac

SEQ ID NO: 397715 - RNA, 22 nt, Human
aguaaaauuaauggaucagaag

SEQ ID NO: 397716 - RNA, 22 nt, Human
cagucaccauagaauaaaacau

SEQ ID NO: 397717 - RNA, 22 nt, Human
ucaguaaaugaaugaauauaug

SEQ ID NO: 397718 - RNA, 22 nt, Human
acaacuuuucuaucauguggaa

SEQ ID NO: 397719 - RNA, 22 nt, Human
aggcaacuguuugauaauguug

SEQ ID NO: 397720 - RNA, 19 nt, Human
acagaaauuaguuauuuuc

SEQ ID NO: 397721 - RNA, 22 nt, Human
aguaugaacggaaggccuggga

SEQ ID NO: 397722 - RNA, 22 nt, Human
uuagaaaugcacccaagaccua

SEQ ID NO: 397723 - RNA, 22 nt, Human
aaaggcaugauuaauucugugu

SEQ ID NO: 397724 - RNA, 22 nt, Human
auggcuuuucacagaggguucu

SEQ ID NO: 397725 - RNA, 19 nt, Human
uggauuuauauucuuuauc

SEQ ID NO: 397726 - RNA, 22 nt, Human
ugugaauaaugccgcaauaaac

SEQ ID NO: 397727 - RNA, 22 nt, Human
aaugccuuuccacuggguauca

SEQ ID NO: 397728 - RNA, 22 nt, Human
aucagaaauugcuaccagugga

SEQ ID NO: 397729 - RNA, 22 nt, Human
caucagaagauggcucuggaaa

SEQ ID NO: 397730 - RNA, 22 nt, Human
uuucauaaggguuucuagacuu

SEQ ID NO: 397731 - RNA, 22 nt, Human
acaauuccacauggcaugcagg

SEQ ID NO: 397732 - RNA, 22 nt, Human
acacagauuuuacauguuaugc

SEQ ID NO: 397733 - RNA, 22 nt, Human
uguguacacagauaguaauggc

SEQ ID NO: 397734 - RNA, 22 nt, Human
auguauaaugcuaauuagcuag

SEQ ID NO: 397735 - RNA, 22 nt, Human
uguaaauaaugcauguaaauca

SEQ ID NO: 397736 - RNA, 22 nt, Human
aaaaggcauggagguugauagu

SEQ ID NO: 397737 - RNA, 22 nt, Human
auuucacaaaccauccugauuu

SEQ ID NO: 397738 - RNA, 22 nt, Human
uagauuuaagacccugaauuug

SEQ ID NO: 397739 - RNA, 22 nt, Human
acauaauaccuaggacaguuug

SEQ ID NO: 397740 - RNA, 22 nt, Human
auaaagcaucuagucugucacu

SEQ ID NO: 397741 - RNA, 22 nt, Human
ugcagagaaaguguagacaggc

SEQ ID NO: 397742 - RNA, 22 nt, Human
aauuccaggaugcaggaggugc

SEQ ID NO: 397743 - RNA, 22 nt, Human
caacuuuucugugaauuuaagu

SEQ ID NO: 397744 - RNA, 22 nt, Human
ugaaauaggaaacagauguuuc

SEQ ID NO: 397745 - RNA, 22 nt, Human
uuccuuaggggacagggggaua

SEQ ID NO: 397746 - RNA, 22 nt, Human
acaugcuuuucccacaauuaua

SEQ ID NO: 397747 - RNA, 22 nt, Human
uaaagccacgcuggaaaucagg

SEQ ID NO: 397748 - RNA, 22 nt, Human
uagaauaugauuaauuuucuua

SEQ ID NO: 397749 - RNA, 22 nt, Human
aguucacagaauggccagaacu

SEQ ID NO: 397750 - RNA, 19 nt, Human
aacuguaauuaauacccua

SEQ ID NO: 397751 - RNA, 22 nt, Human
uaagucaucacauugcagagau

SEQ ID NO: 397752 - RNA, 22 nt, Human
uguuuauaccuugguauaacca

SEQ ID NO: 397753 - RNA, 22 nt, Human
auacagaaguuuuccacuuauu

SEQ ID NO: 397754 - RNA, 22 nt, Human
aaagcagguugcaauuacagug

SEQ ID NO: 397755 - RNA, 22 nt, Human
aaguccuuggagaauagaaagg

SEQ ID NO: 397756 - RNA, 22 nt, Human
uacagagauacucuagaucaaa

SEQ ID NO: 397757 - RNA, 22 nt, Human
uaaagccaauauaccuagcaua

SEQ ID NO: 397758 - RNA, 22 nt, Human
gugaauaaccuacuccaggccu

SEQ ID NO: 397759 - RNA, 20 nt, Human
uucuauacauaucacugaaa

SEQ ID NO: 397760 - RNA, 22 nt, Human
caguaaauacauaucagagaag

SEQ ID NO: 397761 - RNA, 23 nt, Human
aaauaggaguaucuggaucauga

SEQ ID NO: 397762 - RNA, 22 nt, Human
uuaaggauguugugauuuauua

SEQ ID NO: 397763 - RNA, 22 nt, Human
acuauacaagauuagggauuug

SEQ ID NO: 397764 - RNA, 22 nt, Human
uguuccaagcugcuggauaagc

SEQ ID NO: 397765 - RNA, 22 nt, Human
cauagcuuagggguuaaacuca

SEQ ID NO: 397766 - RNA, 20 nt, Human
uuacagaaaugauguuauuu

SEQ ID NO: 397767 - RNA, 22 nt, Human
ucaauaaaucccucugacccug

SEQ ID NO: 397768 - RNA, 22 nt, Human
aaaaugcuauuucauggaggag

SEQ ID NO: 397769 - RNA, 22 nt, Human
uaauaaacugcuacgcuuaguu

SEQ ID NO: 397770 - RNA, 22 nt, Human
uacaguaagaugaaauagcaau

SEQ ID NO: 397771 - RNA, 22 nt, Human
guacagaaaugugaugacgcaa

SEQ ID NO: 397772 - RNA, 22 nt, Human
guuaggcaugaguguguauuaa

SEQ ID NO: 397773 - RNA, 22 nt, Human
aacuggauuaacuggcucaaau

SEQ ID NO: 397774 - RNA, 22 nt, Human
ugcaggaaaaccaacacgccuu

SEQ ID NO: 397775 - RNA, 22 nt, Human
aaugguuugauggacaaaauga

SEQ ID NO: 397776 - RNA, 22 nt, Human
uaaucuaccacuauugcaauau

SEQ ID NO: 397777 - RNA, 22 nt, Human
acaugcuucauauuauaaccaa

SEQ ID NO: 397778 - RNA, 22 nt, Human
auccaaacauguaccacacuaa

SEQ ID NO: 397779 - RNA, 22 nt, Human
ugagaaaagguugagaugauaa

SEQ ID NO: 397780 - RNA, 22 nt, Human
ccuggaucuuuguuguaaauau

SEQ ID NO: 397781 - RNA, 22 nt, Human
uaguccuuuaauaguuaaugug

SEQ ID NO: 397782 - RNA, 22 nt, Human
uaauuccaccuuuuuccaacuu

SEQ ID NO: 397783 - RNA, 22 nt, Human
caucagaauguuagagaaggga

SEQ ID NO: 397784 - RNA, 22 nt, Human
cucuaauccuuugucccugggu

SEQ ID NO: 397785 - RNA, 22 nt, Human
uuuaggcagcacgggcagcccu

SEQ ID NO: 397786 - RNA, 22 nt, Human
auagcuuuacagaagaguuuag

SEQ ID NO: 397787 - RNA, 20 nt, Human
uuccaacucacaucucuaca

SEQ ID NO: 397788 - RNA, 22 nt, Human
gucaaacaaauuaacauaucca

SEQ ID NO: 397789 - RNA, 22 nt, Human
aggauuuaaauccuuaaccacu

SEQ ID NO: 397790 - RNA, 22 nt, Human
ccuggaucuccucuauucauau

SEQ ID NO: 397791 - RNA, 22 nt, Human
aaacaggcuuccauuagagcaa

SEQ ID NO: 397792 - RNA, 22 nt, Human
uagucaccuuuggcaccugcaa

SEQ ID NO: 397793 - RNA, 22 nt, Human
uaucagaaggcacauggagucu

SEQ ID NO: 397794 - RNA, 22 nt, Human
caauuucagugcuguggagagg

SEQ ID NO: 397795 - RNA, 22 nt, Human
aaucaugugggauagucugcuc

SEQ ID NO: 397796 - RNA, 22 nt, Human
aauaauaagauacuaagggagu

SEQ ID NO: 397797 - RNA, 22 nt, Human
agaaaagaggcuuucuaagcau

SEQ ID NO: 397798 - RNA, 22 nt, Human
uaagaaucggucgcaacagagg

SEQ ID NO: 397799 - RNA, 22 nt, Human
uuuaggcagucauugaacaagu

SEQ ID NO: 397800 - RNA, 22 nt, Human
uggauuaguuaagaaauguuag

SEQ ID NO: 397801 - RNA, 19 nt, Human
cagaaauagcgaaguguaa

SEQ ID NO: 397802 - RNA, 22 nt, Human
uuacagaacugcccuaguuggc

SEQ ID NO: 397803 - RNA, 22 nt, Human
caagaucagggugccagaaugg

SEQ ID NO: 397804 - RNA, 22 nt, Human
acauuccaaaaacuagcagaua

SEQ ID NO: 397805 - RNA, 22 nt, Human
aagcauuuuguuuuaagaauga

SEQ ID NO: 397806 - RNA, 22 nt, Human
uuauaugaguaucauaucacuu

SEQ ID NO: 397807 - RNA, 22 nt, Human
aaguccuucuuuauaugagagu

SEQ ID NO: 397808 - RNA, 22 nt, Human
cauuucaauuauuugcucuucu

SEQ ID NO: 397809 - RNA, 22 nt, Human
aacacuuugggcauggccuucc

SEQ ID NO: 397810 - RNA, 22 nt, Human
cuugccuuugucuucaaaggcu

SEQ ID NO: 397811 - RNA, 21 nt, Human
uucauaaaccauucucaugca

SEQ ID NO: 397812 - RNA, 22 nt, Human
gauuucaaccuaacaguaugac

SEQ ID NO: 397813 - RNA, 22 nt, Human
caucagaaccagcugggugagg

SEQ ID NO: 397814 - RNA, 22 nt, Human
cguccuuacagagggucacagc

SEQ ID NO: 397815 - RNA, 22 nt, Human
auauaacauacauacagaaaag

SEQ ID NO: 397816 - RNA, 22 nt, Human
uucacauaaugauacaaagcuu

SEQ ID NO: 397817 - RNA, 22 nt, Human
acagaauugauggaaaucucag

SEQ ID NO: 397818 - RNA, 22 nt, Human
aaugguuuucuagaacaugaaa

SEQ ID NO: 397819 - RNA, 22 nt, Human
aagcccagcugaaagcauuuuu

SEQ ID NO: 397820 - RNA, 22 nt, Human
uaauauguguuacugacuuuuu

SEQ ID NO: 397821 - RNA, 18 nt, Human
auagaaaccuuuaaucag

SEQ ID NO: 397822 - RNA, 22 nt, Human
aaauuauaggugccaccuugga

SEQ ID NO: 397823 - RNA, 22 nt, Human
gcagaauuuucuguuuucuaga

SEQ ID NO: 397824 - RNA, 22 nt, Human
gauaucauaucagacaaccucu

SEQ ID NO: 397825 - RNA, 22 nt, Human
ggcuuaaugguucuuuuucuca

SEQ ID NO: 397826 - RNA, 22 nt, Human
aucuaucccaguuuaacucauu

SEQ ID NO: 397827 - RNA, 22 nt, Human
aacagugaguugaugacugaau

SEQ ID NO: 397828 - RNA, 17 nt, Human
uaucagaauguguuuac

SEQ ID NO: 397829 - RNA, 22 nt, Human
ucuauacaugugcacacacauc

SEQ ID NO: 397830 - RNA, 22 nt, Human
ugcuuuaagagauuguuaguac

SEQ ID NO: 397831 - RNA, 22 nt, Human
ucaguaaaguucuuucuugcug

SEQ ID NO: 397832 - RNA, 17 nt, Human
uaaauacacaaggguau

SEQ ID NO: 397833 - RNA, 22 nt, Human
agauaucaccaguuuuacauac

SEQ ID NO: 397834 - RNA, 22 nt, Human
uuccuuaguugacugucuuagu

SEQ ID NO: 397835 - RNA, 22 nt, Human
cuuaauuacccaaugugguagg

SEQ ID NO: 397836 - RNA, 22 nt, Human
agacaacaucacuaaagcugag

SEQ ID NO: 397837 - RNA, 22 nt, Human
auuccaaacagugcugcagacu

SEQ ID NO: 397838 - RNA, 22 nt, Human
agaauuucaaauggaaguuuua

SEQ ID NO: 397839 - RNA, 22 nt, Human
aauugagugcagccagcccagu

SEQ ID NO: 397840 - RNA, 22 nt, Human
ccacuucaucagugcuccauuu

SEQ ID NO: 397841 - RNA, 22 nt, Human
aaauuucaguuaccuuuacguu

SEQ ID NO: 397842 - RNA, 22 nt, Human
uuggaucaaauuucaugcuguc

SEQ ID NO: 397843 - RNA, 22 nt, Human
ugcuuaauaggaguugaacauu

SEQ ID NO: 397844 - RNA, 22 nt, Human
uucccaauauucugcuuuuaug

SEQ ID NO: 397845 - RNA, 22 nt, Human
caggccagggagaauaugaagc

SEQ ID NO: 397846 - RNA, 22 nt, Human
uggaauaaagugcuuugaucag

SEQ ID NO: 397847 - RNA, 22 nt, Human
aaagcaaugcuuguggaaugua

SEQ ID NO: 397848 - RNA, 22 nt, Human
cauauaauguuugaagaugugg

SEQ ID NO: 397849 - RNA, 22 nt, Human
cauuuauauaaaauguccagaa

SEQ ID NO: 397850 - RNA, 22 nt, Human
gcuuuaaugcuucguggggcca

SEQ ID NO: 397851 - RNA, 22 nt, Human
cugaaagaauaagauguuuaca

SEQ ID NO: 397852 - RNA, 22 nt, Human
aacagaauaguugauguacagu

SEQ ID NO: 397853 - RNA, 22 nt, Human
ccaaacaaauccccauucuuag

SEQ ID NO: 397854 - RNA, 23 nt, Human
ucuaauacaugaaaccuagaugu

SEQ ID NO: 397855 - RNA, 22 nt, Human
caaauacuggguaaguuaauuu

SEQ ID NO: 397856 - RNA, 22 nt, Human
aaaucucaguguucuaagcauu

SEQ ID NO: 397857 - RNA, 22 nt, Human
auccuuagguggugcaucaggg

SEQ ID NO: 397858 - RNA, 22 nt, Human
ucagagaagcugccaggcgagc

SEQ ID NO: 397859 - RNA, 22 nt, Human
aguuucaguucugucauuuaua

SEQ ID NO: 397860 - RNA, 22 nt, Human
uaacagaaauaguaggugaggg

SEQ ID NO: 397861 - RNA, 22 nt, Human
ucaguaaaugguugcuguuauu

SEQ ID NO: 397862 - RNA, 22 nt, Human
uaaagacaugguguaggugaac

SEQ ID NO: 397863 - RNA, 22 nt, Human
aggcuucugugagcucauacaa

SEQ ID NO: 397864 - RNA, 22 nt, Human
auaaagcaaauaggacuauugc

SEQ ID NO: 397865 - RNA, 22 nt, Human
ugcuuauugcuuucaagacugu

SEQ ID NO: 397866 - RNA, 22 nt, Human
aguguuuauauuauggaaauau

SEQ ID NO: 397867 - RNA, 22 nt, Human
uuaaagauucugaggcugauua

SEQ ID NO: 397868 - RNA, 22 nt, Human
aaggcauaggacaaaucaguga

SEQ ID NO: 397869 - RNA, 22 nt, Human
aaguccuuuauccuaaaagguc

SEQ ID NO: 397870 - RNA, 22 nt, Human
auauacaguuuuacaggguuuc

SEQ ID NO: 397871 - RNA, 22 nt, Human
cuuaggcauccaggguucuucc

SEQ ID NO: 397872 - RNA, 22 nt, Human
aauaauuagugggacagagaac

SEQ ID NO: 397873 - RNA, 22 nt, Human
aaucaguguggugacuugucug

SEQ ID NO: 397874 - RNA, 22 nt, Human
acuuuagaccaucuuccacagu

SEQ ID NO: 397875 - RNA, 22 nt, Human
agcacaauagagcaguuaaaaa

SEQ ID NO: 397876 - RNA, 22 nt, Human
aaaauacuguggaguguugaaa

SEQ ID NO: 397877 - RNA, 22 nt, Human
aagcccagaugggagcauuuca

SEQ ID NO: 397878 - RNA, 22 nt, Human
cuggauuugccuauggugcuuu

SEQ ID NO: 397879 - RNA, 22 nt, Human
uuaaagaauagugccccuauug

SEQ ID NO: 397880 - RNA, 22 nt, Human
gugaauaagaccuaaggaugaa

SEQ ID NO: 397881 - RNA, 20 nt, Human
agaaucugacccagagagac

SEQ ID NO: 397882 - RNA, 22 nt, Human
gaauuucauuuguuuccuacca

SEQ ID NO: 397883 - RNA, 22 nt, Human
augaauaaguaaacuccuuugg

SEQ ID NO: 397884 - RNA, 22 nt, Human
acaugcuuccaaauuauguugg

SEQ ID NO: 397885 - RNA, 22 nt, Human
ugcuuauuuauagucaauagag

SEQ ID NO: 397886 - RNA, 23 nt, Human
uacuuaggguuuagaucugacug

SEQ ID NO: 397887 - RNA, 22 nt, Human
aaagcuaugaggcaugcauuuc

SEQ ID NO: 397888 - RNA, 22 nt, Human
guauacagauacuuagacgugc

SEQ ID NO: 397889 - RNA, 22 nt, Human
acuuuuaaaugaguuucaguug

SEQ ID NO: 397890 - RNA, 22 nt, Human
cuaugacacaggccauuauaua

SEQ ID NO: 397891 - RNA, 22 nt, Human
augugcuuguaauguuaaaugu

SEQ ID NO: 397892 - RNA, 22 nt, Human
acagaauuaaugaaaauuacaa

SEQ ID NO: 397893 - RNA, 22 nt, Human
ucuuuaauucagcaugaugcgg

SEQ ID NO: 397894 - RNA, 23 nt, Human
uaucagugugaugaggcugcugc

SEQ ID NO: 397895 - RNA, 22 nt, Human
ucagaauuuuuguuacccuuga

SEQ ID NO: 397896 - RNA, 22 nt, Human
auuccaaaaggauguuagaaug

SEQ ID NO: 397897 - RNA, 22 nt, Human
uguggaaaauuggaacguuccu

SEQ ID NO: 397898 - RNA, 22 nt, Human
auucauaaguaaaugauuaccu

SEQ ID NO: 397899 - RNA, 22 nt, Human
caaguccuccaugugacuaggu

SEQ ID NO: 397900 - RNA, 22 nt, Human
uucagagaagcaaaggcagauu

SEQ ID NO: 397901 - RNA, 22 nt, Human
gucauaaagcuuguugcauuua

SEQ ID NO: 397902 - RNA, 22 nt, Human
guuaggcaaauaacuguggagc

SEQ ID NO: 397903 - RNA, 22 nt, Human
aauugcaauuuucuuaaggucu

SEQ ID NO: 397904 - RNA, 19 nt, Human
uccuucagucagaucuggg

SEQ ID NO: 397905 - RNA, 22 nt, Human
auuucauacuaaggcucaaaaa

SEQ ID NO: 397906 - RNA, 22 nt, Human
guuaauauuuaccugucaagaa

SEQ ID NO: 397907 - RNA, 18 nt, Human
auauguuaauuagguagg

SEQ ID NO: 397908 - RNA, 22 nt, Human
uugaagaaagucauauauaaug

SEQ ID NO: 397909 - RNA, 22 nt, Human
uaggaagaugaguaucaacuug

SEQ ID NO: 397910 - RNA, 20 nt, Human
uacuggauuagggcucaccc

SEQ ID NO: 397911 - RNA, 22 nt, Human
agauaaugaaugccaugacauu

SEQ ID NO: 397912 - RNA, 22 nt, Human
uguauacaauucacacuuccca

SEQ ID NO: 397913 - RNA, 22 nt, Human
gcuuuuauugucuuuacgacga

SEQ ID NO: 397914 - RNA, 22 nt, Human
accagcugcugauugcuaaaug

SEQ ID NO: 397915 - RNA, 22 nt, Human
aguccuuaugugguggagagag

SEQ ID NO: 397916 - RNA, 22 nt, Human
uggauuuauuagguuggugaaa

SEQ ID NO: 397917 - RNA, 22 nt, Human
cacaauuuggugcuaaagaaag

SEQ ID NO: 397918 - RNA, 22 nt, Human
cugaauaauuuucuguuguaug

SEQ ID NO: 397919 - RNA, 23 nt, Human
uuaaaggcagauguugaguauua

SEQ ID NO: 397920 - RNA, 22 nt, Human
aaagucaugcaguugaacuuuu

SEQ ID NO: 397921 - RNA, 22 nt, Human
ucaguuucuccaucgcuccagu

SEQ ID NO: 397922 - RNA, 22 nt, Human
gcauguuauguaucugcccagc

SEQ ID NO: 397923 - RNA, 22 nt, Human
ucagccaggccaccuucagcuu

SEQ ID NO: 397924 - RNA, 22 nt, Human
gcaggcuccaaggccugggaga

SEQ ID NO: 397925 - RNA, 23 nt, Human
uaaagucacauauuagagugagc

SEQ ID NO: 397926 - RNA, 22 nt, Human
uaaucugaagaaacaggacuug

SEQ ID NO: 397927 - RNA, 22 nt, Human
uacuaaacccucgauggaucuu

SEQ ID NO: 397928 - RNA, 23 nt, Human
aagucaccaagaggaaggcggag

SEQ ID NO: 397929 - RNA, 22 nt, Human
aaaacugaaauacgauccaaug

SEQ ID NO: 397930 - RNA, 22 nt, Human
gaguccuuuugugccacaggga

SEQ ID NO: 397931 - RNA, 22 nt, Human
gcuucacaggcaaguuaagccu

SEQ ID NO: 397932 - RNA, 22 nt, Human
gaagaauccaugcuaauuuacc

SEQ ID NO: 397933 - RNA, 22 nt, Human
cacacuuugugcuaaucuauuu

SEQ ID NO: 397934 - RNA, 22 nt, Human
cauaagaauauuccauccuuug

SEQ ID NO: 397935 - RNA, 22 nt, Human
aagcucauuaauuagaagcuaa

SEQ ID NO: 397936 - RNA, 22 nt, Human
augaaaauguacauguguauaa

SEQ ID NO: 397937 - RNA, 20 nt, Human
aguacaauguaugauucaga

SEQ ID NO: 397938 - RNA, 22 nt, Human
uauuccaaaauaguuaagcacu

SEQ ID NO: 397939 - RNA, 22 nt, Human
cuggcuuucccuggacaacagc

SEQ ID NO: 397940 - RNA, 22 nt, Human
aauaacagagaaggguggcuuc

SEQ ID NO: 397941 - RNA, 22 nt, Human
gaaagccaucuggcugcuggga

SEQ ID NO: 397942 - RNA, 22 nt, Human
aauuuacaguugcugaugguac

SEQ ID NO: 397943 - RNA, 22 nt, Human
uuuauucugugcuacaugaaga

SEQ ID NO: 397944 - RNA, 19 nt, Human
augcuuuauguuauuucuu

SEQ ID NO: 397945 - RNA, 15 nt, Human
aaucagaaguguggc

SEQ ID NO: 397946 - RNA, 22 nt, Human
uaggauuuaggcuuuaacaucu

SEQ ID NO: 397947 - RNA, 22 nt, Human
ccaauacacuuuauagaagaaa

SEQ ID NO: 397948 - RNA, 22 nt, Human
uccauuuagcuggcaaacaaug

SEQ ID NO: 397949 - RNA, 22 nt, Human
acaucugaccauuacaagacau

SEQ ID NO: 397950 - RNA, 22 nt, Human
cuuaauuuuuguaguagaugga

SEQ ID NO: 397951 - RNA, 23 nt, Human
agaucugauguuaccaagaauug

SEQ ID NO: 397952 - RNA, 22 nt, Human
auacacagcgaugagaggaggc

SEQ ID NO: 397953 - RNA, 22 nt, Human
cagaucuguaguaaaagaucuc

SEQ ID NO: 397954 - RNA, 22 nt, Human
aauauuaucaaaagcuuuuuca

SEQ ID NO: 397955 - RNA, 22 nt, Human
gucaaacagccuccuguucuaa

SEQ ID NO: 397956 - RNA, 22 nt, Human
guuuauaaggcccaauauuucu

SEQ ID NO: 397957 - RNA, 23 nt, Human
uagaauucaaucuguuccacauc

SEQ ID NO: 397958 - RNA, 22 nt, Human
augaauaaacaggugccucuuc

SEQ ID NO: 397959 - RNA, 22 nt, Human
gaaagccauagcccagcuuuac

SEQ ID NO: 397960 - RNA, 19 nt, Human
auucauuuuugccuucuaa

SEQ ID NO: 397961 - RNA, 22 nt, Human
uuagaaaugucacagaucugau

SEQ ID NO: 397962 - RNA, 22 nt, Human
uuggagagauuaucagaccagc

SEQ ID NO: 397963 - RNA, 22 nt, Human
uauacagucuuuugcuauauuc

SEQ ID NO: 397964 - RNA, 22 nt, Human
aaguuucauuguucauguaaca

SEQ ID NO: 397965 - RNA, 22 nt, Human
acuucacacagcaaauuuaucu

SEQ ID NO: 397966 - RNA, 22 nt, Human
uucuauacaaagauuucucaca

SEQ ID NO: 397967 - RNA, 22 nt, Human
ucuauaaauuaugcagucucag

SEQ ID NO: 397968 - RNA, 18 nt, Human
aauuuccauaugaauugc

SEQ ID NO: 397969 - RNA, 22 nt, Human
aaaagccaugcauaccuaagag

SEQ ID NO: 397970 - RNA, 22 nt, Human
acauaauaaaaauaacagcuca

SEQ ID NO: 397971 - RNA, 22 nt, Human
augcuuaaugaggguauauaug

SEQ ID NO: 397972 - RNA, 22 nt, Human
caaaacugucuagagagagaag

SEQ ID NO: 397973 - RNA, 18 nt, Human
uacagauuauagauacau

SEQ ID NO: 397974 - RNA, 22 nt, Human
acuggaucuaauugguuauagu

SEQ ID NO: 397975 - RNA, 22 nt, Human
acagauuuuugguaaauaauuu

SEQ ID NO: 397976 - RNA, 22 nt, Human
uaauuauaacaguuacaucuua

SEQ ID NO: 397977 - RNA, 22 nt, Human
uaaucuacuguuuauaugaaau

SEQ ID NO: 397978 - RNA, 22 nt, Human
ugugaaagcaagucuaguucuc

SEQ ID NO: 397979 - RNA, 22 nt, Human
caguccuuggcuucauccgagu

SEQ ID NO: 397980 - RNA, 22 nt, Human
auguuaaauaaucccuuaaagc

SEQ ID NO: 397981 - RNA, 19 nt, Human
agcaaauacaucaaaauug

SEQ ID NO: 397982 - RNA, 21 nt, Human
auggcuuuuuuaaagcuugug

SEQ ID NO: 397983 - RNA, 22 nt, Human
aaugggauaauuguucauggga

SEQ ID NO: 397984 - RNA, 22 nt, Human
gauuucaaggaguuuucacagu

SEQ ID NO: 397985 - RNA, 22 nt, Human
aaaugcauggcuguuuuaaagc

SEQ ID NO: 397986 - RNA, 22 nt, Human
auguucaaacaaguuaaugcca

SEQ ID NO: 397987 - RNA, 22 nt, Human
aaauacuguugaaugaaguaag

SEQ ID NO: 397988 - RNA, 22 nt, Human
aauagaaaggaggggcucuugu

SEQ ID NO: 397989 - RNA, 22 nt, Human
uuauagaacagccuccucuaga

SEQ ID NO: 397990 - RNA, 22 nt, Human
aaaguccuagcgauccacagaa

SEQ ID NO: 397991 - RNA, 22 nt, Human
ucacagaaauaagauaguuauu

SEQ ID NO: 397992 - RNA, 22 nt, Human
acuggaugaggggaaagagaca

SEQ ID NO: 397993 - RNA, 22 nt, Human
aggauuuaccuccagcuaggcu

SEQ ID NO: 397994 - RNA, 22 nt, Human
aaacugugcuucccaaaugccc

SEQ ID NO: 397995 - RNA, 22 nt, Human
uguacaaucuuggucccuuuau

SEQ ID NO: 397996 - RNA, 22 nt, Human
acuauacaguauguacgugcac

SEQ ID NO: 397997 - RNA, 22 nt, Human
uaaauaugcauguauccuuauc

SEQ ID NO: 397998 - RNA, 22 nt, Human
aauuccagaggaggacaguccu

SEQ ID NO: 397999 - RNA, 22 nt, Human
cugaauaauauuccauuaugag

SEQ ID NO: 398000 - RNA, 22 nt, Human
gucaacuugcaagaugcugggc

SEQ ID NO: 398001 - RNA, 22 nt, Human
augcuuaaccuugguguacaau

SEQ ID NO: 398002 - RNA, 22 nt, Human
ugaagaauaaaugguugagacu

SEQ ID NO: 398003 - RNA, 22 nt, Human
aaagcagucacuccagugugau

SEQ ID NO: 398004 - RNA, 22 nt, Human
uaguccuuuaucaaacauuuau

SEQ ID NO: 398005 - RNA, 22 nt, Human
gcagaauugauggagaacuuaa

SEQ ID NO: 398006 - RNA, 22 nt, Human
gcacaauaauucuuguuuugcu

SEQ ID NO: 398007 - RNA, 22 nt, Human
uauggcuuuuuauucaucuuac

SEQ ID NO: 398008 - RNA, 22 nt, Human
agaucaguuagauagcuugaug

SEQ ID NO: 398009 - RNA, 22 nt, Human
augguuuuguccucuuugguuc

SEQ ID NO: 398010 - RNA, 22 nt, Human
aaauuucaguuggaaugagcuc

SEQ ID NO: 398011 - RNA, 22 nt, Human
uugguacaaaaguaacuguggu

SEQ ID NO: 398012 - RNA, 22 nt, Human
uuccauaauaaccugagagaaa

SEQ ID NO: 398013 - RNA, 22 nt, Human
ggcauuuaucuaauauaguuua

SEQ ID NO: 398014 - RNA, 22 nt, Human
uuacagauggaucuagcaaaau

SEQ ID NO: 398015 - RNA, 22 nt, Human
cuuauauuuuaggaacagacaa

SEQ ID NO: 398016 - RNA, 22 nt, Human
uggcauuugcucccuuguguuc

SEQ ID NO: 398017 - RNA, 22 nt, Human
caauuucagaccuuuccuugga

SEQ ID NO: 398018 - RNA, 22 nt, Human
acuauacagaagaggauaggaa

SEQ ID NO: 398019 - RNA, 22 nt, Human
ccaguuuaagacuuaucucaau

SEQ ID NO: 398020 - RNA, 21 nt, Human
ucuauucauuacaguuauuug

SEQ ID NO: 398021 - RNA, 22 nt, Human
acagaugauuuuuaugaaaaca

SEQ ID NO: 398022 - RNA, 22 nt, Human
acugcagagguggggugcagag

SEQ ID NO: 398023 - RNA, 22 nt, Human
aauaauuuccagccaacuggaa

SEQ ID NO: 398024 - RNA, 22 nt, Human
uccauacauugaaauaccauuc

SEQ ID NO: 398025 - RNA, 22 nt, Human
guuaggcaguuuucuucauucu

SEQ ID NO: 398026 - RNA, 22 nt, Human
uucacagaauugucuugacugg

SEQ ID NO: 398027 - RNA, 22 nt, Human
guuaggcagcccaagaugucag

SEQ ID NO: 398028 - RNA, 22 nt, Human
uaagaaucaguagauauagauu

SEQ ID NO: 398029 - RNA, 22 nt, Human
uccagaauauuugggaaagaug

SEQ ID NO: 398030 - RNA, 22 nt, Human
aacauuggauauuuauuaaaag

SEQ ID NO: 398031 - RNA, 22 nt, Human
acagaacugggggcacagauag

SEQ ID NO: 398032 - RNA, 22 nt, Human
ucaauacauacaauguauagug

SEQ ID NO: 398033 - RNA, 22 nt, Human
aaaugucagaagcuuuacuucu

SEQ ID NO: 398034 - RNA, 22 nt, Human
uguguaaauggcaucucucagc

SEQ ID NO: 398035 - RNA, 22 nt, Human
caucagaagaaagacaaaugau

SEQ ID NO: 398036 - RNA, 22 nt, Human
caagaauccuguucuugaagau

SEQ ID NO: 398037 - RNA, 22 nt, Human
caccagacagguguaugcauau

SEQ ID NO: 398038 - RNA, 22 nt, Human
uuggaucacucugaagccuuac

SEQ ID NO: 398039 - RNA, 22 nt, Human
aguccagugaacuguaaauagg

SEQ ID NO: 398040 - RNA, 22 nt, Human
uuuuugcugauaagcagaauuc

SEQ ID NO: 398041 - RNA, 22 nt, Human
aggauuuauuccagaaaugcaa

SEQ ID NO: 398042 - RNA, 22 nt, Human
guaggaaaguaaaugaaauaca

SEQ ID NO: 398043 - RNA, 22 nt, Human
uauacagaaagaauucaagucu

SEQ ID NO: 398044 - RNA, 22 nt, Human
guagaaauagugguugacagga

SEQ ID NO: 398045 - RNA, 22 nt, Human
aagcauuuugccacuugaaguu

SEQ ID NO: 398046 - RNA, 22 nt, Human
guaugaaaauuguaaaguucuu

SEQ ID NO: 398047 - RNA, 22 nt, Human
ucaaaauuucagcacuagcccu

SEQ ID NO: 398048 - RNA, 22 nt, Human
aacuuuguguguuuaauauggc

SEQ ID NO: 398049 - RNA, 22 nt, Human
uuuaggcauacuuuugggagaa

SEQ ID NO: 398050 - RNA, 22 nt, Human
ucugaagaacugaguaaacaug

SEQ ID NO: 398051 - RNA, 22 nt, Human
caguccuuucaauggugaccuu

SEQ ID NO: 398052 - RNA, 23 nt, Human
aaguacauauauuuagauaguga

SEQ ID NO: 398053 - RNA, 21 nt, Human
caaguccuuugccaaagugcu

SEQ ID NO: 398054 - RNA, 22 nt, Human
caguaaauuugagggaucuaau

SEQ ID NO: 398055 - RNA, 22 nt, Human
auagcuuucuuaaauauauaaa

SEQ ID NO: 398056 - RNA, 22 nt, Human
aaucauaauucaaauaagcuua

SEQ ID NO: 398057 - RNA, 22 nt, Human
uaauuucacaguucaacgcaca

SEQ ID NO: 398058 - RNA, 22 nt, Human
aauuaaauugguuuagagagga

SEQ ID NO: 398059 - RNA, 22 nt, Human
caaacuggcuaugggaaucuug

SEQ ID NO: 398060 - RNA, 22 nt, Human
caucagaaggaaggacgauuau

SEQ ID NO: 398061 - RNA, 22 nt, Human
uaucauaaguuaauuaaacagu

SEQ ID NO: 398062 - RNA, 22 nt, Human
aauuauccuuaaugcaguaagc

SEQ ID NO: 398063 - RNA, 22 nt, Human
uauggcuuuucauuccuaugug

SEQ ID NO: 398064 - RNA, 22 nt, Human
aagacagugaucucugagagau

SEQ ID NO: 398065 - RNA, 22 nt, Human
cuacagaaaccuuuuucauaca

SEQ ID NO: 398066 - RNA, 22 nt, Human
augcuuaagcucaguuauauau

SEQ ID NO: 398067 - RNA, 22 nt, Human
uagaaacagcauauauuagccc

SEQ ID NO: 398068 - RNA, 22 nt, Human
cagaaauaaacuucucacaucg

SEQ ID NO: 398069 - RNA, 22 nt, Human
aaagccaugaauguuauagagg

SEQ ID NO: 398070 - RNA, 22 nt, Human
gacaguccuugcccaguaucua

SEQ ID NO: 398071 - RNA, 22 nt, Human
gagcccagcuugcacauggagc

SEQ ID NO: 398072 - RNA, 22 nt, Human
uaugaagaaaccuauccucuag

SEQ ID NO: 398073 - RNA, 22 nt, Human
aaaaguguucaggaagaauaau

SEQ ID NO: 398074 - RNA, 22 nt, Human
auggcauuccaagucuucuuuu

SEQ ID NO: 398075 - RNA, 22 nt, Human
uagucaccuguugugugaugcc

SEQ ID NO: 398076 - RNA, 22 nt, Human
aucuagaacuuaaagucaguca

SEQ ID NO: 398077 - RNA, 22 nt, Human
aaguuucaaauauaaaauuaca

SEQ ID NO: 398078 - RNA, 22 nt, Human
uauggcuuuaaacaacuuaggu

SEQ ID NO: 398079 - RNA, 22 nt, Human
ugaauaaucuuggguauuaaua

SEQ ID NO: 398080 - RNA, 19 nt, Human
uuccuuagaggaggcggug

SEQ ID NO: 398081 - RNA, 22 nt, Human
uaaagccacuucauucuagucu

SEQ ID NO: 398082 - RNA, 22 nt, Human
caauuucaucuugugcuucaau

SEQ ID NO: 398083 - RNA, 22 nt, Human
uaucagaagacuuacaguaucg

SEQ ID NO: 398084 - RNA, 22 nt, Human
aguccuuaugagaugcugccuu

SEQ ID NO: 398085 - RNA, 22 nt, Human
aguccuuagaacagugccuggg

SEQ ID NO: 398086 - RNA, 21 nt, Human
auagaacaccaggcauauaua

SEQ ID NO: 398087 - RNA, 22 nt, Human
aaagaaggaugggagaaauccu

SEQ ID NO: 398088 - RNA, 22 nt, Human
uggcuuuacaucaaauugagua

SEQ ID NO: 398089 - RNA, 22 nt, Human
ucauaaaguuaucaccaaaucc

SEQ ID NO: 398090 - RNA, 22 nt, Human
aaagucauacauggugcuuacu

SEQ ID NO: 398091 - RNA, 22 nt, Human
augcuuuaaaugucuuuugcuu

SEQ ID NO: 398092 - RNA, 22 nt, Human
ucagaauugucuggggaauguu

SEQ ID NO: 398093 - RNA, 22 nt, Human
uccaaauacauuuacuguauuu

SEQ ID NO: 398094 - RNA, 22 nt, Human
ugaaagguuaaaaguaguauug

SEQ ID NO: 398095 - RNA, 22 nt, Human
auaugcuugggacugauacagu

SEQ ID NO: 398096 - RNA, 22 nt, Human
aaauagcauaaaauaggaagcu

SEQ ID NO: 398097 - RNA, 22 nt, Human
uuucauugaacuaaagaaucug

SEQ ID NO: 398098 - RNA, 22 nt, Human
aggcagaccaugaaucaugacc

SEQ ID NO: 398099 - RNA, 22 nt, Human
aauacauguuuucuacuauucu

SEQ ID NO: 398100 - RNA, 22 nt, Human
acaaaguccugguguauggcca

SEQ ID NO: 398101 - RNA, 22 nt, Human
uacuucauuccuuuguaaaaug

SEQ ID NO: 398102 - RNA, 22 nt, Human
aaguccuucccaagcauguacc

SEQ ID NO: 398103 - RNA, 22 nt, Human
cauacuuugggauaagagugga

SEQ ID NO: 398104 - RNA, 22 nt, Human
uaucagaaagauauuacugggg

SEQ ID NO: 398105 - RNA, 22 nt, Human
caguuucagaaucaaaacauca

SEQ ID NO: 398106 - RNA, 22 nt, Human
aacuggauuuaggaacagagaa

SEQ ID NO: 398107 - RNA, 22 nt, Human
guuccaaagucucugagcugag

SEQ ID NO: 398108 - RNA, 22 nt, Human
agaauaucguagcauauuaucu

SEQ ID NO: 398109 - RNA, 21 nt, Human
auucagaguaauucaucuuua

SEQ ID NO: 398110 - RNA, 22 nt, Human
aucacaaaggguuuucucugag

SEQ ID NO: 398111 - RNA, 22 nt, Human
acugguuuuccagguuacuucu

SEQ ID NO: 398112 - RNA, 22 nt, Human
caaguccuuuucuuggcucagg

SEQ ID NO: 398113 - RNA, 20 nt, Human
uacagacaugacaauaaugg

SEQ ID NO: 398114 - RNA, 19 nt, Human
cuauacagccucugaggaa

SEQ ID NO: 398115 - RNA, 21 nt, Human
aaauacagaugcaaaucuguu

SEQ ID NO: 398116 - RNA, 22 nt, Human
uuuuccaaaguaccaugucccu

SEQ ID NO: 398117 - RNA, 22 nt, Human
aaguccuuauguggaggggcua

SEQ ID NO: 398118 - RNA, 22 nt, Human
uuuaggcaaauuucagaugugc

SEQ ID NO: 398119 - RNA, 22 nt, Human
ucuggaucuccagcacuuauca

SEQ ID NO: 398120 - RNA, 22 nt, Human
cuggacucugcagagaaaagua

SEQ ID NO: 398121 - RNA, 22 nt, Human
gauuuagagcaggaaugcaugg

SEQ ID NO: 398122 - RNA, 22 nt, Human
ucauaaaaugcuccugauauug

SEQ ID NO: 398123 - RNA, 22 nt, Human
acagaauucuaguauguggcuu

SEQ ID NO: 398124 - RNA, 22 nt, Human
ucaaaaguuucacauagagaua

SEQ ID NO: 398125 - RNA, 23 nt, Human
uuccagaggaagaagucaugacu

SEQ ID NO: 398126 - RNA, 22 nt, Human
acacaagauuguguauugaauu

SEQ ID NO: 398127 - RNA, 22 nt, Human
gcugcaggcauuuuccugggca

SEQ ID NO: 398128 - RNA, 22 nt, Human
gcuggauccugauucgucuuug

SEQ ID NO: 398129 - RNA, 22 nt, Human
uuccuuagauccuucaaucacg

SEQ ID NO: 398130 - RNA, 22 nt, Human
acagaauuugcuugggcaaugg

SEQ ID NO: 398131 - RNA, 22 nt, Human
aauguaaacagcaagagaaggg

SEQ ID NO: 398132 - RNA, 22 nt, Human
uaaagucauaagaguggauccg

SEQ ID NO: 398133 - RNA, 22 nt, Human
acaugcuuugcacuuacaucau

SEQ ID NO: 398134 - RNA, 22 nt, Human
uccuuguugcugcagucaccug

SEQ ID NO: 398135 - RNA, 22 nt, Human
auaauucaugggccuuucaccu

SEQ ID NO: 398136 - RNA, 22 nt, Human
auacugaauuagguaaagcaua

SEQ ID NO: 398137 - RNA, 22 nt, Human
caguccuuagauuuuacugcca

SEQ ID NO: 398138 - RNA, 22 nt, Human
aagaaacaaccacugcucuccu

SEQ ID NO: 398139 - RNA, 22 nt, Human
uauuaaagagagaaucaucauc

SEQ ID NO: 398140 - RNA, 22 nt, Human
auucauaacggcaaaugucacc

SEQ ID NO: 398141 - RNA, 22 nt, Human
uagucaccugugagcugcguag

SEQ ID NO: 398142 - RNA, 22 nt, Human
uguguaaauuuauuuacauaaa

SEQ ID NO: 398143 - RNA, 22 nt, Human
augugaaagagguguucagugg

SEQ ID NO: 398144 - RNA, 22 nt, Human
ucacaucaacauuauagcauga

SEQ ID NO: 398145 - RNA, 22 nt, Human
uccaaaguaauuucacuucugu

SEQ ID NO: 398146 - RNA, 22 nt, Human
aaacuuuguucgucugaugugg

SEQ ID NO: 398147 - RNA, 22 nt, Human
augaaacacacacgcgcauacu

SEQ ID NO: 398148 - RNA, 22 nt, Human
ugccauuuugagauguuaauga

SEQ ID NO: 398149 - RNA, 22 nt, Human
gaauuucacaaggugaggauaa

SEQ ID NO: 398150 - RNA, 22 nt, Human
ccuggaucgaugccgagggaaa

SEQ ID NO: 398151 - RNA, 22 nt, Human
uauaagaaauugccaaccuguu

SEQ ID NO: 398152 - RNA, 22 nt, Human
caaguccuaggucugauugaac

SEQ ID NO: 398153 - RNA, 22 nt, Human
gauuuucauuugcacucuagaa

SEQ ID NO: 398154 - RNA, 22 nt, Human
gaauacaaacuuaaggcuuuac

SEQ ID NO: 398155 - RNA, 23 nt, Human
uaauacugcuucagaggcuuaga

SEQ ID NO: 398156 - RNA, 22 nt, Human
guaaacaacacaaaucauuuga

SEQ ID NO: 398157 - RNA, 23 nt, Human
uuacagaaaguaugcuuuuguuu

SEQ ID NO: 398158 - RNA, 22 nt, Human
aauuccagcuaggaaaagcuuc

SEQ ID NO: 398159 - RNA, 22 nt, Human
auucuaacacaugcucuaagaa

SEQ ID NO: 398160 - RNA, 22 nt, Human
ccuauacaggcuucuuuacaug

SEQ ID NO: 398161 - RNA, 22 nt, Human
ucuauacaaguuucacuuugac

SEQ ID NO: 398162 - RNA, 22 nt, Human
uuuccaaauaaggucacacuca

SEQ ID NO: 398163 - RNA, 22 nt, Human
caucagaauagcucuguggaua

SEQ ID NO: 398164 - RNA, 22 nt, Human
ucagaauuuugguuugguuggu

SEQ ID NO: 398165 - RNA, 22 nt, Human
aagauauagauaaaacuaugca

SEQ ID NO: 398166 - RNA, 22 nt, Human
uauauacuuucuuccuggguag

SEQ ID NO: 398167 - RNA, 22 nt, Human
agucaccagguuuuagagaccu

SEQ ID NO: 398168 - RNA, 22 nt, Human
uacagaaguaaauaccaaaagc

SEQ ID NO: 398169 - RNA, 22 nt, Human
uuuauuauucucuggagaaugu

SEQ ID NO: 398170 - RNA, 22 nt, Human
auuacagaaugcaguuccuuau

SEQ ID NO: 398171 - RNA, 22 nt, Human
uuugaacaggaguaucuauagu

SEQ ID NO: 398172 - RNA, 22 nt, Human
cauuuaguuauacuaaaacauu

SEQ ID NO: 398173 - RNA, 22 nt, Human
uuccaaaccucaaauaauuaau

SEQ ID NO: 398174 - RNA, 22 nt, Human
ccauuucacucuuccugaagga

SEQ ID NO: 398175 - RNA, 22 nt, Human
gaaugaaagauuugcauucuau

SEQ ID NO: 398176 - RNA, 22 nt, Human
agauuggaucaagcagcaguug

SEQ ID NO: 398177 - RNA, 22 nt, Human
ucagaauuugauuccugggaua

SEQ ID NO: 398178 - RNA, 22 nt, Human
ccagaauucagaaagggcauaa

SEQ ID NO: 398179 - RNA, 22 nt, Human
uacagaaaaacuggcauugaag

SEQ ID NO: 398180 - RNA, 22 nt, Human
auaggcuuauauaaaaacaucu

SEQ ID NO: 398181 - RNA, 20 nt, Human
uguuccaagcuaaugaauga

SEQ ID NO: 398182 - RNA, 22 nt, Human
gcaacuuuagggccagcaagua

SEQ ID NO: 398183 - RNA, 22 nt, Human
gugaauaaaacaccugccaaga

SEQ ID NO: 398184 - RNA, 22 nt, Human
aagucacaagcauauaugcauu

SEQ ID NO: 398185 - RNA, 20 nt, Human
uauaacaguguugggugugu

SEQ ID NO: 398186 - RNA, 22 nt, Human
auuuccagacuuuuuccaggaa

SEQ ID NO: 398187 - RNA, 22 nt, Human
ugcuuaauauugugauguaaua

SEQ ID NO: 398188 - RNA, 23 nt, Human
cagaaauaaacugguuuguagau

SEQ ID NO: 398189 - RNA, 22 nt, Human
auggcuuucagauuucuauguu

SEQ ID NO: 398190 - RNA, 22 nt, Human
aacacuuucuauuauuaugguu

SEQ ID NO: 398191 - RNA, 19 nt, Human
aaaauugcguauuuugagg

SEQ ID NO: 398192 - RNA, 22 nt, Human
uaacagaaauuuuaguuagggg

SEQ ID NO: 398193 - RNA, 22 nt, Human
uuccacaauguaugaauaagau

SEQ ID NO: 398194 - RNA, 22 nt, Human
ccuggaucccgauggcugugag

SEQ ID NO: 398195 - RNA, 22 nt, Human
aucuauacuacaaauggcuggu

SEQ ID NO: 398196 - RNA, 22 nt, Human
auuauucaaucauauuaaaagu

SEQ ID NO: 398197 - RNA, 22 nt, Human
cacaagaaauaagcugccuuuc

SEQ ID NO: 398198 - RNA, 22 nt, Human
aaugcuuaauucaauacugugu

SEQ ID NO: 398199 - RNA, 22 nt, Human
uuuggacaaguuacugguuucc

SEQ ID NO: 398200 - RNA, 22 nt, Human
caguccuuagucuggauggcuu

SEQ ID NO: 398201 - RNA, 22 nt, Human
aaugggauaggucuucaggaau

SEQ ID NO: 398202 - RNA, 22 nt, Human
uuccuuaguguuagauucugug

SEQ ID NO: 398203 - RNA, 22 nt, Human
augcuuuagugucaaguuuggg

SEQ ID NO: 398204 - RNA, 22 nt, Human
uaaaacugaauacauacugagg

SEQ ID NO: 398205 - RNA, 22 nt, Human
agcaucuggcagaaagucagaa

SEQ ID NO: 398206 - RNA, 22 nt, Human
acuauacauaaaacauuugggu

SEQ ID NO: 398207 - RNA, 22 nt, Human
ucauaaaguucuaagaauugua

SEQ ID NO: 398208 - RNA, 22 nt, Human
auuaggcagugccauuguacgg

SEQ ID NO: 398209 - RNA, 22 nt, Human
cagaagucacccucagaauaac

SEQ ID NO: 398210 - RNA, 22 nt, Human
guuaaagaagaauaguuccuuu

SEQ ID NO: 398211 - RNA, 22 nt, Human
gaaugaauucagcacauggaau

SEQ ID NO: 398212 - RNA, 22 nt, Human
uuauacuuuauacuacaucauu

SEQ ID NO: 398213 - RNA, 22 nt, Human
gugaauaaucacccuucuggau

SEQ ID NO: 398214 - RNA, 22 nt, Human
uaaguaaauuuauaaugugauu

SEQ ID NO: 398215 - RNA, 22 nt, Human
uggcuuaagauuuaugcuuuua

SEQ ID NO: 398216 - RNA, 22 nt, Human
caacauuugaguaaagaaaugg

SEQ ID NO: 398217 - RNA, 22 nt, Human
agucaccauuuucaccugccuc

SEQ ID NO: 398218 - RNA, 22 nt, Human
uaucaaaguuguccugugaagu

SEQ ID NO: 398219 - RNA, 22 nt, Human
augguuuugaagggaggucaaa

SEQ ID NO: 398220 - RNA, 22 nt, Human
cuuaggcaguuuaggaaagaga

SEQ ID NO: 398221 - RNA, 22 nt, Human
aaacauguaauucugcuuaaga

SEQ ID NO: 398222 - RNA, 22 nt, Human
ugaagaaucccagggaauuugg

SEQ ID NO: 398223 - RNA, 22 nt, Human
auuccaaaggcuggccuggagg

SEQ ID NO: 398224 - RNA, 22 nt, Human
auuuacugagguaaauaaacug

SEQ ID NO: 398225 - RNA, 22 nt, Human
gaagaaucugaggacagucauu

SEQ ID NO: 398226 - RNA, 22 nt, Human
uuuaaugauagcuguuucacau

SEQ ID NO: 398227 - RNA, 22 nt, Human
uaaagucaucuuuacaucuuug

SEQ ID NO: 398228 - RNA, 22 nt, Human
uugaauaauauguucaggagga

SEQ ID NO: 398229 - RNA, 22 nt, Human
cuucuuaacuguauauacuaug

SEQ ID NO: 398230 - RNA, 22 nt, Human
ucauaaagcucuuccaaaugua

SEQ ID NO: 398231 - RNA, 22 nt, Human
aacaugaaaagcccagagaggu

SEQ ID NO: 398232 - RNA, 22 nt, Human
aaagucauuuguauauacccuu

SEQ ID NO: 398233 - RNA, 22 nt, Human
ugucauaacuuagugacaaauc

SEQ ID NO: 398234 - RNA, 23 nt, Human
aagaaugcuucugaagagcugcc

SEQ ID NO: 398235 - RNA, 22 nt, Human
uuacagaaguuucagcguuuua

SEQ ID NO: 398236 - RNA, 22 nt, Human
uaauuguagcuuuguaaucagc

SEQ ID NO: 398237 - RNA, 22 nt, Human
uuauaagaguauauaguguacu

SEQ ID NO: 398238 - RNA, 22 nt, Human
uuaaugauaccuauguuaauuu

SEQ ID NO: 398239 - RNA, 22 nt, Human
ucacaccaguuuccuuucaauu

SEQ ID NO: 398240 - RNA, 18 nt, Human
uauaaacacacuuagguu

SEQ ID NO: 398241 - RNA, 22 nt, Human
aguucacugcuuaagccuuuga

SEQ ID NO: 398242 - RNA, 22 nt, Human
cuaauuauguuguuauaaucaa

SEQ ID NO: 398243 - RNA, 22 nt, Human
caauuucacugacacccuggaa

SEQ ID NO: 398244 - RNA, 22 nt, Human
uauccaaaguuucucagaaacu

SEQ ID NO: 398245 - RNA, 22 nt, Human
guccaaauuuuucacauguaga

SEQ ID NO: 398246 - RNA, 22 nt, Human
auuacaagaugcauccauauuu

SEQ ID NO: 398247 - RNA, 22 nt, Human
aagucauugguagcuugauagg

SEQ ID NO: 398248 - RNA, 19 nt, Human
ucucuacacuacauuucua

SEQ ID NO: 398249 - RNA, 22 nt, Human
ugcaggaacagaacucacuccc

SEQ ID NO: 398250 - RNA, 22 nt, Human
aaauggaucuguggaauacauu

SEQ ID NO: 398251 - RNA, 22 nt, Human
ucauagaaugaguuaaugaacu

SEQ ID NO: 398252 - RNA, 21 nt, Human
ugaucauuuguguaaaggaga

SEQ ID NO: 398253 - RNA, 22 nt, Human
auuaggcagacaacguagccgg

SEQ ID NO: 398254 - RNA, 22 nt, Human
uuauuauugugguugcauuauc

SEQ ID NO: 398255 - RNA, 22 nt, Human
caauuucaugccauguauugcu

SEQ ID NO: 398256 - RNA, 22 nt, Human
uguauguugggucaaaguacau

SEQ ID NO: 398257 - RNA, 22 nt, Human
uuauuauuccccaagucauuau

SEQ ID NO: 398258 - RNA, 22 nt, Human
aaagccauaagccuaauacuaa

SEQ ID NO: 398259 - RNA, 22 nt, Human
aguguuuaaacugaagugauga

SEQ ID NO: 398260 - RNA, 22 nt, Human
auauuaaauggauuuugggagc

SEQ ID NO: 398261 - RNA, 23 nt, Human
uuuaacuuuccaauaauucauug

SEQ ID NO: 398262 - RNA, 22 nt, Human
aucagaaaaacauaauguuauu

SEQ ID NO: 398263 - RNA, 22 nt, Human
uuaggaaauuccaccuguauuc

SEQ ID NO: 398264 - RNA, 22 nt, Human
cuauuacauuucuggacauuca

SEQ ID NO: 398265 - RNA, 22 nt, Human
auggcuuucucuaaugugguau

SEQ ID NO: 398266 - RNA, 22 nt, Human
uuaauaaacaggugcagcugaa

SEQ ID NO: 398267 - RNA, 22 nt, Human
ucagccaguuugauucuauuug

SEQ ID NO: 398268 - RNA, 22 nt, Human
agaaaucaugucuuauuucuau

SEQ ID NO: 398269 - RNA, 22 nt, Human
uucaacuuuaugcauauguauu

SEQ ID NO: 398270 - RNA, 22 nt, Human
uucaacacaggaacaugauaua

SEQ ID NO: 398271 - RNA, 22 nt, Human
acaugcuuugauguauuuugca

SEQ ID NO: 398272 - RNA, 22 nt, Human
uuucaacuagccccuaaguccu

SEQ ID NO: 398273 - RNA, 22 nt, Human
auacagaauuugcccuuuucau

SEQ ID NO: 398274 - RNA, 22 nt, Human
uaauuucaaauuucuuagcgug

SEQ ID NO: 398275 - RNA, 22 nt, Human
aauuucaaugcacucaugguug

SEQ ID NO: 398276 - RNA, 22 nt, Human
caacagucugguuuauauaaua

SEQ ID NO: 398277 - RNA, 22 nt, Human
ugcaggaagcaaccagguccaa

SEQ ID NO: 398278 - RNA, 22 nt, Human
ugcuuuaaaauggacuguuuug

SEQ ID NO: 398279 - RNA, 20 nt, Human
uacaauacacaugcauauga

SEQ ID NO: 398280 - RNA, 22 nt, Human
gaugggauuuuuuauguguuca

SEQ ID NO: 398281 - RNA, 22 nt, Human
uuucaacguguaaucuuauuua

SEQ ID NO: 398282 - RNA, 22 nt, Human
auuccaaagguuaaugcccauu

SEQ ID NO: 398283 - RNA, 22 nt, Human
ccauggcuuucuuucauuguaa

SEQ ID NO: 398284 - RNA, 22 nt, Human
guacagaaauggggccccaggu

SEQ ID NO: 398285 - RNA, 22 nt, Human
acaugucuuuuaaagucuaaua

SEQ ID NO: 398286 - RNA, 22 nt, Human
uagaauucaagauucaacaggc

SEQ ID NO: 398287 - RNA, 22 nt, Human
uuugaacaugcugcaugauaau

SEQ ID NO: 398288 - RNA, 22 nt, Human
uuuaauacuauggggaugaaca

SEQ ID NO: 398289 - RNA, 22 nt, Human
auagaauagcauagaaaauuga

SEQ ID NO: 398290 - RNA, 22 nt, Human
gguacaauggaccauaaaagcu

SEQ ID NO: 398291 - RNA, 22 nt, Human
auacagaauacuaauuccugag

SEQ ID NO: 398292 - RNA, 22 nt, Human
auuuccaagaaagcuuuaggau

SEQ ID NO: 398293 - RNA, 22 nt, Human
auuaggcauuauggggauaagg

SEQ ID NO: 398294 - RNA, 22 nt, Human
gccccagcguggcuguguuagg

SEQ ID NO: 398295 - RNA, 22 nt, Human
aguaaacauuucagauuuauuu

SEQ ID NO: 398296 - RNA, 22 nt, Human
auggcuuugaaguaauguaauu

SEQ ID NO: 398297 - RNA, 22 nt, Human
gcuagaucucucauaaauucca

SEQ ID NO: 398298 - RNA, 22 nt, Human
caauauauaaugaguacuuucc

SEQ ID NO: 398299 - RNA, 22 nt, Human
cagaauuuuucgaauguacugu

SEQ ID NO: 398300 - RNA, 22 nt, Human
gugcauuuaggucacaugaugu

SEQ ID NO: 398301 - RNA, 22 nt, Human
uuuacagaaugucaauuucuau

SEQ ID NO: 398302 - RNA, 22 nt, Human
ccagucacucugugagagcuac

SEQ ID NO: 398303 - RNA, 22 nt, Human
auacuagacuguucuguuauca

SEQ ID NO: 398304 - RNA, 22 nt, Human
aaugaacagauacacauaggca

SEQ ID NO: 398305 - RNA, 22 nt, Human
cugcagagaccuaggucagguu

SEQ ID NO: 398306 - RNA, 22 nt, Human
uguaaauaauuccuaggcuuuu

SEQ ID NO: 398307 - RNA, 22 nt, Human
uggcuuuaggagcuauauaccu

SEQ ID NO: 398308 - RNA, 22 nt, Human
uaaugcuuaauuuucacaagcc

SEQ ID NO: 398309 - RNA, 22 nt, Human
uagcagaaacuguuacagaagg

SEQ ID NO: 398310 - RNA, 23 nt, Human
ugguucuaggccuauaauuauau

SEQ ID NO: 398311 - RNA, 22 nt, Human
caaguccuaaauguauuuguug

SEQ ID NO: 398312 - RNA, 22 nt, Human
uguagaaagaauauguuucaua

SEQ ID NO: 398313 - RNA, 22 nt, Human
gcucuaauugaaaaauacugca

SEQ ID NO: 398314 - RNA, 22 nt, Human
cuagaaauacaggcacgugcca

SEQ ID NO: 398315 - RNA, 22 nt, Human
aauggcuucugaagcacacuuu

SEQ ID NO: 398316 - RNA, 22 nt, Human
aauacuaguuauuaaagcuuuu

SEQ ID NO: 398317 - RNA, 22 nt, Human
augcugaauugaugcgagggag

SEQ ID NO: 398318 - RNA, 22 nt, Human
acuuugaaggggaacauuuuaa

SEQ ID NO: 398319 - RNA, 22 nt, Human
uggcauuugggcuggcuuuucu

SEQ ID NO: 398320 - RNA, 22 nt, Human
uuuaacuuaaucugcuugauga

SEQ ID NO: 398321 - RNA, 22 nt, Human
guagaaauguaaccaggagaua

SEQ ID NO: 398322 - RNA, 23 nt, Human
uggaauaauaagguacauuaaca

SEQ ID NO: 398323 - RNA, 17 nt, Human
caauuucauagguuuug

SEQ ID NO: 398324 - RNA, 22 nt, Human
aaauuucaagcaaaguagcuau

SEQ ID NO: 398325 - RNA, 22 nt, Human
uauccaaaggaacaaucacagc

SEQ ID NO: 398326 - RNA, 22 nt, Human
aaauggauggaaagcaauuuuu

SEQ ID NO: 398327 - RNA, 22 nt, Human
aaaguucaugguguuauagaaa

SEQ ID NO: 398328 - RNA, 22 nt, Human
augugaaauagcuggauaugaa

SEQ ID NO: 398329 - RNA, 22 nt, Human
uagcaucuggagaaacaagucc

SEQ ID NO: 398330 - RNA, 22 nt, Human
uaaacauguugacaucuuaccu

SEQ ID NO: 398331 - RNA, 22 nt, Human
aagccagauuucacucuuaauu

SEQ ID NO: 398332 - RNA, 22 nt, Human
uccuuaauucugugcaauaugu

SEQ ID NO: 398333 - RNA, 22 nt, Human
caauuucaauacaaaauacauu

SEQ ID NO: 398334 - RNA, 22 nt, Human
caguucacacugugcuaucugc

SEQ ID NO: 398335 - RNA, 22 nt, Human
uguccuuauauuguggaagggg

SEQ ID NO: 398336 - RNA, 22 nt, Human
uaaacauggauucugaucacag

SEQ ID NO: 398337 - RNA, 22 nt, Human
gcuauacacauuucuugguagu

SEQ ID NO: 398338 - RNA, 22 nt, Human
gugauuuagauguugaaaguga

SEQ ID NO: 398339 - RNA, 22 nt, Human
ugcugagaucugccaguagaug

SEQ ID NO: 398340 - RNA, 22 nt, Human
aucaguuaguuacugcuaagau

SEQ ID NO: 398341 - RNA, 22 nt, Human
aaaaagguugauccagauuagg

SEQ ID NO: 398342 - RNA, 22 nt, Human
cagauuucuauuucaaauacau

SEQ ID NO: 398343 - RNA, 22 nt, Human
aggauuuaccgucauuuagucu

SEQ ID NO: 398344 - RNA, 22 nt, Human
aaacugauaaaauaaguacauu

SEQ ID NO: 398345 - RNA, 22 nt, Human
ucuggaucccaccgccacacac

SEQ ID NO: 398346 - RNA, 22 nt, Human
gaaguccuccuaucuugcucuu

SEQ ID NO: 398347 - RNA, 22 nt, Human
aaaucagucccucuuggaauuu

SEQ ID NO: 398348 - RNA, 22 nt, Human
gccuuaauuuaugucuaacaua

SEQ ID NO: 398349 - RNA, 21 nt, Human
auggauuuaaacaggccacaa

SEQ ID NO: 398350 - RNA, 22 nt, Human
ucacagcaaaugcugcuucuca

SEQ ID NO: 398351 - RNA, 22 nt, Human
ggaucugauuaauaagguggac

SEQ ID NO: 398352 - RNA, 22 nt, Human
ugaaauagacacagugcuauac

SEQ ID NO: 398353 - RNA, 22 nt, Human
agaaaucauugaauuauuugcu

SEQ ID NO: 398354 - RNA, 22 nt, Human
ucuuuaaugugauuguaauuau

SEQ ID NO: 398355 - RNA, 22 nt, Human
cauuucaauacuaucugagaau

SEQ ID NO: 398356 - RNA, 22 nt, Human
ucuggaucaccacuucugccuc

SEQ ID NO: 398357 - RNA, 22 nt, Human
augaaacaguguguauagcaaa

SEQ ID NO: 398358 - RNA, 22 nt, Human
ucaguaaaugagcaaaaauuuc

SEQ ID NO: 398359 - RNA, 22 nt, Human
uauauaacuacuauuuugcuca

SEQ ID NO: 398360 - RNA, 22 nt, Human
aguguuuaccccaaucaguuua

SEQ ID NO: 398361 - RNA, 22 nt, Human
aauaaugucuuuggcuugacca

SEQ ID NO: 398362 - RNA, 22 nt, Human
uaauuuuuccacguacacuggg

SEQ ID NO: 398363 - RNA, 22 nt, Human
ucagaauuagagcucuucuuga

SEQ ID NO: 398364 - RNA, 22 nt, Human
ucaauucaauugaacaguuacu

SEQ ID NO: 398365 - RNA, 22 nt, Human
agaucugaccuaaccccaccac

SEQ ID NO: 398366 - RNA, 22 nt, Human
uuccucuagcuucucacuaaca

SEQ ID NO: 398367 - RNA, 22 nt, Human
uuacagaagagaaagaauucag

SEQ ID NO: 398368 - RNA, 22 nt, Human
cagauauuaggagcucaauaau

SEQ ID NO: 398369 - RNA, 22 nt, Human
uucuuagaugauuaaugauggg

SEQ ID NO: 398370 - RNA, 22 nt, Human
uaucagaacacauguuuugcag

SEQ ID NO: 398371 - RNA, 22 nt, Human
uuuacagaauguugaauuuggg

SEQ ID NO: 398372 - RNA, 22 nt, Human
aaagccaucaguaaaaugauuu

SEQ ID NO: 398373 - RNA, 22 nt, Human
aguaaaauuucugcugaggaga

SEQ ID NO: 398374 - RNA, 22 nt, Human
ucaauaaauagcuuggcucagc

SEQ ID NO: 398375 - RNA, 22 nt, Human
auauuauucuaguaacagugau

SEQ ID NO: 398376 - RNA, 22 nt, Human
uagaugcuguagaaauacuuau

SEQ ID NO: 398377 - RNA, 22 nt, Human
aagaauucacugguagagucaa

SEQ ID NO: 398378 - RNA, 22 nt, Human
uuuaggcaauagauggcagugu

SEQ ID NO: 398379 - RNA, 22 nt, Human
acaacuuuagucuggagggaaa

SEQ ID NO: 398380 - RNA, 22 nt, Human
uaaguccuagcuuugguaggaa

SEQ ID NO: 398381 - RNA, 22 nt, Human
aaagaaggggucuacauccaau

SEQ ID NO: 398382 - RNA, 22 nt, Human
uacacagaggcugaugucuuag

SEQ ID NO: 398383 - RNA, 22 nt, Human
caugcuuuucaaucuaucuuaa

SEQ ID NO: 398384 - RNA, 22 nt, Human
uuauaacaacaguuuacuuuaa

SEQ ID NO: 398385 - RNA, 20 nt, Human
auaaaauaacugccacaaga

SEQ ID NO: 398386 - RNA, 22 nt, Human
gaugaaaaaagacgagcauaua

SEQ ID NO: 398387 - RNA, 22 nt, Human
aagaaugagcucaaagaucuua

SEQ ID NO: 398388 - RNA, 22 nt, Human
auggguuucccucugaaauuau

SEQ ID NO: 398389 - RNA, 22 nt, Human
augaaauaucuugaagaaauuc

SEQ ID NO: 398390 - RNA, 22 nt, Human
acaauauuguacccagaaguuu

SEQ ID NO: 398391 - RNA, 22 nt, Human
gacauaauccuccucaccuacu

SEQ ID NO: 398392 - RNA, 22 nt, Human
ggcauuuagagggcuuuucuga

SEQ ID NO: 398393 - RNA, 22 nt, Human
auuauagaggguuacaguuaau

SEQ ID NO: 398394 - RNA, 22 nt, Human
augaacaagagagggaagauuc

SEQ ID NO: 398395 - RNA, 22 nt, Human
augaacaaguauuugcaugagc

SEQ ID NO: 398396 - RNA, 22 nt, Human
gaucagaaucuucauuuucagu

SEQ ID NO: 398397 - RNA, 22 nt, Human
acagaauuaucaggaaauguua

SEQ ID NO: 398398 - RNA, 22 nt, Human
auagucacugccuuccauuugu

SEQ ID NO: 398399 - RNA, 22 nt, Human
uacuauaccauguaagauauga

SEQ ID NO: 398400 - RNA, 22 nt, Human
gcuauacaaguguagaauagag

SEQ ID NO: 398401 - RNA, 22 nt, Human
uaagaaucgauguuuauuuaga

SEQ ID NO: 398402 - RNA, 22 nt, Human
uuccuuagugacuucuagcuac

SEQ ID NO: 398403 - RNA, 22 nt, Human
uuacagaaagguugugggauag

SEQ ID NO: 398404 - RNA, 22 nt, Human
aaaugaaaugagugccuggagg

SEQ ID NO: 398405 - RNA, 22 nt, Human
uuacagaaaguuucccaugccg

SEQ ID NO: 398406 - RNA, 22 nt, Human
uuuccauauuuaaucaaaauaa

SEQ ID NO: 398407 - RNA, 22 nt, Human
auuaggcauucaugcagcuccu

SEQ ID NO: 398408 - RNA, 20 nt, Human
aaaaacaguaaugcugaaga

SEQ ID NO: 398409 - RNA, 22 nt, Human
auuaggcauauaugcuuuuaau

SEQ ID NO: 398410 - RNA, 22 nt, Human
auggaucacagugccgugggug

SEQ ID NO: 398411 - RNA, 22 nt, Human
aaauccuuuucuauacagcaua

SEQ ID NO: 398412 - RNA, 22 nt, Human
uucuaacaaguggcuuguuagu

SEQ ID NO: 398413 - RNA, 22 nt, Human
ucagaaauagucuuuaaaauga

SEQ ID NO: 398414 - RNA, 22 nt, Human
ugcagagagauauggcaagagg

SEQ ID NO: 398415 - RNA, 22 nt, Human
aguauaauuagauaucaaaagu

SEQ ID NO: 398416 - RNA, 22 nt, Human
cugugcagcuggcuuccuggaa

SEQ ID NO: 398417 - RNA, 22 nt, Human
uauaaaauucucaguuuggggu

SEQ ID NO: 398418 - RNA, 21 nt, Human
aaauggauagggcaauggaag

SEQ ID NO: 398419 - RNA, 22 nt, Human
aaugguauuugucaagcauagu

SEQ ID NO: 398420 - RNA, 22 nt, Human
cuuacagagaagaaaauguagu

SEQ ID NO: 398421 - RNA, 22 nt, Human
gaugaaaaucuugagaugucga

SEQ ID NO: 398422 - RNA, 22 nt, Human
aguucacagccauguucaugug

SEQ ID NO: 398423 - RNA, 22 nt, Human
ucuuuaauuguggaagagcagc

SEQ ID NO: 398424 - RNA, 22 nt, Human
gaguccuuuucucuguccacug

SEQ ID NO: 398425 - RNA, 21 nt, Human
auacagaagguggcaaaguac

SEQ ID NO: 398426 - RNA, 22 nt, Human
cuauaauuaugcucaaaaugua

SEQ ID NO: 398427 - RNA, 22 nt, Human
guuccaaaguuagaguguauug

SEQ ID NO: 398428 - RNA, 22 nt, Human
agcauuuagucuuuauugcagc

SEQ ID NO: 398429 - RNA, 22 nt, Human
acaacaaagacacuugaaauga

SEQ ID NO: 398430 - RNA, 22 nt, Human
agaagucaauaguuguuugaug

SEQ ID NO: 398431 - RNA, 22 nt, Human
ucuaaagccuuccauauaacgc

SEQ ID NO: 398432 - RNA, 22 nt, Human
auaaagcauacuuuguaugacu

SEQ ID NO: 398433 - RNA, 22 nt, Human
caaauacuaaacauaagauuuu

SEQ ID NO: 398434 - RNA, 22 nt, Human
auagaauuauggaaagcaucuu

SEQ ID NO: 398435 - RNA, 22 nt, Human
aaaugcuuagagguguucaaau

SEQ ID NO: 398436 - RNA, 22 nt, Human
agucauuuugccagucuucagg

SEQ ID NO: 398437 - RNA, 22 nt, Human
ucuuaauucugugucuucacua

SEQ ID NO: 398438 - RNA, 22 nt, Human
cacauacuuguguguacauaug

SEQ ID NO: 398439 - RNA, 22 nt, Human
guuccaaagcaaaggaggugag

SEQ ID NO: 398440 - RNA, 22 nt, Human
auuaggcagggcaugguggcuc

SEQ ID NO: 398441 - RNA, 22 nt, Human
ccuucaaucagcagucuagcuu

SEQ ID NO: 398442 - RNA, 22 nt, Human
uagaacauaagucauucauuug

SEQ ID NO: 398443 - RNA, 20 nt, Human
caauuucaucauuuccugug

SEQ ID NO: 398444 - RNA, 22 nt, Human
auaaaaucagaguuggauugga

SEQ ID NO: 398445 - RNA, 22 nt, Human
aaguccuuuaauaucacauagu

SEQ ID NO: 398446 - RNA, 21 nt, Human
ccaagacucccaucuaguggu

SEQ ID NO: 398447 - RNA, 22 nt, Human
gcagaauuuggggguaaccuuu

SEQ ID NO: 398448 - RNA, 22 nt, Human
gauggcuucacuuacauggcug

SEQ ID NO: 398449 - RNA, 22 nt, Human
uucacagaauggcaaguuaugg

SEQ ID NO: 398450 - RNA, 22 nt, Human
augugcuuuauuaaguaaaaau

SEQ ID NO: 398451 - RNA, 22 nt, Human
uacagauauagagauuuauaga

SEQ ID NO: 398452 - RNA, 22 nt, Human
caauuucauuaauagauauaga

SEQ ID NO: 398453 - RNA, 22 nt, Human
gauuucaagcccccagagauuc

SEQ ID NO: 398454 - RNA, 22 nt, Human
uguagaaauuaguaagaucaac

SEQ ID NO: 398455 - RNA, 22 nt, Human
uaggcagaauuguugaaugaag

SEQ ID NO: 398456 - RNA, 22 nt, Human
aaaucaguuggaacacaagcag

SEQ ID NO: 398457 - RNA, 22 nt, Human
ucaaacagaggaacaauuguuu

SEQ ID NO: 398458 - RNA, 22 nt, Human
uuauccaaacuggugaaucauu

SEQ ID NO: 398459 - RNA, 23 nt, Human
aucaaaggauguagagaagaagc

SEQ ID NO: 398460 - RNA, 22 nt, Human
aucagaaaauacccaguguuua

SEQ ID NO: 398461 - RNA, 22 nt, Human
uucaagacugcgacuaaugccc

SEQ ID NO: 398462 - RNA, 22 nt, Human
aaaagccaagguccucuucaga

SEQ ID NO: 398463 - RNA, 22 nt, Human
ggauucagugucuguuaauagu

SEQ ID NO: 398464 - RNA, 22 nt, Human
auauacugauagcugcacuucu

SEQ ID NO: 398465 - RNA, 22 nt, Human
ggcauuuauuugucucauucuu

SEQ ID NO: 398466 - RNA, 21 nt, Human
uuuaguucaaguacagaacca

SEQ ID NO: 398467 - RNA, 22 nt, Human
aaugucuucaguguauacaugg

SEQ ID NO: 398468 - RNA, 22 nt, Human
gugcauuugacgaauacucacu

SEQ ID NO: 398469 - RNA, 22 nt, Human
cuaacuuuagcuuagauuauca

SEQ ID NO: 398470 - RNA, 22 nt, Human
aucagaaauugcccagcuguuu

SEQ ID NO: 398471 - RNA, 22 nt, Human
uuuucauuuuuguagaugcaag

SEQ ID NO: 398472 - RNA, 23 nt, Human
uguaacaauucccagccuuugcc

SEQ ID NO: 398473 - RNA, 22 nt, Human
ccauggcucuagagauugaaaa

SEQ ID NO: 398474 - RNA, 22 nt, Human
acaacuuugacccuuguucuua

SEQ ID NO: 398475 - RNA, 22 nt, Human
uauaaaacagaaagcacuaccu

SEQ ID NO: 398476 - RNA, 22 nt, Human
agcauauaaauggacauauuug

SEQ ID NO: 398477 - RNA, 22 nt, Human
aauaacuggcacauaucacaua

SEQ ID NO: 398478 - RNA, 22 nt, Human
aaagucauuggaauauuaauga

SEQ ID NO: 398479 - RNA, 22 nt, Human
cagcacagggacaauagcagau

SEQ ID NO: 398480 - RNA, 22 nt, Human
aaucagaacgcucgaucuucgg

SEQ ID NO: 398481 - RNA, 22 nt, Human
aaauucuucagguaauuuugau

SEQ ID NO: 398482 - RNA, 22 nt, Human
ucccaaagcuacucuucugacu

SEQ ID NO: 398483 - RNA, 23 nt, Human
ucuauacauacugcagccucugg

SEQ ID NO: 398484 - RNA, 22 nt, Human
gguaugaauucacuacuuccaa

SEQ ID NO: 398485 - RNA, 22 nt, Human
augugaaauauuaagccgagga

SEQ ID NO: 398486 - RNA, 22 nt, Human
augguuuaaagaguaugacuuu

SEQ ID NO: 398487 - RNA, 22 nt, Human
ucaagacaucacugugcauuuu

SEQ ID NO: 398488 - RNA, 22 nt, Human
caucauaaaauugagauaacug

SEQ ID NO: 398489 - RNA, 22 nt, Human
aaaacuuucagggauacagaaa

SEQ ID NO: 398490 - RNA, 22 nt, Human
aagcauuuauagauaagaauuu

SEQ ID NO: 398491 - RNA, 22 nt, Human
gcguuaauaacauuaauaaugc

SEQ ID NO: 398492 - RNA, 22 nt, Human
caauuucacuaaugaugugggg

SEQ ID NO: 398493 - RNA, 22 nt, Human
aaacagacugcacugccaguca

SEQ ID NO: 398494 - RNA, 22 nt, Human
uagaaaucagcaggcauaugua

SEQ ID NO: 398495 - RNA, 22 nt, Human
uuucaaguguccugauuaaugg

SEQ ID NO: 398496 - RNA, 22 nt, Human
cuuccaaaauuuauauguugaa

SEQ ID NO: 398497 - RNA, 18 nt, Human
aaaaagugcucaggccua

SEQ ID NO: 398498 - RNA, 22 nt, Human
agccagucggggccaugcuggg

SEQ ID NO: 398499 - RNA, 22 nt, Human
gaguccuugacacauaguaggu

SEQ ID NO: 398500 - RNA, 22 nt, Human
caaagucauggggaugcagguc

SEQ ID NO: 398501 - RNA, 22 nt, Human
aagaaaucauaucauuucuugg

SEQ ID NO: 398502 - RNA, 20 nt, Human
caccagucaugagucaauac

SEQ ID NO: 398503 - RNA, 22 nt, Human
caguccuugcucugggaugaug

SEQ ID NO: 398504 - RNA, 22 nt, Human
caaagaagagauuuacagagcu

SEQ ID NO: 398505 - RNA, 22 nt, Human
aggcuucugcugauauuucauu

SEQ ID NO: 398506 - RNA, 22 nt, Human
auguaaaucaagcagugcuggu

SEQ ID NO: 398507 - RNA, 22 nt, Human
uaaaauugcggugaauauuucc

SEQ ID NO: 398508 - RNA, 22 nt, Human
cuagaaauucugauucaguagg

SEQ ID NO: 398509 - RNA, 22 nt, Human
guagaaauauuuaucucugaga

SEQ ID NO: 398510 - RNA, 22 nt, Human
uguucagcccucuauuaaucag

SEQ ID NO: 398511 - RNA, 22 nt, Human
ugcuuauucuuuccacaauuca

SEQ ID NO: 398512 - RNA, 22 nt, Human
aaagccaucuguauuaagugaa

SEQ ID NO: 398513 - RNA, 22 nt, Human
ucuuaauugagaacaguguagg

SEQ ID NO: 398514 - RNA, 19 nt, Human
uuucagacucaucuccagc

SEQ ID NO: 398515 - RNA, 22 nt, Human
uacaugaaguugucuaaacugg

SEQ ID NO: 398516 - RNA, 22 nt, Human
gcuuaauucuggcucaguuucc

SEQ ID NO: 398517 - RNA, 22 nt, Human
cagauuuaagagauaaacagug

SEQ ID NO: 398518 - RNA, 22 nt, Human
uauccaaacauauagucucucu

SEQ ID NO: 398519 - RNA, 22 nt, Human
aauauuucugcagaaugguuuu

SEQ ID NO: 398520 - RNA, 22 nt, Human
augguuuuucaaguauucagaa

SEQ ID NO: 398521 - RNA, 22 nt, Human
uuaaaacagcgugaaucuggca

SEQ ID NO: 398522 - RNA, 22 nt, Human
uuuccaaauaaggucacauucu

SEQ ID NO: 398523 - RNA, 22 nt, Human
ugaauaauccacagucauucau

SEQ ID NO: 398524 - RNA, 22 nt, Human
ugaaauagaaaaacaggcuucu

SEQ ID NO: 398525 - RNA, 22 nt, Human
cauagaaacuugcagcaagcac

SEQ ID NO: 398526 - RNA, 22 nt, Human
aauuuauauguaauuaggcaca

SEQ ID NO: 398527 - RNA, 22 nt, Human
augcaaaauuaccauucuguuc

SEQ ID NO: 398528 - RNA, 22 nt, Human
ucauuucucccggccaaaaacu

SEQ ID NO: 398529 - RNA, 22 nt, Human
ugcuuuaagacacuaaguuuga

SEQ ID NO: 398530 - RNA, 22 nt, Human
caaugucaugauuuuccauuag

SEQ ID NO: 398531 - RNA, 22 nt, Human
ugucaccaguuccaggaaauaa

SEQ ID NO: 398532 - RNA, 22 nt, Human
aucagcaucuuuaacaauuacc

SEQ ID NO: 398533 - RNA, 22 nt, Human
auuucaacauucucaguuguag

SEQ ID NO: 398534 - RNA, 22 nt, Human
uuauccaacaugacuuaugucc

SEQ ID NO: 398535 - RNA, 22 nt, Human
aaguccauucuuccagccagcu

SEQ ID NO: 398536 - RNA, 22 nt, Human
aaagccagguugugugcaggaa

SEQ ID NO: 398537 - RNA, 22 nt, Human
gugaauaacuuucuauguuaau

SEQ ID NO: 398538 - RNA, 22 nt, Human
ccagcugucagugugaaaauaa

SEQ ID NO: 398539 - RNA, 22 nt, Human
uacaagaaauuucugcauauau

SEQ ID NO: 398540 - RNA, 22 nt, Human
uuacagaaaauguguuuuaacu

SEQ ID NO: 398541 - RNA, 19 nt, Human
uauuucaaagugccgucua

SEQ ID NO: 398542 - RNA, 22 nt, Human
ucagaauucugaccuuggguca

SEQ ID NO: 398543 - RNA, 22 nt, Human
agagugaaguuuuugaaaguga

SEQ ID NO: 398544 - RNA, 22 nt, Human
auuuccaauuucauccaugucc

SEQ ID NO: 398545 - RNA, 22 nt, Human
uaaucauggccucaaauuuuau

SEQ ID NO: 398546 - RNA, 22 nt, Human
auuccaaacucuuucccugucg

SEQ ID NO: 398547 - RNA, 22 nt, Human
aauuucaaagcucacuggcaua

SEQ ID NO: 398548 - RNA, 22 nt, Human
auuauauaggacuugcccuucc

SEQ ID NO: 398549 - RNA, 22 nt, Human
uuuauccaccuuacccuguucc

SEQ ID NO: 398550 - RNA, 22 nt, Human
aaugucuugagaagagaaaucu

SEQ ID NO: 398551 - RNA, 22 nt, Human
uucaacuuuggagauuuaauaa

SEQ ID NO: 398552 - RNA, 22 nt, Human
gaguguucccacaccccaguug

SEQ ID NO: 398553 - RNA, 21 nt, Human
agucccauccgguaagcaagc

SEQ ID NO: 398554 - RNA, 23 nt, Human
uucaaaacuggaaaaucagaugc

SEQ ID NO: 398555 - RNA, 22 nt, Human
uuuauccagaaucaggauuuuu

SEQ ID NO: 398556 - RNA, 22 nt, Human
ugcuggaggauuaaacaaguca

SEQ ID NO: 398557 - RNA, 22 nt, Human
uuaacacuccuaacuacagucu

SEQ ID NO: 398558 - RNA, 22 nt, Human
auaugaaaguaagcaugugugu

SEQ ID NO: 398559 - RNA, 20 nt, Human
uauuccaaggguagagaaaa

SEQ ID NO: 398560 - RNA, 22 nt, Human
uuacaaaguguuaugauaaaca

SEQ ID NO: 398561 - RNA, 22 nt, Human
uaucaagugacuaucacagaac

SEQ ID NO: 398562 - RNA, 22 nt, Human
uguucacaaggugaugcuuuga

SEQ ID NO: 398563 - RNA, 22 nt, Human
cuggauuuuagaaggcuuccua

SEQ ID NO: 398564 - RNA, 22 nt, Human
augguuuuccucugcugcuuaa

SEQ ID NO: 398565 - RNA, 22 nt, Human
uacaaaaaauugauacugacga

SEQ ID NO: 398566 - RNA, 22 nt, Human
uggcuuuacugucauucuuaug

SEQ ID NO: 398567 - RNA, 22 nt, Human
uaccaaaagcuuguuucauaca

SEQ ID NO: 398568 - RNA, 22 nt, Human
uuucagacagauucuucucagu

SEQ ID NO: 398569 - RNA, 22 nt, Human
gaucagaaugggacauauccug

SEQ ID NO: 398570 - RNA, 22 nt, Human
gcaaaauuaaacuuagcaucau

SEQ ID NO: 398571 - RNA, 23 nt, Human
aguacaauaaguauaauucuuuc

SEQ ID NO: 398572 - RNA, 22 nt, Human
uaaagaucuuaggaagauuuuc

SEQ ID NO: 398573 - RNA, 22 nt, Human
acagaaugggauuugaauauuu

SEQ ID NO: 398574 - RNA, 22 nt, Human
acacaauacagggcucaaaaua

SEQ ID NO: 398575 - RNA, 22 nt, Human
gaacuuuaaaacaaaguacagu

SEQ ID NO: 398576 - RNA, 22 nt, Human
caaaauuguugaugcugcuuug

SEQ ID NO: 398577 - RNA, 22 nt, Human
ucaacuuugaaaccauagugaa

SEQ ID NO: 398578 - RNA, 22 nt, Human
aaucagaaagaggucauguugc

SEQ ID NO: 398579 - RNA, 22 nt, Human
uguccuuaucuccaaacaauca

SEQ ID NO: 398580 - RNA, 22 nt, Human
cuauacaguaaccacagugauu

SEQ ID NO: 398581 - RNA, 22 nt, Human
agacugaauaacaagcaaauaa

SEQ ID NO: 398582 - RNA, 22 nt, Human
aucagaaaucuaggauucagaa

SEQ ID NO: 398583 - RNA, 22 nt, Human
augguuuacaauguuuucaguu

SEQ ID NO: 398584 - RNA, 22 nt, Human
uucacagaguuauuuuuaugcu

SEQ ID NO: 398585 - RNA, 22 nt, Human
ucauagaagcaccagaagauau

SEQ ID NO: 398586 - RNA, 22 nt, Human
agaacaucuaaauaucugagac

SEQ ID NO: 398587 - RNA, 22 nt, Human
uugauacuauuaagcacugggc

SEQ ID NO: 398588 - RNA, 22 nt, Human
cagaauuuagcacaauguaugg

SEQ ID NO: 398589 - RNA, 22 nt, Human
augugaaaccugugaguagagu

SEQ ID NO: 398590 - RNA, 22 nt, Human
ugaauaaucauguccauagugu

SEQ ID NO: 398591 - RNA, 22 nt, Human
uucagaaaggauaauuggaagg

SEQ ID NO: 398592 - RNA, 22 nt, Human
uuucuaguaaucaauauaaagu

SEQ ID NO: 398593 - RNA, 22 nt, Human
ucagagaaauaauugcugaguu

SEQ ID NO: 398594 - RNA, 22 nt, Human
uuacagaauguucuuccaacag

SEQ ID NO: 398595 - RNA, 22 nt, Human
uauaacaggaaguauucaaaca

SEQ ID NO: 398596 - RNA, 22 nt, Human
gugauuuaguguuaaguauguu

SEQ ID NO: 398597 - RNA, 22 nt, Human
gaaauagacacuuucuaugaau

SEQ ID NO: 398598 - RNA, 22 nt, Human
gccagucugcucccacaaguuc

SEQ ID NO: 398599 - RNA, 22 nt, Human
uuugaaguggaaaaggauuuaa

SEQ ID NO: 398600 - RNA, 22 nt, Human
acauaauagcauuucuaauuug

SEQ ID NO: 398601 - RNA, 22 nt, Human
caacuuugugugaccuagauag

SEQ ID NO: 398602 - RNA, 22 nt, Human
ucuuuaaucauaaccaagaugg

SEQ ID NO: 398603 - RNA, 22 nt, Human
caaagauuuuagaauuugcaau

SEQ ID NO: 398604 - RNA, 22 nt, Human
acagguuugucugauguaauga

SEQ ID NO: 398605 - RNA, 22 nt, Human
caauuucacuaauaauauuuac

SEQ ID NO: 398606 - RNA, 21 nt, Human
gaguccuuccaauguccucag

SEQ ID NO: 398607 - RNA, 22 nt, Human
auaaagauuuuuaggcauuucu

SEQ ID NO: 398608 - RNA, 22 nt, Human
agcacauaccagaaccacaggu

SEQ ID NO: 398609 - RNA, 22 nt, Human
aaauauaguaaaugcauaguuc

SEQ ID NO: 398610 - RNA, 22 nt, Human
aaagucauggaaaaucuuggaa

SEQ ID NO: 398611 - RNA, 22 nt, Human
uuccaaaguuaguuauuagaaa

SEQ ID NO: 398612 - RNA, 22 nt, Human
auaaaauuugcuacuguuaaau

SEQ ID NO: 398613 - RNA, 22 nt, Human
uacuuguagcagguggcauuua

SEQ ID NO: 398614 - RNA, 22 nt, Human
uuccuuagggucagccagaucu

SEQ ID NO: 398615 - RNA, 22 nt, Human
uuuaggcacagaguugagggac

SEQ ID NO: 398616 - RNA, 22 nt, Human
uuuccaaaaguuuguucugugc

SEQ ID NO: 398617 - RNA, 22 nt, Human
cuucuuaaucccuuauauauuu

SEQ ID NO: 398618 - RNA, 22 nt, Human
ugaaacuaggccaaucaaauua

SEQ ID NO: 398619 - RNA, 22 nt, Human
aggauuuacuagcaaggauucu

SEQ ID NO: 398620 - RNA, 22 nt, Human
aauuccaaguagcaucccauca

SEQ ID NO: 398621 - RNA, 22 nt, Human
aggauuuacaaugauucuaggu

SEQ ID NO: 398622 - RNA, 22 nt, Human
uuugaagacauauuguuacaua

SEQ ID NO: 398623 - RNA, 22 nt, Human
uaugucaaaguuaagaaauagg

SEQ ID NO: 398624 - RNA, 22 nt, Human
aaaguccuguuugaaggaccug

SEQ ID NO: 398625 - RNA, 22 nt, Human
uauacuuuccugcaacuuugau

SEQ ID NO: 398626 - RNA, 22 nt, Human
aaacaaacaauuaguugugugg

SEQ ID NO: 398627 - RNA, 22 nt, Human
caaauucaaugaacauguuuaa

SEQ ID NO: 398628 - RNA, 22 nt, Human
aucaagaacuuauuuuggaaau

SEQ ID NO: 398629 - RNA, 22 nt, Human
augaaacagugaauuagucaag

SEQ ID NO: 398630 - RNA, 22 nt, Human
aaguucuaauuuugcauucagg

SEQ ID NO: 398631 - RNA, 22 nt, Human
ucaacuuuaguguagcuauuua

SEQ ID NO: 398632 - RNA, 22 nt, Human
auaaagcaagcauaccauuaag

SEQ ID NO: 398633 - RNA, 22 nt, Human
uuucagacaggacuucauaugu

SEQ ID NO: 398634 - RNA, 22 nt, Human
uagcaucuguucuuucauuaaa

SEQ ID NO: 398635 - RNA, 22 nt, Human
uucugaaaauugggucauacuu

SEQ ID NO: 398636 - RNA, 22 nt, Human
auccaaagauggaaagaacuuu

SEQ ID NO: 398637 - RNA, 22 nt, Human
gagacaggauuuaaccaaagcu

SEQ ID NO: 398638 - RNA, 22 nt, Human
agaucugaaucucauccgagga

SEQ ID NO: 398639 - RNA, 22 nt, Human
aaagccuuugucucaggcucug

SEQ ID NO: 398640 - RNA, 22 nt, Human
ugaaugaauccuaacaaagaca

SEQ ID NO: 398641 - RNA, 22 nt, Human
caguccuugcucaaagucuaca

SEQ ID NO: 398642 - RNA, 22 nt, Human
auccuuaguuaagaacaggagu

SEQ ID NO: 398643 - RNA, 22 nt, Human
aauuaauggaaaguaaggaagg

SEQ ID NO: 398644 - RNA, 22 nt, Human
auggcuuuuuagacuuugguac

SEQ ID NO: 398645 - RNA, 22 nt, Human
augcaaaauaaggcagaaacau

SEQ ID NO: 398646 - RNA, 22 nt, Human
aguguuuagcaugaaguucauu

SEQ ID NO: 398647 - RNA, 22 nt, Human
gaugaaaaauugcugugucaua

SEQ ID NO: 398648 - RNA, 22 nt, Human
auacaugugggucuaaacauau

SEQ ID NO: 398649 - RNA, 22 nt, Human
auuccaaagcacaucagaacua

SEQ ID NO: 398650 - RNA, 22 nt, Human
gaguucuaaaggcagaacauaa

SEQ ID NO: 398651 - RNA, 22 nt, Human
uucuucaaaauccagcaugauu

SEQ ID NO: 398652 - RNA, 22 nt, Human
aucuaaaguguuucaugaaaga

SEQ ID NO: 398653 - RNA, 22 nt, Human
acauucacuauguccaaacucu

SEQ ID NO: 398654 - RNA, 22 nt, Human
agaucacagcccccagaugcca

SEQ ID NO: 398655 - RNA, 23 nt, Human
uuccuuaacuguuaagauugucu

SEQ ID NO: 398656 - RNA, 22 nt, Human
gaaguccugguccucucauuca

SEQ ID NO: 398657 - RNA, 22 nt, Human
ccguagcacaugcuccuggggc

SEQ ID NO: 398658 - RNA, 22 nt, Human
uucaauucuaaacuaauauucu

SEQ ID NO: 398659 - RNA, 22 nt, Human
agaaaugcucaggucaacuuaa

SEQ ID NO: 398660 - RNA, 22 nt, Human
auaaagucuaccguauuaaaga

SEQ ID NO: 398661 - RNA, 22 nt, Human
uugaauaaaugagcagugaauu

SEQ ID NO: 398662 - RNA, 22 nt, Human
aucagaauaauuagauuucaga

SEQ ID NO: 398663 - RNA, 22 nt, Human
gauuucaauccagcuuucuucu

SEQ ID NO: 398664 - RNA, 20 nt, Human
aucaaaggcugauucagucc

SEQ ID NO: 398665 - RNA, 22 nt, Human
auggcauuugaaucugucuuuu

SEQ ID NO: 398666 - RNA, 22 nt, Human
uucacagagagaacucaaacca

SEQ ID NO: 398667 - RNA, 22 nt, Human
aaauagauugcugaggcauuac

SEQ ID NO: 398668 - RNA, 22 nt, Human
gcagaauuggauaguugugaua

SEQ ID NO: 398669 - RNA, 22 nt, Human
ggcauuuaguuuucauauucug

SEQ ID NO: 398670 - RNA, 22 nt, Human
uucauuaauucauucagugacu

SEQ ID NO: 398671 - RNA, 22 nt, Human
uauaaaauggcaucagcuccaa

SEQ ID NO: 398672 - RNA, 20 nt, Human
aauaaacuacugagagaugu

SEQ ID NO: 398673 - RNA, 22 nt, Human
aacauguaucgcuuuuuaauau

SEQ ID NO: 398674 - RNA, 16 nt, Human
uuuccaaagggcagcu

SEQ ID NO: 398675 - RNA, 22 nt, Human
ugagauuuguuuuauaaaauag

SEQ ID NO: 398676 - RNA, 22 nt, Human
acuuugaaacuaaaauucauua

SEQ ID NO: 398677 - RNA, 22 nt, Human
ggauuugaauuguugaaaugau

SEQ ID NO: 398678 - RNA, 22 nt, Human
uuuaggcagcuacauacuaacu

SEQ ID NO: 398679 - RNA, 22 nt, Human
uacaagaaugucuuaaaagcuc

SEQ ID NO: 398680 - RNA, 22 nt, Human
agagauucauguuuacuguagg

SEQ ID NO: 398681 - RNA, 22 nt, Human
aaguccuuaggaagcagucguu

SEQ ID NO: 398682 - RNA, 20 nt, Human
acaauacagguugugucuga

SEQ ID NO: 398683 - RNA, 23 nt, Human
gagauuuagcagacaaagcucuu

SEQ ID NO: 398684 - RNA, 22 nt, Human
uugauccaguugaaagugauga

SEQ ID NO: 398685 - RNA, 22 nt, Human
cuuaauuacuguccaauaugca

SEQ ID NO: 398686 - RNA, 22 nt, Human
aaauccuuuggaggacaugaug

SEQ ID NO: 398687 - RNA, 22 nt, Human
uauauuaaaugaccaguuuuaa

SEQ ID NO: 398688 - RNA, 22 nt, Human
agaagugagugugacucagcag

SEQ ID NO: 398689 - RNA, 22 nt, Human
ucuggaucgccggcgccugggc

SEQ ID NO: 398690 - RNA, 22 nt, Human
gauuuacagcuauacccaaugg

SEQ ID NO: 398691 - RNA, 22 nt, Human
augaaaauugacagcggaagua

SEQ ID NO: 398692 - RNA, 22 nt, Human
aguacaauuuaaugaagauagc

SEQ ID NO: 398693 - RNA, 22 nt, Human
uggauuuaguucuucacaggcc

SEQ ID NO: 398694 - RNA, 22 nt, Human
aagaaaucagaaaagcauucgu

SEQ ID NO: 398695 - RNA, 22 nt, Human
aucuaaacagguguucuuuaga

SEQ ID NO: 398696 - RNA, 22 nt, Human
ucuaaacagccucuuaccaacu

SEQ ID NO: 398697 - RNA, 20 nt, Human
caucagaaauccugacccac

SEQ ID NO: 398698 - RNA, 22 nt, Human
cuuuaacaaaugacucuugucu

SEQ ID NO: 398699 - RNA, 22 nt, Human
ucaguaaacagguuuaaguccu

SEQ ID NO: 398700 - RNA, 22 nt, Human
uccuggauaucaaacaaacauu

SEQ ID NO: 398701 - RNA, 22 nt, Human
aauguucauugauuaaaugaau

SEQ ID NO: 398702 - RNA, 22 nt, Human
uuugaagauaaauauggagaaa

SEQ ID NO: 398703 - RNA, 22 nt, Human
gaaauauacaugaagucggcug

SEQ ID NO: 398704 - RNA, 22 nt, Human
uuaacacuaucugucauaauua

SEQ ID NO: 398705 - RNA, 22 nt, Human
auauacaggugguauguguaaa

SEQ ID NO: 398706 - RNA, 22 nt, Human
uuuccaaagcugaguugagcaa

SEQ ID NO: 398707 - RNA, 22 nt, Human
auugaaaauaaggccagaaaca

SEQ ID NO: 398708 - RNA, 22 nt, Human
agaauaauacugaaaugcugaa

SEQ ID NO: 398709 - RNA, 22 nt, Human
auacagaacaagccucaccucc

SEQ ID NO: 398710 - RNA, 21 nt, Human
accaaaaccuauacuuucugu

SEQ ID NO: 398711 - RNA, 22 nt, Human
cauuucaaggaccacccuggga

SEQ ID NO: 398712 - RNA, 22 nt, Human
ucagaacauugacauucuuauu

SEQ ID NO: 398713 - RNA, 22 nt, Human
gaaguucaaaagacagauuuga

SEQ ID NO: 398714 - RNA, 22 nt, Human
guacagaaaguacccauagaag

SEQ ID NO: 398715 - RNA, 22 nt, Human
uuuacagaugaggaaacugaga

SEQ ID NO: 398716 - RNA, 22 nt, Human
ccaugcacaccagcaggcagac

SEQ ID NO: 398717 - RNA, 22 nt, Human
uuugaagauuaugccagaguga

SEQ ID NO: 398718 - RNA, 16 nt, Human
ccuggauccccugugg

SEQ ID NO: 398719 - RNA, 22 nt, Human
uuggaucagaugauaucuuugu

SEQ ID NO: 398720 - RNA, 22 nt, Human
gagauuuaauuggauuaacuua

SEQ ID NO: 398721 - RNA, 22 nt, Human
aaaugcuuauuagugucacaaa

SEQ ID NO: 398722 - RNA, 18 nt, Human
uaaauauauuucccccuu

SEQ ID NO: 398723 - RNA, 22 nt, Human
auacaucaugcuccauauauuu

SEQ ID NO: 398724 - RNA, 22 nt, Human
uucaauacaaagaaaggaauuu

SEQ ID NO: 398725 - RNA, 22 nt, Human
agauauaauaauuuacaagugu

SEQ ID NO: 398726 - RNA, 22 nt, Human
uuauuaaugaguacaaguuauu

SEQ ID NO: 398727 - RNA, 22 nt, Human
cuggcuuuaacccuacaaaccu

SEQ ID NO: 398728 - RNA, 22 nt, Human
cuuaggcaagcagagcccaucc

SEQ ID NO: 398729 - RNA, 22 nt, Human
aauuucaaacuaauaggaacca

SEQ ID NO: 398730 - RNA, 22 nt, Human
ugcuauacauguacauauuagu

SEQ ID NO: 398731 - RNA, 22 nt, Human
ucagccaguuuguuuauuccgg

SEQ ID NO: 398732 - RNA, 22 nt, Human
caagaaucuugcagcuuagacu

SEQ ID NO: 398733 - RNA, 22 nt, Human
uuuacagagaauguacauaaag

SEQ ID NO: 398734 - RNA, 23 nt, Human
gaaucaguggcuaacaaggaaac

SEQ ID NO: 398735 - RNA, 20 nt, Human
uuuaggcauuacucuuuugu

SEQ ID NO: 398736 - RNA, 22 nt, Human
uuacagaaaggaaggacugacu

SEQ ID NO: 398737 - RNA, 22 nt, Human
aaaguguacuaugucaugaaca

SEQ ID NO: 398738 - RNA, 22 nt, Human
cuuucaacuacauacaggcgau

SEQ ID NO: 398739 - RNA, 22 nt, Human
acaguccuuguguggaacauua

SEQ ID NO: 398740 - RNA, 21 nt, Human
caagccagaccaauagcagcc

SEQ ID NO: 398741 - RNA, 22 nt, Human
ugguuuaaccugucucuuauua

SEQ ID NO: 398742 - RNA, 22 nt, Human
gauagaaagagugguucuuuuu

SEQ ID NO: 398743 - RNA, 22 nt, Human
gugcuucaaguucuuaauguuu

SEQ ID NO: 398744 - RNA, 22 nt, Human
guaaacaucagccacucuauuu

SEQ ID NO: 398745 - RNA, 22 nt, Human
uguauacauuuaacuagauaga

SEQ ID NO: 398746 - RNA, 22 nt, Human
gaauuacaugacccugaguaga

SEQ ID NO: 398747 - RNA, 18 nt, Human
caagaaucucuaaagaag

SEQ ID NO: 398748 - RNA, 22 nt, Human
uauggcuugucuuuauaccagg

SEQ ID NO: 398749 - RNA, 21 nt, Human
ucagagaacccggcaggcaag

SEQ ID NO: 398750 - RNA, 22 nt, Human
aaaaccugauugaauucuauuu

SEQ ID NO: 398751 - RNA, 22 nt, Human
cagaaaucauugugaugacagg

SEQ ID NO: 398752 - RNA, 22 nt, Human
gaugauaacagcauuucaacug

SEQ ID NO: 398753 - RNA, 22 nt, Human
aaauauagcaauuaugccuacu

SEQ ID NO: 398754 - RNA, 22 nt, Human
uuuaauauucugcauucuccuu

SEQ ID NO: 398755 - RNA, 22 nt, Human
ucuauacacacaaagaaugcuu

SEQ ID NO: 398756 - RNA, 22 nt, Human
uggcuuuauaaauccacugguu

SEQ ID NO: 398757 - RNA, 22 nt, Human
ucaguucaguauacacuauucu

SEQ ID NO: 398758 - RNA, 22 nt, Human
uaaagccauacugaaagccacu

SEQ ID NO: 398759 - RNA, 22 nt, Human
aggaucugugagugcugcagac

SEQ ID NO: 398760 - RNA, 22 nt, Human
gaagugaagguuacucuagauu

SEQ ID NO: 398761 - RNA, 22 nt, Human
aaaaccuucagguuuggaguuu

SEQ ID NO: 398762 - RNA, 22 nt, Human
gaguccuuuguuccuugccaca

SEQ ID NO: 398763 - RNA, 22 nt, Human
acuuuuaaggggccuugauuua

SEQ ID NO: 398764 - RNA, 22 nt, Human
ugcagggcccucauuccugucc

SEQ ID NO: 398765 - RNA, 22 nt, Human
ugcagagaagaggacaguucua

SEQ ID NO: 398766 - RNA, 22 nt, Human
gucacagaguuauuaauugugu

SEQ ID NO: 398767 - RNA, 22 nt, Human
ucaguuuccucaucuacaaaag

SEQ ID NO: 398768 - RNA, 22 nt, Human
cuuugaagauggcaaauuuaga

SEQ ID NO: 398769 - RNA, 23 nt, Human
augcaagaguuucucaaacugga

SEQ ID NO: 398770 - RNA, 22 nt, Human
gugaauaauuuuuuaguauaag

SEQ ID NO: 398771 - RNA, 22 nt, Human
aauacugucuuucacagauauu

SEQ ID NO: 398772 - RNA, 22 nt, Human
acaacuuuguagcaauuccacg

SEQ ID NO: 398773 - RNA, 22 nt, Human
auacagaagccuguauuucugg

SEQ ID NO: 398774 - RNA, 22 nt, Human
uaucagaaugcagccaugugca

SEQ ID NO: 398775 - RNA, 22 nt, Human
uagaauaaguugaugauauaug

SEQ ID NO: 398776 - RNA, 22 nt, Human
uuaauucuaguuuaacacuuag

SEQ ID NO: 398777 - RNA, 22 nt, Human
uaagaaucugcauuuuaacaag

SEQ ID NO: 398778 - RNA, 22 nt, Human
gaucugaaucaauagaauaacu

SEQ ID NO: 398779 - RNA, 22 nt, Human
uucuuaaucuguguggguucga

SEQ ID NO: 398780 - RNA, 22 nt, Human
cugaauaauguucucuuguaug

SEQ ID NO: 398781 - RNA, 22 nt, Human
auaaaaguucaagagaguacag

SEQ ID NO: 398782 - RNA, 22 nt, Human
uguucacaucgauggauuuugc

SEQ ID NO: 398783 - RNA, 22 nt, Human
uuacauaacgguaugaaaaaug

SEQ ID NO: 398784 - RNA, 22 nt, Human
ucauauaaguuuaaaacuaucu

SEQ ID NO: 398785 - RNA, 19 nt, Human
gaaguccucuaguaaauuu

SEQ ID NO: 398786 - RNA, 22 nt, Human
caauuucauggauaaaagaugu

SEQ ID NO: 398787 - RNA, 22 nt, Human
ucagaaaagagaaaaucuuaua

SEQ ID NO: 398788 - RNA, 22 nt, Human
uaaugcuuuuccuucaaauaag

SEQ ID NO: 398789 - RNA, 23 nt, Human
augaaugaauaaggcaggaaagc

SEQ ID NO: 398790 - RNA, 18 nt, Human
gaaagccaugcagcagug

SEQ ID NO: 398791 - RNA, 22 nt, Human
uguccuuacaaggucccuuucg

SEQ ID NO: 398792 - RNA, 22 nt, Human
uuuccaaaggaguaccacgcau

SEQ ID NO: 398793 - RNA, 19 nt, Human
ugcuuaauuccuaguaggu

SEQ ID NO: 398794 - RNA, 22 nt, Human
aguucacauaucuguuuuauuu

SEQ ID NO: 398795 - RNA, 22 nt, Human
uaauuucaaguuuagggcucua

SEQ ID NO: 398796 - RNA, 22 nt, Human
uaguccuuacuuacuagaauaa

SEQ ID NO: 398797 - RNA, 22 nt, Human
uacagacaguuuuucagauauu

SEQ ID NO: 398798 - RNA, 21 nt, Human
cuacagaaucgagcauucugg

SEQ ID NO: 398799 - RNA, 22 nt, Human
aaauugcaaaaguacuuuuagg

SEQ ID NO: 398800 - RNA, 22 nt, Human
ucaccgucgggggucgcugucu

SEQ ID NO: 398801 - RNA, 22 nt, Human
acuuugaaucucagauaaccaa

SEQ ID NO: 398802 - RNA, 22 nt, Human
cuggaagagcauuugcauaggg

SEQ ID NO: 398803 - RNA, 22 nt, Human
ggccuuuaagcaauugaaaaga

SEQ ID NO: 398804 - RNA, 22 nt, Human
uauggaaauaauuagacaagug

SEQ ID NO: 398805 - RNA, 22 nt, Human
aaauacuguagauaauagaguu

SEQ ID NO: 398806 - RNA, 22 nt, Human
uaguccuugguaaaauucuaug

SEQ ID NO: 398807 - RNA, 22 nt, Human
acuauaaccuguuagaauagau

SEQ ID NO: 398808 - RNA, 22 nt, Human
caguaaaugcagauauagauac

SEQ ID NO: 398809 - RNA, 22 nt, Human
uuuauuaugauggacaccuucg

SEQ ID NO: 398810 - RNA, 22 nt, Human
uacaggaaguaaguaaugaaau

SEQ ID NO: 398811 - RNA, 22 nt, Human
cuggaucaugggaaagggauca

SEQ ID NO: 398812 - RNA, 22 nt, Human
caaacauucaaguacaagucuu

SEQ ID NO: 398813 - RNA, 22 nt, Human
ggcauuaagaauaucauuaaaa

SEQ ID NO: 398814 - RNA, 22 nt, Human
uuuauuauguacaggcacuaua

SEQ ID NO: 398815 - RNA, 22 nt, Human
cagaaaaggaagagcuauguaa

SEQ ID NO: 398816 - RNA, 22 nt, Human
guacagaaggauuucuaguagu

SEQ ID NO: 398817 - RNA, 19 nt, Human
agauuuaccucauauaguu

SEQ ID NO: 398818 - RNA, 22 nt, Human
caauuuuuguacuuauaguacu

SEQ ID NO: 398819 - RNA, 22 nt, Human
aaaugcuuguaaauuuuccaug

SEQ ID NO: 398820 - RNA, 22 nt, Human
gauggcuuugugcaccaugauu

SEQ ID NO: 398821 - RNA, 22 nt, Human
guucuaauaggagaaaagacag

SEQ ID NO: 398822 - RNA, 22 nt, Human
cacaauuuccaagucauguuau

SEQ ID NO: 398823 - RNA, 22 nt, Human
aaucagaacuccuaccacagag

SEQ ID NO: 398824 - RNA, 22 nt, Human
auuauucaacacuugagaaauu

SEQ ID NO: 398825 - RNA, 22 nt, Human
uauuuauaccaggugaucggag

SEQ ID NO: 398826 - RNA, 22 nt, Human
uaaauacagucauuugagccau

SEQ ID NO: 398827 - RNA, 22 nt, Human
aaguccuuguauacagaaucaa

SEQ ID NO: 398828 - RNA, 22 nt, Human
uaugcccagcuuaaaguacaca

SEQ ID NO: 398829 - RNA, 22 nt, Human
caaguccaucagauaagcaaga

SEQ ID NO: 398830 - RNA, 22 nt, Human
cuuaaccagaaaaugcacuugu

SEQ ID NO: 398831 - RNA, 22 nt, Human
uuugaaguguuauuucuaucac

SEQ ID NO: 398832 - RNA, 22 nt, Human
aagaaugauuacaaagcaacga

SEQ ID NO: 398833 - RNA, 22 nt, Human
ugauuuaugcauuauacuguug

SEQ ID NO: 398834 - RNA, 22 nt, Human
auggcuuuguuccaauaaaacu

SEQ ID NO: 398835 - RNA, 22 nt, Human
uucaaagcugcagacuccuggg

SEQ ID NO: 398836 - RNA, 22 nt, Human
aguuauccgaaggcacugagau

SEQ ID NO: 398837 - RNA, 22 nt, Human
uucaccgugaaccgauuccuca

SEQ ID NO: 398838 - RNA, 22 nt, Human
uaguccuuuccggcugcuauaa

SEQ ID NO: 398839 - RNA, 22 nt, Human
uuuucuuaggugcuccaaguag

SEQ ID NO: 398840 - RNA, 22 nt, Human
aauaauauuugaagcuucaaag

SEQ ID NO: 398841 - RNA, 22 nt, Human
ugaaaagacugcaagagagcau

SEQ ID NO: 398842 - RNA, 22 nt, Human
uacaauacuuaaccuauuuugc

SEQ ID NO: 398843 - RNA, 22 nt, Human
gcauggcugguguccugaggga

SEQ ID NO: 398844 - RNA, 22 nt, Human
uugaauaauuaauuacacucag

SEQ ID NO: 398845 - RNA, 22 nt, Human
aucagaaauagucauguuacuu

SEQ ID NO: 398846 - RNA, 22 nt, Human
ucauaaaaguacucauguucau

SEQ ID NO: 398847 - RNA, 22 nt, Human
gaguccuucuggcuggcaggau

SEQ ID NO: 398848 - RNA, 22 nt, Human
cuuuacauaaggauaaaccugg

SEQ ID NO: 398849 - RNA, 20 nt, Human
acuggaucuggcuggagcug

SEQ ID NO: 398850 - RNA, 22 nt, Human
auacauaauuacuuccgauguu

SEQ ID NO: 398851 - RNA, 22 nt, Human
cuuaaagaugucaaggcuguuu

SEQ ID NO: 398852 - RNA, 22 nt, Human
cauggcuucuaagugauaacgu

SEQ ID NO: 398853 - RNA, 22 nt, Human
uuacaagauuaauuauuggagu

SEQ ID NO: 398854 - RNA, 22 nt, Human
uagaaacaucagcuaaccaaaa

SEQ ID NO: 398855 - RNA, 22 nt, Human
auuaaauguuggacguauacau

SEQ ID NO: 398856 - RNA, 22 nt, Human
gccuaauaacuagcuguguaac

SEQ ID NO: 398857 - RNA, 22 nt, Human
aucauaaaauugcaccauuucu

SEQ ID NO: 398858 - RNA, 22 nt, Human
auagacauagccguaauuuauu

SEQ ID NO: 398859 - RNA, 22 nt, Human
agucaccaggguuugcuggguu

SEQ ID NO: 398860 - RNA, 22 nt, Human
gcaaacaaggacauacauccug

SEQ ID NO: 398861 - RNA, 22 nt, Human
agaaaaacuaagaguggguggu

SEQ ID NO: 398862 - RNA, 22 nt, Human
ccuucaaucuuaagucagccca

SEQ ID NO: 398863 - RNA, 21 nt, Human
acaugucuggucauuuuuagc

SEQ ID NO: 398864 - RNA, 22 nt, Human
acuauacauugaauguuaaggu

SEQ ID NO: 398865 - RNA, 22 nt, Human
caaaagucuguccuuuaacuuc

SEQ ID NO: 398866 - RNA, 22 nt, Human
augacaaaagaagacaugaggu

SEQ ID NO: 398867 - RNA, 22 nt, Human
cugauacauaguagcaugucau

SEQ ID NO: 398868 - RNA, 22 nt, Human
acuuauuagcugugugaccuug

SEQ ID NO: 398869 - RNA, 22 nt, Human
agaaagcaucuccauuguaggu

SEQ ID NO: 398870 - RNA, 22 nt, Human
ucauaauacaaagaguucugca

SEQ ID NO: 398871 - RNA, 22 nt, Human
ucagaauucuacaauagaucag

SEQ ID NO: 398872 - RNA, 22 nt, Human
aaugcaaagcaagcagagauuu

SEQ ID NO: 398873 - RNA, 22 nt, Human
ucaauacuuaagcuuaauucua

SEQ ID NO: 398874 - RNA, 22 nt, Human
ugcuuaaacacauacauacaua

SEQ ID NO: 398875 - RNA, 22 nt, Human
acagcauugagagcuaaauuua

SEQ ID NO: 398876 - RNA, 22 nt, Human
aaagucaucauuucuuuucaaa

SEQ ID NO: 398877 - RNA, 22 nt, Human
uauacaauggcugaaucaucca

SEQ ID NO: 398878 - RNA, 22 nt, Human
uagauauaucugucauacuggu

SEQ ID NO: 398879 - RNA, 22 nt, Human
aaaucaguuaagaugaggccau

SEQ ID NO: 398880 - RNA, 22 nt, Human
aggauuuauuauaugcccucau

SEQ ID NO: 398881 - RNA, 22 nt, Human
caauuuuuuccaugcucuuaca

SEQ ID NO: 398882 - RNA, 22 nt, Human
gauuucaaagguucugcaugcc

SEQ ID NO: 398883 - RNA, 20 nt, Human
guaaaauauggucuuugggu

SEQ ID NO: 398884 - RNA, 22 nt, Human
gaauaaucaugaaauucaguga

SEQ ID NO: 398885 - RNA, 22 nt, Human
acuagaaacuaauggauuauua

SEQ ID NO: 398886 - RNA, 22 nt, Human
ugcuuaauagugcacugguuuc

SEQ ID NO: 398887 - RNA, 22 nt, Human
uguccuuaaggagcuuaauguc

SEQ ID NO: 398888 - RNA, 22 nt, Human
aaucagaauuuauugaaucuuu

SEQ ID NO: 398889 - RNA, 22 nt, Human
uaaagacacugguuuuaaucau

SEQ ID NO: 398890 - RNA, 22 nt, Human
uuaaaauuauggcccauuugga

SEQ ID NO: 398891 - RNA, 20 nt, Human
uauggcuuggcaaagcuuca

SEQ ID NO: 398892 - RNA, 22 nt, Human
cucauacauaugccauuccugc

SEQ ID NO: 398893 - RNA, 22 nt, Human
uaaguccuauuccaggucucuc

SEQ ID NO: 398894 - RNA, 22 nt, Human
gcaacuuucaagcaccaugggg

SEQ ID NO: 398895 - RNA, 22 nt, Human
uuugaagacagaucaauauaag

SEQ ID NO: 398896 - RNA, 21 nt, Human
aaagaaucauggguaauuuca

SEQ ID NO: 398897 - RNA, 22 nt, Human
uaaacagaaugcguaagaagug

SEQ ID NO: 398898 - RNA, 22 nt, Human
uuuauacauggagaauuuuugc

SEQ ID NO: 398899 - RNA, 21 nt, Human
uaucagaagagaaagaaugau

SEQ ID NO: 398900 - RNA, 22 nt, Human
aauauaaugcuguuuuaugcca

SEQ ID NO: 398901 - RNA, 22 nt, Human
auggcuuugcucaaguuuagcc

SEQ ID NO: 398902 - RNA, 21 nt, Human
caaucaguuggcauuugagca

SEQ ID NO: 398903 - RNA, 22 nt, Human
augguuuaagggagaauauuga

SEQ ID NO: 398904 - RNA, 22 nt, Human
ugugugaaggaauauauacuca

SEQ ID NO: 398905 - RNA, 22 nt, Human
agaauaaucacugaaguucaaa

SEQ ID NO: 398906 - RNA, 22 nt, Human
ccuggaucuaaggaagcuggga

SEQ ID NO: 398907 - RNA, 22 nt, Human
agguacaaaagaguauaugaga

SEQ ID NO: 398908 - RNA, 22 nt, Human
uuucaacuuguuugcuuccaua

SEQ ID NO: 398909 - RNA, 22 nt, Human
uauuaaagggaaguuaugcaug

SEQ ID NO: 398910 - RNA, 22 nt, Human
gaauuucaacaguccucaaaug

SEQ ID NO: 398911 - RNA, 22 nt, Human
aguuaucagguguuuucaugga

SEQ ID NO: 398912 - RNA, 22 nt, Human
cuuaggcagggcuggaagaucu

SEQ ID NO: 398913 - RNA, 17 nt, Human
uaaagccagucaaguca

SEQ ID NO: 398914 - RNA, 22 nt, Human
guuaggcagugugguauagcag

SEQ ID NO: 398915 - RNA, 21 nt, Human
gauuugcagaaacuagacagg

SEQ ID NO: 398916 - RNA, 22 nt, Human
agcucacaguguccuuccucaa

SEQ ID NO: 398917 - RNA, 22 nt, Human
gguacaaugguucauuuuaugu

SEQ ID NO: 398918 - RNA, 22 nt, Human
guuuaaucagaggaauuauaga

SEQ ID NO: 398919 - RNA, 22 nt, Human
uuuaggcagaacauggacuuug

SEQ ID NO: 398920 - RNA, 22 nt, Human
uggauuagguacuaugaauaua

SEQ ID NO: 398921 - RNA, 22 nt, Human
uuucaguuagcugagacccagg

SEQ ID NO: 398922 - RNA, 22 nt, Human
gugaauaauauuguuuauaaaa

SEQ ID NO: 398923 - RNA, 21 nt, Human
uucaaagacuugaugcugacc

SEQ ID NO: 398924 - RNA, 22 nt, Human
acaugcuuguuuuucacaaccu

SEQ ID NO: 398925 - RNA, 22 nt, Human
gauaaaauauguggccuuuagu

SEQ ID NO: 398926 - RNA, 22 nt, Human
ugcagagaaaccaguggaggac

SEQ ID NO: 398927 - RNA, 22 nt, Human
gcaacuuuagaaaaaucuauaa

SEQ ID NO: 398928 - RNA, 22 nt, Human
cauuuacaauguacagguugug

SEQ ID NO: 398929 - RNA, 22 nt, Human
agucaccaucuguggcagccug

SEQ ID NO: 398930 - RNA, 22 nt, Human
cuggcuuucuauuuggugcuau

SEQ ID NO: 398931 - RNA, 22 nt, Human
cauuucaaaagaauugccagaa

SEQ ID NO: 398932 - RNA, 22 nt, Human
aaucagaaaauucaguggaauu

SEQ ID NO: 398933 - RNA, 22 nt, Human
uuagacaagggcuccuuaaaag

SEQ ID NO: 398934 - RNA, 22 nt, Human
cauggcuuuguucuguuagaug

SEQ ID NO: 398935 - RNA, 22 nt, Human
caauauauaggaacaacuuagg

SEQ ID NO: 398936 - RNA, 22 nt, Human
ccagauuugagcgucuuaaacc

SEQ ID NO: 398937 - RNA, 22 nt, Human
cuuaauuuaaaauaguucaggc

SEQ ID NO: 398938 - RNA, 22 nt, Human
auacagaagaccccuccgucau

SEQ ID NO: 398939 - RNA, 22 nt, Human
gcuuuaaugaagucacgcaaag

SEQ ID NO: 398940 - RNA, 22 nt, Human
gaaaaaggauaaauacaguguu

SEQ ID NO: 398941 - RNA, 22 nt, Human
gccuuaauuuuuuauaaucucu

SEQ ID NO: 398942 - RNA, 22 nt, Human
ggcaccagccaccuauuucuag

SEQ ID NO: 398943 - RNA, 22 nt, Human
gcuggaucccugugggaguggu

SEQ ID NO: 398944 - RNA, 20 nt, Human
uggccuuuaaauaguauucc

SEQ ID NO: 398945 - RNA, 22 nt, Human
auuucacaucuaucucagauuu

SEQ ID NO: 398946 - RNA, 22 nt, Human
auuccaaagacagaagcagcug

SEQ ID NO: 398947 - RNA, 22 nt, Human
caaguccucugguuucaaauag

SEQ ID NO: 398948 - RNA, 22 nt, Human
uucauagaucucaauuuugagg

SEQ ID NO: 398949 - RNA, 22 nt, Human
ucaguuucacagucugugcaga

SEQ ID NO: 398950 - RNA, 22 nt, Human
cuuuacagaauaagaauacugg

SEQ ID NO: 398951 - RNA, 22 nt, Human
caguccuucauuccuccuuuga

SEQ ID NO: 398952 - RNA, 22 nt, Human
auuaaagaaacccagcauguga

SEQ ID NO: 398953 - RNA, 22 nt, Human
cagucaccaccagguggcagua

SEQ ID NO: 398954 - RNA, 22 nt, Human
uucacagauuucccugcacaug

SEQ ID NO: 398955 - RNA, 22 nt, Human
acagaauuuaaagcucuagacu

SEQ ID NO: 398956 - RNA, 22 nt, Human
aauucacaaaaguuagauccau

SEQ ID NO: 398957 - RNA, 22 nt, Human
uuuauccaguguuggaauuuuu

SEQ ID NO: 398958 - RNA, 22 nt, Human
aaaucucaauuugaauuguagc

SEQ ID NO: 398959 - RNA, 22 nt, Human
uugaauaauguguauguuguua

SEQ ID NO: 398960 - RNA, 22 nt, Human
aaguguuaaagacuugaacacu

SEQ ID NO: 398961 - RNA, 22 nt, Human
ugucaccaaguugaugaaugca

SEQ ID NO: 398962 - RNA, 22 nt, Human
uaugaaauuuaaacacagauca

SEQ ID NO: 398963 - RNA, 22 nt, Human
gaguccuugucauaauucagug

SEQ ID NO: 398964 - RNA, 22 nt, Human
uuugaagucaaagauugauucc

SEQ ID NO: 398965 - RNA, 18 nt, Human
caauuucauccuuaagcc

SEQ ID NO: 398966 - RNA, 22 nt, Human
uucauacuaaaguguaagaugu

SEQ ID NO: 398967 - RNA, 22 nt, Human
caguccuuggcaaguucucagu

SEQ ID NO: 398968 - RNA, 22 nt, Human
gaguccuuccagcaggcauuua

SEQ ID NO: 398969 - RNA, 22 nt, Human
acuauacaccaaaauauuaagg

SEQ ID NO: 398970 - RNA, 22 nt, Human
aaaacaguuuaggcaucacagu

SEQ ID NO: 398971 - RNA, 22 nt, Human
agcauaaaggcacuagaaagag

SEQ ID NO: 398972 - RNA, 22 nt, Human
uuuuaagaugcuaguauuucag

SEQ ID NO: 398973 - RNA, 22 nt, Human
guagaaaugguguguuucuucu

SEQ ID NO: 398974 - RNA, 22 nt, Human
gucaacuuuaagaugaucuuuu

SEQ ID NO: 398975 - RNA, 22 nt, Human
auaacagauacucucugugagg

SEQ ID NO: 398976 - RNA, 22 nt, Human
auaaaacuuggguaugaucccu

SEQ ID NO: 398977 - RNA, 22 nt, Human
aauaagauccugaagauauguu

SEQ ID NO: 398978 - RNA, 22 nt, Human
cagauacuguaaaauuucagua

SEQ ID NO: 398979 - RNA, 22 nt, Human
ugaaacaagauccacagacuug

SEQ ID NO: 398980 - RNA, 22 nt, Human
uuaauucugccuuucauguaac

SEQ ID NO: 398981 - RNA, 22 nt, Human
ucauaaaaauagacucuaaagu

SEQ ID NO: 398982 - RNA, 22 nt, Human
caaagucagcugccagucccaa

SEQ ID NO: 398983 - RNA, 23 nt, Human
uauuacaauuggucuuauuaaga

SEQ ID NO: 398984 - RNA, 22 nt, Human
augcuuaauacacuguuaaagg

SEQ ID NO: 398985 - RNA, 22 nt, Human
aaaucaguuguuauauuaaaga

SEQ ID NO: 398986 - RNA, 22 nt, Human
uguuuaauaauucuaugauagu

SEQ ID NO: 398987 - RNA, 22 nt, Human
uagcagaagaacaacaugaucu

SEQ ID NO: 398988 - RNA, 22 nt, Human
ugucaccagcugcuccucagga

SEQ ID NO: 398989 - RNA, 22 nt, Human
uuacagaaugugccauuugguc

SEQ ID NO: 398990 - RNA, 22 nt, Human
auucucaaaacauaacuucacu

SEQ ID NO: 398991 - RNA, 22 nt, Human
uuacagaagugaaggccuuuaa

SEQ ID NO: 398992 - RNA, 22 nt, Human
uuuaaugaauaauucaaaucug

SEQ ID NO: 398993 - RNA, 22 nt, Human
ugaagaauaagauagauggagc

SEQ ID NO: 398994 - RNA, 22 nt, Human
ucaaaauuagugaccaaaggca

SEQ ID NO: 398995 - RNA, 22 nt, Human
gaauuucagagguaacaucauc

SEQ ID NO: 398996 - RNA, 22 nt, Human
ccuggaucuuucugacugacaa

SEQ ID NO: 398997 - RNA, 22 nt, Human
gaaacaacuacuauugauuucu

SEQ ID NO: 398998 - RNA, 19 nt, Human
uacauacuuauucuaaaag

SEQ ID NO: 398999 - RNA, 22 nt, Human
acuuugaaagccuuggccccgg

SEQ ID NO: 399000 - RNA, 22 nt, Human
aauacugagaucccacaaagca

SEQ ID NO: 399001 - RNA, 22 nt, Human
aaugugauuagccucuacugga

SEQ ID NO: 399002 - RNA, 23 nt, Human
aaaugacauaugguuucugaagg

SEQ ID NO: 399003 - RNA, 22 nt, Human
guucuaauuuggggcuccuuag

SEQ ID NO: 399004 - RNA, 22 nt, Human
gcacaauaacagccaagguuau

SEQ ID NO: 399005 - RNA, 22 nt, Human
acuagaaauuacucagaauaaa

SEQ ID NO: 399006 - RNA, 22 nt, Human
uucagaaagguaaauggauuuc

SEQ ID NO: 399007 - RNA, 19 nt, Human
ugcugaaguugucagucug

SEQ ID NO: 399008 - RNA, 22 nt, Human
cuucuuaaauuggauugcuauu

SEQ ID NO: 399009 - RNA, 22 nt, Human
cuuaggcagacugcugaugcag

SEQ ID NO: 399010 - RNA, 22 nt, Human
uuuuuugucuugaagaaauggu

SEQ ID NO: 399011 - RNA, 22 nt, Human
guuauaaaaugcacaguuguuu

SEQ ID NO: 399012 - RNA, 22 nt, Human
uuuauucuugagagugagaaga

SEQ ID NO: 399013 - RNA, 22 nt, Human
gaauauauuggugaaaauaguu

SEQ ID NO: 399014 - RNA, 22 nt, Human
uguacaaugcugagguuugggg

SEQ ID NO: 399015 - RNA, 22 nt, Human
acagcauucaauaaauaauaac

SEQ ID NO: 399016 - RNA, 22 nt, Human
uagaaacagauguuuuugaaga

SEQ ID NO: 399017 - RNA, 22 nt, Human
aauaacagauuuucaagcugug

SEQ ID NO: 399018 - RNA, 22 nt, Human
agagaugaacauaaaacaagga

SEQ ID NO: 399019 - RNA, 22 nt, Human
auggcuuaagaaugcuuuugug

SEQ ID NO: 399020 - RNA, 22 nt, Human
uggcauuucaguauuuucauaa

SEQ ID NO: 399021 - RNA, 22 nt, Human
cagaaaauaaaguuucuacgca

SEQ ID NO: 399022 - RNA, 22 nt, Human
aaagcaauggaugagaaucugu

SEQ ID NO: 399023 - RNA, 22 nt, Human
aguccuuacaccuggaaccuau

SEQ ID NO: 399024 - RNA, 22 nt, Human
uucuuaaucccacaaaucuuca

SEQ ID NO: 399025 - RNA, 22 nt, Human
cuauuauuuccucaucuauaaa

SEQ ID NO: 399026 - RNA, 22 nt, Human
ucuuuaauguacuuucuuucac

SEQ ID NO: 399027 - RNA, 22 nt, Human
agauuuacugagaacugauuac

SEQ ID NO: 399028 - RNA, 22 nt, Human
acaucagauuaugcuuugcuua

SEQ ID NO: 399029 - RNA, 22 nt, Human
aaauuccagaaacucaguauau

SEQ ID NO: 399030 - RNA, 22 nt, Human
ccaaagcaagucacaugaucaa

SEQ ID NO: 399031 - RNA, 22 nt, Human
gaaguccucaaugcauugucuu

SEQ ID NO: 399032 - RNA, 22 nt, Human
caagucauuacugaaaugucac

SEQ ID NO: 399033 - RNA, 22 nt, Human
uaucugagaaagaagcaccaga

SEQ ID NO: 399034 - RNA, 22 nt, Human
uauauguaagcuauguaagagu

SEQ ID NO: 399035 - RNA, 22 nt, Human
ugcuuuaaauaugaauuagcau

SEQ ID NO: 399036 - RNA, 22 nt, Human
uuaauauguugaaauuuauuag

SEQ ID NO: 399037 - RNA, 22 nt, Human
agccauucauugugcucucaga

SEQ ID NO: 399038 - RNA, 22 nt, Human
aauauaugagggagcuauuuga

SEQ ID NO: 399039 - RNA, 22 nt, Human
uaugaaagaaucucagagcaca

SEQ ID NO: 399040 - RNA, 22 nt, Human
aacauguaaauaucauuguacu

SEQ ID NO: 399041 - RNA, 23 nt, Human
ucaucaaacagcugcucaagaaa

SEQ ID NO: 399042 - RNA, 22 nt, Human
ucauaaagcauuucagcuuuug

SEQ ID NO: 399043 - RNA, 22 nt, Human
cauuucaauacaguuuguaaau

SEQ ID NO: 399044 - RNA, 22 nt, Human
ccagaauuuggaucaugauuuu

SEQ ID NO: 399045 - RNA, 22 nt, Human
ugaauaauuccuuuuugucaag

SEQ ID NO: 399046 - RNA, 22 nt, Human
guuucacagaugguguucauau

SEQ ID NO: 399047 - RNA, 22 nt, Human
aaugccuucaaguaucugagga

SEQ ID NO: 399048 - RNA, 22 nt, Human
uacacaugaucauuuaguagca

SEQ ID NO: 399049 - RNA, 22 nt, Human
uugguccacugugaaauuggga

SEQ ID NO: 399050 - RNA, 22 nt, Human
uaauacuuuugccuuguauuca

SEQ ID NO: 399051 - RNA, 22 nt, Human
cguauacaugaagacauugcug

SEQ ID NO: 399052 - RNA, 20 nt, Human
uuccuuaggcauuggaagaa

SEQ ID NO: 399053 - RNA, 22 nt, Human
cuuugaauuccaguacaauaac

SEQ ID NO: 399054 - RNA, 22 nt, Human
auuuaguuuaggaaaaguaggu

SEQ ID NO: 399055 - RNA, 22 nt, Human
caacuuuaugauugguuuguca

SEQ ID NO: 399056 - RNA, 22 nt, Human
uucagaaacagagugagugagu

SEQ ID NO: 399057 - RNA, 22 nt, Human
aaaguccagagggcacacugaa

SEQ ID NO: 399058 - RNA, 22 nt, Human
acagcauugcuccaucucaaga

SEQ ID NO: 399059 - RNA, 22 nt, Human
cagaauaaaagucccaaggcau

SEQ ID NO: 399060 - RNA, 22 nt, Human
uguacaauagcuauuaucucca

SEQ ID NO: 399061 - RNA, 22 nt, Human
uuuccaaaggaggaaccaguuu

SEQ ID NO: 399062 - RNA, 22 nt, Human
acaaagaucuugcuuuccuacu

SEQ ID NO: 399063 - RNA, 20 nt, Human
uacagaaugcaauaaaaugg

SEQ ID NO: 399064 - RNA, 22 nt, Human
ccuggaucagucacuguugcug

SEQ ID NO: 399065 - RNA, 22 nt, Human
guccuuaguuacuuuucauguc

SEQ ID NO: 399066 - RNA, 22 nt, Human
agagaauuggagcagugacagg

SEQ ID NO: 399067 - RNA, 22 nt, Human
uggcauuucuggccauuugugu

SEQ ID NO: 399068 - RNA, 22 nt, Human
uuacagaaaagggcuuuaagag

SEQ ID NO: 399069 - RNA, 22 nt, Human
caauacaauuaccaguuaauca

SEQ ID NO: 399070 - RNA, 22 nt, Human
uuucauaauacuguacaugaaa

SEQ ID NO: 399071 - RNA, 22 nt, Human
acauaaguuauggauaaaaugu

SEQ ID NO: 399072 - RNA, 18 nt, Human
auuguuaauagaguacuu

SEQ ID NO: 399073 - RNA, 22 nt, Human
gaucagaauuuacuuauaauug

SEQ ID NO: 399074 - RNA, 22 nt, Human
ucagaauaugcuaaugacauuu

SEQ ID NO: 399075 - RNA, 21 nt, Human
aaaguguucagaccaguucug

SEQ ID NO: 399076 - RNA, 22 nt, Human
aaguccaugaucaagauguggc

SEQ ID NO: 399077 - RNA, 22 nt, Human
acauucacgcucucaaagcuga

SEQ ID NO: 399078 - RNA, 22 nt, Human
aaaggcauuuuaauucuaaaga

SEQ ID NO: 399079 - RNA, 22 nt, Human
gaaagaggaaggagauguauua

SEQ ID NO: 399080 - RNA, 21 nt, Human
aggauuuacuauuaacugugu

SEQ ID NO: 399081 - RNA, 22 nt, Human
auuuagcaaaaaaugaugaagc

SEQ ID NO: 399082 - RNA, 22 nt, Human
gauaaugaugacaaugacaacc

SEQ ID NO: 399083 - RNA, 17 nt, Human
ugcuuaauuuugacugg

SEQ ID NO: 399084 - RNA, 20 nt, Human
ucuaauuaaaauugucuagu

SEQ ID NO: 399085 - RNA, 22 nt, Human
aaugucuuuaaagugcaauaga

SEQ ID NO: 399086 - RNA, 22 nt, Human
agaugaaaagauaagcagcaau

SEQ ID NO: 399087 - RNA, 23 nt, Human
guaaaauacgcagugcaguguga

SEQ ID NO: 399088 - RNA, 22 nt, Human
caacuuucuguuaaauguuagu

SEQ ID NO: 399089 - RNA, 22 nt, Human
aaagucaucagaaccuuccaga

SEQ ID NO: 399090 - RNA, 22 nt, Human
gauuuacagaucuaagggucac

SEQ ID NO: 399091 - RNA, 22 nt, Human
uauacagaacugcacgugcacg

SEQ ID NO: 399092 - RNA, 22 nt, Human
auccauuugaaagaacagucca

SEQ ID NO: 399093 - RNA, 18 nt, Human
cuggcuuucuuauccauc

SEQ ID NO: 399094 - RNA, 22 nt, Human
aagcauuugguucugaagacuc

SEQ ID NO: 399095 - RNA, 22 nt, Human
gaucugaagagcaaugaaauau

SEQ ID NO: 399096 - RNA, 22 nt, Human
ugucaccacuggcugaaacacc

SEQ ID NO: 399097 - RNA, 22 nt, Human
uauacaaugaguacauucuggg

SEQ ID NO: 399098 - RNA, 22 nt, Human
auauuuaaacaggguaccaaua

SEQ ID NO: 399099 - RNA, 21 nt, Human
agaauucuuaaguauucuaau

SEQ ID NO: 399100 - RNA, 22 nt, Human
acuggaucagaaucugauuuuu

SEQ ID NO: 399101 - RNA, 22 nt, Human
uuacagaaaagggguuguccuu

SEQ ID NO: 399102 - RNA, 22 nt, Human
uuuacagaugaggauacugagg

SEQ ID NO: 399103 - RNA, 22 nt, Human
aaaaauugcugagaacggaauu

SEQ ID NO: 399104 - RNA, 22 nt, Human
gaauuucagaucagagaccauu

SEQ ID NO: 399105 - RNA, 19 nt, Human
caguccuuuccgcuuucuc

SEQ ID NO: 399106 - RNA, 22 nt, Human
uugguacagaugagguauucuc

SEQ ID NO: 399107 - RNA, 22 nt, Human
gaagaaucaagcaguaauuugu

SEQ ID NO: 399108 - RNA, 19 nt, Human
cauguuaugcuguaguauc

SEQ ID NO: 399109 - RNA, 21 nt, Human
uguccuuaaugcaauguccuu

SEQ ID NO: 399110 - RNA, 22 nt, Human
cucuaacaccacagugugguuu

SEQ ID NO: 399111 - RNA, 22 nt, Human
ucaaaauucuagggagaauggu

SEQ ID NO: 399112 - RNA, 22 nt, Human
auggcuuaugaauaacaguagg

SEQ ID NO: 399113 - RNA, 22 nt, Human
uuccuuagugccucuuccgcug

SEQ ID NO: 399114 - RNA, 22 nt, Human
aaguuacacauuuucauuguaa

SEQ ID NO: 399115 - RNA, 22 nt, Human
uucaauucaauucuaaauauau

SEQ ID NO: 399116 - RNA, 22 nt, Human
caugguuuugagccuauuaugc

SEQ ID NO: 399117 - RNA, 22 nt, Human
ucugaagauuaccagcuaaaug

SEQ ID NO: 399118 - RNA, 22 nt, Human
ggagaaugauauauagcucagu

SEQ ID NO: 399119 - RNA, 22 nt, Human
aucuaaaaggagcucuuuaucu

SEQ ID NO: 399120 - RNA, 22 nt, Human
uucagaaaugaauauugguauu

SEQ ID NO: 399121 - RNA, 23 nt, Human
agaauuccaguuucuuaugucac

SEQ ID NO: 399122 - RNA, 22 nt, Human
gucauuucuguuucuucagugc

SEQ ID NO: 399123 - RNA, 23 nt, Human
ccaaagucgaagucuaguccaga

SEQ ID NO: 399124 - RNA, 21 nt, Human
cuacagaagcucuccuaucca

SEQ ID NO: 399125 - RNA, 22 nt, Human
uuccuuagaguuuccagaaagc

SEQ ID NO: 399126 - RNA, 22 nt, Human
uuccuuagacagagguggucau

SEQ ID NO: 399127 - RNA, 21 nt, Human
uucaauacuauuucaauaguc

SEQ ID NO: 399128 - RNA, 22 nt, Human
uguucacaagaugucuguggcu

SEQ ID NO: 399129 - RNA, 22 nt, Human
ugcaacuuguuuggagagaaag

SEQ ID NO: 399130 - RNA, 22 nt, Human
aaagccauugaacuguacuuua

SEQ ID NO: 399131 - RNA, 22 nt, Human
ccauggcuuuugagucucaaga

SEQ ID NO: 399132 - RNA, 22 nt, Human
caagaaucagaccugucagggu

SEQ ID NO: 399133 - RNA, 22 nt, Human
gcacaauaauuuuuuuaagagg

SEQ ID NO: 399134 - RNA, 22 nt, Human
aaaauccugcugacucgagaug

SEQ ID NO: 399135 - RNA, 22 nt, Human
ugguuuaauuuccauuuccuug

SEQ ID NO: 399136 - RNA, 22 nt, Human
ugcuuaauacguauuugcugga

SEQ ID NO: 399137 - RNA, 22 nt, Human
aauguuuuaaaagagauugaga

SEQ ID NO: 399138 - RNA, 22 nt, Human
agucauaaagccagugggaggc

SEQ ID NO: 399139 - RNA, 22 nt, Human
gauaauaagcacagcaggaugu

SEQ ID NO: 399140 - RNA, 23 nt, Human
cauaaaauauuaguaugguagca

SEQ ID NO: 399141 - RNA, 22 nt, Human
cuuuacauccuguuucccguuu

SEQ ID NO: 399142 - RNA, 22 nt, Human
ggaucugagagcaagcaggacc

SEQ ID NO: 399143 - RNA, 22 nt, Human
uuuauccauaucauuaaaaucu

SEQ ID NO: 399144 - RNA, 22 nt, Human
ugcaggaaaacaccuaucaccc

SEQ ID NO: 399145 - RNA, 22 nt, Human
cuuaaagaaauugaggagagga

SEQ ID NO: 399146 - RNA, 22 nt, Human
aaagaaucacauccuucagcaa

SEQ ID NO: 399147 - RNA, 20 nt, Human
aacacacugguggcaucagg

SEQ ID NO: 399148 - RNA, 22 nt, Human
cagaauguagaucaucaucaag

SEQ ID NO: 399149 - RNA, 22 nt, Human
acaagccaauuacugugccagg

SEQ ID NO: 399150 - RNA, 22 nt, Human
uuauagugggcccaacauggcg

SEQ ID NO: 399151 - RNA, 22 nt, Human
agccaacuaggagauuaaggua

SEQ ID NO: 399152 - RNA, 22 nt, Human
augugaaaaauuucuuauuaca

SEQ ID NO: 399153 - RNA, 22 nt, Human
aaaguccuuuuugccaugcaag

SEQ ID NO: 399154 - RNA, 22 nt, Human
gugaauaaagggaguuuucaaa

SEQ ID NO: 399155 - RNA, 22 nt, Human
agaucugaggguccaagggagg

SEQ ID NO: 399156 - RNA, 22 nt, Human
cagaauaaagguacaauugagu

SEQ ID NO: 399157 - RNA, 22 nt, Human
auuuaguguauucuaauaugug

SEQ ID NO: 399158 - RNA, 22 nt, Human
aaauugaaugauuaagugguga

SEQ ID NO: 399159 - RNA, 22 nt, Human
aauuccaggcagaaaugugagu

SEQ ID NO: 399160 - RNA, 22 nt, Human
cuguuaauugugaauuuuacau

SEQ ID NO: 399161 - RNA, 22 nt, Human
uuauauuaguuagacuugcugu

SEQ ID NO: 399162 - RNA, 22 nt, Human
uucaaguuuugccuccccaucc

SEQ ID NO: 399163 - RNA, 22 nt, Human
aaaucauguuggcacaauaaaa

SEQ ID NO: 399164 - RNA, 22 nt, Human
uaagaaucuauuaggaauaugu

SEQ ID NO: 399165 - RNA, 22 nt, Human
uaaauaucaccuggaauuguua

SEQ ID NO: 399166 - RNA, 22 nt, Human
uggguuuaaacucaacucuaaa

SEQ ID NO: 399167 - RNA, 22 nt, Human
uacauauacugagugauuugcu

SEQ ID NO: 399168 - RNA, 16 nt, Human
gcaacuuugggguuga

SEQ ID NO: 399169 - RNA, 22 nt, Human
caauuucaagauucuguucuuu

SEQ ID NO: 399170 - RNA, 22 nt, Human
aauuccaaauguuuucaaucca

SEQ ID NO: 399171 - RNA, 22 nt, Human
aguguucauuuauucauucacu

SEQ ID NO: 399172 - RNA, 22 nt, Human
cagucaccugaagacuugacca

SEQ ID NO: 399173 - RNA, 22 nt, Human
aguguuagauucuuacucaguu

SEQ ID NO: 399174 - RNA, 22 nt, Human
ucuauaaagggccagauaguag

SEQ ID NO: 399175 - RNA, 22 nt, Human
uuaauuaugcaaaaggccccau

SEQ ID NO: 399176 - RNA, 22 nt, Human
ccaaaauuauuacauuuguagg

SEQ ID NO: 399177 - RNA, 22 nt, Human
agaauuccuccucugggacacu

SEQ ID NO: 399178 - RNA, 22 nt, Human
auuaaagacagcagauggaugg

SEQ ID NO: 399179 - RNA, 22 nt, Human
aauuuacaggugcacucgccau

SEQ ID NO: 399180 - RNA, 22 nt, Human
uuccuuagcugucccuggaaau

SEQ ID NO: 399181 - RNA, 21 nt, Human
auacagaaggcagacucucuc

SEQ ID NO: 399182 - RNA, 22 nt, Human
uacuuugaagacaauaucugga

SEQ ID NO: 399183 - RNA, 22 nt, Human
auuauaaauauuuucuaggggu

SEQ ID NO: 399184 - RNA, 22 nt, Human
auuaggcauucugaaugagguc

SEQ ID NO: 399185 - RNA, 22 nt, Human
auuauccagcaccaaugucaga

SEQ ID NO: 399186 - RNA, 22 nt, Human
ugcacaaacuugugucccaggg

SEQ ID NO: 399187 - RNA, 22 nt, Human
uuugaauaaucacugggcauua

SEQ ID NO: 399188 - RNA, 23 nt, Human
uuccacaaugaaaauaaagcagg

SEQ ID NO: 399189 - RNA, 22 nt, Human
auuuagaagcuaauuuuucaga

SEQ ID NO: 399190 - RNA, 22 nt, Human
uaaaugauuuauguaugugaaa

SEQ ID NO: 399191 - RNA, 22 nt, Human
gcagagacuaguagugcagacu

SEQ ID NO: 399192 - RNA, 22 nt, Human
aaagcaguauauugguaguugu

SEQ ID NO: 399193 - RNA, 22 nt, Human
cuggcuuucuguuauaaagaca

SEQ ID NO: 399194 - RNA, 22 nt, Human
ucucuuaauuuuggaauagugu

SEQ ID NO: 399195 - RNA, 22 nt, Human
cuuugaauugccguuucaucug

SEQ ID NO: 399196 - RNA, 22 nt, Human
uugauuaaucccaugugaguag

SEQ ID NO: 399197 - RNA, 22 nt, Human
ugauuauauucuaacuucauaa

SEQ ID NO: 399198 - RNA, 22 nt, Human
agauuuccuaugguaauuauag

SEQ ID NO: 399199 - RNA, 22 nt, Human
gcaggaaagguugagacuuugc

SEQ ID NO: 399200 - RNA, 22 nt, Human
ugcagucuccaccuccugggug

SEQ ID NO: 399201 - RNA, 22 nt, Human
auaacaugaccugugcuucaca

SEQ ID NO: 399202 - RNA, 22 nt, Human
gcuggaucauauggugguucua

SEQ ID NO: 399203 - RNA, 22 nt, Human
ucagccagaggcuucuugguuu

SEQ ID NO: 399204 - RNA, 22 nt, Human
auuccaaacuuaccccagagga

SEQ ID NO: 399205 - RNA, 22 nt, Human
aagcagggcuuuaagcgguuuu

SEQ ID NO: 399206 - RNA, 22 nt, Human
gucaaacauagggacuuugugg

SEQ ID NO: 399207 - RNA, 22 nt, Human
gauaaaauucuuauuuuacccg

SEQ ID NO: 399208 - RNA, 22 nt, Human
augaacaauaaaauagaucaca

SEQ ID NO: 399209 - RNA, 22 nt, Human
cauguauaguuggaacuacauc

SEQ ID NO: 399210 - RNA, 22 nt, Human
uagauauaagguccuuagaaca

SEQ ID NO: 399211 - RNA, 22 nt, Human
aguccuuagaacacuguaucug

SEQ ID NO: 399212 - RNA, 22 nt, Human
ugucaccacauuugucaauauc

SEQ ID NO: 399213 - RNA, 22 nt, Human
aaucagucucauuuagcaggga

SEQ ID NO: 399214 - RNA, 22 nt, Human
uacugaaauacuaagaaguuaa

SEQ ID NO: 399215 - RNA, 22 nt, Human
auuucaacagaguuugaaggca

SEQ ID NO: 399216 - RNA, 22 nt, Human
aaugugaucgcuuuagaagcuu

SEQ ID NO: 399217 - RNA, 22 nt, Human
uacugugacagaguacuuaaac

SEQ ID NO: 399218 - RNA, 22 nt, Human
uugguacaaugugcuagguagg

SEQ ID NO: 399219 - RNA, 22 nt, Human
ucacagaagaugcuggauguug

SEQ ID NO: 399220 - RNA, 22 nt, Human
aaaugucagaggaacauauuga

SEQ ID NO: 399221 - RNA, 22 nt, Human
aaaucucacuguagucaaagug

SEQ ID NO: 399222 - RNA, 22 nt, Human
uaucagaaaucaacacacagug

SEQ ID NO: 399223 - RNA, 23 nt, Human
uauggcuuacagugcuuuaggua

SEQ ID NO: 399224 - RNA, 22 nt, Human
uauacagauggaaagauacaca

SEQ ID NO: 399225 - RNA, 22 nt, Human
uauggaaagggaguuuaauuug

SEQ ID NO: 399226 - RNA, 22 nt, Human
cuggaucaugcauugcuugucc

SEQ ID NO: 399227 - RNA, 22 nt, Human
ugcaggaacauagguuccuugg

SEQ ID NO: 399228 - RNA, 18 nt, Human
aagucaccccugcucccu

SEQ ID NO: 399229 - RNA, 22 nt, Human
uucauuuguugacagagacaug

SEQ ID NO: 399230 - RNA, 22 nt, Human
uuacagaaguauugagagaucc

SEQ ID NO: 399231 - RNA, 22 nt, Human
caucagaaucugagucucugcc

SEQ ID NO: 399232 - RNA, 22 nt, Human
aguacaacauuagaguaucuua

SEQ ID NO: 399233 - RNA, 22 nt, Human
uuuaaagaaauuccucaucuuu

SEQ ID NO: 399234 - RNA, 22 nt, Human
aguaaaauuguauuggaaaaca

SEQ ID NO: 399235 - RNA, 22 nt, Human
uuaacagagugccuggcaugua

SEQ ID NO: 399236 - RNA, 22 nt, Human
ccauaauauuaaaugcuuuugu

SEQ ID NO: 399237 - RNA, 22 nt, Human
uacauagaacauguuuaauguc

SEQ ID NO: 399238 - RNA, 22 nt, Human
aaguccuuuccaguccugugau

SEQ ID NO: 399239 - RNA, 22 nt, Human
gauggcuucagucuccuugggu

SEQ ID NO: 399240 - RNA, 22 nt, Human
cugaauaauacagacuagcuuc

SEQ ID NO: 399241 - RNA, 22 nt, Human
ucaaaaguggccuguaaaaucu

SEQ ID NO: 399242 - RNA, 22 nt, Human
ugauuuaaaagaaacauugucu

SEQ ID NO: 399243 - RNA, 22 nt, Human
ucaguuucuucaucucccuaac

SEQ ID NO: 399244 - RNA, 22 nt, Human
cuagaaauguagauucuuagug

SEQ ID NO: 399245 - RNA, 22 nt, Human
aaaguccugacugcaggggaug

SEQ ID NO: 399246 - RNA, 22 nt, Human
uguauacaggcauaagagauac

SEQ ID NO: 399247 - RNA, 22 nt, Human
ugcaggaaugagguucucaguu

SEQ ID NO: 399248 - RNA, 22 nt, Human
auuuccaggagaaaggauuuua

SEQ ID NO: 399249 - RNA, 23 nt, Human
augguuuaugucacacuuuugau

SEQ ID NO: 399250 - RNA, 22 nt, Human
cauagaaaucaggugagaaucu

SEQ ID NO: 399251 - RNA, 20 nt, Human
ucauaaagaggaaauaaaua

SEQ ID NO: 399252 - RNA, 22 nt, Human
aaucagcuaaauaaacuaguca

SEQ ID NO: 399253 - RNA, 22 nt, Human
uucagaaacaucaguggaugga

SEQ ID NO: 399254 - RNA, 18 nt, Human
augaucuuagcaaauauu

SEQ ID NO: 399255 - RNA, 22 nt, Human
gauagucaccucccuuaacuuu

SEQ ID NO: 399256 - RNA, 22 nt, Human
agauuucagaugcucggcaguu

SEQ ID NO: 399257 - RNA, 22 nt, Human
aaaucaguuagugguaggauug

SEQ ID NO: 399258 - RNA, 22 nt, Human
uaaagccaacacuuuacugcuc

SEQ ID NO: 399259 - RNA, 22 nt, Human
uaaagcaguguugggucggacg

SEQ ID NO: 399260 - RNA, 20 nt, Human
aaucagaaagugugagcucu

SEQ ID NO: 399261 - RNA, 22 nt, Human
uucacagagaguaugcagagaa

SEQ ID NO: 399262 - RNA, 18 nt, Human
uaagucauuuugccagca

SEQ ID NO: 399263 - RNA, 22 nt, Human
guuccaaauuuggaucuuuagg

SEQ ID NO: 399264 - RNA, 22 nt, Human
auaaaaguaggaccaacuuaca

SEQ ID NO: 399265 - RNA, 22 nt, Human
cuacagaauucaacaaaugguu

SEQ ID NO: 399266 - RNA, 21 nt, Human
auuauuauaaagaccacaggg

SEQ ID NO: 399267 - RNA, 22 nt, Human
aauaaaaugaacugguagaguu

SEQ ID NO: 399268 - RNA, 22 nt, Human
cacccaguugacuacaaagggg

SEQ ID NO: 399269 - RNA, 18 nt, Human
aacaguuuccagauucuc

SEQ ID NO: 399270 - RNA, 23 nt, Human
aauaucaaggugauguucccaga

SEQ ID NO: 399271 - RNA, 22 nt, Human
aagucauagucgggaaagacau

SEQ ID NO: 399272 - RNA, 22 nt, Human
ugcagguaggccugacuuccag

SEQ ID NO: 399273 - RNA, 22 nt, Human
gaaagccagagagaaagggcuc

SEQ ID NO: 399274 - RNA, 22 nt, Human
uuagaaauacaagugagguuga

SEQ ID NO: 399275 - RNA, 22 nt, Human
agauaaaaugguucaaaggcua

SEQ ID NO: 399276 - RNA, 22 nt, Human
ucaaauaccagcaauuucaugu

SEQ ID NO: 399277 - RNA, 22 nt, Human
auccaaaccuggacaugagugg

SEQ ID NO: 399278 - RNA, 22 nt, Human
ugagacaaccuaauuaaacacc

SEQ ID NO: 399279 - RNA, 22 nt, Human
ccagauaaggcuuuuuaaaagc

SEQ ID NO: 399280 - RNA, 22 nt, Human
auacaaguugugauaauguaaa

SEQ ID NO: 399281 - RNA, 22 nt, Human
cauagaaaagaguagguaaugu

SEQ ID NO: 399282 - RNA, 22 nt, Human
ugaaauaauaucuggaucaauc

SEQ ID NO: 399283 - RNA, 22 nt, Human
cuagaaaucucuguuuacauca

SEQ ID NO: 399284 - RNA, 22 nt, Human
aauaaaauggucaguuuucuca

SEQ ID NO: 399285 - RNA, 22 nt, Human
aaagucaugaugaaccaccgua

SEQ ID NO: 399286 - RNA, 22 nt, Human
uuucaagaacaacauucauuca

SEQ ID NO: 399287 - RNA, 22 nt, Human
uuaauucagucaaagaaaccau

SEQ ID NO: 399288 - RNA, 22 nt, Human
uuuaggcacagggaguugguuu

SEQ ID NO: 399289 - RNA, 23 nt, Human
auauggcuguuguguguuaacau

SEQ ID NO: 399290 - RNA, 22 nt, Human
aagcaauagcaacaacuuuaca

SEQ ID NO: 399291 - RNA, 22 nt, Human
aacaugucuggguauucacaag

SEQ ID NO: 399292 - RNA, 22 nt, Human
uuuaggcaagggcaagauuauc

SEQ ID NO: 399293 - RNA, 22 nt, Human
uaaguccuagaugauucacaga

SEQ ID NO: 399294 - RNA, 22 nt, Human
acaugucuguaauuauuuuagg

SEQ ID NO: 399295 - RNA, 22 nt, Human
uaaaaugcacagcaguugaaag

SEQ ID NO: 399296 - RNA, 22 nt, Human
ugucaccaugcgaggcuaauuu

SEQ ID NO: 399297 - RNA, 22 nt, Human
acuuuaauuaaugaacuguggc

SEQ ID NO: 399298 - RNA, 22 nt, Human
aauuuacacuucauuuggaggg

SEQ ID NO: 399299 - RNA, 22 nt, Human
aacagacaacuccuguggcuca

SEQ ID NO: 399300 - RNA, 22 nt, Human
guuaggcauuugccuuaauuuu

SEQ ID NO: 399301 - RNA, 22 nt, Human
uaauuuaugaugcaaagaaaag

SEQ ID NO: 399302 - RNA, 23 nt, Human
aaaguguagccagguuaagaacc

SEQ ID NO: 399303 - RNA, 22 nt, Human
auucuucacaaauauauagaag

SEQ ID NO: 399304 - RNA, 22 nt, Human
aucaaaaccuugacuuuuaaug

SEQ ID NO: 399305 - RNA, 22 nt, Human
aaguccuuucucauggaggaau

SEQ ID NO: 399306 - RNA, 22 nt, Human
auuauccucagaaaacauguga

SEQ ID NO: 399307 - RNA, 22 nt, Human
aguccuuacucgggggcccaga

SEQ ID NO: 399308 - RNA, 22 nt, Human
aucuaacacuguaaacugucuu

SEQ ID NO: 399309 - RNA, 22 nt, Human
ucagagaaaugaaguagggauu

SEQ ID NO: 399310 - RNA, 22 nt, Human
ucaguguauggagugcuggauu

SEQ ID NO: 399311 - RNA, 22 nt, Human
auugauggcggccucuccauau

SEQ ID NO: 399312 - RNA, 22 nt, Human
uuuuauauggcacauugguugg

SEQ ID NO: 399313 - RNA, 22 nt, Human
uuuaggaaugugguuuuugagc

SEQ ID NO: 399314 - RNA, 22 nt, Human
auguuucauuuagauaucaggc

SEQ ID NO: 399315 - RNA, 22 nt, Human
auuaggcaauucugggcaucuc

SEQ ID NO: 399316 - RNA, 22 nt, Human
gcuucacacuaaaaauguuaaa

SEQ ID NO: 399317 - RNA, 22 nt, Human
gauucaauguugcagauggaau

SEQ ID NO: 399318 - RNA, 22 nt, Human
guuaaagaguuuggcuuucuuc

SEQ ID NO: 399319 - RNA, 22 nt, Human
uaauuucaauagcuugcauaau

SEQ ID NO: 399320 - RNA, 22 nt, Human
gaguccuuaauacacuggugga

SEQ ID NO: 399321 - RNA, 22 nt, Human
gauagaaagaauauagauucca

SEQ ID NO: 399322 - RNA, 22 nt, Human
aauuucaagucuugaagaagua

SEQ ID NO: 399323 - RNA, 22 nt, Human
uucucuuagcuguaaagucaau

SEQ ID NO: 399324 - RNA, 22 nt, Human
uuuaggcacaacuacucagcua

SEQ ID NO: 399325 - RNA, 22 nt, Human
uuuaucuguuguacauuuaugc

SEQ ID NO: 399326 - RNA, 22 nt, Human
cagucaccuugaggacucagac

SEQ ID NO: 399327 - RNA, 22 nt, Human
caagaaucaacauuauuuagug

SEQ ID NO: 399328 - RNA, 22 nt, Human
caguaucugucaguaaucaggu

SEQ ID NO: 399329 - RNA, 22 nt, Human
uauuacaauuuacauugcacuu

SEQ ID NO: 399330 - RNA, 22 nt, Human
auggcauuauagcaaugguuug

SEQ ID NO: 399331 - RNA, 22 nt, Human
aucuauacccaucaugauuuaa

SEQ ID NO: 399332 - RNA, 22 nt, Human
uucuuuuacauuaagauuucag

SEQ ID NO: 399333 - RNA, 23 nt, Human
aggauuuaaaggcaaugcauuuu

SEQ ID NO: 399334 - RNA, 22 nt, Human
cuacagaaggagaaauggguaa

SEQ ID NO: 399335 - RNA, 22 nt, Human
uguacaauguggccaguguuaa

SEQ ID NO: 399336 - RNA, 21 nt, Human
cauuucaaagagcuggaaauc

SEQ ID NO: 399337 - RNA, 22 nt, Human
ugaagaaucagauuggccugcg

SEQ ID NO: 399338 - RNA, 22 nt, Human
caguccuugcuaugacccugag

SEQ ID NO: 399339 - RNA, 22 nt, Human
auacagaauucacuacaguuuc

SEQ ID NO: 399340 - RNA, 22 nt, Human
cagaaacauguauaaaguugua

SEQ ID NO: 399341 - RNA, 22 nt, Human
uaaaauguuugcaagagaccag

SEQ ID NO: 399342 - RNA, 22 nt, Human
ugaaaauggccugaagaagcaa

SEQ ID NO: 399343 - RNA, 22 nt, Human
aaaacaguuuuugcuaacugcu

SEQ ID NO: 399344 - RNA, 22 nt, Human
uugaauaauaugcuucguucuc

SEQ ID NO: 399345 - RNA, 21 nt, Human
uccaaaaaggagcguccuucu

SEQ ID NO: 399346 - RNA, 22 nt, Human
acaagauaaggugucagugugu

SEQ ID NO: 399347 - RNA, 22 nt, Human
ccauggcucuuaccuuguuaua

SEQ ID NO: 399348 - RNA, 22 nt, Human
cuacagaaucuaccucaagcca

SEQ ID NO: 399349 - RNA, 22 nt, Human
ucagaauucagagggagugggg

SEQ ID NO: 399350 - RNA, 22 nt, Human
uauuccaacugucauagucaua

SEQ ID NO: 399351 - RNA, 22 nt, Human
ucuaaacacuaagucuugaugc

SEQ ID NO: 399352 - RNA, 22 nt, Human
aguacaaugucugacacaguag

SEQ ID NO: 399353 - RNA, 22 nt, Human
auggcuuuccugggacaugggc

SEQ ID NO: 399354 - RNA, 22 nt, Human
aaagucauguaaugauaugauu

SEQ ID NO: 399355 - RNA, 22 nt, Human
aaaauugagagucuugugcaag

SEQ ID NO: 399356 - RNA, 22 nt, Human
aaucaagucaaccaucaugugc

SEQ ID NO: 399357 - RNA, 21 nt, Human
uuacagaauccaugggaaguc

SEQ ID NO: 399358 - RNA, 22 nt, Human
aaugaacauauaaagagaucuu

SEQ ID NO: 399359 - RNA, 22 nt, Human
uuugaagaccuuaucucuaaau

SEQ ID NO: 399360 - RNA, 22 nt, Human
uggauuuaccacagggccacag

SEQ ID NO: 399361 - RNA, 22 nt, Human
caguccuuccuugccccuuggg

SEQ ID NO: 399362 - RNA, 22 nt, Human
cuacagaauggagggucagaga

SEQ ID NO: 399363 - RNA, 22 nt, Human
ugugugaauggauuauucuauu

SEQ ID NO: 399364 - RNA, 22 nt, Human
gcagagaacccagcagauuggc

SEQ ID NO: 399365 - RNA, 22 nt, Human
aaaucaguucucccuuucuuca

SEQ ID NO: 399366 - RNA, 22 nt, Human
aaagucauugcuguuaucaaug

SEQ ID NO: 399367 - RNA, 22 nt, Human
uccagaauacucugaaaucauu

SEQ ID NO: 399368 - RNA, 22 nt, Human
cauuuacagugagaguuuuuac

SEQ ID NO: 399369 - RNA, 21 nt, Human
uguguaaaguugaaauccugu

SEQ ID NO: 399370 - RNA, 22 nt, Human
uauggaaacuaauucauuuuuc

SEQ ID NO: 399371 - RNA, 22 nt, Human
cauacuuucuuuuucacgcaua

SEQ ID NO: 399372 - RNA, 22 nt, Human
gauuuccauuuucaacuccugc

SEQ ID NO: 399373 - RNA, 22 nt, Human
caaguccaggucaauuuaaagc

SEQ ID NO: 399374 - RNA, 22 nt, Human
aaaucaguaaauguucauuaac

SEQ ID NO: 399375 - RNA, 22 nt, Human
aauaaccuuacuuauuacaugg

SEQ ID NO: 399376 - RNA, 22 nt, Human
aucuaacagcaacaccagaaua

SEQ ID NO: 399377 - RNA, 22 nt, Human
uaaaaguauacuuucaaaggag

SEQ ID NO: 399378 - RNA, 22 nt, Human
augccaaagcccaaguucauca

SEQ ID NO: 399379 - RNA, 19 nt, Human
aggauuuauuaugugcuca

SEQ ID NO: 399380 - RNA, 22 nt, Human
aucugacuucacgcccaugcca

SEQ ID NO: 399381 - RNA, 22 nt, Human
uaaacauggcuguuucaguuau

SEQ ID NO: 399382 - RNA, 22 nt, Human
uguaacaaaauaccuuggauug

SEQ ID NO: 399383 - RNA, 22 nt, Human
ucaaaauuaaaccaacguccag

SEQ ID NO: 399384 - RNA, 22 nt, Human
aagaaaucugauauuuguuuca

SEQ ID NO: 399385 - RNA, 22 nt, Human
uaauuucagugcaagcucacgg

SEQ ID NO: 399386 - RNA, 22 nt, Human
uucaauaggaugcaugauauaa

SEQ ID NO: 399387 - RNA, 22 nt, Human
gguacaaugucuuacagaccca

SEQ ID NO: 399388 - RNA, 22 nt, Human
uggcuuuaaaucuguauucaua

SEQ ID NO: 399389 - RNA, 22 nt, Human
ccagaucuaguguuguaaagcu

SEQ ID NO: 399390 - RNA, 22 nt, Human
aagucacccacaggcagcagaa

SEQ ID NO: 399391 - RNA, 22 nt, Human
gauuuacagguuagguccugua

SEQ ID NO: 399392 - RNA, 22 nt, Human
aauucucagguaaaaguuaagu

SEQ ID NO: 399393 - RNA, 22 nt, Human
uauuaucauuaacuguugaauu

SEQ ID NO: 399394 - RNA, 22 nt, Human
uaggcaacaugucgaauacugu

SEQ ID NO: 399395 - RNA, 23 nt, Human
auagaagauuauugcaacagucc

SEQ ID NO: 399396 - RNA, 22 nt, Human
uucauacuguguuuccaaguuu

SEQ ID NO: 399397 - RNA, 22 nt, Human
cacauuuagagguuagcauggu

SEQ ID NO: 399398 - RNA, 22 nt, Human
cauuuacauaacaguaacgcug

SEQ ID NO: 399399 - RNA, 22 nt, Human
guaaacauuacugugcuguaua

SEQ ID NO: 399400 - RNA, 22 nt, Human
cuccuuagugccucugcacgag

SEQ ID NO: 399401 - RNA, 20 nt, Human
ugcaggaauuugcauuccuu

SEQ ID NO: 399402 - RNA, 22 nt, Human
aucagaaaguucaucauguuug

SEQ ID NO: 399403 - RNA, 22 nt, Human
auagacauuuugcauucaagca

SEQ ID NO: 399404 - RNA, 22 nt, Human
uuuaauauuucuuuccugaagc

SEQ ID NO: 399405 - RNA, 22 nt, Human
aaucccagcuacucaggaaguu

SEQ ID NO: 399406 - RNA, 22 nt, Human
uaauuucacugauaugaaguca

SEQ ID NO: 399407 - RNA, 22 nt, Human
uuuccaaaaugaaucuaaugca

SEQ ID NO: 399408 - RNA, 22 nt, Human
augguauugcaacaacugucau

SEQ ID NO: 399409 - RNA, 22 nt, Human
aaucaguguguaaaguggcugc

SEQ ID NO: 399410 - RNA, 22 nt, Human
uuaauuacuaagcacaaugcaa

SEQ ID NO: 399411 - RNA, 22 nt, Human
gauaaaauaacuauggaauacu

SEQ ID NO: 399412 - RNA, 22 nt, Human
uuagaaaucaccucugaagauc

SEQ ID NO: 399413 - RNA, 22 nt, Human
ugucauaaucaguuuugcaugu

SEQ ID NO: 399414 - RNA, 22 nt, Human
aguuacagugaccauuuauuua

SEQ ID NO: 399415 - RNA, 22 nt, Human
aaugaaacuguauauagacugu

SEQ ID NO: 399416 - RNA, 22 nt, Human
uaaagucagauaucuggguuga

SEQ ID NO: 399417 - RNA, 22 nt, Human
auucaagauuaauucuauguca

SEQ ID NO: 399418 - RNA, 22 nt, Human
acaaagucacaauaauuaaccu

SEQ ID NO: 399419 - RNA, 20 nt, Human
uguaacaaucuggauguugc

SEQ ID NO: 399420 - RNA, 22 nt, Human
ggauuuccucuugacucuaaag

SEQ ID NO: 399421 - RNA, 22 nt, Human
agaaacauccugcuuuccauuu

SEQ ID NO: 399422 - RNA, 22 nt, Human
aagcauuuuagauaaagcauca

SEQ ID NO: 399423 - RNA, 21 nt, Human
agaauaaugguaucauuugcu

SEQ ID NO: 399424 - RNA, 21 nt, Human
auuuccaaauaaggucacauu

SEQ ID NO: 399425 - RNA, 22 nt, Human
uuuaggcaaacucauugucaga

SEQ ID NO: 399426 - RNA, 22 nt, Human
uagaauucauguuacuguuagc

SEQ ID NO: 399427 - RNA, 22 nt, Human
cugaaaggguuacauaguaagu

SEQ ID NO: 399428 - RNA, 22 nt, Human
caaagccaggcuuucuaaugua

SEQ ID NO: 399429 - RNA, 22 nt, Human
cuagaaaugcucaagagaaagu

SEQ ID NO: 399430 - RNA, 22 nt, Human
acaaugaacacacaaggaauuc

SEQ ID NO: 399431 - RNA, 22 nt, Human
gaagugaagagauuagaaauca

SEQ ID NO: 399432 - RNA, 22 nt, Human
auguuaaaugguuuauuauuaa

SEQ ID NO: 399433 - RNA, 22 nt, Human
agcauuuaagcuucugcaaagc

SEQ ID NO: 399434 - RNA, 22 nt, Human
gagucaccacugugauagucga

SEQ ID NO: 399435 - RNA, 22 nt, Human
uggcauuuagaaaacaacaugu

SEQ ID NO: 399436 - RNA, 22 nt, Human
ggauuuacaaguuuaacucuca

SEQ ID NO: 399437 - RNA, 22 nt, Human
uuaugaaggaucagguacuugg

SEQ ID NO: 399438 - RNA, 22 nt, Human
aaguaaauaucuguuuauagca

SEQ ID NO: 399439 - RNA, 22 nt, Human
agaaccucaauuauuuuugcac

SEQ ID NO: 399440 - RNA, 22 nt, Human
acagaaguuggaauuagauacu

SEQ ID NO: 399441 - RNA, 22 nt, Human
auguguaugcaugcacuaagau

SEQ ID NO: 399442 - RNA, 22 nt, Human
aucauaaaccacuuuguaaucu

SEQ ID NO: 399443 - RNA, 22 nt, Human
ggcauuuacauaaucuuauuua

SEQ ID NO: 399444 - RNA, 22 nt, Human
acaaaaagggagaugagguaga

SEQ ID NO: 399445 - RNA, 22 nt, Human
caaauuccucagaaucagaaaa

SEQ ID NO: 399446 - RNA, 22 nt, Human
aaagucaucuaggagcagauuu

SEQ ID NO: 399447 - RNA, 22 nt, Human
cugaaagguauaaauaagacuu

SEQ ID NO: 399448 - RNA, 22 nt, Human
cugaauaauuuuauaguugcug

SEQ ID NO: 399449 - RNA, 22 nt, Human
aaaacauguccauacagaaacu

SEQ ID NO: 399450 - RNA, 22 nt, Human
auuauaaagaacaugugugugg

SEQ ID NO: 399451 - RNA, 22 nt, Human
gauuuacaaagcucucuagugu

SEQ ID NO: 399452 - RNA, 22 nt, Human
caaauucaaauuucaucagugu

SEQ ID NO: 399453 - RNA, 22 nt, Human
ucauacacaagagcauguaaca

SEQ ID NO: 399454 - RNA, 18 nt, Human
caauuucaauggucugaa

SEQ ID NO: 399455 - RNA, 22 nt, Human
caaaauugaugaauguaugauu

SEQ ID NO: 399456 - RNA, 22 nt, Human
agaauuccucuaggaucugccc

SEQ ID NO: 399457 - RNA, 22 nt, Human
aaagucauuguaauauaugcua

SEQ ID NO: 399458 - RNA, 22 nt, Human
uggauuuaauggaugaggggca

SEQ ID NO: 399459 - RNA, 22 nt, Human
auagaauuugcacuaaaucugc

SEQ ID NO: 399460 - RNA, 22 nt, Human
uggcauuuuguucaguauaugg

SEQ ID NO: 399461 - RNA, 22 nt, Human
uuacagaagaguaacuuggcaa

SEQ ID NO: 399462 - RNA, 22 nt, Human
cauggcuuguaauaaauuuaua

SEQ ID NO: 399463 - RNA, 22 nt, Human
aaugcuuauaccuaaugaucuu

SEQ ID NO: 399464 - RNA, 22 nt, Human
uucauaaucaccaaaaacugga

SEQ ID NO: 399465 - RNA, 22 nt, Human
auagaaauguauuuuggacuag

SEQ ID NO: 399466 - RNA, 22 nt, Human
guagaaauuccauuuacuuuga

SEQ ID NO: 399467 - RNA, 22 nt, Human
acaugaaacuguugcauuagaa

SEQ ID NO: 399468 - RNA, 22 nt, Human
aguaaacacugucuuuauauau

SEQ ID NO: 399469 - RNA, 22 nt, Human
ucaguuucuaaaucuuaccaau

SEQ ID NO: 399470 - RNA, 22 nt, Human
gcagaauucuacagaugauaaa

SEQ ID NO: 399471 - RNA, 20 nt, Human
aggauuuacuacuaccugcu

SEQ ID NO: 399472 - RNA, 22 nt, Human
cuggcuuuggucaugugaucau

SEQ ID NO: 399473 - RNA, 18 nt, Human
gcacuucacccagcuagu

SEQ ID NO: 399474 - RNA, 22 nt, Human
ugugaauaccuugaauucauca

SEQ ID NO: 399475 - RNA, 22 nt, Human
aaacggauauaacagcaaacgc

SEQ ID NO: 399476 - RNA, 22 nt, Human
uuaggaaaggguuuucuaacag

SEQ ID NO: 399477 - RNA, 22 nt, Human
acauguauugacauuauauucu

SEQ ID NO: 399478 - RNA, 22 nt, Human
guuuacauguacucauuauacu

SEQ ID NO: 399479 - RNA, 22 nt, Human
auggcuuucagauggugaaaga

SEQ ID NO: 399480 - RNA, 22 nt, Human
aaucagaacuucucaggguggg

SEQ ID NO: 399481 - RNA, 22 nt, Human
aaucagaaccuugggucauaac

SEQ ID NO: 399482 - RNA, 22 nt, Human
cuuauacacccucuucccaggc

SEQ ID NO: 399483 - RNA, 22 nt, Human
uagucaccucuuuaaauguccu

SEQ ID NO: 399484 - RNA, 22 nt, Human
caaguccucaaagggcucugcu

SEQ ID NO: 399485 - RNA, 22 nt, Human
uaauccaaaacugaaucugugg

SEQ ID NO: 399486 - RNA, 21 nt, Human
ugaaagaaggugcagucugaa

SEQ ID NO: 399487 - RNA, 22 nt, Human
aaucuuuaaggacucagucucu

SEQ ID NO: 399488 - RNA, 22 nt, Human
aaucuagucuccuuaagucuuu

SEQ ID NO: 399489 - RNA, 22 nt, Human
aggauuuaggagcuggcuaacg

SEQ ID NO: 399490 - RNA, 22 nt, Human
gcuuuaaugcaauuucaccuca

SEQ ID NO: 399491 - RNA, 22 nt, Human
cagaaagcuuaggcaaguugga

SEQ ID NO: 399492 - RNA, 22 nt, Human
aucagaaacucuuagagcaggg

SEQ ID NO: 399493 - RNA, 22 nt, Human
aagucacccuagggccuggacu

SEQ ID NO: 399494 - RNA, 20 nt, Human
aacaguaccauuuaucucag

SEQ ID NO: 399495 - RNA, 22 nt, Human
aggaaaaaagucugugauuaua

SEQ ID NO: 399496 - RNA, 22 nt, Human
agccaacuaauuaaacaacuuu

SEQ ID NO: 399497 - RNA, 22 nt, Human
uuugaauagcauaggauuacau

SEQ ID NO: 399498 - RNA, 22 nt, Human
gguacaauucugggguaugcuc

SEQ ID NO: 399499 - RNA, 22 nt, Human
auucacuggcagacagaacuca

SEQ ID NO: 399500 - RNA, 22 nt, Human
uaagagaauguuguggcuaggu

SEQ ID NO: 399501 - RNA, 22 nt, Human
uaaagucaucuuuaaacaugcc

SEQ ID NO: 399502 - RNA, 22 nt, Human
caagauuugccaguggccaacu

SEQ ID NO: 399503 - RNA, 22 nt, Human
gaugaucaucuguaaaguuaga

SEQ ID NO: 399504 - RNA, 22 nt, Human
uaugaacauguucauugacuua

SEQ ID NO: 399505 - RNA, 22 nt, Human
auagaauucguguuuguaauuc

SEQ ID NO: 399506 - RNA, 22 nt, Human
uuguccaaaguaacacaucuag

SEQ ID NO: 399507 - RNA, 20 nt, Human
auacuuguuuucaggcuuuu

SEQ ID NO: 399508 - RNA, 22 nt, Human
auuuagccucauuuuugacaua

SEQ ID NO: 399509 - RNA, 22 nt, Human
uauacagauuaacagauuuaaa

SEQ ID NO: 399510 - RNA, 22 nt, Human
aaauucaauuaacuuucaugcu

SEQ ID NO: 399511 - RNA, 22 nt, Human
uaaguccuucaccuaauccuca

SEQ ID NO: 399512 - RNA, 22 nt, Human
uuccaaagugcuggaauuacau

SEQ ID NO: 399513 - RNA, 22 nt, Human
uuuuauguuccucuuuaugcga

SEQ ID NO: 399514 - RNA, 22 nt, Human
cugaauaaagcccucgcgcgcu

SEQ ID NO: 399515 - RNA, 22 nt, Human
uauuucaacguaugaaaagcug

SEQ ID NO: 399516 - RNA, 22 nt, Human
gauagaaagguguugaaaucca

SEQ ID NO: 399517 - RNA, 22 nt, Human
gcaaacaagcugccugaagauu

SEQ ID NO: 399518 - RNA, 22 nt, Human
uuaauuacaaaacacauagguu

SEQ ID NO: 399519 - RNA, 22 nt, Human
caucagaacaaaucgguuaaga

SEQ ID NO: 399520 - RNA, 22 nt, Human
acaaagucaaauugcagccgcc

SEQ ID NO: 399521 - RNA, 22 nt, Human
ccagaucuucuuuucagugucu

SEQ ID NO: 399522 - RNA, 22 nt, Human
aacauguugcuuuaauaauauu

SEQ ID NO: 399523 - RNA, 22 nt, Human
uuauccaagcagaagcugcaca

SEQ ID NO: 399524 - RNA, 22 nt, Human
gggauuuaguaggauaguauac

SEQ ID NO: 399525 - RNA, 22 nt, Human
gaauuucauugcucugcugugu

SEQ ID NO: 399526 - RNA, 22 nt, Human
gagucaccuugggucagcgaua

SEQ ID NO: 399527 - RNA, 22 nt, Human
uuuaaagagaaugugaaggagu

SEQ ID NO: 399528 - RNA, 22 nt, Human
uaaagacaauaggaaaguuguu

SEQ ID NO: 399529 - RNA, 22 nt, Human
auucucaauggcuacuuucaua

SEQ ID NO: 399530 - RNA, 22 nt, Human
uaguaucuauuaguaacaagag

SEQ ID NO: 399531 - RNA, 22 nt, Human
auucaacggguagaagggucuu

SEQ ID NO: 399532 - RNA, 22 nt, Human
cagauuucagcucauauauuau

SEQ ID NO: 399533 - RNA, 22 nt, Human
ugaaacaaugugaaguugcuga

SEQ ID NO: 399534 - RNA, 22 nt, Human
uauguuaagugggauaaucaaa

SEQ ID NO: 399535 - RNA, 22 nt, Human
augguuuaguuagggcuuuuca

SEQ ID NO: 399536 - RNA, 22 nt, Human
uguaaauaguuagcuugccucu

SEQ ID NO: 399537 - RNA, 22 nt, Human
uacaugaaccuuuaugugugau

SEQ ID NO: 399538 - RNA, 22 nt, Human
cagauaaaggcuuacuaguagu

SEQ ID NO: 399539 - RNA, 22 nt, Human
uucaaacauucaaauaaaccgg

SEQ ID NO: 399540 - RNA, 22 nt, Human
uguccuuagggauauaaaauau

SEQ ID NO: 399541 - RNA, 22 nt, Human
uauaauuaguaaauggcagauu

SEQ ID NO: 399542 - RNA, 22 nt, Human
aaucagugguucccagcccagg

SEQ ID NO: 399543 - RNA, 22 nt, Human
caugguuuauuagagcuuauuu

SEQ ID NO: 399544 - RNA, 22 nt, Human
aaauacugggcucaaaaggguu

SEQ ID NO: 399545 - RNA, 22 nt, Human
gcagggcagaccuccagccuau

SEQ ID NO: 399546 - RNA, 22 nt, Human
ggcauuuagauugaauuucugu

SEQ ID NO: 399547 - RNA, 22 nt, Human
cuuaggcaaccaggucaaugcu

SEQ ID NO: 399548 - RNA, 22 nt, Human
gcaaaauuuacacuccuucuuc

SEQ ID NO: 399549 - RNA, 22 nt, Human
ucagcauaucuugagcuucaug

SEQ ID NO: 399550 - RNA, 22 nt, Human
aauguuaauuuacugucuucau

SEQ ID NO: 399551 - RNA, 22 nt, Human
ucagaauugcagggagggcagg

SEQ ID NO: 399552 - RNA, 22 nt, Human
gauuucaaguaucuugggcgag

SEQ ID NO: 399553 - RNA, 22 nt, Human
uuggaucauggaaugucugcuu

SEQ ID NO: 399554 - RNA, 22 nt, Human
uaucagaaaugccuuaaauugg

SEQ ID NO: 399555 - RNA, 22 nt, Human
auggauuuggaugagauuacuu

SEQ ID NO: 399556 - RNA, 22 nt, Human
uuuauaaacaguaccacggugc

SEQ ID NO: 399557 - RNA, 22 nt, Human
cuagaaauauuuuacagucaag

SEQ ID NO: 399558 - RNA, 22 nt, Human
uaccaaaaccaagccauuaucu

SEQ ID NO: 399559 - RNA, 22 nt, Human
uucagaaaucgaguuucauguc

SEQ ID NO: 399560 - RNA, 22 nt, Human
ugcaggaacuugguuuuacuca

SEQ ID NO: 399561 - RNA, 22 nt, Human
uguucuagcaacacaguuuugg

SEQ ID NO: 399562 - RNA, 22 nt, Human
ugaauaauuaugggaguccuaa

SEQ ID NO: 399563 - RNA, 22 nt, Human
aggauuuaucaggaacucucuu

SEQ ID NO: 399564 - RNA, 22 nt, Human
uauuucaagaacuucuauccau

SEQ ID NO: 399565 - RNA, 22 nt, Human
cauaagaagguaacauccuuaa

SEQ ID NO: 399566 - RNA, 22 nt, Human
cauucauucuguaaguaacuau

SEQ ID NO: 399567 - RNA, 22 nt, Human
gaauuucagggucugguaggaa

SEQ ID NO: 399568 - RNA, 22 nt, Human
gaguccuuggcaucaucaguac

SEQ ID NO: 399569 - RNA, 22 nt, Human
uaguccuugcugggcacagagu

SEQ ID NO: 399570 - RNA, 18 nt, Human
aguccuuacgaggcuaua

SEQ ID NO: 399571 - RNA, 22 nt, Human
augaauaaaacauuuuaaucag

SEQ ID NO: 399572 - RNA, 22 nt, Human
agucaaaugaguaaauauauaa

SEQ ID NO: 399573 - RNA, 22 nt, Human
aaaguccuguuaacuguuaaca

SEQ ID NO: 399574 - RNA, 20 nt, Human
auaggaaagggaggggcuuu

SEQ ID NO: 399575 - RNA, 22 nt, Human
caucagaaggccagaggguagc

SEQ ID NO: 399576 - RNA, 23 nt, Human
ggccauuucauuugguucaaacu

SEQ ID NO: 399577 - RNA, 22 nt, Human
uaauuuacuugcaaauaacaau

SEQ ID NO: 399578 - RNA, 22 nt, Human
acacacucaauugcauaagcac

SEQ ID NO: 399579 - RNA, 22 nt, Human
aaagcauuucaugucuagaaag

SEQ ID NO: 399580 - RNA, 22 nt, Human
uucagaaacccauugggucucu

SEQ ID NO: 399581 - RNA, 22 nt, Human
uaagaaacccaggaauuucuua

SEQ ID NO: 399582 - RNA, 22 nt, Human
auucuuaauugccaugcuguau

SEQ ID NO: 399583 - RNA, 22 nt, Human
uaauuucaccguugcuagaaau

SEQ ID NO: 399584 - RNA, 22 nt, Human
aauucuaaauguaauuuagaau

SEQ ID NO: 399585 - RNA, 22 nt, Human
gauuucaaggauguuagaggug

SEQ ID NO: 399586 - RNA, 22 nt, Human
guacagaaggagcuuuggauuc

SEQ ID NO: 399587 - RNA, 22 nt, Human
gguacaauccacuguggguuag

SEQ ID NO: 399588 - RNA, 22 nt, Human
acagccaggaggaacucaguga

SEQ ID NO: 399589 - RNA, 19 nt, Human
acaagucacuuacuuagua

SEQ ID NO: 399590 - RNA, 18 nt, Human
auacaagaucaaguguuc

SEQ ID NO: 399591 - RNA, 22 nt, Human
ugugaauacagcaugugcuucu

SEQ ID NO: 399592 - RNA, 22 nt, Human
cauaaaauggcuuguucuuuaa

SEQ ID NO: 399593 - RNA, 22 nt, Human
ucaaaauuuuauuucucaagga

SEQ ID NO: 399594 - RNA, 23 nt, Human
cauuucaacgaauuuuccuucug

SEQ ID NO: 399595 - RNA, 22 nt, Human
aacauaauguggccaaagucac

SEQ ID NO: 399596 - RNA, 22 nt, Human
uggcuuuagguugcauguuucu

SEQ ID NO: 399597 - RNA, 21 nt, Human
ucauuuauugagaaaugacug

SEQ ID NO: 399598 - RNA, 22 nt, Human
uuucaucucucuaaaagacagu

SEQ ID NO: 399599 - RNA, 22 nt, Human
auggcuuaugguaaauauuucu

SEQ ID NO: 399600 - RNA, 22 nt, Human
uauaaagcugacucaugaaacu

SEQ ID NO: 399601 - RNA, 23 nt, Human
ucagagaacucgggcagaugacc

SEQ ID NO: 399602 - RNA, 22 nt, Human
gugugaaaguuccuaagacuau

SEQ ID NO: 399603 - RNA, 22 nt, Human
augaaaauacugugguugauag

SEQ ID NO: 399604 - RNA, 22 nt, Human
ucagaaaauaacuguuaguuug

SEQ ID NO: 399605 - RNA, 22 nt, Human
auuucauagauuguaaaucccu

SEQ ID NO: 399606 - RNA, 22 nt, Human
caaugaaaauuuaaguugcagc

SEQ ID NO: 399607 - RNA, 22 nt, Human
aggauuuauuacaagccauggu

SEQ ID NO: 399608 - RNA, 22 nt, Human
ggcauuuaauccaucugauuga

SEQ ID NO: 399609 - RNA, 19 nt, Human
acuguaaggcauuuuuuuc

SEQ ID NO: 399610 - RNA, 22 nt, Human
ccagcuauugcuguguaacagu

SEQ ID NO: 399611 - RNA, 22 nt, Human
uaugcugugcuagauacaauau

SEQ ID NO: 399612 - RNA, 22 nt, Human
uuaagcaacacacauuaauuau

SEQ ID NO: 399613 - RNA, 22 nt, Human
uguccuuagaagaagugaaaga

SEQ ID NO: 399614 - RNA, 22 nt, Human
gcagggcaaacccagguguuca

SEQ ID NO: 399615 - RNA, 22 nt, Human
aguucucauugcaugagacaga

SEQ ID NO: 399616 - RNA, 22 nt, Human
uuuauccaaggguuuuaacugu

SEQ ID NO: 399617 - RNA, 22 nt, Human
aaacaggcaucacucagcaaag

SEQ ID NO: 399618 - RNA, 22 nt, Human
aggauuuagauuuggaggaacu

SEQ ID NO: 399619 - RNA, 22 nt, Human
auuucaggauagccuaguuuug

SEQ ID NO: 399620 - RNA, 22 nt, Human
ugugaauagugccgcaauaaac

SEQ ID NO: 399621 - RNA, 22 nt, Human
ucaaguuuaauugagauguuua

SEQ ID NO: 399622 - RNA, 22 nt, Human
uucaaacacagacagcagcaug

SEQ ID NO: 399623 - RNA, 22 nt, Human
ugagacaaaauugacagacaaa

SEQ ID NO: 399624 - RNA, 22 nt, Human
guuuaauaauguugaauuacua

SEQ ID NO: 399625 - RNA, 22 nt, Human
gaauuucaagcagugcaauguu

SEQ ID NO: 399626 - RNA, 22 nt, Human
uuugaauaucacaaacuuucaa

SEQ ID NO: 399627 - RNA, 22 nt, Human
aauuucaauuacuuuugcacca

SEQ ID NO: 399628 - RNA, 22 nt, Human
auuaaacugagcaaauuaacau

SEQ ID NO: 399629 - RNA, 22 nt, Human
aaagaaucguguguaguuugaa

SEQ ID NO: 399630 - RNA, 17 nt, Human
aaucagauuucugagga

SEQ ID NO: 399631 - RNA, 22 nt, Human
auauauaaccuggauaaggcuu

SEQ ID NO: 399632 - RNA, 22 nt, Human
uguacaaugccagggaacacca

SEQ ID NO: 399633 - RNA, 21 nt, Human
gcuauacagaauggccagagg

SEQ ID NO: 399634 - RNA, 22 nt, Human
uaaagacaauuucgagcuguag

SEQ ID NO: 399635 - RNA, 22 nt, Human
auaucaaagcuaguggaaauuu

SEQ ID NO: 399636 - RNA, 22 nt, Human
augaaaauucuaugcaggccag

SEQ ID NO: 399637 - RNA, 22 nt, Human
acuaaacugaagcaugaaaagg

SEQ ID NO: 399638 - RNA, 22 nt, Human
ugcauaauacguuuccuauaac

SEQ ID NO: 399639 - RNA, 22 nt, Human
auacagaacucucaguuguaua

SEQ ID NO: 399640 - RNA, 22 nt, Human
uguacaaugccgagacuaacuc

SEQ ID NO: 399641 - RNA, 22 nt, Human
uuccuuaggcuguuugcagugc

SEQ ID NO: 399642 - RNA, 22 nt, Human
cuggauuuaggacuaguccaag

SEQ ID NO: 399643 - RNA, 21 nt, Human
aacugguucaauucaacuaga

SEQ ID NO: 399644 - RNA, 22 nt, Human
cuaucaaacagccauuaauaua

SEQ ID NO: 399645 - RNA, 22 nt, Human
ugguuuuagaugccuuuacugc

SEQ ID NO: 399646 - RNA, 22 nt, Human
aauacaagauuuauaguuguuu

SEQ ID NO: 399647 - RNA, 22 nt, Human
guuauaaauaccuaauaggauu

SEQ ID NO: 399648 - RNA, 22 nt, Human
caguaaauuaucucaucucugu

SEQ ID NO: 399649 - RNA, 22 nt, Human
auaaacucaugccaagaaauga

SEQ ID NO: 399650 - RNA, 22 nt, Human
aaacuuuguagagaaugcuggc

SEQ ID NO: 399651 - RNA, 22 nt, Human
aaaguccuugcaguuuccucuu

SEQ ID NO: 399652 - RNA, 22 nt, Human
uggcaauuuuaggugguuuagu

SEQ ID NO: 399653 - RNA, 22 nt, Human
caguccuugauccaauaguggg

SEQ ID NO: 399654 - RNA, 22 nt, Human
acaugcuuuaacuuauuuugau

SEQ ID NO: 399655 - RNA, 22 nt, Human
uaaguccuaauggcagaagucu

SEQ ID NO: 399656 - RNA, 22 nt, Human
cauuuacagcagacugaugaaa

SEQ ID NO: 399657 - RNA, 22 nt, Human
guacagaauuaugccaugaggg

SEQ ID NO: 399658 - RNA, 22 nt, Human
aaagucauccaaauuuuuaugu

SEQ ID NO: 399659 - RNA, 22 nt, Human
uguaagaaucagucuuuaaugu

SEQ ID NO: 399660 - RNA, 22 nt, Human
aagauauacuauuaaguaccau

SEQ ID NO: 399661 - RNA, 22 nt, Human
aaucagaauuuguccccugagu

SEQ ID NO: 399662 - RNA, 22 nt, Human
auacaaauuuauagaugcauuu

SEQ ID NO: 399663 - RNA, 22 nt, Human
uuuaggcaagaacucacugaga

SEQ ID NO: 399664 - RNA, 22 nt, Human
guacaauagucccuguuuggau

SEQ ID NO: 399665 - RNA, 22 nt, Human
ucccaguuuuucuccacuaagg

SEQ ID NO: 399666 - RNA, 20 nt, Human
gaguccuuaugggcugaggu

SEQ ID NO: 399667 - RNA, 22 nt, Human
uagcauaacagguaagagugag

SEQ ID NO: 399668 - RNA, 22 nt, Human
uguuuauaccugcaaccuguca

SEQ ID NO: 399669 - RNA, 21 nt, Human
gagauuuagaaggaucaauuu

SEQ ID NO: 399670 - RNA, 22 nt, Human
ugaauagauuuuuaacauauaa

SEQ ID NO: 399671 - RNA, 22 nt, Human
guacauaaaggaggcucuuugc

SEQ ID NO: 399672 - RNA, 22 nt, Human
aguagaauagauggauacuauu

SEQ ID NO: 399673 - RNA, 22 nt, Human
gaagaauccuguccucuuuagg

SEQ ID NO: 399674 - RNA, 22 nt, Human
uuuauccagcagcuauucaaaa

SEQ ID NO: 399675 - RNA, 22 nt, Human
augcuuuaaacuauaaauccac

SEQ ID NO: 399676 - RNA, 22 nt, Human
ucacagaacaauguuuaguucu

SEQ ID NO: 399677 - RNA, 22 nt, Human
ccuauacagccucagcugagau

SEQ ID NO: 399678 - RNA, 22 nt, Human
aaaucagugcucauuugaaagg

SEQ ID NO: 399679 - RNA, 22 nt, Human
ggcgcacaaugugcagguuugu

SEQ ID NO: 399680 - RNA, 22 nt, Human
augaaaacggaccagagcuauu

SEQ ID NO: 399681 - RNA, 22 nt, Human
ccaguacugucuccaauauucc

SEQ ID NO: 399682 - RNA, 22 nt, Human
auguuucaccagcaaauuaccu

SEQ ID NO: 399683 - RNA, 22 nt, Human
uuccuuaguuauuugguccccu

SEQ ID NO: 399684 - RNA, 22 nt, Human
ugaucugaaggacaugggaccc

SEQ ID NO: 399685 - RNA, 21 nt, Human
agccagucuguuuucuagugc

SEQ ID NO: 399686 - RNA, 22 nt, Human
ugcuauacggagcaucuucagg

SEQ ID NO: 399687 - RNA, 22 nt, Human
cauuaauauuguucuucuuuag

SEQ ID NO: 399688 - RNA, 21 nt, Human
ucauucacaggguauuguaua

SEQ ID NO: 399689 - RNA, 22 nt, Human
uaucaaaggcuaugugauuuuu

SEQ ID NO: 399690 - RNA, 22 nt, Human
gauuuccaggucauuaauaaag

SEQ ID NO: 399691 - RNA, 22 nt, Human
aauacagaggggucacaauuca

SEQ ID NO: 399692 - RNA, 22 nt, Human
uaagaaguacaaaaauuuucug

SEQ ID NO: 399693 - RNA, 22 nt, Human
caggaaacauaugugcuugagg

SEQ ID NO: 399694 - RNA, 22 nt, Human
gaucagaauucuuguguguuuc

SEQ ID NO: 399695 - RNA, 22 nt, Human
guacagaaugcuugguaaggca

SEQ ID NO: 399696 - RNA, 22 nt, Human
cuacagaaacacuggacaugug

SEQ ID NO: 399697 - RNA, 22 nt, Human
gacaauacagaaagggacaugc

SEQ ID NO: 399698 - RNA, 22 nt, Human
uugaucaucuaagaguaauagu

SEQ ID NO: 399699 - RNA, 22 nt, Human
caugcuuuuuucuaguauaaau

SEQ ID NO: 399700 - RNA, 22 nt, Human
acauaauagguaccugaauaau

SEQ ID NO: 399701 - RNA, 20 nt, Human
agaagucagcucagaaguga

SEQ ID NO: 399702 - RNA, 22 nt, Human
auggaucagaaucccgggaggg

SEQ ID NO: 399703 - RNA, 22 nt, Human
cuacagaagaaacuaucacuau

SEQ ID NO: 399704 - RNA, 22 nt, Human
caugauaauuguuaacaaagua

SEQ ID NO: 399705 - RNA, 22 nt, Human
aggaaaaauaaggcagcagggc

SEQ ID NO: 399706 - RNA, 22 nt, Human
ugacuucaagguucagcaccuu

SEQ ID NO: 399707 - RNA, 22 nt, Human
auacagaaaaugaugcagaguu

SEQ ID NO: 399708 - RNA, 22 nt, Human
ucuggaucggguuccucagguc

SEQ ID NO: 399709 - RNA, 22 nt, Human
uuuccaaaggcuaaacucaguu

SEQ ID NO: 399710 - RNA, 20 nt, Human
gaaguccuguuauauccuuu

SEQ ID NO: 399711 - RNA, 21 nt, Human
ucaguaaaccuaaagauugua

SEQ ID NO: 399712 - RNA, 22 nt, Human
cagaauuuaaguggauuauucu

SEQ ID NO: 399713 - RNA, 22 nt, Human
uaacauguuaagaaauuagaua

SEQ ID NO: 399714 - RNA, 21 nt, Human
aauccuuaaugaggaguuggu

SEQ ID NO: 399715 - RNA, 22 nt, Human
uggauuagugcugaaaugaugg

SEQ ID NO: 399716 - RNA, 21 nt, Human
auacagaacauugauccaaga

SEQ ID NO: 399717 - RNA, 22 nt, Human
aguaaacaguaucuuuaguguc

SEQ ID NO: 399718 - RNA, 22 nt, Human
ugaaugaaugaauuaauagagu

SEQ ID NO: 399719 - RNA, 22 nt, Human
uacugaaaagccacaaggacca

SEQ ID NO: 399720 - RNA, 22 nt, Human
auuucaggagcaguuucagugg

SEQ ID NO: 399721 - RNA, 22 nt, Human
uacuaaacaucuggcauuaaau

SEQ ID NO: 399722 - RNA, 22 nt, Human
agucuuaacuaugcaaguacua

SEQ ID NO: 399723 - RNA, 22 nt, Human
caucagaauguuauggggggcu

SEQ ID NO: 399724 - RNA, 22 nt, Human
auccuuagaagggagugaggac

SEQ ID NO: 399725 - RNA, 22 nt, Human
uuauacaguuuauacuuagaau

SEQ ID NO: 399726 - RNA, 22 nt, Human
cauuucaaguaacagauugcuu

SEQ ID NO: 399727 - RNA, 22 nt, Human
cuacagaaaaucagccacaggc

SEQ ID NO: 399728 - RNA, 22 nt, Human
aaacaugaauagauauuaaaca

SEQ ID NO: 399729 - RNA, 22 nt, Human
caguccuucuccauuaaggcuc

SEQ ID NO: 399730 - RNA, 22 nt, Human
uacagaaaucacaucgcuuuga

SEQ ID NO: 399731 - RNA, 22 nt, Human
uuaauaaaguaugaauuggaaa

SEQ ID NO: 399732 - RNA, 22 nt, Human
ucucacuuuguugcccagacuu

SEQ ID NO: 399733 - RNA, 22 nt, Human
auauaauuguucugaaguguuu

SEQ ID NO: 399734 - RNA, 22 nt, Human
aaaaugcugggaaaguuggaau

SEQ ID NO: 399735 - RNA, 22 nt, Human
ucuucaauuuagaauggauuua

SEQ ID NO: 399736 - RNA, 22 nt, Human
uuauauaaagauaacuuuucuu

SEQ ID NO: 399737 - RNA, 22 nt, Human
guuauaaaugacugcaaaaguu

SEQ ID NO: 399738 - RNA, 22 nt, Human
gaaauauacauugcaggaagag

SEQ ID NO: 399739 - RNA, 23 nt, Human
uuaagacuggcugaacuuaguag

SEQ ID NO: 399740 - RNA, 22 nt, Human
auacacauguguaugugcaugc

SEQ ID NO: 399741 - RNA, 18 nt, Human
uacagauuauagauacau

SEQ ID NO: 399742 - RNA, 22 nt, Human
uuauuugcccauguuuagcaga

SEQ ID NO: 399743 - RNA, 22 nt, Human
ucagugugaggucuuccacccg

SEQ ID NO: 399744 - RNA, 22 nt, Human
uguugauuaguguuuagacuua

SEQ ID NO: 399745 - RNA, 22 nt, Human
uacuucauuccuuuguaaaaug

SEQ ID NO: 399746 - RNA, 22 nt, Human
uucagaaacccauugggucucu

SEQ ID NO: 399747 - RNA, 21 nt, Human
uccagaaaagaggucauuagc

SEQ ID NO: 399748 - RNA, 22 nt, Human
uaaggccaaacuauuauaguuc

SEQ ID NO: 399749 - RNA, 22 nt, Human
uuucaaagaguuguaaauuacu

SEQ ID NO: 399750 - RNA, 22 nt, Human
gcuccucuucucccacugaaug

SEQ ID NO: 399751 - RNA, 22 nt, Human
agcaauuuucccuuagucuuug

SEQ ID NO: 399752 - RNA, 22 nt, Human
uuagccaugcccuagaagagga

SEQ ID NO: 399753 - RNA, 22 nt, Human
aacauguaaccagcauucaucu

SEQ ID NO: 399754 - RNA, 23 nt, Human
uuccagaguccacaucugccacc

SEQ ID NO: 399755 - RNA, 22 nt, Human
aggacuuagaacauuauguacu

SEQ ID NO: 399756 - RNA, 22 nt, Human
aaagauuauggcauugaaauac

SEQ ID NO: 399757 - RNA, 22 nt, Human
ucaaaauuuuauuucucaagga

SEQ ID NO: 399758 - RNA, 22 nt, Human
uugaaauaucaaguuauuagug

SEQ ID NO: 399759 - RNA, 22 nt, Human
cauuuguacagaacagcuuuau

SEQ ID NO: 399760 - RNA, 22 nt, Human
aauuaauggaaaguaaggaagg

SEQ ID NO: 399761 - RNA, 22 nt, Human
uaaagacaaacccacuaggguu

SEQ ID NO: 399762 - RNA, 22 nt, Human
augaauaaaacauuuuaaucag

SEQ ID NO: 399763 - RNA, 22 nt, Human
uggauuagguacuaugaauaua

SEQ ID NO: 399764 - RNA, 22 nt, Human
aguccuuaugugguggagagag

SEQ ID NO: 399765 - RNA, 22 nt, Human
gaggaaccaaaucagcuugcac

SEQ ID NO: 399766 - RNA, 22 nt, Human
gaugaaaaauugcugugucaua

SEQ ID NO: 399767 - RNA, 23 nt, Human
augguuuaugucacacuuuugau

SEQ ID NO: 399768 - RNA, 22 nt, Human
aucuuucuccauauacaucuuu

SEQ ID NO: 399769 - RNA, 22 nt, Human
aagcagggcuuuaagcgguuuu

SEQ ID NO: 399770 - RNA, 22 nt, Human
guucuucaggcugugcucuaga

SEQ ID NO: 399771 - RNA, 22 nt, Human
aaugguuuucuagaacaugaaa

SEQ ID NO: 399772 - RNA, 22 nt, Human
cugggaaauggcuucgagcuca

SEQ ID NO: 399773 - RNA, 17 nt, Human
cucacggaggaugaauc

SEQ ID NO: 399774 - RNA, 22 nt, Human
uaguccuugcugggcacagagu

SEQ ID NO: 399775 - RNA, 22 nt, Human
gaaucucaaggcuugugaggau

SEQ ID NO: 399776 - RNA, 22 nt, Human
ugcaacuuguuuggagagaaag

SEQ ID NO: 399777 - RNA, 22 nt, Human
cauuugcagagggugacacucu

SEQ ID NO: 399778 - RNA, 22 nt, Human
acuuuuaaggggccuugauuua

SEQ ID NO: 399779 - RNA, 22 nt, Human
uaucagaacacauguuuugcag

SEQ ID NO: 399780 - RNA, 22 nt, Human
uagauuuuacuucugucauuac

SEQ ID NO: 399781 - RNA, 23 nt, Human
gagauuuagcagacaaagcucuu

SEQ ID NO: 399782 - RNA, 22 nt, Human
aacauguugcuuuaauaauauu

SEQ ID NO: 399783 - RNA, 22 nt, Human
agaccauggccauccuaggaaa

SEQ ID NO: 399784 - RNA, 22 nt, Human
auauacaaagggcaaccucgcu

SEQ ID NO: 399785 - RNA, 22 nt, Human
ggccagagaauaugccuuacgu

SEQ ID NO: 399786 - RNA, 22 nt, Human
cugaaugaggaaaagagugagg

SEQ ID NO: 399787 - RNA, 22 nt, Human
ucaggauguuaauauagcauua

SEQ ID NO: 399788 - RNA, 22 nt, Human
aauguuaauuuacugucuucau

SEQ ID NO: 399789 - RNA, 22 nt, Human
augaguucaauuguuucaguca

SEQ ID NO: 399790 - RNA, 22 nt, Human
uucaggaugcucagaguagucu

SEQ ID NO: 399791 - RNA, 22 nt, Human
uuugaaguguuauuucuaucac

SEQ ID NO: 399792 - RNA, 22 nt, Human
uauguguuugacacccugcaag

SEQ ID NO: 399793 - RNA, 20 nt, Human
cuguggaauuuuaccaugcg

SEQ ID NO: 399794 - RNA, 19 nt, Human
uugaaauuguuugauaugg

SEQ ID NO: 399795 - RNA, 22 nt, Human
caacuuugugugaccuagauag

SEQ ID NO: 399796 - RNA, 19 nt, Human
agcuuccauauucucuagu

SEQ ID NO: 399797 - RNA, 22 nt, Human
uucuuagaugauuaaugauggg

SEQ ID NO: 399798 - RNA, 22 nt, Human
ugaugaaaauaugauucugagg

SEQ ID NO: 399799 - RNA, 22 nt, Human
cuuuacauaaggauaaaccugg

SEQ ID NO: 399800 - RNA, 22 nt, Human
aaauucaauuaacuuucaugcu

SEQ ID NO: 399801 - RNA, 22 nt, Human
uguugaagauaaaguucucauu

SEQ ID NO: 399802 - RNA, 22 nt, Human
aaaaucugcuuccuuuuacaga

SEQ ID NO: 399803 - RNA, 22 nt, Human
augugaggcagcacggagauua

SEQ ID NO: 399804 - RNA, 22 nt, Human
aguccuuacaccuggaaccuau

SEQ ID NO: 399805 - RNA, 22 nt, Human
uaaagucaucuuuaaacaugcc

SEQ ID NO: 399806 - RNA, 22 nt, Human
gaggaaccacucugagaagcca

SEQ ID NO: 399807 - RNA, 22 nt, Human
ucagccagcaucagcuaagugc

SEQ ID NO: 399808 - RNA, 23 nt, Human
uacagaaggaguagucacuaaga

SEQ ID NO: 399809 - RNA, 22 nt, Human
uauaagaaauugccaaccuguu

SEQ ID NO: 399810 - RNA, 22 nt, Human
auguaaaucaagcagugcuggu

SEQ ID NO: 399811 - RNA, 22 nt, Human
augguuuuagaaucaggaaaaa

SEQ ID NO: 399812 - RNA, 22 nt, Human
auaaauaucacuguugucccuc

SEQ ID NO: 399813 - RNA, 22 nt, Human
caggaaugaggucguaaguguc

SEQ ID NO: 399814 - RNA, 22 nt, Human
uaacagaagaugaaacuucuuu

SEQ ID NO: 399815 - RNA, 22 nt, Human
acacauauucauauguacuuac

SEQ ID NO: 399816 - RNA, 19 nt, Human
ugccuggacaaaugugggg

SEQ ID NO: 399817 - RNA, 22 nt, Human
ugcuuuaacauaagauaucuuu

SEQ ID NO: 399818 - RNA, 22 nt, Human
uaagucaucacauugcagagau

SEQ ID NO: 399819 - RNA, 22 nt, Human
gcuuaauucuggcucaguuucc

SEQ ID NO: 399820 - RNA, 22 nt, Human
uucucuuuugugaugugagaug

SEQ ID NO: 399821 - RNA, 22 nt, Human
uacacauguuuggcaaguaugu

SEQ ID NO: 399822 - RNA, 22 nt, Human
uaagaaucgauguuuauuuaga

SEQ ID NO: 399823 - RNA, 22 nt, Human
ggcaauuucaugugguuuaaac

SEQ ID NO: 399824 - RNA, 22 nt, Human
aacuuugaggucacugaauucc

SEQ ID NO: 399825 - RNA, 22 nt, Human
uaaggccauuauggugggcccg

SEQ ID NO: 399826 - RNA, 23 nt, Human
uuucaacuccugccauuauuucu

SEQ ID NO: 399827 - RNA, 22 nt, Human
ggcauuuacauaaucuuauuua

SEQ ID NO: 399828 - RNA, 22 nt, Human
aaauuucaagcaaaguagcuau

SEQ ID NO: 399829 - RNA, 22 nt, Human
cucaagacugaucgcaguggaa

SEQ ID NO: 399830 - RNA, 18 nt, Human
uuugcaaaggaaguaugg

SEQ ID NO: 399831 - RNA, 22 nt, Human
cagucuucuaaccuagcagccu

SEQ ID NO: 399832 - RNA, 22 nt, Human
aaguccuugaagaaacaguucu

SEQ ID NO: 399833 - RNA, 22 nt, Human
cagucucucugaaguauuaaga

SEQ ID NO: 399834 - RNA, 22 nt, Human
gaauuucauuuguuuccuacca

SEQ ID NO: 399835 - RNA, 22 nt, Human
aaagucauuggaauauuaauga

SEQ ID NO: 399836 - RNA, 23 nt, Human
uuacagaaaguaugcuuuuguuu

SEQ ID NO: 399837 - RNA, 20 nt, Human
ccucaguguccuggacuggg

SEQ ID NO: 399838 - RNA, 22 nt, Human
cagaagucacccucagaauaac

SEQ ID NO: 399839 - RNA, 17 nt, Human
uaaguccuaguuauuuu

SEQ ID NO: 399840 - RNA, 22 nt, Human
guuauaaaaugcacaguuguuu

SEQ ID NO: 399841 - RNA, 22 nt, Human
uaauuauucuagucacauagca

SEQ ID NO: 399842 - RNA, 22 nt, Human
caggaugagaggcccagggaag

SEQ ID NO: 399843 - RNA, 22 nt, Human
uacaguaagaugaaauagcaau

SEQ ID NO: 399844 - RNA, 22 nt, Human
uuucaacuuguuugcuuccaua

SEQ ID NO: 399845 - RNA, 22 nt, Human
uuuauaaaauagacugggucua

SEQ ID NO: 399846 - RNA, 22 nt, Human
aaauaauguuaggccuuugcuc

SEQ ID NO: 399847 - RNA, 22 nt, Human
caguucuuaauaccaugugguu

SEQ ID NO: 399848 - RNA, 22 nt, Human
agaaguuguagguuugcauauu

SEQ ID NO: 399849 - RNA, 22 nt, Human
ucaaguuuaauugagauguuua

SEQ ID NO: 399850 - RNA, 22 nt, Human
uuauggcauauuccucauugua

SEQ ID NO: 399851 - RNA, 22 nt, Human
gcucacugccauucucuagaug

SEQ ID NO: 399852 - RNA, 22 nt, Human
cuaauacacccuauugcuuguu

SEQ ID NO: 399853 - RNA, 22 nt, Human
cacccaguugacuacaaagggg

SEQ ID NO: 399854 - RNA, 23 nt, Human
guaaaauacgcagugcaguguga

SEQ ID NO: 399855 - RNA, 22 nt, Human
aagcauuugugaaauucagaug

SEQ ID NO: 399856 - RNA, 22 nt, Human
uuugaaagagcugauacaugaa

SEQ ID NO: 399857 - RNA, 22 nt, Human
ucagguggcuuggagggggacg

SEQ ID NO: 399858 - RNA, 22 nt, Human
agucucugcugguugugccuau

SEQ ID NO: 399859 - RNA, 20 nt, Human
auacuuguuuucaggcuuuu

SEQ ID NO: 399860 - RNA, 22 nt, Human
caauuucaagauucuguucuuu

SEQ ID NO: 399861 - RNA, 22 nt, Human
auugaaagaguuuucugcugca

SEQ ID NO: 399862 - RNA, 22 nt, Human
aucaggaucugcaucauaagaa

SEQ ID NO: 399863 - RNA, 22 nt, Human
cuacuucuaaguacauggugau

SEQ ID NO: 399864 - RNA, 22 nt, Human
auuugcaaagucguaucuguga

SEQ ID NO: 399865 - RNA, 22 nt, Human
aauuccaggcagaaaugugagu

SEQ ID NO: 399866 - RNA, 22 nt, Human
acacaaguucuaaagauugcgc

SEQ ID NO: 399867 - RNA, 22 nt, Human
ucagaauaugcuaaugacauuu

SEQ ID NO: 399868 - RNA, 22 nt, Human
gaguccuuggcaucaucaguac

SEQ ID NO: 399869 - RNA, 22 nt, Human
uggauuaguuaagaaauguuag

SEQ ID NO: 399870 - RNA, 22 nt, Human
ugaauaauccacagucauucau

SEQ ID NO: 399871 - RNA, 22 nt, Human
aauuucaaacucuugcccucag

SEQ ID NO: 399872 - RNA, 22 nt, Human
acagauuuuugguaaauaauuu

SEQ ID NO: 399873 - RNA, 20 nt, Human
gaguuccccauuucuccugg

SEQ ID NO: 399874 - RNA, 21 nt, Human
auacagaagguggcaaaguac

SEQ ID NO: 399875 - RNA, 22 nt, Human
uugcaaaggggaauaaagcaau

SEQ ID NO: 399876 - RNA, 22 nt, Human
uuccuuagcagaccugguaucc

SEQ ID NO: 399877 - RNA, 18 nt, Human
ucauuuguuuugcaugaa

SEQ ID NO: 399878 - RNA, 18 nt, Human
auuguuaauagaguacuu

SEQ ID NO: 399879 - RNA, 22 nt, Human
ucuauaaauuaugcagucucag

SEQ ID NO: 399880 - RNA, 22 nt, Human
uguacaaucugaugauguaugg

SEQ ID NO: 399881 - RNA, 22 nt, Human
ucuuuaaugugauuguaauuau

SEQ ID NO: 399882 - RNA, 17 nt, Human
ugcuuaauuuugacugg

SEQ ID NO: 399883 - RNA, 22 nt, Human
ucugauaacucuggccccaggc

SEQ ID NO: 399884 - RNA, 22 nt, Human
augcuuuaaacuauaaauccac

SEQ ID NO: 399885 - RNA, 22 nt, Human
uagcauaacagguaagagugag

SEQ ID NO: 399886 - RNA, 22 nt, Human
uggcauuuuguucaguauaugg

SEQ ID NO: 399887 - RNA, 22 nt, Human
cagcccagagauguuaucuagu

SEQ ID NO: 399888 - RNA, 22 nt, Human
ugauuauauucuaacuucauaa

SEQ ID NO: 399889 - RNA, 22 nt, Human
gacaauacagaaagggacaugc

SEQ ID NO: 399890 - RNA, 22 nt, Human
acuuugaaagccuuggccccgg

SEQ ID NO: 399891 - RNA, 22 nt, Human
uacaguauguucuugaauuugg

SEQ ID NO: 399892 - RNA, 22 nt, Human
uucuucaacaaggacacuguua

SEQ ID NO: 399893 - RNA, 22 nt, Human
cucuucuugccugaugaggcag

SEQ ID NO: 399894 - RNA, 22 nt, Human
ugcagguaggccugacuuccag

SEQ ID NO: 399895 - RNA, 22 nt, Human
agccauuuuccugaaauauaac

SEQ ID NO: 399896 - RNA, 22 nt, Human
uugaaagucacaauggcauuaa

SEQ ID NO: 399897 - RNA, 22 nt, Human
aucaaaaccuugacuuuuaaug

SEQ ID NO: 399898 - RNA, 22 nt, Human
acugguuuuccagguuacuucu

SEQ ID NO: 399899 - RNA, 22 nt, Human
uguucuagcaacacaguuuugg

SEQ ID NO: 399900 - RNA, 22 nt, Human
aagacagugaucucugagagau

SEQ ID NO: 399901 - RNA, 22 nt, Human
augguauugcaacaacugucau

SEQ ID NO: 399902 - RNA, 22 nt, Human
agauaucaccaguuuuacauac

SEQ ID NO: 399903 - RNA, 23 nt, Human
auguuauuauuagcagucuugcc

SEQ ID NO: 399904 - RNA, 22 nt, Human
ugauugaagaggugaggaaguu

SEQ ID NO: 399905 - RNA, 22 nt, Human
aauaauaagauacuaagggagu

SEQ ID NO: 399906 - RNA, 22 nt, Human
ugugaaagcaagucuaguucuc

SEQ ID NO: 399907 - RNA, 22 nt, Human
cauggcuucuaagugauaacgu

SEQ ID NO: 399908 - RNA, 22 nt, Human
uaaagacaauaggaaaguuguu

SEQ ID NO: 399909 - RNA, 22 nt, Human
agccaacuaauuaaacaacuuu

SEQ ID NO: 399910 - RNA, 22 nt, Human
uuuguuuacucauucauugaug

SEQ ID NO: 399911 - RNA, 18 nt, Human
aauuuccauaugaauugc

SEQ ID NO: 399912 - RNA, 22 nt, Human
uuaaagauucugaggcugauua

SEQ ID NO: 399913 - RNA, 22 nt, Human
cucuaacaccacagugugguuu

SEQ ID NO: 399914 - RNA, 22 nt, Human
acaacauucuuaaauacacuga

SEQ ID NO: 399915 - RNA, 19 nt, Human
aucugccuguuaucacaua

SEQ ID NO: 399916 - RNA, 22 nt, Human
auagacauuuugcauucaagca

SEQ ID NO: 399917 - RNA, 22 nt, Human
uauuccaaaauaguuaagcacu

SEQ ID NO: 399918 - RNA, 22 nt, Human
uucauuuguugacagagacaug

SEQ ID NO: 399919 - RNA, 22 nt, Human
uccuucuuugacaaguggcaga

SEQ ID NO: 399920 - RNA, 22 nt, Human
uaaaugauuuauguaugugaaa

SEQ ID NO: 399921 - RNA, 22 nt, Human
ccauaauauuaaaugcuuuugu

SEQ ID NO: 399922 - RNA, 22 nt, Human
gcagaauuuggggguaaccuuu

SEQ ID NO: 399923 - RNA, 22 nt, Human
aucauaaaccacuuuguaaucu

SEQ ID NO: 399924 - RNA, 20 nt, Human
ccagaagagaugaucaucca

SEQ ID NO: 399925 - RNA, 22 nt, Human
accauguguuuuacacauggua

SEQ ID NO: 399926 - RNA, 22 nt, Human
acagcauugcuccaucucaaga

SEQ ID NO: 399927 - RNA, 23 nt, Human
uuaagacuggcugaacuuaguag

SEQ ID NO: 399928 - RNA, 22 nt, Human
acaagcaugggcuuugacauca

SEQ ID NO: 399929 - RNA, 22 nt, Human
ugaaagcagcaccaauaccauu

SEQ ID NO: 399930 - RNA, 22 nt, Human
gauucuuacuucuaagcaagcu

SEQ ID NO: 399931 - RNA, 23 nt, Human
uggacgccgacuuuggaggcgcu

SEQ ID NO: 399932 - RNA, 19 nt, Human
gcaggaaaugagugauugc

SEQ ID NO: 399933 - RNA, 22 nt, Human
uaugaaauuuaaacacagauca

SEQ ID NO: 399934 - RNA, 22 nt, Human
gaugaaaaaagacgagcauaua

SEQ ID NO: 399935 - RNA, 22 nt, Human
acacuaaugagaaaggaauuaa

SEQ ID NO: 399936 - RNA, 22 nt, Human
acaaaauuaugaagaggccuug

SEQ ID NO: 399937 - RNA, 22 nt, Human
caguccuuauuccuauauuccu

SEQ ID NO: 399938 - RNA, 20 nt, Human
ugcaggaauuugcauuccuu

SEQ ID NO: 399939 - RNA, 22 nt, Human
guucuugccagcauccucaggu

SEQ ID NO: 399940 - RNA, 22 nt, Human
auuuuacuacuccaauuaauga

SEQ ID NO: 399941 - RNA, 22 nt, Human
uguguacacagauaguaauggc

SEQ ID NO: 399942 - RNA, 22 nt, Human
cagugcugggcagaggagagcg

SEQ ID NO: 399943 - RNA, 21 nt, Human
aauccuuaaugaggaguuggu

SEQ ID NO: 399944 - RNA, 20 nt, Human
aguacaauguaugauucaga

SEQ ID NO: 399945 - RNA, 22 nt, Human
uugugaguagugccgcaauaaa

SEQ ID NO: 399946 - RNA, 22 nt, Human
auuuaguguauucuaauaugug

SEQ ID NO: 399947 - RNA, 22 nt, Human
gagcccagcuugcacauggagc

SEQ ID NO: 399948 - RNA, 22 nt, Human
caggauggucuucauuuggcuc

SEQ ID NO: 399949 - RNA, 22 nt, Human
aucagaaaauacccaguguuua

SEQ ID NO: 399950 - RNA, 19 nt, Human
aaaaacuuaguccagaaag

SEQ ID NO: 399951 - RNA, 22 nt, Human
acacauauauacauauuugugc

SEQ ID NO: 399952 - RNA, 22 nt, Human
uuagacaagggcuccuuaaaag

SEQ ID NO: 399953 - RNA, 22 nt, Human
cauuuguaguaucuguuuauau

SEQ ID NO: 399954 - RNA, 22 nt, Human
cuucuucaauagcaagcgcaua

SEQ ID NO: 399955 - RNA, 22 nt, Human
aauugcuaaagauuauguuuuc

SEQ ID NO: 399956 - RNA, 22 nt, Human
cagaaaucauugugaugacagg

SEQ ID NO: 399957 - RNA, 21 nt, Human
auggcuuuuuuaaagcuugug

SEQ ID NO: 399958 - RNA, 22 nt, Human
uucaaacauucaaauaaaccgg

SEQ ID NO: 399959 - RNA, 18 nt, Human
cucaccauucugcccaau

SEQ ID NO: 399960 - RNA, 22 nt, Human
uucuucaaaacaacacuggccu

SEQ ID NO: 399961 - RNA, 22 nt, Human
cagugauguuucugcaucagag

SEQ ID NO: 399962 - RNA, 22 nt, Human
uaggcaacaugucgaauacugu

SEQ ID NO: 399963 - RNA, 22 nt, Human
auugaaagauaggcuacugugg

SEQ ID NO: 399964 - RNA, 22 nt, Human
auggauuuggaugagauuacuu

SEQ ID NO: 399965 - RNA, 22 nt, Human
cuuuaacaaaugacucuugucu

SEQ ID NO: 399966 - RNA, 22 nt, Human
caaagccaggcuuucuaaugua

SEQ ID NO: 399967 - RNA, 22 nt, Human
guucuucaaagugacaacuaaa

SEQ ID NO: 399968 - RNA, 22 nt, Human
cuugaaguugcaaaacauuaau

SEQ ID NO: 399969 - RNA, 22 nt, Human
augaaacagugaauuagucaag

SEQ ID NO: 399970 - RNA, 22 nt, Human
gaaggccacuuuguguugagaa

SEQ ID NO: 399971 - RNA, 22 nt, Human
cauuuccacuucugaaaacugg

SEQ ID NO: 399972 - RNA, 22 nt, Human
uuacagaacugcccuaguuggc

SEQ ID NO: 399973 - RNA, 22 nt, Human
aaagcuaugaggcaugcauuuc

SEQ ID NO: 399974 - RNA, 22 nt, Human
cuucuuaaaguugucacagcug

SEQ ID NO: 399975 - RNA, 22 nt, Human
caauuucacuaaugaugugggg

SEQ ID NO: 399976 - RNA, 22 nt, Human
uuuccaaagguggcaggaacaa

SEQ ID NO: 399977 - RNA, 22 nt, Human
uugagaagaauguguugaguuu

SEQ ID NO: 399978 - RNA, 22 nt, Human
uaguccuuuaucaaacauuuau

SEQ ID NO: 399979 - RNA, 22 nt, Human
aaaucucaguguucuaagcauu

SEQ ID NO: 399980 - RNA, 22 nt, Human
acuucacacagcaaauuuaucu

SEQ ID NO: 399981 - RNA, 18 nt, Human
acucaggaaaugaugaca

SEQ ID NO: 399982 - RNA, 22 nt, Human
auauuuaaacaggguaccaaua

SEQ ID NO: 399983 - RNA, 22 nt, Human
caaggccaagguuuugugaacu

SEQ ID NO: 399984 - RNA, 22 nt, Human
uuugaagucaaagauugauucc

SEQ ID NO: 399985 - RNA, 22 nt, Human
uugggcucaggaguuugagacc

SEQ ID NO: 399986 - RNA, 22 nt, Human
caaggccacugcucagguuucc

SEQ ID NO: 399987 - RNA, 22 nt, Human
uuuaacuuaaucugcuugauga

SEQ ID NO: 399988 - RNA, 23 nt, Human
uucuuucaagaaguucacagugc

SEQ ID NO: 399989 - RNA, 22 nt, Human
gauggcagguaguggucucauc

SEQ ID NO: 399990 - RNA, 22 nt, Human
gaggaaccaaucugugauauuc

SEQ ID NO: 399991 - RNA, 22 nt, Human
ugcagagaagaggacaguucua

SEQ ID NO: 399992 - RNA, 22 nt, Human
ucuccuccuuuuuucaacauag

SEQ ID NO: 399993 - RNA, 20 nt, Human
aaacauucauguacaaguga

SEQ ID NO: 399994 - RNA, 22 nt, Human
aauaaccuuacuuauuacaugg

SEQ ID NO: 399995 - RNA, 23 nt, Human
gaaucaguggcuaacaaggaaac

SEQ ID NO: 399996 - RNA, 19 nt, Human
caagugaagccugggaugg

SEQ ID NO: 399997 - RNA, 22 nt, Human
ugucauaaucaguuuugcaugu

SEQ ID NO: 399998 - RNA, 22 nt, Human
uaagaaucggucgcaacagagg

SEQ ID NO: 399999 - RNA, 22 nt, Human
gaagugaagguuacucuagauu

SEQ ID NO: 400000 - RNA, 22 nt, Human
uucauagaucucaauuuugagg

SEQ ID NO: 400001 - RNA, 22 nt, Human
aaaggccacuugaaggauuuuu

SEQ ID NO: 400002 - RNA, 22 nt, Human
gaguccuuaauacacuggugga

SEQ ID NO: 400003 - RNA, 19 nt, Human
cuucuucuuggcagccaag

SEQ ID NO: 400004 - RNA, 22 nt, Human
ucucucuucaacccuuaacuag

SEQ ID NO: 400005 - RNA, 22 nt, Human
uaccauuucauucuuuccucau

SEQ ID NO: 400006 - RNA, 21 nt, Human
cucaaagaccaaaaguguaga

SEQ ID NO: 400007 - RNA, 22 nt, Human
uccauuuuguagguaugcuaca

SEQ ID NO: 400008 - RNA, 20 nt, Human
ucauuguguugccaauuccc

SEQ ID NO: 400009 - RNA, 22 nt, Human
uaauauauuucugcuaagcuca

SEQ ID NO: 400010 - RNA, 22 nt, Human
aagccagauuucacucuuaauu

SEQ ID NO: 400011 - RNA, 22 nt, Human
caaaucuauauguugauauucu

SEQ ID NO: 400012 - RNA, 22 nt, Human
uaucaucuuguugucaugcagc

SEQ ID NO: 400013 - RNA, 22 nt, Human
acaugcuuguuuuucacaaccu

SEQ ID NO: 400014 - RNA, 22 nt, Human
aauugcaauuuucuuaaggucu

SEQ ID NO: 400015 - RNA, 22 nt, Human
aggcagaccaugaaucaugacc

SEQ ID NO: 400016 - RNA, 22 nt, Human
aaacuuuguagagaaugcuggc

SEQ ID NO: 400017 - RNA, 22 nt, Human
auguuacacauaggcauaaaug

SEQ ID NO: 400018 - RNA, 22 nt, Human
cagaguucaaagccugcuggga

SEQ ID NO: 400019 - RNA, 19 nt, Human
uggagacugagagugagca

SEQ ID NO: 400020 - RNA, 22 nt, Human
uuuaggcaugcaguucuauuua

SEQ ID NO: 400021 - RNA, 22 nt, Human
caugauaauuguuaacaaagua

SEQ ID NO: 400022 - RNA, 22 nt, Human
auuauagaggguuacaguuaau

SEQ ID NO: 400023 - RNA, 22 nt, Human
gaucagaauucuuguguguuuc

SEQ ID NO: 400024 - RNA, 22 nt, Human
ccuucuucuguguggcccaaga

SEQ ID NO: 400025 - RNA, 22 nt, Human
aaucuuuaaggacucagucucu

SEQ ID NO: 400026 - RNA, 22 nt, Human
caggguggcacaucacagcauu

SEQ ID NO: 400027 - RNA, 22 nt, Human
auucuuaauugccaugcuguau

SEQ ID NO: 400028 - RNA, 22 nt, Human
ucuaaacacgucucuuugaaua

SEQ ID NO: 400029 - RNA, 22 nt, Human
aaugggauaauuguucauggga

SEQ ID NO: 400030 - RNA, 22 nt, Human
uugaauaauauguucaggagga

SEQ ID NO: 400031 - RNA, 22 nt, Human
aauacauguuuucuacuauucu

SEQ ID NO: 400032 - RNA, 22 nt, Human
acaacuuucuggguuaucugau

SEQ ID NO: 400033 - RNA, 22 nt, Human
aucagaaaaacauaauguuauu

SEQ ID NO: 400034 - RNA, 22 nt, Human
gaaauuauugcuagagacugca

SEQ ID NO: 400035 - RNA, 22 nt, Human
acacacucaauugcauaagcac

SEQ ID NO: 400036 - RNA, 22 nt, Human
uuguaaauaguaguaagaugcc

SEQ ID NO: 400037 - RNA, 23 nt, Human
aguacaauaaguauaauucuuuc

SEQ ID NO: 400038 - RNA, 22 nt, Human
acuauaaccuguuagaauagau

SEQ ID NO: 400039 - RNA, 22 nt, Human
auagcuuucuuaaauauauaaa

SEQ ID NO: 400040 - RNA, 22 nt, Human
gcaucuaaacuugcaucauugu

SEQ ID NO: 400041 - RNA, 22 nt, Human
ugaagaauaagauagauggagc

SEQ ID NO: 400042 - RNA, 22 nt, Human
uaauuucagugcaagcucacgg

SEQ ID NO: 400043 - RNA, 22 nt, Human
cuucuucauaggcaguccuguu

SEQ ID NO: 400044 - RNA, 22 nt, Human
acaugcauacacguacauaccu

SEQ ID NO: 400045 - RNA, 22 nt, Human
uugaauaauguguauguuguua

SEQ ID NO: 400046 - RNA, 22 nt, Human
uuuccauauuuaaucaaaauaa

SEQ ID NO: 400047 - RNA, 22 nt, Human
uuuacagaugaggaaacugaga

SEQ ID NO: 400048 - RNA, 22 nt, Human
gccauuuucugucuuguuuauu

SEQ ID NO: 400049 - RNA, 22 nt, Human
uaucagaaagauauuacugggg

SEQ ID NO: 400050 - RNA, 22 nt, Human
gaaauauacauugcaggaagag

SEQ ID NO: 400051 - RNA, 22 nt, Human
uucaacccaaguucuccauuuu

SEQ ID NO: 400052 - RNA, 22 nt, Human
aucuccaggcauuucaagagac

SEQ ID NO: 400053 - RNA, 22 nt, Human
agaucugaggguccaagggagg

SEQ ID NO: 400054 - RNA, 22 nt, Human
acucaggaaaugaagacugguu

SEQ ID NO: 400055 - RNA, 22 nt, Human
accuugaugccuuuccaagaug

SEQ ID NO: 400056 - RNA, 22 nt, Human
aguguuuauauuauggaaauau

SEQ ID NO: 400057 - RNA, 22 nt, Human
aggcacagagaaugcccuccau

SEQ ID NO: 400058 - RNA, 22 nt, Human
uucagugucaauuuuuaaauau

SEQ ID NO: 400059 - RNA, 22 nt, Human
aggaaacuccccuacaucucaa

SEQ ID NO: 400060 - RNA, 22 nt, Human
ucuggaucucccucauccuggg

SEQ ID NO: 400061 - RNA, 22 nt, Human
ucauaaaguuacccaaauuuua

SEQ ID NO: 400062 - RNA, 22 nt, Human
gaaagccauagcccagcuuuac

SEQ ID NO: 400063 - RNA, 22 nt, Human
uguccuuauaagaaaaggaaau

SEQ ID NO: 400064 - RNA, 22 nt, Human
agucauuuugccagucuucagg

SEQ ID NO: 400065 - RNA, 22 nt, Human
uggaguucucaggugagggcuu

SEQ ID NO: 400066 - RNA, 22 nt, Human
gaucauuuugaugcccuuuuag

SEQ ID NO: 400067 - RNA, 22 nt, Human
ugcuggcuacauuauugcuguc

SEQ ID NO: 400068 - RNA, 21 nt, Human
cuacagaagcucuccuaucca

SEQ ID NO: 400069 - RNA, 20 nt, Human
aucuucuuggccagcuugcu

SEQ ID NO: 400070 - RNA, 22 nt, Human
cuuaacauccugcauuuuucuu

SEQ ID NO: 400071 - RNA, 20 nt, Human
uucacagaggacucagguca

SEQ ID NO: 400072 - RNA, 22 nt, Human
aguuugaaaguauugacagaag

SEQ ID NO: 400073 - RNA, 22 nt, Human
guaucacuuuugagagugagaa

SEQ ID NO: 400074 - RNA, 22 nt, Human
agaaaagaggcuuucuaagcau

SEQ ID NO: 400075 - RNA, 22 nt, Human
gagggucccugcucagggccag

SEQ ID NO: 400076 - RNA, 22 nt, Human
uuagcaucugcuguaagcuuau

SEQ ID NO: 400077 - RNA, 22 nt, Human
uagaacauaagucauucauuug

SEQ ID NO: 400078 - RNA, 22 nt, Human
gucacuguauccagguuccagc

SEQ ID NO: 400079 - RNA, 22 nt, Human
uuaugaaggaucagguacuugg

SEQ ID NO: 400080 - RNA, 21 nt, Human
cuugaaagguagagucuacag

SEQ ID NO: 400081 - RNA, 21 nt, Human
uguccuuaaugcaauguccuu

SEQ ID NO: 400082 - RNA, 22 nt, Human
aaagccaucaguaaaaugauuu

SEQ ID NO: 400083 - RNA, 22 nt, Human
ucuucauuuuauagcaucugug

SEQ ID NO: 400084 - RNA, 22 nt, Human
uuuguuaaauauuuauugagug

SEQ ID NO: 400085 - RNA, 22 nt, Human
aggccagaugucgggcuagaag

SEQ ID NO: 400086 - RNA, 18 nt, Human
uacaggaaaaguguuaca

SEQ ID NO: 400087 - RNA, 22 nt, Human
uugcagcuucgagucuaucugu

SEQ ID NO: 400088 - RNA, 22 nt, Human
gcaacuuucaagcaccaugggg

SEQ ID NO: 400089 - RNA, 22 nt, Human
gaaggccauuuuuagguagaau

SEQ ID NO: 400090 - RNA, 22 nt, Human
auggcauuugaaucugucuuuu

SEQ ID NO: 400091 - RNA, 22 nt, Human
ugagauuuguuuuauaaaauag

SEQ ID NO: 400092 - RNA, 22 nt, Human
agaccaugggcucugaagagca

SEQ ID NO: 400093 - RNA, 21 nt, Human
auacauucuauuaagcauuua

SEQ ID NO: 400094 - RNA, 22 nt, Human
aaccauuugccauuaucuuaag

SEQ ID NO: 400095 - RNA, 22 nt, Human
guuaggcaauaccucuuacacc

SEQ ID NO: 400096 - RNA, 22 nt, Human
ugugaauacagcaugugcuucu

SEQ ID NO: 400097 - RNA, 22 nt, Human
gauugaaacauaggcagucgag

SEQ ID NO: 400098 - RNA, 22 nt, Human
uuucuucucgacaccuuauccc

SEQ ID NO: 400099 - RNA, 22 nt, Human
ucaaaauuucagcacuagcccu

SEQ ID NO: 400100 - RNA, 22 nt, Human
cacaaaugugcagaaaugugag

SEQ ID NO: 400101 - RNA, 22 nt, Human
aaucagaacgcucgaucuucgg

SEQ ID NO: 400102 - RNA, 22 nt, Human
auuauuauuguugauguuaggg

SEQ ID NO: 400103 - RNA, 22 nt, Human
agagauucauguuuacuguagg

SEQ ID NO: 400104 - RNA, 22 nt, Human
agaccaagaaaggaugaggauc

SEQ ID NO: 400105 - RNA, 22 nt, Human
gaauuucaaagagguuaagagg

SEQ ID NO: 400106 - RNA, 22 nt, Human
augaaaauucuaugcaggccag

SEQ ID NO: 400107 - RNA, 22 nt, Human
ucauuuaauaauuuuugaguag

SEQ ID NO: 400108 - RNA, 22 nt, Human
guuauaaaugacugcaaaaguu

SEQ ID NO: 400109 - RNA, 22 nt, Human
auuucaggauagccuaguuuug

SEQ ID NO: 400110 - RNA, 22 nt, Human
acuuauuagcugugugaccuug

SEQ ID NO: 400111 - RNA, 22 nt, Human
acaugucuguaauuauuuuagg

SEQ ID NO: 400112 - RNA, 22 nt, Human
cugccuccugccgugcagcuuc

SEQ ID NO: 400113 - RNA, 21 nt, Human
ucucugguuggaguugugcca

SEQ ID NO: 400114 - RNA, 22 nt, Human
agcauuuaagcuucugcaaagc

SEQ ID NO: 400115 - RNA, 22 nt, Human
ucaguguauggagugcuggauu

SEQ ID NO: 400116 - RNA, 22 nt, Human
ugaauaauuaugggaguccuaa

SEQ ID NO: 400117 - RNA, 22 nt, Human
uuugcaaauaccaugaaacuug

SEQ ID NO: 400118 - RNA, 22 nt, Human
uugaaaguccuucuugaguuac

SEQ ID NO: 400119 - RNA, 21 nt, Human
augugaaauaucaucagagca

SEQ ID NO: 400120 - RNA, 20 nt, Human
ucuuauacagaaaacauuuu

SEQ ID NO: 400121 - RNA, 22 nt, Human
augcuuaaccuugguguacaau

SEQ ID NO: 400122 - RNA, 22 nt, Human
uuauacauguguuuugagauga

SEQ ID NO: 400123 - RNA, 22 nt, Human
uaaagacaauuucgagcuguag

SEQ ID NO: 400124 - RNA, 22 nt, Human
cuguauuucccacauucucuau

SEQ ID NO: 400125 - RNA, 22 nt, Human
ucucaggaagugauauugagac

SEQ ID NO: 400126 - RNA, 22 nt, Human
aauguuuuaaaagagauugaga

SEQ ID NO: 400127 - RNA, 22 nt, Human
uuugaaagggacaaagucacug

SEQ ID NO: 400128 - RNA, 22 nt, Human
aaguguuaaagacuugaacacu

SEQ ID NO: 400129 - RNA, 22 nt, Human
uucaucaauguguuuaauaaug

SEQ ID NO: 400130 - RNA, 22 nt, Human
caaggccaguucaccaagggca

SEQ ID NO: 400131 - RNA, 22 nt, Human
ccuucaaucuuaagucagccca

SEQ ID NO: 400132 - RNA, 22 nt, Human
aacaucuacuaagugccaggca

SEQ ID NO: 400133 - RNA, 23 nt, Human
cuuucauugugguuucacagagc

SEQ ID NO: 400134 - RNA, 22 nt, Human
cagcacagggacaauagcagau

SEQ ID NO: 400135 - RNA, 22 nt, Human
aguccuuagaacacuguaucug

SEQ ID NO: 400136 - RNA, 22 nt, Human
gcucacugcaaccucugcuucc

SEQ ID NO: 400137 - RNA, 22 nt, Human
ucacagaagagauauugacaga

SEQ ID NO: 400138 - RNA, 22 nt, Human
cuggauuuaggacuaguccaag

SEQ ID NO: 400139 - RNA, 22 nt, Human
ugagagggcccagagcacacca

SEQ ID NO: 400140 - RNA, 22 nt, Human
aauauuaucaaaagcuuuuuca

SEQ ID NO: 400141 - RNA, 22 nt, Human
cagagggcucuuggcugccugc

SEQ ID NO: 400142 - RNA, 22 nt, Human
auccaugaucaauuuauuacua

SEQ ID NO: 400143 - RNA, 22 nt, Human
aauacaagauuuauaguuguuu

SEQ ID NO: 400144 - RNA, 22 nt, Human
ucaaguuucucucagauuaugg

SEQ ID NO: 400145 - RNA, 22 nt, Human
uauguuaagugggauaaucaaa

SEQ ID NO: 400146 - RNA, 20 nt, Human
gaguccuuaugggcugaggu

SEQ ID NO: 400147 - RNA, 22 nt, Human
gaguccuucuggcuggcaggau

SEQ ID NO: 400148 - RNA, 22 nt, Human
aaaugucagaggaacauauuga

SEQ ID NO: 400149 - RNA, 22 nt, Human
gaucagaauuuacuuauaauug

SEQ ID NO: 400150 - RNA, 22 nt, Human
ccuucauugcaucuuuaagaga

SEQ ID NO: 400151 - RNA, 22 nt, Human
uucaauucuaaacuaauauucu

SEQ ID NO: 400152 - RNA, 22 nt, Human
ucacaucucccuggaggacaca

SEQ ID NO: 400153 - RNA, 22 nt, Human
uacugugacagaguacuuaaac

SEQ ID NO: 400154 - RNA, 21 nt, Human
ucuauucauuacaguuauuug

SEQ ID NO: 400155 - RNA, 22 nt, Human
cacaagaaauaagcugccuuuc

SEQ ID NO: 400156 - RNA, 22 nt, Human
cuggaucaugcauugcuugucc

SEQ ID NO: 400157 - RNA, 22 nt, Human
aaaauccugcugacucgagaug

SEQ ID NO: 400158 - RNA, 22 nt, Human
ucaaaauuagugaccaaaggca

SEQ ID NO: 400159 - RNA, 22 nt, Human
uaucaaaggcuaugugauuuuu

SEQ ID NO: 400160 - RNA, 22 nt, Human
uugauccaguugaaagugauga

SEQ ID NO: 400161 - RNA, 22 nt, Human
uuuggacaaguuacugguuucc

SEQ ID NO: 400162 - RNA, 22 nt, Human
caggccagggagaauaugaagc

SEQ ID NO: 400163 - RNA, 22 nt, Human
caagaugugccuaaucagaccu

SEQ ID NO: 400164 - RNA, 22 nt, Human
acaaauguggacauggauaaug

SEQ ID NO: 400165 - RNA, 22 nt, Human
auguauuucuauguagugaaga

SEQ ID NO: 400166 - RNA, 22 nt, Human
uuuuccagauuggacuuagucc

SEQ ID NO: 400167 - RNA, 22 nt, Human
uugguuuacuaggauucaaauu

SEQ ID NO: 400168 - RNA, 20 nt, Human
agcauuugaaauaugacuau

SEQ ID NO: 400169 - RNA, 22 nt, Human
cuucuucacacuggucugaagc

SEQ ID NO: 400170 - RNA, 22 nt, Human
aaccauuugcaguuacugagac

SEQ ID NO: 400171 - RNA, 20 nt, Human
ucaggaugugcugagugaag

SEQ ID NO: 400172 - RNA, 22 nt, Human
uuugaaaggugucgagaugugu

SEQ ID NO: 400173 - RNA, 22 nt, Human
gaaggccaagaggcuccaagau

SEQ ID NO: 400174 - RNA, 22 nt, Human
augacaaaagaagacaugaggu

SEQ ID NO: 400175 - RNA, 22 nt, Human
auaaaauuugcuacuguuaaau

SEQ ID NO: 400176 - RNA, 22 nt, Human
cauaagaagguaacauccuuaa

SEQ ID NO: 400177 - RNA, 22 nt, Human
uuuacaaccucauauucugaug

SEQ ID NO: 400178 - RNA, 22 nt, Human
uuccaaaccucaaauaauuaau

SEQ ID NO: 400179 - RNA, 22 nt, Human
gaaagccaucuggcugcuggga

SEQ ID NO: 400180 - RNA, 22 nt, Human
ugaaugaacuaaaucauaguuc

SEQ ID NO: 400181 - RNA, 22 nt, Human
gaggcugaggguuagagaguca

SEQ ID NO: 400182 - RNA, 21 nt, Human
gaguccuuccaauguccucag

SEQ ID NO: 400183 - RNA, 22 nt, Human
auacuuucugaccaauuaauug

SEQ ID NO: 400184 - RNA, 22 nt, Human
uacugaaaagccacaaggacca

SEQ ID NO: 400185 - RNA, 22 nt, Human
uuuaggcagcuacauacuaacu

SEQ ID NO: 400186 - RNA, 22 nt, Human
uauuuccauguuagaacuaagu

SEQ ID NO: 400187 - RNA, 22 nt, Human
aucauucuauuguugagcugcc

SEQ ID NO: 400188 - RNA, 22 nt, Human
uugauagguuuuauguauaguu

SEQ ID NO: 400189 - RNA, 22 nt, Human
aguccaugguucugacucaucu

SEQ ID NO: 400190 - RNA, 22 nt, Human
cuggacucugcagagaaaagua

SEQ ID NO: 400191 - RNA, 23 nt, Human
ucucaagaggaagcagggcucau

SEQ ID NO: 400192 - RNA, 22 nt, Human
aaaugcauggcuguuuuaaagc

SEQ ID NO: 400193 - RNA, 22 nt, Human
aacuggauuaacuggcucaaau

SEQ ID NO: 400194 - RNA, 22 nt, Human
gaauaaucaugaaauucaguga

SEQ ID NO: 400195 - RNA, 22 nt, Human
aauuccaggaugcaggaggugc

SEQ ID NO: 400196 - RNA, 22 nt, Human
ucugaaaugcaaauuugacuga

SEQ ID NO: 400197 - RNA, 22 nt, Human
aaguguauauaugacuuauaaa

SEQ ID NO: 400198 - RNA, 22 nt, Human
auauuauucuaguaacagugau

SEQ ID NO: 400199 - RNA, 22 nt, Human
acuggaugaggggaaagagaca

SEQ ID NO: 400200 - RNA, 22 nt, Human
ugugugaauggauuauucuauu

SEQ ID NO: 400201 - RNA, 22 nt, Human
agacucaagacugcagaagacg

SEQ ID NO: 400202 - RNA, 22 nt, Human
uaaacauuuguuauucuuguuu

SEQ ID NO: 400203 - RNA, 22 nt, Human
guuuaauaauguugaauuacua

SEQ ID NO: 400204 - RNA, 22 nt, Human
cacaauguauauguauaucaaa

SEQ ID NO: 400205 - RNA, 22 nt, Human
aaagccaugaauguuauagagg

SEQ ID NO: 400206 - RNA, 20 nt, Human
uauuccaaggguagagaaaa

SEQ ID NO: 400207 - RNA, 23 nt, Human
ucuauacauacugcagccucugg

SEQ ID NO: 400208 - RNA, 22 nt, Human
ugaaugaguuuggcugcuguuc

SEQ ID NO: 400209 - RNA, 22 nt, Human
auggcuuaugguaaauauuucu

SEQ ID NO: 400210 - RNA, 22 nt, Human
ucugggaaguccucugucaugc

SEQ ID NO: 400211 - RNA, 22 nt, Human
caguccuuucugaaauccuaua

SEQ ID NO: 400212 - RNA, 22 nt, Human
augguuuaguuagggcuuuuca

SEQ ID NO: 400213 - RNA, 21 nt, Human
ucucugugucuuuaagcugga

SEQ ID NO: 400214 - RNA, 22 nt, Human
ugaaggcccuaucuccauauac

SEQ ID NO: 400215 - RNA, 22 nt, Human
auguucaaacaaguuaaugcca

SEQ ID NO: 400216 - RNA, 22 nt, Human
gaugaucaucuguaaaguuaga

SEQ ID NO: 400217 - RNA, 22 nt, Human
gaaagaggaaggagauguauua

SEQ ID NO: 400218 - RNA, 22 nt, Human
aagaacuuccuaauauauuuuc

SEQ ID NO: 400219 - RNA, 22 nt, Human
uuucauaauacuguacaugaaa

SEQ ID NO: 400220 - RNA, 22 nt, Human
ccuggaucuaaggaagcuggga

SEQ ID NO: 400221 - RNA, 22 nt, Human
cucaggaugaaagucaugguga

SEQ ID NO: 400222 - RNA, 22 nt, Human
auuucagauucagaaauguagg

SEQ ID NO: 400223 - RNA, 22 nt, Human
cauucauuuaugaaauaucuau

SEQ ID NO: 400224 - RNA, 22 nt, Human
aucccaugagaccacguuggcu

SEQ ID NO: 400225 - RNA, 22 nt, Human
guagaaaugguguguuucuucu

SEQ ID NO: 400226 - RNA, 22 nt, Human
cuggcuuuaacccuacaaaccu

SEQ ID NO: 400227 - RNA, 22 nt, Human
gcauguuauguaucugcccagc

SEQ ID NO: 400228 - RNA, 22 nt, Human
cauuuaguuauacuaaaacauu

SEQ ID NO: 400229 - RNA, 21 nt, Human
agccagucuguuuucuagugc

SEQ ID NO: 400230 - RNA, 22 nt, Human
caaauuccucagaaucagaaaa

SEQ ID NO: 400231 - RNA, 22 nt, Human
cuagaaauacaggcacgugcca

SEQ ID NO: 400232 - RNA, 22 nt, Human
aguuaucagguguuuucaugga

SEQ ID NO: 400233 - RNA, 22 nt, Human
aagucacccacaggcagcagaa

SEQ ID NO: 400234 - RNA, 22 nt, Human
ccuggaucuccucuauucauau

SEQ ID NO: 400235 - RNA, 22 nt, Human
auaaaaguucaagagaguacag

SEQ ID NO: 400236 - RNA, 22 nt, Human
gugcuucaaguucuuaauguuu

SEQ ID NO: 400237 - RNA, 22 nt, Human
gaggcugauucggggaacagca

SEQ ID NO: 400238 - RNA, 22 nt, Human
agagugucugguagcugcucug

SEQ ID NO: 400239 - RNA, 18 nt, Human
auacaagaucaaguguuc

SEQ ID NO: 400240 - RNA, 22 nt, Human
aaaugucagaagcuuuacuucu

SEQ ID NO: 400241 - RNA, 22 nt, Human
uauguaaaguagauggcaggua

SEQ ID NO: 400242 - RNA, 22 nt, Human
cuugccuuugucuucaaaggcu

SEQ ID NO: 400243 - RNA, 22 nt, Human
caguccuuagauuuuacugcca

SEQ ID NO: 400244 - RNA, 22 nt, Human
cagauacuguaaaauuucagua

SEQ ID NO: 400245 - RNA, 22 nt, Human
guucuucaucauuaacacucug

SEQ ID NO: 400246 - RNA, 22 nt, Human
uucuucaaccaucuacauaaac

SEQ ID NO: 400247 - RNA, 22 nt, Human
agucuuaacuaugcaaguacua

SEQ ID NO: 400248 - RNA, 22 nt, Human
caauuucacugacacccuggaa

SEQ ID NO: 400249 - RNA, 22 nt, Human
gcugucccgcugacuuccagcu

SEQ ID NO: 400250 - RNA, 22 nt, Human
aaugcuuauaccuaaugaucuu

SEQ ID NO: 400251 - RNA, 22 nt, Human
ugagaaaagguugagaugauaa

SEQ ID NO: 400252 - RNA, 22 nt, Human
agucacuguucugucaugucaa

SEQ ID NO: 400253 - RNA, 22 nt, Human
aaaacagacagccaguguagag

SEQ ID NO: 400254 - RNA, 17 nt, Human
uuucuccuuccaucuca

SEQ ID NO: 400255 - RNA, 23 nt, Human
auagaagauuauugcaacagucc

SEQ ID NO: 400256 - RNA, 19 nt, Human
uggcaucuguaaaauggug

SEQ ID NO: 400257 - RNA, 22 nt, Human
agacaaauggaguaugagcaac

SEQ ID NO: 400258 - RNA, 19 nt, Human
agcauuuggaauucuacac

SEQ ID NO: 400259 - RNA, 22 nt, Human
aucuuucuauuucuaaaaacua

SEQ ID NO: 400260 - RNA, 17 nt, Human
cccaugagcccacuccc

SEQ ID NO: 400261 - RNA, 22 nt, Human
auccuuagguggugcaucaggg

SEQ ID NO: 400262 - RNA, 22 nt, Human
gaaucucaguggaagcaggaag

SEQ ID NO: 400263 - RNA, 22 nt, Human
ucucugguuauuaacuaacucc

SEQ ID NO: 400264 - RNA, 21 nt, Human
uaaauaauaaguugcugagau

SEQ ID NO: 400265 - RNA, 22 nt, Human
aaguucuaauuuugcauucagg

SEQ ID NO: 400266 - RNA, 22 nt, Human
uuuucagugggcaaugauguga

SEQ ID NO: 400267 - RNA, 22 nt, Human
aggcuucuucuuccuauuuagu

SEQ ID NO: 400268 - RNA, 22 nt, Human
cuggguaaguuccuaaggcuca

SEQ ID NO: 400269 - RNA, 22 nt, Human
aguuauccgaaggcacugagau

SEQ ID NO: 400270 - RNA, 22 nt, Human
ucaauucaacacaugcacauug

SEQ ID NO: 400271 - RNA, 22 nt, Human
caguccuugcuaugacccugag

SEQ ID NO: 400272 - RNA, 22 nt, Human
uuaaagaauagugccccuauug

SEQ ID NO: 400273 - RNA, 22 nt, Human
auuuaaauuuucugauggagag

SEQ ID NO: 400274 - RNA, 22 nt, Human
gaaguccuccuaucuugcucuu

SEQ ID NO: 400275 - RNA, 22 nt, Human
aaugaaacuguauauagacugu

SEQ ID NO: 400276 - RNA, 21 nt, Human
cucaggauggcggccuggugg

SEQ ID NO: 400277 - RNA, 22 nt, Human
ucucaggaucuaauacauggua

SEQ ID NO: 400278 - RNA, 22 nt, Human
auacagaaaaugaugcagaguu

SEQ ID NO: 400279 - RNA, 22 nt, Human
aagugggaauagaaaugaaggu

SEQ ID NO: 400280 - RNA, 22 nt, Human
gauggcuuugugcaccaugauu

SEQ ID NO: 400281 - RNA, 22 nt, Human
gccccagcguggcuguguuagg

SEQ ID NO: 400282 - RNA, 22 nt, Human
auaaagcaucuagucugucacu

SEQ ID NO: 400283 - RNA, 22 nt, Human
gaaugaauucagcacauggaau

SEQ ID NO: 400284 - RNA, 22 nt, Human
uuucuucacaggguauugggug

SEQ ID NO: 400285 - RNA, 22 nt, Human
uuggaucauggaaugucugcuu

SEQ ID NO: 400286 - RNA, 22 nt, Human
agaauuccuccucugggacacu

SEQ ID NO: 400287 - RNA, 22 nt, Human
ccaggauggggagcagauagaa

SEQ ID NO: 400288 - RNA, 22 nt, Human
ugucaccaaguugaugaaugca

SEQ ID NO: 400289 - RNA, 22 nt, Human
auaucagacagaaagcauugac

SEQ ID NO: 400290 - RNA, 22 nt, Human
uuugaaagaaaccagugaguga

SEQ ID NO: 400291 - RNA, 22 nt, Human
aaauguuuugcucccauguggu

SEQ ID NO: 400292 - RNA, 22 nt, Human
acagguuugucugauguaauga

SEQ ID NO: 400293 - RNA, 22 nt, Human
uuagccauauagaaaaagagcu

SEQ ID NO: 400294 - RNA, 22 nt, Human
auacugaauuagguaaagcaua

SEQ ID NO: 400295 - RNA, 22 nt, Human
cucaggauuaaggaaucuaaau

SEQ ID NO: 400296 - RNA, 22 nt, Human
caaggccauauugccuguaugu

SEQ ID NO: 400297 - RNA, 22 nt, Human
auuugcuucugugaaaucaagu

SEQ ID NO: 400298 - RNA, 22 nt, Human
aaaucauguuggcacaauaaaa

SEQ ID NO: 400299 - RNA, 22 nt, Human
uaagagaacuggauagauagga

SEQ ID NO: 400300 - RNA, 22 nt, Human
cucuuaaugaccuuaauucaag

SEQ ID NO: 400301 - RNA, 22 nt, Human
auucacuggcagacagaacuca

SEQ ID NO: 400302 - RNA, 22 nt, Human
ucuucaauuagauuuaccaauu

SEQ ID NO: 400303 - RNA, 22 nt, Human
cagagccauuauggagacuugc

SEQ ID NO: 400304 - RNA, 22 nt, Human
uuuauccaccuuacccuguucc

SEQ ID NO: 400305 - RNA, 22 nt, Human
ccuucaaucagcagucuagcuu

SEQ ID NO: 400306 - RNA, 22 nt, Human
guucuaauauuuuaaaagccaa

SEQ ID NO: 400307 - RNA, 22 nt, Human
auggcuuucagauggugaaaga

SEQ ID NO: 400308 - RNA, 21 nt, Human
cucaggaucuuauauauuagu

SEQ ID NO: 400309 - RNA, 22 nt, Human
caaagauuuuagaauuugcaau

SEQ ID NO: 400310 - RNA, 22 nt, Human
ugugaauaccuugaauucauca

SEQ ID NO: 400311 - RNA, 22 nt, Human
aauaauuacccaucuuuuugua

SEQ ID NO: 400312 - RNA, 22 nt, Human
auaaaaucagaguuggauugga

SEQ ID NO: 400313 - RNA, 22 nt, Human
aaguguagauuauggagugucu

SEQ ID NO: 400314 - RNA, 22 nt, Human
ucaucucaaaacccaaggggca

SEQ ID NO: 400315 - RNA, 23 nt, Human
uggagcugacagucagagggagg

SEQ ID NO: 400316 - RNA, 22 nt, Human
uccauucauucauugaugaaca

SEQ ID NO: 400317 - RNA, 22 nt, Human
uagauauaucugucauacuggu

SEQ ID NO: 400318 - RNA, 22 nt, Human
uugaaaguuuauggagucugca

SEQ ID NO: 400319 - RNA, 22 nt, Human
gcagaauucuacagaugauaaa

SEQ ID NO: 400320 - RNA, 22 nt, Human
gaauuuuucuggaagcaauuau

SEQ ID NO: 400321 - RNA, 22 nt, Human
aggccagcaagaaagagagucu

SEQ ID NO: 400322 - RNA, 17 nt, Human
uccauacaauucucucu

SEQ ID NO: 400323 - RNA, 22 nt, Human
aaagucauuguaauauaugcua

SEQ ID NO: 400324 - RNA, 22 nt, Human
aaacaugaauagauauuaaaca

SEQ ID NO: 400325 - RNA, 22 nt, Human
uuugcagugucagcuucugugu

SEQ ID NO: 400326 - RNA, 22 nt, Human
aagaaugagcucaaagaucuua

SEQ ID NO: 400327 - RNA, 22 nt, Human
auacaaagacaaaucucaaucu

SEQ ID NO: 400328 - RNA, 22 nt, Human
aaggcaguuaauuuggcuagaa

SEQ ID NO: 400329 - RNA, 17 nt, Human
aaggccauuuccaccca

SEQ ID NO: 400330 - RNA, 22 nt, Human
auacagaacaagccucaccucc

SEQ ID NO: 400331 - RNA, 22 nt, Human
caaguccuuagaugguucuuug

SEQ ID NO: 400332 - RNA, 22 nt, Human
gugaauaaccuacuccaggccu

SEQ ID NO: 400333 - RNA, 22 nt, Human
aagcccagaugggagcauuuca

SEQ ID NO: 400334 - RNA, 22 nt, Human
aagcccagcugaaagcauuuuu

SEQ ID NO: 400335 - RNA, 22 nt, Human
ucucaggagccacagcgggagu

SEQ ID NO: 400336 - RNA, 22 nt, Human
cugugcagcuggcuuccuggaa

SEQ ID NO: 400337 - RNA, 22 nt, Human
uuucauuuugguuaugccauaa

SEQ ID NO: 400338 - RNA, 22 nt, Human
aguaaacauuuucauauuuucu

SEQ ID NO: 400339 - RNA, 21 nt, Human
cgcagagcgaacuugcggcgc

SEQ ID NO: 400340 - RNA, 22 nt, Human
auuauaaaccuuugaggguggg

SEQ ID NO: 400341 - RNA, 22 nt, Human
uuuaggcacagggaguugguuu

SEQ ID NO: 400342 - RNA, 22 nt, Human
auuuccauagagcgucucacag

SEQ ID NO: 400343 - RNA, 22 nt, Human
guccaugacugugacucacaug

SEQ ID NO: 400344 - RNA, 22 nt, Human
uaauauguguuacugacuuuuu

SEQ ID NO: 400345 - RNA, 18 nt, Human
auauguuaauuagguagg

SEQ ID NO: 400346 - RNA, 16 nt, Human
ccuggauccccugugg

SEQ ID NO: 400347 - RNA, 18 nt, Human
uuccaugauuccuuucac

SEQ ID NO: 400348 - RNA, 22 nt, Human
acaggauuagcaaguaaucagg

SEQ ID NO: 400349 - RNA, 22 nt, Human
gucaaacauagggacuuugugg

SEQ ID NO: 400350 - RNA, 22 nt, Human
agauggaguuaguaccagaguc

SEQ ID NO: 400351 - RNA, 22 nt, Human
ucaaauaccagcaauuucaugu

SEQ ID NO: 400352 - RNA, 22 nt, Human
uuccauaauaaccugagagaaa

SEQ ID NO: 400353 - RNA, 22 nt, Human
ucauuuguugaacuuuagugcg

SEQ ID NO: 400354 - RNA, 22 nt, Human
guacagaaggagcuuuggauuc

SEQ ID NO: 400355 - RNA, 22 nt, Human
auguuaaaugguuuauuauuaa

SEQ ID NO: 400356 - RNA, 22 nt, Human
uucacagacuuuccauagauug

SEQ ID NO: 400357 - RNA, 22 nt, Human
acuggaucuaauugguuauagu

SEQ ID NO: 400358 - RNA, 22 nt, Human
uuaagcaacacacauuaauuau

SEQ ID NO: 400359 - RNA, 22 nt, Human
ucauucuuuaccaaguugucac

SEQ ID NO: 400360 - RNA, 17 nt, Human
gccucugcuugugucau

SEQ ID NO: 400361 - RNA, 22 nt, Human
acaugcuucauauuauaaccaa

SEQ ID NO: 400362 - RNA, 22 nt, Human
uagucaccucuuuaaauguccu

SEQ ID NO: 400363 - RNA, 22 nt, Human
agaucacagcccccagaugcca

SEQ ID NO: 400364 - RNA, 22 nt, Human
caauuucauggauaaaagaugu

SEQ ID NO: 400365 - RNA, 22 nt, Human
uggcuucaaaaucuaguggucu

SEQ ID NO: 400366 - RNA, 22 nt, Human
aucugccucuucuucauugcga

SEQ ID NO: 400367 - RNA, 22 nt, Human
uuucaguguaucuuccaaaagc

SEQ ID NO: 400368 - RNA, 22 nt, Human
ugaaaauggccugaagaagcaa

SEQ ID NO: 400369 - RNA, 22 nt, Human
auucuucaccauggauaauuug

SEQ ID NO: 400370 - RNA, 22 nt, Human
uuagaaagaacuuuagauauca

SEQ ID NO: 400371 - RNA, 22 nt, Human
uucaauacaaagaaaggaauuu

SEQ ID NO: 400372 - RNA, 22 nt, Human
cuucugcaauaaguuuuggucc

SEQ ID NO: 400373 - RNA, 22 nt, Human
uccauuuucuaaguaucacuua

SEQ ID NO: 400374 - RNA, 23 nt, Human
aguucacugagguugaccacugg

SEQ ID NO: 400375 - RNA, 22 nt, Human
auguucuuguucaaaugucagu

SEQ ID NO: 400376 - RNA, 22 nt, Human
uucucuuuucaccaguugcuaa

SEQ ID NO: 400377 - RNA, 22 nt, Human
uugaaaguagcagcugcauaug

SEQ ID NO: 400378 - RNA, 22 nt, Human
auagaauucguguuuguaauuc

SEQ ID NO: 400379 - RNA, 22 nt, Human
gucaggaucucccaguacauau

SEQ ID NO: 400380 - RNA, 22 nt, Human
uucugggacaucuggacaguuu

SEQ ID NO: 400381 - RNA, 22 nt, Human
ggacuucuaagugccagacacu

SEQ ID NO: 400382 - RNA, 22 nt, Human
acaaaaagggagaugagguaga

SEQ ID NO: 400383 - RNA, 22 nt, Human
ucauacaucuguccuggagcuc

SEQ ID NO: 400384 - RNA, 22 nt, Human
auccaugauuaguaggauaaag

SEQ ID NO: 400385 - RNA, 22 nt, Human
caguccuuccuugccccuuggg

SEQ ID NO: 400386 - RNA, 22 nt, Human
uugaauaauaugcuucguucuc

SEQ ID NO: 400387 - RNA, 22 nt, Human
aaaacaguuuuugcuaacugcu

SEQ ID NO: 400388 - RNA, 22 nt, Human
caggauggugugagugugagga

SEQ ID NO: 400389 - RNA, 22 nt, Human
cucacugugaccucagcagaca

SEQ ID NO: 400390 - RNA, 22 nt, Human
auacagaacucucaguuguaua

SEQ ID NO: 400391 - RNA, 22 nt, Human
auuuacugagguaaauaaacug

SEQ ID NO: 400392 - RNA, 22 nt, Human
aucuuucaguuucauaccaauu

SEQ ID NO: 400393 - RNA, 22 nt, Human
caguccuucauuccuccuuuga

SEQ ID NO: 400394 - RNA, 22 nt, Human
aaagaaucuauauaucaccacc

SEQ ID NO: 400395 - RNA, 22 nt, Human
ugaauaauuccuuuuugucaag

SEQ ID NO: 400396 - RNA, 23 nt, Human
ccaaagucgaagucuaguccaga

SEQ ID NO: 400397 - RNA, 22 nt, Human
uguacaaugcugagguuugggg

SEQ ID NO: 400398 - RNA, 21 nt, Human
ggcagccucuguggaagggga

SEQ ID NO: 400399 - RNA, 23 nt, Human
ucagagaacucgggcagaugacc

SEQ ID NO: 400400 - RNA, 22 nt, Human
uugcugaaaacaguggguauug

SEQ ID NO: 400401 - RNA, 22 nt, Human
ugcugagaucugccaguagaug

SEQ ID NO: 400402 - RNA, 22 nt, Human
auaucaaagcuaguggaaauuu

SEQ ID NO: 400403 - RNA, 22 nt, Human
agaggccggccgagcccauggg

SEQ ID NO: 400404 - RNA, 22 nt, Human
cucucuguuaugcuuucaugaa

SEQ ID NO: 400405 - RNA, 22 nt, Human
aguucacugcuuaagccuuuga

SEQ ID NO: 400406 - RNA, 22 nt, Human
auuucaacguuagauguaauag

SEQ ID NO: 400407 - RNA, 22 nt, Human
ccacagagacaggguccuugcu

SEQ ID NO: 400408 - RNA, 22 nt, Human
gaucagaaucuucauuuucagu

SEQ ID NO: 400409 - RNA, 22 nt, Human
ugaaggccagcucuuuaucagc

SEQ ID NO: 400410 - RNA, 22 nt, Human
gucuaacaagcauuaggaaccc

SEQ ID NO: 400411 - RNA, 22 nt, Human
gaguccuuuucucuguccacug

SEQ ID NO: 400412 - RNA, 22 nt, Human
cuagcaucagaugagaagcugu

SEQ ID NO: 400413 - RNA, 22 nt, Human
uucuucagucccacuagccaca

SEQ ID NO: 400414 - RNA, 22 nt, Human
aauuucaagucuugaagaagua

SEQ ID NO: 400415 - RNA, 23 nt, Human
uaaagucacauauuagagugagc

SEQ ID NO: 400416 - RNA, 22 nt, Human
uucaacuuuaugcauauguauu

SEQ ID NO: 400417 - RNA, 22 nt, Human
acagauguacacucauauauaa

SEQ ID NO: 400418 - RNA, 22 nt, Human
caacagucugguuuauauaaua

SEQ ID NO: 400419 - RNA, 22 nt, Human
uuuaggcacaacuacucagcua

SEQ ID NO: 400420 - RNA, 18 nt, Human
aguccuuacgaggcuaua

SEQ ID NO: 400421 - RNA, 22 nt, Human
uugguacaaaaguaacuguggu

SEQ ID NO: 400422 - RNA, 22 nt, Human
gcuuuaaugaagucacgcaaag

SEQ ID NO: 400423 - RNA, 21 nt, Human
ugaaugaggaggauggcauuu

SEQ ID NO: 400424 - RNA, 22 nt, Human
gcaugucaugucauguaggaau

SEQ ID NO: 400425 - RNA, 22 nt, Human
uuacagaaucuacucgugguga

SEQ ID NO: 400426 - RNA, 22 nt, Human
guuaucaugcuucaucaucacu

SEQ ID NO: 400427 - RNA, 22 nt, Human
auuuccaguccuaaugaucugg

SEQ ID NO: 400428 - RNA, 20 nt, Human
agaaaucagaccacacacua

SEQ ID NO: 400429 - RNA, 22 nt, Human
acaugcuuuucccacaauuaua

SEQ ID NO: 400430 - RNA, 22 nt, Human
cugcuucuccaaaguaggacuu

SEQ ID NO: 400431 - RNA, 20 nt, Human
uacuggauuagggcucaccc

SEQ ID NO: 400432 - RNA, 20 nt, Human
uguaacaaucuggauguugc

SEQ ID NO: 400433 - RNA, 22 nt, Human
agucaccauuuucaccugccuc

SEQ ID NO: 400434 - RNA, 22 nt, Human
agucucugccagcuuguccucu

SEQ ID NO: 400435 - RNA, 20 nt, Human
auaaaauaacugccacaaga

SEQ ID NO: 400436 - RNA, 22 nt, Human
ucuauaaaugcagauaugugug

SEQ ID NO: 400437 - RNA, 17 nt, Human
ugaaggccaugaccacg

SEQ ID NO: 400438 - RNA, 22 nt, Human
uagauuuaagacccugaauuug

SEQ ID NO: 400439 - RNA, 18 nt, Human
aaaaagugcucaggccua

SEQ ID NO: 400440 - RNA, 22 nt, Human
augaaaauacugugguugauag

SEQ ID NO: 400441 - RNA, 22 nt, Human
aaagacuuggcuuaugauuugc

SEQ ID NO: 400442 - RNA, 22 nt, Human
ccaggaugacccccacuuuccu

SEQ ID NO: 400443 - RNA, 22 nt, Human
acugccauuggucaaaugagug

SEQ ID NO: 400444 - RNA, 22 nt, Human
gcagagcuucuguccuucagga

SEQ ID NO: 400445 - RNA, 22 nt, Human
cucaucugauaaaucacucuua

SEQ ID NO: 400446 - RNA, 22 nt, Human
uuucaacguguaaucuuauuua

SEQ ID NO: 400447 - RNA, 22 nt, Human
ucaguaaacagguuuaaguccu

SEQ ID NO: 400448 - RNA, 22 nt, Human
aaauugcaaaaguacuuuuagg

SEQ ID NO: 400449 - RNA, 22 nt, Human
cagaguggcacucugcuggaug

SEQ ID NO: 400450 - RNA, 22 nt, Human
auuugcuuaucuccacaguugu

SEQ ID NO: 400451 - RNA, 23 nt, Human
uccuuccuuugagaggcuccauc

SEQ ID NO: 400452 - RNA, 22 nt, Human
uauacagauggaaagauacaca

SEQ ID NO: 400453 - RNA, 22 nt, Human
caggaugagguagaggcagaua

SEQ ID NO: 400454 - RNA, 22 nt, Human
aaggcauaggacaaaucaguga

SEQ ID NO: 400455 - RNA, 22 nt, Human
cagucucuaaaucaaucugaau

SEQ ID NO: 400456 - RNA, 22 nt, Human
cauuucaagcauugacuucuau

SEQ ID NO: 400457 - RNA, 22 nt, Human
aaauauaauuucugccucaaua

SEQ ID NO: 400458 - RNA, 22 nt, Human
cucuggcuucuaccuugcaguu

SEQ ID NO: 400459 - RNA, 22 nt, Human
aagucauagucgggaaagacau

SEQ ID NO: 400460 - RNA, 22 nt, Human
gcaaacaaggacauacauccug

SEQ ID NO: 400461 - RNA, 22 nt, Human
gugucccaggccucuggaauua

SEQ ID NO: 400462 - RNA, 22 nt, Human
uaacaauaguguuugcuaguca

SEQ ID NO: 400463 - RNA, 19 nt, Human
agggaguuuauauuugcac

SEQ ID NO: 400464 - RNA, 22 nt, Human
uuucagacaggacuucauaugu

SEQ ID NO: 400465 - RNA, 22 nt, Human
auauaaagaaguggaaaaugag

SEQ ID NO: 400466 - RNA, 22 nt, Human
aaugaacauauaaagagaucuu

SEQ ID NO: 400467 - RNA, 22 nt, Human
uccaugagggacacuggaugcu

SEQ ID NO: 400468 - RNA, 22 nt, Human
auaaagauuuuuaggcauuucu

SEQ ID NO: 400469 - RNA, 22 nt, Human
guccucugaaguugugcaaugc

SEQ ID NO: 400470 - RNA, 22 nt, Human
gaucauuugcaggaaacauuaa

SEQ ID NO: 400471 - RNA, 20 nt, Human
ucacuaguaaccaucugcuu

SEQ ID NO: 400472 - RNA, 22 nt, Human
uaaguccuauuccaggucucuc

SEQ ID NO: 400473 - RNA, 22 nt, Human
cuacagaaacacuggacaugug

SEQ ID NO: 400474 - RNA, 20 nt, Human
cuguaucagguuacaaagua

SEQ ID NO: 400475 - RNA, 22 nt, Human
aauuuccagaccccauccacag

SEQ ID NO: 400476 - RNA, 22 nt, Human
aguauaauuagauaucaaaagu

SEQ ID NO: 400477 - RNA, 22 nt, Human
uuuccaaaaguuuguucugugc

SEQ ID NO: 400478 - RNA, 22 nt, Human
ucaaauaaugccauucaucauc

SEQ ID NO: 400479 - RNA, 22 nt, Human
aaaaugcugggaaaguuggaau

SEQ ID NO: 400480 - RNA, 23 nt, Human
uuccuuaacuguuaagauugucu

SEQ ID NO: 400481 - RNA, 22 nt, Human
ccagaggaaaaauaucucccua

SEQ ID NO: 400482 - RNA, 22 nt, Human
uuagccauugucagcacauggc

SEQ ID NO: 400483 - RNA, 22 nt, Human
gucccauaaguagugcaacuug

SEQ ID NO: 400484 - RNA, 22 nt, Human
uggaaagucucuuuugacugua

SEQ ID NO: 400485 - RNA, 22 nt, Human
uucaagacugcgacuaaugccc

SEQ ID NO: 400486 - RNA, 22 nt, Human
ugggagcccaagggagcugccg

SEQ ID NO: 400487 - RNA, 22 nt, Human
acuuuaucaggaaucacacagc

SEQ ID NO: 400488 - RNA, 17 nt, Human
uaucagaauguguuuac

SEQ ID NO: 400489 - RNA, 22 nt, Human
uguucacaagaugucuguggcu

SEQ ID NO: 400490 - RNA, 22 nt, Human
gcuuuaaugcuucguggggcca

SEQ ID NO: 400491 - RNA, 22 nt, Human
uucuucaauuuuccauauacug

SEQ ID NO: 400492 - RNA, 22 nt, Human
gguacaauucugggguaugcuc

SEQ ID NO: 400493 - RNA, 22 nt, Human
uagcuaucuguguccagaucca

SEQ ID NO: 400494 - RNA, 22 nt, Human
uugaaagugccaaguccuagug

SEQ ID NO: 400495 - RNA, 22 nt, Human
uuaguacugauagggucaauca

SEQ ID NO: 400496 - RNA, 22 nt, Human
cuggcuuucuguuauaaagaca

SEQ ID NO: 400497 - RNA, 21 nt, Human
caaucaguuggcauuugagca

SEQ ID NO: 400498 - RNA, 22 nt, Human
uuagccaugugggaaaaacagc

SEQ ID NO: 400499 - RNA, 22 nt, Human
caacauuugaguaaagaaaugg

SEQ ID NO: 400500 - RNA, 22 nt, Human
uuugguccugagcaaaacuaug

SEQ ID NO: 400501 - RNA, 22 nt, Human
uuauuauuccccaagucauuau

SEQ ID NO: 400502 - RNA, 22 nt, Human
ucaguuucuccaucgcuccagu

SEQ ID NO: 400503 - RNA, 22 nt, Human
ucuggaucgccggcgccugggc

SEQ ID NO: 400504 - RNA, 22 nt, Human
ucagagaaaugaaguagggauu

SEQ ID NO: 400505 - RNA, 22 nt, Human
uggcuuaauauuucauauuuaa

SEQ ID NO: 400506 - RNA, 23 nt, Human
uccaugagaugugggcuucuagu

SEQ ID NO: 400507 - RNA, 22 nt, Human
guucucucugcuuccaagaugg

SEQ ID NO: 400508 - RNA, 22 nt, Human
uucaggauaguggugaguggca

SEQ ID NO: 400509 - RNA, 23 nt, Human
aagaaugcuucugaagagcugcc

SEQ ID NO: 400510 - RNA, 19 nt, Human
uauuucaaagugccgucua

SEQ ID NO: 400511 - RNA, 22 nt, Human
cagaaaauaaaguuucuacgca

SEQ ID NO: 400512 - RNA, 22 nt, Human
uuuuauauggcacauugguugg

SEQ ID NO: 400513 - RNA, 22 nt, Human
guccaugauucuguguaguaga

SEQ ID NO: 400514 - RNA, 22 nt, Human
aagaauucacugguagagucaa

SEQ ID NO: 400515 - RNA, 22 nt, Human
uuuuuuaguuaggucagaaugu

SEQ ID NO: 400516 - RNA, 22 nt, Human
ucaguaaaguucuuucuugcug

SEQ ID NO: 400517 - RNA, 22 nt, Human
aucacuguguauguauaugcag

SEQ ID NO: 400518 - RNA, 22 nt, Human
caaguccuuuucuuggcucagg

SEQ ID NO: 400519 - RNA, 22 nt, Human
ugguaaauauguccauucucuu

SEQ ID NO: 400520 - RNA, 16 nt, Human
auuuccagauuaugca

SEQ ID NO: 400521 - RNA, 22 nt, Human
gaaguccugguccucucauuca

SEQ ID NO: 400522 - RNA, 22 nt, Human
aucagaaaggugggcaagcaga

SEQ ID NO: 400523 - RNA, 22 nt, Human
cuuaaaaucuggcaguuagcua

SEQ ID NO: 400524 - RNA, 22 nt, Human
aaaggccagguuggcugguauu

SEQ ID NO: 400525 - RNA, 22 nt, Human
ccaggcugcagucaaggggcau

SEQ ID NO: 400526 - RNA, 22 nt, Human
auuauccucagaaaacauguga

SEQ ID NO: 400527 - RNA, 22 nt, Human
aaauggaucuguggaauacauu

SEQ ID NO: 400528 - RNA, 22 nt, Human
ucucaggaagauuagggcuaag

SEQ ID NO: 400529 - RNA, 22 nt, Human
acauaauaggugccugaauauu

SEQ ID NO: 400530 - RNA, 22 nt, Human
uugaaaggguuaaagugguaaa

SEQ ID NO: 400531 - RNA, 22 nt, Human
uaaguccuagaugauucacaga

SEQ ID NO: 400532 - RNA, 22 nt, Human
aaaauacuguggaguguugaaa

SEQ ID NO: 400533 - RNA, 22 nt, Human
uuaagauagaacccaguagucu

SEQ ID NO: 400534 - RNA, 22 nt, Human
uuggaaagcaagcuggacauac

SEQ ID NO: 400535 - RNA, 22 nt, Human
gcaaauauucaagacuuuucca

SEQ ID NO: 400536 - RNA, 22 nt, Human
auucauuugcuauuguguaugg

SEQ ID NO: 400537 - RNA, 22 nt, Human
uuuaaauuuguguuuagagggu

SEQ ID NO: 400538 - RNA, 22 nt, Human
aguuauuacucuuuaacauauu

SEQ ID NO: 400539 - RNA, 22 nt, Human
auuugcuuuaagguauaaaagg

SEQ ID NO: 400540 - RNA, 22 nt, Human
uugagaagaaauaguuugcaau

SEQ ID NO: 400541 - RNA, 22 nt, Human
ugcaggaacauagguuccuugg

SEQ ID NO: 400542 - RNA, 22 nt, Human
agauuucagaugcucggcaguu

SEQ ID NO: 400543 - RNA, 22 nt, Human
aacauucugguucuaaaaaccu

SEQ ID NO: 400544 - RNA, 22 nt, Human
gcuccucuauuccccacauuuu

SEQ ID NO: 400545 - RNA, 22 nt, Human
ugcuuaauauugugauguaaua

SEQ ID NO: 400546 - RNA, 22 nt, Human
cuuugaauuccaguacaauaac

SEQ ID NO: 400547 - RNA, 22 nt, Human
gcucucuugguggcuguccugg

SEQ ID NO: 400548 - RNA, 22 nt, Human
aacauguaucgcuuuuuaauau

SEQ ID NO: 400549 - RNA, 22 nt, Human
guacagaaugcuugguaaggca

SEQ ID NO: 400550 - RNA, 22 nt, Human
aucuaaacagguguucuuuaga

SEQ ID NO: 400551 - RNA, 21 nt, Human
cauuuacaugacagauugguu

SEQ ID NO: 400552 - RNA, 22 nt, Human
ucugguaaccuuuaucccuccu

SEQ ID NO: 400553 - RNA, 22 nt, Human
uauacagucuuuugcuauauuc

SEQ ID NO: 400554 - RNA, 22 nt, Human
uucauacucacuccaauaacug

SEQ ID NO: 400555 - RNA, 23 nt, Human
uauggcuuacagugcuuuaggua

SEQ ID NO: 400556 - RNA, 22 nt, Human
aaaauugaggcucauguuaaau

SEQ ID NO: 400557 - RNA, 22 nt, Human
uaucaauacauguuaucagugu

SEQ ID NO: 400558 - RNA, 22 nt, Human
aaaugccuguguaaauucuagc

SEQ ID NO: 400559 - RNA, 19 nt, Human
ucugccucuggucaggcuc

SEQ ID NO: 400560 - RNA, 22 nt, Human
auuaggcaauucugggcaucuc

SEQ ID NO: 400561 - RNA, 22 nt, Human
ucagccaguugccccaguuagu

SEQ ID NO: 400562 - RNA, 22 nt, Human
uaaucuacuguuuauaugaaau

SEQ ID NO: 400563 - RNA, 23 nt, Human
uugauuucaaaugcagagaacac

SEQ ID NO: 400564 - RNA, 22 nt, Human
ucacuguugaccuggaaguggg

SEQ ID NO: 400565 - RNA, 22 nt, Human
gagagucuaggaaccucauaua

SEQ ID NO: 400566 - RNA, 22 nt, Human
auucucaauggcuacuuucaua

SEQ ID NO: 400567 - RNA, 22 nt, Human
agucccuguacuuuccacugcc

SEQ ID NO: 400568 - RNA, 22 nt, Human
uuugaaaggguuaugagacuga

SEQ ID NO: 400569 - RNA, 22 nt, Human
uucauucuuugaaucugaggua

SEQ ID NO: 400570 - RNA, 19 nt, Human
cagaaauagcgaaguguaa

SEQ ID NO: 400571 - RNA, 22 nt, Human
cagauggaacacagaaaggaga

SEQ ID NO: 400572 - RNA, 22 nt, Human
uagcaucuguucuuucauuaaa

SEQ ID NO: 400573 - RNA, 22 nt, Human
caaggccagggaauuuuucugg

SEQ ID NO: 400574 - RNA, 22 nt, Human
ccauuucacucuuccugaagga

SEQ ID NO: 400575 - RNA, 17 nt, Human
ucaggauguagcaguag

SEQ ID NO: 400576 - RNA, 22 nt, Human
ucucagucuuugcaaggaugcu

SEQ ID NO: 400577 - RNA, 22 nt, Human
guacauaaaggaggcucuuugc

SEQ ID NO: 400578 - RNA, 22 nt, Human
aagacauugucauuuuauaauu

SEQ ID NO: 400579 - RNA, 22 nt, Human
uuuauucuauaggcauuaagca

SEQ ID NO: 400580 - RNA, 22 nt, Human
caaugugguggcagaugucagu

SEQ ID NO: 400581 - RNA, 22 nt, Human
auacaaugagugagugaauggg

SEQ ID NO: 400582 - RNA, 15 nt, Human
uucaggauaugacuc

SEQ ID NO: 400583 - RNA, 22 nt, Human
uuaacacuccuaacuacagucu

SEQ ID NO: 400584 - RNA, 22 nt, Human
auacacagcgaugagaggaggc

SEQ ID NO: 400585 - RNA, 22 nt, Human
uuucaaagaccauuaacuauca

SEQ ID NO: 400586 - RNA, 20 nt, Human
ucauaaagaggaaauaaaua

SEQ ID NO: 400587 - RNA, 22 nt, Human
augaggcaucugcagucacuag

SEQ ID NO: 400588 - RNA, 22 nt, Human
aggcuucugugagcucauacaa

SEQ ID NO: 400589 - RNA, 22 nt, Human
uaauuucagugggcucugggcu

SEQ ID NO: 400590 - RNA, 22 nt, Human
uuuccaaaaugaaucuaaugca

SEQ ID NO: 400591 - RNA, 23 nt, Human
uuugaaguugacugccuuccaga

SEQ ID NO: 400592 - RNA, 22 nt, Human
augguuuuucaaguauucagaa

SEQ ID NO: 400593 - RNA, 22 nt, Human
auucuaacacaugcucuaagaa

SEQ ID NO: 400594 - RNA, 22 nt, Human
uucacagacauugcagacugaa

SEQ ID NO: 400595 - RNA, 22 nt, Human
ggccagaggugguacauagcuu

SEQ ID NO: 400596 - RNA, 22 nt, Human
auuuuacuuugugaauauugac

SEQ ID NO: 400597 - RNA, 17 nt, Human
uaaauacacaaggguau

SEQ ID NO: 400598 - RNA, 22 nt, Human
gauucaauguugcagauggaau

SEQ ID NO: 400599 - RNA, 22 nt, Human
gaaggccacggaauggagcugg

SEQ ID NO: 400600 - RNA, 22 nt, Human
cauagagugauguaagguaugu

SEQ ID NO: 400601 - RNA, 22 nt, Human
ucugcaucauuuuucagagccg

SEQ ID NO: 400602 - RNA, 22 nt, Human
gaauacauuggaaaucagaaua

SEQ ID NO: 400603 - RNA, 22 nt, Human
aaucagaauuuauugaaucuuu

SEQ ID NO: 400604 - RNA, 22 nt, Human
uguacauacauagauauacaca

SEQ ID NO: 400605 - RNA, 22 nt, Human
aucuauacuacaaauggcuggu

SEQ ID NO: 400606 - RNA, 22 nt, Human
ucagagaguuacacaaauuguu

SEQ ID NO: 400607 - RNA, 22 nt, Human
uacaauacuuaaccuauuuugc

SEQ ID NO: 400608 - RNA, 22 nt, Human
cggagccugcuuguugcagcug

SEQ ID NO: 400609 - RNA, 22 nt, Human
cuucagagugcagaagauuggg

SEQ ID NO: 400610 - RNA, 22 nt, Human
ugaaggccagggauuugcagcc

SEQ ID NO: 400611 - RNA, 22 nt, Human
ucaagacaucacugugcauuuu

SEQ ID NO: 400612 - RNA, 22 nt, Human
cauucuuacacaauauuuuaau

SEQ ID NO: 400613 - RNA, 22 nt, Human
caauuuuuaaacuaugaaguug

SEQ ID NO: 400614 - RNA, 22 nt, Human
caaagcaccacaaaccagguga

SEQ ID NO: 400615 - RNA, 22 nt, Human
aaauagcagccuuuaguuaaca

SEQ ID NO: 400616 - RNA, 19 nt, Human
aucugccuuagugcugcug

SEQ ID NO: 400617 - RNA, 22 nt, Human
caguuucuuggaugccaauuuc

SEQ ID NO: 400618 - RNA, 19 nt, Human
uucacaauuaugaaauuag

SEQ ID NO: 400619 - RNA, 22 nt, Human
cucccaggggaacuaucaagua

SEQ ID NO: 400620 - RNA, 22 nt, Human
uagaugcuguagaaauacuuau

SEQ ID NO: 400621 - RNA, 22 nt, Human
aaagcaguauauugguaguugu

SEQ ID NO: 400622 - RNA, 22 nt, Human
aucauuucccuuuagaucacaa

SEQ ID NO: 400623 - RNA, 22 nt, Human
aaguccuuguauacagaaucaa

SEQ ID NO: 400624 - RNA, 22 nt, Human
aggcacaggaaugucauccagu

SEQ ID NO: 400625 - RNA, 22 nt, Human
agagugaaguuuuugaaaguga

SEQ ID NO: 400626 - RNA, 22 nt, Human
auucuucaucagagaugcacua

SEQ ID NO: 400627 - RNA, 22 nt, Human
acagaauugauggaaaucucag

SEQ ID NO: 400628 - RNA, 22 nt, Human
uacaagaaauuucugcauauau

SEQ ID NO: 400629 - RNA, 22 nt, Human
uccaaaaaacguuugaauaguu

SEQ ID NO: 400630 - RNA, 22 nt, Human
uacauagaacauguuuaauguc

SEQ ID NO: 400631 - RNA, 22 nt, Human
auauacugauagcugcacuucu

SEQ ID NO: 400632 - RNA, 22 nt, Human
cauuuguuuagaagucuuuaua

SEQ ID NO: 400633 - RNA, 22 nt, Human
cucaggauccaucuccugcccu

SEQ ID NO: 400634 - RNA, 22 nt, Human
uucacagaguuauuuuuaugcu

SEQ ID NO: 400635 - RNA, 22 nt, Human
ccuggaucgaugccgagggaaa

SEQ ID NO: 400636 - RNA, 22 nt, Human
cuauagaaaauuguaucacacg

SEQ ID NO: 400637 - RNA, 19 nt, Human
uucaggauugacccuacug

SEQ ID NO: 400638 - RNA, 22 nt, Human
uuuguuuagaugguaaaucagu

SEQ ID NO: 400639 - RNA, 22 nt, Human
aguucacauaucuguuuuauuu

SEQ ID NO: 400640 - RNA, 22 nt, Human
guuuuauaggcuguugcuauau

SEQ ID NO: 400641 - RNA, 22 nt, Human
auaaacucaugccaagaaauga

SEQ ID NO: 400642 - RNA, 22 nt, Human
ucagauggguuuugaaggaugu

SEQ ID NO: 400643 - RNA, 22 nt, Human
cacaugaguccugccagguaug

SEQ ID NO: 400644 - RNA, 22 nt, Human
agauuuccuaugguaauuauag

SEQ ID NO: 400645 - RNA, 22 nt, Human
uaauuauagccgcuauuuugcu

SEQ ID NO: 400646 - RNA, 22 nt, Human
aacauuggauauuuauuaaaag

SEQ ID NO: 400647 - RNA, 22 nt, Human
acauuccaaaaacuagcagaua

SEQ ID NO: 400648 - RNA, 18 nt, Human
agaugaaagcaaaugaca

SEQ ID NO: 400649 - RNA, 22 nt, Human
uguucauuuggcccuuuuguau

SEQ ID NO: 400650 - RNA, 22 nt, Human
aucuuucagggccauuuguauu

SEQ ID NO: 400651 - RNA, 22 nt, Human
uuauuucauugauuucuaagac

SEQ ID NO: 400652 - RNA, 22 nt, Human
ucuccucuauuucuguauguau

SEQ ID NO: 400653 - RNA, 17 nt, Human
caauuucauagguuuug

SEQ ID NO: 400654 - RNA, 22 nt, Human
aaaacaguuuaggcaucacagu

SEQ ID NO: 400655 - RNA, 22 nt, Human
uccauuuagcuggcaaacaaug

SEQ ID NO: 400656 - RNA, 22 nt, Human
agauuucacaugcugcucuauu

SEQ ID NO: 400657 - RNA, 22 nt, Human
gcuggaucauauggugguucua

SEQ ID NO: 400658 - RNA, 22 nt, Human
uagucaccuuuggcaccugcaa

SEQ ID NO: 400659 - RNA, 22 nt, Human
aggcaguuuaggcagcgauuua

SEQ ID NO: 400660 - RNA, 22 nt, Human
ucaaaucagcaagcagcuuccc

SEQ ID NO: 400661 - RNA, 19 nt, Human
ugagaggcuuaaggcagcu

SEQ ID NO: 400662 - RNA, 22 nt, Human
aaagucaugaugaaccaccgua

SEQ ID NO: 400663 - RNA, 22 nt, Human
uucauuugccaucaguguaaug

SEQ ID NO: 400664 - RNA, 22 nt, Human
cacauacuuguguguacauaug

SEQ ID NO: 400665 - RNA, 22 nt, Human
acauaauagcauuucuaauuug

SEQ ID NO: 400666 - RNA, 22 nt, Human
uuaauucugccuuucauguaac

SEQ ID NO: 400667 - RNA, 22 nt, Human
uacaagaaugucuuaaaagcuc

SEQ ID NO: 400668 - RNA, 22 nt, Human
agaacaucuaaauaucugagac

SEQ ID NO: 400669 - RNA, 22 nt, Human
gcucaggaucccaggggugugc

SEQ ID NO: 400670 - RNA, 22 nt, Human
aaagaaucacauccuucagcaa

SEQ ID NO: 400671 - RNA, 22 nt, Human
ucacaauuuggauacagcuaug

SEQ ID NO: 400672 - RNA, 22 nt, Human
aauauuucugcagaaugguuuu

SEQ ID NO: 400673 - RNA, 22 nt, Human
ucauuuguucucauucucuacu

SEQ ID NO: 400674 - RNA, 22 nt, Human
uauuuccaaaagccuauuauga

SEQ ID NO: 400675 - RNA, 21 nt, Human
uuugaaagugggugauucuuu

SEQ ID NO: 400676 - RNA, 22 nt, Human
cagaccucaguccucaguagga

SEQ ID NO: 400677 - RNA, 23 nt, Human
auauggcuguuguguguuaacau

SEQ ID NO: 400678 - RNA, 22 nt, Human
uucaugugaauauauuugucuu

SEQ ID NO: 400679 - RNA, 22 nt, Human
uuuauucuugagagugagaaga

SEQ ID NO: 400680 - RNA, 22 nt, Human
uuguaaaugaccuuuucuaauu

SEQ ID NO: 400681 - RNA, 22 nt, Human
uuccugggacuggagcagccca

SEQ ID NO: 400682 - RNA, 22 nt, Human
aaagucauggaaaaucuuggaa

SEQ ID NO: 400683 - RNA, 18 nt, Human
auagaaaccuuuaaucag

SEQ ID NO: 400684 - RNA, 22 nt, Human
caacuuuaugauugguuuguca

SEQ ID NO: 400685 - RNA, 22 nt, Human
ucugggaacucugucauuuccc

SEQ ID NO: 400686 - RNA, 17 nt, Human
aaucuguuuacagucag

SEQ ID NO: 400687 - RNA, 22 nt, Human
cacagcauaaugaaauauacuu

SEQ ID NO: 400688 - RNA, 22 nt, Human
aauuuccagaucagaugacuca

SEQ ID NO: 400689 - RNA, 22 nt, Human
gagagaaaugugcaguuugggc

SEQ ID NO: 400690 - RNA, 22 nt, Human
cucaggauguacuacagaaggc

SEQ ID NO: 400691 - RNA, 22 nt, Human
ugaauaaucauguccauagugu

SEQ ID NO: 400692 - RNA, 22 nt, Human
caggauggagggagggcuguua

SEQ ID NO: 400693 - RNA, 22 nt, Human
caaaggcaggcccccugugcag

SEQ ID NO: 400694 - RNA, 22 nt, Human
ucagagaagcugccaggcgagc

SEQ ID NO: 400695 - RNA, 20 nt, Human
augugagggguugaaguggg

SEQ ID NO: 400696 - RNA, 22 nt, Human
uagcuuuccuuguugccugugc

SEQ ID NO: 400697 - RNA, 22 nt, Human
agaauuucaaauggaaguuuua

SEQ ID NO: 400698 - RNA, 22 nt, Human
aauuucaaagcucacuggcaua

SEQ ID NO: 400699 - RNA, 20 nt, Human
uuucaguuaucuugaccuuc

SEQ ID NO: 400700 - RNA, 19 nt, Human
aacuguaauuaauacccua

SEQ ID NO: 400701 - RNA, 22 nt, Human
cagaucuguuugccagaucagc

SEQ ID NO: 400702 - RNA, 22 nt, Human
aaacugauaaaauaaguacauu

SEQ ID NO: 400703 - RNA, 22 nt, Human
ccucaggggucacugugaggag

SEQ ID NO: 400704 - RNA, 22 nt, Human
aacauguaaauaucauuguacu

SEQ ID NO: 400705 - RNA, 22 nt, Human
aggcacaggccucagcacccag

SEQ ID NO: 400706 - RNA, 22 nt, Human
caguuuuugccauuaagaguaa

SEQ ID NO: 400707 - RNA, 22 nt, Human
uauuaaagagagaaucaucauc

SEQ ID NO: 400708 - RNA, 22 nt, Human
auucuucacaccuguuccuguu

SEQ ID NO: 400709 - RNA, 22 nt, Human
uaaagccauacugaaagccacu

SEQ ID NO: 400710 - RNA, 22 nt, Human
auguucuuucagccagugcauc

SEQ ID NO: 400711 - RNA, 22 nt, Human
aaacuuuguucgucugaugugg

SEQ ID NO: 400712 - RNA, 22 nt, Human
agucuuaauagagaaaaacugu

SEQ ID NO: 400713 - RNA, 22 nt, Human
aucagaaaucuaggauucagaa

SEQ ID NO: 400714 - RNA, 22 nt, Human
aucaggaugacaacugcugggu

SEQ ID NO: 400715 - RNA, 22 nt, Human
aguaccaugcuuccugacuggu

SEQ ID NO: 400716 - RNA, 22 nt, Human
aacauuucagcaaauaagaaca

SEQ ID NO: 400717 - RNA, 22 nt, Human
aaaguccagagggcacacugaa

SEQ ID NO: 400718 - RNA, 22 nt, Human
ugcagggcccucauuccugucc

SEQ ID NO: 400719 - RNA, 22 nt, Human
uucaggaugacaccauguccag

SEQ ID NO: 400720 - RNA, 22 nt, Human
cucuaauccuuugucccugggu

SEQ ID NO: 400721 - RNA, 22 nt, Human
acucaggaaaugagaggcucuc

SEQ ID NO: 400722 - RNA, 22 nt, Human
uucauucugcaguucucagcuc

SEQ ID NO: 400723 - RNA, 23 nt, Human
aaauaggaguaucuggaucauga

SEQ ID NO: 400724 - RNA, 22 nt, Human
caaggccaguccauuuuggaag

SEQ ID NO: 400725 - RNA, 22 nt, Human
cucagaauuuagggcucugagg

SEQ ID NO: 400726 - RNA, 22 nt, Human
uucaggauucuuucagacuggg

SEQ ID NO: 400727 - RNA, 22 nt, Human
uuaauuaugcaaaaggccccau

SEQ ID NO: 400728 - RNA, 22 nt, Human
uaauuuacuugcaaauaacaau

SEQ ID NO: 400729 - RNA, 22 nt, Human
gaugagcauuguuucauguguu

SEQ ID NO: 400730 - RNA, 22 nt, Human
aauacugucuuucacagauauu

SEQ ID NO: 400731 - RNA, 22 nt, Human
uuuaggcagcacgggcagcccu

SEQ ID NO: 400732 - RNA, 22 nt, Human
uaauuuuuccacguacacuggg

SEQ ID NO: 400733 - RNA, 22 nt, Human
uuuuucaagacaaccugcaugu

SEQ ID NO: 400734 - RNA, 22 nt, Human
auacagaaaaguggauagccag

SEQ ID NO: 400735 - RNA, 19 nt, Human
aucugagauuauaaacaga

SEQ ID NO: 400736 - RNA, 22 nt, Human
uuucccaguucccugcucuaua

SEQ ID NO: 400737 - RNA, 22 nt, Human
uagaaacagaaaacuguaauag

SEQ ID NO: 400738 - RNA, 22 nt, Human
cagaaauaaacuucucacaucg

SEQ ID NO: 400739 - RNA, 22 nt, Human
uuccagcaggcagacaggagau

SEQ ID NO: 400740 - RNA, 22 nt, Human
caaauguauucucacuucaggg

SEQ ID NO: 400741 - RNA, 22 nt, Human
aaucauucuuauuucacagcaa

SEQ ID NO: 400742 - RNA, 22 nt, Human
acaaaugugucuaauugugccu

SEQ ID NO: 400743 - RNA, 22 nt, Human
caaguccucaaagggcucugcu

SEQ ID NO: 400744 - RNA, 22 nt, Human
uacacaugaucauuuaguagca

SEQ ID NO: 400745 - RNA, 22 nt, Human
ucacagaacaauguuuaguucu

SEQ ID NO: 400746 - RNA, 23 nt, Human
ucuccuccuagauacagucaugg

SEQ ID NO: 400747 - RNA, 22 nt, Human
caggccaggguugagaagagaa

SEQ ID NO: 400748 - RNA, 19 nt, Human
acuguaaggcauuuuuuuc

SEQ ID NO: 400749 - RNA, 22 nt, Human
gucuucaacaauaacuaccacu

SEQ ID NO: 400750 - RNA, 18 nt, Human
gaugggagcaagagaaga

SEQ ID NO: 400751 - RNA, 22 nt, Human
guuuuauaggugaaauauuacu

SEQ ID NO: 400752 - RNA, 22 nt, Human
cugaaagaauaagauguuuaca

SEQ ID NO: 400753 - RNA, 20 nt, Human
acuggaucuggcuggagcug

SEQ ID NO: 400754 - RNA, 22 nt, Human
uauuuucuguggaggaccagau

SEQ ID NO: 400755 - RNA, 22 nt, Human
cuuguccccagcagguugguuu

SEQ ID NO: 400756 - RNA, 22 nt, Human
gaaaggccauuucugaggguuu

SEQ ID NO: 400757 - RNA, 22 nt, Human
gaaggccacaaaaaaugucaua

SEQ ID NO: 400758 - RNA, 22 nt, Human
cucuucuuauggccguggcuga

SEQ ID NO: 400759 - RNA, 22 nt, Human
aaaaaucuaugacugcuucucc

SEQ ID NO: 400760 - RNA, 22 nt, Human
ucagaaauacaaaacacuuacu

SEQ ID NO: 400761 - RNA, 22 nt, Human
aagauggagcacgagcagaagc

SEQ ID NO: 400762 - RNA, 22 nt, Human
uucuuacagaguuuacagagcc

SEQ ID NO: 400763 - RNA, 22 nt, Human
uuuuaucuaccuaugcucauuu

SEQ ID NO: 400764 - RNA, 22 nt, Human
gccagucugcucccacaaguuc

SEQ ID NO: 400765 - RNA, 22 nt, Human
ccagaggaggggggucuuucug

SEQ ID NO: 400766 - RNA, 22 nt, Human
aguccuuagaacagugccuggg

SEQ ID NO: 400767 - RNA, 22 nt, Human
ucugggaaugaauaagaccugu

SEQ ID NO: 400768 - RNA, 22 nt, Human
auuucaaggcuauuaauauaaa

SEQ ID NO: 400769 - RNA, 22 nt, Human
augcacaagcaagagauaaugg

SEQ ID NO: 400770 - RNA, 22 nt, Human
uggaguucauccaugacagcuu

SEQ ID NO: 400771 - RNA, 22 nt, Human
ggcuuggaaauugcaggacaca

SEQ ID NO: 400772 - RNA, 22 nt, Human
caccagacagguguaugcauau

SEQ ID NO: 400773 - RNA, 21 nt, Human
auggauuuaaacaggccacaa

SEQ ID NO: 400774 - RNA, 22 nt, Human
gagagguccauuccccugucag

SEQ ID NO: 400775 - RNA, 22 nt, Human
uucauucuugggaucagagagu

SEQ ID NO: 400776 - RNA, 22 nt, Human
caguucacacugugcuaucugc

SEQ ID NO: 400777 - RNA, 22 nt, Human
aaagucaucagaaccuuccaga

SEQ ID NO: 400778 - RNA, 22 nt, Human
caguuucuauggcugggcucug

SEQ ID NO: 400779 - RNA, 22 nt, Human
uuucaaaccuacuuguauguuu

SEQ ID NO: 400780 - RNA, 22 nt, Human
acaguccuuguguggaacauua

SEQ ID NO: 400781 - RNA, 22 nt, Human
auaaagcaaauaggacuauugc

SEQ ID NO: 400782 - RNA, 22 nt, Human
aucuauacccaucaugauuuaa

SEQ ID NO: 400783 - RNA, 22 nt, Human
ugcauggacucaucagacaaga

SEQ ID NO: 400784 - RNA, 22 nt, Human
ucugggaaccagugcggcuggg

SEQ ID NO: 400785 - RNA, 22 nt, Human
uuuaucuguuguacauuuaugc

SEQ ID NO: 400786 - RNA, 22 nt, Human
aaagucauguaaugauaugauu

SEQ ID NO: 400787 - RNA, 22 nt, Human
gucauuucuguuucuucagugc

SEQ ID NO: 400788 - RNA, 22 nt, Human
auucauuagccacuaacuagca

SEQ ID NO: 400789 - RNA, 22 nt, Human
uauuacaauuuacauugcacuu

SEQ ID NO: 400790 - RNA, 22 nt, Human
ugucaccaugccagcuucugcc

SEQ ID NO: 400791 - RNA, 22 nt, Human
aaaacuaaauacgcuuugccuc

SEQ ID NO: 400792 - RNA, 22 nt, Human
uaguacaguuuaaauauuaaua

SEQ ID NO: 400793 - RNA, 22 nt, Human
augguuuauugcuuuaaugaaa

SEQ ID NO: 400794 - RNA, 22 nt, Human
auuuguagugaagugaaaauaa

SEQ ID NO: 400795 - RNA, 22 nt, Human
aauacuaguuauuaaagcuuuu

SEQ ID NO: 400796 - RNA, 23 nt, Human
ucaucaaacagcugcucaagaaa

SEQ ID NO: 400797 - RNA, 22 nt, Human
uguccauggauagagcugcucg

SEQ ID NO: 400798 - RNA, 22 nt, Human
augaaauauuucagagcagagu

SEQ ID NO: 400799 - RNA, 22 nt, Human
gaugauaacagcauuucaacug

SEQ ID NO: 400800 - RNA, 22 nt, Human
aaugaacagauacacauaggca

SEQ ID NO: 400801 - RNA, 22 nt, Human
caaggccaguuucuccuaguca

SEQ ID NO: 400802 - RNA, 22 nt, Human
uucucacuauguauguagauug

SEQ ID NO: 400803 - RNA, 22 nt, Human
cagaucuagagcuuuuccaucu

SEQ ID NO: 400804 - RNA, 22 nt, Human
auugaaaauaaggccagaaaca

SEQ ID NO: 400805 - RNA, 22 nt, Human
ccuggaucagagccagagaagc

SEQ ID NO: 400806 - RNA, 22 nt, Human
acuggauuccauugugcaaaga

SEQ ID NO: 400807 - RNA, 22 nt, Human
uuauagugggcccaacauggcg

SEQ ID NO: 400808 - RNA, 22 nt, Human
guugaaaguagaugcuauuugg

SEQ ID NO: 400809 - RNA, 22 nt, Human
gcuauacaaguguagaauagag

SEQ ID NO: 400810 - RNA, 22 nt, Human
caucagaaucugagucucugcc

SEQ ID NO: 400811 - RNA, 22 nt, Human
uaauuacagguccaaaacaauc

SEQ ID NO: 400812 - RNA, 22 nt, Human
auuauauaggacuugcccuucc

SEQ ID NO: 400813 - RNA, 22 nt, Human
acuaaacugaagcaugaaaagg

SEQ ID NO: 400814 - RNA, 22 nt, Human
ugguaauuaauuugauagguuc

SEQ ID NO: 400815 - RNA, 22 nt, Human
acugcagagguggggugcagag

SEQ ID NO: 400816 - RNA, 22 nt, Human
guucuucaucuuaaccaucugu

SEQ ID NO: 400817 - RNA, 22 nt, Human
guugaaagcuuuucauuuaguu

SEQ ID NO: 400818 - RNA, 22 nt, Human
ucucucuugucaccccaucugc

SEQ ID NO: 400819 - RNA, 22 nt, Human
caaguccuccaugugacuaggu

SEQ ID NO: 400820 - RNA, 22 nt, Human
cauuuguaucauauguaucuua

SEQ ID NO: 400821 - RNA, 22 nt, Human
gaucugaagagcaaugaaauau

SEQ ID NO: 400822 - RNA, 22 nt, Human
aaagcauuucaugucuagaaag

SEQ ID NO: 400823 - RNA, 22 nt, Human
uuuaaauucugucugccgcuua

SEQ ID NO: 400824 - RNA, 22 nt, Human
uagaaacagauguuuuugaaga

SEQ ID NO: 400825 - RNA, 22 nt, Human
uucuuaaaacuuauggacaggu

SEQ ID NO: 400826 - RNA, 22 nt, Human
ugcuuaauaggaguugaacauu

SEQ ID NO: 400827 - RNA, 22 nt, Human
acauuuuuauucaucaaagcag

SEQ ID NO: 400828 - RNA, 22 nt, Human
auacaacagaaaaugauuauuc

SEQ ID NO: 400829 - RNA, 22 nt, Human
ucaacuuugaaaccauagugaa

SEQ ID NO: 400830 - RNA, 19 nt, Human
aggauuuauuaugugcuca

SEQ ID NO: 400831 - RNA, 22 nt, Human
acagcauugagagcuaaauuua

SEQ ID NO: 400832 - RNA, 22 nt, Human
uauggcuuuuuauucaucuuac

SEQ ID NO: 400833 - RNA, 22 nt, Human
ucaaaauucuagggagaauggu

SEQ ID NO: 400834 - RNA, 22 nt, Human
cugaaaggguuacauaguaagu

SEQ ID NO: 400835 - RNA, 23 nt, Human
uucauuugucuacuucacuuguu

SEQ ID NO: 400836 - RNA, 22 nt, Human
uauuaaagggaaguuaugcaug

SEQ ID NO: 400837 - RNA, 22 nt, Human
cauuucaaguaacagauugcuu

SEQ ID NO: 400838 - RNA, 22 nt, Human
gaguccuugucauaauucagug

SEQ ID NO: 400839 - RNA, 19 nt, Human
aauacaguguuauagaauu

SEQ ID NO: 400840 - RNA, 22 nt, Human
ucugggaagcugguccuguucu

SEQ ID NO: 400841 - RNA, 22 nt, Human
auguuucaccagcaaauuaccu

SEQ ID NO: 400842 - RNA, 22 nt, Human
acacaaauuguaggauaauugc

SEQ ID NO: 400843 - RNA, 22 nt, Human
acuauacauugaauguuaaggu

SEQ ID NO: 400844 - RNA, 22 nt, Human
auggcuuucagauuucuauguu

SEQ ID NO: 400845 - RNA, 20 nt, Human
uuuaggcauuacucuuuugu

SEQ ID NO: 400846 - RNA, 22 nt, Human
guuuaaucagaggaauuauaga

SEQ ID NO: 400847 - RNA, 22 nt, Human
cugcuuccauaaauaaugugcu

SEQ ID NO: 400848 - RNA, 22 nt, Human
aaauaucauuuauaacuuuuaa

SEQ ID NO: 400849 - RNA, 22 nt, Human
cucucagacugaagggccugug

SEQ ID NO: 400850 - RNA, 22 nt, Human
cugaauaauacagacuagcuuc

SEQ ID NO: 400851 - RNA, 22 nt, Human
auauuaaauggauuuugggagc

SEQ ID NO: 400852 - RNA, 22 nt, Human
cagaauuuuucgaauguacugu

SEQ ID NO: 400853 - RNA, 22 nt, Human
uccaugagacagauacuguaag

SEQ ID NO: 400854 - RNA, 22 nt, Human
aaucaugugggauagucugcuc

SEQ ID NO: 400855 - RNA, 22 nt, Human
cagucucagaggugggaguggg

SEQ ID NO: 400856 - RNA, 22 nt, Human
uucuuugaguuaguacagucca

SEQ ID NO: 400857 - RNA, 22 nt, Human
uguccuuaucuccaaacaauca

SEQ ID NO: 400858 - RNA, 20 nt, Human
aaaaacaguaaugcugaaga

SEQ ID NO: 400859 - RNA, 22 nt, Human
augcuuuuccaggagaaauaua

SEQ ID NO: 400860 - RNA, 22 nt, Human
cugaaagguauaaauaagacuu

SEQ ID NO: 400861 - RNA, 22 nt, Human
agucauaugacccuucacaaac

SEQ ID NO: 400862 - RNA, 22 nt, Human
cuugaaagcacuuaguaaauua

SEQ ID NO: 400863 - RNA, 22 nt, Human
aaaucucaauuugaauuguagc

SEQ ID NO: 400864 - RNA, 22 nt, Human
aucaggaucacugggagucuug

SEQ ID NO: 400865 - RNA, 22 nt, Human
acagaugauuuuuaugaaaaca

SEQ ID NO: 400866 - RNA, 22 nt, Human
gugaauaaaacaccugccaaga

SEQ ID NO: 400867 - RNA, 22 nt, Human
aaugccaacuuggauauacauu

SEQ ID NO: 400868 - RNA, 22 nt, Human
gaauuucagagguaacaucauc

SEQ ID NO: 400869 - RNA, 22 nt, Human
uguaacaaaauaccuuggauug

SEQ ID NO: 400870 - RNA, 17 nt, Human
ugaaaucagcacccagg

SEQ ID NO: 400871 - RNA, 22 nt, Human
uucccaugccuggccccuaucc

SEQ ID NO: 400872 - RNA, 22 nt, Human
ugcuuaaacacauacauacaua

SEQ ID NO: 400873 - RNA, 22 nt, Human
caauacaauuaccaguuaauca

SEQ ID NO: 400874 - RNA, 22 nt, Human
uuaaaauuauggcccauuugga

SEQ ID NO: 400875 - RNA, 22 nt, Human
gccuaauaacuagcuguguaac

SEQ ID NO: 400876 - RNA, 22 nt, Human
uaguccuugguaaaauucuaug

SEQ ID NO: 400877 - RNA, 22 nt, Human
caaauacuggguaaguuaauuu

SEQ ID NO: 400878 - RNA, 22 nt, Human
augugaaaaauuucuuauuaca

SEQ ID NO: 400879 - RNA, 22 nt, Human
uuacagaaggaacacuacucag

SEQ ID NO: 400880 - RNA, 22 nt, Human
caugcuuaugauuugcuaagcc

SEQ ID NO: 400881 - RNA, 22 nt, Human
uucuauacaaagauuucucaca

SEQ ID NO: 400882 - RNA, 22 nt, Human
cuuaggcaguuuaggaaagaga

SEQ ID NO: 400883 - RNA, 22 nt, Human
aaaucaguuguuauauuaaaga

SEQ ID NO: 400884 - RNA, 20 nt, Human
aaguuacauuguauuguacc

SEQ ID NO: 400885 - RNA, 18 nt, Human
gcacuucacccagcuagu

SEQ ID NO: 400886 - RNA, 22 nt, Human
aaaguccugacugcaggggaug

SEQ ID NO: 400887 - RNA, 22 nt, Human
aaaggccauuacuugcuuuuag

SEQ ID NO: 400888 - RNA, 22 nt, Human
uugguccacugugaaauuggga

SEQ ID NO: 400889 - RNA, 22 nt, Human
gaggaacccagcugggguugcc

SEQ ID NO: 400890 - RNA, 22 nt, Human
uaauacuuuugccuuguauuca

SEQ ID NO: 400891 - RNA, 22 nt, Human
guucuucacauuucauugagga

SEQ ID NO: 400892 - RNA, 23 nt, Human
auuucuaggggauuuucuggugc

SEQ ID NO: 400893 - RNA, 17 nt, Human
ugauaguucauuuuaag

SEQ ID NO: 400894 - RNA, 22 nt, Human
aucuauacucagaguuaauauc

SEQ ID NO: 400895 - RNA, 22 nt, Human
uuccuuaggcuguuugcagugc

SEQ ID NO: 400896 - RNA, 22 nt, Human
aaauuagucgguuuaggaauuu

SEQ ID NO: 400897 - RNA, 22 nt, Human
acaugaaacuguugcauuagaa

SEQ ID NO: 400898 - RNA, 22 nt, Human
ucauagaaugaguuaaugaacu

SEQ ID NO: 400899 - RNA, 22 nt, Human
acuuucugcaguguuggaaaug

SEQ ID NO: 400900 - RNA, 22 nt, Human
uuaguuuucccaucuuuauggu

SEQ ID NO: 400901 - RNA, 22 nt, Human
agauuggaucaagcagcaguug

SEQ ID NO: 400902 - RNA, 22 nt, Human
cuaucaaacagccauuaauaua

SEQ ID NO: 400903 - RNA, 22 nt, Human
uuagaaauacaagugagguuga

SEQ ID NO: 400904 - RNA, 22 nt, Human
uaaagucauaagaguggauccg

SEQ ID NO: 400905 - RNA, 22 nt, Human
acagaauuugcuugggcaaugg

SEQ ID NO: 400906 - RNA, 22 nt, Human
aguggaccagaagacugaagcu

SEQ ID NO: 400907 - RNA, 22 nt, Human
uuucagaaagcugaacauauga

SEQ ID NO: 400908 - RNA, 22 nt, Human
uuuacagaugaggauacugagg

SEQ ID NO: 400909 - RNA, 22 nt, Human
uggcauuucuguuagacucuca

SEQ ID NO: 400910 - RNA, 22 nt, Human
ucagaaaugaucguuauucauu

SEQ ID NO: 400911 - RNA, 22 nt, Human
uuucaguuuuugcucgauguau

SEQ ID NO: 400912 - RNA, 22 nt, Human
cucugcaugccuugcucagaca

SEQ ID NO: 400913 - RNA, 22 nt, Human
guauacagauacuuagacgugc

SEQ ID NO: 400914 - RNA, 22 nt, Human
auucucuuuguauaacaucuug

SEQ ID NO: 400915 - RNA, 22 nt, Human
ucucaggaauagaguggcagca

SEQ ID NO: 400916 - RNA, 22 nt, Human
acuucacagaaauuuuaugagg

SEQ ID NO: 400917 - RNA, 18 nt, Human
gucacuguguuucugagc

SEQ ID NO: 400918 - RNA, 22 nt, Human
aauggccagcaacaggagugaa

SEQ ID NO: 400919 - RNA, 22 nt, Human
gucacagaguuauuaauugugu

SEQ ID NO: 400920 - RNA, 22 nt, Human
aaacauuugcaacucgguuugg

SEQ ID NO: 400921 - RNA, 22 nt, Human
augauguugauaaauuacuuua

SEQ ID NO: 400922 - RNA, 22 nt, Human
cuguaugaggaucagacuggac

SEQ ID NO: 400923 - RNA, 22 nt, Human
uuacagaauguucuuccaacag

SEQ ID NO: 400924 - RNA, 19 nt, Human
ugaguucugugguucucaa

SEQ ID NO: 400925 - RNA, 22 nt, Human
uuugacaaaggaaaaaugcaca

SEQ ID NO: 400926 - RNA, 22 nt, Human
aagcuggaacaucuugaggaag

SEQ ID NO: 400927 - RNA, 22 nt, Human
aaggcaguacuuuauguccaua

SEQ ID NO: 400928 - RNA, 22 nt, Human
ggcuuggaccagucacaguggu

SEQ ID NO: 400929 - RNA, 22 nt, Human
aguguuagauucuuacucaguu

SEQ ID NO: 400930 - RNA, 22 nt, Human
ugaagaauaaaugguugagacu

SEQ ID NO: 400931 - RNA, 22 nt, Human
uuguuuuaucuuucuacagacu

SEQ ID NO: 400932 - RNA, 22 nt, Human
aaaacuuucagggauacagaaa

SEQ ID NO: 400933 - RNA, 22 nt, Human
uaaugucaaggugauagauuug

SEQ ID NO: 400934 - RNA, 22 nt, Human
uccaaaguaauuucacuucugu

SEQ ID NO: 400935 - RNA, 22 nt, Human
cauuuccagcuccugcaucaug

SEQ ID NO: 400936 - RNA, 22 nt, Human
ucauauaaguuuaaaacuaucu

SEQ ID NO: 400937 - RNA, 22 nt, Human
ugcuggaggauuaaacaaguca

SEQ ID NO: 400938 - RNA, 22 nt, Human
uuccuuagcugucccuggaaau

SEQ ID NO: 400939 - RNA, 22 nt, Human
uuugaacaggaguaucuauagu

SEQ ID NO: 400940 - RNA, 22 nt, Human
uuaaauuuuagaaacagacucu

SEQ ID NO: 400941 - RNA, 22 nt, Human
aauagaaaggaggggcucuugu

SEQ ID NO: 400942 - RNA, 22 nt, Human
uggagcugggguuugaaucugg

SEQ ID NO: 400943 - RNA, 22 nt, Human
uguggaaaauuggaacguuccu

SEQ ID NO: 400944 - RNA, 22 nt, Human
cauagcuuagggguuaaacuca

SEQ ID NO: 400945 - RNA, 22 nt, Human
uaucuaaaggauuuaauuuagu

SEQ ID NO: 400946 - RNA, 22 nt, Human
acagaaugggauuugaauauuu

SEQ ID NO: 400947 - RNA, 22 nt, Human
cccaugagaccugguuuaaggc

SEQ ID NO: 400948 - RNA, 22 nt, Human
ucaaaauuaaaccaacguccag

SEQ ID NO: 400949 - RNA, 22 nt, Human
uguuuaauaauucuaugauagu

SEQ ID NO: 400950 - RNA, 22 nt, Human
cuuaaccagaaaaugcacuugu

SEQ ID NO: 400951 - RNA, 22 nt, Human
uaucagaaugcagccaugugca

SEQ ID NO: 400952 - RNA, 22 nt, Human
ucagagaguuagugucuuagcu

SEQ ID NO: 400953 - RNA, 22 nt, Human
uuauuaaugaguacaaguuauu

SEQ ID NO: 400954 - RNA, 22 nt, Human
aagucacaagcauauaugcauu

SEQ ID NO: 400955 - RNA, 22 nt, Human
uuucauaaggguuucuagacuu

SEQ ID NO: 400956 - RNA, 22 nt, Human
ggcuuaaugguucuuuuucuca

SEQ ID NO: 400957 - RNA, 22 nt, Human
aagccauuuguuguccuucagg

SEQ ID NO: 400958 - RNA, 22 nt, Human
uuuaaauuauaguuaaugucug

SEQ ID NO: 400959 - RNA, 22 nt, Human
aaguugagaugucauaggagac

SEQ ID NO: 400960 - RNA, 22 nt, Human
uccaugagagguaacuuuacaa

SEQ ID NO: 400961 - RNA, 22 nt, Human
gugcauuugugcaugcacaugu

SEQ ID NO: 400962 - RNA, 22 nt, Human
uucacagaauggcaaguuaugg

SEQ ID NO: 400963 - RNA, 22 nt, Human
ggauguugauugaauggccauu

SEQ ID NO: 400964 - RNA, 22 nt, Human
gaguccuuuucauagcaguggg

SEQ ID NO: 400965 - RNA, 22 nt, Human
uugaacauuggcaauuucauau

SEQ ID NO: 400966 - RNA, 21 nt, Human
gcaaauguucaggaaaaaaga

SEQ ID NO: 400967 - RNA, 22 nt, Human
cacauuuaauccuuuauaagua

SEQ ID NO: 400968 - RNA, 22 nt, Human
auauacaguuuuacaggguuuc

SEQ ID NO: 400969 - RNA, 22 nt, Human
caaaauugaugaauguaugauu

SEQ ID NO: 400970 - RNA, 22 nt, Human
aaaagccaagguccucuucaga

SEQ ID NO: 400971 - RNA, 22 nt, Human
ugaaaagacugcaagagagcau

SEQ ID NO: 400972 - RNA, 22 nt, Human
uuuacagaauguugaauuuggg

SEQ ID NO: 400973 - RNA, 22 nt, Human
caauuuuuguacuuauaguacu

SEQ ID NO: 400974 - RNA, 22 nt, Human
aaguccuuuaauaucacauagu

SEQ ID NO: 400975 - RNA, 22 nt, Human
ucacaguaucacacaaggauua

SEQ ID NO: 400976 - RNA, 22 nt, Human
uauaaaauucucaguuuggggu

SEQ ID NO: 400977 - RNA, 22 nt, Human
auacaaauuuauagaugcauuu

SEQ ID NO: 400978 - RNA, 22 nt, Human
auuaggcauucugaaugagguc

SEQ ID NO: 400979 - RNA, 22 nt, Human
auaucaaacgaaguuauuuuaa

SEQ ID NO: 400980 - RNA, 22 nt, Human
cugaauaauauuccauuaugag

SEQ ID NO: 400981 - RNA, 22 nt, Human
ucauggauggccgggaggugau

SEQ ID NO: 400982 - RNA, 22 nt, Human
auguuauaguuauaaaaugagg

SEQ ID NO: 400983 - RNA, 21 nt, Human
uucugggaaaugagcuggggc

SEQ ID NO: 400984 - RNA, 22 nt, Human
aucacaaaggucucagagcaca

SEQ ID NO: 400985 - RNA, 22 nt, Human
acagaguucccacuccagaagc

SEQ ID NO: 400986 - RNA, 22 nt, Human
guaaauuauuucaagaucaucu

SEQ ID NO: 400987 - RNA, 22 nt, Human
ucacagaaauaagauaguuauu

SEQ ID NO: 400988 - RNA, 22 nt, Human
aguguuuaccccaaucaguuua

SEQ ID NO: 400989 - RNA, 22 nt, Human
cucagugugaaugcucaguaaa

SEQ ID NO: 400990 - RNA, 22 nt, Human
guggaaugaauagauuugcauu

SEQ ID NO: 400991 - RNA, 22 nt, Human
ucccaguuuuucuccacuaagg

SEQ ID NO: 400992 - RNA, 22 nt, Human
auaaagucuaccguauuaaaga

SEQ ID NO: 400993 - RNA, 22 nt, Human
acauuuuuuagagucccacauu

SEQ ID NO: 400994 - RNA, 22 nt, Human
agccuuguuggucugaguuugg

SEQ ID NO: 400995 - RNA, 22 nt, Human
cuaugacacaggccauuauaua

SEQ ID NO: 400996 - RNA, 22 nt, Human
uuaaauauuuucagcaggguca

SEQ ID NO: 400997 - RNA, 22 nt, Human
cagaccagaaggaagccgacaa

SEQ ID NO: 400998 - RNA, 22 nt, Human
ggcacagagcccagcuuccuag

SEQ ID NO: 400999 - RNA, 22 nt, Human
uagaaauaaaucugcagcuggg

SEQ ID NO: 401000 - RNA, 22 nt, Human
uuuccaaacccagcgagcuaca

SEQ ID NO: 401001 - RNA, 22 nt, Human
aucaggauagugguuaccuggg

SEQ ID NO: 401002 - RNA, 21 nt, Human
agaauaaugguaucauuugcu

SEQ ID NO: 401003 - RNA, 22 nt, Human
cuuugcaaacgauuaccacaug

SEQ ID NO: 401004 - RNA, 22 nt, Human
uucaccacagucucaucuacgc

SEQ ID NO: 401005 - RNA, 22 nt, Human
acuuuaauuaaugaacuguggc

SEQ ID NO: 401006 - RNA, 22 nt, Human
agaggccaugcuagaggccugg

SEQ ID NO: 401007 - RNA, 22 nt, Human
ugcauaauacguuuccuauaac

SEQ ID NO: 401008 - RNA, 22 nt, Human
aucagaauaauuagauuucaga

SEQ ID NO: 401009 - RNA, 22 nt, Human
aaaucucacuguagucaaagug

SEQ ID NO: 401010 - RNA, 22 nt, Human
gauuuucauuugcacucuagaa

SEQ ID NO: 401011 - RNA, 22 nt, Human
auguagagcaguguuguccaau

SEQ ID NO: 401012 - RNA, 22 nt, Human
uguuuuaaagccauugccuuuc

SEQ ID NO: 401013 - RNA, 22 nt, Human
agagacaaugccaaugcacacg

SEQ ID NO: 401014 - RNA, 22 nt, Human
uaucugagaaagaagcaccaga

SEQ ID NO: 401015 - RNA, 22 nt, Human
uggauuuauggagaccgaaagu

SEQ ID NO: 401016 - RNA, 22 nt, Human
uuguccaaaguaacacaucuag

SEQ ID NO: 401017 - RNA, 22 nt, Human
uguccucagauaugucuacucu

SEQ ID NO: 401018 - RNA, 22 nt, Human
uauggaaacuaauucauuuuuc

SEQ ID NO: 401019 - RNA, 22 nt, Human
uauucaaaguaccuucauugcc

SEQ ID NO: 401020 - RNA, 19 nt, Human
cucucacucgccacauccu

SEQ ID NO: 401021 - RNA, 22 nt, Human
uguaacaauuucuuacuauugu

SEQ ID NO: 401022 - RNA, 20 nt, Human
auuuggcaugaaguauugau

SEQ ID NO: 401023 - RNA, 22 nt, Human
gauuuacaaagcucucuagugu

SEQ ID NO: 401024 - RNA, 22 nt, Human
auucuucacauggauaggaucu

SEQ ID NO: 401025 - RNA, 22 nt, Human
uucuuucucaacaugaauguuu

SEQ ID NO: 401026 - RNA, 22 nt, Human
aagcauuuugccacuugaaguu

SEQ ID NO: 401027 - RNA, 22 nt, Human
gagacaggauuuaaccaaagcu

SEQ ID NO: 401028 - RNA, 22 nt, Human
auuaggcauuauggggauaagg

SEQ ID NO: 401029 - RNA, 22 nt, Human
uguacaauagcuauuaucucca

SEQ ID NO: 401030 - RNA, 22 nt, Human
agguauuauuagcaucucuauu

SEQ ID NO: 401031 - RNA, 22 nt, Human
aauggcuucugaagcacacuuu

SEQ ID NO: 401032 - RNA, 22 nt, Human
uucauucuugucuuuguauagu

SEQ ID NO: 401033 - RNA, 22 nt, Human
uaucagaaacucuggggcaggg

SEQ ID NO: 401034 - RNA, 22 nt, Human
ucacacauucuagguauguuga

SEQ ID NO: 401035 - RNA, 19 nt, Human
ugcuuaauuccuaguaggu

SEQ ID NO: 401036 - RNA, 22 nt, Human
agcauaaaggcacuagaaagag

SEQ ID NO: 401037 - RNA, 22 nt, Human
uugaauaguuuuggauagcaua

SEQ ID NO: 401038 - RNA, 21 nt, Human
uuugaaagcuacaucuauagc

SEQ ID NO: 401039 - RNA, 22 nt, Human
acauaauagguaccugaauaau

SEQ ID NO: 401040 - RNA, 22 nt, Human
auaaaacuuggguaugaucccu

SEQ ID NO: 401041 - RNA, 22 nt, Human
agauauaauaauuuacaagugu

SEQ ID NO: 401042 - RNA, 22 nt, Human
auuuaaaugcuuaagaggguuu

SEQ ID NO: 401043 - RNA, 22 nt, Human
gucacuguuuccuauuauauuu

SEQ ID NO: 401044 - RNA, 22 nt, Human
uuugaaagucaaccuuccaguu

SEQ ID NO: 401045 - RNA, 22 nt, Human
ucagaaaauaacuguuaguuug

SEQ ID NO: 401046 - RNA, 22 nt, Human
uugaaagaagaagcugcgaugu

SEQ ID NO: 401047 - RNA, 22 nt, Human
cucuuaguaaugccaugaagca

SEQ ID NO: 401048 - RNA, 22 nt, Human
ccuauacagccucagcugagau

SEQ ID NO: 401049 - RNA, 22 nt, Human
uuauccaagcagaagcugcaca

SEQ ID NO: 401050 - RNA, 22 nt, Human
uaucuaaauggaauauuccaga

SEQ ID NO: 401051 - RNA, 22 nt, Human
auacuagacuguucuguuauca

SEQ ID NO: 401052 - RNA, 22 nt, Human
caaaagucuguccuuuaacuuc

SEQ ID NO: 401053 - RNA, 21 nt, Human
auuucagagcacacaaguaaa

SEQ ID NO: 401054 - RNA, 22 nt, Human
cagaauggcuuuuauggcucag

SEQ ID NO: 401055 - RNA, 22 nt, Human
uauuuccaccuauuauuuucug

SEQ ID NO: 401056 - RNA, 22 nt, Human
uucaaacaguguagaauauaug

SEQ ID NO: 401057 - RNA, 18 nt, Human
aaguccuuccuuugcuuu

SEQ ID NO: 401058 - RNA, 22 nt, Human
cuuaggcagacugcugaugcag

SEQ ID NO: 401059 - RNA, 22 nt, Human
acaaaauuuuuagacaaggcuu

SEQ ID NO: 401060 - RNA, 22 nt, Human
uguggaaaagaauaagggagau

SEQ ID NO: 401061 - RNA, 22 nt, Human
ggauuuccucuugacucuaaag

SEQ ID NO: 401062 - RNA, 22 nt, Human
guuaauauuuaccugucaagaa

SEQ ID NO: 401063 - RNA, 22 nt, Human
auuaaauuagcaaacugugaaa

SEQ ID NO: 401064 - RNA, 22 nt, Human
cuuugcaaacugucacacuuuc

SEQ ID NO: 401065 - RNA, 22 nt, Human
ucacaaauagcuauauuaagga

SEQ ID NO: 401066 - RNA, 22 nt, Human
uuagccauuaaauuacaaggug

SEQ ID NO: 401067 - RNA, 22 nt, Human
gaucagaaugggacauauccug

SEQ ID NO: 401068 - RNA, 22 nt, Human
gaauuucagggucugguaggaa

SEQ ID NO: 401069 - RNA, 22 nt, Human
uucagaaaucgaguuucauguc

SEQ ID NO: 401070 - RNA, 22 nt, Human
auuauucaacacuugagaaauu

SEQ ID NO: 401071 - RNA, 22 nt, Human
auccauuugaaagaacagucca

SEQ ID NO: 401072 - RNA, 22 nt, Human
uacacacagaggccaugggauu

SEQ ID NO: 401073 - RNA, 22 nt, Human
caacuuuucugugaauuuaagu

SEQ ID NO: 401074 - RNA, 22 nt, Human
caaugaaauugagauccagaga

SEQ ID NO: 401075 - RNA, 21 nt, Human
uucaauacuauuucaauaguc

SEQ ID NO: 401076 - RNA, 22 nt, Human
auggagacgcaagggaccuagg

SEQ ID NO: 401077 - RNA, 22 nt, Human
uuuuuugucuugaagaaauggu

SEQ ID NO: 401078 - RNA, 21 nt, Human
caaagccaggcaacucucucc

SEQ ID NO: 401079 - RNA, 22 nt, Human
uuugaaagaauuuauguacuuu

SEQ ID NO: 401080 - RNA, 22 nt, Human
aacauacauauuucagugucca

SEQ ID NO: 401081 - RNA, 22 nt, Human
cauuuguuggucagauuguagu

SEQ ID NO: 401082 - RNA, 22 nt, Human
acuucuucuucagcugggggau

SEQ ID NO: 401083 - RNA, 22 nt, Human
cagaaacauguauaaaguugua

SEQ ID NO: 401084 - RNA, 22 nt, Human
uuucacacaacgugaauauacu

SEQ ID NO: 401085 - RNA, 22 nt, Human
aguucuucauaaccuuacugug

SEQ ID NO: 401086 - RNA, 22 nt, Human
uucuucuucuggcugcaccugg

SEQ ID NO: 401087 - RNA, 22 nt, Human
uaacacaaaagaauaugugugu

SEQ ID NO: 401088 - RNA, 22 nt, Human
guugaaagagcauggacuugaa

SEQ ID NO: 401089 - RNA, 22 nt, Human
uuugaaaguucuucugacacua

SEQ ID NO: 401090 - RNA, 22 nt, Human
gauuucaagcccccagagauuc

SEQ ID NO: 401091 - RNA, 22 nt, Human
auuccaaacuuaccccagagga

SEQ ID NO: 401092 - RNA, 22 nt, Human
aacauauaaacucuuaaguuca

SEQ ID NO: 401093 - RNA, 22 nt, Human
ucagucucuggggcuucuguuu

SEQ ID NO: 401094 - RNA, 22 nt, Human
uguauaaauuuaaauuccugcu

SEQ ID NO: 401095 - RNA, 22 nt, Human
ucaauucaauugaacaguuacu

SEQ ID NO: 401096 - RNA, 22 nt, Human
aauacugagaucccacaaagca

SEQ ID NO: 401097 - RNA, 22 nt, Human
uaugaagaaaccuauccucuag

SEQ ID NO: 401098 - RNA, 22 nt, Human
uucauacuguguuuccaaguuu

SEQ ID NO: 401099 - RNA, 22 nt, Human
gaaggccacaagagaaguuaag

SEQ ID NO: 401100 - RNA, 22 nt, Human
gucauauacacugcauguaauc

SEQ ID NO: 401101 - RNA, 22 nt, Human
acacaagauuguguauugaauu

SEQ ID NO: 401102 - RNA, 22 nt, Human
gcagagcuccccaagacaccaa

SEQ ID NO: 401103 - RNA, 22 nt, Human
gcuggauccugauucgucuuug

SEQ ID NO: 401104 - RNA, 22 nt, Human
agucucugggcaugguugugac

SEQ ID NO: 401105 - RNA, 22 nt, Human
ucucucagaggaagaggcagug

SEQ ID NO: 401106 - RNA, 23 nt, Human
agaauuccaguuucuuaugucac

SEQ ID NO: 401107 - RNA, 22 nt, Human
acauaauaccuaggacaguuug

SEQ ID NO: 401108 - RNA, 22 nt, Human
aggcuggagggcaauggcaaga

SEQ ID NO: 401109 - RNA, 22 nt, Human
auggguuucccucugaaauuau

SEQ ID NO: 401110 - RNA, 22 nt, Human
uuuccagagcaugucugcucag

SEQ ID NO: 401111 - RNA, 22 nt, Human
ugcuggaauaauuucauguuaa

SEQ ID NO: 401112 - RNA, 22 nt, Human
uucuucuuuccuauaauuaauu

SEQ ID NO: 401113 - RNA, 22 nt, Human
acauuucuaguuguucaucucc

SEQ ID NO: 401114 - RNA, 22 nt, Human
agcauccaacaggagggaaggg

SEQ ID NO: 401115 - RNA, 22 nt, Human
cccaugagguggagguugcagu

SEQ ID NO: 401116 - RNA, 20 nt, Human
ucacaucuggcagcugauga

SEQ ID NO: 401117 - RNA, 22 nt, Human
cuuaaagaaauugaggagagga

SEQ ID NO: 401118 - RNA, 22 nt, Human
cagucaccauagaauaaaacau

SEQ ID NO: 401119 - RNA, 22 nt, Human
aauaaugucuuuggcuugacca

SEQ ID NO: 401120 - RNA, 22 nt, Human
cauuucaaaagaauugccagaa

SEQ ID NO: 401121 - RNA, 22 nt, Human
ucuucuucccaucccucaaaug

SEQ ID NO: 401122 - RNA, 22 nt, Human
gaugggauuuuuuauguguuca

SEQ ID NO: 401123 - RNA, 22 nt, Human
uuggaauucaaguuguagcuua

SEQ ID NO: 401124 - RNA, 22 nt, Human
aaugguuugauggacaaaauga

SEQ ID NO: 401125 - RNA, 22 nt, Human
acaauuccacauggcaugcagg

SEQ ID NO: 401126 - RNA, 22 nt, Human
gugugaaaguuccuaagacuau

SEQ ID NO: 401127 - RNA, 22 nt, Human
uggauuuauuagguuggugaaa

SEQ ID NO: 401128 - RNA, 22 nt, Human
uucagaaagguaaauggauuuc

SEQ ID NO: 401129 - RNA, 22 nt, Human
gucauucuuaacaacucaguag

SEQ ID NO: 401130 - RNA, 22 nt, Human
ugaaacaagauccacagacuug

SEQ ID NO: 401131 - RNA, 23 nt, Human
auguauuuaaauuucagugauga

SEQ ID NO: 401132 - RNA, 21 nt, Human
accaaaaccuauacuuucugu

SEQ ID NO: 401133 - RNA, 23 nt, Human
ggagugcaauggcgccaucucgg

SEQ ID NO: 401134 - RNA, 22 nt, Human
acuauacaagauuagggauuug

SEQ ID NO: 401135 - RNA, 22 nt, Human
augcuuaagcucaguuauauau

SEQ ID NO: 401136 - RNA, 22 nt, Human
caguaaauacauaucagagaag

SEQ ID NO: 401137 - RNA, 22 nt, Human
agacccagaaagcagcugcauu

SEQ ID NO: 401138 - RNA, 22 nt, Human
caauuucagaccuuuccuugga

SEQ ID NO: 401139 - RNA, 22 nt, Human
ucagaauuagagcucuucuuga

SEQ ID NO: 401140 - RNA, 22 nt, Human
uacugccuggagcauuggugcu

SEQ ID NO: 401141 - RNA, 23 nt, Human
ugaguucucaucuuggcuucuau

SEQ ID NO: 401142 - RNA, 22 nt, Human
cauacuuucuuuuucacgcaua

SEQ ID NO: 401143 - RNA, 20 nt, Human
uacagacaugacaauaaugg

SEQ ID NO: 401144 - RNA, 22 nt, Human
cucauacauaugccauuccugc

SEQ ID NO: 401145 - RNA, 22 nt, Human
accgaaggaaacuggaaccguu

SEQ ID NO: 401146 - RNA, 22 nt, Human
guaugaaaauuguaaaguucuu

SEQ ID NO: 401147 - RNA, 22 nt, Human
uauggaaaaauguaucuuguca

SEQ ID NO: 401148 - RNA, 22 nt, Human
aauauaauuuuauuccuagagu

SEQ ID NO: 401149 - RNA, 22 nt, Human
aaauguuucuacuugugagcau

SEQ ID NO: 401150 - RNA, 22 nt, Human
uauuuguugaguuguuaugucu

SEQ ID NO: 401151 - RNA, 23 nt, Human
aagucaccaagaggaaggcggag

SEQ ID NO: 401152 - RNA, 22 nt, Human
aaauacuagaauucagaguuga

SEQ ID NO: 401153 - RNA, 22 nt, Human
ugcaggaaaaccaacacgccuu

SEQ ID NO: 401154 - RNA, 22 nt, Human
cagagcucuauguucauggagg

SEQ ID NO: 401155 - RNA, 22 nt, Human
aagguucuaagggaagccaugc

SEQ ID NO: 401156 - RNA, 22 nt, Human
ggugaguugggguucacagguc

SEQ ID NO: 401157 - RNA, 22 nt, Human
cagauuucagcucauauauuau

SEQ ID NO: 401158 - RNA, 22 nt, Human
gucuccugagccuugacugcaa

SEQ ID NO: 401159 - RNA, 22 nt, Human
auacauacauguaugcacauac

SEQ ID NO: 401160 - RNA, 22 nt, Human
caucagaaggccagaggguagc

SEQ ID NO: 401161 - RNA, 22 nt, Human
uauuaucauuaacuguugaauu

SEQ ID NO: 401162 - RNA, 22 nt, Human
cugguacaaaaugcugauauca

SEQ ID NO: 401163 - RNA, 22 nt, Human
guagaaauuccauuuacuuuga

SEQ ID NO: 401164 - RNA, 22 nt, Human
aaacagacugcacugccaguca

SEQ ID NO: 401165 - RNA, 22 nt, Human
gcucaggaaaacagucuaguaa

SEQ ID NO: 401166 - RNA, 22 nt, Human
aauaacagauuuucaagcugug

SEQ ID NO: 401167 - RNA, 22 nt, Human
uuacaguuuaguccaagccaga

SEQ ID NO: 401168 - RNA, 22 nt, Human
auuacaguaacagcuacaaugc

SEQ ID NO: 401169 - RNA, 20 nt, Human
accaauguuagcuuaguacu

SEQ ID NO: 401170 - RNA, 21 nt, Human
uuuaaagaauaggaagggagg

SEQ ID NO: 401171 - RNA, 22 nt, Human
uugcugaauugaauccuuuggu

SEQ ID NO: 401172 - RNA, 21 nt, Human
aaaguguucagaccaguucug

SEQ ID NO: 401173 - RNA, 22 nt, Human
cuaacuuuagcuuagauuauca

SEQ ID NO: 401174 - RNA, 22 nt, Human
guaguucugcagugucaccuga

SEQ ID NO: 401175 - RNA, 22 nt, Human
uuucaguucaguuuauuauauc

SEQ ID NO: 401176 - RNA, 23 nt, Human
acacauuuuucccguucugaggu

SEQ ID NO: 401177 - RNA, 22 nt, Human
ccaugagcuuccuauauagggu

SEQ ID NO: 401178 - RNA, 22 nt, Human
gcuagaucucucauaaauucca

SEQ ID NO: 401179 - RNA, 22 nt, Human
aaagccuuugucucaggcucug

SEQ ID NO: 401180 - RNA, 22 nt, Human
ucagucucaucaacucuauucc

SEQ ID NO: 401181 - RNA, 22 nt, Human
uaugcuguggaaaauacaaaga

SEQ ID NO: 401182 - RNA, 22 nt, Human
uucuaugccauguucagcuacu

SEQ ID NO: 401183 - RNA, 22 nt, Human
aaagucauuuuccagaccagua

SEQ ID NO: 401184 - RNA, 22 nt, Human
uugauuaaacaggcauauucaa

SEQ ID NO: 401185 - RNA, 22 nt, Human
uaaggccaggcuguggucggca

SEQ ID NO: 401186 - RNA, 22 nt, Human
ucuucagauaaagggagaguau

SEQ ID NO: 401187 - RNA, 22 nt, Human
ugauuuuuagcuauucugaaga

SEQ ID NO: 401188 - RNA, 22 nt, Human
aguuugaaauguuggcaauauu

SEQ ID NO: 401189 - RNA, 22 nt, Human
cuggcuugcagcucaucauaaa

SEQ ID NO: 401190 - RNA, 22 nt, Human
aguaaacauagaauguucuucc

SEQ ID NO: 401191 - RNA, 22 nt, Human
aaucuuucccuauuaaaugugg

SEQ ID NO: 401192 - RNA, 22 nt, Human
uauggaaauaauuagacaagug

SEQ ID NO: 401193 - RNA, 22 nt, Human
cucuaacacuguaaugcuuucu

SEQ ID NO: 401194 - RNA, 22 nt, Human
gagccaaggguugccauggaga

SEQ ID NO: 401195 - RNA, 22 nt, Human
ucugggaacugagcuccccuag

SEQ ID NO: 401196 - RNA, 22 nt, Human
uccuuaauucugugcaauaugu

SEQ ID NO: 401197 - RNA, 21 nt, Human
cucuugugucagagccagagg

SEQ ID NO: 401198 - RNA, 22 nt, Human
ucucgacagccuggcacagugg

SEQ ID NO: 401199 - RNA, 22 nt, Human
ucaguucugcuagaaaaacagu

SEQ ID NO: 401200 - RNA, 22 nt, Human
gucaggauuuacaaacuucagu

SEQ ID NO: 401201 - RNA, 20 nt, Human
uacagaaugcaauaaaaugg

SEQ ID NO: 401202 - RNA, 22 nt, Human
acaugcuuugcacuuacaucau

SEQ ID NO: 401203 - RNA, 22 nt, Human
gcagagacuaguagugcagacu

SEQ ID NO: 401204 - RNA, 22 nt, Human
aguauugugacucaaguauucu

SEQ ID NO: 401205 - RNA, 22 nt, Human
augaacaauaaaauagaucaca

SEQ ID NO: 401206 - RNA, 22 nt, Human
ucauaaaguucuaagaauugua

SEQ ID NO: 401207 - RNA, 22 nt, Human
aguguuuagcaugaaguucauu

SEQ ID NO: 401208 - RNA, 22 nt, Human
aaagcagucacuccagugugau

SEQ ID NO: 401209 - RNA, 22 nt, Human
cguccuuacagagggucacagc

SEQ ID NO: 401210 - RNA, 22 nt, Human
aaaacuguaucuucuugggacu

SEQ ID NO: 401211 - RNA, 22 nt, Human
aauaucaguauauuguaucagu

SEQ ID NO: 401212 - RNA, 22 nt, Human
uuaggaaacgcugcuauugacu

SEQ ID NO: 401213 - RNA, 22 nt, Human
uggugguuaugcgcuuuguggg

SEQ ID NO: 401214 - RNA, 22 nt, Human
uucuuaauaccuauuuucuacc

SEQ ID NO: 401215 - RNA, 20 nt, Human
uggcaucucucaauuguagg

SEQ ID NO: 401216 - RNA, 22 nt, Human
uaauuguagcuuuguaaucagc

SEQ ID NO: 401217 - RNA, 22 nt, Human
caagauggagaagcagcaaggg

SEQ ID NO: 401218 - RNA, 22 nt, Human
acagaauucuaguauguggcuu

SEQ ID NO: 401219 - RNA, 22 nt, Human
uuauuccauucaguucaacaag

SEQ ID NO: 401220 - RNA, 20 nt, Human
agaagucagcucagaaguga

SEQ ID NO: 401221 - RNA, 22 nt, Human
ucaacuuuaguguagcuauuua

SEQ ID NO: 401222 - RNA, 22 nt, Human
auacuguuuugugacuuaucuu

SEQ ID NO: 401223 - RNA, 22 nt, Human
uagauauaagguccuuagaaca

SEQ ID NO: 401224 - RNA, 22 nt, Human
ucccugggcuucuccagacuug

SEQ ID NO: 401225 - RNA, 23 nt, Human
ucuugaaaagccuacagcaguuc

SEQ ID NO: 401226 - RNA, 22 nt, Human
caaaugauaccuauuacuaggc

SEQ ID NO: 401227 - RNA, 22 nt, Human
ucugaaagaagggcagucuuuu

SEQ ID NO: 401228 - RNA, 22 nt, Human
uauugaugcuuggauugggcca

SEQ ID NO: 401229 - RNA, 22 nt, Human
acuuugaaucucagauaaccaa

SEQ ID NO: 401230 - RNA, 22 nt, Human
uauauacuuucuuccuggguag

SEQ ID NO: 401231 - RNA, 22 nt, Human
aaauuaguacauugcaaagucc

SEQ ID NO: 401232 - RNA, 22 nt, Human
uuauaagaguauauaguguacu

SEQ ID NO: 401233 - RNA, 22 nt, Human
uguccuuaaggagcuuaauguc

SEQ ID NO: 401234 - RNA, 22 nt, Human
uuugaagacauauuguuacaua

SEQ ID NO: 401235 - RNA, 22 nt, Human
auaaaaguaggaccaacuuaca

SEQ ID NO: 401236 - RNA, 22 nt, Human
uucuucuuucccccugugguac

SEQ ID NO: 401237 - RNA, 22 nt, Human
cuuauaaaguccaucugaacaa

SEQ ID NO: 401238 - RNA, 22 nt, Human
cagagccacuuggagaugagaa

SEQ ID NO: 401239 - RNA, 22 nt, Human
auguggaggaaaugaguguaca

SEQ ID NO: 401240 - RNA, 21 nt, Human
aggauuuacuauuaacugugu

SEQ ID NO: 401241 - RNA, 22 nt, Human
acaagauaaggugucagugugu

SEQ ID NO: 401242 - RNA, 22 nt, Human
aagucacccuagggccuggacu

SEQ ID NO: 401243 - RNA, 22 nt, Human
uaaaaugaucucucauguucuu

SEQ ID NO: 401244 - RNA, 22 nt, Human
ugaaagguuaaaaguaguauug

SEQ ID NO: 401245 - RNA, 22 nt, Human
uggcuuaagcgcaacucugucu

SEQ ID NO: 401246 - RNA, 22 nt, Human
auugaaaguccuaucuaaggga

SEQ ID NO: 401247 - RNA, 20 nt, Human
uugagcuuuuaguacagaca

SEQ ID NO: 401248 - RNA, 22 nt, Human
acagaauuuaaagcucuagacu

SEQ ID NO: 401249 - RNA, 22 nt, Human
auuuagcaaaaaaugaugaagc

SEQ ID NO: 401250 - RNA, 22 nt, Human
gaauuucaaaagccagaacggg

SEQ ID NO: 401251 - RNA, 22 nt, Human
cuucuuaaucccuuauauauuu

SEQ ID NO: 401252 - RNA, 22 nt, Human
gcaacuuuagaaaaaucuauaa

SEQ ID NO: 401253 - RNA, 22 nt, Human
ucacaucaacauuauagcauga

SEQ ID NO: 401254 - RNA, 22 nt, Human
acaucugaccauuacaagacau

SEQ ID NO: 401255 - RNA, 22 nt, Human
auuaguaaaacauuguauaugu

SEQ ID NO: 401256 - RNA, 21 nt, Human
aaauacagaugcaaaucuguu

SEQ ID NO: 401257 - RNA, 22 nt, Human
ucuucagacccuuagcugugau

SEQ ID NO: 401258 - RNA, 23 nt, Human
aaggccagaauuucaauggugcc

SEQ ID NO: 401259 - RNA, 22 nt, Human
uuacagaaguauugagagaucc

SEQ ID NO: 401260 - RNA, 22 nt, Human
cauucucaauaguagaugagua

SEQ ID NO: 401261 - RNA, 18 nt, Human
agucuucugauccauuuu

SEQ ID NO: 401262 - RNA, 19 nt, Human
ucauuguugguuugucggg

SEQ ID NO: 401263 - RNA, 19 nt, Human
aaaauugcguauuuugagg

SEQ ID NO: 401264 - RNA, 22 nt, Human
uuaacaugucuugacuucaucu

SEQ ID NO: 401265 - RNA, 22 nt, Human
cugcagagaccuaggucagguu

SEQ ID NO: 401266 - RNA, 22 nt, Human
ccaggcugggcuacaaguugag

SEQ ID NO: 401267 - RNA, 22 nt, Human
cugaggaagacagcagcugugu

SEQ ID NO: 401268 - RNA, 21 nt, Human
ucauucacaggguauuguaua

SEQ ID NO: 401269 - RNA, 22 nt, Human
uuucuaggucuuccauacugcc

SEQ ID NO: 401270 - RNA, 22 nt, Human
gcuucacacuaaaaauguuaaa

SEQ ID NO: 401271 - RNA, 22 nt, Human
caaauucaaugaacauguuuaa

SEQ ID NO: 401272 - RNA, 22 nt, Human
ccaguacugucuccaauauucc

SEQ ID NO: 401273 - RNA, 22 nt, Human
gauuuauaguaugugcuuucag

SEQ ID NO: 401274 - RNA, 22 nt, Human
cuguggaaauaaacaaugcuaa

SEQ ID NO: 401275 - RNA, 22 nt, Human
aaagucauccaaauuuuuaugu

SEQ ID NO: 401276 - RNA, 22 nt, Human
cuaaaauuaucaagauaauucc

SEQ ID NO: 401277 - RNA, 22 nt, Human
agaagucauuuauguuagauga

SEQ ID NO: 401278 - RNA, 22 nt, Human
auuauucaaucauauuaaaagu

SEQ ID NO: 401279 - RNA, 22 nt, Human
uuugaagugcaaugaggauucu

SEQ ID NO: 401280 - RNA, 22 nt, Human
gauaaaauauguggccuuuagu

SEQ ID NO: 401281 - RNA, 22 nt, Human
aucuagaacuuaaagucaguca

SEQ ID NO: 401282 - RNA, 22 nt, Human
uuugaauagcauaggauuacau

SEQ ID NO: 401283 - RNA, 22 nt, Human
uuuauuaugauggacaccuucg

SEQ ID NO: 401284 - RNA, 22 nt, Human
gucuucuuguguugccugucuu

SEQ ID NO: 401285 - RNA, 22 nt, Human
aaggcagucugguuucaaagca

SEQ ID NO: 401286 - RNA, 22 nt, Human
uacagaaaaacuggcauugaag

SEQ ID NO: 401287 - RNA, 20 nt, Human
acaauacagguugugucuga

SEQ ID NO: 401288 - RNA, 22 nt, Human
augaaaacggaccagagcuauu

SEQ ID NO: 401289 - RNA, 22 nt, Human
gcuucacaggcaaguuaagccu

SEQ ID NO: 401290 - RNA, 22 nt, Human
aaucagaaauucuacaucacaa

SEQ ID NO: 401291 - RNA, 22 nt, Human
aucauucuagcuguuguguuga

SEQ ID NO: 401292 - RNA, 22 nt, Human
ucacauucucagcaucuauaca

SEQ ID NO: 401293 - RNA, 22 nt, Human
aggauuuacaaugauucuaggu

SEQ ID NO: 401294 - RNA, 22 nt, Human
ucuuaauugagaacaguguagg

SEQ ID NO: 401295 - RNA, 22 nt, Human
gagauuuagagagacuuaaaca

SEQ ID NO: 401296 - RNA, 22 nt, Human
ucugaaggugcuagagaaagcu

SEQ ID NO: 401297 - RNA, 22 nt, Human
uuauucuuuaaacauauauguu

SEQ ID NO: 401298 - RNA, 22 nt, Human
agcauuuauuucuuagaaauug

SEQ ID NO: 401299 - RNA, 22 nt, Human
agauuuacugagaacugauuac

SEQ ID NO: 401300 - RNA, 22 nt, Human
uuacuacugcuuuacuacuggg

SEQ ID NO: 401301 - RNA, 22 nt, Human
uaaauacagucauuugagccau

SEQ ID NO: 401302 - RNA, 22 nt, Human
cagcuucugucugauuagcaag

SEQ ID NO: 401303 - RNA, 22 nt, Human
aguggcagagccaaguagagcc

SEQ ID NO: 401304 - RNA, 22 nt, Human
gauaaaauucuuauuuuacccg

SEQ ID NO: 401305 - RNA, 22 nt, Human
aauguauuccucaugcaagagu

SEQ ID NO: 401306 - RNA, 22 nt, Human
caguccuugcucaaagucuaca

SEQ ID NO: 401307 - RNA, 22 nt, Human
aacagacaacuccuguggcuca

SEQ ID NO: 401308 - RNA, 22 nt, Human
ugaguucucacccauucuucuu

SEQ ID NO: 401309 - RNA, 22 nt, Human
gcagaagucagaccaucugaau

SEQ ID NO: 401310 - RNA, 22 nt, Human
uuaauauguugaaauuuauuag

SEQ ID NO: 401311 - RNA, 22 nt, Human
ucuacugugguccuuguaacca

SEQ ID NO: 401312 - RNA, 22 nt, Human
uucuucuucauuucugacgaug

SEQ ID NO: 401313 - RNA, 22 nt, Human
acagucauuagauacaaugucu

SEQ ID NO: 401314 - RNA, 22 nt, Human
uuucacauuagauaugucauuu

SEQ ID NO: 401315 - RNA, 22 nt, Human
uaguccuuuccggcugcuauaa

SEQ ID NO: 401316 - RNA, 22 nt, Human
uccuuguugcugcagucaccug

SEQ ID NO: 401317 - RNA, 22 nt, Human
ccagaucuucuuuucagugucu

SEQ ID NO: 401318 - RNA, 23 nt, Human
uuccacaaugaaaauaaagcagg

SEQ ID NO: 401319 - RNA, 22 nt, Human
cuuuccaagaaugcagauaccu

SEQ ID NO: 401320 - RNA, 22 nt, Human
uacaaaaaauugauacugacga

SEQ ID NO: 401321 - RNA, 22 nt, Human
ccaaacaaauccccauucuuag

SEQ ID NO: 401322 - RNA, 22 nt, Human
aucugacuucacgcccaugcca

SEQ ID NO: 401323 - RNA, 21 nt, Human
gcuauacagaauggccagagg

SEQ ID NO: 401324 - RNA, 20 nt, Human
gaaguccuguuauauccuuu

SEQ ID NO: 401325 - RNA, 22 nt, Human
uucaggauccccuugaugggcu

SEQ ID NO: 401326 - RNA, 22 nt, Human
cucccagagaccaagcugagaa

SEQ ID NO: 401327 - RNA, 22 nt, Human
caaagucauggggaugcagguc

SEQ ID NO: 401328 - RNA, 23 nt, Human
caguggagacucaugcuuccuua

SEQ ID NO: 401329 - RNA, 20 nt, Human
ugugaaagcaguagaaugac

SEQ ID NO: 401330 - RNA, 22 nt, Human
uauaucauggagauuaacauuc

SEQ ID NO: 401331 - RNA, 22 nt, Human
uucuucaugcuguugcugcuug

SEQ ID NO: 401332 - RNA, 22 nt, Human
ccacuucaucagugcuccauuu

SEQ ID NO: 401333 - RNA, 22 nt, Human
aaucccagcuacucaggaaguu

SEQ ID NO: 401334 - RNA, 22 nt, Human
aauaacuggcacauaucacaua

SEQ ID NO: 401335 - RNA, 22 nt, Human
uucuuaaucuguguggguucga

SEQ ID NO: 401336 - RNA, 23 nt, Human
aucaaaggauguagagaagaagc

SEQ ID NO: 401337 - RNA, 21 nt, Human
uuugaaagcccuauguuuuca

SEQ ID NO: 401338 - RNA, 22 nt, Human
uauaacaggaaguauucaaaca

SEQ ID NO: 401339 - RNA, 22 nt, Human
gaucuucuagcagaaguaauuu

SEQ ID NO: 401340 - RNA, 22 nt, Human
caucagaaaccuugaggaaacu

SEQ ID NO: 401341 - RNA, 22 nt, Human
caucagaagauggcucuggaaa

SEQ ID NO: 401342 - RNA, 22 nt, Human
aucacaaaggguuuucucugag

SEQ ID NO: 401343 - RNA, 22 nt, Human
auuauaaagaacaugugugugg

SEQ ID NO: 401344 - RNA, 22 nt, Human
uauggcuuuucauuccuaugug

SEQ ID NO: 401345 - RNA, 22 nt, Human
uuauuauagauuaugcaagauu

SEQ ID NO: 401346 - RNA, 22 nt, Human
acauaccauacauggugagaug

SEQ ID NO: 401347 - RNA, 22 nt, Human
gaauacaugauacaugaacugc

SEQ ID NO: 401348 - RNA, 19 nt, Human
guuaggcaggguggggagu

SEQ ID NO: 401349 - RNA, 22 nt, Human
aaugaaauguagcuuauccaua

SEQ ID NO: 401350 - RNA, 22 nt, Human
ucauuugugugagugauuugac

SEQ ID NO: 401351 - RNA, 22 nt, Human
cauuuacacacagaggugugcu

SEQ ID NO: 401352 - RNA, 22 nt, Human
cagaaagcuuaggcaaguugga

SEQ ID NO: 401353 - RNA, 21 nt, Human
uaaggccaagucuauuucugu

SEQ ID NO: 401354 - RNA, 22 nt, Human
aagccaaugagagaggccucag

SEQ ID NO: 401355 - RNA, 22 nt, Human
ggaucugagagcaagcaggacc

SEQ ID NO: 401356 - RNA, 22 nt, Human
caggauggagaguuguugguug

SEQ ID NO: 401357 - RNA, 22 nt, Human
aaagccagguugugugcaggaa

SEQ ID NO: 401358 - RNA, 22 nt, Human
caagauggguguugugaugguu

SEQ ID NO: 401359 - RNA, 15 nt, Human
aaucagaaguguggc

SEQ ID NO: 401360 - RNA, 22 nt, Human
uucacagucacccuucuccaug

SEQ ID NO: 401361 - RNA, 22 nt, Human
uuccuuagaguuuccagaaagc

SEQ ID NO: 401362 - RNA, 22 nt, Human
aaacauguuuucugaauauuuu

SEQ ID NO: 401363 - RNA, 22 nt, Human
guucuucaggccauccucccag

SEQ ID NO: 401364 - RNA, 22 nt, Human
auggcuuaagaaugcuuuugug

SEQ ID NO: 401365 - RNA, 22 nt, Human
uguucacaucgauggauuuugc

SEQ ID NO: 401366 - RNA, 22 nt, Human
aucaggauuacacggggaugcu

SEQ ID NO: 401367 - RNA, 22 nt, Human
aguuauaaucugcuacugauau

SEQ ID NO: 401368 - RNA, 21 nt, Human
ccaagacucccaucuaguggu

SEQ ID NO: 401369 - RNA, 22 nt, Human
ccucaugguacuuacuguagcu

SEQ ID NO: 401370 - RNA, 22 nt, Human
uguaaauaauuccuaggcuuuu

SEQ ID NO: 401371 - RNA, 22 nt, Human
uggaaugacagagagucugaau

SEQ ID NO: 401372 - RNA, 22 nt, Human
auuccaaaaggauguuagaaug

SEQ ID NO: 401373 - RNA, 22 nt, Human
cauaaaauggcuuguucuuuaa

SEQ ID NO: 401374 - RNA, 20 nt, Human
ugaaggccagcagcauaggg

SEQ ID NO: 401375 - RNA, 22 nt, Human
augugcuucauucuacaugaca

SEQ ID NO: 401376 - RNA, 22 nt, Human
uuuuuauaacucuuuugugaca

SEQ ID NO: 401377 - RNA, 22 nt, Human
uccaugagaacccuuggagaua

SEQ ID NO: 401378 - RNA, 22 nt, Human
aauuucaaacuaauaggaacca

SEQ ID NO: 401379 - RNA, 22 nt, Human
augcuuaacuuccuagucuaua

SEQ ID NO: 401380 - RNA, 22 nt, Human
guugacagcuggugagcugcua

SEQ ID NO: 401381 - RNA, 22 nt, Human
uucaugugauaaaugugugacu

SEQ ID NO: 401382 - RNA, 22 nt, Human
ucaggaauccagacagggcaca

SEQ ID NO: 401383 - RNA, 22 nt, Human
uaaagccaauauaccuagcaua

SEQ ID NO: 401384 - RNA, 22 nt, Human
aucaggauguuuggcugucaua

SEQ ID NO: 401385 - RNA, 22 nt, Human
caguccagcccccugcuaaaag

SEQ ID NO: 401386 - RNA, 23 nt, Human
cccauuuucauguuaacuccugg

SEQ ID NO: 401387 - RNA, 22 nt, Human
uugacacaguuuucucauuaag

SEQ ID NO: 401388 - RNA, 22 nt, Human
cagaugaggcaaccucauugcu

SEQ ID NO: 401389 - RNA, 22 nt, Human
caguaaauuaucucaucucugu

SEQ ID NO: 401390 - RNA, 22 nt, Human
caguccuuggcaaguucucagu

SEQ ID NO: 401391 - RNA, 21 nt, Human
uucuucaguuuaauauaaaau

SEQ ID NO: 401392 - RNA, 22 nt, Human
uucuuuuccuacacagcgauuu

SEQ ID NO: 401393 - RNA, 22 nt, Human
auacagaagaccccuccgucau

SEQ ID NO: 401394 - RNA, 22 nt, Human
agaauaucguagcauauuaucu

SEQ ID NO: 401395 - RNA, 22 nt, Human
aaucauaauuguauacauucau

SEQ ID NO: 401396 - RNA, 18 nt, Human
ugcuuggagcauuuacca

SEQ ID NO: 401397 - RNA, 22 nt, Human
uaagaaucuauuaggaauaugu

SEQ ID NO: 401398 - RNA, 22 nt, Human
gaccauuuguugaaaagauuau

SEQ ID NO: 401399 - RNA, 20 nt, Human
uauggcuuggcaaagcuuca

SEQ ID NO: 401400 - RNA, 22 nt, Human
uuucaaaauuuugcagugguaa

SEQ ID NO: 401401 - RNA, 23 nt, Human
ucucuuucaagagcuuaaugugc

SEQ ID NO: 401402 - RNA, 22 nt, Human
uuucaaaguugggaauuguaau

SEQ ID NO: 401403 - RNA, 22 nt, Human
aguacaaugucugacacaguag

SEQ ID NO: 401404 - RNA, 22 nt, Human
guuaggcaaauaacuguggagc

SEQ ID NO: 401405 - RNA, 22 nt, Human
auuucacaaaccauccugauuu

SEQ ID NO: 401406 - RNA, 22 nt, Human
ucuacuguagugaugcugcagu

SEQ ID NO: 401407 - RNA, 22 nt, Human
uaaauaucaccuggaauuguua

SEQ ID NO: 401408 - RNA, 22 nt, Human
gauuuacagguuagguccugua

SEQ ID NO: 401409 - RNA, 22 nt, Human
aacaaacaaacauuuugucauc

SEQ ID NO: 401410 - RNA, 22 nt, Human
caaggccacguucugcaugcgg

SEQ ID NO: 401411 - RNA, 22 nt, Human
aucugccuggcuccaggugagc

SEQ ID NO: 401412 - RNA, 22 nt, Human
uguuuauaccugcaaccuguca

SEQ ID NO: 401413 - RNA, 22 nt, Human
uucagagaagcaaaggcagauu

SEQ ID NO: 401414 - RNA, 18 nt, Human
caauuucauccuuaagcc

SEQ ID NO: 401415 - RNA, 22 nt, Human
uguuuauaccuugguauaacca

SEQ ID NO: 401416 - RNA, 22 nt, Human
ggaggccagggacccagucagc

SEQ ID NO: 401417 - RNA, 17 nt, Human
uuugaaaggaugucagu

SEQ ID NO: 401418 - RNA, 22 nt, Human
aaauuauaggugccaccuugga

SEQ ID NO: 401419 - RNA, 20 nt, Human
uuucacagucccuguuuccu

SEQ ID NO: 401420 - RNA, 18 nt, Human
guaggucaguaccaagca

SEQ ID NO: 401421 - RNA, 22 nt, Human
aguacaauuauauuuagauggu

SEQ ID NO: 401422 - RNA, 22 nt, Human
uuccuuagggaaagggauaagg

SEQ ID NO: 401423 - RNA, 22 nt, Human
ugaaugaaugaauuaauagagu

SEQ ID NO: 401424 - RNA, 22 nt, Human
gaccaaggaagaggggagccag

SEQ ID NO: 401425 - RNA, 22 nt, Human
ugcagagaaaguguagacaggc

SEQ ID NO: 401426 - RNA, 20 nt, Human
aucaaaggcugauucagucc

SEQ ID NO: 401427 - RNA, 22 nt, Human
ucauuguuucugcuuuucauga

SEQ ID NO: 401428 - RNA, 22 nt, Human
ucucucuuuuuaaucauguaau

SEQ ID NO: 401429 - RNA, 22 nt, Human
uuacauaacgguaugaaaaaug

SEQ ID NO: 401430 - RNA, 22 nt, Human
acaacaaagacacuugaaauga

SEQ ID NO: 401431 - RNA, 22 nt, Human
gaauuucauugcucugcugugu

SEQ ID NO: 401432 - RNA, 20 nt, Human
uacagaaacaggacuuuugg

SEQ ID NO: 401433 - RNA, 22 nt, Human
cucuccucugaaguggugaccc

SEQ ID NO: 401434 - RNA, 18 nt, Human
ccagguggugacagagau

SEQ ID NO: 401435 - RNA, 22 nt, Human
aaagccagagcaagcugucaca

SEQ ID NO: 401436 - RNA, 22 nt, Human
aaaucagugcucauuugaaagg

SEQ ID NO: 401437 - RNA, 22 nt, Human
uguaggccuauguccagcaauu

SEQ ID NO: 401438 - RNA, 22 nt, Human
acauacauauguuuaaaugcau

SEQ ID NO: 401439 - RNA, 22 nt, Human
cucacuguccaacaggcuuuac

SEQ ID NO: 401440 - RNA, 22 nt, Human
gauuuuauauggcauacugugg

SEQ ID NO: 401441 - RNA, 22 nt, Human
auucuucacauaagugcuguac

SEQ ID NO: 401442 - RNA, 22 nt, Human
gccuuaauuuaugucuaacaua

SEQ ID NO: 401443 - RNA, 22 nt, Human
caguaaaugcagauauagauac

SEQ ID NO: 401444 - RNA, 22 nt, Human
gccugcagauauauaggauggu

SEQ ID NO: 401445 - RNA, 22 nt, Human
uuagaaaugcacccaagaccua

SEQ ID NO: 401446 - RNA, 22 nt, Human
auugaaagauuuugggcucaug

SEQ ID NO: 401447 - RNA, 22 nt, Human
ccucagggaaugggaggcuggg

SEQ ID NO: 401448 - RNA, 22 nt, Human
ccaggcugccgaggaaagaaag

SEQ ID NO: 401449 - RNA, 22 nt, Human
uuuuaucugcuucauuaguuga

SEQ ID NO: 401450 - RNA, 21 nt, Human
uuucuucacuuugccccaugu

SEQ ID NO: 401451 - RNA, 22 nt, Human
aggggcucaaagugugcaggga

SEQ ID NO: 401452 - RNA, 22 nt, Human
augguuuaaagaguaugacuuu

SEQ ID NO: 401453 - RNA, 22 nt, Human
aaucagaacuccuaccacagag

SEQ ID NO: 401454 - RNA, 22 nt, Human
uuuaauauucugcauucuccuu

SEQ ID NO: 401455 - RNA, 22 nt, Human
gaauuacaugacccugaguaga

SEQ ID NO: 401456 - RNA, 22 nt, Human
ucacaucauuaagacuucuccu

SEQ ID NO: 401457 - RNA, 22 nt, Human
uauuuauaccaggugaucggag

SEQ ID NO: 401458 - RNA, 22 nt, Human
uucaggauccccaccgcguuua

SEQ ID NO: 401459 - RNA, 22 nt, Human
uuccuuagacagagguggucau

SEQ ID NO: 401460 - RNA, 22 nt, Human
ccuggaucuuucugacugacaa

SEQ ID NO: 401461 - RNA, 22 nt, Human
uauuugcaacauaaaacucuga

SEQ ID NO: 401462 - RNA, 22 nt, Human
uuuccaagagcuuauuucugaa

SEQ ID NO: 401463 - RNA, 22 nt, Human
aacaugucuggguauucacaag

SEQ ID NO: 401464 - RNA, 22 nt, Human
gcuguucucuguaacaugcauu

SEQ ID NO: 401465 - RNA, 22 nt, Human
aacaguaaagacagaauuuauc

SEQ ID NO: 401466 - RNA, 22 nt, Human
caugguuuauuagagcuuauuu

SEQ ID NO: 401467 - RNA, 22 nt, Human
aaagucauuuguauauacccuu

SEQ ID NO: 401468 - RNA, 22 nt, Human
gcagggcaaacccagguguuca

SEQ ID NO: 401469 - RNA, 22 nt, Human
acucaggaauggggcugggacu

SEQ ID NO: 401470 - RNA, 22 nt, Human
uucaccgugaaccgauuccuca

SEQ ID NO: 401471 - RNA, 22 nt, Human
cagagccaggucuaggagucuc

SEQ ID NO: 401472 - RNA, 22 nt, Human
acaagccaauuacugugccagg

SEQ ID NO: 401473 - RNA, 22 nt, Human
uucucuuagcuguaaagucaau

SEQ ID NO: 401474 - RNA, 22 nt, Human
uuccuuaguguuagauucugug

SEQ ID NO: 401475 - RNA, 22 nt, Human
gaaaggcaguacagcugagccu

SEQ ID NO: 401476 - RNA, 22 nt, Human
ucucaggaaauaggauuugagu

SEQ ID NO: 401477 - RNA, 22 nt, Human
ggaucugauuaauaagguggac

SEQ ID NO: 401478 - RNA, 20 nt, Human
uacaauacacaugcauauga

SEQ ID NO: 401479 - RNA, 23 nt, Human
aaaugacauaugguuucugaagg

SEQ ID NO: 401480 - RNA, 22 nt, Human
aaauacuguagauaauagaguu

SEQ ID NO: 401481 - RNA, 22 nt, Human
uaaggccagcaugaaugcagca

SEQ ID NO: 401482 - RNA, 22 nt, Human
uaucauaaguuaauuaaacagu

SEQ ID NO: 401483 - RNA, 22 nt, Human
aauguaaacagcaagagaaggg

SEQ ID NO: 401484 - RNA, 22 nt, Human
uuugaaaggaauuaggaugaca

SEQ ID NO: 401485 - RNA, 22 nt, Human
uuaaggauguugugauuuauua

SEQ ID NO: 401486 - RNA, 22 nt, Human
auccaugaagguacuucucagg

SEQ ID NO: 401487 - RNA, 22 nt, Human
ucaaucacguguuccauguucu

SEQ ID NO: 401488 - RNA, 22 nt, Human
augcugaauugaugcgagggag

SEQ ID NO: 401489 - RNA, 23 nt, Human
uuuaacuuuccaauaauucauug

SEQ ID NO: 401490 - RNA, 22 nt, Human
uagaauaugauuaauuuucuua

SEQ ID NO: 401491 - RNA, 22 nt, Human
auauacaggugguauguguaaa

SEQ ID NO: 401492 - RNA, 22 nt, Human
cugcaucacagcaggaggcaca

SEQ ID NO: 401493 - RNA, 22 nt, Human
aaacaggcaucacucagcaaag

SEQ ID NO: 401494 - RNA, 22 nt, Human
aucauucugauggucaaugcua

SEQ ID NO: 401495 - RNA, 22 nt, Human
gcacaauaauuuuuuuaagagg

SEQ ID NO: 401496 - RNA, 23 nt, Human
aaguacauauauuuagauaguga

SEQ ID NO: 401497 - RNA, 21 nt, Human
auucagaguaauucaucuuua

SEQ ID NO: 401498 - RNA, 22 nt, Human
ucaccgccuugcccggccgggc

SEQ ID NO: 401499 - RNA, 22 nt, Human
ucuucagagugaaagucuguga

SEQ ID NO: 401500 - RNA, 22 nt, Human
guugaaaguggagaaccugguu

SEQ ID NO: 401501 - RNA, 22 nt, Human
cuuugaagauggcaaauuuaga

SEQ ID NO: 401502 - RNA, 22 nt, Human
acaaaauuguguuaaacuuuau

SEQ ID NO: 401503 - RNA, 22 nt, Human
agugauggugagugagaagcuc

SEQ ID NO: 401504 - RNA, 18 nt, Human
caugucugcgccacaagg

SEQ ID NO: 401505 - RNA, 21 nt, Human
gacaaagugaagcaggcagga

SEQ ID NO: 401506 - RNA, 21 nt, Human
cauuucaaagagcuggaaauc

SEQ ID NO: 401507 - RNA, 22 nt, Human
cuagaaauucugauucaguagg

SEQ ID NO: 401508 - RNA, 22 nt, Human
uccuggauaucaaacaaacauu

SEQ ID NO: 401509 - RNA, 22 nt, Human
caaguccucugguuucaaauag

SEQ ID NO: 401510 - RNA, 22 nt, Human
gaaauauacaugaagucggcug

SEQ ID NO: 401511 - RNA, 22 nt, Human
gaauuucaggacaacuggaagg

SEQ ID NO: 401512 - RNA, 22 nt, Human
ccaggcugagcaugauuggagc

SEQ ID NO: 401513 - RNA, 22 nt, Human
auagucacugccuuccauuugu

SEQ ID NO: 401514 - RNA, 22 nt, Human
agauucuacucuagauccaugg

SEQ ID NO: 401515 - RNA, 20 nt, Human
uuucugugagaaacacuguu

SEQ ID NO: 401516 - RNA, 22 nt, Human
auccuuagaagggagugaggac

SEQ ID NO: 401517 - RNA, 22 nt, Human
ucaggaugguguggaggaaaua

SEQ ID NO: 401518 - RNA, 22 nt, Human
aaauagcauaaaauaggaagcu

SEQ ID NO: 401519 - RNA, 21 nt, Human
gauaaaaugggccuugguccu

SEQ ID NO: 401520 - RNA, 22 nt, Human
ugaaagguagcuggccucauag

SEQ ID NO: 401521 - RNA, 22 nt, Human
aaagcaaugcuuguggaaugua

SEQ ID NO: 401522 - RNA, 22 nt, Human
ucaggauggcuucugcaucaaa

SEQ ID NO: 401523 - RNA, 22 nt, Human
gguuauauaauucagugcuuuc

SEQ ID NO: 401524 - RNA, 22 nt, Human
ggcuuggaaaugguaaugagcu

SEQ ID NO: 401525 - RNA, 22 nt, Human
cuucuucaaccugaaaguuuca

SEQ ID NO: 401526 - RNA, 22 nt, Human
ugaaauagucuaaaaaaccaga

SEQ ID NO: 401527 - RNA, 22 nt, Human
guuuuauaauugcuucauaaga

SEQ ID NO: 401528 - RNA, 22 nt, Human
gauagaaagagugguucuuuuu

SEQ ID NO: 401529 - RNA, 21 nt, Human
ucuugaaaauuguagcaguuu

SEQ ID NO: 401530 - RNA, 23 nt, Human
uuuauccaacucuguaaucucuc

SEQ ID NO: 401531 - RNA, 22 nt, Human
ucagaacauugacauucuuauu

SEQ ID NO: 401532 - RNA, 22 nt, Human
gauuuagagcaggaaugcaugg

SEQ ID NO: 401533 - RNA, 22 nt, Human
ggcauuuaauccaucugauuga

SEQ ID NO: 401534 - RNA, 22 nt, Human
ugcuuaauacguauuugcugga

SEQ ID NO: 401535 - RNA, 22 nt, Human
acagagagaaacaaucagcagc

SEQ ID NO: 401536 - RNA, 22 nt, Human
uaugaaacauucauacaaauaa

SEQ ID NO: 401537 - RNA, 20 nt, Human
aacacacugguggcaucagg

SEQ ID NO: 401538 - RNA, 22 nt, Human
auaaaugccucagaaucauccc

SEQ ID NO: 401539 - RNA, 22 nt, Human
ugaaaggugacauuucuuggau

SEQ ID NO: 401540 - RNA, 22 nt, Human
acaguacauaauccugagucug

SEQ ID NO: 401541 - RNA, 20 nt, Human
acaggggcagcacaauaaug

SEQ ID NO: 401542 - RNA, 22 nt, Human
cucaggauucucgacacucaca

SEQ ID NO: 401543 - RNA, 22 nt, Human
uaaggccaauuaacaaccaggg

SEQ ID NO: 401544 - RNA, 23 nt, Human
ugguucuaggccuauaauuauau

SEQ ID NO: 401545 - RNA, 22 nt, Human
uucugugacuccucagagauuu

SEQ ID NO: 401546 - RNA, 22 nt, Human
uuuuaugugcuggacuggcagu

SEQ ID NO: 401547 - RNA, 22 nt, Human
aauacauauggaauuccauguu

SEQ ID NO: 401548 - RNA, 22 nt, Human
uauuccaacugucauagucaua

SEQ ID NO: 401549 - RNA, 22 nt, Human
ucugaagauuaccagcuaaaug

SEQ ID NO: 401550 - RNA, 22 nt, Human
gauaucauaucagacaaccucu

SEQ ID NO: 401551 - RNA, 22 nt, Human
ugaugaauaaacuugagaguca

SEQ ID NO: 401552 - RNA, 22 nt, Human
gauaauaagcacagcaggaugu

SEQ ID NO: 401553 - RNA, 20 nt, Human
ggggcugcaugcagagaaga

SEQ ID NO: 401554 - RNA, 19 nt, Human
uucauucuuucuacuuacc

SEQ ID NO: 401555 - RNA, 22 nt, Human
guuaaagaguuuggcuuucuuc

SEQ ID NO: 401556 - RNA, 22 nt, Human
ugcuuuaaaauggacuguuuug

SEQ ID NO: 401557 - RNA, 21 nt, Human
uucuccccagcgaauccucgg

SEQ ID NO: 401558 - RNA, 22 nt, Human
aaaggaagauugagcuuuucca

SEQ ID NO: 401559 - RNA, 22 nt, Human
aguacaacauuagaguaucuua

SEQ ID NO: 401560 - RNA, 22 nt, Human
aaggcaguuugggccaccaucu

SEQ ID NO: 401561 - RNA, 22 nt, Human
uauacuuuccugcaacuuugau

SEQ ID NO: 401562 - RNA, 22 nt, Human
ucacaaaugaggaaaucgagca

SEQ ID NO: 401563 - RNA, 22 nt, Human
uaguccuuuaauaguuaaugug

SEQ ID NO: 401564 - RNA, 23 nt, Human
ucuguacacaucagcaucuccca

SEQ ID NO: 401565 - RNA, 22 nt, Human
uuucaguuuccagcuuugucau

SEQ ID NO: 401566 - RNA, 22 nt, Human
acuuuugguucuguaacuguga

SEQ ID NO: 401567 - RNA, 22 nt, Human
uacagagauuuauugcuaaggc

SEQ ID NO: 401568 - RNA, 22 nt, Human
agccagucggggccaugcuggg

SEQ ID NO: 401569 - RNA, 22 nt, Human
acuauacauaaaacauuugggu

SEQ ID NO: 401570 - RNA, 22 nt, Human
aaucaaaaccuacagagguaau

SEQ ID NO: 401571 - RNA, 22 nt, Human
acaaaugucuccucuuuuguua

SEQ ID NO: 401572 - RNA, 22 nt, Human
uucuuuuacauuaagauuucag

SEQ ID NO: 401573 - RNA, 22 nt, Human
acuagaaacuaauggauuauua

SEQ ID NO: 401574 - RNA, 22 nt, Human
acucaggaaaaauguagugaua

SEQ ID NO: 401575 - RNA, 22 nt, Human
caucaucaaaacaaauggaguc

SEQ ID NO: 401576 - RNA, 22 nt, Human
augugucuuugagacucugcua

SEQ ID NO: 401577 - RNA, 22 nt, Human
augguuuuccucugcugcuuaa

SEQ ID NO: 401578 - RNA, 22 nt, Human
aucaagaacuuauuuuggaaau

SEQ ID NO: 401579 - RNA, 22 nt, Human
ucaggauaaaauguaauggcaa

SEQ ID NO: 401580 - RNA, 22 nt, Human
aaugucuucaguguauacaugg

SEQ ID NO: 401581 - RNA, 22 nt, Human
gaaaauagcagauagaccaaug

SEQ ID NO: 401582 - RNA, 22 nt, Human
aauaauuuccagccaacuggaa

SEQ ID NO: 401583 - RNA, 22 nt, Human
uuauucuucuucucuugccagg

SEQ ID NO: 401584 - RNA, 22 nt, Human
cucuucuuggcccccaugaggg

SEQ ID NO: 401585 - RNA, 22 nt, Human
augguuuuguccucuuugguuc

SEQ ID NO: 401586 - RNA, 22 nt, Human
uuuaggcaagggcaagauuauc

SEQ ID NO: 401587 - RNA, 22 nt, Human
gaucauuuacuuguucuggacu

SEQ ID NO: 401588 - RNA, 22 nt, Human
aucacaaaggcugcuucaugau

SEQ ID NO: 401589 - RNA, 22 nt, Human
aaagucaugcaguugaacuuuu

SEQ ID NO: 401590 - RNA, 22 nt, Human
acuauacaguauguacgugcac

SEQ ID NO: 401591 - RNA, 22 nt, Human
acacauuucuaaauuuuuaccg

SEQ ID NO: 401592 - RNA, 22 nt, Human
augaaacaguguguauagcaaa

SEQ ID NO: 401593 - RNA, 22 nt, Human
caaagaagagauuuacagagcu

SEQ ID NO: 401594 - RNA, 22 nt, Human
uuccaugaaggagacugagaag

SEQ ID NO: 401595 - RNA, 22 nt, Human
uuuaaugauagcuguuucacau

SEQ ID NO: 401596 - RNA, 18 nt, Human
ucuuccaacacugacacc

SEQ ID NO: 401597 - RNA, 22 nt, Human
caauuucaucuugugcuucaau

SEQ ID NO: 401598 - RNA, 16 nt, Human
uuuccaaagggcagcu

SEQ ID NO: 401599 - RNA, 22 nt, Human
gacuucuauuaauaccucuacu

SEQ ID NO: 401600 - RNA, 22 nt, Human
auacagauguugaauguuauau

SEQ ID NO: 401601 - RNA, 22 nt, Human
cuccuuagugccucugcacgag

SEQ ID NO: 401602 - RNA, 22 nt, Human
guggaauguccuugaucauaag

SEQ ID NO: 401603 - RNA, 22 nt, Human
aauggccagcugggagaguuga

SEQ ID NO: 401604 - RNA, 22 nt, Human
gguacaauggaccauaaaagcu

SEQ ID NO: 401605 - RNA, 22 nt, Human
acagucuugcuguauggucagg

SEQ ID NO: 401606 - RNA, 22 nt, Human
uucaggauaugugauaucugaa

SEQ ID NO: 401607 - RNA, 23 nt, Human
acuuuauccuauaucuuuguucu

SEQ ID NO: 401608 - RNA, 22 nt, Human
uucuuaaucccacaaaucuuca

SEQ ID NO: 401609 - RNA, 22 nt, Human
uaucagaaggaagugccuuuaa

SEQ ID NO: 401610 - RNA, 22 nt, Human
ugaaggccucugguacaugcca

SEQ ID NO: 401611 - RNA, 22 nt, Human
uaaaauguuugcaagagaccag

SEQ ID NO: 401612 - RNA, 22 nt, Human
caaugaaagcaacugccuauaa

SEQ ID NO: 401613 - RNA, 22 nt, Human
uccauuuuucaugacuccucaa

SEQ ID NO: 401614 - RNA, 22 nt, Human
cuuaggcaaccaggucaaugcu

SEQ ID NO: 401615 - RNA, 22 nt, Human
guucuucagcauuagaagucau

SEQ ID NO: 401616 - RNA, 22 nt, Human
aaugagacacgugaagcagaug

SEQ ID NO: 401617 - RNA, 22 nt, Human
uguauguugggucaaaguacau

SEQ ID NO: 401618 - RNA, 22 nt, Human
guaaacauuacugugcuguaua

SEQ ID NO: 401619 - RNA, 17 nt, Human
uaaagccagucaaguca

SEQ ID NO: 401620 - RNA, 22 nt, Human
gauuucaaccuaacaguaugac

SEQ ID NO: 401621 - RNA, 22 nt, Human
agaucaguuagauagcuugaug

SEQ ID NO: 401622 - RNA, 22 nt, Human
uugaaguuguaguucagugaag

SEQ ID NO: 401623 - RNA, 22 nt, Human
aagugagugguaaggagcaugg

SEQ ID NO: 401624 - RNA, 22 nt, Human
aauauaaugcuguuuuaugcca

SEQ ID NO: 401625 - RNA, 17 nt, Human
ucauuuguugugacuag

SEQ ID NO: 401626 - RNA, 22 nt, Human
ggaccuggcaauuugcaucucu

SEQ ID NO: 401627 - RNA, 22 nt, Human
uuucaugagauuccuccacauc

SEQ ID NO: 401628 - RNA, 22 nt, Human
accagcugcugauugcuaaaug

SEQ ID NO: 401629 - RNA, 22 nt, Human
uauuugaaaguguacaaaaacu

SEQ ID NO: 401630 - RNA, 22 nt, Human
uggcaauuuuaggugguuuagu

SEQ ID NO: 401631 - RNA, 22 nt, Human
cuagaaauauuuuacagucaag

SEQ ID NO: 401632 - RNA, 22 nt, Human
augcagcuucaggauuaugaug

SEQ ID NO: 401633 - RNA, 22 nt, Human
uuuaggcauugggugcucaagu

SEQ ID NO: 401634 - RNA, 22 nt, Human
uuggaucacucugaagccuuac

SEQ ID NO: 401635 - RNA, 22 nt, Human
guaggaaaguaaaugaaauaca

SEQ ID NO: 401636 - RNA, 22 nt, Human
uauuuccaggccccacucuaga

SEQ ID NO: 401637 - RNA, 22 nt, Human
ucaaaaguuucacauagagaua

SEQ ID NO: 401638 - RNA, 22 nt, Human
agcauauaaauggacauauuug

SEQ ID NO: 401639 - RNA, 22 nt, Human
agucuucucauuucacaugcuu

SEQ ID NO: 401640 - RNA, 22 nt, Human
caucagaagaaagacaaaugau

SEQ ID NO: 401641 - RNA, 20 nt, Human
uguuaaaggacacuugcuuu

SEQ ID NO: 401642 - RNA, 19 nt, Human
ucucugcuucucuuggcau

SEQ ID NO: 401643 - RNA, 20 nt, Human
gucaggauuaguaaacucug

SEQ ID NO: 401644 - RNA, 22 nt, Human
cauaauaucuccgauuacuugc

SEQ ID NO: 401645 - RNA, 22 nt, Human
aaugauuuccccuacacagaag

SEQ ID NO: 401646 - RNA, 22 nt, Human
aucaggauucaguaucuccagc

SEQ ID NO: 401647 - RNA, 22 nt, Human
uugaagaaauuauuuuauauag

SEQ ID NO: 401648 - RNA, 22 nt, Human
ugucaccagcugcuccucagga

SEQ ID NO: 401649 - RNA, 22 nt, Human
uaaguccuagcuuugguaggaa

SEQ ID NO: 401650 - RNA, 20 nt, Human
cuucuucaguaguuuguucu

SEQ ID NO: 401651 - RNA, 22 nt, Human
uaaguccuaauggcagaagucu

SEQ ID NO: 401652 - RNA, 22 nt, Human
uuagaaaugauuucaccucuuu

SEQ ID NO: 401653 - RNA, 22 nt, Human
caauuucaugccauguauugcu

SEQ ID NO: 401654 - RNA, 22 nt, Human
gaggggcagagguagagaacaa

SEQ ID NO: 401655 - RNA, 22 nt, Human
ugugaaggagaugaagggagug

SEQ ID NO: 401656 - RNA, 22 nt, Human
ucagagaguuggaaagaauuaa

SEQ ID NO: 401657 - RNA, 22 nt, Human
auuuggcaacauuaauugaauc

SEQ ID NO: 401658 - RNA, 22 nt, Human
uuuuuauaugaaggauagugcg

SEQ ID NO: 401659 - RNA, 23 nt, Human
cagaaauaaacugguuuguagau

SEQ ID NO: 401660 - RNA, 22 nt, Human
ugaaauaauaucuggaucaauc

SEQ ID NO: 401661 - RNA, 22 nt, Human
uggagacugugcuaagggaguu

SEQ ID NO: 401662 - RNA, 23 nt, Human
uuucaaauuacucugcagaugac

SEQ ID NO: 401663 - RNA, 22 nt, Human
cucaggaugucggugacuauug

SEQ ID NO: 401664 - RNA, 22 nt, Human
uucagcaaauggacuguucagg

SEQ ID NO: 401665 - RNA, 22 nt, Human
caugugguucaaguacuccaca

SEQ ID NO: 401666 - RNA, 22 nt, Human
aaauuccagaaacucaguauau

SEQ ID NO: 401667 - RNA, 22 nt, Human
uuauucuuuucuccagaauccc

SEQ ID NO: 401668 - RNA, 22 nt, Human
cuggauuugccuauggugcuuu

SEQ ID NO: 401669 - RNA, 23 nt, Human
uauuacaauuggucuuauuaaga

SEQ ID NO: 401670 - RNA, 22 nt, Human
cuucuuaacuguauauacuaug

SEQ ID NO: 401671 - RNA, 22 nt, Human
auguacaaaauguuuugaaaug

SEQ ID NO: 401672 - RNA, 22 nt, Human
guugaaagaugucuugguuccc

SEQ ID NO: 401673 - RNA, 22 nt, Human
augguuuacaauguuuucaguu

SEQ ID NO: 401674 - RNA, 22 nt, Human
guucuaauaggagaaaagacag

SEQ ID NO: 401675 - RNA, 22 nt, Human
caagagagaugcagcucacuca

SEQ ID NO: 401676 - RNA, 22 nt, Human
uuacagaagaguaacuuggcaa

SEQ ID NO: 401677 - RNA, 22 nt, Human
auaugaaaguaagcaugugugu

SEQ ID NO: 401678 - RNA, 22 nt, Human
ucuuuaauaucugccccagagc

SEQ ID NO: 401679 - RNA, 22 nt, Human
cuagccugggauuugaacuuau

SEQ ID NO: 401680 - RNA, 22 nt, Human
uucauugucucuguuugccuuc

SEQ ID NO: 401681 - RNA, 22 nt, Human
uucagaaguagcuaagcaguca

SEQ ID NO: 401682 - RNA, 22 nt, Human
aguucucauugcaugagacaga

SEQ ID NO: 401683 - RNA, 22 nt, Human
ugcuuaauagugcacugguuuc

SEQ ID NO: 401684 - RNA, 22 nt, Human
uauuucaacguaugaaaagcug

SEQ ID NO: 401685 - RNA, 22 nt, Human
aaugucugcucuacucaggagg

SEQ ID NO: 401686 - RNA, 22 nt, Human
ugaguaauaaacugucuugcuc

SEQ ID NO: 401687 - RNA, 22 nt, Human
uuagaaauauggugcugccgcc

SEQ ID NO: 401688 - RNA, 22 nt, Human
uuggagagaggcugcucaggcu

SEQ ID NO: 401689 - RNA, 22 nt, Human
uauacagaacugcacgugcacg

SEQ ID NO: 401690 - RNA, 22 nt, Human
gauggcuucagucuccuugggu

SEQ ID NO: 401691 - RNA, 22 nt, Human
cuacagaauucaacaaaugguu

SEQ ID NO: 401692 - RNA, 22 nt, Human
caugcuuauucauucugcuaac

SEQ ID NO: 401693 - RNA, 22 nt, Human
uugaagaaagucauauauaaug

SEQ ID NO: 401694 - RNA, 22 nt, Human
acauuuaaauaccuauguuucu

SEQ ID NO: 401695 - RNA, 22 nt, Human
uucauugugaacacauucugcc

SEQ ID NO: 401696 - RNA, 22 nt, Human
aaugcuuaauucaauacugugu

SEQ ID NO: 401697 - RNA, 22 nt, Human
ucuucuccagugcuucugcaca

SEQ ID NO: 401698 - RNA, 22 nt, Human
ugcuuucaaaggcuuucuagau

SEQ ID NO: 401699 - RNA, 22 nt, Human
uguguuauugccacugaagacc

SEQ ID NO: 401700 - RNA, 22 nt, Human
auucaagauuaauucuauguca

SEQ ID NO: 401701 - RNA, 18 nt, Human
uaagucauuuugccagca

SEQ ID NO: 401702 - RNA, 22 nt, Human
uguagaaauuaguaagaucaac

SEQ ID NO: 401703 - RNA, 22 nt, Human
aucagcuuuucucaucagaaau

SEQ ID NO: 401704 - RNA, 22 nt, Human
ucuauacaaguuucacuuugac

SEQ ID NO: 401705 - RNA, 22 nt, Human
aaguccauucuuccagccagcu

SEQ ID NO: 401706 - RNA, 19 nt, Human
uuugaaagaguuuuauugg

SEQ ID NO: 401707 - RNA, 22 nt, Human
gagggagugccagagggccagc

SEQ ID NO: 401708 - RNA, 22 nt, Human
uugcacuaggaaaaggcagcca

SEQ ID NO: 401709 - RNA, 22 nt, Human
uaaagacacugguuuuaaucau

SEQ ID NO: 401710 - RNA, 22 nt, Human
uccaugucuucaugugucuaac

SEQ ID NO: 401711 - RNA, 21 nt, Human
uaucagaagagaaagaaugau

SEQ ID NO: 401712 - RNA, 22 nt, Human
cuuauacacccucuucccaggc

SEQ ID NO: 401713 - RNA, 22 nt, Human
acagaaauaacuuuuuauguuu

SEQ ID NO: 401714 - RNA, 22 nt, Human
uuauacuuuauacuacaucauu

SEQ ID NO: 401715 - RNA, 22 nt, Human
acaacuuuagucuggagggaaa

SEQ ID NO: 401716 - RNA, 22 nt, Human
guaaaauagaauaacguggcua

SEQ ID NO: 401717 - RNA, 22 nt, Human
aaggaaccauuugugugcaugg

SEQ ID NO: 401718 - RNA, 22 nt, Human
ugacuucaagguucagcaccuu

SEQ ID NO: 401719 - RNA, 22 nt, Human
uuugaaagacagaauauuuuug

SEQ ID NO: 401720 - RNA, 22 nt, Human
aucauuacuccuguaaaauugu

SEQ ID NO: 401721 - RNA, 22 nt, Human
uggcuuuaggagcuauauaccu

SEQ ID NO: 401722 - RNA, 22 nt, Human
cuuuuccacugagccucacaaa

SEQ ID NO: 401723 - RNA, 22 nt, Human
aaugucugccagaacugaucau

SEQ ID NO: 401724 - RNA, 22 nt, Human
uaauaucuacuucauagaguuu

SEQ ID NO: 401725 - RNA, 22 nt, Human
aaaggaagaugccaggacucug

SEQ ID NO: 401726 - RNA, 22 nt, Human
uuuccaaaggaguaccacgcau

SEQ ID NO: 401727 - RNA, 20 nt, Human
ucucagcauaagaacccuuc

SEQ ID NO: 401728 - RNA, 22 nt, Human
uuggaucaaauuucaugcuguc

SEQ ID NO: 401729 - RNA, 22 nt, Human
aguaaaauuaauggaucagaag

SEQ ID NO: 401730 - RNA, 22 nt, Human
aaaugaaaugagugccuggagg

SEQ ID NO: 401731 - RNA, 22 nt, Human
acuuugcagggcuugauaucca

SEQ ID NO: 401732 - RNA, 22 nt, Human
caaaauuguugaugcugcuuug

SEQ ID NO: 401733 - RNA, 22 nt, Human
caaggccaugagcagcgagugu

SEQ ID NO: 401734 - RNA, 22 nt, Human
caaguccuaggucugauugaac

SEQ ID NO: 401735 - RNA, 18 nt, Human
gcaggcuuuuccuggguc

SEQ ID NO: 401736 - RNA, 22 nt, Human
agaucauaugaaaaauuucaag

SEQ ID NO: 401737 - RNA, 20 nt, Human
caucaucacaugagccaauu

SEQ ID NO: 401738 - RNA, 22 nt, Human
gaauacaaacuuaaggcuuuac

SEQ ID NO: 401739 - RNA, 22 nt, Human
uucaggaucaaguugccaguag

SEQ ID NO: 401740 - RNA, 22 nt, Human
ucccaaagcuacucuucugacu

SEQ ID NO: 401741 - RNA, 22 nt, Human
acaaagucacaauaauuaaccu

SEQ ID NO: 401742 - RNA, 22 nt, Human
uugguacagaugagguauucuc

SEQ ID NO: 401743 - RNA, 22 nt, Human
auggcuuuguuccaauaaaacu

SEQ ID NO: 401744 - RNA, 22 nt, Human
aauuauauuguggugugaaugu

SEQ ID NO: 401745 - RNA, 22 nt, Human
uaauuccaccuuuuuccaacuu

SEQ ID NO: 401746 - RNA, 22 nt, Human
aaauauaguaaaugcauaguuc

SEQ ID NO: 401747 - RNA, 22 nt, Human
uacaggaaguaaguaaugaaau

SEQ ID NO: 401748 - RNA, 22 nt, Human
aaagcaauggaugagaaucugu

SEQ ID NO: 401749 - RNA, 19 nt, Human
guuccaaaggccagaccuu

SEQ ID NO: 401750 - RNA, 22 nt, Human
gucagagagggcacgugcacac

SEQ ID NO: 401751 - RNA, 22 nt, Human
uucaaauacauucuuugccacu

SEQ ID NO: 401752 - RNA, 22 nt, Human
uuucagacagauucuucucagu

SEQ ID NO: 401753 - RNA, 22 nt, Human
ucuuuaaucauaaccaagaugg

SEQ ID NO: 401754 - RNA, 22 nt, Human
acauguauugacauuauauucu

SEQ ID NO: 401755 - RNA, 22 nt, Human
guaaacauuuucaucugugccc

SEQ ID NO: 401756 - RNA, 22 nt, Human
auacaugugggucuaaacauau

SEQ ID NO: 401757 - RNA, 22 nt, Human
cuggaagagcauuugcauaggg

SEQ ID NO: 401758 - RNA, 19 nt, Human
uuccaaaaucaggauuuga

SEQ ID NO: 401759 - RNA, 22 nt, Human
caaucaguaaccggaucauggu

SEQ ID NO: 401760 - RNA, 22 nt, Human
uacaacauuguguugcuucaua

SEQ ID NO: 401761 - RNA, 22 nt, Human
uucacacacagcuuccuauugu

SEQ ID NO: 401762 - RNA, 22 nt, Human
ugauuuccuaggucuggagaag

SEQ ID NO: 401763 - RNA, 22 nt, Human
uuauuacacugaaagaauugcg

SEQ ID NO: 401764 - RNA, 22 nt, Human
auccaaaccuggacaugagugg

SEQ ID NO: 401765 - RNA, 22 nt, Human
ggccuuuaagcaauugaaaaga

SEQ ID NO: 401766 - RNA, 22 nt, Human
aucuaaaguguuucaugaaaga

SEQ ID NO: 401767 - RNA, 22 nt, Human
uucaggauucugugucugacaa

SEQ ID NO: 401768 - RNA, 22 nt, Human
ucacaugaguauuauuuuccaa

SEQ ID NO: 401769 - RNA, 22 nt, Human
ugacaguuaagguauacauuca

SEQ ID NO: 401770 - RNA, 22 nt, Human
agucaccaucuguggcagccug

SEQ ID NO: 401771 - RNA, 22 nt, Human
gcaggaaagguugagacuuugc

SEQ ID NO: 401772 - RNA, 22 nt, Human
aguccagugaacuguaaauagg

SEQ ID NO: 401773 - RNA, 22 nt, Human
uauaucaccaaaaacaguucug

SEQ ID NO: 401774 - RNA, 22 nt, Human
ucauucuugaucacuaguuagu

SEQ ID NO: 401775 - RNA, 22 nt, Human
uaaugucagcauaguuuauuuu

SEQ ID NO: 401776 - RNA, 22 nt, Human
uucccucuccuacucaggaaag

SEQ ID NO: 401777 - RNA, 21 nt, Human
agaauucuuaaguauucuaau

SEQ ID NO: 401778 - RNA, 23 nt, Human
uacuuaggguuuagaucugacug

SEQ ID NO: 401779 - RNA, 22 nt, Human
ucuauacaugugcacacacauc

SEQ ID NO: 401780 - RNA, 20 nt, Human
uauuuacaacuuagagccuc

SEQ ID NO: 401781 - RNA, 22 nt, Human
gauuucaaaaguagauccauca

SEQ ID NO: 401782 - RNA, 22 nt, Human
ugugaauaaugccgcaauaaac

SEQ ID NO: 401783 - RNA, 22 nt, Human
ucuuuuggguucuuaugauuua

SEQ ID NO: 401784 - RNA, 20 nt, Human
cucaggauugucuagccccu

SEQ ID NO: 401785 - RNA, 22 nt, Human
ugucaccacuggcugaaacacc

SEQ ID NO: 401786 - RNA, 22 nt, Human
aaguccuuggagaauagaaagg

SEQ ID NO: 401787 - RNA, 22 nt, Human
agcauuuagucuuuauugcagc

SEQ ID NO: 401788 - RNA, 22 nt, Human
agccuauuccaggaugagcuca

SEQ ID NO: 401789 - RNA, 22 nt, Human
ccacuguuuuucaguuaacuuu

SEQ ID NO: 401790 - RNA, 22 nt, Human
auuucauacuaaggcucaaaaa

SEQ ID NO: 401791 - RNA, 22 nt, Human
ucuucagauggccaguuguccc

SEQ ID NO: 401792 - RNA, 22 nt, Human
auaugaaaagaagucaccauug

SEQ ID NO: 401793 - RNA, 22 nt, Human
uuacagaaaguuucccaugccg

SEQ ID NO: 401794 - RNA, 22 nt, Human
ucacaguaaaagcauggaagag

SEQ ID NO: 401795 - RNA, 22 nt, Human
auggaucacagugccgugggug

SEQ ID NO: 401796 - RNA, 19 nt, Human
uggcauuuggaggcaaccu

SEQ ID NO: 401797 - RNA, 22 nt, Human
auuucauugaaguuaauucuuc

SEQ ID NO: 401798 - RNA, 22 nt, Human
aaugccuuuccacuggguauca

SEQ ID NO: 401799 - RNA, 22 nt, Human
uuuucuuaggugcuccaaguag

SEQ ID NO: 401800 - RNA, 22 nt, Human
aaaguccuguuaacuguuaaca

SEQ ID NO: 401801 - RNA, 22 nt, Human
auugauggcggccucuccauau

SEQ ID NO: 401802 - RNA, 22 nt, Human
ucauuuaauagcuuuugucuuu

SEQ ID NO: 401803 - RNA, 22 nt, Human
uagaauaaguugaugauauaug

SEQ ID NO: 401804 - RNA, 22 nt, Human
auacaaugaaguauagaugaaa

SEQ ID NO: 401805 - RNA, 22 nt, Human
uuauccuggauuauauauguga

SEQ ID NO: 401806 - RNA, 22 nt, Human
aggcaguuguugcugagcagcu

SEQ ID NO: 401807 - RNA, 22 nt, Human
uagcaucuggagaaacaagucc

SEQ ID NO: 401808 - RNA, 22 nt, Human
aagauaaacucuugauuucuga

SEQ ID NO: 401809 - RNA, 22 nt, Human
gggacuucauagcuaggcacuu

SEQ ID NO: 401810 - RNA, 22 nt, Human
aaugcauauguaggcaagcagu

SEQ ID NO: 401811 - RNA, 22 nt, Human
uuuagaaguucacacauuuaaa

SEQ ID NO: 401812 - RNA, 20 nt, Human
auucuacaagaauaagcaug

SEQ ID NO: 401813 - RNA, 19 nt, Human
ucucuacacuacauuucua

SEQ ID NO: 401814 - RNA, 22 nt, Human
ucuuagaaauuccccaguggcu

SEQ ID NO: 401815 - RNA, 22 nt, Human
cuuugcaauagaggcacacaug

SEQ ID NO: 401816 - RNA, 22 nt, Human
guuuacauguacucauuauacu

SEQ ID NO: 401817 - RNA, 22 nt, Human
ccucacugaagaggugacauuu

SEQ ID NO: 401818 - RNA, 22 nt, Human
cagaauuuagcacaauguaugg

SEQ ID NO: 401819 - RNA, 22 nt, Human
ucagagaaauaauugcugaguu

SEQ ID NO: 401820 - RNA, 22 nt, Human
uaucaagugacuaucacagaac

SEQ ID NO: 401821 - RNA, 22 nt, Human
ucuucuuccucauuuauacaua

SEQ ID NO: 401822 - RNA, 22 nt, Human
gaaauagacacuuucuaugaau

SEQ ID NO: 401823 - RNA, 22 nt, Human
guaaacaacacaaaucauuuga

SEQ ID NO: 401824 - RNA, 22 nt, Human
aaaucaguucacguucugaggu

SEQ ID NO: 401825 - RNA, 22 nt, Human
gaccauuuuuacagagcauuca

SEQ ID NO: 401826 - RNA, 22 nt, Human
ugaucugagagcagaucaccau

SEQ ID NO: 401827 - RNA, 22 nt, Human
caucagaauagcucuguggaua

SEQ ID NO: 401828 - RNA, 22 nt, Human
gcauguguuauuuuauguauga

SEQ ID NO: 401829 - RNA, 22 nt, Human
cugucccuucauuauucacuac

SEQ ID NO: 401830 - RNA, 22 nt, Human
augugaaaccugugaguagagu

SEQ ID NO: 401831 - RNA, 22 nt, Human
uggcuuuacugucauucuuaug

SEQ ID NO: 401832 - RNA, 21 nt, Human
gagauuuagaaggaucaauuu

SEQ ID NO: 401833 - RNA, 22 nt, Human
auggauuugcuuauacacaugu

SEQ ID NO: 401834 - RNA, 22 nt, Human
caaguccaucagauaagcaaga

SEQ ID NO: 401835 - RNA, 21 nt, Human
gauuuauaagccuuaagccua

SEQ ID NO: 401836 - RNA, 21 nt, Human
ucacagacuggucagugaggc

SEQ ID NO: 401837 - RNA, 22 nt, Human
uucaaagcugcagacuccuggg

SEQ ID NO: 401838 - RNA, 22 nt, Human
uugaauaauuaauuacacucag

SEQ ID NO: 401839 - RNA, 22 nt, Human
uuauccaacaugacuuaugucc

SEQ ID NO: 401840 - RNA, 22 nt, Human
gcaggggcuaaggacacagaga

SEQ ID NO: 401841 - RNA, 22 nt, Human
uaauccaaaacugaaucugugg

SEQ ID NO: 401842 - RNA, 22 nt, Human
caguggagagacuuuuacucuu

SEQ ID NO: 401843 - RNA, 22 nt, Human
aauaauauuugaagcuucaaag

SEQ ID NO: 401844 - RNA, 22 nt, Human
gccucugcccuccugggacugc

SEQ ID NO: 401845 - RNA, 22 nt, Human
uaugaaagaaucucagagcaca

SEQ ID NO: 401846 - RNA, 22 nt, Human
agaaaugcucaggucaacuuaa

SEQ ID NO: 401847 - RNA, 22 nt, Human
ucauagaagcaccagaagauau

SEQ ID NO: 401848 - RNA, 22 nt, Human
ccucaggauacaggagccacag

SEQ ID NO: 401849 - RNA, 22 nt, Human
uguuugaacugaauaacauagu

SEQ ID NO: 401850 - RNA, 23 nt, Human
aggauguaggauguauggcagag

SEQ ID NO: 401851 - RNA, 22 nt, Human
uuugaaaggaaguuaauacuuu

SEQ ID NO: 401852 - RNA, 22 nt, Human
cugccaucugagccaaaagugc

SEQ ID NO: 401853 - RNA, 23 nt, Human
uguugaaguaacuguuacauaga

SEQ ID NO: 401854 - RNA, 22 nt, Human
ucuucagacuccaaauguuuua

SEQ ID NO: 401855 - RNA, 20 nt, Human
uuccaacucacaucucuaca

SEQ ID NO: 401856 - RNA, 22 nt, Human
ccagauuugagcgucuuaaacc

SEQ ID NO: 401857 - RNA, 22 nt, Human
uuccaaaguuaguuauuagaaa

SEQ ID NO: 401858 - RNA, 22 nt, Human
aucacauuguuagcauagacug

SEQ ID NO: 401859 - RNA, 22 nt, Human
ugccauuuugagauguuaauga

SEQ ID NO: 401860 - RNA, 22 nt, Human
ggauuugaauuguugaaaugau

SEQ ID NO: 401861 - RNA, 22 nt, Human
uuugaaauuaagauauugucca

SEQ ID NO: 401862 - RNA, 22 nt, Human
uuccuuaguuauuugguccccu

SEQ ID NO: 401863 - RNA, 22 nt, Human
ucauuuguggaagugauugugg

SEQ ID NO: 401864 - RNA, 22 nt, Human
aaaucagucccucuuggaauuu

SEQ ID NO: 401865 - RNA, 20 nt, Human
uugauaggcagcuugucagg

SEQ ID NO: 401866 - RNA, 22 nt, Human
cuuacagagaagaaaauguagu

SEQ ID NO: 401867 - RNA, 22 nt, Human
gugggagcuuuggcaucaggcu

SEQ ID NO: 401868 - RNA, 22 nt, Human
aauucucagguaaaaguuaagu

SEQ ID NO: 401869 - RNA, 22 nt, Human
cuagaaauguagauucuuagug

SEQ ID NO: 401870 - RNA, 22 nt, Human
auaugcuugggacugauacagu

SEQ ID NO: 401871 - RNA, 22 nt, Human
uuuccuaguucuaagaaaugua

SEQ ID NO: 401872 - RNA, 22 nt, Human
uuaaaacagcgugaaucuggca

SEQ ID NO: 401873 - RNA, 22 nt, Human
uaagaaucugcauuuuaacaag

SEQ ID NO: 401874 - RNA, 22 nt, Human
uuacaaaguguuaugauaaaca

SEQ ID NO: 401875 - RNA, 22 nt, Human
cuaaagaagcuagcaaucuaua

SEQ ID NO: 401876 - RNA, 22 nt, Human
ugcaggaauagcuacagagcug

SEQ ID NO: 401877 - RNA, 22 nt, Human
aagucauugguagcuugauagg

SEQ ID NO: 401878 - RNA, 22 nt, Human
ucagaauuugauuccugggaua

SEQ ID NO: 401879 - RNA, 22 nt, Human
ugagauguaagguaugcuuacu

SEQ ID NO: 401880 - RNA, 22 nt, Human
guccaaauuuuucacauguaga

SEQ ID NO: 401881 - RNA, 22 nt, Human
agcagcauuaugauauaucuua

SEQ ID NO: 401882 - RNA, 22 nt, Human
ccucugcucugguccaugugcu

SEQ ID NO: 401883 - RNA, 22 nt, Human
uuucauugcagagucugugugc

SEQ ID NO: 401884 - RNA, 22 nt, Human
agauggagaccuuggaugaacu

SEQ ID NO: 401885 - RNA, 22 nt, Human
uuucuucagccuucacaaccug

SEQ ID NO: 401886 - RNA, 22 nt, Human
auauauaaccuggauaaggcuu

SEQ ID NO: 401887 - RNA, 22 nt, Human
gagugucugaauuagagcacaa

SEQ ID NO: 401888 - RNA, 22 nt, Human
uucccaauauucugcuuuuaug

SEQ ID NO: 401889 - RNA, 22 nt, Human
uuucacaaaugucuuuaacuug

SEQ ID NO: 401890 - RNA, 22 nt, Human
cucaggauuuacuaauuucaag

SEQ ID NO: 401891 - RNA, 22 nt, Human
gaccauuugcuaguaaauugca

SEQ ID NO: 401892 - RNA, 22 nt, Human
uuaggaaauuccaccuguauuc

SEQ ID NO: 401893 - RNA, 22 nt, Human
cagauuuaagagauaaacagug

SEQ ID NO: 401894 - RNA, 22 nt, Human
uuuaggcagaagcccugcugau

SEQ ID NO: 401895 - RNA, 22 nt, Human
uuaauaaacaggugcagcugaa

SEQ ID NO: 401896 - RNA, 22 nt, Human
aaaggccacacugcucuuucuc

SEQ ID NO: 401897 - RNA, 22 nt, Human
gucuauauauugcuugaauaau

SEQ ID NO: 401898 - RNA, 22 nt, Human
gcagggcagaccuccagccuau

SEQ ID NO: 401899 - RNA, 22 nt, Human
ucuauaaagggccagauaguag

SEQ ID NO: 401900 - RNA, 22 nt, Human
cuuaaauuggaugaguuaaguu

SEQ ID NO: 401901 - RNA, 22 nt, Human
cuauacagagcauccuuaacuu

SEQ ID NO: 401902 - RNA, 22 nt, Human
ugucaccaguuccaggaaauaa

SEQ ID NO: 401903 - RNA, 22 nt, Human
caguccuuaaggaaacauuugu

SEQ ID NO: 401904 - RNA, 22 nt, Human
uggguuuaaacucaacucuaaa

SEQ ID NO: 401905 - RNA, 22 nt, Human
cagaauaaagguacaauugagu

SEQ ID NO: 401906 - RNA, 22 nt, Human
agaauucauaggaaguuuccua

SEQ ID NO: 401907 - RNA, 22 nt, Human
uugaaaggugaacaugaugcac

SEQ ID NO: 401908 - RNA, 22 nt, Human
uacugaaaguggucaacagugg

SEQ ID NO: 401909 - RNA, 22 nt, Human
gauuucaaggaguuuucacagu

SEQ ID NO: 401910 - RNA, 22 nt, Human
aaaaagguugauccagauuagg

SEQ ID NO: 401911 - RNA, 22 nt, Human
cuuugaauugccguuucaucug

SEQ ID NO: 401912 - RNA, 22 nt, Human
gcucaggacccaggugugaccu

SEQ ID NO: 401913 - RNA, 22 nt, Human
ucacaguuauagucuguagaau

SEQ ID NO: 401914 - RNA, 22 nt, Human
aggcucagaggugagcaucugc

SEQ ID NO: 401915 - RNA, 22 nt, Human
caaauucaaauuucaucagugu

SEQ ID NO: 401916 - RNA, 22 nt, Human
ugcuuuaagacacuaaguuuga

SEQ ID NO: 401917 - RNA, 22 nt, Human
uugcugaagugaagguauguuu

SEQ ID NO: 401918 - RNA, 22 nt, Human
auucaaguggcugcuauguuaa

SEQ ID NO: 401919 - RNA, 22 nt, Human
uuucuucauucaccuucacccc

SEQ ID NO: 401920 - RNA, 22 nt, Human
auagaauuauggaaagcaucuu

SEQ ID NO: 401921 - RNA, 22 nt, Human
aaaagccaugcauaccuaagag

SEQ ID NO: 401922 - RNA, 22 nt, Human
aauuaaauugguuuagagagga

SEQ ID NO: 401923 - RNA, 22 nt, Human
ucucuguaguugggcagcugcu

SEQ ID NO: 401924 - RNA, 22 nt, Human
auguucuguuuuguaauucaua

SEQ ID NO: 401925 - RNA, 22 nt, Human
cauuuacaauguacagguugug

SEQ ID NO: 401926 - RNA, 21 nt, Human
acagcaagccuucacaugagu

SEQ ID NO: 401927 - RNA, 22 nt, Human
ugugauauuugaguauugucaa

SEQ ID NO: 401928 - RNA, 22 nt, Human
gucaacuugcaagaugcugggc

SEQ ID NO: 401929 - RNA, 22 nt, Human
caguaaauuugagggaucuaau

SEQ ID NO: 401930 - RNA, 22 nt, Human
guagccauuggcaaugaagccu

SEQ ID NO: 401931 - RNA, 19 nt, Human
caaggccaccauuucuccg

SEQ ID NO: 401932 - RNA, 22 nt, Human
gccaugcuugguaugcugugag

SEQ ID NO: 401933 - RNA, 23 nt, Human
ucagagagcuguugagagcugcc

SEQ ID NO: 401934 - RNA, 22 nt, Human
uccauuuuagaagaaaauccac

SEQ ID NO: 401935 - RNA, 22 nt, Human
uuugaaaguguuuacuugggaa

SEQ ID NO: 401936 - RNA, 18 nt, Human
gaaagccaugcagcagug

SEQ ID NO: 401937 - RNA, 22 nt, Human
auaacaugagccagauugaaag

SEQ ID NO: 401938 - RNA, 22 nt, Human
acaaaguccugguguauggcca

SEQ ID NO: 401939 - RNA, 22 nt, Human
cuggaggcacccuuagagaggc

SEQ ID NO: 401940 - RNA, 22 nt, Human
ggcagaagauaggacagggaau

SEQ ID NO: 401941 - RNA, 22 nt, Human
uggcuuuacaucaaauugagua

SEQ ID NO: 401942 - RNA, 22 nt, Human
uaagaaacccaggaauuucuua

SEQ ID NO: 401943 - RNA, 22 nt, Human
uucaugugaucacagauuguaa

SEQ ID NO: 401944 - RNA, 22 nt, Human
cugcauuagucaugcuuugcag

SEQ ID NO: 401945 - RNA, 22 nt, Human
acuuugaaggggaacauuuuaa

SEQ ID NO: 401946 - RNA, 22 nt, Human
gggcacagaagucuaagacauc

SEQ ID NO: 401947 - RNA, 22 nt, Human
uccaaaguguugggauuauagg

SEQ ID NO: 401948 - RNA, 22 nt, Human
gaaaggccagcucacagaugag

SEQ ID NO: 401949 - RNA, 22 nt, Human
gcucuaauugaaaaauacugca

SEQ ID NO: 401950 - RNA, 22 nt, Human
uuuugcuugagugcacaaaaug

SEQ ID NO: 401951 - RNA, 22 nt, Human
uuugaagauaaauauggagaaa

SEQ ID NO: 401952 - RNA, 22 nt, Human
cuuccaaacccaggguaugggc

SEQ ID NO: 401953 - RNA, 22 nt, Human
cucuucuuuaguccagaccauc

SEQ ID NO: 401954 - RNA, 22 nt, Human
guagaaauguaaccaggagaua

SEQ ID NO: 401955 - RNA, 22 nt, Human
caagaugggcaccccagcaccu

SEQ ID NO: 401956 - RNA, 23 nt, Human
ucucaggacacacaugucuauca

SEQ ID NO: 401957 - RNA, 22 nt, Human
uuccuuagauccuucaaucacg

SEQ ID NO: 401958 - RNA, 20 nt, Human
agaaucugacccagagagac

SEQ ID NO: 401959 - RNA, 17 nt, Human
caaggccagcaucuuca

SEQ ID NO: 401960 - RNA, 21 nt, Human
ggauggauagggaagagauuu

SEQ ID NO: 401961 - RNA, 22 nt, Human
uuuccauguuggugaaaugagg

SEQ ID NO: 401962 - RNA, 22 nt, Human
ucagaaaagagaaaaucuuaua

SEQ ID NO: 401963 - RNA, 22 nt, Human
gaguccuuccagcaggcauuua

SEQ ID NO: 401964 - RNA, 22 nt, Human
auacagaauuugcccuuuucau

SEQ ID NO: 401965 - RNA, 16 nt, Human
cuuccucuucacuggc

SEQ ID NO: 401966 - RNA, 22 nt, Human
aauauaugugguauugaccagc

SEQ ID NO: 401967 - RNA, 22 nt, Human
cuauuauuuccucaucuauaaa

SEQ ID NO: 401968 - RNA, 22 nt, Human
ugucucugauaaguaguucagu

SEQ ID NO: 401969 - RNA, 22 nt, Human
aguacauauaguaauuuagcca

SEQ ID NO: 401970 - RNA, 22 nt, Human
guacagaaauggggccccaggu

SEQ ID NO: 401971 - RNA, 22 nt, Human
ucugggaacagccuggcugugu

SEQ ID NO: 401972 - RNA, 22 nt, Human
augugaaauagcuggauaugaa

SEQ ID NO: 401973 - RNA, 19 nt, Human
acaagucacuuacuuagua

SEQ ID NO: 401974 - RNA, 22 nt, Human
uuggaucagaugauaucuuugu

SEQ ID NO: 401975 - RNA, 22 nt, Human
agguccagcuguugcagccucc

SEQ ID NO: 401976 - RNA, 22 nt, Human
cagucaccuagacagaacuuac

SEQ ID NO: 401977 - RNA, 22 nt, Human
uuugaaaggagcuuuauccaga

SEQ ID NO: 401978 - RNA, 22 nt, Human
augaaacacacacgcgcauacu

SEQ ID NO: 401979 - RNA, 22 nt, Human
auggaucagaaucccgggaggg

SEQ ID NO: 401980 - RNA, 22 nt, Human
aauucuaaauguaauuuagaau

SEQ ID NO: 401981 - RNA, 22 nt, Human
ucaguuucuucaucucccuaac

SEQ ID NO: 401982 - RNA, 22 nt, Human
uuaaagucccugccuuaauucc

SEQ ID NO: 401983 - RNA, 22 nt, Human
acauuuaaccaaacuguuuaau

SEQ ID NO: 401984 - RNA, 22 nt, Human
aaucagucucauuuagcaggga

SEQ ID NO: 401985 - RNA, 22 nt, Human
uugaaaggaauacagaggccua

SEQ ID NO: 401986 - RNA, 22 nt, Human
guugaaagaucauguggcugcc

SEQ ID NO: 401987 - RNA, 22 nt, Human
ucauuucaaugauacuacuaag

SEQ ID NO: 401988 - RNA, 19 nt, Human
ugugaaagcuaguguucuu

SEQ ID NO: 401989 - RNA, 22 nt, Human
caaucaguuucuguuguauaau

SEQ ID NO: 401990 - RNA, 22 nt, Human
uccaaauacauuuacuguauuu

SEQ ID NO: 401991 - RNA, 22 nt, Human
aaggccagccugagagcuaaca

SEQ ID NO: 401992 - RNA, 22 nt, Human
caugucuguguacacaugcaca

SEQ ID NO: 401993 - RNA, 22 nt, Human
gucaggauuggggucaugaguc

SEQ ID NO: 401994 - RNA, 22 nt, Human
uggcuuuacacauccacugccu

SEQ ID NO: 401995 - RNA, 22 nt, Human
cuauacaguaaccacagugauu

SEQ ID NO: 401996 - RNA, 22 nt, Human
uuuaggcacagaguugagggac

SEQ ID NO: 401997 - RNA, 22 nt, Human
cuauuucaaggcccagauauga

SEQ ID NO: 401998 - RNA, 22 nt, Human
auugaaagagaauguagcucuu

SEQ ID NO: 401999 - RNA, 22 nt, Human
ccagaccacccuggccaugcac

SEQ ID NO: 402000 - RNA, 22 nt, Human
gacuaugugaagugugaauagg

SEQ ID NO: 402001 - RNA, 22 nt, Human
ucagccaggccaggcauucaca

SEQ ID NO: 402002 - RNA, 22 nt, Human
ucagagaggcaauacuguuuaa

SEQ ID NO: 402003 - RNA, 22 nt, Human
caauuucagugcuguggagagg

SEQ ID NO: 402004 - RNA, 22 nt, Human
auuaaaauuccaagguaugcca

SEQ ID NO: 402005 - RNA, 22 nt, Human
uauaaaauggcaucagcuccaa

SEQ ID NO: 402006 - RNA, 22 nt, Human
aaucagaaagaggucauguugc

SEQ ID NO: 402007 - RNA, 22 nt, Human
ccagaauuuggaucaugauuuu

SEQ ID NO: 402008 - RNA, 22 nt, Human
ggagcugugcagugacuacaga

SEQ ID NO: 402009 - RNA, 22 nt, Human
aauuuacaggugcacucgccau

SEQ ID NO: 402010 - RNA, 22 nt, Human
uaaauuaugucacaugacucug

SEQ ID NO: 402011 - RNA, 22 nt, Human
ccccaggacacauggaccaagu

SEQ ID NO: 402012 - RNA, 22 nt, Human
aauuucaaguggcaucuuugau

SEQ ID NO: 402013 - RNA, 22 nt, Human
auaucaguaucuauguauuugu

SEQ ID NO: 402014 - RNA, 22 nt, Human
uguacaaugccgagacuaacuc

SEQ ID NO: 402015 - RNA, 22 nt, Human
auacauauaugguacuuccugg

SEQ ID NO: 402016 - RNA, 22 nt, Human
uuauagaacagccuccucuaga

SEQ ID NO: 402017 - RNA, 22 nt, Human
gcauguguugguuuaugcaugu

SEQ ID NO: 402018 - RNA, 22 nt, Human
uuauaugaguaucauaucacuu

SEQ ID NO: 402019 - RNA, 22 nt, Human
aucuaucccaguuuaacucauu

SEQ ID NO: 402020 - RNA, 22 nt, Human
aaaugcuuguaaauuuuccaug

SEQ ID NO: 402021 - RNA, 22 nt, Human
agaugaaaagauaagcagcaau

SEQ ID NO: 402022 - RNA, 22 nt, Human
auuccaaagacagaagcagcug

SEQ ID NO: 402023 - RNA, 22 nt, Human
cauuucaauuauuugcucuucu

SEQ ID NO: 402024 - RNA, 22 nt, Human
auucaaguucuucugucuuugc

SEQ ID NO: 402025 - RNA, 22 nt, Human
gaguguucccacaccccaguug

SEQ ID NO: 402026 - RNA, 22 nt, Human
uugacacagaucaauauucaac

SEQ ID NO: 402027 - RNA, 23 nt, Human
ccacagagcugccaauuccugug

SEQ ID NO: 402028 - RNA, 22 nt, Human
agacucaagcagauaggaauua

SEQ ID NO: 402029 - RNA, 22 nt, Human
auucauaacggcaaaugucacc

SEQ ID NO: 402030 - RNA, 22 nt, Human
uauauuaaaugaccaguuuuaa

SEQ ID NO: 402031 - RNA, 17 nt, Human
guccuacccauggucua

SEQ ID NO: 402032 - RNA, 22 nt, Human
caaauacuaaacauaagauuuu

SEQ ID NO: 402033 - RNA, 22 nt, Human
ugcaggaagacuucccaagcca

SEQ ID NO: 402034 - RNA, 22 nt, Human
uuagccauuaauguccugugca

SEQ ID NO: 402035 - RNA, 22 nt, Human
ucacaccaguuuccuuucaauu

SEQ ID NO: 402036 - RNA, 22 nt, Human
gugaauaauauuguuuauaaaa

SEQ ID NO: 402037 - RNA, 22 nt, Human
ugguaauuuacgcauuucugua

SEQ ID NO: 402038 - RNA, 22 nt, Human
gaaguacaguuuuaucuagcca

SEQ ID NO: 402039 - RNA, 23 nt, Human
uaagaacagacaagcauuuacau

SEQ ID NO: 402040 - RNA, 22 nt, Human
aaauuauuaugccccucuauaa

SEQ ID NO: 402041 - RNA, 22 nt, Human
agggaguuagaaauccaggaua

SEQ ID NO: 402042 - RNA, 22 nt, Human
cccuguacagucucuguggcac

SEQ ID NO: 402043 - RNA, 22 nt, Human
uguuuuaagagcgcacuuuaua

SEQ ID NO: 402044 - RNA, 22 nt, Human
uacaugaaguugucuaaacugg

SEQ ID NO: 402045 - RNA, 22 nt, Human
cucacugacgaggaagcugaga

SEQ ID NO: 402046 - RNA, 22 nt, Human
cucaggaugcaggucacaggac

SEQ ID NO: 402047 - RNA, 20 nt, Human
cagagccaagagcagcaucu

SEQ ID NO: 402048 - RNA, 22 nt, Human
caggaugguggcaugaucagaa

SEQ ID NO: 402049 - RNA, 20 nt, Human
ugaaggccauuuguuccaga

SEQ ID NO: 402050 - RNA, 22 nt, Human
uucagaaaggauaauuggaagg

SEQ ID NO: 402051 - RNA, 22 nt, Human
uucaauaggaugcaugauauaa

SEQ ID NO: 402052 - RNA, 22 nt, Human
uaauuucaaguuuagggcucua

SEQ ID NO: 402053 - RNA, 22 nt, Human
acagucuugagcaucagccaga

SEQ ID NO: 402054 - RNA, 22 nt, Human
ugaaauagaaaaacaggcuucu

SEQ ID NO: 402055 - RNA, 22 nt, Human
uacauauacugagugauuugcu

SEQ ID NO: 402056 - RNA, 22 nt, Human
augaggcaaucaugguccaguu

SEQ ID NO: 402057 - RNA, 22 nt, Human
uugaauaggacucagcagugau

SEQ ID NO: 402058 - RNA, 22 nt, Human
ugcagagacuugugugcauuug

SEQ ID NO: 402059 - RNA, 22 nt, Human
uacagagauacucuagaucaaa

SEQ ID NO: 402060 - RNA, 22 nt, Human
ggcugaaggaugaaagcugcag

SEQ ID NO: 402061 - RNA, 22 nt, Human
uugaaagacuucuccugugaaa

SEQ ID NO: 402062 - RNA, 22 nt, Human
ugugaaagauacuaggcagagg

SEQ ID NO: 402063 - RNA, 23 nt, Human
acagaaaucauuuguaagguacc

SEQ ID NO: 402064 - RNA, 22 nt, Human
caauuucagucucagagaguuc

SEQ ID NO: 402065 - RNA, 22 nt, Human
uaaacauguugacaucuuaccu

SEQ ID NO: 402066 - RNA, 18 nt, Human
caauuucaauggucugaa

SEQ ID NO: 402067 - RNA, 22 nt, Human
cugcuucugggaugauggagua

SEQ ID NO: 402068 - RNA, 22 nt, Human
ugccuggaaggcccaugggaag

SEQ ID NO: 402069 - RNA, 22 nt, Human
uaacaagucauuuuaaauuaug

SEQ ID NO: 402070 - RNA, 22 nt, Human
uugcugaaaucuaugacauccu

SEQ ID NO: 402071 - RNA, 22 nt, Human
aauucacaaaaguuagauccau

SEQ ID NO: 402072 - RNA, 22 nt, Human
agaggccaggcugcagagggau

SEQ ID NO: 402073 - RNA, 20 nt, Human
cucuccucacccgugucagg

SEQ ID NO: 402074 - RNA, 22 nt, Human
cagaaucagcccuugcuauuaa

SEQ ID NO: 402075 - RNA, 22 nt, Human
uaauuucaccguugcuagaaau

SEQ ID NO: 402076 - RNA, 20 nt, Human
ucuaauuaaaauugucuagu

SEQ ID NO: 402077 - RNA, 22 nt, Human
cucagagaggcaguggaaguca

SEQ ID NO: 402078 - RNA, 22 nt, Human
auaucacaguaguuguuuaguu

SEQ ID NO: 402079 - RNA, 22 nt, Human
augcaaaauuaccauucuguuc

SEQ ID NO: 402080 - RNA, 22 nt, Human
uauaaagcugacucaugaaacu

SEQ ID NO: 402081 - RNA, 22 nt, Human
cugaauaauguucucuuguaug

SEQ ID NO: 402082 - RNA, 22 nt, Human
uugcagcugcaguaaauguuca

SEQ ID NO: 402083 - RNA, 22 nt, Human
gucaaacaaauuaacauaucca

SEQ ID NO: 402084 - RNA, 22 nt, Human
auacacauauguguguauaugu

SEQ ID NO: 402085 - RNA, 22 nt, Human
gugcauuugacgaauacucacu

SEQ ID NO: 402086 - RNA, 22 nt, Human
cucuucuugcuagacugagugc

SEQ ID NO: 402087 - RNA, 22 nt, Human
aaucagaaccuugggucauaac

SEQ ID NO: 402088 - RNA, 22 nt, Human
ucuuaauucugugucuucacua

SEQ ID NO: 402089 - RNA, 22 nt, Human
aucagaaauugcccagcuguuu

SEQ ID NO: 402090 - RNA, 22 nt, Human
uuuuuggguccaggcuguaucu

SEQ ID NO: 402091 - RNA, 22 nt, Human
uuucacuagaacguucuuguuu

SEQ ID NO: 402092 - RNA, 22 nt, Human
aaaagucugcucucauuucaga

SEQ ID NO: 402093 - RNA, 22 nt, Human
caguccuuggcuucauccgagu

SEQ ID NO: 402094 - RNA, 22 nt, Human
auguuucaaauauauagaguug

SEQ ID NO: 402095 - RNA, 22 nt, Human
augccaaagcccaaguucauca

SEQ ID NO: 402096 - RNA, 22 nt, Human
uucaauucaauucuaaauauau

SEQ ID NO: 402097 - RNA, 22 nt, Human
agucucugcaugccugcugugc

SEQ ID NO: 402098 - RNA, 22 nt, Human
cauggcuuuguucuguuagaug

SEQ ID NO: 402099 - RNA, 22 nt, Human
aggauuuauuauaugcccucau

SEQ ID NO: 402100 - RNA, 22 nt, Human
ccugucacgaugacugcacucu

SEQ ID NO: 402101 - RNA, 19 nt, Human
uacuaaacaugcauauugg

SEQ ID NO: 402102 - RNA, 22 nt, Human
augcuuaaugaggguauauaug

SEQ ID NO: 402103 - RNA, 22 nt, Human
acacaaacugcuagaaaauugg

SEQ ID NO: 402104 - RNA, 22 nt, Human
gauuuccauuuucaacuccugc

SEQ ID NO: 402105 - RNA, 22 nt, Human
ucuggcuuucauuuguuuaaag

SEQ ID NO: 402106 - RNA, 22 nt, Human
uacuaaacccucgauggaucuu

SEQ ID NO: 402107 - RNA, 22 nt, Human
gcuauacacauuucuugguagu

SEQ ID NO: 402108 - RNA, 23 nt, Human
ggccauuucauuugguucaaacu

SEQ ID NO: 402109 - RNA, 22 nt, Human
ugugugucagagucuccauggu

SEQ ID NO: 402110 - RNA, 21 nt, Human
cuacagaaucgagcauucugg

SEQ ID NO: 402111 - RNA, 22 nt, Human
auuucuuacauaacaaauuguu

SEQ ID NO: 402112 - RNA, 22 nt, Human
gaacuuuaccauuuagguaacu

SEQ ID NO: 402113 - RNA, 22 nt, Human
cuguggaaaauuuguauguaau

SEQ ID NO: 402114 - RNA, 22 nt, Human
auuaucuauguagaaugauuuu

SEQ ID NO: 402115 - RNA, 22 nt, Human
ucucacuuuguugcccagacuu

SEQ ID NO: 402116 - RNA, 22 nt, Human
aggcaacuguuugauaauguug

SEQ ID NO: 402117 - RNA, 22 nt, Human
uaaacagaaugcguaagaagug

SEQ ID NO: 402118 - RNA, 22 nt, Human
cugucauuuaagacauucugga

SEQ ID NO: 402119 - RNA, 22 nt, Human
augcagcugugggcaagaaaug

SEQ ID NO: 402120 - RNA, 22 nt, Human
auucuucaucacuaccuuguga

SEQ ID NO: 402121 - RNA, 22 nt, Human
uuuaaugaauaauucaaaucug

SEQ ID NO: 402122 - RNA, 22 nt, Human
gauuucaaagguucugcaugcc

SEQ ID NO: 402123 - RNA, 22 nt, Human
aaagccauugaacuguacuuua

SEQ ID NO: 402124 - RNA, 22 nt, Human
ucagauggcacacagagccugc

SEQ ID NO: 402125 - RNA, 23 nt, Human
acaacuuuacagauacauuuugu

SEQ ID NO: 402126 - RNA, 22 nt, Human
aacauucuauuuugcuaaaaca

SEQ ID NO: 402127 - RNA, 22 nt, Human
cuucuuaaauuggauugcuauu

SEQ ID NO: 402128 - RNA, 22 nt, Human
gagauuuaauuggauuaacuua

SEQ ID NO: 402129 - RNA, 22 nt, Human
cacucaggcugugucaggagga

SEQ ID NO: 402130 - RNA, 21 nt, Human
uuacagaauccaugggaaguc

SEQ ID NO: 402131 - RNA, 22 nt, Human
uguacaaucuuggucccuuuau

SEQ ID NO: 402132 - RNA, 22 nt, Human
ucacagcaaaugcugcuucuca

SEQ ID NO: 402133 - RNA, 20 nt, Human
ucagaugggagugagccauc

SEQ ID NO: 402134 - RNA, 22 nt, Human
uuucuuauacuauauugucauc

SEQ ID NO: 402135 - RNA, 22 nt, Human
aaucaagucaaccaucaugugc

SEQ ID NO: 402136 - RNA, 22 nt, Human
auacagaauacuaauuccugag

SEQ ID NO: 402137 - RNA, 22 nt, Human
ccauggcuuucuuucauuguaa

SEQ ID NO: 402138 - RNA, 22 nt, Human
uaaaauagcaugugcagugaaa

SEQ ID NO: 402139 - RNA, 19 nt, Human
uggauuuauauucuuuauc

SEQ ID NO: 402140 - RNA, 22 nt, Human
auagacauagccguaauuuauu

SEQ ID NO: 402141 - RNA, 22 nt, Human
gggagcugaauggcaauggaga

SEQ ID NO: 402142 - RNA, 19 nt, Human
ugcauaaauuauauacuuu

SEQ ID NO: 402143 - RNA, 20 nt, Human
uauaacaguguugggugugu

SEQ ID NO: 402144 - RNA, 23 nt, Human
uugaaagguagcuggcagcuaga

SEQ ID NO: 402145 - RNA, 22 nt, Human
acaguggagaaggcaugaggcu

SEQ ID NO: 402146 - RNA, 22 nt, Human
aaggaaccuggaguagagggag

SEQ ID NO: 402147 - RNA, 22 nt, Human
acucaggaaauugagauaaugg

SEQ ID NO: 402148 - RNA, 22 nt, Human
ucuuuaauguacuuucuuucac

SEQ ID NO: 402149 - RNA, 22 nt, Human
aggauuuauuggugggaaguua

SEQ ID NO: 402150 - RNA, 22 nt, Human
aagaaacaaccacugcucuccu

SEQ ID NO: 402151 - RNA, 22 nt, Human
uucuugcaggucacucacugag

SEQ ID NO: 402152 - RNA, 22 nt, Human
uuugaauaucacaaacuuucaa

SEQ ID NO: 402153 - RNA, 22 nt, Human
auucauaaguaaaugauuaccu

SEQ ID NO: 402154 - RNA, 22 nt, Human
gaagugaagagauuagaaauca

SEQ ID NO: 402155 - RNA, 22 nt, Human
ucagaauucuacaauagaucag

SEQ ID NO: 402156 - RNA, 22 nt, Human
uuuccuaggagauugaucacau

SEQ ID NO: 402157 - RNA, 22 nt, Human
aaagccaucuguauuaagugaa

SEQ ID NO: 402158 - RNA, 22 nt, Human
auacagaagaacuauagccacu

SEQ ID NO: 402159 - RNA, 21 nt, Human
uuagaaagcucacuacaguua

SEQ ID NO: 402160 - RNA, 23 nt, Human
uuaaacuucagugcagaacacuc

SEQ ID NO: 402161 - RNA, 21 nt, Human
uaauaauuccacuacagagua

SEQ ID NO: 402162 - RNA, 22 nt, Human
aaggacagggaugguugauugu

SEQ ID NO: 402163 - RNA, 22 nt, Human
gaauuucagaucagagaccauu

SEQ ID NO: 402164 - RNA, 22 nt, Human
agaaucugguagaaccaaggau

SEQ ID NO: 402165 - RNA, 22 nt, Human
ucucacuggguauaaaugagua

SEQ ID NO: 402166 - RNA, 22 nt, Human
caggccagcuuccugacauccu

SEQ ID NO: 402167 - RNA, 22 nt, Human
aauguuaauguguuugcuuaug

SEQ ID NO: 402168 - RNA, 22 nt, Human
gauuucaaguaucuugggcgag

SEQ ID NO: 402169 - RNA, 22 nt, Human
uccagaauauuugggaaagaug

SEQ ID NO: 402170 - RNA, 22 nt, Human
ggguacuuaauauuuacggggu

SEQ ID NO: 402171 - RNA, 22 nt, Human
uucauacuaaaguguaagaugu

SEQ ID NO: 402172 - RNA, 22 nt, Human
cuacagaauggagggucagaga

SEQ ID NO: 402173 - RNA, 22 nt, Human
uauuuguauguguguacauaua

SEQ ID NO: 402174 - RNA, 20 nt, Human
guaaugaauguaaacaguaa

SEQ ID NO: 402175 - RNA, 22 nt, Human
aucaggaucaugcuggguggga

SEQ ID NO: 402176 - RNA, 22 nt, Human
ucauuuauaaggaugcaauuaa

SEQ ID NO: 402177 - RNA, 22 nt, Human
aucugcuugaaugagcaacagg

SEQ ID NO: 402178 - RNA, 22 nt, Human
auuccaaagcacaucagaacua

SEQ ID NO: 402179 - RNA, 22 nt, Human
gucuucuguaagaugagguccc

SEQ ID NO: 402180 - RNA, 22 nt, Human
caucagaauguuagagaaggga

SEQ ID NO: 402181 - RNA, 22 nt, Human
guagaaauauuuaucucugaga

SEQ ID NO: 402182 - RNA, 22 nt, Human
uacacacaugcauuugccuuau

SEQ ID NO: 402183 - RNA, 22 nt, Human
guucuucagaggggaaagaacc

SEQ ID NO: 402184 - RNA, 22 nt, Human
uagucaccugugagcugcguag

SEQ ID NO: 402185 - RNA, 22 nt, Human
uuucagaaccgcuaaaauaaau

SEQ ID NO: 402186 - RNA, 22 nt, Human
ccacagcugaccgcaggugagc

SEQ ID NO: 402187 - RNA, 22 nt, Human
auaucagaaauaguaagcagag

SEQ ID NO: 402188 - RNA, 22 nt, Human
uccaugaguuugaggaaaagag

SEQ ID NO: 402189 - RNA, 22 nt, Human
guuccaaaguuagaguguauug

SEQ ID NO: 402190 - RNA, 22 nt, Human
auuccaaacagugcugcagacu

SEQ ID NO: 402191 - RNA, 22 nt, Human
aguaaaauuucugcugaggaga

SEQ ID NO: 402192 - RNA, 22 nt, Human
ggucagagggugggcugccugu

SEQ ID NO: 402193 - RNA, 20 nt, Human
uuugucuguuaaguguuucu

SEQ ID NO: 402194 - RNA, 22 nt, Human
uuuaaauuuagaagaaacacug

SEQ ID NO: 402195 - RNA, 22 nt, Human
uucagaaacagagugagugagu

SEQ ID NO: 402196 - RNA, 20 nt, Human
agcuucuucugucuaauuuu

SEQ ID NO: 402197 - RNA, 22 nt, Human
cauguauaguuggaacuacauc

SEQ ID NO: 402198 - RNA, 22 nt, Human
auuccaaacgccucgcggacuu

SEQ ID NO: 402199 - RNA, 22 nt, Human
agucuccuuggccucaaugccu

SEQ ID NO: 402200 - RNA, 22 nt, Human
uucagaaaaagaccauugcaau

SEQ ID NO: 402201 - RNA, 22 nt, Human
aacuuuguguguuuaauauggc

SEQ ID NO: 402202 - RNA, 22 nt, Human
uucuucaaugugcccuguuuuc

SEQ ID NO: 402203 - RNA, 22 nt, Human
aaauggauggaaagcaauuuuu

SEQ ID NO: 402204 - RNA, 17 nt, Human
cauuuguugaucaguug

SEQ ID NO: 402205 - RNA, 22 nt, Human
uguauacaauucacacuuccca

SEQ ID NO: 402206 - RNA, 22 nt, Human
cagagacauucaguaaauuauc

SEQ ID NO: 402207 - RNA, 22 nt, Human
ccaaaauuauuacauuuguagg

SEQ ID NO: 402208 - RNA, 22 nt, Human
uacagaaguaaauaccaaaagc

SEQ ID NO: 402209 - RNA, 22 nt, Human
ugauuuaugcauuauacuguug

SEQ ID NO: 402210 - RNA, 22 nt, Human
aaggagaaaugguagaugugca

SEQ ID NO: 402211 - RNA, 22 nt, Human
cauuuacagugagaguuuuuac

SEQ ID NO: 402212 - RNA, 22 nt, Human
aaaucaguucucccuuucuuca

SEQ ID NO: 402213 - RNA, 22 nt, Human
aggauuuauuacaagccauggu

SEQ ID NO: 402214 - RNA, 22 nt, Human
agauuuacuggagucuuuggug

SEQ ID NO: 402215 - RNA, 22 nt, Human
gggauuuaguaggauaguauac

SEQ ID NO: 402216 - RNA, 22 nt, Human
uaaugcuuaauuuucacaagcc

SEQ ID NO: 402217 - RNA, 23 nt, Human
uugcacauuggagcuggucuucu

SEQ ID NO: 402218 - RNA, 22 nt, Human
ucuauacacacaaagaaugcuu

SEQ ID NO: 402219 - RNA, 22 nt, Human
uuccaugacaccgagggaaguc

SEQ ID NO: 402220 - RNA, 22 nt, Human
ugcuucuggaaacaguggcugu

SEQ ID NO: 402221 - RNA, 21 nt, Human
aaauggauagggcaauggaag

SEQ ID NO: 402222 - RNA, 22 nt, Human
uuuuccagagcugucucuugca

SEQ ID NO: 402223 - RNA, 22 nt, Human
uugcaucuagggcaacccagag

SEQ ID NO: 402224 - RNA, 22 nt, Human
cacaauuuggugcuaaagaaag

SEQ ID NO: 402225 - RNA, 22 nt, Human
augaaacaugcuuuguggauga

SEQ ID NO: 402226 - RNA, 22 nt, Human
agggacuuguguccuauguaug

SEQ ID NO: 402227 - RNA, 22 nt, Human
uuauuucauguaaaauuuaugu

SEQ ID NO: 402228 - RNA, 22 nt, Human
gaguccuuuguuccuugccaca

SEQ ID NO: 402229 - RNA, 22 nt, Human
ugaaacaaauuuggaaaaucua

SEQ ID NO: 402230 - RNA, 21 nt, Human
caauuucaugggaagauggga

SEQ ID NO: 402231 - RNA, 22 nt, Human
uuauuauugugguugcauuauc

SEQ ID NO: 402232 - RNA, 22 nt, Human
cuguggaaggccuguccugaaa

SEQ ID NO: 402233 - RNA, 22 nt, Human
aaucauaauucaaauaagcuua

SEQ ID NO: 402234 - RNA, 22 nt, Human
cacucaggguacaauggagggc

SEQ ID NO: 402235 - RNA, 22 nt, Human
auuauccagcaccaaugucaga

SEQ ID NO: 402236 - RNA, 22 nt, Human
aaaguguacuaugucaugaaca

SEQ ID NO: 402237 - RNA, 22 nt, Human
ggauucuaacugaacagaauau

SEQ ID NO: 402238 - RNA, 22 nt, Human
uucacagauuucccugcacaug

SEQ ID NO: 402239 - RNA, 23 nt, Human
aucauucuccaaucuggagcagg

SEQ ID NO: 402240 - RNA, 22 nt, Human
cauucauuagaauagauaugua

SEQ ID NO: 402241 - RNA, 23 nt, Human
uuaaaggcagauguugaguauua

SEQ ID NO: 402242 - RNA, 22 nt, Human
aaggccagcuuguagggcuggu

SEQ ID NO: 402243 - RNA, 22 nt, Human
uuugaacaugcugcaugauaau

SEQ ID NO: 402244 - RNA, 22 nt, Human
uaguaucuauuaguaacaagag

SEQ ID NO: 402245 - RNA, 22 nt, Human
ucagggugaaccaggcaggaau

SEQ ID NO: 402246 - RNA, 22 nt, Human
gauaaugaugacaaugacaacc

SEQ ID NO: 402247 - RNA, 22 nt, Human
uugcaucuaccauaucaaagau

SEQ ID NO: 402248 - RNA, 22 nt, Human
uucaggauggaguaccuuuuau

SEQ ID NO: 402249 - RNA, 22 nt, Human
uuuccaaaguugccauaagcuu

SEQ ID NO: 402250 - RNA, 22 nt, Human
uaggauuuaggcuuuaacaucu

SEQ ID NO: 402251 - RNA, 23 nt, Human
uuugaaaguaucaacucgccuga

SEQ ID NO: 402252 - RNA, 22 nt, Human
uauaauuaguaaauggcagauu

SEQ ID NO: 402253 - RNA, 22 nt, Human
agcucacaguguccuuccucaa

SEQ ID NO: 402254 - RNA, 22 nt, Human
ccuccucugggaagauucagag

SEQ ID NO: 402255 - RNA, 22 nt, Human
cacugagcugauagaauuccag

SEQ ID NO: 402256 - RNA, 22 nt, Human
cacaaaugguuguagacauuaa

SEQ ID NO: 402257 - RNA, 23 nt, Human
aggauuuaaaggcaaugcauuuu

SEQ ID NO: 402258 - RNA, 22 nt, Human
uuguuauaaagacuaaauaugu

SEQ ID NO: 402259 - RNA, 22 nt, Human
cuugaaagcacuccuuugacug

SEQ ID NO: 402260 - RNA, 22 nt, Human
cacaauacuauuuuuaggucuu

SEQ ID NO: 402261 - RNA, 22 nt, Human
cuguauuuguccucuauuuauu

SEQ ID NO: 402262 - RNA, 22 nt, Human
gcaaaauuuacacuccuucuuc

SEQ ID NO: 402263 - RNA, 22 nt, Human
caacuuucuguuaaauguuagu

SEQ ID NO: 402264 - RNA, 22 nt, Human
ugcauaaagugccauaguauua

SEQ ID NO: 402265 - RNA, 22 nt, Human
uauuucagcccuacuacuuggc

SEQ ID NO: 402266 - RNA, 22 nt, Human
uacuuugaagacaauaucugga

SEQ ID NO: 402267 - RNA, 22 nt, Human
uauccaaacauauagucucucu

SEQ ID NO: 402268 - RNA, 22 nt, Human
ucacagacacagggagaagcau

SEQ ID NO: 402269 - RNA, 22 nt, Human
guuauaaaggugauaaugguca

SEQ ID NO: 402270 - RNA, 22 nt, Human
cauuucaauacaguuuguaaau

SEQ ID NO: 402271 - RNA, 22 nt, Human
caaaugauagagccgauuauca

SEQ ID NO: 402272 - RNA, 22 nt, Human
aauugagugcagccagcccagu

SEQ ID NO: 402273 - RNA, 22 nt, Human
uccauacauugaaauaccauuc

SEQ ID NO: 402274 - RNA, 22 nt, Human
uucauugugauucuuggcuagc

SEQ ID NO: 402275 - RNA, 22 nt, Human
agagaugaacauaaaacaagga

SEQ ID NO: 402276 - RNA, 22 nt, Human
agaucuauuagcaaacugccau

SEQ ID NO: 402277 - RNA, 22 nt, Human
uucaaguuuugccuccccaucc

SEQ ID NO: 402278 - RNA, 22 nt, Human
uuuguuuagaaagagauuggug

SEQ ID NO: 402279 - RNA, 22 nt, Human
aucagaaauagucauguuacuu

SEQ ID NO: 402280 - RNA, 22 nt, Human
uguacaauggcuauaauacccu

SEQ ID NO: 402281 - RNA, 22 nt, Human
gaucugaaucaauagaauaacu

SEQ ID NO: 402282 - RNA, 22 nt, Human
uucagaaagguuaaucuggauu

SEQ ID NO: 402283 - RNA, 21 nt, Human
auacacauacacauaaaugug

SEQ ID NO: 402284 - RNA, 22 nt, Human
aauauccacacugugucccugc

SEQ ID NO: 402285 - RNA, 20 nt, Human
uauuuguauuugggaaaguu

SEQ ID NO: 402286 - RNA, 22 nt, Human
auuuaucucuggaaacuaagca

SEQ ID NO: 402287 - RNA, 22 nt, Human
uucuucaguuugguaaauguaa

SEQ ID NO: 402288 - RNA, 22 nt, Human
aaauauagcaauuaugccuacu

SEQ ID NO: 402289 - RNA, 22 nt, Human
gggagucugggcuagacuccuu

SEQ ID NO: 402290 - RNA, 22 nt, Human
uguacaauguguuuguuggcuu

SEQ ID NO: 402291 - RNA, 18 nt, Human
ccucagggagagagacgc

SEQ ID NO: 402292 - RNA, 22 nt, Human
ugcuuaauguacgugaguguac

SEQ ID NO: 402293 - RNA, 22 nt, Human
acaugaaaaauguuugcaguuu

SEQ ID NO: 402294 - RNA, 22 nt, Human
aggaucugugagugcugcagac

SEQ ID NO: 402295 - RNA, 22 nt, Human
cagaaaaggaagagcuauguaa

SEQ ID NO: 402296 - RNA, 22 nt, Human
uacacauguauuuauguguaca

SEQ ID NO: 402297 - RNA, 22 nt, Human
augcuuuaaaugucuuuugcuu

SEQ ID NO: 402298 - RNA, 22 nt, Human
cagucaccuugaggacucagac

SEQ ID NO: 402299 - RNA, 22 nt, Human
ucucacuuuccagacuuuucaa

SEQ ID NO: 402300 - RNA, 20 nt, Human
caccagucaugagucaauac

SEQ ID NO: 402301 - RNA, 22 nt, Human
ugcauggaggaagaugaaugca

SEQ ID NO: 402302 - RNA, 22 nt, Human
caggauggccccggggcugugc

SEQ ID NO: 402303 - RNA, 22 nt, Human
uuacagaagagaaagaauucag

SEQ ID NO: 402304 - RNA, 22 nt, Human
uauggcuuuaaacaacuuaggu

SEQ ID NO: 402305 - RNA, 22 nt, Human
agccauucauugugcucucaga

SEQ ID NO: 402306 - RNA, 22 nt, Human
cugcagagcaaguaacauccuc

SEQ ID NO: 402307 - RNA, 22 nt, Human
aaaucaguaaauguucauuaac

SEQ ID NO: 402308 - RNA, 22 nt, Human
gaguucuaaaggcagaacauaa

SEQ ID NO: 402309 - RNA, 22 nt, Human
aauaugcauuaacuguguacau

SEQ ID NO: 402310 - RNA, 22 nt, Human
cauuuguaucugggcugcugug

SEQ ID NO: 402311 - RNA, 22 nt, Human
acaacuuuaauggguuucagcu

SEQ ID NO: 402312 - RNA, 22 nt, Human
uccauuuucaucucauguauaa

SEQ ID NO: 402313 - RNA, 22 nt, Human
ucacugucugaaagaaauggcc

SEQ ID NO: 402314 - RNA, 22 nt, Human
gacauaauccuccucaccuacu

SEQ ID NO: 402315 - RNA, 22 nt, Human
uugugguuaaccgcacauuuuu

SEQ ID NO: 402316 - RNA, 22 nt, Human
aguaaaauuguauuggaaaaca

SEQ ID NO: 402317 - RNA, 22 nt, Human
guucuucagauuccauuucagu

SEQ ID NO: 402318 - RNA, 22 nt, Human
cagaaggcuuuguggaguagac

SEQ ID NO: 402319 - RNA, 20 nt, Human
caucagaaauccugacccac

SEQ ID NO: 402320 - RNA, 22 nt, Human
ucaccagucuuucuuaccauug

SEQ ID NO: 402321 - RNA, 19 nt, Human
guugaaaguaggugagggu

SEQ ID NO: 402322 - RNA, 22 nt, Human
ucauuguuauguuuugcugucu

SEQ ID NO: 402323 - RNA, 22 nt, Human
ugcagagagauauggcaagagg

SEQ ID NO: 402324 - RNA, 22 nt, Human
uaauuauaacaguuacaucuua

SEQ ID NO: 402325 - RNA, 22 nt, Human
acagguuuuuguggauauaugu

SEQ ID NO: 402326 - RNA, 22 nt, Human
cuacagacccaccuuggaagaa

SEQ ID NO: 402327 - RNA, 22 nt, Human
cacaaauggccguguucaaaga

SEQ ID NO: 402328 - RNA, 22 nt, Human
uuuaaaaucagaugggaguugg

SEQ ID NO: 402329 - RNA, 22 nt, Human
uuuagaaugugacuguauuuga

SEQ ID NO: 402330 - RNA, 22 nt, Human
cuggcugggagcgagcugcuca

SEQ ID NO: 402331 - RNA, 22 nt, Human
cacucuccagcacaccccauuu

SEQ ID NO: 402332 - RNA, 22 nt, Human
gauagaaagguguugaaaucca

SEQ ID NO: 402333 - RNA, 22 nt, Human
uagcagaagaacaacaugaucu

SEQ ID NO: 402334 - RNA, 22 nt, Human
uaguccuuacuuacuagaauaa

SEQ ID NO: 402335 - RNA, 22 nt, Human
cugcaucaguggauaugauggu

SEQ ID NO: 402336 - RNA, 22 nt, Human
uuugaagaccuuaucucuaaau

SEQ ID NO: 402337 - RNA, 20 nt, Human
uucaggauucuagaccacac

SEQ ID NO: 402338 - RNA, 22 nt, Human
uuaauuuuaaccuguuuguguc

SEQ ID NO: 402339 - RNA, 22 nt, Human
ucagccucucugaguccagacc

SEQ ID NO: 402340 - RNA, 22 nt, Human
gucaggaucaaauugaaguuau

SEQ ID NO: 402341 - RNA, 21 nt, Human
acagcauguuuguguguuugc

SEQ ID NO: 402342 - RNA, 22 nt, Human
ucaguuucacagucugugcaga

SEQ ID NO: 402343 - RNA, 22 nt, Human
aucugccugagucuagguuuuc

SEQ ID NO: 402344 - RNA, 22 nt, Human
gauuuccaggucauuaauaaag

SEQ ID NO: 402345 - RNA, 22 nt, Human
uugauacauuuuuaggauaaac

SEQ ID NO: 402346 - RNA, 22 nt, Human
aggcacagcacaccuggccccc

SEQ ID NO: 402347 - RNA, 22 nt, Human
agaauuccucuaggaucugccc

SEQ ID NO: 402348 - RNA, 22 nt, Human
uaaagccacgcuggaaaucagg

SEQ ID NO: 402349 - RNA, 22 nt, Human
ugaaauagacacagugcuauac

SEQ ID NO: 402350 - RNA, 22 nt, Human
gcagaauuuucuguuuucuaga

SEQ ID NO: 402351 - RNA, 21 nt, Human
auuuccaaauaaggucacauu

SEQ ID NO: 402352 - RNA, 22 nt, Human
acauguaaaaggaacaugcaug

SEQ ID NO: 402353 - RNA, 22 nt, Human
gcuuuuauugucuuuacgacga

SEQ ID NO: 402354 - RNA, 22 nt, Human
gaguccuugacacauaguaggu

SEQ ID NO: 402355 - RNA, 22 nt, Human
auagaaauguauuuuggacuag

SEQ ID NO: 402356 - RNA, 22 nt, Human
agaaccucaauuauuuuugcac

SEQ ID NO: 402357 - RNA, 19 nt, Human
uuccuuagaggaggcggug

SEQ ID NO: 402358 - RNA, 22 nt, Human
caguucuuuguggggaguucuc

SEQ ID NO: 402359 - RNA, 20 nt, Human
cuucuucauuaacccuacug

SEQ ID NO: 402360 - RNA, 22 nt, Human
ucauaaaaguacucauguucau

SEQ ID NO: 402361 - RNA, 22 nt, Human
ugugaaagagucuuauaguuuc

SEQ ID NO: 402362 - RNA, 22 nt, Human
acagucuacuugagcuuguaua

SEQ ID NO: 402363 - RNA, 22 nt, Human
aaacaaacauagguuugaaagu

SEQ ID NO: 402364 - RNA, 22 nt, Human
cuugaaagcuuugcgucuucua

SEQ ID NO: 402365 - RNA, 22 nt, Human
aucacauugccagugauuaccc

SEQ ID NO: 402366 - RNA, 22 nt, Human
agaucugaccuaaccccaccac

SEQ ID NO: 402367 - RNA, 22 nt, Human
cuccaugaauuugagcuuugug

SEQ ID NO: 402368 - RNA, 22 nt, Human
uucuacaugguugcucagaggg

SEQ ID NO: 402369 - RNA, 22 nt, Human
gaauauauuggugaaaauaguu

SEQ ID NO: 402370 - RNA, 22 nt, Human
caguaucugucaguaaucaggu

SEQ ID NO: 402371 - RNA, 22 nt, Human
ugaaagguuauuuaggucugcu

SEQ ID NO: 402372 - RNA, 22 nt, Human
guacagaaaguacccauagaag

SEQ ID NO: 402373 - RNA, 22 nt, Human
uuuauccaguguuggaauuuuu

SEQ ID NO: 402374 - RNA, 22 nt, Human
gauggcagucaaccaggugagg

SEQ ID NO: 402375 - RNA, 22 nt, Human
uuuccaaagcugaguugagcaa

SEQ ID NO: 402376 - RNA, 22 nt, Human
aagaaaucauaucauuucuugg

SEQ ID NO: 402377 - RNA, 22 nt, Human
caaaugauacuguuuuuagucu

SEQ ID NO: 402378 - RNA, 22 nt, Human
cagucaccaccagguggcagua

SEQ ID NO: 402379 - RNA, 22 nt, Human
gauuuacagcuauacccaaugg

SEQ ID NO: 402380 - RNA, 22 nt, Human
aaucagaaaggcuaaggaagca

SEQ ID NO: 402381 - RNA, 22 nt, Human
ggcauuuagagggcuuuucuga

SEQ ID NO: 402382 - RNA, 22 nt, Human
uuuccagguauuaauacuguau

SEQ ID NO: 402383 - RNA, 22 nt, Human
aaauuauuacaagcuaguuggc

SEQ ID NO: 402384 - RNA, 22 nt, Human
aguggcagagugcacucaggca

SEQ ID NO: 402385 - RNA, 22 nt, Human
gucaggauuaaugggaguaugc

SEQ ID NO: 402386 - RNA, 22 nt, Human
uucuucaaauagcagggaguca

SEQ ID NO: 402387 - RNA, 22 nt, Human
ggagcacuauaauagagauuuu

SEQ ID NO: 402388 - RNA, 22 nt, Human
uuucacaucagagguagauuag

SEQ ID NO: 402389 - RNA, 22 nt, Human
gauuucaaggauguuagaggug

SEQ ID NO: 402390 - RNA, 22 nt, Human
uaacaucuuuagcagcucgaac

SEQ ID NO: 402391 - RNA, 22 nt, Human
uuuucauuguuccucgagcauu

SEQ ID NO: 402392 - RNA, 22 nt, Human
cuuccaaaauuuauauguugaa

SEQ ID NO: 402393 - RNA, 22 nt, Human
cuuuacagaauaagaauacugg

SEQ ID NO: 402394 - RNA, 22 nt, Human
agaauaauacugaaaugcugaa

SEQ ID NO: 402395 - RNA, 22 nt, Human
uuaauucagucaaagaaaccau

SEQ ID NO: 402396 - RNA, 22 nt, Human
cucacugucuguacuagcugau

SEQ ID NO: 402397 - RNA, 22 nt, Human
aguucucagcuuaguaugcugu

SEQ ID NO: 402398 - RNA, 19 nt, Human
uccauaaugaagauagagg

SEQ ID NO: 402399 - RNA, 22 nt, Human
uguauacauuuaacuagauaga

SEQ ID NO: 402400 - RNA, 22 nt, Human
ucuuuuggaaaugaugugcagg

SEQ ID NO: 402401 - RNA, 22 nt, Human
auuacaagaugcauccauauuu

SEQ ID NO: 402402 - RNA, 22 nt, Human
aaaguccuagcgauccacagaa

SEQ ID NO: 402403 - RNA, 22 nt, Human
augaggcauuccacucaaacuc

SEQ ID NO: 402404 - RNA, 22 nt, Human
ggcauuuaguuuucauauucug

SEQ ID NO: 402405 - RNA, 22 nt, Human
uucuucuuuaucucaguauccu

SEQ ID NO: 402406 - RNA, 22 nt, Human
gaaaggugccccauaggcagga

SEQ ID NO: 402407 - RNA, 20 nt, Human
aucaggauucuugcuuuguu

SEQ ID NO: 402408 - RNA, 22 nt, Human
cauuuacacuucuaaccacaag

SEQ ID NO: 402409 - RNA, 23 nt, Human
auucuucauuaucuucuagaaaa

SEQ ID NO: 402410 - RNA, 22 nt, Human
ucagagagugcaaaauauagcu

SEQ ID NO: 402411 - RNA, 22 nt, Human
auugaaagguuuugagcagaua

SEQ ID NO: 402412 - RNA, 22 nt, Human
uuuuuaguagagguggguuuca

SEQ ID NO: 402413 - RNA, 22 nt, Human
auccaaagauggaaagaacuuu

SEQ ID NO: 402414 - RNA, 22 nt, Human
acauucacuauguccaaacucu

SEQ ID NO: 402415 - RNA, 22 nt, Human
uuaacauuguccuuagcagauu

SEQ ID NO: 402416 - RNA, 22 nt, Human
aagugauuuguacaaaaugucg

SEQ ID NO: 402417 - RNA, 22 nt, Human
uuauuuacaacucuucucuucc

SEQ ID NO: 402418 - RNA, 22 nt, Human
uugaauaaaugagcagugaauu

SEQ ID NO: 402419 - RNA, 23 nt, Human
caauuucauaugauucuaccuaa

SEQ ID NO: 402420 - RNA, 22 nt, Human
cucccagagagcaggugggccg

SEQ ID NO: 402421 - RNA, 22 nt, Human
aaagacauuagcuuagauguca

SEQ ID NO: 402422 - RNA, 22 nt, Human
acaaagucaaauugcagccgcc

SEQ ID NO: 402423 - RNA, 22 nt, Human
ugcauguguuugccacagugag

SEQ ID NO: 402424 - RNA, 21 nt, Human
auugaaagucaacaaucaguu

SEQ ID NO: 402425 - RNA, 22 nt, Human
aauuuccaaauuucugucacac

SEQ ID NO: 402426 - RNA, 22 nt, Human
cuuaauuacuguccaauaugca

SEQ ID NO: 402427 - RNA, 22 nt, Human
aacagugaguugaugacugaau

SEQ ID NO: 402428 - RNA, 20 nt, Human
cauuuguuagcuuucuacug

SEQ ID NO: 402429 - RNA, 22 nt, Human
acuuggcaaguaucuauaaagu

SEQ ID NO: 402430 - RNA, 22 nt, Human
uuucacaacugcuuauuugaga

SEQ ID NO: 402431 - RNA, 22 nt, Human
gcaaaauuaaacuuagcaucau

SEQ ID NO: 402432 - RNA, 22 nt, Human
uaaguaaauuuauaaugugauu

SEQ ID NO: 402433 - RNA, 22 nt, Human
acaugauuuuaguaucauaaua

SEQ ID NO: 402434 - RNA, 22 nt, Human
cuacagaaggagaaauggguaa

SEQ ID NO: 402435 - RNA, 22 nt, Human
guacauuucucuuguucuuauu

SEQ ID NO: 402436 - RNA, 22 nt, Human
cgccucagccguggucaucuuc

SEQ ID NO: 402437 - RNA, 22 nt, Human
uauccaaaguuucucagaaacu

SEQ ID NO: 402438 - RNA, 22 nt, Human
uacugcauaacuggcauguggg

SEQ ID NO: 402439 - RNA, 22 nt, Human
uacaaaguagaaauucaguaaa

SEQ ID NO: 402440 - RNA, 21 nt, Human
uucuucaaagaagaaggcaca

SEQ ID NO: 402441 - RNA, 21 nt, Human
ugaaacaaucagacagagucu

SEQ ID NO: 402442 - RNA, 22 nt, Human
auuacacuuguucaucaucacc

SEQ ID NO: 402443 - RNA, 22 nt, Human
auagaauucuuugaaauuuaug

SEQ ID NO: 402444 - RNA, 22 nt, Human
auucucaaaacauaacuucacu

SEQ ID NO: 402445 - RNA, 22 nt, Human
aaauacugggcucaaaaggguu

SEQ ID NO: 402446 - RNA, 22 nt, Human
agaauuucuggaagauugcaag

SEQ ID NO: 402447 - RNA, 22 nt, Human
aaaggugacacucugccagcug

SEQ ID NO: 402448 - RNA, 22 nt, Human
guuaaagaagaauaguuccuuu

SEQ ID NO: 402449 - RNA, 22 nt, Human
agauaaaaugguucaaaggcua

SEQ ID NO: 402450 - RNA, 22 nt, Human
aggaaaaaagucugugauuaua

SEQ ID NO: 402451 - RNA, 22 nt, Human
ggagugucagaaacaguguccu

SEQ ID NO: 402452 - RNA, 22 nt, Human
augaaggcaguuaaacgucauc

SEQ ID NO: 402453 - RNA, 22 nt, Human
ugaaggaaugaguauacuguuu

SEQ ID NO: 402454 - RNA, 22 nt, Human
uaucaaaguuguccugugaagu

SEQ ID NO: 402455 - RNA, 22 nt, Human
caggguggggaaauagcgcccu

SEQ ID NO: 402456 - RNA, 22 nt, Human
ucaccgucgggggucgcugucu

SEQ ID NO: 402457 - RNA, 22 nt, Human
ccuggaucccgauggcugugag

SEQ ID NO: 402458 - RNA, 22 nt, Human
auaguuugugaaacacagcagu

SEQ ID NO: 402459 - RNA, 18 nt, Human
ugaauagggguuugcaga

SEQ ID NO: 402460 - RNA, 22 nt, Human
uucuccaacacaagcaugaugu

SEQ ID NO: 402461 - RNA, 22 nt, Human
uggcauuucuggccauuugugu

SEQ ID NO: 402462 - RNA, 22 nt, Human
uaaguucauaagcuuauucuua

SEQ ID NO: 402463 - RNA, 22 nt, Human
uaagacuucauuaguaauaugg

SEQ ID NO: 402464 - RNA, 22 nt, Human
guacagaauuaugccaugaggg

SEQ ID NO: 402465 - RNA, 22 nt, Human
uuccaugaagggcagccucuca

SEQ ID NO: 402466 - RNA, 22 nt, Human
uuaauaaaguaugaauuggaaa

SEQ ID NO: 402467 - RNA, 22 nt, Human
aaauguauugcauaggauauuu

SEQ ID NO: 402468 - RNA, 22 nt, Human
aucacauucuuucaaagcaguc

SEQ ID NO: 402469 - RNA, 22 nt, Human
aaggaguuuggguagucauaca

SEQ ID NO: 402470 - RNA, 22 nt, Human
uaauuucaauagcuugcauaau

SEQ ID NO: 402471 - RNA, 20 nt, Human
aacaguaccauuuaucucag

SEQ ID NO: 402472 - RNA, 22 nt, Human
cucuucuugaaagaggaauuca

SEQ ID NO: 402473 - RNA, 22 nt, Human
gacaguccuugcccaguaucua

SEQ ID NO: 402474 - RNA, 22 nt, Human
auugugcaaauauuaucuguag

SEQ ID NO: 402475 - RNA, 22 nt, Human
gguacaaugguucauuuuaugu

SEQ ID NO: 402476 - RNA, 22 nt, Human
aagucaccccacacucuuggga

SEQ ID NO: 402477 - RNA, 22 nt, Human
uauuuaucgagugucuacuaug

SEQ ID NO: 402478 - RNA, 22 nt, Human
uucuucuuaauguccugggaac

SEQ ID NO: 402479 - RNA, 22 nt, Human
uaugaaaagguggccaauguag

SEQ ID NO: 402480 - RNA, 22 nt, Human
uucauuaauucauucagugacu

SEQ ID NO: 402481 - RNA, 22 nt, Human
aauuuacacuucauuuggaggg

SEQ ID NO: 402482 - RNA, 22 nt, Human
uaaugcuuuuccuucaaauaag

SEQ ID NO: 402483 - RNA, 22 nt, Human
uuuacagagagagaacuggacu

SEQ ID NO: 402484 - RNA, 22 nt, Human
uagcugcugcagcacagggagg

SEQ ID NO: 402485 - RNA, 22 nt, Human
guucuucaguaaaauuaaaugu

SEQ ID NO: 402486 - RNA, 22 nt, Human
caagauuugccaguggccaacu

SEQ ID NO: 402487 - RNA, 21 nt, Human
uuccagagauuguuucaccug

SEQ ID NO: 402488 - RNA, 22 nt, Human
gugguaauagagcuccaaacua

SEQ ID NO: 402489 - RNA, 22 nt, Human
aaagauaauguuuccuuauucu

SEQ ID NO: 402490 - RNA, 22 nt, Human
uauuuccagcaguaagaagaca

SEQ ID NO: 402491 - RNA, 22 nt, Human
uuccacaauguaugaauaagau

SEQ ID NO: 402492 - RNA, 22 nt, Human
aucaggaugcugucaguuacca

SEQ ID NO: 402493 - RNA, 22 nt, Human
aauguucaaacagaucacuuag

SEQ ID NO: 402494 - RNA, 22 nt, Human
ucuuagcacagcuauauaaguu

SEQ ID NO: 402495 - RNA, 22 nt, Human
gcaucuaauccaguccagcauc

SEQ ID NO: 402496 - RNA, 22 nt, Human
acuuuuaaaugaguuucaguug

SEQ ID NO: 402497 - RNA, 22 nt, Human
ugucuucagcaaaugccuuucu

SEQ ID NO: 402498 - RNA, 22 nt, Human
uuaacauacaucaugaacaaug

SEQ ID NO: 402499 - RNA, 22 nt, Human
ugcagagaaaccaguggaggac

SEQ ID NO: 402500 - RNA, 22 nt, Human
ccacugaggcaggcaguaucua

SEQ ID NO: 402501 - RNA, 22 nt, Human
ugaaggcccagccacagaaugg

SEQ ID NO: 402502 - RNA, 22 nt, Human
uuaauuacaaaacacauagguu

SEQ ID NO: 402503 - RNA, 22 nt, Human
aauaaaaugaacugguagaguu

SEQ ID NO: 402504 - RNA, 22 nt, Human
aguccuuacucgggggcccaga

SEQ ID NO: 402505 - RNA, 22 nt, Human
ucucagucagccuugauguccc

SEQ ID NO: 402506 - RNA, 22 nt, Human
ucaggauguccaaaauccagcc

SEQ ID NO: 402507 - RNA, 22 nt, Human
auguucuuccaaaucuguaaca

SEQ ID NO: 402508 - RNA, 22 nt, Human
auugaggcagcauaguucaggg

SEQ ID NO: 402509 - RNA, 22 nt, Human
gauuuacagaucuaagggucac

SEQ ID NO: 402510 - RNA, 22 nt, Human
uuacagaaguuucagcguuuua

SEQ ID NO: 402511 - RNA, 22 nt, Human
cagucucucagcuuucagcugu

SEQ ID NO: 402512 - RNA, 22 nt, Human
caaguccucgcuucuagcugug

SEQ ID NO: 402513 - RNA, 22 nt, Human
auaauucaugggccuuucaccu

SEQ ID NO: 402514 - RNA, 22 nt, Human
uucacagagaguaugcagagaa

SEQ ID NO: 402515 - RNA, 22 nt, Human
ugaaggccagcagagugaaggc

SEQ ID NO: 402516 - RNA, 22 nt, Human
guacaauagucccuguuuggau

SEQ ID NO: 402517 - RNA, 22 nt, Human
gauuuauaaagguugcacugga

SEQ ID NO: 402518 - RNA, 22 nt, Human
cuacagaaaccuuuuucauaca

SEQ ID NO: 402519 - RNA, 21 nt, Human
aaagaaucauggguaauuuca

SEQ ID NO: 402520 - RNA, 22 nt, Human
uaaagcaguguugggucggacg

SEQ ID NO: 402521 - RNA, 22 nt, Human
gucaggauuugaacucaggucu

SEQ ID NO: 402522 - RNA, 22 nt, Human
aaagaaucagaagucucaaaca

SEQ ID NO: 402523 - RNA, 22 nt, Human
caucagaaccaguggggacauu

SEQ ID NO: 402524 - RNA, 22 nt, Human
uuaaugauaccuauguuaauuu

SEQ ID NO: 402525 - RNA, 22 nt, Human
acaguuaucuuugaaauagaga

SEQ ID NO: 402526 - RNA, 22 nt, Human
aguggcaggcggagauguagga

SEQ ID NO: 402527 - RNA, 22 nt, Human
aguaaacacugucuuuauauau

SEQ ID NO: 402528 - RNA, 22 nt, Human
aguggacucuucccagugcuug

SEQ ID NO: 402529 - RNA, 18 nt, Human
augaucuuagcaaauauu

SEQ ID NO: 402530 - RNA, 22 nt, Human
uucaggaucauuuguuuuaucu

SEQ ID NO: 402531 - RNA, 22 nt, Human
gugguaaucggauucuuaccgg

SEQ ID NO: 402532 - RNA, 22 nt, Human
aaacaggcuuccauuagagcaa

SEQ ID NO: 402533 - RNA, 21 nt, Human
cacucaggguaugugccaggc

SEQ ID NO: 402534 - RNA, 22 nt, Human
uuuauccagaaucaggauuuuu

SEQ ID NO: 402535 - RNA, 20 nt, Human
gauuucaaagcagaguggcc

SEQ ID NO: 402536 - RNA, 22 nt, Human
auucuucagcaggggacacuau

SEQ ID NO: 402537 - RNA, 22 nt, Human
ugauuuaaaagaaacauugucu

SEQ ID NO: 402538 - RNA, 22 nt, Human
auuucaacagaguuugaaggca

SEQ ID NO: 402539 - RNA, 22 nt, Human
uaaggccaaguucauauacaac

SEQ ID NO: 402540 - RNA, 20 nt, Human
uguuccaagcuaaugaauga

SEQ ID NO: 402541 - RNA, 22 nt, Human
ucagaauuuuuguuacccuuga

SEQ ID NO: 402542 - RNA, 19 nt, Human
agauuuaccucauauaguu

SEQ ID NO: 402543 - RNA, 22 nt, Human
cauaagaauauuccauccuuug

SEQ ID NO: 402544 - RNA, 22 nt, Human
cugaauaauuuuauaguugcug

SEQ ID NO: 402545 - RNA, 22 nt, Human
uucaggauggcggauguugggg

SEQ ID NO: 402546 - RNA, 22 nt, Human
ucuucaauuuagaauggauuua

SEQ ID NO: 402547 - RNA, 22 nt, Human
uucauguguauggaacauuuuu

SEQ ID NO: 402548 - RNA, 22 nt, Human
uuucuucagccacuccaaacug

SEQ ID NO: 402549 - RNA, 22 nt, Human
aacaugauggggaagaacaaga

SEQ ID NO: 402550 - RNA, 22 nt, Human
gagucaccuuggccgcuguccc

SEQ ID NO: 402551 - RNA, 22 nt, Human
guuaggcagcccaagaugucag

SEQ ID NO: 402552 - RNA, 22 nt, Human
uauuucuaagagauaucuguac

SEQ ID NO: 402553 - RNA, 22 nt, Human
augaaggcuguguagauggaug

SEQ ID NO: 402554 - RNA, 22 nt, Human
uggcuauugagugaucucuaga

SEQ ID NO: 402555 - RNA, 22 nt, Human
auuguauaacagcauguauuuu

SEQ ID NO: 402556 - RNA, 22 nt, Human
aucagaaaguucaucauguuug

SEQ ID NO: 402557 - RNA, 22 nt, Human
cucaggauauugggcuggagca

SEQ ID NO: 402558 - RNA, 22 nt, Human
uuucuaguaaucaauauaaagu

SEQ ID NO: 402559 - RNA, 22 nt, Human
ugagacaaccuaauuaaacacc

SEQ ID NO: 402560 - RNA, 22 nt, Human
aguccuuaugagaugcugccuu

SEQ ID NO: 402561 - RNA, 22 nt, Human
cgucuuccucuuacgaugcgcu

SEQ ID NO: 402562 - RNA, 22 nt, Human
aaacggauauaacagcaaacgc

SEQ ID NO: 402563 - RNA, 22 nt, Human
auuuagaagcuaauuuuucaga

SEQ ID NO: 402564 - RNA, 19 nt, Human
uucauucucuuauuguugu

SEQ ID NO: 402565 - RNA, 22 nt, Human
auuaaauuggacgcugggggaa

SEQ ID NO: 402566 - RNA, 22 nt, Human
aaggccagaguacuagaggcug

SEQ ID NO: 402567 - RNA, 19 nt, Human
caguccuuuccgcuuucuc

SEQ ID NO: 402568 - RNA, 22 nt, Human
ucauuucaaguucugacagcua

SEQ ID NO: 402569 - RNA, 22 nt, Human
uaggaaaacgugauuuucucac

SEQ ID NO: 402570 - RNA, 22 nt, Human
uuuauuauucucuggagaaugu

SEQ ID NO: 402571 - RNA, 22 nt, Human
uauacaaugaguacauucuggg

SEQ ID NO: 402572 - RNA, 22 nt, Human
ucuaaagccuuccauauaacgc

SEQ ID NO: 402573 - RNA, 22 nt, Human
gaugccuccaaaugagggcaga

SEQ ID NO: 402574 - RNA, 22 nt, Human
uccaauauggauaaaaggggcc

SEQ ID NO: 402575 - RNA, 22 nt, Human
caucucaugggcaugccaagcu

SEQ ID NO: 402576 - RNA, 22 nt, Human
auuccaaacucuuucccugucg

SEQ ID NO: 402577 - RNA, 22 nt, Human
ugccuggauucgguuguuguca

SEQ ID NO: 402578 - RNA, 22 nt, Human
uuuaaagagaaugugaaggagu

SEQ ID NO: 402579 - RNA, 22 nt, Human
aaauucuucagguaauuuugau

SEQ ID NO: 402580 - RNA, 22 nt, Human
aacuuucuuggaugucucaaca

SEQ ID NO: 402581 - RNA, 22 nt, Human
acaugcuuuaacuuauuuugau

SEQ ID NO: 402582 - RNA, 22 nt, Human
cuugaaagauuuggccucugug

SEQ ID NO: 402583 - RNA, 22 nt, Human
agcugcuacugcucugccagag

SEQ ID NO: 402584 - RNA, 22 nt, Human
aaggcaguaaaaucuaccuugc

SEQ ID NO: 402585 - RNA, 22 nt, Human
aaagaaggggucuacauccaau

SEQ ID NO: 402586 - RNA, 22 nt, Human
uaauuucacugauaugaaguca

SEQ ID NO: 402587 - RNA, 22 nt, Human
gugaaggacuagcauggagggc

SEQ ID NO: 402588 - RNA, 22 nt, Human
caaggccagagccagcgauaag

SEQ ID NO: 402589 - RNA, 22 nt, Human
uguucacaaggugaugcuuuga

SEQ ID NO: 402590 - RNA, 22 nt, Human
augugaaauauuaagccgagga

SEQ ID NO: 402591 - RNA, 22 nt, Human
uugauggcugugauuuacucag

SEQ ID NO: 402592 - RNA, 22 nt, Human
acaugcuuccaaauuauguugg

SEQ ID NO: 402593 - RNA, 22 nt, Human
ccauggcucuagagauugaaaa

SEQ ID NO: 402594 - RNA, 22 nt, Human
aucagaaacucuuagagcaggg

SEQ ID NO: 402595 - RNA, 21 nt, Human
agucccauccgguaagcaagc

SEQ ID NO: 402596 - RNA, 20 nt, Human
auaggaaagggaggggcuuu

SEQ ID NO: 402597 - RNA, 22 nt, Human
ugugugaaucuauugaauauau

SEQ ID NO: 402598 - RNA, 22 nt, Human
auuucacaucuaucucagauuu

SEQ ID NO: 402599 - RNA, 22 nt, Human
cagauauuaggagcucaauaau

SEQ ID NO: 402600 - RNA, 22 nt, Human
uucagcaaacacgaugcuuguu

SEQ ID NO: 402601 - RNA, 22 nt, Human
aagcaauauacugauaugauua

SEQ ID NO: 402602 - RNA, 22 nt, Human
uguggaaagucaaguuccagga

SEQ ID NO: 402603 - RNA, 22 nt, Human
gcauguguggaggagaugugcu

SEQ ID NO: 402604 - RNA, 22 nt, Human
ucagaaauagucuuuaaaauga

SEQ ID NO: 402605 - RNA, 22 nt, Human
uuucccagagguaugaauaagu

SEQ ID NO: 402606 - RNA, 19 nt, Human
acagaaauuaguuauuuuc

SEQ ID NO: 402607 - RNA, 22 nt, Human
uaacauguuaagaaauuagaua

SEQ ID NO: 402608 - RNA, 22 nt, Human
uuuccaaaggcuaaacucaguu

SEQ ID NO: 402609 - RNA, 22 nt, Human
aggauuuauuccagaaaugcaa

SEQ ID NO: 402610 - RNA, 22 nt, Human
aggaaaaauaaggcagcagggc

SEQ ID NO: 402611 - RNA, 22 nt, Human
ucaaacaggacuacauucucau

SEQ ID NO: 402612 - RNA, 22 nt, Human
uuucauugaacuaaagaaucug

SEQ ID NO: 402613 - RNA, 22 nt, Human
caagaaucagaccugucagggu

SEQ ID NO: 402614 - RNA, 21 nt, Human
uccaaaaaggagcguccuucu

SEQ ID NO: 402615 - RNA, 22 nt, Human
uuuuauguuccucuuuaugcga

SEQ ID NO: 402616 - RNA, 22 nt, Human
uuccucuagcuucucacuaaca

SEQ ID NO: 402617 - RNA, 22 nt, Human
uaugaacauguucauugacuua

SEQ ID NO: 402618 - RNA, 22 nt, Human
ggagcuguucaggacugcuuca

SEQ ID NO: 402619 - RNA, 22 nt, Human
agucauaaagccagugggaggc

SEQ ID NO: 402620 - RNA, 22 nt, Human
aagauauacuauuaaguaccau

SEQ ID NO: 402621 - RNA, 22 nt, Human
uuuauacauggagaauuuuugc

SEQ ID NO: 402622 - RNA, 22 nt, Human
ggacagaggguugacagaguau

SEQ ID NO: 402623 - RNA, 22 nt, Human
acaaaauuaccuaguuauuuuc

SEQ ID NO: 402624 - RNA, 22 nt, Human
cagucaccugaagacuugacca

SEQ ID NO: 402625 - RNA, 22 nt, Human
acuuaaaaagaaucuuuucacg

SEQ ID NO: 402626 - RNA, 22 nt, Human
acagaauugaaaguauaaucug

SEQ ID NO: 402627 - RNA, 22 nt, Human
uccaugagcuagcuuuccaaag

SEQ ID NO: 402628 - RNA, 22 nt, Human
cucugcauuuuaacagaugauu

SEQ ID NO: 402629 - RNA, 22 nt, Human
cauaacaguggcuucagcaagu

SEQ ID NO: 402630 - RNA, 22 nt, Human
caaauguaaauucuuuugaagc

SEQ ID NO: 402631 - RNA, 22 nt, Human
cccauucauccucgcuuccuuc

SEQ ID NO: 402632 - RNA, 22 nt, Human
uuucuucaauugcuaacaagga

SEQ ID NO: 402633 - RNA, 22 nt, Human
cauuucaaggaccacccuggga

SEQ ID NO: 402634 - RNA, 22 nt, Human
agaguucugcucuucucaguga

SEQ ID NO: 402635 - RNA, 22 nt, Human
guaaacaucagccacucuauuu

SEQ ID NO: 402636 - RNA, 22 nt, Human
caaauaguaugagcaaugauuc

SEQ ID NO: 402637 - RNA, 22 nt, Human
cauagaaacuugcagcaagcac

SEQ ID NO: 402638 - RNA, 22 nt, Human
acagaauuaaugaaaauuacaa

SEQ ID NO: 402639 - RNA, 22 nt, Human
ucaguucuuuauuucacaguga

SEQ ID NO: 402640 - RNA, 22 nt, Human
uuccuuagugacuucuagcuac

SEQ ID NO: 402641 - RNA, 22 nt, Human
uuuaggcaaacucauugucaga

SEQ ID NO: 402642 - RNA, 22 nt, Human
caucagaaccagcugggugagg

SEQ ID NO: 402643 - RNA, 22 nt, Human
caagaauccuguucuugaagau

SEQ ID NO: 402644 - RNA, 22 nt, Human
augaacaagagagggaagauuc

SEQ ID NO: 402645 - RNA, 22 nt, Human
uucacagauguauuggaacucc

SEQ ID NO: 402646 - RNA, 22 nt, Human
uuguuaaaaauagauuuccagg

SEQ ID NO: 402647 - RNA, 22 nt, Human
auuaaauuggaucugcauaguu

SEQ ID NO: 402648 - RNA, 22 nt, Human
acaaugaacacacaaggaauuc

SEQ ID NO: 402649 - RNA, 18 nt, Human
ucauagaagugaaucaga

SEQ ID NO: 402650 - RNA, 22 nt, Human
gcuggauccacaaauaacuuug

SEQ ID NO: 402651 - RNA, 22 nt, Human
ucaguaaaugguugcuguuauu

SEQ ID NO: 402652 - RNA, 22 nt, Human
cucuacucuuaacacagcuagg

SEQ ID NO: 402653 - RNA, 18 nt, Human
cuggcuuucuuauccauc

SEQ ID NO: 402654 - RNA, 22 nt, Human
cauuguuaauugguaucuuaca

SEQ ID NO: 402655 - RNA, 22 nt, Human
cugaauaauuuucuguuguaug

SEQ ID NO: 402656 - RNA, 22 nt, Human
acuggaucagaaucugauuuuu

SEQ ID NO: 402657 - RNA, 22 nt, Human
cuuaaauuuucaucuacaagaa

SEQ ID NO: 402658 - RNA, 22 nt, Human
guauagaaacccagaaagauag

SEQ ID NO: 402659 - RNA, 22 nt, Human
gucuucuuguuuugaaggaaau

SEQ ID NO: 402660 - RNA, 22 nt, Human
guuaggcaugaguguguauuaa

SEQ ID NO: 402661 - RNA, 22 nt, Human
auauccaagaaacaauuaauuc

SEQ ID NO: 402662 - RNA, 22 nt, Human
uguagaaagaauauguuucaua

SEQ ID NO: 402663 - RNA, 22 nt, Human
ucauaaaaugcuccugauauug

SEQ ID NO: 402664 - RNA, 22 nt, Human
uuagaaaaaacgucuucuagug

SEQ ID NO: 402665 - RNA, 22 nt, Human
uaaguccuucaccuaauccuca

SEQ ID NO: 402666 - RNA, 22 nt, Human
auucuucaccugagucagucua

SEQ ID NO: 402667 - RNA, 22 nt, Human
uggcuuuaaaucuguauucaua

SEQ ID NO: 402668 - RNA, 22 nt, Human
guccuuaguuacuuuucauguc

SEQ ID NO: 402669 - RNA, 22 nt, Human
uuugaaauaugaggcauuauga

SEQ ID NO: 402670 - RNA, 22 nt, Human
gucauaaagcuuguugcauuua

SEQ ID NO: 402671 - RNA, 22 nt, Human
auagaauagcauagaaaauuga

SEQ ID NO: 402672 - RNA, 22 nt, Human
agugugagcccuggaguggugc

SEQ ID NO: 402673 - RNA, 22 nt, Human
cuggcuuucuauuuggugcuau

SEQ ID NO: 402674 - RNA, 19 nt, Human
uuagccauccacagugaaa

SEQ ID NO: 402675 - RNA, 22 nt, Human
uuuuucagccaugaauuacacu

SEQ ID NO: 402676 - RNA, 22 nt, Human
caaguccaggucaauuuaaagc

SEQ ID NO: 402677 - RNA, 22 nt, Human
aucaggaucacagaaacuuuua

SEQ ID NO: 402678 - RNA, 22 nt, Human
cauggcugcgagaagagugggu

SEQ ID NO: 402679 - RNA, 22 nt, Human
augaaggcuguguggagccccc

SEQ ID NO: 402680 - RNA, 22 nt, Human
ggcaccagccaccuauuucuag

SEQ ID NO: 402681 - RNA, 22 nt, Human
gaaguucaaaagacagauuuga

SEQ ID NO: 402682 - RNA, 22 nt, Human
gcuggaucaaguccuucaccca

SEQ ID NO: 402683 - RNA, 22 nt, Human
gaugaaaaucuugagaugucga

SEQ ID NO: 402684 - RNA, 22 nt, Human
ucugggaagcugcgugccuguu

SEQ ID NO: 402685 - RNA, 22 nt, Human
ugcaggaaaacaccuaucaccc

SEQ ID NO: 402686 - RNA, 22 nt, Human
uaaaaguauacuuucaaaggag

SEQ ID NO: 402687 - RNA, 22 nt, Human
uaaaauugcggugaauauuucc

SEQ ID NO: 402688 - RNA, 22 nt, Human
ugaagaaucagauuggccugcg

SEQ ID NO: 402689 - RNA, 17 nt, Human
cuguuaauucauuuccc

SEQ ID NO: 402690 - RNA, 22 nt, Human
acauauauuacuaguaaagaca

SEQ ID NO: 402691 - RNA, 22 nt, Human
ugguuuaaccugucucuuauua

SEQ ID NO: 402692 - RNA, 22 nt, Human
ucaggaugagcucauaacuaug

SEQ ID NO: 402693 - RNA, 22 nt, Human
uuauuuaaaagugguaagauuc

SEQ ID NO: 402694 - RNA, 22 nt, Human
ucuggaucggguuccucagguc

SEQ ID NO: 402695 - RNA, 22 nt, Human
ccaguuuaagacuuaucucaau

SEQ ID NO: 402696 - RNA, 22 nt, Human
uuacagaaaggaaggacugacu

SEQ ID NO: 402697 - RNA, 22 nt, Human
aaagucaucuaggagcagauuu

SEQ ID NO: 402698 - RNA, 22 nt, Human
aggcuucugcugauauuucauu

SEQ ID NO: 402699 - RNA, 22 nt, Human
cuucaggauuuaggaagaugaa

SEQ ID NO: 402700 - RNA, 22 nt, Human
cucaacagcucugccauacucc

SEQ ID NO: 402701 - RNA, 22 nt, Human
cuucuucaucuguaaaacuugg

SEQ ID NO: 402702 - RNA, 22 nt, Human
aucaggaugacuauaaggcugc

SEQ ID NO: 402703 - RNA, 23 nt, Human
agaucugauguuaccaagaauug

SEQ ID NO: 402704 - RNA, 22 nt, Human
uaagaaguacaaaaauuuucug

SEQ ID NO: 402705 - RNA, 21 nt, Human
gauuugcagaaacuagacagg

SEQ ID NO: 402706 - RNA, 22 nt, Human
uugauuaaucccaugugaguag

SEQ ID NO: 402707 - RNA, 22 nt, Human
aguauuuagcauagugguuagu

SEQ ID NO: 402708 - RNA, 23 nt, Human
uguaacaauucccagccuuugcc

SEQ ID NO: 402709 - RNA, 22 nt, Human
ucauaaagcucuuccaaaugua

SEQ ID NO: 402710 - RNA, 22 nt, Human
ugagacaaaauugacagacaaa

SEQ ID NO: 402711 - RNA, 22 nt, Human
cauuucaaacaguuacagcugc

SEQ ID NO: 402712 - RNA, 22 nt, Human
gaauuucaacaguccucaaaug

SEQ ID NO: 402713 - RNA, 22 nt, Human
ccuggauccaugaaaaggcuac

SEQ ID NO: 402714 - RNA, 22 nt, Human
agaccuggauuccaauccuacc

SEQ ID NO: 402715 - RNA, 22 nt, Human
uuuaucuuuaggacuuugcaga

SEQ ID NO: 402716 - RNA, 22 nt, Human
auguauccuuauacacauuuau

SEQ ID NO: 402717 - RNA, 22 nt, Human
uguuugaauuuugcuaacgugu

SEQ ID NO: 402718 - RNA, 20 nt, Human
cucaggauacugcaaaguug

SEQ ID NO: 402719 - RNA, 22 nt, Human
aagcauuuuguuuuaagaauga

SEQ ID NO: 402720 - RNA, 22 nt, Human
uccaugaggcagggaggcuggc

SEQ ID NO: 402721 - RNA, 22 nt, Human
uacagcuaggcaaaaaugacau

SEQ ID NO: 402722 - RNA, 22 nt, Human
aaucagaaaauucaguggaauu

SEQ ID NO: 402723 - RNA, 22 nt, Human
augcuuaauacacuguuaaagg

SEQ ID NO: 402724 - RNA, 22 nt, Human
aucaguuaguuacugcuaagau

SEQ ID NO: 402725 - RNA, 21 nt, Human
ucagagaacccggcaggcaag

SEQ ID NO: 402726 - RNA, 22 nt, Human
aucauucuaguccuuauggucu

SEQ ID NO: 402727 - RNA, 22 nt, Human
guccucuguuagaaaugugcuu

SEQ ID NO: 402728 - RNA, 22 nt, Human
uaaguccuggcugguuugaagc

SEQ ID NO: 402729 - RNA, 22 nt, Human
aucaggaucugggagccugaaa

SEQ ID NO: 402730 - RNA, 22 nt, Human
uuuuugcugauaagcagaauuc

SEQ ID NO: 402731 - RNA, 23 nt, Human
acauacauggagauaaagugaug

SEQ ID NO: 402732 - RNA, 22 nt, Human
auacagaauucacuacaguuuc

SEQ ID NO: 402733 - RNA, 22 nt, Human
auuccaaagguuaaugcccauu

SEQ ID NO: 402734 - RNA, 22 nt, Human
caaauguauaaauguacuuucu

SEQ ID NO: 402735 - RNA, 22 nt, Human
ugauauuuaagcaaaaauaugg

SEQ ID NO: 402736 - RNA, 22 nt, Human
auuaaacugagcaaauuaacau

SEQ ID NO: 402737 - RNA, 22 nt, Human
aaguuacacauuuucauuguaa

SEQ ID NO: 402738 - RNA, 22 nt, Human
ucagaauuuugguuugguuggu

SEQ ID NO: 402739 - RNA, 22 nt, Human
uuacagaagugaaggccuuuaa

SEQ ID NO: 402740 - RNA, 22 nt, Human
caucagaaagaguccuggacuu

SEQ ID NO: 402741 - RNA, 22 nt, Human
ccucaggauccgcaggugcagu

SEQ ID NO: 402742 - RNA, 22 nt, Human
gguacaauccacuguggguuag

SEQ ID NO: 402743 - RNA, 22 nt, Human
auacuaaaguauagaacuuagu

SEQ ID NO: 402744 - RNA, 22 nt, Human
ccagucacucugugagagcuac

SEQ ID NO: 402745 - RNA, 22 nt, Human
cauuuguuaaccaguguggauu

SEQ ID NO: 402746 - RNA, 22 nt, Human
cacagacccagaagggaugaag

SEQ ID NO: 402747 - RNA, 22 nt, Human
aaguccuucccaagcauguacc

SEQ ID NO: 402748 - RNA, 22 nt, Human
ucuuuaauauaaaggaaugaau

SEQ ID NO: 402749 - RNA, 21 nt, Human
caagccagaccaauagcagcc

SEQ ID NO: 402750 - RNA, 22 nt, Human
ucauuauccuaguaucuugaau

SEQ ID NO: 402751 - RNA, 22 nt, Human
ugcaggaagcaaccagguccaa

SEQ ID NO: 402752 - RNA, 22 nt, Human
gucaggauuuuaaaaucccagu

SEQ ID NO: 402753 - RNA, 22 nt, Human
ggauggcagucugcaugagaaa

SEQ ID NO: 402754 - RNA, 22 nt, Human
uguccuuacaaggucccuuucg

SEQ ID NO: 402755 - RNA, 22 nt, Human
ggcucagaccucccagcuccag

SEQ ID NO: 402756 - RNA, 22 nt, Human
uuagccauuuuauacaagugua

SEQ ID NO: 402757 - RNA, 22 nt, Human
uaaauuguuuucuagaaguugu

SEQ ID NO: 402758 - RNA, 18 nt, Human
aagucaccccugcucccu

SEQ ID NO: 402759 - RNA, 22 nt, Human
agacaacaucacuaaagcugag

SEQ ID NO: 402760 - RNA, 21 nt, Human
acagucuccccagaucucucc

SEQ ID NO: 402761 - RNA, 22 nt, Human
auuucccagcuuugaucaguuu

SEQ ID NO: 402762 - RNA, 22 nt, Human
ugcuuauucuuuccacaauuca

SEQ ID NO: 402763 - RNA, 22 nt, Human
aaaguccuuuuugccaugcaag

SEQ ID NO: 402764 - RNA, 22 nt, Human
uuccuuagcuccucauggccug

SEQ ID NO: 402765 - RNA, 22 nt, Human
uacuuaaugccacugaauugua

SEQ ID NO: 402766 - RNA, 22 nt, Human
ucuacagacagagcagguggga

SEQ ID NO: 402767 - RNA, 22 nt, Human
augaauaaacaggugccucuuc

SEQ ID NO: 402768 - RNA, 22 nt, Human
caauacuuccuuguuagaggca

SEQ ID NO: 402769 - RNA, 22 nt, Human
caauuucaauacaaaauacauu

SEQ ID NO: 402770 - RNA, 22 nt, Human
augcuaaauggccaguaccaaa

SEQ ID NO: 402771 - RNA, 22 nt, Human
auauucuuccaaaacaucauuu

SEQ ID NO: 402772 - RNA, 22 nt, Human
uuugaaagccuggcuuuucucu

SEQ ID NO: 402773 - RNA, 22 nt, Human
auuaggcagugccauuguacgg

SEQ ID NO: 402774 - RNA, 22 nt, Human
ucaauaaaucccucugacccug

SEQ ID NO: 402775 - RNA, 22 nt, Human
gcaggcuccaaggccugggaga

SEQ ID NO: 402776 - RNA, 22 nt, Human
uuacagaaaagggcuuuaagag

SEQ ID NO: 402777 - RNA, 22 nt, Human
aaguauaagcuauucuucauga

SEQ ID NO: 402778 - RNA, 22 nt, Human
aaguauuucguucugaaaaagu

SEQ ID NO: 402779 - RNA, 22 nt, Human
ucuuucaaugagcauucuuucc

SEQ ID NO: 402780 - RNA, 20 nt, Human
gagauggacagaugaagggg

SEQ ID NO: 402781 - RNA, 22 nt, Human
cacaauuuccuugcuucacuuu

SEQ ID NO: 402782 - RNA, 22 nt, Human
uacuaaacaucuggcauuaaau

SEQ ID NO: 402783 - RNA, 22 nt, Human
cuguaaauaugaagaauauaug

SEQ ID NO: 402784 - RNA, 22 nt, Human
uaaagccacuucauucuagucu

SEQ ID NO: 402785 - RNA, 22 nt, Human
uugguuuagagagugugguuac

SEQ ID NO: 402786 - RNA, 22 nt, Human
caggauggucucgaucuccuga

SEQ ID NO: 402787 - RNA, 22 nt, Human
uuauuuaaugugaucugaagag

SEQ ID NO: 402788 - RNA, 22 nt, Human
ccaugcacaccagcaggcagac

SEQ ID NO: 402789 - RNA, 22 nt, Human
ucaauucugguccucaggaacu

SEQ ID NO: 402790 - RNA, 22 nt, Human
ucauuuguacuugugugcuugu

SEQ ID NO: 402791 - RNA, 22 nt, Human
aaauuguugaucuacaguaagg

SEQ ID NO: 402792 - RNA, 22 nt, Human
aagacuuucaaaccuauguuug

SEQ ID NO: 402793 - RNA, 22 nt, Human
cuggcuuuggucaugugaucau

SEQ ID NO: 402794 - RNA, 20 nt, Human
uuucaagucagcaauucuca

SEQ ID NO: 402795 - RNA, 22 nt, Human
uacagauauagagauuuauaga

SEQ ID NO: 402796 - RNA, 22 nt, Human
uaugucaaaguuaagaaauagg

SEQ ID NO: 402797 - RNA, 22 nt, Human
uagcagaaacuguuacagaagg

SEQ ID NO: 402798 - RNA, 22 nt, Human
uaauaaacugcuacgcuuaguu

SEQ ID NO: 402799 - RNA, 22 nt, Human
gcaacuuuagggccagcaagua

SEQ ID NO: 402800 - RNA, 22 nt, Human
cagauccacccuuguagugaca

SEQ ID NO: 402801 - RNA, 22 nt, Human
cauggcuuuguucauauaauuu

SEQ ID NO: 402802 - RNA, 22 nt, Human
aaucuucuuucuuaacaguaca

SEQ ID NO: 402803 - RNA, 22 nt, Human
uaaagaucuuaggaagauuuuc

SEQ ID NO: 402804 - RNA, 22 nt, Human
ugugaauagugccgcaauaaac

SEQ ID NO: 402805 - RNA, 22 nt, Human
ccucagaugucuuaaggcacug

SEQ ID NO: 402806 - RNA, 22 nt, Human
cuacagaaucuaccucaagcca

SEQ ID NO: 402807 - RNA, 22 nt, Human
caggccagguggcaggcaaaac

SEQ ID NO: 402808 - RNA, 22 nt, Human
aaaggcauuuuaauucuaaaga

SEQ ID NO: 402809 - RNA, 23 nt, Human
auugaugacuugauuacacuuuu

SEQ ID NO: 402810 - RNA, 22 nt, Human
ccuggacucaggcugugggcac

SEQ ID NO: 402811 - RNA, 22 nt, Human
uaaaguuuguagcaauugauau

SEQ ID NO: 402812 - RNA, 22 nt, Human
ucuauacugaugggauacuauu

SEQ ID NO: 402813 - RNA, 22 nt, Human
ucauuauuuuggacuggagugu

SEQ ID NO: 402814 - RNA, 22 nt, Human
cuugaaagucagcagaguggau

SEQ ID NO: 402815 - RNA, 22 nt, Human
ggcucagagaccugcgaucuga

SEQ ID NO: 402816 - RNA, 22 nt, Human
uucuucaguguagcaacuguau

SEQ ID NO: 402817 - RNA, 22 nt, Human
aguuauaugugaaaacacguau

SEQ ID NO: 402818 - RNA, 22 nt, Human
ucugggaaaugcuguuccuugu

SEQ ID NO: 402819 - RNA, 22 nt, Human
uuucacagguacaaacacuccu

SEQ ID NO: 402820 - RNA, 22 nt, Human
uacuuuuagccuauuugauucu

SEQ ID NO: 402821 - RNA, 22 nt, Human
cccaugagauucugaauuuggc

SEQ ID NO: 402822 - RNA, 22 nt, Human
auacaaugauaauaguacuuua

SEQ ID NO: 402823 - RNA, 22 nt, Human
uuauacaguuuauacuuagaau

SEQ ID NO: 402824 - RNA, 21 nt, Human
gcucagaguauugcacuguuu

SEQ ID NO: 402825 - RNA, 22 nt, Human
ccaugagcuucaacugacacag

SEQ ID NO: 402826 - RNA, 22 nt, Human
ucucuguacaguacaugccgug

SEQ ID NO: 402827 - RNA, 22 nt, Human
uggagaauuuugucaccagaca

SEQ ID NO: 402828 - RNA, 22 nt, Human
uucauuaguucugaagaugucu

SEQ ID NO: 402829 - RNA, 22 nt, Human
aagauauagauaaaacuaugca

SEQ ID NO: 402830 - RNA, 21 nt, Human
uuuuauugaugaauggccacu

SEQ ID NO: 402831 - RNA, 22 nt, Human
ugaauagauuuuuaacauauaa

SEQ ID NO: 402832 - RNA, 22 nt, Human
ggaggcugagaaguccaagauc

SEQ ID NO: 402833 - RNA, 20 nt, Human
aaucagaaagugugagcucu

SEQ ID NO: 402834 - RNA, 22 nt, Human
cuauuacauuucuggacauuca

SEQ ID NO: 402835 - RNA, 22 nt, Human
aaauacugucucugagagagcc

SEQ ID NO: 402836 - RNA, 22 nt, Human
aguaaacaguaucuuuaguguc

SEQ ID NO: 402837 - RNA, 21 nt, Human
auacagaacauugauccaaga

SEQ ID NO: 402838 - RNA, 22 nt, Human
gguuuaauggagauauuucaga

SEQ ID NO: 402839 - RNA, 22 nt, Human
ucagccagugccuugaucuugc

SEQ ID NO: 402840 - RNA, 22 nt, Human
uaacagaaaggggacagaaaua

SEQ ID NO: 402841 - RNA, 22 nt, Human
aaugugaucgcuuuagaagcuu

SEQ ID NO: 402842 - RNA, 22 nt, Human
ucgagcucuggagccaaggaug

SEQ ID NO: 402843 - RNA, 22 nt, Human
aauacagaggggucacaauuca

SEQ ID NO: 402844 - RNA, 22 nt, Human
cugauacauaguagcaugucau

SEQ ID NO: 402845 - RNA, 22 nt, Human
uugacaauguccuuugaauuuc

SEQ ID NO: 402846 - RNA, 22 nt, Human
uuuuaucuucauuccuaucuac

SEQ ID NO: 402847 - RNA, 22 nt, Human
ucacauaaauuauacaauuuca

SEQ ID NO: 402848 - RNA, 22 nt, Human
acaauguguuuuuauacauuug

SEQ ID NO: 402849 - RNA, 22 nt, Human
uuuacagauguggaaagugagc

SEQ ID NO: 402850 - RNA, 22 nt, Human
aaugcaaagcaagcagagauuu

SEQ ID NO: 402851 - RNA, 22 nt, Human
uucacauuggugauauguuucu

SEQ ID NO: 402852 - RNA, 22 nt, Human
uuagaaagcuuuccauagucaa

SEQ ID NO: 402853 - RNA, 22 nt, Human
auacuguuucucuucuacauga

SEQ ID NO: 402854 - RNA, 22 nt, Human
auucuuauuuaaauagagucug

SEQ ID NO: 402855 - RNA, 22 nt, Human
aaagccauaagccuaauacuaa

SEQ ID NO: 402856 - RNA, 22 nt, Human
acaacauuauacauagaaagcu

SEQ ID NO: 402857 - RNA, 22 nt, Human
cuuaggcagggcuggaagaucu

SEQ ID NO: 402858 - RNA, 22 nt, Human
agaauuuccuaugagagauucc

SEQ ID NO: 402859 - RNA, 22 nt, Human
uccauuuuagagaugaagaaac

SEQ ID NO: 402860 - RNA, 22 nt, Human
augugaaagagguguucagugg

SEQ ID NO: 402861 - RNA, 22 nt, Human
cauggcuuuuuagcauauucaa

SEQ ID NO: 402862 - RNA, 22 nt, Human
uaagucauaagucaugauguua

SEQ ID NO: 402863 - RNA, 22 nt, Human
aaagucaucauuucuuuucaaa

SEQ ID NO: 402864 - RNA, 22 nt, Human
gcucaggacuggaggagcgggg

SEQ ID NO: 402865 - RNA, 22 nt, Human
uaaagucaucuuuacaucuuug

SEQ ID NO: 402866 - RNA, 22 nt, Human
aggauuuacuagcaaggauucu

SEQ ID NO: 402867 - RNA, 22 nt, Human
ugaguucuaguggcugcagauu

SEQ ID NO: 402868 - RNA, 22 nt, Human
ucuacugcacuggugucucauc

SEQ ID NO: 402869 - RNA, 22 nt, Human
uuuaggcaauagauggcagugu

SEQ ID NO: 402870 - RNA, 22 nt, Human
uuccuuaggggacagggggaua

SEQ ID NO: 402871 - RNA, 22 nt, Human
uucacagagagaacucaaacca

SEQ ID NO: 402872 - RNA, 22 nt, Human
augcuuuagugucaaguuuggg

SEQ ID NO: 402873 - RNA, 22 nt, Human
gagauuuagcugcuuaacuccu

SEQ ID NO: 402874 - RNA, 22 nt, Human
ucauaaagcauuucagcuuuug

SEQ ID NO: 402875 - RNA, 22 nt, Human
ucagaauucugaccuuggguca

SEQ ID NO: 402876 - RNA, 22 nt, Human
auuacagaaugcaguuccuuau

SEQ ID NO: 402877 - RNA, 22 nt, Human
ucuggaucccaccgccacacac

SEQ ID NO: 402878 - RNA, 22 nt, Human
uaagagaauguuguggcuaggu

SEQ ID NO: 402879 - RNA, 21 nt, Human
aaucauacaaaacaugucagg

SEQ ID NO: 402880 - RNA, 22 nt, Human
aaaggccacacagagcagggag

SEQ ID NO: 402881 - RNA, 22 nt, Human
cagucucuugcuucauuaguug

SEQ ID NO: 402882 - RNA, 21 nt, Human
auaagcaugcugauuacauuu

SEQ ID NO: 402883 - RNA, 22 nt, Human
auucuacaacccaauaauaauu

SEQ ID NO: 402884 - RNA, 22 nt, Human
uauuauuaaauggcagaauuuu

SEQ ID NO: 402885 - RNA, 22 nt, Human
cauuuauauaaaauguccagaa

SEQ ID NO: 402886 - RNA, 19 nt, Human
auucauuuuugccuucuaa

SEQ ID NO: 402887 - RNA, 22 nt, Human
cauuuguauguuccuccuuagg

SEQ ID NO: 402888 - RNA, 22 nt, Human
cuuaggcauccaggguucuucc

SEQ ID NO: 402889 - RNA, 23 nt, Human
aauaucaaggugauguucccaga

SEQ ID NO: 402890 - RNA, 22 nt, Human
ugguuuuagaugccuuuacugc

SEQ ID NO: 402891 - RNA, 22 nt, Human
caucagaaugaauguucuggag

SEQ ID NO: 402892 - RNA, 22 nt, Human
gcagaggggaagcugaggaauu

SEQ ID NO: 402893 - RNA, 22 nt, Human
uuuauucugugcuacaugaaga

SEQ ID NO: 402894 - RNA, 22 nt, Human
ucagccuacacuccaacagcau

SEQ ID NO: 402895 - RNA, 20 nt, Human
guaaaauauggucuuugggu

SEQ ID NO: 402896 - RNA, 22 nt, Human
auguuauuaaaguacagauucu

SEQ ID NO: 402897 - RNA, 22 nt, Human
ucuuuaauucagcaugaugcgg

SEQ ID NO: 402898 - RNA, 22 nt, Human
agagaauuggagcagugacagg

SEQ ID NO: 402899 - RNA, 22 nt, Human
ucacugcucuccaauguggagu

SEQ ID NO: 402900 - RNA, 22 nt, Human
ucacaaauauuuuaacaguagg

SEQ ID NO: 402901 - RNA, 20 nt, Human
caggaugauuggacacgaug

SEQ ID NO: 402902 - RNA, 22 nt, Human
aaugucuuuaaagugcaauaga

SEQ ID NO: 402903 - RNA, 22 nt, Human
aggccagaaauuuggaguaugu

SEQ ID NO: 402904 - RNA, 22 nt, Human
gaggccuggagccgccuaggcg

SEQ ID NO: 402905 - RNA, 22 nt, Human
ugaagaaucccagggaauuugg

SEQ ID NO: 402906 - RNA, 22 nt, Human
guuuauaaggcccaauauuucu

SEQ ID NO: 402907 - RNA, 22 nt, Human
ccauccugcauugcuauucaga

SEQ ID NO: 402908 - RNA, 22 nt, Human
agcuucuuggcucagcacuugg

SEQ ID NO: 402909 - RNA, 21 nt, Human
cucagagaaaugucugggagc

SEQ ID NO: 402910 - RNA, 22 nt, Human
uucagaaugugaccuuauuugg

SEQ ID NO: 402911 - RNA, 22 nt, Human
augauauuugcaaugugcuugc

SEQ ID NO: 402912 - RNA, 22 nt, Human
auuucagaugaccaaauggaaa

SEQ ID NO: 402913 - RNA, 22 nt, Human
ccauggcaauggucagucuauu

SEQ ID NO: 402914 - RNA, 22 nt, Human
uaaggccagccagcaaaucugu

SEQ ID NO: 402915 - RNA, 22 nt, Human
cuuuacauccuguuucccguuu

SEQ ID NO: 402916 - RNA, 22 nt, Human
auuguuaauguugcacuaaggu

SEQ ID NO: 402917 - RNA, 22 nt, Human
aucuaacagcaacaccagaaua

SEQ ID NO: 402918 - RNA, 22 nt, Human
uaaaacuuaacuauccagauua

SEQ ID NO: 402919 - RNA, 22 nt, Human
aggauuuagauuuggaggaacu

SEQ ID NO: 402920 - RNA, 22 nt, Human
gcauggcugguguccugaggga

SEQ ID NO: 402921 - RNA, 22 nt, Human
gaggccaggagugcuguaaguu

SEQ ID NO: 402922 - RNA, 22 nt, Human
ucuucagaggaagucagucuuu

SEQ ID NO: 402923 - RNA, 22 nt, Human
auacuuaacuguggagucauug

SEQ ID NO: 402924 - RNA, 22 nt, Human
uaauuccaaguugagacaugca

SEQ ID NO: 402925 - RNA, 22 nt, Human
uguaaauaaugcauguaaauca

SEQ ID NO: 402926 - RNA, 22 nt, Human
acaugcuuugauguauuuugca

SEQ ID NO: 402927 - RNA, 22 nt, Human
ugaauaaucuuggguauuaaua

SEQ ID NO: 402928 - RNA, 22 nt, Human
uguaagaaucagucuuuaaugu

SEQ ID NO: 402929 - RNA, 22 nt, Human
uuagaaaucugcugccaugcaa

SEQ ID NO: 402930 - RNA, 22 nt, Human
uuucaaacauaucuucauuacu

SEQ ID NO: 402931 - RNA, 22 nt, Human
uguguaaauuuauuuacauaaa

SEQ ID NO: 402932 - RNA, 22 nt, Human
aagacuuucaaguaugcaugca

SEQ ID NO: 402933 - RNA, 22 nt, Human
ucuucacaugaccuucaugucu

SEQ ID NO: 402934 - RNA, 22 nt, Human
aaaauaacuucuacuauuugca

SEQ ID NO: 402935 - RNA, 22 nt, Human
acacauuuacauguuuacguau

SEQ ID NO: 402936 - RNA, 22 nt, Human
uaacagaagaaaacauauugga

SEQ ID NO: 402937 - RNA, 22 nt, Human
uaaguccuaacagacugggggc

SEQ ID NO: 402938 - RNA, 22 nt, Human
ucacacagauugguagagcuga

SEQ ID NO: 402939 - RNA, 19 nt, Human
uggggcuguguuuugaccc

SEQ ID NO: 402940 - RNA, 22 nt, Human
uucagaaacaucaguggaugga

SEQ ID NO: 402941 - RNA, 21 nt, Human
uucauaaaccauucucaugca

SEQ ID NO: 402942 - RNA, 22 nt, Human
aaugaaaauuggacccuagaac

SEQ ID NO: 402943 - RNA, 22 nt, Human
ucucuuaauuuuggaauagugu

SEQ ID NO: 402944 - RNA, 22 nt, Human
uaaguggaagguuauaugcuaa

SEQ ID NO: 402945 - RNA, 22 nt, Human
uugguuuaggaacuggcuugga

SEQ ID NO: 402946 - RNA, 22 nt, Human
uaaauaugcauguauccuuauc

SEQ ID NO: 402947 - RNA, 22 nt, Human
aagauauagauggugguauaaa

SEQ ID NO: 402948 - RNA, 22 nt, Human
acauucacgcucucaaagcuga

SEQ ID NO: 402949 - RNA, 22 nt, Human
uguguaaaaucugauuaauacu

SEQ ID NO: 402950 - RNA, 22 nt, Human
agagggagcccagucauagcug

SEQ ID NO: 402951 - RNA, 22 nt, Human
aaacugugcuucccaaaugccc

SEQ ID NO: 402952 - RNA, 18 nt, Human
ugagaggcagguagagga

SEQ ID NO: 402953 - RNA, 22 nt, Human
acaugcauaggagaagucuuua

SEQ ID NO: 402954 - RNA, 22 nt, Human
gugaauaaucacccuucuggau

SEQ ID NO: 402955 - RNA, 20 nt, Human
uuccuuaggcauuggaagaa

SEQ ID NO: 402956 - RNA, 22 nt, Human
uaaucugaagaaacaggacuug

SEQ ID NO: 402957 - RNA, 22 nt, Human
ccuuuaauuuacaauguuaauu

SEQ ID NO: 402958 - RNA, 22 nt, Human
cuguuaauugugaauuuuacau

SEQ ID NO: 402959 - RNA, 22 nt, Human
caaggccauaagagauacaaaa

SEQ ID NO: 402960 - RNA, 22 nt, Human
ugaaggccuaacuuccagugcu

SEQ ID NO: 402961 - RNA, 22 nt, Human
gcuggcuugauaguuucugcuu

SEQ ID NO: 402962 - RNA, 22 nt, Human
uacauacaagauguguuuaaaa

SEQ ID NO: 402963 - RNA, 22 nt, Human
ucagcauaucuugagcuucaug

SEQ ID NO: 402964 - RNA, 22 nt, Human
uucaggaugcagagguuguagu

SEQ ID NO: 402965 - RNA, 22 nt, Human
aacuggauuuaggaacagagaa

SEQ ID NO: 402966 - RNA, 22 nt, Human
uggcauuuucuccuuugaguuu

SEQ ID NO: 402967 - RNA, 23 nt, Human
aaugauuucaugaugauagcagc

SEQ ID NO: 402968 - RNA, 22 nt, Human
auuaaauguuggacguauacau

SEQ ID NO: 402969 - RNA, 22 nt, Human
caaagccauagaguagauaaga

SEQ ID NO: 402970 - RNA, 22 nt, Human
uugaauaguguuuucaguauac

SEQ ID NO: 402971 - RNA, 22 nt, Human
aaguaaauaucuguuuauagca

SEQ ID NO: 402972 - RNA, 22 nt, Human
uaauuucaaauuucuuagcgug

SEQ ID NO: 402973 - RNA, 22 nt, Human
gucaggaugagggaugaggagu

SEQ ID NO: 402974 - RNA, 20 nt, Human
uggccuuuaaauaguauucc

SEQ ID NO: 402975 - RNA, 23 nt, Human
uguaacaauuucauauacaugca

SEQ ID NO: 402976 - RNA, 22 nt, Human
ccauccuaucugaccuacuugu

SEQ ID NO: 402977 - RNA, 22 nt, Human
uuccuuagccugccuuccaggg

SEQ ID NO: 402978 - RNA, 22 nt, Human
ucuucacaggagccugccugcc

SEQ ID NO: 402979 - RNA, 21 nt, Human
uacagaaugcgcuucagucug

SEQ ID NO: 402980 - RNA, 22 nt, Human
cuucucaaaguugugaaucagg

SEQ ID NO: 402981 - RNA, 22 nt, Human
uaaauuauggcuggcagagcag

SEQ ID NO: 402982 - RNA, 22 nt, Human
auaaacaguagagaaagguggu

SEQ ID NO: 402983 - RNA, 22 nt, Human
ucaggaggccaccaggaccugu

SEQ ID NO: 402984 - RNA, 22 nt, Human
uucuuuucuuuaggcauugugu

SEQ ID NO: 402985 - RNA, 22 nt, Human
cauagaaaagaguagguaaugu

SEQ ID NO: 402986 - RNA, 22 nt, Human
uacuuuuuagcacagugugugc

SEQ ID NO: 402987 - RNA, 22 nt, Human
gucccaggugggcuccaccucu

SEQ ID NO: 402988 - RNA, 22 nt, Human
uuucaaguguccugauuaaugg

SEQ ID NO: 402989 - RNA, 22 nt, Human
auuaaagaaacccagcauguga

SEQ ID NO: 402990 - RNA, 22 nt, Human
uuuaauauuucuuuccugaagc

SEQ ID NO: 402991 - RNA, 22 nt, Human
aguaugaacggaaggccuggga

SEQ ID NO: 402992 - RNA, 21 nt, Human
aaaggccauaaucacggagca

SEQ ID NO: 402993 - RNA, 20 nt, Human
agaaaaaguguggaaauuuc

SEQ ID NO: 402994 - RNA, 22 nt, Human
auuucaggagcaguuucagugg

SEQ ID NO: 402995 - RNA, 21 nt, Human
ucauuugugaucugauuucca

SEQ ID NO: 402996 - RNA, 22 nt, Human
cauuucaaugccuucaacauag

SEQ ID NO: 402997 - RNA, 20 nt, Human
ucagugauuuugaagaggaa

SEQ ID NO: 402998 - RNA, 22 nt, Human
cuuuuaaugggagcaguauuug

SEQ ID NO: 402999 - RNA, 22 nt, Human
ucucaagaucucaagauggccc

SEQ ID NO: 403000 - RNA, 22 nt, Human
aguucacagccauguucaugug

SEQ ID NO: 403001 - RNA, 22 nt, Human
augcuuuuaugucacaugguca

SEQ ID NO: 403002 - RNA, 22 nt, Human
gcacaauaacagccaagguuau

SEQ ID NO: 403003 - RNA, 22 nt, Human
gaguccuuuugugccacaggga

SEQ ID NO: 403004 - RNA, 22 nt, Human
uuugaaagcuacuuucggguca

SEQ ID NO: 403005 - RNA, 22 nt, Human
cucaggauugugccuagggaga

SEQ ID NO: 403006 - RNA, 21 nt, Human
aucauucuggaaaauucaagc

SEQ ID NO: 403007 - RNA, 22 nt, Human
uacaugaaccuuuaugugugau

SEQ ID NO: 403008 - RNA, 22 nt, Human
aaguccuuaggaagcagucguu

SEQ ID NO: 403009 - RNA, 22 nt, Human
cauaauuacugauaugcugauu

SEQ ID NO: 403010 - RNA, 22 nt, Human
uuucuaggcacagugucuuccc

SEQ ID NO: 403011 - RNA, 22 nt, Human
cacaauuuccaagucauguuau

SEQ ID NO: 403012 - RNA, 23 nt, Human
augcaagaguuucucaaacugga

SEQ ID NO: 403013 - RNA, 22 nt, Human
cuggcuuucucugugguguuca

SEQ ID NO: 403014 - RNA, 21 nt, Human
uucaaagacuugaugcugacc

SEQ ID NO: 403015 - RNA, 22 nt, Human
caguccuuagucuggauggcuu

SEQ ID NO: 403016 - RNA, 22 nt, Human
caugcuuuucaaucuaucuuaa

SEQ ID NO: 403017 - RNA, 22 nt, Human
uauuuccaagcugaauccaaug

SEQ ID NO: 403018 - RNA, 22 nt, Human
aaaggccacugcaagggaaggu

SEQ ID NO: 403019 - RNA, 22 nt, Human
aguguuuaaacugaagugauga

SEQ ID NO: 403020 - RNA, 22 nt, Human
uuccuuagggucagccagaucu

SEQ ID NO: 403021 - RNA, 22 nt, Human
uucaacuauuaugaauaaaauu

SEQ ID NO: 403022 - RNA, 22 nt, Human
aaguccaugaucaagauguggc

SEQ ID NO: 403023 - RNA, 20 nt, Human
guugaaaguaauaugaugcu

SEQ ID NO: 403024 - RNA, 22 nt, Human
ugucccucugaggcuucccugg

SEQ ID NO: 403025 - RNA, 22 nt, Human
uguccuuagggauauaaaauau

SEQ ID NO: 403026 - RNA, 22 nt, Human
auggcuuugaaguaauguaauu

SEQ ID NO: 403027 - RNA, 23 nt, Human
aaaguguagccagguuaagaacc

SEQ ID NO: 403028 - RNA, 22 nt, Human
gaagaauccuguccucuuuagg

SEQ ID NO: 403029 - RNA, 22 nt, Human
uaauagaauaguggaaacauug

SEQ ID NO: 403030 - RNA, 22 nt, Human
gcauaauauacaugcuugaucc

SEQ ID NO: 403031 - RNA, 22 nt, Human
cacaauuuguuuuaucaguauu

SEQ ID NO: 403032 - RNA, 22 nt, Human
uggggcucaccuaggcuggaag

SEQ ID NO: 403033 - RNA, 22 nt, Human
acauaaguuauggauaaaaugu

SEQ ID NO: 403034 - RNA, 22 nt, Human
agucaccagguuuuagagaccu

SEQ ID NO: 403035 - RNA, 22 nt, Human
cugagccagcuggcaugugcua

SEQ ID NO: 403036 - RNA, 22 nt, Human
uuucugcugugcuuucuugcgu

SEQ ID NO: 403037 - RNA, 22 nt, Human
agauaaugaaugccaugacauu

SEQ ID NO: 403038 - RNA, 22 nt, Human
ccagaucuaguguuguaaagcu

SEQ ID NO: 403039 - RNA, 22 nt, Human
aucagcaucuuuaacaauuacc

SEQ ID NO: 403040 - RNA, 22 nt, Human
aaauacuguugaaugaaguaag

SEQ ID NO: 403041 - RNA, 22 nt, Human
uucagaaaaaacuucaauaagu

SEQ ID NO: 403042 - RNA, 22 nt, Human
uauggcuuuuaacugucguaug

SEQ ID NO: 403043 - RNA, 22 nt, Human
ucuagacacuacuaguaaccgg

SEQ ID NO: 403044 - RNA, 22 nt, Human
aguuggagugaacaugagauug

SEQ ID NO: 403045 - RNA, 22 nt, Human
auuccaaagccugaauaaugga

SEQ ID NO: 403046 - RNA, 22 nt, Human
cuauaauuaugcucaaaaugua

SEQ ID NO: 403047 - RNA, 22 nt, Human
acauucuuaacaguuaaaaacu

SEQ ID NO: 403048 - RNA, 19 nt, Human
agcaaauacaucaaaauug

SEQ ID NO: 403049 - RNA, 22 nt, Human
uucacagaauugucuugacugg

SEQ ID NO: 403050 - RNA, 22 nt, Human
auucuucauaccuacugagguu

SEQ ID NO: 403051 - RNA, 22 nt, Human
uuaaauuagucaagcuucucug

SEQ ID NO: 403052 - RNA, 22 nt, Human
agaaacauccugcuuuccauuu

SEQ ID NO: 403053 - RNA, 22 nt, Human
uaucagaaaucaacacacagug

SEQ ID NO: 403054 - RNA, 22 nt, Human
auuuccagacuuuuuccaggaa

SEQ ID NO: 403055 - RNA, 22 nt, Human
uuucaaauagaaucuuuccaaa

SEQ ID NO: 403056 - RNA, 22 nt, Human
uuuauaaacaguaccacggugc

SEQ ID NO: 403057 - RNA, 22 nt, Human
ugucucugaggugagggucagc

SEQ ID NO: 403058 - RNA, 22 nt, Human
uugaaauacugcauuguucagu

SEQ ID NO: 403059 - RNA, 22 nt, Human
guauuugcaaaucuaaaagaga

SEQ ID NO: 403060 - RNA, 22 nt, Human
uaaauuauguuccauguccuuu

SEQ ID NO: 403061 - RNA, 22 nt, Human
aaaaguguucaggaagaauaau

SEQ ID NO: 403062 - RNA, 22 nt, Human
uuuauucaucaucuguucauau

SEQ ID NO: 403063 - RNA, 22 nt, Human
aagaaaucagaaaagcauucgu

SEQ ID NO: 403064 - RNA, 23 nt, Human
augaaugaauaaggcaggaaagc

SEQ ID NO: 403065 - RNA, 22 nt, Human
cucuucuugucucugguuagaa

SEQ ID NO: 403066 - RNA, 22 nt, Human
uaaacauggcuguuucaguuau

SEQ ID NO: 403067 - RNA, 22 nt, Human
aagauuauggcagauaacaauu

SEQ ID NO: 403068 - RNA, 22 nt, Human
uguguaaauggcaucucucagc

SEQ ID NO: 403069 - RNA, 22 nt, Human
aaaauuauagaucuagugccug

SEQ ID NO: 403070 - RNA, 22 nt, Human
uguuccaagcugcuggauaagc

SEQ ID NO: 403071 - RNA, 22 nt, Human
auacagaagccuguauuucugg

SEQ ID NO: 403072 - RNA, 22 nt, Human
uuacacaacaucuguauuauua

SEQ ID NO: 403073 - RNA, 22 nt, Human
uuugaaaguccuaggagagucc

SEQ ID NO: 403074 - RNA, 22 nt, Human
uucugugaaucuuuuuucccac

SEQ ID NO: 403075 - RNA, 22 nt, Human
uuauauuaguuagacuugcugu

SEQ ID NO: 403076 - RNA, 22 nt, Human
cuguggaauugaugcuuagugu

SEQ ID NO: 403077 - RNA, 22 nt, Human
ugucucugggugauucaguccu

SEQ ID NO: 403078 - RNA, 22 nt, Human
gugaauaagaccuaaggaugaa

SEQ ID NO: 403079 - RNA, 22 nt, Human
aauuuacaguugcugaugguac

SEQ ID NO: 403080 - RNA, 22 nt, Human
auacauaauuacuuccgauguu

SEQ ID NO: 403081 - RNA, 22 nt, Human
caaguccuaaauguauuuguug

SEQ ID NO: 403082 - RNA, 22 nt, Human
cagaauguagaucaucaucaag

SEQ ID NO: 403083 - RNA, 22 nt, Human
gaaggucaccuccccucucugg

SEQ ID NO: 403084 - RNA, 22 nt, Human
auauaugcauguguacuuaugu

SEQ ID NO: 403085 - RNA, 22 nt, Human
uguauuuuuagaccuuuagacc

SEQ ID NO: 403086 - RNA, 22 nt, Human
uacagaauuagauuauuagaga

SEQ ID NO: 403087 - RNA, 22 nt, Human
uaauuuuaugacaguguauuuu

SEQ ID NO: 403088 - RNA, 22 nt, Human
aauaacagagaaggguggcuuc

SEQ ID NO: 403089 - RNA, 22 nt, Human
uucuuauagaagcaaccauugu

SEQ ID NO: 403090 - RNA, 22 nt, Human
gucaacuuuaagaugaucuuuu

SEQ ID NO: 403091 - RNA, 22 nt, Human
acaaagaucuugcuuuccuacu

SEQ ID NO: 403092 - RNA, 22 nt, Human
auuuagccucauuuuugacaua

SEQ ID NO: 403093 - RNA, 22 nt, Human
uggcauuuagaaaacaacaugu

SEQ ID NO: 403094 - RNA, 22 nt, Human
uucauucuuauuugugaucugg

SEQ ID NO: 403095 - RNA, 22 nt, Human
ggccagaaguuggaaaagagcc

SEQ ID NO: 403096 - RNA, 22 nt, Human
agaggccagguccagaguuugu

SEQ ID NO: 403097 - RNA, 22 nt, Human
uauacagaaagaauucaagucu

SEQ ID NO: 403098 - RNA, 22 nt, Human
auagcuuuacagaagaguuuag

SEQ ID NO: 403099 - RNA, 22 nt, Human
aaggccagacaggaccacaucu

SEQ ID NO: 403100 - RNA, 22 nt, Human
uucaggaugaaagugugcaaca

SEQ ID NO: 403101 - RNA, 22 nt, Human
ucacugcugcugccaugaugga

SEQ ID NO: 403102 - RNA, 17 nt, Human
uccaugagacaugaaga

SEQ ID NO: 403103 - RNA, 22 nt, Human
uauauguaagcuauguaagagu

SEQ ID NO: 403104 - RNA, 22 nt, Human
cauauaauguuugaagaugugg

SEQ ID NO: 403105 - RNA, 21 nt, Human
agagacugucacugcaguacc

SEQ ID NO: 403106 - RNA, 22 nt, Human
cauuuacauuuaagguuaauau

SEQ ID NO: 403107 - RNA, 22 nt, Human
ucucaguguguuuucucucaga

SEQ ID NO: 403108 - RNA, 22 nt, Human
uguacaauguggccaguguuaa

SEQ ID NO: 403109 - RNA, 22 nt, Human
uuuacagagaauguacauaaag

SEQ ID NO: 403110 - RNA, 23 nt, Human
ccacuagcaccuguucaacuucu

SEQ ID NO: 403111 - RNA, 20 nt, Human
auccaugagagucuggauuc

SEQ ID NO: 403112 - RNA, 22 nt, Human
uuacagaaaagggguuguccuu

SEQ ID NO: 403113 - RNA, 22 nt, Human
gaaguccucaaugcauugucuu

SEQ ID NO: 403114 - RNA, 22 nt, Human
cuuaauuacccaaugugguagg

SEQ ID NO: 403115 - RNA, 22 nt, Human
aagcauuuauagauaagaauuu

SEQ ID NO: 403116 - RNA, 22 nt, Human
aaugucuugagaagagaaaucu

SEQ ID NO: 403117 - RNA, 22 nt, Human
uggcuuuauaaauccacugguu

SEQ ID NO: 403118 - RNA, 22 nt, Human
uacagacaguuuuucagauauu

SEQ ID NO: 403119 - RNA, 22 nt, Human
ucaguaaaugagcaaaaauuuc

SEQ ID NO: 403120 - RNA, 22 nt, Human
aaaggugacugcagcagcuauu

SEQ ID NO: 403121 - RNA, 22 nt, Human
uauuucaagaacuucuauccau

SEQ ID NO: 403122 - RNA, 22 nt, Human
ugcuuuaaauaugaauuagcau

SEQ ID NO: 403123 - RNA, 22 nt, Human
ucauuuguaccauuuuuuaaga

SEQ ID NO: 403124 - RNA, 21 nt, Human
uugaaaguaaauucagcagcu

SEQ ID NO: 403125 - RNA, 22 nt, Human
uuacagaaaauguguuuuaacu

SEQ ID NO: 403126 - RNA, 22 nt, Human
cagagggcacaugguuuccuca

SEQ ID NO: 403127 - RNA, 22 nt, Human
guuccaaagcaaaggaggugag

SEQ ID NO: 403128 - RNA, 21 nt, Human
aaugcauuaacauaaagcuga

SEQ ID NO: 403129 - RNA, 22 nt, Human
uaucagaaggcacauggagucu

SEQ ID NO: 403130 - RNA, 22 nt, Human
aaggcaguaggaucuuccacag

SEQ ID NO: 403131 - RNA, 20 nt, Human
uucuauacauaucacugaaa

SEQ ID NO: 403132 - RNA, 22 nt, Human
aaguccuuucucauggaggaau

SEQ ID NO: 403133 - RNA, 22 nt, Human
uaauacagaaguguauuaaaau

SEQ ID NO: 403134 - RNA, 22 nt, Human
auauaacauacauacagaaaag

SEQ ID NO: 403135 - RNA, 22 nt, Human
ucuacccagagcuaugaccuga

SEQ ID NO: 403136 - RNA, 22 nt, Human
aucaggaucagggcuagcagag

SEQ ID NO: 403137 - RNA, 22 nt, Human
agaaccucuggauacaguuuaa

SEQ ID NO: 403138 - RNA, 22 nt, Human
cuugcuucauuagugucuuagu

SEQ ID NO: 403139 - RNA, 22 nt, Human
gagaggucaucucccaucagca

SEQ ID NO: 403140 - RNA, 22 nt, Human
uucagcaagaccaccauguacc

SEQ ID NO: 403141 - RNA, 22 nt, Human
aagauggaguaguguaaugguu

SEQ ID NO: 403142 - RNA, 22 nt, Human
ucugucccugagagcucaggag

SEQ ID NO: 403143 - RNA, 22 nt, Human
aauuccagcuaggaaaagcuuc

SEQ ID NO: 403144 - RNA, 22 nt, Human
aagcauuugguucugaagacuc

SEQ ID NO: 403145 - RNA, 22 nt, Human
gaggccaaucaauagggcaaua

SEQ ID NO: 403146 - RNA, 22 nt, Human
uucaauucugcucugaucuuag

SEQ ID NO: 403147 - RNA, 21 nt, Human
gauugaaaccauggcagugag

SEQ ID NO: 403148 - RNA, 22 nt, Human
uuugcaguagacaucuuauuuu

SEQ ID NO: 403149 - RNA, 22 nt, Human
uaauuucacaguucaacgcaca

SEQ ID NO: 403150 - RNA, 22 nt, Human
uucaggauuguguuuuuccuga

SEQ ID NO: 403151 - RNA, 22 nt, Human
auucuucacaaauauauagaag

SEQ ID NO: 403152 - RNA, 22 nt, Human
cuuauauuuuaggaacagacaa

SEQ ID NO: 403153 - RNA, 23 nt, Human
agaugagccaacaccuccaugcc

SEQ ID NO: 403154 - RNA, 21 nt, Human
ucauuuauugagaaaugacug

SEQ ID NO: 403155 - RNA, 22 nt, Human
uuauuuauggcccucaccugau

SEQ ID NO: 403156 - RNA, 22 nt, Human
cugcagagcuuucugaaugaag

SEQ ID NO: 403157 - RNA, 22 nt, Human
aagacaauuugauacuaguugc

SEQ ID NO: 403158 - RNA, 22 nt, Human
ucaaaaguggccuguaaaaucu

SEQ ID NO: 403159 - RNA, 22 nt, Human
agucaauucuuuucaacucaag

SEQ ID NO: 403160 - RNA, 22 nt, Human
caugguuuugagccuauuaugc

SEQ ID NO: 403161 - RNA, 22 nt, Human
agauggagaaugacaauuaagg

SEQ ID NO: 403162 - RNA, 22 nt, Human
uucugggagagaaagggccuug

SEQ ID NO: 403163 - RNA, 22 nt, Human
ucaggaugaccacgagccucua

SEQ ID NO: 403164 - RNA, 22 nt, Human
cauuuacagcagacugaugaaa

SEQ ID NO: 403165 - RNA, 22 nt, Human
uuugcaaagaaauuauugcugu

SEQ ID NO: 403166 - RNA, 21 nt, Human
ucacuagugccuucugucauu

SEQ ID NO: 403167 - RNA, 22 nt, Human
gcucaggaaauaguuuaguguu

SEQ ID NO: 403168 - RNA, 22 nt, Human
guacagaaaugugaugacgcaa

SEQ ID NO: 403169 - RNA, 22 nt, Human
cucaggaugcaauuccaucaag

SEQ ID NO: 403170 - RNA, 22 nt, Human
gagucaccacugugauagucga

SEQ ID NO: 403171 - RNA, 22 nt, Human
cagaccagcucuaugaacccaa

SEQ ID NO: 403172 - RNA, 22 nt, Human
ugcaggaaugagguucucaguu

SEQ ID NO: 403173 - RNA, 22 nt, Human
uguauacaggcauaagagauac

SEQ ID NO: 403174 - RNA, 22 nt, Human
cuucagaggggacucaaaguca

SEQ ID NO: 403175 - RNA, 22 nt, Human
uuucaagaacaacauucauuca

SEQ ID NO: 403176 - RNA, 18 nt, Human
aacaguuuccagauucuc

SEQ ID NO: 403177 - RNA, 22 nt, Human
ugcuuuaaccaucuuguuugga

SEQ ID NO: 403178 - RNA, 22 nt, Human
uucaggauuauacucucuuccc

SEQ ID NO: 403179 - RNA, 22 nt, Human
ucuccucucuuaccugguacaa

SEQ ID NO: 403180 - RNA, 22 nt, Human
aguucacagaauggccagaacu

SEQ ID NO: 403181 - RNA, 22 nt, Human
uucaaacacagacagcagcaug

SEQ ID NO: 403182 - RNA, 22 nt, Human
caguccuuucaauggugaccuu

SEQ ID NO: 403183 - RNA, 22 nt, Human
gaaggccauugcguccugggau

SEQ ID NO: 403184 - RNA, 22 nt, Human
aguuucaguucugucauuuaua

SEQ ID NO: 403185 - RNA, 22 nt, Human
auaggcuuauauaaaaacaucu

SEQ ID NO: 403186 - RNA, 22 nt, Human
uaccaaaaccaagccauuaucu

SEQ ID NO: 403187 - RNA, 22 nt, Human
guucuaauuuggggcuccuuag

SEQ ID NO: 403188 - RNA, 22 nt, Human
gcuccucugucaaaugagagug

SEQ ID NO: 403189 - RNA, 22 nt, Human
cuugggaaugcuaacagaugac

SEQ ID NO: 403190 - RNA, 22 nt, Human
gaacuguaguuaauacuacaca

SEQ ID NO: 403191 - RNA, 22 nt, Human
uucagaauauuuguuuuacaug

SEQ ID NO: 403192 - RNA, 22 nt, Human
cauagaaaguauuauggaauuu

SEQ ID NO: 403193 - RNA, 22 nt, Human
auggcuuugcucaaguuuagcc

SEQ ID NO: 403194 - RNA, 22 nt, Human
uauaagaaacaaggcaaauuuu

SEQ ID NO: 403195 - RNA, 22 nt, Human
aaagcagguugcaauuacagug

SEQ ID NO: 403196 - RNA, 22 nt, Human
uuugcagugauucuugcaguga

SEQ ID NO: 403197 - RNA, 19 nt, Human
ugaggggcucacagucuca

SEQ ID NO: 403198 - RNA, 22 nt, Human
guuaaauucgaugauggauaaa

SEQ ID NO: 403199 - RNA, 22 nt, Human
aucaggauagucuguaaauugu

SEQ ID NO: 403200 - RNA, 22 nt, Human
auaacaugaccugugcuucaca

SEQ ID NO: 403201 - RNA, 22 nt, Human
auuaggcauauaugcuuuuaau

SEQ ID NO: 403202 - RNA, 22 nt, Human
auacaacuuuaucuguaaugag

SEQ ID NO: 403203 - RNA, 22 nt, Human
auuucaacauucucaguuguag

SEQ ID NO: 403204 - RNA, 22 nt, Human
uuuuauagcugaauaguauucc

SEQ ID NO: 403205 - RNA, 22 nt, Human
ucugggaauuuauuggcacuuu

SEQ ID NO: 403206 - RNA, 22 nt, Human
uuugcaaagugacuauuauaug

SEQ ID NO: 403207 - RNA, 22 nt, Human
ugucaaauuuuuauugcaguau

SEQ ID NO: 403208 - RNA, 22 nt, Human
gcagaauuggauaguugugaua

SEQ ID NO: 403209 - RNA, 20 nt, Human
caauuucaucauuuccugug

SEQ ID NO: 403210 - RNA, 22 nt, Human
uuuaggcagcagugaggaugaa

SEQ ID NO: 403211 - RNA, 20 nt, Human
caguccaaucagaggccacc

SEQ ID NO: 403212 - RNA, 22 nt, Human
gaccauuucuaggaaucagacu

SEQ ID NO: 403213 - RNA, 22 nt, Human
uagaauucauguuacuguuagc

SEQ ID NO: 403214 - RNA, 22 nt, Human
cuuaaagaguauuuaauauaau

SEQ ID NO: 403215 - RNA, 22 nt, Human
ucagugugaguaccaugcucag

SEQ ID NO: 403216 - RNA, 22 nt, Human
uaauuuaugaugcaaagaaaag

SEQ ID NO: 403217 - RNA, 22 nt, Human
acaacuuuucuaucauguggaa

SEQ ID NO: 403218 - RNA, 22 nt, Human
aaaggccaccaacaugaagcau

SEQ ID NO: 403219 - RNA, 22 nt, Human
aaaauuauggaguaucccaaag

SEQ ID NO: 403220 - RNA, 22 nt, Human
aaauuucaguuaccuuuacguu

SEQ ID NO: 403221 - RNA, 22 nt, Human
gagaagguggaccugaaggagc

SEQ ID NO: 403222 - RNA, 22 nt, Human
agaagucaaguggucuaugaaa

SEQ ID NO: 403223 - RNA, 22 nt, Human
cuugcacacauguacaugugua

SEQ ID NO: 403224 - RNA, 22 nt, Human
cauuaauauuguucuucuuuag

SEQ ID NO: 403225 - RNA, 22 nt, Human
ucaguuuccucaucuacaaaag

SEQ ID NO: 403226 - RNA, 22 nt, Human
aguguucauuuauucauucacu

SEQ ID NO: 403227 - RNA, 22 nt, Human
cauuuguauagugcuuagacca

SEQ ID NO: 403228 - RNA, 22 nt, Human
ucauuucucccggccaaaaacu

SEQ ID NO: 403229 - RNA, 22 nt, Human
caugcuuuuuucuaguauaaau

SEQ ID NO: 403230 - RNA, 22 nt, Human
auagaaauggcagcuggugcua

SEQ ID NO: 403231 - RNA, 22 nt, Human
uuugaaagcaggugugggaggg

SEQ ID NO: 403232 - RNA, 22 nt, Human
uuugaaagcaccauuugaguag

SEQ ID NO: 403233 - RNA, 22 nt, Human
ccaugagccaggcugaggaagc

SEQ ID NO: 403234 - RNA, 22 nt, Human
aguuacagugaccauuuauuua

SEQ ID NO: 403235 - RNA, 22 nt, Human
uggaaauguauuugggcaugcc

SEQ ID NO: 403236 - RNA, 22 nt, Human
uuagccauggacugaauugacu

SEQ ID NO: 403237 - RNA, 22 nt, Human
aagaaaucugauauuuguuuca

SEQ ID NO: 403238 - RNA, 22 nt, Human
gauggcuucacuuacauggcug

SEQ ID NO: 403239 - RNA, 22 nt, Human
caucagucuagauucuaguacc

SEQ ID NO: 403240 - RNA, 22 nt, Human
uacuagaaccucacaacaaucc

SEQ ID NO: 403241 - RNA, 22 nt, Human
aaucuguuuaguucugcguaug

SEQ ID NO: 403242 - RNA, 22 nt, Human
uaaaaugacuuccuccaacauc

SEQ ID NO: 403243 - RNA, 22 nt, Human
gucaggaugacaagugcuuuca

SEQ ID NO: 403244 - RNA, 22 nt, Human
uuccaugaaauguguuaugcuu

SEQ ID NO: 403245 - RNA, 22 nt, Human
uuuucaguaaugucuacauaau

SEQ ID NO: 403246 - RNA, 22 nt, Human
auauuucaugggguuccauacu

SEQ ID NO: 403247 - RNA, 22 nt, Human
uuccaugaaagugaaauggagc

SEQ ID NO: 403248 - RNA, 22 nt, Human
uacauaguauucacauuguuuu

SEQ ID NO: 403249 - RNA, 22 nt, Human
auacaacuuuacaugcaauucc

SEQ ID NO: 403250 - RNA, 22 nt, Human
uuacaagauuaauuauuggagu

SEQ ID NO: 403251 - RNA, 22 nt, Human
agacugaauaacaagcaaauaa

SEQ ID NO: 403252 - RNA, 22 nt, Human
ggauggcaggacaaggacccag

SEQ ID NO: 403253 - RNA, 22 nt, Human
auauacugaggagacuuuauau

SEQ ID NO: 403254 - RNA, 22 nt, Human
ugcagucuccaccuccugggug

SEQ ID NO: 403255 - RNA, 22 nt, Human
uuucaguuagcugagacccagg

SEQ ID NO: 403256 - RNA, 22 nt, Human
aacaugcuuugauaaauaaaag

SEQ ID NO: 403257 - RNA, 22 nt, Human
gauggcagcagcagccagggau

SEQ ID NO: 403258 - RNA, 22 nt, Human
uucugaaagccaauucauugaa

SEQ ID NO: 403259 - RNA, 22 nt, Human
agucaaaugaguaaauauauaa

SEQ ID NO: 403260 - RNA, 22 nt, Human
ccucaggaaccacauugcugcu

SEQ ID NO: 403261 - RNA, 22 nt, Human
aguguguccagaaaucuguauu

SEQ ID NO: 403262 - RNA, 22 nt, Human
caacauuucaaggucuuuagga

SEQ ID NO: 403263 - RNA, 22 nt, Human
gcacaauaauucuuguuuugcu

SEQ ID NO: 403264 - RNA, 22 nt, Human
aauaauuagugggacagagaac

SEQ ID NO: 403265 - RNA, 22 nt, Human
ugcuuauugcuuucaagacugu

SEQ ID NO: 403266 - RNA, 22 nt, Human
acagccaggaggaacucaguga

SEQ ID NO: 403267 - RNA, 22 nt, Human
caaauagugucacauugugagg

SEQ ID NO: 403268 - RNA, 18 nt, Human
uaaauauauuucccccuu

SEQ ID NO: 403269 - RNA, 22 nt, Human
uuuccaaaggaggaaccaguuu

SEQ ID NO: 403270 - RNA, 22 nt, Human
auuucccaugugaaucaauugg

SEQ ID NO: 403271 - RNA, 22 nt, Human
ccacagagcauuagauuucaga

SEQ ID NO: 403272 - RNA, 22 nt, Human
cauuucaauacuaucugagaau

SEQ ID NO: 403273 - RNA, 22 nt, Human
uaggcagaauuguugaaugaag

SEQ ID NO: 403274 - RNA, 22 nt, Human
gaaugaaagauuugcauucuau

SEQ ID NO: 403275 - RNA, 22 nt, Human
gauaaaauaacuauggaauacu

SEQ ID NO: 403276 - RNA, 22 nt, Human
ccuggaucuuuguuguaaauau

SEQ ID NO: 403277 - RNA, 22 nt, Human
ccaagaugaucuuuacaguguu

SEQ ID NO: 403278 - RNA, 22 nt, Human
auuuccaauuucauccaugucc

SEQ ID NO: 403279 - RNA, 22 nt, Human
cauuguuaccaucuuuuaccua

SEQ ID NO: 403280 - RNA, 22 nt, Human
aauguucauugauuaaaugaau

SEQ ID NO: 403281 - RNA, 22 nt, Human
uuuauuauguacaggcacuaua

SEQ ID NO: 403282 - RNA, 22 nt, Human
aucaggauucaccccagagcug

SEQ ID NO: 403283 - RNA, 22 nt, Human
uagaaaucagcaggcauaugua

SEQ ID NO: 403284 - RNA, 22 nt, Human
uuaauucuaguuuaacacuuag

SEQ ID NO: 403285 - RNA, 22 nt, Human
aaaugcuuauuagugucacaaa

SEQ ID NO: 403286 - RNA, 17 nt, Human
aggccagaugaggcaag

SEQ ID NO: 403287 - RNA, 22 nt, Human
auccaaacauguaccacacuaa

SEQ ID NO: 403288 - RNA, 22 nt, Human
gugauuuagauguugaaaguga

SEQ ID NO: 403289 - RNA, 22 nt, Human
aaacuuuggauugugauugugc

SEQ ID NO: 403290 - RNA, 22 nt, Human
aagcuggagaguuaggugaaua

SEQ ID NO: 403291 - RNA, 22 nt, Human
uacuuucuguccuucuguuaaa

SEQ ID NO: 403292 - RNA, 22 nt, Human
ucuuagcauuucauaacaacug

SEQ ID NO: 403293 - RNA, 22 nt, Human
uuaacacuaucugucauaauua

SEQ ID NO: 403294 - RNA, 22 nt, Human
ugaaagcacaaguucuaacagg

SEQ ID NO: 403295 - RNA, 22 nt, Human
uuuuuguagucauuagaagagg

SEQ ID NO: 403296 - RNA, 22 nt, Human
caauuucagguggauagguuuu

SEQ ID NO: 403297 - RNA, 22 nt, Human
gcaaacaagcugccugaagauu

SEQ ID NO: 403298 - RNA, 22 nt, Human
uuaugauuugccacagauuggu

SEQ ID NO: 403299 - RNA, 22 nt, Human
uuucuagucucgaucucuuaau

SEQ ID NO: 403300 - RNA, 22 nt, Human
uucuucuugaaacuuuagguug

SEQ ID NO: 403301 - RNA, 22 nt, Human
aaggccaacuaggaugagcuag

SEQ ID NO: 403302 - RNA, 19 nt, Human
auacagauguauccaugau

SEQ ID NO: 403303 - RNA, 22 nt, Human
aaagacauggaacuagagaugg

SEQ ID NO: 403304 - RNA, 22 nt, Human
ccauggcuuuugagucucaaga

SEQ ID NO: 403305 - RNA, 22 nt, Human
uggcauuugggcuggcuuuucu

SEQ ID NO: 403306 - RNA, 22 nt, Human
ucaguucaguauacacuauucu

SEQ ID NO: 403307 - RNA, 22 nt, Human
uucuuuugggaauuacguaugc

SEQ ID NO: 403308 - RNA, 17 nt, Human
acagagcacaucaagau

SEQ ID NO: 403309 - RNA, 23 nt, Human
cauuucaacgaauuuuccuucug

SEQ ID NO: 403310 - RNA, 22 nt, Human
uguacaaugccagggaacacca

SEQ ID NO: 403311 - RNA, 22 nt, Human
cacccagugaaggagcaagagg

SEQ ID NO: 403312 - RNA, 23 nt, Human
uuucuucagaagccuugcgaggc

SEQ ID NO: 403313 - RNA, 22 nt, Human
aaaucaguuggaacacaagcag

SEQ ID NO: 403314 - RNA, 22 nt, Human
uguucuucuagauugccuuuua

SEQ ID NO: 403315 - RNA, 22 nt, Human
aagaaugauuacaaagcaacga

SEQ ID NO: 403316 - RNA, 22 nt, Human
cuuucaacuacauacaggcgau

SEQ ID NO: 403317 - RNA, 18 nt, Human
ugaaacaagaauggugca

SEQ ID NO: 403318 - RNA, 22 nt, Human
ugauaauauuuugaaucauaag

SEQ ID NO: 403319 - RNA, 22 nt, Human
aauuaaaugacaggggaagaug

SEQ ID NO: 403320 - RNA, 22 nt, Human
uuuaggcaaauuucagaugugc

SEQ ID NO: 403321 - RNA, 22 nt, Human
agucaccaacaugguucccagg

SEQ ID NO: 403322 - RNA, 22 nt, Human
uggaagggagugacagucagag

SEQ ID NO: 403323 - RNA, 16 nt, Human
gcaacuuugggguuga

SEQ ID NO: 403324 - RNA, 19 nt, Human
uacauacuuauucuaaaag

SEQ ID NO: 403325 - RNA, 22 nt, Human
auuguuaugaaaauaagauguu

SEQ ID NO: 403326 - RNA, 22 nt, Human
uaagaacuucggacauguuauc

SEQ ID NO: 403327 - RNA, 22 nt, Human
gaccuggaggauccucuucuug

SEQ ID NO: 403328 - RNA, 22 nt, Human
aggauuuagcaugaaaugugaa

SEQ ID NO: 403329 - RNA, 22 nt, Human
ucacacagguuugcaaugauuu

SEQ ID NO: 403330 - RNA, 22 nt, Human
auuuugaugcuaucuaaugaau

SEQ ID NO: 403331 - RNA, 22 nt, Human
uuucaguuacugcuauaucauu

SEQ ID NO: 403332 - RNA, 22 nt, Human
auaaagauuucuuuuucucuac

SEQ ID NO: 403333 - RNA, 22 nt, Human
ccaaagcaagucacaugaucaa

SEQ ID NO: 403334 - RNA, 22 nt, Human
aauuuauauguaauuaggcaca

SEQ ID NO: 403335 - RNA, 23 nt, Human
cagaaaucugaaaucuagaaaug

SEQ ID NO: 403336 - RNA, 22 nt, Human
ucaggaugguccuuuaugagaa

SEQ ID NO: 403337 - RNA, 22 nt, Human
aauaauuuuagcucagaguugu

SEQ ID NO: 403338 - RNA, 22 nt, Human
aagcgccaugguuccugcgcag

SEQ ID NO: 403339 - RNA, 22 nt, Human
uuucaacuugaagaauugauac

SEQ ID NO: 403340 - RNA, 22 nt, Human
uuuaaaauuuagaccucuccac

SEQ ID NO: 403341 - RNA, 22 nt, Human
uagucaccuguugugugaugcc

SEQ ID NO: 403342 - RNA, 22 nt, Human
acuucaugcagaagagagcugu

SEQ ID NO: 403343 - RNA, 22 nt, Human
auucacaaaaugauauagauac

SEQ ID NO: 403344 - RNA, 22 nt, Human
uuucacauuuaggcgugaauug

SEQ ID NO: 403345 - RNA, 22 nt, Human
ucaauaaauagcuuggcucagc

SEQ ID NO: 403346 - RNA, 22 nt, Human
gcucaggaucagccaccucuuu

SEQ ID NO: 403347 - RNA, 22 nt, Human
ugaaagggguugaguuacagcu

SEQ ID NO: 403348 - RNA, 22 nt, Human
uuucaacauauaccauaaugcc

SEQ ID NO: 403349 - RNA, 22 nt, Human
uggcuuaagauuuaugcuuuua

SEQ ID NO: 403350 - RNA, 22 nt, Human
gaauuucacaaggugaggauaa

SEQ ID NO: 403351 - RNA, 22 nt, Human
ucaauaauggcaggauaaauuu

SEQ ID NO: 403352 - RNA, 22 nt, Human
uuauacuaaaacgcauugaauu

SEQ ID NO: 403353 - RNA, 22 nt, Human
acacaaugcauauuuuuccaga

SEQ ID NO: 403354 - RNA, 22 nt, Human
cuuaauuuuuguaguagaugga

SEQ ID NO: 403355 - RNA, 22 nt, Human
aggccagacagcuagaaacagg

SEQ ID NO: 403356 - RNA, 22 nt, Human
aaagucauacauggugcuuacu

SEQ ID NO: 403357 - RNA, 22 nt, Human
uucuacaauaugaauaaugaag

SEQ ID NO: 403358 - RNA, 22 nt, Human
aaaggcaggcuuucacaucuca

SEQ ID NO: 403359 - RNA, 19 nt, Human
ugaaauggcaguugcuaaa

SEQ ID NO: 403360 - RNA, 18 nt, Human
uauaaacacacuuagguu

SEQ ID NO: 403361 - RNA, 22 nt, Human
uaugcccagcuuaaaguacaca

SEQ ID NO: 403362 - RNA, 22 nt, Human
ugcugugagguugagaaggaag

SEQ ID NO: 403363 - RNA, 22 nt, Human
cacauuuagagguuagcauggu

SEQ ID NO: 403364 - RNA, 22 nt, Human
gaaggccaguuuugagauaggu

SEQ ID NO: 403365 - RNA, 22 nt, Human
aucaggauggguuuggcuuagg

SEQ ID NO: 403366 - RNA, 23 nt, Human
aaauuauugcucuucaauugccu

SEQ ID NO: 403367 - RNA, 22 nt, Human
uaauuauuugaagacauuagag

SEQ ID NO: 403368 - RNA, 22 nt, Human
gaagcacauggcuauagcuauu

SEQ ID NO: 403369 - RNA, 19 nt, Human
uuugcagugguuccuuugu

SEQ ID NO: 403370 - RNA, 19 nt, Human
gaaagucauagagcuuguc

SEQ ID NO: 403371 - RNA, 22 nt, Human
uuugaagauuaugccagaguga

SEQ ID NO: 403372 - RNA, 22 nt, Human
caguccuugcucugggaugaug

SEQ ID NO: 403373 - RNA, 22 nt, Human
augguuuacugaucuuuuuggu

SEQ ID NO: 403374 - RNA, 22 nt, Human
aucugccuccaaguccaugugu

SEQ ID NO: 403375 - RNA, 22 nt, Human
ugcuuauuuauagucaauagag

SEQ ID NO: 403376 - RNA, 22 nt, Human
aagcaauagcaacaacuuuaca

SEQ ID NO: 403377 - RNA, 22 nt, Human
aucuuucaaucaggaaaaaucu

SEQ ID NO: 403378 - RNA, 22 nt, Human
caaggccacuccagagacuggu

SEQ ID NO: 403379 - RNA, 22 nt, Human
gagucaccuugggucagcgaua

SEQ ID NO: 403380 - RNA, 22 nt, Human
acagaacugggggcacagauag

SEQ ID NO: 403381 - RNA, 22 nt, Human
cagcuucugcuaucgaacaucu

SEQ ID NO: 403382 - RNA, 23 nt, Human
ucguugaauagcaauagcacaac

SEQ ID NO: 403383 - RNA, 22 nt, Human
uacuaaauaguuuaauuccuca

SEQ ID NO: 403384 - RNA, 22 nt, Human
caaacauucaaguacaagucuu

SEQ ID NO: 403385 - RNA, 22 nt, Human
caagaaucuugcagcuuagacu

SEQ ID NO: 403386 - RNA, 22 nt, Human
acaugucuuuuaaagucuaaua

SEQ ID NO: 403387 - RNA, 20 nt, Human
uuuuccagaaaguaucauug

SEQ ID NO: 403388 - RNA, 21 nt, Human
uucuucuuggacuguuuuggc

SEQ ID NO: 403389 - RNA, 22 nt, Human
auuccaaaggcuggccuggagg

SEQ ID NO: 403390 - RNA, 22 nt, Human
cagagaaaaaauccugcucuca

SEQ ID NO: 403391 - RNA, 22 nt, Human
ggcgcacaaugugcagguuugu

SEQ ID NO: 403392 - RNA, 22 nt, Human
uaaagccaacacuuuacugcuc

SEQ ID NO: 403393 - RNA, 22 nt, Human
uaagcugugggagauuggcaua

SEQ ID NO: 403394 - RNA, 22 nt, Human
aaagucauugcuguuaucaaug

SEQ ID NO: 403395 - RNA, 22 nt, Human
aauuauccuuaaugcaguaagc

SEQ ID NO: 403396 - RNA, 21 nt, Human
gcugcaucaaucuacccaggg

SEQ ID NO: 403397 - RNA, 22 nt, Human
auugaaagcacaaagaacaagu

SEQ ID NO: 403398 - RNA, 22 nt, Human
acagaauuaucaggaaauguua

SEQ ID NO: 403399 - RNA, 22 nt, Human
guucuucagucacaucacagaa

SEQ ID NO: 403400 - RNA, 22 nt, Human
ucucccaggcugcccuguggac

SEQ ID NO: 403401 - RNA, 22 nt, Human
uggcaucucaaacaggcagauu

SEQ ID NO: 403402 - RNA, 22 nt, Human
aagauuauuuaagacaggaacc

SEQ ID NO: 403403 - RNA, 19 nt, Human
aaucagaaauaucgaggcc

SEQ ID NO: 403404 - RNA, 22 nt, Human
uuacagaaugugccauuugguc

SEQ ID NO: 403405 - RNA, 22 nt, Human
ggauggcauguugggcucuguu

SEQ ID NO: 403406 - RNA, 22 nt, Human
uuuguuaauucuuauguuagag

SEQ ID NO: 403407 - RNA, 22 nt, Human
caaaacugucuagagagagaag

SEQ ID NO: 403408 - RNA, 22 nt, Human
uaguuuuacuugcgaugauaau

SEQ ID NO: 403409 - RNA, 22 nt, Human
gucaggauuauaauccccaugg

SEQ ID NO: 403410 - RNA, 22 nt, Human
augugcuuguaauguuaaaugu

SEQ ID NO: 403411 - RNA, 22 nt, Human
gugguaauuuaauccuacacug

SEQ ID NO: 403412 - RNA, 22 nt, Human
caauauauaaugaguacuuucc

SEQ ID NO: 403413 - RNA, 21 nt, Human
agaagucaauugaacugaaau

SEQ ID NO: 403414 - RNA, 21 nt, Human
ugaaagaaggugcagucugaa

SEQ ID NO: 403415 - RNA, 22 nt, Human
gcuggaucccugugggaguggu

SEQ ID NO: 403416 - RNA, 22 nt, Human
uuuuccaaaguaccaugucccu

SEQ ID NO: 403417 - RNA, 22 nt, Human
uaucagaagacuuacaguaucg

SEQ ID NO: 403418 - RNA, 22 nt, Human
uuugacauggaauaacucauuu

SEQ ID NO: 403419 - RNA, 22 nt, Human
uuggcuucuucgcacagcagua

SEQ ID NO: 403420 - RNA, 22 nt, Human
uuuggacuuagccugcagaauu

SEQ ID NO: 403421 - RNA, 22 nt, Human
aaaggcaugauuaauucugugu

SEQ ID NO: 403422 - RNA, 22 nt, Human
aucuacccacugaacacaauau

SEQ ID NO: 403423 - RNA, 22 nt, Human
gugaauaauuuuuuaguauaag

SEQ ID NO: 403424 - RNA, 22 nt, Human
auuaaagacagcagauggaugg

SEQ ID NO: 403425 - RNA, 22 nt, Human
agaagucaauaguuguuugaug

SEQ ID NO: 403426 - RNA, 22 nt, Human
ugaaacauuugaugaucuuugg

SEQ ID NO: 403427 - RNA, 22 nt, Human
ugaaauaggaaacagauguuuc

SEQ ID NO: 403428 - RNA, 22 nt, Human
uggcuucuugggaugggucauu

SEQ ID NO: 403429 - RNA, 22 nt, Human
aauacaguagguaauaguucau

SEQ ID NO: 403430 - RNA, 22 nt, Human
augaaauaucuugaagaaauuc

SEQ ID NO: 403431 - RNA, 22 nt, Human
ccugccugcaccuucucugggg

SEQ ID NO: 403432 - RNA, 22 nt, Human
ugcacaaacuugugucccaggg

SEQ ID NO: 403433 - RNA, 22 nt, Human
auugaaagcauggauuuggauu

SEQ ID NO: 403434 - RNA, 22 nt, Human
auggcuuaugaauaacaguagg

SEQ ID NO: 403435 - RNA, 22 nt, Human
uugcagcuuagugauguuaucu

SEQ ID NO: 403436 - RNA, 22 nt, Human
uuugaaguggaaaaggauuuaa

SEQ ID NO: 403437 - RNA, 22 nt, Human
uuauagaaggagcauucacuua

SEQ ID NO: 403438 - RNA, 23 nt, Human
cauaaaauauuaguaugguagca

SEQ ID NO: 403439 - RNA, 23 nt, Human
uuuuccagaaucgacucuguaga

SEQ ID NO: 403440 - RNA, 22 nt, Human
ucuucauuccguagauauuuau

SEQ ID NO: 403441 - RNA, 22 nt, Human
uuuaggcagaacauggacuuug

SEQ ID NO: 403442 - RNA, 22 nt, Human
uauauaacuacuauuuugcuca

SEQ ID NO: 403443 - RNA, 22 nt, Human
caagaaucaacauuauuuagug

SEQ ID NO: 403444 - RNA, 22 nt, Human
acaacuuuguagcaauuccacg

SEQ ID NO: 403445 - RNA, 22 nt, Human
gauagaaagaauauagauucca

SEQ ID NO: 403446 - RNA, 22 nt, Human
cucacuguuuaauagcuggauc

SEQ ID NO: 403447 - RNA, 22 nt, Human
aaaggagacuucagaucuccuu

SEQ ID NO: 403448 - RNA, 22 nt, Human
uaaagacaugguguaggugaac

SEQ ID NO: 403449 - RNA, 22 nt, Human
aucagaaauugcuaccagugga

SEQ ID NO: 403450 - RNA, 22 nt, Human
caucagaacgugagcuccuugu

SEQ ID NO: 403451 - RNA, 22 nt, Human
auggcuuuccugggacaugggc

SEQ ID NO: 403452 - RNA, 22 nt, Human
agucaauuaucucuaggucauc

SEQ ID NO: 403453 - RNA, 22 nt, Human
aaagaaggaugggagaaauccu

SEQ ID NO: 403454 - RNA, 22 nt, Human
cacaaugugguuugucaucuuu

SEQ ID NO: 403455 - RNA, 22 nt, Human
uuuguaaaggccugaauuucag

SEQ ID NO: 403456 - RNA, 22 nt, Human
acacagauuuuacauguuaugc

SEQ ID NO: 403457 - RNA, 22 nt, Human
gcguuaauaacauuaauaaugc

SEQ ID NO: 403458 - RNA, 22 nt, Human
auucuucagaauaucuggcacu

SEQ ID NO: 403459 - RNA, 22 nt, Human
uuaacacuugaacucuacaugu

SEQ ID NO: 403460 - RNA, 21 nt, Human
cuguggaagggaacuagaggg

SEQ ID NO: 403461 - RNA, 22 nt, Human
uuucaacuagccccuaaguccu

SEQ ID NO: 403462 - RNA, 22 nt, Human
uacuaucucuucuaacuucaga

SEQ ID NO: 403463 - RNA, 22 nt, Human
uugauacaggcucuauuucauc

SEQ ID NO: 403464 - RNA, 22 nt, Human
aaaacugaaauacgauccaaug

SEQ ID NO: 403465 - RNA, 22 nt, Human
caucagaauguuauggggggcu

SEQ ID NO: 403466 - RNA, 22 nt, Human
aagacagugacagucacaauug

SEQ ID NO: 403467 - RNA, 22 nt, Human
ugacccauggucugaucauagg

SEQ ID NO: 403468 - RNA, 22 nt, Human
caguccuugauccaauaguggg

SEQ ID NO: 403469 - RNA, 21 nt, Human
auagaacaccaggcauauaua

SEQ ID NO: 403470 - RNA, 22 nt, Human
aggauuuaucaggaacucucuu

SEQ ID NO: 403471 - RNA, 22 nt, Human
ucauuuuucacacagggucacc

SEQ ID NO: 403472 - RNA, 22 nt, Human
aucugccugcaguggagguggg

SEQ ID NO: 403473 - RNA, 17 nt, Human
aaucagauuucugagga

SEQ ID NO: 403474 - RNA, 22 nt, Human
uuaaauauuauguugucugcaa

SEQ ID NO: 403475 - RNA, 22 nt, Human
auggcuuuucacagaggguucu

SEQ ID NO: 403476 - RNA, 22 nt, Human
uucaacacaggaacaugauaua

SEQ ID NO: 403477 - RNA, 22 nt, Human
gugcauuuaggucacaugaugu

SEQ ID NO: 403478 - RNA, 22 nt, Human
uucaacucuucaagaucacauc

SEQ ID NO: 403479 - RNA, 22 nt, Human
cagauuucuauuucaaauacau

SEQ ID NO: 403480 - RNA, 22 nt, Human
uuuaauacuauggggaugaaca

SEQ ID NO: 403481 - RNA, 22 nt, Human
augaacaaguauuugcaugagc

SEQ ID NO: 403482 - RNA, 22 nt, Human
uuccaagaguaaauucaaauug

SEQ ID NO: 403483 - RNA, 22 nt, Human
auccaaaggugacacagaauac

SEQ ID NO: 403484 - RNA, 22 nt, Human
auggcauuauagcaaugguuug

SEQ ID NO: 403485 - RNA, 19 nt, Human
gaaguccucuaguaaauuu

SEQ ID NO: 403486 - RNA, 22 nt, Human
aaguggacuaauacaaggacua

SEQ ID NO: 403487 - RNA, 22 nt, Human
auauaauuguucugaaguguuu

SEQ ID NO: 403488 - RNA, 22 nt, Human
aaauccuuuucuauacagcaua

SEQ ID NO: 403489 - RNA, 19 nt, Human
cuauacagccucugaggaa

SEQ ID NO: 403490 - RNA, 22 nt, Human
uuaggaaaggguuuucuaacag

SEQ ID NO: 403491 - RNA, 21 nt, Human
caaguccuuugccaaagugcu

SEQ ID NO: 403492 - RNA, 22 nt, Human
aguuuucacacucaccaaaagg

SEQ ID NO: 403493 - RNA, 22 nt, Human
caucagaauuacuuggggagcu

SEQ ID NO: 403494 - RNA, 22 nt, Human
uguuuuaaucucccauugcucu

SEQ ID NO: 403495 - RNA, 22 nt, Human
ucuuaaagagcgcaauuugagg

SEQ ID NO: 403496 - RNA, 22 nt, Human
uauuuucuggacagucuugcuu

SEQ ID NO: 403497 - RNA, 22 nt, Human
aaauugcagaugcuaaaugacu

SEQ ID NO: 403498 - RNA, 22 nt, Human
acuuugaaacuaaaauucauua

SEQ ID NO: 403499 - RNA, 22 nt, Human
uccaugagcuagggauucauca

SEQ ID NO: 403500 - RNA, 22 nt, Human
uaaaaugcacagcaguugaaag

SEQ ID NO: 403501 - RNA, 22 nt, Human
uagaugcuacaauuuuguacuc

SEQ ID NO: 403502 - RNA, 22 nt, Human
uugauguacagaauuguucaca

SEQ ID NO: 403503 - RNA, 23 nt, Human
uggaauaauaagguacauuaaca

SEQ ID NO: 403504 - RNA, 22 nt, Human
auuucauagauuguaaaucccu

SEQ ID NO: 403505 - RNA, 22 nt, Human
augaaaauugacagcggaagua

SEQ ID NO: 403506 - RNA, 22 nt, Human
uggggcuccuccuggcaggagg

SEQ ID NO: 403507 - RNA, 22 nt, Human
uccaugaggaccaaauucguag

SEQ ID NO: 403508 - RNA, 22 nt, Human
cauuuguaggaugcuucuuguu

SEQ ID NO: 403509 - RNA, 21 nt, Human
ucacaucuauguuaagcaaac

SEQ ID NO: 403510 - RNA, 22 nt, Human
gaugccucuuuuggcugaauua

SEQ ID NO: 403511 - RNA, 22 nt, Human
uggauuuaguucuucacaggcc

SEQ ID NO: 403512 - RNA, 22 nt, Human
cucaggauggaagccuacagga

SEQ ID NO: 403513 - RNA, 22 nt, Human
aauaagauccugaagauauguu

SEQ ID NO: 403514 - RNA, 22 nt, Human
acaccauacucauguugguucc

SEQ ID NO: 403515 - RNA, 22 nt, Human
aauuucaauuacuuuugcacca

SEQ ID NO: 403516 - RNA, 22 nt, Human
aaaaccugauugaauucuauuu

SEQ ID NO: 403517 - RNA, 22 nt, Human
uauggcuugucuuuauaccagg

SEQ ID NO: 403518 - RNA, 22 nt, Human
ucagccaggccaccuucagcuu

SEQ ID NO: 403519 - RNA, 19 nt, Human
ugcugaaguugucagucug

SEQ ID NO: 403520 - RNA, 22 nt, Human
ucagagagccucaggcacugcc

SEQ ID NO: 403521 - RNA, 22 nt, Human
ugcaggaacuugguuuuacuca

SEQ ID NO: 403522 - RNA, 22 nt, Human
ucuuuccauggccacacagucu

SEQ ID NO: 403523 - RNA, 22 nt, Human
uucucuuugacauuauucaggu

SEQ ID NO: 403524 - RNA, 22 nt, Human
caggaaacauaugugcuugagg

SEQ ID NO: 403525 - RNA, 22 nt, Human
gcaucuaaauaaacgugggagu

SEQ ID NO: 403526 - RNA, 22 nt, Human
uguauuaacauuaauaaaaugg

SEQ ID NO: 403527 - RNA, 18 nt, Human
caagaaucucuaaagaag

SEQ ID NO: 403528 - RNA, 22 nt, Human
uuucuuguaagauguuuauuaa

SEQ ID NO: 403529 - RNA, 22 nt, Human
cuuaaauucuuaaugcccucau

SEQ ID NO: 403530 - RNA, 22 nt, Human
ccagaagaccccguccaccucc

SEQ ID NO: 403531 - RNA, 22 nt, Human
ucauuucccuccuacaaagagg

SEQ ID NO: 403532 - RNA, 22 nt, Human
uguugagacugagggagucagc

SEQ ID NO: 403533 - RNA, 22 nt, Human
auacaucaugcuccauauauuu

SEQ ID NO: 403534 - RNA, 20 nt, Human
gaaguccuuucacucuuccc

SEQ ID NO: 403535 - RNA, 22 nt, Human
uaaucuaccacuauugcaauau

SEQ ID NO: 403536 - RNA, 22 nt, Human
cauuuucagcacccaucugaaa

SEQ ID NO: 403537 - RNA, 22 nt, Human
aaaaccuucagguuuggaguuu

SEQ ID NO: 403538 - RNA, 22 nt, Human
uacaucauaauaauacuuagaa

SEQ ID NO: 403539 - RNA, 22 nt, Human
gucuucaauagagccucaauuu

SEQ ID NO: 403540 - RNA, 22 nt, Human
gguacaaugucuuacagaccca

SEQ ID NO: 403541 - RNA, 22 nt, Human
ugcuauacauguacauauuagu

SEQ ID NO: 403542 - RNA, 22 nt, Human
acagaaauugggcaaauggaag

SEQ ID NO: 403543 - RNA, 22 nt, Human
gugaauaaagggaguuuucaaa

SEQ ID NO: 403544 - RNA, 22 nt, Human
ucaucugucccaggcuuuuuuc

SEQ ID NO: 403545 - RNA, 22 nt, Human
guuccaaacaagucauaaagua

SEQ ID NO: 403546 - RNA, 22 nt, Human
acaucucaugaaugauaaauca

SEQ ID NO: 403547 - RNA, 22 nt, Human
auguuucauuuagauaucaggc

SEQ ID NO: 403548 - RNA, 20 nt, Human
cuucuucagccuaugcuuca

SEQ ID NO: 403549 - RNA, 22 nt, Human
cagaucuguaguaaaagaucuc

SEQ ID NO: 403550 - RNA, 22 nt, Human
uagaauucaagauucaacaggc

SEQ ID NO: 403551 - RNA, 22 nt, Human
uugaucaucuaagaguaauagu

SEQ ID NO: 403552 - RNA, 22 nt, Human
aaaguucaugguguuauagaaa

SEQ ID NO: 403553 - RNA, 22 nt, Human
cuucuucagcacaauauugaug

SEQ ID NO: 403554 - RNA, 22 nt, Human
aaaaggcauggagguugauagu

SEQ ID NO: 403555 - RNA, 22 nt, Human
ucagaauucagagggagugggg

SEQ ID NO: 403556 - RNA, 22 nt, Human
auucuucauacagacaaguccu

SEQ ID NO: 403557 - RNA, 22 nt, Human
acaaauauuuacugaauccacu

SEQ ID NO: 403558 - RNA, 22 nt, Human
ucacuucacacccacuaucaug

SEQ ID NO: 403559 - RNA, 22 nt, Human
aguacaauuuaaugaagauagc

SEQ ID NO: 403560 - RNA, 23 nt, Human
acagacaacacugaugagagaaa

SEQ ID NO: 403561 - RNA, 22 nt, Human
uucaggauucucucccauuuac

SEQ ID NO: 403562 - RNA, 22 nt, Human
caaugucaugauuuuccauuag

SEQ ID NO: 403563 - RNA, 22 nt, Human
uucugaaaauugggucauacuu

SEQ ID NO: 403564 - RNA, 22 nt, Human
cucaggauagauuguccucuca

SEQ ID NO: 403565 - RNA, 22 nt, Human
ugguuuaauuuccauuuccuug

SEQ ID NO: 403566 - RNA, 22 nt, Human
aggcacaguuucauccccgggc

SEQ ID NO: 403567 - RNA, 22 nt, Human
gcaguucuacuuauccauagac

SEQ ID NO: 403568 - RNA, 22 nt, Human
aaauacagaguugcuuaaaagc

SEQ ID NO: 403569 - RNA, 22 nt, Human
caguuucuacgaaggucaaccc

SEQ ID NO: 403570 - RNA, 22 nt, Human
auuuccaagaaagcuuuaggau

SEQ ID NO: 403571 - RNA, 22 nt, Human
agaaaauauucauugagaggcu

SEQ ID NO: 403572 - RNA, 22 nt, Human
uuuucagaggccuaagagguuu

SEQ ID NO: 403573 - RNA, 22 nt, Human
caauuucacuaauaauauuuac

SEQ ID NO: 403574 - RNA, 21 nt, Human
uuucagaccuaucuuugaagg

SEQ ID NO: 403575 - RNA, 22 nt, Human
auuaggcagggcaugguggcuc

SEQ ID NO: 403576 - RNA, 22 nt, Human
aggauuuaaauccuuaaccacu

SEQ ID NO: 403577 - RNA, 22 nt, Human
agaaaucaugucuuauuucuau

SEQ ID NO: 403578 - RNA, 20 nt, Human
uuucugugcccaggucuguu

SEQ ID NO: 403579 - RNA, 22 nt, Human
ugaaugaauccuaacaaagaca

SEQ ID NO: 403580 - RNA, 22 nt, Human
auuaugcugguuuacacauuuu

SEQ ID NO: 403581 - RNA, 22 nt, Human
ucuggaucaccacuucugccuc

SEQ ID NO: 403582 - RNA, 20 nt, Human
gcccaagguccagaaggggg

SEQ ID NO: 403583 - RNA, 22 nt, Human
uuacagauggaucuagcaaaau

SEQ ID NO: 403584 - RNA, 22 nt, Human
augguuuugaagggaggucaaa

SEQ ID NO: 403585 - RNA, 22 nt, Human
uguccucuuccagugcuccuuc

SEQ ID NO: 403586 - RNA, 22 nt, Human
cuaaucaucuuucucuuaaagc

SEQ ID NO: 403587 - RNA, 22 nt, Human
uacuuccuguuuccaugucugu

SEQ ID NO: 403588 - RNA, 22 nt, Human
cauacuuugggauaagagugga

SEQ ID NO: 403589 - RNA, 22 nt, Human
gcagaauugauggagaacuuaa

SEQ ID NO: 403590 - RNA, 22 nt, Human
auucuucacuguuucagaauga

SEQ ID NO: 403591 - RNA, 22 nt, Human
gaagaaucaagcaguaauuugu

SEQ ID NO: 403592 - RNA, 22 nt, Human
ccguagcacaugcuccuggggc

SEQ ID NO: 403593 - RNA, 22 nt, Human
aacacuuucuauuauuaugguu

SEQ ID NO: 403594 - RNA, 20 nt, Human
agaggccaguuaggagucua

SEQ ID NO: 403595 - RNA, 22 nt, Human
guguugaugacauuuuagaaac

SEQ ID NO: 403596 - RNA, 21 nt, Human
aucacauuggcuguuauuauu

SEQ ID NO: 403597 - RNA, 22 nt, Human
auucuuaaauuuaggucuguga

SEQ ID NO: 403598 - RNA, 22 nt, Human
uuccaaagugcuggaauuacau

SEQ ID NO: 403599 - RNA, 22 nt, Human
uguacauagaucuugaaaauua

SEQ ID NO: 403600 - RNA, 23 nt, Human
aggcccaacucugugagggcugc

SEQ ID NO: 403601 - RNA, 22 nt, Human
gucuucuuuaaccuacuaaagc

SEQ ID NO: 403602 - RNA, 22 nt, Human
auacagaaguuuuccacuuauu

SEQ ID NO: 403603 - RNA, 22 nt, Human
uucaguaaaacacugcaauguc

SEQ ID NO: 403604 - RNA, 22 nt, Human
ugaaucauggauaaauagcuua

SEQ ID NO: 403605 - RNA, 22 nt, Human
uucacauaaugauacaaagcuu

SEQ ID NO: 403606 - RNA, 22 nt, Human
cuggauuuuagaaggcuuccua

SEQ ID NO: 403607 - RNA, 22 nt, Human
agaggagugggaagcagugcaa

SEQ ID NO: 403608 - RNA, 22 nt, Human
agguacaaaagaguauaugaga

SEQ ID NO: 403609 - RNA, 22 nt, Human
ccaaaugugccuguuucaacaa

SEQ ID NO: 403610 - RNA, 21 nt, Human
ugaucauuuguguaaaggaga

SEQ ID NO: 403611 - RNA, 22 nt, Human
cuacagaaaaucagccacaggc

SEQ ID NO: 403612 - RNA, 22 nt, Human
aaucagaaauugagggucuggu

SEQ ID NO: 403613 - RNA, 22 nt, Human
guugaaugaaucauucuaugua

SEQ ID NO: 403614 - RNA, 22 nt, Human
accauuuuggguauuuucagag

SEQ ID NO: 403615 - RNA, 22 nt, Human
cuuaauuuaaaauaguucaggc

SEQ ID NO: 403616 - RNA, 22 nt, Human
auuaggcacuagaaugucaauu

SEQ ID NO: 403617 - RNA, 22 nt, Human
uggcauuugcucccuuguguuc

SEQ ID NO: 403618 - RNA, 22 nt, Human
acaauacaggcuucuggacuua

SEQ ID NO: 403619 - RNA, 22 nt, Human
ggcauuuagauugaauuucugu

SEQ ID NO: 403620 - RNA, 22 nt, Human
ggauggagguucucagaugcuc

SEQ ID NO: 403621 - RNA, 22 nt, Human
ccucaggaaaugaauaaauggc

SEQ ID NO: 403622 - RNA, 22 nt, Human
aaauauagugacacuuauaguc

SEQ ID NO: 403623 - RNA, 22 nt, Human
uuccuuagugccucuuccgcug

SEQ ID NO: 403624 - RNA, 22 nt, Human
uuauaacaucaaucagaguuaa

SEQ ID NO: 403625 - RNA, 22 nt, Human
uuucuagugguuaagauuuaca

SEQ ID NO: 403626 - RNA, 22 nt, Human
guuccaaauuuggaucuuuagg

SEQ ID NO: 403627 - RNA, 22 nt, Human
uuauaacaacaguuuacuuuaa

SEQ ID NO: 403628 - RNA, 22 nt, Human
uggcauuucaguauuuucauaa

SEQ ID NO: 403629 - RNA, 22 nt, Human
caucagaacaaaucgguuaaga

SEQ ID NO: 403630 - RNA, 22 nt, Human
auccuuaguuaagaacaggagu

SEQ ID NO: 403631 - RNA, 22 nt, Human
auggcauuccaagucuucuuuu

SEQ ID NO: 403632 - RNA, 22 nt, Human
cuuaaacugaaagcuacaagau

SEQ ID NO: 403633 - RNA, 22 nt, Human
auagaauuugcacuaaaucugc

SEQ ID NO: 403634 - RNA, 21 nt, Human
uucuucaugaugauuaauggc

SEQ ID NO: 403635 - RNA, 22 nt, Human
uucuucuugucugcccucacau

SEQ ID NO: 403636 - RNA, 22 nt, Human
caagucauuacugaaaugucac

SEQ ID NO: 403637 - RNA, 22 nt, Human
uuucacauaugguuguugauug

SEQ ID NO: 403638 - RNA, 22 nt, Human
acaaauaugguacucggagaaa

SEQ ID NO: 403639 - RNA, 22 nt, Human
ugaucugaaggacaugggaccc

SEQ ID NO: 403640 - RNA, 22 nt, Human
uggauuuaauggaugaggggca

SEQ ID NO: 403641 - RNA, 22 nt, Human
caaacuggcuaugggaaucuug

SEQ ID NO: 403642 - RNA, 22 nt, Human
aauaucaacaguguccuucuaa

SEQ ID NO: 403643 - RNA, 22 nt, Human
uauuucagggagaauaaauuug

SEQ ID NO: 403644 - RNA, 22 nt, Human
cccucuacagggaagcgcuuuc

SEQ ID NO: 403645 - RNA, 22 nt, Human
acaacuuugacccuuguucuua

SEQ ID NO: 403646 - RNA, 22 nt, Human
aaguccuuuauccuaaaagguc

SEQ ID NO: 403647 - RNA, 22 nt, Human
caucaucaaaagugacagagaa

SEQ ID NO: 403648 - RNA, 22 nt, Human
agcaucuggcagaaagucagaa

SEQ ID NO: 403649 - RNA, 22 nt, Human
acucaggagggaucagcuauca

SEQ ID NO: 403650 - RNA, 22 nt, Human
agaaaucauugaauuauuugcu

SEQ ID NO: 403651 - RNA, 22 nt, Human
auguguaugcaugcacuaagau

SEQ ID NO: 403652 - RNA, 22 nt, Human
cuuccaaauguaaauaaguuuc

SEQ ID NO: 403653 - RNA, 22 nt, Human
gcugggaagugcaagaucaagg

SEQ ID NO: 403654 - RNA, 22 nt, Human
aggcacaguggcucacaccugu

SEQ ID NO: 403655 - RNA, 22 nt, Human
ucuucccuaaucaccaucuuca

SEQ ID NO: 403656 - RNA, 22 nt, Human
uuuaggcauugaauuagaauag

SEQ ID NO: 403657 - RNA, 21 nt, Human
uuucacaaaaguaugugacaa

SEQ ID NO: 403658 - RNA, 22 nt, Human
aaguuugcauagauuaagcauu

SEQ ID NO: 403659 - RNA, 22 nt, Human
aagcauuuuagauaaagcauca

SEQ ID NO: 403660 - RNA, 22 nt, Human
uucuuaacucaaauauauaucc

SEQ ID NO: 403661 - RNA, 22 nt, Human
caguccuucuccauuaaggcuc

SEQ ID NO: 403662 - RNA, 22 nt, Human
agcagagccugggcuaggggug

SEQ ID NO: 403663 - RNA, 22 nt, Human
ugaaacaaugugaaguugcuga

SEQ ID NO: 403664 - RNA, 22 nt, Human
aaucagaaagaucuugaugaga

SEQ ID NO: 403665 - RNA, 22 nt, Human
uuuuaagaugcuaguauuucag

SEQ ID NO: 403666 - RNA, 22 nt, Human
aaagccauuacaaaauuucaua

SEQ ID NO: 403667 - RNA, 22 nt, Human
ucuucacauggaacaugaagcu

SEQ ID NO: 403668 - RNA, 22 nt, Human
ugucaccaugcgaggcuaauuu

SEQ ID NO: 403669 - RNA, 22 nt, Human
agcacauaccagaaccacaggu

SEQ ID NO: 403670 - RNA, 22 nt, Human
ucauuuguucaucugcucuucu

SEQ ID NO: 403671 - RNA, 22 nt, Human
ugugaaaagcguguguucuagg

SEQ ID NO: 403672 - RNA, 22 nt, Human
acagaaguuggaauuagauacu

SEQ ID NO: 403673 - RNA, 21 nt, Human
auuauuauaaagaccacaggg

SEQ ID NO: 403674 - RNA, 22 nt, Human
gccugcagaacugugaggcaau

SEQ ID NO: 403675 - RNA, 22 nt, Human
ggagcuguuggcagcuaucuug

SEQ ID NO: 403676 - RNA, 20 nt, Human
augugucuguaaacaacucu

SEQ ID NO: 403677 - RNA, 22 nt, Human
ucagccagaggcuucuugguuu

SEQ ID NO: 403678 - RNA, 20 nt, Human
agauuauuccuaagauuucu

SEQ ID NO: 403679 - RNA, 22 nt, Human
auuaggcagacaacguagccgg

SEQ ID NO: 403680 - RNA, 22 nt, Human
uuccauaauaggcuuaagugaa

SEQ ID NO: 403681 - RNA, 22 nt, Human
cuacagaaguuucccuugcuua

SEQ ID NO: 403682 - RNA, 22 nt, Human
cuuuccaaugcauuuccaaugu

SEQ ID NO: 403683 - RNA, 22 nt, Human
gauuuuauuagcccaaacuuug

SEQ ID NO: 403684 - RNA, 22 nt, Human
uuuaaagaaauuccucaucuuu

SEQ ID NO: 403685 - RNA, 22 nt, Human
aaaauuauucauggcuuuugga

SEQ ID NO: 403686 - RNA, 22 nt, Human
ugaaacuaggccaaucaaauua

SEQ ID NO: 403687 - RNA, 23 nt, Human
uaucagugugaugaggcugcugc

SEQ ID NO: 403688 - RNA, 22 nt, Human
aaacuuugguauguagcaaaac

SEQ ID NO: 403689 - RNA, 22 nt, Human
aaucuagucuccuuaagucuuu

SEQ ID NO: 403690 - RNA, 22 nt, Human
ggcucagacucccaggcccucu

SEQ ID NO: 403691 - RNA, 22 nt, Human
cauuuguaguuaaaaaugucuc

SEQ ID NO: 403692 - RNA, 22 nt, Human
auuaaauuaaguggcuaauuua

SEQ ID NO: 403693 - RNA, 22 nt, Human
cuacagaagaaacuaucacuau

SEQ ID NO: 403694 - RNA, 22 nt, Human
caauuuuuuccaugcucuuaca

SEQ ID NO: 403695 - RNA, 22 nt, Human
caggaugggauguagugggccc

SEQ ID NO: 403696 - RNA, 22 nt, Human
acagucucuccacacugcaggg

SEQ ID NO: 403697 - RNA, 22 nt, Human
uccauuuucuugcucuagguaa

SEQ ID NO: 403698 - RNA, 17 nt, Human
cuuuuaauuuacuuccc

SEQ ID NO: 403699 - RNA, 22 nt, Human
gucaggaugcuauuguuauuaa

SEQ ID NO: 403700 - RNA, 22 nt, Human
caggaugaagggcaaaggcaag

SEQ ID NO: 403701 - RNA, 22 nt, Human
aguagaauagauggauacuauu

SEQ ID NO: 403702 - RNA, 22 nt, Human
gaacccaggcuuuugaggcugu

SEQ ID NO: 403703 - RNA, 22 nt, Human
uccauguguuuuccuguccaca

SEQ ID NO: 403704 - RNA, 22 nt, Human
uuugaauaaucacugggcauua

SEQ ID NO: 403705 - RNA, 22 nt, Human
uauaaaacagaaagcacuaccu

SEQ ID NO: 403706 - RNA, 22 nt, Human
caagauggacauaaggagagaa

SEQ ID NO: 403707 - RNA, 22 nt, Human
cauaauauacuacauugaugaa

SEQ ID NO: 403708 - RNA, 22 nt, Human
aggccagaaaugucagggagug

SEQ ID NO: 403709 - RNA, 22 nt, Human
acacaauacagggcucaaaaua

SEQ ID NO: 403710 - RNA, 22 nt, Human
aacacuuugggcauggccuucc

SEQ ID NO: 403711 - RNA, 22 nt, Human
aggauuuaccgucauuuagucu

SEQ ID NO: 403712 - RNA, 22 nt, Human
agcacaauagagcaguuaaaaa

SEQ ID NO: 403713 - RNA, 22 nt, Human
aauuccagaggaggacaguccu

SEQ ID NO: 403714 - RNA, 22 nt, Human
uuccuuaguugacugucuuagu

SEQ ID NO: 403715 - RNA, 22 nt, Human
cagugauggauauggagaaguc

SEQ ID NO: 403716 - RNA, 22 nt, Human
uuuucaguuccaucucugcucu

SEQ ID NO: 403717 - RNA, 22 nt, Human
aaacauguaauucugcuuaaga

SEQ ID NO: 403718 - RNA, 22 nt, Human
ccuggaucagucacuguugcug

SEQ ID NO: 403719 - RNA, 22 nt, Human
uaggaagaugaguaucaacuug

SEQ ID NO: 403720 - RNA, 22 nt, Human
acaucagauuaugcuuugcuua

SEQ ID NO: 403721 - RNA, 22 nt, Human
cuuucauucuuagauauuagug

SEQ ID NO: 403722 - RNA, 22 nt, Human
agucucugucguagaucagcgu

SEQ ID NO: 403723 - RNA, 22 nt, Human
aaaucaguuagugguaggauug

SEQ ID NO: 403724 - RNA, 22 nt, Human
caauuucauuaauagauauaga

SEQ ID NO: 403725 - RNA, 22 nt, Human
ccagcugucagugugaaaauaa

SEQ ID NO: 403726 - RNA, 22 nt, Human
aaguccuuuccaguccugugau

SEQ ID NO: 403727 - RNA, 22 nt, Human
caggauagaaaggccauggagu

SEQ ID NO: 403728 - RNA, 22 nt, Human
gucaggauuauuuuauuaaaag

SEQ ID NO: 403729 - RNA, 22 nt, Human
uuccaaacugccaauucagaag

SEQ ID NO: 403730 - RNA, 22 nt, Human
ugucaccacauuugucaauauc

SEQ ID NO: 403731 - RNA, 22 nt, Human
uacuuguagcagguggcauuua

SEQ ID NO: 403732 - RNA, 22 nt, Human
uagaaacaucagcuaaccaaaa

SEQ ID NO: 403733 - RNA, 22 nt, Human
uggaguuccuuugaaaggcucu

SEQ ID NO: 403734 - RNA, 22 nt, Human
uuuauccauaucauuaaaaucu

SEQ ID NO: 403735 - RNA, 22 nt, Human
gaggccaaguuggagaccaggu

SEQ ID NO: 403736 - RNA, 22 nt, Human
uugcagcuucuaccacuguuuc

SEQ ID NO: 403737 - RNA, 22 nt, Human
cucaggauagcugcgcagccug

SEQ ID NO: 403738 - RNA, 22 nt, Human
uauuucagcaagaagaaugugg

SEQ ID NO: 403739 - RNA, 22 nt, Human
uuacagaacugucuugaaauuu

SEQ ID NO: 403740 - RNA, 22 nt, Human
uuacaagauaaccugaugcugu

SEQ ID NO: 403741 - RNA, 22 nt, Human
aaaggccaugguuggaguguuu

SEQ ID NO: 403742 - RNA, 22 nt, Human
aucacugucgucaucugagauu

SEQ ID NO: 403743 - RNA, 22 nt, Human
aggauuuaggagcuggcuaacg

SEQ ID NO: 403744 - RNA, 22 nt, Human
cucaggauuuaaaggggcacuc

SEQ ID NO: 403745 - RNA, 22 nt, Human
uucccucucacuuaaagcuugg

SEQ ID NO: 403746 - RNA, 21 nt, Human
uucaaaaugguguguuugucu

SEQ ID NO: 403747 - RNA, 22 nt, Human
cauucauucuguaaguaacuau

SEQ ID NO: 403748 - RNA, 22 nt, Human
gaaccucagugaaacuggaggu

SEQ ID NO: 403749 - RNA, 23 nt, Human
uucaaaacuggaaaaucagaugc

SEQ ID NO: 403750 - RNA, 22 nt, Human
uucaacuuuggagauuuaauaa

SEQ ID NO: 403751 - RNA, 22 nt, Human
gagucaccacacggugcugacu

SEQ ID NO: 403752 - RNA, 22 nt, Human
aaugguauuugucaagcauagu

SEQ ID NO: 403753 - RNA, 21 nt, Human
auccuuagcacuuagaagagu

SEQ ID NO: 403754 - RNA, 22 nt, Human
uaauuauuaugacaacaauugc

SEQ ID NO: 403755 - RNA, 22 nt, Human
ccuccuuuccuguuuuccugag

SEQ ID NO: 403756 - RNA, 22 nt, Human
ugcuucugggcaaaugugugug

SEQ ID NO: 403757 - RNA, 22 nt, Human
cagauaaaggcuuacuaguagu

SEQ ID NO: 403758 - RNA, 22 nt, Human
cuuccaaagcacuuuauggacc

SEQ ID NO: 403759 - RNA, 22 nt, Human
uauacaauggcugaaucaucca

SEQ ID NO: 403760 - RNA, 22 nt, Human
auagcuguuagauuggggucga

SEQ ID NO: 403761 - RNA, 22 nt, Human
aaaauugagagucuugugcaag

SEQ ID NO: 403762 - RNA, 22 nt, Human
ggccagcagucacagggucaga

SEQ ID NO: 403763 - RNA, 22 nt, Human
ucaaacagaggaacaauuguuu

SEQ ID NO: 403764 - RNA, 22 nt, Human
acauaauaaaaauaacagcuca

SEQ ID NO: 403765 - RNA, 19 nt, Human
uuucagacucaucuccagc

SEQ ID NO: 403766 - RNA, 22 nt, Human
uuuaggcauacuuuugggagaa

SEQ ID NO: 403767 - RNA, 22 nt, Human
caguucuuauuuggccaguguc

SEQ ID NO: 403768 - RNA, 22 nt, Human
ucagccaguuuguuuauuccgg

SEQ ID NO: 403769 - RNA, 22 nt, Human
aaguuucaugauguaauuauug

SEQ ID NO: 403770 - RNA, 22 nt, Human
aauuucaaugcacucaugguug

SEQ ID NO: 403771 - RNA, 22 nt, Human
auggcauuugaccgcuuugugg

SEQ ID NO: 403772 - RNA, 22 nt, Human
ucaauacuuaagcuuaauucua

SEQ ID NO: 403773 - RNA, 22 nt, Human
cuagaaaugcucaagagaaagu

SEQ ID NO: 403774 - RNA, 22 nt, Human
auaacagauacucucugugagg

SEQ ID NO: 403775 - RNA, 22 nt, Human
ugucaccaccggaagaaacugc

SEQ ID NO: 403776 - RNA, 22 nt, Human
agaccauagggaccucagguug

SEQ ID NO: 403777 - RNA, 22 nt, Human
ugcccacauggugccauggcca

SEQ ID NO: 403778 - RNA, 22 nt, Human
uguccuuagaagaagugaaaga

SEQ ID NO: 403779 - RNA, 22 nt, Human
gucuucuuuucagucugcuugu

SEQ ID NO: 403780 - RNA, 22 nt, Human
auuuucagagacaucuggacuu

SEQ ID NO: 403781 - RNA, 22 nt, Human
cagcuuucaucagugacacuca

SEQ ID NO: 403782 - RNA, 22 nt, Human
agaucugaaucucauccgagga

SEQ ID NO: 403783 - RNA, 22 nt, Human
auaaagcaagcauaccauuaag

SEQ ID NO: 403784 - RNA, 22 nt, Human
uauccaaaggaacaaucacagc

SEQ ID NO: 403785 - RNA, 22 nt, Human
ucauuuguugcuguuaccugag

SEQ ID NO: 403786 - RNA, 22 nt, Human
uugcuucaguagcucuuuaaag

SEQ ID NO: 403787 - RNA, 22 nt, Human
ccagcuauugcuguguaacagu

SEQ ID NO: 403788 - RNA, 22 nt, Human
auucuucauuuacuguuacuug

SEQ ID NO: 403789 - RNA, 22 nt, Human
cagugucuccagaugcuccaau

SEQ ID NO: 403790 - RNA, 22 nt, Human
guagaaauagugguugacagga

SEQ ID NO: 403791 - RNA, 19 nt, Human
ucaucucacagggccuggc

SEQ ID NO: 403792 - RNA, 22 nt, Human
aguaaacauuucagauuuauuu

SEQ ID NO: 403793 - RNA, 22 nt, Human
cuacagaagccguggucaggaa

SEQ ID NO: 403794 - RNA, 22 nt, Human
uggcuuuagguugcauguuucu

SEQ ID NO: 403795 - RNA, 22 nt, Human
uaaagcacgucuauuuaaugau

SEQ ID NO: 403796 - RNA, 22 nt, Human
acagcauucaauaaauaauaac

SEQ ID NO: 403797 - RNA, 22 nt, Human
cuagaaaucucuguuuacauca

SEQ ID NO: 403798 - RNA, 22 nt, Human
uuccaagagcuuuaauuguuga

SEQ ID NO: 403799 - RNA, 22 nt, Human
uaugcugugcuagauacaauau

SEQ ID NO: 403800 - RNA, 19 nt, Human
ucuuucauuucuagcucug

SEQ ID NO: 403801 - RNA, 22 nt, Human
guuaggcagugugguauagcag

SEQ ID NO: 403802 - RNA, 22 nt, Human
cugucauugagccugucagggc

SEQ ID NO: 403803 - RNA, 22 nt, Human
uauacagauuaacagauuuaaa

SEQ ID NO: 403804 - RNA, 22 nt, Human
gaaaaaggauaaauacaguguu

SEQ ID NO: 403805 - RNA, 22 nt, Human
caguuucagaaucaaaacauca

SEQ ID NO: 403806 - RNA, 23 nt, Human
ggauuuaguggaugagcugagug

SEQ ID NO: 403807 - RNA, 22 nt, Human
ucaguaaaugaaugaauauaug

SEQ ID NO: 403808 - RNA, 22 nt, Human
aaucuucuacuugacaguucuc

SEQ ID NO: 403809 - RNA, 22 nt, Human
ggagaaugauauauagcucagu

SEQ ID NO: 403810 - RNA, 22 nt, Human
cucuccucagaacaggcccucu

SEQ ID NO: 403811 - RNA, 22 nt, Human
aggguccugggugcaguugcuu

SEQ ID NO: 403812 - RNA, 21 nt, Human
uuuaguucaaguacagaacca

SEQ ID NO: 403813 - RNA, 22 nt, Human
uuccaugagcucugaguucaca

SEQ ID NO: 403814 - RNA, 22 nt, Human
uacuauaccauguaagauauga

SEQ ID NO: 403815 - RNA, 22 nt, Human
uccagccuaggggaacagcugc

SEQ ID NO: 403816 - RNA, 22 nt, Human
auucuucaaagagugucaaagu

SEQ ID NO: 403817 - RNA, 22 nt, Human
caucauaaaauugagauaacug

SEQ ID NO: 403818 - RNA, 22 nt, Human
ucagaauugcagggagggcagg

SEQ ID NO: 403819 - RNA, 22 nt, Human
ucugaagaacugaguaaacaug

SEQ ID NO: 403820 - RNA, 22 nt, Human
guuuucugauuagcaaaucuga

SEQ ID NO: 403821 - RNA, 22 nt, Human
aucaggauccaccuugagccug

SEQ ID NO: 403822 - RNA, 22 nt, Human
uuucuagggcucuugucuucug

SEQ ID NO: 403823 - RNA, 22 nt, Human
gucaggaugggcagccaaacua

SEQ ID NO: 403824 - RNA, 22 nt, Human
gaucuucuauguaaugaagugu

SEQ ID NO: 403825 - RNA, 22 nt, Human
uccuucuuucccccuagucauu

SEQ ID NO: 403826 - RNA, 22 nt, Human
uuucuucauagaccuugucuug

SEQ ID NO: 403827 - RNA, 22 nt, Human
agaccaagugcaggugccacua

SEQ ID NO: 403828 - RNA, 22 nt, Human
uuucaucucucuaaaagacagu

SEQ ID NO: 403829 - RNA, 22 nt, Human
caucagaaggaaggacgauuau

SEQ ID NO: 403830 - RNA, 22 nt, Human
auucuucauuguugauucaugu

SEQ ID NO: 403831 - RNA, 22 nt, Human
cagaaggcuggcagauugagau

SEQ ID NO: 403832 - RNA, 23 nt, Human
uuccagaggaagaagucaugacu

SEQ ID NO: 403833 - RNA, 22 nt, Human
aaauccuuuggaggacaugaug

SEQ ID NO: 403834 - RNA, 22 nt, Human
aaagaaucguguguaguuugaa

SEQ ID NO: 403835 - RNA, 22 nt, Human
aauacaguaauuuugaugaguu

SEQ ID NO: 403836 - RNA, 22 nt, Human
ggcauuuauuugucucauucuu

SEQ ID NO: 403837 - RNA, 22 nt, Human
auaagcauguuagaauauuuga

SEQ ID NO: 403838 - RNA, 22 nt, Human
gcuugaaaauucauagguauuu

SEQ ID NO: 403839 - RNA, 22 nt, Human
auucaaauuaaguuaauucagc

SEQ ID NO: 403840 - RNA, 22 nt, Human
gccuuaauuuuuuauaaucucu

SEQ ID NO: 403841 - RNA, 22 nt, Human
auggaguucuuuaaauucacag

SEQ ID NO: 403842 - RNA, 22 nt, Human
cuggaguuagaguagacacuga

SEQ ID NO: 403843 - RNA, 22 nt, Human
acagaauuuacacaucucuaaa

SEQ ID NO: 403844 - RNA, 22 nt, Human
ucuaaacacuaagucuugaugc

SEQ ID NO: 403845 - RNA, 22 nt, Human
uuggaugaagucuagcuuuagu

SEQ ID NO: 403846 - RNA, 22 nt, Human
uguucagcccucuauuaaucag

SEQ ID NO: 403847 - RNA, 22 nt, Human
ucuaaacaguuucacucuuaau

SEQ ID NO: 403848 - RNA, 22 nt, Human
augcaucuauucccaagggcag

SEQ ID NO: 403849 - RNA, 22 nt, Human
accauccugaaaccuucaugcu

SEQ ID NO: 403850 - RNA, 22 nt, Human
ucagccaguuugauucuauuug

SEQ ID NO: 403851 - RNA, 22 nt, Human
cuucuucauguauugauagucu

SEQ ID NO: 403852 - RNA, 22 nt, Human
aucuaaaaggagcucuuuaucu

SEQ ID NO: 403853 - RNA, 22 nt, Human
aguaaaaauugaggugcaaaau

SEQ ID NO: 403854 - RNA, 22 nt, Human
uaucagaacacagccacagcca

SEQ ID NO: 403855 - RNA, 22 nt, Human
caagauggaguccgggaaugug

SEQ ID NO: 403856 - RNA, 22 nt, Human
uguaaauaguuagcuugccucu

SEQ ID NO: 403857 - RNA, 20 nt, Human
gggagucuggaugaaagaug

SEQ ID NO: 403858 - RNA, 22 nt, Human
uggauuuaccacagggccacag

SEQ ID NO: 403859 - RNA, 22 nt, Human
cagaaccaggaacugauggaga

SEQ ID NO: 403860 - RNA, 22 nt, Human
auuugcuuucagguauaaaagg

SEQ ID NO: 403861 - RNA, 22 nt, Human
auauauuugagaauauucauga

SEQ ID NO: 403862 - RNA, 21 nt, Human
gaacauuuggguuguuucuac

SEQ ID NO: 403863 - RNA, 22 nt, Human
ccagauaaggcuuuuuaaaagc

SEQ ID NO: 403864 - RNA, 22 nt, Human
ccaggcugugguuuagauagag

SEQ ID NO: 403865 - RNA, 22 nt, Human
gcugcaggcauuuuccugggca

SEQ ID NO: 403866 - RNA, 19 nt, Human
aacuggauaauggccacau

SEQ ID NO: 403867 - RNA, 22 nt, Human
auacaaguugugauaauguaaa

SEQ ID NO: 403868 - RNA, 23 nt, Human
ugaaggccuggaggacgcguugu

SEQ ID NO: 403869 - RNA, 22 nt, Human
aagcucauuaauuagaagcuaa

SEQ ID NO: 403870 - RNA, 22 nt, Human
aucauaaaauugcaccauuucu

SEQ ID NO: 403871 - RNA, 22 nt, Human
uuacagaaagguugugggauag

SEQ ID NO: 403872 - RNA, 21 nt, Human
aaauacagaaacuuguuuuca

SEQ ID NO: 403873 - RNA, 22 nt, Human
uuauauaaagauaacuuuucuu

SEQ ID NO: 403874 - RNA, 22 nt, Human
uucuucaaaauccagcaugauu

SEQ ID NO: 403875 - RNA, 22 nt, Human
cauucuuauauuuacucauuca

SEQ ID NO: 403876 - RNA, 22 nt, Human
uaagaaucaguagauauagauu

SEQ ID NO: 403877 - RNA, 22 nt, Human
uguccuuauauuguggaagggg

SEQ ID NO: 403878 - RNA, 22 nt, Human
uccuuaauauggaagaguucuc

SEQ ID NO: 403879 - RNA, 22 nt, Human
ccuauacaggcuucuuuacaug

SEQ ID NO: 403880 - RNA, 22 nt, Human
aaaacauguccauacagaaacu

SEQ ID NO: 403881 - RNA, 22 nt, Human
cauauaaauacaacauguguua

SEQ ID NO: 403882 - RNA, 22 nt, Human
uaccaaaagcuuguuucauaca

SEQ ID NO: 403883 - RNA, 19 nt, Human
cauguuaugcuguaguauc

SEQ ID NO: 403884 - RNA, 22 nt, Human
auuuaguuuaggaaaaguaggu

SEQ ID NO: 403885 - RNA, 22 nt, Human
ucagucuucccuccagugcaac

SEQ ID NO: 403886 - RNA, 22 nt, Human
ucagaauugucuggggaauguu

SEQ ID NO: 403887 - RNA, 22 nt, Human
ucuggaucuccagcacuuauca

SEQ ID NO: 403888 - RNA, 22 nt, Human
auugaaaggcaaaguaggaagc

SEQ ID NO: 403889 - RNA, 22 nt, Human
acuugcauuauauuuaucacaa

SEQ ID NO: 403890 - RNA, 22 nt, Human
uugaaaguuaucuagauucuga

SEQ ID NO: 403891 - RNA, 22 nt, Human
aacauaauguggccaaagucac

SEQ ID NO: 403892 - RNA, 22 nt, Human
uuaauuacuaagcacaaugcaa

SEQ ID NO: 403893 - RNA, 22 nt, Human
agacaaaugguaauuaugucua

SEQ ID NO: 403894 - RNA, 22 nt, Human
ucuguggauuuuaguguucaug

SEQ ID NO: 403895 - RNA, 22 nt, Human
acaauauuguacccagaaguuu

SEQ ID NO: 403896 - RNA, 23 nt, Human
uagaauucaaucuguuccacauc

SEQ ID NO: 403897 - RNA, 22 nt, Human
cuaauuauguuguuauaaucaa

SEQ ID NO: 403898 - RNA, 22 nt, Human
gcuauacagcaggagaauggaa

SEQ ID NO: 403899 - RNA, 22 nt, Human
gccagagguucaacaacugucu

SEQ ID NO: 403900 - RNA, 22 nt, Human
cauggucuacaauuucauuuua

SEQ ID NO: 403901 - RNA, 22 nt, Human
agucucagaaaagaagcaugga

SEQ ID NO: 403902 - RNA, 22 nt, Human
uuugaagacagaucaauauaag

SEQ ID NO: 403903 - RNA, 22 nt, Human
aaaguccuguuugaaggaccug

SEQ ID NO: 403904 - RNA, 22 nt, Human
auuugcuugugcuaugaaaguu

SEQ ID NO: 403905 - RNA, 22 nt, Human
cauagaaacugagacaaggauu

SEQ ID NO: 403906 - RNA, 22 nt, Human
ucucuuucuauaugugagucuu

SEQ ID NO: 403907 - RNA, 22 nt, Human
gauuucaauccagcuuucuucu

SEQ ID NO: 403908 - RNA, 22 nt, Human
caggauggucagaugcauuguc

SEQ ID NO: 403909 - RNA, 22 nt, Human
uugagaagaggcuuuguaggaa

SEQ ID NO: 403910 - RNA, 22 nt, Human
uuucaguuguccuguuaauagc

SEQ ID NO: 403911 - RNA, 22 nt, Human
caauauauaggaacaacuuagg

SEQ ID NO: 403912 - RNA, 22 nt, Human
gaggacaggagacucacuguuu

SEQ ID NO: 403913 - RNA, 22 nt, Human
gcucaggagcucuugguggcgc

SEQ ID NO: 403914 - RNA, 22 nt, Human
ccagaucuaaguccaaaguacu

SEQ ID NO: 403915 - RNA, 22 nt, Human
cguauacaugaagacauugcug

SEQ ID NO: 403916 - RNA, 22 nt, Human
aaguuucauuguucauguaaca

SEQ ID NO: 403917 - RNA, 22 nt, Human
auauaggcuaacaacuauugag

SEQ ID NO: 403918 - RNA, 22 nt, Human
aauuccaaauguuuucaaucca

SEQ ID NO: 403919 - RNA, 22 nt, Human
cauagaaaucaggugagaaucu

SEQ ID NO: 403920 - RNA, 22 nt, Human
uuaaaauagccagugccccucu

SEQ ID NO: 403921 - RNA, 22 nt, Human
gccucugcaauuacauugugcc

SEQ ID NO: 403922 - RNA, 22 nt, Human
aaguccuucuuuauaugagagu

SEQ ID NO: 403923 - RNA, 22 nt, Human
aaugugauuagccucuacugga

SEQ ID NO: 403924 - RNA, 22 nt, Human
aaguuucaaauauaaaauuaca

SEQ ID NO: 403925 - RNA, 23 nt, Human
ucuaauacaugaaaccuagaugu

SEQ ID NO: 403926 - RNA, 22 nt, Human
cucaggaucgcuugcccuaggg

SEQ ID NO: 403927 - RNA, 22 nt, Human
cucaugauguagcgaaugagaa

SEQ ID NO: 403928 - RNA, 19 nt, Human
uccuucagucagaucuggg

SEQ ID NO: 403929 - RNA, 22 nt, Human
uccagaauacucugaaaucauu

SEQ ID NO: 403930 - RNA, 22 nt, Human
aauuccaaguagcaucccauca

SEQ ID NO: 403931 - RNA, 23 nt, Human
aaucuauacuuaggcugguaaua

SEQ ID NO: 403932 - RNA, 22 nt, Human
cauuaaaauaucucaugguguu

SEQ ID NO: 403933 - RNA, 22 nt, Human
ucuaaagaagaggguucugcgg

SEQ ID NO: 403934 - RNA, 22 nt, Human
uucaacuagauuuauacaauuc

SEQ ID NO: 403935 - RNA, 22 nt, Human
uugaagagugccuuccagacau

SEQ ID NO: 403936 - RNA, 22 nt, Human
auaauaaaccaggaugggucug

SEQ ID NO: 403937 - RNA, 22 nt, Human
gaacuuuaaaacaaaguacagu

SEQ ID NO: 403938 - RNA, 22 nt, Human
agaaaucaauaucuauauguug

SEQ ID NO: 403939 - RNA, 22 nt, Human
ccaauacacuuuauagaagaaa

SEQ ID NO: 403940 - RNA, 22 nt, Human
ucuucaaguuccaaagugcagg

SEQ ID NO: 403941 - RNA, 22 nt, Human
cacacuuugugcuaaucuauuu

SEQ ID NO: 403942 - RNA, 22 nt, Human
agaccaagacuauaaugagagg

SEQ ID NO: 403943 - RNA, 22 nt, Human
cuggaucaugggaaagggauca

SEQ ID NO: 403944 - RNA, 22 nt, Human
ucauaaaaauagacucuaaagu

SEQ ID NO: 403945 - RNA, 22 nt, Human
caaugaaaauuuaaguugcagc

SEQ ID NO: 403946 - RNA, 22 nt, Human
cuuccuucugaagcauagaagc

SEQ ID NO: 403947 - RNA, 22 nt, Human
uuauccaaacuggugaaucauu

SEQ ID NO: 403948 - RNA, 22 nt, Human
uugaaggacauccuauuucuag

SEQ ID NO: 403949 - RNA, 22 nt, Human
acuauacaccaaaauauuaagg

SEQ ID NO: 403950 - RNA, 22 nt, Human
acaggccacaguggagucucug

SEQ ID NO: 403951 - RNA, 22 nt, Human
caaagucagcugccagucccaa

SEQ ID NO: 403952 - RNA, 22 nt, Human
ugcuauacggagcaucuucagg

SEQ ID NO: 403953 - RNA, 22 nt, Human
gaaacaacuacuauugauuucu

SEQ ID NO: 403954 - RNA, 22 nt, Human
auggccuuagugaugauuaaua

SEQ ID NO: 403955 - RNA, 22 nt, Human
guuaggcauuugccuuaauuuu

SEQ ID NO: 403956 - RNA, 22 nt, Human
cuggcuuucauuucaagcacgu

SEQ ID NO: 403957 - RNA, 22 nt, Human
cauggauugaauauaaauuaga

SEQ ID NO: 403958 - RNA, 22 nt, Human
uuuacagaaugucaauuucuau

SEQ ID NO: 403959 - RNA, 22 nt, Human
ugaaguaacuguccaggaucca

SEQ ID NO: 403960 - RNA, 22 nt, Human
cuugaaagaagggucuuuuaau

SEQ ID NO: 403961 - RNA, 22 nt, Human
auacuguaauaccuaaaugaac

SEQ ID NO: 403962 - RNA, 22 nt, Human
uacugaaauacuaagaaguuaa

SEQ ID NO: 403963 - RNA, 22 nt, Human
cauuguuauagcauuacacacc

SEQ ID NO: 403964 - RNA, 22 nt, Human
uuuccaaauaaggucacacuca

SEQ ID NO: 403965 - RNA, 22 nt, Human
caaggccaagucucugugaaga

SEQ ID NO: 403966 - RNA, 22 nt, Human
uuuauccaaggguuuuaacugu

SEQ ID NO: 403967 - RNA, 22 nt, Human
aaucaguguguaaaguggcugc

SEQ ID NO: 403968 - RNA, 22 nt, Human
ccagaauucagaaagggcauaa

SEQ ID NO: 403969 - RNA, 22 nt, Human
aguccaaggagagacagcauuu

SEQ ID NO: 403970 - RNA, 22 nt, Human
uuuaggaaugugguuuuugagc

SEQ ID NO: 403971 - RNA, 22 nt, Human
gaaagccagagagaaagggcuc

SEQ ID NO: 403972 - RNA, 22 nt, Human
guuucacagaugguguucauau

SEQ ID NO: 403973 - RNA, 22 nt, Human
cauuuguagcuauuuacuguau

SEQ ID NO: 403974 - RNA, 22 nt, Human
ucucuuaacugguucagcaauu

SEQ ID NO: 403975 - RNA, 22 nt, Human
augcaaaauaaggcagaaacau

SEQ ID NO: 403976 - RNA, 22 nt, Human
augugaggaagaaagagguaag

SEQ ID NO: 403977 - RNA, 22 nt, Human
augaaaauguacauguguauaa

SEQ ID NO: 403978 - RNA, 22 nt, Human
gcucagagcuugaaguuccacu

SEQ ID NO: 403979 - RNA, 22 nt, Human
agaaaaacuaagaguggguggu

SEQ ID NO: 403980 - RNA, 22 nt, Human
ccaaaauuaagccucuuauguu

SEQ ID NO: 403981 - RNA, 22 nt, Human
auguuaaauaaucccuuaaagc

SEQ ID NO: 403982 - RNA, 22 nt, Human
guuccaaagucucugagcugag

SEQ ID NO: 403983 - RNA, 21 nt, Human
aacugguucaauucaacuaga

SEQ ID NO: 403984 - RNA, 22 nt, Human
uaaacauggauucugaucacag

SEQ ID NO: 403985 - RNA, 22 nt, Human
acuaagugauucuaagcaucuu

SEQ ID NO: 403986 - RNA, 22 nt, Human
uaaggccaauuacauauguuca

SEQ ID NO: 403987 - RNA, 22 nt, Human
uagaagcaguaauagaaauagg

SEQ ID NO: 403988 - RNA, 22 nt, Human
agucaccaggguuugcuggguu

SEQ ID NO: 403989 - RNA, 22 nt, Human
guucuucaucauuuuagauagg

SEQ ID NO: 403990 - RNA, 22 nt, Human
ucuuccaagguugcacacuauc

SEQ ID NO: 403991 - RNA, 22 nt, Human
gaaugaaaaccuuggcucaaau

SEQ ID NO: 403992 - RNA, 22 nt, Human
uuaacagagugccuggcaugua

SEQ ID NO: 403993 - RNA, 21 nt, Human
acucaggagacuaacuauguc

SEQ ID NO: 403994 - RNA, 21 nt, Human
acuuuaauauacaugaggagg

SEQ ID NO: 403995 - RNA, 22 nt, Human
uuaaagggccgauuuccaggcc

SEQ ID NO: 403996 - RNA, 22 nt, Human
agaagugagugugacucagcag

SEQ ID NO: 403997 - RNA, 22 nt, Human
agaauaaucacugaaguucaaa

SEQ ID NO: 403998 - RNA, 19 nt, Human
uugaaagauuagcuuucua

SEQ ID NO: 403999 - RNA, 22 nt, Human
aaucagaacuucucaggguggg

SEQ ID NO: 404000 - RNA, 22 nt, Human
aggauuuaccuccagcuaggcu

SEQ ID NO: 404001 - RNA, 22 nt, Human
uggaauaaagugcuuugaucag

SEQ ID NO: 404002 - RNA, 22 nt, Human
gugaacuauuggguaucauaaa

SEQ ID NO: 404003 - RNA, 22 nt, Human
uggaaauggaucugaugagucu

SEQ ID NO: 404004 - RNA, 22 nt, Human
aguucucaagacaauuaccugu

SEQ ID NO: 404005 - RNA, 22 nt, Human
aaauugaaugauuaagugguga

SEQ ID NO: 404006 - RNA, 22 nt, Human
ucagugaucuaaggguauggcc

SEQ ID NO: 404007 - RNA, 22 nt, Human
uuuauccagcagcuauucaaaa

SEQ ID NO: 404008 - RNA, 22 nt, Human
uuuaggcaagaacucacugaga

SEQ ID NO: 404009 - RNA, 22 nt, Human
cagaauaaaagucccaaggcau

SEQ ID NO: 404010 - RNA, 22 nt, Human
ugaugaaauguugaggcaguga

SEQ ID NO: 404011 - RNA, 22 nt, Human
uaacagaaauuuuaguuagggg

SEQ ID NO: 404012 - RNA, 22 nt, Human
cuuaaagaugucaaggcuguuu

SEQ ID NO: 404013 - RNA, 22 nt, Human
ucuuuccaaggacucuguagca

SEQ ID NO: 404014 - RNA, 20 nt, Human
ccucaggaugagggugagca

SEQ ID NO: 404015 - RNA, 19 nt, Human
uuugaaaggauuguuauuu

SEQ ID NO: 404016 - RNA, 22 nt, Human
aaugggauaggucuucaggaau

SEQ ID NO: 404017 - RNA, 22 nt, Human
uuucaguuuaugucuugaauua

SEQ ID NO: 404018 - RNA, 22 nt, Human
auguauaaugcuaauuagcuag

SEQ ID NO: 404019 - RNA, 22 nt, Human
cagagauuauuauaacuaauua

SEQ ID NO: 404020 - RNA, 22 nt, Human
uacacagaggcugaugucuuag

SEQ ID NO: 404021 - RNA, 22 nt, Human
uaaucauggccucaaauuuuau

SEQ ID NO: 404022 - RNA, 22 nt, Human
agaccgagaaguucuccaggcc

SEQ ID NO: 404023 - RNA, 22 nt, Human
uuuguaaauagcaguacucaug

SEQ ID NO: 404024 - RNA, 22 nt, Human
uaaggccaaggggccauagucu

SEQ ID NO: 404025 - RNA, 22 nt, Human
auggcuuuuuagacuuugguac

SEQ ID NO: 404026 - RNA, 22 nt, Human
aaacaaacaauuaguugugugg

SEQ ID NO: 404027 - RNA, 22 nt, Human
aaucuguucuacucuauucaga

SEQ ID NO: 404028 - RNA, 22 nt, Human
acuuuagaccaucuuccacagu

SEQ ID NO: 404029 - RNA, 22 nt, Human
uagaaacagcauauauuagccc

SEQ ID NO: 404030 - RNA, 22 nt, Human
agccaacuaggagauuaaggua

SEQ ID NO: 404031 - RNA, 22 nt, Human
uucacagaugccugaugugugg

SEQ ID NO: 404032 - RNA, 22 nt, Human
augguuuaagggagaauauuga

SEQ ID NO: 404033 - RNA, 22 nt, Human
gugaauaacuuucuauguuaau

SEQ ID NO: 404034 - RNA, 22 nt, Human
auguuucagauacagaucaaau

SEQ ID NO: 404035 - RNA, 22 nt, Human
gaagaaucugaggacagucauu

SEQ ID NO: 404036 - RNA, 22 nt, Human
ugauugaacugagcuucaagau

SEQ ID NO: 404037 - RNA, 22 nt, Human
acuauacagaagaggauaggaa

SEQ ID NO: 404038 - RNA, 22 nt, Human
ucaaacauguuagcagucugug

SEQ ID NO: 404039 - RNA, 22 nt, Human
uuuucauuuuuguagaugcaag

SEQ ID NO: 404040 - RNA, 22 nt, Human
aaucagcuaaauaaacuaguca

SEQ ID NO: 404041 - RNA, 22 nt, Human
ucauaauacaaagaguucugca

SEQ ID NO: 404042 - RNA, 22 nt, Human
augcuuaacucuguacauaguu

SEQ ID NO: 404043 - RNA, 22 nt, Human
uuagaaaugucacagaucugau

SEQ ID NO: 404044 - RNA, 22 nt, Human
agugugucugaucacuugugag

SEQ ID NO: 404045 - RNA, 22 nt, Human
uuucuucagagagagcuuuccc

SEQ ID NO: 404046 - RNA, 22 nt, Human
ccuggauucaagucuuucuuuc

SEQ ID NO: 404047 - RNA, 22 nt, Human
aaaaugcuauuucauggaggag

SEQ ID NO: 404048 - RNA, 22 nt, Human
uuuccaaauaaggucacauucu

SEQ ID NO: 404049 - RNA, 22 nt, Human
uugcugaaguuaaugcuugcaa

SEQ ID NO: 404050 - RNA, 22 nt, Human
aaucagaaucaguugacacagc

SEQ ID NO: 404051 - RNA, 22 nt, Human
auuccaguuggguucuaauaca

SEQ ID NO: 404052 - RNA, 22 nt, Human
ucauacacaagagcauguaaca

SEQ ID NO: 404053 - RNA, 22 nt, Human
gauagucaccucccuuaacuuu

SEQ ID NO: 404054 - RNA, 22 nt, Human
guaaugaaugaaagaaacuggg

SEQ ID NO: 404055 - RNA, 22 nt, Human
uggcauuuggcuuacuuauguu

SEQ ID NO: 404056 - RNA, 22 nt, Human
cacaaagucugcagcugcugua

SEQ ID NO: 404057 - RNA, 21 nt, Human
uccuuccuugagguccuuucc

SEQ ID NO: 404058 - RNA, 22 nt, Human
cucacugugccuuuucccaaac

SEQ ID NO: 404059 - RNA, 22 nt, Human
auuaaauuuucacuaggcuccc

SEQ ID NO: 404060 - RNA, 22 nt, Human
gcuuuaaugcaauuucaccuca

SEQ ID NO: 404061 - RNA, 19 nt, Human
uaaggccaaaaguaagugu

SEQ ID NO: 404062 - RNA, 22 nt, Human
ggauucagugucuguuaauagu

SEQ ID NO: 404063 - RNA, 22 nt, Human
uauuucagucacuucuucucug

SEQ ID NO: 404064 - RNA, 20 nt, Human
aguuauaguaucuagccaug

SEQ ID NO: 404065 - RNA, 20 nt, Human
uuucaguugguuaauggcau

SEQ ID NO: 404066 - RNA, 22 nt, Human
auucugauaucuuauucuagcu

SEQ ID NO: 404067 - RNA, 22 nt, Human
cuggaaauuggagaugauguuu

SEQ ID NO: 404068 - RNA, 22 nt, Human
ucagucuuugcuuaugacaaua

SEQ ID NO: 404069 - RNA, 22 nt, Human
augaauaaguaaacuccuuugg

SEQ ID NO: 404070 - RNA, 22 nt, Human
uaugaaaauuuagcugaagcau

SEQ ID NO: 404071 - RNA, 22 nt, Human
cagaauuuaaguggauuauucu

SEQ ID NO: 404072 - RNA, 22 nt, Human
uuugcacuagcauuuguccaug

SEQ ID NO: 404073 - RNA, 22 nt, Human
uaacagaaauaguaggugaggg

SEQ ID NO: 404074 - RNA, 22 nt, Human
acucaggaagaaagcagcuggu

SEQ ID NO: 404075 - RNA, 22 nt, Human
auaguuugaaggcuguucuacu

SEQ ID NO: 404076 - RNA, 22 nt, Human
gaucuucucuuuaguagaaaca

SEQ ID NO: 404077 - RNA, 22 nt, Human
uugaaagaggcaaaguuugauc

SEQ ID NO: 404078 - RNA, 22 nt, Human
aaaggccaauaaagacaagcug

SEQ ID NO: 404079 - RNA, 22 nt, Human
ucuggauccuaugcacuggacu

SEQ ID NO: 404080 - RNA, 22 nt, Human
gaaggccauuagagccugugcc

SEQ ID NO: 404081 - RNA, 22 nt, Human
guuauacauauguguuaacaaa

SEQ ID NO: 404082 - RNA, 22 nt, Human
aaguccuuauguggaggggcua

SEQ ID NO: 404083 - RNA, 22 nt, Human
auucuucaguauguguggauug

SEQ ID NO: 404084 - RNA, 22 nt, Human
ucacagacauggugagguaaca

SEQ ID NO: 404085 - RNA, 22 nt, Human
cugaauaaagcccucgcgcgcu

SEQ ID NO: 404086 - RNA, 22 nt, Human
auuauucuuaugucaucauggc

SEQ ID NO: 404087 - RNA, 22 nt, Human
gagagucuagugcaccuaguuu

SEQ ID NO: 404088 - RNA, 22 nt, Human
cagaguggcgacccccucagcu

SEQ ID NO: 404089 - RNA, 22 nt, Human
uucugugauugacauguggcuu

SEQ ID NO: 404090 - RNA, 22 nt, Human
gucuccugagacugcagucacc

SEQ ID NO: 404091 - RNA, 22 nt, Human
auuucaacacuuuuggaauuag

SEQ ID NO: 404092 - RNA, 22 nt, Human
augaggcaguacacacaaagcc

SEQ ID NO: 404093 - RNA, 22 nt, Human
guauuuaauuccauuaaguuag

SEQ ID NO: 404094 - RNA, 22 nt, Human
guccaugauucugugacacccu

SEQ ID NO: 404095 - RNA, 22 nt, Human
caaauaguuuuucauguauuau

SEQ ID NO: 404096 - RNA, 22 nt, Human
ucauaaaguuaucaccaaaucc

SEQ ID NO: 404097 - RNA, 22 nt, Human
caaggccaaagggccacuguca

SEQ ID NO: 404098 - RNA, 22 nt, Human
aaugucugagucucuguauccc

SEQ ID NO: 404099 - RNA, 15 nt, Human
cuccaugauuuugca

SEQ ID NO: 404100 - RNA, 21 nt, Human
uguguaaaguugaaauccugu

SEQ ID NO: 404101 - RNA, 19 nt, Human
caggaaugagguaauggcu

SEQ ID NO: 404102 - RNA, 22 nt, Human
uucuucuucaagugcugcauuc

SEQ ID NO: 404103 - RNA, 22 nt, Human
aauaaaauggucaguuuucuca

SEQ ID NO: 404104 - RNA, 22 nt, Human
cccaaaguacaaguaaacaugu

SEQ ID NO: 404105 - RNA, 22 nt, Human
ucugucuucaucagcaugugau

SEQ ID NO: 404106 - RNA, 20 nt, Human
uuacagaaaugauguuauuu

SEQ ID NO: 404107 - RNA, 22 nt, Human
uggauuagugcugaaaugaugg

SEQ ID NO: 404108 - RNA, 22 nt, Human
auuucacucauucauguuacuu

SEQ ID NO: 404109 - RNA, 22 nt, Human
uuucaugaggggcaaaaucuca

SEQ ID NO: 404110 - RNA, 22 nt, Human
uuugaaugcaggacauacagaa

SEQ ID NO: 404111 - RNA, 22 nt, Human
gguggagcuggaccaggagagg

SEQ ID NO: 404112 - RNA, 22 nt, Human
cuucuucaagagaaugggagac

SEQ ID NO: 404113 - RNA, 22 nt, Human
cuucuucaguugcauguauugg

SEQ ID NO: 404114 - RNA, 22 nt, Human
uugaagaggacuuugcagcugu

SEQ ID NO: 404115 - RNA, 21 nt, Human
ucaguaaaccuaaagauugua

SEQ ID NO: 404116 - RNA, 22 nt, Human
auucaacggguagaagggucuu

SEQ ID NO: 404117 - RNA, 22 nt, Human
agagacagaggcaauauagcuu

SEQ ID NO: 404118 - RNA, 22 nt, Human
uucauaaucaccaaaaacugga

SEQ ID NO: 404119 - RNA, 22 nt, Human
cauggcuuguaauaaauuuaua

SEQ ID NO: 404120 - RNA, 22 nt, Human
uaaggccaccguuauagaacca

SEQ ID NO: 404121 - RNA, 22 nt, Human
acaacaaaaucacuagucuucc

SEQ ID NO: 404122 - RNA, 22 nt, Human
cagucccuaguggagcucacag

SEQ ID NO: 404123 - RNA, 20 nt, Human
aauaaacuacugagagaugu

SEQ ID NO: 404124 - RNA, 22 nt, Human
auuaggcauucaugcagcuccu

SEQ ID NO: 404125 - RNA, 22 nt, Human
gguaugaauucacuacuuccaa

SEQ ID NO: 404126 - RNA, 22 nt, Human
ugcuuuaagagauuguuaguac

SEQ ID NO: 404127 - RNA, 22 nt, Human
cauuuguaauacugacuugcag

SEQ ID NO: 404128 - RNA, 22 nt, Human
ucaauaaaauuguuuuccuauc

SEQ ID NO: 404129 - RNA, 23 nt, Human
acuauaaaguuguucugauuuac

SEQ ID NO: 404130 - RNA, 22 nt, Human
uuaaauuccagccucauaauag

SEQ ID NO: 404131 - RNA, 22 nt, Human
aauaucagcacuuuugugguau

SEQ ID NO: 404132 - RNA, 22 nt, Human
ugaaagguguccaauauuucuc

SEQ ID NO: 404133 - RNA, 22 nt, Human
uucagaaaugaauauugguauu

SEQ ID NO: 404134 - RNA, 23 nt, Human
uaauacugcuucagaggcuuaga

SEQ ID NO: 404135 - RNA, 22 nt, Human
uaaaacugaauacauacugagg

SEQ ID NO: 404136 - RNA, 22 nt, Human
ucuuuaauuguggaagagcagc

SEQ ID NO: 404137 - RNA, 17 nt, Human
acucaggaucugggagu

SEQ ID NO: 404138 - RNA, 22 nt, Human
aaaaauugcugagaacggaauu

SEQ ID NO: 404139 - RNA, 22 nt, Human
ugccuugcacauaauauacauu

SEQ ID NO: 404140 - RNA, 22 nt, Human
aagugaagaaauacaugagaau

SEQ ID NO: 404141 - RNA, 22 nt, Human
uaaagucagauaucuggguuga

SEQ ID NO: 404142 - RNA, 22 nt, Human
ugcaggaacagaacucacuccc

SEQ ID NO: 404143 - RNA, 22 nt, Human
gaagaauccaugcuaauuuacc

SEQ ID NO: 404144 - RNA, 22 nt, Human
aaaggccaagcaugagguggac

SEQ ID NO: 404145 - RNA, 22 nt, Human
gcauucuuuuuaggagguuccu

SEQ ID NO: 404146 - RNA, 22 nt, Human
aaggcaguagguguuucaaacu

SEQ ID NO: 404147 - RNA, 22 nt, Human
uugguacaaugugcuagguagg

SEQ ID NO: 404148 - RNA, 20 nt, Human
aggauuuacuacuaccugcu

SEQ ID NO: 404149 - RNA, 22 nt, Human
uucuaacaaguggcuuguuagu

SEQ ID NO: 404150 - RNA, 22 nt, Human
guccucuggaagaugaguucuu

SEQ ID NO: 404151 - RNA, 22 nt, Human
ucugggaacacacgucacuuca

SEQ ID NO: 404152 - RNA, 22 nt, Human
augugcuuuauuaaguaaaaau

SEQ ID NO: 404153 - RNA, 22 nt, Human
gucaggauguuuauucuccagu

SEQ ID NO: 404154 - RNA, 22 nt, Human
ggcauuuaucuaauauaguuua

SEQ ID NO: 404155 - RNA, 22 nt, Human
agaaagcaucuccauuguaggu

SEQ ID NO: 404156 - RNA, 22 nt, Human
uauguuauuuucauacaacaga

SEQ ID NO: 404157 - RNA, 22 nt, Human
uaucagaaaugccuuaaauugg

SEQ ID NO: 404158 - RNA, 22 nt, Human
uuuccaagacuccaguucuccc

SEQ ID NO: 404159 - RNA, 22 nt, Human
auaaagucauuaugaagaucua

SEQ ID NO: 404160 - RNA, 22 nt, Human
uagucaccagcuacaggacagc

SEQ ID NO: 404161 - RNA, 22 nt, Human
agggcaguucaacuucauagug

SEQ ID NO: 404162 - RNA, 22 nt, Human
uugauacuauuaagcacugggc

SEQ ID NO: 404163 - RNA, 22 nt, Human
aucaggaugaagcuguagcgaa

SEQ ID NO: 404164 - RNA, 22 nt, Human
gucaaacagccuccuguucuaa

SEQ ID NO: 404165 - RNA, 22 nt, Human
auucuuauuauaguaaaacagu

SEQ ID NO: 404166 - RNA, 22 nt, Human
gcacaauuauuuaugcaguaug

SEQ ID NO: 404167 - RNA, 22 nt, Human
gcucaggaccgaggggugggaa

SEQ ID NO: 404168 - RNA, 22 nt, Human
auggcuuucucuaaugugguau

SEQ ID NO: 404169 - RNA, 22 nt, Human
aacagaauaguugauguacagu

SEQ ID NO: 404170 - RNA, 22 nt, Human
ucaguuucuaaaucuuaccaau

SEQ ID NO: 404171 - RNA, 22 nt, Human
uucuuaacuggaaaaugucaga

SEQ ID NO: 404172 - RNA, 22 nt, Human
acacauuucucuuuuuguaagu

SEQ ID NO: 404173 - RNA, 22 nt, Human
caauuucaaugaggccacaggg

SEQ ID NO: 404174 - RNA, 22 nt, Human
aucauaaagugcuaucugauug

SEQ ID NO: 404175 - RNA, 22 nt, Human
cuggcuuucccuggacaacagc

SEQ ID NO: 404176 - RNA, 22 nt, Human
ugcuuagacgucaaguacagcc

SEQ ID NO: 404177 - RNA, 22 nt, Human
uuucaaagucaauaucauuacc

SEQ ID NO: 404178 - RNA, 22 nt, Human
aaauuucaguuggaaugagcuc

SEQ ID NO: 404179 - RNA, 23 nt, Human
uaauucacauauacauugcuuca

SEQ ID NO: 404180 - RNA, 22 nt, Human
guacagaaggauuucuaguagu

SEQ ID NO: 404181 - RNA, 22 nt, Human
ugaaggccacuuccugugagcu

SEQ ID NO: 404182 - RNA, 21 nt, Human
acaugucuggucauuuuuagc

SEQ ID NO: 404183 - RNA, 22 nt, Human
ucuaaccuuugaaacugcuuuc

SEQ ID NO: 404184 - RNA, 22 nt, Human
uucaacuaauguuuauuuuaug

SEQ ID NO: 404185 - RNA, 22 nt, Human
ggcauuaagaauaucauuaaaa

SEQ ID NO: 404186 - RNA, 22 nt, Human
uauggaaagggaguuuaauuug

SEQ ID NO: 404187 - RNA, 21 nt, Human
augucaaaugcuuuauuuuau

SEQ ID NO: 404188 - RNA, 22 nt, Human
gcagagaacccagcagauuggc

SEQ ID NO: 404189 - RNA, 22 nt, Human
cuuaggcaagcagagcccaucc

SEQ ID NO: 404190 - RNA, 22 nt, Human
uacaaaguaauguauaauaucg

SEQ ID NO: 404191 - RNA, 22 nt, Human
uuaucacuuaugagcuuuuugc

SEQ ID NO: 404192 - RNA, 22 nt, Human
ucucauugguauauacaugugu

SEQ ID NO: 404193 - RNA, 22 nt, Human
aauauaugagggagcuauuuga

SEQ ID NO: 404194 - RNA, 22 nt, Human
ggauuuacaaguuuaacucuca

SEQ ID NO: 404195 - RNA, 22 nt, Human
uucuccucuguuggccuucccu

SEQ ID NO: 404196 - RNA, 22 nt, Human
aguuugaauugaaaugcagaug

SEQ ID NO: 404197 - RNA, 22 nt, Human
uuagaaaucaccucugaagauc

SEQ ID NO: 404198 - RNA, 22 nt, Human
aaaucaguuaagaugaggccau

SEQ ID NO: 404199 - RNA, 22 nt, Human
uuggagagauuaucagaccagc

SEQ ID NO: 404200 - RNA, 22 nt, Human
cauuuacauaacaguaacgcug

SEQ ID NO: 404201 - RNA, 20 nt, Human
uccaugaguuagagacuaua

SEQ ID NO: 404202 - RNA, 19 nt, Human
acaaaugauguugcacuga

SEQ ID NO: 404203 - RNA, 22 nt, Human
uucuucaaacaaaaguggcaug

SEQ ID NO: 404204 - RNA, 22 nt, Human
gccacaggcacuuaagggcugg

SEQ ID NO: 404205 - RNA, 22 nt, Human
cugaaaauguuacacaggaaga

SEQ ID NO: 404206 - RNA, 22 nt, Human
auuuccaggagaaaggauuuua

SEQ ID NO: 404207 - RNA, 19 nt, Human
acauuuaaauucagaucuc

SEQ ID NO: 404208 - RNA, 22 nt, Human
acauuguuugagaauacagaug

SEQ ID NO: 404209 - RNA, 22 nt, Human
guuaggcaguuuucuucauucu

SEQ ID NO: 404210 - RNA, 22 nt, Human
uagaacuacaagcauuaaaagu

SEQ ID NO: 404211 - RNA, 22 nt, Human
aaacugugaagcaaguacaagg

SEQ ID NO: 404212 - RNA, 22 nt, Human
cuugaaagucacaugcagcccu

SEQ ID NO: 404213 - RNA, 22 nt, Human
uuucauggcuaggacuagagug

SEQ ID NO: 404214 - RNA, 22 nt, Human
aucaggauuauuaaaucuggau

SEQ ID NO: 404215 - RNA, 22 nt, Human
uuaaaaucuaaagcaguugucu

SEQ ID NO: 404216 - RNA, 22 nt, Human
guuauauauaguauuucucuga

SEQ ID NO: 404217 - RNA, 22 nt, Human
cuuguaauuauaauguacuguu

SEQ ID NO: 404218 - RNA, 22 nt, Human
aaugccuucaaguaucugagga

SEQ ID NO: 404219 - RNA, 22 nt, Human
auguucaaacuuuuuacacacc

SEQ ID NO: 404220 - RNA, 22 nt, Human
uuuaggcagucauugaacaagu

SEQ ID NO: 404221 - RNA, 22 nt, Human
ucucacugcaaauauuauguau

SEQ ID NO: 404222 - RNA, 22 nt, Human
ucucaggacuuugggaagcuca

SEQ ID NO: 404223 - RNA, 22 nt, Human
uucaggaucacuaaacccucca

SEQ ID NO: 404224 - RNA, 22 nt, Human
gugcuuucugcugcauuccucu

SEQ ID NO: 404225 - RNA, 22 nt, Human
ucuaaacagccucuuaccaacu

SEQ ID NO: 404226 - RNA, 22 nt, Human
aaauuauucucauguguuucuu

SEQ ID NO: 404227 - RNA, 22 nt, Human
aaaugcuuagagguguucaaau

SEQ ID NO: 404228 - RNA, 22 nt, Human
guuauaaauaccuaauaggauu

SEQ ID NO: 404229 - RNA, 22 nt, Human
uuugaaagggaaauaaacuccu

SEQ ID NO: 404230 - RNA, 22 nt, Human
acuagaaauuacucagaauaaa

SEQ ID NO: 404231 - RNA, 22 nt, Human
auauaauacaaccugcuaagug

SEQ ID NO: 404232 - RNA, 22 nt, Human
ccucacugcuauguguuugcuc

SEQ ID NO: 404233 - RNA, 22 nt, Human
gcucucuuuuuccagugguggu

SEQ ID NO: 404234 - RNA, 20 nt, Human
aggcucagcugagcucuugg

SEQ ID NO: 404235 - RNA, 22 nt, Human
aggaugaauaacugaaauggug

SEQ ID NO: 404236 - RNA, 22 nt, Human
auuauuauauagggaaaguccc

SEQ ID NO: 404237 - RNA, 22 nt, Human
aaucaguguggugacuugucug

SEQ ID NO: 404238 - RNA, 22 nt, Human
ugugugaaggaauauauacuca

SEQ ID NO: 404239 - RNA, 22 nt, Human
uaacauuagguagacauaagcc

SEQ ID NO: 404240 - RNA, 22 nt, Human
ucaggagggugacaggcccugg

SEQ ID NO: 404241 - RNA, 22 nt, Human
gaauuucaagcagugcaauguu

SEQ ID NO: 404242 - RNA, 22 nt, Human
aaucagaauuuguccccugagu

SEQ ID NO: 404243 - RNA, 22 nt, Human
cuucugugcuucacaguugcca

SEQ ID NO: 404244 - RNA, 21 nt, Human
auacagaaggcagacucucuc

SEQ ID NO: 404245 - RNA, 22 nt, Human
caagaucagggugccagaaugg

SEQ ID NO: 404246 - RNA, 22 nt, Human
uucuagaugauaaaccagcagc

SEQ ID NO: 404247 - RNA, 23 nt, Human
ucaggauauugugugccaaggug

SEQ ID NO: 404248 - RNA, 22 nt, Human
cuguuaaucugcuugcaugaug

SEQ ID NO: 404249 - RNA, 22 nt, Human
auuauaaauauuuucuaggggu

SEQ ID NO: 404250 - RNA, 19 nt, Human
caggaugaucccaugacac

SEQ ID NO: 404251 - RNA, 22 nt, Human
aaaguccuugcaguuuccucuu

SEQ ID NO: 404252 - RNA, 23 nt, Human
uuuggacuugugacucuucuccu

SEQ ID NO: 404253 - RNA, 22 nt, Human
auaaagcauacuuuguaugacu

SEQ ID NO: 404254 - RNA, 22 nt, Human
uacugcaugguggaguggagcu

SEQ ID NO: 404255 - RNA, 22 nt, Human
cuucagaauccagaaucagaau

SEQ ID NO: 404256 - RNA, 19 nt, Human
augcuuuauguuauuucuu

SEQ ID NO: 404257 - RNA, 22 nt, Human
gugauuuaguguuaaguauguu

SEQ ID NO: 404258 - RNA, 22 nt, Human
ccauggcucuuaccuuguuaua

SEQ ID NO: 404259 - RNA, 22 nt, Human
aaauagauugcugaggcauuac

SEQ ID NO: 404260 - RNA, 22 nt, Human
cauuuguuaauuacuauuaucu

SEQ ID NO: 404261 - RNA, 22 nt, Human
aacaugaaaagcccagagaggu

SEQ ID NO: 404262 - RNA, 22 nt, Human
ugaugaaacugagguuccaaga

SEQ ID NO: 404263 - RNA, 22 nt, Human
ugucauaacuuagugacaaauc

SEQ ID NO: 404264 - RNA, 22 nt, Human
auucauuuagguauucacuuac

SEQ ID NO: 404265 - RNA, 22 nt, Human
uucauucugggcucuaaggaac

SEQ ID NO: 404266 - RNA, 22 nt, Human
uacagaaaucacaucgcuuuga

SEQ ID NO: 404267 - RNA, 22 nt, Human
ucacagaagaugcuggauguug

SEQ ID NO: 404268 - RNA, 22 nt, Human
aaucagugguucccagcccagg

SEQ ID NO: 404269 - RNA, 22 nt, Human
ucaauacauacaauguauagug

SEQ ID NO: 404270 - RNA, 22 nt, Human
aucuaacacuguaaacugucuu

SEQ ID NO: 404271 - RNA, 22 nt, Human
auucaaguccagcuucucuaca

SEQ ID NO: 404272 - RNA, 22 nt, Human
auugaaagauauacuguucuca

SEQ ID NO: 404273 - RNA, 22 nt, Human
uuugaauagcauaggauuacau

SEQ ID NO: 404274 - RNA, 22 nt, Human
uaaauaugcauguauccuuauc

SEQ ID NO: 404275 - RNA, 22 nt, Human
caaguccucgcuucuagcugug

SEQ ID NO: 404276 - RNA, 22 nt, Human
accagcugcugauugcuaaaug

SEQ ID NO: 404277 - RNA, 22 nt, Human
uuuauccagaaucaggauuuuu

SEQ ID NO: 404278 - RNA, 22 nt, Human
aaauggaucuguggaauacauu

SEQ ID NO: 404279 - RNA, 22 nt, Human
aaaugcuuagagguguucaaau

SEQ ID NO: 404280 - RNA, 22 nt, Human
uucuauacaaagauuucucaca

SEQ ID NO: 404281 - RNA, 22 nt, Human
aucaagaacuuauuuuggaaau

SEQ ID NO: 404282 - RNA, 22 nt, Human
uauuccaacugucauagucaua

SEQ ID NO: 404283 - RNA, 23 nt, Human
augcaagaguuucucaaacugga

SEQ ID NO: 404284 - RNA, 22 nt, Human
uacagaaguaaauaccaaaagc

SEQ ID NO: 404285 - RNA, 23 nt, Human
aauaucaaggugauguucccaga

SEQ ID NO: 404286 - RNA, 22 nt, Human
caaauucaaauuucaucagugu

SEQ ID NO: 404287 - RNA, 22 nt, Human
ugucaccaguuccaggaaauaa

SEQ ID NO: 404288 - RNA, 22 nt, Human
auaugcuugggacugauacagu

SEQ ID NO: 404289 - RNA, 22 nt, Human
cugaaagaauaagauguuuaca

SEQ ID NO: 404290 - RNA, 21 nt, Human
agaauucuuaaguauucuaau

SEQ ID NO: 404291 - RNA, 22 nt, Human
uacaugaaguugucuaaacugg

SEQ ID NO: 404292 - RNA, 22 nt, Human
uacuuugaagacaauaucugga

SEQ ID NO: 404293 - RNA, 22 nt, Human
gugaacuauuggguaucauaaa

SEQ ID NO: 404294 - RNA, 22 nt, Human
ugaucugagagcagaucaccau

SEQ ID NO: 404295 - RNA, 22 nt, Human
uuagaaaucaccucugaagauc

SEQ ID NO: 404296 - RNA, 22 nt, Human
agucuuaauagagaaaaacugu

SEQ ID NO: 404297 - RNA, 22 nt, Human
agaaagcaucuccauuguaggu

SEQ ID NO: 404298 - RNA, 22 nt, Human
uucacagaauggcaaguuaugg

SEQ ID NO: 404299 - RNA, 22 nt, Human
uuauuauugugguugcauuauc

SEQ ID NO: 404300 - RNA, 22 nt, Human
uuacagaacugcccuaguuggc

SEQ ID NO: 404301 - RNA, 22 nt, Human
aaguccuuuaauaucacauagu

SEQ ID NO: 404302 - RNA, 22 nt, Human
aucuaucccaguuuaacucauu

SEQ ID NO: 404303 - RNA, 22 nt, Human
ggcauuaagaauaucauuaaaa

SEQ ID NO: 404304 - RNA, 22 nt, Human
cagagacauucaguaaauuauc

SEQ ID NO: 404305 - RNA, 22 nt, Human
gugaauaacuuucuauguuaau

SEQ ID NO: 404306 - RNA, 22 nt, Human
auacuagacuguucuguuauca

SEQ ID NO: 404307 - RNA, 22 nt, Human
uuucaacauauaccauaaugcc

SEQ ID NO: 404308 - RNA, 22 nt, Human
guccuuaguuacuuuucauguc

SEQ ID NO: 404309 - RNA, 22 nt, Human
augaaacaguguguauagcaaa

SEQ ID NO: 404310 - RNA, 22 nt, Human
uuuaggcauacuuuugggagaa

SEQ ID NO: 404311 - RNA, 17 nt, Human
aaucagauuucugagga

SEQ ID NO: 404312 - RNA, 22 nt, Human
guuccaaauuuggaucuuuagg

SEQ ID NO: 404313 - RNA, 22 nt, Human
uggcauuucuguuagacucuca

SEQ ID NO: 404314 - RNA, 23 nt, Human
uaauacugcuucagaggcuuaga

SEQ ID NO: 404315 - RNA, 22 nt, Human
cauaacaguggcuucagcaagu

SEQ ID NO: 404316 - RNA, 22 nt, Human
uaaacauggauucugaucacag

SEQ ID NO: 404317 - RNA, 22 nt, Human
ugcaggaagacuucccaagcca

SEQ ID NO: 404318 - RNA, 22 nt, Human
aucauaaaccacuuuguaaucu

SEQ ID NO: 404319 - RNA, 22 nt, Human
gcagagacuaguagugcagacu

SEQ ID NO: 404320 - RNA, 22 nt, Human
aauuaaaugacaggggaagaug

SEQ ID NO: 404321 - RNA, 22 nt, Human
uuugaauaaucacugggcauua

SEQ ID NO: 404322 - RNA, 22 nt, Human
uucaaacauucaaauaaaccgg

SEQ ID NO: 404323 - RNA, 22 nt, Human
acaugcuuuaacuuauuuugau

SEQ ID NO: 404324 - RNA, 22 nt, Human
uaagaaucuauuaggaauaugu

SEQ ID NO: 404325 - RNA, 21 nt, Human
cucagagaaaugucugggagc

SEQ ID NO: 404326 - RNA, 22 nt, Human
uccagaauauuugggaaagaug

SEQ ID NO: 404327 - RNA, 22 nt, Human
auucauaaguaaaugauuaccu

SEQ ID NO: 404328 - RNA, 22 nt, Human
aaucagaaucaguugacacagc

SEQ ID NO: 404329 - RNA, 22 nt, Human
auaaaaguucaagagaguacag

SEQ ID NO: 404330 - RNA, 22 nt, Human
aaagcaauggaugagaaucugu

SEQ ID NO: 404331 - RNA, 19 nt, Human
aucugagauuauaaacaga

SEQ ID NO: 404332 - RNA, 22 nt, Human
aguaaacauagaauguucuucc

SEQ ID NO: 404333 - RNA, 23 nt, Human
ggauuuaguggaugagcugagug

SEQ ID NO: 404334 - RNA, 22 nt, Human
uggcauuucaguauuuucauaa

SEQ ID NO: 404335 - RNA, 22 nt, Human
aaagaaucagaagucucaaaca

SEQ ID NO: 404336 - RNA, 22 nt, Human
ugucaccaccggaagaaacugc

SEQ ID NO: 404337 - RNA, 22 nt, Human
agaauaucguagcauauuaucu

SEQ ID NO: 404338 - RNA, 22 nt, Human
aaaugucagaggaacauauuga

SEQ ID NO: 404339 - RNA, 22 nt, Human
acauaauaaaaauaacagcuca

SEQ ID NO: 404340 - RNA, 22 nt, Human
aauuccaggaugcaggaggugc

SEQ ID NO: 404341 - RNA, 21 nt, Human
acaugucuggucauuuuuagc

SEQ ID NO: 404342 - RNA, 22 nt, Human
agaagugagugugacucagcag

SEQ ID NO: 404343 - RNA, 22 nt, Human
auuucaacagaguuugaaggca

SEQ ID NO: 404344 - RNA, 22 nt, Human
uguaagaaucagucuuuaaugu

SEQ ID NO: 404345 - RNA, 22 nt, Human
augugaaaccugugaguagagu

SEQ ID NO: 404346 - RNA, 22 nt, Human
acuggauuccauugugcaaaga

SEQ ID NO: 404347 - RNA, 21 nt, Human
accaaaaccuauacuuucugu

SEQ ID NO: 404348 - RNA, 22 nt, Human
uauaacaggaaguauucaaaca

SEQ ID NO: 404349 - RNA, 22 nt, Human
ucccaguuuuucuccacuaagg

SEQ ID NO: 404350 - RNA, 21 nt, Human
caaucaguuggcauuugagca

SEQ ID NO: 404351 - RNA, 22 nt, Human
uggagaauuuugucaccagaca

SEQ ID NO: 404352 - RNA, 22 nt, Human
gcauggcugguguccugaggga

SEQ ID NO: 404353 - RNA, 20 nt, Human
uacagaaugcaauaaaaugg

SEQ ID NO: 404354 - RNA, 22 nt, Human
aaguccuuggagaauagaaagg

SEQ ID NO: 404355 - RNA, 22 nt, Human
aaucaguguggugacuugucug

SEQ ID NO: 404356 - RNA, 22 nt, Human
auuuaguguauucuaauaugug

SEQ ID NO: 404357 - RNA, 22 nt, Human
uaugaacauguucauugacuua

SEQ ID NO: 404358 - RNA, 22 nt, Human
ucauaauacaaagaguucugca

SEQ ID NO: 404359 - RNA, 22 nt, Human
caacuuuucugugaauuuaagu

SEQ ID NO: 404360 - RNA, 22 nt, Human
aucaaaaccuugacuuuuaaug

SEQ ID NO: 404361 - RNA, 22 nt, Human
ucuuuaauguacuuucuuucac

SEQ ID NO: 404362 - RNA, 22 nt, Human
uuuccaaaaugaaucuaaugca

SEQ ID NO: 404363 - RNA, 22 nt, Human
gaaguucaaaagacagauuuga

SEQ ID NO: 404364 - RNA, 22 nt, Human
caucagaagaaagacaaaugau

SEQ ID NO: 404365 - RNA, 22 nt, Human
uagucaccuuuggcaccugcaa

SEQ ID NO: 404366 - RNA, 22 nt, Human
gacaauacagaaagggacaugc

SEQ ID NO: 404367 - RNA, 22 nt, Human
ccagaauuuggaucaugauuuu

SEQ ID NO: 404368 - RNA, 22 nt, Human
auuauucaaucauauuaaaagu

SEQ ID NO: 404369 - RNA, 22 nt, Human
guaaacauuacugugcuguaua

SEQ ID NO: 404370 - RNA, 22 nt, Human
caguccuuagucuggauggcuu

SEQ ID NO: 404371 - RNA, 22 nt, Human
uggcuuuauaaauccacugguu

SEQ ID NO: 404372 - RNA, 22 nt, Human
ugaaguaacuguccaggaucca

SEQ ID NO: 404373 - RNA, 22 nt, Human
uucaccgugaaccgauuccuca

SEQ ID NO: 404374 - RNA, 22 nt, Human
uuuuugcugauaagcagaauuc

SEQ ID NO: 404375 - RNA, 22 nt, Human
uucauagaucucaauuuugagg

SEQ ID NO: 404376 - RNA, 22 nt, Human
gauuucaaggauguuagaggug

SEQ ID NO: 404377 - RNA, 22 nt, Human
cagucaccuagacagaacuuac

SEQ ID NO: 404378 - RNA, 22 nt, Human
uguccuuacaaggucccuuucg

SEQ ID NO: 404379 - RNA, 22 nt, Human
uucacagaauugucuugacugg

SEQ ID NO: 404380 - RNA, 22 nt, Human
cugaaaggguuacauaguaagu

SEQ ID NO: 404381 - RNA, 22 nt, Human
uuacagaaagguugugggauag

SEQ ID NO: 404382 - RNA, 22 nt, Human
gaauuucaaagagguuaagagg

SEQ ID NO: 404383 - RNA, 22 nt, Human
caggccagggagaauaugaagc

SEQ ID NO: 404384 - RNA, 22 nt, Human
agucaccauuuucaccugccuc

SEQ ID NO: 404385 - RNA, 22 nt, Human
gaguccuuuugugccacaggga

SEQ ID NO: 404386 - RNA, 22 nt, Human
aauuuacacuucauuuggaggg

SEQ ID NO: 404387 - RNA, 22 nt, Human
aauucucagguaaaaguuaagu

SEQ ID NO: 404388 - RNA, 22 nt, Human
augacaaaagaagacaugaggu

SEQ ID NO: 404389 - RNA, 22 nt, Human
aggauuuaggagcuggcuaacg

SEQ ID NO: 404390 - RNA, 22 nt, Human
uuuaggaaugugguuuuugagc

SEQ ID NO: 404391 - RNA, 22 nt, Human
uuuauccaguguuggaauuuuu

SEQ ID NO: 404392 - RNA, 22 nt, Human
uagaauucaagauucaacaggc

SEQ ID NO: 404393 - RNA, 22 nt, Human
auuucaacguuagauguaauag

SEQ ID NO: 404394 - RNA, 22 nt, Human
ucaaaucagcaagcagcuuccc

SEQ ID NO: 404395 - RNA, 22 nt, Human
cugugcagcuggcuuccuggaa

SEQ ID NO: 404396 - RNA, 22 nt, Human
guaaacauuuucaucugugccc

SEQ ID NO: 404397 - RNA, 22 nt, Human
ucuauaaauuaugcagucucag

SEQ ID NO: 404398 - RNA, 22 nt, Human
gauaaaauauguggccuuuagu

SEQ ID NO: 404399 - RNA, 22 nt, Human
ucuggauccuaugcacuggacu

SEQ ID NO: 404400 - RNA, 22 nt, Human
aacauguugcuuuaauaauauu

SEQ ID NO: 404401 - RNA, 22 nt, Human
cagaagucacccucagaauaac

SEQ ID NO: 404402 - RNA, 22 nt, Human
uaauuauaacaguuacaucuua

SEQ ID NO: 404403 - RNA, 22 nt, Human
aaguccuuaggaagcagucguu

SEQ ID NO: 404404 - RNA, 22 nt, Human
cacaauuuccaagucauguuau

SEQ ID NO: 404405 - RNA, 22 nt, Human
cauaagaagguaacauccuuaa

SEQ ID NO: 404406 - RNA, 22 nt, Human
uucagaaaaaacuucaauaagu

SEQ ID NO: 404407 - RNA, 22 nt, Human
uauggcuuuuaacugucguaug

SEQ ID NO: 404408 - RNA, 22 nt, Human
uuuacagaugaggauacugagg

SEQ ID NO: 404409 - RNA, 22 nt, Human
uuacagaaggaacacuacucag

SEQ ID NO: 404410 - RNA, 22 nt, Human
uuagaaauacaagugagguuga

SEQ ID NO: 404411 - RNA, 22 nt, Human
uaaaacuuaacuauccagauua

SEQ ID NO: 404412 - RNA, 22 nt, Human
acauucacuauguccaaacucu

SEQ ID NO: 404413 - RNA, 22 nt, Human
uuaauuaugcaaaaggccccau

SEQ ID NO: 404414 - RNA, 22 nt, Human
uaguccuuuaucaaacauuuau

SEQ ID NO: 404415 - RNA, 22 nt, Human
aauauaugagggagcuauuuga

SEQ ID NO: 404416 - RNA, 19 nt, Human
gcaggaaaugagugauugc

SEQ ID NO: 404417 - RNA, 22 nt, Human
uucacagagaguaugcagagaa

SEQ ID NO: 404418 - RNA, 22 nt, Human
agaaccucuggauacaguuuaa

SEQ ID NO: 404419 - RNA, 22 nt, Human
ggcauuuacauaaucuuauuua

SEQ ID NO: 404420 - RNA, 22 nt, Human
gaaagccaucuggcugcuggga

SEQ ID NO: 404421 - RNA, 22 nt, Human
guuaggcagugugguauagcag

SEQ ID NO: 404422 - RNA, 22 nt, Human
gugauuuaguguuaaguauguu

SEQ ID NO: 404423 - RNA, 22 nt, Human
gauuuucauuugcacucuagaa

SEQ ID NO: 404424 - RNA, 22 nt, Human
aacagugaguugaugacugaau

SEQ ID NO: 404425 - RNA, 22 nt, Human
aauuccagaggaggacaguccu

SEQ ID NO: 404426 - RNA, 22 nt, Human
caaagucagcugccagucccaa

SEQ ID NO: 404427 - RNA, 22 nt, Human
uaaguccuaacagacugggggc

SEQ ID NO: 404428 - RNA, 22 nt, Human
guagaaaugguguguuucuucu

SEQ ID NO: 404429 - RNA, 22 nt, Human
agcaauuuucccuuagucuuug

SEQ ID NO: 404430 - RNA, 22 nt, Human
uaaagcaguguugggucggacg

SEQ ID NO: 404431 - RNA, 17 nt, Human
uaucagaauguguuuac

SEQ ID NO: 404432 - RNA, 20 nt, Human
uggccuuuaaauaguauucc

SEQ ID NO: 404433 - RNA, 22 nt, Human
cuauagaaaauuguaucacacg

SEQ ID NO: 404434 - RNA, 22 nt, Human
acagaauuugcuugggcaaugg

SEQ ID NO: 404435 - RNA, 21 nt, Human
gcuauacagaauggccagagg

SEQ ID NO: 404436 - RNA, 21 nt, Human
auccuuagcacuuagaagagu

SEQ ID NO: 404437 - RNA, 22 nt, Human
ugcuuaauguacgugaguguac

SEQ ID NO: 404438 - RNA, 22 nt, Human
cuuaggcaaccaggucaaugcu

SEQ ID NO: 404439 - RNA, 22 nt, Human
cuauacagagcauccuuaacuu

SEQ ID NO: 404440 - RNA, 22 nt, Human
cauacuuugggauaagagugga

SEQ ID NO: 404441 - RNA, 22 nt, Human
auuaggcagggcaugguggcuc

SEQ ID NO: 404442 - RNA, 22 nt, Human
agauuuacugagaacugauuac

SEQ ID NO: 404443 - RNA, 22 nt, Human
cauagaaacugagacaaggauu

SEQ ID NO: 404444 - RNA, 22 nt, Human
uuucuagugguuaagauuuaca

SEQ ID NO: 404445 - RNA, 22 nt, Human
augaauaaguaaacuccuuugg

SEQ ID NO: 404446 - RNA, 22 nt, Human
uucauacucacuccaauaacug

SEQ ID NO: 404447 - RNA, 22 nt, Human
ucaaacauguuagcagucugug

SEQ ID NO: 404448 - RNA, 22 nt, Human
acaaaauuguguuaaacuuuau

SEQ ID NO: 404449 - RNA, 22 nt, Human
agcauauaaauggacauauuug

SEQ ID NO: 404450 - RNA, 22 nt, Human
auuaaauguuggacguauacau

SEQ ID NO: 404451 - RNA, 22 nt, Human
uaauuucacugauaugaaguca

SEQ ID NO: 404452 - RNA, 22 nt, Human
uuacagaauguucuuccaacag

SEQ ID NO: 404453 - RNA, 22 nt, Human
augcuuaacucuguacauaguu

SEQ ID NO: 404454 - RNA, 22 nt, Human
agauuucacaugcugcucuauu

SEQ ID NO: 404455 - RNA, 22 nt, Human
aaucagaaagaucuugaugaga

SEQ ID NO: 404456 - RNA, 22 nt, Human
gauuuacaaagcucucuagugu

SEQ ID NO: 404457 - RNA, 22 nt, Human
augaaaacggaccagagcuauu

SEQ ID NO: 404458 - RNA, 22 nt, Human
uguggaaagucaaguuccagga

SEQ ID NO: 404459 - RNA, 22 nt, Human
uaaaauguuugcaagagaccag

SEQ ID NO: 404460 - RNA, 22 nt, Human
aguauaauuagauaucaaaagu

SEQ ID NO: 404461 - RNA, 22 nt, Human
auauaggcuaacaacuauugag

SEQ ID NO: 404462 - RNA, 22 nt, Human
aagaaugauuacaaagcaacga

SEQ ID NO: 404463 - RNA, 22 nt, Human
uauuccaaaauaguuaagcacu

SEQ ID NO: 404464 - RNA, 22 nt, Human
ugguuuaaccugucucuuauua

SEQ ID NO: 404465 - RNA, 22 nt, Human
ccuggaucccgauggcugugag

SEQ ID NO: 404466 - RNA, 21 nt, Human
agccagucuguuuucuagugc

SEQ ID NO: 404467 - RNA, 22 nt, Human
auggcuuuucacagaggguucu

SEQ ID NO: 404468 - RNA, 22 nt, Human
acuucacacagcaaauuuaucu

SEQ ID NO: 404469 - RNA, 22 nt, Human
auucuacaacccaauaauaauu

SEQ ID NO: 404470 - RNA, 15 nt, Human
aaucagaaguguggc

SEQ ID NO: 404471 - RNA, 22 nt, Human
uucaagacugcgacuaaugccc

SEQ ID NO: 404472 - RNA, 22 nt, Human
aacauguaaccagcauucaucu

SEQ ID NO: 404473 - RNA, 22 nt, Human
ugcaacuuguuuggagagaaag

SEQ ID NO: 404474 - RNA, 22 nt, Human
uuucaacuugaagaauugauac

SEQ ID NO: 404475 - RNA, 22 nt, Human
aaacauguaauucugcuuaaga

SEQ ID NO: 404476 - RNA, 22 nt, Human
uacugaaauacuaagaaguuaa

SEQ ID NO: 404477 - RNA, 20 nt, Human
gaaguccuuucacucuuccc

SEQ ID NO: 404478 - RNA, 22 nt, Human
auacaucaugcuccauauauuu

SEQ ID NO: 404479 - RNA, 22 nt, Human
auaggcuuauauaaaaacaucu

SEQ ID NO: 404480 - RNA, 22 nt, Human
acaugcuuguuuuucacaaccu

SEQ ID NO: 404481 - RNA, 22 nt, Human
ucauaaaaguacucauguucau

SEQ ID NO: 404482 - RNA, 22 nt, Human
aauaauuuccagccaacuggaa

SEQ ID NO: 404483 - RNA, 22 nt, Human
augcuuuaaaugucuuuugcuu

SEQ ID NO: 404484 - RNA, 22 nt, Human
ccauggcuuuugagucucaaga

SEQ ID NO: 404485 - RNA, 22 nt, Human
cauaagaauauuccauccuuug

SEQ ID NO: 404486 - RNA, 22 nt, Human
aaauucaauuaacuuucaugcu

SEQ ID NO: 404487 - RNA, 22 nt, Human
uauggaaauaauuagacaagug

SEQ ID NO: 404488 - RNA, 22 nt, Human
aagcauuuuagauaaagcauca

SEQ ID NO: 404489 - RNA, 19 nt, Human
acagaaauuaguuauuuuc

SEQ ID NO: 404490 - RNA, 22 nt, Human
uuccacaauguaugaauaagau

SEQ ID NO: 404491 - RNA, 22 nt, Human
uuccuuagccugccuuccaggg

SEQ ID NO: 404492 - RNA, 22 nt, Human
cauggcuuuuuagcauauucaa

SEQ ID NO: 404493 - RNA, 22 nt, Human
ucagccaguugccccaguuagu

SEQ ID NO: 404494 - RNA, 22 nt, Human
gaguccuuaauacacuggugga

SEQ ID NO: 404495 - RNA, 22 nt, Human
cuacagaaggagaaauggguaa

SEQ ID NO: 404496 - RNA, 22 nt, Human
auguacaaaauguuuugaaaug

SEQ ID NO: 404497 - RNA, 22 nt, Human
aaauugcagaugcuaaaugacu

SEQ ID NO: 404498 - RNA, 21 nt, Human
auucagaguaauucaucuuua

SEQ ID NO: 404499 - RNA, 22 nt, Human
aaagccuuugucucaggcucug

SEQ ID NO: 404500 - RNA, 22 nt, Human
aaagaaucuauauaucaccacc

SEQ ID NO: 404501 - RNA, 22 nt, Human
cagaauuuuucgaauguacugu

SEQ ID NO: 404502 - RNA, 22 nt, Human
caucagaaccagcugggugagg

SEQ ID NO: 404503 - RNA, 22 nt, Human
ugugugaaggaauauauacuca

SEQ ID NO: 404504 - RNA, 22 nt, Human
augaaaauugacagcggaagua

SEQ ID NO: 404505 - RNA, 22 nt, Human
aauaagauccugaagauauguu

SEQ ID NO: 404506 - RNA, 22 nt, Human
cagaucuguaguaaaagaucuc

SEQ ID NO: 404507 - RNA, 22 nt, Human
uccagaauacucugaaaucauu

SEQ ID NO: 404508 - RNA, 22 nt, Human
ucacacauucuagguauguuga

SEQ ID NO: 404509 - RNA, 22 nt, Human
augguuuacugaucuuuuuggu

SEQ ID NO: 404510 - RNA, 22 nt, Human
aauuucaaacucuugcccucag

SEQ ID NO: 404511 - RNA, 22 nt, Human
caacuuucuguuaaauguuagu

SEQ ID NO: 404512 - RNA, 22 nt, Human
cuuuaacaaaugacucuugucu

SEQ ID NO: 404513 - RNA, 22 nt, Human
auaaagcaucuagucugucacu

SEQ ID NO: 404514 - RNA, 20 nt, Human
uguuccaagcuaaugaauga

SEQ ID NO: 404515 - RNA, 22 nt, Human
cuagaaauacaggcacgugcca

SEQ ID NO: 404516 - RNA, 22 nt, Human
auaaaugccucagaaucauccc

SEQ ID NO: 404517 - RNA, 22 nt, Human
auggaucagaaucccgggaggg

SEQ ID NO: 404518 - RNA, 22 nt, Human
aucagaaauagucauguuacuu

SEQ ID NO: 404519 - RNA, 22 nt, Human
ccaaagcaagucacaugaucaa

SEQ ID NO: 404520 - RNA, 22 nt, Human
agaaucugguagaaccaaggau

SEQ ID NO: 404521 - RNA, 22 nt, Human
auacagaaaaguggauagccag

SEQ ID NO: 404522 - RNA, 22 nt, Human
ucagaacauugacauucuuauu

SEQ ID NO: 404523 - RNA, 22 nt, Human
aguacaauuuaaugaagauagc

SEQ ID NO: 404524 - RNA, 22 nt, Human
uucucuuagcuguaaagucaau

SEQ ID NO: 404525 - RNA, 22 nt, Human
uuaacacuaucugucauaauua

SEQ ID NO: 404526 - RNA, 22 nt, Human
cuggcuuuggucaugugaucau

SEQ ID NO: 404527 - RNA, 22 nt, Human
gcagaauucuacagaugauaaa

SEQ ID NO: 404528 - RNA, 21 nt, Human
aaaguguucagaccaguucug

SEQ ID NO: 404529 - RNA, 22 nt, Human
acauaauagguaccugaauaau

SEQ ID NO: 404530 - RNA, 22 nt, Human
acaacaaaaucacuagucuucc

SEQ ID NO: 404531 - RNA, 22 nt, Human
auuuaguuuaggaaaaguaggu

SEQ ID NO: 404532 - RNA, 22 nt, Human
augugaaauagcuggauaugaa

SEQ ID NO: 404533 - RNA, 22 nt, Human
gauggcuucacuuacauggcug

SEQ ID NO: 404534 - RNA, 22 nt, Human
caguccuucauuccuccuuuga

SEQ ID NO: 404535 - RNA, 22 nt, Human
cugaauaauuuucuguuguaug

SEQ ID NO: 404536 - RNA, 22 nt, Human
ugcagagaagaggacaguucua

SEQ ID NO: 404537 - RNA, 22 nt, Human
aggaaaaauaaggcagcagggc

SEQ ID NO: 404538 - RNA, 22 nt, Human
aaucaugugggauagucugcuc

SEQ ID NO: 404539 - RNA, 22 nt, Human
caagaaucagaccugucagggu

SEQ ID NO: 404540 - RNA, 22 nt, Human
caaaagucuguccuuuaacuuc

SEQ ID NO: 404541 - RNA, 22 nt, Human
uuugaacaugcugcaugauaau

SEQ ID NO: 404542 - RNA, 18 nt, Human
aaaaagugcucaggccua

SEQ ID NO: 404543 - RNA, 21 nt, Human
acuuuaauauacaugaggagg

SEQ ID NO: 404544 - RNA, 22 nt, Human
uuucaucucucuaaaagacagu

SEQ ID NO: 404545 - RNA, 22 nt, Human
aauuccagcuaggaaaagcuuc

SEQ ID NO: 404546 - RNA, 22 nt, Human
gaguccuuggcaucaucaguac

SEQ ID NO: 404547 - RNA, 21 nt, Human
uccaaaaaggagcguccuucu

SEQ ID NO: 404548 - RNA, 22 nt, Human
uggcauuugggcuggcuuuucu

SEQ ID NO: 404549 - RNA, 22 nt, Human
cuuaaagaaauugaggagagga

SEQ ID NO: 404550 - RNA, 22 nt, Human
auauacugaggagacuuuauau

SEQ ID NO: 404551 - RNA, 22 nt, Human
uuaauaaaguaugaauuggaaa

SEQ ID NO: 404552 - RNA, 22 nt, Human
cuauuacauuucuggacauuca

SEQ ID NO: 404553 - RNA, 22 nt, Human
guacagaaauggggccccaggu

SEQ ID NO: 404554 - RNA, 22 nt, Human
gauagaaagaauauagauucca

SEQ ID NO: 404555 - RNA, 22 nt, Human
guuuaaucagaggaauuauaga

SEQ ID NO: 404556 - RNA, 22 nt, Human
aaagucaucagaaccuuccaga

SEQ ID NO: 404557 - RNA, 22 nt, Human
uguaaauaaugcauguaaauca

SEQ ID NO: 404558 - RNA, 22 nt, Human
caccagacagguguaugcauau

SEQ ID NO: 404559 - RNA, 22 nt, Human
agucaccaggguuugcuggguu

SEQ ID NO: 404560 - RNA, 22 nt, Human
uuucauugaacuaaagaaucug

SEQ ID NO: 404561 - RNA, 22 nt, Human
uccaaaguguugggauuauagg

SEQ ID NO: 404562 - RNA, 22 nt, Human
uauaagaaauugccaaccuguu

SEQ ID NO: 404563 - RNA, 19 nt, Human
uuccuuagaggaggcggug

SEQ ID NO: 404564 - RNA, 22 nt, Human
ugugugaauggauuauucuauu

SEQ ID NO: 404565 - RNA, 22 nt, Human
aaaugucagaagcuuuacuucu

SEQ ID NO: 404566 - RNA, 22 nt, Human
uggauuuaccacagggccacag

SEQ ID NO: 404567 - RNA, 18 nt, Human
gcacuucacccagcuagu

SEQ ID NO: 404568 - RNA, 22 nt, Human
ucagaaaauaacuguuaguuug

SEQ ID NO: 404569 - RNA, 22 nt, Human
uuaugaaggaucagguacuugg

SEQ ID NO: 404570 - RNA, 23 nt, Human
uuaaaggcagauguugaguauua

SEQ ID NO: 404571 - RNA, 22 nt, Human
agaaccucaauuauuuuugcac

SEQ ID NO: 404572 - RNA, 22 nt, Human
uauuaaagggaaguuaugcaug

SEQ ID NO: 404573 - RNA, 22 nt, Human
uaaauaucaccuggaauuguua

SEQ ID NO: 404574 - RNA, 22 nt, Human
augguuuuagaaucaggaaaaa

SEQ ID NO: 404575 - RNA, 22 nt, Human
uaggcagaauuguugaaugaag

SEQ ID NO: 404576 - RNA, 19 nt, Human
uggcauuuggaggcaaccu

SEQ ID NO: 404577 - RNA, 22 nt, Human
caaucaguuucuguuguauaau

SEQ ID NO: 404578 - RNA, 22 nt, Human
aucagaaauugcccagcuguuu

SEQ ID NO: 404579 - RNA, 22 nt, Human
auuccaaagcacaucagaacua

SEQ ID NO: 404580 - RNA, 22 nt, Human
guauuugcaaaucuaaaagaga

SEQ ID NO: 404581 - RNA, 22 nt, Human
cguauacaugaagacauugcug

SEQ ID NO: 404582 - RNA, 22 nt, Human
uaaagucaucuuuaaacaugcc

SEQ ID NO: 404583 - RNA, 21 nt, Human
auacagaaggcagacucucuc

SEQ ID NO: 404584 - RNA, 22 nt, Human
gaaguccuccuaucuugcucuu

SEQ ID NO: 404585 - RNA, 22 nt, Human
ucauaaagcauuucagcuuuug

SEQ ID NO: 404586 - RNA, 22 nt, Human
uuuccaaaggaguaccacgcau

SEQ ID NO: 404587 - RNA, 22 nt, Human
auauuaaauggauuuugggagc

SEQ ID NO: 404588 - RNA, 22 nt, Human
uucuaacaaguggcuuguuagu

SEQ ID NO: 404589 - RNA, 22 nt, Human
aaagcagguugcaauuacagug

SEQ ID NO: 404590 - RNA, 22 nt, Human
uuacagaacugucuugaaauuu

SEQ ID NO: 404591 - RNA, 22 nt, Human
gugaauaauauuguuuauaaaa

SEQ ID NO: 404592 - RNA, 22 nt, Human
guacagaaaugugaugacgcaa

SEQ ID NO: 404593 - RNA, 22 nt, Human
ucuaaacaguuucacucuuaau

SEQ ID NO: 404594 - RNA, 22 nt, Human
acagguuuuuguggauauaugu

SEQ ID NO: 404595 - RNA, 22 nt, Human
cuguuaauugugaauuuuacau

SEQ ID NO: 404596 - RNA, 22 nt, Human
acagcauugagagcuaaauuua

SEQ ID NO: 404597 - RNA, 18 nt, Human
aacaguuuccagauucuc

SEQ ID NO: 404598 - RNA, 18 nt, Human
uauaaacacacuuagguu

SEQ ID NO: 404599 - RNA, 22 nt, Human
aguccuuaugagaugcugccuu

SEQ ID NO: 404600 - RNA, 22 nt, Human
auaugaaaguaagcaugugugu

SEQ ID NO: 404601 - RNA, 22 nt, Human
guuauaaauaccuaauaggauu

SEQ ID NO: 404602 - RNA, 22 nt, Human
ugguuuuagaugccuuuacugc

SEQ ID NO: 404603 - RNA, 22 nt, Human
caaguccaucagauaagcaaga

SEQ ID NO: 404604 - RNA, 23 nt, Human
auauggcuguuguguguuaacau

SEQ ID NO: 404605 - RNA, 22 nt, Human
guuaggcagcccaagaugucag

SEQ ID NO: 404606 - RNA, 22 nt, Human
ucuauacaugugcacacacauc

SEQ ID NO: 404607 - RNA, 22 nt, Human
ugucaccaaguugaugaaugca

SEQ ID NO: 404608 - RNA, 22 nt, Human
auuccaaacagugcugcagacu

SEQ ID NO: 404609 - RNA, 22 nt, Human
agaauaaucacugaaguucaaa

SEQ ID NO: 404610 - RNA, 22 nt, Human
auuccaaagacagaagcagcug

SEQ ID NO: 404611 - RNA, 22 nt, Human
uuauaacaacaguuuacuuuaa

SEQ ID NO: 404612 - RNA, 22 nt, Human
ucuauacaaguuucacuuugac

SEQ ID NO: 404613 - RNA, 22 nt, Human
uuuaggcaagaacucacugaga

SEQ ID NO: 404614 - RNA, 22 nt, Human
uuuauuaugauggacaccuucg

SEQ ID NO: 404615 - RNA, 22 nt, Human
gaaguccucaaugcauugucuu

SEQ ID NO: 404616 - RNA, 22 nt, Human
gaugaaaaaagacgagcauaua

SEQ ID NO: 404617 - RNA, 22 nt, Human
uguacaaucugaugauguaugg

SEQ ID NO: 404618 - RNA, 22 nt, Human
caaguccuaggucugauugaac

SEQ ID NO: 404619 - RNA, 22 nt, Human
auggcauuccaagucuucuuuu

SEQ ID NO: 404620 - RNA, 22 nt, Human
caucagaagauggcucuggaaa

SEQ ID NO: 404621 - RNA, 22 nt, Human
uuccuuagcagaccugguaucc

SEQ ID NO: 404622 - RNA, 22 nt, Human
cuggauuugccuauggugcuuu

SEQ ID NO: 404623 - RNA, 22 nt, Human
uacugugacagaguacuuaaac

SEQ ID NO: 404624 - RNA, 22 nt, Human
aagcagggcuuuaagcgguuuu

SEQ ID NO: 404625 - RNA, 22 nt, Human
aguccuuacucgggggcccaga

SEQ ID NO: 404626 - RNA, 22 nt, Human
caaguccuccaugugacuaggu

SEQ ID NO: 404627 - RNA, 22 nt, Human
uaaagacaauaggaaaguuguu

SEQ ID NO: 404628 - RNA, 22 nt, Human
aaauagauugcugaggcauuac

SEQ ID NO: 404629 - RNA, 22 nt, Human
cuacagaagaaacuaucacuau

SEQ ID NO: 404630 - RNA, 22 nt, Human
caaauuccucagaaucagaaaa

SEQ ID NO: 404631 - RNA, 22 nt, Human
ugcuuaauagugcacugguuuc

SEQ ID NO: 404632 - RNA, 22 nt, Human
aacacuuucuauuauuaugguu

SEQ ID NO: 404633 - RNA, 22 nt, Human
cagagauuauuauaacuaauua

SEQ ID NO: 404634 - RNA, 22 nt, Human
uacagaaaaacuggcauugaag

SEQ ID NO: 404635 - RNA, 22 nt, Human
acuagaaacuaauggauuauua

SEQ ID NO: 404636 - RNA, 22 nt, Human
guacagaaugcuugguaaggca

SEQ ID NO: 404637 - RNA, 22 nt, Human
uaacagaaauaguaggugaggg

SEQ ID NO: 404638 - RNA, 22 nt, Human
gauuucaaccuaacaguaugac

SEQ ID NO: 404639 - RNA, 22 nt, Human
caacuuuaugauugguuuguca

SEQ ID NO: 404640 - RNA, 20 nt, Human
cuguaucagguuacaaagua

SEQ ID NO: 404641 - RNA, 22 nt, Human
ccuggaucgaugccgagggaaa

SEQ ID NO: 404642 - RNA, 22 nt, Human
aaaugcauggcuguuuuaaagc

SEQ ID NO: 404643 - RNA, 22 nt, Human
cuuauacacccucuucccaggc

SEQ ID NO: 404644 - RNA, 22 nt, Human
ugcagagaaaccaguggaggac

SEQ ID NO: 404645 - RNA, 22 nt, Human
uacaauacuuaaccuauuuugc

SEQ ID NO: 404646 - RNA, 22 nt, Human
uuacagauggaucuagcaaaau

SEQ ID NO: 404647 - RNA, 22 nt, Human
acaacuuugacccuuguucuua

SEQ ID NO: 404648 - RNA, 22 nt, Human
aaucagugguucccagcccagg

SEQ ID NO: 404649 - RNA, 22 nt, Human
uuggagagaggcugcucaggcu

SEQ ID NO: 404650 - RNA, 22 nt, Human
uuagaaauauggugcugccgcc

SEQ ID NO: 404651 - RNA, 22 nt, Human
ucagagaaauaauugcugaguu

SEQ ID NO: 404652 - RNA, 20 nt, Human
aaucagaaagugugagcucu

SEQ ID NO: 404653 - RNA, 22 nt, Human
uuaguacugauagggucaauca

SEQ ID NO: 404654 - RNA, 22 nt, Human
agacaacaucacuaaagcugag

SEQ ID NO: 404655 - RNA, 23 nt, Human
cauaaaauauuaguaugguagca

SEQ ID NO: 404656 - RNA, 22 nt, Human
aaagcaaugcuuguggaaugua

SEQ ID NO: 404657 - RNA, 22 nt, Human
uaaagccacgcuggaaaucagg

SEQ ID NO: 404658 - RNA, 22 nt, Human
aguguuuaccccaaucaguuua

SEQ ID NO: 404659 - RNA, 22 nt, Human
aucagaaaggugggcaagcaga

SEQ ID NO: 404660 - RNA, 22 nt, Human
aauuccaaguagcaucccauca

SEQ ID NO: 404661 - RNA, 22 nt, Human
uuuacagaaugucaauuucuau

SEQ ID NO: 404662 - RNA, 21 nt, Human
cuacagaagcucuccuaucca

SEQ ID NO: 404663 - RNA, 22 nt, Human
aaguccaugaucaagauguggc

SEQ ID NO: 404664 - RNA, 22 nt, Human
aagucauagucgggaaagacau

SEQ ID NO: 404665 - RNA, 22 nt, Human
acaucugaccauuacaagacau

SEQ ID NO: 404666 - RNA, 22 nt, Human
caaagcaccacaaaccagguga

SEQ ID NO: 404667 - RNA, 20 nt, Human
aacaguaccauuuaucucag

SEQ ID NO: 404668 - RNA, 22 nt, Human
aauguucaaacagaucacuuag

SEQ ID NO: 404669 - RNA, 19 nt, Human
uauuucaaagugccgucua

SEQ ID NO: 404670 - RNA, 22 nt, Human
uaaguccuaauggcagaagucu

SEQ ID NO: 404671 - RNA, 22 nt, Human
agcacaauagagcaguuaaaaa

SEQ ID NO: 404672 - RNA, 22 nt, Human
uacagacaguuuuucagauauu

SEQ ID NO: 404673 - RNA, 22 nt, Human
cuggaucaugggaaagggauca

SEQ ID NO: 404674 - RNA, 22 nt, Human
uggguuuaaacucaacucuaaa

SEQ ID NO: 404675 - RNA, 22 nt, Human
auagaaauguauuuuggacuag

SEQ ID NO: 404676 - RNA, 22 nt, Human
uuuacagaugaggaaacugaga

SEQ ID NO: 404677 - RNA, 22 nt, Human
aaacaaacauagguuugaaagu

SEQ ID NO: 404678 - RNA, 22 nt, Human
uggauuuauuagguuggugaaa

SEQ ID NO: 404679 - RNA, 22 nt, Human
cauuucaaaagaauugccagaa

SEQ ID NO: 404680 - RNA, 22 nt, Human
guagaaauguaaccaggagaua

SEQ ID NO: 404681 - RNA, 22 nt, Human
guuaauauuuaccugucaagaa

SEQ ID NO: 404682 - RNA, 22 nt, Human
aaaaccuucagguuuggaguuu

SEQ ID NO: 404683 - RNA, 22 nt, Human
ucauaaaguuaucaccaaaucc

SEQ ID NO: 404684 - RNA, 22 nt, Human
aaauccuuuggaggacaugaug

SEQ ID NO: 404685 - RNA, 19 nt, Human
gaaguccucuaguaaauuu

SEQ ID NO: 404686 - RNA, 22 nt, Human
gaaguccugguccucucauuca

SEQ ID NO: 404687 - RNA, 22 nt, Human
gucaacuuuaagaugaucuuuu

SEQ ID NO: 404688 - RNA, 22 nt, Human
agaauuccucuaggaucugccc

SEQ ID NO: 404689 - RNA, 22 nt, Human
aaaucaguaaauguucauuaac

SEQ ID NO: 404690 - RNA, 22 nt, Human
acagccaggaggaacucaguga

SEQ ID NO: 404691 - RNA, 22 nt, Human
gucuaacaagcauuaggaaccc

SEQ ID NO: 404692 - RNA, 22 nt, Human
aaauugcaaaaguacuuuuagg

SEQ ID NO: 404693 - RNA, 21 nt, Human
auggauuuaaacaggccacaa

SEQ ID NO: 404694 - RNA, 19 nt, Human
cauguuaugcuguaguauc

SEQ ID NO: 404695 - RNA, 22 nt, Human
cauuuacagugagaguuuuuac

SEQ ID NO: 404696 - RNA, 22 nt, Human
ugaaauaggaaacagauguuuc

SEQ ID NO: 404697 - RNA, 22 nt, Human
caggaaacauaugugcuugagg

SEQ ID NO: 404698 - RNA, 22 nt, Human
gcuauacagcaggagaauggaa

SEQ ID NO: 404699 - RNA, 22 nt, Human
ucagccaguuuguuuauuccgg

SEQ ID NO: 404700 - RNA, 22 nt, Human
uucaacacaggaacaugauaua

SEQ ID NO: 404701 - RNA, 22 nt, Human
uuuauuauguacaggcacuaua

SEQ ID NO: 404702 - RNA, 22 nt, Human
caauuucaucuugugcuucaau

SEQ ID NO: 404703 - RNA, 22 nt, Human
uguucagcccucuauuaaucag

SEQ ID NO: 404704 - RNA, 22 nt, Human
auguuaaaugguuuauuauuaa

SEQ ID NO: 404705 - RNA, 22 nt, Human
caaguccucugguuucaaauag

SEQ ID NO: 404706 - RNA, 22 nt, Human
augaaaauacugugguugauag

SEQ ID NO: 404707 - RNA, 22 nt, Human
ucaauaaauagcuuggcucagc

SEQ ID NO: 404708 - RNA, 22 nt, Human
agguauuauuagcaucucuauu

SEQ ID NO: 404709 - RNA, 22 nt, Human
uaaguaaauuuauaaugugauu

SEQ ID NO: 404710 - RNA, 22 nt, Human
uccauacauugaaauaccauuc

SEQ ID NO: 404711 - RNA, 22 nt, Human
ggcauuuagauugaauuucugu

SEQ ID NO: 404712 - RNA, 22 nt, Human
gaguccuuuucucuguccacug

SEQ ID NO: 404713 - RNA, 22 nt, Human
caguccuuggcaaguucucagu

SEQ ID NO: 404714 - RNA, 22 nt, Human
uuauauaaagauaacuuuucuu

SEQ ID NO: 404715 - RNA, 22 nt, Human
aaucuuuaaggacucagucucu

SEQ ID NO: 404716 - RNA, 22 nt, Human
uaucuaaauggaauauuccaga

SEQ ID NO: 404717 - RNA, 22 nt, Human
uaguacaguuuaaauauuaaua

SEQ ID NO: 404718 - RNA, 22 nt, Human
gaguccuugacacauaguaggu

SEQ ID NO: 404719 - RNA, 22 nt, Human
uauggcuuuaaacaacuuaggu

SEQ ID NO: 404720 - RNA, 22 nt, Human
ccuggaucuuucugacugacaa

SEQ ID NO: 404721 - RNA, 22 nt, Human
ucauaaaaugcuccugauauug

SEQ ID NO: 404722 - RNA, 22 nt, Human
augaaauauuucagagcagagu

SEQ ID NO: 404723 - RNA, 22 nt, Human
ucagccagcaucagcuaagugc

SEQ ID NO: 404724 - RNA, 22 nt, Human
uuggaucacucugaagccuuac

SEQ ID NO: 404725 - RNA, 22 nt, Human
agccauucauugugcucucaga

SEQ ID NO: 404726 - RNA, 18 nt, Human
aauuuccauaugaauugc

SEQ ID NO: 404727 - RNA, 17 nt, Human
ugaaaucagcacccagg

SEQ ID NO: 404728 - RNA, 22 nt, Human
cagucaccuugaggacucagac

SEQ ID NO: 404729 - RNA, 22 nt, Human
uuauuccauucaguucaacaag

SEQ ID NO: 404730 - RNA, 22 nt, Human
uagaugcuguagaaauacuuau

SEQ ID NO: 404731 - RNA, 22 nt, Human
uuccuuagacagagguggucau

SEQ ID NO: 404732 - RNA, 20 nt, Human
uauggcuuggcaaagcuuca

SEQ ID NO: 404733 - RNA, 22 nt, Human
gcaaacaagcugccugaagauu

SEQ ID NO: 404734 - RNA, 22 nt, Human
uguacaaucuuggucccuuuau
